United States Patent Application Publication US 2015/0141320 A1 - sequence listing, part 14

SEQ ID NO: 379987 - DNA, 15 bp, Homo sapiens
aaggggaagtttgga

SEQ ID NO: 379988 - DNA, 15 bp, Homo sapiens
gaaggggaagtttgg

SEQ ID NO: 379989 - DNA, 15 bp, Homo sapiens
ggaaggggaagtttg

SEQ ID NO: 379990 - DNA, 15 bp, Homo sapiens
aggaaggggaagttt

SEQ ID NO: 379991 - DNA, 15 bp, Homo sapiens
gaggaaggggaagtt

SEQ ID NO: 379992 - DNA, 15 bp, Homo sapiens
agaggaaggggaagt

SEQ ID NO: 379993 - DNA, 15 bp, Homo sapiens
aagaggaaggggaag

SEQ ID NO: 379994 - DNA, 15 bp, Homo sapiens
aaagaggaaggggaa

SEQ ID NO: 379995 - DNA, 15 bp, Homo sapiens
gaaagaggaagggga

SEQ ID NO: 379996 - DNA, 15 bp, Homo sapiens
tgaaagaggaagggg

SEQ ID NO: 379997 - DNA, 15 bp, Homo sapiens
ctgaaagaggaaggg

SEQ ID NO: 379998 - DNA, 15 bp, Homo sapiens
actgaaagaggaagg

SEQ ID NO: 379999 - DNA, 15 bp, Homo sapiens
tactgaaagaggaag

SEQ ID NO: 380000 - DNA, 15 bp, Homo sapiens
ctactgaaagaggaa

SEQ ID NO: 380001 - DNA, 15 bp, Homo sapiens
tctactgaaagagga

SEQ ID NO: 380002 - DNA, 15 bp, Homo sapiens
ttctactgaaagagg

SEQ ID NO: 380003 - DNA, 15 bp, Homo sapiens
gttctactgaaagag

SEQ ID NO: 380004 - DNA, 15 bp, Homo sapiens
tgttctactgaaaga

SEQ ID NO: 380005 - DNA, 15 bp, Homo sapiens
atgttctactgaaag

SEQ ID NO: 380006 - DNA, 15 bp, Homo sapiens
gatgttctactgaaa

SEQ ID NO: 380007 - DNA, 15 bp, Homo sapiens
agatgttctactgaa

SEQ ID NO: 380008 - DNA, 15 bp, Homo sapiens
cagatgttctactga

SEQ ID NO: 380009 - DNA, 15 bp, Homo sapiens
gcagatgttctactg

SEQ ID NO: 380010 - DNA, 15 bp, Homo sapiens
agcagatgttctact

SEQ ID NO: 380011 - DNA, 15 bp, Homo sapiens
aagcagatgttctac

SEQ ID NO: 380012 - DNA, 15 bp, Homo sapiens
taagcagatgttcta

SEQ ID NO: 380013 - DNA, 15 bp, Homo sapiens
gtaagcagatgttct

SEQ ID NO: 380014 - DNA, 15 bp, Homo sapiens
agtaagcagatgttc

SEQ ID NO: 380015 - DNA, 15 bp, Homo sapiens
aagtaagcagatgtt

SEQ ID NO: 380016 - DNA, 15 bp, Homo sapiens
taagtaagcagatgt

SEQ ID NO: 380017 - DNA, 15 bp, Homo sapiens
ctaagtaagcagatg

SEQ ID NO: 380018 - DNA, 15 bp, Homo sapiens
cctaagtaagcagat

SEQ ID NO: 380019 - DNA, 15 bp, Homo sapiens
tcctaagtaagcaga

SEQ ID NO: 380020 - DNA, 15 bp, Homo sapiens
ttcctaagtaagcag

SEQ ID NO: 380021 - DNA, 15 bp, Homo sapiens
cttcctaagtaagca

SEQ ID NO: 380022 - DNA, 15 bp, Homo sapiens
acttcctaagtaagc

SEQ ID NO: 380023 - DNA, 15 bp, Homo sapiens
tacttcctaagtaag

SEQ ID NO: 380024 - DNA, 15 bp, Homo sapiens
ctacttcctaagtaa

SEQ ID NO: 380025 - DNA, 15 bp, Homo sapiens
cctacttcctaagta

SEQ ID NO: 380026 - DNA, 15 bp, Homo sapiens
gcctacttcctaagt

SEQ ID NO: 380027 - DNA, 15 bp, Homo sapiens
tgcctacttcctaag

SEQ ID NO: 380028 - DNA, 15 bp, Homo sapiens
atgcctacttcctaa

SEQ ID NO: 380029 - DNA, 15 bp, Homo sapiens
tatgcctacttccta

SEQ ID NO: 380030 - DNA, 15 bp, Homo sapiens
gtatgcctacttcct

SEQ ID NO: 380031 - DNA, 15 bp, Homo sapiens
tgtatgcctacttcc

SEQ ID NO: 380032 - DNA, 15 bp, Homo sapiens
ttgtatgcctacttc

SEQ ID NO: 380033 - DNA, 15 bp, Homo sapiens
cttgtatgcctactt

SEQ ID NO: 380034 - DNA, 15 bp, Homo sapiens
acttgtatgcctact

SEQ ID NO: 380035 - DNA, 15 bp, Homo sapiens
aacttgtatgcctac

SEQ ID NO: 380036 - DNA, 15 bp, Homo sapiens
aaacttgtatgccta

SEQ ID NO: 380037 - DNA, 15 bp, Homo sapiens
gaaacttgtatgcct

SEQ ID NO: 380038 - DNA, 15 bp, Homo sapiens
agaaacttgtatgcc

SEQ ID NO: 380039 - DNA, 15 bp, Homo sapiens
aagaaacttgtatgc

SEQ ID NO: 380040 - DNA, 15 bp, Homo sapiens
taagaaacttgtatg

SEQ ID NO: 380041 - DNA, 15 bp, Homo sapiens
ataagaaacttgtat

SEQ ID NO: 380042 - DNA, 15 bp, Homo sapiens
aataagaaacttgta

SEQ ID NO: 380043 - DNA, 15 bp, Homo sapiens
taataagaaacttgt

SEQ ID NO: 380044 - DNA, 15 bp, Homo sapiens
ataataagaaacttg

SEQ ID NO: 380045 - DNA, 15 bp, Homo sapiens
aataataagaaactt

SEQ ID NO: 380046 - DNA, 15 bp, Homo sapiens
taataataagaaact

SEQ ID NO: 380047 - DNA, 15 bp, Homo sapiens
ataataataagaaac

SEQ ID NO: 380048 - DNA, 15 bp, Homo sapiens
tataataataagaaa

SEQ ID NO: 380049 - DNA, 15 bp, Homo sapiens
atataataataagaa

SEQ ID NO: 380050 - DNA, 15 bp, Homo sapiens
gatataataataaga

SEQ ID NO: 380051 - DNA, 15 bp, Homo sapiens
agatataataataag

SEQ ID NO: 380052 - DNA, 15 bp, Homo sapiens
gagatataataataa

SEQ ID NO: 380053 - DNA, 15 bp, Homo sapiens
agagatataataata

SEQ ID NO: 380054 - DNA, 15 bp, Homo sapiens
aagagatataataat

SEQ ID NO: 380055 - DNA, 15 bp, Homo sapiens
gaagagatataataa

SEQ ID NO: 380056 - DNA, 15 bp, Homo sapiens
ggaagagatataata

SEQ ID NO: 380057 - DNA, 15 bp, Homo sapiens
aggaagagatataat

SEQ ID NO: 380058 - DNA, 15 bp, Homo sapiens
caggaagagatataa

SEQ ID NO: 380059 - DNA, 15 bp, Homo sapiens
acaggaagagatata

SEQ ID NO: 380060 - DNA, 15 bp, Homo sapiens
aacaggaagagatat

SEQ ID NO: 380061 - DNA, 15 bp, Homo sapiens
gaacaggaagagata

SEQ ID NO: 380062 - DNA, 15 bp, Homo sapiens
tgaacaggaagagat

SEQ ID NO: 380063 - DNA, 15 bp, Homo sapiens
gtgaacaggaagaga

SEQ ID NO: 380064 - DNA, 15 bp, Homo sapiens
agtgaacaggaagag

SEQ ID NO: 380065 - DNA, 15 bp, Homo sapiens
cagtgaacaggaaga

SEQ ID NO: 380066 - DNA, 15 bp, Homo sapiens
gcagtgaacaggaag

SEQ ID NO: 380067 - DNA, 15 bp, Homo sapiens
ggcagtgaacaggaa

SEQ ID NO: 380068 - DNA, 15 bp, Homo sapiens
aggcagtgaacagga

SEQ ID NO: 380069 - DNA, 15 bp, Homo sapiens
gaggcagtgaacagg

SEQ ID NO: 380070 - DNA, 15 bp, Homo sapiens
ggaggcagtgaacag

SEQ ID NO: 380071 - DNA, 15 bp, Homo sapiens
gggaggcagtgaaca

SEQ ID NO: 380072 - DNA, 15 bp, Homo sapiens
cgggaggcagtgaac

SEQ ID NO: 380073 - DNA, 15 bp, Homo sapiens
gcgggaggcagtgaa

SEQ ID NO: 380074 - DNA, 15 bp, Homo sapiens
tgcgggaggcagtga

SEQ ID NO: 380075 - DNA, 15 bp, Homo sapiens
ttgcgggaggcagtg

SEQ ID NO: 380076 - DNA, 15 bp, Homo sapiens
tttgcgggaggcagt

SEQ ID NO: 380077 - DNA, 15 bp, Homo sapiens
ttttgcgggaggcag

SEQ ID NO: 380078 - DNA, 15 bp, Homo sapiens
tttttgcgggaggca

SEQ ID NO: 380079 - DNA, 15 bp, Homo sapiens
ttttttgcgggaggc

SEQ ID NO: 380080 - DNA, 15 bp, Homo sapiens
tttttttgcgggagg

SEQ ID NO: 380081 - DNA, 15 bp, Homo sapiens
ttttttttgcgggag

SEQ ID NO: 380082 - DNA, 15 bp, Homo sapiens
tttttttttgcggga

SEQ ID NO: 380083 - DNA, 15 bp, Homo sapiens
ttttttttttgcggg

SEQ ID NO: 380084 - DNA, 15 bp, Homo sapiens
tttttttttttgcgg

SEQ ID NO: 380085 - DNA, 15 bp, Homo sapiens
ttttttttttttgcg

SEQ ID NO: 380086 - DNA, 15 bp, Homo sapiens
cttgttttttttttt

SEQ ID NO: 380087 - DNA, 15 bp, Homo sapiens
ccttgtttttttttt

SEQ ID NO: 380088 - DNA, 15 bp, Homo sapiens
tccttgttttttttt

SEQ ID NO: 380089 - DNA, 15 bp, Homo sapiens
ttccttgtttttttt

SEQ ID NO: 380090 - DNA, 15 bp, Homo sapiens
cttccttgttttttt

SEQ ID NO: 380091 - DNA, 15 bp, Homo sapiens
acttccttgtttttt

SEQ ID NO: 380092 - DNA, 15 bp, Homo sapiens
tacttccttgttttt

SEQ ID NO: 380093 - DNA, 15 bp, Homo sapiens
ttacttccttgtttt

SEQ ID NO: 380094 - DNA, 15 bp, Homo sapiens
cttacttccttgttt

SEQ ID NO: 380095 - DNA, 15 bp, Homo sapiens
ccttacttccttgtt

SEQ ID NO: 380096 - DNA, 15 bp, Homo sapiens
cccttacttccttgt

SEQ ID NO: 380097 - DNA, 15 bp, Homo sapiens
acccttacttccttg

SEQ ID NO: 380098 - DNA, 15 bp, Homo sapiens
tacccttacttcctt

SEQ ID NO: 380099 - DNA, 15 bp, Homo sapiens
ctacccttacttcct

SEQ ID NO: 380100 - DNA, 15 bp, Homo sapiens
tctacccttacttcc

SEQ ID NO: 380101 - DNA, 15 bp, Homo sapiens
ttctacccttacttc

SEQ ID NO: 380102 - DNA, 15 bp, Homo sapiens
tttctacccttactt

SEQ ID NO: 380103 - DNA, 15 bp, Homo sapiens
ctttctacccttact

SEQ ID NO: 380104 - DNA, 15 bp, Homo sapiens
actttctacccttac

SEQ ID NO: 380105 - DNA, 15 bp, Homo sapiens
cactttctaccctta

SEQ ID NO: 380106 - DNA, 15 bp, Homo sapiens
tcactttctaccctt

SEQ ID NO: 380107 - DNA, 15 bp, Homo sapiens
ctcactttctaccct

SEQ ID NO: 380108 - DNA, 15 bp, Homo sapiens
tctcactttctaccc

SEQ ID NO: 380109 - DNA, 15 bp, Homo sapiens
ctctcactttctacc

SEQ ID NO: 380110 - DNA, 15 bp, Homo sapiens
actctcactttctac

SEQ ID NO: 380111 - DNA, 15 bp, Homo sapiens
aactctcactttcta

SEQ ID NO: 380112 - DNA, 15 bp, Homo sapiens
gaactctcactttct

SEQ ID NO: 380113 - DNA, 15 bp, Homo sapiens
agaactctcactttc

SEQ ID NO: 380114 - DNA, 15 bp, Homo sapiens
aagaactctcacttt

SEQ ID NO: 380115 - DNA, 15 bp, Homo sapiens
aaagaactctcactt

SEQ ID NO: 380116 - DNA, 15 bp, Homo sapiens
caaagaactctcact

SEQ ID NO: 380117 - DNA, 15 bp, Homo sapiens
tcaaagaactctcac

SEQ ID NO: 380118 - DNA, 15 bp, Homo sapiens
ttcaaagaactctca

SEQ ID NO: 380119 - DNA, 15 bp, Homo sapiens
tttcaaagaactctc

SEQ ID NO: 380120 - DNA, 15 bp, Homo sapiens
ttttcaaagaactct

SEQ ID NO: 380121 - DNA, 15 bp, Homo sapiens
attttcaaagaactc

SEQ ID NO: 380122 - DNA, 15 bp, Homo sapiens
tattttcaaagaact

SEQ ID NO: 380123 - DNA, 15 bp, Homo sapiens
ttattttcaaagaac

SEQ ID NO: 380124 - DNA, 15 bp, Homo sapiens
tttattttcaaagaa

SEQ ID NO: 380125 - DNA, 15 bp, Homo sapiens
ctttattttcaaaga

SEQ ID NO: 380126 - DNA, 15 bp, Homo sapiens
actttattttcaaag

SEQ ID NO: 380127 - DNA, 15 bp, Homo sapiens
tactttattttcaaa

SEQ ID NO: 380128 - DNA, 15 bp, Homo sapiens
atactttattttcaa

SEQ ID NO: 380129 - DNA, 15 bp, Homo sapiens
tatactttattttca

SEQ ID NO: 380130 - DNA, 15 bp, Homo sapiens
atatactttattttc

SEQ ID NO: 380131 - DNA, 15 bp, Homo sapiens
tatatactttatttt

SEQ ID NO: 380132 - DNA, 15 bp, Homo sapiens
gtatatactttattt

SEQ ID NO: 380133 - DNA, 15 bp, Homo sapiens
tgtatatactttatt

SEQ ID NO: 380134 - DNA, 15 bp, Homo sapiens
atgtatatactttat

SEQ ID NO: 380135 - DNA, 15 bp, Homo sapiens
aatgtatatacttta

SEQ ID NO: 380136 - DNA, 15 bp, Homo sapiens
aaatgtatatacttt

SEQ ID NO: 380137 - DNA, 15 bp, Homo sapiens
taaatgtatatactt

SEQ ID NO: 380138 - DNA, 15 bp, Homo sapiens
ttaaatgtatatact

SEQ ID NO: 380139 - DNA, 15 bp, Homo sapiens
tttaaatgtatatac

SEQ ID NO: 380140 - DNA, 15 bp, Homo sapiens
ttttaaatgtatata

SEQ ID NO: 380141 - DNA, 15 bp, Homo sapiens
tttttaaatgtatat

SEQ ID NO: 380142 - DNA, 15 bp, Homo sapiens
ctttttaaatgtata

SEQ ID NO: 380143 - DNA, 15 bp, Homo sapiens
actttttaaatgtat

SEQ ID NO: 380144 - DNA, 15 bp, Homo sapiens
aactttttaaatgta

SEQ ID NO: 380145 - DNA, 15 bp, Homo sapiens
taactttttaaatgt

SEQ ID NO: 380146 - DNA, 15 bp, Homo sapiens
ctaactttttaaatg

SEQ ID NO: 380147 - DNA, 15 bp, Homo sapiens
cctaactttttaaat

SEQ ID NO: 380148 - DNA, 15 bp, Homo sapiens
tcctaactttttaaa

SEQ ID NO: 380149 - DNA, 15 bp, Homo sapiens
ttcctaactttttaa

SEQ ID NO: 380150 - DNA, 15 bp, Homo sapiens
gttcctaacttttta

SEQ ID NO: 380151 - DNA, 15 bp, Homo sapiens
agttcctaacttttt

SEQ ID NO: 380152 - DNA, 15 bp, Homo sapiens
gagttcctaactttt

SEQ ID NO: 380153 - DNA, 15 bp, Homo sapiens
agagttcctaacttt

SEQ ID NO: 380154 - DNA, 15 bp, Homo sapiens
cagagttcctaactt

SEQ ID NO: 380155 - DNA, 15 bp, Homo sapiens
acagagttcctaact

SEQ ID NO: 380156 - DNA, 15 bp, Homo sapiens
aacagagttcctaac

SEQ ID NO: 380157 - DNA, 15 bp, Homo sapiens
taacagagttcctaa

SEQ ID NO: 380158 - DNA, 15 bp, Homo sapiens
ataacagagttccta

SEQ ID NO: 380159 - DNA, 15 bp, Homo sapiens
gataacagagttcct

SEQ ID NO: 380160 - DNA, 15 bp, Homo sapiens
agataacagagttcc

SEQ ID NO: 380161 - DNA, 15 bp, Homo sapiens
cagataacagagttc

SEQ ID NO: 380162 - DNA, 15 bp, Homo sapiens
gcagataacagagtt

SEQ ID NO: 380163 - DNA, 15 bp, Homo sapiens
tgcagataacagagt

SEQ ID NO: 380164 - DNA, 15 bp, Homo sapiens
gtgcagataacagag

SEQ ID NO: 380165 - DNA, 15 bp, Homo sapiens
ggtgcagataacaga

SEQ ID NO: 380166 - DNA, 15 bp, Homo sapiens
tggtgcagataacag

SEQ ID NO: 380167 - DNA, 15 bp, Homo sapiens
atggtgcagataaca

SEQ ID NO: 380168 - DNA, 15 bp, Homo sapiens
aatggtgcagataac

SEQ ID NO: 380169 - DNA, 15 bp, Homo sapiens
gaatggtgcagataa

SEQ ID NO: 380170 - DNA, 15 bp, Homo sapiens
agaatggtgcagata

SEQ ID NO: 380171 - DNA, 15 bp, Homo sapiens
tagaatggtgcagat

SEQ ID NO: 380172 - DNA, 15 bp, Homo sapiens
ctagaatggtgcaga

SEQ ID NO: 380173 - DNA, 15 bp, Homo sapiens
tctagaatggtgcag

SEQ ID NO: 380174 - DNA, 15 bp, Homo sapiens
ttctagaatggtgca

SEQ ID NO: 380175 - DNA, 15 bp, Homo sapiens
cttctagaatggtgc

SEQ ID NO: 380176 - DNA, 15 bp, Homo sapiens
tcttctagaatggtg

SEQ ID NO: 380177 - DNA, 15 bp, Homo sapiens
ctcttctagaatggt

SEQ ID NO: 380178 - DNA, 15 bp, Homo sapiens
tctcttctagaatgg

SEQ ID NO: 380179 - DNA, 15 bp, Homo sapiens
ttctcttctagaatg

SEQ ID NO: 380180 - DNA, 15 bp, Homo sapiens
cttctcttctagaat

SEQ ID NO: 380181 - DNA, 15 bp, Homo sapiens
tcttctcttctagaa

SEQ ID NO: 380182 - DNA, 15 bp, Homo sapiens
ttcttctcttctaga

SEQ ID NO: 380183 - DNA, 15 bp, Homo sapiens
tttcttctcttctag

SEQ ID NO: 380184 - DNA, 15 bp, Homo sapiens
atttcttctcttcta

SEQ ID NO: 380185 - DNA, 15 bp, Homo sapiens
aatttcttctcttct

SEQ ID NO: 380186 - DNA, 15 bp, Homo sapiens
aaatttcttctcttc

SEQ ID NO: 380187 - DNA, 15 bp, Homo sapiens
caaatttcttctctt

SEQ ID NO: 380188 - DNA, 15 bp, Homo sapiens
acaaatttcttctct

SEQ ID NO: 380189 - DNA, 15 bp, Homo sapiens
tacaaatttcttctc

SEQ ID NO: 380190 - DNA, 15 bp, Homo sapiens
ttacaaatttcttct

SEQ ID NO: 380191 - DNA, 15 bp, Homo sapiens
cttacaaatttcttc

SEQ ID NO: 380192 - DNA, 15 bp, Homo sapiens
gcttacaaatttctt

SEQ ID NO: 380193 - DNA, 15 bp, Homo sapiens
ggcttacaaatttct

SEQ ID NO: 380194 - DNA, 15 bp, Homo sapiens
tggcttacaaatttc

SEQ ID NO: 380195 - DNA, 15 bp, Homo sapiens
atggcttacaaattt

SEQ ID NO: 380196 - DNA, 15 bp, Homo sapiens
aatggcttacaaatt

SEQ ID NO: 380197 - DNA, 15 bp, Homo sapiens
aaatggcttacaaat

SEQ ID NO: 380198 - DNA, 15 bp, Homo sapiens
taaatggcttacaaa

SEQ ID NO: 380199 - DNA, 15 bp, Homo sapiens
ctaaatggcttacaa

SEQ ID NO: 380200 - DNA, 15 bp, Homo sapiens
actaaatggcttaca

SEQ ID NO: 380201 - DNA, 15 bp, Homo sapiens
gactaaatggcttac

SEQ ID NO: 380202 - DNA, 15 bp, Homo sapiens
ggactaaatggctta

SEQ ID NO: 380203 - DNA, 15 bp, Homo sapiens
tggactaaatggctt

SEQ ID NO: 380204 - DNA, 15 bp, Homo sapiens
ttggactaaatggct

SEQ ID NO: 380205 - DNA, 15 bp, Homo sapiens
gttggactaaatggc

SEQ ID NO: 380206 - DNA, 15 bp, Homo sapiens
agttggactaaatgg

SEQ ID NO: 380207 - DNA, 15 bp, Homo sapiens
aagttggactaaatg

SEQ ID NO: 380208 - DNA, 15 bp, Homo sapiens
caagttggactaaat

SEQ ID NO: 380209 - DNA, 15 bp, Homo sapiens
gcaagttggactaaa

SEQ ID NO: 380210 - DNA, 15 bp, Homo sapiens
agcaagttggactaa

SEQ ID NO: 380211 - DNA, 15 bp, Homo sapiens
aagcaagttggacta

SEQ ID NO: 380212 - DNA, 15 bp, Homo sapiens
aaagcaagttggact

SEQ ID NO: 380213 - DNA, 15 bp, Homo sapiens
caaagcaagttggac

SEQ ID NO: 380214 - DNA, 15 bp, Homo sapiens
ccaaagcaagttgga

SEQ ID NO: 380215 - DNA, 15 bp, Homo sapiens
cccaaagcaagttgg

SEQ ID NO: 380216 - DNA, 15 bp, Homo sapiens
gcccaaagcaagttg

SEQ ID NO: 380217 - DNA, 15 bp, Homo sapiens
agcccaaagcaagtt

SEQ ID NO: 380218 - DNA, 15 bp, Homo sapiens
aagcccaaagcaagt

SEQ ID NO: 380219 - DNA, 15 bp, Homo sapiens
aaagcccaaagcaag

SEQ ID NO: 380220 - DNA, 15 bp, Homo sapiens
caaagcccaaagcaa

SEQ ID NO: 380221 - DNA, 15 bp, Homo sapiens
tcaaagcccaaagca

SEQ ID NO: 380222 - DNA, 15 bp, Homo sapiens
ttcaaagcccaaagc

SEQ ID NO: 380223 - DNA, 15 bp, Homo sapiens
tttcaaagcccaaag

SEQ ID NO: 380224 - DNA, 15 bp, Homo sapiens
ctttcaaagcccaaa

SEQ ID NO: 380225 - DNA, 15 bp, Homo sapiens
cctttcaaagcccaa

SEQ ID NO: 380226 - DNA, 15 bp, Homo sapiens
ccctttcaaagccca

SEQ ID NO: 380227 - DNA, 15 bp, Homo sapiens
cccctttcaaagccc

SEQ ID NO: 380228 - DNA, 15 bp, Homo sapiens
acccctttcaaagcc

SEQ ID NO: 380229 - DNA, 15 bp, Homo sapiens
cacccctttcaaagc

SEQ ID NO: 380230 - DNA, 15 bp, Homo sapiens
tcacccctttcaaag

SEQ ID NO: 380231 - DNA, 15 bp, Homo sapiens
ttcacccctttcaaa

SEQ ID NO: 380232 - DNA, 15 bp, Homo sapiens
gttcacccctttcaa

SEQ ID NO: 380233 - DNA, 15 bp, Homo sapiens
tgttcacccctttca

SEQ ID NO: 380234 - DNA, 15 bp, Homo sapiens
ttgttcacccctttc

SEQ ID NO: 380235 - DNA, 15 bp, Homo sapiens
attgttcaccccttt

SEQ ID NO: 380236 - DNA, 15 bp, Homo sapiens
tattgttcacccctt

SEQ ID NO: 380237 - DNA, 15 bp, Homo sapiens
ttattgttcacccct

SEQ ID NO: 380238 - DNA, 15 bp, Homo sapiens
cttattgttcacccc

SEQ ID NO: 380239 - DNA, 15 bp, Homo sapiens
acttattgttcaccc

SEQ ID NO: 380240 - DNA, 15 bp, Homo sapiens
tacttattgttcacc

SEQ ID NO: 380241 - DNA, 15 bp, Homo sapiens
ctacttattgttcac

SEQ ID NO: 380242 - DNA, 15 bp, Homo sapiens
cctacttattgttca

SEQ ID NO: 380243 - DNA, 15 bp, Homo sapiens
gcctacttattgttc

SEQ ID NO: 380244 - DNA, 15 bp, Homo sapiens
agcctacttattgtt

SEQ ID NO: 380245 - DNA, 15 bp, Homo sapiens
cagcctacttattgt

SEQ ID NO: 380246 - DNA, 15 bp, Homo sapiens
ccagcctacttattg

SEQ ID NO: 380247 - DNA, 15 bp, Homo sapiens
accagcctacttatt

SEQ ID NO: 380248 - DNA, 15 bp, Homo sapiens
taccagcctacttat

SEQ ID NO: 380249 - DNA, 15 bp, Homo sapiens
ttaccagcctactta

SEQ ID NO: 380250 - DNA, 15 bp, Homo sapiens
tttaccagcctactt

SEQ ID NO: 380251 - DNA, 15 bp, Homo sapiens
gtttaccagcctact

SEQ ID NO: 380252 - DNA, 15 bp, Homo sapiens
ggtttaccagcctac

SEQ ID NO: 380253 - DNA, 15 bp, Homo sapiens
tggtttaccagccta

SEQ ID NO: 380254 - DNA, 15 bp, Homo sapiens
ctggtttaccagcct

SEQ ID NO: 380255 - DNA, 15 bp, Homo sapiens
tctggtttaccagcc

SEQ ID NO: 380256 - DNA, 15 bp, Homo sapiens
ttctggtttaccagc

SEQ ID NO: 380257 - DNA, 15 bp, Homo sapiens
cttctggtttaccag

SEQ ID NO: 380258 - DNA, 15 bp, Homo sapiens
ccttctggtttacca

SEQ ID NO: 380259 - DNA, 15 bp, Homo sapiens
gccttctggtttacc

SEQ ID NO: 380260 - DNA, 15 bp, Homo sapiens
tgccttctggtttac

SEQ ID NO: 380261 - DNA, 15 bp, Homo sapiens
gtgccttctggttta

SEQ ID NO: 380262 - DNA, 15 bp, Homo sapiens
cgtgccttctggttt

SEQ ID NO: 380263 - DNA, 15 bp, Homo sapiens
ccgtgccttctggtt

SEQ ID NO: 380264 - DNA, 15 bp, Homo sapiens
accgtgccttctggt

SEQ ID NO: 380265 - DNA, 15 bp, Homo sapiens
caccgtgccttctgg

SEQ ID NO: 380266 - DNA, 15 bp, Homo sapiens
tcaccgtgccttctg

SEQ ID NO: 380267 - DNA, 15 bp, Homo sapiens
ttcaccgtgccttct

SEQ ID NO: 380268 - DNA, 15 bp, Homo sapiens
cttcaccgtgccttc

SEQ ID NO: 380269 - DNA, 15 bp, Homo sapiens
gcttcaccgtgcctt

SEQ ID NO: 380270 - DNA, 15 bp, Homo sapiens
ggcttcaccgtgcct

SEQ ID NO: 380271 - DNA, 15 bp, Homo sapiens
aggcttcaccgtgcc

SEQ ID NO: 380272 - DNA, 15 bp, Homo sapiens
aaggcttcaccgtgc

SEQ ID NO: 380273 - DNA, 15 bp, Homo sapiens
gaaggcttcaccgtg

SEQ ID NO: 380274 - DNA, 15 bp, Homo sapiens
agaaggcttcaccgt

SEQ ID NO: 380275 - DNA, 15 bp, Homo sapiens
gagaaggcttcaccg

SEQ ID NO: 380276 - DNA, 15 bp, Homo sapiens
tgagaaggcttcacc

SEQ ID NO: 380277 - DNA, 15 bp, Homo sapiens
ctgagaaggcttcac

SEQ ID NO: 380278 - DNA, 15 bp, Homo sapiens
actgagaaggcttca

SEQ ID NO: 380279 - DNA, 15 bp, Homo sapiens
gactgagaaggcttc

SEQ ID NO: 380280 - DNA, 15 bp, Homo sapiens
agactgagaaggctt

SEQ ID NO: 380281 - DNA, 15 bp, Homo sapiens
gagactgagaaggct

SEQ ID NO: 380282 - DNA, 15 bp, Homo sapiens
tgagactgagaaggc

SEQ ID NO: 380283 - DNA, 15 bp, Homo sapiens
ttgagactgagaagg

SEQ ID NO: 380284 - DNA, 15 bp, Homo sapiens
gttgagactgagaag

SEQ ID NO: 380285 - DNA, 15 bp, Homo sapiens
tgttgagactgagaa

SEQ ID NO: 380286 - DNA, 15 bp, Homo sapiens
gtgttgagactgaga

SEQ ID NO: 380287 - DNA, 15 bp, Homo sapiens
agtgttgagactgag

SEQ ID NO: 380288 - DNA, 15 bp, Homo sapiens
aagtgttgagactga

SEQ ID NO: 380289 - DNA, 15 bp, Homo sapiens
caagtgttgagactg

SEQ ID NO: 380290 - DNA, 15 bp, Homo sapiens
ccaagtgttgagact

SEQ ID NO: 380291 - DNA, 15 bp, Homo sapiens
cccaagtgttgagac

SEQ ID NO: 380292 - DNA, 15 bp, Homo sapiens
acccaagtgttgaga

SEQ ID NO: 380293 - DNA, 15 bp, Homo sapiens
cacccaagtgttgag

SEQ ID NO: 380294 - DNA, 15 bp, Homo sapiens
tcacccaagtgttga

SEQ ID NO: 380295 - DNA, 15 bp, Homo sapiens
atcacccaagtgttg

SEQ ID NO: 380296 - DNA, 15 bp, Homo sapiens
gatcacccaagtgtt

SEQ ID NO: 380297 - DNA, 15 bp, Homo sapiens
cgatcacccaagtgt

SEQ ID NO: 380298 - DNA, 15 bp, Homo sapiens
acgatcacccaagtg

SEQ ID NO: 380299 - DNA, 15 bp, Homo sapiens
cacgatcacccaagt

SEQ ID NO: 380300 - DNA, 15 bp, Homo sapiens
ccacgatcacccaag

SEQ ID NO: 380301 - DNA, 15 bp, Homo sapiens
gccacgatcacccaa

SEQ ID NO: 380302 - DNA, 15 bp, Homo sapiens
tgccacgatcaccca

SEQ ID NO: 380303 - DNA, 15 bp, Homo sapiens
atgccacgatcaccc

SEQ ID NO: 380304 - DNA, 15 bp, Homo sapiens
gatgccacgatcacc

SEQ ID NO: 380305 - DNA, 15 bp, Homo sapiens
tgatgccacgatcac

SEQ ID NO: 380306 - DNA, 15 bp, Homo sapiens
atgatgccacgatca

SEQ ID NO: 380307 - DNA, 15 bp, Homo sapiens
gatgatgccacgatc

SEQ ID NO: 380308 - DNA, 15 bp, Homo sapiens
tgatgatgccacgat

SEQ ID NO: 380309 - DNA, 15 bp, Homo sapiens
ctgatgatgccacga

SEQ ID NO: 380310 - DNA, 15 bp, Homo sapiens
actgatgatgccacg

SEQ ID NO: 380311 - DNA, 15 bp, Homo sapiens
cactgatgatgccac

SEQ ID NO: 380312 - DNA, 15 bp, Homo sapiens
acactgatgatgcca

SEQ ID NO: 380313 - DNA, 15 bp, Homo sapiens
gacactgatgatgcc

SEQ ID NO: 380314 - DNA, 15 bp, Homo sapiens
ggacactgatgatgc

SEQ ID NO: 380315 - DNA, 15 bp, Homo sapiens
gggacactgatgatg

SEQ ID NO: 380316 - DNA, 15 bp, Homo sapiens
agggacactgatgat

SEQ ID NO: 380317 - DNA, 15 bp, Homo sapiens
tagggacactgatga

SEQ ID NO: 380318 - DNA, 15 bp, Homo sapiens
ttagggacactgatg

SEQ ID NO: 380319 - DNA, 15 bp, Homo sapiens
tttagggacactgat

SEQ ID NO: 380320 - DNA, 15 bp, Homo sapiens
ctttagggacactga

SEQ ID NO: 380321 - DNA, 15 bp, Homo sapiens
actttagggacactg

SEQ ID NO: 380322 - DNA, 15 bp, Homo sapiens
gactttagggacact

SEQ ID NO: 380323 - DNA, 15 bp, Homo sapiens
agactttagggacac

SEQ ID NO: 380324 - DNA, 15 bp, Homo sapiens
cagactttagggaca

SEQ ID NO: 380325 - DNA, 15 bp, Homo sapiens
gcagactttagggac

SEQ ID NO: 380326 - DNA, 15 bp, Homo sapiens
agcagactttaggga

SEQ ID NO: 380327 - DNA, 15 bp, Homo sapiens
tagcagactttaggg

SEQ ID NO: 380328 - DNA, 15 bp, Homo sapiens
gtagcagactttagg

SEQ ID NO: 380329 - DNA, 15 bp, Homo sapiens
ggtagcagactttag

SEQ ID NO: 380330 - DNA, 15 bp, Homo sapiens
gggtagcagacttta

SEQ ID NO: 380331 - DNA, 15 bp, Homo sapiens
tgggtagcagacttt

SEQ ID NO: 380332 - DNA, 15 bp, Homo sapiens
ctgggtagcagactt

SEQ ID NO: 380333 - DNA, 15 bp, Homo sapiens
cctgggtagcagact

SEQ ID NO: 380334 - DNA, 15 bp, Homo sapiens
acctgggtagcagac

SEQ ID NO: 380335 - DNA, 15 bp, Homo sapiens
aacctgggtagcaga

SEQ ID NO: 380336 - DNA, 15 bp, Homo sapiens
gaacctgggtagcag

SEQ ID NO: 380337 - DNA, 15 bp, Homo sapiens
agaacctgggtagca

SEQ ID NO: 380338 - DNA, 15 bp, Homo sapiens
aagaacctgggtagc

SEQ ID NO: 380339 - DNA, 15 bp, Homo sapiens
gaagaacctgggtag

SEQ ID NO: 380340 - DNA, 15 bp, Homo sapiens
ggaagaacctgggta

SEQ ID NO: 380341 - DNA, 15 bp, Homo sapiens
gggaagaacctgggt

SEQ ID NO: 380342 - DNA, 15 bp, Homo sapiens
tgggaagaacctggg

SEQ ID NO: 380343 - DNA, 15 bp, Homo sapiens
ttgggaagaacctgg

SEQ ID NO: 380344 - DNA, 15 bp, Homo sapiens
tttgggaagaacctg

SEQ ID NO: 380345 - DNA, 15 bp, Homo sapiens
ctttgggaagaacct

SEQ ID NO: 380346 - DNA, 15 bp, Homo sapiens
gctttgggaagaacc

SEQ ID NO: 380347 - DNA, 15 bp, Homo sapiens
ggctttgggaagaac

SEQ ID NO: 380348 - DNA, 15 bp, Homo sapiens
tggctttgggaagaa

SEQ ID NO: 380349 - DNA, 15 bp, Homo sapiens
ctggctttgggaaga

SEQ ID NO: 380350 - DNA, 15 bp, Homo sapiens
actggctttgggaag

SEQ ID NO: 380351 - DNA, 15 bp, Homo sapiens
aactggctttgggaa

SEQ ID NO: 380352 - DNA, 15 bp, Homo sapiens
gaactggctttggga

SEQ ID NO: 380353 - DNA, 15 bp, Homo sapiens
tgaactggctttggg

SEQ ID NO: 380354 - DNA, 15 bp, Homo sapiens
ttgaactggctttgg

SEQ ID NO: 380355 - DNA, 15 bp, Homo sapiens
tttgaactggctttg

SEQ ID NO: 380356 - DNA, 15 bp, Homo sapiens
atttgaactggcttt

SEQ ID NO: 380357 - DNA, 15 bp, Homo sapiens
catttgaactggctt

SEQ ID NO: 380358 - DNA, 15 bp, Homo sapiens
ccatttgaactggct

SEQ ID NO: 380359 - DNA, 15 bp, Homo sapiens
tccatttgaactggc

SEQ ID NO: 380360 - DNA, 15 bp, Homo sapiens
atccatttgaactgg

SEQ ID NO: 380361 - DNA, 15 bp, Homo sapiens
catccatttgaactg

SEQ ID NO: 380362 - DNA, 15 bp, Homo sapiens
ccatccatttgaact

SEQ ID NO: 380363 - DNA, 15 bp, Homo sapiens
tccatccatttgaac

SEQ ID NO: 380364 - DNA, 15 bp, Homo sapiens
ctccatccatttgaa

SEQ ID NO: 380365 - DNA, 15 bp, Homo sapiens
tctccatccatttga

SEQ ID NO: 380366 - DNA, 15 bp, Homo sapiens
ttctccatccatttg

SEQ ID NO: 380367 - DNA, 15 bp, Homo sapiens
tttctccatccattt

SEQ ID NO: 380368 - DNA, 15 bp, Homo sapiens
ctttctccatccatt

SEQ ID NO: 380369 - DNA, 15 bp, Homo sapiens
gctttctccatccat

SEQ ID NO: 380370 - DNA, 15 bp, Homo sapiens
agctttctccatcca

SEQ ID NO: 380371 - DNA, 15 bp, Homo sapiens
cagctttctccatcc

SEQ ID NO: 380372 - DNA, 15 bp, Homo sapiens
ccagctttctccatc

SEQ ID NO: 380373 - DNA, 15 bp, Homo sapiens
tccagctttctccat

SEQ ID NO: 380374 - DNA, 15 bp, Homo sapiens
gtccagctttctcca

SEQ ID NO: 380375 - DNA, 15 bp, Homo sapiens
agtccagctttctcc

SEQ ID NO: 380376 - DNA, 15 bp, Homo sapiens
gagtccagctttctc

SEQ ID NO: 380377 - DNA, 15 bp, Homo sapiens
agagtccagctttct

SEQ ID NO: 380378 - DNA, 15 bp, Homo sapiens
aagagtccagctttc

SEQ ID NO: 380379 - DNA, 15 bp, Homo sapiens
taagagtccagcttt

SEQ ID NO: 380380 - DNA, 15 bp, Homo sapiens
ataagagtccagctt

SEQ ID NO: 380381 - DNA, 15 bp, Homo sapiens
tataagagtccagct

SEQ ID NO: 380382 - DNA, 15 bp, Homo sapiens
gtataagagtccagc

SEQ ID NO: 380383 - DNA, 15 bp, Homo sapiens
tgtataagagtccag

SEQ ID NO: 380384 - DNA, 15 bp, Homo sapiens
gtgtataagagtcca

SEQ ID NO: 380385 - DNA, 15 bp, Homo sapiens
tgtgtataagagtcc

SEQ ID NO: 380386 - DNA, 15 bp, Homo sapiens
gtgtgtataagagtc

SEQ ID NO: 380387 - DNA, 15 bp, Homo sapiens
tgtgtgtataagagt

SEQ ID NO: 380388 - DNA, 15 bp, Homo sapiens
ctgtgtgtataagag

SEQ ID NO: 380389 - DNA, 15 bp, Homo sapiens
actgtgtgtataaga

SEQ ID NO: 380390 - DNA, 15 bp, Homo sapiens
aactgtgtgtataag

SEQ ID NO: 380391 - DNA, 15 bp, Homo sapiens
taactgtgtgtataa

SEQ ID NO: 380392 - DNA, 15 bp, Homo sapiens
ttaactgtgtgtata

SEQ ID NO: 380393 - DNA, 15 bp, Homo sapiens
tttaactgtgtgtat

SEQ ID NO: 380394 - DNA, 15 bp, Homo sapiens
gtttaactgtgtgta

SEQ ID NO: 380395 - DNA, 15 bp, Homo sapiens
agtttaactgtgtgt

SEQ ID NO: 380396 - DNA, 15 bp, Homo sapiens
aagtttaactgtgtg

SEQ ID NO: 380397 - DNA, 15 bp, Homo sapiens
gaagtttaactgtgt

SEQ ID NO: 380398 - DNA, 15 bp, Homo sapiens
agaagtttaactgtg

SEQ ID NO: 380399 - DNA, 15 bp, Homo sapiens
cagaagtttaactgt

SEQ ID NO: 380400 - DNA, 15 bp, Homo sapiens
gcagaagtttaactg

SEQ ID NO: 380401 - DNA, 15 bp, Homo sapiens
ggcagaagtttaact

SEQ ID NO: 380402 - DNA, 15 bp, Homo sapiens
tggcagaagtttaac

SEQ ID NO: 380403 - DNA, 15 bp, Homo sapiens
gtggcagaagtttaa

SEQ ID NO: 380404 - DNA, 15 bp, Homo sapiens
tgtggcagaagttta

SEQ ID NO: 380405 - DNA, 15 bp, Homo sapiens
ttgtggcagaagttt

SEQ ID NO: 380406 - DNA, 15 bp, Homo sapiens
attgtggcagaagtt

SEQ ID NO: 380407 - DNA, 15 bp, Homo sapiens
aattgtggcagaagt

SEQ ID NO: 380408 - DNA, 15 bp, Homo sapiens
caattgtggcagaag

SEQ ID NO: 380409 - DNA, 15 bp, Homo sapiens
ccaattgtggcagaa

SEQ ID NO: 380410 - DNA, 15 bp, Homo sapiens
cccaattgtggcaga

SEQ ID NO: 380411 - DNA, 15 bp, Homo sapiens
tcccaattgtggcag

SEQ ID NO: 380412 - DNA, 15 bp, Homo sapiens
ctcccaattgtggca

SEQ ID NO: 380413 - DNA, 15 bp, Homo sapiens
tctcccaattgtggc

SEQ ID NO: 380414 - DNA, 15 bp, Homo sapiens
ctctcccaattgtgg

SEQ ID NO: 380415 - DNA, 15 bp, Homo sapiens
cctctcccaattgtg

SEQ ID NO: 380416 - DNA, 15 bp, Homo sapiens
acctctcccaattgt

SEQ ID NO: 380417 - DNA, 15 bp, Homo sapiens
aacctctcccaattg

SEQ ID NO: 380418 - DNA, 15 bp, Homo sapiens
aaacctctcccaatt

SEQ ID NO: 380419 - DNA, 15 bp, Homo sapiens
gaaacctctcccaat

SEQ ID NO: 380420 - DNA, 15 bp, Homo sapiens
tgaaacctctcccaa

SEQ ID NO: 380421 - DNA, 15 bp, Homo sapiens
ttgaaacctctccca

SEQ ID NO: 380422 - DNA, 15 bp, Homo sapiens
tttgaaacctctccc

SEQ ID NO: 380423 - DNA, 15 bp, Homo sapiens
atttgaaacctctcc

SEQ ID NO: 380424 - DNA, 15 bp, Homo sapiens
aatttgaaacctctc

SEQ ID NO: 380425 - DNA, 15 bp, Homo sapiens
gaatttgaaacctct

SEQ ID NO: 380426 - DNA, 15 bp, Homo sapiens
agaatttgaaacctc

SEQ ID NO: 380427 - DNA, 15 bp, Homo sapiens
cagaatttgaaacct

SEQ ID NO: 380428 - DNA, 15 bp, Homo sapiens
acagaatttgaaacc

SEQ ID NO: 380429 - DNA, 15 bp, Homo sapiens
aacagaatttgaaac

SEQ ID NO: 380430 - DNA, 15 bp, Homo sapiens
gaacagaatttgaaa

SEQ ID NO: 380431 - DNA, 15 bp, Homo sapiens
agaacagaatttgaa

SEQ ID NO: 380432 - DNA, 15 bp, Homo sapiens
cagaacagaatttga

SEQ ID NO: 380433 - DNA, 15 bp, Homo sapiens
tcagaacagaatttg

SEQ ID NO: 380434 - DNA, 15 bp, Homo sapiens
ttcagaacagaattt

SEQ ID NO: 380435 - DNA, 15 bp, Homo sapiens
attcagaacagaatt

SEQ ID NO: 380436 - DNA, 15 bp, Homo sapiens
tattcagaacagaat

SEQ ID NO: 380437 - DNA, 15 bp, Homo sapiens
atattcagaacagaa

SEQ ID NO: 380438 - DNA, 15 bp, Homo sapiens
aatattcagaacaga

SEQ ID NO: 380439 - DNA, 15 bp, Homo sapiens
taatattcagaacag

SEQ ID NO: 380440 - DNA, 15 bp, Homo sapiens
ttaatattcagaaca

SEQ ID NO: 380441 - DNA, 15 bp, Homo sapiens
tttaatattcagaac

SEQ ID NO: 380442 - DNA, 15 bp, Homo sapiens
ctttaatattcagaa

SEQ ID NO: 380443 - DNA, 15 bp, Homo sapiens
tctttaatattcaga

SEQ ID NO: 380444 - DNA, 15 bp, Homo sapiens
atctttaatattcag

SEQ ID NO: 380445 - DNA, 15 bp, Homo sapiens
aatctttaatattca

SEQ ID NO: 380446 - DNA, 15 bp, Homo sapiens
taatctttaatattc

SEQ ID NO: 380447 - DNA, 15 bp, Homo sapiens
ataatctttaatatt

SEQ ID NO: 380448 - DNA, 15 bp, Homo sapiens
cataatctttaatat

SEQ ID NO: 380449 - DNA, 15 bp, Homo sapiens
tcataatctttaata

SEQ ID NO: 380450 - DNA, 15 bp, Homo sapiens
gtcataatctttaat

SEQ ID NO: 380451 - DNA, 15 bp, Homo sapiens
ggtcataatctttaa

SEQ ID NO: 380452 - DNA, 15 bp, Homo sapiens
gggtcataatcttta

SEQ ID NO: 380453 - DNA, 15 bp, Homo sapiens
tgggtcataatcttt

SEQ ID NO: 380454 - DNA, 15 bp, Homo sapiens
ctgggtcataatctt

SEQ ID NO: 380455 - DNA, 15 bp, Homo sapiens
tctgggtcataatct

SEQ ID NO: 380456 - DNA, 15 bp, Homo sapiens
ttctgggtcataatc

SEQ ID NO: 380457 - DNA, 15 bp, Homo sapiens
gttctgggtcataat

SEQ ID NO: 380458 - DNA, 15 bp, Homo sapiens
ggttctgggtcataa

SEQ ID NO: 380459 - DNA, 15 bp, Homo sapiens
aggttctgggtcata

SEQ ID NO: 380460 - DNA, 15 bp, Homo sapiens
aaggttctgggtcat

SEQ ID NO: 380461 - DNA, 15 bp, Homo sapiens
taaggttctgggtca

SEQ ID NO: 380462 - DNA, 15 bp, Homo sapiens
gtaaggttctgggtc

SEQ ID NO: 380463 - DNA, 15 bp, Homo sapiens
ggtaaggttctgggt

SEQ ID NO: 380464 - DNA, 15 bp, Homo sapiens
tggtaaggttctggg

SEQ ID NO: 380465 - DNA, 15 bp, Homo sapiens
atggtaaggttctgg

SEQ ID NO: 380466 - DNA, 15 bp, Homo sapiens
gatggtaaggttctg

SEQ ID NO: 380467 - DNA, 15 bp, Homo sapiens
cgatggtaaggttct

SEQ ID NO: 380468 - DNA, 15 bp, Homo sapiens
ccgatggtaaggttc

SEQ ID NO: 380469 - DNA, 15 bp, Homo sapiens
accgatggtaaggtt

SEQ ID NO: 380470 - DNA, 15 bp, Homo sapiens
caccgatggtaaggt

SEQ ID NO: 380471 - DNA, 15 bp, Homo sapiens
gcaccgatggtaagg

SEQ ID NO: 380472 - DNA, 15 bp, Homo sapiens
agcaccgatggtaag

SEQ ID NO: 380473 - DNA, 15 bp, Homo sapiens
gagcaccgatggtaa

SEQ ID NO: 380474 - DNA, 15 bp, Homo sapiens
tgagcaccgatggta

SEQ ID NO: 380475 - DNA, 15 bp, Homo sapiens
ttgagcaccgatggt

SEQ ID NO: 380476 - DNA, 15 bp, Homo sapiens
attgagcaccgatgg

SEQ ID NO: 380477 - DNA, 15 bp, Homo sapiens
tattgagcaccgatg

SEQ ID NO: 380478 - DNA, 15 bp, Homo sapiens
ttattgagcaccgat

SEQ ID NO: 380479 - DNA, 15 bp, Homo sapiens
tttattgagcaccga

SEQ ID NO: 380480 - DNA, 15 bp, Homo sapiens
atttattgagcaccg

SEQ ID NO: 380481 - DNA, 15 bp, Homo sapiens
tatttattgagcacc

SEQ ID NO: 380482 - DNA, 15 bp, Homo sapiens
atatttattgagcac

SEQ ID NO: 380483 - DNA, 15 bp, Homo sapiens
aatatttattgagca

SEQ ID NO: 380484 - DNA, 15 bp, Homo sapiens
aaatatttattgagc

SEQ ID NO: 380485 - DNA, 15 bp, Homo sapiens
caaatatttattgag

SEQ ID NO: 380486 - DNA, 15 bp, Homo sapiens
tcaaatatttattga

SEQ ID NO: 380487 - DNA, 15 bp, Homo sapiens
atcaaatatttattg

SEQ ID NO: 380488 - DNA, 15 bp, Homo sapiens
tatcaaatatttatt

SEQ ID NO: 380489 - DNA, 15 bp, Homo sapiens
atatcaaatatttat

SEQ ID NO: 380490 - DNA, 15 bp, Homo sapiens
tatatcaaatattta

SEQ ID NO: 380491 - DNA, 15 bp, Homo sapiens
ttatatcaaatattt

SEQ ID NO: 380492 - DNA, 15 bp, Homo sapiens
tttatatcaaatatt

SEQ ID NO: 380493 - DNA, 15 bp, Homo sapiens
atttatatcaaatat

SEQ ID NO: 380494 - DNA, 15 bp, Homo sapiens
aatttatatcaaata

SEQ ID NO: 380495 - DNA, 15 bp, Homo sapiens
caatttatatcaaat

SEQ ID NO: 380496 - DNA, 15 bp, Homo sapiens
tcaatttatatcaaa

SEQ ID NO: 380497 - DNA, 15 bp, Homo sapiens
gtcaatttatatcaa

SEQ ID NO: 380498 - DNA, 15 bp, Homo sapiens
agtcaatttatatca

SEQ ID NO: 380499 - DNA, 15 bp, Homo sapiens
aagtcaatttatatc

SEQ ID NO: 380500 - DNA, 15 bp, Homo sapiens
aaagtcaatttatat

SEQ ID NO: 380501 - DNA, 15 bp, Homo sapiens
taaagtcaatttata

SEQ ID NO: 380502 - DNA, 15 bp, Homo sapiens
gtaaagtcaatttat

SEQ ID NO: 380503 - DNA, 15 bp, Homo sapiens
tgtaaagtcaattta

SEQ ID NO: 380504 - DNA, 15 bp, Homo sapiens
gtgtaaagtcaattt

SEQ ID NO: 380505 - DNA, 15 bp, Homo sapiens
tgtgtaaagtcaatt

SEQ ID NO: 380506 - DNA, 15 bp, Homo sapiens
atgtgtaaagtcaat

SEQ ID NO: 380507 - DNA, 15 bp, Homo sapiens
aatgtgtaaagtcaa

SEQ ID NO: 380508 - DNA, 15 bp, Homo sapiens
aaatgtgtaaagtca

SEQ ID NO: 380509 - DNA, 15 bp, Homo sapiens
aaaatgtgtaaagtc

SEQ ID NO: 380510 - DNA, 15 bp, Homo sapiens
aaaaatgtgtaaagt

SEQ ID NO: 380511 - DNA, 15 bp, Homo sapiens
taaaaatgtgtaaag

SEQ ID NO: 380512 - DNA, 15 bp, Homo sapiens
ataaaaatgtgtaaa

SEQ ID NO: 380513 - DNA, 15 bp, Homo sapiens
tataaaaatgtgtaa

SEQ ID NO: 380514 - DNA, 15 bp, Homo sapiens
gtataaaaatgtgta

SEQ ID NO: 380515 - DNA, 15 bp, Homo sapiens
ggtataaaaatgtgt

SEQ ID NO: 380516 - DNA, 15 bp, Homo sapiens
aggtataaaaatgtg

SEQ ID NO: 380517 - DNA, 15 bp, Homo sapiens
aaggtataaaaatgt

SEQ ID NO: 380518 - DNA, 15 bp, Homo sapiens
aaaggtataaaaatg

SEQ ID NO: 380519 - DNA, 15 bp, Homo sapiens
taaaggtataaaaat

SEQ ID NO: 380520 - DNA, 15 bp, Homo sapiens
ttaaaggtataaaaa

SEQ ID NO: 380521 - DNA, 15 bp, Homo sapiens
gttaaaggtataaaa

SEQ ID NO: 380522 - DNA, 15 bp, Homo sapiens
ggttaaaggtataaa

SEQ ID NO: 380523 - DNA, 15 bp, Homo sapiens
tggttaaaggtataa

SEQ ID NO: 380524 - DNA, 15 bp, Homo sapiens
atggttaaaggtata

SEQ ID NO: 380525 - DNA, 15 bp, Homo sapiens
aatggttaaaggtat

SEQ ID NO: 380526 - DNA, 15 bp, Homo sapiens
aaatggttaaaggta

SEQ ID NO: 380527 - DNA, 15 bp, Homo sapiens
aaaatggttaaaggt

SEQ ID NO: 380528 - DNA, 15 bp, Homo sapiens
gaaaatggttaaagg

SEQ ID NO: 380529 - DNA, 15 bp, Homo sapiens
agaaaatggttaaag

SEQ ID NO: 380530 - DNA, 15 bp, Homo sapiens
tagaaaatggttaaa

SEQ ID NO: 380531 - DNA, 15 bp, Homo sapiens
atagaaaatggttaa

SEQ ID NO: 380532 - DNA, 15 bp, Homo sapiens
tatagaaaatggtta

SEQ ID NO: 380533 - DNA, 15 bp, Homo sapiens
atatagaaaatggtt

SEQ ID NO: 380534 - DNA, 15 bp, Homo sapiens
aatatagaaaatggt

SEQ ID NO: 380535 - DNA, 15 bp, Homo sapiens
taatatagaaaatgg

SEQ ID NO: 380536 - DNA, 15 bp, Homo sapiens
gtaatatagaaaatg

SEQ ID NO: 380537 - DNA, 15 bp, Homo sapiens
ggtaatatagaaaat

SEQ ID NO: 380538 - DNA, 15 bp, Homo sapiens
gggtaatatagaaaa

SEQ ID NO: 380539 - DNA, 15 bp, Homo sapiens
agggtaatatagaaa

SEQ ID NO: 380540 - DNA, 15 bp, Homo sapiens
aagggtaatatagaa

SEQ ID NO: 380541 - DNA, 15 bp, Homo sapiens
caagggtaatataga

SEQ ID NO: 380542 - DNA, 15 bp, Homo sapiens
acaagggtaatatag

SEQ ID NO: 380543 - DNA, 15 bp, Homo sapiens
gacaagggtaatata

SEQ ID NO: 380544 - DNA, 15 bp, Homo sapiens
ggacaagggtaatat

SEQ ID NO: 380545 - DNA, 15 bp, Homo sapiens
aggacaagggtaata

SEQ ID NO: 380546 - DNA, 15 bp, Homo sapiens
gaggacaagggtaat

SEQ ID NO: 380547 - DNA, 15 bp, Homo sapiens
agaggacaagggtaa

SEQ ID NO: 380548 - DNA, 15 bp, Homo sapiens
aagaggacaagggta

SEQ ID NO: 380549 - DNA, 15 bp, Homo sapiens
caagaggacaagggt

SEQ ID NO: 380550 - DNA, 15 bp, Homo sapiens
ccaagaggacaaggg

SEQ ID NO: 380551 - DNA, 15 bp, Homo sapiens
accaagaggacaagg

SEQ ID NO: 380552 - DNA, 15 bp, Homo sapiens
aaccaagaggacaag

SEQ ID NO: 380553 - DNA, 15 bp, Homo sapiens
aaaccaagaggacaa

SEQ ID NO: 380554 - DNA, 15 bp, Homo sapiens
caaaccaagaggaca

SEQ ID NO: 380555 - DNA, 15 bp, Homo sapiens
tcaaaccaagaggac

SEQ ID NO: 380556 - DNA, 15 bp, Homo sapiens
atcaaaccaagagga

SEQ ID NO: 380557 - DNA, 15 bp, Homo sapiens
aatcaaaccaagagg

SEQ ID NO: 380558 - DNA, 15 bp, Homo sapiens
aaatcaaaccaagag

SEQ ID NO: 380559 - DNA, 15 bp, Homo sapiens
aaaatcaaaccaaga

SEQ ID NO: 380560 - DNA, 15 bp, Homo sapiens
aaaaatcaaaccaag

SEQ ID NO: 380561 - DNA, 15 bp, Homo sapiens
aaaaaatcaaaccaa

SEQ ID NO: 380562 - DNA, 15 bp, Homo sapiens
aaaaaaatcaaacca

SEQ ID NO: 380563 - DNA, 15 bp, Homo sapiens
taaaaaaatcaaacc

SEQ ID NO: 380564 - DNA, 15 bp, Homo sapiens
ttaaaaaaatcaaac

SEQ ID NO: 380565 - DNA, 15 bp, Homo sapiens
tttaaaaaaatcaaa

SEQ ID NO: 380566 - DNA, 15 bp, Homo sapiens
ttttaaaaaaatcaa

SEQ ID NO: 380567 - DNA, 15 bp, Homo sapiens
tttttaaaaaaatca

SEQ ID NO: 380568 - DNA, 15 bp, Homo sapiens
ttttttaaaaaaatc

SEQ ID NO: 380569 - DNA, 15 bp, Homo sapiens
tttttttaaaaaaat

SEQ ID NO: 380570 - DNA, 15 bp, Homo sapiens
tatttttttaaaaaa

SEQ ID NO: 380571 - DNA, 15 bp, Homo sapiens
catatttttttaaaa

SEQ ID NO: 380572 - DNA, 15 bp, Homo sapiens
tcatatttttttaaa

SEQ ID NO: 380573 - DNA, 15 bp, Homo sapiens
ctcatatttttttaa

SEQ ID NO: 380574 - DNA, 15 bp, Homo sapiens
actcatattttttta

SEQ ID NO: 380575 - DNA, 15 bp, Homo sapiens
cactcatattttttt

SEQ ID NO: 380576 - DNA, 15 bp, Homo sapiens
gcactcatatttttt

SEQ ID NO: 380577 - DNA, 15 bp, Homo sapiens
ggcactcatattttt

SEQ ID NO: 380578 - DNA, 15 bp, Homo sapiens
aggcactcatatttt

SEQ ID NO: 380579 - DNA, 15 bp, Homo sapiens
gaggcactcatattt

SEQ ID NO: 380580 - DNA, 15 bp, Homo sapiens
agaggcactcatatt

SEQ ID NO: 380581 - DNA, 15 bp, Homo sapiens
tagaggcactcatat

SEQ ID NO: 380582 - DNA, 15 bp, Homo sapiens
gtagaggcactcata

SEQ ID NO: 380583 - DNA, 15 bp, Homo sapiens
tgtagaggcactcat

SEQ ID NO: 380584 - DNA, 15 bp, Homo sapiens
atgtagaggcactca

SEQ ID NO: 380585 - DNA, 15 bp, Homo sapiens
catgtagaggcactc

SEQ ID NO: 380586 - DNA, 15 bp, Homo sapiens
gcatgtagaggcact

SEQ ID NO: 380587 - DNA, 15 bp, Homo sapiens
ggcatgtagaggcac

SEQ ID NO: 380588 - DNA, 15 bp, Homo sapiens
aggcatgtagaggca

SEQ ID NO: 380589 - DNA, 15 bp, Homo sapiens
aaggcatgtagaggc

SEQ ID NO: 380590 - DNA, 15 bp, Homo sapiens
taaggcatgtagagg

SEQ ID NO: 380591 - DNA, 15 bp, Homo sapiens
ataaggcatgtagag

SEQ ID NO: 380592 - DNA, 15 bp, Homo sapiens
cataaggcatgtaga

SEQ ID NO: 380593 - DNA, 15 bp, Homo sapiens
tcataaggcatgtag

SEQ ID NO: 380594 - DNA, 15 bp, Homo sapiens
atcataaggcatgta

SEQ ID NO: 380595 - DNA, 15 bp, Homo sapiens
catcataaggcatgt

SEQ ID NO: 380596 - DNA, 15 bp, Homo sapiens
gcatcataaggcatg

SEQ ID NO: 380597 - DNA, 15 bp, Homo sapiens
agcatcataaggcat

SEQ ID NO: 380598 - DNA, 15 bp, Homo sapiens
cagcatcataaggca

SEQ ID NO: 380599 - DNA, 15 bp, Homo sapiens
gcagcatcataaggc

SEQ ID NO: 380600 - DNA, 15 bp, Homo sapiens
agcagcatcataagg

SEQ ID NO: 380601 - DNA, 15 bp, Homo sapiens
cagcagcatcataag

SEQ ID NO: 380602 - DNA, 15 bp, Homo sapiens
acagcagcatcataa

SEQ ID NO: 380603 - DNA, 15 bp, Homo sapiens
cacagcagcatcata

SEQ ID NO: 380604 - DNA, 15 bp, Homo sapiens
acacagcagcatcat

SEQ ID NO: 380605 - DNA, 15 bp, Homo sapiens
aacacagcagcatca

SEQ ID NO: 380606 - DNA, 15 bp, Homo sapiens
caacacagcagcatc

SEQ ID NO: 380607 - DNA, 15 bp, Homo sapiens
ccaacacagcagcat

SEQ ID NO: 380608 - DNA, 15 bp, Homo sapiens
accaacacagcagca

SEQ ID NO: 380609 - DNA, 15 bp, Homo sapiens
caccaacacagcagc

SEQ ID NO: 380610 - DNA, 15 bp, Homo sapiens
ccaccaacacagcag

SEQ ID NO: 380611 - DNA, 15 bp, Homo sapiens
gccaccaacacagca

SEQ ID NO: 380612 - DNA, 15 bp, Homo sapiens
tgccaccaacacagc

SEQ ID NO: 380613 - DNA, 15 bp, Homo sapiens
gtgccaccaacacag

SEQ ID NO: 380614 - DNA, 15 bp, Homo sapiens
agtgccaccaacaca

SEQ ID NO: 380615 - DNA, 15 bp, Homo sapiens
aagtgccaccaacac

SEQ ID NO: 380616 - DNA, 15 bp, Homo sapiens
aaagtgccaccaaca

SEQ ID NO: 380617 - DNA, 15 bp, Homo sapiens
gaaagtgccaccaac

SEQ ID NO: 380618 - DNA, 15 bp, Homo sapiens
agaaagtgccaccaa

SEQ ID NO: 380619 - DNA, 15 bp, Homo sapiens
gagaaagtgccacca

SEQ ID NO: 380620 - DNA, 15 bp, Homo sapiens
tgagaaagtgccacc

SEQ ID NO: 380621 - DNA, 15 bp, Homo sapiens
ttgagaaagtgccac

SEQ ID NO: 380622 - DNA, 15 bp, Homo sapiens
cttgagaaagtgcca

SEQ ID NO: 380623 - DNA, 15 bp, Homo sapiens
gcttgagaaagtgcc

SEQ ID NO: 380624 - DNA, 15 bp, Homo sapiens
agcttgagaaagtgc

SEQ ID NO: 380625 - DNA, 15 bp, Homo sapiens
cagcttgagaaagtg

SEQ ID NO: 380626 - DNA, 15 bp, Homo sapiens
ccagcttgagaaagt

SEQ ID NO: 380627 - DNA, 15 bp, Homo sapiens
accagcttgagaaag

SEQ ID NO: 380628 - DNA, 15 bp, Homo sapiens
gaccagcttgagaaa

SEQ ID NO: 380629 - DNA, 15 bp, Homo sapiens
tgaccagcttgagaa

SEQ ID NO: 380630 - DNA, 15 bp, Homo sapiens
gtgaccagcttgaga

SEQ ID NO: 380631 - DNA, 15 bp, Homo sapiens
tgtgaccagcttgag

SEQ ID NO: 380632 - DNA, 15 bp, Homo sapiens
atgtgaccagcttga

SEQ ID NO: 380633 - DNA, 15 bp, Homo sapiens
catgtgaccagcttg

SEQ ID NO: 380634 - DNA, 15 bp, Homo sapiens
ccatgtgaccagctt

SEQ ID NO: 380635 - DNA, 15 bp, Homo sapiens
gccatgtgaccagct

SEQ ID NO: 380636 - DNA, 15 bp, Homo sapiens
agccatgtgaccagc

SEQ ID NO: 380637 - DNA, 15 bp, Homo sapiens
aagccatgtgaccag

SEQ ID NO: 380638 - DNA, 15 bp, Homo sapiens
gaagccatgtgacca

SEQ ID NO: 380639 - DNA, 15 bp, Homo sapiens
agaagccatgtgacc

SEQ ID NO: 380640 - DNA, 15 bp, Homo sapiens
cagaagccatgtgac

SEQ ID NO: 380641 - DNA, 15 bp, Homo sapiens
tcagaagccatgtga

SEQ ID NO: 380642 - DNA, 15 bp, Homo sapiens
ctcagaagccatgtg

SEQ ID NO: 380643 - DNA, 15 bp, Homo sapiens
tctcagaagccatgt

SEQ ID NO: 380644 - DNA, 15 bp, Homo sapiens
ttctcagaagccatg

SEQ ID NO: 380645 - DNA, 15 bp, Homo sapiens
tttctcagaagccat

SEQ ID NO: 380646 - DNA, 15 bp, Homo sapiens
ctttctcagaagcca

SEQ ID NO: 380647 - DNA, 15 bp, Homo sapiens
cctttctcagaagcc

SEQ ID NO: 380648 - DNA, 15 bp, Homo sapiens
ccctttctcagaagc

SEQ ID NO: 380649 - DNA, 15 bp, Homo sapiens
cccctttctcagaag

SEQ ID NO: 380650 - DNA, 15 bp, Homo sapiens
tcccctttctcagaa

SEQ ID NO: 380651 - DNA, 15 bp, Homo sapiens
ttcccctttctcaga

SEQ ID NO: 380652 - DNA, 15 bp, Homo sapiens
attcccctttctcag

SEQ ID NO: 380653 - DNA, 15 bp, Homo sapiens
tattcccctttctca

SEQ ID NO: 380654 - DNA, 15 bp, Homo sapiens
ctattcccctttctc

SEQ ID NO: 380655 - DNA, 15 bp, Homo sapiens
gctattcccctttct

SEQ ID NO: 380656 - DNA, 15 bp, Homo sapiens
ggctattcccctttc

SEQ ID NO: 380657 - DNA, 15 bp, Homo sapiens
gggctattccccttt

SEQ ID NO: 380658 - DNA, 15 bp, Homo sapiens
agggctattcccctt

SEQ ID NO: 380659 - DNA, 15 bp, Homo sapiens
cagggctattcccct

SEQ ID NO: 380660 - DNA, 15 bp, Homo sapiens
acagggctattcccc

SEQ ID NO: 380661 - DNA, 15 bp, Homo sapiens
tacagggctattccc

SEQ ID NO: 380662 - DNA, 15 bp, Homo sapiens
ttacagggctattcc

SEQ ID NO: 380663 - DNA, 15 bp, Homo sapiens
cttacagggctattc

SEQ ID NO: 380664 - DNA, 15 bp, Homo sapiens
gcttacagggctatt

SEQ ID NO: 380665 - DNA, 15 bp, Homo sapiens
agcttacagggctat

SEQ ID NO: 380666 - DNA, 15 bp, Homo sapiens
gagcttacagggcta

SEQ ID NO: 380667 - DNA, 15 bp, Homo sapiens
tgagcttacagggct

SEQ ID NO: 380668 - DNA, 15 bp, Homo sapiens
ttgagcttacagggc

SEQ ID NO: 380669 - DNA, 15 bp, Homo sapiens
attgagcttacaggg

SEQ ID NO: 380670 - DNA, 15 bp, Homo sapiens
cattgagcttacagg

SEQ ID NO: 380671 - DNA, 15 bp, Homo sapiens
tcattgagcttacag

SEQ ID NO: 380672 - DNA, 15 bp, Homo sapiens
ctcattgagcttaca

SEQ ID NO: 380673 - DNA, 15 bp, Homo sapiens
actcattgagcttac

SEQ ID NO: 380674 - DNA, 15 bp, Homo sapiens
tactcattgagctta

SEQ ID NO: 380675 - DNA, 15 bp, Homo sapiens
ctactcattgagctt

SEQ ID NO: 380676 - DNA, 15 bp, Homo sapiens
tctactcattgagct

SEQ ID NO: 380677 - DNA, 15 bp, Homo sapiens
ctctactcattgagc

SEQ ID NO: 380678 - DNA, 15 bp, Homo sapiens
tctctactcattgag

SEQ ID NO: 380679 - DNA, 15 bp, Homo sapiens
gtctctactcattga

SEQ ID NO: 380680 - DNA, 15 bp, Homo sapiens
tgtctctactcattg

SEQ ID NO: 380681 - DNA, 15 bp, Homo sapiens
gtgtctctactcatt

SEQ ID NO: 380682 - DNA, 15 bp, Homo sapiens
agtgtctctactcat

SEQ ID NO: 380683 - DNA, 15 bp, Homo sapiens
cagtgtctctactca

SEQ ID NO: 380684 - DNA, 15 bp, Homo sapiens
tcagtgtctctactc

SEQ ID NO: 380685 - DNA, 15 bp, Homo sapiens
ctcagtgtctctact

SEQ ID NO: 380686 - DNA, 15 bp, Homo sapiens
actcagtgtctctac

SEQ ID NO: 380687 - DNA, 15 bp, Homo sapiens
tactcagtgtctcta

SEQ ID NO: 380688 - DNA, 15 bp, Homo sapiens
atactcagtgtctct

SEQ ID NO: 380689 - DNA, 15 bp, Homo sapiens
catactcagtgtctc

SEQ ID NO: 380690 - DNA, 15 bp, Homo sapiens
gcatactcagtgtct

SEQ ID NO: 380691 - DNA, 15 bp, Homo sapiens
ggcatactcagtgtc

SEQ ID NO: 380692 - DNA, 15 bp, Homo sapiens
aggcatactcagtgt

SEQ ID NO: 380693 - DNA, 15 bp, Homo sapiens
gaggcatactcagtg

SEQ ID NO: 380694 - DNA, 15 bp, Homo sapiens
agaggcatactcagt

SEQ ID NO: 380695 - DNA, 15 bp, Homo sapiens
aagaggcatactcag

SEQ ID NO: 380696 - DNA, 15 bp, Homo sapiens
caagaggcatactca

SEQ ID NO: 380697 - DNA, 15 bp, Homo sapiens
ccaagaggcatactc

SEQ ID NO: 380698 - DNA, 15 bp, Homo sapiens
gccaagaggcatact

SEQ ID NO: 380699 - DNA, 15 bp, Homo sapiens
tgccaagaggcatac

SEQ ID NO: 380700 - DNA, 15 bp, Homo sapiens
ctgccaagaggcata

SEQ ID NO: 380701 - DNA, 15 bp, Homo sapiens
gctgccaagaggcat

SEQ ID NO: 380702 - DNA, 15 bp, Homo sapiens
tgctgccaagaggca

SEQ ID NO: 380703 - DNA, 15 bp, Homo sapiens
atgctgccaagaggc

SEQ ID NO: 380704 - DNA, 15 bp, Homo sapiens
gatgctgccaagagg

SEQ ID NO: 380705 - DNA, 15 bp, Homo sapiens
tgatgctgccaagag

SEQ ID NO: 380706 - DNA, 15 bp, Homo sapiens
atgatgctgccaaga

SEQ ID NO: 380707 - DNA, 15 bp, Homo sapiens
gatgatgctgccaag

SEQ ID NO: 380708 - DNA, 15 bp, Homo sapiens
tgatgatgctgccaa

SEQ ID NO: 380709 - DNA, 15 bp, Homo sapiens
ttgatgatgctgcca

SEQ ID NO: 380710 - DNA, 15 bp, Homo sapiens
cttgatgatgctgcc

SEQ ID NO: 380711 - DNA, 15 bp, Homo sapiens
tcttgatgatgctgc

SEQ ID NO: 380712 - DNA, 15 bp, Homo sapiens
atcttgatgatgctg

SEQ ID NO: 380713 - DNA, 15 bp, Homo sapiens
gatcttgatgatgct

SEQ ID NO: 380714 - DNA, 15 bp, Homo sapiens
ggatcttgatgatgc

SEQ ID NO: 380715 - DNA, 15 bp, Homo sapiens
gggatcttgatgatg

SEQ ID NO: 380716 - DNA, 15 bp, Homo sapiens
tgggatcttgatgat

SEQ ID NO: 380717 - DNA, 15 bp, Homo sapiens
ctgggatcttgatga

SEQ ID NO: 380718 - DNA, 15 bp, Homo sapiens
tctgggatcttgatg

SEQ ID NO: 380719 - DNA, 15 bp, Homo sapiens
atctgggatcttgat

SEQ ID NO: 380720 - DNA, 15 bp, Homo sapiens
catctgggatcttga

SEQ ID NO: 380721 - DNA, 15 bp, Homo sapiens
tcatctgggatcttg

SEQ ID NO: 380722 - DNA, 15 bp, Homo sapiens
gtcatctgggatctt

SEQ ID NO: 380723 - DNA, 15 bp, Homo sapiens
ggtcatctgggatct

SEQ ID NO: 380724 - DNA, 15 bp, Homo sapiens
tggtcatctgggatc

SEQ ID NO: 380725 - DNA, 15 bp, Homo sapiens
ctggtcatctgggat

SEQ ID NO: 380726 - DNA, 15 bp, Homo sapiens
tctggtcatctggga

SEQ ID NO: 380727 - DNA, 15 bp, Homo sapiens
ttctggtcatctggg

SEQ ID NO: 380728 - DNA, 15 bp, Homo sapiens
tttctggtcatctgg

SEQ ID NO: 380729 - DNA, 15 bp, Homo sapiens
ttttctggtcatctg

SEQ ID NO: 380730 - DNA, 15 bp, Homo sapiens
tttttctggtcatct

SEQ ID NO: 380731 - DNA, 15 bp, Homo sapiens
ctttttctggtcatc

SEQ ID NO: 380732 - DNA, 15 bp, Homo sapiens
gctttttctggtcat

SEQ ID NO: 380733 - DNA, 15 bp, Homo sapiens
agctttttctggtca

SEQ ID NO: 380734 - DNA, 15 bp, Homo sapiens
aagctttttctggtc

SEQ ID NO: 380735 - DNA, 15 bp, Homo sapiens
aaagctttttctggt

SEQ ID NO: 380736 - DNA, 15 bp, Homo sapiens
aaaagctttttctgg

SEQ ID NO: 380737 - DNA, 15 bp, Homo sapiens
caaaagctttttctg

SEQ ID NO: 380738 - DNA, 15 bp, Homo sapiens
acaaaagctttttct

SEQ ID NO: 380739 - DNA, 15 bp, Homo sapiens
gacaaaagctttttc

SEQ ID NO: 380740 - DNA, 15 bp, Homo sapiens
agacaaaagcttttt

SEQ ID NO: 380741 - DNA, 15 bp, Homo sapiens
cagacaaaagctttt

SEQ ID NO: 380742 - DNA, 15 bp, Homo sapiens
ccagacaaaagcttt

SEQ ID NO: 380743 - DNA, 15 bp, Homo sapiens
gccagacaaaagctt

SEQ ID NO: 380744 - DNA, 15 bp, Homo sapiens
agccagacaaaagct

SEQ ID NO: 380745 - DNA, 15 bp, Homo sapiens
gagccagacaaaagc

SEQ ID NO: 380746 - DNA, 15 bp, Homo sapiens
agagccagacaaaag

SEQ ID NO: 380747 - DNA, 15 bp, Homo sapiens
aagagccagacaaaa

SEQ ID NO: 380748 - DNA, 15 bp, Homo sapiens
gaagagccagacaaa

SEQ ID NO: 380749 - DNA, 15 bp, Homo sapiens
agaagagccagacaa

SEQ ID NO: 380750 - DNA, 15 bp, Homo sapiens
cagaagagccagaca

SEQ ID NO: 380751 - DNA, 15 bp, Homo sapiens
gcagaagagccagac

SEQ ID NO: 380752 - DNA, 15 bp, Homo sapiens
tgcagaagagccaga

SEQ ID NO: 380753 - DNA, 15 bp, Homo sapiens
ctgcagaagagccag

SEQ ID NO: 380754 - DNA, 15 bp, Homo sapiens
gctgcagaagagcca

SEQ ID NO: 380755 - DNA, 15 bp, Homo sapiens
tgctgcagaagagcc

SEQ ID NO: 380756 - DNA, 15 bp, Homo sapiens
atgctgcagaagagc

SEQ ID NO: 380757 - DNA, 15 bp, Homo sapiens
catgctgcagaagag

SEQ ID NO: 380758 - DNA, 15 bp, Homo sapiens
ccatgctgcagaaga

SEQ ID NO: 380759 - DNA, 15 bp, Homo sapiens
cccatgctgcagaag

SEQ ID NO: 380760 - DNA, 15 bp, Homo sapiens
tcccatgctgcagaa

SEQ ID NO: 380761 - DNA, 15 bp, Homo sapiens
ttcccatgctgcaga

SEQ ID NO: 380762 - DNA, 15 bp, Homo sapiens
tttcccatgctgcag

SEQ ID NO: 380763 - DNA, 15 bp, Homo sapiens
ttttcccatgctgca

SEQ ID NO: 380764 - DNA, 15 bp, Homo sapiens
cttttcccatgctgc

SEQ ID NO: 380765 - DNA, 15 bp, Homo sapiens
gcttttcccatgctg

SEQ ID NO: 380766 - DNA, 15 bp, Homo sapiens
ggcttttcccatgct

SEQ ID NO: 380767 - DNA, 15 bp, Homo sapiens
aggcttttcccatgc

SEQ ID NO: 380768 - DNA, 15 bp, Homo sapiens
taggcttttcccatg

SEQ ID NO: 380769 - DNA, 15 bp, Homo sapiens
ttaggcttttcccat

SEQ ID NO: 380770 - DNA, 15 bp, Homo sapiens
tttaggcttttccca

SEQ ID NO: 380771 - DNA, 15 bp, Homo sapiens
ctttaggcttttccc

SEQ ID NO: 380772 - DNA, 15 bp, Homo sapiens
cctttaggcttttcc

SEQ ID NO: 380773 - DNA, 15 bp, Homo sapiens
acctttaggcttttc

SEQ ID NO: 380774 - DNA, 15 bp, Homo sapiens
cacctttaggctttt

SEQ ID NO: 380775 - DNA, 15 bp, Homo sapiens
acacctttaggcttt

SEQ ID NO: 380776 - DNA, 15 bp, Homo sapiens
gacacctttaggctt

SEQ ID NO: 380777 - DNA, 15 bp, Homo sapiens
agacacctttaggct

SEQ ID NO: 380778 - DNA, 15 bp, Homo sapiens
cagacacctttaggc

SEQ ID NO: 380779 - DNA, 15 bp, Homo sapiens
gcagacacctttagg

SEQ ID NO: 380780 - DNA, 15 bp, Homo sapiens
tgcagacacctttag

SEQ ID NO: 380781 - DNA, 15 bp, Homo sapiens
atgcagacaccttta

SEQ ID NO: 380782 - DNA, 15 bp, Homo sapiens
gatgcagacaccttt

SEQ ID NO: 380783 - DNA, 15 bp, Homo sapiens
ggatgcagacacctt

SEQ ID NO: 380784 - DNA, 15 bp, Homo sapiens
gggatgcagacacct

SEQ ID NO: 380785 - DNA, 15 bp, Homo sapiens
tgggatgcagacacc

SEQ ID NO: 380786 - DNA, 15 bp, Homo sapiens
ttgggatgcagacac

SEQ ID NO: 380787 - DNA, 15 bp, Homo sapiens
attgggatgcagaca

SEQ ID NO: 380788 - DNA, 15 bp, Homo sapiens
tattgggatgcagac

SEQ ID NO: 380789 - DNA, 15 bp, Homo sapiens
ctattgggatgcaga

SEQ ID NO: 380790 - DNA, 15 bp, Homo sapiens
tctattgggatgcag

SEQ ID NO: 380791 - DNA, 15 bp, Homo sapiens
ctctattgggatgca

SEQ ID NO: 380792 - DNA, 15 bp, Homo sapiens
tctctattgggatgc

SEQ ID NO: 380793 - DNA, 15 bp, Homo sapiens
gtctctattgggatg

SEQ ID NO: 380794 - DNA, 15 bp, Homo sapiens
tgtctctattgggat

SEQ ID NO: 380795 - DNA, 15 bp, Homo sapiens
ttgtctctattggga

SEQ ID NO: 380796 - DNA, 15 bp, Homo sapiens
attgtctctattggg

SEQ ID NO: 380797 - DNA, 15 bp, Homo sapiens
aattgtctctattgg

SEQ ID NO: 380798 - DNA, 15 bp, Homo sapiens
taattgtctctattg

SEQ ID NO: 380799 - DNA, 15 bp, Homo sapiens
ttaattgtctctatt

SEQ ID NO: 380800 - DNA, 15 bp, Homo sapiens
tttaattgtctctat

SEQ ID NO: 380801 - DNA, 15 bp, Homo sapiens
atttaattgtctcta

SEQ ID NO: 380802 - DNA, 15 bp, Homo sapiens
gatttaattgtctct

SEQ ID NO: 380803 - DNA, 15 bp, Homo sapiens
tgatttaattgtctc

SEQ ID NO: 380804 - DNA, 15 bp, Homo sapiens
ttgatttaattgtct

SEQ ID NO: 380805 - DNA, 15 bp, Homo sapiens
gttgatttaattgtc

SEQ ID NO: 380806 - DNA, 15 bp, Homo sapiens
ggttgatttaattgt

SEQ ID NO: 380807 - DNA, 15 bp, Homo sapiens
aggttgatttaattg

SEQ ID NO: 380808 - DNA, 15 bp, Homo sapiens
caggttgatttaatt

SEQ ID NO: 380809 - DNA, 15 bp, Homo sapiens
gcaggttgatttaat

SEQ ID NO: 380810 - DNA, 15 bp, Homo sapiens
ggcaggttgatttaa

SEQ ID NO: 380811 - DNA, 15 bp, Homo sapiens
tggcaggttgattta

SEQ ID NO: 380812 - DNA, 15 bp, Homo sapiens
ctggcaggttgattt

SEQ ID NO: 380813 - DNA, 15 bp, Homo sapiens
cctggcaggttgatt

SEQ ID NO: 380814 - DNA, 15 bp, Homo sapiens
acctggcaggttgat

SEQ ID NO: 380815 - DNA, 15 bp, Homo sapiens
aacctggcaggttga

SEQ ID NO: 380816 - DNA, 15 bp, Homo sapiens
gaacctggcaggttg

SEQ ID NO: 380817 - DNA, 15 bp, Homo sapiens
ggaacctggcaggtt

SEQ ID NO: 380818 - DNA, 15 bp, Homo sapiens
aggaacctggcaggt

SEQ ID NO: 380819 - DNA, 15 bp, Homo sapiens
taggaacctggcagg

SEQ ID NO: 380820 - DNA, 15 bp, Homo sapiens
ataggaacctggcag

SEQ ID NO: 380821 - DNA, 15 bp, Homo sapiens
tataggaacctggca

SEQ ID NO: 380822 - DNA, 15 bp, Homo sapiens
ctataggaacctggc

SEQ ID NO: 380823 - DNA, 15 bp, Homo sapiens
gctataggaacctgg

SEQ ID NO: 380824 - DNA, 15 bp, Homo sapiens
tgctataggaacctg

SEQ ID NO: 380825 - DNA, 15 bp, Homo sapiens
ttgctataggaacct

SEQ ID NO: 380826 - DNA, 15 bp, Homo sapiens
gttgctataggaacc

SEQ ID NO: 380827 - DNA, 15 bp, Homo sapiens
tgttgctataggaac

SEQ ID NO: 380828 - DNA, 15 bp, Homo sapiens
ctgttgctataggaa

SEQ ID NO: 380829 - DNA, 15 bp, Homo sapiens
cctgttgctatagga

SEQ ID NO: 380830 - DNA, 15 bp, Homo sapiens
gcctgttgctatagg

SEQ ID NO: 380831 - DNA, 15 bp, Homo sapiens
agcctgttgctatag

SEQ ID NO: 380832 - DNA, 15 bp, Homo sapiens
gagcctgttgctata

SEQ ID NO: 380833 - DNA, 15 bp, Homo sapiens
ggagcctgttgctat

SEQ ID NO: 380834 - DNA, 15 bp, Homo sapiens
aggagcctgttgcta

SEQ ID NO: 380835 - DNA, 15 bp, Homo sapiens
aaggagcctgttgct

SEQ ID NO: 380836 - DNA, 15 bp, Homo sapiens
caaggagcctgttgc

SEQ ID NO: 380837 - DNA, 15 bp, Homo sapiens
tcaaggagcctgttg

SEQ ID NO: 380838 - DNA, 15 bp, Homo sapiens
ttcaaggagcctgtt

SEQ ID NO: 380839 - DNA, 15 bp, Homo sapiens
cttcaaggagcctgt

SEQ ID NO: 380840 - DNA, 15 bp, Homo sapiens
ccttcaaggagcctg

SEQ ID NO: 380841 - DNA, 15 bp, Homo sapiens
tccttcaaggagcct

SEQ ID NO: 380842 - DNA, 15 bp, Homo sapiens
ctccttcaaggagcc

SEQ ID NO: 380843 - DNA, 15 bp, Homo sapiens
tctccttcaaggagc

SEQ ID NO: 380844 - DNA, 15 bp, Homo sapiens
ttctccttcaaggag

SEQ ID NO: 380845 - DNA, 15 bp, Homo sapiens
tttctccttcaagga

SEQ ID NO: 380846 - DNA, 15 bp, Homo sapiens
ctttctccttcaagg

SEQ ID NO: 380847 - DNA, 15 bp, Homo sapiens
tctttctccttcaag

SEQ ID NO: 380848 - DNA, 15 bp, Homo sapiens
ctctttctccttcaa

SEQ ID NO: 380849 - DNA, 15 bp, Homo sapiens
cctctttctccttca

SEQ ID NO: 380850 - DNA, 15 bp, Homo sapiens
tcctctttctccttc

SEQ ID NO: 380851 - DNA, 15 bp, Homo sapiens
ctcctctttctcctt

SEQ ID NO: 380852 - DNA, 15 bp, Homo sapiens
tctcctctttctcct

SEQ ID NO: 380853 - DNA, 15 bp, Homo sapiens
ctctcctctttctcc

SEQ ID NO: 380854 - DNA, 15 bp, Homo sapiens
actctcctctttctc

SEQ ID NO: 380855 - DNA, 15 bp, Homo sapiens
tactctcctctttct

SEQ ID NO: 380856 - DNA, 15 bp, Homo sapiens
gtactctcctctttc

SEQ ID NO: 380857 - DNA, 15 bp, Homo sapiens
tgtactctcctcttt

SEQ ID NO: 380858 - DNA, 15 bp, Homo sapiens
ctgtactctcctctt

SEQ ID NO: 380859 - DNA, 15 bp, Homo sapiens
tctgtactctcctct

SEQ ID NO: 380860 - DNA, 15 bp, Homo sapiens
ttctgtactctcctc

SEQ ID NO: 380861 - DNA, 15 bp, Homo sapiens
tttctgtactctcct

SEQ ID NO: 380862 - DNA, 15 bp, Homo sapiens
gtttctgtactctcc

SEQ ID NO: 380863 - DNA, 15 bp, Homo sapiens
agtttctgtactctc

SEQ ID NO: 380864 - DNA, 15 bp, Homo sapiens
gagtttctgtactct

SEQ ID NO: 380865 - DNA, 15 bp, Homo sapiens
ggagtttctgtactc

SEQ ID NO: 380866 - DNA, 15 bp, Homo sapiens
tggagtttctgtact

SEQ ID NO: 380867 - DNA, 15 bp, Homo sapiens
ctggagtttctgtac

SEQ ID NO: 380868 - DNA, 15 bp, Homo sapiens
cctggagtttctgta

SEQ ID NO: 380869 - DNA, 15 bp, Homo sapiens
ccctggagtttctgt

SEQ ID NO: 380870 - DNA, 15 bp, Homo sapiens
gccctggagtttctg

SEQ ID NO: 380871 - DNA, 15 bp, Homo sapiens
ggccctggagtttct

SEQ ID NO: 380872 - DNA, 15 bp, Homo sapiens
aggccctggagtttc

SEQ ID NO: 380873 - DNA, 15 bp, Homo sapiens
caggccctggagttt

SEQ ID NO: 380874 - DNA, 15 bp, Homo sapiens
acaggccctggagtt

SEQ ID NO: 380875 - DNA, 15 bp, Homo sapiens
cacaggccctggagt

SEQ ID NO: 380876 - DNA, 15 bp, Homo sapiens
ccacaggccctggag

SEQ ID NO: 380877 - DNA, 15 bp, Homo sapiens
tccacaggccctgga

SEQ ID NO: 380878 - DNA, 15 bp, Homo sapiens
ttccacaggccctgg

SEQ ID NO: 380879 - DNA, 15 bp, Homo sapiens
cttccacaggccctg

SEQ ID NO: 380880 - DNA, 15 bp, Homo sapiens
acttccacaggccct

SEQ ID NO: 380881 - DNA, 15 bp, Homo sapiens
gacttccacaggccc

SEQ ID NO: 380882 - DNA, 15 bp, Homo sapiens
tgacttccacaggcc

SEQ ID NO: 380883 - DNA, 15 bp, Homo sapiens
ttgacttccacaggc

SEQ ID NO: 380884 - DNA, 15 bp, Homo sapiens
cttgacttccacagg

SEQ ID NO: 380885 - DNA, 15 bp, Homo sapiens
tcttgacttccacag

SEQ ID NO: 380886 - DNA, 15 bp, Homo sapiens
gtcttgacttccaca

SEQ ID NO: 380887 - DNA, 15 bp, Homo sapiens
tgtcttgacttccac

SEQ ID NO: 380888 - DNA, 15 bp, Homo sapiens
ctgtcttgacttcca

SEQ ID NO: 380889 - DNA, 15 bp, Homo sapiens
cctgtcttgacttcc

SEQ ID NO: 380890 - DNA, 15 bp, Homo sapiens
ccctgtcttgacttc

SEQ ID NO: 380891 - DNA, 15 bp, Homo sapiens
accctgtcttgactt

SEQ ID NO: 380892 - DNA, 15 bp, Homo sapiens
taccctgtcttgact

SEQ ID NO: 380893 - DNA, 15 bp, Homo sapiens
ttaccctgtcttgac

SEQ ID NO: 380894 - DNA, 15 bp, Homo sapiens
tttaccctgtcttga

SEQ ID NO: 380895 - DNA, 15 bp, Homo sapiens
ttttaccctgtcttg

SEQ ID NO: 380896 - DNA, 15 bp, Homo sapiens
tttttaccctgtctt

SEQ ID NO: 380897 - DNA, 15 bp, Homo sapiens
atttttaccctgtct

SEQ ID NO: 380898 - DNA, 15 bp, Homo sapiens
gatttttaccctgtc

SEQ ID NO: 380899 - DNA, 15 bp, Homo sapiens
tgatttttaccctgt

SEQ ID NO: 380900 - DNA, 15 bp, Homo sapiens
ttgatttttaccctg

SEQ ID NO: 380901 - DNA, 15 bp, Homo sapiens
attgatttttaccct

SEQ ID NO: 380902 - DNA, 15 bp, Homo sapiens
aattgatttttaccc

SEQ ID NO: 380903 - DNA, 15 bp, Homo sapiens
aaattgatttttacc

SEQ ID NO: 380904 - DNA, 15 bp, Homo sapiens
gaaattgatttttac

SEQ ID NO: 380905 - DNA, 15 bp, Homo sapiens
agaaattgattttta

SEQ ID NO: 380906 - DNA, 15 bp, Homo sapiens
gagaaattgattttt

SEQ ID NO: 380907 - DNA, 15 bp, Homo sapiens
tgagaaattgatttt

SEQ ID NO: 380908 - DNA, 15 bp, Homo sapiens
ttgagaaattgattt

SEQ ID NO: 380909 - DNA, 15 bp, Homo sapiens
attgagaaattgatt

SEQ ID NO: 380910 - DNA, 15 bp, Homo sapiens
gattgagaaattgat

SEQ ID NO: 380911 - DNA, 15 bp, Homo sapiens
tgattgagaaattga

SEQ ID NO: 380912 - DNA, 15 bp, Homo sapiens
ctgattgagaaattg

SEQ ID NO: 380913 - DNA, 15 bp, Homo sapiens
gctgattgagaaatt

SEQ ID NO: 380914 - DNA, 15 bp, Homo sapiens
agctgattgagaaat

SEQ ID NO: 380915 - DNA, 15 bp, Homo sapiens
aagctgattgagaaa

SEQ ID NO: 380916 - DNA, 15 bp, Homo sapiens
gaagctgattgagaa

SEQ ID NO: 380917 - DNA, 15 bp, Homo sapiens
agaagctgattgaga

SEQ ID NO: 380918 - DNA, 15 bp, Homo sapiens
aagaagctgattgag

SEQ ID NO: 380919 - DNA, 15 bp, Homo sapiens
aaagaagctgattga

SEQ ID NO: 380920 - DNA, 15 bp, Homo sapiens
gaaagaagctgattg

SEQ ID NO: 380921 - DNA, 15 bp, Homo sapiens
tgaaagaagctgatt

SEQ ID NO: 380922 - DNA, 15 bp, Homo sapiens
ctgaaagaagctgat

SEQ ID NO: 380923 - DNA, 15 bp, Homo sapiens
gctgaaagaagctga

SEQ ID NO: 380924 - DNA, 15 bp, Homo sapiens
ggctgaaagaagctg

SEQ ID NO: 380925 - DNA, 15 bp, Homo sapiens
gggctgaaagaagct

SEQ ID NO: 380926 - DNA, 15 bp, Homo sapiens
tgggctgaaagaagc

SEQ ID NO: 380927 - DNA, 15 bp, Homo sapiens
atgggctgaaagaag

SEQ ID NO: 380928 - DNA, 15 bp, Homo sapiens
gatgggctgaaagaa

SEQ ID NO: 380929 - DNA, 15 bp, Homo sapiens
ggatgggctgaaaga

SEQ ID NO: 380930 - DNA, 15 bp, Homo sapiens
gggatgggctgaaag

SEQ ID NO: 380931 - DNA, 15 bp, Homo sapiens
agggatgggctgaaa

SEQ ID NO: 380932 - DNA, 15 bp, Homo sapiens
cagggatgggctgaa

SEQ ID NO: 380933 - DNA, 15 bp, Homo sapiens
gcagggatgggctga

SEQ ID NO: 380934 - DNA, 15 bp, Homo sapiens
agcagggatgggctg

SEQ ID NO: 380935 - DNA, 15 bp, Homo sapiens
aagcagggatgggct

SEQ ID NO: 380936 - DNA, 15 bp, Homo sapiens
aaagcagggatgggc

SEQ ID NO: 380937 - DNA, 15 bp, Homo sapiens
caaagcagggatggg

SEQ ID NO: 380938 - DNA, 15 bp, Homo sapiens
acaaagcagggatgg

SEQ ID NO: 380939 - DNA, 15 bp, Homo sapiens
gacaaagcagggatg

SEQ ID NO: 380940 - DNA, 15 bp, Homo sapiens
tgacaaagcagggat

SEQ ID NO: 380941 - DNA, 15 bp, Homo sapiens
gtgacaaagcaggga

SEQ ID NO: 380942 - DNA, 15 bp, Homo sapiens
tgtgacaaagcaggg

SEQ ID NO: 380943 - DNA, 15 bp, Homo sapiens
ttgtgacaaagcagg

SEQ ID NO: 380944 - DNA, 15 bp, Homo sapiens
attgtgacaaagcag

SEQ ID NO: 380945 - DNA, 15 bp, Homo sapiens
tattgtgacaaagca

SEQ ID NO: 380946 - DNA, 15 bp, Homo sapiens
atattgtgacaaagc

SEQ ID NO: 380947 - DNA, 15 bp, Homo sapiens
catattgtgacaaag

SEQ ID NO: 380948 - DNA, 15 bp, Homo sapiens
tcatattgtgacaaa

SEQ ID NO: 380949 - DNA, 15 bp, Homo sapiens
atcatattgtgacaa

SEQ ID NO: 380950 - DNA, 15 bp, Homo sapiens
tatcatattgtgaca

SEQ ID NO: 380951 - DNA, 15 bp, Homo sapiens
ttatcatattgtgac

SEQ ID NO: 380952 - DNA, 15 bp, Homo sapiens
tttatcatattgtga

SEQ ID NO: 380953 - DNA, 15 bp, Homo sapiens
ctttatcatattgtg

SEQ ID NO: 380954 - DNA, 15 bp, Homo sapiens
tctttatcatattgt

SEQ ID NO: 380955 - DNA, 15 bp, Homo sapiens
ttctttatcatattg

SEQ ID NO: 380956 - DNA, 15 bp, Homo sapiens
cttctttatcatatt

SEQ ID NO: 380957 - DNA, 15 bp, Homo sapiens
acttctttatcatat

SEQ ID NO: 380958 - DNA, 15 bp, Homo sapiens
tacttctttatcata

SEQ ID NO: 380959 - DNA, 15 bp, Homo sapiens
ctacttctttatcat

SEQ ID NO: 380960 - DNA, 15 bp, Homo sapiens
gctacttctttatca

SEQ ID NO: 380961 - DNA, 15 bp, Homo sapiens
agctacttctttatc

SEQ ID NO: 380962 - DNA, 15 bp, Homo sapiens
cagctacttctttat

SEQ ID NO: 380963 - DNA, 15 bp, Homo sapiens
acagctacttcttta

SEQ ID NO: 380964 - DNA, 15 bp, Homo sapiens
cacagctacttcttt

SEQ ID NO: 380965 - DNA, 15 bp, Homo sapiens
ccacagctacttctt

SEQ ID NO: 380966 - DNA, 15 bp, Homo sapiens
cccacagctacttct

SEQ ID NO: 380967 - DNA, 15 bp, Homo sapiens
gcccacagctacttc

SEQ ID NO: 380968 - DNA, 15 bp, Homo sapiens
tgcccacagctactt

SEQ ID NO: 380969 - DNA, 15 bp, Homo sapiens
gtgcccacagctact

SEQ ID NO: 380970 - DNA, 15 bp, Homo sapiens
ggtgcccacagctac

SEQ ID NO: 380971 - DNA, 15 bp, Homo sapiens
aggtgcccacagcta

SEQ ID NO: 380972 - DNA, 15 bp, Homo sapiens
caggtgcccacagct

SEQ ID NO: 380973 - DNA, 15 bp, Homo sapiens
acaggtgcccacagc

SEQ ID NO: 380974 - DNA, 15 bp, Homo sapiens
gacaggtgcccacag

SEQ ID NO: 380975 - DNA, 15 bp, Homo sapiens
tgacaggtgcccaca

SEQ ID NO: 380976 - DNA, 15 bp, Homo sapiens
gtgacaggtgcccac

SEQ ID NO: 380977 - DNA, 15 bp, Homo sapiens
agtgacaggtgccca

SEQ ID NO: 380978 - DNA, 15 bp, Homo sapiens
tagtgacaggtgccc

SEQ ID NO: 380979 - DNA, 15 bp, Homo sapiens
gtagtgacaggtgcc

SEQ ID NO: 380980 - DNA, 15 bp, Homo sapiens
tgtagtgacaggtgc

SEQ ID NO: 380981 - DNA, 15 bp, Homo sapiens
gtgtagtgacaggtg

SEQ ID NO: 380982 - DNA, 15 bp, Homo sapiens
agtgtagtgacaggt

SEQ ID NO: 380983 - DNA, 15 bp, Homo sapiens
cagtgtagtgacagg

SEQ ID NO: 380984 - DNA, 15 bp, Homo sapiens
ccagtgtagtgacag

SEQ ID NO: 380985 - DNA, 15 bp, Homo sapiens
gccagtgtagtgaca

SEQ ID NO: 380986 - DNA, 15 bp, Homo sapiens
agccagtgtagtgac

SEQ ID NO: 380987 - DNA, 15 bp, Homo sapiens
cagccagtgtagtga

SEQ ID NO: 380988 - DNA, 15 bp, Homo sapiens
tcagccagtgtagtg

SEQ ID NO: 380989 - DNA, 15 bp, Homo sapiens
gtcagccagtgtagt

SEQ ID NO: 380990 - DNA, 15 bp, Homo sapiens
agtcagccagtgtag

SEQ ID NO: 380991 - DNA, 15 bp, Homo sapiens
cagtcagccagtgta

SEQ ID NO: 380992 - DNA, 15 bp, Homo sapiens
acagtcagccagtgt

SEQ ID NO: 380993 - DNA, 15 bp, Homo sapiens
gacagtcagccagtg

SEQ ID NO: 380994 - DNA, 15 bp, Homo sapiens
agacagtcagccagt

SEQ ID NO: 380995 - DNA, 15 bp, Homo sapiens
gagacagtcagccag

SEQ ID NO: 380996 - DNA, 15 bp, Homo sapiens
ggagacagtcagcca

SEQ ID NO: 380997 - DNA, 15 bp, Homo sapiens
gggagacagtcagcc

SEQ ID NO: 380998 - DNA, 15 bp, Homo sapiens
tgggagacagtcagc

SEQ ID NO: 380999 - DNA, 15 bp, Homo sapiens
atgggagacagtcag

SEQ ID NO: 381000 - DNA, 15 bp, Homo sapiens
catgggagacagtca

SEQ ID NO: 381001 - DNA, 15 bp, Homo sapiens
gcatgggagacagtc

SEQ ID NO: 381002 - DNA, 15 bp, Homo sapiens
tgcatgggagacagt

SEQ ID NO: 381003 - DNA, 15 bp, Homo sapiens
ttgcatgggagacag

SEQ ID NO: 381004 - DNA, 15 bp, Homo sapiens
cttgcatgggagaca

SEQ ID NO: 381005 - DNA, 15 bp, Homo sapiens
tcttgcatgggagac

SEQ ID NO: 381006 - DNA, 15 bp, Homo sapiens
atcttgcatgggaga

SEQ ID NO: 381007 - DNA, 15 bp, Homo sapiens
aatcttgcatgggag

SEQ ID NO: 381008 - DNA, 15 bp, Homo sapiens
caatcttgcatggga

SEQ ID NO: 381009 - DNA, 15 bp, Homo sapiens
gcaatcttgcatggg

SEQ ID NO: 381010 - DNA, 15 bp, Homo sapiens
tgcaatcttgcatgg

SEQ ID NO: 381011 - DNA, 15 bp, Homo sapiens
atgcaatcttgcatg

SEQ ID NO: 381012 - DNA, 15 bp, Homo sapiens
catgcaatcttgcat

SEQ ID NO: 381013 - DNA, 15 bp, Homo sapiens
gcatgcaatcttgca

SEQ ID NO: 381014 - DNA, 15 bp, Homo sapiens
ggcatgcaatcttgc

SEQ ID NO: 381015 - DNA, 15 bp, Homo sapiens
gggcatgcaatcttg

SEQ ID NO: 381016 - DNA, 15 bp, Homo sapiens
tgggcatgcaatctt

SEQ ID NO: 381017 - DNA, 15 bp, Homo sapiens
atgggcatgcaatct

SEQ ID NO: 381018 - DNA, 15 bp, Homo sapiens
aatgggcatgcaatc

SEQ ID NO: 381019 - DNA, 15 bp, Homo sapiens
caatgggcatgcaat

SEQ ID NO: 381020 - DNA, 15 bp, Homo sapiens
gcaatgggcatgcaa

SEQ ID NO: 381021 - DNA, 15 bp, Homo sapiens
tgcaatgggcatgca

SEQ ID NO: 381022 - DNA, 15 bp, Homo sapiens
ttgcaatgggcatgc

SEQ ID NO: 381023 - DNA, 15 bp, Homo sapiens
gttgcaatgggcatg

SEQ ID NO: 381024 - DNA, 15 bp, Homo sapiens
ggttgcaatgggcat

SEQ ID NO: 381025 - DNA, 15 bp, Homo sapiens
tggttgcaatgggca

SEQ ID NO: 381026 - DNA, 15 bp, Homo sapiens
atggttgcaatgggc

SEQ ID NO: 381027 - DNA, 15 bp, Homo sapiens
aatggttgcaatggg

SEQ ID NO: 381028 - DNA, 15 bp, Homo sapiens
caatggttgcaatgg

SEQ ID NO: 381029 - DNA, 15 bp, Homo sapiens
ccaatggttgcaatg

SEQ ID NO: 381030 - DNA, 15 bp, Homo sapiens
tccaatggttgcaat

SEQ ID NO: 381031 - DNA, 15 bp, Homo sapiens
ctccaatggttgcaa

SEQ ID NO: 381032 - DNA, 15 bp, Homo sapiens
cctccaatggttgca

SEQ ID NO: 381033 - DNA, 15 bp, Homo sapiens
acctccaatggttgc

SEQ ID NO: 381034 - DNA, 15 bp, Homo sapiens
cacctccaatggttg

SEQ ID NO: 381035 - DNA, 15 bp, Homo sapiens
tcacctccaatggtt

SEQ ID NO: 381036 - DNA, 15 bp, Homo sapiens
ctcacctccaatggt

SEQ ID NO: 381037 - DNA, 15 bp, Homo sapiens
tctcacctccaatgg

SEQ ID NO: 381038 - DNA, 15 bp, Homo sapiens
ctctcacctccaatg

SEQ ID NO: 381039 - DNA, 15 bp, Homo sapiens
cctctcacctccaat

SEQ ID NO: 381040 - DNA, 15 bp, Homo sapiens
ccctctcacctccaa

SEQ ID NO: 381041 - DNA, 15 bp, Homo sapiens
tccctctcacctcca

SEQ ID NO: 381042 - DNA, 15 bp, Homo sapiens
atccctctcacctcc

SEQ ID NO: 381043 - DNA, 15 bp, Homo sapiens
aatccctctcacctc

SEQ ID NO: 381044 - DNA, 15 bp, Homo sapiens
taatccctctcacct

SEQ ID NO: 381045 - DNA, 15 bp, Homo sapiens
ataatccctctcacc

SEQ ID NO: 381046 - DNA, 15 bp, Homo sapiens
gataatccctctcac

SEQ ID NO: 381047 - DNA, 15 bp, Homo sapiens
ggataatccctctca

SEQ ID NO: 381048 - DNA, 15 bp, Homo sapiens
cggataatccctctc

SEQ ID NO: 381049 - DNA, 15 bp, Homo sapiens
tcggataatccctct

SEQ ID NO: 381050 - DNA, 15 bp, Homo sapiens
ttcggataatccctc

SEQ ID NO: 381051 - DNA, 15 bp, Homo sapiens
tttcggataatccct

SEQ ID NO: 381052 - DNA, 15 bp, Homo sapiens
ctttcggataatccc

SEQ ID NO: 381053 - DNA, 15 bp, Homo sapiens
cctttcggataatcc

SEQ ID NO: 381054 - DNA, 15 bp, Homo sapiens
ccctttcggataatc

SEQ ID NO: 381055 - DNA, 15 bp, Homo sapiens
tccctttcggataat

SEQ ID NO: 381056 - DNA, 15 bp, Homo sapiens
atccctttcggataa

SEQ ID NO: 381057 - DNA, 15 bp, Homo sapiens
aatccctttcggata

SEQ ID NO: 381058 - DNA, 15 bp, Homo sapiens
taatccctttcggat

SEQ ID NO: 381059 - DNA, 15 bp, Homo sapiens
ctaatccctttcgga

SEQ ID NO: 381060 - DNA, 15 bp, Homo sapiens
actaatccctttcgg

SEQ ID NO: 381061 - DNA, 15 bp, Homo sapiens
cactaatccctttcg

SEQ ID NO: 381062 - DNA, 15 bp, Homo sapiens
tcactaatccctttc

SEQ ID NO: 381063 - DNA, 15 bp, Homo sapiens
ttcactaatcccttt

SEQ ID NO: 381064 - DNA, 15 bp, Homo sapiens
cttcactaatccctt

SEQ ID NO: 381065 - DNA, 15 bp, Homo sapiens
tcttcactaatccct

SEQ ID NO: 381066 - DNA, 15 bp, Homo sapiens
ttcttcactaatccc

SEQ ID NO: 381067 - DNA, 15 bp, Homo sapiens
attcttcactaatcc

SEQ ID NO: 381068 - DNA, 15 bp, Homo sapiens
gattcttcactaatc

SEQ ID NO: 381069 - DNA, 15 bp, Homo sapiens
agattcttcactaat

SEQ ID NO: 381070 - DNA, 15 bp, Homo sapiens
cagattcttcactaa

SEQ ID NO: 381071 - DNA, 15 bp, Homo sapiens
acagattcttcacta

SEQ ID NO: 381072 - DNA, 15 bp, Homo sapiens
gacagattcttcact

SEQ ID NO: 381073 - DNA, 15 bp, Homo sapiens
ggacagattcttcac

SEQ ID NO: 381074 - DNA, 15 bp, Homo sapiens
aggacagattcttca

SEQ ID NO: 381075 - DNA, 15 bp, Homo sapiens
gaggacagattcttc

SEQ ID NO: 381076 - DNA, 15 bp, Homo sapiens
tgaggacagattctt

SEQ ID NO: 381077 - DNA, 15 bp, Homo sapiens
ctgaggacagattct

SEQ ID NO: 381078 - DNA, 15 bp, Homo sapiens
cctgaggacagattc

SEQ ID NO: 381079 - DNA, 15 bp, Homo sapiens
ccctgaggacagatt

SEQ ID NO: 381080 - DNA, 15 bp, Homo sapiens
accctgaggacagat

SEQ ID NO: 381081 - DNA, 15 bp, Homo sapiens
caccctgaggacaga

SEQ ID NO: 381082 - DNA, 15 bp, Homo sapiens
acaccctgaggacag

SEQ ID NO: 381083 - DNA, 15 bp, Homo sapiens
aacaccctgaggaca

SEQ ID NO: 381084 - DNA, 15 bp, Homo sapiens
caacaccctgaggac

SEQ ID NO: 381085 - DNA, 15 bp, Homo sapiens
ccaacaccctgagga

SEQ ID NO: 381086 - DNA, 15 bp, Homo sapiens
gccaacaccctgagg

SEQ ID NO: 381087 - DNA, 15 bp, Homo sapiens
agccaacaccctgag

SEQ ID NO: 381088 - DNA, 15 bp, Homo sapiens
cagccaacaccctga

SEQ ID NO: 381089 - DNA, 15 bp, Homo sapiens
ccagccaacaccctg

SEQ ID NO: 381090 - DNA, 15 bp, Homo sapiens
tccagccaacaccct

SEQ ID NO: 381091 - DNA, 15 bp, Homo sapiens
gtccagccaacaccc

SEQ ID NO: 381092 - DNA, 15 bp, Homo sapiens
ggtccagccaacacc

SEQ ID NO: 381093 - DNA, 15 bp, Homo sapiens
tggtccagccaacac

SEQ ID NO: 381094 - DNA, 15 bp, Homo sapiens
ttggtccagccaaca

SEQ ID NO: 381095 - DNA, 15 bp, Homo sapiens
cttggtccagccaac

SEQ ID NO: 381096 - DNA, 15 bp, Homo sapiens
ccttggtccagccaa

SEQ ID NO: 381097 - DNA, 15 bp, Homo sapiens
cccttggtccagcca

SEQ ID NO: 381098 - DNA, 15 bp, Homo sapiens
gcccttggtccagcc

SEQ ID NO: 381099 - DNA, 15 bp, Homo sapiens
ggcccttggtccagc

SEQ ID NO: 381100 - DNA, 15 bp, Homo sapiens
tggcccttggtccag

SEQ ID NO: 381101 - DNA, 15 bp, Homo sapiens
gtggcccttggtcca

SEQ ID NO: 381102 - DNA, 15 bp, Homo sapiens
tgtggcccttggtcc

SEQ ID NO: 381103 - DNA, 15 bp, Homo sapiens
ctgtggcccttggtc

SEQ ID NO: 381104 - DNA, 15 bp, Homo sapiens
tctgtggcccttggt

SEQ ID NO: 381105 - DNA, 15 bp, Homo sapiens
ctctgtggcccttgg

SEQ ID NO: 381106 - DNA, 15 bp, Homo sapiens
cctctgtggcccttg

SEQ ID NO: 381107 - DNA, 15 bp, Homo sapiens
tcctctgtggccctt

SEQ ID NO: 381108 - DNA, 15 bp, Homo sapiens
ctcctctgtggccct

SEQ ID NO: 381109 - DNA, 15 bp, Homo sapiens
cctcctctgtggccc

SEQ ID NO: 381110 - DNA, 15 bp, Homo sapiens
ccctcctctgtggcc

SEQ ID NO: 381111 - DNA, 15 bp, Homo sapiens
gccctcctctgtggc

SEQ ID NO: 381112 - DNA, 15 bp, Homo sapiens
agccctcctctgtgg

SEQ ID NO: 381113 - DNA, 15 bp, Homo sapiens
cagccctcctctgtg

SEQ ID NO: 381114 - DNA, 15 bp, Homo sapiens
ccagccctcctctgt

SEQ ID NO: 381115 - DNA, 15 bp, Homo sapiens
cccagccctcctctg

SEQ ID NO: 381116 - DNA, 15 bp, Homo sapiens
tcccagccctcctct

SEQ ID NO: 381117 - DNA, 15 bp, Homo sapiens
ctcccagccctcctc

SEQ ID NO: 381118 - DNA, 15 bp, Homo sapiens
tctcccagccctcct

SEQ ID NO: 381119 - DNA, 15 bp, Homo sapiens
ctctcccagccctcc

SEQ ID NO: 381120 - DNA, 15 bp, Homo sapiens
gctctcccagccctc

SEQ ID NO: 381121 - DNA, 15 bp, Homo sapiens
tgctctcccagccct

SEQ ID NO: 381122 - DNA, 15 bp, Homo sapiens
ctgctctcccagccc

SEQ ID NO: 381123 - DNA, 15 bp, Homo sapiens
actgctctcccagcc

SEQ ID NO: 381124 - DNA, 15 bp, Homo sapiens
aactgctctcccagc

SEQ ID NO: 381125 - DNA, 15 bp, Homo sapiens
aaactgctctcccag

SEQ ID NO: 381126 - DNA, 15 bp, Homo sapiens
caaactgctctccca

SEQ ID NO: 381127 - DNA, 15 bp, Homo sapiens
gcaaactgctctccc

SEQ ID NO: 381128 - DNA, 15 bp, Homo sapiens
agcaaactgctctcc

SEQ ID NO: 381129 - DNA, 15 bp, Homo sapiens
gagcaaactgctctc

SEQ ID NO: 381130 - DNA, 15 bp, Homo sapiens
tgagcaaactgctct

SEQ ID NO: 381131 - DNA, 15 bp, Homo sapiens
ttgagcaaactgctc

SEQ ID NO: 381132 - DNA, 15 bp, Homo sapiens
tttgagcaaactgct

SEQ ID NO: 381133 - DNA, 15 bp, Homo sapiens
ctttgagcaaactgc

SEQ ID NO: 381134 - DNA, 15 bp, Homo sapiens
tctttgagcaaactg

SEQ ID NO: 381135 - DNA, 15 bp, Homo sapiens
ttctttgagcaaact

SEQ ID NO: 381136 - DNA, 15 bp, Homo sapiens
attctttgagcaaac

SEQ ID NO: 381137 - DNA, 15 bp, Homo sapiens
cattctttgagcaaa

SEQ ID NO: 381138 - DNA, 15 bp, Homo sapiens
ccattctttgagcaa

SEQ ID NO: 381139 - DNA, 15 bp, Homo sapiens
gccattctttgagca

SEQ ID NO: 381140 - DNA, 15 bp, Homo sapiens
tgccattctttgagc

SEQ ID NO: 381141 - DNA, 15 bp, Homo sapiens
ctgccattctttgag

SEQ ID NO: 381142 - DNA, 15 bp, Homo sapiens
gctgccattctttga

SEQ ID NO: 381143 - DNA, 15 bp, Homo sapiens
tgctgccattctttg

SEQ ID NO: 381144 - DNA, 15 bp, Homo sapiens
atgctgccattcttt

SEQ ID NO: 381145 - DNA, 15 bp, Homo sapiens
gatgctgccattctt

SEQ ID NO: 381146 - DNA, 15 bp, Homo sapiens
tgatgctgccattct

SEQ ID NO: 381147 - DNA, 15 bp, Homo sapiens
ctgatgctgccattc

SEQ ID NO: 381148 - DNA, 15 bp, Homo sapiens
tctgatgctgccatt

SEQ ID NO: 381149 - DNA, 15 bp, Homo sapiens
gtctgatgctgccat

SEQ ID NO: 381150 - DNA, 15 bp, Homo sapiens
agtctgatgctgcca

SEQ ID NO: 381151 - DNA, 15 bp, Homo sapiens
aagtctgatgctgcc

SEQ ID NO: 381152 - DNA, 15 bp, Homo sapiens
aaagtctgatgctgc

SEQ ID NO: 381153 - DNA, 15 bp, Homo sapiens
gaaagtctgatgctg

SEQ ID NO: 381154 - DNA, 15 bp, Homo sapiens
tgaaagtctgatgct

SEQ ID NO: 381155 - DNA, 15 bp, Homo sapiens
ctgaaagtctgatgc

SEQ ID NO: 381156 - DNA, 15 bp, Homo sapiens
actgaaagtctgatg

SEQ ID NO: 381157 - DNA, 15 bp, Homo sapiens
aactgaaagtctgat

SEQ ID NO: 381158 - DNA, 15 bp, Homo sapiens
taactgaaagtctga

SEQ ID NO: 381159 - DNA, 15 bp, Homo sapiens
ttaactgaaagtctg

SEQ ID NO: 381160 - DNA, 15 bp, Homo sapiens
tttaactgaaagtct

SEQ ID NO: 381161 - DNA, 15 bp, Homo sapiens
ttttaactgaaagtc

SEQ ID NO: 381162 - DNA, 15 bp, Homo sapiens
cttttaactgaaagt

SEQ ID NO: 381163 - DNA, 15 bp, Homo sapiens
tcttttaactgaaag

SEQ ID NO: 381164 - DNA, 15 bp, Homo sapiens
ctcttttaactgaaa

SEQ ID NO: 381165 - DNA, 15 bp, Homo sapiens
tctcttttaactgaa

SEQ ID NO: 381166 - DNA, 15 bp, Homo sapiens
gtctcttttaactga

SEQ ID NO: 381167 - DNA, 15 bp, Homo sapiens
tgtctcttttaactg

SEQ ID NO: 381168 - DNA, 15 bp, Homo sapiens
ctgtctcttttaact

SEQ ID NO: 381169 - DNA, 15 bp, Homo sapiens
tctgtctcttttaac

SEQ ID NO: 381170 - DNA, 15 bp, Homo sapiens
ctctgtctcttttaa

SEQ ID NO: 381171 - DNA, 15 bp, Homo sapiens
actctgtctctttta

SEQ ID NO: 381172 - DNA, 15 bp, Homo sapiens
gactctgtctctttt

SEQ ID NO: 381173 - DNA, 15 bp, Homo sapiens
tgactctgtctcttt

SEQ ID NO: 381174 - DNA, 15 bp, Homo sapiens
atgactctgtctctt

SEQ ID NO: 381175 - DNA, 15 bp, Homo sapiens
catgactctgtctct

SEQ ID NO: 381176 - DNA, 15 bp, Homo sapiens
ccatgactctgtctc

SEQ ID NO: 381177 - DNA, 15 bp, Homo sapiens
accatgactctgtct

SEQ ID NO: 381178 - DNA, 15 bp, Homo sapiens
taccatgactctgtc

SEQ ID NO: 381179 - DNA, 15 bp, Homo sapiens
ctaccatgactctgt

SEQ ID NO: 381180 - DNA, 15 bp, Homo sapiens
gctaccatgactctg

SEQ ID NO: 381181 - DNA, 15 bp, Homo sapiens
ggctaccatgactct

SEQ ID NO: 381182 - DNA, 15 bp, Homo sapiens
tggctaccatgactc

SEQ ID NO: 381183 - DNA, 15 bp, Homo sapiens
ttggctaccatgact

SEQ ID NO: 381184 - DNA, 15 bp, Homo sapiens
attggctaccatgac

SEQ ID NO: 381185 - DNA, 15 bp, Homo sapiens
aattggctaccatga

SEQ ID NO: 381186 - DNA, 15 bp, Homo sapiens
caattggctaccatg

SEQ ID NO: 381187 - DNA, 15 bp, Homo sapiens
gcaattggctaccat

SEQ ID NO: 381188 - DNA, 15 bp, Homo sapiens
tgcaattggctacca

SEQ ID NO: 381189 - DNA, 15 bp, Homo sapiens
ttgcaattggctacc

SEQ ID NO: 381190 - DNA, 15 bp, Homo sapiens
tttgcaattggctac

SEQ ID NO: 381191 - DNA, 15 bp, Homo sapiens
ctttgcaattggcta

SEQ ID NO: 381192 - DNA, 15 bp, Homo sapiens
tctttgcaattggct

SEQ ID NO: 381193 - DNA, 15 bp, Homo sapiens
ttctttgcaattggc

SEQ ID NO: 381194 - DNA, 15 bp, Homo sapiens
cttctttgcaattgg

SEQ ID NO: 381195 - DNA, 15 bp, Homo sapiens
acttctttgcaattg

SEQ ID NO: 381196 - DNA, 15 bp, Homo sapiens
cacttctttgcaatt

SEQ ID NO: 381197 - DNA, 15 bp, Homo sapiens
tcacttctttgcaat

SEQ ID NO: 381198 - DNA, 15 bp, Homo sapiens
ctcacttctttgcaa

SEQ ID NO: 381199 - DNA, 15 bp, Homo sapiens
tctcacttctttgca

SEQ ID NO: 381200 - DNA, 15 bp, Homo sapiens
ttctcacttctttgc

SEQ ID NO: 381201 - DNA, 15 bp, Homo sapiens
cttctcacttctttg

SEQ ID NO: 381202 - DNA, 15 bp, Homo sapiens
ccttctcacttcttt

SEQ ID NO: 381203 - DNA, 15 bp, Homo sapiens
accttctcacttctt

SEQ ID NO: 381204 - DNA, 15 bp, Homo sapiens
aaccttctcacttct

SEQ ID NO: 381205 - DNA, 15 bp, Homo sapiens
aaaccttctcacttc

SEQ ID NO: 381206 - DNA, 15 bp, Homo sapiens
aaaaccttctcactt

SEQ ID NO: 381207 - DNA, 15 bp, Homo sapiens
aaaaaccttctcact

SEQ ID NO: 381208 - DNA, 15 bp, Homo sapiens
gaaaaaccttctcac

SEQ ID NO: 381209 - DNA, 15 bp, Homo sapiens
tgaaaaaccttctca

SEQ ID NO: 381210 - DNA, 15 bp, Homo sapiens
atgaaaaaccttctc

SEQ ID NO: 381211 - DNA, 15 bp, Homo sapiens
tatgaaaaaccttct

SEQ ID NO: 381212 - DNA, 15 bp, Homo sapiens
ttatgaaaaaccttc

SEQ ID NO: 381213 - DNA, 15 bp, Homo sapiens
tttatgaaaaacctt

SEQ ID NO: 381214 - DNA, 15 bp, Homo sapiens
gtttatgaaaaacct

SEQ ID NO: 381215 - DNA, 15 bp, Homo sapiens
cgtttatgaaaaacc

SEQ ID NO: 381216 - DNA, 15 bp, Homo sapiens
ccgtttatgaaaaac

SEQ ID NO: 381217 - DNA, 15 bp, Homo sapiens
accgtttatgaaaaa

SEQ ID NO: 381218 - DNA, 15 bp, Homo sapiens
taccgtttatgaaaa

SEQ ID NO: 381219 - DNA, 15 bp, Homo sapiens
ttaccgtttatgaaa

SEQ ID NO: 381220 - DNA, 15 bp, Homo sapiens
attaccgtttatgaa

SEQ ID NO: 381221 - DNA, 15 bp, Homo sapiens
aattaccgtttatga

SEQ ID NO: 381222 - DNA, 15 bp, Homo sapiens
caattaccgtttatg

SEQ ID NO: 381223 - DNA, 15 bp, Homo sapiens
gcaattaccgtttat

SEQ ID NO: 381224 - DNA, 15 bp, Homo sapiens
agcaattaccgttta

SEQ ID NO: 381225 - DNA, 15 bp, Homo sapiens
aagcaattaccgttt

SEQ ID NO: 381226 - DNA, 15 bp, Homo sapiens
aaagcaattaccgtt

SEQ ID NO: 381227 - DNA, 15 bp, Homo sapiens
aaaagcaattaccgt

SEQ ID NO: 381228 - DNA, 15 bp, Homo sapiens
caaaagcaattaccg

SEQ ID NO: 381229 - DNA, 15 bp, Homo sapiens
acaaaagcaattacc

SEQ ID NO: 381230 - DNA, 15 bp, Homo sapiens
aacaaaagcaattac

SEQ ID NO: 381231 - DNA, 15 bp, Homo sapiens
gaacaaaagcaatta

SEQ ID NO: 381232 - DNA, 15 bp, Homo sapiens
agaacaaaagcaatt

SEQ ID NO: 381233 - DNA, 15 bp, Homo sapiens
cagaacaaaagcaat

SEQ ID NO: 381234 - DNA, 15 bp, Homo sapiens
ccagaacaaaagcaa

SEQ ID NO: 381235 - DNA, 15 bp, Homo sapiens
accagaacaaaagca

SEQ ID NO: 381236 - DNA, 15 bp, Homo sapiens
taccagaacaaaagc

SEQ ID NO: 381237 - DNA, 15 bp, Homo sapiens
gtaccagaacaaaag

SEQ ID NO: 381238 - DNA, 15 bp, Homo sapiens
tgtaccagaacaaaa

SEQ ID NO: 381239 - DNA, 15 bp, Homo sapiens
ttgtaccagaacaaa

SEQ ID NO: 381240 - DNA, 15 bp, Homo sapiens
tttgtaccagaacaa

SEQ ID NO: 381241 - DNA, 15 bp, Homo sapiens
atttgtaccagaaca

SEQ ID NO: 381242 - DNA, 15 bp, Homo sapiens
tatttgtaccagaac

SEQ ID NO: 381243 - DNA, 15 bp, Homo sapiens
ttatttgtaccagaa

SEQ ID NO: 381244 - DNA, 15 bp, Homo sapiens
attatttgtaccaga

SEQ ID NO: 381245 - DNA, 15 bp, Homo sapiens
aattatttgtaccag

SEQ ID NO: 381246 - DNA, 15 bp, Homo sapiens
aaattatttgtacca

SEQ ID NO: 381247 - DNA, 15 bp, Homo sapiens
caaattatttgtacc

SEQ ID NO: 381248 - DNA, 15 bp, Homo sapiens
acaaattatttgtac

SEQ ID NO: 381249 - DNA, 15 bp, Homo sapiens
tacaaattatttgta

SEQ ID NO: 381250 - DNA, 15 bp, Homo sapiens
atacaaattatttgt

SEQ ID NO: 381251 - DNA, 15 bp, Homo sapiens
gatacaaattatttg

SEQ ID NO: 381252 - DNA, 15 bp, Homo sapiens
agatacaaattattt

SEQ ID NO: 381253 - DNA, 15 bp, Homo sapiens
gagatacaaattatt

SEQ ID NO: 381254 - DNA, 15 bp, Homo sapiens
agagatacaaattat

SEQ ID NO: 381255 - DNA, 15 bp, Homo sapiens
tagagatacaaatta

SEQ ID NO: 381256 - DNA, 15 bp, Homo sapiens
atagagatacaaatt

SEQ ID NO: 381257 - DNA, 15 bp, Homo sapiens
catagagatacaaat

SEQ ID NO: 381258 - DNA, 15 bp, Homo sapiens
tcatagagatacaaa

SEQ ID NO: 381259 - DNA, 15 bp, Homo sapiens
ttcatagagatacaa

SEQ ID NO: 381260 - DNA, 15 bp, Homo sapiens
tttcatagagataca

SEQ ID NO: 381261 - DNA, 15 bp, Homo sapiens
atttcatagagatac

SEQ ID NO: 381262 - DNA, 15 bp, Homo sapiens
tatttcatagagata

SEQ ID NO: 381263 - DNA, 15 bp, Homo sapiens
ttatttcatagagat

SEQ ID NO: 381264 - DNA, 15 bp, Homo sapiens
cttatttcatagaga

SEQ ID NO: 381265 - DNA, 15 bp, Homo sapiens
gcttatttcatagag

SEQ ID NO: 381266 - DNA, 15 bp, Homo sapiens
tgcttatttcataga

SEQ ID NO: 381267 - DNA, 15 bp, Homo sapiens
atgcttatttcatag

SEQ ID NO: 381268 - DNA, 15 bp, Homo sapiens
tatgcttatttcata

SEQ ID NO: 381269 - DNA, 15 bp, Homo sapiens
gtatgcttatttcat

SEQ ID NO: 381270 - DNA, 15 bp, Homo sapiens
agtatgcttatttca

SEQ ID NO: 381271 - DNA, 15 bp, Homo sapiens
aagtatgcttatttc

SEQ ID NO: 381272 - DNA, 15 bp, Homo sapiens
aaagtatgcttattt

SEQ ID NO: 381273 - DNA, 15 bp, Homo sapiens
caaagtatgcttatt

SEQ ID NO: 381274 - DNA, 15 bp, Homo sapiens
gcaaagtatgcttat

SEQ ID NO: 381275 - DNA, 15 bp, Homo sapiens
agcaaagtatgctta

SEQ ID NO: 381276 - DNA, 15 bp, Homo sapiens
gagcaaagtatgctt

SEQ ID NO: 381277 - DNA, 15 bp, Homo sapiens
tgagcaaagtatgct

SEQ ID NO: 381278 - DNA, 15 bp, Homo sapiens
gtgagcaaagtatgc

SEQ ID NO: 381279 - DNA, 15 bp, Homo sapiens
tgtgagcaaagtatg

SEQ ID NO: 381280 - DNA, 15 bp, Homo sapiens
ctgtgagcaaagtat

SEQ ID NO: 381281 - DNA, 15 bp, Homo sapiens
tctgtgagcaaagta

SEQ ID NO: 381282 - DNA, 15 bp, Homo sapiens
ctctgtgagcaaagt

SEQ ID NO: 381283 - DNA, 15 bp, Homo sapiens
tctctgtgagcaaag

SEQ ID NO: 381284 - DNA, 15 bp, Homo sapiens
ctctctgtgagcaaa

SEQ ID NO: 381285 - DNA, 15 bp, Homo sapiens
cctctctgtgagcaa

SEQ ID NO: 381286 - DNA, 15 bp, Homo sapiens
tcctctctgtgagca

SEQ ID NO: 381287 - DNA, 15 bp, Homo sapiens
ctcctctctgtgagc

SEQ ID NO: 381288 - DNA, 15 bp, Homo sapiens
tctcctctctgtgag

SEQ ID NO: 381289 - DNA, 15 bp, Homo sapiens
ctctcctctctgtga

SEQ ID NO: 381290 - DNA, 15 bp, Homo sapiens
cctctcctctctgtg

SEQ ID NO: 381291 - DNA, 15 bp, Homo sapiens
tcctctcctctctgt

SEQ ID NO: 381292 - DNA, 15 bp, Homo sapiens
ctcctctcctctctg

SEQ ID NO: 381293 - DNA, 15 bp, Homo sapiens
cctcctctcctctct

SEQ ID NO: 381294 - DNA, 15 bp, Homo sapiens
acctcctctcctctc

SEQ ID NO: 381295 - DNA, 15 bp, Homo sapiens
tacctcctctcctct

SEQ ID NO: 381296 - DNA, 15 bp, Homo sapiens
ctacctcctctcctc

SEQ ID NO: 381297 - DNA, 15 bp, Homo sapiens
actacctcctctcct

SEQ ID NO: 381298 - DNA, 15 bp, Homo sapiens
tactacctcctctcc

SEQ ID NO: 381299 - DNA, 15 bp, Homo sapiens
atactacctcctctc

SEQ ID NO: 381300 - DNA, 15 bp, Homo sapiens
catactacctcctct

SEQ ID NO: 381301 - DNA, 15 bp, Homo sapiens
acatactacctcctc

SEQ ID NO: 381302 - DNA, 15 bp, Homo sapiens
cacatactacctcct

SEQ ID NO: 381303 - DNA, 15 bp, Homo sapiens
acacatactacctcc

SEQ ID NO: 381304 - DNA, 15 bp, Homo sapiens
cacacatactacctc

SEQ ID NO: 381305 - DNA, 15 bp, Homo sapiens
ccacacatactacct

SEQ ID NO: 381306 - DNA, 15 bp, Homo sapiens
cccacacatactacc

SEQ ID NO: 381307 - DNA, 15 bp, Homo sapiens
acccacacatactac

SEQ ID NO: 381308 - DNA, 15 bp, Homo sapiens
cacccacacatacta

SEQ ID NO: 381309 - DNA, 15 bp, Homo sapiens
ccacccacacatact

SEQ ID NO: 381310 - DNA, 15 bp, Homo sapiens
cccacccacacatac

SEQ ID NO: 381311 - DNA, 15 bp, Homo sapiens
ccccacccacacata

SEQ ID NO: 381312 - DNA, 15 bp, Homo sapiens
tccccacccacacat

SEQ ID NO: 381313 - DNA, 15 bp, Homo sapiens
gtccccacccacaca

SEQ ID NO: 381314 - DNA, 15 bp, Homo sapiens
cgtccccacccacac

SEQ ID NO: 381315 - DNA, 15 bp, Homo sapiens
ccgtccccacccaca

SEQ ID NO: 381316 - DNA, 15 bp, Homo sapiens
tccgtccccacccac

SEQ ID NO: 381317 - DNA, 15 bp, Homo sapiens
ctccgtccccaccca

SEQ ID NO: 381318 - DNA, 15 bp, Homo sapiens
cctccgtccccaccc

SEQ ID NO: 381319 - DNA, 15 bp, Homo sapiens
tcctccgtccccacc

SEQ ID NO: 381320 - DNA, 15 bp, Homo sapiens
ctcctccgtccccac

SEQ ID NO: 381321 - DNA, 15 bp, Homo sapiens
cctcctccgtcccca

SEQ ID NO: 381322 - DNA, 15 bp, Homo sapiens
gcctcctccgtcccc

SEQ ID NO: 381323 - DNA, 15 bp, Homo sapiens
tgcctcctccgtccc

SEQ ID NO: 381324 - DNA, 15 bp, Homo sapiens
atgcctcctccgtcc

SEQ ID NO: 381325 - DNA, 15 bp, Homo sapiens
gatgcctcctccgtc

SEQ ID NO: 381326 - DNA, 15 bp, Homo sapiens
tgatgcctcctccgt

SEQ ID NO: 381327 - DNA, 15 bp, Homo sapiens
ctgatgcctcctccg

SEQ ID NO: 381328 - DNA, 15 bp, Homo sapiens
cctgatgcctcctcc

SEQ ID NO: 381329 - DNA, 15 bp, Homo sapiens
ccctgatgcctcctc

SEQ ID NO: 381330 - DNA, 15 bp, Homo sapiens
accctgatgcctcct

SEQ ID NO: 381331 - DNA, 15 bp, Homo sapiens
aaccctgatgcctcc

SEQ ID NO: 381332 - DNA, 15 bp, Homo sapiens
aaaccctgatgcctc

SEQ ID NO: 381333 - DNA, 15 bp, Homo sapiens
caaaccctgatgcct

SEQ ID NO: 381334 - DNA, 15 bp, Homo sapiens
gcaaaccctgatgcc

SEQ ID NO: 381335 - DNA, 15 bp, Homo sapiens
agcaaaccctgatgc

SEQ ID NO: 381336 - DNA, 15 bp, Homo sapiens
cagcaaaccctgatg

SEQ ID NO: 381337 - DNA, 15 bp, Homo sapiens
ccagcaaaccctgat

SEQ ID NO: 381338 - DNA, 15 bp, Homo sapiens
cccagcaaaccctga

SEQ ID NO: 381339 - DNA, 15 bp, Homo sapiens
gcccagcaaaccctg

SEQ ID NO: 381340 - DNA, 15 bp, Homo sapiens
tgcccagcaaaccct

SEQ ID NO: 381341 - DNA, 15 bp, Homo sapiens
ctgcccagcaaaccc

SEQ ID NO: 381342 - DNA, 15 bp, Homo sapiens
tctgcccagcaaacc

SEQ ID NO: 381343 - DNA, 15 bp, Homo sapiens
ctctgcccagcaaac

SEQ ID NO: 381344 - DNA, 15 bp, Homo sapiens
cctctgcccagcaaa

SEQ ID NO: 381345 - DNA, 15 bp, Homo sapiens
tcctctgcccagcaa

SEQ ID NO: 381346 - DNA, 15 bp, Homo sapiens
ttcctctgcccagca

SEQ ID NO: 381347 - DNA, 15 bp, Homo sapiens
cttcctctgcccagc

SEQ ID NO: 381348 - DNA, 15 bp, Homo sapiens
acttcctctgcccag

SEQ ID NO: 381349 - DNA, 15 bp, Homo sapiens
cacttcctctgccca

SEQ ID NO: 381350 - DNA, 15 bp, Homo sapiens
acacttcctctgccc

SEQ ID NO: 381351 - DNA, 15 bp, Homo sapiens
cacacttcctctgcc

SEQ ID NO: 381352 - DNA, 15 bp, Homo sapiens
gcacacttcctctgc

SEQ ID NO: 381353 - DNA, 15 bp, Homo sapiens
ggcacacttcctctg

SEQ ID NO: 381354 - DNA, 15 bp, Homo sapiens
tggcacacttcctct

SEQ ID NO: 381355 - DNA, 15 bp, Homo sapiens
ctggcacacttcctc

SEQ ID NO: 381356 - DNA, 15 bp, Homo sapiens
cctggcacacttcct

SEQ ID NO: 381357 - DNA, 15 bp, Homo sapiens
gcctggcacacttcc

SEQ ID NO: 381358 - DNA, 15 bp, Homo sapiens
agcctggcacacttc

SEQ ID NO: 381359 - DNA, 15 bp, Homo sapiens
cagcctggcacactt

SEQ ID NO: 381360 - DNA, 15 bp, Homo sapiens
gcagcctggcacact

SEQ ID NO: 381361 - DNA, 15 bp, Homo sapiens
ggcagcctggcacac

SEQ ID NO: 381362 - DNA, 15 bp, Homo sapiens
aggcagcctggcaca

SEQ ID NO: 381363 - DNA, 15 bp, Homo sapiens
taggcagcctggcac

SEQ ID NO: 381364 - DNA, 15 bp, Homo sapiens
ataggcagcctggca

SEQ ID NO: 381365 - DNA, 15 bp, Homo sapiens
gataggcagcctggc

SEQ ID NO: 381366 - DNA, 15 bp, Homo sapiens
tgataggcagcctgg

SEQ ID NO: 381367 - DNA, 15 bp, Homo sapiens
gtgataggcagcctg

SEQ ID NO: 381368 - DNA, 15 bp, Homo sapiens
tgtgataggcagcct

SEQ ID NO: 381369 - DNA, 15 bp, Homo sapiens
ttgtgataggcagcc

SEQ ID NO: 381370 - DNA, 15 bp, Homo sapiens
cttgtgataggcagc

SEQ ID NO: 381371 - DNA, 15 bp, Homo sapiens
gcttgtgataggcag

SEQ ID NO: 381372 - DNA, 15 bp, Homo sapiens
cgcttgtgataggca

SEQ ID NO: 381373 - DNA, 15 bp, Homo sapiens
gcgcttgtgataggc

SEQ ID NO: 381374 - DNA, 15 bp, Homo sapiens
cgcgcttgtgatagg

SEQ ID NO: 381375 - DNA, 15 bp, Homo sapiens
ccgcgcttgtgatag

SEQ ID NO: 381376 - DNA, 15 bp, Homo sapiens
cccgcgcttgtgata

SEQ ID NO: 381377 - DNA, 15 bp, Homo sapiens
tcccgcgcttgtgat

SEQ ID NO: 381378 - DNA, 15 bp, Homo sapiens
gtcccgcgcttgtga

SEQ ID NO: 381379 - DNA, 15 bp, Homo sapiens
tgtcccgcgcttgtg

SEQ ID NO: 381380 - DNA, 15 bp, Homo sapiens
ctgtcccgcgcttgt

SEQ ID NO: 381381 - DNA, 15 bp, Homo sapiens
cctgtcccgcgcttg

SEQ ID NO: 381382 - DNA, 15 bp, Homo sapiens
tcctgtcccgcgctt

SEQ ID NO: 381383 - DNA, 15 bp, Homo sapiens
ttcctgtcccgcgct

SEQ ID NO: 381384 - DNA, 15 bp, Homo sapiens
tttcctgtcccgcgc

SEQ ID NO: 381385 - DNA, 15 bp, Homo sapiens
gtttcctgtcccgcg

SEQ ID NO: 381386 - DNA, 15 bp, Homo sapiens
ggtttcctgtcccgc

SEQ ID NO: 381387 - DNA, 15 bp, Homo sapiens
tggtttcctgtcccg

SEQ ID NO: 381388 - DNA, 15 bp, Homo sapiens
gtggtttcctgtccc

SEQ ID NO: 381389 - DNA, 15 bp, Homo sapiens
tgtggtttcctgtcc

SEQ ID NO: 381390 - DNA, 15 bp, Homo sapiens
gtgtggtttcctgtc

SEQ ID NO: 381391 - DNA, 15 bp, Homo sapiens
tgtgtggtttcctgt

SEQ ID NO: 381392 - DNA, 15 bp, Homo sapiens
ctgtgtggtttcctg

SEQ ID NO: 381393 - DNA, 15 bp, Homo sapiens
gctgtgtggtttcct

SEQ ID NO: 381394 - DNA, 15 bp, Homo sapiens
tgctgtgtggtttcc

SEQ ID NO: 381395 - DNA, 15 bp, Homo sapiens
atgctgtgtggtttc

SEQ ID NO: 381396 - DNA, 15 bp, Homo sapiens
aatgctgtgtggttt

SEQ ID NO: 381397 - DNA, 15 bp, Homo sapiens
taatgctgtgtggtt

SEQ ID NO: 381398 - DNA, 15 bp, Homo sapiens
gtaatgctgtgtggt

SEQ ID NO: 381399 - DNA, 15 bp, Homo sapiens
ggtaatgctgtgtgg

SEQ ID NO: 381400 - DNA, 15 bp, Homo sapiens
gggtaatgctgtgtg

SEQ ID NO: 381401 - DNA, 15 bp, Homo sapiens
agggtaatgctgtgt

SEQ ID NO: 381402 - DNA, 15 bp, Homo sapiens
aagggtaatgctgtg

SEQ ID NO: 381403 - DNA, 15 bp, Homo sapiens
caagggtaatgctgt

SEQ ID NO: 381404 - DNA, 15 bp, Homo sapiens
tcaagggtaatgctg

SEQ ID NO: 381405 - DNA, 15 bp, Homo sapiens
ttcaagggtaatgct

SEQ ID NO: 381406 - DNA, 15 bp, Homo sapiens
cttcaagggtaatgc

SEQ ID NO: 381407 - DNA, 15 bp, Homo sapiens
ccttcaagggtaatg

SEQ ID NO: 381408 - DNA, 15 bp, Homo sapiens
accttcaagggtaat

SEQ ID NO: 381409 - DNA, 15 bp, Homo sapiens
gaccttcaagggtaa

SEQ ID NO: 381410 - DNA, 15 bp, Homo sapiens
cgaccttcaagggta

SEQ ID NO: 381411 - DNA, 15 bp, Homo sapiens
tcgaccttcaagggt

SEQ ID NO: 381412 - DNA, 15 bp, Homo sapiens
ttcgaccttcaaggg

SEQ ID NO: 381413 - DNA, 15 bp, Homo sapiens
cttcgaccttcaagg

SEQ ID NO: 381414 - DNA, 15 bp, Homo sapiens
gcttcgaccttcaag

SEQ ID NO: 381415 - DNA, 15 bp, Homo sapiens
agcttcgaccttcaa

SEQ ID NO: 381416 - DNA, 15 bp, Homo sapiens
gagcttcgaccttca

SEQ ID NO: 381417 - DNA, 15 bp, Homo sapiens
ggagcttcgaccttc

SEQ ID NO: 381418 - DNA, 15 bp, Homo sapiens
aggagcttcgacctt

SEQ ID NO: 381419 - DNA, 15 bp, Homo sapiens
aaggagcttcgacct

SEQ ID NO: 381420 - DNA, 15 bp, Homo sapiens
caaggagcttcgacc

SEQ ID NO: 381421 - DNA, 15 bp, Homo sapiens
acaaggagcttcgac

SEQ ID NO: 381422 - DNA, 15 bp, Homo sapiens
aacaaggagcttcga

SEQ ID NO: 381423 - DNA, 15 bp, Homo sapiens
taacaaggagcttcg

SEQ ID NO: 381424 - DNA, 15 bp, Homo sapiens
ctaacaaggagcttc

SEQ ID NO: 381425 - DNA, 15 bp, Homo sapiens
gctaacaaggagctt

SEQ ID NO: 381426 - DNA, 15 bp, Homo sapiens
ggctaacaaggagct

SEQ ID NO: 381427 - DNA, 15 bp, Homo sapiens
gggctaacaaggagc

SEQ ID NO: 381428 - DNA, 15 bp, Homo sapiens
agggctaacaaggag

SEQ ID NO: 381429 - DNA, 15 bp, Homo sapiens
aagggctaacaagga

SEQ ID NO: 381430 - DNA, 15 bp, Homo sapiens
taagggctaacaagg

SEQ ID NO: 381431 - DNA, 15 bp, Homo sapiens
gtaagggctaacaag

SEQ ID NO: 381432 - DNA, 15 bp, Homo sapiens
agtaagggctaacaa

SEQ ID NO: 381433 - DNA, 15 bp, Homo sapiens
cagtaagggctaaca

SEQ ID NO: 381434 - DNA, 15 bp, Homo sapiens
acagtaagggctaac

SEQ ID NO: 381435 - DNA, 15 bp, Homo sapiens
aacagtaagggctaa

SEQ ID NO: 381436 - DNA, 15 bp, Homo sapiens
gaacagtaagggcta

SEQ ID NO: 381437 - DNA, 15 bp, Homo sapiens
agaacagtaagggct

SEQ ID NO: 381438 - DNA, 15 bp, Homo sapiens
gagaacagtaagggc

SEQ ID NO: 381439 - DNA, 15 bp, Homo sapiens
ggagaacagtaaggg

SEQ ID NO: 381440 - DNA, 15 bp, Homo sapiens
tggagaacagtaagg

SEQ ID NO: 381441 - DNA, 15 bp, Homo sapiens
gtggagaacagtaag

SEQ ID NO: 381442 - DNA, 15 bp, Homo sapiens
cgtggagaacagtaa

SEQ ID NO: 381443 - DNA, 15 bp, Homo sapiens
ccgtggagaacagta

SEQ ID NO: 381444 - DNA, 15 bp, Homo sapiens
accgtggagaacagt

SEQ ID NO: 381445 - DNA, 15 bp, Homo sapiens
aaccgtggagaacag

SEQ ID NO: 381446 - DNA, 15 bp, Homo sapiens
caaccgtggagaaca

SEQ ID NO: 381447 - DNA, 15 bp, Homo sapiens
acaaccgtggagaac

SEQ ID NO: 381448 - DNA, 15 bp, Homo sapiens
gacaaccgtggagaa

SEQ ID NO: 381449 - DNA, 15 bp, Homo sapiens
agacaaccgtggaga

SEQ ID NO: 381450 - DNA, 15 bp, Homo sapiens
gagacaaccgtggag

SEQ ID NO: 381451 - DNA, 15 bp, Homo sapiens
agagacaaccgtgga

SEQ ID NO: 381452 - DNA, 15 bp, Homo sapiens
gagagacaaccgtgg

SEQ ID NO: 381453 - DNA, 15 bp, Homo sapiens
agagagacaaccgtg

SEQ ID NO: 381454 - DNA, 15 bp, Homo sapiens
gagagagacaaccgt

SEQ ID NO: 381455 - DNA, 15 bp, Homo sapiens
ggagagagacaaccg

SEQ ID NO: 381456 - DNA, 15 bp, Homo sapiens
tggagagagacaacc

SEQ ID NO: 381457 - DNA, 15 bp, Homo sapiens
ttggagagagacaac

SEQ ID NO: 381458 - DNA, 15 bp, Homo sapiens
tttggagagagacaa

SEQ ID NO: 381459 - DNA, 15 bp, Homo sapiens
gtttggagagagaca

SEQ ID NO: 381460 - DNA, 15 bp, Homo sapiens
tgtttggagagagac

SEQ ID NO: 381461 - DNA, 15 bp, Homo sapiens
ctgtttggagagaga

SEQ ID NO: 381462 - DNA, 15 bp, Homo sapiens
gctgtttggagagag

SEQ ID NO: 381463 - DNA, 15 bp, Homo sapiens
tgctgtttggagaga

SEQ ID NO: 381464 - DNA, 15 bp, Homo sapiens
atgctgtttggagag

SEQ ID NO: 381465 - DNA, 15 bp, Homo sapiens
gatgctgtttggaga

SEQ ID NO: 381466 - DNA, 15 bp, Homo sapiens
agatgctgtttggag

SEQ ID NO: 381467 - DNA, 15 bp, Homo sapiens
aagatgctgtttgga

SEQ ID NO: 381468 - DNA, 15 bp, Homo sapiens
aaagatgctgtttgg

SEQ ID NO: 381469 - DNA, 15 bp, Homo sapiens
aaaagatgctgtttg

SEQ ID NO: 381470 - DNA, 15 bp, Homo sapiens
gaaaagatgctgttt

SEQ ID NO: 381471 - DNA, 15 bp, Homo sapiens
agaaaagatgctgtt

SEQ ID NO: 381472 - DNA, 15 bp, Homo sapiens
aagaaaagatgctgt

SEQ ID NO: 381473 - DNA, 15 bp, Homo sapiens
aaagaaaagatgctg

SEQ ID NO: 381474 - DNA, 15 bp, Homo sapiens
aaaagaaaagatgct

SEQ ID NO: 381475 - DNA, 15 bp, Homo sapiens
aaaaagaaaagatgc

SEQ ID NO: 381476 - DNA, 15 bp, Homo sapiens
caaaaagaaaagatg

SEQ ID NO: 381477 - DNA, 15 bp, Homo sapiens
tcaaaaagaaaagat

SEQ ID NO: 381478 - DNA, 15 bp, Homo sapiens
ctcaaaaagaaaaga

SEQ ID NO: 381479 - DNA, 15 bp, Homo sapiens
gctcaaaaagaaaag

SEQ ID NO: 381480 - DNA, 15 bp, Homo sapiens
ggctcaaaaagaaaa

SEQ ID NO: 381481 - DNA, 15 bp, Homo sapiens
aggctcaaaaagaaa

SEQ ID NO: 381482 - DNA, 15 bp, Homo sapiens
aaggctcaaaaagaa

SEQ ID NO: 381483 - DNA, 15 bp, Homo sapiens
aaaggctcaaaaaga

SEQ ID NO: 381484 - DNA, 15 bp, Homo sapiens
aaaaggctcaaaaag

SEQ ID NO: 381485 - DNA, 15 bp, Homo sapiens
gaaaaggctcaaaaa

SEQ ID NO: 381486 - DNA, 15 bp, Homo sapiens
gagaaaaggctcaaa

SEQ ID NO: 381487 - DNA, 15 bp, Homo sapiens
agagaaaaggctcaa

SEQ ID NO: 381488 - DNA, 15 bp, Homo sapiens
gagagaaaaggctca

SEQ ID NO: 381489 - DNA, 15 bp, Homo sapiens
agagagaaaaggctc

SEQ ID NO: 381490 - DNA, 15 bp, Homo sapiens
gagagagaaaaggct

SEQ ID NO: 381491 - DNA, 15 bp, Homo sapiens
tgagagagaaaaggc

SEQ ID NO: 381492 - DNA, 15 bp, Homo sapiens
ttgagagagaaaagg

SEQ ID NO: 381493 - DNA, 15 bp, Homo sapiens
gttgagagagaaaag

SEQ ID NO: 381494 - DNA, 15 bp, Homo sapiens
ggttgagagagaaaa

SEQ ID NO: 381495 - DNA, 15 bp, Homo sapiens
aggttgagagagaaa

SEQ ID NO: 381496 - DNA, 15 bp, Homo sapiens
gaggttgagagagaa

SEQ ID NO: 381497 - DNA, 15 bp, Homo sapiens
tgaggttgagagaga

SEQ ID NO: 381498 - DNA, 15 bp, Homo sapiens
ctgaggttgagagag

SEQ ID NO: 381499 - DNA, 15 bp, Homo sapiens
gctgaggttgagaga

SEQ ID NO: 381500 - DNA, 15 bp, Homo sapiens
agctgaggttgagag

SEQ ID NO: 381501 - DNA, 15 bp, Homo sapiens
aagctgaggttgaga

SEQ ID NO: 381502 - DNA, 15 bp, Homo sapiens
caagctgaggttgag

SEQ ID NO: 381503 - DNA, 15 bp, Homo sapiens
acaagctgaggttga

SEQ ID NO: 381504 - DNA, 15 bp, Homo sapiens
cacaagctgaggttg

SEQ ID NO: 381505 - DNA, 15 bp, Homo sapiens
ccacaagctgaggtt

SEQ ID NO: 381506 - DNA, 15 bp, Homo sapiens
accacaagctgaggt

SEQ ID NO: 381507 - DNA, 15 bp, Homo sapiens
caccacaagctgagg

SEQ ID NO: 381508 - DNA, 15 bp, Homo sapiens
acaccacaagctgag

SEQ ID NO: 381509 - DNA, 15 bp, Homo sapiens
tacaccacaagctga

SEQ ID NO: 381510 - DNA, 15 bp, Homo sapiens
ctacaccacaagctg

SEQ ID NO: 381511 - DNA, 15 bp, Homo sapiens
actacaccacaagct

SEQ ID NO: 381512 - DNA, 15 bp, Homo sapiens
cactacaccacaagc

SEQ ID NO: 381513 - DNA, 15 bp, Homo sapiens
tcactacaccacaag

SEQ ID NO: 381514 - DNA, 15 bp, Homo sapiens
ctcactacaccacaa

SEQ ID NO: 381515 - DNA, 15 bp, Homo sapiens
tctcactacaccaca

SEQ ID NO: 381516 - DNA, 15 bp, Homo sapiens
ttctcactacaccac

SEQ ID NO: 381517 - DNA, 15 bp, Homo sapiens
cttctcactacacca

SEQ ID NO: 381518 - DNA, 15 bp, Homo sapiens
tcttctcactacacc

SEQ ID NO: 381519 - DNA, 15 bp, Homo sapiens
ctcttctcactacac

SEQ ID NO: 381520 - DNA, 15 bp, Homo sapiens
cctcttctcactaca

SEQ ID NO: 381521 - DNA, 15 bp, Homo sapiens
ccctcttctcactac

SEQ ID NO: 381522 - DNA, 15 bp, Homo sapiens
gccctcttctcacta

SEQ ID NO: 381523 - DNA, 15 bp, Homo sapiens
ggccctcttctcact

SEQ ID NO: 381524 - DNA, 15 bp, Homo sapiens
tggccctcttctcac

SEQ ID NO: 381525 - DNA, 15 bp, Homo sapiens
ttggccctcttctca

SEQ ID NO: 381526 - DNA, 15 bp, Homo sapiens
attggccctcttctc

SEQ ID NO: 381527 - DNA, 15 bp, Homo sapiens
aattggccctcttct

SEQ ID NO: 381528 - DNA, 15 bp, Homo sapiens
taattggccctcttc

SEQ ID NO: 381529 - DNA, 15 bp, Homo sapiens
ataattggccctctt

SEQ ID NO: 381530 - DNA, 15 bp, Homo sapiens
aataattggccctct

SEQ ID NO: 381531 - DNA, 15 bp, Homo sapiens
gaataattggccctc

SEQ ID NO: 381532 - DNA, 15 bp, Homo sapiens
ggaataattggccct

SEQ ID NO: 381533 - DNA, 15 bp, Homo sapiens
tggaataattggccc

SEQ ID NO: 381534 - DNA, 15 bp, Homo sapiens
ttggaataattggcc

SEQ ID NO: 381535 - DNA, 15 bp, Homo sapiens
tttggaataattggc

SEQ ID NO: 381536 - DNA, 15 bp, Homo sapiens
atttggaataattgg

SEQ ID NO: 381537 - DNA, 15 bp, Homo sapiens
catttggaataattg

SEQ ID NO: 381538 - DNA, 15 bp, Homo sapiens
gcatttggaataatt

SEQ ID NO: 381539 - DNA, 15 bp, Homo sapiens
agcatttggaataat

SEQ ID NO: 381540 - DNA, 15 bp, Homo sapiens
aagcatttggaataa

SEQ ID NO: 381541 - DNA, 15 bp, Homo sapiens
aaagcatttggaata

SEQ ID NO: 381542 - DNA, 15 bp, Homo sapiens
aaaagcatttggaat

SEQ ID NO: 381543 - DNA, 15 bp, Homo sapiens
caaaagcatttggaa

SEQ ID NO: 381544 - DNA, 15 bp, Homo sapiens
gcaaaagcatttgga

SEQ ID NO: 381545 - DNA, 15 bp, Homo sapiens
agcaaaagcatttgg

SEQ ID NO: 381546 - DNA, 15 bp, Homo sapiens
cagcaaaagcatttg

SEQ ID NO: 381547 - DNA, 15 bp, Homo sapiens
acagcaaaagcattt

SEQ ID NO: 381548 - DNA, 15 bp, Homo sapiens
tacagcaaaagcatt

SEQ ID NO: 381549 - DNA, 15 bp, Homo sapiens
atacagcaaaagcat

SEQ ID NO: 381550 - DNA, 15 bp, Homo sapiens
gatacagcaaaagca

SEQ ID NO: 381551 - DNA, 15 bp, Homo sapiens
tgatacagcaaaagc

SEQ ID NO: 381552 - DNA, 15 bp, Homo sapiens
atgatacagcaaaag

SEQ ID NO: 381553 - DNA, 15 bp, Homo sapiens
aatgatacagcaaaa

SEQ ID NO: 381554 - DNA, 15 bp, Homo sapiens
caatgatacagcaaa

SEQ ID NO: 381555 - DNA, 15 bp, Homo sapiens
acaatgatacagcaa

SEQ ID NO: 381556 - DNA, 15 bp, Homo sapiens
gacaatgatacagca

SEQ ID NO: 381557 - DNA, 15 bp, Homo sapiens
agacaatgatacagc

SEQ ID NO: 381558 - DNA, 15 bp, Homo sapiens
gagacaatgatacag

SEQ ID NO: 381559 - DNA, 15 bp, Homo sapiens
ggagacaatgataca

SEQ ID NO: 381560 - DNA, 15 bp, Homo sapiens
gggagacaatgatac

SEQ ID NO: 381561 - DNA, 15 bp, Homo sapiens
ggggagacaatgata

SEQ ID NO: 381562 - DNA, 15 bp, Homo sapiens
aggggagacaatgat

SEQ ID NO: 381563 - DNA, 15 bp, Homo sapiens
aaggggagacaatga

SEQ ID NO: 381564 - DNA, 15 bp, Homo sapiens
aaaggggagacaatg

SEQ ID NO: 381565 - DNA, 15 bp, Homo sapiens
aaaaggggagacaat

SEQ ID NO: 381566 - DNA, 15 bp, Homo sapiens
gaaaaggggagacaa

SEQ ID NO: 381567 - DNA, 15 bp, Homo sapiens
agaaaaggggagaca

SEQ ID NO: 381568 - DNA, 15 bp, Homo sapiens
cagaaaaggggagac

SEQ ID NO: 381569 - DNA, 15 bp, Homo sapiens
gcagaaaaggggaga

SEQ ID NO: 381570 - DNA, 15 bp, Homo sapiens
cgcagaaaaggggag

SEQ ID NO: 381571 - DNA, 15 bp, Homo sapiens
tcgcagaaaagggga

SEQ ID NO: 381572 - DNA, 15 bp, Homo sapiens
atcgcagaaaagggg

SEQ ID NO: 381573 - DNA, 15 bp, Homo sapiens
gatcgcagaaaaggg

SEQ ID NO: 381574 - DNA, 15 bp, Homo sapiens
agatcgcagaaaagg

SEQ ID NO: 381575 - DNA, 15 bp, Homo sapiens
aagatcgcagaaaag

SEQ ID NO: 381576 - DNA, 15 bp, Homo sapiens
gaagatcgcagaaaa

SEQ ID NO: 381577 - DNA, 15 bp, Homo sapiens
agaagatcgcagaaa

SEQ ID NO: 381578 - DNA, 15 bp, Homo sapiens
gagaagatcgcagaa

SEQ ID NO: 381579 - DNA, 15 bp, Homo sapiens
tgagaagatcgcaga

SEQ ID NO: 381580 - DNA, 15 bp, Homo sapiens
ttgagaagatcgcag

SEQ ID NO: 381581 - DNA, 15 bp, Homo sapiens
cttgagaagatcgca

SEQ ID NO: 381582 - DNA, 15 bp, Homo sapiens
ccttgagaagatcgc

SEQ ID NO: 381583 - DNA, 15 bp, Homo sapiens
cccttgagaagatcg

SEQ ID NO: 381584 - DNA, 15 bp, Homo sapiens
tcccttgagaagatc

SEQ ID NO: 381585 - DNA, 15 bp, Homo sapiens
ctcccttgagaagat

SEQ ID NO: 381586 - DNA, 15 bp, Homo sapiens
actcccttgagaaga

SEQ ID NO: 381587 - DNA, 15 bp, Homo sapiens
tactcccttgagaag

SEQ ID NO: 381588 - DNA, 15 bp, Homo sapiens
gtactcccttgagaa

SEQ ID NO: 381589 - DNA, 15 bp, Homo sapiens
agtactcccttgaga

SEQ ID NO: 381590 - DNA, 15 bp, Homo sapiens
cagtactcccttgag

SEQ ID NO: 381591 - DNA, 15 bp, Homo sapiens
acagtactcccttga

SEQ ID NO: 381592 - DNA, 15 bp, Homo sapiens
cacagtactcccttg

SEQ ID NO: 381593 - DNA, 15 bp, Homo sapiens
tcacagtactccctt

SEQ ID NO: 381594 - DNA, 15 bp, Homo sapiens
ttcacagtactccct

SEQ ID NO: 381595 - DNA, 15 bp, Homo sapiens
tttcacagtactccc

SEQ ID NO: 381596 - DNA, 15 bp, Homo sapiens
ttttcacagtactcc

SEQ ID NO: 381597 - DNA, 15 bp, Homo sapiens
cttttcacagtactc

SEQ ID NO: 381598 - DNA, 15 bp, Homo sapiens
ccttttcacagtact

SEQ ID NO: 381599 - DNA, 15 bp, Homo sapiens
gccttttcacagtac

SEQ ID NO: 381600 - DNA, 15 bp, Homo sapiens
agccttttcacagta

SEQ ID NO: 381601 - DNA, 15 bp, Homo sapiens
tagccttttcacagt

SEQ ID NO: 381602 - DNA, 15 bp, Homo sapiens
ttagccttttcacag

SEQ ID NO: 381603 - DNA, 15 bp, Homo sapiens
tttagccttttcaca

SEQ ID NO: 381604 - DNA, 15 bp, Homo sapiens
atttagccttttcac

SEQ ID NO: 381605 - DNA, 15 bp, Homo sapiens
gatttagccttttca

SEQ ID NO: 381606 - DNA, 15 bp, Homo sapiens
ggatttagccttttc

SEQ ID NO: 381607 - DNA, 15 bp, Homo sapiens
gggatttagcctttt

SEQ ID NO: 381608 - DNA, 15 bp, Homo sapiens
tgggatttagccttt

SEQ ID NO: 381609 - DNA, 15 bp, Homo sapiens
atgggatttagcctt

SEQ ID NO: 381610 - DNA, 15 bp, Homo sapiens
catgggatttagcct

SEQ ID NO: 381611 - DNA, 15 bp, Homo sapiens
ccatgggatttagcc

SEQ ID NO: 381612 - DNA, 15 bp, Homo sapiens
gccatgggatttagc

SEQ ID NO: 381613 - DNA, 15 bp, Homo sapiens
tgccatgggatttag

SEQ ID NO: 381614 - DNA, 15 bp, Homo sapiens
gtgccatgggattta

SEQ ID NO: 381615 - DNA, 15 bp, Homo sapiens
agtgccatgggattt

SEQ ID NO: 381616 - DNA, 15 bp, Homo sapiens
cagtgccatgggatt

SEQ ID NO: 381617 - DNA, 15 bp, Homo sapiens
tcagtgccatgggat

SEQ ID NO: 381618 - DNA, 15 bp, Homo sapiens
gtcagtgccatggga

SEQ ID NO: 381619 - DNA, 15 bp, Homo sapiens
tgtcagtgccatggg

SEQ ID NO: 381620 - DNA, 15 bp, Homo sapiens
ttgtcagtgccatgg

SEQ ID NO: 381621 - DNA, 15 bp, Homo sapiens
gttgtcagtgccatg

SEQ ID NO: 381622 - DNA, 15 bp, Homo sapiens
ggttgtcagtgccat

SEQ ID NO: 381623 - DNA, 15 bp, Homo sapiens
gggttgtcagtgcca

SEQ ID NO: 381624 - DNA, 15 bp, Homo sapiens
tgggttgtcagtgcc

SEQ ID NO: 381625 - DNA, 15 bp, Homo sapiens
gtgggttgtcagtgc

SEQ ID NO: 381626 - DNA, 15 bp, Homo sapiens
tgtgggttgtcagtg

SEQ ID NO: 381627 - DNA, 15 bp, Homo sapiens
ctgtgggttgtcagt

SEQ ID NO: 381628 - DNA, 15 bp, Homo sapiens
tctgtgggttgtcag

SEQ ID NO: 381629 - DNA, 15 bp, Homo sapiens
ctctgtgggttgtca

SEQ ID NO: 381630 - DNA, 15 bp, Homo sapiens
gctctgtgggttgtc

SEQ ID NO: 381631 - DNA, 15 bp, Homo sapiens
ggctctgtgggttgt

SEQ ID NO: 381632 - DNA, 15 bp, Homo sapiens
tggctctgtgggttg

SEQ ID NO: 381633 - DNA, 15 bp, Homo sapiens
ttggctctgtgggtt

SEQ ID NO: 381634 - DNA, 15 bp, Homo sapiens
gttggctctgtgggt

SEQ ID NO: 381635 - DNA, 15 bp, Homo sapiens
tgttggctctgtggg

SEQ ID NO: 381636 - DNA, 15 bp, Homo sapiens
ctgttggctctgtgg

SEQ ID NO: 381637 - DNA, 15 bp, Homo sapiens
tctgttggctctgtg

SEQ ID NO: 381638 - DNA, 15 bp, Homo sapiens
ctctgttggctctgt

SEQ ID NO: 381639 - DNA, 15 bp, Homo sapiens
tctctgttggctctg

SEQ ID NO: 381640 - DNA, 15 bp, Homo sapiens
ttctctgttggctct

SEQ ID NO: 381641 - DNA, 15 bp, Homo sapiens
cttctctgttggctc

SEQ ID NO: 381642 - DNA, 15 bp, Homo sapiens
gcttctctgttggct

SEQ ID NO: 381643 - DNA, 15 bp, Homo sapiens
agcttctctgttggc

SEQ ID NO: 381644 - DNA, 15 bp, Homo sapiens
gagcttctctgttgg

SEQ ID NO: 381645 - DNA, 15 bp, Homo sapiens
tgagcttctctgttg

SEQ ID NO: 381646 - DNA, 15 bp, Homo sapiens
ttgagcttctctgtt

SEQ ID NO: 381647 - DNA, 15 bp, Homo sapiens
attgagcttctctgt

SEQ ID NO: 381648 - DNA, 15 bp, Homo sapiens
aattgagcttctctg

SEQ ID NO: 381649 - DNA, 15 bp, Homo sapiens
taattgagcttctct

SEQ ID NO: 381650 - DNA, 15 bp, Homo sapiens
ataattgagcttctc

SEQ ID NO: 381651 - DNA, 15 bp, Homo sapiens
gataattgagcttct

SEQ ID NO: 381652 - DNA, 15 bp, Homo sapiens
tgataattgagcttc

SEQ ID NO: 381653 - DNA, 15 bp, Homo sapiens
gtgataattgagctt

SEQ ID NO: 381654 - DNA, 15 bp, Homo sapiens
tgtgataattgagct

SEQ ID NO: 381655 - DNA, 15 bp, Homo sapiens
ctgtgataattgagc

SEQ ID NO: 381656 - DNA, 15 bp, Homo sapiens
actgtgataattgag

SEQ ID NO: 381657 - DNA, 15 bp, Homo sapiens
cactgtgataattga

SEQ ID NO: 381658 - DNA, 15 bp, Homo sapiens
gcactgtgataattg

SEQ ID NO: 381659 - DNA, 15 bp, Homo sapiens
tgcactgtgataatt

SEQ ID NO: 381660 - DNA, 15 bp, Homo sapiens
ctgcactgtgataat

SEQ ID NO: 381661 - DNA, 15 bp, Homo sapiens
gctgcactgtgataa

SEQ ID NO: 381662 - DNA, 15 bp, Homo sapiens
ggctgcactgtgata

SEQ ID NO: 381663 - DNA, 15 bp, Homo sapiens
aggctgcactgtgat

SEQ ID NO: 381664 - DNA, 15 bp, Homo sapiens
caggctgcactgtga

SEQ ID NO: 381665 - DNA, 15 bp, Homo sapiens
acaggctgcactgtg

SEQ ID NO: 381666 - DNA, 15 bp, Homo sapiens
aacaggctgcactgt

SEQ ID NO: 381667 - DNA, 15 bp, Homo sapiens
aaacaggctgcactg

SEQ ID NO: 381668 - DNA, 15 bp, Homo sapiens
gaaacaggctgcact

SEQ ID NO: 381669 - DNA, 15 bp, Homo sapiens
agaaacaggctgcac

SEQ ID NO: 381670 - DNA, 15 bp, Homo sapiens
aagaaacaggctgca

SEQ ID NO: 381671 - DNA, 15 bp, Homo sapiens
gaagaaacaggctgc

SEQ ID NO: 381672 - DNA, 15 bp, Homo sapiens
ggaagaaacaggctg

SEQ ID NO: 381673 - DNA, 15 bp, Homo sapiens
aggaagaaacaggct

SEQ ID NO: 381674 - DNA, 15 bp, Homo sapiens
gaggaagaaacaggc

SEQ ID NO: 381675 - DNA, 15 bp, Homo sapiens
agaggaagaaacagg

SEQ ID NO: 381676 - DNA, 15 bp, Homo sapiens
cagaggaagaaacag

SEQ ID NO: 381677 - DNA, 15 bp, Homo sapiens
gcagaggaagaaaca

SEQ ID NO: 381678 - DNA, 15 bp, Homo sapiens
agcagaggaagaaac

SEQ ID NO: 381679 - DNA, 15 bp, Homo sapiens
cagcagaggaagaaa

SEQ ID NO: 381680 - DNA, 15 bp, Homo sapiens
ccagcagaggaagaa

SEQ ID NO: 381681 - DNA, 15 bp, Homo sapiens
accagcagaggaaga

SEQ ID NO: 381682 - DNA, 15 bp, Homo sapiens
caccagcagaggaag

SEQ ID NO: 381683 - DNA, 15 bp, Homo sapiens
ccaccagcagaggaa

SEQ ID NO: 381684 - DNA, 15 bp, Homo sapiens
gccaccagcagagga

SEQ ID NO: 381685 - DNA, 15 bp, Homo sapiens
tgccaccagcagagg

SEQ ID NO: 381686 - DNA, 15 bp, Homo sapiens
ctgccaccagcagag

SEQ ID NO: 381687 - DNA, 15 bp, Homo sapiens
gctgccaccagcaga

SEQ ID NO: 381688 - DNA, 15 bp, Homo sapiens
agctgccaccagcag

SEQ ID NO: 381689 - DNA, 15 bp, Homo sapiens
gagctgccaccagca

SEQ ID NO: 381690 - DNA, 15 bp, Homo sapiens
tgagctgccaccagc

SEQ ID NO: 381691 - DNA, 15 bp, Homo sapiens
ctgagctgccaccag

SEQ ID NO: 381692 - DNA, 15 bp, Homo sapiens
actgagctgccacca

SEQ ID NO: 381693 - DNA, 15 bp, Homo sapiens
gactgagctgccacc

SEQ ID NO: 381694 - DNA, 15 bp, Homo sapiens
tgactgagctgccac

SEQ ID NO: 381695 - DNA, 15 bp, Homo sapiens
ctgactgagctgcca

SEQ ID NO: 381696 - DNA, 15 bp, Homo sapiens
gctgactgagctgcc

SEQ ID NO: 381697 - DNA, 15 bp, Homo sapiens
ggctgactgagctgc

SEQ ID NO: 381698 - DNA, 15 bp, Homo sapiens
gggctgactgagctg

SEQ ID NO: 381699 - DNA, 15 bp, Homo sapiens
tgggctgactgagct

SEQ ID NO: 381700 - DNA, 15 bp, Homo sapiens
ctgggctgactgagc

SEQ ID NO: 381701 - DNA, 15 bp, Homo sapiens
gctgggctgactgag

SEQ ID NO: 381702 - DNA, 15 bp, Homo sapiens
agctgggctgactga

SEQ ID NO: 381703 - DNA, 15 bp, Homo sapiens
gagctgggctgactg

SEQ ID NO: 381704 - DNA, 15 bp, Homo sapiens
agagctgggctgact

SEQ ID NO: 381705 - DNA, 15 bp, Homo sapiens
cagagctgggctgac

SEQ ID NO: 381706 - DNA, 15 bp, Homo sapiens
cccagagctgggctg

SEQ ID NO: 381707 - DNA, 15 bp, Homo sapiens
ccccagagctgggct

SEQ ID NO: 381708 - DNA, 15 bp, Homo sapiens
gccccagagctgggc

SEQ ID NO: 381709 - DNA, 15 bp, Homo sapiens
ggccccagagctggg

SEQ ID NO: 381710 - DNA, 15 bp, Homo sapiens
gggccccagagctgg

SEQ ID NO: 381711 - DNA, 15 bp, Homo sapiens
agggccccagagctg

SEQ ID NO: 381712 - DNA, 15 bp, Homo sapiens
aagggccccagagct

SEQ ID NO: 381713 - DNA, 15 bp, Homo sapiens
gaagggccccagagc

SEQ ID NO: 381714 - DNA, 15 bp, Homo sapiens
ggaagggccccagag

SEQ ID NO: 381715 - DNA, 15 bp, Homo sapiens
gggaagggccccaga

SEQ ID NO: 381716 - DNA, 15 bp, Homo sapiens
agggaagggccccag

SEQ ID NO: 381717 - DNA, 15 bp, Homo sapiens
cagggaagggcccca

SEQ ID NO: 381718 - DNA, 15 bp, Homo sapiens
gcagggaagggcccc

SEQ ID NO: 381719 - DNA, 15 bp, Homo sapiens
tgcagggaagggccc

SEQ ID NO: 381720 - DNA, 15 bp, Homo sapiens
ttgcagggaagggcc

SEQ ID NO: 381721 - DNA, 15 bp, Homo sapiens
cttgcagggaagggc

SEQ ID NO: 381722 - DNA, 15 bp, Homo sapiens
tcttgcagggaaggg

SEQ ID NO: 381723 - DNA, 15 bp, Homo sapiens
ctcttgcagggaagg

SEQ ID NO: 381724 - DNA, 15 bp, Homo sapiens
gctcttgcagggaag

SEQ ID NO: 381725 - DNA, 15 bp, Homo sapiens
ggctcttgcagggaa

SEQ ID NO: 381726 - DNA, 15 bp, Homo sapiens
gggctcttgcaggga

SEQ ID NO: 381727 - DNA, 15 bp, Homo sapiens
tgggctcttgcaggg

SEQ ID NO: 381728 - DNA, 15 bp, Homo sapiens
atgggctcttgcagg

SEQ ID NO: 381729 - DNA, 15 bp, Homo sapiens
aatgggctcttgcag

SEQ ID NO: 381730 - DNA, 15 bp, Homo sapiens
gaatgggctcttgca

SEQ ID NO: 381731 - DNA, 15 bp, Homo sapiens
ggaatgggctcttgc

SEQ ID NO: 381732 - DNA, 15 bp, Homo sapiens
aggaatgggctcttg

SEQ ID NO: 381733 - DNA, 15 bp, Homo sapiens
gaggaatgggctctt

SEQ ID NO: 381734 - DNA, 15 bp, Homo sapiens
ggaggaatgggctct

SEQ ID NO: 381735 - DNA, 15 bp, Homo sapiens
tggaggaatgggctc

SEQ ID NO: 381736 - DNA, 15 bp, Homo sapiens
ctggaggaatgggct

SEQ ID NO: 381737 - DNA, 15 bp, Homo sapiens
cctggaggaatgggc

SEQ ID NO: 381738 - DNA, 15 bp, Homo sapiens
ccctggaggaatggg

SEQ ID NO: 381739 - DNA, 15 bp, Homo sapiens
accctggaggaatgg

SEQ ID NO: 381740 - DNA, 15 bp, Homo sapiens
caccctggaggaatg

SEQ ID NO: 381741 - DNA, 15 bp, Homo sapiens
tcaccctggaggaat

SEQ ID NO: 381742 - DNA, 15 bp, Homo sapiens
gtcaccctggaggaa

SEQ ID NO: 381743 - DNA, 15 bp, Homo sapiens
ggtcaccctggagga

SEQ ID NO: 381744 - DNA, 15 bp, Homo sapiens
aggtcaccctggagg

SEQ ID NO: 381745 - DNA, 15 bp, Homo sapiens
caggtcaccctggag

SEQ ID NO: 381746 - DNA, 15 bp, Homo sapiens
gcaggtcaccctgga

SEQ ID NO: 381747 - DNA, 15 bp, Homo sapiens
tgcaggtcaccctgg

SEQ ID NO: 381748 - DNA, 15 bp, Homo sapiens
ctgcaggtcaccctg

SEQ ID NO: 381749 - DNA, 15 bp, Homo sapiens
gctgcaggtcaccct

SEQ ID NO: 381750 - DNA, 15 bp, Homo sapiens
ggctgcaggtcaccc

SEQ ID NO: 381751 - DNA, 15 bp, Homo sapiens
gggctgcaggtcacc

SEQ ID NO: 381752 - DNA, 15 bp, Homo sapiens
agggctgcaggtcac

SEQ ID NO: 381753 - DNA, 15 bp, Homo sapiens
cagggctgcaggtca

SEQ ID NO: 381754 - DNA, 15 bp, Homo sapiens
acagggctgcaggtc

SEQ ID NO: 381755 - DNA, 15 bp, Homo sapiens
cacagggctgcaggt

SEQ ID NO: 381756 - DNA, 15 bp, Homo sapiens
ccacagggctgcagg

SEQ ID NO: 381757 - DNA, 15 bp, Homo sapiens
gccacagggctgcag

SEQ ID NO: 381758 - DNA, 15 bp, Homo sapiens
agccacagggctgca

SEQ ID NO: 381759 - DNA, 15 bp, Homo sapiens
cagccacagggctgc

SEQ ID NO: 381760 - DNA, 15 bp, Homo sapiens
ccagccacagggctg

SEQ ID NO: 381761 - DNA, 15 bp, Homo sapiens
tccagccacagggct

SEQ ID NO: 381762 - DNA, 15 bp, Homo sapiens
ctccagccacagggc

SEQ ID NO: 381763 - DNA, 15 bp, Homo sapiens
cctccagccacaggg

SEQ ID NO: 381764 - DNA, 15 bp, Homo sapiens
tcctccagccacagg

SEQ ID NO: 381765 - DNA, 15 bp, Homo sapiens
ctcctccagccacag

SEQ ID NO: 381766 - DNA, 15 bp, Homo sapiens
cctcctccagccaca

SEQ ID NO: 381767 - DNA, 15 bp, Homo sapiens
acctcctccagccac

SEQ ID NO: 381768 - DNA, 15 bp, Homo sapiens
aacctcctccagcca

SEQ ID NO: 381769 - DNA, 15 bp, Homo sapiens
aaacctcctccagcc

SEQ ID NO: 381770 - DNA, 15 bp, Homo sapiens
aaaacctcctccagc

SEQ ID NO: 381771 - DNA, 15 bp, Homo sapiens
caaaacctcctccag

SEQ ID NO: 381772 - DNA, 15 bp, Homo sapiens
tcaaaacctcctcca

SEQ ID NO: 381773 - DNA, 15 bp, Homo sapiens
gtcaaaacctcctcc

SEQ ID NO: 381774 - DNA, 15 bp, Homo sapiens
ggtcaaaacctcctc

SEQ ID NO: 381775 - DNA, 15 bp, Homo sapiens
gggtcaaaacctcct

SEQ ID NO: 381776 - DNA, 15 bp, Homo sapiens
agggtcaaaacctcc

SEQ ID NO: 381777 - DNA, 15 bp, Homo sapiens
aagggtcaaaacctc

SEQ ID NO: 381778 - DNA, 15 bp, Homo sapiens
taagggtcaaaacct

SEQ ID NO: 381779 - DNA, 15 bp, Homo sapiens
ataagggtcaaaacc

SEQ ID NO: 381780 - DNA, 15 bp, Homo sapiens
aataagggtcaaaac

SEQ ID NO: 381781 - DNA, 15 bp, Homo sapiens
aaataagggtcaaaa

SEQ ID NO: 381782 - DNA, 15 bp, Homo sapiens
aaaataagggtcaaa

SEQ ID NO: 381783 - DNA, 15 bp, Homo sapiens
taaaataagggtcaa

SEQ ID NO: 381784 - DNA, 15 bp, Homo sapiens
ttaaaataagggtca

SEQ ID NO: 381785 - DNA, 15 bp, Homo sapiens
tttaaaataagggtc

SEQ ID NO: 381786 - DNA, 15 bp, Homo sapiens
gtttaaaataagggt

SEQ ID NO: 381787 - DNA, 15 bp, Homo sapiens
ggtttaaaataaggg

SEQ ID NO: 381788 - DNA, 15 bp, Homo sapiens
gggtttaaaataagg

SEQ ID NO: 381789 - DNA, 15 bp, Homo sapiens
agggtttaaaataag

SEQ ID NO: 381790 - DNA, 15 bp, Homo sapiens
cagggtttaaaataa

SEQ ID NO: 381791 - DNA, 15 bp, Homo sapiens
acagggtttaaaata

SEQ ID NO: 381792 - DNA, 15 bp, Homo sapiens
cacagggtttaaaat

SEQ ID NO: 381793 - DNA, 15 bp, Homo sapiens
tcacagggtttaaaa

SEQ ID NO: 381794 - DNA, 15 bp, Homo sapiens
atcacagggtttaaa

SEQ ID NO: 381795 - DNA, 15 bp, Homo sapiens
gatcacagggtttaa

SEQ ID NO: 381796 - DNA, 15 bp, Homo sapiens
agatcacagggttta

SEQ ID NO: 381797 - DNA, 15 bp, Homo sapiens
gagatcacagggttt

SEQ ID NO: 381798 - DNA, 15 bp, Homo sapiens
tgagatcacagggtt

SEQ ID NO: 381799 - DNA, 15 bp, Homo sapiens
ctgagatcacagggt

SEQ ID NO: 381800 - DNA, 15 bp, Homo sapiens
actgagatcacaggg

SEQ ID NO: 381801 - DNA, 15 bp, Homo sapiens
cactgagatcacagg

SEQ ID NO: 381802 - DNA, 15 bp, Homo sapiens
tcactgagatcacag

SEQ ID NO: 381803 - DNA, 15 bp, Homo sapiens
atcactgagatcaca

SEQ ID NO: 381804 - DNA, 15 bp, Homo sapiens
catcactgagatcac

SEQ ID NO: 381805 - DNA, 15 bp, Homo sapiens
tcatcactgagatca

SEQ ID NO: 381806 - DNA, 15 bp, Homo sapiens
ttcatcactgagatc

SEQ ID NO: 381807 - DNA, 15 bp, Homo sapiens
tttcatcactgagat

SEQ ID NO: 381808 - DNA, 15 bp, Homo sapiens
gtttcatcactgaga

SEQ ID NO: 381809 - DNA, 15 bp, Homo sapiens
agtttcatcactgag

SEQ ID NO: 381810 - DNA, 15 bp, Homo sapiens
tagtttcatcactga

SEQ ID NO: 381811 - DNA, 15 bp, Homo sapiens
ctagtttcatcactg

SEQ ID NO: 381812 - DNA, 15 bp, Homo sapiens
tctagtttcatcact

SEQ ID NO: 381813 - DNA, 15 bp, Homo sapiens
ttctagtttcatcac

SEQ ID NO: 381814 - DNA, 15 bp, Homo sapiens
tttctagtttcatca

SEQ ID NO: 381815 - DNA, 15 bp, Homo sapiens
atttctagtttcatc

SEQ ID NO: 381816 - DNA, 15 bp, Homo sapiens
catttctagtttcat

SEQ ID NO: 381817 - DNA, 15 bp, Homo sapiens
gcatttctagtttca

SEQ ID NO: 381818 - DNA, 15 bp, Homo sapiens
tgcatttctagtttc

SEQ ID NO: 381819 - DNA, 15 bp, Homo sapiens
ttgcatttctagttt

SEQ ID NO: 381820 - DNA, 15 bp, Homo sapiens
cttgcatttctagtt

SEQ ID NO: 381821 - DNA, 15 bp, Homo sapiens
tcttgcatttctagt

SEQ ID NO: 381822 - DNA, 15 bp, Homo sapiens
ttcttgcatttctag

SEQ ID NO: 381823 - DNA, 15 bp, Homo sapiens
tttcttgcatttcta

SEQ ID NO: 381824 - DNA, 15 bp, Homo sapiens
gtttcttgcatttct

SEQ ID NO: 381825 - DNA, 15 bp, Homo sapiens
tgtttcttgcatttc

SEQ ID NO: 381826 - DNA, 15 bp, Homo sapiens
ctgtttcttgcattt

SEQ ID NO: 381827 - DNA, 15 bp, Homo sapiens
tctgtttcttgcatt

SEQ ID NO: 381828 - DNA, 15 bp, Homo sapiens
atctgtttcttgcat

SEQ ID NO: 381829 - DNA, 15 bp, Homo sapiens
catctgtttcttgca

SEQ ID NO: 381830 - DNA, 15 bp, Homo sapiens
ccatctgtttcttgc

SEQ ID NO: 381831 - DNA, 15 bp, Homo sapiens
gccatctgtttcttg

SEQ ID NO: 381832 - DNA, 15 bp, Homo sapiens
agccatctgtttctt

SEQ ID NO: 381833 - DNA, 15 bp, Homo sapiens
gagccatctgtttct

SEQ ID NO: 381834 - DNA, 15 bp, Homo sapiens
agagccatctgtttc

SEQ ID NO: 381835 - DNA, 15 bp, Homo sapiens
gagagccatctgttt

SEQ ID NO: 381836 - DNA, 15 bp, Homo sapiens
tgagagccatctgtt

SEQ ID NO: 381837 - DNA, 15 bp, Homo sapiens
ctgagagccatctgt

SEQ ID NO: 381838 - DNA, 15 bp, Homo sapiens
tctgagagccatctg

SEQ ID NO: 381839 - DNA, 15 bp, Homo sapiens
atctgagagccatct

SEQ ID NO: 381840 - DNA, 15 bp, Homo sapiens
catctgagagccatc

SEQ ID NO: 381841 - DNA, 15 bp, Homo sapiens
ccatctgagagccat

SEQ ID NO: 381842 - DNA, 15 bp, Homo sapiens
cccatctgagagcca

SEQ ID NO: 381843 - DNA, 15 bp, Homo sapiens
tcccatctgagagcc

SEQ ID NO: 381844 - DNA, 15 bp, Homo sapiens
atcccatctgagagc

SEQ ID NO: 381845 - DNA, 15 bp, Homo sapiens
tatcccatctgagag

SEQ ID NO: 381846 - DNA, 15 bp, Homo sapiens
ctatcccatctgaga

SEQ ID NO: 381847 - DNA, 15 bp, Homo sapiens
cctatcccatctgag

SEQ ID NO: 381848 - DNA, 15 bp, Homo sapiens
tcctatcccatctga

SEQ ID NO: 381849 - DNA, 15 bp, Homo sapiens
atcctatcccatctg

SEQ ID NO: 381850 - DNA, 15 bp, Homo sapiens
catcctatcccatct

SEQ ID NO: 381851 - DNA, 15 bp, Homo sapiens
gcatcctatcccatc

SEQ ID NO: 381852 - DNA, 15 bp, Homo sapiens
ggcatcctatcccat

SEQ ID NO: 381853 - DNA, 15 bp, Homo sapiens
aggcatcctatccca

SEQ ID NO: 381854 - DNA, 15 bp, Homo sapiens
caggcatcctatccc

SEQ ID NO: 381855 - DNA, 15 bp, Homo sapiens
ccaggcatcctatcc

SEQ ID NO: 381856 - DNA, 15 bp, Homo sapiens
accaggcatcctatc

SEQ ID NO: 381857 - DNA, 15 bp, Homo sapiens
caccaggcatcctat

SEQ ID NO: 381858 - DNA, 15 bp, Homo sapiens
tcaccaggcatccta

SEQ ID NO: 381859 - DNA, 15 bp, Homo sapiens
ctcaccaggcatcct

SEQ ID NO: 381860 - DNA, 15 bp, Homo sapiens
actcaccaggcatcc

SEQ ID NO: 381861 - DNA, 15 bp, Homo sapiens
gactcaccaggcatc

SEQ ID NO: 381862 - DNA, 15 bp, Homo sapiens
tgactcaccaggcat

SEQ ID NO: 381863 - DNA, 15 bp, Homo sapiens
ttgactcaccaggca

SEQ ID NO: 381864 - DNA, 15 bp, Homo sapiens
tttgactcaccaggc

SEQ ID NO: 381865 - DNA, 15 bp, Homo sapiens
ctttgactcaccagg

SEQ ID NO: 381866 - DNA, 15 bp, Homo sapiens
gctttgactcaccag

SEQ ID NO: 381867 - DNA, 15 bp, Homo sapiens
ggctttgactcacca

SEQ ID NO: 381868 - DNA, 15 bp, Homo sapiens
tggctttgactcacc

SEQ ID NO: 381869 - DNA, 15 bp, Homo sapiens
ctggctttgactcac

SEQ ID NO: 381870 - DNA, 15 bp, Homo sapiens
actggctttgactca

SEQ ID NO: 381871 - DNA, 15 bp, Homo sapiens
tactggctttgactc

SEQ ID NO: 381872 - DNA, 15 bp, Homo sapiens
atactggctttgact

SEQ ID NO: 381873 - DNA, 15 bp, Homo sapiens
aatactggctttgac

SEQ ID NO: 381874 - DNA, 15 bp, Homo sapiens
aaatactggctttga

SEQ ID NO: 381875 - DNA, 15 bp, Homo sapiens
gaaatactggctttg

SEQ ID NO: 381876 - DNA, 15 bp, Homo sapiens
tgaaatactggcttt

SEQ ID NO: 381877 - DNA, 15 bp, Homo sapiens
ctgaaatactggctt

SEQ ID NO: 381878 - DNA, 15 bp, Homo sapiens
tctgaaatactggct

SEQ ID NO: 381879 - DNA, 15 bp, Homo sapiens
ctctgaaatactggc

SEQ ID NO: 381880 - DNA, 15 bp, Homo sapiens
cctctgaaatactgg

SEQ ID NO: 381881 - DNA, 15 bp, Homo sapiens
gcctctgaaatactg

SEQ ID NO: 381882 - DNA, 15 bp, Homo sapiens
tgcctctgaaatact

SEQ ID NO: 381883 - DNA, 15 bp, Homo sapiens
gtgcctctgaaatac

SEQ ID NO: 381884 - DNA, 15 bp, Homo sapiens
tgtgcctctgaaata

SEQ ID NO: 381885 - DNA, 15 bp, Homo sapiens
ctgtgcctctgaaat

SEQ ID NO: 381886 - DNA, 15 bp, Homo sapiens
tctgtgcctctgaaa

SEQ ID NO: 381887 - DNA, 15 bp, Homo sapiens
ctctgtgcctctgaa

SEQ ID NO: 381888 - DNA, 15 bp, Homo sapiens
actctgtgcctctga

SEQ ID NO: 381889 - DNA, 15 bp, Homo sapiens
gactctgtgcctctg

SEQ ID NO: 381890 - DNA, 15 bp, Homo sapiens
tgactctgtgcctct

SEQ ID NO: 381891 - DNA, 15 bp, Homo sapiens
gtgactctgtgcctc

SEQ ID NO: 381892 - DNA, 15 bp, Homo sapiens
ggtgactctgtgcct

SEQ ID NO: 381893 - DNA, 15 bp, Homo sapiens
gggtgactctgtgcc

SEQ ID NO: 381894 - DNA, 15 bp, Homo sapiens
agggtgactctgtgc

SEQ ID NO: 381895 - DNA, 15 bp, Homo sapiens
cagggtgactctgtg

SEQ ID NO: 381896 - DNA, 15 bp, Homo sapiens
ccagggtgactctgt

SEQ ID NO: 381897 - DNA, 15 bp, Homo sapiens
cccagggtgactctg

SEQ ID NO: 381898 - DNA, 15 bp, Homo sapiens
tcccagggtgactct

SEQ ID NO: 381899 - DNA, 15 bp, Homo sapiens
ctcccagggtgactc

SEQ ID NO: 381900 - DNA, 15 bp, Homo sapiens
cctcccagggtgact

SEQ ID NO: 381901 - DNA, 15 bp, Homo sapiens
ccctcccagggtgac

SEQ ID NO: 381902 - DNA, 15 bp, Homo sapiens
cccctcccagggtga

SEQ ID NO: 381903 - DNA, 15 bp, Homo sapiens
tcccctcccagggtg

SEQ ID NO: 381904 - DNA, 15 bp, Homo sapiens
ttcccctcccagggt

SEQ ID NO: 381905 - DNA, 15 bp, Homo sapiens
tttcccctcccaggg

SEQ ID NO: 381906 - DNA, 15 bp, Homo sapiens
ttttcccctcccagg

SEQ ID NO: 381907 - DNA, 15 bp, Homo sapiens
tttttcccctcccag

SEQ ID NO: 381908 - DNA, 15 bp, Homo sapiens
gtttttcccctccca

SEQ ID NO: 381909 - DNA, 15 bp, Homo sapiens
ggtttttcccctccc

SEQ ID NO: 381910 - DNA, 15 bp, Homo sapiens
gggtttttcccctcc

SEQ ID NO: 381911 - DNA, 15 bp, Homo sapiens
agggtttttcccctc

SEQ ID NO: 381912 - DNA, 15 bp, Homo sapiens
tagggtttttcccct

SEQ ID NO: 381913 - DNA, 15 bp, Homo sapiens
ttagggtttttcccc

SEQ ID NO: 381914 - DNA, 15 bp, Homo sapiens
cttagggtttttccc

SEQ ID NO: 381915 - DNA, 15 bp, Homo sapiens
gcttagggtttttcc

SEQ ID NO: 381916 - DNA, 15 bp, Homo sapiens
agcttagggtttttc

SEQ ID NO: 381917 - DNA, 15 bp, Homo sapiens
gagcttagggttttt

SEQ ID NO: 381918 - DNA, 15 bp, Homo sapiens
ggagcttagggtttt

SEQ ID NO: 381919 - DNA, 15 bp, Homo sapiens
gggagcttagggttt

SEQ ID NO: 381920 - DNA, 15 bp, Homo sapiens
ggggagcttagggtt

SEQ ID NO: 381921 - DNA, 15 bp, Homo sapiens
tggggagcttagggt

SEQ ID NO: 381922 - DNA, 15 bp, Homo sapiens
ctggggagcttaggg

SEQ ID NO: 381923 - DNA, 15 bp, Homo sapiens
tctggggagcttagg

SEQ ID NO: 381924 - DNA, 15 bp, Homo sapiens
ttctggggagcttag

SEQ ID NO: 381925 - DNA, 15 bp, Homo sapiens
tttctggggagctta

SEQ ID NO: 381926 - DNA, 15 bp, Homo sapiens
atttctggggagctt

SEQ ID NO: 381927 - DNA, 15 bp, Homo sapiens
tatttctggggagct

SEQ ID NO: 381928 - DNA, 15 bp, Homo sapiens
ttatttctggggagc

SEQ ID NO: 381929 - DNA, 15 bp, Homo sapiens
gttatttctggggag

SEQ ID NO: 381930 - DNA, 15 bp, Homo sapiens
tgttatttctgggga

SEQ ID NO: 381931 - DNA, 15 bp, Homo sapiens
gtgttatttctgggg

SEQ ID NO: 381932 - DNA, 15 bp, Homo sapiens
ggtgttatttctggg

SEQ ID NO: 381933 - DNA, 15 bp, Homo sapiens
tggtgttatttctgg

SEQ ID NO: 381934 - DNA, 15 bp, Homo sapiens
ctggtgttatttctg

SEQ ID NO: 381935 - DNA, 15 bp, Homo sapiens
cctggtgttatttct

SEQ ID NO: 381936 - DNA, 15 bp, Homo sapiens
acctggtgttatttc

SEQ ID NO: 381937 - DNA, 15 bp, Homo sapiens
aacctggtgttattt

SEQ ID NO: 381938 - DNA, 15 bp, Homo sapiens
taacctggtgttatt

SEQ ID NO: 381939 - DNA, 15 bp, Homo sapiens
gtaacctggtgttat

SEQ ID NO: 381940 - DNA, 15 bp, Homo sapiens
ggtaacctggtgtta

SEQ ID NO: 381941 - DNA, 15 bp, Homo sapiens
aggtaacctggtgtt

SEQ ID NO: 381942 - DNA, 15 bp, Homo sapiens
gaggtaacctggtgt

SEQ ID NO: 381943 - DNA, 15 bp, Homo sapiens
agaggtaacctggtg

SEQ ID NO: 381944 - DNA, 15 bp, Homo sapiens
aagaggtaacctggt

SEQ ID NO: 381945 - DNA, 15 bp, Homo sapiens
gaagaggtaacctgg

SEQ ID NO: 381946 - DNA, 15 bp, Homo sapiens
ggaagaggtaacctg

SEQ ID NO: 381947 - DNA, 15 bp, Homo sapiens
aggaagaggtaacct

SEQ ID NO: 381948 - DNA, 15 bp, Homo sapiens
gaggaagaggtaacc

SEQ ID NO: 381949 - DNA, 15 bp, Homo sapiens
agaggaagaggtaac

SEQ ID NO: 381950 - DNA, 15 bp, Homo sapiens
gagaggaagaggtaa

SEQ ID NO: 381951 - DNA, 15 bp, Homo sapiens
ggagaggaagaggta

SEQ ID NO: 381952 - DNA, 15 bp, Homo sapiens
aggagaggaagaggt

SEQ ID NO: 381953 - DNA, 15 bp, Homo sapiens
aaggagaggaagagg

SEQ ID NO: 381954 - DNA, 15 bp, Homo sapiens
aaaggagaggaagag

SEQ ID NO: 381955 - DNA, 15 bp, Homo sapiens
taaaggagaggaaga

SEQ ID NO: 381956 - DNA, 15 bp, Homo sapiens
gtaaaggagaggaag

SEQ ID NO: 381957 - DNA, 15 bp, Homo sapiens
ggtaaaggagaggaa

SEQ ID NO: 381958 - DNA, 15 bp, Homo sapiens
aggtaaaggagagga

SEQ ID NO: 381959 - DNA, 15 bp, Homo sapiens
aaggtaaaggagagg

SEQ ID NO: 381960 - DNA, 15 bp, Homo sapiens
gaaggtaaaggagag

SEQ ID NO: 381961 - DNA, 15 bp, Homo sapiens
ggaaggtaaaggaga

SEQ ID NO: 381962 - DNA, 15 bp, Homo sapiens
tggaaggtaaaggag

SEQ ID NO: 381963 - DNA, 15 bp, Homo sapiens
ttggaaggtaaagga

SEQ ID NO: 381964 - DNA, 15 bp, Homo sapiens
tttggaaggtaaagg

SEQ ID NO: 381965 - DNA, 15 bp, Homo sapiens
atttggaaggtaaag

SEQ ID NO: 381966 - DNA, 15 bp, Homo sapiens
catttggaaggtaaa

SEQ ID NO: 381967 - DNA, 15 bp, Homo sapiens
tcatttggaaggtaa

SEQ ID NO: 381968 - DNA, 15 bp, Homo sapiens
ttcatttggaaggta

SEQ ID NO: 381969 - DNA, 15 bp, Homo sapiens
cttcatttggaaggt

SEQ ID NO: 381970 - DNA, 15 bp, Homo sapiens
tcttcatttggaagg

SEQ ID NO: 381971 - DNA, 15 bp, Homo sapiens
atcttcatttggaag

SEQ ID NO: 381972 - DNA, 15 bp, Homo sapiens
catcttcatttggaa

SEQ ID NO: 381973 - DNA, 15 bp, Homo sapiens
tcatcttcatttgga

SEQ ID NO: 381974 - DNA, 15 bp, Homo sapiens
gtcatcttcatttgg

SEQ ID NO: 381975 - DNA, 15 bp, Homo sapiens
ggtcatcttcatttg

SEQ ID NO: 381976 - DNA, 15 bp, Homo sapiens
tggtcatcttcattt

SEQ ID NO: 381977 - DNA, 15 bp, Homo sapiens
ttggtcatcttcatt

SEQ ID NO: 381978 - DNA, 15 bp, Homo sapiens
gttggtcatcttcat

SEQ ID NO: 381979 - DNA, 15 bp, Homo sapiens
ggttggtcatcttca

SEQ ID NO: 381980 - DNA, 15 bp, Homo sapiens
tggttggtcatcttc

SEQ ID NO: 381981 - DNA, 15 bp, Homo sapiens
ttggttggtcatctt

SEQ ID NO: 381982 - DNA, 15 bp, Homo sapiens
tttggttggtcatct

SEQ ID NO: 381983 - DNA, 15 bp, Homo sapiens
atttggttggtcatc

SEQ ID NO: 381984 - DNA, 15 bp, Homo sapiens
gatttggttggtcat

SEQ ID NO: 381985 - DNA, 15 bp, Homo sapiens
ggatttggttggtca

SEQ ID NO: 381986 - DNA, 15 bp, Homo sapiens
gggatttggttggtc

SEQ ID NO: 381987 - DNA, 15 bp, Homo sapiens
ggggatttggttggt

SEQ ID NO: 381988 - DNA, 15 bp, Homo sapiens
gggggatttggttgg

SEQ ID NO: 381989 - DNA, 15 bp, Homo sapiens
agggggatttggttg

SEQ ID NO: 381990 - DNA, 15 bp, Homo sapiens
gagggggatttggtt

SEQ ID NO: 381991 - DNA, 15 bp, Homo sapiens
agagggggatttggt

SEQ ID NO: 381992 - DNA, 15 bp, Homo sapiens
cagagggggatttgg

SEQ ID NO: 381993 - DNA, 15 bp, Homo sapiens
acagagggggatttg

SEQ ID NO: 381994 - DNA, 15 bp, Homo sapiens
gacagagggggattt

SEQ ID NO: 381995 - DNA, 15 bp, Homo sapiens
tgacagagggggatt

SEQ ID NO: 381996 - DNA, 15 bp, Homo sapiens
gtgacagagggggat

SEQ ID NO: 381997 - DNA, 15 bp, Homo sapiens
ggtgacagaggggga

SEQ ID NO: 381998 - DNA, 15 bp, Homo sapiens
aggtgacagaggggg

SEQ ID NO: 381999 - DNA, 15 bp, Homo sapiens
gaggtgacagagggg

SEQ ID NO: 382000 - DNA, 15 bp, Homo sapiens
agaggtgacagaggg

SEQ ID NO: 382001 - DNA, 15 bp, Homo sapiens
cagaggtgacagagg

SEQ ID NO: 382002 - DNA, 15 bp, Homo sapiens
gcagaggtgacagag

SEQ ID NO: 382003 - DNA, 15 bp, Homo sapiens
agcagaggtgacaga

SEQ ID NO: 382004 - DNA, 15 bp, Homo sapiens
cagcagaggtgacag

SEQ ID NO: 382005 - DNA, 15 bp, Homo sapiens
gcagcagaggtgaca

SEQ ID NO: 382006 - DNA, 15 bp, Homo sapiens
ggcagcagaggtgac

SEQ ID NO: 382007 - DNA, 15 bp, Homo sapiens
tggcagcagaggtga

SEQ ID NO: 382008 - DNA, 15 bp, Homo sapiens
gtggcagcagaggtg

SEQ ID NO: 382009 - DNA, 15 bp, Homo sapiens
tgtggcagcagaggt

SEQ ID NO: 382010 - DNA, 15 bp, Homo sapiens
ttgtggcagcagagg

SEQ ID NO: 382011 - DNA, 15 bp, Homo sapiens
attgtggcagcagag

SEQ ID NO: 382012 - DNA, 15 bp, Homo sapiens
gattgtggcagcaga

SEQ ID NO: 382013 - DNA, 15 bp, Homo sapiens
ggattgtggcagcag

SEQ ID NO: 382014 - DNA, 15 bp, Homo sapiens
tggattgtggcagca

SEQ ID NO: 382015 - DNA, 15 bp, Homo sapiens
atggattgtggcagc

SEQ ID NO: 382016 - DNA, 15 bp, Homo sapiens
catggattgtggcag

SEQ ID NO: 382017 - DNA, 15 bp, Homo sapiens
acatggattgtggca

SEQ ID NO: 382018 - DNA, 15 bp, Homo sapiens
aacatggattgtggc

SEQ ID NO: 382019 - DNA, 15 bp, Homo sapiens
gaacatggattgtgg

SEQ ID NO: 382020 - DNA, 15 bp, Homo sapiens
agaacatggattgtg

SEQ ID NO: 382021 - DNA, 15 bp, Homo sapiens
aagaacatggattgt

SEQ ID NO: 382022 - DNA, 15 bp, Homo sapiens
gaagaacatggattg

SEQ ID NO: 382023 - DNA, 15 bp, Homo sapiens
tgaagaacatggatt

SEQ ID NO: 382024 - DNA, 15 bp, Homo sapiens
ctgaagaacatggat

SEQ ID NO: 382025 - DNA, 15 bp, Homo sapiens
cctgaagaacatgga

SEQ ID NO: 382026 - DNA, 15 bp, Homo sapiens
tcctgaagaacatgg

SEQ ID NO: 382027 - DNA, 15 bp, Homo sapiens
atcctgaagaacatg

SEQ ID NO: 382028 - DNA, 15 bp, Homo sapiens
tatcctgaagaacat

SEQ ID NO: 382029 - DNA, 15 bp, Homo sapiens
gtatcctgaagaaca

SEQ ID NO: 382030 - DNA, 15 bp, Homo sapiens
tgtatcctgaagaac

SEQ ID NO: 382031 - DNA, 15 bp, Homo sapiens
gtgtatcctgaagaa

SEQ ID NO: 382032 - DNA, 15 bp, Homo sapiens
ggtgtatcctgaaga

SEQ ID NO: 382033 - DNA, 15 bp, Homo sapiens
gggtgtatcctgaag

SEQ ID NO: 382034 - DNA, 15 bp, Homo sapiens
ggggtgtatcctgaa

SEQ ID NO: 382035 - DNA, 15 bp, Homo sapiens
cggggtgtatcctga

SEQ ID NO: 382036 - DNA, 15 bp, Homo sapiens
tcggggtgtatcctg

SEQ ID NO: 382037 - DNA, 15 bp, Homo sapiens
atcggggtgtatcct

SEQ ID NO: 382038 - DNA, 15 bp, Homo sapiens
tatcggggtgtatcc

SEQ ID NO: 382039 - DNA, 15 bp, Homo sapiens
atatcggggtgtatc

SEQ ID NO: 382040 - DNA, 15 bp, Homo sapiens
tatatcggggtgtat

SEQ ID NO: 382041 - DNA, 15 bp, Homo sapiens
gtatatcggggtgta

SEQ ID NO: 382042 - DNA, 15 bp, Homo sapiens
tgtatatcggggtgt

SEQ ID NO: 382043 - DNA, 15 bp, Homo sapiens
gtgtatatcggggtg

SEQ ID NO: 382044 - DNA, 15 bp, Homo sapiens
tgtgtatatcggggt

SEQ ID NO: 382045 - DNA, 15 bp, Homo sapiens
gtgtgtatatcgggg

SEQ ID NO: 382046 - DNA, 15 bp, Homo sapiens
ggtgtgtatatcggg

SEQ ID NO: 382047 - DNA, 15 bp, Homo sapiens
gggtgtgtatatcgg

SEQ ID NO: 382048 - DNA, 15 bp, Homo sapiens
ggggtgtgtatatcg

SEQ ID NO: 382049 - DNA, 15 bp, Homo sapiens
aggggtgtgtatatc

SEQ ID NO: 382050 - DNA, 15 bp, Homo sapiens
caggggtgtgtatat

SEQ ID NO: 382051 - DNA, 15 bp, Homo sapiens
acaggggtgtgtata

SEQ ID NO: 382052 - DNA, 15 bp, Homo sapiens
aacaggggtgtgtat

SEQ ID NO: 382053 - DNA, 15 bp, Homo sapiens
gaacaggggtgtgta

SEQ ID NO: 382054 - DNA, 15 bp, Homo sapiens
agaacaggggtgtgt

SEQ ID NO: 382055 - DNA, 15 bp, Homo sapiens
gagaacaggggtgtg

SEQ ID NO: 382056 - DNA, 15 bp, Homo sapiens
agagaacaggggtgt

SEQ ID NO: 382057 - DNA, 15 bp, Homo sapiens
tagagaacaggggtg

SEQ ID NO: 382058 - DNA, 15 bp, Homo sapiens
gtagagaacaggggt

SEQ ID NO: 382059 - DNA, 15 bp, Homo sapiens
ggtagagaacagggg

SEQ ID NO: 382060 - DNA, 15 bp, Homo sapiens
gggtagagaacaggg

SEQ ID NO: 382061 - DNA, 15 bp, Homo sapiens
ggggtagagaacagg

SEQ ID NO: 382062 - DNA, 15 bp, Homo sapiens
gggggtagagaacag

SEQ ID NO: 382063 - DNA, 15 bp, Homo sapiens
tgggggtagagaaca

SEQ ID NO: 382064 - DNA, 15 bp, Homo sapiens
ctgggggtagagaac

SEQ ID NO: 382065 - DNA, 15 bp, Homo sapiens
tctgggggtagagaa

SEQ ID NO: 382066 - DNA, 15 bp, Homo sapiens
ttctgggggtagaga

SEQ ID NO: 382067 - DNA, 15 bp, Homo sapiens
attctgggggtagag

SEQ ID NO: 382068 - DNA, 15 bp, Homo sapiens
gattctgggggtaga

SEQ ID NO: 382069 - DNA, 15 bp, Homo sapiens
agattctgggggtag

SEQ ID NO: 382070 - DNA, 15 bp, Homo sapiens
gagattctgggggta

SEQ ID NO: 382071 - DNA, 15 bp, Homo sapiens
agagattctgggggt

SEQ ID NO: 382072 - DNA, 15 bp, Homo sapiens
cagagattctggggg

SEQ ID NO: 382073 - DNA, 15 bp, Homo sapiens
gcagagattctgggg

SEQ ID NO: 382074 - DNA, 15 bp, Homo sapiens
agcagagattctggg

SEQ ID NO: 382075 - DNA, 15 bp, Homo sapiens
cagcagagattctgg

SEQ ID NO: 382076 - DNA, 15 bp, Homo sapiens
tcagcagagattctg

SEQ ID NO: 382077 - DNA, 15 bp, Homo sapiens
ttcagcagagattct

SEQ ID NO: 382078 - DNA, 15 bp, Homo sapiens
cttcagcagagattc

SEQ ID NO: 382079 - DNA, 15 bp, Homo sapiens
ccttcagcagagatt

SEQ ID NO: 382080 - DNA, 15 bp, Homo sapiens
cccttcagcagagat

SEQ ID NO: 382081 - DNA, 15 bp, Homo sapiens
gcccttcagcagaga

SEQ ID NO: 382082 - DNA, 15 bp, Homo sapiens
tgcccttcagcagag

SEQ ID NO: 382083 - DNA, 15 bp, Homo sapiens
atgcccttcagcaga

SEQ ID NO: 382084 - DNA, 15 bp, Homo sapiens
gatgcccttcagcag

SEQ ID NO: 382085 - DNA, 15 bp, Homo sapiens
tgatgcccttcagca

SEQ ID NO: 382086 - DNA, 15 bp, Homo sapiens
atgatgcccttcagc

SEQ ID NO: 382087 - DNA, 15 bp, Homo sapiens
aatgatgcccttcag

SEQ ID NO: 382088 - DNA, 15 bp, Homo sapiens
aaatgatgcccttca

SEQ ID NO: 382089 - DNA, 15 bp, Homo sapiens
caaatgatgcccttc

SEQ ID NO: 382090 - DNA, 15 bp, Homo sapiens
acaaatgatgccctt

SEQ ID NO: 382091 - DNA, 15 bp, Homo sapiens
gacaaatgatgccct

SEQ ID NO: 382092 - DNA, 15 bp, Homo sapiens
tgacaaatgatgccc

SEQ ID NO: 382093 - DNA, 15 bp, Homo sapiens
atgacaaatgatgcc

SEQ ID NO: 382094 - DNA, 15 bp, Homo sapiens
gatgacaaatgatgc

SEQ ID NO: 382095 - DNA, 15 bp, Homo sapiens
tgatgacaaatgatg

SEQ ID NO: 382096 - DNA, 15 bp, Homo sapiens
gtgatgacaaatgat

SEQ ID NO: 382097 - DNA, 15 bp, Homo sapiens
tgtgatgacaaatga

SEQ ID NO: 382098 - DNA, 15 bp, Homo sapiens
atgtgatgacaaatg

SEQ ID NO: 382099 - DNA, 15 bp, Homo sapiens
aatgtgatgacaaat

SEQ ID NO: 382100 - DNA, 15 bp, Homo sapiens
gaatgtgatgacaaa

SEQ ID NO: 382101 - DNA, 15 bp, Homo sapiens
tgaatgtgatgacaa

SEQ ID NO: 382102 - DNA, 15 bp, Homo sapiens
ttgaatgtgatgaca

SEQ ID NO: 382103 - DNA, 15 bp, Homo sapiens
cttgaatgtgatgac

SEQ ID NO: 382104 - DNA, 15 bp, Homo sapiens
tcttgaatgtgatga

SEQ ID NO: 382105 - DNA, 15 bp, Homo sapiens
ctcttgaatgtgatg

SEQ ID NO: 382106 - DNA, 15 bp, Homo sapiens
cctcttgaatgtgat

SEQ ID NO: 382107 - DNA, 15 bp, Homo sapiens
acctcttgaatgtga

SEQ ID NO: 382108 - DNA, 15 bp, Homo sapiens
tacctcttgaatgtg

SEQ ID NO: 382109 - DNA, 15 bp, Homo sapiens
gtacctcttgaatgt

SEQ ID NO: 382110 - DNA, 15 bp, Homo sapiens
cgtacctcttgaatg

SEQ ID NO: 382111 - DNA, 15 bp, Homo sapiens
tcgtacctcttgaat

SEQ ID NO: 382112 - DNA, 15 bp, Homo sapiens
gtcgtacctcttgaa

SEQ ID NO: 382113 - DNA, 15 bp, Homo sapiens
ggtcgtacctcttga

SEQ ID NO: 382114 - DNA, 15 bp, Homo sapiens
gggtcgtacctcttg

SEQ ID NO: 382115 - DNA, 15 bp, Homo sapiens
tgggtcgtacctctt

SEQ ID NO: 382116 - DNA, 15 bp, Homo sapiens
atgggtcgtacctct

SEQ ID NO: 382117 - DNA, 15 bp, Homo sapiens
catgggtcgtacctc

SEQ ID NO: 382118 - DNA, 15 bp, Homo sapiens
gcatgggtcgtacct

SEQ ID NO: 382119 - DNA, 15 bp, Homo sapiens
agcatgggtcgtacc

SEQ ID NO: 382120 - DNA, 15 bp, Homo sapiens
aagcatgggtcgtac

SEQ ID NO: 382121 - DNA, 15 bp, Homo sapiens
taagcatgggtcgta

SEQ ID NO: 382122 - DNA, 15 bp, Homo sapiens
gtaagcatgggtcgt

SEQ ID NO: 382123 - DNA, 15 bp, Homo sapiens
tgtaagcatgggtcg

SEQ ID NO: 382124 - DNA, 15 bp, Homo sapiens
atgtaagcatgggtc

SEQ ID NO: 382125 - DNA, 15 bp, Homo sapiens
gatgtaagcatgggt

SEQ ID NO: 382126 - DNA, 15 bp, Homo sapiens
tgatgtaagcatggg

SEQ ID NO: 382127 - DNA, 15 bp, Homo sapiens
atgatgtaagcatgg

SEQ ID NO: 382128 - DNA, 15 bp, Homo sapiens
gatgatgtaagcatg

SEQ ID NO: 382129 - DNA, 15 bp, Homo sapiens
ggatgatgtaagcat

SEQ ID NO: 382130 - DNA, 15 bp, Homo sapiens
aggatgatgtaagca

SEQ ID NO: 382131 - DNA, 15 bp, Homo sapiens
aaggatgatgtaagc

SEQ ID NO: 382132 - DNA, 15 bp, Homo sapiens
aaaggatgatgtaag

SEQ ID NO: 382133 - DNA, 15 bp, Homo sapiens
taaaggatgatgtaa

SEQ ID NO: 382134 - DNA, 15 bp, Homo sapiens
ctaaaggatgatgta

SEQ ID NO: 382135 - DNA, 15 bp, Homo sapiens
actaaaggatgatgt

SEQ ID NO: 382136 - DNA, 15 bp, Homo sapiens
tactaaaggatgatg

SEQ ID NO: 382137 - DNA, 15 bp, Homo sapiens
gtactaaaggatgat

SEQ ID NO: 382138 - DNA, 15 bp, Homo sapiens
agtactaaaggatga

SEQ ID NO: 382139 - DNA, 15 bp, Homo sapiens
cagtactaaaggatg

SEQ ID NO: 382140 - DNA, 15 bp, Homo sapiens
tcagtactaaaggat

SEQ ID NO: 382141 - DNA, 15 bp, Homo sapiens
atcagtactaaagga

SEQ ID NO: 382142 - DNA, 15 bp, Homo sapiens
tatcagtactaaagg

SEQ ID NO: 382143 - DNA, 15 bp, Homo sapiens
ctatcagtactaaag

SEQ ID NO: 382144 - DNA, 15 bp, Homo sapiens
actatcagtactaaa

SEQ ID NO: 382145 - DNA, 15 bp, Homo sapiens
tactatcagtactaa

SEQ ID NO: 382146 - DNA, 15 bp, Homo sapiens
gtactatcagtacta

SEQ ID NO: 382147 - DNA, 15 bp, Homo sapiens
agtactatcagtact

SEQ ID NO: 382148 - DNA, 15 bp, Homo sapiens
gagtactatcagtac

SEQ ID NO: 382149 - DNA, 15 bp, Homo sapiens
tgagtactatcagta

SEQ ID NO: 382150 - DNA, 15 bp, Homo sapiens
ctgagtactatcagt

SEQ ID NO: 382151 - DNA, 15 bp, Homo sapiens
cctgagtactatcag

SEQ ID NO: 382152 - DNA, 15 bp, Homo sapiens
gcctgagtactatca

SEQ ID NO: 382153 - DNA, 15 bp, Homo sapiens
agcctgagtactatc

SEQ ID NO: 382154 - DNA, 15 bp, Homo sapiens
tagcctgagtactat

SEQ ID NO: 382155 - DNA, 15 bp, Homo sapiens
ctagcctgagtacta

SEQ ID NO: 382156 - DNA, 15 bp, Homo sapiens
actagcctgagtact

SEQ ID NO: 382157 - DNA, 15 bp, Homo sapiens
tactagcctgagtac

SEQ ID NO: 382158 - DNA, 15 bp, Homo sapiens
gtactagcctgagta

SEQ ID NO: 382159 - DNA, 15 bp, Homo sapiens
agtactagcctgagt

SEQ ID NO: 382160 - DNA, 15 bp, Homo sapiens
tagtactagcctgag

SEQ ID NO: 382161 - DNA, 15 bp, Homo sapiens
ttagtactagcctga

SEQ ID NO: 382162 - DNA, 15 bp, Homo sapiens
tttagtactagcctg

SEQ ID NO: 382163 - DNA, 15 bp, Homo sapiens
gtttagtactagcct

SEQ ID NO: 382164 - DNA, 15 bp, Homo sapiens
agtttagtactagcc

SEQ ID NO: 382165 - DNA, 15 bp, Homo sapiens
aagtttagtactagc

SEQ ID NO: 382166 - DNA, 15 bp, Homo sapiens
taagtttagtactag

SEQ ID NO: 382167 - DNA, 15 bp, Homo sapiens
gtaagtttagtacta

SEQ ID NO: 382168 - DNA, 15 bp, Homo sapiens
agtaagtttagtact

SEQ ID NO: 382169 - DNA, 15 bp, Homo sapiens
gagtaagtttagtac

SEQ ID NO: 382170 - DNA, 15 bp, Homo sapiens
agagtaagtttagta

SEQ ID NO: 382171 - DNA, 15 bp, Homo sapiens
tagagtaagtttagt

SEQ ID NO: 382172 - DNA, 15 bp, Homo sapiens
ttagagtaagtttag

SEQ ID NO: 382173 - DNA, 15 bp, Homo sapiens
tttagagtaagttta

SEQ ID NO: 382174 - DNA, 15 bp, Homo sapiens
ttttagagtaagttt

SEQ ID NO: 382175 - DNA, 15 bp, Homo sapiens
cttttagagtaagtt

SEQ ID NO: 382176 - DNA, 15 bp, Homo sapiens
gcttttagagtaagt

SEQ ID NO: 382177 - DNA, 15 bp, Homo sapiens
agcttttagagtaag

SEQ ID NO: 382178 - DNA, 15 bp, Homo sapiens
tagcttttagagtaa

SEQ ID NO: 382179 - DNA, 15 bp, Homo sapiens
ttagcttttagagta

SEQ ID NO: 382180 - DNA, 15 bp, Homo sapiens
gttagcttttagagt

SEQ ID NO: 382181 - DNA, 15 bp, Homo sapiens
cgttagcttttagag

SEQ ID NO: 382182 - DNA, 15 bp, Homo sapiens
gcgttagcttttaga

SEQ ID NO: 382183 - DNA, 15 bp, Homo sapiens
agcgttagcttttag

SEQ ID NO: 382184 - DNA, 15 bp, Homo sapiens
aagcgttagctttta

SEQ ID NO: 382185 - DNA, 15 bp, Homo sapiens
gaagcgttagctttt

SEQ ID NO: 382186 - DNA, 15 bp, Homo sapiens
tgaagcgttagcttt

SEQ ID NO: 382187 - DNA, 15 bp, Homo sapiens
ctgaagcgttagctt

SEQ ID NO: 382188 - DNA, 15 bp, Homo sapiens
gctgaagcgttagct

SEQ ID NO: 382189 - DNA, 15 bp, Homo sapiens
tgctgaagcgttagc

SEQ ID NO: 382190 - DNA, 15 bp, Homo sapiens
ttgctgaagcgttag

SEQ ID NO: 382191 - DNA, 15 bp, Homo sapiens
attgctgaagcgtta

SEQ ID NO: 382192 - DNA, 15 bp, Homo sapiens
aattgctgaagcgtt

SEQ ID NO: 382193 - DNA, 15 bp, Homo sapiens
caattgctgaagcgt

SEQ ID NO: 382194 - DNA, 15 bp, Homo sapiens
gcaattgctgaagcg

SEQ ID NO: 382195 - DNA, 15 bp, Homo sapiens
ggcaattgctgaagc

SEQ ID NO: 382196 - DNA, 15 bp, Homo sapiens
aggcaattgctgaag

SEQ ID NO: 382197 - DNA, 15 bp, Homo sapiens
aaggcaattgctgaa

SEQ ID NO: 382198 - DNA, 15 bp, Homo sapiens
caaggcaattgctga

SEQ ID NO: 382199 - DNA, 15 bp, Homo sapiens
ccaaggcaattgctg

SEQ ID NO: 382200 - DNA, 15 bp, Homo sapiens
cccaaggcaattgct

SEQ ID NO: 382201 - DNA, 15 bp, Homo sapiens
gcccaaggcaattgc

SEQ ID NO: 382202 - DNA, 15 bp, Homo sapiens
ggcccaaggcaattg

SEQ ID NO: 382203 - DNA, 15 bp, Homo sapiens
tggcccaaggcaatt

SEQ ID NO: 382204 - DNA, 15 bp, Homo sapiens
ctggcccaaggcaat

SEQ ID NO: 382205 - DNA, 15 bp, Homo sapiens
cctggcccaaggcaa

SEQ ID NO: 382206 - DNA, 15 bp, Homo sapiens
gcctggcccaaggca

SEQ ID NO: 382207 - DNA, 15 bp, Homo sapiens
tgcctggcccaaggc

SEQ ID NO: 382208 - DNA, 15 bp, Homo sapiens
atgcctggcccaagg

SEQ ID NO: 382209 - DNA, 15 bp, Homo sapiens
aatgcctggcccaag

SEQ ID NO: 382210 - DNA, 15 bp, Homo sapiens
gaatgcctggcccaa

SEQ ID NO: 382211 - DNA, 15 bp, Homo sapiens
agaatgcctggccca

SEQ ID NO: 382212 - DNA, 15 bp, Homo sapiens
gagaatgcctggccc

SEQ ID NO: 382213 - DNA, 15 bp, Homo sapiens
tgagaatgcctggcc

SEQ ID NO: 382214 - DNA, 15 bp, Homo sapiens
atgagaatgcctggc

SEQ ID NO: 382215 - DNA, 15 bp, Homo sapiens
catgagaatgcctgg

SEQ ID NO: 382216 - DNA, 15 bp, Homo sapiens
tcatgagaatgcctg

SEQ ID NO: 382217 - DNA, 15 bp, Homo sapiens
ctcatgagaatgcct

SEQ ID NO: 382218 - DNA, 15 bp, Homo sapiens
gctcatgagaatgcc

SEQ ID NO: 382219 - DNA, 15 bp, Homo sapiens
tgctcatgagaatgc

SEQ ID NO: 382220 - DNA, 15 bp, Homo sapiens
gtgctcatgagaatg

SEQ ID NO: 382221 - DNA, 15 bp, Homo sapiens
agtgctcatgagaat

SEQ ID NO: 382222 - DNA, 15 bp, Homo sapiens
gagtgctcatgagaa

SEQ ID NO: 382223 - DNA, 15 bp, Homo sapiens
agagtgctcatgaga

SEQ ID NO: 382224 - DNA, 15 bp, Homo sapiens
aagagtgctcatgag

SEQ ID NO: 382225 - DNA, 15 bp, Homo sapiens
aaagagtgctcatga

SEQ ID NO: 382226 - DNA, 15 bp, Homo sapiens
taaagagtgctcatg

SEQ ID NO: 382227 - DNA, 15 bp, Homo sapiens
ctaaagagtgctcat

SEQ ID NO: 382228 - DNA, 15 bp, Homo sapiens
actaaagagtgctca

SEQ ID NO: 382229 - DNA, 15 bp, Homo sapiens
aactaaagagtgctc

SEQ ID NO: 382230 - DNA, 15 bp, Homo sapiens
taactaaagagtgct

SEQ ID NO: 382231 - DNA, 15 bp, Homo sapiens
gtaactaaagagtgc

SEQ ID NO: 382232 - DNA, 15 bp, Homo sapiens
ggtaactaaagagtg

SEQ ID NO: 382233 - DNA, 15 bp, Homo sapiens
aggtaactaaagagt

SEQ ID NO: 382234 - DNA, 15 bp, Homo sapiens
taggtaactaaagag

SEQ ID NO: 382235 - DNA, 15 bp, Homo sapiens
ataggtaactaaaga

SEQ ID NO: 382236 - DNA, 15 bp, Homo sapiens
tataggtaactaaag

SEQ ID NO: 382237 - DNA, 15 bp, Homo sapiens
gtataggtaactaaa

SEQ ID NO: 382238 - DNA, 15 bp, Homo sapiens
tgtataggtaactaa

SEQ ID NO: 382239 - DNA, 15 bp, Homo sapiens
ttgtataggtaacta

SEQ ID NO: 382240 - DNA, 15 bp, Homo sapiens
tttgtataggtaact

SEQ ID NO: 382241 - DNA, 15 bp, Homo sapiens
gtttgtataggtaac

SEQ ID NO: 382242 - DNA, 15 bp, Homo sapiens
agtttgtataggtaa

SEQ ID NO: 382243 - DNA, 15 bp, Homo sapiens
gagtttgtataggta

SEQ ID NO: 382244 - DNA, 15 bp, Homo sapiens
tgagtttgtataggt

SEQ ID NO: 382245 - DNA, 15 bp, Homo sapiens
ttgagtttgtatagg

SEQ ID NO: 382246 - DNA, 15 bp, Homo sapiens
attgagtttgtatag

SEQ ID NO: 382247 - DNA, 15 bp, Homo sapiens
gattgagtttgtata

SEQ ID NO: 382248 - DNA, 15 bp, Homo sapiens
ggattgagtttgtat

SEQ ID NO: 382249 - DNA, 15 bp, Homo sapiens
aggattgagtttgta

SEQ ID NO: 382250 - DNA, 15 bp, Homo sapiens
gaggattgagtttgt

SEQ ID NO: 382251 - DNA, 15 bp, Homo sapiens
tgaggattgagtttg

SEQ ID NO: 382252 - DNA, 15 bp, Homo sapiens
gtgaggattgagttt

SEQ ID NO: 382253 - DNA, 15 bp, Homo sapiens
tgtgaggattgagtt

SEQ ID NO: 382254 - DNA, 15 bp, Homo sapiens
ttgtgaggattgagt

SEQ ID NO: 382255 - DNA, 15 bp, Homo sapiens
gttgtgaggattgag

SEQ ID NO: 382256 - DNA, 15 bp, Homo sapiens
tgttgtgaggattga

SEQ ID NO: 382257 - DNA, 15 bp, Homo sapiens
ctgttgtgaggattg

SEQ ID NO: 382258 - DNA, 15 bp, Homo sapiens
gctgttgtgaggatt

SEQ ID NO: 382259 - DNA, 15 bp, Homo sapiens
agctgttgtgaggat

SEQ ID NO: 382260 - DNA, 15 bp, Homo sapiens
aagctgttgtgagga

SEQ ID NO: 382261 - DNA, 15 bp, Homo sapiens
gaagctgttgtgagg

SEQ ID NO: 382262 - DNA, 15 bp, Homo sapiens
tgaagctgttgtgag

SEQ ID NO: 382263 - DNA, 15 bp, Homo sapiens
ctgaagctgttgtga

SEQ ID NO: 382264 - DNA, 15 bp, Homo sapiens
tctgaagctgttgtg

SEQ ID NO: 382265 - DNA, 15 bp, Homo sapiens
atctgaagctgttgt

SEQ ID NO: 382266 - DNA, 15 bp, Homo sapiens
catctgaagctgttg

SEQ ID NO: 382267 - DNA, 15 bp, Homo sapiens
ccatctgaagctgtt

SEQ ID NO: 382268 - DNA, 15 bp, Homo sapiens
tccatctgaagctgt

SEQ ID NO: 382269 - DNA, 15 bp, Homo sapiens
ctccatctgaagctg

SEQ ID NO: 382270 - DNA, 15 bp, Homo sapiens
tctccatctgaagct

SEQ ID NO: 382271 - DNA, 15 bp, Homo sapiens
atctccatctgaagc

SEQ ID NO: 382272 - DNA, 15 bp, Homo sapiens
catctccatctgaag

SEQ ID NO: 382273 - DNA, 15 bp, Homo sapiens
gcatctccatctgaa

SEQ ID NO: 382274 - DNA, 15 bp, Homo sapiens
agcatctccatctga

SEQ ID NO: 382275 - DNA, 15 bp, Homo sapiens
cagcatctccatctg

SEQ ID NO: 382276 - DNA, 15 bp, Homo sapiens
acagcatctccatct

SEQ ID NO: 382277 - DNA, 15 bp, Homo sapiens
cacagcatctccatc

SEQ ID NO: 382278 - DNA, 15 bp, Homo sapiens
acacagcatctccat

SEQ ID NO: 382279 - DNA, 15 bp, Homo sapiens
gacacagcatctcca

SEQ ID NO: 382280 - DNA, 15 bp, Homo sapiens
agacacagcatctcc

SEQ ID NO: 382281 - DNA, 15 bp, Homo sapiens
gagacacagcatctc

SEQ ID NO: 382282 - DNA, 15 bp, Homo sapiens
ggagacacagcatct

SEQ ID NO: 382283 - DNA, 15 bp, Homo sapiens
tggagacacagcatc

SEQ ID NO: 382284 - DNA, 15 bp, Homo sapiens
atggagacacagcat

SEQ ID NO: 382285 - DNA, 15 bp, Homo sapiens
aatggagacacagca

SEQ ID NO: 382286 - DNA, 15 bp, Homo sapiens
aaatggagacacagc

SEQ ID NO: 382287 - DNA, 15 bp, Homo sapiens
caaatggagacacag

SEQ ID NO: 382288 - DNA, 15 bp, Homo sapiens
tcaaatggagacaca

SEQ ID NO: 382289 - DNA, 15 bp, Homo sapiens
ttcaaatggagacac

SEQ ID NO: 382290 - DNA, 15 bp, Homo sapiens
tttcaaatggagaca

SEQ ID NO: 382291 - DNA, 15 bp, Homo sapiens
ctttcaaatggagac

SEQ ID NO: 382292 - DNA, 15 bp, Homo sapiens
tctttcaaatggaga

SEQ ID NO: 382293 - DNA, 15 bp, Homo sapiens
gtctttcaaatggag

SEQ ID NO: 382294 - DNA, 15 bp, Homo sapiens
tgtctttcaaatgga

SEQ ID NO: 382295 - DNA, 15 bp, Homo sapiens
gtgtctttcaaatgg

SEQ ID NO: 382296 - DNA, 15 bp, Homo sapiens
tgtgtctttcaaatg

SEQ ID NO: 382297 - DNA, 15 bp, Homo sapiens
ctgtgtctttcaaat

SEQ ID NO: 382298 - DNA, 15 bp, Homo sapiens
tctgtgtctttcaaa

SEQ ID NO: 382299 - DNA, 15 bp, Homo sapiens
ttctgtgtctttcaa

SEQ ID NO: 382300 - DNA, 15 bp, Homo sapiens
attctgtgtctttca

SEQ ID NO: 382301 - DNA, 15 bp, Homo sapiens
gattctgtgtctttc

SEQ ID NO: 382302 - DNA, 15 bp, Homo sapiens
agattctgtgtcttt

SEQ ID NO: 382303 - DNA, 15 bp, Homo sapiens
cagattctgtgtctt

SEQ ID NO: 382304 - DNA, 15 bp, Homo sapiens
tcagattctgtgtct

SEQ ID NO: 382305 - DNA, 15 bp, Homo sapiens
ctcagattctgtgtc

SEQ ID NO: 382306 - DNA, 15 bp, Homo sapiens
tctcagattctgtgt

SEQ ID NO: 382307 - DNA, 15 bp, Homo sapiens
ctctcagattctgtg

SEQ ID NO: 382308 - DNA, 15 bp, Homo sapiens
tctctcagattctgt

SEQ ID NO: 382309 - DNA, 15 bp, Homo sapiens
gtctctcagattctg

SEQ ID NO: 382310 - DNA, 15 bp, Homo sapiens
tgtctctcagattct

SEQ ID NO: 382311 - DNA, 15 bp, Homo sapiens
gtgtctctcagattc

SEQ ID NO: 382312 - DNA, 15 bp, Homo sapiens
agtgtctctcagatt

SEQ ID NO: 382313 - DNA, 15 bp, Homo sapiens
tagtgtctctcagat

SEQ ID NO: 382314 - DNA, 15 bp, Homo sapiens
ctagtgtctctcaga

SEQ ID NO: 382315 - DNA, 15 bp, Homo sapiens
tctagtgtctctcag

SEQ ID NO: 382316 - DNA, 15 bp, Homo sapiens
ctctagtgtctctca

SEQ ID NO: 382317 - DNA, 15 bp, Homo sapiens
actctagtgtctctc

SEQ ID NO: 382318 - DNA, 15 bp, Homo sapiens
gactctagtgtctct

SEQ ID NO: 382319 - DNA, 15 bp, Homo sapiens
agactctagtgtctc

SEQ ID NO: 382320 - DNA, 15 bp, Homo sapiens
cagactctagtgtct

SEQ ID NO: 382321 - DNA, 15 bp, Homo sapiens
acagactctagtgtc

SEQ ID NO: 382322 - DNA, 15 bp, Homo sapiens
cacagactctagtgt

SEQ ID NO: 382323 - DNA, 15 bp, Homo sapiens
tcacagactctagtg

SEQ ID NO: 382324 - DNA, 15 bp, Homo sapiens
ttcacagactctagt

SEQ ID NO: 382325 - DNA, 15 bp, Homo sapiens
cttcacagactctag

SEQ ID NO: 382326 - DNA, 15 bp, Homo sapiens
acttcacagactcta

SEQ ID NO: 382327 - DNA, 15 bp, Homo sapiens
aacttcacagactct

SEQ ID NO: 382328 - DNA, 15 bp, Homo sapiens
taacttcacagactc

SEQ ID NO: 382329 - DNA, 15 bp, Homo sapiens
ctaacttcacagact

SEQ ID NO: 382330 - DNA, 15 bp, Homo sapiens
gctaacttcacagac

SEQ ID NO: 382331 - DNA, 15 bp, Homo sapiens
ggctaacttcacaga

SEQ ID NO: 382332 - DNA, 15 bp, Homo sapiens
tggctaacttcacag

SEQ ID NO: 382333 - DNA, 15 bp, Homo sapiens
gtggctaacttcaca

SEQ ID NO: 382334 - DNA, 15 bp, Homo sapiens
agtggctaacttcac

SEQ ID NO: 382335 - DNA, 15 bp, Homo sapiens
cagtggctaacttca

SEQ ID NO: 382336 - DNA, 15 bp, Homo sapiens
acagtggctaacttc

SEQ ID NO: 382337 - DNA, 15 bp, Homo sapiens
cacagtggctaactt

SEQ ID NO: 382338 - DNA, 15 bp, Homo sapiens
tcacagtggctaact

SEQ ID NO: 382339 - DNA, 15 bp, Homo sapiens
atcacagtggctaac

SEQ ID NO: 382340 - DNA, 15 bp, Homo sapiens
tatcacagtggctaa

SEQ ID NO: 382341 - DNA, 15 bp, Homo sapiens
atatcacagtggcta

SEQ ID NO: 382342 - DNA, 15 bp, Homo sapiens
tatatcacagtggct

SEQ ID NO: 382343 - DNA, 15 bp, Homo sapiens
ttatatcacagtggc

SEQ ID NO: 382344 - DNA, 15 bp, Homo sapiens
attatatcacagtgg

SEQ ID NO: 382345 - DNA, 15 bp, Homo sapiens
cattatatcacagtg

SEQ ID NO: 382346 - DNA, 15 bp, Homo sapiens
gcattatatcacagt

SEQ ID NO: 382347 - DNA, 15 bp, Homo sapiens
ggcattatatcacag

SEQ ID NO: 382348 - DNA, 15 bp, Homo sapiens
gggcattatatcaca

SEQ ID NO: 382349 - DNA, 15 bp, Homo sapiens
cgggcattatatcac

SEQ ID NO: 382350 - DNA, 15 bp, Homo sapiens
gcgggcattatatca

SEQ ID NO: 382351 - DNA, 15 bp, Homo sapiens
agcgggcattatatc

SEQ ID NO: 382352 - DNA, 15 bp, Homo sapiens
cagcgggcattatat

SEQ ID NO: 382353 - DNA, 15 bp, Homo sapiens
tcagcgggcattata

SEQ ID NO: 382354 - DNA, 15 bp, Homo sapiens
atcagcgggcattat

SEQ ID NO: 382355 - DNA, 15 bp, Homo sapiens
tatcagcgggcatta

SEQ ID NO: 382356 - DNA, 15 bp, Homo sapiens
atatcagcgggcatt

SEQ ID NO: 382357 - DNA, 15 bp, Homo sapiens
aatatcagcgggcat

SEQ ID NO: 382358 - DNA, 15 bp, Homo sapiens
taatatcagcgggca

SEQ ID NO: 382359 - DNA, 15 bp, Homo sapiens
ataatatcagcgggc

SEQ ID NO: 382360 - DNA, 15 bp, Homo sapiens
aataatatcagcggg

SEQ ID NO: 382361 - DNA, 15 bp, Homo sapiens
gaataatatcagcgg

SEQ ID NO: 382362 - DNA, 15 bp, Homo sapiens
ggaataatatcagcg

SEQ ID NO: 382363 - DNA, 15 bp, Homo sapiens
tggaataatatcagc

SEQ ID NO: 382364 - DNA, 15 bp, Homo sapiens
ttggaataatatcag

SEQ ID NO: 382365 - DNA, 15 bp, Homo sapiens
tttggaataatatca

SEQ ID NO: 382366 - DNA, 15 bp, Homo sapiens
atttggaataatatc

SEQ ID NO: 382367 - DNA, 15 bp, Homo sapiens
tatttggaataatat

SEQ ID NO: 382368 - DNA, 15 bp, Homo sapiens
gtatttggaataata

SEQ ID NO: 382369 - DNA, 15 bp, Homo sapiens
agtatttggaataat

SEQ ID NO: 382370 - DNA, 15 bp, Homo sapiens
gagtatttggaataa

SEQ ID NO: 382371 - DNA, 15 bp, Homo sapiens
tgagtatttggaata

SEQ ID NO: 382372 - DNA, 15 bp, Homo sapiens
atgagtatttggaat

SEQ ID NO: 382373 - DNA, 15 bp, Homo sapiens
tatgagtatttggaa

SEQ ID NO: 382374 - DNA, 15 bp, Homo sapiens
ttatgagtatttgga

SEQ ID NO: 382375 - DNA, 15 bp, Homo sapiens
gttatgagtatttgg

SEQ ID NO: 382376 - DNA, 15 bp, Homo sapiens
ggttatgagtatttg

SEQ ID NO: 382377 - DNA, 15 bp, Homo sapiens
aggttatgagtattt

SEQ ID NO: 382378 - DNA, 15 bp, Homo sapiens
aaggttatgagtatt

SEQ ID NO: 382379 - DNA, 15 bp, Homo sapiens
taaggttatgagtat

SEQ ID NO: 382380 - DNA, 15 bp, Homo sapiens
ttaaggttatgagta

SEQ ID NO: 382381 - DNA, 15 bp, Homo sapiens
gttaaggttatgagt

SEQ ID NO: 382382 - DNA, 15 bp, Homo sapiens
tgttaaggttatgag

SEQ ID NO: 382383 - DNA, 15 bp, Homo sapiens
ttgttaaggttatga

SEQ ID NO: 382384 - DNA, 15 bp, Homo sapiens
gttgttaaggttatg

SEQ ID NO: 382385 - DNA, 15 bp, Homo sapiens
agttgttaaggttat

SEQ ID NO: 382386 - DNA, 15 bp, Homo sapiens
gagttgttaaggtta

SEQ ID NO: 382387 - DNA, 15 bp, Homo sapiens
tgagttgttaaggtt

SEQ ID NO: 382388 - DNA, 15 bp, Homo sapiens
gtgagttgttaaggt

SEQ ID NO: 382389 - DNA, 15 bp, Homo sapiens
tgtgagttgttaagg

SEQ ID NO: 382390 - DNA, 15 bp, Homo sapiens
atgtgagttgttaag

SEQ ID NO: 382391 - DNA, 15 bp, Homo sapiens
aatgtgagttgttaa

SEQ ID NO: 382392 - DNA, 15 bp, Homo sapiens
aaatgtgagttgtta

SEQ ID NO: 382393 - DNA, 15 bp, Homo sapiens
taaatgtgagttgtt

SEQ ID NO: 382394 - DNA, 15 bp, Homo sapiens
gtaaatgtgagttgt

SEQ ID NO: 382395 - DNA, 15 bp, Homo sapiens
agtaaatgtgagttg

SEQ ID NO: 382396 - DNA, 15 bp, Homo sapiens
aagtaaatgtgagtt

SEQ ID NO: 382397 - DNA, 15 bp, Homo sapiens
taagtaaatgtgagt

SEQ ID NO: 382398 - DNA, 15 bp, Homo sapiens
gtaagtaaatgtgag

SEQ ID NO: 382399 - DNA, 15 bp, Homo sapiens
ggtaagtaaatgtga

SEQ ID NO: 382400 - DNA, 15 bp, Homo sapiens
tggtaagtaaatgtg

SEQ ID NO: 382401 - DNA, 15 bp, Homo sapiens
atggtaagtaaatgt

SEQ ID NO: 382402 - DNA, 15 bp, Homo sapiens
catggtaagtaaatg

SEQ ID NO: 382403 - DNA, 15 bp, Homo sapiens
acatggtaagtaaat

SEQ ID NO: 382404 - DNA, 15 bp, Homo sapiens
tacatggtaagtaaa

SEQ ID NO: 382405 - DNA, 15 bp, Homo sapiens
atacatggtaagtaa

SEQ ID NO: 382406 - DNA, 15 bp, Homo sapiens
gatacatggtaagta

SEQ ID NO: 382407 - DNA, 15 bp, Homo sapiens
agatacatggtaagt

SEQ ID NO: 382408 - DNA, 15 bp, Homo sapiens
cagatacatggtaag

SEQ ID NO: 382409 - DNA, 15 bp, Homo sapiens
ccagatacatggtaa

SEQ ID NO: 382410 - DNA, 15 bp, Homo sapiens
tccagatacatggta

SEQ ID NO: 382411 - DNA, 15 bp, Homo sapiens
gtccagatacatggt

SEQ ID NO: 382412 - DNA, 15 bp, Homo sapiens
ggtccagatacatgg

SEQ ID NO: 382413 - DNA, 15 bp, Homo sapiens
aggtccagatacatg

SEQ ID NO: 382414 - DNA, 15 bp, Homo sapiens
caggtccagatacat

SEQ ID NO: 382415 - DNA, 15 bp, Homo sapiens
acaggtccagataca

SEQ ID NO: 382416 - DNA, 15 bp, Homo sapiens
cacaggtccagatac

SEQ ID NO: 382417 - DNA, 15 bp, Homo sapiens
acacaggtccagata

SEQ ID NO: 382418 - DNA, 15 bp, Homo sapiens
tacacaggtccagat

SEQ ID NO: 382419 - DNA, 15 bp, Homo sapiens
ttacacaggtccaga

SEQ ID NO: 382420 - DNA, 15 bp, Homo sapiens
cttacacaggtccag

SEQ ID NO: 382421 - DNA, 15 bp, Homo sapiens
acttacacaggtcca

SEQ ID NO: 382422 - DNA, 15 bp, Homo sapiens
cacttacacaggtcc

SEQ ID NO: 382423 - DNA, 15 bp, Homo sapiens
gcacttacacaggtc

SEQ ID NO: 382424 - DNA, 15 bp, Homo sapiens
agcacttacacaggt

SEQ ID NO: 382425 - DNA, 15 bp, Homo sapiens
aagcacttacacagg

SEQ ID NO: 382426 - DNA, 15 bp, Homo sapiens
gaagcacttacacag

SEQ ID NO: 382427 - DNA, 15 bp, Homo sapiens
tgaagcacttacaca

SEQ ID NO: 382428 - DNA, 15 bp, Homo sapiens
ttgaagcacttacac

SEQ ID NO: 382429 - DNA, 15 bp, Homo sapiens
cttgaagcacttaca

SEQ ID NO: 382430 - DNA, 15 bp, Homo sapiens
ccttgaagcacttac

SEQ ID NO: 382431 - DNA, 15 bp, Homo sapiens
cccttgaagcactta

SEQ ID NO: 382432 - DNA, 15 bp, Homo sapiens
acccttgaagcactt

SEQ ID NO: 382433 - DNA, 15 bp, Homo sapiens
tacccttgaagcact

SEQ ID NO: 382434 - DNA, 15 bp, Homo sapiens
gtacccttgaagcac

SEQ ID NO: 382435 - DNA, 15 bp, Homo sapiens
agtacccttgaagca

SEQ ID NO: 382436 - DNA, 15 bp, Homo sapiens
cagtacccttgaagc

SEQ ID NO: 382437 - DNA, 15 bp, Homo sapiens
ccagtacccttgaag

SEQ ID NO: 382438 - DNA, 15 bp, Homo sapiens
gccagtacccttgaa

SEQ ID NO: 382439 - DNA, 15 bp, Homo sapiens
agccagtacccttga

SEQ ID NO: 382440 - DNA, 15 bp, Homo sapiens
aagccagtacccttg

SEQ ID NO: 382441 - DNA, 15 bp, Homo sapiens
gaagccagtaccctt

SEQ ID NO: 382442 - DNA, 15 bp, Homo sapiens
tgaagccagtaccct

SEQ ID NO: 382443 - DNA, 15 bp, Homo sapiens
atgaagccagtaccc

SEQ ID NO: 382444 - DNA, 15 bp, Homo sapiens
aatgaagccagtacc

SEQ ID NO: 382445 - DNA, 15 bp, Homo sapiens
aaatgaagccagtac

SEQ ID NO: 382446 - DNA, 15 bp, Homo sapiens
taaatgaagccagta

SEQ ID NO: 382447 - DNA, 15 bp, Homo sapiens
ataaatgaagccagt

SEQ ID NO: 382448 - DNA, 15 bp, Homo sapiens
gataaatgaagccag

SEQ ID NO: 382449 - DNA, 15 bp, Homo sapiens
agataaatgaagcca

SEQ ID NO: 382450 - DNA, 15 bp, Homo sapiens
tagataaatgaagcc

SEQ ID NO: 382451 - DNA, 15 bp, Homo sapiens
ttagataaatgaagc

SEQ ID NO: 382452 - DNA, 15 bp, Homo sapiens
tttagataaatgaag

SEQ ID NO: 382453 - DNA, 15 bp, Homo sapiens
gtttagataaatgaa

SEQ ID NO: 382454 - DNA, 15 bp, Homo sapiens
tgtttagataaatga

SEQ ID NO: 382455 - DNA, 15 bp, Homo sapiens
ttgtttagataaatg

SEQ ID NO: 382456 - DNA, 15 bp, Homo sapiens
gttgtttagataaat

SEQ ID NO: 382457 - DNA, 15 bp, Homo sapiens
tgttgtttagataaa

SEQ ID NO: 382458 - DNA, 15 bp, Homo sapiens
gtgttgtttagataa

SEQ ID NO: 382459 - DNA, 15 bp, Homo sapiens
agtgttgtttagata

SEQ ID NO: 382460 - DNA, 15 bp, Homo sapiens
tagtgttgtttagat

SEQ ID NO: 382461 - DNA, 15 bp, Homo sapiens
atagtgttgtttaga

SEQ ID NO: 382462 - DNA, 15 bp, Homo sapiens
aatagtgttgtttag

SEQ ID NO: 382463 - DNA, 15 bp, Homo sapiens
taatagtgttgttta

SEQ ID NO: 382464 - DNA, 15 bp, Homo sapiens
ctaatagtgttgttt

SEQ ID NO: 382465 - DNA, 15 bp, Homo sapiens
cctaatagtgttgtt

SEQ ID NO: 382466 - DNA, 15 bp, Homo sapiens
tcctaatagtgttgt

SEQ ID NO: 382467 - DNA, 15 bp, Homo sapiens
ttcctaatagtgttg

SEQ ID NO: 382468 - DNA, 15 bp, Homo sapiens
cttcctaatagtgtt

SEQ ID NO: 382469 - DNA, 15 bp, Homo sapiens
acttcctaatagtgt

SEQ ID NO: 382470 - DNA, 15 bp, Homo sapiens
aacttcctaatagtg

SEQ ID NO: 382471 - DNA, 15 bp, Homo sapiens
aaacttcctaatagt

SEQ ID NO: 382472 - DNA, 15 bp, Homo sapiens
caaacttcctaatag

SEQ ID NO: 382473 - DNA, 15 bp, Homo sapiens
acaaacttcctaata

SEQ ID NO: 382474 - DNA, 15 bp, Homo sapiens
tacaaacttcctaat

SEQ ID NO: 382475 - DNA, 15 bp, Homo sapiens
atacaaacttcctaa

SEQ ID NO: 382476 - DNA, 15 bp, Homo sapiens
gatacaaacttccta

SEQ ID NO: 382477 - DNA, 15 bp, Homo sapiens
tgatacaaacttcct

SEQ ID NO: 382478 - DNA, 15 bp, Homo sapiens
atgatacaaacttcc

SEQ ID NO: 382479 - DNA, 15 bp, Homo sapiens
gatgatacaaacttc

SEQ ID NO: 382480 - DNA, 15 bp, Homo sapiens
tgatgatacaaactt

SEQ ID NO: 382481 - DNA, 15 bp, Homo sapiens
ctgatgatacaaact

SEQ ID NO: 382482 - DNA, 15 bp, Homo sapiens
gctgatgatacaaac

SEQ ID NO: 382483 - DNA, 15 bp, Homo sapiens
ggctgatgatacaaa

SEQ ID NO: 382484 - DNA, 15 bp, Homo sapiens
gggctgatgatacaa

SEQ ID NO: 382485 - DNA, 15 bp, Homo sapiens
agggctgatgataca

SEQ ID NO: 382486 - DNA, 15 bp, Homo sapiens
tagggctgatgatac

SEQ ID NO: 382487 - DNA, 15 bp, Homo sapiens
atagggctgatgata

SEQ ID NO: 382488 - DNA, 15 bp, Homo sapiens
aatagggctgatgat

SEQ ID NO: 382489 - DNA, 15 bp, Homo sapiens
aaatagggctgatga

SEQ ID NO: 382490 - DNA, 15 bp, Homo sapiens
aaaatagggctgatg

SEQ ID NO: 382491 - DNA, 15 bp, Homo sapiens
taaaatagggctgat

SEQ ID NO: 382492 - DNA, 15 bp, Homo sapiens
gtaaaatagggctga

SEQ ID NO: 382493 - DNA, 15 bp, Homo sapiens
tgtaaaatagggctg

SEQ ID NO: 382494 - DNA, 15 bp, Homo sapiens
tctgtaaaatagggc

SEQ ID NO: 382495 - DNA, 15 bp, Homo sapiens
ttctgtaaaataggg

SEQ ID NO: 382496 - DNA, 15 bp, Homo sapiens
tttctgtaaaatagg

SEQ ID NO: 382497 - DNA, 15 bp, Homo sapiens
ttttctgtaaaatag

SEQ ID NO: 382498 - DNA, 15 bp, Homo sapiens
cttttctgtaaaata

SEQ ID NO: 382499 - DNA, 15 bp, Homo sapiens
ccttttctgtaaaat

SEQ ID NO: 382500 - DNA, 15 bp, Homo sapiens
tccttttctgtaaaa

SEQ ID NO: 382501 - DNA, 15 bp, Homo sapiens
ttccttttctgtaaa

SEQ ID NO: 382502 - DNA, 15 bp, Homo sapiens
attccttttctgtaa

SEQ ID NO: 382503 - DNA, 15 bp, Homo sapiens
cattccttttctgta

SEQ ID NO: 382504 - DNA, 15 bp, Homo sapiens
tcattccttttctgt

SEQ ID NO: 382505 - DNA, 15 bp, Homo sapiens
ttcattccttttctg

SEQ ID NO: 382506 - DNA, 15 bp, Homo sapiens
cttcattccttttct

SEQ ID NO: 382507 - DNA, 15 bp, Homo sapiens
gcttcattccttttc

SEQ ID NO: 382508 - DNA, 15 bp, Homo sapiens
agcttcattcctttt

SEQ ID NO: 382509 - DNA, 15 bp, Homo sapiens
tagcttcattccttt

SEQ ID NO: 382510 - DNA, 15 bp, Homo sapiens
ttagcttcattcctt

SEQ ID NO: 382511 - DNA, 15 bp, Homo sapiens
cttagcttcattcct

SEQ ID NO: 382512 - DNA, 15 bp, Homo sapiens
tcttagcttcattcc

SEQ ID NO: 382513 - DNA, 15 bp, Homo sapiens
atcttagcttcattc

SEQ ID NO: 382514 - DNA, 15 bp, Homo sapiens
tatcttagcttcatt

SEQ ID NO: 382515 - DNA, 15 bp, Homo sapiens
ttatcttagcttcat

SEQ ID NO: 382516 - DNA, 15 bp, Homo sapiens
tttatcttagcttca

SEQ ID NO: 382517 - DNA, 15 bp, Homo sapiens
atttatcttagcttc

SEQ ID NO: 382518 - DNA, 15 bp, Homo sapiens
aatttatcttagctt

SEQ ID NO: 382519 - DNA, 15 bp, Homo sapiens
aaatttatcttagct

SEQ ID NO: 382520 - DNA, 15 bp, Homo sapiens
caaatttatcttagc

SEQ ID NO: 382521 - DNA, 15 bp, Homo sapiens
gcaaatttatcttag

SEQ ID NO: 382522 - DNA, 15 bp, Homo sapiens
agcaaatttatctta

SEQ ID NO: 382523 - DNA, 15 bp, Homo sapiens
tagcaaatttatctt

SEQ ID NO: 382524 - DNA, 15 bp, Homo sapiens
ttagcaaatttatct

SEQ ID NO: 382525 - DNA, 15 bp, Homo sapiens
attagcaaatttatc

SEQ ID NO: 382526 - DNA, 15 bp, Homo sapiens
tattagcaaatttat

SEQ ID NO: 382527 - DNA, 15 bp, Homo sapiens
ttattagcaaattta

SEQ ID NO: 382528 - DNA, 15 bp, Homo sapiens
gttattagcaaattt

SEQ ID NO: 382529 - DNA, 15 bp, Homo sapiens
agttattagcaaatt

SEQ ID NO: 382530 - DNA, 15 bp, Homo sapiens
aagttattagcaaat

SEQ ID NO: 382531 - DNA, 15 bp, Homo sapiens
caagttattagcaaa

SEQ ID NO: 382532 - DNA, 15 bp, Homo sapiens
acaagttattagcaa

SEQ ID NO: 382533 - DNA, 15 bp, Homo sapiens
aacaagttattagca

SEQ ID NO: 382534 - DNA, 15 bp, Homo sapiens
gaacaagttattagc

SEQ ID NO: 382535 - DNA, 15 bp, Homo sapiens
tgaacaagttattag

SEQ ID NO: 382536 - DNA, 15 bp, Homo sapiens
ctgaacaagttatta

SEQ ID NO: 382537 - DNA, 15 bp, Homo sapiens
tctgaacaagttatt

SEQ ID NO: 382538 - DNA, 15 bp, Homo sapiens
ctctgaacaagttat

SEQ ID NO: 382539 - DNA, 15 bp, Homo sapiens
gctctgaacaagtta

SEQ ID NO: 382540 - DNA, 15 bp, Homo sapiens
ggctctgaacaagtt

SEQ ID NO: 382541 - DNA, 15 bp, Homo sapiens
tggctctgaacaagt

SEQ ID NO: 382542 - DNA, 15 bp, Homo sapiens
atggctctgaacaag

SEQ ID NO: 382543 - DNA, 15 bp, Homo sapiens
catggctctgaacaa

SEQ ID NO: 382544 - DNA, 15 bp, Homo sapiens
gcatggctctgaaca

SEQ ID NO: 382545 - DNA, 15 bp, Homo sapiens
tgcatggctctgaac

SEQ ID NO: 382546 - DNA, 15 bp, Homo sapiens
ttgcatggctctgaa

SEQ ID NO: 382547 - DNA, 15 bp, Homo sapiens
gttgcatggctctga

SEQ ID NO: 382548 - DNA, 15 bp, Homo sapiens
agttgcatggctctg

SEQ ID NO: 382549 - DNA, 15 bp, Homo sapiens
tagttgcatggctct

SEQ ID NO: 382550 - DNA, 15 bp, Homo sapiens
ctagttgcatggctc

SEQ ID NO: 382551 - DNA, 15 bp, Homo sapiens
actagttgcatggct

SEQ ID NO: 382552 - DNA, 15 bp, Homo sapiens
tactagttgcatggc

SEQ ID NO: 382553 - DNA, 15 bp, Homo sapiens
gtactagttgcatgg

SEQ ID NO: 382554 - DNA, 15 bp, Homo sapiens
cgtactagttgcatg

SEQ ID NO: 382555 - DNA, 15 bp, Homo sapiens
acgtactagttgcat

SEQ ID NO: 382556 - DNA, 15 bp, Homo sapiens
cacgtactagttgca

SEQ ID NO: 382557 - DNA, 15 bp, Homo sapiens
tcacgtactagttgc

SEQ ID NO: 382558 - DNA, 15 bp, Homo sapiens
ctcacgtactagttg

SEQ ID NO: 382559 - DNA, 15 bp, Homo sapiens
gctcacgtactagtt

SEQ ID NO: 382560 - DNA, 15 bp, Homo sapiens
agctcacgtactagt

SEQ ID NO: 382561 - DNA, 15 bp, Homo sapiens
tagctcacgtactag

SEQ ID NO: 382562 - DNA, 15 bp, Homo sapiens
ctagctcacgtacta

SEQ ID NO: 382563 - DNA, 15 bp, Homo sapiens
tctagctcacgtact

SEQ ID NO: 382564 - DNA, 15 bp, Homo sapiens
atctagctcacgtac

SEQ ID NO: 382565 - DNA, 15 bp, Homo sapiens
gatctagctcacgta

SEQ ID NO: 382566 - DNA, 15 bp, Homo sapiens
agatctagctcacgt

SEQ ID NO: 382567 - DNA, 15 bp, Homo sapiens
cagatctagctcacg

SEQ ID NO: 382568 - DNA, 15 bp, Homo sapiens
gcagatctagctcac

SEQ ID NO: 382569 - DNA, 15 bp, Homo sapiens
agcagatctagctca

SEQ ID NO: 382570 - DNA, 15 bp, Homo sapiens
aagcagatctagctc

SEQ ID NO: 382571 - DNA, 15 bp, Homo sapiens
taagcagatctagct

SEQ ID NO: 382572 - DNA, 15 bp, Homo sapiens
ttaagcagatctagc

SEQ ID NO: 382573 - DNA, 15 bp, Homo sapiens
gttaagcagatctag

SEQ ID NO: 382574 - DNA, 15 bp, Homo sapiens
agttaagcagatcta

SEQ ID NO: 382575 - DNA, 15 bp, Homo sapiens
aagttaagcagatct

SEQ ID NO: 382576 - DNA, 15 bp, Homo sapiens
aaagttaagcagatc

SEQ ID NO: 382577 - DNA, 15 bp, Homo sapiens
gaaagttaagcagat

SEQ ID NO: 382578 - DNA, 15 bp, Homo sapiens
tgaaagttaagcaga

SEQ ID NO: 382579 - DNA, 15 bp, Homo sapiens
gtgaaagttaagcag

SEQ ID NO: 382580 - DNA, 15 bp, Homo sapiens
ggtgaaagttaagca

SEQ ID NO: 382581 - DNA, 15 bp, Homo sapiens
aggtgaaagttaagc

SEQ ID NO: 382582 - DNA, 15 bp, Homo sapiens
gaggtgaaagttaag

SEQ ID NO: 382583 - DNA, 15 bp, Homo sapiens
ggaggtgaaagttaa

SEQ ID NO: 382584 - DNA, 15 bp, Homo sapiens
aggaggtgaaagtta

SEQ ID NO: 382585 - DNA, 15 bp, Homo sapiens
caggaggtgaaagtt

SEQ ID NO: 382586 - DNA, 15 bp, Homo sapiens
gcaggaggtgaaagt

SEQ ID NO: 382587 - DNA, 15 bp, Homo sapiens
ggcaggaggtgaaag

SEQ ID NO: 382588 - DNA, 15 bp, Homo sapiens
gggcaggaggtgaaa

SEQ ID NO: 382589 - DNA, 15 bp, Homo sapiens
agggcaggaggtgaa

SEQ ID NO: 382590 - DNA, 15 bp, Homo sapiens
cagggcaggaggtga

SEQ ID NO: 382591 - DNA, 15 bp, Homo sapiens
gcagggcaggaggtg

SEQ ID NO: 382592 - DNA, 15 bp, Homo sapiens
cgcagggcaggaggt

SEQ ID NO: 382593 - DNA, 15 bp, Homo sapiens
gcgcagggcaggagg

SEQ ID NO: 382594 - DNA, 15 bp, Homo sapiens
agcgcagggcaggag

SEQ ID NO: 382595 - DNA, 15 bp, Homo sapiens
cagcgcagggcagga

SEQ ID NO: 382596 - DNA, 15 bp, Homo sapiens
acagcgcagggcagg

SEQ ID NO: 382597 - DNA, 15 bp, Homo sapiens
gacagcgcagggcag

SEQ ID NO: 382598 - DNA, 15 bp, Homo sapiens
agacagcgcagggca

SEQ ID NO: 382599 - DNA, 15 bp, Homo sapiens
gagacagcgcagggc

SEQ ID NO: 382600 - DNA, 15 bp, Homo sapiens
ggagacagcgcaggg

SEQ ID NO: 382601 - DNA, 15 bp, Homo sapiens
aggagacagcgcagg

SEQ ID NO: 382602 - DNA, 15 bp, Homo sapiens
aaggagacagcgcag

SEQ ID NO: 382603 - DNA, 15 bp, Homo sapiens
taaggagacagcgca

SEQ ID NO: 382604 - DNA, 15 bp, Homo sapiens
ctaaggagacagcgc

SEQ ID NO: 382605 - DNA, 15 bp, Homo sapiens
gctaaggagacagcg

SEQ ID NO: 382606 - DNA, 15 bp, Homo sapiens
ggctaaggagacagc

SEQ ID NO: 382607 - DNA, 15 bp, Homo sapiens
gggctaaggagacag

SEQ ID NO: 382608 - DNA, 15 bp, Homo sapiens
cgggctaaggagaca

SEQ ID NO: 382609 - DNA, 15 bp, Homo sapiens
gcgggctaaggagac

SEQ ID NO: 382610 - DNA, 15 bp, Homo sapiens
tgcgggctaaggaga

SEQ ID NO: 382611 - DNA, 15 bp, Homo sapiens
atgcgggctaaggag

SEQ ID NO: 382612 - DNA, 15 bp, Homo sapiens
gatgcgggctaagga

SEQ ID NO: 382613 - DNA, 15 bp, Homo sapiens
agatgcgggctaagg

SEQ ID NO: 382614 - DNA, 15 bp, Homo sapiens
gagatgcgggctaag

SEQ ID NO: 382615 - DNA, 15 bp, Homo sapiens
ggagatgcgggctaa

SEQ ID NO: 382616 - DNA, 15 bp, Homo sapiens
aggagatgcgggcta

SEQ ID NO: 382617 - DNA, 15 bp, Homo sapiens
aaggagatgcgggct

SEQ ID NO: 382618 - DNA, 15 bp, Homo sapiens
caaggagatgcgggc

SEQ ID NO: 382619 - DNA, 15 bp, Homo sapiens
gcaaggagatgcggg

SEQ ID NO: 382620 - DNA, 15 bp, Homo sapiens
agcaaggagatgcgg

SEQ ID NO: 382621 - DNA, 15 bp, Homo sapiens
aagcaaggagatgcg

SEQ ID NO: 382622 - DNA, 15 bp, Homo sapiens
gaagcaaggagatgc

SEQ ID NO: 382623 - DNA, 15 bp, Homo sapiens
agaagcaaggagatg

SEQ ID NO: 382624 - DNA, 15 bp, Homo sapiens
aagaagcaaggagat

SEQ ID NO: 382625 - DNA, 15 bp, Homo sapiens
gaagaagcaaggaga

SEQ ID NO: 382626 - DNA, 15 bp, Homo sapiens
tgaagaagcaaggag

SEQ ID NO: 382627 - DNA, 15 bp, Homo sapiens
atgaagaagcaagga

SEQ ID NO: 382628 - DNA, 15 bp, Homo sapiens
catgaagaagcaagg

SEQ ID NO: 382629 - DNA, 15 bp, Homo sapiens
ccatgaagaagcaag

SEQ ID NO: 382630 - DNA, 15 bp, Homo sapiens
accatgaagaagcaa

SEQ ID NO: 382631 - DNA, 15 bp, Homo sapiens
caccatgaagaagca

SEQ ID NO: 382632 - DNA, 15 bp, Homo sapiens
ccaccatgaagaagc

SEQ ID NO: 382633 - DNA, 15 bp, Homo sapiens
tccaccatgaagaag

SEQ ID NO: 382634 - DNA, 15 bp, Homo sapiens
gtccaccatgaagaa

SEQ ID NO: 382635 - DNA, 15 bp, Homo sapiens
tgtccaccatgaaga

SEQ ID NO: 382636 - DNA, 15 bp, Homo sapiens
ctgtccaccatgaag

SEQ ID NO: 382637 - DNA, 15 bp, Homo sapiens
gctgtccaccatgaa

SEQ ID NO: 382638 - DNA, 15 bp, Homo sapiens
agctgtccaccatga

SEQ ID NO: 382639 - DNA, 15 bp, Homo sapiens
gagctgtccaccatg

SEQ ID NO: 382640 - DNA, 15 bp, Homo sapiens
tgagctgtccaccat

SEQ ID NO: 382641 - DNA, 15 bp, Homo sapiens
atgagctgtccacca

SEQ ID NO: 382642 - DNA, 15 bp, Homo sapiens
tatgagctgtccacc

SEQ ID NO: 382643 - DNA, 15 bp, Homo sapiens
ctatgagctgtccac

SEQ ID NO: 382644 - DNA, 15 bp, Homo sapiens
gctatgagctgtcca

SEQ ID NO: 382645 - DNA, 15 bp, Homo sapiens
tgctatgagctgtcc

SEQ ID NO: 382646 - DNA, 15 bp, Homo sapiens
atgctatgagctgtc

SEQ ID NO: 382647 - DNA, 15 bp, Homo sapiens
tatgctatgagctgt

SEQ ID NO: 382648 - DNA, 15 bp, Homo sapiens
ctatgctatgagctg

SEQ ID NO: 382649 - DNA, 15 bp, Homo sapiens
gctatgctatgagct

SEQ ID NO: 382650 - DNA, 15 bp, Homo sapiens
agctatgctatgagc

SEQ ID NO: 382651 - DNA, 15 bp, Homo sapiens
cagctatgctatgag

SEQ ID NO: 382652 - DNA, 15 bp, Homo sapiens
ccagctatgctatga

SEQ ID NO: 382653 - DNA, 15 bp, Homo sapiens
accagctatgctatg

SEQ ID NO: 382654 - DNA, 15 bp, Homo sapiens
gaccagctatgctat

SEQ ID NO: 382655 - DNA, 15 bp, Homo sapiens
agaccagctatgcta

SEQ ID NO: 382656 - DNA, 15 bp, Homo sapiens
aagaccagctatgct

SEQ ID NO: 382657 - DNA, 15 bp, Homo sapiens
caagaccagctatgc

SEQ ID NO: 382658 - DNA, 15 bp, Homo sapiens
tcaagaccagctatg

SEQ ID NO: 382659 - DNA, 15 bp, Homo sapiens
atcaagaccagctat

SEQ ID NO: 382660 - DNA, 15 bp, Homo sapiens
tatcaagaccagcta

SEQ ID NO: 382661 - DNA, 15 bp, Homo sapiens
ctatcaagaccagct

SEQ ID NO: 382662 - DNA, 15 bp, Homo sapiens
cctatcaagaccagc

SEQ ID NO: 382663 - DNA, 15 bp, Homo sapiens
acctatcaagaccag

SEQ ID NO: 382664 - DNA, 15 bp, Homo sapiens
cacctatcaagacca

SEQ ID NO: 382665 - DNA, 15 bp, Homo sapiens
tcacctatcaagacc

SEQ ID NO: 382666 - DNA, 15 bp, Homo sapiens
gtcacctatcaagac

SEQ ID NO: 382667 - DNA, 15 bp, Homo sapiens
tgtcacctatcaaga

SEQ ID NO: 382668 - DNA, 15 bp, Homo sapiens
atgtcacctatcaag

SEQ ID NO: 382669 - DNA, 15 bp, Homo sapiens
gatgtcacctatcaa

SEQ ID NO: 382670 - DNA, 15 bp, Homo sapiens
agatgtcacctatca

SEQ ID NO: 382671 - DNA, 15 bp, Homo sapiens
cagatgtcacctatc

SEQ ID NO: 382672 - DNA, 15 bp, Homo sapiens
gcagatgtcacctat

SEQ ID NO: 382673 - DNA, 15 bp, Homo sapiens
ggcagatgtcaccta

SEQ ID NO: 382674 - DNA, 15 bp, Homo sapiens
tggcagatgtcacct

SEQ ID NO: 382675 - DNA, 15 bp, Homo sapiens
ttggcagatgtcacc

SEQ ID NO: 382676 - DNA, 15 bp, Homo sapiens
attggcagatgtcac

SEQ ID NO: 382677 - DNA, 15 bp, Homo sapiens
cattggcagatgtca

SEQ ID NO: 382678 - DNA, 15 bp, Homo sapiens
ccattggcagatgtc

SEQ ID NO: 382679 - DNA, 15 bp, Homo sapiens
gccattggcagatgt

SEQ ID NO: 382680 - DNA, 15 bp, Homo sapiens
tgccattggcagatg

SEQ ID NO: 382681 - DNA, 15 bp, Homo sapiens
ctgccattggcagat

SEQ ID NO: 382682 - DNA, 15 bp, Homo sapiens
actgccattggcaga

SEQ ID NO: 382683 - DNA, 15 bp, Homo sapiens
cactgccattggcag

SEQ ID NO: 382684 - DNA, 15 bp, Homo sapiens
ccactgccattggca

SEQ ID NO: 382685 - DNA, 15 bp, Homo sapiens
gccactgccattggc

SEQ ID NO: 382686 - DNA, 15 bp, Homo sapiens
tgccactgccattgg

SEQ ID NO: 382687 - DNA, 15 bp, Homo sapiens
ttgccactgccattg

SEQ ID NO: 382688 - DNA, 15 bp, Homo sapiens
attgccactgccatt

SEQ ID NO: 382689 - DNA, 15 bp, Homo sapiens
aattgccactgccat

SEQ ID NO: 382690 - DNA, 15 bp, Homo sapiens
caattgccactgcca

SEQ ID NO: 382691 - DNA, 15 bp, Homo sapiens
gcaattgccactgcc

SEQ ID NO: 382692 - DNA, 15 bp, Homo sapiens
agcaattgccactgc

SEQ ID NO: 382693 - DNA, 15 bp, Homo sapiens
gagcaattgccactg

SEQ ID NO: 382694 - DNA, 15 bp, Homo sapiens
agagcaattgccact

SEQ ID NO: 382695 - DNA, 15 bp, Homo sapiens
tagagcaattgccac

SEQ ID NO: 382696 - DNA, 15 bp, Homo sapiens
gtagagcaattgcca

SEQ ID NO: 382697 - DNA, 15 bp, Homo sapiens
ggtagagcaattgcc

SEQ ID NO: 382698 - DNA, 15 bp, Homo sapiens
tggtagagcaattgc

SEQ ID NO: 382699 - DNA, 15 bp, Homo sapiens
ctggtagagcaattg

SEQ ID NO: 382700 - DNA, 15 bp, Homo sapiens
gctggtagagcaatt

SEQ ID NO: 382701 - DNA, 15 bp, Homo sapiens
tgctggtagagcaat

SEQ ID NO: 382702 - DNA, 15 bp, Homo sapiens
atgctggtagagcaa

SEQ ID NO: 382703 - DNA, 15 bp, Homo sapiens
gatgctggtagagca

SEQ ID NO: 382704 - DNA, 15 bp, Homo sapiens
agatgctggtagagc

SEQ ID NO: 382705 - DNA, 15 bp, Homo sapiens
gagatgctggtagag

SEQ ID NO: 382706 - DNA, 15 bp, Homo sapiens
agagatgctggtaga

SEQ ID NO: 382707 - DNA, 15 bp, Homo sapiens
gagagatgctggtag

SEQ ID NO: 382708 - DNA, 15 bp, Homo sapiens
agagagatgctggta

SEQ ID NO: 382709 - DNA, 15 bp, Homo sapiens
cagagagatgctggt

SEQ ID NO: 382710 - DNA, 15 bp, Homo sapiens
gcagagagatgctgg

SEQ ID NO: 382711 - DNA, 15 bp, Homo sapiens
tgcagagagatgctg

SEQ ID NO: 382712 - DNA, 15 bp, Homo sapiens
ctgcagagagatgct

SEQ ID NO: 382713 - DNA, 15 bp, Homo sapiens
actgcagagagatgc

SEQ ID NO: 382714 - DNA, 15 bp, Homo sapiens
aactgcagagagatg

SEQ ID NO: 382715 - DNA, 15 bp, Homo sapiens
caactgcagagagat

SEQ ID NO: 382716 - DNA, 15 bp, Homo sapiens
acaactgcagagaga

SEQ ID NO: 382717 - DNA, 15 bp, Homo sapiens
aacaactgcagagag

SEQ ID NO: 382718 - DNA, 15 bp, Homo sapiens
aaacaactgcagaga

SEQ ID NO: 382719 - DNA, 15 bp, Homo sapiens
aaaacaactgcagag

SEQ ID NO: 382720 - DNA, 15 bp, Homo sapiens
gaaaacaactgcaga

SEQ ID NO: 382721 - DNA, 15 bp, Homo sapiens
ggaaaacaactgcag

SEQ ID NO: 382722 - DNA, 15 bp, Homo sapiens
tggaaaacaactgca

SEQ ID NO: 382723 - DNA, 15 bp, Homo sapiens
ctggaaaacaactgc

SEQ ID NO: 382724 - DNA, 15 bp, Homo sapiens
tctggaaaacaactg

SEQ ID NO: 382725 - DNA, 15 bp, Homo sapiens
ctctggaaaacaact

SEQ ID NO: 382726 - DNA, 15 bp, Homo sapiens
actctggaaaacaac

SEQ ID NO: 382727 - DNA, 15 bp, Homo sapiens
aactctggaaaacaa

SEQ ID NO: 382728 - DNA, 15 bp, Homo sapiens
aaactctggaaaaca

SEQ ID NO: 382729 - DNA, 15 bp, Homo sapiens
aaaactctggaaaac

SEQ ID NO: 382730 - DNA, 15 bp, Homo sapiens
taaaactctggaaaa

SEQ ID NO: 382731 - DNA, 15 bp, Homo sapiens
ataaaactctggaaa

SEQ ID NO: 382732 - DNA, 15 bp, Homo sapiens
gataaaactctggaa

SEQ ID NO: 382733 - DNA, 15 bp, Homo sapiens
agataaaactctgga

SEQ ID NO: 382734 - DNA, 15 bp, Homo sapiens
aagataaaactctgg

SEQ ID NO: 382735 - DNA, 15 bp, Homo sapiens
caagataaaactctg

SEQ ID NO: 382736 - DNA, 15 bp, Homo sapiens
acaagataaaactct

SEQ ID NO: 382737 - DNA, 15 bp, Homo sapiens
gacaagataaaactc

SEQ ID NO: 382738 - DNA, 15 bp, Homo sapiens
ggacaagataaaact

SEQ ID NO: 382739 - DNA, 15 bp, Homo sapiens
gggacaagataaaac

SEQ ID NO: 382740 - DNA, 15 bp, Homo sapiens
tgggacaagataaaa

SEQ ID NO: 382741 - DNA, 15 bp, Homo sapiens
gtgggacaagataaa

SEQ ID NO: 382742 - DNA, 15 bp, Homo sapiens
agtgggacaagataa

SEQ ID NO: 382743 - DNA, 15 bp, Homo sapiens
tagtgggacaagata

SEQ ID NO: 382744 - DNA, 15 bp, Homo sapiens
ctagtgggacaagat

SEQ ID NO: 382745 - DNA, 15 bp, Homo sapiens
gctagtgggacaaga

SEQ ID NO: 382746 - DNA, 15 bp, Homo sapiens
ggctagtgggacaag

SEQ ID NO: 382747 - DNA, 15 bp, Homo sapiens
gggctagtgggacaa

SEQ ID NO: 382748 - DNA, 15 bp, Homo sapiens
ggggctagtgggaca

SEQ ID NO: 382749 - DNA, 15 bp, Homo sapiens
gggggctagtgggac

SEQ ID NO: 382750 - DNA, 15 bp, Homo sapiens
agggggctagtggga

SEQ ID NO: 382751 - DNA, 15 bp, Homo sapiens
gagggggctagtggg

SEQ ID NO: 382752 - DNA, 15 bp, Homo sapiens
ggagggggctagtgg

SEQ ID NO: 382753 - DNA, 15 bp, Homo sapiens
gggagggggctagtg

SEQ ID NO: 382754 - DNA, 15 bp, Homo sapiens
tgggagggggctagt

SEQ ID NO: 382755 - DNA, 15 bp, Homo sapiens
ctgggagggggctag

SEQ ID NO: 382756 - DNA, 15 bp, Homo sapiens
gctgggagggggcta

SEQ ID NO: 382757 - DNA, 15 bp, Homo sapiens
ggctgggagggggct

SEQ ID NO: 382758 - DNA, 15 bp, Homo sapiens
tggctgggagggggc

SEQ ID NO: 382759 - DNA, 15 bp, Homo sapiens
gtggctgggaggggg

SEQ ID NO: 382760 - DNA, 15 bp, Homo sapiens
tgtggctgggagggg

SEQ ID NO: 382761 - DNA, 15 bp, Homo sapiens
ctgtggctgggaggg

SEQ ID NO: 382762 - DNA, 15 bp, Homo sapiens
tctgtggctgggagg

SEQ ID NO: 382763 - DNA, 15 bp, Homo sapiens
gtctgtggctgggag

SEQ ID NO: 382764 - DNA, 15 bp, Homo sapiens
agtctgtggctggga

SEQ ID NO: 382765 - DNA, 15 bp, Homo sapiens
cagtctgtggctggg

SEQ ID NO: 382766 - DNA, 15 bp, Homo sapiens
tcagtctgtggctgg

SEQ ID NO: 382767 - DNA, 15 bp, Homo sapiens
ttcagtctgtggctg

SEQ ID NO: 382768 - DNA, 15 bp, Homo sapiens
tttcagtctgtggct

SEQ ID NO: 382769 - DNA, 15 bp, Homo sapiens
atttcagtctgtggc

SEQ ID NO: 382770 - DNA, 15 bp, Homo sapiens
catttcagtctgtgg

SEQ ID NO: 382771 - DNA, 15 bp, Homo sapiens
tcatttcagtctgtg

SEQ ID NO: 382772 - DNA, 15 bp, Homo sapiens
gtcatttcagtctgt

SEQ ID NO: 382773 - DNA, 15 bp, Homo sapiens
agtcatttcagtctg

SEQ ID NO: 382774 - DNA, 15 bp, Homo sapiens
gagtcatttcagtct

SEQ ID NO: 382775 - DNA, 15 bp, Homo sapiens
agagtcatttcagtc

SEQ ID NO: 382776 - DNA, 15 bp, Homo sapiens
aagagtcatttcagt

SEQ ID NO: 382777 - DNA, 15 bp, Homo sapiens
gaagagtcatttcag

SEQ ID NO: 382778 - DNA, 15 bp, Homo sapiens
agaagagtcatttca

SEQ ID NO: 382779 - DNA, 15 bp, Homo sapiens
aagaagagtcatttc

SEQ ID NO: 382780 - DNA, 15 bp, Homo sapiens
aaagaagagtcattt

SEQ ID NO: 382781 - DNA, 15 bp, Homo sapiens
gaaagaagagtcatt

SEQ ID NO: 382782 - DNA, 15 bp, Homo sapiens
ggaaagaagagtcat

SEQ ID NO: 382783 - DNA, 15 bp, Homo sapiens
aggaaagaagagtca

SEQ ID NO: 382784 - DNA, 15 bp, Homo sapiens
taggaaagaagagtc

SEQ ID NO: 382785 - DNA, 15 bp, Homo sapiens
ttaggaaagaagagt

SEQ ID NO: 382786 - DNA, 15 bp, Homo sapiens
gttaggaaagaagag

SEQ ID NO: 382787 - DNA, 15 bp, Homo sapiens
agttaggaaagaaga

SEQ ID NO: 382788 - DNA, 15 bp, Homo sapiens
gagttaggaaagaag

SEQ ID NO: 382789 - DNA, 15 bp, Homo sapiens
ggagttaggaaagaa

SEQ ID NO: 382790 - DNA, 15 bp, Homo sapiens
tggagttaggaaaga

SEQ ID NO: 382791 - DNA, 15 bp, Homo sapiens
gtggagttaggaaag

SEQ ID NO: 382792 - DNA, 15 bp, Homo sapiens
cgtggagttaggaaa

SEQ ID NO: 382793 - DNA, 15 bp, Homo sapiens
tcgtggagttaggaa

SEQ ID NO: 382794 - DNA, 15 bp, Homo sapiens
ttcgtggagttagga

SEQ ID NO: 382795 - DNA, 15 bp, Homo sapiens
gttcgtggagttagg

SEQ ID NO: 382796 - DNA, 15 bp, Homo sapiens
agttcgtggagttag

SEQ ID NO: 382797 - DNA, 15 bp, Homo sapiens
gagttcgtggagtta

SEQ ID NO: 382798 - DNA, 15 bp, Homo sapiens
ggagttcgtggagtt

SEQ ID NO: 382799 - DNA, 15 bp, Homo sapiens
aggagttcgtggagt

SEQ ID NO: 382800 - DNA, 15 bp, Homo sapiens
caggagttcgtggag

SEQ ID NO: 382801 - DNA, 15 bp, Homo sapiens
tcaggagttcgtgga

SEQ ID NO: 382802 - DNA, 15 bp, Homo sapiens
gtcaggagttcgtgg

SEQ ID NO: 382803 - DNA, 15 bp, Homo sapiens
tgtcaggagttcgtg

SEQ ID NO: 382804 - DNA, 15 bp, Homo sapiens
atgtcaggagttcgt

SEQ ID NO: 382805 - DNA, 15 bp, Homo sapiens
catgtcaggagttcg

SEQ ID NO: 382806 - DNA, 15 bp, Homo sapiens
acatgtcaggagttc

SEQ ID NO: 382807 - DNA, 15 bp, Homo sapiens
gacatgtcaggagtt

SEQ ID NO: 382808 - DNA, 15 bp, Homo sapiens
tgacatgtcaggagt

SEQ ID NO: 382809 - DNA, 15 bp, Homo sapiens
gtgacatgtcaggag

SEQ ID NO: 382810 - DNA, 15 bp, Homo sapiens
tgtgacatgtcagga

SEQ ID NO: 382811 - DNA, 15 bp, Homo sapiens
gtgtgacatgtcagg

SEQ ID NO: 382812 - DNA, 15 bp, Homo sapiens
tgtgtgacatgtcag

SEQ ID NO: 382813 - DNA, 15 bp, Homo sapiens
atgtgtgacatgtca

SEQ ID NO: 382814 - DNA, 15 bp, Homo sapiens
aatgtgtgacatgtc

SEQ ID NO: 382815 - DNA, 15 bp, Homo sapiens
caatgtgtgacatgt

SEQ ID NO: 382816 - DNA, 15 bp, Homo sapiens
acaatgtgtgacatg

SEQ ID NO: 382817 - DNA, 15 bp, Homo sapiens
tacaatgtgtgacat

SEQ ID NO: 382818 - DNA, 15 bp, Homo sapiens
gtacaatgtgtgaca

SEQ ID NO: 382819 - DNA, 15 bp, Homo sapiens
agtacaatgtgtgac

SEQ ID NO: 382820 - DNA, 15 bp, Homo sapiens
gagtacaatgtgtga

SEQ ID NO: 382821 - DNA, 15 bp, Homo sapiens
tgagtacaatgtgtg

SEQ ID NO: 382822 - DNA, 15 bp, Homo sapiens
ctgagtacaatgtgt

SEQ ID NO: 382823 - DNA, 15 bp, Homo sapiens
tctgagtacaatgtg

SEQ ID NO: 382824 - DNA, 15 bp, Homo sapiens
ctctgagtacaatgt

SEQ ID NO: 382825 - DNA, 15 bp, Homo sapiens
gctctgagtacaatg

SEQ ID NO: 382826 - DNA, 15 bp, Homo sapiens
tgctctgagtacaat

SEQ ID NO: 382827 - DNA, 15 bp, Homo sapiens
gtgctctgagtacaa

SEQ ID NO: 382828 - DNA, 15 bp, Homo sapiens
agtgctctgagtaca

SEQ ID NO: 382829 - DNA, 15 bp, Homo sapiens
cagtgctctgagtac

SEQ ID NO: 382830 - DNA, 15 bp, Homo sapiens
tcagtgctctgagta

SEQ ID NO: 382831 - DNA, 15 bp, Homo sapiens
gtcagtgctctgagt

SEQ ID NO: 382832 - DNA, 15 bp, Homo sapiens
tgtcagtgctctgag

SEQ ID NO: 382833 - DNA, 15 bp, Homo sapiens
ttgtcagtgctctga

SEQ ID NO: 382834 - DNA, 15 bp, Homo sapiens
gttgtcagtgctctg

SEQ ID NO: 382835 - DNA, 15 bp, Homo sapiens
tgttgtcagtgctct

SEQ ID NO: 382836 - DNA, 15 bp, Homo sapiens
ctgttgtcagtgctc

SEQ ID NO: 382837 - DNA, 15 bp, Homo sapiens
cctgttgtcagtgct

SEQ ID NO: 382838 - DNA, 15 bp, Homo sapiens
gcctgttgtcagtgc

SEQ ID NO: 382839 - DNA, 15 bp, Homo sapiens
tgcctgttgtcagtg

SEQ ID NO: 382840 - DNA, 15 bp, Homo sapiens
atgcctgttgtcagt

SEQ ID NO: 382841 - DNA, 15 bp, Homo sapiens
gatgcctgttgtcag

SEQ ID NO: 382842 - DNA, 15 bp, Homo sapiens
agatgcctgttgtca

SEQ ID NO: 382843 - DNA, 15 bp, Homo sapiens
gagatgcctgttgtc

SEQ ID NO: 382844 - DNA, 15 bp, Homo sapiens
tgagatgcctgttgt

SEQ ID NO: 382845 - DNA, 15 bp, Homo sapiens
atgagatgcctgttg

SEQ ID NO: 382846 - DNA, 15 bp, Homo sapiens
gatgagatgcctgtt

SEQ ID NO: 382847 - DNA, 15 bp, Homo sapiens
ggatgagatgcctgt

SEQ ID NO: 382848 - DNA, 15 bp, Homo sapiens
aggatgagatgcctg

SEQ ID NO: 382849 - DNA, 15 bp, Homo sapiens
aaggatgagatgcct

SEQ ID NO: 382850 - DNA, 15 bp, Homo sapiens
taaggatgagatgcc

SEQ ID NO: 382851 - DNA, 15 bp, Homo sapiens
ttaaggatgagatgc

SEQ ID NO: 382852 - DNA, 15 bp, Homo sapiens
cttaaggatgagatg

SEQ ID NO: 382853 - DNA, 15 bp, Homo sapiens
tcttaaggatgagat

SEQ ID NO: 382854 - DNA, 15 bp, Homo sapiens
ttcttaaggatgaga

SEQ ID NO: 382855 - DNA, 15 bp, Homo sapiens
cttcttaaggatgag

SEQ ID NO: 382856 - DNA, 15 bp, Homo sapiens
gcttcttaaggatga

SEQ ID NO: 382857 - DNA, 15 bp, Homo sapiens
agcttcttaaggatg

SEQ ID NO: 382858 - DNA, 15 bp, Homo sapiens
aagcttcttaaggat

SEQ ID NO: 382859 - DNA, 15 bp, Homo sapiens
taagcttcttaagga

SEQ ID NO: 382860 - DNA, 15 bp, Homo sapiens
ataagcttcttaagg

SEQ ID NO: 382861 - DNA, 15 bp, Homo sapiens
aataagcttcttaag

SEQ ID NO: 382862 - DNA, 15 bp, Homo sapiens
taataagcttcttaa

SEQ ID NO: 382863 - DNA, 15 bp, Homo sapiens
ttaataagcttctta

SEQ ID NO: 382864 - DNA, 15 bp, Homo sapiens
cttaataagcttctt

SEQ ID NO: 382865 - DNA, 15 bp, Homo sapiens
tcttaataagcttct

SEQ ID NO: 382866 - DNA, 15 bp, Homo sapiens
ttcttaataagcttc

SEQ ID NO: 382867 - DNA, 15 bp, Homo sapiens
tttcttaataagctt

SEQ ID NO: 382868 - DNA, 15 bp, Homo sapiens
atttcttaataagct

SEQ ID NO: 382869 - DNA, 15 bp, Homo sapiens
tatttcttaataagc

SEQ ID NO: 382870 - DNA, 15 bp, Homo sapiens
ttatttcttaataag

SEQ ID NO: 382871 - DNA, 15 bp, Homo sapiens
cttatttcttaataa

SEQ ID NO: 382872 - DNA, 15 bp, Homo sapiens
ccttatttcttaata

SEQ ID NO: 382873 - DNA, 15 bp, Homo sapiens
gccttatttcttaat

SEQ ID NO: 382874 - DNA, 15 bp, Homo sapiens
agccttatttcttaa

SEQ ID NO: 382875 - DNA, 15 bp, Homo sapiens
tagccttatttctta

SEQ ID NO: 382876 - DNA, 15 bp, Homo sapiens
atagccttatttctt

SEQ ID NO: 382877 - DNA, 15 bp, Homo sapiens
aatagccttatttct

SEQ ID NO: 382878 - DNA, 15 bp, Homo sapiens
aaatagccttatttc

SEQ ID NO: 382879 - DNA, 15 bp, Homo sapiens
aaaatagccttattt

SEQ ID NO: 382880 - DNA, 15 bp, Homo sapiens
aaaaatagccttatt

SEQ ID NO: 382881 - DNA, 15 bp, Homo sapiens
gaaaaatagccttat

SEQ ID NO: 382882 - DNA, 15 bp, Homo sapiens
agaaaaatagcctta

SEQ ID NO: 382883 - DNA, 15 bp, Homo sapiens
gagaaaaatagcctt

SEQ ID NO: 382884 - DNA, 15 bp, Homo sapiens
agagaaaaatagcct

SEQ ID NO: 382885 - DNA, 15 bp, Homo sapiens
cagagaaaaatagcc

SEQ ID NO: 382886 - DNA, 15 bp, Homo sapiens
ccagagaaaaatagc

SEQ ID NO: 382887 - DNA, 15 bp, Homo sapiens
gccagagaaaaatag

SEQ ID NO: 382888 - DNA, 15 bp, Homo sapiens
tgccagagaaaaata

SEQ ID NO: 382889 - DNA, 15 bp, Homo sapiens
ctgccagagaaaaat

SEQ ID NO: 382890 - DNA, 15 bp, Homo sapiens
gctgccagagaaaaa

SEQ ID NO: 382891 - DNA, 15 bp, Homo sapiens
cgctgccagagaaaa

SEQ ID NO: 382892 - DNA, 15 bp, Homo sapiens
tcgctgccagagaaa

SEQ ID NO: 382893 - DNA, 15 bp, Homo sapiens
ctcgctgccagagaa

SEQ ID NO: 382894 - DNA, 15 bp, Homo sapiens
cctcgctgccagaga

SEQ ID NO: 382895 - DNA, 15 bp, Homo sapiens
tcctcgctgccagag

SEQ ID NO: 382896 - DNA, 15 bp, Homo sapiens
ttcctcgctgccaga

SEQ ID NO: 382897 - DNA, 15 bp, Homo sapiens
cttcctcgctgccag

SEQ ID NO: 382898 - DNA, 15 bp, Homo sapiens
gcttcctcgctgcca

SEQ ID NO: 382899 - DNA, 15 bp, Homo sapiens
ggcttcctcgctgcc

SEQ ID NO: 382900 - DNA, 15 bp, Homo sapiens
gggcttcctcgctgc

SEQ ID NO: 382901 - DNA, 15 bp, Homo sapiens
agggcttcctcgctg

SEQ ID NO: 382902 - DNA, 15 bp, Homo sapiens
gagggcttcctcgct

SEQ ID NO: 382903 - DNA, 15 bp, Homo sapiens
ggagggcttcctcgc

SEQ ID NO: 382904 - DNA, 15 bp, Homo sapiens
gggagggcttcctcg

SEQ ID NO: 382905 - DNA, 15 bp, Homo sapiens
tgggagggcttcctc

SEQ ID NO: 382906 - DNA, 15 bp, Homo sapiens
gtgggagggcttcct

SEQ ID NO: 382907 - DNA, 15 bp, Homo sapiens
ggtgggagggcttcc

SEQ ID NO: 382908 - DNA, 15 bp, Homo sapiens
gggtgggagggcttc

SEQ ID NO: 382909 - DNA, 15 bp, Homo sapiens
ggggtgggagggctt

SEQ ID NO: 382910 - DNA, 15 bp, Homo sapiens
cggggtgggagggct

SEQ ID NO: 382911 - DNA, 15 bp, Homo sapiens
tcggggtgggagggc

SEQ ID NO: 382912 - DNA, 15 bp, Homo sapiens
atcggggtgggaggg

SEQ ID NO: 382913 - DNA, 15 bp, Homo sapiens
gatcggggtgggagg

SEQ ID NO: 382914 - DNA, 15 bp, Homo sapiens
tgatcggggtgggag

SEQ ID NO: 382915 - DNA, 15 bp, Homo sapiens
ttgatcggggtggga

SEQ ID NO: 382916 - DNA, 15 bp, Homo sapiens
attgatcggggtggg

SEQ ID NO: 382917 - DNA, 15 bp, Homo sapiens
aattgatcggggtgg

SEQ ID NO: 382918 - DNA, 15 bp, Homo sapiens
caattgatcggggtg

SEQ ID NO: 382919 - DNA, 15 bp, Homo sapiens
gcaattgatcggggt

SEQ ID NO: 382920 - DNA, 15 bp, Homo sapiens
ggcaattgatcgggg

SEQ ID NO: 382921 - DNA, 15 bp, Homo sapiens
gggcaattgatcggg

SEQ ID NO: 382922 - DNA, 15 bp, Homo sapiens
agggcaattgatcgg

SEQ ID NO: 382923 - DNA, 15 bp, Homo sapiens
aagggcaattgatcg

SEQ ID NO: 382924 - DNA, 15 bp, Homo sapiens
gaagggcaattgatc

SEQ ID NO: 382925 - DNA, 15 bp, Homo sapiens
agaagggcaattgat

SEQ ID NO: 382926 - DNA, 15 bp, Homo sapiens
gagaagggcaattga

SEQ ID NO: 382927 - DNA, 15 bp, Homo sapiens
tgagaagggcaattg

SEQ ID NO: 382928 - DNA, 15 bp, Homo sapiens
atgagaagggcaatt

SEQ ID NO: 382929 - DNA, 15 bp, Homo sapiens
gatgagaagggcaat

SEQ ID NO: 382930 - DNA, 15 bp, Homo sapiens
agatgagaagggcaa

SEQ ID NO: 382931 - DNA, 15 bp, Homo sapiens
aagatgagaagggca

SEQ ID NO: 382932 - DNA, 15 bp, Homo sapiens
taagatgagaagggc

SEQ ID NO: 382933 - DNA, 15 bp, Homo sapiens
ctaagatgagaaggg

SEQ ID NO: 382934 - DNA, 15 bp, Homo sapiens
tctaagatgagaagg

SEQ ID NO: 382935 - DNA, 15 bp, Homo sapiens
ctctaagatgagaag

SEQ ID NO: 382936 - DNA, 15 bp, Homo sapiens
tctctaagatgagaa

SEQ ID NO: 382937 - DNA, 15 bp, Homo sapiens
atctctaagatgaga

SEQ ID NO: 382938 - DNA, 15 bp, Homo sapiens
catctctaagatgag

SEQ ID NO: 382939 - DNA, 15 bp, Homo sapiens
tcatctctaagatga

SEQ ID NO: 382940 - DNA, 15 bp, Homo sapiens
ttcatctctaagatg

SEQ ID NO: 382941 - DNA, 15 bp, Homo sapiens
tttcatctctaagat

SEQ ID NO: 382942 - DNA, 15 bp, Homo sapiens
ttttcatctctaaga

SEQ ID NO: 382943 - DNA, 15 bp, Homo sapiens
attttcatctctaag

SEQ ID NO: 382944 - DNA, 15 bp, Homo sapiens
tattttcatctctaa

SEQ ID NO: 382945 - DNA, 15 bp, Homo sapiens
ttattttcatctcta

SEQ ID NO: 382946 - DNA, 15 bp, Homo sapiens
tttattttcatctct

SEQ ID NO: 382947 - DNA, 15 bp, Homo sapiens
ctttattttcatctc

SEQ ID NO: 382948 - DNA, 15 bp, Homo sapiens
gctttattttcatct

SEQ ID NO: 382949 - DNA, 15 bp, Homo sapiens
ggctttattttcatc

SEQ ID NO: 382950 - DNA, 15 bp, Homo sapiens
gggctttattttcat

SEQ ID NO: 382951 - DNA, 15 bp, Homo sapiens
ggggctttattttca

SEQ ID NO: 382952 - DNA, 15 bp, Homo sapiens
aggggctttattttc

SEQ ID NO: 382953 - DNA, 15 bp, Homo sapiens
caggggctttatttt

SEQ ID NO: 382954 - DNA, 15 bp, Homo sapiens
ccaggggctttattt

SEQ ID NO: 382955 - DNA, 15 bp, Homo sapiens
tccaggggctttatt

SEQ ID NO: 382956 - DNA, 15 bp, Homo sapiens
ttccaggggctttat

SEQ ID NO: 382957 - DNA, 15 bp, Homo sapiens
tttccaggggcttta

SEQ ID NO: 382958 - DNA, 15 bp, Homo sapiens
atttccaggggcttt

SEQ ID NO: 382959 - DNA, 15 bp, Homo sapiens
gatttccaggggctt

SEQ ID NO: 382960 - DNA, 15 bp, Homo sapiens
agatttccaggggct

SEQ ID NO: 382961 - DNA, 15 bp, Homo sapiens
aagatttccaggggc

SEQ ID NO: 382962 - DNA, 15 bp, Homo sapiens
aaagatttccagggg

SEQ ID NO: 382963 - DNA, 15 bp, Homo sapiens
gaaagatttccaggg

SEQ ID NO: 382964 - DNA, 15 bp, Homo sapiens
agaaagatttccagg

SEQ ID NO: 382965 - DNA, 15 bp, Homo sapiens
cagaaagatttccag

SEQ ID NO: 382966 - DNA, 15 bp, Homo sapiens
ccagaaagatttcca

SEQ ID NO: 382967 - DNA, 15 bp, Homo sapiens
accagaaagatttcc

SEQ ID NO: 382968 - DNA, 15 bp, Homo sapiens
taccagaaagatttc

SEQ ID NO: 382969 - DNA, 15 bp, Homo sapiens
ataccagaaagattt

SEQ ID NO: 382970 - DNA, 15 bp, Homo sapiens
cataccagaaagatt

SEQ ID NO: 382971 - DNA, 15 bp, Homo sapiens
acataccagaaagat

SEQ ID NO: 382972 - DNA, 15 bp, Homo sapiens
cacataccagaaaga

SEQ ID NO: 382973 - DNA, 15 bp, Homo sapiens
tcacataccagaaag

SEQ ID NO: 382974 - DNA, 15 bp, Homo sapiens
ctcacataccagaaa

SEQ ID NO: 382975 - DNA, 15 bp, Homo sapiens
tctcacataccagaa

SEQ ID NO: 382976 - DNA, 15 bp, Homo sapiens
atctcacataccaga

SEQ ID NO: 382977 - DNA, 15 bp, Homo sapiens
catctcacataccag

SEQ ID NO: 382978 - DNA, 15 bp, Homo sapiens
tcatctcacatacca

SEQ ID NO: 382979 - DNA, 15 bp, Homo sapiens
ttcatctcacatacc

SEQ ID NO: 382980 - DNA, 15 bp, Homo sapiens
tttcatctcacatac

SEQ ID NO: 382981 - DNA, 15 bp, Homo sapiens
gtttcatctcacata

SEQ ID NO: 382982 - DNA, 15 bp, Homo sapiens
tgtttcatctcacat

SEQ ID NO: 382983 - DNA, 15 bp, Homo sapiens
ctgtttcatctcaca

SEQ ID NO: 382984 - DNA, 15 bp, Homo sapiens
cctgtttcatctcac

SEQ ID NO: 382985 - DNA, 15 bp, Homo sapiens
ccctgtttcatctca

SEQ ID NO: 382986 - DNA, 15 bp, Homo sapiens
tccctgtttcatctc

SEQ ID NO: 382987 - DNA, 15 bp, Homo sapiens
ctccctgtttcatct

SEQ ID NO: 382988 - DNA, 15 bp, Homo sapiens
actccctgtttcatc

SEQ ID NO: 382989 - DNA, 15 bp, Homo sapiens
cactccctgtttcat

SEQ ID NO: 382990 - DNA, 15 bp, Homo sapiens
ccactccctgtttca

SEQ ID NO: 382991 - DNA, 15 bp, Homo sapiens
tccactccctgtttc

SEQ ID NO: 382992 - DNA, 15 bp, Homo sapiens
ctccactccctgttt

SEQ ID NO: 382993 - DNA, 15 bp, Homo sapiens
tctccactccctgtt

SEQ ID NO: 382994 - DNA, 15 bp, Homo sapiens
atctccactccctgt

SEQ ID NO: 382995 - DNA, 15 bp, Homo sapiens
tatctccactccctg

SEQ ID NO: 382996 - DNA, 15 bp, Homo sapiens
ttatctccactccct

SEQ ID NO: 382997 - DNA, 15 bp, Homo sapiens
tttatctccactccc

SEQ ID NO: 382998 - DNA, 15 bp, Homo sapiens
ctttatctccactcc

SEQ ID NO: 382999 - DNA, 15 bp, Homo sapiens
actttatctccactc

SEQ ID NO: 383000 - DNA, 15 bp, Homo sapiens
gactttatctccact

SEQ ID NO: 383001 - DNA, 15 bp, Homo sapiens
tgactttatctccac

SEQ ID NO: 383002 - DNA, 15 bp, Homo sapiens
ctgactttatctcca

SEQ ID NO: 383003 - DNA, 15 bp, Homo sapiens
cctgactttatctcc

SEQ ID NO: 383004 - DNA, 15 bp, Homo sapiens
ccctgactttatctc

SEQ ID NO: 383005 - DNA, 15 bp, Homo sapiens
tccctgactttatct

SEQ ID NO: 383006 - DNA, 15 bp, Homo sapiens
atccctgactttatc

SEQ ID NO: 383007 - DNA, 15 bp, Homo sapiens
aatccctgactttat

SEQ ID NO: 383008 - DNA, 15 bp, Homo sapiens
aaatccctgacttta

SEQ ID NO: 383009 - DNA, 15 bp, Homo sapiens
caaatccctgacttt

SEQ ID NO: 383010 - DNA, 15 bp, Homo sapiens
ccaaatccctgactt

SEQ ID NO: 383011 - DNA, 15 bp, Homo sapiens
tccaaatccctgact

SEQ ID NO: 383012 - DNA, 15 bp, Homo sapiens
atccaaatccctgac

SEQ ID NO: 383013 - DNA, 15 bp, Homo sapiens
aatccaaatccctga

SEQ ID NO: 383014 - DNA, 15 bp, Homo sapiens
aaatccaaatccctg

SEQ ID NO: 383015 - DNA, 15 bp, Homo sapiens
taaatccaaatccct

SEQ ID NO: 383016 - DNA, 15 bp, Homo sapiens
ataaatccaaatccc

SEQ ID NO: 383017 - DNA, 15 bp, Homo sapiens
gataaatccaaatcc

SEQ ID NO: 383018 - DNA, 15 bp, Homo sapiens
ggataaatccaaatc

SEQ ID NO: 383019 - DNA, 15 bp, Homo sapiens
aggataaatccaaat

SEQ ID NO: 383020 - DNA, 15 bp, Homo sapiens
aaggataaatccaaa

SEQ ID NO: 383021 - DNA, 15 bp, Homo sapiens
caaggataaatccaa

SEQ ID NO: 383022 - DNA, 15 bp, Homo sapiens
acaaggataaatcca

SEQ ID NO: 383023 - DNA, 15 bp, Homo sapiens
gacaaggataaatcc

SEQ ID NO: 383024 - DNA, 15 bp, Homo sapiens
tgacaaggataaatc

SEQ ID NO: 383025 - DNA, 15 bp, Homo sapiens
atgacaaggataaat

SEQ ID NO: 383026 - DNA, 15 bp, Homo sapiens
catgacaaggataaa

SEQ ID NO: 383027 - DNA, 15 bp, Homo sapiens
ccatgacaaggataa

SEQ ID NO: 383028 - DNA, 15 bp, Homo sapiens
gccatgacaaggata

SEQ ID NO: 383029 - DNA, 15 bp, Homo sapiens
tgccatgacaaggat

SEQ ID NO: 383030 - DNA, 15 bp, Homo sapiens
ctgccatgacaagga

SEQ ID NO: 383031 - DNA, 15 bp, Homo sapiens
gctgccatgacaagg

SEQ ID NO: 383032 - DNA, 15 bp, Homo sapiens
tgctgccatgacaag

SEQ ID NO: 383033 - DNA, 15 bp, Homo sapiens
atgctgccatgacaa

SEQ ID NO: 383034 - DNA, 15 bp, Homo sapiens
aatgctgccatgaca

SEQ ID NO: 383035 - DNA, 15 bp, Homo sapiens
gaatgctgccatgac

SEQ ID NO: 383036 - DNA, 15 bp, Homo sapiens
tgaatgctgccatga

SEQ ID NO: 383037 - DNA, 15 bp, Homo sapiens
atgaatgctgccatg

SEQ ID NO: 383038 - DNA, 15 bp, Homo sapiens
aatgaatgctgccat

SEQ ID NO: 383039 - DNA, 15 bp, Homo sapiens
taatgaatgctgcca

SEQ ID NO: 383040 - DNA, 15 bp, Homo sapiens
ctaatgaatgctgcc

SEQ ID NO: 383041 - DNA, 15 bp, Homo sapiens
tctaatgaatgctgc

SEQ ID NO: 383042 - DNA, 15 bp, Homo sapiens
ctctaatgaatgctg

SEQ ID NO: 383043 - DNA, 15 bp, Homo sapiens
gctctaatgaatgct

SEQ ID NO: 383044 - DNA, 15 bp, Homo sapiens
agctctaatgaatgc

SEQ ID NO: 383045 - DNA, 15 bp, Homo sapiens
cagctctaatgaatg

SEQ ID NO: 383046 - DNA, 15 bp, Homo sapiens
gcagctctaatgaat

SEQ ID NO: 383047 - DNA, 15 bp, Homo sapiens
agcagctctaatgaa

SEQ ID NO: 383048 - DNA, 15 bp, Homo sapiens
aagcagctctaatga

SEQ ID NO: 383049 - DNA, 15 bp, Homo sapiens
gaagcagctctaatg

SEQ ID NO: 383050 - DNA, 15 bp, Homo sapiens
ggaagcagctctaat

SEQ ID NO: 383051 - DNA, 15 bp, Homo sapiens
gggaagcagctctaa

SEQ ID NO: 383052 - DNA, 15 bp, Homo sapiens
agggaagcagctcta

SEQ ID NO: 383053 - DNA, 15 bp, Homo sapiens
cagggaagcagctct

SEQ ID NO: 383054 - DNA, 15 bp, Homo sapiens
tcagggaagcagctc

SEQ ID NO: 383055 - DNA, 15 bp, Homo sapiens
ctcagggaagcagct

SEQ ID NO: 383056 - DNA, 15 bp, Homo sapiens
actcagggaagcagc

SEQ ID NO: 383057 - DNA, 15 bp, Homo sapiens
gactcagggaagcag

SEQ ID NO: 383058 - DNA, 15 bp, Homo sapiens
ggactcagggaagca

SEQ ID NO: 383059 - DNA, 15 bp, Homo sapiens
aggactcagggaagc

SEQ ID NO: 383060 - DNA, 15 bp, Homo sapiens
gaggactcagggaag

SEQ ID NO: 383061 - DNA, 15 bp, Homo sapiens
agaggactcagggaa

SEQ ID NO: 383062 - DNA, 15 bp, Homo sapiens
gaagaggactcaggg

SEQ ID NO: 383063 - DNA, 15 bp, Homo sapiens
ggaagaggactcagg

SEQ ID NO: 383064 - DNA, 15 bp, Homo sapiens
aggaagaggactcag

SEQ ID NO: 383065 - DNA, 15 bp, Homo sapiens
gaggaagaggactca

SEQ ID NO: 383066 - DNA, 15 bp, Homo sapiens
cgaggaagaggactc

SEQ ID NO: 383067 - DNA, 15 bp, Homo sapiens
acgaggaagaggact

SEQ ID NO: 383068 - DNA, 15 bp, Homo sapiens
cacgaggaagaggac

SEQ ID NO: 383069 - DNA, 15 bp, Homo sapiens
ccacgaggaagagga

SEQ ID NO: 383070 - DNA, 15 bp, Homo sapiens
accacgaggaagagg

SEQ ID NO: 383071 - DNA, 15 bp, Homo sapiens
gaccacgaggaagag

SEQ ID NO: 383072 - DNA, 15 bp, Homo sapiens
tgaccacgaggaaga

SEQ ID NO: 383073 - DNA, 15 bp, Homo sapiens
ttgaccacgaggaag

SEQ ID NO: 383074 - DNA, 15 bp, Homo sapiens
attgaccacgaggaa

SEQ ID NO: 383075 - DNA, 15 bp, Homo sapiens
aattgaccacgagga

SEQ ID NO: 383076 - DNA, 15 bp, Homo sapiens
aaattgaccacgagg

SEQ ID NO: 383077 - DNA, 15 bp, Homo sapiens
aaaattgaccacgag

SEQ ID NO: 383078 - DNA, 15 bp, Homo sapiens
caaaattgaccacga

SEQ ID NO: 383079 - DNA, 15 bp, Homo sapiens
acaaaattgaccacg

SEQ ID NO: 383080 - DNA, 15 bp, Homo sapiens
tacaaaattgaccac

SEQ ID NO: 383081 - DNA, 15 bp, Homo sapiens
ctacaaaattgacca

SEQ ID NO: 383082 - DNA, 15 bp, Homo sapiens
gctacaaaattgacc

SEQ ID NO: 383083 - DNA, 15 bp, Homo sapiens
ggctacaaaattgac

SEQ ID NO: 383084 - DNA, 15 bp, Homo sapiens
tggctacaaaattga

SEQ ID NO: 383085 - DNA, 15 bp, Homo sapiens
gtggctacaaaattg

SEQ ID NO: 383086 - DNA, 15 bp, Homo sapiens
ggtggctacaaaatt

SEQ ID NO: 383087 - DNA, 15 bp, Homo sapiens
gggtggctacaaaat

SEQ ID NO: 383088 - DNA, 15 bp, Homo sapiens
tgggtggctacaaaa

SEQ ID NO: 383089 - DNA, 15 bp, Homo sapiens
atgggtggctacaaa

SEQ ID NO: 383090 - DNA, 15 bp, Homo sapiens
aatgggtggctacaa

SEQ ID NO: 383091 - DNA, 15 bp, Homo sapiens
caatgggtggctaca

SEQ ID NO: 383092 - DNA, 15 bp, Homo sapiens
ccaatgggtggctac

SEQ ID NO: 383093 - DNA, 15 bp, Homo sapiens
gccaatgggtggcta

SEQ ID NO: 383094 - DNA, 15 bp, Homo sapiens
tgccaatgggtggct

SEQ ID NO: 383095 - DNA, 15 bp, Homo sapiens
atgccaatgggtggc

SEQ ID NO: 383096 - DNA, 15 bp, Homo sapiens
aatgccaatgggtgg

SEQ ID NO: 383097 - DNA, 15 bp, Homo sapiens
caatgccaatgggtg

SEQ ID NO: 383098 - DNA, 15 bp, Homo sapiens
acaatgccaatgggt

SEQ ID NO: 383099 - DNA, 15 bp, Homo sapiens
aacaatgccaatggg

SEQ ID NO: 383100 - DNA, 15 bp, Homo sapiens
aaacaatgccaatgg

SEQ ID NO: 383101 - DNA, 15 bp, Homo sapiens
gaaacaatgccaatg

SEQ ID NO: 383102 - DNA, 15 bp, Homo sapiens
agaaacaatgccaat

SEQ ID NO: 383103 - DNA, 15 bp, Homo sapiens
aagaaacaatgccaa

SEQ ID NO: 383104 - DNA, 15 bp, Homo sapiens
gaagaaacaatgcca

SEQ ID NO: 383105 - DNA, 15 bp, Homo sapiens
agaagaaacaatgcc

SEQ ID NO: 383106 - DNA, 15 bp, Homo sapiens
aagaagaaacaatgc

SEQ ID NO: 383107 - DNA, 15 bp, Homo sapiens
gaagaagaaacaatg

SEQ ID NO: 383108 - DNA, 15 bp, Homo sapiens
tgaagaagaaacaat

SEQ ID NO: 383109 - DNA, 15 bp, Homo sapiens
ctgaagaagaaacaa

SEQ ID NO: 383110 - DNA, 15 bp, Homo sapiens
tctgaagaagaaaca

SEQ ID NO: 383111 - DNA, 15 bp, Homo sapiens
ttctgaagaagaaac

SEQ ID NO: 383112 - DNA, 15 bp, Homo sapiens
cttctgaagaagaaa

SEQ ID NO: 383113 - DNA, 15 bp, Homo sapiens
ccttctgaagaagaa

SEQ ID NO: 383114 - DNA, 15 bp, Homo sapiens
gccttctgaagaaga

SEQ ID NO: 383115 - DNA, 15 bp, Homo sapiens
tgccttctgaagaag

SEQ ID NO: 383116 - DNA, 15 bp, Homo sapiens
ttgccttctgaagaa

SEQ ID NO: 383117 - DNA, 15 bp, Homo sapiens
cttgccttctgaaga

SEQ ID NO: 383118 - DNA, 15 bp, Homo sapiens
tcttgccttctgaag

SEQ ID NO: 383119 - DNA, 15 bp, Homo sapiens
atcttgccttctgaa

SEQ ID NO: 383120 - DNA, 15 bp, Homo sapiens
aatcttgccttctga

SEQ ID NO: 383121 - DNA, 15 bp, Homo sapiens
gaatcttgccttctg

SEQ ID NO: 383122 - DNA, 15 bp, Homo sapiens
tgaatcttgccttct

SEQ ID NO: 383123 - DNA, 15 bp, Homo sapiens
ttgaatcttgccttc

SEQ ID NO: 383124 - DNA, 15 bp, Homo sapiens
attgaatcttgcctt

SEQ ID NO: 383125 - DNA, 15 bp, Homo sapiens
tattgaatcttgcct

SEQ ID NO: 383126 - DNA, 15 bp, Homo sapiens
gtattgaatcttgcc

SEQ ID NO: 383127 - DNA, 15 bp, Homo sapiens
tgtattgaatcttgc

SEQ ID NO: 383128 - DNA, 15 bp, Homo sapiens
atgtattgaatcttg

SEQ ID NO: 383129 - DNA, 15 bp, Homo sapiens
gatgtattgaatctt

SEQ ID NO: 383130 - DNA, 15 bp, Homo sapiens
tgatgtattgaatct

SEQ ID NO: 383131 - DNA, 15 bp, Homo sapiens
ttgatgtattgaatc

SEQ ID NO: 383132 - DNA, 15 bp, Homo sapiens
tttgatgtattgaat

SEQ ID NO: 383133 - DNA, 15 bp, Homo sapiens
atttgatgtattgaa

SEQ ID NO: 383134 - DNA, 15 bp, Homo sapiens
aatttgatgtattga

SEQ ID NO: 383135 - DNA, 15 bp, Homo sapiens
taatttgatgtattg

SEQ ID NO: 383136 - DNA, 15 bp, Homo sapiens
ataatttgatgtatt

SEQ ID NO: 383137 - DNA, 15 bp, Homo sapiens
gataatttgatgtat

SEQ ID NO: 383138 - DNA, 15 bp, Homo sapiens
tgataatttgatgta

SEQ ID NO: 383139 - DNA, 15 bp, Homo sapiens
atgataatttgatgt

SEQ ID NO: 383140 - DNA, 15 bp, Homo sapiens
aatgataatttgatg

SEQ ID NO: 383141 - DNA, 15 bp, Homo sapiens
caatgataatttgat

SEQ ID NO: 383142 - DNA, 15 bp, Homo sapiens
acaatgataatttga

SEQ ID NO: 383143 - DNA, 15 bp, Homo sapiens
gacaatgataatttg

SEQ ID NO: 383144 - DNA, 15 bp, Homo sapiens
ggacaatgataattt

SEQ ID NO: 383145 - DNA, 15 bp, Homo sapiens
aggacaatgataatt

SEQ ID NO: 383146 - DNA, 15 bp, Homo sapiens
taggacaatgataat

SEQ ID NO: 383147 - DNA, 15 bp, Homo sapiens
gtaggacaatgataa

SEQ ID NO: 383148 - DNA, 15 bp, Homo sapiens
agtaggacaatgata

SEQ ID NO: 383149 - DNA, 15 bp, Homo sapiens
aagtaggacaatgat

SEQ ID NO: 383150 - DNA, 15 bp, Homo sapiens
caagtaggacaatga

SEQ ID NO: 383151 - DNA, 15 bp, Homo sapiens
gcaagtaggacaatg

SEQ ID NO: 383152 - DNA, 15 bp, Homo sapiens
tgcaagtaggacaat

SEQ ID NO: 383153 - DNA, 15 bp, Homo sapiens
ctgcaagtaggacaa

SEQ ID NO: 383154 - DNA, 15 bp, Homo sapiens
gctgcaagtaggaca

SEQ ID NO: 383155 - DNA, 15 bp, Homo sapiens
tgctgcaagtaggac

SEQ ID NO: 383156 - DNA, 15 bp, Homo sapiens
gtgctgcaagtagga

SEQ ID NO: 383157 - DNA, 15 bp, Homo sapiens
agtgctgcaagtagg

SEQ ID NO: 383158 - DNA, 15 bp, Homo sapiens
gagtgctgcaagtag

SEQ ID NO: 383159 - DNA, 15 bp, Homo sapiens
agagtgctgcaagta

SEQ ID NO: 383160 - DNA, 15 bp, Homo sapiens
gagagtgctgcaagt

SEQ ID NO: 383161 - DNA, 15 bp, Homo sapiens
ggagagtgctgcaag

SEQ ID NO: 383162 - DNA, 15 bp, Homo sapiens
tggagagtgctgcaa

SEQ ID NO: 383163 - DNA, 15 bp, Homo sapiens
atggagagtgctgca

SEQ ID NO: 383164 - DNA, 15 bp, Homo sapiens
catggagagtgctgc

SEQ ID NO: 383165 - DNA, 15 bp, Homo sapiens
ccatggagagtgctg

SEQ ID NO: 383166 - DNA, 15 bp, Homo sapiens
tccatggagagtgct

SEQ ID NO: 383167 - DNA, 15 bp, Homo sapiens
atccatggagagtgc

SEQ ID NO: 383168 - DNA, 15 bp, Homo sapiens
catccatggagagtg

SEQ ID NO: 383169 - DNA, 15 bp, Homo sapiens
gcatccatggagagt

SEQ ID NO: 383170 - DNA, 15 bp, Homo sapiens
agcatccatggagag

SEQ ID NO: 383171 - DNA, 15 bp, Homo sapiens
cagcatccatggaga

SEQ ID NO: 383172 - DNA, 15 bp, Homo sapiens
tcagcatccatggag

SEQ ID NO: 383173 - DNA, 15 bp, Homo sapiens
ttcagcatccatgga

SEQ ID NO: 383174 - DNA, 15 bp, Homo sapiens
attcagcatccatgg

SEQ ID NO: 383175 - DNA, 15 bp, Homo sapiens
cattcagcatccatg

SEQ ID NO: 383176 - DNA, 15 bp, Homo sapiens
ccattcagcatccat

SEQ ID NO: 383177 - DNA, 15 bp, Homo sapiens
gccattcagcatcca

SEQ ID NO: 383178 - DNA, 15 bp, Homo sapiens
agccattcagcatcc

SEQ ID NO: 383179 - DNA, 15 bp, Homo sapiens
cagccattcagcatc

SEQ ID NO: 383180 - DNA, 15 bp, Homo sapiens
ccagccattcagcat

SEQ ID NO: 383181 - DNA, 15 bp, Homo sapiens
cgccagccattcagc

SEQ ID NO: 383182 - DNA, 15 bp, Homo sapiens
tcgccagccattcag

SEQ ID NO: 383183 - DNA, 15 bp, Homo sapiens
atcgccagccattca

SEQ ID NO: 383184 - DNA, 15 bp, Homo sapiens
gatcgccagccattc

SEQ ID NO: 383185 - DNA, 15 bp, Homo sapiens
tgatcgccagccatt

SEQ ID NO: 383186 - DNA, 15 bp, Homo sapiens
atgatcgccagccat

SEQ ID NO: 383187 - DNA, 15 bp, Homo sapiens
aatgatcgccagcca

SEQ ID NO: 383188 - DNA, 15 bp, Homo sapiens
caatgatcgccagcc

SEQ ID NO: 383189 - DNA, 15 bp, Homo sapiens
tcaatgatcgccagc

SEQ ID NO: 383190 - DNA, 15 bp, Homo sapiens
ttcaatgatcgccag

SEQ ID NO: 383191 - DNA, 15 bp, Homo sapiens
tttcaatgatcgcca

SEQ ID NO: 383192 - DNA, 15 bp, Homo sapiens
atttcaatgatcgcc

SEQ ID NO: 383193 - DNA, 15 bp, Homo sapiens
catttcaatgatcgc

SEQ ID NO: 383194 - DNA, 15 bp, Homo sapiens
acatttcaatgatcg

SEQ ID NO: 383195 - DNA, 15 bp, Homo sapiens
cacatttcaatgatc

SEQ ID NO: 383196 - DNA, 15 bp, Homo sapiens
acacatttcaatgat

SEQ ID NO: 383197 - DNA, 15 bp, Homo sapiens
cacacatttcaatga

SEQ ID NO: 383198 - DNA, 15 bp, Homo sapiens
acacacatttcaatg

SEQ ID NO: 383199 - DNA, 15 bp, Homo sapiens
aacacacatttcaat

SEQ ID NO: 383200 - DNA, 15 bp, Homo sapiens
gaacacacatttcaa

SEQ ID NO: 383201 - DNA, 15 bp, Homo sapiens
ggaacacacatttca

SEQ ID NO: 383202 - DNA, 15 bp, Homo sapiens
aggaacacacatttc

SEQ ID NO: 383203 - DNA, 15 bp, Homo sapiens
aaggaacacacattt

SEQ ID NO: 383204 - DNA, 15 bp, Homo sapiens
caaggaacacacatt

SEQ ID NO: 383205 - DNA, 15 bp, Homo sapiens
ccaaggaacacacat

SEQ ID NO: 383206 - DNA, 15 bp, Homo sapiens
tccaaggaacacaca

SEQ ID NO: 383207 - DNA, 15 bp, Homo sapiens
ttccaaggaacacac

SEQ ID NO: 383208 - DNA, 15 bp, Homo sapiens
cttccaaggaacaca

SEQ ID NO: 383209 - DNA, 15 bp, Homo sapiens
gcttccaaggaacac

SEQ ID NO: 383210 - DNA, 15 bp, Homo sapiens
tgcttccaaggaaca

SEQ ID NO: 383211 - DNA, 15 bp, Homo sapiens
atgcttccaaggaac

SEQ ID NO: 383212 - DNA, 15 bp, Homo sapiens
catgcttccaaggaa

SEQ ID NO: 383213 - DNA, 15 bp, Homo sapiens
acatgcttccaagga

SEQ ID NO: 383214 - DNA, 15 bp, Homo sapiens
aacatgcttccaagg

SEQ ID NO: 383215 - DNA, 15 bp, Homo sapiens
caacatgcttccaag

SEQ ID NO: 383216 - DNA, 15 bp, Homo sapiens
ccaacatgcttccaa

SEQ ID NO: 383217 - DNA, 15 bp, Homo sapiens
cccaacatgcttcca

SEQ ID NO: 383218 - DNA, 15 bp, Homo sapiens
tcccaacatgcttcc

SEQ ID NO: 383219 - DNA, 15 bp, Homo sapiens
ctcccaacatgcttc

SEQ ID NO: 383220 - DNA, 15 bp, Homo sapiens
tctcccaacatgctt

SEQ ID NO: 383221 - DNA, 15 bp, Homo sapiens
ttctcccaacatgct

SEQ ID NO: 383222 - DNA, 15 bp, Homo sapiens
attctcccaacatgc

SEQ ID NO: 383223 - DNA, 15 bp, Homo sapiens
gattctcccaacatg

SEQ ID NO: 383224 - DNA, 15 bp, Homo sapiens
agattctcccaacat

SEQ ID NO: 383225 - DNA, 15 bp, Homo sapiens
cagattctcccaaca

SEQ ID NO: 383226 - DNA, 15 bp, Homo sapiens
acagattctcccaac

SEQ ID NO: 383227 - DNA, 15 bp, Homo sapiens
aacagattctcccaa

SEQ ID NO: 383228 - DNA, 15 bp, Homo sapiens
gaacagattctccca

SEQ ID NO: 383229 - DNA, 15 bp, Homo sapiens
cgaacagattctccc

SEQ ID NO: 383230 - DNA, 15 bp, Homo sapiens
acgaacagattctcc

SEQ ID NO: 383231 - DNA, 15 bp, Homo sapiens
tacgaacagattctc

SEQ ID NO: 383232 - DNA, 15 bp, Homo sapiens
ttacgaacagattct

SEQ ID NO: 383233 - DNA, 15 bp, Homo sapiens
tttacgaacagattc

SEQ ID NO: 383234 - DNA, 15 bp, Homo sapiens
ttttacgaacagatt

SEQ ID NO: 383235 - DNA, 15 bp, Homo sapiens
attttacgaacagat

SEQ ID NO: 383236 - DNA, 15 bp, Homo sapiens
tattttacgaacaga

SEQ ID NO: 383237 - DNA, 15 bp, Homo sapiens
gtattttacgaacag

SEQ ID NO: 383238 - DNA, 15 bp, Homo sapiens
ggtattttacgaaca

SEQ ID NO: 383239 - DNA, 15 bp, Homo sapiens
aggtattttacgaac

SEQ ID NO: 383240 - DNA, 15 bp, Homo sapiens
aaggtattttacgaa

SEQ ID NO: 383241 - DNA, 15 bp, Homo sapiens
aaaggtattttacga

SEQ ID NO: 383242 - DNA, 15 bp, Homo sapiens
caaaggtattttacg

SEQ ID NO: 383243 - DNA, 15 bp, Homo sapiens
gcaaaggtattttac

SEQ ID NO: 383244 - DNA, 15 bp, Homo sapiens
tgcaaaggtatttta

SEQ ID NO: 383245 - DNA, 15 bp, Homo sapiens
gtgcaaaggtatttt

SEQ ID NO: 383246 - DNA, 15 bp, Homo sapiens
ggtgcaaaggtattt

SEQ ID NO: 383247 - DNA, 15 bp, Homo sapiens
tggtgcaaaggtatt

SEQ ID NO: 383248 - DNA, 15 bp, Homo sapiens
ctggtgcaaaggtat

SEQ ID NO: 383249 - DNA, 15 bp, Homo sapiens
tctggtgcaaaggta

SEQ ID NO: 383250 - DNA, 15 bp, Homo sapiens
gtctggtgcaaaggt

SEQ ID NO: 383251 - DNA, 15 bp, Homo sapiens
tgtctggtgcaaagg

SEQ ID NO: 383252 - DNA, 15 bp, Homo sapiens
atgtctggtgcaaag

SEQ ID NO: 383253 - DNA, 15 bp, Homo sapiens
aatgtctggtgcaaa

SEQ ID NO: 383254 - DNA, 15 bp, Homo sapiens
aaatgtctggtgcaa

SEQ ID NO: 383255 - DNA, 15 bp, Homo sapiens
aaaatgtctggtgca

SEQ ID NO: 383256 - DNA, 15 bp, Homo sapiens
taaaatgtctggtgc

SEQ ID NO: 383257 - DNA, 15 bp, Homo sapiens
ctaaaatgtctggtg

SEQ ID NO: 383258 - DNA, 15 bp, Homo sapiens
actaaaatgtctggt

SEQ ID NO: 383259 - DNA, 15 bp, Homo sapiens
tactaaaatgtctgg

SEQ ID NO: 383260 - DNA, 15 bp, Homo sapiens
ttactaaaatgtctg

SEQ ID NO: 383261 - DNA, 15 bp, Homo sapiens
tttactaaaatgtct

SEQ ID NO: 383262 - DNA, 15 bp, Homo sapiens
ttttactaaaatgtc

SEQ ID NO: 383263 - DNA, 15 bp, Homo sapiens
gttttactaaaatgt

SEQ ID NO: 383264 - DNA, 15 bp, Homo sapiens
cgttttactaaaatg

SEQ ID NO: 383265 - DNA, 15 bp, Homo sapiens
gcgttttactaaaat

SEQ ID NO: 383266 - DNA, 15 bp, Homo sapiens
ggcgttttactaaaa

SEQ ID NO: 383267 - DNA, 15 bp, Homo sapiens
gggcgttttactaaa

SEQ ID NO: 383268 - DNA, 15 bp, Homo sapiens
tgggcgttttactaa

SEQ ID NO: 383269 - DNA, 15 bp, Homo sapiens
ctgggcgttttacta

SEQ ID NO: 383270 - DNA, 15 bp, Homo sapiens
tctgggcgttttact

SEQ ID NO: 383271 - DNA, 15 bp, Homo sapiens
ctctgggcgttttac

SEQ ID NO: 383272 - DNA, 15 bp, Homo sapiens
gctctgggcgtttta

SEQ ID NO: 383273 - DNA, 15 bp, Homo sapiens
tgctctgggcgtttt

SEQ ID NO: 383274 - DNA, 15 bp, Homo sapiens
atgctctgggcgttt

SEQ ID NO: 383275 - DNA, 15 bp, Homo sapiens
aatgctctgggcgtt

SEQ ID NO: 383276 - DNA, 15 bp, Homo sapiens
gaatgctctgggcgt

SEQ ID NO: 383277 - DNA, 15 bp, Homo sapiens
tgaatgctctgggcg

SEQ ID NO: 383278 - DNA, 15 bp, Homo sapiens
atgaatgctctgggc

SEQ ID NO: 383279 - DNA, 15 bp, Homo sapiens
tatgaatgctctggg

SEQ ID NO: 383280 - DNA, 15 bp, Homo sapiens
gtatgaatgctctgg

SEQ ID NO: 383281 - DNA, 15 bp, Homo sapiens
tgtatgaatgctctg

SEQ ID NO: 383282 - DNA, 15 bp, Homo sapiens
ctgtatgaatgctct

SEQ ID NO: 383283 - DNA, 15 bp, Homo sapiens
actgtatgaatgctc

SEQ ID NO: 383284 - DNA, 15 bp, Homo sapiens
aactgtatgaatgct

SEQ ID NO: 383285 - DNA, 15 bp, Homo sapiens
gaactgtatgaatgc

SEQ ID NO: 383286 - DNA, 15 bp, Homo sapiens
ggaactgtatgaatg

SEQ ID NO: 383287 - DNA, 15 bp, Homo sapiens
cggaactgtatgaat

SEQ ID NO: 383288 - DNA, 15 bp, Homo sapiens
acggaactgtatgaa

SEQ ID NO: 383289 - DNA, 15 bp, Homo sapiens
aacggaactgtatga

SEQ ID NO: 383290 - DNA, 15 bp, Homo sapiens
tttctccaatctatc

SEQ ID NO: 383291 - DNA, 15 bp, Homo sapiens
ctttctccaatctat

SEQ ID NO: 383292 - DNA, 15 bp, Homo sapiens
tctttctccaatcta

SEQ ID NO: 383293 - DNA, 15 bp, Homo sapiens
ttctttctccaatct

SEQ ID NO: 383294 - DNA, 15 bp, Homo sapiens
attctttctccaatc

SEQ ID NO: 383295 - DNA, 15 bp, Homo sapiens
aattctttctccaat

SEQ ID NO: 383296 - DNA, 15 bp, Homo sapiens
gaattctttctccaa

SEQ ID NO: 383297 - DNA, 15 bp, Homo sapiens
agaattctttctcca

SEQ ID NO: 383298 - DNA, 15 bp, Homo sapiens
cagaattctttctcc

SEQ ID NO: 383299 - DNA, 15 bp, Homo sapiens
tcagaattctttctc

SEQ ID NO: 383300 - DNA, 15 bp, Homo sapiens
gtcagaattctttct

SEQ ID NO: 383301 - DNA, 15 bp, Homo sapiens
agtcagaattctttc

SEQ ID NO: 383302 - DNA, 15 bp, Homo sapiens
aagtcagaattcttt

SEQ ID NO: 383303 - DNA, 15 bp, Homo sapiens
taagtcagaattctt

SEQ ID NO: 383304 - DNA, 15 bp, Homo sapiens
ctaagtcagaattct

SEQ ID NO: 383305 - DNA, 15 bp, Homo sapiens
tctaagtcagaattc

SEQ ID NO: 383306 - DNA, 15 bp, Homo sapiens
gtctaagtcagaatt

SEQ ID NO: 383307 - DNA, 15 bp, Homo sapiens
ggtctaagtcagaat

SEQ ID NO: 383308 - DNA, 15 bp, Homo sapiens
tggtctaagtcagaa

SEQ ID NO: 383309 - DNA, 15 bp, Homo sapiens
gtggtctaagtcaga

SEQ ID NO: 383310 - DNA, 15 bp, Homo sapiens
ggtggtctaagtcag

SEQ ID NO: 383311 - DNA, 15 bp, Homo sapiens
aggtggtctaagtca

SEQ ID NO: 383312 - DNA, 15 bp, Homo sapiens
caggtggtctaagtc

SEQ ID NO: 383313 - DNA, 15 bp, Homo sapiens
acaggtggtctaagt

SEQ ID NO: 383314 - DNA, 15 bp, Homo sapiens
tacaggtggtctaag

SEQ ID NO: 383315 - DNA, 15 bp, Homo sapiens
ctacaggtggtctaa

SEQ ID NO: 383316 - DNA, 15 bp, Homo sapiens
gctacaggtggtcta

SEQ ID NO: 383317 - DNA, 15 bp, Homo sapiens
tgctacaggtggtct

SEQ ID NO: 383318 - DNA, 15 bp, Homo sapiens
ctgctacaggtggtc

SEQ ID NO: 383319 - DNA, 15 bp, Homo sapiens
tctgctacaggtggt

SEQ ID NO: 383320 - DNA, 15 bp, Homo sapiens
gtctgctacaggtgg

SEQ ID NO: 383321 - DNA, 15 bp, Homo sapiens
ggtctgctacaggtg

SEQ ID NO: 383322 - DNA, 15 bp, Homo sapiens
aggtctgctacaggt

SEQ ID NO: 383323 - DNA, 15 bp, Homo sapiens
aaggtctgctacagg

SEQ ID NO: 383324 - DNA, 15 bp, Homo sapiens
gaaggtctgctacag

SEQ ID NO: 383325 - DNA, 15 bp, Homo sapiens
ggaaggtctgctaca

SEQ ID NO: 383326 - DNA, 15 bp, Homo sapiens
aggaaggtctgctac

SEQ ID NO: 383327 - DNA, 15 bp, Homo sapiens
gaggaaggtctgcta

SEQ ID NO: 383328 - DNA, 15 bp, Homo sapiens
agaggaaggtctgct

SEQ ID NO: 383329 - DNA, 15 bp, Homo sapiens
aagaggaaggtctgc

SEQ ID NO: 383330 - DNA, 15 bp, Homo sapiens
aaagaggaaggtctg

SEQ ID NO: 383331 - DNA, 15 bp, Homo sapiens
aaaagaggaaggtct

SEQ ID NO: 383332 - DNA, 15 bp, Homo sapiens
caaaagaggaaggtc

SEQ ID NO: 383333 - DNA, 15 bp, Homo sapiens
ccaaaagaggaaggt

SEQ ID NO: 383334 - DNA, 15 bp, Homo sapiens
gccaaaagaggaagg

SEQ ID NO: 383335 - DNA, 15 bp, Homo sapiens
tgccaaaagaggaag

SEQ ID NO: 383336 - DNA, 15 bp, Homo sapiens
atgccaaaagaggaa

SEQ ID NO: 383337 - DNA, 15 bp, Homo sapiens
tatgccaaaagagga

SEQ ID NO: 383338 - DNA, 15 bp, Homo sapiens
atatgccaaaagagg

SEQ ID NO: 383339 - DNA, 15 bp, Homo sapiens
aatatgccaaaagag

SEQ ID NO: 383340 - DNA, 15 bp, Homo sapiens
aaatatgccaaaaga

SEQ ID NO: 383341 - DNA, 15 bp, Homo sapiens
aaaatatgccaaaag

SEQ ID NO: 383342 - DNA, 15 bp, Homo sapiens
aaaaatatgccaaaa

SEQ ID NO: 383343 - DNA, 15 bp, Homo sapiens
aaaaaatatgccaaa

SEQ ID NO: 383344 - DNA, 15 bp, Homo sapiens
aaaaaaatatgccaa

SEQ ID NO: 383345 - DNA, 15 bp, Homo sapiens
taaaaaaatatgcca

SEQ ID NO: 383346 - DNA, 15 bp, Homo sapiens
ttaaaaaaatatgcc

SEQ ID NO: 383347 - DNA, 15 bp, Homo sapiens
attaaaaaaatatgc

SEQ ID NO: 383348 - DNA, 15 bp, Homo sapiens
gattaaaaaaatatg

SEQ ID NO: 383349 - DNA, 15 bp, Homo sapiens
tgattaaaaaaatat

SEQ ID NO: 383350 - DNA, 15 bp, Homo sapiens
gtgattaaaaaaata

SEQ ID NO: 383351 - DNA, 15 bp, Homo sapiens
tgtgattaaaaaaat

SEQ ID NO: 383352 - DNA, 15 bp, Homo sapiens
ttgtgattaaaaaaa

SEQ ID NO: 383353 - DNA, 15 bp, Homo sapiens
tttgtgattaaaaaa

SEQ ID NO: 383354 - DNA, 15 bp, Homo sapiens
ttttgtgattaaaaa

SEQ ID NO: 383355 - DNA, 15 bp, Homo sapiens
tttttgtgattaaaa

SEQ ID NO: 383356 - DNA, 15 bp, Homo sapiens
ctttttgtgattaaa

SEQ ID NO: 383357 - DNA, 15 bp, Homo sapiens
cctttttgtgattaa

SEQ ID NO: 383358 - DNA, 15 bp, Homo sapiens
tcctttttgtgatta

SEQ ID NO: 383359 - DNA, 15 bp, Homo sapiens
gtcctttttgtgatt

SEQ ID NO: 383360 - DNA, 15 bp, Homo sapiens
ggtcctttttgtgat

SEQ ID NO: 383361 - DNA, 15 bp, Homo sapiens
aggtcctttttgtga

SEQ ID NO: 383362 - DNA, 15 bp, Homo sapiens
caggtcctttttgtg

SEQ ID NO: 383363 - DNA, 15 bp, Homo sapiens
tcaggtcctttttgt

SEQ ID NO: 383364 - DNA, 15 bp, Homo sapiens
ctcaggtcctttttg

SEQ ID NO: 383365 - DNA, 15 bp, Homo sapiens
tctcaggtccttttt

SEQ ID NO: 383366 - DNA, 15 bp, Homo sapiens
gtctcaggtcctttt

SEQ ID NO: 383367 - DNA, 15 bp, Homo sapiens
agtctcaggtccttt

SEQ ID NO: 383368 - DNA, 15 bp, Homo sapiens
gagtctcaggtcctt

SEQ ID NO: 383369 - DNA, 15 bp, Homo sapiens
ggagtctcaggtcct

SEQ ID NO: 383370 - DNA, 15 bp, Homo sapiens
gggagtctcaggtcc

SEQ ID NO: 383371 - DNA, 15 bp, Homo sapiens
agggagtctcaggtc

SEQ ID NO: 383372 - DNA, 15 bp, Homo sapiens
tagggagtctcaggt

SEQ ID NO: 383373 - DNA, 15 bp, Homo sapiens
atagggagtctcagg

SEQ ID NO: 383374 - DNA, 15 bp, Homo sapiens
gatagggagtctcag

SEQ ID NO: 383375 - DNA, 15 bp, Homo sapiens
agatagggagtctca

SEQ ID NO: 383376 - DNA, 15 bp, Homo sapiens
tagatagggagtctc

SEQ ID NO: 383377 - DNA, 15 bp, Homo sapiens
ttagatagggagtct

SEQ ID NO: 383378 - DNA, 15 bp, Homo sapiens
tttagatagggagtc

SEQ ID NO: 383379 - DNA, 15 bp, Homo sapiens
ctttagatagggagt

SEQ ID NO: 383380 - DNA, 15 bp, Homo sapiens
tctttagatagggag

SEQ ID NO: 383381 - DNA, 15 bp, Homo sapiens
atctttagataggga

SEQ ID NO: 383382 - DNA, 15 bp, Homo sapiens
tatctttagataggg

SEQ ID NO: 383383 - DNA, 15 bp, Homo sapiens
ttatctttagatagg

SEQ ID NO: 383384 - DNA, 15 bp, Homo sapiens
cttatctttagatag

SEQ ID NO: 383385 - DNA, 15 bp, Homo sapiens
gcttatctttagata

SEQ ID NO: 383386 - DNA, 15 bp, Homo sapiens
ggcttatctttagat

SEQ ID NO: 383387 - DNA, 15 bp, Homo sapiens
tggcttatctttaga

SEQ ID NO: 383388 - DNA, 15 bp, Homo sapiens
ttggcttatctttag

SEQ ID NO: 383389 - DNA, 15 bp, Homo sapiens
tttggcttatcttta

SEQ ID NO: 383390 - DNA, 15 bp, Homo sapiens
gtttggcttatcttt

SEQ ID NO: 383391 - DNA, 15 bp, Homo sapiens
agtttggcttatctt

SEQ ID NO: 383392 - DNA, 15 bp, Homo sapiens
aagtttggcttatct

SEQ ID NO: 383393 - DNA, 15 bp, Homo sapiens
caagtttggcttatc

SEQ ID NO: 383394 - DNA, 15 bp, Homo sapiens
ccaagtttggcttat

SEQ ID NO: 383395 - DNA, 15 bp, Homo sapiens
cccaagtttggctta

SEQ ID NO: 383396 - DNA, 15 bp, Homo sapiens
ccccaagtttggctt

SEQ ID NO: 383397 - DNA, 15 bp, Homo sapiens
accccaagtttggct

SEQ ID NO: 383398 - DNA, 15 bp, Homo sapiens
taccccaagtttggc

SEQ ID NO: 383399 - DNA, 15 bp, Homo sapiens
ataccccaagtttgg

SEQ ID NO: 383400 - DNA, 15 bp, Homo sapiens
tataccccaagtttg

SEQ ID NO: 383401 - DNA, 15 bp, Homo sapiens
gtataccccaagttt

SEQ ID NO: 383402 - DNA, 15 bp, Homo sapiens
tgtataccccaagtt

SEQ ID NO: 383403 - DNA, 15 bp, Homo sapiens
atgtataccccaagt

SEQ ID NO: 383404 - DNA, 15 bp, Homo sapiens
aatgtataccccaag

SEQ ID NO: 383405 - DNA, 15 bp, Homo sapiens
taatgtataccccaa

SEQ ID NO: 383406 - DNA, 15 bp, Homo sapiens
ttaatgtatacccca

SEQ ID NO: 383407 - DNA, 15 bp, Homo sapiens
cttaatgtatacccc

SEQ ID NO: 383408 - DNA, 15 bp, Homo sapiens
tcttaatgtataccc

SEQ ID NO: 383409 - DNA, 15 bp, Homo sapiens
ttcttaatgtatacc

SEQ ID NO: 383410 - DNA, 15 bp, Homo sapiens
attcttaatgtatac

SEQ ID NO: 383411 - DNA, 15 bp, Homo sapiens
gattcttaatgtata

SEQ ID NO: 383412 - DNA, 15 bp, Homo sapiens
agattcttaatgtat

SEQ ID NO: 383413 - DNA, 15 bp, Homo sapiens
cagattcttaatgta

SEQ ID NO: 383414 - DNA, 15 bp, Homo sapiens
ccagattcttaatgt

SEQ ID NO: 383415 - DNA, 15 bp, Homo sapiens
cccagattcttaatg

SEQ ID NO: 383416 - DNA, 15 bp, Homo sapiens
tcccagattcttaat

SEQ ID NO: 383417 - DNA, 15 bp, Homo sapiens
ttcccagattcttaa

SEQ ID NO: 383418 - DNA, 15 bp, Homo sapiens
cttcccagattctta

SEQ ID NO: 383419 - DNA, 15 bp, Homo sapiens
tcttcccagattctt

SEQ ID NO: 383420 - DNA, 15 bp, Homo sapiens
ttcttcccagattct

SEQ ID NO: 383421 - DNA, 15 bp, Homo sapiens
tttcttcccagattc

SEQ ID NO: 383422 - DNA, 15 bp, Homo sapiens
ctttcttcccagatt

SEQ ID NO: 383423 - DNA, 15 bp, Homo sapiens
tctttcttcccagat

SEQ ID NO: 383424 - DNA, 15 bp, Homo sapiens
ttctttcttcccaga

SEQ ID NO: 383425 - DNA, 15 bp, Homo sapiens
tttctttcttcccag

SEQ ID NO: 383426 - DNA, 15 bp, Homo sapiens
ttttctttcttccca

SEQ ID NO: 383427 - DNA, 15 bp, Homo sapiens
tttttctttcttccc

SEQ ID NO: 383428 - DNA, 15 bp, Homo sapiens
cttttttttctttct

SEQ ID NO: 383429 - DNA, 15 bp, Homo sapiens
tcttttttttctttc

SEQ ID NO: 383430 - DNA, 15 bp, Homo sapiens
atctttttctttttt

SEQ ID NO: 383431 - DNA, 15 bp, Homo sapiens
tatctttttcttttt

SEQ ID NO: 383432 - DNA, 15 bp, Homo sapiens
ccttgaaaatcctct

SEQ ID NO: 383433 - DNA, 15 bp, Homo sapiens
accttgaaaatcctc

SEQ ID NO: 383434 - DNA, 15 bp, Homo sapiens
caccttgaaaatcct

SEQ ID NO: 383435 - DNA, 15 bp, Homo sapiens
gcaccttgaaaatcc

SEQ ID NO: 383436 - DNA, 15 bp, Homo sapiens
agcaccttgaaaatc

SEQ ID NO: 383437 - DNA, 15 bp, Homo sapiens
aagcaccttgaaaat

SEQ ID NO: 383438 - DNA, 15 bp, Homo sapiens
taagcaccttgaaaa

SEQ ID NO: 383439 - DNA, 15 bp, Homo sapiens
gtaagcaccttgaaa

SEQ ID NO: 383440 - DNA, 15 bp, Homo sapiens
tgtaagcaccttgaa

SEQ ID NO: 383441 - DNA, 15 bp, Homo sapiens
ttgtaagcaccttga

SEQ ID NO: 383442 - DNA, 15 bp, Homo sapiens
attgtaagcaccttg

SEQ ID NO: 383443 - DNA, 15 bp, Homo sapiens
aattgtaagcacctt

SEQ ID NO: 383444 - DNA, 15 bp, Homo sapiens
taattgtaagcacct

SEQ ID NO: 383445 - DNA, 15 bp, Homo sapiens
ataattgtaagcacc

SEQ ID NO: 383446 - DNA, 15 bp, Homo sapiens
cataattgtaagcac

SEQ ID NO: 383447 - DNA, 15 bp, Homo sapiens
acataattgtaagca

SEQ ID NO: 383448 - DNA, 15 bp, Homo sapiens
aacataattgtaagc

SEQ ID NO: 383449 - DNA, 15 bp, Homo sapiens
taacataattgtaag

SEQ ID NO: 383450 - DNA, 15 bp, Homo sapiens
ttaacataattgtaa

SEQ ID NO: 383451 - DNA, 15 bp, Homo sapiens
gttaacataattgta

SEQ ID NO: 383452 - DNA, 15 bp, Homo sapiens
tgttaacataattgt

SEQ ID NO: 383453 - DNA, 15 bp, Homo sapiens
ctgttaacataattg

SEQ ID NO: 383454 - DNA, 15 bp, Homo sapiens
gctgttaacataatt

SEQ ID NO: 383455 - DNA, 15 bp, Homo sapiens
tgctgttaacataat

SEQ ID NO: 383456 - DNA, 15 bp, Homo sapiens
atgctgttaacataa

SEQ ID NO: 383457 - DNA, 15 bp, Homo sapiens
catgctgttaacata

SEQ ID NO: 383458 - DNA, 15 bp, Homo sapiens
ccatgctgttaacat

SEQ ID NO: 383459 - DNA, 15 bp, Homo sapiens
gccatgctgttaaca

SEQ ID NO: 383460 - DNA, 15 bp, Homo sapiens
tgccatgctgttaac

SEQ ID NO: 383461 - DNA, 15 bp, Homo sapiens
ctgccatgctgttaa

SEQ ID NO: 383462 - DNA, 15 bp, Homo sapiens
cctgccatgctgtta

SEQ ID NO: 383463 - DNA, 15 bp, Homo sapiens
tcctgccatgctgtt

SEQ ID NO: 383464 - DNA, 15 bp, Homo sapiens
atcctgccatgctgt

SEQ ID NO: 383465 - DNA, 15 bp, Homo sapiens
tatcctgccatgctg

SEQ ID NO: 383466 - DNA, 15 bp, Homo sapiens
ttatcctgccatgct

SEQ ID NO: 383467 - DNA, 15 bp, Homo sapiens
tttatcctgccatgc

SEQ ID NO: 383468 - DNA, 15 bp, Homo sapiens
ctttatcctgccatg

SEQ ID NO: 383469 - DNA, 15 bp, Homo sapiens
cctttatcctgccat

SEQ ID NO: 383470 - DNA, 15 bp, Homo sapiens
tcctttatcctgcca

SEQ ID NO: 383471 - DNA, 15 bp, Homo sapiens
ttcctttatcctgcc

SEQ ID NO: 383472 - DNA, 15 bp, Homo sapiens
cttcctttatcctgc

SEQ ID NO: 383473 - DNA, 15 bp, Homo sapiens
tcttcctttatcctg

SEQ ID NO: 383474 - DNA, 15 bp, Homo sapiens
ttcttcctttatcct

SEQ ID NO: 383475 - DNA, 15 bp, Homo sapiens
tttcttcctttatcc

SEQ ID NO: 383476 - DNA, 15 bp, Homo sapiens
ttttcttcctttatc

SEQ ID NO: 383477 - DNA, 15 bp, Homo sapiens
tttttcttcctttat

SEQ ID NO: 383478 - DNA, 15 bp, Homo sapiens
atttttcttccttta

SEQ ID NO: 383479 - DNA, 15 bp, Homo sapiens
gatttttcttccttt

SEQ ID NO: 383480 - DNA, 15 bp, Homo sapiens
tgatttttcttcctt

SEQ ID NO: 383481 - DNA, 15 bp, Homo sapiens
ctgatttttcttcct

SEQ ID NO: 383482 - DNA, 15 bp, Homo sapiens
cctgatttttcttcc

SEQ ID NO: 383483 - DNA, 15 bp, Homo sapiens
gcctgatttttcttc

SEQ ID NO: 383484 - DNA, 15 bp, Homo sapiens
ggcctgatttttctt

SEQ ID NO: 383485 - DNA, 15 bp, Homo sapiens
tggcctgatttttct

SEQ ID NO: 383486 - DNA, 15 bp, Homo sapiens
ttggcctgatttttc

SEQ ID NO: 383487 - DNA, 15 bp, Homo sapiens
cttggcctgattttt

SEQ ID NO: 383488 - DNA, 15 bp, Homo sapiens
ccttggcctgatttt

SEQ ID NO: 383489 - DNA, 15 bp, Homo sapiens
cccttggcctgattt

SEQ ID NO: 383490 - DNA, 15 bp, Homo sapiens
tcccttggcctgatt

SEQ ID NO: 383491 - DNA, 15 bp, Homo sapiens
ttcccttggcctgat

SEQ ID NO: 383492 - DNA, 15 bp, Homo sapiens
tttcccttggcctga

SEQ ID NO: 383493 - DNA, 15 bp, Homo sapiens
ttttcccttggcctg

SEQ ID NO: 383494 - DNA, 15 bp, Homo sapiens
attttcccttggcct

SEQ ID NO: 383495 - DNA, 15 bp, Homo sapiens
tattttcccttggcc

SEQ ID NO: 383496 - DNA, 15 bp, Homo sapiens
atattttcccttggc

SEQ ID NO: 383497 - DNA, 15 bp, Homo sapiens
catattttcccttgg

SEQ ID NO: 383498 - DNA, 15 bp, Homo sapiens
ccatattttcccttg

SEQ ID NO: 383499 - DNA, 15 bp, Homo sapiens
accatattttccctt

SEQ ID NO: 383500 - DNA, 15 bp, Homo sapiens
caccatattttccct

SEQ ID NO: 383501 - DNA, 15 bp, Homo sapiens
tcaccatattttccc

SEQ ID NO: 383502 - DNA, 15 bp, Homo sapiens
ttcaccatattttcc

SEQ ID NO: 383503 - DNA, 15 bp, Homo sapiens
tttcaccatattttc

SEQ ID NO: 383504 - DNA, 15 bp, Homo sapiens
ttttcaccatatttt

SEQ ID NO: 383505 - DNA, 15 bp, Homo sapiens
cttttcaccatattt

SEQ ID NO: 383506 - DNA, 15 bp, Homo sapiens
tcttttcaccatatt

SEQ ID NO: 383507 - DNA, 15 bp, Homo sapiens
ctcttttcaccatat

SEQ ID NO: 383508 - DNA, 15 bp, Homo sapiens
actcttttcaccata

SEQ ID NO: 383509 - DNA, 15 bp, Homo sapiens
gactcttttcaccat

SEQ ID NO: 383510 - DNA, 15 bp, Homo sapiens
tgactcttttcacca

SEQ ID NO: 383511 - DNA, 15 bp, Homo sapiens
ctgactcttttcacc

SEQ ID NO: 383512 - DNA, 15 bp, Homo sapiens
tctgactcttttcac

SEQ ID NO: 383513 - DNA, 15 bp, Homo sapiens
ctctgactcttttca

SEQ ID NO: 383514 - DNA, 15 bp, Homo sapiens
cctctgactcttttc

SEQ ID NO: 383515 - DNA, 15 bp, Homo sapiens
tcctctgactctttt

SEQ ID NO: 383516 - DNA, 15 bp, Homo sapiens
ttcctctgactcttt

SEQ ID NO: 383517 - DNA, 15 bp, Homo sapiens
tttcctctgactctt

SEQ ID NO: 383518 - DNA, 15 bp, Homo sapiens
ttttcctctgactct

SEQ ID NO: 383519 - DNA, 15 bp, Homo sapiens
tttttcctctgactc

SEQ ID NO: 383520 - DNA, 15 bp, Homo sapiens
ctttttcctctgact

SEQ ID NO: 383521 - DNA, 15 bp, Homo sapiens
cctttttcctctgac

SEQ ID NO: 383522 - DNA, 15 bp, Homo sapiens
tcctttttcctctga

SEQ ID NO: 383523 - DNA, 15 bp, Homo sapiens
ctcctttttcctctg

SEQ ID NO: 383524 - DNA, 15 bp, Homo sapiens
actcctttttcctct

SEQ ID NO: 383525 - DNA, 15 bp, Homo sapiens
cactcctttttcctc

SEQ ID NO: 383526 - DNA, 15 bp, Homo sapiens
tcactcctttttcct

SEQ ID NO: 383527 - DNA, 15 bp, Homo sapiens
ctcactcctttttcc

SEQ ID NO: 383528 - DNA, 15 bp, Homo sapiens
actcactcctttttc

SEQ ID NO: 383529 - DNA, 15 bp, Homo sapiens
tactcactccttttt

SEQ ID NO: 383530 - DNA, 15 bp, Homo sapiens
atactcactcctttt

SEQ ID NO: 383531 - DNA, 15 bp, Homo sapiens
gatactcactccttt

SEQ ID NO: 383532 - DNA, 15 bp, Homo sapiens
tgatactcactcctt

SEQ ID NO: 383533 - DNA, 15 bp, Homo sapiens
gtgatactcactcct

SEQ ID NO: 383534 - DNA, 15 bp, Homo sapiens
ggtgatactcactcc

SEQ ID NO: 383535 - DNA, 15 bp, Homo sapiens
gggtgatactcactc

SEQ ID NO: 383536 - DNA, 15 bp, Homo sapiens
agggtgatactcact

SEQ ID NO: 383537 - DNA, 15 bp, Homo sapiens
tagggtgatactcac

SEQ ID NO: 383538 - DNA, 15 bp, Homo sapiens
gtagggtgatactca

SEQ ID NO: 383539 - DNA, 15 bp, Homo sapiens
tgtagggtgatactc

SEQ ID NO: 383540 - DNA, 15 bp, Homo sapiens
gtgtagggtgatact

SEQ ID NO: 383541 - DNA, 15 bp, Homo sapiens
tgtgtagggtgatac

SEQ ID NO: 383542 - DNA, 15 bp, Homo sapiens
ctgtgtagggtgata

SEQ ID NO: 383543 - DNA, 15 bp, Homo sapiens
gctgtgtagggtgat

SEQ ID NO: 383544 - DNA, 15 bp, Homo sapiens
tgctgtgtagggtga

SEQ ID NO: 383545 - DNA, 15 bp, Homo sapiens
ctgctgtgtagggtg

SEQ ID NO: 383546 - DNA, 15 bp, Homo sapiens
cctgctgtgtagggt

SEQ ID NO: 383547 - DNA, 15 bp, Homo sapiens
ccctgctgtgtaggg

SEQ ID NO: 383548 - DNA, 15 bp, Homo sapiens
tccctgctgtgtagg

SEQ ID NO: 383549 - DNA, 15 bp, Homo sapiens
ttccctgctgtgtag

SEQ ID NO: 383550 - DNA, 15 bp, Homo sapiens
gttccctgctgtgta

SEQ ID NO: 383551 - DNA, 15 bp, Homo sapiens
tgttccctgctgtgt

SEQ ID NO: 383552 - DNA, 15 bp, Homo sapiens
ttgttccctgctgtg

SEQ ID NO: 383553 - DNA, 15 bp, Homo sapiens
gttgttccctgctgt

SEQ ID NO: 383554 - DNA, 15 bp, Homo sapiens
agttgttccctgctg

SEQ ID NO: 383555 - DNA, 15 bp, Homo sapiens
aagttgttccctgct

SEQ ID NO: 383556 - DNA, 15 bp, Homo sapiens
aaagttgttccctgc

SEQ ID NO: 383557 - DNA, 15 bp, Homo sapiens
taaagttgttccctg

SEQ ID NO: 383558 - DNA, 15 bp, Homo sapiens
gtaaagttgttccct

SEQ ID NO: 383559 - DNA, 15 bp, Homo sapiens
ggtaaagttgttccc

SEQ ID NO: 383560 - DNA, 15 bp, Homo sapiens
tggtaaagttgttcc

SEQ ID NO: 383561 - DNA, 15 bp, Homo sapiens
atggtaaagttgttc

SEQ ID NO: 383562 - DNA, 15 bp, Homo sapiens
catggtaaagttgtt

SEQ ID NO: 383563 - DNA, 15 bp, Homo sapiens
acatggtaaagttgt

SEQ ID NO: 383564 - DNA, 15 bp, Homo sapiens
aacatggtaaagttg

SEQ ID NO: 383565 - DNA, 15 bp, Homo sapiens
aaacatggtaaagtt

SEQ ID NO: 383566 - DNA, 15 bp, Homo sapiens
aaaacatggtaaagt

SEQ ID NO: 383567 - DNA, 15 bp, Homo sapiens
aaaaacatggtaaag

SEQ ID NO: 383568 - DNA, 15 bp, Homo sapiens
aaaaaacatggtaaa

SEQ ID NO: 383569 - DNA, 15 bp, Homo sapiens
caaaaaacatggtaa

SEQ ID NO: 383570 - DNA, 15 bp, Homo sapiens
acaaaaaacatggta

SEQ ID NO: 383571 - DNA, 15 bp, Homo sapiens
gacaaaaaacatggt

SEQ ID NO: 383572 - DNA, 15 bp, Homo sapiens
cgacaaaaaacatgg

SEQ ID NO: 383573 - DNA, 15 bp, Homo sapiens
acgacaaaaaacatg

SEQ ID NO: 383574 - DNA, 15 bp, Homo sapiens
cacgacaaaaaacat

SEQ ID NO: 383575 - DNA, 15 bp, Homo sapiens
acacgacaaaaaaca

SEQ ID NO: 383576 - DNA, 15 bp, Homo sapiens
gacacgacaaaaaac

SEQ ID NO: 383577 - DNA, 15 bp, Homo sapiens
agacacgacaaaaaa

SEQ ID NO: 383578 - DNA, 15 bp, Homo sapiens
aagacacgacaaaaa

SEQ ID NO: 383579 - DNA, 15 bp, Homo sapiens
caagacacgacaaaa

SEQ ID NO: 383580 - DNA, 15 bp, Homo sapiens
acaagacacgacaaa

SEQ ID NO: 383581 - DNA, 15 bp, Homo sapiens
aacaagacacgacaa

SEQ ID NO: 383582 - DNA, 15 bp, Homo sapiens
caacaagacacgaca

SEQ ID NO: 383583 - DNA, 15 bp, Homo sapiens
acaacaagacacgac

SEQ ID NO: 383584 - DNA, 15 bp, Homo sapiens
cacaacaagacacga

SEQ ID NO: 383585 - DNA, 15 bp, Homo sapiens
acacaacaagacacg

SEQ ID NO: 383586 - DNA, 15 bp, Homo sapiens
cacacaacaagacac

SEQ ID NO: 383587 - DNA, 15 bp, Homo sapiens
tcacacaacaagaca

SEQ ID NO: 383588 - DNA, 15 bp, Homo sapiens
gtcacacaacaagac

SEQ ID NO: 383589 - DNA, 15 bp, Homo sapiens
ggtcacacaacaaga

SEQ ID NO: 383590 - DNA, 15 bp, Homo sapiens
tggtcacacaacaag

SEQ ID NO: 383591 - DNA, 15 bp, Homo sapiens
atggtcacacaacaa

SEQ ID NO: 383592 - DNA, 15 bp, Homo sapiens
aatggtcacacaaca

SEQ ID NO: 383593 - DNA, 15 bp, Homo sapiens
aaatggtcacacaac

SEQ ID NO: 383594 - DNA, 15 bp, Homo sapiens
taaatggtcacacaa

SEQ ID NO: 383595 - DNA, 15 bp, Homo sapiens
ttaaatggtcacaca

SEQ ID NO: 383596 - DNA, 15 bp, Homo sapiens
attaaatggtcacac

SEQ ID NO: 383597 - DNA, 15 bp, Homo sapiens
aattaaatggtcaca

SEQ ID NO: 383598 - DNA, 15 bp, Homo sapiens
caattaaatggtcac

SEQ ID NO: 383599 - DNA, 15 bp, Homo sapiens
acaattaaatggtca

SEQ ID NO: 383600 - DNA, 15 bp, Homo sapiens
tacaattaaatggtc

SEQ ID NO: 383601 - DNA, 15 bp, Homo sapiens
ttacaattaaatggt

SEQ ID NO: 383602 - DNA, 15 bp, Homo sapiens
attacaattaaatgg

SEQ ID NO: 383603 - DNA, 15 bp, Homo sapiens
tattacaattaaatg

SEQ ID NO: 383604 - DNA, 15 bp, Homo sapiens
atattacaattaaat

SEQ ID NO: 383605 - DNA, 15 bp, Homo sapiens
gatattacaattaaa

SEQ ID NO: 383606 - DNA, 15 bp, Homo sapiens
cgatattacaattaa

SEQ ID NO: 383607 - DNA, 15 bp, Homo sapiens
ccgatattacaatta

SEQ ID NO: 383608 - DNA, 15 bp, Homo sapiens
gccgatattacaatt

SEQ ID NO: 383609 - DNA, 15 bp, Homo sapiens
tgccgatattacaat

SEQ ID NO: 383610 - DNA, 15 bp, Homo sapiens
atgccgatattacaa

SEQ ID NO: 383611 - DNA, 15 bp, Homo sapiens
aatgccgatattaca

SEQ ID NO: 383612 - DNA, 15 bp, Homo sapiens
aaatgccgatattac

SEQ ID NO: 383613 - DNA, 15 bp, Homo sapiens
taaatgccgatatta

SEQ ID NO: 383614 - DNA, 15 bp, Homo sapiens
gtaaatgccgatatt

SEQ ID NO: 383615 - DNA, 15 bp, Homo sapiens
agtaaatgccgatat

SEQ ID NO: 383616 - DNA, 15 bp, Homo sapiens
aagtaaatgccgata

SEQ ID NO: 383617 - DNA, 15 bp, Homo sapiens
aaagtaaatgccgat

SEQ ID NO: 383618 - DNA, 15 bp, Homo sapiens
aaaagtaaatgccga

SEQ ID NO: 383619 - DNA, 15 bp, Homo sapiens
caaaagtaaatgccg

SEQ ID NO: 383620 - DNA, 15 bp, Homo sapiens
gcaaaagtaaatgcc

SEQ ID NO: 383621 - DNA, 15 bp, Homo sapiens
agcaaaagtaaatgc

SEQ ID NO: 383622 - DNA, 15 bp, Homo sapiens
cagcaaaagtaaatg

SEQ ID NO: 383623 - DNA, 15 bp, Homo sapiens
acagcaaaagtaaat

SEQ ID NO: 383624 - DNA, 15 bp, Homo sapiens
aacagcaaaagtaaa

SEQ ID NO: 383625 - DNA, 15 bp, Homo sapiens
caacagcaaaagtaa

SEQ ID NO: 383626 - DNA, 15 bp, Homo sapiens
acaacagcaaaagta

SEQ ID NO: 383627 - DNA, 15 bp, Homo sapiens
aacaacagcaaaagt

SEQ ID NO: 383628 - DNA, 15 bp, Homo sapiens
taacaacagcaaaag

SEQ ID NO: 383629 - DNA, 15 bp, Homo sapiens
ataacaacagcaaaa

SEQ ID NO: 383630 - DNA, 15 bp, Homo sapiens
tataacaacagcaaa

SEQ ID NO: 383631 - DNA, 15 bp, Homo sapiens
gtataacaacagcaa

SEQ ID NO: 383632 - DNA, 15 bp, Homo sapiens
agtataacaacagca

SEQ ID NO: 383633 - DNA, 15 bp, Homo sapiens
aagtataacaacagc

SEQ ID NO: 383634 - DNA, 15 bp, Homo sapiens
aaagtataacaacag

SEQ ID NO: 383635 - DNA, 15 bp, Homo sapiens
caaagtataacaaca

SEQ ID NO: 383636 - DNA, 15 bp, Homo sapiens
acaaagtataacaac

SEQ ID NO: 383637 - DNA, 15 bp, Homo sapiens
gacaaagtataacaa

SEQ ID NO: 383638 - DNA, 15 bp, Homo sapiens
tgacaaagtataaca

SEQ ID NO: 383639 - DNA, 15 bp, Homo sapiens
atgacaaagtataac

SEQ ID NO: 383640 - DNA, 15 bp, Homo sapiens
gatgacaaagtataa

SEQ ID NO: 383641 - DNA, 15 bp, Homo sapiens
agatgacaaagtata

SEQ ID NO: 383642 - DNA, 15 bp, Homo sapiens
gagatgacaaagtat

SEQ ID NO: 383643 - DNA, 15 bp, Homo sapiens
tgagatgacaaagta

SEQ ID NO: 383644 - DNA, 15 bp, Homo sapiens
ttgagatgacaaagt

SEQ ID NO: 383645 - DNA, 15 bp, Homo sapiens
gttgagatgacaaag

SEQ ID NO: 383646 - DNA, 15 bp, Homo sapiens
agttgagatgacaaa

SEQ ID NO: 383647 - DNA, 15 bp, Homo sapiens
gagttgagatgacaa

SEQ ID NO: 383648 - DNA, 15 bp, Homo sapiens
agagttgagatgaca

SEQ ID NO: 383649 - DNA, 15 bp, Homo sapiens
tagagttgagatgac

SEQ ID NO: 383650 - DNA, 15 bp, Homo sapiens
gtagagttgagatga

SEQ ID NO: 383651 - DNA, 15 bp, Homo sapiens
agtagagttgagatg

SEQ ID NO: 383652 - DNA, 15 bp, Homo sapiens
tagtagagttgagat

SEQ ID NO: 383653 - DNA, 15 bp, Homo sapiens
ttagtagagttgaga

SEQ ID NO: 383654 - DNA, 15 bp, Homo sapiens
tttagtagagttgag

SEQ ID NO: 383655 - DNA, 15 bp, Homo sapiens
ttttagtagagttga

SEQ ID NO: 383656 - DNA, 15 bp, Homo sapiens
tttttagtagagttg

SEQ ID NO: 383657 - DNA, 15 bp, Homo sapiens
ttttttagtagagtt

SEQ ID NO: 383658 - DNA, 15 bp, Homo sapiens
gttttttagtagagt

SEQ ID NO: 383659 - DNA, 15 bp, Homo sapiens
ggttttttagtagag

SEQ ID NO: 383660 - DNA, 15 bp, Homo sapiens
aggttttttagtaga

SEQ ID NO: 383661 - DNA, 15 bp, Homo sapiens
gaggttttttagtag

SEQ ID NO: 383662 - DNA, 15 bp, Homo sapiens
ggaggttttttagta

SEQ ID NO: 383663 - DNA, 15 bp, Homo sapiens
gggaggttttttagt

SEQ ID NO: 383664 - DNA, 15 bp, Homo sapiens
tgggaggttttttag

SEQ ID NO: 383665 - DNA, 15 bp, Homo sapiens
gtgggaggtttttta

SEQ ID NO: 383666 - DNA, 15 bp, Homo sapiens
ggtgggaggtttttt

SEQ ID NO: 383667 - DNA, 15 bp, Homo sapiens
cggtgggaggttttt

SEQ ID NO: 383668 - DNA, 15 bp, Homo sapiens
acggtgggaggtttt

SEQ ID NO: 383669 - DNA, 15 bp, Homo sapiens
aacggtgggaggttt

SEQ ID NO: 383670 - DNA, 15 bp, Homo sapiens
taacggtgggaggtt

SEQ ID NO: 383671 - DNA, 15 bp, Homo sapiens
ataacggtgggaggt

SEQ ID NO: 383672 - DNA, 15 bp, Homo sapiens
aataacggtgggagg

SEQ ID NO: 383673 - DNA, 15 bp, Homo sapiens
aaataacggtgggag

SEQ ID NO: 383674 - DNA, 15 bp, Homo sapiens
gaaataacggtggga

SEQ ID NO: 383675 - DNA, 15 bp, Homo sapiens
ggaaataacggtggg

SEQ ID NO: 383676 - DNA, 15 bp, Homo sapiens
aggaaataacggtgg

SEQ ID NO: 383677 - DNA, 15 bp, Homo sapiens
gaggaaataacggtg

SEQ ID NO: 383678 - DNA, 15 bp, Homo sapiens
agaggaaataacggt

SEQ ID NO: 383679 - DNA, 15 bp, Homo sapiens
cagaggaaataacgg

SEQ ID NO: 383680 - DNA, 15 bp, Homo sapiens
gcagaggaaataacg

SEQ ID NO: 383681 - DNA, 15 bp, Homo sapiens
ggcagaggaaataac

SEQ ID NO: 383682 - DNA, 15 bp, Homo sapiens
aggcagaggaaataa

SEQ ID NO: 383683 - DNA, 15 bp, Homo sapiens
aaggcagaggaaata

SEQ ID NO: 383684 - DNA, 15 bp, Homo sapiens
aaaggcagaggaaat

SEQ ID NO: 383685 - DNA, 15 bp, Homo sapiens
aaaaggcagaggaaa

SEQ ID NO: 383686 - DNA, 15 bp, Homo sapiens
taaaaggcagaggaa

SEQ ID NO: 383687 - DNA, 15 bp, Homo sapiens
ataaaaggcagagga

SEQ ID NO: 383688 - DNA, 15 bp, Homo sapiens
aataaaaggcagagg

SEQ ID NO: 383689 - DNA, 15 bp, Homo sapiens
taataaaaggcagag

SEQ ID NO: 383690 - DNA, 15 bp, Homo sapiens
gtaataaaaggcaga

SEQ ID NO: 383691 - DNA, 15 bp, Homo sapiens
agtaataaaaggcag

SEQ ID NO: 383692 - DNA, 15 bp, Homo sapiens
cagtaataaaaggca

SEQ ID NO: 383693 - DNA, 15 bp, Homo sapiens
acagtaataaaaggc

SEQ ID NO: 383694 - DNA, 15 bp, Homo sapiens
gacagtaataaaagg

SEQ ID NO: 383695 - DNA, 15 bp, Homo sapiens
agacagtaataaaag

SEQ ID NO: 383696 - DNA, 15 bp, Homo sapiens
gagacagtaataaaa

SEQ ID NO: 383697 - DNA, 15 bp, Homo sapiens
agagacagtaataaa

SEQ ID NO: 383698 - DNA, 15 bp, Homo sapiens
gagagacagtaataa

SEQ ID NO: 383699 - DNA, 15 bp, Homo sapiens
tgagagacagtaata

SEQ ID NO: 383700 - DNA, 15 bp, Homo sapiens
atgagagacagtaat

SEQ ID NO: 383701 - DNA, 15 bp, Homo sapiens
aatgagagacagtaa

SEQ ID NO: 383702 - DNA, 15 bp, Homo sapiens
aaatgagagacagta

SEQ ID NO: 383703 - DNA, 15 bp, Homo sapiens
taaatgagagacagt

SEQ ID NO: 383704 - DNA, 15 bp, Homo sapiens
ttaaatgagagacag

SEQ ID NO: 383705 - DNA, 15 bp, Homo sapiens
tttaaatgagagaca

SEQ ID NO: 383706 - DNA, 15 bp, Homo sapiens
ttttaaatgagagac

SEQ ID NO: 383707 - DNA, 15 bp, Homo sapiens
gttttaaatgagaga

SEQ ID NO: 383708 - DNA, 15 bp, Homo sapiens
tgttttaaatgagag

SEQ ID NO: 383709 - DNA, 15 bp, Homo sapiens
gtgttttaaatgaga

SEQ ID NO: 383710 - DNA, 15 bp, Homo sapiens
tgtgttttaaatgag

SEQ ID NO: 383711 - DNA, 15 bp, Homo sapiens
atgtgttttaaatga

SEQ ID NO: 383712 - DNA, 15 bp, Homo sapiens
gatgtgttttaaatg

SEQ ID NO: 383713 - DNA, 15 bp, Homo sapiens
agatgtgttttaaat

SEQ ID NO: 383714 - DNA, 15 bp, Homo sapiens
aagatgtgttttaaa

SEQ ID NO: 383715 - DNA, 15 bp, Homo sapiens
aaagatgtgttttaa

SEQ ID NO: 383716 - DNA, 15 bp, Homo sapiens
gaaagatgtgtttta

SEQ ID NO: 383717 - DNA, 15 bp, Homo sapiens
tgaaagatgtgtttt

SEQ ID NO: 383718 - DNA, 15 bp, Homo sapiens
gtgaaagatgtgttt

SEQ ID NO: 383719 - DNA, 15 bp, Homo sapiens
agtgaaagatgtgtt

SEQ ID NO: 383720 - DNA, 15 bp, Homo sapiens
aagtgaaagatgtgt

SEQ ID NO: 383721 - DNA, 15 bp, Homo sapiens
aaagtgaaagatgtg

SEQ ID NO: 383722 - DNA, 15 bp, Homo sapiens
gaaagtgaaagatgt

SEQ ID NO: 383723 - DNA, 15 bp, Homo sapiens
agaaagtgaaagatg

SEQ ID NO: 383724 - DNA, 15 bp, Homo sapiens
cagaaagtgaaagat

SEQ ID NO: 383725 - DNA, 15 bp, Homo sapiens
acagaaagtgaaaga

SEQ ID NO: 383726 - DNA, 15 bp, Homo sapiens
aacagaaagtgaaag

SEQ ID NO: 383727 - DNA, 15 bp, Homo sapiens
gaacagaaagtgaaa

SEQ ID NO: 383728 - DNA, 15 bp, Homo sapiens
agaacagaaagtgaa

SEQ ID NO: 383729 - DNA, 15 bp, Homo sapiens
cagaacagaaagtga

SEQ ID NO: 383730 - DNA, 15 bp, Homo sapiens
acagaacagaaagtg

SEQ ID NO: 383731 - DNA, 15 bp, Homo sapiens
tacagaacagaaagt

SEQ ID NO: 383732 - DNA, 15 bp, Homo sapiens
atacagaacagaaag

SEQ ID NO: 383733 - DNA, 15 bp, Homo sapiens
aatacagaacagaaa

SEQ ID NO: 383734 - DNA, 15 bp, Homo sapiens
aaatacagaacagaa

SEQ ID NO: 383735 - DNA, 15 bp, Homo sapiens
aaaatacagaacaga

SEQ ID NO: 383736 - DNA, 15 bp, Homo sapiens
aaaaatacagaacag

SEQ ID NO: 383737 - DNA, 15 bp, Homo sapiens
caaaaatacagaaca

SEQ ID NO: 383738 - DNA, 15 bp, Homo sapiens
acaaaaatacagaac

SEQ ID NO: 383739 - DNA, 15 bp, Homo sapiens
tacaaaaatacagaa

SEQ ID NO: 383740 - DNA, 15 bp, Homo sapiens
ctacaaaaatacaga

SEQ ID NO: 383741 - DNA, 15 bp, Homo sapiens
actacaaaaatacag

SEQ ID NO: 383742 - DNA, 15 bp, Homo sapiens
aactacaaaaataca

SEQ ID NO: 383743 - DNA, 15 bp, Homo sapiens
caactacaaaaatac

SEQ ID NO: 383744 - DNA, 15 bp, Homo sapiens
tcaactacaaaaata

SEQ ID NO: 383745 - DNA, 15 bp, Homo sapiens
ctcaactacaaaaat

SEQ ID NO: 383746 - DNA, 15 bp, Homo sapiens
cctcaactacaaaaa

SEQ ID NO: 383747 - DNA, 15 bp, Homo sapiens
tcctcaactacaaaa

SEQ ID NO: 383748 - DNA, 15 bp, Homo sapiens
ttcctcaactacaaa

SEQ ID NO: 383749 - DNA, 15 bp, Homo sapiens
tttcctcaactacaa

SEQ ID NO: 383750 - DNA, 15 bp, Homo sapiens
atttcctcaactaca

SEQ ID NO: 383751 - DNA, 15 bp, Homo sapiens
gatttcctcaactac

SEQ ID NO: 383752 - DNA, 15 bp, Homo sapiens
agatttcctcaacta

SEQ ID NO: 383753 - DNA, 15 bp, Homo sapiens
cagatttcctcaact

SEQ ID NO: 383754 - DNA, 15 bp, Homo sapiens
ccagatttcctcaac

SEQ ID NO: 383755 - DNA, 15 bp, Homo sapiens
gccagatttcctcaa

SEQ ID NO: 383756 - DNA, 15 bp, Homo sapiens
tgccagatttcctca

SEQ ID NO: 383757 - DNA, 15 bp, Homo sapiens
atgccagatttcctc

SEQ ID NO: 383758 - DNA, 15 bp, Homo sapiens
gatgccagatttcct

SEQ ID NO: 383759 - DNA, 15 bp, Homo sapiens
cgatgccagatttcc

SEQ ID NO: 383760 - DNA, 15 bp, Homo sapiens
gcgatgccagatttc

SEQ ID NO: 383761 - DNA, 15 bp, Homo sapiens
agcgatgccagattt

SEQ ID NO: 383762 - DNA, 15 bp, Homo sapiens
aagcgatgccagatt

SEQ ID NO: 383763 - DNA, 15 bp, Homo sapiens
aaagcgatgccagat

SEQ ID NO: 383764 - DNA, 15 bp, Homo sapiens
aaaagcgatgccaga

SEQ ID NO: 383765 - DNA, 15 bp, Homo sapiens
gaaaagcgatgccag

SEQ ID NO: 383766 - DNA, 15 bp, Homo sapiens
agaaaagcgatgcca

SEQ ID NO: 383767 - DNA, 15 bp, Homo sapiens
cagaaaagcgatgcc

SEQ ID NO: 383768 - DNA, 15 bp, Homo sapiens
gcagaaaagcgatgc

SEQ ID NO: 383769 - DNA, 15 bp, Homo sapiens
tgcagaaaagcgatg

SEQ ID NO: 383770 - DNA, 15 bp, Homo sapiens
ctgcagaaaagcgat

SEQ ID NO: 383771 - DNA, 15 bp, Homo sapiens
actgcagaaaagcga

SEQ ID NO: 383772 - DNA, 15 bp, Homo sapiens
cactgcagaaaagcg

SEQ ID NO: 383773 - DNA, 15 bp, Homo sapiens
tcactgcagaaaagc

SEQ ID NO: 383774 - DNA, 15 bp, Homo sapiens
ttcactgcagaaaag

SEQ ID NO: 383775 - DNA, 15 bp, Homo sapiens
cttcactgcagaaaa

SEQ ID NO: 383776 - DNA, 15 bp, Homo sapiens
ccttcactgcagaaa

SEQ ID NO: 383777 - DNA, 15 bp, Homo sapiens
cccttcactgcagaa

SEQ ID NO: 383778 - DNA, 15 bp, Homo sapiens
tcccttcactgcaga

SEQ ID NO: 383779 - DNA, 15 bp, Homo sapiens
gtcccttcactgcag

SEQ ID NO: 383780 - DNA, 15 bp, Homo sapiens
ggtcccttcactgca

SEQ ID NO: 383781 - DNA, 15 bp, Homo sapiens
cggtcccttcactgc

SEQ ID NO: 383782 - DNA, 15 bp, Homo sapiens
acggtcccttcactg

SEQ ID NO: 383783 - DNA, 15 bp, Homo sapiens
cacggtcccttcact

SEQ ID NO: 383784 - DNA, 15 bp, Homo sapiens
acacggtcccttcac

SEQ ID NO: 383785 - DNA, 15 bp, Homo sapiens
gacacggtcccttca

SEQ ID NO: 383786 - DNA, 15 bp, Homo sapiens
agacacggtcccttc

SEQ ID NO: 383787 - DNA, 15 bp, Homo sapiens
gtcagctgctggaac

SEQ ID NO: 383788 - DNA, 15 bp, Homo sapiens
tgtcagctgctggaa

SEQ ID NO: 383789 - DNA, 15 bp, Homo sapiens
ctgtcagctgctgga

SEQ ID NO: 383790 - DNA, 15 bp, Homo sapiens
gctgtcagctgctgg

SEQ ID NO: 383791 - DNA, 15 bp, Homo sapiens
ggctgtcagctgctg

SEQ ID NO: 383792 - DNA, 15 bp, Homo sapiens
gggctgtcagctgct

SEQ ID NO: 383793 - DNA, 15 bp, Homo sapiens
ggggctgtcagctgc

SEQ ID NO: 383794 - DNA, 15 bp, Homo sapiens
gggggctgtcagctg

SEQ ID NO: 383795 - DNA, 15 bp, Homo sapiens
agggggctgtcagct

SEQ ID NO: 383796 - DNA, 15 bp, Homo sapiens
aagggggctgtcagc

SEQ ID NO: 383797 - DNA, 15 bp, Homo sapiens
gaagggggctgtcag

SEQ ID NO: 383798 - DNA, 15 bp, Homo sapiens
agaagggggctgtca

SEQ ID NO: 383799 - DNA, 15 bp, Homo sapiens
cagaagggggctgtc

SEQ ID NO: 383800 - DNA, 15 bp, Homo sapiens
tcagaagggggctgt

SEQ ID NO: 383801 - DNA, 15 bp, Homo sapiens
gtcagaagggggctg

SEQ ID NO: 383802 - DNA, 15 bp, Homo sapiens
agtcagaagggggct

SEQ ID NO: 383803 - DNA, 15 bp, Homo sapiens
cagtcagaagggggc

SEQ ID NO: 383804 - DNA, 15 bp, Homo sapiens
ccagtcagaaggggg

SEQ ID NO: 383805 - DNA, 15 bp, Homo sapiens
gccagtcagaagggg

SEQ ID NO: 383806 - DNA, 15 bp, Homo sapiens
tgccagtcagaaggg

SEQ ID NO: 383807 - DNA, 15 bp, Homo sapiens
ttgccagtcagaagg

SEQ ID NO: 383808 - DNA, 15 bp, Homo sapiens
attgccagtcagaag

SEQ ID NO: 383809 - DNA, 15 bp, Homo sapiens
cattgccagtcagaa

SEQ ID NO: 383810 - DNA, 15 bp, Homo sapiens
ccattgccagtcaga

SEQ ID NO: 383811 - DNA, 15 bp, Homo sapiens
cccattgccagtcag

SEQ ID NO: 383812 - DNA, 15 bp, Homo sapiens
acccattgccagtca

SEQ ID NO: 383813 - DNA, 15 bp, Homo sapiens
gacccattgccagtc

SEQ ID NO: 383814 - DNA, 15 bp, Homo sapiens
agacccattgccagt

SEQ ID NO: 383815 - DNA, 15 bp, Homo sapiens
gagacccattgccag

SEQ ID NO: 383816 - DNA, 15 bp, Homo sapiens
ggagacccattgcca

SEQ ID NO: 383817 - DNA, 15 bp, Homo sapiens
gggagacccattgcc

SEQ ID NO: 383818 - DNA, 15 bp, Homo sapiens
tgggagacccattgc

SEQ ID NO: 383819 - DNA, 15 bp, Homo sapiens
gtgggagacccattg

SEQ ID NO: 383820 - DNA, 15 bp, Homo sapiens
tgtgggagacccatt

SEQ ID NO: 383821 - DNA, 15 bp, Homo sapiens
ctgtgggagacccat

SEQ ID NO: 383822 - DNA, 15 bp, Homo sapiens
cctgtgggagaccca

SEQ ID NO: 383823 - DNA, 15 bp, Homo sapiens
tcctgtgggagaccc

SEQ ID NO: 383824 - DNA, 15 bp, Homo sapiens
atcctgtgggagacc

SEQ ID NO: 383825 - DNA, 15 bp, Homo sapiens
tatcctgtgggagac

SEQ ID NO: 383826 - DNA, 15 bp, Homo sapiens
gtatcctgtgggaga

SEQ ID NO: 383827 - DNA, 15 bp, Homo sapiens
agtatcctgtgggag

SEQ ID NO: 383828 - DNA, 15 bp, Homo sapiens
aagtatcctgtggga

SEQ ID NO: 383829 - DNA, 15 bp, Homo sapiens
caagtatcctgtggg

SEQ ID NO: 383830 - DNA, 15 bp, Homo sapiens
ccaagtatcctgtgg

SEQ ID NO: 383831 - DNA, 15 bp, Homo sapiens
cccaagtatcctgtg

SEQ ID NO: 383832 - DNA, 15 bp, Homo sapiens
tcccaagtatcctgt

SEQ ID NO: 383833 - DNA, 15 bp, Homo sapiens
ctcccaagtatcctg

SEQ ID NO: 383834 - DNA, 15 bp, Homo sapiens
actcccaagtatcct

SEQ ID NO: 383835 - DNA, 15 bp, Homo sapiens
aactcccaagtatcc

SEQ ID NO: 383836 - DNA, 15 bp, Homo sapiens
caactcccaagtatc

SEQ ID NO: 383837 - DNA, 15 bp, Homo sapiens
tcaactcccaagtat

SEQ ID NO: 383838 - DNA, 15 bp, Homo sapiens
ttcaactcccaagta

SEQ ID NO: 383839 - DNA, 15 bp, Homo sapiens
cttcaactcccaagt

SEQ ID NO: 383840 - DNA, 15 bp, Homo sapiens
gcttcaactcccaag

SEQ ID NO: 383841 - DNA, 15 bp, Homo sapiens
tgcttcaactcccaa

SEQ ID NO: 383842 - DNA, 15 bp, Homo sapiens
gtgcttcaactccca

SEQ ID NO: 383843 - DNA, 15 bp, Homo sapiens
tgtgcttcaactccc

SEQ ID NO: 383844 - DNA, 15 bp, Homo sapiens
ttgtgcttcaactcc

SEQ ID NO: 383845 - DNA, 15 bp, Homo sapiens
gttgtgcttcaactc

SEQ ID NO: 383846 - DNA, 15 bp, Homo sapiens
agttgtgcttcaact

SEQ ID NO: 383847 - DNA, 15 bp, Homo sapiens
cagttgtgcttcaac

SEQ ID NO: 383848 - DNA, 15 bp, Homo sapiens
tcagttgtgcttcaa

SEQ ID NO: 383849 - DNA, 15 bp, Homo sapiens
atcagttgtgcttca

SEQ ID NO: 383850 - DNA, 15 bp, Homo sapiens
aatcagttgtgcttc

SEQ ID NO: 383851 - DNA, 15 bp, Homo sapiens
aaatcagttgtgctt

SEQ ID NO: 383852 - DNA, 15 bp, Homo sapiens
taaatcagttgtgct

SEQ ID NO: 383853 - DNA, 15 bp, Homo sapiens
gtaaatcagttgtgc

SEQ ID NO: 383854 - DNA, 15 bp, Homo sapiens
agtaaatcagttgtg

SEQ ID NO: 383855 - DNA, 15 bp, Homo sapiens
tagtaaatcagttgt

SEQ ID NO: 383856 - DNA, 15 bp, Homo sapiens
ttagtaaatcagttg

SEQ ID NO: 383857 - DNA, 15 bp, Homo sapiens
attagtaaatcagtt

SEQ ID NO: 383858 - DNA, 15 bp, Homo sapiens
tattagtaaatcagt

SEQ ID NO: 383859 - DNA, 15 bp, Homo sapiens
atattagtaaatcag

SEQ ID NO: 383860 - DNA, 15 bp, Homo sapiens
catattagtaaatca

SEQ ID NO: 383861 - DNA, 15 bp, Homo sapiens
acatattagtaaatc

SEQ ID NO: 383862 - DNA, 15 bp, Homo sapiens
aacatattagtaaat

SEQ ID NO: 383863 - DNA, 15 bp, Homo sapiens
caacatattagtaaa

SEQ ID NO: 383864 - DNA, 15 bp, Homo sapiens
tcaacatattagtaa

SEQ ID NO: 383865 - DNA, 15 bp, Homo sapiens
atcaacatattagta

SEQ ID NO: 383866 - DNA, 15 bp, Homo sapiens
catcaacatattagt

SEQ ID NO: 383867 - DNA, 15 bp, Homo sapiens
tcatcaacatattag

SEQ ID NO: 383868 - DNA, 15 bp, Homo sapiens
ttcatcaacatatta

SEQ ID NO: 383869 - DNA, 15 bp, Homo sapiens
gttcatcaacatatt

SEQ ID NO: 383870 - DNA, 15 bp, Homo sapiens
ggttcatcaacatat

SEQ ID NO: 383871 - DNA, 15 bp, Homo sapiens
aggttcatcaacata

SEQ ID NO: 383872 - DNA, 15 bp, Homo sapiens
caggttcatcaacat

SEQ ID NO: 383873 - DNA, 15 bp, Homo sapiens
acaggttcatcaaca

SEQ ID NO: 383874 - DNA, 15 bp, Homo sapiens
aacaggttcatcaac

SEQ ID NO: 383875 - DNA, 15 bp, Homo sapiens
taacaggttcatcaa

SEQ ID NO: 383876 - DNA, 15 bp, Homo sapiens
ctaacaggttcatca

SEQ ID NO: 383877 - DNA, 15 bp, Homo sapiens
gctaacaggttcatc

SEQ ID NO: 383878 - DNA, 15 bp, Homo sapiens
ggctaacaggttcat

SEQ ID NO: 383879 - DNA, 15 bp, Homo sapiens
aggctaacaggttca

SEQ ID NO: 383880 - DNA, 15 bp, Homo sapiens
gaggctaacaggttc

SEQ ID NO: 383881 - DNA, 15 bp, Homo sapiens
agaggctaacaggtt

SEQ ID NO: 383882 - DNA, 15 bp, Homo sapiens
gagaggctaacaggt

SEQ ID NO: 383883 - DNA, 15 bp, Homo sapiens
ggagaggctaacagg

SEQ ID NO: 383884 - DNA, 15 bp, Homo sapiens
gggagaggctaacag

SEQ ID NO: 383885 - DNA, 15 bp, Homo sapiens
cgggagaggctaaca

SEQ ID NO: 383886 - DNA, 15 bp, Homo sapiens
ccgggagaggctaac

SEQ ID NO: 383887 - DNA, 15 bp, Homo sapiens
cccgggagaggctaa

SEQ ID NO: 383888 - DNA, 15 bp, Homo sapiens
gcccgggagaggcta

SEQ ID NO: 383889 - DNA, 15 bp, Homo sapiens
ggcccgggagaggct

SEQ ID NO: 383890 - DNA, 15 bp, Homo sapiens
aggcccgggagaggc

SEQ ID NO: 383891 - DNA, 15 bp, Homo sapiens
caggcccgggagagg

SEQ ID NO: 383892 - DNA, 15 bp, Homo sapiens
gcaggcccgggagag

SEQ ID NO: 383893 - DNA, 15 bp, Homo sapiens
agcaggcccgggaga

SEQ ID NO: 383894 - DNA, 15 bp, Homo sapiens
cagcaggcccgggag

SEQ ID NO: 383895 - DNA, 15 bp, Homo sapiens
gcagcaggcccggga

SEQ ID NO: 383896 - DNA, 15 bp, Homo sapiens
tgcagcaggcccggg

SEQ ID NO: 383897 - DNA, 15 bp, Homo sapiens
ctgcagcaggcccgg

SEQ ID NO: 383898 - DNA, 15 bp, Homo sapiens
gctgcagcaggcccg

SEQ ID NO: 383899 - DNA, 15 bp, Homo sapiens
ggctgcagcaggccc

SEQ ID NO: 383900 - DNA, 15 bp, Homo sapiens
aggctgcagcaggcc

SEQ ID NO: 383901 - DNA, 15 bp, Homo sapiens
gaggctgcagcaggc

SEQ ID NO: 383902 - DNA, 15 bp, Homo sapiens
tgaggctgcagcagg

SEQ ID NO: 383903 - DNA, 15 bp, Homo sapiens
gtgaggctgcagcag

SEQ ID NO: 383904 - DNA, 15 bp, Homo sapiens
agtgaggctgcagca

SEQ ID NO: 383905 - DNA, 15 bp, Homo sapiens
gagtgaggctgcagc

SEQ ID NO: 383906 - DNA, 15 bp, Homo sapiens
agagtgaggctgcag

SEQ ID NO: 383907 - DNA, 15 bp, Homo sapiens
aagagtgaggctgca

SEQ ID NO: 383908 - DNA, 15 bp, Homo sapiens
gaagagtgaggctgc

SEQ ID NO: 383909 - DNA, 15 bp, Homo sapiens
tgaagagtgaggctg

SEQ ID NO: 383910 - DNA, 15 bp, Homo sapiens
gtgaagagtgaggct

SEQ ID NO: 383911 - DNA, 15 bp, Homo sapiens
tgtgaagagtgaggc

SEQ ID NO: 383912 - DNA, 15 bp, Homo sapiens
ttgtgaagagtgagg

SEQ ID NO: 383913 - DNA, 15 bp, Homo sapiens
gttgtgaagagtgag

SEQ ID NO: 383914 - DNA, 15 bp, Homo sapiens
cgttgtgaagagtga

SEQ ID NO: 383915 - DNA, 15 bp, Homo sapiens
gcgttgtgaagagtg

SEQ ID NO: 383916 - DNA, 15 bp, Homo sapiens
agcgttgtgaagagt

SEQ ID NO: 383917 - DNA, 15 bp, Homo sapiens
cagcgttgtgaagag

SEQ ID NO: 383918 - DNA, 15 bp, Homo sapiens
tcagcgttgtgaaga

SEQ ID NO: 383919 - DNA, 15 bp, Homo sapiens
ttcagcgttgtgaag

SEQ ID NO: 383920 - DNA, 15 bp, Homo sapiens
cttcagcgttgtgaa

SEQ ID NO: 383921 - DNA, 15 bp, Homo sapiens
gcttcagcgttgtga

SEQ ID NO: 383922 - DNA, 15 bp, Homo sapiens
cgcttcagcgttgtg

SEQ ID NO: 383923 - DNA, 15 bp, Homo sapiens
tcgcttcagcgttgt

SEQ ID NO: 383924 - DNA, 15 bp, Homo sapiens
atcgcttcagcgttg

SEQ ID NO: 383925 - DNA, 15 bp, Homo sapiens
aatcgcttcagcgtt

SEQ ID NO: 383926 - DNA, 15 bp, Homo sapiens
gaatcgcttcagcgt

SEQ ID NO: 383927 - DNA, 15 bp, Homo sapiens
ggaatcgcttcagcg

SEQ ID NO: 383928 - DNA, 15 bp, Homo sapiens
tggaatcgcttcagc

SEQ ID NO: 383929 - DNA, 15 bp, Homo sapiens
ctggaatcgcttcag

SEQ ID NO: 383930 - DNA, 15 bp, Homo sapiens
cctggaatcgcttca

SEQ ID NO: 383931 - DNA, 15 bp, Homo sapiens
gcctggaatcgcttc

SEQ ID NO: 383932 - DNA, 15 bp, Homo sapiens
agcctggaatcgctt

SEQ ID NO: 383933 - DNA, 15 bp, Homo sapiens
cagcctggaatcgct

SEQ ID NO: 383934 - DNA, 15 bp, Homo sapiens
ccagcctggaatcgc

SEQ ID NO: 383935 - DNA, 15 bp, Homo sapiens
tccagcctggaatcg

SEQ ID NO: 383936 - DNA, 15 bp, Homo sapiens
gtccagcctggaatc

SEQ ID NO: 383937 - DNA, 15 bp, Homo sapiens
agtccagcctggaat

SEQ ID NO: 383938 - DNA, 15 bp, Homo sapiens
gagtccagcctggaa

SEQ ID NO: 383939 - DNA, 15 bp, Homo sapiens
agagtccagcctgga

SEQ ID NO: 383940 - DNA, 15 bp, Homo sapiens
aagagtccagcctgg

SEQ ID NO: 383941 - DNA, 15 bp, Homo sapiens
taagagtccagcctg

SEQ ID NO: 383942 - DNA, 15 bp, Homo sapiens
ttaagagtccagcct

SEQ ID NO: 383943 - DNA, 15 bp, Homo sapiens
attaagagtccagcc

SEQ ID NO: 383944 - DNA, 15 bp, Homo sapiens
gattaagagtccagc

SEQ ID NO: 383945 - DNA, 15 bp, Homo sapiens
agattaagagtccag

SEQ ID NO: 383946 - DNA, 15 bp, Homo sapiens
cagattaagagtcca

SEQ ID NO: 383947 - DNA, 15 bp, Homo sapiens
ccagattaagagtcc

SEQ ID NO: 383948 - DNA, 15 bp, Homo sapiens
accagattaagagtc

SEQ ID NO: 383949 - DNA, 15 bp, Homo sapiens
caccagattaagagt

SEQ ID NO: 383950 - DNA, 15 bp, Homo sapiens
tcaccagattaagag

SEQ ID NO: 383951 - DNA, 15 bp, Homo sapiens
ttcaccagattaaga

SEQ ID NO: 383952 - DNA, 15 bp, Homo sapiens
cttcaccagattaag

SEQ ID NO: 383953 - DNA, 15 bp, Homo sapiens
gcttcaccagattaa

SEQ ID NO: 383954 - DNA, 15 bp, Homo sapiens
tgcttcaccagatta

SEQ ID NO: 383955 - DNA, 15 bp, Homo sapiens
gtgcttcaccagatt

SEQ ID NO: 383956 - DNA, 15 bp, Homo sapiens
ggtgcttcaccagat

SEQ ID NO: 383957 - DNA, 15 bp, Homo sapiens
tggtgcttcaccaga

SEQ ID NO: 383958 - DNA, 15 bp, Homo sapiens
atggtgcttcaccag

SEQ ID NO: 383959 - DNA, 15 bp, Homo sapiens
gatggtgcttcacca

SEQ ID NO: 383960 - DNA, 15 bp, Homo sapiens
agatggtgcttcacc

SEQ ID NO: 383961 - DNA, 15 bp, Homo sapiens
tagatggtgcttcac

SEQ ID NO: 383962 - DNA, 15 bp, Homo sapiens
ctagatggtgcttca

SEQ ID NO: 383963 - DNA, 15 bp, Homo sapiens
tctagatggtgcttc

SEQ ID NO: 383964 - DNA, 15 bp, Homo sapiens
ctctagatggtgctt

SEQ ID NO: 383965 - DNA, 15 bp, Homo sapiens
tctctagatggtgct

SEQ ID NO: 383966 - DNA, 15 bp, Homo sapiens
gtctctagatggtgc

SEQ ID NO: 383967 - DNA, 15 bp, Homo sapiens
agtctctagatggtg

SEQ ID NO: 383968 - DNA, 15 bp, Homo sapiens
cagtctctagatggt

SEQ ID NO: 383969 - DNA, 15 bp, Homo sapiens
acagtctctagatgg

SEQ ID NO: 383970 - DNA, 15 bp, Homo sapiens
gacagtctctagatg

SEQ ID NO: 383971 - DNA, 15 bp, Homo sapiens
ggacagtctctagat

SEQ ID NO: 383972 - DNA, 15 bp, Homo sapiens
gggacagtctctaga

SEQ ID NO: 383973 - DNA, 15 bp, Homo sapiens
ggggacagtctctag

SEQ ID NO: 383974 - DNA, 15 bp, Homo sapiens
tggggacagtctcta

SEQ ID NO: 383975 - DNA, 15 bp, Homo sapiens
gtggggacagtctct

SEQ ID NO: 383976 - DNA, 15 bp, Homo sapiens
ggtggggacagtctc

SEQ ID NO: 383977 - DNA, 15 bp, Homo sapiens
tggtggggacagtct

SEQ ID NO: 383978 - DNA, 15 bp, Homo sapiens
atggtggggacagtc

SEQ ID NO: 383979 - DNA, 15 bp, Homo sapiens
gatggtggggacagt

SEQ ID NO: 383980 - DNA, 15 bp, Homo sapiens
agatggtggggacag

SEQ ID NO: 383981 - DNA, 15 bp, Homo sapiens
aagatggtggggaca

SEQ ID NO: 383982 - DNA, 15 bp, Homo sapiens
aaagatggtggggac

SEQ ID NO: 383983 - DNA, 15 bp, Homo sapiens
gaaagatggtgggga

SEQ ID NO: 383984 - DNA, 15 bp, Homo sapiens
ggaaagatggtgggg

SEQ ID NO: 383985 - DNA, 15 bp, Homo sapiens
gggaaagatggtggg

SEQ ID NO: 383986 - DNA, 15 bp, Homo sapiens
tgggaaagatggtgg

SEQ ID NO: 383987 - DNA, 15 bp, Homo sapiens
atgggaaagatggtg

SEQ ID NO: 383988 - DNA, 15 bp, Homo sapiens
gatgggaaagatggt

SEQ ID NO: 383989 - DNA, 15 bp, Homo sapiens
ggatgggaaagatgg

SEQ ID NO: 383990 - DNA, 15 bp, Homo sapiens
aggatgggaaagatg

SEQ ID NO: 383991 - DNA, 15 bp, Homo sapiens
caggatgggaaagat

SEQ ID NO: 383992 - DNA, 15 bp, Homo sapiens
ccaggatgggaaaga

SEQ ID NO: 383993 - DNA, 15 bp, Homo sapiens
gccaggatgggaaag

SEQ ID NO: 383994 - DNA, 15 bp, Homo sapiens
agccaggatgggaaa

SEQ ID NO: 383995 - DNA, 15 bp, Homo sapiens
gagccaggatgggaa

SEQ ID NO: 383996 - DNA, 15 bp, Homo sapiens
tgagccaggatggga

SEQ ID NO: 383997 - DNA, 15 bp, Homo sapiens
ttgagccaggatggg

SEQ ID NO: 383998 - DNA, 15 bp, Homo sapiens
gttgagccaggatgg

SEQ ID NO: 383999 - DNA, 15 bp, Homo sapiens
agttgagccaggatg

SEQ ID NO: 384000 - DNA, 15 bp, Homo sapiens
gagttgagccaggat

SEQ ID NO: 384001 - DNA, 15 bp, Homo sapiens
tgagttgagccagga

SEQ ID NO: 384002 - DNA, 15 bp, Homo sapiens
ttgagttgagccagg

SEQ ID NO: 384003 - DNA, 15 bp, Homo sapiens
tttgagttgagccag

SEQ ID NO: 384004 - DNA, 15 bp, Homo sapiens
gtttgagttgagcca

SEQ ID NO: 384005 - DNA, 15 bp, Homo sapiens
ggtttgagttgagcc

SEQ ID NO: 384006 - DNA, 15 bp, Homo sapiens
gggtttgagttgagc

SEQ ID NO: 384007 - DNA, 15 bp, Homo sapiens
ggggtttgagttgag

SEQ ID NO: 384008 - DNA, 15 bp, Homo sapiens
aggggtttgagttga

SEQ ID NO: 384009 - DNA, 15 bp, Homo sapiens
aaggggtttgagttg

SEQ ID NO: 384010 - DNA, 15 bp, Homo sapiens
gaaggggtttgagtt

SEQ ID NO: 384011 - DNA, 15 bp, Homo sapiens
agaaggggtttgagt

SEQ ID NO: 384012 - DNA, 15 bp, Homo sapiens
tagaaggggtttgag

SEQ ID NO: 384013 - DNA, 15 bp, Homo sapiens
gtagaaggggtttga

SEQ ID NO: 384014 - DNA, 15 bp, Homo sapiens
tgtagaaggggtttg

SEQ ID NO: 384015 - DNA, 15 bp, Homo sapiens
atgtagaaggggttt

SEQ ID NO: 384016 - DNA, 15 bp, Homo sapiens
gatgtagaaggggtt

SEQ ID NO: 384017 - DNA, 15 bp, Homo sapiens
agatgtagaaggggt

SEQ ID NO: 384018 - DNA, 15 bp, Homo sapiens
cagatgtagaagggg

SEQ ID NO: 384019 - DNA, 15 bp, Homo sapiens
gcagatgtagaaggg

SEQ ID NO: 384020 - DNA, 15 bp, Homo sapiens
agcagatgtagaagg

SEQ ID NO: 384021 - DNA, 15 bp, Homo sapiens
gagcagatgtagaag

SEQ ID NO: 384022 - DNA, 15 bp, Homo sapiens
ggagcagatgtagaa

SEQ ID NO: 384023 - DNA, 15 bp, Homo sapiens
aggagcagatgtaga

SEQ ID NO: 384024 - DNA, 15 bp, Homo sapiens
aaggagcagatgtag

SEQ ID NO: 384025 - DNA, 15 bp, Homo sapiens
aaaggagcagatgta

SEQ ID NO: 384026 - DNA, 15 bp, Homo sapiens
aaaaggagcagatgt

SEQ ID NO: 384027 - DNA, 15 bp, Homo sapiens
taaaaggagcagatg

SEQ ID NO: 384028 - DNA, 15 bp, Homo sapiens
ctaaaaggagcagat

SEQ ID NO: 384029 - DNA, 15 bp, Homo sapiens
cctaaaaggagcaga

SEQ ID NO: 384030 - DNA, 15 bp, Homo sapiens
ccctaaaaggagcag

SEQ ID NO: 384031 - DNA, 15 bp, Homo sapiens
cccctaaaaggagca

SEQ ID NO: 384032 - DNA, 15 bp, Homo sapiens
tcccctaaaaggagc

SEQ ID NO: 384033 - DNA, 15 bp, Homo sapiens
ttcccctaaaaggag

SEQ ID NO: 384034 - DNA, 15 bp, Homo sapiens
tttcccctaaaagga

SEQ ID NO: 384035 - DNA, 15 bp, Homo sapiens
ctttcccctaaaagg

SEQ ID NO: 384036 - DNA, 15 bp, Homo sapiens
tctttcccctaaaag

SEQ ID NO: 384037 - DNA, 15 bp, Homo sapiens
ttctttcccctaaaa

SEQ ID NO: 384038 - DNA, 15 bp, Homo sapiens
gttctttcccctaaa

SEQ ID NO: 384039 - DNA, 15 bp, Homo sapiens
tgttctttcccctaa

SEQ ID NO: 384040 - DNA, 15 bp, Homo sapiens
gtgttctttccccta

SEQ ID NO: 384041 - DNA, 15 bp, Homo sapiens
tgtgttctttcccct

SEQ ID NO: 384042 - DNA, 15 bp, Homo sapiens
ctgtgttctttcccc

SEQ ID NO: 384043 - DNA, 15 bp, Homo sapiens
gctgtgttctttccc

SEQ ID NO: 384044 - DNA, 15 bp, Homo sapiens
agctgtgttctttcc

SEQ ID NO: 384045 - DNA, 15 bp, Homo sapiens
gagctgtgttctttc

SEQ ID NO: 384046 - DNA, 15 bp, Homo sapiens
agagctgtgttcttt

SEQ ID NO: 384047 - DNA, 15 bp, Homo sapiens
gagagctgtgttctt

SEQ ID NO: 384048 - DNA, 15 bp, Homo sapiens
ggagagctgtgttct

SEQ ID NO: 384049 - DNA, 15 bp, Homo sapiens
tggagagctgtgttc

SEQ ID NO: 384050 - DNA, 15 bp, Homo sapiens
ttggagagctgtgtt

SEQ ID NO: 384051 - DNA, 15 bp, Homo sapiens
gttggagagctgtgt

SEQ ID NO: 384052 - DNA, 15 bp, Homo sapiens
ggttggagagctgtg

SEQ ID NO: 384053 - DNA, 15 bp, Homo sapiens
gggttggagagctgt

SEQ ID NO: 384054 - DNA, 15 bp, Homo sapiens
tgggttggagagctg

SEQ ID NO: 384055 - DNA, 15 bp, Homo sapiens
gtgggttggagagct

SEQ ID NO: 384056 - DNA, 15 bp, Homo sapiens
agtgggttggagagc

SEQ ID NO: 384057 - DNA, 15 bp, Homo sapiens
gagtgggttggagag

SEQ ID NO: 384058 - DNA, 15 bp, Homo sapiens
tgagtgggttggaga

SEQ ID NO: 384059 - DNA, 15 bp, Homo sapiens
ctgagtgggttggag

SEQ ID NO: 384060 - DNA, 15 bp, Homo sapiens
tctgagtgggttgga

SEQ ID NO: 384061 - DNA, 15 bp, Homo sapiens
gtctgagtgggttgg

SEQ ID NO: 384062 - DNA, 15 bp, Homo sapiens
ggtctgagtgggttg

SEQ ID NO: 384063 - DNA, 15 bp, Homo sapiens
aggtctgagtgggtt

SEQ ID NO: 384064 - DNA, 15 bp, Homo sapiens
taggtctgagtgggt

SEQ ID NO: 384065 - DNA, 15 bp, Homo sapiens
ctaggtctgagtggg

SEQ ID NO: 384066 - DNA, 15 bp, Homo sapiens
gctaggtctgagtgg

SEQ ID NO: 384067 - DNA, 15 bp, Homo sapiens
agctaggtctgagtg

SEQ ID NO: 384068 - DNA, 15 bp, Homo sapiens
aagctaggtctgagt

SEQ ID NO: 384069 - DNA, 15 bp, Homo sapiens
gaagctaggtctgag

SEQ ID NO: 384070 - DNA, 15 bp, Homo sapiens
tgaagctaggtctga

SEQ ID NO: 384071 - DNA, 15 bp, Homo sapiens
ctgaagctaggtctg

SEQ ID NO: 384072 - DNA, 15 bp, Homo sapiens
cctgaagctaggtct

SEQ ID NO: 384073 - DNA, 15 bp, Homo sapiens
acctgaagctaggtc

SEQ ID NO: 384074 - DNA, 15 bp, Homo sapiens
gacctgaagctaggt

SEQ ID NO: 384075 - DNA, 15 bp, Homo sapiens
ggacctgaagctagg

SEQ ID NO: 384076 - DNA, 15 bp, Homo sapiens
aggacctgaagctag

SEQ ID NO: 384077 - DNA, 15 bp, Homo sapiens
caggacctgaagcta

SEQ ID NO: 384078 - DNA, 15 bp, Homo sapiens
gcaggacctgaagct

SEQ ID NO: 384079 - DNA, 15 bp, Homo sapiens
tgcaggacctgaagc

SEQ ID NO: 384080 - DNA, 15 bp, Homo sapiens
ttgcaggacctgaag

SEQ ID NO: 384081 - DNA, 15 bp, Homo sapiens
cttgcaggacctgaa

SEQ ID NO: 384082 - DNA, 15 bp, Homo sapiens
ccttgcaggacctga

SEQ ID NO: 384083 - DNA, 15 bp, Homo sapiens
accttgcaggacctg

SEQ ID NO: 384084 - DNA, 15 bp, Homo sapiens
gaccttgcaggacct

SEQ ID NO: 384085 - DNA, 15 bp, Homo sapiens
agaccttgcaggacc

SEQ ID NO: 384086 - DNA, 15 bp, Homo sapiens
gagaccttgcaggac

SEQ ID NO: 384087 - DNA, 15 bp, Homo sapiens
tgagaccttgcagga

SEQ ID NO: 384088 - DNA, 15 bp, Homo sapiens
ctgagaccttgcagg

SEQ ID NO: 384089 - DNA, 15 bp, Homo sapiens
gctgagaccttgcag

SEQ ID NO: 384090 - DNA, 15 bp, Homo sapiens
tgctgagaccttgca

SEQ ID NO: 384091 - DNA, 15 bp, Homo sapiens
ttgctgagaccttgc

SEQ ID NO: 384092 - DNA, 15 bp, Homo sapiens
tttgctgagaccttg

SEQ ID NO: 384093 - DNA, 15 bp, Homo sapiens
ctttgctgagacctt

SEQ ID NO: 384094 - DNA, 15 bp, Homo sapiens
actttgctgagacct

SEQ ID NO: 384095 - DNA, 15 bp, Homo sapiens
gactttgctgagacc

SEQ ID NO: 384096 - DNA, 15 bp, Homo sapiens
tgactttgctgagac

SEQ ID NO: 384097 - DNA, 15 bp, Homo sapiens
gtgactttgctgaga

SEQ ID NO: 384098 - DNA, 15 bp, Homo sapiens
agtgactttgctgag

SEQ ID NO: 384099 - DNA, 15 bp, Homo sapiens
aagtgactttgctga

SEQ ID NO: 384100 - DNA, 15 bp, Homo sapiens
caagtgactttgctg

SEQ ID NO: 384101 - DNA, 15 bp, Homo sapiens
tcaagtgactttgct

SEQ ID NO: 384102 - DNA, 15 bp, Homo sapiens
gtcaagtgactttgc

SEQ ID NO: 384103 - DNA, 15 bp, Homo sapiens
ggtcaagtgactttg

SEQ ID NO: 384104 - DNA, 15 bp, Homo sapiens
aggtcaagtgacttt

SEQ ID NO: 384105 - DNA, 15 bp, Homo sapiens
aaggtcaagtgactt

SEQ ID NO: 384106 - DNA, 15 bp, Homo sapiens
aaaggtcaagtgact

SEQ ID NO: 384107 - DNA, 15 bp, Homo sapiens
gaaaggtcaagtgac

SEQ ID NO: 384108 - DNA, 15 bp, Homo sapiens
agaaaggtcaagtga

SEQ ID NO: 384109 - DNA, 15 bp, Homo sapiens
cagaaaggtcaagtg

SEQ ID NO: 384110 - DNA, 15 bp, Homo sapiens
tcagaaaggtcaagt

SEQ ID NO: 384111 - DNA, 15 bp, Homo sapiens
ctcagaaaggtcaag

SEQ ID NO: 384112 - DNA, 15 bp, Homo sapiens
actcagaaaggtcaa

SEQ ID NO: 384113 - DNA, 15 bp, Homo sapiens
aactcagaaaggtca

SEQ ID NO: 384114 - DNA, 15 bp, Homo sapiens
aaactcagaaaggtc

SEQ ID NO: 384115 - DNA, 15 bp, Homo sapiens
gaaactcagaaaggt

SEQ ID NO: 384116 - DNA, 15 bp, Homo sapiens
agaaactcagaaagg

SEQ ID NO: 384117 - DNA, 15 bp, Homo sapiens
gagaaactcagaaag

SEQ ID NO: 384118 - DNA, 15 bp, Homo sapiens
agagaaactcagaaa

SEQ ID NO: 384119 - DNA, 15 bp, Homo sapiens
aagagaaactcagaa

SEQ ID NO: 384120 - DNA, 15 bp, Homo sapiens
gaagagaaactcaga

SEQ ID NO: 384121 - DNA, 15 bp, Homo sapiens
agaagagaaactcag

SEQ ID NO: 384122 - DNA, 15 bp, Homo sapiens
cagaagagaaactca

SEQ ID NO: 384123 - DNA, 15 bp, Homo sapiens
gcagaagagaaactc

SEQ ID NO: 384124 - DNA, 15 bp, Homo sapiens
ggcagaagagaaact

SEQ ID NO: 384125 - DNA, 15 bp, Homo sapiens
aggcagaagagaaac

SEQ ID NO: 384126 - DNA, 15 bp, Homo sapiens
gaggcagaagagaaa

SEQ ID NO: 384127 - DNA, 15 bp, Homo sapiens
agaggcagaagagaa

SEQ ID NO: 384128 - DNA, 15 bp, Homo sapiens
cagaggcagaagaga

SEQ ID NO: 384129 - DNA, 15 bp, Homo sapiens
gcagaggcagaagag

SEQ ID NO: 384130 - DNA, 15 bp, Homo sapiens
tgcagaggcagaaga

SEQ ID NO: 384131 - DNA, 15 bp, Homo sapiens
ttgcagaggcagaag

SEQ ID NO: 384132 - DNA, 15 bp, Homo sapiens
tttgcagaggcagaa

SEQ ID NO: 384133 - DNA, 15 bp, Homo sapiens
ttttgcagaggcaga

SEQ ID NO: 384134 - DNA, 15 bp, Homo sapiens
attttgcagaggcag

SEQ ID NO: 384135 - DNA, 15 bp, Homo sapiens
cattttgcagaggca

SEQ ID NO: 384136 - DNA, 15 bp, Homo sapiens
tcattttgcagaggc

SEQ ID NO: 384137 - DNA, 15 bp, Homo sapiens
ttcattttgcagagg

SEQ ID NO: 384138 - DNA, 15 bp, Homo sapiens
cttcattttgcagag

SEQ ID NO: 384139 - DNA, 15 bp, Homo sapiens
tcttcattttgcaga

SEQ ID NO: 384140 - DNA, 15 bp, Homo sapiens
gtcttcattttgcag

SEQ ID NO: 384141 - DNA, 15 bp, Homo sapiens
cgtcttcattttgca

SEQ ID NO: 384142 - DNA, 15 bp, Homo sapiens
tcgtcttcattttgc

SEQ ID NO: 384143 - DNA, 15 bp, Homo sapiens
atcgtcttcattttg

SEQ ID NO: 384144 - DNA, 15 bp, Homo sapiens
tatcgtcttcatttt

SEQ ID NO: 384145 - DNA, 15 bp, Homo sapiens
atatcgtcttcattt

SEQ ID NO: 384146 - DNA, 15 bp, Homo sapiens
catatcgtcttcatt

SEQ ID NO: 384147 - DNA, 15 bp, Homo sapiens
ccatatcgtcttcat

SEQ ID NO: 384148 - DNA, 15 bp, Homo sapiens
tccatatcgtcttca

SEQ ID NO: 384149 - DNA, 15 bp, Homo sapiens
atccatatcgtcttc

SEQ ID NO: 384150 - DNA, 15 bp, Homo sapiens
tatccatatcgtctt

SEQ ID NO: 384151 - DNA, 15 bp, Homo sapiens
ttatccatatcgtct

SEQ ID NO: 384152 - DNA, 15 bp, Homo sapiens
cttatccatatcgtc

SEQ ID NO: 384153 - DNA, 15 bp, Homo sapiens
tcttatccatatcgt

SEQ ID NO: 384154 - DNA, 15 bp, Homo sapiens
ttcttatccatatcg

SEQ ID NO: 384155 - DNA, 15 bp, Homo sapiens
tttcttatccatatc

SEQ ID NO: 384156 - DNA, 15 bp, Homo sapiens
ctttcttatccatat

SEQ ID NO: 384157 - DNA, 15 bp, Homo sapiens
actttcttatccata

SEQ ID NO: 384158 - DNA, 15 bp, Homo sapiens
gactttcttatccat

SEQ ID NO: 384159 - DNA, 15 bp, Homo sapiens
agactttcttatcca

SEQ ID NO: 384160 - DNA, 15 bp, Homo sapiens
gagactttcttatcc

SEQ ID NO: 384161 - DNA, 15 bp, Homo sapiens
tgagactttcttatc

SEQ ID NO: 384162 - DNA, 15 bp, Homo sapiens
ctgagactttcttat

SEQ ID NO: 384163 - DNA, 15 bp, Homo sapiens
cctgagactttctta

SEQ ID NO: 384164 - DNA, 15 bp, Homo sapiens
acctgagactttctt

SEQ ID NO: 384165 - DNA, 15 bp, Homo sapiens
aacctgagactttct

SEQ ID NO: 384166 - DNA, 15 bp, Homo sapiens
aaacctgagactttc

SEQ ID NO: 384167 - DNA, 15 bp, Homo sapiens
caaacctgagacttt

SEQ ID NO: 384168 - DNA, 15 bp, Homo sapiens
ccaaacctgagactt

SEQ ID NO: 384169 - DNA, 15 bp, Homo sapiens
gccaaacctgagact

SEQ ID NO: 384170 - DNA, 15 bp, Homo sapiens
agccaaacctgagac

SEQ ID NO: 384171 - DNA, 15 bp, Homo sapiens
cagccaaacctgaga

SEQ ID NO: 384172 - DNA, 15 bp, Homo sapiens
gcagccaaacctgag

SEQ ID NO: 384173 - DNA, 15 bp, Homo sapiens
agcagccaaacctga

SEQ ID NO: 384174 - DNA, 15 bp, Homo sapiens
gagcagccaaacctg

SEQ ID NO: 384175 - DNA, 15 bp, Homo sapiens
cgagcagccaaacct

SEQ ID NO: 384176 - DNA, 15 bp, Homo sapiens
acgagcagccaaacc

SEQ ID NO: 384177 - DNA, 15 bp, Homo sapiens
gacgagcagccaaac

SEQ ID NO: 384178 - DNA, 15 bp, Homo sapiens
tgacgagcagccaaa

SEQ ID NO: 384179 - DNA, 15 bp, Homo sapiens
ctgacgagcagccaa

SEQ ID NO: 384180 - DNA, 15 bp, Homo sapiens
tctgacgagcagcca

SEQ ID NO: 384181 - DNA, 15 bp, Homo sapiens
ttctgacgagcagcc

SEQ ID NO: 384182 - DNA, 15 bp, Homo sapiens
attctgacgagcagc

SEQ ID NO: 384183 - DNA, 15 bp, Homo sapiens
gattctgacgagcag

SEQ ID NO: 384184 - DNA, 15 bp, Homo sapiens
tgattctgacgagca

SEQ ID NO: 384185 - DNA, 15 bp, Homo sapiens
gtgattctgacgagc

SEQ ID NO: 384186 - DNA, 15 bp, Homo sapiens
tgtgattctgacgag

SEQ ID NO: 384187 - DNA, 15 bp, Homo sapiens
atgtgattctgacga

SEQ ID NO: 384188 - DNA, 15 bp, Homo sapiens
gatgtgattctgacg

SEQ ID NO: 384189 - DNA, 15 bp, Homo sapiens
tgatgtgattctgac

SEQ ID NO: 384190 - DNA, 15 bp, Homo sapiens
ctgatgtgattctga

SEQ ID NO: 384191 - DNA, 15 bp, Homo sapiens
cctgatgtgattctg

SEQ ID NO: 384192 - DNA, 15 bp, Homo sapiens
ccctgatgtgattct

SEQ ID NO: 384193 - DNA, 15 bp, Homo sapiens
tccctgatgtgattc

SEQ ID NO: 384194 - DNA, 15 bp, Homo sapiens
ctccctgatgtgatt

SEQ ID NO: 384195 - DNA, 15 bp, Homo sapiens
gctccctgatgtgat

SEQ ID NO: 384196 - DNA, 15 bp, Homo sapiens
agctccctgatgtga

SEQ ID NO: 384197 - DNA, 15 bp, Homo sapiens
aagctccctgatgtg

SEQ ID NO: 384198 - DNA, 15 bp, Homo sapiens
aaagctccctgatgt

SEQ ID NO: 384199 - DNA, 15 bp, Homo sapiens
caaagctccctgatg

SEQ ID NO: 384200 - DNA, 15 bp, Homo sapiens
tcaaagctccctgat

SEQ ID NO: 384201 - DNA, 15 bp, Homo sapiens
ttcaaagctccctga

SEQ ID NO: 384202 - DNA, 15 bp, Homo sapiens
tttcaaagctccctg

SEQ ID NO: 384203 - DNA, 15 bp, Homo sapiens
ttttcaaagctccct

SEQ ID NO: 384204 - DNA, 15 bp, Homo sapiens
tttttcaaagctccc

SEQ ID NO: 384205 - DNA, 15 bp, Homo sapiens
ttttttcaaagctcc

SEQ ID NO: 384206 - DNA, 15 bp, Homo sapiens
gttttttcaaagctc

SEQ ID NO: 384207 - DNA, 15 bp, Homo sapiens
tgttttttcaaagct

SEQ ID NO: 384208 - DNA, 15 bp, Homo sapiens
gtgttttttcaaagc

SEQ ID NO: 384209 - DNA, 15 bp, Homo sapiens
ggtgttttttcaaag

SEQ ID NO: 384210 - DNA, 15 bp, Homo sapiens
gggtgttttttcaaa

SEQ ID NO: 384211 - DNA, 15 bp, Homo sapiens
tgggtgttttttcaa

SEQ ID NO: 384212 - DNA, 15 bp, Homo sapiens
ctgggtgttttttca

SEQ ID NO: 384213 - DNA, 15 bp, Homo sapiens
cctgggtgttttttc

SEQ ID NO: 384214 - DNA, 15 bp, Homo sapiens
ccctgggtgtttttt

SEQ ID NO: 384215 - DNA, 15 bp, Homo sapiens
gccctgggtgttttt

SEQ ID NO: 384216 - DNA, 15 bp, Homo sapiens
ggccctgggtgtttt

SEQ ID NO: 384217 - DNA, 15 bp, Homo sapiens
aggccctgggtgttt

SEQ ID NO: 384218 - DNA, 15 bp, Homo sapiens
caggccctgggtgtt

SEQ ID NO: 384219 - DNA, 15 bp, Homo sapiens
ccaggccctgggtgt

SEQ ID NO: 384220 - DNA, 15 bp, Homo sapiens
cccaggccctgggtg

SEQ ID NO: 384221 - DNA, 15 bp, Homo sapiens
gcccaggccctgggt

SEQ ID NO: 384222 - DNA, 15 bp, Homo sapiens
ggcccaggccctggg

SEQ ID NO: 384223 - DNA, 15 bp, Homo sapiens
tggcccaggccctgg

SEQ ID NO: 384224 - DNA, 15 bp, Homo sapiens
ttggcccaggccctg

SEQ ID NO: 384225 - DNA, 15 bp, Homo sapiens
tttggcccaggccct

SEQ ID NO: 384226 - DNA, 15 bp, Homo sapiens
gtttggcccaggccc

SEQ ID NO: 384227 - DNA, 15 bp, Homo sapiens
ggtttggcccaggcc

SEQ ID NO: 384228 - DNA, 15 bp, Homo sapiens
tggtttggcccaggc

SEQ ID NO: 384229 - DNA, 15 bp, Homo sapiens
gtggtttggcccagg

SEQ ID NO: 384230 - DNA, 15 bp, Homo sapiens
ggtggtttggcccag

SEQ ID NO: 384231 - DNA, 15 bp, Homo sapiens
gggtggtttggccca

SEQ ID NO: 384232 - DNA, 15 bp, Homo sapiens
tgggtggtttggccc

SEQ ID NO: 384233 - DNA, 15 bp, Homo sapiens
ttgggtggtttggcc

SEQ ID NO: 384234 - DNA, 15 bp, Homo sapiens
cttgggtggtttggc

SEQ ID NO: 384235 - DNA, 15 bp, Homo sapiens
tcttgggtggtttgg

SEQ ID NO: 384236 - DNA, 15 bp, Homo sapiens
ttcttgggtggtttg

SEQ ID NO: 384237 - DNA, 15 bp, Homo sapiens
cttcttgggtggttt

SEQ ID NO: 384238 - DNA, 15 bp, Homo sapiens
acttcttgggtggtt

SEQ ID NO: 384239 - DNA, 15 bp, Homo sapiens
aacttcttgggtggt

SEQ ID NO: 384240 - DNA, 15 bp, Homo sapiens
gaacttcttgggtgg

SEQ ID NO: 384241 - DNA, 15 bp, Homo sapiens
agaacttcttgggtg

SEQ ID NO: 384242 - DNA, 15 bp, Homo sapiens
cagaacttcttgggt

SEQ ID NO: 384243 - DNA, 15 bp, Homo sapiens
tcagaacttcttggg

SEQ ID NO: 384244 - DNA, 15 bp, Homo sapiens
atcagaacttcttgg

SEQ ID NO: 384245 - DNA, 15 bp, Homo sapiens
aatcagaacttcttg

SEQ ID NO: 384246 - DNA, 15 bp, Homo sapiens
gaatcagaacttctt

SEQ ID NO: 384247 - DNA, 15 bp, Homo sapiens
tgaatcagaacttct

SEQ ID NO: 384248 - DNA, 15 bp, Homo sapiens
gtgaatcagaacttc

SEQ ID NO: 384249 - DNA, 15 bp, Homo sapiens
agtgaatcagaactt

SEQ ID NO: 384250 - DNA, 15 bp, Homo sapiens
aagtgaatcagaact

SEQ ID NO: 384251 - DNA, 15 bp, Homo sapiens
caagtgaatcagaac

SEQ ID NO: 384252 - DNA, 15 bp, Homo sapiens
gcaagtgaatcagaa

SEQ ID NO: 384253 - DNA, 15 bp, Homo sapiens
agcaagtgaatcaga

SEQ ID NO: 384254 - DNA, 15 bp, Homo sapiens
gagcaagtgaatcag

SEQ ID NO: 384255 - DNA, 15 bp, Homo sapiens
agagcaagtgaatca

SEQ ID NO: 384256 - DNA, 15 bp, Homo sapiens
cagagcaagtgaatc

SEQ ID NO: 384257 - DNA, 15 bp, Homo sapiens
ccagagcaagtgaat

SEQ ID NO: 384258 - DNA, 15 bp, Homo sapiens
cccagagcaagtgaa

SEQ ID NO: 384259 - DNA, 15 bp, Homo sapiens
ccccagagcaagtga

SEQ ID NO: 384260 - DNA, 15 bp, Homo sapiens
accccagagcaagtg

SEQ ID NO: 384261 - DNA, 15 bp, Homo sapiens
caccccagagcaagt

SEQ ID NO: 384262 - DNA, 15 bp, Homo sapiens
acaccccagagcaag

SEQ ID NO: 384263 - DNA, 15 bp, Homo sapiens
tacaccccagagcaa

SEQ ID NO: 384264 - DNA, 15 bp, Homo sapiens
ctacaccccagagca

SEQ ID NO: 384265 - DNA, 15 bp, Homo sapiens
gctacaccccagagc

SEQ ID NO: 384266 - DNA, 15 bp, Homo sapiens
agctacaccccagag

SEQ ID NO: 384267 - DNA, 15 bp, Homo sapiens
aagctacaccccaga

SEQ ID NO: 384268 - DNA, 15 bp, Homo sapiens
caagctacaccccag

SEQ ID NO: 384269 - DNA, 15 bp, Homo sapiens
ccaagctacacccca

SEQ ID NO: 384270 - DNA, 15 bp, Homo sapiens
tccaagctacacccc

SEQ ID NO: 384271 - DNA, 15 bp, Homo sapiens
gtccaagctacaccc

SEQ ID NO: 384272 - DNA, 15 bp, Homo sapiens
tgtccaagctacacc

SEQ ID NO: 384273 - DNA, 15 bp, Homo sapiens
gtgtccaagctacac

SEQ ID NO: 384274 - DNA, 15 bp, Homo sapiens
cgtgtccaagctaca

SEQ ID NO: 384275 - DNA, 15 bp, Homo sapiens
ccgtgtccaagctac

SEQ ID NO: 384276 - DNA, 15 bp, Homo sapiens
cccgtgtccaagcta

SEQ ID NO: 384277 - DNA, 15 bp, Homo sapiens
tcccgtgtccaagct

SEQ ID NO: 384278 - DNA, 15 bp, Homo sapiens
ttcccgtgtccaagc

SEQ ID NO: 384279 - DNA, 15 bp, Homo sapiens
attcccgtgtccaag

SEQ ID NO: 384280 - DNA, 15 bp, Homo sapiens
gattcccgtgtccaa

SEQ ID NO: 384281 - DNA, 15 bp, Homo sapiens
agattcccgtgtcca

SEQ ID NO: 384282 - DNA, 15 bp, Homo sapiens
aagattcccgtgtcc

SEQ ID NO: 384283 - DNA, 15 bp, Homo sapiens
aaagattcccgtgtc

SEQ ID NO: 384284 - DNA, 15 bp, Homo sapiens
aaaagattcccgtgt

SEQ ID NO: 384285 - DNA, 15 bp, Homo sapiens
aaaaagattcccgtg

SEQ ID NO: 384286 - DNA, 15 bp, Homo sapiens
taaaaagattcccgt

SEQ ID NO: 384287 - DNA, 15 bp, Homo sapiens
ctaaaaagattcccg

SEQ ID NO: 384288 - DNA, 15 bp, Homo sapiens
tctaaaaagattccc

SEQ ID NO: 384289 - DNA, 15 bp, Homo sapiens
ttctaaaaagattcc

SEQ ID NO: 384290 - DNA, 15 bp, Homo sapiens
cttctaaaaagattc

SEQ ID NO: 384291 - DNA, 15 bp, Homo sapiens
gcttctaaaaagatt

SEQ ID NO: 384292 - DNA, 15 bp, Homo sapiens
agcttctaaaaagat

SEQ ID NO: 384293 - DNA, 15 bp, Homo sapiens
gagcttctaaaaaga

SEQ ID NO: 384294 - DNA, 15 bp, Homo sapiens
ggagcttctaaaaag

SEQ ID NO: 384295 - DNA, 15 bp, Homo sapiens
gggagcttctaaaaa

SEQ ID NO: 384296 - DNA, 15 bp, Homo sapiens
ggggagcttctaaaa

SEQ ID NO: 384297 - DNA, 15 bp, Homo sapiens
tggggagcttctaaa

SEQ ID NO: 384298 - DNA, 15 bp, Homo sapiens
ctggggagcttctaa

SEQ ID NO: 384299 - DNA, 15 bp, Homo sapiens
cctggggagcttcta

SEQ ID NO: 384300 - DNA, 15 bp, Homo sapiens
acctggggagcttct

SEQ ID NO: 384301 - DNA, 15 bp, Homo sapiens
aacctggggagcttc

SEQ ID NO: 384302 - DNA, 15 bp, Homo sapiens
caacctggggagctt

SEQ ID NO: 384303 - DNA, 15 bp, Homo sapiens
acaacctggggagct

SEQ ID NO: 384304 - DNA, 15 bp, Homo sapiens
aacaacctggggagc

SEQ ID NO: 384305 - DNA, 15 bp, Homo sapiens
caacaacctggggag

SEQ ID NO: 384306 - DNA, 15 bp, Homo sapiens
gcaacaacctgggga

SEQ ID NO: 384307 - DNA, 15 bp, Homo sapiens
tgcaacaacctgggg

SEQ ID NO: 384308 - DNA, 15 bp, Homo sapiens
ttgcaacaacctggg

SEQ ID NO: 384309 - DNA, 15 bp, Homo sapiens
cttgcaacaacctgg

SEQ ID NO: 384310 - DNA, 15 bp, Homo sapiens
tcttgcaacaacctg

SEQ ID NO: 384311 - DNA, 15 bp, Homo sapiens
ctcttgcaacaacct

SEQ ID NO: 384312 - DNA, 15 bp, Homo sapiens
actcttgcaacaacc

SEQ ID NO: 384313 - DNA, 15 bp, Homo sapiens
tactcttgcaacaac

SEQ ID NO: 384314 - DNA, 15 bp, Homo sapiens
ctactcttgcaacaa

SEQ ID NO: 384315 - DNA, 15 bp, Homo sapiens
gctactcttgcaaca

SEQ ID NO: 384316 - DNA, 15 bp, Homo sapiens
ggctactcttgcaac

SEQ ID NO: 384317 - DNA, 15 bp, Homo sapiens
tggctactcttgcaa

SEQ ID NO: 384318 - DNA, 15 bp, Homo sapiens
ttggctactcttgca

SEQ ID NO: 384319 - DNA, 15 bp, Homo sapiens
cttggctactcttgc

SEQ ID NO: 384320 - DNA, 15 bp, Homo sapiens
ccttggctactcttg

SEQ ID NO: 384321 - DNA, 15 bp, Homo sapiens
accttggctactctt

SEQ ID NO: 384322 - DNA, 15 bp, Homo sapiens
aaccttggctactct

SEQ ID NO: 384323 - DNA, 15 bp, Homo sapiens
caaccttggctactc

SEQ ID NO: 384324 - DNA, 15 bp, Homo sapiens
tcaaccttggctact

SEQ ID NO: 384325 - DNA, 15 bp, Homo sapiens
ctcaaccttggctac

SEQ ID NO: 384326 - DNA, 15 bp, Homo sapiens
tctcaaccttggcta

SEQ ID NO: 384327 - DNA, 15 bp, Homo sapiens
ttctcaaccttggct

SEQ ID NO: 384328 - DNA, 15 bp, Homo sapiens
gttctcaaccttggc

SEQ ID NO: 384329 - DNA, 15 bp, Homo sapiens
ggttctcaaccttgg

SEQ ID NO: 384330 - DNA, 15 bp, Homo sapiens
tggttctcaaccttg

SEQ ID NO: 384331 - DNA, 15 bp, Homo sapiens
ctggttctcaacctt

SEQ ID NO: 384332 - DNA, 15 bp, Homo sapiens
actggttctcaacct

SEQ ID NO: 384333 - DNA, 15 bp, Homo sapiens
gactggttctcaacc

SEQ ID NO: 384334 - DNA, 15 bp, Homo sapiens
tgactggttctcaac

SEQ ID NO: 384335 - DNA, 15 bp, Homo sapiens
atgactggttctcaa

SEQ ID NO: 384336 - DNA, 15 bp, Homo sapiens
tatgactggttctca

SEQ ID NO: 384337 - DNA, 15 bp, Homo sapiens
atatgactggttctc

SEQ ID NO: 384338 - DNA, 15 bp, Homo sapiens
tatatgactggttct

SEQ ID NO: 384339 - DNA, 15 bp, Homo sapiens
ctatatgactggttc

SEQ ID NO: 384340 - DNA, 15 bp, Homo sapiens
tctatatgactggtt

SEQ ID NO: 384341 - DNA, 15 bp, Homo sapiens
atctatatgactggt

SEQ ID NO: 384342 - DNA, 15 bp, Homo sapiens
tatctatatgactgg

SEQ ID NO: 384343 - DNA, 15 bp, Homo sapiens
ttatctatatgactg

SEQ ID NO: 384344 - DNA, 15 bp, Homo sapiens
attatctatatgact

SEQ ID NO: 384345 - DNA, 15 bp, Homo sapiens
cattatctatatgac

SEQ ID NO: 384346 - DNA, 15 bp, Homo sapiens
acattatctatatga

SEQ ID NO: 384347 - DNA, 15 bp, Homo sapiens
gacattatctatatg

SEQ ID NO: 384348 - DNA, 15 bp, Homo sapiens
agacattatctatat

SEQ ID NO: 384349 - DNA, 15 bp, Homo sapiens
tagacattatctata

SEQ ID NO: 384350 - DNA, 15 bp, Homo sapiens
ttagacattatctat

SEQ ID NO: 384351 - DNA, 15 bp, Homo sapiens
cttagacattatcta

SEQ ID NO: 384352 - DNA, 15 bp, Homo sapiens
tcttagacattatct

SEQ ID NO: 384353 - DNA, 15 bp, Homo sapiens
gtcttagacattatc

SEQ ID NO: 384354 - DNA, 15 bp, Homo sapiens
ggtcttagacattat

SEQ ID NO: 384355 - DNA, 15 bp, Homo sapiens
gggtcttagacatta

SEQ ID NO: 384356 - DNA, 15 bp, Homo sapiens
ggggtcttagacatt

SEQ ID NO: 384357 - DNA, 15 bp, Homo sapiens
tggggtcttagacat

SEQ ID NO: 384358 - DNA, 15 bp, Homo sapiens
atggggtcttagaca

SEQ ID NO: 384359 - DNA, 15 bp, Homo sapiens
gatggggtcttagac

SEQ ID NO: 384360 - DNA, 15 bp, Homo sapiens
ggatggggtcttaga

SEQ ID NO: 384361 - DNA, 15 bp, Homo sapiens
tggatggggtcttag

SEQ ID NO: 384362 - DNA, 15 bp, Homo sapiens
ctggatggggtctta

SEQ ID NO: 384363 - DNA, 15 bp, Homo sapiens
gctggatggggtctt

SEQ ID NO: 384364 - DNA, 15 bp, Homo sapiens
agctggatggggtct

SEQ ID NO: 384365 - DNA, 15 bp, Homo sapiens
aagctggatggggtc

SEQ ID NO: 384366 - DNA, 15 bp, Homo sapiens
gaagctggatggggt

SEQ ID NO: 384367 - DNA, 15 bp, Homo sapiens
agaagctggatgggg

SEQ ID NO: 384368 - DNA, 15 bp, Homo sapiens
tagaagctggatggg

SEQ ID NO: 384369 - DNA, 15 bp, Homo sapiens
gtagaagctggatgg

SEQ ID NO: 384370 - DNA, 15 bp, Homo sapiens
tgtagaagctggatg

SEQ ID NO: 384371 - DNA, 15 bp, Homo sapiens
ttgtagaagctggat

SEQ ID NO: 384372 - DNA, 15 bp, Homo sapiens
attgtagaagctgga

SEQ ID NO: 384373 - DNA, 15 bp, Homo sapiens
aattgtagaagctgg

SEQ ID NO: 384374 - DNA, 15 bp, Homo sapiens
gaattgtagaagctg

SEQ ID NO: 384375 - DNA, 15 bp, Homo sapiens
ggaattgtagaagct

SEQ ID NO: 384376 - DNA, 15 bp, Homo sapiens
aggaattgtagaagc

SEQ ID NO: 384377 - DNA, 15 bp, Homo sapiens
gaggaattgtagaag

SEQ ID NO: 384378 - DNA, 15 bp, Homo sapiens
ggaggaattgtagaa

SEQ ID NO: 384379 - DNA, 15 bp, Homo sapiens
gggaggaattgtaga

SEQ ID NO: 384380 - DNA, 15 bp, Homo sapiens
agggaggaattgtag

SEQ ID NO: 384381 - DNA, 15 bp, Homo sapiens
cagggaggaattgta

SEQ ID NO: 384382 - DNA, 15 bp, Homo sapiens
acagggaggaattgt

SEQ ID NO: 384383 - DNA, 15 bp, Homo sapiens
cacagggaggaattg

SEQ ID NO: 384384 - DNA, 15 bp, Homo sapiens
acacagggaggaatt

SEQ ID NO: 384385 - DNA, 15 bp, Homo sapiens
gacacagggaggaat

SEQ ID NO: 384386 - DNA, 15 bp, Homo sapiens
ggacacagggaggaa

SEQ ID NO: 384387 - DNA, 15 bp, Homo sapiens
cggacacagggagga

SEQ ID NO: 384388 - DNA, 15 bp, Homo sapiens
ccggacacagggagg

SEQ ID NO: 384389 - DNA, 15 bp, Homo sapiens
cccggacacagggag

SEQ ID NO: 384390 - DNA, 15 bp, Homo sapiens
ccccggacacaggga

SEQ ID NO: 384391 - DNA, 15 bp, Homo sapiens
tccccggacacaggg

SEQ ID NO: 384392 - DNA, 15 bp, Homo sapiens
gtccccggacacagg

SEQ ID NO: 384393 - DNA, 15 bp, Homo sapiens
agtccccggacacag

SEQ ID NO: 384394 - DNA, 15 bp, Homo sapiens
cagtccccggacaca

SEQ ID NO: 384395 - DNA, 15 bp, Homo sapiens
acagtccccggacac

SEQ ID NO: 384396 - DNA, 15 bp, Homo sapiens
cacagtccccggaca

SEQ ID NO: 384397 - DNA, 15 bp, Homo sapiens
ccacagtccccggac

SEQ ID NO: 384398 - DNA, 15 bp, Homo sapiens
cccacagtccccgga

SEQ ID NO: 384399 - DNA, 15 bp, Homo sapiens
ccccacagtccccgg

SEQ ID NO: 384400 - DNA, 15 bp, Homo sapiens
accccacagtccccg

SEQ ID NO: 384401 - DNA, 15 bp, Homo sapiens
gaccccacagtcccc

SEQ ID NO: 384402 - DNA, 15 bp, Homo sapiens
tgaccccacagtccc

SEQ ID NO: 384403 - DNA, 15 bp, Homo sapiens
atgaccccacagtcc

SEQ ID NO: 384404 - DNA, 15 bp, Homo sapiens
catgaccccacagtc

SEQ ID NO: 384405 - DNA, 15 bp, Homo sapiens
acatgaccccacagt

SEQ ID NO: 384406 - DNA, 15 bp, Homo sapiens
cacatgaccccacag

SEQ ID NO: 384407 - DNA, 15 bp, Homo sapiens
gcacatgaccccaca

SEQ ID NO: 384408 - DNA, 15 bp, Homo sapiens
ggcacatgaccccac

SEQ ID NO: 384409 - DNA, 15 bp, Homo sapiens
aggcacatgacccca

SEQ ID NO: 384410 - DNA, 15 bp, Homo sapiens
aaggcacatgacccc

SEQ ID NO: 384411 - DNA, 15 bp, Homo sapiens
aaaggcacatgaccc

SEQ ID NO: 384412 - DNA, 15 bp, Homo sapiens
taaaggcacatgacc

SEQ ID NO: 384413 - DNA, 15 bp, Homo sapiens
ataaaggcacatgac

SEQ ID NO: 384414 - DNA, 15 bp, Homo sapiens
aataaaggcacatga

SEQ ID NO: 384415 - DNA, 15 bp, Homo sapiens
caataaaggcacatg

SEQ ID NO: 384416 - DNA, 15 bp, Homo sapiens
gcaataaaggcacat

SEQ ID NO: 384417 - DNA, 15 bp, Homo sapiens
agcaataaaggcaca

SEQ ID NO: 384418 - DNA, 15 bp, Homo sapiens
cagcaataaaggcac

SEQ ID NO: 384419 - DNA, 15 bp, Homo sapiens
ccagcaataaaggca

SEQ ID NO: 384420 - DNA, 15 bp, Homo sapiens
tccagcaataaaggc

SEQ ID NO: 384421 - DNA, 15 bp, Homo sapiens
atccagcaataaagg

SEQ ID NO: 384422 - DNA, 15 bp, Homo sapiens
catccagcaataaag

SEQ ID NO: 384423 - DNA, 15 bp, Homo sapiens
gcatccagcaataaa

SEQ ID NO: 384424 - DNA, 15 bp, Homo sapiens
agcatccagcaataa

SEQ ID NO: 384425 - DNA, 15 bp, Homo sapiens
cagcatccagcaata

SEQ ID NO: 384426 - DNA, 15 bp, Homo sapiens
tcagcatccagcaat

SEQ ID NO: 384427 - DNA, 15 bp, Homo sapiens
ttcagcatccagcaa

SEQ ID NO: 384428 - DNA, 15 bp, Homo sapiens
cttcagcatccagca

SEQ ID NO: 384429 - DNA, 15 bp, Homo sapiens
tcttcagcatccagc

SEQ ID NO: 384430 - DNA, 15 bp, Homo sapiens
gtcttcagcatccag

SEQ ID NO: 384431 - DNA, 15 bp, Homo sapiens
tgtcttcagcatcca

SEQ ID NO: 384432 - DNA, 15 bp, Homo sapiens
ttgtcttcagcatcc

SEQ ID NO: 384433 - DNA, 15 bp, Homo sapiens
cttgtcttcagcatc

SEQ ID NO: 384434 - DNA, 15 bp, Homo sapiens
tcttgtcttcagcat

SEQ ID NO: 384435 - DNA, 15 bp, Homo sapiens
atcttgtcttcagca

SEQ ID NO: 384436 - DNA, 15 bp, Homo sapiens
catcttgtcttcagc

SEQ ID NO: 384437 - DNA, 15 bp, Homo sapiens
tcatcttgtcttcag

SEQ ID NO: 384438 - DNA, 15 bp, Homo sapiens
ctcatcttgtcttca

SEQ ID NO: 384439 - DNA, 15 bp, Homo sapiens
cctcatcttgtcttc

SEQ ID NO: 384440 - DNA, 15 bp, Homo sapiens
tcctcatcttgtctt

SEQ ID NO: 384441 - DNA, 15 bp, Homo sapiens
atcctcatcttgtct

SEQ ID NO: 384442 - DNA, 15 bp, Homo sapiens
gatcctcatcttgtc

SEQ ID NO: 384443 - DNA, 15 bp, Homo sapiens
ggatcctcatcttgt

SEQ ID NO: 384444 - DNA, 15 bp, Homo sapiens
gggatcctcatcttg

SEQ ID NO: 384445 - DNA, 15 bp, Homo sapiens
tgggatcctcatctt

SEQ ID NO: 384446 - DNA, 15 bp, Homo sapiens
ctgggatcctcatct

SEQ ID NO: 384447 - DNA, 15 bp, Homo sapiens
actgggatcctcatc

SEQ ID NO: 384448 - DNA, 15 bp, Homo sapiens
gactgggatcctcat

SEQ ID NO: 384449 - DNA, 15 bp, Homo sapiens
ggactgggatcctca

SEQ ID NO: 384450 - DNA, 15 bp, Homo sapiens
aggactgggatcctc

SEQ ID NO: 384451 - DNA, 15 bp, Homo sapiens
caggactgggatcct

SEQ ID NO: 384452 - DNA, 15 bp, Homo sapiens
ccaggactgggatcc

SEQ ID NO: 384453 - DNA, 15 bp, Homo sapiens
tccaggactgggatc

SEQ ID NO: 384454 - DNA, 15 bp, Homo sapiens
atccaggactgggat

SEQ ID NO: 384455 - DNA, 15 bp, Homo sapiens
gatccaggactggga

SEQ ID NO: 384456 - DNA, 15 bp, Homo sapiens
ggatccaggactggg

SEQ ID NO: 384457 - DNA, 15 bp, Homo sapiens
gggatccaggactgg

SEQ ID NO: 384458 - DNA, 15 bp, Homo sapiens
agggatccaggactg

SEQ ID NO: 384459 - DNA, 15 bp, Homo sapiens
gagggatccaggact

SEQ ID NO: 384460 - DNA, 15 bp, Homo sapiens
agagggatccaggac

SEQ ID NO: 384461 - DNA, 15 bp, Homo sapiens
tagagggatccagga

SEQ ID NO: 384462 - DNA, 15 bp, Homo sapiens
ctagagggatccagg

SEQ ID NO: 384463 - DNA, 15 bp, Homo sapiens
tctagagggatccag

SEQ ID NO: 384464 - DNA, 15 bp, Homo sapiens
ctctagagggatcca

SEQ ID NO: 384465 - DNA, 15 bp, Homo sapiens
cctctagagggatcc

SEQ ID NO: 384466 - DNA, 15 bp, Homo sapiens
gcctctagagggatc

SEQ ID NO: 384467 - DNA, 15 bp, Homo sapiens
agcctctagagggat

SEQ ID NO: 384468 - DNA, 15 bp, Homo sapiens
gagcctctagaggga

SEQ ID NO: 384469 - DNA, 15 bp, Homo sapiens
ggagcctctagaggg

SEQ ID NO: 384470 - DNA, 15 bp, Homo sapiens
gggagcctctagagg

SEQ ID NO: 384471 - DNA, 15 bp, Homo sapiens
tgggagcctctagag

SEQ ID NO: 384472 - DNA, 15 bp, Homo sapiens
ctgggagcctctaga

SEQ ID NO: 384473 - DNA, 15 bp, Homo sapiens
cctgggagcctctag

SEQ ID NO: 384474 - DNA, 15 bp, Homo sapiens
ccctgggagcctcta

SEQ ID NO: 384475 - DNA, 15 bp, Homo sapiens
cccctgggagcctct

SEQ ID NO: 384476 - DNA, 15 bp, Homo sapiens
tcccctgggagcctc

SEQ ID NO: 384477 - DNA, 15 bp, Homo sapiens
atcccctgggagcct

SEQ ID NO: 384478 - DNA, 15 bp, Homo sapiens
tatcccctgggagcc

SEQ ID NO: 384479 - DNA, 15 bp, Homo sapiens
ttatcccctgggagc

SEQ ID NO: 384480 - DNA, 15 bp, Homo sapiens
attatcccctgggag

SEQ ID NO: 384481 - DNA, 15 bp, Homo sapiens
cattatcccctggga

SEQ ID NO: 384482 - DNA, 15 bp, Homo sapiens
ccattatcccctggg

SEQ ID NO: 384483 - DNA, 15 bp, Homo sapiens
cccattatcccctgg

SEQ ID NO: 384484 - DNA, 15 bp, Homo sapiens
acccattatcccctg

SEQ ID NO: 384485 - DNA, 15 bp, Homo sapiens
aacccattatcccct

SEQ ID NO: 384486 - DNA, 15 bp, Homo sapiens
gaacccattatcccc

SEQ ID NO: 384487 - DNA, 15 bp, Homo sapiens
tgaacccattatccc

SEQ ID NO: 384488 - DNA, 15 bp, Homo sapiens
ttgaacccattatcc

SEQ ID NO: 384489 - DNA, 15 bp, Homo sapiens
tttgaacccattatc

SEQ ID NO: 384490 - DNA, 15 bp, Homo sapiens
atttgaacccattat

SEQ ID NO: 384491 - DNA, 15 bp, Homo sapiens
catttgaacccatta

SEQ ID NO: 384492 - DNA, 15 bp, Homo sapiens
ccatttgaacccatt

SEQ ID NO: 384493 - DNA, 15 bp, Homo sapiens
cccatttgaacccat

SEQ ID NO: 384494 - DNA, 15 bp, Homo sapiens
acccatttgaaccca

SEQ ID NO: 384495 - DNA, 15 bp, Homo sapiens
cacccatttgaaccc

SEQ ID NO: 384496 - DNA, 15 bp, Homo sapiens
acacccatttgaacc

SEQ ID NO: 384497 - DNA, 15 bp, Homo sapiens
aacacccatttgaac

SEQ ID NO: 384498 - DNA, 15 bp, Homo sapiens
gaacacccatttgaa

SEQ ID NO: 384499 - DNA, 15 bp, Homo sapiens
agaacacccatttga

SEQ ID NO: 384500 - DNA, 15 bp, Homo sapiens
cagaacacccatttg

SEQ ID NO: 384501 - DNA, 15 bp, Homo sapiens
acagaacacccattt

SEQ ID NO: 384502 - DNA, 15 bp, Homo sapiens
cacagaacacccatt

SEQ ID NO: 384503 - DNA, 15 bp, Homo sapiens
acacagaacacccat

SEQ ID NO: 384504 - DNA, 15 bp, Homo sapiens
cacacagaacaccca

SEQ ID NO: 384505 - DNA, 15 bp, Homo sapiens
acacacagaacaccc

SEQ ID NO: 384506 - DNA, 15 bp, Homo sapiens
gacacacagaacacc

SEQ ID NO: 384507 - DNA, 15 bp, Homo sapiens
tgacacacagaacac

SEQ ID NO: 384508 - DNA, 15 bp, Homo sapiens
gtgacacacagaaca

SEQ ID NO: 384509 - DNA, 15 bp, Homo sapiens
ggtgacacacagaac

SEQ ID NO: 384510 - DNA, 15 bp, Homo sapiens
gggtgacacacagaa

SEQ ID NO: 384511 - DNA, 15 bp, Homo sapiens
tgggtgacacacaga

SEQ ID NO: 384512 - DNA, 15 bp, Homo sapiens
ctgggtgacacacag

SEQ ID NO: 384513 - DNA, 15 bp, Homo sapiens
actgggtgacacaca

SEQ ID NO: 384514 - DNA, 15 bp, Homo sapiens
aactgggtgacacac

SEQ ID NO: 384515 - DNA, 15 bp, Homo sapiens
gaactgggtgacaca

SEQ ID NO: 384516 - DNA, 15 bp, Homo sapiens
agaactgggtgacac

SEQ ID NO: 384517 - DNA, 15 bp, Homo sapiens
cagaactgggtgaca

SEQ ID NO: 384518 - DNA, 15 bp, Homo sapiens
tcagaactgggtgac

SEQ ID NO: 384519 - DNA, 15 bp, Homo sapiens
ctcagaactgggtga

SEQ ID NO: 384520 - DNA, 15 bp, Homo sapiens
tctcagaactgggtg

SEQ ID NO: 384521 - DNA, 15 bp, Homo sapiens
atctcagaactgggt

SEQ ID NO: 384522 - DNA, 15 bp, Homo sapiens
catctcagaactggg

SEQ ID NO: 384523 - DNA, 15 bp, Homo sapiens
acatctcagaactgg

SEQ ID NO: 384524 - DNA, 15 bp, Homo sapiens
cacatctcagaactg

SEQ ID NO: 384525 - DNA, 15 bp, Homo sapiens
acacatctcagaact

SEQ ID NO: 384526 - DNA, 15 bp, Homo sapiens
tacacatctcagaac

SEQ ID NO: 384527 - DNA, 15 bp, Homo sapiens
atacacatctcagaa

SEQ ID NO: 384528 - DNA, 15 bp, Homo sapiens
catacacatctcaga

SEQ ID NO: 384529 - DNA, 15 bp, Homo sapiens
acatacacatctcag

SEQ ID NO: 384530 - DNA, 15 bp, Homo sapiens
cacatacacatctca

SEQ ID NO: 384531 - DNA, 15 bp, Homo sapiens
acacatacacatctc

SEQ ID NO: 384532 - DNA, 15 bp, Homo sapiens
cacacatacacatct

SEQ ID NO: 384533 - DNA, 15 bp, Homo sapiens
gcacacatacacatc

SEQ ID NO: 384534 - DNA, 15 bp, Homo sapiens
tgcacacatacacat

SEQ ID NO: 384535 - DNA, 15 bp, Homo sapiens
atgcacacatacaca

SEQ ID NO: 384536 - DNA, 15 bp, Homo sapiens
catgcacacatacac

SEQ ID NO: 384537 - DNA, 15 bp, Homo sapiens
acatgcacacataca

SEQ ID NO: 384538 - DNA, 15 bp, Homo sapiens
cacatgcacacatac

SEQ ID NO: 384539 - DNA, 15 bp, Homo sapiens
acacatgcacacata

SEQ ID NO: 384540 - DNA, 15 bp, Homo sapiens
cacacatgcacacat

SEQ ID NO: 384541 - DNA, 15 bp, Homo sapiens
acacacatgcacaca

SEQ ID NO: 384542 - DNA, 15 bp, Homo sapiens
cacacacatgcacac

SEQ ID NO: 384543 - DNA, 15 bp, Homo sapiens
ccacacacatgcaca

SEQ ID NO: 384544 - DNA, 15 bp, Homo sapiens
accacacacatgcac

SEQ ID NO: 384545 - DNA, 15 bp, Homo sapiens
gaccacacacatgca

SEQ ID NO: 384546 - DNA, 15 bp, Homo sapiens
agaccacacacatgc

SEQ ID NO: 384547 - DNA, 15 bp, Homo sapiens
gagaccacacacatg

SEQ ID NO: 384548 - DNA, 15 bp, Homo sapiens
ggagaccacacacat

SEQ ID NO: 384549 - DNA, 15 bp, Homo sapiens
aggagaccacacaca

SEQ ID NO: 384550 - DNA, 15 bp, Homo sapiens
gaggagaccacacac

SEQ ID NO: 384551 - DNA, 15 bp, Homo sapiens
tgaggagaccacaca

SEQ ID NO: 384552 - DNA, 15 bp, Homo sapiens
ctgaggagaccacac

SEQ ID NO: 384553 - DNA, 15 bp, Homo sapiens
gctgaggagaccaca

SEQ ID NO: 384554 - DNA, 15 bp, Homo sapiens
cgctgaggagaccac

SEQ ID NO: 384555 - DNA, 15 bp, Homo sapiens
acgctgaggagacca

SEQ ID NO: 384556 - DNA, 15 bp, Homo sapiens
cacgctgaggagacc

SEQ ID NO: 384557 - DNA, 15 bp, Homo sapiens
acacgctgaggagac

SEQ ID NO: 384558 - DNA, 15 bp, Homo sapiens
cacacgctgaggaga

SEQ ID NO: 384559 - DNA, 15 bp, Homo sapiens
ccacacgctgaggag

SEQ ID NO: 384560 - DNA, 15 bp, Homo sapiens
tccacacgctgagga

SEQ ID NO: 384561 - DNA, 15 bp, Homo sapiens
gtccacacgctgagg

SEQ ID NO: 384562 - DNA, 15 bp, Homo sapiens
ggtccacacgctgag

SEQ ID NO: 384563 - DNA, 15 bp, Homo sapiens
gggtccacacgctga

SEQ ID NO: 384564 - DNA, 15 bp, Homo sapiens
tgggtccacacgctg

SEQ ID NO: 384565 - DNA, 15 bp, Homo sapiens
ctgggtccacacgct

SEQ ID NO: 384566 - DNA, 15 bp, Homo sapiens
cctgggtccacacgc

SEQ ID NO: 384567 - DNA, 15 bp, Homo sapiens
tcctgggtccacacg

SEQ ID NO: 384568 - DNA, 15 bp, Homo sapiens
ttcctgggtccacac

SEQ ID NO: 384569 - DNA, 15 bp, Homo sapiens
attcctgggtccaca

SEQ ID NO: 384570 - DNA, 15 bp, Homo sapiens
gattcctgggtccac

SEQ ID NO: 384571 - DNA, 15 bp, Homo sapiens
ggattcctgggtcca

SEQ ID NO: 384572 - DNA, 15 bp, Homo sapiens
tggattcctgggtcc

SEQ ID NO: 384573 - DNA, 15 bp, Homo sapiens
ttggattcctgggtc

SEQ ID NO: 384574 - DNA, 15 bp, Homo sapiens
cttggattcctgggt

SEQ ID NO: 384575 - DNA, 15 bp, Homo sapiens
acttggattcctggg

SEQ ID NO: 384576 - DNA, 15 bp, Homo sapiens
cacttggattcctgg

SEQ ID NO: 384577 - DNA, 15 bp, Homo sapiens
gcacttggattcctg

SEQ ID NO: 384578 - DNA, 15 bp, Homo sapiens
ggcacttggattcct

SEQ ID NO: 384579 - DNA, 15 bp, Homo sapiens
tggcacttggattcc

SEQ ID NO: 384580 - DNA, 15 bp, Homo sapiens
gtggcacttggattc

SEQ ID NO: 384581 - DNA, 15 bp, Homo sapiens
ggtggcacttggatt

SEQ ID NO: 384582 - DNA, 15 bp, Homo sapiens
aggtggcacttggat

SEQ ID NO: 384583 - DNA, 15 bp, Homo sapiens
caggtggcacttgga

SEQ ID NO: 384584 - DNA, 15 bp, Homo sapiens
tcaggtggcacttgg

SEQ ID NO: 384585 - DNA, 15 bp, Homo sapiens
atcaggtggcacttg

SEQ ID NO: 384586 - DNA, 15 bp, Homo sapiens
aatcaggtggcactt

SEQ ID NO: 384587 - DNA, 15 bp, Homo sapiens
caatcaggtggcact

SEQ ID NO: 384588 - DNA, 15 bp, Homo sapiens
tcaatcaggtggcac

SEQ ID NO: 384589 - DNA, 15 bp, Homo sapiens
ctcaatcaggtggca

SEQ ID NO: 384590 - DNA, 15 bp, Homo sapiens
tctcaatcaggtggc

SEQ ID NO: 384591 - DNA, 15 bp, Homo sapiens
gtctcaatcaggtgg

SEQ ID NO: 384592 - DNA, 15 bp, Homo sapiens
ggtctcaatcaggtg

SEQ ID NO: 384593 - DNA, 15 bp, Homo sapiens
tggtctcaatcaggt

SEQ ID NO: 384594 - DNA, 15 bp, Homo sapiens
ttggtctcaatcagg

SEQ ID NO: 384595 - DNA, 15 bp, Homo sapiens
gttggtctcaatcag

SEQ ID NO: 384596 - DNA, 15 bp, Homo sapiens
tgttggtctcaatca

SEQ ID NO: 384597 - DNA, 15 bp, Homo sapiens
atgttggtctcaatc

SEQ ID NO: 384598 - DNA, 15 bp, Homo sapiens
gatgttggtctcaat

SEQ ID NO: 384599 - DNA, 15 bp, Homo sapiens
tgatgttggtctcaa

SEQ ID NO: 384600 - DNA, 15 bp, Homo sapiens
ctgatgttggtctca

SEQ ID NO: 384601 - DNA, 15 bp, Homo sapiens
cctgatgttggtctc

SEQ ID NO: 384602 - DNA, 15 bp, Homo sapiens
ccctgatgttggtct

SEQ ID NO: 384603 - DNA, 15 bp, Homo sapiens
tccctgatgttggtc

SEQ ID NO: 384604 - DNA, 15 bp, Homo sapiens
gtccctgatgttggt

SEQ ID NO: 384605 - DNA, 15 bp, Homo sapiens
ggtccctgatgttgg

SEQ ID NO: 384606 - DNA, 15 bp, Homo sapiens
tggtccctgatgttg

SEQ ID NO: 384607 - DNA, 15 bp, Homo sapiens
ctggtccctgatgtt

SEQ ID NO: 384608 - DNA, 15 bp, Homo sapiens
cctggtccctgatgt

SEQ ID NO: 384609 - DNA, 15 bp, Homo sapiens
tcctggtccctgatg

SEQ ID NO: 384610 - DNA, 15 bp, Homo sapiens
ctcctggtccctgat

SEQ ID NO: 384611 - DNA, 15 bp, Homo sapiens
cctcctggtccctga

SEQ ID NO: 384612 - DNA, 15 bp, Homo sapiens
tcctcctggtccctg

SEQ ID NO: 384613 - DNA, 15 bp, Homo sapiens
ctcctcctggtccct

SEQ ID NO: 384614 - DNA, 15 bp, Homo sapiens
gctcctcctggtccc

SEQ ID NO: 384615 - DNA, 15 bp, Homo sapiens
agctcctcctggtcc

SEQ ID NO: 384616 - DNA, 15 bp, Homo sapiens
cagctcctcctggtc

SEQ ID NO: 384617 - DNA, 15 bp, Homo sapiens
tcagctcctcctggt

SEQ ID NO: 384618 - DNA, 15 bp, Homo sapiens
ttcagctcctcctgg

SEQ ID NO: 384619 - DNA, 15 bp, Homo sapiens
cttcagctcctcctg

SEQ ID NO: 384620 - DNA, 15 bp, Homo sapiens
ccttcagctcctcct

SEQ ID NO: 384621 - DNA, 15 bp, Homo sapiens
cccttcagctcctcc

SEQ ID NO: 384622 - DNA, 15 bp, Homo sapiens
gcccttcagctcctc

SEQ ID NO: 384623 - DNA, 15 bp, Homo sapiens
tgcccttcagctcct

SEQ ID NO: 384624 - DNA, 15 bp, Homo sapiens
ttgcccttcagctcc

SEQ ID NO: 384625 - DNA, 15 bp, Homo sapiens
cttgcccttcagctc

SEQ ID NO: 384626 - DNA, 15 bp, Homo sapiens
tcttgcccttcagct

SEQ ID NO: 384627 - DNA, 15 bp, Homo sapiens
ttcttgcccttcagc

SEQ ID NO: 384628 - DNA, 15 bp, Homo sapiens
cttcttgcccttcag

SEQ ID NO: 384629 - DNA, 15 bp, Homo sapiens
ccttcttgcccttca

SEQ ID NO: 384630 - DNA, 15 bp, Homo sapiens
accttcttgcccttc

SEQ ID NO: 384631 - DNA, 15 bp, Homo sapiens
caccttcttgccctt

SEQ ID NO: 384632 - DNA, 15 bp, Homo sapiens
gcaccttcttgccct

SEQ ID NO: 384633 - DNA, 15 bp, Homo sapiens
ggcaccttcttgccc

SEQ ID NO: 384634 - DNA, 15 bp, Homo sapiens
gggcaccttcttgcc

SEQ ID NO: 384635 - DNA, 15 bp, Homo sapiens
ggggcaccttcttgc

SEQ ID NO: 384636 - DNA, 15 bp, Homo sapiens
tggggcaccttcttg

SEQ ID NO: 384637 - DNA, 15 bp, Homo sapiens
ctggggcaccttctt

SEQ ID NO: 384638 - DNA, 15 bp, Homo sapiens
actggggcaccttct

SEQ ID NO: 384639 - DNA, 15 bp, Homo sapiens
tactggggcaccttc

SEQ ID NO: 384640 - DNA, 15 bp, Homo sapiens
gtactggggcacctt

SEQ ID NO: 384641 - DNA, 15 bp, Homo sapiens
ggtactggggcacct

SEQ ID NO: 384642 - DNA, 15 bp, Homo sapiens
gggtactggggcacc

SEQ ID NO: 384643 - DNA, 15 bp, Homo sapiens
tgggtactggggcac

SEQ ID NO: 384644 - DNA, 15 bp, Homo sapiens
atgggtactggggca

SEQ ID NO: 384645 - DNA, 15 bp, Homo sapiens
catgggtactggggc

SEQ ID NO: 384646 - DNA, 15 bp, Homo sapiens
gcatgggtactgggg

SEQ ID NO: 384647 - DNA, 15 bp, Homo sapiens
ggcatgggtactggg

SEQ ID NO: 384648 - DNA, 15 bp, Homo sapiens
aggcatgggtactgg

SEQ ID NO: 384649 - DNA, 15 bp, Homo sapiens
caggcatgggtactg

SEQ ID NO: 384650 - DNA, 15 bp, Homo sapiens
acaggcatgggtact

SEQ ID NO: 384651 - DNA, 15 bp, Homo sapiens
cacaggcatgggtac

SEQ ID NO: 384652 - DNA, 15 bp, Homo sapiens
ccacaggcatgggta

SEQ ID NO: 384653 - DNA, 15 bp, Homo sapiens
cccacaggcatgggt

SEQ ID NO: 384654 - DNA, 15 bp, Homo sapiens
acccacaggcatggg

SEQ ID NO: 384655 - DNA, 15 bp, Homo sapiens
gacccacaggcatgg

SEQ ID NO: 384656 - DNA, 15 bp, Homo sapiens
tgacccacaggcatg

SEQ ID NO: 384657 - DNA, 15 bp, Homo sapiens
ttgacccacaggcat

SEQ ID NO: 384658 - DNA, 15 bp, Homo sapiens
gttgacccacaggca

SEQ ID NO: 384659 - DNA, 15 bp, Homo sapiens
cgttgacccacaggc

SEQ ID NO: 384660 - DNA, 15 bp, Homo sapiens
acgttgacccacagg

SEQ ID NO: 384661 - DNA, 15 bp, Homo sapiens
cacgttgacccacag

SEQ ID NO: 384662 - DNA, 15 bp, Homo sapiens
acacgttgacccaca

SEQ ID NO: 384663 - DNA, 15 bp, Homo sapiens
gacacgttgacccac

SEQ ID NO: 384664 - DNA, 15 bp, Homo sapiens
tgacacgttgaccca

SEQ ID NO: 384665 - DNA, 15 bp, Homo sapiens
ctgacacgttgaccc

SEQ ID NO: 384666 - DNA, 15 bp, Homo sapiens
gctgacacgttgacc

SEQ ID NO: 384667 - DNA, 15 bp, Homo sapiens
agctgacacgttgac

SEQ ID NO: 384668 - DNA, 15 bp, Homo sapiens
cagctgacacgttga

SEQ ID NO: 384669 - DNA, 15 bp, Homo sapiens
gcagctgacacgttg

SEQ ID NO: 384670 - DNA, 15 bp, Homo sapiens
ggcagctgacacgtt

SEQ ID NO: 384671 - DNA, 15 bp, Homo sapiens
cggcagctgacacgt

SEQ ID NO: 384672 - DNA, 15 bp, Homo sapiens
ccggcagctgacacg

SEQ ID NO: 384673 - DNA, 15 bp, Homo sapiens
gccggcagctgacac

SEQ ID NO: 384674 - DNA, 15 bp, Homo sapiens
tgccggcagctgaca

SEQ ID NO: 384675 - DNA, 15 bp, Homo sapiens
ctgccggcagctgac

SEQ ID NO: 384676 - DNA, 15 bp, Homo sapiens
cctgccggcagctga

SEQ ID NO: 384677 - DNA, 15 bp, Homo sapiens
acctgccggcagctg

SEQ ID NO: 384678 - DNA, 15 bp, Homo sapiens
cacctgccggcagct

SEQ ID NO: 384679 - DNA, 15 bp, Homo sapiens
ccacctgccggcagc

SEQ ID NO: 384680 - DNA, 15 bp, Homo sapiens
cccacctgccggcag

SEQ ID NO: 384681 - DNA, 15 bp, Homo sapiens
gcccacctgccggca

SEQ ID NO: 384682 - DNA, 15 bp, Homo sapiens
agcccacctgccggc

SEQ ID NO: 384683 - DNA, 15 bp, Homo sapiens
cagcccacctgccgg

SEQ ID NO: 384684 - DNA, 15 bp, Homo sapiens
acagcccacctgccg

SEQ ID NO: 384685 - DNA, 15 bp, Homo sapiens
cacagcccacctgcc

SEQ ID NO: 384686 - DNA, 15 bp, Homo sapiens
gcacagcccacctgc

SEQ ID NO: 384687 - DNA, 15 bp, Homo sapiens
agcacagcccacctg

SEQ ID NO: 384688 - DNA, 15 bp, Homo sapiens
cagcacagcccacct

SEQ ID NO: 384689 - DNA, 15 bp, Homo sapiens
acagcacagcccacc

SEQ ID NO: 384690 - DNA, 15 bp, Homo sapiens
tacagcacagcccac

SEQ ID NO: 384691 - DNA, 15 bp, Homo sapiens
gtacagcacagccca

SEQ ID NO: 384692 - DNA, 15 bp, Homo sapiens
ggtacagcacagccc

SEQ ID NO: 384693 - DNA, 15 bp, Homo sapiens
tggtacagcacagcc

SEQ ID NO: 384694 - DNA, 15 bp, Homo sapiens
gtggtacagcacagc

SEQ ID NO: 384695 - DNA, 15 bp, Homo sapiens
tgtggtacagcacag

SEQ ID NO: 384696 - DNA, 15 bp, Homo sapiens
gtgtggtacagcaca

SEQ ID NO: 384697 - DNA, 15 bp, Homo sapiens
cgtgtggtacagcac

SEQ ID NO: 384698 - DNA, 15 bp, Homo sapiens
ccgtgtggtacagca

SEQ ID NO: 384699 - DNA, 15 bp, Homo sapiens
tccgtgtggtacagc

SEQ ID NO: 384700 - DNA, 15 bp, Homo sapiens
ctccgtgtggtacag

SEQ ID NO: 384701 - DNA, 15 bp, Homo sapiens
cctccgtgtggtaca

SEQ ID NO: 384702 - DNA, 15 bp, Homo sapiens
tcctccgtgtggtac

SEQ ID NO: 384703 - DNA, 15 bp, Homo sapiens
gtcctccgtgtggta

SEQ ID NO: 384704 - DNA, 15 bp, Homo sapiens
tgtcctccgtgtggt

SEQ ID NO: 384705 - DNA, 15 bp, Homo sapiens
gtgtcctccgtgtgg

SEQ ID NO: 384706 - DNA, 15 bp, Homo sapiens
agtgtcctccgtgtg

SEQ ID NO: 384707 - DNA, 15 bp, Homo sapiens
gagtgtcctccgtgt

SEQ ID NO: 384708 - DNA, 15 bp, Homo sapiens
cgagtgtcctccgtg

SEQ ID NO: 384709 - DNA, 15 bp, Homo sapiens
ccgagtgtcctccgt

SEQ ID NO: 384710 - DNA, 15 bp, Homo sapiens
cccgagtgtcctccg

SEQ ID NO: 384711 - DNA, 15 bp, Homo sapiens
tcccgagtgtcctcc

SEQ ID NO: 384712 - DNA, 15 bp, Homo sapiens
gtcccgagtgtcctc

SEQ ID NO: 384713 - DNA, 15 bp, Homo sapiens
ggtcccgagtgtcct

SEQ ID NO: 384714 - DNA, 15 bp, Homo sapiens
tggtcccgagtgtcc

SEQ ID NO: 384715 - DNA, 15 bp, Homo sapiens
ctggtcccgagtgtc

SEQ ID NO: 384716 - DNA, 15 bp, Homo sapiens
tctggtcccgagtgt

SEQ ID NO: 384717 - DNA, 15 bp, Homo sapiens
ttctggtcccgagtg

SEQ ID NO: 384718 - DNA, 15 bp, Homo sapiens
gttctggtcccgagt

SEQ ID NO: 384719 - DNA, 15 bp, Homo sapiens
ggttctggtcccgag

SEQ ID NO: 384720 - DNA, 15 bp, Homo sapiens
tggttctggtcccga

SEQ ID NO: 384721 - DNA, 15 bp, Homo sapiens
ctggttctggtcccg

SEQ ID NO: 384722 - DNA, 15 bp, Homo sapiens
gctggttctggtccc

SEQ ID NO: 384723 - DNA, 15 bp, Homo sapiens
tgctggttctggtcc

SEQ ID NO: 384724 - DNA, 15 bp, Homo sapiens
ctgctggttctggtc

SEQ ID NO: 384725 - DNA, 15 bp, Homo sapiens
cctgctggttctggt

SEQ ID NO: 384726 - DNA, 15 bp, Homo sapiens
acctgctggttctgg

SEQ ID NO: 384727 - DNA, 15 bp, Homo sapiens
tacctgctggttctg

SEQ ID NO: 384728 - DNA, 15 bp, Homo sapiens
gtacctgctggttct

SEQ ID NO: 384729 - DNA, 15 bp, Homo sapiens
agtacctgctggttc

SEQ ID NO: 384730 - DNA, 15 bp, Homo sapiens
cagtacctgctggtt

SEQ ID NO: 384731 - DNA, 15 bp, Homo sapiens
tcagtacctgctggt

SEQ ID NO: 384732 - DNA, 15 bp, Homo sapiens
ttcagtacctgctgg

SEQ ID NO: 384733 - DNA, 15 bp, Homo sapiens
gttcagtacctgctg

SEQ ID NO: 384734 - DNA, 15 bp, Homo sapiens
agttcagtacctgct

SEQ ID NO: 384735 - DNA, 15 bp, Homo sapiens
cagttcagtacctgc

SEQ ID NO: 384736 - DNA, 15 bp, Homo sapiens
ccagttcagtacctg

SEQ ID NO: 384737 - DNA, 15 bp, Homo sapiens
tccagttcagtacct

SEQ ID NO: 384738 - DNA, 15 bp, Homo sapiens
ctccagttcagtacc

SEQ ID NO: 384739 - DNA, 15 bp, Homo sapiens
cctccagttcagtac

SEQ ID NO: 384740 - DNA, 15 bp, Homo sapiens
ccctccagttcagta

SEQ ID NO: 384741 - DNA, 15 bp, Homo sapiens
tccctccagttcagt

SEQ ID NO: 384742 - DNA, 15 bp, Homo sapiens
atccctccagttcag

SEQ ID NO: 384743 - DNA, 15 bp, Homo sapiens
catccctccagttca

SEQ ID NO: 384744 - DNA, 15 bp, Homo sapiens
ccatccctccagttc

SEQ ID NO: 384745 - DNA, 15 bp, Homo sapiens
cccatccctccagtt

SEQ ID NO: 384746 - DNA, 15 bp, Homo sapiens
ccccatccctccagt

SEQ ID NO: 384747 - DNA, 15 bp, Homo sapiens
tccccatccctccag

SEQ ID NO: 384748 - DNA, 15 bp, Homo sapiens
gtccccatccctcca

SEQ ID NO: 384749 - DNA, 15 bp, Homo sapiens
tgtccccatccctcc

SEQ ID NO: 384750 - DNA, 15 bp, Homo sapiens
gtgtccccatccctc

SEQ ID NO: 384751 - DNA, 15 bp, Homo sapiens
tgtgtccccatccct

SEQ ID NO: 384752 - DNA, 15 bp, Homo sapiens
atgtgtccccatccc

SEQ ID NO: 384753 - DNA, 15 bp, Homo sapiens
gatgtgtccccatcc

SEQ ID NO: 384754 - DNA, 15 bp, Homo sapiens
ggatgtgtccccatc

SEQ ID NO: 384755 - DNA, 15 bp, Homo sapiens
gggatgtgtccccat

SEQ ID NO: 384756 - DNA, 15 bp, Homo sapiens
agggatgtgtcccca

SEQ ID NO: 384757 - DNA, 15 bp, Homo sapiens
aagggatgtgtcccc

SEQ ID NO: 384758 - DNA, 15 bp, Homo sapiens
aaagggatgtgtccc

SEQ ID NO: 384759 - DNA, 15 bp, Homo sapiens
taaagggatgtgtcc

SEQ ID NO: 384760 - DNA, 15 bp, Homo sapiens
ataaagggatgtgtc

SEQ ID NO: 384761 - DNA, 15 bp, Homo sapiens
gataaagggatgtgt

SEQ ID NO: 384762 - DNA, 15 bp, Homo sapiens
ggataaagggatgtg

SEQ ID NO: 384763 - DNA, 15 bp, Homo sapiens
gggataaagggatgt

SEQ ID NO: 384764 - DNA, 15 bp, Homo sapiens
agggataaagggatg

SEQ ID NO: 384765 - DNA, 15 bp, Homo sapiens
cagggataaagggat

SEQ ID NO: 384766 - DNA, 15 bp, Homo sapiens
acagggataaaggga

SEQ ID NO: 384767 - DNA, 15 bp, Homo sapiens
gacagggataaaggg

SEQ ID NO: 384768 - DNA, 15 bp, Homo sapiens
tgacagggataaagg

SEQ ID NO: 384769 - DNA, 15 bp, Homo sapiens
ctgacagggataaag

SEQ ID NO: 384770 - DNA, 15 bp, Homo sapiens
cctgacagggataaa

SEQ ID NO: 384771 - DNA, 15 bp, Homo sapiens
acctgacagggataa

SEQ ID NO: 384772 - DNA, 15 bp, Homo sapiens
cacctgacagggata

SEQ ID NO: 384773 - DNA, 15 bp, Homo sapiens
acacctgacagggat

SEQ ID NO: 384774 - DNA, 15 bp, Homo sapiens
cacacctgacaggga

SEQ ID NO: 384775 - DNA, 15 bp, Homo sapiens
acacacctgacaggg

SEQ ID NO: 384776 - DNA, 15 bp, Homo sapiens
cacacacctgacagg

SEQ ID NO: 384777 - DNA, 15 bp, Homo sapiens
tcacacacctgacag

SEQ ID NO: 384778 - DNA, 15 bp, Homo sapiens
ctcacacacctgaca

SEQ ID NO: 384779 - DNA, 15 bp, Homo sapiens
gctcacacacctgac

SEQ ID NO: 384780 - DNA, 15 bp, Homo sapiens
ggctcacacacctga

SEQ ID NO: 384781 - DNA, 15 bp, Homo sapiens
aggctcacacacctg

SEQ ID NO: 384782 - DNA, 15 bp, Homo sapiens
caggctcacacacct

SEQ ID NO: 384783 - DNA, 15 bp, Homo sapiens
acaggctcacacacc

SEQ ID NO: 384784 - DNA, 15 bp, Homo sapiens
aacaggctcacacac

SEQ ID NO: 384785 - DNA, 15 bp, Homo sapiens
gaacaggctcacaca

SEQ ID NO: 384786 - DNA, 15 bp, Homo sapiens
ggaacaggctcacac

SEQ ID NO: 384787 - DNA, 15 bp, Homo sapiens
aggaacaggctcaca

SEQ ID NO: 384788 - DNA, 15 bp, Homo sapiens
taggaacaggctcac

SEQ ID NO: 384789 - DNA, 15 bp, Homo sapiens
ttaggaacaggctca

SEQ ID NO: 384790 - DNA, 15 bp, Homo sapiens
gttaggaacaggctc

SEQ ID NO: 384791 - DNA, 15 bp, Homo sapiens
agttaggaacaggct

SEQ ID NO: 384792 - DNA, 15 bp, Homo sapiens
cagttaggaacaggc

SEQ ID NO: 384793 - DNA, 15 bp, Homo sapiens
acagttaggaacagg

SEQ ID NO: 384794 - DNA, 15 bp, Homo sapiens
gacagttaggaacag

SEQ ID NO: 384795 - DNA, 15 bp, Homo sapiens
ggacagttaggaaca

SEQ ID NO: 384796 - DNA, 15 bp, Homo sapiens
gggacagttaggaac

SEQ ID NO: 384797 - DNA, 15 bp, Homo sapiens
agggacagttaggaa

SEQ ID NO: 384798 - DNA, 15 bp, Homo sapiens
cagggacagttagga

SEQ ID NO: 384799 - DNA, 15 bp, Homo sapiens
acagggacagttagg

SEQ ID NO: 384800 - DNA, 15 bp, Homo sapiens
gacagggacagttag

SEQ ID NO: 384801 - DNA, 15 bp, Homo sapiens
ggacagggacagtta

SEQ ID NO: 384802 - DNA, 15 bp, Homo sapiens
gggacagggacagtt

SEQ ID NO: 384803 - DNA, 15 bp, Homo sapiens
ggggacagggacagt

SEQ ID NO: 384804 - DNA, 15 bp, Homo sapiens
cggggacagggacag

SEQ ID NO: 384805 - DNA, 15 bp, Homo sapiens
tcggggacagggaca

SEQ ID NO: 384806 - DNA, 15 bp, Homo sapiens
ctcggggacagggac

SEQ ID NO: 384807 - DNA, 15 bp, Homo sapiens
cctcggggacaggga

SEQ ID NO: 384808 - DNA, 15 bp, Homo sapiens
gcctcggggacaggg

SEQ ID NO: 384809 - DNA, 15 bp, Homo sapiens
agcctcggggacagg

SEQ ID NO: 384810 - DNA, 15 bp, Homo sapiens
cagcctcggggacag

SEQ ID NO: 384811 - DNA, 15 bp, Homo sapiens
tcagcctcggggaca

SEQ ID NO: 384812 - DNA, 15 bp, Homo sapiens
ctcagcctcggggac

SEQ ID NO: 384813 - DNA, 15 bp, Homo sapiens
tctcagcctcgggga

SEQ ID NO: 384814 - DNA, 15 bp, Homo sapiens
ttctcagcctcgggg

SEQ ID NO: 384815 - DNA, 15 bp, Homo sapiens
tttctcagcctcggg

SEQ ID NO: 384816 - DNA, 15 bp, Homo sapiens
ctttctcagcctcgg

SEQ ID NO: 384817 - DNA, 15 bp, Homo sapiens
tctttctcagcctcg

SEQ ID NO: 384818 - DNA, 15 bp, Homo sapiens
atctttctcagcctc

SEQ ID NO: 384819 - DNA, 15 bp, Homo sapiens
gatctttctcagcct

SEQ ID NO: 384820 - DNA, 15 bp, Homo sapiens
tgatctttctcagcc

SEQ ID NO: 384821 - DNA, 15 bp, Homo sapiens
ttgatctttctcagc

SEQ ID NO: 384822 - DNA, 15 bp, Homo sapiens
gttgatctttctcag

SEQ ID NO: 384823 - DNA, 15 bp, Homo sapiens
ggttgatctttctca

SEQ ID NO: 384824 - DNA, 15 bp, Homo sapiens
gggttgatctttctc

SEQ ID NO: 384825 - DNA, 15 bp, Homo sapiens
tgggttgatctttct

SEQ ID NO: 384826 - DNA, 15 bp, Homo sapiens
gtgggttgatctttc

SEQ ID NO: 384827 - DNA, 15 bp, Homo sapiens
agtgggttgatcttt

SEQ ID NO: 384828 - DNA, 15 bp, Homo sapiens
aagtgggttgatctt

SEQ ID NO: 384829 - DNA, 15 bp, Homo sapiens
caagtgggttgatct

SEQ ID NO: 384830 - DNA, 15 bp, Homo sapiens
tcaagtgggttgatc

SEQ ID NO: 384831 - DNA, 15 bp, Homo sapiens
gtcaagtgggttgat

SEQ ID NO: 384832 - DNA, 15 bp, Homo sapiens
ggtcaagtgggttga

SEQ ID NO: 384833 - DNA, 15 bp, Homo sapiens
tggtcaagtgggttg

SEQ ID NO: 384834 - DNA, 15 bp, Homo sapiens
ctggtcaagtgggtt

SEQ ID NO: 384835 - DNA, 15 bp, Homo sapiens
cctggtcaagtgggt

SEQ ID NO: 384836 - DNA, 15 bp, Homo sapiens
acctggtcaagtggg

SEQ ID NO: 384837 - DNA, 15 bp, Homo sapiens
gacctggtcaagtgg

SEQ ID NO: 384838 - DNA, 15 bp, Homo sapiens
agacctggtcaagtg

SEQ ID NO: 384839 - DNA, 15 bp, Homo sapiens
gagacctggtcaagt

SEQ ID NO: 384840 - DNA, 15 bp, Homo sapiens
tgagacctggtcaag

SEQ ID NO: 384841 - DNA, 15 bp, Homo sapiens
gtgagacctggtcaa

SEQ ID NO: 384842 - DNA, 15 bp, Homo sapiens
tgtgagacctggtca

SEQ ID NO: 384843 - DNA, 15 bp, Homo sapiens
ctgtgagacctggtc

SEQ ID NO: 384844 - DNA, 15 bp, Homo sapiens
gctgtgagacctggt

SEQ ID NO: 384845 - DNA, 15 bp, Homo sapiens
agctgtgagacctgg

SEQ ID NO: 384846 - DNA, 15 bp, Homo sapiens
cagctgtgagacctg

SEQ ID NO: 384847 - DNA, 15 bp, Homo sapiens
ccagctgtgagacct

SEQ ID NO: 384848 - DNA, 15 bp, Homo sapiens
tccagctgtgagacc

SEQ ID NO: 384849 - DNA, 15 bp, Homo sapiens
ttccagctgtgagac

SEQ ID NO: 384850 - DNA, 15 bp, Homo sapiens
attccagctgtgaga

SEQ ID NO: 384851 - DNA, 15 bp, Homo sapiens
cattccagctgtgag

SEQ ID NO: 384852 - DNA, 15 bp, Homo sapiens
tcattccagctgtga

SEQ ID NO: 384853 - DNA, 15 bp, Homo sapiens
ctcattccagctgtg

SEQ ID NO: 384854 - DNA, 15 bp, Homo sapiens
tctcattccagctgt

SEQ ID NO: 384855 - DNA, 15 bp, Homo sapiens
gtctcattccagctg

SEQ ID NO: 384856 - DNA, 15 bp, Homo sapiens
agtctcattccagct

SEQ ID NO: 384857 - DNA, 15 bp, Homo sapiens
cagtctcattccagc

SEQ ID NO: 384858 - DNA, 15 bp, Homo sapiens
tcagtctcattccag

SEQ ID NO: 384859 - DNA, 15 bp, Homo sapiens
ctcagtctcattcca

SEQ ID NO: 384860 - DNA, 15 bp, Homo sapiens
gctcagtctcattcc

SEQ ID NO: 384861 - DNA, 15 bp, Homo sapiens
ggctcagtctcattc

SEQ ID NO: 384862 - DNA, 15 bp, Homo sapiens
tggctcagtctcatt

SEQ ID NO: 384863 - DNA, 15 bp, Homo sapiens
ctggctcagtctcat

SEQ ID NO: 384864 - DNA, 15 bp, Homo sapiens
gctggctcagtctca

SEQ ID NO: 384865 - DNA, 15 bp, Homo sapiens
ggctggctcagtctc

SEQ ID NO: 384866 - DNA, 15 bp, Homo sapiens
gggctggctcagtct

SEQ ID NO: 384867 - DNA, 15 bp, Homo sapiens
agggctggctcagtc

SEQ ID NO: 384868 - DNA, 15 bp, Homo sapiens
tagggctggctcagt

SEQ ID NO: 384869 - DNA, 15 bp, Homo sapiens
ctagggctggctcag

SEQ ID NO: 384870 - DNA, 15 bp, Homo sapiens
gctagggctggctca

SEQ ID NO: 384871 - DNA, 15 bp, Homo sapiens
agctagggctggctc

SEQ ID NO: 384872 - DNA, 15 bp, Homo sapiens
gagctagggctggct

SEQ ID NO: 384873 - DNA, 15 bp, Homo sapiens
agagctagggctggc

SEQ ID NO: 384874 - DNA, 15 bp, Homo sapiens
aagagctagggctgg

SEQ ID NO: 384875 - DNA, 15 bp, Homo sapiens
gaagagctagggctg

SEQ ID NO: 384876 - DNA, 15 bp, Homo sapiens
agaagagctagggct

SEQ ID NO: 384877 - DNA, 15 bp, Homo sapiens
cagaagagctagggc

SEQ ID NO: 384878 - DNA, 15 bp, Homo sapiens
acagaagagctaggg

SEQ ID NO: 384879 - DNA, 15 bp, Homo sapiens
cacagaagagctagg

SEQ ID NO: 384880 - DNA, 15 bp, Homo sapiens
acacagaagagctag

SEQ ID NO: 384881 - DNA, 15 bp, Homo sapiens
aacacagaagagcta

SEQ ID NO: 384882 - DNA, 15 bp, Homo sapiens
caacacagaagagct

SEQ ID NO: 384883 - DNA, 15 bp, Homo sapiens
ccaacacagaagagc

SEQ ID NO: 384884 - DNA, 15 bp, Homo sapiens
tccaacacagaagag

SEQ ID NO: 384885 - DNA, 15 bp, Homo sapiens
ctccaacacagaaga

SEQ ID NO: 384886 - DNA, 15 bp, Homo sapiens
actccaacacagaag

SEQ ID NO: 384887 - DNA, 15 bp, Homo sapiens
gactccaacacagaa

SEQ ID NO: 384888 - DNA, 15 bp, Homo sapiens
tgactccaacacaga

SEQ ID NO: 384889 - DNA, 15 bp, Homo sapiens
gtgactccaacacag

SEQ ID NO: 384890 - DNA, 15 bp, Homo sapiens
tgtgactccaacaca

SEQ ID NO: 384891 - DNA, 15 bp, Homo sapiens
gtgtgactccaacac

SEQ ID NO: 384892 - DNA, 15 bp, Homo sapiens
tgtgtgactccaaca

SEQ ID NO: 384893 - DNA, 15 bp, Homo sapiens
ctgtgtgactccaac

SEQ ID NO: 384894 - DNA, 15 bp, Homo sapiens
tctgtgtgactccaa

SEQ ID NO: 384895 - DNA, 15 bp, Homo sapiens
gtctgtgtgactcca

SEQ ID NO: 384896 - DNA, 15 bp, Homo sapiens
ggtctgtgtgactcc

SEQ ID NO: 384897 - DNA, 15 bp, Homo sapiens
aggtctgtgtgactc

SEQ ID NO: 384898 - DNA, 15 bp, Homo sapiens
caggtctgtgtgact

SEQ ID NO: 384899 - DNA, 15 bp, Homo sapiens
ccaggtctgtgtgac

SEQ ID NO: 384900 - DNA, 15 bp, Homo sapiens
cccaggtctgtgtga

SEQ ID NO: 384901 - DNA, 15 bp, Homo sapiens
acccaggtctgtgtg

SEQ ID NO: 384902 - DNA, 15 bp, Homo sapiens
aacccaggtctgtgt

SEQ ID NO: 384903 - DNA, 15 bp, Homo sapiens
aaacccaggtctgtg

SEQ ID NO: 384904 - DNA, 15 bp, Homo sapiens
caaacccaggtctgt

SEQ ID NO: 384905 - DNA, 15 bp, Homo sapiens
tcaaacccaggtctg

SEQ ID NO: 384906 - DNA, 15 bp, Homo sapiens
ttcaaacccaggtct

SEQ ID NO: 384907 - DNA, 15 bp, Homo sapiens
attcaaacccaggtc

SEQ ID NO: 384908 - DNA, 15 bp, Homo sapiens
gattcaaacccaggt

SEQ ID NO: 384909 - DNA, 15 bp, Homo sapiens
agattcaaacccagg

SEQ ID NO: 384910 - DNA, 15 bp, Homo sapiens
cagattcaaacccag

SEQ ID NO: 384911 - DNA, 15 bp, Homo sapiens
gcagattcaaaccca

SEQ ID NO: 384912 - DNA, 15 bp, Homo sapiens
ggcagattcaaaccc

SEQ ID NO: 384913 - DNA, 15 bp, Homo sapiens
cggcagattcaaacc

SEQ ID NO: 384914 - DNA, 15 bp, Homo sapiens
gcggcagattcaaac

SEQ ID NO: 384915 - DNA, 15 bp, Homo sapiens
agcggcagattcaaa

SEQ ID NO: 384916 - DNA, 15 bp, Homo sapiens
tagcggcagattcaa

SEQ ID NO: 384917 - DNA, 15 bp, Homo sapiens
ttagcggcagattca

SEQ ID NO: 384918 - DNA, 15 bp, Homo sapiens
gttagcggcagattc

SEQ ID NO: 384919 - DNA, 15 bp, Homo sapiens
agttagcggcagatt

SEQ ID NO: 384920 - DNA, 15 bp, Homo sapiens
cagttagcggcagat

SEQ ID NO: 384921 - DNA, 15 bp, Homo sapiens
ccagttagcggcaga

SEQ ID NO: 384922 - DNA, 15 bp, Homo sapiens
gccagttagcggcag

SEQ ID NO: 384923 - DNA, 15 bp, Homo sapiens
agccagttagcggca

SEQ ID NO: 384924 - DNA, 15 bp, Homo sapiens
cagccagttagcggc

SEQ ID NO: 384925 - DNA, 15 bp, Homo sapiens
acagccagttagcgg

SEQ ID NO: 384926 - DNA, 15 bp, Homo sapiens
cacagccagttagcg

SEQ ID NO: 384927 - DNA, 15 bp, Homo sapiens
acacagccagttagc

SEQ ID NO: 384928 - DNA, 15 bp, Homo sapiens
tacacagccagttag

SEQ ID NO: 384929 - DNA, 15 bp, Homo sapiens
ttacacagccagtta

SEQ ID NO: 384930 - DNA, 15 bp, Homo sapiens
tttacacagccagtt

SEQ ID NO: 384931 - DNA, 15 bp, Homo sapiens
gtttacacagccagt

SEQ ID NO: 384932 - DNA, 15 bp, Homo sapiens
tgtttacacagccag

SEQ ID NO: 384933 - DNA, 15 bp, Homo sapiens
atgtttacacagcca

SEQ ID NO: 384934 - DNA, 15 bp, Homo sapiens
tatgtttacacagcc

SEQ ID NO: 384935 - DNA, 15 bp, Homo sapiens
ctatgtttacacagc

SEQ ID NO: 384936 - DNA, 15 bp, Homo sapiens
cctatgtttacacag

SEQ ID NO: 384937 - DNA, 15 bp, Homo sapiens
gcctatgtttacaca

SEQ ID NO: 384938 - DNA, 15 bp, Homo sapiens
tgcctatgtttacac

SEQ ID NO: 384939 - DNA, 15 bp, Homo sapiens
ctgcctatgtttaca

SEQ ID NO: 384940 - DNA, 15 bp, Homo sapiens
cctgcctatgtttac

SEQ ID NO: 384941 - DNA, 15 bp, Homo sapiens
gcctgcctatgttta

SEQ ID NO: 384942 - DNA, 15 bp, Homo sapiens
ggcctgcctatgttt

SEQ ID NO: 384943 - DNA, 15 bp, Homo sapiens
tggcctgcctatgtt

SEQ ID NO: 384944 - DNA, 15 bp, Homo sapiens
gtggcctgcctatgt

SEQ ID NO: 384945 - DNA, 15 bp, Homo sapiens
agtggcctgcctatg

SEQ ID NO: 384946 - DNA, 15 bp, Homo sapiens
aagtggcctgcctat

SEQ ID NO: 384947 - DNA, 15 bp, Homo sapiens
taagtggcctgccta

SEQ ID NO: 384948 - DNA, 15 bp, Homo sapiens
ctaagtggcctgcct

SEQ ID NO: 384949 - DNA, 15 bp, Homo sapiens
gctaagtggcctgcc

SEQ ID NO: 384950 - DNA, 15 bp, Homo sapiens
ggctaagtggcctgc

SEQ ID NO: 384951 - DNA, 15 bp, Homo sapiens
aggctaagtggcctg

SEQ ID NO: 384952 - DNA, 15 bp, Homo sapiens
gaggctaagtggcct

SEQ ID NO: 384953 - DNA, 15 bp, Homo sapiens
agaggctaagtggcc

SEQ ID NO: 384954 - DNA, 15 bp, Homo sapiens
gagaggctaagtggc

SEQ ID NO: 384955 - DNA, 15 bp, Homo sapiens
tgagaggctaagtgg

SEQ ID NO: 384956 - DNA, 15 bp, Homo sapiens
gtgagaggctaagtg

SEQ ID NO: 384957 - DNA, 15 bp, Homo sapiens
ggtgagaggctaagt

SEQ ID NO: 384958 - DNA, 15 bp, Homo sapiens
aggtgagaggctaag

SEQ ID NO: 384959 - DNA, 15 bp, Homo sapiens
gaggtgagaggctaa

SEQ ID NO: 384960 - DNA, 15 bp, Homo sapiens
ggaggtgagaggcta

SEQ ID NO: 384961 - DNA, 15 bp, Homo sapiens
aggaggtgagaggct

SEQ ID NO: 384962 - DNA, 15 bp, Homo sapiens
gaggaggtgagaggc

SEQ ID NO: 384963 - DNA, 15 bp, Homo sapiens
tgaggaggtgagagg

SEQ ID NO: 384964 - DNA, 15 bp, Homo sapiens
ctgaggaggtgagag

SEQ ID NO: 384965 - DNA, 15 bp, Homo sapiens
actgaggaggtgaga

SEQ ID NO: 384966 - DNA, 15 bp, Homo sapiens
aactgaggaggtgag

SEQ ID NO: 384967 - DNA, 15 bp, Homo sapiens
aaactgaggaggtga

SEQ ID NO: 384968 - DNA, 15 bp, Homo sapiens
gaaactgaggaggtg

SEQ ID NO: 384969 - DNA, 15 bp, Homo sapiens
ggaaactgaggaggt

SEQ ID NO: 384970 - DNA, 15 bp, Homo sapiens
tggaaactgaggagg

SEQ ID NO: 384971 - DNA, 15 bp, Homo sapiens
gtggaaactgaggag

SEQ ID NO: 384972 - DNA, 15 bp, Homo sapiens
ggtggaaactgagga

SEQ ID NO: 384973 - DNA, 15 bp, Homo sapiens
gggtggaaactgagg

SEQ ID NO: 384974 - DNA, 15 bp, Homo sapiens
agggtggaaactgag

SEQ ID NO: 384975 - DNA, 15 bp, Homo sapiens
aagggtggaaactga

SEQ ID NO: 384976 - DNA, 15 bp, Homo sapiens
caagggtggaaactg

SEQ ID NO: 384977 - DNA, 15 bp, Homo sapiens
acaagggtggaaact

SEQ ID NO: 384978 - DNA, 15 bp, Homo sapiens
tacaagggtggaaac

SEQ ID NO: 384979 - DNA, 15 bp, Homo sapiens
ttacaagggtggaaa

SEQ ID NO: 384980 - DNA, 15 bp, Homo sapiens
tttacaagggtggaa

SEQ ID NO: 384981 - DNA, 15 bp, Homo sapiens
ctttacaagggtgga

SEQ ID NO: 384982 - DNA, 15 bp, Homo sapiens
actttacaagggtgg

SEQ ID NO: 384983 - DNA, 15 bp, Homo sapiens
cactttacaagggtg

SEQ ID NO: 384984 - DNA, 15 bp, Homo sapiens
ccactttacaagggt

SEQ ID NO: 384985 - DNA, 15 bp, Homo sapiens
tccactttacaaggg

SEQ ID NO: 384986 - DNA, 15 bp, Homo sapiens
ttccactttacaagg

SEQ ID NO: 384987 - DNA, 15 bp, Homo sapiens
attccactttacaag

SEQ ID NO: 384988 - DNA, 15 bp, Homo sapiens
cattccactttacaa

SEQ ID NO: 384989 - DNA, 15 bp, Homo sapiens
gcattccactttaca

SEQ ID NO: 384990 - DNA, 15 bp, Homo sapiens
agcattccactttac

SEQ ID NO: 384991 - DNA, 15 bp, Homo sapiens
tagcattccacttta

SEQ ID NO: 384992 - DNA, 15 bp, Homo sapiens
ttagcattccacttt

SEQ ID NO: 384993 - DNA, 15 bp, Homo sapiens
attagcattccactt

SEQ ID NO: 384994 - DNA, 15 bp, Homo sapiens
cattagcattccact

SEQ ID NO: 384995 - DNA, 15 bp, Homo sapiens
gcattagcattccac

SEQ ID NO: 384996 - DNA, 15 bp, Homo sapiens
agcattagcattcca

SEQ ID NO: 384997 - DNA, 15 bp, Homo sapiens
cagcattagcattcc

SEQ ID NO: 384998 - DNA, 15 bp, Homo sapiens
gcagcattagcattc

SEQ ID NO: 384999 - DNA, 15 bp, Homo sapiens
tgcagcattagcatt

SEQ ID NO: 385000 - DNA, 15 bp, Homo sapiens
gtgcagcattagcat

SEQ ID NO: 385001 - DNA, 15 bp, Homo sapiens
ggtgcagcattagca

SEQ ID NO: 385002 - DNA, 15 bp, Homo sapiens
aggtgcagcattagc

SEQ ID NO: 385003 - DNA, 15 bp, Homo sapiens
aaggtgcagcattag

SEQ ID NO: 385004 - DNA, 15 bp, Homo sapiens
caaggtgcagcatta

SEQ ID NO: 385005 - DNA, 15 bp, Homo sapiens
tcaaggtgcagcatt

SEQ ID NO: 385006 - DNA, 15 bp, Homo sapiens
ttcaaggtgcagcat

SEQ ID NO: 385007 - DNA, 15 bp, Homo sapiens
cttcaaggtgcagca

SEQ ID NO: 385008 - DNA, 15 bp, Homo sapiens
tcttcaaggtgcagc

SEQ ID NO: 385009 - DNA, 15 bp, Homo sapiens
ctcttcaaggtgcag

SEQ ID NO: 385010 - DNA, 15 bp, Homo sapiens
gctcttcaaggtgca

SEQ ID NO: 385011 - DNA, 15 bp, Homo sapiens
agctcttcaaggtgc

SEQ ID NO: 385012 - DNA, 15 bp, Homo sapiens
cagctcttcaaggtg

SEQ ID NO: 385013 - DNA, 15 bp, Homo sapiens
acagctcttcaaggt

SEQ ID NO: 385014 - DNA, 15 bp, Homo sapiens
aacagctcttcaagg

SEQ ID NO: 385015 - DNA, 15 bp, Homo sapiens
taacagctcttcaag

SEQ ID NO: 385016 - DNA, 15 bp, Homo sapiens
ataacagctcttcaa

SEQ ID NO: 385017 - DNA, 15 bp, Homo sapiens
gataacagctcttca

SEQ ID NO: 385018 - DNA, 15 bp, Homo sapiens
tgataacagctcttc

SEQ ID NO: 385019 - DNA, 15 bp, Homo sapiens
ttgataacagctctt

SEQ ID NO: 385020 - DNA, 15 bp, Homo sapiens
cttgataacagctct

SEQ ID NO: 385021 - DNA, 15 bp, Homo sapiens
acttgataacagctc

SEQ ID NO: 385022 - DNA, 15 bp, Homo sapiens
gacttgataacagct

SEQ ID NO: 385023 - DNA, 15 bp, Homo sapiens
tgacttgataacagc

SEQ ID NO: 385024 - DNA, 15 bp, Homo sapiens
ctgacttgataacag

SEQ ID NO: 385025 - DNA, 15 bp, Homo sapiens
tctgacttgataaca

SEQ ID NO: 385026 - DNA, 15 bp, Homo sapiens
ctctgacttgataac

SEQ ID NO: 385027 - DNA, 15 bp, Homo sapiens
tctctgacttgataa

SEQ ID NO: 385028 - DNA, 15 bp, Homo sapiens
gtctctgacttgata

SEQ ID NO: 385029 - DNA, 15 bp, Homo sapiens
cgtctctgacttgat

SEQ ID NO: 385030 - DNA, 15 bp, Homo sapiens
gcgtctctgacttga

SEQ ID NO: 385031 - DNA, 15 bp, Homo sapiens
agcgtctctgacttg

SEQ ID NO: 385032 - DNA, 15 bp, Homo sapiens
cagcgtctctgactt

SEQ ID NO: 385033 - DNA, 15 bp, Homo sapiens
acagcgtctctgact

SEQ ID NO: 385034 - DNA, 15 bp, Homo sapiens
tacagcgtctctgac

SEQ ID NO: 385035 - DNA, 15 bp, Homo sapiens
atacagcgtctctga

SEQ ID NO: 385036 - DNA, 15 bp, Homo sapiens
tatacagcgtctctg

SEQ ID NO: 385037 - DNA, 15 bp, Homo sapiens
atatacagcgtctct

SEQ ID NO: 385038 - DNA, 15 bp, Homo sapiens
tatatacagcgtctc

SEQ ID NO: 385039 - DNA, 15 bp, Homo sapiens
ttatatacagcgtct

SEQ ID NO: 385040 - DNA, 15 bp, Homo sapiens
tttatatacagcgtc

SEQ ID NO: 385041 - DNA, 15 bp, Homo sapiens
ctttatatacagcgt

SEQ ID NO: 385042 - DNA, 15 bp, Homo sapiens
actttatatacagcg

SEQ ID NO: 385043 - DNA, 15 bp, Homo sapiens
cactttatatacagc

SEQ ID NO: 385044 - DNA, 15 bp, Homo sapiens
gcactttatatacag

SEQ ID NO: 385045 - DNA, 15 bp, Homo sapiens
ggcactttatataca

SEQ ID NO: 385046 - DNA, 15 bp, Homo sapiens
tggcactttatatac

SEQ ID NO: 385047 - DNA, 15 bp, Homo sapiens
gtggcactttatata

SEQ ID NO: 385048 - DNA, 15 bp, Homo sapiens
cgtggcactttatat

SEQ ID NO: 385049 - DNA, 15 bp, Homo sapiens
gcgtggcactttata

SEQ ID NO: 385050 - DNA, 15 bp, Homo sapiens
agcgtggcactttat

SEQ ID NO: 385051 - DNA, 15 bp, Homo sapiens
aagcgtggcacttta

SEQ ID NO: 385052 - DNA, 15 bp, Homo sapiens
caagcgtggcacttt

SEQ ID NO: 385053 - DNA, 15 bp, Homo sapiens
tcaagcgtggcactt

SEQ ID NO: 385054 - DNA, 15 bp, Homo sapiens
atcaagcgtggcact

SEQ ID NO: 385055 - DNA, 15 bp, Homo sapiens
catcaagcgtggcac

SEQ ID NO: 385056 - DNA, 15 bp, Homo sapiens
gcatcaagcgtggca

SEQ ID NO: 385057 - DNA, 15 bp, Homo sapiens
agcatcaagcgtggc

SEQ ID NO: 385058 - DNA, 15 bp, Homo sapiens
cagcatcaagcgtgg

SEQ ID NO: 385059 - DNA, 15 bp, Homo sapiens
tcagcatcaagcgtg

SEQ ID NO: 385060 - DNA, 15 bp, Homo sapiens
ctcagcatcaagcgt

SEQ ID NO: 385061 - DNA, 15 bp, Homo sapiens
actcagcatcaagcg

SEQ ID NO: 385062 - DNA, 15 bp, Homo sapiens
cactcagcatcaagc

SEQ ID NO: 385063 - DNA, 15 bp, Homo sapiens
ccactcagcatcaag

SEQ ID NO: 385064 - DNA, 15 bp, Homo sapiens
tccactcagcatcaa

SEQ ID NO: 385065 - DNA, 15 bp, Homo sapiens
atccactcagcatca

SEQ ID NO: 385066 - DNA, 15 bp, Homo sapiens
tatccactcagcatc

SEQ ID NO: 385067 - DNA, 15 bp, Homo sapiens
ctatccactcagcat

SEQ ID NO: 385068 - DNA, 15 bp, Homo sapiens
actatccactcagca

SEQ ID NO: 385069 - DNA, 15 bp, Homo sapiens
cactatccactcagc

SEQ ID NO: 385070 - DNA, 15 bp, Homo sapiens
ccactatccactcag

SEQ ID NO: 385071 - DNA, 15 bp, Homo sapiens
cccactatccactca

SEQ ID NO: 385072 - DNA, 15 bp, Homo sapiens
gcccactatccactc

SEQ ID NO: 385073 - DNA, 15 bp, Homo sapiens
tgcccactatccact

SEQ ID NO: 385074 - DNA, 15 bp, Homo sapiens
gtgcccactatccac

SEQ ID NO: 385075 - DNA, 15 bp, Homo sapiens
agtgcccactatcca

SEQ ID NO: 385076 - DNA, 15 bp, Homo sapiens
gagtgcccactatcc

SEQ ID NO: 385077 - DNA, 15 bp, Homo sapiens
tgagtgcccactatc

SEQ ID NO: 385078 - DNA, 15 bp, Homo sapiens
ttgagtgcccactat

SEQ ID NO: 385079 - DNA, 15 bp, Homo sapiens
tttgagtgcccacta

SEQ ID NO: 385080 - DNA, 15 bp, Homo sapiens
gtttgagtgcccact

SEQ ID NO: 385081 - DNA, 15 bp, Homo sapiens
tgtttgagtgcccac

SEQ ID NO: 385082 - DNA, 15 bp, Homo sapiens
ttgtttgagtgccca

SEQ ID NO: 385083 - DNA, 15 bp, Homo sapiens
tttgtttgagtgccc

SEQ ID NO: 385084 - DNA, 15 bp, Homo sapiens
ttttgtttgagtgcc

SEQ ID NO: 385085 - DNA, 15 bp, Homo sapiens
cttttgtttgagtgc

SEQ ID NO: 385086 - DNA, 15 bp, Homo sapiens
gcttttgtttgagtg

SEQ ID NO: 385087 - DNA, 15 bp, Homo sapiens
tgcttttgtttgagt

SEQ ID NO: 385088 - DNA, 15 bp, Homo sapiens
ctgcttttgtttgag

SEQ ID NO: 385089 - DNA, 15 bp, Homo sapiens
actgcttttgtttga

SEQ ID NO: 385090 - DNA, 15 bp, Homo sapiens
cactgcttttgtttg

SEQ ID NO: 385091 - DNA, 15 bp, Homo sapiens
tcactgcttttgttt

SEQ ID NO: 385092 - DNA, 15 bp, Homo sapiens
atcactgcttttgtt

SEQ ID NO: 385093 - DNA, 15 bp, Homo sapiens
aatcactgcttttgt

SEQ ID NO: 385094 - DNA, 15 bp, Homo sapiens
taatcactgcttttg

SEQ ID NO: 385095 - DNA, 15 bp, Homo sapiens
ctaatcactgctttt

SEQ ID NO: 385096 - DNA, 15 bp, Homo sapiens
actaatcactgcttt

SEQ ID NO: 385097 - DNA, 15 bp, Homo sapiens
cactaatcactgctt

SEQ ID NO: 385098 - DNA, 15 bp, Homo sapiens
acactaatcactgct

SEQ ID NO: 385099 - DNA, 15 bp, Homo sapiens
aacactaatcactgc

SEQ ID NO: 385100 - DNA, 15 bp, Homo sapiens
taacactaatcactg

SEQ ID NO: 385101 - DNA, 15 bp, Homo sapiens
ctaacactaatcact

SEQ ID NO: 385102 - DNA, 15 bp, Homo sapiens
actaacactaatcac

SEQ ID NO: 385103 - DNA, 15 bp, Homo sapiens
tactaacactaatca

SEQ ID NO: 385104 - DNA, 15 bp, Homo sapiens
gtactaacactaatc

SEQ ID NO: 385105 - DNA, 15 bp, Homo sapiens
agtactaacactaat

SEQ ID NO: 385106 - DNA, 15 bp, Homo sapiens
aagtactaacactaa

SEQ ID NO: 385107 - DNA, 15 bp, Homo sapiens
aaagtactaacacta

SEQ ID NO: 385108 - DNA, 15 bp, Homo sapiens
gaaagtactaacact

SEQ ID NO: 385109 - DNA, 15 bp, Homo sapiens
tgaaagtactaacac

SEQ ID NO: 385110 - DNA, 15 bp, Homo sapiens
atgaaagtactaaca

SEQ ID NO: 385111 - DNA, 15 bp, Homo sapiens
aatgaaagtactaac

SEQ ID NO: 385112 - DNA, 15 bp, Homo sapiens
gaatgaaagtactaa

SEQ ID NO: 385113 - DNA, 15 bp, Homo sapiens
agaatgaaagtacta

SEQ ID NO: 385114 - DNA, 15 bp, Homo sapiens
tagaatgaaagtact

SEQ ID NO: 385115 - DNA, 15 bp, Homo sapiens
gtagaatgaaagtac

SEQ ID NO: 385116 - DNA, 15 bp, Homo sapiens
tgtagaatgaaagta

SEQ ID NO: 385117 - DNA, 15 bp, Homo sapiens
ttgtagaatgaaagt

SEQ ID NO: 385118 - DNA, 15 bp, Homo sapiens
gttgtagaatgaaag

SEQ ID NO: 385119 - DNA, 15 bp, Homo sapiens
ggttgtagaatgaaa

SEQ ID NO: 385120 - DNA, 15 bp, Homo sapiens
aggttgtagaatgaa

SEQ ID NO: 385121 - DNA, 15 bp, Homo sapiens
gaggttgtagaatga

SEQ ID NO: 385122 - DNA, 15 bp, Homo sapiens
tgaggttgtagaatg

SEQ ID NO: 385123 - DNA, 15 bp, Homo sapiens
ctgaggttgtagaat

SEQ ID NO: 385124 - DNA, 15 bp, Homo sapiens
actgaggttgtagaa

SEQ ID NO: 385125 - DNA, 15 bp, Homo sapiens
gactgaggttgtaga

SEQ ID NO: 385126 - DNA, 15 bp, Homo sapiens
tgactgaggttgtag

SEQ ID NO: 385127 - DNA, 15 bp, Homo sapiens
ttgactgaggttgta

SEQ ID NO: 385128 - DNA, 15 bp, Homo sapiens
tttgactgaggttgt

SEQ ID NO: 385129 - DNA, 15 bp, Homo sapiens
atttgactgaggttg

SEQ ID NO: 385130 - DNA, 15 bp, Homo sapiens
catttgactgaggtt

SEQ ID NO: 385131 - DNA, 15 bp, Homo sapiens
tcatttgactgaggt

SEQ ID NO: 385132 - DNA, 15 bp, Homo sapiens
ctcatttgactgagg

SEQ ID NO: 385133 - DNA, 15 bp, Homo sapiens
cctcatttgactgag

SEQ ID NO: 385134 - DNA, 15 bp, Homo sapiens
ccctcatttgactga

SEQ ID NO: 385135 - DNA, 15 bp, Homo sapiens
tccctcatttgactg

SEQ ID NO: 385136 - DNA, 15 bp, Homo sapiens
gtccctcatttgact

SEQ ID NO: 385137 - DNA, 15 bp, Homo sapiens
ggtccctcatttgac

SEQ ID NO: 385138 - DNA, 15 bp, Homo sapiens
tggtccctcatttga

SEQ ID NO: 385139 - DNA, 15 bp, Homo sapiens
ctggtccctcatttg

SEQ ID NO: 385140 - DNA, 15 bp, Homo sapiens
cctggtccctcattt

SEQ ID NO: 385141 - DNA, 15 bp, Homo sapiens
gcctggtccctcatt

SEQ ID NO: 385142 - DNA, 15 bp, Homo sapiens
ggcctggtccctcat

SEQ ID NO: 385143 - DNA, 15 bp, Homo sapiens
gggcctggtccctca

SEQ ID NO: 385144 - DNA, 15 bp, Homo sapiens
tgggcctggtccctc

SEQ ID NO: 385145 - DNA, 15 bp, Homo sapiens
ctgggcctggtccct

SEQ ID NO: 385146 - DNA, 15 bp, Homo sapiens
cctgggcctggtccc

SEQ ID NO: 385147 - DNA, 15 bp, Homo sapiens
ccctgggcctggtcc

SEQ ID NO: 385148 - DNA, 15 bp, Homo sapiens
gccctgggcctggtc

SEQ ID NO: 385149 - DNA, 15 bp, Homo sapiens
ggccctgggcctggt

SEQ ID NO: 385150 - DNA, 15 bp, Homo sapiens
tggccctgggcctgg

SEQ ID NO: 385151 - DNA, 15 bp, Homo sapiens
ctggccctgggcctg

SEQ ID NO: 385152 - DNA, 15 bp, Homo sapiens
tctggccctgggcct

SEQ ID NO: 385153 - DNA, 15 bp, Homo sapiens
atctggccctgggcc

SEQ ID NO: 385154 - DNA, 15 bp, Homo sapiens
gatctggccctgggc

SEQ ID NO: 385155 - DNA, 15 bp, Homo sapiens
ggatctggccctggg

SEQ ID NO: 385156 - DNA, 15 bp, Homo sapiens
aggatctggccctgg

SEQ ID NO: 385157 - DNA, 15 bp, Homo sapiens
gaggatctggccctg

SEQ ID NO: 385158 - DNA, 15 bp, Homo sapiens
tgaggatctggccct

SEQ ID NO: 385159 - DNA, 15 bp, Homo sapiens
ttgaggatctggccc

SEQ ID NO: 385160 - DNA, 15 bp, Homo sapiens
tttgaggatctggcc

SEQ ID NO: 385161 - DNA, 15 bp, Homo sapiens
ctttgaggatctggc

SEQ ID NO: 385162 - DNA, 15 bp, Homo sapiens
actttgaggatctgg

SEQ ID NO: 385163 - DNA, 15 bp, Homo sapiens
cactttgaggatctg

SEQ ID NO: 385164 - DNA, 15 bp, Homo sapiens
ccactttgaggatct

SEQ ID NO: 385165 - DNA, 15 bp, Homo sapiens
tccactttgaggatc

SEQ ID NO: 385166 - DNA, 15 bp, Homo sapiens
ttccactttgaggat

SEQ ID NO: 385167 - DNA, 15 bp, Homo sapiens
attccactttgagga

SEQ ID NO: 385168 - DNA, 15 bp, Homo sapiens
gattccactttgagg

SEQ ID NO: 385169 - DNA, 15 bp, Homo sapiens
ggattccactttgag

SEQ ID NO: 385170 - DNA, 15 bp, Homo sapiens
gggattccactttga

SEQ ID NO: 385171 - DNA, 15 bp, Homo sapiens
cgggattccactttg

SEQ ID NO: 385172 - DNA, 15 bp, Homo sapiens
ccgggattccacttt

SEQ ID NO: 385173 - DNA, 15 bp, Homo sapiens
accgggattccactt

SEQ ID NO: 385174 - DNA, 15 bp, Homo sapiens
caccgggattccact

SEQ ID NO: 385175 - DNA, 15 bp, Homo sapiens
tcaccgggattccac

SEQ ID NO: 385176 - DNA, 15 bp, Homo sapiens
gtcaccgggattcca

SEQ ID NO: 385177 - DNA, 15 bp, Homo sapiens
agtcaccgggattcc

SEQ ID NO: 385178 - DNA, 15 bp, Homo sapiens
gagtcaccgggattc

SEQ ID NO: 385179 - DNA, 15 bp, Homo sapiens
ggagtcaccgggatt

SEQ ID NO: 385180 - DNA, 15 bp, Homo sapiens
gggagtcaccgggat

SEQ ID NO: 385181 - DNA, 15 bp, Homo sapiens
ggggagtcaccggga

SEQ ID NO: 385182 - DNA, 15 bp, Homo sapiens
tggggagtcaccggg

SEQ ID NO: 385183 - DNA, 15 bp, Homo sapiens
ctggggagtcaccgg

SEQ ID NO: 385184 - DNA, 15 bp, Homo sapiens
cctggggagtcaccg

SEQ ID NO: 385185 - DNA, 15 bp, Homo sapiens
tcctggggagtcacc

SEQ ID NO: 385186 - DNA, 15 bp, Homo sapiens
ttcctggggagtcac

SEQ ID NO: 385187 - DNA, 15 bp, Homo sapiens
tttcctggggagtca

SEQ ID NO: 385188 - DNA, 15 bp, Homo sapiens
gtttcctggggagtc

SEQ ID NO: 385189 - DNA, 15 bp, Homo sapiens
ggtttcctggggagt

SEQ ID NO: 385190 - DNA, 15 bp, Homo sapiens
tggtttcctggggag

SEQ ID NO: 385191 - DNA, 15 bp, Homo sapiens
ctggtttcctgggga

SEQ ID NO: 385192 - DNA, 15 bp, Homo sapiens
cctggtttcctgggg

SEQ ID NO: 385193 - DNA, 15 bp, Homo sapiens
ccctggtttcctggg

SEQ ID NO: 385194 - DNA, 15 bp, Homo sapiens
tccctggtttcctgg

SEQ ID NO: 385195 - DNA, 15 bp, Homo sapiens
gtccctggtttcctg

SEQ ID NO: 385196 - DNA, 15 bp, Homo sapiens
agtccctggtttcct

SEQ ID NO: 385197 - DNA, 15 bp, Homo sapiens
gagtccctggtttcc

SEQ ID NO: 385198 - DNA, 15 bp, Homo sapiens
tgagtccctggtttc

SEQ ID NO: 385199 - DNA, 15 bp, Homo sapiens
ctgagtccctggttt

SEQ ID NO: 385200 - DNA, 15 bp, Homo sapiens
cctgagtccctggtt

SEQ ID NO: 385201 - DNA, 15 bp, Homo sapiens
ccctgagtccctggt

SEQ ID NO: 385202 - DNA, 15 bp, Homo sapiens
gccctgagtccctgg

SEQ ID NO: 385203 - DNA, 15 bp, Homo sapiens
agccctgagtccctg

SEQ ID NO: 385204 - DNA, 15 bp, Homo sapiens
cagccctgagtccct

SEQ ID NO: 385205 - DNA, 15 bp, Homo sapiens
ccagccctgagtccc

SEQ ID NO: 385206 - DNA, 15 bp, Homo sapiens
tccagccctgagtcc

SEQ ID NO: 385207 - DNA, 15 bp, Homo sapiens
ctccagccctgagtc

SEQ ID NO: 385208 - DNA, 15 bp, Homo sapiens
actccagccctgagt

SEQ ID NO: 385209 - DNA, 15 bp, Homo sapiens
tactccagccctgag

SEQ ID NO: 385210 - DNA, 15 bp, Homo sapiens
ttactccagccctga

SEQ ID NO: 385211 - DNA, 15 bp, Homo sapiens
gttactccagccctg

SEQ ID NO: 385212 - DNA, 15 bp, Homo sapiens
ggttactccagccct

SEQ ID NO: 385213 - DNA, 15 bp, Homo sapiens
aggttactccagccc

SEQ ID NO: 385214 - DNA, 15 bp, Homo sapiens
gaggttactccagcc

SEQ ID NO: 385215 - DNA, 15 bp, Homo sapiens
ggaggttactccagc

SEQ ID NO: 385216 - DNA, 15 bp, Homo sapiens
tggaggttactccag

SEQ ID NO: 385217 - DNA, 15 bp, Homo sapiens
atggaggttactcca

SEQ ID NO: 385218 - DNA, 15 bp, Homo sapiens
tatggaggttactcc

SEQ ID NO: 385219 - DNA, 15 bp, Homo sapiens
ttatggaggttactc

SEQ ID NO: 385220 - DNA, 15 bp, Homo sapiens
tttatggaggttact

SEQ ID NO: 385221 - DNA, 15 bp, Homo sapiens
gtttatggaggttac

SEQ ID NO: 385222 - DNA, 15 bp, Homo sapiens
tgtttatggaggtta

SEQ ID NO: 385223 - DNA, 15 bp, Homo sapiens
ttgtttatggaggtt

SEQ ID NO: 385224 - DNA, 15 bp, Homo sapiens
tttgtttatggaggt

SEQ ID NO: 385225 - DNA, 15 bp, Homo sapiens
gtttgtttatggagg

SEQ ID NO: 385226 - DNA, 15 bp, Homo sapiens
tgtttgtttatggag

SEQ ID NO: 385227 - DNA, 15 bp, Homo sapiens
atgtttgtttatgga

SEQ ID NO: 385228 - DNA, 15 bp, Homo sapiens
aatgtttgtttatgg

SEQ ID NO: 385229 - DNA, 15 bp, Homo sapiens
aaatgtttgtttatg

SEQ ID NO: 385230 - DNA, 15 bp, Homo sapiens
taaatgtttgtttat

SEQ ID NO: 385231 - DNA, 15 bp, Homo sapiens
ctaaatgtttgttta

SEQ ID NO: 385232 - DNA, 15 bp, Homo sapiens
tctaaatgtttgttt

SEQ ID NO: 385233 - DNA, 15 bp, Homo sapiens
atctaaatgtttgtt

SEQ ID NO: 385234 - DNA, 15 bp, Homo sapiens
catctaaatgtttgt

SEQ ID NO: 385235 - DNA, 15 bp, Homo sapiens
ccatctaaatgtttg

SEQ ID NO: 385236 - DNA, 15 bp, Homo sapiens
accatctaaatgttt

SEQ ID NO: 385237 - DNA, 15 bp, Homo sapiens
aaccatctaaatgtt

SEQ ID NO: 385238 - DNA, 15 bp, Homo sapiens
aaaccatctaaatgt

SEQ ID NO: 385239 - DNA, 15 bp, Homo sapiens
aaaaccatctaaatg

SEQ ID NO: 385240 - DNA, 15 bp, Homo sapiens
aaaaaccatctaaat

SEQ ID NO: 385241 - DNA, 15 bp, Homo sapiens
gaaaaaccatctaaa

SEQ ID NO: 385242 - DNA, 15 bp, Homo sapiens
ggaaaaaccatctaa

SEQ ID NO: 385243 - DNA, 15 bp, Homo sapiens
tggaaaaaccatcta

SEQ ID NO: 385244 - DNA, 15 bp, Homo sapiens
atggaaaaaccatct

SEQ ID NO: 385245 - DNA, 15 bp, Homo sapiens
gatggaaaaaccatc

SEQ ID NO: 385246 - DNA, 15 bp, Homo sapiens
ggatggaaaaaccat

SEQ ID NO: 385247 - DNA, 15 bp, Homo sapiens
aggatggaaaaacca

SEQ ID NO: 385248 - DNA, 15 bp, Homo sapiens
aaggatggaaaaacc

SEQ ID NO: 385249 - DNA, 15 bp, Homo sapiens
caaggatggaaaaac

SEQ ID NO: 385250 - DNA, 15 bp, Homo sapiens
gcaaggatggaaaaa

SEQ ID NO: 385251 - DNA, 15 bp, Homo sapiens
tgcaaggatggaaaa

SEQ ID NO: 385252 - DNA, 15 bp, Homo sapiens
atgcaaggatggaaa

SEQ ID NO: 385253 - DNA, 15 bp, Homo sapiens
gatgcaaggatggaa

SEQ ID NO: 385254 - DNA, 15 bp, Homo sapiens
ggatgcaaggatgga

SEQ ID NO: 385255 - DNA, 15 bp, Homo sapiens
gggatgcaaggatgg

SEQ ID NO: 385256 - DNA, 15 bp, Homo sapiens
tgggatgcaaggatg

SEQ ID NO: 385257 - DNA, 15 bp, Homo sapiens
ttgggatgcaaggat

SEQ ID NO: 385258 - DNA, 15 bp, Homo sapiens
gttgggatgcaagga

SEQ ID NO: 385259 - DNA, 15 bp, Homo sapiens
tgttgggatgcaagg

SEQ ID NO: 385260 - DNA, 15 bp, Homo sapiens
atgttgggatgcaag

SEQ ID NO: 385261 - DNA, 15 bp, Homo sapiens
gatgttgggatgcaa

SEQ ID NO: 385262 - DNA, 15 bp, Homo sapiens
ggatgttgggatgca

SEQ ID NO: 385263 - DNA, 15 bp, Homo sapiens
gggatgttgggatgc

SEQ ID NO: 385264 - DNA, 15 bp, Homo sapiens
tgggatgttgggatg

SEQ ID NO: 385265 - DNA, 15 bp, Homo sapiens
gtgggatgttgggat

SEQ ID NO: 385266 - DNA, 15 bp, Homo sapiens
ggtgggatgttggga

SEQ ID NO: 385267 - DNA, 15 bp, Homo sapiens
gggtgggatgttggg

SEQ ID NO: 385268 - DNA, 15 bp, Homo sapiens
agggtgggatgttgg

SEQ ID NO: 385269 - DNA, 15 bp, Homo sapiens
gagggtgggatgttg

SEQ ID NO: 385270 - DNA, 15 bp, Homo sapiens
ggagggtgggatgtt

SEQ ID NO: 385271 - DNA, 15 bp, Homo sapiens
gggagggtgggatgt

SEQ ID NO: 385272 - DNA, 15 bp, Homo sapiens
ggggagggtgggatg

SEQ ID NO: 385273 - DNA, 15 bp, Homo sapiens
gggggagggtgggat

SEQ ID NO: 385274 - DNA, 15 bp, Homo sapiens
agggggagggtggga

SEQ ID NO: 385275 - DNA, 15 bp, Homo sapiens
gagggggagggtggg

SEQ ID NO: 385276 - DNA, 15 bp, Homo sapiens
ggagggggagggtgg

SEQ ID NO: 385277 - DNA, 15 bp, Homo sapiens
tggagggggagggtg

SEQ ID NO: 385278 - DNA, 15 bp, Homo sapiens
ttggagggggagggt

SEQ ID NO: 385279 - DNA, 15 bp, Homo sapiens
tttggagggggaggg

SEQ ID NO: 385280 - DNA, 15 bp, Homo sapiens
ttttggagggggagg

SEQ ID NO: 385281 - DNA, 15 bp, Homo sapiens
gttttggagggggag

SEQ ID NO: 385282 - DNA, 15 bp, Homo sapiens
tgttttggaggggga

SEQ ID NO: 385283 - DNA, 15 bp, Homo sapiens
gtgttttggaggggg

SEQ ID NO: 385284 - DNA, 15 bp, Homo sapiens
tgtgttttggagggg

SEQ ID NO: 385285 - DNA, 15 bp, Homo sapiens
ttgtgttttggaggg

SEQ ID NO: 385286 - DNA, 15 bp, Homo sapiens
tttgtgttttggagg

SEQ ID NO: 385287 - DNA, 15 bp, Homo sapiens
ttttgtgttttggag

SEQ ID NO: 385288 - DNA, 15 bp, Homo sapiens
gttttgtgttttgga

SEQ ID NO: 385289 - DNA, 15 bp, Homo sapiens
agttttgtgttttgg

SEQ ID NO: 385290 - DNA, 15 bp, Homo sapiens
gagttttgtgttttg

SEQ ID NO: 385291 - DNA, 15 bp, Homo sapiens
tgagttttgtgtttt

SEQ ID NO: 385292 - DNA, 15 bp, Homo sapiens
gtgagttttgtgttt

SEQ ID NO: 385293 - DNA, 15 bp, Homo sapiens
ggtgagttttgtgtt

SEQ ID NO: 385294 - DNA, 15 bp, Homo sapiens
tggtgagttttgtgt

SEQ ID NO: 385295 - DNA, 15 bp, Homo sapiens
gtggtgagttttgtg

SEQ ID NO: 385296 - DNA, 15 bp, Homo sapiens
ggtggtgagttttgt

SEQ ID NO: 385297 - DNA, 15 bp, Homo sapiens
tggtggtgagttttg

SEQ ID NO: 385298 - DNA, 15 bp, Homo sapiens
atggtggtgagtttt

SEQ ID NO: 385299 - DNA, 15 bp, Homo sapiens
tatggtggtgagttt

SEQ ID NO: 385300 - DNA, 15 bp, Homo sapiens
atatggtggtgagtt

SEQ ID NO: 385301 - DNA, 15 bp, Homo sapiens
gatatggtggtgagt

SEQ ID NO: 385302 - DNA, 15 bp, Homo sapiens
ggatatggtggtgag

SEQ ID NO: 385303 - DNA, 15 bp, Homo sapiens
aggatatggtggtga

SEQ ID NO: 385304 - DNA, 15 bp, Homo sapiens
aaggatatggtggtg

SEQ ID NO: 385305 - DNA, 15 bp, Homo sapiens
aaaggatatggtggt

SEQ ID NO: 385306 - DNA, 15 bp, Homo sapiens
gaaaggatatggtgg

SEQ ID NO: 385307 - DNA, 15 bp, Homo sapiens
ggaaaggatatggtg

SEQ ID NO: 385308 - DNA, 15 bp, Homo sapiens
aggaaaggatatggt

SEQ ID NO: 385309 - DNA, 15 bp, Homo sapiens
taggaaaggatatgg

SEQ ID NO: 385310 - DNA, 15 bp, Homo sapiens
ttaggaaaggatatg

SEQ ID NO: 385311 - DNA, 15 bp, Homo sapiens
tttaggaaaggatat

SEQ ID NO: 385312 - DNA, 15 bp, Homo sapiens
ctttaggaaaggata

SEQ ID NO: 385313 - DNA, 15 bp, Homo sapiens
gctttaggaaaggat

SEQ ID NO: 385314 - DNA, 15 bp, Homo sapiens
cgctttaggaaagga

SEQ ID NO: 385315 - DNA, 15 bp, Homo sapiens
tcgctttaggaaagg

SEQ ID NO: 385316 - DNA, 15 bp, Homo sapiens
atcgctttaggaaag

SEQ ID NO: 385317 - DNA, 15 bp, Homo sapiens
gatcgctttaggaaa

SEQ ID NO: 385318 - DNA, 15 bp, Homo sapiens
tgatcgctttaggaa

SEQ ID NO: 385319 - DNA, 15 bp, Homo sapiens
ctgatcgctttagga

SEQ ID NO: 385320 - DNA, 15 bp, Homo sapiens
actgatcgctttagg

SEQ ID NO: 385321 - DNA, 15 bp, Homo sapiens
aactgatcgctttag

SEQ ID NO: 385322 - DNA, 15 bp, Homo sapiens
caactgatcgcttta

SEQ ID NO: 385323 - DNA, 15 bp, Homo sapiens
ccaactgatcgcttt

SEQ ID NO: 385324 - DNA, 15 bp, Homo sapiens
gccaactgatcgctt

SEQ ID NO: 385325 - DNA, 15 bp, Homo sapiens
ggccaactgatcgct

SEQ ID NO: 385326 - DNA, 15 bp, Homo sapiens
gggccaactgatcgc

SEQ ID NO: 385327 - DNA, 15 bp, Homo sapiens
tgggccaactgatcg

SEQ ID NO: 385328 - DNA, 15 bp, Homo sapiens
atgggccaactgatc

SEQ ID NO: 385329 - DNA, 15 bp, Homo sapiens
tatgggccaactgat

SEQ ID NO: 385330 - DNA, 15 bp, Homo sapiens
atatgggccaactga

SEQ ID NO: 385331 - DNA, 15 bp, Homo sapiens
aatatgggccaactg

SEQ ID NO: 385332 - DNA, 15 bp, Homo sapiens
gaatatgggccaact

SEQ ID NO: 385333 - DNA, 15 bp, Homo sapiens
agaatatgggccaac

SEQ ID NO: 385334 - DNA, 15 bp, Homo sapiens
cagaatatgggccaa

SEQ ID NO: 385335 - DNA, 15 bp, Homo sapiens
acagaatatgggcca

SEQ ID NO: 385336 - DNA, 15 bp, Homo sapiens
gacagaatatgggcc

SEQ ID NO: 385337 - DNA, 15 bp, Homo sapiens
agacagaatatgggc

SEQ ID NO: 385338 - DNA, 15 bp, Homo sapiens
gagacagaatatggg

SEQ ID NO: 385339 - DNA, 15 bp, Homo sapiens
agagacagaatatgg

SEQ ID NO: 385340 - DNA, 15 bp, Homo sapiens
gagagacagaatatg

SEQ ID NO: 385341 - DNA, 15 bp, Homo sapiens
agagagacagaatat

SEQ ID NO: 385342 - DNA, 15 bp, Homo sapiens
aagagagacagaata

SEQ ID NO: 385343 - DNA, 15 bp, Homo sapiens
gaagagagacagaat

SEQ ID NO: 385344 - DNA, 15 bp, Homo sapiens
ggaagagagacagaa

SEQ ID NO: 385345 - DNA, 15 bp, Homo sapiens
aggaagagagacaga

SEQ ID NO: 385346 - DNA, 15 bp, Homo sapiens
aaggaagagagacag

SEQ ID NO: 385347 - DNA, 15 bp, Homo sapiens
gaaggaagagagaca

SEQ ID NO: 385348 - DNA, 15 bp, Homo sapiens
ggaaggaagagagac

SEQ ID NO: 385349 - DNA, 15 bp, Homo sapiens
aggaaggaagagaga

SEQ ID NO: 385350 - DNA, 15 bp, Homo sapiens
aaggaaggaagagag

SEQ ID NO: 385351 - DNA, 15 bp, Homo sapiens
gaaggaaggaagaga

SEQ ID NO: 385352 - DNA, 15 bp, Homo sapiens
agaaggaaggaagag

SEQ ID NO: 385353 - DNA, 15 bp, Homo sapiens
aagaaggaaggaaga

SEQ ID NO: 385354 - DNA, 15 bp, Homo sapiens
aaagaaggaaggaag

SEQ ID NO: 385355 - DNA, 15 bp, Homo sapiens
gaaagaaggaaggaa

SEQ ID NO: 385356 - DNA, 15 bp, Homo sapiens
agaaagaaggaagga

SEQ ID NO: 385357 - DNA, 15 bp, Homo sapiens
aagaaagaaggaagg

SEQ ID NO: 385358 - DNA, 15 bp, Homo sapiens
aaagaaagaaggaag

SEQ ID NO: 385359 - DNA, 15 bp, Homo sapiens
gaaagaaagaaggaa

SEQ ID NO: 385360 - DNA, 15 bp, Homo sapiens
ggaaagaaagaagga

SEQ ID NO: 385361 - DNA, 15 bp, Homo sapiens
aggaaagaaagaagg

SEQ ID NO: 385362 - DNA, 15 bp, Homo sapiens
aaggaaagaaagaag

SEQ ID NO: 385363 - DNA, 15 bp, Homo sapiens
gaaggaaagaaagaa

SEQ ID NO: 385364 - DNA, 15 bp, Homo sapiens
agaaggaaagaaaga

SEQ ID NO: 385365 - DNA, 15 bp, Homo sapiens
aagaaggaaagaaag

SEQ ID NO: 385366 - DNA, 15 bp, Homo sapiens
aaagaaggaaagaaa

SEQ ID NO: 385367 - DNA, 15 bp, Homo sapiens
aaaagaaggaaagaa

SEQ ID NO: 385368 - DNA, 15 bp, Homo sapiens
aaaaagaaggaaaga

SEQ ID NO: 385369 - DNA, 15 bp, Homo sapiens
aaaaaagaaggaaag

SEQ ID NO: 385370 - DNA, 15 bp, Homo sapiens
gaaaaaagaaggaaa

SEQ ID NO: 385371 - DNA, 15 bp, Homo sapiens
ggaaaaaagaaggaa

SEQ ID NO: 385372 - DNA, 15 bp, Homo sapiens
gggaaaaaagaagga

SEQ ID NO: 385373 - DNA, 15 bp, Homo sapiens
agggaaaaaagaagg

SEQ ID NO: 385374 - DNA, 15 bp, Homo sapiens
aagggaaaaaagaag

SEQ ID NO: 385375 - DNA, 15 bp, Homo sapiens
aaagggaaaaaagaa

SEQ ID NO: 385376 - DNA, 15 bp, Homo sapiens
gaaagggaaaaaaga

SEQ ID NO: 385377 - DNA, 15 bp, Homo sapiens
agaaagggaaaaaag

SEQ ID NO: 385378 - DNA, 15 bp, Homo sapiens
aagaaagggaaaaaa

SEQ ID NO: 385379 - DNA, 15 bp, Homo sapiens
gaagaaagggaaaaa

SEQ ID NO: 385380 - DNA, 15 bp, Homo sapiens
ggaagaaagggaaaa

SEQ ID NO: 385381 - DNA, 15 bp, Homo sapiens
gggaagaaagggaaa

SEQ ID NO: 385382 - DNA, 15 bp, Homo sapiens
agggaagaaagggaa

SEQ ID NO: 385383 - DNA, 15 bp, Homo sapiens
gagggaagaaaggga

SEQ ID NO: 385384 - DNA, 15 bp, Homo sapiens
ggagggaagaaaggg

SEQ ID NO: 385385 - DNA, 15 bp, Homo sapiens
aggagggaagaaagg

SEQ ID NO: 385386 - DNA, 15 bp, Homo sapiens
aaggagggaagaaag

SEQ ID NO: 385387 - DNA, 15 bp, Homo sapiens
gaaggagggaagaaa

SEQ ID NO: 385388 - DNA, 15 bp, Homo sapiens
agaaggagggaagaa

SEQ ID NO: 385389 - DNA, 15 bp, Homo sapiens
aagaaggagggaaga

SEQ ID NO: 385390 - DNA, 15 bp, Homo sapiens
aaagaaggagggaag

SEQ ID NO: 385391 - DNA, 15 bp, Homo sapiens
gaaagaaggagggaa

SEQ ID NO: 385392 - DNA, 15 bp, Homo sapiens
agaaagaaggaggga

SEQ ID NO: 385393 - DNA, 15 bp, Homo sapiens
aagaaagaaggaggg

SEQ ID NO: 385394 - DNA, 15 bp, Homo sapiens
aaagaaagaaggagg

SEQ ID NO: 385395 - DNA, 15 bp, Homo sapiens
aaaagaaagaaggag

SEQ ID NO: 385396 - DNA, 15 bp, Homo sapiens
gaaaagaaagaagga

SEQ ID NO: 385397 - DNA, 15 bp, Homo sapiens
agaaaagaaagaagg

SEQ ID NO: 385398 - DNA, 15 bp, Homo sapiens
aagaaaagaaagaag

SEQ ID NO: 385399 - DNA, 15 bp, Homo sapiens
aaagaaaagaaagaa

SEQ ID NO: 385400 - DNA, 15 bp, Homo sapiens
aaaagaaaagaaaga

SEQ ID NO: 385401 - DNA, 15 bp, Homo sapiens
aaaaagaaaagaaag

SEQ ID NO: 385402 - DNA, 15 bp, Homo sapiens
aaaaaagaaaagaaa

SEQ ID NO: 385403 - DNA, 15 bp, Homo sapiens
aaaaaaagaaaagaa

SEQ ID NO: 385404 - DNA, 15 bp, Homo sapiens
aaaaaaaagaaaaga

SEQ ID NO: 385405 - DNA, 15 bp, Homo sapiens
gaaaaaaaagaaaag

SEQ ID NO: 385406 - DNA, 15 bp, Homo sapiens
ggaaaaaaaagaaaa

SEQ ID NO: 385407 - DNA, 15 bp, Homo sapiens
gggaaaaaaaagaaa

SEQ ID NO: 385408 - DNA, 15 bp, Homo sapiens
ggggaaaaaaaagaa

SEQ ID NO: 385409 - DNA, 15 bp, Homo sapiens
aggggaaaaaaaaga

SEQ ID NO: 385410 - DNA, 15 bp, Homo sapiens
gaggggaaaaaaaag

SEQ ID NO: 385411 - DNA, 15 bp, Homo sapiens
ggaggggaaaaaaaa

SEQ ID NO: 385412 - DNA, 15 bp, Homo sapiens
gggaggggaaaaaaa

SEQ ID NO: 385413 - DNA, 15 bp, Homo sapiens
agggaggggaaaaaa

SEQ ID NO: 385414 - DNA, 15 bp, Homo sapiens
gagggaggggaaaaa

SEQ ID NO: 385415 - DNA, 15 bp, Homo sapiens
ggagggaggggaaaa

SEQ ID NO: 385416 - DNA, 15 bp, Homo sapiens
aggagggaggggaaa

SEQ ID NO: 385417 - DNA, 15 bp, Homo sapiens
aaggagggaggggaa

SEQ ID NO: 385418 - DNA, 15 bp, Homo sapiens
gaaggagggagggga

SEQ ID NO: 385419 - DNA, 15 bp, Homo sapiens
ggaaggagggagggg

SEQ ID NO: 385420 - DNA, 15 bp, Homo sapiens
gggaaggagggaggg

SEQ ID NO: 385421 - DNA, 15 bp, Homo sapiens
agggaaggagggagg

SEQ ID NO: 385422 - DNA, 15 bp, Homo sapiens
gagggaaggagggag

SEQ ID NO: 385423 - DNA, 15 bp, Homo sapiens
ggagggaaggaggga

SEQ ID NO: 385424 - DNA, 15 bp, Homo sapiens
gggagggaaggaggg

SEQ ID NO: 385425 - DNA, 15 bp, Homo sapiens
agggagggaaggagg

SEQ ID NO: 385426 - DNA, 15 bp, Homo sapiens
gagggagggaaggag

SEQ ID NO: 385427 - DNA, 15 bp, Homo sapiens
agagggagggaagga

SEQ ID NO: 385428 - DNA, 15 bp, Homo sapiens
gagagggagggaagg

SEQ ID NO: 385429 - DNA, 15 bp, Homo sapiens
agagagggagggaag

SEQ ID NO: 385430 - DNA, 15 bp, Homo sapiens
gagagagggagggaa

SEQ ID NO: 385431 - DNA, 15 bp, Homo sapiens
ggagagagggaggga

SEQ ID NO: 385432 - DNA, 15 bp, Homo sapiens
gggagagagggaggg

SEQ ID NO: 385433 - DNA, 15 bp, Homo sapiens
agggagagagggagg

SEQ ID NO: 385434 - DNA, 15 bp, Homo sapiens
gagggagagagggag

SEQ ID NO: 385435 - DNA, 15 bp, Homo sapiens
ggagggagagaggga

SEQ ID NO: 385436 - DNA, 15 bp, Homo sapiens
gggagggagagaggg

SEQ ID NO: 385437 - DNA, 15 bp, Homo sapiens
agggagggagagagg

SEQ ID NO: 385438 - DNA, 15 bp, Homo sapiens
aagggagggagagag

SEQ ID NO: 385439 - DNA, 15 bp, Homo sapiens
gaagggagggagaga

SEQ ID NO: 385440 - DNA, 15 bp, Homo sapiens
ggaagggagggagag

SEQ ID NO: 385441 - DNA, 15 bp, Homo sapiens
aggaagggagggaga

SEQ ID NO: 385442 - DNA, 15 bp, Homo sapiens
aaggaagggagggag

SEQ ID NO: 385443 - DNA, 15 bp, Homo sapiens
gaaggaagggaggga

SEQ ID NO: 385444 - DNA, 15 bp, Homo sapiens
ggaaggaagggaggg

SEQ ID NO: 385445 - DNA, 15 bp, Homo sapiens
aggaaggaagggagg

SEQ ID NO: 385446 - DNA, 15 bp, Homo sapiens
aaggaaggaagggag

SEQ ID NO: 385447 - DNA, 15 bp, Homo sapiens
gaaggaaggaaggga

SEQ ID NO: 385448 - DNA, 15 bp, Homo sapiens
ggaaggaaggaaggg

SEQ ID NO: 385449 - DNA, 15 bp, Homo sapiens
aggaaggaaggaagg

SEQ ID NO: 385450 - DNA, 15 bp, Homo sapiens
aaggaaggaaggaag

SEQ ID NO: 385451 - DNA, 15 bp, Homo sapiens
gaaggaaggaaggaa

SEQ ID NO: 385452 - DNA, 15 bp, Homo sapiens
ggaaggaaggaagga

SEQ ID NO: 385453 - DNA, 15 bp, Homo sapiens
caaggaaggaaggaa

SEQ ID NO: 385454 - DNA, 15 bp, Homo sapiens
acaaggaaggaagga

SEQ ID NO: 385455 - DNA, 15 bp, Homo sapiens
aacaaggaaggaagg

SEQ ID NO: 385456 - DNA, 15 bp, Homo sapiens
aaacaaggaaggaag

SEQ ID NO: 385457 - DNA, 15 bp, Homo sapiens
gaaacaaggaaggaa

SEQ ID NO: 385458 - DNA, 15 bp, Homo sapiens
ggaaacaaggaagga

SEQ ID NO: 385459 - DNA, 15 bp, Homo sapiens
aggaaacaaggaagg

SEQ ID NO: 385460 - DNA, 15 bp, Homo sapiens
aaggaaacaaggaag

SEQ ID NO: 385461 - DNA, 15 bp, Homo sapiens
gaaggaaacaaggaa

SEQ ID NO: 385462 - DNA, 15 bp, Homo sapiens
agaaggaaacaagga

SEQ ID NO: 385463 - DNA, 15 bp, Homo sapiens
aagaaggaaacaagg

SEQ ID NO: 385464 - DNA, 15 bp, Homo sapiens
aaagaaggaaacaag

SEQ ID NO: 385465 - DNA, 15 bp, Homo sapiens
gaaagaaggaaacaa

SEQ ID NO: 385466 - DNA, 15 bp, Homo sapiens
ggaaagaaggaaaca

SEQ ID NO: 385467 - DNA, 15 bp, Homo sapiens
aggaaagaaggaaac

SEQ ID NO: 385468 - DNA, 15 bp, Homo sapiens
gaggaaagaaggaaa

SEQ ID NO: 385469 - DNA, 15 bp, Homo sapiens
ggaggaaagaaggaa

SEQ ID NO: 385470 - DNA, 15 bp, Homo sapiens
aggaggaaagaagga

SEQ ID NO: 385471 - DNA, 15 bp, Homo sapiens
gaggaggaaagaagg

SEQ ID NO: 385472 - DNA, 15 bp, Homo sapiens
agaggaggaaagaag

SEQ ID NO: 385473 - DNA, 15 bp, Homo sapiens
gagaggaggaaagaa

SEQ ID NO: 385474 - DNA, 15 bp, Homo sapiens
tgagaggaggaaaga

SEQ ID NO: 385475 - DNA, 15 bp, Homo sapiens
atgagaggaggaaag

SEQ ID NO: 385476 - DNA, 15 bp, Homo sapiens
aatgagaggaggaaa

SEQ ID NO: 385477 - DNA, 15 bp, Homo sapiens
aaatgagaggaggaa

SEQ ID NO: 385478 - DNA, 15 bp, Homo sapiens
taaatgagaggagga

SEQ ID NO: 385479 - DNA, 15 bp, Homo sapiens
ataaatgagaggagg

SEQ ID NO: 385480 - DNA, 15 bp, Homo sapiens
aataaatgagaggag

SEQ ID NO: 385481 - DNA, 15 bp, Homo sapiens
aaataaatgagagga

SEQ ID NO: 385482 - DNA, 15 bp, Homo sapiens
taaataaatgagagg

SEQ ID NO: 385483 - DNA, 15 bp, Homo sapiens
ataaataaatgagag

SEQ ID NO: 385484 - DNA, 15 bp, Homo sapiens
aataaataaatgaga

SEQ ID NO: 385485 - DNA, 15 bp, Homo sapiens
gaataaataaatgag

SEQ ID NO: 385486 - DNA, 15 bp, Homo sapiens
tgaataaataaatga

SEQ ID NO: 385487 - DNA, 15 bp, Homo sapiens
ttgaataaataaatg

SEQ ID NO: 385488 - DNA, 15 bp, Homo sapiens
gttgaataaataaat

SEQ ID NO: 385489 - DNA, 15 bp, Homo sapiens
tgttgaataaataaa

SEQ ID NO: 385490 - DNA, 15 bp, Homo sapiens
ctgttgaataaataa

SEQ ID NO: 385491 - DNA, 15 bp, Homo sapiens
gctgttgaataaata

SEQ ID NO: 385492 - DNA, 15 bp, Homo sapiens
ggctgttgaataaat

SEQ ID NO: 385493 - DNA, 15 bp, Homo sapiens
tggctgttgaataaa

SEQ ID NO: 385494 - DNA, 15 bp, Homo sapiens
atggctgttgaataa

SEQ ID NO: 385495 - DNA, 15 bp, Homo sapiens
aatggctgttgaata

SEQ ID NO: 385496 - DNA, 15 bp, Homo sapiens
caatggctgttgaat

SEQ ID NO: 385497 - DNA, 15 bp, Homo sapiens
tcaatggctgttgaa

SEQ ID NO: 385498 - DNA, 15 bp, Homo sapiens
ctcaatggctgttga

SEQ ID NO: 385499 - DNA, 15 bp, Homo sapiens
gctcaatggctgttg

SEQ ID NO: 385500 - DNA, 15 bp, Homo sapiens
tgctcaatggctgtt

SEQ ID NO: 385501 - DNA, 15 bp, Homo sapiens
gtgctcaatggctgt

SEQ ID NO: 385502 - DNA, 15 bp, Homo sapiens
ggtgctcaatggctg

SEQ ID NO: 385503 - DNA, 15 bp, Homo sapiens
aggtgctcaatggct

SEQ ID NO: 385504 - DNA, 15 bp, Homo sapiens
gaggtgctcaatggc

SEQ ID NO: 385505 - DNA, 15 bp, Homo sapiens
ggaggtgctcaatgg

SEQ ID NO: 385506 - DNA, 15 bp, Homo sapiens
aggaggtgctcaatg

SEQ ID NO: 385507 - DNA, 15 bp, Homo sapiens
caggaggtgctcaat

SEQ ID NO: 385508 - DNA, 15 bp, Homo sapiens
acaggaggtgctcaa

SEQ ID NO: 385509 - DNA, 15 bp, Homo sapiens
cacaggaggtgctca

SEQ ID NO: 385510 - DNA, 15 bp, Homo sapiens
acacaggaggtgctc

SEQ ID NO: 385511 - DNA, 15 bp, Homo sapiens
gacacaggaggtgct

SEQ ID NO: 385512 - DNA, 15 bp, Homo sapiens
tgacacaggaggtgc

SEQ ID NO: 385513 - DNA, 15 bp, Homo sapiens
ttgacacaggaggtg

SEQ ID NO: 385514 - DNA, 15 bp, Homo sapiens
cttgacacaggaggt

SEQ ID NO: 385515 - DNA, 15 bp, Homo sapiens
gcttgacacaggagg

SEQ ID NO: 385516 - DNA, 15 bp, Homo sapiens
ggcttgacacaggag

SEQ ID NO: 385517 - DNA, 15 bp, Homo sapiens
aggcttgacacagga

SEQ ID NO: 385518 - DNA, 15 bp, Homo sapiens
caggcttgacacagg

SEQ ID NO: 385519 - DNA, 15 bp, Homo sapiens
acaggcttgacacag

SEQ ID NO: 385520 - DNA, 15 bp, Homo sapiens
tacaggcttgacaca

SEQ ID NO: 385521 - DNA, 15 bp, Homo sapiens
ctacaggcttgacac

SEQ ID NO: 385522 - DNA, 15 bp, Homo sapiens
cctacaggcttgaca

SEQ ID NO: 385523 - DNA, 15 bp, Homo sapiens
tcctacaggcttgac

SEQ ID NO: 385524 - DNA, 15 bp, Homo sapiens
gtcctacaggcttga

SEQ ID NO: 385525 - DNA, 15 bp, Homo sapiens
agtcctacaggcttg

SEQ ID NO: 385526 - DNA, 15 bp, Homo sapiens
gagtcctacaggctt

SEQ ID NO: 385527 - DNA, 15 bp, Homo sapiens
tgagtcctacaggct

SEQ ID NO: 385528 - DNA, 15 bp, Homo sapiens
ttgagtcctacaggc

SEQ ID NO: 385529 - DNA, 15 bp, Homo sapiens
cttgagtcctacagg

SEQ ID NO: 385530 - DNA, 15 bp, Homo sapiens
tcttgagtcctacag

SEQ ID NO: 385531 - DNA, 15 bp, Homo sapiens
ctcttgagtcctaca

SEQ ID NO: 385532 - DNA, 15 bp, Homo sapiens
cctcttgagtcctac

SEQ ID NO: 385533 - DNA, 15 bp, Homo sapiens
gccagattccttgca

SEQ ID NO: 385534 - DNA, 15 bp, Homo sapiens
agccagattccttgc

SEQ ID NO: 385535 - DNA, 15 bp, Homo sapiens
gagccagattccttg

SEQ ID NO: 385536 - DNA, 15 bp, Homo sapiens
tgagccagattcctt

SEQ ID NO: 385537 - DNA, 15 bp, Homo sapiens
ttgagccagattcct

SEQ ID NO: 385538 - DNA, 15 bp, Homo sapiens
gttgagccagattcc

SEQ ID NO: 385539 - DNA, 15 bp, Homo sapiens
tgttgagccagattc

SEQ ID NO: 385540 - DNA, 15 bp, Homo sapiens
gtgttgagccagatt

SEQ ID NO: 385541 - DNA, 15 bp, Homo sapiens
ggtgttgagccagat

SEQ ID NO: 385542 - DNA, 15 bp, Homo sapiens
aggtgttgagccaga

SEQ ID NO: 385543 - DNA, 15 bp, Homo sapiens
caggtgttgagccag

SEQ ID NO: 385544 - DNA, 15 bp, Homo sapiens
gcaggtgttgagcca

SEQ ID NO: 385545 - DNA, 15 bp, Homo sapiens
ggcaggtgttgagcc

SEQ ID NO: 385546 - DNA, 15 bp, Homo sapiens
tggcaggtgttgagc

SEQ ID NO: 385547 - DNA, 15 bp, Homo sapiens
atggcaggtgttgag

SEQ ID NO: 385548 - DNA, 15 bp, Homo sapiens
aatggcaggtgttga

SEQ ID NO: 385549 - DNA, 15 bp, Homo sapiens
aaatggcaggtgttg

SEQ ID NO: 385550 - DNA, 15 bp, Homo sapiens
caaatggcaggtgtt

SEQ ID NO: 385551 - DNA, 15 bp, Homo sapiens
ccaaatggcaggtgt

SEQ ID NO: 385552 - DNA, 15 bp, Homo sapiens
cccaaatggcaggtg

SEQ ID NO: 385553 - DNA, 15 bp, Homo sapiens
acccaaatggcaggt

SEQ ID NO: 385554 - DNA, 15 bp, Homo sapiens
gacccaaatggcagg

SEQ ID NO: 385555 - DNA, 15 bp, Homo sapiens
agacccaaatggcag

SEQ ID NO: 385556 - DNA, 15 bp, Homo sapiens
gagacccaaatggca

SEQ ID NO: 385557 - DNA, 15 bp, Homo sapiens
tgagacccaaatggc

SEQ ID NO: 385558 - DNA, 15 bp, Homo sapiens
ctgagacccaaatgg

SEQ ID NO: 385559 - DNA, 15 bp, Homo sapiens
actgagacccaaatg

SEQ ID NO: 385560 - DNA, 15 bp, Homo sapiens
aactgagacccaaat

SEQ ID NO: 385561 - DNA, 15 bp, Homo sapiens
aaactgagacccaaa

SEQ ID NO: 385562 - DNA, 15 bp, Homo sapiens
aaaactgagacccaa

SEQ ID NO: 385563 - DNA, 15 bp, Homo sapiens
taaaactgagaccca

SEQ ID NO: 385564 - DNA, 15 bp, Homo sapiens
gtaaaactgagaccc

SEQ ID NO: 385565 - DNA, 15 bp, Homo sapiens
tgtaaaactgagacc

SEQ ID NO: 385566 - DNA, 15 bp, Homo sapiens
gtgtaaaactgagac

SEQ ID NO: 385567 - DNA, 15 bp, Homo sapiens
tgtgtaaaactgaga

SEQ ID NO: 385568 - DNA, 15 bp, Homo sapiens
atgtgtaaaactgag

SEQ ID NO: 385569 - DNA, 15 bp, Homo sapiens
aatgtgtaaaactga

SEQ ID NO: 385570 - DNA, 15 bp, Homo sapiens
aaatgtgtaaaactg

SEQ ID NO: 385571 - DNA, 15 bp, Homo sapiens
aaaatgtgtaaaact

SEQ ID NO: 385572 - DNA, 15 bp, Homo sapiens
caaaatgtgtaaaac

SEQ ID NO: 385573 - DNA, 15 bp, Homo sapiens
tcaaaatgtgtaaaa

SEQ ID NO: 385574 - DNA, 15 bp, Homo sapiens
atcaaaatgtgtaaa

SEQ ID NO: 385575 - DNA, 15 bp, Homo sapiens
gatcaaaatgtgtaa

SEQ ID NO: 385576 - DNA, 15 bp, Homo sapiens
agatcaaaatgtgta

SEQ ID NO: 385577 - DNA, 15 bp, Homo sapiens
aagatcaaaatgtgt

SEQ ID NO: 385578 - DNA, 15 bp, Homo sapiens
caagatcaaaatgtg

SEQ ID NO: 385579 - DNA, 15 bp, Homo sapiens
gcaagatcaaaatgt

SEQ ID NO: 385580 - DNA, 15 bp, Homo sapiens
tgcaagatcaaaatg

SEQ ID NO: 385581 - DNA, 15 bp, Homo sapiens
gtgcaagatcaaaat

SEQ ID NO: 385582 - DNA, 15 bp, Homo sapiens
tgtgcaagatcaaaa

SEQ ID NO: 385583 - DNA, 15 bp, Homo sapiens
atgtgcaagatcaaa

SEQ ID NO: 385584 - DNA, 15 bp, Homo sapiens
catgtgcaagatcaa

SEQ ID NO: 385585 - DNA, 15 bp, Homo sapiens
tcatgtgcaagatca

SEQ ID NO: 385586 - DNA, 15 bp, Homo sapiens
atcatgtgcaagatc

SEQ ID NO: 385587 - DNA, 15 bp, Homo sapiens
aatcatgtgcaagat

SEQ ID NO: 385588 - DNA, 15 bp, Homo sapiens
aaatcatgtgcaaga

SEQ ID NO: 385589 - DNA, 15 bp, Homo sapiens
gaaatcatgtgcaag

SEQ ID NO: 385590 - DNA, 15 bp, Homo sapiens
tgaaatcatgtgcaa

SEQ ID NO: 385591 - DNA, 15 bp, Homo sapiens
gtgaaatcatgtgca

SEQ ID NO: 385592 - DNA, 15 bp, Homo sapiens
agtgaaatcatgtgc

SEQ ID NO: 385593 - DNA, 15 bp, Homo sapiens
tagtgaaatcatgtg

SEQ ID NO: 385594 - DNA, 15 bp, Homo sapiens
ctagtgaaatcatgt

SEQ ID NO: 385595 - DNA, 15 bp, Homo sapiens
cctagtgaaatcatg

SEQ ID NO: 385596 - DNA, 15 bp, Homo sapiens
ccctagtgaaatcat

SEQ ID NO: 385597 - DNA, 15 bp, Homo sapiens
gccctagtgaaatca

SEQ ID NO: 385598 - DNA, 15 bp, Homo sapiens
tgccctagtgaaatc

SEQ ID NO: 385599 - DNA, 15 bp, Homo sapiens
ttgccctagtgaaat

SEQ ID NO: 385600 - DNA, 15 bp, Homo sapiens
tttgccctagtgaaa

SEQ ID NO: 385601 - DNA, 15 bp, Homo sapiens
ttttgccctagtgaa

SEQ ID NO: 385602 - DNA, 15 bp, Homo sapiens
attttgccctagtga

SEQ ID NO: 385603 - DNA, 15 bp, Homo sapiens
aattttgccctagtg

SEQ ID NO: 385604 - DNA, 15 bp, Homo sapiens
taattttgccctagt

SEQ ID NO: 385605 - DNA, 15 bp, Homo sapiens
ttaattttgccctag

SEQ ID NO: 385606 - DNA, 15 bp, Homo sapiens
cttaattttgcccta

SEQ ID NO: 385607 - DNA, 15 bp, Homo sapiens
acttaattttgccct

SEQ ID NO: 385608 - DNA, 15 bp, Homo sapiens
cacttaattttgccc

SEQ ID NO: 385609 - DNA, 15 bp, Homo sapiens
gcacttaattttgcc

SEQ ID NO: 385610 - DNA, 15 bp, Homo sapiens
tgcacttaattttgc

SEQ ID NO: 385611 - DNA, 15 bp, Homo sapiens
atgcacttaattttg

SEQ ID NO: 385612 - DNA, 15 bp, Homo sapiens
catgcacttaatttt

SEQ ID NO: 385613 - DNA, 15 bp, Homo sapiens
tcatgcacttaattt

SEQ ID NO: 385614 - DNA, 15 bp, Homo sapiens
ttcatgcacttaatt

SEQ ID NO: 385615 - DNA, 15 bp, Homo sapiens
cttcatgcacttaat

SEQ ID NO: 385616 - DNA, 15 bp, Homo sapiens
ccttcatgcacttaa

SEQ ID NO: 385617 - DNA, 15 bp, Homo sapiens
tccttcatgcactta

SEQ ID NO: 385618 - DNA, 15 bp, Homo sapiens
ttccttcatgcactt

SEQ ID NO: 385619 - DNA, 15 bp, Homo sapiens
attccttcatgcact

SEQ ID NO: 385620 - DNA, 15 bp, Homo sapiens
gattccttcatgcac

SEQ ID NO: 385621 - DNA, 15 bp, Homo sapiens
tgattccttcatgca

SEQ ID NO: 385622 - DNA, 15 bp, Homo sapiens
gtgattccttcatgc

SEQ ID NO: 385623 - DNA, 15 bp, Homo sapiens
tgtgattccttcatg

SEQ ID NO: 385624 - DNA, 15 bp, Homo sapiens
gtgtgattccttcat

SEQ ID NO: 385625 - DNA, 15 bp, Homo sapiens
tgtgtgattccttca

SEQ ID NO: 385626 - DNA, 15 bp, Homo sapiens
atgtgtgattccttc

SEQ ID NO: 385627 - DNA, 15 bp, Homo sapiens
aatgtgtgattcctt

SEQ ID NO: 385628 - DNA, 15 bp, Homo sapiens
gaatgtgtgattcct

SEQ ID NO: 385629 - DNA, 15 bp, Homo sapiens
ggaatgtgtgattcc

SEQ ID NO: 385630 - DNA, 15 bp, Homo sapiens
aggaatgtgtgattc

SEQ ID NO: 385631 - DNA, 15 bp, Homo sapiens
caggaatgtgtgatt

SEQ ID NO: 385632 - DNA, 15 bp, Homo sapiens
ccaggaatgtgtgat

SEQ ID NO: 385633 - DNA, 15 bp, Homo sapiens
cccaggaatgtgtga

SEQ ID NO: 385634 - DNA, 15 bp, Homo sapiens
acccaggaatgtgtg

SEQ ID NO: 385635 - DNA, 15 bp, Homo sapiens
gacccaggaatgtgt

SEQ ID NO: 385636 - DNA, 15 bp, Homo sapiens
agacccaggaatgtg

SEQ ID NO: 385637 - DNA, 15 bp, Homo sapiens
gagacccaggaatgt

SEQ ID NO: 385638 - DNA, 15 bp, Homo sapiens
cgagacccaggaatg

SEQ ID NO: 385639 - DNA, 15 bp, Homo sapiens
gcgagacccaggaat

SEQ ID NO: 385640 - DNA, 15 bp, Homo sapiens
ggcgagacccaggaa

SEQ ID NO: 385641 - DNA, 15 bp, Homo sapiens
gggcgagacccagga

SEQ ID NO: 385642 - DNA, 15 bp, Homo sapiens
agggcgagacccagg

SEQ ID NO: 385643 - DNA, 15 bp, Homo sapiens
gagggcgagacccag

SEQ ID NO: 385644 - DNA, 15 bp, Homo sapiens
tgagggcgagaccca

SEQ ID NO: 385645 - DNA, 15 bp, Homo sapiens
ctgagggcgagaccc

SEQ ID NO: 385646 - DNA, 15 bp, Homo sapiens
actgagggcgagacc

SEQ ID NO: 385647 - DNA, 15 bp, Homo sapiens
cactgagggcgagac

SEQ ID NO: 385648 - DNA, 15 bp, Homo sapiens
tcactgagggcgaga

SEQ ID NO: 385649 - DNA, 15 bp, Homo sapiens
atcactgagggcgag

SEQ ID NO: 385650 - DNA, 15 bp, Homo sapiens
catcactgagggcga

SEQ ID NO: 385651 - DNA, 15 bp, Homo sapiens
gcatcactgagggcg

SEQ ID NO: 385652 - DNA, 15 bp, Homo sapiens
tgcatcactgagggc

SEQ ID NO: 385653 - DNA, 15 bp, Homo sapiens
ctgcatcactgaggg

SEQ ID NO: 385654 - DNA, 15 bp, Homo sapiens
tctgcatcactgagg

SEQ ID NO: 385655 - DNA, 15 bp, Homo sapiens
ctctgcatcactgag

SEQ ID NO: 385656 - DNA, 15 bp, Homo sapiens
actctgcatcactga

SEQ ID NO: 385657 - DNA, 15 bp, Homo sapiens
cactctgcatcactg

SEQ ID NO: 385658 - DNA, 15 bp, Homo sapiens
ccactctgcatcact

SEQ ID NO: 385659 - DNA, 15 bp, Homo sapiens
cccactctgcatcac

SEQ ID NO: 385660 - DNA, 15 bp, Homo sapiens
acccactctgcatca

SEQ ID NO: 385661 - DNA, 15 bp, Homo sapiens
tacccactctgcatc

SEQ ID NO: 385662 - DNA, 15 bp, Homo sapiens
ctacccactctgcat

SEQ ID NO: 385663 - DNA, 15 bp, Homo sapiens
cctacccactctgca

SEQ ID NO: 385664 - DNA, 15 bp, Homo sapiens
ccctacccactctgc

SEQ ID NO: 385665 - DNA, 15 bp, Homo sapiens
tccctacccactctg

SEQ ID NO: 385666 - DNA, 15 bp, Homo sapiens
gtccctacccactct

SEQ ID NO: 385667 - DNA, 15 bp, Homo sapiens
ggtccctacccactc

SEQ ID NO: 385668 - DNA, 15 bp, Homo sapiens
aggtccctacccact

SEQ ID NO: 385669 - DNA, 15 bp, Homo sapiens
caggtccctacccac

SEQ ID NO: 385670 - DNA, 15 bp, Homo sapiens
ccaggtccctaccca

SEQ ID NO: 385671 - DNA, 15 bp, Homo sapiens
cccaggtccctaccc

SEQ ID NO: 385672 - DNA, 15 bp, Homo sapiens
gcccaggtccctacc

SEQ ID NO: 385673 - DNA, 15 bp, Homo sapiens
agcccaggtccctac

SEQ ID NO: 385674 - DNA, 15 bp, Homo sapiens
tagcccaggtcccta

SEQ ID NO: 385675 - DNA, 15 bp, Homo sapiens
atagcccaggtccct

SEQ ID NO: 385676 - DNA, 15 bp, Homo sapiens
catagcccaggtccc

SEQ ID NO: 385677 - DNA, 15 bp, Homo sapiens
ccatagcccaggtcc

SEQ ID NO: 385678 - DNA, 15 bp, Homo sapiens
cccatagcccaggtc

SEQ ID NO: 385679 - DNA, 15 bp, Homo sapiens
ccccatagcccaggt

SEQ ID NO: 385680 - DNA, 15 bp, Homo sapiens
cccccatagcccagg

SEQ ID NO: 385681 - DNA, 15 bp, Homo sapiens
gcccccatagcccag

SEQ ID NO: 385682 - DNA, 15 bp, Homo sapiens
ggcccccatagccca

SEQ ID NO: 385683 - DNA, 15 bp, Homo sapiens
gggcccccatagccc

SEQ ID NO: 385684 - DNA, 15 bp, Homo sapiens
agggcccccatagcc

SEQ ID NO: 385685 - DNA, 15 bp, Homo sapiens
cagggcccccatagc

SEQ ID NO: 385686 - DNA, 15 bp, Homo sapiens
acagggcccccatag

SEQ ID NO: 385687 - DNA, 15 bp, Homo sapiens
tacagggcccccata

SEQ ID NO: 385688 - DNA, 15 bp, Homo sapiens
ctacagggcccccat

SEQ ID NO: 385689 - DNA, 15 bp, Homo sapiens
cctacagggccccca

SEQ ID NO: 385690 - DNA, 15 bp, Homo sapiens
acctacagggccccc

SEQ ID NO: 385691 - DNA, 15 bp, Homo sapiens
tacctacagggcccc

SEQ ID NO: 385692 - DNA, 15 bp, Homo sapiens
atacctacagggccc

SEQ ID NO: 385693 - DNA, 15 bp, Homo sapiens
aatacctacagggcc

SEQ ID NO: 385694 - DNA, 15 bp, Homo sapiens
gaatacctacagggc

SEQ ID NO: 385695 - DNA, 15 bp, Homo sapiens
agaatacctacaggg

SEQ ID NO: 385696 - DNA, 15 bp, Homo sapiens
cagaatacctacagg

SEQ ID NO: 385697 - DNA, 15 bp, Homo sapiens
gcagaatacctacag

SEQ ID NO: 385698 - DNA, 15 bp, Homo sapiens
agcagaatacctaca

SEQ ID NO: 385699 - DNA, 15 bp, Homo sapiens
cagcagaatacctac

SEQ ID NO: 385700 - DNA, 15 bp, Homo sapiens
gcagcagaataccta

SEQ ID NO: 385701 - DNA, 15 bp, Homo sapiens
tgcagcagaatacct

SEQ ID NO: 385702 - DNA, 15 bp, Homo sapiens
ctgcagcagaatacc

SEQ ID NO: 385703 - DNA, 15 bp, Homo sapiens
tctgcagcagaatac

SEQ ID NO: 385704 - DNA, 15 bp, Homo sapiens
atctgcagcagaata

SEQ ID NO: 385705 - DNA, 15 bp, Homo sapiens
catctgcagcagaat

SEQ ID NO: 385706 - DNA, 15 bp, Homo sapiens
ccatctgcagcagaa

SEQ ID NO: 385707 - DNA, 15 bp, Homo sapiens
cccatctgcagcaga

SEQ ID NO: 385708 - DNA, 15 bp, Homo sapiens
ccccatctgcagcag

SEQ ID NO: 385709 - DNA, 15 bp, Homo sapiens
cccccatctgcagca

SEQ ID NO: 385710 - DNA, 15 bp, Homo sapiens
gcccccatctgcagc

SEQ ID NO: 385711 - DNA, 15 bp, Homo sapiens
tgcccccatctgcag

SEQ ID NO: 385712 - DNA, 15 bp, Homo sapiens
gtgcccccatctgca

SEQ ID NO: 385713 - DNA, 15 bp, Homo sapiens
ggtgcccccatctgc

SEQ ID NO: 385714 - DNA, 15 bp, Homo sapiens
tggtgcccccatctg

SEQ ID NO: 385715 - DNA, 15 bp, Homo sapiens
gtggtgcccccatct

SEQ ID NO: 385716 - DNA, 15 bp, Homo sapiens
tgtggtgcccccatc

SEQ ID NO: 385717 - DNA, 15 bp, Homo sapiens
gtgtggtgcccccat

SEQ ID NO: 385718 - DNA, 15 bp, Homo sapiens
agtgtggtgccccca

SEQ ID NO: 385719 - DNA, 15 bp, Homo sapiens
aagtgtggtgccccc

SEQ ID NO: 385720 - DNA, 15 bp, Homo sapiens
caagtgtggtgcccc

SEQ ID NO: 385721 - DNA, 15 bp, Homo sapiens
gcaagtgtggtgccc

SEQ ID NO: 385722 - DNA, 15 bp, Homo sapiens
tgcaagtgtggtgcc

SEQ ID NO: 385723 - DNA, 15 bp, Homo sapiens
ctgcaagtgtggtgc

SEQ ID NO: 385724 - DNA, 15 bp, Homo sapiens
gctgcaagtgtggtg

SEQ ID NO: 385725 - DNA, 15 bp, Homo sapiens
agctgcaagtgtggt

SEQ ID NO: 385726 - DNA, 15 bp, Homo sapiens
gagctgcaagtgtgg

SEQ ID NO: 385727 - DNA, 15 bp, Homo sapiens
tgagctgcaagtgtg

SEQ ID NO: 385728 - DNA, 15 bp, Homo sapiens
ctgagctgcaagtgt

SEQ ID NO: 385729 - DNA, 15 bp, Homo sapiens
tctgagctgcaagtg

SEQ ID NO: 385730 - DNA, 15 bp, Homo sapiens
ttctgagctgcaagt

SEQ ID NO: 385731 - DNA, 15 bp, Homo sapiens
gttctgagctgcaag

SEQ ID NO: 385732 - DNA, 15 bp, Homo sapiens
tgttctgagctgcaa

SEQ ID NO: 385733 - DNA, 15 bp, Homo sapiens
ctgttctgagctgca

SEQ ID NO: 385734 - DNA, 15 bp, Homo sapiens
tctgttctgagctgc

SEQ ID NO: 385735 - DNA, 15 bp, Homo sapiens
ctctgttctgagctg

SEQ ID NO: 385736 - DNA, 15 bp, Homo sapiens
tctctgttctgagct

SEQ ID NO: 385737 - DNA, 15 bp, Homo sapiens
atctctgttctgagc

SEQ ID NO: 385738 - DNA, 15 bp, Homo sapiens
tatctctgttctgag

SEQ ID NO: 385739 - DNA, 15 bp, Homo sapiens
ttatctctgttctga

SEQ ID NO: 385740 - DNA, 15 bp, Homo sapiens
tttatctctgttctg

SEQ ID NO: 385741 - DNA, 15 bp, Homo sapiens
ttttatctctgttct

SEQ ID NO: 385742 - DNA, 15 bp, Homo sapiens
gttttatctctgttc

SEQ ID NO: 385743 - DNA, 15 bp, Homo sapiens
ggttttatctctgtt

SEQ ID NO: 385744 - DNA, 15 bp, Homo sapiens
tggttttatctctgt

SEQ ID NO: 385745 - DNA, 15 bp, Homo sapiens
ctggttttatctctg

SEQ ID NO: 385746 - DNA, 15 bp, Homo sapiens
tctggttttatctct

SEQ ID NO: 385747 - DNA, 15 bp, Homo sapiens
atctggttttatctc

SEQ ID NO: 385748 - DNA, 15 bp, Homo sapiens
tatctggttttatct

SEQ ID NO: 385749 - DNA, 15 bp, Homo sapiens
ttatctggttttatc

SEQ ID NO: 385750 - DNA, 15 bp, Homo sapiens
tttatctggttttat

SEQ ID NO: 385751 - DNA, 15 bp, Homo sapiens
ttttatctggtttta

SEQ ID NO: 385752 - DNA, 15 bp, Homo sapiens
gttttatctggtttt

SEQ ID NO: 385753 - DNA, 15 bp, Homo sapiens
agttttatctggttt

SEQ ID NO: 385754 - DNA, 15 bp, Homo sapiens
gagttttatctggtt

SEQ ID NO: 385755 - DNA, 15 bp, Homo sapiens
ggagttttatctggt

SEQ ID NO: 385756 - DNA, 15 bp, Homo sapiens
cggagttttatctgg

SEQ ID NO: 385757 - DNA, 15 bp, Homo sapiens
gcggagttttatctg

SEQ ID NO: 385758 - DNA, 15 bp, Homo sapiens
agcggagttttatct

SEQ ID NO: 385759 - DNA, 15 bp, Homo sapiens
aagcggagttttatc

SEQ ID NO: 385760 - DNA, 15 bp, Homo sapiens
aaagcggagttttat

SEQ ID NO: 385761 - DNA, 15 bp, Homo sapiens
taaagcggagtttta

SEQ ID NO: 385762 - DNA, 15 bp, Homo sapiens
ataaagcggagtttt

SEQ ID NO: 385763 - DNA, 15 bp, Homo sapiens
cataaagcggagttt

SEQ ID NO: 385764 - DNA, 15 bp, Homo sapiens
tcataaagcggagtt

SEQ ID NO: 385765 - DNA, 15 bp, Homo sapiens
gtcataaagcggagt

SEQ ID NO: 385766 - DNA, 15 bp, Homo sapiens
agtcataaagcggag

SEQ ID NO: 385767 - DNA, 15 bp, Homo sapiens
cagtcataaagcgga

SEQ ID NO: 385768 - DNA, 15 bp, Homo sapiens
gcagtcataaagcgg

SEQ ID NO: 385769 - DNA, 15 bp, Homo sapiens
agcagtcataaagcg

SEQ ID NO: 385770 - DNA, 15 bp, Homo sapiens
aagcagtcataaagc

SEQ ID NO: 385771 - DNA, 15 bp, Homo sapiens
aaagcagtcataaag

SEQ ID NO: 385772 - DNA, 15 bp, Homo sapiens
caaagcagtcataaa

SEQ ID NO: 385773 - DNA, 15 bp, Homo sapiens
gcaaagcagtcataa

SEQ ID NO: 385774 - DNA, 15 bp, Homo sapiens
tgcaaagcagtcata

SEQ ID NO: 385775 - DNA, 15 bp, Homo sapiens
atgcaaagcagtcat

SEQ ID NO: 385776 - DNA, 15 bp, Homo sapiens
gatgcaaagcagtca

SEQ ID NO: 385777 - DNA, 15 bp, Homo sapiens
tgatgcaaagcagtc

SEQ ID NO: 385778 - DNA, 15 bp, Homo sapiens
gtgatgcaaagcagt

SEQ ID NO: 385779 - DNA, 15 bp, Homo sapiens
agtgatgcaaagcag

SEQ ID NO: 385780 - DNA, 15 bp, Homo sapiens
aagtgatgcaaagca

SEQ ID NO: 385781 - DNA, 15 bp, Homo sapiens
aaagtgatgcaaagc

SEQ ID NO: 385782 - DNA, 15 bp, Homo sapiens
gaaagtgatgcaaag

SEQ ID NO: 385783 - DNA, 15 bp, Homo sapiens
ggaaagtgatgcaaa

SEQ ID NO: 385784 - DNA, 15 bp, Homo sapiens
tggaaagtgatgcaa

SEQ ID NO: 385785 - DNA, 15 bp, Homo sapiens
ctggaaagtgatgca

SEQ ID NO: 385786 - DNA, 15 bp, Homo sapiens
gctggaaagtgatgc

SEQ ID NO: 385787 - DNA, 15 bp, Homo sapiens
agctggaaagtgatg

SEQ ID NO: 385788 - DNA, 15 bp, Homo sapiens
cagctggaaagtgat

SEQ ID NO: 385789 - DNA, 15 bp, Homo sapiens
ccagctggaaagtga

SEQ ID NO: 385790 - DNA, 15 bp, Homo sapiens
gccagctggaaagtg

SEQ ID NO: 385791 - DNA, 15 bp, Homo sapiens
ggccagctggaaagt

SEQ ID NO: 385792 - DNA, 15 bp, Homo sapiens
aggccagctggaaag

SEQ ID NO: 385793 - DNA, 15 bp, Homo sapiens
gaggccagctggaaa

SEQ ID NO: 385794 - DNA, 15 bp, Homo sapiens
tgaggccagctggaa

SEQ ID NO: 385795 - DNA, 15 bp, Homo sapiens
atgaggccagctgga

SEQ ID NO: 385796 - DNA, 15 bp, Homo sapiens
gatgaggccagctgg

SEQ ID NO: 385797 - DNA, 15 bp, Homo sapiens
agatgaggccagctg

SEQ ID NO: 385798 - DNA, 15 bp, Homo sapiens
cagatgaggccagct

SEQ ID NO: 385799 - DNA, 15 bp, Homo sapiens
tcagatgaggccagc

SEQ ID NO: 385800 - DNA, 15 bp, Homo sapiens
ttcagatgaggccag

SEQ ID NO: 385801 - DNA, 15 bp, Homo sapiens
gttcagatgaggcca

SEQ ID NO: 385802 - DNA, 15 bp, Homo sapiens
tgttcagatgaggcc

SEQ ID NO: 385803 - DNA, 15 bp, Homo sapiens
ctgttcagatgaggc

SEQ ID NO: 385804 - DNA, 15 bp, Homo sapiens
cctgttcagatgagg

SEQ ID NO: 385805 - DNA, 15 bp, Homo sapiens
ccctgttcagatgag

SEQ ID NO: 385806 - DNA, 15 bp, Homo sapiens
gccctgttcagatga

SEQ ID NO: 385807 - DNA, 15 bp, Homo sapiens
tgccctgttcagatg

SEQ ID NO: 385808 - DNA, 15 bp, Homo sapiens
ctgccctgttcagat

SEQ ID NO: 385809 - DNA, 15 bp, Homo sapiens
tctgccctgttcaga

SEQ ID NO: 385810 - DNA, 15 bp, Homo sapiens
ttctgccctgttcag

SEQ ID NO: 385811 - DNA, 15 bp, Homo sapiens
tttctgccctgttca

SEQ ID NO: 385812 - DNA, 15 bp, Homo sapiens
ctttctgccctgttc

SEQ ID NO: 385813 - DNA, 15 bp, Homo sapiens
actttctgccctgtt

SEQ ID NO: 385814 - DNA, 15 bp, Homo sapiens
aactttctgccctgt

SEQ ID NO: 385815 - DNA, 15 bp, Homo sapiens
gaactttctgccctg

SEQ ID NO: 385816 - DNA, 15 bp, Homo sapiens
ggaactttctgccct

SEQ ID NO: 385817 - DNA, 15 bp, Homo sapiens
aggaactttctgccc

SEQ ID NO: 385818 - DNA, 15 bp, Homo sapiens
taggaactttctgcc

SEQ ID NO: 385819 - DNA, 15 bp, Homo sapiens
ttaggaactttctgc

SEQ ID NO: 385820 - DNA, 15 bp, Homo sapiens
attaggaactttctg

SEQ ID NO: 385821 - DNA, 15 bp, Homo sapiens
tattaggaactttct

SEQ ID NO: 385822 - DNA, 15 bp, Homo sapiens
ttattaggaactttc

SEQ ID NO: 385823 - DNA, 15 bp, Homo sapiens
gttattaggaacttt

SEQ ID NO: 385824 - DNA, 15 bp, Homo sapiens
tgttattaggaactt

SEQ ID NO: 385825 - DNA, 15 bp, Homo sapiens
ttgttattaggaact

SEQ ID NO: 385826 - DNA, 15 bp, Homo sapiens
attgttattaggaac

SEQ ID NO: 385827 - DNA, 15 bp, Homo sapiens
tattgttattaggaa

SEQ ID NO: 385828 - DNA, 15 bp, Homo sapiens
ttattgttattagga

SEQ ID NO: 385829 - DNA, 15 bp, Homo sapiens
attattgttattagg

SEQ ID NO: 385830 - DNA, 15 bp, Homo sapiens
gattattgttattag

SEQ ID NO: 385831 - DNA, 15 bp, Homo sapiens
tgattattgttatta

SEQ ID NO: 385832 - DNA, 15 bp, Homo sapiens
ttgattattgttatt

SEQ ID NO: 385833 - DNA, 15 bp, Homo sapiens
gttgattattgttat

SEQ ID NO: 385834 - DNA, 15 bp, Homo sapiens
cgttgattattgtta

SEQ ID NO: 385835 - DNA, 15 bp, Homo sapiens
acgttgattattgtt

SEQ ID NO: 385836 - DNA, 15 bp, Homo sapiens
gacgttgattattgt

SEQ ID NO: 385837 - DNA, 15 bp, Homo sapiens
tgacgttgattattg

SEQ ID NO: 385838 - DNA, 15 bp, Homo sapiens
ctgacgttgattatt

SEQ ID NO: 385839 - DNA, 15 bp, Homo sapiens
tctgacgttgattat

SEQ ID NO: 385840 - DNA, 15 bp, Homo sapiens
ttctgacgttgatta

SEQ ID NO: 385841 - DNA, 15 bp, Homo sapiens
attctgacgttgatt

SEQ ID NO: 385842 - DNA, 15 bp, Homo sapiens
aattctgacgttgat

SEQ ID NO: 385843 - DNA, 15 bp, Homo sapiens
taattctgacgttga

SEQ ID NO: 385844 - DNA, 15 bp, Homo sapiens
ttaattctgacgttg

SEQ ID NO: 385845 - DNA, 15 bp, Homo sapiens
tttaattctgacgtt

SEQ ID NO: 385846 - DNA, 15 bp, Homo sapiens
atttaattctgacgt

SEQ ID NO: 385847 - DNA, 15 bp, Homo sapiens
catttaattctgacg

SEQ ID NO: 385848 - DNA, 15 bp, Homo sapiens
acatttaattctgac

SEQ ID NO: 385849 - DNA, 15 bp, Homo sapiens
cacatttaattctga

SEQ ID NO: 385850 - DNA, 15 bp, Homo sapiens
acacatttaattctg

SEQ ID NO: 385851 - DNA, 15 bp, Homo sapiens
cacacatttaattct

SEQ ID NO: 385852 - DNA, 15 bp, Homo sapiens
acacacatttaattc

SEQ ID NO: 385853 - DNA, 15 bp, Homo sapiens
gacacacatttaatt

SEQ ID NO: 385854 - DNA, 15 bp, Homo sapiens
tgacacacatttaat

SEQ ID NO: 385855 - DNA, 15 bp, Homo sapiens
atgacacacatttaa

SEQ ID NO: 385856 - DNA, 15 bp, Homo sapiens
catgacacacattta

SEQ ID NO: 385857 - DNA, 15 bp, Homo sapiens
gcatgacacacattt

SEQ ID NO: 385858 - DNA, 15 bp, Homo sapiens
agcatgacacacatt

SEQ ID NO: 385859 - DNA, 15 bp, Homo sapiens
gagcatgacacacat

SEQ ID NO: 385860 - DNA, 15 bp, Homo sapiens
agagcatgacacaca

SEQ ID NO: 385861 - DNA, 15 bp, Homo sapiens
cagagcatgacacac

SEQ ID NO: 385862 - DNA, 15 bp, Homo sapiens
gcagagcatgacaca

SEQ ID NO: 385863 - DNA, 15 bp, Homo sapiens
agcagagcatgacac

SEQ ID NO: 385864 - DNA, 15 bp, Homo sapiens
cagcagagcatgaca

SEQ ID NO: 385865 - DNA, 15 bp, Homo sapiens
ccagcagagcatgac

SEQ ID NO: 385866 - DNA, 15 bp, Homo sapiens
gccagcagagcatga

SEQ ID NO: 385867 - DNA, 15 bp, Homo sapiens
tgccagcagagcatg

SEQ ID NO: 385868 - DNA, 15 bp, Homo sapiens
gtgccagcagagcat

SEQ ID NO: 385869 - DNA, 15 bp, Homo sapiens
tgtgccagcagagca

SEQ ID NO: 385870 - DNA, 15 bp, Homo sapiens
ttgtgccagcagagc

SEQ ID NO: 385871 - DNA, 15 bp, Homo sapiens
tttgtgccagcagag

SEQ ID NO: 385872 - DNA, 15 bp, Homo sapiens
ttttgtgccagcaga

SEQ ID NO: 385873 - DNA, 15 bp, Homo sapiens
gttttgtgccagcag

SEQ ID NO: 385874 - DNA, 15 bp, Homo sapiens
agttttgtgccagca

SEQ ID NO: 385875 - DNA, 15 bp, Homo sapiens
gagttttgtgccagc

SEQ ID NO: 385876 - DNA, 15 bp, Homo sapiens
agagttttgtgccag

SEQ ID NO: 385877 - DNA, 15 bp, Homo sapiens
aagagttttgtgcca

SEQ ID NO: 385878 - DNA, 15 bp, Homo sapiens
aaagagttttgtgcc

SEQ ID NO: 385879 - DNA, 15 bp, Homo sapiens
aaaagagttttgtgc

SEQ ID NO: 385880 - DNA, 15 bp, Homo sapiens
gaaaagagttttgtg

SEQ ID NO: 385881 - DNA, 15 bp, Homo sapiens
tgaaaagagttttgt

SEQ ID NO: 385882 - DNA, 15 bp, Homo sapiens
ttgaaaagagttttg

SEQ ID NO: 385883 - DNA, 15 bp, Homo sapiens
attgaaaagagtttt

SEQ ID NO: 385884 - DNA, 15 bp, Homo sapiens
cattgaaaagagttt

SEQ ID NO: 385885 - DNA, 15 bp, Homo sapiens
gcattgaaaagagtt

SEQ ID NO: 385886 - DNA, 15 bp, Homo sapiens
tgcattgaaaagagt

SEQ ID NO: 385887 - DNA, 15 bp, Homo sapiens
atgcattgaaaagag

SEQ ID NO: 385888 - DNA, 15 bp, Homo sapiens
aatgcattgaaaaga

SEQ ID NO: 385889 - DNA, 15 bp, Homo sapiens
gaatgcattgaaaag

SEQ ID NO: 385890 - DNA, 15 bp, Homo sapiens
agaatgcattgaaaa

SEQ ID NO: 385891 - DNA, 15 bp, Homo sapiens
aagaatgcattgaaa

SEQ ID NO: 385892 - DNA, 15 bp, Homo sapiens
aaagaatgcattgaa

SEQ ID NO: 385893 - DNA, 15 bp, Homo sapiens
gaaagaatgcattga

SEQ ID NO: 385894 - DNA, 15 bp, Homo sapiens
agaaagaatgcattg

SEQ ID NO: 385895 - DNA, 15 bp, Homo sapiens
aagaaagaatgcatt

SEQ ID NO: 385896 - DNA, 15 bp, Homo sapiens
aaagaaagaatgcat

SEQ ID NO: 385897 - DNA, 15 bp, Homo sapiens
gaaagaaagaatgca

SEQ ID NO: 385898 - DNA, 15 bp, Homo sapiens
ggaaagaaagaatgc

SEQ ID NO: 385899 - DNA, 15 bp, Homo sapiens
aggaaagaaagaatg

SEQ ID NO: 385900 - DNA, 15 bp, Homo sapiens
aaggaaagaaagaat

SEQ ID NO: 385901 - DNA, 15 bp, Homo sapiens
aaaggaaagaaagaa

SEQ ID NO: 385902 - DNA, 15 bp, Homo sapiens
caaaggaaagaaaga

SEQ ID NO: 385903 - DNA, 15 bp, Homo sapiens
ccaaaggaaagaaag

SEQ ID NO: 385904 - DNA, 15 bp, Homo sapiens
tccaaaggaaagaaa

SEQ ID NO: 385905 - DNA, 15 bp, Homo sapiens
atccaaaggaaagaa

SEQ ID NO: 385906 - DNA, 15 bp, Homo sapiens
gatccaaaggaaaga

SEQ ID NO: 385907 - DNA, 15 bp, Homo sapiens
ggatccaaaggaaag

SEQ ID NO: 385908 - DNA, 15 bp, Homo sapiens
gggatccaaaggaaa

SEQ ID NO: 385909 - DNA, 15 bp, Homo sapiens
tgggatccaaaggaa

SEQ ID NO: 385910 - DNA, 15 bp, Homo sapiens
ctgggatccaaagga

SEQ ID NO: 385911 - DNA, 15 bp, Homo sapiens
actgggatccaaagg

SEQ ID NO: 385912 - DNA, 15 bp, Homo sapiens
cactgggatccaaag

SEQ ID NO: 385913 - DNA, 15 bp, Homo sapiens
acactgggatccaaa

SEQ ID NO: 385914 - DNA, 15 bp, Homo sapiens
gacactgggatccaa

SEQ ID NO: 385915 - DNA, 15 bp, Homo sapiens
tgacactgggatcca

SEQ ID NO: 385916 - DNA, 15 bp, Homo sapiens
ttgacactgggatcc

SEQ ID NO: 385917 - DNA, 15 bp, Homo sapiens
tttgacactgggatc

SEQ ID NO: 385918 - DNA, 15 bp, Homo sapiens
atttgacactgggat

SEQ ID NO: 385919 - DNA, 15 bp, Homo sapiens
tatttgacactggga

SEQ ID NO: 385920 - DNA, 15 bp, Homo sapiens
gtatttgacactggg

SEQ ID NO: 385921 - DNA, 15 bp, Homo sapiens
ggtatttgacactgg

SEQ ID NO: 385922 - DNA, 15 bp, Homo sapiens
gggtatttgacactg

SEQ ID NO: 385923 - DNA, 15 bp, Homo sapiens
cgggtatttgacact

SEQ ID NO: 385924 - DNA, 15 bp, Homo sapiens
gcgggtatttgacac

SEQ ID NO: 385925 - DNA, 15 bp, Homo sapiens
agcgggtatttgaca

SEQ ID NO: 385926 - DNA, 15 bp, Homo sapiens
aagcgggtatttgac

SEQ ID NO: 385927 - DNA, 15 bp, Homo sapiens
caagcgggtatttga

SEQ ID NO: 385928 - DNA, 15 bp, Homo sapiens
gcaagcgggtatttg

SEQ ID NO: 385929 - DNA, 15 bp, Homo sapiens
ggcaagcgggtattt

SEQ ID NO: 385930 - DNA, 15 bp, Homo sapiens
tggcaagcgggtatt

SEQ ID NO: 385931 - DNA, 15 bp, Homo sapiens
ttggcaagcgggtat

SEQ ID NO: 385932 - DNA, 15 bp, Homo sapiens
gttggcaagcgggta

SEQ ID NO: 385933 - DNA, 15 bp, Homo sapiens
tgttggcaagcgggt

SEQ ID NO: 385934 - DNA, 15 bp, Homo sapiens
atgttggcaagcggg

SEQ ID NO: 385935 - DNA, 15 bp, Homo sapiens
tatgttggcaagcgg

SEQ ID NO: 385936 - DNA, 15 bp, Homo sapiens
ctatgttggcaagcg

SEQ ID NO: 385937 - DNA, 15 bp, Homo sapiens
actatgttggcaagc

SEQ ID NO: 385938 - DNA, 15 bp, Homo sapiens
aactatgttggcaag

SEQ ID NO: 385939 - DNA, 15 bp, Homo sapiens
aaactatgttggcaa

SEQ ID NO: 385940 - DNA, 15 bp, Homo sapiens
caaactatgttggca

SEQ ID NO: 385941 - DNA, 15 bp, Homo sapiens
acaaactatgttggc

SEQ ID NO: 385942 - DNA, 15 bp, Homo sapiens
aacaaactatgttgg

SEQ ID NO: 385943 - DNA, 15 bp, Homo sapiens
aaacaaactatgttg

SEQ ID NO: 385944 - DNA, 15 bp, Homo sapiens
caaacaaactatgtt

SEQ ID NO: 385945 - DNA, 15 bp, Homo sapiens
gcaaacaaactatgt

SEQ ID NO: 385946 - DNA, 15 bp, Homo sapiens
agcaaacaaactatg

SEQ ID NO: 385947 - DNA, 15 bp, Homo sapiens
cagcaaacaaactat

SEQ ID NO: 385948 - DNA, 15 bp, Homo sapiens
acagcaaacaaacta

SEQ ID NO: 385949 - DNA, 15 bp, Homo sapiens
tacagcaaacaaact

SEQ ID NO: 385950 - DNA, 15 bp, Homo sapiens
gtacagcaaacaaac

SEQ ID NO: 385951 - DNA, 15 bp, Homo sapiens
tgtacagcaaacaaa

SEQ ID NO: 385952 - DNA, 15 bp, Homo sapiens
gtgtacagcaaacaa

SEQ ID NO: 385953 - DNA, 15 bp, Homo sapiens
tgtgtacagcaaaca

SEQ ID NO: 385954 - DNA, 15 bp, Homo sapiens
ctgtgtacagcaaac

SEQ ID NO: 385955 - DNA, 15 bp, Homo sapiens
cctgtgtacagcaaa

SEQ ID NO: 385956 - DNA, 15 bp, Homo sapiens
acctgtgtacagcaa

SEQ ID NO: 385957 - DNA, 15 bp, Homo sapiens
aacctgtgtacagca

SEQ ID NO: 385958 - DNA, 15 bp, Homo sapiens
caacctgtgtacagc

SEQ ID NO: 385959 - DNA, 15 bp, Homo sapiens
tcaacctgtgtacag

SEQ ID NO: 385960 - DNA, 15 bp, Homo sapiens
ttcaacctgtgtaca

SEQ ID NO: 385961 - DNA, 15 bp, Homo sapiens
tttcaacctgtgtac

SEQ ID NO: 385962 - DNA, 15 bp, Homo sapiens
gtttcaacctgtgta

SEQ ID NO: 385963 - DNA, 15 bp, Homo sapiens
agtttcaacctgtgt

SEQ ID NO: 385964 - DNA, 15 bp, Homo sapiens
cagtttcaacctgtg

SEQ ID NO: 385965 - DNA, 15 bp, Homo sapiens
gcagtttcaacctgt

SEQ ID NO: 385966 - DNA, 15 bp, Homo sapiens
tgcagtttcaacctg

SEQ ID NO: 385967 - DNA, 15 bp, Homo sapiens
ttgcagtttcaacct

SEQ ID NO: 385968 - DNA, 15 bp, Homo sapiens
tttgcagtttcaacc

SEQ ID NO: 385969 - DNA, 15 bp, Homo sapiens
ctttgcagtttcaac

SEQ ID NO: 385970 - DNA, 15 bp, Homo sapiens
cctttgcagtttcaa

SEQ ID NO: 385971 - DNA, 15 bp, Homo sapiens
acctttgcagtttca

SEQ ID NO: 385972 - DNA, 15 bp, Homo sapiens
aacctttgcagtttc

SEQ ID NO: 385973 - DNA, 15 bp, Homo sapiens
aaacctttgcagttt

SEQ ID NO: 385974 - DNA, 15 bp, Homo sapiens
aaaacctttgcagtt

SEQ ID NO: 385975 - DNA, 15 bp, Homo sapiens
gaaaacctttgcagt

SEQ ID NO: 385976 - DNA, 15 bp, Homo sapiens
tgaaaacctttgcag

SEQ ID NO: 385977 - DNA, 15 bp, Homo sapiens
ttgaaaacctttgca

SEQ ID NO: 385978 - DNA, 15 bp, Homo sapiens
attgaaaacctttgc

SEQ ID NO: 385979 - DNA, 15 bp, Homo sapiens
aattgaaaacctttg

SEQ ID NO: 385980 - DNA, 15 bp, Homo sapiens
aaattgaaaaccttt

SEQ ID NO: 385981 - DNA, 15 bp, Homo sapiens
aaaattgaaaacctt

SEQ ID NO: 385982 - DNA, 15 bp, Homo sapiens
taaaattgaaaacct

SEQ ID NO: 385983 - DNA, 15 bp, Homo sapiens
ttaaaattgaaaacc

SEQ ID NO: 385984 - DNA, 15 bp, Homo sapiens
tttaaaattgaaaac

SEQ ID NO: 385985 - DNA, 15 bp, Homo sapiens
atttaaaattgaaaa

SEQ ID NO: 385986 - DNA, 15 bp, Homo sapiens
aatttaaaattgaaa

SEQ ID NO: 385987 - DNA, 15 bp, Homo sapiens
aaatttaaaattgaa

SEQ ID NO: 385988 - DNA, 15 bp, Homo sapiens
taaatttaaaattga

SEQ ID NO: 385989 - DNA, 15 bp, Homo sapiens
ctaaatttaaaattg

SEQ ID NO: 385990 - DNA, 15 bp, Homo sapiens
gctaaatttaaaatt

SEQ ID NO: 385991 - DNA, 15 bp, Homo sapiens
agctaaatttaaaat

SEQ ID NO: 385992 - DNA, 15 bp, Homo sapiens
tagctaaatttaaaa

SEQ ID NO: 385993 - DNA, 15 bp, Homo sapiens
ttagctaaatttaaa

SEQ ID NO: 385994 - DNA, 15 bp, Homo sapiens
attagctaaatttaa

SEQ ID NO: 385995 - DNA, 15 bp, Homo sapiens
tattagctaaattta

SEQ ID NO: 385996 - DNA, 15 bp, Homo sapiens
atattagctaaattt

SEQ ID NO: 385997 - DNA, 15 bp, Homo sapiens
aatattagctaaatt

SEQ ID NO: 385998 - DNA, 15 bp, Homo sapiens
aaatattagctaaat

SEQ ID NO: 385999 - DNA, 15 bp, Homo sapiens
aaaatattagctaaa

SEQ ID NO: 386000 - DNA, 15 bp, Homo sapiens
taaaatattagctaa

SEQ ID NO: 386001 - DNA, 15 bp, Homo sapiens
gtaaaatattagcta

SEQ ID NO: 386002 - DNA, 15 bp, Homo sapiens
agtaaaatattagct

SEQ ID NO: 386003 - DNA, 15 bp, Homo sapiens
aagtaaaatattagc

SEQ ID NO: 386004 - DNA, 15 bp, Homo sapiens
aaagtaaaatattag

SEQ ID NO: 386005 - DNA, 15 bp, Homo sapiens
aaaagtaaaatatta

SEQ ID NO: 386006 - DNA, 15 bp, Homo sapiens
aaaaagtaaaatatt

SEQ ID NO: 386007 - DNA, 15 bp, Homo sapiens
aaaaaagtaaaatat

SEQ ID NO: 386008 - DNA, 15 bp, Homo sapiens
aaaaaaagtaaaata

SEQ ID NO: 386009 - DNA, 15 bp, Homo sapiens
aaaaaaaagtaaaat

SEQ ID NO: 386010 - DNA, 15 bp, Homo sapiens
aaaaaaaaagtaaaa

SEQ ID NO: 386011 - DNA, 15 bp, Homo sapiens
aaaaaaaaaagtaaa

SEQ ID NO: 386012 - DNA, 15 bp, Homo sapiens
aaaaaaaaaaagtaa

SEQ ID NO: 386013 - DNA, 15 bp, Homo sapiens
aaaaaaaaaaaagta

SEQ ID NO: 386014 - DNA, 15 bp, Homo sapiens
aaaaaaaaaaaaagt

SEQ ID NO: 386015 - DNA, 15 bp, Homo sapiens
aaaaaaaaaaaaaag

SEQ ID NO: 386016 - DNA, 15 bp, Homo sapiens
aaaaaaaaaaaaaaa

SEQ ID NO: 386017 - DNA, 15 bp, Homo sapiens
caaaaaaaaaaaaaa

SEQ ID NO: 386018 - DNA, 15 bp, Homo sapiens
tcaaaaaaaaaaaaa

SEQ ID NO: 386019 - DNA, 15 bp, Homo sapiens
ttcaaaaaaaaaaaa

SEQ ID NO: 386020 - DNA, 15 bp, Homo sapiens
tttcaaaaaaaaaaa

SEQ ID NO: 386021 - DNA, 15 bp, Homo sapiens
atttcaaaaaaaaaa

SEQ ID NO: 386022 - DNA, 15 bp, Homo sapiens
catttcaaaaaaaaa

SEQ ID NO: 386023 - DNA, 15 bp, Homo sapiens
ccatttcaaaaaaaa

SEQ ID NO: 386024 - DNA, 15 bp, Homo sapiens
cccatttcaaaaaaa

SEQ ID NO: 386025 - DNA, 15 bp, Homo sapiens
tcccatttcaaaaaa

SEQ ID NO: 386026 - DNA, 15 bp, Homo sapiens
atcccatttcaaaaa

SEQ ID NO: 386027 - DNA, 15 bp, Homo sapiens
gatcccatttcaaaa

SEQ ID NO: 386028 - DNA, 15 bp, Homo sapiens
agatcccatttcaaa

SEQ ID NO: 386029 - DNA, 15 bp, Homo sapiens
gagatcccatttcaa

SEQ ID NO: 386030 - DNA, 15 bp, Homo sapiens
cgagatcccatttca

SEQ ID NO: 386031 - DNA, 15 bp, Homo sapiens
gcgagatcccatttc

SEQ ID NO: 386032 - DNA, 15 bp, Homo sapiens
agcgagatcccattt

SEQ ID NO: 386033 - DNA, 15 bp, Homo sapiens
aagcgagatcccatt

SEQ ID NO: 386034 - DNA, 15 bp, Homo sapiens
aaagcgagatcccat

SEQ ID NO: 386035 - DNA, 15 bp, Homo sapiens
caaagcgagatccca

SEQ ID NO: 386036 - DNA, 15 bp, Homo sapiens
acaaagcgagatccc

SEQ ID NO: 386037 - DNA, 15 bp, Homo sapiens
aacaaagcgagatcc

SEQ ID NO: 386038 - DNA, 15 bp, Homo sapiens
caacaaagcgagatc

SEQ ID NO: 386039 - DNA, 15 bp, Homo sapiens
gcaacaaagcgagat

SEQ ID NO: 386040 - DNA, 15 bp, Homo sapiens
ggcaacaaagcgaga

SEQ ID NO: 386041 - DNA, 15 bp, Homo sapiens
aggcaacaaagcgag

SEQ ID NO: 386042 - DNA, 15 bp, Homo sapiens
aaggcaacaaagcga

SEQ ID NO: 386043 - DNA, 15 bp, Homo sapiens
taaggcaacaaagcg

SEQ ID NO: 386044 - DNA, 15 bp, Homo sapiens
gtaaggcaacaaagc

SEQ ID NO: 386045 - DNA, 15 bp, Homo sapiens
ggtaaggcaacaaag

SEQ ID NO: 386046 - DNA, 15 bp, Homo sapiens
aggtaaggcaacaaa

SEQ ID NO: 386047 - DNA, 15 bp, Homo sapiens
caggtaaggcaacaa

SEQ ID NO: 386048 - DNA, 15 bp, Homo sapiens
ccaggtaaggcaaca

SEQ ID NO: 386049 - DNA, 15 bp, Homo sapiens
tccaggtaaggcaac

SEQ ID NO: 386050 - DNA, 15 bp, Homo sapiens
ctccaggtaaggcaa

SEQ ID NO: 386051 - DNA, 15 bp, Homo sapiens
actccaggtaaggca

SEQ ID NO: 386052 - DNA, 15 bp, Homo sapiens
cactccaggtaaggc

SEQ ID NO: 386053 - DNA, 15 bp, Homo sapiens
acactccaggtaagg

SEQ ID NO: 386054 - DNA, 15 bp, Homo sapiens
tacactccaggtaag

SEQ ID NO: 386055 - DNA, 15 bp, Homo sapiens
ctacactccaggtaa

SEQ ID NO: 386056 - DNA, 15 bp, Homo sapiens
actacactccaggta

SEQ ID NO: 386057 - DNA, 15 bp, Homo sapiens
aactacactccaggt

SEQ ID NO: 386058 - DNA, 15 bp, Homo sapiens
caactacactccagg

SEQ ID NO: 386059 - DNA, 15 bp, Homo sapiens
gcaactacactccag

SEQ ID NO: 386060 - DNA, 15 bp, Homo sapiens
cgcaactacactcca

SEQ ID NO: 386061 - DNA, 15 bp, Homo sapiens
tcgcaactacactcc

SEQ ID NO: 386062 - DNA, 15 bp, Homo sapiens
ctcgcaactacactc

SEQ ID NO: 386063 - DNA, 15 bp, Homo sapiens
tctcgcaactacact

SEQ ID NO: 386064 - DNA, 15 bp, Homo sapiens
atctcgcaactacac

SEQ ID NO: 386065 - DNA, 15 bp, Homo sapiens
gatctcgcaactaca

SEQ ID NO: 386066 - DNA, 15 bp, Homo sapiens
tgatctcgcaactac

SEQ ID NO: 386067 - DNA, 15 bp, Homo sapiens
atgatctcgcaacta

SEQ ID NO: 386068 - DNA, 15 bp, Homo sapiens
tatgatctcgcaact

SEQ ID NO: 386069 - DNA, 15 bp, Homo sapiens
ctatgatctcgcaac

SEQ ID NO: 386070 - DNA, 15 bp, Homo sapiens
gctatgatctcgcaa

SEQ ID NO: 386071 - DNA, 15 bp, Homo sapiens
agctatgatctcgca

SEQ ID NO: 386072 - DNA, 15 bp, Homo sapiens
gagctatgatctcgc

SEQ ID NO: 386073 - DNA, 15 bp, Homo sapiens
tgagctatgatctcg

SEQ ID NO: 386074 - DNA, 15 bp, Homo sapiens
gtgagctatgatctc

SEQ ID NO: 386075 - DNA, 15 bp, Homo sapiens
agtgagctatgatct

SEQ ID NO: 386076 - DNA, 15 bp, Homo sapiens
cagtgagctatgatc

SEQ ID NO: 386077 - DNA, 15 bp, Homo sapiens
gcagtgagctatgat

SEQ ID NO: 386078 - DNA, 15 bp, Homo sapiens
tgcagtgagctatga

SEQ ID NO: 386079 - DNA, 15 bp, Homo sapiens
ctgcagtgagctatg

SEQ ID NO: 386080 - DNA, 15 bp, Homo sapiens
gctgcagtgagctat

SEQ ID NO: 386081 - DNA, 15 bp, Homo sapiens
ggctgcagtgagcta

SEQ ID NO: 386082 - DNA, 15 bp, Homo sapiens
aggctgcagtgagct

SEQ ID NO: 386083 - DNA, 15 bp, Homo sapiens
gaggctgcagtgagc

SEQ ID NO: 386084 - DNA, 15 bp, Homo sapiens
ggaggctgcagtgag

SEQ ID NO: 386085 - DNA, 15 bp, Homo sapiens
tggaggctgcagtga

SEQ ID NO: 386086 - DNA, 15 bp, Homo sapiens
ttggaggctgcagtg

SEQ ID NO: 386087 - DNA, 15 bp, Homo sapiens
gttggaggctgcagt

SEQ ID NO: 386088 - DNA, 15 bp, Homo sapiens
agttggaggctgcag

SEQ ID NO: 386089 - DNA, 15 bp, Homo sapiens
gagttggaggctgca

SEQ ID NO: 386090 - DNA, 15 bp, Homo sapiens
ggagttggaggctgc

SEQ ID NO: 386091 - DNA, 15 bp, Homo sapiens
aggagttggaggctg

SEQ ID NO: 386092 - DNA, 15 bp, Homo sapiens
caggagttggaggct

SEQ ID NO: 386093 - DNA, 15 bp, Homo sapiens
ccaggagttggaggc

SEQ ID NO: 386094 - DNA, 15 bp, Homo sapiens
cccaggagttggagg

SEQ ID NO: 386095 - DNA, 15 bp, Homo sapiens
gcccaggagttggag

SEQ ID NO: 386096 - DNA, 15 bp, Homo sapiens
agcccaggagttgga

SEQ ID NO: 386097 - DNA, 15 bp, Homo sapiens
gagcccaggagttgg

SEQ ID NO: 386098 - DNA, 15 bp, Homo sapiens
tgagcccaggagttg

SEQ ID NO: 386099 - DNA, 15 bp, Homo sapiens
ctgagcccaggagtt

SEQ ID NO: 386100 - DNA, 15 bp, Homo sapiens
cctgagcccaggagt

SEQ ID NO: 386101 - DNA, 15 bp, Homo sapiens
acctgagcccaggag

SEQ ID NO: 386102 - DNA, 15 bp, Homo sapiens
cacctgagcccagga

SEQ ID NO: 386103 - DNA, 15 bp, Homo sapiens
tcacctgagcccagg

SEQ ID NO: 386104 - DNA, 15 bp, Homo sapiens
atcacctgagcccag

SEQ ID NO: 386105 - DNA, 15 bp, Homo sapiens
gatcacctgagccca

SEQ ID NO: 386106 - DNA, 15 bp, Homo sapiens
ggatcacctgagccc

SEQ ID NO: 386107 - DNA, 15 bp, Homo sapiens
aggatcacctgagcc

SEQ ID NO: 386108 - DNA, 15 bp, Homo sapiens
gaggatcacctgagc

SEQ ID NO: 386109 - DNA, 15 bp, Homo sapiens
ggaggatcacctgag

SEQ ID NO: 386110 - DNA, 15 bp, Homo sapiens
gggaggatcacctga

SEQ ID NO: 386111 - DNA, 15 bp, Homo sapiens
tgggaggatcacctg

SEQ ID NO: 386112 - DNA, 15 bp, Homo sapiens
gtgggaggatcacct

SEQ ID NO: 386113 - DNA, 15 bp, Homo sapiens
ggtgggaggatcacc

SEQ ID NO: 386114 - DNA, 15 bp, Homo sapiens
aggtgggaggatcac

SEQ ID NO: 386115 - DNA, 15 bp, Homo sapiens
gaggtgggaggatca

SEQ ID NO: 386116 - DNA, 15 bp, Homo sapiens
tgaggtgggaggatc

SEQ ID NO: 386117 - DNA, 15 bp, Homo sapiens
ctgaggtgggaggat

SEQ ID NO: 386118 - DNA, 15 bp, Homo sapiens
actgaggtgggagga

SEQ ID NO: 386119 - DNA, 15 bp, Homo sapiens
gactgaggtgggagg

SEQ ID NO: 386120 - DNA, 15 bp, Homo sapiens
agactgaggtgggag

SEQ ID NO: 386121 - DNA, 15 bp, Homo sapiens
gagactgaggtggga

SEQ ID NO: 386122 - DNA, 15 bp, Homo sapiens
ggagactgaggtggg

SEQ ID NO: 386123 - DNA, 15 bp, Homo sapiens
aggagactgaggtgg

SEQ ID NO: 386124 - DNA, 15 bp, Homo sapiens
caggagactgaggtg

SEQ ID NO: 386125 - DNA, 15 bp, Homo sapiens
acaggagactgaggt

SEQ ID NO: 386126 - DNA, 15 bp, Homo sapiens
cacaggagactgagg

SEQ ID NO: 386127 - DNA, 15 bp, Homo sapiens
acacaggagactgag

SEQ ID NO: 386128 - DNA, 15 bp, Homo sapiens
tacacaggagactga

SEQ ID NO: 386129 - DNA, 15 bp, Homo sapiens
ctacacaggagactg

SEQ ID NO: 386130 - DNA, 15 bp, Homo sapiens
gctacacaggagact

SEQ ID NO: 386131 - DNA, 15 bp, Homo sapiens
agctacacaggagac

SEQ ID NO: 386132 - DNA, 15 bp, Homo sapiens
cagctacacaggaga

SEQ ID NO: 386133 - DNA, 15 bp, Homo sapiens
ccagctacacaggag

SEQ ID NO: 386134 - DNA, 15 bp, Homo sapiens
cccagctacacagga

SEQ ID NO: 386135 - DNA, 15 bp, Homo sapiens
tcccagctacacagg

SEQ ID NO: 386136 - DNA, 15 bp, Homo sapiens
gtcccagctacacag

SEQ ID NO: 386137 - DNA, 15 bp, Homo sapiens
agtcccagctacaca

SEQ ID NO: 386138 - DNA, 15 bp, Homo sapiens
tagtcccagctacac

SEQ ID NO: 386139 - DNA, 15 bp, Homo sapiens
tgtagtcccagctac

SEQ ID NO: 386140 - DNA, 15 bp, Homo sapiens
ctgtagtcccagcta

SEQ ID NO: 386141 - DNA, 15 bp, Homo sapiens
cctgtagtcccagct

SEQ ID NO: 386142 - DNA, 15 bp, Homo sapiens
acctgtagtcccagc

SEQ ID NO: 386143 - DNA, 15 bp, Homo sapiens
tacctgtagtcccag

SEQ ID NO: 386144 - DNA, 15 bp, Homo sapiens
gtacctgtagtccca

SEQ ID NO: 386145 - DNA, 15 bp, Homo sapiens
tgtacctgtagtccc

SEQ ID NO: 386146 - DNA, 15 bp, Homo sapiens
gtgtacctgtagtcc

SEQ ID NO: 386147 - DNA, 15 bp, Homo sapiens
ggtgtacctgtagtc

SEQ ID NO: 386148 - DNA, 15 bp, Homo sapiens
tggtgtacctgtagt

SEQ ID NO: 386149 - DNA, 15 bp, Homo sapiens
gtggtgtacctgtag

SEQ ID NO: 386150 - DNA, 15 bp, Homo sapiens
ggtggtgtacctgta

SEQ ID NO: 386151 - DNA, 15 bp, Homo sapiens
tggtggtgtacctgt

SEQ ID NO: 386152 - DNA, 15 bp, Homo sapiens
atggtggtgtacctg

SEQ ID NO: 386153 - DNA, 15 bp, Homo sapiens
catggtggtgtacct

SEQ ID NO: 386154 - DNA, 15 bp, Homo sapiens
gcatggtggtgtacc

SEQ ID NO: 386155 - DNA, 15 bp, Homo sapiens
ggcatggtggtgtac

SEQ ID NO: 386156 - DNA, 15 bp, Homo sapiens
gggcatggtggtgta

SEQ ID NO: 386157 - DNA, 15 bp, Homo sapiens
tgggcatggtggtgt

SEQ ID NO: 386158 - DNA, 15 bp, Homo sapiens
gtgggcatggtggtg

SEQ ID NO: 386159 - DNA, 15 bp, Homo sapiens
ggtgggcatggtggt

SEQ ID NO: 386160 - DNA, 15 bp, Homo sapiens
aggtgggcatggtgg

SEQ ID NO: 386161 - DNA, 15 bp, Homo sapiens
caggtgggcatggtg

SEQ ID NO: 386162 - DNA, 15 bp, Homo sapiens
ccaggtgggcatggt

SEQ ID NO: 386163 - DNA, 15 bp, Homo sapiens
tccaggtgggcatgg

SEQ ID NO: 386164 - DNA, 15 bp, Homo sapiens
atccaggtgggcatg

SEQ ID NO: 386165 - DNA, 15 bp, Homo sapiens
tatccaggtgggcat

SEQ ID NO: 386166 - DNA, 15 bp, Homo sapiens
ttatccaggtgggca

SEQ ID NO: 386167 - DNA, 15 bp, Homo sapiens
attatccaggtgggc

SEQ ID NO: 386168 - DNA, 15 bp, Homo sapiens
aattatccaggtggg

SEQ ID NO: 386169 - DNA, 15 bp, Homo sapiens
aaattatccaggtgg

SEQ ID NO: 386170 - DNA, 15 bp, Homo sapiens
aaaattatccaggtg

SEQ ID NO: 386171 - DNA, 15 bp, Homo sapiens
aaaaattatccaggt

SEQ ID NO: 386172 - DNA, 15 bp, Homo sapiens
taaaaattatccagg

SEQ ID NO: 386173 - DNA, 15 bp, Homo sapiens
ttaaaaattatccag

SEQ ID NO: 386174 - DNA, 15 bp, Homo sapiens
gttaaaaattatcca

SEQ ID NO: 386175 - DNA, 15 bp, Homo sapiens
agttaaaaattatcc

SEQ ID NO: 386176 - DNA, 15 bp, Homo sapiens
aagttaaaaattatc

SEQ ID NO: 386177 - DNA, 15 bp, Homo sapiens
aaagttaaaaattat

SEQ ID NO: 386178 - DNA, 15 bp, Homo sapiens
aaaagttaaaaatta

SEQ ID NO: 386179 - DNA, 15 bp, Homo sapiens
aaaaagttaaaaatt

SEQ ID NO: 386180 - DNA, 15 bp, Homo sapiens
aaaaaagttaaaaat

SEQ ID NO: 386181 - DNA, 15 bp, Homo sapiens
aaaaaaagttaaaaa

SEQ ID NO: 386182 - DNA, 15 bp, Homo sapiens
caaaaaaagttaaaa

SEQ ID NO: 386183 - DNA, 15 bp, Homo sapiens
acaaaaaaagttaaa

SEQ ID NO: 386184 - DNA, 15 bp, Homo sapiens
tacaaaaaaagttaa

SEQ ID NO: 386185 - DNA, 15 bp, Homo sapiens
ctacaaaaaaagtta

SEQ ID NO: 386186 - DNA, 15 bp, Homo sapiens
tctacaaaaaaagtt

SEQ ID NO: 386187 - DNA, 15 bp, Homo sapiens
ctctacaaaaaaagt

SEQ ID NO: 386188 - DNA, 15 bp, Homo sapiens
tctctacaaaaaaag

SEQ ID NO: 386189 - DNA, 15 bp, Homo sapiens
atctctacaaaaaaa

SEQ ID NO: 386190 - DNA, 15 bp, Homo sapiens
tatctctacaaaaaa

SEQ ID NO: 386191 - DNA, 15 bp, Homo sapiens
ttatctctacaaaaa

SEQ ID NO: 386192 - DNA, 15 bp, Homo sapiens
tttatctctacaaaa

SEQ ID NO: 386193 - DNA, 15 bp, Homo sapiens
ctttatctctacaaa

SEQ ID NO: 386194 - DNA, 15 bp, Homo sapiens
actttatctctacaa

SEQ ID NO: 386195 - DNA, 15 bp, Homo sapiens
gactttatctctaca

SEQ ID NO: 386196 - DNA, 15 bp, Homo sapiens
agactttatctctac

SEQ ID NO: 386197 - DNA, 15 bp, Homo sapiens
aagactttatctcta

SEQ ID NO: 386198 - DNA, 15 bp, Homo sapiens
caagactttatctct

SEQ ID NO: 386199 - DNA, 15 bp, Homo sapiens
gcaagactttatctc

SEQ ID NO: 386200 - DNA, 15 bp, Homo sapiens
agcaagactttatct

SEQ ID NO: 386201 - DNA, 15 bp, Homo sapiens
tagcaagactttatc

SEQ ID NO: 386202 - DNA, 15 bp, Homo sapiens
atagcaagactttat

SEQ ID NO: 386203 - DNA, 15 bp, Homo sapiens
catagcaagacttta

SEQ ID NO: 386204 - DNA, 15 bp, Homo sapiens
acatagcaagacttt

SEQ ID NO: 386205 - DNA, 15 bp, Homo sapiens
aacatagcaagactt

SEQ ID NO: 386206 - DNA, 15 bp, Homo sapiens
caacatagcaagact

SEQ ID NO: 386207 - DNA, 15 bp, Homo sapiens
gcaacatagcaagac

SEQ ID NO: 386208 - DNA, 15 bp, Homo sapiens
ggcaacatagcaaga

SEQ ID NO: 386209 - DNA, 15 bp, Homo sapiens
aggcaacatagcaag

SEQ ID NO: 386210 - DNA, 15 bp, Homo sapiens
taggcaacatagcaa

SEQ ID NO: 386211 - DNA, 15 bp, Homo sapiens
ctaggcaacatagca

SEQ ID NO: 386212 - DNA, 15 bp, Homo sapiens
cctaggcaacatagc

SEQ ID NO: 386213 - DNA, 15 bp, Homo sapiens
gcctaggcaacatag

SEQ ID NO: 386214 - DNA, 15 bp, Homo sapiens
agcctaggcaacata

SEQ ID NO: 386215 - DNA, 15 bp, Homo sapiens
tagcctaggcaacat

SEQ ID NO: 386216 - DNA, 15 bp, Homo sapiens
ctagcctaggcaaca

SEQ ID NO: 386217 - DNA, 15 bp, Homo sapiens
actagcctaggcaac

SEQ ID NO: 386218 - DNA, 15 bp, Homo sapiens
gactagcctaggcaa

SEQ ID NO: 386219 - DNA, 15 bp, Homo sapiens
agactagcctaggca

SEQ ID NO: 386220 - DNA, 15 bp, Homo sapiens
gagactagcctaggc

SEQ ID NO: 386221 - DNA, 15 bp, Homo sapiens
cgagactagcctagg

SEQ ID NO: 386222 - DNA, 15 bp, Homo sapiens
tcgagactagcctag

SEQ ID NO: 386223 - DNA, 15 bp, Homo sapiens
ttcgagactagccta

SEQ ID NO: 386224 - DNA, 15 bp, Homo sapiens
gttcgagactagcct

SEQ ID NO: 386225 - DNA, 15 bp, Homo sapiens
agttcgagactagcc

SEQ ID NO: 386226 - DNA, 15 bp, Homo sapiens
gagttcgagactagc

SEQ ID NO: 386227 - DNA, 15 bp, Homo sapiens
ggagttcgagactag

SEQ ID NO: 386228 - DNA, 15 bp, Homo sapiens
aggagttcgagacta

SEQ ID NO: 386229 - DNA, 15 bp, Homo sapiens
caggagttcgagact

SEQ ID NO: 386230 - DNA, 15 bp, Homo sapiens
ccaggagttcgagac

SEQ ID NO: 386231 - DNA, 15 bp, Homo sapiens
cccaggagttcgaga

SEQ ID NO: 386232 - DNA, 15 bp, Homo sapiens
gcccaggagttcgag

SEQ ID NO: 386233 - DNA, 15 bp, Homo sapiens
agcccaggagttcga

SEQ ID NO: 386234 - DNA, 15 bp, Homo sapiens
gagcccaggagttcg

SEQ ID NO: 386235 - DNA, 15 bp, Homo sapiens
ccttgagcccaggag

SEQ ID NO: 386236 - DNA, 15 bp, Homo sapiens
cccttgagcccagga

SEQ ID NO: 386237 - DNA, 15 bp, Homo sapiens
tcccttgagcccagg

SEQ ID NO: 386238 - DNA, 15 bp, Homo sapiens
atcccttgagcccag

SEQ ID NO: 386239 - DNA, 15 bp, Homo sapiens
gatcccttgagccca

SEQ ID NO: 386240 - DNA, 15 bp, Homo sapiens
ggatcccttgagccc

SEQ ID NO: 386241 - DNA, 15 bp, Homo sapiens
aggatcccttgagcc

SEQ ID NO: 386242 - DNA, 15 bp, Homo sapiens
aaggatcccttgagc

SEQ ID NO: 386243 - DNA, 15 bp, Homo sapiens
gaaggatcccttgag

SEQ ID NO: 386244 - DNA, 15 bp, Homo sapiens
ggaaggatcccttga

SEQ ID NO: 386245 - DNA, 15 bp, Homo sapiens
gggaaggatcccttg

SEQ ID NO: 386246 - DNA, 15 bp, Homo sapiens
ggggaaggatccctt

SEQ ID NO: 386247 - DNA, 15 bp, Homo sapiens
aggggaaggatccct

SEQ ID NO: 386248 - DNA, 15 bp, Homo sapiens
aaggggaaggatccc

SEQ ID NO: 386249 - DNA, 15 bp, Homo sapiens
gaaggggaaggatcc

SEQ ID NO: 386250 - DNA, 15 bp, Homo sapiens
cgaaggggaaggatc

SEQ ID NO: 386251 - DNA, 15 bp, Homo sapiens
ccgaaggggaaggat

SEQ ID NO: 386252 - DNA, 15 bp, Homo sapiens
gccgaaggggaagga

SEQ ID NO: 386253 - DNA, 15 bp, Homo sapiens
agccgaaggggaagg

SEQ ID NO: 386254 - DNA, 15 bp, Homo sapiens
aagccgaaggggaag

SEQ ID NO: 386255 - DNA, 15 bp, Homo sapiens
gaagccgaaggggaa

SEQ ID NO: 386256 - DNA, 15 bp, Homo sapiens
ggaagccgaagggga

SEQ ID NO: 386257 - DNA, 15 bp, Homo sapiens
gggaagccgaagggg

SEQ ID NO: 386258 - DNA, 15 bp, Homo sapiens
tgggaagccgaaggg

SEQ ID NO: 386259 - DNA, 15 bp, Homo sapiens
ttgggaagccgaagg

SEQ ID NO: 386260 - DNA, 15 bp, Homo sapiens
tttgggaagccgaag

SEQ ID NO: 386261 - DNA, 15 bp, Homo sapiens
ctttgggaagccgaa

SEQ ID NO: 386262 - DNA, 15 bp, Homo sapiens
actttgggaagccga

SEQ ID NO: 386263 - DNA, 15 bp, Homo sapiens
cactttgggaagccg

SEQ ID NO: 386264 - DNA, 15 bp, Homo sapiens
acactttgggaagcc

SEQ ID NO: 386265 - DNA, 15 bp, Homo sapiens
aacactttgggaagc

SEQ ID NO: 386266 - DNA, 15 bp, Homo sapiens
taacactttgggaag

SEQ ID NO: 386267 - DNA, 15 bp, Homo sapiens
ctaacactttgggaa

SEQ ID NO: 386268 - DNA, 15 bp, Homo sapiens
cctaacactttggga

SEQ ID NO: 386269 - DNA, 15 bp, Homo sapiens
tcctaacactttggg

SEQ ID NO: 386270 - DNA, 15 bp, Homo sapiens
atcctaacactttgg

SEQ ID NO: 386271 - DNA, 15 bp, Homo sapiens
aatcctaacactttg

SEQ ID NO: 386272 - DNA, 15 bp, Homo sapiens
taatcctaacacttt

SEQ ID NO: 386273 - DNA, 15 bp, Homo sapiens
gtaatcctaacactt

SEQ ID NO: 386274 - DNA, 15 bp, Homo sapiens
tgtaatcctaacact

SEQ ID NO: 386275 - DNA, 15 bp, Homo sapiens
ctgtaatcctaacac

SEQ ID NO: 386276 - DNA, 15 bp, Homo sapiens
cctgtaatcctaaca

SEQ ID NO: 386277 - DNA, 15 bp, Homo sapiens
acctgtaatcctaac

SEQ ID NO: 386278 - DNA, 15 bp, Homo sapiens
cacctgtaatcctaa

SEQ ID NO: 386279 - DNA, 15 bp, Homo sapiens
acacctgtaatccta

SEQ ID NO: 386280 - DNA, 15 bp, Homo sapiens
cacacctgtaatcct

SEQ ID NO: 386281 - DNA, 15 bp, Homo sapiens
tcacacctgtaatcc

SEQ ID NO: 386282 - DNA, 15 bp, Homo sapiens
atcacacctgtaatc

SEQ ID NO: 386283 - DNA, 15 bp, Homo sapiens
gatcacacctgtaat

SEQ ID NO: 386284 - DNA, 15 bp, Homo sapiens
agatcacacctgtaa

SEQ ID NO: 386285 - DNA, 15 bp, Homo sapiens
cagatcacacctgta

SEQ ID NO: 386286 - DNA, 15 bp, Homo sapiens
ccagatcacacctgt

SEQ ID NO: 386287 - DNA, 15 bp, Homo sapiens
accagatcacacctg

SEQ ID NO: 386288 - DNA, 15 bp, Homo sapiens
aaccagatcacacct

SEQ ID NO: 386289 - DNA, 15 bp, Homo sapiens
aaaccagatcacacc

SEQ ID NO: 386290 - DNA, 15 bp, Homo sapiens
gaaaccagatcacac

SEQ ID NO: 386291 - DNA, 15 bp, Homo sapiens
agaaaccagatcaca

SEQ ID NO: 386292 - DNA, 15 bp, Homo sapiens
tagaaaccagatcac

SEQ ID NO: 386293 - DNA, 15 bp, Homo sapiens
ttagaaaccagatca

SEQ ID NO: 386294 - DNA, 15 bp, Homo sapiens
gttagaaaccagatc

SEQ ID NO: 386295 - DNA, 15 bp, Homo sapiens
agttagaaaccagat

SEQ ID NO: 386296 - DNA, 15 bp, Homo sapiens
aagttagaaaccaga

SEQ ID NO: 386297 - DNA, 15 bp, Homo sapiens
gaagttagaaaccag

SEQ ID NO: 386298 - DNA, 15 bp, Homo sapiens
agaagttagaaacca

SEQ ID NO: 386299 - DNA, 15 bp, Homo sapiens
gagaagttagaaacc

SEQ ID NO: 386300 - DNA, 15 bp, Homo sapiens
agagaagttagaaac

SEQ ID NO: 386301 - DNA, 15 bp, Homo sapiens
aagagaagttagaaa

SEQ ID NO: 386302 - DNA, 15 bp, Homo sapiens
taagagaagttagaa

SEQ ID NO: 386303 - DNA, 15 bp, Homo sapiens
ttaagagaagttaga

SEQ ID NO: 386304 - DNA, 15 bp, Homo sapiens
tttaagagaagttag

SEQ ID NO: 386305 - DNA, 15 bp, Homo sapiens
ctttaagagaagtta

SEQ ID NO: 386306 - DNA, 15 bp, Homo sapiens
actttaagagaagtt

SEQ ID NO: 386307 - DNA, 15 bp, Homo sapiens
cactttaagagaagt

SEQ ID NO: 386308 - DNA, 15 bp, Homo sapiens
acactttaagagaag

SEQ ID NO: 386309 - DNA, 15 bp, Homo sapiens
aacactttaagagaa

SEQ ID NO: 386310 - DNA, 15 bp, Homo sapiens
caacactttaagaga

SEQ ID NO: 386311 - DNA, 15 bp, Homo sapiens
ccaacactttaagag

SEQ ID NO: 386312 - DNA, 15 bp, Homo sapiens
tccaacactttaaga

SEQ ID NO: 386313 - DNA, 15 bp, Homo sapiens
ctccaacactttaag

SEQ ID NO: 386314 - DNA, 15 bp, Homo sapiens
cctccaacactttaa

SEQ ID NO: 386315 - DNA, 15 bp, Homo sapiens
acctccaacacttta

SEQ ID NO: 386316 - DNA, 15 bp, Homo sapiens
gacctccaacacttt

SEQ ID NO: 386317 - DNA, 15 bp, Homo sapiens
agacctccaacactt

SEQ ID NO: 386318 - DNA, 15 bp, Homo sapiens
cagacctccaacact

SEQ ID NO: 386319 - DNA, 15 bp, Homo sapiens
ccagacctccaacac

SEQ ID NO: 386320 - DNA, 15 bp, Homo sapiens
gccagacctccaaca

SEQ ID NO: 386321 - DNA, 15 bp, Homo sapiens
agccagacctccaac

SEQ ID NO: 386322 - DNA, 15 bp, Homo sapiens
tagccagacctccaa

SEQ ID NO: 386323 - DNA, 15 bp, Homo sapiens
atagccagacctcca

SEQ ID NO: 386324 - DNA, 15 bp, Homo sapiens
aatagccagacctcc

SEQ ID NO: 386325 - DNA, 15 bp, Homo sapiens
taatagccagacctc

SEQ ID NO: 386326 - DNA, 15 bp, Homo sapiens
ataatagccagacct

SEQ ID NO: 386327 - DNA, 15 bp, Homo sapiens
tataatagccagacc

SEQ ID NO: 386328 - DNA, 15 bp, Homo sapiens
ctataatagccagac

SEQ ID NO: 386329 - DNA, 15 bp, Homo sapiens
tctataatagccaga

SEQ ID NO: 386330 - DNA, 15 bp, Homo sapiens
atctataatagccag

SEQ ID NO: 386331 - DNA, 15 bp, Homo sapiens
gatctataatagcca

SEQ ID NO: 386332 - DNA, 15 bp, Homo sapiens
agatctataatagcc

SEQ ID NO: 386333 - DNA, 15 bp, Homo sapiens
aagatctataatagc

SEQ ID NO: 386334 - DNA, 15 bp, Homo sapiens
gaagatctataatag

SEQ ID NO: 386335 - DNA, 15 bp, Homo sapiens
agaagatctataata

SEQ ID NO: 386336 - DNA, 15 bp, Homo sapiens
cagaagatctataat

SEQ ID NO: 386337 - DNA, 15 bp, Homo sapiens
ccagaagatctataa

SEQ ID NO: 386338 - DNA, 15 bp, Homo sapiens
tccagaagatctata

SEQ ID NO: 386339 - DNA, 15 bp, Homo sapiens
atccagaagatctat

SEQ ID NO: 386340 - DNA, 15 bp, Homo sapiens
catccagaagatcta

SEQ ID NO: 386341 - DNA, 15 bp, Homo sapiens
ccatccagaagatct

SEQ ID NO: 386342 - DNA, 15 bp, Homo sapiens
gccatccagaagatc

SEQ ID NO: 386343 - DNA, 15 bp, Homo sapiens
ggccatccagaagat

SEQ ID NO: 386344 - DNA, 15 bp, Homo sapiens
aggccatccagaaga

SEQ ID NO: 386345 - DNA, 15 bp, Homo sapiens
caggccatccagaag

SEQ ID NO: 386346 - DNA, 15 bp, Homo sapiens
tcaggccatccagaa

SEQ ID NO: 386347 - DNA, 15 bp, Homo sapiens
gtcaggccatccaga

SEQ ID NO: 386348 - DNA, 15 bp, Homo sapiens
tgtcaggccatccag

SEQ ID NO: 386349 - DNA, 15 bp, Homo sapiens
atgtcaggccatcca

SEQ ID NO: 386350 - DNA, 15 bp, Homo sapiens
gatgtcaggccatcc

SEQ ID NO: 386351 - DNA, 15 bp, Homo sapiens
ggatgtcaggccatc

SEQ ID NO: 386352 - DNA, 15 bp, Homo sapiens
tggatgtcaggccat

SEQ ID NO: 386353 - DNA, 15 bp, Homo sapiens
atggatgtcaggcca

SEQ ID NO: 386354 - DNA, 15 bp, Homo sapiens
aatggatgtcaggcc

SEQ ID NO: 386355 - DNA, 15 bp, Homo sapiens
caatggatgtcaggc

SEQ ID NO: 386356 - DNA, 15 bp, Homo sapiens
gcaatggatgtcagg

SEQ ID NO: 386357 - DNA, 15 bp, Homo sapiens
ggcaatggatgtcag

SEQ ID NO: 386358 - DNA, 15 bp, Homo sapiens
aggcaatggatgtca

SEQ ID NO: 386359 - DNA, 15 bp, Homo sapiens
caggcaatggatgtc

SEQ ID NO: 386360 - DNA, 15 bp, Homo sapiens
ccaggcaatggatgt

SEQ ID NO: 386361 - DNA, 15 bp, Homo sapiens
tccaggcaatggatg

SEQ ID NO: 386362 - DNA, 15 bp, Homo sapiens
ctccaggcaatggat

SEQ ID NO: 386363 - DNA, 15 bp, Homo sapiens
cctccaggcaatgga

SEQ ID NO: 386364 - DNA, 15 bp, Homo sapiens
ccctccaggcaatgg

SEQ ID NO: 386365 - DNA, 15 bp, Homo sapiens
tccctccaggcaatg

SEQ ID NO: 386366 - DNA, 15 bp, Homo sapiens
ctccctccaggcaat

SEQ ID NO: 386367 - DNA, 15 bp, Homo sapiens
actccctccaggcaa

SEQ ID NO: 386368 - DNA, 15 bp, Homo sapiens
cactccctccaggca

SEQ ID NO: 386369 - DNA, 15 bp, Homo sapiens
ccactccctccaggc

SEQ ID NO: 386370 - DNA, 15 bp, Homo sapiens
accactccctccagg

SEQ ID NO: 386371 - DNA, 15 bp, Homo sapiens
caccactccctccag

SEQ ID NO: 386372 - DNA, 15 bp, Homo sapiens
tcaccactccctcca

SEQ ID NO: 386373 - DNA, 15 bp, Homo sapiens
gtcaccactccctcc

SEQ ID NO: 386374 - DNA, 15 bp, Homo sapiens
agtcaccactccctc

SEQ ID NO: 386375 - DNA, 15 bp, Homo sapiens
cagtcaccactccct

SEQ ID NO: 386376 - DNA, 15 bp, Homo sapiens
gcagtcaccactccc

SEQ ID NO: 386377 - DNA, 15 bp, Homo sapiens
ggcagtcaccactcc

SEQ ID NO: 386378 - DNA, 15 bp, Homo sapiens
aggcagtcaccactc

SEQ ID NO: 386379 - DNA, 15 bp, Homo sapiens
caggcagtcaccact

SEQ ID NO: 386380 - DNA, 15 bp, Homo sapiens
acaggcagtcaccac

SEQ ID NO: 386381 - DNA, 15 bp, Homo sapiens
gacaggcagtcacca

SEQ ID NO: 386382 - DNA, 15 bp, Homo sapiens
agacaggcagtcacc

SEQ ID NO: 386383 - DNA, 15 bp, Homo sapiens
cagacaggcagtcac

SEQ ID NO: 386384 - DNA, 15 bp, Homo sapiens
ccagacaggcagtca

SEQ ID NO: 386385 - DNA, 15 bp, Homo sapiens
tccagacaggcagtc

SEQ ID NO: 386386 - DNA, 15 bp, Homo sapiens
ctccagacaggcagt

SEQ ID NO: 386387 - DNA, 15 bp, Homo sapiens
cctccagacaggcag

SEQ ID NO: 386388 - DNA, 15 bp, Homo sapiens
gcctccagacaggca

SEQ ID NO: 386389 - DNA, 15 bp, Homo sapiens
tgcctccagacaggc

SEQ ID NO: 386390 - DNA, 15 bp, Homo sapiens
ctgcctccagacagg

SEQ ID NO: 386391 - DNA, 15 bp, Homo sapiens
gctgcctccagacag

SEQ ID NO: 386392 - DNA, 15 bp, Homo sapiens
agctgcctccagaca

SEQ ID NO: 386393 - DNA, 15 bp, Homo sapiens
cagctgcctccagac

SEQ ID NO: 386394 - DNA, 15 bp, Homo sapiens
ccagctgcctccaga

SEQ ID NO: 386395 - DNA, 15 bp, Homo sapiens
gccagctgcctccag

SEQ ID NO: 386396 - DNA, 15 bp, Homo sapiens
agccagctgcctcca

SEQ ID NO: 386397 - DNA, 15 bp, Homo sapiens
gagccagctgcctcc

SEQ ID NO: 386398 - DNA, 15 bp, Homo sapiens
agagccagctgcctc

SEQ ID NO: 386399 - DNA, 15 bp, Homo sapiens
gagagccagctgcct

SEQ ID NO: 386400 - DNA, 15 bp, Homo sapiens
agagagccagctgcc

SEQ ID NO: 386401 - DNA, 15 bp, Homo sapiens
gagagagccagctgc

SEQ ID NO: 386402 - DNA, 15 bp, Homo sapiens
ggagagagccagctg

SEQ ID NO: 386403 - DNA, 15 bp, Homo sapiens
gggagagagccagct

SEQ ID NO: 386404 - DNA, 15 bp, Homo sapiens
agggagagagccagc

SEQ ID NO: 386405 - DNA, 15 bp, Homo sapiens
tagggagagagccag

SEQ ID NO: 386406 - DNA, 15 bp, Homo sapiens
atagggagagagcca

SEQ ID NO: 386407 - DNA, 15 bp, Homo sapiens
aatagggagagagcc

SEQ ID NO: 386408 - DNA, 15 bp, Homo sapiens
caatagggagagagc

SEQ ID NO: 386409 - DNA, 15 bp, Homo sapiens
tcaatagggagagag

SEQ ID NO: 386410 - DNA, 15 bp, Homo sapiens
gtcaatagggagaga

SEQ ID NO: 386411 - DNA, 15 bp, Homo sapiens
tgtcaatagggagag

SEQ ID NO: 386412 - DNA, 15 bp, Homo sapiens
ctgtcaatagggaga

SEQ ID NO: 386413 - DNA, 15 bp, Homo sapiens
cctgtcaatagggag

SEQ ID NO: 386414 - DNA, 15 bp, Homo sapiens
gcctgtcaataggga

SEQ ID NO: 386415 - DNA, 15 bp, Homo sapiens
ggcctgtcaataggg

SEQ ID NO: 386416 - DNA, 15 bp, Homo sapiens
gggcctgtcaatagg

SEQ ID NO: 386417 - DNA, 15 bp, Homo sapiens
agggcctgtcaatag

SEQ ID NO: 386418 - DNA, 15 bp, Homo sapiens
cagggcctgtcaata

SEQ ID NO: 386419 - DNA, 15 bp, Homo sapiens
gcagggcctgtcaat

SEQ ID NO: 386420 - DNA, 15 bp, Homo sapiens
ggcagggcctgtcaa

SEQ ID NO: 386421 - DNA, 15 bp, Homo sapiens
tggcagggcctgtca

SEQ ID NO: 386422 - DNA, 15 bp, Homo sapiens
gtggcagggcctgtc

SEQ ID NO: 386423 - DNA, 15 bp, Homo sapiens
tgtggcagggcctgt

SEQ ID NO: 386424 - DNA, 15 bp, Homo sapiens
gtgtggcagggcctg

SEQ ID NO: 386425 - DNA, 15 bp, Homo sapiens
ggtgtggcagggcct

SEQ ID NO: 386426 - DNA, 15 bp, Homo sapiens
gggtgtggcagggcc

SEQ ID NO: 386427 - DNA, 15 bp, Homo sapiens
agggtgtggcagggc

SEQ ID NO: 386428 - DNA, 15 bp, Homo sapiens
cagggtgtggcaggg

SEQ ID NO: 386429 - DNA, 15 bp, Homo sapiens
ccagggtgtggcagg

SEQ ID NO: 386430 - DNA, 15 bp, Homo sapiens
gccagggtgtggcag

SEQ ID NO: 386431 - DNA, 15 bp, Homo sapiens
tgccagggtgtggca

SEQ ID NO: 386432 - DNA, 15 bp, Homo sapiens
ttgccagggtgtggc

SEQ ID NO: 386433 - DNA, 15 bp, Homo sapiens
attgccagggtgtgg

SEQ ID NO: 386434 - DNA, 15 bp, Homo sapiens
aattgccagggtgtg

SEQ ID NO: 386435 - DNA, 15 bp, Homo sapiens
gaattgccagggtgt

SEQ ID NO: 386436 - DNA, 15 bp, Homo sapiens
agaattgccagggtg

SEQ ID NO: 386437 - DNA, 15 bp, Homo sapiens
aagaattgccagggt

SEQ ID NO: 386438 - DNA, 15 bp, Homo sapiens
gaagaattgccaggg

SEQ ID NO: 386439 - DNA, 15 bp, Homo sapiens
ggaagaattgccagg

SEQ ID NO: 386440 - DNA, 15 bp, Homo sapiens
aggaagaattgccag

SEQ ID NO: 386441 - DNA, 15 bp, Homo sapiens
caggaagaattgcca

SEQ ID NO: 386442 - DNA, 15 bp, Homo sapiens
ccaggaagaattgcc

SEQ ID NO: 386443 - DNA, 15 bp, Homo sapiens
gccaggaagaattgc

SEQ ID NO: 386444 - DNA, 15 bp, Homo sapiens
tgccaggaagaattg

SEQ ID NO: 386445 - DNA, 15 bp, Homo sapiens
gtgccaggaagaatt

SEQ ID NO: 386446 - DNA, 15 bp, Homo sapiens
ggtgccaggaagaat

SEQ ID NO: 386447 - DNA, 15 bp, Homo sapiens
tggtgccaggaagaa

SEQ ID NO: 386448 - DNA, 15 bp, Homo sapiens
ttggtgccaggaaga

SEQ ID NO: 386449 - DNA, 15 bp, Homo sapiens
cttggtgccaggaag

SEQ ID NO: 386450 - DNA, 15 bp, Homo sapiens
ccttggtgccaggaa

SEQ ID NO: 386451 - DNA, 15 bp, Homo sapiens
gccttggtgccagga

SEQ ID NO: 386452 - DNA, 15 bp, Homo sapiens
tgccttggtgccagg

SEQ ID NO: 386453 - DNA, 15 bp, Homo sapiens
ttgccttggtgccag

SEQ ID NO: 386454 - DNA, 15 bp, Homo sapiens
cttgccttggtgcca

SEQ ID NO: 386455 - DNA, 15 bp, Homo sapiens
tcttgccttggtgcc

SEQ ID NO: 386456 - DNA, 15 bp, Homo sapiens
ctcttgccttggtgc

SEQ ID NO: 386457 - DNA, 15 bp, Homo sapiens
actcttgccttggtg

SEQ ID NO: 386458 - DNA, 15 bp, Homo sapiens
gactcttgccttggt

SEQ ID NO: 386459 - DNA, 15 bp, Homo sapiens
tgactcttgccttgg

SEQ ID NO: 386460 - DNA, 15 bp, Homo sapiens
ctgactcttgccttg

SEQ ID NO: 386461 - DNA, 15 bp, Homo sapiens
actgactcttgcctt

SEQ ID NO: 386462 - DNA, 15 bp, Homo sapiens
cactgactcttgcct

SEQ ID NO: 386463 - DNA, 15 bp, Homo sapiens
ccactgactcttgcc

SEQ ID NO: 386464 - DNA, 15 bp, Homo sapiens
cccactgactcttgc

SEQ ID NO: 386465 - DNA, 15 bp, Homo sapiens
gcccactgactcttg

SEQ ID NO: 386466 - DNA, 15 bp, Homo sapiens
tgcccactgactctt

SEQ ID NO: 386467 - DNA, 15 bp, Homo sapiens
gtgcccactgactct

SEQ ID NO: 386468 - DNA, 15 bp, Homo sapiens
ggtgcccactgactc

SEQ ID NO: 386469 - DNA, 15 bp, Homo sapiens
aggtgcccactgact

SEQ ID NO: 386470 - DNA, 15 bp, Homo sapiens
caggtgcccactgac

SEQ ID NO: 386471 - DNA, 15 bp, Homo sapiens
acaggtgcccactga

SEQ ID NO: 386472 - DNA, 15 bp, Homo sapiens
gacaggtgcccactg

SEQ ID NO: 386473 - DNA, 15 bp, Homo sapiens
tgacaggtgcccact

SEQ ID NO: 386474 - DNA, 15 bp, Homo sapiens
atgacaggtgcccac

SEQ ID NO: 386475 - DNA, 15 bp, Homo sapiens
gatgacaggtgccca

SEQ ID NO: 386476 - DNA, 15 bp, Homo sapiens
agatgacaggtgccc

SEQ ID NO: 386477 - DNA, 15 bp, Homo sapiens
gagatgacaggtgcc

SEQ ID NO: 386478 - DNA, 15 bp, Homo sapiens
tgagatgacaggtgc

SEQ ID NO: 386479 - DNA, 15 bp, Homo sapiens
atgagatgacaggtg

SEQ ID NO: 386480 - DNA, 15 bp, Homo sapiens
aatgagatgacaggt

SEQ ID NO: 386481 - DNA, 15 bp, Homo sapiens
caatgagatgacagg

SEQ ID NO: 386482 - DNA, 15 bp, Homo sapiens
gcaatgagatgacag

SEQ ID NO: 386483 - DNA, 15 bp, Homo sapiens
agcaatgagatgaca

SEQ ID NO: 386484 - DNA, 15 bp, Homo sapiens
aagcaatgagatgac

SEQ ID NO: 386485 - DNA, 15 bp, Homo sapiens
aaagcaatgagatga

SEQ ID NO: 386486 - DNA, 15 bp, Homo sapiens
caaagcaatgagatg

SEQ ID NO: 386487 - DNA, 15 bp, Homo sapiens
gcaaagcaatgagat

SEQ ID NO: 386488 - DNA, 15 bp, Homo sapiens
ggcaaagcaatgaga

SEQ ID NO: 386489 - DNA, 15 bp, Homo sapiens
aggcaaagcaatgag

SEQ ID NO: 386490 - DNA, 15 bp, Homo sapiens
caggcaaagcaatga

SEQ ID NO: 386491 - DNA, 15 bp, Homo sapiens
gcaggcaaagcaatg

SEQ ID NO: 386492 - DNA, 15 bp, Homo sapiens
agcaggcaaagcaat

SEQ ID NO: 386493 - DNA, 15 bp, Homo sapiens
aagcaggcaaagcaa

SEQ ID NO: 386494 - DNA, 15 bp, Homo sapiens
gaagcaggcaaagca

SEQ ID NO: 386495 - DNA, 15 bp, Homo sapiens
tgaagcaggcaaagc

SEQ ID NO: 386496 - DNA, 15 bp, Homo sapiens
gtgaagcaggcaaag

SEQ ID NO: 386497 - DNA, 15 bp, Homo sapiens
ggtgaagcaggcaaa

SEQ ID NO: 386498 - DNA, 15 bp, Homo sapiens
gggtgaagcaggcaa

SEQ ID NO: 386499 - DNA, 15 bp, Homo sapiens
agggtgaagcaggca

SEQ ID NO: 386500 - DNA, 15 bp, Homo sapiens
gagggtgaagcaggc

SEQ ID NO: 386501 - DNA, 15 bp, Homo sapiens
agagggtgaagcagg

SEQ ID NO: 386502 - DNA, 15 bp, Homo sapiens
cagagggtgaagcag

SEQ ID NO: 386503 - DNA, 15 bp, Homo sapiens
tcagagggtgaagca

SEQ ID NO: 386504 - DNA, 15 bp, Homo sapiens
gtcagagggtgaagc

SEQ ID NO: 386505 - DNA, 15 bp, Homo sapiens
tgtcagagggtgaag

SEQ ID NO: 386506 - DNA, 15 bp, Homo sapiens
ttgtcagagggtgaa

SEQ ID NO: 386507 - DNA, 15 bp, Homo sapiens
attgtcagagggtga

SEQ ID NO: 386508 - DNA, 15 bp, Homo sapiens
tattgtcagagggtg

SEQ ID NO: 386509 - DNA, 15 bp, Homo sapiens
gtattgtcagagggt

SEQ ID NO: 386510 - DNA, 15 bp, Homo sapiens
ggtattgtcagaggg

SEQ ID NO: 386511 - DNA, 15 bp, Homo sapiens
aggtattgtcagagg

SEQ ID NO: 386512 - DNA, 15 bp, Homo sapiens
aaggtattgtcagag

SEQ ID NO: 386513 - DNA, 15 bp, Homo sapiens
gaaggtattgtcaga

SEQ ID NO: 386514 - DNA, 15 bp, Homo sapiens
tgaaggtattgtcag

SEQ ID NO: 386515 - DNA, 15 bp, Homo sapiens
atgaaggtattgtca

SEQ ID NO: 386516 - DNA, 15 bp, Homo sapiens
catgaaggtattgtc

SEQ ID NO: 386517 - DNA, 15 bp, Homo sapiens
tcatgaaggtattgt

SEQ ID NO: 386518 - DNA, 15 bp, Homo sapiens
ctcatgaaggtattg

SEQ ID NO: 386519 - DNA, 15 bp, Homo sapiens
gctcatgaaggtatt

SEQ ID NO: 386520 - DNA, 15 bp, Homo sapiens
ggctcatgaaggtat

SEQ ID NO: 386521 - DNA, 15 bp, Homo sapiens
gggctcatgaaggta

SEQ ID NO: 386522 - DNA, 15 bp, Homo sapiens
agggctcatgaaggt

SEQ ID NO: 386523 - DNA, 15 bp, Homo sapiens
cagggctcatgaagg

SEQ ID NO: 386524 - DNA, 15 bp, Homo sapiens
acagggctcatgaag

SEQ ID NO: 386525 - DNA, 15 bp, Homo sapiens
tacagggctcatgaa

SEQ ID NO: 386526 - DNA, 15 bp, Homo sapiens
ctacagggctcatga

SEQ ID NO: 386527 - DNA, 15 bp, Homo sapiens
cctacagggctcatg

SEQ ID NO: 386528 - DNA, 15 bp, Homo sapiens
gcctacagggctcat

SEQ ID NO: 386529 - DNA, 15 bp, Homo sapiens
tgcctacagggctca

SEQ ID NO: 386530 - DNA, 15 bp, Homo sapiens
ttgcctacagggctc

SEQ ID NO: 386531 - DNA, 15 bp, Homo sapiens
attgcctacagggct

SEQ ID NO: 386532 - DNA, 15 bp, Homo sapiens
aattgcctacagggc

SEQ ID NO: 386533 - DNA, 15 bp, Homo sapiens
caattgcctacaggg

SEQ ID NO: 386534 - DNA, 15 bp, Homo sapiens
tcaattgcctacagg

SEQ ID NO: 386535 - DNA, 15 bp, Homo sapiens
ctcaattgcctacag

SEQ ID NO: 386536 - DNA, 15 bp, Homo sapiens
gctcaattgcctaca

SEQ ID NO: 386537 - DNA, 15 bp, Homo sapiens
tgctcaattgcctac

SEQ ID NO: 386538 - DNA, 15 bp, Homo sapiens
gtgctcaattgccta

SEQ ID NO: 386539 - DNA, 15 bp, Homo sapiens
tgtgctcaattgcct

SEQ ID NO: 386540 - DNA, 15 bp, Homo sapiens
atgtgctcaattgcc

SEQ ID NO: 386541 - DNA, 15 bp, Homo sapiens
catgtgctcaattgc

SEQ ID NO: 386542 - DNA, 15 bp, Homo sapiens
tcatgtgctcaattg

SEQ ID NO: 386543 - DNA, 15 bp, Homo sapiens
atcatgtgctcaatt

SEQ ID NO: 386544 - DNA, 15 bp, Homo sapiens
gatcatgtgctcaat

SEQ ID NO: 386545 - DNA, 15 bp, Homo sapiens
agatcatgtgctcaa

SEQ ID NO: 386546 - DNA, 15 bp, Homo sapiens
gagatcatgtgctca

SEQ ID NO: 386547 - DNA, 15 bp, Homo sapiens
cgagatcatgtgctc

SEQ ID NO: 386548 - DNA, 15 bp, Homo sapiens
tcgagatcatgtgct

SEQ ID NO: 386549 - DNA, 15 bp, Homo sapiens
atcgagatcatgtgc

SEQ ID NO: 386550 - DNA, 15 bp, Homo sapiens
aatcgagatcatgtg

SEQ ID NO: 386551 - DNA, 15 bp, Homo sapiens
aaatcgagatcatgt

SEQ ID NO: 386552 - DNA, 15 bp, Homo sapiens
gaaatcgagatcatg

SEQ ID NO: 386553 - DNA, 15 bp, Homo sapiens
tgaaatcgagatcat

SEQ ID NO: 386554 - DNA, 15 bp, Homo sapiens
ttgaaatcgagatca

SEQ ID NO: 386555 - DNA, 15 bp, Homo sapiens
tttgaaatcgagatc

SEQ ID NO: 386556 - DNA, 15 bp, Homo sapiens
atttgaaatcgagat

SEQ ID NO: 386557 - DNA, 15 bp, Homo sapiens
tatttgaaatcgaga

SEQ ID NO: 386558 - DNA, 15 bp, Homo sapiens
gtatttgaaatcgag

SEQ ID NO: 386559 - DNA, 15 bp, Homo sapiens
tgtatttgaaatcga

SEQ ID NO: 386560 - DNA, 15 bp, Homo sapiens
gtgtatttgaaatcg

SEQ ID NO: 386561 - DNA, 15 bp, Homo sapiens
tgtgtatttgaaatc

SEQ ID NO: 386562 - DNA, 15 bp, Homo sapiens
ctgtgtatttgaaat

SEQ ID NO: 386563 - DNA, 15 bp, Homo sapiens
gctgtgtatttgaaa

SEQ ID NO: 386564 - DNA, 15 bp, Homo sapiens
ggctgtgtatttgaa

SEQ ID NO: 386565 - DNA, 15 bp, Homo sapiens
gggctgtgtatttga

SEQ ID NO: 386566 - DNA, 15 bp, Homo sapiens
tgggctgtgtatttg

SEQ ID NO: 386567 - DNA, 15 bp, Homo sapiens
gtgggctgtgtattt

SEQ ID NO: 386568 - DNA, 15 bp, Homo sapiens
agtgggctgtgtatt

SEQ ID NO: 386569 - DNA, 15 bp, Homo sapiens
aagtgggctgtgtat

SEQ ID NO: 386570 - DNA, 15 bp, Homo sapiens
caagtgggctgtgta

SEQ ID NO: 386571 - DNA, 15 bp, Homo sapiens
ccaagtgggctgtgt

SEQ ID NO: 386572 - DNA, 15 bp, Homo sapiens
gccaagtgggctgtg

SEQ ID NO: 386573 - DNA, 15 bp, Homo sapiens
ggccaagtgggctgt

SEQ ID NO: 386574 - DNA, 15 bp, Homo sapiens
aggccaagtgggctg

SEQ ID NO: 386575 - DNA, 15 bp, Homo sapiens
caggccaagtgggct

SEQ ID NO: 386576 - DNA, 15 bp, Homo sapiens
acaggccaagtgggc

SEQ ID NO: 386577 - DNA, 15 bp, Homo sapiens
cacaggccaagtggg

SEQ ID NO: 386578 - DNA, 15 bp, Homo sapiens
acacaggccaagtgg

SEQ ID NO: 386579 - DNA, 15 bp, Homo sapiens
gacacaggccaagtg

SEQ ID NO: 386580 - DNA, 15 bp, Homo sapiens
ggacacaggccaagt

SEQ ID NO: 386581 - DNA, 15 bp, Homo sapiens
gggacacaggccaag

SEQ ID NO: 386582 - DNA, 15 bp, Homo sapiens
agggacacaggccaa

SEQ ID NO: 386583 - DNA, 15 bp, Homo sapiens
gagggacacaggcca

SEQ ID NO: 386584 - DNA, 15 bp, Homo sapiens
ggagggacacaggcc

SEQ ID NO: 386585 - DNA, 15 bp, Homo sapiens
gggagggacacaggc

SEQ ID NO: 386586 - DNA, 15 bp, Homo sapiens
agggagggacacagg

SEQ ID NO: 386587 - DNA, 15 bp, Homo sapiens
cagggagggacacag

SEQ ID NO: 386588 - DNA, 15 bp, Homo sapiens
ccagggagggacaca

SEQ ID NO: 386589 - DNA, 15 bp, Homo sapiens
accagggagggacac

SEQ ID NO: 386590 - DNA, 15 bp, Homo sapiens
aaccagggagggaca

SEQ ID NO: 386591 - DNA, 15 bp, Homo sapiens
aaaccagggagggac

SEQ ID NO: 386592 - DNA, 15 bp, Homo sapiens
gaaaccagggaggga

SEQ ID NO: 386593 - DNA, 15 bp, Homo sapiens
ggaaaccagggaggg

SEQ ID NO: 386594 - DNA, 15 bp, Homo sapiens
aggaaaccagggagg

SEQ ID NO: 386595 - DNA, 15 bp, Homo sapiens
aaggaaaccagggag

SEQ ID NO: 386596 - DNA, 15 bp, Homo sapiens
taaggaaaccaggga

SEQ ID NO: 386597 - DNA, 15 bp, Homo sapiens
ctaaggaaaccaggg

SEQ ID NO: 386598 - DNA, 15 bp, Homo sapiens
tctaaggaaaccagg

SEQ ID NO: 386599 - DNA, 15 bp, Homo sapiens
atctaaggaaaccag

SEQ ID NO: 386600 - DNA, 15 bp, Homo sapiens
tatctaaggaaacca

SEQ ID NO: 386601 - DNA, 15 bp, Homo sapiens
ctatctaaggaaacc

SEQ ID NO: 386602 - DNA, 15 bp, Homo sapiens
gctatctaaggaaac

SEQ ID NO: 386603 - DNA, 15 bp, Homo sapiens
agctatctaaggaaa

SEQ ID NO: 386604 - DNA, 15 bp, Homo sapiens
gagctatctaaggaa

SEQ ID NO: 386605 - DNA, 15 bp, Homo sapiens
agagctatctaagga

SEQ ID NO: 386606 - DNA, 15 bp, Homo sapiens
cagagctatctaagg

SEQ ID NO: 386607 - DNA, 15 bp, Homo sapiens
acagagctatctaag

SEQ ID NO: 386608 - DNA, 15 bp, Homo sapiens
cacagagctatctaa

SEQ ID NO: 386609 - DNA, 15 bp, Homo sapiens
acacagagctatcta

SEQ ID NO: 386610 - DNA, 15 bp, Homo sapiens
cacacagagctatct

SEQ ID NO: 386611 - DNA, 15 bp, Homo sapiens
tcacacagagctatc

SEQ ID NO: 386612 - DNA, 15 bp, Homo sapiens
ttcacacagagctat

SEQ ID NO: 386613 - DNA, 15 bp, Homo sapiens
cttcacacagagcta

SEQ ID NO: 386614 - DNA, 15 bp, Homo sapiens
acttcacacagagct

SEQ ID NO: 386615 - DNA, 15 bp, Homo sapiens
gacttcacacagagc

SEQ ID NO: 386616 - DNA, 15 bp, Homo sapiens
ggacttcacacagag

SEQ ID NO: 386617 - DNA, 15 bp, Homo sapiens
aggacttcacacaga

SEQ ID NO: 386618 - DNA, 15 bp, Homo sapiens
aaggacttcacacag

SEQ ID NO: 386619 - DNA, 15 bp, Homo sapiens
gaaggacttcacaca

SEQ ID NO: 386620 - DNA, 15 bp, Homo sapiens
agaaggacttcacac

SEQ ID NO: 386621 - DNA, 15 bp, Homo sapiens
aagaaggacttcaca

SEQ ID NO: 386622 - DNA, 15 bp, Homo sapiens
aaagaaggacttcac

SEQ ID NO: 386623 - DNA, 15 bp, Homo sapiens
gaaagaaggacttca

SEQ ID NO: 386624 - DNA, 15 bp, Homo sapiens
tgaaagaaggacttc

SEQ ID NO: 386625 - DNA, 15 bp, Homo sapiens
atgaaagaaggactt

SEQ ID NO: 386626 - DNA, 15 bp, Homo sapiens
tatgaaagaaggact

SEQ ID NO: 386627 - DNA, 15 bp, Homo sapiens
ttatgaaagaaggac

SEQ ID NO: 386628 - DNA, 15 bp, Homo sapiens
attatgaaagaagga

SEQ ID NO: 386629 - DNA, 15 bp, Homo sapiens
tattatgaaagaagg

SEQ ID NO: 386630 - DNA, 15 bp, Homo sapiens
atattatgaaagaag

SEQ ID NO: 386631 - DNA, 15 bp, Homo sapiens
gatattatgaaagaa

SEQ ID NO: 386632 - DNA, 15 bp, Homo sapiens
ggatattatgaaaga

SEQ ID NO: 386633 - DNA, 15 bp, Homo sapiens
aggatattatgaaag

SEQ ID NO: 386634 - DNA, 15 bp, Homo sapiens
aaggatattatgaaa

SEQ ID NO: 386635 - DNA, 15 bp, Homo sapiens
aaaggatattatgaa

SEQ ID NO: 386636 - DNA, 15 bp, Homo sapiens
caaaggatattatga

SEQ ID NO: 386637 - DNA, 15 bp, Homo sapiens
tcaaaggatattatg

SEQ ID NO: 386638 - DNA, 15 bp, Homo sapiens
ttcaaaggatattat

SEQ ID NO: 386639 - DNA, 15 bp, Homo sapiens
tttcaaaggatatta

SEQ ID NO: 386640 - DNA, 15 bp, Homo sapiens
gtttcaaaggatatt

SEQ ID NO: 386641 - DNA, 15 bp, Homo sapiens
ggtttcaaaggatat

SEQ ID NO: 386642 - DNA, 15 bp, Homo sapiens
cggtttcaaaggata

SEQ ID NO: 386643 - DNA, 15 bp, Homo sapiens
tcggtttcaaaggat

SEQ ID NO: 386644 - DNA, 15 bp, Homo sapiens
atcggtttcaaagga

SEQ ID NO: 386645 - DNA, 15 bp, Homo sapiens
tatcggtttcaaagg

SEQ ID NO: 386646 - DNA, 15 bp, Homo sapiens
atatcggtttcaaag

SEQ ID NO: 386647 - DNA, 15 bp, Homo sapiens
aatatcggtttcaaa

SEQ ID NO: 386648 - DNA, 15 bp, Homo sapiens
gaatatcggtttcaa

SEQ ID NO: 386649 - DNA, 15 bp, Homo sapiens
tgaatatcggtttca

SEQ ID NO: 386650 - DNA, 15 bp, Homo sapiens
gtgaatatcggtttc

SEQ ID NO: 386651 - DNA, 15 bp, Homo sapiens
ggtgaatatcggttt

SEQ ID NO: 386652 - DNA, 15 bp, Homo sapiens
gggtgaatatcggtt

SEQ ID NO: 386653 - DNA, 15 bp, Homo sapiens
tgggtgaatatcggt

SEQ ID NO: 386654 - DNA, 15 bp, Homo sapiens
atgggtgaatatcgg

SEQ ID NO: 386655 - DNA, 15 bp, Homo sapiens
aatgggtgaatatcg

SEQ ID NO: 386656 - DNA, 15 bp, Homo sapiens
aaatgggtgaatatc

SEQ ID NO: 386657 - DNA, 15 bp, Homo sapiens
taaatgggtgaatat

SEQ ID NO: 386658 - DNA, 15 bp, Homo sapiens
ttaaatgggtgaata

SEQ ID NO: 386659 - DNA, 15 bp, Homo sapiens
cttaaatgggtgaat

SEQ ID NO: 386660 - DNA, 15 bp, Homo sapiens
acttaaatgggtgaa

SEQ ID NO: 386661 - DNA, 15 bp, Homo sapiens
cacttaaatgggtga

SEQ ID NO: 386662 - DNA, 15 bp, Homo sapiens
tcacttaaatgggtg

SEQ ID NO: 386663 - DNA, 15 bp, Homo sapiens
atcacttaaatgggt

SEQ ID NO: 386664 - DNA, 15 bp, Homo sapiens
catcacttaaatggg

SEQ ID NO: 386665 - DNA, 15 bp, Homo sapiens
tcatcacttaaatgg

SEQ ID NO: 386666 - DNA, 15 bp, Homo sapiens
ttcatcacttaaatg

SEQ ID NO: 386667 - DNA, 15 bp, Homo sapiens
cttcatcacttaaat

SEQ ID NO: 386668 - DNA, 15 bp, Homo sapiens
gcttcatcacttaaa

SEQ ID NO: 386669 - DNA, 15 bp, Homo sapiens
agcttcatcacttaa

SEQ ID NO: 386670 - DNA, 15 bp, Homo sapiens
aagcttcatcactta

SEQ ID NO: 386671 - DNA, 15 bp, Homo sapiens
gaagcttcatcactt

SEQ ID NO: 386672 - DNA, 15 bp, Homo sapiens
tgaagcttcatcact

SEQ ID NO: 386673 - DNA, 15 bp, Homo sapiens
ctgaagcttcatcac

SEQ ID NO: 386674 - DNA, 15 bp, Homo sapiens
cctgaagcttcatca

SEQ ID NO: 386675 - DNA, 15 bp, Homo sapiens
ccctgaagcttcatc

SEQ ID NO: 386676 - DNA, 15 bp, Homo sapiens
gccctgaagcttcat

SEQ ID NO: 386677 - DNA, 15 bp, Homo sapiens
agccctgaagcttca

SEQ ID NO: 386678 - DNA, 15 bp, Homo sapiens
gagccctgaagcttc

SEQ ID NO: 386679 - DNA, 15 bp, Homo sapiens
tgagccctgaagctt

SEQ ID NO: 386680 - DNA, 15 bp, Homo sapiens
ctgagccctgaagct

SEQ ID NO: 386681 - DNA, 15 bp, Homo sapiens
tctgagccctgaagc

SEQ ID NO: 386682 - DNA, 15 bp, Homo sapiens
ttctgagccctgaag

SEQ ID NO: 386683 - DNA, 15 bp, Homo sapiens
tttctgagccctgaa

SEQ ID NO: 386684 - DNA, 15 bp, Homo sapiens
ctttctgagccctga

SEQ ID NO: 386685 - DNA, 15 bp, Homo sapiens
tctttctgagccctg

SEQ ID NO: 386686 - DNA, 15 bp, Homo sapiens
ctctttctgagccct

SEQ ID NO: 386687 - DNA, 15 bp, Homo sapiens
actctttctgagccc

SEQ ID NO: 386688 - DNA, 15 bp, Homo sapiens
cactctttctgagcc

SEQ ID NO: 386689 - DNA, 15 bp, Homo sapiens
tcactctttctgagc

SEQ ID NO: 386690 - DNA, 15 bp, Homo sapiens
ctcactctttctgag

SEQ ID NO: 386691 - DNA, 15 bp, Homo sapiens
tctcactctttctga

SEQ ID NO: 386692 - DNA, 15 bp, Homo sapiens
ttctcactctttctg

SEQ ID NO: 386693 - DNA, 15 bp, Homo sapiens
tttctcactctttct

SEQ ID NO: 386694 - DNA, 15 bp, Homo sapiens
atttctcactctttc

SEQ ID NO: 386695 - DNA, 15 bp, Homo sapiens
aatttctcactcttt

SEQ ID NO: 386696 - DNA, 15 bp, Homo sapiens
aaatttctcactctt

SEQ ID NO: 386697 - DNA, 15 bp, Homo sapiens
caaatttctcactct

SEQ ID NO: 386698 - DNA, 15 bp, Homo sapiens
gcaaatttctcactc

SEQ ID NO: 386699 - DNA, 15 bp, Homo sapiens
ggcaaatttctcact

SEQ ID NO: 386700 - DNA, 15 bp, Homo sapiens
tggcaaatttctcac

SEQ ID NO: 386701 - DNA, 15 bp, Homo sapiens
ttggcaaatttctca

SEQ ID NO: 386702 - DNA, 15 bp, Homo sapiens
tttggcaaatttctc

SEQ ID NO: 386703 - DNA, 15 bp, Homo sapiens
ttttggcaaatttct

SEQ ID NO: 386704 - DNA, 15 bp, Homo sapiens
tttttggcaaatttc

SEQ ID NO: 386705 - DNA, 15 bp, Homo sapiens
atttttggcaaattt

SEQ ID NO: 386706 - DNA, 15 bp, Homo sapiens
aatttttggcaaatt

SEQ ID NO: 386707 - DNA, 15 bp, Homo sapiens
gaatttttggcaaat

SEQ ID NO: 386708 - DNA, 15 bp, Homo sapiens
agaatttttggcaaa

SEQ ID NO: 386709 - DNA, 15 bp, Homo sapiens
tagaatttttggcaa

SEQ ID NO: 386710 - DNA, 15 bp, Homo sapiens
gtagaatttttggca

SEQ ID NO: 386711 - DNA, 15 bp, Homo sapiens
tgtagaatttttggc

SEQ ID NO: 386712 - DNA, 15 bp, Homo sapiens
ctgtagaatttttgg

SEQ ID NO: 386713 - DNA, 15 bp, Homo sapiens
gctgtagaatttttg

SEQ ID NO: 386714 - DNA, 15 bp, Homo sapiens
ggctgtagaattttt

SEQ ID NO: 386715 - DNA, 15 bp, Homo sapiens
tggctgtagaatttt

SEQ ID NO: 386716 - DNA, 15 bp, Homo sapiens
ttggctgtagaattt

SEQ ID NO: 386717 - DNA, 15 bp, Homo sapiens
attggctgtagaatt

SEQ ID NO: 386718 - DNA, 15 bp, Homo sapiens
gattggctgtagaat

SEQ ID NO: 386719 - DNA, 15 bp, Homo sapiens
ggattggctgtagaa

SEQ ID NO: 386720 - DNA, 15 bp, Homo sapiens
tggattggctgtaga

SEQ ID NO: 386721 - DNA, 15 bp, Homo sapiens
ttggattggctgtag

SEQ ID NO: 386722 - DNA, 15 bp, Homo sapiens
cttggattggctgta

SEQ ID NO: 386723 - DNA, 15 bp, Homo sapiens
gcttggattggctgt

SEQ ID NO: 386724 - DNA, 15 bp, Homo sapiens
tgcttggattggctg

SEQ ID NO: 386725 - DNA, 15 bp, Homo sapiens
ctgcttggattggct

SEQ ID NO: 386726 - DNA, 15 bp, Homo sapiens
tctgcttggattggc

SEQ ID NO: 386727 - DNA, 15 bp, Homo sapiens
ctctgcttggattgg

SEQ ID NO: 386728 - DNA, 15 bp, Homo sapiens
gctctgcttggattg

SEQ ID NO: 386729 - DNA, 15 bp, Homo sapiens
ggctctgcttggatt

SEQ ID NO: 386730 - DNA, 15 bp, Homo sapiens
tggctctgcttggat

SEQ ID NO: 386731 - DNA, 15 bp, Homo sapiens
ctggctctgcttgga

SEQ ID NO: 386732 - DNA, 15 bp, Homo sapiens
cctggctctgcttgg

SEQ ID NO: 386733 - DNA, 15 bp, Homo sapiens
tcctggctctgcttg

SEQ ID NO: 386734 - DNA, 15 bp, Homo sapiens
gtcctggctctgctt

SEQ ID NO: 386735 - DNA, 15 bp, Homo sapiens
agtcctggctctgct

SEQ ID NO: 386736 - DNA, 15 bp, Homo sapiens
gagtcctggctctgc

SEQ ID NO: 386737 - DNA, 15 bp, Homo sapiens
ggagtcctggctctg

SEQ ID NO: 386738 - DNA, 15 bp, Homo sapiens
tggagtcctggctct

SEQ ID NO: 386739 - DNA, 15 bp, Homo sapiens
ttggagtcctggctc

SEQ ID NO: 386740 - DNA, 15 bp, Homo sapiens
cttggagtcctggct

SEQ ID NO: 386741 - DNA, 15 bp, Homo sapiens
ccttggagtcctggc

SEQ ID NO: 386742 - DNA, 15 bp, Homo sapiens
accttggagtcctgg

SEQ ID NO: 386743 - DNA, 15 bp, Homo sapiens
taccttggagtcctg

SEQ ID NO: 386744 - DNA, 15 bp, Homo sapiens
ctaccttggagtcct

SEQ ID NO: 386745 - DNA, 15 bp, Homo sapiens
cctaccttggagtcc

SEQ ID NO: 386746 - DNA, 15 bp, Homo sapiens
tcctaccttggagtc

SEQ ID NO: 386747 - DNA, 15 bp, Homo sapiens
gtcctaccttggagt

SEQ ID NO: 386748 - DNA, 15 bp, Homo sapiens
ggtcctaccttggag

SEQ ID NO: 386749 - DNA, 15 bp, Homo sapiens
aggtcctaccttgga

SEQ ID NO: 386750 - DNA, 15 bp, Homo sapiens
caggtcctaccttgg

SEQ ID NO: 386751 - DNA, 15 bp, Homo sapiens
gcaggtcctaccttg

SEQ ID NO: 386752 - DNA, 15 bp, Homo sapiens
cgcaggtcctacctt

SEQ ID NO: 386753 - DNA, 15 bp, Homo sapiens
gcgcaggtcctacct

SEQ ID NO: 386754 - DNA, 15 bp, Homo sapiens
ggcgcaggtcctacc

SEQ ID NO: 386755 - DNA, 15 bp, Homo sapiens
gggcgcaggtcctac

SEQ ID NO: 386756 - DNA, 15 bp, Homo sapiens
tgggcgcaggtccta

SEQ ID NO: 386757 - DNA, 15 bp, Homo sapiens
ctgggcgcaggtcct

SEQ ID NO: 386758 - DNA, 15 bp, Homo sapiens
cctgggcgcaggtcc

SEQ ID NO: 386759 - DNA, 15 bp, Homo sapiens
acctgggcgcaggtc

SEQ ID NO: 386760 - DNA, 15 bp, Homo sapiens
cacctgggcgcaggt

SEQ ID NO: 386761 - DNA, 15 bp, Homo sapiens
acacctgggcgcagg

SEQ ID NO: 386762 - DNA, 15 bp, Homo sapiens
cacacctgggcgcag

SEQ ID NO: 386763 - DNA, 15 bp, Homo sapiens
acacacctgggcgca

SEQ ID NO: 386764 - DNA, 15 bp, Homo sapiens
tacacacctgggcgc

SEQ ID NO: 386765 - DNA, 15 bp, Homo sapiens
ctacacacctgggcg

SEQ ID NO: 386766 - DNA, 15 bp, Homo sapiens
gctacacacctgggc

SEQ ID NO: 386767 - DNA, 15 bp, Homo sapiens
ggctacacacctggg

SEQ ID NO: 386768 - DNA, 15 bp, Homo sapiens
aggctacacacctgg

SEQ ID NO: 386769 - DNA, 15 bp, Homo sapiens
caggctacacacctg

SEQ ID NO: 386770 - DNA, 15 bp, Homo sapiens
acaggctacacacct

SEQ ID NO: 386771 - DNA, 15 bp, Homo sapiens
tacaggctacacacc

SEQ ID NO: 386772 - DNA, 15 bp, Homo sapiens
gtacaggctacacac

SEQ ID NO: 386773 - DNA, 15 bp, Homo sapiens
ggtacaggctacaca

SEQ ID NO: 386774 - DNA, 15 bp, Homo sapiens
gggtacaggctacac

SEQ ID NO: 386775 - DNA, 15 bp, Homo sapiens
ggggtacaggctaca

SEQ ID NO: 386776 - DNA, 15 bp, Homo sapiens
cggggtacaggctac

SEQ ID NO: 386777 - DNA, 15 bp, Homo sapiens
tcggggtacaggcta

SEQ ID NO: 386778 - DNA, 15 bp, Homo sapiens
ctcggggtacaggct

SEQ ID NO: 386779 - DNA, 15 bp, Homo sapiens
gctcggggtacaggc

SEQ ID NO: 386780 - DNA, 15 bp, Homo sapiens
tgctcggggtacagg

SEQ ID NO: 386781 - DNA, 15 bp, Homo sapiens
ctgctcggggtacag

SEQ ID NO: 386782 - DNA, 15 bp, Homo sapiens
gctgctcggggtaca

SEQ ID NO: 386783 - DNA, 15 bp, Homo sapiens
agctgctcggggtac

SEQ ID NO: 386784 - DNA, 15 bp, Homo sapiens
gagctgctcggggta

SEQ ID NO: 386785 - DNA, 15 bp, Homo sapiens
ggagctgctcggggt

SEQ ID NO: 386786 - DNA, 15 bp, Homo sapiens
tggagctgctcgggg

SEQ ID NO: 386787 - DNA, 15 bp, Homo sapiens
ctggagctgctcggg

SEQ ID NO: 386788 - DNA, 15 bp, Homo sapiens
gctggagctgctcgg

SEQ ID NO: 386789 - DNA, 15 bp, Homo sapiens
tgctggagctgctcg

SEQ ID NO: 386790 - DNA, 15 bp, Homo sapiens
gtgctggagctgctc

SEQ ID NO: 386791 - DNA, 15 bp, Homo sapiens
ggtgctggagctgct

SEQ ID NO: 386792 - DNA, 15 bp, Homo sapiens
cggtgctggagctgc

SEQ ID NO: 386793 - DNA, 15 bp, Homo sapiens
gcggtgctggagctg

SEQ ID NO: 386794 - DNA, 15 bp, Homo sapiens
ggcggtgctggagct

SEQ ID NO: 386795 - DNA, 15 bp, Homo sapiens
tggcggtgctggagc

SEQ ID NO: 386796 - DNA, 15 bp, Homo sapiens
atggcggtgctggag

SEQ ID NO: 386797 - DNA, 15 bp, Homo sapiens
gatggcggtgctgga

SEQ ID NO: 386798 - DNA, 15 bp, Homo sapiens
ggatggcggtgctgg

SEQ ID NO: 386799 - DNA, 15 bp, Homo sapiens
tggatggcggtgctg

SEQ ID NO: 386800 - DNA, 15 bp, Homo sapiens
gtggatggcggtgct

SEQ ID NO: 386801 - DNA, 15 bp, Homo sapiens
tgtggatggcggtgc

SEQ ID NO: 386802 - DNA, 15 bp, Homo sapiens
gtgtggatggcggtg

SEQ ID NO: 386803 - DNA, 15 bp, Homo sapiens
tgtgtggatggcggt

SEQ ID NO: 386804 - DNA, 15 bp, Homo sapiens
gtgtgtggatggcgg

SEQ ID NO: 386805 - DNA, 15 bp, Homo sapiens
tgtgtgtggatggcg

SEQ ID NO: 386806 - DNA, 15 bp, Homo sapiens
ttgtgtgtggatggc

SEQ ID NO: 386807 - DNA, 15 bp, Homo sapiens
cttgtgtgtggatgg

SEQ ID NO: 386808 - DNA, 15 bp, Homo sapiens
tcttgtgtgtggatg

SEQ ID NO: 386809 - DNA, 15 bp, Homo sapiens
gtcttgtgtgtggat

SEQ ID NO: 386810 - DNA, 15 bp, Homo sapiens
tgtcttgtgtgtgga

SEQ ID NO: 386811 - DNA, 15 bp, Homo sapiens
gtgtcttgtgtgtgg

SEQ ID NO: 386812 - DNA, 15 bp, Homo sapiens
tgtgtcttgtgtgtg

SEQ ID NO: 386813 - DNA, 15 bp, Homo sapiens
ttgtgtcttgtgtgt

SEQ ID NO: 386814 - DNA, 15 bp, Homo sapiens
tttgtgtcttgtgtg

SEQ ID NO: 386815 - DNA, 15 bp, Homo sapiens
atttgtgtcttgtgt

SEQ ID NO: 386816 - DNA, 15 bp, Homo sapiens
catttgtgtcttgtg

SEQ ID NO: 386817 - DNA, 15 bp, Homo sapiens
tcatttgtgtcttgt

SEQ ID NO: 386818 - DNA, 15 bp, Homo sapiens
ctcatttgtgtcttg

SEQ ID NO: 386819 - DNA, 15 bp, Homo sapiens
tctcatttgtgtctt

SEQ ID NO: 386820 - DNA, 15 bp, Homo sapiens
ctctcatttgtgtct

SEQ ID NO: 386821 - DNA, 15 bp, Homo sapiens
gctctcatttgtgtc

SEQ ID NO: 386822 - DNA, 15 bp, Homo sapiens
cgctctcatttgtgt

SEQ ID NO: 386823 - DNA, 15 bp, Homo sapiens
acgctctcatttgtg

SEQ ID NO: 386824 - DNA, 15 bp, Homo sapiens
cacgctctcatttgt

SEQ ID NO: 386825 - DNA, 15 bp, Homo sapiens
gcacgctctcatttg

SEQ ID NO: 386826 - DNA, 15 bp, Homo sapiens
agcacgctctcattt

SEQ ID NO: 386827 - DNA, 15 bp, Homo sapiens
gagcacgctctcatt

SEQ ID NO: 386828 - DNA, 15 bp, Homo sapiens
agagcacgctctcat

SEQ ID NO: 386829 - DNA, 15 bp, Homo sapiens
gagagcacgctctca

SEQ ID NO: 386830 - DNA, 15 bp, Homo sapiens
ggagagcacgctctc

SEQ ID NO: 386831 - DNA, 15 bp, Homo sapiens
tggagagcacgctct

SEQ ID NO: 386832 - DNA, 15 bp, Homo sapiens
ctggagagcacgctc

SEQ ID NO: 386833 - DNA, 15 bp, Homo sapiens
tctggagagcacgct

SEQ ID NO: 386834 - DNA, 15 bp, Homo sapiens
gtctggagagcacgc

SEQ ID NO: 386835 - DNA, 15 bp, Homo sapiens
ggtctggagagcacg

SEQ ID NO: 386836 - DNA, 15 bp, Homo sapiens
aggtctggagagcac

SEQ ID NO: 386837 - DNA, 15 bp, Homo sapiens
caggtctggagagca

SEQ ID NO: 386838 - DNA, 15 bp, Homo sapiens
acaggtctggagagc

SEQ ID NO: 386839 - DNA, 15 bp, Homo sapiens
tacaggtctggagag

SEQ ID NO: 386840 - DNA, 15 bp, Homo sapiens
gtacaggtctggaga

SEQ ID NO: 386841 - DNA, 15 bp, Homo sapiens
tgtacaggtctggag

SEQ ID NO: 386842 - DNA, 15 bp, Homo sapiens
ctgtacaggtctgga

SEQ ID NO: 386843 - DNA, 15 bp, Homo sapiens
gctgtacaggtctgg

SEQ ID NO: 386844 - DNA, 15 bp, Homo sapiens
cgctgtacaggtctg

SEQ ID NO: 386845 - DNA, 15 bp, Homo sapiens
gcgctgtacaggtct

SEQ ID NO: 386846 - DNA, 15 bp, Homo sapiens
tgcgctgtacaggtc

SEQ ID NO: 386847 - DNA, 15 bp, Homo sapiens
atgcgctgtacaggt

SEQ ID NO: 386848 - DNA, 15 bp, Homo sapiens
catgcgctgtacagg

SEQ ID NO: 386849 - DNA, 15 bp, Homo sapiens
ccatgcgctgtacag

SEQ ID NO: 386850 - DNA, 15 bp, Homo sapiens
gccatgcgctgtaca

SEQ ID NO: 386851 - DNA, 15 bp, Homo sapiens
ggccatgcgctgtac

SEQ ID NO: 386852 - DNA, 15 bp, Homo sapiens
aggccatgcgctgta

SEQ ID NO: 386853 - DNA, 15 bp, Homo sapiens
caggccatgcgctgt

SEQ ID NO: 386854 - DNA, 15 bp, Homo sapiens
gcaggccatgcgctg

SEQ ID NO: 386855 - DNA, 15 bp, Homo sapiens
ggcaggccatgcgct

SEQ ID NO: 386856 - DNA, 15 bp, Homo sapiens
tggcaggccatgcgc

SEQ ID NO: 386857 - DNA, 15 bp, Homo sapiens
ttggcaggccatgcg

SEQ ID NO: 386858 - DNA, 15 bp, Homo sapiens
cttggcaggccatgc

SEQ ID NO: 386859 - DNA, 15 bp, Homo sapiens
gcttggcaggccatg

SEQ ID NO: 386860 - DNA, 15 bp, Homo sapiens
agcttggcaggccat

SEQ ID NO: 386861 - DNA, 15 bp, Homo sapiens
aagcttggcaggcca

SEQ ID NO: 386862 - DNA, 15 bp, Homo sapiens
aaagcttggcaggcc

SEQ ID NO: 386863 - DNA, 15 bp, Homo sapiens
taaagcttggcaggc

SEQ ID NO: 386864 - DNA, 15 bp, Homo sapiens
ctaaagcttggcagg

SEQ ID NO: 386865 - DNA, 15 bp, Homo sapiens
tctaaagcttggcag

SEQ ID NO: 386866 - DNA, 15 bp, Homo sapiens
gtctaaagcttggca

SEQ ID NO: 386867 - DNA, 15 bp, Homo sapiens
ggtctaaagcttggc

SEQ ID NO: 386868 - DNA, 15 bp, Homo sapiens
tggtctaaagcttgg

SEQ ID NO: 386869 - DNA, 15 bp, Homo sapiens
ttggtctaaagcttg

SEQ ID NO: 386870 - DNA, 15 bp, Homo sapiens
tttggtctaaagctt

SEQ ID NO: 386871 - DNA, 15 bp, Homo sapiens
ctttggtctaaagct

SEQ ID NO: 386872 - DNA, 15 bp, Homo sapiens
gctttggtctaaagc

SEQ ID NO: 386873 - DNA, 15 bp, Homo sapiens
ggctttggtctaaag

SEQ ID NO: 386874 - DNA, 15 bp, Homo sapiens
gggctttggtctaaa

SEQ ID NO: 386875 - DNA, 15 bp, Homo sapiens
ggggctttggtctaa

SEQ ID NO: 386876 - DNA, 15 bp, Homo sapiens
cggggctttggtcta

SEQ ID NO: 386877 - DNA, 15 bp, Homo sapiens
tcggggctttggtct

SEQ ID NO: 386878 - DNA, 15 bp, Homo sapiens
gtcggggctttggtc

SEQ ID NO: 386879 - DNA, 15 bp, Homo sapiens
agtcggggctttggt

SEQ ID NO: 386880 - DNA, 15 bp, Homo sapiens
gagtcggggctttgg

SEQ ID NO: 386881 - DNA, 15 bp, Homo sapiens
ggagtcggggctttg

SEQ ID NO: 386882 - DNA, 15 bp, Homo sapiens
tggagtcggggcttt

SEQ ID NO: 386883 - DNA, 15 bp, Homo sapiens
ttggagtcggggctt

SEQ ID NO: 386884 - DNA, 15 bp, Homo sapiens
attggagtcggggct

SEQ ID NO: 386885 - DNA, 15 bp, Homo sapiens
gattggagtcggggc

SEQ ID NO: 386886 - DNA, 15 bp, Homo sapiens
ggattggagtcgggg

SEQ ID NO: 386887 - DNA, 15 bp, Homo sapiens
tggattggagtcggg

SEQ ID NO: 386888 - DNA, 15 bp, Homo sapiens
ctggattggagtcgg

SEQ ID NO: 386889 - DNA, 15 bp, Homo sapiens
cctggattggagtcg

SEQ ID NO: 386890 - DNA, 15 bp, Homo sapiens
ccctggattggagtc

SEQ ID NO: 386891 - DNA, 15 bp, Homo sapiens
cccctggattggagt

SEQ ID NO: 386892 - DNA, 15 bp, Homo sapiens
gcccctggattggag

SEQ ID NO: 386893 - DNA, 15 bp, Homo sapiens
ggcccctggattgga

SEQ ID NO: 386894 - DNA, 15 bp, Homo sapiens
gggcccctggattgg

SEQ ID NO: 386895 - DNA, 15 bp, Homo sapiens
cgggcccctggattg

SEQ ID NO: 386896 - DNA, 15 bp, Homo sapiens
tcgggcccctggatt

SEQ ID NO: 386897 - DNA, 15 bp, Homo sapiens
gtcgggcccctggat

SEQ ID NO: 386898 - DNA, 15 bp, Homo sapiens
agtcgggcccctgga

SEQ ID NO: 386899 - DNA, 15 bp, Homo sapiens
tagtcgggcccctgg

SEQ ID NO: 386900 - DNA, 15 bp, Homo sapiens
gtagtcgggcccctg

SEQ ID NO: 386901 - DNA, 15 bp, Homo sapiens
tgtagtcgggcccct

SEQ ID NO: 386902 - DNA, 15 bp, Homo sapiens
ttgtagtcgggcccc

SEQ ID NO: 386903 - DNA, 15 bp, Homo sapiens
tttgtagtcgggccc

SEQ ID NO: 386904 - DNA, 15 bp, Homo sapiens
ctttgtagtcgggcc

SEQ ID NO: 386905 - DNA, 15 bp, Homo sapiens
gctttgtagtcgggc

SEQ ID NO: 386906 - DNA, 15 bp, Homo sapiens
agctttgtagtcggg

SEQ ID NO: 386907 - DNA, 15 bp, Homo sapiens
cagctttgtagtcgg

SEQ ID NO: 386908 - DNA, 15 bp, Homo sapiens
ccagctttgtagtcg

SEQ ID NO: 386909 - DNA, 15 bp, Homo sapiens
accagctttgtagtc

SEQ ID NO: 386910 - DNA, 15 bp, Homo sapiens
taccagctttgtagt

SEQ ID NO: 386911 - DNA, 15 bp, Homo sapiens
ataccagctttgtag

SEQ ID NO: 386912 - DNA, 15 bp, Homo sapiens
aataccagctttgta

SEQ ID NO: 386913 - DNA, 15 bp, Homo sapiens
aaataccagctttgt

SEQ ID NO: 386914 - DNA, 15 bp, Homo sapiens
aaaataccagctttg

SEQ ID NO: 386915 - DNA, 15 bp, Homo sapiens
aaaaataccagcttt

SEQ ID NO: 386916 - DNA, 15 bp, Homo sapiens
gaaaaataccagctt

SEQ ID NO: 386917 - DNA, 15 bp, Homo sapiens
agaaaaataccagct

SEQ ID NO: 386918 - DNA, 15 bp, Homo sapiens
aagaaaaataccagc

SEQ ID NO: 386919 - DNA, 15 bp, Homo sapiens
aaagaaaaataccag

SEQ ID NO: 386920 - DNA, 15 bp, Homo sapiens
taaagaaaaatacca

SEQ ID NO: 386921 - DNA, 15 bp, Homo sapiens
gtaaagaaaaatacc

SEQ ID NO: 386922 - DNA, 15 bp, Homo sapiens
agtaaagaaaaatac

SEQ ID NO: 386923 - DNA, 15 bp, Homo sapiens
gagtaaagaaaaata

SEQ ID NO: 386924 - DNA, 15 bp, Homo sapiens
ggagtaaagaaaaat

SEQ ID NO: 386925 - DNA, 15 bp, Homo sapiens
tggagtaaagaaaaa

SEQ ID NO: 386926 - DNA, 15 bp, Homo sapiens
atggagtaaagaaaa

SEQ ID NO: 386927 - DNA, 15 bp, Homo sapiens
tatggagtaaagaaa

SEQ ID NO: 386928 - DNA, 15 bp, Homo sapiens
atatggagtaaagaa

SEQ ID NO: 386929 - DNA, 15 bp, Homo sapiens
gatatggagtaaaga

SEQ ID NO: 386930 - DNA, 15 bp, Homo sapiens
tgatatggagtaaag

SEQ ID NO: 386931 - DNA, 15 bp, Homo sapiens
ttgatatggagtaaa

SEQ ID NO: 386932 - DNA, 15 bp, Homo sapiens
cttgatatggagtaa

SEQ ID NO: 386933 - DNA, 15 bp, Homo sapiens
gcttgatatggagta

SEQ ID NO: 386934 - DNA, 15 bp, Homo sapiens
ggcttgatatggagt

SEQ ID NO: 386935 - DNA, 15 bp, Homo sapiens
gggcttgatatggag

SEQ ID NO: 386936 - DNA, 15 bp, Homo sapiens
agggcttgatatgga

SEQ ID NO: 386937 - DNA, 15 bp, Homo sapiens
aagggcttgatatgg

SEQ ID NO: 386938 - DNA, 15 bp, Homo sapiens
caagggcttgatatg

SEQ ID NO: 386939 - DNA, 15 bp, Homo sapiens
ccaagggcttgatat

SEQ ID NO: 386940 - DNA, 15 bp, Homo sapiens
gccaagggcttgata

SEQ ID NO: 386941 - DNA, 15 bp, Homo sapiens
agccaagggcttgat

SEQ ID NO: 386942 - DNA, 15 bp, Homo sapiens
tagccaagggcttga

SEQ ID NO: 386943 - DNA, 15 bp, Homo sapiens
ttagccaagggcttg

SEQ ID NO: 386944 - DNA, 15 bp, Homo sapiens
cttagccaagggctt

SEQ ID NO: 386945 - DNA, 15 bp, Homo sapiens
tcttagccaagggct

SEQ ID NO: 386946 - DNA, 15 bp, Homo sapiens
ttcttagccaagggc

SEQ ID NO: 386947 - DNA, 15 bp, Homo sapiens
tttcttagccaaggg

SEQ ID NO: 386948 - DNA, 15 bp, Homo sapiens
atttcttagccaagg

SEQ ID NO: 386949 - DNA, 15 bp, Homo sapiens
catttcttagccaag

SEQ ID NO: 386950 - DNA, 15 bp, Homo sapiens
ccatttcttagccaa

SEQ ID NO: 386951 - DNA, 15 bp, Homo sapiens
cccatttcttagcca

SEQ ID NO: 386952 - DNA, 15 bp, Homo sapiens
ccccatttcttagcc

SEQ ID NO: 386953 - DNA, 15 bp, Homo sapiens
tccccatttcttagc

SEQ ID NO: 386954 - DNA, 15 bp, Homo sapiens
atccccatttcttag

SEQ ID NO: 386955 - DNA, 15 bp, Homo sapiens
aatccccatttctta

SEQ ID NO: 386956 - DNA, 15 bp, Homo sapiens
aaatccccatttctt

SEQ ID NO: 386957 - DNA, 15 bp, Homo sapiens
gaaatccccatttct

SEQ ID NO: 386958 - DNA, 15 bp, Homo sapiens
ggaaatccccatttc

SEQ ID NO: 386959 - DNA, 15 bp, Homo sapiens
tggaaatccccattt

SEQ ID NO: 386960 - DNA, 15 bp, Homo sapiens
ttggaaatccccatt

SEQ ID NO: 386961 - DNA, 15 bp, Homo sapiens
cttggaaatccccat

SEQ ID NO: 386962 - DNA, 15 bp, Homo sapiens
gcttggaaatcccca

SEQ ID NO: 386963 - DNA, 15 bp, Homo sapiens
ggcttggaaatcccc

SEQ ID NO: 386964 - DNA, 15 bp, Homo sapiens
gggcttggaaatccc

SEQ ID NO: 386965 - DNA, 15 bp, Homo sapiens
tgggcttggaaatcc

SEQ ID NO: 386966 - DNA, 15 bp, Homo sapiens
gtgggcttggaaatc

SEQ ID NO: 386967 - DNA, 15 bp, Homo sapiens
tgtgggcttggaaat

SEQ ID NO: 386968 - DNA, 15 bp, Homo sapiens
ctgtgggcttggaaa

SEQ ID NO: 386969 - DNA, 15 bp, Homo sapiens
gctgtgggcttggaa

SEQ ID NO: 386970 - DNA, 15 bp, Homo sapiens
agctgtgggcttgga

SEQ ID NO: 386971 - DNA, 15 bp, Homo sapiens
cagctgtgggcttgg

SEQ ID NO: 386972 - DNA, 15 bp, Homo sapiens
gcagctgtgggcttg

SEQ ID NO: 386973 - DNA, 15 bp, Homo sapiens
agcagctgtgggctt

SEQ ID NO: 386974 - DNA, 15 bp, Homo sapiens
gagcagctgtgggct

SEQ ID NO: 386975 - DNA, 15 bp, Homo sapiens
agagcagctgtgggc

SEQ ID NO: 386976 - DNA, 15 bp, Homo sapiens
aagagcagctgtggg

SEQ ID NO: 386977 - DNA, 15 bp, Homo sapiens
caagagcagctgtgg

SEQ ID NO: 386978 - DNA, 15 bp, Homo sapiens
acaagagcagctgtg

SEQ ID NO: 386979 - DNA, 15 bp, Homo sapiens
aacaagagcagctgt

SEQ ID NO: 386980 - DNA, 15 bp, Homo sapiens
aaacaagagcagctg

SEQ ID NO: 386981 - DNA, 15 bp, Homo sapiens
gaaacaagagcagct

SEQ ID NO: 386982 - DNA, 15 bp, Homo sapiens
agaaacaagagcagc

SEQ ID NO: 386983 - DNA, 15 bp, Homo sapiens
gagaaacaagagcag

SEQ ID NO: 386984 - DNA, 15 bp, Homo sapiens
ggagaaacaagagca

SEQ ID NO: 386985 - DNA, 15 bp, Homo sapiens
gggagaaacaagagc

SEQ ID NO: 386986 - DNA, 15 bp, Homo sapiens
ggggagaaacaagag

SEQ ID NO: 386987 - DNA, 15 bp, Homo sapiens
tggggagaaacaaga

SEQ ID NO: 386988 - DNA, 15 bp, Homo sapiens
gtggggagaaacaag

SEQ ID NO: 386989 - DNA, 15 bp, Homo sapiens
tgtggggagaaacaa

SEQ ID NO: 386990 - DNA, 15 bp, Homo sapiens
ctgtggggagaaaca

SEQ ID NO: 386991 - DNA, 15 bp, Homo sapiens
actgtggggagaaac

SEQ ID NO: 386992 - DNA, 15 bp, Homo sapiens
cactgtggggagaaa

SEQ ID NO: 386993 - DNA, 15 bp, Homo sapiens
gcactgtggggagaa

SEQ ID NO: 386994 - DNA, 15 bp, Homo sapiens
agcactgtggggaga

SEQ ID NO: 386995 - DNA, 15 bp, Homo sapiens
gagcactgtggggag

SEQ ID NO: 386996 - DNA, 15 bp, Homo sapiens
ggagcactgtgggga

SEQ ID NO: 386997 - DNA, 15 bp, Homo sapiens
aggagcactgtgggg

SEQ ID NO: 386998 - DNA, 15 bp, Homo sapiens
taggagcactgtggg

SEQ ID NO: 386999 - DNA, 15 bp, Homo sapiens
gtaggagcactgtgg

SEQ ID NO: 387000 - DNA, 15 bp, Homo sapiens
tgtaggagcactgtg

SEQ ID NO: 387001 - DNA, 15 bp, Homo sapiens
atgtaggagcactgt

SEQ ID NO: 387002 - DNA, 15 bp, Homo sapiens
gatgtaggagcactg

SEQ ID NO: 387003 - DNA, 15 bp, Homo sapiens
ggatgtaggagcact

SEQ ID NO: 387004 - DNA, 15 bp, Homo sapiens
gggatgtaggagcac

SEQ ID NO: 387005 - DNA, 15 bp, Homo sapiens
tgggatgtaggagca

SEQ ID NO: 387006 - DNA, 15 bp, Homo sapiens
ctgggatgtaggagc

SEQ ID NO: 387007 - DNA, 15 bp, Homo sapiens
cctgggatgtaggag

SEQ ID NO: 387008 - DNA, 15 bp, Homo sapiens
gcctgggatgtagga

SEQ ID NO: 387009 - DNA, 15 bp, Homo sapiens
tgcctgggatgtagg

SEQ ID NO: 387010 - DNA, 15 bp, Homo sapiens
ctgcctgggatgtag

SEQ ID NO: 387011 - DNA, 15 bp, Homo sapiens
gctgcctgggatgta

SEQ ID NO: 387012 - DNA, 15 bp, Homo sapiens
cgctgcctgggatgt

SEQ ID NO: 387013 - DNA, 15 bp, Homo sapiens
acgctgcctgggatg

SEQ ID NO: 387014 - DNA, 15 bp, Homo sapiens
cacgctgcctgggat

SEQ ID NO: 387015 - DNA, 15 bp, Homo sapiens
ccacgctgcctggga

SEQ ID NO: 387016 - DNA, 15 bp, Homo sapiens
tccacgctgcctggg

SEQ ID NO: 387017 - DNA, 15 bp, Homo sapiens
gtccacgctgcctgg

SEQ ID NO: 387018 - DNA, 15 bp, Homo sapiens
tgtccacgctgcctg

SEQ ID NO: 387019 - DNA, 15 bp, Homo sapiens
ttgtccacgctgcct

SEQ ID NO: 387020 - DNA, 15 bp, Homo sapiens
attgtccacgctgcc

SEQ ID NO: 387021 - DNA, 15 bp, Homo sapiens
aattgtccacgctgc

SEQ ID NO: 387022 - DNA, 15 bp, Homo sapiens
taattgtccacgctg

SEQ ID NO: 387023 - DNA, 15 bp, Homo sapiens
gtaattgtccacgct

SEQ ID NO: 387024 - DNA, 15 bp, Homo sapiens
ggtaattgtccacgc

SEQ ID NO: 387025 - DNA, 15 bp, Homo sapiens
tggtaattgtccacg

SEQ ID NO: 387026 - DNA, 15 bp, Homo sapiens
ctggtaattgtccac

SEQ ID NO: 387027 - DNA, 15 bp, Homo sapiens
tctggtaattgtcca

SEQ ID NO: 387028 - DNA, 15 bp, Homo sapiens
gtctggtaattgtcc

SEQ ID NO: 387029 - DNA, 15 bp, Homo sapiens
cgtctggtaattgtc

SEQ ID NO: 387030 - DNA, 15 bp, Homo sapiens
ccgtctggtaattgt

SEQ ID NO: 387031 - DNA, 15 bp, Homo sapiens
gccgtctggtaattg

SEQ ID NO: 387032 - DNA, 15 bp, Homo sapiens
ggccgtctggtaatt

SEQ ID NO: 387033 - DNA, 15 bp, Homo sapiens
gggccgtctggtaat

SEQ ID NO: 387034 - DNA, 15 bp, Homo sapiens
cgggccgtctggtaa

SEQ ID NO: 387035 - DNA, 15 bp, Homo sapiens
ccgggccgtctggta

SEQ ID NO: 387036 - DNA, 15 bp, Homo sapiens
cccgggccgtctggt

SEQ ID NO: 387037 - DNA, 15 bp, Homo sapiens
gcccgggccgtctgg

SEQ ID NO: 387038 - DNA, 15 bp, Homo sapiens
ggcccgggccgtctg

SEQ ID NO: 387039 - DNA, 15 bp, Homo sapiens
cggcccgggccgtct

SEQ ID NO: 387040 - DNA, 15 bp, Homo sapiens
tcggcccgggccgtc

SEQ ID NO: 387041 - DNA, 15 bp, Homo sapiens
gtcggcccgggccgt

SEQ ID NO: 387042 - DNA, 15 bp, Homo sapiens
cgtcggcccgggccg

SEQ ID NO: 387043 - DNA, 15 bp, Homo sapiens
acgtcggcccgggcc

SEQ ID NO: 387044 - DNA, 15 bp, Homo sapiens
cacgtcggcccgggc

SEQ ID NO: 387045 - DNA, 15 bp, Homo sapiens
ccacgtcggcccggg

SEQ ID NO: 387046 - DNA, 15 bp, Homo sapiens
tccacgtcggcccgg

SEQ ID NO: 387047 - DNA, 15 bp, Homo sapiens
ctccacgtcggcccg

SEQ ID NO: 387048 - DNA, 15 bp, Homo sapiens
tctccacgtcggccc

SEQ ID NO: 387049 - DNA, 15 bp, Homo sapiens
ttctccacgtcggcc

SEQ ID NO: 387050 - DNA, 15 bp, Homo sapiens
cttctccacgtcggc

SEQ ID NO: 387051 - DNA, 15 bp, Homo sapiens
ccttctccacgtcgg

SEQ ID NO: 387052 - DNA, 15 bp, Homo sapiens
accttctccacgtcg

SEQ ID NO: 387053 - DNA, 15 bp, Homo sapiens
gaccttctccacgtc

SEQ ID NO: 387054 - DNA, 15 bp, Homo sapiens
tgaccttctccacgt

SEQ ID NO: 387055 - DNA, 15 bp, Homo sapiens
ctgaccttctccacg

SEQ ID NO: 387056 - DNA, 15 bp, Homo sapiens
tctgaccttctccac

SEQ ID NO: 387057 - DNA, 15 bp, Homo sapiens
ctctgaccttctcca

SEQ ID NO: 387058 - DNA, 15 bp, Homo sapiens
gctctgaccttctcc

SEQ ID NO: 387059 - DNA, 15 bp, Homo sapiens
ggctctgaccttctc

SEQ ID NO: 387060 - DNA, 15 bp, Homo sapiens
tggctctgaccttct

SEQ ID NO: 387061 - DNA, 15 bp, Homo sapiens
ttggctctgaccttc

SEQ ID NO: 387062 - DNA, 15 bp, Homo sapiens
tttggctctgacctt

SEQ ID NO: 387063 - DNA, 15 bp, Homo sapiens
atttggctctgacct

SEQ ID NO: 387064 - DNA, 15 bp, Homo sapiens
aatttggctctgacc

SEQ ID NO: 387065 - DNA, 15 bp, Homo sapiens
gaatttggctctgac

SEQ ID NO: 387066 - DNA, 15 bp, Homo sapiens
ggaatttggctctga

SEQ ID NO: 387067 - DNA, 15 bp, Homo sapiens
tggaatttggctctg

SEQ ID NO: 387068 - DNA, 15 bp, Homo sapiens
ttggaatttggctct

SEQ ID NO: 387069 - DNA, 15 bp, Homo sapiens
cttggaatttggctc

SEQ ID NO: 387070 - DNA, 15 bp, Homo sapiens
tcttggaatttggct

SEQ ID NO: 387071 - DNA, 15 bp, Homo sapiens
ctcttggaatttggc

SEQ ID NO: 387072 - DNA, 15 bp, Homo sapiens
gctcttggaatttgg

SEQ ID NO: 387073 - DNA, 15 bp, Homo sapiens
tgctcttggaatttg

SEQ ID NO: 387074 - DNA, 15 bp, Homo sapiens
ctgctcttggaattt

SEQ ID NO: 387075 - DNA, 15 bp, Homo sapiens
gctgctcttggaatt

SEQ ID NO: 387076 - DNA, 15 bp, Homo sapiens
tgctgctcttggaat

SEQ ID NO: 387077 - DNA, 15 bp, Homo sapiens
ctgctgctcttggaa

SEQ ID NO: 387078 - DNA, 15 bp, Homo sapiens
cctgctgctcttgga

SEQ ID NO: 387079 - DNA, 15 bp, Homo sapiens
acctgctgctcttgg

SEQ ID NO: 387080 - DNA, 15 bp, Homo sapiens
gacctgctgctcttg

SEQ ID NO: 387081 - DNA, 15 bp, Homo sapiens
agacctgctgctctt

SEQ ID NO: 387082 - DNA, 15 bp, Homo sapiens
aagacctgctgctct

SEQ ID NO: 387083 - DNA, 15 bp, Homo sapiens
gaagacctgctgctc

SEQ ID NO: 387084 - DNA, 15 bp, Homo sapiens
agaagacctgctgct

SEQ ID NO: 387085 - DNA, 15 bp, Homo sapiens
tagaagacctgctgc

SEQ ID NO: 387086 - DNA, 15 bp, Homo sapiens
gtagaagacctgctg

SEQ ID NO: 387087 - DNA, 15 bp, Homo sapiens
agtagaagacctgct

SEQ ID NO: 387088 - DNA, 15 bp, Homo sapiens
cagtagaagacctgc

SEQ ID NO: 387089 - DNA, 15 bp, Homo sapiens
gcagtagaagacctg

SEQ ID NO: 387090 - DNA, 15 bp, Homo sapiens
agcagtagaagacct

SEQ ID NO: 387091 - DNA, 15 bp, Homo sapiens
aagcagtagaagacc

SEQ ID NO: 387092 - DNA, 15 bp, Homo sapiens
gaagcagtagaagac

SEQ ID NO: 387093 - DNA, 15 bp, Homo sapiens
agaagcagtagaaga

SEQ ID NO: 387094 - DNA, 15 bp, Homo sapiens
gagaagcagtagaag

SEQ ID NO: 387095 - DNA, 15 bp, Homo sapiens
ggagaagcagtagaa

SEQ ID NO: 387096 - DNA, 15 bp, Homo sapiens
cggagaagcagtaga

SEQ ID NO: 387097 - DNA, 15 bp, Homo sapiens
gcggagaagcagtag

SEQ ID NO: 387098 - DNA, 15 bp, Homo sapiens
tgcggagaagcagta

SEQ ID NO: 387099 - DNA, 15 bp, Homo sapiens
gtgcggagaagcagt

SEQ ID NO: 387100 - DNA, 15 bp, Homo sapiens
ggtgcggagaagcag

SEQ ID NO: 387101 - DNA, 15 bp, Homo sapiens
aggtgcggagaagca

SEQ ID NO: 387102 - DNA, 15 bp, Homo sapiens
gaggtgcggagaagc

SEQ ID NO: 387103 - DNA, 15 bp, Homo sapiens
cgaggtgcggagaag

SEQ ID NO: 387104 - DNA, 15 bp, Homo sapiens
ccgaggtgcggagaa

SEQ ID NO: 387105 - DNA, 15 bp, Homo sapiens
cccgaggtgcggaga

SEQ ID NO: 387106 - DNA, 15 bp, Homo sapiens
ccccgaggtgcggag

SEQ ID NO: 387107 - DNA, 15 bp, Homo sapiens
cccccgaggtgcgga

SEQ ID NO: 387108 - DNA, 15 bp, Homo sapiens
tcccccgaggtgcgg

SEQ ID NO: 387109 - DNA, 15 bp, Homo sapiens
ttcccccgaggtgcg

SEQ ID NO: 387110 - DNA, 15 bp, Homo sapiens
gttcccccgaggtgc

SEQ ID NO: 387111 - DNA, 15 bp, Homo sapiens
cgttcccccgaggtg

SEQ ID NO: 387112 - DNA, 15 bp, Homo sapiens
tcgttcccccgaggt

SEQ ID NO: 387113 - DNA, 15 bp, Homo sapiens
ttcgttcccccgagg

SEQ ID NO: 387114 - DNA, 15 bp, Homo sapiens
tttcgttcccccgag

SEQ ID NO: 387115 - DNA, 15 bp, Homo sapiens
gtttcgttcccccga

SEQ ID NO: 387116 - DNA, 15 bp, Homo sapiens
ggtttcgttcccccg

SEQ ID NO: 387117 - DNA, 15 bp, Homo sapiens
tggtttcgttccccc

SEQ ID NO: 387118 - DNA, 15 bp, Homo sapiens
ctggtttcgttcccc

SEQ ID NO: 387119 - DNA, 15 bp, Homo sapiens
gctggtttcgttccc

SEQ ID NO: 387120 - DNA, 15 bp, Homo sapiens
cgctggtttcgttcc

SEQ ID NO: 387121 - DNA, 15 bp, Homo sapiens
acgctggtttcgttc

SEQ ID NO: 387122 - DNA, 15 bp, Homo sapiens
gacgctggtttcgtt

SEQ ID NO: 387123 - DNA, 15 bp, Homo sapiens
ggacgctggtttcgt

SEQ ID NO: 387124 - DNA, 15 bp, Homo sapiens
aggacgctggtttcg

SEQ ID NO: 387125 - DNA, 15 bp, Homo sapiens
taggacgctggtttc

SEQ ID NO: 387126 - DNA, 15 bp, Homo sapiens
ataggacgctggttt

SEQ ID NO: 387127 - DNA, 15 bp, Homo sapiens
aataggacgctggtt

SEQ ID NO: 387128 - DNA, 15 bp, Homo sapiens
gaataggacgctggt

SEQ ID NO: 387129 - DNA, 15 bp, Homo sapiens
ggaataggacgctgg

SEQ ID NO: 387130 - DNA, 15 bp, Homo sapiens
tggaataggacgctg

SEQ ID NO: 387131 - DNA, 15 bp, Homo sapiens
ctggaataggacgct

SEQ ID NO: 387132 - DNA, 15 bp, Homo sapiens
gctggaataggacgc

SEQ ID NO: 387133 - DNA, 15 bp, Homo sapiens
cgctggaataggacg

SEQ ID NO: 387134 - DNA, 15 bp, Homo sapiens
gcgctggaataggac

SEQ ID NO: 387135 - DNA, 15 bp, Homo sapiens
ggcgctggaatagga

SEQ ID NO: 387136 - DNA, 15 bp, Homo sapiens
aggcgctggaatagg

SEQ ID NO: 387137 - DNA, 15 bp, Homo sapiens
gaggcgctggaatag

SEQ ID NO: 387138 - DNA, 15 bp, Homo sapiens
agaggcgctggaata

SEQ ID NO: 387139 - DNA, 15 bp, Homo sapiens
tagaggcgctggaat

SEQ ID NO: 387140 - DNA, 15 bp, Homo sapiens
gtagaggcgctggaa

SEQ ID NO: 387141 - DNA, 15 bp, Homo sapiens
cgtagaggcgctgga

SEQ ID NO: 387142 - DNA, 15 bp, Homo sapiens
ccgtagaggcgctgg

SEQ ID NO: 387143 - DNA, 15 bp, Homo sapiens
cccgtagaggcgctg

SEQ ID NO: 387144 - DNA, 15 bp, Homo sapiens
gcccgtagaggcgct

SEQ ID NO: 387145 - DNA, 15 bp, Homo sapiens
ggcccgtagaggcgc

SEQ ID NO: 387146 - DNA, 15 bp, Homo sapiens
gggcccgtagaggcg

SEQ ID NO: 387147 - DNA, 15 bp, Homo sapiens
ggggcccgtagaggc

SEQ ID NO: 387148 - DNA, 15 bp, Homo sapiens
tggggcccgtagagg

SEQ ID NO: 387149 - DNA, 15 bp, Homo sapiens
ctggggcccgtagag

SEQ ID NO: 387150 - DNA, 15 bp, Homo sapiens
cctggggcccgtaga

SEQ ID NO: 387151 - DNA, 15 bp, Homo sapiens
gcctggggcccgtag

SEQ ID NO: 387152 - DNA, 15 bp, Homo sapiens
ggcctggggcccgta

SEQ ID NO: 387153 - DNA, 15 bp, Homo sapiens
gggcctggggcccgt

SEQ ID NO: 387154 - DNA, 15 bp, Homo sapiens
agggcctggggcccg

SEQ ID NO: 387155 - DNA, 15 bp, Homo sapiens
gagggcctggggccc

SEQ ID NO: 387156 - DNA, 15 bp, Homo sapiens
ggagggcctggggcc

SEQ ID NO: 387157 - DNA, 15 bp, Homo sapiens
aggagggcctggggc

SEQ ID NO: 387158 - DNA, 15 bp, Homo sapiens
gaggagggcctgggg

SEQ ID NO: 387159 - DNA, 15 bp, Homo sapiens
agaggagggcctggg

SEQ ID NO: 387160 - DNA, 15 bp, Homo sapiens
aagaggagggcctgg

SEQ ID NO: 387161 - DNA, 15 bp, Homo sapiens
gaagaggagggcctg

SEQ ID NO: 387162 - DNA, 15 bp, Homo sapiens
agaagaggagggcct

SEQ ID NO: 387163 - DNA, 15 bp, Homo sapiens
gagaagaggagggcc

SEQ ID NO: 387164 - DNA, 15 bp, Homo sapiens
ggagaagaggagggc

SEQ ID NO: 387165 - DNA, 15 bp, Homo sapiens
gggagaagaggaggg

SEQ ID NO: 387166 - DNA, 15 bp, Homo sapiens
agggagaagaggagg

SEQ ID NO: 387167 - DNA, 15 bp, Homo sapiens
gagggagaagaggag

SEQ ID NO: 387168 - DNA, 15 bp, Homo sapiens
agagggagaagagga

SEQ ID NO: 387169 - DNA, 15 bp, Homo sapiens
aagagggagaagagg

SEQ ID NO: 387170 - DNA, 15 bp, Homo sapiens
gaagagggagaagag

SEQ ID NO: 387171 - DNA, 15 bp, Homo sapiens
agaagagggagaaga

SEQ ID NO: 387172 - DNA, 15 bp, Homo sapiens
cagaagagggagaag

SEQ ID NO: 387173 - DNA, 15 bp, Homo sapiens
ccagaagagggagaa

SEQ ID NO: 387174 - DNA, 15 bp, Homo sapiens
gccagaagagggaga

SEQ ID NO: 387175 - DNA, 15 bp, Homo sapiens
ggccagaagagggag

SEQ ID NO: 387176 - DNA, 15 bp, Homo sapiens
gggccagaagaggga

SEQ ID NO: 387177 - DNA, 15 bp, Homo sapiens
tgggccagaagaggg

SEQ ID NO: 387178 - DNA, 15 bp, Homo sapiens
gtgggccagaagagg

SEQ ID NO: 387179 - DNA, 15 bp, Homo sapiens
ggtgggccagaagag

SEQ ID NO: 387180 - DNA, 15 bp, Homo sapiens
aggtgggccagaaga

SEQ ID NO: 387181 - DNA, 15 bp, Homo sapiens
aaggtgggccagaag

SEQ ID NO: 387182 - DNA, 15 bp, Homo sapiens
gaaggtgggccagaa

SEQ ID NO: 387183 - DNA, 15 bp, Homo sapiens
ggaaggtgggccaga

SEQ ID NO: 387184 - DNA, 15 bp, Homo sapiens
aggaaggtgggccag

SEQ ID NO: 387185 - DNA, 15 bp, Homo sapiens
caggaaggtgggcca

SEQ ID NO: 387186 - DNA, 15 bp, Homo sapiens
gcaggaaggtgggcc

SEQ ID NO: 387187 - DNA, 15 bp, Homo sapiens
agcaggaaggtgggc

SEQ ID NO: 387188 - DNA, 15 bp, Homo sapiens
cagcaggaaggtggg

SEQ ID NO: 387189 - DNA, 15 bp, Homo sapiens
tcagcaggaaggtgg

SEQ ID NO: 387190 - DNA, 15 bp, Homo sapiens
gtcagcaggaaggtg

SEQ ID NO: 387191 - DNA, 15 bp, Homo sapiens
ggtcagcaggaaggt

SEQ ID NO: 387192 - DNA, 15 bp, Homo sapiens
cggtcagcaggaagg

SEQ ID NO: 387193 - DNA, 15 bp, Homo sapiens
ccggtcagcaggaag

SEQ ID NO: 387194 - DNA, 15 bp, Homo sapiens
accggtcagcaggaa

SEQ ID NO: 387195 - DNA, 15 bp, Homo sapiens
caccggtcagcagga

SEQ ID NO: 387196 - DNA, 15 bp, Homo sapiens
ccaccggtcagcagg

SEQ ID NO: 387197 - DNA, 15 bp, Homo sapiens
gccaccggtcagcag

SEQ ID NO: 387198 - DNA, 15 bp, Homo sapiens
ggccaccggtcagca

SEQ ID NO: 387199 - DNA, 15 bp, Homo sapiens
aggccaccggtcagc

SEQ ID NO: 387200 - DNA, 15 bp, Homo sapiens
gaggccaccggtcag

SEQ ID NO: 387201 - DNA, 15 bp, Homo sapiens
ggaggccaccggtca

SEQ ID NO: 387202 - DNA, 15 bp, Homo sapiens
aggaggccaccggtc

SEQ ID NO: 387203 - DNA, 15 bp, Homo sapiens
gaggaggccaccggt

SEQ ID NO: 387204 - DNA, 15 bp, Homo sapiens
tgaggaggccaccgg

SEQ ID NO: 387205 - DNA, 15 bp, Homo sapiens
atgaggaggccaccg

SEQ ID NO: 387206 - DNA, 15 bp, Homo sapiens
aatgaggaggccacc

SEQ ID NO: 387207 - DNA, 15 bp, Homo sapiens
taatgaggaggccac

SEQ ID NO: 387208 - DNA, 15 bp, Homo sapiens
ataatgaggaggcca

SEQ ID NO: 387209 - DNA, 15 bp, Homo sapiens
gataatgaggaggcc

SEQ ID NO: 387210 - DNA, 15 bp, Homo sapiens
cgataatgaggaggc

SEQ ID NO: 387211 - DNA, 15 bp, Homo sapiens
gcgataatgaggagg

SEQ ID NO: 387212 - DNA, 15 bp, Homo sapiens
ggcgataatgaggag

SEQ ID NO: 387213 - DNA, 15 bp, Homo sapiens
tggcgataatgagga

SEQ ID NO: 387214 - DNA, 15 bp, Homo sapiens
atggcgataatgagg

SEQ ID NO: 387215 - DNA, 15 bp, Homo sapiens
catggcgataatgag

SEQ ID NO: 387216 - DNA, 15 bp, Homo sapiens
ccatggcgataatga

SEQ ID NO: 387217 - DNA, 15 bp, Homo sapiens
accatggcgataatg

SEQ ID NO: 387218 - DNA, 15 bp, Homo sapiens
caccatggcgataat

SEQ ID NO: 387219 - DNA, 15 bp, Homo sapiens
tcaccatggcgataa

SEQ ID NO: 387220 - DNA, 15 bp, Homo sapiens
ttcaccatggcgata

SEQ ID NO: 387221 - DNA, 15 bp, Homo sapiens
cttcaccatggcgat

SEQ ID NO: 387222 - DNA, 15 bp, Homo sapiens
tcttcaccatggcga

SEQ ID NO: 387223 - DNA, 15 bp, Homo sapiens
ctcttcaccatggcg

SEQ ID NO: 387224 - DNA, 15 bp, Homo sapiens
gctcttcaccatggc

SEQ ID NO: 387225 - DNA, 15 bp, Homo sapiens
tgctcttcaccatgg

SEQ ID NO: 387226 - DNA, 15 bp, Homo sapiens
ttgctcttcaccatg

SEQ ID NO: 387227 - DNA, 15 bp, Homo sapiens
gttgctcttcaccat

SEQ ID NO: 387228 - DNA, 15 bp, Homo sapiens
ggttgctcttcacca

SEQ ID NO: 387229 - DNA, 15 bp, Homo sapiens
tggttgctcttcacc

SEQ ID NO: 387230 - DNA, 15 bp, Homo sapiens
ctggttgctcttcac

SEQ ID NO: 387231 - DNA, 15 bp, Homo sapiens
actggttgctcttca

SEQ ID NO: 387232 - DNA, 15 bp, Homo sapiens
tactggttgctcttc

SEQ ID NO: 387233 - DNA, 15 bp, Homo sapiens
gtactggttgctctt

SEQ ID NO: 387234 - DNA, 15 bp, Homo sapiens
ggtactggttgctct

SEQ ID NO: 387235 - DNA, 15 bp, Homo sapiens
aggtactggttgctc

SEQ ID NO: 387236 - DNA, 15 bp, Homo sapiens
caggtactggttgct

SEQ ID NO: 387237 - DNA, 15 bp, Homo sapiens
acaggtactggttgc

SEQ ID NO: 387238 - DNA, 15 bp, Homo sapiens
gacaggtactggttg

SEQ ID NO: 387239 - DNA, 15 bp, Homo sapiens
ggacaggtactggtt

SEQ ID NO: 387240 - DNA, 15 bp, Homo sapiens
tggacaggtactggt

SEQ ID NO: 387241 - DNA, 15 bp, Homo sapiens
atggacaggtactgg

SEQ ID NO: 387242 - DNA, 15 bp, Homo sapiens
gatggacaggtactg

SEQ ID NO: 387243 - DNA, 15 bp, Homo sapiens
ggatggacaggtact

SEQ ID NO: 387244 - DNA, 15 bp, Homo sapiens
aggatggacaggtac

SEQ ID NO: 387245 - DNA, 15 bp, Homo sapiens
caggatggacaggta

SEQ ID NO: 387246 - DNA, 15 bp, Homo sapiens
ccaggatggacaggt

SEQ ID NO: 387247 - DNA, 15 bp, Homo sapiens
gccaggatggacagg

SEQ ID NO: 387248 - DNA, 15 bp, Homo sapiens
cgccaggatggacag

SEQ ID NO: 387249 - DNA, 15 bp, Homo sapiens
ccgccaggatggaca

SEQ ID NO: 387250 - DNA, 15 bp, Homo sapiens
gccgccaggatggac

SEQ ID NO: 387251 - DNA, 15 bp, Homo sapiens
ggccgccaggatgga

SEQ ID NO: 387252 - DNA, 15 bp, Homo sapiens
gggccgccaggatgg

SEQ ID NO: 387253 - DNA, 15 bp, Homo sapiens
tgggccgccaggatg

SEQ ID NO: 387254 - DNA, 15 bp, Homo sapiens
ctgggccgccaggat

SEQ ID NO: 387255 - DNA, 15 bp, Homo sapiens
tctgggccgccagga

SEQ ID NO: 387256 - DNA, 15 bp, Homo sapiens
aaaattctattcttt

SEQ ID NO: 387257 - DNA, 15 bp, Homo sapiens
gaaaattctattctt

SEQ ID NO: 387258 - DNA, 15 bp, Homo sapiens
agaaaattctattct

SEQ ID NO: 387259 - DNA, 15 bp, Homo sapiens
aagaaaattctattc

SEQ ID NO: 387260 - DNA, 15 bp, Homo sapiens
aaagaaaattctatt

SEQ ID NO: 387261 - DNA, 15 bp, Homo sapiens
gaaagaaaattctat

SEQ ID NO: 387262 - DNA, 15 bp, Homo sapiens
tgaaagaaaattcta

SEQ ID NO: 387263 - DNA, 15 bp, Homo sapiens
atgaaagaaaattct

SEQ ID NO: 387264 - DNA, 15 bp, Homo sapiens
tatgaaagaaaattc

SEQ ID NO: 387265 - DNA, 15 bp, Homo sapiens
atatgaaagaaaatt

SEQ ID NO: 387266 - DNA, 15 bp, Homo sapiens
aatatgaaagaaaat

SEQ ID NO: 387267 - DNA, 15 bp, Homo sapiens
aaatatgaaagaaaa

SEQ ID NO: 387268 - DNA, 15 bp, Homo sapiens
caaatatgaaagaaa

SEQ ID NO: 387269 - DNA, 15 bp, Homo sapiens
tcaaatatgaaagaa

SEQ ID NO: 387270 - DNA, 15 bp, Homo sapiens
ttcaaatatgaaaga

SEQ ID NO: 387271 - DNA, 15 bp, Homo sapiens
gttcaaatatgaaag

SEQ ID NO: 387272 - DNA, 15 bp, Homo sapiens
tgttcaaatatgaaa

SEQ ID NO: 387273 - DNA, 15 bp, Homo sapiens
ttgttcaaatatgaa

SEQ ID NO: 387274 - DNA, 15 bp, Homo sapiens
attgttcaaatatga

SEQ ID NO: 387275 - DNA, 15 bp, Homo sapiens
tattgttcaaatatg

SEQ ID NO: 387276 - DNA, 15 bp, Homo sapiens
gtattgttcaaatat

SEQ ID NO: 387277 - DNA, 15 bp, Homo sapiens
tgtattgttcaaata

SEQ ID NO: 387278 - DNA, 15 bp, Homo sapiens
ctgtattgttcaaat

SEQ ID NO: 387279 - DNA, 15 bp, Homo sapiens
tctgtattgttcaaa

SEQ ID NO: 387280 - DNA, 15 bp, Homo sapiens
atctgtattgttcaa

SEQ ID NO: 387281 - DNA, 15 bp, Homo sapiens
catctgtattgttca

SEQ ID NO: 387282 - DNA, 15 bp, Homo sapiens
acatctgtattgttc

SEQ ID NO: 387283 - DNA, 15 bp, Homo sapiens
gacatctgtattgtt

SEQ ID NO: 387284 - DNA, 15 bp, Homo sapiens
agacatctgtattgt

SEQ ID NO: 387285 - DNA, 15 bp, Homo sapiens
gagacatctgtattg

SEQ ID NO: 387286 - DNA, 15 bp, Homo sapiens
tgagacatctgtatt

SEQ ID NO: 387287 - DNA, 15 bp, Homo sapiens
atgagacatctgtat

SEQ ID NO: 387288 - DNA, 15 bp, Homo sapiens
catgagacatctgta

SEQ ID NO: 387289 - DNA, 15 bp, Homo sapiens
acatgagacatctgt

SEQ ID NO: 387290 - DNA, 15 bp, Homo sapiens
tacatgagacatctg

SEQ ID NO: 387291 - DNA, 15 bp, Homo sapiens
gtacatgagacatct

SEQ ID NO: 387292 - DNA, 15 bp, Homo sapiens
agtacatgagacatc

SEQ ID NO: 387293 - DNA, 15 bp, Homo sapiens
gagtacatgagacat

SEQ ID NO: 387294 - DNA, 15 bp, Homo sapiens
ggagtacatgagaca

SEQ ID NO: 387295 - DNA, 15 bp, Homo sapiens
aggagtacatgagac

SEQ ID NO: 387296 - DNA, 15 bp, Homo sapiens
aaggagtacatgaga

SEQ ID NO: 387297 - DNA, 15 bp, Homo sapiens
gaaggagtacatgag

SEQ ID NO: 387298 - DNA, 15 bp, Homo sapiens
ggaaggagtacatga

SEQ ID NO: 387299 - DNA, 15 bp, Homo sapiens
gggaaggagtacatg

SEQ ID NO: 387300 - DNA, 15 bp, Homo sapiens
agggaaggagtacat

SEQ ID NO: 387301 - DNA, 15 bp, Homo sapiens
tagggaaggagtaca

SEQ ID NO: 387302 - DNA, 15 bp, Homo sapiens
ttagggaaggagtac

SEQ ID NO: 387303 - DNA, 15 bp, Homo sapiens
tttagggaaggagta

SEQ ID NO: 387304 - DNA, 15 bp, Homo sapiens
gtttagggaaggagt

SEQ ID NO: 387305 - DNA, 15 bp, Homo sapiens
tgtttagggaaggag

SEQ ID NO: 387306 - DNA, 15 bp, Homo sapiens
ttgtttagggaagga

SEQ ID NO: 387307 - DNA, 15 bp, Homo sapiens
tttgtttagggaagg

SEQ ID NO: 387308 - DNA, 15 bp, Homo sapiens
ttttgtttagggaag

SEQ ID NO: 387309 - DNA, 15 bp, Homo sapiens
cttttgtttagggaa

SEQ ID NO: 387310 - DNA, 15 bp, Homo sapiens
acttttgtttaggga

SEQ ID NO: 387311 - DNA, 15 bp, Homo sapiens
tacttttgtttaggg

SEQ ID NO: 387312 - DNA, 15 bp, Homo sapiens
gtacttttgtttagg

SEQ ID NO: 387313 - DNA, 15 bp, Homo sapiens
tgtacttttgtttag

SEQ ID NO: 387314 - DNA, 15 bp, Homo sapiens
gtgtacttttgttta

SEQ ID NO: 387315 - DNA, 15 bp, Homo sapiens
agtgtacttttgttt

SEQ ID NO: 387316 - DNA, 15 bp, Homo sapiens
gagtgtacttttgtt

SEQ ID NO: 387317 - DNA, 15 bp, Homo sapiens
tgagtgtacttttgt

SEQ ID NO: 387318 - DNA, 15 bp, Homo sapiens
ttgagtgtacttttg

SEQ ID NO: 387319 - DNA, 15 bp, Homo sapiens
tttgagtgtactttt

SEQ ID NO: 387320 - DNA, 15 bp, Homo sapiens
gtttgagtgtacttt

SEQ ID NO: 387321 - DNA, 15 bp, Homo sapiens
agtttgagtgtactt

SEQ ID NO: 387322 - DNA, 15 bp, Homo sapiens
gagtttgagtgtact

SEQ ID NO: 387323 - DNA, 15 bp, Homo sapiens
ggagtttgagtgtac

SEQ ID NO: 387324 - DNA, 15 bp, Homo sapiens
gggagtttgagtgta

SEQ ID NO: 387325 - DNA, 15 bp, Homo sapiens
tgggagtttgagtgt

SEQ ID NO: 387326 - DNA, 15 bp, Homo sapiens
ctgggagtttgagtg

SEQ ID NO: 387327 - DNA, 15 bp, Homo sapiens
cctgggagtttgagt

SEQ ID NO: 387328 - DNA, 15 bp, Homo sapiens
tcctgggagtttgag

SEQ ID NO: 387329 - DNA, 15 bp, Homo sapiens
ttcctgggagtttga

SEQ ID NO: 387330 - DNA, 15 bp, Homo sapiens
tttcctgggagtttg

SEQ ID NO: 387331 - DNA, 15 bp, Homo sapiens
gtttcctgggagttt

SEQ ID NO: 387332 - DNA, 15 bp, Homo sapiens
tgtttcctgggagtt

SEQ ID NO: 387333 - DNA, 15 bp, Homo sapiens
ttgtttcctgggagt

SEQ ID NO: 387334 - DNA, 15 bp, Homo sapiens
attgtttcctgggag

SEQ ID NO: 387335 - DNA, 15 bp, Homo sapiens
gattgtttcctggga

SEQ ID NO: 387336 - DNA, 15 bp, Homo sapiens
agattgtttcctggg

SEQ ID NO: 387337 - DNA, 15 bp, Homo sapiens
cagattgtttcctgg

SEQ ID NO: 387338 - DNA, 15 bp, Homo sapiens
tcagattgtttcctg

SEQ ID NO: 387339 - DNA, 15 bp, Homo sapiens
ttcagattgtttcct

SEQ ID NO: 387340 - DNA, 15 bp, Homo sapiens
attcagattgtttcc

SEQ ID NO: 387341 - DNA, 15 bp, Homo sapiens
aattcagattgtttc

SEQ ID NO: 387342 - DNA, 15 bp, Homo sapiens
taattcagattgttt

SEQ ID NO: 387343 - DNA, 15 bp, Homo sapiens
ttaattcagattgtt

SEQ ID NO: 387344 - DNA, 15 bp, Homo sapiens
attaattcagattgt

SEQ ID NO: 387345 - DNA, 15 bp, Homo sapiens
cattaattcagattg

SEQ ID NO: 387346 - DNA, 15 bp, Homo sapiens
gcattaattcagatt

SEQ ID NO: 387347 - DNA, 15 bp, Homo sapiens
tgcattaattcagat

SEQ ID NO: 387348 - DNA, 15 bp, Homo sapiens
ttgcattaattcaga

SEQ ID NO: 387349 - DNA, 15 bp, Homo sapiens
tttgcattaattcag

SEQ ID NO: 387350 - DNA, 15 bp, Homo sapiens
atttgcattaattca

SEQ ID NO: 387351 - DNA, 15 bp, Homo sapiens
aatttgcattaattc

SEQ ID NO: 387352 - DNA, 15 bp, Homo sapiens
aaatttgcattaatt

SEQ ID NO: 387353 - DNA, 15 bp, Homo sapiens
taaatttgcattaat

SEQ ID NO: 387354 - DNA, 15 bp, Homo sapiens
gtaaatttgcattaa

SEQ ID NO: 387355 - DNA, 15 bp, Homo sapiens
tgtaaatttgcatta

SEQ ID NO: 387356 - DNA, 15 bp, Homo sapiens
ttgtaaatttgcatt

SEQ ID NO: 387357 - DNA, 15 bp, Homo sapiens
tttgtaaatttgcat

SEQ ID NO: 387358 - DNA, 15 bp, Homo sapiens
atttgtaaatttgca

SEQ ID NO: 387359 - DNA, 15 bp, Homo sapiens
aatttgtaaatttgc

SEQ ID NO: 387360 - DNA, 15 bp, Homo sapiens
taatttgtaaatttg

SEQ ID NO: 387361 - DNA, 15 bp, Homo sapiens
ttaatttgtaaattt

SEQ ID NO: 387362 - DNA, 15 bp, Homo sapiens
cttaatttgtaaatt

SEQ ID NO: 387363 - DNA, 15 bp, Homo sapiens
tcttaatttgtaaat

SEQ ID NO: 387364 - DNA, 15 bp, Homo sapiens
ttcttaatttgtaaa

SEQ ID NO: 387365 - DNA, 15 bp, Homo sapiens
tttcttaatttgtaa

SEQ ID NO: 387366 - DNA, 15 bp, Homo sapiens
ctttcttaatttgta

SEQ ID NO: 387367 - DNA, 15 bp, Homo sapiens
gctttcttaatttgt

SEQ ID NO: 387368 - DNA, 15 bp, Homo sapiens
ggctttcttaatttg

SEQ ID NO: 387369 - DNA, 15 bp, Homo sapiens
gggctttcttaattt

SEQ ID NO: 387370 - DNA, 15 bp, Homo sapiens
agggctttcttaatt

SEQ ID NO: 387371 - DNA, 15 bp, Homo sapiens
aagggctttcttaat

SEQ ID NO: 387372 - DNA, 15 bp, Homo sapiens
aaagggctttcttaa

SEQ ID NO: 387373 - DNA, 15 bp, Homo sapiens
gaaagggctttctta

SEQ ID NO: 387374 - DNA, 15 bp, Homo sapiens
agaaagggctttctt

SEQ ID NO: 387375 - DNA, 15 bp, Homo sapiens
tagaaagggctttct

SEQ ID NO: 387376 - DNA, 15 bp, Homo sapiens
ctagaaagggctttc

SEQ ID NO: 387377 - DNA, 15 bp, Homo sapiens
tctagaaagggcttt

SEQ ID NO: 387378 - DNA, 15 bp, Homo sapiens
gtctagaaagggctt

SEQ ID NO: 387379 - DNA, 15 bp, Homo sapiens
tgtctagaaagggct

SEQ ID NO: 387380 - DNA, 15 bp, Homo sapiens
gtgtctagaaagggc

SEQ ID NO: 387381 - DNA, 15 bp, Homo sapiens
cgtgtctagaaaggg

SEQ ID NO: 387382 - DNA, 15 bp, Homo sapiens
gcgtgtctagaaagg

SEQ ID NO: 387383 - DNA, 15 bp, Homo sapiens
agcgtgtctagaaag

SEQ ID NO: 387384 - DNA, 15 bp, Homo sapiens
cagcgtgtctagaaa

SEQ ID NO: 387385 - DNA, 15 bp, Homo sapiens
acagcgtgtctagaa

SEQ ID NO: 387386 - DNA, 15 bp, Homo sapiens
tacagcgtgtctaga

SEQ ID NO: 387387 - DNA, 15 bp, Homo sapiens
atacagcgtgtctag

SEQ ID NO: 387388 - DNA, 15 bp, Homo sapiens
tatacagcgtgtcta

SEQ ID NO: 387389 - DNA, 15 bp, Homo sapiens
ttatacagcgtgtct

SEQ ID NO: 387390 - DNA, 15 bp, Homo sapiens
attatacagcgtgtc

SEQ ID NO: 387391 - DNA, 15 bp, Homo sapiens
cattatacagcgtgt

SEQ ID NO: 387392 - DNA, 15 bp, Homo sapiens
ccattatacagcgtg

SEQ ID NO: 387393 - DNA, 15 bp, Homo sapiens
tccattatacagcgt

SEQ ID NO: 387394 - DNA, 15 bp, Homo sapiens
ctccattatacagcg

SEQ ID NO: 387395 - DNA, 15 bp, Homo sapiens
actccattatacagc

SEQ ID NO: 387396 - DNA, 15 bp, Homo sapiens
tactccattatacag

SEQ ID NO: 387397 - DNA, 15 bp, Homo sapiens
atactccattataca

SEQ ID NO: 387398 - DNA, 15 bp, Homo sapiens
aatactccattatac

SEQ ID NO: 387399 - DNA, 15 bp, Homo sapiens
taatactccattata

SEQ ID NO: 387400 - DNA, 15 bp, Homo sapiens
ctaatactccattat

SEQ ID NO: 387401 - DNA, 15 bp, Homo sapiens
tctaatactccatta

SEQ ID NO: 387402 - DNA, 15 bp, Homo sapiens
ttctaatactccatt

SEQ ID NO: 387403 - DNA, 15 bp, Homo sapiens
tttctaatactccat

SEQ ID NO: 387404 - DNA, 15 bp, Homo sapiens
ttttctaatactcca

SEQ ID NO: 387405 - DNA, 15 bp, Homo sapiens
gttttctaatactcc

SEQ ID NO: 387406 - DNA, 15 bp, Homo sapiens
ggttttctaatactc

SEQ ID NO: 387407 - DNA, 15 bp, Homo sapiens
tggttttctaatact

SEQ ID NO: 387408 - DNA, 15 bp, Homo sapiens
ctggttttctaatac

SEQ ID NO: 387409 - DNA, 15 bp, Homo sapiens
actggttttctaata

SEQ ID NO: 387410 - DNA, 15 bp, Homo sapiens
aactggttttctaat

SEQ ID NO: 387411 - DNA, 15 bp, Homo sapiens
aaactggttttctaa

SEQ ID NO: 387412 - DNA, 15 bp, Homo sapiens
gaaactggttttcta

SEQ ID NO: 387413 - DNA, 15 bp, Homo sapiens
tgaaactggttttct

SEQ ID NO: 387414 - DNA, 15 bp, Homo sapiens
gtgaaactggttttc

SEQ ID NO: 387415 - DNA, 15 bp, Homo sapiens
tgtgaaactggtttt

SEQ ID NO: 387416 - DNA, 15 bp, Homo sapiens
ctgtgaaactggttt

SEQ ID NO: 387417 - DNA, 15 bp, Homo sapiens
gctgtgaaactggtt

SEQ ID NO: 387418 - DNA, 15 bp, Homo sapiens
ggctgtgaaactggt

SEQ ID NO: 387419 - DNA, 15 bp, Homo sapiens
gggctgtgaaactgg

SEQ ID NO: 387420 - DNA, 15 bp, Homo sapiens
agggctgtgaaactg

SEQ ID NO: 387421 - DNA, 15 bp, Homo sapiens
cagggctgtgaaact

SEQ ID NO: 387422 - DNA, 15 bp, Homo sapiens
tcagggctgtgaaac

SEQ ID NO: 387423 - DNA, 15 bp, Homo sapiens
ttcagggctgtgaaa

SEQ ID NO: 387424 - DNA, 15 bp, Homo sapiens
attcagggctgtgaa

SEQ ID NO: 387425 - DNA, 15 bp, Homo sapiens
tattcagggctgtga

SEQ ID NO: 387426 - DNA, 15 bp, Homo sapiens
atattcagggctgtg

SEQ ID NO: 387427 - DNA, 15 bp, Homo sapiens
gatattcagggctgt

SEQ ID NO: 387428 - DNA, 15 bp, Homo sapiens
agatattcagggctg

SEQ ID NO: 387429 - DNA, 15 bp, Homo sapiens
aagatattcagggct

SEQ ID NO: 387430 - DNA, 15 bp, Homo sapiens
caagatattcagggc

SEQ ID NO: 387431 - DNA, 15 bp, Homo sapiens
ccaagatattcaggg

SEQ ID NO: 387432 - DNA, 15 bp, Homo sapiens
accaagatattcagg

SEQ ID NO: 387433 - DNA, 15 bp, Homo sapiens
aaccaagatattcag

SEQ ID NO: 387434 - DNA, 15 bp, Homo sapiens
aaaccaagatattca

SEQ ID NO: 387435 - DNA, 15 bp, Homo sapiens
caaaccaagatattc

SEQ ID NO: 387436 - DNA, 15 bp, Homo sapiens
tcaaaccaagatatt

SEQ ID NO: 387437 - DNA, 15 bp, Homo sapiens
ttcaaaccaagatat

SEQ ID NO: 387438 - DNA, 15 bp, Homo sapiens
attcaaaccaagata

SEQ ID NO: 387439 - DNA, 15 bp, Homo sapiens
gattcaaaccaagat

SEQ ID NO: 387440 - DNA, 15 bp, Homo sapiens
ggattcaaaccaaga

SEQ ID NO: 387441 - DNA, 15 bp, Homo sapiens
gggattcaaaccaag

SEQ ID NO: 387442 - DNA, 15 bp, Homo sapiens
tgggattcaaaccaa

SEQ ID NO: 387443 - DNA, 15 bp, Homo sapiens
ctgggattcaaacca

SEQ ID NO: 387444 - DNA, 15 bp, Homo sapiens
actgggattcaaacc

SEQ ID NO: 387445 - DNA, 15 bp, Homo sapiens
aactgggattcaaac

SEQ ID NO: 387446 - DNA, 15 bp, Homo sapiens
gaactgggattcaaa

SEQ ID NO: 387447 - DNA, 15 bp, Homo sapiens
agaactgggattcaa

SEQ ID NO: 387448 - DNA, 15 bp, Homo sapiens
cagaactgggattca

SEQ ID NO: 387449 - DNA, 15 bp, Homo sapiens
gcagaactgggattc

SEQ ID NO: 387450 - DNA, 15 bp, Homo sapiens
cgcagaactgggatt

SEQ ID NO: 387451 - DNA, 15 bp, Homo sapiens
acgcagaactgggat

SEQ ID NO: 387452 - DNA, 15 bp, Homo sapiens
gacgcagaactggga

SEQ ID NO: 387453 - DNA, 15 bp, Homo sapiens
agacgcagaactggg

SEQ ID NO: 387454 - DNA, 15 bp, Homo sapiens
aagacgcagaactgg

SEQ ID NO: 387455 - DNA, 15 bp, Homo sapiens
caagacgcagaactg

SEQ ID NO: 387456 - DNA, 15 bp, Homo sapiens
gcaagacgcagaact

SEQ ID NO: 387457 - DNA, 15 bp, Homo sapiens
ggcaagacgcagaac

SEQ ID NO: 387458 - DNA, 15 bp, Homo sapiens
aggcaagacgcagaa

SEQ ID NO: 387459 - DNA, 15 bp, Homo sapiens
caggcaagacgcaga

SEQ ID NO: 387460 - DNA, 15 bp, Homo sapiens
tcaggcaagacgcag

SEQ ID NO: 387461 - DNA, 15 bp, Homo sapiens
ctcaggcaagacgca

SEQ ID NO: 387462 - DNA, 15 bp, Homo sapiens
actcaggcaagacgc

SEQ ID NO: 387463 - DNA, 15 bp, Homo sapiens
gactcaggcaagacg

SEQ ID NO: 387464 - DNA, 15 bp, Homo sapiens
agactcaggcaagac

SEQ ID NO: 387465 - DNA, 15 bp, Homo sapiens
gagactcaggcaaga

SEQ ID NO: 387466 - DNA, 15 bp, Homo sapiens
ggagactcaggcaag

SEQ ID NO: 387467 - DNA, 15 bp, Homo sapiens
gggagactcaggcaa

SEQ ID NO: 387468 - DNA, 15 bp, Homo sapiens
agggagactcaggca

SEQ ID NO: 387469 - DNA, 15 bp, Homo sapiens
aagggagactcaggc

SEQ ID NO: 387470 - DNA, 15 bp, Homo sapiens
aaagggagactcagg

SEQ ID NO: 387471 - DNA, 15 bp, Homo sapiens
gaaagggagactcag

SEQ ID NO: 387472 - DNA, 15 bp, Homo sapiens
ggaaagggagactca

SEQ ID NO: 387473 - DNA, 15 bp, Homo sapiens
aggaaagggagactc

SEQ ID NO: 387474 - DNA, 15 bp, Homo sapiens
gaggaaagggagact

SEQ ID NO: 387475 - DNA, 15 bp, Homo sapiens
tgaggaaagggagac

SEQ ID NO: 387476 - DNA, 15 bp, Homo sapiens
ctgaggaaagggaga

SEQ ID NO: 387477 - DNA, 15 bp, Homo sapiens
tctgaggaaagggag

SEQ ID NO: 387478 - DNA, 15 bp, Homo sapiens
ttctgaggaaaggga

SEQ ID NO: 387479 - DNA, 15 bp, Homo sapiens
cttctgaggaaaggg

SEQ ID NO: 387480 - DNA, 15 bp, Homo sapiens
ccttctgaggaaagg

SEQ ID NO: 387481 - DNA, 15 bp, Homo sapiens
tccttctgaggaaag

SEQ ID NO: 387482 - DNA, 15 bp, Homo sapiens
ttccttctgaggaaa

SEQ ID NO: 387483 - DNA, 15 bp, Homo sapiens
attccttctgaggaa

SEQ ID NO: 387484 - DNA, 15 bp, Homo sapiens
cattccttctgagga

SEQ ID NO: 387485 - DNA, 15 bp, Homo sapiens
acattccttctgagg

SEQ ID NO: 387486 - DNA, 15 bp, Homo sapiens
tacattccttctgag

SEQ ID NO: 387487 - DNA, 15 bp, Homo sapiens
ctacattccttctga

SEQ ID NO: 387488 - DNA, 15 bp, Homo sapiens
cctacattccttctg

SEQ ID NO: 387489 - DNA, 15 bp, Homo sapiens
acctacattccttct

SEQ ID NO: 387490 - DNA, 15 bp, Homo sapiens
tacctacattccttc

SEQ ID NO: 387491 - DNA, 15 bp, Homo sapiens
ctacctacattcctt

SEQ ID NO: 387492 - DNA, 15 bp, Homo sapiens
actacctacattcct

SEQ ID NO: 387493 - DNA, 15 bp, Homo sapiens
tactacctacattcc

SEQ ID NO: 387494 - DNA, 15 bp, Homo sapiens
ttactacctacattc

SEQ ID NO: 387495 - DNA, 15 bp, Homo sapiens
attactacctacatt

SEQ ID NO: 387496 - DNA, 15 bp, Homo sapiens
cattactacctacat

SEQ ID NO: 387497 - DNA, 15 bp, Homo sapiens
ccattactacctaca

SEQ ID NO: 387498 - DNA, 15 bp, Homo sapiens
accattactacctac

SEQ ID NO: 387499 - DNA, 15 bp, Homo sapiens
taccattactaccta

SEQ ID NO: 387500 - DNA, 15 bp, Homo sapiens
ataccattactacct

SEQ ID NO: 387501 - DNA, 15 bp, Homo sapiens
tataccattactacc

SEQ ID NO: 387502 - DNA, 15 bp, Homo sapiens
atataccattactac

SEQ ID NO: 387503 - DNA, 15 bp, Homo sapiens
aatataccattacta

SEQ ID NO: 387504 - DNA, 15 bp, Homo sapiens
taatataccattact

SEQ ID NO: 387505 - DNA, 15 bp, Homo sapiens
ataatataccattac

SEQ ID NO: 387506 - DNA, 15 bp, Homo sapiens
aataatataccatta

SEQ ID NO: 387507 - DNA, 15 bp, Homo sapiens
gaataatataccatt

SEQ ID NO: 387508 - DNA, 15 bp, Homo sapiens
tgaataatataccat

SEQ ID NO: 387509 - DNA, 15 bp, Homo sapiens
atgaataatatacca

SEQ ID NO: 387510 - DNA, 15 bp, Homo sapiens
catgaataatatacc

SEQ ID NO: 387511 - DNA, 15 bp, Homo sapiens
ccatgaataatatac

SEQ ID NO: 387512 - DNA, 15 bp, Homo sapiens
cccatgaataatata

SEQ ID NO: 387513 - DNA, 15 bp, Homo sapiens
ccccatgaataatat

SEQ ID NO: 387514 - DNA, 15 bp, Homo sapiens
accccatgaataata

SEQ ID NO: 387515 - DNA, 15 bp, Homo sapiens
gaccccatgaataat

SEQ ID NO: 387516 - DNA, 15 bp, Homo sapiens
tgaccccatgaataa

SEQ ID NO: 387517 - DNA, 15 bp, Homo sapiens
gtgaccccatgaata

SEQ ID NO: 387518 - DNA, 15 bp, Homo sapiens
tgtgaccccatgaat

SEQ ID NO: 387519 - DNA, 15 bp, Homo sapiens
ttgtgaccccatgaa

SEQ ID NO: 387520 - DNA, 15 bp, Homo sapiens
cttgtgaccccatga

SEQ ID NO: 387521 - DNA, 15 bp, Homo sapiens
ccttgtgaccccatg

SEQ ID NO: 387522 - DNA, 15 bp, Homo sapiens
tccttgtgaccccat

SEQ ID NO: 387523 - DNA, 15 bp, Homo sapiens
atccttgtgacccca

SEQ ID NO: 387524 - DNA, 15 bp, Homo sapiens
aatccttgtgacccc

SEQ ID NO: 387525 - DNA, 15 bp, Homo sapiens
taatccttgtgaccc

SEQ ID NO: 387526 - DNA, 15 bp, Homo sapiens
ttaatccttgtgacc

SEQ ID NO: 387527 - DNA, 15 bp, Homo sapiens
tttaatccttgtgac

SEQ ID NO: 387528 - DNA, 15 bp, Homo sapiens
atttaatccttgtga

SEQ ID NO: 387529 - DNA, 15 bp, Homo sapiens
catttaatccttgtg

SEQ ID NO: 387530 - DNA, 15 bp, Homo sapiens
tcatttaatccttgt

SEQ ID NO: 387531 - DNA, 15 bp, Homo sapiens
ttcatttaatccttg

SEQ ID NO: 387532 - DNA, 15 bp, Homo sapiens
tttcatttaatcctt

SEQ ID NO: 387533 - DNA, 15 bp, Homo sapiens
atttcatttaatcct

SEQ ID NO: 387534 - DNA, 15 bp, Homo sapiens
tatttcatttaatcc

SEQ ID NO: 387535 - DNA, 15 bp, Homo sapiens
ttatttcatttaatc

SEQ ID NO: 387536 - DNA, 15 bp, Homo sapiens
gttatttcatttaat

SEQ ID NO: 387537 - DNA, 15 bp, Homo sapiens
ggttatttcatttaa

SEQ ID NO: 387538 - DNA, 15 bp, Homo sapiens
aggttatttcattta

SEQ ID NO: 387539 - DNA, 15 bp, Homo sapiens
caggttatttcattt

SEQ ID NO: 387540 - DNA, 15 bp, Homo sapiens
acaggttatttcatt

SEQ ID NO: 387541 - DNA, 15 bp, Homo sapiens
cacaggttatttcat

SEQ ID NO: 387542 - DNA, 15 bp, Homo sapiens
gcacaggttatttca

SEQ ID NO: 387543 - DNA, 15 bp, Homo sapiens
ggcacaggttatttc

SEQ ID NO: 387544 - DNA, 15 bp, Homo sapiens
gggcacaggttattt

SEQ ID NO: 387545 - DNA, 15 bp, Homo sapiens
tgggcacaggttatt

SEQ ID NO: 387546 - DNA, 15 bp, Homo sapiens
ctgggcacaggttat

SEQ ID NO: 387547 - DNA, 15 bp, Homo sapiens
cctgggcacaggtta

SEQ ID NO: 387548 - DNA, 15 bp, Homo sapiens
acctgggcacaggtt

SEQ ID NO: 387549 - DNA, 15 bp, Homo sapiens
cacctgggcacaggt

SEQ ID NO: 387550 - DNA, 15 bp, Homo sapiens
acacctgggcacagg

SEQ ID NO: 387551 - DNA, 15 bp, Homo sapiens
aacacctgggcacag

SEQ ID NO: 387552 - DNA, 15 bp, Homo sapiens
taacacctgggcaca

SEQ ID NO: 387553 - DNA, 15 bp, Homo sapiens
ctaacacctgggcac

SEQ ID NO: 387554 - DNA, 15 bp, Homo sapiens
gctaacacctgggca

SEQ ID NO: 387555 - DNA, 15 bp, Homo sapiens
tgctaacacctgggc

SEQ ID NO: 387556 - DNA, 15 bp, Homo sapiens
gtgctaacacctggg

SEQ ID NO: 387557 - DNA, 15 bp, Homo sapiens
ggtgctaacacctgg

SEQ ID NO: 387558 - DNA, 15 bp, Homo sapiens
tggtgctaacacctg

SEQ ID NO: 387559 - DNA, 15 bp, Homo sapiens
atggtgctaacacct

SEQ ID NO: 387560 - DNA, 15 bp, Homo sapiens
catggtgctaacacc

SEQ ID NO: 387561 - DNA, 15 bp, Homo sapiens
gcatggtgctaacac

SEQ ID NO: 387562 - DNA, 15 bp, Homo sapiens
agcatggtgctaaca

SEQ ID NO: 387563 - DNA, 15 bp, Homo sapiens
aagcatggtgctaac

SEQ ID NO: 387564 - DNA, 15 bp, Homo sapiens
caagcatggtgctaa

SEQ ID NO: 387565 - DNA, 15 bp, Homo sapiens
ccaagcatggtgcta

SEQ ID NO: 387566 - DNA, 15 bp, Homo sapiens
gccaagcatggtgct

SEQ ID NO: 387567 - DNA, 15 bp, Homo sapiens
tgccaagcatggtgc

SEQ ID NO: 387568 - DNA, 15 bp, Homo sapiens
gtgccaagcatggtg

SEQ ID NO: 387569 - DNA, 15 bp, Homo sapiens
tgtgccaagcatggt

SEQ ID NO: 387570 - DNA, 15 bp, Homo sapiens
ttgtgccaagcatgg

SEQ ID NO: 387571 - DNA, 15 bp, Homo sapiens
tttgtgccaagcatg

SEQ ID NO: 387572 - DNA, 15 bp, Homo sapiens
atttgtgccaagcat

SEQ ID NO: 387573 - DNA, 15 bp, Homo sapiens
aatttgtgccaagca

SEQ ID NO: 387574 - DNA, 15 bp, Homo sapiens
taatttgtgccaagc

SEQ ID NO: 387575 - DNA, 15 bp, Homo sapiens
ctaatttgtgccaag

SEQ ID NO: 387576 - DNA, 15 bp, Homo sapiens
actaatttgtgccaa

SEQ ID NO: 387577 - DNA, 15 bp, Homo sapiens
cactaatttgtgcca

SEQ ID NO: 387578 - DNA, 15 bp, Homo sapiens
gcactaatttgtgcc

SEQ ID NO: 387579 - DNA, 15 bp, Homo sapiens
tgcactaatttgtgc

SEQ ID NO: 387580 - DNA, 15 bp, Homo sapiens
atgcactaatttgtg

SEQ ID NO: 387581 - DNA, 15 bp, Homo sapiens
tatgcactaatttgt

SEQ ID NO: 387582 - DNA, 15 bp, Homo sapiens
gtatgcactaatttg

SEQ ID NO: 387583 - DNA, 15 bp, Homo sapiens
agtatgcactaattt

SEQ ID NO: 387584 - DNA, 15 bp, Homo sapiens
cagtatgcactaatt

SEQ ID NO: 387585 - DNA, 15 bp, Homo sapiens
gcagtatgcactaat

SEQ ID NO: 387586 - DNA, 15 bp, Homo sapiens
ggcagtatgcactaa

SEQ ID NO: 387587 - DNA, 15 bp, Homo sapiens
aggcagtatgcacta

SEQ ID NO: 387588 - DNA, 15 bp, Homo sapiens
taggcagtatgcact

SEQ ID NO: 387589 - DNA, 15 bp, Homo sapiens
ataggcagtatgcac

SEQ ID NO: 387590 - DNA, 15 bp, Homo sapiens
cataggcagtatgca

SEQ ID NO: 387591 - DNA, 15 bp, Homo sapiens
tcataggcagtatgc

SEQ ID NO: 387592 - DNA, 15 bp, Homo sapiens
gtcataggcagtatg

SEQ ID NO: 387593 - DNA, 15 bp, Homo sapiens
ggtcataggcagtat

SEQ ID NO: 387594 - DNA, 15 bp, Homo sapiens
aggtcataggcagta

SEQ ID NO: 387595 - DNA, 15 bp, Homo sapiens
taggtcataggcagt

SEQ ID NO: 387596 - DNA, 15 bp, Homo sapiens
ataggtcataggcag

SEQ ID NO: 387597 - DNA, 15 bp, Homo sapiens
aataggtcataggca

SEQ ID NO: 387598 - DNA, 15 bp, Homo sapiens
aaataggtcataggc

SEQ ID NO: 387599 - DNA, 15 bp, Homo sapiens
caaataggtcatagg

SEQ ID NO: 387600 - DNA, 15 bp, Homo sapiens
acaaataggtcatag

SEQ ID NO: 387601 - DNA, 15 bp, Homo sapiens
tacaaataggtcata

SEQ ID NO: 387602 - DNA, 15 bp, Homo sapiens
atacaaataggtcat

SEQ ID NO: 387603 - DNA, 15 bp, Homo sapiens
aatacaaataggtca

SEQ ID NO: 387604 - DNA, 15 bp, Homo sapiens
taatacaaataggtc

SEQ ID NO: 387605 - DNA, 15 bp, Homo sapiens
ttaatacaaataggt

SEQ ID NO: 387606 - DNA, 15 bp, Homo sapiens
tttaatacaaatagg

SEQ ID NO: 387607 - DNA, 15 bp, Homo sapiens
gtttaatacaaatag

SEQ ID NO: 387608 - DNA, 15 bp, Homo sapiens
agtttaatacaaata

SEQ ID NO: 387609 - DNA, 15 bp, Homo sapiens
tagtttaatacaaat

SEQ ID NO: 387610 - DNA, 15 bp, Homo sapiens
atagtttaatacaaa

SEQ ID NO: 387611 - DNA, 15 bp, Homo sapiens
aatagtttaatacaa

SEQ ID NO: 387612 - DNA, 15 bp, Homo sapiens
taatagtttaataca

SEQ ID NO: 387613 - DNA, 15 bp, Homo sapiens
ataatagtttaatac

SEQ ID NO: 387614 - DNA, 15 bp, Homo sapiens
gataatagtttaata

SEQ ID NO: 387615 - DNA, 15 bp, Homo sapiens
tgataatagtttaat

SEQ ID NO: 387616 - DNA, 15 bp, Homo sapiens
atgataatagtttaa

SEQ ID NO: 387617 - DNA, 15 bp, Homo sapiens
gatgataatagttta

SEQ ID NO: 387618 - DNA, 15 bp, Homo sapiens
agatgataatagttt

SEQ ID NO: 387619 - DNA, 15 bp, Homo sapiens
tagatgataatagtt

SEQ ID NO: 387620 - DNA, 15 bp, Homo sapiens
ttagatgataatagt

SEQ ID NO: 387621 - DNA, 15 bp, Homo sapiens
cttagatgataatag

SEQ ID NO: 387622 - DNA, 15 bp, Homo sapiens
tcttagatgataata

SEQ ID NO: 387623 - DNA, 15 bp, Homo sapiens
atcttagatgataat

SEQ ID NO: 387624 - DNA, 15 bp, Homo sapiens
catcttagatgataa

SEQ ID NO: 387625 - DNA, 15 bp, Homo sapiens
tcatcttagatgata

SEQ ID NO: 387626 - DNA, 15 bp, Homo sapiens
ttcatcttagatgat

SEQ ID NO: 387627 - DNA, 15 bp, Homo sapiens
tttcatcttagatga

SEQ ID NO: 387628 - DNA, 15 bp, Homo sapiens
gtttcatcttagatg

SEQ ID NO: 387629 - DNA, 15 bp, Homo sapiens
agtttcatcttagat

SEQ ID NO: 387630 - DNA, 15 bp, Homo sapiens
tagtttcatcttaga

SEQ ID NO: 387631 - DNA, 15 bp, Homo sapiens
atagtttcatcttag

SEQ ID NO: 387632 - DNA, 15 bp, Homo sapiens
tatagtttcatctta

SEQ ID NO: 387633 - DNA, 15 bp, Homo sapiens
ttatagtttcatctt

SEQ ID NO: 387634 - DNA, 15 bp, Homo sapiens
tttatagtttcatct

SEQ ID NO: 387635 - DNA, 15 bp, Homo sapiens
gtttatagtttcatc

SEQ ID NO: 387636 - DNA, 15 bp, Homo sapiens
agtttatagtttcat

SEQ ID NO: 387637 - DNA, 15 bp, Homo sapiens
aagtttatagtttca

SEQ ID NO: 387638 - DNA, 15 bp, Homo sapiens
aaagtttatagtttc

SEQ ID NO: 387639 - DNA, 15 bp, Homo sapiens
taaagtttatagttt

SEQ ID NO: 387640 - DNA, 15 bp, Homo sapiens
ttaaagtttatagtt

SEQ ID NO: 387641 - DNA, 15 bp, Homo sapiens
attaaagtttatagt

SEQ ID NO: 387642 - DNA, 15 bp, Homo sapiens
aattaaagtttatag

SEQ ID NO: 387643 - DNA, 15 bp, Homo sapiens
caattaaagtttata

SEQ ID NO: 387644 - DNA, 15 bp, Homo sapiens
gcaattaaagtttat

SEQ ID NO: 387645 - DNA, 15 bp, Homo sapiens
tgcaattaaagttta

SEQ ID NO: 387646 - DNA, 15 bp, Homo sapiens
atgcaattaaagttt

SEQ ID NO: 387647 - DNA, 15 bp, Homo sapiens
catgcaattaaagtt

SEQ ID NO: 387648 - DNA, 15 bp, Homo sapiens
acatgcaattaaagt

SEQ ID NO: 387649 - DNA, 15 bp, Homo sapiens
tacatgcaattaaag

SEQ ID NO: 387650 - DNA, 15 bp, Homo sapiens
atacatgcaattaaa

SEQ ID NO: 387651 - DNA, 15 bp, Homo sapiens
aatacatgcaattaa

SEQ ID NO: 387652 - DNA, 15 bp, Homo sapiens
taatacatgcaatta

SEQ ID NO: 387653 - DNA, 15 bp, Homo sapiens
ataatacatgcaatt

SEQ ID NO: 387654 - DNA, 15 bp, Homo sapiens
tataatacatgcaat

SEQ ID NO: 387655 - DNA, 15 bp, Homo sapiens
ttataatacatgcaa

SEQ ID NO: 387656 - DNA, 15 bp, Homo sapiens
attataatacatgca

SEQ ID NO: 387657 - DNA, 15 bp, Homo sapiens
tattataatacatgc

SEQ ID NO: 387658 - DNA, 15 bp, Homo sapiens
gtattataatacatg

SEQ ID NO: 387659 - DNA, 15 bp, Homo sapiens
agtattataatacat

SEQ ID NO: 387660 - DNA, 15 bp, Homo sapiens
cagtattataataca

SEQ ID NO: 387661 - DNA, 15 bp, Homo sapiens
gcagtattataatac

SEQ ID NO: 387662 - DNA, 15 bp, Homo sapiens
tgcagtattataata

SEQ ID NO: 387663 - DNA, 15 bp, Homo sapiens
ttgcagtattataat

SEQ ID NO: 387664 - DNA, 15 bp, Homo sapiens
cttgcagtattataa

SEQ ID NO: 387665 - DNA, 15 bp, Homo sapiens
tcttgcagtattata

SEQ ID NO: 387666 - DNA, 15 bp, Homo sapiens
atcttgcagtattat

SEQ ID NO: 387667 - DNA, 15 bp, Homo sapiens
aatcttgcagtatta

SEQ ID NO: 387668 - DNA, 15 bp, Homo sapiens
aaatcttgcagtatt

SEQ ID NO: 387669 - DNA, 15 bp, Homo sapiens
caaatcttgcagtat

SEQ ID NO: 387670 - DNA, 15 bp, Homo sapiens
ccaaatcttgcagta

SEQ ID NO: 387671 - DNA, 15 bp, Homo sapiens
accaaatcttgcagt

SEQ ID NO: 387672 - DNA, 15 bp, Homo sapiens
aaccaaatcttgcag

SEQ ID NO: 387673 - DNA, 15 bp, Homo sapiens
aaaccaaatcttgca

SEQ ID NO: 387674 - DNA, 15 bp, Homo sapiens
taaaccaaatcttgc

SEQ ID NO: 387675 - DNA, 15 bp, Homo sapiens
ttaaaccaaatcttg

SEQ ID NO: 387676 - DNA, 15 bp, Homo sapiens
tttaaaccaaatctt

SEQ ID NO: 387677 - DNA, 15 bp, Homo sapiens
ctttaaaccaaatct

SEQ ID NO: 387678 - DNA, 15 bp, Homo sapiens
cctttaaaccaaatc

SEQ ID NO: 387679 - DNA, 15 bp, Homo sapiens
acctttaaaccaaat

SEQ ID NO: 387680 - DNA, 15 bp, Homo sapiens
gacctttaaaccaaa

SEQ ID NO: 387681 - DNA, 15 bp, Homo sapiens
ggacctttaaaccaa

SEQ ID NO: 387682 - DNA, 15 bp, Homo sapiens
gggacctttaaacca

SEQ ID NO: 387683 - DNA, 15 bp, Homo sapiens
ggggacctttaaacc

SEQ ID NO: 387684 - DNA, 15 bp, Homo sapiens
aggggacctttaaac

SEQ ID NO: 387685 - DNA, 15 bp, Homo sapiens
aaggggacctttaaa

SEQ ID NO: 387686 - DNA, 15 bp, Homo sapiens
aaaggggacctttaa

SEQ ID NO: 387687 - DNA, 15 bp, Homo sapiens
taaaggggaccttta

SEQ ID NO: 387688 - DNA, 15 bp, Homo sapiens
ctaaaggggaccttt

SEQ ID NO: 387689 - DNA, 15 bp, Homo sapiens
actaaaggggacctt

SEQ ID NO: 387690 - DNA, 15 bp, Homo sapiens
aactaaaggggacct

SEQ ID NO: 387691 - DNA, 15 bp, Homo sapiens
aaactaaaggggacc

SEQ ID NO: 387692 - DNA, 15 bp, Homo sapiens
aaaactaaaggggac

SEQ ID NO: 387693 - DNA, 15 bp, Homo sapiens
aaaaactaaagggga

SEQ ID NO: 387694 - DNA, 15 bp, Homo sapiens
taaaaactaaagggg

SEQ ID NO: 387695 - DNA, 15 bp, Homo sapiens
gtaaaaactaaaggg

SEQ ID NO: 387696 - DNA, 15 bp, Homo sapiens
agtaaaaactaaagg

SEQ ID NO: 387697 - DNA, 15 bp, Homo sapiens
aagtaaaaactaaag

SEQ ID NO: 387698 - DNA, 15 bp, Homo sapiens
gaagtaaaaactaaa

SEQ ID NO: 387699 - DNA, 15 bp, Homo sapiens
agaagtaaaaactaa

SEQ ID NO: 387700 - DNA, 15 bp, Homo sapiens
aagaagtaaaaacta

SEQ ID NO: 387701 - DNA, 15 bp, Homo sapiens
caagaagtaaaaact

SEQ ID NO: 387702 - DNA, 15 bp, Homo sapiens
ccaagaagtaaaaac

SEQ ID NO: 387703 - DNA, 15 bp, Homo sapiens
gccaagaagtaaaaa

SEQ ID NO: 387704 - DNA, 15 bp, Homo sapiens
tgccaagaagtaaaa

SEQ ID NO: 387705 - DNA, 15 bp, Homo sapiens
atgccaagaagtaaa

SEQ ID NO: 387706 - DNA, 15 bp, Homo sapiens
catgccaagaagtaa

SEQ ID NO: 387707 - DNA, 15 bp, Homo sapiens
acatgccaagaagta

SEQ ID NO: 387708 - DNA, 15 bp, Homo sapiens
gacatgccaagaagt

SEQ ID NO: 387709 - DNA, 15 bp, Homo sapiens
tgacatgccaagaag

SEQ ID NO: 387710 - DNA, 15 bp, Homo sapiens
atgacatgccaagaa

SEQ ID NO: 387711 - DNA, 15 bp, Homo sapiens
catgacatgccaaga

SEQ ID NO: 387712 - DNA, 15 bp, Homo sapiens
acatgacatgccaag

SEQ ID NO: 387713 - DNA, 15 bp, Homo sapiens
gacatgacatgccaa

SEQ ID NO: 387714 - DNA, 15 bp, Homo sapiens
agacatgacatgcca

SEQ ID NO: 387715 - DNA, 15 bp, Homo sapiens
gagacatgacatgcc

SEQ ID NO: 387716 - DNA, 15 bp, Homo sapiens
ggagacatgacatgc

SEQ ID NO: 387717 - DNA, 15 bp, Homo sapiens
tggagacatgacatg

SEQ ID NO: 387718 - DNA, 15 bp, Homo sapiens
ttggagacatgacat

SEQ ID NO: 387719 - DNA, 15 bp, Homo sapiens
tttggagacatgaca

SEQ ID NO: 387720 - DNA, 15 bp, Homo sapiens
atttggagacatgac

SEQ ID NO: 387721 - DNA, 15 bp, Homo sapiens
aatttggagacatga

SEQ ID NO: 387722 - DNA, 15 bp, Homo sapiens
gaatttggagacatg

SEQ ID NO: 387723 - DNA, 15 bp, Homo sapiens
tgaatttggagacat

SEQ ID NO: 387724 - DNA, 15 bp, Homo sapiens
atgaatttggagaca

SEQ ID NO: 387725 - DNA, 15 bp, Homo sapiens
aatgaatttggagac

SEQ ID NO: 387726 - DNA, 15 bp, Homo sapiens
gaatgaatttggaga

SEQ ID NO: 387727 - DNA, 15 bp, Homo sapiens
tgaatgaatttggag

SEQ ID NO: 387728 - DNA, 15 bp, Homo sapiens
ttgaatgaatttgga

SEQ ID NO: 387729 - DNA, 15 bp, Homo sapiens
attgaatgaatttgg

SEQ ID NO: 387730 - DNA, 15 bp, Homo sapiens
tattgaatgaatttg

SEQ ID NO: 387731 - DNA, 15 bp, Homo sapiens
ctattgaatgaattt

SEQ ID NO: 387732 - DNA, 15 bp, Homo sapiens
tctattgaatgaatt

SEQ ID NO: 387733 - DNA, 15 bp, Homo sapiens
atctattgaatgaat

SEQ ID NO: 387734 - DNA, 15 bp, Homo sapiens
catctattgaatgaa

SEQ ID NO: 387735 - DNA, 15 bp, Homo sapiens
acatctattgaatga

SEQ ID NO: 387736 - DNA, 15 bp, Homo sapiens
gacatctattgaatg

SEQ ID NO: 387737 - DNA, 15 bp, Homo sapiens
tgacatctattgaat

SEQ ID NO: 387738 - DNA, 15 bp, Homo sapiens
atgacatctattgaa

SEQ ID NO: 387739 - DNA, 15 bp, Homo sapiens
aatgacatctattga

SEQ ID NO: 387740 - DNA, 15 bp, Homo sapiens
aaatgacatctattg

SEQ ID NO: 387741 - DNA, 15 bp, Homo sapiens
taaatgacatctatt

SEQ ID NO: 387742 - DNA, 15 bp, Homo sapiens
ttaaatgacatctat

SEQ ID NO: 387743 - DNA, 15 bp, Homo sapiens
cttaaatgacatcta

SEQ ID NO: 387744 - DNA, 15 bp, Homo sapiens
tcttaaatgacatct

SEQ ID NO: 387745 - DNA, 15 bp, Homo sapiens
ctcttaaatgacatc

SEQ ID NO: 387746 - DNA, 15 bp, Homo sapiens
actcttaaatgacat

SEQ ID NO: 387747 - DNA, 15 bp, Homo sapiens
gactcttaaatgaca

SEQ ID NO: 387748 - DNA, 15 bp, Homo sapiens
tgactcttaaatgac

SEQ ID NO: 387749 - DNA, 15 bp, Homo sapiens
atgactcttaaatga

SEQ ID NO: 387750 - DNA, 15 bp, Homo sapiens
aatgactcttaaatg

SEQ ID NO: 387751 - DNA, 15 bp, Homo sapiens
aaatgactcttaaat

SEQ ID NO: 387752 - DNA, 15 bp, Homo sapiens
caaatgactcttaaa

SEQ ID NO: 387753 - DNA, 15 bp, Homo sapiens
tcaaatgactcttaa

SEQ ID NO: 387754 - DNA, 15 bp, Homo sapiens
gtcaaatgactctta

SEQ ID NO: 387755 - DNA, 15 bp, Homo sapiens
ggtcaaatgactctt

SEQ ID NO: 387756 - DNA, 15 bp, Homo sapiens
tggtcaaatgactct

SEQ ID NO: 387757 - DNA, 15 bp, Homo sapiens
ctggtcaaatgactc

SEQ ID NO: 387758 - DNA, 15 bp, Homo sapiens
tctggtcaaatgact

SEQ ID NO: 387759 - DNA, 15 bp, Homo sapiens
ttctggtcaaatgac

SEQ ID NO: 387760 - DNA, 15 bp, Homo sapiens
gttctggtcaaatga

SEQ ID NO: 387761 - DNA, 15 bp, Homo sapiens
ggttctggtcaaatg

SEQ ID NO: 387762 - DNA, 15 bp, Homo sapiens
tggttctggtcaaat

SEQ ID NO: 387763 - DNA, 15 bp, Homo sapiens
ctggttctggtcaaa

SEQ ID NO: 387764 - DNA, 15 bp, Homo sapiens
tctggttctggtcaa

SEQ ID NO: 387765 - DNA, 15 bp, Homo sapiens
ttctggttctggtca

SEQ ID NO: 387766 - DNA, 15 bp, Homo sapiens
tttctggttctggtc

SEQ ID NO: 387767 - DNA, 15 bp, Homo sapiens
gtttctggttctggt

SEQ ID NO: 387768 - DNA, 15 bp, Homo sapiens
ggtttctggttctgg

SEQ ID NO: 387769 - DNA, 15 bp, Homo sapiens
tggtttctggttctg

SEQ ID NO: 387770 - DNA, 15 bp, Homo sapiens
ttggtttctggttct

SEQ ID NO: 387771 - DNA, 15 bp, Homo sapiens
attggtttctggttc

SEQ ID NO: 387772 - DNA, 15 bp, Homo sapiens
aattggtttctggtt

SEQ ID NO: 387773 - DNA, 15 bp, Homo sapiens
aaattggtttctggt

SEQ ID NO: 387774 - DNA, 15 bp, Homo sapiens
aaaattggtttctgg

SEQ ID NO: 387775 - DNA, 15 bp, Homo sapiens
gaaaattggtttctg

SEQ ID NO: 387776 - DNA, 15 bp, Homo sapiens
ggaaaattggtttct

SEQ ID NO: 387777 - DNA, 15 bp, Homo sapiens
aggaaaattggtttc

SEQ ID NO: 387778 - DNA, 15 bp, Homo sapiens
caggaaaattggttt

SEQ ID NO: 387779 - DNA, 15 bp, Homo sapiens
tcaggaaaattggtt

SEQ ID NO: 387780 - DNA, 15 bp, Homo sapiens
ttcaggaaaattggt

SEQ ID NO: 387781 - DNA, 15 bp, Homo sapiens
tttcaggaaaattgg

SEQ ID NO: 387782 - DNA, 15 bp, Homo sapiens
atttcaggaaaattg

SEQ ID NO: 387783 - DNA, 15 bp, Homo sapiens
catttcaggaaaatt

SEQ ID NO: 387784 - DNA, 15 bp, Homo sapiens
acatttcaggaaaat

SEQ ID NO: 387785 - DNA, 15 bp, Homo sapiens
tacatttcaggaaaa

SEQ ID NO: 387786 - DNA, 15 bp, Homo sapiens
atacatttcaggaaa

SEQ ID NO: 387787 - DNA, 15 bp, Homo sapiens
catacatttcaggaa

SEQ ID NO: 387788 - DNA, 15 bp, Homo sapiens
tcatacatttcagga

SEQ ID NO: 387789 - DNA, 15 bp, Homo sapiens
gtcatacatttcagg

SEQ ID NO: 387790 - DNA, 15 bp, Homo sapiens
tgtcatacatttcag

SEQ ID NO: 387791 - DNA, 15 bp, Homo sapiens
atgtcatacatttca

SEQ ID NO: 387792 - DNA, 15 bp, Homo sapiens
aatgtcatacatttc

SEQ ID NO: 387793 - DNA, 15 bp, Homo sapiens
aaatgtcatacattt

SEQ ID NO: 387794 - DNA, 15 bp, Homo sapiens
caaatgtcatacatt

SEQ ID NO: 387795 - DNA, 15 bp, Homo sapiens
gcaaatgtcatacat

SEQ ID NO: 387796 - DNA, 15 bp, Homo sapiens
agcaaatgtcataca

SEQ ID NO: 387797 - DNA, 15 bp, Homo sapiens
gagcaaatgtcatac

SEQ ID NO: 387798 - DNA, 15 bp, Homo sapiens
tgagcaaatgtcata

SEQ ID NO: 387799 - DNA, 15 bp, Homo sapiens
gtgagcaaatgtcat

SEQ ID NO: 387800 - DNA, 15 bp, Homo sapiens
agtgagcaaatgtca

SEQ ID NO: 387801 - DNA, 15 bp, Homo sapiens
cagtgagcaaatgtc

SEQ ID NO: 387802 - DNA, 15 bp, Homo sapiens
gcagtgagcaaatgt

SEQ ID NO: 387803 - DNA, 15 bp, Homo sapiens
agcagtgagcaaatg

SEQ ID NO: 387804 - DNA, 15 bp, Homo sapiens
aagcagtgagcaaat

SEQ ID NO: 387805 - DNA, 15 bp, Homo sapiens
taagcagtgagcaaa

SEQ ID NO: 387806 - DNA, 15 bp, Homo sapiens
ataagcagtgagcaa

SEQ ID NO: 387807 - DNA, 15 bp, Homo sapiens
aataagcagtgagca

SEQ ID NO: 387808 - DNA, 15 bp, Homo sapiens
taataagcagtgagc

SEQ ID NO: 387809 - DNA, 15 bp, Homo sapiens
ctaataagcagtgag

SEQ ID NO: 387810 - DNA, 15 bp, Homo sapiens
cctaataagcagtga

SEQ ID NO: 387811 - DNA, 15 bp, Homo sapiens
gcctaataagcagtg

SEQ ID NO: 387812 - DNA, 15 bp, Homo sapiens
ggcctaataagcagt

SEQ ID NO: 387813 - DNA, 15 bp, Homo sapiens
gggcctaataagcag

SEQ ID NO: 387814 - DNA, 15 bp, Homo sapiens
tgggcctaataagca

SEQ ID NO: 387815 - DNA, 15 bp, Homo sapiens
ttgggcctaataagc

SEQ ID NO: 387816 - DNA, 15 bp, Homo sapiens
tttgggcctaataag

SEQ ID NO: 387817 - DNA, 15 bp, Homo sapiens
ttttgggcctaataa

SEQ ID NO: 387818 - DNA, 15 bp, Homo sapiens
attttgggcctaata

SEQ ID NO: 387819 - DNA, 15 bp, Homo sapiens
cattttgggcctaat

SEQ ID NO: 387820 - DNA, 15 bp, Homo sapiens
tcattttgggcctaa

SEQ ID NO: 387821 - DNA, 15 bp, Homo sapiens
ttcattttgggccta

SEQ ID NO: 387822 - DNA, 15 bp, Homo sapiens
tttcattttgggcct

SEQ ID NO: 387823 - DNA, 15 bp, Homo sapiens
ctttcattttgggcc

SEQ ID NO: 387824 - DNA, 15 bp, Homo sapiens
tctttcattttgggc

SEQ ID NO: 387825 - DNA, 15 bp, Homo sapiens
ttctttcattttggg

SEQ ID NO: 387826 - DNA, 15 bp, Homo sapiens
cttctttcattttgg

SEQ ID NO: 387827 - DNA, 15 bp, Homo sapiens
gcttctttcattttg

SEQ ID NO: 387828 - DNA, 15 bp, Homo sapiens
tgcttctttcatttt

SEQ ID NO: 387829 - DNA, 15 bp, Homo sapiens
ttgcttctttcattt

SEQ ID NO: 387830 - DNA, 15 bp, Homo sapiens
attgcttctttcatt

SEQ ID NO: 387831 - DNA, 15 bp, Homo sapiens
aattgcttctttcat

SEQ ID NO: 387832 - DNA, 15 bp, Homo sapiens
gaattgcttctttca

SEQ ID NO: 387833 - DNA, 15 bp, Homo sapiens
agaattgcttctttc

SEQ ID NO: 387834 - DNA, 15 bp, Homo sapiens
cagaattgcttcttt

SEQ ID NO: 387835 - DNA, 15 bp, Homo sapiens
ccagaattgcttctt

SEQ ID NO: 387836 - DNA, 15 bp, Homo sapiens
tccagaattgcttct

SEQ ID NO: 387837 - DNA, 15 bp, Homo sapiens
ttccagaattgcttc

SEQ ID NO: 387838 - DNA, 15 bp, Homo sapiens
tttccagaattgctt

SEQ ID NO: 387839 - DNA, 15 bp, Homo sapiens
ttttccagaattgct

SEQ ID NO: 387840 - DNA, 15 bp, Homo sapiens
tttttccagaattgc

SEQ ID NO: 387841 - DNA, 15 bp, Homo sapiens
atttttccagaattg

SEQ ID NO: 387842 - DNA, 15 bp, Homo sapiens
gatttttccagaatt

SEQ ID NO: 387843 - DNA, 15 bp, Homo sapiens
tgatttttccagaat

SEQ ID NO: 387844 - DNA, 15 bp, Homo sapiens
ttgatttttccagaa

SEQ ID NO: 387845 - DNA, 15 bp, Homo sapiens
tttgatttttccaga

SEQ ID NO: 387846 - DNA, 15 bp, Homo sapiens
ctttgatttttccag

SEQ ID NO: 387847 - DNA, 15 bp, Homo sapiens
tctttgatttttcca

SEQ ID NO: 387848 - DNA, 15 bp, Homo sapiens
ttctttgatttttcc

SEQ ID NO: 387849 - DNA, 15 bp, Homo sapiens
tttctttgatttttc

SEQ ID NO: 387850 - DNA, 15 bp, Homo sapiens
ttttctttgattttt

SEQ ID NO: 387851 - DNA, 15 bp, Homo sapiens
attttctttgatttt

SEQ ID NO: 387852 - DNA, 15 bp, Homo sapiens
cattttctttgattt

SEQ ID NO: 387853 - DNA, 15 bp, Homo sapiens
acattttctttgatt

SEQ ID NO: 387854 - DNA, 15 bp, Homo sapiens
gacattttctttgat

SEQ ID NO: 387855 - DNA, 15 bp, Homo sapiens
agacattttctttga

SEQ ID NO: 387856 - DNA, 15 bp, Homo sapiens
cagacattttctttg

SEQ ID NO: 387857 - DNA, 15 bp, Homo sapiens
gcagacattttcttt

SEQ ID NO: 387858 - DNA, 15 bp, Homo sapiens
ggcagacattttctt

SEQ ID NO: 387859 - DNA, 15 bp, Homo sapiens
aggcagacattttct

SEQ ID NO: 387860 - DNA, 15 bp, Homo sapiens
gaggcagacattttc

SEQ ID NO: 387861 - DNA, 15 bp, Homo sapiens
agaggcagacatttt

SEQ ID NO: 387862 - DNA, 15 bp, Homo sapiens
gagaggcagacattt

SEQ ID NO: 387863 - DNA, 15 bp, Homo sapiens
agagaggcagacatt

SEQ ID NO: 387864 - DNA, 15 bp, Homo sapiens
cagagaggcagacat

SEQ ID NO: 387865 - DNA, 15 bp, Homo sapiens
tcagagaggcagaca

SEQ ID NO: 387866 - DNA, 15 bp, Homo sapiens
ctcagagaggcagac

SEQ ID NO: 387867 - DNA, 15 bp, Homo sapiens
tctcagagaggcaga

SEQ ID NO: 387868 - DNA, 15 bp, Homo sapiens
atctcagagaggcag

SEQ ID NO: 387869 - DNA, 15 bp, Homo sapiens
tatctcagagaggca

SEQ ID NO: 387870 - DNA, 15 bp, Homo sapiens
gtatctcagagaggc

SEQ ID NO: 387871 - DNA, 15 bp, Homo sapiens
ggtatctcagagagg

SEQ ID NO: 387872 - DNA, 15 bp, Homo sapiens
tggtatctcagagag

SEQ ID NO: 387873 - DNA, 15 bp, Homo sapiens
ttggtatctcagaga

SEQ ID NO: 387874 - DNA, 15 bp, Homo sapiens
tttggtatctcagag

SEQ ID NO: 387875 - DNA, 15 bp, Homo sapiens
gtttggtatctcaga

SEQ ID NO: 387876 - DNA, 15 bp, Homo sapiens
ggtttggtatctcag

SEQ ID NO: 387877 - DNA, 15 bp, Homo sapiens
aggtttggtatctca

SEQ ID NO: 387878 - DNA, 15 bp, Homo sapiens
taggtttggtatctc

SEQ ID NO: 387879 - DNA, 15 bp, Homo sapiens
ttaggtttggtatct

SEQ ID NO: 387880 - DNA, 15 bp, Homo sapiens
attaggtttggtatc

SEQ ID NO: 387881 - DNA, 15 bp, Homo sapiens
aattaggtttggtat

SEQ ID NO: 387882 - DNA, 15 bp, Homo sapiens
aaattaggtttggta

SEQ ID NO: 387883 - DNA, 15 bp, Homo sapiens
aaaattaggtttggt

SEQ ID NO: 387884 - DNA, 15 bp, Homo sapiens
taaaattaggtttgg

SEQ ID NO: 387885 - DNA, 15 bp, Homo sapiens
ataaaattaggtttg

SEQ ID NO: 387886 - DNA, 15 bp, Homo sapiens
tataaaattaggttt

SEQ ID NO: 387887 - DNA, 15 bp, Homo sapiens
ttataaaattaggtt

SEQ ID NO: 387888 - DNA, 15 bp, Homo sapiens
attataaaattaggt

SEQ ID NO: 387889 - DNA, 15 bp, Homo sapiens
aattataaaattagg

SEQ ID NO: 387890 - DNA, 15 bp, Homo sapiens
gaattataaaattag

SEQ ID NO: 387891 - DNA, 15 bp, Homo sapiens
tgaattataaaatta

SEQ ID NO: 387892 - DNA, 15 bp, Homo sapiens
gtgaattataaaatt

SEQ ID NO: 387893 - DNA, 15 bp, Homo sapiens
tgtgaattataaaat

SEQ ID NO: 387894 - DNA, 15 bp, Homo sapiens
atgtgaattataaaa

SEQ ID NO: 387895 - DNA, 15 bp, Homo sapiens
tatgtgaattataaa

SEQ ID NO: 387896 - DNA, 15 bp, Homo sapiens
gtatgtgaattataa

SEQ ID NO: 387897 - DNA, 15 bp, Homo sapiens
ggtatgtgaattata

SEQ ID NO: 387898 - DNA, 15 bp, Homo sapiens
aggtatgtgaattat

SEQ ID NO: 387899 - DNA, 15 bp, Homo sapiens
caggtatgtgaatta

SEQ ID NO: 387900 - DNA, 15 bp, Homo sapiens
ccaggtatgtgaatt

SEQ ID NO: 387901 - DNA, 15 bp, Homo sapiens
cccaggtatgtgaat

SEQ ID NO: 387902 - DNA, 15 bp, Homo sapiens
tcccaggtatgtgaa

SEQ ID NO: 387903 - DNA, 15 bp, Homo sapiens
gtcccaggtatgtga

SEQ ID NO: 387904 - DNA, 15 bp, Homo sapiens
tgtcccaggtatgtg

SEQ ID NO: 387905 - DNA, 15 bp, Homo sapiens
ctgtcccaggtatgt

SEQ ID NO: 387906 - DNA, 15 bp, Homo sapiens
tctgtcccaggtatg

SEQ ID NO: 387907 - DNA, 15 bp, Homo sapiens
ttctgtcccaggtat

SEQ ID NO: 387908 - DNA, 15 bp, Homo sapiens
gttctgtcccaggta

SEQ ID NO: 387909 - DNA, 15 bp, Homo sapiens
agttctgtcccaggt

SEQ ID NO: 387910 - DNA, 15 bp, Homo sapiens
aagttctgtcccagg

SEQ ID NO: 387911 - DNA, 15 bp, Homo sapiens
gaagttctgtcccag

SEQ ID NO: 387912 - DNA, 15 bp, Homo sapiens
tgaagttctgtccca

SEQ ID NO: 387913 - DNA, 15 bp, Homo sapiens
ttgaagttctgtccc

SEQ ID NO: 387914 - DNA, 15 bp, Homo sapiens
gttgaagttctgtcc

SEQ ID NO: 387915 - DNA, 15 bp, Homo sapiens
ggttgaagttctgtc

SEQ ID NO: 387916 - DNA, 15 bp, Homo sapiens
gggttgaagttctgt

SEQ ID NO: 387917 - DNA, 15 bp, Homo sapiens
tgggttgaagttctg

SEQ ID NO: 387918 - DNA, 15 bp, Homo sapiens
ctgggttgaagttct

SEQ ID NO: 387919 - DNA, 15 bp, Homo sapiens
actgggttgaagttc

SEQ ID NO: 387920 - DNA, 15 bp, Homo sapiens
tactgggttgaagtt

SEQ ID NO: 387921 - DNA, 15 bp, Homo sapiens
gtactgggttgaagt

SEQ ID NO: 387922 - DNA, 15 bp, Homo sapiens
ggtactgggttgaag

SEQ ID NO: 387923 - DNA, 15 bp, Homo sapiens
aggtactgggttgaa

SEQ ID NO: 387924 - DNA, 15 bp, Homo sapiens
aaggtactgggttga

SEQ ID NO: 387925 - DNA, 15 bp, Homo sapiens
caaggtactgggttg

SEQ ID NO: 387926 - DNA, 15 bp, Homo sapiens
acaaggtactgggtt

SEQ ID NO: 387927 - DNA, 15 bp, Homo sapiens
gacaaggtactgggt

SEQ ID NO: 387928 - DNA, 15 bp, Homo sapiens
tgacaaggtactggg

SEQ ID NO: 387929 - DNA, 15 bp, Homo sapiens
ctgacaaggtactgg

SEQ ID NO: 387930 - DNA, 15 bp, Homo sapiens
tctgacaaggtactg

SEQ ID NO: 387931 - DNA, 15 bp, Homo sapiens
gtctgacaaggtact

SEQ ID NO: 387932 - DNA, 15 bp, Homo sapiens
agtctgacaaggtac

SEQ ID NO: 387933 - DNA, 15 bp, Homo sapiens
aagtctgacaaggta

SEQ ID NO: 387934 - DNA, 15 bp, Homo sapiens
gaagtctgacaaggt

SEQ ID NO: 387935 - DNA, 15 bp, Homo sapiens
tgaagtctgacaagg

SEQ ID NO: 387936 - DNA, 15 bp, Homo sapiens
ctgaagtctgacaag

SEQ ID NO: 387937 - DNA, 15 bp, Homo sapiens
gctgaagtctgacaa

SEQ ID NO: 387938 - DNA, 15 bp, Homo sapiens
agctgaagtctgaca

SEQ ID NO: 387939 - DNA, 15 bp, Homo sapiens
aagctgaagtctgac

SEQ ID NO: 387940 - DNA, 15 bp, Homo sapiens
gaagctgaagtctga

SEQ ID NO: 387941 - DNA, 15 bp, Homo sapiens
tgaagctgaagtctg

SEQ ID NO: 387942 - DNA, 15 bp, Homo sapiens
ttgaagctgaagtct

SEQ ID NO: 387943 - DNA, 15 bp, Homo sapiens
gttgaagctgaagtc

SEQ ID NO: 387944 - DNA, 15 bp, Homo sapiens
tgttgaagctgaagt

SEQ ID NO: 387945 - DNA, 15 bp, Homo sapiens
atgttgaagctgaag

SEQ ID NO: 387946 - DNA, 15 bp, Homo sapiens
catgttgaagctgaa

SEQ ID NO: 387947 - DNA, 15 bp, Homo sapiens
acatgttgaagctga

SEQ ID NO: 387948 - DNA, 15 bp, Homo sapiens
gacatgttgaagctg

SEQ ID NO: 387949 - DNA, 15 bp, Homo sapiens
ggacatgttgaagct

SEQ ID NO: 387950 - DNA, 15 bp, Homo sapiens
tggacatgttgaagc

SEQ ID NO: 387951 - DNA, 15 bp, Homo sapiens
ctggacatgttgaag

SEQ ID NO: 387952 - DNA, 15 bp, Homo sapiens
actggacatgttgaa

SEQ ID NO: 387953 - DNA, 15 bp, Homo sapiens
cactggacatgttga

SEQ ID NO: 387954 - DNA, 15 bp, Homo sapiens
acactggacatgttg

SEQ ID NO: 387955 - DNA, 15 bp, Homo sapiens
gacactggacatgtt

SEQ ID NO: 387956 - DNA, 15 bp, Homo sapiens
agacactggacatgt

SEQ ID NO: 387957 - DNA, 15 bp, Homo sapiens
aagacactggacatg

SEQ ID NO: 387958 - DNA, 15 bp, Homo sapiens
gaagacactggacat

SEQ ID NO: 387959 - DNA, 15 bp, Homo sapiens
tgaagacactggaca

SEQ ID NO: 387960 - DNA, 15 bp, Homo sapiens
gtgaagacactggac

SEQ ID NO: 387961 - DNA, 15 bp, Homo sapiens
agtgaagacactgga

SEQ ID NO: 387962 - DNA, 15 bp, Homo sapiens
gagtgaagacactgg

SEQ ID NO: 387963 - DNA, 15 bp, Homo sapiens
agagtgaagacactg

SEQ ID NO: 387964 - DNA, 15 bp, Homo sapiens
cagagtgaagacact

SEQ ID NO: 387965 - DNA, 15 bp, Homo sapiens
acagagtgaagacac

SEQ ID NO: 387966 - DNA, 15 bp, Homo sapiens
gacagagtgaagaca

SEQ ID NO: 387967 - DNA, 15 bp, Homo sapiens
agacagagtgaagac

SEQ ID NO: 387968 - DNA, 15 bp, Homo sapiens
cagacagagtgaaga

SEQ ID NO: 387969 - DNA, 15 bp, Homo sapiens
acagacagagtgaag

SEQ ID NO: 387970 - DNA, 15 bp, Homo sapiens
cacagacagagtgaa

SEQ ID NO: 387971 - DNA, 15 bp, Homo sapiens
ccacagacagagtga

SEQ ID NO: 387972 - DNA, 15 bp, Homo sapiens
gccacagacagagtg

SEQ ID NO: 387973 - DNA, 15 bp, Homo sapiens
agccacagacagagt

SEQ ID NO: 387974 - DNA, 15 bp, Homo sapiens
cagccacagacagag

SEQ ID NO: 387975 - DNA, 15 bp, Homo sapiens
gcagccacagacaga

SEQ ID NO: 387976 - DNA, 15 bp, Homo sapiens
cgcagccacagacag

SEQ ID NO: 387977 - DNA, 15 bp, Homo sapiens
gcgcagccacagaca

SEQ ID NO: 387978 - DNA, 15 bp, Homo sapiens
agcgcagccacagac

SEQ ID NO: 387979 - DNA, 15 bp, Homo sapiens
cagcgcagccacaga

SEQ ID NO: 387980 - DNA, 15 bp, Homo sapiens
tcagcgcagccacag

SEQ ID NO: 387981 - DNA, 15 bp, Homo sapiens
gtcagcgcagccaca

SEQ ID NO: 387982 - DNA, 15 bp, Homo sapiens
agtcagcgcagccac

SEQ ID NO: 387983 - DNA, 15 bp, Homo sapiens
cagtcagcgcagcca

SEQ ID NO: 387984 - DNA, 15 bp, Homo sapiens
tcagtcagcgcagcc

SEQ ID NO: 387985 - DNA, 15 bp, Homo sapiens
ttcagtcagcgcagc

SEQ ID NO: 387986 - DNA, 15 bp, Homo sapiens
tttcagtcagcgcag

SEQ ID NO: 387987 - DNA, 15 bp, Homo sapiens
gtttcagtcagcgca

SEQ ID NO: 387988 - DNA, 15 bp, Homo sapiens
ggtttcagtcagcgc

SEQ ID NO: 387989 - DNA, 15 bp, Homo sapiens
gggtttcagtcagcg

SEQ ID NO: 387990 - DNA, 15 bp, Homo sapiens
agggtttcagtcagc

SEQ ID NO: 387991 - DNA, 15 bp, Homo sapiens
cagggtttcagtcag

SEQ ID NO: 387992 - DNA, 15 bp, Homo sapiens
tcagggtttcagtca

SEQ ID NO: 387993 - DNA, 15 bp, Homo sapiens
ctcagggtttcagtc

SEQ ID NO: 387994 - DNA, 15 bp, Homo sapiens
tctcagggtttcagt

SEQ ID NO: 387995 - DNA, 15 bp, Homo sapiens
ttctcagggtttcag

SEQ ID NO: 387996 - DNA, 15 bp, Homo sapiens
tttctcagggtttca

SEQ ID NO: 387997 - DNA, 15 bp, Homo sapiens
gtttctcagggtttc

SEQ ID NO: 387998 - DNA, 15 bp, Homo sapiens
agtttctcagggttt

SEQ ID NO: 387999 - DNA, 15 bp, Homo sapiens
cagtttctcagggtt

SEQ ID NO: 388000 - DNA, 15 bp, Homo sapiens
tcagtttctcagggt

SEQ ID NO: 388001 - DNA, 15 bp, Homo sapiens
gtcagtttctcaggg

SEQ ID NO: 388002 - DNA, 15 bp, Homo sapiens
ggtcagtttctcagg

SEQ ID NO: 388003 - DNA, 15 bp, Homo sapiens
tggtcagtttctcag

SEQ ID NO: 388004 - DNA, 15 bp, Homo sapiens
ctggtcagtttctca

SEQ ID NO: 388005 - DNA, 15 bp, Homo sapiens
cctggtcagtttctc

SEQ ID NO: 388006 - DNA, 15 bp, Homo sapiens
acctggtcagtttct

SEQ ID NO: 388007 - DNA, 15 bp, Homo sapiens
cacctggtcagtttc

SEQ ID NO: 388008 - DNA, 15 bp, Homo sapiens
tcacctggtcagttt

SEQ ID NO: 388009 - DNA, 15 bp, Homo sapiens
ttcacctggtcagtt

SEQ ID NO: 388010 - DNA, 15 bp, Homo sapiens
attcacctggtcagt

SEQ ID NO: 388011 - DNA, 15 bp, Homo sapiens
cattcacctggtcag

SEQ ID NO: 388012 - DNA, 15 bp, Homo sapiens
gcattcacctggtca

SEQ ID NO: 388013 - DNA, 15 bp, Homo sapiens
tgcattcacctggtc

SEQ ID NO: 388014 - DNA, 15 bp, Homo sapiens
atgcattcacctggt

SEQ ID NO: 388015 - DNA, 15 bp, Homo sapiens
catgcattcacctgg

SEQ ID NO: 388016 - DNA, 15 bp, Homo sapiens
tcatgcattcacctg

SEQ ID NO: 388017 - DNA, 15 bp, Homo sapiens
atcatgcattcacct

SEQ ID NO: 388018 - DNA, 15 bp, Homo sapiens
gatcatgcattcacc

SEQ ID NO: 388019 - DNA, 15 bp, Homo sapiens
tgatcatgcattcac

SEQ ID NO: 388020 - DNA, 15 bp, Homo sapiens
atgatcatgcattca

SEQ ID NO: 388021 - DNA, 15 bp, Homo sapiens
tatgatcatgcattc

SEQ ID NO: 388022 - DNA, 15 bp, Homo sapiens
gtatgatcatgcatt

SEQ ID NO: 388023 - DNA, 15 bp, Homo sapiens
tgtatgatcatgcat

SEQ ID NO: 388024 - DNA, 15 bp, Homo sapiens
ttgtatgatcatgca

SEQ ID NO: 388025 - DNA, 15 bp, Homo sapiens
tttgtatgatcatgc

SEQ ID NO: 388026 - DNA, 15 bp, Homo sapiens
atttgtatgatcatg

SEQ ID NO: 388027 - DNA, 15 bp, Homo sapiens
catttgtatgatcat

SEQ ID NO: 388028 - DNA, 15 bp, Homo sapiens
tcatttgtatgatca

SEQ ID NO: 388029 - DNA, 15 bp, Homo sapiens
gtcatttgtatgatc

SEQ ID NO: 388030 - DNA, 15 bp, Homo sapiens
agtcatttgtatgat

SEQ ID NO: 388031 - DNA, 15 bp, Homo sapiens
aagtcatttgtatga

SEQ ID NO: 388032 - DNA, 15 bp, Homo sapiens
gaagtcatttgtatg

SEQ ID NO: 388033 - DNA, 15 bp, Homo sapiens
tgaagtcatttgtat

SEQ ID NO: 388034 - DNA, 15 bp, Homo sapiens
ctgaagtcatttgta

SEQ ID NO: 388035 - DNA, 15 bp, Homo sapiens
actgaagtcatttgt

SEQ ID NO: 388036 - DNA, 15 bp, Homo sapiens
cactgaagtcatttg

SEQ ID NO: 388037 - DNA, 15 bp, Homo sapiens
gcactgaagtcattt

SEQ ID NO: 388038 - DNA, 15 bp, Homo sapiens
tgcactgaagtcatt

SEQ ID NO: 388039 - DNA, 15 bp, Homo sapiens
gtgcactgaagtcat

SEQ ID NO: 388040 - DNA, 15 bp, Homo sapiens
tgtgcactgaagtca

SEQ ID NO: 388041 - DNA, 15 bp, Homo sapiens
ttgtgcactgaagtc

SEQ ID NO: 388042 - DNA, 15 bp, Homo sapiens
gttgtgcactgaagt

SEQ ID NO: 388043 - DNA, 15 bp, Homo sapiens
cgttgtgcactgaag

SEQ ID NO: 388044 - DNA, 15 bp, Homo sapiens
acgttgtgcactgaa

SEQ ID NO: 388045 - DNA, 15 bp, Homo sapiens
cacgttgtgcactga

SEQ ID NO: 388046 - DNA, 15 bp, Homo sapiens
gcacgttgtgcactg

SEQ ID NO: 388047 - DNA, 15 bp, Homo sapiens
tgcacgttgtgcact

SEQ ID NO: 388048 - DNA, 15 bp, Homo sapiens
atgcacgttgtgcac

SEQ ID NO: 388049 - DNA, 15 bp, Homo sapiens
catgcacgttgtgca

SEQ ID NO: 388050 - DNA, 15 bp, Homo sapiens
tcatgcacgttgtgc

SEQ ID NO: 388051 - DNA, 15 bp, Homo sapiens
ttcatgcacgttgtg

SEQ ID NO: 388052 - DNA, 15 bp, Homo sapiens
tttcatgcacgttgt

SEQ ID NO: 388053 - DNA, 15 bp, Homo sapiens
atttcatgcacgttg

SEQ ID NO: 388054 - DNA, 15 bp, Homo sapiens
aatttcatgcacgtt

SEQ ID NO: 388055 - DNA, 15 bp, Homo sapiens
caatttcatgcacgt

SEQ ID NO: 388056 - DNA, 15 bp, Homo sapiens
ccaatttcatgcacg

SEQ ID NO: 388057 - DNA, 15 bp, Homo sapiens
cccaatttcatgcac

SEQ ID NO: 388058 - DNA, 15 bp, Homo sapiens
tcccaatttcatgca

SEQ ID NO: 388059 - DNA, 15 bp, Homo sapiens
ttcccaatttcatgc

SEQ ID NO: 388060 - DNA, 15 bp, Homo sapiens
attcccaatttcatg

SEQ ID NO: 388061 - DNA, 15 bp, Homo sapiens
aattcccaatttcat

SEQ ID NO: 388062 - DNA, 15 bp, Homo sapiens
taattcccaatttca

SEQ ID NO: 388063 - DNA, 15 bp, Homo sapiens
ttaattcccaatttc

SEQ ID NO: 388064 - DNA, 15 bp, Homo sapiens
gttaattcccaattt

SEQ ID NO: 388065 - DNA, 15 bp, Homo sapiens
ggttaattcccaatt

SEQ ID NO: 388066 - DNA, 15 bp, Homo sapiens
aggttaattcccaat

SEQ ID NO: 388067 - DNA, 15 bp, Homo sapiens
gaggttaattcccaa

SEQ ID NO: 388068 - DNA, 15 bp, Homo sapiens
tgaggttaattccca

SEQ ID NO: 388069 - DNA, 15 bp, Homo sapiens
atgaggttaattccc

SEQ ID NO: 388070 - DNA, 15 bp, Homo sapiens
gatgaggttaattcc

SEQ ID NO: 388071 - DNA, 15 bp, Homo sapiens
tgatgaggttaattc

SEQ ID NO: 388072 - DNA, 15 bp, Homo sapiens
ctgatgaggttaatt

SEQ ID NO: 388073 - DNA, 15 bp, Homo sapiens
actgatgaggttaat

SEQ ID NO: 388074 - DNA, 15 bp, Homo sapiens
aactgatgaggttaa

SEQ ID NO: 388075 - DNA, 15 bp, Homo sapiens
taactgatgaggtta

SEQ ID NO: 388076 - DNA, 15 bp, Homo sapiens
gtaactgatgaggtt

SEQ ID NO: 388077 - DNA, 15 bp, Homo sapiens
agtaactgatgaggt

SEQ ID NO: 388078 - DNA, 15 bp, Homo sapiens
gagtaactgatgagg

SEQ ID NO: 388079 - DNA, 15 bp, Homo sapiens
agagtaactgatgag

SEQ ID NO: 388080 - DNA, 15 bp, Homo sapiens
tagagtaactgatga

SEQ ID NO: 388081 - DNA, 15 bp, Homo sapiens
ctagagtaactgatg

SEQ ID NO: 388082 - DNA, 15 bp, Homo sapiens
tctagagtaactgat

SEQ ID NO: 388083 - DNA, 15 bp, Homo sapiens
atctagagtaactga

SEQ ID NO: 388084 - DNA, 15 bp, Homo sapiens
aatctagagtaactg

SEQ ID NO: 388085 - DNA, 15 bp, Homo sapiens
aaatctagagtaact

SEQ ID NO: 388086 - DNA, 15 bp, Homo sapiens
taaatctagagtaac

SEQ ID NO: 388087 - DNA, 15 bp, Homo sapiens
ctaaatctagagtaa

SEQ ID NO: 388088 - DNA, 15 bp, Homo sapiens
gctaaatctagagta

SEQ ID NO: 388089 - DNA, 15 bp, Homo sapiens
tgctaaatctagagt

SEQ ID NO: 388090 - DNA, 15 bp, Homo sapiens
atgctaaatctagag

SEQ ID NO: 388091 - DNA, 15 bp, Homo sapiens
aatgctaaatctaga

SEQ ID NO: 388092 - DNA, 15 bp, Homo sapiens
taatgctaaatctag

SEQ ID NO: 388093 - DNA, 15 bp, Homo sapiens
ttaatgctaaatcta

SEQ ID NO: 388094 - DNA, 15 bp, Homo sapiens
attaatgctaaatct

SEQ ID NO: 388095 - DNA, 15 bp, Homo sapiens
aattaatgctaaatc

SEQ ID NO: 388096 - DNA, 15 bp, Homo sapiens
aaattaatgctaaat

SEQ ID NO: 388097 - DNA, 15 bp, Homo sapiens
aaaattaatgctaaa

SEQ ID NO: 388098 - DNA, 15 bp, Homo sapiens
aaaaattaatgctaa

SEQ ID NO: 388099 - DNA, 15 bp, Homo sapiens
caaaaattaatgcta

SEQ ID NO: 388100 - DNA, 15 bp, Homo sapiens
tcaaaaattaatgct

SEQ ID NO: 388101 - DNA, 15 bp, Homo sapiens
ttcaaaaattaatgc

SEQ ID NO: 388102 - DNA, 15 bp, Homo sapiens
attcaaaaattaatg

SEQ ID NO: 388103 - DNA, 15 bp, Homo sapiens
gattcaaaaattaat

SEQ ID NO: 388104 - DNA, 15 bp, Homo sapiens
ggattcaaaaattaa

SEQ ID NO: 388105 - DNA, 15 bp, Homo sapiens
tggattcaaaaatta

SEQ ID NO: 388106 - DNA, 15 bp, Homo sapiens
ttggattcaaaaatt

SEQ ID NO: 388107 - DNA, 15 bp, Homo sapiens
tttggattcaaaaat

SEQ ID NO: 388108 - DNA, 15 bp, Homo sapiens
ctttggattcaaaaa

SEQ ID NO: 388109 - DNA, 15 bp, Homo sapiens
cctttggattcaaaa

SEQ ID NO: 388110 - DNA, 15 bp, Homo sapiens
ccctttggattcaaa

SEQ ID NO: 388111 - DNA, 15 bp, Homo sapiens
accctttggattcaa

SEQ ID NO: 388112 - DNA, 15 bp, Homo sapiens
caccctttggattca

SEQ ID NO: 388113 - DNA, 15 bp, Homo sapiens
acaccctttggattc

SEQ ID NO: 388114 - DNA, 15 bp, Homo sapiens
aacaccctttggatt

SEQ ID NO: 388115 - DNA, 15 bp, Homo sapiens
aaacaccctttggat

SEQ ID NO: 388116 - DNA, 15 bp, Homo sapiens
gaaacaccctttgga

SEQ ID NO: 388117 - DNA, 15 bp, Homo sapiens
tgaaacaccctttgg

SEQ ID NO: 388118 - DNA, 15 bp, Homo sapiens
atgaaacaccctttg

SEQ ID NO: 388119 - DNA, 15 bp, Homo sapiens
aatgaaacacccttt

SEQ ID NO: 388120 - DNA, 15 bp, Homo sapiens
aaatgaaacaccctt

SEQ ID NO: 388121 - DNA, 15 bp, Homo sapiens
taaatgaaacaccct

SEQ ID NO: 388122 - DNA, 15 bp, Homo sapiens
ttaaatgaaacaccc

SEQ ID NO: 388123 - DNA, 15 bp, Homo sapiens
attaaatgaaacacc

SEQ ID NO: 388124 - DNA, 15 bp, Homo sapiens
aattaaatgaaacac

SEQ ID NO: 388125 - DNA, 15 bp, Homo sapiens
caattaaatgaaaca

SEQ ID NO: 388126 - DNA, 15 bp, Homo sapiens
gcaattaaatgaaac

SEQ ID NO: 388127 - DNA, 15 bp, Homo sapiens
agcaattaaatgaaa

SEQ ID NO: 388128 - DNA, 15 bp, Homo sapiens
gagcaattaaatgaa

SEQ ID NO: 388129 - DNA, 15 bp, Homo sapiens
tgagcaattaaatga

SEQ ID NO: 388130 - DNA, 15 bp, Homo sapiens
ttgagcaattaaatg

SEQ ID NO: 388131 - DNA, 15 bp, Homo sapiens
attgagcaattaaat

SEQ ID NO: 388132 - DNA, 15 bp, Homo sapiens
tattgagcaattaaa

SEQ ID NO: 388133 - DNA, 15 bp, Homo sapiens
ttattgagcaattaa

SEQ ID NO: 388134 - DNA, 15 bp, Homo sapiens
tttattgagcaatta

SEQ ID NO: 388135 - DNA, 15 bp, Homo sapiens
ttttattgagcaatt

SEQ ID NO: 388136 - DNA, 15 bp, Homo sapiens
tttttattgagcaat

SEQ ID NO: 388137 - DNA, 15 bp, Homo sapiens
atttttattgagcaa

SEQ ID NO: 388138 - DNA, 15 bp, Homo sapiens
catttttattgagca

SEQ ID NO: 388139 - DNA, 15 bp, Homo sapiens
acatttttattgagc

SEQ ID NO: 388140 - DNA, 15 bp, Homo sapiens
gacatttttattgag

SEQ ID NO: 388141 - DNA, 15 bp, Homo sapiens
tgacatttttattga

SEQ ID NO: 388142 - DNA, 15 bp, Homo sapiens
gtgacatttttattg

SEQ ID NO: 388143 - DNA, 15 bp, Homo sapiens
agtgacatttttatt

SEQ ID NO: 388144 - DNA, 15 bp, Homo sapiens
tagtgacatttttat

SEQ ID NO: 388145 - DNA, 15 bp, Homo sapiens
gtagtgacattttta

SEQ ID NO: 388146 - DNA, 15 bp, Homo sapiens
ggtagtgacattttt

SEQ ID NO: 388147 - DNA, 15 bp, Homo sapiens
aggtagtgacatttt

SEQ ID NO: 388148 - DNA, 15 bp, Homo sapiens
gaggtagtgacattt

SEQ ID NO: 388149 - DNA, 15 bp, Homo sapiens
ggaggtagtgacatt

SEQ ID NO: 388150 - DNA, 15 bp, Homo sapiens
tggaggtagtgacat

SEQ ID NO: 388151 - DNA, 15 bp, Homo sapiens
ttggaggtagtgaca

SEQ ID NO: 388152 - DNA, 15 bp, Homo sapiens
attggaggtagtgac

SEQ ID NO: 388153 - DNA, 15 bp, Homo sapiens
aattggaggtagtga

SEQ ID NO: 388154 - DNA, 15 bp, Homo sapiens
taattggaggtagtg

SEQ ID NO: 388155 - DNA, 15 bp, Homo sapiens
ttaattggaggtagt

SEQ ID NO: 388156 - DNA, 15 bp, Homo sapiens
tttaattggaggtag

SEQ ID NO: 388157 - DNA, 15 bp, Homo sapiens
gtttaattggaggta

SEQ ID NO: 388158 - DNA, 15 bp, Homo sapiens
agtttaattggaggt

SEQ ID NO: 388159 - DNA, 15 bp, Homo sapiens
tagtttaattggagg

SEQ ID NO: 388160 - DNA, 15 bp, Homo sapiens
atagtttaattggag

SEQ ID NO: 388161 - DNA, 15 bp, Homo sapiens
aatagtttaattgga

SEQ ID NO: 388162 - DNA, 15 bp, Homo sapiens
caatagtttaattgg

SEQ ID NO: 388163 - DNA, 15 bp, Homo sapiens
ccaatagtttaattg

SEQ ID NO: 388164 - DNA, 15 bp, Homo sapiens
cccaatagtttaatt

SEQ ID NO: 388165 - DNA, 15 bp, Homo sapiens
tcccaatagtttaat

SEQ ID NO: 388166 - DNA, 15 bp, Homo sapiens
ttcccaatagtttaa

SEQ ID NO: 388167 - DNA, 15 bp, Homo sapiens
tttcccaatagttta

SEQ ID NO: 388168 - DNA, 15 bp, Homo sapiens
gtttcccaatagttt

SEQ ID NO: 388169 - DNA, 15 bp, Homo sapiens
agtttcccaatagtt

SEQ ID NO: 388170 - DNA, 15 bp, Homo sapiens
gagtttcccaatagt

SEQ ID NO: 388171 - DNA, 15 bp, Homo sapiens
agagtttcccaatag

SEQ ID NO: 388172 - DNA, 15 bp, Homo sapiens
gagagtttcccaata

SEQ ID NO: 388173 - DNA, 15 bp, Homo sapiens
tgagagtttcccaat

SEQ ID NO: 388174 - DNA, 15 bp, Homo sapiens
ttgagagtttcccaa

SEQ ID NO: 388175 - DNA, 15 bp, Homo sapiens
tttgagagtttccca

SEQ ID NO: 388176 - DNA, 15 bp, Homo sapiens
atttgagagtttccc

SEQ ID NO: 388177 - DNA, 15 bp, Homo sapiens
gatttgagagtttcc

SEQ ID NO: 388178 - DNA, 15 bp, Homo sapiens
ggatttgagagtttc

SEQ ID NO: 388179 - DNA, 15 bp, Homo sapiens
aggatttgagagttt

SEQ ID NO: 388180 - DNA, 15 bp, Homo sapiens
caggatttgagagtt

SEQ ID NO: 388181 - DNA, 15 bp, Homo sapiens
tcaggatttgagagt

SEQ ID NO: 388182 - DNA, 15 bp, Homo sapiens
atcaggatttgagag

SEQ ID NO: 388183 - DNA, 15 bp, Homo sapiens
gatcaggatttgaga

SEQ ID NO: 388184 - DNA, 15 bp, Homo sapiens
agatcaggatttgag

SEQ ID NO: 388185 - DNA, 15 bp, Homo sapiens
tagatcaggatttga

SEQ ID NO: 388186 - DNA, 15 bp, Homo sapiens
gtagatcaggatttg

SEQ ID NO: 388187 - DNA, 15 bp, Homo sapiens
agtagatcaggattt

SEQ ID NO: 388188 - DNA, 15 bp, Homo sapiens
tagtagatcaggatt

SEQ ID NO: 388189 - DNA, 15 bp, Homo sapiens
gtagtagatcaggat

SEQ ID NO: 388190 - DNA, 15 bp, Homo sapiens
tgtagtagatcagga

SEQ ID NO: 388191 - DNA, 15 bp, Homo sapiens
atgtagtagatcagg

SEQ ID NO: 388192 - DNA, 15 bp, Homo sapiens
tatgtagtagatcag

SEQ ID NO: 388193 - DNA, 15 bp, Homo sapiens
ctatgtagtagatca

SEQ ID NO: 388194 - DNA, 15 bp, Homo sapiens
cctatgtagtagatc

SEQ ID NO: 388195 - DNA, 15 bp, Homo sapiens
acctatgtagtagat

SEQ ID NO: 388196 - DNA, 15 bp, Homo sapiens
aacctatgtagtaga

SEQ ID NO: 388197 - DNA, 15 bp, Homo sapiens
taacctatgtagtag

SEQ ID NO: 388198 - DNA, 15 bp, Homo sapiens
ttaacctatgtagta

SEQ ID NO: 388199 - DNA, 15 bp, Homo sapiens
tttaacctatgtagt

SEQ ID NO: 388200 - DNA, 15 bp, Homo sapiens
gtttaacctatgtag

SEQ ID NO: 388201 - DNA, 15 bp, Homo sapiens
agtttaacctatgta

SEQ ID NO: 388202 - DNA, 15 bp, Homo sapiens
aagtttaacctatgt

SEQ ID NO: 388203 - DNA, 15 bp, Homo sapiens
aaagtttaacctatg

SEQ ID NO: 388204 - DNA, 15 bp, Homo sapiens
gaaagtttaacctat

SEQ ID NO: 388205 - DNA, 15 bp, Homo sapiens
ggaaagtttaaccta

SEQ ID NO: 388206 - DNA, 15 bp, Homo sapiens
aggaaagtttaacct

SEQ ID NO: 388207 - DNA, 15 bp, Homo sapiens
aaggaaagtttaacc

SEQ ID NO: 388208 - DNA, 15 bp, Homo sapiens
aaaggaaagtttaac

SEQ ID NO: 388209 - DNA, 15 bp, Homo sapiens
aaaaggaaagtttaa

SEQ ID NO: 388210 - DNA, 15 bp, Homo sapiens
gaaaaggaaagttta

SEQ ID NO: 388211 - DNA, 15 bp, Homo sapiens
agaaaaggaaagttt

SEQ ID NO: 388212 - DNA, 15 bp, Homo sapiens
aagaaaaggaaagtt

SEQ ID NO: 388213 - DNA, 15 bp, Homo sapiens
aaagaaaaggaaagt

SEQ ID NO: 388214 - DNA, 15 bp, Homo sapiens
caaagaaaaggaaag

SEQ ID NO: 388215 - DNA, 15 bp, Homo sapiens
ccaaagaaaaggaaa

SEQ ID NO: 388216 - DNA, 15 bp, Homo sapiens
accaaagaaaaggaa

SEQ ID NO: 388217 - DNA, 15 bp, Homo sapiens
gaccaaagaaaagga

SEQ ID NO: 388218 - DNA, 15 bp, Homo sapiens
tgaccaaagaaaagg

SEQ ID NO: 388219 - DNA, 15 bp, Homo sapiens
ttgaccaaagaaaag

SEQ ID NO: 388220 - DNA, 15 bp, Homo sapiens
attgaccaaagaaaa

SEQ ID NO: 388221 - DNA, 15 bp, Homo sapiens
aattgaccaaagaaa

SEQ ID NO: 388222 - DNA, 15 bp, Homo sapiens
gaattgaccaaagaa

SEQ ID NO: 388223 - DNA, 15 bp, Homo sapiens
agaattgaccaaaga

SEQ ID NO: 388224 - DNA, 15 bp, Homo sapiens
cagaattgaccaaag

SEQ ID NO: 388225 - DNA, 15 bp, Homo sapiens
tcagaattgaccaaa

SEQ ID NO: 388226 - DNA, 15 bp, Homo sapiens
ctcagaattgaccaa

SEQ ID NO: 388227 - DNA, 15 bp, Homo sapiens
gctcagaattgacca

SEQ ID NO: 388228 - DNA, 15 bp, Homo sapiens
agctcagaattgacc

SEQ ID NO: 388229 - DNA, 15 bp, Homo sapiens
aagctcagaattgac

SEQ ID NO: 388230 - DNA, 15 bp, Homo sapiens
gaagctcagaattga

SEQ ID NO: 388231 - DNA, 15 bp, Homo sapiens
tgaagctcagaattg

SEQ ID NO: 388232 - DNA, 15 bp, Homo sapiens
atgaagctcagaatt

SEQ ID NO: 388233 - DNA, 15 bp, Homo sapiens
aatgaagctcagaat

SEQ ID NO: 388234 - DNA, 15 bp, Homo sapiens
gaatgaagctcagaa

SEQ ID NO: 388235 - DNA, 15 bp, Homo sapiens
agaatgaagctcaga

SEQ ID NO: 388236 - DNA, 15 bp, Homo sapiens
cagaatgaagctcag

SEQ ID NO: 388237 - DNA, 15 bp, Homo sapiens
acagaatgaagctca

SEQ ID NO: 388238 - DNA, 15 bp, Homo sapiens
tacagaatgaagctc

SEQ ID NO: 388239 - DNA, 15 bp, Homo sapiens
gtacagaatgaagct

SEQ ID NO: 388240 - DNA, 15 bp, Homo sapiens
ggtacagaatgaagc

SEQ ID NO: 388241 - DNA, 15 bp, Homo sapiens
tggtacagaatgaag

SEQ ID NO: 388242 - DNA, 15 bp, Homo sapiens
ttggtacagaatgaa

SEQ ID NO: 388243 - DNA, 15 bp, Homo sapiens
tttggtacagaatga

SEQ ID NO: 388244 - DNA, 15 bp, Homo sapiens
atttggtacagaatg

SEQ ID NO: 388245 - DNA, 15 bp, Homo sapiens
tatttggtacagaat

SEQ ID NO: 388246 - DNA, 15 bp, Homo sapiens
ttatttggtacagaa

SEQ ID NO: 388247 - DNA, 15 bp, Homo sapiens
gttatttggtacaga

SEQ ID NO: 388248 - DNA, 15 bp, Homo sapiens
agttatttggtacag

SEQ ID NO: 388249 - DNA, 15 bp, Homo sapiens
aagttatttggtaca

SEQ ID NO: 388250 - DNA, 15 bp, Homo sapiens
gaagttatttggtac

SEQ ID NO: 388251 - DNA, 15 bp, Homo sapiens
agaagttatttggta

SEQ ID NO: 388252 - DNA, 15 bp, Homo sapiens
gagaagttatttggt

SEQ ID NO: 388253 - DNA, 15 bp, Homo sapiens
tgagaagttatttgg

SEQ ID NO: 388254 - DNA, 15 bp, Homo sapiens
ttgagaagttatttg

SEQ ID NO: 388255 - DNA, 15 bp, Homo sapiens
tttgagaagttattt

SEQ ID NO: 388256 - DNA, 15 bp, Homo sapiens
atttgagaagttatt

SEQ ID NO: 388257 - DNA, 15 bp, Homo sapiens
aatttgagaagttat

SEQ ID NO: 388258 - DNA, 15 bp, Homo sapiens
aaatttgagaagtta

SEQ ID NO: 388259 - DNA, 15 bp, Homo sapiens
gaaatttgagaagtt

SEQ ID NO: 388260 - DNA, 15 bp, Homo sapiens
ggaaatttgagaagt

SEQ ID NO: 388261 - DNA, 15 bp, Homo sapiens
cggaaatttgagaag

SEQ ID NO: 388262 - DNA, 15 bp, Homo sapiens
tcggaaatttgagaa

SEQ ID NO: 388263 - DNA, 15 bp, Homo sapiens
atcggaaatttgaga

SEQ ID NO: 388264 - DNA, 15 bp, Homo sapiens
aatcggaaatttgag

SEQ ID NO: 388265 - DNA, 15 bp, Homo sapiens
gaatcggaaatttga

SEQ ID NO: 388266 - DNA, 15 bp, Homo sapiens
ggaatcggaaatttg

SEQ ID NO: 388267 - DNA, 15 bp, Homo sapiens
aggaatcggaaattt

SEQ ID NO: 388268 - DNA, 15 bp, Homo sapiens
caggaatcggaaatt

SEQ ID NO: 388269 - DNA, 15 bp, Homo sapiens
tcaggaatcggaaat

SEQ ID NO: 388270 - DNA, 15 bp, Homo sapiens
ttcaggaatcggaaa

SEQ ID NO: 388271 - DNA, 15 bp, Homo sapiens
cttcaggaatcggaa

SEQ ID NO: 388272 - DNA, 15 bp, Homo sapiens
gcttcaggaatcgga

SEQ ID NO: 388273 - DNA, 15 bp, Homo sapiens
agcttcaggaatcgg

SEQ ID NO: 388274 - DNA, 15 bp, Homo sapiens
aagcttcaggaatcg

SEQ ID NO: 388275 - DNA, 15 bp, Homo sapiens
caagcttcaggaatc

SEQ ID NO: 388276 - DNA, 15 bp, Homo sapiens
ccaagcttcaggaat

SEQ ID NO: 388277 - DNA, 15 bp, Homo sapiens
accaagcttcaggaa

SEQ ID NO: 388278 - DNA, 15 bp, Homo sapiens
taccaagcttcagga

SEQ ID NO: 388279 - DNA, 15 bp, Homo sapiens
ttaccaagcttcagg

SEQ ID NO: 388280 - DNA, 15 bp, Homo sapiens
gttaccaagcttcag

SEQ ID NO: 388281 - DNA, 15 bp, Homo sapiens
agttaccaagcttca

SEQ ID NO: 388282 - DNA, 15 bp, Homo sapiens
tagttaccaagcttc

SEQ ID NO: 388283 - DNA, 15 bp, Homo sapiens
ttagttaccaagctt

SEQ ID NO: 388284 - DNA, 15 bp, Homo sapiens
attagttaccaagct

SEQ ID NO: 388285 - DNA, 15 bp, Homo sapiens
cattagttaccaagc

SEQ ID NO: 388286 - DNA, 15 bp, Homo sapiens
ccattagttaccaag

SEQ ID NO: 388287 - DNA, 15 bp, Homo sapiens
accattagttaccaa

SEQ ID NO: 388288 - DNA, 15 bp, Homo sapiens
aaccattagttacca

SEQ ID NO: 388289 - DNA, 15 bp, Homo sapiens
caaccattagttacc

SEQ ID NO: 388290 - DNA, 15 bp, Homo sapiens
tcaaccattagttac

SEQ ID NO: 388291 - DNA, 15 bp, Homo sapiens
ttcaaccattagtta

SEQ ID NO: 388292 - DNA, 15 bp, Homo sapiens
attcaaccattagtt

SEQ ID NO: 388293 - DNA, 15 bp, Homo sapiens
aattcaaccattagt

SEQ ID NO: 388294 - DNA, 15 bp, Homo sapiens
aaattcaaccattag

SEQ ID NO: 388295 - DNA, 15 bp, Homo sapiens
aaaattcaaccatta

SEQ ID NO: 388296 - DNA, 15 bp, Homo sapiens
caaaattcaaccatt

SEQ ID NO: 388297 - DNA, 15 bp, Homo sapiens
ccaaaattcaaccat

SEQ ID NO: 388298 - DNA, 15 bp, Homo sapiens
cccaaaattcaacca

SEQ ID NO: 388299 - DNA, 15 bp, Homo sapiens
ccccaaaattcaacc

SEQ ID NO: 388300 - DNA, 15 bp, Homo sapiens
cccccaaaattcaac

SEQ ID NO: 388301 - DNA, 15 bp, Homo sapiens
tcccccaaaattcaa

SEQ ID NO: 388302 - DNA, 15 bp, Homo sapiens
atcccccaaaattca

SEQ ID NO: 388303 - DNA, 15 bp, Homo sapiens
catcccccaaaattc

SEQ ID NO: 388304 - DNA, 15 bp, Homo sapiens
acatcccccaaaatt

SEQ ID NO: 388305 - DNA, 15 bp, Homo sapiens
cacatcccccaaaat

SEQ ID NO: 388306 - DNA, 15 bp, Homo sapiens
acacatcccccaaaa

SEQ ID NO: 388307 - DNA, 15 bp, Homo sapiens
aacacatcccccaaa

SEQ ID NO: 388308 - DNA, 15 bp, Homo sapiens
gaacacatcccccaa

SEQ ID NO: 388309 - DNA, 15 bp, Homo sapiens
agaacacatccccca

SEQ ID NO: 388310 - DNA, 15 bp, Homo sapiens
aagaacacatccccc

SEQ ID NO: 388311 - DNA, 15 bp, Homo sapiens
aaagaacacatcccc

SEQ ID NO: 388312 - DNA, 15 bp, Homo sapiens
taaagaacacatccc

SEQ ID NO: 388313 - DNA, 15 bp, Homo sapiens
ttaaagaacacatcc

SEQ ID NO: 388314 - DNA, 15 bp, Homo sapiens
attaaagaacacatc

SEQ ID NO: 388315 - DNA, 15 bp, Homo sapiens
tattaaagaacacat

SEQ ID NO: 388316 - DNA, 15 bp, Homo sapiens
atattaaagaacaca

SEQ ID NO: 388317 - DNA, 15 bp, Homo sapiens
aatattaaagaacac

SEQ ID NO: 388318 - DNA, 15 bp, Homo sapiens
aaatattaaagaaca

SEQ ID NO: 388319 - DNA, 15 bp, Homo sapiens
aaaatattaaagaac

SEQ ID NO: 388320 - DNA, 15 bp, Homo sapiens
caaaatattaaagaa

SEQ ID NO: 388321 - DNA, 15 bp, Homo sapiens
acaaaatattaaaga

SEQ ID NO: 388322 - DNA, 15 bp, Homo sapiens
tacaaaatattaaag

SEQ ID NO: 388323 - DNA, 15 bp, Homo sapiens
ttacaaaatattaaa

SEQ ID NO: 388324 - DNA, 15 bp, Homo sapiens
attacaaaatattaa

SEQ ID NO: 388325 - DNA, 15 bp, Homo sapiens
aattacaaaatatta

SEQ ID NO: 388326 - DNA, 15 bp, Homo sapiens
aaattacaaaatatt

SEQ ID NO: 388327 - DNA, 15 bp, Homo sapiens
gaaattacaaaatat

SEQ ID NO: 388328 - DNA, 15 bp, Homo sapiens
agaaattacaaaata

SEQ ID NO: 388329 - DNA, 15 bp, Homo sapiens
gagaaattacaaaat

SEQ ID NO: 388330 - DNA, 15 bp, Homo sapiens
tgagaaattacaaaa

SEQ ID NO: 388331 - DNA, 15 bp, Homo sapiens
atgagaaattacaaa

SEQ ID NO: 388332 - DNA, 15 bp, Homo sapiens
tatgagaaattacaa

SEQ ID NO: 388333 - DNA, 15 bp, Homo sapiens
atatgagaaattaca

SEQ ID NO: 388334 - DNA, 15 bp, Homo sapiens
gatatgagaaattac

SEQ ID NO: 388335 - DNA, 15 bp, Homo sapiens
agatatgagaaatta

SEQ ID NO: 388336 - DNA, 15 bp, Homo sapiens
aagatatgagaaatt

SEQ ID NO: 388337 - DNA, 15 bp, Homo sapiens
gaagatatgagaaat

SEQ ID NO: 388338 - DNA, 15 bp, Homo sapiens
ggaagatatgagaaa

SEQ ID NO: 388339 - DNA, 15 bp, Homo sapiens
aggaagatatgagaa

SEQ ID NO: 388340 - DNA, 15 bp, Homo sapiens
gaggaagatatgaga

SEQ ID NO: 388341 - DNA, 15 bp, Homo sapiens
agaggaagatatgag

SEQ ID NO: 388342 - DNA, 15 bp, Homo sapiens
cagaggaagatatga

SEQ ID NO: 388343 - DNA, 15 bp, Homo sapiens
acagaggaagatatg

SEQ ID NO: 388344 - DNA, 15 bp, Homo sapiens
tacagaggaagatat

SEQ ID NO: 388345 - DNA, 15 bp, Homo sapiens
ttacagaggaagata

SEQ ID NO: 388346 - DNA, 15 bp, Homo sapiens
cttacagaggaagat

SEQ ID NO: 388347 - DNA, 15 bp, Homo sapiens
acttacagaggaaga

SEQ ID NO: 388348 - DNA, 15 bp, Homo sapiens
cacttacagaggaag

SEQ ID NO: 388349 - DNA, 15 bp, Homo sapiens
gcacttacagaggaa

SEQ ID NO: 388350 - DNA, 15 bp, Homo sapiens
tgcacttacagagga

SEQ ID NO: 388351 - DNA, 15 bp, Homo sapiens
ttgcacttacagagg

SEQ ID NO: 388352 - DNA, 15 bp, Homo sapiens
gttgcacttacagag

SEQ ID NO: 388353 - DNA, 15 bp, Homo sapiens
agttgcacttacaga

SEQ ID NO: 388354 - DNA, 15 bp, Homo sapiens
cagttgcacttacag

SEQ ID NO: 388355 - DNA, 15 bp, Homo sapiens
ccagttgcacttaca

SEQ ID NO: 388356 - DNA, 15 bp, Homo sapiens
accagttgcacttac

SEQ ID NO: 388357 - DNA, 15 bp, Homo sapiens
gaccagttgcactta

SEQ ID NO: 388358 - DNA, 15 bp, Homo sapiens
ggaccagttgcactt

SEQ ID NO: 388359 - DNA, 15 bp, Homo sapiens
gggaccagttgcact

SEQ ID NO: 388360 - DNA, 15 bp, Homo sapiens
cgggaccagttgcac

SEQ ID NO: 388361 - DNA, 15 bp, Homo sapiens
tcgggaccagttgca

SEQ ID NO: 388362 - DNA, 15 bp, Homo sapiens
gtcgggaccagttgc

SEQ ID NO: 388363 - DNA, 15 bp, Homo sapiens
tgtcgggaccagttg

SEQ ID NO: 388364 - DNA, 15 bp, Homo sapiens
gtgtcgggaccagtt

SEQ ID NO: 388365 - DNA, 15 bp, Homo sapiens
agtgtcgggaccagt

SEQ ID NO: 388366 - DNA, 15 bp, Homo sapiens
tagtgtcgggaccag

SEQ ID NO: 388367 - DNA, 15 bp, Homo sapiens
ctagtgtcgggacca

SEQ ID NO: 388368 - DNA, 15 bp, Homo sapiens
actagtgtcgggacc

SEQ ID NO: 388369 - DNA, 15 bp, Homo sapiens
tactagtgtcgggac

SEQ ID NO: 388370 - DNA, 15 bp, Homo sapiens
atactagtgtcggga

SEQ ID NO: 388371 - DNA, 15 bp, Homo sapiens
tatactagtgtcggg

SEQ ID NO: 388372 - DNA, 15 bp, Homo sapiens
atatactagtgtcgg

SEQ ID NO: 388373 - DNA, 15 bp, Homo sapiens
gatatactagtgtcg

SEQ ID NO: 388374 - DNA, 15 bp, Homo sapiens
agatatactagtgtc

SEQ ID NO: 388375 - DNA, 15 bp, Homo sapiens
gagatatactagtgt

SEQ ID NO: 388376 - DNA, 15 bp, Homo sapiens
agagatatactagtg

SEQ ID NO: 388377 - DNA, 15 bp, Homo sapiens
gagagatatactagt

SEQ ID NO: 388378 - DNA, 15 bp, Homo sapiens
ggagagatatactag

SEQ ID NO: 388379 - DNA, 15 bp, Homo sapiens
tggagagatatacta

SEQ ID NO: 388380 - DNA, 15 bp, Homo sapiens
ttggagagatatact

SEQ ID NO: 388381 - DNA, 15 bp, Homo sapiens
tttggagagatatac

SEQ ID NO: 388382 - DNA, 15 bp, Homo sapiens
ttttggagagatata

SEQ ID NO: 388383 - DNA, 15 bp, Homo sapiens
cttttggagagatat

SEQ ID NO: 388384 - DNA, 15 bp, Homo sapiens
acttttggagagata

SEQ ID NO: 388385 - DNA, 15 bp, Homo sapiens
cacttttggagagat

SEQ ID NO: 388386 - DNA, 15 bp, Homo sapiens
acacttttggagaga

SEQ ID NO: 388387 - DNA, 15 bp, Homo sapiens
cacacttttggagag

SEQ ID NO: 388388 - DNA, 15 bp, Homo sapiens
acacacttttggaga

SEQ ID NO: 388389 - DNA, 15 bp, Homo sapiens
tacacacttttggag

SEQ ID NO: 388390 - DNA, 15 bp, Homo sapiens
atacacacttttgga

SEQ ID NO: 388391 - DNA, 15 bp, Homo sapiens
catacacacttttgg

SEQ ID NO: 388392 - DNA, 15 bp, Homo sapiens
acatacacacttttg

SEQ ID NO: 388393 - DNA, 15 bp, Homo sapiens
cacatacacactttt

SEQ ID NO: 388394 - DNA, 15 bp, Homo sapiens
acacatacacacttt

SEQ ID NO: 388395 - DNA, 15 bp, Homo sapiens
gacacatacacactt

SEQ ID NO: 388396 - DNA, 15 bp, Homo sapiens
tgacacatacacact

SEQ ID NO: 388397 - DNA, 15 bp, Homo sapiens
gtgacacatacacac

SEQ ID NO: 388398 - DNA, 15 bp, Homo sapiens
agtgacacatacaca

SEQ ID NO: 388399 - DNA, 15 bp, Homo sapiens
cagtgacacatacac

SEQ ID NO: 388400 - DNA, 15 bp, Homo sapiens
acagtgacacataca

SEQ ID NO: 388401 - DNA, 15 bp, Homo sapiens
gacagtgacacatac

SEQ ID NO: 388402 - DNA, 15 bp, Homo sapiens
tgacagtgacacata

SEQ ID NO: 388403 - DNA, 15 bp, Homo sapiens
atgacagtgacacat

SEQ ID NO: 388404 - DNA, 15 bp, Homo sapiens
tatgacagtgacaca

SEQ ID NO: 388405 - DNA, 15 bp, Homo sapiens
ttatgacagtgacac

SEQ ID NO: 388406 - DNA, 15 bp, Homo sapiens
tttatgacagtgaca

SEQ ID NO: 388407 - DNA, 15 bp, Homo sapiens
ttttatgacagtgac

SEQ ID NO: 388408 - DNA, 15 bp, Homo sapiens
tttttatgacagtga

SEQ ID NO: 388409 - DNA, 15 bp, Homo sapiens
atttttatgacagtg

SEQ ID NO: 388410 - DNA, 15 bp, Homo sapiens
catttttatgacagt

SEQ ID NO: 388411 - DNA, 15 bp, Homo sapiens
acatttttatgacag

SEQ ID NO: 388412 - DNA, 15 bp, Homo sapiens
gacatttttatgaca

SEQ ID NO: 388413 - DNA, 15 bp, Homo sapiens
tgacatttttatgac

SEQ ID NO: 388414 - DNA, 15 bp, Homo sapiens
gtgacatttttatga

SEQ ID NO: 388415 - DNA, 15 bp, Homo sapiens
tgtgacatttttatg

SEQ ID NO: 388416 - DNA, 15 bp, Homo sapiens
ctgtgacatttttat

SEQ ID NO: 388417 - DNA, 15 bp, Homo sapiens
tctgtgacattttta

SEQ ID NO: 388418 - DNA, 15 bp, Homo sapiens
atctgtgacattttt

SEQ ID NO: 388419 - DNA, 15 bp, Homo sapiens
aatctgtgacatttt

SEQ ID NO: 388420 - DNA, 15 bp, Homo sapiens
aaatctgtgacattt

SEQ ID NO: 388421 - DNA, 15 bp, Homo sapiens
aaaatctgtgacatt

SEQ ID NO: 388422 - DNA, 15 bp, Homo sapiens
aaaaatctgtgacat

SEQ ID NO: 388423 - DNA, 15 bp, Homo sapiens
taaaaatctgtgaca

SEQ ID NO: 388424 - DNA, 15 bp, Homo sapiens
ttaaaaatctgtgac

SEQ ID NO: 388425 - DNA, 15 bp, Homo sapiens
cttaaaaatctgtga

SEQ ID NO: 388426 - DNA, 15 bp, Homo sapiens
tcttaaaaatctgtg

SEQ ID NO: 388427 - DNA, 15 bp, Homo sapiens
atcttaaaaatctgt

SEQ ID NO: 388428 - DNA, 15 bp, Homo sapiens
aatcttaaaaatctg

SEQ ID NO: 388429 - DNA, 15 bp, Homo sapiens
caatcttaaaaatct

SEQ ID NO: 388430 - DNA, 15 bp, Homo sapiens
ccaatcttaaaaatc

SEQ ID NO: 388431 - DNA, 15 bp, Homo sapiens
tccaatcttaaaaat

SEQ ID NO: 388432 - DNA, 15 bp, Homo sapiens
atccaatcttaaaaa

SEQ ID NO: 388433 - DNA, 15 bp, Homo sapiens
aatccaatcttaaaa

SEQ ID NO: 388434 - DNA, 15 bp, Homo sapiens
aaatccaatcttaaa

SEQ ID NO: 388435 - DNA, 15 bp, Homo sapiens
aaaatccaatcttaa

SEQ ID NO: 388436 - DNA, 15 bp, Homo sapiens
aaaaatccaatctta

SEQ ID NO: 388437 - DNA, 15 bp, Homo sapiens
aaaaaatccaatctt

SEQ ID NO: 388438 - DNA, 15 bp, Homo sapiens
aaaaaaatccaatct

SEQ ID NO: 388439 - DNA, 15 bp, Homo sapiens
gaaaaaaatccaatc

SEQ ID NO: 388440 - DNA, 15 bp, Homo sapiens
agaaaaaaatccaat

SEQ ID NO: 388441 - DNA, 15 bp, Homo sapiens
aagaaaaaaatccaa

SEQ ID NO: 388442 - DNA, 15 bp, Homo sapiens
taagaaaaaaatcca

SEQ ID NO: 388443 - DNA, 15 bp, Homo sapiens
ttaagaaaaaaatcc

SEQ ID NO: 388444 - DNA, 15 bp, Homo sapiens
attaagaaaaaaatc

SEQ ID NO: 388445 - DNA, 15 bp, Homo sapiens
gattaagaaaaaaat

SEQ ID NO: 388446 - DNA, 15 bp, Homo sapiens
agattaagaaaaaaa

SEQ ID NO: 388447 - DNA, 15 bp, Homo sapiens
aagattaagaaaaaa

SEQ ID NO: 388448 - DNA, 15 bp, Homo sapiens
gaagattaagaaaaa

SEQ ID NO: 388449 - DNA, 15 bp, Homo sapiens
tgaagattaagaaaa

SEQ ID NO: 388450 - DNA, 15 bp, Homo sapiens
gtgaagattaagaaa

SEQ ID NO: 388451 - DNA, 15 bp, Homo sapiens
tgtgaagattaagaa

SEQ ID NO: 388452 - DNA, 15 bp, Homo sapiens
ttgtgaagattaaga

SEQ ID NO: 388453 - DNA, 15 bp, Homo sapiens
attgtgaagattaag

SEQ ID NO: 388454 - DNA, 15 bp, Homo sapiens
tattgtgaagattaa

SEQ ID NO: 388455 - DNA, 15 bp, Homo sapiens
atattgtgaagatta

SEQ ID NO: 388456 - DNA, 15 bp, Homo sapiens
catattgtgaagatt

SEQ ID NO: 388457 - DNA, 15 bp, Homo sapiens
acatattgtgaagat

SEQ ID NO: 388458 - DNA, 15 bp, Homo sapiens
aacatattgtgaaga

SEQ ID NO: 388459 - DNA, 15 bp, Homo sapiens
aaacatattgtgaag

SEQ ID NO: 388460 - DNA, 15 bp, Homo sapiens
gaaacatattgtgaa

SEQ ID NO: 388461 - DNA, 15 bp, Homo sapiens
agaaacatattgtga

SEQ ID NO: 388462 - DNA, 15 bp, Homo sapiens
gagaaacatattgtg

SEQ ID NO: 388463 - DNA, 15 bp, Homo sapiens
ggagaaacatattgt

SEQ ID NO: 388464 - DNA, 15 bp, Homo sapiens
aggagaaacatattg

SEQ ID NO: 388465 - DNA, 15 bp, Homo sapiens
aaggagaaacatatt

SEQ ID NO: 388466 - DNA, 15 bp, Homo sapiens
aaaggagaaacatat

SEQ ID NO: 388467 - DNA, 15 bp, Homo sapiens
aaaaggagaaacata

SEQ ID NO: 388468 - DNA, 15 bp, Homo sapiens
aaaaaggagaaacat

SEQ ID NO: 388469 - DNA, 15 bp, Homo sapiens
caaaaaggagaaaca

SEQ ID NO: 388470 - DNA, 15 bp, Homo sapiens
acaaaaaggagaaac

SEQ ID NO: 388471 - DNA, 15 bp, Homo sapiens
aacaaaaaggagaaa

SEQ ID NO: 388472 - DNA, 15 bp, Homo sapiens
caacaaaaaggagaa

SEQ ID NO: 388473 - DNA, 15 bp, Homo sapiens
gcaacaaaaaggaga

SEQ ID NO: 388474 - DNA, 15 bp, Homo sapiens
tgcaacaaaaaggag

SEQ ID NO: 388475 - DNA, 15 bp, Homo sapiens
ttgcaacaaaaagga

SEQ ID NO: 388476 - DNA, 15 bp, Homo sapiens
cttgcaacaaaaagg

SEQ ID NO: 388477 - DNA, 15 bp, Homo sapiens
tcttgcaacaaaaag

SEQ ID NO: 388478 - DNA, 15 bp, Homo sapiens
ttcttgcaacaaaaa

SEQ ID NO: 388479 - DNA, 15 bp, Homo sapiens
attcttgcaacaaaa

SEQ ID NO: 388480 - DNA, 15 bp, Homo sapiens
tattcttgcaacaaa

SEQ ID NO: 388481 - DNA, 15 bp, Homo sapiens
gtattcttgcaacaa

SEQ ID NO: 388482 - DNA, 15 bp, Homo sapiens
agtattcttgcaaca

SEQ ID NO: 388483 - DNA, 15 bp, Homo sapiens
gagtattcttgcaac

SEQ ID NO: 388484 - DNA, 15 bp, Homo sapiens
agagtattcttgcaa

SEQ ID NO: 388485 - DNA, 15 bp, Homo sapiens
cagagtattcttgca

SEQ ID NO: 388486 - DNA, 15 bp, Homo sapiens
acagagtattcttgc

SEQ ID NO: 388487 - DNA, 15 bp, Homo sapiens
cacagagtattcttg

SEQ ID NO: 388488 - DNA, 15 bp, Homo sapiens
gcacagagtattctt

SEQ ID NO: 388489 - DNA, 15 bp, Homo sapiens
tgcacagagtattct

SEQ ID NO: 388490 - DNA, 15 bp, Homo sapiens
atgcacagagtattc

SEQ ID NO: 388491 - DNA, 15 bp, Homo sapiens
tatgcacagagtatt

SEQ ID NO: 388492 - DNA, 15 bp, Homo sapiens
ttatgcacagagtat

SEQ ID NO: 388493 - DNA, 15 bp, Homo sapiens
attatgcacagagta

SEQ ID NO: 388494 - DNA, 15 bp, Homo sapiens
aattatgcacagagt

SEQ ID NO: 388495 - DNA, 15 bp, Homo sapiens
gaattatgcacagag

SEQ ID NO: 388496 - DNA, 15 bp, Homo sapiens
agaattatgcacaga

SEQ ID NO: 388497 - DNA, 15 bp, Homo sapiens
tagaattatgcacag

SEQ ID NO: 388498 - DNA, 15 bp, Homo sapiens
gtagaattatgcaca

SEQ ID NO: 388499 - DNA, 15 bp, Homo sapiens
ggtagaattatgcac

SEQ ID NO: 388500 - DNA, 15 bp, Homo sapiens
tggtagaattatgca

SEQ ID NO: 388501 - DNA, 15 bp, Homo sapiens
gtggtagaattatgc

SEQ ID NO: 388502 - DNA, 15 bp, Homo sapiens
cgtggtagaattatg

SEQ ID NO: 388503 - DNA, 15 bp, Homo sapiens
ccgtggtagaattat

SEQ ID NO: 388504 - DNA, 15 bp, Homo sapiens
accgtggtagaatta

SEQ ID NO: 388505 - DNA, 15 bp, Homo sapiens
gaccgtggtagaatt

SEQ ID NO: 388506 - DNA, 15 bp, Homo sapiens
ggaccgtggtagaat

SEQ ID NO: 388507 - DNA, 15 bp, Homo sapiens
aggaccgtggtagaa

SEQ ID NO: 388508 - DNA, 15 bp, Homo sapiens
aaggaccgtggtaga

SEQ ID NO: 388509 - DNA, 15 bp, Homo sapiens
taaggaccgtggtag

SEQ ID NO: 388510 - DNA, 15 bp, Homo sapiens
ttaaggaccgtggta

SEQ ID NO: 388511 - DNA, 15 bp, Homo sapiens
attaaggaccgtggt

SEQ ID NO: 388512 - DNA, 15 bp, Homo sapiens
tattaaggaccgtgg

SEQ ID NO: 388513 - DNA, 15 bp, Homo sapiens
gtattaaggaccgtg

SEQ ID NO: 388514 - DNA, 15 bp, Homo sapiens
tgtattaaggaccgt

SEQ ID NO: 388515 - DNA, 15 bp, Homo sapiens
atgtattaaggaccg

SEQ ID NO: 388516 - DNA, 15 bp, Homo sapiens
aatgtattaaggacc

SEQ ID NO: 388517 - DNA, 15 bp, Homo sapiens
taatgtattaaggac

SEQ ID NO: 388518 - DNA, 15 bp, Homo sapiens
ataatgtattaagga

SEQ ID NO: 388519 - DNA, 15 bp, Homo sapiens
cataatgtattaagg

SEQ ID NO: 388520 - DNA, 15 bp, Homo sapiens
gcataatgtattaag

SEQ ID NO: 388521 - DNA, 15 bp, Homo sapiens
agcataatgtattaa

SEQ ID NO: 388522 - DNA, 15 bp, Homo sapiens
cagcataatgtatta

SEQ ID NO: 388523 - DNA, 15 bp, Homo sapiens
acagcataatgtatt

SEQ ID NO: 388524 - DNA, 15 bp, Homo sapiens
cacagcataatgtat

SEQ ID NO: 388525 - DNA, 15 bp, Homo sapiens
tcacagcataatgta

SEQ ID NO: 388526 - DNA, 15 bp, Homo sapiens
atcacagcataatgt

SEQ ID NO: 388527 - DNA, 15 bp, Homo sapiens
tatcacagcataatg

SEQ ID NO: 388528 - DNA, 15 bp, Homo sapiens
atatcacagcataat

SEQ ID NO: 388529 - DNA, 15 bp, Homo sapiens
aatatcacagcataa

SEQ ID NO: 388530 - DNA, 15 bp, Homo sapiens
aaatatcacagcata

SEQ ID NO: 388531 - DNA, 15 bp, Homo sapiens
caaatatcacagcat

SEQ ID NO: 388532 - DNA, 15 bp, Homo sapiens
ccaaatatcacagca

SEQ ID NO: 388533 - DNA, 15 bp, Homo sapiens
accaaatatcacagc

SEQ ID NO: 388534 - DNA, 15 bp, Homo sapiens
aaccaaatatcacag

SEQ ID NO: 388535 - DNA, 15 bp, Homo sapiens
gaaccaaatatcaca

SEQ ID NO: 388536 - DNA, 15 bp, Homo sapiens
tgaaccaaatatcac

SEQ ID NO: 388537 - DNA, 15 bp, Homo sapiens
gtgaaccaaatatca

SEQ ID NO: 388538 - DNA, 15 bp, Homo sapiens
agtgaaccaaatatc

SEQ ID NO: 388539 - DNA, 15 bp, Homo sapiens
aagtgaaccaaatat

SEQ ID NO: 388540 - DNA, 15 bp, Homo sapiens
taagtgaaccaaata

SEQ ID NO: 388541 - DNA, 15 bp, Homo sapiens
ataagtgaaccaaat

SEQ ID NO: 388542 - DNA, 15 bp, Homo sapiens
gataagtgaaccaaa

SEQ ID NO: 388543 - DNA, 15 bp, Homo sapiens
agataagtgaaccaa

SEQ ID NO: 388544 - DNA, 15 bp, Homo sapiens
cagataagtgaacca

SEQ ID NO: 388545 - DNA, 15 bp, Homo sapiens
gcagataagtgaacc

SEQ ID NO: 388546 - DNA, 15 bp, Homo sapiens
ggcagataagtgaac

SEQ ID NO: 388547 - DNA, 15 bp, Homo sapiens
aggcagataagtgaa

SEQ ID NO: 388548 - DNA, 15 bp, Homo sapiens
gaggcagataagtga

SEQ ID NO: 388549 - DNA, 15 bp, Homo sapiens
ggaggcagataagtg

SEQ ID NO: 388550 - DNA, 15 bp, Homo sapiens
aggaggcagataagt

SEQ ID NO: 388551 - DNA, 15 bp, Homo sapiens
aaggaggcagataag

SEQ ID NO: 388552 - DNA, 15 bp, Homo sapiens
gaaggaggcagataa

SEQ ID NO: 388553 - DNA, 15 bp, Homo sapiens
ggaaggaggcagata

SEQ ID NO: 388554 - DNA, 15 bp, Homo sapiens
tggaaggaggcagat

SEQ ID NO: 388555 - DNA, 15 bp, Homo sapiens
gtggaaggaggcaga

SEQ ID NO: 388556 - DNA, 15 bp, Homo sapiens
ggtggaaggaggcag

SEQ ID NO: 388557 - DNA, 15 bp, Homo sapiens
gggtggaaggaggca

SEQ ID NO: 388558 - DNA, 15 bp, Homo sapiens
ggggtggaaggaggc

SEQ ID NO: 388559 - DNA, 15 bp, Homo sapiens
aggggtggaaggagg

SEQ ID NO: 388560 - DNA, 15 bp, Homo sapiens
gaggggtggaaggag

SEQ ID NO: 388561 - DNA, 15 bp, Homo sapiens
ggaggggtggaagga

SEQ ID NO: 388562 - DNA, 15 bp, Homo sapiens
aggaggggtggaagg

SEQ ID NO: 388563 - DNA, 15 bp, Homo sapiens
aaggaggggtggaag

SEQ ID NO: 388564 - DNA, 15 bp, Homo sapiens
taaggaggggtggaa

SEQ ID NO: 388565 - DNA, 15 bp, Homo sapiens
ttaaggaggggtgga

SEQ ID NO: 388566 - DNA, 15 bp, Homo sapiens
tttaaggaggggtgg

SEQ ID NO: 388567 - DNA, 15 bp, Homo sapiens
gtttaaggaggggtg

SEQ ID NO: 388568 - DNA, 15 bp, Homo sapiens
agtttaaggaggggt

SEQ ID NO: 388569 - DNA, 15 bp, Homo sapiens
cagtttaaggagggg

SEQ ID NO: 388570 - DNA, 15 bp, Homo sapiens
acagtttaaggaggg

SEQ ID NO: 388571 - DNA, 15 bp, Homo sapiens
tacagtttaaggagg

SEQ ID NO: 388572 - DNA, 15 bp, Homo sapiens
ttacagtttaaggag

SEQ ID NO: 388573 - DNA, 15 bp, Homo sapiens
cttacagtttaagga

SEQ ID NO: 388574 - DNA, 15 bp, Homo sapiens
acttacagtttaagg

SEQ ID NO: 388575 - DNA, 15 bp, Homo sapiens
gacttacagtttaag

SEQ ID NO: 388576 - DNA, 15 bp, Homo sapiens
agacttacagtttaa

SEQ ID NO: 388577 - DNA, 15 bp, Homo sapiens
gagacttacagttta

SEQ ID NO: 388578 - DNA, 15 bp, Homo sapiens
agagacttacagttt

SEQ ID NO: 388579 - DNA, 15 bp, Homo sapiens
cagagacttacagtt

SEQ ID NO: 388580 - DNA, 15 bp, Homo sapiens
tcagagacttacagt

SEQ ID NO: 388581 - DNA, 15 bp, Homo sapiens
ttcagagacttacag

SEQ ID NO: 388582 - DNA, 15 bp, Homo sapiens
tttcagagacttaca

SEQ ID NO: 388583 - DNA, 15 bp, Homo sapiens
ctttcagagacttac

SEQ ID NO: 388584 - DNA, 15 bp, Homo sapiens
cctttcagagactta

SEQ ID NO: 388585 - DNA, 15 bp, Homo sapiens
acctttcagagactt

SEQ ID NO: 388586 - DNA, 15 bp, Homo sapiens
aacctttcagagact

SEQ ID NO: 388587 - DNA, 15 bp, Homo sapiens
taacctttcagagac

SEQ ID NO: 388588 - DNA, 15 bp, Homo sapiens
ttaacctttcagaga

SEQ ID NO: 388589 - DNA, 15 bp, Homo sapiens
cttaacctttcagag

SEQ ID NO: 388590 - DNA, 15 bp, Homo sapiens
ccttaacctttcaga

SEQ ID NO: 388591 - DNA, 15 bp, Homo sapiens
tccttaacctttcag

SEQ ID NO: 388592 - DNA, 15 bp, Homo sapiens
gtccttaacctttca

SEQ ID NO: 388593 - DNA, 15 bp, Homo sapiens
agtccttaacctttc

SEQ ID NO: 388594 - DNA, 15 bp, Homo sapiens
tagtccttaaccttt

SEQ ID NO: 388595 - DNA, 15 bp, Homo sapiens
ctagtccttaacctt

SEQ ID NO: 388596 - DNA, 15 bp, Homo sapiens
cctagtccttaacct

SEQ ID NO: 388597 - DNA, 15 bp, Homo sapiens
acctagtccttaacc

SEQ ID NO: 388598 - DNA, 15 bp, Homo sapiens
gacctagtccttaac

SEQ ID NO: 388599 - DNA, 15 bp, Homo sapiens
tgacctagtccttaa

SEQ ID NO: 388600 - DNA, 15 bp, Homo sapiens
atgacctagtcctta

SEQ ID NO: 388601 - DNA, 15 bp, Homo sapiens
gatgacctagtcctt

SEQ ID NO: 388602 - DNA, 15 bp, Homo sapiens
cgatgacctagtcct

SEQ ID NO: 388603 - DNA, 15 bp, Homo sapiens
acgatgacctagtcc

SEQ ID NO: 388604 - DNA, 15 bp, Homo sapiens
gacgatgacctagtc

SEQ ID NO: 388605 - DNA, 15 bp, Homo sapiens
tgacgatgacctagt

SEQ ID NO: 388606 - DNA, 15 bp, Homo sapiens
atgacgatgacctag

SEQ ID NO: 388607 - DNA, 15 bp, Homo sapiens
gatgacgatgaccta

SEQ ID NO: 388608 - DNA, 15 bp, Homo sapiens
tgatgacgatgacct

SEQ ID NO: 388609 - DNA, 15 bp, Homo sapiens
gtgatgacgatgacc

SEQ ID NO: 388610 - DNA, 15 bp, Homo sapiens
tgtgatgacgatgac

SEQ ID NO: 388611 - DNA, 15 bp, Homo sapiens
ctgtgatgacgatga

SEQ ID NO: 388612 - DNA, 15 bp, Homo sapiens
actgtgatgacgatg

SEQ ID NO: 388613 - DNA, 15 bp, Homo sapiens
tactgtgatgacgat

SEQ ID NO: 388614 - DNA, 15 bp, Homo sapiens
gtactgtgatgacga

SEQ ID NO: 388615 - DNA, 15 bp, Homo sapiens
agtactgtgatgacg

SEQ ID NO: 388616 - DNA, 15 bp, Homo sapiens
aagtactgtgatgac

SEQ ID NO: 388617 - DNA, 15 bp, Homo sapiens
aaagtactgtgatga

SEQ ID NO: 388618 - DNA, 15 bp, Homo sapiens
gaaagtactgtgatg

SEQ ID NO: 388619 - DNA, 15 bp, Homo sapiens
tgaaagtactgtgat

SEQ ID NO: 388620 - DNA, 15 bp, Homo sapiens
ttgaaagtactgtga

SEQ ID NO: 388621 - DNA, 15 bp, Homo sapiens
attgaaagtactgtg

SEQ ID NO: 388622 - DNA, 15 bp, Homo sapiens
cattgaaagtactgt

SEQ ID NO: 388623 - DNA, 15 bp, Homo sapiens
gcattgaaagtactg

SEQ ID NO: 388624 - DNA, 15 bp, Homo sapiens
ggcattgaaagtact

SEQ ID NO: 388625 - DNA, 15 bp, Homo sapiens
aggcattgaaagtac

SEQ ID NO: 388626 - DNA, 15 bp, Homo sapiens
taggcattgaaagta

SEQ ID NO: 388627 - DNA, 15 bp, Homo sapiens
ctaggcattgaaagt

SEQ ID NO: 388628 - DNA, 15 bp, Homo sapiens
gctaggcattgaaag

SEQ ID NO: 388629 - DNA, 15 bp, Homo sapiens
tgctaggcattgaaa

SEQ ID NO: 388630 - DNA, 15 bp, Homo sapiens
gtgctaggcattgaa

SEQ ID NO: 388631 - DNA, 15 bp, Homo sapiens
tgtgctaggcattga

SEQ ID NO: 388632 - DNA, 15 bp, Homo sapiens
ctgtgctaggcattg

SEQ ID NO: 388633 - DNA, 15 bp, Homo sapiens
actgtgctaggcatt

SEQ ID NO: 388634 - DNA, 15 bp, Homo sapiens
aactgtgctaggcat

SEQ ID NO: 388635 - DNA, 15 bp, Homo sapiens
gaactgtgctaggca

SEQ ID NO: 388636 - DNA, 15 bp, Homo sapiens
tgaactgtgctaggc

SEQ ID NO: 388637 - DNA, 15 bp, Homo sapiens
atgaactgtgctagg

SEQ ID NO: 388638 - DNA, 15 bp, Homo sapiens
catgaactgtgctag

SEQ ID NO: 388639 - DNA, 15 bp, Homo sapiens
ccatgaactgtgcta

SEQ ID NO: 388640 - DNA, 15 bp, Homo sapiens
gccatgaactgtgct

SEQ ID NO: 388641 - DNA, 15 bp, Homo sapiens
tgccatgaactgtgc

SEQ ID NO: 388642 - DNA, 15 bp, Homo sapiens
ctgccatgaactgtg

SEQ ID NO: 388643 - DNA, 15 bp, Homo sapiens
actgccatgaactgt

SEQ ID NO: 388644 - DNA, 15 bp, Homo sapiens
tactgccatgaactg

SEQ ID NO: 388645 - DNA, 15 bp, Homo sapiens
ctactgccatgaact

SEQ ID NO: 388646 - DNA, 15 bp, Homo sapiens
actactgccatgaac

SEQ ID NO: 388647 - DNA, 15 bp, Homo sapiens
aactactgccatgaa

SEQ ID NO: 388648 - DNA, 15 bp, Homo sapiens
taactactgccatga

SEQ ID NO: 388649 - DNA, 15 bp, Homo sapiens
ttaactactgccatg

SEQ ID NO: 388650 - DNA, 15 bp, Homo sapiens
attaactactgccat

SEQ ID NO: 388651 - DNA, 15 bp, Homo sapiens
cattaactactgcca

SEQ ID NO: 388652 - DNA, 15 bp, Homo sapiens
gcattaactactgcc

SEQ ID NO: 388653 - DNA, 15 bp, Homo sapiens
agcattaactactgc

SEQ ID NO: 388654 - DNA, 15 bp, Homo sapiens
gagcattaactactg

SEQ ID NO: 388655 - DNA, 15 bp, Homo sapiens
tgagcattaactact

SEQ ID NO: 388656 - DNA, 15 bp, Homo sapiens
ttgagcattaactac

SEQ ID NO: 388657 - DNA, 15 bp, Homo sapiens
attgagcattaacta

SEQ ID NO: 388658 - DNA, 15 bp, Homo sapiens
tattgagcattaact

SEQ ID NO: 388659 - DNA, 15 bp, Homo sapiens
ttattgagcattaac

SEQ ID NO: 388660 - DNA, 15 bp, Homo sapiens
cttattgagcattaa

SEQ ID NO: 388661 - DNA, 15 bp, Homo sapiens
acttattgagcatta

SEQ ID NO: 388662 - DNA, 15 bp, Homo sapiens
cacttattgagcatt

SEQ ID NO: 388663 - DNA, 15 bp, Homo sapiens
acacttattgagcat

SEQ ID NO: 388664 - DNA, 15 bp, Homo sapiens
aacacttattgagca

SEQ ID NO: 388665 - DNA, 15 bp, Homo sapiens
aaacacttattgagc

SEQ ID NO: 388666 - DNA, 15 bp, Homo sapiens
gaaacacttattgag

SEQ ID NO: 388667 - DNA, 15 bp, Homo sapiens
agaaacacttattga

SEQ ID NO: 388668 - DNA, 15 bp, Homo sapiens
aagaaacacttattg

SEQ ID NO: 388669 - DNA, 15 bp, Homo sapiens
caagaaacacttatt

SEQ ID NO: 388670 - DNA, 15 bp, Homo sapiens
tcaagaaacacttat

SEQ ID NO: 388671 - DNA, 15 bp, Homo sapiens
ttcaagaaacactta

SEQ ID NO: 388672 - DNA, 15 bp, Homo sapiens
tttcaagaaacactt

SEQ ID NO: 388673 - DNA, 15 bp, Homo sapiens
ctttcaagaaacact

SEQ ID NO: 388674 - DNA, 15 bp, Homo sapiens
tctttcaagaaacac

SEQ ID NO: 388675 - DNA, 15 bp, Homo sapiens
ttctttcaagaaaca

SEQ ID NO: 388676 - DNA, 15 bp, Homo sapiens
gttctttcaagaaac

SEQ ID NO: 388677 - DNA, 15 bp, Homo sapiens
tgttctttcaagaaa

SEQ ID NO: 388678 - DNA, 15 bp, Homo sapiens
ttgttctttcaagaa

SEQ ID NO: 388679 - DNA, 15 bp, Homo sapiens
tttgttctttcaaga

SEQ ID NO: 388680 - DNA, 15 bp, Homo sapiens
atttgttctttcaag

SEQ ID NO: 388681 - DNA, 15 bp, Homo sapiens
gatttgttctttcaa

SEQ ID NO: 388682 - DNA, 15 bp, Homo sapiens
tgatttgttctttca

SEQ ID NO: 388683 - DNA, 15 bp, Homo sapiens
ttgatttgttctttc

SEQ ID NO: 388684 - DNA, 15 bp, Homo sapiens
attgatttgttcttt

SEQ ID NO: 388685 - DNA, 15 bp, Homo sapiens
gattgatttgttctt

SEQ ID NO: 388686 - DNA, 15 bp, Homo sapiens
tgattgatttgttct

SEQ ID NO: 388687 - DNA, 15 bp, Homo sapiens
atgattgatttgttc

SEQ ID NO: 388688 - DNA, 15 bp, Homo sapiens
tatgattgatttgtt

SEQ ID NO: 388689 - DNA, 15 bp, Homo sapiens
atatgattgatttgt

SEQ ID NO: 388690 - DNA, 15 bp, Homo sapiens
gatatgattgatttg

SEQ ID NO: 388691 - DNA, 15 bp, Homo sapiens
agatatgattgattt

SEQ ID NO: 388692 - DNA, 15 bp, Homo sapiens
tagatatgattgatt

SEQ ID NO: 388693 - DNA, 15 bp, Homo sapiens
atagatatgattgat

SEQ ID NO: 388694 - DNA, 15 bp, Homo sapiens
tatagatatgattga

SEQ ID NO: 388695 - DNA, 15 bp, Homo sapiens
ctatagatatgattg

SEQ ID NO: 388696 - DNA, 15 bp, Homo sapiens
actatagatatgatt

SEQ ID NO: 388697 - DNA, 15 bp, Homo sapiens
tactatagatatgat

SEQ ID NO: 388698 - DNA, 15 bp, Homo sapiens
atactatagatatga

SEQ ID NO: 388699 - DNA, 15 bp, Homo sapiens
tatactatagatatg

SEQ ID NO: 388700 - DNA, 15 bp, Homo sapiens
atatactatagatat

SEQ ID NO: 388701 - DNA, 15 bp, Homo sapiens
aatatactatagata

SEQ ID NO: 388702 - DNA, 15 bp, Homo sapiens
aaatatactatagat

SEQ ID NO: 388703 - DNA, 15 bp, Homo sapiens
gaaatatactataga

SEQ ID NO: 388704 - DNA, 15 bp, Homo sapiens
agaaatatactatag

SEQ ID NO: 388705 - DNA, 15 bp, Homo sapiens
aagaaatatactata

SEQ ID NO: 388706 - DNA, 15 bp, Homo sapiens
taagaaatatactat

SEQ ID NO: 388707 - DNA, 15 bp, Homo sapiens
ctaagaaatatacta

SEQ ID NO: 388708 - DNA, 15 bp, Homo sapiens
actaagaaatatact

SEQ ID NO: 388709 - DNA, 15 bp, Homo sapiens
cactaagaaatatac

SEQ ID NO: 388710 - DNA, 15 bp, Homo sapiens
acactaagaaatata

SEQ ID NO: 388711 - DNA, 15 bp, Homo sapiens
gacactaagaaatat

SEQ ID NO: 388712 - DNA, 15 bp, Homo sapiens
ggacactaagaaata

SEQ ID NO: 388713 - DNA, 15 bp, Homo sapiens
tggacactaagaaat

SEQ ID NO: 388714 - DNA, 15 bp, Homo sapiens
ctggacactaagaaa

SEQ ID NO: 388715 - DNA, 15 bp, Homo sapiens
actggacactaagaa

SEQ ID NO: 388716 - DNA, 15 bp, Homo sapiens
aactggacactaaga

SEQ ID NO: 388717 - DNA, 15 bp, Homo sapiens
aaactggacactaag

SEQ ID NO: 388718 - DNA, 15 bp, Homo sapiens
caaactggacactaa

SEQ ID NO: 388719 - DNA, 15 bp, Homo sapiens
tcaaactggacacta

SEQ ID NO: 388720 - DNA, 15 bp, Homo sapiens
gtcaaactggacact

SEQ ID NO: 388721 - DNA, 15 bp, Homo sapiens
ggtcaaactggacac

SEQ ID NO: 388722 - DNA, 15 bp, Homo sapiens
aggtcaaactggaca

SEQ ID NO: 388723 - DNA, 15 bp, Homo sapiens
taggtcaaactggac

SEQ ID NO: 388724 - DNA, 15 bp, Homo sapiens
ttaggtcaaactgga

SEQ ID NO: 388725 - DNA, 15 bp, Homo sapiens
tttaggtcaaactgg

SEQ ID NO: 388726 - DNA, 15 bp, Homo sapiens
ttttaggtcaaactg

SEQ ID NO: 388727 - DNA, 15 bp, Homo sapiens
tttttaggtcaaact

SEQ ID NO: 388728 - DNA, 15 bp, Homo sapiens
ctttttaggtcaaac

SEQ ID NO: 388729 - DNA, 15 bp, Homo sapiens
cctttttaggtcaaa

SEQ ID NO: 388730 - DNA, 15 bp, Homo sapiens
ccctttttaggtcaa

SEQ ID NO: 388731 - DNA, 15 bp, Homo sapiens
accctttttaggtca

SEQ ID NO: 388732 - DNA, 15 bp, Homo sapiens
taccctttttaggtc

SEQ ID NO: 388733 - DNA, 15 bp, Homo sapiens
ttaccctttttaggt

SEQ ID NO: 388734 - DNA, 15 bp, Homo sapiens
tttaccctttttagg

SEQ ID NO: 388735 - DNA, 15 bp, Homo sapiens
atttaccctttttag

SEQ ID NO: 388736 - DNA, 15 bp, Homo sapiens
catttacccttttta

SEQ ID NO: 388737 - DNA, 15 bp, Homo sapiens
gcatttacccttttt

SEQ ID NO: 388738 - DNA, 15 bp, Homo sapiens
ggcatttaccctttt

SEQ ID NO: 388739 - DNA, 15 bp, Homo sapiens
gggcatttacccttt

SEQ ID NO: 388740 - DNA, 15 bp, Homo sapiens
tgggcatttaccctt

SEQ ID NO: 388741 - DNA, 15 bp, Homo sapiens
gtgggcatttaccct

SEQ ID NO: 388742 - DNA, 15 bp, Homo sapiens
tgtgggcatttaccc

SEQ ID NO: 388743 - DNA, 15 bp, Homo sapiens
atgtgggcatttacc

SEQ ID NO: 388744 - DNA, 15 bp, Homo sapiens
catgtgggcatttac

SEQ ID NO: 388745 - DNA, 15 bp, Homo sapiens
ccatgtgggcattta

SEQ ID NO: 388746 - DNA, 15 bp, Homo sapiens
accatgtgggcattt

SEQ ID NO: 388747 - DNA, 15 bp, Homo sapiens
gaccatgtgggcatt

SEQ ID NO: 388748 - DNA, 15 bp, Homo sapiens
tgaccatgtgggcat

SEQ ID NO: 388749 - DNA, 15 bp, Homo sapiens
ttgaccatgtgggca

SEQ ID NO: 388750 - DNA, 15 bp, Homo sapiens
tttgaccatgtgggc

SEQ ID NO: 388751 - DNA, 15 bp, Homo sapiens
ttttgaccatgtggg

SEQ ID NO: 388752 - DNA, 15 bp, Homo sapiens
tttttgaccatgtgg

SEQ ID NO: 388753 - DNA, 15 bp, Homo sapiens
ttttttgaccatgtg

SEQ ID NO: 388754 - DNA, 15 bp, Homo sapiens
tttttttgaccatgt

SEQ ID NO: 388755 - DNA, 15 bp, Homo sapiens
atttttttgaccatg

SEQ ID NO: 388756 - DNA, 15 bp, Homo sapiens
gatttttttgaccat

SEQ ID NO: 388757 - DNA, 15 bp, Homo sapiens
tgatttttttgacca

SEQ ID NO: 388758 - DNA, 15 bp, Homo sapiens
atgatttttttgacc

SEQ ID NO: 388759 - DNA, 15 bp, Homo sapiens
tatgatttttttgac

SEQ ID NO: 388760 - DNA, 15 bp, Homo sapiens
gtatgatttttttga

SEQ ID NO: 388761 - DNA, 15 bp, Homo sapiens
tgtatgatttttttg

SEQ ID NO: 388762 - DNA, 15 bp, Homo sapiens
gtgtatgattttttt

SEQ ID NO: 388763 - DNA, 15 bp, Homo sapiens
ggtgtatgatttttt

SEQ ID NO: 388764 - DNA, 15 bp, Homo sapiens
aggtgtatgattttt

SEQ ID NO: 388765 - DNA, 15 bp, Homo sapiens
gaggtgtatgatttt

SEQ ID NO: 388766 - DNA, 15 bp, Homo sapiens
tgaggtgtatgattt

SEQ ID NO: 388767 - DNA, 15 bp, Homo sapiens
ctgaggtgtatgatt

SEQ ID NO: 388768 - DNA, 15 bp, Homo sapiens
tctgaggtgtatgat

SEQ ID NO: 388769 - DNA, 15 bp, Homo sapiens
ttctgaggtgtatga

SEQ ID NO: 388770 - DNA, 15 bp, Homo sapiens
tttctgaggtgtatg

SEQ ID NO: 388771 - DNA, 15 bp, Homo sapiens
atttctgaggtgtat

SEQ ID NO: 388772 - DNA, 15 bp, Homo sapiens
tatttctgaggtgta

SEQ ID NO: 388773 - DNA, 15 bp, Homo sapiens
gtatttctgaggtgt

SEQ ID NO: 388774 - DNA, 15 bp, Homo sapiens
tgtatttctgaggtg

SEQ ID NO: 388775 - DNA, 15 bp, Homo sapiens
ctgtatttctgaggt

SEQ ID NO: 388776 - DNA, 15 bp, Homo sapiens
actgtatttctgagg

SEQ ID NO: 388777 - DNA, 15 bp, Homo sapiens
cactgtatttctgag

SEQ ID NO: 388778 - DNA, 15 bp, Homo sapiens
gcactgtatttctga

SEQ ID NO: 388779 - DNA, 15 bp, Homo sapiens
agcactgtatttctg

SEQ ID NO: 388780 - DNA, 15 bp, Homo sapiens
cagcactgtatttct

SEQ ID NO: 388781 - DNA, 15 bp, Homo sapiens
gcagcactgtatttc

SEQ ID NO: 388782 - DNA, 15 bp, Homo sapiens
tgcagcactgtattt

SEQ ID NO: 388783 - DNA, 15 bp, Homo sapiens
ctgcagcactgtatt

SEQ ID NO: 388784 - DNA, 15 bp, Homo sapiens
cctgcagcactgtat

SEQ ID NO: 388785 - DNA, 15 bp, Homo sapiens
ccctgcagcactgta

SEQ ID NO: 388786 - DNA, 15 bp, Homo sapiens
tccctgcagcactgt

SEQ ID NO: 388787 - DNA, 15 bp, Homo sapiens
ttccctgcagcactg

SEQ ID NO: 388788 - DNA, 15 bp, Homo sapiens
attccctgcagcact

SEQ ID NO: 388789 - DNA, 15 bp, Homo sapiens
aattccctgcagcac

SEQ ID NO: 388790 - DNA, 15 bp, Homo sapiens
taattccctgcagca

SEQ ID NO: 388791 - DNA, 15 bp, Homo sapiens
ataattccctgcagc

SEQ ID NO: 388792 - DNA, 15 bp, Homo sapiens
aataattccctgcag

SEQ ID NO: 388793 - DNA, 15 bp, Homo sapiens
aaataattccctgca

SEQ ID NO: 388794 - DNA, 15 bp, Homo sapiens
aaaataattccctgc

SEQ ID NO: 388795 - DNA, 15 bp, Homo sapiens
taaaataattccctg

SEQ ID NO: 388796 - DNA, 15 bp, Homo sapiens
ataaaataattccct

SEQ ID NO: 388797 - DNA, 15 bp, Homo sapiens
tataaaataattccc

SEQ ID NO: 388798 - DNA, 15 bp, Homo sapiens
ttataaaataattcc

SEQ ID NO: 388799 - DNA, 15 bp, Homo sapiens
attataaaataattc

SEQ ID NO: 388800 - DNA, 15 bp, Homo sapiens
tattataaaataatt

SEQ ID NO: 388801 - DNA, 15 bp, Homo sapiens
ttattataaaataat

SEQ ID NO: 388802 - DNA, 15 bp, Homo sapiens
attattataaaataa

SEQ ID NO: 388803 - DNA, 15 bp, Homo sapiens
aattattataaaata

SEQ ID NO: 388804 - DNA, 15 bp, Homo sapiens
taattattataaaat

SEQ ID NO: 388805 - DNA, 15 bp, Homo sapiens
ttaattattataaaa

SEQ ID NO: 388806 - DNA, 15 bp, Homo sapiens
cttaattattataaa

SEQ ID NO: 388807 - DNA, 15 bp, Homo sapiens
gcttaattattataa

SEQ ID NO: 388808 - DNA, 15 bp, Homo sapiens
ggcttaattattata

SEQ ID NO: 388809 - DNA, 15 bp, Homo sapiens
gggcttaattattat

SEQ ID NO: 388810 - DNA, 15 bp, Homo sapiens
agggcttaattatta

SEQ ID NO: 388811 - DNA, 15 bp, Homo sapiens
cagggcttaattatt

SEQ ID NO: 388812 - DNA, 15 bp, Homo sapiens
ccagggcttaattat

SEQ ID NO: 388813 - DNA, 15 bp, Homo sapiens
tccagggcttaatta

SEQ ID NO: 388814 - DNA, 15 bp, Homo sapiens
atccagggcttaatt

SEQ ID NO: 388815 - DNA, 15 bp, Homo sapiens
gatccagggcttaat

SEQ ID NO: 388816 - DNA, 15 bp, Homo sapiens
agatccagggcttaa

SEQ ID NO: 388817 - DNA, 15 bp, Homo sapiens
cagatccagggctta

SEQ ID NO: 388818 - DNA, 15 bp, Homo sapiens
gcagatccagggctt

SEQ ID NO: 388819 - DNA, 15 bp, Homo sapiens
ggcagatccagggct

SEQ ID NO: 388820 - DNA, 15 bp, Homo sapiens
tggcagatccagggc

SEQ ID NO: 388821 - DNA, 15 bp, Homo sapiens
atggcagatccaggg

SEQ ID NO: 388822 - DNA, 15 bp, Homo sapiens
catggcagatccagg

SEQ ID NO: 388823 - DNA, 15 bp, Homo sapiens
ccatggcagatccag

SEQ ID NO: 388824 - DNA, 15 bp, Homo sapiens
cccatggcagatcca

SEQ ID NO: 388825 - DNA, 15 bp, Homo sapiens
gcccatggcagatcc

SEQ ID NO: 388826 - DNA, 15 bp, Homo sapiens
agcccatggcagatc

SEQ ID NO: 388827 - DNA, 15 bp, Homo sapiens
gagcccatggcagat

SEQ ID NO: 388828 - DNA, 15 bp, Homo sapiens
tgagcccatggcaga

SEQ ID NO: 388829 - DNA, 15 bp, Homo sapiens
gtgagcccatggcag

SEQ ID NO: 388830 - DNA, 15 bp, Homo sapiens
agtgagcccatggca

SEQ ID NO: 388831 - DNA, 15 bp, Homo sapiens
tagtgagcccatggc

SEQ ID NO: 388832 - DNA, 15 bp, Homo sapiens
ttagtgagcccatgg

SEQ ID NO: 388833 - DNA, 15 bp, Homo sapiens
tttagtgagcccatg

SEQ ID NO: 388834 - DNA, 15 bp, Homo sapiens
gtttagtgagcccat

SEQ ID NO: 388835 - DNA, 15 bp, Homo sapiens
agtttagtgagccca

SEQ ID NO: 388836 - DNA, 15 bp, Homo sapiens
gagtttagtgagccc

SEQ ID NO: 388837 - DNA, 15 bp, Homo sapiens
agagtttagtgagcc

SEQ ID NO: 388838 - DNA, 15 bp, Homo sapiens
gagagtttagtgagc

SEQ ID NO: 388839 - DNA, 15 bp, Homo sapiens
tgagagtttagtgag

SEQ ID NO: 388840 - DNA, 15 bp, Homo sapiens
atgagagtttagtga

SEQ ID NO: 388841 - DNA, 15 bp, Homo sapiens
aatgagagtttagtg

SEQ ID NO: 388842 - DNA, 15 bp, Homo sapiens
gaatgagagtttagt

SEQ ID NO: 388843 - DNA, 15 bp, Homo sapiens
tgaatgagagtttag

SEQ ID NO: 388844 - DNA, 15 bp, Homo sapiens
gtgaatgagagttta

SEQ ID NO: 388845 - DNA, 15 bp, Homo sapiens
ggtgaatgagagttt

SEQ ID NO: 388846 - DNA, 15 bp, Homo sapiens
aggtgaatgagagtt

SEQ ID NO: 388847 - DNA, 15 bp, Homo sapiens
caggtgaatgagagt

SEQ ID NO: 388848 - DNA, 15 bp, Homo sapiens
acaggtgaatgagag

SEQ ID NO: 388849 - DNA, 15 bp, Homo sapiens
gacaggtgaatgaga

SEQ ID NO: 388850 - DNA, 15 bp, Homo sapiens
ggacaggtgaatgag

SEQ ID NO: 388851 - DNA, 15 bp, Homo sapiens
aggacaggtgaatga

SEQ ID NO: 388852 - DNA, 15 bp, Homo sapiens
gaggacaggtgaatg

SEQ ID NO: 388853 - DNA, 15 bp, Homo sapiens
agaggacaggtgaat

SEQ ID NO: 388854 - DNA, 15 bp, Homo sapiens
gagaggacaggtgaa

SEQ ID NO: 388855 - DNA, 15 bp, Homo sapiens
tgagaggacaggtga

SEQ ID NO: 388856 - DNA, 15 bp, Homo sapiens
gtgagaggacaggtg

SEQ ID NO: 388857 - DNA, 15 bp, Homo sapiens
ggtgagaggacaggt

SEQ ID NO: 388858 - DNA, 15 bp, Homo sapiens
aggtgagaggacagg

SEQ ID NO: 388859 - DNA, 15 bp, Homo sapiens
gaggtgagaggacag

SEQ ID NO: 388860 - DNA, 15 bp, Homo sapiens
agaggtgagaggaca

SEQ ID NO: 388861 - DNA, 15 bp, Homo sapiens
aagaggtgagaggac

SEQ ID NO: 388862 - DNA, 15 bp, Homo sapiens
gaagaggtgagagga

SEQ ID NO: 388863 - DNA, 15 bp, Homo sapiens
agaagaggtgagagg

SEQ ID NO: 388864 - DNA, 15 bp, Homo sapiens
gagaagaggtgagag

SEQ ID NO: 388865 - DNA, 15 bp, Homo sapiens
agagaagaggtgaga

SEQ ID NO: 388866 - DNA, 15 bp, Homo sapiens
aagagaagaggtgag

SEQ ID NO: 388867 - DNA, 15 bp, Homo sapiens
aaagagaagaggtga

SEQ ID NO: 388868 - DNA, 15 bp, Homo sapiens
taaagagaagaggtg

SEQ ID NO: 388869 - DNA, 15 bp, Homo sapiens
ataaagagaagaggt

SEQ ID NO: 388870 - DNA, 15 bp, Homo sapiens
tataaagagaagagg

SEQ ID NO: 388871 - DNA, 15 bp, Homo sapiens
atataaagagaagag

SEQ ID NO: 388872 - DNA, 15 bp, Homo sapiens
aatataaagagaaga

SEQ ID NO: 388873 - DNA, 15 bp, Homo sapiens
gaatataaagagaag

SEQ ID NO: 388874 - DNA, 15 bp, Homo sapiens
ggaatataaagagaa

SEQ ID NO: 388875 - DNA, 15 bp, Homo sapiens
gggaatataaagaga

SEQ ID NO: 388876 - DNA, 15 bp, Homo sapiens
tgggaatataaagag

SEQ ID NO: 388877 - DNA, 15 bp, Homo sapiens
ctgggaatataaaga

SEQ ID NO: 388878 - DNA, 15 bp, Homo sapiens
cctgggaatataaag

SEQ ID NO: 388879 - DNA, 15 bp, Homo sapiens
gcctgggaatataaa

SEQ ID NO: 388880 - DNA, 15 bp, Homo sapiens
ggcctgggaatataa

SEQ ID NO: 388881 - DNA, 15 bp, Homo sapiens
gggcctgggaatata

SEQ ID NO: 388882 - DNA, 15 bp, Homo sapiens
tgggcctgggaatat

SEQ ID NO: 388883 - DNA, 15 bp, Homo sapiens
gtgggcctgggaata

SEQ ID NO: 388884 - DNA, 15 bp, Homo sapiens
tgtgggcctgggaat

SEQ ID NO: 388885 - DNA, 15 bp, Homo sapiens
atgtgggcctgggaa

SEQ ID NO: 388886 - DNA, 15 bp, Homo sapiens
gatgtgggcctggga

SEQ ID NO: 388887 - DNA, 15 bp, Homo sapiens
tgatgtgggcctggg

SEQ ID NO: 388888 - DNA, 15 bp, Homo sapiens
ctgatgtgggcctgg

SEQ ID NO: 388889 - DNA, 15 bp, Homo sapiens
tctgatgtgggcctg

SEQ ID NO: 388890 - DNA, 15 bp, Homo sapiens
atctgatgtgggcct

SEQ ID NO: 388891 - DNA, 15 bp, Homo sapiens
catctgatgtgggcc

SEQ ID NO: 388892 - DNA, 15 bp, Homo sapiens
gcatctgatgtgggc

SEQ ID NO: 388893 - DNA, 15 bp, Homo sapiens
agcatctgatgtggg

SEQ ID NO: 388894 - DNA, 15 bp, Homo sapiens
gagcatctgatgtgg

SEQ ID NO: 388895 - DNA, 15 bp, Homo sapiens
agagcatctgatgtg

SEQ ID NO: 388896 - DNA, 15 bp, Homo sapiens
aagagcatctgatgt

SEQ ID NO: 388897 - DNA, 15 bp, Homo sapiens
aaagagcatctgatg

SEQ ID NO: 388898 - DNA, 15 bp, Homo sapiens
gaaagagcatctgat

SEQ ID NO: 388899 - DNA, 15 bp, Homo sapiens
tgaaagagcatctga

SEQ ID NO: 388900 - DNA, 15 bp, Homo sapiens
ctgaaagagcatctg

SEQ ID NO: 388901 - DNA, 15 bp, Homo sapiens
tctgaaagagcatct

SEQ ID NO: 388902 - DNA, 15 bp, Homo sapiens
ttctgaaagagcatc

SEQ ID NO: 388903 - DNA, 15 bp, Homo sapiens
attctgaaagagcat

SEQ ID NO: 388904 - DNA, 15 bp, Homo sapiens
cattctgaaagagca

SEQ ID NO: 388905 - DNA, 15 bp, Homo sapiens
acattctgaaagagc

SEQ ID NO: 388906 - DNA, 15 bp, Homo sapiens
aacattctgaaagag

SEQ ID NO: 388907 - DNA, 15 bp, Homo sapiens
aaacattctgaaaga

SEQ ID NO: 388908 - DNA, 15 bp, Homo sapiens
gaaacattctgaaag

SEQ ID NO: 388909 - DNA, 15 bp, Homo sapiens
agaaacattctgaaa

SEQ ID NO: 388910 - DNA, 15 bp, Homo sapiens
gagaaacattctgaa

SEQ ID NO: 388911 - DNA, 15 bp, Homo sapiens
agagaaacattctga

SEQ ID NO: 388912 - DNA, 15 bp, Homo sapiens
gagagaaacattctg

SEQ ID NO: 388913 - DNA, 15 bp, Homo sapiens
agagagaaacattct

SEQ ID NO: 388914 - DNA, 15 bp, Homo sapiens
gagagagaaacattc

SEQ ID NO: 388915 - DNA, 15 bp, Homo sapiens
ggagagagaaacatt

SEQ ID NO: 388916 - DNA, 15 bp, Homo sapiens
gggagagagaaacat

SEQ ID NO: 388917 - DNA, 15 bp, Homo sapiens
agggagagagaaaca

SEQ ID NO: 388918 - DNA, 15 bp, Homo sapiens
aagggagagagaaac

SEQ ID NO: 388919 - DNA, 15 bp, Homo sapiens
gaagggagagagaaa

SEQ ID NO: 388920 - DNA, 15 bp, Homo sapiens
ggaagggagagagaa

SEQ ID NO: 388921 - DNA, 15 bp, Homo sapiens
aggaagggagagaga

SEQ ID NO: 388922 - DNA, 15 bp, Homo sapiens
gaggaagggagagag

SEQ ID NO: 388923 - DNA, 15 bp, Homo sapiens
agaggaagggagaga

SEQ ID NO: 388924 - DNA, 15 bp, Homo sapiens
gagaggaagggagag

SEQ ID NO: 388925 - DNA, 15 bp, Homo sapiens
agagaggaagggaga

SEQ ID NO: 388926 - DNA, 15 bp, Homo sapiens
cagagaggaagggag

SEQ ID NO: 388927 - DNA, 15 bp, Homo sapiens
gcagagaggaaggga

SEQ ID NO: 388928 - DNA, 15 bp, Homo sapiens
agcagagaggaaggg

SEQ ID NO: 388929 - DNA, 15 bp, Homo sapiens
cagcagagaggaagg

SEQ ID NO: 388930 - DNA, 15 bp, Homo sapiens
acagcagagaggaag

SEQ ID NO: 388931 - DNA, 15 bp, Homo sapiens
gacagcagagaggaa

SEQ ID NO: 388932 - DNA, 15 bp, Homo sapiens
agacagcagagagga

SEQ ID NO: 388933 - DNA, 15 bp, Homo sapiens
cagacagcagagagg

SEQ ID NO: 388934 - DNA, 15 bp, Homo sapiens
gcagacagcagagag

SEQ ID NO: 388935 - DNA, 15 bp, Homo sapiens
ggcagacagcagaga

SEQ ID NO: 388936 - DNA, 15 bp, Homo sapiens
gggcagacagcagag

SEQ ID NO: 388937 - DNA, 15 bp, Homo sapiens
tgggcagacagcaga

SEQ ID NO: 388938 - DNA, 15 bp, Homo sapiens
gtgggcagacagcag

SEQ ID NO: 388939 - DNA, 15 bp, Homo sapiens
tgtgggcagacagca

SEQ ID NO: 388940 - DNA, 15 bp, Homo sapiens
ctgtgggcagacagc

SEQ ID NO: 388941 - DNA, 15 bp, Homo sapiens
gctgtgggcagacag

SEQ ID NO: 388942 - DNA, 15 bp, Homo sapiens
ggctgtgggcagaca

SEQ ID NO: 388943 - DNA, 15 bp, Homo sapiens
tggctgtgggcagac

SEQ ID NO: 388944 - DNA, 15 bp, Homo sapiens
gtggctgtgggcaga

SEQ ID NO: 388945 - DNA, 15 bp, Homo sapiens
agtggctgtgggcag

SEQ ID NO: 388946 - DNA, 15 bp, Homo sapiens
tagtggctgtgggca

SEQ ID NO: 388947 - DNA, 15 bp, Homo sapiens
gtagtggctgtgggc

SEQ ID NO: 388948 - DNA, 15 bp, Homo sapiens
ggtagtggctgtggg

SEQ ID NO: 388949 - DNA, 15 bp, Homo sapiens
gggtagtggctgtgg

SEQ ID NO: 388950 - DNA, 15 bp, Homo sapiens
agggtagtggctgtg

SEQ ID NO: 388951 - DNA, 15 bp, Homo sapiens
tagggtagtggctgt

SEQ ID NO: 388952 - DNA, 15 bp, Homo sapiens
atagggtagtggctg

SEQ ID NO: 388953 - DNA, 15 bp, Homo sapiens
aatagggtagtggct

SEQ ID NO: 388954 - DNA, 15 bp, Homo sapiens
aaatagggtagtggc

SEQ ID NO: 388955 - DNA, 15 bp, Homo sapiens
aaaatagggtagtgg

SEQ ID NO: 388956 - DNA, 15 bp, Homo sapiens
aaaaatagggtagtg

SEQ ID NO: 388957 - DNA, 15 bp, Homo sapiens
gaaaaatagggtagt

SEQ ID NO: 388958 - DNA, 15 bp, Homo sapiens
agaaaaatagggtag

SEQ ID NO: 388959 - DNA, 15 bp, Homo sapiens
tagaaaaatagggta

SEQ ID NO: 388960 - DNA, 15 bp, Homo sapiens
ttagaaaaatagggt

SEQ ID NO: 388961 - DNA, 15 bp, Homo sapiens
tttagaaaaataggg

SEQ ID NO: 388962 - DNA, 15 bp, Homo sapiens
ctttagaaaaatagg

SEQ ID NO: 388963 - DNA, 15 bp, Homo sapiens
gctttagaaaaatag

SEQ ID NO: 388964 - DNA, 15 bp, Homo sapiens
tgctttagaaaaata

SEQ ID NO: 388965 - DNA, 15 bp, Homo sapiens
gtgctttagaaaaat

SEQ ID NO: 388966 - DNA, 15 bp, Homo sapiens
tgtgctttagaaaaa

SEQ ID NO: 388967 - DNA, 15 bp, Homo sapiens
atgtgctttagaaaa

SEQ ID NO: 388968 - DNA, 15 bp, Homo sapiens
catgtgctttagaaa

SEQ ID NO: 388969 - DNA, 15 bp, Homo sapiens
ccatgtgctttagaa

SEQ ID NO: 388970 - DNA, 15 bp, Homo sapiens
accatgtgctttaga

SEQ ID NO: 388971 - DNA, 15 bp, Homo sapiens
caccatgtgctttag

SEQ ID NO: 388972 - DNA, 15 bp, Homo sapiens
ccaccatgtgcttta

SEQ ID NO: 388973 - DNA, 15 bp, Homo sapiens
cccaccatgtgcttt

SEQ ID NO: 388974 - DNA, 15 bp, Homo sapiens
tcccaccatgtgctt

SEQ ID NO: 388975 - DNA, 15 bp, Homo sapiens
gtcccaccatgtgct

SEQ ID NO: 388976 - DNA, 15 bp, Homo sapiens
ggtcccaccatgtgc

SEQ ID NO: 388977 - DNA, 15 bp, Homo sapiens
aggtcccaccatgtg

SEQ ID NO: 388978 - DNA, 15 bp, Homo sapiens
aaggtcccaccatgt

SEQ ID NO: 388979 - DNA, 15 bp, Homo sapiens
gaaggtcccaccatg

SEQ ID NO: 388980 - DNA, 15 bp, Homo sapiens
ggaaggtcccaccat

SEQ ID NO: 388981 - DNA, 15 bp, Homo sapiens
tggaaggtcccacca

SEQ ID NO: 388982 - DNA, 15 bp, Homo sapiens
atggaaggtcccacc

SEQ ID NO: 388983 - DNA, 15 bp, Homo sapiens
aatggaaggtcccac

SEQ ID NO: 388984 - DNA, 15 bp, Homo sapiens
gaatggaaggtccca

SEQ ID NO: 388985 - DNA, 15 bp, Homo sapiens
tgaatggaaggtccc

SEQ ID NO: 388986 - DNA, 15 bp, Homo sapiens
ttgaatggaaggtcc

SEQ ID NO: 388987 - DNA, 15 bp, Homo sapiens
tttgaatggaaggtc

SEQ ID NO: 388988 - DNA, 15 bp, Homo sapiens
ctttgaatggaaggt

SEQ ID NO: 388989 - DNA, 15 bp, Homo sapiens
gctttgaatggaagg

SEQ ID NO: 388990 - DNA, 15 bp, Homo sapiens
agctttgaatggaag

SEQ ID NO: 388991 - DNA, 15 bp, Homo sapiens
cagctttgaatggaa

SEQ ID NO: 388992 - DNA, 15 bp, Homo sapiens
tcagctttgaatgga

SEQ ID NO: 388993 - DNA, 15 bp, Homo sapiens
gtcagctttgaatgg

SEQ ID NO: 388994 - DNA, 15 bp, Homo sapiens
agtcagctttgaatg

SEQ ID NO: 388995 - DNA, 15 bp, Homo sapiens
aagtcagctttgaat

SEQ ID NO: 388996 - DNA, 15 bp, Homo sapiens
aaagtcagctttgaa

SEQ ID NO: 388997 - DNA, 15 bp, Homo sapiens
caaagtcagctttga

SEQ ID NO: 388998 - DNA, 15 bp, Homo sapiens
tcaaagtcagctttg

SEQ ID NO: 388999 - DNA, 15 bp, Homo sapiens
ctcaaagtcagcttt

SEQ ID NO: 389000 - DNA, 15 bp, Homo sapiens
actcaaagtcagctt

SEQ ID NO: 389001 - DNA, 15 bp, Homo sapiens
aactcaaagtcagct

SEQ ID NO: 389002 - DNA, 15 bp, Homo sapiens
aaactcaaagtcagc

SEQ ID NO: 389003 - DNA, 15 bp, Homo sapiens
caaactcaaagtcag

SEQ ID NO: 389004 - DNA, 15 bp, Homo sapiens
tcaaactcaaagtca

SEQ ID NO: 389005 - DNA, 15 bp, Homo sapiens
gtcaaactcaaagtc

SEQ ID NO: 389006 - DNA, 15 bp, Homo sapiens
tgtcaaactcaaagt

SEQ ID NO: 389007 - DNA, 15 bp, Homo sapiens
ctgtcaaactcaaag

SEQ ID NO: 389008 - DNA, 15 bp, Homo sapiens
actgtcaaactcaaa

SEQ ID NO: 389009 - DNA, 15 bp, Homo sapiens
aactgtcaaactcaa

SEQ ID NO: 389010 - DNA, 15 bp, Homo sapiens
gaactgtcaaactca

SEQ ID NO: 389011 - DNA, 15 bp, Homo sapiens
tgaactgtcaaactc

SEQ ID NO: 389012 - DNA, 15 bp, Homo sapiens
ctgaactgtcaaact

SEQ ID NO: 389013 - DNA, 15 bp, Homo sapiens
tctgaactgtcaaac

SEQ ID NO: 389014 - DNA, 15 bp, Homo sapiens
gtctgaactgtcaaa

SEQ ID NO: 389015 - DNA, 15 bp, Homo sapiens
tgtctgaactgtcaa

SEQ ID NO: 389016 - DNA, 15 bp, Homo sapiens
ctgtctgaactgtca

SEQ ID NO: 389017 - DNA, 15 bp, Homo sapiens
gctgtctgaactgtc

SEQ ID NO: 389018 - DNA, 15 bp, Homo sapiens
tgctgtctgaactgt

SEQ ID NO: 389019 - DNA, 15 bp, Homo sapiens
ttgctgtctgaactg

SEQ ID NO: 389020 - DNA, 15 bp, Homo sapiens
tttgctgtctgaact

SEQ ID NO: 389021 - DNA, 15 bp, Homo sapiens
atttgctgtctgaac

SEQ ID NO: 389022 - DNA, 15 bp, Homo sapiens
catttgctgtctgaa

SEQ ID NO: 389023 - DNA, 15 bp, Homo sapiens
gcatttgctgtctga

SEQ ID NO: 389024 - DNA, 15 bp, Homo sapiens
ggcatttgctgtctg

SEQ ID NO: 389025 - DNA, 15 bp, Homo sapiens
aggcatttgctgtct

SEQ ID NO: 389026 - DNA, 15 bp, Homo sapiens
taggcatttgctgtc

SEQ ID NO: 389027 - DNA, 15 bp, Homo sapiens
ttaggcatttgctgt

SEQ ID NO: 389028 - DNA, 15 bp, Homo sapiens
tttaggcatttgctg

SEQ ID NO: 389029 - DNA, 15 bp, Homo sapiens
gtttaggcatttgct

SEQ ID NO: 389030 - DNA, 15 bp, Homo sapiens
ggtttaggcatttgc

SEQ ID NO: 389031 - DNA, 15 bp, Homo sapiens
gggtttaggcatttg

SEQ ID NO: 389032 - DNA, 15 bp, Homo sapiens
ggggtttaggcattt

SEQ ID NO: 389033 - DNA, 15 bp, Homo sapiens
gggggtttaggcatt

SEQ ID NO: 389034 - DNA, 15 bp, Homo sapiens
agggggtttaggcat

SEQ ID NO: 389035 - DNA, 15 bp, Homo sapiens
gagggggtttaggca

SEQ ID NO: 389036 - DNA, 15 bp, Homo sapiens
ggagggggtttaggc

SEQ ID NO: 389037 - DNA, 15 bp, Homo sapiens
aggagggggtttagg

SEQ ID NO: 389038 - DNA, 15 bp, Homo sapiens
gaggagggggtttag

SEQ ID NO: 389039 - DNA, 15 bp, Homo sapiens
tgaggagggggttta

SEQ ID NO: 389040 - DNA, 15 bp, Homo sapiens
atgaggagggggttt

SEQ ID NO: 389041 - DNA, 15 bp, Homo sapiens
gatgaggagggggtt

SEQ ID NO: 389042 - DNA, 15 bp, Homo sapiens
tgatgaggagggggt

SEQ ID NO: 389043 - DNA, 15 bp, Homo sapiens
ttgatgaggaggggg

SEQ ID NO: 389044 - DNA, 15 bp, Homo sapiens
tttgatgaggagggg

SEQ ID NO: 389045 - DNA, 15 bp, Homo sapiens
ctttgatgaggaggg

SEQ ID NO: 389046 - DNA, 15 bp, Homo sapiens
gctttgatgaggagg

SEQ ID NO: 389047 - DNA, 15 bp, Homo sapiens
ggctttgatgaggag

SEQ ID NO: 389048 - DNA, 15 bp, Homo sapiens
gggctttgatgagga

SEQ ID NO: 389049 - DNA, 15 bp, Homo sapiens
cgggctttgatgagg

SEQ ID NO: 389050 - DNA, 15 bp, Homo sapiens
ccgggctttgatgag

SEQ ID NO: 389051 - DNA, 15 bp, Homo sapiens
cccgggctttgatga

SEQ ID NO: 389052 - DNA, 15 bp, Homo sapiens
acccgggctttgatg

SEQ ID NO: 389053 - DNA, 15 bp, Homo sapiens
cacccgggctttgat

SEQ ID NO: 389054 - DNA, 15 bp, Homo sapiens
tcacccgggctttga

SEQ ID NO: 389055 - DNA, 15 bp, Homo sapiens
gtcacccgggctttg

SEQ ID NO: 389056 - DNA, 15 bp, Homo sapiens
tgtcacccgggcttt

SEQ ID NO: 389057 - DNA, 15 bp, Homo sapiens
ctgtcacccgggctt

SEQ ID NO: 389058 - DNA, 15 bp, Homo sapiens
tctgtcacccgggct

SEQ ID NO: 389059 - DNA, 15 bp, Homo sapiens
atctgtcacccgggc

SEQ ID NO: 389060 - DNA, 15 bp, Homo sapiens
catctgtcacccggg

SEQ ID NO: 389061 - DNA, 15 bp, Homo sapiens
tcatctgtcacccgg

SEQ ID NO: 389062 - DNA, 15 bp, Homo sapiens
atcatctgtcacccg

SEQ ID NO: 389063 - DNA, 15 bp, Homo sapiens
gatcatctgtcaccc

SEQ ID NO: 389064 - DNA, 15 bp, Homo sapiens
ggatcatctgtcacc

SEQ ID NO: 389065 - DNA, 15 bp, Homo sapiens
aggatcatctgtcac

SEQ ID NO: 389066 - DNA, 15 bp, Homo sapiens
caggatcatctgtca

SEQ ID NO: 389067 - DNA, 15 bp, Homo sapiens
ccaggatcatctgtc

SEQ ID NO: 389068 - DNA, 15 bp, Homo sapiens
cccaggatcatctgt

SEQ ID NO: 389069 - DNA, 15 bp, Homo sapiens
acccaggatcatctg

SEQ ID NO: 389070 - DNA, 15 bp, Homo sapiens
cacccaggatcatct

SEQ ID NO: 389071 - DNA, 15 bp, Homo sapiens
tcacccaggatcatc

SEQ ID NO: 389072 - DNA, 15 bp, Homo sapiens
ctcacccaggatcat

SEQ ID NO: 389073 - DNA, 15 bp, Homo sapiens
tctcacccaggatca

SEQ ID NO: 389074 - DNA, 15 bp, Homo sapiens
ttctcacccaggatc

SEQ ID NO: 389075 - DNA, 15 bp, Homo sapiens
attctcacccaggat

SEQ ID NO: 389076 - DNA, 15 bp, Homo sapiens
aattctcacccagga

SEQ ID NO: 389077 - DNA, 15 bp, Homo sapiens
aaattctcacccagg

SEQ ID NO: 389078 - DNA, 15 bp, Homo sapiens
gaaattctcacccag

SEQ ID NO: 389079 - DNA, 15 bp, Homo sapiens
tgaaattctcaccca

SEQ ID NO: 389080 - DNA, 15 bp, Homo sapiens
ctgaaattctcaccc

SEQ ID NO: 389081 - DNA, 15 bp, Homo sapiens
gctgaaattctcacc

SEQ ID NO: 389082 - DNA, 15 bp, Homo sapiens
agctgaaattctcac

SEQ ID NO: 389083 - DNA, 15 bp, Homo sapiens
gagctgaaattctca

SEQ ID NO: 389084 - DNA, 15 bp, Homo sapiens
agagctgaaattctc

SEQ ID NO: 389085 - DNA, 15 bp, Homo sapiens
cagagctgaaattct

SEQ ID NO: 389086 - DNA, 15 bp, Homo sapiens
ccagagctgaaattc

SEQ ID NO: 389087 - DNA, 15 bp, Homo sapiens
tccagagctgaaatt

SEQ ID NO: 389088 - DNA, 15 bp, Homo sapiens
ctccagagctgaaat

SEQ ID NO: 389089 - DNA, 15 bp, Homo sapiens
tctccagagctgaaa

SEQ ID NO: 389090 - DNA, 15 bp, Homo sapiens
ctctccagagctgaa

SEQ ID NO: 389091 - DNA, 15 bp, Homo sapiens
cctctccagagctga

SEQ ID NO: 389092 - DNA, 15 bp, Homo sapiens
ccctctccagagctg

SEQ ID NO: 389093 - DNA, 15 bp, Homo sapiens
cccctctccagagct

SEQ ID NO: 389094 - DNA, 15 bp, Homo sapiens
tcccctctccagagc

SEQ ID NO: 389095 - DNA, 15 bp, Homo sapiens
ctcccctctccagag

SEQ ID NO: 389096 - DNA, 15 bp, Homo sapiens
cctcccctctccaga

SEQ ID NO: 389097 - DNA, 15 bp, Homo sapiens
tcctcccctctccag

SEQ ID NO: 389098 - DNA, 15 bp, Homo sapiens
ttcctcccctctcca

SEQ ID NO: 389099 - DNA, 15 bp, Homo sapiens
tttcctcccctctcc

SEQ ID NO: 389100 - DNA, 15 bp, Homo sapiens
atttcctcccctctc

SEQ ID NO: 389101 - DNA, 15 bp, Homo sapiens
catttcctcccctct

SEQ ID NO: 389102 - DNA, 15 bp, Homo sapiens
tcatttcctcccctc

SEQ ID NO: 389103 - DNA, 15 bp, Homo sapiens
ttcatttcctcccct

SEQ ID NO: 389104 - DNA, 15 bp, Homo sapiens
attcatttcctcccc

SEQ ID NO: 389105 - DNA, 15 bp, Homo sapiens
tattcatttcctccc

SEQ ID NO: 389106 - DNA, 15 bp, Homo sapiens
ttattcatttcctcc

SEQ ID NO: 389107 - DNA, 15 bp, Homo sapiens
cttattcatttcctc

SEQ ID NO: 389108 - DNA, 15 bp, Homo sapiens
gcttattcatttcct

SEQ ID NO: 389109 - DNA, 15 bp, Homo sapiens
tgcttattcatttcc

SEQ ID NO: 389110 - DNA, 15 bp, Homo sapiens
ctgcttattcatttc

SEQ ID NO: 389111 - DNA, 15 bp, Homo sapiens
actgcttattcattt

SEQ ID NO: 389112 - DNA, 15 bp, Homo sapiens
gactgcttattcatt

SEQ ID NO: 389113 - DNA, 15 bp, Homo sapiens
tgactgcttattcat

SEQ ID NO: 389114 - DNA, 15 bp, Homo sapiens
ttgactgcttattca

SEQ ID NO: 389115 - DNA, 15 bp, Homo sapiens
tttgactgcttattc

SEQ ID NO: 389116 - DNA, 15 bp, Homo sapiens
atttgactgcttatt

SEQ ID NO: 389117 - DNA, 15 bp, Homo sapiens
catttgactgcttat

SEQ ID NO: 389118 - DNA, 15 bp, Homo sapiens
acatttgactgctta

SEQ ID NO: 389119 - DNA, 15 bp, Homo sapiens
gacatttgactgctt

SEQ ID NO: 389120 - DNA, 15 bp, Homo sapiens
tgacatttgactgct

SEQ ID NO: 389121 - DNA, 15 bp, Homo sapiens
ttgacatttgactgc

SEQ ID NO: 389122 - DNA, 15 bp, Homo sapiens
cttgacatttgactg

SEQ ID NO: 389123 - DNA, 15 bp, Homo sapiens
acttgacatttgact

SEQ ID NO: 389124 - DNA, 15 bp, Homo sapiens
gacttgacatttgac

SEQ ID NO: 389125 - DNA, 15 bp, Homo sapiens
agacttgacatttga

SEQ ID NO: 389126 - DNA, 15 bp, Homo sapiens
cagacttgacatttg

SEQ ID NO: 389127 - DNA, 15 bp, Homo sapiens
gcagacttgacattt

SEQ ID NO: 389128 - DNA, 15 bp, Homo sapiens
agcagacttgacatt

SEQ ID NO: 389129 - DNA, 15 bp, Homo sapiens
cagcagacttgacat

SEQ ID NO: 389130 - DNA, 15 bp, Homo sapiens
tcagcagacttgaca

SEQ ID NO: 389131 - DNA, 15 bp, Homo sapiens
gtcagcagacttgac

SEQ ID NO: 389132 - DNA, 15 bp, Homo sapiens
agtcagcagacttga

SEQ ID NO: 389133 - DNA, 15 bp, Homo sapiens
aagtcagcagacttg

SEQ ID NO: 389134 - DNA, 15 bp, Homo sapiens
gaagtcagcagactt

SEQ ID NO: 389135 - DNA, 15 bp, Homo sapiens
agaagtcagcagact

SEQ ID NO: 389136 - DNA, 15 bp, Homo sapiens
aagaagtcagcagac

SEQ ID NO: 389137 - DNA, 15 bp, Homo sapiens
taagaagtcagcaga

SEQ ID NO: 389138 - DNA, 15 bp, Homo sapiens
ctaagaagtcagcag

SEQ ID NO: 389139 - DNA, 15 bp, Homo sapiens
cctaagaagtcagca

SEQ ID NO: 389140 - DNA, 15 bp, Homo sapiens
tcctaagaagtcagc

SEQ ID NO: 389141 - DNA, 15 bp, Homo sapiens
ttcctaagaagtcag

SEQ ID NO: 389142 - DNA, 15 bp, Homo sapiens
tttcctaagaagtca

SEQ ID NO: 389143 - DNA, 15 bp, Homo sapiens
ctttcctaagaagtc

SEQ ID NO: 389144 - DNA, 15 bp, Homo sapiens
tctttcctaagaagt

SEQ ID NO: 389145 - DNA, 15 bp, Homo sapiens
ttctttcctaagaag

SEQ ID NO: 389146 - DNA, 15 bp, Homo sapiens
tttctttcctaagaa

SEQ ID NO: 389147 - DNA, 15 bp, Homo sapiens
ctttctttcctaaga

SEQ ID NO: 389148 - DNA, 15 bp, Homo sapiens
tctttctttcctaag

SEQ ID NO: 389149 - DNA, 15 bp, Homo sapiens
ctctttctttcctaa

SEQ ID NO: 389150 - DNA, 15 bp, Homo sapiens
tctctttctttccta

SEQ ID NO: 389151 - DNA, 15 bp, Homo sapiens
ttctctttctttcct

SEQ ID NO: 389152 - DNA, 15 bp, Homo sapiens
cttctctttctttcc

SEQ ID NO: 389153 - DNA, 15 bp, Homo sapiens
tcttctctttctttc

SEQ ID NO: 389154 - DNA, 15 bp, Homo sapiens
atcttctctttcttt

SEQ ID NO: 389155 - DNA, 15 bp, Homo sapiens
tatcttctctttctt

SEQ ID NO: 389156 - DNA, 15 bp, Homo sapiens
gtatcttctctttct

SEQ ID NO: 389157 - DNA, 15 bp, Homo sapiens
agtatcttctctttc

SEQ ID NO: 389158 - DNA, 15 bp, Homo sapiens
aagtatcttctcttt

SEQ ID NO: 389159 - DNA, 15 bp, Homo sapiens
taagtatcttctctt

SEQ ID NO: 389160 - DNA, 15 bp, Homo sapiens
ataagtatcttctct

SEQ ID NO: 389161 - DNA, 15 bp, Homo sapiens
tataagtatcttctc

SEQ ID NO: 389162 - DNA, 15 bp, Homo sapiens
ttataagtatcttct

SEQ ID NO: 389163 - DNA, 15 bp, Homo sapiens
attataagtatcttc

SEQ ID NO: 389164 - DNA, 15 bp, Homo sapiens
tattataagtatctt

SEQ ID NO: 389165 - DNA, 15 bp, Homo sapiens
gtattataagtatct

SEQ ID NO: 389166 - DNA, 15 bp, Homo sapiens
agtattataagtatc

SEQ ID NO: 389167 - DNA, 15 bp, Homo sapiens
cagtattataagtat

SEQ ID NO: 389168 - DNA, 15 bp, Homo sapiens
ccagtattataagta

SEQ ID NO: 389169 - DNA, 15 bp, Homo sapiens
tccagtattataagt

SEQ ID NO: 389170 - DNA, 15 bp, Homo sapiens
gtccagtattataag

SEQ ID NO: 389171 - DNA, 15 bp, Homo sapiens
tgtccagtattataa

SEQ ID NO: 389172 - DNA, 15 bp, Homo sapiens
ctgtccagtattata

SEQ ID NO: 389173 - DNA, 15 bp, Homo sapiens
cctgtccagtattat

SEQ ID NO: 389174 - DNA, 15 bp, Homo sapiens
tcctgtccagtatta

SEQ ID NO: 389175 - DNA, 15 bp, Homo sapiens
ctcctgtccagtatt

SEQ ID NO: 389176 - DNA, 15 bp, Homo sapiens
cctcctgtccagtat

SEQ ID NO: 389177 - DNA, 15 bp, Homo sapiens
ccctcctgtccagta

SEQ ID NO: 389178 - DNA, 15 bp, Homo sapiens
gccctcctgtccagt

SEQ ID NO: 389179 - DNA, 15 bp, Homo sapiens
agccctcctgtccag

SEQ ID NO: 389180 - DNA, 15 bp, Homo sapiens
aagccctcctgtcca

SEQ ID NO: 389181 - DNA, 15 bp, Homo sapiens
aaagccctcctgtcc

SEQ ID NO: 389182 - DNA, 15 bp, Homo sapiens
caaagccctcctgtc

SEQ ID NO: 389183 - DNA, 15 bp, Homo sapiens
ccaaagccctcctgt

SEQ ID NO: 389184 - DNA, 15 bp, Homo sapiens
gccaaagccctcctg

SEQ ID NO: 389185 - DNA, 15 bp, Homo sapiens
agccaaagccctcct

SEQ ID NO: 389186 - DNA, 15 bp, Homo sapiens
aagccaaagccctcc

SEQ ID NO: 389187 - DNA, 15 bp, Homo sapiens
taagccaaagccctc

SEQ ID NO: 389188 - DNA, 15 bp, Homo sapiens
gtaagccaaagccct

SEQ ID NO: 389189 - DNA, 15 bp, Homo sapiens
tgtaagccaaagccc

SEQ ID NO: 389190 - DNA, 15 bp, Homo sapiens
atgtaagccaaagcc

SEQ ID NO: 389191 - DNA, 15 bp, Homo sapiens
aatgtaagccaaagc

SEQ ID NO: 389192 - DNA, 15 bp, Homo sapiens
aaatgtaagccaaag

SEQ ID NO: 389193 - DNA, 15 bp, Homo sapiens
caaatgtaagccaaa

SEQ ID NO: 389194 - DNA, 15 bp, Homo sapiens
gcaaatgtaagccaa

SEQ ID NO: 389195 - DNA, 15 bp, Homo sapiens
ggcaaatgtaagcca

SEQ ID NO: 389196 - DNA, 15 bp, Homo sapiens
tggcaaatgtaagcc

SEQ ID NO: 389197 - DNA, 15 bp, Homo sapiens
ctggcaaatgtaagc

SEQ ID NO: 389198 - DNA, 15 bp, Homo sapiens
gctggcaaatgtaag

SEQ ID NO: 389199 - DNA, 15 bp, Homo sapiens
tgctggcaaatgtaa

SEQ ID NO: 389200 - DNA, 15 bp, Homo sapiens
atgctggcaaatgta

SEQ ID NO: 389201 - DNA, 15 bp, Homo sapiens
aatgctggcaaatgt

SEQ ID NO: 389202 - DNA, 15 bp, Homo sapiens
taatgctggcaaatg

SEQ ID NO: 389203 - DNA, 15 bp, Homo sapiens
ataatgctggcaaat

SEQ ID NO: 389204 - DNA, 15 bp, Homo sapiens
tataatgctggcaaa

SEQ ID NO: 389205 - DNA, 15 bp, Homo sapiens
gtataatgctggcaa

SEQ ID NO: 389206 - DNA, 15 bp, Homo sapiens
agtataatgctggca

SEQ ID NO: 389207 - DNA, 15 bp, Homo sapiens
tagtataatgctggc

SEQ ID NO: 389208 - DNA, 15 bp, Homo sapiens
ttagtataatgctgg

SEQ ID NO: 389209 - DNA, 15 bp, Homo sapiens
tttagtataatgctg

SEQ ID NO: 389210 - DNA, 15 bp, Homo sapiens
atttagtataatgct

SEQ ID NO: 389211 - DNA, 15 bp, Homo sapiens
tatttagtataatgc

SEQ ID NO: 389212 - DNA, 15 bp, Homo sapiens
ctatttagtataatg

SEQ ID NO: 389213 - DNA, 15 bp, Homo sapiens
cctatttagtataat

SEQ ID NO: 389214 - DNA, 15 bp, Homo sapiens
ccctatttagtataa

SEQ ID NO: 389215 - DNA, 15 bp, Homo sapiens
tccctatttagtata

SEQ ID NO: 389216 - DNA, 15 bp, Homo sapiens
ttccctatttagtat

SEQ ID NO: 389217 - DNA, 15 bp, Homo sapiens
tttccctatttagta

SEQ ID NO: 389218 - DNA, 15 bp, Homo sapiens
ttttccctatttagt

SEQ ID NO: 389219 - DNA, 15 bp, Homo sapiens
attttccctatttag

SEQ ID NO: 389220 - DNA, 15 bp, Homo sapiens
cattttccctattta

SEQ ID NO: 389221 - DNA, 15 bp, Homo sapiens
acattttccctattt

SEQ ID NO: 389222 - DNA, 15 bp, Homo sapiens
gacattttccctatt

SEQ ID NO: 389223 - DNA, 15 bp, Homo sapiens
tgacattttccctat

SEQ ID NO: 389224 - DNA, 15 bp, Homo sapiens
ctgacattttcccta

SEQ ID NO: 389225 - DNA, 15 bp, Homo sapiens
gctgacattttccct

SEQ ID NO: 389226 - DNA, 15 bp, Homo sapiens
agctgacattttccc

SEQ ID NO: 389227 - DNA, 15 bp, Homo sapiens
cagctgacattttcc

SEQ ID NO: 389228 - DNA, 15 bp, Homo sapiens
tcagctgacattttc

SEQ ID NO: 389229 - DNA, 15 bp, Homo sapiens
ctcagctgacatttt

SEQ ID NO: 389230 - DNA, 15 bp, Homo sapiens
actcagctgacattt

SEQ ID NO: 389231 - DNA, 15 bp, Homo sapiens
gactcagctgacatt

SEQ ID NO: 389232 - DNA, 15 bp, Homo sapiens
ggactcagctgacat

SEQ ID NO: 389233 - DNA, 15 bp, Homo sapiens
gggactcagctgaca

SEQ ID NO: 389234 - DNA, 15 bp, Homo sapiens
tgggactcagctgac

SEQ ID NO: 389235 - DNA, 15 bp, Homo sapiens
gtgggactcagctga

SEQ ID NO: 389236 - DNA, 15 bp, Homo sapiens
tgtgggactcagctg

SEQ ID NO: 389237 - DNA, 15 bp, Homo sapiens
atgtgggactcagct

SEQ ID NO: 389238 - DNA, 15 bp, Homo sapiens
catgtgggactcagc

SEQ ID NO: 389239 - DNA, 15 bp, Homo sapiens
acatgtgggactcag

SEQ ID NO: 389240 - DNA, 15 bp, Homo sapiens
tacatgtgggactca

SEQ ID NO: 389241 - DNA, 15 bp, Homo sapiens
ctacatgtgggactc

SEQ ID NO: 389242 - DNA, 15 bp, Homo sapiens
tctacatgtgggact

SEQ ID NO: 389243 - DNA, 15 bp, Homo sapiens
atctacatgtgggac

SEQ ID NO: 389244 - DNA, 15 bp, Homo sapiens
aatctacatgtggga

SEQ ID NO: 389245 - DNA, 15 bp, Homo sapiens
gaatctacatgtggg

SEQ ID NO: 389246 - DNA, 15 bp, Homo sapiens
ggaatctacatgtgg

SEQ ID NO: 389247 - DNA, 15 bp, Homo sapiens
aggaatctacatgtg

SEQ ID NO: 389248 - DNA, 15 bp, Homo sapiens
aaggaatctacatgt

SEQ ID NO: 389249 - DNA, 15 bp, Homo sapiens
caaggaatctacatg

SEQ ID NO: 389250 - DNA, 15 bp, Homo sapiens
acaaggaatctacat

SEQ ID NO: 389251 - DNA, 15 bp, Homo sapiens
gacaaggaatctaca

SEQ ID NO: 389252 - DNA, 15 bp, Homo sapiens
tgacaaggaatctac

SEQ ID NO: 389253 - DNA, 15 bp, Homo sapiens
atgacaaggaatcta

SEQ ID NO: 389254 - DNA, 15 bp, Homo sapiens
gatgacaaggaatct

SEQ ID NO: 389255 - DNA, 15 bp, Homo sapiens
agatgacaaggaatc

SEQ ID NO: 389256 - DNA, 15 bp, Homo sapiens
aagatgacaaggaat

SEQ ID NO: 389257 - DNA, 15 bp, Homo sapiens
caagatgacaaggaa

SEQ ID NO: 389258 - DNA, 15 bp, Homo sapiens
ccaagatgacaagga

SEQ ID NO: 389259 - DNA, 15 bp, Homo sapiens
accaagatgacaagg

SEQ ID NO: 389260 - DNA, 15 bp, Homo sapiens
caccaagatgacaag

SEQ ID NO: 389261 - DNA, 15 bp, Homo sapiens
acaccaagatgacaa

SEQ ID NO: 389262 - DNA, 15 bp, Homo sapiens
aacaccaagatgaca

SEQ ID NO: 389263 - DNA, 15 bp, Homo sapiens
aaacaccaagatgac

SEQ ID NO: 389264 - DNA, 15 bp, Homo sapiens
aaaacaccaagatga

SEQ ID NO: 389265 - DNA, 15 bp, Homo sapiens
gaaaacaccaagatg

SEQ ID NO: 389266 - DNA, 15 bp, Homo sapiens
ggaaaacaccaagat

SEQ ID NO: 389267 - DNA, 15 bp, Homo sapiens
aggaaaacaccaaga

SEQ ID NO: 389268 - DNA, 15 bp, Homo sapiens
caggaaaacaccaag

SEQ ID NO: 389269 - DNA, 15 bp, Homo sapiens
tcaggaaaacaccaa

SEQ ID NO: 389270 - DNA, 15 bp, Homo sapiens
ctcaggaaaacacca

SEQ ID NO: 389271 - DNA, 15 bp, Homo sapiens
actcaggaaaacacc

SEQ ID NO: 389272 - DNA, 15 bp, Homo sapiens
cactcaggaaaacac

SEQ ID NO: 389273 - DNA, 15 bp, Homo sapiens
acactcaggaaaaca

SEQ ID NO: 389274 - DNA, 15 bp, Homo sapiens
tacactcaggaaaac

SEQ ID NO: 389275 - DNA, 15 bp, Homo sapiens
ttacactcaggaaaa

SEQ ID NO: 389276 - DNA, 15 bp, Homo sapiens
tttacactcaggaaa

SEQ ID NO: 389277 - DNA, 15 bp, Homo sapiens
ttttacactcaggaa

SEQ ID NO: 389278 - DNA, 15 bp, Homo sapiens
attttacactcagga

SEQ ID NO: 389279 - DNA, 15 bp, Homo sapiens
aattttacactcagg

SEQ ID NO: 389280 - DNA, 15 bp, Homo sapiens
taattttacactcag

SEQ ID NO: 389281 - DNA, 15 bp, Homo sapiens
ttaattttacactca

SEQ ID NO: 389282 - DNA, 15 bp, Homo sapiens
tttaattttacactc

SEQ ID NO: 389283 - DNA, 15 bp, Homo sapiens
ttttaattttacact

SEQ ID NO: 389284 - DNA, 15 bp, Homo sapiens
gttttaattttacac

SEQ ID NO: 389285 - DNA, 15 bp, Homo sapiens
agttttaattttaca

SEQ ID NO: 389286 - DNA, 15 bp, Homo sapiens
gagttttaattttac

SEQ ID NO: 389287 - DNA, 15 bp, Homo sapiens
ggagttttaatttta

SEQ ID NO: 389288 - DNA, 15 bp, Homo sapiens
tggagttttaatttt

SEQ ID NO: 389289 - DNA, 15 bp, Homo sapiens
ttggagttttaattt

SEQ ID NO: 389290 - DNA, 15 bp, Homo sapiens
tttggagttttaatt

SEQ ID NO: 389291 - DNA, 15 bp, Homo sapiens
ttttggagttttaat

SEQ ID NO: 389292 - DNA, 15 bp, Homo sapiens
cttttggagttttaa

SEQ ID NO: 389293 - DNA, 15 bp, Homo sapiens
tcttttggagtttta

SEQ ID NO: 389294 - DNA, 15 bp, Homo sapiens
atcttttggagtttt

SEQ ID NO: 389295 - DNA, 15 bp, Homo sapiens
aatcttttggagttt

SEQ ID NO: 389296 - DNA, 15 bp, Homo sapiens
gaatcttttggagtt

SEQ ID NO: 389297 - DNA, 15 bp, Homo sapiens
agaatcttttggagt

SEQ ID NO: 389298 - DNA, 15 bp, Homo sapiens
cagaatcttttggag

SEQ ID NO: 389299 - DNA, 15 bp, Homo sapiens
ccagaatcttttgga

SEQ ID NO: 389300 - DNA, 15 bp, Homo sapiens
tccagaatcttttgg

SEQ ID NO: 389301 - DNA, 15 bp, Homo sapiens
gtccagaatcttttg

SEQ ID NO: 389302 - DNA, 15 bp, Homo sapiens
tgtccagaatctttt

SEQ ID NO: 389303 - DNA, 15 bp, Homo sapiens
atgtccagaatcttt

SEQ ID NO: 389304 - DNA, 15 bp, Homo sapiens
gatgtccagaatctt

SEQ ID NO: 389305 - DNA, 15 bp, Homo sapiens
tgatgtccagaatct

SEQ ID NO: 389306 - DNA, 15 bp, Homo sapiens
ctgatgtccagaatc

SEQ ID NO: 389307 - DNA, 15 bp, Homo sapiens
tctgatgtccagaat

SEQ ID NO: 389308 - DNA, 15 bp, Homo sapiens
ctctgatgtccagaa

SEQ ID NO: 389309 - DNA, 15 bp, Homo sapiens
gctctgatgtccaga

SEQ ID NO: 389310 - DNA, 15 bp, Homo sapiens
agctctgatgtccag

SEQ ID NO: 389311 - DNA, 15 bp, Homo sapiens
gagctctgatgtcca

SEQ ID NO: 389312 - DNA, 15 bp, Homo sapiens
tgagctctgatgtcc

SEQ ID NO: 389313 - DNA, 15 bp, Homo sapiens
atgagctctgatgtc

SEQ ID NO: 389314 - DNA, 15 bp, Homo sapiens
aatgagctctgatgt

SEQ ID NO: 389315 - DNA, 15 bp, Homo sapiens
aaatgagctctgatg

SEQ ID NO: 389316 - DNA, 15 bp, Homo sapiens
aaaatgagctctgat

SEQ ID NO: 389317 - DNA, 15 bp, Homo sapiens
gaaaatgagctctga

SEQ ID NO: 389318 - DNA, 15 bp, Homo sapiens
tgaaaatgagctctg

SEQ ID NO: 389319 - DNA, 15 bp, Homo sapiens
ctgaaaatgagctct

SEQ ID NO: 389320 - DNA, 15 bp, Homo sapiens
actgaaaatgagctc

SEQ ID NO: 389321 - DNA, 15 bp, Homo sapiens
aactgaaaatgagct

SEQ ID NO: 389322 - DNA, 15 bp, Homo sapiens
aaactgaaaatgagc

SEQ ID NO: 389323 - DNA, 15 bp, Homo sapiens
aaaactgaaaatgag

SEQ ID NO: 389324 - DNA, 15 bp, Homo sapiens
gaaaactgaaaatga

SEQ ID NO: 389325 - DNA, 15 bp, Homo sapiens
tgaaaactgaaaatg

SEQ ID NO: 389326 - DNA, 15 bp, Homo sapiens
ttgaaaactgaaaat

SEQ ID NO: 389327 - DNA, 15 bp, Homo sapiens
gttgaaaactgaaaa

SEQ ID NO: 389328 - DNA, 15 bp, Homo sapiens
tgttgaaaactgaaa

SEQ ID NO: 389329 - DNA, 15 bp, Homo sapiens
ttgttgaaaactgaa

SEQ ID NO: 389330 - DNA, 15 bp, Homo sapiens
tttgttgaaaactga

SEQ ID NO: 389331 - DNA, 15 bp, Homo sapiens
atttgttgaaaactg

SEQ ID NO: 389332 - DNA, 15 bp, Homo sapiens
gatttgttgaaaact

SEQ ID NO: 389333 - DNA, 15 bp, Homo sapiens
agatttgttgaaaac

SEQ ID NO: 389334 - DNA, 15 bp, Homo sapiens
tagatttgttgaaaa

SEQ ID NO: 389335 - DNA, 15 bp, Homo sapiens
atagatttgttgaaa

SEQ ID NO: 389336 - DNA, 15 bp, Homo sapiens
gatagatttgttgaa

SEQ ID NO: 389337 - DNA, 15 bp, Homo sapiens
agatagatttgttga

SEQ ID NO: 389338 - DNA, 15 bp, Homo sapiens
cagatagatttgttg

SEQ ID NO: 389339 - DNA, 15 bp, Homo sapiens
tcagatagatttgtt

SEQ ID NO: 389340 - DNA, 15 bp, Homo sapiens
atcagatagatttgt

SEQ ID NO: 389341 - DNA, 15 bp, Homo sapiens
catcagatagatttg

SEQ ID NO: 389342 - DNA, 15 bp, Homo sapiens
tcatcagatagattt

SEQ ID NO: 389343 - DNA, 15 bp, Homo sapiens
ctcatcagatagatt

SEQ ID NO: 389344 - DNA, 15 bp, Homo sapiens
tctcatcagatagat

SEQ ID NO: 389345 - DNA, 15 bp, Homo sapiens
ttctcatcagataga

SEQ ID NO: 389346 - DNA, 15 bp, Homo sapiens
tttctcatcagatag

SEQ ID NO: 389347 - DNA, 15 bp, Homo sapiens
ttttctcatcagata

SEQ ID NO: 389348 - DNA, 15 bp, Homo sapiens
tttttctcatcagat

SEQ ID NO: 389349 - DNA, 15 bp, Homo sapiens
ttttttctcatcaga

SEQ ID NO: 389350 - DNA, 15 bp, Homo sapiens
tttttttctcatcag

SEQ ID NO: 389351 - DNA, 15 bp, Homo sapiens
ttttttttctcatca

SEQ ID NO: 389352 - DNA, 15 bp, Homo sapiens
attttttttctcatc

SEQ ID NO: 389353 - DNA, 15 bp, Homo sapiens
tattttttttctcat

SEQ ID NO: 389354 - DNA, 15 bp, Homo sapiens
ctattttttttctca

SEQ ID NO: 389355 - DNA, 15 bp, Homo sapiens
cctattttttttctc

SEQ ID NO: 389356 - DNA, 15 bp, Homo sapiens
gcctattttttttct

SEQ ID NO: 389357 - DNA, 15 bp, Homo sapiens
tgcctattttttttc

SEQ ID NO: 389358 - DNA, 15 bp, Homo sapiens
ttgcctatttttttt

SEQ ID NO: 389359 - DNA, 15 bp, Homo sapiens
cttgcctattttttt

SEQ ID NO: 389360 - DNA, 15 bp, Homo sapiens
acttgcctatttttt

SEQ ID NO: 389361 - DNA, 15 bp, Homo sapiens
tacttgcctattttt

SEQ ID NO: 389362 - DNA, 15 bp, Homo sapiens
ctacttgcctatttt

SEQ ID NO: 389363 - DNA, 15 bp, Homo sapiens
actacttgcctattt

SEQ ID NO: 389364 - DNA, 15 bp, Homo sapiens
tactacttgcctatt

SEQ ID NO: 389365 - DNA, 15 bp, Homo sapiens
ttactacttgcctat

SEQ ID NO: 389366 - DNA, 15 bp, Homo sapiens
tttactacttgccta

SEQ ID NO: 389367 - DNA, 15 bp, Homo sapiens
ttttactacttgcct

SEQ ID NO: 389368 - DNA, 15 bp, Homo sapiens
attttactacttgcc

SEQ ID NO: 389369 - DNA, 15 bp, Homo sapiens
tattttactacttgc

SEQ ID NO: 389370 - DNA, 15 bp, Homo sapiens
atattttactacttg

SEQ ID NO: 389371 - DNA, 15 bp, Homo sapiens
catattttactactt

SEQ ID NO: 389372 - DNA, 15 bp, Homo sapiens
gcatattttactact

SEQ ID NO: 389373 - DNA, 15 bp, Homo sapiens
tgcatattttactac

SEQ ID NO: 389374 - DNA, 15 bp, Homo sapiens
ttgcatattttacta

SEQ ID NO: 389375 - DNA, 15 bp, Homo sapiens
gttgcatattttact

SEQ ID NO: 389376 - DNA, 15 bp, Homo sapiens
agttgcatattttac

SEQ ID NO: 389377 - DNA, 15 bp, Homo sapiens
tagttgcatatttta

SEQ ID NO: 389378 - DNA, 15 bp, Homo sapiens
ttagttgcatatttt

SEQ ID NO: 389379 - DNA, 15 bp, Homo sapiens
tttagttgcatattt

SEQ ID NO: 389380 - DNA, 15 bp, Homo sapiens
ttttagttgcatatt

SEQ ID NO: 389381 - DNA, 15 bp, Homo sapiens
attttagttgcatat

SEQ ID NO: 389382 - DNA, 15 bp, Homo sapiens
aattttagttgcata

SEQ ID NO: 389383 - DNA, 15 bp, Homo sapiens
aaattttagttgcat

SEQ ID NO: 389384 - DNA, 15 bp, Homo sapiens
aaaattttagttgca

SEQ ID NO: 389385 - DNA, 15 bp, Homo sapiens
taaaattttagttgc

SEQ ID NO: 389386 - DNA, 15 bp, Homo sapiens
ttaaaattttagttg

SEQ ID NO: 389387 - DNA, 15 bp, Homo sapiens
tttaaaattttagtt

SEQ ID NO: 389388 - DNA, 15 bp, Homo sapiens
ctttaaaattttagt

SEQ ID NO: 389389 - DNA, 15 bp, Homo sapiens
actttaaaattttag

SEQ ID NO: 389390 - DNA, 15 bp, Homo sapiens
gactttaaaatttta

SEQ ID NO: 389391 - DNA, 15 bp, Homo sapiens
agactttaaaatttt

SEQ ID NO: 389392 - DNA, 15 bp, Homo sapiens
tagactttaaaattt

SEQ ID NO: 389393 - DNA, 15 bp, Homo sapiens
ttagactttaaaatt

SEQ ID NO: 389394 - DNA, 15 bp, Homo sapiens
attagactttaaaat

SEQ ID NO: 389395 - DNA, 15 bp, Homo sapiens
aattagactttaaaa

SEQ ID NO: 389396 - DNA, 15 bp, Homo sapiens
aaattagactttaaa

SEQ ID NO: 389397 - DNA, 15 bp, Homo sapiens
aaaattagactttaa

SEQ ID NO: 389398 - DNA, 15 bp, Homo sapiens
aaaaattagacttta

SEQ ID NO: 389399 - DNA, 15 bp, Homo sapiens
taaaaattagacttt

SEQ ID NO: 389400 - DNA, 15 bp, Homo sapiens
ctaaaaattagactt

SEQ ID NO: 389401 - DNA, 15 bp, Homo sapiens
gctaaaaattagact

SEQ ID NO: 389402 - DNA, 15 bp, Homo sapiens
ggctaaaaattagac

SEQ ID NO: 389403 - DNA, 15 bp, Homo sapiens
tggctaaaaattaga

SEQ ID NO: 389404 - DNA, 15 bp, Homo sapiens
ctggctaaaaattag

SEQ ID NO: 389405 - DNA, 15 bp, Homo sapiens
tctggctaaaaatta

SEQ ID NO: 389406 - DNA, 15 bp, Homo sapiens
atctggctaaaaatt

SEQ ID NO: 389407 - DNA, 15 bp, Homo sapiens
tatctggctaaaaat

SEQ ID NO: 389408 - DNA, 15 bp, Homo sapiens
ttatctggctaaaaa

SEQ ID NO: 389409 - DNA, 15 bp, Homo sapiens
attatctggctaaaa

SEQ ID NO: 389410 - DNA, 15 bp, Homo sapiens
aattatctggctaaa

SEQ ID NO: 389411 - DNA, 15 bp, Homo sapiens
taattatctggctaa

SEQ ID NO: 389412 - DNA, 15 bp, Homo sapiens
ctaattatctggcta

SEQ ID NO: 389413 - DNA, 15 bp, Homo sapiens
cctaattatctggct

SEQ ID NO: 389414 - DNA, 15 bp, Homo sapiens
acctaattatctggc

SEQ ID NO: 389415 - DNA, 15 bp, Homo sapiens
aacctaattatctgg

SEQ ID NO: 389416 - DNA, 15 bp, Homo sapiens
caacctaattatctg

SEQ ID NO: 389417 - DNA, 15 bp, Homo sapiens
gcaacctaattatct

SEQ ID NO: 389418 - DNA, 15 bp, Homo sapiens
tgcaacctaattatc

SEQ ID NO: 389419 - DNA, 15 bp, Homo sapiens
ttgcaacctaattat

SEQ ID NO: 389420 - DNA, 15 bp, Homo sapiens
tttgcaacctaatta

SEQ ID NO: 389421 - DNA, 15 bp, Homo sapiens
gtttgcaacctaatt

SEQ ID NO: 389422 - DNA, 15 bp, Homo sapiens
agtttgcaacctaat

SEQ ID NO: 389423 - DNA, 15 bp, Homo sapiens
gagtttgcaacctaa

SEQ ID NO: 389424 - DNA, 15 bp, Homo sapiens
tgagtttgcaaccta

SEQ ID NO: 389425 - DNA, 15 bp, Homo sapiens
atgagtttgcaacct

SEQ ID NO: 389426 - DNA, 15 bp, Homo sapiens
aatgagtttgcaacc

SEQ ID NO: 389427 - DNA, 15 bp, Homo sapiens
caatgagtttgcaac

SEQ ID NO: 389428 - DNA, 15 bp, Homo sapiens
tcaatgagtttgcaa

SEQ ID NO: 389429 - DNA, 15 bp, Homo sapiens
ttcaatgagtttgca

SEQ ID NO: 389430 - DNA, 15 bp, Homo sapiens
tttcaatgagtttgc

SEQ ID NO: 389431 - DNA, 15 bp, Homo sapiens
ctttcaatgagtttg

SEQ ID NO: 389432 - DNA, 15 bp, Homo sapiens
gctttcaatgagttt

SEQ ID NO: 389433 - DNA, 15 bp, Homo sapiens
tgctttcaatgagtt

SEQ ID NO: 389434 - DNA, 15 bp, Homo sapiens
ctgctttcaatgagt

SEQ ID NO: 389435 - DNA, 15 bp, Homo sapiens
gctgctttcaatgag

SEQ ID NO: 389436 - DNA, 15 bp, Homo sapiens
tgctgctttcaatga

SEQ ID NO: 389437 - DNA, 15 bp, Homo sapiens
ttgctgctttcaatg

SEQ ID NO: 389438 - DNA, 15 bp, Homo sapiens
gttgctgctttcaat

SEQ ID NO: 389439 - DNA, 15 bp, Homo sapiens
cgttgctgctttcaa

SEQ ID NO: 389440 - DNA, 15 bp, Homo sapiens
tcgttgctgctttca

SEQ ID NO: 389441 - DNA, 15 bp, Homo sapiens
atcgttgctgctttc

SEQ ID NO: 389442 - DNA, 15 bp, Homo sapiens
catcgttgctgcttt

SEQ ID NO: 389443 - DNA, 15 bp, Homo sapiens
acatcgttgctgctt

SEQ ID NO: 389444 - DNA, 15 bp, Homo sapiens
aacatcgttgctgct

SEQ ID NO: 389445 - DNA, 15 bp, Homo sapiens
aaacatcgttgctgc

SEQ ID NO: 389446 - DNA, 15 bp, Homo sapiens
aaaacatcgttgctg

SEQ ID NO: 389447 - DNA, 15 bp, Homo sapiens
aaaaacatcgttgct

SEQ ID NO: 389448 - DNA, 15 bp, Homo sapiens
aaaaaacatcgttgc

SEQ ID NO: 389449 - DNA, 15 bp, Homo sapiens
taaaaaacatcgttg

SEQ ID NO: 389450 - DNA, 15 bp, Homo sapiens
ataaaaaacatcgtt

SEQ ID NO: 389451 - DNA, 15 bp, Homo sapiens
tataaaaaacatcgt

SEQ ID NO: 389452 - DNA, 15 bp, Homo sapiens
ttataaaaaacatcg

SEQ ID NO: 389453 - DNA, 15 bp, Homo sapiens
tttataaaaaacatc

SEQ ID NO: 389454 - DNA, 15 bp, Homo sapiens
atttataaaaaacat

SEQ ID NO: 389455 - DNA, 15 bp, Homo sapiens
gatttataaaaaaca

SEQ ID NO: 389456 - DNA, 15 bp, Homo sapiens
agatttataaaaaac

SEQ ID NO: 389457 - DNA, 15 bp, Homo sapiens
gagatttataaaaaa

SEQ ID NO: 389458 - DNA, 15 bp, Homo sapiens
tgagatttataaaaa

SEQ ID NO: 389459 - DNA, 15 bp, Homo sapiens
ctgagatttataaaa

SEQ ID NO: 389460 - DNA, 15 bp, Homo sapiens
cctgagatttataaa

SEQ ID NO: 389461 - DNA, 15 bp, Homo sapiens
acctgagatttataa

SEQ ID NO: 389462 - DNA, 15 bp, Homo sapiens
cacctgagatttata

SEQ ID NO: 389463 - DNA, 15 bp, Homo sapiens
tcacctgagatttat

SEQ ID NO: 389464 - DNA, 15 bp, Homo sapiens
gtcacctgagattta

SEQ ID NO: 389465 - DNA, 15 bp, Homo sapiens
agtcacctgagattt

SEQ ID NO: 389466 - DNA, 15 bp, Homo sapiens
tagtcacctgagatt

SEQ ID NO: 389467 - DNA, 15 bp, Homo sapiens
ctagtcacctgagat

SEQ ID NO: 389468 - DNA, 15 bp, Homo sapiens
tctagtcacctgaga

SEQ ID NO: 389469 - DNA, 15 bp, Homo sapiens
ttctagtcacctgag

SEQ ID NO: 389470 - DNA, 15 bp, Homo sapiens
gttctagtcacctga

SEQ ID NO: 389471 - DNA, 15 bp, Homo sapiens
agttctagtcacctg

SEQ ID NO: 389472 - DNA, 15 bp, Homo sapiens
tagttctagtcacct

SEQ ID NO: 389473 - DNA, 15 bp, Homo sapiens
atagttctagtcacc

SEQ ID NO: 389474 - DNA, 15 bp, Homo sapiens
tatagttctagtcac

SEQ ID NO: 389475 - DNA, 15 bp, Homo sapiens
atatagttctagtca

SEQ ID NO: 389476 - DNA, 15 bp, Homo sapiens
aatatagttctagtc

SEQ ID NO: 389477 - DNA, 15 bp, Homo sapiens
taatatagttctagt

SEQ ID NO: 389478 - DNA, 15 bp, Homo sapiens
ttaatatagttctag

SEQ ID NO: 389479 - DNA, 15 bp, Homo sapiens
cttaatatagttcta

SEQ ID NO: 389480 - DNA, 15 bp, Homo sapiens
acttaatatagttct

SEQ ID NO: 389481 - DNA, 15 bp, Homo sapiens
tacttaatatagttc

SEQ ID NO: 389482 - DNA, 15 bp, Homo sapiens
atacttaatatagtt

SEQ ID NO: 389483 - DNA, 15 bp, Homo sapiens
tatacttaatatagt

SEQ ID NO: 389484 - DNA, 15 bp, Homo sapiens
atatacttaatatag

SEQ ID NO: 389485 - DNA, 15 bp, Homo sapiens
tatatacttaatata

SEQ ID NO: 389486 - DNA, 15 bp, Homo sapiens
gtatatacttaatat

SEQ ID NO: 389487 - DNA, 15 bp, Homo sapiens
tgtatatacttaata

SEQ ID NO: 389488 - DNA, 15 bp, Homo sapiens
ttgtatatacttaat

SEQ ID NO: 389489 - DNA, 15 bp, Homo sapiens
attgtatatacttaa

SEQ ID NO: 389490 - DNA, 15 bp, Homo sapiens
tattgtatatactta

SEQ ID NO: 389491 - DNA, 15 bp, Homo sapiens
ctattgtatatactt

SEQ ID NO: 389492 - DNA, 15 bp, Homo sapiens
cctattgtatatact

SEQ ID NO: 389493 - DNA, 15 bp, Homo sapiens
acctattgtatatac

SEQ ID NO: 389494 - DNA, 15 bp, Homo sapiens
aacctattgtatata

SEQ ID NO: 389495 - DNA, 15 bp, Homo sapiens
aaacctattgtatat

SEQ ID NO: 389496 - DNA, 15 bp, Homo sapiens
aaaacctattgtata

SEQ ID NO: 389497 - DNA, 15 bp, Homo sapiens
aaaaacctattgtat

SEQ ID NO: 389498 - DNA, 15 bp, Homo sapiens
aaaaaacctattgta

SEQ ID NO: 389499 - DNA, 15 bp, Homo sapiens
taaaaaacctattgt

SEQ ID NO: 389500 - DNA, 15 bp, Homo sapiens
ttaaaaaacctattg

SEQ ID NO: 389501 - DNA, 15 bp, Homo sapiens
tttaaaaaacctatt

SEQ ID NO: 389502 - DNA, 15 bp, Homo sapiens
ttttaaaaaacctat

SEQ ID NO: 389503 - DNA, 15 bp, Homo sapiens
tttttaaaaaaccta

SEQ ID NO: 389504 - DNA, 15 bp, Homo sapiens
gtttttaaaaaacct

SEQ ID NO: 389505 - DNA, 15 bp, Homo sapiens
tgtttttaaaaaacc

SEQ ID NO: 389506 - DNA, 15 bp, Homo sapiens
ttgtttttaaaaaac

SEQ ID NO: 389507 - DNA, 15 bp, Homo sapiens
gttgtttttaaaaaa

SEQ ID NO: 389508 - DNA, 15 bp, Homo sapiens
ggttgtttttaaaaa

SEQ ID NO: 389509 - DNA, 15 bp, Homo sapiens
aggttgtttttaaaa

SEQ ID NO: 389510 - DNA, 15 bp, Homo sapiens
gaggttgtttttaaa

SEQ ID NO: 389511 - DNA, 15 bp, Homo sapiens
agaggttgtttttaa

SEQ ID NO: 389512 - DNA, 15 bp, Homo sapiens
aagaggttgttttta

SEQ ID NO: 389513 - DNA, 15 bp, Homo sapiens
caagaggttgttttt

SEQ ID NO: 389514 - DNA, 15 bp, Homo sapiens
tcaagaggttgtttt

SEQ ID NO: 389515 - DNA, 15 bp, Homo sapiens
atcaagaggttgttt

SEQ ID NO: 389516 - DNA, 15 bp, Homo sapiens
aatcaagaggttgtt

SEQ ID NO: 389517 - DNA, 15 bp, Homo sapiens
taatcaagaggttgt

SEQ ID NO: 389518 - DNA, 15 bp, Homo sapiens
ttaatcaagaggttg

SEQ ID NO: 389519 - DNA, 15 bp, Homo sapiens
attaatcaagaggtt

SEQ ID NO: 389520 - DNA, 15 bp, Homo sapiens
tattaatcaagaggt

SEQ ID NO: 389521 - DNA, 15 bp, Homo sapiens
atattaatcaagagg

SEQ ID NO: 389522 - DNA, 15 bp, Homo sapiens
tatattaatcaagag

SEQ ID NO: 389523 - DNA, 15 bp, Homo sapiens
atatattaatcaaga

SEQ ID NO: 389524 - DNA, 15 bp, Homo sapiens
catatattaatcaag

SEQ ID NO: 389525 - DNA, 15 bp, Homo sapiens
gcatatattaatcaa

SEQ ID NO: 389526 - DNA, 15 bp, Homo sapiens
ggcatatattaatca

SEQ ID NO: 389527 - DNA, 15 bp, Homo sapiens
gggcatatattaatc

SEQ ID NO: 389528 - DNA, 15 bp, Homo sapiens
agggcatatattaat

SEQ ID NO: 389529 - DNA, 15 bp, Homo sapiens
gagggcatatattaa

SEQ ID NO: 389530 - DNA, 15 bp, Homo sapiens
ggagggcatatatta

SEQ ID NO: 389531 - DNA, 15 bp, Homo sapiens
aggagggcatatatt

SEQ ID NO: 389532 - DNA, 15 bp, Homo sapiens
gaggagggcatatat

SEQ ID NO: 389533 - DNA, 15 bp, Homo sapiens
ggaggagggcatata

SEQ ID NO: 389534 - DNA, 15 bp, Homo sapiens
aggaggagggcatat

SEQ ID NO: 389535 - DNA, 15 bp, Homo sapiens
aaggaggagggcata

SEQ ID NO: 389536 - DNA, 15 bp, Homo sapiens
taaggaggagggcat

SEQ ID NO: 389537 - DNA, 15 bp, Homo sapiens
gtaaggaggagggca

SEQ ID NO: 389538 - DNA, 15 bp, Homo sapiens
ggtaaggaggagggc

SEQ ID NO: 389539 - DNA, 15 bp, Homo sapiens
gggtaaggaggaggg

SEQ ID NO: 389540 - DNA, 15 bp, Homo sapiens
agggtaaggaggagg

SEQ ID NO: 389541 - DNA, 15 bp, Homo sapiens
cagggtaaggaggag

SEQ ID NO: 389542 - DNA, 15 bp, Homo sapiens
acagggtaaggagga

SEQ ID NO: 389543 - DNA, 15 bp, Homo sapiens
gacagggtaaggagg

SEQ ID NO: 389544 - DNA, 15 bp, Homo sapiens
ggacagggtaaggag

SEQ ID NO: 389545 - DNA, 15 bp, Homo sapiens
gggacagggtaagga

SEQ ID NO: 389546 - DNA, 15 bp, Homo sapiens
ggggacagggtaagg

SEQ ID NO: 389547 - DNA, 15 bp, Homo sapiens
aggggacagggtaag

SEQ ID NO: 389548 - DNA, 15 bp, Homo sapiens
caggggacagggtaa

SEQ ID NO: 389549 - DNA, 15 bp, Homo sapiens
tcaggggacagggta

SEQ ID NO: 389550 - DNA, 15 bp, Homo sapiens
ctcaggggacagggt

SEQ ID NO: 389551 - DNA, 15 bp, Homo sapiens
cctcaggggacaggg

SEQ ID NO: 389552 - DNA, 15 bp, Homo sapiens
acctcaggggacagg

SEQ ID NO: 389553 - DNA, 15 bp, Homo sapiens
tacctcaggggacag

SEQ ID NO: 389554 - DNA, 15 bp, Homo sapiens
ttacctcaggggaca

SEQ ID NO: 389555 - DNA, 15 bp, Homo sapiens
tttacctcaggggac

SEQ ID NO: 389556 - DNA, 15 bp, Homo sapiens
ctttacctcagggga

SEQ ID NO: 389557 - DNA, 15 bp, Homo sapiens
gctttacctcagggg

SEQ ID NO: 389558 - DNA, 15 bp, Homo sapiens
ggctttacctcaggg

SEQ ID NO: 389559 - DNA, 15 bp, Homo sapiens
tggctttacctcagg

SEQ ID NO: 389560 - DNA, 15 bp, Homo sapiens
atggctttacctcag

SEQ ID NO: 389561 - DNA, 15 bp, Homo sapiens
tatggctttacctca

SEQ ID NO: 389562 - DNA, 15 bp, Homo sapiens
atatggctttacctc

SEQ ID NO: 389563 - DNA, 15 bp, Homo sapiens
aatatggctttacct

SEQ ID NO: 389564 - DNA, 15 bp, Homo sapiens
taatatggctttacc

SEQ ID NO: 389565 - DNA, 15 bp, Homo sapiens
ctaatatggctttac

SEQ ID NO: 389566 - DNA, 15 bp, Homo sapiens
cctaatatggcttta

SEQ ID NO: 389567 - DNA, 15 bp, Homo sapiens
ccctaatatggcttt

SEQ ID NO: 389568 - DNA, 15 bp, Homo sapiens
tccctaatatggctt

SEQ ID NO: 389569 - DNA, 15 bp, Homo sapiens
ttccctaatatggct

SEQ ID NO: 389570 - DNA, 15 bp, Homo sapiens
tttccctaatatggc

SEQ ID NO: 389571 - DNA, 15 bp, Homo sapiens
atttccctaatatgg

SEQ ID NO: 389572 - DNA, 15 bp, Homo sapiens
gatttccctaatatg

SEQ ID NO: 389573 - DNA, 15 bp, Homo sapiens
tgatttccctaatat

SEQ ID NO: 389574 - DNA, 15 bp, Homo sapiens
ttgatttccctaata

SEQ ID NO: 389575 - DNA, 15 bp, Homo sapiens
cttgatttccctaat

SEQ ID NO: 389576 - DNA, 15 bp, Homo sapiens
acttgatttccctaa

SEQ ID NO: 389577 - DNA, 15 bp, Homo sapiens
tacttgatttcccta

SEQ ID NO: 389578 - DNA, 15 bp, Homo sapiens
ttacttgatttccct

SEQ ID NO: 389579 - DNA, 15 bp, Homo sapiens
tttacttgatttccc

SEQ ID NO: 389580 - DNA, 15 bp, Homo sapiens
atttacttgatttcc

SEQ ID NO: 389581 - DNA, 15 bp, Homo sapiens
catttacttgatttc

SEQ ID NO: 389582 - DNA, 15 bp, Homo sapiens
gcatttacttgattt

SEQ ID NO: 389583 - DNA, 15 bp, Homo sapiens
ggcatttacttgatt

SEQ ID NO: 389584 - DNA, 15 bp, Homo sapiens
aggcatttacttgat

SEQ ID NO: 389585 - DNA, 15 bp, Homo sapiens
aaggcatttacttga

SEQ ID NO: 389586 - DNA, 15 bp, Homo sapiens
taaggcatttacttg

SEQ ID NO: 389587 - DNA, 15 bp, Homo sapiens
ataaggcatttactt

SEQ ID NO: 389588 - DNA, 15 bp, Homo sapiens
gataaggcatttact

SEQ ID NO: 389589 - DNA, 15 bp, Homo sapiens
agataaggcatttac

SEQ ID NO: 389590 - DNA, 15 bp, Homo sapiens
aagataaggcattta

SEQ ID NO: 389591 - DNA, 15 bp, Homo sapiens
aaagataaggcattt

SEQ ID NO: 389592 - DNA, 15 bp, Homo sapiens
taaagataaggcatt

SEQ ID NO: 389593 - DNA, 15 bp, Homo sapiens
ataaagataaggcat

SEQ ID NO: 389594 - DNA, 15 bp, Homo sapiens
aataaagataaggca

SEQ ID NO: 389595 - DNA, 15 bp, Homo sapiens
aaataaagataaggc

SEQ ID NO: 389596 - DNA, 15 bp, Homo sapiens
taaataaagataagg

SEQ ID NO: 389597 - DNA, 15 bp, Homo sapiens
gtaaataaagataag

SEQ ID NO: 389598 - DNA, 15 bp, Homo sapiens
ggtaaataaagataa

SEQ ID NO: 389599 - DNA, 15 bp, Homo sapiens
tggtaaataaagata

SEQ ID NO: 389600 - DNA, 15 bp, Homo sapiens
ctggtaaataaagat

SEQ ID NO: 389601 - DNA, 15 bp, Homo sapiens
tctggtaaataaaga

SEQ ID NO: 389602 - DNA, 15 bp, Homo sapiens
gtctggtaaataaag

SEQ ID NO: 389603 - DNA, 15 bp, Homo sapiens
agtctggtaaataaa

SEQ ID NO: 389604 - DNA, 15 bp, Homo sapiens
cagtctggtaaataa

SEQ ID NO: 389605 - DNA, 15 bp, Homo sapiens
gcagtctggtaaata

SEQ ID NO: 389606 - DNA, 15 bp, Homo sapiens
agcagtctggtaaat

SEQ ID NO: 389607 - DNA, 15 bp, Homo sapiens
aagcagtctggtaaa

SEQ ID NO: 389608 - DNA, 15 bp, Homo sapiens
caagcagtctggtaa

SEQ ID NO: 389609 - DNA, 15 bp, Homo sapiens
tcaagcagtctggta

SEQ ID NO: 389610 - DNA, 15 bp, Homo sapiens
gtcaagcagtctggt

SEQ ID NO: 389611 - DNA, 15 bp, Homo sapiens
agtcaagcagtctgg

SEQ ID NO: 389612 - DNA, 15 bp, Homo sapiens
cagtcaagcagtctg

SEQ ID NO: 389613 - DNA, 15 bp, Homo sapiens
ccagtcaagcagtct

SEQ ID NO: 389614 - DNA, 15 bp, Homo sapiens
cccagtcaagcagtc

SEQ ID NO: 389615 - DNA, 15 bp, Homo sapiens
ccccagtcaagcagt

SEQ ID NO: 389616 - DNA, 15 bp, Homo sapiens
tccccagtcaagcag

SEQ ID NO: 389617 - DNA, 15 bp, Homo sapiens
atccccagtcaagca

SEQ ID NO: 389618 - DNA, 15 bp, Homo sapiens
aatccccagtcaagc

SEQ ID NO: 389619 - DNA, 15 bp, Homo sapiens
aaatccccagtcaag

SEQ ID NO: 389620 - DNA, 15 bp, Homo sapiens
taaatccccagtcaa

SEQ ID NO: 389621 - DNA, 15 bp, Homo sapiens
ctaaatccccagtca

SEQ ID NO: 389622 - DNA, 15 bp, Homo sapiens
cctaaatccccagtc

SEQ ID NO: 389623 - DNA, 15 bp, Homo sapiens
ccctaaatccccagt

SEQ ID NO: 389624 - DNA, 15 bp, Homo sapiens
accctaaatccccag

SEQ ID NO: 389625 - DNA, 15 bp, Homo sapiens
aaccctaaatcccca

SEQ ID NO: 389626 - DNA, 15 bp, Homo sapiens
gaaccctaaatcccc

SEQ ID NO: 389627 - DNA, 15 bp, Homo sapiens
ggaaccctaaatccc

SEQ ID NO: 389628 - DNA, 15 bp, Homo sapiens
tggaaccctaaatcc

SEQ ID NO: 389629 - DNA, 15 bp, Homo sapiens
ctggaaccctaaatc

SEQ ID NO: 389630 - DNA, 15 bp, Homo sapiens
tctggaaccctaaat

SEQ ID NO: 389631 - DNA, 15 bp, Homo sapiens
ttctggaaccctaaa

SEQ ID NO: 389632 - DNA, 15 bp, Homo sapiens
tttctggaaccctaa

SEQ ID NO: 389633 - DNA, 15 bp, Homo sapiens
gtttctggaacccta

SEQ ID NO: 389634 - DNA, 15 bp, Homo sapiens
ggtttctggaaccct

SEQ ID NO: 389635 - DNA, 15 bp, Homo sapiens
tggtttctggaaccc

SEQ ID NO: 389636 - DNA, 15 bp, Homo sapiens
gtggtttctggaacc

SEQ ID NO: 389637 - DNA, 15 bp, Homo sapiens
tgtggtttctggaac

SEQ ID NO: 389638 - DNA, 15 bp, Homo sapiens
gtgtggtttctggaa

SEQ ID NO: 389639 - DNA, 15 bp, Homo sapiens
tgtgtggtttctgga

SEQ ID NO: 389640 - DNA, 15 bp, Homo sapiens
ttgtgtggtttctgg

SEQ ID NO: 389641 - DNA, 15 bp, Homo sapiens
cttgtgtggtttctg

SEQ ID NO: 389642 - DNA, 15 bp, Homo sapiens
acttgtgtggtttct

SEQ ID NO: 389643 - DNA, 15 bp, Homo sapiens
aacttgtgtggtttc

SEQ ID NO: 389644 - DNA, 15 bp, Homo sapiens
aaacttgtgtggttt

SEQ ID NO: 389645 - DNA, 15 bp, Homo sapiens
aaaacttgtgtggtt

SEQ ID NO: 389646 - DNA, 15 bp, Homo sapiens
taaaacttgtgtggt

SEQ ID NO: 389647 - DNA, 15 bp, Homo sapiens
ttaaaacttgtgtgg

SEQ ID NO: 389648 - DNA, 15 bp, Homo sapiens
attaaaacttgtgtg

SEQ ID NO: 389649 - DNA, 15 bp, Homo sapiens
aattaaaacttgtgt

SEQ ID NO: 389650 - DNA, 15 bp, Homo sapiens
gaattaaaacttgtg

SEQ ID NO: 389651 - DNA, 15 bp, Homo sapiens
ggaattaaaacttgt

SEQ ID NO: 389652 - DNA, 15 bp, Homo sapiens
tggaattaaaacttg

SEQ ID NO: 389653 - DNA, 15 bp, Homo sapiens
gtggaattaaaactt

SEQ ID NO: 389654 - DNA, 15 bp, Homo sapiens
tgtggaattaaaact

SEQ ID NO: 389655 - DNA, 15 bp, Homo sapiens
ctgtggaattaaaac

SEQ ID NO: 389656 - DNA, 15 bp, Homo sapiens
tctgtggaattaaaa

SEQ ID NO: 389657 - DNA, 15 bp, Homo sapiens
ttctgtggaattaaa

SEQ ID NO: 389658 - DNA, 15 bp, Homo sapiens
attctgtggaattaa

SEQ ID NO: 389659 - DNA, 15 bp, Homo sapiens
gattctgtggaatta

SEQ ID NO: 389660 - DNA, 15 bp, Homo sapiens
ggattctgtggaatt

SEQ ID NO: 389661 - DNA, 15 bp, Homo sapiens
gggattctgtggaat

SEQ ID NO: 389662 - DNA, 15 bp, Homo sapiens
ggggattctgtggaa

SEQ ID NO: 389663 - DNA, 15 bp, Homo sapiens
tctgagaaacagata

SEQ ID NO: 389664 - DNA, 15 bp, Homo sapiens
atctgagaaacagat

SEQ ID NO: 389665 - DNA, 15 bp, Homo sapiens
catctgagaaacaga

SEQ ID NO: 389666 - DNA, 15 bp, Homo sapiens
tcatctgagaaacag

SEQ ID NO: 389667 - DNA, 15 bp, Homo sapiens
ctcatctgagaaaca

SEQ ID NO: 389668 - DNA, 15 bp, Homo sapiens
cctcatctgagaaac

SEQ ID NO: 389669 - DNA, 15 bp, Homo sapiens
tcctcatctgagaaa

SEQ ID NO: 389670 - DNA, 15 bp, Homo sapiens
ttcctcatctgagaa

SEQ ID NO: 389671 - DNA, 15 bp, Homo sapiens
tttcctcatctgaga

SEQ ID NO: 389672 - DNA, 15 bp, Homo sapiens
ttttcctcatctgag

SEQ ID NO: 389673 - DNA, 15 bp, Homo sapiens
attttcctcatctga

SEQ ID NO: 389674 - DNA, 15 bp, Homo sapiens
cattttcctcatctg

SEQ ID NO: 389675 - DNA, 15 bp, Homo sapiens
tcattttcctcatct

SEQ ID NO: 389676 - DNA, 15 bp, Homo sapiens
ctcattttcctcatc

SEQ ID NO: 389677 - DNA, 15 bp, Homo sapiens
cctcattttcctcat

SEQ ID NO: 389678 - DNA, 15 bp, Homo sapiens
gcctcattttcctca

SEQ ID NO: 389679 - DNA, 15 bp, Homo sapiens
tgcctcattttcctc

SEQ ID NO: 389680 - DNA, 15 bp, Homo sapiens
gtgcctcattttcct

SEQ ID NO: 389681 - DNA, 15 bp, Homo sapiens
tgtgcctcattttcc

SEQ ID NO: 389682 - DNA, 15 bp, Homo sapiens
ctgtgcctcattttc

SEQ ID NO: 389683 - DNA, 15 bp, Homo sapiens
tctgtgcctcatttt

SEQ ID NO: 389684 - DNA, 15 bp, Homo sapiens
ttctgtgcctcattt

SEQ ID NO: 389685 - DNA, 15 bp, Homo sapiens
tttctgtgcctcatt

SEQ ID NO: 389686 - DNA, 15 bp, Homo sapiens
ttttctgtgcctcat

SEQ ID NO: 389687 - DNA, 15 bp, Homo sapiens
cttttctgtgcctca

SEQ ID NO: 389688 - DNA, 15 bp, Homo sapiens
tcttttctgtgcctc

SEQ ID NO: 389689 - DNA, 15 bp, Homo sapiens
gtcttttctgtgcct

SEQ ID NO: 389690 - DNA, 15 bp, Homo sapiens
ggtcttttctgtgcc

SEQ ID NO: 389691 - DNA, 15 bp, Homo sapiens
aggtcttttctgtgc

SEQ ID NO: 389692 - DNA, 15 bp, Homo sapiens
aaggtcttttctgtg

SEQ ID NO: 389693 - DNA, 15 bp, Homo sapiens
gaaggtcttttctgt

SEQ ID NO: 389694 - DNA, 15 bp, Homo sapiens
tgaaggtcttttctg

SEQ ID NO: 389695 - DNA, 15 bp, Homo sapiens
ttgaaggtcttttct

SEQ ID NO: 389696 - DNA, 15 bp, Homo sapiens
gttgaaggtcttttc

SEQ ID NO: 389697 - DNA, 15 bp, Homo sapiens
agttgaaggtctttt

SEQ ID NO: 389698 - DNA, 15 bp, Homo sapiens
aagttgaaggtcttt

SEQ ID NO: 389699 - DNA, 15 bp, Homo sapiens
gaagttgaaggtctt

SEQ ID NO: 389700 - DNA, 15 bp, Homo sapiens
agaagttgaaggtct

SEQ ID NO: 389701 - DNA, 15 bp, Homo sapiens
aagaagttgaaggtc

SEQ ID NO: 389702 - DNA, 15 bp, Homo sapiens
gaagaagttgaaggt

SEQ ID NO: 389703 - DNA, 15 bp, Homo sapiens
tgaagaagttgaagg

SEQ ID NO: 389704 - DNA, 15 bp, Homo sapiens
ttgaagaagttgaag

SEQ ID NO: 389705 - DNA, 15 bp, Homo sapiens
tttgaagaagttgaa

SEQ ID NO: 389706 - DNA, 15 bp, Homo sapiens
ctttgaagaagttga

SEQ ID NO: 389707 - DNA, 15 bp, Homo sapiens
actttgaagaagttg

SEQ ID NO: 389708 - DNA, 15 bp, Homo sapiens
aactttgaagaagtt

SEQ ID NO: 389709 - DNA, 15 bp, Homo sapiens
taactttgaagaagt

SEQ ID NO: 389710 - DNA, 15 bp, Homo sapiens
gtaactttgaagaag

SEQ ID NO: 389711 - DNA, 15 bp, Homo sapiens
tgtaactttgaagaa

SEQ ID NO: 389712 - DNA, 15 bp, Homo sapiens
ctgtaactttgaaga

SEQ ID NO: 389713 - DNA, 15 bp, Homo sapiens
actgtaactttgaag

SEQ ID NO: 389714 - DNA, 15 bp, Homo sapiens
aactgtaactttgaa

SEQ ID NO: 389715 - DNA, 15 bp, Homo sapiens
taactgtaactttga

SEQ ID NO: 389716 - DNA, 15 bp, Homo sapiens
ttaactgtaactttg

SEQ ID NO: 389717 - DNA, 15 bp, Homo sapiens
gttaactgtaacttt

SEQ ID NO: 389718 - DNA, 15 bp, Homo sapiens
tgttaactgtaactt

SEQ ID NO: 389719 - DNA, 15 bp, Homo sapiens
ttgttaactgtaact

SEQ ID NO: 389720 - DNA, 15 bp, Homo sapiens
cttgttaactgtaac

SEQ ID NO: 389721 - DNA, 15 bp, Homo sapiens
acttgttaactgtaa

SEQ ID NO: 389722 - DNA, 15 bp, Homo sapiens
cacttgttaactgta

SEQ ID NO: 389723 - DNA, 15 bp, Homo sapiens
acacttgttaactgt

SEQ ID NO: 389724 - DNA, 15 bp, Homo sapiens
aacacttgttaactg

SEQ ID NO: 389725 - DNA, 15 bp, Homo sapiens
taacacttgttaact

SEQ ID NO: 389726 - DNA, 15 bp, Homo sapiens
ttaacacttgttaac

SEQ ID NO: 389727 - DNA, 15 bp, Homo sapiens
cttaacacttgttaa

SEQ ID NO: 389728 - DNA, 15 bp, Homo sapiens
ccttaacacttgtta

SEQ ID NO: 389729 - DNA, 15 bp, Homo sapiens
gccttaacacttgtt

SEQ ID NO: 389730 - DNA, 15 bp, Homo sapiens
ggccttaacacttgt

SEQ ID NO: 389731 - DNA, 15 bp, Homo sapiens
aggccttaacacttg

SEQ ID NO: 389732 - DNA, 15 bp, Homo sapiens
taggccttaacactt

SEQ ID NO: 389733 - DNA, 15 bp, Homo sapiens
ttaggccttaacact

SEQ ID NO: 389734 - DNA, 15 bp, Homo sapiens
attaggccttaacac

SEQ ID NO: 389735 - DNA, 15 bp, Homo sapiens
aattaggccttaaca

SEQ ID NO: 389736 - DNA, 15 bp, Homo sapiens
gaattaggccttaac

SEQ ID NO: 389737 - DNA, 15 bp, Homo sapiens
tgaattaggccttaa

SEQ ID NO: 389738 - DNA, 15 bp, Homo sapiens
ttgaattaggcctta

SEQ ID NO: 389739 - DNA, 15 bp, Homo sapiens
tttgaattaggcctt

SEQ ID NO: 389740 - DNA, 15 bp, Homo sapiens
atttgaattaggcct

SEQ ID NO: 389741 - DNA, 15 bp, Homo sapiens
aatttgaattaggcc

SEQ ID NO: 389742 - DNA, 15 bp, Homo sapiens
gaatttgaattaggc

SEQ ID NO: 389743 - DNA, 15 bp, Homo sapiens
tgaatttgaattagg

SEQ ID NO: 389744 - DNA, 15 bp, Homo sapiens
ctgaatttgaattag

SEQ ID NO: 389745 - DNA, 15 bp, Homo sapiens
actgaatttgaatta

SEQ ID NO: 389746 - DNA, 15 bp, Homo sapiens
aactgaatttgaatt

SEQ ID NO: 389747 - DNA, 15 bp, Homo sapiens
caactgaatttgaat

SEQ ID NO: 389748 - DNA, 15 bp, Homo sapiens
tcaactgaatttgaa

SEQ ID NO: 389749 - DNA, 15 bp, Homo sapiens
atcaactgaatttga

SEQ ID NO: 389750 - DNA, 15 bp, Homo sapiens
gatcaactgaatttg

SEQ ID NO: 389751 - DNA, 15 bp, Homo sapiens
ggatcaactgaattt

SEQ ID NO: 389752 - DNA, 15 bp, Homo sapiens
tggatcaactgaatt

SEQ ID NO: 389753 - DNA, 15 bp, Homo sapiens
ttggatcaactgaat

SEQ ID NO: 389754 - DNA, 15 bp, Homo sapiens
attggatcaactgaa

SEQ ID NO: 389755 - DNA, 15 bp, Homo sapiens
gattggatcaactga

SEQ ID NO: 389756 - DNA, 15 bp, Homo sapiens
ggattggatcaactg

SEQ ID NO: 389757 - DNA, 15 bp, Homo sapiens
aggattggatcaact

SEQ ID NO: 389758 - DNA, 15 bp, Homo sapiens
caggattggatcaac

SEQ ID NO: 389759 - DNA, 15 bp, Homo sapiens
tcaggattggatcaa

SEQ ID NO: 389760 - DNA, 15 bp, Homo sapiens
atcaggattggatca

SEQ ID NO: 389761 - DNA, 15 bp, Homo sapiens
aatcaggattggatc

SEQ ID NO: 389762 - DNA, 15 bp, Homo sapiens
gaatcaggattggat

SEQ ID NO: 389763 - DNA, 15 bp, Homo sapiens
ggaatcaggattgga

SEQ ID NO: 389764 - DNA, 15 bp, Homo sapiens
tggaatcaggattgg

SEQ ID NO: 389765 - DNA, 15 bp, Homo sapiens
ctggaatcaggattg

SEQ ID NO: 389766 - DNA, 15 bp, Homo sapiens
tctggaatcaggatt

SEQ ID NO: 389767 - DNA, 15 bp, Homo sapiens
ctctggaatcaggat

SEQ ID NO: 389768 - DNA, 15 bp, Homo sapiens
actctggaatcagga

SEQ ID NO: 389769 - DNA, 15 bp, Homo sapiens
aactctggaatcagg

SEQ ID NO: 389770 - DNA, 15 bp, Homo sapiens
taactctggaatcag

SEQ ID NO: 389771 - DNA, 15 bp, Homo sapiens
ataactctggaatca

SEQ ID NO: 389772 - DNA, 15 bp, Homo sapiens
tataactctggaatc

SEQ ID NO: 389773 - DNA, 15 bp, Homo sapiens
atataactctggaat

SEQ ID NO: 389774 - DNA, 15 bp, Homo sapiens
tatataactctggaa

SEQ ID NO: 389775 - DNA, 15 bp, Homo sapiens
gtatataactctgga

SEQ ID NO: 389776 - DNA, 15 bp, Homo sapiens
agtatataactctgg

SEQ ID NO: 389777 - DNA, 15 bp, Homo sapiens
aagtatataactctg

SEQ ID NO: 389778 - DNA, 15 bp, Homo sapiens
aaagtatataactct

SEQ ID NO: 389779 - DNA, 15 bp, Homo sapiens
taaagtatataactc

SEQ ID NO: 389780 - DNA, 15 bp, Homo sapiens
ataaagtatataact

SEQ ID NO: 389781 - DNA, 15 bp, Homo sapiens
gataaagtatataac

SEQ ID NO: 389782 - DNA, 15 bp, Homo sapiens
ggataaagtatataa

SEQ ID NO: 389783 - DNA, 15 bp, Homo sapiens
gggataaagtatata

SEQ ID NO: 389784 - DNA, 15 bp, Homo sapiens
ggggataaagtatat

SEQ ID NO: 389785 - DNA, 15 bp, Homo sapiens
tggggataaagtata

SEQ ID NO: 389786 - DNA, 15 bp, Homo sapiens
atggggataaagtat

SEQ ID NO: 389787 - DNA, 15 bp, Homo sapiens
gatggggataaagta

SEQ ID NO: 389788 - DNA, 15 bp, Homo sapiens
cgatggggataaagt

SEQ ID NO: 389789 - DNA, 15 bp, Homo sapiens
gcgatggggataaag

SEQ ID NO: 389790 - DNA, 15 bp, Homo sapiens
tgcgatggggataaa

SEQ ID NO: 389791 - DNA, 15 bp, Homo sapiens
ttgcgatggggataa

SEQ ID NO: 389792 - DNA, 15 bp, Homo sapiens
attgcgatggggata

SEQ ID NO: 389793 - DNA, 15 bp, Homo sapiens
tattgcgatggggat

SEQ ID NO: 389794 - DNA, 15 bp, Homo sapiens
ttattgcgatgggga

SEQ ID NO: 389795 - DNA, 15 bp, Homo sapiens
tttattgcgatgggg

SEQ ID NO: 389796 - DNA, 15 bp, Homo sapiens
ttttattgcgatggg

SEQ ID NO: 389797 - DNA, 15 bp, Homo sapiens
attttattgcgatgg

SEQ ID NO: 389798 - DNA, 15 bp, Homo sapiens
aattttattgcgatg

SEQ ID NO: 389799 - DNA, 15 bp, Homo sapiens
aaattttattgcgat

SEQ ID NO: 389800 - DNA, 15 bp, Homo sapiens
gaaattttattgcga

SEQ ID NO: 389801 - DNA, 15 bp, Homo sapiens
tgaaattttattgcg

SEQ ID NO: 389802 - DNA, 15 bp, Homo sapiens
ttgaaattttattgc

SEQ ID NO: 389803 - DNA, 15 bp, Homo sapiens
tttgaaattttattg

SEQ ID NO: 389804 - DNA, 15 bp, Homo sapiens
gtttgaaattttatt

SEQ ID NO: 389805 - DNA, 15 bp, Homo sapiens
ggtttgaaattttat

SEQ ID NO: 389806 - DNA, 15 bp, Homo sapiens
tggtttgaaatttta

SEQ ID NO: 389807 - DNA, 15 bp, Homo sapiens
gtggtttgaaatttt

SEQ ID NO: 389808 - DNA, 15 bp, Homo sapiens
agtggtttgaaattt

SEQ ID NO: 389809 - DNA, 15 bp, Homo sapiens
tagtggtttgaaatt

SEQ ID NO: 389810 - DNA, 15 bp, Homo sapiens
atagtggtttgaaat

SEQ ID NO: 389811 - DNA, 15 bp, Homo sapiens
catagtggtttgaaa

SEQ ID NO: 389812 - DNA, 15 bp, Homo sapiens
gcatagtggtttgaa

SEQ ID NO: 389813 - DNA, 15 bp, Homo sapiens
tgcatagtggtttga

SEQ ID NO: 389814 - DNA, 15 bp, Homo sapiens
ctgcatagtggtttg

SEQ ID NO: 389815 - DNA, 15 bp, Homo sapiens
cctgcatagtggttt

SEQ ID NO: 389816 - DNA, 15 bp, Homo sapiens
acctgcatagtggtt

SEQ ID NO: 389817 - DNA, 15 bp, Homo sapiens
tacctgcatagtggt

SEQ ID NO: 389818 - DNA, 15 bp, Homo sapiens
ttacctgcatagtgg

SEQ ID NO: 389819 - DNA, 15 bp, Homo sapiens
tttacctgcatagtg

SEQ ID NO: 389820 - DNA, 15 bp, Homo sapiens
ttttacctgcatagt

SEQ ID NO: 389821 - DNA, 15 bp, Homo sapiens
attttacctgcatag

SEQ ID NO: 389822 - DNA, 15 bp, Homo sapiens
tattttacctgcata

SEQ ID NO: 389823 - DNA, 15 bp, Homo sapiens
ttattttacctgcat

SEQ ID NO: 389824 - DNA, 15 bp, Homo sapiens
attattttacctgca

SEQ ID NO: 389825 - DNA, 15 bp, Homo sapiens
tattattttacctgc

SEQ ID NO: 389826 - DNA, 15 bp, Homo sapiens
ttattattttacctg

SEQ ID NO: 389827 - DNA, 15 bp, Homo sapiens
gttattattttacct

SEQ ID NO: 389828 - DNA, 15 bp, Homo sapiens
ggttattattttacc

SEQ ID NO: 389829 - DNA, 15 bp, Homo sapiens
aggttattattttac

SEQ ID NO: 389830 - DNA, 15 bp, Homo sapiens
aaggttattatttta

SEQ ID NO: 389831 - DNA, 15 bp, Homo sapiens
gaaggttattatttt

SEQ ID NO: 389832 - DNA, 15 bp, Homo sapiens
tgaaggttattattt

SEQ ID NO: 389833 - DNA, 15 bp, Homo sapiens
ctgaaggttattatt

SEQ ID NO: 389834 - DNA, 15 bp, Homo sapiens
tctgaaggttattat

SEQ ID NO: 389835 - DNA, 15 bp, Homo sapiens
ctctgaaggttatta

SEQ ID NO: 389836 - DNA, 15 bp, Homo sapiens
cctctgaaggttatt

SEQ ID NO: 389837 - DNA, 15 bp, Homo sapiens
tcctctgaaggttat

SEQ ID NO: 389838 - DNA, 15 bp, Homo sapiens
atcctctgaaggtta

SEQ ID NO: 389839 - DNA, 15 bp, Homo sapiens
tatcctctgaaggtt

SEQ ID NO: 389840 - DNA, 15 bp, Homo sapiens
atatcctctgaaggt

SEQ ID NO: 389841 - DNA, 15 bp, Homo sapiens
catatcctctgaagg

SEQ ID NO: 389842 - DNA, 15 bp, Homo sapiens
ccatatcctctgaag

SEQ ID NO: 389843 - DNA, 15 bp, Homo sapiens
accatatcctctgaa

SEQ ID NO: 389844 - DNA, 15 bp, Homo sapiens
aaccatatcctctga

SEQ ID NO: 389845 - DNA, 15 bp, Homo sapiens
caaccatatcctctg

SEQ ID NO: 389846 - DNA, 15 bp, Homo sapiens
acaaccatatcctct

SEQ ID NO: 389847 - DNA, 15 bp, Homo sapiens
tacaaccatatcctc

SEQ ID NO: 389848 - DNA, 15 bp, Homo sapiens
ctacaaccatatcct

SEQ ID NO: 389849 - DNA, 15 bp, Homo sapiens
tctacaaccatatcc

SEQ ID NO: 389850 - DNA, 15 bp, Homo sapiens
atctacaaccatatc

SEQ ID NO: 389851 - DNA, 15 bp, Homo sapiens
tatctacaaccatat

SEQ ID NO: 389852 - DNA, 15 bp, Homo sapiens
ttatctacaaccata

SEQ ID NO: 389853 - DNA, 15 bp, Homo sapiens
tttatctacaaccat

SEQ ID NO: 389854 - DNA, 15 bp, Homo sapiens
atttatctacaacca

SEQ ID NO: 389855 - DNA, 15 bp, Homo sapiens
aatttatctacaacc

SEQ ID NO: 389856 - DNA, 15 bp, Homo sapiens
aaatttatctacaac

SEQ ID NO: 389857 - DNA, 15 bp, Homo sapiens
caaatttatctacaa

SEQ ID NO: 389858 - DNA, 15 bp, Homo sapiens
tcaaatttatctaca

SEQ ID NO: 389859 - DNA, 15 bp, Homo sapiens
ttcaaatttatctac

SEQ ID NO: 389860 - DNA, 15 bp, Homo sapiens
attcaaatttatcta

SEQ ID NO: 389861 - DNA, 15 bp, Homo sapiens
gattcaaatttatct

SEQ ID NO: 389862 - DNA, 15 bp, Homo sapiens
tgattcaaatttatc

SEQ ID NO: 389863 - DNA, 15 bp, Homo sapiens
ttgattcaaatttat

SEQ ID NO: 389864 - DNA, 15 bp, Homo sapiens
gttgattcaaattta

SEQ ID NO: 389865 - DNA, 15 bp, Homo sapiens
agttgattcaaattt

SEQ ID NO: 389866 - DNA, 15 bp, Homo sapiens
aagttgattcaaatt

SEQ ID NO: 389867 - DNA, 15 bp, Homo sapiens
aaagttgattcaaat

SEQ ID NO: 389868 - DNA, 15 bp, Homo sapiens
aaaagttgattcaaa

SEQ ID NO: 389869 - DNA, 15 bp, Homo sapiens
taaaagttgattcaa

SEQ ID NO: 389870 - DNA, 15 bp, Homo sapiens
ttaaaagttgattca

SEQ ID NO: 389871 - DNA, 15 bp, Homo sapiens
attaaaagttgattc

SEQ ID NO: 389872 - DNA, 15 bp, Homo sapiens
tattaaaagttgatt

SEQ ID NO: 389873 - DNA, 15 bp, Homo sapiens
ttattaaaagttgat

SEQ ID NO: 389874 - DNA, 15 bp, Homo sapiens
cttattaaaagttga

SEQ ID NO: 389875 - DNA, 15 bp, Homo sapiens
tcttattaaaagttg

SEQ ID NO: 389876 - DNA, 15 bp, Homo sapiens
ttcttattaaaagtt

SEQ ID NO: 389877 - DNA, 15 bp, Homo sapiens
attcttattaaaagt

SEQ ID NO: 389878 - DNA, 15 bp, Homo sapiens
aattcttattaaaag

SEQ ID NO: 389879 - DNA, 15 bp, Homo sapiens
gaattcttattaaaa

SEQ ID NO: 389880 - DNA, 15 bp, Homo sapiens
tgaattcttattaaa

SEQ ID NO: 389881 - DNA, 15 bp, Homo sapiens
ttgaattcttattaa

SEQ ID NO: 389882 - DNA, 15 bp, Homo sapiens
cttgaattcttatta

SEQ ID NO: 389883 - DNA, 15 bp, Homo sapiens
gcttgaattcttatt

SEQ ID NO: 389884 - DNA, 15 bp, Homo sapiens
ggcttgaattcttat

SEQ ID NO: 389885 - DNA, 15 bp, Homo sapiens
aggcttgaattctta

SEQ ID NO: 389886 - DNA, 15 bp, Homo sapiens
caggcttgaattctt

SEQ ID NO: 389887 - DNA, 15 bp, Homo sapiens
tcaggcttgaattct

SEQ ID NO: 389888 - DNA, 15 bp, Homo sapiens
ttcaggcttgaattc

SEQ ID NO: 389889 - DNA, 15 bp, Homo sapiens
tttcaggcttgaatt

SEQ ID NO: 389890 - DNA, 15 bp, Homo sapiens
atttcaggcttgaat

SEQ ID NO: 389891 - DNA, 15 bp, Homo sapiens
tatttcaggcttgaa

SEQ ID NO: 389892 - DNA, 15 bp, Homo sapiens
atatttcaggcttga

SEQ ID NO: 389893 - DNA, 15 bp, Homo sapiens
aatatttcaggcttg

SEQ ID NO: 389894 - DNA, 15 bp, Homo sapiens
aaatatttcaggctt

SEQ ID NO: 389895 - DNA, 15 bp, Homo sapiens
taaatatttcaggct

SEQ ID NO: 389896 - DNA, 15 bp, Homo sapiens
ataaatatttcaggc

SEQ ID NO: 389897 - DNA, 15 bp, Homo sapiens
aataaatatttcagg

SEQ ID NO: 389898 - DNA, 15 bp, Homo sapiens
caataaatatttcag

SEQ ID NO: 389899 - DNA, 15 bp, Homo sapiens
ccaataaatatttca

SEQ ID NO: 389900 - DNA, 15 bp, Homo sapiens
tccaataaatatttc

SEQ ID NO: 389901 - DNA, 15 bp, Homo sapiens
ctccaataaatattt

SEQ ID NO: 389902 - DNA, 15 bp, Homo sapiens
actccaataaatatt

SEQ ID NO: 389903 - DNA, 15 bp, Homo sapiens
gactccaataaatat

SEQ ID NO: 389904 - DNA, 15 bp, Homo sapiens
tgactccaataaata

SEQ ID NO: 389905 - DNA, 15 bp, Homo sapiens
ttgactccaataaat

SEQ ID NO: 389906 - DNA, 15 bp, Homo sapiens
tttgactccaataaa

SEQ ID NO: 389907 - DNA, 15 bp, Homo sapiens
atttgactccaataa

SEQ ID NO: 389908 - DNA, 15 bp, Homo sapiens
gatttgactccaata

SEQ ID NO: 389909 - DNA, 15 bp, Homo sapiens
agatttgactccaat

SEQ ID NO: 389910 - DNA, 15 bp, Homo sapiens
gagatttgactccaa

SEQ ID NO: 389911 - DNA, 15 bp, Homo sapiens
cgagatttgactcca

SEQ ID NO: 389912 - DNA, 15 bp, Homo sapiens
tcgagatttgactcc

SEQ ID NO: 389913 - DNA, 15 bp, Homo sapiens
ttcgagatttgactc

SEQ ID NO: 389914 - DNA, 15 bp, Homo sapiens
tttcgagatttgact

SEQ ID NO: 389915 - DNA, 15 bp, Homo sapiens
gtttcgagatttgac

SEQ ID NO: 389916 - DNA, 15 bp, Homo sapiens
agtttcgagatttga

SEQ ID NO: 389917 - DNA, 15 bp, Homo sapiens
tagtttcgagatttg

SEQ ID NO: 389918 - DNA, 15 bp, Homo sapiens
gtagtttcgagattt

SEQ ID NO: 389919 - DNA, 15 bp, Homo sapiens
tgtagtttcgagatt

SEQ ID NO: 389920 - DNA, 15 bp, Homo sapiens
ttgtagtttcgagat

SEQ ID NO: 389921 - DNA, 15 bp, Homo sapiens
attgtagtttcgaga

SEQ ID NO: 389922 - DNA, 15 bp, Homo sapiens
aattgtagtttcgag

SEQ ID NO: 389923 - DNA, 15 bp, Homo sapiens
caattgtagtttcga

SEQ ID NO: 389924 - DNA, 15 bp, Homo sapiens
ccaattgtagtttcg

SEQ ID NO: 389925 - DNA, 15 bp, Homo sapiens
accaattgtagtttc

SEQ ID NO: 389926 - DNA, 15 bp, Homo sapiens
taccaattgtagttt

SEQ ID NO: 389927 - DNA, 15 bp, Homo sapiens
gtaccaattgtagtt

SEQ ID NO: 389928 - DNA, 15 bp, Homo sapiens
ggtaccaattgtagt

SEQ ID NO: 389929 - DNA, 15 bp, Homo sapiens
tggtaccaattgtag

SEQ ID NO: 389930 - DNA, 15 bp, Homo sapiens
ttggtaccaattgta

SEQ ID NO: 389931 - DNA, 15 bp, Homo sapiens
tttggtaccaattgt

SEQ ID NO: 389932 - DNA, 15 bp, Homo sapiens
ctttggtaccaattg

SEQ ID NO: 389933 - DNA, 15 bp, Homo sapiens
tctttggtaccaatt

SEQ ID NO: 389934 - DNA, 15 bp, Homo sapiens
ttctttggtaccaat

SEQ ID NO: 389935 - DNA, 15 bp, Homo sapiens
gttctttggtaccaa

SEQ ID NO: 389936 - DNA, 15 bp, Homo sapiens
ggttctttggtacca

SEQ ID NO: 389937 - DNA, 15 bp, Homo sapiens
tggttctttggtacc

SEQ ID NO: 389938 - DNA, 15 bp, Homo sapiens
atggttctttggtac

SEQ ID NO: 389939 - DNA, 15 bp, Homo sapiens
catggttctttggta

SEQ ID NO: 389940 - DNA, 15 bp, Homo sapiens
gcatggttctttggt

SEQ ID NO: 389941 - DNA, 15 bp, Homo sapiens
ggcatggttctttgg

SEQ ID NO: 389942 - DNA, 15 bp, Homo sapiens
aggcatggttctttg

SEQ ID NO: 389943 - DNA, 15 bp, Homo sapiens
taggcatggttcttt

SEQ ID NO: 389944 - DNA, 15 bp, Homo sapiens
ataggcatggttctt

SEQ ID NO: 389945 - DNA, 15 bp, Homo sapiens
aataggcatggttct

SEQ ID NO: 389946 - DNA, 15 bp, Homo sapiens
caataggcatggttc

SEQ ID NO: 389947 - DNA, 15 bp, Homo sapiens
acaataggcatggtt

SEQ ID NO: 389948 - DNA, 15 bp, Homo sapiens
gacaataggcatggt

SEQ ID NO: 389949 - DNA, 15 bp, Homo sapiens
tgacaataggcatgg

SEQ ID NO: 389950 - DNA, 15 bp, Homo sapiens
atgacaataggcatg

SEQ ID NO: 389951 - DNA, 15 bp, Homo sapiens
gatgacaataggcat

SEQ ID NO: 389952 - DNA, 15 bp, Homo sapiens
agatgacaataggca

SEQ ID NO: 389953 - DNA, 15 bp, Homo sapiens
cagatgacaataggc

SEQ ID NO: 389954 - DNA, 15 bp, Homo sapiens
ccagatgacaatagg

SEQ ID NO: 389955 - DNA, 15 bp, Homo sapiens
accagatgacaatag

SEQ ID NO: 389956 - DNA, 15 bp, Homo sapiens
caccagatgacaata

SEQ ID NO: 389957 - DNA, 15 bp, Homo sapiens
acaccagatgacaat

SEQ ID NO: 389958 - DNA, 15 bp, Homo sapiens
aacaccagatgacaa

SEQ ID NO: 389959 - DNA, 15 bp, Homo sapiens
taacaccagatgaca

SEQ ID NO: 389960 - DNA, 15 bp, Homo sapiens
gtaacaccagatgac

SEQ ID NO: 389961 - DNA, 15 bp, Homo sapiens
tgtaacaccagatga

SEQ ID NO: 389962 - DNA, 15 bp, Homo sapiens
ctgtaacaccagatg

SEQ ID NO: 389963 - DNA, 15 bp, Homo sapiens
tctgtaacaccagat

SEQ ID NO: 389964 - DNA, 15 bp, Homo sapiens
ttctgtaacaccaga

SEQ ID NO: 389965 - DNA, 15 bp, Homo sapiens
attctgtaacaccag

SEQ ID NO: 389966 - DNA, 15 bp, Homo sapiens
aattctgtaacacca

SEQ ID NO: 389967 - DNA, 15 bp, Homo sapiens
caattctgtaacacc

SEQ ID NO: 389968 - DNA, 15 bp, Homo sapiens
tcaattctgtaacac

SEQ ID NO: 389969 - DNA, 15 bp, Homo sapiens
ttcaattctgtaaca

SEQ ID NO: 389970 - DNA, 15 bp, Homo sapiens
gttcaattctgtaac

SEQ ID NO: 389971 - DNA, 15 bp, Homo sapiens
agttcaattctgtaa

SEQ ID NO: 389972 - DNA, 15 bp, Homo sapiens
aagttcaattctgta

SEQ ID NO: 389973 - DNA, 15 bp, Homo sapiens
gaagttcaattctgt

SEQ ID NO: 389974 - DNA, 15 bp, Homo sapiens
tgaagttcaattctg

SEQ ID NO: 389975 - DNA, 15 bp, Homo sapiens
ttgaagttcaattct

SEQ ID NO: 389976 - DNA, 15 bp, Homo sapiens
tttgaagttcaattc

SEQ ID NO: 389977 - DNA, 15 bp, Homo sapiens
atttgaagttcaatt

SEQ ID NO: 389978 - DNA, 15 bp, Homo sapiens
gatttgaagttcaat

SEQ ID NO: 389979 - DNA, 15 bp, Homo sapiens
tgatttgaagttcaa

SEQ ID NO: 389980 - DNA, 15 bp, Homo sapiens
gtgatttgaagttca

SEQ ID NO: 389981 - DNA, 15 bp, Homo sapiens
tgtgatttgaagttc

SEQ ID NO: 389982 - DNA, 15 bp, Homo sapiens
ctgtgatttgaagtt

SEQ ID NO: 389983 - DNA, 15 bp, Homo sapiens
actgtgatttgaagt

SEQ ID NO: 389984 - DNA, 15 bp, Homo sapiens
cactgtgatttgaag

SEQ ID NO: 389985 - DNA, 15 bp, Homo sapiens
tcactgtgatttgaa

SEQ ID NO: 389986 - DNA, 15 bp, Homo sapiens
atcactgtgatttga

SEQ ID NO: 389987 - DNA, 15 bp, Homo sapiens
tatcactgtgatttg

SEQ ID NO: 389988 - DNA, 15 bp, Homo sapiens
atatcactgtgattt

SEQ ID NO: 389989 - DNA, 15 bp, Homo sapiens
aatatcactgtgatt

SEQ ID NO: 389990 - DNA, 15 bp, Homo sapiens
aaatatcactgtgat

SEQ ID NO: 389991 - DNA, 15 bp, Homo sapiens
taaatatcactgtga

SEQ ID NO: 389992 - DNA, 15 bp, Homo sapiens
ctaaatatcactgtg

SEQ ID NO: 389993 - DNA, 15 bp, Homo sapiens
tctaaatatcactgt

SEQ ID NO: 389994 - DNA, 15 bp, Homo sapiens
ctctaaatatcactg

SEQ ID NO: 389995 - DNA, 15 bp, Homo sapiens
tctctaaatatcact

SEQ ID NO: 389996 - DNA, 15 bp, Homo sapiens
ctctctaaatatcac

SEQ ID NO: 389997 - DNA, 15 bp, Homo sapiens
actctctaaatatca

SEQ ID NO: 389998 - DNA, 15 bp, Homo sapiens
aactctctaaatatc

SEQ ID NO: 389999 - DNA, 15 bp, Homo sapiens
gaactctctaaatat

SEQ ID NO: 390000 - DNA, 15 bp, Homo sapiens
tgaactctctaaata

SEQ ID NO: 390001 - DNA, 15 bp, Homo sapiens
atgaactctctaaat

SEQ ID NO: 390002 - DNA, 15 bp, Homo sapiens
tatgaactctctaaa

SEQ ID NO: 390003 - DNA, 15 bp, Homo sapiens
ttatgaactctctaa

SEQ ID NO: 390004 - DNA, 15 bp, Homo sapiens
tttatgaactctcta

SEQ ID NO: 390005 - DNA, 15 bp, Homo sapiens
gtttatgaactctct

SEQ ID NO: 390006 - DNA, 15 bp, Homo sapiens
tgtttatgaactctc

SEQ ID NO: 390007 - DNA, 15 bp, Homo sapiens
atgtttatgaactct

SEQ ID NO: 390008 - DNA, 15 bp, Homo sapiens
catgtttatgaactc

SEQ ID NO: 390009 - DNA, 15 bp, Homo sapiens
acatgtttatgaact

SEQ ID NO: 390010 - DNA, 15 bp, Homo sapiens
tacatgtttatgaac

SEQ ID NO: 390011 - DNA, 15 bp, Homo sapiens
atacatgtttatgaa

SEQ ID NO: 390012 - DNA, 15 bp, Homo sapiens
aatacatgtttatga

SEQ ID NO: 390013 - DNA, 15 bp, Homo sapiens
caatacatgtttatg

SEQ ID NO: 390014 - DNA, 15 bp, Homo sapiens
acaatacatgtttat

SEQ ID NO: 390015 - DNA, 15 bp, Homo sapiens
aacaatacatgttta

SEQ ID NO: 390016 - DNA, 15 bp, Homo sapiens
aaacaatacatgttt

SEQ ID NO: 390017 - DNA, 15 bp, Homo sapiens
taaacaatacatgtt

SEQ ID NO: 390018 - DNA, 15 bp, Homo sapiens
ttaaacaatacatgt

SEQ ID NO: 390019 - DNA, 15 bp, Homo sapiens
tttaaacaatacatg

SEQ ID NO: 390020 - DNA, 15 bp, Homo sapiens
ctttaaacaatacat

SEQ ID NO: 390021 - DNA, 15 bp, Homo sapiens
tctttaaacaataca

SEQ ID NO: 390022 - DNA, 15 bp, Homo sapiens
ttctttaaacaatac

SEQ ID NO: 390023 - DNA, 15 bp, Homo sapiens
tttctttaaacaata

SEQ ID NO: 390024 - DNA, 15 bp, Homo sapiens
ttttctttaaacaat

SEQ ID NO: 390025 - DNA, 15 bp, Homo sapiens
tttttctttaaacaa

SEQ ID NO: 390026 - DNA, 15 bp, Homo sapiens
ttttttctttaaaca

SEQ ID NO: 390027 - DNA, 15 bp, Homo sapiens
tttttttctttaaac

SEQ ID NO: 390028 - DNA, 15 bp, Homo sapiens
atttttttctttaaa

SEQ ID NO: 390029 - DNA, 15 bp, Homo sapiens
tatttttttctttaa

SEQ ID NO: 390030 - DNA, 15 bp, Homo sapiens
atatttttttcttta

SEQ ID NO: 390031 - DNA, 15 bp, Homo sapiens
aatatttttttcttt

SEQ ID NO: 390032 - DNA, 15 bp, Homo sapiens
aaatatttttttctt

SEQ ID NO: 390033 - DNA, 15 bp, Homo sapiens
caaatatttttttct

SEQ ID NO: 390034 - DNA, 15 bp, Homo sapiens
acaaatatttttttc

SEQ ID NO: 390035 - DNA, 15 bp, Homo sapiens
aacaaatattttttt

SEQ ID NO: 390036 - DNA, 15 bp, Homo sapiens
aaacaaatatttttt

SEQ ID NO: 390037 - DNA, 15 bp, Homo sapiens
gaaacaaatattttt

SEQ ID NO: 390038 - DNA, 15 bp, Homo sapiens
agaaacaaatatttt

SEQ ID NO: 390039 - DNA, 15 bp, Homo sapiens
gagaaacaaatattt

SEQ ID NO: 390040 - DNA, 15 bp, Homo sapiens
agagaaacaaatatt

SEQ ID NO: 390041 - DNA, 15 bp, Homo sapiens
aagagaaacaaatat

SEQ ID NO: 390042 - DNA, 15 bp, Homo sapiens
taagagaaacaaata

SEQ ID NO: 390043 - DNA, 15 bp, Homo sapiens
gtaagagaaacaaat

SEQ ID NO: 390044 - DNA, 15 bp, Homo sapiens
ggtaagagaaacaaa

SEQ ID NO: 390045 - DNA, 15 bp, Homo sapiens
tggtaagagaaacaa

SEQ ID NO: 390046 - DNA, 15 bp, Homo sapiens
ctggtaagagaaaca

SEQ ID NO: 390047 - DNA, 15 bp, Homo sapiens
actggtaagagaaac

SEQ ID NO: 390048 - DNA, 15 bp, Homo sapiens
cactggtaagagaaa

SEQ ID NO: 390049 - DNA, 15 bp, Homo sapiens
acactggtaagagaa

SEQ ID NO: 390050 - DNA, 15 bp, Homo sapiens
gacactggtaagaga

SEQ ID NO: 390051 - DNA, 15 bp, Homo sapiens
tgacactggtaagag

SEQ ID NO: 390052 - DNA, 15 bp, Homo sapiens
gtgacactggtaaga

SEQ ID NO: 390053 - DNA, 15 bp, Homo sapiens
ggtgacactggtaag

SEQ ID NO: 390054 - DNA, 15 bp, Homo sapiens
aggtgacactggtaa

SEQ ID NO: 390055 - DNA, 15 bp, Homo sapiens
taggtgacactggta

SEQ ID NO: 390056 - DNA, 15 bp, Homo sapiens
ctaggtgacactggt

SEQ ID NO: 390057 - DNA, 15 bp, Homo sapiens
tctaggtgacactgg

SEQ ID NO: 390058 - DNA, 15 bp, Homo sapiens
ttctaggtgacactg

SEQ ID NO: 390059 - DNA, 15 bp, Homo sapiens
gttctaggtgacact

SEQ ID NO: 390060 - DNA, 15 bp, Homo sapiens
ggttctaggtgacac

SEQ ID NO: 390061 - DNA, 15 bp, Homo sapiens
aggttctaggtgaca

SEQ ID NO: 390062 - DNA, 15 bp, Homo sapiens
aaggttctaggtgac

SEQ ID NO: 390063 - DNA, 15 bp, Homo sapiens
taaggttctaggtga

SEQ ID NO: 390064 - DNA, 15 bp, Homo sapiens
ataaggttctaggtg

SEQ ID NO: 390065 - DNA, 15 bp, Homo sapiens
aataaggttctaggt

SEQ ID NO: 390066 - DNA, 15 bp, Homo sapiens
taataaggttctagg

SEQ ID NO: 390067 - DNA, 15 bp, Homo sapiens
ctaataaggttctag

SEQ ID NO: 390068 - DNA, 15 bp, Homo sapiens
tctaataaggttcta

SEQ ID NO: 390069 - DNA, 15 bp, Homo sapiens
ttctaataaggttct

SEQ ID NO: 390070 - DNA, 15 bp, Homo sapiens
tttctaataaggttc

SEQ ID NO: 390071 - DNA, 15 bp, Homo sapiens
atttctaataaggtt

SEQ ID NO: 390072 - DNA, 15 bp, Homo sapiens
catttctaataaggt

SEQ ID NO: 390073 - DNA, 15 bp, Homo sapiens
acatttctaataagg

SEQ ID NO: 390074 - DNA, 15 bp, Homo sapiens
gacatttctaataag

SEQ ID NO: 390075 - DNA, 15 bp, Homo sapiens
tgacatttctaataa

SEQ ID NO: 390076 - DNA, 15 bp, Homo sapiens
ttgacatttctaata

SEQ ID NO: 390077 - DNA, 15 bp, Homo sapiens
attgacatttctaat

SEQ ID NO: 390078 - DNA, 15 bp, Homo sapiens
aattgacatttctaa

SEQ ID NO: 390079 - DNA, 15 bp, Homo sapiens
gaattgacatttcta

SEQ ID NO: 390080 - DNA, 15 bp, Homo sapiens
ggaattgacatttct

SEQ ID NO: 390081 - DNA, 15 bp, Homo sapiens
aggaattgacatttc

SEQ ID NO: 390082 - DNA, 15 bp, Homo sapiens
aaggaattgacattt

SEQ ID NO: 390083 - DNA, 15 bp, Homo sapiens
aaaggaattgacatt

SEQ ID NO: 390084 - DNA, 15 bp, Homo sapiens
gaaaggaattgacat

SEQ ID NO: 390085 - DNA, 15 bp, Homo sapiens
agaaaggaattgaca

SEQ ID NO: 390086 - DNA, 15 bp, Homo sapiens
aagaaaggaattgac

SEQ ID NO: 390087 - DNA, 15 bp, Homo sapiens
aaagaaaggaattga

SEQ ID NO: 390088 - DNA, 15 bp, Homo sapiens
gaaagaaaggaattg

SEQ ID NO: 390089 - DNA, 15 bp, Homo sapiens
agaaagaaaggaatt

SEQ ID NO: 390090 - DNA, 15 bp, Homo sapiens
aagaaagaaaggaat

SEQ ID NO: 390091 - DNA, 15 bp, Homo sapiens
aaagaaagaaaggaa

SEQ ID NO: 390092 - DNA, 15 bp, Homo sapiens
gaaagaaagaaagga

SEQ ID NO: 390093 - DNA, 15 bp, Homo sapiens
agaaagaaagaaagg

SEQ ID NO: 390094 - DNA, 15 bp, Homo sapiens
cagaaagaaagaaag

SEQ ID NO: 390095 - DNA, 15 bp, Homo sapiens
tcagaaagaaagaaa

SEQ ID NO: 390096 - DNA, 15 bp, Homo sapiens
atcagaaagaaagaa

SEQ ID NO: 390097 - DNA, 15 bp, Homo sapiens
catcagaaagaaaga

SEQ ID NO: 390098 - DNA, 15 bp, Homo sapiens
acatcagaaagaaag

SEQ ID NO: 390099 - DNA, 15 bp, Homo sapiens
tacatcagaaagaaa

SEQ ID NO: 390100 - DNA, 15 bp, Homo sapiens
ctacatcagaaagaa

SEQ ID NO: 390101 - DNA, 15 bp, Homo sapiens
tctacatcagaaaga

SEQ ID NO: 390102 - DNA, 15 bp, Homo sapiens
ttctacatcagaaag

SEQ ID NO: 390103 - DNA, 15 bp, Homo sapiens
gttctacatcagaaa

SEQ ID NO: 390104 - DNA, 15 bp, Homo sapiens
tgttctacatcagaa

SEQ ID NO: 390105 - DNA, 15 bp, Homo sapiens
ttgttctacatcaga

SEQ ID NO: 390106 - DNA, 15 bp, Homo sapiens
cttgttctacatcag

SEQ ID NO: 390107 - DNA, 15 bp, Homo sapiens
acttgttctacatca

SEQ ID NO: 390108 - DNA, 15 bp, Homo sapiens
cacttgttctacatc

SEQ ID NO: 390109 - DNA, 15 bp, Homo sapiens
tcacttgttctacat

SEQ ID NO: 390110 - DNA, 15 bp, Homo sapiens
gtcacttgttctaca

SEQ ID NO: 390111 - DNA, 15 bp, Homo sapiens
ggtcacttgttctac

SEQ ID NO: 390112 - DNA, 15 bp, Homo sapiens
gggtcacttgttcta

SEQ ID NO: 390113 - DNA, 15 bp, Homo sapiens
tgggtcacttgttct

SEQ ID NO: 390114 - DNA, 15 bp, Homo sapiens
ttgggtcacttgttc

SEQ ID NO: 390115 - DNA, 15 bp, Homo sapiens
gttgggtcacttgtt

SEQ ID NO: 390116 - DNA, 15 bp, Homo sapiens
agttgggtcacttgt

SEQ ID NO: 390117 - DNA, 15 bp, Homo sapiens
aagttgggtcacttg

SEQ ID NO: 390118 - DNA, 15 bp, Homo sapiens
caagttgggtcactt

SEQ ID NO: 390119 - DNA, 15 bp, Homo sapiens
gcaagttgggtcact

SEQ ID NO: 390120 - DNA, 15 bp, Homo sapiens
tgcaagttgggtcac

SEQ ID NO: 390121 - DNA, 15 bp, Homo sapiens
ttgcaagttgggtca

SEQ ID NO: 390122 - DNA, 15 bp, Homo sapiens
tttgcaagttgggtc

SEQ ID NO: 390123 - DNA, 15 bp, Homo sapiens
atttgcaagttgggt

SEQ ID NO: 390124 - DNA, 15 bp, Homo sapiens
aatttgcaagttggg

SEQ ID NO: 390125 - DNA, 15 bp, Homo sapiens
taatttgcaagttgg

SEQ ID NO: 390126 - DNA, 15 bp, Homo sapiens
ttaatttgcaagttg

SEQ ID NO: 390127 - DNA, 15 bp, Homo sapiens
attaatttgcaagtt

SEQ ID NO: 390128 - DNA, 15 bp, Homo sapiens
aattaatttgcaagt

SEQ ID NO: 390129 - DNA, 15 bp, Homo sapiens
aaattaatttgcaag

SEQ ID NO: 390130 - DNA, 15 bp, Homo sapiens
taaattaatttgcaa

SEQ ID NO: 390131 - DNA, 15 bp, Homo sapiens
ttaaattaatttgca

SEQ ID NO: 390132 - DNA, 15 bp, Homo sapiens
attaaattaatttgc

SEQ ID NO: 390133 - DNA, 15 bp, Homo sapiens
aattaaattaatttg

SEQ ID NO: 390134 - DNA, 15 bp, Homo sapiens
gaattaaattaattt

SEQ ID NO: 390135 - DNA, 15 bp, Homo sapiens
tgaattaaattaatt

SEQ ID NO: 390136 - DNA, 15 bp, Homo sapiens
ttgaattaaattaat

SEQ ID NO: 390137 - DNA, 15 bp, Homo sapiens
attgaattaaattaa

SEQ ID NO: 390138 - DNA, 15 bp, Homo sapiens
aattgaattaaatta

SEQ ID NO: 390139 - DNA, 15 bp, Homo sapiens
gaattgaattaaatt

SEQ ID NO: 390140 - DNA, 15 bp, Homo sapiens
agaattgaattaaat

SEQ ID NO: 390141 - DNA, 15 bp, Homo sapiens
aagaattgaattaaa

SEQ ID NO: 390142 - DNA, 15 bp, Homo sapiens
aaagaattgaattaa

SEQ ID NO: 390143 - DNA, 15 bp, Homo sapiens
aaaagaattgaatta

SEQ ID NO: 390144 - DNA, 15 bp, Homo sapiens
aaaaagaattgaatt

SEQ ID NO: 390145 - DNA, 15 bp, Homo sapiens
taaaaagaattgaat

SEQ ID NO: 390146 - DNA, 15 bp, Homo sapiens
ttaaaaagaattgaa

SEQ ID NO: 390147 - DNA, 15 bp, Homo sapiens
gttaaaaagaattga

SEQ ID NO: 390148 - DNA, 15 bp, Homo sapiens
tgttaaaaagaattg

SEQ ID NO: 390149 - DNA, 15 bp, Homo sapiens
ttgttaaaaagaatt

SEQ ID NO: 390150 - DNA, 15 bp, Homo sapiens
attgttaaaaagaat

SEQ ID NO: 390151 - DNA, 15 bp, Homo sapiens
gattgttaaaaagaa

SEQ ID NO: 390152 - DNA, 15 bp, Homo sapiens
tgattgttaaaaaga

SEQ ID NO: 390153 - DNA, 15 bp, Homo sapiens
ttgattgttaaaaag

SEQ ID NO: 390154 - DNA, 15 bp, Homo sapiens
attgattgttaaaaa

SEQ ID NO: 390155 - DNA, 15 bp, Homo sapiens
aattgattgttaaaa

SEQ ID NO: 390156 - DNA, 15 bp, Homo sapiens
gaattgattgttaaa

SEQ ID NO: 390157 - DNA, 15 bp, Homo sapiens
agaattgattgttaa

SEQ ID NO: 390158 - DNA, 15 bp, Homo sapiens
gagaattgattgtta

SEQ ID NO: 390159 - DNA, 15 bp, Homo sapiens
tgagaattgattgtt

SEQ ID NO: 390160 - DNA, 15 bp, Homo sapiens
ctgagaattgattgt

SEQ ID NO: 390161 - DNA, 15 bp, Homo sapiens
cctgagaattgattg

SEQ ID NO: 390162 - DNA, 15 bp, Homo sapiens
gcctgagaattgatt

SEQ ID NO: 390163 - DNA, 15 bp, Homo sapiens
ggcctgagaattgat

SEQ ID NO: 390164 - DNA, 15 bp, Homo sapiens
gggcctgagaattga

SEQ ID NO: 390165 - DNA, 15 bp, Homo sapiens
ggggcctgagaattg

SEQ ID NO: 390166 - DNA, 15 bp, Homo sapiens
aggggcctgagaatt

SEQ ID NO: 390167 - DNA, 15 bp, Homo sapiens
aaggggcctgagaat

SEQ ID NO: 390168 - DNA, 15 bp, Homo sapiens
aaaggggcctgagaa

SEQ ID NO: 390169 - DNA, 15 bp, Homo sapiens
gaaaggggcctgaga

SEQ ID NO: 390170 - DNA, 15 bp, Homo sapiens
tgaaaggggcctgag

SEQ ID NO: 390171 - DNA, 15 bp, Homo sapiens
ctgaaaggggcctga

SEQ ID NO: 390172 - DNA, 15 bp, Homo sapiens
tctgaaaggggcctg

SEQ ID NO: 390173 - DNA, 15 bp, Homo sapiens
ttctgaaaggggcct

SEQ ID NO: 390174 - DNA, 15 bp, Homo sapiens
tttctgaaaggggcc

SEQ ID NO: 390175 - DNA, 15 bp, Homo sapiens
ttttctgaaaggggc

SEQ ID NO: 390176 - DNA, 15 bp, Homo sapiens
tttttctgaaagggg

SEQ ID NO: 390177 - DNA, 15 bp, Homo sapiens
ttttttctgaaaggg

SEQ ID NO: 390178 - DNA, 15 bp, Homo sapiens
tttttttctgaaagg

SEQ ID NO: 390179 - DNA, 15 bp, Homo sapiens
ttttttttctgaaag

SEQ ID NO: 390180 - DNA, 15 bp, Homo sapiens
cttttttttctgaaa

SEQ ID NO: 390181 - DNA, 15 bp, Homo sapiens
gcttttttttctgaa

SEQ ID NO: 390182 - DNA, 15 bp, Homo sapiens
tgcttttttttctga

SEQ ID NO: 390183 - DNA, 15 bp, Homo sapiens
gtgcttttttttctg

SEQ ID NO: 390184 - DNA, 15 bp, Homo sapiens
agtgcttttttttct

SEQ ID NO: 390185 - DNA, 15 bp, Homo sapiens
aagtgcttttttttc

SEQ ID NO: 390186 - DNA, 15 bp, Homo sapiens
taagtgctttttttt

SEQ ID NO: 390187 - DNA, 15 bp, Homo sapiens
ataagtgcttttttt

SEQ ID NO: 390188 - DNA, 15 bp, Homo sapiens
cataagtgctttttt

SEQ ID NO: 390189 - DNA, 15 bp, Homo sapiens
gcataagtgcttttt

SEQ ID NO: 390190 - DNA, 15 bp, Homo sapiens
agcataagtgctttt

SEQ ID NO: 390191 - DNA, 15 bp, Homo sapiens
aagcataagtgcttt

SEQ ID NO: 390192 - DNA, 15 bp, Homo sapiens
aaagcataagtgctt

SEQ ID NO: 390193 - DNA, 15 bp, Homo sapiens
aaaagcataagtgct

SEQ ID NO: 390194 - DNA, 15 bp, Homo sapiens
gaaaagcataagtgc

SEQ ID NO: 390195 - DNA, 15 bp, Homo sapiens
ggaaaagcataagtg

SEQ ID NO: 390196 - DNA, 15 bp, Homo sapiens
aggaaaagcataagt

SEQ ID NO: 390197 - DNA, 15 bp, Homo sapiens
aaggaaaagcataag

SEQ ID NO: 390198 - DNA, 15 bp, Homo sapiens
gaaggaaaagcataa

SEQ ID NO: 390199 - DNA, 15 bp, Homo sapiens
ggaaggaaaagcata

SEQ ID NO: 390200 - DNA, 15 bp, Homo sapiens
aggaaggaaaagcat

SEQ ID NO: 390201 - DNA, 15 bp, Homo sapiens
gaggaaggaaaagca

SEQ ID NO: 390202 - DNA, 15 bp, Homo sapiens
agaggaaggaaaagc

SEQ ID NO: 390203 - DNA, 15 bp, Homo sapiens
gagaggaaggaaaag

SEQ ID NO: 390204 - DNA, 15 bp, Homo sapiens
tgagaggaaggaaaa

SEQ ID NO: 390205 - DNA, 15 bp, Homo sapiens
ttgagaggaaggaaa

SEQ ID NO: 390206 - DNA, 15 bp, Homo sapiens
tttgagaggaaggaa

SEQ ID NO: 390207 - DNA, 15 bp, Homo sapiens
ttttgagaggaagga

SEQ ID NO: 390208 - DNA, 15 bp, Homo sapiens
tttttgagaggaagg

SEQ ID NO: 390209 - DNA, 15 bp, Homo sapiens
atttttgagaggaag

SEQ ID NO: 390210 - DNA, 15 bp, Homo sapiens
tatttttgagaggaa

SEQ ID NO: 390211 - DNA, 15 bp, Homo sapiens
ttatttttgagagga

SEQ ID NO: 390212 - DNA, 15 bp, Homo sapiens
tttatttttgagagg

SEQ ID NO: 390213 - DNA, 15 bp, Homo sapiens
ctttatttttgagag

SEQ ID NO: 390214 - DNA, 15 bp, Homo sapiens
tctttatttttgaga

SEQ ID NO: 390215 - DNA, 15 bp, Homo sapiens
ttctttatttttgag

SEQ ID NO: 390216 - DNA, 15 bp, Homo sapiens
gttctttatttttga

SEQ ID NO: 390217 - DNA, 15 bp, Homo sapiens
agttctttatttttg

SEQ ID NO: 390218 - DNA, 15 bp, Homo sapiens
gagttctttattttt

SEQ ID NO: 390219 - DNA, 15 bp, Homo sapiens
tgagttctttatttt

SEQ ID NO: 390220 - DNA, 15 bp, Homo sapiens
ttgagttctttattt

SEQ ID NO: 390221 - DNA, 15 bp, Homo sapiens
cttgagttctttatt

SEQ ID NO: 390222 - DNA, 15 bp, Homo sapiens
acttgagttctttat

SEQ ID NO: 390223 - DNA, 15 bp, Homo sapiens
aacttgagttcttta

SEQ ID NO: 390224 - DNA, 15 bp, Homo sapiens
aaacttgagttcttt

SEQ ID NO: 390225 - DNA, 15 bp, Homo sapiens
caaacttgagttctt

SEQ ID NO: 390226 - DNA, 15 bp, Homo sapiens
gcaaacttgagttct

SEQ ID NO: 390227 - DNA, 15 bp, Homo sapiens
tgcaaacttgagttc

SEQ ID NO: 390228 - DNA, 15 bp, Homo sapiens
atgcaaacttgagtt

SEQ ID NO: 390229 - DNA, 15 bp, Homo sapiens
aatgcaaacttgagt

SEQ ID NO: 390230 - DNA, 15 bp, Homo sapiens
taatgcaaacttgag

SEQ ID NO: 390231 - DNA, 15 bp, Homo sapiens
ataatgcaaacttga

SEQ ID NO: 390232 - DNA, 15 bp, Homo sapiens
aataatgcaaacttg

SEQ ID NO: 390233 - DNA, 15 bp, Homo sapiens
aaataatgcaaactt

SEQ ID NO: 390234 - DNA, 15 bp, Homo sapiens
gaaataatgcaaact

SEQ ID NO: 390235 - DNA, 15 bp, Homo sapiens
agaaataatgcaaac

SEQ ID NO: 390236 - DNA, 15 bp, Homo sapiens
tagaaataatgcaaa

SEQ ID NO: 390237 - DNA, 15 bp, Homo sapiens
atagaaataatgcaa

SEQ ID NO: 390238 - DNA, 15 bp, Homo sapiens
catagaaataatgca

SEQ ID NO: 390239 - DNA, 15 bp, Homo sapiens
tcatagaaataatgc

SEQ ID NO: 390240 - DNA, 15 bp, Homo sapiens
ttcatagaaataatg

SEQ ID NO: 390241 - DNA, 15 bp, Homo sapiens
tttcatagaaataat

SEQ ID NO: 390242 - DNA, 15 bp, Homo sapiens
atttcatagaaataa

SEQ ID NO: 390243 - DNA, 15 bp, Homo sapiens
tatttcatagaaata

SEQ ID NO: 390244 - DNA, 15 bp, Homo sapiens
ttatttcatagaaat

SEQ ID NO: 390245 - DNA, 15 bp, Homo sapiens
cttatttcatagaaa

SEQ ID NO: 390246 - DNA, 15 bp, Homo sapiens
acttatttcatagaa

SEQ ID NO: 390247 - DNA, 15 bp, Homo sapiens
tacttatttcataga

SEQ ID NO: 390248 - DNA, 15 bp, Homo sapiens
atacttatttcatag

SEQ ID NO: 390249 - DNA, 15 bp, Homo sapiens
tatacttatttcata

SEQ ID NO: 390250 - DNA, 15 bp, Homo sapiens
ttatacttatttcat

SEQ ID NO: 390251 - DNA, 15 bp, Homo sapiens
attatacttatttca

SEQ ID NO: 390252 - DNA, 15 bp, Homo sapiens
aattatacttatttc

SEQ ID NO: 390253 - DNA, 15 bp, Homo sapiens
aaattatacttattt

SEQ ID NO: 390254 - DNA, 15 bp, Homo sapiens
taaattatacttatt

SEQ ID NO: 390255 - DNA, 15 bp, Homo sapiens
gtaaattatacttat

SEQ ID NO: 390256 - DNA, 15 bp, Homo sapiens
tgtaaattatactta

SEQ ID NO: 390257 - DNA, 15 bp, Homo sapiens
gtgtaaattatactt

SEQ ID NO: 390258 - DNA, 15 bp, Homo sapiens
agtgtaaattatact

SEQ ID NO: 390259 - DNA, 15 bp, Homo sapiens
gagtgtaaattatac

SEQ ID NO: 390260 - DNA, 15 bp, Homo sapiens
tgagtgtaaattata

SEQ ID NO: 390261 - DNA, 15 bp, Homo sapiens
ctgagtgtaaattat

SEQ ID NO: 390262 - DNA, 15 bp, Homo sapiens
tctgagtgtaaatta

SEQ ID NO: 390263 - DNA, 15 bp, Homo sapiens
ttctgagtgtaaatt

SEQ ID NO: 390264 - DNA, 15 bp, Homo sapiens
cttctgagtgtaaat

SEQ ID NO: 390265 - DNA, 15 bp, Homo sapiens
acttctgagtgtaaa

SEQ ID NO: 390266 - DNA, 15 bp, Homo sapiens
gacttctgagtgtaa

SEQ ID NO: 390267 - DNA, 15 bp, Homo sapiens
tgacttctgagtgta

SEQ ID NO: 390268 - DNA, 15 bp, Homo sapiens
ctgacttctgagtgt

SEQ ID NO: 390269 - DNA, 15 bp, Homo sapiens
actgacttctgagtg

SEQ ID NO: 390270 - DNA, 15 bp, Homo sapiens
tactgacttctgagt

SEQ ID NO: 390271 - DNA, 15 bp, Homo sapiens
ctactgacttctgag

SEQ ID NO: 390272 - DNA, 15 bp, Homo sapiens
cctactgacttctga

SEQ ID NO: 390273 - DNA, 15 bp, Homo sapiens
gcctactgacttctg

SEQ ID NO: 390274 - DNA, 15 bp, Homo sapiens
agcctactgacttct

SEQ ID NO: 390275 - DNA, 15 bp, Homo sapiens
tagcctactgacttc

SEQ ID NO: 390276 - DNA, 15 bp, Homo sapiens
ctagcctactgactt

SEQ ID NO: 390277 - DNA, 15 bp, Homo sapiens
actagcctactgact

SEQ ID NO: 390278 - DNA, 15 bp, Homo sapiens
tactagcctactgac

SEQ ID NO: 390279 - DNA, 15 bp, Homo sapiens
ttactagcctactga

SEQ ID NO: 390280 - DNA, 15 bp, Homo sapiens
cttactagcctactg

SEQ ID NO: 390281 - DNA, 15 bp, Homo sapiens
tcttactagcctact

SEQ ID NO: 390282 - DNA, 15 bp, Homo sapiens
ttcttactagcctac

SEQ ID NO: 390283 - DNA, 15 bp, Homo sapiens
tttcttactagccta

SEQ ID NO: 390284 - DNA, 15 bp, Homo sapiens
gtttcttactagcct

SEQ ID NO: 390285 - DNA, 15 bp, Homo sapiens
agtttcttactagcc

SEQ ID NO: 390286 - DNA, 15 bp, Homo sapiens
tagtttcttactagc

SEQ ID NO: 390287 - DNA, 15 bp, Homo sapiens
ctagtttcttactag

SEQ ID NO: 390288 - DNA, 15 bp, Homo sapiens
cctagtttcttacta

SEQ ID NO: 390289 - DNA, 15 bp, Homo sapiens
ccctagtttcttact

SEQ ID NO: 390290 - DNA, 15 bp, Homo sapiens
accctagtttcttac

SEQ ID NO: 390291 - DNA, 15 bp, Homo sapiens
aaccctagtttctta

SEQ ID NO: 390292 - DNA, 15 bp, Homo sapiens
caaccctagtttctt

SEQ ID NO: 390293 - DNA, 15 bp, Homo sapiens
tcaaccctagtttct

SEQ ID NO: 390294 - DNA, 15 bp, Homo sapiens
atcaaccctagtttc

SEQ ID NO: 390295 - DNA, 15 bp, Homo sapiens
tatcaaccctagttt

SEQ ID NO: 390296 - DNA, 15 bp, Homo sapiens
ttatcaaccctagtt

SEQ ID NO: 390297 - DNA, 15 bp, Homo sapiens
tttatcaaccctagt

SEQ ID NO: 390298 - DNA, 15 bp, Homo sapiens
gtttatcaaccctag

SEQ ID NO: 390299 - DNA, 15 bp, Homo sapiens
tgtttatcaacccta

SEQ ID NO: 390300 - DNA, 15 bp, Homo sapiens
ctgtttatcaaccct

SEQ ID NO: 390301 - DNA, 15 bp, Homo sapiens
tctgtttatcaaccc

SEQ ID NO: 390302 - DNA, 15 bp, Homo sapiens
gtctgtttatcaacc

SEQ ID NO: 390303 - DNA, 15 bp, Homo sapiens
agtctgtttatcaac

SEQ ID NO: 390304 - DNA, 15 bp, Homo sapiens
cagtctgtttatcaa

SEQ ID NO: 390305 - DNA, 15 bp, Homo sapiens
ccagtctgtttatca

SEQ ID NO: 390306 - DNA, 15 bp, Homo sapiens
tccagtctgtttatc

SEQ ID NO: 390307 - DNA, 15 bp, Homo sapiens
ttccagtctgtttat

SEQ ID NO: 390308 - DNA, 15 bp, Homo sapiens
cttccagtctgttta

SEQ ID NO: 390309 - DNA, 15 bp, Homo sapiens
tcttccagtctgttt

SEQ ID NO: 390310 - DNA, 15 bp, Homo sapiens
gtcttccagtctgtt

SEQ ID NO: 390311 - DNA, 15 bp, Homo sapiens
tgtcttccagtctgt

SEQ ID NO: 390312 - DNA, 15 bp, Homo sapiens
atgtcttccagtctg

SEQ ID NO: 390313 - DNA, 15 bp, Homo sapiens
catgtcttccagtct

SEQ ID NO: 390314 - DNA, 15 bp, Homo sapiens
acatgtcttccagtc

SEQ ID NO: 390315 - DNA, 15 bp, Homo sapiens
aacatgtcttccagt

SEQ ID NO: 390316 - DNA, 15 bp, Homo sapiens
gaacatgtcttccag

SEQ ID NO: 390317 - DNA, 15 bp, Homo sapiens
ggaacatgtcttcca

SEQ ID NO: 390318 - DNA, 15 bp, Homo sapiens
gggaacatgtcttcc

SEQ ID NO: 390319 - DNA, 15 bp, Homo sapiens
agggaacatgtcttc

SEQ ID NO: 390320 - DNA, 15 bp, Homo sapiens
aagggaacatgtctt

SEQ ID NO: 390321 - DNA, 15 bp, Homo sapiens
taagggaacatgtct

SEQ ID NO: 390322 - DNA, 15 bp, Homo sapiens
gtaagggaacatgtc

SEQ ID NO: 390323 - DNA, 15 bp, Homo sapiens
agtaagggaacatgt

SEQ ID NO: 390324 - DNA, 15 bp, Homo sapiens
gagtaagggaacatg

SEQ ID NO: 390325 - DNA, 15 bp, Homo sapiens
agagtaagggaacat

SEQ ID NO: 390326 - DNA, 15 bp, Homo sapiens
gagagtaagggaaca

SEQ ID NO: 390327 - DNA, 15 bp, Homo sapiens
tgagagtaagggaac

SEQ ID NO: 390328 - DNA, 15 bp, Homo sapiens
ttgagagtaagggaa

SEQ ID NO: 390329 - DNA, 15 bp, Homo sapiens
cttgagagtaaggga

SEQ ID NO: 390330 - DNA, 15 bp, Homo sapiens
acttgagagtaaggg

SEQ ID NO: 390331 - DNA, 15 bp, Homo sapiens
aacttgagagtaagg

SEQ ID NO: 390332 - DNA, 15 bp, Homo sapiens
caacttgagagtaag

SEQ ID NO: 390333 - DNA, 15 bp, Homo sapiens
gcaacttgagagtaa

SEQ ID NO: 390334 - DNA, 15 bp, Homo sapiens
agcaacttgagagta

SEQ ID NO: 390335 - DNA, 15 bp, Homo sapiens
aagcaacttgagagt

SEQ ID NO: 390336 - DNA, 15 bp, Homo sapiens
caagcaacttgagag

SEQ ID NO: 390337 - DNA, 15 bp, Homo sapiens
gcaagcaacttgaga

SEQ ID NO: 390338 - DNA, 15 bp, Homo sapiens
tgcaagcaacttgag

SEQ ID NO: 390339 - DNA, 15 bp, Homo sapiens
ttgcaagcaacttga

SEQ ID NO: 390340 - DNA, 15 bp, Homo sapiens
tttgcaagcaacttg

SEQ ID NO: 390341 - DNA, 15 bp, Homo sapiens
atttgcaagcaactt

SEQ ID NO: 390342 - DNA, 15 bp, Homo sapiens
aatttgcaagcaact

SEQ ID NO: 390343 - DNA, 15 bp, Homo sapiens
taatttgcaagcaac

SEQ ID NO: 390344 - DNA, 15 bp, Homo sapiens
ctaatttgcaagcaa

SEQ ID NO: 390345 - DNA, 15 bp, Homo sapiens
actaatttgcaagca

SEQ ID NO: 390346 - DNA, 15 bp, Homo sapiens
tactaatttgcaagc

SEQ ID NO: 390347 - DNA, 15 bp, Homo sapiens
gtactaatttgcaag

SEQ ID NO: 390348 - DNA, 15 bp, Homo sapiens
agtactaatttgcaa

SEQ ID NO: 390349 - DNA, 15 bp, Homo sapiens
cagtactaatttgca

SEQ ID NO: 390350 - DNA, 15 bp, Homo sapiens
tcagtactaatttgc

SEQ ID NO: 390351 - DNA, 15 bp, Homo sapiens
atcagtactaatttg

SEQ ID NO: 390352 - DNA, 15 bp, Homo sapiens
aatcagtactaattt

SEQ ID NO: 390353 - DNA, 15 bp, Homo sapiens
taatcagtactaatt

SEQ ID NO: 390354 - DNA, 15 bp, Homo sapiens
gtaatcagtactaat

SEQ ID NO: 390355 - DNA, 15 bp, Homo sapiens
agtaatcagtactaa

SEQ ID NO: 390356 - DNA, 15 bp, Homo sapiens
tagtaatcagtacta

SEQ ID NO: 390357 - DNA, 15 bp, Homo sapiens
atagtaatcagtact

SEQ ID NO: 390358 - DNA, 15 bp, Homo sapiens
aatagtaatcagtac

SEQ ID NO: 390359 - DNA, 15 bp, Homo sapiens
gaatagtaatcagta

SEQ ID NO: 390360 - DNA, 15 bp, Homo sapiens
tgaatagtaatcagt

SEQ ID NO: 390361 - DNA, 15 bp, Homo sapiens
ttgaatagtaatcag

SEQ ID NO: 390362 - DNA, 15 bp, Homo sapiens
tttgaatagtaatca

SEQ ID NO: 390363 - DNA, 15 bp, Homo sapiens
ttttgaatagtaatc

SEQ ID NO: 390364 - DNA, 15 bp, Homo sapiens
cttttgaatagtaat

SEQ ID NO: 390365 - DNA, 15 bp, Homo sapiens
tcttttgaatagtaa

SEQ ID NO: 390366 - DNA, 15 bp, Homo sapiens
ttcttttgaatagta

SEQ ID NO: 390367 - DNA, 15 bp, Homo sapiens
tttcttttgaatagt

SEQ ID NO: 390368 - DNA, 15 bp, Homo sapiens
ctttcttttgaatag

SEQ ID NO: 390369 - DNA, 15 bp, Homo sapiens
gctttcttttgaata

SEQ ID NO: 390370 - DNA, 15 bp, Homo sapiens
tgctttcttttgaat

SEQ ID NO: 390371 - DNA, 15 bp, Homo sapiens
ttgctttcttttgaa

SEQ ID NO: 390372 - DNA, 15 bp, Homo sapiens
attgctttcttttga

SEQ ID NO: 390373 - DNA, 15 bp, Homo sapiens
cattgctttcttttg

SEQ ID NO: 390374 - DNA, 15 bp, Homo sapiens
acattgctttctttt

SEQ ID NO: 390375 - DNA, 15 bp, Homo sapiens
gacattgctttcttt

SEQ ID NO: 390376 - DNA, 15 bp, Homo sapiens
agacattgctttctt

SEQ ID NO: 390377 - DNA, 15 bp, Homo sapiens
aagacattgctttct

SEQ ID NO: 390378 - DNA, 15 bp, Homo sapiens
caagacattgctttc

SEQ ID NO: 390379 - DNA, 15 bp, Homo sapiens
ccaagacattgcttt

SEQ ID NO: 390380 - DNA, 15 bp, Homo sapiens
accaagacattgctt

SEQ ID NO: 390381 - DNA, 15 bp, Homo sapiens
aaccaagacattgct

SEQ ID NO: 390382 - DNA, 15 bp, Homo sapiens
aaaccaagacattgc

SEQ ID NO: 390383 - DNA, 15 bp, Homo sapiens
aaaaccaagacattg

SEQ ID NO: 390384 - DNA, 15 bp, Homo sapiens
gaaaaccaagacatt

SEQ ID NO: 390385 - DNA, 15 bp, Homo sapiens
tgaaaaccaagacat

SEQ ID NO: 390386 - DNA, 15 bp, Homo sapiens
ttgaaaaccaagaca

SEQ ID NO: 390387 - DNA, 15 bp, Homo sapiens
tttgaaaaccaagac

SEQ ID NO: 390388 - DNA, 15 bp, Homo sapiens
ttttgaaaaccaaga

SEQ ID NO: 390389 - DNA, 15 bp, Homo sapiens
cttttgaaaaccaag

SEQ ID NO: 390390 - DNA, 15 bp, Homo sapiens
gcttttgaaaaccaa

SEQ ID NO: 390391 - DNA, 15 bp, Homo sapiens
tgcttttgaaaacca

SEQ ID NO: 390392 - DNA, 15 bp, Homo sapiens
atgcttttgaaaacc

SEQ ID NO: 390393 - DNA, 15 bp, Homo sapiens
tatgcttttgaaaac

SEQ ID NO: 390394 - DNA, 15 bp, Homo sapiens
atatgcttttgaaaa

SEQ ID NO: 390395 - DNA, 15 bp, Homo sapiens
catatgcttttgaaa

SEQ ID NO: 390396 - DNA, 15 bp, Homo sapiens
ccatatgcttttgaa

SEQ ID NO: 390397 - DNA, 15 bp, Homo sapiens
cccatatgcttttga

SEQ ID NO: 390398 - DNA, 15 bp, Homo sapiens
acccatatgcttttg

SEQ ID NO: 390399 - DNA, 15 bp, Homo sapiens
gacccatatgctttt

SEQ ID NO: 390400 - DNA, 15 bp, Homo sapiens
agacccatatgcttt

SEQ ID NO: 390401 - DNA, 15 bp, Homo sapiens
aagacccatatgctt

SEQ ID NO: 390402 - DNA, 15 bp, Homo sapiens
aaagacccatatgct

SEQ ID NO: 390403 - DNA, 15 bp, Homo sapiens
aaaagacccatatgc

SEQ ID NO: 390404 - DNA, 15 bp, Homo sapiens
caaaagacccatatg

SEQ ID NO: 390405 - DNA, 15 bp, Homo sapiens
acaaaagacccatat

SEQ ID NO: 390406 - DNA, 15 bp, Homo sapiens
tacaaaagacccata

SEQ ID NO: 390407 - DNA, 15 bp, Homo sapiens
ttacaaaagacccat

SEQ ID NO: 390408 - DNA, 15 bp, Homo sapiens
cttacaaaagaccca

SEQ ID NO: 390409 - DNA, 15 bp, Homo sapiens
ccttacaaaagaccc

SEQ ID NO: 390410 - DNA, 15 bp, Homo sapiens
tccttacaaaagacc

SEQ ID NO: 390411 - DNA, 15 bp, Homo sapiens
gtccttacaaaagac

SEQ ID NO: 390412 - DNA, 15 bp, Homo sapiens
tgtccttacaaaaga

SEQ ID NO: 390413 - DNA, 15 bp, Homo sapiens
atgtccttacaaaag

SEQ ID NO: 390414 - DNA, 15 bp, Homo sapiens
catgtccttacaaaa

SEQ ID NO: 390415 - DNA, 15 bp, Homo sapiens
ccatgtccttacaaa

SEQ ID NO: 390416 - DNA, 15 bp, Homo sapiens
cccatgtccttacaa

SEQ ID NO: 390417 - DNA, 15 bp, Homo sapiens
acccatgtccttaca

SEQ ID NO: 390418 - DNA, 15 bp, Homo sapiens
gacccatgtccttac

SEQ ID NO: 390419 - DNA, 15 bp, Homo sapiens
agacccatgtcctta

SEQ ID NO: 390420 - DNA, 15 bp, Homo sapiens
gagacccatgtcctt

SEQ ID NO: 390421 - DNA, 15 bp, Homo sapiens
agagacccatgtcct

SEQ ID NO: 390422 - DNA, 15 bp, Homo sapiens
cagagacccatgtcc

SEQ ID NO: 390423 - DNA, 15 bp, Homo sapiens
gcagagacccatgtc

SEQ ID NO: 390424 - DNA, 15 bp, Homo sapiens
agcagagacccatgt

SEQ ID NO: 390425 - DNA, 15 bp, Homo sapiens
gagcagagacccatg

SEQ ID NO: 390426 - DNA, 15 bp, Homo sapiens
agagcagagacccat

SEQ ID NO: 390427 - DNA, 15 bp, Homo sapiens
gagagcagagaccca

SEQ ID NO: 390428 - DNA, 15 bp, Homo sapiens
agagagcagagaccc

SEQ ID NO: 390429 - DNA, 15 bp, Homo sapiens
cagagagcagagacc

SEQ ID NO: 390430 - DNA, 15 bp, Homo sapiens
gcagagagcagagac

SEQ ID NO: 390431 - DNA, 15 bp, Homo sapiens
tgcagagagcagaga

SEQ ID NO: 390432 - DNA, 15 bp, Homo sapiens
ttgcagagagcagag

SEQ ID NO: 390433 - DNA, 15 bp, Homo sapiens
cttgcagagagcaga

SEQ ID NO: 390434 - DNA, 15 bp, Homo sapiens
acttgcagagagcag

SEQ ID NO: 390435 - DNA, 15 bp, Homo sapiens
cacttgcagagagca

SEQ ID NO: 390436 - DNA, 15 bp, Homo sapiens
tcacttgcagagagc

SEQ ID NO: 390437 - DNA, 15 bp, Homo sapiens
gtcacttgcagagag

SEQ ID NO: 390438 - DNA, 15 bp, Homo sapiens
agtcacttgcagaga

SEQ ID NO: 390439 - DNA, 15 bp, Homo sapiens
aagtcacttgcagag

SEQ ID NO: 390440 - DNA, 15 bp, Homo sapiens
aaagtcacttgcaga

SEQ ID NO: 390441 - DNA, 15 bp, Homo sapiens
taaagtcacttgcag

SEQ ID NO: 390442 - DNA, 15 bp, Homo sapiens
ataaagtcacttgca

SEQ ID NO: 390443 - DNA, 15 bp, Homo sapiens
aataaagtcacttgc

SEQ ID NO: 390444 - DNA, 15 bp, Homo sapiens
taataaagtcacttg

SEQ ID NO: 390445 - DNA, 15 bp, Homo sapiens
ataataaagtcactt

SEQ ID NO: 390446 - DNA, 15 bp, Homo sapiens
cataataaagtcact

SEQ ID NO: 390447 - DNA, 15 bp, Homo sapiens
ccataataaagtcac

SEQ ID NO: 390448 - DNA, 15 bp, Homo sapiens
tccataataaagtca

SEQ ID NO: 390449 - DNA, 15 bp, Homo sapiens
atccataataaagtc

SEQ ID NO: 390450 - DNA, 15 bp, Homo sapiens
tatccataataaagt

SEQ ID NO: 390451 - DNA, 15 bp, Homo sapiens
ctatccataataaag

SEQ ID NO: 390452 - DNA, 15 bp, Homo sapiens
tctatccataataaa

SEQ ID NO: 390453 - DNA, 15 bp, Homo sapiens
ctctatccataataa

SEQ ID NO: 390454 - DNA, 15 bp, Homo sapiens
cctctatccataata

SEQ ID NO: 390455 - DNA, 15 bp, Homo sapiens
acctctatccataat

SEQ ID NO: 390456 - DNA, 15 bp, Homo sapiens
aacctctatccataa

SEQ ID NO: 390457 - DNA, 15 bp, Homo sapiens
caacctctatccata

SEQ ID NO: 390458 - DNA, 15 bp, Homo sapiens
acaacctctatccat

SEQ ID NO: 390459 - DNA, 15 bp, Homo sapiens
gacaacctctatcca

SEQ ID NO: 390460 - DNA, 15 bp, Homo sapiens
agacaacctctatcc

SEQ ID NO: 390461 - DNA, 15 bp, Homo sapiens
tagacaacctctatc

SEQ ID NO: 390462 - DNA, 15 bp, Homo sapiens
ctagacaacctctat

SEQ ID NO: 390463 - DNA, 15 bp, Homo sapiens
tctagacaacctcta

SEQ ID NO: 390464 - DNA, 15 bp, Homo sapiens
ctctagacaacctct

SEQ ID NO: 390465 - DNA, 15 bp, Homo sapiens
tctctagacaacctc

SEQ ID NO: 390466 - DNA, 15 bp, Homo sapiens
ctctctagacaacct

SEQ ID NO: 390467 - DNA, 15 bp, Homo sapiens
cctctctagacaacc

SEQ ID NO: 390468 - DNA, 15 bp, Homo sapiens
tcctctctagacaac

SEQ ID NO: 390469 - DNA, 15 bp, Homo sapiens
gtcctctctagacaa

SEQ ID NO: 390470 - DNA, 15 bp, Homo sapiens
agtcctctctagaca

SEQ ID NO: 390471 - DNA, 15 bp, Homo sapiens
aagtcctctctagac

SEQ ID NO: 390472 - DNA, 15 bp, Homo sapiens
gaagtcctctctaga

SEQ ID NO: 390473 - DNA, 15 bp, Homo sapiens
tgaagtcctctctag

SEQ ID NO: 390474 - DNA, 15 bp, Homo sapiens
gtgaagtcctctcta

SEQ ID NO: 390475 - DNA, 15 bp, Homo sapiens
tgtgaagtcctctct

SEQ ID NO: 390476 - DNA, 15 bp, Homo sapiens
ttgtgaagtcctctc

SEQ ID NO: 390477 - DNA, 15 bp, Homo sapiens
cttgtgaagtcctct

SEQ ID NO: 390478 - DNA, 15 bp, Homo sapiens
ccttgtgaagtcctc

SEQ ID NO: 390479 - DNA, 15 bp, Homo sapiens
gccttgtgaagtcct

SEQ ID NO: 390480 - DNA, 15 bp, Homo sapiens
agccttgtgaagtcc

SEQ ID NO: 390481 - DNA, 15 bp, Homo sapiens
cagccttgtgaagtc

SEQ ID NO: 390482 - DNA, 15 bp, Homo sapiens
acagccttgtgaagt

SEQ ID NO: 390483 - DNA, 15 bp, Homo sapiens
gacagccttgtgaag

SEQ ID NO: 390484 - DNA, 15 bp, Homo sapiens
tgacagccttgtgaa

SEQ ID NO: 390485 - DNA, 15 bp, Homo sapiens
ttgacagccttgtga

SEQ ID NO: 390486 - DNA, 15 bp, Homo sapiens
tttgacagccttgtg

SEQ ID NO: 390487 - DNA, 15 bp, Homo sapiens
gtttgacagccttgt

SEQ ID NO: 390488 - DNA, 15 bp, Homo sapiens
agtttgacagccttg

SEQ ID NO: 390489 - DNA, 15 bp, Homo sapiens
tagtttgacagcctt

SEQ ID NO: 390490 - DNA, 15 bp, Homo sapiens
ttagtttgacagcct

SEQ ID NO: 390491 - DNA, 15 bp, Homo sapiens
attagtttgacagcc

SEQ ID NO: 390492 - DNA, 15 bp, Homo sapiens
gattagtttgacagc

SEQ ID NO: 390493 - DNA, 15 bp, Homo sapiens
ggattagtttgacag

SEQ ID NO: 390494 - DNA, 15 bp, Homo sapiens
aggattagtttgaca

SEQ ID NO: 390495 - DNA, 15 bp, Homo sapiens
aaggattagtttgac

SEQ ID NO: 390496 - DNA, 15 bp, Homo sapiens
gaaggattagtttga

SEQ ID NO: 390497 - DNA, 15 bp, Homo sapiens
ggaaggattagtttg

SEQ ID NO: 390498 - DNA, 15 bp, Homo sapiens
aggaaggattagttt

SEQ ID NO: 390499 - DNA, 15 bp, Homo sapiens
aaggaaggattagtt

SEQ ID NO: 390500 - DNA, 15 bp, Homo sapiens
taaggaaggattagt

SEQ ID NO: 390501 - DNA, 15 bp, Homo sapiens
ctaaggaaggattag

SEQ ID NO: 390502 - DNA, 15 bp, Homo sapiens
gctaaggaaggatta

SEQ ID NO: 390503 - DNA, 15 bp, Homo sapiens
tgctaaggaaggatt

SEQ ID NO: 390504 - DNA, 15 bp, Homo sapiens
ctgctaaggaaggat

SEQ ID NO: 390505 - DNA, 15 bp, Homo sapiens
cctgctaaggaagga

SEQ ID NO: 390506 - DNA, 15 bp, Homo sapiens
acctgctaaggaagg

SEQ ID NO: 390507 - DNA, 15 bp, Homo sapiens
tacctgctaaggaag

SEQ ID NO: 390508 - DNA, 15 bp, Homo sapiens
ctacctgctaaggaa

SEQ ID NO: 390509 - DNA, 15 bp, Homo sapiens
gctacctgctaagga

SEQ ID NO: 390510 - DNA, 15 bp, Homo sapiens
agctacctgctaagg

SEQ ID NO: 390511 - DNA, 15 bp, Homo sapiens
cagctacctgctaag

SEQ ID NO: 390512 - DNA, 15 bp, Homo sapiens
tcagctacctgctaa

SEQ ID NO: 390513 - DNA, 15 bp, Homo sapiens
atcagctacctgcta

SEQ ID NO: 390514 - DNA, 15 bp, Homo sapiens
tatcagctacctgct

SEQ ID NO: 390515 - DNA, 15 bp, Homo sapiens
ttatcagctacctgc

SEQ ID NO: 390516 - DNA, 15 bp, Homo sapiens
cttatcagctacctg

SEQ ID NO: 390517 - DNA, 15 bp, Homo sapiens
tcttatcagctacct

SEQ ID NO: 390518 - DNA, 15 bp, Homo sapiens
ttcttatcagctacc

SEQ ID NO: 390519 - DNA, 15 bp, Homo sapiens
gttcttatcagctac

SEQ ID NO: 390520 - DNA, 15 bp, Homo sapiens
tgttcttatcagcta

SEQ ID NO: 390521 - DNA, 15 bp, Homo sapiens
atgttcttatcagct

SEQ ID NO: 390522 - DNA, 15 bp, Homo sapiens
tatgttcttatcagc

SEQ ID NO: 390523 - DNA, 15 bp, Homo sapiens
atatgttcttatcag

SEQ ID NO: 390524 - DNA, 15 bp, Homo sapiens
catatgttcttatca

SEQ ID NO: 390525 - DNA, 15 bp, Homo sapiens
tcatatgttcttatc

SEQ ID NO: 390526 - DNA, 15 bp, Homo sapiens
gtcatatgttcttat

SEQ ID NO: 390527 - DNA, 15 bp, Homo sapiens
ggtcatatgttctta

SEQ ID NO: 390528 - DNA, 15 bp, Homo sapiens
tggtcatatgttctt

SEQ ID NO: 390529 - DNA, 15 bp, Homo sapiens
ttggtcatatgttct

SEQ ID NO: 390530 - DNA, 15 bp, Homo sapiens
cttggtcatatgttc

SEQ ID NO: 390531 - DNA, 15 bp, Homo sapiens
tcttggtcatatgtt

SEQ ID NO: 390532 - DNA, 15 bp, Homo sapiens
gtcttggtcatatgt

SEQ ID NO: 390533 - DNA, 15 bp, Homo sapiens
ggtcttggtcatatg

SEQ ID NO: 390534 - DNA, 15 bp, Homo sapiens
tggtcttggtcatat

SEQ ID NO: 390535 - DNA, 15 bp, Homo sapiens
ttggtcttggtcata

SEQ ID NO: 390536 - DNA, 15 bp, Homo sapiens
attggtcttggtcat

SEQ ID NO: 390537 - DNA, 15 bp, Homo sapiens
cattggtcttggtca

SEQ ID NO: 390538 - DNA, 15 bp, Homo sapiens
acattggtcttggtc

SEQ ID NO: 390539 - DNA, 15 bp, Homo sapiens
aacattggtcttggt

SEQ ID NO: 390540 - DNA, 15 bp, Homo sapiens
gaacattggtcttgg

SEQ ID NO: 390541 - DNA, 15 bp, Homo sapiens
agaacattggtcttg

SEQ ID NO: 390542 - DNA, 15 bp, Homo sapiens
aagaacattggtctt

SEQ ID NO: 390543 - DNA, 15 bp, Homo sapiens
caagaacattggtct

SEQ ID NO: 390544 - DNA, 15 bp, Homo sapiens
acaagaacattggtc

SEQ ID NO: 390545 - DNA, 15 bp, Homo sapiens
gacaagaacattggt

SEQ ID NO: 390546 - DNA, 15 bp, Homo sapiens
tgacaagaacattgg

SEQ ID NO: 390547 - DNA, 15 bp, Homo sapiens
atgacaagaacattg

SEQ ID NO: 390548 - DNA, 15 bp, Homo sapiens
aatgacaagaacatt

SEQ ID NO: 390549 - DNA, 15 bp, Homo sapiens
aaatgacaagaacat

SEQ ID NO: 390550 - DNA, 15 bp, Homo sapiens
taaatgacaagaaca

SEQ ID NO: 390551 - DNA, 15 bp, Homo sapiens
ttaaatgacaagaac

SEQ ID NO: 390552 - DNA, 15 bp, Homo sapiens
tttaaatgacaagaa

SEQ ID NO: 390553 - DNA, 15 bp, Homo sapiens
atttaaatgacaaga

SEQ ID NO: 390554 - DNA, 15 bp, Homo sapiens
aatttaaatgacaag

SEQ ID NO: 390555 - DNA, 15 bp, Homo sapiens
taatttaaatgacaa

SEQ ID NO: 390556 - DNA, 15 bp, Homo sapiens
ctaatttaaatgaca

SEQ ID NO: 390557 - DNA, 15 bp, Homo sapiens
tctaatttaaatgac

SEQ ID NO: 390558 - DNA, 15 bp, Homo sapiens
ttctaatttaaatga

SEQ ID NO: 390559 - DNA, 15 bp, Homo sapiens
attctaatttaaatg

SEQ ID NO: 390560 - DNA, 15 bp, Homo sapiens
aattctaatttaaat

SEQ ID NO: 390561 - DNA, 15 bp, Homo sapiens
taattctaatttaaa

SEQ ID NO: 390562 - DNA, 15 bp, Homo sapiens
gtaattctaatttaa

SEQ ID NO: 390563 - DNA, 15 bp, Homo sapiens
agtaattctaattta

SEQ ID NO: 390564 - DNA, 15 bp, Homo sapiens
aagtaattctaattt

SEQ ID NO: 390565 - DNA, 15 bp, Homo sapiens
taagtaattctaatt

SEQ ID NO: 390566 - DNA, 15 bp, Homo sapiens
ttaagtaattctaat

SEQ ID NO: 390567 - DNA, 15 bp, Homo sapiens
tttaagtaattctaa

SEQ ID NO: 390568 - DNA, 15 bp, Homo sapiens
ctttaagtaattcta

SEQ ID NO: 390569 - DNA, 15 bp, Homo sapiens
actttaagtaattct

SEQ ID NO: 390570 - DNA, 15 bp, Homo sapiens
aactttaagtaattc

SEQ ID NO: 390571 - DNA, 15 bp, Homo sapiens
caactttaagtaatt

SEQ ID NO: 390572 - DNA, 15 bp, Homo sapiens
tcaactttaagtaat

SEQ ID NO: 390573 - DNA, 15 bp, Homo sapiens
atcaactttaagtaa

SEQ ID NO: 390574 - DNA, 15 bp, Homo sapiens
catcaactttaagta

SEQ ID NO: 390575 - DNA, 15 bp, Homo sapiens
gcatcaactttaagt

SEQ ID NO: 390576 - DNA, 15 bp, Homo sapiens
ggcatcaactttaag

SEQ ID NO: 390577 - DNA, 15 bp, Homo sapiens
aggcatcaactttaa

SEQ ID NO: 390578 - DNA, 15 bp, Homo sapiens
aaggcatcaacttta

SEQ ID NO: 390579 - DNA, 15 bp, Homo sapiens
gaaggcatcaacttt

SEQ ID NO: 390580 - DNA, 15 bp, Homo sapiens
tgaaggcatcaactt

SEQ ID NO: 390581 - DNA, 15 bp, Homo sapiens
ctgaaggcatcaact

SEQ ID NO: 390582 - DNA, 15 bp, Homo sapiens
cctgaaggcatcaac

SEQ ID NO: 390583 - DNA, 15 bp, Homo sapiens
tcctgaaggcatcaa

SEQ ID NO: 390584 - DNA, 15 bp, Homo sapiens
atcctgaaggcatca

SEQ ID NO: 390585 - DNA, 15 bp, Homo sapiens
catcctgaaggcatc

SEQ ID NO: 390586 - DNA, 15 bp, Homo sapiens
tcatcctgaaggcat

SEQ ID NO: 390587 - DNA, 15 bp, Homo sapiens
ttcatcctgaaggca

SEQ ID NO: 390588 - DNA, 15 bp, Homo sapiens
tttcatcctgaaggc

SEQ ID NO: 390589 - DNA, 15 bp, Homo sapiens
ttttcatcctgaagg

SEQ ID NO: 390590 - DNA, 15 bp, Homo sapiens
cttttcatcctgaag

SEQ ID NO: 390591 - DNA, 15 bp, Homo sapiens
tcttttcatcctgaa

SEQ ID NO: 390592 - DNA, 15 bp, Homo sapiens
ctcttttcatcctga

SEQ ID NO: 390593 - DNA, 15 bp, Homo sapiens
tctcttttcatcctg

SEQ ID NO: 390594 - DNA, 15 bp, Homo sapiens
ctctcttttcatcct

SEQ ID NO: 390595 - DNA, 15 bp, Homo sapiens
cctctcttttcatcc

SEQ ID NO: 390596 - DNA, 15 bp, Homo sapiens
acctctcttttcatc

SEQ ID NO: 390597 - DNA, 15 bp, Homo sapiens
cacctctcttttcat

SEQ ID NO: 390598 - DNA, 15 bp, Homo sapiens
tcacctctcttttca

SEQ ID NO: 390599 - DNA, 15 bp, Homo sapiens
atcacctctcttttc

SEQ ID NO: 390600 - DNA, 15 bp, Homo sapiens
tatcacctctctttt

SEQ ID NO: 390601 - DNA, 15 bp, Homo sapiens
ctatcacctctcttt

SEQ ID NO: 390602 - DNA, 15 bp, Homo sapiens
tctatcacctctctt

SEQ ID NO: 390603 - DNA, 15 bp, Homo sapiens
ttctatcacctctct

SEQ ID NO: 390604 - DNA, 15 bp, Homo sapiens
tttctatcacctctc

SEQ ID NO: 390605 - DNA, 15 bp, Homo sapiens
atttctatcacctct

SEQ ID NO: 390606 - DNA, 15 bp, Homo sapiens
catttctatcacctc

SEQ ID NO: 390607 - DNA, 15 bp, Homo sapiens
ccatttctatcacct

SEQ ID NO: 390608 - DNA, 15 bp, Homo sapiens
accatttctatcacc

SEQ ID NO: 390609 - DNA, 15 bp, Homo sapiens
caccatttctatcac

SEQ ID NO: 390610 - DNA, 15 bp, Homo sapiens
ccaccatttctatca

SEQ ID NO: 390611 - DNA, 15 bp, Homo sapiens
accaccatttctatc

SEQ ID NO: 390612 - DNA, 15 bp, Homo sapiens
gaccaccatttctat

SEQ ID NO: 390613 - DNA, 15 bp, Homo sapiens
agaccaccatttcta

SEQ ID NO: 390614 - DNA, 15 bp, Homo sapiens
cagaccaccatttct

SEQ ID NO: 390615 - DNA, 15 bp, Homo sapiens
tcagaccaccatttc

SEQ ID NO: 390616 - DNA, 15 bp, Homo sapiens
gtcagaccaccattt

SEQ ID NO: 390617 - DNA, 15 bp, Homo sapiens
tgtcagaccaccatt

SEQ ID NO: 390618 - DNA, 15 bp, Homo sapiens
ctgtcagaccaccat

SEQ ID NO: 390619 - DNA, 15 bp, Homo sapiens
tctgtcagaccacca

SEQ ID NO: 390620 - DNA, 15 bp, Homo sapiens
atctgtcagaccacc

SEQ ID NO: 390621 - DNA, 15 bp, Homo sapiens
gatctgtcagaccac

SEQ ID NO: 390622 - DNA, 15 bp, Homo sapiens
tgatctgtcagacca

SEQ ID NO: 390623 - DNA, 15 bp, Homo sapiens
ctgatctgtcagacc

SEQ ID NO: 390624 - DNA, 15 bp, Homo sapiens
tctgatctgtcagac

SEQ ID NO: 390625 - DNA, 15 bp, Homo sapiens
ctctgatctgtcaga

SEQ ID NO: 390626 - DNA, 15 bp, Homo sapiens
cctctgatctgtcag

SEQ ID NO: 390627 - DNA, 15 bp, Homo sapiens
tcctctgatctgtca

SEQ ID NO: 390628 - DNA, 15 bp, Homo sapiens
ctcctctgatctgtc

SEQ ID NO: 390629 - DNA, 15 bp, Homo sapiens
gctcctctgatctgt

SEQ ID NO: 390630 - DNA, 15 bp, Homo sapiens
agctcctctgatctg

SEQ ID NO: 390631 - DNA, 15 bp, Homo sapiens
cagctcctctgatct

SEQ ID NO: 390632 - DNA, 15 bp, Homo sapiens
ccagctcctctgatc

SEQ ID NO: 390633 - DNA, 15 bp, Homo sapiens
accagctcctctgat

SEQ ID NO: 390634 - DNA, 15 bp, Homo sapiens
taccagctcctctga

SEQ ID NO: 390635 - DNA, 15 bp, Homo sapiens
ataccagctcctctg

SEQ ID NO: 390636 - DNA, 15 bp, Homo sapiens
cataccagctcctct

SEQ ID NO: 390637 - DNA, 15 bp, Homo sapiens
acataccagctcctc

SEQ ID NO: 390638 - DNA, 15 bp, Homo sapiens
aacataccagctcct

SEQ ID NO: 390639 - DNA, 15 bp, Homo sapiens
taacataccagctcc

SEQ ID NO: 390640 - DNA, 15 bp, Homo sapiens
ctaacataccagctc

SEQ ID NO: 390641 - DNA, 15 bp, Homo sapiens
tctaacataccagct

SEQ ID NO: 390642 - DNA, 15 bp, Homo sapiens
ttctaacataccagc

SEQ ID NO: 390643 - DNA, 15 bp, Homo sapiens
cttctaacataccag

SEQ ID NO: 390644 - DNA, 15 bp, Homo sapiens
tcttctaacatacca

SEQ ID NO: 390645 - DNA, 15 bp, Homo sapiens
ctcttctaacatacc

SEQ ID NO: 390646 - DNA, 15 bp, Homo sapiens
actcttctaacatac

SEQ ID NO: 390647 - DNA, 15 bp, Homo sapiens
cactcttctaacata

SEQ ID NO: 390648 - DNA, 15 bp, Homo sapiens
acactcttctaacat

SEQ ID NO: 390649 - DNA, 15 bp, Homo sapiens
gacactcttctaaca

SEQ ID NO: 390650 - DNA, 15 bp, Homo sapiens
ggacactcttctaac

SEQ ID NO: 390651 - DNA, 15 bp, Homo sapiens
aggacactcttctaa

SEQ ID NO: 390652 - DNA, 15 bp, Homo sapiens
gaggacactcttcta

SEQ ID NO: 390653 - DNA, 15 bp, Homo sapiens
agaggacactcttct

SEQ ID NO: 390654 - DNA, 15 bp, Homo sapiens
gagaggacactcttc

SEQ ID NO: 390655 - DNA, 15 bp, Homo sapiens
tgagaggacactctt

SEQ ID NO: 390656 - DNA, 15 bp, Homo sapiens
gtgagaggacactct

SEQ ID NO: 390657 - DNA, 15 bp, Homo sapiens
tgtgagaggacactc

SEQ ID NO: 390658 - DNA, 15 bp, Homo sapiens
gtgtgagaggacact

SEQ ID NO: 390659 - DNA, 15 bp, Homo sapiens
tgtgtgagaggacac

SEQ ID NO: 390660 - DNA, 15 bp, Homo sapiens
atgtgtgagaggaca

SEQ ID NO: 390661 - DNA, 15 bp, Homo sapiens
catgtgtgagaggac

SEQ ID NO: 390662 - DNA, 15 bp, Homo sapiens
ccatgtgtgagagga

SEQ ID NO: 390663 - DNA, 15 bp, Homo sapiens
accatgtgtgagagg

SEQ ID NO: 390664 - DNA, 15 bp, Homo sapiens
taccatgtgtgagag

SEQ ID NO: 390665 - DNA, 15 bp, Homo sapiens
ttaccatgtgtgaga

SEQ ID NO: 390666 - DNA, 15 bp, Homo sapiens
cttaccatgtgtgag

SEQ ID NO: 390667 - DNA, 15 bp, Homo sapiens
gcttaccatgtgtga

SEQ ID NO: 390668 - DNA, 15 bp, Homo sapiens
ggcttaccatgtgtg

SEQ ID NO: 390669 - DNA, 15 bp, Homo sapiens
gggcttaccatgtgt

SEQ ID NO: 390670 - DNA, 15 bp, Homo sapiens
ggggcttaccatgtg

SEQ ID NO: 390671 - DNA, 15 bp, Homo sapiens
gggggcttaccatgt

SEQ ID NO: 390672 - DNA, 15 bp, Homo sapiens
tgggggcttaccatg

SEQ ID NO: 390673 - DNA, 15 bp, Homo sapiens
atgggggcttaccat

SEQ ID NO: 390674 - DNA, 15 bp, Homo sapiens
catgggggcttacca

SEQ ID NO: 390675 - DNA, 15 bp, Homo sapiens
gcatgggggcttacc

SEQ ID NO: 390676 - DNA, 15 bp, Homo sapiens
agcatgggggcttac

SEQ ID NO: 390677 - DNA, 15 bp, Homo sapiens
tagcatgggggctta

SEQ ID NO: 390678 - DNA, 15 bp, Homo sapiens
gtagcatgggggctt

SEQ ID NO: 390679 - DNA, 15 bp, Homo sapiens
ggtagcatgggggct

SEQ ID NO: 390680 - DNA, 15 bp, Homo sapiens
aggtagcatgggggc

SEQ ID NO: 390681 - DNA, 15 bp, Homo sapiens
caggtagcatggggg

SEQ ID NO: 390682 - DNA, 15 bp, Homo sapiens
gcaggtagcatgggg

SEQ ID NO: 390683 - DNA, 15 bp, Homo sapiens
agcaggtagcatggg

SEQ ID NO: 390684 - DNA, 15 bp, Homo sapiens
cagcaggtagcatgg

SEQ ID NO: 390685 - DNA, 15 bp, Homo sapiens
gcagcaggtagcatg

SEQ ID NO: 390686 - DNA, 15 bp, Homo sapiens
agcagcaggtagcat

SEQ ID NO: 390687 - DNA, 15 bp, Homo sapiens
gagcagcaggtagca

SEQ ID NO: 390688 - DNA, 15 bp, Homo sapiens
tgagcagcaggtagc

SEQ ID NO: 390689 - DNA, 15 bp, Homo sapiens
ctgagcagcaggtag

SEQ ID NO: 390690 - DNA, 15 bp, Homo sapiens
cctgagcagcaggta

SEQ ID NO: 390691 - DNA, 15 bp, Homo sapiens
acctgagcagcaggt

SEQ ID NO: 390692 - DNA, 15 bp, Homo sapiens
cacctgagcagcagg

SEQ ID NO: 390693 - DNA, 15 bp, Homo sapiens
ccacctgagcagcag

SEQ ID NO: 390694 - DNA, 15 bp, Homo sapiens
tccacctgagcagca

SEQ ID NO: 390695 - DNA, 15 bp, Homo sapiens
gtccacctgagcagc

SEQ ID NO: 390696 - DNA, 15 bp, Homo sapiens
agtccacctgagcag

SEQ ID NO: 390697 - DNA, 15 bp, Homo sapiens
gagtccacctgagca

SEQ ID NO: 390698 - DNA, 15 bp, Homo sapiens
agagtccacctgagc

SEQ ID NO: 390699 - DNA, 15 bp, Homo sapiens
cagagtccacctgag

SEQ ID NO: 390700 - DNA, 15 bp, Homo sapiens
gcagagtccacctga

SEQ ID NO: 390701 - DNA, 15 bp, Homo sapiens
tgcagagtccacctg

SEQ ID NO: 390702 - DNA, 15 bp, Homo sapiens
ttgcagagtccacct

SEQ ID NO: 390703 - DNA, 15 bp, Homo sapiens
gttgcagagtccacc

SEQ ID NO: 390704 - DNA, 15 bp, Homo sapiens
agttgcagagtccac

SEQ ID NO: 390705 - DNA, 15 bp, Homo sapiens
cagttgcagagtcca

SEQ ID NO: 390706 - DNA, 15 bp, Homo sapiens
ccagttgcagagtcc

SEQ ID NO: 390707 - DNA, 15 bp, Homo sapiens
cccagttgcagagtc

SEQ ID NO: 390708 - DNA, 15 bp, Homo sapiens
tcccagttgcagagt

SEQ ID NO: 390709 - DNA, 15 bp, Homo sapiens
ttcccagttgcagag

SEQ ID NO: 390710 - DNA, 15 bp, Homo sapiens
cttcccagttgcaga

SEQ ID NO: 390711 - DNA, 15 bp, Homo sapiens
acttcccagttgcag

SEQ ID NO: 390712 - DNA, 15 bp, Homo sapiens
aacttcccagttgca

SEQ ID NO: 390713 - DNA, 15 bp, Homo sapiens
gaacttcccagttgc

SEQ ID NO: 390714 - DNA, 15 bp, Homo sapiens
ggaacttcccagttg

SEQ ID NO: 390715 - DNA, 15 bp, Homo sapiens
tggaacttcccagtt

SEQ ID NO: 390716 - DNA, 15 bp, Homo sapiens
ttggaacttcccagt

SEQ ID NO: 390717 - DNA, 15 bp, Homo sapiens
cttggaacttcccag

SEQ ID NO: 390718 - DNA, 15 bp, Homo sapiens
tcttggaacttccca

SEQ ID NO: 390719 - DNA, 15 bp, Homo sapiens
ttcttggaacttccc

SEQ ID NO: 390720 - DNA, 15 bp, Homo sapiens
gttcttggaacttcc

SEQ ID NO: 390721 - DNA, 15 bp, Homo sapiens
tgttcttggaacttc

SEQ ID NO: 390722 - DNA, 15 bp, Homo sapiens
ttgttcttggaactt

SEQ ID NO: 390723 - DNA, 15 bp, Homo sapiens
attgttcttggaact

SEQ ID NO: 390724 - DNA, 15 bp, Homo sapiens
cattgttcttggaac

SEQ ID NO: 390725 - DNA, 15 bp, Homo sapiens
tcattgttcttggaa

SEQ ID NO: 390726 - DNA, 15 bp, Homo sapiens
ctcattgttcttgga

SEQ ID NO: 390727 - DNA, 15 bp, Homo sapiens
tctcattgttcttgg

SEQ ID NO: 390728 - DNA, 15 bp, Homo sapiens
ctctcattgttcttg

SEQ ID NO: 390729 - DNA, 15 bp, Homo sapiens
actctcattgttctt

SEQ ID NO: 390730 - DNA, 15 bp, Homo sapiens
gactctcattgttct

SEQ ID NO: 390731 - DNA, 15 bp, Homo sapiens
tgactctcattgttc

SEQ ID NO: 390732 - DNA, 15 bp, Homo sapiens
ttgactctcattgtt

SEQ ID NO: 390733 - DNA, 15 bp, Homo sapiens
tttgactctcattgt

SEQ ID NO: 390734 - DNA, 15 bp, Homo sapiens
ttttgactctcattg

SEQ ID NO: 390735 - DNA, 15 bp, Homo sapiens
cttttgactctcatt

SEQ ID NO: 390736 - DNA, 15 bp, Homo sapiens
tcttttgactctcat

SEQ ID NO: 390737 - DNA, 15 bp, Homo sapiens
ttcttttgactctca

SEQ ID NO: 390738 - DNA, 15 bp, Homo sapiens
tttcttttgactctc

SEQ ID NO: 390739 - DNA, 15 bp, Homo sapiens
ctttcttttgactct

SEQ ID NO: 390740 - DNA, 15 bp, Homo sapiens
tctttcttttgactc

SEQ ID NO: 390741 - DNA, 15 bp, Homo sapiens
gtctttcttttgact

SEQ ID NO: 390742 - DNA, 15 bp, Homo sapiens
agtctttcttttgac

SEQ ID NO: 390743 - DNA, 15 bp, Homo sapiens
cagtctttcttttga

SEQ ID NO: 390744 - DNA, 15 bp, Homo sapiens
tcagtctttcttttg

SEQ ID NO: 390745 - DNA, 15 bp, Homo sapiens
ttcagtctttctttt

SEQ ID NO: 390746 - DNA, 15 bp, Homo sapiens
gttcagtctttcttt

SEQ ID NO: 390747 - DNA, 15 bp, Homo sapiens
tgttcagtctttctt

SEQ ID NO: 390748 - DNA, 15 bp, Homo sapiens
ctgttcagtctttct

SEQ ID NO: 390749 - DNA, 15 bp, Homo sapiens
tctgttcagtctttc

SEQ ID NO: 390750 - DNA, 15 bp, Homo sapiens
ttctgttcagtcttt

SEQ ID NO: 390751 - DNA, 15 bp, Homo sapiens
gttctgttcagtctt

SEQ ID NO: 390752 - DNA, 15 bp, Homo sapiens
tgttctgttcagtct

SEQ ID NO: 390753 - DNA, 15 bp, Homo sapiens
atgttctgttcagtc

SEQ ID NO: 390754 - DNA, 15 bp, Homo sapiens
gatgttctgttcagt

SEQ ID NO: 390755 - DNA, 15 bp, Homo sapiens
agatgttctgttcag

SEQ ID NO: 390756 - DNA, 15 bp, Homo sapiens
aagatgttctgttca

SEQ ID NO: 390757 - DNA, 15 bp, Homo sapiens
taagatgttctgttc

SEQ ID NO: 390758 - DNA, 15 bp, Homo sapiens
gtaagatgttctgtt

SEQ ID NO: 390759 - DNA, 15 bp, Homo sapiens
agtaagatgttctgt

SEQ ID NO: 390760 - DNA, 15 bp, Homo sapiens
gagtaagatgttctg

SEQ ID NO: 390761 - DNA, 15 bp, Homo sapiens
agagtaagatgttct

SEQ ID NO: 390762 - DNA, 15 bp, Homo sapiens
aagagtaagatgttc

SEQ ID NO: 390763 - DNA, 15 bp, Homo sapiens
aaagagtaagatgtt

SEQ ID NO: 390764 - DNA, 15 bp, Homo sapiens
gaaagagtaagatgt

SEQ ID NO: 390765 - DNA, 15 bp, Homo sapiens
agaaagagtaagatg

SEQ ID NO: 390766 - DNA, 15 bp, Homo sapiens
gagaaagagtaagat

SEQ ID NO: 390767 - DNA, 15 bp, Homo sapiens
tgagaaagagtaaga

SEQ ID NO: 390768 - DNA, 15 bp, Homo sapiens
ttgagaaagagtaag

SEQ ID NO: 390769 - DNA, 15 bp, Homo sapiens
attgagaaagagtaa

SEQ ID NO: 390770 - DNA, 15 bp, Homo sapiens
tattgagaaagagta

SEQ ID NO: 390771 - DNA, 15 bp, Homo sapiens
ttattgagaaagagt

SEQ ID NO: 390772 - DNA, 15 bp, Homo sapiens
tttattgagaaagag

SEQ ID NO: 390773 - DNA, 15 bp, Homo sapiens
ttttattgagaaaga

SEQ ID NO: 390774 - DNA, 15 bp, Homo sapiens
attttattgagaaag

SEQ ID NO: 390775 - DNA, 15 bp, Homo sapiens
tattttattgagaaa

SEQ ID NO: 390776 - DNA, 15 bp, Homo sapiens
ttattttattgagaa

SEQ ID NO: 390777 - DNA, 15 bp, Homo sapiens
gttattttattgaga

SEQ ID NO: 390778 - DNA, 15 bp, Homo sapiens
agttattttattgag

SEQ ID NO: 390779 - DNA, 15 bp, Homo sapiens
gagttattttattga

SEQ ID NO: 390780 - DNA, 15 bp, Homo sapiens
agagttattttattg

SEQ ID NO: 390781 - DNA, 15 bp, Homo sapiens
aagagttattttatt

SEQ ID NO: 390782 - DNA, 15 bp, Homo sapiens
gaagagttattttat

SEQ ID NO: 390783 - DNA, 15 bp, Homo sapiens
tgaagagttatttta

SEQ ID NO: 390784 - DNA, 15 bp, Homo sapiens
atgaagagttatttt

SEQ ID NO: 390785 - DNA, 15 bp, Homo sapiens
aatgaagagttattt

SEQ ID NO: 390786 - DNA, 15 bp, Homo sapiens
caatgaagagttatt

SEQ ID NO: 390787 - DNA, 15 bp, Homo sapiens
acaatgaagagttat

SEQ ID NO: 390788 - DNA, 15 bp, Homo sapiens
gacaatgaagagtta

SEQ ID NO: 390789 - DNA, 15 bp, Homo sapiens
ggacaatgaagagtt

SEQ ID NO: 390790 - DNA, 15 bp, Homo sapiens
tggacaatgaagagt

SEQ ID NO: 390791 - DNA, 15 bp, Homo sapiens
gtggacaatgaagag

SEQ ID NO: 390792 - DNA, 15 bp, Homo sapiens
tgtggacaatgaaga

SEQ ID NO: 390793 - DNA, 15 bp, Homo sapiens
ttgtggacaatgaag

SEQ ID NO: 390794 - DNA, 15 bp, Homo sapiens
tttgtggacaatgaa

SEQ ID NO: 390795 - DNA, 15 bp, Homo sapiens
gtttgtggacaatga

SEQ ID NO: 390796 - DNA, 15 bp, Homo sapiens
ggtttgtggacaatg

SEQ ID NO: 390797 - DNA, 15 bp, Homo sapiens
aggtttgtggacaat

SEQ ID NO: 390798 - DNA, 15 bp, Homo sapiens
aaggtttgtggacaa

SEQ ID NO: 390799 - DNA, 15 bp, Homo sapiens
gaaggtttgtggaca

SEQ ID NO: 390800 - DNA, 15 bp, Homo sapiens
ggaaggtttgtggac

SEQ ID NO: 390801 - DNA, 15 bp, Homo sapiens
gggaaggtttgtgga

SEQ ID NO: 390802 - DNA, 15 bp, Homo sapiens
ggggaaggtttgtgg

SEQ ID NO: 390803 - DNA, 15 bp, Homo sapiens
tggggaaggtttgtg

SEQ ID NO: 390804 - DNA, 15 bp, Homo sapiens
ttggggaaggtttgt

SEQ ID NO: 390805 - DNA, 15 bp, Homo sapiens
cttggggaaggtttg

SEQ ID NO: 390806 - DNA, 15 bp, Homo sapiens
gcttggggaaggttt

SEQ ID NO: 390807 - DNA, 15 bp, Homo sapiens
tgcttggggaaggtt

SEQ ID NO: 390808 - DNA, 15 bp, Homo sapiens
ttgcttggggaaggt

SEQ ID NO: 390809 - DNA, 15 bp, Homo sapiens
tttgcttggggaagg

SEQ ID NO: 390810 - DNA, 15 bp, Homo sapiens
ttttgcttggggaag

SEQ ID NO: 390811 - DNA, 15 bp, Homo sapiens
tttttgcttggggaa

SEQ ID NO: 390812 - DNA, 15 bp, Homo sapiens
ttttttgcttgggga

SEQ ID NO: 390813 - DNA, 15 bp, Homo sapiens
attttttgcttgggg

SEQ ID NO: 390814 - DNA, 15 bp, Homo sapiens
aattttttgcttggg

SEQ ID NO: 390815 - DNA, 15 bp, Homo sapiens
aaattttttgcttgg

SEQ ID NO: 390816 - DNA, 15 bp, Homo sapiens
aaaattttttgcttg

SEQ ID NO: 390817 - DNA, 15 bp, Homo sapiens
gaaaattttttgctt

SEQ ID NO: 390818 - DNA, 15 bp, Homo sapiens
agaaaattttttgct

SEQ ID NO: 390819 - DNA, 15 bp, Homo sapiens
aagaaaattttttgc

SEQ ID NO: 390820 - DNA, 15 bp, Homo sapiens
gaagaaaattttttg

SEQ ID NO: 390821 - DNA, 15 bp, Homo sapiens
ggaagaaaatttttt

SEQ ID NO: 390822 - DNA, 15 bp, Homo sapiens
gggaagaaaattttt

SEQ ID NO: 390823 - DNA, 15 bp, Homo sapiens
agggaagaaaatttt

SEQ ID NO: 390824 - DNA, 15 bp, Homo sapiens
cagggaagaaaattt

SEQ ID NO: 390825 - DNA, 15 bp, Homo sapiens
acagggaagaaaatt

SEQ ID NO: 390826 - DNA, 15 bp, Homo sapiens
cacagggaagaaaat

SEQ ID NO: 390827 - DNA, 15 bp, Homo sapiens
gcacagggaagaaaa

SEQ ID NO: 390828 - DNA, 15 bp, Homo sapiens
ggcacagggaagaaa

SEQ ID NO: 390829 - DNA, 15 bp, Homo sapiens
cggcacagggaagaa

SEQ ID NO: 390830 - DNA, 15 bp, Homo sapiens
gcggcacagggaaga

SEQ ID NO: 390831 - DNA, 15 bp, Homo sapiens
ggcggcacagggaag

SEQ ID NO: 390832 - DNA, 15 bp, Homo sapiens
tggcggcacagggaa

SEQ ID NO: 390833 - DNA, 15 bp, Homo sapiens
ctggcggcacaggga

SEQ ID NO: 390834 - DNA, 15 bp, Homo sapiens
gctggcggcacaggg

SEQ ID NO: 390835 - DNA, 15 bp, Homo sapiens
agctggcggcacagg

SEQ ID NO: 390836 - DNA, 15 bp, Homo sapiens
gagctggcggcacag

SEQ ID NO: 390837 - DNA, 15 bp, Homo sapiens
ggagctggcggcaca

SEQ ID NO: 390838 - DNA, 15 bp, Homo sapiens
aggagctggcggcac

SEQ ID NO: 390839 - DNA, 15 bp, Homo sapiens
caggagctggcggca

SEQ ID NO: 390840 - DNA, 15 bp, Homo sapiens
acaggagctggcggc

SEQ ID NO: 390841 - DNA, 15 bp, Homo sapiens
aacaggagctggcgg

SEQ ID NO: 390842 - DNA, 15 bp, Homo sapiens
caacaggagctggcg

SEQ ID NO: 390843 - DNA, 15 bp, Homo sapiens
acaacaggagctggc

SEQ ID NO: 390844 - DNA, 15 bp, Homo sapiens
tacaacaggagctgg

SEQ ID NO: 390845 - DNA, 15 bp, Homo sapiens
atacaacaggagctg

SEQ ID NO: 390846 - DNA, 15 bp, Homo sapiens
catacaacaggagct

SEQ ID NO: 390847 - DNA, 15 bp, Homo sapiens
tcatacaacaggagc

SEQ ID NO: 390848 - DNA, 15 bp, Homo sapiens
gtcatacaacaggag

SEQ ID NO: 390849 - DNA, 15 bp, Homo sapiens
tgtcatacaacagga

SEQ ID NO: 390850 - DNA, 15 bp, Homo sapiens
gtgtcatacaacagg

SEQ ID NO: 390851 - DNA, 15 bp, Homo sapiens
tgtgtcatacaacag

SEQ ID NO: 390852 - DNA, 15 bp, Homo sapiens
ttgtgtcatacaaca

SEQ ID NO: 390853 - DNA, 15 bp, Homo sapiens
gttgtgtcatacaac

SEQ ID NO: 390854 - DNA, 15 bp, Homo sapiens
tgttgtgtcatacaa

SEQ ID NO: 390855 - DNA, 15 bp, Homo sapiens
gtgttgtgtcataca

SEQ ID NO: 390856 - DNA, 15 bp, Homo sapiens
ggtgttgtgtcatac

SEQ ID NO: 390857 - DNA, 15 bp, Homo sapiens
gggtgttgtgtcata

SEQ ID NO: 390858 - DNA, 15 bp, Homo sapiens
tgggtgttgtgtcat

SEQ ID NO: 390859 - DNA, 15 bp, Homo sapiens
ttgggtgttgtgtca

SEQ ID NO: 390860 - DNA, 15 bp, Homo sapiens
attgggtgttgtgtc

SEQ ID NO: 390861 - DNA, 15 bp, Homo sapiens
aattgggtgttgtgt

SEQ ID NO: 390862 - DNA, 15 bp, Homo sapiens
aaattgggtgttgtg

SEQ ID NO: 390863 - DNA, 15 bp, Homo sapiens
taaattgggtgttgt

SEQ ID NO: 390864 - DNA, 15 bp, Homo sapiens
ctaaattgggtgttg

SEQ ID NO: 390865 - DNA, 15 bp, Homo sapiens
actaaattgggtgtt

SEQ ID NO: 390866 - DNA, 15 bp, Homo sapiens
gactaaattgggtgt

SEQ ID NO: 390867 - DNA, 15 bp, Homo sapiens
agactaaattgggtg

SEQ ID NO: 390868 - DNA, 15 bp, Homo sapiens
tagactaaattgggt

SEQ ID NO: 390869 - DNA, 15 bp, Homo sapiens
ttagactaaattggg

SEQ ID NO: 390870 - DNA, 15 bp, Homo sapiens
attagactaaattgg

SEQ ID NO: 390871 - DNA, 15 bp, Homo sapiens
cattagactaaattg

SEQ ID NO: 390872 - DNA, 15 bp, Homo sapiens
ccattagactaaatt

SEQ ID NO: 390873 - DNA, 15 bp, Homo sapiens
tccattagactaaat

SEQ ID NO: 390874 - DNA, 15 bp, Homo sapiens
ttccattagactaaa

SEQ ID NO: 390875 - DNA, 15 bp, Homo sapiens
attccattagactaa

SEQ ID NO: 390876 - DNA, 15 bp, Homo sapiens
gattccattagacta

SEQ ID NO: 390877 - DNA, 15 bp, Homo sapiens
tgattccattagact

SEQ ID NO: 390878 - DNA, 15 bp, Homo sapiens
gtgattccattagac

SEQ ID NO: 390879 - DNA, 15 bp, Homo sapiens
tgtgattccattaga

SEQ ID NO: 390880 - DNA, 15 bp, Homo sapiens
atgtgattccattag

SEQ ID NO: 390881 - DNA, 15 bp, Homo sapiens
catgtgattccatta

SEQ ID NO: 390882 - DNA, 15 bp, Homo sapiens
tcatgtgattccatt

SEQ ID NO: 390883 - DNA, 15 bp, Homo sapiens
ttcatgtgattccat

SEQ ID NO: 390884 - DNA, 15 bp, Homo sapiens
cttcatgtgattcca

SEQ ID NO: 390885 - DNA, 15 bp, Homo sapiens
acttcatgtgattcc

SEQ ID NO: 390886 - DNA, 15 bp, Homo sapiens
aacttcatgtgattc

SEQ ID NO: 390887 - DNA, 15 bp, Homo sapiens
taacttcatgtgatt

SEQ ID NO: 390888 - DNA, 15 bp, Homo sapiens
ttaacttcatgtgat

SEQ ID NO: 390889 - DNA, 15 bp, Homo sapiens
cttaacttcatgtga

SEQ ID NO: 390890 - DNA, 15 bp, Homo sapiens
tcttaacttcatgtg

SEQ ID NO: 390891 - DNA, 15 bp, Homo sapiens
ctcttaacttcatgt

SEQ ID NO: 390892 - DNA, 15 bp, Homo sapiens
gctcttaacttcatg

SEQ ID NO: 390893 - DNA, 15 bp, Homo sapiens
cgctcttaacttcat

SEQ ID NO: 390894 - DNA, 15 bp, Homo sapiens
acgctcttaacttca

SEQ ID NO: 390895 - DNA, 15 bp, Homo sapiens
cacgctcttaacttc

SEQ ID NO: 390896 - DNA, 15 bp, Homo sapiens
ccacgctcttaactt

SEQ ID NO: 390897 - DNA, 15 bp, Homo sapiens
cccacgctcttaact

SEQ ID NO: 390898 - DNA, 15 bp, Homo sapiens
gcccacgctcttaac

SEQ ID NO: 390899 - DNA, 15 bp, Homo sapiens
agcccacgctcttaa

SEQ ID NO: 390900 - DNA, 15 bp, Homo sapiens
aagcccacgctctta

SEQ ID NO: 390901 - DNA, 15 bp, Homo sapiens
aaagcccacgctctt

SEQ ID NO: 390902 - DNA, 15 bp, Homo sapiens
gaaagcccacgctct

SEQ ID NO: 390903 - DNA, 15 bp, Homo sapiens
tgaaagcccacgctc

SEQ ID NO: 390904 - DNA, 15 bp, Homo sapiens
gtgaaagcccacgct

SEQ ID NO: 390905 - DNA, 15 bp, Homo sapiens
tgtgaaagcccacgc

SEQ ID NO: 390906 - DNA, 15 bp, Homo sapiens
gtgtgaaagcccacg

SEQ ID NO: 390907 - DNA, 15 bp, Homo sapiens
ggtgtgaaagcccac

SEQ ID NO: 390908 - DNA, 15 bp, Homo sapiens
aggtgtgaaagccca

SEQ ID NO: 390909 - DNA, 15 bp, Homo sapiens
caggtgtgaaagccc

SEQ ID NO: 390910 - DNA, 15 bp, Homo sapiens
ccaggtgtgaaagcc

SEQ ID NO: 390911 - DNA, 15 bp, Homo sapiens
cccaggtgtgaaagc

SEQ ID NO: 390912 - DNA, 15 bp, Homo sapiens
tcccaggtgtgaaag

SEQ ID NO: 390913 - DNA, 15 bp, Homo sapiens
atcccaggtgtgaaa

SEQ ID NO: 390914 - DNA, 15 bp, Homo sapiens
aatcccaggtgtgaa

SEQ ID NO: 390915 - DNA, 15 bp, Homo sapiens
aaatcccaggtgtga

SEQ ID NO: 390916 - DNA, 15 bp, Homo sapiens
caaatcccaggtgtg

SEQ ID NO: 390917 - DNA, 15 bp, Homo sapiens
ccaaatcccaggtgt

SEQ ID NO: 390918 - DNA, 15 bp, Homo sapiens
tccaaatcccaggtg

SEQ ID NO: 390919 - DNA, 15 bp, Homo sapiens
gtccaaatcccaggt

SEQ ID NO: 390920 - DNA, 15 bp, Homo sapiens
ggtccaaatcccagg

SEQ ID NO: 390921 - DNA, 15 bp, Homo sapiens
aggtccaaatcccag

SEQ ID NO: 390922 - DNA, 15 bp, Homo sapiens
aaggtccaaatccca

SEQ ID NO: 390923 - DNA, 15 bp, Homo sapiens
caaggtccaaatccc

SEQ ID NO: 390924 - DNA, 15 bp, Homo sapiens
acaaggtccaaatcc

SEQ ID NO: 390925 - DNA, 15 bp, Homo sapiens
gacaaggtccaaatc

SEQ ID NO: 390926 - DNA, 15 bp, Homo sapiens
ggacaaggtccaaat

SEQ ID NO: 390927 - DNA, 15 bp, Homo sapiens
aggacaaggtccaaa

SEQ ID NO: 390928 - DNA, 15 bp, Homo sapiens
gaggacaaggtccaa

SEQ ID NO: 390929 - DNA, 15 bp, Homo sapiens
agaggacaaggtcca

SEQ ID NO: 390930 - DNA, 15 bp, Homo sapiens
gagaggacaaggtcc

SEQ ID NO: 390931 - DNA, 15 bp, Homo sapiens
tgagaggacaaggtc

SEQ ID NO: 390932 - DNA, 15 bp, Homo sapiens
atgagaggacaaggt

SEQ ID NO: 390933 - DNA, 15 bp, Homo sapiens
aatgagaggacaagg

SEQ ID NO: 390934 - DNA, 15 bp, Homo sapiens
taatgagaggacaag

SEQ ID NO: 390935 - DNA, 15 bp, Homo sapiens
gtaatgagaggacaa

SEQ ID NO: 390936 - DNA, 15 bp, Homo sapiens
agtaatgagaggaca

SEQ ID NO: 390937 - DNA, 15 bp, Homo sapiens
tagtaatgagaggac

SEQ ID NO: 390938 - DNA, 15 bp, Homo sapiens
ctagtaatgagagga

SEQ ID NO: 390939 - DNA, 15 bp, Homo sapiens
gctagtaatgagagg

SEQ ID NO: 390940 - DNA, 15 bp, Homo sapiens
agctagtaatgagag

SEQ ID NO: 390941 - DNA, 15 bp, Homo sapiens
cagctagtaatgaga

SEQ ID NO: 390942 - DNA, 15 bp, Homo sapiens
acagctagtaatgag

SEQ ID NO: 390943 - DNA, 15 bp, Homo sapiens
cacagctagtaatga

SEQ ID NO: 390944 - DNA, 15 bp, Homo sapiens
acacagctagtaatg

SEQ ID NO: 390945 - DNA, 15 bp, Homo sapiens
gacacagctagtaat

SEQ ID NO: 390946 - DNA, 15 bp, Homo sapiens
tgacacagctagtaa

SEQ ID NO: 390947 - DNA, 15 bp, Homo sapiens
atgacacagctagta

SEQ ID NO: 390948 - DNA, 15 bp, Homo sapiens
gatgacacagctagt

SEQ ID NO: 390949 - DNA, 15 bp, Homo sapiens
agatgacacagctag

SEQ ID NO: 390950 - DNA, 15 bp, Homo sapiens
aagatgacacagcta

SEQ ID NO: 390951 - DNA, 15 bp, Homo sapiens
caagatgacacagct

SEQ ID NO: 390952 - DNA, 15 bp, Homo sapiens
ccaagatgacacagc

SEQ ID NO: 390953 - DNA, 15 bp, Homo sapiens
cccaagatgacacag

SEQ ID NO: 390954 - DNA, 15 bp, Homo sapiens
gcccaagatgacaca

SEQ ID NO: 390955 - DNA, 15 bp, Homo sapiens
tgcccaagatgacac

SEQ ID NO: 390956 - DNA, 15 bp, Homo sapiens
ttgcccaagatgaca

SEQ ID NO: 390957 - DNA, 15 bp, Homo sapiens
cttgcccaagatgac

SEQ ID NO: 390958 - DNA, 15 bp, Homo sapiens
acttgcccaagatga

SEQ ID NO: 390959 - DNA, 15 bp, Homo sapiens
aacttgcccaagatg

SEQ ID NO: 390960 - DNA, 15 bp, Homo sapiens
taacttgcccaagat

SEQ ID NO: 390961 - DNA, 15 bp, Homo sapiens
gtaacttgcccaaga

SEQ ID NO: 390962 - DNA, 15 bp, Homo sapiens
agtaacttgcccaag

SEQ ID NO: 390963 - DNA, 15 bp, Homo sapiens
aagtaacttgcccaa

SEQ ID NO: 390964 - DNA, 15 bp, Homo sapiens
taagtaacttgccca

SEQ ID NO: 390965 - DNA, 15 bp, Homo sapiens
ttaagtaacttgccc

SEQ ID NO: 390966 - DNA, 15 bp, Homo sapiens
attaagtaacttgcc

SEQ ID NO: 390967 - DNA, 15 bp, Homo sapiens
cattaagtaacttgc

SEQ ID NO: 390968 - DNA, 15 bp, Homo sapiens
acattaagtaacttg

SEQ ID NO: 390969 - DNA, 15 bp, Homo sapiens
aacattaagtaactt

SEQ ID NO: 390970 - DNA, 15 bp, Homo sapiens
aaacattaagtaact

SEQ ID NO: 390971 - DNA, 15 bp, Homo sapiens
aaaacattaagtaac

SEQ ID NO: 390972 - DNA, 15 bp, Homo sapiens
caaaacattaagtaa

SEQ ID NO: 390973 - DNA, 15 bp, Homo sapiens
tcaaaacattaagta

SEQ ID NO: 390974 - DNA, 15 bp, Homo sapiens
ctcaaaacattaagt

SEQ ID NO: 390975 - DNA, 15 bp, Homo sapiens
gctcaaaacattaag

SEQ ID NO: 390976 - DNA, 15 bp, Homo sapiens
tgctcaaaacattaa

SEQ ID NO: 390977 - DNA, 15 bp, Homo sapiens
atgctcaaaacatta

SEQ ID NO: 390978 - DNA, 15 bp, Homo sapiens
gatgctcaaaacatt

SEQ ID NO: 390979 - DNA, 15 bp, Homo sapiens
tgatgctcaaaacat

SEQ ID NO: 390980 - DNA, 15 bp, Homo sapiens
ctgatgctcaaaaca

SEQ ID NO: 390981 - DNA, 15 bp, Homo sapiens
actgatgctcaaaac

SEQ ID NO: 390982 - DNA, 15 bp, Homo sapiens
aactgatgctcaaaa

SEQ ID NO: 390983 - DNA, 15 bp, Homo sapiens
aaactgatgctcaaa

SEQ ID NO: 390984 - DNA, 15 bp, Homo sapiens
gaaactgatgctcaa

SEQ ID NO: 390985 - DNA, 15 bp, Homo sapiens
agaaactgatgctca

SEQ ID NO: 390986 - DNA, 15 bp, Homo sapiens
tagaaactgatgctc

SEQ ID NO: 390987 - DNA, 15 bp, Homo sapiens
gtagaaactgatgct

SEQ ID NO: 390988 - DNA, 15 bp, Homo sapiens
tgtagaaactgatgc

SEQ ID NO: 390989 - DNA, 15 bp, Homo sapiens
atgtagaaactgatg

SEQ ID NO: 390990 - DNA, 15 bp, Homo sapiens
gatgtagaaactgat

SEQ ID NO: 390991 - DNA, 15 bp, Homo sapiens
agatgtagaaactga

SEQ ID NO: 390992 - DNA, 15 bp, Homo sapiens
tagatgtagaaactg

SEQ ID NO: 390993 - DNA, 15 bp, Homo sapiens
atagatgtagaaact

SEQ ID NO: 390994 - DNA, 15 bp, Homo sapiens
tatagatgtagaaac

SEQ ID NO: 390995 - DNA, 15 bp, Homo sapiens
ttatagatgtagaaa

SEQ ID NO: 390996 - DNA, 15 bp, Homo sapiens
tttatagatgtagaa

SEQ ID NO: 390997 - DNA, 15 bp, Homo sapiens
ttttatagatgtaga

SEQ ID NO: 390998 - DNA, 15 bp, Homo sapiens
attttatagatgtag

SEQ ID NO: 390999 - DNA, 15 bp, Homo sapiens
cattttatagatgta

SEQ ID NO: 391000 - DNA, 15 bp, Homo sapiens
ccattttatagatgt

SEQ ID NO: 391001 - DNA, 15 bp, Homo sapiens
cccattttatagatg

SEQ ID NO: 391002 - DNA, 15 bp, Homo sapiens
acccattttatagat

SEQ ID NO: 391003 - DNA, 15 bp, Homo sapiens
cacccattttataga

SEQ ID NO: 391004 - DNA, 15 bp, Homo sapiens
gcacccattttatag

SEQ ID NO: 391005 - DNA, 15 bp, Homo sapiens
agcacccattttata

SEQ ID NO: 391006 - DNA, 15 bp, Homo sapiens
gagcacccattttat

SEQ ID NO: 391007 - DNA, 15 bp, Homo sapiens
tgagcacccatttta

SEQ ID NO: 391008 - DNA, 15 bp, Homo sapiens
atgagcacccatttt

SEQ ID NO: 391009 - DNA, 15 bp, Homo sapiens
tatgagcacccattt

SEQ ID NO: 391010 - DNA, 15 bp, Homo sapiens
ttatgagcacccatt

SEQ ID NO: 391011 - DNA, 15 bp, Homo sapiens
attatgagcacccat

SEQ ID NO: 391012 - DNA, 15 bp, Homo sapiens
tattatgagcaccca

SEQ ID NO: 391013 - DNA, 15 bp, Homo sapiens
atattatgagcaccc

SEQ ID NO: 391014 - DNA, 15 bp, Homo sapiens
aatattatgagcacc

SEQ ID NO: 391015 - DNA, 15 bp, Homo sapiens
aaatattatgagcac

SEQ ID NO: 391016 - DNA, 15 bp, Homo sapiens
taaatattatgagca

SEQ ID NO: 391017 - DNA, 15 bp, Homo sapiens
ataaatattatgagc

SEQ ID NO: 391018 - DNA, 15 bp, Homo sapiens
gataaatattatgag

SEQ ID NO: 391019 - DNA, 15 bp, Homo sapiens
agataaatattatga

SEQ ID NO: 391020 - DNA, 15 bp, Homo sapiens
aagataaatattatg

SEQ ID NO: 391021 - DNA, 15 bp, Homo sapiens
caagataaatattat

SEQ ID NO: 391022 - DNA, 15 bp, Homo sapiens
gcaagataaatatta

SEQ ID NO: 391023 - DNA, 15 bp, Homo sapiens
tgcaagataaatatt

SEQ ID NO: 391024 - DNA, 15 bp, Homo sapiens
ctgcaagataaatat

SEQ ID NO: 391025 - DNA, 15 bp, Homo sapiens
cctgcaagataaata

SEQ ID NO: 391026 - DNA, 15 bp, Homo sapiens
acctgcaagataaat

SEQ ID NO: 391027 - DNA, 15 bp, Homo sapiens
gacctgcaagataaa

SEQ ID NO: 391028 - DNA, 15 bp, Homo sapiens
agacctgcaagataa

SEQ ID NO: 391029 - DNA, 15 bp, Homo sapiens
aagacctgcaagata

SEQ ID NO: 391030 - DNA, 15 bp, Homo sapiens
aaagacctgcaagat

SEQ ID NO: 391031 - DNA, 15 bp, Homo sapiens
aaaagacctgcaaga

SEQ ID NO: 391032 - DNA, 15 bp, Homo sapiens
caaaagacctgcaag

SEQ ID NO: 391033 - DNA, 15 bp, Homo sapiens
ccaaaagacctgcaa

SEQ ID NO: 391034 - DNA, 15 bp, Homo sapiens
cccaaaagacctgca

SEQ ID NO: 391035 - DNA, 15 bp, Homo sapiens
tcccaaaagacctgc

SEQ ID NO: 391036 - DNA, 15 bp, Homo sapiens
ttcccaaaagacctg

SEQ ID NO: 391037 - DNA, 15 bp, Homo sapiens
cttcccaaaagacct

SEQ ID NO: 391038 - DNA, 15 bp, Homo sapiens
acttcccaaaagacc

SEQ ID NO: 391039 - DNA, 15 bp, Homo sapiens
aacttcccaaaagac

SEQ ID NO: 391040 - DNA, 15 bp, Homo sapiens
aaacttcccaaaaga

SEQ ID NO: 391041 - DNA, 15 bp, Homo sapiens
caaacttcccaaaag

SEQ ID NO: 391042 - DNA, 15 bp, Homo sapiens
tcaaacttcccaaaa

SEQ ID NO: 391043 - DNA, 15 bp, Homo sapiens
ttcaaacttcccaaa

SEQ ID NO: 391044 - DNA, 15 bp, Homo sapiens
attcaaacttcccaa

SEQ ID NO: 391045 - DNA, 15 bp, Homo sapiens
cattcaaacttccca

SEQ ID NO: 391046 - DNA, 15 bp, Homo sapiens
tcattcaaacttccc

SEQ ID NO: 391047 - DNA, 15 bp, Homo sapiens
ttcattcaaacttcc

SEQ ID NO: 391048 - DNA, 15 bp, Homo sapiens
tttcattcaaacttc

SEQ ID NO: 391049 - DNA, 15 bp, Homo sapiens
atttcattcaaactt

SEQ ID NO: 391050 - DNA, 15 bp, Homo sapiens
catttcattcaaact

SEQ ID NO: 391051 - DNA, 15 bp, Homo sapiens
tcatttcattcaaac

SEQ ID NO: 391052 - DNA, 15 bp, Homo sapiens
gtcatttcattcaaa

SEQ ID NO: 391053 - DNA, 15 bp, Homo sapiens
tgtcatttcattcaa

SEQ ID NO: 391054 - DNA, 15 bp, Homo sapiens
atgtcatttcattca

SEQ ID NO: 391055 - DNA, 15 bp, Homo sapiens
tatgtcatttcattc

SEQ ID NO: 391056 - DNA, 15 bp, Homo sapiens
atatgtcatttcatt

SEQ ID NO: 391057 - DNA, 15 bp, Homo sapiens
tatatgtcatttcat

SEQ ID NO: 391058 - DNA, 15 bp, Homo sapiens
atatatgtcatttca

SEQ ID NO: 391059 - DNA, 15 bp, Homo sapiens
tatatatgtcatttc

SEQ ID NO: 391060 - DNA, 15 bp, Homo sapiens
ttatatatgtcattt

SEQ ID NO: 391061 - DNA, 15 bp, Homo sapiens
gttatatatgtcatt

SEQ ID NO: 391062 - DNA, 15 bp, Homo sapiens
tgttatatatgtcat

SEQ ID NO: 391063 - DNA, 15 bp, Homo sapiens
gtgttatatatgtca

SEQ ID NO: 391064 - DNA, 15 bp, Homo sapiens
tgtgttatatatgtc

SEQ ID NO: 391065 - DNA, 15 bp, Homo sapiens
atgtgttatatatgt

SEQ ID NO: 391066 - DNA, 15 bp, Homo sapiens
catgtgttatatatg

SEQ ID NO: 391067 - DNA, 15 bp, Homo sapiens
acatgtgttatatat

SEQ ID NO: 391068 - DNA, 15 bp, Homo sapiens
cacatgtgttatata

SEQ ID NO: 391069 - DNA, 15 bp, Homo sapiens
gcacatgtgttatat

SEQ ID NO: 391070 - DNA, 15 bp, Homo sapiens
agcacatgtgttata

SEQ ID NO: 391071 - DNA, 15 bp, Homo sapiens
gagcacatgtgttat

SEQ ID NO: 391072 - DNA, 15 bp, Homo sapiens
tgagcacatgtgtta

SEQ ID NO: 391073 - DNA, 15 bp, Homo sapiens
atgagcacatgtgtt

SEQ ID NO: 391074 - DNA, 15 bp, Homo sapiens
tatgagcacatgtgt

SEQ ID NO: 391075 - DNA, 15 bp, Homo sapiens
atatgagcacatgtg

SEQ ID NO: 391076 - DNA, 15 bp, Homo sapiens
catatgagcacatgt

SEQ ID NO: 391077 - DNA, 15 bp, Homo sapiens
tcatatgagcacatg

SEQ ID NO: 391078 - DNA, 15 bp, Homo sapiens
atcatatgagcacat

SEQ ID NO: 391079 - DNA, 15 bp, Homo sapiens
catcatatgagcaca

SEQ ID NO: 391080 - DNA, 15 bp, Homo sapiens
ccatcatatgagcac

SEQ ID NO: 391081 - DNA, 15 bp, Homo sapiens
cccatcatatgagca

SEQ ID NO: 391082 - DNA, 15 bp, Homo sapiens
acccatcatatgagc

SEQ ID NO: 391083 - DNA, 15 bp, Homo sapiens
cacccatcatatgag

SEQ ID NO: 391084 - DNA, 15 bp, Homo sapiens
tcacccatcatatga

SEQ ID NO: 391085 - DNA, 15 bp, Homo sapiens
ctcacccatcatatg

SEQ ID NO: 391086 - DNA, 15 bp, Homo sapiens
gctcacccatcatat

SEQ ID NO: 391087 - DNA, 15 bp, Homo sapiens
tgctcacccatcata

SEQ ID NO: 391088 - DNA, 15 bp, Homo sapiens
ttgctcacccatcat

SEQ ID NO: 391089 - DNA, 15 bp, Homo sapiens
attgctcacccatca

SEQ ID NO: 391090 - DNA, 15 bp, Homo sapiens
gattgctcacccatc

SEQ ID NO: 391091 - DNA, 15 bp, Homo sapiens
tgattgctcacccat

SEQ ID NO: 391092 - DNA, 15 bp, Homo sapiens
ttgattgctcaccca

SEQ ID NO: 391093 - DNA, 15 bp, Homo sapiens
tttgattgctcaccc

SEQ ID NO: 391094 - DNA, 15 bp, Homo sapiens
ttttgattgctcacc

SEQ ID NO: 391095 - DNA, 15 bp, Homo sapiens
gttttgattgctcac

SEQ ID NO: 391096 - DNA, 15 bp, Homo sapiens
agttttgattgctca

SEQ ID NO: 391097 - DNA, 15 bp, Homo sapiens
tagttttgattgctc

SEQ ID NO: 391098 - DNA, 15 bp, Homo sapiens
ctagttttgattgct

SEQ ID NO: 391099 - DNA, 15 bp, Homo sapiens
gctagttttgattgc

SEQ ID NO: 391100 - DNA, 15 bp, Homo sapiens
ggctagttttgattg

SEQ ID NO: 391101 - DNA, 15 bp, Homo sapiens
cggctagttttgatt

SEQ ID NO: 391102 - DNA, 15 bp, Homo sapiens
acggctagttttgat

SEQ ID NO: 391103 - DNA, 15 bp, Homo sapiens
aacggctagttttga

SEQ ID NO: 391104 - DNA, 15 bp, Homo sapiens
caacggctagttttg

SEQ ID NO: 391105 - DNA, 15 bp, Homo sapiens
acaacggctagtttt

SEQ ID NO: 391106 - DNA, 15 bp, Homo sapiens
aacaacggctagttt

SEQ ID NO: 391107 - DNA, 15 bp, Homo sapiens
taacaacggctagtt

SEQ ID NO: 391108 - DNA, 15 bp, Homo sapiens
ataacaacggctagt

SEQ ID NO: 391109 - DNA, 15 bp, Homo sapiens
tataacaacggctag

SEQ ID NO: 391110 - DNA, 15 bp, Homo sapiens
ttataacaacggcta

SEQ ID NO: 391111 - DNA, 15 bp, Homo sapiens
tttataacaacggct

SEQ ID NO: 391112 - DNA, 15 bp, Homo sapiens
ttttataacaacggc

SEQ ID NO: 391113 - DNA, 15 bp, Homo sapiens
cttttataacaacgg

SEQ ID NO: 391114 - DNA, 15 bp, Homo sapiens
gcttttataacaacg

SEQ ID NO: 391115 - DNA, 15 bp, Homo sapiens
tgcttttataacaac

SEQ ID NO: 391116 - DNA, 15 bp, Homo sapiens
atgcttttataacaa

SEQ ID NO: 391117 - DNA, 15 bp, Homo sapiens
catgcttttataaca

SEQ ID NO: 391118 - DNA, 15 bp, Homo sapiens
ccatgcttttataac

SEQ ID NO: 391119 - DNA, 15 bp, Homo sapiens
cccatgcttttataa

SEQ ID NO: 391120 - DNA, 15 bp, Homo sapiens
gcccatgcttttata

SEQ ID NO: 391121 - DNA, 15 bp, Homo sapiens
agcccatgcttttat

SEQ ID NO: 391122 - DNA, 15 bp, Homo sapiens
tagcccatgctttta

SEQ ID NO: 391123 - DNA, 15 bp, Homo sapiens
atagcccatgctttt

SEQ ID NO: 391124 - DNA, 15 bp, Homo sapiens
catagcccatgcttt

SEQ ID NO: 391125 - DNA, 15 bp, Homo sapiens
acatagcccatgctt

SEQ ID NO: 391126 - DNA, 15 bp, Homo sapiens
aacatagcccatgct

SEQ ID NO: 391127 - DNA, 15 bp, Homo sapiens
aaacatagcccatgc

SEQ ID NO: 391128 - DNA, 15 bp, Homo sapiens
taaacatagcccatg

SEQ ID NO: 391129 - DNA, 15 bp, Homo sapiens
gtaaacatagcccat

SEQ ID NO: 391130 - DNA, 15 bp, Homo sapiens
tgtaaacatagccca

SEQ ID NO: 391131 - DNA, 15 bp, Homo sapiens
ttgtaaacatagccc

SEQ ID NO: 391132 - DNA, 15 bp, Homo sapiens
tttgtaaacatagcc

SEQ ID NO: 391133 - DNA, 15 bp, Homo sapiens
ctttgtaaacatagc

SEQ ID NO: 391134 - DNA, 15 bp, Homo sapiens
gctttgtaaacatag

SEQ ID NO: 391135 - DNA, 15 bp, Homo sapiens
ggctttgtaaacata

SEQ ID NO: 391136 - DNA, 15 bp, Homo sapiens
gggctttgtaaacat

SEQ ID NO: 391137 - DNA, 15 bp, Homo sapiens
agggctttgtaaaca

SEQ ID NO: 391138 - DNA, 15 bp, Homo sapiens
tagggctttgtaaac

SEQ ID NO: 391139 - DNA, 15 bp, Homo sapiens
atagggctttgtaaa

SEQ ID NO: 391140 - DNA, 15 bp, Homo sapiens
aatagggctttgtaa

SEQ ID NO: 391141 - DNA, 15 bp, Homo sapiens
caatagggctttgta

SEQ ID NO: 391142 - DNA, 15 bp, Homo sapiens
acaatagggctttgt

SEQ ID NO: 391143 - DNA, 15 bp, Homo sapiens
gacaatagggctttg

SEQ ID NO: 391144 - DNA, 15 bp, Homo sapiens
tgacaatagggcttt

SEQ ID NO: 391145 - DNA, 15 bp, Homo sapiens
atgacaatagggctt

SEQ ID NO: 391146 - DNA, 15 bp, Homo sapiens
aatgacaatagggct

SEQ ID NO: 391147 - DNA, 15 bp, Homo sapiens
taatgacaatagggc

SEQ ID NO: 391148 - DNA, 15 bp, Homo sapiens
ataatgacaataggg

SEQ ID NO: 391149 - DNA, 15 bp, Homo sapiens
aataatgacaatagg

SEQ ID NO: 391150 - DNA, 15 bp, Homo sapiens
gaataatgacaatag

SEQ ID NO: 391151 - DNA, 15 bp, Homo sapiens
tgaataatgacaata

SEQ ID NO: 391152 - DNA, 15 bp, Homo sapiens
gtgaataatgacaat

SEQ ID NO: 391153 - DNA, 15 bp, Homo sapiens
agtgaataatgacaa

SEQ ID NO: 391154 - DNA, 15 bp, Homo sapiens
aagtgaataatgaca

SEQ ID NO: 391155 - DNA, 15 bp, Homo sapiens
aaagtgaataatgac

SEQ ID NO: 391156 - DNA, 15 bp, Homo sapiens
taaagtgaataatga

SEQ ID NO: 391157 - DNA, 15 bp, Homo sapiens
ataaagtgaataatg

SEQ ID NO: 391158 - DNA, 15 bp, Homo sapiens
cataaagtgaataat

SEQ ID NO: 391159 - DNA, 15 bp, Homo sapiens
ccataaagtgaataa

SEQ ID NO: 391160 - DNA, 15 bp, Homo sapiens
accataaagtgaata

SEQ ID NO: 391161 - DNA, 15 bp, Homo sapiens
caccataaagtgaat

SEQ ID NO: 391162 - DNA, 15 bp, Homo sapiens
tcaccataaagtgaa

SEQ ID NO: 391163 - DNA, 15 bp, Homo sapiens
ttcaccataaagtga

SEQ ID NO: 391164 - DNA, 15 bp, Homo sapiens
attcaccataaagtg

SEQ ID NO: 391165 - DNA, 15 bp, Homo sapiens
tattcaccataaagt

SEQ ID NO: 391166 - DNA, 15 bp, Homo sapiens
ctattcaccataaag

SEQ ID NO: 391167 - DNA, 15 bp, Homo sapiens
gctattcaccataaa

SEQ ID NO: 391168 - DNA, 15 bp, Homo sapiens
ggctattcaccataa

SEQ ID NO: 391169 - DNA, 15 bp, Homo sapiens
tggctattcaccata

SEQ ID NO: 391170 - DNA, 15 bp, Homo sapiens
atggctattcaccat

SEQ ID NO: 391171 - DNA, 15 bp, Homo sapiens
aatggctattcacca

SEQ ID NO: 391172 - DNA, 15 bp, Homo sapiens
aaatggctattcacc

SEQ ID NO: 391173 - DNA, 15 bp, Homo sapiens
gaaatggctattcac

SEQ ID NO: 391174 - DNA, 15 bp, Homo sapiens
ggaaatggctattca

SEQ ID NO: 391175 - DNA, 15 bp, Homo sapiens
tggaaatggctattc

SEQ ID NO: 391176 - DNA, 15 bp, Homo sapiens
gtggaaatggctatt

SEQ ID NO: 391177 - DNA, 15 bp, Homo sapiens
agtggaaatggctat

SEQ ID NO: 391178 - DNA, 15 bp, Homo sapiens
cagtggaaatggcta

SEQ ID NO: 391179 - DNA, 15 bp, Homo sapiens
acagtggaaatggct

SEQ ID NO: 391180 - DNA, 15 bp, Homo sapiens
tacagtggaaatggc

SEQ ID NO: 391181 - DNA, 15 bp, Homo sapiens
atacagtggaaatgg

SEQ ID NO: 391182 - DNA, 15 bp, Homo sapiens
aatacagtggaaatg

SEQ ID NO: 391183 - DNA, 15 bp, Homo sapiens
caatacagtggaaat

SEQ ID NO: 391184 - DNA, 15 bp, Homo sapiens
gcaatacagtggaaa

SEQ ID NO: 391185 - DNA, 15 bp, Homo sapiens
tgcaatacagtggaa

SEQ ID NO: 391186 - DNA, 15 bp, Homo sapiens
ctgcaatacagtgga

SEQ ID NO: 391187 - DNA, 15 bp, Homo sapiens
actgcaatacagtgg

SEQ ID NO: 391188 - DNA, 15 bp, Homo sapiens
aactgcaatacagtg

SEQ ID NO: 391189 - DNA, 15 bp, Homo sapiens
aaactgcaatacagt

SEQ ID NO: 391190 - DNA, 15 bp, Homo sapiens
caaactgcaatacag

SEQ ID NO: 391191 - DNA, 15 bp, Homo sapiens
acaaactgcaataca

SEQ ID NO: 391192 - DNA, 15 bp, Homo sapiens
cacaaactgcaatac

SEQ ID NO: 391193 - DNA, 15 bp, Homo sapiens
ccacaaactgcaata

SEQ ID NO: 391194 - DNA, 15 bp, Homo sapiens
cccacaaactgcaat

SEQ ID NO: 391195 - DNA, 15 bp, Homo sapiens
ccccacaaactgcaa

SEQ ID NO: 391196 - DNA, 15 bp, Homo sapiens
tccccacaaactgca

SEQ ID NO: 391197 - DNA, 15 bp, Homo sapiens
ctccccacaaactgc

SEQ ID NO: 391198 - DNA, 15 bp, Homo sapiens
cctccccacaaactg

SEQ ID NO: 391199 - DNA, 15 bp, Homo sapiens
tcctccccacaaact

SEQ ID NO: 391200 - DNA, 15 bp, Homo sapiens
ctcctccccacaaac

SEQ ID NO: 391201 - DNA, 15 bp, Homo sapiens
cctcctccccacaaa

SEQ ID NO: 391202 - DNA, 15 bp, Homo sapiens
gcctcctccccacaa

SEQ ID NO: 391203 - DNA, 15 bp, Homo sapiens
ggcctcctccccaca

SEQ ID NO: 391204 - DNA, 15 bp, Homo sapiens
gggcctcctccccac

SEQ ID NO: 391205 - DNA, 15 bp, Homo sapiens
tgggcctcctcccca

SEQ ID NO: 391206 - DNA, 15 bp, Homo sapiens
ctgggcctcctcccc

SEQ ID NO: 391207 - DNA, 15 bp, Homo sapiens
cctgggcctcctccc

SEQ ID NO: 391208 - DNA, 15 bp, Homo sapiens
ccctgggcctcctcc

SEQ ID NO: 391209 - DNA, 15 bp, Homo sapiens
accctgggcctcctc

SEQ ID NO: 391210 - DNA, 15 bp, Homo sapiens
caccctgggcctcct

SEQ ID NO: 391211 - DNA, 15 bp, Homo sapiens
tcaccctgggcctcc

SEQ ID NO: 391212 - DNA, 15 bp, Homo sapiens
ctcaccctgggcctc

SEQ ID NO: 391213 - DNA, 15 bp, Homo sapiens
tctcaccctgggcct

SEQ ID NO: 391214 - DNA, 15 bp, Homo sapiens
ttctcaccctgggcc

SEQ ID NO: 391215 - DNA, 15 bp, Homo sapiens
tttctcaccctgggc

SEQ ID NO: 391216 - DNA, 15 bp, Homo sapiens
ctttctcaccctggg

SEQ ID NO: 391217 - DNA, 15 bp, Homo sapiens
tctttctcaccctgg

SEQ ID NO: 391218 - DNA, 15 bp, Homo sapiens
ttctttctcaccctg

SEQ ID NO: 391219 - DNA, 15 bp, Homo sapiens
attctttctcaccct

SEQ ID NO: 391220 - DNA, 15 bp, Homo sapiens
cattctttctcaccc

SEQ ID NO: 391221 - DNA, 15 bp, Homo sapiens
ccattctttctcacc

SEQ ID NO: 391222 - DNA, 15 bp, Homo sapiens
cccattctttctcac

SEQ ID NO: 391223 - DNA, 15 bp, Homo sapiens
ccccattctttctca

SEQ ID NO: 391224 - DNA, 15 bp, Homo sapiens
tccccattctttctc

SEQ ID NO: 391225 - DNA, 15 bp, Homo sapiens
ctccccattctttct

SEQ ID NO: 391226 - DNA, 15 bp, Homo sapiens
cctccccattctttc

SEQ ID NO: 391227 - DNA, 15 bp, Homo sapiens
acctccccattcttt

SEQ ID NO: 391228 - DNA, 15 bp, Homo sapiens
tacctccccattctt

SEQ ID NO: 391229 - DNA, 15 bp, Homo sapiens
atacctccccattct

SEQ ID NO: 391230 - DNA, 15 bp, Homo sapiens
aatacctccccattc

SEQ ID NO: 391231 - DNA, 15 bp, Homo sapiens
aaatacctccccatt

SEQ ID NO: 391232 - DNA, 15 bp, Homo sapiens
aaaatacctccccat

SEQ ID NO: 391233 - DNA, 15 bp, Homo sapiens
aaaaatacctcccca

SEQ ID NO: 391234 - DNA, 15 bp, Homo sapiens
caaaaatacctcccc

SEQ ID NO: 391235 - DNA, 15 bp, Homo sapiens
acaaaaatacctccc

SEQ ID NO: 391236 - DNA, 15 bp, Homo sapiens
aacaaaaatacctcc

SEQ ID NO: 391237 - DNA, 15 bp, Homo sapiens
aaacaaaaatacctc

SEQ ID NO: 391238 - DNA, 15 bp, Homo sapiens
taaacaaaaatacct

SEQ ID NO: 391239 - DNA, 15 bp, Homo sapiens
gtaaacaaaaatacc

SEQ ID NO: 391240 - DNA, 15 bp, Homo sapiens
agtaaacaaaaatac

SEQ ID NO: 391241 - DNA, 15 bp, Homo sapiens
gagtaaacaaaaata

SEQ ID NO: 391242 - DNA, 15 bp, Homo sapiens
tgagtaaacaaaaat

SEQ ID NO: 391243 - DNA, 15 bp, Homo sapiens
ctgagtaaacaaaaa

SEQ ID NO: 391244 - DNA, 15 bp, Homo sapiens
tctgagtaaacaaaa

SEQ ID NO: 391245 - DNA, 15 bp, Homo sapiens
atctgagtaaacaaa

SEQ ID NO: 391246 - DNA, 15 bp, Homo sapiens
tatctgagtaaacaa

SEQ ID NO: 391247 - DNA, 15 bp, Homo sapiens
ctatctgagtaaaca

SEQ ID NO: 391248 - DNA, 15 bp, Homo sapiens
tctatctgagtaaac

SEQ ID NO: 391249 - DNA, 15 bp, Homo sapiens
atctatctgagtaaa

SEQ ID NO: 391250 - DNA, 15 bp, Homo sapiens
aatctatctgagtaa

SEQ ID NO: 391251 - DNA, 15 bp, Homo sapiens
caatctatctgagta

SEQ ID NO: 391252 - DNA, 15 bp, Homo sapiens
acaatctatctgagt

SEQ ID NO: 391253 - DNA, 15 bp, Homo sapiens
tacaatctatctgag

SEQ ID NO: 391254 - DNA, 15 bp, Homo sapiens
ttacaatctatctga

SEQ ID NO: 391255 - DNA, 15 bp, Homo sapiens
cttacaatctatctg

SEQ ID NO: 391256 - DNA, 15 bp, Homo sapiens
acttacaatctatct

SEQ ID NO: 391257 - DNA, 15 bp, Homo sapiens
gacttacaatctatc

SEQ ID NO: 391258 - DNA, 15 bp, Homo sapiens
ggacttacaatctat

SEQ ID NO: 391259 - DNA, 15 bp, Homo sapiens
gggacttacaatcta

SEQ ID NO: 391260 - DNA, 15 bp, Homo sapiens
agggacttacaatct

SEQ ID NO: 391261 - DNA, 15 bp, Homo sapiens
gagggacttacaatc

SEQ ID NO: 391262 - DNA, 15 bp, Homo sapiens
tgagggacttacaat

SEQ ID NO: 391263 - DNA, 15 bp, Homo sapiens
atgagggacttacaa

SEQ ID NO: 391264 - DNA, 15 bp, Homo sapiens
gatgagggacttaca

SEQ ID NO: 391265 - DNA, 15 bp, Homo sapiens
ggatgagggacttac

SEQ ID NO: 391266 - DNA, 15 bp, Homo sapiens
aggatgagggactta

SEQ ID NO: 391267 - DNA, 15 bp, Homo sapiens
aaggatgagggactt

SEQ ID NO: 391268 - DNA, 15 bp, Homo sapiens
caaggatgagggact

SEQ ID NO: 391269 - DNA, 15 bp, Homo sapiens
tcaaggatgagggac

SEQ ID NO: 391270 - DNA, 15 bp, Homo sapiens
atcaaggatgaggga

SEQ ID NO: 391271 - DNA, 15 bp, Homo sapiens
tatcaaggatgaggg

SEQ ID NO: 391272 - DNA, 15 bp, Homo sapiens
gtatcaaggatgagg

SEQ ID NO: 391273 - DNA, 15 bp, Homo sapiens
agtatcaaggatgag

SEQ ID NO: 391274 - DNA, 15 bp, Homo sapiens
tagtatcaaggatga

SEQ ID NO: 391275 - DNA, 15 bp, Homo sapiens
ttagtatcaaggatg

SEQ ID NO: 391276 - DNA, 15 bp, Homo sapiens
gttagtatcaaggat

SEQ ID NO: 391277 - DNA, 15 bp, Homo sapiens
agttagtatcaagga

SEQ ID NO: 391278 - DNA, 15 bp, Homo sapiens
tagttagtatcaagg

SEQ ID NO: 391279 - DNA, 15 bp, Homo sapiens
gtagttagtatcaag

SEQ ID NO: 391280 - DNA, 15 bp, Homo sapiens
tgtagttagtatcaa

SEQ ID NO: 391281 - DNA, 15 bp, Homo sapiens
atgtagttagtatca

SEQ ID NO: 391282 - DNA, 15 bp, Homo sapiens
gatgtagttagtatc

SEQ ID NO: 391283 - DNA, 15 bp, Homo sapiens
ggatgtagttagtat

SEQ ID NO: 391284 - DNA, 15 bp, Homo sapiens
tggatgtagttagta

SEQ ID NO: 391285 - DNA, 15 bp, Homo sapiens
ttggatgtagttagt

SEQ ID NO: 391286 - DNA, 15 bp, Homo sapiens
cttggatgtagttag

SEQ ID NO: 391287 - DNA, 15 bp, Homo sapiens
tcttggatgtagtta

SEQ ID NO: 391288 - DNA, 15 bp, Homo sapiens
ttcttggatgtagtt

SEQ ID NO: 391289 - DNA, 15 bp, Homo sapiens
tttcttggatgtagt

SEQ ID NO: 391290 - DNA, 15 bp, Homo sapiens
ctttcttggatgtag

SEQ ID NO: 391291 - DNA, 15 bp, Homo sapiens
gctttcttggatgta

SEQ ID NO: 391292 - DNA, 15 bp, Homo sapiens
tgctttcttggatgt

SEQ ID NO: 391293 - DNA, 15 bp, Homo sapiens
atgctttcttggatg

SEQ ID NO: 391294 - DNA, 15 bp, Homo sapiens
tatgctttcttggat

SEQ ID NO: 391295 - DNA, 15 bp, Homo sapiens
atatgctttcttgga

SEQ ID NO: 391296 - DNA, 15 bp, Homo sapiens
gatatgctttcttgg

SEQ ID NO: 391297 - DNA, 15 bp, Homo sapiens
tgatatgctttcttg

SEQ ID NO: 391298 - DNA, 15 bp, Homo sapiens
atgatatgctttctt

SEQ ID NO: 391299 - DNA, 15 bp, Homo sapiens
gatgatatgctttct

SEQ ID NO: 391300 - DNA, 15 bp, Homo sapiens
agatgatatgctttc

SEQ ID NO: 391301 - DNA, 15 bp, Homo sapiens
gagatgatatgcttt

SEQ ID NO: 391302 - DNA, 15 bp, Homo sapiens
agagatgatatgctt

SEQ ID NO: 391303 - DNA, 15 bp, Homo sapiens
cagagatgatatgct

SEQ ID NO: 391304 - DNA, 15 bp, Homo sapiens
tcagagatgatatgc

SEQ ID NO: 391305 - DNA, 15 bp, Homo sapiens
gtcagagatgatatg

SEQ ID NO: 391306 - DNA, 15 bp, Homo sapiens
tgtcagagatgatat

SEQ ID NO: 391307 - DNA, 15 bp, Homo sapiens
atgtcagagatgata

SEQ ID NO: 391308 - DNA, 15 bp, Homo sapiens
aatgtcagagatgat

SEQ ID NO: 391309 - DNA, 15 bp, Homo sapiens
caatgtcagagatga

SEQ ID NO: 391310 - DNA, 15 bp, Homo sapiens
tcaatgtcagagatg

SEQ ID NO: 391311 - DNA, 15 bp, Homo sapiens
ctcaatgtcagagat

SEQ ID NO: 391312 - DNA, 15 bp, Homo sapiens
cctcaatgtcagaga

SEQ ID NO: 391313 - DNA, 15 bp, Homo sapiens
ccctcaatgtcagag

SEQ ID NO: 391314 - DNA, 15 bp, Homo sapiens
accctcaatgtcaga

SEQ ID NO: 391315 - DNA, 15 bp, Homo sapiens
gaccctcaatgtcag

SEQ ID NO: 391316 - DNA, 15 bp, Homo sapiens
agaccctcaatgtca

SEQ ID NO: 391317 - DNA, 15 bp, Homo sapiens
tagaccctcaatgtc

SEQ ID NO: 391318 - DNA, 15 bp, Homo sapiens
ttagaccctcaatgt

SEQ ID NO: 391319 - DNA, 15 bp, Homo sapiens
gttagaccctcaatg

SEQ ID NO: 391320 - DNA, 15 bp, Homo sapiens
ggttagaccctcaat

SEQ ID NO: 391321 - DNA, 15 bp, Homo sapiens
aggttagaccctcaa

SEQ ID NO: 391322 - DNA, 15 bp, Homo sapiens
taggttagaccctca

SEQ ID NO: 391323 - DNA, 15 bp, Homo sapiens
ttaggttagaccctc

SEQ ID NO: 391324 - DNA, 15 bp, Homo sapiens
cttaggttagaccct

SEQ ID NO: 391325 - DNA, 15 bp, Homo sapiens
acttaggttagaccc

SEQ ID NO: 391326 - DNA, 15 bp, Homo sapiens
cacttaggttagacc

SEQ ID NO: 391327 - DNA, 15 bp, Homo sapiens
ccacttaggttagac

SEQ ID NO: 391328 - DNA, 15 bp, Homo sapiens
accacttaggttaga

SEQ ID NO: 391329 - DNA, 15 bp, Homo sapiens
caccacttaggttag

SEQ ID NO: 391330 - DNA, 15 bp, Homo sapiens
ccaccacttaggtta

SEQ ID NO: 391331 - DNA, 15 bp, Homo sapiens
tccaccacttaggtt

SEQ ID NO: 391332 - DNA, 15 bp, Homo sapiens
ctccaccacttaggt

SEQ ID NO: 391333 - DNA, 15 bp, Homo sapiens
tctccaccacttagg

SEQ ID NO: 391334 - DNA, 15 bp, Homo sapiens
gtctccaccacttag

SEQ ID NO: 391335 - DNA, 15 bp, Homo sapiens
agtctccaccactta

SEQ ID NO: 391336 - DNA, 15 bp, Homo sapiens
tagtctccaccactt

SEQ ID NO: 391337 - DNA, 15 bp, Homo sapiens
atagtctccaccact

SEQ ID NO: 391338 - DNA, 15 bp, Homo sapiens
tatagtctccaccac

SEQ ID NO: 391339 - DNA, 15 bp, Homo sapiens
gtatagtctccacca

SEQ ID NO: 391340 - DNA, 15 bp, Homo sapiens
tgtatagtctccacc

SEQ ID NO: 391341 - DNA, 15 bp, Homo sapiens
atgtatagtctccac

SEQ ID NO: 391342 - DNA, 15 bp, Homo sapiens
tatgtatagtctcca

SEQ ID NO: 391343 - DNA, 15 bp, Homo sapiens
atatgtatagtctcc

SEQ ID NO: 391344 - DNA, 15 bp, Homo sapiens
catatgtatagtctc

SEQ ID NO: 391345 - DNA, 15 bp, Homo sapiens
ccatatgtatagtct

SEQ ID NO: 391346 - DNA, 15 bp, Homo sapiens
accatatgtatagtc

SEQ ID NO: 391347 - DNA, 15 bp, Homo sapiens
caccatatgtatagt

SEQ ID NO: 391348 - DNA, 15 bp, Homo sapiens
gcaccatatgtatag

SEQ ID NO: 391349 - DNA, 15 bp, Homo sapiens
agcaccatatgtata

SEQ ID NO: 391350 - DNA, 15 bp, Homo sapiens
tagcaccatatgtat

SEQ ID NO: 391351 - DNA, 15 bp, Homo sapiens
atagcaccatatgta

SEQ ID NO: 391352 - DNA, 15 bp, Homo sapiens
tatagcaccatatgt

SEQ ID NO: 391353 - DNA, 15 bp, Homo sapiens
atatagcaccatatg

SEQ ID NO: 391354 - DNA, 15 bp, Homo sapiens
aatatagcaccatat

SEQ ID NO: 391355 - DNA, 15 bp, Homo sapiens
taatatagcaccata

SEQ ID NO: 391356 - DNA, 15 bp, Homo sapiens
ctaatatagcaccat

SEQ ID NO: 391357 - DNA, 15 bp, Homo sapiens
tctaatatagcacca

SEQ ID NO: 391358 - DNA, 15 bp, Homo sapiens
ttctaatatagcacc

SEQ ID NO: 391359 - DNA, 15 bp, Homo sapiens
tttctaatatagcac

SEQ ID NO: 391360 - DNA, 15 bp, Homo sapiens
ctttctaatatagca

SEQ ID NO: 391361 - DNA, 15 bp, Homo sapiens
actttctaatatagc

SEQ ID NO: 391362 - DNA, 15 bp, Homo sapiens
tactttctaatatag

SEQ ID NO: 391363 - DNA, 15 bp, Homo sapiens
ctactttctaatata

SEQ ID NO: 391364 - DNA, 15 bp, Homo sapiens
tctactttctaatat

SEQ ID NO: 391365 - DNA, 15 bp, Homo sapiens
ttctactttctaata

SEQ ID NO: 391366 - DNA, 15 bp, Homo sapiens
attctactttctaat

SEQ ID NO: 391367 - DNA, 15 bp, Homo sapiens
cattctactttctaa

SEQ ID NO: 391368 - DNA, 15 bp, Homo sapiens
acattctactttcta

SEQ ID NO: 391369 - DNA, 15 bp, Homo sapiens
cacattctactttct

SEQ ID NO: 391370 - DNA, 15 bp, Homo sapiens
gcacattctactttc

SEQ ID NO: 391371 - DNA, 15 bp, Homo sapiens
agcacattctacttt

SEQ ID NO: 391372 - DNA, 15 bp, Homo sapiens
gagcacattctactt

SEQ ID NO: 391373 - DNA, 15 bp, Homo sapiens
tgagcacattctact

SEQ ID NO: 391374 - DNA, 15 bp, Homo sapiens
gtgagcacattctac

SEQ ID NO: 391375 - DNA, 15 bp, Homo sapiens
agtgagcacattcta

SEQ ID NO: 391376 - DNA, 15 bp, Homo sapiens
cagtgagcacattct

SEQ ID NO: 391377 - DNA, 15 bp, Homo sapiens
acagtgagcacattc

SEQ ID NO: 391378 - DNA, 15 bp, Homo sapiens
aacagtgagcacatt

SEQ ID NO: 391379 - DNA, 15 bp, Homo sapiens
taacagtgagcacat

SEQ ID NO: 391380 - DNA, 15 bp, Homo sapiens
ataacagtgagcaca

SEQ ID NO: 391381 - DNA, 15 bp, Homo sapiens
tataacagtgagcac

SEQ ID NO: 391382 - DNA, 15 bp, Homo sapiens
gtataacagtgagca

SEQ ID NO: 391383 - DNA, 15 bp, Homo sapiens
agtataacagtgagc

SEQ ID NO: 391384 - DNA, 15 bp, Homo sapiens
tagtataacagtgag

SEQ ID NO: 391385 - DNA, 15 bp, Homo sapiens
ctagtataacagtga

SEQ ID NO: 391386 - DNA, 15 bp, Homo sapiens
tctagtataacagtg

SEQ ID NO: 391387 - DNA, 15 bp, Homo sapiens
gtctagtataacagt

SEQ ID NO: 391388 - DNA, 15 bp, Homo sapiens
agtctagtataacag

SEQ ID NO: 391389 - DNA, 15 bp, Homo sapiens
gagtctagtataaca

SEQ ID NO: 391390 - DNA, 15 bp, Homo sapiens
tgagtctagtataac

SEQ ID NO: 391391 - DNA, 15 bp, Homo sapiens
gtgagtctagtataa

SEQ ID NO: 391392 - DNA, 15 bp, Homo sapiens
tgtgagtctagtata

SEQ ID NO: 391393 - DNA, 15 bp, Homo sapiens
ttgtgagtctagtat

SEQ ID NO: 391394 - DNA, 15 bp, Homo sapiens
tttgtgagtctagta

SEQ ID NO: 391395 - DNA, 15 bp, Homo sapiens
ctttgtgagtctagt

SEQ ID NO: 391396 - DNA, 15 bp, Homo sapiens
gctttgtgagtctag

SEQ ID NO: 391397 - DNA, 15 bp, Homo sapiens
tgctttgtgagtcta

SEQ ID NO: 391398 - DNA, 15 bp, Homo sapiens
gtgctttgtgagtct

SEQ ID NO: 391399 - DNA, 15 bp, Homo sapiens
agtgctttgtgagtc

SEQ ID NO: 391400 - DNA, 15 bp, Homo sapiens
aagtgctttgtgagt

SEQ ID NO: 391401 - DNA, 15 bp, Homo sapiens
aaagtgctttgtgag

SEQ ID NO: 391402 - DNA, 15 bp, Homo sapiens
caaagtgctttgtga

SEQ ID NO: 391403 - DNA, 15 bp, Homo sapiens
ccaaagtgctttgtg

SEQ ID NO: 391404 - DNA, 15 bp, Homo sapiens
cccaaagtgctttgt

SEQ ID NO: 391405 - DNA, 15 bp, Homo sapiens
tcccaaagtgctttg

SEQ ID NO: 391406 - DNA, 15 bp, Homo sapiens
atcccaaagtgcttt

SEQ ID NO: 391407 - DNA, 15 bp, Homo sapiens
gatcccaaagtgctt

SEQ ID NO: 391408 - DNA, 15 bp, Homo sapiens
tgatcccaaagtgct

SEQ ID NO: 391409 - DNA, 15 bp, Homo sapiens
gtgatcccaaagtgc

SEQ ID NO: 391410 - DNA, 15 bp, Homo sapiens
ggtgatcccaaagtg

SEQ ID NO: 391411 - DNA, 15 bp, Homo sapiens
tggtgatcccaaagt

SEQ ID NO: 391412 - DNA, 15 bp, Homo sapiens
ttggtgatcccaaag

SEQ ID NO: 391413 - DNA, 15 bp, Homo sapiens
tttggtgatcccaaa

SEQ ID NO: 391414 - DNA, 15 bp, Homo sapiens
ctttggtgatcccaa

SEQ ID NO: 391415 - DNA, 15 bp, Homo sapiens
tctttggtgatccca

SEQ ID NO: 391416 - DNA, 15 bp, Homo sapiens
ctctttggtgatccc

SEQ ID NO: 391417 - DNA, 15 bp, Homo sapiens
cctctttggtgatcc

SEQ ID NO: 391418 - DNA, 15 bp, Homo sapiens
ccctctttggtgatc

SEQ ID NO: 391419 - DNA, 15 bp, Homo sapiens
cccctctttggtgat

SEQ ID NO: 391420 - DNA, 15 bp, Homo sapiens
tcccctctttggtga

SEQ ID NO: 391421 - DNA, 15 bp, Homo sapiens
ttcccctctttggtg

SEQ ID NO: 391422 - DNA, 15 bp, Homo sapiens
tttcccctctttggt

SEQ ID NO: 391423 - DNA, 15 bp, Homo sapiens
ctttcccctctttgg

SEQ ID NO: 391424 - DNA, 15 bp, Homo sapiens
gctttcccctctttg

SEQ ID NO: 391425 - DNA, 15 bp, Homo sapiens
agctttcccctcttt

SEQ ID NO: 391426 - DNA, 15 bp, Homo sapiens
tagctttcccctctt

SEQ ID NO: 391427 - DNA, 15 bp, Homo sapiens
ttagctttcccctct

SEQ ID NO: 391428 - DNA, 15 bp, Homo sapiens
attagctttcccctc

SEQ ID NO: 391429 - DNA, 15 bp, Homo sapiens
aattagctttcccct

SEQ ID NO: 391430 - DNA, 15 bp, Homo sapiens
aaattagctttcccc

SEQ ID NO: 391431 - DNA, 15 bp, Homo sapiens
aaaattagctttccc

SEQ ID NO: 391432 - DNA, 15 bp, Homo sapiens
caaaattagctttcc

SEQ ID NO: 391433 - DNA, 15 bp, Homo sapiens
tcaaaattagctttc

SEQ ID NO: 391434 - DNA, 15 bp, Homo sapiens
atcaaaattagcttt

SEQ ID NO: 391435 - DNA, 15 bp, Homo sapiens
gatcaaaattagctt

SEQ ID NO: 391436 - DNA, 15 bp, Homo sapiens
tgatcaaaattagct

SEQ ID NO: 391437 - DNA, 15 bp, Homo sapiens
ctgatcaaaattagc

SEQ ID NO: 391438 - DNA, 15 bp, Homo sapiens
cctgatcaaaattag

SEQ ID NO: 391439 - DNA, 15 bp, Homo sapiens
tcctgatcaaaatta

SEQ ID NO: 391440 - DNA, 15 bp, Homo sapiens
ctcctgatcaaaatt

SEQ ID NO: 391441 - DNA, 15 bp, Homo sapiens
actcctgatcaaaat

SEQ ID NO: 391442 - DNA, 15 bp, Homo sapiens
aactcctgatcaaaa

SEQ ID NO: 391443 - DNA, 15 bp, Homo sapiens
caactcctgatcaaa

SEQ ID NO: 391444 - DNA, 15 bp, Homo sapiens
ccaactcctgatcaa

SEQ ID NO: 391445 - DNA, 15 bp, Homo sapiens
cccaactcctgatca

SEQ ID NO: 391446 - DNA, 15 bp, Homo sapiens
ccccaactcctgatc

SEQ ID NO: 391447 - DNA, 15 bp, Homo sapiens
tccccaactcctgat

SEQ ID NO: 391448 - DNA, 15 bp, Homo sapiens
atccccaactcctga

SEQ ID NO: 391449 - DNA, 15 bp, Homo sapiens
catccccaactcctg

SEQ ID NO: 391450 - DNA, 15 bp, Homo sapiens
gcatccccaactcct

SEQ ID NO: 391451 - DNA, 15 bp, Homo sapiens
ggcatccccaactcc

SEQ ID NO: 391452 - DNA, 15 bp, Homo sapiens
tggcatccccaactc

SEQ ID NO: 391453 - DNA, 15 bp, Homo sapiens
atggcatccccaact

SEQ ID NO: 391454 - DNA, 15 bp, Homo sapiens
gatggcatccccaac

SEQ ID NO: 391455 - DNA, 15 bp, Homo sapiens
tgatggcatccccaa

SEQ ID NO: 391456 - DNA, 15 bp, Homo sapiens
atgatggcatcccca

SEQ ID NO: 391457 - DNA, 15 bp, Homo sapiens
catgatggcatcccc

SEQ ID NO: 391458 - DNA, 15 bp, Homo sapiens
ccatgatggcatccc

SEQ ID NO: 391459 - DNA, 15 bp, Homo sapiens
tccatgatggcatcc

SEQ ID NO: 391460 - DNA, 15 bp, Homo sapiens
ttccatgatggcatc

SEQ ID NO: 391461 - DNA, 15 bp, Homo sapiens
cttccatgatggcat

SEQ ID NO: 391462 - DNA, 15 bp, Homo sapiens
ccttccatgatggca

SEQ ID NO: 391463 - DNA, 15 bp, Homo sapiens
gccttccatgatggc

SEQ ID NO: 391464 - DNA, 15 bp, Homo sapiens
agccttccatgatgg

SEQ ID NO: 391465 - DNA, 15 bp, Homo sapiens
cagccttccatgatg

SEQ ID NO: 391466 - DNA, 15 bp, Homo sapiens
gcagccttccatgat

SEQ ID NO: 391467 - DNA, 15 bp, Homo sapiens
tgcagccttccatga

SEQ ID NO: 391468 - DNA, 15 bp, Homo sapiens
atgcagccttccatg

SEQ ID NO: 391469 - DNA, 15 bp, Homo sapiens
tatgcagccttccat

SEQ ID NO: 391470 - DNA, 15 bp, Homo sapiens
atatgcagccttcca

SEQ ID NO: 391471 - DNA, 15 bp, Homo sapiens
aatatgcagccttcc

SEQ ID NO: 391472 - DNA, 15 bp, Homo sapiens
aaatatgcagccttc

SEQ ID NO: 391473 - DNA, 15 bp, Homo sapiens
caaatatgcagcctt

SEQ ID NO: 391474 - DNA, 15 bp, Homo sapiens
tcaaatatgcagcct

SEQ ID NO: 391475 - DNA, 15 bp, Homo sapiens
atcaaatatgcagcc

SEQ ID NO: 391476 - DNA, 15 bp, Homo sapiens
gatcaaatatgcagc

SEQ ID NO: 391477 - DNA, 15 bp, Homo sapiens
agatcaaatatgcag

SEQ ID NO: 391478 - DNA, 15 bp, Homo sapiens
cagatcaaatatgca

SEQ ID NO: 391479 - DNA, 15 bp, Homo sapiens
acagatcaaatatgc

SEQ ID NO: 391480 - DNA, 15 bp, Homo sapiens
cacagatcaaatatg

SEQ ID NO: 391481 - DNA, 15 bp, Homo sapiens
acacagatcaaatat

SEQ ID NO: 391482 - DNA, 15 bp, Homo sapiens
gacacagatcaaata

SEQ ID NO: 391483 - DNA, 15 bp, Homo sapiens
agacacagatcaaat

SEQ ID NO: 391484 - DNA, 15 bp, Homo sapiens
aagacacagatcaaa

SEQ ID NO: 391485 - DNA, 15 bp, Homo sapiens
taagacacagatcaa

SEQ ID NO: 391486 - DNA, 15 bp, Homo sapiens
ttaagacacagatca

SEQ ID NO: 391487 - DNA, 15 bp, Homo sapiens
tttaagacacagatc

SEQ ID NO: 391488 - DNA, 15 bp, Homo sapiens
gtttaagacacagat

SEQ ID NO: 391489 - DNA, 15 bp, Homo sapiens
tgtttaagacacaga

SEQ ID NO: 391490 - DNA, 15 bp, Homo sapiens
ttgtttaagacacag

SEQ ID NO: 391491 - DNA, 15 bp, Homo sapiens
tttgtttaagacaca

SEQ ID NO: 391492 - DNA, 15 bp, Homo sapiens
ctttgtttaagacac

SEQ ID NO: 391493 - DNA, 15 bp, Homo sapiens
cctttgtttaagaca

SEQ ID NO: 391494 - DNA, 15 bp, Homo sapiens
gcctttgtttaagac

SEQ ID NO: 391495 - DNA, 15 bp, Homo sapiens
agcctttgtttaaga

SEQ ID NO: 391496 - DNA, 15 bp, Homo sapiens
gagcctttgtttaag

SEQ ID NO: 391497 - DNA, 15 bp, Homo sapiens
cgagcctttgtttaa

SEQ ID NO: 391498 - DNA, 15 bp, Homo sapiens
tcgagcctttgttta

SEQ ID NO: 391499 - DNA, 15 bp, Homo sapiens
ttcgagcctttgttt

SEQ ID NO: 391500 - DNA, 15 bp, Homo sapiens
attcgagcctttgtt

SEQ ID NO: 391501 - DNA, 15 bp, Homo sapiens
tattcgagcctttgt

SEQ ID NO: 391502 - DNA, 15 bp, Homo sapiens
ttattcgagcctttg

SEQ ID NO: 391503 - DNA, 15 bp, Homo sapiens
cttattcgagccttt

SEQ ID NO: 391504 - DNA, 15 bp, Homo sapiens
tcttattcgagcctt

SEQ ID NO: 391505 - DNA, 15 bp, Homo sapiens
ttcttattcgagcct

SEQ ID NO: 391506 - DNA, 15 bp, Homo sapiens
attcttattcgagcc

SEQ ID NO: 391507 - DNA, 15 bp, Homo sapiens
aattcttattcgagc

SEQ ID NO: 391508 - DNA, 15 bp, Homo sapiens
taattcttattcgag

SEQ ID NO: 391509 - DNA, 15 bp, Homo sapiens
ctaattcttattcga

SEQ ID NO: 391510 - DNA, 15 bp, Homo sapiens
tctaattcttattcg

SEQ ID NO: 391511 - DNA, 15 bp, Homo sapiens
ttctaattcttattc

SEQ ID NO: 391512 - DNA, 15 bp, Homo sapiens
tttctaattcttatt

SEQ ID NO: 391513 - DNA, 15 bp, Homo sapiens
atttctaattcttat

SEQ ID NO: 391514 - DNA, 15 bp, Homo sapiens
tatttctaattctta

SEQ ID NO: 391515 - DNA, 15 bp, Homo sapiens
ttatttctaattctt

SEQ ID NO: 391516 - DNA, 15 bp, Homo sapiens
cttatttctaattct

SEQ ID NO: 391517 - DNA, 15 bp, Homo sapiens
tcttatttctaattc

SEQ ID NO: 391518 - DNA, 15 bp, Homo sapiens
ttcttatttctaatt

SEQ ID NO: 391519 - DNA, 15 bp, Homo sapiens
cttcttatttctaat

SEQ ID NO: 391520 - DNA, 15 bp, Homo sapiens
ccttcttatttctaa

SEQ ID NO: 391521 - DNA, 15 bp, Homo sapiens
tccttcttatttcta

SEQ ID NO: 391522 - DNA, 15 bp, Homo sapiens
ttccttcttatttct

SEQ ID NO: 391523 - DNA, 15 bp, Homo sapiens
tttccttcttatttc

SEQ ID NO: 391524 - DNA, 15 bp, Homo sapiens
atttccttcttattt

SEQ ID NO: 391525 - DNA, 15 bp, Homo sapiens
tatttccttcttatt

SEQ ID NO: 391526 - DNA, 15 bp, Homo sapiens
ctatttccttcttat

SEQ ID NO: 391527 - DNA, 15 bp, Homo sapiens
tctatttccttctta

SEQ ID NO: 391528 - DNA, 15 bp, Homo sapiens
gtctatttccttctt

SEQ ID NO: 391529 - DNA, 15 bp, Homo sapiens
tgtctatttccttct

SEQ ID NO: 391530 - DNA, 15 bp, Homo sapiens
gtgtctatttccttc

SEQ ID NO: 391531 - DNA, 15 bp, Homo sapiens
ggtgtctatttcctt

SEQ ID NO: 391532 - DNA, 15 bp, Homo sapiens
aggtgtctatttcct

SEQ ID NO: 391533 - DNA, 15 bp, Homo sapiens
gaggtgtctatttcc

SEQ ID NO: 391534 - DNA, 15 bp, Homo sapiens
tgaggtgtctatttc

SEQ ID NO: 391535 - DNA, 15 bp, Homo sapiens
ttgaggtgtctattt

SEQ ID NO: 391536 - DNA, 15 bp, Homo sapiens
tttgaggtgtctatt

SEQ ID NO: 391537 - DNA, 15 bp, Homo sapiens
ttttgaggtgtctat

SEQ ID NO: 391538 - DNA, 15 bp, Homo sapiens
attttgaggtgtcta

SEQ ID NO: 391539 - DNA, 15 bp, Homo sapiens
aattttgaggtgtct

SEQ ID NO: 391540 - DNA, 15 bp, Homo sapiens
aaattttgaggtgtc

SEQ ID NO: 391541 - DNA, 15 bp, Homo sapiens
gaaattttgaggtgt

SEQ ID NO: 391542 - DNA, 15 bp, Homo sapiens
tgaaattttgaggtg

SEQ ID NO: 391543 - DNA, 15 bp, Homo sapiens
ttgaaattttgaggt

SEQ ID NO: 391544 - DNA, 15 bp, Homo sapiens
tttgaaattttgagg

SEQ ID NO: 391545 - DNA, 15 bp, Homo sapiens
ttttgaaattttgag

SEQ ID NO: 391546 - DNA, 15 bp, Homo sapiens
cttttgaaattttga

SEQ ID NO: 391547 - DNA, 15 bp, Homo sapiens
gcttttgaaattttg

SEQ ID NO: 391548 - DNA, 15 bp, Homo sapiens
tgcttttgaaatttt

SEQ ID NO: 391549 - DNA, 15 bp, Homo sapiens
ttgcttttgaaattt

SEQ ID NO: 391550 - DNA, 15 bp, Homo sapiens
tttgcttttgaaatt

SEQ ID NO: 391551 - DNA, 15 bp, Homo sapiens
ttttgcttttgaaat

SEQ ID NO: 391552 - DNA, 15 bp, Homo sapiens
gttttgcttttgaaa

SEQ ID NO: 391553 - DNA, 15 bp, Homo sapiens
tgttttgcttttgaa

SEQ ID NO: 391554 - DNA, 15 bp, Homo sapiens
ctgttttgcttttga

SEQ ID NO: 391555 - DNA, 15 bp, Homo sapiens
tctgttttgcttttg

SEQ ID NO: 391556 - DNA, 15 bp, Homo sapiens
gtctgttttgctttt

SEQ ID NO: 391557 - DNA, 15 bp, Homo sapiens
tgtctgttttgcttt

SEQ ID NO: 391558 - DNA, 15 bp, Homo sapiens
gtgtctgttttgctt

SEQ ID NO: 391559 - DNA, 15 bp, Homo sapiens
tgtgtctgttttgct

SEQ ID NO: 391560 - DNA, 15 bp, Homo sapiens
ttgtgtctgttttgc

SEQ ID NO: 391561 - DNA, 15 bp, Homo sapiens
gttgtgtctgttttg

SEQ ID NO: 391562 - DNA, 15 bp, Homo sapiens
agttgtgtctgtttt

SEQ ID NO: 391563 - DNA, 15 bp, Homo sapiens
aagttgtgtctgttt

SEQ ID NO: 391564 - DNA, 15 bp, Homo sapiens
caagttgtgtctgtt

SEQ ID NO: 391565 - DNA, 15 bp, Homo sapiens
ccaagttgtgtctgt

SEQ ID NO: 391566 - DNA, 15 bp, Homo sapiens
cccaagttgtgtctg

SEQ ID NO: 391567 - DNA, 15 bp, Homo sapiens
tcccaagttgtgtct

SEQ ID NO: 391568 - DNA, 15 bp, Homo sapiens
atcccaagttgtgtc

SEQ ID NO: 391569 - DNA, 15 bp, Homo sapiens
catcccaagttgtgt

SEQ ID NO: 391570 - DNA, 15 bp, Homo sapiens
gcatcccaagttgtg

SEQ ID NO: 391571 - DNA, 15 bp, Homo sapiens
tgcatcccaagttgt

SEQ ID NO: 391572 - DNA, 15 bp, Homo sapiens
atgcatcccaagttg

SEQ ID NO: 391573 - DNA, 15 bp, Homo sapiens
tatgcatcccaagtt

SEQ ID NO: 391574 - DNA, 15 bp, Homo sapiens
ctatgcatcccaagt

SEQ ID NO: 391575 - DNA, 15 bp, Homo sapiens
cctatgcatcccaag

SEQ ID NO: 391576 - DNA, 15 bp, Homo sapiens
tcctatgcatcccaa

SEQ ID NO: 391577 - DNA, 15 bp, Homo sapiens
atcctatgcatccca

SEQ ID NO: 391578 - DNA, 15 bp, Homo sapiens
tatcctatgcatccc

SEQ ID NO: 391579 - DNA, 15 bp, Homo sapiens
atatcctatgcatcc

SEQ ID NO: 391580 - DNA, 15 bp, Homo sapiens
catatcctatgcatc

SEQ ID NO: 391581 - DNA, 15 bp, Homo sapiens
ccatatcctatgcat

SEQ ID NO: 391582 - DNA, 15 bp, Homo sapiens
tccatatcctatgca

SEQ ID NO: 391583 - DNA, 15 bp, Homo sapiens
ctccatatcctatgc

SEQ ID NO: 391584 - DNA, 15 bp, Homo sapiens
tctccatatcctatg

SEQ ID NO: 391585 - DNA, 15 bp, Homo sapiens
ctctccatatcctat

SEQ ID NO: 391586 - DNA, 15 bp, Homo sapiens
actctccatatccta

SEQ ID NO: 391587 - DNA, 15 bp, Homo sapiens
tactctccatatcct

SEQ ID NO: 391588 - DNA, 15 bp, Homo sapiens
ttactctccatatcc

SEQ ID NO: 391589 - DNA, 15 bp, Homo sapiens
tttactctccatatc

SEQ ID NO: 391590 - DNA, 15 bp, Homo sapiens
atttactctccatat

SEQ ID NO: 391591 - DNA, 15 bp, Homo sapiens
tatttactctccata

SEQ ID NO: 391592 - DNA, 15 bp, Homo sapiens
ctatttactctccat

SEQ ID NO: 391593 - DNA, 15 bp, Homo sapiens
cctatttactctcca

SEQ ID NO: 391594 - DNA, 15 bp, Homo sapiens
tcctatttactctcc

SEQ ID NO: 391595 - DNA, 15 bp, Homo sapiens
ttcctatttactctc

SEQ ID NO: 391596 - DNA, 15 bp, Homo sapiens
tttcctatttactct

SEQ ID NO: 391597 - DNA, 15 bp, Homo sapiens
ttttcctatttactc

SEQ ID NO: 391598 - DNA, 15 bp, Homo sapiens
tttttcctatttact

SEQ ID NO: 391599 - DNA, 15 bp, Homo sapiens
ctttttcctatttac

SEQ ID NO: 391600 - DNA, 15 bp, Homo sapiens
tctttttcctattta

SEQ ID NO: 391601 - DNA, 15 bp, Homo sapiens
ttctttttcctattt

SEQ ID NO: 391602 - DNA, 15 bp, Homo sapiens
cttctttttcctatt

SEQ ID NO: 391603 - DNA, 15 bp, Homo sapiens
tcttctttttcctat

SEQ ID NO: 391604 - DNA, 15 bp, Homo sapiens
ctcttctttttccta

SEQ ID NO: 391605 - DNA, 15 bp, Homo sapiens
actcttctttttcct

SEQ ID NO: 391606 - DNA, 15 bp, Homo sapiens
cactcttctttttcc

SEQ ID NO: 391607 - DNA, 15 bp, Homo sapiens
tcactcttctttttc

SEQ ID NO: 391608 - DNA, 15 bp, Homo sapiens
ttcactcttcttttt

SEQ ID NO: 391609 - DNA, 15 bp, Homo sapiens
tttcactcttctttt

SEQ ID NO: 391610 - DNA, 15 bp, Homo sapiens
ctttcactcttcttt

SEQ ID NO: 391611 - DNA, 15 bp, Homo sapiens
tctttcactcttctt

SEQ ID NO: 391612 - DNA, 15 bp, Homo sapiens
atctttcactcttct

SEQ ID NO: 391613 - DNA, 15 bp, Homo sapiens
tatctttcactcttc

SEQ ID NO: 391614 - DNA, 15 bp, Homo sapiens
ttatctttcactctt

SEQ ID NO: 391615 - DNA, 15 bp, Homo sapiens
gttatctttcactct

SEQ ID NO: 391616 - DNA, 15 bp, Homo sapiens
ggttatctttcactc

SEQ ID NO: 391617 - DNA, 15 bp, Homo sapiens
tggttatctttcact

SEQ ID NO: 391618 - DNA, 15 bp, Homo sapiens
ctggttatctttcac

SEQ ID NO: 391619 - DNA, 15 bp, Homo sapiens
tctggttatctttca

SEQ ID NO: 391620 - DNA, 15 bp, Homo sapiens
ttctggttatctttc

SEQ ID NO: 391621 - DNA, 15 bp, Homo sapiens
attctggttatcttt

SEQ ID NO: 391622 - DNA, 15 bp, Homo sapiens
aattctggttatctt

SEQ ID NO: 391623 - DNA, 15 bp, Homo sapiens
aaattctggttatct

SEQ ID NO: 391624 - DNA, 15 bp, Homo sapiens
taaattctggttatc

SEQ ID NO: 391625 - DNA, 15 bp, Homo sapiens
ctaaattctggttat

SEQ ID NO: 391626 - DNA, 15 bp, Homo sapiens
tctaaattctggtta

SEQ ID NO: 391627 - DNA, 15 bp, Homo sapiens
ttctaaattctggtt

SEQ ID NO: 391628 - DNA, 15 bp, Homo sapiens
cttctaaattctggt

SEQ ID NO: 391629 - DNA, 15 bp, Homo sapiens
gcttctaaattctgg

SEQ ID NO: 391630 - DNA, 15 bp, Homo sapiens
ggcttctaaattctg

SEQ ID NO: 391631 - DNA, 15 bp, Homo sapiens
gggcttctaaattct

SEQ ID NO: 391632 - DNA, 15 bp, Homo sapiens
tgggcttctaaattc

SEQ ID NO: 391633 - DNA, 15 bp, Homo sapiens
ctgggcttctaaatt

SEQ ID NO: 391634 - DNA, 15 bp, Homo sapiens
tctgggcttctaaat

SEQ ID NO: 391635 - DNA, 15 bp, Homo sapiens
ttctgggcttctaaa

SEQ ID NO: 391636 - DNA, 15 bp, Homo sapiens
tttctgggcttctaa

SEQ ID NO: 391637 - DNA, 15 bp, Homo sapiens
ttttctgggcttcta

SEQ ID NO: 391638 - DNA, 15 bp, Homo sapiens
gttttctgggcttct

SEQ ID NO: 391639 - DNA, 15 bp, Homo sapiens
agttttctgggcttc

SEQ ID NO: 391640 - DNA, 15 bp, Homo sapiens
cagttttctgggctt

SEQ ID NO: 391641 - DNA, 15 bp, Homo sapiens
ccagttttctgggct

SEQ ID NO: 391642 - DNA, 15 bp, Homo sapiens
tccagttttctgggc

SEQ ID NO: 391643 - DNA, 15 bp, Homo sapiens
ttccagttttctggg

SEQ ID NO: 391644 - DNA, 15 bp, Homo sapiens
cttccagttttctgg

SEQ ID NO: 391645 - DNA, 15 bp, Homo sapiens
ccttccagttttctg

SEQ ID NO: 391646 - DNA, 15 bp, Homo sapiens
tccttccagttttct

SEQ ID NO: 391647 - DNA, 15 bp, Homo sapiens
gtccttccagttttc

SEQ ID NO: 391648 - DNA, 15 bp, Homo sapiens
tgtccttccagtttt

SEQ ID NO: 391649 - DNA, 15 bp, Homo sapiens
ctgtccttccagttt

SEQ ID NO: 391650 - DNA, 15 bp, Homo sapiens
actgtccttccagtt

SEQ ID NO: 391651 - DNA, 15 bp, Homo sapiens
cactgtccttccagt

SEQ ID NO: 391652 - DNA, 15 bp, Homo sapiens
gcactgtccttccag

SEQ ID NO: 391653 - DNA, 15 bp, Homo sapiens
agcactgtccttcca

SEQ ID NO: 391654 - DNA, 15 bp, Homo sapiens
cagcactgtccttcc

SEQ ID NO: 391655 - DNA, 15 bp, Homo sapiens
tcagcactgtccttc

SEQ ID NO: 391656 - DNA, 15 bp, Homo sapiens
gtcagcactgtcctt

SEQ ID NO: 391657 - DNA, 15 bp, Homo sapiens
agtcagcactgtcct

SEQ ID NO: 391658 - DNA, 15 bp, Homo sapiens
cagtcagcactgtcc

SEQ ID NO: 391659 - DNA, 15 bp, Homo sapiens
tcagtcagcactgtc

SEQ ID NO: 391660 - DNA, 15 bp, Homo sapiens
ttcagtcagcactgt

SEQ ID NO: 391661 - DNA, 15 bp, Homo sapiens
cttcagtcagcactg

SEQ ID NO: 391662 - DNA, 15 bp, Homo sapiens
acttcagtcagcact

SEQ ID NO: 391663 - DNA, 15 bp, Homo sapiens
aacttcagtcagcac

SEQ ID NO: 391664 - DNA, 15 bp, Homo sapiens
gaacttcagtcagca

SEQ ID NO: 391665 - DNA, 15 bp, Homo sapiens
tgaacttcagtcagc

SEQ ID NO: 391666 - DNA, 15 bp, Homo sapiens
ctgaacttcagtcag

SEQ ID NO: 391667 - DNA, 15 bp, Homo sapiens
gctgaacttcagtca

SEQ ID NO: 391668 - DNA, 15 bp, Homo sapiens
tgctgaacttcagtc

SEQ ID NO: 391669 - DNA, 15 bp, Homo sapiens
ctgctgaacttcagt

SEQ ID NO: 391670 - DNA, 15 bp, Homo sapiens
cctgctgaacttcag

SEQ ID NO: 391671 - DNA, 15 bp, Homo sapiens
tcctgctgaacttca

SEQ ID NO: 391672 - DNA, 15 bp, Homo sapiens
gtcctgctgaacttc

SEQ ID NO: 391673 - DNA, 15 bp, Homo sapiens
cgtcctgctgaactt

SEQ ID NO: 391674 - DNA, 15 bp, Homo sapiens
acgtcctgctgaact

SEQ ID NO: 391675 - DNA, 15 bp, Homo sapiens
gacgtcctgctgaac

SEQ ID NO: 391676 - DNA, 15 bp, Homo sapiens
tgacgtcctgctgaa

SEQ ID NO: 391677 - DNA, 15 bp, Homo sapiens
gtgacgtcctgctga

SEQ ID NO: 391678 - DNA, 15 bp, Homo sapiens
tgtgacgtcctgctg

SEQ ID NO: 391679 - DNA, 15 bp, Homo sapiens
ctgtgacgtcctgct

SEQ ID NO: 391680 - DNA, 15 bp, Homo sapiens
tctgtgacgtcctgc

SEQ ID NO: 391681 - DNA, 15 bp, Homo sapiens
ctctgtgacgtcctg

SEQ ID NO: 391682 - DNA, 15 bp, Homo sapiens
tctctgtgacgtcct

SEQ ID NO: 391683 - DNA, 15 bp, Homo sapiens
ttctctgtgacgtcc

SEQ ID NO: 391684 - DNA, 15 bp, Homo sapiens
cttctctgtgacgtc

SEQ ID NO: 391685 - DNA, 15 bp, Homo sapiens
ccttctctgtgacgt

SEQ ID NO: 391686 - DNA, 15 bp, Homo sapiens
cccttctctgtgacg

SEQ ID NO: 391687 - DNA, 15 bp, Homo sapiens
ccccttctctgtgac

SEQ ID NO: 391688 - DNA, 15 bp, Homo sapiens
accccttctctgtga

SEQ ID NO: 391689 - DNA, 15 bp, Homo sapiens
caccccttctctgtg

SEQ ID NO: 391690 - DNA, 15 bp, Homo sapiens
tcaccccttctctgt

SEQ ID NO: 391691 - DNA, 15 bp, Homo sapiens
ttcaccccttctctg

SEQ ID NO: 391692 - DNA, 15 bp, Homo sapiens
tttcaccccttctct

SEQ ID NO: 391693 - DNA, 15 bp, Homo sapiens
atttcaccccttctc

SEQ ID NO: 391694 - DNA, 15 bp, Homo sapiens
gatttcaccccttct

SEQ ID NO: 391695 - DNA, 15 bp, Homo sapiens
tgatttcaccccttc

SEQ ID NO: 391696 - DNA, 15 bp, Homo sapiens
ctgatttcacccctt

SEQ ID NO: 391697 - DNA, 15 bp, Homo sapiens
actgatttcacccct

SEQ ID NO: 391698 - DNA, 15 bp, Homo sapiens
tactgatttcacccc

SEQ ID NO: 391699 - DNA, 15 bp, Homo sapiens
ctactgatttcaccc

SEQ ID NO: 391700 - DNA, 15 bp, Homo sapiens
tctactgatttcacc

SEQ ID NO: 391701 - DNA, 15 bp, Homo sapiens
ttctactgatttcac

SEQ ID NO: 391702 - DNA, 15 bp, Homo sapiens
cttctactgatttca

SEQ ID NO: 391703 - DNA, 15 bp, Homo sapiens
tcttctactgatttc

SEQ ID NO: 391704 - DNA, 15 bp, Homo sapiens
atcttctactgattt

SEQ ID NO: 391705 - DNA, 15 bp, Homo sapiens
catcttctactgatt

SEQ ID NO: 391706 - DNA, 15 bp, Homo sapiens
tcatcttctactgat

SEQ ID NO: 391707 - DNA, 15 bp, Homo sapiens
atcatcttctactga

SEQ ID NO: 391708 - DNA, 15 bp, Homo sapiens
tatcatcttctactg

SEQ ID NO: 391709 - DNA, 15 bp, Homo sapiens
ttatcatcttctact

SEQ ID NO: 391710 - DNA, 15 bp, Homo sapiens
tttatcatcttctac

SEQ ID NO: 391711 - DNA, 15 bp, Homo sapiens
gtttatcatcttcta

SEQ ID NO: 391712 - DNA, 15 bp, Homo sapiens
agtttatcatcttct

SEQ ID NO: 391713 - DNA, 15 bp, Homo sapiens
gagtttatcatcttc

SEQ ID NO: 391714 - DNA, 15 bp, Homo sapiens
tgagtttatcatctt

SEQ ID NO: 391715 - DNA, 15 bp, Homo sapiens
ctgagtttatcatct

SEQ ID NO: 391716 - DNA, 15 bp, Homo sapiens
cctgagtttatcatc

SEQ ID NO: 391717 - DNA, 15 bp, Homo sapiens
acctgagtttatcat

SEQ ID NO: 391718 - DNA, 15 bp, Homo sapiens
aacctgagtttatca

SEQ ID NO: 391719 - DNA, 15 bp, Homo sapiens
caacctgagtttatc

SEQ ID NO: 391720 - DNA, 15 bp, Homo sapiens
tcaacctgagtttat

SEQ ID NO: 391721 - DNA, 15 bp, Homo sapiens
ctcaacctgagttta

SEQ ID NO: 391722 - DNA, 15 bp, Homo sapiens
actcaacctgagttt

SEQ ID NO: 391723 - DNA, 15 bp, Homo sapiens
aactcaacctgagtt

SEQ ID NO: 391724 - DNA, 15 bp, Homo sapiens
aaactcaacctgagt

SEQ ID NO: 391725 - DNA, 15 bp, Homo sapiens
caaactcaacctgag

SEQ ID NO: 391726 - DNA, 15 bp, Homo sapiens
tcaaactcaacctga

SEQ ID NO: 391727 - DNA, 15 bp, Homo sapiens
ctcaaactcaacctg

SEQ ID NO: 391728 - DNA, 15 bp, Homo sapiens
cctcaaactcaacct

SEQ ID NO: 391729 - DNA, 15 bp, Homo sapiens
acctcaaactcaacc

SEQ ID NO: 391730 - DNA, 15 bp, Homo sapiens
cacctcaaactcaac

SEQ ID NO: 391731 - DNA, 15 bp, Homo sapiens
ccacctcaaactcaa

SEQ ID NO: 391732 - DNA, 15 bp, Homo sapiens
tccacctcaaactca

SEQ ID NO: 391733 - DNA, 15 bp, Homo sapiens
ctccacctcaaactc

SEQ ID NO: 391734 - DNA, 15 bp, Homo sapiens
cctccacctcaaact

SEQ ID NO: 391735 - DNA, 15 bp, Homo sapiens
tcctccacctcaaac

SEQ ID NO: 391736 - DNA, 15 bp, Homo sapiens
ttcctccacctcaaa

SEQ ID NO: 391737 - DNA, 15 bp, Homo sapiens
cttcctccacctcaa

SEQ ID NO: 391738 - DNA, 15 bp, Homo sapiens
tcttcctccacctca

SEQ ID NO: 391739 - DNA, 15 bp, Homo sapiens
ttcttcctccacctc

SEQ ID NO: 391740 - DNA, 15 bp, Homo sapiens
gttcttcctccacct

SEQ ID NO: 391741 - DNA, 15 bp, Homo sapiens
tgttcttcctccacc

SEQ ID NO: 391742 - DNA, 15 bp, Homo sapiens
atgttcttcctccac

SEQ ID NO: 391743 - DNA, 15 bp, Homo sapiens
gatgttcttcctcca

SEQ ID NO: 391744 - DNA, 15 bp, Homo sapiens
ggatgttcttcctcc

SEQ ID NO: 391745 - DNA, 15 bp, Homo sapiens
tggatgttcttcctc

SEQ ID NO: 391746 - DNA, 15 bp, Homo sapiens
ctggatgttcttcct

SEQ ID NO: 391747 - DNA, 15 bp, Homo sapiens
tctggatgttcttcc

SEQ ID NO: 391748 - DNA, 15 bp, Homo sapiens
atctggatgttcttc

SEQ ID NO: 391749 - DNA, 15 bp, Homo sapiens
catctggatgttctt

SEQ ID NO: 391750 - DNA, 15 bp, Homo sapiens
tcatctggatgttct

SEQ ID NO: 391751 - DNA, 15 bp, Homo sapiens
ctcatctggatgttc

SEQ ID NO: 391752 - DNA, 15 bp, Homo sapiens
cctcatctggatgtt

SEQ ID NO: 391753 - DNA, 15 bp, Homo sapiens
tcctcatctggatgt

SEQ ID NO: 391754 - DNA, 15 bp, Homo sapiens
atcctcatctggatg

SEQ ID NO: 391755 - DNA, 15 bp, Homo sapiens
tatcctcatctggat

SEQ ID NO: 391756 - DNA, 15 bp, Homo sapiens
atatcctcatctgga

SEQ ID NO: 391757 - DNA, 15 bp, Homo sapiens
tatatcctcatctgg

SEQ ID NO: 391758 - DNA, 15 bp, Homo sapiens
atatatcctcatctg

SEQ ID NO: 391759 - DNA, 15 bp, Homo sapiens
gatatatcctcatct

SEQ ID NO: 391760 - DNA, 15 bp, Homo sapiens
ggatatatcctcatc

SEQ ID NO: 391761 - DNA, 15 bp, Homo sapiens
aggatatatcctcat

SEQ ID NO: 391762 - DNA, 15 bp, Homo sapiens
caggatatatcctca

SEQ ID NO: 391763 - DNA, 15 bp, Homo sapiens
ccaggatatatcctc

SEQ ID NO: 391764 - DNA, 15 bp, Homo sapiens
accaggatatatcct

SEQ ID NO: 391765 - DNA, 15 bp, Homo sapiens
caccaggatatatcc

SEQ ID NO: 391766 - DNA, 15 bp, Homo sapiens
tcaccaggatatatc

SEQ ID NO: 391767 - DNA, 15 bp, Homo sapiens
ttcaccaggatatat

SEQ ID NO: 391768 - DNA, 15 bp, Homo sapiens
cttcaccaggatata

SEQ ID NO: 391769 - DNA, 15 bp, Homo sapiens
acttcaccaggatat

SEQ ID NO: 391770 - DNA, 15 bp, Homo sapiens
tacttcaccaggata

SEQ ID NO: 391771 - DNA, 15 bp, Homo sapiens
atacttcaccaggat

SEQ ID NO: 391772 - DNA, 15 bp, Homo sapiens
tatacttcaccagga

SEQ ID NO: 391773 - DNA, 15 bp, Homo sapiens
ttatacttcaccagg

SEQ ID NO: 391774 - DNA, 15 bp, Homo sapiens
attatacttcaccag

SEQ ID NO: 391775 - DNA, 15 bp, Homo sapiens
aattatacttcacca

SEQ ID NO: 391776 - DNA, 15 bp, Homo sapiens
aaattatacttcacc

SEQ ID NO: 391777 - DNA, 15 bp, Homo sapiens
taaattatacttcac

SEQ ID NO: 391778 - DNA, 15 bp, Homo sapiens
gtaaattatacttca

SEQ ID NO: 391779 - DNA, 15 bp, Homo sapiens
tgtaaattatacttc

SEQ ID NO: 391780 - DNA, 15 bp, Homo sapiens
ttgtaaattatactt

SEQ ID NO: 391781 - DNA, 15 bp, Homo sapiens
gttgtaaattatact

SEQ ID NO: 391782 - DNA, 15 bp, Homo sapiens
agttgtaaattatac

SEQ ID NO: 391783 - DNA, 15 bp, Homo sapiens
gagttgtaaattata

SEQ ID NO: 391784 - DNA, 15 bp, Homo sapiens
tgagttgtaaattat

SEQ ID NO: 391785 - DNA, 15 bp, Homo sapiens
ctgagttgtaaatta

SEQ ID NO: 391786 - DNA, 15 bp, Homo sapiens
cctgagttgtaaatt

SEQ ID NO: 391787 - DNA, 15 bp, Homo sapiens
ccctgagttgtaaat

SEQ ID NO: 391788 - DNA, 15 bp, Homo sapiens
tccctgagttgtaaa

SEQ ID NO: 391789 - DNA, 15 bp, Homo sapiens
ttccctgagttgtaa

SEQ ID NO: 391790 - DNA, 15 bp, Homo sapiens
cttccctgagttgta

SEQ ID NO: 391791 - DNA, 15 bp, Homo sapiens
tcttccctgagttgt

SEQ ID NO: 391792 - DNA, 15 bp, Homo sapiens
ctcttccctgagttg

SEQ ID NO: 391793 - DNA, 15 bp, Homo sapiens
tctcttccctgagtt

SEQ ID NO: 391794 - DNA, 15 bp, Homo sapiens
atctcttccctgagt

SEQ ID NO: 391795 - DNA, 15 bp, Homo sapiens
catctcttccctgag

SEQ ID NO: 391796 - DNA, 15 bp, Homo sapiens
gcatctcttccctga

SEQ ID NO: 391797 - DNA, 15 bp, Homo sapiens
tgcatctcttccctg

SEQ ID NO: 391798 - DNA, 15 bp, Homo sapiens
ctgcatctcttccct

SEQ ID NO: 391799 - DNA, 15 bp, Homo sapiens
tctgcatctcttccc

SEQ ID NO: 391800 - DNA, 15 bp, Homo sapiens
atctgcatctcttcc

SEQ ID NO: 391801 - DNA, 15 bp, Homo sapiens
aatctgcatctcttc

SEQ ID NO: 391802 - DNA, 15 bp, Homo sapiens
gaatctgcatctctt

SEQ ID NO: 391803 - DNA, 15 bp, Homo sapiens
ggaatctgcatctct

SEQ ID NO: 391804 - DNA, 15 bp, Homo sapiens
tggaatctgcatctc

SEQ ID NO: 391805 - DNA, 15 bp, Homo sapiens
ctggaatctgcatct

SEQ ID NO: 391806 - DNA, 15 bp, Homo sapiens
tctggaatctgcatc

SEQ ID NO: 391807 - DNA, 15 bp, Homo sapiens
ctctggaatctgcat

SEQ ID NO: 391808 - DNA, 15 bp, Homo sapiens
actctggaatctgca

SEQ ID NO: 391809 - DNA, 15 bp, Homo sapiens
gactctggaatctgc

SEQ ID NO: 391810 - DNA, 15 bp, Homo sapiens
tgactctggaatctg

SEQ ID NO: 391811 - DNA, 15 bp, Homo sapiens
atgactctggaatct

SEQ ID NO: 391812 - DNA, 15 bp, Homo sapiens
aatgactctggaatc

SEQ ID NO: 391813 - DNA, 15 bp, Homo sapiens
aaatgactctggaat

SEQ ID NO: 391814 - DNA, 15 bp, Homo sapiens
aaaatgactctggaa

SEQ ID NO: 391815 - DNA, 15 bp, Homo sapiens
gaaaatgactctgga

SEQ ID NO: 391816 - DNA, 15 bp, Homo sapiens
tgaaaatgactctgg

SEQ ID NO: 391817 - DNA, 15 bp, Homo sapiens
atgaaaatgactctg

SEQ ID NO: 391818 - DNA, 15 bp, Homo sapiens
catgaaaatgactct

SEQ ID NO: 391819 - DNA, 15 bp, Homo sapiens
ccatgaaaatgactc

SEQ ID NO: 391820 - DNA, 15 bp, Homo sapiens
tccatgaaaatgact

SEQ ID NO: 391821 - DNA, 15 bp, Homo sapiens
atccatgaaaatgac

SEQ ID NO: 391822 - DNA, 15 bp, Homo sapiens
catccatgaaaatga

SEQ ID NO: 391823 - DNA, 15 bp, Homo sapiens
acatccatgaaaatg

SEQ ID NO: 391824 - DNA, 15 bp, Homo sapiens
cacatccatgaaaat

SEQ ID NO: 391825 - DNA, 15 bp, Homo sapiens
ccacatccatgaaaa

SEQ ID NO: 391826 - DNA, 15 bp, Homo sapiens
accacatccatgaaa

SEQ ID NO: 391827 - DNA, 15 bp, Homo sapiens
gaccacatccatgaa

SEQ ID NO: 391828 - DNA, 15 bp, Homo sapiens
tgaccacatccatga

SEQ ID NO: 391829 - DNA, 15 bp, Homo sapiens
atgaccacatccatg

SEQ ID NO: 391830 - DNA, 15 bp, Homo sapiens
aatgaccacatccat

SEQ ID NO: 391831 - DNA, 15 bp, Homo sapiens
aaatgaccacatcca

SEQ ID NO: 391832 - DNA, 15 bp, Homo sapiens
taaatgaccacatcc

SEQ ID NO: 391833 - DNA, 15 bp, Homo sapiens
ttaaatgaccacatc

SEQ ID NO: 391834 - DNA, 15 bp, Homo sapiens
tttaaatgaccacat

SEQ ID NO: 391835 - DNA, 15 bp, Homo sapiens
gtttaaatgaccaca

SEQ ID NO: 391836 - DNA, 15 bp, Homo sapiens
agtttaaatgaccac

SEQ ID NO: 391837 - DNA, 15 bp, Homo sapiens
aagtttaaatgacca

SEQ ID NO: 391838 - DNA, 15 bp, Homo sapiens
taagtttaaatgacc

SEQ ID NO: 391839 - DNA, 15 bp, Homo sapiens
ttaagtttaaatgac

SEQ ID NO: 391840 - DNA, 15 bp, Homo sapiens
cttaagtttaaatga

SEQ ID NO: 391841 - DNA, 15 bp, Homo sapiens
gcttaagtttaaatg

SEQ ID NO: 391842 - DNA, 15 bp, Homo sapiens
tgcttaagtttaaat

SEQ ID NO: 391843 - DNA, 15 bp, Homo sapiens
ttgcttaagtttaaa

SEQ ID NO: 391844 - DNA, 15 bp, Homo sapiens
attgcttaagtttaa

SEQ ID NO: 391845 - DNA, 15 bp, Homo sapiens
gattgcttaagttta

SEQ ID NO: 391846 - DNA, 15 bp, Homo sapiens
tgattgcttaagttt

SEQ ID NO: 391847 - DNA, 15 bp, Homo sapiens
atgattgcttaagtt

SEQ ID NO: 391848 - DNA, 15 bp, Homo sapiens
aatgattgcttaagt

SEQ ID NO: 391849 - DNA, 15 bp, Homo sapiens
aaatgattgcttaag

SEQ ID NO: 391850 - DNA, 15 bp, Homo sapiens
aaaatgattgcttaa

SEQ ID NO: 391851 - DNA, 15 bp, Homo sapiens
taaaatgattgctta

SEQ ID NO: 391852 - DNA, 15 bp, Homo sapiens
ctaaaatgattgctt

SEQ ID NO: 391853 - DNA, 15 bp, Homo sapiens
cctaaaatgattgct

SEQ ID NO: 391854 - DNA, 15 bp, Homo sapiens
ccctaaaatgattgc

SEQ ID NO: 391855 - DNA, 15 bp, Homo sapiens
accctaaaatgattg

SEQ ID NO: 391856 - DNA, 15 bp, Homo sapiens
taccctaaaatgatt

SEQ ID NO: 391857 - DNA, 15 bp, Homo sapiens
ctaccctaaaatgat

SEQ ID NO: 391858 - DNA, 15 bp, Homo sapiens
tctaccctaaaatga

SEQ ID NO: 391859 - DNA, 15 bp, Homo sapiens
ctctaccctaaaatg

SEQ ID NO: 391860 - DNA, 15 bp, Homo sapiens
tctctaccctaaaat

SEQ ID NO: 391861 - DNA, 15 bp, Homo sapiens
ttctctaccctaaaa

SEQ ID NO: 391862 - DNA, 15 bp, Homo sapiens
attctctaccctaaa

SEQ ID NO: 391863 - DNA, 15 bp, Homo sapiens
tattctctaccctaa

SEQ ID NO: 391864 - DNA, 15 bp, Homo sapiens
ttattctctacccta

SEQ ID NO: 391865 - DNA, 15 bp, Homo sapiens
tttattctctaccct

SEQ ID NO: 391866 - DNA, 15 bp, Homo sapiens
atttattctctaccc

SEQ ID NO: 391867 - DNA, 15 bp, Homo sapiens
gatttattctctacc

SEQ ID NO: 391868 - DNA, 15 bp, Homo sapiens
tgatttattctctac

SEQ ID NO: 391869 - DNA, 15 bp, Homo sapiens
ttgatttattctcta

SEQ ID NO: 391870 - DNA, 15 bp, Homo sapiens
attgatttattctct

SEQ ID NO: 391871 - DNA, 15 bp, Homo sapiens
tattgatttattctc

SEQ ID NO: 391872 - DNA, 15 bp, Homo sapiens
ttattgatttattct

SEQ ID NO: 391873 - DNA, 15 bp, Homo sapiens
attattgatttattc

SEQ ID NO: 391874 - DNA, 15 bp, Homo sapiens
aattattgatttatt

SEQ ID NO: 391875 - DNA, 15 bp, Homo sapiens
aaattattgatttat

SEQ ID NO: 391876 - DNA, 15 bp, Homo sapiens
taaattattgattta

SEQ ID NO: 391877 - DNA, 15 bp, Homo sapiens
ttaaattattgattt

SEQ ID NO: 391878 - DNA, 15 bp, Homo sapiens
attaaattattgatt

SEQ ID NO: 391879 - DNA, 15 bp, Homo sapiens
cattaaattattgat

SEQ ID NO: 391880 - DNA, 15 bp, Homo sapiens
ccattaaattattga

SEQ ID NO: 391881 - DNA, 15 bp, Homo sapiens
gccattaaattattg

SEQ ID NO: 391882 - DNA, 15 bp, Homo sapiens
tgccattaaattatt

SEQ ID NO: 391883 - DNA, 15 bp, Homo sapiens
ttgccattaaattat

SEQ ID NO: 391884 - DNA, 15 bp, Homo sapiens
gttgccattaaatta

SEQ ID NO: 391885 - DNA, 15 bp, Homo sapiens
agttgccattaaatt

SEQ ID NO: 391886 - DNA, 15 bp, Homo sapiens
tagttgccattaaat

SEQ ID NO: 391887 - DNA, 15 bp, Homo sapiens
ctagttgccattaaa

SEQ ID NO: 391888 - DNA, 15 bp, Homo sapiens
actagttgccattaa

SEQ ID NO: 391889 - DNA, 15 bp, Homo sapiens
cactagttgccatta

SEQ ID NO: 391890 - DNA, 15 bp, Homo sapiens
acactagttgccatt

SEQ ID NO: 391891 - DNA, 15 bp, Homo sapiens
tacactagttgccat

SEQ ID NO: 391892 - DNA, 15 bp, Homo sapiens
ctacactagttgcca

SEQ ID NO: 391893 - DNA, 15 bp, Homo sapiens
tctacactagttgcc

SEQ ID NO: 391894 - DNA, 15 bp, Homo sapiens
ttctacactagttgc

SEQ ID NO: 391895 - DNA, 15 bp, Homo sapiens
gttctacactagttg

SEQ ID NO: 391896 - DNA, 15 bp, Homo sapiens
tgttctacactagtt

SEQ ID NO: 391897 - DNA, 15 bp, Homo sapiens
ctgttctacactagt

SEQ ID NO: 391898 - DNA, 15 bp, Homo sapiens
actgttctacactag

SEQ ID NO: 391899 - DNA, 15 bp, Homo sapiens
tactgttctacacta

SEQ ID NO: 391900 - DNA, 15 bp, Homo sapiens
ttactgttctacact

SEQ ID NO: 391901 - DNA, 15 bp, Homo sapiens
cttactgttctacac

SEQ ID NO: 391902 - DNA, 15 bp, Homo sapiens
tcttactgttctaca

SEQ ID NO: 391903 - DNA, 15 bp, Homo sapiens
ttcttactgttctac

SEQ ID NO: 391904 - DNA, 15 bp, Homo sapiens
cttcttactgttcta

SEQ ID NO: 391905 - DNA, 15 bp, Homo sapiens
gcttcttactgttct

SEQ ID NO: 391906 - DNA, 15 bp, Homo sapiens
tgcttcttactgttc

SEQ ID NO: 391907 - DNA, 15 bp, Homo sapiens
ctgcttcttactgtt

SEQ ID NO: 391908 - DNA, 15 bp, Homo sapiens
gctgcttcttactgt

SEQ ID NO: 391909 - DNA, 15 bp, Homo sapiens
agctgcttcttactg

SEQ ID NO: 391910 - DNA, 15 bp, Homo sapiens
tagctgcttcttact

SEQ ID NO: 391911 - DNA, 15 bp, Homo sapiens
atagctgcttcttac

SEQ ID NO: 391912 - DNA, 15 bp, Homo sapiens
catagctgcttctta

SEQ ID NO: 391913 - DNA, 15 bp, Homo sapiens
gcatagctgcttctt

SEQ ID NO: 391914 - DNA, 15 bp, Homo sapiens
agcatagctgcttct

SEQ ID NO: 391915 - DNA, 15 bp, Homo sapiens
aagcatagctgcttc

SEQ ID NO: 391916 - DNA, 15 bp, Homo sapiens
aaagcatagctgctt

SEQ ID NO: 391917 - DNA, 15 bp, Homo sapiens
caaagcatagctgct

SEQ ID NO: 391918 - DNA, 15 bp, Homo sapiens
ccaaagcatagctgc

SEQ ID NO: 391919 - DNA, 15 bp, Homo sapiens
tccaaagcatagctg

SEQ ID NO: 391920 - DNA, 15 bp, Homo sapiens
ctccaaagcatagct

SEQ ID NO: 391921 - DNA, 15 bp, Homo sapiens
tctccaaagcatagc

SEQ ID NO: 391922 - DNA, 15 bp, Homo sapiens
gtctccaaagcatag

SEQ ID NO: 391923 - DNA, 15 bp, Homo sapiens
agtctccaaagcata

SEQ ID NO: 391924 - DNA, 15 bp, Homo sapiens
gagtctccaaagcat

SEQ ID NO: 391925 - DNA, 15 bp, Homo sapiens
tgagtctccaaagca

SEQ ID NO: 391926 - DNA, 15 bp, Homo sapiens
atgagtctccaaagc

SEQ ID NO: 391927 - DNA, 15 bp, Homo sapiens
tatgagtctccaaag

SEQ ID NO: 391928 - DNA, 15 bp, Homo sapiens
ctatgagtctccaaa

SEQ ID NO: 391929 - DNA, 15 bp, Homo sapiens
tctatgagtctccaa

SEQ ID NO: 391930 - DNA, 15 bp, Homo sapiens
ttctatgagtctcca

SEQ ID NO: 391931 - DNA, 15 bp, Homo sapiens
gttctatgagtctcc

SEQ ID NO: 391932 - DNA, 15 bp, Homo sapiens
tgttctatgagtctc

SEQ ID NO: 391933 - DNA, 15 bp, Homo sapiens
gtgttctatgagtct

SEQ ID NO: 391934 - DNA, 15 bp, Homo sapiens
tgtgttctatgagtc

SEQ ID NO: 391935 - DNA, 15 bp, Homo sapiens
atgtgttctatgagt

SEQ ID NO: 391936 - DNA, 15 bp, Homo sapiens
tatgtgttctatgag

SEQ ID NO: 391937 - DNA, 15 bp, Homo sapiens
ctatgtgttctatga

SEQ ID NO: 391938 - DNA, 15 bp, Homo sapiens
actatgtgttctatg

SEQ ID NO: 391939 - DNA, 15 bp, Homo sapiens
aactatgtgttctat

SEQ ID NO: 391940 - DNA, 15 bp, Homo sapiens
caactatgtgttcta

SEQ ID NO: 391941 - DNA, 15 bp, Homo sapiens
ccaactatgtgttct

SEQ ID NO: 391942 - DNA, 15 bp, Homo sapiens
cccaactatgtgttc

SEQ ID NO: 391943 - DNA, 15 bp, Homo sapiens
acccaactatgtgtt

SEQ ID NO: 391944 - DNA, 15 bp, Homo sapiens
aacccaactatgtgt

SEQ ID NO: 391945 - DNA, 15 bp, Homo sapiens
aaacccaactatgtg

SEQ ID NO: 391946 - DNA, 15 bp, Homo sapiens
aaaacccaactatgt

SEQ ID NO: 391947 - DNA, 15 bp, Homo sapiens
aaaaacccaactatg

SEQ ID NO: 391948 - DNA, 15 bp, Homo sapiens
aaaaaacccaactat

SEQ ID NO: 391949 - DNA, 15 bp, Homo sapiens
aaaaaaacccaacta

SEQ ID NO: 391950 - DNA, 15 bp, Homo sapiens
caaaaaaacccaact

SEQ ID NO: 391951 - DNA, 15 bp, Homo sapiens
acaaaaaaacccaac

SEQ ID NO: 391952 - DNA, 15 bp, Homo sapiens
aacaaaaaaacccaa

SEQ ID NO: 391953 - DNA, 15 bp, Homo sapiens
caacaaaaaaaccca

SEQ ID NO: 391954 - DNA, 15 bp, Homo sapiens
acaacaaaaaaaccc

SEQ ID NO: 391955 - DNA, 15 bp, Homo sapiens
aacaacaaaaaaacc

SEQ ID NO: 391956 - DNA, 15 bp, Homo sapiens
caacaacaaaaaaac

SEQ ID NO: 391957 - DNA, 15 bp, Homo sapiens
acaacaacaaaaaaa

SEQ ID NO: 391958 - DNA, 15 bp, Homo sapiens
aacaacaacaaaaaa

SEQ ID NO: 391959 - DNA, 15 bp, Homo sapiens
aaacaacaacaaaaa

SEQ ID NO: 391960 - DNA, 15 bp, Homo sapiens
aaaacaacaacaaaa

SEQ ID NO: 391961 - DNA, 15 bp, Homo sapiens
aaaaacaacaacaaa

SEQ ID NO: 391962 - DNA, 15 bp, Homo sapiens
gaaaaacaacaacaa

SEQ ID NO: 391963 - DNA, 15 bp, Homo sapiens
agaaaaacaacaaca

SEQ ID NO: 391964 - DNA, 15 bp, Homo sapiens
cagaaaaacaacaac

SEQ ID NO: 391965 - DNA, 15 bp, Homo sapiens
tcagaaaaacaacaa

SEQ ID NO: 391966 - DNA, 15 bp, Homo sapiens
ctcagaaaaacaaca

SEQ ID NO: 391967 - DNA, 15 bp, Homo sapiens
tctcagaaaaacaac

SEQ ID NO: 391968 - DNA, 15 bp, Homo sapiens
atctcagaaaaacaa

SEQ ID NO: 391969 - DNA, 15 bp, Homo sapiens
catctcagaaaaaca

SEQ ID NO: 391970 - DNA, 15 bp, Homo sapiens
ccatctcagaaaaac

SEQ ID NO: 391971 - DNA, 15 bp, Homo sapiens
tccatctcagaaaaa

SEQ ID NO: 391972 - DNA, 15 bp, Homo sapiens
ctccatctcagaaaa

SEQ ID NO: 391973 - DNA, 15 bp, Homo sapiens
actccatctcagaaa

SEQ ID NO: 391974 - DNA, 15 bp, Homo sapiens
aactccatctcagaa

SEQ ID NO: 391975 - DNA, 15 bp, Homo sapiens
aaactccatctcaga

SEQ ID NO: 391976 - DNA, 15 bp, Homo sapiens
aaaactccatctcag

SEQ ID NO: 391977 - DNA, 15 bp, Homo sapiens
caaaactccatctca

SEQ ID NO: 391978 - DNA, 15 bp, Homo sapiens
gcaaaactccatctc

SEQ ID NO: 391979 - DNA, 15 bp, Homo sapiens
agcaaaactccatct

SEQ ID NO: 391980 - DNA, 15 bp, Homo sapiens
gagcaaaactccatc

SEQ ID NO: 391981 - DNA, 15 bp, Homo sapiens
agagcaaaactccat

SEQ ID NO: 391982 - DNA, 15 bp, Homo sapiens
aagagcaaaactcca

SEQ ID NO: 391983 - DNA, 15 bp, Homo sapiens
taagagcaaaactcc

SEQ ID NO: 391984 - DNA, 15 bp, Homo sapiens
ataagagcaaaactc

SEQ ID NO: 391985 - DNA, 15 bp, Homo sapiens
aataagagcaaaact

SEQ ID NO: 391986 - DNA, 15 bp, Homo sapiens
caataagagcaaaac

SEQ ID NO: 391987 - DNA, 15 bp, Homo sapiens
tcaataagagcaaaa

SEQ ID NO: 391988 - DNA, 15 bp, Homo sapiens
gtcaataagagcaaa

SEQ ID NO: 391989 - DNA, 15 bp, Homo sapiens
ggtcaataagagcaa

SEQ ID NO: 391990 - DNA, 15 bp, Homo sapiens
tggtcaataagagca

SEQ ID NO: 391991 - DNA, 15 bp, Homo sapiens
ctggtcaataagagc

SEQ ID NO: 391992 - DNA, 15 bp, Homo sapiens
cctggtcaataagag

SEQ ID NO: 391993 - DNA, 15 bp, Homo sapiens
gcctggtcaataaga

SEQ ID NO: 391994 - DNA, 15 bp, Homo sapiens
agcctggtcaataag

SEQ ID NO: 391995 - DNA, 15 bp, Homo sapiens
tagcctggtcaataa

SEQ ID NO: 391996 - DNA, 15 bp, Homo sapiens
ctagcctggtcaata

SEQ ID NO: 391997 - DNA, 15 bp, Homo sapiens
tctagcctggtcaat

SEQ ID NO: 391998 - DNA, 15 bp, Homo sapiens
ctctagcctggtcaa

SEQ ID NO: 391999 - DNA, 15 bp, Homo sapiens
actctagcctggtca

SEQ ID NO: 392000 - DNA, 15 bp, Homo sapiens
cactctagcctggtc

SEQ ID NO: 392001 - DNA, 15 bp, Homo sapiens
gcactctagcctggt

SEQ ID NO: 392002 - DNA, 15 bp, Homo sapiens
tgcactctagcctgg

SEQ ID NO: 392003 - DNA, 15 bp, Homo sapiens
ttgcactctagcctg

SEQ ID NO: 392004 - DNA, 15 bp, Homo sapiens
attgcactctagcct

SEQ ID NO: 392005 - DNA, 15 bp, Homo sapiens
cattgcactctagcc

SEQ ID NO: 392006 - DNA, 15 bp, Homo sapiens
ccattgcactctagc

SEQ ID NO: 392007 - DNA, 15 bp, Homo sapiens
gccattgcactctag

SEQ ID NO: 392008 - DNA, 15 bp, Homo sapiens
tgccattgcactcta

SEQ ID NO: 392009 - DNA, 15 bp, Homo sapiens
gtgccattgcactct

SEQ ID NO: 392010 - DNA, 15 bp, Homo sapiens
aagccaagattgtgc

SEQ ID NO: 392011 - DNA, 15 bp, Homo sapiens
caagccaagattgtg

SEQ ID NO: 392012 - DNA, 15 bp, Homo sapiens
gcaagccaagattgt

SEQ ID NO: 392013 - DNA, 15 bp, Homo sapiens
agcaagccaagattg

SEQ ID NO: 392014 - DNA, 15 bp, Homo sapiens
cagcaagccaagatt

SEQ ID NO: 392015 - DNA, 15 bp, Homo sapiens
gcagcaagccaagat

SEQ ID NO: 392016 - DNA, 15 bp, Homo sapiens
tgcagcaagccaaga

SEQ ID NO: 392017 - DNA, 15 bp, Homo sapiens
ttgcagcaagccaag

SEQ ID NO: 392018 - DNA, 15 bp, Homo sapiens
gttgcagcaagccaa

SEQ ID NO: 392019 - DNA, 15 bp, Homo sapiens
ggttgcagcaagcca

SEQ ID NO: 392020 - DNA, 15 bp, Homo sapiens
aggttgcagcaagcc

SEQ ID NO: 392021 - DNA, 15 bp, Homo sapiens
gaggttgcagcaagc

SEQ ID NO: 392022 - DNA, 15 bp, Homo sapiens
ggaggttgcagcaag

SEQ ID NO: 392023 - DNA, 15 bp, Homo sapiens
cggaggttgcagcaa

SEQ ID NO: 392024 - DNA, 15 bp, Homo sapiens
gcggaggttgcagca

SEQ ID NO: 392025 - DNA, 15 bp, Homo sapiens
ggcggaggttgcagc

SEQ ID NO: 392026 - DNA, 15 bp, Homo sapiens
aggcggaggttgcag

SEQ ID NO: 392027 - DNA, 15 bp, Homo sapiens
aaggcggaggttgca

SEQ ID NO: 392028 - DNA, 15 bp, Homo sapiens
gaaggcggaggttgc

SEQ ID NO: 392029 - DNA, 15 bp, Homo sapiens
ggaaggcggaggttg

SEQ ID NO: 392030 - DNA, 15 bp, Homo sapiens
cggaaggcggaggtt

SEQ ID NO: 392031 - DNA, 15 bp, Homo sapiens
ccggaaggcggaggt

SEQ ID NO: 392032 - DNA, 15 bp, Homo sapiens
accggaaggcggagg

SEQ ID NO: 392033 - DNA, 15 bp, Homo sapiens
aaccggaaggcggag

SEQ ID NO: 392034 - DNA, 15 bp, Homo sapiens
aaaccggaaggcgga

SEQ ID NO: 392035 - DNA, 15 bp, Homo sapiens
gaaaccggaaggcgg

SEQ ID NO: 392036 - DNA, 15 bp, Homo sapiens
tgaaaccggaaggcg

SEQ ID NO: 392037 - DNA, 15 bp, Homo sapiens
ttgaaaccggaaggc

SEQ ID NO: 392038 - DNA, 15 bp, Homo sapiens
cttgaaaccggaagg

SEQ ID NO: 392039 - DNA, 15 bp, Homo sapiens
gcttgaaaccggaag

SEQ ID NO: 392040 - DNA, 15 bp, Homo sapiens
tgcttgaaaccggaa

SEQ ID NO: 392041 - DNA, 15 bp, Homo sapiens
ttgcttgaaaccgga

SEQ ID NO: 392042 - DNA, 15 bp, Homo sapiens
attgcttgaaaccgg

SEQ ID NO: 392043 - DNA, 15 bp, Homo sapiens
aattgcttgaaaccg

SEQ ID NO: 392044 - DNA, 15 bp, Homo sapiens
gaattgcttgaaacc

SEQ ID NO: 392045 - DNA, 15 bp, Homo sapiens
agaattgcttgaaac

SEQ ID NO: 392046 - DNA, 15 bp, Homo sapiens
gagaattgcttgaaa

SEQ ID NO: 392047 - DNA, 15 bp, Homo sapiens
ggagaattgcttgaa

SEQ ID NO: 392048 - DNA, 15 bp, Homo sapiens
aggagaattgcttga

SEQ ID NO: 392049 - DNA, 15 bp, Homo sapiens
caggagaattgcttg

SEQ ID NO: 392050 - DNA, 15 bp, Homo sapiens
gcaggagaattgctt

SEQ ID NO: 392051 - DNA, 15 bp, Homo sapiens
ggcaggagaattgct

SEQ ID NO: 392052 - DNA, 15 bp, Homo sapiens
aggcaggagaattgc

SEQ ID NO: 392053 - DNA, 15 bp, Homo sapiens
gaggcaggagaattg

SEQ ID NO: 392054 - DNA, 15 bp, Homo sapiens
tgaggcaggagaatt

SEQ ID NO: 392055 - DNA, 15 bp, Homo sapiens
cgcctgtaatcccag

SEQ ID NO: 392056 - DNA, 15 bp, Homo sapiens
gcgcctgtaatccca

SEQ ID NO: 392057 - DNA, 15 bp, Homo sapiens
ggcgcctgtaatccc

SEQ ID NO: 392058 - DNA, 15 bp, Homo sapiens
aggcgcctgtaatcc

SEQ ID NO: 392059 - DNA, 15 bp, Homo sapiens
caggcgcctgtaatc

SEQ ID NO: 392060 - DNA, 15 bp, Homo sapiens
gcaggcgcctgtaat

SEQ ID NO: 392061 - DNA, 15 bp, Homo sapiens
ggcaggcgcctgtaa

SEQ ID NO: 392062 - DNA, 15 bp, Homo sapiens
tggcaggcgcctgta

SEQ ID NO: 392063 - DNA, 15 bp, Homo sapiens
gtggcaggcgcctgt

SEQ ID NO: 392064 - DNA, 15 bp, Homo sapiens
ggtggcaggcgcctg

SEQ ID NO: 392065 - DNA, 15 bp, Homo sapiens
tggtggcaggcgcct

SEQ ID NO: 392066 - DNA, 15 bp, Homo sapiens
gtggtggcaggcgcc

SEQ ID NO: 392067 - DNA, 15 bp, Homo sapiens
cgtggtggcaggcgc

SEQ ID NO: 392068 - DNA, 15 bp, Homo sapiens
gcgtggtggcaggcg

SEQ ID NO: 392069 - DNA, 15 bp, Homo sapiens
ggcgtggtggcaggc

SEQ ID NO: 392070 - DNA, 15 bp, Homo sapiens
gggcgtggtggcagg

SEQ ID NO: 392071 - DNA, 15 bp, Homo sapiens
tgggcgtggtggcag

SEQ ID NO: 392072 - DNA, 15 bp, Homo sapiens
ctgggcgtggtggca

SEQ ID NO: 392073 - DNA, 15 bp, Homo sapiens
gctgggcgtggtggc

SEQ ID NO: 392074 - DNA, 15 bp, Homo sapiens
agctgggcgtggtgg

SEQ ID NO: 392075 - DNA, 15 bp, Homo sapiens
tagctgggcgtggtg

SEQ ID NO: 392076 - DNA, 15 bp, Homo sapiens
ttagctgggcgtggt

SEQ ID NO: 392077 - DNA, 15 bp, Homo sapiens
attagctgggcgtgg

SEQ ID NO: 392078 - DNA, 15 bp, Homo sapiens
aattagctgggcgtg

SEQ ID NO: 392079 - DNA, 15 bp, Homo sapiens
aaattagctgggcgt

SEQ ID NO: 392080 - DNA, 15 bp, Homo sapiens
aaaattagctgggcg

SEQ ID NO: 392081 - DNA, 15 bp, Homo sapiens
aaaaattagctgggc

SEQ ID NO: 392082 - DNA, 15 bp, Homo sapiens
aaaaaattagctggg

SEQ ID NO: 392083 - DNA, 15 bp, Homo sapiens
aaaaaaattagctgg

SEQ ID NO: 392084 - DNA, 15 bp, Homo sapiens
caaaaaaattagctg

SEQ ID NO: 392085 - DNA, 15 bp, Homo sapiens
acaaaaaaattagct

SEQ ID NO: 392086 - DNA, 15 bp, Homo sapiens
tacaaaaaaattagc

SEQ ID NO: 392087 - DNA, 15 bp, Homo sapiens
atacaaaaaaattag

SEQ ID NO: 392088 - DNA, 15 bp, Homo sapiens
aatacaaaaaaatta

SEQ ID NO: 392089 - DNA, 15 bp, Homo sapiens
aaatacaaaaaaatt

SEQ ID NO: 392090 - DNA, 15 bp, Homo sapiens
aaaatacaaaaaaat

SEQ ID NO: 392091 - DNA, 15 bp, Homo sapiens
accaacatggtgaaa

SEQ ID NO: 392092 - DNA, 15 bp, Homo sapiens
gaccaacatggtgaa

SEQ ID NO: 392093 - DNA, 15 bp, Homo sapiens
tgaccaacatggtga

SEQ ID NO: 392094 - DNA, 15 bp, Homo sapiens
ctgaccaacatggtg

SEQ ID NO: 392095 - DNA, 15 bp, Homo sapiens
tctgaccaacatggt

SEQ ID NO: 392096 - DNA, 15 bp, Homo sapiens
ctctgaccaacatgg

SEQ ID NO: 392097 - DNA, 15 bp, Homo sapiens
actctgaccaacatg

SEQ ID NO: 392098 - DNA, 15 bp, Homo sapiens
cactctgaccaacat

SEQ ID NO: 392099 - DNA, 15 bp, Homo sapiens
ccactctgaccaaca

SEQ ID NO: 392100 - DNA, 15 bp, Homo sapiens
accactctgaccaac

SEQ ID NO: 392101 - DNA, 15 bp, Homo sapiens
gaccactctgaccaa

SEQ ID NO: 392102 - DNA, 15 bp, Homo sapiens
agaccactctgacca

SEQ ID NO: 392103 - DNA, 15 bp, Homo sapiens
aagaccactctgacc

SEQ ID NO: 392104 - DNA, 15 bp, Homo sapiens
caagaccactctgac

SEQ ID NO: 392105 - DNA, 15 bp, Homo sapiens
tcaagaccactctga

SEQ ID NO: 392106 - DNA, 15 bp, Homo sapiens
ttcaagaccactctg

SEQ ID NO: 392107 - DNA, 15 bp, Homo sapiens
gttcaagaccactct

SEQ ID NO: 392108 - DNA, 15 bp, Homo sapiens
agttcaagaccactc

SEQ ID NO: 392109 - DNA, 15 bp, Homo sapiens
cagttcaagaccact

SEQ ID NO: 392110 - DNA, 15 bp, Homo sapiens
gcagttcaagaccac

SEQ ID NO: 392111 - DNA, 15 bp, Homo sapiens
agcagttcaagacca

SEQ ID NO: 392112 - DNA, 15 bp, Homo sapiens
cagcagttcaagacc

SEQ ID NO: 392113 - DNA, 15 bp, Homo sapiens
tcagcagttcaagac

SEQ ID NO: 392114 - DNA, 15 bp, Homo sapiens
gtcagcagttcaaga

SEQ ID NO: 392115 - DNA, 15 bp, Homo sapiens
ggtcagcagttcaag

SEQ ID NO: 392116 - DNA, 15 bp, Homo sapiens
aggtcagcagttcaa

SEQ ID NO: 392117 - DNA, 15 bp, Homo sapiens
gaggtcagcagttca

SEQ ID NO: 392118 - DNA, 15 bp, Homo sapiens
cgaggtcagcagttc

SEQ ID NO: 392119 - DNA, 15 bp, Homo sapiens
acgaggtcagcagtt

SEQ ID NO: 392120 - DNA, 15 bp, Homo sapiens
cacgaggtcagcagt

SEQ ID NO: 392121 - DNA, 15 bp, Homo sapiens
tcacgaggtcagcag

SEQ ID NO: 392122 - DNA, 15 bp, Homo sapiens
atcacgaggtcagca

SEQ ID NO: 392123 - DNA, 15 bp, Homo sapiens
gatcacgaggtcagc

SEQ ID NO: 392124 - DNA, 15 bp, Homo sapiens
ggatcacgaggtcag

SEQ ID NO: 392125 - DNA, 15 bp, Homo sapiens
tggatcacgaggtca

SEQ ID NO: 392126 - DNA, 15 bp, Homo sapiens
gtggatcacgaggtc

SEQ ID NO: 392127 - DNA, 15 bp, Homo sapiens
ggtggatcacgaggt

SEQ ID NO: 392128 - DNA, 15 bp, Homo sapiens
gggtggatcacgagg

SEQ ID NO: 392129 - DNA, 15 bp, Homo sapiens
tgggtggatcacgag

SEQ ID NO: 392130 - DNA, 15 bp, Homo sapiens
gtgggtggatcacga

SEQ ID NO: 392131 - DNA, 15 bp, Homo sapiens
ggtgggtggatcacg

SEQ ID NO: 392132 - DNA, 15 bp, Homo sapiens
aggtgggtggatcac

SEQ ID NO: 392133 - DNA, 15 bp, Homo sapiens
gaggtgggtggatca

SEQ ID NO: 392134 - DNA, 15 bp, Homo sapiens
cgaggtgggtggatc

SEQ ID NO: 392135 - DNA, 15 bp, Homo sapiens
ccgaggtgggtggat

SEQ ID NO: 392136 - DNA, 15 bp, Homo sapiens
gccgaggtgggtgga

SEQ ID NO: 392137 - DNA, 15 bp, Homo sapiens
ggccgaggtgggtgg

SEQ ID NO: 392138 - DNA, 15 bp, Homo sapiens
aggccgaggtgggtg

SEQ ID NO: 392139 - DNA, 15 bp, Homo sapiens
gaggccgaggtgggt

SEQ ID NO: 392140 - DNA, 15 bp, Homo sapiens
ggaggccgaggtggg

SEQ ID NO: 392141 - DNA, 15 bp, Homo sapiens
gggaggccgaggtgg

SEQ ID NO: 392142 - DNA, 15 bp, Homo sapiens
tgggaggccgaggtg

SEQ ID NO: 392143 - DNA, 15 bp, Homo sapiens
ttgggaggccgaggt

SEQ ID NO: 392144 - DNA, 15 bp, Homo sapiens
cacctgtaatcccag

SEQ ID NO: 392145 - DNA, 15 bp, Homo sapiens
acacctgtaatccca

SEQ ID NO: 392146 - DNA, 15 bp, Homo sapiens
tacacctgtaatccc

SEQ ID NO: 392147 - DNA, 15 bp, Homo sapiens
ttacacctgtaatcc

SEQ ID NO: 392148 - DNA, 15 bp, Homo sapiens
cttacacctgtaatc

SEQ ID NO: 392149 - DNA, 15 bp, Homo sapiens
gcttacacctgtaat

SEQ ID NO: 392150 - DNA, 15 bp, Homo sapiens
ggcttacacctgtaa

SEQ ID NO: 392151 - DNA, 15 bp, Homo sapiens
tggcttacacctgta

SEQ ID NO: 392152 - DNA, 15 bp, Homo sapiens
gtggcttacacctgt

SEQ ID NO: 392153 - DNA, 15 bp, Homo sapiens
ggtggcttacacctg

SEQ ID NO: 392154 - DNA, 15 bp, Homo sapiens
aggtggcttacacct

SEQ ID NO: 392155 - DNA, 15 bp, Homo sapiens
gaggtggcttacacc

SEQ ID NO: 392156 - DNA, 15 bp, Homo sapiens
cgaggtggcttacac

SEQ ID NO: 392157 - DNA, 15 bp, Homo sapiens
gcgaggtggcttaca

SEQ ID NO: 392158 - DNA, 15 bp, Homo sapiens
ggcgaggtggcttac

SEQ ID NO: 392159 - DNA, 15 bp, Homo sapiens
gggcgaggtggctta

SEQ ID NO: 392160 - DNA, 15 bp, Homo sapiens
agggcgaggtggctt

SEQ ID NO: 392161 - DNA, 15 bp, Homo sapiens
cagggcgaggtggct

SEQ ID NO: 392162 - DNA, 15 bp, Homo sapiens
gcagggcgaggtggc

SEQ ID NO: 392163 - DNA, 15 bp, Homo sapiens
ggcagggcgaggtgg

SEQ ID NO: 392164 - DNA, 15 bp, Homo sapiens
cggcagggcgaggtg

SEQ ID NO: 392165 - DNA, 15 bp, Homo sapiens
tcggcagggcgaggt

SEQ ID NO: 392166 - DNA, 15 bp, Homo sapiens
gtcggcagggcgagg

SEQ ID NO: 392167 - DNA, 15 bp, Homo sapiens
tgtcggcagggcgag

SEQ ID NO: 392168 - DNA, 15 bp, Homo sapiens
gtgtcggcagggcga

SEQ ID NO: 392169 - DNA, 15 bp, Homo sapiens
tgtgtcggcagggcg

SEQ ID NO: 392170 - DNA, 15 bp, Homo sapiens
atgtgtcggcagggc

SEQ ID NO: 392171 - DNA, 15 bp, Homo sapiens
tatgtgtcggcaggg

SEQ ID NO: 392172 - DNA, 15 bp, Homo sapiens
gtatgtgtcggcagg

SEQ ID NO: 392173 - DNA, 15 bp, Homo sapiens
agtatgtgtcggcag

SEQ ID NO: 392174 - DNA, 15 bp, Homo sapiens
aagtatgtgtcggca

SEQ ID NO: 392175 - DNA, 15 bp, Homo sapiens
aaagtatgtgtcggc

SEQ ID NO: 392176 - DNA, 15 bp, Homo sapiens
aaaagtatgtgtcgg

SEQ ID NO: 392177 - DNA, 15 bp, Homo sapiens
taaaagtatgtgtcg

SEQ ID NO: 392178 - DNA, 15 bp, Homo sapiens
ttaaaagtatgtgtc

SEQ ID NO: 392179 - DNA, 15 bp, Homo sapiens
tttaaaagtatgtgt

SEQ ID NO: 392180 - DNA, 15 bp, Homo sapiens
ctttaaaagtatgtg

SEQ ID NO: 392181 - DNA, 15 bp, Homo sapiens
cctttaaaagtatgt

SEQ ID NO: 392182 - DNA, 15 bp, Homo sapiens
tcctttaaaagtatg

SEQ ID NO: 392183 - DNA, 15 bp, Homo sapiens
ttcctttaaaagtat

SEQ ID NO: 392184 - DNA, 15 bp, Homo sapiens
tttcctttaaaagta

SEQ ID NO: 392185 - DNA, 15 bp, Homo sapiens
gtttcctttaaaagt

SEQ ID NO: 392186 - DNA, 15 bp, Homo sapiens
agtttcctttaaaag

SEQ ID NO: 392187 - DNA, 15 bp, Homo sapiens
aagtttcctttaaaa

SEQ ID NO: 392188 - DNA, 15 bp, Homo sapiens
aaagtttcctttaaa

SEQ ID NO: 392189 - DNA, 15 bp, Homo sapiens
caaagtttcctttaa

SEQ ID NO: 392190 - DNA, 15 bp, Homo sapiens
acaaagtttccttta

SEQ ID NO: 392191 - DNA, 15 bp, Homo sapiens
cacaaagtttccttt

SEQ ID NO: 392192 - DNA, 15 bp, Homo sapiens
gcacaaagtttcctt

SEQ ID NO: 392193 - DNA, 15 bp, Homo sapiens
tgcacaaagtttcct

SEQ ID NO: 392194 - DNA, 15 bp, Homo sapiens
ttgcacaaagtttcc

SEQ ID NO: 392195 - DNA, 15 bp, Homo sapiens
gttgcacaaagtttc

SEQ ID NO: 392196 - DNA, 15 bp, Homo sapiens
agttgcacaaagttt

SEQ ID NO: 392197 - DNA, 15 bp, Homo sapiens
cagttgcacaaagtt

SEQ ID NO: 392198 - DNA, 15 bp, Homo sapiens
ccagttgcacaaagt

SEQ ID NO: 392199 - DNA, 15 bp, Homo sapiens
cccagttgcacaaag

SEQ ID NO: 392200 - DNA, 15 bp, Homo sapiens
tcccagttgcacaaa

SEQ ID NO: 392201 - DNA, 15 bp, Homo sapiens
ttcccagttgcacaa

SEQ ID NO: 392202 - DNA, 15 bp, Homo sapiens
cttcccagttgcaca

SEQ ID NO: 392203 - DNA, 15 bp, Homo sapiens
ccttcccagttgcac

SEQ ID NO: 392204 - DNA, 15 bp, Homo sapiens
tccttcccagttgca

SEQ ID NO: 392205 - DNA, 15 bp, Homo sapiens
ttccttcccagttgc

SEQ ID NO: 392206 - DNA, 15 bp, Homo sapiens
tttccttcccagttg

SEQ ID NO: 392207 - DNA, 15 bp, Homo sapiens
gtttccttcccagtt

SEQ ID NO: 392208 - DNA, 15 bp, Homo sapiens
ggtttccttcccagt

SEQ ID NO: 392209 - DNA, 15 bp, Homo sapiens
tggtttccttcccag

SEQ ID NO: 392210 - DNA, 15 bp, Homo sapiens
ctggtttccttccca

SEQ ID NO: 392211 - DNA, 15 bp, Homo sapiens
cctggtttccttccc

SEQ ID NO: 392212 - DNA, 15 bp, Homo sapiens
tcctggtttccttcc

SEQ ID NO: 392213 - DNA, 15 bp, Homo sapiens
ctcctggtttccttc

SEQ ID NO: 392214 - DNA, 15 bp, Homo sapiens
tctcctggtttcctt

SEQ ID NO: 392215 - DNA, 15 bp, Homo sapiens
ttctcctggtttcct

SEQ ID NO: 392216 - DNA, 15 bp, Homo sapiens
attctcctggtttcc

SEQ ID NO: 392217 - DNA, 15 bp, Homo sapiens
cattctcctggtttc

SEQ ID NO: 392218 - DNA, 15 bp, Homo sapiens
gcattctcctggttt

SEQ ID NO: 392219 - DNA, 15 bp, Homo sapiens
tgcattctcctggtt

SEQ ID NO: 392220 - DNA, 15 bp, Homo sapiens
ctgcattctcctggt

SEQ ID NO: 392221 - DNA, 15 bp, Homo sapiens
tctgcattctcctgg

SEQ ID NO: 392222 - DNA, 15 bp, Homo sapiens
ttctgcattctcctg

SEQ ID NO: 392223 - DNA, 15 bp, Homo sapiens
attctgcattctcct

SEQ ID NO: 392224 - DNA, 15 bp, Homo sapiens
gattctgcattctcc

SEQ ID NO: 392225 - DNA, 15 bp, Homo sapiens
tgattctgcattctc

SEQ ID NO: 392226 - DNA, 15 bp, Homo sapiens
gtgattctgcattct

SEQ ID NO: 392227 - DNA, 15 bp, Homo sapiens
tgtgattctgcattc

SEQ ID NO: 392228 - DNA, 15 bp, Homo sapiens
ctgtgattctgcatt

SEQ ID NO: 392229 - DNA, 15 bp, Homo sapiens
tctgtgattctgcat

SEQ ID NO: 392230 - DNA, 15 bp, Homo sapiens
ctctgtgattctgca

SEQ ID NO: 392231 - DNA, 15 bp, Homo sapiens
cctctgtgattctgc

SEQ ID NO: 392232 - DNA, 15 bp, Homo sapiens
gcctctgtgattctg

SEQ ID NO: 392233 - DNA, 15 bp, Homo sapiens
ggcctctgtgattct

SEQ ID NO: 392234 - DNA, 15 bp, Homo sapiens
tggcctctgtgattc

SEQ ID NO: 392235 - DNA, 15 bp, Homo sapiens
ttggcctctgtgatt

SEQ ID NO: 392236 - DNA, 15 bp, Homo sapiens
tttggcctctgtgat

SEQ ID NO: 392237 - DNA, 15 bp, Homo sapiens
ctttggcctctgtga

SEQ ID NO: 392238 - DNA, 15 bp, Homo sapiens
cctttggcctctgtg

SEQ ID NO: 392239 - DNA, 15 bp, Homo sapiens
tcctttggcctctgt

SEQ ID NO: 392240 - DNA, 15 bp, Homo sapiens
ttcctttggcctctg

SEQ ID NO: 392241 - DNA, 15 bp, Homo sapiens
cttcctttggcctct

SEQ ID NO: 392242 - DNA, 15 bp, Homo sapiens
tcttcctttggcctc

SEQ ID NO: 392243 - DNA, 15 bp, Homo sapiens
ctcttcctttggcct

SEQ ID NO: 392244 - DNA, 15 bp, Homo sapiens
gctcttcctttggcc

SEQ ID NO: 392245 - DNA, 15 bp, Homo sapiens
cgctcttcctttggc

SEQ ID NO: 392246 - DNA, 15 bp, Homo sapiens
tcgctcttcctttgg

SEQ ID NO: 392247 - DNA, 15 bp, Homo sapiens
ttcgctcttcctttg

SEQ ID NO: 392248 - DNA, 15 bp, Homo sapiens
attcgctcttccttt

SEQ ID NO: 392249 - DNA, 15 bp, Homo sapiens
aattcgctcttcctt

SEQ ID NO: 392250 - DNA, 15 bp, Homo sapiens
aaattcgctcttcct

SEQ ID NO: 392251 - DNA, 15 bp, Homo sapiens
aaaattcgctcttcc

SEQ ID NO: 392252 - DNA, 15 bp, Homo sapiens
taaaattcgctcttc

SEQ ID NO: 392253 - DNA, 15 bp, Homo sapiens
gtaaaattcgctctt

SEQ ID NO: 392254 - DNA, 15 bp, Homo sapiens
tgtaaaattcgctct

SEQ ID NO: 392255 - DNA, 15 bp, Homo sapiens
ctgtaaaattcgctc

SEQ ID NO: 392256 - DNA, 15 bp, Homo sapiens
actgtaaaattcgct

SEQ ID NO: 392257 - DNA, 15 bp, Homo sapiens
cactgtaaaattcgc

SEQ ID NO: 392258 - DNA, 15 bp, Homo sapiens
ccactgtaaaattcg

SEQ ID NO: 392259 - DNA, 15 bp, Homo sapiens
gccactgtaaaattc

SEQ ID NO: 392260 - DNA, 15 bp, Homo sapiens
tgccactgtaaaatt

SEQ ID NO: 392261 - DNA, 15 bp, Homo sapiens
ttgccactgtaaaat

SEQ ID NO: 392262 - DNA, 15 bp, Homo sapiens
cttgccactgtaaaa

SEQ ID NO: 392263 - DNA, 15 bp, Homo sapiens
ccttgccactgtaaa

SEQ ID NO: 392264 - DNA, 15 bp, Homo sapiens
cccttgccactgtaa

SEQ ID NO: 392265 - DNA, 15 bp, Homo sapiens
acccttgccactgta

SEQ ID NO: 392266 - DNA, 15 bp, Homo sapiens
cacccttgccactgt

SEQ ID NO: 392267 - DNA, 15 bp, Homo sapiens
tcacccttgccactg

SEQ ID NO: 392268 - DNA, 15 bp, Homo sapiens
atcacccttgccact

SEQ ID NO: 392269 - DNA, 15 bp, Homo sapiens
aatcacccttgccac

SEQ ID NO: 392270 - DNA, 15 bp, Homo sapiens
caatcacccttgcca

SEQ ID NO: 392271 - DNA, 15 bp, Homo sapiens
ccaatcacccttgcc

SEQ ID NO: 392272 - DNA, 15 bp, Homo sapiens
cccaatcacccttgc

SEQ ID NO: 392273 - DNA, 15 bp, Homo sapiens
tcccaatcacccttg

SEQ ID NO: 392274 - DNA, 15 bp, Homo sapiens
ttcccaatcaccctt

SEQ ID NO: 392275 - DNA, 15 bp, Homo sapiens
attcccaatcaccct

SEQ ID NO: 392276 - DNA, 15 bp, Homo sapiens
cattcccaatcaccc

SEQ ID NO: 392277 - DNA, 15 bp, Homo sapiens
acattcccaatcacc

SEQ ID NO: 392278 - DNA, 15 bp, Homo sapiens
gacattcccaatcac

SEQ ID NO: 392279 - DNA, 15 bp, Homo sapiens
tgacattcccaatca

SEQ ID NO: 392280 - DNA, 15 bp, Homo sapiens
ctgacattcccaatc

SEQ ID NO: 392281 - DNA, 15 bp, Homo sapiens
cctgacattcccaat

SEQ ID NO: 392282 - DNA, 15 bp, Homo sapiens
gcctgacattcccaa

SEQ ID NO: 392283 - DNA, 15 bp, Homo sapiens
ggcctgacattccca

SEQ ID NO: 392284 - DNA, 15 bp, Homo sapiens
gggcctgacattccc

SEQ ID NO: 392285 - DNA, 15 bp, Homo sapiens
agggcctgacattcc

SEQ ID NO: 392286 - DNA, 15 bp, Homo sapiens
tagggcctgacattc

SEQ ID NO: 392287 - DNA, 15 bp, Homo sapiens
ttagggcctgacatt

SEQ ID NO: 392288 - DNA, 15 bp, Homo sapiens
tttagggcctgacat

SEQ ID NO: 392289 - DNA, 15 bp, Homo sapiens
ctttagggcctgaca

SEQ ID NO: 392290 - DNA, 15 bp, Homo sapiens
tctttagggcctgac

SEQ ID NO: 392291 - DNA, 15 bp, Homo sapiens
ctctttagggcctga

SEQ ID NO: 392292 - DNA, 15 bp, Homo sapiens
tctctttagggcctg

SEQ ID NO: 392293 - DNA, 15 bp, Homo sapiens
ctctctttagggcct

SEQ ID NO: 392294 - DNA, 15 bp, Homo sapiens
gctctctttagggcc

SEQ ID NO: 392295 - DNA, 15 bp, Homo sapiens
ggctctctttagggc

SEQ ID NO: 392296 - DNA, 15 bp, Homo sapiens
aggctctctttaggg

SEQ ID NO: 392297 - DNA, 15 bp, Homo sapiens
caggctctctttagg

SEQ ID NO: 392298 - DNA, 15 bp, Homo sapiens
tcaggctctctttag

SEQ ID NO: 392299 - DNA, 15 bp, Homo sapiens
ctcaggctctcttta

SEQ ID NO: 392300 - DNA, 15 bp, Homo sapiens
actcaggctctcttt

SEQ ID NO: 392301 - DNA, 15 bp, Homo sapiens
tactcaggctctctt

SEQ ID NO: 392302 - DNA, 15 bp, Homo sapiens
ctactcaggctctct

SEQ ID NO: 392303 - DNA, 15 bp, Homo sapiens
gctactcaggctctc

SEQ ID NO: 392304 - DNA, 15 bp, Homo sapiens
tgctactcaggctct

SEQ ID NO: 392305 - DNA, 15 bp, Homo sapiens
atgctactcaggctc

SEQ ID NO: 392306 - DNA, 15 bp, Homo sapiens
catgctactcaggct

SEQ ID NO: 392307 - DNA, 15 bp, Homo sapiens
tcatgctactcaggc

SEQ ID NO: 392308 - DNA, 15 bp, Homo sapiens
ttcatgctactcagg

SEQ ID NO: 392309 - DNA, 15 bp, Homo sapiens
cttcatgctactcag

SEQ ID NO: 392310 - DNA, 15 bp, Homo sapiens
gcttcatgctactca

SEQ ID NO: 392311 - DNA, 15 bp, Homo sapiens
tgcttcatgctactc

SEQ ID NO: 392312 - DNA, 15 bp, Homo sapiens
atgcttcatgctact

SEQ ID NO: 392313 - DNA, 15 bp, Homo sapiens
tatgcttcatgctac

SEQ ID NO: 392314 - DNA, 15 bp, Homo sapiens
ttatgcttcatgcta

SEQ ID NO: 392315 - DNA, 15 bp, Homo sapiens
cttatgcttcatgct

SEQ ID NO: 392316 - DNA, 15 bp, Homo sapiens
ccttatgcttcatgc

SEQ ID NO: 392317 - DNA, 15 bp, Homo sapiens
cccttatgcttcatg

SEQ ID NO: 392318 - DNA, 15 bp, Homo sapiens
tcccttatgcttcat

SEQ ID NO: 392319 - DNA, 15 bp, Homo sapiens
gtcccttatgcttca

SEQ ID NO: 392320 - DNA, 15 bp, Homo sapiens
agtcccttatgcttc

SEQ ID NO: 392321 - DNA, 15 bp, Homo sapiens
cagtcccttatgctt

SEQ ID NO: 392322 - DNA, 15 bp, Homo sapiens
acagtcccttatgct

SEQ ID NO: 392323 - DNA, 15 bp, Homo sapiens
cacagtcccttatgc

SEQ ID NO: 392324 - DNA, 15 bp, Homo sapiens
acacagtcccttatg

SEQ ID NO: 392325 - DNA, 15 bp, Homo sapiens
tacacagtcccttat

SEQ ID NO: 392326 - DNA, 15 bp, Homo sapiens
atacacagtccctta

SEQ ID NO: 392327 - DNA, 15 bp, Homo sapiens
catacacagtccctt

SEQ ID NO: 392328 - DNA, 15 bp, Homo sapiens
gcatacacagtccct

SEQ ID NO: 392329 - DNA, 15 bp, Homo sapiens
ggcatacacagtccc

SEQ ID NO: 392330 - DNA, 15 bp, Homo sapiens
tggcatacacagtcc

SEQ ID NO: 392331 - DNA, 15 bp, Homo sapiens
atggcatacacagtc

SEQ ID NO: 392332 - DNA, 15 bp, Homo sapiens
catggcatacacagt

SEQ ID NO: 392333 - DNA, 15 bp, Homo sapiens
tcatggcatacacag

SEQ ID NO: 392334 - DNA, 15 bp, Homo sapiens
ctcatggcatacaca

SEQ ID NO: 392335 - DNA, 15 bp, Homo sapiens
cctcatggcatacac

SEQ ID NO: 392336 - DNA, 15 bp, Homo sapiens
acctcatggcataca

SEQ ID NO: 392337 - DNA, 15 bp, Homo sapiens
cacctcatggcatac

SEQ ID NO: 392338 - DNA, 15 bp, Homo sapiens
tcacctcatggcata

SEQ ID NO: 392339 - DNA, 15 bp, Homo sapiens
gtcacctcatggcat

SEQ ID NO: 392340 - DNA, 15 bp, Homo sapiens
agtcacctcatggca

SEQ ID NO: 392341 - DNA, 15 bp, Homo sapiens
cagtcacctcatggc

SEQ ID NO: 392342 - DNA, 15 bp, Homo sapiens
gcagtcacctcatgg

SEQ ID NO: 392343 - DNA, 15 bp, Homo sapiens
tgcagtcacctcatg

SEQ ID NO: 392344 - DNA, 15 bp, Homo sapiens
atgcagtcacctcat

SEQ ID NO: 392345 - DNA, 15 bp, Homo sapiens
tatgcagtcacctca

SEQ ID NO: 392346 - DNA, 15 bp, Homo sapiens
ctatgcagtcacctc

SEQ ID NO: 392347 - DNA, 15 bp, Homo sapiens
tctatgcagtcacct

SEQ ID NO: 392348 - DNA, 15 bp, Homo sapiens
ttctatgcagtcacc

SEQ ID NO: 392349 - DNA, 15 bp, Homo sapiens
tttctatgcagtcac

SEQ ID NO: 392350 - DNA, 15 bp, Homo sapiens
ctttctatgcagtca

SEQ ID NO: 392351 - DNA, 15 bp, Homo sapiens
gctttctatgcagtc

SEQ ID NO: 392352 - DNA, 15 bp, Homo sapiens
agctttctatgcagt

SEQ ID NO: 392353 - DNA, 15 bp, Homo sapiens
cagctttctatgcag

SEQ ID NO: 392354 - DNA, 15 bp, Homo sapiens
acagctttctatgca

SEQ ID NO: 392355 - DNA, 15 bp, Homo sapiens
aacagctttctatgc

SEQ ID NO: 392356 - DNA, 15 bp, Homo sapiens
aaacagctttctatg

SEQ ID NO: 392357 - DNA, 15 bp, Homo sapiens
gaaacagctttctat

SEQ ID NO: 392358 - DNA, 15 bp, Homo sapiens
tgaaacagctttcta

SEQ ID NO: 392359 - DNA, 15 bp, Homo sapiens
ctgaaacagctttct

SEQ ID NO: 392360 - DNA, 15 bp, Homo sapiens
cctgaaacagctttc

SEQ ID NO: 392361 - DNA, 15 bp, Homo sapiens
ccctgaaacagcttt

SEQ ID NO: 392362 - DNA, 15 bp, Homo sapiens
gccctgaaacagctt

SEQ ID NO: 392363 - DNA, 15 bp, Homo sapiens
agccctgaaacagct

SEQ ID NO: 392364 - DNA, 15 bp, Homo sapiens
tagccctgaaacagc

SEQ ID NO: 392365 - DNA, 15 bp, Homo sapiens
ttagccctgaaacag

SEQ ID NO: 392366 - DNA, 15 bp, Homo sapiens
gttagccctgaaaca

SEQ ID NO: 392367 - DNA, 15 bp, Homo sapiens
tgttagccctgaaac

SEQ ID NO: 392368 - DNA, 15 bp, Homo sapiens
ttgttagccctgaaa

SEQ ID NO: 392369 - DNA, 15 bp, Homo sapiens
cttgttagccctgaa

SEQ ID NO: 392370 - DNA, 15 bp, Homo sapiens
ccttgttagccctga

SEQ ID NO: 392371 - DNA, 15 bp, Homo sapiens
tccttgttagccctg

SEQ ID NO: 392372 - DNA, 15 bp, Homo sapiens
ctccttgttagccct

SEQ ID NO: 392373 - DNA, 15 bp, Homo sapiens
gctccttgttagccc

SEQ ID NO: 392374 - DNA, 15 bp, Homo sapiens
tgctccttgttagcc

SEQ ID NO: 392375 - DNA, 15 bp, Homo sapiens
ctgctccttgttagc

SEQ ID NO: 392376 - DNA, 15 bp, Homo sapiens
tctgctccttgttag

SEQ ID NO: 392377 - DNA, 15 bp, Homo sapiens
ttctgctccttgtta

SEQ ID NO: 392378 - DNA, 15 bp, Homo sapiens
gttctgctccttgtt

SEQ ID NO: 392379 - DNA, 15 bp, Homo sapiens
ggttctgctccttgt

SEQ ID NO: 392380 - DNA, 15 bp, Homo sapiens
tggttctgctccttg

SEQ ID NO: 392381 - DNA, 15 bp, Homo sapiens
atggttctgctcctt

SEQ ID NO: 392382 - DNA, 15 bp, Homo sapiens
aatggttctgctcct

SEQ ID NO: 392383 - DNA, 15 bp, Homo sapiens
caatggttctgctcc

SEQ ID NO: 392384 - DNA, 15 bp, Homo sapiens
tcaatggttctgctc

SEQ ID NO: 392385 - DNA, 15 bp, Homo sapiens
ctcaatggttctgct

SEQ ID NO: 392386 - DNA, 15 bp, Homo sapiens
tctcaatggttctgc

SEQ ID NO: 392387 - DNA, 15 bp, Homo sapiens
ttctcaatggttctg

SEQ ID NO: 392388 - DNA, 15 bp, Homo sapiens
cttctcaatggttct

SEQ ID NO: 392389 - DNA, 15 bp, Homo sapiens
tcttctcaatggttc

SEQ ID NO: 392390 - DNA, 15 bp, Homo sapiens
atcttctcaatggtt

SEQ ID NO: 392391 - DNA, 15 bp, Homo sapiens
tatcttctcaatggt

SEQ ID NO: 392392 - DNA, 15 bp, Homo sapiens
ttatcttctcaatgg

SEQ ID NO: 392393 - DNA, 15 bp, Homo sapiens
tttatcttctcaatg

SEQ ID NO: 392394 - DNA, 15 bp, Homo sapiens
ctttatcttctcaat

SEQ ID NO: 392395 - DNA, 15 bp, Homo sapiens
actttatcttctcaa

SEQ ID NO: 392396 - DNA, 15 bp, Homo sapiens
cactttatcttctca

SEQ ID NO: 392397 - DNA, 15 bp, Homo sapiens
ccactttatcttctc

SEQ ID NO: 392398 - DNA, 15 bp, Homo sapiens
cccactttatcttct

SEQ ID NO: 392399 - DNA, 15 bp, Homo sapiens
tcccactttatcttc

SEQ ID NO: 392400 - DNA, 15 bp, Homo sapiens
ctcccactttatctt

SEQ ID NO: 392401 - DNA, 15 bp, Homo sapiens
tctcccactttatct

SEQ ID NO: 392402 - DNA, 15 bp, Homo sapiens
ctctcccactttatc

SEQ ID NO: 392403 - DNA, 15 bp, Homo sapiens
tctctcccactttat

SEQ ID NO: 392404 - DNA, 15 bp, Homo sapiens
ctctctcccacttta

SEQ ID NO: 392405 - DNA, 15 bp, Homo sapiens
cctctctcccacttt

SEQ ID NO: 392406 - DNA, 15 bp, Homo sapiens
tcctctctcccactt

SEQ ID NO: 392407 - DNA, 15 bp, Homo sapiens
ctcctctctcccact

SEQ ID NO: 392408 - DNA, 15 bp, Homo sapiens
cctcctctctcccac

SEQ ID NO: 392409 - DNA, 15 bp, Homo sapiens
tcctcctctctccca

SEQ ID NO: 392410 - DNA, 15 bp, Homo sapiens
atcctcctctctccc

SEQ ID NO: 392411 - DNA, 15 bp, Homo sapiens
catcctcctctctcc

SEQ ID NO: 392412 - DNA, 15 bp, Homo sapiens
gcatcctcctctctc

SEQ ID NO: 392413 - DNA, 15 bp, Homo sapiens
tgcatcctcctctct

SEQ ID NO: 392414 - DNA, 15 bp, Homo sapiens
atgcatcctcctctc

SEQ ID NO: 392415 - DNA, 15 bp, Homo sapiens
tatgcatcctcctct

SEQ ID NO: 392416 - DNA, 15 bp, Homo sapiens
ctatgcatcctcctc

SEQ ID NO: 392417 - DNA, 15 bp, Homo sapiens
tctatgcatcctcct

SEQ ID NO: 392418 - DNA, 15 bp, Homo sapiens
ttctatgcatcctcc

SEQ ID NO: 392419 - DNA, 15 bp, Homo sapiens
attctatgcatcctc

SEQ ID NO: 392420 - DNA, 15 bp, Homo sapiens
gattctatgcatcct

SEQ ID NO: 392421 - DNA, 15 bp, Homo sapiens
cgattctatgcatcc

SEQ ID NO: 392422 - DNA, 15 bp, Homo sapiens
acgattctatgcatc

SEQ ID NO: 392423 - DNA, 15 bp, Homo sapiens
tacgattctatgcat

SEQ ID NO: 392424 - DNA, 15 bp, Homo sapiens
ctacgattctatgca

SEQ ID NO: 392425 - DNA, 15 bp, Homo sapiens
gctacgattctatgc

SEQ ID NO: 392426 - DNA, 15 bp, Homo sapiens
agctacgattctatg

SEQ ID NO: 392427 - DNA, 15 bp, Homo sapiens
aagctacgattctat

SEQ ID NO: 392428 - DNA, 15 bp, Homo sapiens
caagctacgattcta

SEQ ID NO: 392429 - DNA, 15 bp, Homo sapiens
tcaagctacgattct

SEQ ID NO: 392430 - DNA, 15 bp, Homo sapiens
ctcaagctacgattc

SEQ ID NO: 392431 - DNA, 15 bp, Homo sapiens
cctcaagctacgatt

SEQ ID NO: 392432 - DNA, 15 bp, Homo sapiens
ccctcaagctacgat

SEQ ID NO: 392433 - DNA, 15 bp, Homo sapiens
tccctcaagctacga

SEQ ID NO: 392434 - DNA, 15 bp, Homo sapiens
gtccctcaagctacg

SEQ ID NO: 392435 - DNA, 15 bp, Homo sapiens
tgtccctcaagctac

SEQ ID NO: 392436 - DNA, 15 bp, Homo sapiens
ttgtccctcaagcta

SEQ ID NO: 392437 - DNA, 15 bp, Homo sapiens
cttgtccctcaagct

SEQ ID NO: 392438 - DNA, 15 bp, Homo sapiens
ccttgtccctcaagc

SEQ ID NO: 392439 - DNA, 15 bp, Homo sapiens
cccttgtccctcaag

SEQ ID NO: 392440 - DNA, 15 bp, Homo sapiens
tcccttgtccctcaa

SEQ ID NO: 392441 - DNA, 15 bp, Homo sapiens
ttcccttgtccctca

SEQ ID NO: 392442 - DNA, 15 bp, Homo sapiens
cttcccttgtccctc

SEQ ID NO: 392443 - DNA, 15 bp, Homo sapiens
ccttcccttgtccct

SEQ ID NO: 392444 - DNA, 15 bp, Homo sapiens
accttcccttgtccc

SEQ ID NO: 392445 - DNA, 15 bp, Homo sapiens
caccttcccttgtcc

SEQ ID NO: 392446 - DNA, 15 bp, Homo sapiens
acaccttcccttgtc

SEQ ID NO: 392447 - DNA, 15 bp, Homo sapiens
aacaccttcccttgt

SEQ ID NO: 392448 - DNA, 15 bp, Homo sapiens
aaacaccttcccttg

SEQ ID NO: 392449 - DNA, 15 bp, Homo sapiens
aaaacaccttccctt

SEQ ID NO: 392450 - DNA, 15 bp, Homo sapiens
taaaacaccttccct

SEQ ID NO: 392451 - DNA, 15 bp, Homo sapiens
ataaaacaccttccc

SEQ ID NO: 392452 - DNA, 15 bp, Homo sapiens
aataaaacaccttcc

SEQ ID NO: 392453 - DNA, 15 bp, Homo sapiens
taataaaacaccttc

SEQ ID NO: 392454 - DNA, 15 bp, Homo sapiens
ctaataaaacacctt

SEQ ID NO: 392455 - DNA, 15 bp, Homo sapiens
cctaataaaacacct

SEQ ID NO: 392456 - DNA, 15 bp, Homo sapiens
tcctaataaaacacc

SEQ ID NO: 392457 - DNA, 15 bp, Homo sapiens
atcctaataaaacac

SEQ ID NO: 392458 - DNA, 15 bp, Homo sapiens
tatcctaataaaaca

SEQ ID NO: 392459 - DNA, 15 bp, Homo sapiens
ttatcctaataaaac

SEQ ID NO: 392460 - DNA, 15 bp, Homo sapiens
attatcctaataaaa

SEQ ID NO: 392461 - DNA, 15 bp, Homo sapiens
tattatcctaataaa

SEQ ID NO: 392462 - DNA, 15 bp, Homo sapiens
ttattatcctaataa

SEQ ID NO: 392463 - DNA, 15 bp, Homo sapiens
attattatcctaata

SEQ ID NO: 392464 - DNA, 15 bp, Homo sapiens
tattattatcctaat

SEQ ID NO: 392465 - DNA, 15 bp, Homo sapiens
ctattattatcctaa

SEQ ID NO: 392466 - DNA, 15 bp, Homo sapiens
gctattattatccta

SEQ ID NO: 392467 - DNA, 15 bp, Homo sapiens
ggctattattatcct

SEQ ID NO: 392468 - DNA, 15 bp, Homo sapiens
aggctattattatcc

SEQ ID NO: 392469 - DNA, 15 bp, Homo sapiens
taggctattattatc

SEQ ID NO: 392470 - DNA, 15 bp, Homo sapiens
ttaggctattattat

SEQ ID NO: 392471 - DNA, 15 bp, Homo sapiens
tttaggctattatta

SEQ ID NO: 392472 - DNA, 15 bp, Homo sapiens
gtttaggctattatt

SEQ ID NO: 392473 - DNA, 15 bp, Homo sapiens
tgtttaggctattat

SEQ ID NO: 392474 - DNA, 15 bp, Homo sapiens
gtgtttaggctatta

SEQ ID NO: 392475 - DNA, 15 bp, Homo sapiens
tgtgtttaggctatt

SEQ ID NO: 392476 - DNA, 15 bp, Homo sapiens
atgtgtttaggctat

SEQ ID NO: 392477 - DNA, 15 bp, Homo sapiens
aatgtgtttaggcta

SEQ ID NO: 392478 - DNA, 15 bp, Homo sapiens
aaatgtgtttaggct

SEQ ID NO: 392479 - DNA, 15 bp, Homo sapiens
caaatgtgtttaggc

SEQ ID NO: 392480 - DNA, 15 bp, Homo sapiens
gcaaatgtgtttagg

SEQ ID NO: 392481 - DNA, 15 bp, Homo sapiens
tgcaaatgtgtttag

SEQ ID NO: 392482 - DNA, 15 bp, Homo sapiens
ctgcaaatgtgttta

SEQ ID NO: 392483 - DNA, 15 bp, Homo sapiens
cctgcaaatgtgttt

SEQ ID NO: 392484 - DNA, 15 bp, Homo sapiens
acctgcaaatgtgtt

SEQ ID NO: 392485 - DNA, 15 bp, Homo sapiens
aacctgcaaatgtgt

SEQ ID NO: 392486 - DNA, 15 bp, Homo sapiens
aaacctgcaaatgtg

SEQ ID NO: 392487 - DNA, 15 bp, Homo sapiens
caaacctgcaaatgt

SEQ ID NO: 392488 - DNA, 15 bp, Homo sapiens
tcaaacctgcaaatg

SEQ ID NO: 392489 - DNA, 15 bp, Homo sapiens
ctcaaacctgcaaat

SEQ ID NO: 392490 - DNA, 15 bp, Homo sapiens
cctcaaacctgcaaa

SEQ ID NO: 392491 - DNA, 15 bp, Homo sapiens
ccctcaaacctgcaa

SEQ ID NO: 392492 - DNA, 15 bp, Homo sapiens
tccctcaaacctgca

SEQ ID NO: 392493 - DNA, 15 bp, Homo sapiens
ttccctcaaacctgc

SEQ ID NO: 392494 - DNA, 15 bp, Homo sapiens
cttccctcaaacctg

SEQ ID NO: 392495 - DNA, 15 bp, Homo sapiens
ccttccctcaaacct

SEQ ID NO: 392496 - DNA, 15 bp, Homo sapiens
tccttccctcaaacc

SEQ ID NO: 392497 - DNA, 15 bp, Homo sapiens
ctccttccctcaaac

SEQ ID NO: 392498 - DNA, 15 bp, Homo sapiens
gctccttccctcaaa

SEQ ID NO: 392499 - DNA, 15 bp, Homo sapiens
ggctccttccctcaa

SEQ ID NO: 392500 - DNA, 15 bp, Homo sapiens
tggctccttccctca

SEQ ID NO: 392501 - DNA, 15 bp, Homo sapiens
ctggctccttccctc

SEQ ID NO: 392502 - DNA, 15 bp, Homo sapiens
actggctccttccct

SEQ ID NO: 392503 - DNA, 15 bp, Homo sapiens
tactggctccttccc

SEQ ID NO: 392504 - DNA, 15 bp, Homo sapiens
ttactggctccttcc

SEQ ID NO: 392505 - DNA, 15 bp, Homo sapiens
tttactggctccttc

SEQ ID NO: 392506 - DNA, 15 bp, Homo sapiens
ttttactggctcctt

SEQ ID NO: 392507 - DNA, 15 bp, Homo sapiens
attttactggctcct

SEQ ID NO: 392508 - DNA, 15 bp, Homo sapiens
cattttactggctcc

SEQ ID NO: 392509 - DNA, 15 bp, Homo sapiens
ccattttactggctc

SEQ ID NO: 392510 - DNA, 15 bp, Homo sapiens
tccattttactggct

SEQ ID NO: 392511 - DNA, 15 bp, Homo sapiens
atccattttactggc

SEQ ID NO: 392512 - DNA, 15 bp, Homo sapiens
aatccattttactgg

SEQ ID NO: 392513 - DNA, 15 bp, Homo sapiens
taatccattttactg

SEQ ID NO: 392514 - DNA, 15 bp, Homo sapiens
ttaatccattttact

SEQ ID NO: 392515 - DNA, 15 bp, Homo sapiens
tttaatccattttac

SEQ ID NO: 392516 - DNA, 15 bp, Homo sapiens
ctttaatccatttta

SEQ ID NO: 392517 - DNA, 15 bp, Homo sapiens
gctttaatccatttt

SEQ ID NO: 392518 - DNA, 15 bp, Homo sapiens
agctttaatccattt

SEQ ID NO: 392519 - DNA, 15 bp, Homo sapiens
cagctttaatccatt

SEQ ID NO: 392520 - DNA, 15 bp, Homo sapiens
tcagctttaatccat

SEQ ID NO: 392521 - DNA, 15 bp, Homo sapiens
ttcagctttaatcca

SEQ ID NO: 392522 - DNA, 15 bp, Homo sapiens
cttcagctttaatcc

SEQ ID NO: 392523 - DNA, 15 bp, Homo sapiens
tcttcagctttaatc

SEQ ID NO: 392524 - DNA, 15 bp, Homo sapiens
ttcttcagctttaat

SEQ ID NO: 392525 - DNA, 15 bp, Homo sapiens
attcttcagctttaa

SEQ ID NO: 392526 - DNA, 15 bp, Homo sapiens
tattcttcagcttta

SEQ ID NO: 392527 - DNA, 15 bp, Homo sapiens
ttattcttcagcttt

SEQ ID NO: 392528 - DNA, 15 bp, Homo sapiens
tttattcttcagctt

SEQ ID NO: 392529 - DNA, 15 bp, Homo sapiens
gtttattcttcagct

SEQ ID NO: 392530 - DNA, 15 bp, Homo sapiens
tgtttattcttcagc

SEQ ID NO: 392531 - DNA, 15 bp, Homo sapiens
ttgtttattcttcag

SEQ ID NO: 392532 - DNA, 15 bp, Homo sapiens
cttgtttattcttca

SEQ ID NO: 392533 - DNA, 15 bp, Homo sapiens
ccttgtttattcttc

SEQ ID NO: 392534 - DNA, 15 bp, Homo sapiens
tccttgtttattctt

SEQ ID NO: 392535 - DNA, 15 bp, Homo sapiens
atccttgtttattct

SEQ ID NO: 392536 - DNA, 15 bp, Homo sapiens
aatccttgtttattc

SEQ ID NO: 392537 - DNA, 15 bp, Homo sapiens
taatccttgtttatt

SEQ ID NO: 392538 - DNA, 15 bp, Homo sapiens
ttaatccttgtttat

SEQ ID NO: 392539 - DNA, 15 bp, Homo sapiens
attaatccttgttta

SEQ ID NO: 392540 - DNA, 15 bp, Homo sapiens
aattaatccttgttt

SEQ ID NO: 392541 - DNA, 15 bp, Homo sapiens
taattaatccttgtt

SEQ ID NO: 392542 - DNA, 15 bp, Homo sapiens
ttaattaatccttgt

SEQ ID NO: 392543 - DNA, 15 bp, Homo sapiens
attaattaatccttg

SEQ ID NO: 392544 - DNA, 15 bp, Homo sapiens
gattaattaatcctt

SEQ ID NO: 392545 - DNA, 15 bp, Homo sapiens
tgattaattaatcct

SEQ ID NO: 392546 - DNA, 15 bp, Homo sapiens
ttgattaattaatcc

SEQ ID NO: 392547 - DNA, 15 bp, Homo sapiens
attgattaattaatc

SEQ ID NO: 392548 - DNA, 15 bp, Homo sapiens
gattgattaattaat

SEQ ID NO: 392549 - DNA, 15 bp, Homo sapiens
tgattgattaattaa

SEQ ID NO: 392550 - DNA, 15 bp, Homo sapiens
ttgattgattaatta

SEQ ID NO: 392551 - DNA, 15 bp, Homo sapiens
cttgattgattaatt

SEQ ID NO: 392552 - DNA, 15 bp, Homo sapiens
tcttgattgattaat

SEQ ID NO: 392553 - DNA, 15 bp, Homo sapiens
gtcttgattgattaa

SEQ ID NO: 392554 - DNA, 15 bp, Homo sapiens
ggtcttgattgatta

SEQ ID NO: 392555 - DNA, 15 bp, Homo sapiens
aggtcttgattgatt

SEQ ID NO: 392556 - DNA, 15 bp, Homo sapiens
gaggtcttgattgat

SEQ ID NO: 392557 - DNA, 15 bp, Homo sapiens
ggaggtcttgattga

SEQ ID NO: 392558 - DNA, 15 bp, Homo sapiens
tggaggtcttgattg

SEQ ID NO: 392559 - DNA, 15 bp, Homo sapiens
gtggaggtcttgatt

SEQ ID NO: 392560 - DNA, 15 bp, Homo sapiens
tgtggaggtcttgat

SEQ ID NO: 392561 - DNA, 15 bp, Homo sapiens
ctgtggaggtcttga

SEQ ID NO: 392562 - DNA, 15 bp, Homo sapiens
gctgtggaggtcttg

SEQ ID NO: 392563 - DNA, 15 bp, Homo sapiens
tgctgtggaggtctt

SEQ ID NO: 392564 - DNA, 15 bp, Homo sapiens
gtgctgtggaggtct

SEQ ID NO: 392565 - DNA, 15 bp, Homo sapiens
agtgctgtggaggtc

SEQ ID NO: 392566 - DNA, 15 bp, Homo sapiens
cagtgctgtggaggt

SEQ ID NO: 392567 - DNA, 15 bp, Homo sapiens
ccagtgctgtggagg

SEQ ID NO: 392568 - DNA, 15 bp, Homo sapiens
accagtgctgtggag

SEQ ID NO: 392569 - DNA, 15 bp, Homo sapiens
aaccagtgctgtgga

SEQ ID NO: 392570 - DNA, 15 bp, Homo sapiens
taaccagtgctgtgg

SEQ ID NO: 392571 - DNA, 15 bp, Homo sapiens
ataaccagtgctgtg

SEQ ID NO: 392572 - DNA, 15 bp, Homo sapiens
gataaccagtgctgt

SEQ ID NO: 392573 - DNA, 15 bp, Homo sapiens
tgataaccagtgctg

SEQ ID NO: 392574 - DNA, 15 bp, Homo sapiens
ttgataaccagtgct

SEQ ID NO: 392575 - DNA, 15 bp, Homo sapiens
gttgataaccagtgc

SEQ ID NO: 392576 - DNA, 15 bp, Homo sapiens
ggttgataaccagtg

SEQ ID NO: 392577 - DNA, 15 bp, Homo sapiens
gggttgataaccagt

SEQ ID NO: 392578 - DNA, 15 bp, Homo sapiens
agggttgataaccag

SEQ ID NO: 392579 - DNA, 15 bp, Homo sapiens
aagggttgataacca

SEQ ID NO: 392580 - DNA, 15 bp, Homo sapiens
aaagggttgataacc

SEQ ID NO: 392581 - DNA, 15 bp, Homo sapiens
gaaagggttgataac

SEQ ID NO: 392582 - DNA, 15 bp, Homo sapiens
agaaagggttgataa

SEQ ID NO: 392583 - DNA, 15 bp, Homo sapiens
aagaaagggttgata

SEQ ID NO: 392584 - DNA, 15 bp, Homo sapiens
taagaaagggttgat

SEQ ID NO: 392585 - DNA, 15 bp, Homo sapiens
ttaagaaagggttga

SEQ ID NO: 392586 - DNA, 15 bp, Homo sapiens
gttaagaaagggttg

SEQ ID NO: 392587 - DNA, 15 bp, Homo sapiens
tgttaagaaagggtt

SEQ ID NO: 392588 - DNA, 15 bp, Homo sapiens
atgttaagaaagggt

SEQ ID NO: 392589 - DNA, 15 bp, Homo sapiens
tatgttaagaaaggg

SEQ ID NO: 392590 - DNA, 15 bp, Homo sapiens
ttatgttaagaaagg

SEQ ID NO: 392591 - DNA, 15 bp, Homo sapiens
tttatgttaagaaag

SEQ ID NO: 392592 - DNA, 15 bp, Homo sapiens
ttttatgttaagaaa

SEQ ID NO: 392593 - DNA, 15 bp, Homo sapiens
gttttatgttaagaa

SEQ ID NO: 392594 - DNA, 15 bp, Homo sapiens
agttttatgttaaga

SEQ ID NO: 392595 - DNA, 15 bp, Homo sapiens
gagttttatgttaag

SEQ ID NO: 392596 - DNA, 15 bp, Homo sapiens
tgagttttatgttaa

SEQ ID NO: 392597 - DNA, 15 bp, Homo sapiens
gtgagttttatgtta

SEQ ID NO: 392598 - DNA, 15 bp, Homo sapiens
agtgagttttatgtt

SEQ ID NO: 392599 - DNA, 15 bp, Homo sapiens
aagtgagttttatgt

SEQ ID NO: 392600 - DNA, 15 bp, Homo sapiens
taagtgagttttatg

SEQ ID NO: 392601 - DNA, 15 bp, Homo sapiens
ctaagtgagttttat

SEQ ID NO: 392602 - DNA, 15 bp, Homo sapiens
cctaagtgagtttta

SEQ ID NO: 392603 - DNA, 15 bp, Homo sapiens
tcctaagtgagtttt

SEQ ID NO: 392604 - DNA, 15 bp, Homo sapiens
gtcctaagtgagttt

SEQ ID NO: 392605 - DNA, 15 bp, Homo sapiens
ggtcctaagtgagtt

SEQ ID NO: 392606 - DNA, 15 bp, Homo sapiens
gggtcctaagtgagt

SEQ ID NO: 392607 - DNA, 15 bp, Homo sapiens
agggtcctaagtgag

SEQ ID NO: 392608 - DNA, 15 bp, Homo sapiens
aagggtcctaagtga

SEQ ID NO: 392609 - DNA, 15 bp, Homo sapiens
taagggtcctaagtg

SEQ ID NO: 392610 - DNA, 15 bp, Homo sapiens
ataagggtcctaagt

SEQ ID NO: 392611 - DNA, 15 bp, Homo sapiens
aataagggtcctaag

SEQ ID NO: 392612 - DNA, 15 bp, Homo sapiens
taataagggtcctaa

SEQ ID NO: 392613 - DNA, 15 bp, Homo sapiens
ataataagggtccta

SEQ ID NO: 392614 - DNA, 15 bp, Homo sapiens
tataataagggtcct

SEQ ID NO: 392615 - DNA, 15 bp, Homo sapiens
ttataataagggtcc

SEQ ID NO: 392616 - DNA, 15 bp, Homo sapiens
attataataagggtc

SEQ ID NO: 392617 - DNA, 15 bp, Homo sapiens
tattataataagggt

SEQ ID NO: 392618 - DNA, 15 bp, Homo sapiens
gtattataataaggg

SEQ ID NO: 392619 - DNA, 15 bp, Homo sapiens
agtattataataagg

SEQ ID NO: 392620 - DNA, 15 bp, Homo sapiens
tagtattataataag

SEQ ID NO: 392621 - DNA, 15 bp, Homo sapiens
ttagtattataataa

SEQ ID NO: 392622 - DNA, 15 bp, Homo sapiens
gttagtattataata

SEQ ID NO: 392623 - DNA, 15 bp, Homo sapiens
tgttagtattataat

SEQ ID NO: 392624 - DNA, 15 bp, Homo sapiens
gtgttagtattataa

SEQ ID NO: 392625 - DNA, 15 bp, Homo sapiens
ggtgttagtattata

SEQ ID NO: 392626 - DNA, 15 bp, Homo sapiens
aggtgttagtattat

SEQ ID NO: 392627 - DNA, 15 bp, Homo sapiens
caggtgttagtatta

SEQ ID NO: 392628 - DNA, 15 bp, Homo sapiens
ccaggtgttagtatt

SEQ ID NO: 392629 - DNA, 15 bp, Homo sapiens
accaggtgttagtat

SEQ ID NO: 392630 - DNA, 15 bp, Homo sapiens
gaccaggtgttagta

SEQ ID NO: 392631 - DNA, 15 bp, Homo sapiens
ggaccaggtgttagt

SEQ ID NO: 392632 - DNA, 15 bp, Homo sapiens
aggaccaggtgttag

SEQ ID NO: 392633 - DNA, 15 bp, Homo sapiens
caggaccaggtgtta

SEQ ID NO: 392634 - DNA, 15 bp, Homo sapiens
tcaggaccaggtgtt

SEQ ID NO: 392635 - DNA, 15 bp, Homo sapiens
atcaggaccaggtgt

SEQ ID NO: 392636 - DNA, 15 bp, Homo sapiens
aatcaggaccaggtg

SEQ ID NO: 392637 - DNA, 15 bp, Homo sapiens
gaatcaggaccaggt

SEQ ID NO: 392638 - DNA, 15 bp, Homo sapiens
agaatcaggaccagg

SEQ ID NO: 392639 - DNA, 15 bp, Homo sapiens
cagaatcaggaccag

SEQ ID NO: 392640 - DNA, 15 bp, Homo sapiens
tcagaatcaggacca

SEQ ID NO: 392641 - DNA, 15 bp, Homo sapiens
atcagaatcaggacc

SEQ ID NO: 392642 - DNA, 15 bp, Homo sapiens
gatcagaatcaggac

SEQ ID NO: 392643 - DNA, 15 bp, Homo sapiens
tgatcagaatcagga

SEQ ID NO: 392644 - DNA, 15 bp, Homo sapiens
ctgatcagaatcagg

SEQ ID NO: 392645 - DNA, 15 bp, Homo sapiens
cctgatcagaatcag

SEQ ID NO: 392646 - DNA, 15 bp, Homo sapiens
tcctgatcagaatca

SEQ ID NO: 392647 - DNA, 15 bp, Homo sapiens
atcctgatcagaatc

SEQ ID NO: 392648 - DNA, 15 bp, Homo sapiens
aatcctgatcagaat

SEQ ID NO: 392649 - DNA, 15 bp, Homo sapiens
taatcctgatcagaa

SEQ ID NO: 392650 - DNA, 15 bp, Homo sapiens
ataatcctgatcaga

SEQ ID NO: 392651 - DNA, 15 bp, Homo sapiens
aataatcctgatcag

SEQ ID NO: 392652 - DNA, 15 bp, Homo sapiens
aaataatcctgatca

SEQ ID NO: 392653 - DNA, 15 bp, Homo sapiens
taaataatcctgatc

SEQ ID NO: 392654 - DNA, 15 bp, Homo sapiens
gtaaataatcctgat

SEQ ID NO: 392655 - DNA, 15 bp, Homo sapiens
agtaaataatcctga

SEQ ID NO: 392656 - DNA, 15 bp, Homo sapiens
tagtaaataatcctg

SEQ ID NO: 392657 - DNA, 15 bp, Homo sapiens
ctagtaaataatcct

SEQ ID NO: 392658 - DNA, 15 bp, Homo sapiens
actagtaaataatcc

SEQ ID NO: 392659 - DNA, 15 bp, Homo sapiens
aactagtaaataatc

SEQ ID NO: 392660 - DNA, 15 bp, Homo sapiens
aaactagtaaataat

SEQ ID NO: 392661 - DNA, 15 bp, Homo sapiens
aaaactagtaaataa

SEQ ID NO: 392662 - DNA, 15 bp, Homo sapiens
gaaaactagtaaata

SEQ ID NO: 392663 - DNA, 15 bp, Homo sapiens
ggaaaactagtaaat

SEQ ID NO: 392664 - DNA, 15 bp, Homo sapiens
gggaaaactagtaaa

SEQ ID NO: 392665 - DNA, 15 bp, Homo sapiens
tgggaaaactagtaa

SEQ ID NO: 392666 - DNA, 15 bp, Homo sapiens
ctgggaaaactagta

SEQ ID NO: 392667 - DNA, 15 bp, Homo sapiens
cctgggaaaactagt

SEQ ID NO: 392668 - DNA, 15 bp, Homo sapiens
acctgggaaaactag

SEQ ID NO: 392669 - DNA, 15 bp, Homo sapiens
cacctgggaaaacta

SEQ ID NO: 392670 - DNA, 15 bp, Homo sapiens
tcacctgggaaaact

SEQ ID NO: 392671 - DNA, 15 bp, Homo sapiens
atcacctgggaaaac

SEQ ID NO: 392672 - DNA, 15 bp, Homo sapiens
aatcacctgggaaaa

SEQ ID NO: 392673 - DNA, 15 bp, Homo sapiens
gaatcacctgggaaa

SEQ ID NO: 392674 - DNA, 15 bp, Homo sapiens
tgaatcacctgggaa

SEQ ID NO: 392675 - DNA, 15 bp, Homo sapiens
ttgaatcacctggga

SEQ ID NO: 392676 - DNA, 15 bp, Homo sapiens
tttgaatcacctggg

SEQ ID NO: 392677 - DNA, 15 bp, Homo sapiens
atttgaatcacctgg

SEQ ID NO: 392678 - DNA, 15 bp, Homo sapiens
gatttgaatcacctg

SEQ ID NO: 392679 - DNA, 15 bp, Homo sapiens
agatttgaatcacct

SEQ ID NO: 392680 - DNA, 15 bp, Homo sapiens
cagatttgaatcacc

SEQ ID NO: 392681 - DNA, 15 bp, Homo sapiens
acagatttgaatcac

SEQ ID NO: 392682 - DNA, 15 bp, Homo sapiens
tacagatttgaatca

SEQ ID NO: 392683 - DNA, 15 bp, Homo sapiens
atacagatttgaatc

SEQ ID NO: 392684 - DNA, 15 bp, Homo sapiens
gatacagatttgaat

SEQ ID NO: 392685 - DNA, 15 bp, Homo sapiens
agatacagatttgaa

SEQ ID NO: 392686 - DNA, 15 bp, Homo sapiens
tagatacagatttga

SEQ ID NO: 392687 - DNA, 15 bp, Homo sapiens
ctagatacagatttg

SEQ ID NO: 392688 - DNA, 15 bp, Homo sapiens
cctagatacagattt

SEQ ID NO: 392689 - DNA, 15 bp, Homo sapiens
acctagatacagatt

SEQ ID NO: 392690 - DNA, 15 bp, Homo sapiens
tacctagatacagat

SEQ ID NO: 392691 - DNA, 15 bp, Homo sapiens
atacctagatacaga

SEQ ID NO: 392692 - DNA, 15 bp, Homo sapiens
catacctagatacag

SEQ ID NO: 392693 - DNA, 15 bp, Homo sapiens
tcatacctagataca

SEQ ID NO: 392694 - DNA, 15 bp, Homo sapiens
ctcatacctagatac

SEQ ID NO: 392695 - DNA, 15 bp, Homo sapiens
tctcatacctagata

SEQ ID NO: 392696 - DNA, 15 bp, Homo sapiens
ctctcatacctagat

SEQ ID NO: 392697 - DNA, 15 bp, Homo sapiens
actctcatacctaga

SEQ ID NO: 392698 - DNA, 15 bp, Homo sapiens
gactctcatacctag

SEQ ID NO: 392699 - DNA, 15 bp, Homo sapiens
tgactctcataccta

SEQ ID NO: 392700 - DNA, 15 bp, Homo sapiens
gtgactctcatacct

SEQ ID NO: 392701 - DNA, 15 bp, Homo sapiens
agtgactctcatacc

SEQ ID NO: 392702 - DNA, 15 bp, Homo sapiens
aagtgactctcatac

SEQ ID NO: 392703 - DNA, 15 bp, Homo sapiens
taagtgactctcata

SEQ ID NO: 392704 - DNA, 15 bp, Homo sapiens
gtaagtgactctcat

SEQ ID NO: 392705 - DNA, 15 bp, Homo sapiens
agtaagtgactctca

SEQ ID NO: 392706 - DNA, 15 bp, Homo sapiens
aagtaagtgactctc

SEQ ID NO: 392707 - DNA, 15 bp, Homo sapiens
taagtaagtgactct

SEQ ID NO: 392708 - DNA, 15 bp, Homo sapiens
ctaagtaagtgactc

SEQ ID NO: 392709 - DNA, 15 bp, Homo sapiens
tctaagtaagtgact

SEQ ID NO: 392710 - DNA, 15 bp, Homo sapiens
ttctaagtaagtgac

SEQ ID NO: 392711 - DNA, 15 bp, Homo sapiens
cttctaagtaagtga

SEQ ID NO: 392712 - DNA, 15 bp, Homo sapiens
tcttctaagtaagtg

SEQ ID NO: 392713 - DNA, 15 bp, Homo sapiens
ttcttctaagtaagt

SEQ ID NO: 392714 - DNA, 15 bp, Homo sapiens
gttcttctaagtaag

SEQ ID NO: 392715 - DNA, 15 bp, Homo sapiens
agttcttctaagtaa

SEQ ID NO: 392716 - DNA, 15 bp, Homo sapiens
cagttcttctaagta

SEQ ID NO: 392717 - DNA, 15 bp, Homo sapiens
ccagttcttctaagt

SEQ ID NO: 392718 - DNA, 15 bp, Homo sapiens
tccagttcttctaag

SEQ ID NO: 392719 - DNA, 15 bp, Homo sapiens
gtccagttcttctaa

SEQ ID NO: 392720 - DNA, 15 bp, Homo sapiens
tgtccagttcttcta

SEQ ID NO: 392721 - DNA, 15 bp, Homo sapiens
atgtccagttcttct

SEQ ID NO: 392722 - DNA, 15 bp, Homo sapiens
aatgtccagttcttc

SEQ ID NO: 392723 - DNA, 15 bp, Homo sapiens
caatgtccagttctt

SEQ ID NO: 392724 - DNA, 15 bp, Homo sapiens
ccaatgtccagttct

SEQ ID NO: 392725 - DNA, 15 bp, Homo sapiens
tccaatgtccagttc

SEQ ID NO: 392726 - DNA, 15 bp, Homo sapiens
atccaatgtccagtt

SEQ ID NO: 392727 - DNA, 15 bp, Homo sapiens
aatccaatgtccagt

SEQ ID NO: 392728 - DNA, 15 bp, Homo sapiens
taatccaatgtccag

SEQ ID NO: 392729 - DNA, 15 bp, Homo sapiens
ttaatccaatgtcca

SEQ ID NO: 392730 - DNA, 15 bp, Homo sapiens
cttaatccaatgtcc

SEQ ID NO: 392731 - DNA, 15 bp, Homo sapiens
tcttaatccaatgtc

SEQ ID NO: 392732 - DNA, 15 bp, Homo sapiens
gtcttaatccaatgt

SEQ ID NO: 392733 - DNA, 15 bp, Homo sapiens
ggtcttaatccaatg

SEQ ID NO: 392734 - DNA, 15 bp, Homo sapiens
tggtcttaatccaat

SEQ ID NO: 392735 - DNA, 15 bp, Homo sapiens
gtggtcttaatccaa

SEQ ID NO: 392736 - DNA, 15 bp, Homo sapiens
agtggtcttaatcca

SEQ ID NO: 392737 - DNA, 15 bp, Homo sapiens
tagtggtcttaatcc

SEQ ID NO: 392738 - DNA, 15 bp, Homo sapiens
atagtggtcttaatc

SEQ ID NO: 392739 - DNA, 15 bp, Homo sapiens
tatagtggtcttaat

SEQ ID NO: 392740 - DNA, 15 bp, Homo sapiens
ctatagtggtcttaa

SEQ ID NO: 392741 - DNA, 15 bp, Homo sapiens
tctatagtggtctta

SEQ ID NO: 392742 - DNA, 15 bp, Homo sapiens
atctatagtggtctt

SEQ ID NO: 392743 - DNA, 15 bp, Homo sapiens
catctatagtggtct

SEQ ID NO: 392744 - DNA, 15 bp, Homo sapiens
ccatctatagtggtc

SEQ ID NO: 392745 - DNA, 15 bp, Homo sapiens
accatctatagtggt

SEQ ID NO: 392746 - DNA, 15 bp, Homo sapiens
aaccatctatagtgg

SEQ ID NO: 392747 - DNA, 15 bp, Homo sapiens
taaccatctatagtg

SEQ ID NO: 392748 - DNA, 15 bp, Homo sapiens
ataaccatctatagt

SEQ ID NO: 392749 - DNA, 15 bp, Homo sapiens
aataaccatctatag

SEQ ID NO: 392750 - DNA, 15 bp, Homo sapiens
aaataaccatctata

SEQ ID NO: 392751 - DNA, 15 bp, Homo sapiens
aaaataaccatctat

SEQ ID NO: 392752 - DNA, 15 bp, Homo sapiens
caaaataaccatcta

SEQ ID NO: 392753 - DNA, 15 bp, Homo sapiens
ccaaaataaccatct

SEQ ID NO: 392754 - DNA, 15 bp, Homo sapiens
cccaaaataaccatc

SEQ ID NO: 392755 - DNA, 15 bp, Homo sapiens
tcccaaaataaccat

SEQ ID NO: 392756 - DNA, 15 bp, Homo sapiens
atcccaaaataacca

SEQ ID NO: 392757 - DNA, 15 bp, Homo sapiens
catcccaaaataacc

SEQ ID NO: 392758 - DNA, 15 bp, Homo sapiens
tcatcccaaaataac

SEQ ID NO: 392759 - DNA, 15 bp, Homo sapiens
gtcatcccaaaataa

SEQ ID NO: 392760 - DNA, 15 bp, Homo sapiens
tgtcatcccaaaata

SEQ ID NO: 392761 - DNA, 15 bp, Homo sapiens
ttgtcatcccaaaat

SEQ ID NO: 392762 - DNA, 15 bp, Homo sapiens
tttgtcatcccaaaa

SEQ ID NO: 392763 - DNA, 15 bp, Homo sapiens
ctttgtcatcccaaa

SEQ ID NO: 392764 - DNA, 15 bp, Homo sapiens
cctttgtcatcccaa

SEQ ID NO: 392765 - DNA, 15 bp, Homo sapiens
gcctttgtcatccca

SEQ ID NO: 392766 - DNA, 15 bp, Homo sapiens
agcctttgtcatccc

SEQ ID NO: 392767 - DNA, 15 bp, Homo sapiens
gagcctttgtcatcc

SEQ ID NO: 392768 - DNA, 15 bp, Homo sapiens
agagcctttgtcatc

SEQ ID NO: 392769 - DNA, 15 bp, Homo sapiens
gagagcctttgtcat

SEQ ID NO: 392770 - DNA, 15 bp, Homo sapiens
agagagcctttgtca

SEQ ID NO: 392771 - DNA, 15 bp, Homo sapiens
aagagagcctttgtc

SEQ ID NO: 392772 - DNA, 15 bp, Homo sapiens
aaagagagcctttgt

SEQ ID NO: 392773 - DNA, 15 bp, Homo sapiens
aaaagagagcctttg

SEQ ID NO: 392774 - DNA, 15 bp, Homo sapiens
aaaaagagagccttt

SEQ ID NO: 392775 - DNA, 15 bp, Homo sapiens
gaaaaagagagcctt

SEQ ID NO: 392776 - DNA, 15 bp, Homo sapiens
ggaaaaagagagcct

SEQ ID NO: 392777 - DNA, 15 bp, Homo sapiens
aggaaaaagagagcc

SEQ ID NO: 392778 - DNA, 15 bp, Homo sapiens
gaggaaaaagagagc

SEQ ID NO: 392779 - DNA, 15 bp, Homo sapiens
agaggaaaaagagag

SEQ ID NO: 392780 - DNA, 15 bp, Homo sapiens
cagaggaaaaagaga

SEQ ID NO: 392781 - DNA, 15 bp, Homo sapiens
tcagaggaaaaagag

SEQ ID NO: 392782 - DNA, 15 bp, Homo sapiens
ctcagaggaaaaaga

SEQ ID NO: 392783 - DNA, 15 bp, Homo sapiens
tctcagaggaaaaag

SEQ ID NO: 392784 - DNA, 15 bp, Homo sapiens
atctcagaggaaaaa

SEQ ID NO: 392785 - DNA, 15 bp, Homo sapiens
catctcagaggaaaa

SEQ ID NO: 392786 - DNA, 15 bp, Homo sapiens
tcatctcagaggaaa

SEQ ID NO: 392787 - DNA, 15 bp, Homo sapiens
ctcatctcagaggaa

SEQ ID NO: 392788 - DNA, 15 bp, Homo sapiens
cctcatctcagagga

SEQ ID NO: 392789 - DNA, 15 bp, Homo sapiens
ccctcatctcagagg

SEQ ID NO: 392790 - DNA, 15 bp, Homo sapiens
accctcatctcagag

SEQ ID NO: 392791 - DNA, 15 bp, Homo sapiens
taccctcatctcaga

SEQ ID NO: 392792 - DNA, 15 bp, Homo sapiens
ctaccctcatctcag

SEQ ID NO: 392793 - DNA, 15 bp, Homo sapiens
actaccctcatctca

SEQ ID NO: 392794 - DNA, 15 bp, Homo sapiens
tactaccctcatctc

SEQ ID NO: 392795 - DNA, 15 bp, Homo sapiens
atactaccctcatct

SEQ ID NO: 392796 - DNA, 15 bp, Homo sapiens
tatactaccctcatc

SEQ ID NO: 392797 - DNA, 15 bp, Homo sapiens
ctatactaccctcat

SEQ ID NO: 392798 - DNA, 15 bp, Homo sapiens
actatactaccctca

SEQ ID NO: 392799 - DNA, 15 bp, Homo sapiens
tactatactaccctc

SEQ ID NO: 392800 - DNA, 15 bp, Homo sapiens
gtactatactaccct

SEQ ID NO: 392801 - DNA, 15 bp, Homo sapiens
ggtactatactaccc

SEQ ID NO: 392802 - DNA, 15 bp, Homo sapiens
cggtactatactacc

SEQ ID NO: 392803 - DNA, 15 bp, Homo sapiens
ccggtactatactac

SEQ ID NO: 392804 - DNA, 15 bp, Homo sapiens
cccggtactatacta

SEQ ID NO: 392805 - DNA, 15 bp, Homo sapiens
ccccggtactatact

SEQ ID NO: 392806 - DNA, 15 bp, Homo sapiens
accccggtactatac

SEQ ID NO: 392807 - DNA, 15 bp, Homo sapiens
caccccggtactata

SEQ ID NO: 392808 - DNA, 15 bp, Homo sapiens
ccaccccggtactat

SEQ ID NO: 392809 - DNA, 15 bp, Homo sapiens
gccaccccggtacta

SEQ ID NO: 392810 - DNA, 15 bp, Homo sapiens
cgccaccccggtact

SEQ ID NO: 392811 - DNA, 15 bp, Homo sapiens
ccgccaccccggtac

SEQ ID NO: 392812 - DNA, 15 bp, Homo sapiens
tccgccaccccggta

SEQ ID NO: 392813 - DNA, 15 bp, Homo sapiens
ctccgccaccccggt

SEQ ID NO: 392814 - DNA, 15 bp, Homo sapiens
actccgccaccccgg

SEQ ID NO: 392815 - DNA, 15 bp, Homo sapiens
tactccgccaccccg

SEQ ID NO: 392816 - DNA, 15 bp, Homo sapiens
ttactccgccacccc

SEQ ID NO: 392817 - DNA, 15 bp, Homo sapiens
cttactccgccaccc

SEQ ID NO: 392818 - DNA, 15 bp, Homo sapiens
tcttactccgccacc

SEQ ID NO: 392819 - DNA, 15 bp, Homo sapiens
ttcttactccgccac

SEQ ID NO: 392820 - DNA, 15 bp, Homo sapiens
tttcttactccgcca

SEQ ID NO: 392821 - DNA, 15 bp, Homo sapiens
ttttcttactccgcc

SEQ ID NO: 392822 - DNA, 15 bp, Homo sapiens
cttttcttactccgc

SEQ ID NO: 392823 - DNA, 15 bp, Homo sapiens
ccttttcttactccg

SEQ ID NO: 392824 - DNA, 15 bp, Homo sapiens
tccttttcttactcc

SEQ ID NO: 392825 - DNA, 15 bp, Homo sapiens
atccttttcttactc

SEQ ID NO: 392826 - DNA, 15 bp, Homo sapiens
catccttttcttact

SEQ ID NO: 392827 - DNA, 15 bp, Homo sapiens
tcatccttttcttac

SEQ ID NO: 392828 - DNA, 15 bp, Homo sapiens
ttcatccttttctta

SEQ ID NO: 392829 - DNA, 15 bp, Homo sapiens
attcatccttttctt

SEQ ID NO: 392830 - DNA, 15 bp, Homo sapiens
aattcatccttttct

SEQ ID NO: 392831 - DNA, 15 bp, Homo sapiens
taattcatccttttc

SEQ ID NO: 392832 - DNA, 15 bp, Homo sapiens
ttaattcatcctttt

SEQ ID NO: 392833 - DNA, 15 bp, Homo sapiens
cttaattcatccttt

SEQ ID NO: 392834 - DNA, 15 bp, Homo sapiens
tcttaattcatcctt

SEQ ID NO: 392835 - DNA, 15 bp, Homo sapiens
ctcttaattcatcct

SEQ ID NO: 392836 - DNA, 15 bp, Homo sapiens
gctcttaattcatcc

SEQ ID NO: 392837 - DNA, 15 bp, Homo sapiens
cgctcttaattcatc

SEQ ID NO: 392838 - DNA, 15 bp, Homo sapiens
ccgctcttaattcat

SEQ ID NO: 392839 - DNA, 15 bp, Homo sapiens
tccgctcttaattca

SEQ ID NO: 392840 - DNA, 15 bp, Homo sapiens
ttccgctcttaattc

SEQ ID NO: 392841 - DNA, 15 bp, Homo sapiens
tttccgctcttaatt

SEQ ID NO: 392842 - DNA, 15 bp, Homo sapiens
gtttccgctcttaat

SEQ ID NO: 392843 - DNA, 15 bp, Homo sapiens
tgtttccgctcttaa

SEQ ID NO: 392844 - DNA, 15 bp, Homo sapiens
atgtttccgctctta

SEQ ID NO: 392845 - DNA, 15 bp, Homo sapiens
aatgtttccgctctt

SEQ ID NO: 392846 - DNA, 15 bp, Homo sapiens
aaatgtttccgctct

SEQ ID NO: 392847 - DNA, 15 bp, Homo sapiens
taaatgtttccgctc

SEQ ID NO: 392848 - DNA, 15 bp, Homo sapiens
ctaaatgtttccgct

SEQ ID NO: 392849 - DNA, 15 bp, Homo sapiens
tctaaatgtttccgc

SEQ ID NO: 392850 - DNA, 15 bp, Homo sapiens
ttctaaatgtttccg

SEQ ID NO: 392851 - DNA, 15 bp, Homo sapiens
tttctaaatgtttcc

SEQ ID NO: 392852 - DNA, 15 bp, Homo sapiens
ctttctaaatgtttc

SEQ ID NO: 392853 - DNA, 15 bp, Homo sapiens
tctttctaaatgttt

SEQ ID NO: 392854 - DNA, 15 bp, Homo sapiens
gtctttctaaatgtt

SEQ ID NO: 392855 - DNA, 15 bp, Homo sapiens
agtctttctaaatgt

SEQ ID NO: 392856 - DNA, 15 bp, Homo sapiens
aagtctttctaaatg

SEQ ID NO: 392857 - DNA, 15 bp, Homo sapiens
aaagtctttctaaat

SEQ ID NO: 392858 - DNA, 15 bp, Homo sapiens
caaagtctttctaaa

SEQ ID NO: 392859 - DNA, 15 bp, Homo sapiens
tcaaagtctttctaa

SEQ ID NO: 392860 - DNA, 15 bp, Homo sapiens
ttcaaagtctttcta

SEQ ID NO: 392861 - DNA, 15 bp, Homo sapiens
tttcaaagtctttct

SEQ ID NO: 392862 - DNA, 15 bp, Homo sapiens
ctttcaaagtctttc

SEQ ID NO: 392863 - DNA, 15 bp, Homo sapiens
cctttcaaagtcttt

SEQ ID NO: 392864 - DNA, 15 bp, Homo sapiens
tcctttcaaagtctt

SEQ ID NO: 392865 - DNA, 15 bp, Homo sapiens
gtcctttcaaagtct

SEQ ID NO: 392866 - DNA, 15 bp, Homo sapiens
agtcctttcaaagtc

SEQ ID NO: 392867 - DNA, 15 bp, Homo sapiens
gagtcctttcaaagt

SEQ ID NO: 392868 - DNA, 15 bp, Homo sapiens
ggagtcctttcaaag

SEQ ID NO: 392869 - DNA, 15 bp, Homo sapiens
aggagtcctttcaaa

SEQ ID NO: 392870 - DNA, 15 bp, Homo sapiens
caggagtcctttcaa

SEQ ID NO: 392871 - DNA, 15 bp, Homo sapiens
tcaggagtcctttca

SEQ ID NO: 392872 - DNA, 15 bp, Homo sapiens
atcaggagtcctttc

SEQ ID NO: 392873 - DNA, 15 bp, Homo sapiens
catcaggagtccttt

SEQ ID NO: 392874 - DNA, 15 bp, Homo sapiens
tcatcaggagtcctt

SEQ ID NO: 392875 - DNA, 15 bp, Homo sapiens
ttcatcaggagtcct

SEQ ID NO: 392876 - DNA, 15 bp, Homo sapiens
attcatcaggagtcc

SEQ ID NO: 392877 - DNA, 15 bp, Homo sapiens
cattcatcaggagtc

SEQ ID NO: 392878 - DNA, 15 bp, Homo sapiens
ccattcatcaggagt

SEQ ID NO: 392879 - DNA, 15 bp, Homo sapiens
gccattcatcaggag

SEQ ID NO: 392880 - DNA, 15 bp, Homo sapiens
agccattcatcagga

SEQ ID NO: 392881 - DNA, 15 bp, Homo sapiens
aagccattcatcagg

SEQ ID NO: 392882 - DNA, 15 bp, Homo sapiens
gaagccattcatcag

SEQ ID NO: 392883 - DNA, 15 bp, Homo sapiens
cgaagccattcatca

SEQ ID NO: 392884 - DNA, 15 bp, Homo sapiens
tcgaagccattcatc

SEQ ID NO: 392885 - DNA, 15 bp, Homo sapiens
ttcgaagccattcat

SEQ ID NO: 392886 - DNA, 15 bp, Homo sapiens
gttcgaagccattca

SEQ ID NO: 392887 - DNA, 15 bp, Homo sapiens
agttcgaagccattc

SEQ ID NO: 392888 - DNA, 15 bp, Homo sapiens
cagttcgaagccatt

SEQ ID NO: 392889 - DNA, 15 bp, Homo sapiens
tcagttcgaagccat

SEQ ID NO: 392890 - DNA, 15 bp, Homo sapiens
ctcagttcgaagcca

SEQ ID NO: 392891 - DNA, 15 bp, Homo sapiens
tctcagttcgaagcc

SEQ ID NO: 392892 - DNA, 15 bp, Homo sapiens
ttctcagttcgaagc

SEQ ID NO: 392893 - DNA, 15 bp, Homo sapiens
tttctcagttcgaag

SEQ ID NO: 392894 - DNA, 15 bp, Homo sapiens
ctttctcagttcgaa

SEQ ID NO: 392895 - DNA, 15 bp, Homo sapiens
actttctcagttcga

SEQ ID NO: 392896 - DNA, 15 bp, Homo sapiens
tactttctcagttcg

SEQ ID NO: 392897 - DNA, 15 bp, Homo sapiens
ctactttctcagttc

SEQ ID NO: 392898 - DNA, 15 bp, Homo sapiens
tctactttctcagtt

SEQ ID NO: 392899 - DNA, 15 bp, Homo sapiens
ttctactttctcagt

SEQ ID NO: 392900 - DNA, 15 bp, Homo sapiens
cttctactttctcag

SEQ ID NO: 392901 - DNA, 15 bp, Homo sapiens
ccttctactttctca

SEQ ID NO: 392902 - DNA, 15 bp, Homo sapiens
accttctactttctc

SEQ ID NO: 392903 - DNA, 15 bp, Homo sapiens
caccttctactttct

SEQ ID NO: 392904 - DNA, 15 bp, Homo sapiens
tcaccttctactttc

SEQ ID NO: 392905 - DNA, 15 bp, Homo sapiens
ctcaccttctacttt

SEQ ID NO: 392906 - DNA, 15 bp, Homo sapiens
tctcaccttctactt

SEQ ID NO: 392907 - DNA, 15 bp, Homo sapiens
atctcaccttctact

SEQ ID NO: 392908 - DNA, 15 bp, Homo sapiens
catctcaccttctac

SEQ ID NO: 392909 - DNA, 15 bp, Homo sapiens
gcatctcaccttcta

SEQ ID NO: 392910 - DNA, 15 bp, Homo sapiens
agcatctcaccttct

SEQ ID NO: 392911 - DNA, 15 bp, Homo sapiens
aagcatctcaccttc

SEQ ID NO: 392912 - DNA, 15 bp, Homo sapiens
taagcatctcacctt

SEQ ID NO: 392913 - DNA, 15 bp, Homo sapiens
gtaagcatctcacct

SEQ ID NO: 392914 - DNA, 15 bp, Homo sapiens
tgtaagcatctcacc

SEQ ID NO: 392915 - DNA, 15 bp, Homo sapiens
atgtaagcatctcac

SEQ ID NO: 392916 - DNA, 15 bp, Homo sapiens
aatgtaagcatctca

SEQ ID NO: 392917 - DNA, 15 bp, Homo sapiens
caatgtaagcatctc

SEQ ID NO: 392918 - DNA, 15 bp, Homo sapiens
tcaatgtaagcatct

SEQ ID NO: 392919 - DNA, 15 bp, Homo sapiens
ctcaatgtaagcatc

SEQ ID NO: 392920 - DNA, 15 bp, Homo sapiens
cctcaatgtaagcat

SEQ ID NO: 392921 - DNA, 15 bp, Homo sapiens
ccctcaatgtaagca

SEQ ID NO: 392922 - DNA, 15 bp, Homo sapiens
accctcaatgtaagc

SEQ ID NO: 392923 - DNA, 15 bp, Homo sapiens
caccctcaatgtaag

SEQ ID NO: 392924 - DNA, 15 bp, Homo sapiens
gcaccctcaatgtaa

SEQ ID NO: 392925 - DNA, 15 bp, Homo sapiens
tgcaccctcaatgta

SEQ ID NO: 392926 - DNA, 15 bp, Homo sapiens
ttgcaccctcaatgt

SEQ ID NO: 392927 - DNA, 15 bp, Homo sapiens
tttgcaccctcaatg

SEQ ID NO: 392928 - DNA, 15 bp, Homo sapiens
ttttgcaccctcaat

SEQ ID NO: 392929 - DNA, 15 bp, Homo sapiens
cttttgcaccctcaa

SEQ ID NO: 392930 - DNA, 15 bp, Homo sapiens
acttttgcaccctca

SEQ ID NO: 392931 - DNA, 15 bp, Homo sapiens
tacttttgcaccctc

SEQ ID NO: 392932 - DNA, 15 bp, Homo sapiens
ttacttttgcaccct

SEQ ID NO: 392933 - DNA, 15 bp, Homo sapiens
cttacttttgcaccc

SEQ ID NO: 392934 - DNA, 15 bp, Homo sapiens
tcttacttttgcacc

SEQ ID NO: 392935 - DNA, 15 bp, Homo sapiens
gtcttacttttgcac

SEQ ID NO: 392936 - DNA, 15 bp, Homo sapiens
agtcttacttttgca

SEQ ID NO: 392937 - DNA, 15 bp, Homo sapiens
cagtcttacttttgc

SEQ ID NO: 392938 - DNA, 15 bp, Homo sapiens
ccagtcttacttttg

SEQ ID NO: 392939 - DNA, 15 bp, Homo sapiens
cccagtcttactttt

SEQ ID NO: 392940 - DNA, 15 bp, Homo sapiens
gcccagtcttacttt

SEQ ID NO: 392941 - DNA, 15 bp, Homo sapiens
ggcccagtcttactt

SEQ ID NO: 392942 - DNA, 15 bp, Homo sapiens
tggcccagtcttact

SEQ ID NO: 392943 - DNA, 15 bp, Homo sapiens
atggcccagtcttac

SEQ ID NO: 392944 - DNA, 15 bp, Homo sapiens
aatggcccagtctta

SEQ ID NO: 392945 - DNA, 15 bp, Homo sapiens
taatggcccagtctt

SEQ ID NO: 392946 - DNA, 15 bp, Homo sapiens
ttaatggcccagtct

SEQ ID NO: 392947 - DNA, 15 bp, Homo sapiens
tttaatggcccagtc

SEQ ID NO: 392948 - DNA, 15 bp, Homo sapiens
ctttaatggcccagt

SEQ ID NO: 392949 - DNA, 15 bp, Homo sapiens
tctttaatggcccag

SEQ ID NO: 392950 - DNA, 15 bp, Homo sapiens
ttctttaatggccca

SEQ ID NO: 392951 - DNA, 15 bp, Homo sapiens
tttctttaatggccc

SEQ ID NO: 392952 - DNA, 15 bp, Homo sapiens
atttctttaatggcc

SEQ ID NO: 392953 - DNA, 15 bp, Homo sapiens
aatttctttaatggc

SEQ ID NO: 392954 - DNA, 15 bp, Homo sapiens
aaatttctttaatgg

SEQ ID NO: 392955 - DNA, 15 bp, Homo sapiens
taaatttctttaatg

SEQ ID NO: 392956 - DNA, 15 bp, Homo sapiens
ttaaatttctttaat

SEQ ID NO: 392957 - DNA, 15 bp, Homo sapiens
tttaaatttctttaa

SEQ ID NO: 392958 - DNA, 15 bp, Homo sapiens
ctttaaatttcttta

SEQ ID NO: 392959 - DNA, 15 bp, Homo sapiens
gctttaaatttcttt

SEQ ID NO: 392960 - DNA, 15 bp, Homo sapiens
tgctttaaatttctt

SEQ ID NO: 392961 - DNA, 15 bp, Homo sapiens
atgctttaaatttct

SEQ ID NO: 392962 - DNA, 15 bp, Homo sapiens
aatgctttaaatttc

SEQ ID NO: 392963 - DNA, 15 bp, Homo sapiens
gaatgctttaaattt

SEQ ID NO: 392964 - DNA, 15 bp, Homo sapiens
ggaatgctttaaatt

SEQ ID NO: 392965 - DNA, 15 bp, Homo sapiens
cggaatgctttaaat

SEQ ID NO: 392966 - DNA, 15 bp, Homo sapiens
tcggaatgctttaaa

SEQ ID NO: 392967 - DNA, 15 bp, Homo sapiens
ttcggaatgctttaa

SEQ ID NO: 392968 - DNA, 15 bp, Homo sapiens
attcggaatgcttta

SEQ ID NO: 392969 - DNA, 15 bp, Homo sapiens
tattcggaatgcttt

SEQ ID NO: 392970 - DNA, 15 bp, Homo sapiens
ttattcggaatgctt

SEQ ID NO: 392971 - DNA, 15 bp, Homo sapiens
tgcactcttacattc

SEQ ID NO: 392972 - DNA, 15 bp, Homo sapiens
ctgcactcttacatt

SEQ ID NO: 392973 - DNA, 15 bp, Homo sapiens
cctgcactcttacat

SEQ ID NO: 392974 - DNA, 15 bp, Homo sapiens
acctgcactcttaca

SEQ ID NO: 392975 - DNA, 15 bp, Homo sapiens
cacctgcactcttac

SEQ ID NO: 392976 - DNA, 15 bp, Homo sapiens
ccacctgcactctta

SEQ ID NO: 392977 - DNA, 15 bp, Homo sapiens
tccacctgcactctt

SEQ ID NO: 392978 - DNA, 15 bp, Homo sapiens
ttccacctgcactct

SEQ ID NO: 392979 - DNA, 15 bp, Homo sapiens
gttccacctgcactc

SEQ ID NO: 392980 - DNA, 15 bp, Homo sapiens
cgttccacctgcact

SEQ ID NO: 392981 - DNA, 15 bp, Homo sapiens
gcgttccacctgcac

SEQ ID NO: 392982 - DNA, 15 bp, Homo sapiens
cgcgttccacctgca

SEQ ID NO: 392983 - DNA, 15 bp, Homo sapiens
tcgcgttccacctgc

SEQ ID NO: 392984 - DNA, 15 bp, Homo sapiens
ttcgcgttccacctg

SEQ ID NO: 392985 - DNA, 15 bp, Homo sapiens
cttcgcgttccacct

SEQ ID NO: 392986 - DNA, 15 bp, Homo sapiens
ccttcgcgttccacc

SEQ ID NO: 392987 - DNA, 15 bp, Homo sapiens
accttcgcgttccac

SEQ ID NO: 392988 - DNA, 15 bp, Homo sapiens
taccttcgcgttcca

SEQ ID NO: 392989 - DNA, 15 bp, Homo sapiens
ttaccttcgcgttcc

SEQ ID NO: 392990 - DNA, 15 bp, Homo sapiens
attaccttcgcgttc

SEQ ID NO: 392991 - DNA, 15 bp, Homo sapiens
tattaccttcgcgtt

SEQ ID NO: 392992 - DNA, 15 bp, Homo sapiens
gtattaccttcgcgt

SEQ ID NO: 392993 - DNA, 15 bp, Homo sapiens
tgtattaccttcgcg

SEQ ID NO: 392994 - DNA, 15 bp, Homo sapiens
ctgtattaccttcgc

SEQ ID NO: 392995 - DNA, 15 bp, Homo sapiens
tctgtattaccttcg

SEQ ID NO: 392996 - DNA, 15 bp, Homo sapiens
atctgtattaccttc

SEQ ID NO: 392997 - DNA, 15 bp, Homo sapiens
catctgtattacctt

SEQ ID NO: 392998 - DNA, 15 bp, Homo sapiens
tcatctgtattacct

SEQ ID NO: 392999 - DNA, 15 bp, Homo sapiens
ctcatctgtattacc

SEQ ID NO: 393000 - DNA, 15 bp, Homo sapiens
gctcatctgtattac

SEQ ID NO: 393001 - DNA, 15 bp, Homo sapiens
agctcatctgtatta

SEQ ID NO: 393002 - DNA, 15 bp, Homo sapiens
aagctcatctgtatt

SEQ ID NO: 393003 - DNA, 15 bp, Homo sapiens
gaagctcatctgtat

SEQ ID NO: 393004 - DNA, 15 bp, Homo sapiens
agaagctcatctgta

SEQ ID NO: 393005 - DNA, 15 bp, Homo sapiens
cagaagctcatctgt

SEQ ID NO: 393006 - DNA, 15 bp, Homo sapiens
gcagaagctcatctg

SEQ ID NO: 393007 - DNA, 15 bp, Homo sapiens
ggcagaagctcatct

SEQ ID NO: 393008 - DNA, 15 bp, Homo sapiens
aggcagaagctcatc

SEQ ID NO: 393009 - DNA, 15 bp, Homo sapiens
gaggcagaagctcat

SEQ ID NO: 393010 - DNA, 15 bp, Homo sapiens
ggaggcagaagctca

SEQ ID NO: 393011 - DNA, 15 bp, Homo sapiens
gggaggcagaagctc

SEQ ID NO: 393012 - DNA, 15 bp, Homo sapiens
tgggaggcagaagct

SEQ ID NO: 393013 - DNA, 15 bp, Homo sapiens
gtgggaggcagaagc

SEQ ID NO: 393014 - DNA, 15 bp, Homo sapiens
tgtgggaggcagaag

SEQ ID NO: 393015 - DNA, 15 bp, Homo sapiens
ttgtgggaggcagaa

SEQ ID NO: 393016 - DNA, 15 bp, Homo sapiens
cttgtgggaggcaga

SEQ ID NO: 393017 - DNA, 15 bp, Homo sapiens
tcttgtgggaggcag

SEQ ID NO: 393018 - DNA, 15 bp, Homo sapiens
ctcttgtgggaggca

SEQ ID NO: 393019 - DNA, 15 bp, Homo sapiens
tctcttgtgggaggc

SEQ ID NO: 393020 - DNA, 15 bp, Homo sapiens
ctctcttgtgggagg

SEQ ID NO: 393021 - DNA, 15 bp, Homo sapiens
gctctcttgtgggag

SEQ ID NO: 393022 - DNA, 15 bp, Homo sapiens
tgctctcttgtggga

SEQ ID NO: 393023 - DNA, 15 bp, Homo sapiens
ttgctctcttgtggg

SEQ ID NO: 393024 - DNA, 15 bp, Homo sapiens
gttgctctcttgtgg

SEQ ID NO: 393025 - DNA, 15 bp, Homo sapiens
ggttgctctcttgtg

SEQ ID NO: 393026 - DNA, 15 bp, Homo sapiens
tggttgctctcttgt

SEQ ID NO: 393027 - DNA, 15 bp, Homo sapiens
gtggttgctctcttg

SEQ ID NO: 393028 - DNA, 15 bp, Homo sapiens
tgtggttgctctctt

SEQ ID NO: 393029 - DNA, 15 bp, Homo sapiens
atgtggttgctctct

SEQ ID NO: 393030 - DNA, 15 bp, Homo sapiens
gatgtggttgctctc

SEQ ID NO: 393031 - DNA, 15 bp, Homo sapiens
agatgtggttgctct

SEQ ID NO: 393032 - DNA, 15 bp, Homo sapiens
cagatgtggttgctc

SEQ ID NO: 393033 - DNA, 15 bp, Homo sapiens
acagatgtggttgct

SEQ ID NO: 393034 - DNA, 15 bp, Homo sapiens
aacagatgtggttgc

SEQ ID NO: 393035 - DNA, 15 bp, Homo sapiens
aaacagatgtggttg

SEQ ID NO: 393036 - DNA, 15 bp, Homo sapiens
aaaacagatgtggtt

SEQ ID NO: 393037 - DNA, 15 bp, Homo sapiens
gaaaacagatgtggt

SEQ ID NO: 393038 - DNA, 15 bp, Homo sapiens
ggaaaacagatgtgg

SEQ ID NO: 393039 - DNA, 15 bp, Homo sapiens
aggaaaacagatgtg

SEQ ID NO: 393040 - DNA, 15 bp, Homo sapiens
taggaaaacagatgt

SEQ ID NO: 393041 - DNA, 15 bp, Homo sapiens
ttaggaaaacagatg

SEQ ID NO: 393042 - DNA, 15 bp, Homo sapiens
cttaggaaaacagat

SEQ ID NO: 393043 - DNA, 15 bp, Homo sapiens
gcttaggaaaacaga

SEQ ID NO: 393044 - DNA, 15 bp, Homo sapiens
ggcttaggaaaacag

SEQ ID NO: 393045 - DNA, 15 bp, Homo sapiens
tggcttaggaaaaca

SEQ ID NO: 393046 - DNA, 15 bp, Homo sapiens
ctggcttaggaaaac

SEQ ID NO: 393047 - DNA, 15 bp, Homo sapiens
tctggcttaggaaaa

SEQ ID NO: 393048 - DNA, 15 bp, Homo sapiens
ctctggcttaggaaa

SEQ ID NO: 393049 - DNA, 15 bp, Homo sapiens
cctctggcttaggaa

SEQ ID NO: 393050 - DNA, 15 bp, Homo sapiens
acctctggcttagga

SEQ ID NO: 393051 - DNA, 15 bp, Homo sapiens
gacctctggcttagg

SEQ ID NO: 393052 - DNA, 15 bp, Homo sapiens
ggacctctggcttag

SEQ ID NO: 393053 - DNA, 15 bp, Homo sapiens
tggacctctggctta

SEQ ID NO: 393054 - DNA, 15 bp, Homo sapiens
atggacctctggctt

SEQ ID NO: 393055 - DNA, 15 bp, Homo sapiens
aatggacctctggct

SEQ ID NO: 393056 - DNA, 15 bp, Homo sapiens
caatggacctctggc

SEQ ID NO: 393057 - DNA, 15 bp, Homo sapiens
tcaatggacctctgg

SEQ ID NO: 393058 - DNA, 15 bp, Homo sapiens
ctcaatggacctctg

SEQ ID NO: 393059 - DNA, 15 bp, Homo sapiens
cctcaatggacctct

SEQ ID NO: 393060 - DNA, 15 bp, Homo sapiens
tcctcaatggacctc

SEQ ID NO: 393061 - DNA, 15 bp, Homo sapiens
gtcctcaatggacct

SEQ ID NO: 393062 - DNA, 15 bp, Homo sapiens
tgtcctcaatggacc

SEQ ID NO: 393063 - DNA, 15 bp, Homo sapiens
ttgtcctcaatggac

SEQ ID NO: 393064 - DNA, 15 bp, Homo sapiens
tttgtcctcaatgga

SEQ ID NO: 393065 - DNA, 15 bp, Homo sapiens
ctttgtcctcaatgg

SEQ ID NO: 393066 - DNA, 15 bp, Homo sapiens
tctttgtcctcaatg

SEQ ID NO: 393067 - DNA, 15 bp, Homo sapiens
gtctttgtcctcaat

SEQ ID NO: 393068 - DNA, 15 bp, Homo sapiens
tgtctttgtcctcaa

SEQ ID NO: 393069 - DNA, 15 bp, Homo sapiens
atgtctttgtcctca

SEQ ID NO: 393070 - DNA, 15 bp, Homo sapiens
gatgtctttgtcctc

SEQ ID NO: 393071 - DNA, 15 bp, Homo sapiens
tgatgtctttgtcct

SEQ ID NO: 393072 - DNA, 15 bp, Homo sapiens
atgatgtctttgtcc

SEQ ID NO: 393073 - DNA, 15 bp, Homo sapiens
aatgatgtctttgtc

SEQ ID NO: 393074 - DNA, 15 bp, Homo sapiens
aaatgatgtctttgt

SEQ ID NO: 393075 - DNA, 15 bp, Homo sapiens
taaatgatgtctttg

SEQ ID NO: 393076 - DNA, 15 bp, Homo sapiens
ttaaatgatgtcttt

SEQ ID NO: 393077 - DNA, 15 bp, Homo sapiens
attaaatgatgtctt

SEQ ID NO: 393078 - DNA, 15 bp, Homo sapiens
tattaaatgatgtct

SEQ ID NO: 393079 - DNA, 15 bp, Homo sapiens
gtattaaatgatgtc

SEQ ID NO: 393080 - DNA, 15 bp, Homo sapiens
agtattaaatgatgt

SEQ ID NO: 393081 - DNA, 15 bp, Homo sapiens
aagtattaaatgatg

SEQ ID NO: 393082 - DNA, 15 bp, Homo sapiens
taagtattaaatgat

SEQ ID NO: 393083 - DNA, 15 bp, Homo sapiens
ataagtattaaatga

SEQ ID NO: 393084 - DNA, 15 bp, Homo sapiens
cataagtattaaatg

SEQ ID NO: 393085 - DNA, 15 bp, Homo sapiens
ccataagtattaaat

SEQ ID NO: 393086 - DNA, 15 bp, Homo sapiens
accataagtattaaa

SEQ ID NO: 393087 - DNA, 15 bp, Homo sapiens
aaccataagtattaa

SEQ ID NO: 393088 - DNA, 15 bp, Homo sapiens
taaccataagtatta

SEQ ID NO: 393089 - DNA, 15 bp, Homo sapiens
ataaccataagtatt

SEQ ID NO: 393090 - DNA, 15 bp, Homo sapiens
gataaccataagtat

SEQ ID NO: 393091 - DNA, 15 bp, Homo sapiens
agataaccataagta

SEQ ID NO: 393092 - DNA, 15 bp, Homo sapiens
gagataaccataagt

SEQ ID NO: 393093 - DNA, 15 bp, Homo sapiens
tgagataaccataag

SEQ ID NO: 393094 - DNA, 15 bp, Homo sapiens
gtgagataaccataa

SEQ ID NO: 393095 - DNA, 15 bp, Homo sapiens
tgtgagataaccata

SEQ ID NO: 393096 - DNA, 15 bp, Homo sapiens
gtgtgagataaccat

SEQ ID NO: 393097 - DNA, 15 bp, Homo sapiens
agtgtgagataacca

SEQ ID NO: 393098 - DNA, 15 bp, Homo sapiens
gagtgtgagataacc

SEQ ID NO: 393099 - DNA, 15 bp, Homo sapiens
agagtgtgagataac

SEQ ID NO: 393100 - DNA, 15 bp, Homo sapiens
gagagtgtgagataa

SEQ ID NO: 393101 - DNA, 15 bp, Homo sapiens
agagagtgtgagata

SEQ ID NO: 393102 - DNA, 15 bp, Homo sapiens
aagagagtgtgagat

SEQ ID NO: 393103 - DNA, 15 bp, Homo sapiens
taagagagtgtgaga

SEQ ID NO: 393104 - DNA, 15 bp, Homo sapiens
ttaagagagtgtgag

SEQ ID NO: 393105 - DNA, 15 bp, Homo sapiens
cttaagagagtgtga

SEQ ID NO: 393106 - DNA, 15 bp, Homo sapiens
ccttaagagagtgtg

SEQ ID NO: 393107 - DNA, 15 bp, Homo sapiens
tccttaagagagtgt

SEQ ID NO: 393108 - DNA, 15 bp, Homo sapiens
ttccttaagagagtg

SEQ ID NO: 393109 - DNA, 15 bp, Homo sapiens
attccttaagagagt

SEQ ID NO: 393110 - DNA, 15 bp, Homo sapiens
cattccttaagagag

SEQ ID NO: 393111 - DNA, 15 bp, Homo sapiens
tcattccttaagaga

SEQ ID NO: 393112 - DNA, 15 bp, Homo sapiens
atcattccttaagag

SEQ ID NO: 393113 - DNA, 15 bp, Homo sapiens
catcattccttaaga

SEQ ID NO: 393114 - DNA, 15 bp, Homo sapiens
gcatcattccttaag

SEQ ID NO: 393115 - DNA, 15 bp, Homo sapiens
cgcatcattccttaa

SEQ ID NO: 393116 - DNA, 15 bp, Homo sapiens
acgcatcattcctta

SEQ ID NO: 393117 - DNA, 15 bp, Homo sapiens
tacgcatcattcctt

SEQ ID NO: 393118 - DNA, 15 bp, Homo sapiens
atacgcatcattcct

SEQ ID NO: 393119 - DNA, 15 bp, Homo sapiens
catacgcatcattcc

SEQ ID NO: 393120 - DNA, 15 bp, Homo sapiens
acatacgcatcattc

SEQ ID NO: 393121 - DNA, 15 bp, Homo sapiens
cacatacgcatcatt

SEQ ID NO: 393122 - DNA, 15 bp, Homo sapiens
acacatacgcatcat

SEQ ID NO: 393123 - DNA, 15 bp, Homo sapiens
tacacatacgcatca

SEQ ID NO: 393124 - DNA, 15 bp, Homo sapiens
ttacacatacgcatc

SEQ ID NO: 393125 - DNA, 15 bp, Homo sapiens
attacacatacgcat

SEQ ID NO: 393126 - DNA, 15 bp, Homo sapiens
cattacacatacgca

SEQ ID NO: 393127 - DNA, 15 bp, Homo sapiens
gcattacacatacgc

SEQ ID NO: 393128 - DNA, 15 bp, Homo sapiens
tgcattacacatacg

SEQ ID NO: 393129 - DNA, 15 bp, Homo sapiens
atgcattacacatac

SEQ ID NO: 393130 - DNA, 15 bp, Homo sapiens
tatgcattacacata

SEQ ID NO: 393131 - DNA, 15 bp, Homo sapiens
ttatgcattacacat

SEQ ID NO: 393132 - DNA, 15 bp, Homo sapiens
tttatgcattacaca

SEQ ID NO: 393133 - DNA, 15 bp, Homo sapiens
ttttatgcattacac

SEQ ID NO: 393134 - DNA, 15 bp, Homo sapiens
tttttatgcattaca

SEQ ID NO: 393135 - DNA, 15 bp, Homo sapiens
atttttatgcattac

SEQ ID NO: 393136 - DNA, 15 bp, Homo sapiens
gatttttatgcatta

SEQ ID NO: 393137 - DNA, 15 bp, Homo sapiens
tgatttttatgcatt

SEQ ID NO: 393138 - DNA, 15 bp, Homo sapiens
ctgatttttatgcat

SEQ ID NO: 393139 - DNA, 15 bp, Homo sapiens
cctgatttttatgca

SEQ ID NO: 393140 - DNA, 15 bp, Homo sapiens
tcctgatttttatgc

SEQ ID NO: 393141 - DNA, 15 bp, Homo sapiens
ctcctgatttttatg

SEQ ID NO: 393142 - DNA, 15 bp, Homo sapiens
cctcctgatttttat

SEQ ID NO: 393143 - DNA, 15 bp, Homo sapiens
ccctcctgattttta

SEQ ID NO: 393144 - DNA, 15 bp, Homo sapiens
gccctcctgattttt

SEQ ID NO: 393145 - DNA, 15 bp, Homo sapiens
agccctcctgatttt

SEQ ID NO: 393146 - DNA, 15 bp, Homo sapiens
aagccctcctgattt

SEQ ID NO: 393147 - DNA, 15 bp, Homo sapiens
caagccctcctgatt

SEQ ID NO: 393148 - DNA, 15 bp, Homo sapiens
tcaagccctcctgat

SEQ ID NO: 393149 - DNA, 15 bp, Homo sapiens
atcaagccctcctga

SEQ ID NO: 393150 - DNA, 15 bp, Homo sapiens
tatcaagccctcctg

SEQ ID NO: 393151 - DNA, 15 bp, Homo sapiens
gtatcaagccctcct

SEQ ID NO: 393152 - DNA, 15 bp, Homo sapiens
tgtatcaagccctcc

SEQ ID NO: 393153 - DNA, 15 bp, Homo sapiens
gtgtatcaagccctc

SEQ ID NO: 393154 - DNA, 15 bp, Homo sapiens
tgtgtatcaagccct

SEQ ID NO: 393155 - DNA, 15 bp, Homo sapiens
ttgtgtatcaagccc

SEQ ID NO: 393156 - DNA, 15 bp, Homo sapiens
tttgtgtatcaagcc

SEQ ID NO: 393157 - DNA, 15 bp, Homo sapiens
atttgtgtatcaagc

SEQ ID NO: 393158 - DNA, 15 bp, Homo sapiens
catttgtgtatcaag

SEQ ID NO: 393159 - DNA, 15 bp, Homo sapiens
ccatttgtgtatcaa

SEQ ID NO: 393160 - DNA, 15 bp, Homo sapiens
gccatttgtgtatca

SEQ ID NO: 393161 - DNA, 15 bp, Homo sapiens
agccatttgtgtatc

SEQ ID NO: 393162 - DNA, 15 bp, Homo sapiens
cagccatttgtgtat

SEQ ID NO: 393163 - DNA, 15 bp, Homo sapiens
tcagccatttgtgta

SEQ ID NO: 393164 - DNA, 15 bp, Homo sapiens
ttcagccatttgtgt

SEQ ID NO: 393165 - DNA, 15 bp, Homo sapiens
tttcagccatttgtg

SEQ ID NO: 393166 - DNA, 15 bp, Homo sapiens
ttttcagccatttgt

SEQ ID NO: 393167 - DNA, 15 bp, Homo sapiens
cttttcagccatttg

SEQ ID NO: 393168 - DNA, 15 bp, Homo sapiens
ccttttcagccattt

SEQ ID NO: 393169 - DNA, 15 bp, Homo sapiens
cccttttcagccatt

SEQ ID NO: 393170 - DNA, 15 bp, Homo sapiens
tcccttttcagccat

SEQ ID NO: 393171 - DNA, 15 bp, Homo sapiens
atcccttttcagcca

SEQ ID NO: 393172 - DNA, 15 bp, Homo sapiens
tatcccttttcagcc

SEQ ID NO: 393173 - DNA, 15 bp, Homo sapiens
ttatcccttttcagc

SEQ ID NO: 393174 - DNA, 15 bp, Homo sapiens
attatcccttttcag

SEQ ID NO: 393175 - DNA, 15 bp, Homo sapiens
aattatcccttttca

SEQ ID NO: 393176 - DNA, 15 bp, Homo sapiens
caattatcccttttc

SEQ ID NO: 393177 - DNA, 15 bp, Homo sapiens
acaattatccctttt

SEQ ID NO: 393178 - DNA, 15 bp, Homo sapiens
tacaattatcccttt

SEQ ID NO: 393179 - DNA, 15 bp, Homo sapiens
atacaattatccctt

SEQ ID NO: 393180 - DNA, 15 bp, Homo sapiens
aatacaattatccct

SEQ ID NO: 393181 - DNA, 15 bp, Homo sapiens
aaatacaattatccc

SEQ ID NO: 393182 - DNA, 15 bp, Homo sapiens
caaatacaattatcc

SEQ ID NO: 393183 - DNA, 15 bp, Homo sapiens
gcaaatacaattatc

SEQ ID NO: 393184 - DNA, 15 bp, Homo sapiens
tgcaaatacaattat

SEQ ID NO: 393185 - DNA, 15 bp, Homo sapiens
ttgcaaatacaatta

SEQ ID NO: 393186 - DNA, 15 bp, Homo sapiens
attgcaaatacaatt

SEQ ID NO: 393187 - DNA, 15 bp, Homo sapiens
aattgcaaatacaat

SEQ ID NO: 393188 - DNA, 15 bp, Homo sapiens
taattgcaaatacaa

SEQ ID NO: 393189 - DNA, 15 bp, Homo sapiens
ataattgcaaataca

SEQ ID NO: 393190 - DNA, 15 bp, Homo sapiens
aataattgcaaatac

SEQ ID NO: 393191 - DNA, 15 bp, Homo sapiens
taataattgcaaata

SEQ ID NO: 393192 - DNA, 15 bp, Homo sapiens
ataataattgcaaat

SEQ ID NO: 393193 - DNA, 15 bp, Homo sapiens
cataataattgcaaa

SEQ ID NO: 393194 - DNA, 15 bp, Homo sapiens
gcataataattgcaa

SEQ ID NO: 393195 - DNA, 15 bp, Homo sapiens
agcataataattgca

SEQ ID NO: 393196 - DNA, 15 bp, Homo sapiens
tagcataataattgc

SEQ ID NO: 393197 - DNA, 15 bp, Homo sapiens
atagcataataattg

SEQ ID NO: 393198 - DNA, 15 bp, Homo sapiens
catagcataataatt

SEQ ID NO: 393199 - DNA, 15 bp, Homo sapiens
acatagcataataat

SEQ ID NO: 393200 - DNA, 15 bp, Homo sapiens
aacatagcataataa

SEQ ID NO: 393201 - DNA, 15 bp, Homo sapiens
caacatagcataata

SEQ ID NO: 393202 - DNA, 15 bp, Homo sapiens
ccaacatagcataat

SEQ ID NO: 393203 - DNA, 15 bp, Homo sapiens
tccaacatagcataa

SEQ ID NO: 393204 - DNA, 15 bp, Homo sapiens
gtccaacatagcata

SEQ ID NO: 393205 - DNA, 15 bp, Homo sapiens
tgtccaacatagcat

SEQ ID NO: 393206 - DNA, 15 bp, Homo sapiens
ctgtccaacatagca

SEQ ID NO: 393207 - DNA, 15 bp, Homo sapiens
gctgtccaacatagc

SEQ ID NO: 393208 - DNA, 15 bp, Homo sapiens
ggctgtccaacatag

SEQ ID NO: 393209 - DNA, 15 bp, Homo sapiens
tggctgtccaacata

SEQ ID NO: 393210 - DNA, 15 bp, Homo sapiens
gtggctgtccaacat

SEQ ID NO: 393211 - DNA, 15 bp, Homo sapiens
tgtggctgtccaaca

SEQ ID NO: 393212 - DNA, 15 bp, Homo sapiens
ttgtggctgtccaac

SEQ ID NO: 393213 - DNA, 15 bp, Homo sapiens
tttgtggctgtccaa

SEQ ID NO: 393214 - DNA, 15 bp, Homo sapiens
ctttgtggctgtcca

SEQ ID NO: 393215 - DNA, 15 bp, Homo sapiens
cctttgtggctgtcc

SEQ ID NO: 393216 - DNA, 15 bp, Homo sapiens
gcctttgtggctgtc

SEQ ID NO: 393217 - DNA, 15 bp, Homo sapiens
agcctttgtggctgt

SEQ ID NO: 393218 - DNA, 15 bp, Homo sapiens
gagcctttgtggctg

SEQ ID NO: 393219 - DNA, 15 bp, Homo sapiens
agagcctttgtggct

SEQ ID NO: 393220 - DNA, 15 bp, Homo sapiens
tagagcctttgtggc

SEQ ID NO: 393221 - DNA, 15 bp, Homo sapiens
atagagcctttgtgg

SEQ ID NO: 393222 - DNA, 15 bp, Homo sapiens
catagagcctttgtg

SEQ ID NO: 393223 - DNA, 15 bp, Homo sapiens
tcatagagcctttgt

SEQ ID NO: 393224 - DNA, 15 bp, Homo sapiens
gtcatagagcctttg

SEQ ID NO: 393225 - DNA, 15 bp, Homo sapiens
tgtcatagagccttt

SEQ ID NO: 393226 - DNA, 15 bp, Homo sapiens
ctgtcatagagcctt

SEQ ID NO: 393227 - DNA, 15 bp, Homo sapiens
gctgtcatagagcct

SEQ ID NO: 393228 - DNA, 15 bp, Homo sapiens
ggctgtcatagagcc

SEQ ID NO: 393229 - DNA, 15 bp, Homo sapiens
aggctgtcatagagc

SEQ ID NO: 393230 - DNA, 15 bp, Homo sapiens
taggctgtcatagag

SEQ ID NO: 393231 - DNA, 15 bp, Homo sapiens
ataggctgtcataga

SEQ ID NO: 393232 - DNA, 15 bp, Homo sapiens
cataggctgtcatag

SEQ ID NO: 393233 - DNA, 15 bp, Homo sapiens
acataggctgtcata

SEQ ID NO: 393234 - DNA, 15 bp, Homo sapiens
cacataggctgtcat

SEQ ID NO: 393235 - DNA, 15 bp, Homo sapiens
acacataggctgtca

SEQ ID NO: 393236 - DNA, 15 bp, Homo sapiens
cacacataggctgtc

SEQ ID NO: 393237 - DNA, 15 bp, Homo sapiens
gcacacataggctgt

SEQ ID NO: 393238 - DNA, 15 bp, Homo sapiens
agcacacataggctg

SEQ ID NO: 393239 - DNA, 15 bp, Homo sapiens
tagcacacataggct

SEQ ID NO: 393240 - DNA, 15 bp, Homo sapiens
atagcacacataggc

SEQ ID NO: 393241 - DNA, 15 bp, Homo sapiens
catagcacacatagg

SEQ ID NO: 393242 - DNA, 15 bp, Homo sapiens
acatagcacacatag

SEQ ID NO: 393243 - DNA, 15 bp, Homo sapiens
cacatagcacacata

SEQ ID NO: 393244 - DNA, 15 bp, Homo sapiens
acacatagcacacat

SEQ ID NO: 393245 - DNA, 15 bp, Homo sapiens
cacacatagcacaca

SEQ ID NO: 393246 - DNA, 15 bp, Homo sapiens
acacacatagcacac

SEQ ID NO: 393247 - DNA, 15 bp, Homo sapiens
aacacacatagcaca

SEQ ID NO: 393248 - DNA, 15 bp, Homo sapiens
aaacacacatagcac

SEQ ID NO: 393249 - DNA, 15 bp, Homo sapiens
aaaacacacatagca

SEQ ID NO: 393250 - DNA, 15 bp, Homo sapiens
gaaaacacacatagc

SEQ ID NO: 393251 - DNA, 15 bp, Homo sapiens
ggaaaacacacatag

SEQ ID NO: 393252 - DNA, 15 bp, Homo sapiens
tggaaaacacacata

SEQ ID NO: 393253 - DNA, 15 bp, Homo sapiens
atggaaaacacacat

SEQ ID NO: 393254 - DNA, 15 bp, Homo sapiens
tatggaaaacacaca

SEQ ID NO: 393255 - DNA, 15 bp, Homo sapiens
ttatggaaaacacac

SEQ ID NO: 393256 - DNA, 15 bp, Homo sapiens
tttatggaaaacaca

SEQ ID NO: 393257 - DNA, 15 bp, Homo sapiens
ttttatggaaaacac

SEQ ID NO: 393258 - DNA, 15 bp, Homo sapiens
tttttatggaaaaca

SEQ ID NO: 393259 - DNA, 15 bp, Homo sapiens
ctttttatggaaaac

SEQ ID NO: 393260 - DNA, 15 bp, Homo sapiens
tctttttatggaaaa

SEQ ID NO: 393261 - DNA, 15 bp, Homo sapiens
ctctttttatggaaa

SEQ ID NO: 393262 - DNA, 15 bp, Homo sapiens
tctctttttatggaa

SEQ ID NO: 393263 - DNA, 15 bp, Homo sapiens
atctctttttatgga

SEQ ID NO: 393264 - DNA, 15 bp, Homo sapiens
catctctttttatgg

SEQ ID NO: 393265 - DNA, 15 bp, Homo sapiens
acatctctttttatg

SEQ ID NO: 393266 - DNA, 15 bp, Homo sapiens
aacatctctttttat

SEQ ID NO: 393267 - DNA, 15 bp, Homo sapiens
caacatctcttttta

SEQ ID NO: 393268 - DNA, 15 bp, Homo sapiens
tcaacatctcttttt

SEQ ID NO: 393269 - DNA, 15 bp, Homo sapiens
atcaacatctctttt

SEQ ID NO: 393270 - DNA, 15 bp, Homo sapiens
tatcaacatctcttt

SEQ ID NO: 393271 - DNA, 15 bp, Homo sapiens
ctatcaacatctctt

SEQ ID NO: 393272 - DNA, 15 bp, Homo sapiens
tctatcaacatctct

SEQ ID NO: 393273 - DNA, 15 bp, Homo sapiens
ctctatcaacatctc

SEQ ID NO: 393274 - DNA, 15 bp, Homo sapiens
tctctatcaacatct

SEQ ID NO: 393275 - DNA, 15 bp, Homo sapiens
ttctctatcaacatc

SEQ ID NO: 393276 - DNA, 15 bp, Homo sapiens
cttctctatcaacat

SEQ ID NO: 393277 - DNA, 15 bp, Homo sapiens
acttctctatcaaca

SEQ ID NO: 393278 - DNA, 15 bp, Homo sapiens
tacttctctatcaac

SEQ ID NO: 393279 - DNA, 15 bp, Homo sapiens
ctacttctctatcaa

SEQ ID NO: 393280 - DNA, 15 bp, Homo sapiens
actacttctctatca

SEQ ID NO: 393281 - DNA, 15 bp, Homo sapiens
tactacttctctatc

SEQ ID NO: 393282 - DNA, 15 bp, Homo sapiens
atactacttctctat

SEQ ID NO: 393283 - DNA, 15 bp, Homo sapiens
gatactacttctcta

SEQ ID NO: 393284 - DNA, 15 bp, Homo sapiens
agatactacttctct

SEQ ID NO: 393285 - DNA, 15 bp, Homo sapiens
cagatactacttctc

SEQ ID NO: 393286 - DNA, 15 bp, Homo sapiens
acagatactacttct

SEQ ID NO: 393287 - DNA, 15 bp, Homo sapiens
aacagatactacttc

SEQ ID NO: 393288 - DNA, 15 bp, Homo sapiens
taacagatactactt

SEQ ID NO: 393289 - DNA, 15 bp, Homo sapiens
ttaacagatactact

SEQ ID NO: 393290 - DNA, 15 bp, Homo sapiens
gttaacagatactac

SEQ ID NO: 393291 - DNA, 15 bp, Homo sapiens
ggttaacagatacta

SEQ ID NO: 393292 - DNA, 15 bp, Homo sapiens
aggttaacagatact

SEQ ID NO: 393293 - DNA, 15 bp, Homo sapiens
caggttaacagatac

SEQ ID NO: 393294 - DNA, 15 bp, Homo sapiens
acaggttaacagata

SEQ ID NO: 393295 - DNA, 15 bp, Homo sapiens
tacaggttaacagat

SEQ ID NO: 393296 - DNA, 15 bp, Homo sapiens
ttacaggttaacaga

SEQ ID NO: 393297 - DNA, 15 bp, Homo sapiens
attacaggttaacag

SEQ ID NO: 393298 - DNA, 15 bp, Homo sapiens
gattacaggttaaca

SEQ ID NO: 393299 - DNA, 15 bp, Homo sapiens
agattacaggttaac

SEQ ID NO: 393300 - DNA, 15 bp, Homo sapiens
cagattacaggttaa

SEQ ID NO: 393301 - DNA, 15 bp, Homo sapiens
ccagattacaggtta

SEQ ID NO: 393302 - DNA, 15 bp, Homo sapiens
cccagattacaggtt

SEQ ID NO: 393303 - DNA, 15 bp, Homo sapiens
acccagattacaggt

SEQ ID NO: 393304 - DNA, 15 bp, Homo sapiens
aacccagattacagg

SEQ ID NO: 393305 - DNA, 15 bp, Homo sapiens
taacccagattacag

SEQ ID NO: 393306 - DNA, 15 bp, Homo sapiens
ataacccagattaca

SEQ ID NO: 393307 - DNA, 15 bp, Homo sapiens
tataacccagattac

SEQ ID NO: 393308 - DNA, 15 bp, Homo sapiens
gtataacccagatta

SEQ ID NO: 393309 - DNA, 15 bp, Homo sapiens
agtataacccagatt

SEQ ID NO: 393310 - DNA, 15 bp, Homo sapiens
tagtataacccagat

SEQ ID NO: 393311 - DNA, 15 bp, Homo sapiens
atagtataacccaga

SEQ ID NO: 393312 - DNA, 15 bp, Homo sapiens
aatagtataacccag

SEQ ID NO: 393313 - DNA, 15 bp, Homo sapiens
caatagtataaccca

SEQ ID NO: 393314 - DNA, 15 bp, Homo sapiens
acaatagtataaccc

SEQ ID NO: 393315 - DNA, 15 bp, Homo sapiens
gacaatagtataacc

SEQ ID NO: 393316 - DNA, 15 bp, Homo sapiens
agacaatagtataac

SEQ ID NO: 393317 - DNA, 15 bp, Homo sapiens
aagacaatagtataa

SEQ ID NO: 393318 - DNA, 15 bp, Homo sapiens
aaagacaatagtata

SEQ ID NO: 393319 - DNA, 15 bp, Homo sapiens
aaaagacaatagtat

SEQ ID NO: 393320 - DNA, 15 bp, Homo sapiens
aaaaagacaatagta

SEQ ID NO: 393321 - DNA, 15 bp, Homo sapiens
taaaaagacaatagt

SEQ ID NO: 393322 - DNA, 15 bp, Homo sapiens
ttaaaaagacaatag

SEQ ID NO: 393323 - DNA, 15 bp, Homo sapiens
tttaaaaagacaata

SEQ ID NO: 393324 - DNA, 15 bp, Homo sapiens
ctttaaaaagacaat

SEQ ID NO: 393325 - DNA, 15 bp, Homo sapiens
actttaaaaagacaa

SEQ ID NO: 393326 - DNA, 15 bp, Homo sapiens
aactttaaaaagaca

SEQ ID NO: 393327 - DNA, 15 bp, Homo sapiens
gaactttaaaaagac

SEQ ID NO: 393328 - DNA, 15 bp, Homo sapiens
agaactttaaaaaga

SEQ ID NO: 393329 - DNA, 15 bp, Homo sapiens
cagaactttaaaaag

SEQ ID NO: 393330 - DNA, 15 bp, Homo sapiens
ccagaactttaaaaa

SEQ ID NO: 393331 - DNA, 15 bp, Homo sapiens
accagaactttaaaa

SEQ ID NO: 393332 - DNA, 15 bp, Homo sapiens
taccagaactttaaa

SEQ ID NO: 393333 - DNA, 15 bp, Homo sapiens
ctaccagaactttaa

SEQ ID NO: 393334 - DNA, 15 bp, Homo sapiens
cctaccagaacttta

SEQ ID NO: 393335 - DNA, 15 bp, Homo sapiens
acctaccagaacttt

SEQ ID NO: 393336 - DNA, 15 bp, Homo sapiens
gacctaccagaactt

SEQ ID NO: 393337 - DNA, 15 bp, Homo sapiens
agacctaccagaact

SEQ ID NO: 393338 - DNA, 15 bp, Homo sapiens
tagacctaccagaac

SEQ ID NO: 393339 - DNA, 15 bp, Homo sapiens
atagacctaccagaa

SEQ ID NO: 393340 - DNA, 15 bp, Homo sapiens
tatagacctaccaga

SEQ ID NO: 393341 - DNA, 15 bp, Homo sapiens
gtatagacctaccag

SEQ ID NO: 393342 - DNA, 15 bp, Homo sapiens
cgtatagacctacca

SEQ ID NO: 393343 - DNA, 15 bp, Homo sapiens
acgtatagacctacc

SEQ ID NO: 393344 - DNA, 15 bp, Homo sapiens
aacgtatagacctac

SEQ ID NO: 393345 - DNA, 15 bp, Homo sapiens
aaacgtatagaccta

SEQ ID NO: 393346 - DNA, 15 bp, Homo sapiens
aaaacgtatagacct

SEQ ID NO: 393347 - DNA, 15 bp, Homo sapiens
caaaacgtatagacc

SEQ ID NO: 393348 - DNA, 15 bp, Homo sapiens
ccaaaacgtatagac

SEQ ID NO: 393349 - DNA, 15 bp, Homo sapiens
accaaaacgtataga

SEQ ID NO: 393350 - DNA, 15 bp, Homo sapiens
taccaaaacgtatag

SEQ ID NO: 393351 - DNA, 15 bp, Homo sapiens
ttaccaaaacgtata

SEQ ID NO: 393352 - DNA, 15 bp, Homo sapiens
tttaccaaaacgtat

SEQ ID NO: 393353 - DNA, 15 bp, Homo sapiens
gtttaccaaaacgta

SEQ ID NO: 393354 - DNA, 15 bp, Homo sapiens
agtttaccaaaacgt

SEQ ID NO: 393355 - DNA, 15 bp, Homo sapiens
gagtttaccaaaacg

SEQ ID NO: 393356 - DNA, 15 bp, Homo sapiens
ggagtttaccaaaac

SEQ ID NO: 393357 - DNA, 15 bp, Homo sapiens
aggagtttaccaaaa

SEQ ID NO: 393358 - DNA, 15 bp, Homo sapiens
caggagtttaccaaa

SEQ ID NO: 393359 - DNA, 15 bp, Homo sapiens
ccaggagtttaccaa

SEQ ID NO: 393360 - DNA, 15 bp, Homo sapiens
accaggagtttacca

SEQ ID NO: 393361 - DNA, 15 bp, Homo sapiens
aaccaggagtttacc

SEQ ID NO: 393362 - DNA, 15 bp, Homo sapiens
aaaccaggagtttac

SEQ ID NO: 393363 - DNA, 15 bp, Homo sapiens
caaaccaggagttta

SEQ ID NO: 393364 - DNA, 15 bp, Homo sapiens
gcaaaccaggagttt

SEQ ID NO: 393365 - DNA, 15 bp, Homo sapiens
cgcaaaccaggagtt

SEQ ID NO: 393366 - DNA, 15 bp, Homo sapiens
gcgcaaaccaggagt

SEQ ID NO: 393367 - DNA, 15 bp, Homo sapiens
ggcgcaaaccaggag

SEQ ID NO: 393368 - DNA, 15 bp, Homo sapiens
aggcgcaaaccagga

SEQ ID NO: 393369 - DNA, 15 bp, Homo sapiens
caggcgcaaaccagg

SEQ ID NO: 393370 - DNA, 15 bp, Homo sapiens
gcaggcgcaaaccag

SEQ ID NO: 393371 - DNA, 15 bp, Homo sapiens
agcaggcgcaaacca

SEQ ID NO: 393372 - DNA, 15 bp, Homo sapiens
aagcaggcgcaaacc

SEQ ID NO: 393373 - DNA, 15 bp, Homo sapiens
taagcaggcgcaaac

SEQ ID NO: 393374 - DNA, 15 bp, Homo sapiens
ataagcaggcgcaaa

SEQ ID NO: 393375 - DNA, 15 bp, Homo sapiens
aataagcaggcgcaa

SEQ ID NO: 393376 - DNA, 15 bp, Homo sapiens
aaataagcaggcgca

SEQ ID NO: 393377 - DNA, 15 bp, Homo sapiens
aaaataagcaggcgc

SEQ ID NO: 393378 - DNA, 15 bp, Homo sapiens
caaaataagcaggcg

SEQ ID NO: 393379 - DNA, 15 bp, Homo sapiens
acaaaataagcaggc

SEQ ID NO: 393380 - DNA, 15 bp, Homo sapiens
aacaaaataagcagg

SEQ ID NO: 393381 - DNA, 15 bp, Homo sapiens
aaacaaaataagcag

SEQ ID NO: 393382 - DNA, 15 bp, Homo sapiens
aaaacaaaataagca

SEQ ID NO: 393383 - DNA, 15 bp, Homo sapiens
taaaacaaaataagc

SEQ ID NO: 393384 - DNA, 15 bp, Homo sapiens
gtaaaacaaaataag

SEQ ID NO: 393385 - DNA, 15 bp, Homo sapiens
cgtaaaacaaaataa

SEQ ID NO: 393386 - DNA, 15 bp, Homo sapiens
tcgtaaaacaaaata

SEQ ID NO: 393387 - DNA, 15 bp, Homo sapiens
ctcgtaaaacaaaat

SEQ ID NO: 393388 - DNA, 15 bp, Homo sapiens
tctcgtaaaacaaaa

SEQ ID NO: 393389 - DNA, 15 bp, Homo sapiens
ctctcgtaaaacaaa

SEQ ID NO: 393390 - DNA, 15 bp, Homo sapiens
actctcgtaaaacaa

SEQ ID NO: 393391 - DNA, 15 bp, Homo sapiens
gactctcgtaaaaca

SEQ ID NO: 393392 - DNA, 15 bp, Homo sapiens
tgactctcgtaaaac

SEQ ID NO: 393393 - DNA, 15 bp, Homo sapiens
atgactctcgtaaaa

SEQ ID NO: 393394 - DNA, 15 bp, Homo sapiens
aatgactctcgtaaa

SEQ ID NO: 393395 - DNA, 15 bp, Homo sapiens
gaatgactctcgtaa

SEQ ID NO: 393396 - DNA, 15 bp, Homo sapiens
agaatgactctcgta

SEQ ID NO: 393397 - DNA, 15 bp, Homo sapiens
aagaatgactctcgt

SEQ ID NO: 393398 - DNA, 15 bp, Homo sapiens
taagaatgactctcg

SEQ ID NO: 393399 - DNA, 15 bp, Homo sapiens
ttaagaatgactctc

SEQ ID NO: 393400 - DNA, 15 bp, Homo sapiens
tttaagaatgactct

SEQ ID NO: 393401 - DNA, 15 bp, Homo sapiens
ctttaagaatgactc

SEQ ID NO: 393402 - DNA, 15 bp, Homo sapiens
actttaagaatgact

SEQ ID NO: 393403 - DNA, 15 bp, Homo sapiens
tactttaagaatgac

SEQ ID NO: 393404 - DNA, 15 bp, Homo sapiens
atactttaagaatga

SEQ ID NO: 393405 - DNA, 15 bp, Homo sapiens
catactttaagaatg

SEQ ID NO: 393406 - DNA, 15 bp, Homo sapiens
ccatactttaagaat

SEQ ID NO: 393407 - DNA, 15 bp, Homo sapiens
gccatactttaagaa

SEQ ID NO: 393408 - DNA, 15 bp, Homo sapiens
tgccatactttaaga

SEQ ID NO: 393409 - DNA, 15 bp, Homo sapiens
gtgccatactttaag

SEQ ID NO: 393410 - DNA, 15 bp, Homo sapiens
tgtgccatactttaa

SEQ ID NO: 393411 - DNA, 15 bp, Homo sapiens
atgtgccatacttta

SEQ ID NO: 393412 - DNA, 15 bp, Homo sapiens
tatgtgccatacttt

SEQ ID NO: 393413 - DNA, 15 bp, Homo sapiens
ctatgtgccatactt

SEQ ID NO: 393414 - DNA, 15 bp, Homo sapiens
tctatgtgccatact

SEQ ID NO: 393415 - DNA, 15 bp, Homo sapiens
gtctatgtgccatac

SEQ ID NO: 393416 - DNA, 15 bp, Homo sapiens
ggtctatgtgccata

SEQ ID NO: 393417 - DNA, 15 bp, Homo sapiens
tggtctatgtgccat

SEQ ID NO: 393418 - DNA, 15 bp, Homo sapiens
atggtctatgtgcca

SEQ ID NO: 393419 - DNA, 15 bp, Homo sapiens
gatggtctatgtgcc

SEQ ID NO: 393420 - DNA, 15 bp, Homo sapiens
agatggtctatgtgc

SEQ ID NO: 393421 - DNA, 15 bp, Homo sapiens
tagatggtctatgtg

SEQ ID NO: 393422 - DNA, 15 bp, Homo sapiens
gtagatggtctatgt

SEQ ID NO: 393423 - DNA, 15 bp, Homo sapiens
cgtagatggtctatg

SEQ ID NO: 393424 - DNA, 15 bp, Homo sapiens
acgtagatggtctat

SEQ ID NO: 393425 - DNA, 15 bp, Homo sapiens
aacgtagatggtcta

SEQ ID NO: 393426 - DNA, 15 bp, Homo sapiens
taacgtagatggtct

SEQ ID NO: 393427 - DNA, 15 bp, Homo sapiens
ctaacgtagatggtc

SEQ ID NO: 393428 - DNA, 15 bp, Homo sapiens
gctaacgtagatggt

SEQ ID NO: 393429 - DNA, 15 bp, Homo sapiens
tgctaacgtagatgg

SEQ ID NO: 393430 - DNA, 15 bp, Homo sapiens
atgctaacgtagatg

SEQ ID NO: 393431 - DNA, 15 bp, Homo sapiens
gatgctaacgtagat

SEQ ID NO: 393432 - DNA, 15 bp, Homo sapiens
tgatgctaacgtaga

SEQ ID NO: 393433 - DNA, 15 bp, Homo sapiens
gtgatgctaacgtag

SEQ ID NO: 393434 - DNA, 15 bp, Homo sapiens
agtgatgctaacgta

SEQ ID NO: 393435 - DNA, 15 bp, Homo sapiens
cagtgatgctaacgt

SEQ ID NO: 393436 - DNA, 15 bp, Homo sapiens
gcagtgatgctaacg

SEQ ID NO: 393437 - DNA, 15 bp, Homo sapiens
tgcagtgatgctaac

SEQ ID NO: 393438 - DNA, 15 bp, Homo sapiens
ctgcagtgatgctaa

SEQ ID NO: 393439 - DNA, 15 bp, Homo sapiens
actgcagtgatgcta

SEQ ID NO: 393440 - DNA, 15 bp, Homo sapiens
cactgcagtgatgct

SEQ ID NO: 393441 - DNA, 15 bp, Homo sapiens
tcactgcagtgatgc

SEQ ID NO: 393442 - DNA, 15 bp, Homo sapiens
ctcactgcagtgatg

SEQ ID NO: 393443 - DNA, 15 bp, Homo sapiens
cctcactgcagtgat

SEQ ID NO: 393444 - DNA, 15 bp, Homo sapiens
acctcactgcagtga

SEQ ID NO: 393445 - DNA, 15 bp, Homo sapiens
tacctcactgcagtg

SEQ ID NO: 393446 - DNA, 15 bp, Homo sapiens
atacctcactgcagt

SEQ ID NO: 393447 - DNA, 15 bp, Homo sapiens
aatacctcactgcag

SEQ ID NO: 393448 - DNA, 15 bp, Homo sapiens
aaatacctcactgca

SEQ ID NO: 393449 - DNA, 15 bp, Homo sapiens
aaaatacctcactgc

SEQ ID NO: 393450 - DNA, 15 bp, Homo sapiens
aaaaatacctcactg

SEQ ID NO: 393451 - DNA, 15 bp, Homo sapiens
aaaaaatacctcact

SEQ ID NO: 393452 - DNA, 15 bp, Homo sapiens
aaaaaaatacctcac

SEQ ID NO: 393453 - DNA, 15 bp, Homo sapiens
taaaaaaatacctca

SEQ ID NO: 393454 - DNA, 15 bp, Homo sapiens
ttaaaaaaatacctc

SEQ ID NO: 393455 - DNA, 15 bp, Homo sapiens
tttaaaaaaatacct

SEQ ID NO: 393456 - DNA, 15 bp, Homo sapiens
ctttaaaaaaatacc

SEQ ID NO: 393457 - DNA, 15 bp, Homo sapiens
actttaaaaaaatac

SEQ ID NO: 393458 - DNA, 15 bp, Homo sapiens
cactttaaaaaaata

SEQ ID NO: 393459 - DNA, 15 bp, Homo sapiens
tcactttaaaaaaat

SEQ ID NO: 393460 - DNA, 15 bp, Homo sapiens
ttcactttaaaaaaa

SEQ ID NO: 393461 - DNA, 15 bp, Homo sapiens
cttcactttaaaaaa

SEQ ID NO: 393462 - DNA, 15 bp, Homo sapiens
ccttcactttaaaaa

SEQ ID NO: 393463 - DNA, 15 bp, Homo sapiens
accttcactttaaaa

SEQ ID NO: 393464 - DNA, 15 bp, Homo sapiens
aaccttcactttaaa

SEQ ID NO: 393465 - DNA, 15 bp, Homo sapiens
aaaccttcactttaa

SEQ ID NO: 393466 - DNA, 15 bp, Homo sapiens
gaaaccttcacttta

SEQ ID NO: 393467 - DNA, 15 bp, Homo sapiens
agaaaccttcacttt

SEQ ID NO: 393468 - DNA, 15 bp, Homo sapiens
tagaaaccttcactt

SEQ ID NO: 393469 - DNA, 15 bp, Homo sapiens
atagaaaccttcact

SEQ ID NO: 393470 - DNA, 15 bp, Homo sapiens
catagaaaccttcac

SEQ ID NO: 393471 - DNA, 15 bp, Homo sapiens
ccatagaaaccttca

SEQ ID NO: 393472 - DNA, 15 bp, Homo sapiens
tccatagaaaccttc

SEQ ID NO: 393473 - DNA, 15 bp, Homo sapiens
ttccatagaaacctt

SEQ ID NO: 393474 - DNA, 15 bp, Homo sapiens
attccatagaaacct

SEQ ID NO: 393475 - DNA, 15 bp, Homo sapiens
gattccatagaaacc

SEQ ID NO: 393476 - DNA, 15 bp, Homo sapiens
tgattccatagaaac

SEQ ID NO: 393477 - DNA, 15 bp, Homo sapiens
ctgattccatagaaa

SEQ ID NO: 393478 - DNA, 15 bp, Homo sapiens
tctgattccatagaa

SEQ ID NO: 393479 - DNA, 15 bp, Homo sapiens
ttctgattccataga

SEQ ID NO: 393480 - DNA, 15 bp, Homo sapiens
attctgattccatag

SEQ ID NO: 393481 - DNA, 15 bp, Homo sapiens
aattctgattccata

SEQ ID NO: 393482 - DNA, 15 bp, Homo sapiens
aaattctgattccat

SEQ ID NO: 393483 - DNA, 15 bp, Homo sapiens
gaaattctgattcca

SEQ ID NO: 393484 - DNA, 15 bp, Homo sapiens
agaaattctgattcc

SEQ ID NO: 393485 - DNA, 15 bp, Homo sapiens
cagaaattctgattc

SEQ ID NO: 393486 - DNA, 15 bp, Homo sapiens
acagaaattctgatt

SEQ ID NO: 393487 - DNA, 15 bp, Homo sapiens
cacagaaattctgat

SEQ ID NO: 393488 - DNA, 15 bp, Homo sapiens
tcacagaaattctga

SEQ ID NO: 393489 - DNA, 15 bp, Homo sapiens
ctcacagaaattctg

SEQ ID NO: 393490 - DNA, 15 bp, Homo sapiens
tctcacagaaattct

SEQ ID NO: 393491 - DNA, 15 bp, Homo sapiens
ttctcacagaaattc

SEQ ID NO: 393492 - DNA, 15 bp, Homo sapiens
cttctcacagaaatt

SEQ ID NO: 393493 - DNA, 15 bp, Homo sapiens
ccttctcacagaaat

SEQ ID NO: 393494 - DNA, 15 bp, Homo sapiens
cccttctcacagaaa

SEQ ID NO: 393495 - DNA, 15 bp, Homo sapiens
gcccttctcacagaa

SEQ ID NO: 393496 - DNA, 15 bp, Homo sapiens
ggcccttctcacaga

SEQ ID NO: 393497 - DNA, 15 bp, Homo sapiens
gggcccttctcacag

SEQ ID NO: 393498 - DNA, 15 bp, Homo sapiens
tgggcccttctcaca

SEQ ID NO: 393499 - DNA, 15 bp, Homo sapiens
ctgggcccttctcac

SEQ ID NO: 393500 - DNA, 15 bp, Homo sapiens
actgggcccttctca

SEQ ID NO: 393501 - DNA, 15 bp, Homo sapiens
aactgggcccttctc

SEQ ID NO: 393502 - DNA, 15 bp, Homo sapiens
aaactgggcccttct

SEQ ID NO: 393503 - DNA, 15 bp, Homo sapiens
caaactgggcccttc

SEQ ID NO: 393504 - DNA, 15 bp, Homo sapiens
acaaactgggccctt

SEQ ID NO: 393505 - DNA, 15 bp, Homo sapiens
aacaaactgggccct

SEQ ID NO: 393506 - DNA, 15 bp, Homo sapiens
taacaaactgggccc

SEQ ID NO: 393507 - DNA, 15 bp, Homo sapiens
ctaacaaactgggcc

SEQ ID NO: 393508 - DNA, 15 bp, Homo sapiens
gctaacaaactgggc

SEQ ID NO: 393509 - DNA, 15 bp, Homo sapiens
tgctaacaaactggg

SEQ ID NO: 393510 - DNA, 15 bp, Homo sapiens
atgctaacaaactgg

SEQ ID NO: 393511 - DNA, 15 bp, Homo sapiens
tatgctaacaaactg

SEQ ID NO: 393512 - DNA, 15 bp, Homo sapiens
gtatgctaacaaact

SEQ ID NO: 393513 - DNA, 15 bp, Homo sapiens
agtatgctaacaaac

SEQ ID NO: 393514 - DNA, 15 bp, Homo sapiens
gagtatgctaacaaa

SEQ ID NO: 393515 - DNA, 15 bp, Homo sapiens
agagtatgctaacaa

SEQ ID NO: 393516 - DNA, 15 bp, Homo sapiens
gagagtatgctaaca

SEQ ID NO: 393517 - DNA, 15 bp, Homo sapiens
agagagtatgctaac

SEQ ID NO: 393518 - DNA, 15 bp, Homo sapiens
cagagagtatgctaa

SEQ ID NO: 393519 - DNA, 15 bp, Homo sapiens
ccagagagtatgcta

SEQ ID NO: 393520 - DNA, 15 bp, Homo sapiens
tccagagagtatgct

SEQ ID NO: 393521 - DNA, 15 bp, Homo sapiens
ctccagagagtatgc

SEQ ID NO: 393522 - DNA, 15 bp, Homo sapiens
gctccagagagtatg

SEQ ID NO: 393523 - DNA, 15 bp, Homo sapiens
agctccagagagtat

SEQ ID NO: 393524 - DNA, 15 bp, Homo sapiens
aagctccagagagta

SEQ ID NO: 393525 - DNA, 15 bp, Homo sapiens
gaagctccagagagt

SEQ ID NO: 393526 - DNA, 15 bp, Homo sapiens
agaagctccagagag

SEQ ID NO: 393527 - DNA, 15 bp, Homo sapiens
tagaagctccagaga

SEQ ID NO: 393528 - DNA, 15 bp, Homo sapiens
ttagaagctccagag

SEQ ID NO: 393529 - DNA, 15 bp, Homo sapiens
attagaagctccaga

SEQ ID NO: 393530 - DNA, 15 bp, Homo sapiens
cattagaagctccag

SEQ ID NO: 393531 - DNA, 15 bp, Homo sapiens
gcattagaagctcca

SEQ ID NO: 393532 - DNA, 15 bp, Homo sapiens
tgcattagaagctcc

SEQ ID NO: 393533 - DNA, 15 bp, Homo sapiens
gtgcattagaagctc

SEQ ID NO: 393534 - DNA, 15 bp, Homo sapiens
tgtgcattagaagct

SEQ ID NO: 393535 - DNA, 15 bp, Homo sapiens
gtgtgcattagaagc

SEQ ID NO: 393536 - DNA, 15 bp, Homo sapiens
agtgtgcattagaag

SEQ ID NO: 393537 - DNA, 15 bp, Homo sapiens
cagtgtgcattagaa

SEQ ID NO: 393538 - DNA, 15 bp, Homo sapiens
tcagtgtgcattaga

SEQ ID NO: 393539 - DNA, 15 bp, Homo sapiens
ttcagtgtgcattag

SEQ ID NO: 393540 - DNA, 15 bp, Homo sapiens
cttcagtgtgcatta

SEQ ID NO: 393541 - DNA, 15 bp, Homo sapiens
acttcagtgtgcatt

SEQ ID NO: 393542 - DNA, 15 bp, Homo sapiens
gacttcagtgtgcat

SEQ ID NO: 393543 - DNA, 15 bp, Homo sapiens
cgacttcagtgtgca

SEQ ID NO: 393544 - DNA, 15 bp, Homo sapiens
acgacttcagtgtgc

SEQ ID NO: 393545 - DNA, 15 bp, Homo sapiens
aacgacttcagtgtg

SEQ ID NO: 393546 - DNA, 15 bp, Homo sapiens
aaacgacttcagtgt

SEQ ID NO: 393547 - DNA, 15 bp, Homo sapiens
aaaacgacttcagtg

SEQ ID NO: 393548 - DNA, 15 bp, Homo sapiens
gaaaacgacttcagt

SEQ ID NO: 393549 - DNA, 15 bp, Homo sapiens
agaaaacgacttcag

SEQ ID NO: 393550 - DNA, 15 bp, Homo sapiens
aagaaaacgacttca

SEQ ID NO: 393551 - DNA, 15 bp, Homo sapiens
aaagaaaacgacttc

SEQ ID NO: 393552 - DNA, 15 bp, Homo sapiens
aaaagaaaacgactt

SEQ ID NO: 393553 - DNA, 15 bp, Homo sapiens
aaaaagaaaacgact

SEQ ID NO: 393554 - DNA, 15 bp, Homo sapiens
aaaaaagaaaacgac

SEQ ID NO: 393555 - DNA, 15 bp, Homo sapiens
gaaaaaagaaaacga

SEQ ID NO: 393556 - DNA, 15 bp, Homo sapiens
cgaaaaaagaaaacg

SEQ ID NO: 393557 - DNA, 15 bp, Homo sapiens
acgaaaaaagaaaac

SEQ ID NO: 393558 - DNA, 15 bp, Homo sapiens
cacgaaaaaagaaaa

SEQ ID NO: 393559 - DNA, 15 bp, Homo sapiens
acacgaaaaaagaaa

SEQ ID NO: 393560 - DNA, 15 bp, Homo sapiens
cacacgaaaaaagaa

SEQ ID NO: 393561 - DNA, 15 bp, Homo sapiens
tcacacgaaaaaaga

SEQ ID NO: 393562 - DNA, 15 bp, Homo sapiens
gtcacacgaaaaaag

SEQ ID NO: 393563 - DNA, 15 bp, Homo sapiens
agtcacacgaaaaaa

SEQ ID NO: 393564 - DNA, 15 bp, Homo sapiens
gagtcacacgaaaaa

SEQ ID NO: 393565 - DNA, 15 bp, Homo sapiens
agagtcacacgaaaa

SEQ ID NO: 393566 - DNA, 15 bp, Homo sapiens
aagagtcacacgaaa

SEQ ID NO: 393567 - DNA, 15 bp, Homo sapiens
aaagagtcacacgaa

SEQ ID NO: 393568 - DNA, 15 bp, Homo sapiens
aaaagagtcacacga

SEQ ID NO: 393569 - DNA, 15 bp, Homo sapiens
caaaagagtcacacg

SEQ ID NO: 393570 - DNA, 15 bp, Homo sapiens
gcaaaagagtcacac

SEQ ID NO: 393571 - DNA, 15 bp, Homo sapiens
agcaaaagagtcaca

SEQ ID NO: 393572 - DNA, 15 bp, Homo sapiens
aagcaaaagagtcac

SEQ ID NO: 393573 - DNA, 15 bp, Homo sapiens
aaagcaaaagagtca

SEQ ID NO: 393574 - DNA, 15 bp, Homo sapiens
taaagcaaaagagtc

SEQ ID NO: 393575 - DNA, 15 bp, Homo sapiens
ttaaagcaaaagagt

SEQ ID NO: 393576 - DNA, 15 bp, Homo sapiens
gttaaagcaaaagag

SEQ ID NO: 393577 - DNA, 15 bp, Homo sapiens
cgttaaagcaaaaga

SEQ ID NO: 393578 - DNA, 15 bp, Homo sapiens
acgttaaagcaaaag

SEQ ID NO: 393579 - DNA, 15 bp, Homo sapiens
cacgttaaagcaaaa

SEQ ID NO: 393580 - DNA, 15 bp, Homo sapiens
ccacgttaaagcaaa

SEQ ID NO: 393581 - DNA, 15 bp, Homo sapiens
accacgttaaagcaa

SEQ ID NO: 393582 - DNA, 15 bp, Homo sapiens
gaccacgttaaagca

SEQ ID NO: 393583 - DNA, 15 bp, Homo sapiens
ggaccacgttaaagc

SEQ ID NO: 393584 - DNA, 15 bp, Homo sapiens
gggaccacgttaaag

SEQ ID NO: 393585 - DNA, 15 bp, Homo sapiens
tgggaccacgttaaa

SEQ ID NO: 393586 - DNA, 15 bp, Homo sapiens
ctgggaccacgttaa

SEQ ID NO: 393587 - DNA, 15 bp, Homo sapiens
tctgggaccacgtta

SEQ ID NO: 393588 - DNA, 15 bp, Homo sapiens
ttctgggaccacgtt

SEQ ID NO: 393589 - DNA, 15 bp, Homo sapiens
tttctgggaccacgt

SEQ ID NO: 393590 - DNA, 15 bp, Homo sapiens
ttttctgggaccacg

SEQ ID NO: 393591 - DNA, 15 bp, Homo sapiens
gttttctgggaccac

SEQ ID NO: 393592 - DNA, 15 bp, Homo sapiens
tgttttctgggacca

SEQ ID NO: 393593 - DNA, 15 bp, Homo sapiens
gtgttttctgggacc

SEQ ID NO: 393594 - DNA, 15 bp, Homo sapiens
ggtgttttctgggac

SEQ ID NO: 393595 - DNA, 15 bp, Homo sapiens
tggtgttttctggga

SEQ ID NO: 393596 - DNA, 15 bp, Homo sapiens
atggtgttttctggg

SEQ ID NO: 393597 - DNA, 15 bp, Homo sapiens
aatggtgttttctgg

SEQ ID NO: 393598 - DNA, 15 bp, Homo sapiens
aaatggtgttttctg

SEQ ID NO: 393599 - DNA, 15 bp, Homo sapiens
taaatggtgttttct

SEQ ID NO: 393600 - DNA, 15 bp, Homo sapiens
ttaaatggtgttttc

SEQ ID NO: 393601 - DNA, 15 bp, Homo sapiens
attaaatggtgtttt

SEQ ID NO: 393602 - DNA, 15 bp, Homo sapiens
tattaaatggtgttt

SEQ ID NO: 393603 - DNA, 15 bp, Homo sapiens
atattaaatggtgtt

SEQ ID NO: 393604 - DNA, 15 bp, Homo sapiens
aatattaaatggtgt

SEQ ID NO: 393605 - DNA, 15 bp, Homo sapiens
gaatattaaatggtg

SEQ ID NO: 393606 - DNA, 15 bp, Homo sapiens
ggaatattaaatggt

SEQ ID NO: 393607 - DNA, 15 bp, Homo sapiens
tggaatattaaatgg

SEQ ID NO: 393608 - DNA, 15 bp, Homo sapiens
ttggaatattaaatg

SEQ ID NO: 393609 - DNA, 15 bp, Homo sapiens
tttggaatattaaat

SEQ ID NO: 393610 - DNA, 15 bp, Homo sapiens
atttggaatattaaa

SEQ ID NO: 393611 - DNA, 15 bp, Homo sapiens
catttggaatattaa

SEQ ID NO: 393612 - DNA, 15 bp, Homo sapiens
acatttggaatatta

SEQ ID NO: 393613 - DNA, 15 bp, Homo sapiens
aacatttggaatatt

SEQ ID NO: 393614 - DNA, 15 bp, Homo sapiens
aaacatttggaatat

SEQ ID NO: 393615 - DNA, 15 bp, Homo sapiens
aaaacatttggaata

SEQ ID NO: 393616 - DNA, 15 bp, Homo sapiens
caaaacatttggaat

SEQ ID NO: 393617 - DNA, 15 bp, Homo sapiens
ccaaaacatttggaa

SEQ ID NO: 393618 - DNA, 15 bp, Homo sapiens
gccaaaacatttgga

SEQ ID NO: 393619 - DNA, 15 bp, Homo sapiens
ggccaaaacatttgg

SEQ ID NO: 393620 - DNA, 15 bp, Homo sapiens
tggccaaaacatttg

SEQ ID NO: 393621 - DNA, 15 bp, Homo sapiens
gtggccaaaacattt

SEQ ID NO: 393622 - DNA, 15 bp, Homo sapiens
agtggccaaaacatt

SEQ ID NO: 393623 - DNA, 15 bp, Homo sapiens
tagtggccaaaacat

SEQ ID NO: 393624 - DNA, 15 bp, Homo sapiens
ttagtggccaaaaca

SEQ ID NO: 393625 - DNA, 15 bp, Homo sapiens
tttagtggccaaaac

SEQ ID NO: 393626 - DNA, 15 bp, Homo sapiens
ctttagtggccaaaa

SEQ ID NO: 393627 - DNA, 15 bp, Homo sapiens
cctttagtggccaaa

SEQ ID NO: 393628 - DNA, 15 bp, Homo sapiens
acctttagtggccaa

SEQ ID NO: 393629 - DNA, 15 bp, Homo sapiens
tacctttagtggcca

SEQ ID NO: 393630 - DNA, 15 bp, Homo sapiens
atacctttagtggcc

SEQ ID NO: 393631 - DNA, 15 bp, Homo sapiens
tatacctttagtggc

SEQ ID NO: 393632 - DNA, 15 bp, Homo sapiens
ttatacctttagtgg

SEQ ID NO: 393633 - DNA, 15 bp, Homo sapiens
tttatacctttagtg

SEQ ID NO: 393634 - DNA, 15 bp, Homo sapiens
ctttatacctttagt

SEQ ID NO: 393635 - DNA, 15 bp, Homo sapiens
actttatacctttag

SEQ ID NO: 393636 - DNA, 15 bp, Homo sapiens
aactttataccttta

SEQ ID NO: 393637 - DNA, 15 bp, Homo sapiens
aaactttataccttt

SEQ ID NO: 393638 - DNA, 15 bp, Homo sapiens
caaactttatacctt

SEQ ID NO: 393639 - DNA, 15 bp, Homo sapiens
tcaaactttatacct

SEQ ID NO: 393640 - DNA, 15 bp, Homo sapiens
gtcaaactttatacc

SEQ ID NO: 393641 - DNA, 15 bp, Homo sapiens
tgtcaaactttatac

SEQ ID NO: 393642 - DNA, 15 bp, Homo sapiens
ttgtcaaactttata

SEQ ID NO: 393643 - DNA, 15 bp, Homo sapiens
cttgtcaaactttat

SEQ ID NO: 393644 - DNA, 15 bp, Homo sapiens
acttgtcaaacttta

SEQ ID NO: 393645 - DNA, 15 bp, Homo sapiens
aacttgtcaaacttt

SEQ ID NO: 393646 - DNA, 15 bp, Homo sapiens
gaacttgtcaaactt

SEQ ID NO: 393647 - DNA, 15 bp, Homo sapiens
agaacttgtcaaact

SEQ ID NO: 393648 - DNA, 15 bp, Homo sapiens
aagaacttgtcaaac

SEQ ID NO: 393649 - DNA, 15 bp, Homo sapiens
aaagaacttgtcaaa

SEQ ID NO: 393650 - DNA, 15 bp, Homo sapiens
aaaagaacttgtcaa

SEQ ID NO: 393651 - DNA, 15 bp, Homo sapiens
taaaagaacttgtca

SEQ ID NO: 393652 - DNA, 15 bp, Homo sapiens
gtaaaagaacttgtc

SEQ ID NO: 393653 - DNA, 15 bp, Homo sapiens
ggtaaaagaacttgt

SEQ ID NO: 393654 - DNA, 15 bp, Homo sapiens
gggtaaaagaacttg

SEQ ID NO: 393655 - DNA, 15 bp, Homo sapiens
ggggtaaaagaactt

SEQ ID NO: 393656 - DNA, 15 bp, Homo sapiens
aggggtaaaagaact

SEQ ID NO: 393657 - DNA, 15 bp, Homo sapiens
gaggggtaaaagaac

SEQ ID NO: 393658 - DNA, 15 bp, Homo sapiens
tgaggggtaaaagaa

SEQ ID NO: 393659 - DNA, 15 bp, Homo sapiens
ttgaggggtaaaaga

SEQ ID NO: 393660 - DNA, 15 bp, Homo sapiens
attgaggggtaaaag

SEQ ID NO: 393661 - DNA, 15 bp, Homo sapiens
aattgaggggtaaaa

SEQ ID NO: 393662 - DNA, 15 bp, Homo sapiens
aaattgaggggtaaa

SEQ ID NO: 393663 - DNA, 15 bp, Homo sapiens
gaaattgaggggtaa

SEQ ID NO: 393664 - DNA, 15 bp, Homo sapiens
agaaattgaggggta

SEQ ID NO: 393665 - DNA, 15 bp, Homo sapiens
aagaaattgaggggt

SEQ ID NO: 393666 - DNA, 15 bp, Homo sapiens
aaagaaattgagggg

SEQ ID NO: 393667 - DNA, 15 bp, Homo sapiens
aaaagaaattgaggg

SEQ ID NO: 393668 - DNA, 15 bp, Homo sapiens
aaaaagaaattgagg

SEQ ID NO: 393669 - DNA, 15 bp, Homo sapiens
aaaaaagaaattgag

SEQ ID NO: 393670 - DNA, 15 bp, Homo sapiens
aaaaaaagaaattga

SEQ ID NO: 393671 - DNA, 15 bp, Homo sapiens
taaaaaaagaaattg

SEQ ID NO: 393672 - DNA, 15 bp, Homo sapiens
ttaaaaaaagaaatt

SEQ ID NO: 393673 - DNA, 15 bp, Homo sapiens
tttaaaaaaagaaat

SEQ ID NO: 393674 - DNA, 15 bp, Homo sapiens
ttttaaaaaaagaaa

SEQ ID NO: 393675 - DNA, 15 bp, Homo sapiens
tttttaaaaaaagaa

SEQ ID NO: 393676 - DNA, 15 bp, Homo sapiens
ttttttaaaaaaaga

SEQ ID NO: 393677 - DNA, 15 bp, Homo sapiens
attttttaaaaaaag

SEQ ID NO: 393678 - DNA, 15 bp, Homo sapiens
tattttttaaaaaaa

SEQ ID NO: 393679 - DNA, 15 bp, Homo sapiens
ttattttttaaaaaa

SEQ ID NO: 393680 - DNA, 15 bp, Homo sapiens
tttattttttaaaaa

SEQ ID NO: 393681 - DNA, 15 bp, Homo sapiens
ctttattttttaaaa

SEQ ID NO: 393682 - DNA, 15 bp, Homo sapiens
actttattttttaaa

SEQ ID NO: 393683 - DNA, 15 bp, Homo sapiens
tactttattttttaa

SEQ ID NO: 393684 - DNA, 15 bp, Homo sapiens
gtactttatttttta

SEQ ID NO: 393685 - DNA, 15 bp, Homo sapiens
cgtactttatttttt

SEQ ID NO: 393686 - DNA, 15 bp, Homo sapiens
tcgtactttattttt

SEQ ID NO: 393687 - DNA, 15 bp, Homo sapiens
ctcgtactttatttt

SEQ ID NO: 393688 - DNA, 15 bp, Homo sapiens
gctcgtactttattt

SEQ ID NO: 393689 - DNA, 15 bp, Homo sapiens
tgctcgtactttatt

SEQ ID NO: 393690 - DNA, 15 bp, Homo sapiens
ctgctcgtactttat

SEQ ID NO: 393691 - DNA, 15 bp, Homo sapiens
tctgctcgtacttta

SEQ ID NO: 393692 - DNA, 15 bp, Homo sapiens
ctctgctcgtacttt

SEQ ID NO: 393693 - DNA, 15 bp, Homo sapiens
cctctgctcgtactt

SEQ ID NO: 393694 - DNA, 15 bp, Homo sapiens
ccctctgctcgtact

SEQ ID NO: 393695 - DNA, 15 bp, Homo sapiens
tccctctgctcgtac

SEQ ID NO: 393696 - DNA, 15 bp, Homo sapiens
ttccctctgctcgta

SEQ ID NO: 393697 - DNA, 15 bp, Homo sapiens
cttccctctgctcgt

SEQ ID NO: 393698 - DNA, 15 bp, Homo sapiens
ccttccctctgctcg

SEQ ID NO: 393699 - DNA, 15 bp, Homo sapiens
cccttccctctgctc

SEQ ID NO: 393700 - DNA, 15 bp, Homo sapiens
ccccttccctctgct

SEQ ID NO: 393701 - DNA, 15 bp, Homo sapiens
cccccttccctctgc

SEQ ID NO: 393702 - DNA, 15 bp, Homo sapiens
gcccccttccctctg

SEQ ID NO: 393703 - DNA, 15 bp, Homo sapiens
agcccccttccctct

SEQ ID NO: 393704 - DNA, 15 bp, Homo sapiens
gagcccccttccctc

SEQ ID NO: 393705 - DNA, 15 bp, Homo sapiens
agagcccccttccct

SEQ ID NO: 393706 - DNA, 15 bp, Homo sapiens
cagagcccccttccc

SEQ ID NO: 393707 - DNA, 15 bp, Homo sapiens
ccagagcccccttcc

SEQ ID NO: 393708 - DNA, 15 bp, Homo sapiens
accagagcccccttc

SEQ ID NO: 393709 - DNA, 15 bp, Homo sapiens
caccagagccccctt

SEQ ID NO: 393710 - DNA, 15 bp, Homo sapiens
acaccagagccccct

SEQ ID NO: 393711 - DNA, 15 bp, Homo sapiens
aacaccagagccccc

SEQ ID NO: 393712 - DNA, 15 bp, Homo sapiens
caacaccagagcccc

SEQ ID NO: 393713 - DNA, 15 bp, Homo sapiens
ccaacaccagagccc

SEQ ID NO: 393714 - DNA, 15 bp, Homo sapiens
cccaacaccagagcc

SEQ ID NO: 393715 - DNA, 15 bp, Homo sapiens
ccccaacaccagagc

SEQ ID NO: 393716 - DNA, 15 bp, Homo sapiens
tccccaacaccagag

SEQ ID NO: 393717 - DNA, 15 bp, Homo sapiens
ctccccaacaccaga

SEQ ID NO: 393718 - DNA, 15 bp, Homo sapiens
actccccaacaccag

SEQ ID NO: 393719 - DNA, 15 bp, Homo sapiens
cactccccaacacca

SEQ ID NO: 393720 - DNA, 15 bp, Homo sapiens
ccactccccaacacc

SEQ ID NO: 393721 - DNA, 15 bp, Homo sapiens
cccactccccaacac

SEQ ID NO: 393722 - DNA, 15 bp, Homo sapiens
ccccactccccaaca

SEQ ID NO: 393723 - DNA, 15 bp, Homo sapiens
accccactccccaac

SEQ ID NO: 393724 - DNA, 15 bp, Homo sapiens
caccccactccccaa

SEQ ID NO: 393725 - DNA, 15 bp, Homo sapiens
acaccccactcccca

SEQ ID NO: 393726 - DNA, 15 bp, Homo sapiens
aacaccccactcccc

SEQ ID NO: 393727 - DNA, 15 bp, Homo sapiens
caacaccccactccc

SEQ ID NO: 393728 - DNA, 15 bp, Homo sapiens
acaacaccccactcc

SEQ ID NO: 393729 - DNA, 15 bp, Homo sapiens
tacaacaccccactc

SEQ ID NO: 393730 - DNA, 15 bp, Homo sapiens
ctacaacaccccact

SEQ ID NO: 393731 - DNA, 15 bp, Homo sapiens
tctacaacaccccac

SEQ ID NO: 393732 - DNA, 15 bp, Homo sapiens
atctacaacacccca

SEQ ID NO: 393733 - DNA, 15 bp, Homo sapiens
tatctacaacacccc

SEQ ID NO: 393734 - DNA, 15 bp, Homo sapiens
ttatctacaacaccc

SEQ ID NO: 393735 - DNA, 15 bp, Homo sapiens
attatctacaacacc

SEQ ID NO: 393736 - DNA, 15 bp, Homo sapiens
gattatctacaacac

SEQ ID NO: 393737 - DNA, 15 bp, Homo sapiens
agattatctacaaca

SEQ ID NO: 393738 - DNA, 15 bp, Homo sapiens
gagattatctacaac

SEQ ID NO: 393739 - DNA, 15 bp, Homo sapiens
agagattatctacaa

SEQ ID NO: 393740 - DNA, 15 bp, Homo sapiens
tagagattatctaca

SEQ ID NO: 393741 - DNA, 15 bp, Homo sapiens
atagagattatctac

SEQ ID NO: 393742 - DNA, 15 bp, Homo sapiens
catagagattatcta

SEQ ID NO: 393743 - DNA, 15 bp, Homo sapiens
ccatagagattatct

SEQ ID NO: 393744 - DNA, 15 bp, Homo sapiens
cccatagagattatc

SEQ ID NO: 393745 - DNA, 15 bp, Homo sapiens
acccatagagattat

SEQ ID NO: 393746 - DNA, 15 bp, Homo sapiens
gacccatagagatta

SEQ ID NO: 393747 - DNA, 15 bp, Homo sapiens
ggacccatagagatt

SEQ ID NO: 393748 - DNA, 15 bp, Homo sapiens
aggacccatagagat

SEQ ID NO: 393749 - DNA, 15 bp, Homo sapiens
caggacccatagaga

SEQ ID NO: 393750 - DNA, 15 bp, Homo sapiens
gcaggacccatagag

SEQ ID NO: 393751 - DNA, 15 bp, Homo sapiens
ggcaggacccataga

SEQ ID NO: 393752 - DNA, 15 bp, Homo sapiens
tggcaggacccatag

SEQ ID NO: 393753 - DNA, 15 bp, Homo sapiens
ttggcaggacccata

SEQ ID NO: 393754 - DNA, 15 bp, Homo sapiens
gttggcaggacccat

SEQ ID NO: 393755 - DNA, 15 bp, Homo sapiens
agttggcaggaccca

SEQ ID NO: 393756 - DNA, 15 bp, Homo sapiens
tagttggcaggaccc

SEQ ID NO: 393757 - DNA, 15 bp, Homo sapiens
ttagttggcaggacc

SEQ ID NO: 393758 - DNA, 15 bp, Homo sapiens
gttagttggcaggac

SEQ ID NO: 393759 - DNA, 15 bp, Homo sapiens
tgttagttggcagga

SEQ ID NO: 393760 - DNA, 15 bp, Homo sapiens
atgttagttggcagg

SEQ ID NO: 393761 - DNA, 15 bp, Homo sapiens
catgttagttggcag

SEQ ID NO: 393762 - DNA, 15 bp, Homo sapiens
gcatgttagttggca

SEQ ID NO: 393763 - DNA, 15 bp, Homo sapiens
ggcatgttagttggc

SEQ ID NO: 393764 - DNA, 15 bp, Homo sapiens
tggcatgttagttgg

SEQ ID NO: 393765 - DNA, 15 bp, Homo sapiens
atggcatgttagttg

SEQ ID NO: 393766 - DNA, 15 bp, Homo sapiens
aatggcatgttagtt

SEQ ID NO: 393767 - DNA, 15 bp, Homo sapiens
gaatggcatgttagt

SEQ ID NO: 393768 - DNA, 15 bp, Homo sapiens
agaatggcatgttag

SEQ ID NO: 393769 - DNA, 15 bp, Homo sapiens
gagaatggcatgtta

SEQ ID NO: 393770 - DNA, 15 bp, Homo sapiens
cgagaatggcatgtt

SEQ ID NO: 393771 - DNA, 15 bp, Homo sapiens
tcgagaatggcatgt

SEQ ID NO: 393772 - DNA, 15 bp, Homo sapiens
ctcgagaatggcatg

SEQ ID NO: 393773 - DNA, 15 bp, Homo sapiens
actcgagaatggcat

SEQ ID NO: 393774 - DNA, 15 bp, Homo sapiens
aactcgagaatggca

SEQ ID NO: 393775 - DNA, 15 bp, Homo sapiens
aaactcgagaatggc

SEQ ID NO: 393776 - DNA, 15 bp, Homo sapiens
aaaactcgagaatgg

SEQ ID NO: 393777 - DNA, 15 bp, Homo sapiens
taaaactcgagaatg

SEQ ID NO: 393778 - DNA, 15 bp, Homo sapiens
ttaaaactcgagaat

SEQ ID NO: 393779 - DNA, 15 bp, Homo sapiens
cttaaaactcgagaa

SEQ ID NO: 393780 - DNA, 15 bp, Homo sapiens
acttaaaactcgaga

SEQ ID NO: 393781 - DNA, 15 bp, Homo sapiens
aacttaaaactcgag

SEQ ID NO: 393782 - DNA, 15 bp, Homo sapiens
taacttaaaactcga

SEQ ID NO: 393783 - DNA, 15 bp, Homo sapiens
ttaacttaaaactcg

SEQ ID NO: 393784 - DNA, 15 bp, Homo sapiens
gttaacttaaaactc

SEQ ID NO: 393785 - DNA, 15 bp, Homo sapiens
agttaacttaaaact

SEQ ID NO: 393786 - DNA, 15 bp, Homo sapiens
aagttaacttaaaac

SEQ ID NO: 393787 - DNA, 15 bp, Homo sapiens
taagttaacttaaaa

SEQ ID NO: 393788 - DNA, 15 bp, Homo sapiens
ttaagttaacttaaa

SEQ ID NO: 393789 - DNA, 15 bp, Homo sapiens
cttaagttaacttaa

SEQ ID NO: 393790 - DNA, 15 bp, Homo sapiens
gcttaagttaactta

SEQ ID NO: 393791 - DNA, 15 bp, Homo sapiens
agcttaagttaactt

SEQ ID NO: 393792 - DNA, 15 bp, Homo sapiens
aagcttaagttaact

SEQ ID NO: 393793 - DNA, 15 bp, Homo sapiens
caagcttaagttaac

SEQ ID NO: 393794 - DNA, 15 bp, Homo sapiens
ccaagcttaagttaa

SEQ ID NO: 393795 - DNA, 15 bp, Homo sapiens
tccaagcttaagtta

SEQ ID NO: 393796 - DNA, 15 bp, Homo sapiens
ctccaagcttaagtt

SEQ ID NO: 393797 - DNA, 15 bp, Homo sapiens
cctccaagcttaagt

SEQ ID NO: 393798 - DNA, 15 bp, Homo sapiens
gcctccaagcttaag

SEQ ID NO: 393799 - DNA, 15 bp, Homo sapiens
ggcctccaagcttaa

SEQ ID NO: 393800 - DNA, 15 bp, Homo sapiens
tggcctccaagctta

SEQ ID NO: 393801 - DNA, 15 bp, Homo sapiens
ctggcctccaagctt

SEQ ID NO: 393802 - DNA, 15 bp, Homo sapiens
tctggcctccaagct

SEQ ID NO: 393803 - DNA, 15 bp, Homo sapiens
ctctggcctccaagc

SEQ ID NO: 393804 - DNA, 15 bp, Homo sapiens
gctctggcctccaag

SEQ ID NO: 393805 - DNA, 15 bp, Homo sapiens
tgctctggcctccaa

SEQ ID NO: 393806 - DNA, 15 bp, Homo sapiens
ctgctctggcctcca

SEQ ID NO: 393807 - DNA, 15 bp, Homo sapiens
actgctctggcctcc

SEQ ID NO: 393808 - DNA, 15 bp, Homo sapiens
aactgctctggcctc

SEQ ID NO: 393809 - DNA, 15 bp, Homo sapiens
aaactgctctggcct

SEQ ID NO: 393810 - DNA, 15 bp, Homo sapiens
taaactgctctggcc

SEQ ID NO: 393811 - DNA, 15 bp, Homo sapiens
ataaactgctctggc

SEQ ID NO: 393812 - DNA, 15 bp, Homo sapiens
aataaactgctctgg

SEQ ID NO: 393813 - DNA, 15 bp, Homo sapiens
taataaactgctctg

SEQ ID NO: 393814 - DNA, 15 bp, Homo sapiens
gtaataaactgctct

SEQ ID NO: 393815 - DNA, 15 bp, Homo sapiens
ggtaataaactgctc

SEQ ID NO: 393816 - DNA, 15 bp, Homo sapiens
aggtaataaactgct

SEQ ID NO: 393817 - DNA, 15 bp, Homo sapiens
taggtaataaactgc

SEQ ID NO: 393818 - DNA, 15 bp, Homo sapiens
ctaggtaataaactg

SEQ ID NO: 393819 - DNA, 15 bp, Homo sapiens
cctaggtaataaact

SEQ ID NO: 393820 - DNA, 15 bp, Homo sapiens
acctaggtaataaac

SEQ ID NO: 393821 - DNA, 15 bp, Homo sapiens
tacctaggtaataaa

SEQ ID NO: 393822 - DNA, 15 bp, Homo sapiens
gtacctaggtaataa

SEQ ID NO: 393823 - DNA, 15 bp, Homo sapiens
agtacctaggtaata

SEQ ID NO: 393824 - DNA, 15 bp, Homo sapiens
aagtacctaggtaat

SEQ ID NO: 393825 - DNA, 15 bp, Homo sapiens
aaagtacctaggtaa

SEQ ID NO: 393826 - DNA, 15 bp, Homo sapiens
aaaagtacctaggta

SEQ ID NO: 393827 - DNA, 15 bp, Homo sapiens
taaaagtacctaggt

SEQ ID NO: 393828 - DNA, 15 bp, Homo sapiens
ctaaaagtacctagg

SEQ ID NO: 393829 - DNA, 15 bp, Homo sapiens
tctaaaagtacctag

SEQ ID NO: 393830 - DNA, 15 bp, Homo sapiens
ctctaaaagtaccta

SEQ ID NO: 393831 - DNA, 15 bp, Homo sapiens
gctctaaaagtacct

SEQ ID NO: 393832 - DNA, 15 bp, Homo sapiens
agctctaaaagtacc

SEQ ID NO: 393833 - DNA, 15 bp, Homo sapiens
tagctctaaaagtac

SEQ ID NO: 393834 - DNA, 15 bp, Homo sapiens
atagctctaaaagta

SEQ ID NO: 393835 - DNA, 15 bp, Homo sapiens
aatagctctaaaagt

SEQ ID NO: 393836 - DNA, 15 bp, Homo sapiens
taatagctctaaaag

SEQ ID NO: 393837 - DNA, 15 bp, Homo sapiens
ataatagctctaaaa

SEQ ID NO: 393838 - DNA, 15 bp, Homo sapiens
gataatagctctaaa

SEQ ID NO: 393839 - DNA, 15 bp, Homo sapiens
tgataatagctctaa

SEQ ID NO: 393840 - DNA, 15 bp, Homo sapiens
ttgataatagctcta

SEQ ID NO: 393841 - DNA, 15 bp, Homo sapiens
attgataatagctct

SEQ ID NO: 393842 - DNA, 15 bp, Homo sapiens
aattgataatagctc

SEQ ID NO: 393843 - DNA, 15 bp, Homo sapiens
taattgataatagct

SEQ ID NO: 393844 - DNA, 15 bp, Homo sapiens
ataattgataatagc

SEQ ID NO: 393845 - DNA, 15 bp, Homo sapiens
tataattgataatag

SEQ ID NO: 393846 - DNA, 15 bp, Homo sapiens
atataattgataata

SEQ ID NO: 393847 - DNA, 15 bp, Homo sapiens
catataattgataat

SEQ ID NO: 393848 - DNA, 15 bp, Homo sapiens
ccatataattgataa

SEQ ID NO: 393849 - DNA, 15 bp, Homo sapiens
gccatataattgata

SEQ ID NO: 393850 - DNA, 15 bp, Homo sapiens
tgccatataattgat

SEQ ID NO: 393851 - DNA, 15 bp, Homo sapiens
gtgccatataattga

SEQ ID NO: 393852 - DNA, 15 bp, Homo sapiens
tgtgccatataattg

SEQ ID NO: 393853 - DNA, 15 bp, Homo sapiens
atgtgccatataatt

SEQ ID NO: 393854 - DNA, 15 bp, Homo sapiens
tatgtgccatataat

SEQ ID NO: 393855 - DNA, 15 bp, Homo sapiens
atatgtgccatataa

SEQ ID NO: 393856 - DNA, 15 bp, Homo sapiens
aatatgtgccatata

SEQ ID NO: 393857 - DNA, 15 bp, Homo sapiens
gaatatgtgccatat

SEQ ID NO: 393858 - DNA, 15 bp, Homo sapiens
tgaatatgtgccata

SEQ ID NO: 393859 - DNA, 15 bp, Homo sapiens
ttgaatatgtgccat

SEQ ID NO: 393860 - DNA, 15 bp, Homo sapiens
gttgaatatgtgcca

SEQ ID NO: 393861 - DNA, 15 bp, Homo sapiens
ggttgaatatgtgcc

SEQ ID NO: 393862 - DNA, 15 bp, Homo sapiens
aggttgaatatgtgc

SEQ ID NO: 393863 - DNA, 15 bp, Homo sapiens
caggttgaatatgtg

SEQ ID NO: 393864 - DNA, 15 bp, Homo sapiens
ccaggttgaatatgt

SEQ ID NO: 393865 - DNA, 15 bp, Homo sapiens
tccaggttgaatatg

SEQ ID NO: 393866 - DNA, 15 bp, Homo sapiens
atccaggttgaatat

SEQ ID NO: 393867 - DNA, 15 bp, Homo sapiens
aatccaggttgaata

SEQ ID NO: 393868 - DNA, 15 bp, Homo sapiens
taatccaggttgaat

SEQ ID NO: 393869 - DNA, 15 bp, Homo sapiens
ttaatccaggttgaa

SEQ ID NO: 393870 - DNA, 15 bp, Homo sapiens
gttaatccaggttga

SEQ ID NO: 393871 - DNA, 15 bp, Homo sapiens
tgttaatccaggttg

SEQ ID NO: 393872 - DNA, 15 bp, Homo sapiens
ctgttaatccaggtt

SEQ ID NO: 393873 - DNA, 15 bp, Homo sapiens
tctgttaatccaggt

SEQ ID NO: 393874 - DNA, 15 bp, Homo sapiens
ttctgttaatccagg

SEQ ID NO: 393875 - DNA, 15 bp, Homo sapiens
tttctgttaatccag

SEQ ID NO: 393876 - DNA, 15 bp, Homo sapiens
gtttctgttaatcca

SEQ ID NO: 393877 - DNA, 15 bp, Homo sapiens
agtttctgttaatcc

SEQ ID NO: 393878 - DNA, 15 bp, Homo sapiens
aagtttctgttaatc

SEQ ID NO: 393879 - DNA, 15 bp, Homo sapiens
aaagtttctgttaat

SEQ ID NO: 393880 - DNA, 15 bp, Homo sapiens
aaaagtttctgttaa

SEQ ID NO: 393881 - DNA, 15 bp, Homo sapiens
taaaagtttctgtta

SEQ ID NO: 393882 - DNA, 15 bp, Homo sapiens
ttaaaagtttctgtt

SEQ ID NO: 393883 - DNA, 15 bp, Homo sapiens
tttaaaagtttctgt

SEQ ID NO: 393884 - DNA, 15 bp, Homo sapiens
ttttaaaagtttctg

SEQ ID NO: 393885 - DNA, 15 bp, Homo sapiens
attttaaaagtttct

SEQ ID NO: 393886 - DNA, 15 bp, Homo sapiens
atattttaaaagttt

SEQ ID NO: 393887 - DNA, 15 bp, Homo sapiens
aatattttaaaagtt

SEQ ID NO: 393888 - DNA, 15 bp, Homo sapiens
aaatattttaaaagt

SEQ ID NO: 393889 - DNA, 15 bp, Homo sapiens
taaatattttaaaag

SEQ ID NO: 393890 - DNA, 15 bp, Homo sapiens
ataaatattttaaaa

SEQ ID NO: 393891 - DNA, 15 bp, Homo sapiens
cataaatattttaaa

SEQ ID NO: 393892 - DNA, 15 bp, Homo sapiens
acataaatattttaa

SEQ ID NO: 393893 - DNA, 15 bp, Homo sapiens
tacataaatatttta

SEQ ID NO: 393894 - DNA, 15 bp, Homo sapiens
atacataaatatttt

SEQ ID NO: 393895 - DNA, 15 bp, Homo sapiens
tatacataaatattt

SEQ ID NO: 393896 - DNA, 15 bp, Homo sapiens
atatacataaatatt

SEQ ID NO: 393897 - DNA, 15 bp, Homo sapiens
tatatacataaatat

SEQ ID NO: 393898 - DNA, 15 bp, Homo sapiens
atatatacataaata

SEQ ID NO: 393899 - DNA, 15 bp, Homo sapiens
aatatatacataaat

SEQ ID NO: 393900 - DNA, 15 bp, Homo sapiens
aaatatatacataaa

SEQ ID NO: 393901 - DNA, 15 bp, Homo sapiens
taaatatatacataa

SEQ ID NO: 393902 - DNA, 15 bp, Homo sapiens
ataaatatatacata

SEQ ID NO: 393903 - DNA, 15 bp, Homo sapiens
cataaatatatacat

SEQ ID NO: 393904 - DNA, 15 bp, Homo sapiens
tcataaatatataca

SEQ ID NO: 393905 - DNA, 15 bp, Homo sapiens
gtcataaatatatac

SEQ ID NO: 393906 - DNA, 15 bp, Homo sapiens
cgtcataaatatata

SEQ ID NO: 393907 - DNA, 15 bp, Homo sapiens
acgtcataaatatat

SEQ ID NO: 393908 - DNA, 15 bp, Homo sapiens
cacgtcataaatata

SEQ ID NO: 393909 - DNA, 15 bp, Homo sapiens
acacgtcataaatat

SEQ ID NO: 393910 - DNA, 15 bp, Homo sapiens
tacacgtcataaata

SEQ ID NO: 393911 - DNA, 15 bp, Homo sapiens
ttacacgtcataaat

SEQ ID NO: 393912 - DNA, 15 bp, Homo sapiens
tttacacgtcataaa

SEQ ID NO: 393913 - DNA, 15 bp, Homo sapiens
ttttacacgtcataa

SEQ ID NO: 393914 - DNA, 15 bp, Homo sapiens
attttacacgtcata

SEQ ID NO: 393915 - DNA, 15 bp, Homo sapiens
cattttacacgtcat

SEQ ID NO: 393916 - DNA, 15 bp, Homo sapiens
ccattttacacgtca

SEQ ID NO: 393917 - DNA, 15 bp, Homo sapiens
tccattttacacgtc

SEQ ID NO: 393918 - DNA, 15 bp, Homo sapiens
ttccattttacacgt

SEQ ID NO: 393919 - DNA, 15 bp, Homo sapiens
tttccattttacacg

SEQ ID NO: 393920 - DNA, 15 bp, Homo sapiens
ttttccattttacac

SEQ ID NO: 393921 - DNA, 15 bp, Homo sapiens
attttccattttaca

SEQ ID NO: 393922 - DNA, 15 bp, Homo sapiens
cattttccattttac

SEQ ID NO: 393923 - DNA, 15 bp, Homo sapiens
tcattttccatttta

SEQ ID NO: 393924 - DNA, 15 bp, Homo sapiens
atcattttccatttt

SEQ ID NO: 393925 - DNA, 15 bp, Homo sapiens
tatcattttccattt

SEQ ID NO: 393926 - DNA, 15 bp, Homo sapiens
gtatcattttccatt

SEQ ID NO: 393927 - DNA, 15 bp, Homo sapiens
ggtatcattttccat

SEQ ID NO: 393928 - DNA, 15 bp, Homo sapiens
tggtatcattttcca

SEQ ID NO: 393929 - DNA, 15 bp, Homo sapiens
ctggtatcattttcc

SEQ ID NO: 393930 - DNA, 15 bp, Homo sapiens
tctggtatcattttc

SEQ ID NO: 393931 - DNA, 15 bp, Homo sapiens
ttctggtatcatttt

SEQ ID NO: 393932 - DNA, 15 bp, Homo sapiens
tttctggtatcattt

SEQ ID NO: 393933 - DNA, 15 bp, Homo sapiens
atttctggtatcatt

SEQ ID NO: 393934 - DNA, 15 bp, Homo sapiens
catttctggtatcat

SEQ ID NO: 393935 - DNA, 15 bp, Homo sapiens
tcatttctggtatca

SEQ ID NO: 393936 - DNA, 15 bp, Homo sapiens
ttcatttctggtatc

SEQ ID NO: 393937 - DNA, 15 bp, Homo sapiens
cttcatttctggtat

SEQ ID NO: 393938 - DNA, 15 bp, Homo sapiens
acttcatttctggta

SEQ ID NO: 393939 - DNA, 15 bp, Homo sapiens
tacttcatttctggt

SEQ ID NO: 393940 - DNA, 15 bp, Homo sapiens
gtacttcatttctgg

SEQ ID NO: 393941 - DNA, 15 bp, Homo sapiens
ggtacttcatttctg

SEQ ID NO: 393942 - DNA, 15 bp, Homo sapiens
tggtacttcatttct

SEQ ID NO: 393943 - DNA, 15 bp, Homo sapiens
ctggtacttcatttc

SEQ ID NO: 393944 - DNA, 15 bp, Homo sapiens
tctggtacttcattt

SEQ ID NO: 393945 - DNA, 15 bp, Homo sapiens
ttctggtacttcatt

SEQ ID NO: 393946 - DNA, 15 bp, Homo sapiens
tttctggtacttcat

SEQ ID NO: 393947 - DNA, 15 bp, Homo sapiens
atttctggtacttca

SEQ ID NO: 393948 - DNA, 15 bp, Homo sapiens
catttctggtacttc

SEQ ID NO: 393949 - DNA, 15 bp, Homo sapiens
tcatttctggtactt

SEQ ID NO: 393950 - DNA, 15 bp, Homo sapiens
ttcatttctggtact

SEQ ID NO: 393951 - DNA, 15 bp, Homo sapiens
tttcatttctggtac

SEQ ID NO: 393952 - DNA, 15 bp, Homo sapiens
atttcatttctggta

SEQ ID NO: 393953 - DNA, 15 bp, Homo sapiens
tatttcatttctggt

SEQ ID NO: 393954 - DNA, 15 bp, Homo sapiens
ttatttcatttctgg

SEQ ID NO: 393955 - DNA, 15 bp, Homo sapiens
cttatttcatttctg

SEQ ID NO: 393956 - DNA, 15 bp, Homo sapiens
acttatttcatttct

SEQ ID NO: 393957 - DNA, 15 bp, Homo sapiens
cacttatttcatttc

SEQ ID NO: 393958 - DNA, 15 bp, Homo sapiens
acacttatttcattt

SEQ ID NO: 393959 - DNA, 15 bp, Homo sapiens
gacacttatttcatt

SEQ ID NO: 393960 - DNA, 15 bp, Homo sapiens
agacacttatttcat

SEQ ID NO: 393961 - DNA, 15 bp, Homo sapiens
tagacacttatttca

SEQ ID NO: 393962 - DNA, 15 bp, Homo sapiens
ttagacacttatttc

SEQ ID NO: 393963 - DNA, 15 bp, Homo sapiens
attagacacttattt

SEQ ID NO: 393964 - DNA, 15 bp, Homo sapiens
tattagacacttatt

SEQ ID NO: 393965 - DNA, 15 bp, Homo sapiens
ttattagacacttat

SEQ ID NO: 393966 - DNA, 15 bp, Homo sapiens
tttattagacactta

SEQ ID NO: 393967 - DNA, 15 bp, Homo sapiens
ttttattagacactt

SEQ ID NO: 393968 - DNA, 15 bp, Homo sapiens
attttattagacact

SEQ ID NO: 393969 - DNA, 15 bp, Homo sapiens
tattttattagacac

SEQ ID NO: 393970 - DNA, 15 bp, Homo sapiens
ttattttattagaca

SEQ ID NO: 393971 - DNA, 15 bp, Homo sapiens
cttattttattagac

SEQ ID NO: 393972 - DNA, 15 bp, Homo sapiens
gcttattttattaga

SEQ ID NO: 393973 - DNA, 15 bp, Homo sapiens
tgcttattttattag

SEQ ID NO: 393974 - DNA, 15 bp, Homo sapiens
ttgcttattttatta

SEQ ID NO: 393975 - DNA, 15 bp, Homo sapiens
tttgcttattttatt

SEQ ID NO: 393976 - DNA, 15 bp, Homo sapiens
gtttgcttattttat

SEQ ID NO: 393977 - DNA, 15 bp, Homo sapiens
ggtttgcttatttta

SEQ ID NO: 393978 - DNA, 15 bp, Homo sapiens
tggtttgcttatttt

SEQ ID NO: 393979 - DNA, 15 bp, Homo sapiens
ctggtttgcttattt

SEQ ID NO: 393980 - DNA, 15 bp, Homo sapiens
actggtttgcttatt

SEQ ID NO: 393981 - DNA, 15 bp, Homo sapiens
tactggtttgcttat

SEQ ID NO: 393982 - DNA, 15 bp, Homo sapiens
ttactggtttgctta

SEQ ID NO: 393983 - DNA, 15 bp, Homo sapiens
cttactggtttgctt

SEQ ID NO: 393984 - DNA, 15 bp, Homo sapiens
tcttactggtttgct

SEQ ID NO: 393985 - DNA, 15 bp, Homo sapiens
ttcttactggtttgc

SEQ ID NO: 393986 - DNA, 15 bp, Homo sapiens
cttcttactggtttg

SEQ ID NO: 393987 - DNA, 15 bp, Homo sapiens
acttcttactggttt

SEQ ID NO: 393988 - DNA, 15 bp, Homo sapiens
gacttcttactggtt

SEQ ID NO: 393989 - DNA, 15 bp, Homo sapiens
tgacttcttactggt

SEQ ID NO: 393990 - DNA, 15 bp, Homo sapiens
atgacttcttactgg

SEQ ID NO: 393991 - DNA, 15 bp, Homo sapiens
tatgacttcttactg

SEQ ID NO: 393992 - DNA, 15 bp, Homo sapiens
atatgacttcttact

SEQ ID NO: 393993 - DNA, 15 bp, Homo sapiens
tatatgacttcttac

SEQ ID NO: 393994 - DNA, 15 bp, Homo sapiens
atatatgacttctta

SEQ ID NO: 393995 - DNA, 15 bp, Homo sapiens
gatatatgacttctt

SEQ ID NO: 393996 - DNA, 15 bp, Homo sapiens
tgatatatgacttct

SEQ ID NO: 393997 - DNA, 15 bp, Homo sapiens
gtgatatatgacttc

SEQ ID NO: 393998 - DNA, 15 bp, Homo sapiens
ggtgatatatgactt

SEQ ID NO: 393999 - DNA, 15 bp, Homo sapiens
aggtgatatatgact

SEQ ID NO: 394000 - DNA, 15 bp, Homo sapiens
caggtgatatatgac

SEQ ID NO: 394001 - DNA, 15 bp, Homo sapiens
tcaggtgatatatga

SEQ ID NO: 394002 - DNA, 15 bp, Homo sapiens
gtcaggtgatatatg

SEQ ID NO: 394003 - DNA, 15 bp, Homo sapiens
agtcaggtgatatat

SEQ ID NO: 394004 - DNA, 15 bp, Homo sapiens
gagtcaggtgatata

SEQ ID NO: 394005 - DNA, 15 bp, Homo sapiens
tgagtcaggtgatat

SEQ ID NO: 394006 - DNA, 15 bp, Homo sapiens
ctgagtcaggtgata

SEQ ID NO: 394007 - DNA, 15 bp, Homo sapiens
actgagtcaggtgat

SEQ ID NO: 394008 - DNA, 15 bp, Homo sapiens
aactgagtcaggtga

SEQ ID NO: 394009 - DNA, 15 bp, Homo sapiens
gaactgagtcaggtg

SEQ ID NO: 394010 - DNA, 15 bp, Homo sapiens
ggaactgagtcaggt

SEQ ID NO: 394011 - DNA, 15 bp, Homo sapiens
aggaactgagtcagg

SEQ ID NO: 394012 - DNA, 15 bp, Homo sapiens
aaggaactgagtcag

SEQ ID NO: 394013 - DNA, 15 bp, Homo sapiens
gaaggaactgagtca

SEQ ID NO: 394014 - DNA, 15 bp, Homo sapiens
agaaggaactgagtc

SEQ ID NO: 394015 - DNA, 15 bp, Homo sapiens
tagaaggaactgagt

SEQ ID NO: 394016 - DNA, 15 bp, Homo sapiens
gtagaaggaactgag

SEQ ID NO: 394017 - DNA, 15 bp, Homo sapiens
tgtagaaggaactga

SEQ ID NO: 394018 - DNA, 15 bp, Homo sapiens
ctgtagaaggaactg

SEQ ID NO: 394019 - DNA, 15 bp, Homo sapiens
cctgtagaaggaact

SEQ ID NO: 394020 - DNA, 15 bp, Homo sapiens
ccctgtagaaggaac

SEQ ID NO: 394021 - DNA, 15 bp, Homo sapiens
tccctgtagaaggaa

SEQ ID NO: 394022 - DNA, 15 bp, Homo sapiens
gtccctgtagaagga

SEQ ID NO: 394023 - DNA, 15 bp, Homo sapiens
agtccctgtagaagg

SEQ ID NO: 394024 - DNA, 15 bp, Homo sapiens
tagtccctgtagaag

SEQ ID NO: 394025 - DNA, 15 bp, Homo sapiens
ttagtccctgtagaa

SEQ ID NO: 394026 - DNA, 15 bp, Homo sapiens
attagtccctgtaga

SEQ ID NO: 394027 - DNA, 15 bp, Homo sapiens
gattagtccctgtag

SEQ ID NO: 394028 - DNA, 15 bp, Homo sapiens
tgattagtccctgta

SEQ ID NO: 394029 - DNA, 15 bp, Homo sapiens
ttgattagtccctgt

SEQ ID NO: 394030 - DNA, 15 bp, Homo sapiens
tttgattagtccctg

SEQ ID NO: 394031 - DNA, 15 bp, Homo sapiens
atttgattagtccct

SEQ ID NO: 394032 - DNA, 15 bp, Homo sapiens
catttgattagtccc

SEQ ID NO: 394033 - DNA, 15 bp, Homo sapiens
tcatttgattagtcc

SEQ ID NO: 394034 - DNA, 15 bp, Homo sapiens
ttcatttgattagtc

SEQ ID NO: 394035 - DNA, 15 bp, Homo sapiens
tttcatttgattagt

SEQ ID NO: 394036 - DNA, 15 bp, Homo sapiens
atttcatttgattag

SEQ ID NO: 394037 - DNA, 15 bp, Homo sapiens
catttcatttgatta

SEQ ID NO: 394038 - DNA, 15 bp, Homo sapiens
gcatttcatttgatt

SEQ ID NO: 394039 - DNA, 15 bp, Homo sapiens
tgcatttcatttgat

SEQ ID NO: 394040 - DNA, 15 bp, Homo sapiens
atgcatttcatttga

SEQ ID NO: 394041 - DNA, 15 bp, Homo sapiens
gatgcatttcatttg

SEQ ID NO: 394042 - DNA, 15 bp, Homo sapiens
agatgcatttcattt

SEQ ID NO: 394043 - DNA, 15 bp, Homo sapiens
aagatgcatttcatt

SEQ ID NO: 394044 - DNA, 15 bp, Homo sapiens
caagatgcatttcat

SEQ ID NO: 394045 - DNA, 15 bp, Homo sapiens
tcaagatgcatttca

SEQ ID NO: 394046 - DNA, 15 bp, Homo sapiens
ttcaagatgcatttc

SEQ ID NO: 394047 - DNA, 15 bp, Homo sapiens
tttcaagatgcattt

SEQ ID NO: 394048 - DNA, 15 bp, Homo sapiens
atttcaagatgcatt

SEQ ID NO: 394049 - DNA, 15 bp, Homo sapiens
gatttcaagatgcat

SEQ ID NO: 394050 - DNA, 15 bp, Homo sapiens
ggatttcaagatgca

SEQ ID NO: 394051 - DNA, 15 bp, Homo sapiens
tggatttcaagatgc

SEQ ID NO: 394052 - DNA, 15 bp, Homo sapiens
gtggatttcaagatg

SEQ ID NO: 394053 - DNA, 15 bp, Homo sapiens
tgtggatttcaagat

SEQ ID NO: 394054 - DNA, 15 bp, Homo sapiens
ttgtggatttcaaga

SEQ ID NO: 394055 - DNA, 15 bp, Homo sapiens
attgtggatttcaag

SEQ ID NO: 394056 - DNA, 15 bp, Homo sapiens
aattgtggatttcaa

SEQ ID NO: 394057 - DNA, 15 bp, Homo sapiens
taattgtggatttca

SEQ ID NO: 394058 - DNA, 15 bp, Homo sapiens
ttaattgtggatttc

SEQ ID NO: 394059 - DNA, 15 bp, Homo sapiens
tttaattgtggattt

SEQ ID NO: 394060 - DNA, 15 bp, Homo sapiens
gtttaattgtggatt

SEQ ID NO: 394061 - DNA, 15 bp, Homo sapiens
tgtttaattgtggat

SEQ ID NO: 394062 - DNA, 15 bp, Homo sapiens
atgtttaattgtgga

SEQ ID NO: 394063 - DNA, 15 bp, Homo sapiens
catgtttaattgtgg

SEQ ID NO: 394064 - DNA, 15 bp, Homo sapiens
gcatgtttaattgtg

SEQ ID NO: 394065 - DNA, 15 bp, Homo sapiens
ggcatgtttaattgt

SEQ ID NO: 394066 - DNA, 15 bp, Homo sapiens
tggcatgtttaattg

SEQ ID NO: 394067 - DNA, 15 bp, Homo sapiens
ttggcatgtttaatt

SEQ ID NO: 394068 - DNA, 15 bp, Homo sapiens
tttggcatgtttaat

SEQ ID NO: 394069 - DNA, 15 bp, Homo sapiens
ctttggcatgtttaa

SEQ ID NO: 394070 - DNA, 15 bp, Homo sapiens
tctttggcatgttta

SEQ ID NO: 394071 - DNA, 15 bp, Homo sapiens
ctctttggcatgttt

SEQ ID NO: 394072 - DNA, 15 bp, Homo sapiens
actctttggcatgtt

SEQ ID NO: 394073 - DNA, 15 bp, Homo sapiens
gactctttggcatgt

SEQ ID NO: 394074 - DNA, 15 bp, Homo sapiens
agactctttggcatg

SEQ ID NO: 394075 - DNA, 15 bp, Homo sapiens
tagactctttggcat

SEQ ID NO: 394076 - DNA, 15 bp, Homo sapiens
ctagactctttggca

SEQ ID NO: 394077 - DNA, 15 bp, Homo sapiens
gctagactctttggc

SEQ ID NO: 394078 - DNA, 15 bp, Homo sapiens
ggctagactctttgg

SEQ ID NO: 394079 - DNA, 15 bp, Homo sapiens
tggctagactctttg

SEQ ID NO: 394080 - DNA, 15 bp, Homo sapiens
ctggctagactcttt

SEQ ID NO: 394081 - DNA, 15 bp, Homo sapiens
tctggctagactctt

SEQ ID NO: 394082 - DNA, 15 bp, Homo sapiens
ctctggctagactct

SEQ ID NO: 394083 - DNA, 15 bp, Homo sapiens
tctctggctagactc

SEQ ID NO: 394084 - DNA, 15 bp, Homo sapiens
ttctctggctagact

SEQ ID NO: 394085 - DNA, 15 bp, Homo sapiens
attctctggctagac

SEQ ID NO: 394086 - DNA, 15 bp, Homo sapiens
tattctctggctaga

SEQ ID NO: 394087 - DNA, 15 bp, Homo sapiens
gtattctctggctag

SEQ ID NO: 394088 - DNA, 15 bp, Homo sapiens
agtattctctggcta

SEQ ID NO: 394089 - DNA, 15 bp, Homo sapiens
cagtattctctggct

SEQ ID NO: 394090 - DNA, 15 bp, Homo sapiens
gcagtattctctggc

SEQ ID NO: 394091 - DNA, 15 bp, Homo sapiens
tgcagtattctctgg

SEQ ID NO: 394092 - DNA, 15 bp, Homo sapiens
atgcagtattctctg

SEQ ID NO: 394093 - DNA, 15 bp, Homo sapiens
gatgcagtattctct

SEQ ID NO: 394094 - DNA, 15 bp, Homo sapiens
tgatgcagtattctc

SEQ ID NO: 394095 - DNA, 15 bp, Homo sapiens
ttgatgcagtattct

SEQ ID NO: 394096 - DNA, 15 bp, Homo sapiens
tttgatgcagtattc

SEQ ID NO: 394097 - DNA, 15 bp, Homo sapiens
ttttgatgcagtatt

SEQ ID NO: 394098 - DNA, 15 bp, Homo sapiens
cttttgatgcagtat

SEQ ID NO: 394099 - DNA, 15 bp, Homo sapiens
tcttttgatgcagta

SEQ ID NO: 394100 - DNA, 15 bp, Homo sapiens
gtcttttgatgcagt

SEQ ID NO: 394101 - DNA, 15 bp, Homo sapiens
tgtcttttgatgcag

SEQ ID NO: 394102 - DNA, 15 bp, Homo sapiens
atgtcttttgatgca

SEQ ID NO: 394103 - DNA, 15 bp, Homo sapiens
catgtcttttgatgc

SEQ ID NO: 394104 - DNA, 15 bp, Homo sapiens
tcatgtcttttgatg

SEQ ID NO: 394105 - DNA, 15 bp, Homo sapiens
atcatgtcttttgat

SEQ ID NO: 394106 - DNA, 15 bp, Homo sapiens
aatcatgtcttttga

SEQ ID NO: 394107 - DNA, 15 bp, Homo sapiens
aaatcatgtcttttg

SEQ ID NO: 394108 - DNA, 15 bp, Homo sapiens
caaatcatgtctttt

SEQ ID NO: 394109 - DNA, 15 bp, Homo sapiens
tcaaatcatgtcttt

SEQ ID NO: 394110 - DNA, 15 bp, Homo sapiens
gtcaaatcatgtctt

SEQ ID NO: 394111 - DNA, 15 bp, Homo sapiens
agtcaaatcatgtct

SEQ ID NO: 394112 - DNA, 15 bp, Homo sapiens
aagtcaaatcatgtc

SEQ ID NO: 394113 - DNA, 15 bp, Homo sapiens
aaagtcaaatcatgt

SEQ ID NO: 394114 - DNA, 15 bp, Homo sapiens
aaaagtcaaatcatg

SEQ ID NO: 394115 - DNA, 15 bp, Homo sapiens
taaaagtcaaatcat

SEQ ID NO: 394116 - DNA, 15 bp, Homo sapiens
ataaaagtcaaatca

SEQ ID NO: 394117 - DNA, 15 bp, Homo sapiens
cataaaagtcaaatc

SEQ ID NO: 394118 - DNA, 15 bp, Homo sapiens
tcataaaagtcaaat

SEQ ID NO: 394119 - DNA, 15 bp, Homo sapiens
ctcataaaagtcaaa

SEQ ID NO: 394120 - DNA, 15 bp, Homo sapiens
actcataaaagtcaa

SEQ ID NO: 394121 - DNA, 15 bp, Homo sapiens
gactcataaaagtca

SEQ ID NO: 394122 - DNA, 15 bp, Homo sapiens
ggactcataaaagtc

SEQ ID NO: 394123 - DNA, 15 bp, Homo sapiens
tggactcataaaagt

SEQ ID NO: 394124 - DNA, 15 bp, Homo sapiens
gtggactcataaaag

SEQ ID NO: 394125 - DNA, 15 bp, Homo sapiens
agtggactcataaaa

SEQ ID NO: 394126 - DNA, 15 bp, Homo sapiens
aagtggactcataaa

SEQ ID NO: 394127 - DNA, 15 bp, Homo sapiens
aaagtggactcataa

SEQ ID NO: 394128 - DNA, 15 bp, Homo sapiens
aaaagtggactcata

SEQ ID NO: 394129 - DNA, 15 bp, Homo sapiens
aaaaagtggactcat

SEQ ID NO: 394130 - DNA, 15 bp, Homo sapiens
gaaaaagtggactca

SEQ ID NO: 394131 - DNA, 15 bp, Homo sapiens
tgaaaaagtggactc

SEQ ID NO: 394132 - DNA, 15 bp, Homo sapiens
atgaaaaagtggact

SEQ ID NO: 394133 - DNA, 15 bp, Homo sapiens
aatgaaaaagtggac

SEQ ID NO: 394134 - DNA, 15 bp, Homo sapiens
caatgaaaaagtgga

SEQ ID NO: 394135 - DNA, 15 bp, Homo sapiens
ccaatgaaaaagtgg

SEQ ID NO: 394136 - DNA, 15 bp, Homo sapiens
tccaatgaaaaagtg

SEQ ID NO: 394137 - DNA, 15 bp, Homo sapiens
atccaatgaaaaagt

SEQ ID NO: 394138 - DNA, 15 bp, Homo sapiens
tatccaatgaaaaag

SEQ ID NO: 394139 - DNA, 15 bp, Homo sapiens
ttatccaatgaaaaa

SEQ ID NO: 394140 - DNA, 15 bp, Homo sapiens
cttatccaatgaaaa

SEQ ID NO: 394141 - DNA, 15 bp, Homo sapiens
acttatccaatgaaa

SEQ ID NO: 394142 - DNA, 15 bp, Homo sapiens
aacttatccaatgaa

SEQ ID NO: 394143 - DNA, 15 bp, Homo sapiens
taacttatccaatga

SEQ ID NO: 394144 - DNA, 15 bp, Homo sapiens
ttaacttatccaatg

SEQ ID NO: 394145 - DNA, 15 bp, Homo sapiens
tttaacttatccaat

SEQ ID NO: 394146 - DNA, 15 bp, Homo sapiens
atttaacttatccaa

SEQ ID NO: 394147 - DNA, 15 bp, Homo sapiens
aatttaacttatcca

SEQ ID NO: 394148 - DNA, 15 bp, Homo sapiens
aaatttaacttatcc

SEQ ID NO: 394149 - DNA, 15 bp, Homo sapiens
aaaatttaacttatc

SEQ ID NO: 394150 - DNA, 15 bp, Homo sapiens
caaaatttaacttat

SEQ ID NO: 394151 - DNA, 15 bp, Homo sapiens
acaaaatttaactta

SEQ ID NO: 394152 - DNA, 15 bp, Homo sapiens
tacaaaatttaactt

SEQ ID NO: 394153 - DNA, 15 bp, Homo sapiens
ttacaaaatttaact

SEQ ID NO: 394154 - DNA, 15 bp, Homo sapiens
tttacaaaatttaac

SEQ ID NO: 394155 - DNA, 15 bp, Homo sapiens
gtttacaaaatttaa

SEQ ID NO: 394156 - DNA, 15 bp, Homo sapiens
agtttacaaaattta

SEQ ID NO: 394157 - DNA, 15 bp, Homo sapiens
cagtttacaaaattt

SEQ ID NO: 394158 - DNA, 15 bp, Homo sapiens
tcagtttacaaaatt

SEQ ID NO: 394159 - DNA, 15 bp, Homo sapiens
atcagtttacaaaat

SEQ ID NO: 394160 - DNA, 15 bp, Homo sapiens
aatcagtttacaaaa

SEQ ID NO: 394161 - DNA, 15 bp, Homo sapiens
aaatcagtttacaaa

SEQ ID NO: 394162 - DNA, 15 bp, Homo sapiens
gaaatcagtttacaa

SEQ ID NO: 394163 - DNA, 15 bp, Homo sapiens
tgaaatcagtttaca

SEQ ID NO: 394164 - DNA, 15 bp, Homo sapiens
ttgaaatcagtttac

SEQ ID NO: 394165 - DNA, 15 bp, Homo sapiens
tttgaaatcagttta

SEQ ID NO: 394166 - DNA, 15 bp, Homo sapiens
ctttgaaatcagttt

SEQ ID NO: 394167 - DNA, 15 bp, Homo sapiens
actttgaaatcagtt

SEQ ID NO: 394168 - DNA, 15 bp, Homo sapiens
cactttgaaatcagt

SEQ ID NO: 394169 - DNA, 15 bp, Homo sapiens
ccactttgaaatcag

SEQ ID NO: 394170 - DNA, 15 bp, Homo sapiens
accactttgaaatca

SEQ ID NO: 394171 - DNA, 15 bp, Homo sapiens
aaccactttgaaatc

SEQ ID NO: 394172 - DNA, 15 bp, Homo sapiens
aaaccactttgaaat

SEQ ID NO: 394173 - DNA, 15 bp, Homo sapiens
aaaaccactttgaaa

SEQ ID NO: 394174 - DNA, 15 bp, Homo sapiens
caaaaccactttgaa

SEQ ID NO: 394175 - DNA, 15 bp, Homo sapiens
ccaaaaccactttga

SEQ ID NO: 394176 - DNA, 15 bp, Homo sapiens
tccaaaaccactttg

SEQ ID NO: 394177 - DNA, 15 bp, Homo sapiens
ctccaaaaccacttt

SEQ ID NO: 394178 - DNA, 15 bp, Homo sapiens
actccaaaaccactt

SEQ ID NO: 394179 - DNA, 15 bp, Homo sapiens
gactccaaaaccact

SEQ ID NO: 394180 - DNA, 15 bp, Homo sapiens
ggactccaaaaccac

SEQ ID NO: 394181 - DNA, 15 bp, Homo sapiens
aggactccaaaacca

SEQ ID NO: 394182 - DNA, 15 bp, Homo sapiens
aaggactccaaaacc

SEQ ID NO: 394183 - DNA, 15 bp, Homo sapiens
caaggactccaaaac

SEQ ID NO: 394184 - DNA, 15 bp, Homo sapiens
tcaaggactccaaaa

SEQ ID NO: 394185 - DNA, 15 bp, Homo sapiens
ctcaaggactccaaa

SEQ ID NO: 394186 - DNA, 15 bp, Homo sapiens
gctcaaggactccaa

SEQ ID NO: 394187 - DNA, 15 bp, Homo sapiens
agctcaaggactcca

SEQ ID NO: 394188 - DNA, 15 bp, Homo sapiens
cagctcaaggactcc

SEQ ID NO: 394189 - DNA, 15 bp, Homo sapiens
tcagctcaaggactc

SEQ ID NO: 394190 - DNA, 15 bp, Homo sapiens
ttcagctcaaggact

SEQ ID NO: 394191 - DNA, 15 bp, Homo sapiens
attcagctcaaggac

SEQ ID NO: 394192 - DNA, 15 bp, Homo sapiens
aattcagctcaagga

SEQ ID NO: 394193 - DNA, 15 bp, Homo sapiens
gaattcagctcaagg

SEQ ID NO: 394194 - DNA, 15 bp, Homo sapiens
agaattcagctcaag

SEQ ID NO: 394195 - DNA, 15 bp, Homo sapiens
gagaattcagctcaa

SEQ ID NO: 394196 - DNA, 15 bp, Homo sapiens
ggagaattcagctca

SEQ ID NO: 394197 - DNA, 15 bp, Homo sapiens
gggagaattcagctc

SEQ ID NO: 394198 - DNA, 15 bp, Homo sapiens
ggggagaattcagct

SEQ ID NO: 394199 - DNA, 15 bp, Homo sapiens
tggggagaattcagc

SEQ ID NO: 394200 - DNA, 15 bp, Homo sapiens
gtggggagaattcag

SEQ ID NO: 394201 - DNA, 15 bp, Homo sapiens
agtggggagaattca

SEQ ID NO: 394202 - DNA, 15 bp, Homo sapiens
tagtggggagaattc

SEQ ID NO: 394203 - DNA, 15 bp, Homo sapiens
gtagtggggagaatt

SEQ ID NO: 394204 - DNA, 15 bp, Homo sapiens
tgtagtggggagaat

SEQ ID NO: 394205 - DNA, 15 bp, Homo sapiens
ttgtagtggggagaa

SEQ ID NO: 394206 - DNA, 15 bp, Homo sapiens
attgtagtggggaga

SEQ ID NO: 394207 - DNA, 15 bp, Homo sapiens
gattgtagtggggag

SEQ ID NO: 394208 - DNA, 15 bp, Homo sapiens
agattgtagtgggga

SEQ ID NO: 394209 - DNA, 15 bp, Homo sapiens
tagattgtagtgggg

SEQ ID NO: 394210 - DNA, 15 bp, Homo sapiens
gtagattgtagtggg

SEQ ID NO: 394211 - DNA, 15 bp, Homo sapiens
agtagattgtagtgg

SEQ ID NO: 394212 - DNA, 15 bp, Homo sapiens
gagtagattgtagtg

SEQ ID NO: 394213 - DNA, 15 bp, Homo sapiens
agagtagattgtagt

SEQ ID NO: 394214 - DNA, 15 bp, Homo sapiens
cagagtagattgtag

SEQ ID NO: 394215 - DNA, 15 bp, Homo sapiens
tcagagtagattgta

SEQ ID NO: 394216 - DNA, 15 bp, Homo sapiens
ttcagagtagattgt

SEQ ID NO: 394217 - DNA, 15 bp, Homo sapiens
tttcagagtagattg

SEQ ID NO: 394218 - DNA, 15 bp, Homo sapiens
ttttcagagtagatt

SEQ ID NO: 394219 - DNA, 15 bp, Homo sapiens
gttttcagagtagat

SEQ ID NO: 394220 - DNA, 15 bp, Homo sapiens
agttttcagagtaga

SEQ ID NO: 394221 - DNA, 15 bp, Homo sapiens
tagttttcagagtag

SEQ ID NO: 394222 - DNA, 15 bp, Homo sapiens
ttagttttcagagta

SEQ ID NO: 394223 - DNA, 15 bp, Homo sapiens
gttagttttcagagt

SEQ ID NO: 394224 - DNA, 15 bp, Homo sapiens
agttagttttcagag

SEQ ID NO: 394225 - DNA, 15 bp, Homo sapiens
cagttagttttcaga

SEQ ID NO: 394226 - DNA, 15 bp, Homo sapiens
ccagttagttttcag

SEQ ID NO: 394227 - DNA, 15 bp, Homo sapiens
accagttagttttca

SEQ ID NO: 394228 - DNA, 15 bp, Homo sapiens
caccagttagttttc

SEQ ID NO: 394229 - DNA, 15 bp, Homo sapiens
tcaccagttagtttt

SEQ ID NO: 394230 - DNA, 15 bp, Homo sapiens
gtcaccagttagttt

SEQ ID NO: 394231 - DNA, 15 bp, Homo sapiens
tgtcaccagttagtt

SEQ ID NO: 394232 - DNA, 15 bp, Homo sapiens
ttgtcaccagttagt

SEQ ID NO: 394233 - DNA, 15 bp, Homo sapiens
tttgtcaccagttag

SEQ ID NO: 394234 - DNA, 15 bp, Homo sapiens
ctttgtcaccagtta

SEQ ID NO: 394235 - DNA, 15 bp, Homo sapiens
actttgtcaccagtt

SEQ ID NO: 394236 - DNA, 15 bp, Homo sapiens
aactttgtcaccagt

SEQ ID NO: 394237 - DNA, 15 bp, Homo sapiens
aaactttgtcaccag

SEQ ID NO: 394238 - DNA, 15 bp, Homo sapiens
aaaactttgtcacca

SEQ ID NO: 394239 - DNA, 15 bp, Homo sapiens
taaaactttgtcacc

SEQ ID NO: 394240 - DNA, 15 bp, Homo sapiens
ataaaactttgtcac

SEQ ID NO: 394241 - DNA, 15 bp, Homo sapiens
aataaaactttgtca

SEQ ID NO: 394242 - DNA, 15 bp, Homo sapiens
gaataaaactttgtc

SEQ ID NO: 394243 - DNA, 15 bp, Homo sapiens
agaataaaactttgt

SEQ ID NO: 394244 - DNA, 15 bp, Homo sapiens
tagaataaaactttg

SEQ ID NO: 394245 - DNA, 15 bp, Homo sapiens
atagaataaaacttt

SEQ ID NO: 394246 - DNA, 15 bp, Homo sapiens
aatagaataaaactt

SEQ ID NO: 394247 - DNA, 15 bp, Homo sapiens
caatagaataaaact

SEQ ID NO: 394248 - DNA, 15 bp, Homo sapiens
tcaatagaataaaac

SEQ ID NO: 394249 - DNA, 15 bp, Homo sapiens
atcaatagaataaaa

SEQ ID NO: 394250 - DNA, 15 bp, Homo sapiens
aatcaatagaataaa

SEQ ID NO: 394251 - DNA, 15 bp, Homo sapiens
aaatcaatagaataa

SEQ ID NO: 394252 - DNA, 15 bp, Homo sapiens
aaaatcaatagaata

SEQ ID NO: 394253 - DNA, 15 bp, Homo sapiens
caaaatcaatagaat

SEQ ID NO: 394254 - DNA, 15 bp, Homo sapiens
tcaaaatcaatagaa

SEQ ID NO: 394255 - DNA, 15 bp, Homo sapiens
gtcaaaatcaataga

SEQ ID NO: 394256 - DNA, 15 bp, Homo sapiens
ggtcaaaatcaatag

SEQ ID NO: 394257 - DNA, 15 bp, Homo sapiens
cggtcaaaatcaata

SEQ ID NO: 394258 - DNA, 15 bp, Homo sapiens
tcggtcaaaatcaat

SEQ ID NO: 394259 - DNA, 15 bp, Homo sapiens
atcggtcaaaatcaa

SEQ ID NO: 394260 - DNA, 15 bp, Homo sapiens
catcggtcaaaatca

SEQ ID NO: 394261 - DNA, 15 bp, Homo sapiens
gcatcggtcaaaatc

SEQ ID NO: 394262 - DNA, 15 bp, Homo sapiens
agcatcggtcaaaat

SEQ ID NO: 394263 - DNA, 15 bp, Homo sapiens
aagcatcggtcaaaa

SEQ ID NO: 394264 - DNA, 15 bp, Homo sapiens
taagcatcggtcaaa

SEQ ID NO: 394265 - DNA, 15 bp, Homo sapiens
ataagcatcggtcaa

SEQ ID NO: 394266 - DNA, 15 bp, Homo sapiens
aataagcatcggtca

SEQ ID NO: 394267 - DNA, 15 bp, Homo sapiens
aaataagcatcggtc

SEQ ID NO: 394268 - DNA, 15 bp, Homo sapiens
aaaataagcatcggt

SEQ ID NO: 394269 - DNA, 15 bp, Homo sapiens
caaaataagcatcgg

SEQ ID NO: 394270 - DNA, 15 bp, Homo sapiens
acaaaataagcatcg

SEQ ID NO: 394271 - DNA, 15 bp, Homo sapiens
aacaaaataagcatc

SEQ ID NO: 394272 - DNA, 15 bp, Homo sapiens
caacaaaataagcat

SEQ ID NO: 394273 - DNA, 15 bp, Homo sapiens
tcaacaaaataagca

SEQ ID NO: 394274 - DNA, 15 bp, Homo sapiens
gtcaacaaaataagc

SEQ ID NO: 394275 - DNA, 15 bp, Homo sapiens
ggtcaacaaaataag

SEQ ID NO: 394276 - DNA, 15 bp, Homo sapiens
tggtcaacaaaataa

SEQ ID NO: 394277 - DNA, 15 bp, Homo sapiens
ttggtcaacaaaata

SEQ ID NO: 394278 - DNA, 15 bp, Homo sapiens
attggtcaacaaaat

SEQ ID NO: 394279 - DNA, 15 bp, Homo sapiens
tattggtcaacaaaa

SEQ ID NO: 394280 - DNA, 15 bp, Homo sapiens
ctattggtcaacaaa

SEQ ID NO: 394281 - DNA, 15 bp, Homo sapiens
actattggtcaacaa

SEQ ID NO: 394282 - DNA, 15 bp, Homo sapiens
aactattggtcaaca

SEQ ID NO: 394283 - DNA, 15 bp, Homo sapiens
taactattggtcaac

SEQ ID NO: 394284 - DNA, 15 bp, Homo sapiens
ataactattggtcaa

SEQ ID NO: 394285 - DNA, 15 bp, Homo sapiens
aataactattggtca

SEQ ID NO: 394286 - DNA, 15 bp, Homo sapiens
aaataactattggtc

SEQ ID NO: 394287 - DNA, 15 bp, Homo sapiens
taaataactattggt

SEQ ID NO: 394288 - DNA, 15 bp, Homo sapiens
ttaaataactattgg

SEQ ID NO: 394289 - DNA, 15 bp, Homo sapiens
attaaataactattg

SEQ ID NO: 394290 - DNA, 15 bp, Homo sapiens
cattaaataactatt

SEQ ID NO: 394291 - DNA, 15 bp, Homo sapiens
acattaaataactat

SEQ ID NO: 394292 - DNA, 15 bp, Homo sapiens
gacattaaataacta

SEQ ID NO: 394293 - DNA, 15 bp, Homo sapiens
ggacattaaataact

SEQ ID NO: 394294 - DNA, 15 bp, Homo sapiens
tggacattaaataac

SEQ ID NO: 394295 - DNA, 15 bp, Homo sapiens
atggacattaaataa

SEQ ID NO: 394296 - DNA, 15 bp, Homo sapiens
tatggacattaaata

SEQ ID NO: 394297 - DNA, 15 bp, Homo sapiens
ttatggacattaaat

SEQ ID NO: 394298 - DNA, 15 bp, Homo sapiens
attatggacattaaa

SEQ ID NO: 394299 - DNA, 15 bp, Homo sapiens
tattatggacattaa

SEQ ID NO: 394300 - DNA, 15 bp, Homo sapiens
atattatggacatta

SEQ ID NO: 394301 - DNA, 15 bp, Homo sapiens
catattatggacatt

SEQ ID NO: 394302 - DNA, 15 bp, Homo sapiens
ccatattatggacat

SEQ ID NO: 394303 - DNA, 15 bp, Homo sapiens
gccatattatggaca

SEQ ID NO: 394304 - DNA, 15 bp, Homo sapiens
tgccatattatggac

SEQ ID NO: 394305 - DNA, 15 bp, Homo sapiens
atgccatattatgga

SEQ ID NO: 394306 - DNA, 15 bp, Homo sapiens
catgccatattatgg

SEQ ID NO: 394307 - DNA, 15 bp, Homo sapiens
acatgccatattatg

SEQ ID NO: 394308 - DNA, 15 bp, Homo sapiens
aacatgccatattat

SEQ ID NO: 394309 - DNA, 15 bp, Homo sapiens
gaacatgccatatta

SEQ ID NO: 394310 - DNA, 15 bp, Homo sapiens
ggaacatgccatatt

SEQ ID NO: 394311 - DNA, 15 bp, Homo sapiens
tggaacatgccatat

SEQ ID NO: 394312 - DNA, 15 bp, Homo sapiens
gtggaacatgccata

SEQ ID NO: 394313 - DNA, 15 bp, Homo sapiens
agtggaacatgccat

SEQ ID NO: 394314 - DNA, 15 bp, Homo sapiens
aagtggaacatgcca

SEQ ID NO: 394315 - DNA, 15 bp, Homo sapiens
gaagtggaacatgcc

SEQ ID NO: 394316 - DNA, 15 bp, Homo sapiens
ggaagtggaacatgc

SEQ ID NO: 394317 - DNA, 15 bp, Homo sapiens
aggaagtggaacatg

SEQ ID NO: 394318 - DNA, 15 bp, Homo sapiens
caggaagtggaacat

SEQ ID NO: 394319 - DNA, 15 bp, Homo sapiens
ccaggaagtggaaca

SEQ ID NO: 394320 - DNA, 15 bp, Homo sapiens
tccaggaagtggaac

SEQ ID NO: 394321 - DNA, 15 bp, Homo sapiens
ttccaggaagtggaa

SEQ ID NO: 394322 - DNA, 15 bp, Homo sapiens
attccaggaagtgga

SEQ ID NO: 394323 - DNA, 15 bp, Homo sapiens
cattccaggaagtgg

SEQ ID NO: 394324 - DNA, 15 bp, Homo sapiens
tcattccaggaagtg

SEQ ID NO: 394325 - DNA, 15 bp, Homo sapiens
gtcattccaggaagt

SEQ ID NO: 394326 - DNA, 15 bp, Homo sapiens
ggtcattccaggaag

SEQ ID NO: 394327 - DNA, 15 bp, Homo sapiens
aggtcattccaggaa

SEQ ID NO: 394328 - DNA, 15 bp, Homo sapiens
taggtcattccagga

SEQ ID NO: 394329 - DNA, 15 bp, Homo sapiens
ttaggtcattccagg

SEQ ID NO: 394330 - DNA, 15 bp, Homo sapiens
attaggtcattccag

SEQ ID NO: 394331 - DNA, 15 bp, Homo sapiens
gattaggtcattcca

SEQ ID NO: 394332 - DNA, 15 bp, Homo sapiens
tgattaggtcattcc

SEQ ID NO: 394333 - DNA, 15 bp, Homo sapiens
gtgattaggtcattc

SEQ ID NO: 394334 - DNA, 15 bp, Homo sapiens
ggtgattaggtcatt

SEQ ID NO: 394335 - DNA, 15 bp, Homo sapiens
aggtgattaggtcat

SEQ ID NO: 394336 - DNA, 15 bp, Homo sapiens
gaggtgattaggtca

SEQ ID NO: 394337 - DNA, 15 bp, Homo sapiens
ggaggtgattaggtc

SEQ ID NO: 394338 - DNA, 15 bp, Homo sapiens
gggaggtgattaggt

SEQ ID NO: 394339 - DNA, 15 bp, Homo sapiens
cgggaggtgattagg

SEQ ID NO: 394340 - DNA, 15 bp, Homo sapiens
acgggaggtgattag

SEQ ID NO: 394341 - DNA, 15 bp, Homo sapiens
gacgggaggtgatta

SEQ ID NO: 394342 - DNA, 15 bp, Homo sapiens
agacgggaggtgatt

SEQ ID NO: 394343 - DNA, 15 bp, Homo sapiens
gagacgggaggtgat

SEQ ID NO: 394344 - DNA, 15 bp, Homo sapiens
agagacgggaggtga

SEQ ID NO: 394345 - DNA, 15 bp, Homo sapiens
tagagacgggaggtg

SEQ ID NO: 394346 - DNA, 15 bp, Homo sapiens
atagagacgggaggt

SEQ ID NO: 394347 - DNA, 15 bp, Homo sapiens
gatagagacgggagg

SEQ ID NO: 394348 - DNA, 15 bp, Homo sapiens
agatagagacgggag

SEQ ID NO: 394349 - DNA, 15 bp, Homo sapiens
tagatagagacggga

SEQ ID NO: 394350 - DNA, 15 bp, Homo sapiens
gtagatagagacggg

SEQ ID NO: 394351 - DNA, 15 bp, Homo sapiens
agtagatagagacgg

SEQ ID NO: 394352 - DNA, 15 bp, Homo sapiens
tagtagatagagacg

SEQ ID NO: 394353 - DNA, 15 bp, Homo sapiens
gtagtagatagagac

SEQ ID NO: 394354 - DNA, 15 bp, Homo sapiens
ggtagtagatagaga

SEQ ID NO: 394355 - DNA, 15 bp, Homo sapiens
tggtagtagatagag

SEQ ID NO: 394356 - DNA, 15 bp, Homo sapiens
ttggtagtagataga

SEQ ID NO: 394357 - DNA, 15 bp, Homo sapiens
attggtagtagatag

SEQ ID NO: 394358 - DNA, 15 bp, Homo sapiens
aattggtagtagata

SEQ ID NO: 394359 - DNA, 15 bp, Homo sapiens
gaattggtagtagat

SEQ ID NO: 394360 - DNA, 15 bp, Homo sapiens
ggaattggtagtaga

SEQ ID NO: 394361 - DNA, 15 bp, Homo sapiens
gggaattggtagtag

SEQ ID NO: 394362 - DNA, 15 bp, Homo sapiens
ggggaattggtagta

SEQ ID NO: 394363 - DNA, 15 bp, Homo sapiens
cggggaattggtagt

SEQ ID NO: 394364 - DNA, 15 bp, Homo sapiens
ccggggaattggtag

SEQ ID NO: 394365 - DNA, 15 bp, Homo sapiens
gccggggaattggta

SEQ ID NO: 394366 - DNA, 15 bp, Homo sapiens
ggccggggaattggt

SEQ ID NO: 394367 - DNA, 15 bp, Homo sapiens
aggccggggaattgg

SEQ ID NO: 394368 - DNA, 15 bp, Homo sapiens
aaggccggggaattg

SEQ ID NO: 394369 - DNA, 15 bp, Homo sapiens
taaggccggggaatt

SEQ ID NO: 394370 - DNA, 15 bp, Homo sapiens
ctaaggccggggaat

SEQ ID NO: 394371 - DNA, 15 bp, Homo sapiens
tctaaggccggggaa

SEQ ID NO: 394372 - DNA, 15 bp, Homo sapiens
atctaaggccgggga

SEQ ID NO: 394373 - DNA, 15 bp, Homo sapiens
aatctaaggccgggg

SEQ ID NO: 394374 - DNA, 15 bp, Homo sapiens
caatctaaggccggg

SEQ ID NO: 394375 - DNA, 15 bp, Homo sapiens
ccaatctaaggccgg

SEQ ID NO: 394376 - DNA, 15 bp, Homo sapiens
cccaatctaaggccg

SEQ ID NO: 394377 - DNA, 15 bp, Homo sapiens
gcccaatctaaggcc

SEQ ID NO: 394378 - DNA, 15 bp, Homo sapiens
agcccaatctaaggc

SEQ ID NO: 394379 - DNA, 15 bp, Homo sapiens
aagcccaatctaagg

SEQ ID NO: 394380 - DNA, 15 bp, Homo sapiens
aaagcccaatctaag

SEQ ID NO: 394381 - DNA, 15 bp, Homo sapiens
aaaagcccaatctaa

SEQ ID NO: 394382 - DNA, 15 bp, Homo sapiens
caaaagcccaatcta

SEQ ID NO: 394383 - DNA, 15 bp, Homo sapiens
acaaaagcccaatct

SEQ ID NO: 394384 - DNA, 15 bp, Homo sapiens
cacaaaagcccaatc

SEQ ID NO: 394385 - DNA, 15 bp, Homo sapiens
acacaaaagcccaat

SEQ ID NO: 394386 - DNA, 15 bp, Homo sapiens
gacacaaaagcccaa

SEQ ID NO: 394387 - DNA, 15 bp, Homo sapiens
agacacaaaagccca

SEQ ID NO: 394388 - DNA, 15 bp, Homo sapiens
gagacacaaaagccc

SEQ ID NO: 394389 - DNA, 15 bp, Homo sapiens
agagacacaaaagcc

SEQ ID NO: 394390 - DNA, 15 bp, Homo sapiens
aagagacacaaaagc

SEQ ID NO: 394391 - DNA, 15 bp, Homo sapiens
aaagagacacaaaag

SEQ ID NO: 394392 - DNA, 15 bp, Homo sapiens
gaaagagacacaaaa

SEQ ID NO: 394393 - DNA, 15 bp, Homo sapiens
ggaaagagacacaaa

SEQ ID NO: 394394 - DNA, 15 bp, Homo sapiens
gggaaagagacacaa

SEQ ID NO: 394395 - DNA, 15 bp, Homo sapiens
cgggaaagagacaca

SEQ ID NO: 394396 - DNA, 15 bp, Homo sapiens
acgggaaagagacac

SEQ ID NO: 394397 - DNA, 15 bp, Homo sapiens
cacgggaaagagaca

SEQ ID NO: 394398 - DNA, 15 bp, Homo sapiens
acacgggaaagagac

SEQ ID NO: 394399 - DNA, 15 bp, Homo sapiens
aacacgggaaagaga

SEQ ID NO: 394400 - DNA, 15 bp, Homo sapiens
caacacgggaaagag

SEQ ID NO: 394401 - DNA, 15 bp, Homo sapiens
gcaacacgggaaaga

SEQ ID NO: 394402 - DNA, 15 bp, Homo sapiens
tgcaacacgggaaag

SEQ ID NO: 394403 - DNA, 15 bp, Homo sapiens
ttgcaacacgggaaa

SEQ ID NO: 394404 - DNA, 15 bp, Homo sapiens
attgcaacacgggaa

SEQ ID NO: 394405 - DNA, 15 bp, Homo sapiens
cattgcaacacggga

SEQ ID NO: 394406 - DNA, 15 bp, Homo sapiens
acattgcaacacggg

SEQ ID NO: 394407 - DNA, 15 bp, Homo sapiens
gacattgcaacacgg

SEQ ID NO: 394408 - DNA, 15 bp, Homo sapiens
ggacattgcaacacg

SEQ ID NO: 394409 - DNA, 15 bp, Homo sapiens
aggacattgcaacac

SEQ ID NO: 394410 - DNA, 15 bp, Homo sapiens
aaggacattgcaaca

SEQ ID NO: 394411 - DNA, 15 bp, Homo sapiens
gaaggacattgcaac

SEQ ID NO: 394412 - DNA, 15 bp, Homo sapiens
ggaaggacattgcaa

SEQ ID NO: 394413 - DNA, 15 bp, Homo sapiens
tggaaggacattgca

SEQ ID NO: 394414 - DNA, 15 bp, Homo sapiens
ttggaaggacattgc

SEQ ID NO: 394415 - DNA, 15 bp, Homo sapiens
gttggaaggacattg

SEQ ID NO: 394416 - DNA, 15 bp, Homo sapiens
tgttggaaggacatt

SEQ ID NO: 394417 - DNA, 15 bp, Homo sapiens
ctgttggaaggacat

SEQ ID NO: 394418 - DNA, 15 bp, Homo sapiens
cctgttggaaggaca

SEQ ID NO: 394419 - DNA, 15 bp, Homo sapiens
acctgttggaaggac

SEQ ID NO: 394420 - DNA, 15 bp, Homo sapiens
gacctgttggaagga

SEQ ID NO: 394421 - DNA, 15 bp, Homo sapiens
tgacctgttggaagg

SEQ ID NO: 394422 - DNA, 15 bp, Homo sapiens
atgacctgttggaag

SEQ ID NO: 394423 - DNA, 15 bp, Homo sapiens
gatgacctgttggaa

SEQ ID NO: 394424 - DNA, 15 bp, Homo sapiens
ggatgacctgttgga

SEQ ID NO: 394425 - DNA, 15 bp, Homo sapiens
aggatgacctgttgg

SEQ ID NO: 394426 - DNA, 15 bp, Homo sapiens
aaggatgacctgttg

SEQ ID NO: 394427 - DNA, 15 bp, Homo sapiens
gaaggatgacctgtt

SEQ ID NO: 394428 - DNA, 15 bp, Homo sapiens
agaaggatgacctgt

SEQ ID NO: 394429 - DNA, 15 bp, Homo sapiens
gagaaggatgacctg

SEQ ID NO: 394430 - DNA, 15 bp, Homo sapiens
ggagaaggatgacct

SEQ ID NO: 394431 - DNA, 15 bp, Homo sapiens
aggagaaggatgacc

SEQ ID NO: 394432 - DNA, 15 bp, Homo sapiens
aaggagaaggatgac

SEQ ID NO: 394433 - DNA, 15 bp, Homo sapiens
aaaggagaaggatga

SEQ ID NO: 394434 - DNA, 15 bp, Homo sapiens
gaaaggagaaggatg

SEQ ID NO: 394435 - DNA, 15 bp, Homo sapiens
tgaaaggagaaggat

SEQ ID NO: 394436 - DNA, 15 bp, Homo sapiens
ttgaaaggagaagga

SEQ ID NO: 394437 - DNA, 15 bp, Homo sapiens
attgaaaggagaagg

SEQ ID NO: 394438 - DNA, 15 bp, Homo sapiens
tattgaaaggagaag

SEQ ID NO: 394439 - DNA, 15 bp, Homo sapiens
gtattgaaaggagaa

SEQ ID NO: 394440 - DNA, 15 bp, Homo sapiens
tgtattgaaaggaga

SEQ ID NO: 394441 - DNA, 15 bp, Homo sapiens
atgtattgaaaggag

SEQ ID NO: 394442 - DNA, 15 bp, Homo sapiens
gatgtattgaaagga

SEQ ID NO: 394443 - DNA, 15 bp, Homo sapiens
agatgtattgaaagg

SEQ ID NO: 394444 - DNA, 15 bp, Homo sapiens
gagatgtattgaaag

SEQ ID NO: 394445 - DNA, 15 bp, Homo sapiens
ggagatgtattgaaa

SEQ ID NO: 394446 - DNA, 15 bp, Homo sapiens
tggagatgtattgaa

SEQ ID NO: 394447 - DNA, 15 bp, Homo sapiens
gtggagatgtattga

SEQ ID NO: 394448 - DNA, 15 bp, Homo sapiens
ggtggagatgtattg

SEQ ID NO: 394449 - DNA, 15 bp, Homo sapiens
aggtggagatgtatt

SEQ ID NO: 394450 - DNA, 15 bp, Homo sapiens
aaggtggagatgtat

SEQ ID NO: 394451 - DNA, 15 bp, Homo sapiens
taaggtggagatgta

SEQ ID NO: 394452 - DNA, 15 bp, Homo sapiens
ctaaggtggagatgt

SEQ ID NO: 394453 - DNA, 15 bp, Homo sapiens
tctaaggtggagatg

SEQ ID NO: 394454 - DNA, 15 bp, Homo sapiens
atctaaggtggagat

SEQ ID NO: 394455 - DNA, 15 bp, Homo sapiens
aatctaaggtggaga

SEQ ID NO: 394456 - DNA, 15 bp, Homo sapiens
gaatctaaggtggag

SEQ ID NO: 394457 - DNA, 15 bp, Homo sapiens
agaatctaaggtgga

SEQ ID NO: 394458 - DNA, 15 bp, Homo sapiens
aagaatctaaggtgg

SEQ ID NO: 394459 - DNA, 15 bp, Homo sapiens
taagaatctaaggtg

SEQ ID NO: 394460 - DNA, 15 bp, Homo sapiens
ttaagaatctaaggt

SEQ ID NO: 394461 - DNA, 15 bp, Homo sapiens
tttaagaatctaagg

SEQ ID NO: 394462 - DNA, 15 bp, Homo sapiens
ttttaagaatctaag

SEQ ID NO: 394463 - DNA, 15 bp, Homo sapiens
attttaagaatctaa

SEQ ID NO: 394464 - DNA, 15 bp, Homo sapiens
cattttaagaatcta

SEQ ID NO: 394465 - DNA, 15 bp, Homo sapiens
gcattttaagaatct

SEQ ID NO: 394466 - DNA, 15 bp, Homo sapiens
tgcattttaagaatc

SEQ ID NO: 394467 - DNA, 15 bp, Homo sapiens
ttgcattttaagaat

SEQ ID NO: 394468 - DNA, 15 bp, Homo sapiens
cttgcattttaagaa

SEQ ID NO: 394469 - DNA, 15 bp, Homo sapiens
acttgcattttaaga

SEQ ID NO: 394470 - DNA, 15 bp, Homo sapiens
gacttgcattttaag

SEQ ID NO: 394471 - DNA, 15 bp, Homo sapiens
agacttgcattttaa

SEQ ID NO: 394472 - DNA, 15 bp, Homo sapiens
cagacttgcatttta

SEQ ID NO: 394473 - DNA, 15 bp, Homo sapiens
tcagacttgcatttt

SEQ ID NO: 394474 - DNA, 15 bp, Homo sapiens
atcagacttgcattt

SEQ ID NO: 394475 - DNA, 15 bp, Homo sapiens
aatcagacttgcatt

SEQ ID NO: 394476 - DNA, 15 bp, Homo sapiens
taatcagacttgcat

SEQ ID NO: 394477 - DNA, 15 bp, Homo sapiens
ataatcagacttgca

SEQ ID NO: 394478 - DNA, 15 bp, Homo sapiens
cataatcagacttgc

SEQ ID NO: 394479 - DNA, 15 bp, Homo sapiens
acataatcagacttg

SEQ ID NO: 394480 - DNA, 15 bp, Homo sapiens
gacataatcagactt

SEQ ID NO: 394481 - DNA, 15 bp, Homo sapiens
tgacataatcagact

SEQ ID NO: 394482 - DNA, 15 bp, Homo sapiens
ctgacataatcagac

SEQ ID NO: 394483 - DNA, 15 bp, Homo sapiens
gctgacataatcaga

SEQ ID NO: 394484 - DNA, 15 bp, Homo sapiens
ggctgacataatcag

SEQ ID NO: 394485 - DNA, 15 bp, Homo sapiens
aggctgacataatca

SEQ ID NO: 394486 - DNA, 15 bp, Homo sapiens
aaggctgacataatc

SEQ ID NO: 394487 - DNA, 15 bp, Homo sapiens
gaaggctgacataat

SEQ ID NO: 394488 - DNA, 15 bp, Homo sapiens
agaaggctgacataa

SEQ ID NO: 394489 - DNA, 15 bp, Homo sapiens
tagaaggctgacata

SEQ ID NO: 394490 - DNA, 15 bp, Homo sapiens
gtagaaggctgacat

SEQ ID NO: 394491 - DNA, 15 bp, Homo sapiens
agtagaaggctgaca

SEQ ID NO: 394492 - DNA, 15 bp, Homo sapiens
aagtagaaggctgac

SEQ ID NO: 394493 - DNA, 15 bp, Homo sapiens
caagtagaaggctga

SEQ ID NO: 394494 - DNA, 15 bp, Homo sapiens
tcaagtagaaggctg

SEQ ID NO: 394495 - DNA, 15 bp, Homo sapiens
ttcaagtagaaggct

SEQ ID NO: 394496 - DNA, 15 bp, Homo sapiens
tttcaagtagaaggc

SEQ ID NO: 394497 - DNA, 15 bp, Homo sapiens
gtttcaagtagaagg

SEQ ID NO: 394498 - DNA, 15 bp, Homo sapiens
agtttcaagtagaag

SEQ ID NO: 394499 - DNA, 15 bp, Homo sapiens
gagtttcaagtagaa

SEQ ID NO: 394500 - DNA, 15 bp, Homo sapiens
agagtttcaagtaga

SEQ ID NO: 394501 - DNA, 15 bp, Homo sapiens
aagagtttcaagtag

SEQ ID NO: 394502 - DNA, 15 bp, Homo sapiens
aaagagtttcaagta

SEQ ID NO: 394503 - DNA, 15 bp, Homo sapiens
taaagagtttcaagt

SEQ ID NO: 394504 - DNA, 15 bp, Homo sapiens
ataaagagtttcaag

SEQ ID NO: 394505 - DNA, 15 bp, Homo sapiens
aataaagagtttcaa

SEQ ID NO: 394506 - DNA, 15 bp, Homo sapiens
caataaagagtttca

SEQ ID NO: 394507 - DNA, 15 bp, Homo sapiens
ccaataaagagtttc

SEQ ID NO: 394508 - DNA, 15 bp, Homo sapiens
gccaataaagagttt

SEQ ID NO: 394509 - DNA, 15 bp, Homo sapiens
agccaataaagagtt

SEQ ID NO: 394510 - DNA, 15 bp, Homo sapiens
tagccaataaagagt

SEQ ID NO: 394511 - DNA, 15 bp, Homo sapiens
gtagccaataaagag

SEQ ID NO: 394512 - DNA, 15 bp, Homo sapiens
agtagccaataaaga

SEQ ID NO: 394513 - DNA, 15 bp, Homo sapiens
gagtagccaataaag

SEQ ID NO: 394514 - DNA, 15 bp, Homo sapiens
agagtagccaataaa

SEQ ID NO: 394515 - DNA, 15 bp, Homo sapiens
aagagtagccaataa

SEQ ID NO: 394516 - DNA, 15 bp, Homo sapiens
aaagagtagccaata

SEQ ID NO: 394517 - DNA, 15 bp, Homo sapiens
taaagagtagccaat

SEQ ID NO: 394518 - DNA, 15 bp, Homo sapiens
gtaaagagtagccaa

SEQ ID NO: 394519 - DNA, 15 bp, Homo sapiens
ggtaaagagtagcca

SEQ ID NO: 394520 - DNA, 15 bp, Homo sapiens
aggtaaagagtagcc

SEQ ID NO: 394521 - DNA, 15 bp, Homo sapiens
taggtaaagagtagc

SEQ ID NO: 394522 - DNA, 15 bp, Homo sapiens
ataggtaaagagtag

SEQ ID NO: 394523 - DNA, 15 bp, Homo sapiens
aataggtaaagagta

SEQ ID NO: 394524 - DNA, 15 bp, Homo sapiens
caataggtaaagagt

SEQ ID NO: 394525 - DNA, 15 bp, Homo sapiens
acaataggtaaagag

SEQ ID NO: 394526 - DNA, 15 bp, Homo sapiens
tacaataggtaaaga

SEQ ID NO: 394527 - DNA, 15 bp, Homo sapiens
atacaataggtaaag

SEQ ID NO: 394528 - DNA, 15 bp, Homo sapiens
tatacaataggtaaa

SEQ ID NO: 394529 - DNA, 15 bp, Homo sapiens
ttatacaataggtaa

SEQ ID NO: 394530 - DNA, 15 bp, Homo sapiens
tttatacaataggta

SEQ ID NO: 394531 - DNA, 15 bp, Homo sapiens
ctttatacaataggt

SEQ ID NO: 394532 - DNA, 15 bp, Homo sapiens
actttatacaatagg

SEQ ID NO: 394533 - DNA, 15 bp, Homo sapiens
gactttatacaatag

SEQ ID NO: 394534 - DNA, 15 bp, Homo sapiens
ggactttatacaata

SEQ ID NO: 394535 - DNA, 15 bp, Homo sapiens
tggactttatacaat

SEQ ID NO: 394536 - DNA, 15 bp, Homo sapiens
ttggactttatacaa

SEQ ID NO: 394537 - DNA, 15 bp, Homo sapiens
gttggactttataca

SEQ ID NO: 394538 - DNA, 15 bp, Homo sapiens
ggttggactttatac

SEQ ID NO: 394539 - DNA, 15 bp, Homo sapiens
aggttggactttata

SEQ ID NO: 394540 - DNA, 15 bp, Homo sapiens
gaggttggactttat

SEQ ID NO: 394541 - DNA, 15 bp, Homo sapiens
agaggttggacttta

SEQ ID NO: 394542 - DNA, 15 bp, Homo sapiens
aagaggttggacttt

SEQ ID NO: 394543 - DNA, 15 bp, Homo sapiens
caagaggttggactt

SEQ ID NO: 394544 - DNA, 15 bp, Homo sapiens
ccaagaggttggact

SEQ ID NO: 394545 - DNA, 15 bp, Homo sapiens
gccaagaggttggac

SEQ ID NO: 394546 - DNA, 15 bp, Homo sapiens
ggccaagaggttgga

SEQ ID NO: 394547 - DNA, 15 bp, Homo sapiens
tggccaagaggttgg

SEQ ID NO: 394548 - DNA, 15 bp, Homo sapiens
gtggccaagaggttg

SEQ ID NO: 394549 - DNA, 15 bp, Homo sapiens
cgtggccaagaggtt

SEQ ID NO: 394550 - DNA, 15 bp, Homo sapiens
ccgtggccaagaggt

SEQ ID NO: 394551 - DNA, 15 bp, Homo sapiens
gccgtggccaagagg

SEQ ID NO: 394552 - DNA, 15 bp, Homo sapiens
tgccgtggccaagag

SEQ ID NO: 394553 - DNA, 15 bp, Homo sapiens
atgccgtggccaaga

SEQ ID NO: 394554 - DNA, 15 bp, Homo sapiens
tatgccgtggccaag

SEQ ID NO: 394555 - DNA, 15 bp, Homo sapiens
gtatgccgtggccaa

SEQ ID NO: 394556 - DNA, 15 bp, Homo sapiens
ggtatgccgtggcca

SEQ ID NO: 394557 - DNA, 15 bp, Homo sapiens
tggtatgccgtggcc

SEQ ID NO: 394558 - DNA, 15 bp, Homo sapiens
ctggtatgccgtggc

SEQ ID NO: 394559 - DNA, 15 bp, Homo sapiens
tctggtatgccgtgg

SEQ ID NO: 394560 - DNA, 15 bp, Homo sapiens
atctggtatgccgtg

SEQ ID NO: 394561 - DNA, 15 bp, Homo sapiens
gatctggtatgccgt

SEQ ID NO: 394562 - DNA, 15 bp, Homo sapiens
tgatctggtatgccg

SEQ ID NO: 394563 - DNA, 15 bp, Homo sapiens
atgatctggtatgcc

SEQ ID NO: 394564 - DNA, 15 bp, Homo sapiens
aatgatctggtatgc

SEQ ID NO: 394565 - DNA, 15 bp, Homo sapiens
gaatgatctggtatg

SEQ ID NO: 394566 - DNA, 15 bp, Homo sapiens
tgaatgatctggtat

SEQ ID NO: 394567 - DNA, 15 bp, Homo sapiens
atgaatgatctggta

SEQ ID NO: 394568 - DNA, 15 bp, Homo sapiens
aatgaatgatctggt

SEQ ID NO: 394569 - DNA, 15 bp, Homo sapiens
taatgaatgatctgg

SEQ ID NO: 394570 - DNA, 15 bp, Homo sapiens
gtaatgaatgatctg

SEQ ID NO: 394571 - DNA, 15 bp, Homo sapiens
ggtaatgaatgatct

SEQ ID NO: 394572 - DNA, 15 bp, Homo sapiens
aggtaatgaatgatc

SEQ ID NO: 394573 - DNA, 15 bp, Homo sapiens
caggtaatgaatgat

SEQ ID NO: 394574 - DNA, 15 bp, Homo sapiens
tcaggtaatgaatga

SEQ ID NO: 394575 - DNA, 15 bp, Homo sapiens
gtcaggtaatgaatg

SEQ ID NO: 394576 - DNA, 15 bp, Homo sapiens
agtcaggtaatgaat

SEQ ID NO: 394577 - DNA, 15 bp, Homo sapiens
tagtcaggtaatgaa

SEQ ID NO: 394578 - DNA, 15 bp, Homo sapiens
ttagtcaggtaatga

SEQ ID NO: 394579 - DNA, 15 bp, Homo sapiens
cttagtcaggtaatg

SEQ ID NO: 394580 - DNA, 15 bp, Homo sapiens
gcttagtcaggtaat

SEQ ID NO: 394581 - DNA, 15 bp, Homo sapiens
agcttagtcaggtaa

SEQ ID NO: 394582 - DNA, 15 bp, Homo sapiens
aagcttagtcaggta

SEQ ID NO: 394583 - DNA, 15 bp, Homo sapiens
aaagcttagtcaggt

SEQ ID NO: 394584 - DNA, 15 bp, Homo sapiens
aaaagcttagtcagg

SEQ ID NO: 394585 - DNA, 15 bp, Homo sapiens
taaaagcttagtcag

SEQ ID NO: 394586 - DNA, 15 bp, Homo sapiens
ataaaagcttagtca

SEQ ID NO: 394587 - DNA, 15 bp, Homo sapiens
gataaaagcttagtc

SEQ ID NO: 394588 - DNA, 15 bp, Homo sapiens
agataaaagcttagt

SEQ ID NO: 394589 - DNA, 15 bp, Homo sapiens
gagataaaagcttag

SEQ ID NO: 394590 - DNA, 15 bp, Homo sapiens
agagataaaagctta

SEQ ID NO: 394591 - DNA, 15 bp, Homo sapiens
tagagataaaagctt

SEQ ID NO: 394592 - DNA, 15 bp, Homo sapiens
ttagagataaaagct

SEQ ID NO: 394593 - DNA, 15 bp, Homo sapiens
attagagataaaagc

SEQ ID NO: 394594 - DNA, 15 bp, Homo sapiens
gattagagataaaag

SEQ ID NO: 394595 - DNA, 15 bp, Homo sapiens
tgattagagataaaa

SEQ ID NO: 394596 - DNA, 15 bp, Homo sapiens
atgattagagataaa

SEQ ID NO: 394597 - DNA, 15 bp, Homo sapiens
catgattagagataa

SEQ ID NO: 394598 - DNA, 15 bp, Homo sapiens
acatgattagagata

SEQ ID NO: 394599 - DNA, 15 bp, Homo sapiens
gacatgattagagat

SEQ ID NO: 394600 - DNA, 15 bp, Homo sapiens
agacatgattagaga

SEQ ID NO: 394601 - DNA, 15 bp, Homo sapiens
cagacatgattagag

SEQ ID NO: 394602 - DNA, 15 bp, Homo sapiens
gcagacatgattaga

SEQ ID NO: 394603 - DNA, 15 bp, Homo sapiens
tgcagacatgattag

SEQ ID NO: 394604 - DNA, 15 bp, Homo sapiens
atgcagacatgatta

SEQ ID NO: 394605 - DNA, 15 bp, Homo sapiens
catgcagacatgatt

SEQ ID NO: 394606 - DNA, 15 bp, Homo sapiens
tcatgcagacatgat

SEQ ID NO: 394607 - DNA, 15 bp, Homo sapiens
gtcatgcagacatga

SEQ ID NO: 394608 - DNA, 15 bp, Homo sapiens
ggtcatgcagacatg

SEQ ID NO: 394609 - DNA, 15 bp, Homo sapiens
gggtcatgcagacat

SEQ ID NO: 394610 - DNA, 15 bp, Homo sapiens
ggggtcatgcagaca

SEQ ID NO: 394611 - DNA, 15 bp, Homo sapiens
tggggtcatgcagac

SEQ ID NO: 394612 - DNA, 15 bp, Homo sapiens
ctggggtcatgcaga

SEQ ID NO: 394613 - DNA, 15 bp, Homo sapiens
tctggggtcatgcag

SEQ ID NO: 394614 - DNA, 15 bp, Homo sapiens
ctctggggtcatgca

SEQ ID NO: 394615 - DNA, 15 bp, Homo sapiens
cctctggggtcatgc

SEQ ID NO: 394616 - DNA, 15 bp, Homo sapiens
ccctctggggtcatg

SEQ ID NO: 394617 - DNA, 15 bp, Homo sapiens
tccctctggggtcat

SEQ ID NO: 394618 - DNA, 15 bp, Homo sapiens
gtccctctggggtca

SEQ ID NO: 394619 - DNA, 15 bp, Homo sapiens
agtccctctggggtc

SEQ ID NO: 394620 - DNA, 15 bp, Homo sapiens
cagtccctctggggt

SEQ ID NO: 394621 - DNA, 15 bp, Homo sapiens
tcagtccctctgggg

SEQ ID NO: 394622 - DNA, 15 bp, Homo sapiens
ttcagtccctctggg

SEQ ID NO: 394623 - DNA, 15 bp, Homo sapiens
tttcagtccctctgg

SEQ ID NO: 394624 - DNA, 15 bp, Homo sapiens
atttcagtccctctg

SEQ ID NO: 394625 - DNA, 15 bp, Homo sapiens
aatttcagtccctct

SEQ ID NO: 394626 - DNA, 15 bp, Homo sapiens
gaatttcagtccctc

SEQ ID NO: 394627 - DNA, 15 bp, Homo sapiens
ggaatttcagtccct

SEQ ID NO: 394628 - DNA, 15 bp, Homo sapiens
tggaatttcagtccc

SEQ ID NO: 394629 - DNA, 15 bp, Homo sapiens
ttggaatttcagtcc

SEQ ID NO: 394630 - DNA, 15 bp, Homo sapiens
cttggaatttcagtc

SEQ ID NO: 394631 - DNA, 15 bp, Homo sapiens
gcttggaatttcagt

SEQ ID NO: 394632 - DNA, 15 bp, Homo sapiens
tgcttggaatttcag

SEQ ID NO: 394633 - DNA, 15 bp, Homo sapiens
ctgcttggaatttca

SEQ ID NO: 394634 - DNA, 15 bp, Homo sapiens
cctgcttggaatttc

SEQ ID NO: 394635 - DNA, 15 bp, Homo sapiens
gcctgcttggaattt

SEQ ID NO: 394636 - DNA, 15 bp, Homo sapiens
tgcctgcttggaatt

SEQ ID NO: 394637 - DNA, 15 bp, Homo sapiens
ttgcctgcttggaat

SEQ ID NO: 394638 - DNA, 15 bp, Homo sapiens
cttgcctgcttggaa

SEQ ID NO: 394639 - DNA, 15 bp, Homo sapiens
acttgcctgcttgga

SEQ ID NO: 394640 - DNA, 15 bp, Homo sapiens
aacttgcctgcttgg

SEQ ID NO: 394641 - DNA, 15 bp, Homo sapiens
gaacttgcctgcttg

SEQ ID NO: 394642 - DNA, 15 bp, Homo sapiens
agaacttgcctgctt

SEQ ID NO: 394643 - DNA, 15 bp, Homo sapiens
aagaacttgcctgct

SEQ ID NO: 394644 - DNA, 15 bp, Homo sapiens
aaagaacttgcctgc

SEQ ID NO: 394645 - DNA, 15 bp, Homo sapiens
caaagaacttgcctg

SEQ ID NO: 394646 - DNA, 15 bp, Homo sapiens
tcaaagaacttgcct

SEQ ID NO: 394647 - DNA, 15 bp, Homo sapiens
ctcaaagaacttgcc

SEQ ID NO: 394648 - DNA, 15 bp, Homo sapiens
tctcaaagaacttgc

SEQ ID NO: 394649 - DNA, 15 bp, Homo sapiens
ctctcaaagaacttg

SEQ ID NO: 394650 - DNA, 15 bp, Homo sapiens
gctctcaaagaactt

SEQ ID NO: 394651 - DNA, 15 bp, Homo sapiens
ggctctcaaagaact

SEQ ID NO: 394652 - DNA, 15 bp, Homo sapiens
tggctctcaaagaac

SEQ ID NO: 394653 - DNA, 15 bp, Homo sapiens
atggctctcaaagaa

SEQ ID NO: 394654 - DNA, 15 bp, Homo sapiens
gatggctctcaaaga

SEQ ID NO: 394655 - DNA, 15 bp, Homo sapiens
tgatggctctcaaag

SEQ ID NO: 394656 - DNA, 15 bp, Homo sapiens
gtgatggctctcaaa

SEQ ID NO: 394657 - DNA, 15 bp, Homo sapiens
agtgatggctctcaa

SEQ ID NO: 394658 - DNA, 15 bp, Homo sapiens
aagtgatggctctca

SEQ ID NO: 394659 - DNA, 15 bp, Homo sapiens
aaagtgatggctctc

SEQ ID NO: 394660 - DNA, 15 bp, Homo sapiens
caaagtgatggctct

SEQ ID NO: 394661 - DNA, 15 bp, Homo sapiens
tcaaagtgatggctc

SEQ ID NO: 394662 - DNA, 15 bp, Homo sapiens
ttcaaagtgatggct

SEQ ID NO: 394663 - DNA, 15 bp, Homo sapiens
tttcaaagtgatggc

SEQ ID NO: 394664 - DNA, 15 bp, Homo sapiens
ttttcaaagtgatgg

SEQ ID NO: 394665 - DNA, 15 bp, Homo sapiens
attttcaaagtgatg

SEQ ID NO: 394666 - DNA, 15 bp, Homo sapiens
cattttcaaagtgat

SEQ ID NO: 394667 - DNA, 15 bp, Homo sapiens
gcattttcaaagtga

SEQ ID NO: 394668 - DNA, 15 bp, Homo sapiens
agcattttcaaagtg

SEQ ID NO: 394669 - DNA, 15 bp, Homo sapiens
tagcattttcaaagt

SEQ ID NO: 394670 - DNA, 15 bp, Homo sapiens
atagcattttcaaag

SEQ ID NO: 394671 - DNA, 15 bp, Homo sapiens
aatagcattttcaaa

SEQ ID NO: 394672 - DNA, 15 bp, Homo sapiens
aaatagcattttcaa

SEQ ID NO: 394673 - DNA, 15 bp, Homo sapiens
aaaatagcattttca

SEQ ID NO: 394674 - DNA, 15 bp, Homo sapiens
caaaatagcattttc

SEQ ID NO: 394675 - DNA, 15 bp, Homo sapiens
acaaaatagcatttt

SEQ ID NO: 394676 - DNA, 15 bp, Homo sapiens
aacaaaatagcattt

SEQ ID NO: 394677 - DNA, 15 bp, Homo sapiens
gaacaaaatagcatt

SEQ ID NO: 394678 - DNA, 15 bp, Homo sapiens
agaacaaaatagcat

SEQ ID NO: 394679 - DNA, 15 bp, Homo sapiens
aagaacaaaatagca

SEQ ID NO: 394680 - DNA, 15 bp, Homo sapiens
gaagaacaaaatagc

SEQ ID NO: 394681 - DNA, 15 bp, Homo sapiens
agaagaacaaaatag

SEQ ID NO: 394682 - DNA, 15 bp, Homo sapiens
cagaagaacaaaata

SEQ ID NO: 394683 - DNA, 15 bp, Homo sapiens
ccagaagaacaaaat

SEQ ID NO: 394684 - DNA, 15 bp, Homo sapiens
accagaagaacaaaa

SEQ ID NO: 394685 - DNA, 15 bp, Homo sapiens
taccagaagaacaaa

SEQ ID NO: 394686 - DNA, 15 bp, Homo sapiens
ataccagaagaacaa

SEQ ID NO: 394687 - DNA, 15 bp, Homo sapiens
cataccagaagaaca

SEQ ID NO: 394688 - DNA, 15 bp, Homo sapiens
gcataccagaagaac

SEQ ID NO: 394689 - DNA, 15 bp, Homo sapiens
ggcataccagaagaa

SEQ ID NO: 394690 - DNA, 15 bp, Homo sapiens
gggcataccagaaga

SEQ ID NO: 394691 - DNA, 15 bp, Homo sapiens
agggcataccagaag

SEQ ID NO: 394692 - DNA, 15 bp, Homo sapiens
gagggcataccagaa

SEQ ID NO: 394693 - DNA, 15 bp, Homo sapiens
agagggcataccaga

SEQ ID NO: 394694 - DNA, 15 bp, Homo sapiens
aagagggcataccag

SEQ ID NO: 394695 - DNA, 15 bp, Homo sapiens
gaagagggcatacca

SEQ ID NO: 394696 - DNA, 15 bp, Homo sapiens
ggaagagggcatacc

SEQ ID NO: 394697 - DNA, 15 bp, Homo sapiens
gggaagagggcatac

SEQ ID NO: 394698 - DNA, 15 bp, Homo sapiens
agggaagagggcata

SEQ ID NO: 394699 - DNA, 15 bp, Homo sapiens
gagggaagagggcat

SEQ ID NO: 394700 - DNA, 15 bp, Homo sapiens
ggagggaagagggca

SEQ ID NO: 394701 - DNA, 15 bp, Homo sapiens
gggagggaagagggc

SEQ ID NO: 394702 - DNA, 15 bp, Homo sapiens
agggagggaagaggg

SEQ ID NO: 394703 - DNA, 15 bp, Homo sapiens
gagggagggaagagg

SEQ ID NO: 394704 - DNA, 15 bp, Homo sapiens
ggagggagggaagag

SEQ ID NO: 394705 - DNA, 15 bp, Homo sapiens
gggagggagggaaga

SEQ ID NO: 394706 - DNA, 15 bp, Homo sapiens
agggagggagggaag

SEQ ID NO: 394707 - DNA, 15 bp, Homo sapiens
gagggagggagggaa

SEQ ID NO: 394708 - DNA, 15 bp, Homo sapiens
aggagggagggaggg

SEQ ID NO: 394709 - DNA, 15 bp, Homo sapiens
aaggagggagggagg

SEQ ID NO: 394710 - DNA, 15 bp, Homo sapiens
taaggagggagggag

SEQ ID NO: 394711 - DNA, 15 bp, Homo sapiens
gtaaggagggaggga

SEQ ID NO: 394712 - DNA, 15 bp, Homo sapiens
ggtaaggagggaggg

SEQ ID NO: 394713 - DNA, 15 bp, Homo sapiens
aggtaaggagggagg

SEQ ID NO: 394714 - DNA, 15 bp, Homo sapiens
taggtaaggagggag

SEQ ID NO: 394715 - DNA, 15 bp, Homo sapiens
gtaggtaaggaggga

SEQ ID NO: 394716 - DNA, 15 bp, Homo sapiens
ggtaggtaaggaggg

SEQ ID NO: 394717 - DNA, 15 bp, Homo sapiens
gggtaggtaaggagg

SEQ ID NO: 394718 - DNA, 15 bp, Homo sapiens
tgggtaggtaaggag

SEQ ID NO: 394719 - DNA, 15 bp, Homo sapiens
ttgggtaggtaagga

SEQ ID NO: 394720 - DNA, 15 bp, Homo sapiens
cttgggtaggtaagg

SEQ ID NO: 394721 - DNA, 15 bp, Homo sapiens
acttgggtaggtaag

SEQ ID NO: 394722 - DNA, 15 bp, Homo sapiens
cacttgggtaggtaa

SEQ ID NO: 394723 - DNA, 15 bp, Homo sapiens
acacttgggtaggta

SEQ ID NO: 394724 - DNA, 15 bp, Homo sapiens
cacacttgggtaggt

SEQ ID NO: 394725 - DNA, 15 bp, Homo sapiens
gcacacttgggtagg

SEQ ID NO: 394726 - DNA, 15 bp, Homo sapiens
ggcacacttgggtag

SEQ ID NO: 394727 - DNA, 15 bp, Homo sapiens
aggcacacttgggta

SEQ ID NO: 394728 - DNA, 15 bp, Homo sapiens
caggcacacttgggt

SEQ ID NO: 394729 - DNA, 15 bp, Homo sapiens
ccaggcacacttggg

SEQ ID NO: 394730 - DNA, 15 bp, Homo sapiens
gccaggcacacttgg

SEQ ID NO: 394731 - DNA, 15 bp, Homo sapiens
tgccaggcacacttg

SEQ ID NO: 394732 - DNA, 15 bp, Homo sapiens
atgccaggcacactt

SEQ ID NO: 394733 - DNA, 15 bp, Homo sapiens
tatgccaggcacact

SEQ ID NO: 394734 - DNA, 15 bp, Homo sapiens
atatgccaggcacac

SEQ ID NO: 394735 - DNA, 15 bp, Homo sapiens
aatatgccaggcaca

SEQ ID NO: 394736 - DNA, 15 bp, Homo sapiens
aaatatgccaggcac

SEQ ID NO: 394737 - DNA, 15 bp, Homo sapiens
caaatatgccaggca

SEQ ID NO: 394738 - DNA, 15 bp, Homo sapiens
tcaaatatgccaggc

SEQ ID NO: 394739 - DNA, 15 bp, Homo sapiens
ctcaaatatgccagg

SEQ ID NO: 394740 - DNA, 15 bp, Homo sapiens
cctcaaatatgccag

SEQ ID NO: 394741 - DNA, 15 bp, Homo sapiens
tcctcaaatatgcca

SEQ ID NO: 394742 - DNA, 15 bp, Homo sapiens
ttcctcaaatatgcc

SEQ ID NO: 394743 - DNA, 15 bp, Homo sapiens
attcctcaaatatgc

SEQ ID NO: 394744 - DNA, 15 bp, Homo sapiens
tattcctcaaatatg

SEQ ID NO: 394745 - DNA, 15 bp, Homo sapiens
atattcctcaaatat

SEQ ID NO: 394746 - DNA, 15 bp, Homo sapiens
gatattcctcaaata

SEQ ID NO: 394747 - DNA, 15 bp, Homo sapiens
tgatattcctcaaat

SEQ ID NO: 394748 - DNA, 15 bp, Homo sapiens
ctgatattcctcaaa

SEQ ID NO: 394749 - DNA, 15 bp, Homo sapiens
cctgatattcctcaa

SEQ ID NO: 394750 - DNA, 15 bp, Homo sapiens
tcctgatattcctca

SEQ ID NO: 394751 - DNA, 15 bp, Homo sapiens
ttcctgatattcctc

SEQ ID NO: 394752 - DNA, 15 bp, Homo sapiens
cttcctgatattcct

SEQ ID NO: 394753 - DNA, 15 bp, Homo sapiens
tcttcctgatattcc

SEQ ID NO: 394754 - DNA, 15 bp, Homo sapiens
gtcttcctgatattc

SEQ ID NO: 394755 - DNA, 15 bp, Homo sapiens
tgtcttcctgatatt

SEQ ID NO: 394756 - DNA, 15 bp, Homo sapiens
ctgtcttcctgatat

SEQ ID NO: 394757 - DNA, 15 bp, Homo sapiens
gctgtcttcctgata

SEQ ID NO: 394758 - DNA, 15 bp, Homo sapiens
tgctgtcttcctgat

SEQ ID NO: 394759 - DNA, 15 bp, Homo sapiens
gtgctgtcttcctga

SEQ ID NO: 394760 - DNA, 15 bp, Homo sapiens
agtgctgtcttcctg

SEQ ID NO: 394761 - DNA, 15 bp, Homo sapiens
cagtgctgtcttcct

SEQ ID NO: 394762 - DNA, 15 bp, Homo sapiens
tcagtgctgtcttcc

SEQ ID NO: 394763 - DNA, 15 bp, Homo sapiens
ctcagtgctgtcttc

SEQ ID NO: 394764 - DNA, 15 bp, Homo sapiens
cctcagtgctgtctt

SEQ ID NO: 394765 - DNA, 15 bp, Homo sapiens
gcctcagtgctgtct

SEQ ID NO: 394766 - DNA, 15 bp, Homo sapiens
tgcctcagtgctgtc

SEQ ID NO: 394767 - DNA, 15 bp, Homo sapiens
ttgcctcagtgctgt

SEQ ID NO: 394768 - DNA, 15 bp, Homo sapiens
cttgcctcagtgctg

SEQ ID NO: 394769 - DNA, 15 bp, Homo sapiens
tcttgcctcagtgct

SEQ ID NO: 394770 - DNA, 15 bp, Homo sapiens
ctcttgcctcagtgc

SEQ ID NO: 394771 - DNA, 15 bp, Homo sapiens
actcttgcctcagtg

SEQ ID NO: 394772 - DNA, 15 bp, Homo sapiens
tactcttgcctcagt

SEQ ID NO: 394773 - DNA, 15 bp, Homo sapiens
ttactcttgcctcag

SEQ ID NO: 394774 - DNA, 15 bp, Homo sapiens
tttactcttgcctca

SEQ ID NO: 394775 - DNA, 15 bp, Homo sapiens
ctttactcttgcctc

SEQ ID NO: 394776 - DNA, 15 bp, Homo sapiens
actttactcttgcct

SEQ ID NO: 394777 - DNA, 15 bp, Homo sapiens
cactttactcttgcc

SEQ ID NO: 394778 - DNA, 15 bp, Homo sapiens
tcactttactcttgc

SEQ ID NO: 394779 - DNA, 15 bp, Homo sapiens
ctcactttactcttg

SEQ ID NO: 394780 - DNA, 15 bp, Homo sapiens
actcactttactctt

SEQ ID NO: 394781 - DNA, 15 bp, Homo sapiens
cactcactttactct

SEQ ID NO: 394782 - DNA, 15 bp, Homo sapiens
tcactcactttactc

SEQ ID NO: 394783 - DNA, 15 bp, Homo sapiens
ttcactcactttact

SEQ ID NO: 394784 - DNA, 15 bp, Homo sapiens
cttcactcactttac

SEQ ID NO: 394785 - DNA, 15 bp, Homo sapiens
ccttcactcacttta

SEQ ID NO: 394786 - DNA, 15 bp, Homo sapiens
cccttcactcacttt

SEQ ID NO: 394787 - DNA, 15 bp, Homo sapiens
tcccttcactcactt

SEQ ID NO: 394788 - DNA, 15 bp, Homo sapiens
ttcccttcactcact

SEQ ID NO: 394789 - DNA, 15 bp, Homo sapiens
cttcccttcactcac

SEQ ID NO: 394790 - DNA, 15 bp, Homo sapiens
tcttcccttcactca

SEQ ID NO: 394791 - DNA, 15 bp, Homo sapiens
gtcttcccttcactc

SEQ ID NO: 394792 - DNA, 15 bp, Homo sapiens
agtcttcccttcact

SEQ ID NO: 394793 - DNA, 15 bp, Homo sapiens
tagtcttcccttcac

SEQ ID NO: 394794 - DNA, 15 bp, Homo sapiens
atagtcttcccttca

SEQ ID NO: 394795 - DNA, 15 bp, Homo sapiens
aatagtcttcccttc

SEQ ID NO: 394796 - DNA, 15 bp, Homo sapiens
taatagtcttccctt

SEQ ID NO: 394797 - DNA, 15 bp, Homo sapiens
ctaatagtcttccct

SEQ ID NO: 394798 - DNA, 15 bp, Homo sapiens
cctaatagtcttccc

SEQ ID NO: 394799 - DNA, 15 bp, Homo sapiens
tcctaatagtcttcc

SEQ ID NO: 394800 - DNA, 15 bp, Homo sapiens
ctcctaatagtcttc

SEQ ID NO: 394801 - DNA, 15 bp, Homo sapiens
tctcctaatagtctt

SEQ ID NO: 394802 - DNA, 15 bp, Homo sapiens
atctcctaatagtct

SEQ ID NO: 394803 - DNA, 15 bp, Homo sapiens
aatctcctaatagtc

SEQ ID NO: 394804 - DNA, 15 bp, Homo sapiens
taatctcctaatagt

SEQ ID NO: 394805 - DNA, 15 bp, Homo sapiens
ctaatctcctaatag

SEQ ID NO: 394806 - DNA, 15 bp, Homo sapiens
cctaatctcctaata

SEQ ID NO: 394807 - DNA, 15 bp, Homo sapiens
acctaatctcctaat

SEQ ID NO: 394808 - DNA, 15 bp, Homo sapiens
cacctaatctcctaa

SEQ ID NO: 394809 - DNA, 15 bp, Homo sapiens
ccacctaatctccta

SEQ ID NO: 394810 - DNA, 15 bp, Homo sapiens
accacctaatctcct

SEQ ID NO: 394811 - DNA, 15 bp, Homo sapiens
taccacctaatctcc

SEQ ID NO: 394812 - DNA, 15 bp, Homo sapiens
ctaccacctaatctc

SEQ ID NO: 394813 - DNA, 15 bp, Homo sapiens
tctaccacctaatct

SEQ ID NO: 394814 - DNA, 15 bp, Homo sapiens
gtctaccacctaatc

SEQ ID NO: 394815 - DNA, 15 bp, Homo sapiens
tgtctaccacctaat

SEQ ID NO: 394816 - DNA, 15 bp, Homo sapiens
ctgtctaccacctaa

SEQ ID NO: 394817 - DNA, 15 bp, Homo sapiens
tctgtctaccaccta

SEQ ID NO: 394818 - DNA, 15 bp, Homo sapiens
ttctgtctaccacct

SEQ ID NO: 394819 - DNA, 15 bp, Homo sapiens
tttctgtctaccacc

SEQ ID NO: 394820 - DNA, 15 bp, Homo sapiens
ttttctgtctaccac

SEQ ID NO: 394821 - DNA, 15 bp, Homo sapiens
attttctgtctacca

SEQ ID NO: 394822 - DNA, 15 bp, Homo sapiens
cattttctgtctacc

SEQ ID NO: 394823 - DNA, 15 bp, Homo sapiens
tcattttctgtctac

SEQ ID NO: 394824 - DNA, 15 bp, Homo sapiens
ctcattttctgtcta

SEQ ID NO: 394825 - DNA, 15 bp, Homo sapiens
cctcattttctgtct

SEQ ID NO: 394826 - DNA, 15 bp, Homo sapiens
gcctcattttctgtc

SEQ ID NO: 394827 - DNA, 15 bp, Homo sapiens
tgcctcattttctgt

SEQ ID NO: 394828 - DNA, 15 bp, Homo sapiens
ctgcctcattttctg

SEQ ID NO: 394829 - DNA, 15 bp, Homo sapiens
tctgcctcattttct

SEQ ID NO: 394830 - DNA, 15 bp, Homo sapiens
atctgcctcattttc

SEQ ID NO: 394831 - DNA, 15 bp, Homo sapiens
gatctgcctcatttt

SEQ ID NO: 394832 - DNA, 15 bp, Homo sapiens
tgatctgcctcattt

SEQ ID NO: 394833 - DNA, 15 bp, Homo sapiens
atgatctgcctcatt

SEQ ID NO: 394834 - DNA, 15 bp, Homo sapiens
catgatctgcctcat

SEQ ID NO: 394835 - DNA, 15 bp, Homo sapiens
acatgatctgcctca

SEQ ID NO: 394836 - DNA, 15 bp, Homo sapiens
tacatgatctgcctc

SEQ ID NO: 394837 - DNA, 15 bp, Homo sapiens
ctacatgatctgcct

SEQ ID NO: 394838 - DNA, 15 bp, Homo sapiens
cctacatgatctgcc

SEQ ID NO: 394839 - DNA, 15 bp, Homo sapiens
tcctacatgatctgc

SEQ ID NO: 394840 - DNA, 15 bp, Homo sapiens
gtcctacatgatctg

SEQ ID NO: 394841 - DNA, 15 bp, Homo sapiens
ggtcctacatgatct

SEQ ID NO: 394842 - DNA, 15 bp, Homo sapiens
aggtcctacatgatc

SEQ ID NO: 394843 - DNA, 15 bp, Homo sapiens
aaggtcctacatgat

SEQ ID NO: 394844 - DNA, 15 bp, Homo sapiens
taaggtcctacatga

SEQ ID NO: 394845 - DNA, 15 bp, Homo sapiens
ataaggtcctacatg

SEQ ID NO: 394846 - DNA, 15 bp, Homo sapiens
cataaggtcctacat

SEQ ID NO: 394847 - DNA, 15 bp, Homo sapiens
gcataaggtcctaca

SEQ ID NO: 394848 - DNA, 15 bp, Homo sapiens
agcataaggtcctac

SEQ ID NO: 394849 - DNA, 15 bp, Homo sapiens
aagcataaggtccta

SEQ ID NO: 394850 - DNA, 15 bp, Homo sapiens
aaagcataaggtcct

SEQ ID NO: 394851 - DNA, 15 bp, Homo sapiens
caaagcataaggtcc

SEQ ID NO: 394852 - DNA, 15 bp, Homo sapiens
tcaaagcataaggtc

SEQ ID NO: 394853 - DNA, 15 bp, Homo sapiens
ctcaaagcataaggt

SEQ ID NO: 394854 - DNA, 15 bp, Homo sapiens
actcaaagcataagg

SEQ ID NO: 394855 - DNA, 15 bp, Homo sapiens
tactcaaagcataag

SEQ ID NO: 394856 - DNA, 15 bp, Homo sapiens
ttactcaaagcataa

SEQ ID NO: 394857 - DNA, 15 bp, Homo sapiens
attactcaaagcata

SEQ ID NO: 394858 - DNA, 15 bp, Homo sapiens
tattactcaaagcat

SEQ ID NO: 394859 - DNA, 15 bp, Homo sapiens
atattactcaaagca

SEQ ID NO: 394860 - DNA, 15 bp, Homo sapiens
catattactcaaagc

SEQ ID NO: 394861 - DNA, 15 bp, Homo sapiens
ccatattactcaaag

SEQ ID NO: 394862 - DNA, 15 bp, Homo sapiens
tccatattactcaaa

SEQ ID NO: 394863 - DNA, 15 bp, Homo sapiens
ttccatattactcaa

SEQ ID NO: 394864 - DNA, 15 bp, Homo sapiens
attccatattactca

SEQ ID NO: 394865 - DNA, 15 bp, Homo sapiens
cattccatattactc

SEQ ID NO: 394866 - DNA, 15 bp, Homo sapiens
acattccatattact

SEQ ID NO: 394867 - DNA, 15 bp, Homo sapiens
gacattccatattac

SEQ ID NO: 394868 - DNA, 15 bp, Homo sapiens
tgacattccatatta

SEQ ID NO: 394869 - DNA, 15 bp, Homo sapiens
gtgacattccatatt

SEQ ID NO: 394870 - DNA, 15 bp, Homo sapiens
agtgacattccatat

SEQ ID NO: 394871 - DNA, 15 bp, Homo sapiens
cagtgacattccata

SEQ ID NO: 394872 - DNA, 15 bp, Homo sapiens
ccagtgacattccat

SEQ ID NO: 394873 - DNA, 15 bp, Homo sapiens
tccagtgacattcca

SEQ ID NO: 394874 - DNA, 15 bp, Homo sapiens
ttccagtgacattcc

SEQ ID NO: 394875 - DNA, 15 bp, Homo sapiens
cttccagtgacattc

SEQ ID NO: 394876 - DNA, 15 bp, Homo sapiens
ccttccagtgacatt

SEQ ID NO: 394877 - DNA, 15 bp, Homo sapiens
tccttccagtgacat

SEQ ID NO: 394878 - DNA, 15 bp, Homo sapiens
atccttccagtgaca

SEQ ID NO: 394879 - DNA, 15 bp, Homo sapiens
aatccttccagtgac

SEQ ID NO: 394880 - DNA, 15 bp, Homo sapiens
gaatccttccagtga

SEQ ID NO: 394881 - DNA, 15 bp, Homo sapiens
agaatccttccagtg

SEQ ID NO: 394882 - DNA, 15 bp, Homo sapiens
tagaatccttccagt

SEQ ID NO: 394883 - DNA, 15 bp, Homo sapiens
ctagaatccttccag

SEQ ID NO: 394884 - DNA, 15 bp, Homo sapiens
gctagaatccttcca

SEQ ID NO: 394885 - DNA, 15 bp, Homo sapiens
tgctagaatccttcc

SEQ ID NO: 394886 - DNA, 15 bp, Homo sapiens
ttgctagaatccttc

SEQ ID NO: 394887 - DNA, 15 bp, Homo sapiens
tttgctagaatcctt

SEQ ID NO: 394888 - DNA, 15 bp, Homo sapiens
atttgctagaatcct

SEQ ID NO: 394889 - DNA, 15 bp, Homo sapiens
tatttgctagaatcc

SEQ ID NO: 394890 - DNA, 15 bp, Homo sapiens
ttatttgctagaatc

SEQ ID NO: 394891 - DNA, 15 bp, Homo sapiens
attatttgctagaat

SEQ ID NO: 394892 - DNA, 15 bp, Homo sapiens
aattatttgctagaa

SEQ ID NO: 394893 - DNA, 15 bp, Homo sapiens
caattatttgctaga

SEQ ID NO: 394894 - DNA, 15 bp, Homo sapiens
ccaattatttgctag

SEQ ID NO: 394895 - DNA, 15 bp, Homo sapiens
accaattatttgcta

SEQ ID NO: 394896 - DNA, 15 bp, Homo sapiens
taccaattatttgct

SEQ ID NO: 394897 - DNA, 15 bp, Homo sapiens
ataccaattatttgc

SEQ ID NO: 394898 - DNA, 15 bp, Homo sapiens
cataccaattatttg

SEQ ID NO: 394899 - DNA, 15 bp, Homo sapiens
tcataccaattattt

SEQ ID NO: 394900 - DNA, 15 bp, Homo sapiens
atcataccaattatt

SEQ ID NO: 394901 - DNA, 15 bp, Homo sapiens
gatcataccaattat

SEQ ID NO: 394902 - DNA, 15 bp, Homo sapiens
agatcataccaatta

SEQ ID NO: 394903 - DNA, 15 bp, Homo sapiens
cagatcataccaatt

SEQ ID NO: 394904 - DNA, 15 bp, Homo sapiens
acagatcataccaat

SEQ ID NO: 394905 - DNA, 15 bp, Homo sapiens
aacagatcataccaa

SEQ ID NO: 394906 - DNA, 15 bp, Homo sapiens
aaacagatcatacca

SEQ ID NO: 394907 - DNA, 15 bp, Homo sapiens
aaaacagatcatacc

SEQ ID NO: 394908 - DNA, 15 bp, Homo sapiens
caaaacagatcatac

SEQ ID NO: 394909 - DNA, 15 bp, Homo sapiens
acaaaacagatcata

SEQ ID NO: 394910 - DNA, 15 bp, Homo sapiens
tacaaaacagatcat

SEQ ID NO: 394911 - DNA, 15 bp, Homo sapiens
atacaaaacagatca

SEQ ID NO: 394912 - DNA, 15 bp, Homo sapiens
aatacaaaacagatc

SEQ ID NO: 394913 - DNA, 15 bp, Homo sapiens
aaatacaaaacagat

SEQ ID NO: 394914 - DNA, 15 bp, Homo sapiens
aaaatacaaaacaga

SEQ ID NO: 394915 - DNA, 15 bp, Homo sapiens
taaaatacaaaacag

SEQ ID NO: 394916 - DNA, 15 bp, Homo sapiens
ttaaaatacaaaaca

SEQ ID NO: 394917 - DNA, 15 bp, Homo sapiens
tttaaaatacaaaac

SEQ ID NO: 394918 - DNA, 15 bp, Homo sapiens
ctttaaaatacaaaa

SEQ ID NO: 394919 - DNA, 15 bp, Homo sapiens
cctttaaaatacaaa

SEQ ID NO: 394920 - DNA, 15 bp, Homo sapiens
gcctttaaaatacaa

SEQ ID NO: 394921 - DNA, 15 bp, Homo sapiens
agcctttaaaataca

SEQ ID NO: 394922 - DNA, 15 bp, Homo sapiens
gagcctttaaaatac

SEQ ID NO: 394923 - DNA, 15 bp, Homo sapiens
tgagcctttaaaata

SEQ ID NO: 394924 - DNA, 15 bp, Homo sapiens
gtgagcctttaaaat

SEQ ID NO: 394925 - DNA, 15 bp, Homo sapiens
agtgagcctttaaaa

SEQ ID NO: 394926 - DNA, 15 bp, Homo sapiens
gagtgagcctttaaa

SEQ ID NO: 394927 - DNA, 15 bp, Homo sapiens
agagtgagcctttaa

SEQ ID NO: 394928 - DNA, 15 bp, Homo sapiens
cagagtgagccttta

SEQ ID NO: 394929 - DNA, 15 bp, Homo sapiens
ccagagtgagccttt

SEQ ID NO: 394930 - DNA, 15 bp, Homo sapiens
gccagagtgagcctt

SEQ ID NO: 394931 - DNA, 15 bp, Homo sapiens
agccagagtgagcct

SEQ ID NO: 394932 - DNA, 15 bp, Homo sapiens
aagccagagtgagcc

SEQ ID NO: 394933 - DNA, 15 bp, Homo sapiens
gaagccagagtgagc

SEQ ID NO: 394934 - DNA, 15 bp, Homo sapiens
ggaagccagagtgag

SEQ ID NO: 394935 - DNA, 15 bp, Homo sapiens
tggaagccagagtga

SEQ ID NO: 394936 - DNA, 15 bp, Homo sapiens
atggaagccagagtg

SEQ ID NO: 394937 - DNA, 15 bp, Homo sapiens
catggaagccagagt

SEQ ID NO: 394938 - DNA, 15 bp, Homo sapiens
ccatggaagccagag

SEQ ID NO: 394939 - DNA, 15 bp, Homo sapiens
accatggaagccaga

SEQ ID NO: 394940 - DNA, 15 bp, Homo sapiens
caccatggaagccag

SEQ ID NO: 394941 - DNA, 15 bp, Homo sapiens
tcaccatggaagcca

SEQ ID NO: 394942 - DNA, 15 bp, Homo sapiens
ctcaccatggaagcc

SEQ ID NO: 394943 - DNA, 15 bp, Homo sapiens
tctcaccatggaagc

SEQ ID NO: 394944 - DNA, 15 bp, Homo sapiens
ttctcaccatggaag

SEQ ID NO: 394945 - DNA, 15 bp, Homo sapiens
attctcaccatggaa

SEQ ID NO: 394946 - DNA, 15 bp, Homo sapiens
cattctcaccatgga

SEQ ID NO: 394947 - DNA, 15 bp, Homo sapiens
acattctcaccatgg

SEQ ID NO: 394948 - DNA, 15 bp, Homo sapiens
gacattctcaccatg

SEQ ID NO: 394949 - DNA, 15 bp, Homo sapiens
agacattctcaccat

SEQ ID NO: 394950 - DNA, 15 bp, Homo sapiens
cagacattctcacca

SEQ ID NO: 394951 - DNA, 15 bp, Homo sapiens
acagacattctcacc

SEQ ID NO: 394952 - DNA, 15 bp, Homo sapiens
cacagacattctcac

SEQ ID NO: 394953 - DNA, 15 bp, Homo sapiens
tcacagacattctca

SEQ ID NO: 394954 - DNA, 15 bp, Homo sapiens
ctcacagacattctc

SEQ ID NO: 394955 - DNA, 15 bp, Homo sapiens
tctcacagacattct

SEQ ID NO: 394956 - DNA, 15 bp, Homo sapiens
ctctcacagacattc

SEQ ID NO: 394957 - DNA, 15 bp, Homo sapiens
actctcacagacatt

SEQ ID NO: 394958 - DNA, 15 bp, Homo sapiens
cactctcacagacat

SEQ ID NO: 394959 - DNA, 15 bp, Homo sapiens
tcactctcacagaca

SEQ ID NO: 394960 - DNA, 15 bp, Homo sapiens
ctcactctcacagac

SEQ ID NO: 394961 - DNA, 15 bp, Homo sapiens
tctcactctcacaga

SEQ ID NO: 394962 - DNA, 15 bp, Homo sapiens
ttctcactctcacag

SEQ ID NO: 394963 - DNA, 15 bp, Homo sapiens
cttctcactctcaca

SEQ ID NO: 394964 - DNA, 15 bp, Homo sapiens
gcttctcactctcac

SEQ ID NO: 394965 - DNA, 15 bp, Homo sapiens
cgcttctcactctca

SEQ ID NO: 394966 - DNA, 15 bp, Homo sapiens
acgcttctcactctc

SEQ ID NO: 394967 - DNA, 15 bp, Homo sapiens
cacgcttctcactct

SEQ ID NO: 394968 - DNA, 15 bp, Homo sapiens
tcacgcttctcactc

SEQ ID NO: 394969 - DNA, 15 bp, Homo sapiens
ctcacgcttctcact

SEQ ID NO: 394970 - DNA, 15 bp, Homo sapiens
tctcacgcttctcac

SEQ ID NO: 394971 - DNA, 15 bp, Homo sapiens
ttctcacgcttctca

SEQ ID NO: 394972 - DNA, 15 bp, Homo sapiens
cttctcacgcttctc

SEQ ID NO: 394973 - DNA, 15 bp, Homo sapiens
tcttctcacgcttct

SEQ ID NO: 394974 - DNA, 15 bp, Homo sapiens
ctcttctcacgcttc

SEQ ID NO: 394975 - DNA, 15 bp, Homo sapiens
gctcttctcacgctt

SEQ ID NO: 394976 - DNA, 15 bp, Homo sapiens
tgctcttctcacgct

SEQ ID NO: 394977 - DNA, 15 bp, Homo sapiens
ttgctcttctcacgc

SEQ ID NO: 394978 - DNA, 15 bp, Homo sapiens
tttgctcttctcacg

SEQ ID NO: 394979 - DNA, 15 bp, Homo sapiens
ttttgctcttctcac

SEQ ID NO: 394980 - DNA, 15 bp, Homo sapiens
cttttgctcttctca

SEQ ID NO: 394981 - DNA, 15 bp, Homo sapiens
gcttttgctcttctc

SEQ ID NO: 394982 - DNA, 15 bp, Homo sapiens
tgcttttgctcttct

SEQ ID NO: 394983 - DNA, 15 bp, Homo sapiens
ctgcttttgctcttc

SEQ ID NO: 394984 - DNA, 15 bp, Homo sapiens
tctgcttttgctctt

SEQ ID NO: 394985 - DNA, 15 bp, Homo sapiens
ctctgcttttgctct

SEQ ID NO: 394986 - DNA, 15 bp, Homo sapiens
tctctgcttttgctc

SEQ ID NO: 394987 - DNA, 15 bp, Homo sapiens
ctctctgcttttgct

SEQ ID NO: 394988 - DNA, 15 bp, Homo sapiens
tctctctgcttttgc

SEQ ID NO: 394989 - DNA, 15 bp, Homo sapiens
gtctctctgcttttg

SEQ ID NO: 394990 - DNA, 15 bp, Homo sapiens
ggtctctctgctttt

SEQ ID NO: 394991 - DNA, 15 bp, Homo sapiens
tggtctctctgcttt

SEQ ID NO: 394992 - DNA, 15 bp, Homo sapiens
ttggtctctctgctt

SEQ ID NO: 394993 - DNA, 15 bp, Homo sapiens
attggtctctctgct

SEQ ID NO: 394994 - DNA, 15 bp, Homo sapiens
aattggtctctctgc

SEQ ID NO: 394995 - DNA, 15 bp, Homo sapiens
taattggtctctctg

SEQ ID NO: 394996 - DNA, 15 bp, Homo sapiens
gtaattggtctctct

SEQ ID NO: 394997 - DNA, 15 bp, Homo sapiens
cgtaattggtctctc

SEQ ID NO: 394998 - DNA, 15 bp, Homo sapiens
tcgtaattggtctct

SEQ ID NO: 394999 - DNA, 15 bp, Homo sapiens
ttcgtaattggtctc

SEQ ID NO: 395000 - DNA, 15 bp, Homo sapiens
cttcgtaattggtct

SEQ ID NO: 395001 - DNA, 15 bp, Homo sapiens
tcttcgtaattggtc

SEQ ID NO: 395002 - DNA, 15 bp, Homo sapiens
ttcttcgtaattggt

SEQ ID NO: 395003 - DNA, 15 bp, Homo sapiens
tttcttcgtaattgg

SEQ ID NO: 395004 - DNA, 15 bp, Homo sapiens
atttcttcgtaattg

SEQ ID NO: 395005 - DNA, 15 bp, Homo sapiens
aatttcttcgtaatt

SEQ ID NO: 395006 - DNA, 15 bp, Homo sapiens
taatttcttcgtaat

SEQ ID NO: 395007 - DNA, 15 bp, Homo sapiens
gtaatttcttcgtaa

SEQ ID NO: 395008 - DNA, 15 bp, Homo sapiens
tgtaatttcttcgta

SEQ ID NO: 395009 - DNA, 15 bp, Homo sapiens
atgtaatttcttcgt

SEQ ID NO: 395010 - DNA, 15 bp, Homo sapiens
aatgtaatttcttcg

SEQ ID NO: 395011 - DNA, 15 bp, Homo sapiens
taatgtaatttcttc

SEQ ID NO: 395012 - DNA, 15 bp, Homo sapiens
ttaatgtaatttctt

SEQ ID NO: 395013 - DNA, 15 bp, Homo sapiens
gttaatgtaatttct

SEQ ID NO: 395014 - DNA, 15 bp, Homo sapiens
ggttaatgtaatttc

SEQ ID NO: 395015 - DNA, 15 bp, Homo sapiens
aggttaatgtaattt

SEQ ID NO: 395016 - DNA, 15 bp, Homo sapiens
caggttaatgtaatt

SEQ ID NO: 395017 - DNA, 15 bp, Homo sapiens
tcaggttaatgtaat

SEQ ID NO: 395018 - DNA, 15 bp, Homo sapiens
ctcaggttaatgtaa

SEQ ID NO: 395019 - DNA, 15 bp, Homo sapiens
gctcaggttaatgta

SEQ ID NO: 395020 - DNA, 15 bp, Homo sapiens
tgctcaggttaatgt

SEQ ID NO: 395021 - DNA, 15 bp, Homo sapiens
ttgctcaggttaatg

SEQ ID NO: 395022 - DNA, 15 bp, Homo sapiens
cttgctcaggttaat

SEQ ID NO: 395023 - DNA, 15 bp, Homo sapiens
tcttgctcaggttaa

SEQ ID NO: 395024 - DNA, 15 bp, Homo sapiens
ttcttgctcaggtta

SEQ ID NO: 395025 - DNA, 15 bp, Homo sapiens
tttcttgctcaggtt

SEQ ID NO: 395026 - DNA, 15 bp, Homo sapiens
atttcttgctcaggt

SEQ ID NO: 395027 - DNA, 15 bp, Homo sapiens
aatttcttgctcagg

SEQ ID NO: 395028 - DNA, 15 bp, Homo sapiens
taatttcttgctcag

SEQ ID NO: 395029 - DNA, 15 bp, Homo sapiens
ctaatttcttgctca

SEQ ID NO: 395030 - DNA, 15 bp, Homo sapiens
actaatttcttgctc

SEQ ID NO: 395031 - DNA, 15 bp, Homo sapiens
cactaatttcttgct

SEQ ID NO: 395032 - DNA, 15 bp, Homo sapiens
acactaatttcttgc

SEQ ID NO: 395033 - DNA, 15 bp, Homo sapiens
cacactaatttcttg

SEQ ID NO: 395034 - DNA, 15 bp, Homo sapiens
ccacactaatttctt

SEQ ID NO: 395035 - DNA, 15 bp, Homo sapiens
tccacactaatttct

SEQ ID NO: 395036 - DNA, 15 bp, Homo sapiens
ttccacactaatttc

SEQ ID NO: 395037 - DNA, 15 bp, Homo sapiens
cttccacactaattt

SEQ ID NO: 395038 - DNA, 15 bp, Homo sapiens
gcttccacactaatt

SEQ ID NO: 395039 - DNA, 15 bp, Homo sapiens
tgcttccacactaat

SEQ ID NO: 395040 - DNA, 15 bp, Homo sapiens
ctgcttccacactaa

SEQ ID NO: 395041 - DNA, 15 bp, Homo sapiens
actgcttccacacta

SEQ ID NO: 395042 - DNA, 15 bp, Homo sapiens
cactgcttccacact

SEQ ID NO: 395043 - DNA, 15 bp, Homo sapiens
tcactgcttccacac

SEQ ID NO: 395044 - DNA, 15 bp, Homo sapiens
ttcactgcttccaca

SEQ ID NO: 395045 - DNA, 15 bp, Homo sapiens
cttcactgcttccac

SEQ ID NO: 395046 - DNA, 15 bp, Homo sapiens
tcttcactgcttcca

SEQ ID NO: 395047 - DNA, 15 bp, Homo sapiens
atcttcactgcttcc

SEQ ID NO: 395048 - DNA, 15 bp, Homo sapiens
catcttcactgcttc

SEQ ID NO: 395049 - DNA, 15 bp, Homo sapiens
ccatcttcactgctt

SEQ ID NO: 395050 - DNA, 15 bp, Homo sapiens
accatcttcactgct

SEQ ID NO: 395051 - DNA, 15 bp, Homo sapiens
caccatcttcactgc

SEQ ID NO: 395052 - DNA, 15 bp, Homo sapiens
ccaccatcttcactg

SEQ ID NO: 395053 - DNA, 15 bp, Homo sapiens
cccaccatcttcact

SEQ ID NO: 395054 - DNA, 15 bp, Homo sapiens
tcccaccatcttcac

SEQ ID NO: 395055 - DNA, 15 bp, Homo sapiens
ttcccaccatcttca

SEQ ID NO: 395056 - DNA, 15 bp, Homo sapiens
cttcccaccatcttc

SEQ ID NO: 395057 - DNA, 15 bp, Homo sapiens
acttcccaccatctt

SEQ ID NO: 395058 - DNA, 15 bp, Homo sapiens
aacttcccaccatct

SEQ ID NO: 395059 - DNA, 15 bp, Homo sapiens
caacttcccaccatc

SEQ ID NO: 395060 - DNA, 15 bp, Homo sapiens
gcaacttcccaccat

SEQ ID NO: 395061 - DNA, 15 bp, Homo sapiens
ggcaacttcccacca

SEQ ID NO: 395062 - DNA, 15 bp, Homo sapiens
tggcaacttcccacc

SEQ ID NO: 395063 - DNA, 15 bp, Homo sapiens
ctggcaacttcccac

SEQ ID NO: 395064 - DNA, 15 bp, Homo sapiens
tctggcaacttccca

SEQ ID NO: 395065 - DNA, 15 bp, Homo sapiens
atctggcaacttccc

SEQ ID NO: 395066 - DNA, 15 bp, Homo sapiens
aatctggcaacttcc

SEQ ID NO: 395067 - DNA, 15 bp, Homo sapiens
gaatctggcaacttc

SEQ ID NO: 395068 - DNA, 15 bp, Homo sapiens
agaatctggcaactt

SEQ ID NO: 395069 - DNA, 15 bp, Homo sapiens
cagaatctggcaact

SEQ ID NO: 395070 - DNA, 15 bp, Homo sapiens
ccagaatctggcaac

SEQ ID NO: 395071 - DNA, 15 bp, Homo sapiens
tccagaatctggcaa

SEQ ID NO: 395072 - DNA, 15 bp, Homo sapiens
atccagaatctggca

SEQ ID NO: 395073 - DNA, 15 bp, Homo sapiens
catccagaatctggc

SEQ ID NO: 395074 - DNA, 15 bp, Homo sapiens
acatccagaatctgg

SEQ ID NO: 395075 - DNA, 15 bp, Homo sapiens
cacatccagaatctg

SEQ ID NO: 395076 - DNA, 15 bp, Homo sapiens
acacatccagaatct

SEQ ID NO: 395077 - DNA, 15 bp, Homo sapiens
aacacatccagaatc

SEQ ID NO: 395078 - DNA, 15 bp, Homo sapiens
aaacacatccagaat

SEQ ID NO: 395079 - DNA, 15 bp, Homo sapiens
aaaacacatccagaa

SEQ ID NO: 395080 - DNA, 15 bp, Homo sapiens
caaaacacatccaga

SEQ ID NO: 395081 - DNA, 15 bp, Homo sapiens
tcaaaacacatccag

SEQ ID NO: 395082 - DNA, 15 bp, Homo sapiens
ttcaaaacacatcca

SEQ ID NO: 395083 - DNA, 15 bp, Homo sapiens
tttcaaaacacatcc

SEQ ID NO: 395084 - DNA, 15 bp, Homo sapiens
gtttcaaaacacatc

SEQ ID NO: 395085 - DNA, 15 bp, Homo sapiens
agtttcaaaacacat

SEQ ID NO: 395086 - DNA, 15 bp, Homo sapiens
tagtttcaaaacaca

SEQ ID NO: 395087 - DNA, 15 bp, Homo sapiens
ctagtttcaaaacac

SEQ ID NO: 395088 - DNA, 15 bp, Homo sapiens
tctagtttcaaaaca

SEQ ID NO: 395089 - DNA, 15 bp, Homo sapiens
ttctagtttcaaaac

SEQ ID NO: 395090 - DNA, 15 bp, Homo sapiens
cttctagtttcaaaa

SEQ ID NO: 395091 - DNA, 15 bp, Homo sapiens
gcttctagtttcaaa

SEQ ID NO: 395092 - DNA, 15 bp, Homo sapiens
tgcttctagtttcaa

SEQ ID NO: 395093 - DNA, 15 bp, Homo sapiens
ttgcttctagtttca

SEQ ID NO: 395094 - DNA, 15 bp, Homo sapiens
attgcttctagtttc

SEQ ID NO: 395095 - DNA, 15 bp, Homo sapiens
tattgcttctagttt

SEQ ID NO: 395096 - DNA, 15 bp, Homo sapiens
ctattgcttctagtt

SEQ ID NO: 395097 - DNA, 15 bp, Homo sapiens
cctattgcttctagt

SEQ ID NO: 395098 - DNA, 15 bp, Homo sapiens
tcctattgcttctag

SEQ ID NO: 395099 - DNA, 15 bp, Homo sapiens
atcctattgcttcta

SEQ ID NO: 395100 - DNA, 15 bp, Homo sapiens
aatcctattgcttct

SEQ ID NO: 395101 - DNA, 15 bp, Homo sapiens
aaatcctattgcttc

SEQ ID NO: 395102 - DNA, 15 bp, Homo sapiens
caaatcctattgctt

SEQ ID NO: 395103 - DNA, 15 bp, Homo sapiens
gcaaatcctattgct

SEQ ID NO: 395104 - DNA, 15 bp, Homo sapiens
agcaaatcctattgc

SEQ ID NO: 395105 - DNA, 15 bp, Homo sapiens
cagcaaatcctattg

SEQ ID NO: 395106 - DNA, 15 bp, Homo sapiens
ccagcaaatcctatt

SEQ ID NO: 395107 - DNA, 15 bp, Homo sapiens
accagcaaatcctat

SEQ ID NO: 395108 - DNA, 15 bp, Homo sapiens
caccagcaaatccta

SEQ ID NO: 395109 - DNA, 15 bp, Homo sapiens
tcaccagcaaatcct

SEQ ID NO: 395110 - DNA, 15 bp, Homo sapiens
ttcaccagcaaatcc

SEQ ID NO: 395111 - DNA, 15 bp, Homo sapiens
attcaccagcaaatc

SEQ ID NO: 395112 - DNA, 15 bp, Homo sapiens
aattcaccagcaaat

SEQ ID NO: 395113 - DNA, 15 bp, Homo sapiens
caattcaccagcaaa

SEQ ID NO: 395114 - DNA, 15 bp, Homo sapiens
tcaattcaccagcaa

SEQ ID NO: 395115 - DNA, 15 bp, Homo sapiens
atcaattcaccagca

SEQ ID NO: 395116 - DNA, 15 bp, Homo sapiens
catcaattcaccagc

SEQ ID NO: 395117 - DNA, 15 bp, Homo sapiens
acatcaattcaccag

SEQ ID NO: 395118 - DNA, 15 bp, Homo sapiens
tacatcaattcacca

SEQ ID NO: 395119 - DNA, 15 bp, Homo sapiens
ctacatcaattcacc

SEQ ID NO: 395120 - DNA, 15 bp, Homo sapiens
cctacatcaattcac

SEQ ID NO: 395121 - DNA, 15 bp, Homo sapiens
acctacatcaattca

SEQ ID NO: 395122 - DNA, 15 bp, Homo sapiens
cacctacatcaattc

SEQ ID NO: 395123 - DNA, 15 bp, Homo sapiens
acacctacatcaatt

SEQ ID NO: 395124 - DNA, 15 bp, Homo sapiens
cacacctacatcaat

SEQ ID NO: 395125 - DNA, 15 bp, Homo sapiens
tcacacctacatcaa

SEQ ID NO: 395126 - DNA, 15 bp, Homo sapiens
gtcacacctacatca

SEQ ID NO: 395127 - DNA, 15 bp, Homo sapiens
tgtcacacctacatc

SEQ ID NO: 395128 - DNA, 15 bp, Homo sapiens
ctgtcacacctacat

SEQ ID NO: 395129 - DNA, 15 bp, Homo sapiens
tctgtcacacctaca

SEQ ID NO: 395130 - DNA, 15 bp, Homo sapiens
ttctgtcacacctac

SEQ ID NO: 395131 - DNA, 15 bp, Homo sapiens
attctgtcacaccta

SEQ ID NO: 395132 - DNA, 15 bp, Homo sapiens
cattctgtcacacct

SEQ ID NO: 395133 - DNA, 15 bp, Homo sapiens
tcattctgtcacacc

SEQ ID NO: 395134 - DNA, 15 bp, Homo sapiens
ttcattctgtcacac

SEQ ID NO: 395135 - DNA, 15 bp, Homo sapiens
cttcattctgtcaca

SEQ ID NO: 395136 - DNA, 15 bp, Homo sapiens
tcttcattctgtcac

SEQ ID NO: 395137 - DNA, 15 bp, Homo sapiens
ttcttcattctgtca

SEQ ID NO: 395138 - DNA, 15 bp, Homo sapiens
tttcttcattctgtc

SEQ ID NO: 395139 - DNA, 15 bp, Homo sapiens
atttcttcattctgt

SEQ ID NO: 395140 - DNA, 15 bp, Homo sapiens
gatttcttcattctg

SEQ ID NO: 395141 - DNA, 15 bp, Homo sapiens
tgatttcttcattct

SEQ ID NO: 395142 - DNA, 15 bp, Homo sapiens
ttgatttcttcattc

SEQ ID NO: 395143 - DNA, 15 bp, Homo sapiens
tttgatttcttcatt

SEQ ID NO: 395144 - DNA, 15 bp, Homo sapiens
ctttgatttcttcat

SEQ ID NO: 395145 - DNA, 15 bp, Homo sapiens
tctttgatttcttca

SEQ ID NO: 395146 - DNA, 15 bp, Homo sapiens
atctttgatttcttc

SEQ ID NO: 395147 - DNA, 15 bp, Homo sapiens
catctttgatttctt

SEQ ID NO: 395148 - DNA, 15 bp, Homo sapiens
tcatctttgatttct

SEQ ID NO: 395149 - DNA, 15 bp, Homo sapiens
gtcatctttgatttc

SEQ ID NO: 395150 - DNA, 15 bp, Homo sapiens
ggtcatctttgattt

SEQ ID NO: 395151 - DNA, 15 bp, Homo sapiens
gggtcatctttgatt

SEQ ID NO: 395152 - DNA, 15 bp, Homo sapiens
ggggtcatctttgat

SEQ ID NO: 395153 - DNA, 15 bp, Homo sapiens
gggggtcatctttga

SEQ ID NO: 395154 - DNA, 15 bp, Homo sapiens
tgggggtcatctttg

SEQ ID NO: 395155 - DNA, 15 bp, Homo sapiens
atgggggtcatcttt

SEQ ID NO: 395156 - DNA, 15 bp, Homo sapiens
catgggggtcatctt

SEQ ID NO: 395157 - DNA, 15 bp, Homo sapiens
acatgggggtcatct

SEQ ID NO: 395158 - DNA, 15 bp, Homo sapiens
aacatgggggtcatc

SEQ ID NO: 395159 - DNA, 15 bp, Homo sapiens
aaacatgggggtcat

SEQ ID NO: 395160 - DNA, 15 bp, Homo sapiens
caaacatgggggtca

SEQ ID NO: 395161 - DNA, 15 bp, Homo sapiens
ccaaacatgggggtc

SEQ ID NO: 395162 - DNA, 15 bp, Homo sapiens
cccaaacatgggggt

SEQ ID NO: 395163 - DNA, 15 bp, Homo sapiens
ccccaaacatggggg

SEQ ID NO: 395164 - DNA, 15 bp, Homo sapiens
accccaaacatgggg

SEQ ID NO: 395165 - DNA, 15 bp, Homo sapiens
gaccccaaacatggg

SEQ ID NO: 395166 - DNA, 15 bp, Homo sapiens
tgaccccaaacatgg

SEQ ID NO: 395167 - DNA, 15 bp, Homo sapiens
ttgaccccaaacatg

SEQ ID NO: 395168 - DNA, 15 bp, Homo sapiens
tttgaccccaaacat

SEQ ID NO: 395169 - DNA, 15 bp, Homo sapiens
ctttgaccccaaaca

SEQ ID NO: 395170 - DNA, 15 bp, Homo sapiens
cctttgaccccaaac

SEQ ID NO: 395171 - DNA, 15 bp, Homo sapiens
tcctttgaccccaaa

SEQ ID NO: 395172 - DNA, 15 bp, Homo sapiens
ttcctttgaccccaa

SEQ ID NO: 395173 - DNA, 15 bp, Homo sapiens
attcctttgacccca

SEQ ID NO: 395174 - DNA, 15 bp, Homo sapiens
aattcctttgacccc

SEQ ID NO: 395175 - DNA, 15 bp, Homo sapiens
caattcctttgaccc

SEQ ID NO: 395176 - DNA, 15 bp, Homo sapiens
ccaattcctttgacc

SEQ ID NO: 395177 - DNA, 15 bp, Homo sapiens
tccaattcctttgac

SEQ ID NO: 395178 - DNA, 15 bp, Homo sapiens
ttccaattcctttga

SEQ ID NO: 395179 - DNA, 15 bp, Homo sapiens
tttccaattcctttg

SEQ ID NO: 395180 - DNA, 15 bp, Homo sapiens
ttttccaattccttt

SEQ ID NO: 395181 - DNA, 15 bp, Homo sapiens
attttccaattcctt

SEQ ID NO: 395182 - DNA, 15 bp, Homo sapiens
aattttccaattcct

SEQ ID NO: 395183 - DNA, 15 bp, Homo sapiens
caattttccaattcc

SEQ ID NO: 395184 - DNA, 15 bp, Homo sapiens
ccaattttccaattc

SEQ ID NO: 395185 - DNA, 15 bp, Homo sapiens
tccaattttccaatt

SEQ ID NO: 395186 - DNA, 15 bp, Homo sapiens
ctccaattttccaat

SEQ ID NO: 395187 - DNA, 15 bp, Homo sapiens
actccaattttccaa

SEQ ID NO: 395188 - DNA, 15 bp, Homo sapiens
tactccaattttcca

SEQ ID NO: 395189 - DNA, 15 bp, Homo sapiens
ctactccaattttcc

SEQ ID NO: 395190 - DNA, 15 bp, Homo sapiens
gctactccaattttc

SEQ ID NO: 395191 - DNA, 15 bp, Homo sapiens
ggctactccaatttt

SEQ ID NO: 395192 - DNA, 15 bp, Homo sapiens
tggctactccaattt

SEQ ID NO: 395193 - DNA, 15 bp, Homo sapiens
atggctactccaatt

SEQ ID NO: 395194 - DNA, 15 bp, Homo sapiens
aatggctactccaat

SEQ ID NO: 395195 - DNA, 15 bp, Homo sapiens
aaatggctactccaa

SEQ ID NO: 395196 - DNA, 15 bp, Homo sapiens
taaatggctactcca

SEQ ID NO: 395197 - DNA, 15 bp, Homo sapiens
gtaaatggctactcc

SEQ ID NO: 395198 - DNA, 15 bp, Homo sapiens
agtaaatggctactc

SEQ ID NO: 395199 - DNA, 15 bp, Homo sapiens
cagtaaatggctact

SEQ ID NO: 395200 - DNA, 15 bp, Homo sapiens
tcagtaaatggctac

SEQ ID NO: 395201 - DNA, 15 bp, Homo sapiens
ctcagtaaatggcta

SEQ ID NO: 395202 - DNA, 15 bp, Homo sapiens
tctcagtaaatggct

SEQ ID NO: 395203 - DNA, 15 bp, Homo sapiens
atctcagtaaatggc

SEQ ID NO: 395204 - DNA, 15 bp, Homo sapiens
tatctcagtaaatgg

SEQ ID NO: 395205 - DNA, 15 bp, Homo sapiens
ctatctcagtaaatg

SEQ ID NO: 395206 - DNA, 15 bp, Homo sapiens
tctatctcagtaaat

SEQ ID NO: 395207 - DNA, 15 bp, Homo sapiens
ttctatctcagtaaa

SEQ ID NO: 395208 - DNA, 15 bp, Homo sapiens
attctatctcagtaa

SEQ ID NO: 395209 - DNA, 15 bp, Homo sapiens
tattctatctcagta

SEQ ID NO: 395210 - DNA, 15 bp, Homo sapiens
ctattctatctcagt

SEQ ID NO: 395211 - DNA, 15 bp, Homo sapiens
tctattctatctcag

SEQ ID NO: 395212 - DNA, 15 bp, Homo sapiens
ttctattctatctca

SEQ ID NO: 395213 - DNA, 15 bp, Homo sapiens
tttctattctatctc

SEQ ID NO: 395214 - DNA, 15 bp, Homo sapiens
ctttctattctatct

SEQ ID NO: 395215 - DNA, 15 bp, Homo sapiens
tctttctattctatc

SEQ ID NO: 395216 - DNA, 15 bp, Homo sapiens
ctctttctattctat

SEQ ID NO: 395217 - DNA, 15 bp, Homo sapiens
gctctttctattcta

SEQ ID NO: 395218 - DNA, 15 bp, Homo sapiens
tgctctttctattct

SEQ ID NO: 395219 - DNA, 15 bp, Homo sapiens
atgctctttctattc

SEQ ID NO: 395220 - DNA, 15 bp, Homo sapiens
catgctctttctatt

SEQ ID NO: 395221 - DNA, 15 bp, Homo sapiens
acatgctctttctat

SEQ ID NO: 395222 - DNA, 15 bp, Homo sapiens
aacatgctctttcta

SEQ ID NO: 395223 - DNA, 15 bp, Homo sapiens
aaacatgctctttct

SEQ ID NO: 395224 - DNA, 15 bp, Homo sapiens
caaacatgctctttc

SEQ ID NO: 395225 - DNA, 15 bp, Homo sapiens
gcaaacatgctcttt

SEQ ID NO: 395226 - DNA, 15 bp, Homo sapiens
tgcaaacatgctctt

SEQ ID NO: 395227 - DNA, 15 bp, Homo sapiens
ctgcaaacatgctct

SEQ ID NO: 395228 - DNA, 15 bp, Homo sapiens
tctgcaaacatgctc

SEQ ID NO: 395229 - DNA, 15 bp, Homo sapiens
ctctgcaaacatgct

SEQ ID NO: 395230 - DNA, 15 bp, Homo sapiens
tctctgcaaacatgc

SEQ ID NO: 395231 - DNA, 15 bp, Homo sapiens
ttctctgcaaacatg

SEQ ID NO: 395232 - DNA, 15 bp, Homo sapiens
attctctgcaaacat

SEQ ID NO: 395233 - DNA, 15 bp, Homo sapiens
tattctctgcaaaca

SEQ ID NO: 395234 - DNA, 15 bp, Homo sapiens
ctattctctgcaaac

SEQ ID NO: 395235 - DNA, 15 bp, Homo sapiens
cctattctctgcaaa

SEQ ID NO: 395236 - DNA, 15 bp, Homo sapiens
tcctattctctgcaa

SEQ ID NO: 395237 - DNA, 15 bp, Homo sapiens
ctcctattctctgca

SEQ ID NO: 395238 - DNA, 15 bp, Homo sapiens
gctcctattctctgc

SEQ ID NO: 395239 - DNA, 15 bp, Homo sapiens
tgctcctattctctg

SEQ ID NO: 395240 - DNA, 15 bp, Homo sapiens
ttgctcctattctct

SEQ ID NO: 395241 - DNA, 15 bp, Homo sapiens
tttgctcctattctc

SEQ ID NO: 395242 - DNA, 15 bp, Homo sapiens
atttgctcctattct

SEQ ID NO: 395243 - DNA, 15 bp, Homo sapiens
aatttgctcctattc

SEQ ID NO: 395244 - DNA, 15 bp, Homo sapiens
taatttgctcctatt

SEQ ID NO: 395245 - DNA, 15 bp, Homo sapiens
ctaatttgctcctat

SEQ ID NO: 395246 - DNA, 15 bp, Homo sapiens
tctaatttgctccta

SEQ ID NO: 395247 - DNA, 15 bp, Homo sapiens
ttctaatttgctcct

SEQ ID NO: 395248 - DNA, 15 bp, Homo sapiens
cttctaatttgctcc

SEQ ID NO: 395249 - DNA, 15 bp, Homo sapiens
acttctaatttgctc

SEQ ID NO: 395250 - DNA, 15 bp, Homo sapiens
aacttctaatttgct

SEQ ID NO: 395251 - DNA, 15 bp, Homo sapiens
gaacttctaatttgc

SEQ ID NO: 395252 - DNA, 15 bp, Homo sapiens
tgaacttctaatttg

SEQ ID NO: 395253 - DNA, 15 bp, Homo sapiens
ttgaacttctaattt

SEQ ID NO: 395254 - DNA, 15 bp, Homo sapiens
attgaacttctaatt

SEQ ID NO: 395255 - DNA, 15 bp, Homo sapiens
gattgaacttctaat

SEQ ID NO: 395256 - DNA, 15 bp, Homo sapiens
ggattgaacttctaa

SEQ ID NO: 395257 - DNA, 15 bp, Homo sapiens
aggattgaacttcta

SEQ ID NO: 395258 - DNA, 15 bp, Homo sapiens
caggattgaacttct

SEQ ID NO: 395259 - DNA, 15 bp, Homo sapiens
ccaggattgaacttc

SEQ ID NO: 395260 - DNA, 15 bp, Homo sapiens
tccaggattgaactt

SEQ ID NO: 395261 - DNA, 15 bp, Homo sapiens
ttccaggattgaact

SEQ ID NO: 395262 - DNA, 15 bp, Homo sapiens
tttccaggattgaac

SEQ ID NO: 395263 - DNA, 15 bp, Homo sapiens
atttccaggattgaa

SEQ ID NO: 395264 - DNA, 15 bp, Homo sapiens
catttccaggattga

SEQ ID NO: 395265 - DNA, 15 bp, Homo sapiens
acatttccaggattg

SEQ ID NO: 395266 - DNA, 15 bp, Homo sapiens
aacatttccaggatt

SEQ ID NO: 395267 - DNA, 15 bp, Homo sapiens
caacatttccaggat

SEQ ID NO: 395268 - DNA, 15 bp, Homo sapiens
tcaacatttccagga

SEQ ID NO: 395269 - DNA, 15 bp, Homo sapiens
ttcaacatttccagg

SEQ ID NO: 395270 - DNA, 15 bp, Homo sapiens
attcaacatttccag

SEQ ID NO: 395271 - DNA, 15 bp, Homo sapiens
aattcaacatttcca

SEQ ID NO: 395272 - DNA, 15 bp, Homo sapiens
caattcaacatttcc

SEQ ID NO: 395273 - DNA, 15 bp, Homo sapiens
tcaattcaacatttc

SEQ ID NO: 395274 - DNA, 15 bp, Homo sapiens
ctcaattcaacattt

SEQ ID NO: 395275 - DNA, 15 bp, Homo sapiens
tctcaattcaacatt

SEQ ID NO: 395276 - DNA, 15 bp, Homo sapiens
atctcaattcaacat

SEQ ID NO: 395277 - DNA, 15 bp, Homo sapiens
catctcaattcaaca

SEQ ID NO: 395278 - DNA, 15 bp, Homo sapiens
gcatctcaattcaac

SEQ ID NO: 395279 - DNA, 15 bp, Homo sapiens
agcatctcaattcaa

SEQ ID NO: 395280 - DNA, 15 bp, Homo sapiens
aagcatctcaattca

SEQ ID NO: 395281 - DNA, 15 bp, Homo sapiens
taagcatctcaattc

SEQ ID NO: 395282 - DNA, 15 bp, Homo sapiens
ataagcatctcaatt

SEQ ID NO: 395283 - DNA, 15 bp, Homo sapiens
aataagcatctcaat

SEQ ID NO: 395284 - DNA, 15 bp, Homo sapiens
taataagcatctcaa

SEQ ID NO: 395285 - DNA, 15 bp, Homo sapiens
ctaataagcatctca

SEQ ID NO: 395286 - DNA, 15 bp, Homo sapiens
tctaataagcatctc

SEQ ID NO: 395287 - DNA, 15 bp, Homo sapiens
gtctaataagcatct

SEQ ID NO: 395288 - DNA, 15 bp, Homo sapiens
tgtctaataagcatc

SEQ ID NO: 395289 - DNA, 15 bp, Homo sapiens
gtgtctaataagcat

SEQ ID NO: 395290 - DNA, 15 bp, Homo sapiens
agtgtctaataagca

SEQ ID NO: 395291 - DNA, 15 bp, Homo sapiens
gagtgtctaataagc

SEQ ID NO: 395292 - DNA, 15 bp, Homo sapiens
tgagtgtctaataag

SEQ ID NO: 395293 - DNA, 15 bp, Homo sapiens
ttgagtgtctaataa

SEQ ID NO: 395294 - DNA, 15 bp, Homo sapiens
cttgagtgtctaata

SEQ ID NO: 395295 - DNA, 15 bp, Homo sapiens
acttgagtgtctaat

SEQ ID NO: 395296 - DNA, 15 bp, Homo sapiens
gacttgagtgtctaa

SEQ ID NO: 395297 - DNA, 15 bp, Homo sapiens
tgacttgagtgtcta

SEQ ID NO: 395298 - DNA, 15 bp, Homo sapiens
ctgacttgagtgtct

SEQ ID NO: 395299 - DNA, 15 bp, Homo sapiens
cctgacttgagtgtc

SEQ ID NO: 395300 - DNA, 15 bp, Homo sapiens
tcctgacttgagtgt

SEQ ID NO: 395301 - DNA, 15 bp, Homo sapiens
atcctgacttgagtg

SEQ ID NO: 395302 - DNA, 15 bp, Homo sapiens
catcctgacttgagt

SEQ ID NO: 395303 - DNA, 15 bp, Homo sapiens
gcatcctgacttgag

SEQ ID NO: 395304 - DNA, 15 bp, Homo sapiens
ggcatcctgacttga

SEQ ID NO: 395305 - DNA, 15 bp, Homo sapiens
aggcatcctgacttg

SEQ ID NO: 395306 - DNA, 15 bp, Homo sapiens
aaggcatcctgactt

SEQ ID NO: 395307 - DNA, 15 bp, Homo sapiens
caaggcatcctgact

SEQ ID NO: 395308 - DNA, 15 bp, Homo sapiens
acaaggcatcctgac

SEQ ID NO: 395309 - DNA, 15 bp, Homo sapiens
tacaaggcatcctga

SEQ ID NO: 395310 - DNA, 15 bp, Homo sapiens
ctacaaggcatcctg

SEQ ID NO: 395311 - DNA, 15 bp, Homo sapiens
tctacaaggcatcct

SEQ ID NO: 395312 - DNA, 15 bp, Homo sapiens
gtctacaaggcatcc

SEQ ID NO: 395313 - DNA, 15 bp, Homo sapiens
tgtctacaaggcatc

SEQ ID NO: 395314 - DNA, 15 bp, Homo sapiens
ttgtctacaaggcat

SEQ ID NO: 395315 - DNA, 15 bp, Homo sapiens
gttgtctacaaggca

SEQ ID NO: 395316 - DNA, 15 bp, Homo sapiens
agttgtctacaaggc

SEQ ID NO: 395317 - DNA, 15 bp, Homo sapiens
cagttgtctacaagg

SEQ ID NO: 395318 - DNA, 15 bp, Homo sapiens
ccagttgtctacaag

SEQ ID NO: 395319 - DNA, 15 bp, Homo sapiens
tccagttgtctacaa

SEQ ID NO: 395320 - DNA, 15 bp, Homo sapiens
atccagttgtctaca

SEQ ID NO: 395321 - DNA, 15 bp, Homo sapiens
catccagttgtctac

SEQ ID NO: 395322 - DNA, 15 bp, Homo sapiens
acatccagttgtcta

SEQ ID NO: 395323 - DNA, 15 bp, Homo sapiens
aacatccagttgtct

SEQ ID NO: 395324 - DNA, 15 bp, Homo sapiens
aaacatccagttgtc

SEQ ID NO: 395325 - DNA, 15 bp, Homo sapiens
aaaacatccagttgt

SEQ ID NO: 395326 - DNA, 15 bp, Homo sapiens
taaaacatccagttg

SEQ ID NO: 395327 - DNA, 15 bp, Homo sapiens
ctaaaacatccagtt

SEQ ID NO: 395328 - DNA, 15 bp, Homo sapiens
actaaaacatccagt

SEQ ID NO: 395329 - DNA, 15 bp, Homo sapiens
gactaaaacatccag

SEQ ID NO: 395330 - DNA, 15 bp, Homo sapiens
agactaaaacatcca

SEQ ID NO: 395331 - DNA, 15 bp, Homo sapiens
cagactaaaacatcc

SEQ ID NO: 395332 - DNA, 15 bp, Homo sapiens
ccagactaaaacatc

SEQ ID NO: 395333 - DNA, 15 bp, Homo sapiens
tccagactaaaacat

SEQ ID NO: 395334 - DNA, 15 bp, Homo sapiens
ttccagactaaaaca

SEQ ID NO: 395335 - DNA, 15 bp, Homo sapiens
attccagactaaaac

SEQ ID NO: 395336 - DNA, 15 bp, Homo sapiens
aattccagactaaaa

SEQ ID NO: 395337 - DNA, 15 bp, Homo sapiens
gaattccagactaaa

SEQ ID NO: 395338 - DNA, 15 bp, Homo sapiens
tgaattccagactaa

SEQ ID NO: 395339 - DNA, 15 bp, Homo sapiens
ttgaattccagacta

SEQ ID NO: 395340 - DNA, 15 bp, Homo sapiens
cttgaattccagact

SEQ ID NO: 395341 - DNA, 15 bp, Homo sapiens
ccttgaattccagac

SEQ ID NO: 395342 - DNA, 15 bp, Homo sapiens
cccttgaattccaga

SEQ ID NO: 395343 - DNA, 15 bp, Homo sapiens
ccccttgaattccag

SEQ ID NO: 395344 - DNA, 15 bp, Homo sapiens
cccccttgaattcca

SEQ ID NO: 395345 - DNA, 15 bp, Homo sapiens
tcccccttgaattcc

SEQ ID NO: 395346 - DNA, 15 bp, Homo sapiens
ctcccccttgaattc

SEQ ID NO: 395347 - DNA, 15 bp, Homo sapiens
cctcccccttgaatt

SEQ ID NO: 395348 - DNA, 15 bp, Homo sapiens
gcctcccccttgaat

SEQ ID NO: 395349 - DNA, 15 bp, Homo sapiens
agcctcccccttgaa

SEQ ID NO: 395350 - DNA, 15 bp, Homo sapiens
cagcctcccccttga

SEQ ID NO: 395351 - DNA, 15 bp, Homo sapiens
gcagcctcccccttg

SEQ ID NO: 395352 - DNA, 15 bp, Homo sapiens
tgcagcctccccctt

SEQ ID NO: 395353 - DNA, 15 bp, Homo sapiens
ttgcagcctccccct

SEQ ID NO: 395354 - DNA, 15 bp, Homo sapiens
gttgcagcctccccc

SEQ ID NO: 395355 - DNA, 15 bp, Homo sapiens
agttgcagcctcccc

SEQ ID NO: 395356 - DNA, 15 bp, Homo sapiens
tagttgcagcctccc

SEQ ID NO: 395357 - DNA, 15 bp, Homo sapiens
gtagttgcagcctcc

SEQ ID NO: 395358 - DNA, 15 bp, Homo sapiens
tgtagttgcagcctc

SEQ ID NO: 395359 - DNA, 15 bp, Homo sapiens
atgtagttgcagcct

SEQ ID NO: 395360 - DNA, 15 bp, Homo sapiens
tatgtagttgcagcc

SEQ ID NO: 395361 - DNA, 15 bp, Homo sapiens
ttatgtagttgcagc

SEQ ID NO: 395362 - DNA, 15 bp, Homo sapiens
tttatgtagttgcag

SEQ ID NO: 395363 - DNA, 15 bp, Homo sapiens
atttatgtagttgca

SEQ ID NO: 395364 - DNA, 15 bp, Homo sapiens
aatttatgtagttgc

SEQ ID NO: 395365 - DNA, 15 bp, Homo sapiens
taatttatgtagttg

SEQ ID NO: 395366 - DNA, 15 bp, Homo sapiens
ttaatttatgtagtt

SEQ ID NO: 395367 - DNA, 15 bp, Homo sapiens
gttaatttatgtagt

SEQ ID NO: 395368 - DNA, 15 bp, Homo sapiens
agttaatttatgtag

SEQ ID NO: 395369 - DNA, 15 bp, Homo sapiens
gagttaatttatgta

SEQ ID NO: 395370 - DNA, 15 bp, Homo sapiens
tgagttaatttatgt

SEQ ID NO: 395371 - DNA, 15 bp, Homo sapiens
ctgagttaatttatg

SEQ ID NO: 395372 - DNA, 15 bp, Homo sapiens
tctgagttaatttat

SEQ ID NO: 395373 - DNA, 15 bp, Homo sapiens
ttctgagttaattta

SEQ ID NO: 395374 - DNA, 15 bp, Homo sapiens
cttctgagttaattt

SEQ ID NO: 395375 - DNA, 15 bp, Homo sapiens
acttctgagttaatt

SEQ ID NO: 395376 - DNA, 15 bp, Homo sapiens
aacttctgagttaat

SEQ ID NO: 395377 - DNA, 15 bp, Homo sapiens
caacttctgagttaa

SEQ ID NO: 395378 - DNA, 15 bp, Homo sapiens
acaacttctgagtta

SEQ ID NO: 395379 - DNA, 15 bp, Homo sapiens
gacaacttctgagtt

SEQ ID NO: 395380 - DNA, 15 bp, Homo sapiens
tgacaacttctgagt

SEQ ID NO: 395381 - DNA, 15 bp, Homo sapiens
ttgacaacttctgag

SEQ ID NO: 395382 - DNA, 15 bp, Homo sapiens
gttgacaacttctga

SEQ ID NO: 395383 - DNA, 15 bp, Homo sapiens
tgttgacaacttctg

SEQ ID NO: 395384 - DNA, 15 bp, Homo sapiens
gtgttgacaacttct

SEQ ID NO: 395385 - DNA, 15 bp, Homo sapiens
tgtgttgacaacttc

SEQ ID NO: 395386 - DNA, 15 bp, Homo sapiens
atgtgttgacaactt

SEQ ID NO: 395387 - DNA, 15 bp, Homo sapiens
tatgtgttgacaact

SEQ ID NO: 395388 - DNA, 15 bp, Homo sapiens
ttatgtgttgacaac

SEQ ID NO: 395389 - DNA, 15 bp, Homo sapiens
cttatgtgttgacaa

SEQ ID NO: 395390 - DNA, 15 bp, Homo sapiens
gcttatgtgttgaca

SEQ ID NO: 395391 - DNA, 15 bp, Homo sapiens
tgcttatgtgttgac

SEQ ID NO: 395392 - DNA, 15 bp, Homo sapiens
atgcttatgtgttga

SEQ ID NO: 395393 - DNA, 15 bp, Homo sapiens
aatgcttatgtgttg

SEQ ID NO: 395394 - DNA, 15 bp, Homo sapiens
taatgcttatgtgtt

SEQ ID NO: 395395 - DNA, 15 bp, Homo sapiens
ataatgcttatgtgt

SEQ ID NO: 395396 - DNA, 15 bp, Homo sapiens
aataatgcttatgtg

SEQ ID NO: 395397 - DNA, 15 bp, Homo sapiens
aaataatgcttatgt

SEQ ID NO: 395398 - DNA, 15 bp, Homo sapiens
taaataatgcttatg

SEQ ID NO: 395399 - DNA, 15 bp, Homo sapiens
ataaataatgcttat

SEQ ID NO: 395400 - DNA, 15 bp, Homo sapiens
tataaataatgctta

SEQ ID NO: 395401 - DNA, 15 bp, Homo sapiens
ttataaataatgctt

SEQ ID NO: 395402 - DNA, 15 bp, Homo sapiens
cttataaataatgct

SEQ ID NO: 395403 - DNA, 15 bp, Homo sapiens
acttataaataatgc

SEQ ID NO: 395404 - DNA, 15 bp, Homo sapiens
cacttataaataatg

SEQ ID NO: 395405 - DNA, 15 bp, Homo sapiens
tcacttataaataat

SEQ ID NO: 395406 - DNA, 15 bp, Homo sapiens
ctcacttataaataa

SEQ ID NO: 395407 - DNA, 15 bp, Homo sapiens
actcacttataaata

SEQ ID NO: 395408 - DNA, 15 bp, Homo sapiens
tactcacttataaat

SEQ ID NO: 395409 - DNA, 15 bp, Homo sapiens
atactcacttataaa

SEQ ID NO: 395410 - DNA, 15 bp, Homo sapiens
tatactcacttataa

SEQ ID NO: 395411 - DNA, 15 bp, Homo sapiens
ctatactcacttata

SEQ ID NO: 395412 - DNA, 15 bp, Homo sapiens
tctatactcacttat

SEQ ID NO: 395413 - DNA, 15 bp, Homo sapiens
atctatactcactta

SEQ ID NO: 395414 - DNA, 15 bp, Homo sapiens
tatctatactcactt

SEQ ID NO: 395415 - DNA, 15 bp, Homo sapiens
ttatctatactcact

SEQ ID NO: 395416 - DNA, 15 bp, Homo sapiens
tttatctatactcac

SEQ ID NO: 395417 - DNA, 15 bp, Homo sapiens
ttttatctatactca

SEQ ID NO: 395418 - DNA, 15 bp, Homo sapiens
tttttatctatactc

SEQ ID NO: 395419 - DNA, 15 bp, Homo sapiens
ttttttatctatact

SEQ ID NO: 395420 - DNA, 15 bp, Homo sapiens
cttttttatctatac

SEQ ID NO: 395421 - DNA, 15 bp, Homo sapiens
tcttttttatctata

SEQ ID NO: 395422 - DNA, 15 bp, Homo sapiens
ctcttttttatctat

SEQ ID NO: 395423 - DNA, 15 bp, Homo sapiens
cctcttttttatcta

SEQ ID NO: 395424 - DNA, 15 bp, Homo sapiens
tcctcttttttatct

SEQ ID NO: 395425 - DNA, 15 bp, Homo sapiens
ttcctcttttttatc

SEQ ID NO: 395426 - DNA, 15 bp, Homo sapiens
attcctcttttttat

SEQ ID NO: 395427 - DNA, 15 bp, Homo sapiens
cattcctctttttta

SEQ ID NO: 395428 - DNA, 15 bp, Homo sapiens
acattcctctttttt

SEQ ID NO: 395429 - DNA, 15 bp, Homo sapiens
aacattcctcttttt

SEQ ID NO: 395430 - DNA, 15 bp, Homo sapiens
taacattcctctttt

SEQ ID NO: 395431 - DNA, 15 bp, Homo sapiens
ttaacattcctcttt

SEQ ID NO: 395432 - DNA, 15 bp, Homo sapiens
gttaacattcctctt

SEQ ID NO: 395433 - DNA, 15 bp, Homo sapiens
tgttaacattcctct

SEQ ID NO: 395434 - DNA, 15 bp, Homo sapiens
gtgttaacattcctc

SEQ ID NO: 395435 - DNA, 15 bp, Homo sapiens
tgtgttaacattcct

SEQ ID NO: 395436 - DNA, 15 bp, Homo sapiens
atgtgttaacattcc

SEQ ID NO: 395437 - DNA, 15 bp, Homo sapiens
tatgtgttaacattc

SEQ ID NO: 395438 - DNA, 15 bp, Homo sapiens
ttatgtgttaacatt

SEQ ID NO: 395439 - DNA, 15 bp, Homo sapiens
tttatgtgttaacat

SEQ ID NO: 395440 - DNA, 15 bp, Homo sapiens
ttttatgtgttaaca

SEQ ID NO: 395441 - DNA, 15 bp, Homo sapiens
tttttatgtgttaac

SEQ ID NO: 395442 - DNA, 15 bp, Homo sapiens
ctttttatgtgttaa

SEQ ID NO: 395443 - DNA, 15 bp, Homo sapiens
gctttttatgtgtta

SEQ ID NO: 395444 - DNA, 15 bp, Homo sapiens
tgctttttatgtgtt

SEQ ID NO: 395445 - DNA, 15 bp, Homo sapiens
gtgctttttatgtgt

SEQ ID NO: 395446 - DNA, 15 bp, Homo sapiens
agtgctttttatgtg

SEQ ID NO: 395447 - DNA, 15 bp, Homo sapiens
tagtgctttttatgt

SEQ ID NO: 395448 - DNA, 15 bp, Homo sapiens
ttagtgctttttatg

SEQ ID NO: 395449 - DNA, 15 bp, Homo sapiens
tttagtgctttttat

SEQ ID NO: 395450 - DNA, 15 bp, Homo sapiens
ttttagtgcttttta

SEQ ID NO: 395451 - DNA, 15 bp, Homo sapiens
tttttagtgcttttt

SEQ ID NO: 395452 - DNA, 15 bp, Homo sapiens
atttttagtgctttt

SEQ ID NO: 395453 - DNA, 15 bp, Homo sapiens
catttttagtgcttt

SEQ ID NO: 395454 - DNA, 15 bp, Homo sapiens
acatttttagtgctt

SEQ ID NO: 395455 - DNA, 15 bp, Homo sapiens
cacatttttagtgct

SEQ ID NO: 395456 - DNA, 15 bp, Homo sapiens
tcacatttttagtgc

SEQ ID NO: 395457 - DNA, 15 bp, Homo sapiens
ttcacatttttagtg

SEQ ID NO: 395458 - DNA, 15 bp, Homo sapiens
tttcacatttttagt

SEQ ID NO: 395459 - DNA, 15 bp, Homo sapiens
atttcacatttttag

SEQ ID NO: 395460 - DNA, 15 bp, Homo sapiens
catttcacattttta

SEQ ID NO: 395461 - DNA, 15 bp, Homo sapiens
tcatttcacattttt

SEQ ID NO: 395462 - DNA, 15 bp, Homo sapiens
ttcatttcacatttt

SEQ ID NO: 395463 - DNA, 15 bp, Homo sapiens
attcatttcacattt

SEQ ID NO: 395464 - DNA, 15 bp, Homo sapiens
tattcatttcacatt

SEQ ID NO: 395465 - DNA, 15 bp, Homo sapiens
ttattcatttcacat

SEQ ID NO: 395466 - DNA, 15 bp, Homo sapiens
tttattcatttcaca

SEQ ID NO: 395467 - DNA, 15 bp, Homo sapiens
atttattcatttcac

SEQ ID NO: 395468 - DNA, 15 bp, Homo sapiens
catttattcatttca

SEQ ID NO: 395469 - DNA, 15 bp, Homo sapiens
tcatttattcatttc

SEQ ID NO: 395470 - DNA, 15 bp, Homo sapiens
ttcatttattcattt

SEQ ID NO: 395471 - DNA, 15 bp, Homo sapiens
attcatttattcatt

SEQ ID NO: 395472 - DNA, 15 bp, Homo sapiens
cattcatttattcat

SEQ ID NO: 395473 - DNA, 15 bp, Homo sapiens
tcattcatttattca

SEQ ID NO: 395474 - DNA, 15 bp, Homo sapiens
ttcattcatttattc

SEQ ID NO: 395475 - DNA, 15 bp, Homo sapiens
attcattcatttatt

SEQ ID NO: 395476 - DNA, 15 bp, Homo sapiens
tattcattcatttat

SEQ ID NO: 395477 - DNA, 15 bp, Homo sapiens
ttattcattcattta

SEQ ID NO: 395478 - DNA, 15 bp, Homo sapiens
attattcattcattt

SEQ ID NO: 395479 - DNA, 15 bp, Homo sapiens
tattattcattcatt

SEQ ID NO: 395480 - DNA, 15 bp, Homo sapiens
gtattattcattcat

SEQ ID NO: 395481 - DNA, 15 bp, Homo sapiens
agtattattcattca

SEQ ID NO: 395482 - DNA, 15 bp, Homo sapiens
cagtattattcattc

SEQ ID NO: 395483 - DNA, 15 bp, Homo sapiens
tcagtattattcatt

SEQ ID NO: 395484 - DNA, 15 bp, Homo sapiens
ctcagtattattcat

SEQ ID NO: 395485 - DNA, 15 bp, Homo sapiens
tctcagtattattca

SEQ ID NO: 395486 - DNA, 15 bp, Homo sapiens
atctcagtattattc

SEQ ID NO: 395487 - DNA, 15 bp, Homo sapiens
gatctcagtattatt

SEQ ID NO: 395488 - DNA, 15 bp, Homo sapiens
ggatctcagtattat

SEQ ID NO: 395489 - DNA, 15 bp, Homo sapiens
gggatctcagtatta

SEQ ID NO: 395490 - DNA, 15 bp, Homo sapiens
tgggatctcagtatt

SEQ ID NO: 395491 - DNA, 15 bp, Homo sapiens
ttgggatctcagtat

SEQ ID NO: 395492 - DNA, 15 bp, Homo sapiens
gttgggatctcagta

SEQ ID NO: 395493 - DNA, 15 bp, Homo sapiens
agttgggatctcagt

SEQ ID NO: 395494 - DNA, 15 bp, Homo sapiens
aagttgggatctcag

SEQ ID NO: 395495 - DNA, 15 bp, Homo sapiens
taagttgggatctca

SEQ ID NO: 395496 - DNA, 15 bp, Homo sapiens
gtaagttgggatctc

SEQ ID NO: 395497 - DNA, 15 bp, Homo sapiens
tgtaagttgggatct

SEQ ID NO: 395498 - DNA, 15 bp, Homo sapiens
gtgtaagttgggatc

SEQ ID NO: 395499 - DNA, 15 bp, Homo sapiens
tgtgtaagttgggat

SEQ ID NO: 395500 - DNA, 15 bp, Homo sapiens
ttgtgtaagttggga

SEQ ID NO: 395501 - DNA, 15 bp, Homo sapiens
gttgtgtaagttggg

SEQ ID NO: 395502 - DNA, 15 bp, Homo sapiens
tgttgtgtaagttgg

SEQ ID NO: 395503 - DNA, 15 bp, Homo sapiens
ttgttgtgtaagttg

SEQ ID NO: 395504 - DNA, 15 bp, Homo sapiens
attgttgtgtaagtt

SEQ ID NO: 395505 - DNA, 15 bp, Homo sapiens
tattgttgtgtaagt

SEQ ID NO: 395506 - DNA, 15 bp, Homo sapiens
gtattgttgtgtaag

SEQ ID NO: 395507 - DNA, 15 bp, Homo sapiens
agtattgttgtgtaa

SEQ ID NO: 395508 - DNA, 15 bp, Homo sapiens
tagtattgttgtgta

SEQ ID NO: 395509 - DNA, 15 bp, Homo sapiens
ttagtattgttgtgt

SEQ ID NO: 395510 - DNA, 15 bp, Homo sapiens
tttagtattgttgtg

SEQ ID NO: 395511 - DNA, 15 bp, Homo sapiens
ctttagtattgttgt

SEQ ID NO: 395512 - DNA, 15 bp, Homo sapiens
actttagtattgttg

SEQ ID NO: 395513 - DNA, 15 bp, Homo sapiens
aactttagtattgtt

SEQ ID NO: 395514 - DNA, 15 bp, Homo sapiens
aaactttagtattgt

SEQ ID NO: 395515 - DNA, 15 bp, Homo sapiens
gaaactttagtattg

SEQ ID NO: 395516 - DNA, 15 bp, Homo sapiens
tgaaactttagtatt

SEQ ID NO: 395517 - DNA, 15 bp, Homo sapiens
atgaaactttagtat

SEQ ID NO: 395518 - DNA, 15 bp, Homo sapiens
tatgaaactttagta

SEQ ID NO: 395519 - DNA, 15 bp, Homo sapiens
atatgaaactttagt

SEQ ID NO: 395520 - DNA, 15 bp, Homo sapiens
catatgaaactttag

SEQ ID NO: 395521 - DNA, 15 bp, Homo sapiens
tcatatgaaacttta

SEQ ID NO: 395522 - DNA, 15 bp, Homo sapiens
ctcatatgaaacttt

SEQ ID NO: 395523 - DNA, 15 bp, Homo sapiens
actcatatgaaactt

SEQ ID NO: 395524 - DNA, 15 bp, Homo sapiens
tactcatatgaaact

SEQ ID NO: 395525 - DNA, 15 bp, Homo sapiens
atactcatatgaaac

SEQ ID NO: 395526 - DNA, 15 bp, Homo sapiens
gatactcatatgaaa

SEQ ID NO: 395527 - DNA, 15 bp, Homo sapiens
tgatactcatatgaa

SEQ ID NO: 395528 - DNA, 15 bp, Homo sapiens
atgatactcatatga

SEQ ID NO: 395529 - DNA, 15 bp, Homo sapiens
aatgatactcatatg

SEQ ID NO: 395530 - DNA, 15 bp, Homo sapiens
taatgatactcatat

SEQ ID NO: 395531 - DNA, 15 bp, Homo sapiens
ctaatgatactcata

SEQ ID NO: 395532 - DNA, 15 bp, Homo sapiens
tctaatgatactcat

SEQ ID NO: 395533 - DNA, 15 bp, Homo sapiens
ctctaatgatactca

SEQ ID NO: 395534 - DNA, 15 bp, Homo sapiens
tctctaatgatactc

SEQ ID NO: 395535 - DNA, 15 bp, Homo sapiens
ctctctaatgatact

SEQ ID NO: 395536 - DNA, 15 bp, Homo sapiens
tctctctaatgatac

SEQ ID NO: 395537 - DNA, 15 bp, Homo sapiens
atctctctaatgata

SEQ ID NO: 395538 - DNA, 15 bp, Homo sapiens
aatctctctaatgat

SEQ ID NO: 395539 - DNA, 15 bp, Homo sapiens
aaatctctctaatga

SEQ ID NO: 395540 - DNA, 15 bp, Homo sapiens
gaaatctctctaatg

SEQ ID NO: 395541 - DNA, 15 bp, Homo sapiens
tgaaatctctctaat

SEQ ID NO: 395542 - DNA, 15 bp, Homo sapiens
atgaaatctctctaa

SEQ ID NO: 395543 - DNA, 15 bp, Homo sapiens
aatgaaatctctcta

SEQ ID NO: 395544 - DNA, 15 bp, Homo sapiens
gaatgaaatctctct

SEQ ID NO: 395545 - DNA, 15 bp, Homo sapiens
agaatgaaatctctc

SEQ ID NO: 395546 - DNA, 15 bp, Homo sapiens
aagaatgaaatctct

SEQ ID NO: 395547 - DNA, 15 bp, Homo sapiens
gaagaatgaaatctc

SEQ ID NO: 395548 - DNA, 15 bp, Homo sapiens
tgaagaatgaaatct

SEQ ID NO: 395549 - DNA, 15 bp, Homo sapiens
gtgaagaatgaaatc

SEQ ID NO: 395550 - DNA, 15 bp, Homo sapiens
ggtgaagaatgaaat

SEQ ID NO: 395551 - DNA, 15 bp, Homo sapiens
tggtgaagaatgaaa

SEQ ID NO: 395552 - DNA, 15 bp, Homo sapiens
atggtgaagaatgaa

SEQ ID NO: 395553 - DNA, 15 bp, Homo sapiens
tatggtgaagaatga

SEQ ID NO: 395554 - DNA, 15 bp, Homo sapiens
atatggtgaagaatg

SEQ ID NO: 395555 - DNA, 15 bp, Homo sapiens
aatatggtgaagaat

SEQ ID NO: 395556 - DNA, 15 bp, Homo sapiens
gaatatggtgaagaa

SEQ ID NO: 395557 - DNA, 15 bp, Homo sapiens
agaatatggtgaaga

SEQ ID NO: 395558 - DNA, 15 bp, Homo sapiens
gagaatatggtgaag

SEQ ID NO: 395559 - DNA, 15 bp, Homo sapiens
agagaatatggtgaa

SEQ ID NO: 395560 - DNA, 15 bp, Homo sapiens
aagagaatatggtga

SEQ ID NO: 395561 - DNA, 15 bp, Homo sapiens
taagagaatatggtg

SEQ ID NO: 395562 - DNA, 15 bp, Homo sapiens
ataagagaatatggt

SEQ ID NO: 395563 - DNA, 15 bp, Homo sapiens
cataagagaatatgg

SEQ ID NO: 395564 - DNA, 15 bp, Homo sapiens
tcataagagaatatg

SEQ ID NO: 395565 - DNA, 15 bp, Homo sapiens
ttcataagagaatat

SEQ ID NO: 395566 - DNA, 15 bp, Homo sapiens
tttcataagagaata

SEQ ID NO: 395567 - DNA, 15 bp, Homo sapiens
ttttcataagagaat

SEQ ID NO: 395568 - DNA, 15 bp, Homo sapiens
tttttcataagagaa

SEQ ID NO: 395569 - DNA, 15 bp, Homo sapiens
atttttcataagaga

SEQ ID NO: 395570 - DNA, 15 bp, Homo sapiens
gatttttcataagag

SEQ ID NO: 395571 - DNA, 15 bp, Homo sapiens
agatttttcataaga

SEQ ID NO: 395572 - DNA, 15 bp, Homo sapiens
cagatttttcataag

SEQ ID NO: 395573 - DNA, 15 bp, Homo sapiens
acagatttttcataa

SEQ ID NO: 395574 - DNA, 15 bp, Homo sapiens
aacagatttttcata

SEQ ID NO: 395575 - DNA, 15 bp, Homo sapiens
aaacagatttttcat

SEQ ID NO: 395576 - DNA, 15 bp, Homo sapiens
caaacagatttttca

SEQ ID NO: 395577 - DNA, 15 bp, Homo sapiens
gcaaacagatttttc

SEQ ID NO: 395578 - DNA, 15 bp, Homo sapiens
tgcaaacagattttt

SEQ ID NO: 395579 - DNA, 15 bp, Homo sapiens
ttgcaaacagatttt

SEQ ID NO: 395580 - DNA, 15 bp, Homo sapiens
attgcaaacagattt

SEQ ID NO: 395581 - DNA, 15 bp, Homo sapiens
aattgcaaacagatt

SEQ ID NO: 395582 - DNA, 15 bp, Homo sapiens
gaattgcaaacagat

SEQ ID NO: 395583 - DNA, 15 bp, Homo sapiens
agaattgcaaacaga

SEQ ID NO: 395584 - DNA, 15 bp, Homo sapiens
aagaattgcaaacag

SEQ ID NO: 395585 - DNA, 15 bp, Homo sapiens
gaagaattgcaaaca

SEQ ID NO: 395586 - DNA, 15 bp, Homo sapiens
agaagaattgcaaac

SEQ ID NO: 395587 - DNA, 15 bp, Homo sapiens
aagaagaattgcaaa

SEQ ID NO: 395588 - DNA, 15 bp, Homo sapiens
aaagaagaattgcaa

SEQ ID NO: 395589 - DNA, 15 bp, Homo sapiens
gaaagaagaattgca

SEQ ID NO: 395590 - DNA, 15 bp, Homo sapiens
ggaaagaagaattgc

SEQ ID NO: 395591 - DNA, 15 bp, Homo sapiens
tggaaagaagaattg

SEQ ID NO: 395592 - DNA, 15 bp, Homo sapiens
ttggaaagaagaatt

SEQ ID NO: 395593 - DNA, 15 bp, Homo sapiens
attggaaagaagaat

SEQ ID NO: 395594 - DNA, 15 bp, Homo sapiens
cattggaaagaagaa

SEQ ID NO: 395595 - DNA, 15 bp, Homo sapiens
tcattggaaagaaga

SEQ ID NO: 395596 - DNA, 15 bp, Homo sapiens
gtcattggaaagaag

SEQ ID NO: 395597 - DNA, 15 bp, Homo sapiens
tgtcattggaaagaa

SEQ ID NO: 395598 - DNA, 15 bp, Homo sapiens
gtgtcattggaaaga

SEQ ID NO: 395599 - DNA, 15 bp, Homo sapiens
tgtgtcattggaaag

SEQ ID NO: 395600 - DNA, 15 bp, Homo sapiens
gtgtgtcattggaaa

SEQ ID NO: 395601 - DNA, 15 bp, Homo sapiens
agtgtgtcattggaa

SEQ ID NO: 395602 - DNA, 15 bp, Homo sapiens
tagtgtgtcattgga

SEQ ID NO: 395603 - DNA, 15 bp, Homo sapiens
gtagtgtgtcattgg

SEQ ID NO: 395604 - DNA, 15 bp, Homo sapiens
agtagtgtgtcattg

SEQ ID NO: 395605 - DNA, 15 bp, Homo sapiens
tagtagtgtgtcatt

SEQ ID NO: 395606 - DNA, 15 bp, Homo sapiens
ttagtagtgtgtcat

SEQ ID NO: 395607 - DNA, 15 bp, Homo sapiens
attagtagtgtgtca

SEQ ID NO: 395608 - DNA, 15 bp, Homo sapiens
cattagtagtgtgtc

SEQ ID NO: 395609 - DNA, 15 bp, Homo sapiens
tcattagtagtgtgt

SEQ ID NO: 395610 - DNA, 15 bp, Homo sapiens
ttcattagtagtgtg

SEQ ID NO: 395611 - DNA, 15 bp, Homo sapiens
tttcattagtagtgt

SEQ ID NO: 395612 - DNA, 15 bp, Homo sapiens
atttcattagtagtg

SEQ ID NO: 395613 - DNA, 15 bp, Homo sapiens
aatttcattagtagt

SEQ ID NO: 395614 - DNA, 15 bp, Homo sapiens
taatttcattagtag

SEQ ID NO: 395615 - DNA, 15 bp, Homo sapiens
ataatttcattagta

SEQ ID NO: 395616 - DNA, 15 bp, Homo sapiens
aataatttcattagt

SEQ ID NO: 395617 - DNA, 15 bp, Homo sapiens
aaataatttcattag

SEQ ID NO: 395618 - DNA, 15 bp, Homo sapiens
taaataatttcatta

SEQ ID NO: 395619 - DNA, 15 bp, Homo sapiens
ataaataatttcatt

SEQ ID NO: 395620 - DNA, 15 bp, Homo sapiens
cataaataatttcat

SEQ ID NO: 395621 - DNA, 15 bp, Homo sapiens
tcataaataatttca

SEQ ID NO: 395622 - DNA, 15 bp, Homo sapiens
ctcataaataatttc

SEQ ID NO: 395623 - DNA, 15 bp, Homo sapiens
cctcataaataattt

SEQ ID NO: 395624 - DNA, 15 bp, Homo sapiens
gcctcataaataatt

SEQ ID NO: 395625 - DNA, 15 bp, Homo sapiens
agcctcataaataat

SEQ ID NO: 395626 - DNA, 15 bp, Homo sapiens
tagcctcataaataa

SEQ ID NO: 395627 - DNA, 15 bp, Homo sapiens
ttagcctcataaata

SEQ ID NO: 395628 - DNA, 15 bp, Homo sapiens
attagcctcataaat

SEQ ID NO: 395629 - DNA, 15 bp, Homo sapiens
tattagcctcataaa

SEQ ID NO: 395630 - DNA, 15 bp, Homo sapiens
atattagcctcataa

SEQ ID NO: 395631 - DNA, 15 bp, Homo sapiens
tatattagcctcata

SEQ ID NO: 395632 - DNA, 15 bp, Homo sapiens
ctatattagcctcat

SEQ ID NO: 395633 - DNA, 15 bp, Homo sapiens
tctatattagcctca

SEQ ID NO: 395634 - DNA, 15 bp, Homo sapiens
gtctatattagcctc

SEQ ID NO: 395635 - DNA, 15 bp, Homo sapiens
tgtctatattagcct

SEQ ID NO: 395636 - DNA, 15 bp, Homo sapiens
atgtctatattagcc

SEQ ID NO: 395637 - DNA, 15 bp, Homo sapiens
catgtctatattagc

SEQ ID NO: 395638 - DNA, 15 bp, Homo sapiens
ccatgtctatattag

SEQ ID NO: 395639 - DNA, 15 bp, Homo sapiens
cccatgtctatatta

SEQ ID NO: 395640 - DNA, 15 bp, Homo sapiens
gcccatgtctatatt

SEQ ID NO: 395641 - DNA, 15 bp, Homo sapiens
tgcccatgtctatat

SEQ ID NO: 395642 - DNA, 15 bp, Homo sapiens
atgcccatgtctata

SEQ ID NO: 395643 - DNA, 15 bp, Homo sapiens
tatgcccatgtctat

SEQ ID NO: 395644 - DNA, 15 bp, Homo sapiens
gtatgcccatgtcta

SEQ ID NO: 395645 - DNA, 15 bp, Homo sapiens
tgtatgcccatgtct

SEQ ID NO: 395646 - DNA, 15 bp, Homo sapiens
ttgtatgcccatgtc

SEQ ID NO: 395647 - DNA, 15 bp, Homo sapiens
attgtatgcccatgt

SEQ ID NO: 395648 - DNA, 15 bp, Homo sapiens
aattgtatgcccatg

SEQ ID NO: 395649 - DNA, 15 bp, Homo sapiens
taattgtatgcccat

SEQ ID NO: 395650 - DNA, 15 bp, Homo sapiens
ataattgtatgccca

SEQ ID NO: 395651 - DNA, 15 bp, Homo sapiens
gataattgtatgccc

SEQ ID NO: 395652 - DNA, 15 bp, Homo sapiens
agataattgtatgcc

SEQ ID NO: 395653 - DNA, 15 bp, Homo sapiens
cagataattgtatgc

SEQ ID NO: 395654 - DNA, 15 bp, Homo sapiens
acagataattgtatg

SEQ ID NO: 395655 - DNA, 15 bp, Homo sapiens
aacagataattgtat

SEQ ID NO: 395656 - DNA, 15 bp, Homo sapiens
aaacagataattgta

SEQ ID NO: 395657 - DNA, 15 bp, Homo sapiens
caaacagataattgt

SEQ ID NO: 395658 - DNA, 15 bp, Homo sapiens
tcaaacagataattg

SEQ ID NO: 395659 - DNA, 15 bp, Homo sapiens
ttcaaacagataatt

SEQ ID NO: 395660 - DNA, 15 bp, Homo sapiens
attcaaacagataat

SEQ ID NO: 395661 - DNA, 15 bp, Homo sapiens
tattcaaacagataa

SEQ ID NO: 395662 - DNA, 15 bp, Homo sapiens
atattcaaacagata

SEQ ID NO: 395663 - DNA, 15 bp, Homo sapiens
aatattcaaacagat

SEQ ID NO: 395664 - DNA, 15 bp, Homo sapiens
caatattcaaacaga

SEQ ID NO: 395665 - DNA, 15 bp, Homo sapiens
tcaatattcaaacag

SEQ ID NO: 395666 - DNA, 15 bp, Homo sapiens
ttcaatattcaaaca

SEQ ID NO: 395667 - DNA, 15 bp, Homo sapiens
attcaatattcaaac

SEQ ID NO: 395668 - DNA, 15 bp, Homo sapiens
aattcaatattcaaa

SEQ ID NO: 395669 - DNA, 15 bp, Homo sapiens
taattcaatattcaa

SEQ ID NO: 395670 - DNA, 15 bp, Homo sapiens
gtaattcaatattca

SEQ ID NO: 395671 - DNA, 15 bp, Homo sapiens
agtaattcaatattc

SEQ ID NO: 395672 - DNA, 15 bp, Homo sapiens
tagtaattcaatatt

SEQ ID NO: 395673 - DNA, 15 bp, Homo sapiens
ttagtaattcaatat

SEQ ID NO: 395674 - DNA, 15 bp, Homo sapiens
gttagtaattcaata

SEQ ID NO: 395675 - DNA, 15 bp, Homo sapiens
cgttagtaattcaat

SEQ ID NO: 395676 - DNA, 15 bp, Homo sapiens
acgttagtaattcaa

SEQ ID NO: 395677 - DNA, 15 bp, Homo sapiens
gacgttagtaattca

SEQ ID NO: 395678 - DNA, 15 bp, Homo sapiens
agacgttagtaattc

SEQ ID NO: 395679 - DNA, 15 bp, Homo sapiens
aagacgttagtaatt

SEQ ID NO: 395680 - DNA, 15 bp, Homo sapiens
taagacgttagtaat

SEQ ID NO: 395681 - DNA, 15 bp, Homo sapiens
ataagacgttagtaa

SEQ ID NO: 395682 - DNA, 15 bp, Homo sapiens
aataagacgttagta

SEQ ID NO: 395683 - DNA, 15 bp, Homo sapiens
taataagacgttagt

SEQ ID NO: 395684 - DNA, 15 bp, Homo sapiens
ataataagacgttag

SEQ ID NO: 395685 - DNA, 15 bp, Homo sapiens
aataataagacgtta

SEQ ID NO: 395686 - DNA, 15 bp, Homo sapiens
gaataataagacgtt

SEQ ID NO: 395687 - DNA, 15 bp, Homo sapiens
ggaataataagacgt

SEQ ID NO: 395688 - DNA, 15 bp, Homo sapiens
cggaataataagacg

SEQ ID NO: 395689 - DNA, 15 bp, Homo sapiens
acggaataataagac

SEQ ID NO: 395690 - DNA, 15 bp, Homo sapiens
cacggaataataaga

SEQ ID NO: 395691 - DNA, 15 bp, Homo sapiens
gcacggaataataag

SEQ ID NO: 395692 - DNA, 15 bp, Homo sapiens
ggcacggaataataa

SEQ ID NO: 395693 - DNA, 15 bp, Homo sapiens
aggcacggaataata

SEQ ID NO: 395694 - DNA, 15 bp, Homo sapiens
aaggcacggaataat

SEQ ID NO: 395695 - DNA, 15 bp, Homo sapiens
taaggcacggaataa

SEQ ID NO: 395696 - DNA, 15 bp, Homo sapiens
ctaaggcacggaata

SEQ ID NO: 395697 - DNA, 15 bp, Homo sapiens
actaaggcacggaat

SEQ ID NO: 395698 - DNA, 15 bp, Homo sapiens
cactaaggcacggaa

SEQ ID NO: 395699 - DNA, 15 bp, Homo sapiens
ccactaaggcacgga

SEQ ID NO: 395700 - DNA, 15 bp, Homo sapiens
gccactaaggcacgg

SEQ ID NO: 395701 - DNA, 15 bp, Homo sapiens
tgccactaaggcacg

SEQ ID NO: 395702 - DNA, 15 bp, Homo sapiens
atgccactaaggcac

SEQ ID NO: 395703 - DNA, 15 bp, Homo sapiens
tatgccactaaggca

SEQ ID NO: 395704 - DNA, 15 bp, Homo sapiens
atatgccactaaggc

SEQ ID NO: 395705 - DNA, 15 bp, Homo sapiens
tatatgccactaagg

SEQ ID NO: 395706 - DNA, 15 bp, Homo sapiens
gtatatgccactaag

SEQ ID NO: 395707 - DNA, 15 bp, Homo sapiens
tgtatatgccactaa

SEQ ID NO: 395708 - DNA, 15 bp, Homo sapiens
ctgtatatgccacta

SEQ ID NO: 395709 - DNA, 15 bp, Homo sapiens
actgtatatgccact

SEQ ID NO: 395710 - DNA, 15 bp, Homo sapiens
tactgtatatgccac

SEQ ID NO: 395711 - DNA, 15 bp, Homo sapiens
atactgtatatgcca

SEQ ID NO: 395712 - DNA, 15 bp, Homo sapiens
aatactgtatatgcc

SEQ ID NO: 395713 - DNA, 15 bp, Homo sapiens
aaatactgtatatgc

SEQ ID NO: 395714 - DNA, 15 bp, Homo sapiens
caaatactgtatatg

SEQ ID NO: 395715 - DNA, 15 bp, Homo sapiens
gcaaatactgtatat

SEQ ID NO: 395716 - DNA, 15 bp, Homo sapiens
tgcaaatactgtata

SEQ ID NO: 395717 - DNA, 15 bp, Homo sapiens
ttgcaaatactgtat

SEQ ID NO: 395718 - DNA, 15 bp, Homo sapiens
tttgcaaatactgta

SEQ ID NO: 395719 - DNA, 15 bp, Homo sapiens
ttttgcaaatactgt

SEQ ID NO: 395720 - DNA, 15 bp, Homo sapiens
tttttgcaaatactg

SEQ ID NO: 395721 - DNA, 15 bp, Homo sapiens
ttttttgcaaatact

SEQ ID NO: 395722 - DNA, 15 bp, Homo sapiens
tttttttgcaaatac

SEQ ID NO: 395723 - DNA, 15 bp, Homo sapiens
ttttttttgcaaata

SEQ ID NO: 395724 - DNA, 15 bp, Homo sapiens
tttttttttgcaaat

SEQ ID NO: 395725 - DNA, 15 bp, Homo sapiens
ttttttttttgcaaa

SEQ ID NO: 395726 - DNA, 15 bp, Homo sapiens
tttttttttttgcaa

SEQ ID NO: 395727 - DNA, 15 bp, Homo sapiens
ttttttttttttgca

SEQ ID NO: 395728 - DNA, 15 bp, Homo sapiens
tttttttttttttgc

SEQ ID NO: 395729 - DNA, 15 bp, Homo sapiens
gattttttttttttt

SEQ ID NO: 395730 - DNA, 15 bp, Homo sapiens
tgatttttttttttt

SEQ ID NO: 395731 - DNA, 15 bp, Homo sapiens
ttgattttttttttt

SEQ ID NO: 395732 - DNA, 15 bp, Homo sapiens
attgatttttttttt

SEQ ID NO: 395733 - DNA, 15 bp, Homo sapiens
tattgattttttttt

SEQ ID NO: 395734 - DNA, 15 bp, Homo sapiens
gtattgatttttttt

SEQ ID NO: 395735 - DNA, 15 bp, Homo sapiens
tgtattgattttttt

SEQ ID NO: 395736 - DNA, 15 bp, Homo sapiens
atgtattgatttttt

SEQ ID NO: 395737 - DNA, 15 bp, Homo sapiens
gatgtattgattttt

SEQ ID NO: 395738 - DNA, 15 bp, Homo sapiens
tgatgtattgatttt

SEQ ID NO: 395739 - DNA, 15 bp, Homo sapiens
ttgatgtattgattt

SEQ ID NO: 395740 - DNA, 15 bp, Homo sapiens
attgatgtattgatt

SEQ ID NO: 395741 - DNA, 15 bp, Homo sapiens
tattgatgtattgat

SEQ ID NO: 395742 - DNA, 15 bp, Homo sapiens
gtattgatgtattga

SEQ ID NO: 395743 - DNA, 15 bp, Homo sapiens
cgtattgatgtattg

SEQ ID NO: 395744 - DNA, 15 bp, Homo sapiens
tcgtattgatgtatt

SEQ ID NO: 395745 - DNA, 15 bp, Homo sapiens
atcgtattgatgtat

SEQ ID NO: 395746 - DNA, 15 bp, Homo sapiens
catcgtattgatgta

SEQ ID NO: 395747 - DNA, 15 bp, Homo sapiens
tcatcgtattgatgt

SEQ ID NO: 395748 - DNA, 15 bp, Homo sapiens
ctcatcgtattgatg

SEQ ID NO: 395749 - DNA, 15 bp, Homo sapiens
cctcatcgtattgat

SEQ ID NO: 395750 - DNA, 15 bp, Homo sapiens
gcctcatcgtattga

SEQ ID NO: 395751 - DNA, 15 bp, Homo sapiens
agcctcatcgtattg

SEQ ID NO: 395752 - DNA, 15 bp, Homo sapiens
cagcctcatcgtatt

SEQ ID NO: 395753 - DNA, 15 bp, Homo sapiens
acagcctcatcgtat

SEQ ID NO: 395754 - DNA, 15 bp, Homo sapiens
gacagcctcatcgta

SEQ ID NO: 395755 - DNA, 15 bp, Homo sapiens
tgacagcctcatcgt

SEQ ID NO: 395756 - DNA, 15 bp, Homo sapiens
ttgacagcctcatcg

SEQ ID NO: 395757 - DNA, 15 bp, Homo sapiens
gttgacagcctcatc

SEQ ID NO: 395758 - DNA, 15 bp, Homo sapiens
agttgacagcctcat

SEQ ID NO: 395759 - DNA, 15 bp, Homo sapiens
cagttgacagcctca

SEQ ID NO: 395760 - DNA, 15 bp, Homo sapiens
acagttgacagcctc

SEQ ID NO: 395761 - DNA, 15 bp, Homo sapiens
aacagttgacagcct

SEQ ID NO: 395762 - DNA, 15 bp, Homo sapiens
taacagttgacagcc

SEQ ID NO: 395763 - DNA, 15 bp, Homo sapiens
ctaacagttgacagc

SEQ ID NO: 395764 - DNA, 15 bp, Homo sapiens
tctaacagttgacag

SEQ ID NO: 395765 - DNA, 15 bp, Homo sapiens
atctaacagttgaca

SEQ ID NO: 395766 - DNA, 15 bp, Homo sapiens
catctaacagttgac

SEQ ID NO: 395767 - DNA, 15 bp, Homo sapiens
ccatctaacagttga

SEQ ID NO: 395768 - DNA, 15 bp, Homo sapiens
gccatctaacagttg

SEQ ID NO: 395769 - DNA, 15 bp, Homo sapiens
agccatctaacagtt

SEQ ID NO: 395770 - DNA, 15 bp, Homo sapiens
tagccatctaacagt

SEQ ID NO: 395771 - DNA, 15 bp, Homo sapiens
atagccatctaacag

SEQ ID NO: 395772 - DNA, 15 bp, Homo sapiens
gatagccatctaaca

SEQ ID NO: 395773 - DNA, 15 bp, Homo sapiens
tgatagccatctaac

SEQ ID NO: 395774 - DNA, 15 bp, Homo sapiens
gtgatagccatctaa

SEQ ID NO: 395775 - DNA, 15 bp, Homo sapiens
agtgatagccatcta

SEQ ID NO: 395776 - DNA, 15 bp, Homo sapiens
cagtgatagccatct

SEQ ID NO: 395777 - DNA, 15 bp, Homo sapiens
gcagtgatagccatc

SEQ ID NO: 395778 - DNA, 15 bp, Homo sapiens
agcagtgatagccat

SEQ ID NO: 395779 - DNA, 15 bp, Homo sapiens
tagcagtgatagcca

SEQ ID NO: 395780 - DNA, 15 bp, Homo sapiens
ttagcagtgatagcc

SEQ ID NO: 395781 - DNA, 15 bp, Homo sapiens
tttagcagtgatagc

SEQ ID NO: 395782 - DNA, 15 bp, Homo sapiens
ttttagcagtgatag

SEQ ID NO: 395783 - DNA, 15 bp, Homo sapiens
cttttagcagtgata

SEQ ID NO: 395784 - DNA, 15 bp, Homo sapiens
tcttttagcagtgat

SEQ ID NO: 395785 - DNA, 15 bp, Homo sapiens
ctcttttagcagtga

SEQ ID NO: 395786 - DNA, 15 bp, Homo sapiens
cctcttttagcagtg

SEQ ID NO: 395787 - DNA, 15 bp, Homo sapiens
acctcttttagcagt

SEQ ID NO: 395788 - DNA, 15 bp, Homo sapiens
tacctcttttagcag

SEQ ID NO: 395789 - DNA, 15 bp, Homo sapiens
atacctcttttagca

SEQ ID NO: 395790 - DNA, 15 bp, Homo sapiens
aatacctcttttagc

SEQ ID NO: 395791 - DNA, 15 bp, Homo sapiens
aaatacctcttttag

SEQ ID NO: 395792 - DNA, 15 bp, Homo sapiens
gaaatacctctttta

SEQ ID NO: 395793 - DNA, 15 bp, Homo sapiens
tgaaatacctctttt

SEQ ID NO: 395794 - DNA, 15 bp, Homo sapiens
ctgaaatacctcttt

SEQ ID NO: 395795 - DNA, 15 bp, Homo sapiens
gctgaaatacctctt

SEQ ID NO: 395796 - DNA, 15 bp, Homo sapiens
tgctgaaatacctct

SEQ ID NO: 395797 - DNA, 15 bp, Homo sapiens
atgctgaaatacctc

SEQ ID NO: 395798 - DNA, 15 bp, Homo sapiens
tatgctgaaatacct

SEQ ID NO: 395799 - DNA, 15 bp, Homo sapiens
atatgctgaaatacc

SEQ ID NO: 395800 - DNA, 15 bp, Homo sapiens
aatatgctgaaatac

SEQ ID NO: 395801 - DNA, 15 bp, Homo sapiens
taatatgctgaaata

SEQ ID NO: 395802 - DNA, 15 bp, Homo sapiens
ttaatatgctgaaat

SEQ ID NO: 395803 - DNA, 15 bp, Homo sapiens
tttaatatgctgaaa

SEQ ID NO: 395804 - DNA, 15 bp, Homo sapiens
ttttaatatgctgaa

SEQ ID NO: 395805 - DNA, 15 bp, Homo sapiens
tttttaatatgctga

SEQ ID NO: 395806 - DNA, 15 bp, Homo sapiens
atttttaatatgctg

SEQ ID NO: 395807 - DNA, 15 bp, Homo sapiens
aatttttaatatgct

SEQ ID NO: 395808 - DNA, 15 bp, Homo sapiens
aaatttttaatatgc

SEQ ID NO: 395809 - DNA, 15 bp, Homo sapiens
caaatttttaatatg

SEQ ID NO: 395810 - DNA, 15 bp, Homo sapiens
acaaatttttaatat

SEQ ID NO: 395811 - DNA, 15 bp, Homo sapiens
gacaaatttttaata

SEQ ID NO: 395812 - DNA, 15 bp, Homo sapiens
tgacaaatttttaat

SEQ ID NO: 395813 - DNA, 15 bp, Homo sapiens
gtgacaaatttttaa

SEQ ID NO: 395814 - DNA, 15 bp, Homo sapiens
tgtgacaaattttta

SEQ ID NO: 395815 - DNA, 15 bp, Homo sapiens
atgtgacaaattttt

SEQ ID NO: 395816 - DNA, 15 bp, Homo sapiens
gatgtgacaaatttt

SEQ ID NO: 395817 - DNA, 15 bp, Homo sapiens
ggatgtgacaaattt

SEQ ID NO: 395818 - DNA, 15 bp, Homo sapiens
aggatgtgacaaatt

SEQ ID NO: 395819 - DNA, 15 bp, Homo sapiens
gaggatgtgacaaat

SEQ ID NO: 395820 - DNA, 15 bp, Homo sapiens
tgaggatgtgacaaa

SEQ ID NO: 395821 - DNA, 15 bp, Homo sapiens
gtgaggatgtgacaa

SEQ ID NO: 395822 - DNA, 15 bp, Homo sapiens
tgtgaggatgtgaca

SEQ ID NO: 395823 - DNA, 15 bp, Homo sapiens
atgtgaggatgtgac

SEQ ID NO: 395824 - DNA, 15 bp, Homo sapiens
catgtgaggatgtga

SEQ ID NO: 395825 - DNA, 15 bp, Homo sapiens
tcatgtgaggatgtg

SEQ ID NO: 395826 - DNA, 15 bp, Homo sapiens
atcatgtgaggatgt

SEQ ID NO: 395827 - DNA, 15 bp, Homo sapiens
catcatgtgaggatg

SEQ ID NO: 395828 - DNA, 15 bp, Homo sapiens
ccatcatgtgaggat

SEQ ID NO: 395829 - DNA, 15 bp, Homo sapiens
gccatcatgtgagga

SEQ ID NO: 395830 - DNA, 15 bp, Homo sapiens
agccatcatgtgagg

SEQ ID NO: 395831 - DNA, 15 bp, Homo sapiens
tagccatcatgtgag

SEQ ID NO: 395832 - DNA, 15 bp, Homo sapiens
ttagccatcatgtga

SEQ ID NO: 395833 - DNA, 15 bp, Homo sapiens
gttagccatcatgtg

SEQ ID NO: 395834 - DNA, 15 bp, Homo sapiens
tgttagccatcatgt

SEQ ID NO: 395835 - DNA, 15 bp, Homo sapiens
ctgttagccatcatg

SEQ ID NO: 395836 - DNA, 15 bp, Homo sapiens
actgttagccatcat

SEQ ID NO: 395837 - DNA, 15 bp, Homo sapiens
aactgttagccatca

SEQ ID NO: 395838 - DNA, 15 bp, Homo sapiens
aaactgttagccatc

SEQ ID NO: 395839 - DNA, 15 bp, Homo sapiens
gaaactgttagccat

SEQ ID NO: 395840 - DNA, 15 bp, Homo sapiens
ggaaactgttagcca

SEQ ID NO: 395841 - DNA, 15 bp, Homo sapiens
tggaaactgttagcc

SEQ ID NO: 395842 - DNA, 15 bp, Homo sapiens
ctggaaactgttagc

SEQ ID NO: 395843 - DNA, 15 bp, Homo sapiens
actggaaactgttag

SEQ ID NO: 395844 - DNA, 15 bp, Homo sapiens
cactggaaactgtta

SEQ ID NO: 395845 - DNA, 15 bp, Homo sapiens
acactggaaactgtt

SEQ ID NO: 395846 - DNA, 15 bp, Homo sapiens
cacactggaaactgt

SEQ ID NO: 395847 - DNA, 15 bp, Homo sapiens
gcacactggaaactg

SEQ ID NO: 395848 - DNA, 15 bp, Homo sapiens
agcacactggaaact

SEQ ID NO: 395849 - DNA, 15 bp, Homo sapiens
aagcacactggaaac

SEQ ID NO: 395850 - DNA, 15 bp, Homo sapiens
aaagcacactggaaa

SEQ ID NO: 395851 - DNA, 15 bp, Homo sapiens
taaagcacactggaa

SEQ ID NO: 395852 - DNA, 15 bp, Homo sapiens
ataaagcacactgga

SEQ ID NO: 395853 - DNA, 15 bp, Homo sapiens
gataaagcacactgg

SEQ ID NO: 395854 - DNA, 15 bp, Homo sapiens
tgataaagcacactg

SEQ ID NO: 395855 - DNA, 15 bp, Homo sapiens
atgataaagcacact

SEQ ID NO: 395856 - DNA, 15 bp, Homo sapiens
gatgataaagcacac

SEQ ID NO: 395857 - DNA, 15 bp, Homo sapiens
ggatgataaagcaca

SEQ ID NO: 395858 - DNA, 15 bp, Homo sapiens
tggatgataaagcac

SEQ ID NO: 395859 - DNA, 15 bp, Homo sapiens
atggatgataaagca

SEQ ID NO: 395860 - DNA, 15 bp, Homo sapiens
aatggatgataaagc

SEQ ID NO: 395861 - DNA, 15 bp, Homo sapiens
taatggatgataaag

SEQ ID NO: 395862 - DNA, 15 bp, Homo sapiens
ataatggatgataaa

SEQ ID NO: 395863 - DNA, 15 bp, Homo sapiens
gataatggatgataa

SEQ ID NO: 395864 - DNA, 15 bp, Homo sapiens
agataatggatgata

SEQ ID NO: 395865 - DNA, 15 bp, Homo sapiens
gagataatggatgat

SEQ ID NO: 395866 - DNA, 15 bp, Homo sapiens
agagataatggatga

SEQ ID NO: 395867 - DNA, 15 bp, Homo sapiens
cagagataatggatg

SEQ ID NO: 395868 - DNA, 15 bp, Homo sapiens
acagagataatggat

SEQ ID NO: 395869 - DNA, 15 bp, Homo sapiens
aacagagataatgga

SEQ ID NO: 395870 - DNA, 15 bp, Homo sapiens
aaacagagataatgg

SEQ ID NO: 395871 - DNA, 15 bp, Homo sapiens
caaacagagataatg

SEQ ID NO: 395872 - DNA, 15 bp, Homo sapiens
tcaaacagagataat

SEQ ID NO: 395873 - DNA, 15 bp, Homo sapiens
gtcaaacagagataa

SEQ ID NO: 395874 - DNA, 15 bp, Homo sapiens
agtcaaacagagata

SEQ ID NO: 395875 - DNA, 15 bp, Homo sapiens
aagtcaaacagagat

SEQ ID NO: 395876 - DNA, 15 bp, Homo sapiens
aaagtcaaacagaga

SEQ ID NO: 395877 - DNA, 15 bp, Homo sapiens
caaagtcaaacagag

SEQ ID NO: 395878 - DNA, 15 bp, Homo sapiens
tcaaagtcaaacaga

SEQ ID NO: 395879 - DNA, 15 bp, Homo sapiens
ttcaaagtcaaacag

SEQ ID NO: 395880 - DNA, 15 bp, Homo sapiens
gttcaaagtcaaaca

SEQ ID NO: 395881 - DNA, 15 bp, Homo sapiens
ggttcaaagtcaaac

SEQ ID NO: 395882 - DNA, 15 bp, Homo sapiens
aggttcaaagtcaaa

SEQ ID NO: 395883 - DNA, 15 bp, Homo sapiens
gaggttcaaagtcaa

SEQ ID NO: 395884 - DNA, 15 bp, Homo sapiens
tgaggttcaaagtca

SEQ ID NO: 395885 - DNA, 15 bp, Homo sapiens
atgaggttcaaagtc

SEQ ID NO: 395886 - DNA, 15 bp, Homo sapiens
catgaggttcaaagt

SEQ ID NO: 395887 - DNA, 15 bp, Homo sapiens
tcatgaggttcaaag

SEQ ID NO: 395888 - DNA, 15 bp, Homo sapiens
gtcatgaggttcaaa

SEQ ID NO: 395889 - DNA, 15 bp, Homo sapiens
tgtcatgaggttcaa

SEQ ID NO: 395890 - DNA, 15 bp, Homo sapiens
atgtcatgaggttca

SEQ ID NO: 395891 - DNA, 15 bp, Homo sapiens
gatgtcatgaggttc

SEQ ID NO: 395892 - DNA, 15 bp, Homo sapiens
ggatgtcatgaggtt

SEQ ID NO: 395893 - DNA, 15 bp, Homo sapiens
tggatgtcatgaggt

SEQ ID NO: 395894 - DNA, 15 bp, Homo sapiens
ttggatgtcatgagg

SEQ ID NO: 395895 - DNA, 15 bp, Homo sapiens
tttggatgtcatgag

SEQ ID NO: 395896 - DNA, 15 bp, Homo sapiens
atttggatgtcatga

SEQ ID NO: 395897 - DNA, 15 bp, Homo sapiens
tatttggatgtcatg

SEQ ID NO: 395898 - DNA, 15 bp, Homo sapiens
gtatttggatgtcat

SEQ ID NO: 395899 - DNA, 15 bp, Homo sapiens
agtatttggatgtca

SEQ ID NO: 395900 - DNA, 15 bp, Homo sapiens
tagtatttggatgtc

SEQ ID NO: 395901 - DNA, 15 bp, Homo sapiens
ctagtatttggatgt

SEQ ID NO: 395902 - DNA, 15 bp, Homo sapiens
cctagtatttggatg

SEQ ID NO: 395903 - DNA, 15 bp, Homo sapiens
gcctagtatttggat

SEQ ID NO: 395904 - DNA, 15 bp, Homo sapiens
tgcctagtatttgga

SEQ ID NO: 395905 - DNA, 15 bp, Homo sapiens
ctgcctagtatttgg

SEQ ID NO: 395906 - DNA, 15 bp, Homo sapiens
cctgcctagtatttg

SEQ ID NO: 395907 - DNA, 15 bp, Homo sapiens
acctgcctagtattt

SEQ ID NO: 395908 - DNA, 15 bp, Homo sapiens
gacctgcctagtatt

SEQ ID NO: 395909 - DNA, 15 bp, Homo sapiens
tgacctgcctagtat

SEQ ID NO: 395910 - DNA, 15 bp, Homo sapiens
ctgacctgcctagta

SEQ ID NO: 395911 - DNA, 15 bp, Homo sapiens
actgacctgcctagt

SEQ ID NO: 395912 - DNA, 15 bp, Homo sapiens
cactgacctgcctag

SEQ ID NO: 395913 - DNA, 15 bp, Homo sapiens
acactgacctgccta

SEQ ID NO: 395914 - DNA, 15 bp, Homo sapiens
aacactgacctgcct

SEQ ID NO: 395915 - DNA, 15 bp, Homo sapiens
taacactgacctgcc

SEQ ID NO: 395916 - DNA, 15 bp, Homo sapiens
ataacactgacctgc

SEQ ID NO: 395917 - DNA, 15 bp, Homo sapiens
aataacactgacctg

SEQ ID NO: 395918 - DNA, 15 bp, Homo sapiens
taataacactgacct

SEQ ID NO: 395919 - DNA, 15 bp, Homo sapiens
ataataacactgacc

SEQ ID NO: 395920 - DNA, 15 bp, Homo sapiens
gataataacactgac

SEQ ID NO: 395921 - DNA, 15 bp, Homo sapiens
ggataataacactga

SEQ ID NO: 395922 - DNA, 15 bp, Homo sapiens
cggataataacactg

SEQ ID NO: 395923 - DNA, 15 bp, Homo sapiens
acggataataacact

SEQ ID NO: 395924 - DNA, 15 bp, Homo sapiens
cacggataataacac

SEQ ID NO: 395925 - DNA, 15 bp, Homo sapiens
tcacggataataaca

SEQ ID NO: 395926 - DNA, 15 bp, Homo sapiens
atcacggataataac

SEQ ID NO: 395927 - DNA, 15 bp, Homo sapiens
aatcacggataataa

SEQ ID NO: 395928 - DNA, 15 bp, Homo sapiens
aaatcacggataata

SEQ ID NO: 395929 - DNA, 15 bp, Homo sapiens
taaatcacggataat

SEQ ID NO: 395930 - DNA, 15 bp, Homo sapiens
ttaaatcacggataa

SEQ ID NO: 395931 - DNA, 15 bp, Homo sapiens
tttaaatcacggata

SEQ ID NO: 395932 - DNA, 15 bp, Homo sapiens
atttaaatcacggat

SEQ ID NO: 395933 - DNA, 15 bp, Homo sapiens
aatttaaatcacgga

SEQ ID NO: 395934 - DNA, 15 bp, Homo sapiens
aaatttaaatcacgg

SEQ ID NO: 395935 - DNA, 15 bp, Homo sapiens
aaaatttaaatcacg

SEQ ID NO: 395936 - DNA, 15 bp, Homo sapiens
caaaatttaaatcac

SEQ ID NO: 395937 - DNA, 15 bp, Homo sapiens
tcaaaatttaaatca

SEQ ID NO: 395938 - DNA, 15 bp, Homo sapiens
ctcaaaatttaaatc

SEQ ID NO: 395939 - DNA, 15 bp, Homo sapiens
tctcaaaatttaaat

SEQ ID NO: 395940 - DNA, 15 bp, Homo sapiens
ttctcaaaatttaaa

SEQ ID NO: 395941 - DNA, 15 bp, Homo sapiens
tttctcaaaatttaa

SEQ ID NO: 395942 - DNA, 15 bp, Homo sapiens
gtttctcaaaattta

SEQ ID NO: 395943 - DNA, 15 bp, Homo sapiens
agtttctcaaaattt

SEQ ID NO: 395944 - DNA, 15 bp, Homo sapiens
tagtttctcaaaatt

SEQ ID NO: 395945 - DNA, 15 bp, Homo sapiens
ttagtttctcaaaat

SEQ ID NO: 395946 - DNA, 15 bp, Homo sapiens
cttagtttctcaaaa

SEQ ID NO: 395947 - DNA, 15 bp, Homo sapiens
ccttagtttctcaaa

SEQ ID NO: 395948 - DNA, 15 bp, Homo sapiens
gccttagtttctcaa

SEQ ID NO: 395949 - DNA, 15 bp, Homo sapiens
agccttagtttctca

SEQ ID NO: 395950 - DNA, 15 bp, Homo sapiens
gagccttagtttctc

SEQ ID NO: 395951 - DNA, 15 bp, Homo sapiens
tgagccttagtttct

SEQ ID NO: 395952 - DNA, 15 bp, Homo sapiens
ctgagccttagtttc

SEQ ID NO: 395953 - DNA, 15 bp, Homo sapiens
cctgagccttagttt

SEQ ID NO: 395954 - DNA, 15 bp, Homo sapiens
tcctgagccttagtt

SEQ ID NO: 395955 - DNA, 15 bp, Homo sapiens
ctcctgagccttagt

SEQ ID NO: 395956 - DNA, 15 bp, Homo sapiens
cctcctgagccttag

SEQ ID NO: 395957 - DNA, 15 bp, Homo sapiens
acctcctgagcctta

SEQ ID NO: 395958 - DNA, 15 bp, Homo sapiens
cacctcctgagcctt

SEQ ID NO: 395959 - DNA, 15 bp, Homo sapiens
tcacctcctgagcct

SEQ ID NO: 395960 - DNA, 15 bp, Homo sapiens
ttcacctcctgagcc

SEQ ID NO: 395961 - DNA, 15 bp, Homo sapiens
cttcacctcctgagc

SEQ ID NO: 395962 - DNA, 15 bp, Homo sapiens
acttcacctcctgag

SEQ ID NO: 395963 - DNA, 15 bp, Homo sapiens
cacttcacctcctga

SEQ ID NO: 395964 - DNA, 15 bp, Homo sapiens
tcacttcacctcctg

SEQ ID NO: 395965 - DNA, 15 bp, Homo sapiens
atcacttcacctcct

SEQ ID NO: 395966 - DNA, 15 bp, Homo sapiens
aatcacttcacctcc

SEQ ID NO: 395967 - DNA, 15 bp, Homo sapiens
aaatcacttcacctc

SEQ ID NO: 395968 - DNA, 15 bp, Homo sapiens
taaatcacttcacct

SEQ ID NO: 395969 - DNA, 15 bp, Homo sapiens
gtaaatcacttcacc

SEQ ID NO: 395970 - DNA, 15 bp, Homo sapiens
agtaaatcacttcac

SEQ ID NO: 395971 - DNA, 15 bp, Homo sapiens
aagtaaatcacttca

SEQ ID NO: 395972 - DNA, 15 bp, Homo sapiens
caagtaaatcacttc

SEQ ID NO: 395973 - DNA, 15 bp, Homo sapiens
tcaagtaaatcactt

SEQ ID NO: 395974 - DNA, 15 bp, Homo sapiens
ctcaagtaaatcact

SEQ ID NO: 395975 - DNA, 15 bp, Homo sapiens
gctcaagtaaatcac

SEQ ID NO: 395976 - DNA, 15 bp, Homo sapiens
agctcaagtaaatca

SEQ ID NO: 395977 - DNA, 15 bp, Homo sapiens
cagctcaagtaaatc

SEQ ID NO: 395978 - DNA, 15 bp, Homo sapiens
tcagctcaagtaaat

SEQ ID NO: 395979 - DNA, 15 bp, Homo sapiens
atcagctcaagtaaa

SEQ ID NO: 395980 - DNA, 15 bp, Homo sapiens
catcagctcaagtaa

SEQ ID NO: 395981 - DNA, 15 bp, Homo sapiens
tcatcagctcaagta

SEQ ID NO: 395982 - DNA, 15 bp, Homo sapiens
ttcatcagctcaagt

SEQ ID NO: 395983 - DNA, 15 bp, Homo sapiens
attcatcagctcaag

SEQ ID NO: 395984 - DNA, 15 bp, Homo sapiens
cattcatcagctcaa

SEQ ID NO: 395985 - DNA, 15 bp, Homo sapiens
ccattcatcagctca

SEQ ID NO: 395986 - DNA, 15 bp, Homo sapiens
cccattcatcagctc

SEQ ID NO: 395987 - DNA, 15 bp, Homo sapiens
acccattcatcagct

SEQ ID NO: 395988 - DNA, 15 bp, Homo sapiens
gacccattcatcagc

SEQ ID NO: 395989 - DNA, 15 bp, Homo sapiens
tgacccattcatcag

SEQ ID NO: 395990 - DNA, 15 bp, Homo sapiens
atgacccattcatca

SEQ ID NO: 395991 - DNA, 15 bp, Homo sapiens
gatgacccattcatc

SEQ ID NO: 395992 - DNA, 15 bp, Homo sapiens
tgatgacccattcat

SEQ ID NO: 395993 - DNA, 15 bp, Homo sapiens
atgatgacccattca

SEQ ID NO: 395994 - DNA, 15 bp, Homo sapiens
catgatgacccattc

SEQ ID NO: 395995 - DNA, 15 bp, Homo sapiens
ccatgatgacccatt

SEQ ID NO: 395996 - DNA, 15 bp, Homo sapiens
accatgatgacccat

SEQ ID NO: 395997 - DNA, 15 bp, Homo sapiens
aaccatgatgaccca

SEQ ID NO: 395998 - DNA, 15 bp, Homo sapiens
aaaccatgatgaccc

SEQ ID NO: 395999 - DNA, 15 bp, Homo sapiens
caaaccatgatgacc

SEQ ID NO: 396000 - DNA, 15 bp, Homo sapiens
tcaaaccatgatgac

SEQ ID NO: 396001 - DNA, 15 bp, Homo sapiens
ttcaaaccatgatga

SEQ ID NO: 396002 - DNA, 15 bp, Homo sapiens
attcaaaccatgatg

SEQ ID NO: 396003 - DNA, 15 bp, Homo sapiens
gattcaaaccatgat

SEQ ID NO: 396004 - DNA, 15 bp, Homo sapiens
ggattcaaaccatga

SEQ ID NO: 396005 - DNA, 15 bp, Homo sapiens
aggattcaaaccatg

SEQ ID NO: 396006 - DNA, 15 bp, Homo sapiens
caggattcaaaccat

SEQ ID NO: 396007 - DNA, 15 bp, Homo sapiens
ccaggattcaaacca

SEQ ID NO: 396008 - DNA, 15 bp, Homo sapiens
accaggattcaaacc

SEQ ID NO: 396009 - DNA, 15 bp, Homo sapiens
taccaggattcaaac

SEQ ID NO: 396010 - DNA, 15 bp, Homo sapiens
ctaccaggattcaaa

SEQ ID NO: 396011 - DNA, 15 bp, Homo sapiens
actaccaggattcaa

SEQ ID NO: 396012 - DNA, 15 bp, Homo sapiens
gactaccaggattca

SEQ ID NO: 396013 - DNA, 15 bp, Homo sapiens
ggactaccaggattc

SEQ ID NO: 396014 - DNA, 15 bp, Homo sapiens
tggactaccaggatt

SEQ ID NO: 396015 - DNA, 15 bp, Homo sapiens
ttggactaccaggat

SEQ ID NO: 396016 - DNA, 15 bp, Homo sapiens
cttggactaccagga

SEQ ID NO: 396017 - DNA, 15 bp, Homo sapiens
acttggactaccagg

SEQ ID NO: 396018 - DNA, 15 bp, Homo sapiens
cacttggactaccag

SEQ ID NO: 396019 - DNA, 15 bp, Homo sapiens
tcacttggactacca

SEQ ID NO: 396020 - DNA, 15 bp, Homo sapiens
gtcacttggactacc

SEQ ID NO: 396021 - DNA, 15 bp, Homo sapiens
agtcacttggactac

SEQ ID NO: 396022 - DNA, 15 bp, Homo sapiens
cagtcacttggacta

SEQ ID NO: 396023 - DNA, 15 bp, Homo sapiens
gcagtcacttggact

SEQ ID NO: 396024 - DNA, 15 bp, Homo sapiens
agcagtcacttggac

SEQ ID NO: 396025 - DNA, 15 bp, Homo sapiens
gagcagtcacttgga

SEQ ID NO: 396026 - DNA, 15 bp, Homo sapiens
ggagcagtcacttgg

SEQ ID NO: 396027 - DNA, 15 bp, Homo sapiens
aggagcagtcacttg

SEQ ID NO: 396028 - DNA, 15 bp, Homo sapiens
gaggagcagtcactt

SEQ ID NO: 396029 - DNA, 15 bp, Homo sapiens
agaggagcagtcact

SEQ ID NO: 396030 - DNA, 15 bp, Homo sapiens
aagaggagcagtcac

SEQ ID NO: 396031 - DNA, 15 bp, Homo sapiens
gaagaggagcagtca

SEQ ID NO: 396032 - DNA, 15 bp, Homo sapiens
tgaagaggagcagtc

SEQ ID NO: 396033 - DNA, 15 bp, Homo sapiens
ttgaagaggagcagt

SEQ ID NO: 396034 - DNA, 15 bp, Homo sapiens
gttgaagaggagcag

SEQ ID NO: 396035 - DNA, 15 bp, Homo sapiens
agttgaagaggagca

SEQ ID NO: 396036 - DNA, 15 bp, Homo sapiens
aagttgaagaggagc

SEQ ID NO: 396037 - DNA, 15 bp, Homo sapiens
caagttgaagaggag

SEQ ID NO: 396038 - DNA, 15 bp, Homo sapiens
gcaagttgaagagga

SEQ ID NO: 396039 - DNA, 15 bp, Homo sapiens
ggcaagttgaagagg

SEQ ID NO: 396040 - DNA, 15 bp, Homo sapiens
tggcaagttgaagag

SEQ ID NO: 396041 - DNA, 15 bp, Homo sapiens
gtggcaagttgaaga

SEQ ID NO: 396042 - DNA, 15 bp, Homo sapiens
ggtggcaagttgaag

SEQ ID NO: 396043 - DNA, 15 bp, Homo sapiens
aggtggcaagttgaa

SEQ ID NO: 396044 - DNA, 15 bp, Homo sapiens
aaggtggcaagttga

SEQ ID NO: 396045 - DNA, 15 bp, Homo sapiens
aaaggtggcaagttg

SEQ ID NO: 396046 - DNA, 15 bp, Homo sapiens
gaaaggtggcaagtt

SEQ ID NO: 396047 - DNA, 15 bp, Homo sapiens
agaaaggtggcaagt

SEQ ID NO: 396048 - DNA, 15 bp, Homo sapiens
cagaaaggtggcaag

SEQ ID NO: 396049 - DNA, 15 bp, Homo sapiens
tcagaaaggtggcaa

SEQ ID NO: 396050 - DNA, 15 bp, Homo sapiens
ttcagaaaggtggca

SEQ ID NO: 396051 - DNA, 15 bp, Homo sapiens
tttcagaaaggtggc

SEQ ID NO: 396052 - DNA, 15 bp, Homo sapiens
ttttcagaaaggtgg

SEQ ID NO: 396053 - DNA, 15 bp, Homo sapiens
cttttcagaaaggtg

SEQ ID NO: 396054 - DNA, 15 bp, Homo sapiens
gcttttcagaaaggt

SEQ ID NO: 396055 - DNA, 15 bp, Homo sapiens
ggcttttcagaaagg

SEQ ID NO: 396056 - DNA, 15 bp, Homo sapiens
gggcttttcagaaag

SEQ ID NO: 396057 - DNA, 15 bp, Homo sapiens
cgggcttttcagaaa

SEQ ID NO: 396058 - DNA, 15 bp, Homo sapiens
tcgggcttttcagaa

SEQ ID NO: 396059 - DNA, 15 bp, Homo sapiens
ctcgggcttttcaga

SEQ ID NO: 396060 - DNA, 15 bp, Homo sapiens
cctcgggcttttcag

SEQ ID NO: 396061 - DNA, 15 bp, Homo sapiens
acctcgggcttttca

SEQ ID NO: 396062 - DNA, 15 bp, Homo sapiens
gacctcgggcttttc

SEQ ID NO: 396063 - DNA, 15 bp, Homo sapiens
ggacctcgggctttt

SEQ ID NO: 396064 - DNA, 15 bp, Homo sapiens
aggacctcgggcttt

SEQ ID NO: 396065 - DNA, 15 bp, Homo sapiens
caggacctcgggctt

SEQ ID NO: 396066 - DNA, 15 bp, Homo sapiens
gcaggacctcgggct

SEQ ID NO: 396067 - DNA, 15 bp, Homo sapiens
agcaggacctcgggc

SEQ ID NO: 396068 - DNA, 15 bp, Homo sapiens
gagcaggacctcggg

SEQ ID NO: 396069 - DNA, 15 bp, Homo sapiens
tgagcaggacctcgg

SEQ ID NO: 396070 - DNA, 15 bp, Homo sapiens
atgagcaggacctcg

SEQ ID NO: 396071 - DNA, 15 bp, Homo sapiens
gatgagcaggacctc

SEQ ID NO: 396072 - DNA, 15 bp, Homo sapiens
ggatgagcaggacct

SEQ ID NO: 396073 - DNA, 15 bp, Homo sapiens
aggatgagcaggacc

SEQ ID NO: 396074 - DNA, 15 bp, Homo sapiens
aaggatgagcaggac

SEQ ID NO: 396075 - DNA, 15 bp, Homo sapiens
taaggatgagcagga

SEQ ID NO: 396076 - DNA, 15 bp, Homo sapiens
ctaaggatgagcagg

SEQ ID NO: 396077 - DNA, 15 bp, Homo sapiens
gctaaggatgagcag

SEQ ID NO: 396078 - DNA, 15 bp, Homo sapiens
agctaaggatgagca

SEQ ID NO: 396079 - DNA, 15 bp, Homo sapiens
cagctaaggatgagc

SEQ ID NO: 396080 - DNA, 15 bp, Homo sapiens
gcagctaaggatgag

SEQ ID NO: 396081 - DNA, 15 bp, Homo sapiens
agcagctaaggatga

SEQ ID NO: 396082 - DNA, 15 bp, Homo sapiens
cagcagctaaggatg

SEQ ID NO: 396083 - DNA, 15 bp, Homo sapiens
tcagcagctaaggat

SEQ ID NO: 396084 - DNA, 15 bp, Homo sapiens
atcagcagctaagga

SEQ ID NO: 396085 - DNA, 15 bp, Homo sapiens
tatcagcagctaagg

SEQ ID NO: 396086 - DNA, 15 bp, Homo sapiens
atatcagcagctaag

SEQ ID NO: 396087 - DNA, 15 bp, Homo sapiens
catatcagcagctaa

SEQ ID NO: 396088 - DNA, 15 bp, Homo sapiens
ccatatcagcagcta

SEQ ID NO: 396089 - DNA, 15 bp, Homo sapiens
accatatcagcagct

SEQ ID NO: 396090 - DNA, 15 bp, Homo sapiens
aaccatatcagcagc

SEQ ID NO: 396091 - DNA, 15 bp, Homo sapiens
aaaccatatcagcag

SEQ ID NO: 396092 - DNA, 15 bp, Homo sapiens
caaaccatatcagca

SEQ ID NO: 396093 - DNA, 15 bp, Homo sapiens
ccaaaccatatcagc

SEQ ID NO: 396094 - DNA, 15 bp, Homo sapiens
gccaaaccatatcag

SEQ ID NO: 396095 - DNA, 15 bp, Homo sapiens
agccaaaccatatca

SEQ ID NO: 396096 - DNA, 15 bp, Homo sapiens
cagccaaaccatatc

SEQ ID NO: 396097 - DNA, 15 bp, Homo sapiens
acagccaaaccatat

SEQ ID NO: 396098 - DNA, 15 bp, Homo sapiens
cacagccaaaccata

SEQ ID NO: 396099 - DNA, 15 bp, Homo sapiens
acacagccaaaccat

SEQ ID NO: 396100 - DNA, 15 bp, Homo sapiens
gacacagccaaacca

SEQ ID NO: 396101 - DNA, 15 bp, Homo sapiens
agacacagccaaacc

SEQ ID NO: 396102 - DNA, 15 bp, Homo sapiens
gagacacagccaaac

SEQ ID NO: 396103 - DNA, 15 bp, Homo sapiens
ggagacacagccaaa

SEQ ID NO: 396104 - DNA, 15 bp, Homo sapiens
tggagacacagccaa

SEQ ID NO: 396105 - DNA, 15 bp, Homo sapiens
gtggagacacagcca

SEQ ID NO: 396106 - DNA, 15 bp, Homo sapiens
ggtggagacacagcc

SEQ ID NO: 396107 - DNA, 15 bp, Homo sapiens
gggtggagacacagc

SEQ ID NO: 396108 - DNA, 15 bp, Homo sapiens
tgggtggagacacag

SEQ ID NO: 396109 - DNA, 15 bp, Homo sapiens
ttgggtggagacaca

SEQ ID NO: 396110 - DNA, 15 bp, Homo sapiens
tttgggtggagacac

SEQ ID NO: 396111 - DNA, 15 bp, Homo sapiens
atttgggtggagaca

SEQ ID NO: 396112 - DNA, 15 bp, Homo sapiens
gatttgggtggagac

SEQ ID NO: 396113 - DNA, 15 bp, Homo sapiens
agatttgggtggaga

SEQ ID NO: 396114 - DNA, 15 bp, Homo sapiens
aagatttgggtggag

SEQ ID NO: 396115 - DNA, 15 bp, Homo sapiens
taagatttgggtgga

SEQ ID NO: 396116 - DNA, 15 bp, Homo sapiens
ataagatttgggtgg

SEQ ID NO: 396117 - DNA, 15 bp, Homo sapiens
gataagatttgggtg

SEQ ID NO: 396118 - DNA, 15 bp, Homo sapiens
agataagatttgggt

SEQ ID NO: 396119 - DNA, 15 bp, Homo sapiens
aagataagatttggg

SEQ ID NO: 396120 - DNA, 15 bp, Homo sapiens
caagataagatttgg

SEQ ID NO: 396121 - DNA, 15 bp, Homo sapiens
tcaagataagatttg

SEQ ID NO: 396122 - DNA, 15 bp, Homo sapiens
ttcaagataagattt

SEQ ID NO: 396123 - DNA, 15 bp, Homo sapiens
attcaagataagatt

SEQ ID NO: 396124 - DNA, 15 bp, Homo sapiens
aattcaagataagat

SEQ ID NO: 396125 - DNA, 15 bp, Homo sapiens
caattcaagataaga

SEQ ID NO: 396126 - DNA, 15 bp, Homo sapiens
gcaattcaagataag

SEQ ID NO: 396127 - DNA, 15 bp, Homo sapiens
tgcaattcaagataa

SEQ ID NO: 396128 - DNA, 15 bp, Homo sapiens
ctgcaattcaagata

SEQ ID NO: 396129 - DNA, 15 bp, Homo sapiens
actgcaattcaagat

SEQ ID NO: 396130 - DNA, 15 bp, Homo sapiens
aactgcaattcaaga

SEQ ID NO: 396131 - DNA, 15 bp, Homo sapiens
gaactgcaattcaag

SEQ ID NO: 396132 - DNA, 15 bp, Homo sapiens
ggaactgcaattcaa

SEQ ID NO: 396133 - DNA, 15 bp, Homo sapiens
gggaactgcaattca

SEQ ID NO: 396134 - DNA, 15 bp, Homo sapiens
tgggaactgcaattc

SEQ ID NO: 396135 - DNA, 15 bp, Homo sapiens
atgggaactgcaatt

SEQ ID NO: 396136 - DNA, 15 bp, Homo sapiens
tatgggaactgcaat

SEQ ID NO: 396137 - DNA, 15 bp, Homo sapiens
ttatgggaactgcaa

SEQ ID NO: 396138 - DNA, 15 bp, Homo sapiens
attatgggaactgca

SEQ ID NO: 396139 - DNA, 15 bp, Homo sapiens
gattatgggaactgc

SEQ ID NO: 396140 - DNA, 15 bp, Homo sapiens
ggattatgggaactg

SEQ ID NO: 396141 - DNA, 15 bp, Homo sapiens
gggattatgggaact

SEQ ID NO: 396142 - DNA, 15 bp, Homo sapiens
ggggattatgggaac

SEQ ID NO: 396143 - DNA, 15 bp, Homo sapiens
tggggattatgggaa

SEQ ID NO: 396144 - DNA, 15 bp, Homo sapiens
atggggattatggga

SEQ ID NO: 396145 - DNA, 15 bp, Homo sapiens
catggggattatggg

SEQ ID NO: 396146 - DNA, 15 bp, Homo sapiens
acatggggattatgg

SEQ ID NO: 396147 - DNA, 15 bp, Homo sapiens
cacatggggattatg

SEQ ID NO: 396148 - DNA, 15 bp, Homo sapiens
acacatggggattat

SEQ ID NO: 396149 - DNA, 15 bp, Homo sapiens
aacacatggggatta

SEQ ID NO: 396150 - DNA, 15 bp, Homo sapiens
caacacatggggatt

SEQ ID NO: 396151 - DNA, 15 bp, Homo sapiens
acaacacatggggat

SEQ ID NO: 396152 - DNA, 15 bp, Homo sapiens
cacaacacatgggga

SEQ ID NO: 396153 - DNA, 15 bp, Homo sapiens
ccacaacacatgggg

SEQ ID NO: 396154 - DNA, 15 bp, Homo sapiens
cccacaacacatggg

SEQ ID NO: 396155 - DNA, 15 bp, Homo sapiens
tcccacaacacatgg

SEQ ID NO: 396156 - DNA, 15 bp, Homo sapiens
ctcccacaacacatg

SEQ ID NO: 396157 - DNA, 15 bp, Homo sapiens
cctcccacaacacat

SEQ ID NO: 396158 - DNA, 15 bp, Homo sapiens
ccctcccacaacaca

SEQ ID NO: 396159 - DNA, 15 bp, Homo sapiens
tccctcccacaacac

SEQ ID NO: 396160 - DNA, 15 bp, Homo sapiens
gtccctcccacaaca

SEQ ID NO: 396161 - DNA, 15 bp, Homo sapiens
ggtccctcccacaac

SEQ ID NO: 396162 - DNA, 15 bp, Homo sapiens
tggtccctcccacaa

SEQ ID NO: 396163 - DNA, 15 bp, Homo sapiens
ctggtccctcccaca

SEQ ID NO: 396164 - DNA, 15 bp, Homo sapiens
cctggtccctcccac

SEQ ID NO: 396165 - DNA, 15 bp, Homo sapiens
acctggtccctccca

SEQ ID NO: 396166 - DNA, 15 bp, Homo sapiens
cacctggtccctccc

SEQ ID NO: 396167 - DNA, 15 bp, Homo sapiens
ccacctggtccctcc

SEQ ID NO: 396168 - DNA, 15 bp, Homo sapiens
accacctggtccctc

SEQ ID NO: 396169 - DNA, 15 bp, Homo sapiens
caccacctggtccct

SEQ ID NO: 396170 - DNA, 15 bp, Homo sapiens
tcaccacctggtccc

SEQ ID NO: 396171 - DNA, 15 bp, Homo sapiens
atcaccacctggtcc

SEQ ID NO: 396172 - DNA, 15 bp, Homo sapiens
tatcaccacctggtc

SEQ ID NO: 396173 - DNA, 15 bp, Homo sapiens
ttatcaccacctggt

SEQ ID NO: 396174 - DNA, 15 bp, Homo sapiens
attatcaccacctgg

SEQ ID NO: 396175 - DNA, 15 bp, Homo sapiens
aattatcaccacctg

SEQ ID NO: 396176 - DNA, 15 bp, Homo sapiens
caattatcaccacct

SEQ ID NO: 396177 - DNA, 15 bp, Homo sapiens
tcaattatcaccacc

SEQ ID NO: 396178 - DNA, 15 bp, Homo sapiens
ttcaattatcaccac

SEQ ID NO: 396179 - DNA, 15 bp, Homo sapiens
attcaattatcacca

SEQ ID NO: 396180 - DNA, 15 bp, Homo sapiens
gattcaattatcacc

SEQ ID NO: 396181 - DNA, 15 bp, Homo sapiens
tgattcaattatcac

SEQ ID NO: 396182 - DNA, 15 bp, Homo sapiens
atgattcaattatca

SEQ ID NO: 396183 - DNA, 15 bp, Homo sapiens
catgattcaattatc

SEQ ID NO: 396184 - DNA, 15 bp, Homo sapiens
ccatgattcaattat

SEQ ID NO: 396185 - DNA, 15 bp, Homo sapiens
cccatgattcaatta

SEQ ID NO: 396186 - DNA, 15 bp, Homo sapiens
ccccatgattcaatt

SEQ ID NO: 396187 - DNA, 15 bp, Homo sapiens
cccccatgattcaat

SEQ ID NO: 396188 - DNA, 15 bp, Homo sapiens
ccccccatgattcaa

SEQ ID NO: 396189 - DNA, 15 bp, Homo sapiens
gccccccatgattca

SEQ ID NO: 396190 - DNA, 15 bp, Homo sapiens
tgccccccatgattc

SEQ ID NO: 396191 - DNA, 15 bp, Homo sapiens
ctgccccccatgatt

SEQ ID NO: 396192 - DNA, 15 bp, Homo sapiens
actgccccccatgat

SEQ ID NO: 396193 - DNA, 15 bp, Homo sapiens
aactgccccccatga

SEQ ID NO: 396194 - DNA, 15 bp, Homo sapiens
gaactgccccccatg

SEQ ID NO: 396195 - DNA, 15 bp, Homo sapiens
ggaactgccccccat

SEQ ID NO: 396196 - DNA, 15 bp, Homo sapiens
gggaactgcccccca

SEQ ID NO: 396197 - DNA, 15 bp, Homo sapiens
ggggaactgcccccc

SEQ ID NO: 396198 - DNA, 15 bp, Homo sapiens
gggggaactgccccc

SEQ ID NO: 396199 - DNA, 15 bp, Homo sapiens
tgggggaactgcccc

SEQ ID NO: 396200 - DNA, 15 bp, Homo sapiens
atgggggaactgccc

SEQ ID NO: 396201 - DNA, 15 bp, Homo sapiens
gatgggggaactgcc

SEQ ID NO: 396202 - DNA, 15 bp, Homo sapiens
agatgggggaactgc

SEQ ID NO: 396203 - DNA, 15 bp, Homo sapiens
aagatgggggaactg

SEQ ID NO: 396204 - DNA, 15 bp, Homo sapiens
caagatgggggaact

SEQ ID NO: 396205 - DNA, 15 bp, Homo sapiens
acaagatgggggaac

SEQ ID NO: 396206 - DNA, 15 bp, Homo sapiens
aacaagatgggggaa

SEQ ID NO: 396207 - DNA, 15 bp, Homo sapiens
gaacaagatggggga

SEQ ID NO: 396208 - DNA, 15 bp, Homo sapiens
agaacaagatggggg

SEQ ID NO: 396209 - DNA, 15 bp, Homo sapiens
gagaacaagatgggg

SEQ ID NO: 396210 - DNA, 15 bp, Homo sapiens
tgagaacaagatggg

SEQ ID NO: 396211 - DNA, 15 bp, Homo sapiens
atgagaacaagatgg

SEQ ID NO: 396212 - DNA, 15 bp, Homo sapiens
catgagaacaagatg

SEQ ID NO: 396213 - DNA, 15 bp, Homo sapiens
ccatgagaacaagat

SEQ ID NO: 396214 - DNA, 15 bp, Homo sapiens
accatgagaacaaga

SEQ ID NO: 396215 - DNA, 15 bp, Homo sapiens
taccatgagaacaag

SEQ ID NO: 396216 - DNA, 15 bp, Homo sapiens
ctaccatgagaacaa

SEQ ID NO: 396217 - DNA, 15 bp, Homo sapiens
actaccatgagaaca

SEQ ID NO: 396218 - DNA, 15 bp, Homo sapiens
cactaccatgagaac

SEQ ID NO: 396219 - DNA, 15 bp, Homo sapiens
tcactaccatgagaa

SEQ ID NO: 396220 - DNA, 15 bp, Homo sapiens
ctcactaccatgaga

SEQ ID NO: 396221 - DNA, 15 bp, Homo sapiens
actcactaccatgag

SEQ ID NO: 396222 - DNA, 15 bp, Homo sapiens
aactcactaccatga

SEQ ID NO: 396223 - DNA, 15 bp, Homo sapiens
taactcactaccatg

SEQ ID NO: 396224 - DNA, 15 bp, Homo sapiens
ctaactcactaccat

SEQ ID NO: 396225 - DNA, 15 bp, Homo sapiens
actaactcactacca

SEQ ID NO: 396226 - DNA, 15 bp, Homo sapiens
cactaactcactacc

SEQ ID NO: 396227 - DNA, 15 bp, Homo sapiens
gcactaactcactac

SEQ ID NO: 396228 - DNA, 15 bp, Homo sapiens
agcactaactcacta

SEQ ID NO: 396229 - DNA, 15 bp, Homo sapiens
tagcactaactcact

SEQ ID NO: 396230 - DNA, 15 bp, Homo sapiens
ttagcactaactcac

SEQ ID NO: 396231 - DNA, 15 bp, Homo sapiens
gttagcactaactca

SEQ ID NO: 396232 - DNA, 15 bp, Homo sapiens
cgttagcactaactc

SEQ ID NO: 396233 - DNA, 15 bp, Homo sapiens
tcgttagcactaact

SEQ ID NO: 396234 - DNA, 15 bp, Homo sapiens
ctcgttagcactaac

SEQ ID NO: 396235 - DNA, 15 bp, Homo sapiens
tctcgttagcactaa

SEQ ID NO: 396236 - DNA, 15 bp, Homo sapiens
atctcgttagcacta

SEQ ID NO: 396237 - DNA, 15 bp, Homo sapiens
gatctcgttagcact

SEQ ID NO: 396238 - DNA, 15 bp, Homo sapiens
agatctcgttagcac

SEQ ID NO: 396239 - DNA, 15 bp, Homo sapiens
cagatctcgttagca

SEQ ID NO: 396240 - DNA, 15 bp, Homo sapiens
ccagatctcgttagc

SEQ ID NO: 396241 - DNA, 15 bp, Homo sapiens
accagatctcgttag

SEQ ID NO: 396242 - DNA, 15 bp, Homo sapiens
aaccagatctcgtta

SEQ ID NO: 396243 - DNA, 15 bp, Homo sapiens
caaccagatctcgtt

SEQ ID NO: 396244 - DNA, 15 bp, Homo sapiens
acaaccagatctcgt

SEQ ID NO: 396245 - DNA, 15 bp, Homo sapiens
aacaaccagatctcg

SEQ ID NO: 396246 - DNA, 15 bp, Homo sapiens
aaacaaccagatctc

SEQ ID NO: 396247 - DNA, 15 bp, Homo sapiens
aaaacaaccagatct

SEQ ID NO: 396248 - DNA, 15 bp, Homo sapiens
aaaaacaaccagatc

SEQ ID NO: 396249 - DNA, 15 bp, Homo sapiens
taaaaacaaccagat

SEQ ID NO: 396250 - DNA, 15 bp, Homo sapiens
ataaaaacaaccaga

SEQ ID NO: 396251 - DNA, 15 bp, Homo sapiens
tataaaaacaaccag

SEQ ID NO: 396252 - DNA, 15 bp, Homo sapiens
ttataaaaacaacca

SEQ ID NO: 396253 - DNA, 15 bp, Homo sapiens
cttataaaaacaacc

SEQ ID NO: 396254 - DNA, 15 bp, Homo sapiens
ccttataaaaacaac

SEQ ID NO: 396255 - DNA, 15 bp, Homo sapiens
cccttataaaaacaa

SEQ ID NO: 396256 - DNA, 15 bp, Homo sapiens
ccccttataaaaaca

SEQ ID NO: 396257 - DNA, 15 bp, Homo sapiens
gccccttataaaaac

SEQ ID NO: 396258 - DNA, 15 bp, Homo sapiens
agccccttataaaaa

SEQ ID NO: 396259 - DNA, 15 bp, Homo sapiens
aagccccttataaaa

SEQ ID NO: 396260 - DNA, 15 bp, Homo sapiens
gaagccccttataaa

SEQ ID NO: 396261 - DNA, 15 bp, Homo sapiens
ggaagccccttataa

SEQ ID NO: 396262 - DNA, 15 bp, Homo sapiens
gggaagccccttata

SEQ ID NO: 396263 - DNA, 15 bp, Homo sapiens
ggggaagccccttat

SEQ ID NO: 396264 - DNA, 15 bp, Homo sapiens
tggggaagcccctta

SEQ ID NO: 396265 - DNA, 15 bp, Homo sapiens
atggggaagcccctt

SEQ ID NO: 396266 - DNA, 15 bp, Homo sapiens
aatggggaagcccct

SEQ ID NO: 396267 - DNA, 15 bp, Homo sapiens
taatggggaagcccc

SEQ ID NO: 396268 - DNA, 15 bp, Homo sapiens
ctaatggggaagccc

SEQ ID NO: 396269 - DNA, 15 bp, Homo sapiens
gctaatggggaagcc

SEQ ID NO: 396270 - DNA, 15 bp, Homo sapiens
agctaatggggaagc

SEQ ID NO: 396271 - DNA, 15 bp, Homo sapiens
cagctaatggggaag

SEQ ID NO: 396272 - DNA, 15 bp, Homo sapiens
ccagctaatggggaa

SEQ ID NO: 396273 - DNA, 15 bp, Homo sapiens
cccagctaatgggga

SEQ ID NO: 396274 - DNA, 15 bp, Homo sapiens
gcccagctaatgggg

SEQ ID NO: 396275 - DNA, 15 bp, Homo sapiens
tgcccagctaatggg

SEQ ID NO: 396276 - DNA, 15 bp, Homo sapiens
atgcccagctaatgg

SEQ ID NO: 396277 - DNA, 15 bp, Homo sapiens
aatgcccagctaatg

SEQ ID NO: 396278 - DNA, 15 bp, Homo sapiens
gaatgcccagctaat

SEQ ID NO: 396279 - DNA, 15 bp, Homo sapiens
tgaatgcccagctaa

SEQ ID NO: 396280 - DNA, 15 bp, Homo sapiens
atgaatgcccagcta

SEQ ID NO: 396281 - DNA, 15 bp, Homo sapiens
aatgaatgcccagct

SEQ ID NO: 396282 - DNA, 15 bp, Homo sapiens
gaatgaatgcccagc

SEQ ID NO: 396283 - DNA, 15 bp, Homo sapiens
agaatgaatgcccag

SEQ ID NO: 396284 - DNA, 15 bp, Homo sapiens
gagaatgaatgccca

SEQ ID NO: 396285 - DNA, 15 bp, Homo sapiens
ggagaatgaatgccc

SEQ ID NO: 396286 - DNA, 15 bp, Homo sapiens
aggagaatgaatgcc

SEQ ID NO: 396287 - DNA, 15 bp, Homo sapiens
aaggagaatgaatgc

SEQ ID NO: 396288 - DNA, 15 bp, Homo sapiens
gaaggagaatgaatg

SEQ ID NO: 396289 - DNA, 15 bp, Homo sapiens
ggaaggagaatgaat

SEQ ID NO: 396290 - DNA, 15 bp, Homo sapiens
aggaaggagaatgaa

SEQ ID NO: 396291 - DNA, 15 bp, Homo sapiens
caggaaggagaatga

SEQ ID NO: 396292 - DNA, 15 bp, Homo sapiens
gcaggaaggagaatg

SEQ ID NO: 396293 - DNA, 15 bp, Homo sapiens
agcaggaaggagaat

SEQ ID NO: 396294 - DNA, 15 bp, Homo sapiens
cagcaggaaggagaa

SEQ ID NO: 396295 - DNA, 15 bp, Homo sapiens
gcagcaggaaggaga

SEQ ID NO: 396296 - DNA, 15 bp, Homo sapiens
ggcagcaggaaggag

SEQ ID NO: 396297 - DNA, 15 bp, Homo sapiens
tggcagcaggaagga

SEQ ID NO: 396298 - DNA, 15 bp, Homo sapiens
atggcagcaggaagg

SEQ ID NO: 396299 - DNA, 15 bp, Homo sapiens
catggcagcaggaag

SEQ ID NO: 396300 - DNA, 15 bp, Homo sapiens
acatggcagcaggaa

SEQ ID NO: 396301 - DNA, 15 bp, Homo sapiens
cacatggcagcagga

SEQ ID NO: 396302 - DNA, 15 bp, Homo sapiens
tcacatggcagcagg

SEQ ID NO: 396303 - DNA, 15 bp, Homo sapiens
ttcacatggcagcag

SEQ ID NO: 396304 - DNA, 15 bp, Homo sapiens
tttcacatggcagca

SEQ ID NO: 396305 - DNA, 15 bp, Homo sapiens
ttttcacatggcagc

SEQ ID NO: 396306 - DNA, 15 bp, Homo sapiens
tttttcacatggcag

SEQ ID NO: 396307 - DNA, 15 bp, Homo sapiens
ctttttcacatggca

SEQ ID NO: 396308 - DNA, 15 bp, Homo sapiens
cctttttcacatggc

SEQ ID NO: 396309 - DNA, 15 bp, Homo sapiens
tcctttttcacatgg

SEQ ID NO: 396310 - DNA, 15 bp, Homo sapiens
atcctttttcacatg

SEQ ID NO: 396311 - DNA, 15 bp, Homo sapiens
catcctttttcacat

SEQ ID NO: 396312 - DNA, 15 bp, Homo sapiens
acatcctttttcaca

SEQ ID NO: 396313 - DNA, 15 bp, Homo sapiens
cacatcctttttcac

SEQ ID NO: 396314 - DNA, 15 bp, Homo sapiens
acacatcctttttca

SEQ ID NO: 396315 - DNA, 15 bp, Homo sapiens
aacacatcctttttc

SEQ ID NO: 396316 - DNA, 15 bp, Homo sapiens
aaacacatccttttt

SEQ ID NO: 396317 - DNA, 15 bp, Homo sapiens
caaacacatcctttt

SEQ ID NO: 396318 - DNA, 15 bp, Homo sapiens
gcaaacacatccttt

SEQ ID NO: 396319 - DNA, 15 bp, Homo sapiens
agcaaacacatcctt

SEQ ID NO: 396320 - DNA, 15 bp, Homo sapiens
aagcaaacacatcct

SEQ ID NO: 396321 - DNA, 15 bp, Homo sapiens
aaagcaaacacatcc

SEQ ID NO: 396322 - DNA, 15 bp, Homo sapiens
aaaagcaaacacatc

SEQ ID NO: 396323 - DNA, 15 bp, Homo sapiens
gaaaagcaaacacat

SEQ ID NO: 396324 - DNA, 15 bp, Homo sapiens
ggaaaagcaaacaca

SEQ ID NO: 396325 - DNA, 15 bp, Homo sapiens
gggaaaagcaaacac

SEQ ID NO: 396326 - DNA, 15 bp, Homo sapiens
agggaaaagcaaaca

SEQ ID NO: 396327 - DNA, 15 bp, Homo sapiens
aagggaaaagcaaac

SEQ ID NO: 396328 - DNA, 15 bp, Homo sapiens
gaagggaaaagcaaa

SEQ ID NO: 396329 - DNA, 15 bp, Homo sapiens
ggaagggaaaagcaa

SEQ ID NO: 396330 - DNA, 15 bp, Homo sapiens
tggaagggaaaagca

SEQ ID NO: 396331 - DNA, 15 bp, Homo sapiens
gtggaagggaaaagc

SEQ ID NO: 396332 - DNA, 15 bp, Homo sapiens
ggtggaagggaaaag

SEQ ID NO: 396333 - DNA, 15 bp, Homo sapiens
tggtggaagggaaaa

SEQ ID NO: 396334 - DNA, 15 bp, Homo sapiens
atggtggaagggaaa

SEQ ID NO: 396335 - DNA, 15 bp, Homo sapiens
tatggtggaagggaa

SEQ ID NO: 396336 - DNA, 15 bp, Homo sapiens
ttatggtggaaggga

SEQ ID NO: 396337 - DNA, 15 bp, Homo sapiens
attatggtggaaggg

SEQ ID NO: 396338 - DNA, 15 bp, Homo sapiens
aattatggtggaagg

SEQ ID NO: 396339 - DNA, 15 bp, Homo sapiens
caattatggtggaag

SEQ ID NO: 396340 - DNA, 15 bp, Homo sapiens
acaattatggtggaa

SEQ ID NO: 396341 - DNA, 15 bp, Homo sapiens
tacaattatggtgga

SEQ ID NO: 396342 - DNA, 15 bp, Homo sapiens
ttacaattatggtgg

SEQ ID NO: 396343 - DNA, 15 bp, Homo sapiens
cttacaattatggtg

SEQ ID NO: 396344 - DNA, 15 bp, Homo sapiens
acttacaattatggt

SEQ ID NO: 396345 - DNA, 15 bp, Homo sapiens
aacttacaattatgg

SEQ ID NO: 396346 - DNA, 15 bp, Homo sapiens
aaacttacaattatg

SEQ ID NO: 396347 - DNA, 15 bp, Homo sapiens
gaaacttacaattat

SEQ ID NO: 396348 - DNA, 15 bp, Homo sapiens
ggaaacttacaatta

SEQ ID NO: 396349 - DNA, 15 bp, Homo sapiens
aggaaacttacaatt

SEQ ID NO: 396350 - DNA, 15 bp, Homo sapiens
caggaaacttacaat

SEQ ID NO: 396351 - DNA, 15 bp, Homo sapiens
tcaggaaacttacaa

SEQ ID NO: 396352 - DNA, 15 bp, Homo sapiens
ctcaggaaacttaca

SEQ ID NO: 396353 - DNA, 15 bp, Homo sapiens
cctcaggaaacttac

SEQ ID NO: 396354 - DNA, 15 bp, Homo sapiens
gcctcaggaaactta

SEQ ID NO: 396355 - DNA, 15 bp, Homo sapiens
ggcctcaggaaactt

SEQ ID NO: 396356 - DNA, 15 bp, Homo sapiens
aggcctcaggaaact

SEQ ID NO: 396357 - DNA, 15 bp, Homo sapiens
gaggcctcaggaaac

SEQ ID NO: 396358 - DNA, 15 bp, Homo sapiens
ggaggcctcaggaaa

SEQ ID NO: 396359 - DNA, 15 bp, Homo sapiens
gggaggcctcaggaa

SEQ ID NO: 396360 - DNA, 15 bp, Homo sapiens
ggggaggcctcagga

SEQ ID NO: 396361 - DNA, 15 bp, Homo sapiens
tggggaggcctcagg

SEQ ID NO: 396362 - DNA, 15 bp, Homo sapiens
ctggggaggcctcag

SEQ ID NO: 396363 - DNA, 15 bp, Homo sapiens
gctggggaggcctca

SEQ ID NO: 396364 - DNA, 15 bp, Homo sapiens
ggctggggaggcctc

SEQ ID NO: 396365 - DNA, 15 bp, Homo sapiens
tggctggggaggcct

SEQ ID NO: 396366 - DNA, 15 bp, Homo sapiens
atggctggggaggcc

SEQ ID NO: 396367 - DNA, 15 bp, Homo sapiens
catggctggggaggc

SEQ ID NO: 396368 - DNA, 15 bp, Homo sapiens
gcatggctggggagg

SEQ ID NO: 396369 - DNA, 15 bp, Homo sapiens
agcatggctggggag

SEQ ID NO: 396370 - DNA, 15 bp, Homo sapiens
cagcatggctgggga

SEQ ID NO: 396371 - DNA, 15 bp, Homo sapiens
tcagcatggctgggg

SEQ ID NO: 396372 - DNA, 15 bp, Homo sapiens
ctcagcatggctggg

SEQ ID NO: 396373 - DNA, 15 bp, Homo sapiens
gctcagcatggctgg

SEQ ID NO: 396374 - DNA, 15 bp, Homo sapiens
agctcagcatggctg

SEQ ID NO: 396375 - DNA, 15 bp, Homo sapiens
cagctcagcatggct

SEQ ID NO: 396376 - DNA, 15 bp, Homo sapiens
acagctcagcatggc

SEQ ID NO: 396377 - DNA, 15 bp, Homo sapiens
cacagctcagcatgg

SEQ ID NO: 396378 - DNA, 15 bp, Homo sapiens
tcacagctcagcatg

SEQ ID NO: 396379 - DNA, 15 bp, Homo sapiens
ctcacagctcagcat

SEQ ID NO: 396380 - DNA, 15 bp, Homo sapiens
actcacagctcagca

SEQ ID NO: 396381 - DNA, 15 bp, Homo sapiens
gactcacagctcagc

SEQ ID NO: 396382 - DNA, 15 bp, Homo sapiens
tgactcacagctcag

SEQ ID NO: 396383 - DNA, 15 bp, Homo sapiens
ttgactcacagctca

SEQ ID NO: 396384 - DNA, 15 bp, Homo sapiens
attgactcacagctc

SEQ ID NO: 396385 - DNA, 15 bp, Homo sapiens
aattgactcacagct

SEQ ID NO: 396386 - DNA, 15 bp, Homo sapiens
taattgactcacagc

SEQ ID NO: 396387 - DNA, 15 bp, Homo sapiens
ttaattgactcacag

SEQ ID NO: 396388 - DNA, 15 bp, Homo sapiens
tttaattgactcaca

SEQ ID NO: 396389 - DNA, 15 bp, Homo sapiens
gtttaattgactcac

SEQ ID NO: 396390 - DNA, 15 bp, Homo sapiens
ggtttaattgactca

SEQ ID NO: 396391 - DNA, 15 bp, Homo sapiens
aggtttaattgactc

SEQ ID NO: 396392 - DNA, 15 bp, Homo sapiens
gaggtttaattgact

SEQ ID NO: 396393 - DNA, 15 bp, Homo sapiens
agaggtttaattgac

SEQ ID NO: 396394 - DNA, 15 bp, Homo sapiens
aagaggtttaattga

SEQ ID NO: 396395 - DNA, 15 bp, Homo sapiens
aaagaggtttaattg

SEQ ID NO: 396396 - DNA, 15 bp, Homo sapiens
gaaagaggtttaatt

SEQ ID NO: 396397 - DNA, 15 bp, Homo sapiens
ggaaagaggtttaat

SEQ ID NO: 396398 - DNA, 15 bp, Homo sapiens
aggaaagaggtttaa

SEQ ID NO: 396399 - DNA, 15 bp, Homo sapiens
aaggaaagaggttta

SEQ ID NO: 396400 - DNA, 15 bp, Homo sapiens
aaaggaaagaggttt

SEQ ID NO: 396401 - DNA, 15 bp, Homo sapiens
taaaggaaagaggtt

SEQ ID NO: 396402 - DNA, 15 bp, Homo sapiens
ataaaggaaagaggt

SEQ ID NO: 396403 - DNA, 15 bp, Homo sapiens
tataaaggaaagagg

SEQ ID NO: 396404 - DNA, 15 bp, Homo sapiens
ttataaaggaaagag

SEQ ID NO: 396405 - DNA, 15 bp, Homo sapiens
tttataaaggaaaga

SEQ ID NO: 396406 - DNA, 15 bp, Homo sapiens
atttataaaggaaag

SEQ ID NO: 396407 - DNA, 15 bp, Homo sapiens
aatttataaaggaaa

SEQ ID NO: 396408 - DNA, 15 bp, Homo sapiens
taatttataaaggaa

SEQ ID NO: 396409 - DNA, 15 bp, Homo sapiens
gtaatttataaagga

SEQ ID NO: 396410 - DNA, 15 bp, Homo sapiens
ggtaatttataaagg

SEQ ID NO: 396411 - DNA, 15 bp, Homo sapiens
gggtaatttataaag

SEQ ID NO: 396412 - DNA, 15 bp, Homo sapiens
tgggtaatttataaa

SEQ ID NO: 396413 - DNA, 15 bp, Homo sapiens
ctgggtaatttataa

SEQ ID NO: 396414 - DNA, 15 bp, Homo sapiens
actgggtaatttata

SEQ ID NO: 396415 - DNA, 15 bp, Homo sapiens
gactgggtaatttat

SEQ ID NO: 396416 - DNA, 15 bp, Homo sapiens
agactgggtaattta

SEQ ID NO: 396417 - DNA, 15 bp, Homo sapiens
gagactgggtaattt

SEQ ID NO: 396418 - DNA, 15 bp, Homo sapiens
cgagactgggtaatt

SEQ ID NO: 396419 - DNA, 15 bp, Homo sapiens
ccgagactgggtaat

SEQ ID NO: 396420 - DNA, 15 bp, Homo sapiens
cccgagactgggtaa

SEQ ID NO: 396421 - DNA, 15 bp, Homo sapiens
acccgagactgggta

SEQ ID NO: 396422 - DNA, 15 bp, Homo sapiens
tacccgagactgggt

SEQ ID NO: 396423 - DNA, 15 bp, Homo sapiens
atacccgagactggg

SEQ ID NO: 396424 - DNA, 15 bp, Homo sapiens
catacccgagactgg

SEQ ID NO: 396425 - DNA, 15 bp, Homo sapiens
acatacccgagactg

SEQ ID NO: 396426 - DNA, 15 bp, Homo sapiens
gacatacccgagact

SEQ ID NO: 396427 - DNA, 15 bp, Homo sapiens
agacatacccgagac

SEQ ID NO: 396428 - DNA, 15 bp, Homo sapiens
aagacatacccgaga

SEQ ID NO: 396429 - DNA, 15 bp, Homo sapiens
aaagacatacccgag

SEQ ID NO: 396430 - DNA, 15 bp, Homo sapiens
taaagacatacccga

SEQ ID NO: 396431 - DNA, 15 bp, Homo sapiens
ataaagacatacccg

SEQ ID NO: 396432 - DNA, 15 bp, Homo sapiens
aataaagacataccc

SEQ ID NO: 396433 - DNA, 15 bp, Homo sapiens
taataaagacatacc

SEQ ID NO: 396434 - DNA, 15 bp, Homo sapiens
ctaataaagacatac

SEQ ID NO: 396435 - DNA, 15 bp, Homo sapiens
gctaataaagacata

SEQ ID NO: 396436 - DNA, 15 bp, Homo sapiens
tgctaataaagacat

SEQ ID NO: 396437 - DNA, 15 bp, Homo sapiens
ctgctaataaagaca

SEQ ID NO: 396438 - DNA, 15 bp, Homo sapiens
gctgctaataaagac

SEQ ID NO: 396439 - DNA, 15 bp, Homo sapiens
tgctgctaataaaga

SEQ ID NO: 396440 - DNA, 15 bp, Homo sapiens
atgctgctaataaag

SEQ ID NO: 396441 - DNA, 15 bp, Homo sapiens
catgctgctaataaa

SEQ ID NO: 396442 - DNA, 15 bp, Homo sapiens
tcatgctgctaataa

SEQ ID NO: 396443 - DNA, 15 bp, Homo sapiens
ctcatgctgctaata

SEQ ID NO: 396444 - DNA, 15 bp, Homo sapiens
tctcatgctgctaat

SEQ ID NO: 396445 - DNA, 15 bp, Homo sapiens
ttctcatgctgctaa

SEQ ID NO: 396446 - DNA, 15 bp, Homo sapiens
gttctcatgctgcta

SEQ ID NO: 396447 - DNA, 15 bp, Homo sapiens
cgttctcatgctgct

SEQ ID NO: 396448 - DNA, 15 bp, Homo sapiens
ccgttctcatgctgc

SEQ ID NO: 396449 - DNA, 15 bp, Homo sapiens
tccgttctcatgctg

SEQ ID NO: 396450 - DNA, 15 bp, Homo sapiens
gtccgttctcatgct

SEQ ID NO: 396451 - DNA, 15 bp, Homo sapiens
agtccgttctcatgc

SEQ ID NO: 396452 - DNA, 15 bp, Homo sapiens
tagtccgttctcatg

SEQ ID NO: 396453 - DNA, 15 bp, Homo sapiens
ttagtccgttctcat

SEQ ID NO: 396454 - DNA, 15 bp, Homo sapiens
attagtccgttctca

SEQ ID NO: 396455 - DNA, 15 bp, Homo sapiens
tattagtccgttctc

SEQ ID NO: 396456 - DNA, 15 bp, Homo sapiens
ctattagtccgttct

SEQ ID NO: 396457 - DNA, 15 bp, Homo sapiens
tctattagtccgttc

SEQ ID NO: 396458 - DNA, 15 bp, Homo sapiens
ctctattagtccgtt

SEQ ID NO: 396459 - DNA, 15 bp, Homo sapiens
cctctattagtccgt

SEQ ID NO: 396460 - DNA, 15 bp, Homo sapiens
acctctattagtccg

SEQ ID NO: 396461 - DNA, 15 bp, Homo sapiens
cacctctattagtcc

SEQ ID NO: 396462 - DNA, 15 bp, Homo sapiens
gcacctctattagtc

SEQ ID NO: 396463 - DNA, 15 bp, Homo sapiens
ggcacctctattagt

SEQ ID NO: 396464 - DNA, 15 bp, Homo sapiens
tggcacctctattag

SEQ ID NO: 396465 - DNA, 15 bp, Homo sapiens
ttggcacctctatta

SEQ ID NO: 396466 - DNA, 15 bp, Homo sapiens
tttggcacctctatt

SEQ ID NO: 396467 - DNA, 15 bp, Homo sapiens
gtttggcacctctat

SEQ ID NO: 396468 - DNA, 15 bp, Homo sapiens
ggtttggcacctcta

SEQ ID NO: 396469 - DNA, 15 bp, Homo sapiens
tggtttggcacctct

SEQ ID NO: 396470 - DNA, 15 bp, Homo sapiens
ttggtttggcacctc

SEQ ID NO: 396471 - DNA, 15 bp, Homo sapiens
attggtttggcacct

SEQ ID NO: 396472 - DNA, 15 bp, Homo sapiens
cattggtttggcacc

SEQ ID NO: 396473 - DNA, 15 bp, Homo sapiens
tcattggtttggcac

SEQ ID NO: 396474 - DNA, 15 bp, Homo sapiens
ttcattggtttggca

SEQ ID NO: 396475 - DNA, 15 bp, Homo sapiens
attcattggtttggc

SEQ ID NO: 396476 - DNA, 15 bp, Homo sapiens
cattcattggtttgg

SEQ ID NO: 396477 - DNA, 15 bp, Homo sapiens
ccattcattggtttg

SEQ ID NO: 396478 - DNA, 15 bp, Homo sapiens
gccattcattggttt

SEQ ID NO: 396479 - DNA, 15 bp, Homo sapiens
cgccattcattggtt

SEQ ID NO: 396480 - DNA, 15 bp, Homo sapiens
gcgccattcattggt

SEQ ID NO: 396481 - DNA, 15 bp, Homo sapiens
tgcgccattcattgg

SEQ ID NO: 396482 - DNA, 15 bp, Homo sapiens
ctgcgccattcattg

SEQ ID NO: 396483 - DNA, 15 bp, Homo sapiens
cctgcgccattcatt

SEQ ID NO: 396484 - DNA, 15 bp, Homo sapiens
tcctgcgccattcat

SEQ ID NO: 396485 - DNA, 15 bp, Homo sapiens
atcctgcgccattca

SEQ ID NO: 396486 - DNA, 15 bp, Homo sapiens
catcctgcgccattc

SEQ ID NO: 396487 - DNA, 15 bp, Homo sapiens
tcatcctgcgccatt

SEQ ID NO: 396488 - DNA, 15 bp, Homo sapiens
gtcatcctgcgccat

SEQ ID NO: 396489 - DNA, 15 bp, Homo sapiens
tgtcatcctgcgcca

SEQ ID NO: 396490 - DNA, 15 bp, Homo sapiens
ttgtcatcctgcgcc

SEQ ID NO: 396491 - DNA, 15 bp, Homo sapiens
cttgtcatcctgcgc

SEQ ID NO: 396492 - DNA, 15 bp, Homo sapiens
acttgtcatcctgcg

SEQ ID NO: 396493 - DNA, 15 bp, Homo sapiens
tacttgtcatcctgc

SEQ ID NO: 396494 - DNA, 15 bp, Homo sapiens
ctacttgtcatcctg

SEQ ID NO: 396495 - DNA, 15 bp, Homo sapiens
actacttgtcatcct

SEQ ID NO: 396496 - DNA, 15 bp, Homo sapiens
tactacttgtcatcc

SEQ ID NO: 396497 - DNA, 15 bp, Homo sapiens
atactacttgtcatc

SEQ ID NO: 396498 - DNA, 15 bp, Homo sapiens
tatactacttgtcat

SEQ ID NO: 396499 - DNA, 15 bp, Homo sapiens
ctatactacttgtca

SEQ ID NO: 396500 - DNA, 15 bp, Homo sapiens
cctatactacttgtc

SEQ ID NO: 396501 - DNA, 15 bp, Homo sapiens
acctatactacttgt

SEQ ID NO: 396502 - DNA, 15 bp, Homo sapiens
gacctatactacttg

SEQ ID NO: 396503 - DNA, 15 bp, Homo sapiens
agacctatactactt

SEQ ID NO: 396504 - DNA, 15 bp, Homo sapiens
aagacctatactact

SEQ ID NO: 396505 - DNA, 15 bp, Homo sapiens
aaagacctatactac

SEQ ID NO: 396506 - DNA, 15 bp, Homo sapiens
aaaagacctatacta

SEQ ID NO: 396507 - DNA, 15 bp, Homo sapiens
aaaaagacctatact

SEQ ID NO: 396508 - DNA, 15 bp, Homo sapiens
aaaaaagacctatac

SEQ ID NO: 396509 - DNA, 15 bp, Homo sapiens
taaaaaagacctata

SEQ ID NO: 396510 - DNA, 15 bp, Homo sapiens
gtaaaaaagacctat

SEQ ID NO: 396511 - DNA, 15 bp, Homo sapiens
tgtaaaaaagaccta

SEQ ID NO: 396512 - DNA, 15 bp, Homo sapiens
atgtaaaaaagacct

SEQ ID NO: 396513 - DNA, 15 bp, Homo sapiens
aatgtaaaaaagacc

SEQ ID NO: 396514 - DNA, 15 bp, Homo sapiens
aaatgtaaaaaagac

SEQ ID NO: 396515 - DNA, 15 bp, Homo sapiens
gaaatgtaaaaaaga

SEQ ID NO: 396516 - DNA, 15 bp, Homo sapiens
tgaaatgtaaaaaag

SEQ ID NO: 396517 - DNA, 15 bp, Homo sapiens
ctgaaatgtaaaaaa

SEQ ID NO: 396518 - DNA, 15 bp, Homo sapiens
tctgaaatgtaaaaa

SEQ ID NO: 396519 - DNA, 15 bp, Homo sapiens
atctgaaatgtaaaa

SEQ ID NO: 396520 - DNA, 15 bp, Homo sapiens
aatctgaaatgtaaa

SEQ ID NO: 396521 - DNA, 15 bp, Homo sapiens
caatctgaaatgtaa

SEQ ID NO: 396522 - DNA, 15 bp, Homo sapiens
tcaatctgaaatgta

SEQ ID NO: 396523 - DNA, 15 bp, Homo sapiens
ttcaatctgaaatgt

SEQ ID NO: 396524 - DNA, 15 bp, Homo sapiens
cttcaatctgaaatg

SEQ ID NO: 396525 - DNA, 15 bp, Homo sapiens
tcttcaatctgaaat

SEQ ID NO: 396526 - DNA, 15 bp, Homo sapiens
gtcttcaatctgaaa

SEQ ID NO: 396527 - DNA, 15 bp, Homo sapiens
agtcttcaatctgaa

SEQ ID NO: 396528 - DNA, 15 bp, Homo sapiens
tagtcttcaatctga

SEQ ID NO: 396529 - DNA, 15 bp, Homo sapiens
ttagtcttcaatctg

SEQ ID NO: 396530 - DNA, 15 bp, Homo sapiens
cttagtcttcaatct

SEQ ID NO: 396531 - DNA, 15 bp, Homo sapiens
ccttagtcttcaatc

SEQ ID NO: 396532 - DNA, 15 bp, Homo sapiens
tccttagtcttcaat

SEQ ID NO: 396533 - DNA, 15 bp, Homo sapiens
ttccttagtcttcaa

SEQ ID NO: 396534 - DNA, 15 bp, Homo sapiens
tttccttagtcttca

SEQ ID NO: 396535 - DNA, 15 bp, Homo sapiens
atttccttagtcttc

SEQ ID NO: 396536 - DNA, 15 bp, Homo sapiens
tatttccttagtctt

SEQ ID NO: 396537 - DNA, 15 bp, Homo sapiens
ttatttccttagtct

SEQ ID NO: 396538 - DNA, 15 bp, Homo sapiens
tttatttccttagtc

SEQ ID NO: 396539 - DNA, 15 bp, Homo sapiens
atttatttccttagt

SEQ ID NO: 396540 - DNA, 15 bp, Homo sapiens
catttatttccttag

SEQ ID NO: 396541 - DNA, 15 bp, Homo sapiens
ccatttatttcctta

SEQ ID NO: 396542 - DNA, 15 bp, Homo sapiens
accatttatttcctt

SEQ ID NO: 396543 - DNA, 15 bp, Homo sapiens
gaccatttatttcct

SEQ ID NO: 396544 - DNA, 15 bp, Homo sapiens
agaccatttatttcc

SEQ ID NO: 396545 - DNA, 15 bp, Homo sapiens
aagaccatttatttc

SEQ ID NO: 396546 - DNA, 15 bp, Homo sapiens
aaagaccatttattt

SEQ ID NO: 396547 - DNA, 15 bp, Homo sapiens
taaagaccatttatt

SEQ ID NO: 396548 - DNA, 15 bp, Homo sapiens
gtaaagaccatttat

SEQ ID NO: 396549 - DNA, 15 bp, Homo sapiens
agtaaagaccattta

SEQ ID NO: 396550 - DNA, 15 bp, Homo sapiens
cagtaaagaccattt

SEQ ID NO: 396551 - DNA, 15 bp, Homo sapiens
ccagtaaagaccatt

SEQ ID NO: 396552 - DNA, 15 bp, Homo sapiens
cccagtaaagaccat

SEQ ID NO: 396553 - DNA, 15 bp, Homo sapiens
gcccagtaaagacca

SEQ ID NO: 396554 - DNA, 15 bp, Homo sapiens
tgcccagtaaagacc

SEQ ID NO: 396555 - DNA, 15 bp, Homo sapiens
gtgcccagtaaagac

SEQ ID NO: 396556 - DNA, 15 bp, Homo sapiens
ggtgcccagtaaaga

SEQ ID NO: 396557 - DNA, 15 bp, Homo sapiens
tggtgcccagtaaag

SEQ ID NO: 396558 - DNA, 15 bp, Homo sapiens
atggtgcccagtaaa

SEQ ID NO: 396559 - DNA, 15 bp, Homo sapiens
aatggtgcccagtaa

SEQ ID NO: 396560 - DNA, 15 bp, Homo sapiens
gaatggtgcccagta

SEQ ID NO: 396561 - DNA, 15 bp, Homo sapiens
tgaatggtgcccagt

SEQ ID NO: 396562 - DNA, 15 bp, Homo sapiens
ctgaatggtgcccag

SEQ ID NO: 396563 - DNA, 15 bp, Homo sapiens
actgaatggtgccca

SEQ ID NO: 396564 - DNA, 15 bp, Homo sapiens
tactgaatggtgccc

SEQ ID NO: 396565 - DNA, 15 bp, Homo sapiens
ctactgaatggtgcc

SEQ ID NO: 396566 - DNA, 15 bp, Homo sapiens
cctactgaatggtgc

SEQ ID NO: 396567 - DNA, 15 bp, Homo sapiens
acctactgaatggtg

SEQ ID NO: 396568 - DNA, 15 bp, Homo sapiens
gacctactgaatggt

SEQ ID NO: 396569 - DNA, 15 bp, Homo sapiens
tgacctactgaatgg

SEQ ID NO: 396570 - DNA, 15 bp, Homo sapiens
ctgacctactgaatg

SEQ ID NO: 396571 - DNA, 15 bp, Homo sapiens
tctgacctactgaat

SEQ ID NO: 396572 - DNA, 15 bp, Homo sapiens
atctgacctactgaa

SEQ ID NO: 396573 - DNA, 15 bp, Homo sapiens
catctgacctactga

SEQ ID NO: 396574 - DNA, 15 bp, Homo sapiens
gcatctgacctactg

SEQ ID NO: 396575 - DNA, 15 bp, Homo sapiens
agcatctgacctact

SEQ ID NO: 396576 - DNA, 15 bp, Homo sapiens
gagcatctgacctac

SEQ ID NO: 396577 - DNA, 15 bp, Homo sapiens
agagcatctgaccta

SEQ ID NO: 396578 - DNA, 15 bp, Homo sapiens
cagagcatctgacct

SEQ ID NO: 396579 - DNA, 15 bp, Homo sapiens
acagagcatctgacc

SEQ ID NO: 396580 - DNA, 15 bp, Homo sapiens
cacagagcatctgac

SEQ ID NO: 396581 - DNA, 15 bp, Homo sapiens
acacagagcatctga

SEQ ID NO: 396582 - DNA, 15 bp, Homo sapiens
cacacagagcatctg

SEQ ID NO: 396583 - DNA, 15 bp, Homo sapiens
acacacagagcatct

SEQ ID NO: 396584 - DNA, 15 bp, Homo sapiens
cacacacagagcatc

SEQ ID NO: 396585 - DNA, 15 bp, Homo sapiens
ccacacacagagcat

SEQ ID NO: 396586 - DNA, 15 bp, Homo sapiens
tccacacacagagca

SEQ ID NO: 396587 - DNA, 15 bp, Homo sapiens
atccacacacagagc

SEQ ID NO: 396588 - DNA, 15 bp, Homo sapiens
gatccacacacagag

SEQ ID NO: 396589 - DNA, 15 bp, Homo sapiens
agatccacacacaga

SEQ ID NO: 396590 - DNA, 15 bp, Homo sapiens
cagatccacacacag

SEQ ID NO: 396591 - DNA, 15 bp, Homo sapiens
ccagatccacacaca

SEQ ID NO: 396592 - DNA, 15 bp, Homo sapiens
cccagatccacacac

SEQ ID NO: 396593 - DNA, 15 bp, Homo sapiens
acccagatccacaca

SEQ ID NO: 396594 - DNA, 15 bp, Homo sapiens
aacccagatccacac

SEQ ID NO: 396595 - DNA, 15 bp, Homo sapiens
aaacccagatccaca

SEQ ID NO: 396596 - DNA, 15 bp, Homo sapiens
taaacccagatccac

SEQ ID NO: 396597 - DNA, 15 bp, Homo sapiens
ttaaacccagatcca

SEQ ID NO: 396598 - DNA, 15 bp, Homo sapiens
attaaacccagatcc

SEQ ID NO: 396599 - DNA, 15 bp, Homo sapiens
gattaaacccagatc

SEQ ID NO: 396600 - DNA, 15 bp, Homo sapiens
tgattaaacccagat

SEQ ID NO: 396601 - DNA, 15 bp, Homo sapiens
gtgattaaacccaga

SEQ ID NO: 396602 - DNA, 15 bp, Homo sapiens
agtgattaaacccag

SEQ ID NO: 396603 - DNA, 15 bp, Homo sapiens
tagtgattaaaccca

SEQ ID NO: 396604 - DNA, 15 bp, Homo sapiens
ctagtgattaaaccc

SEQ ID NO: 396605 - DNA, 15 bp, Homo sapiens
tctagtgattaaacc

SEQ ID NO: 396606 - DNA, 15 bp, Homo sapiens
gtctagtgattaaac

SEQ ID NO: 396607 - DNA, 15 bp, Homo sapiens
tgtctagtgattaaa

SEQ ID NO: 396608 - DNA, 15 bp, Homo sapiens
gtgtctagtgattaa

SEQ ID NO: 396609 - DNA, 15 bp, Homo sapiens
ggtgtctagtgatta

SEQ ID NO: 396610 - DNA, 15 bp, Homo sapiens
gggtgtctagtgatt

SEQ ID NO: 396611 - DNA, 15 bp, Homo sapiens
agggtgtctagtgat

SEQ ID NO: 396612 - DNA, 15 bp, Homo sapiens
gagggtgtctagtga

SEQ ID NO: 396613 - DNA, 15 bp, Homo sapiens
tgagggtgtctagtg

SEQ ID NO: 396614 - DNA, 15 bp, Homo sapiens
ctgagggtgtctagt

SEQ ID NO: 396615 - DNA, 15 bp, Homo sapiens
cctgagggtgtctag

SEQ ID NO: 396616 - DNA, 15 bp, Homo sapiens
gcctgagggtgtcta

SEQ ID NO: 396617 - DNA, 15 bp, Homo sapiens
tgcctgagggtgtct

SEQ ID NO: 396618 - DNA, 15 bp, Homo sapiens
ctgcctgagggtgtc

SEQ ID NO: 396619 - DNA, 15 bp, Homo sapiens
cctgcctgagggtgt

SEQ ID NO: 396620 - DNA, 15 bp, Homo sapiens
ccctgcctgagggtg

SEQ ID NO: 396621 - DNA, 15 bp, Homo sapiens
cccctgcctgagggt

SEQ ID NO: 396622 - DNA, 15 bp, Homo sapiens
tcccctgcctgaggg

SEQ ID NO: 396623 - DNA, 15 bp, Homo sapiens
atcccctgcctgagg

SEQ ID NO: 396624 - DNA, 15 bp, Homo sapiens
gatcccctgcctgag

SEQ ID NO: 396625 - DNA, 15 bp, Homo sapiens
agatcccctgcctga

SEQ ID NO: 396626 - DNA, 15 bp, Homo sapiens
aagatcccctgcctg

SEQ ID NO: 396627 - DNA, 15 bp, Homo sapiens
caagatcccctgcct

SEQ ID NO: 396628 - DNA, 15 bp, Homo sapiens
tcaagatcccctgcc

SEQ ID NO: 396629 - DNA, 15 bp, Homo sapiens
ctcaagatcccctgc

SEQ ID NO: 396630 - DNA, 15 bp, Homo sapiens
gctcaagatcccctg

SEQ ID NO: 396631 - DNA, 15 bp, Homo sapiens
agctcaagatcccct

SEQ ID NO: 396632 - DNA, 15 bp, Homo sapiens
aagctcaagatcccc

SEQ ID NO: 396633 - DNA, 15 bp, Homo sapiens
aaagctcaagatccc

SEQ ID NO: 396634 - DNA, 15 bp, Homo sapiens
gaaagctcaagatcc

SEQ ID NO: 396635 - DNA, 15 bp, Homo sapiens
ggaaagctcaagatc

SEQ ID NO: 396636 - DNA, 15 bp, Homo sapiens
cggaaagctcaagat

SEQ ID NO: 396637 - DNA, 15 bp, Homo sapiens
tcggaaagctcaaga

SEQ ID NO: 396638 - DNA, 15 bp, Homo sapiens
ttcggaaagctcaag

SEQ ID NO: 396639 - DNA, 15 bp, Homo sapiens
cttcggaaagctcaa

SEQ ID NO: 396640 - DNA, 15 bp, Homo sapiens
tcttcggaaagctca

SEQ ID NO: 396641 - DNA, 15 bp, Homo sapiens
ctcttcggaaagctc

SEQ ID NO: 396642 - DNA, 15 bp, Homo sapiens
cctcttcggaaagct

SEQ ID NO: 396643 - DNA, 15 bp, Homo sapiens
gcctcttcggaaagc

SEQ ID NO: 396644 - DNA, 15 bp, Homo sapiens
tgcctcttcggaaag

SEQ ID NO: 396645 - DNA, 15 bp, Homo sapiens
gtgcctcttcggaaa

SEQ ID NO: 396646 - DNA, 15 bp, Homo sapiens
agtgcctcttcggaa

SEQ ID NO: 396647 - DNA, 15 bp, Homo sapiens
cagtgcctcttcgga

SEQ ID NO: 396648 - DNA, 15 bp, Homo sapiens
tcagtgcctcttcgg

SEQ ID NO: 396649 - DNA, 15 bp, Homo sapiens
ttcagtgcctcttcg

SEQ ID NO: 396650 - DNA, 15 bp, Homo sapiens
cttcagtgcctcttc

SEQ ID NO: 396651 - DNA, 15 bp, Homo sapiens
ccttcagtgcctctt

SEQ ID NO: 396652 - DNA, 15 bp, Homo sapiens
cccttcagtgcctct

SEQ ID NO: 396653 - DNA, 15 bp, Homo sapiens
ccccttcagtgcctc

SEQ ID NO: 396654 - DNA, 15 bp, Homo sapiens
tccccttcagtgcct

SEQ ID NO: 396655 - DNA, 15 bp, Homo sapiens
ctccccttcagtgcc

SEQ ID NO: 396656 - DNA, 15 bp, Homo sapiens
cctccccttcagtgc

SEQ ID NO: 396657 - DNA, 15 bp, Homo sapiens
tcctccccttcagtg

SEQ ID NO: 396658 - DNA, 15 bp, Homo sapiens
ctcctccccttcagt

SEQ ID NO: 396659 - DNA, 15 bp, Homo sapiens
tctcctccccttcag

SEQ ID NO: 396660 - DNA, 15 bp, Homo sapiens
ttctcctccccttca

SEQ ID NO: 396661 - DNA, 15 bp, Homo sapiens
attctcctccccttc

SEQ ID NO: 396662 - DNA, 15 bp, Homo sapiens
cattctcctcccctt

SEQ ID NO: 396663 - DNA, 15 bp, Homo sapiens
tcattctcctcccct

SEQ ID NO: 396664 - DNA, 15 bp, Homo sapiens
atcattctcctcccc

SEQ ID NO: 396665 - DNA, 15 bp, Homo sapiens
catcattctcctccc

SEQ ID NO: 396666 - DNA, 15 bp, Homo sapiens
tcatcattctcctcc

SEQ ID NO: 396667 - DNA, 15 bp, Homo sapiens
gtcatcattctcctc

SEQ ID NO: 396668 - DNA, 15 bp, Homo sapiens
ggtcatcattctcct

SEQ ID NO: 396669 - DNA, 15 bp, Homo sapiens
gggtcatcattctcc

SEQ ID NO: 396670 - DNA, 15 bp, Homo sapiens
ggggtcatcattctc

SEQ ID NO: 396671 - DNA, 15 bp, Homo sapiens
tggggtcatcattct

SEQ ID NO: 396672 - DNA, 15 bp, Homo sapiens
ttggggtcatcattc

SEQ ID NO: 396673 - DNA, 15 bp, Homo sapiens
cttggggtcatcatt

SEQ ID NO: 396674 - DNA, 15 bp, Homo sapiens
tcttggggtcatcat

SEQ ID NO: 396675 - DNA, 15 bp, Homo sapiens
ttcttggggtcatca

SEQ ID NO: 396676 - DNA, 15 bp, Homo sapiens
attcttggggtcatc

SEQ ID NO: 396677 - DNA, 15 bp, Homo sapiens
cattcttggggtcat

SEQ ID NO: 396678 - DNA, 15 bp, Homo sapiens
acattcttggggtca

SEQ ID NO: 396679 - DNA, 15 bp, Homo sapiens
cacattcttggggtc

SEQ ID NO: 396680 - DNA, 15 bp, Homo sapiens
acacattcttggggt

SEQ ID NO: 396681 - DNA, 15 bp, Homo sapiens
gacacattcttgggg

SEQ ID NO: 396682 - DNA, 15 bp, Homo sapiens
agacacattcttggg

SEQ ID NO: 396683 - DNA, 15 bp, Homo sapiens
cagacacattcttgg

SEQ ID NO: 396684 - DNA, 15 bp, Homo sapiens
ccagacacattcttg

SEQ ID NO: 396685 - DNA, 15 bp, Homo sapiens
tccagacacattctt

SEQ ID NO: 396686 - DNA, 15 bp, Homo sapiens
gtccagacacattct

SEQ ID NO: 396687 - DNA, 15 bp, Homo sapiens
agtccagacacattc

SEQ ID NO: 396688 - DNA, 15 bp, Homo sapiens
gagtccagacacatt

SEQ ID NO: 396689 - DNA, 15 bp, Homo sapiens
tgagtccagacacat

SEQ ID NO: 396690 - DNA, 15 bp, Homo sapiens
ctgagtccagacaca

SEQ ID NO: 396691 - DNA, 15 bp, Homo sapiens
gctgagtccagacac

SEQ ID NO: 396692 - DNA, 15 bp, Homo sapiens
agctgagtccagaca

SEQ ID NO: 396693 - DNA, 15 bp, Homo sapiens
aagctgagtccagac

SEQ ID NO: 396694 - DNA, 15 bp, Homo sapiens
caagctgagtccaga

SEQ ID NO: 396695 - DNA, 15 bp, Homo sapiens
tcaagctgagtccag

SEQ ID NO: 396696 - DNA, 15 bp, Homo sapiens
ctcaagctgagtcca

SEQ ID NO: 396697 - DNA, 15 bp, Homo sapiens
tctcaagctgagtcc

SEQ ID NO: 396698 - DNA, 15 bp, Homo sapiens
ctctcaagctgagtc

SEQ ID NO: 396699 - DNA, 15 bp, Homo sapiens
cctctcaagctgagt

SEQ ID NO: 396700 - DNA, 15 bp, Homo sapiens
gcctctcaagctgag

SEQ ID NO: 396701 - DNA, 15 bp, Homo sapiens
tgcctctcaagctga

SEQ ID NO: 396702 - DNA, 15 bp, Homo sapiens
gtgcctctcaagctg

SEQ ID NO: 396703 - DNA, 15 bp, Homo sapiens
ggtgcctctcaagct

SEQ ID NO: 396704 - DNA, 15 bp, Homo sapiens
aggtgcctctcaagc

SEQ ID NO: 396705 - DNA, 15 bp, Homo sapiens
aaggtgcctctcaag

SEQ ID NO: 396706 - DNA, 15 bp, Homo sapiens
gaaggtgcctctcaa

SEQ ID NO: 396707 - DNA, 15 bp, Homo sapiens
ggaaggtgcctctca

SEQ ID NO: 396708 - DNA, 15 bp, Homo sapiens
tggaaggtgcctctc

SEQ ID NO: 396709 - DNA, 15 bp, Homo sapiens
gtggaaggtgcctct

SEQ ID NO: 396710 - DNA, 15 bp, Homo sapiens
agtggaaggtgcctc

SEQ ID NO: 396711 - DNA, 15 bp, Homo sapiens
gagtggaaggtgcct

SEQ ID NO: 396712 - DNA, 15 bp, Homo sapiens
tgagtggaaggtgcc

SEQ ID NO: 396713 - DNA, 15 bp, Homo sapiens
ttgagtggaaggtgc

SEQ ID NO: 396714 - DNA, 15 bp, Homo sapiens
gttgagtggaaggtg

SEQ ID NO: 396715 - DNA, 15 bp, Homo sapiens
ggttgagtggaaggt

SEQ ID NO: 396716 - DNA, 15 bp, Homo sapiens
gggttgagtggaagg

SEQ ID NO: 396717 - DNA, 15 bp, Homo sapiens
ggggttgagtggaag

SEQ ID NO: 396718 - DNA, 15 bp, Homo sapiens
tggggttgagtggaa

SEQ ID NO: 396719 - DNA, 15 bp, Homo sapiens
atggggttgagtgga

SEQ ID NO: 396720 - DNA, 15 bp, Homo sapiens
gatggggttgagtgg

SEQ ID NO: 396721 - DNA, 15 bp, Homo sapiens
tgatggggttgagtg

SEQ ID NO: 396722 - DNA, 15 bp, Homo sapiens
gtgatggggttgagt

SEQ ID NO: 396723 - DNA, 15 bp, Homo sapiens
ggtgatggggttgag

SEQ ID NO: 396724 - DNA, 15 bp, Homo sapiens
gggtgatggggttga

SEQ ID NO: 396725 - DNA, 15 bp, Homo sapiens
tgggtgatggggttg

SEQ ID NO: 396726 - DNA, 15 bp, Homo sapiens
gtgggtgatggggtt

SEQ ID NO: 396727 - DNA, 15 bp, Homo sapiens
agtgggtgatggggt

SEQ ID NO: 396728 - DNA, 15 bp, Homo sapiens
aagtgggtgatgggg

SEQ ID NO: 396729 - DNA, 15 bp, Homo sapiens
taagtgggtgatggg

SEQ ID NO: 396730 - DNA, 15 bp, Homo sapiens
ctaagtgggtgatgg

SEQ ID NO: 396731 - DNA, 15 bp, Homo sapiens
gctaagtgggtgatg

SEQ ID NO: 396732 - DNA, 15 bp, Homo sapiens
agctaagtgggtgat

SEQ ID NO: 396733 - DNA, 15 bp, Homo sapiens
gagctaagtgggtga

SEQ ID NO: 396734 - DNA, 15 bp, Homo sapiens
agagctaagtgggtg

SEQ ID NO: 396735 - DNA, 15 bp, Homo sapiens
aagagctaagtgggt

SEQ ID NO: 396736 - DNA, 15 bp, Homo sapiens
caagagctaagtggg

SEQ ID NO: 396737 - DNA, 15 bp, Homo sapiens
gcaagagctaagtgg

SEQ ID NO: 396738 - DNA, 15 bp, Homo sapiens
ggcaagagctaagtg

SEQ ID NO: 396739 - DNA, 15 bp, Homo sapiens
tggcaagagctaagt

SEQ ID NO: 396740 - DNA, 15 bp, Homo sapiens
gtggcaagagctaag

SEQ ID NO: 396741 - DNA, 15 bp, Homo sapiens
ggtggcaagagctaa

SEQ ID NO: 396742 - DNA, 15 bp, Homo sapiens
aggtggcaagagcta

SEQ ID NO: 396743 - DNA, 15 bp, Homo sapiens
aaggtggcaagagct

SEQ ID NO: 396744 - DNA, 15 bp, Homo sapiens
aaaggtggcaagagc

SEQ ID NO: 396745 - DNA, 15 bp, Homo sapiens
caaaggtggcaagag

SEQ ID NO: 396746 - DNA, 15 bp, Homo sapiens
tcaaaggtggcaaga

SEQ ID NO: 396747 - DNA, 15 bp, Homo sapiens
atcaaaggtggcaag

SEQ ID NO: 396748 - DNA, 15 bp, Homo sapiens
aatcaaaggtggcaa

SEQ ID NO: 396749 - DNA, 15 bp, Homo sapiens
aaatcaaaggtggca

SEQ ID NO: 396750 - DNA, 15 bp, Homo sapiens
caaatcaaaggtggc

SEQ ID NO: 396751 - DNA, 15 bp, Homo sapiens
tcaaatcaaaggtgg

SEQ ID NO: 396752 - DNA, 15 bp, Homo sapiens
ctcaaatcaaaggtg

SEQ ID NO: 396753 - DNA, 15 bp, Homo sapiens
tctcaaatcaaaggt

SEQ ID NO: 396754 - DNA, 15 bp, Homo sapiens
atctcaaatcaaagg

SEQ ID NO: 396755 - DNA, 15 bp, Homo sapiens
catctcaaatcaaag

SEQ ID NO: 396756 - DNA, 15 bp, Homo sapiens
acatctcaaatcaaa

SEQ ID NO: 396757 - DNA, 15 bp, Homo sapiens
cacatctcaaatcaa

SEQ ID NO: 396758 - DNA, 15 bp, Homo sapiens
acacatctcaaatca

SEQ ID NO: 396759 - DNA, 15 bp, Homo sapiens
aacacatctcaaatc

SEQ ID NO: 396760 - DNA, 15 bp, Homo sapiens
gaacacatctcaaat

SEQ ID NO: 396761 - DNA, 15 bp, Homo sapiens
ggaacacatctcaaa

SEQ ID NO: 396762 - DNA, 15 bp, Homo sapiens
gggaacacatctcaa

SEQ ID NO: 396763 - DNA, 15 bp, Homo sapiens
tgggaacacatctca

SEQ ID NO: 396764 - DNA, 15 bp, Homo sapiens
atgggaacacatctc

SEQ ID NO: 396765 - DNA, 15 bp, Homo sapiens
tatgggaacacatct

SEQ ID NO: 396766 - DNA, 15 bp, Homo sapiens
ctatgggaacacatc

SEQ ID NO: 396767 - DNA, 15 bp, Homo sapiens
tctatgggaacacat

SEQ ID NO: 396768 - DNA, 15 bp, Homo sapiens
atctatgggaacaca

SEQ ID NO: 396769 - DNA, 15 bp, Homo sapiens
catctatgggaacac

SEQ ID NO: 396770 - DNA, 15 bp, Homo sapiens
gcatctatgggaaca

SEQ ID NO: 396771 - DNA, 15 bp, Homo sapiens
ggcatctatgggaac

SEQ ID NO: 396772 - DNA, 15 bp, Homo sapiens
tggcatctatgggaa

SEQ ID NO: 396773 - DNA, 15 bp, Homo sapiens
ttggcatctatggga

SEQ ID NO: 396774 - DNA, 15 bp, Homo sapiens
gttggcatctatggg

SEQ ID NO: 396775 - DNA, 15 bp, Homo sapiens
tgttggcatctatgg

SEQ ID NO: 396776 - DNA, 15 bp, Homo sapiens
gtgttggcatctatg

SEQ ID NO: 396777 - DNA, 15 bp, Homo sapiens
tgtgttggcatctat

SEQ ID NO: 396778 - DNA, 15 bp, Homo sapiens
atgtgttggcatcta

SEQ ID NO: 396779 - DNA, 15 bp, Homo sapiens
aatgtgttggcatct

SEQ ID NO: 396780 - DNA, 15 bp, Homo sapiens
taatgtgttggcatc

SEQ ID NO: 396781 - DNA, 15 bp, Homo sapiens
ttaatgtgttggcat

SEQ ID NO: 396782 - DNA, 15 bp, Homo sapiens
gttaatgtgttggca

SEQ ID NO: 396783 - DNA, 15 bp, Homo sapiens
tgttaatgtgttggc

SEQ ID NO: 396784 - DNA, 15 bp, Homo sapiens
atgttaatgtgttgg

SEQ ID NO: 396785 - DNA, 15 bp, Homo sapiens
aatgttaatgtgttg

SEQ ID NO: 396786 - DNA, 15 bp, Homo sapiens
aaatgttaatgtgtt

SEQ ID NO: 396787 - DNA, 15 bp, Homo sapiens
aaaatgttaatgtgt

SEQ ID NO: 396788 - DNA, 15 bp, Homo sapiens
taaaatgttaatgtg

SEQ ID NO: 396789 - DNA, 15 bp, Homo sapiens
ataaaatgttaatgt

SEQ ID NO: 396790 - DNA, 15 bp, Homo sapiens
gataaaatgttaatg

SEQ ID NO: 396791 - DNA, 15 bp, Homo sapiens
agataaaatgttaat

SEQ ID NO: 396792 - DNA, 15 bp, Homo sapiens
aagataaaatgttaa

SEQ ID NO: 396793 - DNA, 15 bp, Homo sapiens
caagataaaatgtta

SEQ ID NO: 396794 - DNA, 15 bp, Homo sapiens
gcaagataaaatgtt

SEQ ID NO: 396795 - DNA, 15 bp, Homo sapiens
agcaagataaaatgt

SEQ ID NO: 396796 - DNA, 15 bp, Homo sapiens
gagcaagataaaatg

SEQ ID NO: 396797 - DNA, 15 bp, Homo sapiens
agagcaagataaaat

SEQ ID NO: 396798 - DNA, 15 bp, Homo sapiens
aagagcaagataaaa

SEQ ID NO: 396799 - DNA, 15 bp, Homo sapiens
gaagagcaagataaa

SEQ ID NO: 396800 - DNA, 15 bp, Homo sapiens
tgaagagcaagataa

SEQ ID NO: 396801 - DNA, 15 bp, Homo sapiens
ttgaagagcaagata

SEQ ID NO: 396802 - DNA, 15 bp, Homo sapiens
attgaagagcaagat

SEQ ID NO: 396803 - DNA, 15 bp, Homo sapiens
gattgaagagcaaga

SEQ ID NO: 396804 - DNA, 15 bp, Homo sapiens
agattgaagagcaag

SEQ ID NO: 396805 - DNA, 15 bp, Homo sapiens
aagattgaagagcaa

SEQ ID NO: 396806 - DNA, 15 bp, Homo sapiens
taagattgaagagca

SEQ ID NO: 396807 - DNA, 15 bp, Homo sapiens
ttaagattgaagagc

SEQ ID NO: 396808 - DNA, 15 bp, Homo sapiens
attaagattgaagag

SEQ ID NO: 396809 - DNA, 15 bp, Homo sapiens
gattaagattgaaga

SEQ ID NO: 396810 - DNA, 15 bp, Homo sapiens
ggattaagattgaag

SEQ ID NO: 396811 - DNA, 15 bp, Homo sapiens
gggattaagattgaa

SEQ ID NO: 396812 - DNA, 15 bp, Homo sapiens
agggattaagattga

SEQ ID NO: 396813 - DNA, 15 bp, Homo sapiens
aagggattaagattg

SEQ ID NO: 396814 - DNA, 15 bp, Homo sapiens
taagggattaagatt

SEQ ID NO: 396815 - DNA, 15 bp, Homo sapiens
ctaagggattaagat

SEQ ID NO: 396816 - DNA, 15 bp, Homo sapiens
tctaagggattaaga

SEQ ID NO: 396817 - DNA, 15 bp, Homo sapiens
gtctaagggattaag

SEQ ID NO: 396818 - DNA, 15 bp, Homo sapiens
cgtctaagggattaa

SEQ ID NO: 396819 - DNA, 15 bp, Homo sapiens
gcgtctaagggatta

SEQ ID NO: 396820 - DNA, 15 bp, Homo sapiens
ggcgtctaagggatt

SEQ ID NO: 396821 - DNA, 15 bp, Homo sapiens
aggcgtctaagggat

SEQ ID NO: 396822 - DNA, 15 bp, Homo sapiens
aaggcgtctaaggga

SEQ ID NO: 396823 - DNA, 15 bp, Homo sapiens
gaaggcgtctaaggg

SEQ ID NO: 396824 - DNA, 15 bp, Homo sapiens
ggaaggcgtctaagg

SEQ ID NO: 396825 - DNA, 15 bp, Homo sapiens
aggaaggcgtctaag

SEQ ID NO: 396826 - DNA, 15 bp, Homo sapiens
aaggaaggcgtctaa

SEQ ID NO: 396827 - DNA, 15 bp, Homo sapiens
aaaggaaggcgtcta

SEQ ID NO: 396828 - DNA, 15 bp, Homo sapiens
aaaaggaaggcgtct

SEQ ID NO: 396829 - DNA, 15 bp, Homo sapiens
caaaaggaaggcgtc

SEQ ID NO: 396830 - DNA, 15 bp, Homo sapiens
acaaaaggaaggcgt

SEQ ID NO: 396831 - DNA, 15 bp, Homo sapiens
aacaaaaggaaggcg

SEQ ID NO: 396832 - DNA, 15 bp, Homo sapiens
taacaaaaggaaggc

SEQ ID NO: 396833 - DNA, 15 bp, Homo sapiens
ttaacaaaaggaagg

SEQ ID NO: 396834 - DNA, 15 bp, Homo sapiens
gttaacaaaaggaag

SEQ ID NO: 396835 - DNA, 15 bp, Homo sapiens
agttaacaaaaggaa

SEQ ID NO: 396836 - DNA, 15 bp, Homo sapiens
tagttaacaaaagga

SEQ ID NO: 396837 - DNA, 15 bp, Homo sapiens
ttagttaacaaaagg

SEQ ID NO: 396838 - DNA, 15 bp, Homo sapiens
cttagttaacaaaag

SEQ ID NO: 396839 - DNA, 15 bp, Homo sapiens
acttagttaacaaaa

SEQ ID NO: 396840 - DNA, 15 bp, Homo sapiens
aacttagttaacaaa

SEQ ID NO: 396841 - DNA, 15 bp, Homo sapiens
aaacttagttaacaa

SEQ ID NO: 396842 - DNA, 15 bp, Homo sapiens
gaaacttagttaaca

SEQ ID NO: 396843 - DNA, 15 bp, Homo sapiens
agaaacttagttaac

SEQ ID NO: 396844 - DNA, 15 bp, Homo sapiens
cagaaacttagttaa

SEQ ID NO: 396845 - DNA, 15 bp, Homo sapiens
tcagaaacttagtta

SEQ ID NO: 396846 - DNA, 15 bp, Homo sapiens
ctcagaaacttagtt

SEQ ID NO: 396847 - DNA, 15 bp, Homo sapiens
actcagaaacttagt

SEQ ID NO: 396848 - DNA, 15 bp, Homo sapiens
gactcagaaacttag

SEQ ID NO: 396849 - DNA, 15 bp, Homo sapiens
ggactcagaaactta

SEQ ID NO: 396850 - DNA, 15 bp, Homo sapiens
aggactcagaaactt

SEQ ID NO: 396851 - DNA, 15 bp, Homo sapiens
taggactcagaaact

SEQ ID NO: 396852 - DNA, 15 bp, Homo sapiens
gtaggactcagaaac

SEQ ID NO: 396853 - DNA, 15 bp, Homo sapiens
agtaggactcagaaa

SEQ ID NO: 396854 - DNA, 15 bp, Homo sapiens
gagtaggactcagaa

SEQ ID NO: 396855 - DNA, 15 bp, Homo sapiens
tgagtaggactcaga

SEQ ID NO: 396856 - DNA, 15 bp, Homo sapiens
gtgagtaggactcag

SEQ ID NO: 396857 - DNA, 15 bp, Homo sapiens
tgtgagtaggactca

SEQ ID NO: 396858 - DNA, 15 bp, Homo sapiens
gtgtgagtaggactc

SEQ ID NO: 396859 - DNA, 15 bp, Homo sapiens
tgtgtgagtaggact

SEQ ID NO: 396860 - DNA, 15 bp, Homo sapiens
atgtgtgagtaggac

SEQ ID NO: 396861 - DNA, 15 bp, Homo sapiens
aatgtgtgagtagga

SEQ ID NO: 396862 - DNA, 15 bp, Homo sapiens
gaatgtgtgagtagg

SEQ ID NO: 396863 - DNA, 15 bp, Homo sapiens
ggaatgtgtgagtag

SEQ ID NO: 396864 - DNA, 15 bp, Homo sapiens
gggaatgtgtgagta

SEQ ID NO: 396865 - DNA, 15 bp, Homo sapiens
tgggaatgtgtgagt

SEQ ID NO: 396866 - DNA, 15 bp, Homo sapiens
atgggaatgtgtgag

SEQ ID NO: 396867 - DNA, 15 bp, Homo sapiens
catgggaatgtgtga

SEQ ID NO: 396868 - DNA, 15 bp, Homo sapiens
gcatgggaatgtgtg

SEQ ID NO: 396869 - DNA, 15 bp, Homo sapiens
tgcatgggaatgtgt

SEQ ID NO: 396870 - DNA, 15 bp, Homo sapiens
atgcatgggaatgtg

SEQ ID NO: 396871 - DNA, 15 bp, Homo sapiens
gatgcatgggaatgt

SEQ ID NO: 396872 - DNA, 15 bp, Homo sapiens
ggatgcatgggaatg

SEQ ID NO: 396873 - DNA, 15 bp, Homo sapiens
tggatgcatgggaat

SEQ ID NO: 396874 - DNA, 15 bp, Homo sapiens
ctggatgcatgggaa

SEQ ID NO: 396875 - DNA, 15 bp, Homo sapiens
actggatgcatggga

SEQ ID NO: 396876 - DNA, 15 bp, Homo sapiens
aactggatgcatggg

SEQ ID NO: 396877 - DNA, 15 bp, Homo sapiens
caactggatgcatgg

SEQ ID NO: 396878 - DNA, 15 bp, Homo sapiens
gcaactggatgcatg

SEQ ID NO: 396879 - DNA, 15 bp, Homo sapiens
tgcaactggatgcat

SEQ ID NO: 396880 - DNA, 15 bp, Homo sapiens
ctgcaactggatgca

SEQ ID NO: 396881 - DNA, 15 bp, Homo sapiens
tctgcaactggatgc

SEQ ID NO: 396882 - DNA, 15 bp, Homo sapiens
atctgcaactggatg

SEQ ID NO: 396883 - DNA, 15 bp, Homo sapiens
catctgcaactggat

SEQ ID NO: 396884 - DNA, 15 bp, Homo sapiens
tcatctgcaactgga

SEQ ID NO: 396885 - DNA, 15 bp, Homo sapiens
atcatctgcaactgg

SEQ ID NO: 396886 - DNA, 15 bp, Homo sapiens
gatcatctgcaactg

SEQ ID NO: 396887 - DNA, 15 bp, Homo sapiens
agatcatctgcaact

SEQ ID NO: 396888 - DNA, 15 bp, Homo sapiens
tagatcatctgcaac

SEQ ID NO: 396889 - DNA, 15 bp, Homo sapiens
atagatcatctgcaa

SEQ ID NO: 396890 - DNA, 15 bp, Homo sapiens
aatagatcatctgca

SEQ ID NO: 396891 - DNA, 15 bp, Homo sapiens
aaatagatcatctgc

SEQ ID NO: 396892 - DNA, 15 bp, Homo sapiens
aaaatagatcatctg

SEQ ID NO: 396893 - DNA, 15 bp, Homo sapiens
gaaaatagatcatct

SEQ ID NO: 396894 - DNA, 15 bp, Homo sapiens
tgaaaatagatcatc

SEQ ID NO: 396895 - DNA, 15 bp, Homo sapiens
ttgaaaatagatcat

SEQ ID NO: 396896 - DNA, 15 bp, Homo sapiens
attgaaaatagatca

SEQ ID NO: 396897 - DNA, 15 bp, Homo sapiens
aattgaaaatagatc

SEQ ID NO: 396898 - DNA, 15 bp, Homo sapiens
aaattgaaaatagat

SEQ ID NO: 396899 - DNA, 15 bp, Homo sapiens
gaaattgaaaataga

SEQ ID NO: 396900 - DNA, 15 bp, Homo sapiens
tgaaattgaaaatag

SEQ ID NO: 396901 - DNA, 15 bp, Homo sapiens
ttgaaattgaaaata

SEQ ID NO: 396902 - DNA, 15 bp, Homo sapiens
attgaaattgaaaat

SEQ ID NO: 396903 - DNA, 15 bp, Homo sapiens
tattgaaattgaaaa

SEQ ID NO: 396904 - DNA, 15 bp, Homo sapiens
ttattgaaattgaaa

SEQ ID NO: 396905 - DNA, 15 bp, Homo sapiens
gttattgaaattgaa

SEQ ID NO: 396906 - DNA, 15 bp, Homo sapiens
ggttattgaaattga

SEQ ID NO: 396907 - DNA, 15 bp, Homo sapiens
aggttattgaaattg

SEQ ID NO: 396908 - DNA, 15 bp, Homo sapiens
taggttattgaaatt

SEQ ID NO: 396909 - DNA, 15 bp, Homo sapiens
ataggttattgaaat

SEQ ID NO: 396910 - DNA, 15 bp, Homo sapiens
gataggttattgaaa

SEQ ID NO: 396911 - DNA, 15 bp, Homo sapiens
ggataggttattgaa

SEQ ID NO: 396912 - DNA, 15 bp, Homo sapiens
aggataggttattga

SEQ ID NO: 396913 - DNA, 15 bp, Homo sapiens
gaggataggttattg

SEQ ID NO: 396914 - DNA, 15 bp, Homo sapiens
tgaggataggttatt

SEQ ID NO: 396915 - DNA, 15 bp, Homo sapiens
ttgaggataggttat

SEQ ID NO: 396916 - DNA, 15 bp, Homo sapiens
attgaggataggtta

SEQ ID NO: 396917 - DNA, 15 bp, Homo sapiens
tattgaggataggtt

SEQ ID NO: 396918 - DNA, 15 bp, Homo sapiens
ttattgaggataggt

SEQ ID NO: 396919 - DNA, 15 bp, Homo sapiens
attattgaggatagg

SEQ ID NO: 396920 - DNA, 15 bp, Homo sapiens
cattattgaggatag

SEQ ID NO: 396921 - DNA, 15 bp, Homo sapiens
tcattattgaggata

SEQ ID NO: 396922 - DNA, 15 bp, Homo sapiens
atcattattgaggat

SEQ ID NO: 396923 - DNA, 15 bp, Homo sapiens
tatcattattgagga

SEQ ID NO: 396924 - DNA, 15 bp, Homo sapiens
ctatcattattgagg

SEQ ID NO: 396925 - DNA, 15 bp, Homo sapiens
actatcattattgag

SEQ ID NO: 396926 - DNA, 15 bp, Homo sapiens
aactatcattattga

SEQ ID NO: 396927 - DNA, 15 bp, Homo sapiens
gaactatcattattg

SEQ ID NO: 396928 - DNA, 15 bp, Homo sapiens
tgaactatcattatt

SEQ ID NO: 396929 - DNA, 15 bp, Homo sapiens
ctgaactatcattat

SEQ ID NO: 396930 - DNA, 15 bp, Homo sapiens
tctgaactatcatta

SEQ ID NO: 396931 - DNA, 15 bp, Homo sapiens
ttctgaactatcatt

SEQ ID NO: 396932 - DNA, 15 bp, Homo sapiens
attctgaactatcat

SEQ ID NO: 396933 - DNA, 15 bp, Homo sapiens
tattctgaactatca

SEQ ID NO: 396934 - DNA, 15 bp, Homo sapiens
ttattctgaactatc

SEQ ID NO: 396935 - DNA, 15 bp, Homo sapiens
cttattctgaactat

SEQ ID NO: 396936 - DNA, 15 bp, Homo sapiens
tcttattctgaacta

SEQ ID NO: 396937 - DNA, 15 bp, Homo sapiens
ttcttattctgaact

SEQ ID NO: 396938 - DNA, 15 bp, Homo sapiens
gttcttattctgaac

SEQ ID NO: 396939 - DNA, 15 bp, Homo sapiens
tgttcttattctgaa

SEQ ID NO: 396940 - DNA, 15 bp, Homo sapiens
atgttcttattctga

SEQ ID NO: 396941 - DNA, 15 bp, Homo sapiens
tatgttcttattctg

SEQ ID NO: 396942 - DNA, 15 bp, Homo sapiens
atatgttcttattct

SEQ ID NO: 396943 - DNA, 15 bp, Homo sapiens
tatatgttcttattc

SEQ ID NO: 396944 - DNA, 15 bp, Homo sapiens
atatatgttcttatt

SEQ ID NO: 396945 - DNA, 15 bp, Homo sapiens
gatatatgttcttat

SEQ ID NO: 396946 - DNA, 15 bp, Homo sapiens
tgatatatgttctta

SEQ ID NO: 396947 - DNA, 15 bp, Homo sapiens
atgatatatgttctt

SEQ ID NO: 396948 - DNA, 15 bp, Homo sapiens
aatgatatatgttct

SEQ ID NO: 396949 - DNA, 15 bp, Homo sapiens
caatgatatatgttc

SEQ ID NO: 396950 - DNA, 15 bp, Homo sapiens
tcaatgatatatgtt

SEQ ID NO: 396951 - DNA, 15 bp, Homo sapiens
atcaatgatatatgt

SEQ ID NO: 396952 - DNA, 15 bp, Homo sapiens
aatcaatgatatatg

SEQ ID NO: 396953 - DNA, 15 bp, Homo sapiens
aaatcaatgatatat

SEQ ID NO: 396954 - DNA, 15 bp, Homo sapiens
aaaatcaatgatata

SEQ ID NO: 396955 - DNA, 15 bp, Homo sapiens
taaaatcaatgatat

SEQ ID NO: 396956 - DNA, 15 bp, Homo sapiens
ataaaatcaatgata

SEQ ID NO: 396957 - DNA, 15 bp, Homo sapiens
tataaaatcaatgat

SEQ ID NO: 396958 - DNA, 15 bp, Homo sapiens
gtataaaatcaatga

SEQ ID NO: 396959 - DNA, 15 bp, Homo sapiens
agtataaaatcaatg

SEQ ID NO: 396960 - DNA, 15 bp, Homo sapiens
aagtataaaatcaat

SEQ ID NO: 396961 - DNA, 15 bp, Homo sapiens
aaagtataaaatcaa

SEQ ID NO: 396962 - DNA, 15 bp, Homo sapiens
aaaagtataaaatca

SEQ ID NO: 396963 - DNA, 15 bp, Homo sapiens
taaaagtataaaatc

SEQ ID NO: 396964 - DNA, 15 bp, Homo sapiens
ataaaagtataaaat

SEQ ID NO: 396965 - DNA, 15 bp, Homo sapiens
tataaaagtataaaa

SEQ ID NO: 396966 - DNA, 15 bp, Homo sapiens
atataaaagtataaa

SEQ ID NO: 396967 - DNA, 15 bp, Homo sapiens
tatataaaagtataa

SEQ ID NO: 396968 - DNA, 15 bp, Homo sapiens
gtatataaaagtata

SEQ ID NO: 396969 - DNA, 15 bp, Homo sapiens
tgtatataaaagtat

SEQ ID NO: 396970 - DNA, 15 bp, Homo sapiens
gtgtatataaaagta

SEQ ID NO: 396971 - DNA, 15 bp, Homo sapiens
agtgtatataaaagt

SEQ ID NO: 396972 - DNA, 15 bp, Homo sapiens
aagtgtatataaaag

SEQ ID NO: 396973 - DNA, 15 bp, Homo sapiens
caagtgtatataaaa

SEQ ID NO: 396974 - DNA, 15 bp, Homo sapiens
ccaagtgtatataaa

SEQ ID NO: 396975 - DNA, 15 bp, Homo sapiens
gccaagtgtatataa

SEQ ID NO: 396976 - DNA, 15 bp, Homo sapiens
ggccaagtgtatata

SEQ ID NO: 396977 - DNA, 15 bp, Homo sapiens
aggccaagtgtatat

SEQ ID NO: 396978 - DNA, 15 bp, Homo sapiens
aaggccaagtgtata

SEQ ID NO: 396979 - DNA, 15 bp, Homo sapiens
aaaggccaagtgtat

SEQ ID NO: 396980 - DNA, 15 bp, Homo sapiens
caaaggccaagtgta

SEQ ID NO: 396981 - DNA, 15 bp, Homo sapiens
gcaaaggccaagtgt

SEQ ID NO: 396982 - DNA, 15 bp, Homo sapiens
agcaaaggccaagtg

SEQ ID NO: 396983 - DNA, 15 bp, Homo sapiens
gagcaaaggccaagt

SEQ ID NO: 396984 - DNA, 15 bp, Homo sapiens
tgagcaaaggccaag

SEQ ID NO: 396985 - DNA, 15 bp, Homo sapiens
atgagcaaaggccaa

SEQ ID NO: 396986 - DNA, 15 bp, Homo sapiens
catgagcaaaggcca

SEQ ID NO: 396987 - DNA, 15 bp, Homo sapiens
acatgagcaaaggcc

SEQ ID NO: 396988 - DNA, 15 bp, Homo sapiens
aacatgagcaaaggc

SEQ ID NO: 396989 - DNA, 15 bp, Homo sapiens
taacatgagcaaagg

SEQ ID NO: 396990 - DNA, 15 bp, Homo sapiens
ataacatgagcaaag

SEQ ID NO: 396991 - DNA, 15 bp, Homo sapiens
gataacatgagcaaa

SEQ ID NO: 396992 - DNA, 15 bp, Homo sapiens
agataacatgagcaa

SEQ ID NO: 396993 - DNA, 15 bp, Homo sapiens
tagataacatgagca

SEQ ID NO: 396994 - DNA, 15 bp, Homo sapiens
ttagataacatgagc

SEQ ID NO: 396995 - DNA, 15 bp, Homo sapiens
cttagataacatgag

SEQ ID NO: 396996 - DNA, 15 bp, Homo sapiens
gcttagataacatga

SEQ ID NO: 396997 - DNA, 15 bp, Homo sapiens
agcttagataacatg

SEQ ID NO: 396998 - DNA, 15 bp, Homo sapiens
cagcttagataacat

SEQ ID NO: 396999 - DNA, 15 bp, Homo sapiens
ccagcttagataaca

SEQ ID NO: 397000 - DNA, 15 bp, Homo sapiens
tccagcttagataac

SEQ ID NO: 397001 - DNA, 15 bp, Homo sapiens
gtccagcttagataa

SEQ ID NO: 397002 - DNA, 15 bp, Homo sapiens
tgtccagcttagata

SEQ ID NO: 397003 - DNA, 15 bp, Homo sapiens
ttgtccagcttagat

SEQ ID NO: 397004 - DNA, 15 bp, Homo sapiens
gttgtccagcttaga

SEQ ID NO: 397005 - DNA, 15 bp, Homo sapiens
tgttgtccagcttag

SEQ ID NO: 397006 - DNA, 15 bp, Homo sapiens
ttgttgtccagctta

SEQ ID NO: 397007 - DNA, 15 bp, Homo sapiens
attgttgtccagctt

SEQ ID NO: 397008 - DNA, 15 bp, Homo sapiens
gattgttgtccagct

SEQ ID NO: 397009 - DNA, 15 bp, Homo sapiens
tgattgttgtccagc

SEQ ID NO: 397010 - DNA, 15 bp, Homo sapiens
atgattgttgtccag

SEQ ID NO: 397011 - DNA, 15 bp, Homo sapiens
tatgattgttgtcca

SEQ ID NO: 397012 - DNA, 15 bp, Homo sapiens
atatgattgttgtcc

SEQ ID NO: 397013 - DNA, 15 bp, Homo sapiens
aatatgattgttgtc

SEQ ID NO: 397014 - DNA, 15 bp, Homo sapiens
taatatgattgttgt

SEQ ID NO: 397015 - DNA, 15 bp, Homo sapiens
ctaatatgattgttg

SEQ ID NO: 397016 - DNA, 15 bp, Homo sapiens
tctaatatgattgtt

SEQ ID NO: 397017 - DNA, 15 bp, Homo sapiens
ttctaatatgattgt

SEQ ID NO: 397018 - DNA, 15 bp, Homo sapiens
tttctaatatgattg

SEQ ID NO: 397019 - DNA, 15 bp, Homo sapiens
ctttctaatatgatt

SEQ ID NO: 397020 - DNA, 15 bp, Homo sapiens
cctttctaatatgat

SEQ ID NO: 397021 - DNA, 15 bp, Homo sapiens
gcctttctaatatga

SEQ ID NO: 397022 - DNA, 15 bp, Homo sapiens
tgcctttctaatatg

SEQ ID NO: 397023 - DNA, 15 bp, Homo sapiens
atgcctttctaatat

SEQ ID NO: 397024 - DNA, 15 bp, Homo sapiens
aatgcctttctaata

SEQ ID NO: 397025 - DNA, 15 bp, Homo sapiens
taatgcctttctaat

SEQ ID NO: 397026 - DNA, 15 bp, Homo sapiens
ataatgcctttctaa

SEQ ID NO: 397027 - DNA, 15 bp, Homo sapiens
aataatgcctttcta

SEQ ID NO: 397028 - DNA, 15 bp, Homo sapiens
aaataatgcctttct

SEQ ID NO: 397029 - DNA, 15 bp, Homo sapiens
ggaagactgaggctt

SEQ ID NO: 397030 - DNA, 15 bp, Homo sapiens
aggaagactgaggct

SEQ ID NO: 397031 - DNA, 15 bp, Homo sapiens
taggaagactgaggc

SEQ ID NO: 397032 - DNA, 15 bp, Homo sapiens
ataggaagactgagg

SEQ ID NO: 397033 - DNA, 15 bp, Homo sapiens
cataggaagactgag

SEQ ID NO: 397034 - DNA, 15 bp, Homo sapiens
ccataggaagactga

SEQ ID NO: 397035 - DNA, 15 bp, Homo sapiens
tccataggaagactg

SEQ ID NO: 397036 - DNA, 15 bp, Homo sapiens
ttccataggaagact

SEQ ID NO: 397037 - DNA, 15 bp, Homo sapiens
attccataggaagac

SEQ ID NO: 397038 - DNA, 15 bp, Homo sapiens
tattccataggaaga

SEQ ID NO: 397039 - DNA, 15 bp, Homo sapiens
ctattccataggaag

SEQ ID NO: 397040 - DNA, 15 bp, Homo sapiens
gctattccataggaa

SEQ ID NO: 397041 - DNA, 15 bp, Homo sapiens
agctattccatagga

SEQ ID NO: 397042 - DNA, 15 bp, Homo sapiens
tagctattccatagg

SEQ ID NO: 397043 - DNA, 15 bp, Homo sapiens
ttagctattccatag

SEQ ID NO: 397044 - DNA, 15 bp, Homo sapiens
cttagctattccata

SEQ ID NO: 397045 - DNA, 15 bp, Homo sapiens
acttagctattccat

SEQ ID NO: 397046 - DNA, 15 bp, Homo sapiens
tacttagctattcca

SEQ ID NO: 397047 - DNA, 15 bp, Homo sapiens
atacttagctattcc

SEQ ID NO: 397048 - DNA, 15 bp, Homo sapiens
gatacttagctattc

SEQ ID NO: 397049 - DNA, 15 bp, Homo sapiens
tgatacttagctatt

SEQ ID NO: 397050 - DNA, 15 bp, Homo sapiens
atgatacttagctat

SEQ ID NO: 397051 - DNA, 15 bp, Homo sapiens
catgatacttagcta

SEQ ID NO: 397052 - DNA, 15 bp, Homo sapiens
tcatgatacttagct

SEQ ID NO: 397053 - DNA, 15 bp, Homo sapiens
ttcatgatacttagc

SEQ ID NO: 397054 - DNA, 15 bp, Homo sapiens
gttcatgatacttag

SEQ ID NO: 397055 - DNA, 15 bp, Homo sapiens
tgttcatgatactta

SEQ ID NO: 397056 - DNA, 15 bp, Homo sapiens
ctgttcatgatactt

SEQ ID NO: 397057 - DNA, 15 bp, Homo sapiens
tctgttcatgatact

SEQ ID NO: 397058 - DNA, 15 bp, Homo sapiens
ttctgttcatgatac

SEQ ID NO: 397059 - DNA, 15 bp, Homo sapiens
attctgttcatgata

SEQ ID NO: 397060 - DNA, 15 bp, Homo sapiens
tattctgttcatgat

SEQ ID NO: 397061 - DNA, 15 bp, Homo sapiens
atattctgttcatga

SEQ ID NO: 397062 - DNA, 15 bp, Homo sapiens
aatattctgttcatg

SEQ ID NO: 397063 - DNA, 15 bp, Homo sapiens
caatattctgttcat

SEQ ID NO: 397064 - DNA, 15 bp, Homo sapiens
ccaatattctgttca

SEQ ID NO: 397065 - DNA, 15 bp, Homo sapiens
accaatattctgttc

SEQ ID NO: 397066 - DNA, 15 bp, Homo sapiens
taccaatattctgtt

SEQ ID NO: 397067 - DNA, 15 bp, Homo sapiens
ctaccaatattctgt

SEQ ID NO: 397068 - DNA, 15 bp, Homo sapiens
tctaccaatattctg

SEQ ID NO: 397069 - DNA, 15 bp, Homo sapiens
gtctaccaatattct

SEQ ID NO: 397070 - DNA, 15 bp, Homo sapiens
tgtctaccaatattc

SEQ ID NO: 397071 - DNA, 15 bp, Homo sapiens
atgtctaccaatatt

SEQ ID NO: 397072 - DNA, 15 bp, Homo sapiens
tatgtctaccaatat

SEQ ID NO: 397073 - DNA, 15 bp, Homo sapiens
atatgtctaccaata

SEQ ID NO: 397074 - DNA, 15 bp, Homo sapiens
tatatgtctaccaat

SEQ ID NO: 397075 - DNA, 15 bp, Homo sapiens
ttatatgtctaccaa

SEQ ID NO: 397076 - DNA, 15 bp, Homo sapiens
tttatatgtctacca

SEQ ID NO: 397077 - DNA, 15 bp, Homo sapiens
gtttatatgtctacc

SEQ ID NO: 397078 - DNA, 15 bp, Homo sapiens
tgtttatatgtctac

SEQ ID NO: 397079 - DNA, 15 bp, Homo sapiens
ctgtttatatgtcta

SEQ ID NO: 397080 - DNA, 15 bp, Homo sapiens
gctgtttatatgtct

SEQ ID NO: 397081 - DNA, 15 bp, Homo sapiens
tgctgtttatatgtc

SEQ ID NO: 397082 - DNA, 15 bp, Homo sapiens
ttgctgtttatatgt

SEQ ID NO: 397083 - DNA, 15 bp, Homo sapiens
tttgctgtttatatg

SEQ ID NO: 397084 - DNA, 15 bp, Homo sapiens
ttttgctgtttatat

SEQ ID NO: 397085 - DNA, 15 bp, Homo sapiens
cttttgctgtttata

SEQ ID NO: 397086 - DNA, 15 bp, Homo sapiens
acttttgctgtttat

SEQ ID NO: 397087 - DNA, 15 bp, Homo sapiens
gacttttgctgttta

SEQ ID NO: 397088 - DNA, 15 bp, Homo sapiens
tgacttttgctgttt

SEQ ID NO: 397089 - DNA, 15 bp, Homo sapiens
ctgacttttgctgtt

SEQ ID NO: 397090 - DNA, 15 bp, Homo sapiens
tctgacttttgctgt

SEQ ID NO: 397091 - DNA, 15 bp, Homo sapiens
gtctgacttttgctg

SEQ ID NO: 397092 - DNA, 15 bp, Homo sapiens
tgtctgacttttgct

SEQ ID NO: 397093 - DNA, 15 bp, Homo sapiens
ctgtctgacttttgc

SEQ ID NO: 397094 - DNA, 15 bp, Homo sapiens
tctgtctgacttttg

SEQ ID NO: 397095 - DNA, 15 bp, Homo sapiens
ttctgtctgactttt

SEQ ID NO: 397096 - DNA, 15 bp, Homo sapiens
tttctgtctgacttt

SEQ ID NO: 397097 - DNA, 15 bp, Homo sapiens
atttctgtctgactt

SEQ ID NO: 397098 - DNA, 15 bp, Homo sapiens
catttctgtctgact

SEQ ID NO: 397099 - DNA, 15 bp, Homo sapiens
tcatttctgtctgac

SEQ ID NO: 397100 - DNA, 15 bp, Homo sapiens
ctcatttctgtctga

SEQ ID NO: 397101 - DNA, 15 bp, Homo sapiens
cctcatttctgtctg

SEQ ID NO: 397102 - DNA, 15 bp, Homo sapiens
tcctcatttctgtct

SEQ ID NO: 397103 - DNA, 15 bp, Homo sapiens
ttcctcatttctgtc

SEQ ID NO: 397104 - DNA, 15 bp, Homo sapiens
attcctcatttctgt

SEQ ID NO: 397105 - DNA, 15 bp, Homo sapiens
tattcctcatttctg

SEQ ID NO: 397106 - DNA, 15 bp, Homo sapiens
atattcctcatttct

SEQ ID NO: 397107 - DNA, 15 bp, Homo sapiens
aatattcctcatttc

SEQ ID NO: 397108 - DNA, 15 bp, Homo sapiens
aaatattcctcattt

SEQ ID NO: 397109 - DNA, 15 bp, Homo sapiens
aaaatattcctcatt

SEQ ID NO: 397110 - DNA, 15 bp, Homo sapiens
taaaatattcctcat

SEQ ID NO: 397111 - DNA, 15 bp, Homo sapiens
ataaaatattcctca

SEQ ID NO: 397112 - DNA, 15 bp, Homo sapiens
aataaaatattcctc

SEQ ID NO: 397113 - DNA, 15 bp, Homo sapiens
caataaaatattcct

SEQ ID NO: 397114 - DNA, 15 bp, Homo sapiens
ccaataaaatattcc

SEQ ID NO: 397115 - DNA, 15 bp, Homo sapiens
tccaataaaatattc

SEQ ID NO: 397116 - DNA, 15 bp, Homo sapiens
ttccaataaaatatt

SEQ ID NO: 397117 - DNA, 15 bp, Homo sapiens
tttccaataaaatat

SEQ ID NO: 397118 - DNA, 15 bp, Homo sapiens
gtttccaataaaata

SEQ ID NO: 397119 - DNA, 15 bp, Homo sapiens
agtttccaataaaat

SEQ ID NO: 397120 - DNA, 15 bp, Homo sapiens
cagtttccaataaaa

SEQ ID NO: 397121 - DNA, 15 bp, Homo sapiens
ccagtttccaataaa

SEQ ID NO: 397122 - DNA, 15 bp, Homo sapiens
tccagtttccaataa

SEQ ID NO: 397123 - DNA, 15 bp, Homo sapiens
ctccagtttccaata

SEQ ID NO: 397124 - DNA, 15 bp, Homo sapiens
cctccagtttccaat

SEQ ID NO: 397125 - DNA, 15 bp, Homo sapiens
tcctccagtttccaa

SEQ ID NO: 397126 - DNA, 15 bp, Homo sapiens
ttcctccagtttcca

SEQ ID NO: 397127 - DNA, 15 bp, Homo sapiens
tttcctccagtttcc

SEQ ID NO: 397128 - DNA, 15 bp, Homo sapiens
ctttcctccagtttc

SEQ ID NO: 397129 - DNA, 15 bp, Homo sapiens
cctttcctccagttt

SEQ ID NO: 397130 - DNA, 15 bp, Homo sapiens
acctttcctccagtt

SEQ ID NO: 397131 - DNA, 15 bp, Homo sapiens
cacctttcctccagt

SEQ ID NO: 397132 - DNA, 15 bp, Homo sapiens
tcacctttcctccag

SEQ ID NO: 397133 - DNA, 15 bp, Homo sapiens
atcacctttcctcca

SEQ ID NO: 397134 - DNA, 15 bp, Homo sapiens
gatcacctttcctcc

SEQ ID NO: 397135 - DNA, 15 bp, Homo sapiens
agatcacctttcctc

SEQ ID NO: 397136 - DNA, 15 bp, Homo sapiens
aagatcacctttcct

SEQ ID NO: 397137 - DNA, 15 bp, Homo sapiens
aaagatcacctttcc

SEQ ID NO: 397138 - DNA, 15 bp, Homo sapiens
aaaagatcacctttc

SEQ ID NO: 397139 - DNA, 15 bp, Homo sapiens
aaaaagatcaccttt

SEQ ID NO: 397140 - DNA, 15 bp, Homo sapiens
aaaaaagatcacctt

SEQ ID NO: 397141 - DNA, 15 bp, Homo sapiens
taaaaaagatcacct

SEQ ID NO: 397142 - DNA, 15 bp, Homo sapiens
ataaaaaagatcacc

SEQ ID NO: 397143 - DNA, 15 bp, Homo sapiens
tataaaaaagatcac

SEQ ID NO: 397144 - DNA, 15 bp, Homo sapiens
ttataaaaaagatca

SEQ ID NO: 397145 - DNA, 15 bp, Homo sapiens
tttataaaaaagatc

SEQ ID NO: 397146 - DNA, 15 bp, Homo sapiens
ctttataaaaaagat

SEQ ID NO: 397147 - DNA, 15 bp, Homo sapiens
actttataaaaaaga

SEQ ID NO: 397148 - DNA, 15 bp, Homo sapiens
cactttataaaaaag

SEQ ID NO: 397149 - DNA, 15 bp, Homo sapiens
ccactttataaaaaa

SEQ ID NO: 397150 - DNA, 15 bp, Homo sapiens
gccactttataaaaa

SEQ ID NO: 397151 - DNA, 15 bp, Homo sapiens
tgccactttataaaa

SEQ ID NO: 397152 - DNA, 15 bp, Homo sapiens
ttgccactttataaa

SEQ ID NO: 397153 - DNA, 15 bp, Homo sapiens
tttgccactttataa

SEQ ID NO: 397154 - DNA, 15 bp, Homo sapiens
atttgccactttata

SEQ ID NO: 397155 - DNA, 15 bp, Homo sapiens
tatttgccactttat

SEQ ID NO: 397156 - DNA, 15 bp, Homo sapiens
ttatttgccacttta

SEQ ID NO: 397157 - DNA, 15 bp, Homo sapiens
attatttgccacttt

SEQ ID NO: 397158 - DNA, 15 bp, Homo sapiens
aattatttgccactt

SEQ ID NO: 397159 - DNA, 15 bp, Homo sapiens
aaattatttgccact

SEQ ID NO: 397160 - DNA, 15 bp, Homo sapiens
caaattatttgccac

SEQ ID NO: 397161 - DNA, 15 bp, Homo sapiens
ccaaattatttgcca

SEQ ID NO: 397162 - DNA, 15 bp, Homo sapiens
gccaaattatttgcc

SEQ ID NO: 397163 - DNA, 15 bp, Homo sapiens
agccaaattatttgc

SEQ ID NO: 397164 - DNA, 15 bp, Homo sapiens
cagccaaattatttg

SEQ ID NO: 397165 - DNA, 15 bp, Homo sapiens
tcagccaaattattt

SEQ ID NO: 397166 - DNA, 15 bp, Homo sapiens
ttcagccaaattatt

SEQ ID NO: 397167 - DNA, 15 bp, Homo sapiens
attcagccaaattat

SEQ ID NO: 397168 - DNA, 15 bp, Homo sapiens
tattcagccaaatta

SEQ ID NO: 397169 - DNA, 15 bp, Homo sapiens
ctattcagccaaatt

SEQ ID NO: 397170 - DNA, 15 bp, Homo sapiens
actattcagccaaat

SEQ ID NO: 397171 - DNA, 15 bp, Homo sapiens
cactattcagccaaa

SEQ ID NO: 397172 - DNA, 15 bp, Homo sapiens
acactattcagccaa

SEQ ID NO: 397173 - DNA, 15 bp, Homo sapiens
aacactattcagcca

SEQ ID NO: 397174 - DNA, 15 bp, Homo sapiens
aaacactattcagcc

SEQ ID NO: 397175 - DNA, 15 bp, Homo sapiens
taaacactattcagc

SEQ ID NO: 397176 - DNA, 15 bp, Homo sapiens
ataaacactattcag

SEQ ID NO: 397177 - DNA, 15 bp, Homo sapiens
cataaacactattca

SEQ ID NO: 397178 - DNA, 15 bp, Homo sapiens
acataaacactattc

SEQ ID NO: 397179 - DNA, 15 bp, Homo sapiens
aacataaacactatt

SEQ ID NO: 397180 - DNA, 15 bp, Homo sapiens
gaacataaacactat

SEQ ID NO: 397181 - DNA, 15 bp, Homo sapiens
agaacataaacacta

SEQ ID NO: 397182 - DNA, 15 bp, Homo sapiens
tagaacataaacact

SEQ ID NO: 397183 - DNA, 15 bp, Homo sapiens
ctagaacataaacac

SEQ ID NO: 397184 - DNA, 15 bp, Homo sapiens
actagaacataaaca

SEQ ID NO: 397185 - DNA, 15 bp, Homo sapiens
cactagaacataaac

SEQ ID NO: 397186 - DNA, 15 bp, Homo sapiens
gcactagaacataaa

SEQ ID NO: 397187 - DNA, 15 bp, Homo sapiens
agcactagaacataa

SEQ ID NO: 397188 - DNA, 15 bp, Homo sapiens
aagcactagaacata

SEQ ID NO: 397189 - DNA, 15 bp, Homo sapiens
aaagcactagaacat

SEQ ID NO: 397190 - DNA, 15 bp, Homo sapiens
caaagcactagaaca

SEQ ID NO: 397191 - DNA, 15 bp, Homo sapiens
acaaagcactagaac

SEQ ID NO: 397192 - DNA, 15 bp, Homo sapiens
cacaaagcactagaa

SEQ ID NO: 397193 - DNA, 15 bp, Homo sapiens
ccacaaagcactaga

SEQ ID NO: 397194 - DNA, 15 bp, Homo sapiens
tccacaaagcactag

SEQ ID NO: 397195 - DNA, 15 bp, Homo sapiens
ttccacaaagcacta

SEQ ID NO: 397196 - DNA, 15 bp, Homo sapiens
cttccacaaagcact

SEQ ID NO: 397197 - DNA, 15 bp, Homo sapiens
tcttccacaaagcac

SEQ ID NO: 397198 - DNA, 15 bp, Homo sapiens
atcttccacaaagca

SEQ ID NO: 397199 - DNA, 15 bp, Homo sapiens
tatcttccacaaagc

SEQ ID NO: 397200 - DNA, 15 bp, Homo sapiens
ctatcttccacaaag

SEQ ID NO: 397201 - DNA, 15 bp, Homo sapiens
tctatcttccacaaa

SEQ ID NO: 397202 - DNA, 15 bp, Homo sapiens
ttctatcttccacaa

SEQ ID NO: 397203 - DNA, 15 bp, Homo sapiens
gttctatcttccaca

SEQ ID NO: 397204 - DNA, 15 bp, Homo sapiens
agttctatcttccac

SEQ ID NO: 397205 - DNA, 15 bp, Homo sapiens
aagttctatcttcca

SEQ ID NO: 397206 - DNA, 15 bp, Homo sapiens
caagttctatcttcc

SEQ ID NO: 397207 - DNA, 15 bp, Homo sapiens
gcaagttctatcttc

SEQ ID NO: 397208 - DNA, 15 bp, Homo sapiens
tgcaagttctatctt

SEQ ID NO: 397209 - DNA, 15 bp, Homo sapiens
ttgcaagttctatct

SEQ ID NO: 397210 - DNA, 15 bp, Homo sapiens
cttgcaagttctatc

SEQ ID NO: 397211 - DNA, 15 bp, Homo sapiens
gcttgcaagttctat

SEQ ID NO: 397212 - DNA, 15 bp, Homo sapiens
agcttgcaagttcta

SEQ ID NO: 397213 - DNA, 15 bp, Homo sapiens
aagcttgcaagttct

SEQ ID NO: 397214 - DNA, 15 bp, Homo sapiens
aaagcttgcaagttc

SEQ ID NO: 397215 - DNA, 15 bp, Homo sapiens
caaagcttgcaagtt

SEQ ID NO: 397216 - DNA, 15 bp, Homo sapiens
tcaaagcttgcaagt

SEQ ID NO: 397217 - DNA, 15 bp, Homo sapiens
atcaaagcttgcaag

SEQ ID NO: 397218 - DNA, 15 bp, Homo sapiens
tatcaaagcttgcaa

SEQ ID NO: 397219 - DNA, 15 bp, Homo sapiens
atatcaaagcttgca

SEQ ID NO: 397220 - DNA, 15 bp, Homo sapiens
aatatcaaagcttgc

SEQ ID NO: 397221 - DNA, 15 bp, Homo sapiens
aaatatcaaagcttg

SEQ ID NO: 397222 - DNA, 15 bp, Homo sapiens
taaatatcaaagctt

SEQ ID NO: 397223 - DNA, 15 bp, Homo sapiens
ctaaatatcaaagct

SEQ ID NO: 397224 - DNA, 15 bp, Homo sapiens
gctaaatatcaaagc

SEQ ID NO: 397225 - DNA, 15 bp, Homo sapiens
agctaaatatcaaag

SEQ ID NO: 397226 - DNA, 15 bp, Homo sapiens
cagctaaatatcaaa

SEQ ID NO: 397227 - DNA, 15 bp, Homo sapiens
tcagctaaatatcaa

SEQ ID NO: 397228 - DNA, 15 bp, Homo sapiens
ttcagctaaatatca

SEQ ID NO: 397229 - DNA, 15 bp, Homo sapiens
tttcagctaaatatc

SEQ ID NO: 397230 - DNA, 15 bp, Homo sapiens
atttcagctaaatat

SEQ ID NO: 397231 - DNA, 15 bp, Homo sapiens
tatttcagctaaata

SEQ ID NO: 397232 - DNA, 15 bp, Homo sapiens
ttatttcagctaaat

SEQ ID NO: 397233 - DNA, 15 bp, Homo sapiens
attatttcagctaaa

SEQ ID NO: 397234 - DNA, 15 bp, Homo sapiens
aattatttcagctaa

SEQ ID NO: 397235 - DNA, 15 bp, Homo sapiens
gaattatttcagcta

SEQ ID NO: 397236 - DNA, 15 bp, Homo sapiens
ggaattatttcagct

SEQ ID NO: 397237 - DNA, 15 bp, Homo sapiens
gggaattatttcagc

SEQ ID NO: 397238 - DNA, 15 bp, Homo sapiens
tgggaattatttcag

SEQ ID NO: 397239 - DNA, 15 bp, Homo sapiens
ttgggaattatttca

SEQ ID NO: 397240 - DNA, 15 bp, Homo sapiens
cttgggaattatttc

SEQ ID NO: 397241 - DNA, 15 bp, Homo sapiens
gcttgggaattattt

SEQ ID NO: 397242 - DNA, 15 bp, Homo sapiens
tgcttgggaattatt

SEQ ID NO: 397243 - DNA, 15 bp, Homo sapiens
ttgcttgggaattat

SEQ ID NO: 397244 - DNA, 15 bp, Homo sapiens
tttgcttgggaatta

SEQ ID NO: 397245 - DNA, 15 bp, Homo sapiens
ctttgcttgggaatt

SEQ ID NO: 397246 - DNA, 15 bp, Homo sapiens
actttgcttgggaat

SEQ ID NO: 397247 - DNA, 15 bp, Homo sapiens
cactttgcttgggaa

SEQ ID NO: 397248 - DNA, 15 bp, Homo sapiens
acactttgcttggga

SEQ ID NO: 397249 - DNA, 15 bp, Homo sapiens
aacactttgcttggg

SEQ ID NO: 397250 - DNA, 15 bp, Homo sapiens
taacactttgcttgg

SEQ ID NO: 397251 - DNA, 15 bp, Homo sapiens
ttaacactttgcttg

SEQ ID NO: 397252 - DNA, 15 bp, Homo sapiens
tttaacactttgctt

SEQ ID NO: 397253 - DNA, 15 bp, Homo sapiens
ttttaacactttgct

SEQ ID NO: 397254 - DNA, 15 bp, Homo sapiens
cttttaacactttgc

SEQ ID NO: 397255 - DNA, 15 bp, Homo sapiens
acttttaacactttg

SEQ ID NO: 397256 - DNA, 15 bp, Homo sapiens
tacttttaacacttt

SEQ ID NO: 397257 - DNA, 15 bp, Homo sapiens
gtacttttaacactt

SEQ ID NO: 397258 - DNA, 15 bp, Homo sapiens
tgtacttttaacact

SEQ ID NO: 397259 - DNA, 15 bp, Homo sapiens
ctgtacttttaacac

SEQ ID NO: 397260 - DNA, 15 bp, Homo sapiens
gctgtacttttaaca

SEQ ID NO: 397261 - DNA, 15 bp, Homo sapiens
agctgtacttttaac

SEQ ID NO: 397262 - DNA, 15 bp, Homo sapiens
aagctgtacttttaa

SEQ ID NO: 397263 - DNA, 15 bp, Homo sapiens
caagctgtactttta

SEQ ID NO: 397264 - DNA, 15 bp, Homo sapiens
ccaagctgtactttt

SEQ ID NO: 397265 - DNA, 15 bp, Homo sapiens
accaagctgtacttt

SEQ ID NO: 397266 - DNA, 15 bp, Homo sapiens
caccaagctgtactt

SEQ ID NO: 397267 - DNA, 15 bp, Homo sapiens
gcaccaagctgtact

SEQ ID NO: 397268 - DNA, 15 bp, Homo sapiens
ggcaccaagctgtac

SEQ ID NO: 397269 - DNA, 15 bp, Homo sapiens
gggcaccaagctgta

SEQ ID NO: 397270 - DNA, 15 bp, Homo sapiens
ggggcaccaagctgt

SEQ ID NO: 397271 - DNA, 15 bp, Homo sapiens
gggggcaccaagctg

SEQ ID NO: 397272 - DNA, 15 bp, Homo sapiens
agggggcaccaagct

SEQ ID NO: 397273 - DNA, 15 bp, Homo sapiens
cagggggcaccaagc

SEQ ID NO: 397274 - DNA, 15 bp, Homo sapiens
ccagggggcaccaag

SEQ ID NO: 397275 - DNA, 15 bp, Homo sapiens
gccagggggcaccaa

SEQ ID NO: 397276 - DNA, 15 bp, Homo sapiens
agccagggggcacca

SEQ ID NO: 397277 - DNA, 15 bp, Homo sapiens
aagccagggggcacc

SEQ ID NO: 397278 - DNA, 15 bp, Homo sapiens
gaagccagggggcac

SEQ ID NO: 397279 - DNA, 15 bp, Homo sapiens
agaagccagggggca

SEQ ID NO: 397280 - DNA, 15 bp, Homo sapiens
aagaagccagggggc

SEQ ID NO: 397281 - DNA, 15 bp, Homo sapiens
taagaagccaggggg

SEQ ID NO: 397282 - DNA, 15 bp, Homo sapiens
gtaagaagccagggg

SEQ ID NO: 397283 - DNA, 15 bp, Homo sapiens
tgtaagaagccaggg

SEQ ID NO: 397284 - DNA, 15 bp, Homo sapiens
ctgtaagaagccagg

SEQ ID NO: 397285 - DNA, 15 bp, Homo sapiens
actgtaagaagccag

SEQ ID NO: 397286 - DNA, 15 bp, Homo sapiens
tactgtaagaagcca

SEQ ID NO: 397287 - DNA, 15 bp, Homo sapiens
ttactgtaagaagcc

SEQ ID NO: 397288 - DNA, 15 bp, Homo sapiens
tttactgtaagaagc

SEQ ID NO: 397289 - DNA, 15 bp, Homo sapiens
ttttactgtaagaag

SEQ ID NO: 397290 - DNA, 15 bp, Homo sapiens
attttactgtaagaa

SEQ ID NO: 397291 - DNA, 15 bp, Homo sapiens
gattttactgtaaga

SEQ ID NO: 397292 - DNA, 15 bp, Homo sapiens
agattttactgtaag

SEQ ID NO: 397293 - DNA, 15 bp, Homo sapiens
tagattttactgtaa

SEQ ID NO: 397294 - DNA, 15 bp, Homo sapiens
ttagattttactgta

SEQ ID NO: 397295 - DNA, 15 bp, Homo sapiens
cttagattttactgt

SEQ ID NO: 397296 - DNA, 15 bp, Homo sapiens
tcttagattttactg

SEQ ID NO: 397297 - DNA, 15 bp, Homo sapiens
ctcttagattttact

SEQ ID NO: 397298 - DNA, 15 bp, Homo sapiens
cctcttagattttac

SEQ ID NO: 397299 - DNA, 15 bp, Homo sapiens
ccctcttagatttta

SEQ ID NO: 397300 - DNA, 15 bp, Homo sapiens
tccctcttagatttt

SEQ ID NO: 397301 - DNA, 15 bp, Homo sapiens
ttccctcttagattt

SEQ ID NO: 397302 - DNA, 15 bp, Homo sapiens
tttccctcttagatt

SEQ ID NO: 397303 - DNA, 15 bp, Homo sapiens
ttttccctcttagat

SEQ ID NO: 397304 - DNA, 15 bp, Homo sapiens
attttccctcttaga

SEQ ID NO: 397305 - DNA, 15 bp, Homo sapiens
cattttccctcttag

SEQ ID NO: 397306 - DNA, 15 bp, Homo sapiens
tcattttccctctta

SEQ ID NO: 397307 - DNA, 15 bp, Homo sapiens
gtcattttccctctt

SEQ ID NO: 397308 - DNA, 15 bp, Homo sapiens
tgtcattttccctct

SEQ ID NO: 397309 - DNA, 15 bp, Homo sapiens
atgtcattttccctc

SEQ ID NO: 397310 - DNA, 15 bp, Homo sapiens
tatgtcattttccct

SEQ ID NO: 397311 - DNA, 15 bp, Homo sapiens
ttatgtcattttccc

SEQ ID NO: 397312 - DNA, 15 bp, Homo sapiens
gttatgtcattttcc

SEQ ID NO: 397313 - DNA, 15 bp, Homo sapiens
tgttatgtcattttc

SEQ ID NO: 397314 - DNA, 15 bp, Homo sapiens
ttgttatgtcatttt

SEQ ID NO: 397315 - DNA, 15 bp, Homo sapiens
attgttatgtcattt

SEQ ID NO: 397316 - DNA, 15 bp, Homo sapiens
tattgttatgtcatt

SEQ ID NO: 397317 - DNA, 15 bp, Homo sapiens
ctattgttatgtcat

SEQ ID NO: 397318 - DNA, 15 bp, Homo sapiens
tctattgttatgtca

SEQ ID NO: 397319 - DNA, 15 bp, Homo sapiens
ttctattgttatgtc

SEQ ID NO: 397320 - DNA, 15 bp, Homo sapiens
attctattgttatgt

SEQ ID NO: 397321 - DNA, 15 bp, Homo sapiens
aattctattgttatg

SEQ ID NO: 397322 - DNA, 15 bp, Homo sapiens
caattctattgttat

SEQ ID NO: 397323 - DNA, 15 bp, Homo sapiens
acaattctattgtta

SEQ ID NO: 397324 - DNA, 15 bp, Homo sapiens
aacaattctattgtt

SEQ ID NO: 397325 - DNA, 15 bp, Homo sapiens
taacaattctattgt

SEQ ID NO: 397326 - DNA, 15 bp, Homo sapiens
ctaacaattctattg

SEQ ID NO: 397327 - DNA, 15 bp, Homo sapiens
cctaacaattctatt

SEQ ID NO: 397328 - DNA, 15 bp, Homo sapiens
gcctaacaattctat

SEQ ID NO: 397329 - DNA, 15 bp, Homo sapiens
tgcctaacaattcta

SEQ ID NO: 397330 - DNA, 15 bp, Homo sapiens
ttgcctaacaattct

SEQ ID NO: 397331 - DNA, 15 bp, Homo sapiens
tttgcctaacaattc

SEQ ID NO: 397332 - DNA, 15 bp, Homo sapiens
ttttgcctaacaatt

SEQ ID NO: 397333 - DNA, 15 bp, Homo sapiens
tttttgcctaacaat

SEQ ID NO: 397334 - DNA, 15 bp, Homo sapiens
ctttttgcctaacaa

SEQ ID NO: 397335 - DNA, 15 bp, Homo sapiens
cctttttgcctaaca

SEQ ID NO: 397336 - DNA, 15 bp, Homo sapiens
tcctttttgcctaac

SEQ ID NO: 397337 - DNA, 15 bp, Homo sapiens
atcctttttgcctaa

SEQ ID NO: 397338 - DNA, 15 bp, Homo sapiens
gatcctttttgccta

SEQ ID NO: 397339 - DNA, 15 bp, Homo sapiens
agatcctttttgcct

SEQ ID NO: 397340 - DNA, 15 bp, Homo sapiens
tagatcctttttgcc

SEQ ID NO: 397341 - DNA, 15 bp, Homo sapiens
ttagatcctttttgc

SEQ ID NO: 397342 - DNA, 15 bp, Homo sapiens
tttagatcctttttg

SEQ ID NO: 397343 - DNA, 15 bp, Homo sapiens
gtttagatccttttt

SEQ ID NO: 397344 - DNA, 15 bp, Homo sapiens
agtttagatcctttt

SEQ ID NO: 397345 - DNA, 15 bp, Homo sapiens
aagtttagatccttt

SEQ ID NO: 397346 - DNA, 15 bp, Homo sapiens
taagtttagatcctt

SEQ ID NO: 397347 - DNA, 15 bp, Homo sapiens
ttaagtttagatcct

SEQ ID NO: 397348 - DNA, 15 bp, Homo sapiens
tttaagtttagatcc

SEQ ID NO: 397349 - DNA, 15 bp, Homo sapiens
ctttaagtttagatc

SEQ ID NO: 397350 - DNA, 15 bp, Homo sapiens
tctttaagtttagat

SEQ ID NO: 397351 - DNA, 15 bp, Homo sapiens
atctttaagtttaga

SEQ ID NO: 397352 - DNA, 15 bp, Homo sapiens
aatctttaagtttag

SEQ ID NO: 397353 - DNA, 15 bp, Homo sapiens
aaatctttaagttta

SEQ ID NO: 397354 - DNA, 15 bp, Homo sapiens
caaatctttaagttt

SEQ ID NO: 397355 - DNA, 15 bp, Homo sapiens
ccaaatctttaagtt

SEQ ID NO: 397356 - DNA, 15 bp, Homo sapiens
tccaaatctttaagt

SEQ ID NO: 397357 - DNA, 15 bp, Homo sapiens
ttccaaatctttaag

SEQ ID NO: 397358 - DNA, 15 bp, Homo sapiens
tttccaaatctttaa

SEQ ID NO: 397359 - DNA, 15 bp, Homo sapiens
ttttccaaatcttta

SEQ ID NO: 397360 - DNA, 15 bp, Homo sapiens
attttccaaatcttt

SEQ ID NO: 397361 - DNA, 15 bp, Homo sapiens
aattttccaaatctt

SEQ ID NO: 397362 - DNA, 15 bp, Homo sapiens
aaattttccaaatct

SEQ ID NO: 397363 - DNA, 15 bp, Homo sapiens
caaattttccaaatc

SEQ ID NO: 397364 - DNA, 15 bp, Homo sapiens
gcaaattttccaaat

SEQ ID NO: 397365 - DNA, 15 bp, Homo sapiens
tgcaaattttccaaa

SEQ ID NO: 397366 - DNA, 15 bp, Homo sapiens
ctgcaaattttccaa

SEQ ID NO: 397367 - DNA, 15 bp, Homo sapiens
gctgcaaattttcca

SEQ ID NO: 397368 - DNA, 15 bp, Homo sapiens
ggctgcaaattttcc

SEQ ID NO: 397369 - DNA, 15 bp, Homo sapiens
tggctgcaaattttc

SEQ ID NO: 397370 - DNA, 15 bp, Homo sapiens
atggctgcaaatttt

SEQ ID NO: 397371 - DNA, 15 bp, Homo sapiens
gatggctgcaaattt

SEQ ID NO: 397372 - DNA, 15 bp, Homo sapiens
ggatggctgcaaatt

SEQ ID NO: 397373 - DNA, 15 bp, Homo sapiens
tggatggctgcaaat

SEQ ID NO: 397374 - DNA, 15 bp, Homo sapiens
atggatggctgcaaa

SEQ ID NO: 397375 - DNA, 15 bp, Homo sapiens
tatggatggctgcaa

SEQ ID NO: 397376 - DNA, 15 bp, Homo sapiens
atatggatggctgca

SEQ ID NO: 397377 - DNA, 15 bp, Homo sapiens
aatatggatggctgc

SEQ ID NO: 397378 - DNA, 15 bp, Homo sapiens
caatatggatggctg

SEQ ID NO: 397379 - DNA, 15 bp, Homo sapiens
gcaatatggatggct

SEQ ID NO: 397380 - DNA, 15 bp, Homo sapiens
tgcaatatggatggc

SEQ ID NO: 397381 - DNA, 15 bp, Homo sapiens
ttgcaatatggatgg

SEQ ID NO: 397382 - DNA, 15 bp, Homo sapiens
tttgcaatatggatg

SEQ ID NO: 397383 - DNA, 15 bp, Homo sapiens
ttttgcaatatggat

SEQ ID NO: 397384 - DNA, 15 bp, Homo sapiens
tttttgcaatatgga

SEQ ID NO: 397385 - DNA, 15 bp, Homo sapiens
atttttgcaatatgg

SEQ ID NO: 397386 - DNA, 15 bp, Homo sapiens
aatttttgcaatatg

SEQ ID NO: 397387 - DNA, 15 bp, Homo sapiens
caatttttgcaatat

SEQ ID NO: 397388 - DNA, 15 bp, Homo sapiens
tcaatttttgcaata

SEQ ID NO: 397389 - DNA, 15 bp, Homo sapiens
ctcaatttttgcaat

SEQ ID NO: 397390 - DNA, 15 bp, Homo sapiens
tctcaatttttgcaa

SEQ ID NO: 397391 - DNA, 15 bp, Homo sapiens
ttctcaatttttgca

SEQ ID NO: 397392 - DNA, 15 bp, Homo sapiens
tttctcaatttttgc

SEQ ID NO: 397393 - DNA, 15 bp, Homo sapiens
ttttctcaatttttg

SEQ ID NO: 397394 - DNA, 15 bp, Homo sapiens
tttttctcaattttt

SEQ ID NO: 397395 - DNA, 15 bp, Homo sapiens
ttttttctcaatttt

SEQ ID NO: 397396 - DNA, 15 bp, Homo sapiens
attttttctcaattt

SEQ ID NO: 397397 - DNA, 15 bp, Homo sapiens
cattttttctcaatt

SEQ ID NO: 397398 - DNA, 15 bp, Homo sapiens
acattttttctcaat

SEQ ID NO: 397399 - DNA, 15 bp, Homo sapiens
aacattttttctcaa

SEQ ID NO: 397400 - DNA, 15 bp, Homo sapiens
aaacattttttctca

SEQ ID NO: 397401 - DNA, 15 bp, Homo sapiens
caaacattttttctc

SEQ ID NO: 397402 - DNA, 15 bp, Homo sapiens
ccaaacattttttct

SEQ ID NO: 397403 - DNA, 15 bp, Homo sapiens
tccaaacattttttc

SEQ ID NO: 397404 - DNA, 15 bp, Homo sapiens
ttccaaacatttttt

SEQ ID NO: 397405 - DNA, 15 bp, Homo sapiens
gttccaaacattttt

SEQ ID NO: 397406 - DNA, 15 bp, Homo sapiens
tgttccaaacatttt

SEQ ID NO: 397407 - DNA, 15 bp, Homo sapiens
gtgttccaaacattt

SEQ ID NO: 397408 - DNA, 15 bp, Homo sapiens
agtgttccaaacatt

SEQ ID NO: 397409 - DNA, 15 bp, Homo sapiens
tagtgttccaaacat

SEQ ID NO: 397410 - DNA, 15 bp, Homo sapiens
ttagtgttccaaaca

SEQ ID NO: 397411 - DNA, 15 bp, Homo sapiens
cttagtgttccaaac

SEQ ID NO: 397412 - DNA, 15 bp, Homo sapiens
ccttagtgttccaaa

SEQ ID NO: 397413 - DNA, 15 bp, Homo sapiens
cccttagtgttccaa

SEQ ID NO: 397414 - DNA, 15 bp, Homo sapiens
acccttagtgttcca

SEQ ID NO: 397415 - DNA, 15 bp, Homo sapiens
cacccttagtgttcc

SEQ ID NO: 397416 - DNA, 15 bp, Homo sapiens
acacccttagtgttc

SEQ ID NO: 397417 - DNA, 15 bp, Homo sapiens
cacacccttagtgtt

SEQ ID NO: 397418 - DNA, 15 bp, Homo sapiens
ccacacccttagtgt

SEQ ID NO: 397419 - DNA, 15 bp, Homo sapiens
gccacacccttagtg

SEQ ID NO: 397420 - DNA, 15 bp, Homo sapiens
ggccacacccttagt

SEQ ID NO: 397421 - DNA, 15 bp, Homo sapiens
aggccacacccttag

SEQ ID NO: 397422 - DNA, 15 bp, Homo sapiens
taggccacaccctta

SEQ ID NO: 397423 - DNA, 15 bp, Homo sapiens
ctaggccacaccctt

SEQ ID NO: 397424 - DNA, 15 bp, Homo sapiens
actaggccacaccct

SEQ ID NO: 397425 - DNA, 15 bp, Homo sapiens
cactaggccacaccc

SEQ ID NO: 397426 - DNA, 15 bp, Homo sapiens
tcactaggccacacc

SEQ ID NO: 397427 - DNA, 15 bp, Homo sapiens
gtcactaggccacac

SEQ ID NO: 397428 - DNA, 15 bp, Homo sapiens
ggtcactaggccaca

SEQ ID NO: 397429 - DNA, 15 bp, Homo sapiens
tggtcactaggccac

SEQ ID NO: 397430 - DNA, 15 bp, Homo sapiens
atggtcactaggcca

SEQ ID NO: 397431 - DNA, 15 bp, Homo sapiens
aatggtcactaggcc

SEQ ID NO: 397432 - DNA, 15 bp, Homo sapiens
aaatggtcactaggc

SEQ ID NO: 397433 - DNA, 15 bp, Homo sapiens
caaatggtcactagg

SEQ ID NO: 397434 - DNA, 15 bp, Homo sapiens
tcaaatggtcactag

SEQ ID NO: 397435 - DNA, 15 bp, Homo sapiens
atcaaatggtcacta

SEQ ID NO: 397436 - DNA, 15 bp, Homo sapiens
tatcaaatggtcact

SEQ ID NO: 397437 - DNA, 15 bp, Homo sapiens
ttatcaaatggtcac

SEQ ID NO: 397438 - DNA, 15 bp, Homo sapiens
cttatcaaatggtca

SEQ ID NO: 397439 - DNA, 15 bp, Homo sapiens
tcttatcaaatggtc

SEQ ID NO: 397440 - DNA, 15 bp, Homo sapiens
atcttatcaaatggt

SEQ ID NO: 397441 - DNA, 15 bp, Homo sapiens
aatcttatcaaatgg

SEQ ID NO: 397442 - DNA, 15 bp, Homo sapiens
aaatcttatcaaatg

SEQ ID NO: 397443 - DNA, 15 bp, Homo sapiens
caaatcttatcaaat

SEQ ID NO: 397444 - DNA, 15 bp, Homo sapiens
acaaatcttatcaaa

SEQ ID NO: 397445 - DNA, 15 bp, Homo sapiens
cacaaatcttatcaa

SEQ ID NO: 397446 - DNA, 15 bp, Homo sapiens
acacaaatcttatca

SEQ ID NO: 397447 - DNA, 15 bp, Homo sapiens
cacacaaatcttatc

SEQ ID NO: 397448 - DNA, 15 bp, Homo sapiens
ccacacaaatcttat

SEQ ID NO: 397449 - DNA, 15 bp, Homo sapiens
cccacacaaatctta

SEQ ID NO: 397450 - DNA, 15 bp, Homo sapiens
gcccacacaaatctt

SEQ ID NO: 397451 - DNA, 15 bp, Homo sapiens
tgcccacacaaatct

SEQ ID NO: 397452 - DNA, 15 bp, Homo sapiens
atgcccacacaaatc

SEQ ID NO: 397453 - DNA, 15 bp, Homo sapiens
tatgcccacacaaat

SEQ ID NO: 397454 - DNA, 15 bp, Homo sapiens
ttatgcccacacaaa

SEQ ID NO: 397455 - DNA, 15 bp, Homo sapiens
tttatgcccacacaa

SEQ ID NO: 397456 - DNA, 15 bp, Homo sapiens
gtttatgcccacaca

SEQ ID NO: 397457 - DNA, 15 bp, Homo sapiens
agtttatgcccacac

SEQ ID NO: 397458 - DNA, 15 bp, Homo sapiens
cagtttatgcccaca

SEQ ID NO: 397459 - DNA, 15 bp, Homo sapiens
acagtttatgcccac

SEQ ID NO: 397460 - DNA, 15 bp, Homo sapiens
tacagtttatgccca

SEQ ID NO: 397461 - DNA, 15 bp, Homo sapiens
ctacagtttatgccc

SEQ ID NO: 397462 - DNA, 15 bp, Homo sapiens
tctacagtttatgcc

SEQ ID NO: 397463 - DNA, 15 bp, Homo sapiens
atctacagtttatgc

SEQ ID NO: 397464 - DNA, 15 bp, Homo sapiens
aatctacagtttatg

SEQ ID NO: 397465 - DNA, 15 bp, Homo sapiens
aaatctacagtttat

SEQ ID NO: 397466 - DNA, 15 bp, Homo sapiens
taaatctacagttta

SEQ ID NO: 397467 - DNA, 15 bp, Homo sapiens
ttaaatctacagttt

SEQ ID NO: 397468 - DNA, 15 bp, Homo sapiens
attaaatctacagtt

SEQ ID NO: 397469 - DNA, 15 bp, Homo sapiens
gattaaatctacagt

SEQ ID NO: 397470 - DNA, 15 bp, Homo sapiens
tgattaaatctacag

SEQ ID NO: 397471 - DNA, 15 bp, Homo sapiens
ctgattaaatctaca

SEQ ID NO: 397472 - DNA, 15 bp, Homo sapiens
gctgattaaatctac

SEQ ID NO: 397473 - DNA, 15 bp, Homo sapiens
ggctgattaaatcta

SEQ ID NO: 397474 - DNA, 15 bp, Homo sapiens
tggctgattaaatct

SEQ ID NO: 397475 - DNA, 15 bp, Homo sapiens
gtggctgattaaatc

SEQ ID NO: 397476 - DNA, 15 bp, Homo sapiens
ggtggctgattaaat

SEQ ID NO: 397477 - DNA, 15 bp, Homo sapiens
gggtggctgattaaa

SEQ ID NO: 397478 - DNA, 15 bp, Homo sapiens
ggggtggctgattaa

SEQ ID NO: 397479 - DNA, 15 bp, Homo sapiens
tggggtggctgatta

SEQ ID NO: 397480 - DNA, 15 bp, Homo sapiens
ctggggtggctgatt

SEQ ID NO: 397481 - DNA, 15 bp, Homo sapiens
tctggggtggctgat

SEQ ID NO: 397482 - DNA, 15 bp, Homo sapiens
ttctggggtggctga

SEQ ID NO: 397483 - DNA, 15 bp, Homo sapiens
cttctggggtggctg

SEQ ID NO: 397484 - DNA, 15 bp, Homo sapiens
ccttctggggtggct

SEQ ID NO: 397485 - DNA, 15 bp, Homo sapiens
tccttctggggtggc

SEQ ID NO: 397486 - DNA, 15 bp, Homo sapiens
ttccttctggggtgg

SEQ ID NO: 397487 - DNA, 15 bp, Homo sapiens
attccttctggggtg

SEQ ID NO: 397488 - DNA, 15 bp, Homo sapiens
tattccttctggggt

SEQ ID NO: 397489 - DNA, 15 bp, Homo sapiens
gtattccttctgggg

SEQ ID NO: 397490 - DNA, 15 bp, Homo sapiens
ggtattccttctggg

SEQ ID NO: 397491 - DNA, 15 bp, Homo sapiens
tggtattccttctgg

SEQ ID NO: 397492 - DNA, 15 bp, Homo sapiens
gtggtattccttctg

SEQ ID NO: 397493 - DNA, 15 bp, Homo sapiens
ggtggtattccttct

SEQ ID NO: 397494 - DNA, 15 bp, Homo sapiens
tggtggtattccttc

SEQ ID NO: 397495 - DNA, 15 bp, Homo sapiens
ctggtggtattcctt

SEQ ID NO: 397496 - DNA, 15 bp, Homo sapiens
actggtggtattcct

SEQ ID NO: 397497 - DNA, 15 bp, Homo sapiens
aactggtggtattcc

SEQ ID NO: 397498 - DNA, 15 bp, Homo sapiens
aaactggtggtattc

SEQ ID NO: 397499 - DNA, 15 bp, Homo sapiens
caaactggtggtatt

SEQ ID NO: 397500 - DNA, 15 bp, Homo sapiens
tcaaactggtggtat

SEQ ID NO: 397501 - DNA, 15 bp, Homo sapiens
ttcaaactggtggta

SEQ ID NO: 397502 - DNA, 15 bp, Homo sapiens
gttcaaactggtggt

SEQ ID NO: 397503 - DNA, 15 bp, Homo sapiens
agttcaaactggtgg

SEQ ID NO: 397504 - DNA, 15 bp, Homo sapiens
cagttcaaactggtg

SEQ ID NO: 397505 - DNA, 15 bp, Homo sapiens
tcagttcaaactggt

SEQ ID NO: 397506 - DNA, 15 bp, Homo sapiens
ttcagttcaaactgg

SEQ ID NO: 397507 - DNA, 15 bp, Homo sapiens
cttcagttcaaactg

SEQ ID NO: 397508 - DNA, 15 bp, Homo sapiens
ccttcagttcaaact

SEQ ID NO: 397509 - DNA, 15 bp, Homo sapiens
cccttcagttcaaac

SEQ ID NO: 397510 - DNA, 15 bp, Homo sapiens
ccccttcagttcaaa

SEQ ID NO: 397511 - DNA, 15 bp, Homo sapiens
tccccttcagttcaa

SEQ ID NO: 397512 - DNA, 15 bp, Homo sapiens
ttccccttcagttca

SEQ ID NO: 397513 - DNA, 15 bp, Homo sapiens
cttccccttcagttc

SEQ ID NO: 397514 - DNA, 15 bp, Homo sapiens
ccttccccttcagtt

SEQ ID NO: 397515 - DNA, 15 bp, Homo sapiens
tccttccccttcagt

SEQ ID NO: 397516 - DNA, 15 bp, Homo sapiens
ctccttccccttcag

SEQ ID NO: 397517 - DNA, 15 bp, Homo sapiens
tctccttccccttca

SEQ ID NO: 397518 - DNA, 15 bp, Homo sapiens
atctccttccccttc

SEQ ID NO: 397519 - DNA, 15 bp, Homo sapiens
tatctccttcccctt

SEQ ID NO: 397520 - DNA, 15 bp, Homo sapiens
ctatctccttcccct

SEQ ID NO: 397521 - DNA, 15 bp, Homo sapiens
cctatctccttcccc

SEQ ID NO: 397522 - DNA, 15 bp, Homo sapiens
tcctatctccttccc

SEQ ID NO: 397523 - DNA, 15 bp, Homo sapiens
ttcctatctccttcc

SEQ ID NO: 397524 - DNA, 15 bp, Homo sapiens
cttcctatctccttc

SEQ ID NO: 397525 - DNA, 15 bp, Homo sapiens
ccttcctatctcctt

SEQ ID NO: 397526 - DNA, 15 bp, Homo sapiens
tccttcctatctcct

SEQ ID NO: 397527 - DNA, 15 bp, Homo sapiens
ttccttcctatctcc

SEQ ID NO: 397528 - DNA, 15 bp, Homo sapiens
attccttcctatctc

SEQ ID NO: 397529 - DNA, 15 bp, Homo sapiens
cattccttcctatct

SEQ ID NO: 397530 - DNA, 15 bp, Homo sapiens
tcattccttcctatc

SEQ ID NO: 397531 - DNA, 15 bp, Homo sapiens
ttcattccttcctat

SEQ ID NO: 397532 - DNA, 15 bp, Homo sapiens
cttcattccttccta

SEQ ID NO: 397533 - DNA, 15 bp, Homo sapiens
ccttcattccttcct

SEQ ID NO: 397534 - DNA, 15 bp, Homo sapiens
cccttcattccttcc

SEQ ID NO: 397535 - DNA, 15 bp, Homo sapiens
tcccttcattccttc

SEQ ID NO: 397536 - DNA, 15 bp, Homo sapiens
ctcccttcattcctt

SEQ ID NO: 397537 - DNA, 15 bp, Homo sapiens
cctcccttcattcct

SEQ ID NO: 397538 - DNA, 15 bp, Homo sapiens
gcctcccttcattcc

SEQ ID NO: 397539 - DNA, 15 bp, Homo sapiens
agcctcccttcattc

SEQ ID NO: 397540 - DNA, 15 bp, Homo sapiens
cagcctcccttcatt

SEQ ID NO: 397541 - DNA, 15 bp, Homo sapiens
acagcctcccttcat

SEQ ID NO: 397542 - DNA, 15 bp, Homo sapiens
gacagcctcccttca

SEQ ID NO: 397543 - DNA, 15 bp, Homo sapiens
tgacagcctcccttc

SEQ ID NO: 397544 - DNA, 15 bp, Homo sapiens
ctgacagcctccctt

SEQ ID NO: 397545 - DNA, 15 bp, Homo sapiens
tctgacagcctccct

SEQ ID NO: 397546 - DNA, 15 bp, Homo sapiens
gtctgacagcctccc

SEQ ID NO: 397547 - DNA, 15 bp, Homo sapiens
agtctgacagcctcc

SEQ ID NO: 397548 - DNA, 15 bp, Homo sapiens
aagtctgacagcctc

SEQ ID NO: 397549 - DNA, 15 bp, Homo sapiens
gaagtctgacagcct

SEQ ID NO: 397550 - DNA, 15 bp, Homo sapiens
agaagtctgacagcc

SEQ ID NO: 397551 - DNA, 15 bp, Homo sapiens
aagaagtctgacagc

SEQ ID NO: 397552 - DNA, 15 bp, Homo sapiens
taagaagtctgacag

SEQ ID NO: 397553 - DNA, 15 bp, Homo sapiens
gtaagaagtctgaca

SEQ ID NO: 397554 - DNA, 15 bp, Homo sapiens
cgtaagaagtctgac

SEQ ID NO: 397555 - DNA, 15 bp, Homo sapiens
acgtaagaagtctga

SEQ ID NO: 397556 - DNA, 15 bp, Homo sapiens
gacgtaagaagtctg

SEQ ID NO: 397557 - DNA, 15 bp, Homo sapiens
agacgtaagaagtct

SEQ ID NO: 397558 - DNA, 15 bp, Homo sapiens
aagacgtaagaagtc

SEQ ID NO: 397559 - DNA, 15 bp, Homo sapiens
taagacgtaagaagt

SEQ ID NO: 397560 - DNA, 15 bp, Homo sapiens
ataagacgtaagaag

SEQ ID NO: 397561 - DNA, 15 bp, Homo sapiens
tataagacgtaagaa

SEQ ID NO: 397562 - DNA, 15 bp, Homo sapiens
ctataagacgtaaga

SEQ ID NO: 397563 - DNA, 15 bp, Homo sapiens
cctataagacgtaag

SEQ ID NO: 397564 - DNA, 15 bp, Homo sapiens
tcctataagacgtaa

SEQ ID NO: 397565 - DNA, 15 bp, Homo sapiens
gtcctataagacgta

SEQ ID NO: 397566 - DNA, 15 bp, Homo sapiens
tgtcctataagacgt

SEQ ID NO: 397567 - DNA, 15 bp, Homo sapiens
ctgtcctataagacg

SEQ ID NO: 397568 - DNA, 15 bp, Homo sapiens
cctgtcctataagac

SEQ ID NO: 397569 - DNA, 15 bp, Homo sapiens
tcctgtcctataaga

SEQ ID NO: 397570 - DNA, 15 bp, Homo sapiens
gtcctgtcctataag

SEQ ID NO: 397571 - DNA, 15 bp, Homo sapiens
ggtcctgtcctataa

SEQ ID NO: 397572 - DNA, 15 bp, Homo sapiens
tggtcctgtcctata

SEQ ID NO: 397573 - DNA, 15 bp, Homo sapiens
ttggtcctgtcctat

SEQ ID NO: 397574 - DNA, 15 bp, Homo sapiens
attggtcctgtccta

SEQ ID NO: 397575 - DNA, 15 bp, Homo sapiens
gattggtcctgtcct

SEQ ID NO: 397576 - DNA, 15 bp, Homo sapiens
agattggtcctgtcc

SEQ ID NO: 397577 - DNA, 15 bp, Homo sapiens
aagattggtcctgtc

SEQ ID NO: 397578 - DNA, 15 bp, Homo sapiens
taagattggtcctgt

SEQ ID NO: 397579 - DNA, 15 bp, Homo sapiens
ataagattggtcctg

SEQ ID NO: 397580 - DNA, 15 bp, Homo sapiens
tataagattggtcct

SEQ ID NO: 397581 - DNA, 15 bp, Homo sapiens
ctataagattggtcc

SEQ ID NO: 397582 - DNA, 15 bp, Homo sapiens
tctataagattggtc

SEQ ID NO: 397583 - DNA, 15 bp, Homo sapiens
atctataagattggt

SEQ ID NO: 397584 - DNA, 15 bp, Homo sapiens
tatctataagattgg

SEQ ID NO: 397585 - DNA, 15 bp, Homo sapiens
gtatctataagattg

SEQ ID NO: 397586 - DNA, 15 bp, Homo sapiens
cgtatctataagatt

SEQ ID NO: 397587 - DNA, 15 bp, Homo sapiens
acgtatctataagat

SEQ ID NO: 397588 - DNA, 15 bp, Homo sapiens
aacgtatctataaga

SEQ ID NO: 397589 - DNA, 15 bp, Homo sapiens
aaacgtatctataag

SEQ ID NO: 397590 - DNA, 15 bp, Homo sapiens
aaaacgtatctataa

SEQ ID NO: 397591 - DNA, 15 bp, Homo sapiens
taaaacgtatctata

SEQ ID NO: 397592 - DNA, 15 bp, Homo sapiens
ataaaacgtatctat

SEQ ID NO: 397593 - DNA, 15 bp, Homo sapiens
tataaaacgtatcta

SEQ ID NO: 397594 - DNA, 15 bp, Homo sapiens
ctataaaacgtatct

SEQ ID NO: 397595 - DNA, 15 bp, Homo sapiens
actataaaacgtatc

SEQ ID NO: 397596 - DNA, 15 bp, Homo sapiens
tactataaaacgtat

SEQ ID NO: 397597 - DNA, 15 bp, Homo sapiens
atactataaaacgta

SEQ ID NO: 397598 - DNA, 15 bp, Homo sapiens
tatactataaaacgt

SEQ ID NO: 397599 - DNA, 15 bp, Homo sapiens
ctatactataaaacg

SEQ ID NO: 397600 - DNA, 15 bp, Homo sapiens
cctatactataaaac

SEQ ID NO: 397601 - DNA, 15 bp, Homo sapiens
tcctatactataaaa

SEQ ID NO: 397602 - DNA, 15 bp, Homo sapiens
gtcctatactataaa

SEQ ID NO: 397603 - DNA, 15 bp, Homo sapiens
ggtcctatactataa

SEQ ID NO: 397604 - DNA, 15 bp, Homo sapiens
aggtcctatactata

SEQ ID NO: 397605 - DNA, 15 bp, Homo sapiens
taggtcctatactat

SEQ ID NO: 397606 - DNA, 15 bp, Homo sapiens
ataggtcctatacta

SEQ ID NO: 397607 - DNA, 15 bp, Homo sapiens
aataggtcctatact

SEQ ID NO: 397608 - DNA, 15 bp, Homo sapiens
gaataggtcctatac

SEQ ID NO: 397609 - DNA, 15 bp, Homo sapiens
tgaataggtcctata

SEQ ID NO: 397610 - DNA, 15 bp, Homo sapiens
ctgaataggtcctat

SEQ ID NO: 397611 - DNA, 15 bp, Homo sapiens
gctgaataggtccta

SEQ ID NO: 397612 - DNA, 15 bp, Homo sapiens
agctgaataggtcct

SEQ ID NO: 397613 - DNA, 15 bp, Homo sapiens
cagctgaataggtcc

SEQ ID NO: 397614 - DNA, 15 bp, Homo sapiens
gcagctgaataggtc

SEQ ID NO: 397615 - DNA, 15 bp, Homo sapiens
tgcagctgaataggt

SEQ ID NO: 397616 - DNA, 15 bp, Homo sapiens
ttgcagctgaatagg

SEQ ID NO: 397617 - DNA, 15 bp, Homo sapiens
tttgcagctgaatag

SEQ ID NO: 397618 - DNA, 15 bp, Homo sapiens
atttgcagctgaata

SEQ ID NO: 397619 - DNA, 15 bp, Homo sapiens
catttgcagctgaat

SEQ ID NO: 397620 - DNA, 15 bp, Homo sapiens
acatttgcagctgaa

SEQ ID NO: 397621 - DNA, 15 bp, Homo sapiens
cacatttgcagctga

SEQ ID NO: 397622 - DNA, 15 bp, Homo sapiens
gcacatttgcagctg

SEQ ID NO: 397623 - DNA, 15 bp, Homo sapiens
tgcacatttgcagct

SEQ ID NO: 397624 - DNA, 15 bp, Homo sapiens
gtgcacatttgcagc

SEQ ID NO: 397625 - DNA, 15 bp, Homo sapiens
agtgcacatttgcag

SEQ ID NO: 397626 - DNA, 15 bp, Homo sapiens
tagtgcacatttgca

SEQ ID NO: 397627 - DNA, 15 bp, Homo sapiens
atagtgcacatttgc

SEQ ID NO: 397628 - DNA, 15 bp, Homo sapiens
aatagtgcacatttg

SEQ ID NO: 397629 - DNA, 15 bp, Homo sapiens
caatagtgcacattt

SEQ ID NO: 397630 - DNA, 15 bp, Homo sapiens
tcaatagtgcacatt

SEQ ID NO: 397631 - DNA, 15 bp, Homo sapiens
ttcaatagtgcacat

SEQ ID NO: 397632 - DNA, 15 bp, Homo sapiens
cttcaatagtgcaca

SEQ ID NO: 397633 - DNA, 15 bp, Homo sapiens
tcttcaatagtgcac

SEQ ID NO: 397634 - DNA, 15 bp, Homo sapiens
gtcttcaatagtgca

SEQ ID NO: 397635 - DNA, 15 bp, Homo sapiens
tgtcttcaatagtgc

SEQ ID NO: 397636 - DNA, 15 bp, Homo sapiens
ttgtcttcaatagtg

SEQ ID NO: 397637 - DNA, 15 bp, Homo sapiens
cttgtcttcaatagt

SEQ ID NO: 397638 - DNA, 15 bp, Homo sapiens
ccttgtcttcaatag

SEQ ID NO: 397639 - DNA, 15 bp, Homo sapiens
cccttgtcttcaata

SEQ ID NO: 397640 - DNA, 15 bp, Homo sapiens
tcccttgtcttcaat

SEQ ID NO: 397641 - DNA, 15 bp, Homo sapiens
ttcccttgtcttcaa

SEQ ID NO: 397642 - DNA, 15 bp, Homo sapiens
cttcccttgtcttca

SEQ ID NO: 397643 - DNA, 15 bp, Homo sapiens
tcttcccttgtcttc

SEQ ID NO: 397644 - DNA, 15 bp, Homo sapiens
ttcttcccttgtctt

SEQ ID NO: 397645 - DNA, 15 bp, Homo sapiens
cttcttcccttgtct

SEQ ID NO: 397646 - DNA, 15 bp, Homo sapiens
tcttcttcccttgtc

SEQ ID NO: 397647 - DNA, 15 bp, Homo sapiens
ttcttcttcccttgt

SEQ ID NO: 397648 - DNA, 15 bp, Homo sapiens
gttcttcttcccttg

SEQ ID NO: 397649 - DNA, 15 bp, Homo sapiens
ggttcttcttccctt

SEQ ID NO: 397650 - DNA, 15 bp, Homo sapiens
gggttcttcttccct

SEQ ID NO: 397651 - DNA, 15 bp, Homo sapiens
ggggttcttcttccc

SEQ ID NO: 397652 - DNA, 15 bp, Homo sapiens
tggggttcttcttcc

SEQ ID NO: 397653 - DNA, 15 bp, Homo sapiens
ttggggttcttcttc

SEQ ID NO: 397654 - DNA, 15 bp, Homo sapiens
tttggggttcttctt

SEQ ID NO: 397655 - DNA, 15 bp, Homo sapiens
ttttggggttcttct

SEQ ID NO: 397656 - DNA, 15 bp, Homo sapiens
cttttggggttcttc

SEQ ID NO: 397657 - DNA, 15 bp, Homo sapiens
gcttttggggttctt

SEQ ID NO: 397658 - DNA, 15 bp, Homo sapiens
tgcttttggggttct

SEQ ID NO: 397659 - DNA, 15 bp, Homo sapiens
ttgcttttggggttc

SEQ ID NO: 397660 - DNA, 15 bp, Homo sapiens
attgcttttggggtt

SEQ ID NO: 397661 - DNA, 15 bp, Homo sapiens
aattgcttttggggt

SEQ ID NO: 397662 - DNA, 15 bp, Homo sapiens
gaattgcttttgggg

SEQ ID NO: 397663 - DNA, 15 bp, Homo sapiens
tgaattgcttttggg

SEQ ID NO: 397664 - DNA, 15 bp, Homo sapiens
ttgaattgcttttgg

SEQ ID NO: 397665 - DNA, 15 bp, Homo sapiens
tttgaattgcttttg

SEQ ID NO: 397666 - DNA, 15 bp, Homo sapiens
atttgaattgctttt

SEQ ID NO: 397667 - DNA, 15 bp, Homo sapiens
tatttgaattgcttt

SEQ ID NO: 397668 - DNA, 15 bp, Homo sapiens
atatttgaattgctt

SEQ ID NO: 397669 - DNA, 15 bp, Homo sapiens
gatatttgaattgct

SEQ ID NO: 397670 - DNA, 15 bp, Homo sapiens
tgatatttgaattgc

SEQ ID NO: 397671 - DNA, 15 bp, Homo sapiens
atgatatttgaattg

SEQ ID NO: 397672 - DNA, 15 bp, Homo sapiens
gatgatatttgaatt

SEQ ID NO: 397673 - DNA, 15 bp, Homo sapiens
tgatgatatttgaat

SEQ ID NO: 397674 - DNA, 15 bp, Homo sapiens
ctgatgatatttgaa

SEQ ID NO: 397675 - DNA, 15 bp, Homo sapiens
tctgatgatatttga

SEQ ID NO: 397676 - DNA, 15 bp, Homo sapiens
ctctgatgatatttg

SEQ ID NO: 397677 - DNA, 15 bp, Homo sapiens
tctctgatgatattt

SEQ ID NO: 397678 - DNA, 15 bp, Homo sapiens
atctctgatgatatt

SEQ ID NO: 397679 - DNA, 15 bp, Homo sapiens
catctctgatgatat

SEQ ID NO: 397680 - DNA, 15 bp, Homo sapiens
gcatctctgatgata

SEQ ID NO: 397681 - DNA, 15 bp, Homo sapiens
ggcatctctgatgat

SEQ ID NO: 397682 - DNA, 15 bp, Homo sapiens
aggcatctctgatga

SEQ ID NO: 397683 - DNA, 15 bp, Homo sapiens
gaggcatctctgatg

SEQ ID NO: 397684 - DNA, 15 bp, Homo sapiens
agaggcatctctgat

SEQ ID NO: 397685 - DNA, 15 bp, Homo sapiens
aagaggcatctctga

SEQ ID NO: 397686 - DNA, 15 bp, Homo sapiens
gaagaggcatctctg

SEQ ID NO: 397687 - DNA, 15 bp, Homo sapiens
tgaagaggcatctct

SEQ ID NO: 397688 - DNA, 15 bp, Homo sapiens
ctgaagaggcatctc

SEQ ID NO: 397689 - DNA, 15 bp, Homo sapiens
actgaagaggcatct

SEQ ID NO: 397690 - DNA, 15 bp, Homo sapiens
aactgaagaggcatc

SEQ ID NO: 397691 - DNA, 15 bp, Homo sapiens
taactgaagaggcat

SEQ ID NO: 397692 - DNA, 15 bp, Homo sapiens
gtaactgaagaggca

SEQ ID NO: 397693 - DNA, 15 bp, Homo sapiens
tgtaactgaagaggc

SEQ ID NO: 397694 - DNA, 15 bp, Homo sapiens
ttgtaactgaagagg

SEQ ID NO: 397695 - DNA, 15 bp, Homo sapiens
tttgtaactgaagag

SEQ ID NO: 397696 - DNA, 15 bp, Homo sapiens
ttttgtaactgaaga

SEQ ID NO: 397697 - DNA, 15 bp, Homo sapiens
tttttgtaactgaag

SEQ ID NO: 397698 - DNA, 15 bp, Homo sapiens
ctttttgtaactgaa

SEQ ID NO: 397699 - DNA, 15 bp, Homo sapiens
actttttgtaactga

SEQ ID NO: 397700 - DNA, 15 bp, Homo sapiens
cactttttgtaactg

SEQ ID NO: 397701 - DNA, 15 bp, Homo sapiens
ccactttttgtaact

SEQ ID NO: 397702 - DNA, 15 bp, Homo sapiens
tccactttttgtaac

SEQ ID NO: 397703 - DNA, 15 bp, Homo sapiens
ctccactttttgtaa

SEQ ID NO: 397704 - DNA, 15 bp, Homo sapiens
gctccactttttgta

SEQ ID NO: 397705 - DNA, 15 bp, Homo sapiens
ggctccactttttgt

SEQ ID NO: 397706 - DNA, 15 bp, Homo sapiens
tggctccactttttg

SEQ ID NO: 397707 - DNA, 15 bp, Homo sapiens
atggctccacttttt

SEQ ID NO: 397708 - DNA, 15 bp, Homo sapiens
aatggctccactttt

SEQ ID NO: 397709 - DNA, 15 bp, Homo sapiens
caatggctccacttt

SEQ ID NO: 397710 - DNA, 15 bp, Homo sapiens
gcaatggctccactt

SEQ ID NO: 397711 - DNA, 15 bp, Homo sapiens
ggcaatggctccact

SEQ ID NO: 397712 - DNA, 15 bp, Homo sapiens
aggcaatggctccac

SEQ ID NO: 397713 - DNA, 15 bp, Homo sapiens
caggcaatggctcca

SEQ ID NO: 397714 - DNA, 15 bp, Homo sapiens
tcaggcaatggctcc

SEQ ID NO: 397715 - DNA, 15 bp, Homo sapiens
ctcaggcaatggctc

SEQ ID NO: 397716 - DNA, 15 bp, Homo sapiens
actcaggcaatggct

SEQ ID NO: 397717 - DNA, 15 bp, Homo sapiens
aactcaggcaatggc

SEQ ID NO: 397718 - DNA, 15 bp, Homo sapiens
aaactcaggcaatgg

SEQ ID NO: 397719 - DNA, 15 bp, Homo sapiens
gaaactcaggcaatg

SEQ ID NO: 397720 - DNA, 15 bp, Homo sapiens
tgaaactcaggcaat

SEQ ID NO: 397721 - DNA, 15 bp, Homo sapiens
ttgaaactcaggcaa

SEQ ID NO: 397722 - DNA, 15 bp, Homo sapiens
gttgaaactcaggca

SEQ ID NO: 397723 - DNA, 15 bp, Homo sapiens
agttgaaactcaggc

SEQ ID NO: 397724 - DNA, 15 bp, Homo sapiens
cagttgaaactcagg

SEQ ID NO: 397725 - DNA, 15 bp, Homo sapiens
ccagttgaaactcag

SEQ ID NO: 397726 - DNA, 15 bp, Homo sapiens
accagttgaaactca

SEQ ID NO: 397727 - DNA, 15 bp, Homo sapiens
aaccagttgaaactc

SEQ ID NO: 397728 - DNA, 15 bp, Homo sapiens
taaccagttgaaact

SEQ ID NO: 397729 - DNA, 15 bp, Homo sapiens
ctaaccagttgaaac

SEQ ID NO: 397730 - DNA, 15 bp, Homo sapiens
tctaaccagttgaaa

SEQ ID NO: 397731 - DNA, 15 bp, Homo sapiens
gtctaaccagttgaa

SEQ ID NO: 397732 - DNA, 15 bp, Homo sapiens
tgtctaaccagttga

SEQ ID NO: 397733 - DNA, 15 bp, Homo sapiens
ctgtctaaccagttg

SEQ ID NO: 397734 - DNA, 15 bp, Homo sapiens
cctgtctaaccagtt

SEQ ID NO: 397735 - DNA, 15 bp, Homo sapiens
acctgtctaaccagt

SEQ ID NO: 397736 - DNA, 15 bp, Homo sapiens
aacctgtctaaccag

SEQ ID NO: 397737 - DNA, 15 bp, Homo sapiens
gaacctgtctaacca

SEQ ID NO: 397738 - DNA, 15 bp, Homo sapiens
agaacctgtctaacc

SEQ ID NO: 397739 - DNA, 15 bp, Homo sapiens
cagaacctgtctaac

SEQ ID NO: 397740 - DNA, 15 bp, Homo sapiens
gcagaacctgtctaa

SEQ ID NO: 397741 - DNA, 15 bp, Homo sapiens
ggcagaacctgtcta

SEQ ID NO: 397742 - DNA, 15 bp, Homo sapiens
gggcagaacctgtct

SEQ ID NO: 397743 - DNA, 15 bp, Homo sapiens
tgggcagaacctgtc

SEQ ID NO: 397744 - DNA, 15 bp, Homo sapiens
ttgggcagaacctgt

SEQ ID NO: 397745 - DNA, 15 bp, Homo sapiens
tttgggcagaacctg

SEQ ID NO: 397746 - DNA, 15 bp, Homo sapiens
ctttgggcagaacct

SEQ ID NO: 397747 - DNA, 15 bp, Homo sapiens
gctttgggcagaacc

SEQ ID NO: 397748 - DNA, 15 bp, Homo sapiens
agctttgggcagaac

SEQ ID NO: 397749 - DNA, 15 bp, Homo sapiens
cagctttgggcagaa

SEQ ID NO: 397750 - DNA, 15 bp, Homo sapiens
acagctttgggcaga

SEQ ID NO: 397751 - DNA, 15 bp, Homo sapiens
cacagctttgggcag

SEQ ID NO: 397752 - DNA, 15 bp, Homo sapiens
ccacagctttgggca

SEQ ID NO: 397753 - DNA, 15 bp, Homo sapiens
cccacagctttgggc

SEQ ID NO: 397754 - DNA, 15 bp, Homo sapiens
acccacagctttggg

SEQ ID NO: 397755 - DNA, 15 bp, Homo sapiens
gacccacagctttgg

SEQ ID NO: 397756 - DNA, 15 bp, Homo sapiens
ggacccacagctttg

SEQ ID NO: 397757 - DNA, 15 bp, Homo sapiens
tggacccacagcttt

SEQ ID NO: 397758 - DNA, 15 bp, Homo sapiens
atggacccacagctt

SEQ ID NO: 397759 - DNA, 15 bp, Homo sapiens
tatggacccacagct

SEQ ID NO: 397760 - DNA, 15 bp, Homo sapiens
ctatggacccacagc

SEQ ID NO: 397761 - DNA, 15 bp, Homo sapiens
tctatggacccacag

SEQ ID NO: 397762 - DNA, 15 bp, Homo sapiens
ctctatggacccaca

SEQ ID NO: 397763 - DNA, 15 bp, Homo sapiens
tctctatggacccac

SEQ ID NO: 397764 - DNA, 15 bp, Homo sapiens
ctctctatggaccca

SEQ ID NO: 397765 - DNA, 15 bp, Homo sapiens
cctctctatggaccc

SEQ ID NO: 397766 - DNA, 15 bp, Homo sapiens
acctctctatggacc

SEQ ID NO: 397767 - DNA, 15 bp, Homo sapiens
tacctctctatggac

SEQ ID NO: 397768 - DNA, 15 bp, Homo sapiens
gtacctctctatgga

SEQ ID NO: 397769 - DNA, 15 bp, Homo sapiens
ggtacctctctatgg

SEQ ID NO: 397770 - DNA, 15 bp, Homo sapiens
aggtacctctctatg

SEQ ID NO: 397771 - DNA, 15 bp, Homo sapiens
gaggtacctctctat

SEQ ID NO: 397772 - DNA, 15 bp, Homo sapiens
ggaggtacctctcta

SEQ ID NO: 397773 - DNA, 15 bp, Homo sapiens
gggaggtacctctct

SEQ ID NO: 397774 - DNA, 15 bp, Homo sapiens
ggggaggtacctctc

SEQ ID NO: 397775 - DNA, 15 bp, Homo sapiens
tggggaggtacctct

SEQ ID NO: 397776 - DNA, 15 bp, Homo sapiens
ttggggaggtacctc

SEQ ID NO: 397777 - DNA, 15 bp, Homo sapiens
gttggggaggtacct

SEQ ID NO: 397778 - DNA, 15 bp, Homo sapiens
agttggggaggtacc

SEQ ID NO: 397779 - DNA, 15 bp, Homo sapiens
tagttggggaggtac

SEQ ID NO: 397780 - DNA, 15 bp, Homo sapiens
ctagttggggaggta

SEQ ID NO: 397781 - DNA, 15 bp, Homo sapiens
actagttggggaggt

SEQ ID NO: 397782 - DNA, 15 bp, Homo sapiens
cactagttggggagg

SEQ ID NO: 397783 - DNA, 15 bp, Homo sapiens
ccactagttggggag

SEQ ID NO: 397784 - DNA, 15 bp, Homo sapiens
tccactagttgggga

SEQ ID NO: 397785 - DNA, 15 bp, Homo sapiens
gtccactagttgggg

SEQ ID NO: 397786 - DNA, 15 bp, Homo sapiens
ggtccactagttggg

SEQ ID NO: 397787 - DNA, 15 bp, Homo sapiens
aggtccactagttgg

SEQ ID NO: 397788 - DNA, 15 bp, Homo sapiens
taggtccactagttg

SEQ ID NO: 397789 - DNA, 15 bp, Homo sapiens
ctaggtccactagtt

SEQ ID NO: 397790 - DNA, 15 bp, Homo sapiens
tctaggtccactagt

SEQ ID NO: 397791 - DNA, 15 bp, Homo sapiens
ctctaggtccactag

SEQ ID NO: 397792 - DNA, 15 bp, Homo sapiens
cctctaggtccacta

SEQ ID NO: 397793 - DNA, 15 bp, Homo sapiens
ccctctaggtccact

SEQ ID NO: 397794 - DNA, 15 bp, Homo sapiens
gccctctaggtccac

SEQ ID NO: 397795 - DNA, 15 bp, Homo sapiens
tgccctctaggtcca

SEQ ID NO: 397796 - DNA, 15 bp, Homo sapiens
ctgccctctaggtcc

SEQ ID NO: 397797 - DNA, 15 bp, Homo sapiens
tctgccctctaggtc

SEQ ID NO: 397798 - DNA, 15 bp, Homo sapiens
ctctgccctctaggt

SEQ ID NO: 397799 - DNA, 15 bp, Homo sapiens
gctctgccctctagg

SEQ ID NO: 397800 - DNA, 15 bp, Homo sapiens
ggctctgccctctag

SEQ ID NO: 397801 - DNA, 15 bp, Homo sapiens
tggctctgccctcta

SEQ ID NO: 397802 - DNA, 15 bp, Homo sapiens
gtggctctgccctct

SEQ ID NO: 397803 - DNA, 15 bp, Homo sapiens
tgtggctctgccctc

SEQ ID NO: 397804 - DNA, 15 bp, Homo sapiens
ttgtggctctgccct

SEQ ID NO: 397805 - DNA, 15 bp, Homo sapiens
cttgtggctctgccc

SEQ ID NO: 397806 - DNA, 15 bp, Homo sapiens
gcttgtggctctgcc

SEQ ID NO: 397807 - DNA, 15 bp, Homo sapiens
ggcttgtggctctgc

SEQ ID NO: 397808 - DNA, 15 bp, Homo sapiens
tggcttgtggctctg

SEQ ID NO: 397809 - DNA, 15 bp, Homo sapiens
ttggcttgtggctct

SEQ ID NO: 397810 - DNA, 15 bp, Homo sapiens
tttggcttgtggctc

SEQ ID NO: 397811 - DNA, 15 bp, Homo sapiens
ctttggcttgtggct

SEQ ID NO: 397812 - DNA, 15 bp, Homo sapiens
tctttggcttgtggc

SEQ ID NO: 397813 - DNA, 15 bp, Homo sapiens
ctctttggcttgtgg

SEQ ID NO: 397814 - DNA, 15 bp, Homo sapiens
cctctttggcttgtg

SEQ ID NO: 397815 - DNA, 15 bp, Homo sapiens
tcctctttggcttgt

SEQ ID NO: 397816 - DNA, 15 bp, Homo sapiens
atcctctttggcttg

SEQ ID NO: 397817 - DNA, 15 bp, Homo sapiens
aatcctctttggctt

SEQ ID NO: 397818 - DNA, 15 bp, Homo sapiens
taatcctctttggct

SEQ ID NO: 397819 - DNA, 15 bp, Homo sapiens
ataatcctctttggc

SEQ ID NO: 397820 - DNA, 15 bp, Homo sapiens
aataatcctctttgg

SEQ ID NO: 397821 - DNA, 15 bp, Homo sapiens
gaataatcctctttg

SEQ ID NO: 397822 - DNA, 15 bp, Homo sapiens
agaataatcctcttt

SEQ ID NO: 397823 - DNA, 15 bp, Homo sapiens
cagaataatcctctt

SEQ ID NO: 397824 - DNA, 15 bp, Homo sapiens
gcagaataatcctct

SEQ ID NO: 397825 - DNA, 15 bp, Homo sapiens
tgcagaataatcctc

SEQ ID NO: 397826 - DNA, 15 bp, Homo sapiens
ctgcagaataatcct

SEQ ID NO: 397827 - DNA, 15 bp, Homo sapiens
gctgcagaataatcc

SEQ ID NO: 397828 - DNA, 15 bp, Homo sapiens
agctgcagaataatc

SEQ ID NO: 397829 - DNA, 15 bp, Homo sapiens
cagctgcagaataat

SEQ ID NO: 397830 - DNA, 15 bp, Homo sapiens
acagctgcagaataa

SEQ ID NO: 397831 - DNA, 15 bp, Homo sapiens
tacagctgcagaata

SEQ ID NO: 397832 - DNA, 15 bp, Homo sapiens
ttacagctgcagaat

SEQ ID NO: 397833 - DNA, 15 bp, Homo sapiens
cttacagctgcagaa

SEQ ID NO: 397834 - DNA, 15 bp, Homo sapiens
tcttacagctgcaga

SEQ ID NO: 397835 - DNA, 15 bp, Homo sapiens
gtcttacagctgcag

SEQ ID NO: 397836 - DNA, 15 bp, Homo sapiens
ggtcttacagctgca

SEQ ID NO: 397837 - DNA, 15 bp, Homo sapiens
aggtcttacagctgc

SEQ ID NO: 397838 - DNA, 15 bp, Homo sapiens
gaggtcttacagctg

SEQ ID NO: 397839 - DNA, 15 bp, Homo sapiens
tgaggtcttacagct

SEQ ID NO: 397840 - DNA, 15 bp, Homo sapiens
atgaggtcttacagc

SEQ ID NO: 397841 - DNA, 15 bp, Homo sapiens
catgaggtcttacag

SEQ ID NO: 397842 - DNA, 15 bp, Homo sapiens
tcatgaggtcttaca

SEQ ID NO: 397843 - DNA, 15 bp, Homo sapiens
ttcatgaggtcttac

SEQ ID NO: 397844 - DNA, 15 bp, Homo sapiens
cttcatgaggtctta

SEQ ID NO: 397845 - DNA, 15 bp, Homo sapiens
acttcatgaggtctt

SEQ ID NO: 397846 - DNA, 15 bp, Homo sapiens
aacttcatgaggtct

SEQ ID NO: 397847 - DNA, 15 bp, Homo sapiens
aaacttcatgaggtc

SEQ ID NO: 397848 - DNA, 15 bp, Homo sapiens
gaaacttcatgaggt

SEQ ID NO: 397849 - DNA, 15 bp, Homo sapiens
ggaaacttcatgagg

SEQ ID NO: 397850 - DNA, 15 bp, Homo sapiens
gggaaacttcatgag

SEQ ID NO: 397851 - DNA, 15 bp, Homo sapiens
agggaaacttcatga

SEQ ID NO: 397852 - DNA, 15 bp, Homo sapiens
aagggaaacttcatg

SEQ ID NO: 397853 - DNA, 15 bp, Homo sapiens
caagggaaacttcat

SEQ ID NO: 397854 - DNA, 15 bp, Homo sapiens
acaagggaaacttca

SEQ ID NO: 397855 - DNA, 15 bp, Homo sapiens
tacaagggaaacttc

SEQ ID NO: 397856 - DNA, 15 bp, Homo sapiens
ctacaagggaaactt

SEQ ID NO: 397857 - DNA, 15 bp, Homo sapiens
gctacaagggaaact

SEQ ID NO: 397858 - DNA, 15 bp, Homo sapiens
ggctacaagggaaac

SEQ ID NO: 397859 - DNA, 15 bp, Homo sapiens
aggctacaagggaaa

SEQ ID NO: 397860 - DNA, 15 bp, Homo sapiens
caggctacaagggaa

SEQ ID NO: 397861 - DNA, 15 bp, Homo sapiens
ccaggctacaaggga

SEQ ID NO: 397862 - DNA, 15 bp, Homo sapiens
tccaggctacaaggg

SEQ ID NO: 397863 - DNA, 15 bp, Homo sapiens
gtccaggctacaagg

SEQ ID NO: 397864 - DNA, 15 bp, Homo sapiens
agtccaggctacaag

SEQ ID NO: 397865 - DNA, 15 bp, Homo sapiens
aagtccaggctacaa

SEQ ID NO: 397866 - DNA, 15 bp, Homo sapiens
taagtccaggctaca

SEQ ID NO: 397867 - DNA, 15 bp, Homo sapiens
ataagtccaggctac

SEQ ID NO: 397868 - DNA, 15 bp, Homo sapiens
aataagtccaggcta

SEQ ID NO: 397869 - DNA, 15 bp, Homo sapiens
aaataagtccaggct

SEQ ID NO: 397870 - DNA, 15 bp, Homo sapiens
aaaataagtccaggc

SEQ ID NO: 397871 - DNA, 15 bp, Homo sapiens
caaaataagtccagg

SEQ ID NO: 397872 - DNA, 15 bp, Homo sapiens
tcaaaataagtccag

SEQ ID NO: 397873 - DNA, 15 bp, Homo sapiens
ttcaaaataagtcca

SEQ ID NO: 397874 - DNA, 15 bp, Homo sapiens
attcaaaataagtcc

SEQ ID NO: 397875 - DNA, 15 bp, Homo sapiens
cattcaaaataagtc

SEQ ID NO: 397876 - DNA, 15 bp, Homo sapiens
acattcaaaataagt

SEQ ID NO: 397877 - DNA, 15 bp, Homo sapiens
cacattcaaaataag

SEQ ID NO: 397878 - DNA, 15 bp, Homo sapiens
acacattcaaaataa

SEQ ID NO: 397879 - DNA, 15 bp, Homo sapiens
aacacattcaaaata

SEQ ID NO: 397880 - DNA, 15 bp, Homo sapiens
taacacattcaaaat

SEQ ID NO: 397881 - DNA, 15 bp, Homo sapiens
ataacacattcaaaa

SEQ ID NO: 397882 - DNA, 15 bp, Homo sapiens
cataacacattcaaa

SEQ ID NO: 397883 - DNA, 15 bp, Homo sapiens
gcataacacattcaa

SEQ ID NO: 397884 - DNA, 15 bp, Homo sapiens
ggcataacacattca

SEQ ID NO: 397885 - DNA, 15 bp, Homo sapiens
aggcataacacattc

SEQ ID NO: 397886 - DNA, 15 bp, Homo sapiens
aaggcataacacatt

SEQ ID NO: 397887 - DNA, 15 bp, Homo sapiens
aaaggcataacacat

SEQ ID NO: 397888 - DNA, 15 bp, Homo sapiens
gaaaggcataacaca

SEQ ID NO: 397889 - DNA, 15 bp, Homo sapiens
agaaaggcataacac

SEQ ID NO: 397890 - DNA, 15 bp, Homo sapiens
aagaaaggcataaca

SEQ ID NO: 397891 - DNA, 15 bp, Homo sapiens
gaagaaaggcataac

SEQ ID NO: 397892 - DNA, 15 bp, Homo sapiens
agaagaaaggcataa

SEQ ID NO: 397893 - DNA, 15 bp, Homo sapiens
aagaagaaaggcata

SEQ ID NO: 397894 - DNA, 15 bp, Homo sapiens
aaagaagaaaggcat

SEQ ID NO: 397895 - DNA, 15 bp, Homo sapiens
gaaagaagaaaggca

SEQ ID NO: 397896 - DNA, 15 bp, Homo sapiens
ggaaagaagaaaggc

SEQ ID NO: 397897 - DNA, 15 bp, Homo sapiens
aggaaagaagaaagg

SEQ ID NO: 397898 - DNA, 15 bp, Homo sapiens
taggaaagaagaaag

SEQ ID NO: 397899 - DNA, 15 bp, Homo sapiens
ataggaaagaagaaa

SEQ ID NO: 397900 - DNA, 15 bp, Homo sapiens
aataggaaagaagaa

SEQ ID NO: 397901 - DNA, 15 bp, Homo sapiens
aaataggaaagaaga

SEQ ID NO: 397902 - DNA, 15 bp, Homo sapiens
gaaataggaaagaag

SEQ ID NO: 397903 - DNA, 15 bp, Homo sapiens
agaaataggaaagaa

SEQ ID NO: 397904 - DNA, 15 bp, Homo sapiens
aagaaataggaaaga

SEQ ID NO: 397905 - DNA, 15 bp, Homo sapiens
aaagaaataggaaag

SEQ ID NO: 397906 - DNA, 15 bp, Homo sapiens
aaaagaaataggaaa

SEQ ID NO: 397907 - DNA, 15 bp, Homo sapiens
aaaaagaaataggaa

SEQ ID NO: 397908 - DNA, 15 bp, Homo sapiens
aaaaaagaaatagga

SEQ ID NO: 397909 - DNA, 15 bp, Homo sapiens
aaaaaaagaaatagg

SEQ ID NO: 397910 - DNA, 15 bp, Homo sapiens
aaaaaaaagaaatag

SEQ ID NO: 397911 - DNA, 15 bp, Homo sapiens
aaaaaaaaagaaata

SEQ ID NO: 397912 - DNA, 15 bp, Homo sapiens
aaaaaaaaaagaaat

SEQ ID NO: 397913 - DNA, 15 bp, Homo sapiens
cacaaaaaaaaaaaa

SEQ ID NO: 397914 - DNA, 15 bp, Homo sapiens
ccacaaaaaaaaaaa

SEQ ID NO: 397915 - DNA, 15 bp, Homo sapiens
tccacaaaaaaaaaa

SEQ ID NO: 397916 - DNA, 15 bp, Homo sapiens
ttccacaaaaaaaaa

SEQ ID NO: 397917 - DNA, 15 bp, Homo sapiens
tttccacaaaaaaaa

SEQ ID NO: 397918 - DNA, 15 bp, Homo sapiens
atttccacaaaaaaa

SEQ ID NO: 397919 - DNA, 15 bp, Homo sapiens
aatttccacaaaaaa

SEQ ID NO: 397920 - DNA, 15 bp, Homo sapiens
aaatttccacaaaaa

SEQ ID NO: 397921 - DNA, 15 bp, Homo sapiens
gaaatttccacaaaa

SEQ ID NO: 397922 - DNA, 15 bp, Homo sapiens
agaaatttccacaaa

SEQ ID NO: 397923 - DNA, 15 bp, Homo sapiens
aagaaatttccacaa

SEQ ID NO: 397924 - DNA, 15 bp, Homo sapiens
aaagaaatttccaca

SEQ ID NO: 397925 - DNA, 15 bp, Homo sapiens
gaaagaaatttccac

SEQ ID NO: 397926 - DNA, 15 bp, Homo sapiens
ggaaagaaatttcca

SEQ ID NO: 397927 - DNA, 15 bp, Homo sapiens
aggaaagaaatttcc

SEQ ID NO: 397928 - DNA, 15 bp, Homo sapiens
aaggaaagaaatttc

SEQ ID NO: 397929 - DNA, 15 bp, Homo sapiens
aaaggaaagaaattt

SEQ ID NO: 397930 - DNA, 15 bp, Homo sapiens
caaaggaaagaaatt

SEQ ID NO: 397931 - DNA, 15 bp, Homo sapiens
acaaaggaaagaaat

SEQ ID NO: 397932 - DNA, 15 bp, Homo sapiens
gacaaaggaaagaaa

SEQ ID NO: 397933 - DNA, 15 bp, Homo sapiens
agacaaaggaaagaa

SEQ ID NO: 397934 - DNA, 15 bp, Homo sapiens
cagacaaaggaaaga

SEQ ID NO: 397935 - DNA, 15 bp, Homo sapiens
tcagacaaaggaaag

SEQ ID NO: 397936 - DNA, 15 bp, Homo sapiens
ctcagacaaaggaaa

SEQ ID NO: 397937 - DNA, 15 bp, Homo sapiens
gctcagacaaaggaa

SEQ ID NO: 397938 - DNA, 15 bp, Homo sapiens
ggctcagacaaagga

SEQ ID NO: 397939 - DNA, 15 bp, Homo sapiens
tggctcagacaaagg

SEQ ID NO: 397940 - DNA, 15 bp, Homo sapiens
atggctcagacaaag

SEQ ID NO: 397941 - DNA, 15 bp, Homo sapiens
gatggctcagacaaa

SEQ ID NO: 397942 - DNA, 15 bp, Homo sapiens
agatggctcagacaa

SEQ ID NO: 397943 - DNA, 15 bp, Homo sapiens
aagatggctcagaca

SEQ ID NO: 397944 - DNA, 15 bp, Homo sapiens
aaagatggctcagac

SEQ ID NO: 397945 - DNA, 15 bp, Homo sapiens
caaagatggctcaga

SEQ ID NO: 397946 - DNA, 15 bp, Homo sapiens
tcaaagatggctcag

SEQ ID NO: 397947 - DNA, 15 bp, Homo sapiens
ttcaaagatggctca

SEQ ID NO: 397948 - DNA, 15 bp, Homo sapiens
attcaaagatggctc

SEQ ID NO: 397949 - DNA, 15 bp, Homo sapiens
aattcaaagatggct

SEQ ID NO: 397950 - DNA, 15 bp, Homo sapiens
aaattcaaagatggc

SEQ ID NO: 397951 - DNA, 15 bp, Homo sapiens
aaaattcaaagatgg

SEQ ID NO: 397952 - DNA, 15 bp, Homo sapiens
caaaattcaaagatg

SEQ ID NO: 397953 - DNA, 15 bp, Homo sapiens
ccaaaattcaaagat

SEQ ID NO: 397954 - DNA, 15 bp, Homo sapiens
tccaaaattcaaaga

SEQ ID NO: 397955 - DNA, 15 bp, Homo sapiens
ttccaaaattcaaag

SEQ ID NO: 397956 - DNA, 15 bp, Homo sapiens
cttccaaaattcaaa

SEQ ID NO: 397957 - DNA, 15 bp, Homo sapiens
acttccaaaattcaa

SEQ ID NO: 397958 - DNA, 15 bp, Homo sapiens
tacttccaaaattca

SEQ ID NO: 397959 - DNA, 15 bp, Homo sapiens
gtacttccaaaattc

SEQ ID NO: 397960 - DNA, 15 bp, Homo sapiens
tgtacttccaaaatt

SEQ ID NO: 397961 - DNA, 15 bp, Homo sapiens
atgtacttccaaaat

SEQ ID NO: 397962 - DNA, 15 bp, Homo sapiens
tatgtacttccaaaa

SEQ ID NO: 397963 - DNA, 15 bp, Homo sapiens
ttatgtacttccaaa

SEQ ID NO: 397964 - DNA, 15 bp, Homo sapiens
attatgtacttccaa

SEQ ID NO: 397965 - DNA, 15 bp, Homo sapiens
aattatgtacttcca

SEQ ID NO: 397966 - DNA, 15 bp, Homo sapiens
aaattatgtacttcc

SEQ ID NO: 397967 - DNA, 15 bp, Homo sapiens
caaattatgtacttc

SEQ ID NO: 397968 - DNA, 15 bp, Homo sapiens
acaaattatgtactt

SEQ ID NO: 397969 - DNA, 15 bp, Homo sapiens
aacaaattatgtact

SEQ ID NO: 397970 - DNA, 15 bp, Homo sapiens
aaacaaattatgtac

SEQ ID NO: 397971 - DNA, 15 bp, Homo sapiens
caaacaaattatgta

SEQ ID NO: 397972 - DNA, 15 bp, Homo sapiens
ccaaacaaattatgt

SEQ ID NO: 397973 - DNA, 15 bp, Homo sapiens
accaaacaaattatg

SEQ ID NO: 397974 - DNA, 15 bp, Homo sapiens
aaccaaacaaattat

SEQ ID NO: 397975 - DNA, 15 bp, Homo sapiens
aaaccaaacaaatta

SEQ ID NO: 397976 - DNA, 15 bp, Homo sapiens
gaaaccaaacaaatt

SEQ ID NO: 397977 - DNA, 15 bp, Homo sapiens
tgaaaccaaacaaat

SEQ ID NO: 397978 - DNA, 15 bp, Homo sapiens
gtgaaaccaaacaaa

SEQ ID NO: 397979 - DNA, 15 bp, Homo sapiens
tgtgaaaccaaacaa

SEQ ID NO: 397980 - DNA, 15 bp, Homo sapiens
ttgtgaaaccaaaca

SEQ ID NO: 397981 - DNA, 15 bp, Homo sapiens
cttgtgaaaccaaac

SEQ ID NO: 397982 - DNA, 15 bp, Homo sapiens
gcttgtgaaaccaaa

SEQ ID NO: 397983 - DNA, 15 bp, Homo sapiens
agcttgtgaaaccaa

SEQ ID NO: 397984 - DNA, 15 bp, Homo sapiens
gagcttgtgaaacca

SEQ ID NO: 397985 - DNA, 15 bp, Homo sapiens
tgagcttgtgaaacc

SEQ ID NO: 397986 - DNA, 15 bp, Homo sapiens
gtgagcttgtgaaac

SEQ ID NO: 397987 - DNA, 15 bp, Homo sapiens
tgtgagcttgtgaaa

SEQ ID NO: 397988 - DNA, 15 bp, Homo sapiens
ctgtgagcttgtgaa

SEQ ID NO: 397989 - DNA, 15 bp, Homo sapiens
gctgtgagcttgtga

SEQ ID NO: 397990 - DNA, 15 bp, Homo sapiens
agctgtgagcttgtg

SEQ ID NO: 397991 - DNA, 15 bp, Homo sapiens
cagctgtgagcttgt

SEQ ID NO: 397992 - DNA, 15 bp, Homo sapiens
ccagctgtgagcttg

SEQ ID NO: 397993 - DNA, 15 bp, Homo sapiens
tccagctgtgagctt

SEQ ID NO: 397994 - DNA, 15 bp, Homo sapiens
ctccagctgtgagct

SEQ ID NO: 397995 - DNA, 15 bp, Homo sapiens
tctccagctgtgagc

SEQ ID NO: 397996 - DNA, 15 bp, Homo sapiens
ctctccagctgtgag

SEQ ID NO: 397997 - DNA, 15 bp, Homo sapiens
gctctccagctgtga

SEQ ID NO: 397998 - DNA, 15 bp, Homo sapiens
tgctctccagctgtg

SEQ ID NO: 397999 - DNA, 15 bp, Homo sapiens
ttgctctccagctgt

SEQ ID NO: 398000 - DNA, 15 bp, Homo sapiens
attgctctccagctg

SEQ ID NO: 398001 - DNA, 15 bp, Homo sapiens
aattgctctccagct

SEQ ID NO: 398002 - DNA, 15 bp, Homo sapiens
aaattgctctccagc

SEQ ID NO: 398003 - DNA, 15 bp, Homo sapiens
caaattgctctccag

SEQ ID NO: 398004 - DNA, 15 bp, Homo sapiens
acaaattgctctcca

SEQ ID NO: 398005 - DNA, 15 bp, Homo sapiens
gacaaattgctctcc

SEQ ID NO: 398006 - DNA, 15 bp, Homo sapiens
agacaaattgctctc

SEQ ID NO: 398007 - DNA, 15 bp, Homo sapiens
gagacaaattgctct

SEQ ID NO: 398008 - DNA, 15 bp, Homo sapiens
agagacaaattgctc

SEQ ID NO: 398009 - DNA, 15 bp, Homo sapiens
cagagacaaattgct

SEQ ID NO: 398010 - DNA, 15 bp, Homo sapiens
ccagagacaaattgc

SEQ ID NO: 398011 - DNA, 15 bp, Homo sapiens
tccagagacaaattg

SEQ ID NO: 398012 - DNA, 15 bp, Homo sapiens
atccagagacaaatt

SEQ ID NO: 398013 - DNA, 15 bp, Homo sapiens
catccagagacaaat

SEQ ID NO: 398014 - DNA, 15 bp, Homo sapiens
tcatccagagacaaa

SEQ ID NO: 398015 - DNA, 15 bp, Homo sapiens
ttcatccagagacaa

SEQ ID NO: 398016 - DNA, 15 bp, Homo sapiens
attcatccagagaca

SEQ ID NO: 398017 - DNA, 15 bp, Homo sapiens
gattcatccagagac

SEQ ID NO: 398018 - DNA, 15 bp, Homo sapiens
tgattcatccagaga

SEQ ID NO: 398019 - DNA, 15 bp, Homo sapiens
atgattcatccagag

SEQ ID NO: 398020 - DNA, 15 bp, Homo sapiens
tatgattcatccaga

SEQ ID NO: 398021 - DNA, 15 bp, Homo sapiens
gtatgattcatccag

SEQ ID NO: 398022 - DNA, 15 bp, Homo sapiens
ggtatgattcatcca

SEQ ID NO: 398023 - DNA, 15 bp, Homo sapiens
aggtatgattcatcc

SEQ ID NO: 398024 - DNA, 15 bp, Homo sapiens
aaggtatgattcatc

SEQ ID NO: 398025 - DNA, 15 bp, Homo sapiens
caaggtatgattcat

SEQ ID NO: 398026 - DNA, 15 bp, Homo sapiens
tcaaggtatgattca

SEQ ID NO: 398027 - DNA, 15 bp, Homo sapiens
ctcaaggtatgattc

SEQ ID NO: 398028 - DNA, 15 bp, Homo sapiens
actcaaggtatgatt

SEQ ID NO: 398029 - DNA, 15 bp, Homo sapiens
gactcaaggtatgat

SEQ ID NO: 398030 - DNA, 15 bp, Homo sapiens
agactcaaggtatga

SEQ ID NO: 398031 - DNA, 15 bp, Homo sapiens
gagactcaaggtatg

SEQ ID NO: 398032 - DNA, 15 bp, Homo sapiens
tgagactcaaggtat

SEQ ID NO: 398033 - DNA, 15 bp, Homo sapiens
gtgagactcaaggta

SEQ ID NO: 398034 - DNA, 15 bp, Homo sapiens
ggtgagactcaaggt

SEQ ID NO: 398035 - DNA, 15 bp, Homo sapiens
gggtgagactcaagg

SEQ ID NO: 398036 - DNA, 15 bp, Homo sapiens
tgggtgagactcaag

SEQ ID NO: 398037 - DNA, 15 bp, Homo sapiens
atgggtgagactcaa

SEQ ID NO: 398038 - DNA, 15 bp, Homo sapiens
gatgggtgagactca

SEQ ID NO: 398039 - DNA, 15 bp, Homo sapiens
agatgggtgagactc

SEQ ID NO: 398040 - DNA, 15 bp, Homo sapiens
gagatgggtgagact

SEQ ID NO: 398041 - DNA, 15 bp, Homo sapiens
agagatgggtgagac

SEQ ID NO: 398042 - DNA, 15 bp, Homo sapiens
cagagatgggtgaga

SEQ ID NO: 398043 - DNA, 15 bp, Homo sapiens
ccagagatgggtgag

SEQ ID NO: 398044 - DNA, 15 bp, Homo sapiens
cccagagatgggtga

SEQ ID NO: 398045 - DNA, 15 bp, Homo sapiens
ccccagagatgggtg

SEQ ID NO: 398046 - DNA, 15 bp, Homo sapiens
gccccagagatgggt

SEQ ID NO: 398047 - DNA, 15 bp, Homo sapiens
agccccagagatggg

SEQ ID NO: 398048 - DNA, 15 bp, Homo sapiens
tagccccagagatgg

SEQ ID NO: 398049 - DNA, 15 bp, Homo sapiens
atagccccagagatg

SEQ ID NO: 398050 - DNA, 15 bp, Homo sapiens
catagccccagagat

SEQ ID NO: 398051 - DNA, 15 bp, Homo sapiens
tcatagccccagaga

SEQ ID NO: 398052 - DNA, 15 bp, Homo sapiens
atcatagccccagag

SEQ ID NO: 398053 - DNA, 15 bp, Homo sapiens
catcatagccccaga

SEQ ID NO: 398054 - DNA, 15 bp, Homo sapiens
tcatcatagccccag

SEQ ID NO: 398055 - DNA, 15 bp, Homo sapiens
atcatcatagcccca

SEQ ID NO: 398056 - DNA, 15 bp, Homo sapiens
gatcatcatagcccc

SEQ ID NO: 398057 - DNA, 15 bp, Homo sapiens
ggatcatcatagccc

SEQ ID NO: 398058 - DNA, 15 bp, Homo sapiens
gggatcatcatagcc

SEQ ID NO: 398059 - DNA, 15 bp, Homo sapiens
agggatcatcatagc

SEQ ID NO: 398060 - DNA, 15 bp, Homo sapiens
aagggatcatcatag

SEQ ID NO: 398061 - DNA, 15 bp, Homo sapiens
aaagggatcatcata

SEQ ID NO: 398062 - DNA, 15 bp, Homo sapiens
taaagggatcatcat

SEQ ID NO: 398063 - DNA, 15 bp, Homo sapiens
ttaaagggatcatca

SEQ ID NO: 398064 - DNA, 15 bp, Homo sapiens
attaaagggatcatc

SEQ ID NO: 398065 - DNA, 15 bp, Homo sapiens
cattaaagggatcat

SEQ ID NO: 398066 - DNA, 15 bp, Homo sapiens
acattaaagggatca

SEQ ID NO: 398067 - DNA, 15 bp, Homo sapiens
tacattaaagggatc

SEQ ID NO: 398068 - DNA, 15 bp, Homo sapiens
atacattaaagggat

SEQ ID NO: 398069 - DNA, 15 bp, Homo sapiens
aatacattaaaggga

SEQ ID NO: 398070 - DNA, 15 bp, Homo sapiens
aaatacattaaaggg

SEQ ID NO: 398071 - DNA, 15 bp, Homo sapiens
aaaatacattaaagg

SEQ ID NO: 398072 - DNA, 15 bp, Homo sapiens
caaaatacattaaag

SEQ ID NO: 398073 - DNA, 15 bp, Homo sapiens
gcaaaatacattaaa

SEQ ID NO: 398074 - DNA, 15 bp, Homo sapiens
tgcaaaatacattaa

SEQ ID NO: 398075 - DNA, 15 bp, Homo sapiens
atgcaaaatacatta

SEQ ID NO: 398076 - DNA, 15 bp, Homo sapiens
catgcaaaatacatt

SEQ ID NO: 398077 - DNA, 15 bp, Homo sapiens
acatgcaaaatacat

SEQ ID NO: 398078 - DNA, 15 bp, Homo sapiens
tacatgcaaaataca

SEQ ID NO: 398079 - DNA, 15 bp, Homo sapiens
ttacatgcaaaatac

SEQ ID NO: 398080 - DNA, 15 bp, Homo sapiens
cttacatgcaaaata

SEQ ID NO: 398081 - DNA, 15 bp, Homo sapiens
tcttacatgcaaaat

SEQ ID NO: 398082 - DNA, 15 bp, Homo sapiens
ttcttacatgcaaaa

SEQ ID NO: 398083 - DNA, 15 bp, Homo sapiens
cttcttacatgcaaa

SEQ ID NO: 398084 - DNA, 15 bp, Homo sapiens
ccttcttacatgcaa

SEQ ID NO: 398085 - DNA, 15 bp, Homo sapiens
tccttcttacatgca

SEQ ID NO: 398086 - DNA, 15 bp, Homo sapiens
gtccttcttacatgc

SEQ ID NO: 398087 - DNA, 15 bp, Homo sapiens
tgtccttcttacatg

SEQ ID NO: 398088 - DNA, 15 bp, Homo sapiens
atgtccttcttacat

SEQ ID NO: 398089 - DNA, 15 bp, Homo sapiens
catgtccttcttaca

SEQ ID NO: 398090 - DNA, 15 bp, Homo sapiens
tcatgtccttcttac

SEQ ID NO: 398091 - DNA, 15 bp, Homo sapiens
atcatgtccttctta

SEQ ID NO: 398092 - DNA, 15 bp, Homo sapiens
aatcatgtccttctt

SEQ ID NO: 398093 - DNA, 15 bp, Homo sapiens
aaatcatgtccttct

SEQ ID NO: 398094 - DNA, 15 bp, Homo sapiens
caaatcatgtccttc

SEQ ID NO: 398095 - DNA, 15 bp, Homo sapiens
ccaaatcatgtcctt

SEQ ID NO: 398096 - DNA, 15 bp, Homo sapiens
cccaaatcatgtcct

SEQ ID NO: 398097 - DNA, 15 bp, Homo sapiens
ccccaaatcatgtcc

SEQ ID NO: 398098 - DNA, 15 bp, Homo sapiens
cccccaaatcatgtc

SEQ ID NO: 398099 - DNA, 15 bp, Homo sapiens
acccccaaatcatgt

SEQ ID NO: 398100 - DNA, 15 bp, Homo sapiens
cacccccaaatcatg

SEQ ID NO: 398101 - DNA, 15 bp, Homo sapiens
ccacccccaaatcat

SEQ ID NO: 398102 - DNA, 15 bp, Homo sapiens
cccacccccaaatca

SEQ ID NO: 398103 - DNA, 15 bp, Homo sapiens
ccccacccccaaatc

SEQ ID NO: 398104 - DNA, 15 bp, Homo sapiens
cccccacccccaaat

SEQ ID NO: 398105 - DNA, 15 bp, Homo sapiens
gcccccacccccaaa

SEQ ID NO: 398106 - DNA, 15 bp, Homo sapiens
tgcccccacccccaa

SEQ ID NO: 398107 - DNA, 15 bp, Homo sapiens
ctgcccccaccccca

SEQ ID NO: 398108 - DNA, 15 bp, Homo sapiens
tctgcccccaccccc

SEQ ID NO: 398109 - DNA, 15 bp, Homo sapiens
ttctgcccccacccc

SEQ ID NO: 398110 - DNA, 15 bp, Homo sapiens
cttctgcccccaccc

SEQ ID NO: 398111 - DNA, 15 bp, Homo sapiens
gcttctgcccccacc

SEQ ID NO: 398112 - DNA, 15 bp, Homo sapiens
agcttctgcccccac

SEQ ID NO: 398113 - DNA, 15 bp, Homo sapiens
cagcttctgccccca

SEQ ID NO: 398114 - DNA, 15 bp, Homo sapiens
tcagcttctgccccc

SEQ ID NO: 398115 - DNA, 15 bp, Homo sapiens
ttcagcttctgcccc

SEQ ID NO: 398116 - DNA, 15 bp, Homo sapiens
attcagcttctgccc

SEQ ID NO: 398117 - DNA, 15 bp, Homo sapiens
tattcagcttctgcc

SEQ ID NO: 398118 - DNA, 15 bp, Homo sapiens
ttattcagcttctgc

SEQ ID NO: 398119 - DNA, 15 bp, Homo sapiens
attattcagcttctg

SEQ ID NO: 398120 - DNA, 15 bp, Homo sapiens
tattattcagcttct

SEQ ID NO: 398121 - DNA, 15 bp, Homo sapiens
atattattcagcttc

SEQ ID NO: 398122 - DNA, 15 bp, Homo sapiens
tatattattcagctt

SEQ ID NO: 398123 - DNA, 15 bp, Homo sapiens
ctatattattcagct

SEQ ID NO: 398124 - DNA, 15 bp, Homo sapiens
tctatattattcagc

SEQ ID NO: 398125 - DNA, 15 bp, Homo sapiens
atctatattattcag

SEQ ID NO: 398126 - DNA, 15 bp, Homo sapiens
aatctatattattca

SEQ ID NO: 398127 - DNA, 15 bp, Homo sapiens
caatctatattattc

SEQ ID NO: 398128 - DNA, 15 bp, Homo sapiens
tcaatctatattatt

SEQ ID NO: 398129 - DNA, 15 bp, Homo sapiens
ttcaatctatattat

SEQ ID NO: 398130 - DNA, 15 bp, Homo sapiens
attcaatctatatta

SEQ ID NO: 398131 - DNA, 15 bp, Homo sapiens
cattcaatctatatt

SEQ ID NO: 398132 - DNA, 15 bp, Homo sapiens
acattcaatctatat

SEQ ID NO: 398133 - DNA, 15 bp, Homo sapiens
aacattcaatctata

SEQ ID NO: 398134 - DNA, 15 bp, Homo sapiens
aaacattcaatctat

SEQ ID NO: 398135 - DNA, 15 bp, Homo sapiens
caaacattcaatcta

SEQ ID NO: 398136 - DNA, 15 bp, Homo sapiens
gcaaacattcaatct

SEQ ID NO: 398137 - DNA, 15 bp, Homo sapiens
tgcaaacattcaatc

SEQ ID NO: 398138 - DNA, 15 bp, Homo sapiens
atgcaaacattcaat

SEQ ID NO: 398139 - DNA, 15 bp, Homo sapiens
gatgcaaacattcaa

SEQ ID NO: 398140 - DNA, 15 bp, Homo sapiens
ggatgcaaacattca

SEQ ID NO: 398141 - DNA, 15 bp, Homo sapiens
gggatgcaaacattc

SEQ ID NO: 398142 - DNA, 15 bp, Homo sapiens
ggggatgcaaacatt

SEQ ID NO: 398143 - DNA, 15 bp, Homo sapiens
gggggatgcaaacat

SEQ ID NO: 398144 - DNA, 15 bp, Homo sapiens
ggggggatgcaaaca

SEQ ID NO: 398145 - DNA, 15 bp, Homo sapiens
gggggggatgcaaac

SEQ ID NO: 398146 - DNA, 15 bp, Homo sapiens
tgggggggatgcaaa

SEQ ID NO: 398147 - DNA, 15 bp, Homo sapiens
gtgggggggatgcaa

SEQ ID NO: 398148 - DNA, 15 bp, Homo sapiens
ggtgggggggatgca

SEQ ID NO: 398149 - DNA, 15 bp, Homo sapiens
tggtgggggggatgc

SEQ ID NO: 398150 - DNA, 15 bp, Homo sapiens
ttggtgggggggatg

SEQ ID NO: 398151 - DNA, 15 bp, Homo sapiens
tttggtgggggggat

SEQ ID NO: 398152 - DNA, 15 bp, Homo sapiens
atttggtggggggga

SEQ ID NO: 398153 - DNA, 15 bp, Homo sapiens
aatttggtggggggg

SEQ ID NO: 398154 - DNA, 15 bp, Homo sapiens
gaatttggtgggggg

SEQ ID NO: 398155 - DNA, 15 bp, Homo sapiens
tgaatttggtggggg

SEQ ID NO: 398156 - DNA, 15 bp, Homo sapiens
atgaatttggtgggg

SEQ ID NO: 398157 - DNA, 15 bp, Homo sapiens
tatgaatttggtggg

SEQ ID NO: 398158 - DNA, 15 bp, Homo sapiens
ttatgaatttggtgg

SEQ ID NO: 398159 - DNA, 15 bp, Homo sapiens
cttatgaatttggtg

SEQ ID NO: 398160 - DNA, 15 bp, Homo sapiens
acttatgaatttggt

SEQ ID NO: 398161 - DNA, 15 bp, Homo sapiens
aacttatgaatttgg

SEQ ID NO: 398162 - DNA, 15 bp, Homo sapiens
taacttatgaatttg

SEQ ID NO: 398163 - DNA, 15 bp, Homo sapiens
ttaacttatgaattt

SEQ ID NO: 398164 - DNA, 15 bp, Homo sapiens
tttaacttatgaatt

SEQ ID NO: 398165 - DNA, 15 bp, Homo sapiens
ttttaacttatgaat

SEQ ID NO: 398166 - DNA, 15 bp, Homo sapiens
attttaacttatgaa

SEQ ID NO: 398167 - DNA, 15 bp, Homo sapiens
gattttaacttatga

SEQ ID NO: 398168 - DNA, 15 bp, Homo sapiens
ggattttaacttatg

SEQ ID NO: 398169 - DNA, 15 bp, Homo sapiens
aggattttaacttat

SEQ ID NO: 398170 - DNA, 15 bp, Homo sapiens
gaggattttaactta

SEQ ID NO: 398171 - DNA, 15 bp, Homo sapiens
tgaggattttaactt

SEQ ID NO: 398172 - DNA, 15 bp, Homo sapiens
atgaggattttaact

SEQ ID NO: 398173 - DNA, 15 bp, Homo sapiens
gatgaggattttaac

SEQ ID NO: 398174 - DNA, 15 bp, Homo sapiens
ggatgaggattttaa

SEQ ID NO: 398175 - DNA, 15 bp, Homo sapiens
gggatgaggatttta

SEQ ID NO: 398176 - DNA, 15 bp, Homo sapiens
agggatgaggatttt

SEQ ID NO: 398177 - DNA, 15 bp, Homo sapiens
tagggatgaggattt

SEQ ID NO: 398178 - DNA, 15 bp, Homo sapiens
ttagggatgaggatt

SEQ ID NO: 398179 - DNA, 15 bp, Homo sapiens
attagggatgaggat

SEQ ID NO: 398180 - DNA, 15 bp, Homo sapiens
tattagggatgagga

SEQ ID NO: 398181 - DNA, 15 bp, Homo sapiens
atattagggatgagg

SEQ ID NO: 398182 - DNA, 15 bp, Homo sapiens
catattagggatgag

SEQ ID NO: 398183 - DNA, 15 bp, Homo sapiens
tcatattagggatga

SEQ ID NO: 398184 - DNA, 15 bp, Homo sapiens
atcatattagggatg

SEQ ID NO: 398185 - DNA, 15 bp, Homo sapiens
catcatattagggat

SEQ ID NO: 398186 - DNA, 15 bp, Homo sapiens
ccatcatattaggga

SEQ ID NO: 398187 - DNA, 15 bp, Homo sapiens
accatcatattaggg

SEQ ID NO: 398188 - DNA, 15 bp, Homo sapiens
taccatcatattagg

SEQ ID NO: 398189 - DNA, 15 bp, Homo sapiens
ataccatcatattag

SEQ ID NO: 398190 - DNA, 15 bp, Homo sapiens
aataccatcatatta

SEQ ID NO: 398191 - DNA, 15 bp, Homo sapiens
taataccatcatatt

SEQ ID NO: 398192 - DNA, 15 bp, Homo sapiens
ttaataccatcatat

SEQ ID NO: 398193 - DNA, 15 bp, Homo sapiens
cttaataccatcata

SEQ ID NO: 398194 - DNA, 15 bp, Homo sapiens
tcttaataccatcat

SEQ ID NO: 398195 - DNA, 15 bp, Homo sapiens
ctcttaataccatca

SEQ ID NO: 398196 - DNA, 15 bp, Homo sapiens
cctcttaataccatc

SEQ ID NO: 398197 - DNA, 15 bp, Homo sapiens
acctcttaataccat

SEQ ID NO: 398198 - DNA, 15 bp, Homo sapiens
tacctcttaatacca

SEQ ID NO: 398199 - DNA, 15 bp, Homo sapiens
ttacctcttaatacc

SEQ ID NO: 398200 - DNA, 15 bp, Homo sapiens
cttacctcttaatac

SEQ ID NO: 398201 - DNA, 15 bp, Homo sapiens
ccttacctcttaata

SEQ ID NO: 398202 - DNA, 15 bp, Homo sapiens
cccttacctcttaat

SEQ ID NO: 398203 - DNA, 15 bp, Homo sapiens
ccccttacctcttaa

SEQ ID NO: 398204 - DNA, 15 bp, Homo sapiens
gccccttacctctta

SEQ ID NO: 398205 - DNA, 15 bp, Homo sapiens
agccccttacctctt

SEQ ID NO: 398206 - DNA, 15 bp, Homo sapiens
aagccccttacctct

SEQ ID NO: 398207 - DNA, 15 bp, Homo sapiens
aaagccccttacctc

SEQ ID NO: 398208 - DNA, 15 bp, Homo sapiens
caaagccccttacct

SEQ ID NO: 398209 - DNA, 15 bp, Homo sapiens
ccaaagccccttacc

SEQ ID NO: 398210 - DNA, 15 bp, Homo sapiens
accaaagccccttac

SEQ ID NO: 398211 - DNA, 15 bp, Homo sapiens
taccaaagcccctta

SEQ ID NO: 398212 - DNA, 15 bp, Homo sapiens
ctaccaaagcccctt

SEQ ID NO: 398213 - DNA, 15 bp, Homo sapiens
cctaccaaagcccct

SEQ ID NO: 398214 - DNA, 15 bp, Homo sapiens
tcctaccaaagcccc

SEQ ID NO: 398215 - DNA, 15 bp, Homo sapiens
ctcctaccaaagccc

SEQ ID NO: 398216 - DNA, 15 bp, Homo sapiens
tctcctaccaaagcc

SEQ ID NO: 398217 - DNA, 15 bp, Homo sapiens
ctctcctaccaaagc

SEQ ID NO: 398218 - DNA, 15 bp, Homo sapiens
actctcctaccaaag

SEQ ID NO: 398219 - DNA, 15 bp, Homo sapiens
tactctcctaccaaa

SEQ ID NO: 398220 - DNA, 15 bp, Homo sapiens
ttactctcctaccaa

SEQ ID NO: 398221 - DNA, 15 bp, Homo sapiens
cttactctcctacca

SEQ ID NO: 398222 - DNA, 15 bp, Homo sapiens
acttactctcctacc

SEQ ID NO: 398223 - DNA, 15 bp, Homo sapiens
gacttactctcctac

SEQ ID NO: 398224 - DNA, 15 bp, Homo sapiens
tgacttactctccta

SEQ ID NO: 398225 - DNA, 15 bp, Homo sapiens
gtgacttactctcct

SEQ ID NO: 398226 - DNA, 15 bp, Homo sapiens
tgtgacttactctcc

SEQ ID NO: 398227 - DNA, 15 bp, Homo sapiens
ttgtgacttactctc

SEQ ID NO: 398228 - DNA, 15 bp, Homo sapiens
cttgtgacttactct

SEQ ID NO: 398229 - DNA, 15 bp, Homo sapiens
ccttgtgacttactc

SEQ ID NO: 398230 - DNA, 15 bp, Homo sapiens
cccttgtgacttact

SEQ ID NO: 398231 - DNA, 15 bp, Homo sapiens
gcccttgtgacttac

SEQ ID NO: 398232 - DNA, 15 bp, Homo sapiens
tgcccttgtgactta

SEQ ID NO: 398233 - DNA, 15 bp, Homo sapiens
ctgcccttgtgactt

SEQ ID NO: 398234 - DNA, 15 bp, Homo sapiens
tctgcccttgtgact

SEQ ID NO: 398235 - DNA, 15 bp, Homo sapiens
ctctgcccttgtgac

SEQ ID NO: 398236 - DNA, 15 bp, Homo sapiens
gctctgcccttgtga

SEQ ID NO: 398237 - DNA, 15 bp, Homo sapiens
ggctctgcccttgtg

SEQ ID NO: 398238 - DNA, 15 bp, Homo sapiens
gggctctgcccttgt

SEQ ID NO: 398239 - DNA, 15 bp, Homo sapiens
agggctctgcccttg

SEQ ID NO: 398240 - DNA, 15 bp, Homo sapiens
aagggctctgccctt

SEQ ID NO: 398241 - DNA, 15 bp, Homo sapiens
taagggctctgccct

SEQ ID NO: 398242 - DNA, 15 bp, Homo sapiens
gtaagggctctgccc

SEQ ID NO: 398243 - DNA, 15 bp, Homo sapiens
tgtaagggctctgcc

SEQ ID NO: 398244 - DNA, 15 bp, Homo sapiens
ttgtaagggctctgc

SEQ ID NO: 398245 - DNA, 15 bp, Homo sapiens
tttgtaagggctctg

SEQ ID NO: 398246 - DNA, 15 bp, Homo sapiens
atttgtaagggctct

SEQ ID NO: 398247 - DNA, 15 bp, Homo sapiens
catttgtaagggctc

SEQ ID NO: 398248 - DNA, 15 bp, Homo sapiens
ccatttgtaagggct

SEQ ID NO: 398249 - DNA, 15 bp, Homo sapiens
cccatttgtaagggc

SEQ ID NO: 398250 - DNA, 15 bp, Homo sapiens
tcccatttgtaaggg

SEQ ID NO: 398251 - DNA, 15 bp, Homo sapiens
atcccatttgtaagg

SEQ ID NO: 398252 - DNA, 15 bp, Homo sapiens
aatcccatttgtaag

SEQ ID NO: 398253 - DNA, 15 bp, Homo sapiens
aaatcccatttgtaa

SEQ ID NO: 398254 - DNA, 15 bp, Homo sapiens
caaatcccatttgta

SEQ ID NO: 398255 - DNA, 15 bp, Homo sapiens
tcaaatcccatttgt

SEQ ID NO: 398256 - DNA, 15 bp, Homo sapiens
ctcaaatcccatttg

SEQ ID NO: 398257 - DNA, 15 bp, Homo sapiens
gctcaaatcccattt

SEQ ID NO: 398258 - DNA, 15 bp, Homo sapiens
agctcaaatcccatt

SEQ ID NO: 398259 - DNA, 15 bp, Homo sapiens
tagctcaaatcccat

SEQ ID NO: 398260 - DNA, 15 bp, Homo sapiens
atagctcaaatccca

SEQ ID NO: 398261 - DNA, 15 bp, Homo sapiens
tatagctcaaatccc

SEQ ID NO: 398262 - DNA, 15 bp, Homo sapiens
ctatagctcaaatcc

SEQ ID NO: 398263 - DNA, 15 bp, Homo sapiens
tctatagctcaaatc

SEQ ID NO: 398264 - DNA, 15 bp, Homo sapiens
ctctatagctcaaat

SEQ ID NO: 398265 - DNA, 15 bp, Homo sapiens
tctctatagctcaaa

SEQ ID NO: 398266 - DNA, 15 bp, Homo sapiens
ttctctatagctcaa

SEQ ID NO: 398267 - DNA, 15 bp, Homo sapiens
tttctctatagctca

SEQ ID NO: 398268 - DNA, 15 bp, Homo sapiens
ctttctctatagctc

SEQ ID NO: 398269 - DNA, 15 bp, Homo sapiens
gctttctctatagct

SEQ ID NO: 398270 - DNA, 15 bp, Homo sapiens
agctttctctatagc

SEQ ID NO: 398271 - DNA, 15 bp, Homo sapiens
aagctttctctatag

SEQ ID NO: 398272 - DNA, 15 bp, Homo sapiens
gaagctttctctata

SEQ ID NO: 398273 - DNA, 15 bp, Homo sapiens
tgaagctttctctat

SEQ ID NO: 398274 - DNA, 15 bp, Homo sapiens
ttgaagctttctcta

SEQ ID NO: 398275 - DNA, 15 bp, Homo sapiens
attgaagctttctct

SEQ ID NO: 398276 - DNA, 15 bp, Homo sapiens
gattgaagctttctc

SEQ ID NO: 398277 - DNA, 15 bp, Homo sapiens
agattgaagctttct

SEQ ID NO: 398278 - DNA, 15 bp, Homo sapiens
gagattgaagctttc

SEQ ID NO: 398279 - DNA, 15 bp, Homo sapiens
cgagattgaagcttt

SEQ ID NO: 398280 - DNA, 15 bp, Homo sapiens
ccgagattgaagctt

SEQ ID NO: 398281 - DNA, 15 bp, Homo sapiens
cccgagattgaagct

SEQ ID NO: 398282 - DNA, 15 bp, Homo sapiens
tcccgagattgaagc

SEQ ID NO: 398283 - DNA, 15 bp, Homo sapiens
ttcccgagattgaag

SEQ ID NO: 398284 - DNA, 15 bp, Homo sapiens
tttcccgagattgaa

SEQ ID NO: 398285 - DNA, 15 bp, Homo sapiens
atttcccgagattga

SEQ ID NO: 398286 - DNA, 15 bp, Homo sapiens
tatttcccgagattg

SEQ ID NO: 398287 - DNA, 15 bp, Homo sapiens
gtatttcccgagatt

SEQ ID NO: 398288 - DNA, 15 bp, Homo sapiens
tgtatttcccgagat

SEQ ID NO: 398289 - DNA, 15 bp, Homo sapiens
ttgtatttcccgaga

SEQ ID NO: 398290 - DNA, 15 bp, Homo sapiens
cttgtatttcccgag

SEQ ID NO: 398291 - DNA, 15 bp, Homo sapiens
tcttgtatttcccga

SEQ ID NO: 398292 - DNA, 15 bp, Homo sapiens
atcttgtatttcccg

SEQ ID NO: 398293 - DNA, 15 bp, Homo sapiens
catcttgtatttccc

SEQ ID NO: 398294 - DNA, 15 bp, Homo sapiens
tcatcttgtatttcc

SEQ ID NO: 398295 - DNA, 15 bp, Homo sapiens
ctcatcttgtatttc

SEQ ID NO: 398296 - DNA, 15 bp, Homo sapiens
tctcatcttgtattt

SEQ ID NO: 398297 - DNA, 15 bp, Homo sapiens
atctcatcttgtatt

SEQ ID NO: 398298 - DNA, 15 bp, Homo sapiens
tatctcatcttgtat

SEQ ID NO: 398299 - DNA, 15 bp, Homo sapiens
gtatctcatcttgta

SEQ ID NO: 398300 - DNA, 15 bp, Homo sapiens
ggtatctcatcttgt

SEQ ID NO: 398301 - DNA, 15 bp, Homo sapiens
tggtatctcatcttg

SEQ ID NO: 398302 - DNA, 15 bp, Homo sapiens
ctggtatctcatctt

SEQ ID NO: 398303 - DNA, 15 bp, Homo sapiens
tctggtatctcatct

SEQ ID NO: 398304 - DNA, 15 bp, Homo sapiens
ttctggtatctcatc

SEQ ID NO: 398305 - DNA, 15 bp, Homo sapiens
tttctggtatctcat

SEQ ID NO: 398306 - DNA, 15 bp, Homo sapiens
ctttctggtatctca

SEQ ID NO: 398307 - DNA, 15 bp, Homo sapiens
gctttctggtatctc

SEQ ID NO: 398308 - DNA, 15 bp, Homo sapiens
agctttctggtatct

SEQ ID NO: 398309 - DNA, 15 bp, Homo sapiens
gagctttctggtatc

SEQ ID NO: 398310 - DNA, 15 bp, Homo sapiens
agagctttctggtat

SEQ ID NO: 398311 - DNA, 15 bp, Homo sapiens
gagagctttctggta

SEQ ID NO: 398312 - DNA, 15 bp, Homo sapiens
agagagctttctggt

SEQ ID NO: 398313 - DNA, 15 bp, Homo sapiens
gagagagctttctgg

SEQ ID NO: 398314 - DNA, 15 bp, Homo sapiens
agagagagctttctg

SEQ ID NO: 398315 - DNA, 15 bp, Homo sapiens
gagagagagctttct

SEQ ID NO: 398316 - DNA, 15 bp, Homo sapiens
ggagagagagctttc

SEQ ID NO: 398317 - DNA, 15 bp, Homo sapiens
gggagagagagcttt

SEQ ID NO: 398318 - DNA, 15 bp, Homo sapiens
ggggagagagagctt

SEQ ID NO: 398319 - DNA, 15 bp, Homo sapiens
aggggagagagagct

SEQ ID NO: 398320 - DNA, 15 bp, Homo sapiens
aaggggagagagagc

SEQ ID NO: 398321 - DNA, 15 bp, Homo sapiens
gaaggggagagagag

SEQ ID NO: 398322 - DNA, 15 bp, Homo sapiens
ggaaggggagagaga

SEQ ID NO: 398323 - DNA, 15 bp, Homo sapiens
tggaaggggagagag

SEQ ID NO: 398324 - DNA, 15 bp, Homo sapiens
atggaaggggagaga

SEQ ID NO: 398325 - DNA, 15 bp, Homo sapiens
gatggaaggggagag

SEQ ID NO: 398326 - DNA, 15 bp, Homo sapiens
tgatggaaggggaga

SEQ ID NO: 398327 - DNA, 15 bp, Homo sapiens
atgatggaaggggag

SEQ ID NO: 398328 - DNA, 15 bp, Homo sapiens
catgatggaagggga

SEQ ID NO: 398329 - DNA, 15 bp, Homo sapiens
acatgatggaagggg

SEQ ID NO: 398330 - DNA, 15 bp, Homo sapiens
cacatgatggaaggg

SEQ ID NO: 398331 - DNA, 15 bp, Homo sapiens
tcacatgatggaagg

SEQ ID NO: 398332 - DNA, 15 bp, Homo sapiens
ttcacatgatggaag

SEQ ID NO: 398333 - DNA, 15 bp, Homo sapiens
cttcacatgatggaa

SEQ ID NO: 398334 - DNA, 15 bp, Homo sapiens
tcttcacatgatgga

SEQ ID NO: 398335 - DNA, 15 bp, Homo sapiens
gtcttcacatgatgg

SEQ ID NO: 398336 - DNA, 15 bp, Homo sapiens
tgtcttcacatgatg

SEQ ID NO: 398337 - DNA, 15 bp, Homo sapiens
gtgtcttcacatgat

SEQ ID NO: 398338 - DNA, 15 bp, Homo sapiens
tgtgtcttcacatga

SEQ ID NO: 398339 - DNA, 15 bp, Homo sapiens
ctgtgtcttcacatg

SEQ ID NO: 398340 - DNA, 15 bp, Homo sapiens
gctgtgtcttcacat

SEQ ID NO: 398341 - DNA, 15 bp, Homo sapiens
tgctgtgtcttcaca

SEQ ID NO: 398342 - DNA, 15 bp, Homo sapiens
ttgctgtgtcttcac

SEQ ID NO: 398343 - DNA, 15 bp, Homo sapiens
tttgctgtgtcttca

SEQ ID NO: 398344 - DNA, 15 bp, Homo sapiens
ttttgctgtgtcttc

SEQ ID NO: 398345 - DNA, 15 bp, Homo sapiens
tttttgctgtgtctt

SEQ ID NO: 398346 - DNA, 15 bp, Homo sapiens
ctttttgctgtgtct

SEQ ID NO: 398347 - DNA, 15 bp, Homo sapiens
tctttttgctgtgtc

SEQ ID NO: 398348 - DNA, 15 bp, Homo sapiens
gtctttttgctgtgt

SEQ ID NO: 398349 - DNA, 15 bp, Homo sapiens
tgtctttttgctgtg

SEQ ID NO: 398350 - DNA, 15 bp, Homo sapiens
ctgtctttttgctgt

SEQ ID NO: 398351 - DNA, 15 bp, Homo sapiens
gctgtctttttgctg

SEQ ID NO: 398352 - DNA, 15 bp, Homo sapiens
ggctgtctttttgct

SEQ ID NO: 398353 - DNA, 15 bp, Homo sapiens
tggctgtctttttgc

SEQ ID NO: 398354 - DNA, 15 bp, Homo sapiens
atggctgtctttttg

SEQ ID NO: 398355 - DNA, 15 bp, Homo sapiens
gatggctgtcttttt

SEQ ID NO: 398356 - DNA, 15 bp, Homo sapiens
agatggctgtctttt

SEQ ID NO: 398357 - DNA, 15 bp, Homo sapiens
tagatggctgtcttt

SEQ ID NO: 398358 - DNA, 15 bp, Homo sapiens
atagatggctgtctt

SEQ ID NO: 398359 - DNA, 15 bp, Homo sapiens
catagatggctgtct

SEQ ID NO: 398360 - DNA, 15 bp, Homo sapiens
tcatagatggctgtc

SEQ ID NO: 398361 - DNA, 15 bp, Homo sapiens
ttcatagatggctgt

SEQ ID NO: 398362 - DNA, 15 bp, Homo sapiens
gttcatagatggctg

SEQ ID NO: 398363 - DNA, 15 bp, Homo sapiens
ggttcatagatggct

SEQ ID NO: 398364 - DNA, 15 bp, Homo sapiens
tggttcatagatggc

SEQ ID NO: 398365 - DNA, 15 bp, Homo sapiens
ttggttcatagatgg

SEQ ID NO: 398366 - DNA, 15 bp, Homo sapiens
attggttcatagatg

SEQ ID NO: 398367 - DNA, 15 bp, Homo sapiens
tattggttcatagat

SEQ ID NO: 398368 - DNA, 15 bp, Homo sapiens
ttattggttcataga

SEQ ID NO: 398369 - DNA, 15 bp, Homo sapiens
cttattggttcatag

SEQ ID NO: 398370 - DNA, 15 bp, Homo sapiens
acttattggttcata

SEQ ID NO: 398371 - DNA, 15 bp, Homo sapiens
tacttattggttcat

SEQ ID NO: 398372 - DNA, 15 bp, Homo sapiens
ctacttattggttca

SEQ ID NO: 398373 - DNA, 15 bp, Homo sapiens
actacttattggttc

SEQ ID NO: 398374 - DNA, 15 bp, Homo sapiens
gactacttattggtt

SEQ ID NO: 398375 - DNA, 15 bp, Homo sapiens
ggactacttattggt

SEQ ID NO: 398376 - DNA, 15 bp, Homo sapiens
gggactacttattgg

SEQ ID NO: 398377 - DNA, 15 bp, Homo sapiens
agggactacttattg

SEQ ID NO: 398378 - DNA, 15 bp, Homo sapiens
gagggactacttatt

SEQ ID NO: 398379 - DNA, 15 bp, Homo sapiens
tgagggactacttat

SEQ ID NO: 398380 - DNA, 15 bp, Homo sapiens
gtgagggactactta

SEQ ID NO: 398381 - DNA, 15 bp, Homo sapiens
agtgagggactactt

SEQ ID NO: 398382 - DNA, 15 bp, Homo sapiens
tagtgagggactact

SEQ ID NO: 398383 - DNA, 15 bp, Homo sapiens
ctagtgagggactac

SEQ ID NO: 398384 - DNA, 15 bp, Homo sapiens
tctagtgagggacta

SEQ ID NO: 398385 - DNA, 15 bp, Homo sapiens
gtctagtgagggact

SEQ ID NO: 398386 - DNA, 15 bp, Homo sapiens
tgtctagtgagggac

SEQ ID NO: 398387 - DNA, 15 bp, Homo sapiens
atgtctagtgaggga

SEQ ID NO: 398388 - DNA, 15 bp, Homo sapiens
aatgtctagtgaggg

SEQ ID NO: 398389 - DNA, 15 bp, Homo sapiens
caatgtctagtgagg

SEQ ID NO: 398390 - DNA, 15 bp, Homo sapiens
tcaatgtctagtgag

SEQ ID NO: 398391 - DNA, 15 bp, Homo sapiens
ttcaatgtctagtga

SEQ ID NO: 398392 - DNA, 15 bp, Homo sapiens
attcaatgtctagtg

SEQ ID NO: 398393 - DNA, 15 bp, Homo sapiens
gattcaatgtctagt

SEQ ID NO: 398394 - DNA, 15 bp, Homo sapiens
agattcaatgtctag

SEQ ID NO: 398395 - DNA, 15 bp, Homo sapiens
cagattcaatgtcta

SEQ ID NO: 398396 - DNA, 15 bp, Homo sapiens
gcagattcaatgtct

SEQ ID NO: 398397 - DNA, 15 bp, Homo sapiens
ggcagattcaatgtc

SEQ ID NO: 398398 - DNA, 15 bp, Homo sapiens
tggcagattcaatgt

SEQ ID NO: 398399 - DNA, 15 bp, Homo sapiens
ctggcagattcaatg

SEQ ID NO: 398400 - DNA, 15 bp, Homo sapiens
gctggcagattcaat

SEQ ID NO: 398401 - DNA, 15 bp, Homo sapiens
tgctggcagattcaa

SEQ ID NO: 398402 - DNA, 15 bp, Homo sapiens
gtgctggcagattca

SEQ ID NO: 398403 - DNA, 15 bp, Homo sapiens
agtgctggcagattc

SEQ ID NO: 398404 - DNA, 15 bp, Homo sapiens
aagtgctggcagatt

SEQ ID NO: 398405 - DNA, 15 bp, Homo sapiens
aaagtgctggcagat

SEQ ID NO: 398406 - DNA, 15 bp, Homo sapiens
caaagtgctggcaga

SEQ ID NO: 398407 - DNA, 15 bp, Homo sapiens
tcaaagtgctggcag

SEQ ID NO: 398408 - DNA, 15 bp, Homo sapiens
atcaaagtgctggca

SEQ ID NO: 398409 - DNA, 15 bp, Homo sapiens
gatcaaagtgctggc

SEQ ID NO: 398410 - DNA, 15 bp, Homo sapiens
agatcaaagtgctgg

SEQ ID NO: 398411 - DNA, 15 bp, Homo sapiens
tagatcaaagtgctg

SEQ ID NO: 398412 - DNA, 15 bp, Homo sapiens
ctagatcaaagtgct

SEQ ID NO: 398413 - DNA, 15 bp, Homo sapiens
cctagatcaaagtgc

SEQ ID NO: 398414 - DNA, 15 bp, Homo sapiens
tcctagatcaaagtg

SEQ ID NO: 398415 - DNA, 15 bp, Homo sapiens
gtcctagatcaaagt

SEQ ID NO: 398416 - DNA, 15 bp, Homo sapiens
aaggctgggaagtcc

SEQ ID NO: 398417 - DNA, 15 bp, Homo sapiens
gaaggctgggaagtc

SEQ ID NO: 398418 - DNA, 15 bp, Homo sapiens
tgaaggctgggaagt

SEQ ID NO: 398419 - DNA, 15 bp, Homo sapiens
ctgaaggctgggaag

SEQ ID NO: 398420 - DNA, 15 bp, Homo sapiens
tctgaaggctgggaa

SEQ ID NO: 398421 - DNA, 15 bp, Homo sapiens
ttctgaaggctggga

SEQ ID NO: 398422 - DNA, 15 bp, Homo sapiens
gttctgaaggctggg

SEQ ID NO: 398423 - DNA, 15 bp, Homo sapiens
agttctgaaggctgg

SEQ ID NO: 398424 - DNA, 15 bp, Homo sapiens
cagttctgaaggctg

SEQ ID NO: 398425 - DNA, 15 bp, Homo sapiens
acagttctgaaggct

SEQ ID NO: 398426 - DNA, 15 bp, Homo sapiens
cacagttctgaaggc

SEQ ID NO: 398427 - DNA, 15 bp, Homo sapiens
tcacagttctgaagg

SEQ ID NO: 398428 - DNA, 15 bp, Homo sapiens
ctcacagttctgaag

SEQ ID NO: 398429 - DNA, 15 bp, Homo sapiens
tctcacagttctgaa

SEQ ID NO: 398430 - DNA, 15 bp, Homo sapiens
ttctcacagttctga

SEQ ID NO: 398431 - DNA, 15 bp, Homo sapiens
tttctcacagttctg

SEQ ID NO: 398432 - DNA, 15 bp, Homo sapiens
atttctcacagttct

SEQ ID NO: 398433 - DNA, 15 bp, Homo sapiens
tatttctcacagttc

SEQ ID NO: 398434 - DNA, 15 bp, Homo sapiens
ttatttctcacagtt

SEQ ID NO: 398435 - DNA, 15 bp, Homo sapiens
tttatttctcacagt

SEQ ID NO: 398436 - DNA, 15 bp, Homo sapiens
atttatttctcacag

SEQ ID NO: 398437 - DNA, 15 bp, Homo sapiens
aatttatttctcaca

SEQ ID NO: 398438 - DNA, 15 bp, Homo sapiens
aaatttatttctcac

SEQ ID NO: 398439 - DNA, 15 bp, Homo sapiens
gaaatttatttctca

SEQ ID NO: 398440 - DNA, 15 bp, Homo sapiens
gcagaaatttatttc

SEQ ID NO: 398441 - DNA, 15 bp, Homo sapiens
agcagaaatttattt

SEQ ID NO: 398442 - DNA, 15 bp, Homo sapiens
cagcagaaatttatt

SEQ ID NO: 398443 - DNA, 15 bp, Homo sapiens
acagcagaaatttat

SEQ ID NO: 398444 - DNA, 15 bp, Homo sapiens
aacagcagaaattta

SEQ ID NO: 398445 - DNA, 15 bp, Homo sapiens
aaacagcagaaattt

SEQ ID NO: 398446 - DNA, 15 bp, Homo sapiens
taaacagcagaaatt

SEQ ID NO: 398447 - DNA, 15 bp, Homo sapiens
ataaacagcagaaat

SEQ ID NO: 398448 - DNA, 15 bp, Homo sapiens
tataaacagcagaaa

SEQ ID NO: 398449 - DNA, 15 bp, Homo sapiens
ttataaacagcagaa

SEQ ID NO: 398450 - DNA, 15 bp, Homo sapiens
cttataaacagcaga

SEQ ID NO: 398451 - DNA, 15 bp, Homo sapiens
gcttataaacagcag

SEQ ID NO: 398452 - DNA, 15 bp, Homo sapiens
tgcttataaacagca

SEQ ID NO: 398453 - DNA, 15 bp, Homo sapiens
ttgcttataaacagc

SEQ ID NO: 398454 - DNA, 15 bp, Homo sapiens
gttgcttataaacag

SEQ ID NO: 398455 - DNA, 15 bp, Homo sapiens
ggttgcttataaaca

SEQ ID NO: 398456 - DNA, 15 bp, Homo sapiens
gggttgcttataaac

SEQ ID NO: 398457 - DNA, 15 bp, Homo sapiens
tgggttgcttataaa

SEQ ID NO: 398458 - DNA, 15 bp, Homo sapiens
ctgggttgcttataa

SEQ ID NO: 398459 - DNA, 15 bp, Homo sapiens
gctgggttgcttata

SEQ ID NO: 398460 - DNA, 15 bp, Homo sapiens
agctgggttgcttat

SEQ ID NO: 398461 - DNA, 15 bp, Homo sapiens
aagctgggttgctta

SEQ ID NO: 398462 - DNA, 15 bp, Homo sapiens
taagctgggttgctt

SEQ ID NO: 398463 - DNA, 15 bp, Homo sapiens
ataagctgggttgct

SEQ ID NO: 398464 - DNA, 15 bp, Homo sapiens
cataagctgggttgc

SEQ ID NO: 398465 - DNA, 15 bp, Homo sapiens
ccataagctgggttg

SEQ ID NO: 398466 - DNA, 15 bp, Homo sapiens
accataagctgggtt

SEQ ID NO: 398467 - DNA, 15 bp, Homo sapiens
taccataagctgggt

SEQ ID NO: 398468 - DNA, 15 bp, Homo sapiens
ctaccataagctggg

SEQ ID NO: 398469 - DNA, 15 bp, Homo sapiens
actaccataagctgg

SEQ ID NO: 398470 - DNA, 15 bp, Homo sapiens
aactaccataagctg

SEQ ID NO: 398471 - DNA, 15 bp, Homo sapiens
aaactaccataagct

SEQ ID NO: 398472 - DNA, 15 bp, Homo sapiens
taaactaccataagc

SEQ ID NO: 398473 - DNA, 15 bp, Homo sapiens
ataaactaccataag

SEQ ID NO: 398474 - DNA, 15 bp, Homo sapiens
aataaactaccataa

SEQ ID NO: 398475 - DNA, 15 bp, Homo sapiens
taataaactaccata

SEQ ID NO: 398476 - DNA, 15 bp, Homo sapiens
ataataaactaccat

SEQ ID NO: 398477 - DNA, 15 bp, Homo sapiens
tataataaactacca

SEQ ID NO: 398478 - DNA, 15 bp, Homo sapiens
ctataataaactacc

SEQ ID NO: 398479 - DNA, 15 bp, Homo sapiens
gctataataaactac

SEQ ID NO: 398480 - DNA, 15 bp, Homo sapiens
tgctataataaacta

SEQ ID NO: 398481 - DNA, 15 bp, Homo sapiens
ctgctataataaact

SEQ ID NO: 398482 - DNA, 15 bp, Homo sapiens
gctgctataataaac

SEQ ID NO: 398483 - DNA, 15 bp, Homo sapiens
ggctgctataataaa

SEQ ID NO: 398484 - DNA, 15 bp, Homo sapiens
aggctgctataataa

SEQ ID NO: 398485 - DNA, 15 bp, Homo sapiens
caggctgctataata

SEQ ID NO: 398486 - DNA, 15 bp, Homo sapiens
tcaggctgctataat

SEQ ID NO: 398487 - DNA, 15 bp, Homo sapiens
ttcaggctgctataa

SEQ ID NO: 398488 - DNA, 15 bp, Homo sapiens
attcaggctgctata

SEQ ID NO: 398489 - DNA, 15 bp, Homo sapiens
tattcaggctgctat

SEQ ID NO: 398490 - DNA, 15 bp, Homo sapiens
ctattcaggctgcta

SEQ ID NO: 398491 - DNA, 15 bp, Homo sapiens
tctattcaggctgct

SEQ ID NO: 398492 - DNA, 15 bp, Homo sapiens
gtctattcaggctgc

SEQ ID NO: 398493 - DNA, 15 bp, Homo sapiens
agtctattcaggctg

SEQ ID NO: 398494 - DNA, 15 bp, Homo sapiens
tagtctattcaggct

SEQ ID NO: 398495 - DNA, 15 bp, Homo sapiens
ttagtctattcaggc

SEQ ID NO: 398496 - DNA, 15 bp, Homo sapiens
tttagtctattcagg

SEQ ID NO: 398497 - DNA, 15 bp, Homo sapiens
ttttagtctattcag

SEQ ID NO: 398498 - DNA, 15 bp, Homo sapiens
gttttagtctattca

SEQ ID NO: 398499 - DNA, 15 bp, Homo sapiens
tgttttagtctattc

SEQ ID NO: 398500 - DNA, 15 bp, Homo sapiens
ctgttttagtctatt

SEQ ID NO: 398501 - DNA, 15 bp, Homo sapiens
cctgttttagtctat

SEQ ID NO: 398502 - DNA, 15 bp, Homo sapiens
tcctgttttagtcta

SEQ ID NO: 398503 - DNA, 15 bp, Homo sapiens
gtcctgttttagtct

SEQ ID NO: 398504 - DNA, 15 bp, Homo sapiens
ggtcctgttttagtc

SEQ ID NO: 398505 - DNA, 15 bp, Homo sapiens
tggtcctgttttagt

SEQ ID NO: 398506 - DNA, 15 bp, Homo sapiens
ctggtcctgttttag

SEQ ID NO: 398507 - DNA, 15 bp, Homo sapiens
cctggtcctgtttta

SEQ ID NO: 398508 - DNA, 15 bp, Homo sapiens
acctggtcctgtttt

SEQ ID NO: 398509 - DNA, 15 bp, Homo sapiens
gacctggtcctgttt

SEQ ID NO: 398510 - DNA, 15 bp, Homo sapiens
ggacctggtcctgtt

SEQ ID NO: 398511 - DNA, 15 bp, Homo sapiens
tggacctggtcctgt

SEQ ID NO: 398512 - DNA, 15 bp, Homo sapiens
ttggacctggtcctg

SEQ ID NO: 398513 - DNA, 15 bp, Homo sapiens
cttggacctggtcct

SEQ ID NO: 398514 - DNA, 15 bp, Homo sapiens
ccttggacctggtcc

SEQ ID NO: 398515 - DNA, 15 bp, Homo sapiens
accttggacctggtc

SEQ ID NO: 398516 - DNA, 15 bp, Homo sapiens
gaccttggacctggt

SEQ ID NO: 398517 - DNA, 15 bp, Homo sapiens
tgaccttggacctgg

SEQ ID NO: 398518 - DNA, 15 bp, Homo sapiens
ctgaccttggacctg

SEQ ID NO: 398519 - DNA, 15 bp, Homo sapiens
tctgaccttggacct

SEQ ID NO: 398520 - DNA, 15 bp, Homo sapiens
atctgaccttggacc

SEQ ID NO: 398521 - DNA, 15 bp, Homo sapiens
aatctgaccttggac

SEQ ID NO: 398522 - DNA, 15 bp, Homo sapiens
aaatctgaccttgga

SEQ ID NO: 398523 - DNA, 15 bp, Homo sapiens
taaatctgaccttgg

SEQ ID NO: 398524 - DNA, 15 bp, Homo sapiens
ctaaatctgaccttg

SEQ ID NO: 398525 - DNA, 15 bp, Homo sapiens
cctaaatctgacctt

SEQ ID NO: 398526 - DNA, 15 bp, Homo sapiens
tcctaaatctgacct

SEQ ID NO: 398527 - DNA, 15 bp, Homo sapiens
gtcctaaatctgacc

SEQ ID NO: 398528 - DNA, 15 bp, Homo sapiens
cgtcctaaatctgac

SEQ ID NO: 398529 - DNA, 15 bp, Homo sapiens
tcgtcctaaatctga

SEQ ID NO: 398530 - DNA, 15 bp, Homo sapiens
ctcgtcctaaatctg

SEQ ID NO: 398531 - DNA, 15 bp, Homo sapiens
actcgtcctaaatct

SEQ ID NO: 398532 - DNA, 15 bp, Homo sapiens
cactcgtcctaaatc

SEQ ID NO: 398533 - DNA, 15 bp, Homo sapiens
acactcgtcctaaat

SEQ ID NO: 398534 - DNA, 15 bp, Homo sapiens
aacactcgtcctaaa

SEQ ID NO: 398535 - DNA, 15 bp, Homo sapiens
taacactcgtcctaa

SEQ ID NO: 398536 - DNA, 15 bp, Homo sapiens
ataacactcgtccta

SEQ ID NO: 398537 - DNA, 15 bp, Homo sapiens
aataacactcgtcct

SEQ ID NO: 398538 - DNA, 15 bp, Homo sapiens
aaataacactcgtcc

SEQ ID NO: 398539 - DNA, 15 bp, Homo sapiens
gaaataacactcgtc

SEQ ID NO: 398540 - DNA, 15 bp, Homo sapiens
ggaaataacactcgt

SEQ ID NO: 398541 - DNA, 15 bp, Homo sapiens
tggaaataacactcg

SEQ ID NO: 398542 - DNA, 15 bp, Homo sapiens
gtggaaataacactc

SEQ ID NO: 398543 - DNA, 15 bp, Homo sapiens
agtggaaataacact

SEQ ID NO: 398544 - DNA, 15 bp, Homo sapiens
cagtggaaataacac

SEQ ID NO: 398545 - DNA, 15 bp, Homo sapiens
ccagtggaaataaca

SEQ ID NO: 398546 - DNA, 15 bp, Homo sapiens
tccagtggaaataac

SEQ ID NO: 398547 - DNA, 15 bp, Homo sapiens
ctccagtggaaataa

SEQ ID NO: 398548 - DNA, 15 bp, Homo sapiens
gctccagtggaaata

SEQ ID NO: 398549 - DNA, 15 bp, Homo sapiens
tgctccagtggaaat

SEQ ID NO: 398550 - DNA, 15 bp, Homo sapiens
atgctccagtggaaa

SEQ ID NO: 398551 - DNA, 15 bp, Homo sapiens
tatgctccagtggaa

SEQ ID NO: 398552 - DNA, 15 bp, Homo sapiens
atatgctccagtgga

SEQ ID NO: 398553 - DNA, 15 bp, Homo sapiens
aatatgctccagtgg

SEQ ID NO: 398554 - DNA, 15 bp, Homo sapiens
gaatatgctccagtg

SEQ ID NO: 398555 - DNA, 15 bp, Homo sapiens
ggaatatgctccagt

SEQ ID NO: 398556 - DNA, 15 bp, Homo sapiens
aggaatatgctccag

SEQ ID NO: 398557 - DNA, 15 bp, Homo sapiens
gaggaatatgctcca

SEQ ID NO: 398558 - DNA, 15 bp, Homo sapiens
agaggaatatgctcc

SEQ ID NO: 398559 - DNA, 15 bp, Homo sapiens
aagaggaatatgctc

SEQ ID NO: 398560 - DNA, 15 bp, Homo sapiens
taagaggaatatgct

SEQ ID NO: 398561 - DNA, 15 bp, Homo sapiens
ttaagaggaatatgc

SEQ ID NO: 398562 - DNA, 15 bp, Homo sapiens
tttaagaggaatatg

SEQ ID NO: 398563 - DNA, 15 bp, Homo sapiens
ctttaagaggaatat

SEQ ID NO: 398564 - DNA, 15 bp, Homo sapiens
tctttaagaggaata

SEQ ID NO: 398565 - DNA, 15 bp, Homo sapiens
ctctttaagaggaat

SEQ ID NO: 398566 - DNA, 15 bp, Homo sapiens
tctctttaagaggaa

SEQ ID NO: 398567 - DNA, 15 bp, Homo sapiens
ctctctttaagagga

SEQ ID NO: 398568 - DNA, 15 bp, Homo sapiens
cctctctttaagagg

SEQ ID NO: 398569 - DNA, 15 bp, Homo sapiens
acctctctttaagag

SEQ ID NO: 398570 - DNA, 15 bp, Homo sapiens
aacctctctttaaga

SEQ ID NO: 398571 - DNA, 15 bp, Homo sapiens
taacctctctttaag

SEQ ID NO: 398572 - DNA, 15 bp, Homo sapiens
ttaacctctctttaa

SEQ ID NO: 398573 - DNA, 15 bp, Homo sapiens
cttaacctctcttta

SEQ ID NO: 398574 - DNA, 15 bp, Homo sapiens
tcttaacctctcttt

SEQ ID NO: 398575 - DNA, 15 bp, Homo sapiens
gtcttaacctctctt

SEQ ID NO: 398576 - DNA, 15 bp, Homo sapiens
tgtcttaacctctct

SEQ ID NO: 398577 - DNA, 15 bp, Homo sapiens
ttgtcttaacctctc

SEQ ID NO: 398578 - DNA, 15 bp, Homo sapiens
gttgtcttaacctct

SEQ ID NO: 398579 - DNA, 15 bp, Homo sapiens
tgttgtcttaacctc

SEQ ID NO: 398580 - DNA, 15 bp, Homo sapiens
gtgttgtcttaacct

SEQ ID NO: 398581 - DNA, 15 bp, Homo sapiens
tgtgttgtcttaacc

SEQ ID NO: 398582 - DNA, 15 bp, Homo sapiens
ttgtgttgtcttaac

SEQ ID NO: 398583 - DNA, 15 bp, Homo sapiens
tttgtgttgtcttaa

SEQ ID NO: 398584 - DNA, 15 bp, Homo sapiens
ctttgtgttgtctta

SEQ ID NO: 398585 - DNA, 15 bp, Homo sapiens
tctttgtgttgtctt

SEQ ID NO: 398586 - DNA, 15 bp, Homo sapiens
ttctttgtgttgtct

SEQ ID NO: 398587 - DNA, 15 bp, Homo sapiens
gttctttgtgttgtc

SEQ ID NO: 398588 - DNA, 15 bp, Homo sapiens
agttctttgtgttgt

SEQ ID NO: 398589 - DNA, 15 bp, Homo sapiens
cagttctttgtgttg

SEQ ID NO: 398590 - DNA, 15 bp, Homo sapiens
tcagttctttgtgtt

SEQ ID NO: 398591 - DNA, 15 bp, Homo sapiens
ttcagttctttgtgt

SEQ ID NO: 398592 - DNA, 15 bp, Homo sapiens
attcagttctttgtg

SEQ ID NO: 398593 - DNA, 15 bp, Homo sapiens
tattcagttctttgt

SEQ ID NO: 398594 - DNA, 15 bp, Homo sapiens
atattcagttctttg

SEQ ID NO: 398595 - DNA, 15 bp, Homo sapiens
tatattcagttcttt

SEQ ID NO: 398596 - DNA, 15 bp, Homo sapiens
ctatattcagttctt

SEQ ID NO: 398597 - DNA, 15 bp, Homo sapiens
tctatattcagttct

SEQ ID NO: 398598 - DNA, 15 bp, Homo sapiens
ttctatattcagttc

SEQ ID NO: 398599 - DNA, 15 bp, Homo sapiens
tttctatattcagtt

SEQ ID NO: 398600 - DNA, 15 bp, Homo sapiens
gtttctatattcagt

SEQ ID NO: 398601 - DNA, 15 bp, Homo sapiens
agtttctatattcag

SEQ ID NO: 398602 - DNA, 15 bp, Homo sapiens
aagtttctatattca

SEQ ID NO: 398603 - DNA, 15 bp, Homo sapiens
taagtttctatattc

SEQ ID NO: 398604 - DNA, 15 bp, Homo sapiens
ttaagtttctatatt

SEQ ID NO: 398605 - DNA, 15 bp, Homo sapiens
attaagtttctatat

SEQ ID NO: 398606 - DNA, 15 bp, Homo sapiens
cattaagtttctata

SEQ ID NO: 398607 - DNA, 15 bp, Homo sapiens
ccattaagtttctat

SEQ ID NO: 398608 - DNA, 15 bp, Homo sapiens
accattaagtttcta

SEQ ID NO: 398609 - DNA, 15 bp, Homo sapiens
caccattaagtttct

SEQ ID NO: 398610 - DNA, 15 bp, Homo sapiens
tcaccattaagtttc

SEQ ID NO: 398611 - DNA, 15 bp, Homo sapiens
atcaccattaagttt

SEQ ID NO: 398612 - DNA, 15 bp, Homo sapiens
aatcaccattaagtt

SEQ ID NO: 398613 - DNA, 15 bp, Homo sapiens
gaatcaccattaagt

SEQ ID NO: 398614 - DNA, 15 bp, Homo sapiens
cgaatcaccattaag

SEQ ID NO: 398615 - DNA, 15 bp, Homo sapiens
ccgaatcaccattaa

SEQ ID NO: 398616 - DNA, 15 bp, Homo sapiens
cccgaatcaccatta

SEQ ID NO: 398617 - DNA, 15 bp, Homo sapiens
acccgaatcaccatt

SEQ ID NO: 398618 - DNA, 15 bp, Homo sapiens
cacccgaatcaccat

SEQ ID NO: 398619 - DNA, 15 bp, Homo sapiens
acacccgaatcacca

SEQ ID NO: 398620 - DNA, 15 bp, Homo sapiens
tacacccgaatcacc

SEQ ID NO: 398621 - DNA, 15 bp, Homo sapiens
ttacacccgaatcac

SEQ ID NO: 398622 - DNA, 15 bp, Homo sapiens
tttacacccgaatca

SEQ ID NO: 398623 - DNA, 15 bp, Homo sapiens
ttttacacccgaatc

SEQ ID NO: 398624 - DNA, 15 bp, Homo sapiens
tttttacacccgaat

SEQ ID NO: 398625 - DNA, 15 bp, Homo sapiens
ttttttacacccgaa

SEQ ID NO: 398626 - DNA, 15 bp, Homo sapiens
gttttttacacccga

SEQ ID NO: 398627 - DNA, 15 bp, Homo sapiens
tgttttttacacccg

SEQ ID NO: 398628 - DNA, 15 bp, Homo sapiens
atgttttttacaccc

SEQ ID NO: 398629 - DNA, 15 bp, Homo sapiens
gatgttttttacacc

SEQ ID NO: 398630 - DNA, 15 bp, Homo sapiens
cgatgttttttacac

SEQ ID NO: 398631 - DNA, 15 bp, Homo sapiens
ccgatgttttttaca

SEQ ID NO: 398632 - DNA, 15 bp, Homo sapiens
cccgatgttttttac

SEQ ID NO: 398633 - DNA, 15 bp, Homo sapiens
ccccgatgtttttta

SEQ ID NO: 398634 - DNA, 15 bp, Homo sapiens
gccccgatgtttttt

SEQ ID NO: 398635 - DNA, 15 bp, Homo sapiens
tgccccgatgttttt

SEQ ID NO: 398636 - DNA, 15 bp, Homo sapiens
ctgccccgatgtttt

SEQ ID NO: 398637 - DNA, 15 bp, Homo sapiens
cctgccccgatgttt

SEQ ID NO: 398638 - DNA, 15 bp, Homo sapiens
acctgccccgatgtt

SEQ ID NO: 398639 - DNA, 15 bp, Homo sapiens
tacctgccccgatgt

SEQ ID NO: 398640 - DNA, 15 bp, Homo sapiens
atacctgccccgatg

SEQ ID NO: 398641 - DNA, 15 bp, Homo sapiens
tatacctgccccgat

SEQ ID NO: 398642 - DNA, 15 bp, Homo sapiens
gtatacctgccccga

SEQ ID NO: 398643 - DNA, 15 bp, Homo sapiens
tgtatacctgccccg

SEQ ID NO: 398644 - DNA, 15 bp, Homo sapiens
ctgtatacctgcccc

SEQ ID NO: 398645 - DNA, 15 bp, Homo sapiens
actgtatacctgccc

SEQ ID NO: 398646 - DNA, 15 bp, Homo sapiens
cactgtatacctgcc

SEQ ID NO: 398647 - DNA, 15 bp, Homo sapiens
gcactgtatacctgc

SEQ ID NO: 398648 - DNA, 15 bp, Homo sapiens
tgcactgtatacctg

SEQ ID NO: 398649 - DNA, 15 bp, Homo sapiens
ctgcactgtatacct

SEQ ID NO: 398650 - DNA, 15 bp, Homo sapiens
actgcactgtatacc

SEQ ID NO: 398651 - DNA, 15 bp, Homo sapiens
cactgcactgtatac

SEQ ID NO: 398652 - DNA, 15 bp, Homo sapiens
ccactgcactgtata

SEQ ID NO: 398653 - DNA, 15 bp, Homo sapiens
gccactgcactgtat

SEQ ID NO: 398654 - DNA, 15 bp, Homo sapiens
tgccactgcactgta

SEQ ID NO: 398655 - DNA, 15 bp, Homo sapiens
ttgccactgcactgt

SEQ ID NO: 398656 - DNA, 15 bp, Homo sapiens
tttgccactgcactg

SEQ ID NO: 398657 - DNA, 15 bp, Homo sapiens
ctttgccactgcact

SEQ ID NO: 398658 - DNA, 15 bp, Homo sapiens
cctttgccactgcac

SEQ ID NO: 398659 - DNA, 15 bp, Homo sapiens
ccctttgccactgca

SEQ ID NO: 398660 - DNA, 15 bp, Homo sapiens
accctttgccactgc

SEQ ID NO: 398661 - DNA, 15 bp, Homo sapiens
aaccctttgccactg

SEQ ID NO: 398662 - DNA, 15 bp, Homo sapiens
taaccctttgccact

SEQ ID NO: 398663 - DNA, 15 bp, Homo sapiens
ctaaccctttgccac

SEQ ID NO: 398664 - DNA, 15 bp, Homo sapiens
tctaaccctttgcca

SEQ ID NO: 398665 - DNA, 15 bp, Homo sapiens
atctaaccctttgcc

SEQ ID NO: 398666 - DNA, 15 bp, Homo sapiens
gatctaaccctttgc

SEQ ID NO: 398667 - DNA, 15 bp, Homo sapiens
agatctaaccctttg

SEQ ID NO: 398668 - DNA, 15 bp, Homo sapiens
gagatctaacccttt

SEQ ID NO: 398669 - DNA, 15 bp, Homo sapiens
ggagatctaaccctt

SEQ ID NO: 398670 - DNA, 15 bp, Homo sapiens
aggagatctaaccct

SEQ ID NO: 398671 - DNA, 15 bp, Homo sapiens
taggagatctaaccc

SEQ ID NO: 398672 - DNA, 15 bp, Homo sapiens
ctaggagatctaacc

SEQ ID NO: 398673 - DNA, 15 bp, Homo sapiens
tctaggagatctaac

SEQ ID NO: 398674 - DNA, 15 bp, Homo sapiens
ttctaggagatctaa

SEQ ID NO: 398675 - DNA, 15 bp, Homo sapiens
cttctaggagatcta

SEQ ID NO: 398676 - DNA, 15 bp, Homo sapiens
tcttctaggagatct

SEQ ID NO: 398677 - DNA, 15 bp, Homo sapiens
ttcttctaggagatc

SEQ ID NO: 398678 - DNA, 15 bp, Homo sapiens
tttcttctaggagat

SEQ ID NO: 398679 - DNA, 15 bp, Homo sapiens
ctttcttctaggaga

SEQ ID NO: 398680 - DNA, 15 bp, Homo sapiens
tctttcttctaggag

SEQ ID NO: 398681 - DNA, 15 bp, Homo sapiens
atctttcttctagga

SEQ ID NO: 398682 - DNA, 15 bp, Homo sapiens
tatctttcttctagg

SEQ ID NO: 398683 - DNA, 15 bp, Homo sapiens
atatctttcttctag

SEQ ID NO: 398684 - DNA, 15 bp, Homo sapiens
aatatctttcttcta

SEQ ID NO: 398685 - DNA, 15 bp, Homo sapiens
aaatatctttcttct

SEQ ID NO: 398686 - DNA, 15 bp, Homo sapiens
aaaatatctttcttc

SEQ ID NO: 398687 - DNA, 15 bp, Homo sapiens
caaaatatctttctt

SEQ ID NO: 398688 - DNA, 15 bp, Homo sapiens
tcaaaatatctttct

SEQ ID NO: 398689 - DNA, 15 bp, Homo sapiens
gtcaaaatatctttc

SEQ ID NO: 398690 - DNA, 15 bp, Homo sapiens
cgtcaaaatatcttt

SEQ ID NO: 398691 - DNA, 15 bp, Homo sapiens
ccgtcaaaatatctt

SEQ ID NO: 398692 - DNA, 15 bp, Homo sapiens
tccgtcaaaatatct

SEQ ID NO: 398693 - DNA, 15 bp, Homo sapiens
ctccgtcaaaatatc

SEQ ID NO: 398694 - DNA, 15 bp, Homo sapiens
gctccgtcaaaatat

SEQ ID NO: 398695 - DNA, 15 bp, Homo sapiens
ggctccgtcaaaata

SEQ ID NO: 398696 - DNA, 15 bp, Homo sapiens
gggctccgtcaaaat

SEQ ID NO: 398697 - DNA, 15 bp, Homo sapiens
agggctccgtcaaaa

SEQ ID NO: 398698 - DNA, 15 bp, Homo sapiens
tagggctccgtcaaa

SEQ ID NO: 398699 - DNA, 15 bp, Homo sapiens
ttagggctccgtcaa

SEQ ID NO: 398700 - DNA, 15 bp, Homo sapiens
tttagggctccgtca

SEQ ID NO: 398701 - DNA, 15 bp, Homo sapiens
ctttagggctccgtc

SEQ ID NO: 398702 - DNA, 15 bp, Homo sapiens
tctttagggctccgt

SEQ ID NO: 398703 - DNA, 15 bp, Homo sapiens
atctttagggctccg

SEQ ID NO: 398704 - DNA, 15 bp, Homo sapiens
aatctttagggctcc

SEQ ID NO: 398705 - DNA, 15 bp, Homo sapiens
gaatctttagggctc

SEQ ID NO: 398706 - DNA, 15 bp, Homo sapiens
agaatctttagggct

SEQ ID NO: 398707 - DNA, 15 bp, Homo sapiens
cagaatctttagggc

SEQ ID NO: 398708 - DNA, 15 bp, Homo sapiens
tcagaatctttaggg

SEQ ID NO: 398709 - DNA, 15 bp, Homo sapiens
ttcagaatctttagg

SEQ ID NO: 398710 - DNA, 15 bp, Homo sapiens
tttcagaatctttag

SEQ ID NO: 398711 - DNA, 15 bp, Homo sapiens
gtttcagaatcttta

SEQ ID NO: 398712 - DNA, 15 bp, Homo sapiens
tgtttcagaatcttt

SEQ ID NO: 398713 - DNA, 15 bp, Homo sapiens
atgtttcagaatctt

SEQ ID NO: 398714 - DNA, 15 bp, Homo sapiens
catgtttcagaatct

SEQ ID NO: 398715 - DNA, 15 bp, Homo sapiens
acatgtttcagaatc

SEQ ID NO: 398716 - DNA, 15 bp, Homo sapiens
cacatgtttcagaat

SEQ ID NO: 398717 - DNA, 15 bp, Homo sapiens
ccacatgtttcagaa

SEQ ID NO: 398718 - DNA, 15 bp, Homo sapiens
tccacatgtttcaga

SEQ ID NO: 398719 - DNA, 15 bp, Homo sapiens
ttccacatgtttcag

SEQ ID NO: 398720 - DNA, 15 bp, Homo sapiens
tttccacatgtttca

SEQ ID NO: 398721 - DNA, 15 bp, Homo sapiens
ctttccacatgtttc

SEQ ID NO: 398722 - DNA, 15 bp, Homo sapiens
cctttccacatgttt

SEQ ID NO: 398723 - DNA, 15 bp, Homo sapiens
gcctttccacatgtt

SEQ ID NO: 398724 - DNA, 15 bp, Homo sapiens
agcctttccacatgt

SEQ ID NO: 398725 - DNA, 15 bp, Homo sapiens
tagcctttccacatg

SEQ ID NO: 398726 - DNA, 15 bp, Homo sapiens
ttagcctttccacat

SEQ ID NO: 398727 - DNA, 15 bp, Homo sapiens
cttagcctttccaca

SEQ ID NO: 398728 - DNA, 15 bp, Homo sapiens
acttagcctttccac

SEQ ID NO: 398729 - DNA, 15 bp, Homo sapiens
aacttagcctttcca

SEQ ID NO: 398730 - DNA, 15 bp, Homo sapiens
caacttagcctttcc

SEQ ID NO: 398731 - DNA, 15 bp, Homo sapiens
tcaacttagcctttc

SEQ ID NO: 398732 - DNA, 15 bp, Homo sapiens
atcaacttagccttt

SEQ ID NO: 398733 - DNA, 15 bp, Homo sapiens
tatcaacttagcctt

SEQ ID NO: 398734 - DNA, 15 bp, Homo sapiens
ttatcaacttagcct

SEQ ID NO: 398735 - DNA, 15 bp, Homo sapiens
attatcaacttagcc

SEQ ID NO: 398736 - DNA, 15 bp, Homo sapiens
tattatcaacttagc

SEQ ID NO: 398737 - DNA, 15 bp, Homo sapiens
ttattatcaacttag

SEQ ID NO: 398738 - DNA, 15 bp, Homo sapiens
tttattatcaactta

SEQ ID NO: 398739 - DNA, 15 bp, Homo sapiens
atttattatcaactt

SEQ ID NO: 398740 - DNA, 15 bp, Homo sapiens
aatttattatcaact

SEQ ID NO: 398741 - DNA, 15 bp, Homo sapiens
taatttattatcaac

SEQ ID NO: 398742 - DNA, 15 bp, Homo sapiens
ttaatttattatcaa

SEQ ID NO: 398743 - DNA, 15 bp, Homo sapiens
cttaatttattatca

SEQ ID NO: 398744 - DNA, 15 bp, Homo sapiens
tcttaatttattatc

SEQ ID NO: 398745 - DNA, 15 bp, Homo sapiens
ttcttaatttattat

SEQ ID NO: 398746 - DNA, 15 bp, Homo sapiens
tttcttaatttatta

SEQ ID NO: 398747 - DNA, 15 bp, Homo sapiens
atttcttaatttatt

SEQ ID NO: 398748 - DNA, 15 bp, Homo sapiens
gatttcttaatttat

SEQ ID NO: 398749 - DNA, 15 bp, Homo sapiens
tgatttcttaattta

SEQ ID NO: 398750 - DNA, 15 bp, Homo sapiens
ttgatttcttaattt

SEQ ID NO: 398751 - DNA, 15 bp, Homo sapiens
tttgatttcttaatt

SEQ ID NO: 398752 - DNA, 15 bp, Homo sapiens
ttttgatttcttaat

SEQ ID NO: 398753 - DNA, 15 bp, Homo sapiens
cttttgatttcttaa

SEQ ID NO: 398754 - DNA, 15 bp, Homo sapiens
tcttttgatttctta

SEQ ID NO: 398755 - DNA, 15 bp, Homo sapiens
gtcttttgatttctt

SEQ ID NO: 398756 - DNA, 15 bp, Homo sapiens
tgtcttttgatttct

SEQ ID NO: 398757 - DNA, 15 bp, Homo sapiens
ctgtcttttgatttc

SEQ ID NO: 398758 - DNA, 15 bp, Homo sapiens
cctgtcttttgattt

SEQ ID NO: 398759 - DNA, 15 bp, Homo sapiens
gcctgtcttttgatt

SEQ ID NO: 398760 - DNA, 15 bp, Homo sapiens
tgcctgtcttttgat

SEQ ID NO: 398761 - DNA, 15 bp, Homo sapiens
ctgcctgtcttttga

SEQ ID NO: 398762 - DNA, 15 bp, Homo sapiens
cctgcctgtcttttg

SEQ ID NO: 398763 - DNA, 15 bp, Homo sapiens
tcctgcctgtctttt

SEQ ID NO: 398764 - DNA, 15 bp, Homo sapiens
atcctgcctgtcttt

SEQ ID NO: 398765 - DNA, 15 bp, Homo sapiens
aatcctgcctgtctt

SEQ ID NO: 398766 - DNA, 15 bp, Homo sapiens
caatcctgcctgtct

SEQ ID NO: 398767 - DNA, 15 bp, Homo sapiens
acaatcctgcctgtc

SEQ ID NO: 398768 - DNA, 15 bp, Homo sapiens
cacaatcctgcctgt

SEQ ID NO: 398769 - DNA, 15 bp, Homo sapiens
ccacaatcctgcctg

SEQ ID NO: 398770 - DNA, 15 bp, Homo sapiens
tccacaatcctgcct

SEQ ID NO: 398771 - DNA, 15 bp, Homo sapiens
atccacaatcctgcc

SEQ ID NO: 398772 - DNA, 15 bp, Homo sapiens
catccacaatcctgc

SEQ ID NO: 398773 - DNA, 15 bp, Homo sapiens
ccatccacaatcctg

SEQ ID NO: 398774 - DNA, 15 bp, Homo sapiens
tccatccacaatcct

SEQ ID NO: 398775 - DNA, 15 bp, Homo sapiens
ctccatccacaatcc

SEQ ID NO: 398776 - DNA, 15 bp, Homo sapiens
actccatccacaatc

SEQ ID NO: 398777 - DNA, 15 bp, Homo sapiens
tactccatccacaat

SEQ ID NO: 398778 - DNA, 15 bp, Homo sapiens
atactccatccacaa

SEQ ID NO: 398779 - DNA, 15 bp, Homo sapiens
catactccatccaca

SEQ ID NO: 398780 - DNA, 15 bp, Homo sapiens
acatactccatccac

SEQ ID NO: 398781 - DNA, 15 bp, Homo sapiens
gacatactccatcca

SEQ ID NO: 398782 - DNA, 15 bp, Homo sapiens
tgacatactccatcc

SEQ ID NO: 398783 - DNA, 15 bp, Homo sapiens
ctgacatactccatc

SEQ ID NO: 398784 - DNA, 15 bp, Homo sapiens
actgacatactccat

SEQ ID NO: 398785 - DNA, 15 bp, Homo sapiens
cactgacatactcca

SEQ ID NO: 398786 - DNA, 15 bp, Homo sapiens
ccactgacatactcc

SEQ ID NO: 398787 - DNA, 15 bp, Homo sapiens
accactgacatactc

SEQ ID NO: 398788 - DNA, 15 bp, Homo sapiens
gaccactgacatact

SEQ ID NO: 398789 - DNA, 15 bp, Homo sapiens
tgaccactgacatac

SEQ ID NO: 398790 - DNA, 15 bp, Homo sapiens
atgaccactgacata

SEQ ID NO: 398791 - DNA, 15 bp, Homo sapiens
aatgaccactgacat

SEQ ID NO: 398792 - DNA, 15 bp, Homo sapiens
aaatgaccactgaca

SEQ ID NO: 398793 - DNA, 15 bp, Homo sapiens
taaatgaccactgac

SEQ ID NO: 398794 - DNA, 15 bp, Homo sapiens
ttaaatgaccactga

SEQ ID NO: 398795 - DNA, 15 bp, Homo sapiens
tttaaatgaccactg

SEQ ID NO: 398796 - DNA, 15 bp, Homo sapiens
ttttaaatgaccact

SEQ ID NO: 398797 - DNA, 15 bp, Homo sapiens
attttaaatgaccac

SEQ ID NO: 398798 - DNA, 15 bp, Homo sapiens
gattttaaatgacca

SEQ ID NO: 398799 - DNA, 15 bp, Homo sapiens
ggattttaaatgacc

SEQ ID NO: 398800 - DNA, 15 bp, Homo sapiens
tggattttaaatgac

SEQ ID NO: 398801 - DNA, 15 bp, Homo sapiens
atggattttaaatga

SEQ ID NO: 398802 - DNA, 15 bp, Homo sapiens
catggattttaaatg

SEQ ID NO: 398803 - DNA, 15 bp, Homo sapiens
acatggattttaaat

SEQ ID NO: 398804 - DNA, 15 bp, Homo sapiens
aacatggattttaaa

SEQ ID NO: 398805 - DNA, 15 bp, Homo sapiens
aaacatggattttaa

SEQ ID NO: 398806 - DNA, 15 bp, Homo sapiens
aaaacatggatttta

SEQ ID NO: 398807 - DNA, 15 bp, Homo sapiens
aaaaacatggatttt

SEQ ID NO: 398808 - DNA, 15 bp, Homo sapiens
caaaaacatggattt

SEQ ID NO: 398809 - DNA, 15 bp, Homo sapiens
acaaaaacatggatt

SEQ ID NO: 398810 - DNA, 15 bp, Homo sapiens
aacaaaaacatggat

SEQ ID NO: 398811 - DNA, 15 bp, Homo sapiens
aaacaaaaacatgga

SEQ ID NO: 398812 - DNA, 15 bp, Homo sapiens
aaaacaaaaacatgg

SEQ ID NO: 398813 - DNA, 15 bp, Homo sapiens
aaaaacaaaaacatg

SEQ ID NO: 398814 - DNA, 15 bp, Homo sapiens
taaaaacaaaaacat

SEQ ID NO: 398815 - DNA, 15 bp, Homo sapiens
ttaaaaacaaaaaca

SEQ ID NO: 398816 - DNA, 15 bp, Homo sapiens
tttaaaaacaaaaac

SEQ ID NO: 398817 - DNA, 15 bp, Homo sapiens
ttttaaaaacaaaaa

SEQ ID NO: 398818 - DNA, 15 bp, Homo sapiens
attttaaaaacaaaa

SEQ ID NO: 398819 - DNA, 15 bp, Homo sapiens
cattttaaaaacaaa

SEQ ID NO: 398820 - DNA, 15 bp, Homo sapiens
gcattttaaaaacaa

SEQ ID NO: 398821 - DNA, 15 bp, Homo sapiens
ggcattttaaaaaca

SEQ ID NO: 398822 - DNA, 15 bp, Homo sapiens
aggcattttaaaaac

SEQ ID NO: 398823 - DNA, 15 bp, Homo sapiens
caggcattttaaaaa

SEQ ID NO: 398824 - DNA, 15 bp, Homo sapiens
gcaggcattttaaaa

SEQ ID NO: 398825 - DNA, 15 bp, Homo sapiens
tgcaggcattttaaa

SEQ ID NO: 398826 - DNA, 15 bp, Homo sapiens
ttgcaggcattttaa

SEQ ID NO: 398827 - DNA, 15 bp, Homo sapiens
tttgcaggcatttta

SEQ ID NO: 398828 - DNA, 15 bp, Homo sapiens
gtttgcaggcatttt

SEQ ID NO: 398829 - DNA, 15 bp, Homo sapiens
ggtttgcaggcattt

SEQ ID NO: 398830 - DNA, 15 bp, Homo sapiens
aggtttgcaggcatt

SEQ ID NO: 398831 - DNA, 15 bp, Homo sapiens
gaggtttgcaggcat

SEQ ID NO: 398832 - DNA, 15 bp, Homo sapiens
agaggtttgcaggca

SEQ ID NO: 398833 - DNA, 15 bp, Homo sapiens
aagaggtttgcaggc

SEQ ID NO: 398834 - DNA, 15 bp, Homo sapiens
gaagaggtttgcagg

SEQ ID NO: 398835 - DNA, 15 bp, Homo sapiens
tgaagaggtttgcag

SEQ ID NO: 398836 - DNA, 15 bp, Homo sapiens
ttgaagaggtttgca

SEQ ID NO: 398837 - DNA, 15 bp, Homo sapiens
tttgaagaggtttgc

SEQ ID NO: 398838 - DNA, 15 bp, Homo sapiens
gtttgaagaggtttg

SEQ ID NO: 398839 - DNA, 15 bp, Homo sapiens
ggtttgaagaggttt

SEQ ID NO: 398840 - DNA, 15 bp, Homo sapiens
aggtttgaagaggtt

SEQ ID NO: 398841 - DNA, 15 bp, Homo sapiens
gaggtttgaagaggt

SEQ ID NO: 398842 - DNA, 15 bp, Homo sapiens
agaggtttgaagagg

SEQ ID NO: 398843 - DNA, 15 bp, Homo sapiens
cagaggtttgaagag

SEQ ID NO: 398844 - DNA, 15 bp, Homo sapiens
tcagaggtttgaaga

SEQ ID NO: 398845 - DNA, 15 bp, Homo sapiens
atcagaggtttgaag

SEQ ID NO: 398846 - DNA, 15 bp, Homo sapiens
aatcagaggtttgaa

SEQ ID NO: 398847 - DNA, 15 bp, Homo sapiens
taatcagaggtttga

SEQ ID NO: 398848 - DNA, 15 bp, Homo sapiens
gtaatcagaggtttg

SEQ ID NO: 398849 - DNA, 15 bp, Homo sapiens
tgtaatcagaggttt

SEQ ID NO: 398850 - DNA, 15 bp, Homo sapiens
ttgtaatcagaggtt

SEQ ID NO: 398851 - DNA, 15 bp, Homo sapiens
gttgtaatcagaggt

SEQ ID NO: 398852 - DNA, 15 bp, Homo sapiens
tgttgtaatcagagg

SEQ ID NO: 398853 - DNA, 15 bp, Homo sapiens
ttgttgtaatcagag

SEQ ID NO: 398854 - DNA, 15 bp, Homo sapiens
gttgttgtaatcaga

SEQ ID NO: 398855 - DNA, 15 bp, Homo sapiens
ggttgttgtaatcag

SEQ ID NO: 398856 - DNA, 15 bp, Homo sapiens
aggttgttgtaatca

SEQ ID NO: 398857 - DNA, 15 bp, Homo sapiens
caggttgttgtaatc

SEQ ID NO: 398858 - DNA, 15 bp, Homo sapiens
acaggttgttgtaat

SEQ ID NO: 398859 - DNA, 15 bp, Homo sapiens
aacaggttgttgtaa

SEQ ID NO: 398860 - DNA, 15 bp, Homo sapiens
taacaggttgttgta

SEQ ID NO: 398861 - DNA, 15 bp, Homo sapiens
ttaacaggttgttgt

SEQ ID NO: 398862 - DNA, 15 bp, Homo sapiens
gttaacaggttgttg

SEQ ID NO: 398863 - DNA, 15 bp, Homo sapiens
agttaacaggttgtt

SEQ ID NO: 398864 - DNA, 15 bp, Homo sapiens
aagttaacaggttgt

SEQ ID NO: 398865 - DNA, 15 bp, Homo sapiens
gaagttaacaggttg

SEQ ID NO: 398866 - DNA, 15 bp, Homo sapiens
agaagttaacaggtt

SEQ ID NO: 398867 - DNA, 15 bp, Homo sapiens
aagaagttaacaggt

SEQ ID NO: 398868 - DNA, 15 bp, Homo sapiens
caagaagttaacagg

SEQ ID NO: 398869 - DNA, 15 bp, Homo sapiens
acaagaagttaacag

SEQ ID NO: 398870 - DNA, 15 bp, Homo sapiens
aacaagaagttaaca

SEQ ID NO: 398871 - DNA, 15 bp, Homo sapiens
gaacaagaagttaac

SEQ ID NO: 398872 - DNA, 15 bp, Homo sapiens
agaacaagaagttaa

SEQ ID NO: 398873 - DNA, 15 bp, Homo sapiens
tagaacaagaagtta

SEQ ID NO: 398874 - DNA, 15 bp, Homo sapiens
ctagaacaagaagtt

SEQ ID NO: 398875 - DNA, 15 bp, Homo sapiens
tctagaacaagaagt

SEQ ID NO: 398876 - DNA, 15 bp, Homo sapiens
gtctagaacaagaag

SEQ ID NO: 398877 - DNA, 15 bp, Homo sapiens
agtctagaacaagaa

SEQ ID NO: 398878 - DNA, 15 bp, Homo sapiens
cagtctagaacaaga

SEQ ID NO: 398879 - DNA, 15 bp, Homo sapiens
gcagtctagaacaag

SEQ ID NO: 398880 - DNA, 15 bp, Homo sapiens
ggcagtctagaacaa

SEQ ID NO: 398881 - DNA, 15 bp, Homo sapiens
gggcagtctagaaca

SEQ ID NO: 398882 - DNA, 15 bp, Homo sapiens
tgggcagtctagaac

SEQ ID NO: 398883 - DNA, 15 bp, Homo sapiens
ctgggcagtctagaa

SEQ ID NO: 398884 - DNA, 15 bp, Homo sapiens
tctgggcagtctaga

SEQ ID NO: 398885 - DNA, 15 bp, Homo sapiens
atctgggcagtctag

SEQ ID NO: 398886 - DNA, 15 bp, Homo sapiens
aatctgggcagtcta

SEQ ID NO: 398887 - DNA, 15 bp, Homo sapiens
aaatctgggcagtct

SEQ ID NO: 398888 - DNA, 15 bp, Homo sapiens
gaaatctgggcagtc

SEQ ID NO: 398889 - DNA, 15 bp, Homo sapiens
tgaaatctgggcagt

SEQ ID NO: 398890 - DNA, 15 bp, Homo sapiens
ctgaaatctgggcag

SEQ ID NO: 398891 - DNA, 15 bp, Homo sapiens
cctgaaatctgggca

SEQ ID NO: 398892 - DNA, 15 bp, Homo sapiens
tcctgaaatctgggc

SEQ ID NO: 398893 - DNA, 15 bp, Homo sapiens
gtcctgaaatctggg

SEQ ID NO: 398894 - DNA, 15 bp, Homo sapiens
agtcctgaaatctgg

SEQ ID NO: 398895 - DNA, 15 bp, Homo sapiens
tagtcctgaaatctg

SEQ ID NO: 398896 - DNA, 15 bp, Homo sapiens
gtagtcctgaaatct

SEQ ID NO: 398897 - DNA, 15 bp, Homo sapiens
tgtagtcctgaaatc

SEQ ID NO: 398898 - DNA, 15 bp, Homo sapiens
ctgtagtcctgaaat

SEQ ID NO: 398899 - DNA, 15 bp, Homo sapiens
tctgtagtcctgaaa

SEQ ID NO: 398900 - DNA, 15 bp, Homo sapiens
ctctgtagtcctgaa

SEQ ID NO: 398901 - DNA, 15 bp, Homo sapiens
actctgtagtcctga

SEQ ID NO: 398902 - DNA, 15 bp, Homo sapiens
aactctgtagtcctg

SEQ ID NO: 398903 - DNA, 15 bp, Homo sapiens
caactctgtagtcct

SEQ ID NO: 398904 - DNA, 15 bp, Homo sapiens
acaactctgtagtcc

SEQ ID NO: 398905 - DNA, 15 bp, Homo sapiens
cacaactctgtagtc

SEQ ID NO: 398906 - DNA, 15 bp, Homo sapiens
acacaactctgtagt

SEQ ID NO: 398907 - DNA, 15 bp, Homo sapiens
aacacaactctgtag

SEQ ID NO: 398908 - DNA, 15 bp, Homo sapiens
aaacacaactctgta

SEQ ID NO: 398909 - DNA, 15 bp, Homo sapiens
gaaacacaactctgt

SEQ ID NO: 398910 - DNA, 15 bp, Homo sapiens
agaaacacaactctg

SEQ ID NO: 398911 - DNA, 15 bp, Homo sapiens
gagaaacacaactct

SEQ ID NO: 398912 - DNA, 15 bp, Homo sapiens
tgagaaacacaactc

SEQ ID NO: 398913 - DNA, 15 bp, Homo sapiens
ctgagaaacacaact

SEQ ID NO: 398914 - DNA, 15 bp, Homo sapiens
actgagaaacacaac

SEQ ID NO: 398915 - DNA, 15 bp, Homo sapiens
gactgagaaacacaa

SEQ ID NO: 398916 - DNA, 15 bp, Homo sapiens
agactgagaaacaca

SEQ ID NO: 398917 - DNA, 15 bp, Homo sapiens
gagactgagaaacac

SEQ ID NO: 398918 - DNA, 15 bp, Homo sapiens
agagactgagaaaca

SEQ ID NO: 398919 - DNA, 15 bp, Homo sapiens
cagagactgagaaac

SEQ ID NO: 398920 - DNA, 15 bp, Homo sapiens
acagagactgagaaa

SEQ ID NO: 398921 - DNA, 15 bp, Homo sapiens
tacagagactgagaa

SEQ ID NO: 398922 - DNA, 15 bp, Homo sapiens
ttacagagactgaga

SEQ ID NO: 398923 - DNA, 15 bp, Homo sapiens
attacagagactgag

SEQ ID NO: 398924 - DNA, 15 bp, Homo sapiens
cattacagagactga

SEQ ID NO: 398925 - DNA, 15 bp, Homo sapiens
acattacagagactg

SEQ ID NO: 398926 - DNA, 15 bp, Homo sapiens
tacattacagagact

SEQ ID NO: 398927 - DNA, 15 bp, Homo sapiens
ctacattacagagac

SEQ ID NO: 398928 - DNA, 15 bp, Homo sapiens
cctacattacagaga

SEQ ID NO: 398929 - DNA, 15 bp, Homo sapiens
gcctacattacagag

SEQ ID NO: 398930 - DNA, 15 bp, Homo sapiens
tgcctacattacaga

SEQ ID NO: 398931 - DNA, 15 bp, Homo sapiens
atgcctacattacag

SEQ ID NO: 398932 - DNA, 15 bp, Homo sapiens
aatgcctacattaca

SEQ ID NO: 398933 - DNA, 15 bp, Homo sapiens
caatgcctacattac

SEQ ID NO: 398934 - DNA, 15 bp, Homo sapiens
acaatgcctacatta

SEQ ID NO: 398935 - DNA, 15 bp, Homo sapiens
tacaatgcctacatt

SEQ ID NO: 398936 - DNA, 15 bp, Homo sapiens
atacaatgcctacat

SEQ ID NO: 398937 - DNA, 15 bp, Homo sapiens
gatacaatgcctaca

SEQ ID NO: 398938 - DNA, 15 bp, Homo sapiens
agatacaatgcctac

SEQ ID NO: 398939 - DNA, 15 bp, Homo sapiens
aagatacaatgccta

SEQ ID NO: 398940 - DNA, 15 bp, Homo sapiens
taagatacaatgcct

SEQ ID NO: 398941 - DNA, 15 bp, Homo sapiens
ataagatacaatgcc

SEQ ID NO: 398942 - DNA, 15 bp, Homo sapiens
gataagatacaatgc

SEQ ID NO: 398943 - DNA, 15 bp, Homo sapiens
agataagatacaatg

SEQ ID NO: 398944 - DNA, 15 bp, Homo sapiens
cagataagatacaat

SEQ ID NO: 398945 - DNA, 15 bp, Homo sapiens
tcagataagatacaa

SEQ ID NO: 398946 - DNA, 15 bp, Homo sapiens
ctcagataagataca

SEQ ID NO: 398947 - DNA, 15 bp, Homo sapiens
tctcagataagatac

SEQ ID NO: 398948 - DNA, 15 bp, Homo sapiens
ctctcagataagata

SEQ ID NO: 398949 - DNA, 15 bp, Homo sapiens
actctcagataagat

SEQ ID NO: 398950 - DNA, 15 bp, Homo sapiens
aactctcagataaga

SEQ ID NO: 398951 - DNA, 15 bp, Homo sapiens
aaactctcagataag

SEQ ID NO: 398952 - DNA, 15 bp, Homo sapiens
taaactctcagataa

SEQ ID NO: 398953 - DNA, 15 bp, Homo sapiens
ataaactctcagata

SEQ ID NO: 398954 - DNA, 15 bp, Homo sapiens
tataaactctcagat

SEQ ID NO: 398955 - DNA, 15 bp, Homo sapiens
atataaactctcaga

SEQ ID NO: 398956 - DNA, 15 bp, Homo sapiens
tatataaactctcag

SEQ ID NO: 398957 - DNA, 15 bp, Homo sapiens
gtatataaactctca

SEQ ID NO: 398958 - DNA, 15 bp, Homo sapiens
tgtatataaactctc

SEQ ID NO: 398959 - DNA, 15 bp, Homo sapiens
ctgtatataaactct

SEQ ID NO: 398960 - DNA, 15 bp, Homo sapiens
cctgtatataaactc

SEQ ID NO: 398961 - DNA, 15 bp, Homo sapiens
tcctgtatataaact

SEQ ID NO: 398962 - DNA, 15 bp, Homo sapiens
atcctgtatataaac

SEQ ID NO: 398963 - DNA, 15 bp, Homo sapiens
aatcctgtatataaa

SEQ ID NO: 398964 - DNA, 15 bp, Homo sapiens
caatcctgtatataa

SEQ ID NO: 398965 - DNA, 15 bp, Homo sapiens
gcaatcctgtatata

SEQ ID NO: 398966 - DNA, 15 bp, Homo sapiens
ggcaatcctgtatat

SEQ ID NO: 398967 - DNA, 15 bp, Homo sapiens
tggcaatcctgtata

SEQ ID NO: 398968 - DNA, 15 bp, Homo sapiens
ttggcaatcctgtat

SEQ ID NO: 398969 - DNA, 15 bp, Homo sapiens
cttggcaatcctgta

SEQ ID NO: 398970 - DNA, 15 bp, Homo sapiens
ccttggcaatcctgt

SEQ ID NO: 398971 - DNA, 15 bp, Homo sapiens
accttggcaatcctg

SEQ ID NO: 398972 - DNA, 15 bp, Homo sapiens
taccttggcaatcct

SEQ ID NO: 398973 - DNA, 15 bp, Homo sapiens
ctaccttggcaatcc

SEQ ID NO: 398974 - DNA, 15 bp, Homo sapiens
actaccttggcaatc

SEQ ID NO: 398975 - DNA, 15 bp, Homo sapiens
cactaccttggcaat

SEQ ID NO: 398976 - DNA, 15 bp, Homo sapiens
tcactaccttggcaa

SEQ ID NO: 398977 - DNA, 15 bp, Homo sapiens
atcactaccttggca

SEQ ID NO: 398978 - DNA, 15 bp, Homo sapiens
gatcactaccttggc

SEQ ID NO: 398979 - DNA, 15 bp, Homo sapiens
tgatcactaccttgg

SEQ ID NO: 398980 - DNA, 15 bp, Homo sapiens
ttgatcactaccttg

SEQ ID NO: 398981 - DNA, 15 bp, Homo sapiens
tttgatcactacctt

SEQ ID NO: 398982 - DNA, 15 bp, Homo sapiens
ctttgatcactacct

SEQ ID NO: 398983 - DNA, 15 bp, Homo sapiens
actttgatcactacc

SEQ ID NO: 398984 - DNA, 15 bp, Homo sapiens
tactttgatcactac

SEQ ID NO: 398985 - DNA, 15 bp, Homo sapiens
ttactttgatcacta

SEQ ID NO: 398986 - DNA, 15 bp, Homo sapiens
tttactttgatcact

SEQ ID NO: 398987 - DNA, 15 bp, Homo sapiens
atttactttgatcac

SEQ ID NO: 398988 - DNA, 15 bp, Homo sapiens
catttactttgatca

SEQ ID NO: 398989 - DNA, 15 bp, Homo sapiens
gcatttactttgatc

SEQ ID NO: 398990 - DNA, 15 bp, Homo sapiens
tgcatttactttgat

SEQ ID NO: 398991 - DNA, 15 bp, Homo sapiens
ttgcatttactttga

SEQ ID NO: 398992 - DNA, 15 bp, Homo sapiens
attgcatttactttg

SEQ ID NO: 398993 - DNA, 15 bp, Homo sapiens
aattgcatttacttt

SEQ ID NO: 398994 - DNA, 15 bp, Homo sapiens
caattgcatttactt

SEQ ID NO: 398995 - DNA, 15 bp, Homo sapiens
acaattgcatttact

SEQ ID NO: 398996 - DNA, 15 bp, Homo sapiens
gacaattgcatttac

SEQ ID NO: 398997 - DNA, 15 bp, Homo sapiens
tgacaattgcattta

SEQ ID NO: 398998 - DNA, 15 bp, Homo sapiens
ttgacaattgcattt

SEQ ID NO: 398999 - DNA, 15 bp, Homo sapiens
attgacaattgcatt

SEQ ID NO: 399000 - DNA, 15 bp, Homo sapiens
aattgacaattgcat

SEQ ID NO: 399001 - DNA, 15 bp, Homo sapiens
aaattgacaattgca

SEQ ID NO: 399002 - DNA, 15 bp, Homo sapiens
taaattgacaattgc

SEQ ID NO: 399003 - DNA, 15 bp, Homo sapiens
ttaaattgacaattg

SEQ ID NO: 399004 - DNA, 15 bp, Homo sapiens
attaaattgacaatt

SEQ ID NO: 399005 - DNA, 15 bp, Homo sapiens
aattaaattgacaat

SEQ ID NO: 399006 - DNA, 15 bp, Homo sapiens
taattaaattgacaa

SEQ ID NO: 399007 - DNA, 15 bp, Homo sapiens
ctaattaaattgaca

SEQ ID NO: 399008 - DNA, 15 bp, Homo sapiens
gctaattaaattgac

SEQ ID NO: 399009 - DNA, 15 bp, Homo sapiens
tgctaattaaattga

SEQ ID NO: 399010 - DNA, 15 bp, Homo sapiens
atgctaattaaattg

SEQ ID NO: 399011 - DNA, 15 bp, Homo sapiens
aatgctaattaaatt

SEQ ID NO: 399012 - DNA, 15 bp, Homo sapiens
taatgctaattaaat

SEQ ID NO: 399013 - DNA, 15 bp, Homo sapiens
ctaatgctaattaaa

SEQ ID NO: 399014 - DNA, 15 bp, Homo sapiens
actaatgctaattaa

SEQ ID NO: 399015 - DNA, 15 bp, Homo sapiens
gactaatgctaatta

SEQ ID NO: 399016 - DNA, 15 bp, Homo sapiens
ggactaatgctaatt

SEQ ID NO: 399017 - DNA, 15 bp, Homo sapiens
gggactaatgctaat

SEQ ID NO: 399018 - DNA, 15 bp, Homo sapiens
agggactaatgctaa

SEQ ID NO: 399019 - DNA, 15 bp, Homo sapiens
gagggactaatgcta

SEQ ID NO: 399020 - DNA, 15 bp, Homo sapiens
ggagggactaatgct

SEQ ID NO: 399021 - DNA, 15 bp, Homo sapiens
tggagggactaatgc

SEQ ID NO: 399022 - DNA, 15 bp, Homo sapiens
ttggagggactaatg

SEQ ID NO: 399023 - DNA, 15 bp, Homo sapiens
tttggagggactaat

SEQ ID NO: 399024 - DNA, 15 bp, Homo sapiens
atttggagggactaa

SEQ ID NO: 399025 - DNA, 15 bp, Homo sapiens
aatttggagggacta

SEQ ID NO: 399026 - DNA, 15 bp, Homo sapiens
gaatttggagggact

SEQ ID NO: 399027 - DNA, 15 bp, Homo sapiens
tgaatttggagggac

SEQ ID NO: 399028 - DNA, 15 bp, Homo sapiens
atgaatttggaggga

SEQ ID NO: 399029 - DNA, 15 bp, Homo sapiens
aatgaatttggaggg

SEQ ID NO: 399030 - DNA, 15 bp, Homo sapiens
caatgaatttggagg

SEQ ID NO: 399031 - DNA, 15 bp, Homo sapiens
acaatgaatttggag

SEQ ID NO: 399032 - DNA, 15 bp, Homo sapiens
cacaatgaatttgga

SEQ ID NO: 399033 - DNA, 15 bp, Homo sapiens
gcacaatgaatttgg

SEQ ID NO: 399034 - DNA, 15 bp, Homo sapiens
tgcacaatgaatttg

SEQ ID NO: 399035 - DNA, 15 bp, Homo sapiens
atgcacaatgaattt

SEQ ID NO: 399036 - DNA, 15 bp, Homo sapiens
catgcacaatgaatt

SEQ ID NO: 399037 - DNA, 15 bp, Homo sapiens
gcatgcacaatgaat

SEQ ID NO: 399038 - DNA, 15 bp, Homo sapiens
cgcatgcacaatgaa

SEQ ID NO: 399039 - DNA, 15 bp, Homo sapiens
acgcatgcacaatga

SEQ ID NO: 399040 - DNA, 15 bp, Homo sapiens
cacgcatgcacaatg

SEQ ID NO: 399041 - DNA, 15 bp, Homo sapiens
acacgcatgcacaat

SEQ ID NO: 399042 - DNA, 15 bp, Homo sapiens
cacacgcatgcacaa

SEQ ID NO: 399043 - DNA, 15 bp, Homo sapiens
acacacgcatgcaca

SEQ ID NO: 399044 - DNA, 15 bp, Homo sapiens
cacacacgcatgcac

SEQ ID NO: 399045 - DNA, 15 bp, Homo sapiens
acacacacgcatgca

SEQ ID NO: 399046 - DNA, 15 bp, Homo sapiens
cacacacacgcatgc

SEQ ID NO: 399047 - DNA, 15 bp, Homo sapiens
acacacacacgcatg

SEQ ID NO: 399048 - DNA, 15 bp, Homo sapiens
cacacacacacgcat

SEQ ID NO: 399049 - DNA, 15 bp, Homo sapiens
cacacacacacacgc

SEQ ID NO: 399050 - DNA, 15 bp, Homo sapiens
acacacacacacacg

SEQ ID NO: 399051 - DNA, 15 bp, Homo sapiens
cacacacacacacac

SEQ ID NO: 399052 - DNA, 15 bp, Homo sapiens
acacacacacacaca

SEQ ID NO: 399053 - DNA, 15 bp, Homo sapiens
tacacacacacacac

SEQ ID NO: 399054 - DNA, 15 bp, Homo sapiens
atacacacacacaca

SEQ ID NO: 399055 - DNA, 15 bp, Homo sapiens
catacacacacacac

SEQ ID NO: 399056 - DNA, 15 bp, Homo sapiens
acatacacacacaca

SEQ ID NO: 399057 - DNA, 15 bp, Homo sapiens
cacatacacacacac

SEQ ID NO: 399058 - DNA, 15 bp, Homo sapiens
cacacatacacacac

SEQ ID NO: 399059 - DNA, 15 bp, Homo sapiens
gcacacatacacaca

SEQ ID NO: 399060 - DNA, 15 bp, Homo sapiens
tgcacacatacacac

SEQ ID NO: 399061 - DNA, 15 bp, Homo sapiens
atgcacacatacaca

SEQ ID NO: 399062 - DNA, 15 bp, Homo sapiens
tatgcacacatacac

SEQ ID NO: 399063 - DNA, 15 bp, Homo sapiens
ttatgcacacataca

SEQ ID NO: 399064 - DNA, 15 bp, Homo sapiens
tttatgcacacatac

SEQ ID NO: 399065 - DNA, 15 bp, Homo sapiens
gtttatgcacacata

SEQ ID NO: 399066 - DNA, 15 bp, Homo sapiens
tgtttatgcacacat

SEQ ID NO: 399067 - DNA, 15 bp, Homo sapiens
gtgtttatgcacaca

SEQ ID NO: 399068 - DNA, 15 bp, Homo sapiens
tgtgtttatgcacac

SEQ ID NO: 399069 - DNA, 15 bp, Homo sapiens
atgtgtttatgcaca

SEQ ID NO: 399070 - DNA, 15 bp, Homo sapiens
tatgtgtttatgcac

SEQ ID NO: 399071 - DNA, 15 bp, Homo sapiens
gtatgtgtttatgca

SEQ ID NO: 399072 - DNA, 15 bp, Homo sapiens
tgtatgtgtttatgc

SEQ ID NO: 399073 - DNA, 15 bp, Homo sapiens
ttgtatgtgtttatg

SEQ ID NO: 399074 - DNA, 15 bp, Homo sapiens
cttgtatgtgtttat

SEQ ID NO: 399075 - DNA, 15 bp, Homo sapiens
acttgtatgtgttta

SEQ ID NO: 399076 - DNA, 15 bp, Homo sapiens
aacttgtatgtgttt

SEQ ID NO: 399077 - DNA, 15 bp, Homo sapiens
aaacttgtatgtgtt

SEQ ID NO: 399078 - DNA, 15 bp, Homo sapiens
caaacttgtatgtgt

SEQ ID NO: 399079 - DNA, 15 bp, Homo sapiens
acaaacttgtatgtg

SEQ ID NO: 399080 - DNA, 15 bp, Homo sapiens
cacaaacttgtatgt

SEQ ID NO: 399081 - DNA, 15 bp, Homo sapiens
acacaaacttgtatg

SEQ ID NO: 399082 - DNA, 15 bp, Homo sapiens
aacacaaacttgtat

SEQ ID NO: 399083 - DNA, 15 bp, Homo sapiens
aaacacaaacttgta

SEQ ID NO: 399084 - DNA, 15 bp, Homo sapiens
gaaacacaaacttgt

SEQ ID NO: 399085 - DNA, 15 bp, Homo sapiens
tgaaacacaaacttg

SEQ ID NO: 399086 - DNA, 15 bp, Homo sapiens
ctgaaacacaaactt

SEQ ID NO: 399087 - DNA, 15 bp, Homo sapiens
cctgaaacacaaact

SEQ ID NO: 399088 - DNA, 15 bp, Homo sapiens
acctgaaacacaaac

SEQ ID NO: 399089 - DNA, 15 bp, Homo sapiens
aacctgaaacacaaa

SEQ ID NO: 399090 - DNA, 15 bp, Homo sapiens
aaacctgaaacacaa

SEQ ID NO: 399091 - DNA, 15 bp, Homo sapiens
caaacctgaaacaca

SEQ ID NO: 399092 - DNA, 15 bp, Homo sapiens
gcaaacctgaaacac

SEQ ID NO: 399093 - DNA, 15 bp, Homo sapiens
agcaaacctgaaaca

SEQ ID NO: 399094 - DNA, 15 bp, Homo sapiens
tagcaaacctgaaac

SEQ ID NO: 399095 - DNA, 15 bp, Homo sapiens
ttagcaaacctgaaa

SEQ ID NO: 399096 - DNA, 15 bp, Homo sapiens
gttagcaaacctgaa

SEQ ID NO: 399097 - DNA, 15 bp, Homo sapiens
agttagcaaacctga

SEQ ID NO: 399098 - DNA, 15 bp, Homo sapiens
cagttagcaaacctg

SEQ ID NO: 399099 - DNA, 15 bp, Homo sapiens
ccagttagcaaacct

SEQ ID NO: 399100 - DNA, 15 bp, Homo sapiens
gccagttagcaaacc

SEQ ID NO: 399101 - DNA, 15 bp, Homo sapiens
agccagttagcaaac

SEQ ID NO: 399102 - DNA, 15 bp, Homo sapiens
aagccagttagcaaa

SEQ ID NO: 399103 - DNA, 15 bp, Homo sapiens
taagccagttagcaa

SEQ ID NO: 399104 - DNA, 15 bp, Homo sapiens
ataagccagttagca

SEQ ID NO: 399105 - DNA, 15 bp, Homo sapiens
aataagccagttagc

SEQ ID NO: 399106 - DNA, 15 bp, Homo sapiens
taataagccagttag

SEQ ID NO: 399107 - DNA, 15 bp, Homo sapiens
ctaataagccagtta

SEQ ID NO: 399108 - DNA, 15 bp, Homo sapiens
gctaataagccagtt

SEQ ID NO: 399109 - DNA, 15 bp, Homo sapiens
tgctaataagccagt

SEQ ID NO: 399110 - DNA, 15 bp, Homo sapiens
ttgctaataagccag

SEQ ID NO: 399111 - DNA, 15 bp, Homo sapiens
tttgctaataagcca

SEQ ID NO: 399112 - DNA, 15 bp, Homo sapiens
atttgctaataagcc

SEQ ID NO: 399113 - DNA, 15 bp, Homo sapiens
tatttgctaataagc

SEQ ID NO: 399114 - DNA, 15 bp, Homo sapiens
gtatttgctaataag

SEQ ID NO: 399115 - DNA, 15 bp, Homo sapiens
agtatttgctaataa

SEQ ID NO: 399116 - DNA, 15 bp, Homo sapiens
tagtatttgctaata

SEQ ID NO: 399117 - DNA, 15 bp, Homo sapiens
ttagtatttgctaat

SEQ ID NO: 399118 - DNA, 15 bp, Homo sapiens
tttagtatttgctaa

SEQ ID NO: 399119 - DNA, 15 bp, Homo sapiens
ctttagtatttgcta

SEQ ID NO: 399120 - DNA, 15 bp, Homo sapiens
tctttagtatttgct

SEQ ID NO: 399121 - DNA, 15 bp, Homo sapiens
gtctttagtatttgc

SEQ ID NO: 399122 - DNA, 15 bp, Homo sapiens
tgtctttagtatttg

SEQ ID NO: 399123 - DNA, 15 bp, Homo sapiens
ttgtctttagtattt

SEQ ID NO: 399124 - DNA, 15 bp, Homo sapiens
tttgtctttagtatt

SEQ ID NO: 399125 - DNA, 15 bp, Homo sapiens
ctttgtctttagtat

SEQ ID NO: 399126 - DNA, 15 bp, Homo sapiens
gctttgtctttagta

SEQ ID NO: 399127 - DNA, 15 bp, Homo sapiens
agctttgtctttagt

SEQ ID NO: 399128 - DNA, 15 bp, Homo sapiens
aagctttgtctttag

SEQ ID NO: 399129 - DNA, 15 bp, Homo sapiens
aaagctttgtcttta

SEQ ID NO: 399130 - DNA, 15 bp, Homo sapiens
taaagctttgtcttt

SEQ ID NO: 399131 - DNA, 15 bp, Homo sapiens
ttaaagctttgtctt

SEQ ID NO: 399132 - DNA, 15 bp, Homo sapiens
cttaaagctttgtct

SEQ ID NO: 399133 - DNA, 15 bp, Homo sapiens
tcttaaagctttgtc

SEQ ID NO: 399134 - DNA, 15 bp, Homo sapiens
ttcttaaagctttgt

SEQ ID NO: 399135 - DNA, 15 bp, Homo sapiens
tttcttaaagctttg

SEQ ID NO: 399136 - DNA, 15 bp, Homo sapiens
ctttcttaaagcttt

SEQ ID NO: 399137 - DNA, 15 bp, Homo sapiens
gctttcttaaagctt

SEQ ID NO: 399138 - DNA, 15 bp, Homo sapiens
tgctttcttaaagct

SEQ ID NO: 399139 - DNA, 15 bp, Homo sapiens
atgctttcttaaagc

SEQ ID NO: 399140 - DNA, 15 bp, Homo sapiens
aatgctttcttaaag

SEQ ID NO: 399141 - DNA, 15 bp, Homo sapiens
gaatgctttcttaaa

SEQ ID NO: 399142 - DNA, 15 bp, Homo sapiens
tgaatgctttcttaa

SEQ ID NO: 399143 - DNA, 15 bp, Homo sapiens
atgaatgctttctta

SEQ ID NO: 399144 - DNA, 15 bp, Homo sapiens
tatgaatgctttctt

SEQ ID NO: 399145 - DNA, 15 bp, Homo sapiens
ttatgaatgctttct

SEQ ID NO: 399146 - DNA, 15 bp, Homo sapiens
attatgaatgctttc

SEQ ID NO: 399147 - DNA, 15 bp, Homo sapiens
aattatgaatgcttt

SEQ ID NO: 399148 - DNA, 15 bp, Homo sapiens
aaattatgaatgctt

SEQ ID NO: 399149 - DNA, 15 bp, Homo sapiens
gaaattatgaatgct

SEQ ID NO: 399150 - DNA, 15 bp, Homo sapiens
agaaattatgaatgc

SEQ ID NO: 399151 - DNA, 15 bp, Homo sapiens
aagaaattatgaatg

SEQ ID NO: 399152 - DNA, 15 bp, Homo sapiens
caagaaattatgaat

SEQ ID NO: 399153 - DNA, 15 bp, Homo sapiens
ccaagaaattatgaa

SEQ ID NO: 399154 - DNA, 15 bp, Homo sapiens
cccaagaaattatga

SEQ ID NO: 399155 - DNA, 15 bp, Homo sapiens
acccaagaaattatg

SEQ ID NO: 399156 - DNA, 15 bp, Homo sapiens
gacccaagaaattat

SEQ ID NO: 399157 - DNA, 15 bp, Homo sapiens
tgacccaagaaatta

SEQ ID NO: 399158 - DNA, 15 bp, Homo sapiens
ctgacccaagaaatt

SEQ ID NO: 399159 - DNA, 15 bp, Homo sapiens
gctgacccaagaaat

SEQ ID NO: 399160 - DNA, 15 bp, Homo sapiens
agctgacccaagaaa

SEQ ID NO: 399161 - DNA, 15 bp, Homo sapiens
tagctgacccaagaa

SEQ ID NO: 399162 - DNA, 15 bp, Homo sapiens
gtagctgacccaaga

SEQ ID NO: 399163 - DNA, 15 bp, Homo sapiens
agtagctgacccaag

SEQ ID NO: 399164 - DNA, 15 bp, Homo sapiens
cagtagctgacccaa

SEQ ID NO: 399165 - DNA, 15 bp, Homo sapiens
tcagtagctgaccca

SEQ ID NO: 399166 - DNA, 15 bp, Homo sapiens
ctcagtagctgaccc

SEQ ID NO: 399167 - DNA, 15 bp, Homo sapiens
actcagtagctgacc

SEQ ID NO: 399168 - DNA, 15 bp, Homo sapiens
tactcagtagctgac

SEQ ID NO: 399169 - DNA, 15 bp, Homo sapiens
atactcagtagctga

SEQ ID NO: 399170 - DNA, 15 bp, Homo sapiens
gatactcagtagctg

SEQ ID NO: 399171 - DNA, 15 bp, Homo sapiens
agatactcagtagct

SEQ ID NO: 399172 - DNA, 15 bp, Homo sapiens
tagatactcagtagc

SEQ ID NO: 399173 - DNA, 15 bp, Homo sapiens
ttagatactcagtag

SEQ ID NO: 399174 - DNA, 15 bp, Homo sapiens
gttagatactcagta

SEQ ID NO: 399175 - DNA, 15 bp, Homo sapiens
tgttagatactcagt

SEQ ID NO: 399176 - DNA, 15 bp, Homo sapiens
atgttagatactcag

SEQ ID NO: 399177 - DNA, 15 bp, Homo sapiens
tatgttagatactca

SEQ ID NO: 399178 - DNA, 15 bp, Homo sapiens
ttatgttagatactc

SEQ ID NO: 399179 - DNA, 15 bp, Homo sapiens
cttatgttagatact

SEQ ID NO: 399180 - DNA, 15 bp, Homo sapiens
acttatgttagatac

SEQ ID NO: 399181 - DNA, 15 bp, Homo sapiens
tacttatgttagata

SEQ ID NO: 399182 - DNA, 15 bp, Homo sapiens
ttacttatgttagat

SEQ ID NO: 399183 - DNA, 15 bp, Homo sapiens
attacttatgttaga

SEQ ID NO: 399184 - DNA, 15 bp, Homo sapiens
aattacttatgttag

SEQ ID NO: 399185 - DNA, 15 bp, Homo sapiens
aaattacttatgtta

SEQ ID NO: 399186 - DNA, 15 bp, Homo sapiens
gaaattacttatgtt

SEQ ID NO: 399187 - DNA, 15 bp, Homo sapiens
ggaaattacttatgt

SEQ ID NO: 399188 - DNA, 15 bp, Homo sapiens
aggaaattacttatg

SEQ ID NO: 399189 - DNA, 15 bp, Homo sapiens
aaggaaattacttat

SEQ ID NO: 399190 - DNA, 15 bp, Homo sapiens
gaaggaaattactta

SEQ ID NO: 399191 - DNA, 15 bp, Homo sapiens
agaaggaaattactt

SEQ ID NO: 399192 - DNA, 15 bp, Homo sapiens
tagaaggaaattact

SEQ ID NO: 399193 - DNA, 15 bp, Homo sapiens
atagaaggaaattac

SEQ ID NO: 399194 - DNA, 15 bp, Homo sapiens
catagaaggaaatta

SEQ ID NO: 399195 - DNA, 15 bp, Homo sapiens
gcatagaaggaaatt

SEQ ID NO: 399196 - DNA, 15 bp, Homo sapiens
agcatagaaggaaat

SEQ ID NO: 399197 - DNA, 15 bp, Homo sapiens
gagcatagaaggaaa

SEQ ID NO: 399198 - DNA, 15 bp, Homo sapiens
agagcatagaaggaa

SEQ ID NO: 399199 - DNA, 15 bp, Homo sapiens
cagagcatagaagga

SEQ ID NO: 399200 - DNA, 15 bp, Homo sapiens
acagagcatagaagg

SEQ ID NO: 399201 - DNA, 15 bp, Homo sapiens
aacagagcatagaag

SEQ ID NO: 399202 - DNA, 15 bp, Homo sapiens
taacagagcatagaa

SEQ ID NO: 399203 - DNA, 15 bp, Homo sapiens
ataacagagcataga

SEQ ID NO: 399204 - DNA, 15 bp, Homo sapiens
gataacagagcatag

SEQ ID NO: 399205 - DNA, 15 bp, Homo sapiens
agataacagagcata

SEQ ID NO: 399206 - DNA, 15 bp, Homo sapiens
aagataacagagcat

SEQ ID NO: 399207 - DNA, 15 bp, Homo sapiens
caagataacagagca

SEQ ID NO: 399208 - DNA, 15 bp, Homo sapiens
acaagataacagagc

SEQ ID NO: 399209 - DNA, 15 bp, Homo sapiens
aacaagataacagag

SEQ ID NO: 399210 - DNA, 15 bp, Homo sapiens
taacaagataacaga

SEQ ID NO: 399211 - DNA, 15 bp, Homo sapiens
ttaacaagataacag

SEQ ID NO: 399212 - DNA, 15 bp, Homo sapiens
attaacaagataaca

SEQ ID NO: 399213 - DNA, 15 bp, Homo sapiens
tattaacaagataac

SEQ ID NO: 399214 - DNA, 15 bp, Homo sapiens
gtattaacaagataa

SEQ ID NO: 399215 - DNA, 15 bp, Homo sapiens
tgtattaacaagata

SEQ ID NO: 399216 - DNA, 15 bp, Homo sapiens
ctgtattaacaagat

SEQ ID NO: 399217 - DNA, 15 bp, Homo sapiens
actgtattaacaaga

SEQ ID NO: 399218 - DNA, 15 bp, Homo sapiens
gactgtattaacaag

SEQ ID NO: 399219 - DNA, 15 bp, Homo sapiens
tgactgtattaacaa

SEQ ID NO: 399220 - DNA, 15 bp, Homo sapiens
atgactgtattaaca

SEQ ID NO: 399221 - DNA, 15 bp, Homo sapiens
aatgactgtattaac

SEQ ID NO: 399222 - DNA, 15 bp, Homo sapiens
aaatgactgtattaa

SEQ ID NO: 399223 - DNA, 15 bp, Homo sapiens
taaatgactgtatta

SEQ ID NO: 399224 - DNA, 15 bp, Homo sapiens
ttaaatgactgtatt

SEQ ID NO: 399225 - DNA, 15 bp, Homo sapiens
tttaaatgactgtat

SEQ ID NO: 399226 - DNA, 15 bp, Homo sapiens
ttttaaatgactgta

SEQ ID NO: 399227 - DNA, 15 bp, Homo sapiens
attttaaatgactgt

SEQ ID NO: 399228 - DNA, 15 bp, Homo sapiens
cattttaaatgactg

SEQ ID NO: 399229 - DNA, 15 bp, Homo sapiens
tcattttaaatgact

SEQ ID NO: 399230 - DNA, 15 bp, Homo sapiens
ctcattttaaatgac

SEQ ID NO: 399231 - DNA, 15 bp, Homo sapiens
tctcattttaaatga

SEQ ID NO: 399232 - DNA, 15 bp, Homo sapiens
atctcattttaaatg

SEQ ID NO: 399233 - DNA, 15 bp, Homo sapiens
aatctcattttaaat

SEQ ID NO: 399234 - DNA, 15 bp, Homo sapiens
aaatctcattttaaa

SEQ ID NO: 399235 - DNA, 15 bp, Homo sapiens
aaaatctcattttaa

SEQ ID NO: 399236 - DNA, 15 bp, Homo sapiens
gaaaatctcatttta

SEQ ID NO: 399237 - DNA, 15 bp, Homo sapiens
agaaaatctcatttt

SEQ ID NO: 399238 - DNA, 15 bp, Homo sapiens
aagaaaatctcattt

SEQ ID NO: 399239 - DNA, 15 bp, Homo sapiens
aaagaaaatctcatt

SEQ ID NO: 399240 - DNA, 15 bp, Homo sapiens
taaagaaaatctcat

SEQ ID NO: 399241 - DNA, 15 bp, Homo sapiens
ataaagaaaatctca

SEQ ID NO: 399242 - DNA, 15 bp, Homo sapiens
tataaagaaaatctc

SEQ ID NO: 399243 - DNA, 15 bp, Homo sapiens
ctataaagaaaatct

SEQ ID NO: 399244 - DNA, 15 bp, Homo sapiens
cctataaagaaaatc

SEQ ID NO: 399245 - DNA, 15 bp, Homo sapiens
acctataaagaaaat

SEQ ID NO: 399246 - DNA, 15 bp, Homo sapiens
aacctataaagaaaa

SEQ ID NO: 399247 - DNA, 15 bp, Homo sapiens
aaacctataaagaaa

SEQ ID NO: 399248 - DNA, 15 bp, Homo sapiens
aaaacctataaagaa

SEQ ID NO: 399249 - DNA, 15 bp, Homo sapiens
taaaacctataaaga

SEQ ID NO: 399250 - DNA, 15 bp, Homo sapiens
ttaaaacctataaag

SEQ ID NO: 399251 - DNA, 15 bp, Homo sapiens
attaaaacctataaa

SEQ ID NO: 399252 - DNA, 15 bp, Homo sapiens
cattaaaacctataa

SEQ ID NO: 399253 - DNA, 15 bp, Homo sapiens
tcattaaaacctata

SEQ ID NO: 399254 - DNA, 15 bp, Homo sapiens
ttcattaaaacctat

SEQ ID NO: 399255 - DNA, 15 bp, Homo sapiens
tttcattaaaaccta

SEQ ID NO: 399256 - DNA, 15 bp, Homo sapiens
ttttcattaaaacct

SEQ ID NO: 399257 - DNA, 15 bp, Homo sapiens
cttttcattaaaacc

SEQ ID NO: 399258 - DNA, 15 bp, Homo sapiens
tcttttcattaaaac

SEQ ID NO: 399259 - DNA, 15 bp, Homo sapiens
ttcttttcattaaaa

SEQ ID NO: 399260 - DNA, 15 bp, Homo sapiens
gttcttttcattaaa

SEQ ID NO: 399261 - DNA, 15 bp, Homo sapiens
tgttcttttcattaa

SEQ ID NO: 399262 - DNA, 15 bp, Homo sapiens
ctgttcttttcatta

SEQ ID NO: 399263 - DNA, 15 bp, Homo sapiens
tctgttcttttcatt

SEQ ID NO: 399264 - DNA, 15 bp, Homo sapiens
atctgttcttttcat

SEQ ID NO: 399265 - DNA, 15 bp, Homo sapiens
gatctgttcttttca

SEQ ID NO: 399266 - DNA, 15 bp, Homo sapiens
tgatctgttcttttc

SEQ ID NO: 399267 - DNA, 15 bp, Homo sapiens
ttgatctgttctttt

SEQ ID NO: 399268 - DNA, 15 bp, Homo sapiens
attgatctgttcttt

SEQ ID NO: 399269 - DNA, 15 bp, Homo sapiens
aattgatctgttctt

SEQ ID NO: 399270 - DNA, 15 bp, Homo sapiens
aaattgatctgttct

SEQ ID NO: 399271 - DNA, 15 bp, Homo sapiens
aaaattgatctgttc

SEQ ID NO: 399272 - DNA, 15 bp, Homo sapiens
aaaaattgatctgtt

SEQ ID NO: 399273 - DNA, 15 bp, Homo sapiens
taaaaattgatctgt

SEQ ID NO: 399274 - DNA, 15 bp, Homo sapiens
ataaaaattgatctg

SEQ ID NO: 399275 - DNA, 15 bp, Homo sapiens
cataaaaattgatct

SEQ ID NO: 399276 - DNA, 15 bp, Homo sapiens
ccataaaaattgatc

SEQ ID NO: 399277 - DNA, 15 bp, Homo sapiens
cccataaaaattgat

SEQ ID NO: 399278 - DNA, 15 bp, Homo sapiens
tcccataaaaattga

SEQ ID NO: 399279 - DNA, 15 bp, Homo sapiens
atcccataaaaattg

SEQ ID NO: 399280 - DNA, 15 bp, Homo sapiens
gatcccataaaaatt

SEQ ID NO: 399281 - DNA, 15 bp, Homo sapiens
ggatcccataaaaat

SEQ ID NO: 399282 - DNA, 15 bp, Homo sapiens
tggatcccataaaaa

SEQ ID NO: 399283 - DNA, 15 bp, Homo sapiens
atggatcccataaaa

SEQ ID NO: 399284 - DNA, 15 bp, Homo sapiens
catggatcccataaa

SEQ ID NO: 399285 - DNA, 15 bp, Homo sapiens
acatggatcccataa

SEQ ID NO: 399286 - DNA, 15 bp, Homo sapiens
aacatggatcccata

SEQ ID NO: 399287 - DNA, 15 bp, Homo sapiens
gaacatggatcccat

SEQ ID NO: 399288 - DNA, 15 bp, Homo sapiens
ggaacatggatccca

SEQ ID NO: 399289 - DNA, 15 bp, Homo sapiens
aggaacatggatccc

SEQ ID NO: 399290 - DNA, 15 bp, Homo sapiens
taggaacatggatcc

SEQ ID NO: 399291 - DNA, 15 bp, Homo sapiens
gtaggaacatggatc

SEQ ID NO: 399292 - DNA, 15 bp, Homo sapiens
agtaggaacatggat

SEQ ID NO: 399293 - DNA, 15 bp, Homo sapiens
gagtaggaacatgga

SEQ ID NO: 399294 - DNA, 15 bp, Homo sapiens
tgagtaggaacatgg

SEQ ID NO: 399295 - DNA, 15 bp, Homo sapiens
ctgagtaggaacatg

SEQ ID NO: 399296 - DNA, 15 bp, Homo sapiens
gctgagtaggaacat

SEQ ID NO: 399297 - DNA, 15 bp, Homo sapiens
agctgagtaggaaca

SEQ ID NO: 399298 - DNA, 15 bp, Homo sapiens
tagctgagtaggaac

SEQ ID NO: 399299 - DNA, 15 bp, Homo sapiens
ctagctgagtaggaa

SEQ ID NO: 399300 - DNA, 15 bp, Homo sapiens
gctagctgagtagga

SEQ ID NO: 399301 - DNA, 15 bp, Homo sapiens
tgctagctgagtagg

SEQ ID NO: 399302 - DNA, 15 bp, Homo sapiens
ttgctagctgagtag

SEQ ID NO: 399303 - DNA, 15 bp, Homo sapiens
cttgctagctgagta

SEQ ID NO: 399304 - DNA, 15 bp, Homo sapiens
tcttgctagctgagt

SEQ ID NO: 399305 - DNA, 15 bp, Homo sapiens
ttcttgctagctgag

SEQ ID NO: 399306 - DNA, 15 bp, Homo sapiens
attcttgctagctga

SEQ ID NO: 399307 - DNA, 15 bp, Homo sapiens
cattcttgctagctg

SEQ ID NO: 399308 - DNA, 15 bp, Homo sapiens
tcattcttgctagct

SEQ ID NO: 399309 - DNA, 15 bp, Homo sapiens
ttcattcttgctagc

SEQ ID NO: 399310 - DNA, 15 bp, Homo sapiens
gttcattcttgctag

SEQ ID NO: 399311 - DNA, 15 bp, Homo sapiens
tgttcattcttgcta

SEQ ID NO: 399312 - DNA, 15 bp, Homo sapiens
gtgttcattcttgct

SEQ ID NO: 399313 - DNA, 15 bp, Homo sapiens
ggtgttcattcttgc

SEQ ID NO: 399314 - DNA, 15 bp, Homo sapiens
tggtgttcattcttg

SEQ ID NO: 399315 - DNA, 15 bp, Homo sapiens
atggtgttcattctt

SEQ ID NO: 399316 - DNA, 15 bp, Homo sapiens
aatggtgttcattct

SEQ ID NO: 399317 - DNA, 15 bp, Homo sapiens
aaatggtgttcattc

SEQ ID NO: 399318 - DNA, 15 bp, Homo sapiens
gaaatggtgttcatt

SEQ ID NO: 399319 - DNA, 15 bp, Homo sapiens
agaaatggtgttcat

SEQ ID NO: 399320 - DNA, 15 bp, Homo sapiens
gagaaatggtgttca

SEQ ID NO: 399321 - DNA, 15 bp, Homo sapiens
agagaaatggtgttc

SEQ ID NO: 399322 - DNA, 15 bp, Homo sapiens
tagagaaatggtgtt

SEQ ID NO: 399323 - DNA, 15 bp, Homo sapiens
ctagagaaatggtgt

SEQ ID NO: 399324 - DNA, 15 bp, Homo sapiens
actagagaaatggtg

SEQ ID NO: 399325 - DNA, 15 bp, Homo sapiens
tactagagaaatggt

SEQ ID NO: 399326 - DNA, 15 bp, Homo sapiens
ctactagagaaatgg

SEQ ID NO: 399327 - DNA, 15 bp, Homo sapiens
actactagagaaatg

SEQ ID NO: 399328 - DNA, 15 bp, Homo sapiens
aactactagagaaat

SEQ ID NO: 399329 - DNA, 15 bp, Homo sapiens
gaactactagagaaa

SEQ ID NO: 399330 - DNA, 15 bp, Homo sapiens
agaactactagagaa

SEQ ID NO: 399331 - DNA, 15 bp, Homo sapiens
tagaactactagaga

SEQ ID NO: 399332 - DNA, 15 bp, Homo sapiens
ttagaactactagag

SEQ ID NO: 399333 - DNA, 15 bp, Homo sapiens
cttagaactactaga

SEQ ID NO: 399334 - DNA, 15 bp, Homo sapiens
tcttagaactactag

SEQ ID NO: 399335 - DNA, 15 bp, Homo sapiens
atcttagaactacta

SEQ ID NO: 399336 - DNA, 15 bp, Homo sapiens
aatcttagaactact

SEQ ID NO: 399337 - DNA, 15 bp, Homo sapiens
gaatcttagaactac

SEQ ID NO: 399338 - DNA, 15 bp, Homo sapiens
agaatcttagaacta

SEQ ID NO: 399339 - DNA, 15 bp, Homo sapiens
aagaatcttagaact

SEQ ID NO: 399340 - DNA, 15 bp, Homo sapiens
gaagaatcttagaac

SEQ ID NO: 399341 - DNA, 15 bp, Homo sapiens
ggaagaatcttagaa

SEQ ID NO: 399342 - DNA, 15 bp, Homo sapiens
aggaagaatcttaga

SEQ ID NO: 399343 - DNA, 15 bp, Homo sapiens
aaggaagaatcttag

SEQ ID NO: 399344 - DNA, 15 bp, Homo sapiens
taaggaagaatctta

SEQ ID NO: 399345 - DNA, 15 bp, Homo sapiens
ttaaggaagaatctt

SEQ ID NO: 399346 - DNA, 15 bp, Homo sapiens
cttaaggaagaatct

SEQ ID NO: 399347 - DNA, 15 bp, Homo sapiens
acttaaggaagaatc

SEQ ID NO: 399348 - DNA, 15 bp, Homo sapiens
tacttaaggaagaat

SEQ ID NO: 399349 - DNA, 15 bp, Homo sapiens
ttacttaaggaagaa

SEQ ID NO: 399350 - DNA, 15 bp, Homo sapiens
tttacttaaggaaga

SEQ ID NO: 399351 - DNA, 15 bp, Homo sapiens
ttttacttaaggaag

SEQ ID NO: 399352 - DNA, 15 bp, Homo sapiens
attttacttaaggaa

SEQ ID NO: 399353 - DNA, 15 bp, Homo sapiens
aattttacttaagga

SEQ ID NO: 399354 - DNA, 15 bp, Homo sapiens
aaattttacttaagg

SEQ ID NO: 399355 - DNA, 15 bp, Homo sapiens
aaaattttacttaag

SEQ ID NO: 399356 - DNA, 15 bp, Homo sapiens
taaaattttacttaa

SEQ ID NO: 399357 - DNA, 15 bp, Homo sapiens
ttaaaattttactta

SEQ ID NO: 399358 - DNA, 15 bp, Homo sapiens
attaaaattttactt

SEQ ID NO: 399359 - DNA, 15 bp, Homo sapiens
cattaaaattttact

SEQ ID NO: 399360 - DNA, 15 bp, Homo sapiens
acattaaaattttac

SEQ ID NO: 399361 - DNA, 15 bp, Homo sapiens
aacattaaaatttta

SEQ ID NO: 399362 - DNA, 15 bp, Homo sapiens
aaacattaaaatttt

SEQ ID NO: 399363 - DNA, 15 bp, Homo sapiens
taaacattaaaattt

SEQ ID NO: 399364 - DNA, 15 bp, Homo sapiens
ctaaacattaaaatt

SEQ ID NO: 399365 - DNA, 15 bp, Homo sapiens
cctaaacattaaaat

SEQ ID NO: 399366 - DNA, 15 bp, Homo sapiens
tcctaaacattaaaa

SEQ ID NO: 399367 - DNA, 15 bp, Homo sapiens
ctcctaaacattaaa

SEQ ID NO: 399368 - DNA, 15 bp, Homo sapiens
tctcctaaacattaa

SEQ ID NO: 399369 - DNA, 15 bp, Homo sapiens
gtctcctaaacatta

SEQ ID NO: 399370 - DNA, 15 bp, Homo sapiens
tgtctcctaaacatt

SEQ ID NO: 399371 - DNA, 15 bp, Homo sapiens
gtgtctcctaaacat

SEQ ID NO: 399372 - DNA, 15 bp, Homo sapiens
tgtgtctcctaaaca

SEQ ID NO: 399373 - DNA, 15 bp, Homo sapiens
ctgtgtctcctaaac

SEQ ID NO: 399374 - DNA, 15 bp, Homo sapiens
tctgtgtctcctaaa

SEQ ID NO: 399375 - DNA, 15 bp, Homo sapiens
ctctgtgtctcctaa

SEQ ID NO: 399376 - DNA, 15 bp, Homo sapiens
gctctgtgtctccta

SEQ ID NO: 399377 - DNA, 15 bp, Homo sapiens
tgctctgtgtctcct

SEQ ID NO: 399378 - DNA, 15 bp, Homo sapiens
gtgctctgtgtctcc

SEQ ID NO: 399379 - DNA, 15 bp, Homo sapiens
tgtgctctgtgtctc

SEQ ID NO: 399380 - DNA, 15 bp, Homo sapiens
gtgtgctctgtgtct

SEQ ID NO: 399381 - DNA, 15 bp, Homo sapiens
tgtgtgctctgtgtc

SEQ ID NO: 399382 - DNA, 15 bp, Homo sapiens
ttgtgtgctctgtgt

SEQ ID NO: 399383 - DNA, 15 bp, Homo sapiens
tttgtgtgctctgtg

SEQ ID NO: 399384 - DNA, 15 bp, Homo sapiens
ctttgtgtgctctgt

SEQ ID NO: 399385 - DNA, 15 bp, Homo sapiens
cctttgtgtgctctg

SEQ ID NO: 399386 - DNA, 15 bp, Homo sapiens
ccctttgtgtgctct

SEQ ID NO: 399387 - DNA, 15 bp, Homo sapiens
tccctttgtgtgctc

SEQ ID NO: 399388 - DNA, 15 bp, Homo sapiens
ctccctttgtgtgct

SEQ ID NO: 399389 - DNA, 15 bp, Homo sapiens
actccctttgtgtgc

SEQ ID NO: 399390 - DNA, 15 bp, Homo sapiens
tactccctttgtgtg

SEQ ID NO: 399391 - DNA, 15 bp, Homo sapiens
ttactccctttgtgt

SEQ ID NO: 399392 - DNA, 15 bp, Homo sapiens
tttactccctttgtg

SEQ ID NO: 399393 - DNA, 15 bp, Homo sapiens
ttttactccctttgt

SEQ ID NO: 399394 - DNA, 15 bp, Homo sapiens
cttttactccctttg

SEQ ID NO: 399395 - DNA, 15 bp, Homo sapiens
tcttttactcccttt

SEQ ID NO: 399396 - DNA, 15 bp, Homo sapiens
ctcttttactccctt

SEQ ID NO: 399397 - DNA, 15 bp, Homo sapiens
gctcttttactccct

SEQ ID NO: 399398 - DNA, 15 bp, Homo sapiens
agctcttttactccc

SEQ ID NO: 399399 - DNA, 15 bp, Homo sapiens
aagctcttttactcc

SEQ ID NO: 399400 - DNA, 15 bp, Homo sapiens
taagctcttttactc

SEQ ID NO: 399401 - DNA, 15 bp, Homo sapiens
ttaagctcttttact

SEQ ID NO: 399402 - DNA, 15 bp, Homo sapiens
tttaagctcttttac

SEQ ID NO: 399403 - DNA, 15 bp, Homo sapiens
ttttaagctctttta

SEQ ID NO: 399404 - DNA, 15 bp, Homo sapiens
tttttaagctctttt

SEQ ID NO: 399405 - DNA, 15 bp, Homo sapiens
atttttaagctcttt

SEQ ID NO: 399406 - DNA, 15 bp, Homo sapiens
catttttaagctctt

SEQ ID NO: 399407 - DNA, 15 bp, Homo sapiens
acatttttaagctct

SEQ ID NO: 399408 - DNA, 15 bp, Homo sapiens
cacatttttaagctc

SEQ ID NO: 399409 - DNA, 15 bp, Homo sapiens
tcacatttttaagct

SEQ ID NO: 399410 - DNA, 15 bp, Homo sapiens
ctcacatttttaagc

SEQ ID NO: 399411 - DNA, 15 bp, Homo sapiens
actcacatttttaag

SEQ ID NO: 399412 - DNA, 15 bp, Homo sapiens
aactcacatttttaa

SEQ ID NO: 399413 - DNA, 15 bp, Homo sapiens
aaactcacattttta

SEQ ID NO: 399414 - DNA, 15 bp, Homo sapiens
taaactcacattttt

SEQ ID NO: 399415 - DNA, 15 bp, Homo sapiens
ataaactcacatttt

SEQ ID NO: 399416 - DNA, 15 bp, Homo sapiens
tataaactcacattt

SEQ ID NO: 399417 - DNA, 15 bp, Homo sapiens
atataaactcacatt

SEQ ID NO: 399418 - DNA, 15 bp, Homo sapiens
aatataaactcacat

SEQ ID NO: 399419 - DNA, 15 bp, Homo sapiens
aaatataaactcaca

SEQ ID NO: 399420 - DNA, 15 bp, Homo sapiens
aaaatataaactcac

SEQ ID NO: 399421 - DNA, 15 bp, Homo sapiens
caaaatataaactca

SEQ ID NO: 399422 - DNA, 15 bp, Homo sapiens
tcaaaatataaactc

SEQ ID NO: 399423 - DNA, 15 bp, Homo sapiens
ttcaaaatataaact

SEQ ID NO: 399424 - DNA, 15 bp, Homo sapiens
attcaaaatataaac

SEQ ID NO: 399425 - DNA, 15 bp, Homo sapiens
gattcaaaatataaa

SEQ ID NO: 399426 - DNA, 15 bp, Homo sapiens
tgattcaaaatataa

SEQ ID NO: 399427 - DNA, 15 bp, Homo sapiens
atgattcaaaatata

SEQ ID NO: 399428 - DNA, 15 bp, Homo sapiens
gatgattcaaaatat

SEQ ID NO: 399429 - DNA, 15 bp, Homo sapiens
ggatgattcaaaata

SEQ ID NO: 399430 - DNA, 15 bp, Homo sapiens
aggatgattcaaaat

SEQ ID NO: 399431 - DNA, 15 bp, Homo sapiens
taggatgattcaaaa

SEQ ID NO: 399432 - DNA, 15 bp, Homo sapiens
ttaggatgattcaaa

SEQ ID NO: 399433 - DNA, 15 bp, Homo sapiens
tttaggatgattcaa

SEQ ID NO: 399434 - DNA, 15 bp, Homo sapiens
gtttaggatgattca

SEQ ID NO: 399435 - DNA, 15 bp, Homo sapiens
tgtttaggatgattc

SEQ ID NO: 399436 - DNA, 15 bp, Homo sapiens
ttgtttaggatgatt

SEQ ID NO: 399437 - DNA, 15 bp, Homo sapiens
cttgtttaggatgat

SEQ ID NO: 399438 - DNA, 15 bp, Homo sapiens
gcttgtttaggatga

SEQ ID NO: 399439 - DNA, 15 bp, Homo sapiens
tgcttgtttaggatg

SEQ ID NO: 399440 - DNA, 15 bp, Homo sapiens
gtgcttgtttaggat

SEQ ID NO: 399441 - DNA, 15 bp, Homo sapiens
tgtgcttgtttagga

SEQ ID NO: 399442 - DNA, 15 bp, Homo sapiens
ctgtgcttgtttagg

SEQ ID NO: 399443 - DNA, 15 bp, Homo sapiens
tctgtgcttgtttag

SEQ ID NO: 399444 - DNA, 15 bp, Homo sapiens
ttctgtgcttgttta

SEQ ID NO: 399445 - DNA, 15 bp, Homo sapiens
tttctgtgcttgttt

SEQ ID NO: 399446 - DNA, 15 bp, Homo sapiens
atttctgtgcttgtt

SEQ ID NO: 399447 - DNA, 15 bp, Homo sapiens
tatttctgtgcttgt

SEQ ID NO: 399448 - DNA, 15 bp, Homo sapiens
atatttctgtgcttg

SEQ ID NO: 399449 - DNA, 15 bp, Homo sapiens
tatatttctgtgctt

SEQ ID NO: 399450 - DNA, 15 bp, Homo sapiens
gtatatttctgtgct

SEQ ID NO: 399451 - DNA, 15 bp, Homo sapiens
tgtatatttctgtgc

SEQ ID NO: 399452 - DNA, 15 bp, Homo sapiens
atgtatatttctgtg

SEQ ID NO: 399453 - DNA, 15 bp, Homo sapiens
catgtatatttctgt

SEQ ID NO: 399454 - DNA, 15 bp, Homo sapiens
tcatgtatatttctg

SEQ ID NO: 399455 - DNA, 15 bp, Homo sapiens
ctcatgtatatttct

SEQ ID NO: 399456 - DNA, 15 bp, Homo sapiens
tctcatgtatatttc

SEQ ID NO: 399457 - DNA, 15 bp, Homo sapiens
ctctcatgtatattt

SEQ ID NO: 399458 - DNA, 15 bp, Homo sapiens
cctctcatgtatatt

SEQ ID NO: 399459 - DNA, 15 bp, Homo sapiens
tcctctcatgtatat

SEQ ID NO: 399460 - DNA, 15 bp, Homo sapiens
ttcctctcatgtata

SEQ ID NO: 399461 - DNA, 15 bp, Homo sapiens
cttcctctcatgtat

SEQ ID NO: 399462 - DNA, 15 bp, Homo sapiens
acttcctctcatgta

SEQ ID NO: 399463 - DNA, 15 bp, Homo sapiens
tacttcctctcatgt

SEQ ID NO: 399464 - DNA, 15 bp, Homo sapiens
ttacttcctctcatg

SEQ ID NO: 399465 - DNA, 15 bp, Homo sapiens
tttacttcctctcat

SEQ ID NO: 399466 - DNA, 15 bp, Homo sapiens
ttttacttcctctca

SEQ ID NO: 399467 - DNA, 15 bp, Homo sapiens
attttacttcctctc

SEQ ID NO: 399468 - DNA, 15 bp, Homo sapiens
aattttacttcctct

SEQ ID NO: 399469 - DNA, 15 bp, Homo sapiens
taattttacttcctc

SEQ ID NO: 399470 - DNA, 15 bp, Homo sapiens
ataattttacttcct

SEQ ID NO: 399471 - DNA, 15 bp, Homo sapiens
tataattttacttcc

SEQ ID NO: 399472 - DNA, 15 bp, Homo sapiens
ctataattttacttc

SEQ ID NO: 399473 - DNA, 15 bp, Homo sapiens
actataattttactt

SEQ ID NO: 399474 - DNA, 15 bp, Homo sapiens
gactataattttact

SEQ ID NO: 399475 - DNA, 15 bp, Homo sapiens
tgactataattttac

SEQ ID NO: 399476 - DNA, 15 bp, Homo sapiens
gtgactataatttta

SEQ ID NO: 399477 - DNA, 15 bp, Homo sapiens
tgtgactataatttt

SEQ ID NO: 399478 - DNA, 15 bp, Homo sapiens
ctgtgactataattt

SEQ ID NO: 399479 - DNA, 15 bp, Homo sapiens
cctgtgactataatt

SEQ ID NO: 399480 - DNA, 15 bp, Homo sapiens
tcctgtgactataat

SEQ ID NO: 399481 - DNA, 15 bp, Homo sapiens
atcctgtgactataa

SEQ ID NO: 399482 - DNA, 15 bp, Homo sapiens
tatcctgtgactata

SEQ ID NO: 399483 - DNA, 15 bp, Homo sapiens
ctatcctgtgactat

SEQ ID NO: 399484 - DNA, 15 bp, Homo sapiens
tctatcctgtgacta

SEQ ID NO: 399485 - DNA, 15 bp, Homo sapiens
ctctatcctgtgact

SEQ ID NO: 399486 - DNA, 15 bp, Homo sapiens
tctctatcctgtgac

SEQ ID NO: 399487 - DNA, 15 bp, Homo sapiens
ctctctatcctgtga

SEQ ID NO: 399488 - DNA, 15 bp, Homo sapiens
tctctctatcctgtg

SEQ ID NO: 399489 - DNA, 15 bp, Homo sapiens
gtctctctatcctgt

SEQ ID NO: 399490 - DNA, 15 bp, Homo sapiens
agtctctctatcctg

SEQ ID NO: 399491 - DNA, 15 bp, Homo sapiens
aagtctctctatcct

SEQ ID NO: 399492 - DNA, 15 bp, Homo sapiens
aaagtctctctatcc

SEQ ID NO: 399493 - DNA, 15 bp, Homo sapiens
caaagtctctctatc

SEQ ID NO: 399494 - DNA, 15 bp, Homo sapiens
tcaaagtctctctat

SEQ ID NO: 399495 - DNA, 15 bp, Homo sapiens
ttcaaagtctctcta

SEQ ID NO: 399496 - DNA, 15 bp, Homo sapiens
tttcaaagtctctct

SEQ ID NO: 399497 - DNA, 15 bp, Homo sapiens
ctttcaaagtctctc

SEQ ID NO: 399498 - DNA, 15 bp, Homo sapiens
tctttcaaagtctct

SEQ ID NO: 399499 - DNA, 15 bp, Homo sapiens
ctctttcaaagtctc

SEQ ID NO: 399500 - DNA, 15 bp, Homo sapiens
cctctttcaaagtct

SEQ ID NO: 399501 - DNA, 15 bp, Homo sapiens
acctctttcaaagtc

SEQ ID NO: 399502 - DNA, 15 bp, Homo sapiens
tacctctttcaaagt

SEQ ID NO: 399503 - DNA, 15 bp, Homo sapiens
ttacctctttcaaag

SEQ ID NO: 399504 - DNA, 15 bp, Homo sapiens
cttacctctttcaaa

SEQ ID NO: 399505 - DNA, 15 bp, Homo sapiens
tcttacctctttcaa

SEQ ID NO: 399506 - DNA, 15 bp, Homo sapiens
ctcttacctctttca

SEQ ID NO: 399507 - DNA, 15 bp, Homo sapiens
gctcttacctctttc

SEQ ID NO: 399508 - DNA, 15 bp, Homo sapiens
tgctcttacctcttt

SEQ ID NO: 399509 - DNA, 15 bp, Homo sapiens
ttgctcttacctctt

SEQ ID NO: 399510 - DNA, 15 bp, Homo sapiens
tttgctcttacctct

SEQ ID NO: 399511 - DNA, 15 bp, Homo sapiens
ttttgctcttacctc

SEQ ID NO: 399512 - DNA, 15 bp, Homo sapiens
attttgctcttacct

SEQ ID NO: 399513 - DNA, 15 bp, Homo sapiens
tattttgctcttacc

SEQ ID NO: 399514 - DNA, 15 bp, Homo sapiens
ctattttgctcttac

SEQ ID NO: 399515 - DNA, 15 bp, Homo sapiens
tctattttgctctta

SEQ ID NO: 399516 - DNA, 15 bp, Homo sapiens
gtctattttgctctt

SEQ ID NO: 399517 - DNA, 15 bp, Homo sapiens
tgtctattttgctct

SEQ ID NO: 399518 - DNA, 15 bp, Homo sapiens
ttgtctattttgctc

SEQ ID NO: 399519 - DNA, 15 bp, Homo sapiens
tttgtctattttgct

SEQ ID NO: 399520 - DNA, 15 bp, Homo sapiens
ttttgtctattttgc

SEQ ID NO: 399521 - DNA, 15 bp, Homo sapiens
attttgtctattttg

SEQ ID NO: 399522 - DNA, 15 bp, Homo sapiens
gattttgtctatttt

SEQ ID NO: 399523 - DNA, 15 bp, Homo sapiens
tgattttgtctattt

SEQ ID NO: 399524 - DNA, 15 bp, Homo sapiens
ctgattttgtctatt

SEQ ID NO: 399525 - DNA, 15 bp, Homo sapiens
tctgattttgtctat

SEQ ID NO: 399526 - DNA, 15 bp, Homo sapiens
ttctgattttgtcta

SEQ ID NO: 399527 - DNA, 15 bp, Homo sapiens
tttctgattttgtct

SEQ ID NO: 399528 - DNA, 15 bp, Homo sapiens
ttttctgattttgtc

SEQ ID NO: 399529 - DNA, 15 bp, Homo sapiens
attttctgattttgt

SEQ ID NO: 399530 - DNA, 15 bp, Homo sapiens
aattttctgattttg

SEQ ID NO: 399531 - DNA, 15 bp, Homo sapiens
taattttctgatttt

SEQ ID NO: 399532 - DNA, 15 bp, Homo sapiens
ttaattttctgattt

SEQ ID NO: 399533 - DNA, 15 bp, Homo sapiens
tttaattttctgatt

SEQ ID NO: 399534 - DNA, 15 bp, Homo sapiens
atttaattttctgat

SEQ ID NO: 399535 - DNA, 15 bp, Homo sapiens
aatttaattttctga

SEQ ID NO: 399536 - DNA, 15 bp, Homo sapiens
gaatttaattttctg

SEQ ID NO: 399537 - DNA, 15 bp, Homo sapiens
tgaatttaattttct

SEQ ID NO: 399538 - DNA, 15 bp, Homo sapiens
ttgaatttaattttc

SEQ ID NO: 399539 - DNA, 15 bp, Homo sapiens
tttgaatttaatttt

SEQ ID NO: 399540 - DNA, 15 bp, Homo sapiens
gtttgaatttaattt

SEQ ID NO: 399541 - DNA, 15 bp, Homo sapiens
agtttgaatttaatt

SEQ ID NO: 399542 - DNA, 15 bp, Homo sapiens
aagtttgaatttaat

SEQ ID NO: 399543 - DNA, 15 bp, Homo sapiens
gaagtttgaatttaa

SEQ ID NO: 399544 - DNA, 15 bp, Homo sapiens
agaagtttgaattta

SEQ ID NO: 399545 - DNA, 15 bp, Homo sapiens
tagaagtttgaattt

SEQ ID NO: 399546 - DNA, 15 bp, Homo sapiens
ttagaagtttgaatt

SEQ ID NO: 399547 - DNA, 15 bp, Homo sapiens
tttagaagtttgaat

SEQ ID NO: 399548 - DNA, 15 bp, Homo sapiens
ctttagaagtttgaa

SEQ ID NO: 399549 - DNA, 15 bp, Homo sapiens
actttagaagtttga

SEQ ID NO: 399550 - DNA, 15 bp, Homo sapiens
tactttagaagtttg

SEQ ID NO: 399551 - DNA, 15 bp, Homo sapiens
ttactttagaagttt

SEQ ID NO: 399552 - DNA, 15 bp, Homo sapiens
tttactttagaagtt

SEQ ID NO: 399553 - DNA, 15 bp, Homo sapiens
ctttactttagaagt

SEQ ID NO: 399554 - DNA, 15 bp, Homo sapiens
gctttactttagaag

SEQ ID NO: 399555 - DNA, 15 bp, Homo sapiens
tgctttactttagaa

SEQ ID NO: 399556 - DNA, 15 bp, Homo sapiens
ttgctttactttaga

SEQ ID NO: 399557 - DNA, 15 bp, Homo sapiens
gttgctttactttag

SEQ ID NO: 399558 - DNA, 15 bp, Homo sapiens
tgttgctttacttta

SEQ ID NO: 399559 - DNA, 15 bp, Homo sapiens
ctgttgctttacttt

SEQ ID NO: 399560 - DNA, 15 bp, Homo sapiens
tctgttgctttactt

SEQ ID NO: 399561 - DNA, 15 bp, Homo sapiens
gtctgttgctttact

SEQ ID NO: 399562 - DNA, 15 bp, Homo sapiens
tgtctgttgctttac

SEQ ID NO: 399563 - DNA, 15 bp, Homo sapiens
gtgtctgttgcttta

SEQ ID NO: 399564 - DNA, 15 bp, Homo sapiens
agtgtctgttgcttt

SEQ ID NO: 399565 - DNA, 15 bp, Homo sapiens
tagtgtctgttgctt

SEQ ID NO: 399566 - DNA, 15 bp, Homo sapiens
atagtgtctgttgct

SEQ ID NO: 399567 - DNA, 15 bp, Homo sapiens
catagtgtctgttgc

SEQ ID NO: 399568 - DNA, 15 bp, Homo sapiens
tcatagtgtctgttg

SEQ ID NO: 399569 - DNA, 15 bp, Homo sapiens
ttcatagtgtctgtt

SEQ ID NO: 399570 - DNA, 15 bp, Homo sapiens
attcatagtgtctgt

SEQ ID NO: 399571 - DNA, 15 bp, Homo sapiens
cattcatagtgtctg

SEQ ID NO: 399572 - DNA, 15 bp, Homo sapiens
gcattcatagtgtct

SEQ ID NO: 399573 - DNA, 15 bp, Homo sapiens
agcattcatagtgtc

SEQ ID NO: 399574 - DNA, 15 bp, Homo sapiens
aagcattcatagtgt

SEQ ID NO: 399575 - DNA, 15 bp, Homo sapiens
aaagcattcatagtg

SEQ ID NO: 399576 - DNA, 15 bp, Homo sapiens
caaagcattcatagt

SEQ ID NO: 399577 - DNA, 15 bp, Homo sapiens
ccaaagcattcatag

SEQ ID NO: 399578 - DNA, 15 bp, Homo sapiens
tccaaagcattcata

SEQ ID NO: 399579 - DNA, 15 bp, Homo sapiens
ctccaaagcattcat

SEQ ID NO: 399580 - DNA, 15 bp, Homo sapiens
tctccaaagcattca

SEQ ID NO: 399581 - DNA, 15 bp, Homo sapiens
ttctccaaagcattc

SEQ ID NO: 399582 - DNA, 15 bp, Homo sapiens
tttctccaaagcatt

SEQ ID NO: 399583 - DNA, 15 bp, Homo sapiens
ttttctccaaagcat

SEQ ID NO: 399584 - DNA, 15 bp, Homo sapiens
tttttctccaaagca

SEQ ID NO: 399585 - DNA, 15 bp, Homo sapiens
gtttttctccaaagc

SEQ ID NO: 399586 - DNA, 15 bp, Homo sapiens
agtttttctccaaag

SEQ ID NO: 399587 - DNA, 15 bp, Homo sapiens
cagtttttctccaaa

SEQ ID NO: 399588 - DNA, 15 bp, Homo sapiens
ccagtttttctccaa

SEQ ID NO: 399589 - DNA, 15 bp, Homo sapiens
tccagtttttctcca

SEQ ID NO: 399590 - DNA, 15 bp, Homo sapiens
gtccagtttttctcc

SEQ ID NO: 399591 - DNA, 15 bp, Homo sapiens
agtccagtttttctc

SEQ ID NO: 399592 - DNA, 15 bp, Homo sapiens
aagtccagtttttct

SEQ ID NO: 399593 - DNA, 15 bp, Homo sapiens
aaagtccagtttttc

SEQ ID NO: 399594 - DNA, 15 bp, Homo sapiens
caaagtccagttttt

SEQ ID NO: 399595 - DNA, 15 bp, Homo sapiens
acaaagtccagtttt

SEQ ID NO: 399596 - DNA, 15 bp, Homo sapiens
cacaaagtccagttt

SEQ ID NO: 399597 - DNA, 15 bp, Homo sapiens
ccacaaagtccagtt

SEQ ID NO: 399598 - DNA, 15 bp, Homo sapiens
cccacaaagtccagt

SEQ ID NO: 399599 - DNA, 15 bp, Homo sapiens
tcccacaaagtccag

SEQ ID NO: 399600 - DNA, 15 bp, Homo sapiens
atcccacaaagtcca

SEQ ID NO: 399601 - DNA, 15 bp, Homo sapiens
aatcccacaaagtcc

SEQ ID NO: 399602 - DNA, 15 bp, Homo sapiens
aaatcccacaaagtc

SEQ ID NO: 399603 - DNA, 15 bp, Homo sapiens
aaaatcccacaaagt

SEQ ID NO: 399604 - DNA, 15 bp, Homo sapiens
aaaaatcccacaaag

SEQ ID NO: 399605 - DNA, 15 bp, Homo sapiens
taaaaatcccacaaa

SEQ ID NO: 399606 - DNA, 15 bp, Homo sapiens
ttaaaaatcccacaa

SEQ ID NO: 399607 - DNA, 15 bp, Homo sapiens
gttaaaaatcccaca

SEQ ID NO: 399608 - DNA, 15 bp, Homo sapiens
ggttaaaaatcccac

SEQ ID NO: 399609 - DNA, 15 bp, Homo sapiens
gggttaaaaatccca

SEQ ID NO: 399610 - DNA, 15 bp, Homo sapiens
tgggttaaaaatccc

SEQ ID NO: 399611 - DNA, 15 bp, Homo sapiens
atgggttaaaaatcc

SEQ ID NO: 399612 - DNA, 15 bp, Homo sapiens
catgggttaaaaatc

SEQ ID NO: 399613 - DNA, 15 bp, Homo sapiens
tcatgggttaaaaat

SEQ ID NO: 399614 - DNA, 15 bp, Homo sapiens
ttcatgggttaaaaa

SEQ ID NO: 399615 - DNA, 15 bp, Homo sapiens
cttcatgggttaaaa

SEQ ID NO: 399616 - DNA, 15 bp, Homo sapiens
ccttcatgggttaaa

SEQ ID NO: 399617 - DNA, 15 bp, Homo sapiens
tccttcatgggttaa

SEQ ID NO: 399618 - DNA, 15 bp, Homo sapiens
ttccttcatgggtta

SEQ ID NO: 399619 - DNA, 15 bp, Homo sapiens
tttccttcatgggtt

SEQ ID NO: 399620 - DNA, 15 bp, Homo sapiens
ctttccttcatgggt

SEQ ID NO: 399621 - DNA, 15 bp, Homo sapiens
actttccttcatggg

SEQ ID NO: 399622 - DNA, 15 bp, Homo sapiens
tactttccttcatgg

SEQ ID NO: 399623 - DNA, 15 bp, Homo sapiens
ttactttccttcatg

SEQ ID NO: 399624 - DNA, 15 bp, Homo sapiens
tttactttccttcat

SEQ ID NO: 399625 - DNA, 15 bp, Homo sapiens
gtttactttccttca

SEQ ID NO: 399626 - DNA, 15 bp, Homo sapiens
tgtttactttccttc

SEQ ID NO: 399627 - DNA, 15 bp, Homo sapiens
ttgtttactttcctt

SEQ ID NO: 399628 - DNA, 15 bp, Homo sapiens
cttgtttactttcct

SEQ ID NO: 399629 - DNA, 15 bp, Homo sapiens
ccttgtttactttcc

SEQ ID NO: 399630 - DNA, 15 bp, Homo sapiens
tccttgtttactttc

SEQ ID NO: 399631 - DNA, 15 bp, Homo sapiens
atccttgtttacttt

SEQ ID NO: 399632 - DNA, 15 bp, Homo sapiens
catccttgtttactt

SEQ ID NO: 399633 - DNA, 15 bp, Homo sapiens
gcatccttgtttact

SEQ ID NO: 399634 - DNA, 15 bp, Homo sapiens
tgcatccttgtttac

SEQ ID NO: 399635 - DNA, 15 bp, Homo sapiens
ttgcatccttgttta

SEQ ID NO: 399636 - DNA, 15 bp, Homo sapiens
cttgcatccttgttt

SEQ ID NO: 399637 - DNA, 15 bp, Homo sapiens
tcttgcatccttgtt

SEQ ID NO: 399638 - DNA, 15 bp, Homo sapiens
ctcttgcatccttgt

SEQ ID NO: 399639 - DNA, 15 bp, Homo sapiens
gctcttgcatccttg

SEQ ID NO: 399640 - DNA, 15 bp, Homo sapiens
tgctcttgcatcctt

SEQ ID NO: 399641 - DNA, 15 bp, Homo sapiens
atgctcttgcatcct

SEQ ID NO: 399642 - DNA, 15 bp, Homo sapiens
aatgctcttgcatcc

SEQ ID NO: 399643 - DNA, 15 bp, Homo sapiens
aaatgctcttgcatc

SEQ ID NO: 399644 - DNA, 15 bp, Homo sapiens
aaaatgctcttgcat

SEQ ID NO: 399645 - DNA, 15 bp, Homo sapiens
taaaatgctcttgca

SEQ ID NO: 399646 - DNA, 15 bp, Homo sapiens
ataaaatgctcttgc

SEQ ID NO: 399647 - DNA, 15 bp, Homo sapiens
tataaaatgctcttg

SEQ ID NO: 399648 - DNA, 15 bp, Homo sapiens
ttataaaatgctctt

SEQ ID NO: 399649 - DNA, 15 bp, Homo sapiens
attataaaatgctct

SEQ ID NO: 399650 - DNA, 15 bp, Homo sapiens
aattataaaatgctc

SEQ ID NO: 399651 - DNA, 15 bp, Homo sapiens
aaattataaaatgct

SEQ ID NO: 399652 - DNA, 15 bp, Homo sapiens
aaaattataaaatgc

SEQ ID NO: 399653 - DNA, 15 bp, Homo sapiens
taaaattataaaatg

SEQ ID NO: 399654 - DNA, 15 bp, Homo sapiens
gtaaaattataaaat

SEQ ID NO: 399655 - DNA, 15 bp, Homo sapiens
ggtaaaattataaaa

SEQ ID NO: 399656 - DNA, 15 bp, Homo sapiens
gggtaaaattataaa

SEQ ID NO: 399657 - DNA, 15 bp, Homo sapiens
tgggtaaaattataa

SEQ ID NO: 399658 - DNA, 15 bp, Homo sapiens
atgggtaaaattata

SEQ ID NO: 399659 - DNA, 15 bp, Homo sapiens
tatgggtaaaattat

SEQ ID NO: 399660 - DNA, 15 bp, Homo sapiens
ctatgggtaaaatta

SEQ ID NO: 399661 - DNA, 15 bp, Homo sapiens
cctatgggtaaaatt

SEQ ID NO: 399662 - DNA, 15 bp, Homo sapiens
gcctatgggtaaaat

SEQ ID NO: 399663 - DNA, 15 bp, Homo sapiens
agcctatgggtaaaa

SEQ ID NO: 399664 - DNA, 15 bp, Homo sapiens
cagcctatgggtaaa

SEQ ID NO: 399665 - DNA, 15 bp, Homo sapiens
ccagcctatgggtaa

SEQ ID NO: 399666 - DNA, 15 bp, Homo sapiens
gccagcctatgggta

SEQ ID NO: 399667 - DNA, 15 bp, Homo sapiens
tgccagcctatgggt

SEQ ID NO: 399668 - DNA, 15 bp, Homo sapiens
ttgccagcctatggg

SEQ ID NO: 399669 - DNA, 15 bp, Homo sapiens
attgccagcctatgg

SEQ ID NO: 399670 - DNA, 15 bp, Homo sapiens
tattgccagcctatg

SEQ ID NO: 399671 - DNA, 15 bp, Homo sapiens
ttattgccagcctat

SEQ ID NO: 399672 - DNA, 15 bp, Homo sapiens
attattgccagccta

SEQ ID NO: 399673 - DNA, 15 bp, Homo sapiens
gattattgccagcct

SEQ ID NO: 399674 - DNA, 15 bp, Homo sapiens
tgattattgccagcc

SEQ ID NO: 399675 - DNA, 15 bp, Homo sapiens
atgattattgccagc

SEQ ID NO: 399676 - DNA, 15 bp, Homo sapiens
aatgattattgccag

SEQ ID NO: 399677 - DNA, 15 bp, Homo sapiens
aaatgattattgcca

SEQ ID NO: 399678 - DNA, 15 bp, Homo sapiens
taaatgattattgcc

SEQ ID NO: 399679 - DNA, 15 bp, Homo sapiens
ataaatgattattgc

SEQ ID NO: 399680 - DNA, 15 bp, Homo sapiens
aataaatgattattg

SEQ ID NO: 399681 - DNA, 15 bp, Homo sapiens
gaataaatgattatt

SEQ ID NO: 399682 - DNA, 15 bp, Homo sapiens
ggaataaatgattat

SEQ ID NO: 399683 - DNA, 15 bp, Homo sapiens
aggaataaatgatta

SEQ ID NO: 399684 - DNA, 15 bp, Homo sapiens
caggaataaatgatt

SEQ ID NO: 399685 - DNA, 15 bp, Homo sapiens
gcaggaataaatgat

SEQ ID NO: 399686 - DNA, 15 bp, Homo sapiens
tgcaggaataaatga

SEQ ID NO: 399687 - DNA, 15 bp, Homo sapiens
ctgcaggaataaatg

SEQ ID NO: 399688 - DNA, 15 bp, Homo sapiens
cctgcaggaataaat

SEQ ID NO: 399689 - DNA, 15 bp, Homo sapiens
tcctgcaggaataaa

SEQ ID NO: 399690 - DNA, 15 bp, Homo sapiens
gtcctgcaggaataa

SEQ ID NO: 399691 - DNA, 15 bp, Homo sapiens
tgtcctgcaggaata

SEQ ID NO: 399692 - DNA, 15 bp, Homo sapiens
atgtcctgcaggaat

SEQ ID NO: 399693 - DNA, 15 bp, Homo sapiens
catgtcctgcaggaa

SEQ ID NO: 399694 - DNA, 15 bp, Homo sapiens
ccatgtcctgcagga

SEQ ID NO: 399695 - DNA, 15 bp, Homo sapiens
tccatgtcctgcagg

SEQ ID NO: 399696 - DNA, 15 bp, Homo sapiens
ctccatgtcctgcag

SEQ ID NO: 399697 - DNA, 15 bp, Homo sapiens
actccatgtcctgca

SEQ ID NO: 399698 - DNA, 15 bp, Homo sapiens
aactccatgtcctgc

SEQ ID NO: 399699 - DNA, 15 bp, Homo sapiens
taactccatgtcctg

SEQ ID NO: 399700 - DNA, 15 bp, Homo sapiens
ttaactccatgtcct

SEQ ID NO: 399701 - DNA, 15 bp, Homo sapiens
tttaactccatgtcc

SEQ ID NO: 399702 - DNA, 15 bp, Homo sapiens
ttttaactccatgtc

SEQ ID NO: 399703 - DNA, 15 bp, Homo sapiens
attttaactccatgt

SEQ ID NO: 399704 - DNA, 15 bp, Homo sapiens
aattttaactccatg

SEQ ID NO: 399705 - DNA, 15 bp, Homo sapiens
caattttaactccat

SEQ ID NO: 399706 - DNA, 15 bp, Homo sapiens
tcaattttaactcca

SEQ ID NO: 399707 - DNA, 15 bp, Homo sapiens
ttcaattttaactcc

SEQ ID NO: 399708 - DNA, 15 bp, Homo sapiens
cttcaattttaactc

SEQ ID NO: 399709 - DNA, 15 bp, Homo sapiens
acttcaattttaact

SEQ ID NO: 399710 - DNA, 15 bp, Homo sapiens
cacttcaattttaac

SEQ ID NO: 399711 - DNA, 15 bp, Homo sapiens
gcacttcaattttaa

SEQ ID NO: 399712 - DNA, 15 bp, Homo sapiens
agcacttcaatttta

SEQ ID NO: 399713 - DNA, 15 bp, Homo sapiens
gagcacttcaatttt

SEQ ID NO: 399714 - DNA, 15 bp, Homo sapiens
tgagcacttcaattt

SEQ ID NO: 399715 - DNA, 15 bp, Homo sapiens
ttgagcacttcaatt

SEQ ID NO: 399716 - DNA, 15 bp, Homo sapiens
tttgagcacttcaat

SEQ ID NO: 399717 - DNA, 15 bp, Homo sapiens
atttgagcacttcaa

SEQ ID NO: 399718 - DNA, 15 bp, Homo sapiens
aatttgagcacttca

SEQ ID NO: 399719 - DNA, 15 bp, Homo sapiens
caatttgagcacttc

SEQ ID NO: 399720 - DNA, 15 bp, Homo sapiens
ccaatttgagcactt

SEQ ID NO: 399721 - DNA, 15 bp, Homo sapiens
gccaatttgagcact

SEQ ID NO: 399722 - DNA, 15 bp, Homo sapiens
agccaatttgagcac

SEQ ID NO: 399723 - DNA, 15 bp, Homo sapiens
gagccaatttgagca

SEQ ID NO: 399724 - DNA, 15 bp, Homo sapiens
agagccaatttgagc

SEQ ID NO: 399725 - DNA, 15 bp, Homo sapiens
cagagccaatttgag

SEQ ID NO: 399726 - DNA, 15 bp, Homo sapiens
tcagagccaatttga

SEQ ID NO: 399727 - DNA, 15 bp, Homo sapiens
ttcagagccaatttg

SEQ ID NO: 399728 - DNA, 15 bp, Homo sapiens
attcagagccaattt

SEQ ID NO: 399729 - DNA, 15 bp, Homo sapiens
aattcagagccaatt

SEQ ID NO: 399730 - DNA, 15 bp, Homo sapiens
gaattcagagccaat

SEQ ID NO: 399731 - DNA, 15 bp, Homo sapiens
agaattcagagccaa

SEQ ID NO: 399732 - DNA, 15 bp, Homo sapiens
gagaattcagagcca

SEQ ID NO: 399733 - DNA, 15 bp, Homo sapiens
agagaattcagagcc

SEQ ID NO: 399734 - DNA, 15 bp, Homo sapiens
gagagaattcagagc

SEQ ID NO: 399735 - DNA, 15 bp, Homo sapiens
tgagagaattcagag

SEQ ID NO: 399736 - DNA, 15 bp, Homo sapiens
atgagagaattcaga

SEQ ID NO: 399737 - DNA, 15 bp, Homo sapiens
aatgagagaattcag

SEQ ID NO: 399738 - DNA, 15 bp, Homo sapiens
taatgagagaattca

SEQ ID NO: 399739 - DNA, 15 bp, Homo sapiens
ttaatgagagaattc

SEQ ID NO: 399740 - DNA, 15 bp, Homo sapiens
tttaatgagagaatt

SEQ ID NO: 399741 - DNA, 15 bp, Homo sapiens
ttttaatgagagaat

SEQ ID NO: 399742 - DNA, 15 bp, Homo sapiens
gttttaatgagagaa

SEQ ID NO: 399743 - DNA, 15 bp, Homo sapiens
agttttaatgagaga

SEQ ID NO: 399744 - DNA, 15 bp, Homo sapiens
cagttttaatgagag

SEQ ID NO: 399745 - DNA, 15 bp, Homo sapiens
acagttttaatgaga

SEQ ID NO: 399746 - DNA, 15 bp, Homo sapiens
gacagttttaatgag

SEQ ID NO: 399747 - DNA, 15 bp, Homo sapiens
ggacagttttaatga

SEQ ID NO: 399748 - DNA, 15 bp, Homo sapiens
aggacagttttaatg

SEQ ID NO: 399749 - DNA, 15 bp, Homo sapiens
taggacagttttaat

SEQ ID NO: 399750 - DNA, 15 bp, Homo sapiens
ttaggacagttttaa

SEQ ID NO: 399751 - DNA, 15 bp, Homo sapiens
tttaggacagtttta

SEQ ID NO: 399752 - DNA, 15 bp, Homo sapiens
ttttaggacagtttt

SEQ ID NO: 399753 - DNA, 15 bp, Homo sapiens
attttaggacagttt

SEQ ID NO: 399754 - DNA, 15 bp, Homo sapiens
tattttaggacagtt

SEQ ID NO: 399755 - DNA, 15 bp, Homo sapiens
atattttaggacagt

SEQ ID NO: 399756 - DNA, 15 bp, Homo sapiens
tatattttaggacag

SEQ ID NO: 399757 - DNA, 15 bp, Homo sapiens
gtatattttaggaca

SEQ ID NO: 399758 - DNA, 15 bp, Homo sapiens
tgtatattttaggac

SEQ ID NO: 399759 - DNA, 15 bp, Homo sapiens
atgtatattttagga

SEQ ID NO: 399760 - DNA, 15 bp, Homo sapiens
tatgtatattttagg

SEQ ID NO: 399761 - DNA, 15 bp, Homo sapiens
ctatgtatattttag

SEQ ID NO: 399762 - DNA, 15 bp, Homo sapiens
cctatgtatatttta

SEQ ID NO: 399763 - DNA, 15 bp, Homo sapiens
ccctatgtatatttt

SEQ ID NO: 399764 - DNA, 15 bp, Homo sapiens
accctatgtatattt

SEQ ID NO: 399765 - DNA, 15 bp, Homo sapiens
aaccctatgtatatt

SEQ ID NO: 399766 - DNA, 15 bp, Homo sapiens
caaccctatgtatat

SEQ ID NO: 399767 - DNA, 15 bp, Homo sapiens
tcaaccctatgtata

SEQ ID NO: 399768 - DNA, 15 bp, Homo sapiens
atcaaccctatgtat

SEQ ID NO: 399769 - DNA, 15 bp, Homo sapiens
aatcaaccctatgta

SEQ ID NO: 399770 - DNA, 15 bp, Homo sapiens
caatcaaccctatgt

SEQ ID NO: 399771 - DNA, 15 bp, Homo sapiens
acaatcaaccctatg

SEQ ID NO: 399772 - DNA, 15 bp, Homo sapiens
tacaatcaaccctat

SEQ ID NO: 399773 - DNA, 15 bp, Homo sapiens
atacaatcaacccta

SEQ ID NO: 399774 - DNA, 15 bp, Homo sapiens
aatacaatcaaccct

SEQ ID NO: 399775 - DNA, 15 bp, Homo sapiens
aaatacaatcaaccc

SEQ ID NO: 399776 - DNA, 15 bp, Homo sapiens
aaaatacaatcaacc

SEQ ID NO: 399777 - DNA, 15 bp, Homo sapiens
aaaaatacaatcaac

SEQ ID NO: 399778 - DNA, 15 bp, Homo sapiens
taaaaatacaatcaa

SEQ ID NO: 399779 - DNA, 15 bp, Homo sapiens
ttaaaaatacaatca

SEQ ID NO: 399780 - DNA, 15 bp, Homo sapiens
attaaaaatacaatc

SEQ ID NO: 399781 - DNA, 15 bp, Homo sapiens
aattaaaaatacaat

SEQ ID NO: 399782 - DNA, 15 bp, Homo sapiens
aaattaaaaatacaa

SEQ ID NO: 399783 - DNA, 15 bp, Homo sapiens
taaattaaaaataca

SEQ ID NO: 399784 - DNA, 15 bp, Homo sapiens
ataaattaaaaatac

SEQ ID NO: 399785 - DNA, 15 bp, Homo sapiens
gataaattaaaaata

SEQ ID NO: 399786 - DNA, 15 bp, Homo sapiens
ggataaattaaaaat

SEQ ID NO: 399787 - DNA, 15 bp, Homo sapiens
aggataaattaaaaa

SEQ ID NO: 399788 - DNA, 15 bp, Homo sapiens
aaggataaattaaaa

SEQ ID NO: 399789 - DNA, 15 bp, Homo sapiens
aaaggataaattaaa

SEQ ID NO: 399790 - DNA, 15 bp, Homo sapiens
aaaaggataaattaa

SEQ ID NO: 399791 - DNA, 15 bp, Homo sapiens
aaaaaggataaatta

SEQ ID NO: 399792 - DNA, 15 bp, Homo sapiens
aaaaaaggataaatt

SEQ ID NO: 399793 - DNA, 15 bp, Homo sapiens
aaaaaaaggataaat

SEQ ID NO: 399794 - DNA, 15 bp, Homo sapiens
taaaaaaaggataaa

SEQ ID NO: 399795 - DNA, 15 bp, Homo sapiens
ttaaaaaaaggataa

SEQ ID NO: 399796 - DNA, 15 bp, Homo sapiens
attaaaaaaaggata

SEQ ID NO: 399797 - DNA, 15 bp, Homo sapiens
aattaaaaaaaggat

SEQ ID NO: 399798 - DNA, 15 bp, Homo sapiens
aaattaaaaaaagga

SEQ ID NO: 399799 - DNA, 15 bp, Homo sapiens
aaaattaaaaaaagg

SEQ ID NO: 399800 - DNA, 15 bp, Homo sapiens
aaaaattaaaaaaag

SEQ ID NO: 399801 - DNA, 15 bp, Homo sapiens
caaaaattaaaaaaa

SEQ ID NO: 399802 - DNA, 15 bp, Homo sapiens
acaaaaattaaaaaa

SEQ ID NO: 399803 - DNA, 15 bp, Homo sapiens
cacaaaaattaaaaa

SEQ ID NO: 399804 - DNA, 15 bp, Homo sapiens
ccacaaaaattaaaa

SEQ ID NO: 399805 - DNA, 15 bp, Homo sapiens
cccacaaaaattaaa

SEQ ID NO: 399806 - DNA, 15 bp, Homo sapiens
acccacaaaaattaa

SEQ ID NO: 399807 - DNA, 15 bp, Homo sapiens
tacccacaaaaatta

SEQ ID NO: 399808 - DNA, 15 bp, Homo sapiens
gtacccacaaaaatt

SEQ ID NO: 399809 - DNA, 15 bp, Homo sapiens
tgtacccacaaaaat

SEQ ID NO: 399810 - DNA, 15 bp, Homo sapiens
atgtacccacaaaaa

SEQ ID NO: 399811 - DNA, 15 bp, Homo sapiens
tatgtacccacaaaa

SEQ ID NO: 399812 - DNA, 15 bp, Homo sapiens
ctatgtacccacaaa

SEQ ID NO: 399813 - DNA, 15 bp, Homo sapiens
actatgtacccacaa

SEQ ID NO: 399814 - DNA, 15 bp, Homo sapiens
tactatgtacccaca

SEQ ID NO: 399815 - DNA, 15 bp, Homo sapiens
ctactatgtacccac

SEQ ID NO: 399816 - DNA, 15 bp, Homo sapiens
cctactatgtaccca

SEQ ID NO: 399817 - DNA, 15 bp, Homo sapiens
acctactatgtaccc

SEQ ID NO: 399818 - DNA, 15 bp, Homo sapiens
cacctactatgtacc

SEQ ID NO: 399819 - DNA, 15 bp, Homo sapiens
gcacctactatgtac

SEQ ID NO: 399820 - DNA, 15 bp, Homo sapiens
tgcacctactatgta

SEQ ID NO: 399821 - DNA, 15 bp, Homo sapiens
atgcacctactatgt

SEQ ID NO: 399822 - DNA, 15 bp, Homo sapiens
tatgcacctactatg

SEQ ID NO: 399823 - DNA, 15 bp, Homo sapiens
atatgcacctactat

SEQ ID NO: 399824 - DNA, 15 bp, Homo sapiens
tatatgcacctacta

SEQ ID NO: 399825 - DNA, 15 bp, Homo sapiens
atatatgcacctact

SEQ ID NO: 399826 - DNA, 15 bp, Homo sapiens
aatatatgcacctac

SEQ ID NO: 399827 - DNA, 15 bp, Homo sapiens
aaatatatgcaccta

SEQ ID NO: 399828 - DNA, 15 bp, Homo sapiens
taaatatatgcacct

SEQ ID NO: 399829 - DNA, 15 bp, Homo sapiens
ataaatatatgcacc

SEQ ID NO: 399830 - DNA, 15 bp, Homo sapiens
aataaatatatgcac

SEQ ID NO: 399831 - DNA, 15 bp, Homo sapiens
caataaatatatgca

SEQ ID NO: 399832 - DNA, 15 bp, Homo sapiens
tcaataaatatatgc

SEQ ID NO: 399833 - DNA, 15 bp, Homo sapiens
ctcaataaatatatg

SEQ ID NO: 399834 - DNA, 15 bp, Homo sapiens
actcaataaatatat

SEQ ID NO: 399835 - DNA, 15 bp, Homo sapiens
tactcaataaatata

SEQ ID NO: 399836 - DNA, 15 bp, Homo sapiens
gtactcaataaatat

SEQ ID NO: 399837 - DNA, 15 bp, Homo sapiens
tgtactcaataaata

SEQ ID NO: 399838 - DNA, 15 bp, Homo sapiens
atgtactcaataaat

SEQ ID NO: 399839 - DNA, 15 bp, Homo sapiens
catgtactcaataaa

SEQ ID NO: 399840 - DNA, 15 bp, Homo sapiens
tcatgtactcaataa

SEQ ID NO: 399841 - DNA, 15 bp, Homo sapiens
ctcatgtactcaata

SEQ ID NO: 399842 - DNA, 15 bp, Homo sapiens
tctcatgtactcaat

SEQ ID NO: 399843 - DNA, 15 bp, Homo sapiens
atctcatgtactcaa

SEQ ID NO: 399844 - DNA, 15 bp, Homo sapiens
catctcatgtactca

SEQ ID NO: 399845 - DNA, 15 bp, Homo sapiens
acatctcatgtactc

SEQ ID NO: 399846 - DNA, 15 bp, Homo sapiens
aacatctcatgtact

SEQ ID NO: 399847 - DNA, 15 bp, Homo sapiens
aaacatctcatgtac

SEQ ID NO: 399848 - DNA, 15 bp, Homo sapiens
aaaacatctcatgta

SEQ ID NO: 399849 - DNA, 15 bp, Homo sapiens
caaaacatctcatgt

SEQ ID NO: 399850 - DNA, 15 bp, Homo sapiens
tcaaaacatctcatg

SEQ ID NO: 399851 - DNA, 15 bp, Homo sapiens
atcaaaacatctcat

SEQ ID NO: 399852 - DNA, 15 bp, Homo sapiens
tatcaaaacatctca

SEQ ID NO: 399853 - DNA, 15 bp, Homo sapiens
ctatcaaaacatctc

SEQ ID NO: 399854 - DNA, 15 bp, Homo sapiens
tctatcaaaacatct

SEQ ID NO: 399855 - DNA, 15 bp, Homo sapiens
ctctatcaaaacatc

SEQ ID NO: 399856 - DNA, 15 bp, Homo sapiens
cctctatcaaaacat

SEQ ID NO: 399857 - DNA, 15 bp, Homo sapiens
gcctctatcaaaaca

SEQ ID NO: 399858 - DNA, 15 bp, Homo sapiens
tgcctctatcaaaac

SEQ ID NO: 399859 - DNA, 15 bp, Homo sapiens
atgcctctatcaaaa

SEQ ID NO: 399860 - DNA, 15 bp, Homo sapiens
catgcctctatcaaa

SEQ ID NO: 399861 - DNA, 15 bp, Homo sapiens
gcatgcctctatcaa

SEQ ID NO: 399862 - DNA, 15 bp, Homo sapiens
tgcatgcctctatca

SEQ ID NO: 399863 - DNA, 15 bp, Homo sapiens
ctgcatgcctctatc

SEQ ID NO: 399864 - DNA, 15 bp, Homo sapiens
gctgcatgcctctat

SEQ ID NO: 399865 - DNA, 15 bp, Homo sapiens
tgctgcatgcctcta

SEQ ID NO: 399866 - DNA, 15 bp, Homo sapiens
atgctgcatgcctct

SEQ ID NO: 399867 - DNA, 15 bp, Homo sapiens
catgctgcatgcctc

SEQ ID NO: 399868 - DNA, 15 bp, Homo sapiens
tcatgctgcatgcct

SEQ ID NO: 399869 - DNA, 15 bp, Homo sapiens
ttcatgctgcatgcc

SEQ ID NO: 399870 - DNA, 15 bp, Homo sapiens
tttcatgctgcatgc

SEQ ID NO: 399871 - DNA, 15 bp, Homo sapiens
atttcatgctgcatg

SEQ ID NO: 399872 - DNA, 15 bp, Homo sapiens
tatttcatgctgcat

SEQ ID NO: 399873 - DNA, 15 bp, Homo sapiens
ttatttcatgctgca

SEQ ID NO: 399874 - DNA, 15 bp, Homo sapiens
cttatttcatgctgc

SEQ ID NO: 399875 - DNA, 15 bp, Homo sapiens
gcttatttcatgctg

SEQ ID NO: 399876 - DNA, 15 bp, Homo sapiens
tgcttatttcatgct

SEQ ID NO: 399877 - DNA, 15 bp, Homo sapiens
gtgcttatttcatgc

SEQ ID NO: 399878 - DNA, 15 bp, Homo sapiens
tgtgcttatttcatg

SEQ ID NO: 399879 - DNA, 15 bp, Homo sapiens
ttgtgcttatttcat

SEQ ID NO: 399880 - DNA, 15 bp, Homo sapiens
attgtgcttatttca

SEQ ID NO: 399881 - DNA, 15 bp, Homo sapiens
tattgtgcttatttc

SEQ ID NO: 399882 - DNA, 15 bp, Homo sapiens
ttattgtgcttattt

SEQ ID NO: 399883 - DNA, 15 bp, Homo sapiens
attattgtgcttatt

SEQ ID NO: 399884 - DNA, 15 bp, Homo sapiens
tattattgtgcttat

SEQ ID NO: 399885 - DNA, 15 bp, Homo sapiens
ctattattgtgctta

SEQ ID NO: 399886 - DNA, 15 bp, Homo sapiens
tctattattgtgctt

SEQ ID NO: 399887 - DNA, 15 bp, Homo sapiens
ctctattattgtgct

SEQ ID NO: 399888 - DNA, 15 bp, Homo sapiens
tctctattattgtgc

SEQ ID NO: 399889 - DNA, 15 bp, Homo sapiens
ttctctattattgtg

SEQ ID NO: 399890 - DNA, 15 bp, Homo sapiens
attctctattattgt

SEQ ID NO: 399891 - DNA, 15 bp, Homo sapiens
cattctctattattg

SEQ ID NO: 399892 - DNA, 15 bp, Homo sapiens
ccattctctattatt

SEQ ID NO: 399893 - DNA, 15 bp, Homo sapiens
cccattctctattat

SEQ ID NO: 399894 - DNA, 15 bp, Homo sapiens
gcccattctctatta

SEQ ID NO: 399895 - DNA, 15 bp, Homo sapiens
agcccattctctatt

SEQ ID NO: 399896 - DNA, 15 bp, Homo sapiens
tagcccattctctat

SEQ ID NO: 399897 - DNA, 15 bp, Homo sapiens
atagcccattctcta

SEQ ID NO: 399898 - DNA, 15 bp, Homo sapiens
gatagcccattctct

SEQ ID NO: 399899 - DNA, 15 bp, Homo sapiens
ggatagcccattctc

SEQ ID NO: 399900 - DNA, 15 bp, Homo sapiens
tggatagcccattct

SEQ ID NO: 399901 - DNA, 15 bp, Homo sapiens
atggatagcccattc

SEQ ID NO: 399902 - DNA, 15 bp, Homo sapiens
gatggatagcccatt

SEQ ID NO: 399903 - DNA, 15 bp, Homo sapiens
ggatggatagcccat

SEQ ID NO: 399904 - DNA, 15 bp, Homo sapiens
tggatggatagccca

SEQ ID NO: 399905 - DNA, 15 bp, Homo sapiens
atggatggatagccc

SEQ ID NO: 399906 - DNA, 15 bp, Homo sapiens
gatggatggatagcc

SEQ ID NO: 399907 - DNA, 15 bp, Homo sapiens
tgatggatggatagc

SEQ ID NO: 399908 - DNA, 15 bp, Homo sapiens
ttgatggatggatag

SEQ ID NO: 399909 - DNA, 15 bp, Homo sapiens
tttgatggatggata

SEQ ID NO: 399910 - DNA, 15 bp, Homo sapiens
ctttgatggatggat

SEQ ID NO: 399911 - DNA, 15 bp, Homo sapiens
actttgatggatgga

SEQ ID NO: 399912 - DNA, 15 bp, Homo sapiens
tactttgatggatgg

SEQ ID NO: 399913 - DNA, 15 bp, Homo sapiens
atactttgatggatg

SEQ ID NO: 399914 - DNA, 15 bp, Homo sapiens
aatactttgatggat

SEQ ID NO: 399915 - DNA, 15 bp, Homo sapiens
aaatactttgatgga

SEQ ID NO: 399916 - DNA, 15 bp, Homo sapiens
taaatactttgatgg

SEQ ID NO: 399917 - DNA, 15 bp, Homo sapiens
ataaatactttgatg

SEQ ID NO: 399918 - DNA, 15 bp, Homo sapiens
gataaatactttgat

SEQ ID NO: 399919 - DNA, 15 bp, Homo sapiens
ggataaatactttga

SEQ ID NO: 399920 - DNA, 15 bp, Homo sapiens
tggataaatactttg

SEQ ID NO: 399921 - DNA, 15 bp, Homo sapiens
atggataaatacttt

SEQ ID NO: 399922 - DNA, 15 bp, Homo sapiens
aatggataaatactt

SEQ ID NO: 399923 - DNA, 15 bp, Homo sapiens
caatggataaatact

SEQ ID NO: 399924 - DNA, 15 bp, Homo sapiens
tcaatggataaatac

SEQ ID NO: 399925 - DNA, 15 bp, Homo sapiens
ctcaatggataaata

SEQ ID NO: 399926 - DNA, 15 bp, Homo sapiens
actcaatggataaat

SEQ ID NO: 399927 - DNA, 15 bp, Homo sapiens
aactcaatggataaa

SEQ ID NO: 399928 - DNA, 15 bp, Homo sapiens
taactcaatggataa

SEQ ID NO: 399929 - DNA, 15 bp, Homo sapiens
gtaactcaatggata

SEQ ID NO: 399930 - DNA, 15 bp, Homo sapiens
tgtaactcaatggat

SEQ ID NO: 399931 - DNA, 15 bp, Homo sapiens
ttgtaactcaatgga

SEQ ID NO: 399932 - DNA, 15 bp, Homo sapiens
tttgtaactcaatgg

SEQ ID NO: 399933 - DNA, 15 bp, Homo sapiens
gtttgtaactcaatg

SEQ ID NO: 399934 - DNA, 15 bp, Homo sapiens
tgtttgtaactcaat

SEQ ID NO: 399935 - DNA, 15 bp, Homo sapiens
ttgtttgtaactcaa

SEQ ID NO: 399936 - DNA, 15 bp, Homo sapiens
attgtttgtaactca

SEQ ID NO: 399937 - DNA, 15 bp, Homo sapiens
gattgtttgtaactc

SEQ ID NO: 399938 - DNA, 15 bp, Homo sapiens
ggattgtttgtaact

SEQ ID NO: 399939 - DNA, 15 bp, Homo sapiens
tggattgtttgtaac

SEQ ID NO: 399940 - DNA, 15 bp, Homo sapiens
ttggattgtttgtaa

SEQ ID NO: 399941 - DNA, 15 bp, Homo sapiens
attggattgtttgta

SEQ ID NO: 399942 - DNA, 15 bp, Homo sapiens
aattggattgtttgt

SEQ ID NO: 399943 - DNA, 15 bp, Homo sapiens
taattggattgtttg

SEQ ID NO: 399944 - DNA, 15 bp, Homo sapiens
gtaattggattgttt

SEQ ID NO: 399945 - DNA, 15 bp, Homo sapiens
tgtaattggattgtt

SEQ ID NO: 399946 - DNA, 15 bp, Homo sapiens
gtgtaattggattgt

SEQ ID NO: 399947 - DNA, 15 bp, Homo sapiens
agtgtaattggattg

SEQ ID NO: 399948 - DNA, 15 bp, Homo sapiens
gagtgtaattggatt

SEQ ID NO: 399949 - DNA, 15 bp, Homo sapiens
agagtgtaattggat

SEQ ID NO: 399950 - DNA, 15 bp, Homo sapiens
tagagtgtaattgga

SEQ ID NO: 399951 - DNA, 15 bp, Homo sapiens
atagagtgtaattgg

SEQ ID NO: 399952 - DNA, 15 bp, Homo sapiens
aatagagtgtaattg

SEQ ID NO: 399953 - DNA, 15 bp, Homo sapiens
aaatagagtgtaatt

SEQ ID NO: 399954 - DNA, 15 bp, Homo sapiens
aaaatagagtgtaat

SEQ ID NO: 399955 - DNA, 15 bp, Homo sapiens
taaaatagagtgtaa

SEQ ID NO: 399956 - DNA, 15 bp, Homo sapiens
ttaaaatagagtgta

SEQ ID NO: 399957 - DNA, 15 bp, Homo sapiens
tttaaaatagagtgt

SEQ ID NO: 399958 - DNA, 15 bp, Homo sapiens
ttttaaaatagagtg

SEQ ID NO: 399959 - DNA, 15 bp, Homo sapiens
attttaaaatagagt

SEQ ID NO: 399960 - DNA, 15 bp, Homo sapiens
cattttaaaatagag

SEQ ID NO: 399961 - DNA, 15 bp, Homo sapiens
acattttaaaataga

SEQ ID NO: 399962 - DNA, 15 bp, Homo sapiens
tacattttaaaatag

SEQ ID NO: 399963 - DNA, 15 bp, Homo sapiens
gtacattttaaaata

SEQ ID NO: 399964 - DNA, 15 bp, Homo sapiens
tgtacattttaaaat

SEQ ID NO: 399965 - DNA, 15 bp, Homo sapiens
ttgtacattttaaaa

SEQ ID NO: 399966 - DNA, 15 bp, Homo sapiens
attgtacattttaaa

SEQ ID NO: 399967 - DNA, 15 bp, Homo sapiens
aattgtacattttaa

SEQ ID NO: 399968 - DNA, 15 bp, Homo sapiens
taattgtacatttta

SEQ ID NO: 399969 - DNA, 15 bp, Homo sapiens
ttaattgtacatttt

SEQ ID NO: 399970 - DNA, 15 bp, Homo sapiens
cttaattgtacattt

SEQ ID NO: 399971 - DNA, 15 bp, Homo sapiens
acttaattgtacatt

SEQ ID NO: 399972 - DNA, 15 bp, Homo sapiens
aacttaattgtacat

SEQ ID NO: 399973 - DNA, 15 bp, Homo sapiens
taacttaattgtaca

SEQ ID NO: 399974 - DNA, 15 bp, Homo sapiens
ataacttaattgtac

SEQ ID NO: 399975 - DNA, 15 bp, Homo sapiens
gataacttaattgta

SEQ ID NO: 399976 - DNA, 15 bp, Homo sapiens
tgataacttaattgt

SEQ ID NO: 399977 - DNA, 15 bp, Homo sapiens
atgataacttaattg

SEQ ID NO: 399978 - DNA, 15 bp, Homo sapiens
aatgataacttaatt

SEQ ID NO: 399979 - DNA, 15 bp, Homo sapiens
caatgataacttaat

SEQ ID NO: 399980 - DNA, 15 bp, Homo sapiens
tcaatgataacttaa

SEQ ID NO: 399981 - DNA, 15 bp, Homo sapiens
gtcaatgataactta

SEQ ID NO: 399982 - DNA, 15 bp, Homo sapiens
tgtcaatgataactt

SEQ ID NO: 399983 - DNA, 15 bp, Homo sapiens
ttgtcaatgataact

SEQ ID NO: 399984 - DNA, 15 bp, Homo sapiens
attgtcaatgataac

SEQ ID NO: 399985 - DNA, 15 bp, Homo sapiens
tattgtcaatgataa

SEQ ID NO: 399986 - DNA, 15 bp, Homo sapiens
ttattgtcaatgata

SEQ ID NO: 399987 - DNA, 15 bp, Homo sapiens
attattgtcaatgat

SEQ ID NO: 399988 - DNA, 15 bp, Homo sapiens
gattattgtcaatga

SEQ ID NO: 399989 - DNA, 15 bp, Homo sapiens
tgattattgtcaatg

SEQ ID NO: 399990 - DNA, 15 bp, Homo sapiens
gtgattattgtcaat

SEQ ID NO: 399991 - DNA, 15 bp, Homo sapiens
ggtgattattgtcaa

SEQ ID NO: 399992 - DNA, 15 bp, Homo sapiens
gggtgattattgtca

SEQ ID NO: 399993 - DNA, 15 bp, Homo sapiens
agggtgattattgtc

SEQ ID NO: 399994 - DNA, 15 bp, Homo sapiens
tagggtgattattgt

SEQ ID NO: 399995 - DNA, 15 bp, Homo sapiens
atagggtgattattg

SEQ ID NO: 399996 - DNA, 15 bp, Homo sapiens
aatagggtgattatt

SEQ ID NO: 399997 - DNA, 15 bp, Homo sapiens
caatagggtgattat

SEQ ID NO: 399998 - DNA, 15 bp, Homo sapiens
acaatagggtgatta

SEQ ID NO: 399999 - DNA, 15 bp, Homo sapiens
cacaatagggtgatt

SEQ ID NO: 400000 - DNA, 15 bp, Homo sapiens
gcacaatagggtgat

SEQ ID NO: 400001 - DNA, 15 bp, Homo sapiens
agcacaatagggtga

SEQ ID NO: 400002 - DNA, 15 bp, Homo sapiens
tagcacaatagggtg

SEQ ID NO: 400003 - DNA, 15 bp, Homo sapiens
atagcacaatagggt

SEQ ID NO: 400004 - DNA, 15 bp, Homo sapiens
aatagcacaataggg

SEQ ID NO: 400005 - DNA, 15 bp, Homo sapiens
caatagcacaatagg

SEQ ID NO: 400006 - DNA, 15 bp, Homo sapiens
tcaatagcacaatag

SEQ ID NO: 400007 - DNA, 15 bp, Homo sapiens
ttcaatagcacaata

SEQ ID NO: 400008 - DNA, 15 bp, Homo sapiens
attcaatagcacaat

SEQ ID NO: 400009 - DNA, 15 bp, Homo sapiens
tattcaatagcacaa

SEQ ID NO: 400010 - DNA, 15 bp, Homo sapiens
ctattcaatagcaca

SEQ ID NO: 400011 - DNA, 15 bp, Homo sapiens
actattcaatagcac

SEQ ID NO: 400012 - DNA, 15 bp, Homo sapiens
tactattcaatagca

SEQ ID NO: 400013 - DNA, 15 bp, Homo sapiens
ctactattcaatagc

SEQ ID NO: 400014 - DNA, 15 bp, Homo sapiens
cctactattcaatag

SEQ ID NO: 400015 - DNA, 15 bp, Homo sapiens
acctactattcaata

SEQ ID NO: 400016 - DNA, 15 bp, Homo sapiens
gacctactattcaat

SEQ ID NO: 400017 - DNA, 15 bp, Homo sapiens
agacctactattcaa

SEQ ID NO: 400018 - DNA, 15 bp, Homo sapiens
aagacctactattca

SEQ ID NO: 400019 - DNA, 15 bp, Homo sapiens
taagacctactattc

SEQ ID NO: 400020 - DNA, 15 bp, Homo sapiens
ataagacctactatt

SEQ ID NO: 400021 - DNA, 15 bp, Homo sapiens
aataagacctactat

SEQ ID NO: 400022 - DNA, 15 bp, Homo sapiens
aaataagacctacta

SEQ ID NO: 400023 - DNA, 15 bp, Homo sapiens
taaataagacctact

SEQ ID NO: 400024 - DNA, 15 bp, Homo sapiens
ataaataagacctac

SEQ ID NO: 400025 - DNA, 15 bp, Homo sapiens
aataaataagaccta

SEQ ID NO: 400026 - DNA, 15 bp, Homo sapiens
gaataaataagacct

SEQ ID NO: 400027 - DNA, 15 bp, Homo sapiens
agaataaataagacc

SEQ ID NO: 400028 - DNA, 15 bp, Homo sapiens
aagaataaataagac

SEQ ID NO: 400029 - DNA, 15 bp, Homo sapiens
aaagaataaataaga

SEQ ID NO: 400030 - DNA, 15 bp, Homo sapiens
gaaagaataaataag

SEQ ID NO: 400031 - DNA, 15 bp, Homo sapiens
agaaagaataaataa

SEQ ID NO: 400032 - DNA, 15 bp, Homo sapiens
tagaaagaataaata

SEQ ID NO: 400033 - DNA, 15 bp, Homo sapiens
atagaaagaataaat

SEQ ID NO: 400034 - DNA, 15 bp, Homo sapiens
aatagaaagaataaa

SEQ ID NO: 400035 - DNA, 15 bp, Homo sapiens
aaatagaaagaataa

SEQ ID NO: 400036 - DNA, 15 bp, Homo sapiens
aaaatagaaagaata

SEQ ID NO: 400037 - DNA, 15 bp, Homo sapiens
aaaaatagaaagaat

SEQ ID NO: 400038 - DNA, 15 bp, Homo sapiens
aaaaaatagaaagaa

SEQ ID NO: 400039 - DNA, 15 bp, Homo sapiens
caaaaaatagaaaga

SEQ ID NO: 400040 - DNA, 15 bp, Homo sapiens
acaaaaaatagaaag

SEQ ID NO: 400041 - DNA, 15 bp, Homo sapiens
tacaaaaaatagaaa

SEQ ID NO: 400042 - DNA, 15 bp, Homo sapiens
gtacaaaaaatagaa

SEQ ID NO: 400043 - DNA, 15 bp, Homo sapiens
ggtacaaaaaataga

SEQ ID NO: 400044 - DNA, 15 bp, Homo sapiens
aggtacaaaaaatag

SEQ ID NO: 400045 - DNA, 15 bp, Homo sapiens
taggtacaaaaaata

SEQ ID NO: 400046 - DNA, 15 bp, Homo sapiens
ataggtacaaaaaat

SEQ ID NO: 400047 - DNA, 15 bp, Homo sapiens
aataggtacaaaaaa

SEQ ID NO: 400048 - DNA, 15 bp, Homo sapiens
aaataggtacaaaaa

SEQ ID NO: 400049 - DNA, 15 bp, Homo sapiens
gaaataggtacaaaa

SEQ ID NO: 400050 - DNA, 15 bp, Homo sapiens
ggaaataggtacaaa

SEQ ID NO: 400051 - DNA, 15 bp, Homo sapiens
tggaaataggtacaa

SEQ ID NO: 400052 - DNA, 15 bp, Homo sapiens
gtggaaataggtaca

SEQ ID NO: 400053 - DNA, 15 bp, Homo sapiens
agtggaaataggtac

SEQ ID NO: 400054 - DNA, 15 bp, Homo sapiens
cagtggaaataggta

SEQ ID NO: 400055 - DNA, 15 bp, Homo sapiens
gcagtggaaataggt

SEQ ID NO: 400056 - DNA, 15 bp, Homo sapiens
ggcagtggaaatagg

SEQ ID NO: 400057 - DNA, 15 bp, Homo sapiens
ggggcagtggaaata

SEQ ID NO: 400058 - DNA, 15 bp, Homo sapiens
gggggcagtggaaat

SEQ ID NO: 400059 - DNA, 15 bp, Homo sapiens
agggggcagtggaaa

SEQ ID NO: 400060 - DNA, 15 bp, Homo sapiens
gagggggcagtggaa

SEQ ID NO: 400061 - DNA, 15 bp, Homo sapiens
tgagggggcagtgga

SEQ ID NO: 400062 - DNA, 15 bp, Homo sapiens
ctgagggggcagtgg

SEQ ID NO: 400063 - DNA, 15 bp, Homo sapiens
gctgagggggcagtg

SEQ ID NO: 400064 - DNA, 15 bp, Homo sapiens
ggctgagggggcagt

SEQ ID NO: 400065 - DNA, 15 bp, Homo sapiens
gggctgagggggcag

SEQ ID NO: 400066 - DNA, 15 bp, Homo sapiens
ggggctgagggggca

SEQ ID NO: 400067 - DNA, 15 bp, Homo sapiens
gggggctgagggggc

SEQ ID NO: 400068 - DNA, 15 bp, Homo sapiens
tgggggctgaggggg

SEQ ID NO: 400069 - DNA, 15 bp, Homo sapiens
ttgggggctgagggg

SEQ ID NO: 400070 - DNA, 15 bp, Homo sapiens
gttgggggctgaggg

SEQ ID NO: 400071 - DNA, 15 bp, Homo sapiens
agttgggggctgagg

SEQ ID NO: 400072 - DNA, 15 bp, Homo sapiens
tagttgggggctgag

SEQ ID NO: 400073 - DNA, 15 bp, Homo sapiens
gtagttgggggctga

SEQ ID NO: 400074 - DNA, 15 bp, Homo sapiens
ggtagttgggggctg

SEQ ID NO: 400075 - DNA, 15 bp, Homo sapiens
gggtagttgggggct

SEQ ID NO: 400076 - DNA, 15 bp, Homo sapiens
agggtagttgggggc

SEQ ID NO: 400077 - DNA, 15 bp, Homo sapiens
aagggtagttggggg

SEQ ID NO: 400078 - DNA, 15 bp, Homo sapiens
gaagggtagttgggg

SEQ ID NO: 400079 - DNA, 15 bp, Homo sapiens
ggaagggtagttggg

SEQ ID NO: 400080 - DNA, 15 bp, Homo sapiens
gggaagggtagttgg

SEQ ID NO: 400081 - DNA, 15 bp, Homo sapiens
tgggaagggtagttg

SEQ ID NO: 400082 - DNA, 15 bp, Homo sapiens
ctgggaagggtagtt

SEQ ID NO: 400083 - DNA, 15 bp, Homo sapiens
gctgggaagggtagt

SEQ ID NO: 400084 - DNA, 15 bp, Homo sapiens
agctgggaagggtag

SEQ ID NO: 400085 - DNA, 15 bp, Homo sapiens
gagctgggaagggta

SEQ ID NO: 400086 - DNA, 15 bp, Homo sapiens
ggagctgggaagggt

SEQ ID NO: 400087 - DNA, 15 bp, Homo sapiens
aggagctgggaaggg

SEQ ID NO: 400088 - DNA, 15 bp, Homo sapiens
caggagctgggaagg

SEQ ID NO: 400089 - DNA, 15 bp, Homo sapiens
ccaggagctgggaag

SEQ ID NO: 400090 - DNA, 15 bp, Homo sapiens
cccaggagctgggaa

SEQ ID NO: 400091 - DNA, 15 bp, Homo sapiens
tcccaggagctggga

SEQ ID NO: 400092 - DNA, 15 bp, Homo sapiens
ttcccaggagctggg

SEQ ID NO: 400093 - DNA, 15 bp, Homo sapiens
gttcccaggagctgg

SEQ ID NO: 400094 - DNA, 15 bp, Homo sapiens
ggttcccaggagctg

SEQ ID NO: 400095 - DNA, 15 bp, Homo sapiens
tggttcccaggagct

SEQ ID NO: 400096 - DNA, 15 bp, Homo sapiens
gtggttcccaggagc

SEQ ID NO: 400097 - DNA, 15 bp, Homo sapiens
agtggttcccaggag

SEQ ID NO: 400098 - DNA, 15 bp, Homo sapiens
gagtggttcccagga

SEQ ID NO: 400099 - DNA, 15 bp, Homo sapiens
agagtggttcccagg

SEQ ID NO: 400100 - DNA, 15 bp, Homo sapiens
aagagtggttcccag

SEQ ID NO: 400101 - DNA, 15 bp, Homo sapiens
gaagagtggttccca

SEQ ID NO: 400102 - DNA, 15 bp, Homo sapiens
agaagagtggttccc

SEQ ID NO: 400103 - DNA, 15 bp, Homo sapiens
tagaagagtggttcc

SEQ ID NO: 400104 - DNA, 15 bp, Homo sapiens
gtagaagagtggttc

SEQ ID NO: 400105 - DNA, 15 bp, Homo sapiens
agtagaagagtggtt

SEQ ID NO: 400106 - DNA, 15 bp, Homo sapiens
gagtagaagagtggt

SEQ ID NO: 400107 - DNA, 15 bp, Homo sapiens
agagtagaagagtgg

SEQ ID NO: 400108 - DNA, 15 bp, Homo sapiens
gagagtagaagagtg

SEQ ID NO: 400109 - DNA, 15 bp, Homo sapiens
agagagtagaagagt

SEQ ID NO: 400110 - DNA, 15 bp, Homo sapiens
cagagagtagaagag

SEQ ID NO: 400111 - DNA, 15 bp, Homo sapiens
ccagagagtagaaga

SEQ ID NO: 400112 - DNA, 15 bp, Homo sapiens
cccagagagtagaag

SEQ ID NO: 400113 - DNA, 15 bp, Homo sapiens
acccagagagtagaa

SEQ ID NO: 400114 - DNA, 15 bp, Homo sapiens
gacccagagagtaga

SEQ ID NO: 400115 - DNA, 15 bp, Homo sapiens
ggacccagagagtag

SEQ ID NO: 400116 - DNA, 15 bp, Homo sapiens
tggacccagagagta

SEQ ID NO: 400117 - DNA, 15 bp, Homo sapiens
atggacccagagagt

SEQ ID NO: 400118 - DNA, 15 bp, Homo sapiens
catggacccagagag

SEQ ID NO: 400119 - DNA, 15 bp, Homo sapiens
tcatggacccagaga

SEQ ID NO: 400120 - DNA, 15 bp, Homo sapiens
ctcatggacccagag

SEQ ID NO: 400121 - DNA, 15 bp, Homo sapiens
actcatggacccaga

SEQ ID NO: 400122 - DNA, 15 bp, Homo sapiens
aactcatggacccag

SEQ ID NO: 400123 - DNA, 15 bp, Homo sapiens
gaactcatggaccca

SEQ ID NO: 400124 - DNA, 15 bp, Homo sapiens
tgaactcatggaccc

SEQ ID NO: 400125 - DNA, 15 bp, Homo sapiens
ttgaactcatggacc

SEQ ID NO: 400126 - DNA, 15 bp, Homo sapiens
attgaactcatggac

SEQ ID NO: 400127 - DNA, 15 bp, Homo sapiens
aattgaactcatgga

SEQ ID NO: 400128 - DNA, 15 bp, Homo sapiens
caattgaactcatgg

SEQ ID NO: 400129 - DNA, 15 bp, Homo sapiens
acaattgaactcatg

SEQ ID NO: 400130 - DNA, 15 bp, Homo sapiens
aacaattgaactcat

SEQ ID NO: 400131 - DNA, 15 bp, Homo sapiens
gaacaattgaactca

SEQ ID NO: 400132 - DNA, 15 bp, Homo sapiens
agaacaattgaactc

SEQ ID NO: 400133 - DNA, 15 bp, Homo sapiens
cagaacaattgaact

SEQ ID NO: 400134 - DNA, 15 bp, Homo sapiens
tcagaacaattgaac

SEQ ID NO: 400135 - DNA, 15 bp, Homo sapiens
atcagaacaattgaa

SEQ ID NO: 400136 - DNA, 15 bp, Homo sapiens
aatcagaacaattga

SEQ ID NO: 400137 - DNA, 15 bp, Homo sapiens
aaatcagaacaattg

SEQ ID NO: 400138 - DNA, 15 bp, Homo sapiens
aaaatcagaacaatt

SEQ ID NO: 400139 - DNA, 15 bp, Homo sapiens
aaaaatcagaacaat

SEQ ID NO: 400140 - DNA, 15 bp, Homo sapiens
taaaaatcagaacaa

SEQ ID NO: 400141 - DNA, 15 bp, Homo sapiens
ctaaaaatcagaaca

SEQ ID NO: 400142 - DNA, 15 bp, Homo sapiens
tctaaaaatcagaac

SEQ ID NO: 400143 - DNA, 15 bp, Homo sapiens
atctaaaaatcagaa

SEQ ID NO: 400144 - DNA, 15 bp, Homo sapiens
gatctaaaaatcaga

SEQ ID NO: 400145 - DNA, 15 bp, Homo sapiens
ggatctaaaaatcag

SEQ ID NO: 400146 - DNA, 15 bp, Homo sapiens
gggatctaaaaatca

SEQ ID NO: 400147 - DNA, 15 bp, Homo sapiens
tgggatctaaaaatc

SEQ ID NO: 400148 - DNA, 15 bp, Homo sapiens
gtgggatctaaaaat

SEQ ID NO: 400149 - DNA, 15 bp, Homo sapiens
tgtgggatctaaaaa

SEQ ID NO: 400150 - DNA, 15 bp, Homo sapiens
ttgtgggatctaaaa

SEQ ID NO: 400151 - DNA, 15 bp, Homo sapiens
tttgtgggatctaaa

SEQ ID NO: 400152 - DNA, 15 bp, Homo sapiens
atttgtgggatctaa

SEQ ID NO: 400153 - DNA, 15 bp, Homo sapiens
tatttgtgggatcta

SEQ ID NO: 400154 - DNA, 15 bp, Homo sapiens
ttatttgtgggatct

SEQ ID NO: 400155 - DNA, 15 bp, Homo sapiens
cttatttgtgggatc

SEQ ID NO: 400156 - DNA, 15 bp, Homo sapiens
acttatttgtgggat

SEQ ID NO: 400157 - DNA, 15 bp, Homo sapiens
cacttatttgtggga

SEQ ID NO: 400158 - DNA, 15 bp, Homo sapiens
tcacttatttgtggg

SEQ ID NO: 400159 - DNA, 15 bp, Homo sapiens
ctcacttatttgtgg

SEQ ID NO: 400160 - DNA, 15 bp, Homo sapiens
tctcacttatttgtg

SEQ ID NO: 400161 - DNA, 15 bp, Homo sapiens
ttctcacttatttgt

SEQ ID NO: 400162 - DNA, 15 bp, Homo sapiens
attctcacttatttg

SEQ ID NO: 400163 - DNA, 15 bp, Homo sapiens
tattctcacttattt

SEQ ID NO: 400164 - DNA, 15 bp, Homo sapiens
atattctcacttatt

SEQ ID NO: 400165 - DNA, 15 bp, Homo sapiens
catattctcacttat

SEQ ID NO: 400166 - DNA, 15 bp, Homo sapiens
gcatattctcactta

SEQ ID NO: 400167 - DNA, 15 bp, Homo sapiens
tgcatattctcactt

SEQ ID NO: 400168 - DNA, 15 bp, Homo sapiens
ctgcatattctcact

SEQ ID NO: 400169 - DNA, 15 bp, Homo sapiens
actgcatattctcac

SEQ ID NO: 400170 - DNA, 15 bp, Homo sapiens
aactgcatattctca

SEQ ID NO: 400171 - DNA, 15 bp, Homo sapiens
aaactgcatattctc

SEQ ID NO: 400172 - DNA, 15 bp, Homo sapiens
caaactgcatattct

SEQ ID NO: 400173 - DNA, 15 bp, Homo sapiens
acaaactgcatattc

SEQ ID NO: 400174 - DNA, 15 bp, Homo sapiens
gacaaactgcatatt

SEQ ID NO: 400175 - DNA, 15 bp, Homo sapiens
agacaaactgcatat

SEQ ID NO: 400176 - DNA, 15 bp, Homo sapiens
aagacaaactgcata

SEQ ID NO: 400177 - DNA, 15 bp, Homo sapiens
aaagacaaactgcat

SEQ ID NO: 400178 - DNA, 15 bp, Homo sapiens
gaaagacaaactgca

SEQ ID NO: 400179 - DNA, 15 bp, Homo sapiens
agaaagacaaactgc

SEQ ID NO: 400180 - DNA, 15 bp, Homo sapiens
cagaaagacaaactg

SEQ ID NO: 400181 - DNA, 15 bp, Homo sapiens
acagaaagacaaact

SEQ ID NO: 400182 - DNA, 15 bp, Homo sapiens
cacagaaagacaaac

SEQ ID NO: 400183 - DNA, 15 bp, Homo sapiens
gcacagaaagacaaa

SEQ ID NO: 400184 - DNA, 15 bp, Homo sapiens
ggcacagaaagacaa

SEQ ID NO: 400185 - DNA, 15 bp, Homo sapiens
aggcacagaaagaca

SEQ ID NO: 400186 - DNA, 15 bp, Homo sapiens
gaggcacagaaagac

SEQ ID NO: 400187 - DNA, 15 bp, Homo sapiens
ggaggcacagaaaga

SEQ ID NO: 400188 - DNA, 15 bp, Homo sapiens
tggaggcacagaaag

SEQ ID NO: 400189 - DNA, 15 bp, Homo sapiens
ctggaggcacagaaa

SEQ ID NO: 400190 - DNA, 15 bp, Homo sapiens
actggaggcacagaa

SEQ ID NO: 400191 - DNA, 15 bp, Homo sapiens
aactggaggcacaga

SEQ ID NO: 400192 - DNA, 15 bp, Homo sapiens
gaactggaggcacag

SEQ ID NO: 400193 - DNA, 15 bp, Homo sapiens
agaactggaggcaca

SEQ ID NO: 400194 - DNA, 15 bp, Homo sapiens
tagaactggaggcac

SEQ ID NO: 400195 - DNA, 15 bp, Homo sapiens
atagaactggaggca

SEQ ID NO: 400196 - DNA, 15 bp, Homo sapiens
catagaactggaggc

SEQ ID NO: 400197 - DNA, 15 bp, Homo sapiens
acatagaactggagg

SEQ ID NO: 400198 - DNA, 15 bp, Homo sapiens
aacatagaactggag

SEQ ID NO: 400199 - DNA, 15 bp, Homo sapiens
caacatagaactgga

SEQ ID NO: 400200 - DNA, 15 bp, Homo sapiens
gcaacatagaactgg

SEQ ID NO: 400201 - DNA, 15 bp, Homo sapiens
agcaacatagaactg

SEQ ID NO: 400202 - DNA, 15 bp, Homo sapiens
tagcaacatagaact

SEQ ID NO: 400203 - DNA, 15 bp, Homo sapiens
gtagcaacatagaac

SEQ ID NO: 400204 - DNA, 15 bp, Homo sapiens
tgtagcaacatagaa

SEQ ID NO: 400205 - DNA, 15 bp, Homo sapiens
ttgtagcaacataga

SEQ ID NO: 400206 - DNA, 15 bp, Homo sapiens
tttgtagcaacatag

SEQ ID NO: 400207 - DNA, 15 bp, Homo sapiens
atttgtagcaacata

SEQ ID NO: 400208 - DNA, 15 bp, Homo sapiens
catttgtagcaacat

SEQ ID NO: 400209 - DNA, 15 bp, Homo sapiens
tcatttgtagcaaca

SEQ ID NO: 400210 - DNA, 15 bp, Homo sapiens
gtcatttgtagcaac

SEQ ID NO: 400211 - DNA, 15 bp, Homo sapiens
agtcatttgtagcaa

SEQ ID NO: 400212 - DNA, 15 bp, Homo sapiens
cagtcatttgtagca

SEQ ID NO: 400213 - DNA, 15 bp, Homo sapiens
acagtcatttgtagc

SEQ ID NO: 400214 - DNA, 15 bp, Homo sapiens
tacagtcatttgtag

SEQ ID NO: 400215 - DNA, 15 bp, Homo sapiens
atacagtcatttgta

SEQ ID NO: 400216 - DNA, 15 bp, Homo sapiens
gatacagtcatttgt

SEQ ID NO: 400217 - DNA, 15 bp, Homo sapiens
cgatacagtcatttg

SEQ ID NO: 400218 - DNA, 15 bp, Homo sapiens
gcgatacagtcattt

SEQ ID NO: 400219 - DNA, 15 bp, Homo sapiens
tgcgatacagtcatt

SEQ ID NO: 400220 - DNA, 15 bp, Homo sapiens
atgcgatacagtcat

SEQ ID NO: 400221 - DNA, 15 bp, Homo sapiens
gatgcgatacagtca

SEQ ID NO: 400222 - DNA, 15 bp, Homo sapiens
ggatgcgatacagtc

SEQ ID NO: 400223 - DNA, 15 bp, Homo sapiens
aggatgcgatacagt

SEQ ID NO: 400224 - DNA, 15 bp, Homo sapiens
aaggatgcgatacag

SEQ ID NO: 400225 - DNA, 15 bp, Homo sapiens
aaaggatgcgataca

SEQ ID NO: 400226 - DNA, 15 bp, Homo sapiens
aaaaggatgcgatac

SEQ ID NO: 400227 - DNA, 15 bp, Homo sapiens
aaaaaggatgcgata

SEQ ID NO: 400228 - DNA, 15 bp, Homo sapiens
aaaaaaggatgcgat

SEQ ID NO: 400229 - DNA, 15 bp, Homo sapiens
taaaaaaggatgcga

SEQ ID NO: 400230 - DNA, 15 bp, Homo sapiens
ataaaaaaggatgcg

SEQ ID NO: 400231 - DNA, 15 bp, Homo sapiens
cataaaaaaggatgc

SEQ ID NO: 400232 - DNA, 15 bp, Homo sapiens
ccataaaaaaggatg

SEQ ID NO: 400233 - DNA, 15 bp, Homo sapiens
accataaaaaaggat

SEQ ID NO: 400234 - DNA, 15 bp, Homo sapiens
aaccataaaaaagga

SEQ ID NO: 400235 - DNA, 15 bp, Homo sapiens
taaccataaaaaagg

SEQ ID NO: 400236 - DNA, 15 bp, Homo sapiens
ttaaccataaaaaag

SEQ ID NO: 400237 - DNA, 15 bp, Homo sapiens
tttaaccataaaaaa

SEQ ID NO: 400238 - DNA, 15 bp, Homo sapiens
atttaaccataaaaa

SEQ ID NO: 400239 - DNA, 15 bp, Homo sapiens
tatttaaccataaaa

SEQ ID NO: 400240 - DNA, 15 bp, Homo sapiens
ctatttaaccataaa

SEQ ID NO: 400241 - DNA, 15 bp, Homo sapiens
actatttaaccataa

SEQ ID NO: 400242 - DNA, 15 bp, Homo sapiens
tactatttaaccata

SEQ ID NO: 400243 - DNA, 15 bp, Homo sapiens
gtactatttaaccat

SEQ ID NO: 400244 - DNA, 15 bp, Homo sapiens
agtactatttaacca

SEQ ID NO: 400245 - DNA, 15 bp, Homo sapiens
gagtactatttaacc

SEQ ID NO: 400246 - DNA, 15 bp, Homo sapiens
ggagtactatttaac

SEQ ID NO: 400247 - DNA, 15 bp, Homo sapiens
tggagtactatttaa

SEQ ID NO: 400248 - DNA, 15 bp, Homo sapiens
atggagtactattta

SEQ ID NO: 400249 - DNA, 15 bp, Homo sapiens
aatggagtactattt

SEQ ID NO: 400250 - DNA, 15 bp, Homo sapiens
caatggagtactatt

SEQ ID NO: 400251 - DNA, 15 bp, Homo sapiens
acaatggagtactat

SEQ ID NO: 400252 - DNA, 15 bp, Homo sapiens
cacaatggagtacta

SEQ ID NO: 400253 - DNA, 15 bp, Homo sapiens
acacaatggagtact

SEQ ID NO: 400254 - DNA, 15 bp, Homo sapiens
tacacaatggagtac

SEQ ID NO: 400255 - DNA, 15 bp, Homo sapiens
gtacacaatggagta

SEQ ID NO: 400256 - DNA, 15 bp, Homo sapiens
cgtacacaatggagt

SEQ ID NO: 400257 - DNA, 15 bp, Homo sapiens
acgtacacaatggag

SEQ ID NO: 400258 - DNA, 15 bp, Homo sapiens
tacgtacacaatgga

SEQ ID NO: 400259 - DNA, 15 bp, Homo sapiens
atacgtacacaatgg

SEQ ID NO: 400260 - DNA, 15 bp, Homo sapiens
tatacgtacacaatg

SEQ ID NO: 400261 - DNA, 15 bp, Homo sapiens
gtatacgtacacaat

SEQ ID NO: 400262 - DNA, 15 bp, Homo sapiens
ggtatacgtacacaa

SEQ ID NO: 400263 - DNA, 15 bp, Homo sapiens
tggtatacgtacaca

SEQ ID NO: 400264 - DNA, 15 bp, Homo sapiens
gtggtatacgtacac

SEQ ID NO: 400265 - DNA, 15 bp, Homo sapiens
tgtggtatacgtaca

SEQ ID NO: 400266 - DNA, 15 bp, Homo sapiens
atgtggtatacgtac

SEQ ID NO: 400267 - DNA, 15 bp, Homo sapiens
aatgtggtatacgta

SEQ ID NO: 400268 - DNA, 15 bp, Homo sapiens
aaatgtggtatacgt

SEQ ID NO: 400269 - DNA, 15 bp, Homo sapiens
aaaatgtggtatacg

SEQ ID NO: 400270 - DNA, 15 bp, Homo sapiens
aaaaatgtggtatac

SEQ ID NO: 400271 - DNA, 15 bp, Homo sapiens
gaaaaatgtggtata

SEQ ID NO: 400272 - DNA, 15 bp, Homo sapiens
agaaaaatgtggtat

SEQ ID NO: 400273 - DNA, 15 bp, Homo sapiens
aagaaaaatgtggta

SEQ ID NO: 400274 - DNA, 15 bp, Homo sapiens
aaagaaaaatgtggt

SEQ ID NO: 400275 - DNA, 15 bp, Homo sapiens
taaagaaaaatgtgg

SEQ ID NO: 400276 - DNA, 15 bp, Homo sapiens
gtaaagaaaaatgtg

SEQ ID NO: 400277 - DNA, 15 bp, Homo sapiens
ggtaaagaaaaatgt

SEQ ID NO: 400278 - DNA, 15 bp, Homo sapiens
aggtaaagaaaaatg

SEQ ID NO: 400279 - DNA, 15 bp, Homo sapiens
caggtaaagaaaaat

SEQ ID NO: 400280 - DNA, 15 bp, Homo sapiens
acaggtaaagaaaaa

SEQ ID NO: 400281 - DNA, 15 bp, Homo sapiens
aacaggtaaagaaaa

SEQ ID NO: 400282 - DNA, 15 bp, Homo sapiens
aaacaggtaaagaaa

SEQ ID NO: 400283 - DNA, 15 bp, Homo sapiens
taaacaggtaaagaa

SEQ ID NO: 400284 - DNA, 15 bp, Homo sapiens
ataaacaggtaaaga

SEQ ID NO: 400285 - DNA, 15 bp, Homo sapiens
gataaacaggtaaag

SEQ ID NO: 400286 - DNA, 15 bp, Homo sapiens
agataaacaggtaaa

SEQ ID NO: 400287 - DNA, 15 bp, Homo sapiens
cagataaacaggtaa

SEQ ID NO: 400288 - DNA, 15 bp, Homo sapiens
acagataaacaggta

SEQ ID NO: 400289 - DNA, 15 bp, Homo sapiens
aacagataaacaggt

SEQ ID NO: 400290 - DNA, 15 bp, Homo sapiens
caacagataaacagg

SEQ ID NO: 400291 - DNA, 15 bp, Homo sapiens
tcaacagataaacag

SEQ ID NO: 400292 - DNA, 15 bp, Homo sapiens
atcaacagataaaca

SEQ ID NO: 400293 - DNA, 15 bp, Homo sapiens
catcaacagataaac

SEQ ID NO: 400294 - DNA, 15 bp, Homo sapiens
ccatcaacagataaa

SEQ ID NO: 400295 - DNA, 15 bp, Homo sapiens
tccatcaacagataa

SEQ ID NO: 400296 - DNA, 15 bp, Homo sapiens
gtccatcaacagata

SEQ ID NO: 400297 - DNA, 15 bp, Homo sapiens
tgtccatcaacagat

SEQ ID NO: 400298 - DNA, 15 bp, Homo sapiens
gtgtccatcaacaga

SEQ ID NO: 400299 - DNA, 15 bp, Homo sapiens
agtgtccatcaacag

SEQ ID NO: 400300 - DNA, 15 bp, Homo sapiens
aagtgtccatcaaca

SEQ ID NO: 400301 - DNA, 15 bp, Homo sapiens
taagtgtccatcaac

SEQ ID NO: 400302 - DNA, 15 bp, Homo sapiens
ctaagtgtccatcaa

SEQ ID NO: 400303 - DNA, 15 bp, Homo sapiens
cctaagtgtccatca

SEQ ID NO: 400304 - DNA, 15 bp, Homo sapiens
acctaagtgtccatc

SEQ ID NO: 400305 - DNA, 15 bp, Homo sapiens
aacctaagtgtccat

SEQ ID NO: 400306 - DNA, 15 bp, Homo sapiens
caacctaagtgtcca

SEQ ID NO: 400307 - DNA, 15 bp, Homo sapiens
gcaacctaagtgtcc

SEQ ID NO: 400308 - DNA, 15 bp, Homo sapiens
agcaacctaagtgtc

SEQ ID NO: 400309 - DNA, 15 bp, Homo sapiens
aagcaacctaagtgt

SEQ ID NO: 400310 - DNA, 15 bp, Homo sapiens
gaagcaacctaagtg

SEQ ID NO: 400311 - DNA, 15 bp, Homo sapiens
ggaagcaacctaagt

SEQ ID NO: 400312 - DNA, 15 bp, Homo sapiens
tggaagcaacctaag

SEQ ID NO: 400313 - DNA, 15 bp, Homo sapiens
ttggaagcaacctaa

SEQ ID NO: 400314 - DNA, 15 bp, Homo sapiens
tttggaagcaaccta

SEQ ID NO: 400315 - DNA, 15 bp, Homo sapiens
atttggaagcaacct

SEQ ID NO: 400316 - DNA, 15 bp, Homo sapiens
gatttggaagcaacc

SEQ ID NO: 400317 - DNA, 15 bp, Homo sapiens
agatttggaagcaac

SEQ ID NO: 400318 - DNA, 15 bp, Homo sapiens
aagatttggaagcaa

SEQ ID NO: 400319 - DNA, 15 bp, Homo sapiens
taagatttggaagca

SEQ ID NO: 400320 - DNA, 15 bp, Homo sapiens
ctaagatttggaagc

SEQ ID NO: 400321 - DNA, 15 bp, Homo sapiens
gctaagatttggaag

SEQ ID NO: 400322 - DNA, 15 bp, Homo sapiens
agctaagatttggaa

SEQ ID NO: 400323 - DNA, 15 bp, Homo sapiens
tagctaagatttgga

SEQ ID NO: 400324 - DNA, 15 bp, Homo sapiens
atagctaagatttgg

SEQ ID NO: 400325 - DNA, 15 bp, Homo sapiens
aatagctaagatttg

SEQ ID NO: 400326 - DNA, 15 bp, Homo sapiens
caatagctaagattt

SEQ ID NO: 400327 - DNA, 15 bp, Homo sapiens
acaatagctaagatt

SEQ ID NO: 400328 - DNA, 15 bp, Homo sapiens
tacaatagctaagat

SEQ ID NO: 400329 - DNA, 15 bp, Homo sapiens
ttacaatagctaaga

SEQ ID NO: 400330 - DNA, 15 bp, Homo sapiens
tttacaatagctaag

SEQ ID NO: 400331 - DNA, 15 bp, Homo sapiens
gtttacaatagctaa

SEQ ID NO: 400332 - DNA, 15 bp, Homo sapiens
ggtttacaatagcta

SEQ ID NO: 400333 - DNA, 15 bp, Homo sapiens
tggtttacaatagct

SEQ ID NO: 400334 - DNA, 15 bp, Homo sapiens
atggtttacaatagc

SEQ ID NO: 400335 - DNA, 15 bp, Homo sapiens
catggtttacaatag

SEQ ID NO: 400336 - DNA, 15 bp, Homo sapiens
gcatggtttacaata

SEQ ID NO: 400337 - DNA, 15 bp, Homo sapiens
agcatggtttacaat

SEQ ID NO: 400338 - DNA, 15 bp, Homo sapiens
cagcatggtttacaa

SEQ ID NO: 400339 - DNA, 15 bp, Homo sapiens
gcagcatggtttaca

SEQ ID NO: 400340 - DNA, 15 bp, Homo sapiens
cgcagcatggtttac

SEQ ID NO: 400341 - DNA, 15 bp, Homo sapiens
tcgcagcatggttta

SEQ ID NO: 400342 - DNA, 15 bp, Homo sapiens
gtcgcagcatggttt

SEQ ID NO: 400343 - DNA, 15 bp, Homo sapiens
tgtcgcagcatggtt

SEQ ID NO: 400344 - DNA, 15 bp, Homo sapiens
ttgtcgcagcatggt

SEQ ID NO: 400345 - DNA, 15 bp, Homo sapiens
tttgtcgcagcatgg

SEQ ID NO: 400346 - DNA, 15 bp, Homo sapiens
gtttgtcgcagcatg

SEQ ID NO: 400347 - DNA, 15 bp, Homo sapiens
tgtttgtcgcagcat

SEQ ID NO: 400348 - DNA, 15 bp, Homo sapiens
gtgtttgtcgcagca

SEQ ID NO: 400349 - DNA, 15 bp, Homo sapiens
tgtgtttgtcgcagc

SEQ ID NO: 400350 - DNA, 15 bp, Homo sapiens
ctgtgtttgtcgcag

SEQ ID NO: 400351 - DNA, 15 bp, Homo sapiens
cctgtgtttgtcgca

SEQ ID NO: 400352 - DNA, 15 bp, Homo sapiens
tcctgtgtttgtcgc

SEQ ID NO: 400353 - DNA, 15 bp, Homo sapiens
ctcctgtgtttgtcg

SEQ ID NO: 400354 - DNA, 15 bp, Homo sapiens
actcctgtgtttgtc

SEQ ID NO: 400355 - DNA, 15 bp, Homo sapiens
cactcctgtgtttgt

SEQ ID NO: 400356 - DNA, 15 bp, Homo sapiens
gcactcctgtgtttg

SEQ ID NO: 400357 - DNA, 15 bp, Homo sapiens
tgcactcctgtgttt

SEQ ID NO: 400358 - DNA, 15 bp, Homo sapiens
ttgcactcctgtgtt

SEQ ID NO: 400359 - DNA, 15 bp, Homo sapiens
gttgcactcctgtgt

SEQ ID NO: 400360 - DNA, 15 bp, Homo sapiens
agttgcactcctgtg

SEQ ID NO: 400361 - DNA, 15 bp, Homo sapiens
tagttgcactcctgt

SEQ ID NO: 400362 - DNA, 15 bp, Homo sapiens
atagttgcactcctg

SEQ ID NO: 400363 - DNA, 15 bp, Homo sapiens
gatagttgcactcct

SEQ ID NO: 400364 - DNA, 15 bp, Homo sapiens
agatagttgcactcc

SEQ ID NO: 400365 - DNA, 15 bp, Homo sapiens
gagatagttgcactc

SEQ ID NO: 400366 - DNA, 15 bp, Homo sapiens
agagatagttgcact

SEQ ID NO: 400367 - DNA, 15 bp, Homo sapiens
aagagatagttgcac

SEQ ID NO: 400368 - DNA, 15 bp, Homo sapiens
gaagagatagttgca

SEQ ID NO: 400369 - DNA, 15 bp, Homo sapiens
tgaagagatagttgc

SEQ ID NO: 400370 - DNA, 15 bp, Homo sapiens
ttgaagagatagttg

SEQ ID NO: 400371 - DNA, 15 bp, Homo sapiens
attgaagagatagtt

SEQ ID NO: 400372 - DNA, 15 bp, Homo sapiens
tattgaagagatagt

SEQ ID NO: 400373 - DNA, 15 bp, Homo sapiens
atattgaagagatag

SEQ ID NO: 400374 - DNA, 15 bp, Homo sapiens
tatattgaagagata

SEQ ID NO: 400375 - DNA, 15 bp, Homo sapiens
gtatattgaagagat

SEQ ID NO: 400376 - DNA, 15 bp, Homo sapiens
agtatattgaagaga

SEQ ID NO: 400377 - DNA, 15 bp, Homo sapiens
cagtatattgaagag

SEQ ID NO: 400378 - DNA, 15 bp, Homo sapiens
tcagtatattgaaga

SEQ ID NO: 400379 - DNA, 15 bp, Homo sapiens
atcagtatattgaag

SEQ ID NO: 400380 - DNA, 15 bp, Homo sapiens
aatcagtatattgaa

SEQ ID NO: 400381 - DNA, 15 bp, Homo sapiens
aaatcagtatattga

SEQ ID NO: 400382 - DNA, 15 bp, Homo sapiens
gaaatcagtatattg

SEQ ID NO: 400383 - DNA, 15 bp, Homo sapiens
ggaaatcagtatatt

SEQ ID NO: 400384 - DNA, 15 bp, Homo sapiens
aggaaatcagtatat

SEQ ID NO: 400385 - DNA, 15 bp, Homo sapiens
aaggaaatcagtata

SEQ ID NO: 400386 - DNA, 15 bp, Homo sapiens
aaaggaaatcagtat

SEQ ID NO: 400387 - DNA, 15 bp, Homo sapiens
gaaaggaaatcagta

SEQ ID NO: 400388 - DNA, 15 bp, Homo sapiens
agaaaggaaatcagt

SEQ ID NO: 400389 - DNA, 15 bp, Homo sapiens
aagaaaggaaatcag

SEQ ID NO: 400390 - DNA, 15 bp, Homo sapiens
aaagaaaggaaatca

SEQ ID NO: 400391 - DNA, 15 bp, Homo sapiens
aaaagaaaggaaatc

SEQ ID NO: 400392 - DNA, 15 bp, Homo sapiens
caaaagaaaggaaat

SEQ ID NO: 400393 - DNA, 15 bp, Homo sapiens
ccaaaagaaaggaaa

SEQ ID NO: 400394 - DNA, 15 bp, Homo sapiens
cccaaaagaaaggaa

SEQ ID NO: 400395 - DNA, 15 bp, Homo sapiens
acccaaaagaaagga

SEQ ID NO: 400396 - DNA, 15 bp, Homo sapiens
tacccaaaagaaagg

SEQ ID NO: 400397 - DNA, 15 bp, Homo sapiens
gtacccaaaagaaag

SEQ ID NO: 400398 - DNA, 15 bp, Homo sapiens
tgtacccaaaagaaa

SEQ ID NO: 400399 - DNA, 15 bp, Homo sapiens
atgtacccaaaagaa

SEQ ID NO: 400400 - DNA, 15 bp, Homo sapiens
catgtacccaaaaga

SEQ ID NO: 400401 - DNA, 15 bp, Homo sapiens
gcatgtacccaaaag

SEQ ID NO: 400402 - DNA, 15 bp, Homo sapiens
ggcatgtacccaaaa

SEQ ID NO: 400403 - DNA, 15 bp, Homo sapiens
gggcatgtacccaaa

SEQ ID NO: 400404 - DNA, 15 bp, Homo sapiens
tgggcatgtacccaa

SEQ ID NO: 400405 - DNA, 15 bp, Homo sapiens
ctgggcatgtaccca

SEQ ID NO: 400406 - DNA, 15 bp, Homo sapiens
gctgggcatgtaccc

SEQ ID NO: 400407 - DNA, 15 bp, Homo sapiens
tgctgggcatgtacc

SEQ ID NO: 400408 - DNA, 15 bp, Homo sapiens
ctgctgggcatgtac

SEQ ID NO: 400409 - DNA, 15 bp, Homo sapiens
actgctgggcatgta

SEQ ID NO: 400410 - DNA, 15 bp, Homo sapiens
cactgctgggcatgt

SEQ ID NO: 400411 - DNA, 15 bp, Homo sapiens
ccactgctgggcatg

SEQ ID NO: 400412 - DNA, 15 bp, Homo sapiens
cccactgctgggcat

SEQ ID NO: 400413 - DNA, 15 bp, Homo sapiens
tcccactgctgggca

SEQ ID NO: 400414 - DNA, 15 bp, Homo sapiens
atcccactgctgggc

SEQ ID NO: 400415 - DNA, 15 bp, Homo sapiens
aatcccactgctggg

SEQ ID NO: 400416 - DNA, 15 bp, Homo sapiens
caatcccactgctgg

SEQ ID NO: 400417 - DNA, 15 bp, Homo sapiens
gcaatcccactgctg

SEQ ID NO: 400418 - DNA, 15 bp, Homo sapiens
agcaatcccactgct

SEQ ID NO: 400419 - DNA, 15 bp, Homo sapiens
cagcaatcccactgc

SEQ ID NO: 400420 - DNA, 15 bp, Homo sapiens
ccagcaatcccactg

SEQ ID NO: 400421 - DNA, 15 bp, Homo sapiens
tccagcaatcccact

SEQ ID NO: 400422 - DNA, 15 bp, Homo sapiens
atccagcaatcccac

SEQ ID NO: 400423 - DNA, 15 bp, Homo sapiens
gatccagcaatccca

SEQ ID NO: 400424 - DNA, 15 bp, Homo sapiens
cgatccagcaatccc

SEQ ID NO: 400425 - DNA, 15 bp, Homo sapiens
acgatccagcaatcc

SEQ ID NO: 400426 - DNA, 15 bp, Homo sapiens
tacgatccagcaatc

SEQ ID NO: 400427 - DNA, 15 bp, Homo sapiens
atacgatccagcaat

SEQ ID NO: 400428 - DNA, 15 bp, Homo sapiens
catacgatccagcaa

SEQ ID NO: 400429 - DNA, 15 bp, Homo sapiens
ccatacgatccagca

SEQ ID NO: 400430 - DNA, 15 bp, Homo sapiens
gccatacgatccagc

SEQ ID NO: 400431 - DNA, 15 bp, Homo sapiens
tgccatacgatccag

SEQ ID NO: 400432 - DNA, 15 bp, Homo sapiens
ctgccatacgatcca

SEQ ID NO: 400433 - DNA, 15 bp, Homo sapiens
gctgccatacgatcc

SEQ ID NO: 400434 - DNA, 15 bp, Homo sapiens
agctgccatacgatc

SEQ ID NO: 400435 - DNA, 15 bp, Homo sapiens
gagctgccatacgat

SEQ ID NO: 400436 - DNA, 15 bp, Homo sapiens
tgagctgccatacga

SEQ ID NO: 400437 - DNA, 15 bp, Homo sapiens
ttgagctgccatacg

SEQ ID NO: 400438 - DNA, 15 bp, Homo sapiens
attgagctgccatac

SEQ ID NO: 400439 - DNA, 15 bp, Homo sapiens
aattgagctgccata

SEQ ID NO: 400440 - DNA, 15 bp, Homo sapiens
aaattgagctgccat

SEQ ID NO: 400441 - DNA, 15 bp, Homo sapiens
aaaattgagctgcca

SEQ ID NO: 400442 - DNA, 15 bp, Homo sapiens
gaaaattgagctgcc

SEQ ID NO: 400443 - DNA, 15 bp, Homo sapiens
tgaaaattgagctgc

SEQ ID NO: 400444 - DNA, 15 bp, Homo sapiens
ctgaaaattgagctg

SEQ ID NO: 400445 - DNA, 15 bp, Homo sapiens
actgaaaattgagct

SEQ ID NO: 400446 - DNA, 15 bp, Homo sapiens
aactgaaaattgagc

SEQ ID NO: 400447 - DNA, 15 bp, Homo sapiens
aaactgaaaattgag

SEQ ID NO: 400448 - DNA, 15 bp, Homo sapiens
aaaactgaaaattga

SEQ ID NO: 400449 - DNA, 15 bp, Homo sapiens
aaaaactgaaaattg

SEQ ID NO: 400450 - DNA, 15 bp, Homo sapiens
aaaaaactgaaaatt

SEQ ID NO: 400451 - DNA, 15 bp, Homo sapiens
aaaaaaactgaaaat

SEQ ID NO: 400452 - DNA, 15 bp, Homo sapiens
caaaaaaactgaaaa

SEQ ID NO: 400453 - DNA, 15 bp, Homo sapiens
tcaaaaaaactgaaa

SEQ ID NO: 400454 - DNA, 15 bp, Homo sapiens
ctcaaaaaaactgaa

SEQ ID NO: 400455 - DNA, 15 bp, Homo sapiens
cctcaaaaaaactga

SEQ ID NO: 400456 - DNA, 15 bp, Homo sapiens
tcctcaaaaaaactg

SEQ ID NO: 400457 - DNA, 15 bp, Homo sapiens
ttcctcaaaaaaact

SEQ ID NO: 400458 - DNA, 15 bp, Homo sapiens
gttcctcaaaaaaac

SEQ ID NO: 400459 - DNA, 15 bp, Homo sapiens
ggttcctcaaaaaaa

SEQ ID NO: 400460 - DNA, 15 bp, Homo sapiens
aggttcctcaaaaaa

SEQ ID NO: 400461 - DNA, 15 bp, Homo sapiens
gaggttcctcaaaaa

SEQ ID NO: 400462 - DNA, 15 bp, Homo sapiens
ggaggttcctcaaaa

SEQ ID NO: 400463 - DNA, 15 bp, Homo sapiens
tggaggttcctcaaa

SEQ ID NO: 400464 - DNA, 15 bp, Homo sapiens
ttggaggttcctcaa

SEQ ID NO: 400465 - DNA, 15 bp, Homo sapiens
tttggaggttcctca

SEQ ID NO: 400466 - DNA, 15 bp, Homo sapiens
atttggaggttcctc

SEQ ID NO: 400467 - DNA, 15 bp, Homo sapiens
aatttggaggttcct

SEQ ID NO: 400468 - DNA, 15 bp, Homo sapiens
caatttggaggttcc

SEQ ID NO: 400469 - DNA, 15 bp, Homo sapiens
acaatttggaggttc

SEQ ID NO: 400470 - DNA, 15 bp, Homo sapiens
aacaatttggaggtt

SEQ ID NO: 400471 - DNA, 15 bp, Homo sapiens
gaacaatttggaggt

SEQ ID NO: 400472 - DNA, 15 bp, Homo sapiens
ggaacaatttggagg

SEQ ID NO: 400473 - DNA, 15 bp, Homo sapiens
gggaacaatttggag

SEQ ID NO: 400474 - DNA, 15 bp, Homo sapiens
ggggaacaatttgga

SEQ ID NO: 400475 - DNA, 15 bp, Homo sapiens
tggggaacaatttgg

SEQ ID NO: 400476 - DNA, 15 bp, Homo sapiens
atggggaacaatttg

SEQ ID NO: 400477 - DNA, 15 bp, Homo sapiens
tatggggaacaattt

SEQ ID NO: 400478 - DNA, 15 bp, Homo sapiens
gtatggggaacaatt

SEQ ID NO: 400479 - DNA, 15 bp, Homo sapiens
agtatggggaacaat

SEQ ID NO: 400480 - DNA, 15 bp, Homo sapiens
cagtatggggaacaa

SEQ ID NO: 400481 - DNA, 15 bp, Homo sapiens
acagtatggggaaca

SEQ ID NO: 400482 - DNA, 15 bp, Homo sapiens
aacagtatggggaac

SEQ ID NO: 400483 - DNA, 15 bp, Homo sapiens
aaacagtatggggaa

SEQ ID NO: 400484 - DNA, 15 bp, Homo sapiens
aaaacagtatgggga

SEQ ID NO: 400485 - DNA, 15 bp, Homo sapiens
aaaaacagtatgggg

SEQ ID NO: 400486 - DNA, 15 bp, Homo sapiens
taaaaacagtatggg

SEQ ID NO: 400487 - DNA, 15 bp, Homo sapiens
gtaaaaacagtatgg

SEQ ID NO: 400488 - DNA, 15 bp, Homo sapiens
agtaaaaacagtatg

SEQ ID NO: 400489 - DNA, 15 bp, Homo sapiens
tagtaaaaacagtat

SEQ ID NO: 400490 - DNA, 15 bp, Homo sapiens
ttagtaaaaacagta

SEQ ID NO: 400491 - DNA, 15 bp, Homo sapiens
attagtaaaaacagt

SEQ ID NO: 400492 - DNA, 15 bp, Homo sapiens
aattagtaaaaacag

SEQ ID NO: 400493 - DNA, 15 bp, Homo sapiens
aaattagtaaaaaca

SEQ ID NO: 400494 - DNA, 15 bp, Homo sapiens
taaattagtaaaaac

SEQ ID NO: 400495 - DNA, 15 bp, Homo sapiens
gtaaattagtaaaaa

SEQ ID NO: 400496 - DNA, 15 bp, Homo sapiens
tgtaaattagtaaaa

SEQ ID NO: 400497 - DNA, 15 bp, Homo sapiens
atgtaaattagtaaa

SEQ ID NO: 400498 - DNA, 15 bp, Homo sapiens
aatgtaaattagtaa

SEQ ID NO: 400499 - DNA, 15 bp, Homo sapiens
gaatgtaaattagta

SEQ ID NO: 400500 - DNA, 15 bp, Homo sapiens
ggaatgtaaattagt

SEQ ID NO: 400501 - DNA, 15 bp, Homo sapiens
gggaatgtaaattag

SEQ ID NO: 400502 - DNA, 15 bp, Homo sapiens
tgggaatgtaaatta

SEQ ID NO: 400503 - DNA, 15 bp, Homo sapiens
gtgggaatgtaaatt

SEQ ID NO: 400504 - DNA, 15 bp, Homo sapiens
tgtgggaatgtaaat

SEQ ID NO: 400505 - DNA, 15 bp, Homo sapiens
ttgtgggaatgtaaa

SEQ ID NO: 400506 - DNA, 15 bp, Homo sapiens
tttgtgggaatgtaa

SEQ ID NO: 400507 - DNA, 15 bp, Homo sapiens
gtttgtgggaatgta

SEQ ID NO: 400508 - DNA, 15 bp, Homo sapiens
tgtttgtgggaatgt

SEQ ID NO: 400509 - DNA, 15 bp, Homo sapiens
ttgtttgtgggaatg

SEQ ID NO: 400510 - DNA, 15 bp, Homo sapiens
attgtttgtgggaat

SEQ ID NO: 400511 - DNA, 15 bp, Homo sapiens
cattgtttgtgggaa

SEQ ID NO: 400512 - DNA, 15 bp, Homo sapiens
acattgtttgtggga

SEQ ID NO: 400513 - DNA, 15 bp, Homo sapiens
tacattgtttgtggg

SEQ ID NO: 400514 - DNA, 15 bp, Homo sapiens
gtacattgtttgtgg

SEQ ID NO: 400515 - DNA, 15 bp, Homo sapiens
tgtacattgtttgtg

SEQ ID NO: 400516 - DNA, 15 bp, Homo sapiens
ttgtacattgtttgt

SEQ ID NO: 400517 - DNA, 15 bp, Homo sapiens
gttgtacattgtttg

SEQ ID NO: 400518 - DNA, 15 bp, Homo sapiens
tgttgtacattgttt

SEQ ID NO: 400519 - DNA, 15 bp, Homo sapiens
ctgttgtacattgtt

SEQ ID NO: 400520 - DNA, 15 bp, Homo sapiens
actgttgtacattgt

SEQ ID NO: 400521 - DNA, 15 bp, Homo sapiens
aactgttgtacattg

SEQ ID NO: 400522 - DNA, 15 bp, Homo sapiens
gaactgttgtacatt

SEQ ID NO: 400523 - DNA, 15 bp, Homo sapiens
ggaactgttgtacat

SEQ ID NO: 400524 - DNA, 15 bp, Homo sapiens
gggaactgttgtaca

SEQ ID NO: 400525 - DNA, 15 bp, Homo sapiens
agggaactgttgtac

SEQ ID NO: 400526 - DNA, 15 bp, Homo sapiens
aagggaactgttgta

SEQ ID NO: 400527 - DNA, 15 bp, Homo sapiens
aaagggaactgttgt

SEQ ID NO: 400528 - DNA, 15 bp, Homo sapiens
aaaagggaactgttg

SEQ ID NO: 400529 - DNA, 15 bp, Homo sapiens
gaaaagggaactgtt

SEQ ID NO: 400530 - DNA, 15 bp, Homo sapiens
agaaaagggaactgt

SEQ ID NO: 400531 - DNA, 15 bp, Homo sapiens
gagaaaagggaactg

SEQ ID NO: 400532 - DNA, 15 bp, Homo sapiens
ggagaaaagggaact

SEQ ID NO: 400533 - DNA, 15 bp, Homo sapiens
tggagaaaagggaac

SEQ ID NO: 400534 - DNA, 15 bp, Homo sapiens
gtggagaaaagggaa

SEQ ID NO: 400535 - DNA, 15 bp, Homo sapiens
tgtggagaaaaggga

SEQ ID NO: 400536 - DNA, 15 bp, Homo sapiens
atgtggagaaaaggg

SEQ ID NO: 400537 - DNA, 15 bp, Homo sapiens
gatgtggagaaaagg

SEQ ID NO: 400538 - DNA, 15 bp, Homo sapiens
ggatgtggagaaaag

SEQ ID NO: 400539 - DNA, 15 bp, Homo sapiens
aggatgtggagaaaa

SEQ ID NO: 400540 - DNA, 15 bp, Homo sapiens
gaggatgtggagaaa

SEQ ID NO: 400541 - DNA, 15 bp, Homo sapiens
cgaggatgtggagaa

SEQ ID NO: 400542 - DNA, 15 bp, Homo sapiens
gcgaggatgtggaga

SEQ ID NO: 400543 - DNA, 15 bp, Homo sapiens
ggcgaggatgtggag

SEQ ID NO: 400544 - DNA, 15 bp, Homo sapiens
tggcgaggatgtgga

SEQ ID NO: 400545 - DNA, 15 bp, Homo sapiens
ctggcgaggatgtgg

SEQ ID NO: 400546 - DNA, 15 bp, Homo sapiens
gctggcgaggatgtg

SEQ ID NO: 400547 - DNA, 15 bp, Homo sapiens
tgctggcgaggatgt

SEQ ID NO: 400548 - DNA, 15 bp, Homo sapiens
atgctggcgaggatg

SEQ ID NO: 400549 - DNA, 15 bp, Homo sapiens
aatgctggcgaggat

SEQ ID NO: 400550 - DNA, 15 bp, Homo sapiens
aaatgctggcgagga

SEQ ID NO: 400551 - DNA, 15 bp, Homo sapiens
caaatgctggcgagg

SEQ ID NO: 400552 - DNA, 15 bp, Homo sapiens
acaaatgctggcgag

SEQ ID NO: 400553 - DNA, 15 bp, Homo sapiens
aacaaatgctggcga

SEQ ID NO: 400554 - DNA, 15 bp, Homo sapiens
taacaaatgctggcg

SEQ ID NO: 400555 - DNA, 15 bp, Homo sapiens
ataacaaatgctggc

SEQ ID NO: 400556 - DNA, 15 bp, Homo sapiens
aataacaaatgctgg

SEQ ID NO: 400557 - DNA, 15 bp, Homo sapiens
caataacaaatgctg

SEQ ID NO: 400558 - DNA, 15 bp, Homo sapiens
gcaataacaaatgct

SEQ ID NO: 400559 - DNA, 15 bp, Homo sapiens
ggcaataacaaatgc

SEQ ID NO: 400560 - DNA, 15 bp, Homo sapiens
aggcaataacaaatg

SEQ ID NO: 400561 - DNA, 15 bp, Homo sapiens
caggcaataacaaat

SEQ ID NO: 400562 - DNA, 15 bp, Homo sapiens
acaggcaataacaaa

SEQ ID NO: 400563 - DNA, 15 bp, Homo sapiens
aacaggcaataacaa

SEQ ID NO: 400564 - DNA, 15 bp, Homo sapiens
aaacaggcaataaca

SEQ ID NO: 400565 - DNA, 15 bp, Homo sapiens
aaaacaggcaataac

SEQ ID NO: 400566 - DNA, 15 bp, Homo sapiens
aaaaacaggcaataa

SEQ ID NO: 400567 - DNA, 15 bp, Homo sapiens
aaaaaacaggcaata

SEQ ID NO: 400568 - DNA, 15 bp, Homo sapiens
caaaaaacaggcaat

SEQ ID NO: 400569 - DNA, 15 bp, Homo sapiens
ccaaaaaacaggcaa

SEQ ID NO: 400570 - DNA, 15 bp, Homo sapiens
gccaaaaaacaggca

SEQ ID NO: 400571 - DNA, 15 bp, Homo sapiens
agccaaaaaacaggc

SEQ ID NO: 400572 - DNA, 15 bp, Homo sapiens
tagccaaaaaacagg

SEQ ID NO: 400573 - DNA, 15 bp, Homo sapiens
gtagccaaaaaacag

SEQ ID NO: 400574 - DNA, 15 bp, Homo sapiens
tgtagccaaaaaaca

SEQ ID NO: 400575 - DNA, 15 bp, Homo sapiens
ttgtagccaaaaaac

SEQ ID NO: 400576 - DNA, 15 bp, Homo sapiens
tttgtagccaaaaaa

SEQ ID NO: 400577 - DNA, 15 bp, Homo sapiens
gtttgtagccaaaaa

SEQ ID NO: 400578 - DNA, 15 bp, Homo sapiens
ggtttgtagccaaaa

SEQ ID NO: 400579 - DNA, 15 bp, Homo sapiens
tggtttgtagccaaa

SEQ ID NO: 400580 - DNA, 15 bp, Homo sapiens
atggtttgtagccaa

SEQ ID NO: 400581 - DNA, 15 bp, Homo sapiens
aatggtttgtagcca

SEQ ID NO: 400582 - DNA, 15 bp, Homo sapiens
aaatggtttgtagcc

SEQ ID NO: 400583 - DNA, 15 bp, Homo sapiens
aaaatggtttgtagc

SEQ ID NO: 400584 - DNA, 15 bp, Homo sapiens
taaaatggtttgtag

SEQ ID NO: 400585 - DNA, 15 bp, Homo sapiens
ttaaaatggtttgta

SEQ ID NO: 400586 - DNA, 15 bp, Homo sapiens
gttaaaatggtttgt

SEQ ID NO: 400587 - DNA, 15 bp, Homo sapiens
agttaaaatggtttg

SEQ ID NO: 400588 - DNA, 15 bp, Homo sapiens
cagttaaaatggttt

SEQ ID NO: 400589 - DNA, 15 bp, Homo sapiens
acagttaaaatggtt

SEQ ID NO: 400590 - DNA, 15 bp, Homo sapiens
cacagttaaaatggt

SEQ ID NO: 400591 - DNA, 15 bp, Homo sapiens
ccacagttaaaatgg

SEQ ID NO: 400592 - DNA, 15 bp, Homo sapiens
accacagttaaaatg

SEQ ID NO: 400593 - DNA, 15 bp, Homo sapiens
caccacagttaaaat

SEQ ID NO: 400594 - DNA, 15 bp, Homo sapiens
tcaccacagttaaaa

SEQ ID NO: 400595 - DNA, 15 bp, Homo sapiens
gtcaccacagttaaa

SEQ ID NO: 400596 - DNA, 15 bp, Homo sapiens
tgtcaccacagttaa

SEQ ID NO: 400597 - DNA, 15 bp, Homo sapiens
atgtcaccacagtta

SEQ ID NO: 400598 - DNA, 15 bp, Homo sapiens
catgtcaccacagtt

SEQ ID NO: 400599 - DNA, 15 bp, Homo sapiens
tcatgtcaccacagt

SEQ ID NO: 400600 - DNA, 15 bp, Homo sapiens
atcatgtcaccacag

SEQ ID NO: 400601 - DNA, 15 bp, Homo sapiens
tatcatgtcaccaca

SEQ ID NO: 400602 - DNA, 15 bp, Homo sapiens
atatcatgtcaccac

SEQ ID NO: 400603 - DNA, 15 bp, Homo sapiens
catatcatgtcacca

SEQ ID NO: 400604 - DNA, 15 bp, Homo sapiens
acatatcatgtcacc

SEQ ID NO: 400605 - DNA, 15 bp, Homo sapiens
gacatatcatgtcac

SEQ ID NO: 400606 - DNA, 15 bp, Homo sapiens
tgacatatcatgtca

SEQ ID NO: 400607 - DNA, 15 bp, Homo sapiens
atgacatatcatgtc

SEQ ID NO: 400608 - DNA, 15 bp, Homo sapiens
aatgacatatcatgt

SEQ ID NO: 400609 - DNA, 15 bp, Homo sapiens
taatgacatatcatg

SEQ ID NO: 400610 - DNA, 15 bp, Homo sapiens
ataatgacatatcat

SEQ ID NO: 400611 - DNA, 15 bp, Homo sapiens
tataatgacatatca

SEQ ID NO: 400612 - DNA, 15 bp, Homo sapiens
ctataatgacatatc

SEQ ID NO: 400613 - DNA, 15 bp, Homo sapiens
actataatgacatat

SEQ ID NO: 400614 - DNA, 15 bp, Homo sapiens
aactataatgacata

SEQ ID NO: 400615 - DNA, 15 bp, Homo sapiens
aaactataatgacat

SEQ ID NO: 400616 - DNA, 15 bp, Homo sapiens
aaaactataatgaca

SEQ ID NO: 400617 - DNA, 15 bp, Homo sapiens
caaaactataatgac

SEQ ID NO: 400618 - DNA, 15 bp, Homo sapiens
gcaaaactataatga

SEQ ID NO: 400619 - DNA, 15 bp, Homo sapiens
tgcaaaactataatg

SEQ ID NO: 400620 - DNA, 15 bp, Homo sapiens
atgcaaaactataat

SEQ ID NO: 400621 - DNA, 15 bp, Homo sapiens
aatgcaaaactataa

SEQ ID NO: 400622 - DNA, 15 bp, Homo sapiens
aaatgcaaaactata

SEQ ID NO: 400623 - DNA, 15 bp, Homo sapiens
gaaatgcaaaactat

SEQ ID NO: 400624 - DNA, 15 bp, Homo sapiens
agaaatgcaaaacta

SEQ ID NO: 400625 - DNA, 15 bp, Homo sapiens
gagaaatgcaaaact

SEQ ID NO: 400626 - DNA, 15 bp, Homo sapiens
agagaaatgcaaaac

SEQ ID NO: 400627 - DNA, 15 bp, Homo sapiens
cagagaaatgcaaaa

SEQ ID NO: 400628 - DNA, 15 bp, Homo sapiens
tcagagaaatgcaaa

SEQ ID NO: 400629 - DNA, 15 bp, Homo sapiens
atcagagaaatgcaa

SEQ ID NO: 400630 - DNA, 15 bp, Homo sapiens
catcagagaaatgca

SEQ ID NO: 400631 - DNA, 15 bp, Homo sapiens
tcatcagagaaatgc

SEQ ID NO: 400632 - DNA, 15 bp, Homo sapiens
atcatcagagaaatg

SEQ ID NO: 400633 - DNA, 15 bp, Homo sapiens
gatcatcagagaaat

SEQ ID NO: 400634 - DNA, 15 bp, Homo sapiens
tgatcatcagagaaa

SEQ ID NO: 400635 - DNA, 15 bp, Homo sapiens
ctgatcatcagagaa

SEQ ID NO: 400636 - DNA, 15 bp, Homo sapiens
actgatcatcagaga

SEQ ID NO: 400637 - DNA, 15 bp, Homo sapiens
cactgatcatcagag

SEQ ID NO: 400638 - DNA, 15 bp, Homo sapiens
tcactgatcatcaga

SEQ ID NO: 400639 - DNA, 15 bp, Homo sapiens
atcactgatcatcag

SEQ ID NO: 400640 - DNA, 15 bp, Homo sapiens
catcactgatcatca

SEQ ID NO: 400641 - DNA, 15 bp, Homo sapiens
acatcactgatcatc

SEQ ID NO: 400642 - DNA, 15 bp, Homo sapiens
aacatcactgatcat

SEQ ID NO: 400643 - DNA, 15 bp, Homo sapiens
caacatcactgatca

SEQ ID NO: 400644 - DNA, 15 bp, Homo sapiens
tcaacatcactgatc

SEQ ID NO: 400645 - DNA, 15 bp, Homo sapiens
ctcaacatcactgat

SEQ ID NO: 400646 - DNA, 15 bp, Homo sapiens
gctcaacatcactga

SEQ ID NO: 400647 - DNA, 15 bp, Homo sapiens
tgctcaacatcactg

SEQ ID NO: 400648 - DNA, 15 bp, Homo sapiens
gtgctcaacatcact

SEQ ID NO: 400649 - DNA, 15 bp, Homo sapiens
ggtgctcaacatcac

SEQ ID NO: 400650 - DNA, 15 bp, Homo sapiens
aggtgctcaacatca

SEQ ID NO: 400651 - DNA, 15 bp, Homo sapiens
aaggtgctcaacatc

SEQ ID NO: 400652 - DNA, 15 bp, Homo sapiens
aaaggtgctcaacat

SEQ ID NO: 400653 - DNA, 15 bp, Homo sapiens
taaaggtgctcaaca

SEQ ID NO: 400654 - DNA, 15 bp, Homo sapiens
gtaaaggtgctcaac

SEQ ID NO: 400655 - DNA, 15 bp, Homo sapiens
tgtaaaggtgctcaa

SEQ ID NO: 400656 - DNA, 15 bp, Homo sapiens
atgtaaaggtgctca

SEQ ID NO: 400657 - DNA, 15 bp, Homo sapiens
tatgtaaaggtgctc

SEQ ID NO: 400658 - DNA, 15 bp, Homo sapiens
atatgtaaaggtgct

SEQ ID NO: 400659 - DNA, 15 bp, Homo sapiens
aatatgtaaaggtgc

SEQ ID NO: 400660 - DNA, 15 bp, Homo sapiens
gaatatgtaaaggtg

SEQ ID NO: 400661 - DNA, 15 bp, Homo sapiens
ggaatatgtaaaggt

SEQ ID NO: 400662 - DNA, 15 bp, Homo sapiens
aggaatatgtaaagg

SEQ ID NO: 400663 - DNA, 15 bp, Homo sapiens
caggaatatgtaaag

SEQ ID NO: 400664 - DNA, 15 bp, Homo sapiens
acaggaatatgtaaa

SEQ ID NO: 400665 - DNA, 15 bp, Homo sapiens
aacaggaatatgtaa

SEQ ID NO: 400666 - DNA, 15 bp, Homo sapiens
aaacaggaatatgta

SEQ ID NO: 400667 - DNA, 15 bp, Homo sapiens
caaacaggaatatgt

SEQ ID NO: 400668 - DNA, 15 bp, Homo sapiens
gcaaacaggaatatg

SEQ ID NO: 400669 - DNA, 15 bp, Homo sapiens
ggcaaacaggaatat

SEQ ID NO: 400670 - DNA, 15 bp, Homo sapiens
gggcaaacaggaata

SEQ ID NO: 400671 - DNA, 15 bp, Homo sapiens
agggcaaacaggaat

SEQ ID NO: 400672 - DNA, 15 bp, Homo sapiens
aagggcaaacaggaa

SEQ ID NO: 400673 - DNA, 15 bp, Homo sapiens
aaagggcaaacagga

SEQ ID NO: 400674 - DNA, 15 bp, Homo sapiens
aaaagggcaaacagg

SEQ ID NO: 400675 - DNA, 15 bp, Homo sapiens
aaaaagggcaaacag

SEQ ID NO: 400676 - DNA, 15 bp, Homo sapiens
aaaaaagggcaaaca

SEQ ID NO: 400677 - DNA, 15 bp, Homo sapiens
taaaaaagggcaaac

SEQ ID NO: 400678 - DNA, 15 bp, Homo sapiens
ataaaaaagggcaaa

SEQ ID NO: 400679 - DNA, 15 bp, Homo sapiens
cataaaaaagggcaa

SEQ ID NO: 400680 - DNA, 15 bp, Homo sapiens
tcataaaaaagggca

SEQ ID NO: 400681 - DNA, 15 bp, Homo sapiens
gtcataaaaaagggc

SEQ ID NO: 400682 - DNA, 15 bp, Homo sapiens
agtcataaaaaaggg

SEQ ID NO: 400683 - DNA, 15 bp, Homo sapiens
aagtcataaaaaagg

SEQ ID NO: 400684 - DNA, 15 bp, Homo sapiens
gaagtcataaaaaag

SEQ ID NO: 400685 - DNA, 15 bp, Homo sapiens
agaagtcataaaaaa

SEQ ID NO: 400686 - DNA, 15 bp, Homo sapiens
aagaagtcataaaaa

SEQ ID NO: 400687 - DNA, 15 bp, Homo sapiens
aaagaagtcataaaa

SEQ ID NO: 400688 - DNA, 15 bp, Homo sapiens
aaaagaagtcataaa

SEQ ID NO: 400689 - DNA, 15 bp, Homo sapiens
caaaagaagtcataa

SEQ ID NO: 400690 - DNA, 15 bp, Homo sapiens
tcaaaagaagtcata

SEQ ID NO: 400691 - DNA, 15 bp, Homo sapiens
ctcaaaagaagtcat

SEQ ID NO: 400692 - DNA, 15 bp, Homo sapiens
tctcaaaagaagtca

SEQ ID NO: 400693 - DNA, 15 bp, Homo sapiens
ttctcaaaagaagtc

SEQ ID NO: 400694 - DNA, 15 bp, Homo sapiens
tttctcaaaagaagt

SEQ ID NO: 400695 - DNA, 15 bp, Homo sapiens
atttctcaaaagaag

SEQ ID NO: 400696 - DNA, 15 bp, Homo sapiens
catttctcaaaagaa

SEQ ID NO: 400697 - DNA, 15 bp, Homo sapiens
acatttctcaaaaga

SEQ ID NO: 400698 - DNA, 15 bp, Homo sapiens
gacatttctcaaaag

SEQ ID NO: 400699 - DNA, 15 bp, Homo sapiens
agacatttctcaaaa

SEQ ID NO: 400700 - DNA, 15 bp, Homo sapiens
tagacatttctcaaa

SEQ ID NO: 400701 - DNA, 15 bp, Homo sapiens
atagacatttctcaa

SEQ ID NO: 400702 - DNA, 15 bp, Homo sapiens
aatagacatttctca

SEQ ID NO: 400703 - DNA, 15 bp, Homo sapiens
gaatagacatttctc

SEQ ID NO: 400704 - DNA, 15 bp, Homo sapiens
tgaatagacatttct

SEQ ID NO: 400705 - DNA, 15 bp, Homo sapiens
ttgaatagacatttc

SEQ ID NO: 400706 - DNA, 15 bp, Homo sapiens
tttgaatagacattt

SEQ ID NO: 400707 - DNA, 15 bp, Homo sapiens
atttgaatagacatt

SEQ ID NO: 400708 - DNA, 15 bp, Homo sapiens
gatttgaatagacat

SEQ ID NO: 400709 - DNA, 15 bp, Homo sapiens
agatttgaatagaca

SEQ ID NO: 400710 - DNA, 15 bp, Homo sapiens
aagatttgaatagac

SEQ ID NO: 400711 - DNA, 15 bp, Homo sapiens
caagatttgaataga

SEQ ID NO: 400712 - DNA, 15 bp, Homo sapiens
acaagatttgaatag

SEQ ID NO: 400713 - DNA, 15 bp, Homo sapiens
cacaagatttgaata

SEQ ID NO: 400714 - DNA, 15 bp, Homo sapiens
gcacaagatttgaat

SEQ ID NO: 400715 - DNA, 15 bp, Homo sapiens
ggcacaagatttgaa

SEQ ID NO: 400716 - DNA, 15 bp, Homo sapiens
gggcacaagatttga

SEQ ID NO: 400717 - DNA, 15 bp, Homo sapiens
tgggcacaagatttg

SEQ ID NO: 400718 - DNA, 15 bp, Homo sapiens
atgggcacaagattt

SEQ ID NO: 400719 - DNA, 15 bp, Homo sapiens
aatgggcacaagatt

SEQ ID NO: 400720 - DNA, 15 bp, Homo sapiens
aaatgggcacaagat

SEQ ID NO: 400721 - DNA, 15 bp, Homo sapiens
aaaatgggcacaaga

SEQ ID NO: 400722 - DNA, 15 bp, Homo sapiens
aaaaatgggcacaag

SEQ ID NO: 400723 - DNA, 15 bp, Homo sapiens
aaaaaatgggcacaa

SEQ ID NO: 400724 - DNA, 15 bp, Homo sapiens
caaaaaatgggcaca

SEQ ID NO: 400725 - DNA, 15 bp, Homo sapiens
tcaaaaaatgggcac

SEQ ID NO: 400726 - DNA, 15 bp, Homo sapiens
atcaaaaaatgggca

SEQ ID NO: 400727 - DNA, 15 bp, Homo sapiens
tatcaaaaaatgggc

SEQ ID NO: 400728 - DNA, 15 bp, Homo sapiens
ttatcaaaaaatggg

SEQ ID NO: 400729 - DNA, 15 bp, Homo sapiens
cttatcaaaaaatgg

SEQ ID NO: 400730 - DNA, 15 bp, Homo sapiens
acttatcaaaaaatg

SEQ ID NO: 400731 - DNA, 15 bp, Homo sapiens
aacttatcaaaaaat

SEQ ID NO: 400732 - DNA, 15 bp, Homo sapiens
aaacttatcaaaaaa

SEQ ID NO: 400733 - DNA, 15 bp, Homo sapiens
taaacttatcaaaaa

SEQ ID NO: 400734 - DNA, 15 bp, Homo sapiens
ataaacttatcaaaa

SEQ ID NO: 400735 - DNA, 15 bp, Homo sapiens
aataaacttatcaaa

SEQ ID NO: 400736 - DNA, 15 bp, Homo sapiens
taataaacttatcaa

SEQ ID NO: 400737 - DNA, 15 bp, Homo sapiens
ctaataaacttatca

SEQ ID NO: 400738 - DNA, 15 bp, Homo sapiens
tctaataaacttatc

SEQ ID NO: 400739 - DNA, 15 bp, Homo sapiens
atctaataaacttat

SEQ ID NO: 400740 - DNA, 15 bp, Homo sapiens
aatctaataaactta

SEQ ID NO: 400741 - DNA, 15 bp, Homo sapiens
aaatctaataaactt

SEQ ID NO: 400742 - DNA, 15 bp, Homo sapiens
aaaatctaataaact

SEQ ID NO: 400743 - DNA, 15 bp, Homo sapiens
aaaaatctaataaac

SEQ ID NO: 400744 - DNA, 15 bp, Homo sapiens
aaaaaatctaataaa

SEQ ID NO: 400745 - DNA, 15 bp, Homo sapiens
gaaaaaatctaataa

SEQ ID NO: 400746 - DNA, 15 bp, Homo sapiens
ggaaaaaatctaata

SEQ ID NO: 400747 - DNA, 15 bp, Homo sapiens
aggaaaaaatctaat

SEQ ID NO: 400748 - DNA, 15 bp, Homo sapiens
taggaaaaaatctaa

SEQ ID NO: 400749 - DNA, 15 bp, Homo sapiens
ataggaaaaaatcta

SEQ ID NO: 400750 - DNA, 15 bp, Homo sapiens
tataggaaaaaatct

SEQ ID NO: 400751 - DNA, 15 bp, Homo sapiens
ctataggaaaaaatc

SEQ ID NO: 400752 - DNA, 15 bp, Homo sapiens
tctataggaaaaaat

SEQ ID NO: 400753 - DNA, 15 bp, Homo sapiens
ctctataggaaaaaa

SEQ ID NO: 400754 - DNA, 15 bp, Homo sapiens
actctataggaaaaa

SEQ ID NO: 400755 - DNA, 15 bp, Homo sapiens
gactctataggaaaa

SEQ ID NO: 400756 - DNA, 15 bp, Homo sapiens
cgactctataggaaa

SEQ ID NO: 400757 - DNA, 15 bp, Homo sapiens
acgactctataggaa

SEQ ID NO: 400758 - DNA, 15 bp, Homo sapiens
aacgactctatagga

SEQ ID NO: 400759 - DNA, 15 bp, Homo sapiens
aaacgactctatagg

SEQ ID NO: 400760 - DNA, 15 bp, Homo sapiens
caaacgactctatag

SEQ ID NO: 400761 - DNA, 15 bp, Homo sapiens
tcaaacgactctata

SEQ ID NO: 400762 - DNA, 15 bp, Homo sapiens
ctcaaacgactctat

SEQ ID NO: 400763 - DNA, 15 bp, Homo sapiens
gctcaaacgactcta

SEQ ID NO: 400764 - DNA, 15 bp, Homo sapiens
agctcaaacgactct

SEQ ID NO: 400765 - DNA, 15 bp, Homo sapiens
gagctcaaacgactc

SEQ ID NO: 400766 - DNA, 15 bp, Homo sapiens
ggagctcaaacgact

SEQ ID NO: 400767 - DNA, 15 bp, Homo sapiens
aggagctcaaacgac

SEQ ID NO: 400768 - DNA, 15 bp, Homo sapiens
aaggagctcaaacga

SEQ ID NO: 400769 - DNA, 15 bp, Homo sapiens
taaggagctcaaacg

SEQ ID NO: 400770 - DNA, 15 bp, Homo sapiens
ataaggagctcaaac

SEQ ID NO: 400771 - DNA, 15 bp, Homo sapiens
cataaggagctcaaa

SEQ ID NO: 400772 - DNA, 15 bp, Homo sapiens
acataaggagctcaa

SEQ ID NO: 400773 - DNA, 15 bp, Homo sapiens
tacataaggagctca

SEQ ID NO: 400774 - DNA, 15 bp, Homo sapiens
atacataaggagctc

SEQ ID NO: 400775 - DNA, 15 bp, Homo sapiens
aatacataaggagct

SEQ ID NO: 400776 - DNA, 15 bp, Homo sapiens
gaatacataaggagc

SEQ ID NO: 400777 - DNA, 15 bp, Homo sapiens
agaatacataaggag

SEQ ID NO: 400778 - DNA, 15 bp, Homo sapiens
cagaatacataagga

SEQ ID NO: 400779 - DNA, 15 bp, Homo sapiens
tcagaatacataagg

SEQ ID NO: 400780 - DNA, 15 bp, Homo sapiens
atcagaatacataag

SEQ ID NO: 400781 - DNA, 15 bp, Homo sapiens
aatcagaatacataa

SEQ ID NO: 400782 - DNA, 15 bp, Homo sapiens
taatcagaatacata

SEQ ID NO: 400783 - DNA, 15 bp, Homo sapiens
ataatcagaatacat

SEQ ID NO: 400784 - DNA, 15 bp, Homo sapiens
aataatcagaataca

SEQ ID NO: 400785 - DNA, 15 bp, Homo sapiens
taataatcagaatac

SEQ ID NO: 400786 - DNA, 15 bp, Homo sapiens
ttaataatcagaata

SEQ ID NO: 400787 - DNA, 15 bp, Homo sapiens
attaataatcagaat

SEQ ID NO: 400788 - DNA, 15 bp, Homo sapiens
gattaataatcagaa

SEQ ID NO: 400789 - DNA, 15 bp, Homo sapiens
ggattaataatcaga

SEQ ID NO: 400790 - DNA, 15 bp, Homo sapiens
gggattaataatcag

SEQ ID NO: 400791 - DNA, 15 bp, Homo sapiens
agggattaataatca

SEQ ID NO: 400792 - DNA, 15 bp, Homo sapiens
aagggattaataatc

SEQ ID NO: 400793 - DNA, 15 bp, Homo sapiens
caagggattaataat

SEQ ID NO: 400794 - DNA, 15 bp, Homo sapiens
acaagggattaataa

SEQ ID NO: 400795 - DNA, 15 bp, Homo sapiens
gacaagggattaata

SEQ ID NO: 400796 - DNA, 15 bp, Homo sapiens
agacaagggattaat

SEQ ID NO: 400797 - DNA, 15 bp, Homo sapiens
cagacaagggattaa

SEQ ID NO: 400798 - DNA, 15 bp, Homo sapiens
tcagacaagggatta

SEQ ID NO: 400799 - DNA, 15 bp, Homo sapiens
ctcagacaagggatt

SEQ ID NO: 400800 - DNA, 15 bp, Homo sapiens
cctcagacaagggat

SEQ ID NO: 400801 - DNA, 15 bp, Homo sapiens
acctcagacaaggga

SEQ ID NO: 400802 - DNA, 15 bp, Homo sapiens
cacctcagacaaggg

SEQ ID NO: 400803 - DNA, 15 bp, Homo sapiens
acacctcagacaagg

SEQ ID NO: 400804 - DNA, 15 bp, Homo sapiens
aacacctcagacaag

SEQ ID NO: 400805 - DNA, 15 bp, Homo sapiens
aaacacctcagacaa

SEQ ID NO: 400806 - DNA, 15 bp, Homo sapiens
aaaacacctcagaca

SEQ ID NO: 400807 - DNA, 15 bp, Homo sapiens
aaaaacacctcagac

SEQ ID NO: 400808 - DNA, 15 bp, Homo sapiens
aaaaaacacctcaga

SEQ ID NO: 400809 - DNA, 15 bp, Homo sapiens
aaaaaaacacctcag

SEQ ID NO: 400810 - DNA, 15 bp, Homo sapiens
aaaaaaaacacctca

SEQ ID NO: 400811 - DNA, 15 bp, Homo sapiens
aaaaaaaaacacctc

SEQ ID NO: 400812 - DNA, 15 bp, Homo sapiens
gaaaaaaaaacacct

SEQ ID NO: 400813 - DNA, 15 bp, Homo sapiens
ggaaaaaaaaacacc

SEQ ID NO: 400814 - DNA, 15 bp, Homo sapiens
gggaaaaaaaaacac

SEQ ID NO: 400815 - DNA, 15 bp, Homo sapiens
tgggaaaaaaaaaca

SEQ ID NO: 400816 - DNA, 15 bp, Homo sapiens
atgggaaaaaaaaac

SEQ ID NO: 400817 - DNA, 15 bp, Homo sapiens
aatgggaaaaaaaaa

SEQ ID NO: 400818 - DNA, 15 bp, Homo sapiens
gaatgggaaaaaaaa

SEQ ID NO: 400819 - DNA, 15 bp, Homo sapiens
agaatgggaaaaaaa

SEQ ID NO: 400820 - DNA, 15 bp, Homo sapiens
cagaatgggaaaaaa

SEQ ID NO: 400821 - DNA, 15 bp, Homo sapiens
acagaatgggaaaaa

SEQ ID NO: 400822 - DNA, 15 bp, Homo sapiens
gacagaatgggaaaa

SEQ ID NO: 400823 - DNA, 15 bp, Homo sapiens
tgacagaatgggaaa

SEQ ID NO: 400824 - DNA, 15 bp, Homo sapiens
ctgacagaatgggaa

SEQ ID NO: 400825 - DNA, 15 bp, Homo sapiens
actgacagaatggga

SEQ ID NO: 400826 - DNA, 15 bp, Homo sapiens
aactgacagaatggg

SEQ ID NO: 400827 - DNA, 15 bp, Homo sapiens
caactgacagaatgg

SEQ ID NO: 400828 - DNA, 15 bp, Homo sapiens
acaactgacagaatg

SEQ ID NO: 400829 - DNA, 15 bp, Homo sapiens
gacaactgacagaat

SEQ ID NO: 400830 - DNA, 15 bp, Homo sapiens
agacaactgacagaa

SEQ ID NO: 400831 - DNA, 15 bp, Homo sapiens
gagacaactgacaga

SEQ ID NO: 400832 - DNA, 15 bp, Homo sapiens
agagacaactgacag

SEQ ID NO: 400833 - DNA, 15 bp, Homo sapiens
aagagacaactgaca

SEQ ID NO: 400834 - DNA, 15 bp, Homo sapiens
gaagagacaactgac

SEQ ID NO: 400835 - DNA, 15 bp, Homo sapiens
tgaagagacaactga

SEQ ID NO: 400836 - DNA, 15 bp, Homo sapiens
gtgaagagacaactg

SEQ ID NO: 400837 - DNA, 15 bp, Homo sapiens
agtgaagagacaact

SEQ ID NO: 400838 - DNA, 15 bp, Homo sapiens
aagtgaagagacaac

SEQ ID NO: 400839 - DNA, 15 bp, Homo sapiens
aaagtgaagagacaa

SEQ ID NO: 400840 - DNA, 15 bp, Homo sapiens
caaagtgaagagaca

SEQ ID NO: 400841 - DNA, 15 bp, Homo sapiens
acaaagtgaagagac

SEQ ID NO: 400842 - DNA, 15 bp, Homo sapiens
aacaaagtgaagaga

SEQ ID NO: 400843 - DNA, 15 bp, Homo sapiens
caacaaagtgaagag

SEQ ID NO: 400844 - DNA, 15 bp, Homo sapiens
tcaacaaagtgaaga

SEQ ID NO: 400845 - DNA, 15 bp, Homo sapiens
atcaacaaagtgaag

SEQ ID NO: 400846 - DNA, 15 bp, Homo sapiens
aatcaacaaagtgaa

SEQ ID NO: 400847 - DNA, 15 bp, Homo sapiens
taatcaacaaagtga

SEQ ID NO: 400848 - DNA, 15 bp, Homo sapiens
gtaatcaacaaagtg

SEQ ID NO: 400849 - DNA, 15 bp, Homo sapiens
tgtaatcaacaaagt

SEQ ID NO: 400850 - DNA, 15 bp, Homo sapiens
ttgtaatcaacaaag

SEQ ID NO: 400851 - DNA, 15 bp, Homo sapiens
gttgtaatcaacaaa

SEQ ID NO: 400852 - DNA, 15 bp, Homo sapiens
ggttgtaatcaacaa

SEQ ID NO: 400853 - DNA, 15 bp, Homo sapiens
gggttgtaatcaaca

SEQ ID NO: 400854 - DNA, 15 bp, Homo sapiens
agggttgtaatcaac

SEQ ID NO: 400855 - DNA, 15 bp, Homo sapiens
aagggttgtaatcaa

SEQ ID NO: 400856 - DNA, 15 bp, Homo sapiens
caagggttgtaatca

SEQ ID NO: 400857 - DNA, 15 bp, Homo sapiens
gcaagggttgtaatc

SEQ ID NO: 400858 - DNA, 15 bp, Homo sapiens
agcaagggttgtaat

SEQ ID NO: 400859 - DNA, 15 bp, Homo sapiens
cagcaagggttgtaa

SEQ ID NO: 400860 - DNA, 15 bp, Homo sapiens
acagcaagggttgta

SEQ ID NO: 400861 - DNA, 15 bp, Homo sapiens
cacagcaagggttgt

SEQ ID NO: 400862 - DNA, 15 bp, Homo sapiens
gcacagcaagggttg

SEQ ID NO: 400863 - DNA, 15 bp, Homo sapiens
tgcacagcaagggtt

SEQ ID NO: 400864 - DNA, 15 bp, Homo sapiens
ctgcacagcaagggt

SEQ ID NO: 400865 - DNA, 15 bp, Homo sapiens
tctgcacagcaaggg

SEQ ID NO: 400866 - DNA, 15 bp, Homo sapiens
ttctgcacagcaagg

SEQ ID NO: 400867 - DNA, 15 bp, Homo sapiens
cttctgcacagcaag

SEQ ID NO: 400868 - DNA, 15 bp, Homo sapiens
gcttctgcacagcaa

SEQ ID NO: 400869 - DNA, 15 bp, Homo sapiens
agcttctgcacagca

SEQ ID NO: 400870 - DNA, 15 bp, Homo sapiens
aagcttctgcacagc

SEQ ID NO: 400871 - DNA, 15 bp, Homo sapiens
aaagcttctgcacag

SEQ ID NO: 400872 - DNA, 15 bp, Homo sapiens
aaaagcttctgcaca

SEQ ID NO: 400873 - DNA, 15 bp, Homo sapiens
aaaaagcttctgcac

SEQ ID NO: 400874 - DNA, 15 bp, Homo sapiens
taaaaagcttctgca

SEQ ID NO: 400875 - DNA, 15 bp, Homo sapiens
ttaaaaagcttctgc

SEQ ID NO: 400876 - DNA, 15 bp, Homo sapiens
attaaaaagcttctg

SEQ ID NO: 400877 - DNA, 15 bp, Homo sapiens
aattaaaaagcttct

SEQ ID NO: 400878 - DNA, 15 bp, Homo sapiens
aaattaaaaagcttc

SEQ ID NO: 400879 - DNA, 15 bp, Homo sapiens
caaattaaaaagctt

SEQ ID NO: 400880 - DNA, 15 bp, Homo sapiens
tcaaattaaaaagct

SEQ ID NO: 400881 - DNA, 15 bp, Homo sapiens
atcaaattaaaaagc

SEQ ID NO: 400882 - DNA, 15 bp, Homo sapiens
catcaaattaaaaag

SEQ ID NO: 400883 - DNA, 15 bp, Homo sapiens
acatcaaattaaaaa

SEQ ID NO: 400884 - DNA, 15 bp, Homo sapiens
cacatcaaattaaaa

SEQ ID NO: 400885 - DNA, 15 bp, Homo sapiens
tcacatcaaattaaa

SEQ ID NO: 400886 - DNA, 15 bp, Homo sapiens
atcacatcaaattaa

SEQ ID NO: 400887 - DNA, 15 bp, Homo sapiens
gatcacatcaaatta

SEQ ID NO: 400888 - DNA, 15 bp, Homo sapiens
ggatcacatcaaatt

SEQ ID NO: 400889 - DNA, 15 bp, Homo sapiens
cggatcacatcaaat

SEQ ID NO: 400890 - DNA, 15 bp, Homo sapiens
tcggatcacatcaaa

SEQ ID NO: 400891 - DNA, 15 bp, Homo sapiens
atcggatcacatcaa

SEQ ID NO: 400892 - DNA, 15 bp, Homo sapiens
aatcggatcacatca

SEQ ID NO: 400893 - DNA, 15 bp, Homo sapiens
aaatcggatcacatc

SEQ ID NO: 400894 - DNA, 15 bp, Homo sapiens
caaatcggatcacat

SEQ ID NO: 400895 - DNA, 15 bp, Homo sapiens
acaaatcggatcaca

SEQ ID NO: 400896 - DNA, 15 bp, Homo sapiens
gacaaatcggatcac

SEQ ID NO: 400897 - DNA, 15 bp, Homo sapiens
ggacaaatcggatca

SEQ ID NO: 400898 - DNA, 15 bp, Homo sapiens
tggacaaatcggatc

SEQ ID NO: 400899 - DNA, 15 bp, Homo sapiens
atggacaaatcggat

SEQ ID NO: 400900 - DNA, 15 bp, Homo sapiens
aatggacaaatcgga

SEQ ID NO: 400901 - DNA, 15 bp, Homo sapiens
aaatggacaaatcgg

SEQ ID NO: 400902 - DNA, 15 bp, Homo sapiens
aaaatggacaaatcg

SEQ ID NO: 400903 - DNA, 15 bp, Homo sapiens
aaaaatggacaaatc

SEQ ID NO: 400904 - DNA, 15 bp, Homo sapiens
aaaaaatggacaaat

SEQ ID NO: 400905 - DNA, 15 bp, Homo sapiens
taaaaaatggacaaa

SEQ ID NO: 400906 - DNA, 15 bp, Homo sapiens
gtaaaaaatggacaa

SEQ ID NO: 400907 - DNA, 15 bp, Homo sapiens
agtaaaaaatggaca

SEQ ID NO: 400908 - DNA, 15 bp, Homo sapiens
aagtaaaaaatggac

SEQ ID NO: 400909 - DNA, 15 bp, Homo sapiens
aaagtaaaaaatgga

SEQ ID NO: 400910 - DNA, 15 bp, Homo sapiens
caaagtaaaaaatgg

SEQ ID NO: 400911 - DNA, 15 bp, Homo sapiens
ccaaagtaaaaaatg

SEQ ID NO: 400912 - DNA, 15 bp, Homo sapiens
accaaagtaaaaaat

SEQ ID NO: 400913 - DNA, 15 bp, Homo sapiens
aaccaaagtaaaaaa

SEQ ID NO: 400914 - DNA, 15 bp, Homo sapiens
caaccaaagtaaaaa

SEQ ID NO: 400915 - DNA, 15 bp, Homo sapiens
gcaaccaaagtaaaa

SEQ ID NO: 400916 - DNA, 15 bp, Homo sapiens
ggcaaccaaagtaaa

SEQ ID NO: 400917 - DNA, 15 bp, Homo sapiens
aggcaaccaaagtaa

SEQ ID NO: 400918 - DNA, 15 bp, Homo sapiens
caggcaaccaaagta

SEQ ID NO: 400919 - DNA, 15 bp, Homo sapiens
acaggcaaccaaagt

SEQ ID NO: 400920 - DNA, 15 bp, Homo sapiens
cacaggcaaccaaag

SEQ ID NO: 400921 - DNA, 15 bp, Homo sapiens
gcacaggcaaccaaa

SEQ ID NO: 400922 - DNA, 15 bp, Homo sapiens
agcacaggcaaccaa

SEQ ID NO: 400923 - DNA, 15 bp, Homo sapiens
aagcacaggcaacca

SEQ ID NO: 400924 - DNA, 15 bp, Homo sapiens
caagcacaggcaacc

SEQ ID NO: 400925 - DNA, 15 bp, Homo sapiens
acaagcacaggcaac

SEQ ID NO: 400926 - DNA, 15 bp, Homo sapiens
tacaagcacaggcaa

SEQ ID NO: 400927 - DNA, 15 bp, Homo sapiens
ctacaagcacaggca

SEQ ID NO: 400928 - DNA, 15 bp, Homo sapiens
cctacaagcacaggc

SEQ ID NO: 400929 - DNA, 15 bp, Homo sapiens
ccctacaagcacagg

SEQ ID NO: 400930 - DNA, 15 bp, Homo sapiens
accctacaagcacag

SEQ ID NO: 400931 - DNA, 15 bp, Homo sapiens
taccctacaagcaca

SEQ ID NO: 400932 - DNA, 15 bp, Homo sapiens
ataccctacaagcac

SEQ ID NO: 400933 - DNA, 15 bp, Homo sapiens
aataccctacaagca

SEQ ID NO: 400934 - DNA, 15 bp, Homo sapiens
caataccctacaagc

SEQ ID NO: 400935 - DNA, 15 bp, Homo sapiens
acaataccctacaag

SEQ ID NO: 400936 - DNA, 15 bp, Homo sapiens
aacaataccctacaa

SEQ ID NO: 400937 - DNA, 15 bp, Homo sapiens
gaacaataccctaca

SEQ ID NO: 400938 - DNA, 15 bp, Homo sapiens
tgaacaataccctac

SEQ ID NO: 400939 - DNA, 15 bp, Homo sapiens
ttgaacaatacccta

SEQ ID NO: 400940 - DNA, 15 bp, Homo sapiens
cttgaacaataccct

SEQ ID NO: 400941 - DNA, 15 bp, Homo sapiens
tcttgaacaataccc

SEQ ID NO: 400942 - DNA, 15 bp, Homo sapiens
ttcttgaacaatacc

SEQ ID NO: 400943 - DNA, 15 bp, Homo sapiens
tttcttgaacaatac

SEQ ID NO: 400944 - DNA, 15 bp, Homo sapiens
gtttcttgaacaata

SEQ ID NO: 400945 - DNA, 15 bp, Homo sapiens
ggtttcttgaacaat

SEQ ID NO: 400946 - DNA, 15 bp, Homo sapiens
aggtttcttgaacaa

SEQ ID NO: 400947 - DNA, 15 bp, Homo sapiens
aaggtttcttgaaca

SEQ ID NO: 400948 - DNA, 15 bp, Homo sapiens
aaaggtttcttgaac

SEQ ID NO: 400949 - DNA, 15 bp, Homo sapiens
caaaggtttcttgaa

SEQ ID NO: 400950 - DNA, 15 bp, Homo sapiens
gcaaaggtttcttga

SEQ ID NO: 400951 - DNA, 15 bp, Homo sapiens
ggcaaaggtttcttg

SEQ ID NO: 400952 - DNA, 15 bp, Homo sapiens
gggcaaaggtttctt

SEQ ID NO: 400953 - DNA, 15 bp, Homo sapiens
tgggcaaaggtttct

SEQ ID NO: 400954 - DNA, 15 bp, Homo sapiens
ctgggcaaaggtttc

SEQ ID NO: 400955 - DNA, 15 bp, Homo sapiens
tctgggcaaaggttt

SEQ ID NO: 400956 - DNA, 15 bp, Homo sapiens
atctgggcaaaggtt

SEQ ID NO: 400957 - DNA, 15 bp, Homo sapiens
tatctgggcaaaggt

SEQ ID NO: 400958 - DNA, 15 bp, Homo sapiens
ttatctgggcaaagg

SEQ ID NO: 400959 - DNA, 15 bp, Homo sapiens
tttatctgggcaaag

SEQ ID NO: 400960 - DNA, 15 bp, Homo sapiens
atttatctgggcaaa

SEQ ID NO: 400961 - DNA, 15 bp, Homo sapiens
catttatctgggcaa

SEQ ID NO: 400962 - DNA, 15 bp, Homo sapiens
acatttatctgggca

SEQ ID NO: 400963 - DNA, 15 bp, Homo sapiens
gacatttatctgggc

SEQ ID NO: 400964 - DNA, 15 bp, Homo sapiens
ggacatttatctggg

SEQ ID NO: 400965 - DNA, 15 bp, Homo sapiens
aggacatttatctgg

SEQ ID NO: 400966 - DNA, 15 bp, Homo sapiens
caggacatttatctg

SEQ ID NO: 400967 - DNA, 15 bp, Homo sapiens
ccaggacatttatct

SEQ ID NO: 400968 - DNA, 15 bp, Homo sapiens
tccaggacatttatc

SEQ ID NO: 400969 - DNA, 15 bp, Homo sapiens
ttccaggacatttat

SEQ ID NO: 400970 - DNA, 15 bp, Homo sapiens
tttccaggacattta

SEQ ID NO: 400971 - DNA, 15 bp, Homo sapiens
atttccaggacattt

SEQ ID NO: 400972 - DNA, 15 bp, Homo sapiens
aatttccaggacatt

SEQ ID NO: 400973 - DNA, 15 bp, Homo sapiens
aaatttccaggacat

SEQ ID NO: 400974 - DNA, 15 bp, Homo sapiens
aaaatttccaggaca

SEQ ID NO: 400975 - DNA, 15 bp, Homo sapiens
gaaaatttccaggac

SEQ ID NO: 400976 - DNA, 15 bp, Homo sapiens
agaaaatttccagga

SEQ ID NO: 400977 - DNA, 15 bp, Homo sapiens
gagaaaatttccagg

SEQ ID NO: 400978 - DNA, 15 bp, Homo sapiens
ggagaaaatttccag

SEQ ID NO: 400979 - DNA, 15 bp, Homo sapiens
tggagaaaatttcca

SEQ ID NO: 400980 - DNA, 15 bp, Homo sapiens
ttggagaaaatttcc

SEQ ID NO: 400981 - DNA, 15 bp, Homo sapiens
attggagaaaatttc

SEQ ID NO: 400982 - DNA, 15 bp, Homo sapiens
cattggagaaaattt

SEQ ID NO: 400983 - DNA, 15 bp, Homo sapiens
acattggagaaaatt

SEQ ID NO: 400984 - DNA, 15 bp, Homo sapiens
aacattggagaaaat

SEQ ID NO: 400985 - DNA, 15 bp, Homo sapiens
aaacattggagaaaa

SEQ ID NO: 400986 - DNA, 15 bp, Homo sapiens
taaacattggagaaa

SEQ ID NO: 400987 - DNA, 15 bp, Homo sapiens
gtaaacattggagaa

SEQ ID NO: 400988 - DNA, 15 bp, Homo sapiens
agtaaacattggaga

SEQ ID NO: 400989 - DNA, 15 bp, Homo sapiens
aagtaaacattggag

SEQ ID NO: 400990 - DNA, 15 bp, Homo sapiens
caagtaaacattgga

SEQ ID NO: 400991 - DNA, 15 bp, Homo sapiens
acaagtaaacattgg

SEQ ID NO: 400992 - DNA, 15 bp, Homo sapiens
tacaagtaaacattg

SEQ ID NO: 400993 - DNA, 15 bp, Homo sapiens
ctacaagtaaacatt

SEQ ID NO: 400994 - DNA, 15 bp, Homo sapiens
actacaagtaaacat

SEQ ID NO: 400995 - DNA, 15 bp, Homo sapiens
gactacaagtaaaca

SEQ ID NO: 400996 - DNA, 15 bp, Homo sapiens
tgactacaagtaaac

SEQ ID NO: 400997 - DNA, 15 bp, Homo sapiens
atgactacaagtaaa

SEQ ID NO: 400998 - DNA, 15 bp, Homo sapiens
aatgactacaagtaa

SEQ ID NO: 400999 - DNA, 15 bp, Homo sapiens
aaatgactacaagta

SEQ ID NO: 401000 - DNA, 15 bp, Homo sapiens
gaaatgactacaagt

SEQ ID NO: 401001 - DNA, 15 bp, Homo sapiens
tgaaatgactacaag

SEQ ID NO: 401002 - DNA, 15 bp, Homo sapiens
atgaaatgactacaa

SEQ ID NO: 401003 - DNA, 15 bp, Homo sapiens
tatgaaatgactaca

SEQ ID NO: 401004 - DNA, 15 bp, Homo sapiens
ctatgaaatgactac

SEQ ID NO: 401005 - DNA, 15 bp, Homo sapiens
actatgaaatgacta

SEQ ID NO: 401006 - DNA, 15 bp, Homo sapiens
cactatgaaatgact

SEQ ID NO: 401007 - DNA, 15 bp, Homo sapiens
acactatgaaatgac

SEQ ID NO: 401008 - DNA, 15 bp, Homo sapiens
cacactatgaaatga

SEQ ID NO: 401009 - DNA, 15 bp, Homo sapiens
tcacactatgaaatg

SEQ ID NO: 401010 - DNA, 15 bp, Homo sapiens
ctcacactatgaaat

SEQ ID NO: 401011 - DNA, 15 bp, Homo sapiens
tctcacactatgaaa

SEQ ID NO: 401012 - DNA, 15 bp, Homo sapiens
atctcacactatgaa

SEQ ID NO: 401013 - DNA, 15 bp, Homo sapiens
gatctcacactatga

SEQ ID NO: 401014 - DNA, 15 bp, Homo sapiens
agatctcacactatg

SEQ ID NO: 401015 - DNA, 15 bp, Homo sapiens
aagatctcacactat

SEQ ID NO: 401016 - DNA, 15 bp, Homo sapiens
taagatctcacacta

SEQ ID NO: 401017 - DNA, 15 bp, Homo sapiens
ctaagatctcacact

SEQ ID NO: 401018 - DNA, 15 bp, Homo sapiens
tctaagatctcacac

SEQ ID NO: 401019 - DNA, 15 bp, Homo sapiens
atctaagatctcaca

SEQ ID NO: 401020 - DNA, 15 bp, Homo sapiens
tatctaagatctcac

SEQ ID NO: 401021 - DNA, 15 bp, Homo sapiens
atatctaagatctca

SEQ ID NO: 401022 - DNA, 15 bp, Homo sapiens
tatatctaagatctc

SEQ ID NO: 401023 - DNA, 15 bp, Homo sapiens
ttatatctaagatct

SEQ ID NO: 401024 - DNA, 15 bp, Homo sapiens
cttatatctaagatc

SEQ ID NO: 401025 - DNA, 15 bp, Homo sapiens
acttatatctaagat

SEQ ID NO: 401026 - DNA, 15 bp, Homo sapiens
gacttatatctaaga

SEQ ID NO: 401027 - DNA, 15 bp, Homo sapiens
agacttatatctaag

SEQ ID NO: 401028 - DNA, 15 bp, Homo sapiens
aagacttatatctaa

SEQ ID NO: 401029 - DNA, 15 bp, Homo sapiens
aaagacttatatcta

SEQ ID NO: 401030 - DNA, 15 bp, Homo sapiens
taaagacttatatct

SEQ ID NO: 401031 - DNA, 15 bp, Homo sapiens
ctaaagacttatatc

SEQ ID NO: 401032 - DNA, 15 bp, Homo sapiens
actaaagacttatat

SEQ ID NO: 401033 - DNA, 15 bp, Homo sapiens
gactaaagacttata

SEQ ID NO: 401034 - DNA, 15 bp, Homo sapiens
agactaaagacttat

SEQ ID NO: 401035 - DNA, 15 bp, Homo sapiens
tagactaaagactta

SEQ ID NO: 401036 - DNA, 15 bp, Homo sapiens
atagactaaagactt

SEQ ID NO: 401037 - DNA, 15 bp, Homo sapiens
aatagactaaagact

SEQ ID NO: 401038 - DNA, 15 bp, Homo sapiens
aaatagactaaagac

SEQ ID NO: 401039 - DNA, 15 bp, Homo sapiens
gaaatagactaaaga

SEQ ID NO: 401040 - DNA, 15 bp, Homo sapiens
cgaaatagactaaag

SEQ ID NO: 401041 - DNA, 15 bp, Homo sapiens
tcgaaatagactaaa

SEQ ID NO: 401042 - DNA, 15 bp, Homo sapiens
atcgaaatagactaa

SEQ ID NO: 401043 - DNA, 15 bp, Homo sapiens
aatcgaaatagacta

SEQ ID NO: 401044 - DNA, 15 bp, Homo sapiens
aaatcgaaatagact

SEQ ID NO: 401045 - DNA, 15 bp, Homo sapiens
aaaatcgaaatagac

SEQ ID NO: 401046 - DNA, 15 bp, Homo sapiens
aaaaatcgaaataga

SEQ ID NO: 401047 - DNA, 15 bp, Homo sapiens
aaaaaatcgaaatag

SEQ ID NO: 401048 - DNA, 15 bp, Homo sapiens
aaaaaaatcgaaata

SEQ ID NO: 401049 - DNA, 15 bp, Homo sapiens
aaaaaaaatcgaaat

SEQ ID NO: 401050 - DNA, 15 bp, Homo sapiens
aaaaaaaaatcgaaa

SEQ ID NO: 401051 - DNA, 15 bp, Homo sapiens
aaaaaaaaaatcgaa

SEQ ID NO: 401052 - DNA, 15 bp, Homo sapiens
aaaaaaaaaaatcga

SEQ ID NO: 401053 - DNA, 15 bp, Homo sapiens
aaaaaaaaaaaatcg

SEQ ID NO: 401054 - DNA, 15 bp, Homo sapiens
caaaaaaaaaaaaat

SEQ ID NO: 401055 - DNA, 15 bp, Homo sapiens
ccaaaaaaaaaaaaa

SEQ ID NO: 401056 - DNA, 15 bp, Homo sapiens
gccaaaaaaaaaaaa

SEQ ID NO: 401057 - DNA, 15 bp, Homo sapiens
tgccaaaaaaaaaaa

SEQ ID NO: 401058 - DNA, 15 bp, Homo sapiens
ctgccaaaaaaaaaa

SEQ ID NO: 401059 - DNA, 15 bp, Homo sapiens
tctgccaaaaaaaaa

SEQ ID NO: 401060 - DNA, 15 bp, Homo sapiens
atctgccaaaaaaaa

SEQ ID NO: 401061 - DNA, 15 bp, Homo sapiens
aatctgccaaaaaaa

SEQ ID NO: 401062 - DNA, 15 bp, Homo sapiens
caatctgccaaaaaa

SEQ ID NO: 401063 - DNA, 15 bp, Homo sapiens
acaatctgccaaaaa

SEQ ID NO: 401064 - DNA, 15 bp, Homo sapiens
ccattcttccaccca

SEQ ID NO: 401065 - DNA, 15 bp, Homo sapiens
cccattcttccaccc

SEQ ID NO: 401066 - DNA, 15 bp, Homo sapiens
tcccattcttccacc

SEQ ID NO: 401067 - DNA, 15 bp, Homo sapiens
ctcccattcttccac

SEQ ID NO: 401068 - DNA, 15 bp, Homo sapiens
cctcccattcttcca

SEQ ID NO: 401069 - DNA, 15 bp, Homo sapiens
ccctcccattcttcc

SEQ ID NO: 401070 - DNA, 15 bp, Homo sapiens
cccctcccattcttc

SEQ ID NO: 401071 - DNA, 15 bp, Homo sapiens
tcccctcccattctt

SEQ ID NO: 401072 - DNA, 15 bp, Homo sapiens
ctcccctcccattct

SEQ ID NO: 401073 - DNA, 15 bp, Homo sapiens
actcccctcccattc

SEQ ID NO: 401074 - DNA, 15 bp, Homo sapiens
cactcccctcccatt

SEQ ID NO: 401075 - DNA, 15 bp, Homo sapiens
tcactcccctcccat

SEQ ID NO: 401076 - DNA, 15 bp, Homo sapiens
ctcactcccctccca

SEQ ID NO: 401077 - DNA, 15 bp, Homo sapiens
cctcactcccctccc

SEQ ID NO: 401078 - DNA, 15 bp, Homo sapiens
ccctcactcccctcc

SEQ ID NO: 401079 - DNA, 15 bp, Homo sapiens
tccctcactcccctc

SEQ ID NO: 401080 - DNA, 15 bp, Homo sapiens
atccctcactcccct

SEQ ID NO: 401081 - DNA, 15 bp, Homo sapiens
tatccctcactcccc

SEQ ID NO: 401082 - DNA, 15 bp, Homo sapiens
ttatccctcactccc

SEQ ID NO: 401083 - DNA, 15 bp, Homo sapiens
tttatccctcactcc

SEQ ID NO: 401084 - DNA, 15 bp, Homo sapiens
ttttatccctcactc

SEQ ID NO: 401085 - DNA, 15 bp, Homo sapiens
cttttatccctcact

SEQ ID NO: 401086 - DNA, 15 bp, Homo sapiens
tcttttatccctcac

SEQ ID NO: 401087 - DNA, 15 bp, Homo sapiens
ttcttttatccctca

SEQ ID NO: 401088 - DNA, 15 bp, Homo sapiens
attcttttatccctc

SEQ ID NO: 401089 - DNA, 15 bp, Homo sapiens
tattcttttatccct

SEQ ID NO: 401090 - DNA, 15 bp, Homo sapiens
gtattcttttatccc

SEQ ID NO: 401091 - DNA, 15 bp, Homo sapiens
tgtattcttttatcc

SEQ ID NO: 401092 - DNA, 15 bp, Homo sapiens
ttgtattcttttatc

SEQ ID NO: 401093 - DNA, 15 bp, Homo sapiens
tttgtattcttttat

SEQ ID NO: 401094 - DNA, 15 bp, Homo sapiens
atttgtattctttta

SEQ ID NO: 401095 - DNA, 15 bp, Homo sapiens
tatttgtattctttt

SEQ ID NO: 401096 - DNA, 15 bp, Homo sapiens
atatttgtattcttt

SEQ ID NO: 401097 - DNA, 15 bp, Homo sapiens
tatatttgtattctt

SEQ ID NO: 401098 - DNA, 15 bp, Homo sapiens
ttatatttgtattct

SEQ ID NO: 401099 - DNA, 15 bp, Homo sapiens
attatatttgtattc

SEQ ID NO: 401100 - DNA, 15 bp, Homo sapiens
cattatatttgtatt

SEQ ID NO: 401101 - DNA, 15 bp, Homo sapiens
gcattatatttgtat

SEQ ID NO: 401102 - DNA, 15 bp, Homo sapiens
tgcattatatttgta

SEQ ID NO: 401103 - DNA, 15 bp, Homo sapiens
ctgcattatatttgt

SEQ ID NO: 401104 - DNA, 15 bp, Homo sapiens
actgcattatatttg

SEQ ID NO: 401105 - DNA, 15 bp, Homo sapiens
cactgcattatattt

SEQ ID NO: 401106 - DNA, 15 bp, Homo sapiens
acactgcattatatt

SEQ ID NO: 401107 - DNA, 15 bp, Homo sapiens
tacactgcattatat

SEQ ID NO: 401108 - DNA, 15 bp, Homo sapiens
atacactgcattata

SEQ ID NO: 401109 - DNA, 15 bp, Homo sapiens
tatacactgcattat

SEQ ID NO: 401110 - DNA, 15 bp, Homo sapiens
gtatacactgcatta

SEQ ID NO: 401111 - DNA, 15 bp, Homo sapiens
agtatacactgcatt

SEQ ID NO: 401112 - DNA, 15 bp, Homo sapiens
cagtatacactgcat

SEQ ID NO: 401113 - DNA, 15 bp, Homo sapiens
gcagtatacactgca

SEQ ID NO: 401114 - DNA, 15 bp, Homo sapiens
agcagtatacactgc

SEQ ID NO: 401115 - DNA, 15 bp, Homo sapiens
gagcagtatacactg

SEQ ID NO: 401116 - DNA, 15 bp, Homo sapiens
cgagcagtatacact

SEQ ID NO: 401117 - DNA, 15 bp, Homo sapiens
ccgagcagtatacac

SEQ ID NO: 401118 - DNA, 15 bp, Homo sapiens
cccgagcagtataca

SEQ ID NO: 401119 - DNA, 15 bp, Homo sapiens
acccgagcagtatac

SEQ ID NO: 401120 - DNA, 15 bp, Homo sapiens
cacccgagcagtata

SEQ ID NO: 401121 - DNA, 15 bp, Homo sapiens
tcacccgagcagtat

SEQ ID NO: 401122 - DNA, 15 bp, Homo sapiens
atcacccgagcagta

SEQ ID NO: 401123 - DNA, 15 bp, Homo sapiens
catcacccgagcagt

SEQ ID NO: 401124 - DNA, 15 bp, Homo sapiens
ccatcacccgagcag

SEQ ID NO: 401125 - DNA, 15 bp, Homo sapiens
cccatcacccgagca

SEQ ID NO: 401126 - DNA, 15 bp, Homo sapiens
acccatcacccgagc

SEQ ID NO: 401127 - DNA, 15 bp, Homo sapiens
cacccatcacccgag

SEQ ID NO: 401128 - DNA, 15 bp, Homo sapiens
gcacccatcacccga

SEQ ID NO: 401129 - DNA, 15 bp, Homo sapiens
tgcacccatcacccg

SEQ ID NO: 401130 - DNA, 15 bp, Homo sapiens
gtgcacccatcaccc

SEQ ID NO: 401131 - DNA, 15 bp, Homo sapiens
ggtgcacccatcacc

SEQ ID NO: 401132 - DNA, 15 bp, Homo sapiens
tggtgcacccatcac

SEQ ID NO: 401133 - DNA, 15 bp, Homo sapiens
ttggtgcacccatca

SEQ ID NO: 401134 - DNA, 15 bp, Homo sapiens
tttggtgcacccatc

SEQ ID NO: 401135 - DNA, 15 bp, Homo sapiens
ttttggtgcacccat

SEQ ID NO: 401136 - DNA, 15 bp, Homo sapiens
attttggtgcaccca

SEQ ID NO: 401137 - DNA, 15 bp, Homo sapiens
gattttggtgcaccc

SEQ ID NO: 401138 - DNA, 15 bp, Homo sapiens
agattttggtgcacc

SEQ ID NO: 401139 - DNA, 15 bp, Homo sapiens
aagattttggtgcac

SEQ ID NO: 401140 - DNA, 15 bp, Homo sapiens
taagattttggtgca

SEQ ID NO: 401141 - DNA, 15 bp, Homo sapiens
gtaagattttggtgc

SEQ ID NO: 401142 - DNA, 15 bp, Homo sapiens
tgtaagattttggtg

SEQ ID NO: 401143 - DNA, 15 bp, Homo sapiens
ttgtaagattttggt

SEQ ID NO: 401144 - DNA, 15 bp, Homo sapiens
tttgtaagattttgg

SEQ ID NO: 401145 - DNA, 15 bp, Homo sapiens
atttgtaagattttg

SEQ ID NO: 401146 - DNA, 15 bp, Homo sapiens
gatttgtaagatttt

SEQ ID NO: 401147 - DNA, 15 bp, Homo sapiens
tgatttgtaagattt

SEQ ID NO: 401148 - DNA, 15 bp, Homo sapiens
gtgatttgtaagatt

SEQ ID NO: 401149 - DNA, 15 bp, Homo sapiens
ggtgatttgtaagat

SEQ ID NO: 401150 - DNA, 15 bp, Homo sapiens
tggtgatttgtaaga

SEQ ID NO: 401151 - DNA, 15 bp, Homo sapiens
gtggtgatttgtaag

SEQ ID NO: 401152 - DNA, 15 bp, Homo sapiens
agtggtgatttgtaa

SEQ ID NO: 401153 - DNA, 15 bp, Homo sapiens
tagtggtgatttgta

SEQ ID NO: 401154 - DNA, 15 bp, Homo sapiens
ttagtggtgatttgt

SEQ ID NO: 401155 - DNA, 15 bp, Homo sapiens
tttagtggtgatttg

SEQ ID NO: 401156 - DNA, 15 bp, Homo sapiens
ctttagtggtgattt

SEQ ID NO: 401157 - DNA, 15 bp, Homo sapiens
tctttagtggtgatt

SEQ ID NO: 401158 - DNA, 15 bp, Homo sapiens
ttctttagtggtgat

SEQ ID NO: 401159 - DNA, 15 bp, Homo sapiens
gttctttagtggtga

SEQ ID NO: 401160 - DNA, 15 bp, Homo sapiens
agttctttagtggtg

SEQ ID NO: 401161 - DNA, 15 bp, Homo sapiens
aagttctttagtggt

SEQ ID NO: 401162 - DNA, 15 bp, Homo sapiens
taagttctttagtgg

SEQ ID NO: 401163 - DNA, 15 bp, Homo sapiens
gtaagttctttagtg

SEQ ID NO: 401164 - DNA, 15 bp, Homo sapiens
agtaagttctttagt

SEQ ID NO: 401165 - DNA, 15 bp, Homo sapiens
gagtaagttctttag

SEQ ID NO: 401166 - DNA, 15 bp, Homo sapiens
tgagtaagttcttta

SEQ ID NO: 401167 - DNA, 15 bp, Homo sapiens
atgagtaagttcttt

SEQ ID NO: 401168 - DNA, 15 bp, Homo sapiens
catgagtaagttctt

SEQ ID NO: 401169 - DNA, 15 bp, Homo sapiens
acatgagtaagttct

SEQ ID NO: 401170 - DNA, 15 bp, Homo sapiens
tacatgagtaagttc

SEQ ID NO: 401171 - DNA, 15 bp, Homo sapiens
ttacatgagtaagtt

SEQ ID NO: 401172 - DNA, 15 bp, Homo sapiens
gttacatgagtaagt

SEQ ID NO: 401173 - DNA, 15 bp, Homo sapiens
agttacatgagtaag

SEQ ID NO: 401174 - DNA, 15 bp, Homo sapiens
tagttacatgagtaa

SEQ ID NO: 401175 - DNA, 15 bp, Homo sapiens
ttagttacatgagta

SEQ ID NO: 401176 - DNA, 15 bp, Homo sapiens
tttagttacatgagt

SEQ ID NO: 401177 - DNA, 15 bp, Homo sapiens
atttagttacatgag

SEQ ID NO: 401178 - DNA, 15 bp, Homo sapiens
tatttagttacatga

SEQ ID NO: 401179 - DNA, 15 bp, Homo sapiens
gtatttagttacatg

SEQ ID NO: 401180 - DNA, 15 bp, Homo sapiens
ggtatttagttacat

SEQ ID NO: 401181 - DNA, 15 bp, Homo sapiens
tggtatttagttaca

SEQ ID NO: 401182 - DNA, 15 bp, Homo sapiens
gtggtatttagttac

SEQ ID NO: 401183 - DNA, 15 bp, Homo sapiens
ggtggtatttagtta

SEQ ID NO: 401184 - DNA, 15 bp, Homo sapiens
aggtggtatttagtt

SEQ ID NO: 401185 - DNA, 15 bp, Homo sapiens
caggtggtatttagt

SEQ ID NO: 401186 - DNA, 15 bp, Homo sapiens
acaggtggtatttag

SEQ ID NO: 401187 - DNA, 15 bp, Homo sapiens
tacaggtggtattta

SEQ ID NO: 401188 - DNA, 15 bp, Homo sapiens
gtacaggtggtattt

SEQ ID NO: 401189 - DNA, 15 bp, Homo sapiens
ggtacaggtggtatt

SEQ ID NO: 401190 - DNA, 15 bp, Homo sapiens
gggtacaggtggtat

SEQ ID NO: 401191 - DNA, 15 bp, Homo sapiens
ggggtacaggtggta

SEQ ID NO: 401192 - DNA, 15 bp, Homo sapiens
tggggtacaggtggt

SEQ ID NO: 401193 - DNA, 15 bp, Homo sapiens
ttggggtacaggtgg

SEQ ID NO: 401194 - DNA, 15 bp, Homo sapiens
attggggtacaggtg

SEQ ID NO: 401195 - DNA, 15 bp, Homo sapiens
tattggggtacaggt

SEQ ID NO: 401196 - DNA, 15 bp, Homo sapiens
ttattggggtacagg

SEQ ID NO: 401197 - DNA, 15 bp, Homo sapiens
gttattggggtacag

SEQ ID NO: 401198 - DNA, 15 bp, Homo sapiens
agttattggggtaca

SEQ ID NO: 401199 - DNA, 15 bp, Homo sapiens
aagttattggggtac

SEQ ID NO: 401200 - DNA, 15 bp, Homo sapiens
taagttattggggta

SEQ ID NO: 401201 - DNA, 15 bp, Homo sapiens
gtaagttattggggt

SEQ ID NO: 401202 - DNA, 15 bp, Homo sapiens
cgtaagttattgggg

SEQ ID NO: 401203 - DNA, 15 bp, Homo sapiens
tcgtaagttattggg

SEQ ID NO: 401204 - DNA, 15 bp, Homo sapiens
ttcgtaagttattgg

SEQ ID NO: 401205 - DNA, 15 bp, Homo sapiens
tttcgtaagttattg

SEQ ID NO: 401206 - DNA, 15 bp, Homo sapiens
ttttcgtaagttatt

SEQ ID NO: 401207 - DNA, 15 bp, Homo sapiens
tttttcgtaagttat

SEQ ID NO: 401208 - DNA, 15 bp, Homo sapiens
ttttttcgtaagtta

SEQ ID NO: 401209 - DNA, 15 bp, Homo sapiens
tttttttcgtaagtt

SEQ ID NO: 401210 - DNA, 15 bp, Homo sapiens
atttttttcgtaagt

SEQ ID NO: 401211 - DNA, 15 bp, Homo sapiens
tatttttttcgtaag

SEQ ID NO: 401212 - DNA, 15 bp, Homo sapiens
ttatttttttcgtaa

SEQ ID NO: 401213 - DNA, 15 bp, Homo sapiens
tttatttttttcgta

SEQ ID NO: 401214 - DNA, 15 bp, Homo sapiens
ttttatttttttcgt

SEQ ID NO: 401215 - DNA, 15 bp, Homo sapiens
attttatttttttcg

SEQ ID NO: 401216 - DNA, 15 bp, Homo sapiens
tattttatttttttc

SEQ ID NO: 401217 - DNA, 15 bp, Homo sapiens
ttattttattttttt

SEQ ID NO: 401218 - DNA, 15 bp, Homo sapiens
tttattttatttttt

SEQ ID NO: 401219 - DNA, 15 bp, Homo sapiens
ctttattttattttt

SEQ ID NO: 401220 - DNA, 15 bp, Homo sapiens
actttattttatttt

SEQ ID NO: 401221 - DNA, 15 bp, Homo sapiens
tactttattttattt

SEQ ID NO: 401222 - DNA, 15 bp, Homo sapiens
ttactttattttatt

SEQ ID NO: 401223 - DNA, 15 bp, Homo sapiens
cttactttattttat

SEQ ID NO: 401224 - DNA, 15 bp, Homo sapiens
tcttactttatttta

SEQ ID NO: 401225 - DNA, 15 bp, Homo sapiens
ctcttactttatttt

SEQ ID NO: 401226 - DNA, 15 bp, Homo sapiens
cctcttactttattt

SEQ ID NO: 401227 - DNA, 15 bp, Homo sapiens
gcctcttactttatt

SEQ ID NO: 401228 - DNA, 15 bp, Homo sapiens
tgcctcttactttat

SEQ ID NO: 401229 - DNA, 15 bp, Homo sapiens
gtgcctcttacttta

SEQ ID NO: 401230 - DNA, 15 bp, Homo sapiens
tgtgcctcttacttt

SEQ ID NO: 401231 - DNA, 15 bp, Homo sapiens
ttgtgcctcttactt

SEQ ID NO: 401232 - DNA, 15 bp, Homo sapiens
cttgtgcctcttact

SEQ ID NO: 401233 - DNA, 15 bp, Homo sapiens
acttgtgcctcttac

SEQ ID NO: 401234 - DNA, 15 bp, Homo sapiens
tacttgtgcctctta

SEQ ID NO: 401235 - DNA, 15 bp, Homo sapiens
ttacttgtgcctctt

SEQ ID NO: 401236 - DNA, 15 bp, Homo sapiens
gttacttgtgcctct

SEQ ID NO: 401237 - DNA, 15 bp, Homo sapiens
tgttacttgtgcctc

SEQ ID NO: 401238 - DNA, 15 bp, Homo sapiens
atgttacttgtgcct

SEQ ID NO: 401239 - DNA, 15 bp, Homo sapiens
aatgttacttgtgcc

SEQ ID NO: 401240 - DNA, 15 bp, Homo sapiens
taatgttacttgtgc

SEQ ID NO: 401241 - DNA, 15 bp, Homo sapiens
ttaatgttacttgtg

SEQ ID NO: 401242 - DNA, 15 bp, Homo sapiens
tttaatgttacttgt

SEQ ID NO: 401243 - DNA, 15 bp, Homo sapiens
ttttaatgttacttg

SEQ ID NO: 401244 - DNA, 15 bp, Homo sapiens
tttttaatgttactt

SEQ ID NO: 401245 - DNA, 15 bp, Homo sapiens
ttttttaatgttact

SEQ ID NO: 401246 - DNA, 15 bp, Homo sapiens
tttttttaatgttac

SEQ ID NO: 401247 - DNA, 15 bp, Homo sapiens
atttttttaatgtta

SEQ ID NO: 401248 - DNA, 15 bp, Homo sapiens
gatttttttaatgtt

SEQ ID NO: 401249 - DNA, 15 bp, Homo sapiens
agatttttttaatgt

SEQ ID NO: 401250 - DNA, 15 bp, Homo sapiens
gagatttttttaatg

SEQ ID NO: 401251 - DNA, 15 bp, Homo sapiens
agagatttttttaat

SEQ ID NO: 401252 - DNA, 15 bp, Homo sapiens
aagagatttttttaa

SEQ ID NO: 401253 - DNA, 15 bp, Homo sapiens
gaagagattttttta

SEQ ID NO: 401254 - DNA, 15 bp, Homo sapiens
tgaagagattttttt

SEQ ID NO: 401255 - DNA, 15 bp, Homo sapiens
ttgaagagatttttt

SEQ ID NO: 401256 - DNA, 15 bp, Homo sapiens
gttgaagagattttt

SEQ ID NO: 401257 - DNA, 15 bp, Homo sapiens
agttgaagagatttt

SEQ ID NO: 401258 - DNA, 15 bp, Homo sapiens
aagttgaagagattt

SEQ ID NO: 401259 - DNA, 15 bp, Homo sapiens
taagttgaagagatt

SEQ ID NO: 401260 - DNA, 15 bp, Homo sapiens
ctaagttgaagagat

SEQ ID NO: 401261 - DNA, 15 bp, Homo sapiens
tctaagttgaagaga

SEQ ID NO: 401262 - DNA, 15 bp, Homo sapiens
atctaagttgaagag

SEQ ID NO: 401263 - DNA, 15 bp, Homo sapiens
catctaagttgaaga

SEQ ID NO: 401264 - DNA, 15 bp, Homo sapiens
tcatctaagttgaag

SEQ ID NO: 401265 - DNA, 15 bp, Homo sapiens
ttcatctaagttgaa

SEQ ID NO: 401266 - DNA, 15 bp, Homo sapiens
attcatctaagttga

SEQ ID NO: 401267 - DNA, 15 bp, Homo sapiens
aattcatctaagttg

SEQ ID NO: 401268 - DNA, 15 bp, Homo sapiens
taattcatctaagtt

SEQ ID NO: 401269 - DNA, 15 bp, Homo sapiens
ataattcatctaagt

SEQ ID NO: 401270 - DNA, 15 bp, Homo sapiens
cataattcatctaag

SEQ ID NO: 401271 - DNA, 15 bp, Homo sapiens
acataattcatctaa

SEQ ID NO: 401272 - DNA, 15 bp, Homo sapiens
aacataattcatcta

SEQ ID NO: 401273 - DNA, 15 bp, Homo sapiens
aaacataattcatct

SEQ ID NO: 401274 - DNA, 15 bp, Homo sapiens
aaaacataattcatc

SEQ ID NO: 401275 - DNA, 15 bp, Homo sapiens
aaaaacataattcat

SEQ ID NO: 401276 - DNA, 15 bp, Homo sapiens
gaaaaacataattca

SEQ ID NO: 401277 - DNA, 15 bp, Homo sapiens
tgaaaaacataattc

SEQ ID NO: 401278 - DNA, 15 bp, Homo sapiens
gtgaaaaacataatt

SEQ ID NO: 401279 - DNA, 15 bp, Homo sapiens
cgtgaaaaacataat

SEQ ID NO: 401280 - DNA, 15 bp, Homo sapiens
gcgtgaaaaacataa

SEQ ID NO: 401281 - DNA, 15 bp, Homo sapiens
tgcgtgaaaaacata

SEQ ID NO: 401282 - DNA, 15 bp, Homo sapiens
atgcgtgaaaaacat

SEQ ID NO: 401283 - DNA, 15 bp, Homo sapiens
catgcgtgaaaaaca

SEQ ID NO: 401284 - DNA, 15 bp, Homo sapiens
acatgcgtgaaaaac

SEQ ID NO: 401285 - DNA, 15 bp, Homo sapiens
gacatgcgtgaaaaa

SEQ ID NO: 401286 - DNA, 15 bp, Homo sapiens
tgacatgcgtgaaaa

SEQ ID NO: 401287 - DNA, 15 bp, Homo sapiens
atgacatgcgtgaaa

SEQ ID NO: 401288 - DNA, 15 bp, Homo sapiens
aatgacatgcgtgaa

SEQ ID NO: 401289 - DNA, 15 bp, Homo sapiens
aaatgacatgcgtga

SEQ ID NO: 401290 - DNA, 15 bp, Homo sapiens
taaatgacatgcgtg

SEQ ID NO: 401291 - DNA, 15 bp, Homo sapiens
ttaaatgacatgcgt

SEQ ID NO: 401292 - DNA, 15 bp, Homo sapiens
tttaaatgacatgcg

SEQ ID NO: 401293 - DNA, 15 bp, Homo sapiens
ttttaaatgacatgc

SEQ ID NO: 401294 - DNA, 15 bp, Homo sapiens
tttttaaatgacatg

SEQ ID NO: 401295 - DNA, 15 bp, Homo sapiens
gtttttaaatgacat

SEQ ID NO: 401296 - DNA, 15 bp, Homo sapiens
tgtttttaaatgaca

SEQ ID NO: 401297 - DNA, 15 bp, Homo sapiens
ttgtttttaaatgac

SEQ ID NO: 401298 - DNA, 15 bp, Homo sapiens
tttgtttttaaatga

SEQ ID NO: 401299 - DNA, 15 bp, Homo sapiens
ttttgtttttaaatg

SEQ ID NO: 401300 - DNA, 15 bp, Homo sapiens
gttttgtttttaaat

SEQ ID NO: 401301 - DNA, 15 bp, Homo sapiens
tgttttgtttttaaa

SEQ ID NO: 401302 - DNA, 15 bp, Homo sapiens
gtgttttgtttttaa

SEQ ID NO: 401303 - DNA, 15 bp, Homo sapiens
tgtgttttgttttta

SEQ ID NO: 401304 - DNA, 15 bp, Homo sapiens
ttgtgttttgttttt

SEQ ID NO: 401305 - DNA, 15 bp, Homo sapiens
tttgtgttttgtttt

SEQ ID NO: 401306 - DNA, 15 bp, Homo sapiens
atttgtgttttgttt

SEQ ID NO: 401307 - DNA, 15 bp, Homo sapiens
tatttgtgttttgtt

SEQ ID NO: 401308 - DNA, 15 bp, Homo sapiens
ctatttgtgttttgt

SEQ ID NO: 401309 - DNA, 15 bp, Homo sapiens
tctatttgtgttttg

SEQ ID NO: 401310 - DNA, 15 bp, Homo sapiens
ctctatttgtgtttt

SEQ ID NO: 401311 - DNA, 15 bp, Homo sapiens
cctctatttgtgttt

SEQ ID NO: 401312 - DNA, 15 bp, Homo sapiens
ccctctatttgtgtt

SEQ ID NO: 401313 - DNA, 15 bp, Homo sapiens
tccctctatttgtgt

SEQ ID NO: 401314 - DNA, 15 bp, Homo sapiens
gtccctctatttgtg

SEQ ID NO: 401315 - DNA, 15 bp, Homo sapiens
ggtccctctatttgt

SEQ ID NO: 401316 - DNA, 15 bp, Homo sapiens
gggtccctctatttg

SEQ ID NO: 401317 - DNA, 15 bp, Homo sapiens
tgggtccctctattt

SEQ ID NO: 401318 - DNA, 15 bp, Homo sapiens
atgggtccctctatt

SEQ ID NO: 401319 - DNA, 15 bp, Homo sapiens
catgggtccctctat

SEQ ID NO: 401320 - DNA, 15 bp, Homo sapiens
acatgggtccctcta

SEQ ID NO: 401321 - DNA, 15 bp, Homo sapiens
gacatgggtccctct

SEQ ID NO: 401322 - DNA, 15 bp, Homo sapiens
agacatgggtccctc

SEQ ID NO: 401323 - DNA, 15 bp, Homo sapiens
cagacatgggtccct

SEQ ID NO: 401324 - DNA, 15 bp, Homo sapiens
tcagacatgggtccc

SEQ ID NO: 401325 - DNA, 15 bp, Homo sapiens
ttcagacatgggtcc

SEQ ID NO: 401326 - DNA, 15 bp, Homo sapiens
attcagacatgggtc

SEQ ID NO: 401327 - DNA, 15 bp, Homo sapiens
aattcagacatgggt

SEQ ID NO: 401328 - DNA, 15 bp, Homo sapiens
taattcagacatggg

SEQ ID NO: 401329 - DNA, 15 bp, Homo sapiens
ttaattcagacatgg

SEQ ID NO: 401330 - DNA, 15 bp, Homo sapiens
attaattcagacatg

SEQ ID NO: 401331 - DNA, 15 bp, Homo sapiens
aattaattcagacat

SEQ ID NO: 401332 - DNA, 15 bp, Homo sapiens
caattaattcagaca

SEQ ID NO: 401333 - DNA, 15 bp, Homo sapiens
gcaattaattcagac

SEQ ID NO: 401334 - DNA, 15 bp, Homo sapiens
ggcaattaattcaga

SEQ ID NO: 401335 - DNA, 15 bp, Homo sapiens
aggcaattaattcag

SEQ ID NO: 401336 - DNA, 15 bp, Homo sapiens
aaggcaattaattca

SEQ ID NO: 401337 - DNA, 15 bp, Homo sapiens
caaggcaattaattc

SEQ ID NO: 401338 - DNA, 15 bp, Homo sapiens
acaaggcaattaatt

SEQ ID NO: 401339 - DNA, 15 bp, Homo sapiens
cacaaggcaattaat

SEQ ID NO: 401340 - DNA, 15 bp, Homo sapiens
tcacaaggcaattaa

SEQ ID NO: 401341 - DNA, 15 bp, Homo sapiens
atcacaaggcaatta

SEQ ID NO: 401342 - DNA, 15 bp, Homo sapiens
tatcacaaggcaatt

SEQ ID NO: 401343 - DNA, 15 bp, Homo sapiens
atatcacaaggcaat

SEQ ID NO: 401344 - DNA, 15 bp, Homo sapiens
gatatcacaaggcaa

SEQ ID NO: 401345 - DNA, 15 bp, Homo sapiens
tgatatcacaaggca

SEQ ID NO: 401346 - DNA, 15 bp, Homo sapiens
gtgatatcacaaggc

SEQ ID NO: 401347 - DNA, 15 bp, Homo sapiens
agtgatatcacaagg

SEQ ID NO: 401348 - DNA, 15 bp, Homo sapiens
cagtgatatcacaag

SEQ ID NO: 401349 - DNA, 15 bp, Homo sapiens
acagtgatatcacaa

SEQ ID NO: 401350 - DNA, 15 bp, Homo sapiens
cacagtgatatcaca

SEQ ID NO: 401351 - DNA, 15 bp, Homo sapiens
gcacagtgatatcac

SEQ ID NO: 401352 - DNA, 15 bp, Homo sapiens
tgcacagtgatatca

SEQ ID NO: 401353 - DNA, 15 bp, Homo sapiens
atgcacagtgatatc

SEQ ID NO: 401354 - DNA, 15 bp, Homo sapiens
aatgcacagtgatat

SEQ ID NO: 401355 - DNA, 15 bp, Homo sapiens
caatgcacagtgata

SEQ ID NO: 401356 - DNA, 15 bp, Homo sapiens
ccaatgcacagtgat

SEQ ID NO: 401357 - DNA, 15 bp, Homo sapiens
cccaatgcacagtga

SEQ ID NO: 401358 - DNA, 15 bp, Homo sapiens
ccccaatgcacagtg

SEQ ID NO: 401359 - DNA, 15 bp, Homo sapiens
tccccaatgcacagt

SEQ ID NO: 401360 - DNA, 15 bp, Homo sapiens
gtccccaatgcacag

SEQ ID NO: 401361 - DNA, 15 bp, Homo sapiens
agtccccaatgcaca

SEQ ID NO: 401362 - DNA, 15 bp, Homo sapiens
aagtccccaatgcac

SEQ ID NO: 401363 - DNA, 15 bp, Homo sapiens
taagtccccaatgca

SEQ ID NO: 401364 - DNA, 15 bp, Homo sapiens
ttaagtccccaatgc

SEQ ID NO: 401365 - DNA, 15 bp, Homo sapiens
attaagtccccaatg

SEQ ID NO: 401366 - DNA, 15 bp, Homo sapiens
tattaagtccccaat

SEQ ID NO: 401367 - DNA, 15 bp, Homo sapiens
atattaagtccccaa

SEQ ID NO: 401368 - DNA, 15 bp, Homo sapiens
tatattaagtcccca

SEQ ID NO: 401369 - DNA, 15 bp, Homo sapiens
atatattaagtcccc

SEQ ID NO: 401370 - DNA, 15 bp, Homo sapiens
tatatattaagtccc

SEQ ID NO: 401371 - DNA, 15 bp, Homo sapiens
ttatatattaagtcc

SEQ ID NO: 401372 - DNA, 15 bp, Homo sapiens
attatatattaagtc

SEQ ID NO: 401373 - DNA, 15 bp, Homo sapiens
gattatatattaagt

SEQ ID NO: 401374 - DNA, 15 bp, Homo sapiens
tgattatatattaag

SEQ ID NO: 401375 - DNA, 15 bp, Homo sapiens
ctgattatatattaa

SEQ ID NO: 401376 - DNA, 15 bp, Homo sapiens
tctgattatatatta

SEQ ID NO: 401377 - DNA, 15 bp, Homo sapiens
ttctgattatatatt

SEQ ID NO: 401378 - DNA, 15 bp, Homo sapiens
tttctgattatatat

SEQ ID NO: 401379 - DNA, 15 bp, Homo sapiens
ctttctgattatata

SEQ ID NO: 401380 - DNA, 15 bp, Homo sapiens
tctttctgattatat

SEQ ID NO: 401381 - DNA, 15 bp, Homo sapiens
ttctttctgattata

SEQ ID NO: 401382 - DNA, 15 bp, Homo sapiens
tttctttctgattat

SEQ ID NO: 401383 - DNA, 15 bp, Homo sapiens
ttttctttctgatta

SEQ ID NO: 401384 - DNA, 15 bp, Homo sapiens
tttttctttctgatt

SEQ ID NO: 401385 - DNA, 15 bp, Homo sapiens
gtttttctttctgat

SEQ ID NO: 401386 - DNA, 15 bp, Homo sapiens
agtttttctttctga

SEQ ID NO: 401387 - DNA, 15 bp, Homo sapiens
cagtttttctttctg

SEQ ID NO: 401388 - DNA, 15 bp, Homo sapiens
gcagtttttctttct

SEQ ID NO: 401389 - DNA, 15 bp, Homo sapiens
tgcagtttttctttc

SEQ ID NO: 401390 - DNA, 15 bp, Homo sapiens
gtgcagtttttcttt

SEQ ID NO: 401391 - DNA, 15 bp, Homo sapiens
agtgcagtttttctt

SEQ ID NO: 401392 - DNA, 15 bp, Homo sapiens
gagtgcagtttttct

SEQ ID NO: 401393 - DNA, 15 bp, Homo sapiens
tgagtgcagtttttc

SEQ ID NO: 401394 - DNA, 15 bp, Homo sapiens
gtgagtgcagttttt

SEQ ID NO: 401395 - DNA, 15 bp, Homo sapiens
agtgagtgcagtttt

SEQ ID NO: 401396 - DNA, 15 bp, Homo sapiens
gagtgagtgcagttt

SEQ ID NO: 401397 - DNA, 15 bp, Homo sapiens
agagtgagtgcagtt

SEQ ID NO: 401398 - DNA, 15 bp, Homo sapiens
gagagtgagtgcagt

SEQ ID NO: 401399 - DNA, 15 bp, Homo sapiens
agagagtgagtgcag

SEQ ID NO: 401400 - DNA, 15 bp, Homo sapiens
aagagagtgagtgca

SEQ ID NO: 401401 - DNA, 15 bp, Homo sapiens
taagagagtgagtgc

SEQ ID NO: 401402 - DNA, 15 bp, Homo sapiens
ctaagagagtgagtg

SEQ ID NO: 401403 - DNA, 15 bp, Homo sapiens
gctaagagagtgagt

SEQ ID NO: 401404 - DNA, 15 bp, Homo sapiens
agctaagagagtgag

SEQ ID NO: 401405 - DNA, 15 bp, Homo sapiens
aagctaagagagtga

SEQ ID NO: 401406 - DNA, 15 bp, Homo sapiens
gaagctaagagagtg

SEQ ID NO: 401407 - DNA, 15 bp, Homo sapiens
agaagctaagagagt

SEQ ID NO: 401408 - DNA, 15 bp, Homo sapiens
aagaagctaagagag

SEQ ID NO: 401409 - DNA, 15 bp, Homo sapiens
caagaagctaagaga

SEQ ID NO: 401410 - DNA, 15 bp, Homo sapiens
tcaagaagctaagag

SEQ ID NO: 401411 - DNA, 15 bp, Homo sapiens
ctcaagaagctaaga

SEQ ID NO: 401412 - DNA, 15 bp, Homo sapiens
actcaagaagctaag

SEQ ID NO: 401413 - DNA, 15 bp, Homo sapiens
tactcaagaagctaa

SEQ ID NO: 401414 - DNA, 15 bp, Homo sapiens
atactcaagaagcta

SEQ ID NO: 401415 - DNA, 15 bp, Homo sapiens
gatactcaagaagct

SEQ ID NO: 401416 - DNA, 15 bp, Homo sapiens
agatactcaagaagc

SEQ ID NO: 401417 - DNA, 15 bp, Homo sapiens
aagatactcaagaag

SEQ ID NO: 401418 - DNA, 15 bp, Homo sapiens
caagatactcaagaa

SEQ ID NO: 401419 - DNA, 15 bp, Homo sapiens
tcaagatactcaaga

SEQ ID NO: 401420 - DNA, 15 bp, Homo sapiens
ttcaagatactcaag

SEQ ID NO: 401421 - DNA, 15 bp, Homo sapiens
cttcaagatactcaa

SEQ ID NO: 401422 - DNA, 15 bp, Homo sapiens
gcttcaagatactca

SEQ ID NO: 401423 - DNA, 15 bp, Homo sapiens
agcttcaagatactc

SEQ ID NO: 401424 - DNA, 15 bp, Homo sapiens
aagcttcaagatact

SEQ ID NO: 401425 - DNA, 15 bp, Homo sapiens
gaagcttcaagatac

SEQ ID NO: 401426 - DNA, 15 bp, Homo sapiens
ggaagcttcaagata

SEQ ID NO: 401427 - DNA, 15 bp, Homo sapiens
tggaagcttcaagat

SEQ ID NO: 401428 - DNA, 15 bp, Homo sapiens
ctggaagcttcaaga

SEQ ID NO: 401429 - DNA, 15 bp, Homo sapiens
gctggaagcttcaag

SEQ ID NO: 401430 - DNA, 15 bp, Homo sapiens
tgctggaagcttcaa

SEQ ID NO: 401431 - DNA, 15 bp, Homo sapiens
gtgctggaagcttca

SEQ ID NO: 401432 - DNA, 15 bp, Homo sapiens
agtgctggaagcttc

SEQ ID NO: 401433 - DNA, 15 bp, Homo sapiens
gagtgctggaagctt

SEQ ID NO: 401434 - DNA, 15 bp, Homo sapiens
agagtgctggaagct

SEQ ID NO: 401435 - DNA, 15 bp, Homo sapiens
aagagtgctggaagc

SEQ ID NO: 401436 - DNA, 15 bp, Homo sapiens
aaagagtgctggaag

SEQ ID NO: 401437 - DNA, 15 bp, Homo sapiens
aaaagagtgctggaa

SEQ ID NO: 401438 - DNA, 15 bp, Homo sapiens
gaaaagagtgctgga

SEQ ID NO: 401439 - DNA, 15 bp, Homo sapiens
tgaaaagagtgctgg

SEQ ID NO: 401440 - DNA, 15 bp, Homo sapiens
gtgaaaagagtgctg

SEQ ID NO: 401441 - DNA, 15 bp, Homo sapiens
ggtgaaaagagtgct

SEQ ID NO: 401442 - DNA, 15 bp, Homo sapiens
aggtgaaaagagtgc

SEQ ID NO: 401443 - DNA, 15 bp, Homo sapiens
aaggtgaaaagagtg

SEQ ID NO: 401444 - DNA, 15 bp, Homo sapiens
gaaggtgaaaagagt

SEQ ID NO: 401445 - DNA, 15 bp, Homo sapiens
tgaaggtgaaaagag

SEQ ID NO: 401446 - DNA, 15 bp, Homo sapiens
atgaaggtgaaaaga

SEQ ID NO: 401447 - DNA, 15 bp, Homo sapiens
catgaaggtgaaaag

SEQ ID NO: 401448 - DNA, 15 bp, Homo sapiens
acatgaaggtgaaaa

SEQ ID NO: 401449 - DNA, 15 bp, Homo sapiens
cacatgaaggtgaaa

SEQ ID NO: 401450 - DNA, 15 bp, Homo sapiens
ccacatgaaggtgaa

SEQ ID NO: 401451 - DNA, 15 bp, Homo sapiens
cccacatgaaggtga

SEQ ID NO: 401452 - DNA, 15 bp, Homo sapiens
tcccacatgaaggtg

SEQ ID NO: 401453 - DNA, 15 bp, Homo sapiens
gtcccacatgaaggt

SEQ ID NO: 401454 - DNA, 15 bp, Homo sapiens
tgtcccacatgaagg

SEQ ID NO: 401455 - DNA, 15 bp, Homo sapiens
ttgtcccacatgaag

SEQ ID NO: 401456 - DNA, 15 bp, Homo sapiens
tttgtcccacatgaa

SEQ ID NO: 401457 - DNA, 15 bp, Homo sapiens
atttgtcccacatga

SEQ ID NO: 401458 - DNA, 15 bp, Homo sapiens
tatttgtcccacatg

SEQ ID NO: 401459 - DNA, 15 bp, Homo sapiens
gtatttgtcccacat

SEQ ID NO: 401460 - DNA, 15 bp, Homo sapiens
tgtatttgtcccaca

SEQ ID NO: 401461 - DNA, 15 bp, Homo sapiens
gtgtatttgtcccac

SEQ ID NO: 401462 - DNA, 15 bp, Homo sapiens
tgtgtatttgtccca

SEQ ID NO: 401463 - DNA, 15 bp, Homo sapiens
ttgtgtatttgtccc

SEQ ID NO: 401464 - DNA, 15 bp, Homo sapiens
tttgtgtatttgtcc

SEQ ID NO: 401465 - DNA, 15 bp, Homo sapiens
ttttgtgtatttgtc

SEQ ID NO: 401466 - DNA, 15 bp, Homo sapiens
gttttgtgtatttgt

SEQ ID NO: 401467 - DNA, 15 bp, Homo sapiens
agttttgtgtatttg

SEQ ID NO: 401468 - DNA, 15 bp, Homo sapiens
cagttttgtgtattt

SEQ ID NO: 401469 - DNA, 15 bp, Homo sapiens
gcagttttgtgtatt

SEQ ID NO: 401470 - DNA, 15 bp, Homo sapiens
agcagttttgtgtat

SEQ ID NO: 401471 - DNA, 15 bp, Homo sapiens
aagcagttttgtgta

SEQ ID NO: 401472 - DNA, 15 bp, Homo sapiens
caagcagttttgtgt

SEQ ID NO: 401473 - DNA, 15 bp, Homo sapiens
tcaagcagttttgtg

SEQ ID NO: 401474 - DNA, 15 bp, Homo sapiens
ctcaagcagttttgt

SEQ ID NO: 401475 - DNA, 15 bp, Homo sapiens
gctcaagcagttttg

SEQ ID NO: 401476 - DNA, 15 bp, Homo sapiens
tgctcaagcagtttt

SEQ ID NO: 401477 - DNA, 15 bp, Homo sapiens
ttgctcaagcagttt

SEQ ID NO: 401478 - DNA, 15 bp, Homo sapiens
cttgctcaagcagtt

SEQ ID NO: 401479 - DNA, 15 bp, Homo sapiens
gcttgctcaagcagt

SEQ ID NO: 401480 - DNA, 15 bp, Homo sapiens
ggcttgctcaagcag

SEQ ID NO: 401481 - DNA, 15 bp, Homo sapiens
tggcttgctcaagca

SEQ ID NO: 401482 - DNA, 15 bp, Homo sapiens
atggcttgctcaagc

SEQ ID NO: 401483 - DNA, 15 bp, Homo sapiens
gatggcttgctcaag

SEQ ID NO: 401484 - DNA, 15 bp, Homo sapiens
agatggcttgctcaa

SEQ ID NO: 401485 - DNA, 15 bp, Homo sapiens
cagatggcttgctca

SEQ ID NO: 401486 - DNA, 15 bp, Homo sapiens
ccagatggcttgctc

SEQ ID NO: 401487 - DNA, 15 bp, Homo sapiens
cccagatggcttgct

SEQ ID NO: 401488 - DNA, 15 bp, Homo sapiens
tcccagatggcttgc

SEQ ID NO: 401489 - DNA, 15 bp, Homo sapiens
gtcccagatggcttg

SEQ ID NO: 401490 - DNA, 15 bp, Homo sapiens
ggtcccagatggctt

SEQ ID NO: 401491 - DNA, 15 bp, Homo sapiens
aggtcccagatggct

SEQ ID NO: 401492 - DNA, 15 bp, Homo sapiens
gaggtcccagatggc

SEQ ID NO: 401493 - DNA, 15 bp, Homo sapiens
agaggtcccagatgg

SEQ ID NO: 401494 - DNA, 15 bp, Homo sapiens
aagaggtcccagatg

SEQ ID NO: 401495 - DNA, 15 bp, Homo sapiens
aaagaggtcccagat

SEQ ID NO: 401496 - DNA, 15 bp, Homo sapiens
gaaagaggtcccaga

SEQ ID NO: 401497 - DNA, 15 bp, Homo sapiens
ggaaagaggtcccag

SEQ ID NO: 401498 - DNA, 15 bp, Homo sapiens
tggaaagaggtccca

SEQ ID NO: 401499 - DNA, 15 bp, Homo sapiens
ttggaaagaggtccc

SEQ ID NO: 401500 - DNA, 15 bp, Homo sapiens
cttggaaagaggtcc

SEQ ID NO: 401501 - DNA, 15 bp, Homo sapiens
tcttggaaagaggtc

SEQ ID NO: 401502 - DNA, 15 bp, Homo sapiens
ttcttggaaagaggt

SEQ ID NO: 401503 - DNA, 15 bp, Homo sapiens
attcttggaaagagg

SEQ ID NO: 401504 - DNA, 15 bp, Homo sapiens
gattcttggaaagag

SEQ ID NO: 401505 - DNA, 15 bp, Homo sapiens
cgattcttggaaaga

SEQ ID NO: 401506 - DNA, 15 bp, Homo sapiens
acgattcttggaaag

SEQ ID NO: 401507 - DNA, 15 bp, Homo sapiens
gacgattcttggaaa

SEQ ID NO: 401508 - DNA, 15 bp, Homo sapiens
ggacgattcttggaa

SEQ ID NO: 401509 - DNA, 15 bp, Homo sapiens
aggacgattcttgga

SEQ ID NO: 401510 - DNA, 15 bp, Homo sapiens
aaggacgattcttgg

SEQ ID NO: 401511 - DNA, 15 bp, Homo sapiens
gaaggacgattcttg

SEQ ID NO: 401512 - DNA, 15 bp, Homo sapiens
agaaggacgattctt

SEQ ID NO: 401513 - DNA, 15 bp, Homo sapiens
gagaaggacgattct

SEQ ID NO: 401514 - DNA, 15 bp, Homo sapiens
agagaaggacgattc

SEQ ID NO: 401515 - DNA, 15 bp, Homo sapiens
tagagaaggacgatt

SEQ ID NO: 401516 - DNA, 15 bp, Homo sapiens
atagagaaggacgat

SEQ ID NO: 401517 - DNA, 15 bp, Homo sapiens
gatagagaaggacga

SEQ ID NO: 401518 - DNA, 15 bp, Homo sapiens
tgatagagaaggacg

SEQ ID NO: 401519 - DNA, 15 bp, Homo sapiens
atgatagagaaggac

SEQ ID NO: 401520 - DNA, 15 bp, Homo sapiens
aatgatagagaagga

SEQ ID NO: 401521 - DNA, 15 bp, Homo sapiens
caatgatagagaagg

SEQ ID NO: 401522 - DNA, 15 bp, Homo sapiens
ccaatgatagagaag

SEQ ID NO: 401523 - DNA, 15 bp, Homo sapiens
tccaatgatagagaa

SEQ ID NO: 401524 - DNA, 15 bp, Homo sapiens
ctccaatgatagaga

SEQ ID NO: 401525 - DNA, 15 bp, Homo sapiens
actccaatgatagag

SEQ ID NO: 401526 - DNA, 15 bp, Homo sapiens
gactccaatgataga

SEQ ID NO: 401527 - DNA, 15 bp, Homo sapiens
agactccaatgatag

SEQ ID NO: 401528 - DNA, 15 bp, Homo sapiens
gagactccaatgata

SEQ ID NO: 401529 - DNA, 15 bp, Homo sapiens
agagactccaatgat

SEQ ID NO: 401530 - DNA, 15 bp, Homo sapiens
aagagactccaatga

SEQ ID NO: 401531 - DNA, 15 bp, Homo sapiens
gaagagactccaatg

SEQ ID NO: 401532 - DNA, 15 bp, Homo sapiens
agaagagactccaat

SEQ ID NO: 401533 - DNA, 15 bp, Homo sapiens
tagaagagactccaa

SEQ ID NO: 401534 - DNA, 15 bp, Homo sapiens
ttagaagagactcca

SEQ ID NO: 401535 - DNA, 15 bp, Homo sapiens
cttagaagagactcc

SEQ ID NO: 401536 - DNA, 15 bp, Homo sapiens
gcttagaagagactc

SEQ ID NO: 401537 - DNA, 15 bp, Homo sapiens
tgcttagaagagact

SEQ ID NO: 401538 - DNA, 15 bp, Homo sapiens
atgcttagaagagac

SEQ ID NO: 401539 - DNA, 15 bp, Homo sapiens
aatgcttagaagaga

SEQ ID NO: 401540 - DNA, 15 bp, Homo sapiens
caatgcttagaagag

SEQ ID NO: 401541 - DNA, 15 bp, Homo sapiens
gcaatgcttagaaga

SEQ ID NO: 401542 - DNA, 15 bp, Homo sapiens
agcaatgcttagaag

SEQ ID NO: 401543 - DNA, 15 bp, Homo sapiens
aagcaatgcttagaa

SEQ ID NO: 401544 - DNA, 15 bp, Homo sapiens
aaagcaatgcttaga

SEQ ID NO: 401545 - DNA, 15 bp, Homo sapiens
aaaagcaatgcttag

SEQ ID NO: 401546 - DNA, 15 bp, Homo sapiens
taaaagcaatgctta

SEQ ID NO: 401547 - DNA, 15 bp, Homo sapiens
ataaaagcaatgctt

SEQ ID NO: 401548 - DNA, 15 bp, Homo sapiens
aataaaagcaatgct

SEQ ID NO: 401549 - DNA, 15 bp, Homo sapiens
aaataaaagcaatgc

SEQ ID NO: 401550 - DNA, 15 bp, Homo sapiens
aaaataaaagcaatg

SEQ ID NO: 401551 - DNA, 15 bp, Homo sapiens
gaaaataaaagcaat

SEQ ID NO: 401552 - DNA, 15 bp, Homo sapiens
agaaaataaaagcaa

SEQ ID NO: 401553 - DNA, 15 bp, Homo sapiens
aagaaaataaaagca

SEQ ID NO: 401554 - DNA, 15 bp, Homo sapiens
gaagaaaataaaagc

SEQ ID NO: 401555 - DNA, 15 bp, Homo sapiens
tgaagaaaataaaag

SEQ ID NO: 401556 - DNA, 15 bp, Homo sapiens
ttgaagaaaataaaa

SEQ ID NO: 401557 - DNA, 15 bp, Homo sapiens
gttgaagaaaataaa

SEQ ID NO: 401558 - DNA, 15 bp, Homo sapiens
agttgaagaaaataa

SEQ ID NO: 401559 - DNA, 15 bp, Homo sapiens
aagttgaagaaaata

SEQ ID NO: 401560 - DNA, 15 bp, Homo sapiens
aaagttgaagaaaat

SEQ ID NO: 401561 - DNA, 15 bp, Homo sapiens
aaaagttgaagaaaa

SEQ ID NO: 401562 - DNA, 15 bp, Homo sapiens
taaaagttgaagaaa

SEQ ID NO: 401563 - DNA, 15 bp, Homo sapiens
ttaaaagttgaagaa

SEQ ID NO: 401564 - DNA, 15 bp, Homo sapiens
cttaaaagttgaaga

SEQ ID NO: 401565 - DNA, 15 bp, Homo sapiens
acttaaaagttgaag

SEQ ID NO: 401566 - DNA, 15 bp, Homo sapiens
tacttaaaagttgaa

SEQ ID NO: 401567 - DNA, 15 bp, Homo sapiens
gtacttaaaagttga

SEQ ID NO: 401568 - DNA, 15 bp, Homo sapiens
tgtacttaaaagttg

SEQ ID NO: 401569 - DNA, 15 bp, Homo sapiens
gtgtacttaaaagtt

SEQ ID NO: 401570 - DNA, 15 bp, Homo sapiens
agtgtacttaaaagt

SEQ ID NO: 401571 - DNA, 15 bp, Homo sapiens
cagtgtacttaaaag

SEQ ID NO: 401572 - DNA, 15 bp, Homo sapiens
ccagtgtacttaaaa

SEQ ID NO: 401573 - DNA, 15 bp, Homo sapiens
accagtgtacttaaa

SEQ ID NO: 401574 - DNA, 15 bp, Homo sapiens
taccagtgtacttaa

SEQ ID NO: 401575 - DNA, 15 bp, Homo sapiens
gtaccagtgtactta

SEQ ID NO: 401576 - DNA, 15 bp, Homo sapiens
tgtaccagtgtactt

SEQ ID NO: 401577 - DNA, 15 bp, Homo sapiens
atgtaccagtgtact

SEQ ID NO: 401578 - DNA, 15 bp, Homo sapiens
catgtaccagtgtac

SEQ ID NO: 401579 - DNA, 15 bp, Homo sapiens
acatgtaccagtgta

SEQ ID NO: 401580 - DNA, 15 bp, Homo sapiens
cacatgtaccagtgt

SEQ ID NO: 401581 - DNA, 15 bp, Homo sapiens
gcacatgtaccagtg

SEQ ID NO: 401582 - DNA, 15 bp, Homo sapiens
ggcacatgtaccagt

SEQ ID NO: 401583 - DNA, 15 bp, Homo sapiens
tggcacatgtaccag

SEQ ID NO: 401584 - DNA, 15 bp, Homo sapiens
ctggcacatgtacca

SEQ ID NO: 401585 - DNA, 15 bp, Homo sapiens
tctggcacatgtacc

SEQ ID NO: 401586 - DNA, 15 bp, Homo sapiens
atctggcacatgtac

SEQ ID NO: 401587 - DNA, 15 bp, Homo sapiens
catctggcacatgta

SEQ ID NO: 401588 - DNA, 15 bp, Homo sapiens
acatctggcacatgt

SEQ ID NO: 401589 - DNA, 15 bp, Homo sapiens
cacatctggcacatg

SEQ ID NO: 401590 - DNA, 15 bp, Homo sapiens
gcacatctggcacat

SEQ ID NO: 401591 - DNA, 15 bp, Homo sapiens
tgcacatctggcaca

SEQ ID NO: 401592 - DNA, 15 bp, Homo sapiens
ctgcacatctggcac

SEQ ID NO: 401593 - DNA, 15 bp, Homo sapiens
cctgcacatctggca

SEQ ID NO: 401594 - DNA, 15 bp, Homo sapiens
acctgcacatctggc

SEQ ID NO: 401595 - DNA, 15 bp, Homo sapiens
aacctgcacatctgg

SEQ ID NO: 401596 - DNA, 15 bp, Homo sapiens
aaacctgcacatctg

SEQ ID NO: 401597 - DNA, 15 bp, Homo sapiens
caaacctgcacatct

SEQ ID NO: 401598 - DNA, 15 bp, Homo sapiens
acaaacctgcacatc

SEQ ID NO: 401599 - DNA, 15 bp, Homo sapiens
aacaaacctgcacat

SEQ ID NO: 401600 - DNA, 15 bp, Homo sapiens
taacaaacctgcaca

SEQ ID NO: 401601 - DNA, 15 bp, Homo sapiens
ctgtaacaaacctgc

SEQ ID NO: 401602 - DNA, 15 bp, Homo sapiens
tctgtaacaaacctg

SEQ ID NO: 401603 - DNA, 15 bp, Homo sapiens
ctctgtaacaaacct

SEQ ID NO: 401604 - DNA, 15 bp, Homo sapiens
cctctgtaacaaacc

SEQ ID NO: 401605 - DNA, 15 bp, Homo sapiens
acctctgtaacaaac

SEQ ID NO: 401606 - DNA, 15 bp, Homo sapiens
tacctctgtaacaaa

SEQ ID NO: 401607 - DNA, 15 bp, Homo sapiens
ttacctctgtaacaa

SEQ ID NO: 401608 - DNA, 15 bp, Homo sapiens
tttacctctgtaaca

SEQ ID NO: 401609 - DNA, 15 bp, Homo sapiens
gtttacctctgtaac

SEQ ID NO: 401610 - DNA, 15 bp, Homo sapiens
tgtttacctctgtaa

SEQ ID NO: 401611 - DNA, 15 bp, Homo sapiens
atgtttacctctgta

SEQ ID NO: 401612 - DNA, 15 bp, Homo sapiens
catgtttacctctgt

SEQ ID NO: 401613 - DNA, 15 bp, Homo sapiens
acatgtttacctctg

SEQ ID NO: 401614 - DNA, 15 bp, Homo sapiens
cacatgtttacctct

SEQ ID NO: 401615 - DNA, 15 bp, Homo sapiens
gcacatgtttacctc

SEQ ID NO: 401616 - DNA, 15 bp, Homo sapiens
ggcacatgtttacct

SEQ ID NO: 401617 - DNA, 15 bp, Homo sapiens
cggcacatgtttacc

SEQ ID NO: 401618 - DNA, 15 bp, Homo sapiens
acggcacatgtttac

SEQ ID NO: 401619 - DNA, 15 bp, Homo sapiens
cacggcacatgttta

SEQ ID NO: 401620 - DNA, 15 bp, Homo sapiens
ccacggcacatgttt

SEQ ID NO: 401621 - DNA, 15 bp, Homo sapiens
accacggcacatgtt

SEQ ID NO: 401622 - DNA, 15 bp, Homo sapiens
caccacggcacatgt

SEQ ID NO: 401623 - DNA, 15 bp, Homo sapiens
ccaccacggcacatg

SEQ ID NO: 401624 - DNA, 15 bp, Homo sapiens
accaccacggcacat

SEQ ID NO: 401625 - DNA, 15 bp, Homo sapiens
aaccaccacggcaca

SEQ ID NO: 401626 - DNA, 15 bp, Homo sapiens
aaaccaccacggcac

SEQ ID NO: 401627 - DNA, 15 bp, Homo sapiens
caaaccaccacggca

SEQ ID NO: 401628 - DNA, 15 bp, Homo sapiens
gcaaaccaccacggc

SEQ ID NO: 401629 - DNA, 15 bp, Homo sapiens
agcaaaccaccacgg

SEQ ID NO: 401630 - DNA, 15 bp, Homo sapiens
cagcaaaccaccacg

SEQ ID NO: 401631 - DNA, 15 bp, Homo sapiens
gcagcaaaccaccac

SEQ ID NO: 401632 - DNA, 15 bp, Homo sapiens
tgtgcagcaaaccac

SEQ ID NO: 401633 - DNA, 15 bp, Homo sapiens
ctgtgcagcaaacca

SEQ ID NO: 401634 - DNA, 15 bp, Homo sapiens
tctgtgcagcaaacc

SEQ ID NO: 401635 - DNA, 15 bp, Homo sapiens
atctgtgcagcaaac

SEQ ID NO: 401636 - DNA, 15 bp, Homo sapiens
gatctgtgcagcaaa

SEQ ID NO: 401637 - DNA, 15 bp, Homo sapiens
tgatctgtgcagcaa

SEQ ID NO: 401638 - DNA, 15 bp, Homo sapiens
atgatctgtgcagca

SEQ ID NO: 401639 - DNA, 15 bp, Homo sapiens
aatgatctgtgcagc

SEQ ID NO: 401640 - DNA, 15 bp, Homo sapiens
gaatgatctgtgcag

SEQ ID NO: 401641 - DNA, 15 bp, Homo sapiens
ggaatgatctgtgca

SEQ ID NO: 401642 - DNA, 15 bp, Homo sapiens
tggaatgatctgtgc

SEQ ID NO: 401643 - DNA, 15 bp, Homo sapiens
gtggaatgatctgtg

SEQ ID NO: 401644 - DNA, 15 bp, Homo sapiens
ggtggaatgatctgt

SEQ ID NO: 401645 - DNA, 15 bp, Homo sapiens
tggtggaatgatctg

SEQ ID NO: 401646 - DNA, 15 bp, Homo sapiens
gtggtggaatgatct

SEQ ID NO: 401647 - DNA, 15 bp, Homo sapiens
ggtggtggaatgatc

SEQ ID NO: 401648 - DNA, 15 bp, Homo sapiens
gggtggtggaatgat

SEQ ID NO: 401649 - DNA, 15 bp, Homo sapiens
tgggtggtggaatga

SEQ ID NO: 401650 - DNA, 15 bp, Homo sapiens
ttgggtggtggaatg

SEQ ID NO: 401651 - DNA, 15 bp, Homo sapiens
cttgggtggtggaat

SEQ ID NO: 401652 - DNA, 15 bp, Homo sapiens
acttgggtggtggaa

SEQ ID NO: 401653 - DNA, 15 bp, Homo sapiens
tacttgggtggtgga

SEQ ID NO: 401654 - DNA, 15 bp, Homo sapiens
atacttgggtggtgg

SEQ ID NO: 401655 - DNA, 15 bp, Homo sapiens
aatacttgggtggtg

SEQ ID NO: 401656 - DNA, 15 bp, Homo sapiens
taatacttgggtggt

SEQ ID NO: 401657 - DNA, 15 bp, Homo sapiens
ttaatacttgggtgg

SEQ ID NO: 401658 - DNA, 15 bp, Homo sapiens
cttaatacttgggtg

SEQ ID NO: 401659 - DNA, 15 bp, Homo sapiens
gcttaatacttgggt

SEQ ID NO: 401660 - DNA, 15 bp, Homo sapiens
ggcttaatacttggg

SEQ ID NO: 401661 - DNA, 15 bp, Homo sapiens
gggcttaatacttgg

SEQ ID NO: 401662 - DNA, 15 bp, Homo sapiens
tgggcttaatacttg

SEQ ID NO: 401663 - DNA, 15 bp, Homo sapiens
atgggcttaatactt

SEQ ID NO: 401664 - DNA, 15 bp, Homo sapiens
catgggcttaatact

SEQ ID NO: 401665 - DNA, 15 bp, Homo sapiens
gcatgggcttaatac

SEQ ID NO: 401666 - DNA, 15 bp, Homo sapiens
ggcatgggcttaata

SEQ ID NO: 401667 - DNA, 15 bp, Homo sapiens
gggcatgggcttaat

SEQ ID NO: 401668 - DNA, 15 bp, Homo sapiens
ggggcatgggcttaa

SEQ ID NO: 401669 - DNA, 15 bp, Homo sapiens
gggggcatgggctta

SEQ ID NO: 401670 - DNA, 15 bp, Homo sapiens
ggggggcatgggctt

SEQ ID NO: 401671 - DNA, 15 bp, Homo sapiens
tggggggcatgggct

SEQ ID NO: 401672 - DNA, 15 bp, Homo sapiens
ttggggggcatgggc

SEQ ID NO: 401673 - DNA, 15 bp, Homo sapiens
gttggggggcatggg

SEQ ID NO: 401674 - DNA, 15 bp, Homo sapiens
tgttggggggcatgg

SEQ ID NO: 401675 - DNA, 15 bp, Homo sapiens
ctgttggggggcatg

SEQ ID NO: 401676 - DNA, 15 bp, Homo sapiens
tctgttggggggcat

SEQ ID NO: 401677 - DNA, 15 bp, Homo sapiens
gtctgttggggggca

SEQ ID NO: 401678 - DNA, 15 bp, Homo sapiens
ggtctgttggggggc

SEQ ID NO: 401679 - DNA, 15 bp, Homo sapiens
tggtctgttgggggg

SEQ ID NO: 401680 - DNA, 15 bp, Homo sapiens
gtggtctgttggggg

SEQ ID NO: 401681 - DNA, 15 bp, Homo sapiens
tgtggtctgttgggg

SEQ ID NO: 401682 - DNA, 15 bp, Homo sapiens
ctgtggtctgttggg

SEQ ID NO: 401683 - DNA, 15 bp, Homo sapiens
actgtggtctgttgg

SEQ ID NO: 401684 - DNA, 15 bp, Homo sapiens
cactgtggtctgttg

SEQ ID NO: 401685 - DNA, 15 bp, Homo sapiens
acactgtggtctgtt

SEQ ID NO: 401686 - DNA, 15 bp, Homo sapiens
cacactgtggtctgt

SEQ ID NO: 401687 - DNA, 15 bp, Homo sapiens
acacactgtggtctg

SEQ ID NO: 401688 - DNA, 15 bp, Homo sapiens
cacacactgtggtct

SEQ ID NO: 401689 - DNA, 15 bp, Homo sapiens
acacacactgtggtc

SEQ ID NO: 401690 - DNA, 15 bp, Homo sapiens
aacacacactgtggt

SEQ ID NO: 401691 - DNA, 15 bp, Homo sapiens
caacacacactgtgg

SEQ ID NO: 401692 - DNA, 15 bp, Homo sapiens
acaacacacactgtg

SEQ ID NO: 401693 - DNA, 15 bp, Homo sapiens
aacaacacacactgt

SEQ ID NO: 401694 - DNA, 15 bp, Homo sapiens
gaacaacacacactg

SEQ ID NO: 401695 - DNA, 15 bp, Homo sapiens
ggaacaacacacact

SEQ ID NO: 401696 - DNA, 15 bp, Homo sapiens
gggaacaacacacac

SEQ ID NO: 401697 - DNA, 15 bp, Homo sapiens
ggggaacaacacaca

SEQ ID NO: 401698 - DNA, 15 bp, Homo sapiens
gggggaacaacacac

SEQ ID NO: 401699 - DNA, 15 bp, Homo sapiens
tgggggaacaacaca

SEQ ID NO: 401700 - DNA, 15 bp, Homo sapiens
atgggggaacaacac

SEQ ID NO: 401701 - DNA, 15 bp, Homo sapiens
catgggggaacaaca

SEQ ID NO: 401702 - DNA, 15 bp, Homo sapiens
acatgggggaacaac

SEQ ID NO: 401703 - DNA, 15 bp, Homo sapiens
cacatgggggaacaa

SEQ ID NO: 401704 - DNA, 15 bp, Homo sapiens
acacatgggggaaca

SEQ ID NO: 401705 - DNA, 15 bp, Homo sapiens
gacacatgggggaac

SEQ ID NO: 401706 - DNA, 15 bp, Homo sapiens
ggacacatgggggaa

SEQ ID NO: 401707 - DNA, 15 bp, Homo sapiens
tggacacatggggga

SEQ ID NO: 401708 - DNA, 15 bp, Homo sapiens
gtggacacatggggg

SEQ ID NO: 401709 - DNA, 15 bp, Homo sapiens
cgtggacacatgggg

SEQ ID NO: 401710 - DNA, 15 bp, Homo sapiens
acgtggacacatggg

SEQ ID NO: 401711 - DNA, 15 bp, Homo sapiens
cacgtggacacatgg

SEQ ID NO: 401712 - DNA, 15 bp, Homo sapiens
acacgtggacacatg

SEQ ID NO: 401713 - DNA, 15 bp, Homo sapiens
aacacgtggacacat

SEQ ID NO: 401714 - DNA, 15 bp, Homo sapiens
gaacacgtggacaca

SEQ ID NO: 401715 - DNA, 15 bp, Homo sapiens
agaacacgtggacac

SEQ ID NO: 401716 - DNA, 15 bp, Homo sapiens
gagaacacgtggaca

SEQ ID NO: 401717 - DNA, 15 bp, Homo sapiens
tgagaacacgtggac

SEQ ID NO: 401718 - DNA, 15 bp, Homo sapiens
atgagaacacgtgga

SEQ ID NO: 401719 - DNA, 15 bp, Homo sapiens
gatgagaacacgtgg

SEQ ID NO: 401720 - DNA, 15 bp, Homo sapiens
tgatgagaacacgtg

SEQ ID NO: 401721 - DNA, 15 bp, Homo sapiens
atgatgagaacacgt

SEQ ID NO: 401722 - DNA, 15 bp, Homo sapiens
aatgatgagaacacg

SEQ ID NO: 401723 - DNA, 15 bp, Homo sapiens
gaatgatgagaacac

SEQ ID NO: 401724 - DNA, 15 bp, Homo sapiens
tgaatgatgagaaca

SEQ ID NO: 401725 - DNA, 15 bp, Homo sapiens
ctgaatgatgagaac

SEQ ID NO: 401726 - DNA, 15 bp, Homo sapiens
gctgaatgatgagaa

SEQ ID NO: 401727 - DNA, 15 bp, Homo sapiens
tgctgaatgatgaga

SEQ ID NO: 401728 - DNA, 15 bp, Homo sapiens
gtgctgaatgatgag

SEQ ID NO: 401729 - DNA, 15 bp, Homo sapiens
ggtgctgaatgatga

SEQ ID NO: 401730 - DNA, 15 bp, Homo sapiens
gggtgctgaatgatg

SEQ ID NO: 401731 - DNA, 15 bp, Homo sapiens
tgggtgctgaatgat

SEQ ID NO: 401732 - DNA, 15 bp, Homo sapiens
gtgggtgctgaatga

SEQ ID NO: 401733 - DNA, 15 bp, Homo sapiens
agtgggtgctgaatg

SEQ ID NO: 401734 - DNA, 15 bp, Homo sapiens
gagtgggtgctgaat

SEQ ID NO: 401735 - DNA, 15 bp, Homo sapiens
tgagtgggtgctgaa

SEQ ID NO: 401736 - DNA, 15 bp, Homo sapiens
atgagtgggtgctga

SEQ ID NO: 401737 - DNA, 15 bp, Homo sapiens
tatgagtgggtgctg

SEQ ID NO: 401738 - DNA, 15 bp, Homo sapiens
ttatgagtgggtgct

SEQ ID NO: 401739 - DNA, 15 bp, Homo sapiens
cttatgagtgggtgc

SEQ ID NO: 401740 - DNA, 15 bp, Homo sapiens
acttatgagtgggtg

SEQ ID NO: 401741 - DNA, 15 bp, Homo sapiens
cacttatgagtgggt

SEQ ID NO: 401742 - DNA, 15 bp, Homo sapiens
tcacttatgagtggg

SEQ ID NO: 401743 - DNA, 15 bp, Homo sapiens
ctcacttatgagtgg

SEQ ID NO: 401744 - DNA, 15 bp, Homo sapiens
tctcacttatgagtg

SEQ ID NO: 401745 - DNA, 15 bp, Homo sapiens
ttctcacttatgagt

SEQ ID NO: 401746 - DNA, 15 bp, Homo sapiens
gttctcacttatgag

SEQ ID NO: 401747 - DNA, 15 bp, Homo sapiens
tgttctcacttatga

SEQ ID NO: 401748 - DNA, 15 bp, Homo sapiens
atgttctcacttatg

SEQ ID NO: 401749 - DNA, 15 bp, Homo sapiens
catgttctcacttat

SEQ ID NO: 401750 - DNA, 15 bp, Homo sapiens
acatgttctcactta

SEQ ID NO: 401751 - DNA, 15 bp, Homo sapiens
cacatgttctcactt

SEQ ID NO: 401752 - DNA, 15 bp, Homo sapiens
ccacatgttctcact

SEQ ID NO: 401753 - DNA, 15 bp, Homo sapiens
accacatgttctcac

SEQ ID NO: 401754 - DNA, 15 bp, Homo sapiens
caccacatgttctca

SEQ ID NO: 401755 - DNA, 15 bp, Homo sapiens
acaccacatgttctc

SEQ ID NO: 401756 - DNA, 15 bp, Homo sapiens
aacaccacatgttct

SEQ ID NO: 401757 - DNA, 15 bp, Homo sapiens
aaacaccacatgttc

SEQ ID NO: 401758 - DNA, 15 bp, Homo sapiens
caaacaccacatgtt

SEQ ID NO: 401759 - DNA, 15 bp, Homo sapiens
ccaaacaccacatgt

SEQ ID NO: 401760 - DNA, 15 bp, Homo sapiens
accaaacaccacatg

SEQ ID NO: 401761 - DNA, 15 bp, Homo sapiens
aaccaaacaccacat

SEQ ID NO: 401762 - DNA, 15 bp, Homo sapiens
aaaccaaacaccaca

SEQ ID NO: 401763 - DNA, 15 bp, Homo sapiens
aaaaccaaacaccac

SEQ ID NO: 401764 - DNA, 15 bp, Homo sapiens
gaaaaccaaacacca

SEQ ID NO: 401765 - DNA, 15 bp, Homo sapiens
tgaaaaccaaacacc

SEQ ID NO: 401766 - DNA, 15 bp, Homo sapiens
ctgaaaaccaaacac

SEQ ID NO: 401767 - DNA, 15 bp, Homo sapiens
actgaaaaccaaaca

SEQ ID NO: 401768 - DNA, 15 bp, Homo sapiens
aactgaaaaccaaac

SEQ ID NO: 401769 - DNA, 15 bp, Homo sapiens
gaactgaaaaccaaa

SEQ ID NO: 401770 - DNA, 15 bp, Homo sapiens
agaactgaaaaccaa

SEQ ID NO: 401771 - DNA, 15 bp, Homo sapiens
aagaactgaaaacca

SEQ ID NO: 401772 - DNA, 15 bp, Homo sapiens
caagaactgaaaacc

SEQ ID NO: 401773 - DNA, 15 bp, Homo sapiens
gcaagaactgaaaac

SEQ ID NO: 401774 - DNA, 15 bp, Homo sapiens
tgcaagaactgaaaa

SEQ ID NO: 401775 - DNA, 15 bp, Homo sapiens
atgcaagaactgaaa

SEQ ID NO: 401776 - DNA, 15 bp, Homo sapiens
aatgcaagaactgaa

SEQ ID NO: 401777 - DNA, 15 bp, Homo sapiens
taatgcaagaactga

SEQ ID NO: 401778 - DNA, 15 bp, Homo sapiens
ctaatgcaagaactg

SEQ ID NO: 401779 - DNA, 15 bp, Homo sapiens
actaatgcaagaact

SEQ ID NO: 401780 - DNA, 15 bp, Homo sapiens
aactaatgcaagaac

SEQ ID NO: 401781 - DNA, 15 bp, Homo sapiens
aaactaatgcaagaa

SEQ ID NO: 401782 - DNA, 15 bp, Homo sapiens
caaactaatgcaaga

SEQ ID NO: 401783 - DNA, 15 bp, Homo sapiens
acaaactaatgcaag

SEQ ID NO: 401784 - DNA, 15 bp, Homo sapiens
aacaaactaatgcaa

SEQ ID NO: 401785 - DNA, 15 bp, Homo sapiens
taacaaactaatgca

SEQ ID NO: 401786 - DNA, 15 bp, Homo sapiens
ttaacaaactaatgc

SEQ ID NO: 401787 - DNA, 15 bp, Homo sapiens
cttaacaaactaatg

SEQ ID NO: 401788 - DNA, 15 bp, Homo sapiens
ccttaacaaactaat

SEQ ID NO: 401789 - DNA, 15 bp, Homo sapiens
tccttaacaaactaa

SEQ ID NO: 401790 - DNA, 15 bp, Homo sapiens
ttccttaacaaacta

SEQ ID NO: 401791 - DNA, 15 bp, Homo sapiens
tttccttaacaaact

SEQ ID NO: 401792 - DNA, 15 bp, Homo sapiens
ttttccttaacaaac

SEQ ID NO: 401793 - DNA, 15 bp, Homo sapiens
attttccttaacaaa

SEQ ID NO: 401794 - DNA, 15 bp, Homo sapiens
cattttccttaacaa

SEQ ID NO: 401795 - DNA, 15 bp, Homo sapiens
tcattttccttaaca

SEQ ID NO: 401796 - DNA, 15 bp, Homo sapiens
gtcattttccttaac

SEQ ID NO: 401797 - DNA, 15 bp, Homo sapiens
agtcattttccttaa

SEQ ID NO: 401798 - DNA, 15 bp, Homo sapiens
aagtcattttcctta

SEQ ID NO: 401799 - DNA, 15 bp, Homo sapiens
gaagtcattttcctt

SEQ ID NO: 401800 - DNA, 15 bp, Homo sapiens
ggaagtcattttcct

SEQ ID NO: 401801 - DNA, 15 bp, Homo sapiens
tggaagtcattttcc

SEQ ID NO: 401802 - DNA, 15 bp, Homo sapiens
ttggaagtcattttc

SEQ ID NO: 401803 - DNA, 15 bp, Homo sapiens
gttggaagtcatttt

SEQ ID NO: 401804 - DNA, 15 bp, Homo sapiens
agttggaagtcattt

SEQ ID NO: 401805 - DNA, 15 bp, Homo sapiens
gagttggaagtcatt

SEQ ID NO: 401806 - DNA, 15 bp, Homo sapiens
ggagttggaagtcat

SEQ ID NO: 401807 - DNA, 15 bp, Homo sapiens
tggagttggaagtca

SEQ ID NO: 401808 - DNA, 15 bp, Homo sapiens
atggagttggaagtc

SEQ ID NO: 401809 - DNA, 15 bp, Homo sapiens
gatggagttggaagt

SEQ ID NO: 401810 - DNA, 15 bp, Homo sapiens
ggatggagttggaag

SEQ ID NO: 401811 - DNA, 15 bp, Homo sapiens
tggatggagttggaa

SEQ ID NO: 401812 - DNA, 15 bp, Homo sapiens
atggatggagttgga

SEQ ID NO: 401813 - DNA, 15 bp, Homo sapiens
tatggatggagttgg

SEQ ID NO: 401814 - DNA, 15 bp, Homo sapiens
atatggatggagttg

SEQ ID NO: 401815 - DNA, 15 bp, Homo sapiens
aatatggatggagtt

SEQ ID NO: 401816 - DNA, 15 bp, Homo sapiens
gaatatggatggagt

SEQ ID NO: 401817 - DNA, 15 bp, Homo sapiens
ggaatatggatggag

SEQ ID NO: 401818 - DNA, 15 bp, Homo sapiens
aggaatatggatgga

SEQ ID NO: 401819 - DNA, 15 bp, Homo sapiens
caggaatatggatgg

SEQ ID NO: 401820 - DNA, 15 bp, Homo sapiens
gcaggaatatggatg

SEQ ID NO: 401821 - DNA, 15 bp, Homo sapiens
tgcaggaatatggat

SEQ ID NO: 401822 - DNA, 15 bp, Homo sapiens
ttgcaggaatatgga

SEQ ID NO: 401823 - DNA, 15 bp, Homo sapiens
tttgcaggaatatgg

SEQ ID NO: 401824 - DNA, 15 bp, Homo sapiens
ctttgcaggaatatg

SEQ ID NO: 401825 - DNA, 15 bp, Homo sapiens
cctttgcaggaatat

SEQ ID NO: 401826 - DNA, 15 bp, Homo sapiens
tcctttgcaggaata

SEQ ID NO: 401827 - DNA, 15 bp, Homo sapiens
gtcctttgcaggaat

SEQ ID NO: 401828 - DNA, 15 bp, Homo sapiens
tgtcctttgcaggaa

SEQ ID NO: 401829 - DNA, 15 bp, Homo sapiens
atgtcctttgcagga

SEQ ID NO: 401830 - DNA, 15 bp, Homo sapiens
gcatgtcctttgcag

SEQ ID NO: 401831 - DNA, 15 bp, Homo sapiens
agcatgtcctttgca

SEQ ID NO: 401832 - DNA, 15 bp, Homo sapiens
gagcatgtcctttgc

SEQ ID NO: 401833 - DNA, 15 bp, Homo sapiens
agagcatgtcctttg

SEQ ID NO: 401834 - DNA, 15 bp, Homo sapiens
gagagcatgtccttt

SEQ ID NO: 401835 - DNA, 15 bp, Homo sapiens
tgagagcatgtcctt

SEQ ID NO: 401836 - DNA, 15 bp, Homo sapiens
atgagagcatgtcct

SEQ ID NO: 401837 - DNA, 15 bp, Homo sapiens
aatgagagcatgtcc

SEQ ID NO: 401838 - DNA, 15 bp, Homo sapiens
gaatgagagcatgtc

SEQ ID NO: 401839 - DNA, 15 bp, Homo sapiens
agaatgagagcatgt

SEQ ID NO: 401840 - DNA, 15 bp, Homo sapiens
aagaatgagagcatg

SEQ ID NO: 401841 - DNA, 15 bp, Homo sapiens
aaagaatgagagcat

SEQ ID NO: 401842 - DNA, 15 bp, Homo sapiens
aaaagaatgagagca

SEQ ID NO: 401843 - DNA, 15 bp, Homo sapiens
aaaaagaatgagagc

SEQ ID NO: 401844 - DNA, 15 bp, Homo sapiens
aaaaaagaatgagag

SEQ ID NO: 401845 - DNA, 15 bp, Homo sapiens
aaaaaaagaatgaga

SEQ ID NO: 401846 - DNA, 15 bp, Homo sapiens
aaaaaaaagaatgag

SEQ ID NO: 401847 - DNA, 15 bp, Homo sapiens
caaaaaaaagaatga

SEQ ID NO: 401848 - DNA, 15 bp, Homo sapiens
acaaaaaaaagaatg

SEQ ID NO: 401849 - DNA, 15 bp, Homo sapiens
cacaaaaaaaagaat

SEQ ID NO: 401850 - DNA, 15 bp, Homo sapiens
ccacaaaaaaaagaa

SEQ ID NO: 401851 - DNA, 15 bp, Homo sapiens
gccacaaaaaaaaga

SEQ ID NO: 401852 - DNA, 15 bp, Homo sapiens
agccacaaaaaaaag

SEQ ID NO: 401853 - DNA, 15 bp, Homo sapiens
cagccacaaaaaaaa

SEQ ID NO: 401854 - DNA, 15 bp, Homo sapiens
gcagccacaaaaaaa

SEQ ID NO: 401855 - DNA, 15 bp, Homo sapiens
tgcagccacaaaaaa

SEQ ID NO: 401856 - DNA, 15 bp, Homo sapiens
atgcagccacaaaaa

SEQ ID NO: 401857 - DNA, 15 bp, Homo sapiens
tatgcagccacaaaa

SEQ ID NO: 401858 - DNA, 15 bp, Homo sapiens
ctatgcagccacaaa

SEQ ID NO: 401859 - DNA, 15 bp, Homo sapiens
actatgcagccacaa

SEQ ID NO: 401860 - DNA, 15 bp, Homo sapiens
tactatgcagccaca

SEQ ID NO: 401861 - DNA, 15 bp, Homo sapiens
atactatgcagccac

SEQ ID NO: 401862 - DNA, 15 bp, Homo sapiens
aatactatgcagcca

SEQ ID NO: 401863 - DNA, 15 bp, Homo sapiens
ggaatactatgcagc

SEQ ID NO: 401864 - DNA, 15 bp, Homo sapiens
tggaatactatgcag

SEQ ID NO: 401865 - DNA, 15 bp, Homo sapiens
atggaatactatgca

SEQ ID NO: 401866 - DNA, 15 bp, Homo sapiens
catggaatactatgc

SEQ ID NO: 401867 - DNA, 15 bp, Homo sapiens
ccatggaatactatg

SEQ ID NO: 401868 - DNA, 15 bp, Homo sapiens
accatggaatactat

SEQ ID NO: 401869 - DNA, 15 bp, Homo sapiens
caccatggaatacta

SEQ ID NO: 401870 - DNA, 15 bp, Homo sapiens
acaccatggaatact

SEQ ID NO: 401871 - DNA, 15 bp, Homo sapiens
tacaccatggaatac

SEQ ID NO: 401872 - DNA, 15 bp, Homo sapiens
atacaccatggaata

SEQ ID NO: 401873 - DNA, 15 bp, Homo sapiens
tatacaccatggaat

SEQ ID NO: 401874 - DNA, 15 bp, Homo sapiens
gtatacaccatggaa

SEQ ID NO: 401875 - DNA, 15 bp, Homo sapiens
cgtatacaccatgga

SEQ ID NO: 401876 - DNA, 15 bp, Homo sapiens
acgtatacaccatgg

SEQ ID NO: 401877 - DNA, 15 bp, Homo sapiens
tacgtatacaccatg

SEQ ID NO: 401878 - DNA, 15 bp, Homo sapiens
gtacgtatacaccat

SEQ ID NO: 401879 - DNA, 15 bp, Homo sapiens
ggtacgtatacacca

SEQ ID NO: 401880 - DNA, 15 bp, Homo sapiens
tggtacgtatacacc

SEQ ID NO: 401881 - DNA, 15 bp, Homo sapiens
atggtacgtatacac

SEQ ID NO: 401882 - DNA, 15 bp, Homo sapiens
tatggtacgtataca

SEQ ID NO: 401883 - DNA, 15 bp, Homo sapiens
atatggtacgtatac

SEQ ID NO: 401884 - DNA, 15 bp, Homo sapiens
aatatggtacgtata

SEQ ID NO: 401885 - DNA, 15 bp, Homo sapiens
aaatatggtacgtat

SEQ ID NO: 401886 - DNA, 15 bp, Homo sapiens
aaaatatggtacgta

SEQ ID NO: 401887 - DNA, 15 bp, Homo sapiens
caaaatatggtacgt

SEQ ID NO: 401888 - DNA, 15 bp, Homo sapiens
acaaaatatggtacg

SEQ ID NO: 401889 - DNA, 15 bp, Homo sapiens
aacaaaatatggtac

SEQ ID NO: 401890 - DNA, 15 bp, Homo sapiens
aaacaaaatatggta

SEQ ID NO: 401891 - DNA, 15 bp, Homo sapiens
taaacaaaatatggt

SEQ ID NO: 401892 - DNA, 15 bp, Homo sapiens
ataaacaaaatatgg

SEQ ID NO: 401893 - DNA, 15 bp, Homo sapiens
gataaacaaaatatg

SEQ ID NO: 401894 - DNA, 15 bp, Homo sapiens
ggataaacaaaatat

SEQ ID NO: 401895 - DNA, 15 bp, Homo sapiens
tggataaacaaaata

SEQ ID NO: 401896 - DNA, 15 bp, Homo sapiens
ttggataaacaaaat

SEQ ID NO: 401897 - DNA, 15 bp, Homo sapiens
attggataaacaaaa

SEQ ID NO: 401898 - DNA, 15 bp, Homo sapiens
gattggataaacaaa

SEQ ID NO: 401899 - DNA, 15 bp, Homo sapiens
agattggataaacaa

SEQ ID NO: 401900 - DNA, 15 bp, Homo sapiens
tagattggataaaca

SEQ ID NO: 401901 - DNA, 15 bp, Homo sapiens
atagattggataaac

SEQ ID NO: 401902 - DNA, 15 bp, Homo sapiens
gatagattggataaa

SEQ ID NO: 401903 - DNA, 15 bp, Homo sapiens
tgatagattggataa

SEQ ID NO: 401904 - DNA, 15 bp, Homo sapiens
atgatagattggata

SEQ ID NO: 401905 - DNA, 15 bp, Homo sapiens
aatgatagattggat

SEQ ID NO: 401906 - DNA, 15 bp, Homo sapiens
caatgatagattgga

SEQ ID NO: 401907 - DNA, 15 bp, Homo sapiens
tcaatgatagattgg

SEQ ID NO: 401908 - DNA, 15 bp, Homo sapiens
atcaatgatagattg

SEQ ID NO: 401909 - DNA, 15 bp, Homo sapiens
catcaatgatagatt

SEQ ID NO: 401910 - DNA, 15 bp, Homo sapiens
ccatcaatgatagat

SEQ ID NO: 401911 - DNA, 15 bp, Homo sapiens
cccatcaatgataga

SEQ ID NO: 401912 - DNA, 15 bp, Homo sapiens
gcccatcaatgatag

SEQ ID NO: 401913 - DNA, 15 bp, Homo sapiens
tgcccatcaatgata

SEQ ID NO: 401914 - DNA, 15 bp, Homo sapiens
atgcccatcaatgat

SEQ ID NO: 401915 - DNA, 15 bp, Homo sapiens
aatgcccatcaatga

SEQ ID NO: 401916 - DNA, 15 bp, Homo sapiens
aaatgcccatcaatg

SEQ ID NO: 401917 - DNA, 15 bp, Homo sapiens
taaatgcccatcaat

SEQ ID NO: 401918 - DNA, 15 bp, Homo sapiens
ctaaatgcccatcaa

SEQ ID NO: 401919 - DNA, 15 bp, Homo sapiens
cctaaatgcccatca

SEQ ID NO: 401920 - DNA, 15 bp, Homo sapiens
gcctaaatgcccatc

SEQ ID NO: 401921 - DNA, 15 bp, Homo sapiens
agcctaaatgcccat

SEQ ID NO: 401922 - DNA, 15 bp, Homo sapiens
cagcctaaatgccca

SEQ ID NO: 401923 - DNA, 15 bp, Homo sapiens
gcagcctaaatgccc

SEQ ID NO: 401924 - DNA, 15 bp, Homo sapiens
agcagcctaaatgcc

SEQ ID NO: 401925 - DNA, 15 bp, Homo sapiens
aagcagcctaaatgc

SEQ ID NO: 401926 - DNA, 15 bp, Homo sapiens
gaagcagcctaaatg

SEQ ID NO: 401927 - DNA, 15 bp, Homo sapiens
ggaagcagcctaaat

SEQ ID NO: 401928 - DNA, 15 bp, Homo sapiens
tggaagcagcctaaa

SEQ ID NO: 401929 - DNA, 15 bp, Homo sapiens
atggaagcagcctaa

SEQ ID NO: 401930 - DNA, 15 bp, Homo sapiens
catggaagcagccta

SEQ ID NO: 401931 - DNA, 15 bp, Homo sapiens
gcatggaagcagcct

SEQ ID NO: 401932 - DNA, 15 bp, Homo sapiens
ggcatggaagcagcc

SEQ ID NO: 401933 - DNA, 15 bp, Homo sapiens
aggcatggaagcagc

SEQ ID NO: 401934 - DNA, 15 bp, Homo sapiens
aaggcatggaagcag

SEQ ID NO: 401935 - DNA, 15 bp, Homo sapiens
aaaggcatggaagca

SEQ ID NO: 401936 - DNA, 15 bp, Homo sapiens
aaaaggcatggaagc

SEQ ID NO: 401937 - DNA, 15 bp, Homo sapiens
gaaaaggcatggaag

SEQ ID NO: 401938 - DNA, 15 bp, Homo sapiens
agaaaaggcatggaa

SEQ ID NO: 401939 - DNA, 15 bp, Homo sapiens
tagaaaaggcatgga

SEQ ID NO: 401940 - DNA, 15 bp, Homo sapiens
atagaaaaggcatgg

SEQ ID NO: 401941 - DNA, 15 bp, Homo sapiens
aatagaaaaggcatg

SEQ ID NO: 401942 - DNA, 15 bp, Homo sapiens
caatagaaaaggcat

SEQ ID NO: 401943 - DNA, 15 bp, Homo sapiens
acaatagaaaaggca

SEQ ID NO: 401944 - DNA, 15 bp, Homo sapiens
cacaatagaaaaggc

SEQ ID NO: 401945 - DNA, 15 bp, Homo sapiens
acacaatagaaaagg

SEQ ID NO: 401946 - DNA, 15 bp, Homo sapiens
tacacaatagaaaag

SEQ ID NO: 401947 - DNA, 15 bp, Homo sapiens
atacacaatagaaaa

SEQ ID NO: 401948 - DNA, 15 bp, Homo sapiens
tatacacaatagaaa

SEQ ID NO: 401949 - DNA, 15 bp, Homo sapiens
ctatacacaatagaa

SEQ ID NO: 401950 - DNA, 15 bp, Homo sapiens
actatacacaataga

SEQ ID NO: 401951 - DNA, 15 bp, Homo sapiens
cactatacacaatag

SEQ ID NO: 401952 - DNA, 15 bp, Homo sapiens
gcactatacacaata

SEQ ID NO: 401953 - DNA, 15 bp, Homo sapiens
agcactatacacaat

SEQ ID NO: 401954 - DNA, 15 bp, Homo sapiens
cagcactatacacaa

SEQ ID NO: 401955 - DNA, 15 bp, Homo sapiens
gcagcactatacaca

SEQ ID NO: 401956 - DNA, 15 bp, Homo sapiens
tgcagcactatacac

SEQ ID NO: 401957 - DNA, 15 bp, Homo sapiens
ttgcagcactataca

SEQ ID NO: 401958 - DNA, 15 bp, Homo sapiens
attgcagcactatac

SEQ ID NO: 401959 - DNA, 15 bp, Homo sapiens
cattgcagcactata

SEQ ID NO: 401960 - DNA, 15 bp, Homo sapiens
tcattgcagcactat

SEQ ID NO: 401961 - DNA, 15 bp, Homo sapiens
ttcattgcagcacta

SEQ ID NO: 401962 - DNA, 15 bp, Homo sapiens
gttcattgcagcact

SEQ ID NO: 401963 - DNA, 15 bp, Homo sapiens
tgttcattgcagcac

SEQ ID NO: 401964 - DNA, 15 bp, Homo sapiens
atgttcattgcagca

SEQ ID NO: 401965 - DNA, 15 bp, Homo sapiens
tatgttcattgcagc

SEQ ID NO: 401966 - DNA, 15 bp, Homo sapiens
atatgttcattgcag

SEQ ID NO: 401967 - DNA, 15 bp, Homo sapiens
catatgttcattgca

SEQ ID NO: 401968 - DNA, 15 bp, Homo sapiens
gcatatgttcattgc

SEQ ID NO: 401969 - DNA, 15 bp, Homo sapiens
tgcatatgttcattg

SEQ ID NO: 401970 - DNA, 15 bp, Homo sapiens
ttgcatatgttcatt

SEQ ID NO: 401971 - DNA, 15 bp, Homo sapiens
cttgcatatgttcat

SEQ ID NO: 401972 - DNA, 15 bp, Homo sapiens
gcttgcatatgttca

SEQ ID NO: 401973 - DNA, 15 bp, Homo sapiens
tgcttgcatatgttc

SEQ ID NO: 401974 - DNA, 15 bp, Homo sapiens
atgcttgcatatgtt

SEQ ID NO: 401975 - DNA, 15 bp, Homo sapiens
catgcttgcatatgt

SEQ ID NO: 401976 - DNA, 15 bp, Homo sapiens
acatgcttgcatatg

SEQ ID NO: 401977 - DNA, 15 bp, Homo sapiens
tacatgcttgcatat

SEQ ID NO: 401978 - DNA, 15 bp, Homo sapiens
atacatgcttgcata

SEQ ID NO: 401979 - DNA, 15 bp, Homo sapiens
gatacatgcttgcat

SEQ ID NO: 401980 - DNA, 15 bp, Homo sapiens
agatacatgcttgca

SEQ ID NO: 401981 - DNA, 15 bp, Homo sapiens
aagatacatgcttgc

SEQ ID NO: 401982 - DNA, 15 bp, Homo sapiens
aaagatacatgcttg

SEQ ID NO: 401983 - DNA, 15 bp, Homo sapiens
taaagatacatgctt

SEQ ID NO: 401984 - DNA, 15 bp, Homo sapiens
ataaagatacatgct

SEQ ID NO: 401985 - DNA, 15 bp, Homo sapiens
tataaagatacatgc

SEQ ID NO: 401986 - DNA, 15 bp, Homo sapiens
ttataaagatacatg

SEQ ID NO: 401987 - DNA, 15 bp, Homo sapiens
gttataaagatacat

SEQ ID NO: 401988 - DNA, 15 bp, Homo sapiens
tgttataaagataca

SEQ ID NO: 401989 - DNA, 15 bp, Homo sapiens
ctgttataaagatac

SEQ ID NO: 401990 - DNA, 15 bp, Homo sapiens
tctgttataaagata

SEQ ID NO: 401991 - DNA, 15 bp, Homo sapiens
ttctgttataaagat

SEQ ID NO: 401992 - DNA, 15 bp, Homo sapiens
attctgttataaaga

SEQ ID NO: 401993 - DNA, 15 bp, Homo sapiens
cattctgttataaag

SEQ ID NO: 401994 - DNA, 15 bp, Homo sapiens
tcattctgttataaa

SEQ ID NO: 401995 - DNA, 15 bp, Homo sapiens
atcattctgttataa

SEQ ID NO: 401996 - DNA, 15 bp, Homo sapiens
aatcattctgttata

SEQ ID NO: 401997 - DNA, 15 bp, Homo sapiens
aaatcattctgttat

SEQ ID NO: 401998 - DNA, 15 bp, Homo sapiens
gaaatcattctgtta

SEQ ID NO: 401999 - DNA, 15 bp, Homo sapiens
agaaatcattctgtt

SEQ ID NO: 402000 - DNA, 15 bp, Homo sapiens
cagaaatcattctgt

SEQ ID NO: 402001 - DNA, 15 bp, Homo sapiens
acagaaatcattctg

SEQ ID NO: 402002 - DNA, 15 bp, Homo sapiens
aacagaaatcattct

SEQ ID NO: 402003 - DNA, 15 bp, Homo sapiens
gaacagaaatcattc

SEQ ID NO: 402004 - DNA, 15 bp, Homo sapiens
ggaacagaaatcatt

SEQ ID NO: 402005 - DNA, 15 bp, Homo sapiens
aggaacagaaatcat

SEQ ID NO: 402006 - DNA, 15 bp, Homo sapiens
aaggaacagaaatca

SEQ ID NO: 402007 - DNA, 15 bp, Homo sapiens
aaaggaacagaaatc

SEQ ID NO: 402008 - DNA, 15 bp, Homo sapiens
caaaggaacagaaat

SEQ ID NO: 402009 - DNA, 15 bp, Homo sapiens
tcaaaggaacagaaa

SEQ ID NO: 402010 - DNA, 15 bp, Homo sapiens
ctcaaaggaacagaa

SEQ ID NO: 402011 - DNA, 15 bp, Homo sapiens
actcaaaggaacaga

SEQ ID NO: 402012 - DNA, 15 bp, Homo sapiens
tactcaaaggaacag

SEQ ID NO: 402013 - DNA, 15 bp, Homo sapiens
atactcaaaggaaca

SEQ ID NO: 402014 - DNA, 15 bp, Homo sapiens
catactcaaaggaac

SEQ ID NO: 402015 - DNA, 15 bp, Homo sapiens
acatactcaaaggaa

SEQ ID NO: 402016 - DNA, 15 bp, Homo sapiens
tacatactcaaagga

SEQ ID NO: 402017 - DNA, 15 bp, Homo sapiens
gtacatactcaaagg

SEQ ID NO: 402018 - DNA, 15 bp, Homo sapiens
ggtacatactcaaag

SEQ ID NO: 402019 - DNA, 15 bp, Homo sapiens
aggtacatactcaaa

SEQ ID NO: 402020 - DNA, 15 bp, Homo sapiens
taggtacatactcaa

SEQ ID NO: 402021 - DNA, 15 bp, Homo sapiens
ctaggtacatactca

SEQ ID NO: 402022 - DNA, 15 bp, Homo sapiens
actaggtacatactc

SEQ ID NO: 402023 - DNA, 15 bp, Homo sapiens
tactaggtacatact

SEQ ID NO: 402024 - DNA, 15 bp, Homo sapiens
ttactaggtacatac

SEQ ID NO: 402025 - DNA, 15 bp, Homo sapiens
attactaggtacata

SEQ ID NO: 402026 - DNA, 15 bp, Homo sapiens
cattactaggtacat

SEQ ID NO: 402027 - DNA, 15 bp, Homo sapiens
ccattactaggtaca

SEQ ID NO: 402028 - DNA, 15 bp, Homo sapiens
cccattactaggtac

SEQ ID NO: 402029 - DNA, 15 bp, Homo sapiens
tcccattactaggta

SEQ ID NO: 402030 - DNA, 15 bp, Homo sapiens
atcccattactaggt

SEQ ID NO: 402031 - DNA, 15 bp, Homo sapiens
aatcccattactagg

SEQ ID NO: 402032 - DNA, 15 bp, Homo sapiens
caatcccattactag

SEQ ID NO: 402033 - DNA, 15 bp, Homo sapiens
acaatcccattacta

SEQ ID NO: 402034 - DNA, 15 bp, Homo sapiens
aacaatcccattact

SEQ ID NO: 402035 - DNA, 15 bp, Homo sapiens
caacaatcccattac

SEQ ID NO: 402036 - DNA, 15 bp, Homo sapiens
ccaacaatcccatta

SEQ ID NO: 402037 - DNA, 15 bp, Homo sapiens
cccaacaatcccatt

SEQ ID NO: 402038 - DNA, 15 bp, Homo sapiens
acccaacaatcccat

SEQ ID NO: 402039 - DNA, 15 bp, Homo sapiens
gacccaacaatccca

SEQ ID NO: 402040 - DNA, 15 bp, Homo sapiens
tgacccaacaatccc

SEQ ID NO: 402041 - DNA, 15 bp, Homo sapiens
ttgacccaacaatcc

SEQ ID NO: 402042 - DNA, 15 bp, Homo sapiens
tttgacccaacaatc

SEQ ID NO: 402043 - DNA, 15 bp, Homo sapiens
atttgacccaacaat

SEQ ID NO: 402044 - DNA, 15 bp, Homo sapiens
aatttgacccaacaa

SEQ ID NO: 402045 - DNA, 15 bp, Homo sapiens
caatttgacccaaca

SEQ ID NO: 402046 - DNA, 15 bp, Homo sapiens
acaatttgacccaac

SEQ ID NO: 402047 - DNA, 15 bp, Homo sapiens
tacaatttgacccaa

SEQ ID NO: 402048 - DNA, 15 bp, Homo sapiens
atacaatttgaccca

SEQ ID NO: 402049 - DNA, 15 bp, Homo sapiens
aatacaatttgaccc

SEQ ID NO: 402050 - DNA, 15 bp, Homo sapiens
aaatacaatttgacc

SEQ ID NO: 402051 - DNA, 15 bp, Homo sapiens
gaaatacaatttgac

SEQ ID NO: 402052 - DNA, 15 bp, Homo sapiens
agaaatacaatttga

SEQ ID NO: 402053 - DNA, 15 bp, Homo sapiens
cagaaatacaatttg

SEQ ID NO: 402054 - DNA, 15 bp, Homo sapiens
gcagaaatacaattt

SEQ ID NO: 402055 - DNA, 15 bp, Homo sapiens
agcagaaatacaatt

SEQ ID NO: 402056 - DNA, 15 bp, Homo sapiens
aagcagaaatacaat

SEQ ID NO: 402057 - DNA, 15 bp, Homo sapiens
gaagcagaaatacaa

SEQ ID NO: 402058 - DNA, 15 bp, Homo sapiens
agaagcagaaataca

SEQ ID NO: 402059 - DNA, 15 bp, Homo sapiens
tagaagcagaaatac

SEQ ID NO: 402060 - DNA, 15 bp, Homo sapiens
ctagaagcagaaata

SEQ ID NO: 402061 - DNA, 15 bp, Homo sapiens
cctagaagcagaaat

SEQ ID NO: 402062 - DNA, 15 bp, Homo sapiens
acctagaagcagaaa

SEQ ID NO: 402063 - DNA, 15 bp, Homo sapiens
gacctagaagcagaa

SEQ ID NO: 402064 - DNA, 15 bp, Homo sapiens
agacctagaagcaga

SEQ ID NO: 402065 - DNA, 15 bp, Homo sapiens
aagacctagaagcag

SEQ ID NO: 402066 - DNA, 15 bp, Homo sapiens
aaagacctagaagca

SEQ ID NO: 402067 - DNA, 15 bp, Homo sapiens
caaagacctagaagc

SEQ ID NO: 402068 - DNA, 15 bp, Homo sapiens
tcaaagacctagaag

SEQ ID NO: 402069 - DNA, 15 bp, Homo sapiens
ctcaaagacctagaa

SEQ ID NO: 402070 - DNA, 15 bp, Homo sapiens
cctcaaagacctaga

SEQ ID NO: 402071 - DNA, 15 bp, Homo sapiens
tcctcaaagacctag

SEQ ID NO: 402072 - DNA, 15 bp, Homo sapiens
ttcctcaaagaccta

SEQ ID NO: 402073 - DNA, 15 bp, Homo sapiens
attcctcaaagacct

SEQ ID NO: 402074 - DNA, 15 bp, Homo sapiens
tattcctcaaagacc

SEQ ID NO: 402075 - DNA, 15 bp, Homo sapiens
ctattcctcaaagac

SEQ ID NO: 402076 - DNA, 15 bp, Homo sapiens
gctattcctcaaaga

SEQ ID NO: 402077 - DNA, 15 bp, Homo sapiens
ggctattcctcaaag

SEQ ID NO: 402078 - DNA, 15 bp, Homo sapiens
tggctattcctcaaa

SEQ ID NO: 402079 - DNA, 15 bp, Homo sapiens
gtggctattcctcaa

SEQ ID NO: 402080 - DNA, 15 bp, Homo sapiens
tgtggctattcctca

SEQ ID NO: 402081 - DNA, 15 bp, Homo sapiens
gtgtggctattcctc

SEQ ID NO: 402082 - DNA, 15 bp, Homo sapiens
agtgtggctattcct

SEQ ID NO: 402083 - DNA, 15 bp, Homo sapiens
cagtgtggctattcc

SEQ ID NO: 402084 - DNA, 15 bp, Homo sapiens
acagtgtggctattc

SEQ ID NO: 402085 - DNA, 15 bp, Homo sapiens
gacagtgtggctatt

SEQ ID NO: 402086 - DNA, 15 bp, Homo sapiens
agacagtgtggctat

SEQ ID NO: 402087 - DNA, 15 bp, Homo sapiens
aagacagtgtggcta

SEQ ID NO: 402088 - DNA, 15 bp, Homo sapiens
taagacagtgtggct

SEQ ID NO: 402089 - DNA, 15 bp, Homo sapiens
gtaagacagtgtggc

SEQ ID NO: 402090 - DNA, 15 bp, Homo sapiens
tgtaagacagtgtgg

SEQ ID NO: 402091 - DNA, 15 bp, Homo sapiens
gtgtaagacagtgtg

SEQ ID NO: 402092 - DNA, 15 bp, Homo sapiens
tgtgtaagacagtgt

SEQ ID NO: 402093 - DNA, 15 bp, Homo sapiens
ttgtgtaagacagtg

SEQ ID NO: 402094 - DNA, 15 bp, Homo sapiens
gttgtgtaagacagt

SEQ ID NO: 402095 - DNA, 15 bp, Homo sapiens
cgttgtgtaagacag

SEQ ID NO: 402096 - DNA, 15 bp, Homo sapiens
ccgttgtgtaagaca

SEQ ID NO: 402097 - DNA, 15 bp, Homo sapiens
accgttgtgtaagac

SEQ ID NO: 402098 - DNA, 15 bp, Homo sapiens
aaccgttgtgtaaga

SEQ ID NO: 402099 - DNA, 15 bp, Homo sapiens
caaccgttgtgtaag

SEQ ID NO: 402100 - DNA, 15 bp, Homo sapiens
tcaaccgttgtgtaa

SEQ ID NO: 402101 - DNA, 15 bp, Homo sapiens
ttcaaccgttgtgta

SEQ ID NO: 402102 - DNA, 15 bp, Homo sapiens
attcaaccgttgtgt

SEQ ID NO: 402103 - DNA, 15 bp, Homo sapiens
aattcaaccgttgtg

SEQ ID NO: 402104 - DNA, 15 bp, Homo sapiens
taattcaaccgttgt

SEQ ID NO: 402105 - DNA, 15 bp, Homo sapiens
ttaattcaaccgttg

SEQ ID NO: 402106 - DNA, 15 bp, Homo sapiens
attaattcaaccgtt

SEQ ID NO: 402107 - DNA, 15 bp, Homo sapiens
aattaattcaaccgt

SEQ ID NO: 402108 - DNA, 15 bp, Homo sapiens
aaattaattcaaccg

SEQ ID NO: 402109 - DNA, 15 bp, Homo sapiens
taaattaattcaacc

SEQ ID NO: 402110 - DNA, 15 bp, Homo sapiens
gtaaattaattcaac

SEQ ID NO: 402111 - DNA, 15 bp, Homo sapiens
tgtaaattaattcaa

SEQ ID NO: 402112 - DNA, 15 bp, Homo sapiens
gtgtaaattaattca

SEQ ID NO: 402113 - DNA, 15 bp, Homo sapiens
agtgtaaattaattc

SEQ ID NO: 402114 - DNA, 15 bp, Homo sapiens
gagtgtaaattaatt

SEQ ID NO: 402115 - DNA, 15 bp, Homo sapiens
ggagtgtaaattaat

SEQ ID NO: 402116 - DNA, 15 bp, Homo sapiens
gggagtgtaaattaa

SEQ ID NO: 402117 - DNA, 15 bp, Homo sapiens
tgggagtgtaaatta

SEQ ID NO: 402118 - DNA, 15 bp, Homo sapiens
gtgggagtgtaaatt

SEQ ID NO: 402119 - DNA, 15 bp, Homo sapiens
agtgggagtgtaaat

SEQ ID NO: 402120 - DNA, 15 bp, Homo sapiens
tagtgggagtgtaaa

SEQ ID NO: 402121 - DNA, 15 bp, Homo sapiens
ttagtgggagtgtaa

SEQ ID NO: 402122 - DNA, 15 bp, Homo sapiens
gttagtgggagtgta

SEQ ID NO: 402123 - DNA, 15 bp, Homo sapiens
tgttagtgggagtgt

SEQ ID NO: 402124 - DNA, 15 bp, Homo sapiens
atgttagtgggagtg

SEQ ID NO: 402125 - DNA, 15 bp, Homo sapiens
aatgttagtgggagt

SEQ ID NO: 402126 - DNA, 15 bp, Homo sapiens
caatgttagtgggag

SEQ ID NO: 402127 - DNA, 15 bp, Homo sapiens
acaatgttagtggga

SEQ ID NO: 402128 - DNA, 15 bp, Homo sapiens
tacaatgttagtggg

SEQ ID NO: 402129 - DNA, 15 bp, Homo sapiens
ttacaatgttagtgg

SEQ ID NO: 402130 - DNA, 15 bp, Homo sapiens
tttacaatgttagtg

SEQ ID NO: 402131 - DNA, 15 bp, Homo sapiens
ttttacaatgttagt

SEQ ID NO: 402132 - DNA, 15 bp, Homo sapiens
tttttacaatgttag

SEQ ID NO: 402133 - DNA, 15 bp, Homo sapiens
gtttttacaatgtta

SEQ ID NO: 402134 - DNA, 15 bp, Homo sapiens
tgtttttacaatgtt

SEQ ID NO: 402135 - DNA, 15 bp, Homo sapiens
atgtttttacaatgt

SEQ ID NO: 402136 - DNA, 15 bp, Homo sapiens
aatgtttttacaatg

SEQ ID NO: 402137 - DNA, 15 bp, Homo sapiens
gaatgtttttacaat

SEQ ID NO: 402138 - DNA, 15 bp, Homo sapiens
ggaatgtttttacaa

SEQ ID NO: 402139 - DNA, 15 bp, Homo sapiens
aggaatgtttttaca

SEQ ID NO: 402140 - DNA, 15 bp, Homo sapiens
aaggaatgtttttac

SEQ ID NO: 402141 - DNA, 15 bp, Homo sapiens
aaaggaatgttttta

SEQ ID NO: 402142 - DNA, 15 bp, Homo sapiens
aaaaggaatgttttt

SEQ ID NO: 402143 - DNA, 15 bp, Homo sapiens
aaaaaggaatgtttt

SEQ ID NO: 402144 - DNA, 15 bp, Homo sapiens
gaaaaaggaatgttt

SEQ ID NO: 402145 - DNA, 15 bp, Homo sapiens
agaaaaaggaatgtt

SEQ ID NO: 402146 - DNA, 15 bp, Homo sapiens
tagaaaaaggaatgt

SEQ ID NO: 402147 - DNA, 15 bp, Homo sapiens
atagaaaaaggaatg

SEQ ID NO: 402148 - DNA, 15 bp, Homo sapiens
catagaaaaaggaat

SEQ ID NO: 402149 - DNA, 15 bp, Homo sapiens
acatagaaaaaggaa

SEQ ID NO: 402150 - DNA, 15 bp, Homo sapiens
cacatagaaaaagga

SEQ ID NO: 402151 - DNA, 15 bp, Homo sapiens
ccacatagaaaaagg

SEQ ID NO: 402152 - DNA, 15 bp, Homo sapiens
gccacatagaaaaag

SEQ ID NO: 402153 - DNA, 15 bp, Homo sapiens
agccacatagaaaaa

SEQ ID NO: 402154 - DNA, 15 bp, Homo sapiens
aagccacatagaaaa

SEQ ID NO: 402155 - DNA, 15 bp, Homo sapiens
gaagccacatagaaa

SEQ ID NO: 402156 - DNA, 15 bp, Homo sapiens
tgaagccacatagaa

SEQ ID NO: 402157 - DNA, 15 bp, Homo sapiens
gtgaagccacataga

SEQ ID NO: 402158 - DNA, 15 bp, Homo sapiens
ggtgaagccacatag

SEQ ID NO: 402159 - DNA, 15 bp, Homo sapiens
tggtgaagccacata

SEQ ID NO: 402160 - DNA, 15 bp, Homo sapiens
ctggtgaagccacat

SEQ ID NO: 402161 - DNA, 15 bp, Homo sapiens
gctggtgaagccaca

SEQ ID NO: 402162 - DNA, 15 bp, Homo sapiens
tgctggtgaagccac

SEQ ID NO: 402163 - DNA, 15 bp, Homo sapiens
atgctggtgaagcca

SEQ ID NO: 402164 - DNA, 15 bp, Homo sapiens
catgctggtgaagcc

SEQ ID NO: 402165 - DNA, 15 bp, Homo sapiens
tcatgctggtgaagc

SEQ ID NO: 402166 - DNA, 15 bp, Homo sapiens
atcatgctggtgaag

SEQ ID NO: 402167 - DNA, 15 bp, Homo sapiens
gatcatgctggtgaa

SEQ ID NO: 402168 - DNA, 15 bp, Homo sapiens
tgatcatgctggtga

SEQ ID NO: 402169 - DNA, 15 bp, Homo sapiens
ttgatcatgctggtg

SEQ ID NO: 402170 - DNA, 15 bp, Homo sapiens
tttgatcatgctggt

SEQ ID NO: 402171 - DNA, 15 bp, Homo sapiens
gtttgatcatgctgg

SEQ ID NO: 402172 - DNA, 15 bp, Homo sapiens
agtttgatcatgctg

SEQ ID NO: 402173 - DNA, 15 bp, Homo sapiens
tagtttgatcatgct

SEQ ID NO: 402174 - DNA, 15 bp, Homo sapiens
atagtttgatcatgc

SEQ ID NO: 402175 - DNA, 15 bp, Homo sapiens
gatagtttgatcatg

SEQ ID NO: 402176 - DNA, 15 bp, Homo sapiens
agatagtttgatcat

SEQ ID NO: 402177 - DNA, 15 bp, Homo sapiens
aagatagtttgatca

SEQ ID NO: 402178 - DNA, 15 bp, Homo sapiens
aaagatagtttgatc

SEQ ID NO: 402179 - DNA, 15 bp, Homo sapiens
caaagatagtttgat

SEQ ID NO: 402180 - DNA, 15 bp, Homo sapiens
acaaagatagtttga

SEQ ID NO: 402181 - DNA, 15 bp, Homo sapiens
aacaaagatagtttg

SEQ ID NO: 402182 - DNA, 15 bp, Homo sapiens
aaacaaagatagttt

SEQ ID NO: 402183 - DNA, 15 bp, Homo sapiens
gaaacaaagatagtt

SEQ ID NO: 402184 - DNA, 15 bp, Homo sapiens
ggaaacaaagatagt

SEQ ID NO: 402185 - DNA, 15 bp, Homo sapiens
aggaaacaaagatag

SEQ ID NO: 402186 - DNA, 15 bp, Homo sapiens
taggaaacaaagata

SEQ ID NO: 402187 - DNA, 15 bp, Homo sapiens
ataggaaacaaagat

SEQ ID NO: 402188 - DNA, 15 bp, Homo sapiens
aataggaaacaaaga

SEQ ID NO: 402189 - DNA, 15 bp, Homo sapiens
aaataggaaacaaag

SEQ ID NO: 402190 - DNA, 15 bp, Homo sapiens
aaaataggaaacaaa

SEQ ID NO: 402191 - DNA, 15 bp, Homo sapiens
gaaaataggaaacaa

SEQ ID NO: 402192 - DNA, 15 bp, Homo sapiens
agaaaataggaaaca

SEQ ID NO: 402193 - DNA, 15 bp, Homo sapiens
aagaaaataggaaac

SEQ ID NO: 402194 - DNA, 15 bp, Homo sapiens
aaagaaaataggaaa

SEQ ID NO: 402195 - DNA, 15 bp, Homo sapiens
aaaagaaaataggaa

SEQ ID NO: 402196 - DNA, 15 bp, Homo sapiens
gaaaagaaaatagga

SEQ ID NO: 402197 - DNA, 15 bp, Homo sapiens
agaaaagaaaatagg

SEQ ID NO: 402198 - DNA, 15 bp, Homo sapiens
aagaaaagaaaatag

SEQ ID NO: 402199 - DNA, 15 bp, Homo sapiens
caagaaaagaaaata

SEQ ID NO: 402200 - DNA, 15 bp, Homo sapiens
tcaagaaaagaaaat

SEQ ID NO: 402201 - DNA, 15 bp, Homo sapiens
ctcaagaaaagaaaa

SEQ ID NO: 402202 - DNA, 15 bp, Homo sapiens
cctcaagaaaagaaa

SEQ ID NO: 402203 - DNA, 15 bp, Homo sapiens
acctcaagaaaagaa

SEQ ID NO: 402204 - DNA, 15 bp, Homo sapiens
aacctcaagaaaaga

SEQ ID NO: 402205 - DNA, 15 bp, Homo sapiens
taacctcaagaaaag

SEQ ID NO: 402206 - DNA, 15 bp, Homo sapiens
ctaacctcaagaaaa

SEQ ID NO: 402207 - DNA, 15 bp, Homo sapiens
cctaacctcaagaaa

SEQ ID NO: 402208 - DNA, 15 bp, Homo sapiens
tcctaacctcaagaa

SEQ ID NO: 402209 - DNA, 15 bp, Homo sapiens
ctcctaacctcaaga

SEQ ID NO: 402210 - DNA, 15 bp, Homo sapiens
actcctaacctcaag

SEQ ID NO: 402211 - DNA, 15 bp, Homo sapiens
aactcctaacctcaa

SEQ ID NO: 402212 - DNA, 15 bp, Homo sapiens
gaactcctaacctca

SEQ ID NO: 402213 - DNA, 15 bp, Homo sapiens
ggaactcctaacctc

SEQ ID NO: 402214 - DNA, 15 bp, Homo sapiens
aggaactcctaacct

SEQ ID NO: 402215 - DNA, 15 bp, Homo sapiens
caggaactcctaacc

SEQ ID NO: 402216 - DNA, 15 bp, Homo sapiens
acaggaactcctaac

SEQ ID NO: 402217 - DNA, 15 bp, Homo sapiens
cacaggaactcctaa

SEQ ID NO: 402218 - DNA, 15 bp, Homo sapiens
tcacaggaactccta

SEQ ID NO: 402219 - DNA, 15 bp, Homo sapiens
gtcacaggaactcct

SEQ ID NO: 402220 - DNA, 15 bp, Homo sapiens
tgtcacaggaactcc

SEQ ID NO: 402221 - DNA, 15 bp, Homo sapiens
gtgtcacaggaactc

SEQ ID NO: 402222 - DNA, 15 bp, Homo sapiens
tgtgtcacaggaact

SEQ ID NO: 402223 - DNA, 15 bp, Homo sapiens
ctgtgtcacaggaac

SEQ ID NO: 402224 - DNA, 15 bp, Homo sapiens
cctgtgtcacaggaa

SEQ ID NO: 402225 - DNA, 15 bp, Homo sapiens
ccctgtgtcacagga

SEQ ID NO: 402226 - DNA, 15 bp, Homo sapiens
tccctgtgtcacagg

SEQ ID NO: 402227 - DNA, 15 bp, Homo sapiens
atccctgtgtcacag

SEQ ID NO: 402228 - DNA, 15 bp, Homo sapiens
catccctgtgtcaca

SEQ ID NO: 402229 - DNA, 15 bp, Homo sapiens
ccatccctgtgtcac

SEQ ID NO: 402230 - DNA, 15 bp, Homo sapiens
cccatccctgtgtca

SEQ ID NO: 402231 - DNA, 15 bp, Homo sapiens
tcccatccctgtgtc

SEQ ID NO: 402232 - DNA, 15 bp, Homo sapiens
ttcccatccctgtgt

SEQ ID NO: 402233 - DNA, 15 bp, Homo sapiens
cttcccatccctgtg

SEQ ID NO: 402234 - DNA, 15 bp, Homo sapiens
tcttcccatccctgt

SEQ ID NO: 402235 - DNA, 15 bp, Homo sapiens
ttcttcccatccctg

SEQ ID NO: 402236 - DNA, 15 bp, Homo sapiens
gttcttcccatccct

SEQ ID NO: 402237 - DNA, 15 bp, Homo sapiens
agttcttcccatccc

SEQ ID NO: 402238 - DNA, 15 bp, Homo sapiens
cagttcttcccatcc

SEQ ID NO: 402239 - DNA, 15 bp, Homo sapiens
acagttcttcccatc

SEQ ID NO: 402240 - DNA, 15 bp, Homo sapiens
gacagttcttcccat

SEQ ID NO: 402241 - DNA, 15 bp, Homo sapiens
agacagttcttccca

SEQ ID NO: 402242 - DNA, 15 bp, Homo sapiens
aagacagttcttccc

SEQ ID NO: 402243 - DNA, 15 bp, Homo sapiens
taagacagttcttcc

SEQ ID NO: 402244 - DNA, 15 bp, Homo sapiens
ataagacagttcttc

SEQ ID NO: 402245 - DNA, 15 bp, Homo sapiens
cataagacagttctt

SEQ ID NO: 402246 - DNA, 15 bp, Homo sapiens
tcataagacagttct

SEQ ID NO: 402247 - DNA, 15 bp, Homo sapiens
gtcataagacagttc

SEQ ID NO: 402248 - DNA, 15 bp, Homo sapiens
tgtcataagacagtt

SEQ ID NO: 402249 - DNA, 15 bp, Homo sapiens
gtgtcataagacagt

SEQ ID NO: 402250 - DNA, 15 bp, Homo sapiens
tgtgtcataagacag

SEQ ID NO: 402251 - DNA, 15 bp, Homo sapiens
ctgtgtcataagaca

SEQ ID NO: 402252 - DNA, 15 bp, Homo sapiens
gctgtgtcataagac

SEQ ID NO: 402253 - DNA, 15 bp, Homo sapiens
tgctgtgtcataaga

SEQ ID NO: 402254 - DNA, 15 bp, Homo sapiens
ctgctgtgtcataag

SEQ ID NO: 402255 - DNA, 15 bp, Homo sapiens
tctgctgtgtcataa

SEQ ID NO: 402256 - DNA, 15 bp, Homo sapiens
ttctgctgtgtcata

SEQ ID NO: 402257 - DNA, 15 bp, Homo sapiens
gttctgctgtgtcat

SEQ ID NO: 402258 - DNA, 15 bp, Homo sapiens
agttctgctgtgtca

SEQ ID NO: 402259 - DNA, 15 bp, Homo sapiens
aagttctgctgtgtc

SEQ ID NO: 402260 - DNA, 15 bp, Homo sapiens
caagttctgctgtgt

SEQ ID NO: 402261 - DNA, 15 bp, Homo sapiens
ccaagttctgctgtg

SEQ ID NO: 402262 - DNA, 15 bp, Homo sapiens
tccaagttctgctgt

SEQ ID NO: 402263 - DNA, 15 bp, Homo sapiens
gtccaagttctgctg

SEQ ID NO: 402264 - DNA, 15 bp, Homo sapiens
tgtccaagttctgct

SEQ ID NO: 402265 - DNA, 15 bp, Homo sapiens
gtgtccaagttctgc

SEQ ID NO: 402266 - DNA, 15 bp, Homo sapiens
agtgtccaagttctg

SEQ ID NO: 402267 - DNA, 15 bp, Homo sapiens
cagtgtccaagttct

SEQ ID NO: 402268 - DNA, 15 bp, Homo sapiens
ccagtgtccaagttc

SEQ ID NO: 402269 - DNA, 15 bp, Homo sapiens
tccagtgtccaagtt

SEQ ID NO: 402270 - DNA, 15 bp, Homo sapiens
ttccagtgtccaagt

SEQ ID NO: 402271 - DNA, 15 bp, Homo sapiens
cttccagtgtccaag

SEQ ID NO: 402272 - DNA, 15 bp, Homo sapiens
ccttccagtgtccaa

SEQ ID NO: 402273 - DNA, 15 bp, Homo sapiens
cccttccagtgtcca

SEQ ID NO: 402274 - DNA, 15 bp, Homo sapiens
tcccttccagtgtcc

SEQ ID NO: 402275 - DNA, 15 bp, Homo sapiens
ctcccttccagtgtc

SEQ ID NO: 402276 - DNA, 15 bp, Homo sapiens
actcccttccagtgt

SEQ ID NO: 402277 - DNA, 15 bp, Homo sapiens
cactcccttccagtg

SEQ ID NO: 402278 - DNA, 15 bp, Homo sapiens
ccactcccttccagt

SEQ ID NO: 402279 - DNA, 15 bp, Homo sapiens
accactcccttccag

SEQ ID NO: 402280 - DNA, 15 bp, Homo sapiens
caccactcccttcca

SEQ ID NO: 402281 - DNA, 15 bp, Homo sapiens
tcaccactcccttcc

SEQ ID NO: 402282 - DNA, 15 bp, Homo sapiens
ctcaccactcccttc

SEQ ID NO: 402283 - DNA, 15 bp, Homo sapiens
tctcaccactccctt

SEQ ID NO: 402284 - DNA, 15 bp, Homo sapiens
ttctcaccactccct

SEQ ID NO: 402285 - DNA, 15 bp, Homo sapiens
cttctcaccactccc

SEQ ID NO: 402286 - DNA, 15 bp, Homo sapiens
ccttctcaccactcc

SEQ ID NO: 402287 - DNA, 15 bp, Homo sapiens
accttctcaccactc

SEQ ID NO: 402288 - DNA, 15 bp, Homo sapiens
aaccttctcaccact

SEQ ID NO: 402289 - DNA, 15 bp, Homo sapiens
gaaccttctcaccac

SEQ ID NO: 402290 - DNA, 15 bp, Homo sapiens
agaaccttctcacca

SEQ ID NO: 402291 - DNA, 15 bp, Homo sapiens
aagaaccttctcacc

SEQ ID NO: 402292 - DNA, 15 bp, Homo sapiens
gaagaaccttctcac

SEQ ID NO: 402293 - DNA, 15 bp, Homo sapiens
tgaagaaccttctca

SEQ ID NO: 402294 - DNA, 15 bp, Homo sapiens
atgaagaaccttctc

SEQ ID NO: 402295 - DNA, 15 bp, Homo sapiens
aatgaagaaccttct

SEQ ID NO: 402296 - DNA, 15 bp, Homo sapiens
taatgaagaaccttc

SEQ ID NO: 402297 - DNA, 15 bp, Homo sapiens
ctaatgaagaacctt

SEQ ID NO: 402298 - DNA, 15 bp, Homo sapiens
actaatgaagaacct

SEQ ID NO: 402299 - DNA, 15 bp, Homo sapiens
tactaatgaagaacc

SEQ ID NO: 402300 - DNA, 15 bp, Homo sapiens
atactaatgaagaac

SEQ ID NO: 402301 - DNA, 15 bp, Homo sapiens
gatactaatgaagaa

SEQ ID NO: 402302 - DNA, 15 bp, Homo sapiens
agatactaatgaaga

SEQ ID NO: 402303 - DNA, 15 bp, Homo sapiens
tagatactaatgaag

SEQ ID NO: 402304 - DNA, 15 bp, Homo sapiens
ttagatactaatgaa

SEQ ID NO: 402305 - DNA, 15 bp, Homo sapiens
attagatactaatga

SEQ ID NO: 402306 - DNA, 15 bp, Homo sapiens
tattagatactaatg

SEQ ID NO: 402307 - DNA, 15 bp, Homo sapiens
ttattagatactaat

SEQ ID NO: 402308 - DNA, 15 bp, Homo sapiens
gttattagatactaa

SEQ ID NO: 402309 - DNA, 15 bp, Homo sapiens
tgttattagatacta

SEQ ID NO: 402310 - DNA, 15 bp, Homo sapiens
atgttattagatact

SEQ ID NO: 402311 - DNA, 15 bp, Homo sapiens
aatgttattagatac

SEQ ID NO: 402312 - DNA, 15 bp, Homo sapiens
aaatgttattagata

SEQ ID NO: 402313 - DNA, 15 bp, Homo sapiens
taaatgttattagat

SEQ ID NO: 402314 - DNA, 15 bp, Homo sapiens
ctaaatgttattaga

SEQ ID NO: 402315 - DNA, 15 bp, Homo sapiens
tctaaatgttattag

SEQ ID NO: 402316 - DNA, 15 bp, Homo sapiens
ttctaaatgttatta

SEQ ID NO: 402317 - DNA, 15 bp, Homo sapiens
cttctaaatgttatt

SEQ ID NO: 402318 - DNA, 15 bp, Homo sapiens
tcttctaaatgttat

SEQ ID NO: 402319 - DNA, 15 bp, Homo sapiens
atcttctaaatgtta

SEQ ID NO: 402320 - DNA, 15 bp, Homo sapiens
tatcttctaaatgtt

SEQ ID NO: 402321 - DNA, 15 bp, Homo sapiens
ctatcttctaaatgt

SEQ ID NO: 402322 - DNA, 15 bp, Homo sapiens
actatcttctaaatg

SEQ ID NO: 402323 - DNA, 15 bp, Homo sapiens
aactatcttctaaat

SEQ ID NO: 402324 - DNA, 15 bp, Homo sapiens
taactatcttctaaa

SEQ ID NO: 402325 - DNA, 15 bp, Homo sapiens
ttaactatcttctaa

SEQ ID NO: 402326 - DNA, 15 bp, Homo sapiens
attaactatcttcta

SEQ ID NO: 402327 - DNA, 15 bp, Homo sapiens
aattaactatcttct

SEQ ID NO: 402328 - DNA, 15 bp, Homo sapiens
taattaactatcttc

SEQ ID NO: 402329 - DNA, 15 bp, Homo sapiens
gtaattaactatctt

SEQ ID NO: 402330 - DNA, 15 bp, Homo sapiens
tgtaattaactatct

SEQ ID NO: 402331 - DNA, 15 bp, Homo sapiens
atgtaattaactatc

SEQ ID NO: 402332 - DNA, 15 bp, Homo sapiens
aatgtaattaactat

SEQ ID NO: 402333 - DNA, 15 bp, Homo sapiens
caatgtaattaacta

SEQ ID NO: 402334 - DNA, 15 bp, Homo sapiens
ccaatgtaattaact

SEQ ID NO: 402335 - DNA, 15 bp, Homo sapiens
accaatgtaattaac

SEQ ID NO: 402336 - DNA, 15 bp, Homo sapiens
gaccaatgtaattaa

SEQ ID NO: 402337 - DNA, 15 bp, Homo sapiens
agaccaatgtaatta

SEQ ID NO: 402338 - DNA, 15 bp, Homo sapiens
aagaccaatgtaatt

SEQ ID NO: 402339 - DNA, 15 bp, Homo sapiens
aaagaccaatgtaat

SEQ ID NO: 402340 - DNA, 15 bp, Homo sapiens
taaagaccaatgtaa

SEQ ID NO: 402341 - DNA, 15 bp, Homo sapiens
ctaaagaccaatgta

SEQ ID NO: 402342 - DNA, 15 bp, Homo sapiens
actaaagaccaatgt

SEQ ID NO: 402343 - DNA, 15 bp, Homo sapiens
aactaaagaccaatg

SEQ ID NO: 402344 - DNA, 15 bp, Homo sapiens
aaactaaagaccaat

SEQ ID NO: 402345 - DNA, 15 bp, Homo sapiens
gaaactaaagaccaa

SEQ ID NO: 402346 - DNA, 15 bp, Homo sapiens
ggaaactaaagacca

SEQ ID NO: 402347 - DNA, 15 bp, Homo sapiens
gggaaactaaagacc

SEQ ID NO: 402348 - DNA, 15 bp, Homo sapiens
ggggaaactaaagac

SEQ ID NO: 402349 - DNA, 15 bp, Homo sapiens
tggggaaactaaaga

SEQ ID NO: 402350 - DNA, 15 bp, Homo sapiens
ttggggaaactaaag

SEQ ID NO: 402351 - DNA, 15 bp, Homo sapiens
attggggaaactaaa

SEQ ID NO: 402352 - DNA, 15 bp, Homo sapiens
gattggggaaactaa

SEQ ID NO: 402353 - DNA, 15 bp, Homo sapiens
agattggggaaacta

SEQ ID NO: 402354 - DNA, 15 bp, Homo sapiens
tagattggggaaact

SEQ ID NO: 402355 - DNA, 15 bp, Homo sapiens
atagattggggaaac

SEQ ID NO: 402356 - DNA, 15 bp, Homo sapiens
tatagattggggaaa

SEQ ID NO: 402357 - DNA, 15 bp, Homo sapiens
ttatagattggggaa

SEQ ID NO: 402358 - DNA, 15 bp, Homo sapiens
cttatagattgggga

SEQ ID NO: 402359 - DNA, 15 bp, Homo sapiens
ccttatagattgggg

SEQ ID NO: 402360 - DNA, 15 bp, Homo sapiens
accttatagattggg

SEQ ID NO: 402361 - DNA, 15 bp, Homo sapiens
caccttatagattgg

SEQ ID NO: 402362 - DNA, 15 bp, Homo sapiens
tcaccttatagattg

SEQ ID NO: 402363 - DNA, 15 bp, Homo sapiens
ttcaccttatagatt

SEQ ID NO: 402364 - DNA, 15 bp, Homo sapiens
tttcaccttatagat

SEQ ID NO: 402365 - DNA, 15 bp, Homo sapiens
atttcaccttataga

SEQ ID NO: 402366 - DNA, 15 bp, Homo sapiens
aatttcaccttatag

SEQ ID NO: 402367 - DNA, 15 bp, Homo sapiens
taatttcaccttata

SEQ ID NO: 402368 - DNA, 15 bp, Homo sapiens
ataatttcaccttat

SEQ ID NO: 402369 - DNA, 15 bp, Homo sapiens
tataatttcacctta

SEQ ID NO: 402370 - DNA, 15 bp, Homo sapiens
ctataatttcacctt

SEQ ID NO: 402371 - DNA, 15 bp, Homo sapiens
tctataatttcacct

SEQ ID NO: 402372 - DNA, 15 bp, Homo sapiens
ttctataatttcacc

SEQ ID NO: 402373 - DNA, 15 bp, Homo sapiens
tttctataatttcac

SEQ ID NO: 402374 - DNA, 15 bp, Homo sapiens
ttttctataatttca

SEQ ID NO: 402375 - DNA, 15 bp, Homo sapiens
tttttctataatttc

SEQ ID NO: 402376 - DNA, 15 bp, Homo sapiens
ctttttctataattt

SEQ ID NO: 402377 - DNA, 15 bp, Homo sapiens
tctttttctataatt

SEQ ID NO: 402378 - DNA, 15 bp, Homo sapiens
ttctttttctataat

SEQ ID NO: 402379 - DNA, 15 bp, Homo sapiens
tttctttttctataa

SEQ ID NO: 402380 - DNA, 15 bp, Homo sapiens
ttttctttttctata

SEQ ID NO: 402381 - DNA, 15 bp, Homo sapiens
attttctttttctat

SEQ ID NO: 402382 - DNA, 15 bp, Homo sapiens
aattttctttttcta

SEQ ID NO: 402383 - DNA, 15 bp, Homo sapiens
aaattttctttttct

SEQ ID NO: 402384 - DNA, 15 bp, Homo sapiens
caaattttctttttc

SEQ ID NO: 402385 - DNA, 15 bp, Homo sapiens
acaaattttcttttt

SEQ ID NO: 402386 - DNA, 15 bp, Homo sapiens
cacaaattttctttt

SEQ ID NO: 402387 - DNA, 15 bp, Homo sapiens
tcacaaattttcttt

SEQ ID NO: 402388 - DNA, 15 bp, Homo sapiens
ctcacaaattttctt

SEQ ID NO: 402389 - DNA, 15 bp, Homo sapiens
cctcacaaattttct

SEQ ID NO: 402390 - DNA, 15 bp, Homo sapiens
acctcacaaattttc

SEQ ID NO: 402391 - DNA, 15 bp, Homo sapiens
gacctcacaaatttt

SEQ ID NO: 402392 - DNA, 15 bp, Homo sapiens
ggacctcacaaattt

SEQ ID NO: 402393 - DNA, 15 bp, Homo sapiens
gggacctcacaaatt

SEQ ID NO: 402394 - DNA, 15 bp, Homo sapiens
tgggacctcacaaat

SEQ ID NO: 402395 - DNA, 15 bp, Homo sapiens
atgggacctcacaaa

SEQ ID NO: 402396 - DNA, 15 bp, Homo sapiens
tatgggacctcacaa

SEQ ID NO: 402397 - DNA, 15 bp, Homo sapiens
gtatgggacctcaca

SEQ ID NO: 402398 - DNA, 15 bp, Homo sapiens
ggtatgggacctcac

SEQ ID NO: 402399 - DNA, 15 bp, Homo sapiens
aggtatgggacctca

SEQ ID NO: 402400 - DNA, 15 bp, Homo sapiens
taggtatgggacctc

SEQ ID NO: 402401 - DNA, 15 bp, Homo sapiens
ataggtatgggacct

SEQ ID NO: 402402 - DNA, 15 bp, Homo sapiens
aataggtatgggacc

SEQ ID NO: 402403 - DNA, 15 bp, Homo sapiens
caataggtatgggac

SEQ ID NO: 402404 - DNA, 15 bp, Homo sapiens
acaataggtatggga

SEQ ID NO: 402405 - DNA, 15 bp, Homo sapiens
aacaataggtatggg

SEQ ID NO: 402406 - DNA, 15 bp, Homo sapiens
gaacaataggtatgg

SEQ ID NO: 402407 - DNA, 15 bp, Homo sapiens
agaacaataggtatg

SEQ ID NO: 402408 - DNA, 15 bp, Homo sapiens
tagaacaataggtat

SEQ ID NO: 402409 - DNA, 15 bp, Homo sapiens
ttagaacaataggta

SEQ ID NO: 402410 - DNA, 15 bp, Homo sapiens
attagaacaataggt

SEQ ID NO: 402411 - DNA, 15 bp, Homo sapiens
aattagaacaatagg

SEQ ID NO: 402412 - DNA, 15 bp, Homo sapiens
gaattagaacaatag

SEQ ID NO: 402413 - DNA, 15 bp, Homo sapiens
tgaattagaacaata

SEQ ID NO: 402414 - DNA, 15 bp, Homo sapiens
ctgaattagaacaat

SEQ ID NO: 402415 - DNA, 15 bp, Homo sapiens
actgaattagaacaa

SEQ ID NO: 402416 - DNA, 15 bp, Homo sapiens
tactgaattagaaca

SEQ ID NO: 402417 - DNA, 15 bp, Homo sapiens
ttactgaattagaac

SEQ ID NO: 402418 - DNA, 15 bp, Homo sapiens
tttactgaattagaa

SEQ ID NO: 402419 - DNA, 15 bp, Homo sapiens
atttactgaattaga

SEQ ID NO: 402420 - DNA, 15 bp, Homo sapiens
catttactgaattag

SEQ ID NO: 402421 - DNA, 15 bp, Homo sapiens
tcatttactgaatta

SEQ ID NO: 402422 - DNA, 15 bp, Homo sapiens
ttcatttactgaatt

SEQ ID NO: 402423 - DNA, 15 bp, Homo sapiens
attcatttactgaat

SEQ ID NO: 402424 - DNA, 15 bp, Homo sapiens
cattcatttactgaa

SEQ ID NO: 402425 - DNA, 15 bp, Homo sapiens
acattcatttactga

SEQ ID NO: 402426 - DNA, 15 bp, Homo sapiens
tacattcatttactg

SEQ ID NO: 402427 - DNA, 15 bp, Homo sapiens
ttacattcatttact

SEQ ID NO: 402428 - DNA, 15 bp, Homo sapiens
tttacattcatttac

SEQ ID NO: 402429 - DNA, 15 bp, Homo sapiens
atttacattcattta

SEQ ID NO: 402430 - DNA, 15 bp, Homo sapiens
catttacattcattt

SEQ ID NO: 402431 - DNA, 15 bp, Homo sapiens
ccatttacattcatt

SEQ ID NO: 402432 - DNA, 15 bp, Homo sapiens
accatttacattcat

SEQ ID NO: 402433 - DNA, 15 bp, Homo sapiens
gaccatttacattca

SEQ ID NO: 402434 - DNA, 15 bp, Homo sapiens
agaccatttacattc

SEQ ID NO: 402435 - DNA, 15 bp, Homo sapiens
tagaccatttacatt

SEQ ID NO: 402436 - DNA, 15 bp, Homo sapiens
ttagaccatttacat

SEQ ID NO: 402437 - DNA, 15 bp, Homo sapiens
gttagaccatttaca

SEQ ID NO: 402438 - DNA, 15 bp, Homo sapiens
tgttagaccatttac

SEQ ID NO: 402439 - DNA, 15 bp, Homo sapiens
gtgttagaccattta

SEQ ID NO: 402440 - DNA, 15 bp, Homo sapiens
tgtgttagaccattt

SEQ ID NO: 402441 - DNA, 15 bp, Homo sapiens
ttgtgttagaccatt

SEQ ID NO: 402442 - DNA, 15 bp, Homo sapiens
cttgtgttagaccat

SEQ ID NO: 402443 - DNA, 15 bp, Homo sapiens
acttgtgttagacca

SEQ ID NO: 402444 - DNA, 15 bp, Homo sapiens
cacttgtgttagacc

SEQ ID NO: 402445 - DNA, 15 bp, Homo sapiens
tcacttgtgttagac

SEQ ID NO: 402446 - DNA, 15 bp, Homo sapiens
ttcacttgtgttaga

SEQ ID NO: 402447 - DNA, 15 bp, Homo sapiens
tttcacttgtgttag

SEQ ID NO: 402448 - DNA, 15 bp, Homo sapiens
atttcacttgtgtta

SEQ ID NO: 402449 - DNA, 15 bp, Homo sapiens
catttcacttgtgtt

SEQ ID NO: 402450 - DNA, 15 bp, Homo sapiens
tcatttcacttgtgt

SEQ ID NO: 402451 - DNA, 15 bp, Homo sapiens
ttcatttcacttgtg

SEQ ID NO: 402452 - DNA, 15 bp, Homo sapiens
cttcatttcacttgt

SEQ ID NO: 402453 - DNA, 15 bp, Homo sapiens
ccttcatttcacttg

SEQ ID NO: 402454 - DNA, 15 bp, Homo sapiens
accttcatttcactt

SEQ ID NO: 402455 - DNA, 15 bp, Homo sapiens
gaccttcatttcact

SEQ ID NO: 402456 - DNA, 15 bp, Homo sapiens
tgaccttcatttcac

SEQ ID NO: 402457 - DNA, 15 bp, Homo sapiens
atgaccttcatttca

SEQ ID NO: 402458 - DNA, 15 bp, Homo sapiens
tatgaccttcatttc

SEQ ID NO: 402459 - DNA, 15 bp, Homo sapiens
gtatgaccttcattt

SEQ ID NO: 402460 - DNA, 15 bp, Homo sapiens
tgtatgaccttcatt

SEQ ID NO: 402461 - DNA, 15 bp, Homo sapiens
ctgtatgaccttcat

SEQ ID NO: 402462 - DNA, 15 bp, Homo sapiens
cctgtatgaccttca

SEQ ID NO: 402463 - DNA, 15 bp, Homo sapiens
ccctgtatgaccttc

SEQ ID NO: 402464 - DNA, 15 bp, Homo sapiens
tccctgtatgacctt

SEQ ID NO: 402465 - DNA, 15 bp, Homo sapiens
atccctgtatgacct

SEQ ID NO: 402466 - DNA, 15 bp, Homo sapiens
tatccctgtatgacc

SEQ ID NO: 402467 - DNA, 15 bp, Homo sapiens
ctatccctgtatgac

SEQ ID NO: 402468 - DNA, 15 bp, Homo sapiens
tctatccctgtatga

SEQ ID NO: 402469 - DNA, 15 bp, Homo sapiens
atctatccctgtatg

SEQ ID NO: 402470 - DNA, 15 bp, Homo sapiens
catctatccctgtat

SEQ ID NO: 402471 - DNA, 15 bp, Homo sapiens
ccatctatccctgta

SEQ ID NO: 402472 - DNA, 15 bp, Homo sapiens
accatctatccctgt

SEQ ID NO: 402473 - DNA, 15 bp, Homo sapiens
aaccatctatccctg

SEQ ID NO: 402474 - DNA, 15 bp, Homo sapiens
aaaccatctatccct

SEQ ID NO: 402475 - DNA, 15 bp, Homo sapiens
taaaccatctatccc

SEQ ID NO: 402476 - DNA, 15 bp, Homo sapiens
ataaaccatctatcc

SEQ ID NO: 402477 - DNA, 15 bp, Homo sapiens
cataaaccatctatc

SEQ ID NO: 402478 - DNA, 15 bp, Homo sapiens
tcataaaccatctat

SEQ ID NO: 402479 - DNA, 15 bp, Homo sapiens
ttcataaaccatcta

SEQ ID NO: 402480 - DNA, 15 bp, Homo sapiens
cttcataaaccatct

SEQ ID NO: 402481 - DNA, 15 bp, Homo sapiens
tcttcataaaccatc

SEQ ID NO: 402482 - DNA, 15 bp, Homo sapiens
ttcttcataaaccat

SEQ ID NO: 402483 - DNA, 15 bp, Homo sapiens
tttcttcataaacca

SEQ ID NO: 402484 - DNA, 15 bp, Homo sapiens
gtttcttcataaacc

SEQ ID NO: 402485 - DNA, 15 bp, Homo sapiens
ggtttcttcataaac

SEQ ID NO: 402486 - DNA, 15 bp, Homo sapiens
tggtttcttcataaa

SEQ ID NO: 402487 - DNA, 15 bp, Homo sapiens
gtggtttcttcataa

SEQ ID NO: 402488 - DNA, 15 bp, Homo sapiens
agtggtttcttcata

SEQ ID NO: 402489 - DNA, 15 bp, Homo sapiens
tagtggtttcttcat

SEQ ID NO: 402490 - DNA, 15 bp, Homo sapiens
ttagtggtttcttca

SEQ ID NO: 402491 - DNA, 15 bp, Homo sapiens
gttagtggtttcttc

SEQ ID NO: 402492 - DNA, 15 bp, Homo sapiens
tgttagtggtttctt

SEQ ID NO: 402493 - DNA, 15 bp, Homo sapiens
ttgttagtggtttct

SEQ ID NO: 402494 - DNA, 15 bp, Homo sapiens
tttgttagtggtttc

SEQ ID NO: 402495 - DNA, 15 bp, Homo sapiens
gtttgttagtggttt

SEQ ID NO: 402496 - DNA, 15 bp, Homo sapiens
agtttgttagtggtt

SEQ ID NO: 402497 - DNA, 15 bp, Homo sapiens
gagtttgttagtggt

SEQ ID NO: 402498 - DNA, 15 bp, Homo sapiens
tgagtttgttagtgg

SEQ ID NO: 402499 - DNA, 15 bp, Homo sapiens
atgagtttgttagtg

SEQ ID NO: 402500 - DNA, 15 bp, Homo sapiens
catgagtttgttagt

SEQ ID NO: 402501 - DNA, 15 bp, Homo sapiens
ccatgagtttgttag

SEQ ID NO: 402502 - DNA, 15 bp, Homo sapiens
cccatgagtttgtta

SEQ ID NO: 402503 - DNA, 15 bp, Homo sapiens
ccccatgagtttgtt

SEQ ID NO: 402504 - DNA, 15 bp, Homo sapiens
gccccatgagtttgt

SEQ ID NO: 402505 - DNA, 15 bp, Homo sapiens
tgccccatgagtttg

SEQ ID NO: 402506 - DNA, 15 bp, Homo sapiens
ttgccccatgagttt

SEQ ID NO: 402507 - DNA, 15 bp, Homo sapiens
tttgccccatgagtt

SEQ ID NO: 402508 - DNA, 15 bp, Homo sapiens
gtttgccccatgagt

SEQ ID NO: 402509 - DNA, 15 bp, Homo sapiens
ggtttgccccatgag

SEQ ID NO: 402510 - DNA, 15 bp, Homo sapiens
aggtttgccccatga

SEQ ID NO: 402511 - DNA, 15 bp, Homo sapiens
caggtttgccccatg

SEQ ID NO: 402512 - DNA, 15 bp, Homo sapiens
ccaggtttgccccat

SEQ ID NO: 402513 - DNA, 15 bp, Homo sapiens
tccaggtttgcccca

SEQ ID NO: 402514 - DNA, 15 bp, Homo sapiens
ctccaggtttgcccc

SEQ ID NO: 402515 - DNA, 15 bp, Homo sapiens
tctccaggtttgccc

SEQ ID NO: 402516 - DNA, 15 bp, Homo sapiens
atctccaggtttgcc

SEQ ID NO: 402517 - DNA, 15 bp, Homo sapiens
tatctccaggtttgc

SEQ ID NO: 402518 - DNA, 15 bp, Homo sapiens
gtatctccaggtttg

SEQ ID NO: 402519 - DNA, 15 bp, Homo sapiens
agtatctccaggttt

SEQ ID NO: 402520 - DNA, 15 bp, Homo sapiens
tagtatctccaggtt

SEQ ID NO: 402521 - DNA, 15 bp, Homo sapiens
ctagtatctccaggt

SEQ ID NO: 402522 - DNA, 15 bp, Homo sapiens
cctagtatctccagg

SEQ ID NO: 402523 - DNA, 15 bp, Homo sapiens
acctagtatctccag

SEQ ID NO: 402524 - DNA, 15 bp, Homo sapiens
tacctagtatctcca

SEQ ID NO: 402525 - DNA, 15 bp, Homo sapiens
ctacctagtatctcc

SEQ ID NO: 402526 - DNA, 15 bp, Homo sapiens
actacctagtatctc

SEQ ID NO: 402527 - DNA, 15 bp, Homo sapiens
gactacctagtatct

SEQ ID NO: 402528 - DNA, 15 bp, Homo sapiens
tgactacctagtatc

SEQ ID NO: 402529 - DNA, 15 bp, Homo sapiens
gtgactacctagtat

SEQ ID NO: 402530 - DNA, 15 bp, Homo sapiens
tgtgactacctagta

SEQ ID NO: 402531 - DNA, 15 bp, Homo sapiens
ttgtgactacctagt

SEQ ID NO: 402532 - DNA, 15 bp, Homo sapiens
cttgtgactacctag

SEQ ID NO: 402533 - DNA, 15 bp, Homo sapiens
gcttgtgactaccta

SEQ ID NO: 402534 - DNA, 15 bp, Homo sapiens
tgcttgtgactacct

SEQ ID NO: 402535 - DNA, 15 bp, Homo sapiens
atgcttgtgactacc

SEQ ID NO: 402536 - DNA, 15 bp, Homo sapiens
catgcttgtgactac

SEQ ID NO: 402537 - DNA, 15 bp, Homo sapiens
ccatgcttgtgacta

SEQ ID NO: 402538 - DNA, 15 bp, Homo sapiens
accatgcttgtgact

SEQ ID NO: 402539 - DNA, 15 bp, Homo sapiens
taccatgcttgtgac

SEQ ID NO: 402540 - DNA, 15 bp, Homo sapiens
ctaccatgcttgtga

SEQ ID NO: 402541 - DNA, 15 bp, Homo sapiens
tctaccatgcttgtg

SEQ ID NO: 402542 - DNA, 15 bp, Homo sapiens
ttctaccatgcttgt

SEQ ID NO: 402543 - DNA, 15 bp, Homo sapiens
cttctaccatgcttg

SEQ ID NO: 402544 - DNA, 15 bp, Homo sapiens
tcttctaccatgctt

SEQ ID NO: 402545 - DNA, 15 bp, Homo sapiens
ttcttctaccatgct

SEQ ID NO: 402546 - DNA, 15 bp, Homo sapiens
tttcttctaccatgc

SEQ ID NO: 402547 - DNA, 15 bp, Homo sapiens
gtttcttctaccatg

SEQ ID NO: 402548 - DNA, 15 bp, Homo sapiens
ggtttcttctaccat

SEQ ID NO: 402549 - DNA, 15 bp, Homo sapiens
gggtttcttctacca

SEQ ID NO: 402550 - DNA, 15 bp, Homo sapiens
tgggtttcttctacc

SEQ ID NO: 402551 - DNA, 15 bp, Homo sapiens
ttgggtttcttctac

SEQ ID NO: 402552 - DNA, 15 bp, Homo sapiens
cttgggtttcttcta

SEQ ID NO: 402553 - DNA, 15 bp, Homo sapiens
ccttgggtttcttct

SEQ ID NO: 402554 - DNA, 15 bp, Homo sapiens
gccttgggtttcttc

SEQ ID NO: 402555 - DNA, 15 bp, Homo sapiens
agccttgggtttctt

SEQ ID NO: 402556 - DNA, 15 bp, Homo sapiens
gagccttgggtttct

SEQ ID NO: 402557 - DNA, 15 bp, Homo sapiens
tgagccttgggtttc

SEQ ID NO: 402558 - DNA, 15 bp, Homo sapiens
atgagccttgggttt

SEQ ID NO: 402559 - DNA, 15 bp, Homo sapiens
tatgagccttgggtt

SEQ ID NO: 402560 - DNA, 15 bp, Homo sapiens
ttatgagccttgggt

SEQ ID NO: 402561 - DNA, 15 bp, Homo sapiens
gttatgagccttggg

SEQ ID NO: 402562 - DNA, 15 bp, Homo sapiens
tgttatgagccttgg

SEQ ID NO: 402563 - DNA, 15 bp, Homo sapiens
ttgttatgagccttg

SEQ ID NO: 402564 - DNA, 15 bp, Homo sapiens
tttgttatgagcctt

SEQ ID NO: 402565 - DNA, 15 bp, Homo sapiens
gtttgttatgagcct

SEQ ID NO: 402566 - DNA, 15 bp, Homo sapiens
ggtttgttatgagcc

SEQ ID NO: 402567 - DNA, 15 bp, Homo sapiens
gggtttgttatgagc

SEQ ID NO: 402568 - DNA, 15 bp, Homo sapiens
agggtttgttatgag

SEQ ID NO: 402569 - DNA, 15 bp, Homo sapiens
cagggtttgttatga

SEQ ID NO: 402570 - DNA, 15 bp, Homo sapiens
gcagggtttgttatg

SEQ ID NO: 402571 - DNA, 15 bp, Homo sapiens
tgcagggtttgttat

SEQ ID NO: 402572 - DNA, 15 bp, Homo sapiens
atgcagggtttgtta

SEQ ID NO: 402573 - DNA, 15 bp, Homo sapiens
tatgcagggtttgtt

SEQ ID NO: 402574 - DNA, 15 bp, Homo sapiens
atatgcagggtttgt

SEQ ID NO: 402575 - DNA, 15 bp, Homo sapiens
catatgcagggtttg

SEQ ID NO: 402576 - DNA, 15 bp, Homo sapiens
ccatatgcagggttt

SEQ ID NO: 402577 - DNA, 15 bp, Homo sapiens
accatatgcagggtt

SEQ ID NO: 402578 - DNA, 15 bp, Homo sapiens
taccatatgcagggt

SEQ ID NO: 402579 - DNA, 15 bp, Homo sapiens
ctaccatatgcaggg

SEQ ID NO: 402580 - DNA, 15 bp, Homo sapiens
actaccatatgcagg

SEQ ID NO: 402581 - DNA, 15 bp, Homo sapiens
aactaccatatgcag

SEQ ID NO: 402582 - DNA, 15 bp, Homo sapiens
taactaccatatgca

SEQ ID NO: 402583 - DNA, 15 bp, Homo sapiens
ataactaccatatgc

SEQ ID NO: 402584 - DNA, 15 bp, Homo sapiens
aataactaccatatg

SEQ ID NO: 402585 - DNA, 15 bp, Homo sapiens
aaataactaccatat

SEQ ID NO: 402586 - DNA, 15 bp, Homo sapiens
aaaataactaccata

SEQ ID NO: 402587 - DNA, 15 bp, Homo sapiens
gaaaataactaccat

SEQ ID NO: 402588 - DNA, 15 bp, Homo sapiens
agaaaataactacca

SEQ ID NO: 402589 - DNA, 15 bp, Homo sapiens
cagaaaataactacc

SEQ ID NO: 402590 - DNA, 15 bp, Homo sapiens
acagaaaataactac

SEQ ID NO: 402591 - DNA, 15 bp, Homo sapiens
gacagaaaataacta

SEQ ID NO: 402592 - DNA, 15 bp, Homo sapiens
agacagaaaataact

SEQ ID NO: 402593 - DNA, 15 bp, Homo sapiens
gagacagaaaataac

SEQ ID NO: 402594 - DNA, 15 bp, Homo sapiens
agagacagaaaataa

SEQ ID NO: 402595 - DNA, 15 bp, Homo sapiens
cagagacagaaaata

SEQ ID NO: 402596 - DNA, 15 bp, Homo sapiens
tcagagacagaaaat

SEQ ID NO: 402597 - DNA, 15 bp, Homo sapiens
atcagagacagaaaa

SEQ ID NO: 402598 - DNA, 15 bp, Homo sapiens
tatcagagacagaaa

SEQ ID NO: 402599 - DNA, 15 bp, Homo sapiens
ctatcagagacagaa

SEQ ID NO: 402600 - DNA, 15 bp, Homo sapiens
tctatcagagacaga

SEQ ID NO: 402601 - DNA, 15 bp, Homo sapiens
gtctatcagagacag

SEQ ID NO: 402602 - DNA, 15 bp, Homo sapiens
ggtctatcagagaca

SEQ ID NO: 402603 - DNA, 15 bp, Homo sapiens
tggtctatcagagac

SEQ ID NO: 402604 - DNA, 15 bp, Homo sapiens
atggtctatcagaga

SEQ ID NO: 402605 - DNA, 15 bp, Homo sapiens
aatggtctatcagag

SEQ ID NO: 402606 - DNA, 15 bp, Homo sapiens
gaatggtctatcaga

SEQ ID NO: 402607 - DNA, 15 bp, Homo sapiens
agaatggtctatcag

SEQ ID NO: 402608 - DNA, 15 bp, Homo sapiens
gagaatggtctatca

SEQ ID NO: 402609 - DNA, 15 bp, Homo sapiens
ggagaatggtctatc

SEQ ID NO: 402610 - DNA, 15 bp, Homo sapiens
gggagaatggtctat

SEQ ID NO: 402611 - DNA, 15 bp, Homo sapiens
agggagaatggtcta

SEQ ID NO: 402612 - DNA, 15 bp, Homo sapiens
aagggagaatggtct

SEQ ID NO: 402613 - DNA, 15 bp, Homo sapiens
aaagggagaatggtc

SEQ ID NO: 402614 - DNA, 15 bp, Homo sapiens
taaagggagaatggt

SEQ ID NO: 402615 - DNA, 15 bp, Homo sapiens
gtaaagggagaatgg

SEQ ID NO: 402616 - DNA, 15 bp, Homo sapiens
tgtaaagggagaatg

SEQ ID NO: 402617 - DNA, 15 bp, Homo sapiens
ttgtaaagggagaat

SEQ ID NO: 402618 - DNA, 15 bp, Homo sapiens
gttgtaaagggagaa

SEQ ID NO: 402619 - DNA, 15 bp, Homo sapiens
tgttgtaaagggaga

SEQ ID NO: 402620 - DNA, 15 bp, Homo sapiens
atgttgtaaagggag

SEQ ID NO: 402621 - DNA, 15 bp, Homo sapiens
gatgttgtaaaggga

SEQ ID NO: 402622 - DNA, 15 bp, Homo sapiens
agatgttgtaaaggg

SEQ ID NO: 402623 - DNA, 15 bp, Homo sapiens
aagatgttgtaaagg

SEQ ID NO: 402624 - DNA, 15 bp, Homo sapiens
taagatgttgtaaag

SEQ ID NO: 402625 - DNA, 15 bp, Homo sapiens
gtaagatgttgtaaa

SEQ ID NO: 402626 - DNA, 15 bp, Homo sapiens
agtaagatgttgtaa

SEQ ID NO: 402627 - DNA, 15 bp, Homo sapiens
cagtaagatgttgta

SEQ ID NO: 402628 - DNA, 15 bp, Homo sapiens
ccagtaagatgttgt

SEQ ID NO: 402629 - DNA, 15 bp, Homo sapiens
tccagtaagatgttg

SEQ ID NO: 402630 - DNA, 15 bp, Homo sapiens
gtccagtaagatgtt

SEQ ID NO: 402631 - DNA, 15 bp, Homo sapiens
tgtccagtaagatgt

SEQ ID NO: 402632 - DNA, 15 bp, Homo sapiens
atgtccagtaagatg

SEQ ID NO: 402633 - DNA, 15 bp, Homo sapiens
catgtccagtaagat

SEQ ID NO: 402634 - DNA, 15 bp, Homo sapiens
acatgtccagtaaga

SEQ ID NO: 402635 - DNA, 15 bp, Homo sapiens
aacatgtccagtaag

SEQ ID NO: 402636 - DNA, 15 bp, Homo sapiens
gaacatgtccagtaa

SEQ ID NO: 402637 - DNA, 15 bp, Homo sapiens
ggaacatgtccagta

SEQ ID NO: 402638 - DNA, 15 bp, Homo sapiens
aggaacatgtccagt

SEQ ID NO: 402639 - DNA, 15 bp, Homo sapiens
taggaacatgtccag

SEQ ID NO: 402640 - DNA, 15 bp, Homo sapiens
gtaggaacatgtcca

SEQ ID NO: 402641 - DNA, 15 bp, Homo sapiens
agtaggaacatgtcc

SEQ ID NO: 402642 - DNA, 15 bp, Homo sapiens
aagtaggaacatgtc

SEQ ID NO: 402643 - DNA, 15 bp, Homo sapiens
caagtaggaacatgt

SEQ ID NO: 402644 - DNA, 15 bp, Homo sapiens
ccaagtaggaacatg

SEQ ID NO: 402645 - DNA, 15 bp, Homo sapiens
cccaagtaggaacat

SEQ ID NO: 402646 - DNA, 15 bp, Homo sapiens
acccaagtaggaaca

SEQ ID NO: 402647 - DNA, 15 bp, Homo sapiens
cacccaagtaggaac

SEQ ID NO: 402648 - DNA, 15 bp, Homo sapiens
acacccaagtaggaa

SEQ ID NO: 402649 - DNA, 15 bp, Homo sapiens
aacacccaagtagga

SEQ ID NO: 402650 - DNA, 15 bp, Homo sapiens
gaacacccaagtagg

SEQ ID NO: 402651 - DNA, 15 bp, Homo sapiens
agaacacccaagtag

SEQ ID NO: 402652 - DNA, 15 bp, Homo sapiens
tagaacacccaagta

SEQ ID NO: 402653 - DNA, 15 bp, Homo sapiens
atagaacacccaagt

SEQ ID NO: 402654 - DNA, 15 bp, Homo sapiens
tatagaacacccaag

SEQ ID NO: 402655 - DNA, 15 bp, Homo sapiens
ttatagaacacccaa

SEQ ID NO: 402656 - DNA, 15 bp, Homo sapiens
cttatagaacaccca

SEQ ID NO: 402657 - DNA, 15 bp, Homo sapiens
tcttatagaacaccc

SEQ ID NO: 402658 - DNA, 15 bp, Homo sapiens
atcttatagaacacc

SEQ ID NO: 402659 - DNA, 15 bp, Homo sapiens
tatcttatagaacac

SEQ ID NO: 402660 - DNA, 15 bp, Homo sapiens
ttatcttatagaaca

SEQ ID NO: 402661 - DNA, 15 bp, Homo sapiens
tttatcttatagaac

SEQ ID NO: 402662 - DNA, 15 bp, Homo sapiens
atttatcttatagaa

SEQ ID NO: 402663 - DNA, 15 bp, Homo sapiens
aatttatcttataga

SEQ ID NO: 402664 - DNA, 15 bp, Homo sapiens
gaatttatcttatag

SEQ ID NO: 402665 - DNA, 15 bp, Homo sapiens
tgaatttatcttata

SEQ ID NO: 402666 - DNA, 15 bp, Homo sapiens
ttgaatttatcttat

SEQ ID NO: 402667 - DNA, 15 bp, Homo sapiens
tttgaatttatctta

SEQ ID NO: 402668 - DNA, 15 bp, Homo sapiens
gtttgaatttatctt

SEQ ID NO: 402669 - DNA, 15 bp, Homo sapiens
agtttgaatttatct

SEQ ID NO: 402670 - DNA, 15 bp, Homo sapiens
aagtttgaatttatc

SEQ ID NO: 402671 - DNA, 15 bp, Homo sapiens
taagtttgaatttat

SEQ ID NO: 402672 - DNA, 15 bp, Homo sapiens
ataagtttgaattta

SEQ ID NO: 402673 - DNA, 15 bp, Homo sapiens
aataagtttgaattt

SEQ ID NO: 402674 - DNA, 15 bp, Homo sapiens
taataagtttgaatt

SEQ ID NO: 402675 - DNA, 15 bp, Homo sapiens
ttaataagtttgaat

SEQ ID NO: 402676 - DNA, 15 bp, Homo sapiens
cttaataagtttgaa

SEQ ID NO: 402677 - DNA, 15 bp, Homo sapiens
acttaataagtttga

SEQ ID NO: 402678 - DNA, 15 bp, Homo sapiens
gacttaataagtttg

SEQ ID NO: 402679 - DNA, 15 bp, Homo sapiens
ggacttaataagttt

SEQ ID NO: 402680 - DNA, 15 bp, Homo sapiens
gggacttaataagtt

SEQ ID NO: 402681 - DNA, 15 bp, Homo sapiens
tgggacttaataagt

SEQ ID NO: 402682 - DNA, 15 bp, Homo sapiens
gtgggacttaataag

SEQ ID NO: 402683 - DNA, 15 bp, Homo sapiens
tgtgggacttaataa

SEQ ID NO: 402684 - DNA, 15 bp, Homo sapiens
ttgtgggacttaata

SEQ ID NO: 402685 - DNA, 15 bp, Homo sapiens
attgtgggacttaat

SEQ ID NO: 402686 - DNA, 15 bp, Homo sapiens
cattgtgggacttaa

SEQ ID NO: 402687 - DNA, 15 bp, Homo sapiens
tcattgtgggactta

SEQ ID NO: 402688 - DNA, 15 bp, Homo sapiens
atcattgtgggactt

SEQ ID NO: 402689 - DNA, 15 bp, Homo sapiens
aatcattgtgggact

SEQ ID NO: 402690 - DNA, 15 bp, Homo sapiens
aaatcattgtgggac

SEQ ID NO: 402691 - DNA, 15 bp, Homo sapiens
gaaatcattgtggga

SEQ ID NO: 402692 - DNA, 15 bp, Homo sapiens
tgaaatcattgtggg

SEQ ID NO: 402693 - DNA, 15 bp, Homo sapiens
ctgaaatcattgtgg

SEQ ID NO: 402694 - DNA, 15 bp, Homo sapiens
actgaaatcattgtg

SEQ ID NO: 402695 - DNA, 15 bp, Homo sapiens
tactgaaatcattgt

SEQ ID NO: 402696 - DNA, 15 bp, Homo sapiens
atactgaaatcattg

SEQ ID NO: 402697 - DNA, 15 bp, Homo sapiens
aatactgaaatcatt

SEQ ID NO: 402698 - DNA, 15 bp, Homo sapiens
aaatactgaaatcat

SEQ ID NO: 402699 - DNA, 15 bp, Homo sapiens
gaaatactgaaatca

SEQ ID NO: 402700 - DNA, 15 bp, Homo sapiens
agaaatactgaaatc

SEQ ID NO: 402701 - DNA, 15 bp, Homo sapiens
cagaaatactgaaat

SEQ ID NO: 402702 - DNA, 15 bp, Homo sapiens
acagaaatactgaaa

SEQ ID NO: 402703 - DNA, 15 bp, Homo sapiens
gacagaaatactgaa

SEQ ID NO: 402704 - DNA, 15 bp, Homo sapiens
tgacagaaatactga

SEQ ID NO: 402705 - DNA, 15 bp, Homo sapiens
ttgacagaaatactg

SEQ ID NO: 402706 - DNA, 15 bp, Homo sapiens
attgacagaaatact

SEQ ID NO: 402707 - DNA, 15 bp, Homo sapiens
gattgacagaaatac

SEQ ID NO: 402708 - DNA, 15 bp, Homo sapiens
ggattgacagaaata

SEQ ID NO: 402709 - DNA, 15 bp, Homo sapiens
aggattgacagaaat

SEQ ID NO: 402710 - DNA, 15 bp, Homo sapiens
caggattgacagaaa

SEQ ID NO: 402711 - DNA, 15 bp, Homo sapiens
tcaggattgacagaa

SEQ ID NO: 402712 - DNA, 15 bp, Homo sapiens
ttcaggattgacaga

SEQ ID NO: 402713 - DNA, 15 bp, Homo sapiens
attcaggattgacag

SEQ ID NO: 402714 - DNA, 15 bp, Homo sapiens
gattcaggattgaca

SEQ ID NO: 402715 - DNA, 15 bp, Homo sapiens
agattcaggattgac

SEQ ID NO: 402716 - DNA, 15 bp, Homo sapiens
aagattcaggattga

SEQ ID NO: 402717 - DNA, 15 bp, Homo sapiens
gaagattcaggattg

SEQ ID NO: 402718 - DNA, 15 bp, Homo sapiens
agaagattcaggatt

SEQ ID NO: 402719 - DNA, 15 bp, Homo sapiens
tagaagattcaggat

SEQ ID NO: 402720 - DNA, 15 bp, Homo sapiens
ttagaagattcagga

SEQ ID NO: 402721 - DNA, 15 bp, Homo sapiens
attagaagattcagg

SEQ ID NO: 402722 - DNA, 15 bp, Homo sapiens
tattagaagattcag

SEQ ID NO: 402723 - DNA, 15 bp, Homo sapiens
gtattagaagattca

SEQ ID NO: 402724 - DNA, 15 bp, Homo sapiens
agtattagaagattc

SEQ ID NO: 402725 - DNA, 15 bp, Homo sapiens
aagtattagaagatt

SEQ ID NO: 402726 - DNA, 15 bp, Homo sapiens
gaagtattagaagat

SEQ ID NO: 402727 - DNA, 15 bp, Homo sapiens
agaagtattagaaga

SEQ ID NO: 402728 - DNA, 15 bp, Homo sapiens
cagaagtattagaag

SEQ ID NO: 402729 - DNA, 15 bp, Homo sapiens
acagaagtattagaa

SEQ ID NO: 402730 - DNA, 15 bp, Homo sapiens
aacagaagtattaga

SEQ ID NO: 402731 - DNA, 15 bp, Homo sapiens
aaacagaagtattag

SEQ ID NO: 402732 - DNA, 15 bp, Homo sapiens
aaaacagaagtatta

SEQ ID NO: 402733 - DNA, 15 bp, Homo sapiens
aaaaacagaagtatt

SEQ ID NO: 402734 - DNA, 15 bp, Homo sapiens
taaaaacagaagtat

SEQ ID NO: 402735 - DNA, 15 bp, Homo sapiens
ataaaaacagaagta

SEQ ID NO: 402736 - DNA, 15 bp, Homo sapiens
aataaaaacagaagt

SEQ ID NO: 402737 - DNA, 15 bp, Homo sapiens
caataaaaacagaag

SEQ ID NO: 402738 - DNA, 15 bp, Homo sapiens
tcaataaaaacagaa

SEQ ID NO: 402739 - DNA, 15 bp, Homo sapiens
ctcaataaaaacaga

SEQ ID NO: 402740 - DNA, 15 bp, Homo sapiens
cctcaataaaaacag

SEQ ID NO: 402741 - DNA, 15 bp, Homo sapiens
tcctcaataaaaaca

SEQ ID NO: 402742 - DNA, 15 bp, Homo sapiens
ctcctcaataaaaac

SEQ ID NO: 402743 - DNA, 15 bp, Homo sapiens
actcctcaataaaaa

SEQ ID NO: 402744 - DNA, 15 bp, Homo sapiens
gactcctcaataaaa

SEQ ID NO: 402745 - DNA, 15 bp, Homo sapiens
ggactcctcaataaa

SEQ ID NO: 402746 - DNA, 15 bp, Homo sapiens
gggactcctcaataa

SEQ ID NO: 402747 - DNA, 15 bp, Homo sapiens
tgggactcctcaata

SEQ ID NO: 402748 - DNA, 15 bp, Homo sapiens
ctgggactcctcaat

SEQ ID NO: 402749 - DNA, 15 bp, Homo sapiens
gctgggactcctcaa

SEQ ID NO: 402750 - DNA, 15 bp, Homo sapiens
tgctgggactcctca

SEQ ID NO: 402751 - DNA, 15 bp, Homo sapiens
gtgctgggactcctc

SEQ ID NO: 402752 - DNA, 15 bp, Homo sapiens
ggtgctgggactcct

SEQ ID NO: 402753 - DNA, 15 bp, Homo sapiens
gggtgctgggactcc

SEQ ID NO: 402754 - DNA, 15 bp, Homo sapiens
agggtgctgggactc

SEQ ID NO: 402755 - DNA, 15 bp, Homo sapiens
gagggtgctgggact

SEQ ID NO: 402756 - DNA, 15 bp, Homo sapiens
agagggtgctgggac

SEQ ID NO: 402757 - DNA, 15 bp, Homo sapiens
aagagggtgctggga

SEQ ID NO: 402758 - DNA, 15 bp, Homo sapiens
taagagggtgctggg

SEQ ID NO: 402759 - DNA, 15 bp, Homo sapiens
ctaagagggtgctgg

SEQ ID NO: 402760 - DNA, 15 bp, Homo sapiens
actaagagggtgctg

SEQ ID NO: 402761 - DNA, 15 bp, Homo sapiens
cactaagagggtgct

SEQ ID NO: 402762 - DNA, 15 bp, Homo sapiens
tcactaagagggtgc

SEQ ID NO: 402763 - DNA, 15 bp, Homo sapiens
atcactaagagggtg

SEQ ID NO: 402764 - DNA, 15 bp, Homo sapiens
tatcactaagagggt

SEQ ID NO: 402765 - DNA, 15 bp, Homo sapiens
gtatcactaagaggg

SEQ ID NO: 402766 - DNA, 15 bp, Homo sapiens
tgtatcactaagagg

SEQ ID NO: 402767 - DNA, 15 bp, Homo sapiens
ctgtatcactaagag

SEQ ID NO: 402768 - DNA, 15 bp, Homo sapiens
gctgtatcactaaga

SEQ ID NO: 402769 - DNA, 15 bp, Homo sapiens
agctgtatcactaag

SEQ ID NO: 402770 - DNA, 15 bp, Homo sapiens
aagctgtatcactaa

SEQ ID NO: 402771 - DNA, 15 bp, Homo sapiens
aaagctgtatcacta

SEQ ID NO: 402772 - DNA, 15 bp, Homo sapiens
gaaagctgtatcact

SEQ ID NO: 402773 - DNA, 15 bp, Homo sapiens
tgaaagctgtatcac

SEQ ID NO: 402774 - DNA, 15 bp, Homo sapiens
ctgaaagctgtatca

SEQ ID NO: 402775 - DNA, 15 bp, Homo sapiens
tctgaaagctgtatc

SEQ ID NO: 402776 - DNA, 15 bp, Homo sapiens
atctgaaagctgtat

SEQ ID NO: 402777 - DNA, 15 bp, Homo sapiens
aatctgaaagctgta

SEQ ID NO: 402778 - DNA, 15 bp, Homo sapiens
aaatctgaaagctgt

SEQ ID NO: 402779 - DNA, 15 bp, Homo sapiens
taaatctgaaagctg

SEQ ID NO: 402780 - DNA, 15 bp, Homo sapiens
gtaaatctgaaagct

SEQ ID NO: 402781 - DNA, 15 bp, Homo sapiens
agtaaatctgaaagc

SEQ ID NO: 402782 - DNA, 15 bp, Homo sapiens
tagtaaatctgaaag

SEQ ID NO: 402783 - DNA, 15 bp, Homo sapiens
ttagtaaatctgaaa

SEQ ID NO: 402784 - DNA, 15 bp, Homo sapiens
tttagtaaatctgaa

SEQ ID NO: 402785 - DNA, 15 bp, Homo sapiens
gtttagtaaatctga

SEQ ID NO: 402786 - DNA, 15 bp, Homo sapiens
agtttagtaaatctg

SEQ ID NO: 402787 - DNA, 15 bp, Homo sapiens
gagtttagtaaatct

SEQ ID NO: 402788 - DNA, 15 bp, Homo sapiens
ggagtttagtaaatc

SEQ ID NO: 402789 - DNA, 15 bp, Homo sapiens
aggagtttagtaaat

SEQ ID NO: 402790 - DNA, 15 bp, Homo sapiens
aaggagtttagtaaa

SEQ ID NO: 402791 - DNA, 15 bp, Homo sapiens
aaaggagtttagtaa

SEQ ID NO: 402792 - DNA, 15 bp, Homo sapiens
gaaaggagtttagta

SEQ ID NO: 402793 - DNA, 15 bp, Homo sapiens
agaaaggagtttagt

SEQ ID NO: 402794 - DNA, 15 bp, Homo sapiens
cagaaaggagtttag

SEQ ID NO: 402795 - DNA, 15 bp, Homo sapiens
acagaaaggagttta

SEQ ID NO: 402796 - DNA, 15 bp, Homo sapiens
aacagaaaggagttt

SEQ ID NO: 402797 - DNA, 15 bp, Homo sapiens
gaacagaaaggagtt

SEQ ID NO: 402798 - DNA, 15 bp, Homo sapiens
ggaacagaaaggagt

SEQ ID NO: 402799 - DNA, 15 bp, Homo sapiens
aggaacagaaaggag

SEQ ID NO: 402800 - DNA, 15 bp, Homo sapiens
caggaacagaaagga

SEQ ID NO: 402801 - DNA, 15 bp, Homo sapiens
ccaggaacagaaagg

SEQ ID NO: 402802 - DNA, 15 bp, Homo sapiens
tccaggaacagaaag

SEQ ID NO: 402803 - DNA, 15 bp, Homo sapiens
gtccaggaacagaaa

SEQ ID NO: 402804 - DNA, 15 bp, Homo sapiens
tgtccaggaacagaa

SEQ ID NO: 402805 - DNA, 15 bp, Homo sapiens
gtgtccaggaacaga

SEQ ID NO: 402806 - DNA, 15 bp, Homo sapiens
agtgtccaggaacag

SEQ ID NO: 402807 - DNA, 15 bp, Homo sapiens
gagtgtccaggaaca

SEQ ID NO: 402808 - DNA, 15 bp, Homo sapiens
tgagtgtccaggaac

SEQ ID NO: 402809 - DNA, 15 bp, Homo sapiens
atgagtgtccaggaa

SEQ ID NO: 402810 - DNA, 15 bp, Homo sapiens
gatgagtgtccagga

SEQ ID NO: 402811 - DNA, 15 bp, Homo sapiens
agatgagtgtccagg

SEQ ID NO: 402812 - DNA, 15 bp, Homo sapiens
tagatgagtgtccag

SEQ ID NO: 402813 - DNA, 15 bp, Homo sapiens
ttagatgagtgtcca

SEQ ID NO: 402814 - DNA, 15 bp, Homo sapiens
tttagatgagtgtcc

SEQ ID NO: 402815 - DNA, 15 bp, Homo sapiens
gtttagatgagtgtc

SEQ ID NO: 402816 - DNA, 15 bp, Homo sapiens
tgtttagatgagtgt

SEQ ID NO: 402817 - DNA, 15 bp, Homo sapiens
ctgtttagatgagtg

SEQ ID NO: 402818 - DNA, 15 bp, Homo sapiens
cctgtttagatgagt

SEQ ID NO: 402819 - DNA, 15 bp, Homo sapiens
ccctgtttagatgag

SEQ ID NO: 402820 - DNA, 15 bp, Homo sapiens
gccctgtttagatga

SEQ ID NO: 402821 - DNA, 15 bp, Homo sapiens
agccctgtttagatg

SEQ ID NO: 402822 - DNA, 15 bp, Homo sapiens
gagccctgtttagat

SEQ ID NO: 402823 - DNA, 15 bp, Homo sapiens
tgagccctgtttaga

SEQ ID NO: 402824 - DNA, 15 bp, Homo sapiens
ttgagccctgtttag

SEQ ID NO: 402825 - DNA, 15 bp, Homo sapiens
attgagccctgttta

SEQ ID NO: 402826 - DNA, 15 bp, Homo sapiens
gattgagccctgttt

SEQ ID NO: 402827 - DNA, 15 bp, Homo sapiens
ggattgagccctgtt

SEQ ID NO: 402828 - DNA, 15 bp, Homo sapiens
aggattgagccctgt

SEQ ID NO: 402829 - DNA, 15 bp, Homo sapiens
caggattgagccctg

SEQ ID NO: 402830 - DNA, 15 bp, Homo sapiens
gcaggattgagccct

SEQ ID NO: 402831 - DNA, 15 bp, Homo sapiens
agcaggattgagccc

SEQ ID NO: 402832 - DNA, 15 bp, Homo sapiens
cagcaggattgagcc

SEQ ID NO: 402833 - DNA, 15 bp, Homo sapiens
tcagcaggattgagc

SEQ ID NO: 402834 - DNA, 15 bp, Homo sapiens
atcagcaggattgag

SEQ ID NO: 402835 - DNA, 15 bp, Homo sapiens
aatcagcaggattga

SEQ ID NO: 402836 - DNA, 15 bp, Homo sapiens
gaatcagcaggattg

SEQ ID NO: 402837 - DNA, 15 bp, Homo sapiens
tgaatcagcaggatt

SEQ ID NO: 402838 - DNA, 15 bp, Homo sapiens
ttgaatcagcaggat

SEQ ID NO: 402839 - DNA, 15 bp, Homo sapiens
gttgaatcagcagga

SEQ ID NO: 402840 - DNA, 15 bp, Homo sapiens
agttgaatcagcagg

SEQ ID NO: 402841 - DNA, 15 bp, Homo sapiens
cagttgaatcagcag

SEQ ID NO: 402842 - DNA, 15 bp, Homo sapiens
gcagttgaatcagca

SEQ ID NO: 402843 - DNA, 15 bp, Homo sapiens
ggcagttgaatcagc

SEQ ID NO: 402844 - DNA, 15 bp, Homo sapiens
tggcagttgaatcag

SEQ ID NO: 402845 - DNA, 15 bp, Homo sapiens
gtggcagttgaatca

SEQ ID NO: 402846 - DNA, 15 bp, Homo sapiens
tgtggcagttgaatc

SEQ ID NO: 402847 - DNA, 15 bp, Homo sapiens
ttgtggcagttgaat

SEQ ID NO: 402848 - DNA, 15 bp, Homo sapiens
gttgtggcagttgaa

SEQ ID NO: 402849 - DNA, 15 bp, Homo sapiens
agttgtggcagttga

SEQ ID NO: 402850 - DNA, 15 bp, Homo sapiens
gagttgtggcagttg

SEQ ID NO: 402851 - DNA, 15 bp, Homo sapiens
tgagttgtggcagtt

SEQ ID NO: 402852 - DNA, 15 bp, Homo sapiens
atgagttgtggcagt

SEQ ID NO: 402853 - DNA, 15 bp, Homo sapiens
tatgagttgtggcag

SEQ ID NO: 402854 - DNA, 15 bp, Homo sapiens
ctatgagttgtggca

SEQ ID NO: 402855 - DNA, 15 bp, Homo sapiens
gctatgagttgtggc

SEQ ID NO: 402856 - DNA, 15 bp, Homo sapiens
tgctatgagttgtgg

SEQ ID NO: 402857 - DNA, 15 bp, Homo sapiens
ctgctatgagttgtg

SEQ ID NO: 402858 - DNA, 15 bp, Homo sapiens
actgctatgagttgt

SEQ ID NO: 402859 - DNA, 15 bp, Homo sapiens
aactgctatgagttg

SEQ ID NO: 402860 - DNA, 15 bp, Homo sapiens
taactgctatgagtt

SEQ ID NO: 402861 - DNA, 15 bp, Homo sapiens
gtaactgctatgagt

SEQ ID NO: 402862 - DNA, 15 bp, Homo sapiens
cgtaactgctatgag

SEQ ID NO: 402863 - DNA, 15 bp, Homo sapiens
acgtaactgctatga

SEQ ID NO: 402864 - DNA, 15 bp, Homo sapiens
gacgtaactgctatg

SEQ ID NO: 402865 - DNA, 15 bp, Homo sapiens
ggacgtaactgctat

SEQ ID NO: 402866 - DNA, 15 bp, Homo sapiens
aggacgtaactgcta

SEQ ID NO: 402867 - DNA, 15 bp, Homo sapiens
gaggacgtaactgct

SEQ ID NO: 402868 - DNA, 15 bp, Homo sapiens
agaggacgtaactgc

SEQ ID NO: 402869 - DNA, 15 bp, Homo sapiens
aagaggacgtaactg

SEQ ID NO: 402870 - DNA, 15 bp, Homo sapiens
gaagaggacgtaact

SEQ ID NO: 402871 - DNA, 15 bp, Homo sapiens
tgaagaggacgtaac

SEQ ID NO: 402872 - DNA, 15 bp, Homo sapiens
gtgaagaggacgtaa

SEQ ID NO: 402873 - DNA, 15 bp, Homo sapiens
ggtgaagaggacgta

SEQ ID NO: 402874 - DNA, 15 bp, Homo sapiens
tggtgaagaggacgt

SEQ ID NO: 402875 - DNA, 15 bp, Homo sapiens
atggtgaagaggacg

SEQ ID NO: 402876 - DNA, 15 bp, Homo sapiens
gatggtgaagaggac

SEQ ID NO: 402877 - DNA, 15 bp, Homo sapiens
tgatggtgaagagga

SEQ ID NO: 402878 - DNA, 15 bp, Homo sapiens
ctgatggtgaagagg

SEQ ID NO: 402879 - DNA, 15 bp, Homo sapiens
gctgatggtgaagag

SEQ ID NO: 402880 - DNA, 15 bp, Homo sapiens
tgctgatggtgaaga

SEQ ID NO: 402881 - DNA, 15 bp, Homo sapiens
gtgctgatggtgaag

SEQ ID NO: 402882 - DNA, 15 bp, Homo sapiens
ggtgctgatggtgaa

SEQ ID NO: 402883 - DNA, 15 bp, Homo sapiens
aggtgctgatggtga

SEQ ID NO: 402884 - DNA, 15 bp, Homo sapiens
gaggtgctgatggtg

SEQ ID NO: 402885 - DNA, 15 bp, Homo sapiens
cgaggtgctgatggt

SEQ ID NO: 402886 - DNA, 15 bp, Homo sapiens
tcgaggtgctgatgg

SEQ ID NO: 402887 - DNA, 15 bp, Homo sapiens
atcgaggtgctgatg

SEQ ID NO: 402888 - DNA, 15 bp, Homo sapiens
aatcgaggtgctgat

SEQ ID NO: 402889 - DNA, 15 bp, Homo sapiens
gaatcgaggtgctga

SEQ ID NO: 402890 - DNA, 15 bp, Homo sapiens
tgaatcgaggtgctg

SEQ ID NO: 402891 - DNA, 15 bp, Homo sapiens
ctgaatcgaggtgct

SEQ ID NO: 402892 - DNA, 15 bp, Homo sapiens
tctgaatcgaggtgc

SEQ ID NO: 402893 - DNA, 15 bp, Homo sapiens
gtctgaatcgaggtg

SEQ ID NO: 402894 - DNA, 15 bp, Homo sapiens
ggtctgaatcgaggt

SEQ ID NO: 402895 - DNA, 15 bp, Homo sapiens
aggtctgaatcgagg

SEQ ID NO: 402896 - DNA, 15 bp, Homo sapiens
gaggtctgaatcgag

SEQ ID NO: 402897 - DNA, 15 bp, Homo sapiens
agaggtctgaatcga

SEQ ID NO: 402898 - DNA, 15 bp, Homo sapiens
gagaggtctgaatcg

SEQ ID NO: 402899 - DNA, 15 bp, Homo sapiens
agagaggtctgaatc

SEQ ID NO: 402900 - DNA, 15 bp, Homo sapiens
cagagaggtctgaat

SEQ ID NO: 402901 - DNA, 15 bp, Homo sapiens
acagagaggtctgaa

SEQ ID NO: 402902 - DNA, 15 bp, Homo sapiens
cacagagaggtctga

SEQ ID NO: 402903 - DNA, 15 bp, Homo sapiens
ccacagagaggtctg

SEQ ID NO: 402904 - DNA, 15 bp, Homo sapiens
tccacagagaggtct

SEQ ID NO: 402905 - DNA, 15 bp, Homo sapiens
atccacagagaggtc

SEQ ID NO: 402906 - DNA, 15 bp, Homo sapiens
aatccacagagaggt

SEQ ID NO: 402907 - DNA, 15 bp, Homo sapiens
aaatccacagagagg

SEQ ID NO: 402908 - DNA, 15 bp, Homo sapiens
gaaatccacagagag

SEQ ID NO: 402909 - DNA, 15 bp, Homo sapiens
ggaaatccacagaga

SEQ ID NO: 402910 - DNA, 15 bp, Homo sapiens
tggaaatccacagag

SEQ ID NO: 402911 - DNA, 15 bp, Homo sapiens
gtggaaatccacaga

SEQ ID NO: 402912 - DNA, 15 bp, Homo sapiens
tgtggaaatccacag

SEQ ID NO: 402913 - DNA, 15 bp, Homo sapiens
ttgtggaaatccaca

SEQ ID NO: 402914 - DNA, 15 bp, Homo sapiens
attgtggaaatccac

SEQ ID NO: 402915 - DNA, 15 bp, Homo sapiens
tattgtggaaatcca

SEQ ID NO: 402916 - DNA, 15 bp, Homo sapiens
gtattgtggaaatcc

SEQ ID NO: 402917 - DNA, 15 bp, Homo sapiens
ggtattgtggaaatc

SEQ ID NO: 402918 - DNA, 15 bp, Homo sapiens
aggtattgtggaaat

SEQ ID NO: 402919 - DNA, 15 bp, Homo sapiens
taggtattgtggaaa

SEQ ID NO: 402920 - DNA, 15 bp, Homo sapiens
ttaggtattgtggaa

SEQ ID NO: 402921 - DNA, 15 bp, Homo sapiens
attaggtattgtgga

SEQ ID NO: 402922 - DNA, 15 bp, Homo sapiens
aattaggtattgtgg

SEQ ID NO: 402923 - DNA, 15 bp, Homo sapiens
aaattaggtattgtg

SEQ ID NO: 402924 - DNA, 15 bp, Homo sapiens
caaattaggtattgt

SEQ ID NO: 402925 - DNA, 15 bp, Homo sapiens
gcaaattaggtattg

SEQ ID NO: 402926 - DNA, 15 bp, Homo sapiens
cgcaaattaggtatt

SEQ ID NO: 402927 - DNA, 15 bp, Homo sapiens
ccgcaaattaggtat

SEQ ID NO: 402928 - DNA, 15 bp, Homo sapiens
gccgcaaattaggta

SEQ ID NO: 402929 - DNA, 15 bp, Homo sapiens
ggccgcaaattaggt

SEQ ID NO: 402930 - DNA, 15 bp, Homo sapiens
aggccgcaaattagg

SEQ ID NO: 402931 - DNA, 15 bp, Homo sapiens
gaggccgcaaattag

SEQ ID NO: 402932 - DNA, 15 bp, Homo sapiens
tgaggccgcaaatta

SEQ ID NO: 402933 - DNA, 15 bp, Homo sapiens
gtgaggccgcaaatt

SEQ ID NO: 402934 - DNA, 15 bp, Homo sapiens
agtgaggccgcaaat

SEQ ID NO: 402935 - DNA, 15 bp, Homo sapiens
aagtgaggccgcaaa

SEQ ID NO: 402936 - DNA, 15 bp, Homo sapiens
taagtgaggccgcaa

SEQ ID NO: 402937 - DNA, 15 bp, Homo sapiens
ataagtgaggccgca

SEQ ID NO: 402938 - DNA, 15 bp, Homo sapiens
aataagtgaggccgc

SEQ ID NO: 402939 - DNA, 15 bp, Homo sapiens
aaataagtgaggccg

SEQ ID NO: 402940 - DNA, 15 bp, Homo sapiens
aaaataagtgaggcc

SEQ ID NO: 402941 - DNA, 15 bp, Homo sapiens
gaaaataagtgaggc

SEQ ID NO: 402942 - DNA, 15 bp, Homo sapiens
agaaaataagtgagg

SEQ ID NO: 402943 - DNA, 15 bp, Homo sapiens
gagaaaataagtgag

SEQ ID NO: 402944 - DNA, 15 bp, Homo sapiens
agagaaaataagtga

SEQ ID NO: 402945 - DNA, 15 bp, Homo sapiens
cagagaaaataagtg

SEQ ID NO: 402946 - DNA, 15 bp, Homo sapiens
acagagaaaataagt

SEQ ID NO: 402947 - DNA, 15 bp, Homo sapiens
gacagagaaaataag

SEQ ID NO: 402948 - DNA, 15 bp, Homo sapiens
agacagagaaaataa

SEQ ID NO: 402949 - DNA, 15 bp, Homo sapiens
aagacagagaaaata

SEQ ID NO: 402950 - DNA, 15 bp, Homo sapiens
gaagacagagaaaat

SEQ ID NO: 402951 - DNA, 15 bp, Homo sapiens
ggaagacagagaaaa

SEQ ID NO: 402952 - DNA, 15 bp, Homo sapiens
tggaagacagagaaa

SEQ ID NO: 402953 - DNA, 15 bp, Homo sapiens
ctggaagacagagaa

SEQ ID NO: 402954 - DNA, 15 bp, Homo sapiens
gctggaagacagaga

SEQ ID NO: 402955 - DNA, 15 bp, Homo sapiens
ggctggaagacagag

SEQ ID NO: 402956 - DNA, 15 bp, Homo sapiens
gggctggaagacaga

SEQ ID NO: 402957 - DNA, 15 bp, Homo sapiens
tgggctggaagacag

SEQ ID NO: 402958 - DNA, 15 bp, Homo sapiens
atgggctggaagaca

SEQ ID NO: 402959 - DNA, 15 bp, Homo sapiens
aatgggctggaagac

SEQ ID NO: 402960 - DNA, 15 bp, Homo sapiens
gaatgggctggaaga

SEQ ID NO: 402961 - DNA, 15 bp, Homo sapiens
agaatgggctggaag

SEQ ID NO: 402962 - DNA, 15 bp, Homo sapiens
cagaatgggctggaa

SEQ ID NO: 402963 - DNA, 15 bp, Homo sapiens
ccagaatgggctgga

SEQ ID NO: 402964 - DNA, 15 bp, Homo sapiens
tccagaatgggctgg

SEQ ID NO: 402965 - DNA, 15 bp, Homo sapiens
ttccagaatgggctg

SEQ ID NO: 402966 - DNA, 15 bp, Homo sapiens
tttccagaatgggct

SEQ ID NO: 402967 - DNA, 15 bp, Homo sapiens
atttccagaatgggc

SEQ ID NO: 402968 - DNA, 15 bp, Homo sapiens
tatttccagaatggg

SEQ ID NO: 402969 - DNA, 15 bp, Homo sapiens
ctatttccagaatgg

SEQ ID NO: 402970 - DNA, 15 bp, Homo sapiens
gctatttccagaatg

SEQ ID NO: 402971 - DNA, 15 bp, Homo sapiens
agctatttccagaat

SEQ ID NO: 402972 - DNA, 15 bp, Homo sapiens
tagctatttccagaa

SEQ ID NO: 402973 - DNA, 15 bp, Homo sapiens
gtagctatttccaga

SEQ ID NO: 402974 - DNA, 15 bp, Homo sapiens
ggtagctatttccag

SEQ ID NO: 402975 - DNA, 15 bp, Homo sapiens
tggtagctatttcca

SEQ ID NO: 402976 - DNA, 15 bp, Homo sapiens
ctggtagctatttcc

SEQ ID NO: 402977 - DNA, 15 bp, Homo sapiens
tctggtagctatttc

SEQ ID NO: 402978 - DNA, 15 bp, Homo sapiens
ctctggtagctattt

SEQ ID NO: 402979 - DNA, 15 bp, Homo sapiens
actctggtagctatt

SEQ ID NO: 402980 - DNA, 15 bp, Homo sapiens
aactctggtagctat

SEQ ID NO: 402981 - DNA, 15 bp, Homo sapiens
taactctggtagcta

SEQ ID NO: 402982 - DNA, 15 bp, Homo sapiens
ataactctggtagct

SEQ ID NO: 402983 - DNA, 15 bp, Homo sapiens
aataactctggtagc

SEQ ID NO: 402984 - DNA, 15 bp, Homo sapiens
aaataactctggtag

SEQ ID NO: 402985 - DNA, 15 bp, Homo sapiens
aaaataactctggta

SEQ ID NO: 402986 - DNA, 15 bp, Homo sapiens
aaaaataactctggt

SEQ ID NO: 402987 - DNA, 15 bp, Homo sapiens
gaaaaataactctgg

SEQ ID NO: 402988 - DNA, 15 bp, Homo sapiens
tgaaaaataactctg

SEQ ID NO: 402989 - DNA, 15 bp, Homo sapiens
ttgaaaaataactct

SEQ ID NO: 402990 - DNA, 15 bp, Homo sapiens
tttgaaaaataactc

SEQ ID NO: 402991 - DNA, 15 bp, Homo sapiens
ctttgaaaaataact

SEQ ID NO: 402992 - DNA, 15 bp, Homo sapiens
cctttgaaaaataac

SEQ ID NO: 402993 - DNA, 15 bp, Homo sapiens
tcctttgaaaaataa

SEQ ID NO: 402994 - DNA, 15 bp, Homo sapiens
gtcctttgaaaaata

SEQ ID NO: 402995 - DNA, 15 bp, Homo sapiens
tgtcctttgaaaaat

SEQ ID NO: 402996 - DNA, 15 bp, Homo sapiens
ctgtcctttgaaaaa

SEQ ID NO: 402997 - DNA, 15 bp, Homo sapiens
cctgtcctttgaaaa

SEQ ID NO: 402998 - DNA, 15 bp, Homo sapiens
ccctgtcctttgaaa

SEQ ID NO: 402999 - DNA, 15 bp, Homo sapiens
tccctgtcctttgaa

SEQ ID NO: 403000 - DNA, 15 bp, Homo sapiens
ttccctgtcctttga

SEQ ID NO: 403001 - DNA, 15 bp, Homo sapiens
tttccctgtcctttg

SEQ ID NO: 403002 - DNA, 15 bp, Homo sapiens
ttttccctgtccttt

SEQ ID NO: 403003 - DNA, 15 bp, Homo sapiens
cttttccctgtcctt

SEQ ID NO: 403004 - DNA, 15 bp, Homo sapiens
acttttccctgtcct

SEQ ID NO: 403005 - DNA, 15 bp, Homo sapiens
gacttttccctgtcc

SEQ ID NO: 403006 - DNA, 15 bp, Homo sapiens
agacttttccctgtc

SEQ ID NO: 403007 - DNA, 15 bp, Homo sapiens
tagacttttccctgt

SEQ ID NO: 403008 - DNA, 15 bp, Homo sapiens
gtagacttttccctg

SEQ ID NO: 403009 - DNA, 15 bp, Homo sapiens
agtagacttttccct

SEQ ID NO: 403010 - DNA, 15 bp, Homo sapiens
tagtagacttttccc

SEQ ID NO: 403011 - DNA, 15 bp, Homo sapiens
atagtagacttttcc

SEQ ID NO: 403012 - DNA, 15 bp, Homo sapiens
aatagtagacttttc

SEQ ID NO: 403013 - DNA, 15 bp, Homo sapiens
gaatagtagactttt

SEQ ID NO: 403014 - DNA, 15 bp, Homo sapiens
agaatagtagacttt

SEQ ID NO: 403015 - DNA, 15 bp, Homo sapiens
aagaatagtagactt

SEQ ID NO: 403016 - DNA, 15 bp, Homo sapiens
taagaatagtagact

SEQ ID NO: 403017 - DNA, 15 bp, Homo sapiens
ttaagaatagtagac

SEQ ID NO: 403018 - DNA, 15 bp, Homo sapiens
tttaagaatagtaga

SEQ ID NO: 403019 - DNA, 15 bp, Homo sapiens
gtttaagaatagtag

SEQ ID NO: 403020 - DNA, 15 bp, Homo sapiens
tgtttaagaatagta

SEQ ID NO: 403021 - DNA, 15 bp, Homo sapiens
gtgtttaagaatagt

SEQ ID NO: 403022 - DNA, 15 bp, Homo sapiens
tgtgtttaagaatag

SEQ ID NO: 403023 - DNA, 15 bp, Homo sapiens
atgtgtttaagaata

SEQ ID NO: 403024 - DNA, 15 bp, Homo sapiens
aatgtgtttaagaat

SEQ ID NO: 403025 - DNA, 15 bp, Homo sapiens
aaatgtgtttaagaa

SEQ ID NO: 403026 - DNA, 15 bp, Homo sapiens
taaatgtgtttaaga

SEQ ID NO: 403027 - DNA, 15 bp, Homo sapiens
ttaaatgtgtttaag

SEQ ID NO: 403028 - DNA, 15 bp, Homo sapiens
attaaatgtgtttaa

SEQ ID NO: 403029 - DNA, 15 bp, Homo sapiens
aattaaatgtgttta

SEQ ID NO: 403030 - DNA, 15 bp, Homo sapiens
caattaaatgtgttt

SEQ ID NO: 403031 - DNA, 15 bp, Homo sapiens
acaattaaatgtgtt

SEQ ID NO: 403032 - DNA, 15 bp, Homo sapiens
tacaattaaatgtgt

SEQ ID NO: 403033 - DNA, 15 bp, Homo sapiens
gtacaattaaatgtg

SEQ ID NO: 403034 - DNA, 15 bp, Homo sapiens
ggtacaattaaatgt

SEQ ID NO: 403035 - DNA, 15 bp, Homo sapiens
gggtacaattaaatg

SEQ ID NO: 403036 - DNA, 15 bp, Homo sapiens
agggtacaattaaat

SEQ ID NO: 403037 - DNA, 15 bp, Homo sapiens
aagggtacaattaaa

SEQ ID NO: 403038 - DNA, 15 bp, Homo sapiens
aaagggtacaattaa

SEQ ID NO: 403039 - DNA, 15 bp, Homo sapiens
taaagggtacaatta

SEQ ID NO: 403040 - DNA, 15 bp, Homo sapiens
ctaaagggtacaatt

SEQ ID NO: 403041 - DNA, 15 bp, Homo sapiens
gctaaagggtacaat

SEQ ID NO: 403042 - DNA, 15 bp, Homo sapiens
ggctaaagggtacaa

SEQ ID NO: 403043 - DNA, 15 bp, Homo sapiens
aggctaaagggtaca

SEQ ID NO: 403044 - DNA, 15 bp, Homo sapiens
caggctaaagggtac

SEQ ID NO: 403045 - DNA, 15 bp, Homo sapiens
acaggctaaagggta

SEQ ID NO: 403046 - DNA, 15 bp, Homo sapiens
cacaggctaaagggt

SEQ ID NO: 403047 - DNA, 15 bp, Homo sapiens
acacaggctaaaggg

SEQ ID NO: 403048 - DNA, 15 bp, Homo sapiens
cacacaggctaaagg

SEQ ID NO: 403049 - DNA, 15 bp, Homo sapiens
acacacaggctaaag

SEQ ID NO: 403050 - DNA, 15 bp, Homo sapiens
tacacacaggctaaa

SEQ ID NO: 403051 - DNA, 15 bp, Homo sapiens
ttacacacaggctaa

SEQ ID NO: 403052 - DNA, 15 bp, Homo sapiens
tttacacacaggcta

SEQ ID NO: 403053 - DNA, 15 bp, Homo sapiens
ttttacacacaggct

SEQ ID NO: 403054 - DNA, 15 bp, Homo sapiens
attttacacacaggc

SEQ ID NO: 403055 - DNA, 15 bp, Homo sapiens
aattttacacacagg

SEQ ID NO: 403056 - DNA, 15 bp, Homo sapiens
gaattttacacacag

SEQ ID NO: 403057 - DNA, 15 bp, Homo sapiens
tgaattttacacaca

SEQ ID NO: 403058 - DNA, 15 bp, Homo sapiens
ttgaattttacacac

SEQ ID NO: 403059 - DNA, 15 bp, Homo sapiens
tttgaattttacaca

SEQ ID NO: 403060 - DNA, 15 bp, Homo sapiens
gtttgaattttacac

SEQ ID NO: 403061 - DNA, 15 bp, Homo sapiens
agtttgaattttaca

SEQ ID NO: 403062 - DNA, 15 bp, Homo sapiens
gagtttgaattttac

SEQ ID NO: 403063 - DNA, 15 bp, Homo sapiens
ggagtttgaatttta

SEQ ID NO: 403064 - DNA, 15 bp, Homo sapiens
gggagtttgaatttt

SEQ ID NO: 403065 - DNA, 15 bp, Homo sapiens
ggggagtttgaattt

SEQ ID NO: 403066 - DNA, 15 bp, Homo sapiens
tggggagtttgaatt

SEQ ID NO: 403067 - DNA, 15 bp, Homo sapiens
ctggggagtttgaat

SEQ ID NO: 403068 - DNA, 15 bp, Homo sapiens
tctggggagtttgaa

SEQ ID NO: 403069 - DNA, 15 bp, Homo sapiens
gtctggggagtttga

SEQ ID NO: 403070 - DNA, 15 bp, Homo sapiens
agtctggggagtttg

SEQ ID NO: 403071 - DNA, 15 bp, Homo sapiens
cagtctggggagttt

SEQ ID NO: 403072 - DNA, 15 bp, Homo sapiens
acagtctggggagtt

SEQ ID NO: 403073 - DNA, 15 bp, Homo sapiens
aacagtctggggagt

SEQ ID NO: 403074 - DNA, 15 bp, Homo sapiens
aaacagtctggggag

SEQ ID NO: 403075 - DNA, 15 bp, Homo sapiens
aaaacagtctgggga

SEQ ID NO: 403076 - DNA, 15 bp, Homo sapiens
aaaaacagtctgggg

SEQ ID NO: 403077 - DNA, 15 bp, Homo sapiens
aaaaaacagtctggg

SEQ ID NO: 403078 - DNA, 15 bp, Homo sapiens
caaaaaacagtctgg

SEQ ID NO: 403079 - DNA, 15 bp, Homo sapiens
tcaaaaaacagtctg

SEQ ID NO: 403080 - DNA, 15 bp, Homo sapiens
ctcaaaaaacagtct

SEQ ID NO: 403081 - DNA, 15 bp, Homo sapiens
tctcaaaaaacagtc

SEQ ID NO: 403082 - DNA, 15 bp, Homo sapiens
atctcaaaaaacagt

SEQ ID NO: 403083 - DNA, 15 bp, Homo sapiens
gatctcaaaaaacag

SEQ ID NO: 403084 - DNA, 15 bp, Homo sapiens
ggatctcaaaaaaca

SEQ ID NO: 403085 - DNA, 15 bp, Homo sapiens
gggatctcaaaaaac

SEQ ID NO: 403086 - DNA, 15 bp, Homo sapiens
ggggatctcaaaaaa

SEQ ID NO: 403087 - DNA, 15 bp, Homo sapiens
tggggatctcaaaaa

SEQ ID NO: 403088 - DNA, 15 bp, Homo sapiens
gtggggatctcaaaa

SEQ ID NO: 403089 - DNA, 15 bp, Homo sapiens
tgtggggatctcaaa

SEQ ID NO: 403090 - DNA, 15 bp, Homo sapiens
ttgtggggatctcaa

SEQ ID NO: 403091 - DNA, 15 bp, Homo sapiens
gttgtggggatctca

SEQ ID NO: 403092 - DNA, 15 bp, Homo sapiens
ggttgtggggatctc

SEQ ID NO: 403093 - DNA, 15 bp, Homo sapiens
aggttgtggggatct

SEQ ID NO: 403094 - DNA, 15 bp, Homo sapiens
gaggttgtggggatc

SEQ ID NO: 403095 - DNA, 15 bp, Homo sapiens
tgaggttgtggggat

SEQ ID NO: 403096 - DNA, 15 bp, Homo sapiens
atgaggttgtgggga

SEQ ID NO: 403097 - DNA, 15 bp, Homo sapiens
aatgaggttgtgggg

SEQ ID NO: 403098 - DNA, 15 bp, Homo sapiens
aaatgaggttgtggg

SEQ ID NO: 403099 - DNA, 15 bp, Homo sapiens
gaaatgaggttgtgg

SEQ ID NO: 403100 - DNA, 15 bp, Homo sapiens
tgaaatgaggttgtg

SEQ ID NO: 403101 - DNA, 15 bp, Homo sapiens
ttgaaatgaggttgt

SEQ ID NO: 403102 - DNA, 15 bp, Homo sapiens
gttgaaatgaggttg

SEQ ID NO: 403103 - DNA, 15 bp, Homo sapiens
ggttgaaatgaggtt

SEQ ID NO: 403104 - DNA, 15 bp, Homo sapiens
tggttgaaatgaggt

SEQ ID NO: 403105 - DNA, 15 bp, Homo sapiens
ttggttgaaatgagg

SEQ ID NO: 403106 - DNA, 15 bp, Homo sapiens
tttggttgaaatgag

SEQ ID NO: 403107 - DNA, 15 bp, Homo sapiens
gtttggttgaaatga

SEQ ID NO: 403108 - DNA, 15 bp, Homo sapiens
tgtttggttgaaatg

SEQ ID NO: 403109 - DNA, 15 bp, Homo sapiens
atgtttggttgaaat

SEQ ID NO: 403110 - DNA, 15 bp, Homo sapiens
aatgtttggttgaaa

SEQ ID NO: 403111 - DNA, 15 bp, Homo sapiens
aaatgtttggttgaa

SEQ ID NO: 403112 - DNA, 15 bp, Homo sapiens
aaaatgtttggttga

SEQ ID NO: 403113 - DNA, 15 bp, Homo sapiens
aaaaatgtttggttg

SEQ ID NO: 403114 - DNA, 15 bp, Homo sapiens
aaaaaatgtttggtt

SEQ ID NO: 403115 - DNA, 15 bp, Homo sapiens
caaaaaatgtttggt

SEQ ID NO: 403116 - DNA, 15 bp, Homo sapiens
ccaaaaaatgtttgg

SEQ ID NO: 403117 - DNA, 15 bp, Homo sapiens
accaaaaaatgtttg

SEQ ID NO: 403118 - DNA, 15 bp, Homo sapiens
aaccaaaaaatgttt

SEQ ID NO: 403119 - DNA, 15 bp, Homo sapiens
gaaccaaaaaatgtt

SEQ ID NO: 403120 - DNA, 15 bp, Homo sapiens
tgaaccaaaaaatgt

SEQ ID NO: 403121 - DNA, 15 bp, Homo sapiens
atgaaccaaaaaatg

SEQ ID NO: 403122 - DNA, 15 bp, Homo sapiens
aatgaaccaaaaaat

SEQ ID NO: 403123 - DNA, 15 bp, Homo sapiens
aaatgaaccaaaaaa

SEQ ID NO: 403124 - DNA, 15 bp, Homo sapiens
gaaatgaaccaaaaa

SEQ ID NO: 403125 - DNA, 15 bp, Homo sapiens
ggaaatgaaccaaaa

SEQ ID NO: 403126 - DNA, 15 bp, Homo sapiens
aggaaatgaaccaaa

SEQ ID NO: 403127 - DNA, 15 bp, Homo sapiens
aaggaaatgaaccaa

SEQ ID NO: 403128 - DNA, 15 bp, Homo sapiens
gaaggaaatgaacca

SEQ ID NO: 403129 - DNA, 15 bp, Homo sapiens
agaaggaaatgaacc

SEQ ID NO: 403130 - DNA, 15 bp, Homo sapiens
tagaaggaaatgaac

SEQ ID NO: 403131 - DNA, 15 bp, Homo sapiens
ttagaaggaaatgaa

SEQ ID NO: 403132 - DNA, 15 bp, Homo sapiens
attagaaggaaatga

SEQ ID NO: 403133 - DNA, 15 bp, Homo sapiens
gattagaaggaaatg

SEQ ID NO: 403134 - DNA, 15 bp, Homo sapiens
agattagaaggaaat

SEQ ID NO: 403135 - DNA, 15 bp, Homo sapiens
gagattagaaggaaa

SEQ ID NO: 403136 - DNA, 15 bp, Homo sapiens
agagattagaaggaa

SEQ ID NO: 403137 - DNA, 15 bp, Homo sapiens
aagagattagaagga

SEQ ID NO: 403138 - DNA, 15 bp, Homo sapiens
aaagagattagaagg

SEQ ID NO: 403139 - DNA, 15 bp, Homo sapiens
gaaagagattagaag

SEQ ID NO: 403140 - DNA, 15 bp, Homo sapiens
tgaaagagattagaa

SEQ ID NO: 403141 - DNA, 15 bp, Homo sapiens
ctgaaagagattaga

SEQ ID NO: 403142 - DNA, 15 bp, Homo sapiens
tctgaaagagattag

SEQ ID NO: 403143 - DNA, 15 bp, Homo sapiens
atctgaaagagatta

SEQ ID NO: 403144 - DNA, 15 bp, Homo sapiens
tatctgaaagagatt

SEQ ID NO: 403145 - DNA, 15 bp, Homo sapiens
gtatctgaaagagat

SEQ ID NO: 403146 - DNA, 15 bp, Homo sapiens
tgtatctgaaagaga

SEQ ID NO: 403147 - DNA, 15 bp, Homo sapiens
gtgtatctgaaagag

SEQ ID NO: 403148 - DNA, 15 bp, Homo sapiens
agtgtatctgaaaga

SEQ ID NO: 403149 - DNA, 15 bp, Homo sapiens
gagtgtatctgaaag

SEQ ID NO: 403150 - DNA, 15 bp, Homo sapiens
ggagtgtatctgaaa

SEQ ID NO: 403151 - DNA, 15 bp, Homo sapiens
aggagtgtatctgaa

SEQ ID NO: 403152 - DNA, 15 bp, Homo sapiens
taggagtgtatctga

SEQ ID NO: 403153 - DNA, 15 bp, Homo sapiens
ttaggagtgtatctg

SEQ ID NO: 403154 - DNA, 15 bp, Homo sapiens
gttaggagtgtatct

SEQ ID NO: 403155 - DNA, 15 bp, Homo sapiens
agttaggagtgtatc

SEQ ID NO: 403156 - DNA, 15 bp, Homo sapiens
aagttaggagtgtat

SEQ ID NO: 403157 - DNA, 15 bp, Homo sapiens
taagttaggagtgta

SEQ ID NO: 403158 - DNA, 15 bp, Homo sapiens
gtaagttaggagtgt

SEQ ID NO: 403159 - DNA, 15 bp, Homo sapiens
agtaagttaggagtg

SEQ ID NO: 403160 - DNA, 15 bp, Homo sapiens
cagtaagttaggagt

SEQ ID NO: 403161 - DNA, 15 bp, Homo sapiens
tcagtaagttaggag

SEQ ID NO: 403162 - DNA, 15 bp, Homo sapiens
ttcagtaagttagga

SEQ ID NO: 403163 - DNA, 15 bp, Homo sapiens
gttcagtaagttagg

SEQ ID NO: 403164 - DNA, 15 bp, Homo sapiens
agttcagtaagttag

SEQ ID NO: 403165 - DNA, 15 bp, Homo sapiens
cagttcagtaagtta

SEQ ID NO: 403166 - DNA, 15 bp, Homo sapiens
gcagttcagtaagtt

SEQ ID NO: 403167 - DNA, 15 bp, Homo sapiens
tgcagttcagtaagt

SEQ ID NO: 403168 - DNA, 15 bp, Homo sapiens
atgcagttcagtaag

SEQ ID NO: 403169 - DNA, 15 bp, Homo sapiens
catgcagttcagtaa

SEQ ID NO: 403170 - DNA, 15 bp, Homo sapiens
ccatgcagttcagta

SEQ ID NO: 403171 - DNA, 15 bp, Homo sapiens
accatgcagttcagt

SEQ ID NO: 403172 - DNA, 15 bp, Homo sapiens
gaccatgcagttcag

SEQ ID NO: 403173 - DNA, 15 bp, Homo sapiens
ggaccatgcagttca

SEQ ID NO: 403174 - DNA, 15 bp, Homo sapiens
aggaccatgcagttc

SEQ ID NO: 403175 - DNA, 15 bp, Homo sapiens
aaggaccatgcagtt

SEQ ID NO: 403176 - DNA, 15 bp, Homo sapiens
aaaggaccatgcagt

SEQ ID NO: 403177 - DNA, 15 bp, Homo sapiens
gaaaggaccatgcag

SEQ ID NO: 403178 - DNA, 15 bp, Homo sapiens
agaaaggaccatgca

SEQ ID NO: 403179 - DNA, 15 bp, Homo sapiens
aagaaaggaccatgc

SEQ ID NO: 403180 - DNA, 15 bp, Homo sapiens
aaagaaaggaccatg

SEQ ID NO: 403181 - DNA, 15 bp, Homo sapiens
taaagaaaggaccat

SEQ ID NO: 403182 - DNA, 15 bp, Homo sapiens
ataaagaaaggacca

SEQ ID NO: 403183 - DNA, 15 bp, Homo sapiens
tataaagaaaggacc

SEQ ID NO: 403184 - DNA, 15 bp, Homo sapiens
atataaagaaaggac

SEQ ID NO: 403185 - DNA, 15 bp, Homo sapiens
aatataaagaaagga

SEQ ID NO: 403186 - DNA, 15 bp, Homo sapiens
aaatataaagaaagg

SEQ ID NO: 403187 - DNA, 15 bp, Homo sapiens
aaaatataaagaaag

SEQ ID NO: 403188 - DNA, 15 bp, Homo sapiens
gaaaatataaagaaa

SEQ ID NO: 403189 - DNA, 15 bp, Homo sapiens
ggaaaatataaagaa

SEQ ID NO: 403190 - DNA, 15 bp, Homo sapiens
aggaaaatataaaga

SEQ ID NO: 403191 - DNA, 15 bp, Homo sapiens
caggaaaatataaag

SEQ ID NO: 403192 - DNA, 15 bp, Homo sapiens
acaggaaaatataaa

SEQ ID NO: 403193 - DNA, 15 bp, Homo sapiens
aacaggaaaatataa

SEQ ID NO: 403194 - DNA, 15 bp, Homo sapiens
aaacaggaaaatata

SEQ ID NO: 403195 - DNA, 15 bp, Homo sapiens
aaaacaggaaaatat

SEQ ID NO: 403196 - DNA, 15 bp, Homo sapiens
aaaaacaggaaaata

SEQ ID NO: 403197 - DNA, 15 bp, Homo sapiens
taaaaacaggaaaat

SEQ ID NO: 403198 - DNA, 15 bp, Homo sapiens
ataaaaacaggaaaa

SEQ ID NO: 403199 - DNA, 15 bp, Homo sapiens
aataaaaacaggaaa

SEQ ID NO: 403200 - DNA, 15 bp, Homo sapiens
gaataaaaacaggaa

SEQ ID NO: 403201 - DNA, 15 bp, Homo sapiens
ggaataaaaacagga

SEQ ID NO: 403202 - DNA, 15 bp, Homo sapiens
gggaataaaaacagg

SEQ ID NO: 403203 - DNA, 15 bp, Homo sapiens
ggggaataaaaacag

SEQ ID NO: 403204 - DNA, 15 bp, Homo sapiens
aggggaataaaaaca

SEQ ID NO: 403205 - DNA, 15 bp, Homo sapiens
gaggggaataaaaac

SEQ ID NO: 403206 - DNA, 15 bp, Homo sapiens
agaggggaataaaaa

SEQ ID NO: 403207 - DNA, 15 bp, Homo sapiens
tagaggggaataaaa

SEQ ID NO: 403208 - DNA, 15 bp, Homo sapiens
ctagaggggaataaa

SEQ ID NO: 403209 - DNA, 15 bp, Homo sapiens
tctagaggggaataa

SEQ ID NO: 403210 - DNA, 15 bp, Homo sapiens
atctagaggggaata

SEQ ID NO: 403211 - DNA, 15 bp, Homo sapiens
aatctagaggggaat

SEQ ID NO: 403212 - DNA, 15 bp, Homo sapiens
caatctagaggggaa

SEQ ID NO: 403213 - DNA, 15 bp, Homo sapiens
gcaatctagagggga

SEQ ID NO: 403214 - DNA, 15 bp, Homo sapiens
agcaatctagagggg

SEQ ID NO: 403215 - DNA, 15 bp, Homo sapiens
aagcaatctagaggg

SEQ ID NO: 403216 - DNA, 15 bp, Homo sapiens
aaagcaatctagagg

SEQ ID NO: 403217 - DNA, 15 bp, Homo sapiens
gaaagcaatctagag

SEQ ID NO: 403218 - DNA, 15 bp, Homo sapiens
ggaaagcaatctaga

SEQ ID NO: 403219 - DNA, 15 bp, Homo sapiens
gggaaagcaatctag

SEQ ID NO: 403220 - DNA, 15 bp, Homo sapiens
ggggaaagcaatcta

SEQ ID NO: 403221 - DNA, 15 bp, Homo sapiens
tggggaaagcaatct

SEQ ID NO: 403222 - DNA, 15 bp, Homo sapiens
atggggaaagcaatc

SEQ ID NO: 403223 - DNA, 15 bp, Homo sapiens
aatggggaaagcaat

SEQ ID NO: 403224 - DNA, 15 bp, Homo sapiens
taatggggaaagcaa

SEQ ID NO: 403225 - DNA, 15 bp, Homo sapiens
ataatggggaaagca

SEQ ID NO: 403226 - DNA, 15 bp, Homo sapiens
gataatggggaaagc

SEQ ID NO: 403227 - DNA, 15 bp, Homo sapiens
agataatggggaaag

SEQ ID NO: 403228 - DNA, 15 bp, Homo sapiens
gagataatggggaaa

SEQ ID NO: 403229 - DNA, 15 bp, Homo sapiens
agagataatggggaa

SEQ ID NO: 403230 - DNA, 15 bp, Homo sapiens
cagagataatgggga

SEQ ID NO: 403231 - DNA, 15 bp, Homo sapiens
gcagagataatgggg

SEQ ID NO: 403232 - DNA, 15 bp, Homo sapiens
tgcagagataatggg

SEQ ID NO: 403233 - DNA, 15 bp, Homo sapiens
atgcagagataatgg

SEQ ID NO: 403234 - DNA, 15 bp, Homo sapiens
catgcagagataatg

SEQ ID NO: 403235 - DNA, 15 bp, Homo sapiens
acatgcagagataat

SEQ ID NO: 403236 - DNA, 15 bp, Homo sapiens
gacatgcagagataa

SEQ ID NO: 403237 - DNA, 15 bp, Homo sapiens
agacatgcagagata

SEQ ID NO: 403238 - DNA, 15 bp, Homo sapiens
cagacatgcagagat

SEQ ID NO: 403239 - DNA, 15 bp, Homo sapiens
tcagacatgcagaga

SEQ ID NO: 403240 - DNA, 15 bp, Homo sapiens
ttcagacatgcagag

SEQ ID NO: 403241 - DNA, 15 bp, Homo sapiens
attcagacatgcaga

SEQ ID NO: 403242 - DNA, 15 bp, Homo sapiens
gattcagacatgcag

SEQ ID NO: 403243 - DNA, 15 bp, Homo sapiens
agattcagacatgca

SEQ ID NO: 403244 - DNA, 15 bp, Homo sapiens
tagattcagacatgc

SEQ ID NO: 403245 - DNA, 15 bp, Homo sapiens
gtagattcagacatg

SEQ ID NO: 403246 - DNA, 15 bp, Homo sapiens
agtagattcagacat

SEQ ID NO: 403247 - DNA, 15 bp, Homo sapiens
gagtagattcagaca

SEQ ID NO: 403248 - DNA, 15 bp, Homo sapiens
agagtagattcagac

SEQ ID NO: 403249 - DNA, 15 bp, Homo sapiens
gagagtagattcaga

SEQ ID NO: 403250 - DNA, 15 bp, Homo sapiens
cgagagtagattcag

SEQ ID NO: 403251 - DNA, 15 bp, Homo sapiens
acgagagtagattca

SEQ ID NO: 403252 - DNA, 15 bp, Homo sapiens
tacgagagtagattc

SEQ ID NO: 403253 - DNA, 15 bp, Homo sapiens
atacgagagtagatt

SEQ ID NO: 403254 - DNA, 15 bp, Homo sapiens
gatacgagagtagat

SEQ ID NO: 403255 - DNA, 15 bp, Homo sapiens
tgatacgagagtaga

SEQ ID NO: 403256 - DNA, 15 bp, Homo sapiens
ttgatacgagagtag

SEQ ID NO: 403257 - DNA, 15 bp, Homo sapiens
cttgatacgagagta

SEQ ID NO: 403258 - DNA, 15 bp, Homo sapiens
ccttgatacgagagt

SEQ ID NO: 403259 - DNA, 15 bp, Homo sapiens
gccttgatacgagag

SEQ ID NO: 403260 - DNA, 15 bp, Homo sapiens
tgccttgatacgaga

SEQ ID NO: 403261 - DNA, 15 bp, Homo sapiens
gtgccttgatacgag

SEQ ID NO: 403262 - DNA, 15 bp, Homo sapiens
ggtgccttgatacga

SEQ ID NO: 403263 - DNA, 15 bp, Homo sapiens
tggtgccttgatacg

SEQ ID NO: 403264 - DNA, 15 bp, Homo sapiens
ttggtgccttgatac

SEQ ID NO: 403265 - DNA, 15 bp, Homo sapiens
attggtgccttgata

SEQ ID NO: 403266 - DNA, 15 bp, Homo sapiens
tattggtgccttgat

SEQ ID NO: 403267 - DNA, 15 bp, Homo sapiens
ttattggtgccttga

SEQ ID NO: 403268 - DNA, 15 bp, Homo sapiens
tttattggtgccttg

SEQ ID NO: 403269 - DNA, 15 bp, Homo sapiens
ttttattggtgcctt

SEQ ID NO: 403270 - DNA, 15 bp, Homo sapiens
attttattggtgcct

SEQ ID NO: 403271 - DNA, 15 bp, Homo sapiens
cattttattggtgcc

SEQ ID NO: 403272 - DNA, 15 bp, Homo sapiens
gcattttattggtgc

SEQ ID NO: 403273 - DNA, 15 bp, Homo sapiens
ggcattttattggtg

SEQ ID NO: 403274 - DNA, 15 bp, Homo sapiens
tggcattttattggt

SEQ ID NO: 403275 - DNA, 15 bp, Homo sapiens
gtggcattttattgg

SEQ ID NO: 403276 - DNA, 15 bp, Homo sapiens
ggtggcattttattg

SEQ ID NO: 403277 - DNA, 15 bp, Homo sapiens
aggtggcattttatt

SEQ ID NO: 403278 - DNA, 15 bp, Homo sapiens
gaggtggcattttat

SEQ ID NO: 403279 - DNA, 15 bp, Homo sapiens
agaggtggcatttta

SEQ ID NO: 403280 - DNA, 15 bp, Homo sapiens
aagaggtggcatttt

SEQ ID NO: 403281 - DNA, 15 bp, Homo sapiens
gaagaggtggcattt

SEQ ID NO: 403282 - DNA, 15 bp, Homo sapiens
agaagaggtggcatt

SEQ ID NO: 403283 - DNA, 15 bp, Homo sapiens
gagaagaggtggcat

SEQ ID NO: 403284 - DNA, 15 bp, Homo sapiens
agagaagaggtggca

SEQ ID NO: 403285 - DNA, 15 bp, Homo sapiens
tagagaagaggtggc

SEQ ID NO: 403286 - DNA, 15 bp, Homo sapiens
ttagagaagaggtgg

SEQ ID NO: 403287 - DNA, 15 bp, Homo sapiens
tttagagaagaggtg

SEQ ID NO: 403288 - DNA, 15 bp, Homo sapiens
ctttagagaagaggt

SEQ ID NO: 403289 - DNA, 15 bp, Homo sapiens
gctttagagaagagg

SEQ ID NO: 403290 - DNA, 15 bp, Homo sapiens
agctttagagaagag

SEQ ID NO: 403291 - DNA, 15 bp, Homo sapiens
aagctttagagaaga

SEQ ID NO: 403292 - DNA, 15 bp, Homo sapiens
aaagctttagagaag

SEQ ID NO: 403293 - DNA, 15 bp, Homo sapiens
aaaagctttagagaa

SEQ ID NO: 403294 - DNA, 15 bp, Homo sapiens
gaaaagctttagaga

SEQ ID NO: 403295 - DNA, 15 bp, Homo sapiens
ggaaaagctttagag

SEQ ID NO: 403296 - DNA, 15 bp, Homo sapiens
gggaaaagctttaga

SEQ ID NO: 403297 - DNA, 15 bp, Homo sapiens
ggggaaaagctttag

SEQ ID NO: 403298 - DNA, 15 bp, Homo sapiens
tggggaaaagcttta

SEQ ID NO: 403299 - DNA, 15 bp, Homo sapiens
atggggaaaagcttt

SEQ ID NO: 403300 - DNA, 15 bp, Homo sapiens
gatggggaaaagctt

SEQ ID NO: 403301 - DNA, 15 bp, Homo sapiens
ggatggggaaaagct

SEQ ID NO: 403302 - DNA, 15 bp, Homo sapiens
aggatggggaaaagc

SEQ ID NO: 403303 - DNA, 15 bp, Homo sapiens
gaggatggggaaaag

SEQ ID NO: 403304 - DNA, 15 bp, Homo sapiens
ggaggatggggaaaa

SEQ ID NO: 403305 - DNA, 15 bp, Homo sapiens
aggaggatggggaaa

SEQ ID NO: 403306 - DNA, 15 bp, Homo sapiens
caggaggatggggaa

SEQ ID NO: 403307 - DNA, 15 bp, Homo sapiens
gcaggaggatgggga

SEQ ID NO: 403308 - DNA, 15 bp, Homo sapiens
agcaggaggatgggg

SEQ ID NO: 403309 - DNA, 15 bp, Homo sapiens
cagcaggaggatggg

SEQ ID NO: 403310 - DNA, 15 bp, Homo sapiens
ccagcaggaggatgg

SEQ ID NO: 403311 - DNA, 15 bp, Homo sapiens
tccagcaggaggatg

SEQ ID NO: 403312 - DNA, 15 bp, Homo sapiens
ttccagcaggaggat

SEQ ID NO: 403313 - DNA, 15 bp, Homo sapiens
cttccagcaggagga

SEQ ID NO: 403314 - DNA, 15 bp, Homo sapiens
gcttccagcaggagg

SEQ ID NO: 403315 - DNA, 15 bp, Homo sapiens
tgcttccagcaggag

SEQ ID NO: 403316 - DNA, 15 bp, Homo sapiens
ttgcttccagcagga

SEQ ID NO: 403317 - DNA, 15 bp, Homo sapiens
attgcttccagcagg

SEQ ID NO: 403318 - DNA, 15 bp, Homo sapiens
tattgcttccagcag

SEQ ID NO: 403319 - DNA, 15 bp, Homo sapiens
atattgcttccagca

SEQ ID NO: 403320 - DNA, 15 bp, Homo sapiens
aatattgcttccagc

SEQ ID NO: 403321 - DNA, 15 bp, Homo sapiens
aaatattgcttccag

SEQ ID NO: 403322 - DNA, 15 bp, Homo sapiens
aaaatattgcttcca

SEQ ID NO: 403323 - DNA, 15 bp, Homo sapiens
gaaaatattgcttcc

SEQ ID NO: 403324 - DNA, 15 bp, Homo sapiens
agaaaatattgcttc

SEQ ID NO: 403325 - DNA, 15 bp, Homo sapiens
cagaaaatattgctt

SEQ ID NO: 403326 - DNA, 15 bp, Homo sapiens
gcagaaaatattgct

SEQ ID NO: 403327 - DNA, 15 bp, Homo sapiens
ggcagaaaatattgc

SEQ ID NO: 403328 - DNA, 15 bp, Homo sapiens
aggcagaaaatattg

SEQ ID NO: 403329 - DNA, 15 bp, Homo sapiens
gaggcagaaaatatt

SEQ ID NO: 403330 - DNA, 15 bp, Homo sapiens
ggaggcagaaaatat

SEQ ID NO: 403331 - DNA, 15 bp, Homo sapiens
tggaggcagaaaata

SEQ ID NO: 403332 - DNA, 15 bp, Homo sapiens
ttggaggcagaaaat

SEQ ID NO: 403333 - DNA, 15 bp, Homo sapiens
tttggaggcagaaaa

SEQ ID NO: 403334 - DNA, 15 bp, Homo sapiens
gtttggaggcagaaa

SEQ ID NO: 403335 - DNA, 15 bp, Homo sapiens
tgtttggaggcagaa

SEQ ID NO: 403336 - DNA, 15 bp, Homo sapiens
gtgtttggaggcaga

SEQ ID NO: 403337 - DNA, 15 bp, Homo sapiens
ggtgtttggaggcag

SEQ ID NO: 403338 - DNA, 15 bp, Homo sapiens
aggtgtttggaggca

SEQ ID NO: 403339 - DNA, 15 bp, Homo sapiens
taggtgtttggaggc

SEQ ID NO: 403340 - DNA, 15 bp, Homo sapiens
gtaggtgtttggagg

SEQ ID NO: 403341 - DNA, 15 bp, Homo sapiens
tgtaggtgtttggag

SEQ ID NO: 403342 - DNA, 15 bp, Homo sapiens
ctgtaggtgtttgga

SEQ ID NO: 403343 - DNA, 15 bp, Homo sapiens
actgtaggtgtttgg

SEQ ID NO: 403344 - DNA, 15 bp, Homo sapiens
cactgtaggtgtttg

SEQ ID NO: 403345 - DNA, 15 bp, Homo sapiens
acactgtaggtgttt

SEQ ID NO: 403346 - DNA, 15 bp, Homo sapiens
aacactgtaggtgtt

SEQ ID NO: 403347 - DNA, 15 bp, Homo sapiens
aaacactgtaggtgt

SEQ ID NO: 403348 - DNA, 15 bp, Homo sapiens
aaaacactgtaggtg

SEQ ID NO: 403349 - DNA, 15 bp, Homo sapiens
taaaacactgtaggt

SEQ ID NO: 403350 - DNA, 15 bp, Homo sapiens
gtaaaacactgtagg

SEQ ID NO: 403351 - DNA, 15 bp, Homo sapiens
ggtaaaacactgtag

SEQ ID NO: 403352 - DNA, 15 bp, Homo sapiens
aggtaaaacactgta

SEQ ID NO: 403353 - DNA, 15 bp, Homo sapiens
caggtaaaacactgt

SEQ ID NO: 403354 - DNA, 15 bp, Homo sapiens
gcaggtaaaacactg

SEQ ID NO: 403355 - DNA, 15 bp, Homo sapiens
tgcaggtaaaacact

SEQ ID NO: 403356 - DNA, 15 bp, Homo sapiens
ttgcaggtaaaacac

SEQ ID NO: 403357 - DNA, 15 bp, Homo sapiens
attgcaggtaaaaca

SEQ ID NO: 403358 - DNA, 15 bp, Homo sapiens
aattgcaggtaaaac

SEQ ID NO: 403359 - DNA, 15 bp, Homo sapiens
gaattgcaggtaaaa

SEQ ID NO: 403360 - DNA, 15 bp, Homo sapiens
agaattgcaggtaaa

SEQ ID NO: 403361 - DNA, 15 bp, Homo sapiens
gagaattgcaggtaa

SEQ ID NO: 403362 - DNA, 15 bp, Homo sapiens
agagaattgcaggta

SEQ ID NO: 403363 - DNA, 15 bp, Homo sapiens
aagagaattgcaggt

SEQ ID NO: 403364 - DNA, 15 bp, Homo sapiens
taagagaattgcagg

SEQ ID NO: 403365 - DNA, 15 bp, Homo sapiens
ataagagaattgcag

SEQ ID NO: 403366 - DNA, 15 bp, Homo sapiens
cataagagaattgca

SEQ ID NO: 403367 - DNA, 15 bp, Homo sapiens
ccataagagaattgc

SEQ ID NO: 403368 - DNA, 15 bp, Homo sapiens
gccataagagaattg

SEQ ID NO: 403369 - DNA, 15 bp, Homo sapiens
tgccataagagaatt

SEQ ID NO: 403370 - DNA, 15 bp, Homo sapiens
gtgccataagagaat

SEQ ID NO: 403371 - DNA, 15 bp, Homo sapiens
agtgccataagagaa

SEQ ID NO: 403372 - DNA, 15 bp, Homo sapiens
aagtgccataagaga

SEQ ID NO: 403373 - DNA, 15 bp, Homo sapiens
gaagtgccataagag

SEQ ID NO: 403374 - DNA, 15 bp, Homo sapiens
agaagtgccataaga

SEQ ID NO: 403375 - DNA, 15 bp, Homo sapiens
gagaagtgccataag

SEQ ID NO: 403376 - DNA, 15 bp, Homo sapiens
tgagaagtgccataa

SEQ ID NO: 403377 - DNA, 15 bp, Homo sapiens
gtgagaagtgccata

SEQ ID NO: 403378 - DNA, 15 bp, Homo sapiens
agtgagaagtgccat

SEQ ID NO: 403379 - DNA, 15 bp, Homo sapiens
aagtgagaagtgcca

SEQ ID NO: 403380 - DNA, 15 bp, Homo sapiens
aaagtgagaagtgcc

SEQ ID NO: 403381 - DNA, 15 bp, Homo sapiens
aaaagtgagaagtgc

SEQ ID NO: 403382 - DNA, 15 bp, Homo sapiens
aaaaagtgagaagtg

SEQ ID NO: 403383 - DNA, 15 bp, Homo sapiens
taaaaagtgagaagt

SEQ ID NO: 403384 - DNA, 15 bp, Homo sapiens
ataaaaagtgagaag

SEQ ID NO: 403385 - DNA, 15 bp, Homo sapiens
cataaaaagtgagaa

SEQ ID NO: 403386 - DNA, 15 bp, Homo sapiens
tcataaaaagtgaga

SEQ ID NO: 403387 - DNA, 15 bp, Homo sapiens
atcataaaaagtgag

SEQ ID NO: 403388 - DNA, 15 bp, Homo sapiens
tatcataaaaagtga

SEQ ID NO: 403389 - DNA, 15 bp, Homo sapiens
ttatcataaaaagtg

SEQ ID NO: 403390 - DNA, 15 bp, Homo sapiens
tttatcataaaaagt

SEQ ID NO: 403391 - DNA, 15 bp, Homo sapiens
ttttatcataaaaag

SEQ ID NO: 403392 - DNA, 15 bp, Homo sapiens
attttatcataaaaa

SEQ ID NO: 403393 - DNA, 15 bp, Homo sapiens
tattttatcataaaa

SEQ ID NO: 403394 - DNA, 15 bp, Homo sapiens
gtattttatcataaa

SEQ ID NO: 403395 - DNA, 15 bp, Homo sapiens
agtattttatcataa

SEQ ID NO: 403396 - DNA, 15 bp, Homo sapiens
gagtattttatcata

SEQ ID NO: 403397 - DNA, 15 bp, Homo sapiens
tgagtattttatcat

SEQ ID NO: 403398 - DNA, 15 bp, Homo sapiens
gtgagtattttatca

SEQ ID NO: 403399 - DNA, 15 bp, Homo sapiens
agtgagtattttatc

SEQ ID NO: 403400 - DNA, 15 bp, Homo sapiens
tagtgagtattttat

SEQ ID NO: 403401 - DNA, 15 bp, Homo sapiens
ttagtgagtatttta

SEQ ID NO: 403402 - DNA, 15 bp, Homo sapiens
tttagtgagtatttt

SEQ ID NO: 403403 - DNA, 15 bp, Homo sapiens
ttttagtgagtattt

SEQ ID NO: 403404 - DNA, 15 bp, Homo sapiens
cttttagtgagtatt

SEQ ID NO: 403405 - DNA, 15 bp, Homo sapiens
tcttttagtgagtat

SEQ ID NO: 403406 - DNA, 15 bp, Homo sapiens
gtcttttagtgagta

SEQ ID NO: 403407 - DNA, 15 bp, Homo sapiens
tgtcttttagtgagt

SEQ ID NO: 403408 - DNA, 15 bp, Homo sapiens
gtgtcttttagtgag

SEQ ID NO: 403409 - DNA, 15 bp, Homo sapiens
agtgtcttttagtga

SEQ ID NO: 403410 - DNA, 15 bp, Homo sapiens
gagtgtcttttagtg

SEQ ID NO: 403411 - DNA, 15 bp, Homo sapiens
agagtgtcttttagt

SEQ ID NO: 403412 - DNA, 15 bp, Homo sapiens
aagagtgtcttttag

SEQ ID NO: 403413 - DNA, 15 bp, Homo sapiens
caagagtgtctttta

SEQ ID NO: 403414 - DNA, 15 bp, Homo sapiens
tcaagagtgtctttt

SEQ ID NO: 403415 - DNA, 15 bp, Homo sapiens
gtcaagagtgtcttt

SEQ ID NO: 403416 - DNA, 15 bp, Homo sapiens
tgtcaagagtgtctt

SEQ ID NO: 403417 - DNA, 15 bp, Homo sapiens
ttgtcaagagtgtct

SEQ ID NO: 403418 - DNA, 15 bp, Homo sapiens
cttgtcaagagtgtc

SEQ ID NO: 403419 - DNA, 15 bp, Homo sapiens
tcttgtcaagagtgt

SEQ ID NO: 403420 - DNA, 15 bp, Homo sapiens
ttcttgtcaagagtg

SEQ ID NO: 403421 - DNA, 15 bp, Homo sapiens
attcttgtcaagagt

SEQ ID NO: 403422 - DNA, 15 bp, Homo sapiens
cattcttgtcaagag

SEQ ID NO: 403423 - DNA, 15 bp, Homo sapiens
acattcttgtcaaga

SEQ ID NO: 403424 - DNA, 15 bp, Homo sapiens
tacattcttgtcaag

SEQ ID NO: 403425 - DNA, 15 bp, Homo sapiens
ttacattcttgtcaa

SEQ ID NO: 403426 - DNA, 15 bp, Homo sapiens
cttacattcttgtca

SEQ ID NO: 403427 - DNA, 15 bp, Homo sapiens
gcttacattcttgtc

SEQ ID NO: 403428 - DNA, 15 bp, Homo sapiens
agcttacattcttgt

SEQ ID NO: 403429 - DNA, 15 bp, Homo sapiens
aagcttacattcttg

SEQ ID NO: 403430 - DNA, 15 bp, Homo sapiens
taagcttacattctt

SEQ ID NO: 403431 - DNA, 15 bp, Homo sapiens
ttaagcttacattct

SEQ ID NO: 403432 - DNA, 15 bp, Homo sapiens
tttaagcttacattc

SEQ ID NO: 403433 - DNA, 15 bp, Homo sapiens
atttaagcttacatt

SEQ ID NO: 403434 - DNA, 15 bp, Homo sapiens
tatttaagcttacat

SEQ ID NO: 403435 - DNA, 15 bp, Homo sapiens
ttatttaagcttaca

SEQ ID NO: 403436 - DNA, 15 bp, Homo sapiens
gttatttaagcttac

SEQ ID NO: 403437 - DNA, 15 bp, Homo sapiens
agttatttaagctta

SEQ ID NO: 403438 - DNA, 15 bp, Homo sapiens
tagttatttaagctt

SEQ ID NO: 403439 - DNA, 15 bp, Homo sapiens
ttagttatttaagct

SEQ ID NO: 403440 - DNA, 15 bp, Homo sapiens
attagttatttaagc

SEQ ID NO: 403441 - DNA, 15 bp, Homo sapiens
cattagttatttaag

SEQ ID NO: 403442 - DNA, 15 bp, Homo sapiens
acattagttatttaa

SEQ ID NO: 403443 - DNA, 15 bp, Homo sapiens
tacattagttattta

SEQ ID NO: 403444 - DNA, 15 bp, Homo sapiens
ctacattagttattt

SEQ ID NO: 403445 - DNA, 15 bp, Homo sapiens
actacattagttatt

SEQ ID NO: 403446 - DNA, 15 bp, Homo sapiens
cactacattagttat

SEQ ID NO: 403447 - DNA, 15 bp, Homo sapiens
acactacattagtta

SEQ ID NO: 403448 - DNA, 15 bp, Homo sapiens
gacactacattagtt

SEQ ID NO: 403449 - DNA, 15 bp, Homo sapiens
agacactacattagt

SEQ ID NO: 403450 - DNA, 15 bp, Homo sapiens
aagacactacattag

SEQ ID NO: 403451 - DNA, 15 bp, Homo sapiens
caagacactacatta

SEQ ID NO: 403452 - DNA, 15 bp, Homo sapiens
acaagacactacatt

SEQ ID NO: 403453 - DNA, 15 bp, Homo sapiens
tacaagacactacat

SEQ ID NO: 403454 - DNA, 15 bp, Homo sapiens
atacaagacactaca

SEQ ID NO: 403455 - DNA, 15 bp, Homo sapiens
tatacaagacactac

SEQ ID NO: 403456 - DNA, 15 bp, Homo sapiens
atatacaagacacta

SEQ ID NO: 403457 - DNA, 15 bp, Homo sapiens
tatatacaagacact

SEQ ID NO: 403458 - DNA, 15 bp, Homo sapiens
atatatacaagacac

SEQ ID NO: 403459 - DNA, 15 bp, Homo sapiens
aatatatacaagaca

SEQ ID NO: 403460 - DNA, 15 bp, Homo sapiens
aaatatatacaagac

SEQ ID NO: 403461 - DNA, 15 bp, Homo sapiens
aaaatatatacaaga

SEQ ID NO: 403462 - DNA, 15 bp, Homo sapiens
caaaatatatacaag

SEQ ID NO: 403463 - DNA, 15 bp, Homo sapiens
ccaaaatatatacaa

SEQ ID NO: 403464 - DNA, 15 bp, Homo sapiens
gccaaaatatataca

SEQ ID NO: 403465 - DNA, 15 bp, Homo sapiens
ggccaaaatatatac

SEQ ID NO: 403466 - DNA, 15 bp, Homo sapiens
gggccaaaatatata

SEQ ID NO: 403467 - DNA, 15 bp, Homo sapiens
ggggccaaaatatat

SEQ ID NO: 403468 - DNA, 15 bp, Homo sapiens
tggggccaaaatata

SEQ ID NO: 403469 - DNA, 15 bp, Homo sapiens
ttggggccaaaatat

SEQ ID NO: 403470 - DNA, 15 bp, Homo sapiens
attggggccaaaata

SEQ ID NO: 403471 - DNA, 15 bp, Homo sapiens
aattggggccaaaat

SEQ ID NO: 403472 - DNA, 15 bp, Homo sapiens
gaattggggccaaaa

SEQ ID NO: 403473 - DNA, 15 bp, Homo sapiens
tgaattggggccaaa

SEQ ID NO: 403474 - DNA, 15 bp, Homo sapiens
atgaattggggccaa

SEQ ID NO: 403475 - DNA, 15 bp, Homo sapiens
tatgaattggggcca

SEQ ID NO: 403476 - DNA, 15 bp, Homo sapiens
atatgaattggggcc

SEQ ID NO: 403477 - DNA, 15 bp, Homo sapiens
catatgaattggggc

SEQ ID NO: 403478 - DNA, 15 bp, Homo sapiens
acatatgaattgggg

SEQ ID NO: 403479 - DNA, 15 bp, Homo sapiens
tacatatgaattggg

SEQ ID NO: 403480 - DNA, 15 bp, Homo sapiens
atacatatgaattgg

SEQ ID NO: 403481 - DNA, 15 bp, Homo sapiens
aatacatatgaattg

SEQ ID NO: 403482 - DNA, 15 bp, Homo sapiens
caatacatatgaatt

SEQ ID NO: 403483 - DNA, 15 bp, Homo sapiens
tcaatacatatgaat

SEQ ID NO: 403484 - DNA, 15 bp, Homo sapiens
ctcaatacatatgaa

SEQ ID NO: 403485 - DNA, 15 bp, Homo sapiens
cctcaatacatatga

SEQ ID NO: 403486 - DNA, 15 bp, Homo sapiens
acctcaatacatatg

SEQ ID NO: 403487 - DNA, 15 bp, Homo sapiens
aacctcaatacatat

SEQ ID NO: 403488 - DNA, 15 bp, Homo sapiens
caacctcaatacata

SEQ ID NO: 403489 - DNA, 15 bp, Homo sapiens
tcaacctcaatacat

SEQ ID NO: 403490 - DNA, 15 bp, Homo sapiens
ttcaacctcaataca

SEQ ID NO: 403491 - DNA, 15 bp, Homo sapiens
cttcaacctcaatac

SEQ ID NO: 403492 - DNA, 15 bp, Homo sapiens
acttcaacctcaata

SEQ ID NO: 403493 - DNA, 15 bp, Homo sapiens
gacttcaacctcaat

SEQ ID NO: 403494 - DNA, 15 bp, Homo sapiens
agacttcaacctcaa

SEQ ID NO: 403495 - DNA, 15 bp, Homo sapiens
gagacttcaacctca

SEQ ID NO: 403496 - DNA, 15 bp, Homo sapiens
tgagacttcaacctc

SEQ ID NO: 403497 - DNA, 15 bp, Homo sapiens
atgagacttcaacct

SEQ ID NO: 403498 - DNA, 15 bp, Homo sapiens
gatgagacttcaacc

SEQ ID NO: 403499 - DNA, 15 bp, Homo sapiens
tgatgagacttcaac

SEQ ID NO: 403500 - DNA, 15 bp, Homo sapiens
ctgatgagacttcaa

SEQ ID NO: 403501 - DNA, 15 bp, Homo sapiens
tctgatgagacttca

SEQ ID NO: 403502 - DNA, 15 bp, Homo sapiens
ctctgatgagacttc

SEQ ID NO: 403503 - DNA, 15 bp, Homo sapiens
cctctgatgagactt

SEQ ID NO: 403504 - DNA, 15 bp, Homo sapiens
tcctctgatgagact

SEQ ID NO: 403505 - DNA, 15 bp, Homo sapiens
ctcctctgatgagac

SEQ ID NO: 403506 - DNA, 15 bp, Homo sapiens
tctcctctgatgaga

SEQ ID NO: 403507 - DNA, 15 bp, Homo sapiens
gtctcctctgatgag

SEQ ID NO: 403508 - DNA, 15 bp, Homo sapiens
tgtctcctctgatga

SEQ ID NO: 403509 - DNA, 15 bp, Homo sapiens
ctgtctcctctgatg

SEQ ID NO: 403510 - DNA, 15 bp, Homo sapiens
tctgtctcctctgat

SEQ ID NO: 403511 - DNA, 15 bp, Homo sapiens
atctgtctcctctga

SEQ ID NO: 403512 - DNA, 15 bp, Homo sapiens
tatctgtctcctctg

SEQ ID NO: 403513 - DNA, 15 bp, Homo sapiens
atatctgtctcctct

SEQ ID NO: 403514 - DNA, 15 bp, Homo sapiens
catatctgtctcctc

SEQ ID NO: 403515 - DNA, 15 bp, Homo sapiens
tcatatctgtctcct

SEQ ID NO: 403516 - DNA, 15 bp, Homo sapiens
ttcatatctgtctcc

SEQ ID NO: 403517 - DNA, 15 bp, Homo sapiens
tttcatatctgtctc

SEQ ID NO: 403518 - DNA, 15 bp, Homo sapiens
ctttcatatctgtct

SEQ ID NO: 403519 - DNA, 15 bp, Homo sapiens
tctttcatatctgtc

SEQ ID NO: 403520 - DNA, 15 bp, Homo sapiens
ttctttcatatctgt

SEQ ID NO: 403521 - DNA, 15 bp, Homo sapiens
tttctttcatatctg

SEQ ID NO: 403522 - DNA, 15 bp, Homo sapiens
atttctttcatatct

SEQ ID NO: 403523 - DNA, 15 bp, Homo sapiens
aatttctttcatatc

SEQ ID NO: 403524 - DNA, 15 bp, Homo sapiens
taatttctttcatat

SEQ ID NO: 403525 - DNA, 15 bp, Homo sapiens
gtaatttctttcata

SEQ ID NO: 403526 - DNA, 15 bp, Homo sapiens
tgtaatttctttcat

SEQ ID NO: 403527 - DNA, 15 bp, Homo sapiens
atgtaatttctttca

SEQ ID NO: 403528 - DNA, 15 bp, Homo sapiens
aatgtaatttctttc

SEQ ID NO: 403529 - DNA, 15 bp, Homo sapiens
aaatgtaatttcttt

SEQ ID NO: 403530 - DNA, 15 bp, Homo sapiens
aaaatgtaatttctt

SEQ ID NO: 403531 - DNA, 15 bp, Homo sapiens
caaaatgtaatttct

SEQ ID NO: 403532 - DNA, 15 bp, Homo sapiens
tcaaaatgtaatttc

SEQ ID NO: 403533 - DNA, 15 bp, Homo sapiens
gtcaaaatgtaattt

SEQ ID NO: 403534 - DNA, 15 bp, Homo sapiens
ggtcaaaatgtaatt

SEQ ID NO: 403535 - DNA, 15 bp, Homo sapiens
tggtcaaaatgtaat

SEQ ID NO: 403536 - DNA, 15 bp, Homo sapiens
ctggtcaaaatgtaa

SEQ ID NO: 403537 - DNA, 15 bp, Homo sapiens
cctggtcaaaatgta

SEQ ID NO: 403538 - DNA, 15 bp, Homo sapiens
tcctggtcaaaatgt

SEQ ID NO: 403539 - DNA, 15 bp, Homo sapiens
ttcctggtcaaaatg

SEQ ID NO: 403540 - DNA, 15 bp, Homo sapiens
cttcctggtcaaaat

SEQ ID NO: 403541 - DNA, 15 bp, Homo sapiens
acttcctggtcaaaa

SEQ ID NO: 403542 - DNA, 15 bp, Homo sapiens
tacttcctggtcaaa

SEQ ID NO: 403543 - DNA, 15 bp, Homo sapiens
atacttcctggtcaa

SEQ ID NO: 403544 - DNA, 15 bp, Homo sapiens
aatacttcctggtca

SEQ ID NO: 403545 - DNA, 15 bp, Homo sapiens
aaatacttcctggtc

SEQ ID NO: 403546 - DNA, 15 bp, Homo sapiens
aaaatacttcctggt

SEQ ID NO: 403547 - DNA, 15 bp, Homo sapiens
gaaaatacttcctgg

SEQ ID NO: 403548 - DNA, 15 bp, Homo sapiens
agaaaatacttcctg

SEQ ID NO: 403549 - DNA, 15 bp, Homo sapiens
aagaaaatacttcct

SEQ ID NO: 403550 - DNA, 15 bp, Homo sapiens
taagaaaatacttcc

SEQ ID NO: 403551 - DNA, 15 bp, Homo sapiens
ctaagaaaatacttc

SEQ ID NO: 403552 - DNA, 15 bp, Homo sapiens
tctaagaaaatactt

SEQ ID NO: 403553 - DNA, 15 bp, Homo sapiens
atctaagaaaatact

SEQ ID NO: 403554 - DNA, 15 bp, Homo sapiens
tatctaagaaaatac

SEQ ID NO: 403555 - DNA, 15 bp, Homo sapiens
ctatctaagaaaata

SEQ ID NO: 403556 - DNA, 15 bp, Homo sapiens
actatctaagaaaat

SEQ ID NO: 403557 - DNA, 15 bp, Homo sapiens
tactatctaagaaaa

SEQ ID NO: 403558 - DNA, 15 bp, Homo sapiens
ctactatctaagaaa

SEQ ID NO: 403559 - DNA, 15 bp, Homo sapiens
tctactatctaagaa

SEQ ID NO: 403560 - DNA, 15 bp, Homo sapiens
ttctactatctaaga

SEQ ID NO: 403561 - DNA, 15 bp, Homo sapiens
tttctactatctaag

SEQ ID NO: 403562 - DNA, 15 bp, Homo sapiens
ctttctactatctaa

SEQ ID NO: 403563 - DNA, 15 bp, Homo sapiens
tctttctactatcta

SEQ ID NO: 403564 - DNA, 15 bp, Homo sapiens
ttctttctactatct

SEQ ID NO: 403565 - DNA, 15 bp, Homo sapiens
gttctttctactatc

SEQ ID NO: 403566 - DNA, 15 bp, Homo sapiens
tgttctttctactat

SEQ ID NO: 403567 - DNA, 15 bp, Homo sapiens
atgttctttctacta

SEQ ID NO: 403568 - DNA, 15 bp, Homo sapiens
tatgttctttctact

SEQ ID NO: 403569 - DNA, 15 bp, Homo sapiens
atatgttctttctac

SEQ ID NO: 403570 - DNA, 15 bp, Homo sapiens
gatatgttctttcta

SEQ ID NO: 403571 - DNA, 15 bp, Homo sapiens
tgatatgttctttct

SEQ ID NO: 403572 - DNA, 15 bp, Homo sapiens
ttgatatgttctttc

SEQ ID NO: 403573 - DNA, 15 bp, Homo sapiens
attgatatgttcttt

SEQ ID NO: 403574 - DNA, 15 bp, Homo sapiens
aattgatatgttctt

SEQ ID NO: 403575 - DNA, 15 bp, Homo sapiens
taattgatatgttct

SEQ ID NO: 403576 - DNA, 15 bp, Homo sapiens
ctaattgatatgttc

SEQ ID NO: 403577 - DNA, 15 bp, Homo sapiens
tctaattgatatgtt

SEQ ID NO: 403578 - DNA, 15 bp, Homo sapiens
ctctaattgatatgt

SEQ ID NO: 403579 - DNA, 15 bp, Homo sapiens
cctctaattgatatg

SEQ ID NO: 403580 - DNA, 15 bp, Homo sapiens
ccctctaattgatat

SEQ ID NO: 403581 - DNA, 15 bp, Homo sapiens
cccctctaattgata

SEQ ID NO: 403582 - DNA, 15 bp, Homo sapiens
acccctctaattgat

SEQ ID NO: 403583 - DNA, 15 bp, Homo sapiens
aacccctctaattga

SEQ ID NO: 403584 - DNA, 15 bp, Homo sapiens
caacccctctaattg

SEQ ID NO: 403585 - DNA, 15 bp, Homo sapiens
acaacccctctaatt

SEQ ID NO: 403586 - DNA, 15 bp, Homo sapiens
aacaacccctctaat

SEQ ID NO: 403587 - DNA, 15 bp, Homo sapiens
aaacaacccctctaa

SEQ ID NO: 403588 - DNA, 15 bp, Homo sapiens
taaacaacccctcta

SEQ ID NO: 403589 - DNA, 15 bp, Homo sapiens
ctaaacaacccctct

SEQ ID NO: 403590 - DNA, 15 bp, Homo sapiens
tctaaacaacccctc

SEQ ID NO: 403591 - DNA, 15 bp, Homo sapiens
atctaaacaacccct

SEQ ID NO: 403592 - DNA, 15 bp, Homo sapiens
catctaaacaacccc

SEQ ID NO: 403593 - DNA, 15 bp, Homo sapiens
ccatctaaacaaccc

SEQ ID NO: 403594 - DNA, 15 bp, Homo sapiens
cccatctaaacaacc

SEQ ID NO: 403595 - DNA, 15 bp, Homo sapiens
gcccatctaaacaac

SEQ ID NO: 403596 - DNA, 15 bp, Homo sapiens
agcccatctaaacaa

SEQ ID NO: 403597 - DNA, 15 bp, Homo sapiens
cagcccatctaaaca

SEQ ID NO: 403598 - DNA, 15 bp, Homo sapiens
acagcccatctaaac

SEQ ID NO: 403599 - DNA, 15 bp, Homo sapiens
aacagcccatctaaa

SEQ ID NO: 403600 - DNA, 15 bp, Homo sapiens
gaacagcccatctaa

SEQ ID NO: 403601 - DNA, 15 bp, Homo sapiens
agaacagcccatcta

SEQ ID NO: 403602 - DNA, 15 bp, Homo sapiens
cagaacagcccatct

SEQ ID NO: 403603 - DNA, 15 bp, Homo sapiens
ccagaacagcccatc

SEQ ID NO: 403604 - DNA, 15 bp, Homo sapiens
accagaacagcccat

SEQ ID NO: 403605 - DNA, 15 bp, Homo sapiens
taccagaacagccca

SEQ ID NO: 403606 - DNA, 15 bp, Homo sapiens
gtaccagaacagccc

SEQ ID NO: 403607 - DNA, 15 bp, Homo sapiens
tgtaccagaacagcc

SEQ ID NO: 403608 - DNA, 15 bp, Homo sapiens
ctgtaccagaacagc

SEQ ID NO: 403609 - DNA, 15 bp, Homo sapiens
tctgtaccagaacag

SEQ ID NO: 403610 - DNA, 15 bp, Homo sapiens
gtctgtaccagaaca

SEQ ID NO: 403611 - DNA, 15 bp, Homo sapiens
agtctgtaccagaac

SEQ ID NO: 403612 - DNA, 15 bp, Homo sapiens
tagtctgtaccagaa

SEQ ID NO: 403613 - DNA, 15 bp, Homo sapiens
gtagtctgtaccaga

SEQ ID NO: 403614 - DNA, 15 bp, Homo sapiens
ggtagtctgtaccag

SEQ ID NO: 403615 - DNA, 15 bp, Homo sapiens
tggtagtctgtacca

SEQ ID NO: 403616 - DNA, 15 bp, Homo sapiens
ttggtagtctgtacc

SEQ ID NO: 403617 - DNA, 15 bp, Homo sapiens
tttggtagtctgtac

SEQ ID NO: 403618 - DNA, 15 bp, Homo sapiens
atttggtagtctgta

SEQ ID NO: 403619 - DNA, 15 bp, Homo sapiens
catttggtagtctgt

SEQ ID NO: 403620 - DNA, 15 bp, Homo sapiens
gcatttggtagtctg

SEQ ID NO: 403621 - DNA, 15 bp, Homo sapiens
agcatttggtagtct

SEQ ID NO: 403622 - DNA, 15 bp, Homo sapiens
aagcatttggtagtc

SEQ ID NO: 403623 - DNA, 15 bp, Homo sapiens
caagcatttggtagt

SEQ ID NO: 403624 - DNA, 15 bp, Homo sapiens
acaagcatttggtag

SEQ ID NO: 403625 - DNA, 15 bp, Homo sapiens
tacaagcatttggta

SEQ ID NO: 403626 - DNA, 15 bp, Homo sapiens
ctacaagcatttggt

SEQ ID NO: 403627 - DNA, 15 bp, Homo sapiens
tctacaagcatttgg

SEQ ID NO: 403628 - DNA, 15 bp, Homo sapiens
gtctacaagcatttg

SEQ ID NO: 403629 - DNA, 15 bp, Homo sapiens
agtctacaagcattt

SEQ ID NO: 403630 - DNA, 15 bp, Homo sapiens
aagtctacaagcatt

SEQ ID NO: 403631 - DNA, 15 bp, Homo sapiens
gaagtctacaagcat

SEQ ID NO: 403632 - DNA, 15 bp, Homo sapiens
agaagtctacaagca

SEQ ID NO: 403633 - DNA, 15 bp, Homo sapiens
aagaagtctacaagc

SEQ ID NO: 403634 - DNA, 15 bp, Homo sapiens
aaagaagtctacaag

SEQ ID NO: 403635 - DNA, 15 bp, Homo sapiens
gaaagaagtctacaa

SEQ ID NO: 403636 - DNA, 15 bp, Homo sapiens
tgaaagaagtctaca

SEQ ID NO: 403637 - DNA, 15 bp, Homo sapiens
atgaaagaagtctac

SEQ ID NO: 403638 - DNA, 15 bp, Homo sapiens
tatgaaagaagtcta

SEQ ID NO: 403639 - DNA, 15 bp, Homo sapiens
gtatgaaagaagtct

SEQ ID NO: 403640 - DNA, 15 bp, Homo sapiens
tgtatgaaagaagtc

SEQ ID NO: 403641 - DNA, 15 bp, Homo sapiens
ttgtatgaaagaagt

SEQ ID NO: 403642 - DNA, 15 bp, Homo sapiens
cttgtatgaaagaag

SEQ ID NO: 403643 - DNA, 15 bp, Homo sapiens
gcttgtatgaaagaa

SEQ ID NO: 403644 - DNA, 15 bp, Homo sapiens
ggcttgtatgaaaga

SEQ ID NO: 403645 - DNA, 15 bp, Homo sapiens
aggcttgtatgaaag

SEQ ID NO: 403646 - DNA, 15 bp, Homo sapiens
aaggcttgtatgaaa

SEQ ID NO: 403647 - DNA, 15 bp, Homo sapiens
aaaggcttgtatgaa

SEQ ID NO: 403648 - DNA, 15 bp, Homo sapiens
aaaaggcttgtatga

SEQ ID NO: 403649 - DNA, 15 bp, Homo sapiens
taaaaggcttgtatg

SEQ ID NO: 403650 - DNA, 15 bp, Homo sapiens
ttaaaaggcttgtat

SEQ ID NO: 403651 - DNA, 15 bp, Homo sapiens
tttaaaaggcttgta

SEQ ID NO: 403652 - DNA, 15 bp, Homo sapiens
ttttaaaaggcttgt

SEQ ID NO: 403653 - DNA, 15 bp, Homo sapiens
attttaaaaggcttg

SEQ ID NO: 403654 - DNA, 15 bp, Homo sapiens
tattttaaaaggctt

SEQ ID NO: 403655 - DNA, 15 bp, Homo sapiens
ctattttaaaaggct

SEQ ID NO: 403656 - DNA, 15 bp, Homo sapiens
gctattttaaaaggc

SEQ ID NO: 403657 - DNA, 15 bp, Homo sapiens
tgctattttaaaagg

SEQ ID NO: 403658 - DNA, 15 bp, Homo sapiens
atgctattttaaaag

SEQ ID NO: 403659 - DNA, 15 bp, Homo sapiens
aatgctattttaaaa

SEQ ID NO: 403660 - DNA, 15 bp, Homo sapiens
taatgctattttaaa

SEQ ID NO: 403661 - DNA, 15 bp, Homo sapiens
ctaatgctattttaa

SEQ ID NO: 403662 - DNA, 15 bp, Homo sapiens
actaatgctatttta

SEQ ID NO: 403663 - DNA, 15 bp, Homo sapiens
gactaatgctatttt

SEQ ID NO: 403664 - DNA, 15 bp, Homo sapiens
tgactaatgctattt

SEQ ID NO: 403665 - DNA, 15 bp, Homo sapiens
ttgactaatgctatt

SEQ ID NO: 403666 - DNA, 15 bp, Homo sapiens
attgactaatgctat

SEQ ID NO: 403667 - DNA, 15 bp, Homo sapiens
gattgactaatgcta

SEQ ID NO: 403668 - DNA, 15 bp, Homo sapiens
tgattgactaatgct

SEQ ID NO: 403669 - DNA, 15 bp, Homo sapiens
atgattgactaatgc

SEQ ID NO: 403670 - DNA, 15 bp, Homo sapiens
aatgattgactaatg

SEQ ID NO: 403671 - DNA, 15 bp, Homo sapiens
aaatgattgactaat

SEQ ID NO: 403672 - DNA, 15 bp, Homo sapiens
gaaatgattgactaa

SEQ ID NO: 403673 - DNA, 15 bp, Homo sapiens
ggaaatgattgacta

SEQ ID NO: 403674 - DNA, 15 bp, Homo sapiens
aggaaatgattgact

SEQ ID NO: 403675 - DNA, 15 bp, Homo sapiens
aaggaaatgattgac

SEQ ID NO: 403676 - DNA, 15 bp, Homo sapiens
taaggaaatgattga

SEQ ID NO: 403677 - DNA, 15 bp, Homo sapiens
ataaggaaatgattg

SEQ ID NO: 403678 - DNA, 15 bp, Homo sapiens
cataaggaaatgatt

SEQ ID NO: 403679 - DNA, 15 bp, Homo sapiens
ccataaggaaatgat

SEQ ID NO: 403680 - DNA, 15 bp, Homo sapiens
tccataaggaaatga

SEQ ID NO: 403681 - DNA, 15 bp, Homo sapiens
atccataaggaaatg

SEQ ID NO: 403682 - DNA, 15 bp, Homo sapiens
tatccataaggaaat

SEQ ID NO: 403683 - DNA, 15 bp, Homo sapiens
gatatccataaggaa

SEQ ID NO: 403684 - DNA, 15 bp, Homo sapiens
ggatatccataagga

SEQ ID NO: 403685 - DNA, 15 bp, Homo sapiens
tggatatccataagg

SEQ ID NO: 403686 - DNA, 15 bp, Homo sapiens
ttggatatccataag

SEQ ID NO: 403687 - DNA, 15 bp, Homo sapiens
tttggatatccataa

SEQ ID NO: 403688 - DNA, 15 bp, Homo sapiens
ctttggatatccata

SEQ ID NO: 403689 - DNA, 15 bp, Homo sapiens
tctttggatatccat

SEQ ID NO: 403690 - DNA, 15 bp, Homo sapiens
gtctttggatatcca

SEQ ID NO: 403691 - DNA, 15 bp, Homo sapiens
agtctttggatatcc

SEQ ID NO: 403692 - DNA, 15 bp, Homo sapiens
aagtctttggatatc

SEQ ID NO: 403693 - DNA, 15 bp, Homo sapiens
taagtctttggatat

SEQ ID NO: 403694 - DNA, 15 bp, Homo sapiens
ttaagtctttggata

SEQ ID NO: 403695 - DNA, 15 bp, Homo sapiens
tttaagtctttggat

SEQ ID NO: 403696 - DNA, 15 bp, Homo sapiens
atttaagtctttgga

SEQ ID NO: 403697 - DNA, 15 bp, Homo sapiens
aatttaagtctttgg

SEQ ID NO: 403698 - DNA, 15 bp, Homo sapiens
caatttaagtctttg

SEQ ID NO: 403699 - DNA, 15 bp, Homo sapiens
acaatttaagtcttt

SEQ ID NO: 403700 - DNA, 15 bp, Homo sapiens
aacaatttaagtctt

SEQ ID NO: 403701 - DNA, 15 bp, Homo sapiens
taacaatttaagtct

SEQ ID NO: 403702 - DNA, 15 bp, Homo sapiens
ttaacaatttaagtc

SEQ ID NO: 403703 - DNA, 15 bp, Homo sapiens
tttaacaatttaagt

SEQ ID NO: 403704 - DNA, 15 bp, Homo sapiens
atttaacaatttaag

SEQ ID NO: 403705 - DNA, 15 bp, Homo sapiens
tatttaacaatttaa

SEQ ID NO: 403706 - DNA, 15 bp, Homo sapiens
ctatttaacaattta

SEQ ID NO: 403707 - DNA, 15 bp, Homo sapiens
tctatttaacaattt

SEQ ID NO: 403708 - DNA, 15 bp, Homo sapiens
atctatttaacaatt

SEQ ID NO: 403709 - DNA, 15 bp, Homo sapiens
aatctatttaacaat

SEQ ID NO: 403710 - DNA, 15 bp, Homo sapiens
aaatctatttaacaa

SEQ ID NO: 403711 - DNA, 15 bp, Homo sapiens
aaaatctatttaaca

SEQ ID NO: 403712 - DNA, 15 bp, Homo sapiens
aaaaatctatttaac

SEQ ID NO: 403713 - DNA, 15 bp, Homo sapiens
aaaaaatctatttaa

SEQ ID NO: 403714 - DNA, 15 bp, Homo sapiens
taaaaaatctattta

SEQ ID NO: 403715 - DNA, 15 bp, Homo sapiens
ttaaaaaatctattt

SEQ ID NO: 403716 - DNA, 15 bp, Homo sapiens
tttaaaaaatctatt

SEQ ID NO: 403717 - DNA, 15 bp, Homo sapiens
gtttaaaaaatctat

SEQ ID NO: 403718 - DNA, 15 bp, Homo sapiens
tgtttaaaaaatcta

SEQ ID NO: 403719 - DNA, 15 bp, Homo sapiens
atgtttaaaaaatct

SEQ ID NO: 403720 - DNA, 15 bp, Homo sapiens
gatgtttaaaaaatc

SEQ ID NO: 403721 - DNA, 15 bp, Homo sapiens
ggatgtttaaaaaat

SEQ ID NO: 403722 - DNA, 15 bp, Homo sapiens
tggatgtttaaaaaa

SEQ ID NO: 403723 - DNA, 15 bp, Homo sapiens
atggatgtttaaaaa

SEQ ID NO: 403724 - DNA, 15 bp, Homo sapiens
catggatgtttaaaa

SEQ ID NO: 403725 - DNA, 15 bp, Homo sapiens
acatggatgtttaaa

SEQ ID NO: 403726 - DNA, 15 bp, Homo sapiens
tacatggatgtttaa

SEQ ID NO: 403727 - DNA, 15 bp, Homo sapiens
ttacatggatgttta

SEQ ID NO: 403728 - DNA, 15 bp, Homo sapiens
attacatggatgttt

SEQ ID NO: 403729 - DNA, 15 bp, Homo sapiens
aattacatggatgtt

SEQ ID NO: 403730 - DNA, 15 bp, Homo sapiens
aaattacatggatgt

SEQ ID NO: 403731 - DNA, 15 bp, Homo sapiens
taaattacatggatg

SEQ ID NO: 403732 - DNA, 15 bp, Homo sapiens
ataaattacatggat

SEQ ID NO: 403733 - DNA, 15 bp, Homo sapiens
tataaattacatgga

SEQ ID NO: 403734 - DNA, 15 bp, Homo sapiens
atataaattacatgg

SEQ ID NO: 403735 - DNA, 15 bp, Homo sapiens
aatataaattacatg

SEQ ID NO: 403736 - DNA, 15 bp, Homo sapiens
aaatataaattacat

SEQ ID NO: 403737 - DNA, 15 bp, Homo sapiens
taaatataaattaca

SEQ ID NO: 403738 - DNA, 15 bp, Homo sapiens
gtaaatataaattac

SEQ ID NO: 403739 - DNA, 15 bp, Homo sapiens
agtaaatataaatta

SEQ ID NO: 403740 - DNA, 15 bp, Homo sapiens
gagtaaatataaatt

SEQ ID NO: 403741 - DNA, 15 bp, Homo sapiens
agagtaaatataaat

SEQ ID NO: 403742 - DNA, 15 bp, Homo sapiens
tagagtaaatataaa

SEQ ID NO: 403743 - DNA, 15 bp, Homo sapiens
ctagagtaaatataa

SEQ ID NO: 403744 - DNA, 15 bp, Homo sapiens
tctagagtaaatata

SEQ ID NO: 403745 - DNA, 15 bp, Homo sapiens
ttctagagtaaatat

SEQ ID NO: 403746 - DNA, 15 bp, Homo sapiens
tttctagagtaaata

SEQ ID NO: 403747 - DNA, 15 bp, Homo sapiens
atttctagagtaaat

SEQ ID NO: 403748 - DNA, 15 bp, Homo sapiens
tatttctagagtaaa

SEQ ID NO: 403749 - DNA, 15 bp, Homo sapiens
atatttctagagtaa

SEQ ID NO: 403750 - DNA, 15 bp, Homo sapiens
tatatttctagagta

SEQ ID NO: 403751 - DNA, 15 bp, Homo sapiens
ctatatttctagagt

SEQ ID NO: 403752 - DNA, 15 bp, Homo sapiens
tctatatttctagag

SEQ ID NO: 403753 - DNA, 15 bp, Homo sapiens
gtctatatttctaga

SEQ ID NO: 403754 - DNA, 15 bp, Homo sapiens
ggtctatatttctag

SEQ ID NO: 403755 - DNA, 15 bp, Homo sapiens
tggtctatatttcta

SEQ ID NO: 403756 - DNA, 15 bp, Homo sapiens
atggtctatatttct

SEQ ID NO: 403757 - DNA, 15 bp, Homo sapiens
aatggtctatatttc

SEQ ID NO: 403758 - DNA, 15 bp, Homo sapiens
caatggtctatattt

SEQ ID NO: 403759 - DNA, 15 bp, Homo sapiens
tcaatggtctatatt

SEQ ID NO: 403760 - DNA, 15 bp, Homo sapiens
gtcaatggtctatat

SEQ ID NO: 403761 - DNA, 15 bp, Homo sapiens
agtcaatggtctata

SEQ ID NO: 403762 - DNA, 15 bp, Homo sapiens
aagtcaatggtctat

SEQ ID NO: 403763 - DNA, 15 bp, Homo sapiens
taagtcaatggtcta

SEQ ID NO: 403764 - DNA, 15 bp, Homo sapiens
ttaagtcaatggtct

SEQ ID NO: 403765 - DNA, 15 bp, Homo sapiens
cttaagtcaatggtc

SEQ ID NO: 403766 - DNA, 15 bp, Homo sapiens
ccttaagtcaatggt

SEQ ID NO: 403767 - DNA, 15 bp, Homo sapiens
accttaagtcaatgg

SEQ ID NO: 403768 - DNA, 15 bp, Homo sapiens
taccttaagtcaatg

SEQ ID NO: 403769 - DNA, 15 bp, Homo sapiens
ctaccttaagtcaat

SEQ ID NO: 403770 - DNA, 15 bp, Homo sapiens
cctaccttaagtcaa

SEQ ID NO: 403771 - DNA, 15 bp, Homo sapiens
acctaccttaagtca

SEQ ID NO: 403772 - DNA, 15 bp, Homo sapiens
aacctaccttaagtc

SEQ ID NO: 403773 - DNA, 15 bp, Homo sapiens
aaacctaccttaagt

SEQ ID NO: 403774 - DNA, 15 bp, Homo sapiens
gaaacctaccttaag

SEQ ID NO: 403775 - DNA, 15 bp, Homo sapiens
agaaacctaccttaa

SEQ ID NO: 403776 - DNA, 15 bp, Homo sapiens
tagaaacctacctta

SEQ ID NO: 403777 - DNA, 15 bp, Homo sapiens
gtagaaacctacctt

SEQ ID NO: 403778 - DNA, 15 bp, Homo sapiens
tgtagaaacctacct

SEQ ID NO: 403779 - DNA, 15 bp, Homo sapiens
atgtagaaacctacc

SEQ ID NO: 403780 - DNA, 15 bp, Homo sapiens
aatgtagaaacctac

SEQ ID NO: 403781 - DNA, 15 bp, Homo sapiens
taatgtagaaaccta

SEQ ID NO: 403782 - DNA, 15 bp, Homo sapiens
ataatgtagaaacct

SEQ ID NO: 403783 - DNA, 15 bp, Homo sapiens
cataatgtagaaacc

SEQ ID NO: 403784 - DNA, 15 bp, Homo sapiens
gcataatgtagaaac

SEQ ID NO: 403785 - DNA, 15 bp, Homo sapiens
tgcataatgtagaaa

SEQ ID NO: 403786 - DNA, 15 bp, Homo sapiens
ctgcataatgtagaa

SEQ ID NO: 403787 - DNA, 15 bp, Homo sapiens
actgcataatgtaga

SEQ ID NO: 403788 - DNA, 15 bp, Homo sapiens
cactgcataatgtag

SEQ ID NO: 403789 - DNA, 15 bp, Homo sapiens
ccactgcataatgta

SEQ ID NO: 403790 - DNA, 15 bp, Homo sapiens
accactgcataatgt

SEQ ID NO: 403791 - DNA, 15 bp, Homo sapiens
taccactgcataatg

SEQ ID NO: 403792 - DNA, 15 bp, Homo sapiens
ctaccactgcataat

SEQ ID NO: 403793 - DNA, 15 bp, Homo sapiens
gctaccactgcataa

SEQ ID NO: 403794 - DNA, 15 bp, Homo sapiens
agctaccactgcata

SEQ ID NO: 403795 - DNA, 15 bp, Homo sapiens
tagctaccactgcat

SEQ ID NO: 403796 - DNA, 15 bp, Homo sapiens
gtagctaccactgca

SEQ ID NO: 403797 - DNA, 15 bp, Homo sapiens
tgtagctaccactgc

SEQ ID NO: 403798 - DNA, 15 bp, Homo sapiens
ctgtagctaccactg

SEQ ID NO: 403799 - DNA, 15 bp, Homo sapiens
tctgtagctaccact

SEQ ID NO: 403800 - DNA, 15 bp, Homo sapiens
atctgtagctaccac

SEQ ID NO: 403801 - DNA, 15 bp, Homo sapiens
aatctgtagctacca

SEQ ID NO: 403802 - DNA, 15 bp, Homo sapiens
aaatctgtagctacc

SEQ ID NO: 403803 - DNA, 15 bp, Homo sapiens
gaaatctgtagctac

SEQ ID NO: 403804 - DNA, 15 bp, Homo sapiens
tgaaatctgtagcta

SEQ ID NO: 403805 - DNA, 15 bp, Homo sapiens
atgaaatctgtagct

SEQ ID NO: 403806 - DNA, 15 bp, Homo sapiens
catgaaatctgtagc

SEQ ID NO: 403807 - DNA, 15 bp, Homo sapiens
acatgaaatctgtag

SEQ ID NO: 403808 - DNA, 15 bp, Homo sapiens
cacatgaaatctgta

SEQ ID NO: 403809 - DNA, 15 bp, Homo sapiens
acacatgaaatctgt

SEQ ID NO: 403810 - DNA, 15 bp, Homo sapiens
aacacatgaaatctg

SEQ ID NO: 403811 - DNA, 15 bp, Homo sapiens
taacacatgaaatct

SEQ ID NO: 403812 - DNA, 15 bp, Homo sapiens
ctaacacatgaaatc

SEQ ID NO: 403813 - DNA, 15 bp, Homo sapiens
tctaacacatgaaat

SEQ ID NO: 403814 - DNA, 15 bp, Homo sapiens
atctaacacatgaaa

SEQ ID NO: 403815 - DNA, 15 bp, Homo sapiens
catctaacacatgaa

SEQ ID NO: 403816 - DNA, 15 bp, Homo sapiens
acatctaacacatga

SEQ ID NO: 403817 - DNA, 15 bp, Homo sapiens
gacatctaacacatg

SEQ ID NO: 403818 - DNA, 15 bp, Homo sapiens
agacatctaacacat

SEQ ID NO: 403819 - DNA, 15 bp, Homo sapiens
aagacatctaacaca

SEQ ID NO: 403820 - DNA, 15 bp, Homo sapiens
aaagacatctaacac

SEQ ID NO: 403821 - DNA, 15 bp, Homo sapiens
gaaagacatctaaca

SEQ ID NO: 403822 - DNA, 15 bp, Homo sapiens
agaaagacatctaac

SEQ ID NO: 403823 - DNA, 15 bp, Homo sapiens
tagaaagacatctaa

SEQ ID NO: 403824 - DNA, 15 bp, Homo sapiens
gtagaaagacatcta

SEQ ID NO: 403825 - DNA, 15 bp, Homo sapiens
agtagaaagacatct

SEQ ID NO: 403826 - DNA, 15 bp, Homo sapiens
gagtagaaagacatc

SEQ ID NO: 403827 - DNA, 15 bp, Homo sapiens
agagtagaaagacat

SEQ ID NO: 403828 - DNA, 15 bp, Homo sapiens
aagagtagaaagaca

SEQ ID NO: 403829 - DNA, 15 bp, Homo sapiens
caagagtagaaagac

SEQ ID NO: 403830 - DNA, 15 bp, Homo sapiens
acaagagtagaaaga

SEQ ID NO: 403831 - DNA, 15 bp, Homo sapiens
aacaagagtagaaag

SEQ ID NO: 403832 - DNA, 15 bp, Homo sapiens
aaacaagagtagaaa

SEQ ID NO: 403833 - DNA, 15 bp, Homo sapiens
caaacaagagtagaa

SEQ ID NO: 403834 - DNA, 15 bp, Homo sapiens
acaaacaagagtaga

SEQ ID NO: 403835 - DNA, 15 bp, Homo sapiens
aacaaacaagagtag

SEQ ID NO: 403836 - DNA, 15 bp, Homo sapiens
aaacaaacaagagta

SEQ ID NO: 403837 - DNA, 15 bp, Homo sapiens
aaaacaaacaagagt

SEQ ID NO: 403838 - DNA, 15 bp, Homo sapiens
taaaacaaacaagag

SEQ ID NO: 403839 - DNA, 15 bp, Homo sapiens
ataaaacaaacaaga

SEQ ID NO: 403840 - DNA, 15 bp, Homo sapiens
gataaaacaaacaag

SEQ ID NO: 403841 - DNA, 15 bp, Homo sapiens
cgataaaacaaacaa

SEQ ID NO: 403842 - DNA, 15 bp, Homo sapiens
ccgataaaacaaaca

SEQ ID NO: 403843 - DNA, 15 bp, Homo sapiens
accgataaaacaaac

SEQ ID NO: 403844 - DNA, 15 bp, Homo sapiens
aaccgataaaacaaa

SEQ ID NO: 403845 - DNA, 15 bp, Homo sapiens
aaaccgataaaacaa

SEQ ID NO: 403846 - DNA, 15 bp, Homo sapiens
aaaaccgataaaaca

SEQ ID NO: 403847 - DNA, 15 bp, Homo sapiens
taaaaccgataaaac

SEQ ID NO: 403848 - DNA, 15 bp, Homo sapiens
ctaaaaccgataaaa

SEQ ID NO: 403849 - DNA, 15 bp, Homo sapiens
gctaaaaccgataaa

SEQ ID NO: 403850 - DNA, 15 bp, Homo sapiens
agctaaaaccgataa

SEQ ID NO: 403851 - DNA, 15 bp, Homo sapiens
cagctaaaaccgata

SEQ ID NO: 403852 - DNA, 15 bp, Homo sapiens
acagctaaaaccgat

SEQ ID NO: 403853 - DNA, 15 bp, Homo sapiens
tacagctaaaaccga

SEQ ID NO: 403854 - DNA, 15 bp, Homo sapiens
gtacagctaaaaccg

SEQ ID NO: 403855 - DNA, 15 bp, Homo sapiens
agtacagctaaaacc

SEQ ID NO: 403856 - DNA, 15 bp, Homo sapiens
tagtacagctaaaac

SEQ ID NO: 403857 - DNA, 15 bp, Homo sapiens
ctagtacagctaaaa

SEQ ID NO: 403858 - DNA, 15 bp, Homo sapiens
tctagtacagctaaa

SEQ ID NO: 403859 - DNA, 15 bp, Homo sapiens
ctctagtacagctaa

SEQ ID NO: 403860 - DNA, 15 bp, Homo sapiens
actctagtacagcta

SEQ ID NO: 403861 - DNA, 15 bp, Homo sapiens
aactctagtacagct

SEQ ID NO: 403862 - DNA, 15 bp, Homo sapiens
taactctagtacagc

SEQ ID NO: 403863 - DNA, 15 bp, Homo sapiens
gtaactctagtacag

SEQ ID NO: 403864 - DNA, 15 bp, Homo sapiens
ggtaactctagtaca

SEQ ID NO: 403865 - DNA, 15 bp, Homo sapiens
gggtaactctagtac

SEQ ID NO: 403866 - DNA, 15 bp, Homo sapiens
agggtaactctagta

SEQ ID NO: 403867 - DNA, 15 bp, Homo sapiens
aagggtaactctagt

SEQ ID NO: 403868 - DNA, 15 bp, Homo sapiens
caagggtaactctag

SEQ ID NO: 403869 - DNA, 15 bp, Homo sapiens
tcaagggtaactcta

SEQ ID NO: 403870 - DNA, 15 bp, Homo sapiens
ttcaagggtaactct

SEQ ID NO: 403871 - DNA, 15 bp, Homo sapiens
attcaagggtaactc

SEQ ID NO: 403872 - DNA, 15 bp, Homo sapiens
tattcaagggtaact

SEQ ID NO: 403873 - DNA, 15 bp, Homo sapiens
ctattcaagggtaac

SEQ ID NO: 403874 - DNA, 15 bp, Homo sapiens
tctattcaagggtaa

SEQ ID NO: 403875 - DNA, 15 bp, Homo sapiens
atctattcaagggta

SEQ ID NO: 403876 - DNA, 15 bp, Homo sapiens
aatctattcaagggt

SEQ ID NO: 403877 - DNA, 15 bp, Homo sapiens
aaatctattcaaggg

SEQ ID NO: 403878 - DNA, 15 bp, Homo sapiens
aaaatctattcaagg

SEQ ID NO: 403879 - DNA, 15 bp, Homo sapiens
aaaaatctattcaag

SEQ ID NO: 403880 - DNA, 15 bp, Homo sapiens
aaaaaatctattcaa

SEQ ID NO: 403881 - DNA, 15 bp, Homo sapiens
aaaaaaatctattca

SEQ ID NO: 403882 - DNA, 15 bp, Homo sapiens
aaaaaaaatctattc

SEQ ID NO: 403883 - DNA, 15 bp, Homo sapiens
taaaaaaaatctatt

SEQ ID NO: 403884 - DNA, 15 bp, Homo sapiens
ttaaaaaaaatctat

SEQ ID NO: 403885 - DNA, 15 bp, Homo sapiens
attaaaaaaaatcta

SEQ ID NO: 403886 - DNA, 15 bp, Homo sapiens
aattaaaaaaaatct

SEQ ID NO: 403887 - DNA, 15 bp, Homo sapiens
aaattaaaaaaaatc

SEQ ID NO: 403888 - DNA, 15 bp, Homo sapiens
gaaattaaaaaaaat

SEQ ID NO: 403889 - DNA, 15 bp, Homo sapiens
agaaattaaaaaaaa

SEQ ID NO: 403890 - DNA, 15 bp, Homo sapiens
tagaaattaaaaaaa

SEQ ID NO: 403891 - DNA, 15 bp, Homo sapiens
atagaaattaaaaaa

SEQ ID NO: 403892 - DNA, 15 bp, Homo sapiens
tatagaaattaaaaa

SEQ ID NO: 403893 - DNA, 15 bp, Homo sapiens
ttatagaaattaaaa

SEQ ID NO: 403894 - DNA, 15 bp, Homo sapiens
tttatagaaattaaa

SEQ ID NO: 403895 - DNA, 15 bp, Homo sapiens
atttatagaaattaa

SEQ ID NO: 403896 - DNA, 15 bp, Homo sapiens
gatttatagaaatta

SEQ ID NO: 403897 - DNA, 15 bp, Homo sapiens
ggatttatagaaatt

SEQ ID NO: 403898 - DNA, 15 bp, Homo sapiens
tggatttatagaaat

SEQ ID NO: 403899 - DNA, 15 bp, Homo sapiens
ttggatttatagaaa

SEQ ID NO: 403900 - DNA, 15 bp, Homo sapiens
cttggatttatagaa

SEQ ID NO: 403901 - DNA, 15 bp, Homo sapiens
acttggatttataga

SEQ ID NO: 403902 - DNA, 15 bp, Homo sapiens
tacttggatttatag

SEQ ID NO: 403903 - DNA, 15 bp, Homo sapiens
ttacttggatttata

SEQ ID NO: 403904 - DNA, 15 bp, Homo sapiens
gttacttggatttat

SEQ ID NO: 403905 - DNA, 15 bp, Homo sapiens
tgttacttggattta

SEQ ID NO: 403906 - DNA, 15 bp, Homo sapiens
atgttacttggattt

SEQ ID NO: 403907 - DNA, 15 bp, Homo sapiens
gatgttacttggatt

SEQ ID NO: 403908 - DNA, 15 bp, Homo sapiens
agatgttacttggat

SEQ ID NO: 403909 - DNA, 15 bp, Homo sapiens
aagatgttacttgga

SEQ ID NO: 403910 - DNA, 15 bp, Homo sapiens
gaagatgttacttgg

SEQ ID NO: 403911 - DNA, 15 bp, Homo sapiens
tgaagatgttacttg

SEQ ID NO: 403912 - DNA, 15 bp, Homo sapiens
ttgaagatgttactt

SEQ ID NO: 403913 - DNA, 15 bp, Homo sapiens
tttgaagatgttact

SEQ ID NO: 403914 - DNA, 15 bp, Homo sapiens
atttgaagatgttac

SEQ ID NO: 403915 - DNA, 15 bp, Homo sapiens
tatttgaagatgtta

SEQ ID NO: 403916 - DNA, 15 bp, Homo sapiens
atatttgaagatgtt

SEQ ID NO: 403917 - DNA, 15 bp, Homo sapiens
aatatttgaagatgt

SEQ ID NO: 403918 - DNA, 15 bp, Homo sapiens
caatatttgaagatg

SEQ ID NO: 403919 - DNA, 15 bp, Homo sapiens
acaatatttgaagat

SEQ ID NO: 403920 - DNA, 15 bp, Homo sapiens
aacaatatttgaaga

SEQ ID NO: 403921 - DNA, 15 bp, Homo sapiens
aaacaatatttgaag

SEQ ID NO: 403922 - DNA, 15 bp, Homo sapiens
caaacaatatttgaa

SEQ ID NO: 403923 - DNA, 15 bp, Homo sapiens
gcaaacaatatttga

SEQ ID NO: 403924 - DNA, 15 bp, Homo sapiens
agcaaacaatatttg

SEQ ID NO: 403925 - DNA, 15 bp, Homo sapiens
cagcaaacaatattt

SEQ ID NO: 403926 - DNA, 15 bp, Homo sapiens
gcagcaaacaatatt

SEQ ID NO: 403927 - DNA, 15 bp, Homo sapiens
agcagcaaacaatat

SEQ ID NO: 403928 - DNA, 15 bp, Homo sapiens
aagcagcaaacaata

SEQ ID NO: 403929 - DNA, 15 bp, Homo sapiens
taagcagcaaacaat

SEQ ID NO: 403930 - DNA, 15 bp, Homo sapiens
ataagcagcaaacaa

SEQ ID NO: 403931 - DNA, 15 bp, Homo sapiens
cataagcagcaaaca

SEQ ID NO: 403932 - DNA, 15 bp, Homo sapiens
tcataagcagcaaac

SEQ ID NO: 403933 - DNA, 15 bp, Homo sapiens
gtcataagcagcaaa

SEQ ID NO: 403934 - DNA, 15 bp, Homo sapiens
tgtcataagcagcaa

SEQ ID NO: 403935 - DNA, 15 bp, Homo sapiens
ctgtcataagcagca

SEQ ID NO: 403936 - DNA, 15 bp, Homo sapiens
tctgtcataagcagc

SEQ ID NO: 403937 - DNA, 15 bp, Homo sapiens
ttctgtcataagcag

SEQ ID NO: 403938 - DNA, 15 bp, Homo sapiens
cttctgtcataagca

SEQ ID NO: 403939 - DNA, 15 bp, Homo sapiens
gcttctgtcataagc

SEQ ID NO: 403940 - DNA, 15 bp, Homo sapiens
tgcttctgtcataag

SEQ ID NO: 403941 - DNA, 15 bp, Homo sapiens
ttgcttctgtcataa

SEQ ID NO: 403942 - DNA, 15 bp, Homo sapiens
tttgcttctgtcata

SEQ ID NO: 403943 - DNA, 15 bp, Homo sapiens
ctttgcttctgtcat

SEQ ID NO: 403944 - DNA, 15 bp, Homo sapiens
gctttgcttctgtca

SEQ ID NO: 403945 - DNA, 15 bp, Homo sapiens
ggctttgcttctgtc

SEQ ID NO: 403946 - DNA, 15 bp, Homo sapiens
tggctttgcttctgt

SEQ ID NO: 403947 - DNA, 15 bp, Homo sapiens
atggctttgcttctg

SEQ ID NO: 403948 - DNA, 15 bp, Homo sapiens
catggctttgcttct

SEQ ID NO: 403949 - DNA, 15 bp, Homo sapiens
acatggctttgcttc

SEQ ID NO: 403950 - DNA, 15 bp, Homo sapiens
aacatggctttgctt

SEQ ID NO: 403951 - DNA, 15 bp, Homo sapiens
taacatggctttgct

SEQ ID NO: 403952 - DNA, 15 bp, Homo sapiens
ttaacatggctttgc

SEQ ID NO: 403953 - DNA, 15 bp, Homo sapiens
tttaacatggctttg

SEQ ID NO: 403954 - DNA, 15 bp, Homo sapiens
ttttaacatggcttt

SEQ ID NO: 403955 - DNA, 15 bp, Homo sapiens
attttaacatggctt

SEQ ID NO: 403956 - DNA, 15 bp, Homo sapiens
tattttaacatggct

SEQ ID NO: 403957 - DNA, 15 bp, Homo sapiens
ttattttaacatggc

SEQ ID NO: 403958 - DNA, 15 bp, Homo sapiens
attattttaacatgg

SEQ ID NO: 403959 - DNA, 15 bp, Homo sapiens
aattattttaacatg

SEQ ID NO: 403960 - DNA, 15 bp, Homo sapiens
gaattattttaacat

SEQ ID NO: 403961 - DNA, 15 bp, Homo sapiens
ggaattattttaaca

SEQ ID NO: 403962 - DNA, 15 bp, Homo sapiens
tggaattattttaac

SEQ ID NO: 403963 - DNA, 15 bp, Homo sapiens
ctggaattattttaa

SEQ ID NO: 403964 - DNA, 15 bp, Homo sapiens
actggaattatttta

SEQ ID NO: 403965 - DNA, 15 bp, Homo sapiens
aactggaattatttt

SEQ ID NO: 403966 - DNA, 15 bp, Homo sapiens
caactggaattattt

SEQ ID NO: 403967 - DNA, 15 bp, Homo sapiens
tcaactggaattatt

SEQ ID NO: 403968 - DNA, 15 bp, Homo sapiens
atcaactggaattat

SEQ ID NO: 403969 - DNA, 15 bp, Homo sapiens
tatcaactggaatta

SEQ ID NO: 403970 - DNA, 15 bp, Homo sapiens
atatcaactggaatt

SEQ ID NO: 403971 - DNA, 15 bp, Homo sapiens
tatatcaactggaat

SEQ ID NO: 403972 - DNA, 15 bp, Homo sapiens
atatatcaactggaa

SEQ ID NO: 403973 - DNA, 15 bp, Homo sapiens
tatatatcaactgga

SEQ ID NO: 403974 - DNA, 15 bp, Homo sapiens
atatatatcaactgg

SEQ ID NO: 403975 - DNA, 15 bp, Homo sapiens
catatatatcaactg

SEQ ID NO: 403976 - DNA, 15 bp, Homo sapiens
tcatatatatcaact

SEQ ID NO: 403977 - DNA, 15 bp, Homo sapiens
atcatatatatcaac

SEQ ID NO: 403978 - DNA, 15 bp, Homo sapiens
gatcatatatatcaa

SEQ ID NO: 403979 - DNA, 15 bp, Homo sapiens
agatcatatatatca

SEQ ID NO: 403980 - DNA, 15 bp, Homo sapiens
cagatcatatatatc

SEQ ID NO: 403981 - DNA, 15 bp, Homo sapiens
acagatcatatatat

SEQ ID NO: 403982 - DNA, 15 bp, Homo sapiens
aacagatcatatata

SEQ ID NO: 403983 - DNA, 15 bp, Homo sapiens
aaacagatcatatat

SEQ ID NO: 403984 - DNA, 15 bp, Homo sapiens
aaaacagatcatata

SEQ ID NO: 403985 - DNA, 15 bp, Homo sapiens
taaaacagatcatat

SEQ ID NO: 403986 - DNA, 15 bp, Homo sapiens
ataaaacagatcata

SEQ ID NO: 403987 - DNA, 15 bp, Homo sapiens
tataaaacagatcat

SEQ ID NO: 403988 - DNA, 15 bp, Homo sapiens
gtataaaacagatca

SEQ ID NO: 403989 - DNA, 15 bp, Homo sapiens
tgtataaaacagatc

SEQ ID NO: 403990 - DNA, 15 bp, Homo sapiens
gtgtataaaacagat

SEQ ID NO: 403991 - DNA, 15 bp, Homo sapiens
ggtgtataaaacaga

SEQ ID NO: 403992 - DNA, 15 bp, Homo sapiens
aggtgtataaaacag

SEQ ID NO: 403993 - DNA, 15 bp, Homo sapiens
aaggtgtataaaaca

SEQ ID NO: 403994 - DNA, 15 bp, Homo sapiens
caaggtgtataaaac

SEQ ID NO: 403995 - DNA, 15 bp, Homo sapiens
acaaggtgtataaaa

SEQ ID NO: 403996 - DNA, 15 bp, Homo sapiens
tacaaggtgtataaa

SEQ ID NO: 403997 - DNA, 15 bp, Homo sapiens
ttacaaggtgtataa

SEQ ID NO: 403998 - DNA, 15 bp, Homo sapiens
attacaaggtgtata

SEQ ID NO: 403999 - DNA, 15 bp, Homo sapiens
cattacaaggtgtat

SEQ ID NO: 404000 - DNA, 15 bp, Homo sapiens
acattacaaggtgta

SEQ ID NO: 404001 - DNA, 15 bp, Homo sapiens
tacattacaaggtgt

SEQ ID NO: 404002 - DNA, 15 bp, Homo sapiens
atacattacaaggtg

SEQ ID NO: 404003 - DNA, 15 bp, Homo sapiens
aatacattacaaggt

SEQ ID NO: 404004 - DNA, 15 bp, Homo sapiens
taatacattacaagg

SEQ ID NO: 404005 - DNA, 15 bp, Homo sapiens
ttaatacattacaag

SEQ ID NO: 404006 - DNA, 15 bp, Homo sapiens
tttaatacattacaa

SEQ ID NO: 404007 - DNA, 15 bp, Homo sapiens
ttttaatacattaca

SEQ ID NO: 404008 - DNA, 15 bp, Homo sapiens
attttaatacattac

SEQ ID NO: 404009 - DNA, 15 bp, Homo sapiens
gattttaatacatta

SEQ ID NO: 404010 - DNA, 15 bp, Homo sapiens
agattttaatacatt

SEQ ID NO: 404011 - DNA, 15 bp, Homo sapiens
aagattttaatacat

SEQ ID NO: 404012 - DNA, 15 bp, Homo sapiens
caagattttaataca

SEQ ID NO: 404013 - DNA, 15 bp, Homo sapiens
tcaagattttaatac

SEQ ID NO: 404014 - DNA, 15 bp, Homo sapiens
gtcaagattttaata

SEQ ID NO: 404015 - DNA, 15 bp, Homo sapiens
tgtcaagattttaat

SEQ ID NO: 404016 - DNA, 15 bp, Homo sapiens
atgtcaagattttaa

SEQ ID NO: 404017 - DNA, 15 bp, Homo sapiens
aatgtcaagatttta

SEQ ID NO: 404018 - DNA, 15 bp, Homo sapiens
taatgtcaagatttt

SEQ ID NO: 404019 - DNA, 15 bp, Homo sapiens
ttaatgtcaagattt

SEQ ID NO: 404020 - DNA, 15 bp, Homo sapiens
attaatgtcaagatt

SEQ ID NO: 404021 - DNA, 15 bp, Homo sapiens
aattaatgtcaagat

SEQ ID NO: 404022 - DNA, 15 bp, Homo sapiens
taattaatgtcaaga

SEQ ID NO: 404023 - DNA, 15 bp, Homo sapiens
ataattaatgtcaag

SEQ ID NO: 404024 - DNA, 15 bp, Homo sapiens
gataattaatgtcaa

SEQ ID NO: 404025 - DNA, 15 bp, Homo sapiens
agataattaatgtca

SEQ ID NO: 404026 - DNA, 15 bp, Homo sapiens
gagataattaatgtc

SEQ ID NO: 404027 - DNA, 15 bp, Homo sapiens
tgagataattaatgt

SEQ ID NO: 404028 - DNA, 15 bp, Homo sapiens
atgagataattaatg

SEQ ID NO: 404029 - DNA, 15 bp, Homo sapiens
aatgagataattaat

SEQ ID NO: 404030 - DNA, 15 bp, Homo sapiens
aaatgagataattaa

SEQ ID NO: 404031 - DNA, 15 bp, Homo sapiens
taaatgagataatta

SEQ ID NO: 404032 - DNA, 15 bp, Homo sapiens
ttaaatgagataatt

SEQ ID NO: 404033 - DNA, 15 bp, Homo sapiens
cttaaatgagataat

SEQ ID NO: 404034 - DNA, 15 bp, Homo sapiens
acttaaatgagataa

SEQ ID NO: 404035 - DNA, 15 bp, Homo sapiens
gacttaaatgagata

SEQ ID NO: 404036 - DNA, 15 bp, Homo sapiens
agacttaaatgagat

SEQ ID NO: 404037 - DNA, 15 bp, Homo sapiens
gagacttaaatgaga

SEQ ID NO: 404038 - DNA, 15 bp, Homo sapiens
tgagacttaaatgag

SEQ ID NO: 404039 - DNA, 15 bp, Homo sapiens
gtgagacttaaatga

SEQ ID NO: 404040 - DNA, 15 bp, Homo sapiens
tgtgagacttaaatg

SEQ ID NO: 404041 - DNA, 15 bp, Homo sapiens
ctgtgagacttaaat

SEQ ID NO: 404042 - DNA, 15 bp, Homo sapiens
gctgtgagacttaaa

SEQ ID NO: 404043 - DNA, 15 bp, Homo sapiens
tgctgtgagacttaa

SEQ ID NO: 404044 - DNA, 15 bp, Homo sapiens
ttgctgtgagactta

SEQ ID NO: 404045 - DNA, 15 bp, Homo sapiens
attgctgtgagactt

SEQ ID NO: 404046 - DNA, 15 bp, Homo sapiens
gattgctgtgagact

SEQ ID NO: 404047 - DNA, 15 bp, Homo sapiens
agattgctgtgagac

SEQ ID NO: 404048 - DNA, 15 bp, Homo sapiens
cagattgctgtgaga

SEQ ID NO: 404049 - DNA, 15 bp, Homo sapiens
tcagattgctgtgag

SEQ ID NO: 404050 - DNA, 15 bp, Homo sapiens
atcagattgctgtga

SEQ ID NO: 404051 - DNA, 15 bp, Homo sapiens
catcagattgctgtg

SEQ ID NO: 404052 - DNA, 15 bp, Homo sapiens
tcatcagattgctgt

SEQ ID NO: 404053 - DNA, 15 bp, Homo sapiens
ctcatcagattgctg

SEQ ID NO: 404054 - DNA, 15 bp, Homo sapiens
tctcatcagattgct

SEQ ID NO: 404055 - DNA, 15 bp, Homo sapiens
atctcatcagattgc

SEQ ID NO: 404056 - DNA, 15 bp, Homo sapiens
gatctcatcagattg

SEQ ID NO: 404057 - DNA, 15 bp, Homo sapiens
tgatctcatcagatt

SEQ ID NO: 404058 - DNA, 15 bp, Homo sapiens
atgatctcatcagat

SEQ ID NO: 404059 - DNA, 15 bp, Homo sapiens
tatgatctcatcaga

SEQ ID NO: 404060 - DNA, 15 bp, Homo sapiens
atatgatctcatcag

SEQ ID NO: 404061 - DNA, 15 bp, Homo sapiens
gatatgatctcatca

SEQ ID NO: 404062 - DNA, 15 bp, Homo sapiens
tgatatgatctcatc

SEQ ID NO: 404063 - DNA, 15 bp, Homo sapiens
gtgatatgatctcat

SEQ ID NO: 404064 - DNA, 15 bp, Homo sapiens
agtgatatgatctca

SEQ ID NO: 404065 - DNA, 15 bp, Homo sapiens
tagtgatatgatctc

SEQ ID NO: 404066 - DNA, 15 bp, Homo sapiens
atagtgatatgatct

SEQ ID NO: 404067 - DNA, 15 bp, Homo sapiens
aatagtgatatgatc

SEQ ID NO: 404068 - DNA, 15 bp, Homo sapiens
aaatagtgatatgat

SEQ ID NO: 404069 - DNA, 15 bp, Homo sapiens
aaaatagtgatatga

SEQ ID NO: 404070 - DNA, 15 bp, Homo sapiens
gaaaatagtgatatg

SEQ ID NO: 404071 - DNA, 15 bp, Homo sapiens
ggaaaatagtgatat

SEQ ID NO: 404072 - DNA, 15 bp, Homo sapiens
tggaaaatagtgata

SEQ ID NO: 404073 - DNA, 15 bp, Homo sapiens
ctggaaaatagtgat

SEQ ID NO: 404074 - DNA, 15 bp, Homo sapiens
tctggaaaatagtga

SEQ ID NO: 404075 - DNA, 15 bp, Homo sapiens
atctggaaaatagtg

SEQ ID NO: 404076 - DNA, 15 bp, Homo sapiens
catctggaaaatagt

SEQ ID NO: 404077 - DNA, 15 bp, Homo sapiens
acatctggaaaatag

SEQ ID NO: 404078 - DNA, 15 bp, Homo sapiens
cacatctggaaaata

SEQ ID NO: 404079 - DNA, 15 bp, Homo sapiens
tcacatctggaaaat

SEQ ID NO: 404080 - DNA, 15 bp, Homo sapiens
ctcacatctggaaaa

SEQ ID NO: 404081 - DNA, 15 bp, Homo sapiens
gctcacatctggaaa

SEQ ID NO: 404082 - DNA, 15 bp, Homo sapiens
tgctcacatctggaa

SEQ ID NO: 404083 - DNA, 15 bp, Homo sapiens
atgctcacatctgga

SEQ ID NO: 404084 - DNA, 15 bp, Homo sapiens
aatgctcacatctgg

SEQ ID NO: 404085 - DNA, 15 bp, Homo sapiens
caatgctcacatctg

SEQ ID NO: 404086 - DNA, 15 bp, Homo sapiens
tcaatgctcacatct

SEQ ID NO: 404087 - DNA, 15 bp, Homo sapiens
ctcaatgctcacatc

SEQ ID NO: 404088 - DNA, 15 bp, Homo sapiens
cctcaatgctcacat

SEQ ID NO: 404089 - DNA, 15 bp, Homo sapiens
gcctcaatgctcaca

SEQ ID NO: 404090 - DNA, 15 bp, Homo sapiens
tgcctcaatgctcac

SEQ ID NO: 404091 - DNA, 15 bp, Homo sapiens
gtgcctcaatgctca

SEQ ID NO: 404092 - DNA, 15 bp, Homo sapiens
tgtgcctcaatgctc

SEQ ID NO: 404093 - DNA, 15 bp, Homo sapiens
ctgtgcctcaatgct

SEQ ID NO: 404094 - DNA, 15 bp, Homo sapiens
tctgtgcctcaatgc

SEQ ID NO: 404095 - DNA, 15 bp, Homo sapiens
atctgtgcctcaatg

SEQ ID NO: 404096 - DNA, 15 bp, Homo sapiens
tatctgtgcctcaat

SEQ ID NO: 404097 - DNA, 15 bp, Homo sapiens
atatctgtgcctcaa

SEQ ID NO: 404098 - DNA, 15 bp, Homo sapiens
catatctgtgcctca

SEQ ID NO: 404099 - DNA, 15 bp, Homo sapiens
acatatctgtgcctc

SEQ ID NO: 404100 - DNA, 15 bp, Homo sapiens
aacatatctgtgcct

SEQ ID NO: 404101 - DNA, 15 bp, Homo sapiens
caacatatctgtgcc

SEQ ID NO: 404102 - DNA, 15 bp, Homo sapiens
tcaacatatctgtgc

SEQ ID NO: 404103 - DNA, 15 bp, Homo sapiens
ttcaacatatctgtg

SEQ ID NO: 404104 - DNA, 15 bp, Homo sapiens
attcaacatatctgt

SEQ ID NO: 404105 - DNA, 15 bp, Homo sapiens
tattcaacatatctg

SEQ ID NO: 404106 - DNA, 15 bp, Homo sapiens
ttattcaacatatct

SEQ ID NO: 404107 - DNA, 15 bp, Homo sapiens
tttattcaacatatc

SEQ ID NO: 404108 - DNA, 15 bp, Homo sapiens
atttattcaacatat

SEQ ID NO: 404109 - DNA, 15 bp, Homo sapiens
aatttattcaacata

SEQ ID NO: 404110 - DNA, 15 bp, Homo sapiens
taatttattcaacat

SEQ ID NO: 404111 - DNA, 15 bp, Homo sapiens
ataatttattcaaca

SEQ ID NO: 404112 - DNA, 15 bp, Homo sapiens
gataatttattcaac

SEQ ID NO: 404113 - DNA, 15 bp, Homo sapiens
ggataatttattcaa

SEQ ID NO: 404114 - DNA, 15 bp, Homo sapiens
tggataatttattca

SEQ ID NO: 404115 - DNA, 15 bp, Homo sapiens
ttggataatttattc

SEQ ID NO: 404116 - DNA, 15 bp, Homo sapiens
cttggataatttatt

SEQ ID NO: 404117 - DNA, 15 bp, Homo sapiens
ccttggataatttat

SEQ ID NO: 404118 - DNA, 15 bp, Homo sapiens
accttggataattta

SEQ ID NO: 404119 - DNA, 15 bp, Homo sapiens
aaccttggataattt

SEQ ID NO: 404120 - DNA, 15 bp, Homo sapiens
taaccttggataatt

SEQ ID NO: 404121 - DNA, 15 bp, Homo sapiens
ttaaccttggataat

SEQ ID NO: 404122 - DNA, 15 bp, Homo sapiens
tttaaccttggataa

SEQ ID NO: 404123 - DNA, 15 bp, Homo sapiens
gtttaaccttggata

SEQ ID NO: 404124 - DNA, 15 bp, Homo sapiens
tgtttaaccttggat

SEQ ID NO: 404125 - DNA, 15 bp, Homo sapiens
ctgtttaaccttgga

SEQ ID NO: 404126 - DNA, 15 bp, Homo sapiens
gctgtttaaccttgg

SEQ ID NO: 404127 - DNA, 15 bp, Homo sapiens
agctgtttaaccttg

SEQ ID NO: 404128 - DNA, 15 bp, Homo sapiens
tagctgtttaacctt

SEQ ID NO: 404129 - DNA, 15 bp, Homo sapiens
ttagctgtttaacct

SEQ ID NO: 404130 - DNA, 15 bp, Homo sapiens
attagctgtttaacc

SEQ ID NO: 404131 - DNA, 15 bp, Homo sapiens
tattagctgtttaac

SEQ ID NO: 404132 - DNA, 15 bp, Homo sapiens
ttattagctgtttaa

SEQ ID NO: 404133 - DNA, 15 bp, Homo sapiens
cttattagctgttta

SEQ ID NO: 404134 - DNA, 15 bp, Homo sapiens
acttattagctgttt

SEQ ID NO: 404135 - DNA, 15 bp, Homo sapiens
cacttattagctgtt

SEQ ID NO: 404136 - DNA, 15 bp, Homo sapiens
tcacttattagctgt

SEQ ID NO: 404137 - DNA, 15 bp, Homo sapiens
ttcacttattagctg

SEQ ID NO: 404138 - DNA, 15 bp, Homo sapiens
tttcacttattagct

SEQ ID NO: 404139 - DNA, 15 bp, Homo sapiens
ttttcacttattagc

SEQ ID NO: 404140 - DNA, 15 bp, Homo sapiens
attttcacttattag

SEQ ID NO: 404141 - DNA, 15 bp, Homo sapiens
gattttcacttatta

SEQ ID NO: 404142 - DNA, 15 bp, Homo sapiens
tgattttcacttatt

SEQ ID NO: 404143 - DNA, 15 bp, Homo sapiens
gtgattttcacttat

SEQ ID NO: 404144 - DNA, 15 bp, Homo sapiens
tgtgattttcactta

SEQ ID NO: 404145 - DNA, 15 bp, Homo sapiens
ctgtgattttcactt

SEQ ID NO: 404146 - DNA, 15 bp, Homo sapiens
tctgtgattttcact

SEQ ID NO: 404147 - DNA, 15 bp, Homo sapiens
ttctgtgattttcac

SEQ ID NO: 404148 - DNA, 15 bp, Homo sapiens
tttctgtgattttca

SEQ ID NO: 404149 - DNA, 15 bp, Homo sapiens
ctttctgtgattttc

SEQ ID NO: 404150 - DNA, 15 bp, Homo sapiens
tctttctgtgatttt

SEQ ID NO: 404151 - DNA, 15 bp, Homo sapiens
ctctttctgtgattt

SEQ ID NO: 404152 - DNA, 15 bp, Homo sapiens
tctctttctgtgatt

SEQ ID NO: 404153 - DNA, 15 bp, Homo sapiens
ttctctttctgtgat

SEQ ID NO: 404154 - DNA, 15 bp, Homo sapiens
attctctttctgtga

SEQ ID NO: 404155 - DNA, 15 bp, Homo sapiens
gattctctttctgtg

SEQ ID NO: 404156 - DNA, 15 bp, Homo sapiens
tgattctctttctgt

SEQ ID NO: 404157 - DNA, 15 bp, Homo sapiens
ttgattctctttctg

SEQ ID NO: 404158 - DNA, 15 bp, Homo sapiens
tttgattctctttct

SEQ ID NO: 404159 - DNA, 15 bp, Homo sapiens
ctttgattctctttc

SEQ ID NO: 404160 - DNA, 15 bp, Homo sapiens
actttgattctcttt

SEQ ID NO: 404161 - DNA, 15 bp, Homo sapiens
tactttgattctctt

SEQ ID NO: 404162 - DNA, 15 bp, Homo sapiens
ttactttgattctct

SEQ ID NO: 404163 - DNA, 15 bp, Homo sapiens
attactttgattctc

SEQ ID NO: 404164 - DNA, 15 bp, Homo sapiens
aattactttgattct

SEQ ID NO: 404165 - DNA, 15 bp, Homo sapiens
aaattactttgattc

SEQ ID NO: 404166 - DNA, 15 bp, Homo sapiens
caaattactttgatt

SEQ ID NO: 404167 - DNA, 15 bp, Homo sapiens
tcaaattactttgat

SEQ ID NO: 404168 - DNA, 15 bp, Homo sapiens
gtcaaattactttga

SEQ ID NO: 404169 - DNA, 15 bp, Homo sapiens
tgtcaaattactttg

SEQ ID NO: 404170 - DNA, 15 bp, Homo sapiens
gtgtcaaattacttt

SEQ ID NO: 404171 - DNA, 15 bp, Homo sapiens
agtgtcaaattactt

SEQ ID NO: 404172 - DNA, 15 bp, Homo sapiens
cagtgtcaaattact

SEQ ID NO: 404173 - DNA, 15 bp, Homo sapiens
ccagtgtcaaattac

SEQ ID NO: 404174 - DNA, 15 bp, Homo sapiens
tccagtgtcaaatta

SEQ ID NO: 404175 - DNA, 15 bp, Homo sapiens
ttccagtgtcaaatt

SEQ ID NO: 404176 - DNA, 15 bp, Homo sapiens
attccagtgtcaaat

SEQ ID NO: 404177 - DNA, 15 bp, Homo sapiens
gattccagtgtcaaa

SEQ ID NO: 404178 - DNA, 15 bp, Homo sapiens
agattccagtgtcaa

SEQ ID NO: 404179 - DNA, 15 bp, Homo sapiens
tagattccagtgtca

SEQ ID NO: 404180 - DNA, 15 bp, Homo sapiens
gtagattccagtgtc

SEQ ID NO: 404181 - DNA, 15 bp, Homo sapiens
ggtagattccagtgt

SEQ ID NO: 404182 - DNA, 15 bp, Homo sapiens
aggtagattccagtg

SEQ ID NO: 404183 - DNA, 15 bp, Homo sapiens
taggtagattccagt

SEQ ID NO: 404184 - DNA, 15 bp, Homo sapiens
gtaggtagattccag

SEQ ID NO: 404185 - DNA, 15 bp, Homo sapiens
agtaggtagattcca

SEQ ID NO: 404186 - DNA, 15 bp, Homo sapiens
aagtaggtagattcc

SEQ ID NO: 404187 - DNA, 15 bp, Homo sapiens
caagtaggtagattc

SEQ ID NO: 404188 - DNA, 15 bp, Homo sapiens
tcaagtaggtagatt

SEQ ID NO: 404189 - DNA, 15 bp, Homo sapiens
atcaagtaggtagat

SEQ ID NO: 404190 - DNA, 15 bp, Homo sapiens
gatcaagtaggtaga

SEQ ID NO: 404191 - DNA, 15 bp, Homo sapiens
tgatcaagtaggtag

SEQ ID NO: 404192 - DNA, 15 bp, Homo sapiens
gtgatcaagtaggta

SEQ ID NO: 404193 - DNA, 15 bp, Homo sapiens
agtgatcaagtaggt

SEQ ID NO: 404194 - DNA, 15 bp, Homo sapiens
tagtgatcaagtagg

SEQ ID NO: 404195 - DNA, 15 bp, Homo sapiens
atagtgatcaagtag

SEQ ID NO: 404196 - DNA, 15 bp, Homo sapiens
tatagtgatcaagta

SEQ ID NO: 404197 - DNA, 15 bp, Homo sapiens
gtatagtgatcaagt

SEQ ID NO: 404198 - DNA, 15 bp, Homo sapiens
agtatagtgatcaag

SEQ ID NO: 404199 - DNA, 15 bp, Homo sapiens
cagtatagtgatcaa

SEQ ID NO: 404200 - DNA, 15 bp, Homo sapiens
acagtatagtgatca

SEQ ID NO: 404201 - DNA, 15 bp, Homo sapiens
tacagtatagtgatc

SEQ ID NO: 404202 - DNA, 15 bp, Homo sapiens
gtacagtatagtgat

SEQ ID NO: 404203 - DNA, 15 bp, Homo sapiens
agtacagtatagtga

SEQ ID NO: 404204 - DNA, 15 bp, Homo sapiens
cagtacagtatagtg

SEQ ID NO: 404205 - DNA, 15 bp, Homo sapiens
acagtacagtatagt

SEQ ID NO: 404206 - DNA, 15 bp, Homo sapiens
gacagtacagtatag

SEQ ID NO: 404207 - DNA, 15 bp, Homo sapiens
ggacagtacagtata

SEQ ID NO: 404208 - DNA, 15 bp, Homo sapiens
tggacagtacagtat

SEQ ID NO: 404209 - DNA, 15 bp, Homo sapiens
atggacagtacagta

SEQ ID NO: 404210 - DNA, 15 bp, Homo sapiens
aatggacagtacagt

SEQ ID NO: 404211 - DNA, 15 bp, Homo sapiens
caatggacagtacag

SEQ ID NO: 404212 - DNA, 15 bp, Homo sapiens
ccaatggacagtaca

SEQ ID NO: 404213 - DNA, 15 bp, Homo sapiens
gccaatggacagtac

SEQ ID NO: 404214 - DNA, 15 bp, Homo sapiens
agccaatggacagta

SEQ ID NO: 404215 - DNA, 15 bp, Homo sapiens
cagccaatggacagt

SEQ ID NO: 404216 - DNA, 15 bp, Homo sapiens
acagccaatggacag

SEQ ID NO: 404217 - DNA, 15 bp, Homo sapiens
cacagccaatggaca

SEQ ID NO: 404218 - DNA, 15 bp, Homo sapiens
ccacagccaatggac

SEQ ID NO: 404219 - DNA, 15 bp, Homo sapiens
tccacagccaatgga

SEQ ID NO: 404220 - DNA, 15 bp, Homo sapiens
ctccacagccaatgg

SEQ ID NO: 404221 - DNA, 15 bp, Homo sapiens
actccacagccaatg

SEQ ID NO: 404222 - DNA, 15 bp, Homo sapiens
aactccacagccaat

SEQ ID NO: 404223 - DNA, 15 bp, Homo sapiens
taactccacagccaa

SEQ ID NO: 404224 - DNA, 15 bp, Homo sapiens
ctaactccacagcca

SEQ ID NO: 404225 - DNA, 15 bp, Homo sapiens
tctaactccacagcc

SEQ ID NO: 404226 - DNA, 15 bp, Homo sapiens
gtctaactccacagc

SEQ ID NO: 404227 - DNA, 15 bp, Homo sapiens
tgtctaactccacag

SEQ ID NO: 404228 - DNA, 15 bp, Homo sapiens
ttgtctaactccaca

SEQ ID NO: 404229 - DNA, 15 bp, Homo sapiens
cttgtctaactccac

SEQ ID NO: 404230 - DNA, 15 bp, Homo sapiens
ccttgtctaactcca

SEQ ID NO: 404231 - DNA, 15 bp, Homo sapiens
tccttgtctaactcc

SEQ ID NO: 404232 - DNA, 15 bp, Homo sapiens
atccttgtctaactc

SEQ ID NO: 404233 - DNA, 15 bp, Homo sapiens
aatccttgtctaact

SEQ ID NO: 404234 - DNA, 15 bp, Homo sapiens
taatccttgtctaac

SEQ ID NO: 404235 - DNA, 15 bp, Homo sapiens
ttaatccttgtctaa

SEQ ID NO: 404236 - DNA, 15 bp, Homo sapiens
tttaatccttgtcta

SEQ ID NO: 404237 - DNA, 15 bp, Homo sapiens
atttaatccttgtct

SEQ ID NO: 404238 - DNA, 15 bp, Homo sapiens
gatttaatccttgtc

SEQ ID NO: 404239 - DNA, 15 bp, Homo sapiens
ggatttaatccttgt

SEQ ID NO: 404240 - DNA, 15 bp, Homo sapiens
aggatttaatccttg

SEQ ID NO: 404241 - DNA, 15 bp, Homo sapiens
aaggatttaatcctt

SEQ ID NO: 404242 - DNA, 15 bp, Homo sapiens
gaaggatttaatcct

SEQ ID NO: 404243 - DNA, 15 bp, Homo sapiens
ggaaggatttaatcc

SEQ ID NO: 404244 - DNA, 15 bp, Homo sapiens
aggaaggatttaatc

SEQ ID NO: 404245 - DNA, 15 bp, Homo sapiens
gaggaaggatttaat

SEQ ID NO: 404246 - DNA, 15 bp, Homo sapiens
agaggaaggatttaa

SEQ ID NO: 404247 - DNA, 15 bp, Homo sapiens
cagaggaaggattta

SEQ ID NO: 404248 - DNA, 15 bp, Homo sapiens
acagaggaaggattt

SEQ ID NO: 404249 - DNA, 15 bp, Homo sapiens
aacagaggaaggatt

SEQ ID NO: 404250 - DNA, 15 bp, Homo sapiens
taacagaggaaggat

SEQ ID NO: 404251 - DNA, 15 bp, Homo sapiens
ataacagaggaagga

SEQ ID NO: 404252 - DNA, 15 bp, Homo sapiens
aataacagaggaagg

SEQ ID NO: 404253 - DNA, 15 bp, Homo sapiens
aaataacagaggaag

SEQ ID NO: 404254 - DNA, 15 bp, Homo sapiens
taaataacagaggaa

SEQ ID NO: 404255 - DNA, 15 bp, Homo sapiens
gtaaataacagagga

SEQ ID NO: 404256 - DNA, 15 bp, Homo sapiens
agtaaataacagagg

SEQ ID NO: 404257 - DNA, 15 bp, Homo sapiens
tagtaaataacagag

SEQ ID NO: 404258 - DNA, 15 bp, Homo sapiens
gtagtaaataacaga

SEQ ID NO: 404259 - DNA, 15 bp, Homo sapiens
agtagtaaataacag

SEQ ID NO: 404260 - DNA, 15 bp, Homo sapiens
tagtagtaaataaca

SEQ ID NO: 404261 - DNA, 15 bp, Homo sapiens
ctagtagtaaataac

SEQ ID NO: 404262 - DNA, 15 bp, Homo sapiens
actagtagtaaataa

SEQ ID NO: 404263 - DNA, 15 bp, Homo sapiens
aactagtagtaaata

SEQ ID NO: 404264 - DNA, 15 bp, Homo sapiens
caactagtagtaaat

SEQ ID NO: 404265 - DNA, 15 bp, Homo sapiens
acaactagtagtaaa

SEQ ID NO: 404266 - DNA, 15 bp, Homo sapiens
cacaactagtagtaa

SEQ ID NO: 404267 - DNA, 15 bp, Homo sapiens
acacaactagtagta

SEQ ID NO: 404268 - DNA, 15 bp, Homo sapiens
aacacaactagtagt

SEQ ID NO: 404269 - DNA, 15 bp, Homo sapiens
taacacaactagtag

SEQ ID NO: 404270 - DNA, 15 bp, Homo sapiens
ataacacaactagta

SEQ ID NO: 404271 - DNA, 15 bp, Homo sapiens
gataacacaactagt

SEQ ID NO: 404272 - DNA, 15 bp, Homo sapiens
cgataacacaactag

SEQ ID NO: 404273 - DNA, 15 bp, Homo sapiens
acgataacacaacta

SEQ ID NO: 404274 - DNA, 15 bp, Homo sapiens
cacgataacacaact

SEQ ID NO: 404275 - DNA, 15 bp, Homo sapiens
tcacgataacacaac

SEQ ID NO: 404276 - DNA, 15 bp, Homo sapiens
ctcacgataacacaa

SEQ ID NO: 404277 - DNA, 15 bp, Homo sapiens
gctcacgataacaca

SEQ ID NO: 404278 - DNA, 15 bp, Homo sapiens
tgctcacgataacac

SEQ ID NO: 404279 - DNA, 15 bp, Homo sapiens
ttgctcacgataaca

SEQ ID NO: 404280 - DNA, 15 bp, Homo sapiens
tttgctcacgataac

SEQ ID NO: 404281 - DNA, 15 bp, Homo sapiens
ctttgctcacgataa

SEQ ID NO: 404282 - DNA, 15 bp, Homo sapiens
actttgctcacgata

SEQ ID NO: 404283 - DNA, 15 bp, Homo sapiens
tactttgctcacgat

SEQ ID NO: 404284 - DNA, 15 bp, Homo sapiens
atactttgctcacga

SEQ ID NO: 404285 - DNA, 15 bp, Homo sapiens
aatactttgctcacg

SEQ ID NO: 404286 - DNA, 15 bp, Homo sapiens
aaatactttgctcac

SEQ ID NO: 404287 - DNA, 15 bp, Homo sapiens
taaatactttgctca

SEQ ID NO: 404288 - DNA, 15 bp, Homo sapiens
ttaaatactttgctc

SEQ ID NO: 404289 - DNA, 15 bp, Homo sapiens
gttaaatactttgct

SEQ ID NO: 404290 - DNA, 15 bp, Homo sapiens
ggttaaatactttgc

SEQ ID NO: 404291 - DNA, 15 bp, Homo sapiens
aggttaaatactttg

SEQ ID NO: 404292 - DNA, 15 bp, Homo sapiens
gaggttaaatacttt

SEQ ID NO: 404293 - DNA, 15 bp, Homo sapiens
agaggttaaatactt

SEQ ID NO: 404294 - DNA, 15 bp, Homo sapiens
gagaggttaaatact

SEQ ID NO: 404295 - DNA, 15 bp, Homo sapiens
agagaggttaaatac

SEQ ID NO: 404296 - DNA, 15 bp, Homo sapiens
cagagaggttaaata

SEQ ID NO: 404297 - DNA, 15 bp, Homo sapiens
tcagagaggttaaat

SEQ ID NO: 404298 - DNA, 15 bp, Homo sapiens
ctcagagaggttaaa

SEQ ID NO: 404299 - DNA, 15 bp, Homo sapiens
tctcagagaggttaa

SEQ ID NO: 404300 - DNA, 15 bp, Homo sapiens
gtctcagagaggtta

SEQ ID NO: 404301 - DNA, 15 bp, Homo sapiens
agtctcagagaggtt

SEQ ID NO: 404302 - DNA, 15 bp, Homo sapiens
gagtctcagagaggt

SEQ ID NO: 404303 - DNA, 15 bp, Homo sapiens
tgagtctcagagagg

SEQ ID NO: 404304 - DNA, 15 bp, Homo sapiens
atgagtctcagagag

SEQ ID NO: 404305 - DNA, 15 bp, Homo sapiens
aatgagtctcagaga

SEQ ID NO: 404306 - DNA, 15 bp, Homo sapiens
aaatgagtctcagag

SEQ ID NO: 404307 - DNA, 15 bp, Homo sapiens
gaaatgagtctcaga

SEQ ID NO: 404308 - DNA, 15 bp, Homo sapiens
tgaaatgagtctcag

SEQ ID NO: 404309 - DNA, 15 bp, Homo sapiens
atgaaatgagtctca

SEQ ID NO: 404310 - DNA, 15 bp, Homo sapiens
aatgaaatgagtctc

SEQ ID NO: 404311 - DNA, 15 bp, Homo sapiens
taatgaaatgagtct

SEQ ID NO: 404312 - DNA, 15 bp, Homo sapiens
ataatgaaatgagtc

SEQ ID NO: 404313 - DNA, 15 bp, Homo sapiens
gataatgaaatgagt

SEQ ID NO: 404314 - DNA, 15 bp, Homo sapiens
agataatgaaatgag

SEQ ID NO: 404315 - DNA, 15 bp, Homo sapiens
tagataatgaaatga

SEQ ID NO: 404316 - DNA, 15 bp, Homo sapiens
gtagataatgaaatg

SEQ ID NO: 404317 - DNA, 15 bp, Homo sapiens
tgtagataatgaaat

SEQ ID NO: 404318 - DNA, 15 bp, Homo sapiens
ttgtagataatgaaa

SEQ ID NO: 404319 - DNA, 15 bp, Homo sapiens
cttgtagataatgaa

SEQ ID NO: 404320 - DNA, 15 bp, Homo sapiens
tcttgtagataatga

SEQ ID NO: 404321 - DNA, 15 bp, Homo sapiens
atcttgtagataatg

SEQ ID NO: 404322 - DNA, 15 bp, Homo sapiens
catcttgtagataat

SEQ ID NO: 404323 - DNA, 15 bp, Homo sapiens
ccatcttgtagataa

SEQ ID NO: 404324 - DNA, 15 bp, Homo sapiens
accatcttgtagata

SEQ ID NO: 404325 - DNA, 15 bp, Homo sapiens
aaccatcttgtagat

SEQ ID NO: 404326 - DNA, 15 bp, Homo sapiens
taaccatcttgtaga

SEQ ID NO: 404327 - DNA, 15 bp, Homo sapiens
ttaaccatcttgtag

SEQ ID NO: 404328 - DNA, 15 bp, Homo sapiens
tttaaccatcttgta

SEQ ID NO: 404329 - DNA, 15 bp, Homo sapiens
atttaaccatcttgt

SEQ ID NO: 404330 - DNA, 15 bp, Homo sapiens
tatttaaccatcttg

SEQ ID NO: 404331 - DNA, 15 bp, Homo sapiens
ttatttaaccatctt

SEQ ID NO: 404332 - DNA, 15 bp, Homo sapiens
attatttaaccatct

SEQ ID NO: 404333 - DNA, 15 bp, Homo sapiens
tattatttaaccatc

SEQ ID NO: 404334 - DNA, 15 bp, Homo sapiens
gtattatttaaccat

SEQ ID NO: 404335 - DNA, 15 bp, Homo sapiens
agtattatttaacca

SEQ ID NO: 404336 - DNA, 15 bp, Homo sapiens
aagtattatttaacc

SEQ ID NO: 404337 - DNA, 15 bp, Homo sapiens
taagtattatttaac

SEQ ID NO: 404338 - DNA, 15 bp, Homo sapiens
ataagtattatttaa

SEQ ID NO: 404339 - DNA, 15 bp, Homo sapiens
tataagtattattta

SEQ ID NO: 404340 - DNA, 15 bp, Homo sapiens
atataagtattattt

SEQ ID NO: 404341 - DNA, 15 bp, Homo sapiens
catataagtattatt

SEQ ID NO: 404342 - DNA, 15 bp, Homo sapiens
tcatataagtattat

SEQ ID NO: 404343 - DNA, 15 bp, Homo sapiens
gtcatataagtatta

SEQ ID NO: 404344 - DNA, 15 bp, Homo sapiens
tgtcatataagtatt

SEQ ID NO: 404345 - DNA, 15 bp, Homo sapiens
ttgtcatataagtat

SEQ ID NO: 404346 - DNA, 15 bp, Homo sapiens
tttgtcatataagta

SEQ ID NO: 404347 - DNA, 15 bp, Homo sapiens
ctttgtcatataagt

SEQ ID NO: 404348 - DNA, 15 bp, Homo sapiens
actttgtcatataag

SEQ ID NO: 404349 - DNA, 15 bp, Homo sapiens
aactttgtcatataa

SEQ ID NO: 404350 - DNA, 15 bp, Homo sapiens
taactttgtcatata

SEQ ID NO: 404351 - DNA, 15 bp, Homo sapiens
ataactttgtcatat

SEQ ID NO: 404352 - DNA, 15 bp, Homo sapiens
aataactttgtcata

SEQ ID NO: 404353 - DNA, 15 bp, Homo sapiens
taataactttgtcat

SEQ ID NO: 404354 - DNA, 15 bp, Homo sapiens
ttaataactttgtca

SEQ ID NO: 404355 - DNA, 15 bp, Homo sapiens
attaataactttgtc

SEQ ID NO: 404356 - DNA, 15 bp, Homo sapiens
tattaataactttgt

SEQ ID NO: 404357 - DNA, 15 bp, Homo sapiens
ttattaataactttg

SEQ ID NO: 404358 - DNA, 15 bp, Homo sapiens
tttattaataacttt

SEQ ID NO: 404359 - DNA, 15 bp, Homo sapiens
ttttattaataactt

SEQ ID NO: 404360 - DNA, 15 bp, Homo sapiens
tttttattaataact

SEQ ID NO: 404361 - DNA, 15 bp, Homo sapiens
atttttattaataac

SEQ ID NO: 404362 - DNA, 15 bp, Homo sapiens
tatttttattaataa

SEQ ID NO: 404363 - DNA, 15 bp, Homo sapiens
ttatttttattaata

SEQ ID NO: 404364 - DNA, 15 bp, Homo sapiens
tttatttttattaat

SEQ ID NO: 404365 - DNA, 15 bp, Homo sapiens
atttatttttattaa

SEQ ID NO: 404366 - DNA, 15 bp, Homo sapiens
ttttatttattttta

SEQ ID NO: 404367 - DNA, 15 bp, Homo sapiens
attttatttattttt

SEQ ID NO: 404368 - DNA, 15 bp, Homo sapiens
tattttatttatttt

SEQ ID NO: 404369 - DNA, 15 bp, Homo sapiens
ttattttatttattt

SEQ ID NO: 404370 - DNA, 15 bp, Homo sapiens
attattttatttatt

SEQ ID NO: 404371 - DNA, 15 bp, Homo sapiens
tattattttatttat

SEQ ID NO: 404372 - DNA, 15 bp, Homo sapiens
atattattttattta

SEQ ID NO: 404373 - DNA, 15 bp, Homo sapiens
gatattattttattt

SEQ ID NO: 404374 - DNA, 15 bp, Homo sapiens
agatattattttatt

SEQ ID NO: 404375 - DNA, 15 bp, Homo sapiens
tagatattattttat

SEQ ID NO: 404376 - DNA, 15 bp, Homo sapiens
atagatattatttta

SEQ ID NO: 404377 - DNA, 15 bp, Homo sapiens
tatagatattatttt

SEQ ID NO: 404378 - DNA, 15 bp, Homo sapiens
atatagatattattt

SEQ ID NO: 404379 - DNA, 15 bp, Homo sapiens
tatatagatattatt

SEQ ID NO: 404380 - DNA, 15 bp, Homo sapiens
ttatatagatattat

SEQ ID NO: 404381 - DNA, 15 bp, Homo sapiens
gttatatagatatta

SEQ ID NO: 404382 - DNA, 15 bp, Homo sapiens
ggttatatagatatt

SEQ ID NO: 404383 - DNA, 15 bp, Homo sapiens
gggttatatagatat

SEQ ID NO: 404384 - DNA, 15 bp, Homo sapiens
tgggttatatagata

SEQ ID NO: 404385 - DNA, 15 bp, Homo sapiens
ttgggttatatagat

SEQ ID NO: 404386 - DNA, 15 bp, Homo sapiens
tttgggttatataga

SEQ ID NO: 404387 - DNA, 15 bp, Homo sapiens
atttgggttatatag

SEQ ID NO: 404388 - DNA, 15 bp, Homo sapiens
gatttgggttatata

SEQ ID NO: 404389 - DNA, 15 bp, Homo sapiens
agaacagtatacata

SEQ ID NO: 404390 - DNA, 15 bp, Homo sapiens
aagaacagtatacat

SEQ ID NO: 404391 - DNA, 15 bp, Homo sapiens
aaagaacagtataca

SEQ ID NO: 404392 - DNA, 15 bp, Homo sapiens
taaagaacagtatac

SEQ ID NO: 404393 - DNA, 15 bp, Homo sapiens
ataaagaacagtata

SEQ ID NO: 404394 - DNA, 15 bp, Homo sapiens
gataaagaacagtat

SEQ ID NO: 404395 - DNA, 15 bp, Homo sapiens
ggataaagaacagta

SEQ ID NO: 404396 - DNA, 15 bp, Homo sapiens
tggataaagaacagt

SEQ ID NO: 404397 - DNA, 15 bp, Homo sapiens
ctggataaagaacag

SEQ ID NO: 404398 - DNA, 15 bp, Homo sapiens
actggataaagaaca

SEQ ID NO: 404399 - DNA, 15 bp, Homo sapiens
gactggataaagaac

SEQ ID NO: 404400 - DNA, 15 bp, Homo sapiens
ggactggataaagaa

SEQ ID NO: 404401 - DNA, 15 bp, Homo sapiens
tggactggataaaga

SEQ ID NO: 404402 - DNA, 15 bp, Homo sapiens
gtggactggataaag

SEQ ID NO: 404403 - DNA, 15 bp, Homo sapiens
agtggactggataaa

SEQ ID NO: 404404 - DNA, 15 bp, Homo sapiens
cagtggactggataa

SEQ ID NO: 404405 - DNA, 15 bp, Homo sapiens
acagtggactggata

SEQ ID NO: 404406 - DNA, 15 bp, Homo sapiens
aacagtggactggat

SEQ ID NO: 404407 - DNA, 15 bp, Homo sapiens
taacagtggactgga

SEQ ID NO: 404408 - DNA, 15 bp, Homo sapiens
ttaacagtggactgg

SEQ ID NO: 404409 - DNA, 15 bp, Homo sapiens
attaacagtggactg

SEQ ID NO: 404410 - DNA, 15 bp, Homo sapiens
cattaacagtggact

SEQ ID NO: 404411 - DNA, 15 bp, Homo sapiens
ccattaacagtggac

SEQ ID NO: 404412 - DNA, 15 bp, Homo sapiens
cccattaacagtgga

SEQ ID NO: 404413 - DNA, 15 bp, Homo sapiens
acccattaacagtgg

SEQ ID NO: 404414 - DNA, 15 bp, Homo sapiens
cacccattaacagtg

SEQ ID NO: 404415 - DNA, 15 bp, Homo sapiens
gcacccattaacagt

SEQ ID NO: 404416 - DNA, 15 bp, Homo sapiens
ggcacccattaacag

SEQ ID NO: 404417 - DNA, 15 bp, Homo sapiens
aggcacccattaaca

SEQ ID NO: 404418 - DNA, 15 bp, Homo sapiens
taggcacccattaac

SEQ ID NO: 404419 - DNA, 15 bp, Homo sapiens
ctaggcacccattaa

SEQ ID NO: 404420 - DNA, 15 bp, Homo sapiens
cctaggcacccatta

SEQ ID NO: 404421 - DNA, 15 bp, Homo sapiens
acctaggcacccatt

SEQ ID NO: 404422 - DNA, 15 bp, Homo sapiens
aacctaggcacccat

SEQ ID NO: 404423 - DNA, 15 bp, Homo sapiens
caacctaggcaccca

SEQ ID NO: 404424 - DNA, 15 bp, Homo sapiens
tcaacctaggcaccc

SEQ ID NO: 404425 - DNA, 15 bp, Homo sapiens
ttcaacctaggcacc

SEQ ID NO: 404426 - DNA, 15 bp, Homo sapiens
attcaacctaggcac

SEQ ID NO: 404427 - DNA, 15 bp, Homo sapiens
gattcaacctaggca

SEQ ID NO: 404428 - DNA, 15 bp, Homo sapiens
agattcaacctaggc

SEQ ID NO: 404429 - DNA, 15 bp, Homo sapiens
tagattcaacctagg

SEQ ID NO: 404430 - DNA, 15 bp, Homo sapiens
atagattcaacctag

SEQ ID NO: 404431 - DNA, 15 bp, Homo sapiens
catagattcaaccta

SEQ ID NO: 404432 - DNA, 15 bp, Homo sapiens
acatagattcaacct

SEQ ID NO: 404433 - DNA, 15 bp, Homo sapiens
gacatagattcaacc

SEQ ID NO: 404434 - DNA, 15 bp, Homo sapiens
agacatagattcaac

SEQ ID NO: 404435 - DNA, 15 bp, Homo sapiens
aagacatagattcaa

SEQ ID NO: 404436 - DNA, 15 bp, Homo sapiens
aaagacatagattca

SEQ ID NO: 404437 - DNA, 15 bp, Homo sapiens
caaagacatagattc

SEQ ID NO: 404438 - DNA, 15 bp, Homo sapiens
gcaaagacatagatt

SEQ ID NO: 404439 - DNA, 15 bp, Homo sapiens
agcaaagacatagat

SEQ ID NO: 404440 - DNA, 15 bp, Homo sapiens
tagcaaagacataga

SEQ ID NO: 404441 - DNA, 15 bp, Homo sapiens
atagcaaagacatag

SEQ ID NO: 404442 - DNA, 15 bp, Homo sapiens
aatagcaaagacata

SEQ ID NO: 404443 - DNA, 15 bp, Homo sapiens
caatagcaaagacat

SEQ ID NO: 404444 - DNA, 15 bp, Homo sapiens
acaatagcaaagaca

SEQ ID NO: 404445 - DNA, 15 bp, Homo sapiens
tggcactattcacaa

SEQ ID NO: 404446 - DNA, 15 bp, Homo sapiens
atggcactattcaca

SEQ ID NO: 404447 - DNA, 15 bp, Homo sapiens
catggcactattcac

SEQ ID NO: 404448 - DNA, 15 bp, Homo sapiens
ccatggcactattca

SEQ ID NO: 404449 - DNA, 15 bp, Homo sapiens
accatggcactattc

SEQ ID NO: 404450 - DNA, 15 bp, Homo sapiens
taccatggcactatt

SEQ ID NO: 404451 - DNA, 15 bp, Homo sapiens
ttaccatggcactat

SEQ ID NO: 404452 - DNA, 15 bp, Homo sapiens
tttaccatggcacta

SEQ ID NO: 404453 - DNA, 15 bp, Homo sapiens
gtttaccatggcact

SEQ ID NO: 404454 - DNA, 15 bp, Homo sapiens
tgtttaccatggcac

SEQ ID NO: 404455 - DNA, 15 bp, Homo sapiens
atgtttaccatggca

SEQ ID NO: 404456 - DNA, 15 bp, Homo sapiens
tatgtttaccatggc

SEQ ID NO: 404457 - DNA, 15 bp, Homo sapiens
gtatgtttaccatgg

SEQ ID NO: 404458 - DNA, 15 bp, Homo sapiens
tgtatgtttaccatg

SEQ ID NO: 404459 - DNA, 15 bp, Homo sapiens
ttgtatgtttaccat

SEQ ID NO: 404460 - DNA, 15 bp, Homo sapiens
cttgtatgtttacca

SEQ ID NO: 404461 - DNA, 15 bp, Homo sapiens
acttgtatgtttacc

SEQ ID NO: 404462 - DNA, 15 bp, Homo sapiens
cacttgtatgtttac

SEQ ID NO: 404463 - DNA, 15 bp, Homo sapiens
gcacttgtatgttta

SEQ ID NO: 404464 - DNA, 15 bp, Homo sapiens
tgcacttgtatgttt

SEQ ID NO: 404465 - DNA, 15 bp, Homo sapiens
ctgcacttgtatgtt

SEQ ID NO: 404466 - DNA, 15 bp, Homo sapiens
cctgcacttgtatgt

SEQ ID NO: 404467 - DNA, 15 bp, Homo sapiens
acctgcacttgtatg

SEQ ID NO: 404468 - DNA, 15 bp, Homo sapiens
tacctgcacttgtat

SEQ ID NO: 404469 - DNA, 15 bp, Homo sapiens
atacctgcacttgta

SEQ ID NO: 404470 - DNA, 15 bp, Homo sapiens
gatacctgcacttgt

SEQ ID NO: 404471 - DNA, 15 bp, Homo sapiens
tgatacctgcacttg

SEQ ID NO: 404472 - DNA, 15 bp, Homo sapiens
atgatacctgcactt

SEQ ID NO: 404473 - DNA, 15 bp, Homo sapiens
aatgatacctgcact

SEQ ID NO: 404474 - DNA, 15 bp, Homo sapiens
aaatgatacctgcac

SEQ ID NO: 404475 - DNA, 15 bp, Homo sapiens
aaaatgatacctgca

SEQ ID NO: 404476 - DNA, 15 bp, Homo sapiens
taaaatgatacctgc

SEQ ID NO: 404477 - DNA, 15 bp, Homo sapiens
ctaaaatgatacctg

SEQ ID NO: 404478 - DNA, 15 bp, Homo sapiens
actaaaatgatacct

SEQ ID NO: 404479 - DNA, 15 bp, Homo sapiens
tactaaaatgatacc

SEQ ID NO: 404480 - DNA, 15 bp, Homo sapiens
ctactaaaatgatac

SEQ ID NO: 404481 - DNA, 15 bp, Homo sapiens
tctactaaaatgata

SEQ ID NO: 404482 - DNA, 15 bp, Homo sapiens
ttctactaaaatgat

SEQ ID NO: 404483 - DNA, 15 bp, Homo sapiens
gttctactaaaatga

SEQ ID NO: 404484 - DNA, 15 bp, Homo sapiens
agttctactaaaatg

SEQ ID NO: 404485 - DNA, 15 bp, Homo sapiens
tagttctactaaaat

SEQ ID NO: 404486 - DNA, 15 bp, Homo sapiens
atagttctactaaaa

SEQ ID NO: 404487 - DNA, 15 bp, Homo sapiens
aatagttctactaaa

SEQ ID NO: 404488 - DNA, 15 bp, Homo sapiens
aaatagttctactaa

SEQ ID NO: 404489 - DNA, 15 bp, Homo sapiens
taaatagttctacta

SEQ ID NO: 404490 - DNA, 15 bp, Homo sapiens
ataaatagttctact

SEQ ID NO: 404491 - DNA, 15 bp, Homo sapiens
aataaatagttctac

SEQ ID NO: 404492 - DNA, 15 bp, Homo sapiens
aaataaatagttcta

SEQ ID NO: 404493 - DNA, 15 bp, Homo sapiens
aaaataaatagttct

SEQ ID NO: 404494 - DNA, 15 bp, Homo sapiens
gaaaataaatagttc

SEQ ID NO: 404495 - DNA, 15 bp, Homo sapiens
ggaaaataaatagtt

SEQ ID NO: 404496 - DNA, 15 bp, Homo sapiens
aggaaaataaatagt

SEQ ID NO: 404497 - DNA, 15 bp, Homo sapiens
aaggaaaataaatag

SEQ ID NO: 404498 - DNA, 15 bp, Homo sapiens
aaaggaaaataaata

SEQ ID NO: 404499 - DNA, 15 bp, Homo sapiens
caaaggaaaataaat

SEQ ID NO: 404500 - DNA, 15 bp, Homo sapiens
ccaaaggaaaataaa

SEQ ID NO: 404501 - DNA, 15 bp, Homo sapiens
cccaaaggaaaataa

SEQ ID NO: 404502 - DNA, 15 bp, Homo sapiens
acccaaaggaaaata

SEQ ID NO: 404503 - DNA, 15 bp, Homo sapiens
tacccaaaggaaaat

SEQ ID NO: 404504 - DNA, 15 bp, Homo sapiens
atacccaaaggaaaa

SEQ ID NO: 404505 - DNA, 15 bp, Homo sapiens
tatacccaaaggaaa

SEQ ID NO: 404506 - DNA, 15 bp, Homo sapiens
atatacccaaaggaa

SEQ ID NO: 404507 - DNA, 15 bp, Homo sapiens
gcagcaatctcatta

SEQ ID NO: 404508 - DNA, 15 bp, Homo sapiens
tgcagcaatctcatt

SEQ ID NO: 404509 - DNA, 15 bp, Homo sapiens
atgcagcaatctcat

SEQ ID NO: 404510 - DNA, 15 bp, Homo sapiens
aatgcagcaatctca

SEQ ID NO: 404511 - DNA, 15 bp, Homo sapiens
caatgcagcaatctc

SEQ ID NO: 404512 - DNA, 15 bp, Homo sapiens
tcaatgcagcaatct

SEQ ID NO: 404513 - DNA, 15 bp, Homo sapiens
ttcaatgcagcaatc

SEQ ID NO: 404514 - DNA, 15 bp, Homo sapiens
attcaatgcagcaat

SEQ ID NO: 404515 - DNA, 15 bp, Homo sapiens
cattcaatgcagcaa

SEQ ID NO: 404516 - DNA, 15 bp, Homo sapiens
tcattcaatgcagca

SEQ ID NO: 404517 - DNA, 15 bp, Homo sapiens
atcattcaatgcagc

SEQ ID NO: 404518 - DNA, 15 bp, Homo sapiens
tatcattcaatgcag

SEQ ID NO: 404519 - DNA, 15 bp, Homo sapiens
ctatcattcaatgca

SEQ ID NO: 404520 - DNA, 15 bp, Homo sapiens
actatcattcaatgc

SEQ ID NO: 404521 - DNA, 15 bp, Homo sapiens
aactatcattcaatg

SEQ ID NO: 404522 - DNA, 15 bp, Homo sapiens
gaactatcattcaat

SEQ ID NO: 404523 - DNA, 15 bp, Homo sapiens
agaactatcattcaa

SEQ ID NO: 404524 - DNA, 15 bp, Homo sapiens
cagaactatcattca

SEQ ID NO: 404525 - DNA, 15 bp, Homo sapiens
gcagaactatcattc

SEQ ID NO: 404526 - DNA, 15 bp, Homo sapiens
agcagaactatcatt

SEQ ID NO: 404527 - DNA, 15 bp, Homo sapiens
aagcagaactatcat

SEQ ID NO: 404528 - DNA, 15 bp, Homo sapiens
aaagcagaactatca

SEQ ID NO: 404529 - DNA, 15 bp, Homo sapiens
taaagcagaactatc

SEQ ID NO: 404530 - DNA, 15 bp, Homo sapiens
ttaaagcagaactat

SEQ ID NO: 404531 - DNA, 15 bp, Homo sapiens
cttaaagcagaacta

SEQ ID NO: 404532 - DNA, 15 bp, Homo sapiens
acttaaagcagaact

SEQ ID NO: 404533 - DNA, 15 bp, Homo sapiens
aacttaaagcagaac

SEQ ID NO: 404534 - DNA, 15 bp, Homo sapiens
gaacttaaagcagaa

SEQ ID NO: 404535 - DNA, 15 bp, Homo sapiens
agaacttaaagcaga

SEQ ID NO: 404536 - DNA, 15 bp, Homo sapiens
aagaacttaaagcag

SEQ ID NO: 404537 - DNA, 15 bp, Homo sapiens
aaagaacttaaagca

SEQ ID NO: 404538 - DNA, 15 bp, Homo sapiens
caaagaacttaaagc

SEQ ID NO: 404539 - DNA, 15 bp, Homo sapiens
tcaaagaacttaaag

SEQ ID NO: 404540 - DNA, 15 bp, Homo sapiens
ctcaaagaacttaaa

SEQ ID NO: 404541 - DNA, 15 bp, Homo sapiens
tctcaaagaacttaa

SEQ ID NO: 404542 - DNA, 15 bp, Homo sapiens
ttctcaaagaactta

SEQ ID NO: 404543 - DNA, 15 bp, Homo sapiens
tttctcaaagaactt

SEQ ID NO: 404544 - DNA, 15 bp, Homo sapiens
atttctcaaagaact

SEQ ID NO: 404545 - DNA, 15 bp, Homo sapiens
gatttctcaaagaac

SEQ ID NO: 404546 - DNA, 15 bp, Homo sapiens
agatttctcaaagaa

SEQ ID NO: 404547 - DNA, 15 bp, Homo sapiens
gagatttctcaaaga

SEQ ID NO: 404548 - DNA, 15 bp, Homo sapiens
ggagatttctcaaag

SEQ ID NO: 404549 - DNA, 15 bp, Homo sapiens
tggagatttctcaaa

SEQ ID NO: 404550 - DNA, 15 bp, Homo sapiens
ttggagatttctcaa

SEQ ID NO: 404551 - DNA, 15 bp, Homo sapiens
tttggagatttctca

SEQ ID NO: 404552 - DNA, 15 bp, Homo sapiens
gtttggagatttctc

SEQ ID NO: 404553 - DNA, 15 bp, Homo sapiens
agtttggagatttct

SEQ ID NO: 404554 - DNA, 15 bp, Homo sapiens
cagtttggagatttc

SEQ ID NO: 404555 - DNA, 15 bp, Homo sapiens
gcagtttggagattt

SEQ ID NO: 404556 - DNA, 15 bp, Homo sapiens
agcagtttggagatt

SEQ ID NO: 404557 - DNA, 15 bp, Homo sapiens
aagcagtttggagat

SEQ ID NO: 404558 - DNA, 15 bp, Homo sapiens
aaagcagtttggaga

SEQ ID NO: 404559 - DNA, 15 bp, Homo sapiens
gaaagcagtttggag

SEQ ID NO: 404560 - DNA, 15 bp, Homo sapiens
ggaaagcagtttgga

SEQ ID NO: 404561 - DNA, 15 bp, Homo sapiens
gggaaagcagtttgg

SEQ ID NO: 404562 - DNA, 15 bp, Homo sapiens
ggggaaagcagtttg

SEQ ID NO: 404563 - DNA, 15 bp, Homo sapiens
tggggaaagcagttt

SEQ ID NO: 404564 - DNA, 15 bp, Homo sapiens
ctggggaaagcagtt

SEQ ID NO: 404565 - DNA, 15 bp, Homo sapiens
cctggggaaagcagt

SEQ ID NO: 404566 - DNA, 15 bp, Homo sapiens
ccctggggaaagcag

SEQ ID NO: 404567 - DNA, 15 bp, Homo sapiens
cccctggggaaagca

SEQ ID NO: 404568 - DNA, 15 bp, Homo sapiens
gcccctggggaaagc

SEQ ID NO: 404569 - DNA, 15 bp, Homo sapiens
agcccctggggaaag

SEQ ID NO: 404570 - DNA, 15 bp, Homo sapiens
cagcccctggggaaa

SEQ ID NO: 404571 - DNA, 15 bp, Homo sapiens
tcagcccctggggaa

SEQ ID NO: 404572 - DNA, 15 bp, Homo sapiens
ttcagcccctgggga

SEQ ID NO: 404573 - DNA, 15 bp, Homo sapiens
gttcagcccctgggg

SEQ ID NO: 404574 - DNA, 15 bp, Homo sapiens
agttcagcccctggg

SEQ ID NO: 404575 - DNA, 15 bp, Homo sapiens
tagttcagcccctgg

SEQ ID NO: 404576 - DNA, 15 bp, Homo sapiens
ttagttcagcccctg

SEQ ID NO: 404577 - DNA, 15 bp, Homo sapiens
attagttcagcccct

SEQ ID NO: 404578 - DNA, 15 bp, Homo sapiens
aattagttcagcccc

SEQ ID NO: 404579 - DNA, 15 bp, Homo sapiens
aaattagttcagccc

SEQ ID NO: 404580 - DNA, 15 bp, Homo sapiens
caaattagttcagcc

SEQ ID NO: 404581 - DNA, 15 bp, Homo sapiens
gcaaattagttcagc

SEQ ID NO: 404582 - DNA, 15 bp, Homo sapiens
tgcaaattagttcag

SEQ ID NO: 404583 - DNA, 15 bp, Homo sapiens
atgcaaattagttca

SEQ ID NO: 404584 - DNA, 15 bp, Homo sapiens
aatgcaaattagttc

SEQ ID NO: 404585 - DNA, 15 bp, Homo sapiens
gaatgcaaattagtt

SEQ ID NO: 404586 - DNA, 15 bp, Homo sapiens
ggaatgcaaattagt

SEQ ID NO: 404587 - DNA, 15 bp, Homo sapiens
gggaatgcaaattag

SEQ ID NO: 404588 - DNA, 15 bp, Homo sapiens
tgggaatgcaaatta

SEQ ID NO: 404589 - DNA, 15 bp, Homo sapiens
gtgggaatgcaaatt

SEQ ID NO: 404590 - DNA, 15 bp, Homo sapiens
agtgggaatgcaaat

SEQ ID NO: 404591 - DNA, 15 bp, Homo sapiens
cagtgggaatgcaaa

SEQ ID NO: 404592 - DNA, 15 bp, Homo sapiens
tcagtgggaatgcaa

SEQ ID NO: 404593 - DNA, 15 bp, Homo sapiens
gtcagtgggaatgca

SEQ ID NO: 404594 - DNA, 15 bp, Homo sapiens
tgtcagtgggaatgc

SEQ ID NO: 404595 - DNA, 15 bp, Homo sapiens
ctgtcagtgggaatg

SEQ ID NO: 404596 - DNA, 15 bp, Homo sapiens
actgtcagtgggaat

SEQ ID NO: 404597 - DNA, 15 bp, Homo sapiens
cactgtcagtgggaa

SEQ ID NO: 404598 - DNA, 15 bp, Homo sapiens
acactgtcagtggga

SEQ ID NO: 404599 - DNA, 15 bp, Homo sapiens
tacactgtcagtggg

SEQ ID NO: 404600 - DNA, 15 bp, Homo sapiens
atacactgtcagtgg

SEQ ID NO: 404601 - DNA, 15 bp, Homo sapiens
tatacactgtcagtg

SEQ ID NO: 404602 - DNA, 15 bp, Homo sapiens
ttatacactgtcagt

SEQ ID NO: 404603 - DNA, 15 bp, Homo sapiens
cttatacactgtcag

SEQ ID NO: 404604 - DNA, 15 bp, Homo sapiens
acttatacactgtca

SEQ ID NO: 404605 - DNA, 15 bp, Homo sapiens
tacttatacactgtc

SEQ ID NO: 404606 - DNA, 15 bp, Homo sapiens
atacttatacactgt

SEQ ID NO: 404607 - DNA, 15 bp, Homo sapiens
aatacttatacactg

SEQ ID NO: 404608 - DNA, 15 bp, Homo sapiens
gaatacttatacact

SEQ ID NO: 404609 - DNA, 15 bp, Homo sapiens
ggaatacttatacac

SEQ ID NO: 404610 - DNA, 15 bp, Homo sapiens
gggaatacttataca

SEQ ID NO: 404611 - DNA, 15 bp, Homo sapiens
agggaatacttatac

SEQ ID NO: 404612 - DNA, 15 bp, Homo sapiens
aagggaatacttata

SEQ ID NO: 404613 - DNA, 15 bp, Homo sapiens
aaagggaatacttat

SEQ ID NO: 404614 - DNA, 15 bp, Homo sapiens
aaaagggaatactta

SEQ ID NO: 404615 - DNA, 15 bp, Homo sapiens
gaaaagggaatactt

SEQ ID NO: 404616 - DNA, 15 bp, Homo sapiens
agaaaagggaatact

SEQ ID NO: 404617 - DNA, 15 bp, Homo sapiens
gagaaaagggaatac

SEQ ID NO: 404618 - DNA, 15 bp, Homo sapiens
agagaaaagggaata

SEQ ID NO: 404619 - DNA, 15 bp, Homo sapiens
gagagaaaagggaat

SEQ ID NO: 404620 - DNA, 15 bp, Homo sapiens
ggagagaaaagggaa

SEQ ID NO: 404621 - DNA, 15 bp, Homo sapiens
tggagagaaaaggga

SEQ ID NO: 404622 - DNA, 15 bp, Homo sapiens
ctggagagaaaaggg

SEQ ID NO: 404623 - DNA, 15 bp, Homo sapiens
gctggagagaaaagg

SEQ ID NO: 404624 - DNA, 15 bp, Homo sapiens
ggctggagagaaaag

SEQ ID NO: 404625 - DNA, 15 bp, Homo sapiens
aggctggagagaaaa

SEQ ID NO: 404626 - DNA, 15 bp, Homo sapiens
gaggctggagagaaa

SEQ ID NO: 404627 - DNA, 15 bp, Homo sapiens
tgaggctggagagaa

SEQ ID NO: 404628 - DNA, 15 bp, Homo sapiens
gtgaggctggagaga

SEQ ID NO: 404629 - DNA, 15 bp, Homo sapiens
ggtgaggctggagag

SEQ ID NO: 404630 - DNA, 15 bp, Homo sapiens
tggtgaggctggaga

SEQ ID NO: 404631 - DNA, 15 bp, Homo sapiens
ttggtgaggctggag

SEQ ID NO: 404632 - DNA, 15 bp, Homo sapiens
gttggtgaggctgga

SEQ ID NO: 404633 - DNA, 15 bp, Homo sapiens
cgttggtgaggctgg

SEQ ID NO: 404634 - DNA, 15 bp, Homo sapiens
acgttggtgaggctg

SEQ ID NO: 404635 - DNA, 15 bp, Homo sapiens
gacgttggtgaggct

SEQ ID NO: 404636 - DNA, 15 bp, Homo sapiens
agacgttggtgaggc

SEQ ID NO: 404637 - DNA, 15 bp, Homo sapiens
cagacgttggtgagg

SEQ ID NO: 404638 - DNA, 15 bp, Homo sapiens
acagacgttggtgag

SEQ ID NO: 404639 - DNA, 15 bp, Homo sapiens
aacagacgttggtga

SEQ ID NO: 404640 - DNA, 15 bp, Homo sapiens
aaacagacgttggtg

SEQ ID NO: 404641 - DNA, 15 bp, Homo sapiens
aaaacagacgttggt

SEQ ID NO: 404642 - DNA, 15 bp, Homo sapiens
aaaaacagacgttgg

SEQ ID NO: 404643 - DNA, 15 bp, Homo sapiens
caaaaacagacgttg

SEQ ID NO: 404644 - DNA, 15 bp, Homo sapiens
acaaaaacagacgtt

SEQ ID NO: 404645 - DNA, 15 bp, Homo sapiens
aacaaaaacagacgt

SEQ ID NO: 404646 - DNA, 15 bp, Homo sapiens
taacaaaaacagacg

SEQ ID NO: 404647 - DNA, 15 bp, Homo sapiens
ataacaaaaacagac

SEQ ID NO: 404648 - DNA, 15 bp, Homo sapiens
aataacaaaaacaga

SEQ ID NO: 404649 - DNA, 15 bp, Homo sapiens
caataacaaaaacag

SEQ ID NO: 404650 - DNA, 15 bp, Homo sapiens
acaataacaaaaaca

SEQ ID NO: 404651 - DNA, 15 bp, Homo sapiens
aacaataacaaaaac

SEQ ID NO: 404652 - DNA, 15 bp, Homo sapiens
aaacaataacaaaaa

SEQ ID NO: 404653 - DNA, 15 bp, Homo sapiens
aaaacaataacaaaa

SEQ ID NO: 404654 - DNA, 15 bp, Homo sapiens
aaaaacaataacaaa

SEQ ID NO: 404655 - DNA, 15 bp, Homo sapiens
caaaaacaataacaa

SEQ ID NO: 404656 - DNA, 15 bp, Homo sapiens
acaaaaacaataaca

SEQ ID NO: 404657 - DNA, 15 bp, Homo sapiens
aacaaaaacaataac

SEQ ID NO: 404658 - DNA, 15 bp, Homo sapiens
caacaaaaacaataa

SEQ ID NO: 404659 - DNA, 15 bp, Homo sapiens
acaacaaaaacaata

SEQ ID NO: 404660 - DNA, 15 bp, Homo sapiens
aacaacaaaaacaat

SEQ ID NO: 404661 - DNA, 15 bp, Homo sapiens
caacaacaaaaacaa

SEQ ID NO: 404662 - DNA, 15 bp, Homo sapiens
acaacaacaaaaaca

SEQ ID NO: 404663 - DNA, 15 bp, Homo sapiens
aacaacaacaaaaac

SEQ ID NO: 404664 - DNA, 15 bp, Homo sapiens
caacaacaacaaaaa

SEQ ID NO: 404665 - DNA, 15 bp, Homo sapiens
aaacaacaacaacaa

SEQ ID NO: 404666 - DNA, 15 bp, Homo sapiens
aaaacaacaacaaca

SEQ ID NO: 404667 - DNA, 15 bp, Homo sapiens
taaaacaacaacaac

SEQ ID NO: 404668 - DNA, 15 bp, Homo sapiens
gtaaaacaacaacaa

SEQ ID NO: 404669 - DNA, 15 bp, Homo sapiens
agtaaaacaacaaca

SEQ ID NO: 404670 - DNA, 15 bp, Homo sapiens
gagtaaaacaacaac

SEQ ID NO: 404671 - DNA, 15 bp, Homo sapiens
agagtaaaacaacaa

SEQ ID NO: 404672 - DNA, 15 bp, Homo sapiens
aagagtaaaacaaca

SEQ ID NO: 404673 - DNA, 15 bp, Homo sapiens
aaagagtaaaacaac

SEQ ID NO: 404674 - DNA, 15 bp, Homo sapiens
taaagagtaaaacaa

SEQ ID NO: 404675 - DNA, 15 bp, Homo sapiens
ctaaagagtaaaaca

SEQ ID NO: 404676 - DNA, 15 bp, Homo sapiens
actaaagagtaaaac

SEQ ID NO: 404677 - DNA, 15 bp, Homo sapiens
tactaaagagtaaaa

SEQ ID NO: 404678 - DNA, 15 bp, Homo sapiens
ttactaaagagtaaa

SEQ ID NO: 404679 - DNA, 15 bp, Homo sapiens
attactaaagagtaa

SEQ ID NO: 404680 - DNA, 15 bp, Homo sapiens
tattactaaagagta

SEQ ID NO: 404681 - DNA, 15 bp, Homo sapiens
ctattactaaagagt

SEQ ID NO: 404682 - DNA, 15 bp, Homo sapiens
gctattactaaagag

SEQ ID NO: 404683 - DNA, 15 bp, Homo sapiens
ggctattactaaaga

SEQ ID NO: 404684 - DNA, 15 bp, Homo sapiens
tggctattactaaag

SEQ ID NO: 404685 - DNA, 15 bp, Homo sapiens
atggctattactaaa

SEQ ID NO: 404686 - DNA, 15 bp, Homo sapiens
aatggctattactaa

SEQ ID NO: 404687 - DNA, 15 bp, Homo sapiens
gaatggctattacta

SEQ ID NO: 404688 - DNA, 15 bp, Homo sapiens
agaatggctattact

SEQ ID NO: 404689 - DNA, 15 bp, Homo sapiens
cagaatggctattac

SEQ ID NO: 404690 - DNA, 15 bp, Homo sapiens
tcagaatggctatta

SEQ ID NO: 404691 - DNA, 15 bp, Homo sapiens
gtcagaatggctatt

SEQ ID NO: 404692 - DNA, 15 bp, Homo sapiens
tgtcagaatggctat

SEQ ID NO: 404693 - DNA, 15 bp, Homo sapiens
ttgtcagaatggcta

SEQ ID NO: 404694 - DNA, 15 bp, Homo sapiens
attgtcagaatggct

SEQ ID NO: 404695 - DNA, 15 bp, Homo sapiens
aattgtcagaatggc

SEQ ID NO: 404696 - DNA, 15 bp, Homo sapiens
aaattgtcagaatgg

SEQ ID NO: 404697 - DNA, 15 bp, Homo sapiens
aaaattgtcagaatg

SEQ ID NO: 404698 - DNA, 15 bp, Homo sapiens
caaaattgtcagaat

SEQ ID NO: 404699 - DNA, 15 bp, Homo sapiens
tcaaaattgtcagaa

SEQ ID NO: 404700 - DNA, 15 bp, Homo sapiens
ctcaaaattgtcaga

SEQ ID NO: 404701 - DNA, 15 bp, Homo sapiens
tctcaaaattgtcag

SEQ ID NO: 404702 - DNA, 15 bp, Homo sapiens
ttctcaaaattgtca

SEQ ID NO: 404703 - DNA, 15 bp, Homo sapiens
cttctcaaaattgtc

SEQ ID NO: 404704 - DNA, 15 bp, Homo sapiens
ccttctcaaaattgt

SEQ ID NO: 404705 - DNA, 15 bp, Homo sapiens
accttctcaaaattg

SEQ ID NO: 404706 - DNA, 15 bp, Homo sapiens
taccttctcaaaatt

SEQ ID NO: 404707 - DNA, 15 bp, Homo sapiens
ataccttctcaaaat

SEQ ID NO: 404708 - DNA, 15 bp, Homo sapiens
gataccttctcaaaa

SEQ ID NO: 404709 - DNA, 15 bp, Homo sapiens
agataccttctcaaa

SEQ ID NO: 404710 - DNA, 15 bp, Homo sapiens
gagataccttctcaa

SEQ ID NO: 404711 - DNA, 15 bp, Homo sapiens
tgagataccttctca

SEQ ID NO: 404712 - DNA, 15 bp, Homo sapiens
atgagataccttctc

SEQ ID NO: 404713 - DNA, 15 bp, Homo sapiens
aatgagataccttct

SEQ ID NO: 404714 - DNA, 15 bp, Homo sapiens
caatgagataccttc

SEQ ID NO: 404715 - DNA, 15 bp, Homo sapiens
acaatgagatacctt

SEQ ID NO: 404716 - DNA, 15 bp, Homo sapiens
cacaatgagatacct

SEQ ID NO: 404717 - DNA, 15 bp, Homo sapiens
tcacaatgagatacc

SEQ ID NO: 404718 - DNA, 15 bp, Homo sapiens
atcacaatgagatac

SEQ ID NO: 404719 - DNA, 15 bp, Homo sapiens
aatcacaatgagata

SEQ ID NO: 404720 - DNA, 15 bp, Homo sapiens
aaatcacaatgagat

SEQ ID NO: 404721 - DNA, 15 bp, Homo sapiens
aaaatcacaatgaga

SEQ ID NO: 404722 - DNA, 15 bp, Homo sapiens
caaaatcacaatgag

SEQ ID NO: 404723 - DNA, 15 bp, Homo sapiens
tcaaaatcacaatga

SEQ ID NO: 404724 - DNA, 15 bp, Homo sapiens
atcaaaatcacaatg

SEQ ID NO: 404725 - DNA, 15 bp, Homo sapiens
aatcaaaatcacaat

SEQ ID NO: 404726 - DNA, 15 bp, Homo sapiens
aaatcaaaatcacaa

SEQ ID NO: 404727 - DNA, 15 bp, Homo sapiens
caaatcaaaatcaca

SEQ ID NO: 404728 - DNA, 15 bp, Homo sapiens
gcaaatcaaaatcac

SEQ ID NO: 404729 - DNA, 15 bp, Homo sapiens
tgcaaatcaaaatca

SEQ ID NO: 404730 - DNA, 15 bp, Homo sapiens
atgcaaatcaaaatc

SEQ ID NO: 404731 - DNA, 15 bp, Homo sapiens
aatgcaaatcaaaat

SEQ ID NO: 404732 - DNA, 15 bp, Homo sapiens
gtcagagaaatgcaa

SEQ ID NO: 404733 - DNA, 15 bp, Homo sapiens
cgtcagagaaatgca

SEQ ID NO: 404734 - DNA, 15 bp, Homo sapiens
tcgtcagagaaatgc

SEQ ID NO: 404735 - DNA, 15 bp, Homo sapiens
atcgtcagagaaatg

SEQ ID NO: 404736 - DNA, 15 bp, Homo sapiens
aatcgtcagagaaat

SEQ ID NO: 404737 - DNA, 15 bp, Homo sapiens
taatcgtcagagaaa

SEQ ID NO: 404738 - DNA, 15 bp, Homo sapiens
ctaatcgtcagagaa

SEQ ID NO: 404739 - DNA, 15 bp, Homo sapiens
actaatcgtcagaga

SEQ ID NO: 404740 - DNA, 15 bp, Homo sapiens
cactaatcgtcagag

SEQ ID NO: 404741 - DNA, 15 bp, Homo sapiens
tcactaatcgtcaga

SEQ ID NO: 404742 - DNA, 15 bp, Homo sapiens
atcactaatcgtcag

SEQ ID NO: 404743 - DNA, 15 bp, Homo sapiens
catcactaatcgtca

SEQ ID NO: 404744 - DNA, 15 bp, Homo sapiens
gcatcactaatcgtc

SEQ ID NO: 404745 - DNA, 15 bp, Homo sapiens
agcatcactaatcgt

SEQ ID NO: 404746 - DNA, 15 bp, Homo sapiens
cagcatcactaatcg

SEQ ID NO: 404747 - DNA, 15 bp, Homo sapiens
tcagcatcactaatc

SEQ ID NO: 404748 - DNA, 15 bp, Homo sapiens
ctcagcatcactaat

SEQ ID NO: 404749 - DNA, 15 bp, Homo sapiens
gctcagcatcactaa

SEQ ID NO: 404750 - DNA, 15 bp, Homo sapiens
tgctcagcatcacta

SEQ ID NO: 404751 - DNA, 15 bp, Homo sapiens
atgctcagcatcact

SEQ ID NO: 404752 - DNA, 15 bp, Homo sapiens
aatgctcagcatcac

SEQ ID NO: 404753 - DNA, 15 bp, Homo sapiens
aaatgctcagcatca

SEQ ID NO: 404754 - DNA, 15 bp, Homo sapiens
aaaatgctcagcatc

SEQ ID NO: 404755 - DNA, 15 bp, Homo sapiens
aaaaatgctcagcat

SEQ ID NO: 404756 - DNA, 15 bp, Homo sapiens
aaaaaatgctcagca

SEQ ID NO: 404757 - DNA, 15 bp, Homo sapiens
gaaaaaatgctcagc

SEQ ID NO: 404758 - DNA, 15 bp, Homo sapiens
tgaaaaaatgctcag

SEQ ID NO: 404759 - DNA, 15 bp, Homo sapiens
gtgaaaaaatgctca

SEQ ID NO: 404760 - DNA, 15 bp, Homo sapiens
tgtgaaaaaatgctc

SEQ ID NO: 404761 - DNA, 15 bp, Homo sapiens
atgtgaaaaaatgct

SEQ ID NO: 404762 - DNA, 15 bp, Homo sapiens
catgtgaaaaaatgc

SEQ ID NO: 404763 - DNA, 15 bp, Homo sapiens
acatgtgaaaaaatg

SEQ ID NO: 404764 - DNA, 15 bp, Homo sapiens
aacatgtgaaaaaat

SEQ ID NO: 404765 - DNA, 15 bp, Homo sapiens
aaacatgtgaaaaaa

SEQ ID NO: 404766 - DNA, 15 bp, Homo sapiens
caaacatgtgaaaaa

SEQ ID NO: 404767 - DNA, 15 bp, Homo sapiens
acaaacatgtgaaaa

SEQ ID NO: 404768 - DNA, 15 bp, Homo sapiens
gacaaacatgtgaaa

SEQ ID NO: 404769 - DNA, 15 bp, Homo sapiens
cgacaaacatgtgaa

SEQ ID NO: 404770 - DNA, 15 bp, Homo sapiens
ccgacaaacatgtga

SEQ ID NO: 404771 - DNA, 15 bp, Homo sapiens
gccgacaaacatgtg

SEQ ID NO: 404772 - DNA, 15 bp, Homo sapiens
ggccgacaaacatgt

SEQ ID NO: 404773 - DNA, 15 bp, Homo sapiens
tggccgacaaacatg

SEQ ID NO: 404774 - DNA, 15 bp, Homo sapiens
gtggccgacaaacat

SEQ ID NO: 404775 - DNA, 15 bp, Homo sapiens
agtggccgacaaaca

SEQ ID NO: 404776 - DNA, 15 bp, Homo sapiens
cagtggccgacaaac

SEQ ID NO: 404777 - DNA, 15 bp, Homo sapiens
ccagtggccgacaaa

SEQ ID NO: 404778 - DNA, 15 bp, Homo sapiens
accagtggccgacaa

SEQ ID NO: 404779 - DNA, 15 bp, Homo sapiens
taccagtggccgaca

SEQ ID NO: 404780 - DNA, 15 bp, Homo sapiens
ataccagtggccgac

SEQ ID NO: 404781 - DNA, 15 bp, Homo sapiens
cataccagtggccga

SEQ ID NO: 404782 - DNA, 15 bp, Homo sapiens
acataccagtggccg

SEQ ID NO: 404783 - DNA, 15 bp, Homo sapiens
gacataccagtggcc

SEQ ID NO: 404784 - DNA, 15 bp, Homo sapiens
agacataccagtggc

SEQ ID NO: 404785 - DNA, 15 bp, Homo sapiens
aagacataccagtgg

SEQ ID NO: 404786 - DNA, 15 bp, Homo sapiens
gaagacataccagtg

SEQ ID NO: 404787 - DNA, 15 bp, Homo sapiens
agaagacataccagt

SEQ ID NO: 404788 - DNA, 15 bp, Homo sapiens
aagaagacataccag

SEQ ID NO: 404789 - DNA, 15 bp, Homo sapiens
aaagaagacatacca

SEQ ID NO: 404790 - DNA, 15 bp, Homo sapiens
aaaagaagacatacc

SEQ ID NO: 404791 - DNA, 15 bp, Homo sapiens
ccttctcaaaagaag

SEQ ID NO: 404792 - DNA, 15 bp, Homo sapiens
tccttctcaaaagaa

SEQ ID NO: 404793 - DNA, 15 bp, Homo sapiens
atccttctcaaaaga

SEQ ID NO: 404794 - DNA, 15 bp, Homo sapiens
gatccttctcaaaag

SEQ ID NO: 404795 - DNA, 15 bp, Homo sapiens
agatccttctcaaaa

SEQ ID NO: 404796 - DNA, 15 bp, Homo sapiens
cagatccttctcaaa

SEQ ID NO: 404797 - DNA, 15 bp, Homo sapiens
acagatccttctcaa

SEQ ID NO: 404798 - DNA, 15 bp, Homo sapiens
aacagatccttctca

SEQ ID NO: 404799 - DNA, 15 bp, Homo sapiens
gaacagatccttctc

SEQ ID NO: 404800 - DNA, 15 bp, Homo sapiens
tgaacagatccttct

SEQ ID NO: 404801 - DNA, 15 bp, Homo sapiens
atgaacagatccttc

SEQ ID NO: 404802 - DNA, 15 bp, Homo sapiens
catgaacagatcctt

SEQ ID NO: 404803 - DNA, 15 bp, Homo sapiens
acatgaacagatcct

SEQ ID NO: 404804 - DNA, 15 bp, Homo sapiens
gacatgaacagatcc

SEQ ID NO: 404805 - DNA, 15 bp, Homo sapiens
ggacatgaacagatc

SEQ ID NO: 404806 - DNA, 15 bp, Homo sapiens
aggacatgaacagat

SEQ ID NO: 404807 - DNA, 15 bp, Homo sapiens
aaggacatgaacaga

SEQ ID NO: 404808 - DNA, 15 bp, Homo sapiens
aaaggacatgaacag

SEQ ID NO: 404809 - DNA, 15 bp, Homo sapiens
caaaggacatgaaca

SEQ ID NO: 404810 - DNA, 15 bp, Homo sapiens
ggcaaaggacatgaa

SEQ ID NO: 404811 - DNA, 15 bp, Homo sapiens
gggcaaaggacatga

SEQ ID NO: 404812 - DNA, 15 bp, Homo sapiens
tgggcaaaggacatg

SEQ ID NO: 404813 - DNA, 15 bp, Homo sapiens
gtgggcaaaggacat

SEQ ID NO: 404814 - DNA, 15 bp, Homo sapiens
agtgggcaaaggaca

SEQ ID NO: 404815 - DNA, 15 bp, Homo sapiens
aagtgggcaaaggac

SEQ ID NO: 404816 - DNA, 15 bp, Homo sapiens
taaaaagtgggcaaa

SEQ ID NO: 404817 - DNA, 15 bp, Homo sapiens
ttaaaaagtgggcaa

SEQ ID NO: 404818 - DNA, 15 bp, Homo sapiens
attaaaaagtgggca

SEQ ID NO: 404819 - DNA, 15 bp, Homo sapiens
tattaaaaagtgggc

SEQ ID NO: 404820 - DNA, 15 bp, Homo sapiens
ctattaaaaagtggg

SEQ ID NO: 404821 - DNA, 15 bp, Homo sapiens
cctattaaaaagtgg

SEQ ID NO: 404822 - DNA, 15 bp, Homo sapiens
ccctattaaaaagtg

SEQ ID NO: 404823 - DNA, 15 bp, Homo sapiens
accctattaaaaagt

SEQ ID NO: 404824 - DNA, 15 bp, Homo sapiens
aaccctattaaaaag

SEQ ID NO: 404825 - DNA, 15 bp, Homo sapiens
caaccctattaaaaa

SEQ ID NO: 404826 - DNA, 15 bp, Homo sapiens
acaaccctattaaaa

SEQ ID NO: 404827 - DNA, 15 bp, Homo sapiens
aacaaccctattaaa

SEQ ID NO: 404828 - DNA, 15 bp, Homo sapiens
aaacaaccctattaa

SEQ ID NO: 404829 - DNA, 15 bp, Homo sapiens
aaaacaaccctatta

SEQ ID NO: 404830 - DNA, 15 bp, Homo sapiens
gaaaacaaccctatt

SEQ ID NO: 404831 - DNA, 15 bp, Homo sapiens
agaaaacaaccctat

SEQ ID NO: 404832 - DNA, 15 bp, Homo sapiens
aagaaaacaacccta

SEQ ID NO: 404833 - DNA, 15 bp, Homo sapiens
gaagaaaacaaccct

SEQ ID NO: 404834 - DNA, 15 bp, Homo sapiens
ggaagaaaacaaccc

SEQ ID NO: 404835 - DNA, 15 bp, Homo sapiens
aggaagaaaacaacc

SEQ ID NO: 404836 - DNA, 15 bp, Homo sapiens
caggaagaaaacaac

SEQ ID NO: 404837 - DNA, 15 bp, Homo sapiens
acaggaagaaaacaa

SEQ ID NO: 404838 - DNA, 15 bp, Homo sapiens
aacaggaagaaaaca

SEQ ID NO: 404839 - DNA, 15 bp, Homo sapiens
caacaggaagaaaac

SEQ ID NO: 404840 - DNA, 15 bp, Homo sapiens
tcaacaggaagaaaa

SEQ ID NO: 404841 - DNA, 15 bp, Homo sapiens
atcaacaggaagaaa

SEQ ID NO: 404842 - DNA, 15 bp, Homo sapiens
aatcaacaggaagaa

SEQ ID NO: 404843 - DNA, 15 bp, Homo sapiens
aaatcaacaggaaga

SEQ ID NO: 404844 - DNA, 15 bp, Homo sapiens
caaatcaacaggaag

SEQ ID NO: 404845 - DNA, 15 bp, Homo sapiens
acaaatcaacaggaa

SEQ ID NO: 404846 - DNA, 15 bp, Homo sapiens
aacaaatcaacagga

SEQ ID NO: 404847 - DNA, 15 bp, Homo sapiens
aaacaaatcaacagg

SEQ ID NO: 404848 - DNA, 15 bp, Homo sapiens
taaacaaatcaacag

SEQ ID NO: 404849 - DNA, 15 bp, Homo sapiens
ttaaacaaatcaaca

SEQ ID NO: 404850 - DNA, 15 bp, Homo sapiens
tttaaacaaatcaac

SEQ ID NO: 404851 - DNA, 15 bp, Homo sapiens
atttaaacaaatcaa

SEQ ID NO: 404852 - DNA, 15 bp, Homo sapiens
aatttaaacaaatca

SEQ ID NO: 404853 - DNA, 15 bp, Homo sapiens
gaatttaaacaaatc

SEQ ID NO: 404854 - DNA, 15 bp, Homo sapiens
ggaatttaaacaaat

SEQ ID NO: 404855 - DNA, 15 bp, Homo sapiens
aggaatttaaacaaa

SEQ ID NO: 404856 - DNA, 15 bp, Homo sapiens
aaggaatttaaacaa

SEQ ID NO: 404857 - DNA, 15 bp, Homo sapiens
taaggaatttaaaca

SEQ ID NO: 404858 - DNA, 15 bp, Homo sapiens
ataaggaatttaaac

SEQ ID NO: 404859 - DNA, 15 bp, Homo sapiens
tataaggaatttaaa

SEQ ID NO: 404860 - DNA, 15 bp, Homo sapiens
ctataaggaatttaa

SEQ ID NO: 404861 - DNA, 15 bp, Homo sapiens
tctataaggaattta

SEQ ID NO: 404862 - DNA, 15 bp, Homo sapiens
ttctataaggaattt

SEQ ID NO: 404863 - DNA, 15 bp, Homo sapiens
attctataaggaatt

SEQ ID NO: 404864 - DNA, 15 bp, Homo sapiens
gattctataaggaat

SEQ ID NO: 404865 - DNA, 15 bp, Homo sapiens
agattctataaggaa

SEQ ID NO: 404866 - DNA, 15 bp, Homo sapiens
cagattctataagga

SEQ ID NO: 404867 - DNA, 15 bp, Homo sapiens
ccagattctataagg

SEQ ID NO: 404868 - DNA, 15 bp, Homo sapiens
tccagattctataag

SEQ ID NO: 404869 - DNA, 15 bp, Homo sapiens
atccagattctataa

SEQ ID NO: 404870 - DNA, 15 bp, Homo sapiens
tatccagattctata

SEQ ID NO: 404871 - DNA, 15 bp, Homo sapiens
atatccagattctat

SEQ ID NO: 404872 - DNA, 15 bp, Homo sapiens
gatatccagattcta

SEQ ID NO: 404873 - DNA, 15 bp, Homo sapiens
tgatatccagattct

SEQ ID NO: 404874 - DNA, 15 bp, Homo sapiens
ctgatatccagattc

SEQ ID NO: 404875 - DNA, 15 bp, Homo sapiens
actgatatccagatt

SEQ ID NO: 404876 - DNA, 15 bp, Homo sapiens
gactgatatccagat

SEQ ID NO: 404877 - DNA, 15 bp, Homo sapiens
ggactgatatccaga

SEQ ID NO: 404878 - DNA, 15 bp, Homo sapiens
aggactgatatccag

SEQ ID NO: 404879 - DNA, 15 bp, Homo sapiens
aaggactgatatcca

SEQ ID NO: 404880 - DNA, 15 bp, Homo sapiens
aaaggactgatatcc

SEQ ID NO: 404881 - DNA, 15 bp, Homo sapiens
caaaggactgatatc

SEQ ID NO: 404882 - DNA, 15 bp, Homo sapiens
acaaaggactgatat

SEQ ID NO: 404883 - DNA, 15 bp, Homo sapiens
gacaaaggactgata

SEQ ID NO: 404884 - DNA, 15 bp, Homo sapiens
tgacaaaggactgat

SEQ ID NO: 404885 - DNA, 15 bp, Homo sapiens
ctgacaaaggactga

SEQ ID NO: 404886 - DNA, 15 bp, Homo sapiens
tctgacaaaggactg

SEQ ID NO: 404887 - DNA, 15 bp, Homo sapiens
catctgacaaaggac

SEQ ID NO: 404888 - DNA, 15 bp, Homo sapiens
gcatctgacaaagga

SEQ ID NO: 404889 - DNA, 15 bp, Homo sapiens
ctgcatctgacaaag

SEQ ID NO: 404890 - DNA, 15 bp, Homo sapiens
tctgcatctgacaaa

SEQ ID NO: 404891 - DNA, 15 bp, Homo sapiens
ctctgcatctgacaa

SEQ ID NO: 404892 - DNA, 15 bp, Homo sapiens
actctgcatctgaca

SEQ ID NO: 404893 - DNA, 15 bp, Homo sapiens
aactctgcatctgac

SEQ ID NO: 404894 - DNA, 15 bp, Homo sapiens
aaactctgcatctga

SEQ ID NO: 404895 - DNA, 15 bp, Homo sapiens
caaactctgcatctg

SEQ ID NO: 404896 - DNA, 15 bp, Homo sapiens
gcaaactctgcatct

SEQ ID NO: 404897 - DNA, 15 bp, Homo sapiens
tgcaaactctgcatc

SEQ ID NO: 404898 - DNA, 15 bp, Homo sapiens
ttgcaaactctgcat

SEQ ID NO: 404899 - DNA, 15 bp, Homo sapiens
tttgcaaactctgca

SEQ ID NO: 404900 - DNA, 15 bp, Homo sapiens
atttgcaaactctgc

SEQ ID NO: 404901 - DNA, 15 bp, Homo sapiens
tatttgcaaactctg

SEQ ID NO: 404902 - DNA, 15 bp, Homo sapiens
atatttgcaaactct

SEQ ID NO: 404903 - DNA, 15 bp, Homo sapiens
aatatttgcaaactc

SEQ ID NO: 404904 - DNA, 15 bp, Homo sapiens
aaatatttgcaaact

SEQ ID NO: 404905 - DNA, 15 bp, Homo sapiens
aaaatatttgcaaac

SEQ ID NO: 404906 - DNA, 15 bp, Homo sapiens
caaaatatttgcaaa

SEQ ID NO: 404907 - DNA, 15 bp, Homo sapiens
acaaaatatttgcaa

SEQ ID NO: 404908 - DNA, 15 bp, Homo sapiens
gacaaaatatttgca

SEQ ID NO: 404909 - DNA, 15 bp, Homo sapiens
ggacaaaatatttgc

SEQ ID NO: 404910 - DNA, 15 bp, Homo sapiens
gggacaaaatatttg

SEQ ID NO: 404911 - DNA, 15 bp, Homo sapiens
tgggacaaaatattt

SEQ ID NO: 404912 - DNA, 15 bp, Homo sapiens
atgggacaaaatatt

SEQ ID NO: 404913 - DNA, 15 bp, Homo sapiens
aatgggacaaaatat

SEQ ID NO: 404914 - DNA, 15 bp, Homo sapiens
gaatgggacaaaata

SEQ ID NO: 404915 - DNA, 15 bp, Homo sapiens
agaatgggacaaaat

SEQ ID NO: 404916 - DNA, 15 bp, Homo sapiens
gagaatgggacaaaa

SEQ ID NO: 404917 - DNA, 15 bp, Homo sapiens
agagaatgggacaaa

SEQ ID NO: 404918 - DNA, 15 bp, Homo sapiens
tagagaatgggacaa

SEQ ID NO: 404919 - DNA, 15 bp, Homo sapiens
ctagagaatgggaca

SEQ ID NO: 404920 - DNA, 15 bp, Homo sapiens
cctagagaatgggac

SEQ ID NO: 404921 - DNA, 15 bp, Homo sapiens
acctagagaatggga

SEQ ID NO: 404922 - DNA, 15 bp, Homo sapiens
aacctagagaatggg

SEQ ID NO: 404923 - DNA, 15 bp, Homo sapiens
taacctagagaatgg

SEQ ID NO: 404924 - DNA, 15 bp, Homo sapiens
gtaacctagagaatg

SEQ ID NO: 404925 - DNA, 15 bp, Homo sapiens
ggtaacctagagaat

SEQ ID NO: 404926 - DNA, 15 bp, Homo sapiens
aggtaacctagagaa

SEQ ID NO: 404927 - DNA, 15 bp, Homo sapiens
caggtaacctagaga

SEQ ID NO: 404928 - DNA, 15 bp, Homo sapiens
gcaggtaacctagag

SEQ ID NO: 404929 - DNA, 15 bp, Homo sapiens
agcaggtaacctaga

SEQ ID NO: 404930 - DNA, 15 bp, Homo sapiens
aagcaggtaacctag

SEQ ID NO: 404931 - DNA, 15 bp, Homo sapiens
aaagcaggtaaccta

SEQ ID NO: 404932 - DNA, 15 bp, Homo sapiens
gaaagcaggtaacct

SEQ ID NO: 404933 - DNA, 15 bp, Homo sapiens
agaaagcaggtaacc

SEQ ID NO: 404934 - DNA, 15 bp, Homo sapiens
gagaaagcaggtaac

SEQ ID NO: 404935 - DNA, 15 bp, Homo sapiens
agagaaagcaggtaa

SEQ ID NO: 404936 - DNA, 15 bp, Homo sapiens
cagagaaagcaggta

SEQ ID NO: 404937 - DNA, 15 bp, Homo sapiens
acagagaaagcaggt

SEQ ID NO: 404938 - DNA, 15 bp, Homo sapiens
aacagagaaagcagg

SEQ ID NO: 404939 - DNA, 15 bp, Homo sapiens
caacagagaaagcag

SEQ ID NO: 404940 - DNA, 15 bp, Homo sapiens
tcaacagagaaagca

SEQ ID NO: 404941 - DNA, 15 bp, Homo sapiens
atcaacagagaaagc

SEQ ID NO: 404942 - DNA, 15 bp, Homo sapiens
tatcaacagagaaag

SEQ ID NO: 404943 - DNA, 15 bp, Homo sapiens
ctatcaacagagaaa

SEQ ID NO: 404944 - DNA, 15 bp, Homo sapiens
actatcaacagagaa

SEQ ID NO: 404945 - DNA, 15 bp, Homo sapiens
aactatcaacagaga

SEQ ID NO: 404946 - DNA, 15 bp, Homo sapiens
aaactatcaacagag

SEQ ID NO: 404947 - DNA, 15 bp, Homo sapiens
gaaactatcaacaga

SEQ ID NO: 404948 - DNA, 15 bp, Homo sapiens
agaaactatcaacag

SEQ ID NO: 404949 - DNA, 15 bp, Homo sapiens
aagaaactatcaaca

SEQ ID NO: 404950 - DNA, 15 bp, Homo sapiens
aaagaaactatcaac

SEQ ID NO: 404951 - DNA, 15 bp, Homo sapiens
aaaagaaactatcaa

SEQ ID NO: 404952 - DNA, 15 bp, Homo sapiens
acaaaagaaactatc

SEQ ID NO: 404953 - DNA, 15 bp, Homo sapiens
aacaaaagaaactat

SEQ ID NO: 404954 - DNA, 15 bp, Homo sapiens
caacaaaagaaacta

SEQ ID NO: 404955 - DNA, 15 bp, Homo sapiens
acaacaaaagaaact

SEQ ID NO: 404956 - DNA, 15 bp, Homo sapiens
tacaacaaaagaaac

SEQ ID NO: 404957 - DNA, 15 bp, Homo sapiens
gtacaacaaaagaaa

SEQ ID NO: 404958 - DNA, 15 bp, Homo sapiens
tgtacaacaaaagaa

SEQ ID NO: 404959 - DNA, 15 bp, Homo sapiens
ctgtacaacaaaaga

SEQ ID NO: 404960 - DNA, 15 bp, Homo sapiens
tctgtacaacaaaag

SEQ ID NO: 404961 - DNA, 15 bp, Homo sapiens
ttctgtacaacaaaa

SEQ ID NO: 404962 - DNA, 15 bp, Homo sapiens
cttctgtacaacaaa

SEQ ID NO: 404963 - DNA, 15 bp, Homo sapiens
gcttctgtacaacaa

SEQ ID NO: 404964 - DNA, 15 bp, Homo sapiens
agcttctgtacaaca

SEQ ID NO: 404965 - DNA, 15 bp, Homo sapiens
gagcttctgtacaac

SEQ ID NO: 404966 - DNA, 15 bp, Homo sapiens
agagcttctgtacaa

SEQ ID NO: 404967 - DNA, 15 bp, Homo sapiens
ctaaagagcttctgt

SEQ ID NO: 404968 - DNA, 15 bp, Homo sapiens
ttaattaaactaaag

SEQ ID NO: 404969 - DNA, 15 bp, Homo sapiens
cttaattaaactaaa

SEQ ID NO: 404970 - DNA, 15 bp, Homo sapiens
acttaattaaactaa

SEQ ID NO: 404971 - DNA, 15 bp, Homo sapiens
gacttaattaaacta

SEQ ID NO: 404972 - DNA, 15 bp, Homo sapiens
ggacttaattaaact

SEQ ID NO: 404973 - DNA, 15 bp, Homo sapiens
gggacttaattaaac

SEQ ID NO: 404974 - DNA, 15 bp, Homo sapiens
tgggacttaattaaa

SEQ ID NO: 404975 - DNA, 15 bp, Homo sapiens
atgggacttaattaa

SEQ ID NO: 404976 - DNA, 15 bp, Homo sapiens
aatgggacttaatta

SEQ ID NO: 404977 - DNA, 15 bp, Homo sapiens
aaatgggacttaatt

SEQ ID NO: 404978 - DNA, 15 bp, Homo sapiens
caaatgggacttaat

SEQ ID NO: 404979 - DNA, 15 bp, Homo sapiens
acaaatgggacttaa

SEQ ID NO: 404980 - DNA, 15 bp, Homo sapiens
gacaaatgggactta

SEQ ID NO: 404981 - DNA, 15 bp, Homo sapiens
agacaaatgggactt

SEQ ID NO: 404982 - DNA, 15 bp, Homo sapiens
tagacaaatgggact

SEQ ID NO: 404983 - DNA, 15 bp, Homo sapiens
atagacaaatgggac

SEQ ID NO: 404984 - DNA, 15 bp, Homo sapiens
aatagacaaatggga

SEQ ID NO: 404985 - DNA, 15 bp, Homo sapiens
aaatagacaaatggg

SEQ ID NO: 404986 - DNA, 15 bp, Homo sapiens
aaaatagacaaatgg

SEQ ID NO: 404987 - DNA, 15 bp, Homo sapiens
aaaaatagacaaatg

SEQ ID NO: 404988 - DNA, 15 bp, Homo sapiens
aaaaaatagacaaat

SEQ ID NO: 404989 - DNA, 15 bp, Homo sapiens
taaaaaatagacaaa

SEQ ID NO: 404990 - DNA, 15 bp, Homo sapiens
ataaaaaatagacaa

SEQ ID NO: 404991 - DNA, 15 bp, Homo sapiens
aataaaaaatagaca

SEQ ID NO: 404992 - DNA, 15 bp, Homo sapiens
aaataaaaaatagac

SEQ ID NO: 404993 - DNA, 15 bp, Homo sapiens
aaaataaaaaataga

SEQ ID NO: 404994 - DNA, 15 bp, Homo sapiens
gaaaataaaaaatag

SEQ ID NO: 404995 - DNA, 15 bp, Homo sapiens
agaaaataaaaaata

SEQ ID NO: 404996 - DNA, 15 bp, Homo sapiens
aagaaaataaaaaat

SEQ ID NO: 404997 - DNA, 15 bp, Homo sapiens
caagaaaataaaaaa

SEQ ID NO: 404998 - DNA, 15 bp, Homo sapiens
gcaagaaaataaaaa

SEQ ID NO: 404999 - DNA, 15 bp, Homo sapiens
tgcaagaaaataaaa

SEQ ID NO: 405000 - DNA, 15 bp, Homo sapiens
atgcaagaaaataaa

SEQ ID NO: 405001 - DNA, 15 bp, Homo sapiens
aatgcaagaaaataa

SEQ ID NO: 405002 - DNA, 15 bp, Homo sapiens
aaatgcaagaaaata

SEQ ID NO: 405003 - DNA, 15 bp, Homo sapiens
caaatgcaagaaaat

SEQ ID NO: 405004 - DNA, 15 bp, Homo sapiens
gcaaatgcaagaaaa

SEQ ID NO: 405005 - DNA, 15 bp, Homo sapiens
agcaaatgcaagaaa

SEQ ID NO: 405006 - DNA, 15 bp, Homo sapiens
aagcaaatgcaagaa

SEQ ID NO: 405007 - DNA, 15 bp, Homo sapiens
aaagcaaatgcaaga

SEQ ID NO: 405008 - DNA, 15 bp, Homo sapiens
aaaagcaaatgcaag

SEQ ID NO: 405009 - DNA, 15 bp, Homo sapiens
taaaagcaaatgcaa

SEQ ID NO: 405010 - DNA, 15 bp, Homo sapiens
ctaaaagcaaatgca

SEQ ID NO: 405011 - DNA, 15 bp, Homo sapiens
cctaaaagcaaatgc

SEQ ID NO: 405012 - DNA, 15 bp, Homo sapiens
ccctaaaagcaaatg

SEQ ID NO: 405013 - DNA, 15 bp, Homo sapiens
accctaaaagcaaat

SEQ ID NO: 405014 - DNA, 15 bp, Homo sapiens
gaccctaaaagcaaa

SEQ ID NO: 405015 - DNA, 15 bp, Homo sapiens
agaccctaaaagcaa

SEQ ID NO: 405016 - DNA, 15 bp, Homo sapiens
aagaccctaaaagca

SEQ ID NO: 405017 - DNA, 15 bp, Homo sapiens
caagaccctaaaagc

SEQ ID NO: 405018 - DNA, 15 bp, Homo sapiens
acaagaccctaaaag

SEQ ID NO: 405019 - DNA, 15 bp, Homo sapiens
aacaagaccctaaaa

SEQ ID NO: 405020 - DNA, 15 bp, Homo sapiens
gaacaagaccctaaa

SEQ ID NO: 405021 - DNA, 15 bp, Homo sapiens
tgaacaagaccctaa

SEQ ID NO: 405022 - DNA, 15 bp, Homo sapiens
ctgaacaagacccta

SEQ ID NO: 405023 - DNA, 15 bp, Homo sapiens
tctgaacaagaccct

SEQ ID NO: 405024 - DNA, 15 bp, Homo sapiens
ttctgaacaagaccc

SEQ ID NO: 405025 - DNA, 15 bp, Homo sapiens
tttctgaacaagacc

SEQ ID NO: 405026 - DNA, 15 bp, Homo sapiens
atttctgaacaagac

SEQ ID NO: 405027 - DNA, 15 bp, Homo sapiens
aatttctgaacaaga

SEQ ID NO: 405028 - DNA, 15 bp, Homo sapiens
gaatttctgaacaag

SEQ ID NO: 405029 - DNA, 15 bp, Homo sapiens
agaatttctgaacaa

SEQ ID NO: 405030 - DNA, 15 bp, Homo sapiens
aagaatttctgaaca

SEQ ID NO: 405031 - DNA, 15 bp, Homo sapiens
aaagaatttctgaac

SEQ ID NO: 405032 - DNA, 15 bp, Homo sapiens
caaagaatttctgaa

SEQ ID NO: 405033 - DNA, 15 bp, Homo sapiens
gcaaagaatttctga

SEQ ID NO: 405034 - DNA, 15 bp, Homo sapiens
ggcaaagaatttctg

SEQ ID NO: 405035 - DNA, 15 bp, Homo sapiens
aggcaaagaatttct

SEQ ID NO: 405036 - DNA, 15 bp, Homo sapiens
taggcaaagaatttc

SEQ ID NO: 405037 - DNA, 15 bp, Homo sapiens
ctaggcaaagaattt

SEQ ID NO: 405038 - DNA, 15 bp, Homo sapiens
cctaggcaaagaatt

SEQ ID NO: 405039 - DNA, 15 bp, Homo sapiens
gcctaggcaaagaat

SEQ ID NO: 405040 - DNA, 15 bp, Homo sapiens
ggcctaggcaaagaa

SEQ ID NO: 405041 - DNA, 15 bp, Homo sapiens
tggcctaggcaaaga

SEQ ID NO: 405042 - DNA, 15 bp, Homo sapiens
ttggcctaggcaaag

SEQ ID NO: 405043 - DNA, 15 bp, Homo sapiens
attggcctaggcaaa

SEQ ID NO: 405044 - DNA, 15 bp, Homo sapiens
cattggcctaggcaa

SEQ ID NO: 405045 - DNA, 15 bp, Homo sapiens
acattggcctaggca

SEQ ID NO: 405046 - DNA, 15 bp, Homo sapiens
gacattggcctaggc

SEQ ID NO: 405047 - DNA, 15 bp, Homo sapiens
agacattggcctagg

SEQ ID NO: 405048 - DNA, 15 bp, Homo sapiens
tagacattggcctag

SEQ ID NO: 405049 - DNA, 15 bp, Homo sapiens
ctagacattggccta

SEQ ID NO: 405050 - DNA, 15 bp, Homo sapiens
tctagacattggcct

SEQ ID NO: 405051 - DNA, 15 bp, Homo sapiens
ttctagacattggcc

SEQ ID NO: 405052 - DNA, 15 bp, Homo sapiens
cttctagacattggc

SEQ ID NO: 405053 - DNA, 15 bp, Homo sapiens
tcttctagacattgg

SEQ ID NO: 405054 - DNA, 15 bp, Homo sapiens
ctcttctagacattg

SEQ ID NO: 405055 - DNA, 15 bp, Homo sapiens
actcttctagacatt

SEQ ID NO: 405056 - DNA, 15 bp, Homo sapiens
tactcttctagacat

SEQ ID NO: 405057 - DNA, 15 bp, Homo sapiens
atactcttctagaca

SEQ ID NO: 405058 - DNA, 15 bp, Homo sapiens
aatactcttctagac

SEQ ID NO: 405059 - DNA, 15 bp, Homo sapiens
aaatactcttctaga

SEQ ID NO: 405060 - DNA, 15 bp, Homo sapiens
aaaatactcttctag

SEQ ID NO: 405061 - DNA, 15 bp, Homo sapiens
gaaaatactcttcta

SEQ ID NO: 405062 - DNA, 15 bp, Homo sapiens
agaaaatactcttct

SEQ ID NO: 405063 - DNA, 15 bp, Homo sapiens
tagaaaatactcttc

SEQ ID NO: 405064 - DNA, 15 bp, Homo sapiens
ctagaaaatactctt

SEQ ID NO: 405065 - DNA, 15 bp, Homo sapiens
cctagaaaatactct

SEQ ID NO: 405066 - DNA, 15 bp, Homo sapiens
ccctagaaaatactc

SEQ ID NO: 405067 - DNA, 15 bp, Homo sapiens
accctagaaaatact

SEQ ID NO: 405068 - DNA, 15 bp, Homo sapiens
aaccctagaaaatac

SEQ ID NO: 405069 - DNA, 15 bp, Homo sapiens
aaaccctagaaaata

SEQ ID NO: 405070 - DNA, 15 bp, Homo sapiens
gaaaccctagaaaat

SEQ ID NO: 405071 - DNA, 15 bp, Homo sapiens
agaaaccctagaaaa

SEQ ID NO: 405072 - DNA, 15 bp, Homo sapiens
aagaaaccctagaaa

SEQ ID NO: 405073 - DNA, 15 bp, Homo sapiens
gaagaaaccctagaa

SEQ ID NO: 405074 - DNA, 15 bp, Homo sapiens
agaagaaaccctaga

SEQ ID NO: 405075 - DNA, 15 bp, Homo sapiens
tagaagaaaccctag

SEQ ID NO: 405076 - DNA, 15 bp, Homo sapiens
ctagaagaaacccta

SEQ ID NO: 405077 - DNA, 15 bp, Homo sapiens
cctagaagaaaccct

SEQ ID NO: 405078 - DNA, 15 bp, Homo sapiens
tcctagaagaaaccc

SEQ ID NO: 405079 - DNA, 15 bp, Homo sapiens
atcctagaagaaacc

SEQ ID NO: 405080 - DNA, 15 bp, Homo sapiens
aatcctagaagaaac

SEQ ID NO: 405081 - DNA, 15 bp, Homo sapiens
aaatcctagaagaaa

SEQ ID NO: 405082 - DNA, 15 bp, Homo sapiens
aaaatcctagaagaa

SEQ ID NO: 405083 - DNA, 15 bp, Homo sapiens
aaaaatcctagaaga

SEQ ID NO: 405084 - DNA, 15 bp, Homo sapiens
taaaaatcctagaag

SEQ ID NO: 405085 - DNA, 15 bp, Homo sapiens
ataaaaatcctagaa

SEQ ID NO: 405086 - DNA, 15 bp, Homo sapiens
tataaaaatcctaga

SEQ ID NO: 405087 - DNA, 15 bp, Homo sapiens
ctataaaaatcctag

SEQ ID NO: 405088 - DNA, 15 bp, Homo sapiens
actataaaaatccta

SEQ ID NO: 405089 - DNA, 15 bp, Homo sapiens
aactataaaaatcct

SEQ ID NO: 405090 - DNA, 15 bp, Homo sapiens
aaactataaaaatcc

SEQ ID NO: 405091 - DNA, 15 bp, Homo sapiens
taaactataaaaatc

SEQ ID NO: 405092 - DNA, 15 bp, Homo sapiens
ttaaactataaaaat

SEQ ID NO: 405093 - DNA, 15 bp, Homo sapiens
cttaaactataaaaa

SEQ ID NO: 405094 - DNA, 15 bp, Homo sapiens
ccttaaactataaaa

SEQ ID NO: 405095 - DNA, 15 bp, Homo sapiens
accttaaactataaa

SEQ ID NO: 405096 - DNA, 15 bp, Homo sapiens
gaccttaaactataa

SEQ ID NO: 405097 - DNA, 15 bp, Homo sapiens
agaccttaaactata

SEQ ID NO: 405098 - DNA, 15 bp, Homo sapiens
aagaccttaaactat

SEQ ID NO: 405099 - DNA, 15 bp, Homo sapiens
taagaccttaaacta

SEQ ID NO: 405100 - DNA, 15 bp, Homo sapiens
gtaagaccttaaact

SEQ ID NO: 405101 - DNA, 15 bp, Homo sapiens
ggtaagaccttaaac

SEQ ID NO: 405102 - DNA, 15 bp, Homo sapiens
gggtaagaccttaaa

SEQ ID NO: 405103 - DNA, 15 bp, Homo sapiens
tgggtaagaccttaa

SEQ ID NO: 405104 - DNA, 15 bp, Homo sapiens
atgggtaagacctta

SEQ ID NO: 405105 - DNA, 15 bp, Homo sapiens
tatgggtaagacctt

SEQ ID NO: 405106 - DNA, 15 bp, Homo sapiens
ttatgggtaagacct

SEQ ID NO: 405107 - DNA, 15 bp, Homo sapiens
tttatgggtaagacc

SEQ ID NO: 405108 - DNA, 15 bp, Homo sapiens
atttatgggtaagac

SEQ ID NO: 405109 - DNA, 15 bp, Homo sapiens
gatttatgggtaaga

SEQ ID NO: 405110 - DNA, 15 bp, Homo sapiens
agatttatgggtaag

SEQ ID NO: 405111 - DNA, 15 bp, Homo sapiens
aagatttatgggtaa

SEQ ID NO: 405112 - DNA, 15 bp, Homo sapiens
aaagatttatgggta

SEQ ID NO: 405113 - DNA, 15 bp, Homo sapiens
taaagatttatgggt

SEQ ID NO: 405114 - DNA, 15 bp, Homo sapiens
ttaaagatttatggg

SEQ ID NO: 405115 - DNA, 15 bp, Homo sapiens
attaaagatttatgg

SEQ ID NO: 405116 - DNA, 15 bp, Homo sapiens
gattaaagatttatg

SEQ ID NO: 405117 - DNA, 15 bp, Homo sapiens
ggattaaagatttat

SEQ ID NO: 405118 - DNA, 15 bp, Homo sapiens
tggattaaagattta

SEQ ID NO: 405119 - DNA, 15 bp, Homo sapiens
atggattaaagattt

SEQ ID NO: 405120 - DNA, 15 bp, Homo sapiens
gatggattaaagatt

SEQ ID NO: 405121 - DNA, 15 bp, Homo sapiens
agatggattaaagat

SEQ ID NO: 405122 - DNA, 15 bp, Homo sapiens
aagatggattaaaga

SEQ ID NO: 405123 - DNA, 15 bp, Homo sapiens
gcaagatggattaaa

SEQ ID NO: 405124 - DNA, 15 bp, Homo sapiens
cgcaagatggattaa

SEQ ID NO: 405125 - DNA, 15 bp, Homo sapiens
acgcaagatggatta

SEQ ID NO: 405126 - DNA, 15 bp, Homo sapiens
aacgcaagatggatt

SEQ ID NO: 405127 - DNA, 15 bp, Homo sapiens
taacgcaagatggat

SEQ ID NO: 405128 - DNA, 15 bp, Homo sapiens
ttaacgcaagatgga

SEQ ID NO: 405129 - DNA, 15 bp, Homo sapiens
attaacgcaagatgg

SEQ ID NO: 405130 - DNA, 15 bp, Homo sapiens
aattaacgcaagatg

SEQ ID NO: 405131 - DNA, 15 bp, Homo sapiens
aaattaacgcaagat

SEQ ID NO: 405132 - DNA, 15 bp, Homo sapiens
aaaattaacgcaaga

SEQ ID NO: 405133 - DNA, 15 bp, Homo sapiens
aaaaattaacgcaag

SEQ ID NO: 405134 - DNA, 15 bp, Homo sapiens
caaaaattaacgcaa

SEQ ID NO: 405135 - DNA, 15 bp, Homo sapiens
gcaaaaattaacgca

SEQ ID NO: 405136 - DNA, 15 bp, Homo sapiens
tgcaaaaattaacgc

SEQ ID NO: 405137 - DNA, 15 bp, Homo sapiens
atgcaaaaattaacg

SEQ ID NO: 405138 - DNA, 15 bp, Homo sapiens
caccatatgcaaaaa

SEQ ID NO: 405139 - DNA, 15 bp, Homo sapiens
tcaccatatgcaaaa

SEQ ID NO: 405140 - DNA, 15 bp, Homo sapiens
ctcaccatatgcaaa

SEQ ID NO: 405141 - DNA, 15 bp, Homo sapiens
tctcaccatatgcaa

SEQ ID NO: 405142 - DNA, 15 bp, Homo sapiens
ctctcaccatatgca

SEQ ID NO: 405143 - DNA, 15 bp, Homo sapiens
cctctcaccatatgc

SEQ ID NO: 405144 - DNA, 15 bp, Homo sapiens
acctctcaccatatg

SEQ ID NO: 405145 - DNA, 15 bp, Homo sapiens
tacctctcaccatat

SEQ ID NO: 405146 - DNA, 15 bp, Homo sapiens
ctacctctcaccata

SEQ ID NO: 405147 - DNA, 15 bp, Homo sapiens
cctacctctcaccat

SEQ ID NO: 405148 - DNA, 15 bp, Homo sapiens
ccctacctctcacca

SEQ ID NO: 405149 - DNA, 15 bp, Homo sapiens
cccctacctctcacc

SEQ ID NO: 405150 - DNA, 15 bp, Homo sapiens
acccctacctctcac

SEQ ID NO: 405151 - DNA, 15 bp, Homo sapiens
gacccctacctctca

SEQ ID NO: 405152 - DNA, 15 bp, Homo sapiens
ggacccctacctctc

SEQ ID NO: 405153 - DNA, 15 bp, Homo sapiens
tggacccctacctct

SEQ ID NO: 405154 - DNA, 15 bp, Homo sapiens
ctggacccctacctc

SEQ ID NO: 405155 - DNA, 15 bp, Homo sapiens
actggacccctacct

SEQ ID NO: 405156 - DNA, 15 bp, Homo sapiens
aactggacccctacc

SEQ ID NO: 405157 - DNA, 15 bp, Homo sapiens
aaactggacccctac

SEQ ID NO: 405158 - DNA, 15 bp, Homo sapiens
gaaactggaccccta

SEQ ID NO: 405159 - DNA, 15 bp, Homo sapiens
agaaactggacccct

SEQ ID NO: 405160 - DNA, 15 bp, Homo sapiens
gagaaactggacccc

SEQ ID NO: 405161 - DNA, 15 bp, Homo sapiens
agagaaactggaccc

SEQ ID NO: 405162 - DNA, 15 bp, Homo sapiens
gagagaaactggacc

SEQ ID NO: 405163 - DNA, 15 bp, Homo sapiens
agagagaaactggac

SEQ ID NO: 405164 - DNA, 15 bp, Homo sapiens
aagagagaaactgga

SEQ ID NO: 405165 - DNA, 15 bp, Homo sapiens
gaagagagaaactgg

SEQ ID NO: 405166 - DNA, 15 bp, Homo sapiens
agaagagagaaactg

SEQ ID NO: 405167 - DNA, 15 bp, Homo sapiens
cagaagagagaaact

SEQ ID NO: 405168 - DNA, 15 bp, Homo sapiens
gcagaagagagaaac

SEQ ID NO: 405169 - DNA, 15 bp, Homo sapiens
tgcagaagagagaaa

SEQ ID NO: 405170 - DNA, 15 bp, Homo sapiens
atgcagaagagagaa

SEQ ID NO: 405171 - DNA, 15 bp, Homo sapiens
tatgcagaagagaga

SEQ ID NO: 405172 - DNA, 15 bp, Homo sapiens
atatgcagaagagag

SEQ ID NO: 405173 - DNA, 15 bp, Homo sapiens
catatgcagaagaga

SEQ ID NO: 405174 - DNA, 15 bp, Homo sapiens
ccatatgcagaagag

SEQ ID NO: 405175 - DNA, 15 bp, Homo sapiens
accatatgcagaaga

SEQ ID NO: 405176 - DNA, 15 bp, Homo sapiens
aaccatatgcagaag

SEQ ID NO: 405177 - DNA, 15 bp, Homo sapiens
taaccatatgcagaa

SEQ ID NO: 405178 - DNA, 15 bp, Homo sapiens
ctaaccatatgcaga

SEQ ID NO: 405179 - DNA, 15 bp, Homo sapiens
gctaaccatatgcag

SEQ ID NO: 405180 - DNA, 15 bp, Homo sapiens
ggctaaccatatgca

SEQ ID NO: 405181 - DNA, 15 bp, Homo sapiens
tggctaaccatatgc

SEQ ID NO: 405182 - DNA, 15 bp, Homo sapiens
ctggctaaccatatg

SEQ ID NO: 405183 - DNA, 15 bp, Homo sapiens
actggctaaccatat

SEQ ID NO: 405184 - DNA, 15 bp, Homo sapiens
aactggctaaccata

SEQ ID NO: 405185 - DNA, 15 bp, Homo sapiens
aaactggctaaccat

SEQ ID NO: 405186 - DNA, 15 bp, Homo sapiens
aaaactggctaacca

SEQ ID NO: 405187 - DNA, 15 bp, Homo sapiens
gaaaactggctaacc

SEQ ID NO: 405188 - DNA, 15 bp, Homo sapiens
ggaaaactggctaac

SEQ ID NO: 405189 - DNA, 15 bp, Homo sapiens
tggaaaactggctaa

SEQ ID NO: 405190 - DNA, 15 bp, Homo sapiens
ctggaaaactggcta

SEQ ID NO: 405191 - DNA, 15 bp, Homo sapiens
gctggaaaactggct

SEQ ID NO: 405192 - DNA, 15 bp, Homo sapiens
tgctggaaaactggc

SEQ ID NO: 405193 - DNA, 15 bp, Homo sapiens
gtgctggaaaactgg

SEQ ID NO: 405194 - DNA, 15 bp, Homo sapiens
ggtgctggaaaactg

SEQ ID NO: 405195 - DNA, 15 bp, Homo sapiens
tggtgctggaaaact

SEQ ID NO: 405196 - DNA, 15 bp, Homo sapiens
gtggtgctggaaaac

SEQ ID NO: 405197 - DNA, 15 bp, Homo sapiens
agtggtgctggaaaa

SEQ ID NO: 405198 - DNA, 15 bp, Homo sapiens
aagtggtgctggaaa

SEQ ID NO: 405199 - DNA, 15 bp, Homo sapiens
taagtggtgctggaa

SEQ ID NO: 405200 - DNA, 15 bp, Homo sapiens
ataagtggtgctgga

SEQ ID NO: 405201 - DNA, 15 bp, Homo sapiens
aataagtggtgctgg

SEQ ID NO: 405202 - DNA, 15 bp, Homo sapiens
caataagtggtgctg

SEQ ID NO: 405203 - DNA, 15 bp, Homo sapiens
tcaataagtggtgct

SEQ ID NO: 405204 - DNA, 15 bp, Homo sapiens
ttcaataagtggtgc

SEQ ID NO: 405205 - DNA, 15 bp, Homo sapiens
attcaataagtggtg

SEQ ID NO: 405206 - DNA, 15 bp, Homo sapiens
tattcaataagtggt

SEQ ID NO: 405207 - DNA, 15 bp, Homo sapiens
ctattcaataagtgg

SEQ ID NO: 405208 - DNA, 15 bp, Homo sapiens
gctattcaataagtg

SEQ ID NO: 405209 - DNA, 15 bp, Homo sapiens
cgctattcaataagt

SEQ ID NO: 405210 - DNA, 15 bp, Homo sapiens
acgctattcaataag

SEQ ID NO: 405211 - DNA, 15 bp, Homo sapiens
tacgctattcaataa

SEQ ID NO: 405212 - DNA, 15 bp, Homo sapiens
gtacgctattcaata

SEQ ID NO: 405213 - DNA, 15 bp, Homo sapiens
ggtacgctattcaat

SEQ ID NO: 405214 - DNA, 15 bp, Homo sapiens
aggtacgctattcaa

SEQ ID NO: 405215 - DNA, 15 bp, Homo sapiens
aaggtacgctattca

SEQ ID NO: 405216 - DNA, 15 bp, Homo sapiens
aaaggtacgctattc

SEQ ID NO: 405217 - DNA, 15 bp, Homo sapiens
aaaaggtacgctatt

SEQ ID NO: 405218 - DNA, 15 bp, Homo sapiens
gaaaaggtacgctat

SEQ ID NO: 405219 - DNA, 15 bp, Homo sapiens
ggaaaaggtacgcta

SEQ ID NO: 405220 - DNA, 15 bp, Homo sapiens
gggaaaaggtacgct

SEQ ID NO: 405221 - DNA, 15 bp, Homo sapiens
ggggaaaaggtacgc

SEQ ID NO: 405222 - DNA, 15 bp, Homo sapiens
tggggaaaaggtacg

SEQ ID NO: 405223 - DNA, 15 bp, Homo sapiens
gtggggaaaaggtac

SEQ ID NO: 405224 - DNA, 15 bp, Homo sapiens
agtggggaaaaggta

SEQ ID NO: 405225 - DNA, 15 bp, Homo sapiens
cagtggggaaaaggt

SEQ ID NO: 405226 - DNA, 15 bp, Homo sapiens
acagtggggaaaagg

SEQ ID NO: 405227 - DNA, 15 bp, Homo sapiens
aacagtggggaaaag

SEQ ID NO: 405228 - DNA, 15 bp, Homo sapiens
aaacagtggggaaaa

SEQ ID NO: 405229 - DNA, 15 bp, Homo sapiens
taaacagtggggaaa

SEQ ID NO: 405230 - DNA, 15 bp, Homo sapiens
ataaacagtggggaa

SEQ ID NO: 405231 - DNA, 15 bp, Homo sapiens
aataaacagtgggga

SEQ ID NO: 405232 - DNA, 15 bp, Homo sapiens
aaataaacagtgggg

SEQ ID NO: 405233 - DNA, 15 bp, Homo sapiens
aaaataaacagtggg

SEQ ID NO: 405234 - DNA, 15 bp, Homo sapiens
aaaaataaacagtgg

SEQ ID NO: 405235 - DNA, 15 bp, Homo sapiens
caaaaataaacagtg

SEQ ID NO: 405236 - DNA, 15 bp, Homo sapiens
acaaaaataaacagt

SEQ ID NO: 405237 - DNA, 15 bp, Homo sapiens
aacaaaaataaacag

SEQ ID NO: 405238 - DNA, 15 bp, Homo sapiens
taacaaaaataaaca

SEQ ID NO: 405239 - DNA, 15 bp, Homo sapiens
ttaacaaaaataaac

SEQ ID NO: 405240 - DNA, 15 bp, Homo sapiens
gttaacaaaaataaa

SEQ ID NO: 405241 - DNA, 15 bp, Homo sapiens
agttaacaaaaataa

SEQ ID NO: 405242 - DNA, 15 bp, Homo sapiens
aagttaacaaaaata

SEQ ID NO: 405243 - DNA, 15 bp, Homo sapiens
aaagttaacaaaaat

SEQ ID NO: 405244 - DNA, 15 bp, Homo sapiens
caaagttaacaaaaa

SEQ ID NO: 405245 - DNA, 15 bp, Homo sapiens
acaaagttaacaaaa

SEQ ID NO: 405246 - DNA, 15 bp, Homo sapiens
gacaaagttaacaaa

SEQ ID NO: 405247 - DNA, 15 bp, Homo sapiens
tgacaaagttaacaa

SEQ ID NO: 405248 - DNA, 15 bp, Homo sapiens
ttgacaaagttaaca

SEQ ID NO: 405249 - DNA, 15 bp, Homo sapiens
tttgacaaagttaac

SEQ ID NO: 405250 - DNA, 15 bp, Homo sapiens
atttgacaaagttaa

SEQ ID NO: 405251 - DNA, 15 bp, Homo sapiens
tatttgacaaagtta

SEQ ID NO: 405252 - DNA, 15 bp, Homo sapiens
gtatttgacaaagtt

SEQ ID NO: 405253 - DNA, 15 bp, Homo sapiens
ggtatttgacaaagt

SEQ ID NO: 405254 - DNA, 15 bp, Homo sapiens
tggtatttgacaaag

SEQ ID NO: 405255 - DNA, 15 bp, Homo sapiens
atggtatttgacaaa

SEQ ID NO: 405256 - DNA, 15 bp, Homo sapiens
aatggtatttgacaa

SEQ ID NO: 405257 - DNA, 15 bp, Homo sapiens
aaatggtatttgaca

SEQ ID NO: 405258 - DNA, 15 bp, Homo sapiens
aaaatggtatttgac

SEQ ID NO: 405259 - DNA, 15 bp, Homo sapiens
caaaatggtatttga

SEQ ID NO: 405260 - DNA, 15 bp, Homo sapiens
acaaaatggtatttg

SEQ ID NO: 405261 - DNA, 15 bp, Homo sapiens
aacaaaatggtattt

SEQ ID NO: 405262 - DNA, 15 bp, Homo sapiens
caacaaaatggtatt

SEQ ID NO: 405263 - DNA, 15 bp, Homo sapiens
acaacaaaatggtat

SEQ ID NO: 405264 - DNA, 15 bp, Homo sapiens
cacaacaaaatggta

SEQ ID NO: 405265 - DNA, 15 bp, Homo sapiens
ccacaacaaaatggt

SEQ ID NO: 405266 - DNA, 15 bp, Homo sapiens
cccacaacaaaatgg

SEQ ID NO: 405267 - DNA, 15 bp, Homo sapiens
acccacaacaaaatg

SEQ ID NO: 405268 - DNA, 15 bp, Homo sapiens
cacccacaacaaaat

SEQ ID NO: 405269 - DNA, 15 bp, Homo sapiens
acacccacaacaaaa

SEQ ID NO: 405270 - DNA, 15 bp, Homo sapiens
cacacccacaacaaa

SEQ ID NO: 405271 - DNA, 15 bp, Homo sapiens
gcacacccacaacaa

SEQ ID NO: 405272 - DNA, 15 bp, Homo sapiens
tgcacacccacaaca

SEQ ID NO: 405273 - DNA, 15 bp, Homo sapiens
ctgcacacccacaac

SEQ ID NO: 405274 - DNA, 15 bp, Homo sapiens
cctgcacacccacaa

SEQ ID NO: 405275 - DNA, 15 bp, Homo sapiens
acctgcacacccaca

SEQ ID NO: 405276 - DNA, 15 bp, Homo sapiens
aacctgcacacccac

SEQ ID NO: 405277 - DNA, 15 bp, Homo sapiens
aaacctgcacaccca

SEQ ID NO: 405278 - DNA, 15 bp, Homo sapiens
taaacctgcacaccc

SEQ ID NO: 405279 - DNA, 15 bp, Homo sapiens
ataaacctgcacacc

SEQ ID NO: 405280 - DNA, 15 bp, Homo sapiens
aataaacctgcacac

SEQ ID NO: 405281 - DNA, 15 bp, Homo sapiens
aaataaacctgcaca

SEQ ID NO: 405282 - DNA, 15 bp, Homo sapiens
gaaataaacctgcac

SEQ ID NO: 405283 - DNA, 15 bp, Homo sapiens
tgaaataaacctgca

SEQ ID NO: 405284 - DNA, 15 bp, Homo sapiens
ctgaaataaacctgc

SEQ ID NO: 405285 - DNA, 15 bp, Homo sapiens
cctgaaataaacctg

SEQ ID NO: 405286 - DNA, 15 bp, Homo sapiens
ccctgaaataaacct

SEQ ID NO: 405287 - DNA, 15 bp, Homo sapiens
cccctgaaataaacc

SEQ ID NO: 405288 - DNA, 15 bp, Homo sapiens
acccctgaaataaac

SEQ ID NO: 405289 - DNA, 15 bp, Homo sapiens
gacccctgaaataaa

SEQ ID NO: 405290 - DNA, 15 bp, Homo sapiens
agacccctgaaataa

SEQ ID NO: 405291 - DNA, 15 bp, Homo sapiens
cagacccctgaaata

SEQ ID NO: 405292 - DNA, 15 bp, Homo sapiens
acagacccctgaaat

SEQ ID NO: 405293 - DNA, 15 bp, Homo sapiens
tacagacccctgaaa

SEQ ID NO: 405294 - DNA, 15 bp, Homo sapiens
atacagacccctgaa

SEQ ID NO: 405295 - DNA, 15 bp, Homo sapiens
aatacagacccctga

SEQ ID NO: 405296 - DNA, 15 bp, Homo sapiens
gaatacagacccctg

SEQ ID NO: 405297 - DNA, 15 bp, Homo sapiens
agaatacagacccct

SEQ ID NO: 405298 - DNA, 15 bp, Homo sapiens
gagaatacagacccc

SEQ ID NO: 405299 - DNA, 15 bp, Homo sapiens
agagaatacagaccc

SEQ ID NO: 405300 - DNA, 15 bp, Homo sapiens
aagagaatacagacc

SEQ ID NO: 405301 - DNA, 15 bp, Homo sapiens
gaagagaatacagac

SEQ ID NO: 405302 - DNA, 15 bp, Homo sapiens
ggaagagaatacaga

SEQ ID NO: 405303 - DNA, 15 bp, Homo sapiens
tggaagagaatacag

SEQ ID NO: 405304 - DNA, 15 bp, Homo sapiens
atggaagagaataca

SEQ ID NO: 405305 - DNA, 15 bp, Homo sapiens
aatggaagagaatac

SEQ ID NO: 405306 - DNA, 15 bp, Homo sapiens
caatggaagagaata

SEQ ID NO: 405307 - DNA, 15 bp, Homo sapiens
ccaatggaagagaat

SEQ ID NO: 405308 - DNA, 15 bp, Homo sapiens
accaatggaagagaa

SEQ ID NO: 405309 - DNA, 15 bp, Homo sapiens
gaccaatggaagaga

SEQ ID NO: 405310 - DNA, 15 bp, Homo sapiens
agaccaatggaagag

SEQ ID NO: 405311 - DNA, 15 bp, Homo sapiens
tagaccaatggaaga

SEQ ID NO: 405312 - DNA, 15 bp, Homo sapiens
atagaccaatggaag

SEQ ID NO: 405313 - DNA, 15 bp, Homo sapiens
tagacacatagacca

SEQ ID NO: 405314 - DNA, 15 bp, Homo sapiens
atagacacatagacc

SEQ ID NO: 405315 - DNA, 15 bp, Homo sapiens
aatagacacatagac

SEQ ID NO: 405316 - DNA, 15 bp, Homo sapiens
aaatagacacataga

SEQ ID NO: 405317 - DNA, 15 bp, Homo sapiens
aaaatagacacatag

SEQ ID NO: 405318 - DNA, 15 bp, Homo sapiens
aaaaatagacacata

SEQ ID NO: 405319 - DNA, 15 bp, Homo sapiens
caaaaatagacacat

SEQ ID NO: 405320 - DNA, 15 bp, Homo sapiens
acaaaaatagacaca

SEQ ID NO: 405321 - DNA, 15 bp, Homo sapiens
tacaaaaatagacac

SEQ ID NO: 405322 - DNA, 15 bp, Homo sapiens
gtacaaaaatagaca

SEQ ID NO: 405323 - DNA, 15 bp, Homo sapiens
ggtacaaaaatagac

SEQ ID NO: 405324 - DNA, 15 bp, Homo sapiens
tggtacaaaaataga

SEQ ID NO: 405325 - DNA, 15 bp, Homo sapiens
ctggtacaaaaatag

SEQ ID NO: 405326 - DNA, 15 bp, Homo sapiens
gctggtacaaaaata

SEQ ID NO: 405327 - DNA, 15 bp, Homo sapiens
tgctggtacaaaaat

SEQ ID NO: 405328 - DNA, 15 bp, Homo sapiens
gtgctggtacaaaaa

SEQ ID NO: 405329 - DNA, 15 bp, Homo sapiens
tgtgctggtacaaaa

SEQ ID NO: 405330 - DNA, 15 bp, Homo sapiens
ttgtgctggtacaaa

SEQ ID NO: 405331 - DNA, 15 bp, Homo sapiens
attgtgctggtacaa

SEQ ID NO: 405332 - DNA, 15 bp, Homo sapiens
cattgtgctggtaca

SEQ ID NO: 405333 - DNA, 15 bp, Homo sapiens
gcattgtgctggtac

SEQ ID NO: 405334 - DNA, 15 bp, Homo sapiens
agcattgtgctggta

SEQ ID NO: 405335 - DNA, 15 bp, Homo sapiens
cagcattgtgctggt

SEQ ID NO: 405336 - DNA, 15 bp, Homo sapiens
acagcattgtgctgg

SEQ ID NO: 405337 - DNA, 15 bp, Homo sapiens
aacagcattgtgctg

SEQ ID NO: 405338 - DNA, 15 bp, Homo sapiens
aaacagcattgtgct

SEQ ID NO: 405339 - DNA, 15 bp, Homo sapiens
aaaacagcattgtgc

SEQ ID NO: 405340 - DNA, 15 bp, Homo sapiens
caaaacagcattgtg

SEQ ID NO: 405341 - DNA, 15 bp, Homo sapiens
ccaaaacagcattgt

SEQ ID NO: 405342 - DNA, 15 bp, Homo sapiens
accaaaacagcattg

SEQ ID NO: 405343 - DNA, 15 bp, Homo sapiens
aaccaaaacagcatt

SEQ ID NO: 405344 - DNA, 15 bp, Homo sapiens
agctacagtaaccaa

SEQ ID NO: 405345 - DNA, 15 bp, Homo sapiens
aagctacagtaacca

SEQ ID NO: 405346 - DNA, 15 bp, Homo sapiens
aaagctacagtaacc

SEQ ID NO: 405347 - DNA, 15 bp, Homo sapiens
caaagctacagtaac

SEQ ID NO: 405348 - DNA, 15 bp, Homo sapiens
acaaagctacagtaa

SEQ ID NO: 405349 - DNA, 15 bp, Homo sapiens
tacaaagctacagta

SEQ ID NO: 405350 - DNA, 15 bp, Homo sapiens
ctacaaagctacagt

SEQ ID NO: 405351 - DNA, 15 bp, Homo sapiens
actacaaagctacag

SEQ ID NO: 405352 - DNA, 15 bp, Homo sapiens
tactacaaagctaca

SEQ ID NO: 405353 - DNA, 15 bp, Homo sapiens
atactacaaagctac

SEQ ID NO: 405354 - DNA, 15 bp, Homo sapiens
tatactacaaagcta

SEQ ID NO: 405355 - DNA, 15 bp, Homo sapiens
ctatactacaaagct

SEQ ID NO: 405356 - DNA, 15 bp, Homo sapiens
actatactacaaagc

SEQ ID NO: 405357 - DNA, 15 bp, Homo sapiens
aactatactacaaag

SEQ ID NO: 405358 - DNA, 15 bp, Homo sapiens
gaactatactacaaa

SEQ ID NO: 405359 - DNA, 15 bp, Homo sapiens
cgaactatactacaa

SEQ ID NO: 405360 - DNA, 15 bp, Homo sapiens
tcgaactatactaca

SEQ ID NO: 405361 - DNA, 15 bp, Homo sapiens
ttcgaactatactac

SEQ ID NO: 405362 - DNA, 15 bp, Homo sapiens
cttcgaactatacta

SEQ ID NO: 405363 - DNA, 15 bp, Homo sapiens
acttcgaactatact

SEQ ID NO: 405364 - DNA, 15 bp, Homo sapiens
aacttcgaactatac

SEQ ID NO: 405365 - DNA, 15 bp, Homo sapiens
caacttcgaactata

SEQ ID NO: 405366 - DNA, 15 bp, Homo sapiens
ccaacttcgaactat

SEQ ID NO: 405367 - DNA, 15 bp, Homo sapiens
cccaacttcgaacta

SEQ ID NO: 405368 - DNA, 15 bp, Homo sapiens
acccaacttcgaact

SEQ ID NO: 405369 - DNA, 15 bp, Homo sapiens
tacccaacttcgaac

SEQ ID NO: 405370 - DNA, 15 bp, Homo sapiens
ttacccaacttcgaa

SEQ ID NO: 405371 - DNA, 15 bp, Homo sapiens
attacccaacttcga

SEQ ID NO: 405372 - DNA, 15 bp, Homo sapiens
gattacccaacttcg

SEQ ID NO: 405373 - DNA, 15 bp, Homo sapiens
agattacccaacttc

SEQ ID NO: 405374 - DNA, 15 bp, Homo sapiens
cagattacccaactt

SEQ ID NO: 405375 - DNA, 15 bp, Homo sapiens
tcagattacccaact

SEQ ID NO: 405376 - DNA, 15 bp, Homo sapiens
atcagattacccaac

SEQ ID NO: 405377 - DNA, 15 bp, Homo sapiens
catcagattacccaa

SEQ ID NO: 405378 - DNA, 15 bp, Homo sapiens
gcatcagattaccca

SEQ ID NO: 405379 - DNA, 15 bp, Homo sapiens
ggcatcagattaccc

SEQ ID NO: 405380 - DNA, 15 bp, Homo sapiens
aggcatcagattacc

SEQ ID NO: 405381 - DNA, 15 bp, Homo sapiens
gaggcatcagattac

SEQ ID NO: 405382 - DNA, 15 bp, Homo sapiens
ggaggcatcagatta

SEQ ID NO: 405383 - DNA, 15 bp, Homo sapiens
tggaggcatcagatt

SEQ ID NO: 405384 - DNA, 15 bp, Homo sapiens
ctggaggcatcagat

SEQ ID NO: 405385 - DNA, 15 bp, Homo sapiens
gctggaggcatcaga

SEQ ID NO: 405386 - DNA, 15 bp, Homo sapiens
taaagctggaggcat

SEQ ID NO: 405387 - DNA, 15 bp, Homo sapiens
ataaagctggaggca

SEQ ID NO: 405388 - DNA, 15 bp, Homo sapiens
aataaagctggaggc

SEQ ID NO: 405389 - DNA, 15 bp, Homo sapiens
aaataaagctggagg

SEQ ID NO: 405390 - DNA, 15 bp, Homo sapiens
aaaataaagctggag

SEQ ID NO: 405391 - DNA, 15 bp, Homo sapiens
taaaaataaagctgg

SEQ ID NO: 405392 - DNA, 15 bp, Homo sapiens
ataaaaataaagctg

SEQ ID NO: 405393 - DNA, 15 bp, Homo sapiens
aataaaaataaagct

SEQ ID NO: 405394 - DNA, 15 bp, Homo sapiens
aaataaaaataaagc

SEQ ID NO: 405395 - DNA, 15 bp, Homo sapiens
aaaaataaaaataaa

SEQ ID NO: 405396 - DNA, 15 bp, Homo sapiens
aaaaaataaaaataa

SEQ ID NO: 405397 - DNA, 15 bp, Homo sapiens
gaaaaaataaaaata

SEQ ID NO: 405398 - DNA, 15 bp, Homo sapiens
tgaaaaaataaaaat

SEQ ID NO: 405399 - DNA, 15 bp, Homo sapiens
atgaaaaaataaaaa

SEQ ID NO: 405400 - DNA, 15 bp, Homo sapiens
aatgaaaaaataaaa

SEQ ID NO: 405401 - DNA, 15 bp, Homo sapiens
aaatgaaaaaataaa

SEQ ID NO: 405402 - DNA, 15 bp, Homo sapiens
aaaatgaaaaaataa

SEQ ID NO: 405403 - DNA, 15 bp, Homo sapiens
aaaaatgaaaaaata

SEQ ID NO: 405404 - DNA, 15 bp, Homo sapiens
caaaaatgaaaaaat

SEQ ID NO: 405405 - DNA, 15 bp, Homo sapiens
gcaaaaatgaaaaaa

SEQ ID NO: 405406 - DNA, 15 bp, Homo sapiens
agcaaaaatgaaaaa

SEQ ID NO: 405407 - DNA, 15 bp, Homo sapiens
gagcaaaaatgaaaa

SEQ ID NO: 405408 - DNA, 15 bp, Homo sapiens
tgagcaaaaatgaaa

SEQ ID NO: 405409 - DNA, 15 bp, Homo sapiens
ctgagcaaaaatgaa

SEQ ID NO: 405410 - DNA, 15 bp, Homo sapiens
cctgagcaaaaatga

SEQ ID NO: 405411 - DNA, 15 bp, Homo sapiens
ccctgagcaaaaatg

SEQ ID NO: 405412 - DNA, 15 bp, Homo sapiens
accctgagcaaaaat

SEQ ID NO: 405413 - DNA, 15 bp, Homo sapiens
aaccctgagcaaaaa

SEQ ID NO: 405414 - DNA, 15 bp, Homo sapiens
caaccctgagcaaaa

SEQ ID NO: 405415 - DNA, 15 bp, Homo sapiens
gcaaccctgagcaaa

SEQ ID NO: 405416 - DNA, 15 bp, Homo sapiens
agcaaccctgagcaa

SEQ ID NO: 405417 - DNA, 15 bp, Homo sapiens
aagcaaccctgagca

SEQ ID NO: 405418 - DNA, 15 bp, Homo sapiens
aaagcaaccctgagc

SEQ ID NO: 405419 - DNA, 15 bp, Homo sapiens
caaagcaaccctgag

SEQ ID NO: 405420 - DNA, 15 bp, Homo sapiens
ccaaagcaaccctga

SEQ ID NO: 405421 - DNA, 15 bp, Homo sapiens
gccaaagcaaccctg

SEQ ID NO: 405422 - DNA, 15 bp, Homo sapiens
agccaaagcaaccct

SEQ ID NO: 405423 - DNA, 15 bp, Homo sapiens
tagccaaagcaaccc

SEQ ID NO: 405424 - DNA, 15 bp, Homo sapiens
atagccaaagcaacc

SEQ ID NO: 405425 - DNA, 15 bp, Homo sapiens
aatagccaaagcaac

SEQ ID NO: 405426 - DNA, 15 bp, Homo sapiens
gaatagccaaagcaa

SEQ ID NO: 405427 - DNA, 15 bp, Homo sapiens
tgaatagccaaagca

SEQ ID NO: 405428 - DNA, 15 bp, Homo sapiens
ctgaatagccaaagc

SEQ ID NO: 405429 - DNA, 15 bp, Homo sapiens
tctgaatagccaaag

SEQ ID NO: 405430 - DNA, 15 bp, Homo sapiens
gtctgaatagccaaa

SEQ ID NO: 405431 - DNA, 15 bp, Homo sapiens
agtctgaatagccaa

SEQ ID NO: 405432 - DNA, 15 bp, Homo sapiens
gagtctgaatagcca

SEQ ID NO: 405433 - DNA, 15 bp, Homo sapiens
agagtctgaatagcc

SEQ ID NO: 405434 - DNA, 15 bp, Homo sapiens
aagagtctgaatagc

SEQ ID NO: 405435 - DNA, 15 bp, Homo sapiens
aaagagtctgaatag

SEQ ID NO: 405436 - DNA, 15 bp, Homo sapiens
aaaagagtctgaata

SEQ ID NO: 405437 - DNA, 15 bp, Homo sapiens
aaaaagagtctgaat

SEQ ID NO: 405438 - DNA, 15 bp, Homo sapiens
aaaaaagagtctgaa

SEQ ID NO: 405439 - DNA, 15 bp, Homo sapiens
caaaaaagagtctga

SEQ ID NO: 405440 - DNA, 15 bp, Homo sapiens
ccaaaaaagagtctg

SEQ ID NO: 405441 - DNA, 15 bp, Homo sapiens
accaaaaaagagtct

SEQ ID NO: 405442 - DNA, 15 bp, Homo sapiens
caccaaaaaagagtc

SEQ ID NO: 405443 - DNA, 15 bp, Homo sapiens
tcaccaaaaaagagt

SEQ ID NO: 405444 - DNA, 15 bp, Homo sapiens
ctcaccaaaaaagag

SEQ ID NO: 405445 - DNA, 15 bp, Homo sapiens
tctcaccaaaaaaga

SEQ ID NO: 405446 - DNA, 15 bp, Homo sapiens
ttctcaccaaaaaag

SEQ ID NO: 405447 - DNA, 15 bp, Homo sapiens
tttctcaccaaaaaa

SEQ ID NO: 405448 - DNA, 15 bp, Homo sapiens
atttctcaccaaaaa

SEQ ID NO: 405449 - DNA, 15 bp, Homo sapiens
catttctcaccaaaa

SEQ ID NO: 405450 - DNA, 15 bp, Homo sapiens
tcatttctcaccaaa

SEQ ID NO: 405451 - DNA, 15 bp, Homo sapiens
ttcatttctcaccaa

SEQ ID NO: 405452 - DNA, 15 bp, Homo sapiens
attcatttctcacca

SEQ ID NO: 405453 - DNA, 15 bp, Homo sapiens
aattcatttctcacc

SEQ ID NO: 405454 - DNA, 15 bp, Homo sapiens
aaattcatttctcac

SEQ ID NO: 405455 - DNA, 15 bp, Homo sapiens
aaaattcatttctca

SEQ ID NO: 405456 - DNA, 15 bp, Homo sapiens
taaaattcatttctc

SEQ ID NO: 405457 - DNA, 15 bp, Homo sapiens
ctaaaattcatttct

SEQ ID NO: 405458 - DNA, 15 bp, Homo sapiens
tctaaaattcatttc

SEQ ID NO: 405459 - DNA, 15 bp, Homo sapiens
ttctaaaattcattt

SEQ ID NO: 405460 - DNA, 15 bp, Homo sapiens
attctaaaattcatt

SEQ ID NO: 405461 - DNA, 15 bp, Homo sapiens
tattctaaaattcat

SEQ ID NO: 405462 - DNA, 15 bp, Homo sapiens
gtattctaaaattca

SEQ ID NO: 405463 - DNA, 15 bp, Homo sapiens
agtattctaaaattc

SEQ ID NO: 405464 - DNA, 15 bp, Homo sapiens
aagtattctaaaatt

SEQ ID NO: 405465 - DNA, 15 bp, Homo sapiens
aaagtattctaaaat

SEQ ID NO: 405466 - DNA, 15 bp, Homo sapiens
aaaagtattctaaaa

SEQ ID NO: 405467 - DNA, 15 bp, Homo sapiens
aaaaagtattctaaa

SEQ ID NO: 405468 - DNA, 15 bp, Homo sapiens
aaaaaagtattctaa

SEQ ID NO: 405469 - DNA, 15 bp, Homo sapiens
gaaaaaagtattcta

SEQ ID NO: 405470 - DNA, 15 bp, Homo sapiens
tgaaaaaagtattct

SEQ ID NO: 405471 - DNA, 15 bp, Homo sapiens
ttgaaaaaagtattc

SEQ ID NO: 405472 - DNA, 15 bp, Homo sapiens
tttgaaaaaagtatt

SEQ ID NO: 405473 - DNA, 15 bp, Homo sapiens
ctttgaaaaaagtat

SEQ ID NO: 405474 - DNA, 15 bp, Homo sapiens
actttgaaaaaagta

SEQ ID NO: 405475 - DNA, 15 bp, Homo sapiens
gactttgaaaaaagt

SEQ ID NO: 405476 - DNA, 15 bp, Homo sapiens
agactttgaaaaaag

SEQ ID NO: 405477 - DNA, 15 bp, Homo sapiens
cagactttgaaaaaa

SEQ ID NO: 405478 - DNA, 15 bp, Homo sapiens
acagactttgaaaaa

SEQ ID NO: 405479 - DNA, 15 bp, Homo sapiens
aacagactttgaaaa

SEQ ID NO: 405480 - DNA, 15 bp, Homo sapiens
taacagactttgaaa

SEQ ID NO: 405481 - DNA, 15 bp, Homo sapiens
ttaacagactttgaa

SEQ ID NO: 405482 - DNA, 15 bp, Homo sapiens
tttaacagactttga

SEQ ID NO: 405483 - DNA, 15 bp, Homo sapiens
ttttaacagactttg

SEQ ID NO: 405484 - DNA, 15 bp, Homo sapiens
tttttaacagacttt

SEQ ID NO: 405485 - DNA, 15 bp, Homo sapiens
atttttaacagactt

SEQ ID NO: 405486 - DNA, 15 bp, Homo sapiens
catttttaacagact

SEQ ID NO: 405487 - DNA, 15 bp, Homo sapiens
tcatttttaacagac

SEQ ID NO: 405488 - DNA, 15 bp, Homo sapiens
gtcatttttaacaga

SEQ ID NO: 405489 - DNA, 15 bp, Homo sapiens
tgtcatttttaacag

SEQ ID NO: 405490 - DNA, 15 bp, Homo sapiens
atgtcatttttaaca

SEQ ID NO: 405491 - DNA, 15 bp, Homo sapiens
aatgtcatttttaac

SEQ ID NO: 405492 - DNA, 15 bp, Homo sapiens
caatgtcatttttaa

SEQ ID NO: 405493 - DNA, 15 bp, Homo sapiens
ccaatgtcattttta

SEQ ID NO: 405494 - DNA, 15 bp, Homo sapiens
accaatgtcattttt

SEQ ID NO: 405495 - DNA, 15 bp, Homo sapiens
taccaatgtcatttt

SEQ ID NO: 405496 - DNA, 15 bp, Homo sapiens
ttaccaatgtcattt

SEQ ID NO: 405497 - DNA, 15 bp, Homo sapiens
attaccaatgtcatt

SEQ ID NO: 405498 - DNA, 15 bp, Homo sapiens
aattaccaatgtcat

SEQ ID NO: 405499 - DNA, 15 bp, Homo sapiens
aaattaccaatgtca

SEQ ID NO: 405500 - DNA, 15 bp, Homo sapiens
caaattaccaatgtc

SEQ ID NO: 405501 - DNA, 15 bp, Homo sapiens
tcaaattaccaatgt

SEQ ID NO: 405502 - DNA, 15 bp, Homo sapiens
ttcaaattaccaatg

SEQ ID NO: 405503 - DNA, 15 bp, Homo sapiens
tttcaaattaccaat

SEQ ID NO: 405504 - DNA, 15 bp, Homo sapiens
ttttcaaattaccaa

SEQ ID NO: 405505 - DNA, 15 bp, Homo sapiens
cttttcaaattacca

SEQ ID NO: 405506 - DNA, 15 bp, Homo sapiens
tcttttcaaattacc

SEQ ID NO: 405507 - DNA, 15 bp, Homo sapiens
ttcttttcaaattac

SEQ ID NO: 405508 - DNA, 15 bp, Homo sapiens
attcttttcaaatta

SEQ ID NO: 405509 - DNA, 15 bp, Homo sapiens
tattcttttcaaatt

SEQ ID NO: 405510 - DNA, 15 bp, Homo sapiens
ctattcttttcaaat

SEQ ID NO: 405511 - DNA, 15 bp, Homo sapiens
actattcttttcaaa

SEQ ID NO: 405512 - DNA, 15 bp, Homo sapiens
tactattcttttcaa

SEQ ID NO: 405513 - DNA, 15 bp, Homo sapiens
atactattcttttca

SEQ ID NO: 405514 - DNA, 15 bp, Homo sapiens
aatactattcttttc

SEQ ID NO: 405515 - DNA, 15 bp, Homo sapiens
caatactattctttt

SEQ ID NO: 405516 - DNA, 15 bp, Homo sapiens
tcaatactattcttt

SEQ ID NO: 405517 - DNA, 15 bp, Homo sapiens
ttcaatactattctt

SEQ ID NO: 405518 - DNA, 15 bp, Homo sapiens
attcaatactattct

SEQ ID NO: 405519 - DNA, 15 bp, Homo sapiens
gattcaatactattc

SEQ ID NO: 405520 - DNA, 15 bp, Homo sapiens
agattcaatactatt

SEQ ID NO: 405521 - DNA, 15 bp, Homo sapiens
cagattcaatactat

SEQ ID NO: 405522 - DNA, 15 bp, Homo sapiens
acagattcaatacta

SEQ ID NO: 405523 - DNA, 15 bp, Homo sapiens
tacagattcaatact

SEQ ID NO: 405524 - DNA, 15 bp, Homo sapiens
atacagattcaatac

SEQ ID NO: 405525 - DNA, 15 bp, Homo sapiens
tatacagattcaata

SEQ ID NO: 405526 - DNA, 15 bp, Homo sapiens
atatacagattcaat

SEQ ID NO: 405527 - DNA, 15 bp, Homo sapiens
aatatacagattcaa

SEQ ID NO: 405528 - DNA, 15 bp, Homo sapiens
caatatacagattca

SEQ ID NO: 405529 - DNA, 15 bp, Homo sapiens
gcaatatacagattc

SEQ ID NO: 405530 - DNA, 15 bp, Homo sapiens
agcaatatacagatt

SEQ ID NO: 405531 - DNA, 15 bp, Homo sapiens
aagcaatatacagat

SEQ ID NO: 405532 - DNA, 15 bp, Homo sapiens
aaagcaatatacaga

SEQ ID NO: 405533 - DNA, 15 bp, Homo sapiens
caaagcaatatacag

SEQ ID NO: 405534 - DNA, 15 bp, Homo sapiens
ccaaagcaatataca

SEQ ID NO: 405535 - DNA, 15 bp, Homo sapiens
gccaaagcaatatac

SEQ ID NO: 405536 - DNA, 15 bp, Homo sapiens
tgccaaagcaatata

SEQ ID NO: 405537 - DNA, 15 bp, Homo sapiens
ttgccaaagcaatat

SEQ ID NO: 405538 - DNA, 15 bp, Homo sapiens
cttgccaaagcaata

SEQ ID NO: 405539 - DNA, 15 bp, Homo sapiens
acttgccaaagcaat

SEQ ID NO: 405540 - DNA, 15 bp, Homo sapiens
tacttgccaaagcaa

SEQ ID NO: 405541 - DNA, 15 bp, Homo sapiens
atacttgccaaagca

SEQ ID NO: 405542 - DNA, 15 bp, Homo sapiens
catacttgccaaagc

SEQ ID NO: 405543 - DNA, 15 bp, Homo sapiens
ccatacttgccaaag

SEQ ID NO: 405544 - DNA, 15 bp, Homo sapiens
tccatacttgccaaa

SEQ ID NO: 405545 - DNA, 15 bp, Homo sapiens
gtccatacttgccaa

SEQ ID NO: 405546 - DNA, 15 bp, Homo sapiens
tgtccatacttgcca

SEQ ID NO: 405547 - DNA, 15 bp, Homo sapiens
atgtccatacttgcc

SEQ ID NO: 405548 - DNA, 15 bp, Homo sapiens
aatgtccatacttgc

SEQ ID NO: 405549 - DNA, 15 bp, Homo sapiens
aaatgtccatacttg

SEQ ID NO: 405550 - DNA, 15 bp, Homo sapiens
aaaatgtccatactt

SEQ ID NO: 405551 - DNA, 15 bp, Homo sapiens
taaaatgtccatact

SEQ ID NO: 405552 - DNA, 15 bp, Homo sapiens
ttaaaatgtccatac

SEQ ID NO: 405553 - DNA, 15 bp, Homo sapiens
gttaaaatgtccata

SEQ ID NO: 405554 - DNA, 15 bp, Homo sapiens
gaagaatcaatattg

SEQ ID NO: 405555 - DNA, 15 bp, Homo sapiens
ggaagaatcaatatt

SEQ ID NO: 405556 - DNA, 15 bp, Homo sapiens
tggaagaatcaatat

SEQ ID NO: 405557 - DNA, 15 bp, Homo sapiens
ttggaagaatcaata

SEQ ID NO: 405558 - DNA, 15 bp, Homo sapiens
gttggaagaatcaat

SEQ ID NO: 405559 - DNA, 15 bp, Homo sapiens
ggttggaagaatcaa

SEQ ID NO: 405560 - DNA, 15 bp, Homo sapiens
gggttggaagaatca

SEQ ID NO: 405561 - DNA, 15 bp, Homo sapiens
tgggttggaagaatc

SEQ ID NO: 405562 - DNA, 15 bp, Homo sapiens
atgggttggaagaat

SEQ ID NO: 405563 - DNA, 15 bp, Homo sapiens
catgggttggaagaa

SEQ ID NO: 405564 - DNA, 15 bp, Homo sapiens
acatgggttggaaga

SEQ ID NO: 405565 - DNA, 15 bp, Homo sapiens
cacatgggttggaag

SEQ ID NO: 405566 - DNA, 15 bp, Homo sapiens
gcacatgggttggaa

SEQ ID NO: 405567 - DNA, 15 bp, Homo sapiens
tgcacatgggttgga

SEQ ID NO: 405568 - DNA, 15 bp, Homo sapiens
atgcacatgggttgg

SEQ ID NO: 405569 - DNA, 15 bp, Homo sapiens
catgcacatgggttg

SEQ ID NO: 405570 - DNA, 15 bp, Homo sapiens
ccatgcacatgggtt

SEQ ID NO: 405571 - DNA, 15 bp, Homo sapiens
tccatgcacatgggt

SEQ ID NO: 405572 - DNA, 15 bp, Homo sapiens
ttccatgcacatggg

SEQ ID NO: 405573 - DNA, 15 bp, Homo sapiens
attccatgcacatgg

SEQ ID NO: 405574 - DNA, 15 bp, Homo sapiens
cattccatgcacatg

SEQ ID NO: 405575 - DNA, 15 bp, Homo sapiens
gcattccatgcacat

SEQ ID NO: 405576 - DNA, 15 bp, Homo sapiens
agcattccatgcaca

SEQ ID NO: 405577 - DNA, 15 bp, Homo sapiens
aagcattccatgcac

SEQ ID NO: 405578 - DNA, 15 bp, Homo sapiens
gaagcattccatgca

SEQ ID NO: 405579 - DNA, 15 bp, Homo sapiens
agaagcattccatgc

SEQ ID NO: 405580 - DNA, 15 bp, Homo sapiens
gagaagcattccatg

SEQ ID NO: 405581 - DNA, 15 bp, Homo sapiens
ggagaagcattccat

SEQ ID NO: 405582 - DNA, 15 bp, Homo sapiens
tggagaagcattcca

SEQ ID NO: 405583 - DNA, 15 bp, Homo sapiens
gtggagaagcattcc

SEQ ID NO: 405584 - DNA, 15 bp, Homo sapiens
agtggagaagcattc

SEQ ID NO: 405585 - DNA, 15 bp, Homo sapiens
aagtggagaagcatt

SEQ ID NO: 405586 - DNA, 15 bp, Homo sapiens
caagtggagaagcat

SEQ ID NO: 405587 - DNA, 15 bp, Homo sapiens
acaagtggagaagca

SEQ ID NO: 405588 - DNA, 15 bp, Homo sapiens
aacaagtggagaagc

SEQ ID NO: 405589 - DNA, 15 bp, Homo sapiens
aaacaagtggagaag

SEQ ID NO: 405590 - DNA, 15 bp, Homo sapiens
caaacaagtggagaa

SEQ ID NO: 405591 - DNA, 15 bp, Homo sapiens
acaaacaagtggaga

SEQ ID NO: 405592 - DNA, 15 bp, Homo sapiens
cacaaacaagtggag

SEQ ID NO: 405593 - DNA, 15 bp, Homo sapiens
acacaaacaagtgga

SEQ ID NO: 405594 - DNA, 15 bp, Homo sapiens
gacacaaacaagtgg

SEQ ID NO: 405595 - DNA, 15 bp, Homo sapiens
tgacacaaacaagtg

SEQ ID NO: 405596 - DNA, 15 bp, Homo sapiens
atgacacaaacaagt

SEQ ID NO: 405597 - DNA, 15 bp, Homo sapiens
gatgacacaaacaag

SEQ ID NO: 405598 - DNA, 15 bp, Homo sapiens
caaatcagagatgac

SEQ ID NO: 405599 - DNA, 15 bp, Homo sapiens
acaaatcagagatga

SEQ ID NO: 405600 - DNA, 15 bp, Homo sapiens
aacaaatcagagatg

SEQ ID NO: 405601 - DNA, 15 bp, Homo sapiens
aaacaaatcagagat

SEQ ID NO: 405602 - DNA, 15 bp, Homo sapiens
taaacaaatcagaga

SEQ ID NO: 405603 - DNA, 15 bp, Homo sapiens
ctaaacaaatcagag

SEQ ID NO: 405604 - DNA, 15 bp, Homo sapiens
cctaaacaaatcaga

SEQ ID NO: 405605 - DNA, 15 bp, Homo sapiens
gcctaaacaaatcag

SEQ ID NO: 405606 - DNA, 15 bp, Homo sapiens
tgcctaaacaaatca

SEQ ID NO: 405607 - DNA, 15 bp, Homo sapiens
ttgcctaaacaaatc

SEQ ID NO: 405608 - DNA, 15 bp, Homo sapiens
attgcctaaacaaat

SEQ ID NO: 405609 - DNA, 15 bp, Homo sapiens
cattgcctaaacaaa

SEQ ID NO: 405610 - DNA, 15 bp, Homo sapiens
acattgcctaaacaa

SEQ ID NO: 405611 - DNA, 15 bp, Homo sapiens
aacattgcctaaaca

SEQ ID NO: 405612 - DNA, 15 bp, Homo sapiens
aaacattgcctaaac

SEQ ID NO: 405613 - DNA, 15 bp, Homo sapiens
aaaacattgcctaaa

SEQ ID NO: 405614 - DNA, 15 bp, Homo sapiens
taaaacattgcctaa

SEQ ID NO: 405615 - DNA, 15 bp, Homo sapiens
ataaaacattgccta

SEQ ID NO: 405616 - DNA, 15 bp, Homo sapiens
tataaaacattgcct

SEQ ID NO: 405617 - DNA, 15 bp, Homo sapiens
ctataaaacattgcc

SEQ ID NO: 405618 - DNA, 15 bp, Homo sapiens
actataaaacattgc

SEQ ID NO: 405619 - DNA, 15 bp, Homo sapiens
aactataaaacattg

SEQ ID NO: 405620 - DNA, 15 bp, Homo sapiens
gaactataaaacatt

SEQ ID NO: 405621 - DNA, 15 bp, Homo sapiens
agaactataaaacat

SEQ ID NO: 405622 - DNA, 15 bp, Homo sapiens
gagaactataaaaca

SEQ ID NO: 405623 - DNA, 15 bp, Homo sapiens
ggagaactataaaac

SEQ ID NO: 405624 - DNA, 15 bp, Homo sapiens
aggagaactataaaa

SEQ ID NO: 405625 - DNA, 15 bp, Homo sapiens
gaggagaactataaa

SEQ ID NO: 405626 - DNA, 15 bp, Homo sapiens
tgaggagaactataa

SEQ ID NO: 405627 - DNA, 15 bp, Homo sapiens
atgaggagaactata

SEQ ID NO: 405628 - DNA, 15 bp, Homo sapiens
tatgaggagaactat

SEQ ID NO: 405629 - DNA, 15 bp, Homo sapiens
ctatgaggagaacta

SEQ ID NO: 405630 - DNA, 15 bp, Homo sapiens
tctatgaggagaact

SEQ ID NO: 405631 - DNA, 15 bp, Homo sapiens
ttctatgaggagaac

SEQ ID NO: 405632 - DNA, 15 bp, Homo sapiens
tttctatgaggagaa

SEQ ID NO: 405633 - DNA, 15 bp, Homo sapiens
atttctatgaggaga

SEQ ID NO: 405634 - DNA, 15 bp, Homo sapiens
gatttctatgaggag

SEQ ID NO: 405635 - DNA, 15 bp, Homo sapiens
agatttctatgagga

SEQ ID NO: 405636 - DNA, 15 bp, Homo sapiens
aagatttctatgagg

SEQ ID NO: 405637 - DNA, 15 bp, Homo sapiens
gaagatttctatgag

SEQ ID NO: 405638 - DNA, 15 bp, Homo sapiens
ggaagatttctatga

SEQ ID NO: 405639 - DNA, 15 bp, Homo sapiens
tggaagatttctatg

SEQ ID NO: 405640 - DNA, 15 bp, Homo sapiens
atggaagatttctat

SEQ ID NO: 405641 - DNA, 15 bp, Homo sapiens
gatggaagatttcta

SEQ ID NO: 405642 - DNA, 15 bp, Homo sapiens
agatggaagatttct

SEQ ID NO: 405643 - DNA, 15 bp, Homo sapiens
gagatggaagatttc

SEQ ID NO: 405644 - DNA, 15 bp, Homo sapiens
agagatggaagattt

SEQ ID NO: 405645 - DNA, 15 bp, Homo sapiens
aagagatggaagatt

SEQ ID NO: 405646 - DNA, 15 bp, Homo sapiens
aaagagatggaagat

SEQ ID NO: 405647 - DNA, 15 bp, Homo sapiens
caaagagatggaaga

SEQ ID NO: 405648 - DNA, 15 bp, Homo sapiens
ccaaagagatggaag

SEQ ID NO: 405649 - DNA, 15 bp, Homo sapiens
accaaagagatggaa

SEQ ID NO: 405650 - DNA, 15 bp, Homo sapiens
aaccaaagagatgga

SEQ ID NO: 405651 - DNA, 15 bp, Homo sapiens
taaccaaagagatgg

SEQ ID NO: 405652 - DNA, 15 bp, Homo sapiens
gtaaccaaagagatg

SEQ ID NO: 405653 - DNA, 15 bp, Homo sapiens
tgtaaccaaagagat

SEQ ID NO: 405654 - DNA, 15 bp, Homo sapiens
atgtaaccaaagaga

SEQ ID NO: 405655 - DNA, 15 bp, Homo sapiens
catgtaaccaaagag

SEQ ID NO: 405656 - DNA, 15 bp, Homo sapiens
acatgtaaccaaaga

SEQ ID NO: 405657 - DNA, 15 bp, Homo sapiens
tacatgtaaccaaag

SEQ ID NO: 405658 - DNA, 15 bp, Homo sapiens
ctacatgtaaccaaa

SEQ ID NO: 405659 - DNA, 15 bp, Homo sapiens
actacatgtaaccaa

SEQ ID NO: 405660 - DNA, 15 bp, Homo sapiens
gactacatgtaacca

SEQ ID NO: 405661 - DNA, 15 bp, Homo sapiens
agactacatgtaacc

SEQ ID NO: 405662 - DNA, 15 bp, Homo sapiens
gagactacatgtaac

SEQ ID NO: 405663 - DNA, 15 bp, Homo sapiens
tgagactacatgtaa

SEQ ID NO: 405664 - DNA, 15 bp, Homo sapiens
ctgagactacatgta

SEQ ID NO: 405665 - DNA, 15 bp, Homo sapiens
cctgagactacatgt

SEQ ID NO: 405666 - DNA, 15 bp, Homo sapiens
acctgagactacatg

SEQ ID NO: 405667 - DNA, 15 bp, Homo sapiens
tacctgagactacat

SEQ ID NO: 405668 - DNA, 15 bp, Homo sapiens
atacctgagactaca

SEQ ID NO: 405669 - DNA, 15 bp, Homo sapiens
aatacctgagactac

SEQ ID NO: 405670 - DNA, 15 bp, Homo sapiens
aaatacctgagacta

SEQ ID NO: 405671 - DNA, 15 bp, Homo sapiens
caaatacctgagact

SEQ ID NO: 405672 - DNA, 15 bp, Homo sapiens
acaaatacctgagac

SEQ ID NO: 405673 - DNA, 15 bp, Homo sapiens
tacaaatacctgaga

SEQ ID NO: 405674 - DNA, 15 bp, Homo sapiens
atacaaatacctgag

SEQ ID NO: 405675 - DNA, 15 bp, Homo sapiens
catacaaatacctga

SEQ ID NO: 405676 - DNA, 15 bp, Homo sapiens
acatacaaatacctg

SEQ ID NO: 405677 - DNA, 15 bp, Homo sapiens
cacatacaaatacct

SEQ ID NO: 405678 - DNA, 15 bp, Homo sapiens
acacatacaaatacc

SEQ ID NO: 405679 - DNA, 15 bp, Homo sapiens
cacacatacaaatac

SEQ ID NO: 405680 - DNA, 15 bp, Homo sapiens
acacacatacaaata

SEQ ID NO: 405681 - DNA, 15 bp, Homo sapiens
cacacacatacaaat

SEQ ID NO: 405682 - DNA, 15 bp, Homo sapiens
acacacacatacaaa

SEQ ID NO: 405683 - DNA, 15 bp, Homo sapiens
cacacacacatacaa

SEQ ID NO: 405684 - DNA, 15 bp, Homo sapiens
ccacacacacataca

SEQ ID NO: 405685 - DNA, 15 bp, Homo sapiens
gccacacacacatac

SEQ ID NO: 405686 - DNA, 15 bp, Homo sapiens
agccacacacacata

SEQ ID NO: 405687 - DNA, 15 bp, Homo sapiens
tagccacacacacat

SEQ ID NO: 405688 - DNA, 15 bp, Homo sapiens
atagccacacacaca

SEQ ID NO: 405689 - DNA, 15 bp, Homo sapiens
aatagccacacacac

SEQ ID NO: 405690 - DNA, 15 bp, Homo sapiens
caatagccacacaca

SEQ ID NO: 405691 - DNA, 15 bp, Homo sapiens
acaatagccacacac

SEQ ID NO: 405692 - DNA, 15 bp, Homo sapiens
tacaatagccacaca

SEQ ID NO: 405693 - DNA, 15 bp, Homo sapiens
ttacaatagccacac

SEQ ID NO: 405694 - DNA, 15 bp, Homo sapiens
tttacaatagccaca

SEQ ID NO: 405695 - DNA, 15 bp, Homo sapiens
atttacaatagccac

SEQ ID NO: 405696 - DNA, 15 bp, Homo sapiens
catttacaatagcca

SEQ ID NO: 405697 - DNA, 15 bp, Homo sapiens
tcatttacaatagcc

SEQ ID NO: 405698 - DNA, 15 bp, Homo sapiens
ctcatttacaatagc

SEQ ID NO: 405699 - DNA, 15 bp, Homo sapiens
tctcatttacaatag

SEQ ID NO: 405700 - DNA, 15 bp, Homo sapiens
atctcatttacaata

SEQ ID NO: 405701 - DNA, 15 bp, Homo sapiens
aatctcatttacaat

SEQ ID NO: 405702 - DNA, 15 bp, Homo sapiens
taatctcatttacaa

SEQ ID NO: 405703 - DNA, 15 bp, Homo sapiens
gtaatctcatttaca

SEQ ID NO: 405704 - DNA, 15 bp, Homo sapiens
tgtaatctcatttac

SEQ ID NO: 405705 - DNA, 15 bp, Homo sapiens
atgtaatctcattta

SEQ ID NO: 405706 - DNA, 15 bp, Homo sapiens
aatgtaatctcattt

SEQ ID NO: 405707 - DNA, 15 bp, Homo sapiens
gaatgtaatctcatt

SEQ ID NO: 405708 - DNA, 15 bp, Homo sapiens
agaatgtaatctcat

SEQ ID NO: 405709 - DNA, 15 bp, Homo sapiens
aagaatgtaatctca

SEQ ID NO: 405710 - DNA, 15 bp, Homo sapiens
caagaatgtaatctc

SEQ ID NO: 405711 - DNA, 15 bp, Homo sapiens
tcaagaatgtaatct

SEQ ID NO: 405712 - DNA, 15 bp, Homo sapiens
atcaagaatgtaatc

SEQ ID NO: 405713 - DNA, 15 bp, Homo sapiens
aatcaagaatgtaat

SEQ ID NO: 405714 - DNA, 15 bp, Homo sapiens
aaatcaagaatgtaa

SEQ ID NO: 405715 - DNA, 15 bp, Homo sapiens
aaaatcaagaatgta

SEQ ID NO: 405716 - DNA, 15 bp, Homo sapiens
caaaatcaagaatgt

SEQ ID NO: 405717 - DNA, 15 bp, Homo sapiens
acaaaatcaagaatg

SEQ ID NO: 405718 - DNA, 15 bp, Homo sapiens
aacaaaatcaagaat

SEQ ID NO: 405719 - DNA, 15 bp, Homo sapiens
gaacaaaatcaagaa

SEQ ID NO: 405720 - DNA, 15 bp, Homo sapiens
agaacaaaatcaaga

SEQ ID NO: 405721 - DNA, 15 bp, Homo sapiens
gagaacaaaatcaag

SEQ ID NO: 405722 - DNA, 15 bp, Homo sapiens
tgagaacaaaatcaa

SEQ ID NO: 405723 - DNA, 15 bp, Homo sapiens
gtgagaacaaaatca

SEQ ID NO: 405724 - DNA, 15 bp, Homo sapiens
ggtgagaacaaaatc

SEQ ID NO: 405725 - DNA, 15 bp, Homo sapiens
tggtgagaacaaaat

SEQ ID NO: 405726 - DNA, 15 bp, Homo sapiens
gtggtgagaacaaaa

SEQ ID NO: 405727 - DNA, 15 bp, Homo sapiens
agtggtgagaacaaa

SEQ ID NO: 405728 - DNA, 15 bp, Homo sapiens
gagtggtgagaacaa

SEQ ID NO: 405729 - DNA, 15 bp, Homo sapiens
ggagtggtgagaaca

SEQ ID NO: 405730 - DNA, 15 bp, Homo sapiens
aggagtggtgagaac

SEQ ID NO: 405731 - DNA, 15 bp, Homo sapiens
taggagtggtgagaa

SEQ ID NO: 405732 - DNA, 15 bp, Homo sapiens
gtactatgttgaata

SEQ ID NO: 405733 - DNA, 15 bp, Homo sapiens
agtactatgttgaat

SEQ ID NO: 405734 - DNA, 15 bp, Homo sapiens
tagtactatgttgaa

SEQ ID NO: 405735 - DNA, 15 bp, Homo sapiens
ctagtactatgttga

SEQ ID NO: 405736 - DNA, 15 bp, Homo sapiens
tctagtactatgttg

SEQ ID NO: 405737 - DNA, 15 bp, Homo sapiens
ttctagtactatgtt

SEQ ID NO: 405738 - DNA, 15 bp, Homo sapiens
cttctagtactatgt

SEQ ID NO: 405739 - DNA, 15 bp, Homo sapiens
acttctagtactatg

SEQ ID NO: 405740 - DNA, 15 bp, Homo sapiens
gacttctagtactat

SEQ ID NO: 405741 - DNA, 15 bp, Homo sapiens
agacttctagtacta

SEQ ID NO: 405742 - DNA, 15 bp, Homo sapiens
aagacttctagtact

SEQ ID NO: 405743 - DNA, 15 bp, Homo sapiens
taagacttctagtac

SEQ ID NO: 405744 - DNA, 15 bp, Homo sapiens
ctaagacttctagta

SEQ ID NO: 405745 - DNA, 15 bp, Homo sapiens
gctaagacttctagt

SEQ ID NO: 405746 - DNA, 15 bp, Homo sapiens
ggctaagacttctag

SEQ ID NO: 405747 - DNA, 15 bp, Homo sapiens
tggctaagacttcta

SEQ ID NO: 405748 - DNA, 15 bp, Homo sapiens
ctggctaagacttct

SEQ ID NO: 405749 - DNA, 15 bp, Homo sapiens
tctggctaagacttc

SEQ ID NO: 405750 - DNA, 15 bp, Homo sapiens
ctctggctaagactt

SEQ ID NO: 405751 - DNA, 15 bp, Homo sapiens
gctctggctaagact

SEQ ID NO: 405752 - DNA, 15 bp, Homo sapiens
tgctctggctaagac

SEQ ID NO: 405753 - DNA, 15 bp, Homo sapiens
ttgctctggctaaga

SEQ ID NO: 405754 - DNA, 15 bp, Homo sapiens
attgctctggctaag

SEQ ID NO: 405755 - DNA, 15 bp, Homo sapiens
gattgctctggctaa

SEQ ID NO: 405756 - DNA, 15 bp, Homo sapiens
tgattgctctggcta

SEQ ID NO: 405757 - DNA, 15 bp, Homo sapiens
ctgattgctctggct

SEQ ID NO: 405758 - DNA, 15 bp, Homo sapiens
cctgattgctctggc

SEQ ID NO: 405759 - DNA, 15 bp, Homo sapiens
gcctgattgctctgg

SEQ ID NO: 405760 - DNA, 15 bp, Homo sapiens
tgcctgattgctctg

SEQ ID NO: 405761 - DNA, 15 bp, Homo sapiens
ttgcctgattgctct

SEQ ID NO: 405762 - DNA, 15 bp, Homo sapiens
cttgcctgattgctc

SEQ ID NO: 405763 - DNA, 15 bp, Homo sapiens
tcttgcctgattgct

SEQ ID NO: 405764 - DNA, 15 bp, Homo sapiens
actttctcttgcctg

SEQ ID NO: 405765 - DNA, 15 bp, Homo sapiens
tactttctcttgcct

SEQ ID NO: 405766 - DNA, 15 bp, Homo sapiens
ttactttctcttgcc

SEQ ID NO: 405767 - DNA, 15 bp, Homo sapiens
attactttctcttgc

SEQ ID NO: 405768 - DNA, 15 bp, Homo sapiens
tattactttctcttg

SEQ ID NO: 405769 - DNA, 15 bp, Homo sapiens
ttattactttctctt

SEQ ID NO: 405770 - DNA, 15 bp, Homo sapiens
tttattactttctct

SEQ ID NO: 405771 - DNA, 15 bp, Homo sapiens
ttttattactttctc

SEQ ID NO: 405772 - DNA, 15 bp, Homo sapiens
cttttattactttct

SEQ ID NO: 405773 - DNA, 15 bp, Homo sapiens
ccttttattactttc

SEQ ID NO: 405774 - DNA, 15 bp, Homo sapiens
gccttttattacttt

SEQ ID NO: 405775 - DNA, 15 bp, Homo sapiens
tgccttttattactt

SEQ ID NO: 405776 - DNA, 15 bp, Homo sapiens
gtgccttttattact

SEQ ID NO: 405777 - DNA, 15 bp, Homo sapiens
agtgccttttattac

SEQ ID NO: 405778 - DNA, 15 bp, Homo sapiens
cagtgccttttatta

SEQ ID NO: 405779 - DNA, 15 bp, Homo sapiens
gcagtgccttttatt

SEQ ID NO: 405780 - DNA, 15 bp, Homo sapiens
ggcagtgccttttat

SEQ ID NO: 405781 - DNA, 15 bp, Homo sapiens
gggcagtgcctttta

SEQ ID NO: 405782 - DNA, 15 bp, Homo sapiens
agggcagtgcctttt

SEQ ID NO: 405783 - DNA, 15 bp, Homo sapiens
gagggcagtgccttt

SEQ ID NO: 405784 - DNA, 15 bp, Homo sapiens
ggagggcagtgcctt

SEQ ID NO: 405785 - DNA, 15 bp, Homo sapiens
gggagggcagtgcct

SEQ ID NO: 405786 - DNA, 15 bp, Homo sapiens
ggggagggcagtgcc

SEQ ID NO: 405787 - DNA, 15 bp, Homo sapiens
gggggagggcagtgc

SEQ ID NO: 405788 - DNA, 15 bp, Homo sapiens
ggggggagggcagtg

SEQ ID NO: 405789 - DNA, 15 bp, Homo sapiens
tggggggagggcagt

SEQ ID NO: 405790 - DNA, 15 bp, Homo sapiens
gtggggggagggcag

SEQ ID NO: 405791 - DNA, 15 bp, Homo sapiens
ggtggggggagggca

SEQ ID NO: 405792 - DNA, 15 bp, Homo sapiens
tggtggggggagggc

SEQ ID NO: 405793 - DNA, 15 bp, Homo sapiens
ttggtggggggaggg

SEQ ID NO: 405794 - DNA, 15 bp, Homo sapiens
tttggtggggggagg

SEQ ID NO: 405795 - DNA, 15 bp, Homo sapiens
ttttggtggggggag

SEQ ID NO: 405796 - DNA, 15 bp, Homo sapiens
tttttggtgggggga

SEQ ID NO: 405797 - DNA, 15 bp, Homo sapiens
ttttttggtgggggg

SEQ ID NO: 405798 - DNA, 15 bp, Homo sapiens
gttttttggtggggg

SEQ ID NO: 405799 - DNA, 15 bp, Homo sapiens
cgttttttggtgggg

SEQ ID NO: 405800 - DNA, 15 bp, Homo sapiens
tcgttttttggtggg

SEQ ID NO: 405801 - DNA, 15 bp, Homo sapiens
ttcgttttttggtgg

SEQ ID NO: 405802 - DNA, 15 bp, Homo sapiens
tttcgttttttggtg

SEQ ID NO: 405803 - DNA, 15 bp, Homo sapiens
ttttcgttttttggt

SEQ ID NO: 405804 - DNA, 15 bp, Homo sapiens
tttttcgttttttgg

SEQ ID NO: 405805 - DNA, 15 bp, Homo sapiens
ctttttcgttttttg

SEQ ID NO: 405806 - DNA, 15 bp, Homo sapiens
actttttcgtttttt

SEQ ID NO: 405807 - DNA, 15 bp, Homo sapiens
aactttttcgttttt

SEQ ID NO: 405808 - DNA, 15 bp, Homo sapiens
taactttttcgtttt

SEQ ID NO: 405809 - DNA, 15 bp, Homo sapiens
ataactttttcgttt

SEQ ID NO: 405810 - DNA, 15 bp, Homo sapiens
gataactttttcgtt

SEQ ID NO: 405811 - DNA, 15 bp, Homo sapiens
tgataactttttcgt

SEQ ID NO: 405812 - DNA, 15 bp, Homo sapiens
gtgataactttttcg

SEQ ID NO: 405813 - DNA, 15 bp, Homo sapiens
ggtgataactttttc

SEQ ID NO: 405814 - DNA, 15 bp, Homo sapiens
tggtgataacttttt

SEQ ID NO: 405815 - DNA, 15 bp, Homo sapiens
gtggtgataactttt

SEQ ID NO: 405816 - DNA, 15 bp, Homo sapiens
agtggtgataacttt

SEQ ID NO: 405817 - DNA, 15 bp, Homo sapiens
tagtggtgataactt

SEQ ID NO: 405818 - DNA, 15 bp, Homo sapiens
ttagtggtgataact

SEQ ID NO: 405819 - DNA, 15 bp, Homo sapiens
gttagtggtgataac

SEQ ID NO: 405820 - DNA, 15 bp, Homo sapiens
tgttagtggtgataa

SEQ ID NO: 405821 - DNA, 15 bp, Homo sapiens
ttgttagtggtgata

SEQ ID NO: 405822 - DNA, 15 bp, Homo sapiens
attgttagtggtgat

SEQ ID NO: 405823 - DNA, 15 bp, Homo sapiens
tattgttagtggtga

SEQ ID NO: 405824 - DNA, 15 bp, Homo sapiens
atattgttagtggtg

SEQ ID NO: 405825 - DNA, 15 bp, Homo sapiens
catattgttagtggt

SEQ ID NO: 405826 - DNA, 15 bp, Homo sapiens
tcatattgttagtgg

SEQ ID NO: 405827 - DNA, 15 bp, Homo sapiens
atcatattgttagtg

SEQ ID NO: 405828 - DNA, 15 bp, Homo sapiens
aatcatattgttagt

SEQ ID NO: 405829 - DNA, 15 bp, Homo sapiens
gaatcatattgttag

SEQ ID NO: 405830 - DNA, 15 bp, Homo sapiens
agaatcatattgtta

SEQ ID NO: 405831 - DNA, 15 bp, Homo sapiens
tagaatcatattgtt

SEQ ID NO: 405832 - DNA, 15 bp, Homo sapiens
atagaatcatattgt

SEQ ID NO: 405833 - DNA, 15 bp, Homo sapiens
tatagaatcatattg

SEQ ID NO: 405834 - DNA, 15 bp, Homo sapiens
atatagaatcatatt

SEQ ID NO: 405835 - DNA, 15 bp, Homo sapiens
gatatagaatcatat

SEQ ID NO: 405836 - DNA, 15 bp, Homo sapiens
agatatagaatcata

SEQ ID NO: 405837 - DNA, 15 bp, Homo sapiens
tagatatagaatcat

SEQ ID NO: 405838 - DNA, 15 bp, Homo sapiens
ctagatatagaatca

SEQ ID NO: 405839 - DNA, 15 bp, Homo sapiens
cctagatatagaatc

SEQ ID NO: 405840 - DNA, 15 bp, Homo sapiens
tcctagatatagaat

SEQ ID NO: 405841 - DNA, 15 bp, Homo sapiens
ttcctagatatagaa

SEQ ID NO: 405842 - DNA, 15 bp, Homo sapiens
tttcctagatataga

SEQ ID NO: 405843 - DNA, 15 bp, Homo sapiens
gtttcctagatatag

SEQ ID NO: 405844 - DNA, 15 bp, Homo sapiens
ggtttcctagatata

SEQ ID NO: 405845 - DNA, 15 bp, Homo sapiens
gggtttcctagatat

SEQ ID NO: 405846 - DNA, 15 bp, Homo sapiens
agggtttcctagata

SEQ ID NO: 405847 - DNA, 15 bp, Homo sapiens
tagggtttcctagat

SEQ ID NO: 405848 - DNA, 15 bp, Homo sapiens
ttagggtttcctaga

SEQ ID NO: 405849 - DNA, 15 bp, Homo sapiens
tttagggtttcctag

SEQ ID NO: 405850 - DNA, 15 bp, Homo sapiens
ctttagggtttccta

SEQ ID NO: 405851 - DNA, 15 bp, Homo sapiens
tctttagggtttcct

SEQ ID NO: 405852 - DNA, 15 bp, Homo sapiens
atctttagggtttcc

SEQ ID NO: 405853 - DNA, 15 bp, Homo sapiens
aatctttagggtttc

SEQ ID NO: 405854 - DNA, 15 bp, Homo sapiens
gaatctttagggttt

SEQ ID NO: 405855 - DNA, 15 bp, Homo sapiens
agaatctttagggtt

SEQ ID NO: 405856 - DNA, 15 bp, Homo sapiens
cagaatctttagggt

SEQ ID NO: 405857 - DNA, 15 bp, Homo sapiens
gcagaatctttaggg

SEQ ID NO: 405858 - DNA, 15 bp, Homo sapiens
tgcagaatctttagg

SEQ ID NO: 405859 - DNA, 15 bp, Homo sapiens
ttgcagaatctttag

SEQ ID NO: 405860 - DNA, 15 bp, Homo sapiens
tttgcagaatcttta

SEQ ID NO: 405861 - DNA, 15 bp, Homo sapiens
ttttgcagaatcttt

SEQ ID NO: 405862 - DNA, 15 bp, Homo sapiens
tttttgcagaatctt

SEQ ID NO: 405863 - DNA, 15 bp, Homo sapiens
ctttttgcagaatct

SEQ ID NO: 405864 - DNA, 15 bp, Homo sapiens
tctttttgcagaatc

SEQ ID NO: 405865 - DNA, 15 bp, Homo sapiens
gtctttttgcagaat

SEQ ID NO: 405866 - DNA, 15 bp, Homo sapiens
agtctttttgcagaa

SEQ ID NO: 405867 - DNA, 15 bp, Homo sapiens
gagtctttttgcaga

SEQ ID NO: 405868 - DNA, 15 bp, Homo sapiens
ggagtctttttgcag

SEQ ID NO: 405869 - DNA, 15 bp, Homo sapiens
aggagtctttttgca

SEQ ID NO: 405870 - DNA, 15 bp, Homo sapiens
taggagtctttttgc

SEQ ID NO: 405871 - DNA, 15 bp, Homo sapiens
ctaggagtctttttg

SEQ ID NO: 405872 - DNA, 15 bp, Homo sapiens
tctaggagtcttttt

SEQ ID NO: 405873 - DNA, 15 bp, Homo sapiens
gtctaggagtctttt

SEQ ID NO: 405874 - DNA, 15 bp, Homo sapiens
agtctaggagtcttt

SEQ ID NO: 405875 - DNA, 15 bp, Homo sapiens
aagtctaggagtctt

SEQ ID NO: 405876 - DNA, 15 bp, Homo sapiens
caagtctaggagtct

SEQ ID NO: 405877 - DNA, 15 bp, Homo sapiens
tcaagtctaggagtc

SEQ ID NO: 405878 - DNA, 15 bp, Homo sapiens
atcaagtctaggagt

SEQ ID NO: 405879 - DNA, 15 bp, Homo sapiens
tatcaagtctaggag

SEQ ID NO: 405880 - DNA, 15 bp, Homo sapiens
ttatcaagtctagga

SEQ ID NO: 405881 - DNA, 15 bp, Homo sapiens
tttatcaagtctagg

SEQ ID NO: 405882 - DNA, 15 bp, Homo sapiens
gtttatcaagtctag

SEQ ID NO: 405883 - DNA, 15 bp, Homo sapiens
tgtttatcaagtcta

SEQ ID NO: 405884 - DNA, 15 bp, Homo sapiens
ttgtttatcaagtct

SEQ ID NO: 405885 - DNA, 15 bp, Homo sapiens
gttgtttatcaagtc

SEQ ID NO: 405886 - DNA, 15 bp, Homo sapiens
agttgtttatcaagt

SEQ ID NO: 405887 - DNA, 15 bp, Homo sapiens
aagttgtttatcaag

SEQ ID NO: 405888 - DNA, 15 bp, Homo sapiens
aaagttgtttatcaa

SEQ ID NO: 405889 - DNA, 15 bp, Homo sapiens
taaagttgtttatca

SEQ ID NO: 405890 - DNA, 15 bp, Homo sapiens
ctaaagttgtttatc

SEQ ID NO: 405891 - DNA, 15 bp, Homo sapiens
actaaagttgtttat

SEQ ID NO: 405892 - DNA, 15 bp, Homo sapiens
tactaaagttgttta

SEQ ID NO: 405893 - DNA, 15 bp, Homo sapiens
ttactaaagttgttt

SEQ ID NO: 405894 - DNA, 15 bp, Homo sapiens
tttactaaagttgtt

SEQ ID NO: 405895 - DNA, 15 bp, Homo sapiens
ctttactaaagttgt

SEQ ID NO: 405896 - DNA, 15 bp, Homo sapiens
actttactaaagttg

SEQ ID NO: 405897 - DNA, 15 bp, Homo sapiens
gactttactaaagtt

SEQ ID NO: 405898 - DNA, 15 bp, Homo sapiens
agactttactaaagt

SEQ ID NO: 405899 - DNA, 15 bp, Homo sapiens
gagactttactaaag

SEQ ID NO: 405900 - DNA, 15 bp, Homo sapiens
tgagactttactaaa

SEQ ID NO: 405901 - DNA, 15 bp, Homo sapiens
ctgagactttactaa

SEQ ID NO: 405902 - DNA, 15 bp, Homo sapiens
cctgagactttacta

SEQ ID NO: 405903 - DNA, 15 bp, Homo sapiens
tcctgagactttact

SEQ ID NO: 405904 - DNA, 15 bp, Homo sapiens
atcctgagactttac

SEQ ID NO: 405905 - DNA, 15 bp, Homo sapiens
tatcctgagacttta

SEQ ID NO: 405906 - DNA, 15 bp, Homo sapiens
ttatcctgagacttt

SEQ ID NO: 405907 - DNA, 15 bp, Homo sapiens
tttatcctgagactt

SEQ ID NO: 405908 - DNA, 15 bp, Homo sapiens
ttttatcctgagact

SEQ ID NO: 405909 - DNA, 15 bp, Homo sapiens
tttttatcctgagac

SEQ ID NO: 405910 - DNA, 15 bp, Homo sapiens
tatttttatcctgag

SEQ ID NO: 405911 - DNA, 15 bp, Homo sapiens
ctatttttatcctga

SEQ ID NO: 405912 - DNA, 15 bp, Homo sapiens
actatttttatcctg

SEQ ID NO: 405913 - DNA, 15 bp, Homo sapiens
gactatttttatcct

SEQ ID NO: 405914 - DNA, 15 bp, Homo sapiens
tgactatttttatcc

SEQ ID NO: 405915 - DNA, 15 bp, Homo sapiens
ttgactatttttatc

SEQ ID NO: 405916 - DNA, 15 bp, Homo sapiens
gttgactatttttat

SEQ ID NO: 405917 - DNA, 15 bp, Homo sapiens
tgttgactattttta

SEQ ID NO: 405918 - DNA, 15 bp, Homo sapiens
atgttgactattttt

SEQ ID NO: 405919 - DNA, 15 bp, Homo sapiens
tatgttgactatttt

SEQ ID NO: 405920 - DNA, 15 bp, Homo sapiens
atatgttgactattt

SEQ ID NO: 405921 - DNA, 15 bp, Homo sapiens
tatatgttgactatt

SEQ ID NO: 405922 - DNA, 15 bp, Homo sapiens
ttatatgttgactat

SEQ ID NO: 405923 - DNA, 15 bp, Homo sapiens
tttatatgttgacta

SEQ ID NO: 405924 - DNA, 15 bp, Homo sapiens
ttttatatgttgact

SEQ ID NO: 405925 - DNA, 15 bp, Homo sapiens
tttttatatgttgac

SEQ ID NO: 405926 - DNA, 15 bp, Homo sapiens
atttttatatgttga

SEQ ID NO: 405927 - DNA, 15 bp, Homo sapiens
gatttttatatgttg

SEQ ID NO: 405928 - DNA, 15 bp, Homo sapiens
tgatttttatatgtt

SEQ ID NO: 405929 - DNA, 15 bp, Homo sapiens
ctgatttttatatgt

SEQ ID NO: 405930 - DNA, 15 bp, Homo sapiens
actgatttttatatg

SEQ ID NO: 405931 - DNA, 15 bp, Homo sapiens
tactgatttttatat

SEQ ID NO: 405932 - DNA, 15 bp, Homo sapiens
ctactgatttttata

SEQ ID NO: 405933 - DNA, 15 bp, Homo sapiens
gctactgatttttat

SEQ ID NO: 405934 - DNA, 15 bp, Homo sapiens
tgctactgattttta

SEQ ID NO: 405935 - DNA, 15 bp, Homo sapiens
atgctactgattttt

SEQ ID NO: 405936 - DNA, 15 bp, Homo sapiens
aatgctactgatttt

SEQ ID NO: 405937 - DNA, 15 bp, Homo sapiens
aaatgctactgattt

SEQ ID NO: 405938 - DNA, 15 bp, Homo sapiens
gaaatgctactgatt

SEQ ID NO: 405939 - DNA, 15 bp, Homo sapiens
agaaatgctactgat

SEQ ID NO: 405940 - DNA, 15 bp, Homo sapiens
tagaaatgctactga

SEQ ID NO: 405941 - DNA, 15 bp, Homo sapiens
atagaaatgctactg

SEQ ID NO: 405942 - DNA, 15 bp, Homo sapiens
tatagaaatgctact

SEQ ID NO: 405943 - DNA, 15 bp, Homo sapiens
gtatagaaatgctac

SEQ ID NO: 405944 - DNA, 15 bp, Homo sapiens
tgtatagaaatgcta

SEQ ID NO: 405945 - DNA, 15 bp, Homo sapiens
gtgtatagaaatgct

SEQ ID NO: 405946 - DNA, 15 bp, Homo sapiens
cgtgtatagaaatgc

SEQ ID NO: 405947 - DNA, 15 bp, Homo sapiens
acgtgtatagaaatg

SEQ ID NO: 405948 - DNA, 15 bp, Homo sapiens
cacgtgtatagaaat

SEQ ID NO: 405949 - DNA, 15 bp, Homo sapiens
tcacgtgtatagaaa

SEQ ID NO: 405950 - DNA, 15 bp, Homo sapiens
atcacgtgtatagaa

SEQ ID NO: 405951 - DNA, 15 bp, Homo sapiens
tatcacgtgtataga

SEQ ID NO: 405952 - DNA, 15 bp, Homo sapiens
atatcacgtgtatag

SEQ ID NO: 405953 - DNA, 15 bp, Homo sapiens
gatatcacgtgtata

SEQ ID NO: 405954 - DNA, 15 bp, Homo sapiens
agatatcacgtgtat

SEQ ID NO: 405955 - DNA, 15 bp, Homo sapiens
aagatatcacgtgta

SEQ ID NO: 405956 - DNA, 15 bp, Homo sapiens
aaagatatcacgtgt

SEQ ID NO: 405957 - DNA, 15 bp, Homo sapiens
gaaagatatcacgtg

SEQ ID NO: 405958 - DNA, 15 bp, Homo sapiens
tgaaagatatcacgt

SEQ ID NO: 405959 - DNA, 15 bp, Homo sapiens
ttgaaagatatcacg

SEQ ID NO: 405960 - DNA, 15 bp, Homo sapiens
gttgaaagatatcac

SEQ ID NO: 405961 - DNA, 15 bp, Homo sapiens
agttgaaagatatca

SEQ ID NO: 405962 - DNA, 15 bp, Homo sapiens
tagttgaaagatatc

SEQ ID NO: 405963 - DNA, 15 bp, Homo sapiens
ctagttgaaagatat

SEQ ID NO: 405964 - DNA, 15 bp, Homo sapiens
tctagttgaaagata

SEQ ID NO: 405965 - DNA, 15 bp, Homo sapiens
atctagttgaaagat

SEQ ID NO: 405966 - DNA, 15 bp, Homo sapiens
aatctagttgaaaga

SEQ ID NO: 405967 - DNA, 15 bp, Homo sapiens
aaatctagttgaaag

SEQ ID NO: 405968 - DNA, 15 bp, Homo sapiens
taaatctagttgaaa

SEQ ID NO: 405969 - DNA, 15 bp, Homo sapiens
ataaatctagttgaa

SEQ ID NO: 405970 - DNA, 15 bp, Homo sapiens
aataaatctagttga

SEQ ID NO: 405971 - DNA, 15 bp, Homo sapiens
aaataaatctagttg

SEQ ID NO: 405972 - DNA, 15 bp, Homo sapiens
gaaataaatctagtt

SEQ ID NO: 405973 - DNA, 15 bp, Homo sapiens
agaaataaatctagt

SEQ ID NO: 405974 - DNA, 15 bp, Homo sapiens
tagaaataaatctag

SEQ ID NO: 405975 - DNA, 15 bp, Homo sapiens
ctagaaataaatcta

SEQ ID NO: 405976 - DNA, 15 bp, Homo sapiens
actagaaataaatct

SEQ ID NO: 405977 - DNA, 15 bp, Homo sapiens
aactagaaataaatc

SEQ ID NO: 405978 - DNA, 15 bp, Homo sapiens
aaactagaaataaat

SEQ ID NO: 405979 - DNA, 15 bp, Homo sapiens
taaactagaaataaa

SEQ ID NO: 405980 - DNA, 15 bp, Homo sapiens
ttaaactagaaataa

SEQ ID NO: 405981 - DNA, 15 bp, Homo sapiens
attaaactagaaata

SEQ ID NO: 405982 - DNA, 15 bp, Homo sapiens
aattaaactagaaat

SEQ ID NO: 405983 - DNA, 15 bp, Homo sapiens
gaattaaactagaaa

SEQ ID NO: 405984 - DNA, 15 bp, Homo sapiens
agaattaaactagaa

SEQ ID NO: 405985 - DNA, 15 bp, Homo sapiens
tagaattaaactaga

SEQ ID NO: 405986 - DNA, 15 bp, Homo sapiens
gtagaattaaactag

SEQ ID NO: 405987 - DNA, 15 bp, Homo sapiens
agtagaattaaacta

SEQ ID NO: 405988 - DNA, 15 bp, Homo sapiens
cagtagaattaaact

SEQ ID NO: 405989 - DNA, 15 bp, Homo sapiens
acagtagaattaaac

SEQ ID NO: 405990 - DNA, 15 bp, Homo sapiens
cacagtagaattaaa

SEQ ID NO: 405991 - DNA, 15 bp, Homo sapiens
ccacagtagaattaa

SEQ ID NO: 405992 - DNA, 15 bp, Homo sapiens
accacagtagaatta

SEQ ID NO: 405993 - DNA, 15 bp, Homo sapiens
gaccacagtagaatt

SEQ ID NO: 405994 - DNA, 15 bp, Homo sapiens
tgaccacagtagaat

SEQ ID NO: 405995 - DNA, 15 bp, Homo sapiens
ctgaccacagtagaa

SEQ ID NO: 405996 - DNA, 15 bp, Homo sapiens
tctgaccacagtaga

SEQ ID NO: 405997 - DNA, 15 bp, Homo sapiens
ctctgaccacagtag

SEQ ID NO: 405998 - DNA, 15 bp, Homo sapiens
tctctgaccacagta

SEQ ID NO: 405999 - DNA, 15 bp, Homo sapiens
atctctgaccacagt

SEQ ID NO: 406000 - DNA, 15 bp, Homo sapiens
gatctctgaccacag

SEQ ID NO: 406001 - DNA, 15 bp, Homo sapiens
tgatctctgaccaca

SEQ ID NO: 406002 - DNA, 15 bp, Homo sapiens
atgatctctgaccac

SEQ ID NO: 406003 - DNA, 15 bp, Homo sapiens
gatgatctctgacca

SEQ ID NO: 406004 - DNA, 15 bp, Homo sapiens
agatgatctctgacc

SEQ ID NO: 406005 - DNA, 15 bp, Homo sapiens
aagatgatctctgac

SEQ ID NO: 406006 - DNA, 15 bp, Homo sapiens
aaagatgatctctga

SEQ ID NO: 406007 - DNA, 15 bp, Homo sapiens
aaaagatgatctctg

SEQ ID NO: 406008 - DNA, 15 bp, Homo sapiens
taaaagatgatctct

SEQ ID NO: 406009 - DNA, 15 bp, Homo sapiens
ataaaagatgatctc

SEQ ID NO: 406010 - DNA, 15 bp, Homo sapiens
aataaaagatgatct

SEQ ID NO: 406011 - DNA, 15 bp, Homo sapiens
taataaaagatgatc

SEQ ID NO: 406012 - DNA, 15 bp, Homo sapiens
ataataaaagatgat

SEQ ID NO: 406013 - DNA, 15 bp, Homo sapiens
aataataaaagatga

SEQ ID NO: 406014 - DNA, 15 bp, Homo sapiens
aaataataaaagatg

SEQ ID NO: 406015 - DNA, 15 bp, Homo sapiens
gaaataataaaagat

SEQ ID NO: 406016 - DNA, 15 bp, Homo sapiens
tgaaataataaaaga

SEQ ID NO: 406017 - DNA, 15 bp, Homo sapiens
ctgaaataataaaag

SEQ ID NO: 406018 - DNA, 15 bp, Homo sapiens
gctgaaataataaaa

SEQ ID NO: 406019 - DNA, 15 bp, Homo sapiens
agctgaaataataaa

SEQ ID NO: 406020 - DNA, 15 bp, Homo sapiens
aagctgaaataataa

SEQ ID NO: 406021 - DNA, 15 bp, Homo sapiens
aaagctgaaataata

SEQ ID NO: 406022 - DNA, 15 bp, Homo sapiens
aaaagctgaaataat

SEQ ID NO: 406023 - DNA, 15 bp, Homo sapiens
gaaaagctgaaataa

SEQ ID NO: 406024 - DNA, 15 bp, Homo sapiens
tgaaaagctgaaata

SEQ ID NO: 406025 - DNA, 15 bp, Homo sapiens
ttgaaaagctgaaat

SEQ ID NO: 406026 - DNA, 15 bp, Homo sapiens
gttgaaaagctgaaa

SEQ ID NO: 406027 - DNA, 15 bp, Homo sapiens
agttgaaaagctgaa

SEQ ID NO: 406028 - DNA, 15 bp, Homo sapiens
aagttgaaaagctga

SEQ ID NO: 406029 - DNA, 15 bp, Homo sapiens
caagttgaaaagctg

SEQ ID NO: 406030 - DNA, 15 bp, Homo sapiens
acaagttgaaaagct

SEQ ID NO: 406031 - DNA, 15 bp, Homo sapiens
aacaagttgaaaagc

SEQ ID NO: 406032 - DNA, 15 bp, Homo sapiens
taacaagttgaaaag

SEQ ID NO: 406033 - DNA, 15 bp, Homo sapiens
ttaacaagttgaaaa

SEQ ID NO: 406034 - DNA, 15 bp, Homo sapiens
tttaacaagttgaaa

SEQ ID NO: 406035 - DNA, 15 bp, Homo sapiens
ctttaacaagttgaa

SEQ ID NO: 406036 - DNA, 15 bp, Homo sapiens
actttaacaagttga

SEQ ID NO: 406037 - DNA, 15 bp, Homo sapiens
aactttaacaagttg

SEQ ID NO: 406038 - DNA, 15 bp, Homo sapiens
aaactttaacaagtt

SEQ ID NO: 406039 - DNA, 15 bp, Homo sapiens
caaactttaacaagt

SEQ ID NO: 406040 - DNA, 15 bp, Homo sapiens
acaaactttaacaag

SEQ ID NO: 406041 - DNA, 15 bp, Homo sapiens
aacaaactttaacaa

SEQ ID NO: 406042 - DNA, 15 bp, Homo sapiens
aaacaaactttaaca

SEQ ID NO: 406043 - DNA, 15 bp, Homo sapiens
aaaacaaactttaac

SEQ ID NO: 406044 - DNA, 15 bp, Homo sapiens
aaaaacaaactttaa

SEQ ID NO: 406045 - DNA, 15 bp, Homo sapiens
gaaaaacaaacttta

SEQ ID NO: 406046 - DNA, 15 bp, Homo sapiens
ggaaaaacaaacttt

SEQ ID NO: 406047 - DNA, 15 bp, Homo sapiens
gggaaaaacaaactt

SEQ ID NO: 406048 - DNA, 15 bp, Homo sapiens
ggggaaaaacaaact

SEQ ID NO: 406049 - DNA, 15 bp, Homo sapiens
tggggaaaaacaaac

SEQ ID NO: 406050 - DNA, 15 bp, Homo sapiens
ctggggaaaaacaaa

SEQ ID NO: 406051 - DNA, 15 bp, Homo sapiens
tctggggaaaaacaa

SEQ ID NO: 406052 - DNA, 15 bp, Homo sapiens
ttctggggaaaaaca

SEQ ID NO: 406053 - DNA, 15 bp, Homo sapiens
attctggggaaaaac

SEQ ID NO: 406054 - DNA, 15 bp, Homo sapiens
tattctggggaaaaa

SEQ ID NO: 406055 - DNA, 15 bp, Homo sapiens
atattctggggaaaa

SEQ ID NO: 406056 - DNA, 15 bp, Homo sapiens
tatattctggggaaa

SEQ ID NO: 406057 - DNA, 15 bp, Homo sapiens
ttatattctggggaa

SEQ ID NO: 406058 - DNA, 15 bp, Homo sapiens
attatattctgggga

SEQ ID NO: 406059 - DNA, 15 bp, Homo sapiens
gattatattctgggg

SEQ ID NO: 406060 - DNA, 15 bp, Homo sapiens
agattatattctggg

SEQ ID NO: 406061 - DNA, 15 bp, Homo sapiens
tagattatattctgg

SEQ ID NO: 406062 - DNA, 15 bp, Homo sapiens
atagattatattctg

SEQ ID NO: 406063 - DNA, 15 bp, Homo sapiens
gatagattatattct

SEQ ID NO: 406064 - DNA, 15 bp, Homo sapiens
agatagattatattc

SEQ ID NO: 406065 - DNA, 15 bp, Homo sapiens
aagatagattatatt

SEQ ID NO: 406066 - DNA, 15 bp, Homo sapiens
taagatagattatat

SEQ ID NO: 406067 - DNA, 15 bp, Homo sapiens
ctaagatagattata

SEQ ID NO: 406068 - DNA, 15 bp, Homo sapiens
actaagatagattat

SEQ ID NO: 406069 - DNA, 15 bp, Homo sapiens
cactaagatagatta

SEQ ID NO: 406070 - DNA, 15 bp, Homo sapiens
tcactaagatagatt

SEQ ID NO: 406071 - DNA, 15 bp, Homo sapiens
ttcactaagatagat

SEQ ID NO: 406072 - DNA, 15 bp, Homo sapiens
attcactaagataga

SEQ ID NO: 406073 - DNA, 15 bp, Homo sapiens
aattcactaagatag

SEQ ID NO: 406074 - DNA, 15 bp, Homo sapiens
aaattcactaagata

SEQ ID NO: 406075 - DNA, 15 bp, Homo sapiens
gaaattcactaagat

SEQ ID NO: 406076 - DNA, 15 bp, Homo sapiens
ggaaattcactaaga

SEQ ID NO: 406077 - DNA, 15 bp, Homo sapiens
gggaaattcactaag

SEQ ID NO: 406078 - DNA, 15 bp, Homo sapiens
tgggaaattcactaa

SEQ ID NO: 406079 - DNA, 15 bp, Homo sapiens
atgggaaattcacta

SEQ ID NO: 406080 - DNA, 15 bp, Homo sapiens
aatgggaaattcact

SEQ ID NO: 406081 - DNA, 15 bp, Homo sapiens
aaatgggaaattcac

SEQ ID NO: 406082 - DNA, 15 bp, Homo sapiens
caaatgggaaattca

SEQ ID NO: 406083 - DNA, 15 bp, Homo sapiens
gcaaatgggaaattc

SEQ ID NO: 406084 - DNA, 15 bp, Homo sapiens
tgcaaatgggaaatt

SEQ ID NO: 406085 - DNA, 15 bp, Homo sapiens
gtgcaaatgggaaat

SEQ ID NO: 406086 - DNA, 15 bp, Homo sapiens
agtgcaaatgggaaa

SEQ ID NO: 406087 - DNA, 15 bp, Homo sapiens
aagtgcaaatgggaa

SEQ ID NO: 406088 - DNA, 15 bp, Homo sapiens
taagtgcaaatggga

SEQ ID NO: 406089 - DNA, 15 bp, Homo sapiens
ttaagtgcaaatggg

SEQ ID NO: 406090 - DNA, 15 bp, Homo sapiens
tttaagtgcaaatgg

SEQ ID NO: 406091 - DNA, 15 bp, Homo sapiens
ttttaagtgcaaatg

SEQ ID NO: 406092 - DNA, 15 bp, Homo sapiens
tttttaagtgcaaat

SEQ ID NO: 406093 - DNA, 15 bp, Homo sapiens
ctttttaagtgcaaa

SEQ ID NO: 406094 - DNA, 15 bp, Homo sapiens
cctttttaagtgcaa

SEQ ID NO: 406095 - DNA, 15 bp, Homo sapiens
tcctttttaagtgca

SEQ ID NO: 406096 - DNA, 15 bp, Homo sapiens
ttcctttttaagtgc

SEQ ID NO: 406097 - DNA, 15 bp, Homo sapiens
attcctttttaagtg

SEQ ID NO: 406098 - DNA, 15 bp, Homo sapiens
tattcctttttaagt

SEQ ID NO: 406099 - DNA, 15 bp, Homo sapiens
atattcctttttaag

SEQ ID NO: 406100 - DNA, 15 bp, Homo sapiens
aatattcctttttaa

SEQ ID NO: 406101 - DNA, 15 bp, Homo sapiens
aaatattccttttta

SEQ ID NO: 406102 - DNA, 15 bp, Homo sapiens
gaaatattccttttt

SEQ ID NO: 406103 - DNA, 15 bp, Homo sapiens
tgaaatattcctttt

SEQ ID NO: 406104 - DNA, 15 bp, Homo sapiens
atgaaatattccttt

SEQ ID NO: 406105 - DNA, 15 bp, Homo sapiens
catgaaatattcctt

SEQ ID NO: 406106 - DNA, 15 bp, Homo sapiens
acatgaaatattcct

SEQ ID NO: 406107 - DNA, 15 bp, Homo sapiens
cacatgaaatattcc

SEQ ID NO: 406108 - DNA, 15 bp, Homo sapiens
gcacatgaaatattc

SEQ ID NO: 406109 - DNA, 15 bp, Homo sapiens
agcacatgaaatatt

SEQ ID NO: 406110 - DNA, 15 bp, Homo sapiens
cagcacatgaaatat

SEQ ID NO: 406111 - DNA, 15 bp, Homo sapiens
acagcacatgaaata

SEQ ID NO: 406112 - DNA, 15 bp, Homo sapiens
aacagcacatgaaat

SEQ ID NO: 406113 - DNA, 15 bp, Homo sapiens
taacagcacatgaaa

SEQ ID NO: 406114 - DNA, 15 bp, Homo sapiens
ataacagcacatgaa

SEQ ID NO: 406115 - DNA, 15 bp, Homo sapiens
aataacagcacatga

SEQ ID NO: 406116 - DNA, 15 bp, Homo sapiens
gaataacagcacatg

SEQ ID NO: 406117 - DNA, 15 bp, Homo sapiens
cgaataacagcacat

SEQ ID NO: 406118 - DNA, 15 bp, Homo sapiens
tcgaataacagcaca

SEQ ID NO: 406119 - DNA, 15 bp, Homo sapiens
atcgaataacagcac

SEQ ID NO: 406120 - DNA, 15 bp, Homo sapiens
catcgaataacagca

SEQ ID NO: 406121 - DNA, 15 bp, Homo sapiens
ccatcgaataacagc

SEQ ID NO: 406122 - DNA, 15 bp, Homo sapiens
tccatcgaataacag

SEQ ID NO: 406123 - DNA, 15 bp, Homo sapiens
ttccatcgaataaca

SEQ ID NO: 406124 - DNA, 15 bp, Homo sapiens
attccatcgaataac

SEQ ID NO: 406125 - DNA, 15 bp, Homo sapiens
cattccatcgaataa

SEQ ID NO: 406126 - DNA, 15 bp, Homo sapiens
acattccatcgaata

SEQ ID NO: 406127 - DNA, 15 bp, Homo sapiens
aacattccatcgaat

SEQ ID NO: 406128 - DNA, 15 bp, Homo sapiens
caacattccatcgaa

SEQ ID NO: 406129 - DNA, 15 bp, Homo sapiens
acaacattccatcga

SEQ ID NO: 406130 - DNA, 15 bp, Homo sapiens
gacaacattccatcg

SEQ ID NO: 406131 - DNA, 15 bp, Homo sapiens
tgacaacattccatc

SEQ ID NO: 406132 - DNA, 15 bp, Homo sapiens
ctgacaacattccat

SEQ ID NO: 406133 - DNA, 15 bp, Homo sapiens
tctgacaacattcca

SEQ ID NO: 406134 - DNA, 15 bp, Homo sapiens
atctgacaacattcc

SEQ ID NO: 406135 - DNA, 15 bp, Homo sapiens
tatctgacaacattc

SEQ ID NO: 406136 - DNA, 15 bp, Homo sapiens
atatctgacaacatt

SEQ ID NO: 406137 - DNA, 15 bp, Homo sapiens
aatatctgacaacat

SEQ ID NO: 406138 - DNA, 15 bp, Homo sapiens
taatatctgacaaca

SEQ ID NO: 406139 - DNA, 15 bp, Homo sapiens
ttaatatctgacaac

SEQ ID NO: 406140 - DNA, 15 bp, Homo sapiens
attaatatctgacaa

SEQ ID NO: 406141 - DNA, 15 bp, Homo sapiens
tattaatatctgaca

SEQ ID NO: 406142 - DNA, 15 bp, Homo sapiens
atattaatatctgac

SEQ ID NO: 406143 - DNA, 15 bp, Homo sapiens
tatattaatatctga

SEQ ID NO: 406144 - DNA, 15 bp, Homo sapiens
ttatattaatatctg

SEQ ID NO: 406145 - DNA, 15 bp, Homo sapiens
tttatattaatatct

SEQ ID NO: 406146 - DNA, 15 bp, Homo sapiens
gtttatattaatatc

SEQ ID NO: 406147 - DNA, 15 bp, Homo sapiens
tgtttatattaatat

SEQ ID NO: 406148 - DNA, 15 bp, Homo sapiens
atgtttatattaata

SEQ ID NO: 406149 - DNA, 15 bp, Homo sapiens
catgtttatattaat

SEQ ID NO: 406150 - DNA, 15 bp, Homo sapiens
acatgtttatattaa

SEQ ID NO: 406151 - DNA, 15 bp, Homo sapiens
gacatgtttatatta

SEQ ID NO: 406152 - DNA, 15 bp, Homo sapiens
ggacatgtttatatt

SEQ ID NO: 406153 - DNA, 15 bp, Homo sapiens
tggacatgtttatat

SEQ ID NO: 406154 - DNA, 15 bp, Homo sapiens
atggacatgtttata

SEQ ID NO: 406155 - DNA, 15 bp, Homo sapiens
aatggacatgtttat

SEQ ID NO: 406156 - DNA, 15 bp, Homo sapiens
aaatggacatgttta

SEQ ID NO: 406157 - DNA, 15 bp, Homo sapiens
taaatggacatgttt

SEQ ID NO: 406158 - DNA, 15 bp, Homo sapiens
gtaaatggacatgtt

SEQ ID NO: 406159 - DNA, 15 bp, Homo sapiens
agtaaatggacatgt

SEQ ID NO: 406160 - DNA, 15 bp, Homo sapiens
aagtaaatggacatg

SEQ ID NO: 406161 - DNA, 15 bp, Homo sapiens
aaagtaaatggacat

SEQ ID NO: 406162 - DNA, 15 bp, Homo sapiens
aaaagtaaatggaca

SEQ ID NO: 406163 - DNA, 15 bp, Homo sapiens
caaaagtaaatggac

SEQ ID NO: 406164 - DNA, 15 bp, Homo sapiens
tcaaaagtaaatgga

SEQ ID NO: 406165 - DNA, 15 bp, Homo sapiens
atcaaaagtaaatgg

SEQ ID NO: 406166 - DNA, 15 bp, Homo sapiens
aatcaaaagtaaatg

SEQ ID NO: 406167 - DNA, 15 bp, Homo sapiens
taatcaaaagtaaat

SEQ ID NO: 406168 - DNA, 15 bp, Homo sapiens
ctaatcaaaagtaaa

SEQ ID NO: 406169 - DNA, 15 bp, Homo sapiens
actaatcaaaagtaa

SEQ ID NO: 406170 - DNA, 15 bp, Homo sapiens
cactaatcaaaagta

SEQ ID NO: 406171 - DNA, 15 bp, Homo sapiens
acactaatcaaaagt

SEQ ID NO: 406172 - DNA, 15 bp, Homo sapiens
aacactaatcaaaag

SEQ ID NO: 406173 - DNA, 15 bp, Homo sapiens
aaacactaatcaaaa

SEQ ID NO: 406174 - DNA, 15 bp, Homo sapiens
aaaacactaatcaaa

SEQ ID NO: 406175 - DNA, 15 bp, Homo sapiens
gaaaacactaatcaa

SEQ ID NO: 406176 - DNA, 15 bp, Homo sapiens
tgaaaacactaatca

SEQ ID NO: 406177 - DNA, 15 bp, Homo sapiens
atgaaaacactaatc

SEQ ID NO: 406178 - DNA, 15 bp, Homo sapiens
catgaaaacactaat

SEQ ID NO: 406179 - DNA, 15 bp, Homo sapiens
tcatgaaaacactaa

SEQ ID NO: 406180 - DNA, 15 bp, Homo sapiens
gtcatgaaaacacta

SEQ ID NO: 406181 - DNA, 15 bp, Homo sapiens
cgtcatgaaaacact

SEQ ID NO: 406182 - DNA, 15 bp, Homo sapiens
acgtcatgaaaacac

SEQ ID NO: 406183 - DNA, 15 bp, Homo sapiens
tacgtcatgaaaaca

SEQ ID NO: 406184 - DNA, 15 bp, Homo sapiens
atacgtcatgaaaac

SEQ ID NO: 406185 - DNA, 15 bp, Homo sapiens
gatacgtcatgaaaa

SEQ ID NO: 406186 - DNA, 15 bp, Homo sapiens
tgatacgtcatgaaa

SEQ ID NO: 406187 - DNA, 15 bp, Homo sapiens
atgatacgtcatgaa

SEQ ID NO: 406188 - DNA, 15 bp, Homo sapiens
aatgatacgtcatga

SEQ ID NO: 406189 - DNA, 15 bp, Homo sapiens
aaatgatacgtcatg

SEQ ID NO: 406190 - DNA, 15 bp, Homo sapiens
aaaatgatacgtcat

SEQ ID NO: 406191 - DNA, 15 bp, Homo sapiens
gaaaatgatacgtca

SEQ ID NO: 406192 - DNA, 15 bp, Homo sapiens
agaaaatgatacgtc

SEQ ID NO: 406193 - DNA, 15 bp, Homo sapiens
tagaaaatgatacgt

SEQ ID NO: 406194 - DNA, 15 bp, Homo sapiens
ttagaaaatgatacg

SEQ ID NO: 406195 - DNA, 15 bp, Homo sapiens
gttagaaaatgatac

SEQ ID NO: 406196 - DNA, 15 bp, Homo sapiens
ggttagaaaatgata

SEQ ID NO: 406197 - DNA, 15 bp, Homo sapiens
aggttagaaaatgat

SEQ ID NO: 406198 - DNA, 15 bp, Homo sapiens
aaggttagaaaatga

SEQ ID NO: 406199 - DNA, 15 bp, Homo sapiens
aaaggttagaaaatg

SEQ ID NO: 406200 - DNA, 15 bp, Homo sapiens
aaaaggttagaaaat

SEQ ID NO: 406201 - DNA, 15 bp, Homo sapiens
taaaaggttagaaaa

SEQ ID NO: 406202 - DNA, 15 bp, Homo sapiens
gtaaaaggttagaaa

SEQ ID NO: 406203 - DNA, 15 bp, Homo sapiens
ggtaaaaggttagaa

SEQ ID NO: 406204 - DNA, 15 bp, Homo sapiens
aggtaaaaggttaga

SEQ ID NO: 406205 - DNA, 15 bp, Homo sapiens
aaggtaaaaggttag

SEQ ID NO: 406206 - DNA, 15 bp, Homo sapiens
aaaggtaaaaggtta

SEQ ID NO: 406207 - DNA, 15 bp, Homo sapiens
taaaggtaaaaggtt

SEQ ID NO: 406208 - DNA, 15 bp, Homo sapiens
ttaaaggtaaaaggt

SEQ ID NO: 406209 - DNA, 15 bp, Homo sapiens
gttaaaggtaaaagg

SEQ ID NO: 406210 - DNA, 15 bp, Homo sapiens
ggttaaaggtaaaag

SEQ ID NO: 406211 - DNA, 15 bp, Homo sapiens
aggttaaaggtaaaa

SEQ ID NO: 406212 - DNA, 15 bp, Homo sapiens
taggttaaaggtaaa

SEQ ID NO: 406213 - DNA, 15 bp, Homo sapiens
gtaggttaaaggtaa

SEQ ID NO: 406214 - DNA, 15 bp, Homo sapiens
ggtaggttaaaggta

SEQ ID NO: 406215 - DNA, 15 bp, Homo sapiens
aggtaggttaaaggt

SEQ ID NO: 406216 - DNA, 15 bp, Homo sapiens
taggtaggttaaagg

SEQ ID NO: 406217 - DNA, 15 bp, Homo sapiens
ataggtaggttaaag

SEQ ID NO: 406218 - DNA, 15 bp, Homo sapiens
tataggtaggttaaa

SEQ ID NO: 406219 - DNA, 15 bp, Homo sapiens
atataggtaggttaa

SEQ ID NO: 406220 - DNA, 15 bp, Homo sapiens
aatataggtaggtta

SEQ ID NO: 406221 - DNA, 15 bp, Homo sapiens
taatataggtaggtt

SEQ ID NO: 406222 - DNA, 15 bp, Homo sapiens
ataatataggtaggt

SEQ ID NO: 406223 - DNA, 15 bp, Homo sapiens
aataatataggtagg

SEQ ID NO: 406224 - DNA, 15 bp, Homo sapiens
aaataatataggtag

SEQ ID NO: 406225 - DNA, 15 bp, Homo sapiens
gaaataatataggta

SEQ ID NO: 406226 - DNA, 15 bp, Homo sapiens
ggaaataatataggt

SEQ ID NO: 406227 - DNA, 15 bp, Homo sapiens
aggaaataatatagg

SEQ ID NO: 406228 - DNA, 15 bp, Homo sapiens
aaggaaataatatag

SEQ ID NO: 406229 - DNA, 15 bp, Homo sapiens
aaaggaaataatata

SEQ ID NO: 406230 - DNA, 15 bp, Homo sapiens
caaaggaaataatat

SEQ ID NO: 406231 - DNA, 15 bp, Homo sapiens
tcaaaggaaataata

SEQ ID NO: 406232 - DNA, 15 bp, Homo sapiens
ttcaaaggaaataat

SEQ ID NO: 406233 - DNA, 15 bp, Homo sapiens
cttcaaaggaaataa

SEQ ID NO: 406234 - DNA, 15 bp, Homo sapiens
acttcaaaggaaata

SEQ ID NO: 406235 - DNA, 15 bp, Homo sapiens
cacttcaaaggaaat

SEQ ID NO: 406236 - DNA, 15 bp, Homo sapiens
tcacttcaaaggaaa

SEQ ID NO: 406237 - DNA, 15 bp, Homo sapiens
ctcacttcaaaggaa

SEQ ID NO: 406238 - DNA, 15 bp, Homo sapiens
actcacttcaaagga

SEQ ID NO: 406239 - DNA, 15 bp, Homo sapiens
aactcacttcaaagg

SEQ ID NO: 406240 - DNA, 15 bp, Homo sapiens
aaactcacttcaaag

SEQ ID NO: 406241 - DNA, 15 bp, Homo sapiens
gaaactcacttcaaa

SEQ ID NO: 406242 - DNA, 15 bp, Homo sapiens
agaaactcacttcaa

SEQ ID NO: 406243 - DNA, 15 bp, Homo sapiens
aagaaactcacttca

SEQ ID NO: 406244 - DNA, 15 bp, Homo sapiens
caagaaactcacttc

SEQ ID NO: 406245 - DNA, 15 bp, Homo sapiens
acaagaaactcactt

SEQ ID NO: 406246 - DNA, 15 bp, Homo sapiens
tacaagaaactcact

SEQ ID NO: 406247 - DNA, 15 bp, Homo sapiens
gtacaagaaactcac

SEQ ID NO: 406248 - DNA, 15 bp, Homo sapiens
tgtacaagaaactca

SEQ ID NO: 406249 - DNA, 15 bp, Homo sapiens
atgtacaagaaactc

SEQ ID NO: 406250 - DNA, 15 bp, Homo sapiens
tatgtacaagaaact

SEQ ID NO: 406251 - DNA, 15 bp, Homo sapiens
ctatgtacaagaaac

SEQ ID NO: 406252 - DNA, 15 bp, Homo sapiens
gctatgtacaagaaa

SEQ ID NO: 406253 - DNA, 15 bp, Homo sapiens
tgctatgtacaagaa

SEQ ID NO: 406254 - DNA, 15 bp, Homo sapiens
atgctatgtacaaga

SEQ ID NO: 406255 - DNA, 15 bp, Homo sapiens
catgctatgtacaag

SEQ ID NO: 406256 - DNA, 15 bp, Homo sapiens
acatgctatgtacaa

SEQ ID NO: 406257 - DNA, 15 bp, Homo sapiens
tacatgctatgtaca

SEQ ID NO: 406258 - DNA, 15 bp, Homo sapiens
ctacatgctatgtac

SEQ ID NO: 406259 - DNA, 15 bp, Homo sapiens
actacatgctatgta

SEQ ID NO: 406260 - DNA, 15 bp, Homo sapiens
aactacatgctatgt

SEQ ID NO: 406261 - DNA, 15 bp, Homo sapiens
caactacatgctatg

SEQ ID NO: 406262 - DNA, 15 bp, Homo sapiens
ccaactacatgctat

SEQ ID NO: 406263 - DNA, 15 bp, Homo sapiens
accaactacatgcta

SEQ ID NO: 406264 - DNA, 15 bp, Homo sapiens
aaccaactacatgct

SEQ ID NO: 406265 - DNA, 15 bp, Homo sapiens
aaaccaactacatgc

SEQ ID NO: 406266 - DNA, 15 bp, Homo sapiens
taaaccaactacatg

SEQ ID NO: 406267 - DNA, 15 bp, Homo sapiens
ataaaccaactacat

SEQ ID NO: 406268 - DNA, 15 bp, Homo sapiens
aataaaccaactaca

SEQ ID NO: 406269 - DNA, 15 bp, Homo sapiens
aaataaaccaactac

SEQ ID NO: 406270 - DNA, 15 bp, Homo sapiens
aaaataaaccaacta

SEQ ID NO: 406271 - DNA, 15 bp, Homo sapiens
aaaaataaaccaact

SEQ ID NO: 406272 - DNA, 15 bp, Homo sapiens
aaaaaataaaccaac

SEQ ID NO: 406273 - DNA, 15 bp, Homo sapiens
aaaaaaataaaccaa

SEQ ID NO: 406274 - DNA, 15 bp, Homo sapiens
taaaaaaataaacca

SEQ ID NO: 406275 - DNA, 15 bp, Homo sapiens
ttaaaaaaataaacc

SEQ ID NO: 406276 - DNA, 15 bp, Homo sapiens
attaaaaaaataaac

SEQ ID NO: 406277 - DNA, 15 bp, Homo sapiens
gattaaaaaaataaa

SEQ ID NO: 406278 - DNA, 15 bp, Homo sapiens
ggattaaaaaaataa

SEQ ID NO: 406279 - DNA, 15 bp, Homo sapiens
tggattaaaaaaata

SEQ ID NO: 406280 - DNA, 15 bp, Homo sapiens
atggattaaaaaaat

SEQ ID NO: 406281 - DNA, 15 bp, Homo sapiens
gatggattaaaaaaa

SEQ ID NO: 406282 - DNA, 15 bp, Homo sapiens
agatggattaaaaaa

SEQ ID NO: 406283 - DNA, 15 bp, Homo sapiens
tagatggattaaaaa

SEQ ID NO: 406284 - DNA, 15 bp, Homo sapiens
atagatggattaaaa

SEQ ID NO: 406285 - DNA, 15 bp, Homo sapiens
gatagatggattaaa

SEQ ID NO: 406286 - DNA, 15 bp, Homo sapiens
ggatagatggattaa

SEQ ID NO: 406287 - DNA, 15 bp, Homo sapiens
aggatagatggatta

SEQ ID NO: 406288 - DNA, 15 bp, Homo sapiens
taggatagatggatt

SEQ ID NO: 406289 - DNA, 15 bp, Homo sapiens
ttaggatagatggat

SEQ ID NO: 406290 - DNA, 15 bp, Homo sapiens
gttaggatagatgga

SEQ ID NO: 406291 - DNA, 15 bp, Homo sapiens
tgttaggatagatgg

SEQ ID NO: 406292 - DNA, 15 bp, Homo sapiens
ttgttaggatagatg

SEQ ID NO: 406293 - DNA, 15 bp, Homo sapiens
attgttaggatagat

SEQ ID NO: 406294 - DNA, 15 bp, Homo sapiens
gattgttaggataga

SEQ ID NO: 406295 - DNA, 15 bp, Homo sapiens
agattgttaggatag

SEQ ID NO: 406296 - DNA, 15 bp, Homo sapiens
gagattgttaggata

SEQ ID NO: 406297 - DNA, 15 bp, Homo sapiens
agagattgttaggat

SEQ ID NO: 406298 - DNA, 15 bp, Homo sapiens
tagagattgttagga

SEQ ID NO: 406299 - DNA, 15 bp, Homo sapiens
atagagattgttagg

SEQ ID NO: 406300 - DNA, 15 bp, Homo sapiens
catagagattgttag

SEQ ID NO: 406301 - DNA, 15 bp, Homo sapiens
acatagagattgtta

SEQ ID NO: 406302 - DNA, 15 bp, Homo sapiens
aacatagagattgtt

SEQ ID NO: 406303 - DNA, 15 bp, Homo sapiens
aaacatagagattgt

SEQ ID NO: 406304 - DNA, 15 bp, Homo sapiens
aaaacatagagattg

SEQ ID NO: 406305 - DNA, 15 bp, Homo sapiens
taaaacatagagatt

SEQ ID NO: 406306 - DNA, 15 bp, Homo sapiens
ctaaaacatagagat

SEQ ID NO: 406307 - DNA, 15 bp, Homo sapiens
actaaaacatagaga

SEQ ID NO: 406308 - DNA, 15 bp, Homo sapiens
aactaaaacatagag

SEQ ID NO: 406309 - DNA, 15 bp, Homo sapiens
caactaaaacataga

SEQ ID NO: 406310 - DNA, 15 bp, Homo sapiens
ccaactaaaacatag

SEQ ID NO: 406311 - DNA, 15 bp, Homo sapiens
accaactaaaacata

SEQ ID NO: 406312 - DNA, 15 bp, Homo sapiens
taccaactaaaacat

SEQ ID NO: 406313 - DNA, 15 bp, Homo sapiens
ataccaactaaaaca

SEQ ID NO: 406314 - DNA, 15 bp, Homo sapiens
tataccaactaaaac

SEQ ID NO: 406315 - DNA, 15 bp, Homo sapiens
atataccaactaaaa

SEQ ID NO: 406316 - DNA, 15 bp, Homo sapiens
aatataccaactaaa

SEQ ID NO: 406317 - DNA, 15 bp, Homo sapiens
aaatataccaactaa

SEQ ID NO: 406318 - DNA, 15 bp, Homo sapiens
taaatataccaacta

SEQ ID NO: 406319 - DNA, 15 bp, Homo sapiens
ctaaatataccaact

SEQ ID NO: 406320 - DNA, 15 bp, Homo sapiens
tctaaatataccaac

SEQ ID NO: 406321 - DNA, 15 bp, Homo sapiens
atctaaatataccaa

SEQ ID NO: 406322 - DNA, 15 bp, Homo sapiens
gatctaaatatacca

SEQ ID NO: 406323 - DNA, 15 bp, Homo sapiens
tgatctaaatatacc

SEQ ID NO: 406324 - DNA, 15 bp, Homo sapiens
atgatctaaatatac

SEQ ID NO: 406325 - DNA, 15 bp, Homo sapiens
aatgatctaaatata

SEQ ID NO: 406326 - DNA, 15 bp, Homo sapiens
aaatgatctaaatat

SEQ ID NO: 406327 - DNA, 15 bp, Homo sapiens
caaatgatctaaata

SEQ ID NO: 406328 - DNA, 15 bp, Homo sapiens
gcaaatgatctaaat

SEQ ID NO: 406329 - DNA, 15 bp, Homo sapiens
agcaaatgatctaaa

SEQ ID NO: 406330 - DNA, 15 bp, Homo sapiens
aagcaaatgatctaa

SEQ ID NO: 406331 - DNA, 15 bp, Homo sapiens
aaagcaaatgatcta

SEQ ID NO: 406332 - DNA, 15 bp, Homo sapiens
aaaagcaaatgatct

SEQ ID NO: 406333 - DNA, 15 bp, Homo sapiens
taaaagcaaatgatc

SEQ ID NO: 406334 - DNA, 15 bp, Homo sapiens
ttaaaagcaaatgat

SEQ ID NO: 406335 - DNA, 15 bp, Homo sapiens
attaaaagcaaatga

SEQ ID NO: 406336 - DNA, 15 bp, Homo sapiens
tattaaaagcaaatg

SEQ ID NO: 406337 - DNA, 15 bp, Homo sapiens
atattaaaagcaaat

SEQ ID NO: 406338 - DNA, 15 bp, Homo sapiens
tatattaaaagcaaa

SEQ ID NO: 406339 - DNA, 15 bp, Homo sapiens
ttatattaaaagcaa

SEQ ID NO: 406340 - DNA, 15 bp, Homo sapiens
attatattaaaagca

SEQ ID NO: 406341 - DNA, 15 bp, Homo sapiens
aattatattaaaagc

SEQ ID NO: 406342 - DNA, 15 bp, Homo sapiens
taattatattaaaag

SEQ ID NO: 406343 - DNA, 15 bp, Homo sapiens
ataattatattaaaa

SEQ ID NO: 406344 - DNA, 15 bp, Homo sapiens
aataattatattaaa

SEQ ID NO: 406345 - DNA, 15 bp, Homo sapiens
taataattatattaa

SEQ ID NO: 406346 - DNA, 15 bp, Homo sapiens
ataataattatatta

SEQ ID NO: 406347 - DNA, 15 bp, Homo sapiens
cataataattatatt

SEQ ID NO: 406348 - DNA, 15 bp, Homo sapiens
tcataataattatat

SEQ ID NO: 406349 - DNA, 15 bp, Homo sapiens
ttcataataattata

SEQ ID NO: 406350 - DNA, 15 bp, Homo sapiens
attcataataattat

SEQ ID NO: 406351 - DNA, 15 bp, Homo sapiens
aattcataataatta

SEQ ID NO: 406352 - DNA, 15 bp, Homo sapiens
taaattcataataat

SEQ ID NO: 406353 - DNA, 15 bp, Homo sapiens
ctaaattcataataa

SEQ ID NO: 406354 - DNA, 15 bp, Homo sapiens
gctaaattcataata

SEQ ID NO: 406355 - DNA, 15 bp, Homo sapiens
agctaaattcataat

SEQ ID NO: 406356 - DNA, 15 bp, Homo sapiens
gagctaaattcataa

SEQ ID NO: 406357 - DNA, 15 bp, Homo sapiens
agagctaaattcata

SEQ ID NO: 406358 - DNA, 15 bp, Homo sapiens
gagagctaaattcat

SEQ ID NO: 406359 - DNA, 15 bp, Homo sapiens
ggagagctaaattca

SEQ ID NO: 406360 - DNA, 15 bp, Homo sapiens
gggagagctaaattc

SEQ ID NO: 406361 - DNA, 15 bp, Homo sapiens
tgggagagctaaatt

SEQ ID NO: 406362 - DNA, 15 bp, Homo sapiens
atgggagagctaaat

SEQ ID NO: 406363 - DNA, 15 bp, Homo sapiens
aatgggagagctaaa

SEQ ID NO: 406364 - DNA, 15 bp, Homo sapiens
aaatgggagagctaa

SEQ ID NO: 406365 - DNA, 15 bp, Homo sapiens
aaaatgggagagcta

SEQ ID NO: 406366 - DNA, 15 bp, Homo sapiens
taaaatgggagagct

SEQ ID NO: 406367 - DNA, 15 bp, Homo sapiens
ataaaatgggagagc

SEQ ID NO: 406368 - DNA, 15 bp, Homo sapiens
aataaaatgggagag

SEQ ID NO: 406369 - DNA, 15 bp, Homo sapiens
aaataaaatgggaga

SEQ ID NO: 406370 - DNA, 15 bp, Homo sapiens
caaataaaatgggag

SEQ ID NO: 406371 - DNA, 15 bp, Homo sapiens
acaaataaaatggga

SEQ ID NO: 406372 - DNA, 15 bp, Homo sapiens
aacaaataaaatggg

SEQ ID NO: 406373 - DNA, 15 bp, Homo sapiens
aaacaaataaaatgg

SEQ ID NO: 406374 - DNA, 15 bp, Homo sapiens
aaaacaaataaaatg

SEQ ID NO: 406375 - DNA, 15 bp, Homo sapiens
gaaaacaaataaaat

SEQ ID NO: 406376 - DNA, 15 bp, Homo sapiens
agaaaacaaataaaa

SEQ ID NO: 406377 - DNA, 15 bp, Homo sapiens
gagaaaacaaataaa

SEQ ID NO: 406378 - DNA, 15 bp, Homo sapiens
agagaaaacaaataa

SEQ ID NO: 406379 - DNA, 15 bp, Homo sapiens
tagagaaaacaaata

SEQ ID NO: 406380 - DNA, 15 bp, Homo sapiens
atagagaaaacaaat

SEQ ID NO: 406381 - DNA, 15 bp, Homo sapiens
aatagagaaaacaaa

SEQ ID NO: 406382 - DNA, 15 bp, Homo sapiens
aaatagagaaaacaa

SEQ ID NO: 406383 - DNA, 15 bp, Homo sapiens
aaaatagagaaaaca

SEQ ID NO: 406384 - DNA, 15 bp, Homo sapiens
aaaaatagagaaaac

SEQ ID NO: 406385 - DNA, 15 bp, Homo sapiens
gaaaaatagagaaaa

SEQ ID NO: 406386 - DNA, 15 bp, Homo sapiens
tgaaaaatagagaaa

SEQ ID NO: 406387 - DNA, 15 bp, Homo sapiens
atgaaaaatagagaa

SEQ ID NO: 406388 - DNA, 15 bp, Homo sapiens
aatgaaaaatagaga

SEQ ID NO: 406389 - DNA, 15 bp, Homo sapiens
gaatgaaaaatagag

SEQ ID NO: 406390 - DNA, 15 bp, Homo sapiens
ggaatgaaaaataga

SEQ ID NO: 406391 - DNA, 15 bp, Homo sapiens
aggaatgaaaaatag

SEQ ID NO: 406392 - DNA, 15 bp, Homo sapiens
aaggaatgaaaaata

SEQ ID NO: 406393 - DNA, 15 bp, Homo sapiens
aaaggaatgaaaaat

SEQ ID NO: 406394 - DNA, 15 bp, Homo sapiens
caaaggaatgaaaaa

SEQ ID NO: 406395 - DNA, 15 bp, Homo sapiens
acaaaggaatgaaaa

SEQ ID NO: 406396 - DNA, 15 bp, Homo sapiens
aacaaaggaatgaaa

SEQ ID NO: 406397 - DNA, 15 bp, Homo sapiens
aaacaaaggaatgaa

SEQ ID NO: 406398 - DNA, 15 bp, Homo sapiens
aaaacaaaggaatga

SEQ ID NO: 406399 - DNA, 15 bp, Homo sapiens
gaaaacaaaggaatg

SEQ ID NO: 406400 - DNA, 15 bp, Homo sapiens
agaaaacaaaggaat

SEQ ID NO: 406401 - DNA, 15 bp, Homo sapiens
tagaaaacaaaggaa

SEQ ID NO: 406402 - DNA, 15 bp, Homo sapiens
atagaaaacaaagga

SEQ ID NO: 406403 - DNA, 15 bp, Homo sapiens
aatagaaaacaaagg

SEQ ID NO: 406404 - DNA, 15 bp, Homo sapiens
gaatagaaaacaaag

SEQ ID NO: 406405 - DNA, 15 bp, Homo sapiens
ggaatagaaaacaaa

SEQ ID NO: 406406 - DNA, 15 bp, Homo sapiens
aggaatagaaaacaa

SEQ ID NO: 406407 - DNA, 15 bp, Homo sapiens
aaggaatagaaaaca

SEQ ID NO: 406408 - DNA, 15 bp, Homo sapiens
caaggaatagaaaac

SEQ ID NO: 406409 - DNA, 15 bp, Homo sapiens
tcaaggaatagaaaa

SEQ ID NO: 406410 - DNA, 15 bp, Homo sapiens
gtcaaggaatagaaa

SEQ ID NO: 406411 - DNA, 15 bp, Homo sapiens
agtcaaggaatagaa

SEQ ID NO: 406412 - DNA, 15 bp, Homo sapiens
aagtcaaggaataga

SEQ ID NO: 406413 - DNA, 15 bp, Homo sapiens
aaagtcaaggaatag

SEQ ID NO: 406414 - DNA, 15 bp, Homo sapiens
aaaagtcaaggaata

SEQ ID NO: 406415 - DNA, 15 bp, Homo sapiens
aaaaagtcaaggaat

SEQ ID NO: 406416 - DNA, 15 bp, Homo sapiens
aaaaaagtcaaggaa

SEQ ID NO: 406417 - DNA, 15 bp, Homo sapiens
caaaaaagtcaagga

SEQ ID NO: 406418 - DNA, 15 bp, Homo sapiens
ccaaaaaagtcaagg

SEQ ID NO: 406419 - DNA, 15 bp, Homo sapiens
tccaaaaaagtcaag

SEQ ID NO: 406420 - DNA, 15 bp, Homo sapiens
atccaaaaaagtcaa

SEQ ID NO: 406421 - DNA, 15 bp, Homo sapiens
tatccaaaaaagtca

SEQ ID NO: 406422 - DNA, 15 bp, Homo sapiens
ttatccaaaaaagtc

SEQ ID NO: 406423 - DNA, 15 bp, Homo sapiens
attatccaaaaaagt

SEQ ID NO: 406424 - DNA, 15 bp, Homo sapiens
aattatccaaaaaag

SEQ ID NO: 406425 - DNA, 15 bp, Homo sapiens
aaattatccaaaaaa

SEQ ID NO: 406426 - DNA, 15 bp, Homo sapiens
taaattatccaaaaa

SEQ ID NO: 406427 - DNA, 15 bp, Homo sapiens
ttaaattatccaaaa

SEQ ID NO: 406428 - DNA, 15 bp, Homo sapiens
tttaaattatccaaa

SEQ ID NO: 406429 - DNA, 15 bp, Homo sapiens
atttaaattatccaa

SEQ ID NO: 406430 - DNA, 15 bp, Homo sapiens
tatttaaattatcca

SEQ ID NO: 406431 - DNA, 15 bp, Homo sapiens
atatttaaattatcc

SEQ ID NO: 406432 - DNA, 15 bp, Homo sapiens
aatatttaaattatc

SEQ ID NO: 406433 - DNA, 15 bp, Homo sapiens
aaatatttaaattat

SEQ ID NO: 406434 - DNA, 15 bp, Homo sapiens
aaaatatttaaatta

SEQ ID NO: 406435 - DNA, 15 bp, Homo sapiens
aaaaatatttaaatt

SEQ ID NO: 406436 - DNA, 15 bp, Homo sapiens
taaaaatatttaaat

SEQ ID NO: 406437 - DNA, 15 bp, Homo sapiens
ttaaaaatatttaaa

SEQ ID NO: 406438 - DNA, 15 bp, Homo sapiens
attaaaaatatttaa

SEQ ID NO: 406439 - DNA, 15 bp, Homo sapiens
cattaaaaatattta

SEQ ID NO: 406440 - DNA, 15 bp, Homo sapiens
gcattaaaaatattt

SEQ ID NO: 406441 - DNA, 15 bp, Homo sapiens
agcattaaaaatatt

SEQ ID NO: 406442 - DNA, 15 bp, Homo sapiens
aagcattaaaaatat

SEQ ID NO: 406443 - DNA, 15 bp, Homo sapiens
taagcattaaaaata

SEQ ID NO: 406444 - DNA, 15 bp, Homo sapiens
ttaagcattaaaaat

SEQ ID NO: 406445 - DNA, 15 bp, Homo sapiens
tttaagcattaaaaa

SEQ ID NO: 406446 - DNA, 15 bp, Homo sapiens
atttaagcattaaaa

SEQ ID NO: 406447 - DNA, 15 bp, Homo sapiens
aatttaagcattaaa

SEQ ID NO: 406448 - DNA, 15 bp, Homo sapiens
aaatttaagcattaa

SEQ ID NO: 406449 - DNA, 15 bp, Homo sapiens
taaatttaagcatta

SEQ ID NO: 406450 - DNA, 15 bp, Homo sapiens
ttaaatttaagcatt

SEQ ID NO: 406451 - DNA, 15 bp, Homo sapiens
attaaatttaagcat

SEQ ID NO: 406452 - DNA, 15 bp, Homo sapiens
aattaaatttaagca

SEQ ID NO: 406453 - DNA, 15 bp, Homo sapiens
aaattaaatttaagc

SEQ ID NO: 406454 - DNA, 15 bp, Homo sapiens
taaattaaatttaag

SEQ ID NO: 406455 - DNA, 15 bp, Homo sapiens
ataaattaaatttaa

SEQ ID NO: 406456 - DNA, 15 bp, Homo sapiens
aataaattaaattta

SEQ ID NO: 406457 - DNA, 15 bp, Homo sapiens
aaataaattaaattt

SEQ ID NO: 406458 - DNA, 15 bp, Homo sapiens
taaataaattaaatt

SEQ ID NO: 406459 - DNA, 15 bp, Homo sapiens
ttaaataaattaaat

SEQ ID NO: 406460 - DNA, 15 bp, Homo sapiens
attaaataaattaaa

SEQ ID NO: 406461 - DNA, 15 bp, Homo sapiens
cattaaataaattaa

SEQ ID NO: 406462 - DNA, 15 bp, Homo sapiens
acattaaataaatta

SEQ ID NO: 406463 - DNA, 15 bp, Homo sapiens
cacattaaataaatt

SEQ ID NO: 406464 - DNA, 15 bp, Homo sapiens
acacattaaataaat

SEQ ID NO: 406465 - DNA, 15 bp, Homo sapiens
aacacattaaataaa

SEQ ID NO: 406466 - DNA, 15 bp, Homo sapiens
aaacacattaaataa

SEQ ID NO: 406467 - DNA, 15 bp, Homo sapiens
aaaacacattaaata

SEQ ID NO: 406468 - DNA, 15 bp, Homo sapiens
aaaaacacattaaat

SEQ ID NO: 406469 - DNA, 15 bp, Homo sapiens
taaaaacacattaaa

SEQ ID NO: 406470 - DNA, 15 bp, Homo sapiens
ttaaaaacacattaa

SEQ ID NO: 406471 - DNA, 15 bp, Homo sapiens
attaaaaacacatta

SEQ ID NO: 406472 - DNA, 15 bp, Homo sapiens
aattaaaaacacatt

SEQ ID NO: 406473 - DNA, 15 bp, Homo sapiens
taattaaaaacacat

SEQ ID NO: 406474 - DNA, 15 bp, Homo sapiens
ataattaaaaacaca

SEQ ID NO: 406475 - DNA, 15 bp, Homo sapiens
gataattaaaaacac

SEQ ID NO: 406476 - DNA, 15 bp, Homo sapiens
agataattaaaaaca

SEQ ID NO: 406477 - DNA, 15 bp, Homo sapiens
gagataattaaaaac

SEQ ID NO: 406478 - DNA, 15 bp, Homo sapiens
tgagataattaaaaa

SEQ ID NO: 406479 - DNA, 15 bp, Homo sapiens
ctgagataattaaaa

SEQ ID NO: 406480 - DNA, 15 bp, Homo sapiens
actgagataattaaa

SEQ ID NO: 406481 - DNA, 15 bp, Homo sapiens
cactgagataattaa

SEQ ID NO: 406482 - DNA, 15 bp, Homo sapiens
tcactgagataatta

SEQ ID NO: 406483 - DNA, 15 bp, Homo sapiens
ttcactgagataatt

SEQ ID NO: 406484 - DNA, 15 bp, Homo sapiens
attcactgagataat

SEQ ID NO: 406485 - DNA, 15 bp, Homo sapiens
tattcactgagataa

SEQ ID NO: 406486 - DNA, 15 bp, Homo sapiens
ttattcactgagata

SEQ ID NO: 406487 - DNA, 15 bp, Homo sapiens
attattcactgagat

SEQ ID NO: 406488 - DNA, 15 bp, Homo sapiens
tattattcactgaga

SEQ ID NO: 406489 - DNA, 15 bp, Homo sapiens
atattattcactgag

SEQ ID NO: 406490 - DNA, 15 bp, Homo sapiens
aatattattcactga

SEQ ID NO: 406491 - DNA, 15 bp, Homo sapiens
aaatattattcactg

SEQ ID NO: 406492 - DNA, 15 bp, Homo sapiens
aaaatattattcact

SEQ ID NO: 406493 - DNA, 15 bp, Homo sapiens
taaaatattattcac

SEQ ID NO: 406494 - DNA, 15 bp, Homo sapiens
ctaaaatattattca

SEQ ID NO: 406495 - DNA, 15 bp, Homo sapiens
actaaaatattattc

SEQ ID NO: 406496 - DNA, 15 bp, Homo sapiens
cactaaaatattatt

SEQ ID NO: 406497 - DNA, 15 bp, Homo sapiens
ccactaaaatattat

SEQ ID NO: 406498 - DNA, 15 bp, Homo sapiens
gccactaaaatatta

SEQ ID NO: 406499 - DNA, 15 bp, Homo sapiens
ggccactaaaatatt

SEQ ID NO: 406500 - DNA, 15 bp, Homo sapiens
gggccactaaaatat

SEQ ID NO: 406501 - DNA, 15 bp, Homo sapiens
agggccactaaaata

SEQ ID NO: 406502 - DNA, 15 bp, Homo sapiens
aagggccactaaaat

SEQ ID NO: 406503 - DNA, 15 bp, Homo sapiens
aaagggccactaaaa

SEQ ID NO: 406504 - DNA, 15 bp, Homo sapiens
aaaagggccactaaa

SEQ ID NO: 406505 - DNA, 15 bp, Homo sapiens
taaaagggccactaa

SEQ ID NO: 406506 - DNA, 15 bp, Homo sapiens
ttaaaagggccacta

SEQ ID NO: 406507 - DNA, 15 bp, Homo sapiens
tttaaaagggccact

SEQ ID NO: 406508 - DNA, 15 bp, Homo sapiens
ctttaaaagggccac

SEQ ID NO: 406509 - DNA, 15 bp, Homo sapiens
tctttaaaagggcca

SEQ ID NO: 406510 - DNA, 15 bp, Homo sapiens
atctttaaaagggcc

SEQ ID NO: 406511 - DNA, 15 bp, Homo sapiens
aatctttaaaagggc

SEQ ID NO: 406512 - DNA, 15 bp, Homo sapiens
taatctttaaaaggg

SEQ ID NO: 406513 - DNA, 15 bp, Homo sapiens
gtaatctttaaaagg

SEQ ID NO: 406514 - DNA, 15 bp, Homo sapiens
tgtaatctttaaaag

SEQ ID NO: 406515 - DNA, 15 bp, Homo sapiens
ctgtaatctttaaaa

SEQ ID NO: 406516 - DNA, 15 bp, Homo sapiens
actgtaatctttaaa

SEQ ID NO: 406517 - DNA, 15 bp, Homo sapiens
gactgtaatctttaa

SEQ ID NO: 406518 - DNA, 15 bp, Homo sapiens
agactgtaatcttta

SEQ ID NO: 406519 - DNA, 15 bp, Homo sapiens
tagactgtaatcttt

SEQ ID NO: 406520 - DNA, 15 bp, Homo sapiens
gtagactgtaatctt

SEQ ID NO: 406521 - DNA, 15 bp, Homo sapiens
tgtagactgtaatct

SEQ ID NO: 406522 - DNA, 15 bp, Homo sapiens
atgtagactgtaatc

SEQ ID NO: 406523 - DNA, 15 bp, Homo sapiens
tatgtagactgtaat

SEQ ID NO: 406524 - DNA, 15 bp, Homo sapiens
atatgtagactgtaa

SEQ ID NO: 406525 - DNA, 15 bp, Homo sapiens
tatatgtagactgta

SEQ ID NO: 406526 - DNA, 15 bp, Homo sapiens
atatatgtagactgt

SEQ ID NO: 406527 - DNA, 15 bp, Homo sapiens
tatatatgtagactg

SEQ ID NO: 406528 - DNA, 15 bp, Homo sapiens
ttatatatgtagact

SEQ ID NO: 406529 - DNA, 15 bp, Homo sapiens
gttatatatgtagac

SEQ ID NO: 406530 - DNA, 15 bp, Homo sapiens
agttatatatgtaga

SEQ ID NO: 406531 - DNA, 15 bp, Homo sapiens
aagttatatatgtag

SEQ ID NO: 406532 - DNA, 15 bp, Homo sapiens
aaagttatatatgta

SEQ ID NO: 406533 - DNA, 15 bp, Homo sapiens
aaaagttatatatgt

SEQ ID NO: 406534 - DNA, 15 bp, Homo sapiens
gaaaagttatatatg

SEQ ID NO: 406535 - DNA, 15 bp, Homo sapiens
tgaaaagttatatat

SEQ ID NO: 406536 - DNA, 15 bp, Homo sapiens
atgaaaagttatata

SEQ ID NO: 406537 - DNA, 15 bp, Homo sapiens
tatgaaaagttatat

SEQ ID NO: 406538 - DNA, 15 bp, Homo sapiens
ctatgaaaagttata

SEQ ID NO: 406539 - DNA, 15 bp, Homo sapiens
actatgaaaagttat

SEQ ID NO: 406540 - DNA, 15 bp, Homo sapiens
gactatgaaaagtta

SEQ ID NO: 406541 - DNA, 15 bp, Homo sapiens
agactatgaaaagtt

SEQ ID NO: 406542 - DNA, 15 bp, Homo sapiens
tagactatgaaaagt

SEQ ID NO: 406543 - DNA, 15 bp, Homo sapiens
gtagactatgaaaag

SEQ ID NO: 406544 - DNA, 15 bp, Homo sapiens
tgtagactatgaaaa

SEQ ID NO: 406545 - DNA, 15 bp, Homo sapiens
atgtagactatgaaa

SEQ ID NO: 406546 - DNA, 15 bp, Homo sapiens
tatgtagactatgaa

SEQ ID NO: 406547 - DNA, 15 bp, Homo sapiens
gtatgtagactatga

SEQ ID NO: 406548 - DNA, 15 bp, Homo sapiens
tgtatgtagactatg

SEQ ID NO: 406549 - DNA, 15 bp, Homo sapiens
ttgtatgtagactat

SEQ ID NO: 406550 - DNA, 15 bp, Homo sapiens
attgtatgtagacta

SEQ ID NO: 406551 - DNA, 15 bp, Homo sapiens
gattgtatgtagact

SEQ ID NO: 406552 - DNA, 15 bp, Homo sapiens
tgattgtatgtagac

SEQ ID NO: 406553 - DNA, 15 bp, Homo sapiens
ttgattgtatgtaga

SEQ ID NO: 406554 - DNA, 15 bp, Homo sapiens
attgattgtatgtag

SEQ ID NO: 406555 - DNA, 15 bp, Homo sapiens
tattgattgtatgta

SEQ ID NO: 406556 - DNA, 15 bp, Homo sapiens
atattgattgtatgt

SEQ ID NO: 406557 - DNA, 15 bp, Homo sapiens
aatattgattgtatg

SEQ ID NO: 406558 - DNA, 15 bp, Homo sapiens
aaatattgattgtat

SEQ ID NO: 406559 - DNA, 15 bp, Homo sapiens
aaaatattgattgta

SEQ ID NO: 406560 - DNA, 15 bp, Homo sapiens
taaaatattgattgt

SEQ ID NO: 406561 - DNA, 15 bp, Homo sapiens
gtaaaatattgattg

SEQ ID NO: 406562 - DNA, 15 bp, Homo sapiens
agtaaaatattgatt

SEQ ID NO: 406563 - DNA, 15 bp, Homo sapiens
tagtaaaatattgat

SEQ ID NO: 406564 - DNA, 15 bp, Homo sapiens
ctagtaaaatattga

SEQ ID NO: 406565 - DNA, 15 bp, Homo sapiens
actagtaaaatattg

SEQ ID NO: 406566 - DNA, 15 bp, Homo sapiens
aactagtaaaatatt

SEQ ID NO: 406567 - DNA, 15 bp, Homo sapiens
gaactagtaaaatat

SEQ ID NO: 406568 - DNA, 15 bp, Homo sapiens
tgaactagtaaaata

SEQ ID NO: 406569 - DNA, 15 bp, Homo sapiens
ttgaactagtaaaat

SEQ ID NO: 406570 - DNA, 15 bp, Homo sapiens
cttgaactagtaaaa

SEQ ID NO: 406571 - DNA, 15 bp, Homo sapiens
acttgaactagtaaa

SEQ ID NO: 406572 - DNA, 15 bp, Homo sapiens
tacttgaactagtaa

SEQ ID NO: 406573 - DNA, 15 bp, Homo sapiens
ctacttgaactagta

SEQ ID NO: 406574 - DNA, 15 bp, Homo sapiens
tctacttgaactagt

SEQ ID NO: 406575 - DNA, 15 bp, Homo sapiens
ttctacttgaactag

SEQ ID NO: 406576 - DNA, 15 bp, Homo sapiens
attctacttgaacta

SEQ ID NO: 406577 - DNA, 15 bp, Homo sapiens
cattctacttgaact

SEQ ID NO: 406578 - DNA, 15 bp, Homo sapiens
acattctacttgaac

SEQ ID NO: 406579 - DNA, 15 bp, Homo sapiens
tacattctacttgaa

SEQ ID NO: 406580 - DNA, 15 bp, Homo sapiens
ttacattctacttga

SEQ ID NO: 406581 - DNA, 15 bp, Homo sapiens
tttacattctacttg

SEQ ID NO: 406582 - DNA, 15 bp, Homo sapiens
ttttacattctactt

SEQ ID NO: 406583 - DNA, 15 bp, Homo sapiens
gttttacattctact

SEQ ID NO: 406584 - DNA, 15 bp, Homo sapiens
agttttacattctac

SEQ ID NO: 406585 - DNA, 15 bp, Homo sapiens
gagttttacattcta

SEQ ID NO: 406586 - DNA, 15 bp, Homo sapiens
agagttttacattct

SEQ ID NO: 406587 - DNA, 15 bp, Homo sapiens
gagagttttacattc

SEQ ID NO: 406588 - DNA, 15 bp, Homo sapiens
tgagagttttacatt

SEQ ID NO: 406589 - DNA, 15 bp, Homo sapiens
gtgagagttttacat

SEQ ID NO: 406590 - DNA, 15 bp, Homo sapiens
ggtgagagttttaca

SEQ ID NO: 406591 - DNA, 15 bp, Homo sapiens
tggtgagagttttac

SEQ ID NO: 406592 - DNA, 15 bp, Homo sapiens
gtggtgagagtttta

SEQ ID NO: 406593 - DNA, 15 bp, Homo sapiens
ggtggtgagagtttt

SEQ ID NO: 406594 - DNA, 15 bp, Homo sapiens
tggtggtgagagttt

SEQ ID NO: 406595 - DNA, 15 bp, Homo sapiens
ttggtggtgagagtt

SEQ ID NO: 406596 - DNA, 15 bp, Homo sapiens
tttggtggtgagagt

SEQ ID NO: 406597 - DNA, 15 bp, Homo sapiens
atttggtggtgagag

SEQ ID NO: 406598 - DNA, 15 bp, Homo sapiens
tatttggtggtgaga

SEQ ID NO: 406599 - DNA, 15 bp, Homo sapiens
ctatttggtggtgag

SEQ ID NO: 406600 - DNA, 15 bp, Homo sapiens
cctatttggtggtga

SEQ ID NO: 406601 - DNA, 15 bp, Homo sapiens
acctatttggtggtg

SEQ ID NO: 406602 - DNA, 15 bp, Homo sapiens
aacctatttggtggt

SEQ ID NO: 406603 - DNA, 15 bp, Homo sapiens
gaacctatttggtgg

SEQ ID NO: 406604 - DNA, 15 bp, Homo sapiens
ggaacctatttggtg

SEQ ID NO: 406605 - DNA, 15 bp, Homo sapiens
aggaacctatttggt

SEQ ID NO: 406606 - DNA, 15 bp, Homo sapiens
aaggaacctatttgg

SEQ ID NO: 406607 - DNA, 15 bp, Homo sapiens
aaaggaacctatttg

SEQ ID NO: 406608 - DNA, 15 bp, Homo sapiens
taaaggaacctattt

SEQ ID NO: 406609 - DNA, 15 bp, Homo sapiens
ataaaggaacctatt

SEQ ID NO: 406610 - DNA, 15 bp, Homo sapiens
gataaaggaacctat

SEQ ID NO: 406611 - DNA, 15 bp, Homo sapiens
agataaaggaaccta

SEQ ID NO: 406612 - DNA, 15 bp, Homo sapiens
aagataaaggaacct

SEQ ID NO: 406613 - DNA, 15 bp, Homo sapiens
gaagataaaggaacc

SEQ ID NO: 406614 - DNA, 15 bp, Homo sapiens
ggaagataaaggaac

SEQ ID NO: 406615 - DNA, 15 bp, Homo sapiens
gggaagataaaggaa

SEQ ID NO: 406616 - DNA, 15 bp, Homo sapiens
ggggaagataaagga

SEQ ID NO: 406617 - DNA, 15 bp, Homo sapiens
gggggaagataaagg

SEQ ID NO: 406618 - DNA, 15 bp, Homo sapiens
agggggaagataaag

SEQ ID NO: 406619 - DNA, 15 bp, Homo sapiens
aagggggaagataaa

SEQ ID NO: 406620 - DNA, 15 bp, Homo sapiens
aaagggggaagataa

SEQ ID NO: 406621 - DNA, 15 bp, Homo sapiens
taaagggggaagata

SEQ ID NO: 406622 - DNA, 15 bp, Homo sapiens
ataaagggggaagat

SEQ ID NO: 406623 - DNA, 15 bp, Homo sapiens
gataaagggggaaga

SEQ ID NO: 406624 - DNA, 15 bp, Homo sapiens
agataaagggggaag

SEQ ID NO: 406625 - DNA, 15 bp, Homo sapiens
aagataaagggggaa

SEQ ID NO: 406626 - DNA, 15 bp, Homo sapiens
taagataaaggggga

SEQ ID NO: 406627 - DNA, 15 bp, Homo sapiens
gtaagataaaggggg

SEQ ID NO: 406628 - DNA, 15 bp, Homo sapiens
tgtaagataaagggg

SEQ ID NO: 406629 - DNA, 15 bp, Homo sapiens
ttgtaagataaaggg

SEQ ID NO: 406630 - DNA, 15 bp, Homo sapiens
attgtaagataaagg

SEQ ID NO: 406631 - DNA, 15 bp, Homo sapiens
aattgtaagataaag

SEQ ID NO: 406632 - DNA, 15 bp, Homo sapiens
taattgtaagataaa

SEQ ID NO: 406633 - DNA, 15 bp, Homo sapiens
ataattgtaagataa

SEQ ID NO: 406634 - DNA, 15 bp, Homo sapiens
aataattgtaagata

SEQ ID NO: 406635 - DNA, 15 bp, Homo sapiens
aaataattgtaagat

SEQ ID NO: 406636 - DNA, 15 bp, Homo sapiens
aaaataattgtaaga

SEQ ID NO: 406637 - DNA, 15 bp, Homo sapiens
taaaataattgtaag

SEQ ID NO: 406638 - DNA, 15 bp, Homo sapiens
ataaaataattgtaa

SEQ ID NO: 406639 - DNA, 15 bp, Homo sapiens
tataaaataattgta

SEQ ID NO: 406640 - DNA, 15 bp, Homo sapiens
atataaaataattgt

SEQ ID NO: 406641 - DNA, 15 bp, Homo sapiens
tatataaaataattg

SEQ ID NO: 406642 - DNA, 15 bp, Homo sapiens
atatataaaataatt

SEQ ID NO: 406643 - DNA, 15 bp, Homo sapiens
catatataaaataat

SEQ ID NO: 406644 - DNA, 15 bp, Homo sapiens
tcatatataaaataa

SEQ ID NO: 406645 - DNA, 15 bp, Homo sapiens
gtcatatataaaata

SEQ ID NO: 406646 - DNA, 15 bp, Homo sapiens
tgtcatatataaaat

SEQ ID NO: 406647 - DNA, 15 bp, Homo sapiens
atgtcatatataaaa

SEQ ID NO: 406648 - DNA, 15 bp, Homo sapiens
gatgtcatatataaa

SEQ ID NO: 406649 - DNA, 15 bp, Homo sapiens
agatgtcatatataa

SEQ ID NO: 406650 - DNA, 15 bp, Homo sapiens
cagatgtcatatata

SEQ ID NO: 406651 - DNA, 15 bp, Homo sapiens
gcagatgtcatatat

SEQ ID NO: 406652 - DNA, 15 bp, Homo sapiens
tgcagatgtcatata

SEQ ID NO: 406653 - DNA, 15 bp, Homo sapiens
gtgcagatgtcatat

SEQ ID NO: 406654 - DNA, 15 bp, Homo sapiens
tgtgcagatgtcata

SEQ ID NO: 406655 - DNA, 15 bp, Homo sapiens
atgtgcagatgtcat

SEQ ID NO: 406656 - DNA, 15 bp, Homo sapiens
tatgtgcagatgtca

SEQ ID NO: 406657 - DNA, 15 bp, Homo sapiens
gtatgtgcagatgtc

SEQ ID NO: 406658 - DNA, 15 bp, Homo sapiens
agtatgtgcagatgt

SEQ ID NO: 406659 - DNA, 15 bp, Homo sapiens
cagtatgtgcagatg

SEQ ID NO: 406660 - DNA, 15 bp, Homo sapiens
tcagtatgtgcagat

SEQ ID NO: 406661 - DNA, 15 bp, Homo sapiens
ttcagtatgtgcaga

SEQ ID NO: 406662 - DNA, 15 bp, Homo sapiens
tttcagtatgtgcag

SEQ ID NO: 406663 - DNA, 15 bp, Homo sapiens
ttttcagtatgtgca

SEQ ID NO: 406664 - DNA, 15 bp, Homo sapiens
gttttcagtatgtgc

SEQ ID NO: 406665 - DNA, 15 bp, Homo sapiens
ggttttcagtatgtg

SEQ ID NO: 406666 - DNA, 15 bp, Homo sapiens
aggttttcagtatgt

SEQ ID NO: 406667 - DNA, 15 bp, Homo sapiens
gaggttttcagtatg

SEQ ID NO: 406668 - DNA, 15 bp, Homo sapiens
tgaggttttcagtat

SEQ ID NO: 406669 - DNA, 15 bp, Homo sapiens
atgaggttttcagta

SEQ ID NO: 406670 - DNA, 15 bp, Homo sapiens
tatgaggttttcagt

SEQ ID NO: 406671 - DNA, 15 bp, Homo sapiens
atatgaggttttcag

SEQ ID NO: 406672 - DNA, 15 bp, Homo sapiens
catatgaggttttca

SEQ ID NO: 406673 - DNA, 15 bp, Homo sapiens
tcatatgaggttttc

SEQ ID NO: 406674 - DNA, 15 bp, Homo sapiens
gtcatatgaggtttt

SEQ ID NO: 406675 - DNA, 15 bp, Homo sapiens
tgtcatatgaggttt

SEQ ID NO: 406676 - DNA, 15 bp, Homo sapiens
ttgtcatatgaggtt

SEQ ID NO: 406677 - DNA, 15 bp, Homo sapiens
attgtcatatgaggt

SEQ ID NO: 406678 - DNA, 15 bp, Homo sapiens
cattgtcatatgagg

SEQ ID NO: 406679 - DNA, 15 bp, Homo sapiens
gcattgtcatatgag

SEQ ID NO: 406680 - DNA, 15 bp, Homo sapiens
ggcattgtcatatga

SEQ ID NO: 406681 - DNA, 15 bp, Homo sapiens
gggcattgtcatatg

SEQ ID NO: 406682 - DNA, 15 bp, Homo sapiens
agggcattgtcatat

SEQ ID NO: 406683 - DNA, 15 bp, Homo sapiens
tagggcattgtcata

SEQ ID NO: 406684 - DNA, 15 bp, Homo sapiens
ttagggcattgtcat

SEQ ID NO: 406685 - DNA, 15 bp, Homo sapiens
gttagggcattgtca

SEQ ID NO: 406686 - DNA, 15 bp, Homo sapiens
agttagggcattgtc

SEQ ID NO: 406687 - DNA, 15 bp, Homo sapiens
aagttagggcattgt

SEQ ID NO: 406688 - DNA, 15 bp, Homo sapiens
gaagttagggcattg

SEQ ID NO: 406689 - DNA, 15 bp, Homo sapiens
agaagttagggcatt

SEQ ID NO: 406690 - DNA, 15 bp, Homo sapiens
tagaagttagggcat

SEQ ID NO: 406691 - DNA, 15 bp, Homo sapiens
gtagaagttagggca

SEQ ID NO: 406692 - DNA, 15 bp, Homo sapiens
agtagaagttagggc

SEQ ID NO: 406693 - DNA, 15 bp, Homo sapiens
aagtagaagttaggg

SEQ ID NO: 406694 - DNA, 15 bp, Homo sapiens
aaagtagaagttagg

SEQ ID NO: 406695 - DNA, 15 bp, Homo sapiens
gaaagtagaagttag

SEQ ID NO: 406696 - DNA, 15 bp, Homo sapiens
tgaaagtagaagtta

SEQ ID NO: 406697 - DNA, 15 bp, Homo sapiens
ttgaaagtagaagtt

SEQ ID NO: 406698 - DNA, 15 bp, Homo sapiens
gttgaaagtagaagt

SEQ ID NO: 406699 - DNA, 15 bp, Homo sapiens
ggttgaaagtagaag

SEQ ID NO: 406700 - DNA, 15 bp, Homo sapiens
tggttgaaagtagaa

SEQ ID NO: 406701 - DNA, 15 bp, Homo sapiens
atggttgaaagtaga

SEQ ID NO: 406702 - DNA, 15 bp, Homo sapiens
gatggttgaaagtag

SEQ ID NO: 406703 - DNA, 15 bp, Homo sapiens
tgatggttgaaagta

SEQ ID NO: 406704 - DNA, 15 bp, Homo sapiens
ttgatggttgaaagt

SEQ ID NO: 406705 - DNA, 15 bp, Homo sapiens
gttgatggttgaaag

SEQ ID NO: 406706 - DNA, 15 bp, Homo sapiens
ggttgatggttgaaa

SEQ ID NO: 406707 - DNA, 15 bp, Homo sapiens
tggttgatggttgaa

SEQ ID NO: 406708 - DNA, 15 bp, Homo sapiens
atggttgatggttga

SEQ ID NO: 406709 - DNA, 15 bp, Homo sapiens
tatggttgatggttg

SEQ ID NO: 406710 - DNA, 15 bp, Homo sapiens
gtatggttgatggtt

SEQ ID NO: 406711 - DNA, 15 bp, Homo sapiens
agtatggttgatggt

SEQ ID NO: 406712 - DNA, 15 bp, Homo sapiens
aagtatggttgatgg

SEQ ID NO: 406713 - DNA, 15 bp, Homo sapiens
taagtatggttgatg

SEQ ID NO: 406714 - DNA, 15 bp, Homo sapiens
ttaagtatggttgat

SEQ ID NO: 406715 - DNA, 15 bp, Homo sapiens
tttaagtatggttga

SEQ ID NO: 406716 - DNA, 15 bp, Homo sapiens
ctttaagtatggttg

SEQ ID NO: 406717 - DNA, 15 bp, Homo sapiens
tctttaagtatggtt

SEQ ID NO: 406718 - DNA, 15 bp, Homo sapiens
ttctttaagtatggt

SEQ ID NO: 406719 - DNA, 15 bp, Homo sapiens
attctttaagtatgg

SEQ ID NO: 406720 - DNA, 15 bp, Homo sapiens
aattctttaagtatg

SEQ ID NO: 406721 - DNA, 15 bp, Homo sapiens
gaattctttaagtat

SEQ ID NO: 406722 - DNA, 15 bp, Homo sapiens
tgaattctttaagta

SEQ ID NO: 406723 - DNA, 15 bp, Homo sapiens
ttgaattctttaagt

SEQ ID NO: 406724 - DNA, 15 bp, Homo sapiens
cttgaattctttaag

SEQ ID NO: 406725 - DNA, 15 bp, Homo sapiens
tcttgaattctttaa

SEQ ID NO: 406726 - DNA, 15 bp, Homo sapiens
ctcttgaattcttta

SEQ ID NO: 406727 - DNA, 15 bp, Homo sapiens
cctcttgaattcttt

SEQ ID NO: 406728 - DNA, 15 bp, Homo sapiens
tcctcttgaattctt

SEQ ID NO: 406729 - DNA, 15 bp, Homo sapiens
ttcctcttgaattct

SEQ ID NO: 406730 - DNA, 15 bp, Homo sapiens
tttcctcttgaattc

SEQ ID NO: 406731 - DNA, 15 bp, Homo sapiens
ttttcctcttgaatt

SEQ ID NO: 406732 - DNA, 15 bp, Homo sapiens
tttttcctcttgaat

SEQ ID NO: 406733 - DNA, 15 bp, Homo sapiens
ttttttcctcttgaa

SEQ ID NO: 406734 - DNA, 15 bp, Homo sapiens
tttttttcctcttga

SEQ ID NO: 406735 - DNA, 15 bp, Homo sapiens
atttttttcctcttg

SEQ ID NO: 406736 - DNA, 15 bp, Homo sapiens
tatttttttcctctt

SEQ ID NO: 406737 - DNA, 15 bp, Homo sapiens
ttatttttttcctct

SEQ ID NO: 406738 - DNA, 15 bp, Homo sapiens
attatttttttcctc

SEQ ID NO: 406739 - DNA, 15 bp, Homo sapiens
gattatttttttcct

SEQ ID NO: 406740 - DNA, 15 bp, Homo sapiens
agattatttttttcc

SEQ ID NO: 406741 - DNA, 15 bp, Homo sapiens
tagattatttttttc

SEQ ID NO: 406742 - DNA, 15 bp, Homo sapiens
gtagattattttttt

SEQ ID NO: 406743 - DNA, 15 bp, Homo sapiens
agtagattatttttt

SEQ ID NO: 406744 - DNA, 15 bp, Homo sapiens
cagtagattattttt

SEQ ID NO: 406745 - DNA, 15 bp, Homo sapiens
acagtagattatttt

SEQ ID NO: 406746 - DNA, 15 bp, Homo sapiens
cacagtagattattt

SEQ ID NO: 406747 - DNA, 15 bp, Homo sapiens
acacagtagattatt

SEQ ID NO: 406748 - DNA, 15 bp, Homo sapiens
aacacagtagattat

SEQ ID NO: 406749 - DNA, 15 bp, Homo sapiens
aaacacagtagatta

SEQ ID NO: 406750 - DNA, 15 bp, Homo sapiens
taaacacagtagatt

SEQ ID NO: 406751 - DNA, 15 bp, Homo sapiens
gtaaacacagtagat

SEQ ID NO: 406752 - DNA, 15 bp, Homo sapiens
ggtaaacacagtaga

SEQ ID NO: 406753 - DNA, 15 bp, Homo sapiens
tggtaaacacagtag

SEQ ID NO: 406754 - DNA, 15 bp, Homo sapiens
atggtaaacacagta

SEQ ID NO: 406755 - DNA, 15 bp, Homo sapiens
aatggtaaacacagt

SEQ ID NO: 406756 - DNA, 15 bp, Homo sapiens
aaatggtaaacacag

SEQ ID NO: 406757 - DNA, 15 bp, Homo sapiens
gaaatggtaaacaca

SEQ ID NO: 406758 - DNA, 15 bp, Homo sapiens
agaaatggtaaacac

SEQ ID NO: 406759 - DNA, 15 bp, Homo sapiens
cagaaatggtaaaca

SEQ ID NO: 406760 - DNA, 15 bp, Homo sapiens
acagaaatggtaaac

SEQ ID NO: 406761 - DNA, 15 bp, Homo sapiens
aacagaaatggtaaa

SEQ ID NO: 406762 - DNA, 15 bp, Homo sapiens
caacagaaatggtaa

SEQ ID NO: 406763 - DNA, 15 bp, Homo sapiens
ccaacagaaatggta

SEQ ID NO: 406764 - DNA, 15 bp, Homo sapiens
accaacagaaatggt

SEQ ID NO: 406765 - DNA, 15 bp, Homo sapiens
gaccaacagaaatgg

SEQ ID NO: 406766 - DNA, 15 bp, Homo sapiens
agaccaacagaaatg

SEQ ID NO: 406767 - DNA, 15 bp, Homo sapiens
aagaccaacagaaat

SEQ ID NO: 406768 - DNA, 15 bp, Homo sapiens
aaagaccaacagaaa

SEQ ID NO: 406769 - DNA, 15 bp, Homo sapiens
aaaagaccaacagaa

SEQ ID NO: 406770 - DNA, 15 bp, Homo sapiens
gaaaagaccaacaga

SEQ ID NO: 406771 - DNA, 15 bp, Homo sapiens
agaaaagaccaacag

SEQ ID NO: 406772 - DNA, 15 bp, Homo sapiens
gagaaaagaccaaca

SEQ ID NO: 406773 - DNA, 15 bp, Homo sapiens
tgagaaaagaccaac

SEQ ID NO: 406774 - DNA, 15 bp, Homo sapiens
atgagaaaagaccaa

SEQ ID NO: 406775 - DNA, 15 bp, Homo sapiens
aatgagaaaagacca

SEQ ID NO: 406776 - DNA, 15 bp, Homo sapiens
aaatgagaaaagacc

SEQ ID NO: 406777 - DNA, 15 bp, Homo sapiens
caaatgagaaaagac

SEQ ID NO: 406778 - DNA, 15 bp, Homo sapiens
acaaatgagaaaaga

SEQ ID NO: 406779 - DNA, 15 bp, Homo sapiens
cacaaatgagaaaag

SEQ ID NO: 406780 - DNA, 15 bp, Homo sapiens
tcacaaatgagaaaa

SEQ ID NO: 406781 - DNA, 15 bp, Homo sapiens
atcacaaatgagaaa

SEQ ID NO: 406782 - DNA, 15 bp, Homo sapiens
catcacaaatgagaa

SEQ ID NO: 406783 - DNA, 15 bp, Homo sapiens
acatcacaaatgaga

SEQ ID NO: 406784 - DNA, 15 bp, Homo sapiens
aacatcacaaatgag

SEQ ID NO: 406785 - DNA, 15 bp, Homo sapiens
gaacatcacaaatga

SEQ ID NO: 406786 - DNA, 15 bp, Homo sapiens
agaacatcacaaatg

SEQ ID NO: 406787 - DNA, 15 bp, Homo sapiens
cagaacatcacaaat

SEQ ID NO: 406788 - DNA, 15 bp, Homo sapiens
tcagaacatcacaaa

SEQ ID NO: 406789 - DNA, 15 bp, Homo sapiens
ctcagaacatcacaa

SEQ ID NO: 406790 - DNA, 15 bp, Homo sapiens
actcagaacatcaca

SEQ ID NO: 406791 - DNA, 15 bp, Homo sapiens
aactcagaacatcac

SEQ ID NO: 406792 - DNA, 15 bp, Homo sapiens
aaactcagaacatca

SEQ ID NO: 406793 - DNA, 15 bp, Homo sapiens
gaaactcagaacatc

SEQ ID NO: 406794 - DNA, 15 bp, Homo sapiens
ggaaactcagaacat

SEQ ID NO: 406795 - DNA, 15 bp, Homo sapiens
aggaaactcagaaca

SEQ ID NO: 406796 - DNA, 15 bp, Homo sapiens
aaggaaactcagaac

SEQ ID NO: 406797 - DNA, 15 bp, Homo sapiens
gaaggaaactcagaa

SEQ ID NO: 406798 - DNA, 15 bp, Homo sapiens
agaaggaaactcaga

SEQ ID NO: 406799 - DNA, 15 bp, Homo sapiens
cagaaggaaactcag

SEQ ID NO: 406800 - DNA, 15 bp, Homo sapiens
ccagaaggaaactca

SEQ ID NO: 406801 - DNA, 15 bp, Homo sapiens
accagaaggaaactc

SEQ ID NO: 406802 - DNA, 15 bp, Homo sapiens
taccagaaggaaact

SEQ ID NO: 406803 - DNA, 15 bp, Homo sapiens
caggtttcaactgag

SEQ ID NO: 406804 - DNA, 15 bp, Homo sapiens
tcaggtttcaactga

SEQ ID NO: 406805 - DNA, 15 bp, Homo sapiens
ctcaggtttcaactg

SEQ ID NO: 406806 - DNA, 15 bp, Homo sapiens
gctcaggtttcaact

SEQ ID NO: 406807 - DNA, 15 bp, Homo sapiens
ggctcaggtttcaac

SEQ ID NO: 406808 - DNA, 15 bp, Homo sapiens
aggctcaggtttcaa

SEQ ID NO: 406809 - DNA, 15 bp, Homo sapiens
gaggctcaggtttca

SEQ ID NO: 406810 - DNA, 15 bp, Homo sapiens
tgaggctcaggtttc

SEQ ID NO: 406811 - DNA, 15 bp, Homo sapiens
gtgaggctcaggttt

SEQ ID NO: 406812 - DNA, 15 bp, Homo sapiens
agtgaggctcaggtt

SEQ ID NO: 406813 - DNA, 15 bp, Homo sapiens
aagtgaggctcaggt

SEQ ID NO: 406814 - DNA, 15 bp, Homo sapiens
gaagtgaggctcagg

SEQ ID NO: 406815 - DNA, 15 bp, Homo sapiens
agaagtgaggctcag

SEQ ID NO: 406816 - DNA, 15 bp, Homo sapiens
gagaagtgaggctca

SEQ ID NO: 406817 - DNA, 15 bp, Homo sapiens
agagaagtgaggctc

SEQ ID NO: 406818 - DNA, 15 bp, Homo sapiens
gagagaagtgaggct

SEQ ID NO: 406819 - DNA, 15 bp, Homo sapiens
ggagagaagtgaggc

SEQ ID NO: 406820 - DNA, 15 bp, Homo sapiens
aggagagaagtgagg

SEQ ID NO: 406821 - DNA, 15 bp, Homo sapiens
gaggagagaagtgag

SEQ ID NO: 406822 - DNA, 15 bp, Homo sapiens
ggaggagagaagtga

SEQ ID NO: 406823 - DNA, 15 bp, Homo sapiens
gggaggagagaagtg

SEQ ID NO: 406824 - DNA, 15 bp, Homo sapiens
agggaggagagaagt

SEQ ID NO: 406825 - DNA, 15 bp, Homo sapiens
cagggaggagagaag

SEQ ID NO: 406826 - DNA, 15 bp, Homo sapiens
gcagggaggagagaa

SEQ ID NO: 406827 - DNA, 15 bp, Homo sapiens
tgcagggaggagaga

SEQ ID NO: 406828 - DNA, 15 bp, Homo sapiens
gtgcagggaggagag

SEQ ID NO: 406829 - DNA, 15 bp, Homo sapiens
tgtgcagggaggaga

SEQ ID NO: 406830 - DNA, 15 bp, Homo sapiens
ctgtgcagggaggag

SEQ ID NO: 406831 - DNA, 15 bp, Homo sapiens
gctgtgcagggagga

SEQ ID NO: 406832 - DNA, 15 bp, Homo sapiens
tgctgtgcagggagg

SEQ ID NO: 406833 - DNA, 15 bp, Homo sapiens
ttgctgtgcagggag

SEQ ID NO: 406834 - DNA, 15 bp, Homo sapiens
gttgctgtgcaggga

SEQ ID NO: 406835 - DNA, 15 bp, Homo sapiens
tgttgctgtgcaggg

SEQ ID NO: 406836 - DNA, 15 bp, Homo sapiens
ttgttgctgtgcagg

SEQ ID NO: 406837 - DNA, 15 bp, Homo sapiens
cttgttgctgtgcag

SEQ ID NO: 406838 - DNA, 15 bp, Homo sapiens
ccttgttgctgtgca

SEQ ID NO: 406839 - DNA, 15 bp, Homo sapiens
gccttgttgctgtgc

SEQ ID NO: 406840 - DNA, 15 bp, Homo sapiens
tgccttgttgctgtg

SEQ ID NO: 406841 - DNA, 15 bp, Homo sapiens
ctgccttgttgctgt

SEQ ID NO: 406842 - DNA, 15 bp, Homo sapiens
actgccttgttgctg

SEQ ID NO: 406843 - DNA, 15 bp, Homo sapiens
gactgccttgttgct

SEQ ID NO: 406844 - DNA, 15 bp, Homo sapiens
tgactgccttgttgc

SEQ ID NO: 406845 - DNA, 15 bp, Homo sapiens
atgactgccttgttg

SEQ ID NO: 406846 - DNA, 15 bp, Homo sapiens
gatgactgccttgtt

SEQ ID NO: 406847 - DNA, 15 bp, Homo sapiens
cgatgactgccttgt

SEQ ID NO: 406848 - DNA, 15 bp, Homo sapiens
ccgatgactgccttg

SEQ ID NO: 406849 - DNA, 15 bp, Homo sapiens
tccgatgactgcctt

SEQ ID NO: 406850 - DNA, 15 bp, Homo sapiens
ctccgatgactgcct

SEQ ID NO: 406851 - DNA, 15 bp, Homo sapiens
tctccgatgactgcc

SEQ ID NO: 406852 - DNA, 15 bp, Homo sapiens
gtctccgatgactgc

SEQ ID NO: 406853 - DNA, 15 bp, Homo sapiens
ggtctccgatgactg

SEQ ID NO: 406854 - DNA, 15 bp, Homo sapiens
gggtctccgatgact

SEQ ID NO: 406855 - DNA, 15 bp, Homo sapiens
ggggtctccgatgac

SEQ ID NO: 406856 - DNA, 15 bp, Homo sapiens
aggggtctccgatga

SEQ ID NO: 406857 - DNA, 15 bp, Homo sapiens
aaggggtctccgatg

SEQ ID NO: 406858 - DNA, 15 bp, Homo sapiens
caaggggtctccgat

SEQ ID NO: 406859 - DNA, 15 bp, Homo sapiens
acaaggggtctccga

SEQ ID NO: 406860 - DNA, 15 bp, Homo sapiens
gacaaggggtctccg

SEQ ID NO: 406861 - DNA, 15 bp, Homo sapiens
tgacaaggggtctcc

SEQ ID NO: 406862 - DNA, 15 bp, Homo sapiens
ttgacaaggggtctc

SEQ ID NO: 406863 - DNA, 15 bp, Homo sapiens
tttgacaaggggtct

SEQ ID NO: 406864 - DNA, 15 bp, Homo sapiens
ttttgacaaggggtc

SEQ ID NO: 406865 - DNA, 15 bp, Homo sapiens
tttttgacaaggggt

SEQ ID NO: 406866 - DNA, 15 bp, Homo sapiens
ttttttgacaagggg

SEQ ID NO: 406867 - DNA, 15 bp, Homo sapiens
tttttttgacaaggg

SEQ ID NO: 406868 - DNA, 15 bp, Homo sapiens
atttttttgacaagg

SEQ ID NO: 406869 - DNA, 15 bp, Homo sapiens
aatttttttgacaag

SEQ ID NO: 406870 - DNA, 15 bp, Homo sapiens
gaatttttttgacaa

SEQ ID NO: 406871 - DNA, 15 bp, Homo sapiens
ggaatttttttgaca

SEQ ID NO: 406872 - DNA, 15 bp, Homo sapiens
gggaatttttttgac

SEQ ID NO: 406873 - DNA, 15 bp, Homo sapiens
tgggaatttttttga

SEQ ID NO: 406874 - DNA, 15 bp, Homo sapiens
ttgggaatttttttg

SEQ ID NO: 406875 - DNA, 15 bp, Homo sapiens
tttgggaattttttt

SEQ ID NO: 406876 - DNA, 15 bp, Homo sapiens
ctttgggaatttttt

SEQ ID NO: 406877 - DNA, 15 bp, Homo sapiens
actttgggaattttt

SEQ ID NO: 406878 - DNA, 15 bp, Homo sapiens
cactttgggaatttt

SEQ ID NO: 406879 - DNA, 15 bp, Homo sapiens
ccactttgggaattt

SEQ ID NO: 406880 - DNA, 15 bp, Homo sapiens
accactttgggaatt

SEQ ID NO: 406881 - DNA, 15 bp, Homo sapiens
taccactttgggaat

SEQ ID NO: 406882 - DNA, 15 bp, Homo sapiens
ttaccactttgggaa

SEQ ID NO: 406883 - DNA, 15 bp, Homo sapiens
tttaccactttggga

SEQ ID NO: 406884 - DNA, 15 bp, Homo sapiens
ctttaccactttggg

SEQ ID NO: 406885 - DNA, 15 bp, Homo sapiens
cctttaccactttgg

SEQ ID NO: 406886 - DNA, 15 bp, Homo sapiens
gcctttaccactttg

SEQ ID NO: 406887 - DNA, 15 bp, Homo sapiens
tgcctttaccacttt

SEQ ID NO: 406888 - DNA, 15 bp, Homo sapiens
ctgcctttaccactt

SEQ ID NO: 406889 - DNA, 15 bp, Homo sapiens
tctgcctttaccact

SEQ ID NO: 406890 - DNA, 15 bp, Homo sapiens
ttctgcctttaccac

SEQ ID NO: 406891 - DNA, 15 bp, Homo sapiens
tttctgcctttacca

SEQ ID NO: 406892 - DNA, 15 bp, Homo sapiens
ttttctgcctttacc

SEQ ID NO: 406893 - DNA, 15 bp, Homo sapiens
tttttctgcctttac

SEQ ID NO: 406894 - DNA, 15 bp, Homo sapiens
gtttttctgccttta

SEQ ID NO: 406895 - DNA, 15 bp, Homo sapiens
cgtttttctgccttt

SEQ ID NO: 406896 - DNA, 15 bp, Homo sapiens
acgtttttctgcctt

SEQ ID NO: 406897 - DNA, 15 bp, Homo sapiens
tacgtttttctgcct

SEQ ID NO: 406898 - DNA, 15 bp, Homo sapiens
gtacgtttttctgcc

SEQ ID NO: 406899 - DNA, 15 bp, Homo sapiens
ggtacgtttttctgc

SEQ ID NO: 406900 - DNA, 15 bp, Homo sapiens
aggtacgtttttctg

SEQ ID NO: 406901 - DNA, 15 bp, Homo sapiens
caggtacgtttttct

SEQ ID NO: 406902 - DNA, 15 bp, Homo sapiens
acaggtacgtttttc

SEQ ID NO: 406903 - DNA, 15 bp, Homo sapiens
tacaggtacgttttt

SEQ ID NO: 406904 - DNA, 15 bp, Homo sapiens
ctacaggtacgtttt

SEQ ID NO: 406905 - DNA, 15 bp, Homo sapiens
actacaggtacgttt

SEQ ID NO: 406906 - DNA, 15 bp, Homo sapiens
tactacaggtacgtt

SEQ ID NO: 406907 - DNA, 15 bp, Homo sapiens
gtactacaggtacgt

SEQ ID NO: 406908 - DNA, 15 bp, Homo sapiens
ggtactacaggtacg

SEQ ID NO: 406909 - DNA, 15 bp, Homo sapiens
tggtactacaggtac

SEQ ID NO: 406910 - DNA, 15 bp, Homo sapiens
ttggtactacaggta

SEQ ID NO: 406911 - DNA, 15 bp, Homo sapiens
tttggtactacaggt

SEQ ID NO: 406912 - DNA, 15 bp, Homo sapiens
gtttggtactacagg

SEQ ID NO: 406913 - DNA, 15 bp, Homo sapiens
tgtttggtactacag

SEQ ID NO: 406914 - DNA, 15 bp, Homo sapiens
atgtttggtactaca

SEQ ID NO: 406915 - DNA, 15 bp, Homo sapiens
tatgtttggtactac

SEQ ID NO: 406916 - DNA, 15 bp, Homo sapiens
atatgtttggtacta

SEQ ID NO: 406917 - DNA, 15 bp, Homo sapiens
catatgtttggtact

SEQ ID NO: 406918 - DNA, 15 bp, Homo sapiens
ccatatgtttggtac

SEQ ID NO: 406919 - DNA, 15 bp, Homo sapiens
gccatatgtttggta

SEQ ID NO: 406920 - DNA, 15 bp, Homo sapiens
agccatatgtttggt

SEQ ID NO: 406921 - DNA, 15 bp, Homo sapiens
cagccatatgtttgg

SEQ ID NO: 406922 - DNA, 15 bp, Homo sapiens
ccagccatatgtttg

SEQ ID NO: 406923 - DNA, 15 bp, Homo sapiens
cccagccatatgttt

SEQ ID NO: 406924 - DNA, 15 bp, Homo sapiens
ccccagccatatgtt

SEQ ID NO: 406925 - DNA, 15 bp, Homo sapiens
tccccagccatatgt

SEQ ID NO: 406926 - DNA, 15 bp, Homo sapiens
atccccagccatatg

SEQ ID NO: 406927 - DNA, 15 bp, Homo sapiens
catccccagccatat

SEQ ID NO: 406928 - DNA, 15 bp, Homo sapiens
ccatccccagccata

SEQ ID NO: 406929 - DNA, 15 bp, Homo sapiens
cccatccccagccat

SEQ ID NO: 406930 - DNA, 15 bp, Homo sapiens
ccccatccccagcca

SEQ ID NO: 406931 - DNA, 15 bp, Homo sapiens
accccatccccagcc

SEQ ID NO: 406932 - DNA, 15 bp, Homo sapiens
taccccatccccagc

SEQ ID NO: 406933 - DNA, 15 bp, Homo sapiens
ttaccccatccccag

SEQ ID NO: 406934 - DNA, 15 bp, Homo sapiens
attaccccatcccca

SEQ ID NO: 406935 - DNA, 15 bp, Homo sapiens
gattaccccatcccc

SEQ ID NO: 406936 - DNA, 15 bp, Homo sapiens
agattaccccatccc

SEQ ID NO: 406937 - DNA, 15 bp, Homo sapiens
gagattaccccatcc

SEQ ID NO: 406938 - DNA, 15 bp, Homo sapiens
agagattaccccatc

SEQ ID NO: 406939 - DNA, 15 bp, Homo sapiens
gagagattaccccat

SEQ ID NO: 406940 - DNA, 15 bp, Homo sapiens
tgagagattacccca

SEQ ID NO: 406941 - DNA, 15 bp, Homo sapiens
ttgagagattacccc

SEQ ID NO: 406942 - DNA, 15 bp, Homo sapiens
tttgagagattaccc

SEQ ID NO: 406943 - DNA, 15 bp, Homo sapiens
ctttgagagattacc

SEQ ID NO: 406944 - DNA, 15 bp, Homo sapiens
cctttgagagattac

SEQ ID NO: 406945 - DNA, 15 bp, Homo sapiens
ccctttgagagatta

SEQ ID NO: 406946 - DNA, 15 bp, Homo sapiens
accctttgagagatt

SEQ ID NO: 406947 - DNA, 15 bp, Homo sapiens
aaccctttgagagat

SEQ ID NO: 406948 - DNA, 15 bp, Homo sapiens
aaaccctttgagaga

SEQ ID NO: 406949 - DNA, 15 bp, Homo sapiens
aaaaccctttgagag

SEQ ID NO: 406950 - DNA, 15 bp, Homo sapiens
caaaaccctttgaga

SEQ ID NO: 406951 - DNA, 15 bp, Homo sapiens
tcaaaaccctttgag

SEQ ID NO: 406952 - DNA, 15 bp, Homo sapiens
ctcaaaaccctttga

SEQ ID NO: 406953 - DNA, 15 bp, Homo sapiens
actcaaaaccctttg

SEQ ID NO: 406954 - DNA, 15 bp, Homo sapiens
aactcaaaacccttt

SEQ ID NO: 406955 - DNA, 15 bp, Homo sapiens
caactcaaaaccctt

SEQ ID NO: 406956 - DNA, 15 bp, Homo sapiens
tcaactcaaaaccct

SEQ ID NO: 406957 - DNA, 15 bp, Homo sapiens
gtcaactcaaaaccc

SEQ ID NO: 406958 - DNA, 15 bp, Homo sapiens
cgtcaactcaaaacc

SEQ ID NO: 406959 - DNA, 15 bp, Homo sapiens
ccgtcaactcaaaac

SEQ ID NO: 406960 - DNA, 15 bp, Homo sapiens
gccgtcaactcaaaa

SEQ ID NO: 406961 - DNA, 15 bp, Homo sapiens
ggccgtcaactcaaa

SEQ ID NO: 406962 - DNA, 15 bp, Homo sapiens
aggccgtcaactcaa

SEQ ID NO: 406963 - DNA, 15 bp, Homo sapiens
gaggccgtcaactca

SEQ ID NO: 406964 - DNA, 15 bp, Homo sapiens
tgaggccgtcaactc

SEQ ID NO: 406965 - DNA, 15 bp, Homo sapiens
gtgaggccgtcaact

SEQ ID NO: 406966 - DNA, 15 bp, Homo sapiens
tgtgaggccgtcaac

SEQ ID NO: 406967 - DNA, 15 bp, Homo sapiens
gtgtgaggccgtcaa

SEQ ID NO: 406968 - DNA, 15 bp, Homo sapiens
tgtgtgaggccgtca

SEQ ID NO: 406969 - DNA, 15 bp, Homo sapiens
gtgtgtgaggccgtc

SEQ ID NO: 406970 - DNA, 15 bp, Homo sapiens
ggtgtgtgaggccgt

SEQ ID NO: 406971 - DNA, 15 bp, Homo sapiens
aggtgtgtgaggccg

SEQ ID NO: 406972 - DNA, 15 bp, Homo sapiens
aaggtgtgtgaggcc

SEQ ID NO: 406973 - DNA, 15 bp, Homo sapiens
caaggtgtgtgaggc

SEQ ID NO: 406974 - DNA, 15 bp, Homo sapiens
ccaaggtgtgtgagg

SEQ ID NO: 406975 - DNA, 15 bp, Homo sapiens
tccaaggtgtgtgag

SEQ ID NO: 406976 - DNA, 15 bp, Homo sapiens
ttccaaggtgtgtga

SEQ ID NO: 406977 - DNA, 15 bp, Homo sapiens
attccaaggtgtgtg

SEQ ID NO: 406978 - DNA, 15 bp, Homo sapiens
tattccaaggtgtgt

SEQ ID NO: 406979 - DNA, 15 bp, Homo sapiens
atattccaaggtgtg

SEQ ID NO: 406980 - DNA, 15 bp, Homo sapiens
aatattccaaggtgt

SEQ ID NO: 406981 - DNA, 15 bp, Homo sapiens
caatattccaaggtg

SEQ ID NO: 406982 - DNA, 15 bp, Homo sapiens
gcaatattccaaggt

SEQ ID NO: 406983 - DNA, 15 bp, Homo sapiens
agcaatattccaagg

SEQ ID NO: 406984 - DNA, 15 bp, Homo sapiens
aagcaatattccaag

SEQ ID NO: 406985 - DNA, 15 bp, Homo sapiens
gaagcaatattccaa

SEQ ID NO: 406986 - DNA, 15 bp, Homo sapiens
tgaagcaatattcca

SEQ ID NO: 406987 - DNA, 15 bp, Homo sapiens
ttgaagcaatattcc

SEQ ID NO: 406988 - DNA, 15 bp, Homo sapiens
attgaagcaatattc

SEQ ID NO: 406989 - DNA, 15 bp, Homo sapiens
tattgaagcaatatt

SEQ ID NO: 406990 - DNA, 15 bp, Homo sapiens
atattgaagcaatat

SEQ ID NO: 406991 - DNA, 15 bp, Homo sapiens
catattgaagcaata

SEQ ID NO: 406992 - DNA, 15 bp, Homo sapiens
ccatattgaagcaat

SEQ ID NO: 406993 - DNA, 15 bp, Homo sapiens
gccatattgaagcaa

SEQ ID NO: 406994 - DNA, 15 bp, Homo sapiens
agccatattgaagca

SEQ ID NO: 406995 - DNA, 15 bp, Homo sapiens
cagccatattgaagc

SEQ ID NO: 406996 - DNA, 15 bp, Homo sapiens
acagccatattgaag

SEQ ID NO: 406997 - DNA, 15 bp, Homo sapiens
cacagccatattgaa

SEQ ID NO: 406998 - DNA, 15 bp, Homo sapiens
ccacagccatattga

SEQ ID NO: 406999 - DNA, 15 bp, Homo sapiens
cccacagccatattg

SEQ ID NO: 407000 - DNA, 15 bp, Homo sapiens
ccccacagccatatt

SEQ ID NO: 407001 - DNA, 15 bp, Homo sapiens
accccacagccatat

SEQ ID NO: 407002 - DNA, 15 bp, Homo sapiens
taccccacagccata

SEQ ID NO: 407003 - DNA, 15 bp, Homo sapiens
ataccccacagccat

SEQ ID NO: 407004 - DNA, 15 bp, Homo sapiens
gataccccacagcca

SEQ ID NO: 407005 - DNA, 15 bp, Homo sapiens
tgataccccacagcc

SEQ ID NO: 407006 - DNA, 15 bp, Homo sapiens
atgataccccacagc

SEQ ID NO: 407007 - DNA, 15 bp, Homo sapiens
aatgataccccacag

SEQ ID NO: 407008 - DNA, 15 bp, Homo sapiens
aaatgataccccaca

SEQ ID NO: 407009 - DNA, 15 bp, Homo sapiens
aaaatgataccccac

SEQ ID NO: 407010 - DNA, 15 bp, Homo sapiens
aaaaatgatacccca

SEQ ID NO: 407011 - DNA, 15 bp, Homo sapiens
gaaaaatgatacccc

SEQ ID NO: 407012 - DNA, 15 bp, Homo sapiens
tgaaaaatgataccc

SEQ ID NO: 407013 - DNA, 15 bp, Homo sapiens
atgaaaaatgatacc

SEQ ID NO: 407014 - DNA, 15 bp, Homo sapiens
gatgaaaaatgatac

SEQ ID NO: 407015 - DNA, 15 bp, Homo sapiens
tgatgaaaaatgata

SEQ ID NO: 407016 - DNA, 15 bp, Homo sapiens
gtgatgaaaaatgat

SEQ ID NO: 407017 - DNA, 15 bp, Homo sapiens
agtgatgaaaaatga

SEQ ID NO: 407018 - DNA, 15 bp, Homo sapiens
cagtgatgaaaaatg

SEQ ID NO: 407019 - DNA, 15 bp, Homo sapiens
acagtgatgaaaaat

SEQ ID NO: 407020 - DNA, 15 bp, Homo sapiens
cacagtgatgaaaaa

SEQ ID NO: 407021 - DNA, 15 bp, Homo sapiens
gcacagtgatgaaaa

SEQ ID NO: 407022 - DNA, 15 bp, Homo sapiens
agcacagtgatgaaa

SEQ ID NO: 407023 - DNA, 15 bp, Homo sapiens
cagcacagtgatgaa

SEQ ID NO: 407024 - DNA, 15 bp, Homo sapiens
acagcacagtgatga

SEQ ID NO: 407025 - DNA, 15 bp, Homo sapiens
cacagcacagtgatg

SEQ ID NO: 407026 - DNA, 15 bp, Homo sapiens
acacagcacagtgat

SEQ ID NO: 407027 - DNA, 15 bp, Homo sapiens
cacacagcacagtga

SEQ ID NO: 407028 - DNA, 15 bp, Homo sapiens
acacacagcacagtg

SEQ ID NO: 407029 - DNA, 15 bp, Homo sapiens
tacacacagcacagt

SEQ ID NO: 407030 - DNA, 15 bp, Homo sapiens
gtacacacagcacag

SEQ ID NO: 407031 - DNA, 15 bp, Homo sapiens
tgtacacacagcaca

SEQ ID NO: 407032 - DNA, 15 bp, Homo sapiens
gtgtacacacagcac

SEQ ID NO: 407033 - DNA, 15 bp, Homo sapiens
agtgtacacacagca

SEQ ID NO: 407034 - DNA, 15 bp, Homo sapiens
cagtgtacacacagc

SEQ ID NO: 407035 - DNA, 15 bp, Homo sapiens
ccagtgtacacacag

SEQ ID NO: 407036 - DNA, 15 bp, Homo sapiens
gccagtgtacacaca

SEQ ID NO: 407037 - DNA, 15 bp, Homo sapiens
ggccagtgtacacac

SEQ ID NO: 407038 - DNA, 15 bp, Homo sapiens
tggccagtgtacaca

SEQ ID NO: 407039 - DNA, 15 bp, Homo sapiens
ttggccagtgtacac

SEQ ID NO: 407040 - DNA, 15 bp, Homo sapiens
attggccagtgtaca

SEQ ID NO: 407041 - DNA, 15 bp, Homo sapiens
tattggccagtgtac

SEQ ID NO: 407042 - DNA, 15 bp, Homo sapiens
ttattggccagtgta

SEQ ID NO: 407043 - DNA, 15 bp, Homo sapiens
tttattggccagtgt

SEQ ID NO: 407044 - DNA, 15 bp, Homo sapiens
atttattggccagtg

SEQ ID NO: 407045 - DNA, 15 bp, Homo sapiens
tatttattggccagt

SEQ ID NO: 407046 - DNA, 15 bp, Homo sapiens
atatttattggccag

SEQ ID NO: 407047 - DNA, 15 bp, Homo sapiens
catatttattggcca

SEQ ID NO: 407048 - DNA, 15 bp, Homo sapiens
gcatatttattggcc

SEQ ID NO: 407049 - DNA, 15 bp, Homo sapiens
tgcatatttattggc

SEQ ID NO: 407050 - DNA, 15 bp, Homo sapiens
ttgcatatttattgg

SEQ ID NO: 407051 - DNA, 15 bp, Homo sapiens
attgcatatttattg

SEQ ID NO: 407052 - DNA, 15 bp, Homo sapiens
gattgcatatttatt

SEQ ID NO: 407053 - DNA, 15 bp, Homo sapiens
ggattgcatatttat

SEQ ID NO: 407054 - DNA, 15 bp, Homo sapiens
tggattgcatattta

SEQ ID NO: 407055 - DNA, 15 bp, Homo sapiens
ctggattgcatattt

SEQ ID NO: 407056 - DNA, 15 bp, Homo sapiens
actggattgcatatt

SEQ ID NO: 407057 - DNA, 15 bp, Homo sapiens
cactggattgcatat

SEQ ID NO: 407058 - DNA, 15 bp, Homo sapiens
tcactggattgcata

SEQ ID NO: 407059 - DNA, 15 bp, Homo sapiens
gtcactggattgcat

SEQ ID NO: 407060 - DNA, 15 bp, Homo sapiens
ggtcactggattgca

SEQ ID NO: 407061 - DNA, 15 bp, Homo sapiens
aggtcactggattgc

SEQ ID NO: 407062 - DNA, 15 bp, Homo sapiens
caggtcactggattg

SEQ ID NO: 407063 - DNA, 15 bp, Homo sapiens
tcaggtcactggatt

SEQ ID NO: 407064 - DNA, 15 bp, Homo sapiens
gtcaggtcactggat

SEQ ID NO: 407065 - DNA, 15 bp, Homo sapiens
tgtcaggtcactgga

SEQ ID NO: 407066 - DNA, 15 bp, Homo sapiens
ctgtcaggtcactgg

SEQ ID NO: 407067 - DNA, 15 bp, Homo sapiens
tctgtcaggtcactg

SEQ ID NO: 407068 - DNA, 15 bp, Homo sapiens
ctctgtcaggtcact

SEQ ID NO: 407069 - DNA, 15 bp, Homo sapiens
cctctgtcaggtcac

SEQ ID NO: 407070 - DNA, 15 bp, Homo sapiens
ccctctgtcaggtca

SEQ ID NO: 407071 - DNA, 15 bp, Homo sapiens
tccctctgtcaggtc

SEQ ID NO: 407072 - DNA, 15 bp, Homo sapiens
ctccctctgtcaggt

SEQ ID NO: 407073 - DNA, 15 bp, Homo sapiens
tctccctctgtcagg

SEQ ID NO: 407074 - DNA, 15 bp, Homo sapiens
gtctccctctgtcag

SEQ ID NO: 407075 - DNA, 15 bp, Homo sapiens
agtctccctctgtca

SEQ ID NO: 407076 - DNA, 15 bp, Homo sapiens
aagtctccctctgtc

SEQ ID NO: 407077 - DNA, 15 bp, Homo sapiens
caagtctccctctgt

SEQ ID NO: 407078 - DNA, 15 bp, Homo sapiens
ccaagtctccctctg

SEQ ID NO: 407079 - DNA, 15 bp, Homo sapiens
accaagtctccctct

SEQ ID NO: 407080 - DNA, 15 bp, Homo sapiens
taccaagtctccctc

SEQ ID NO: 407081 - DNA, 15 bp, Homo sapiens
ttaccaagtctccct

SEQ ID NO: 407082 - DNA, 15 bp, Homo sapiens
tttaccaagtctccc

SEQ ID NO: 407083 - DNA, 15 bp, Homo sapiens
gtttaccaagtctcc

SEQ ID NO: 407084 - DNA, 15 bp, Homo sapiens
tgtttaccaagtctc

SEQ ID NO: 407085 - DNA, 15 bp, Homo sapiens
atgtttaccaagtct

SEQ ID NO: 407086 - DNA, 15 bp, Homo sapiens
gatgtttaccaagtc

SEQ ID NO: 407087 - DNA, 15 bp, Homo sapiens
tgatgtttaccaagt

SEQ ID NO: 407088 - DNA, 15 bp, Homo sapiens
gtgatgtttaccaag

SEQ ID NO: 407089 - DNA, 15 bp, Homo sapiens
agtgatgtttaccaa

SEQ ID NO: 407090 - DNA, 15 bp, Homo sapiens
tagtgatgtttacca

SEQ ID NO: 407091 - DNA, 15 bp, Homo sapiens
ctagtgatgtttacc

SEQ ID NO: 407092 - DNA, 15 bp, Homo sapiens
cctagtgatgtttac

SEQ ID NO: 407093 - DNA, 15 bp, Homo sapiens
ccctagtgatgttta

SEQ ID NO: 407094 - DNA, 15 bp, Homo sapiens
gccctagtgatgttt

SEQ ID NO: 407095 - DNA, 15 bp, Homo sapiens
ggccctagtgatgtt

SEQ ID NO: 407096 - DNA, 15 bp, Homo sapiens
aggccctagtgatgt

SEQ ID NO: 407097 - DNA, 15 bp, Homo sapiens
aaggccctagtgatg

SEQ ID NO: 407098 - DNA, 15 bp, Homo sapiens
caaggccctagtgat

SEQ ID NO: 407099 - DNA, 15 bp, Homo sapiens
acaaggccctagtga

SEQ ID NO: 407100 - DNA, 15 bp, Homo sapiens
gacaaggccctagtg

SEQ ID NO: 407101 - DNA, 15 bp, Homo sapiens
ggacaaggccctagt

SEQ ID NO: 407102 - DNA, 15 bp, Homo sapiens
tggacaaggccctag

SEQ ID NO: 407103 - DNA, 15 bp, Homo sapiens
ctggacaaggcccta

SEQ ID NO: 407104 - DNA, 15 bp, Homo sapiens
cctggacaaggccct

SEQ ID NO: 407105 - DNA, 15 bp, Homo sapiens
gcctggacaaggccc

SEQ ID NO: 407106 - DNA, 15 bp, Homo sapiens
agcctggacaaggcc

SEQ ID NO: 407107 - DNA, 15 bp, Homo sapiens
cagcctggacaaggc

SEQ ID NO: 407108 - DNA, 15 bp, Homo sapiens
acagcctggacaagg

SEQ ID NO: 407109 - DNA, 15 bp, Homo sapiens
gacagcctggacaag

SEQ ID NO: 407110 - DNA, 15 bp, Homo sapiens
agacagcctggacaa

SEQ ID NO: 407111 - DNA, 15 bp, Homo sapiens
gagacagcctggaca

SEQ ID NO: 407112 - DNA, 15 bp, Homo sapiens
tgagacagcctggac

SEQ ID NO: 407113 - DNA, 15 bp, Homo sapiens
ctgagacagcctgga

SEQ ID NO: 407114 - DNA, 15 bp, Homo sapiens
tctgagacagcctgg

SEQ ID NO: 407115 - DNA, 15 bp, Homo sapiens
ctctgagacagcctg

SEQ ID NO: 407116 - DNA, 15 bp, Homo sapiens
cctctgagacagcct

SEQ ID NO: 407117 - DNA, 15 bp, Homo sapiens
gcctctgagacagcc

SEQ ID NO: 407118 - DNA, 15 bp, Homo sapiens
ggcctctgagacagc

SEQ ID NO: 407119 - DNA, 15 bp, Homo sapiens
aggcctctgagacag

SEQ ID NO: 407120 - DNA, 15 bp, Homo sapiens
caggcctctgagaca

SEQ ID NO: 407121 - DNA, 15 bp, Homo sapiens
acaggcctctgagac

SEQ ID NO: 407122 - DNA, 15 bp, Homo sapiens
cacaggcctctgaga

SEQ ID NO: 407123 - DNA, 15 bp, Homo sapiens
acacaggcctctgag

SEQ ID NO: 407124 - DNA, 15 bp, Homo sapiens
cacacaggcctctga

SEQ ID NO: 407125 - DNA, 15 bp, Homo sapiens
ccacacaggcctctg

SEQ ID NO: 407126 - DNA, 15 bp, Homo sapiens
accacacaggcctct

SEQ ID NO: 407127 - DNA, 15 bp, Homo sapiens
taccacacaggcctc

SEQ ID NO: 407128 - DNA, 15 bp, Homo sapiens
ataccacacaggcct

SEQ ID NO: 407129 - DNA, 15 bp, Homo sapiens
aataccacacaggcc

SEQ ID NO: 407130 - DNA, 15 bp, Homo sapiens
gaataccacacaggc

SEQ ID NO: 407131 - DNA, 15 bp, Homo sapiens
tgaataccacacagg

SEQ ID NO: 407132 - DNA, 15 bp, Homo sapiens
ctgaataccacacag

SEQ ID NO: 407133 - DNA, 15 bp, Homo sapiens
cctgaataccacaca

SEQ ID NO: 407134 - DNA, 15 bp, Homo sapiens
ccctgaataccacac

SEQ ID NO: 407135 - DNA, 15 bp, Homo sapiens
accctgaataccaca

SEQ ID NO: 407136 - DNA, 15 bp, Homo sapiens
taccctgaataccac

SEQ ID NO: 407137 - DNA, 15 bp, Homo sapiens
ttaccctgaatacca

SEQ ID NO: 407138 - DNA, 15 bp, Homo sapiens
cttaccctgaatacc

SEQ ID NO: 407139 - DNA, 15 bp, Homo sapiens
ccttaccctgaatac

SEQ ID NO: 407140 - DNA, 15 bp, Homo sapiens
accttaccctgaata

SEQ ID NO: 407141 - DNA, 15 bp, Homo sapiens
taccttaccctgaat

SEQ ID NO: 407142 - DNA, 15 bp, Homo sapiens
ttaccttaccctgaa

SEQ ID NO: 407143 - DNA, 15 bp, Homo sapiens
tttaccttaccctga

SEQ ID NO: 407144 - DNA, 15 bp, Homo sapiens
atttaccttaccctg

SEQ ID NO: 407145 - DNA, 15 bp, Homo sapiens
aatttaccttaccct

SEQ ID NO: 407146 - DNA, 15 bp, Homo sapiens
caatttaccttaccc

SEQ ID NO: 407147 - DNA, 15 bp, Homo sapiens
tcaatttaccttacc

SEQ ID NO: 407148 - DNA, 15 bp, Homo sapiens
ttcaatttaccttac

SEQ ID NO: 407149 - DNA, 15 bp, Homo sapiens
attcaatttacctta

SEQ ID NO: 407150 - DNA, 15 bp, Homo sapiens
cattcaatttacctt

SEQ ID NO: 407151 - DNA, 15 bp, Homo sapiens
tcattcaatttacct

SEQ ID NO: 407152 - DNA, 15 bp, Homo sapiens
atcattcaatttacc

SEQ ID NO: 407153 - DNA, 15 bp, Homo sapiens
aatcattcaatttac

SEQ ID NO: 407154 - DNA, 15 bp, Homo sapiens
aaatcattcaattta

SEQ ID NO: 407155 - DNA, 15 bp, Homo sapiens
aaaatcattcaattt

SEQ ID NO: 407156 - DNA, 15 bp, Homo sapiens
aaaaatcattcaatt

SEQ ID NO: 407157 - DNA, 15 bp, Homo sapiens
aaaaaatcattcaat

SEQ ID NO: 407158 - DNA, 15 bp, Homo sapiens
caaaaaatcattcaa

SEQ ID NO: 407159 - DNA, 15 bp, Homo sapiens
tcaaaaaatcattca

SEQ ID NO: 407160 - DNA, 15 bp, Homo sapiens
ctcaaaaaatcattc

SEQ ID NO: 407161 - DNA, 15 bp, Homo sapiens
actcaaaaaatcatt

SEQ ID NO: 407162 - DNA, 15 bp, Homo sapiens
gactcaaaaaatcat

SEQ ID NO: 407163 - DNA, 15 bp, Homo sapiens
agactcaaaaaatca

SEQ ID NO: 407164 - DNA, 15 bp, Homo sapiens
cagactcaaaaaatc

SEQ ID NO: 407165 - DNA, 15 bp, Homo sapiens
acagactcaaaaaat

SEQ ID NO: 407166 - DNA, 15 bp, Homo sapiens
cacagactcaaaaaa

SEQ ID NO: 407167 - DNA, 15 bp, Homo sapiens
ccacagactcaaaaa

SEQ ID NO: 407168 - DNA, 15 bp, Homo sapiens
gccacagactcaaaa

SEQ ID NO: 407169 - DNA, 15 bp, Homo sapiens
agccacagactcaaa

SEQ ID NO: 407170 - DNA, 15 bp, Homo sapiens
cagccacagactcaa

SEQ ID NO: 407171 - DNA, 15 bp, Homo sapiens
acagccacagactca

SEQ ID NO: 407172 - DNA, 15 bp, Homo sapiens
aacagccacagactc

SEQ ID NO: 407173 - DNA, 15 bp, Homo sapiens
taacagccacagact

SEQ ID NO: 407174 - DNA, 15 bp, Homo sapiens
gtaacagccacagac

SEQ ID NO: 407175 - DNA, 15 bp, Homo sapiens
tgtaacagccacaga

SEQ ID NO: 407176 - DNA, 15 bp, Homo sapiens
ttgtaacagccacag

SEQ ID NO: 407177 - DNA, 15 bp, Homo sapiens
cttgtaacagccaca

SEQ ID NO: 407178 - DNA, 15 bp, Homo sapiens
tcttgtaacagccac

SEQ ID NO: 407179 - DNA, 15 bp, Homo sapiens
ttcttgtaacagcca

SEQ ID NO: 407180 - DNA, 15 bp, Homo sapiens
tttcttgtaacagcc

SEQ ID NO: 407181 - DNA, 15 bp, Homo sapiens
gtttcttgtaacagc

SEQ ID NO: 407182 - DNA, 15 bp, Homo sapiens
tgtttcttgtaacag

SEQ ID NO: 407183 - DNA, 15 bp, Homo sapiens
gtgtttcttgtaaca

SEQ ID NO: 407184 - DNA, 15 bp, Homo sapiens
agtgtttcttgtaac

SEQ ID NO: 407185 - DNA, 15 bp, Homo sapiens
tagtgtttcttgtaa

SEQ ID NO: 407186 - DNA, 15 bp, Homo sapiens
atagtgtttcttgta

SEQ ID NO: 407187 - DNA, 15 bp, Homo sapiens
aatagtgtttcttgt

SEQ ID NO: 407188 - DNA, 15 bp, Homo sapiens
aaatagtgtttcttg

SEQ ID NO: 407189 - DNA, 15 bp, Homo sapiens
aaaatagtgtttctt

SEQ ID NO: 407190 - DNA, 15 bp, Homo sapiens
caaaatagtgtttct

SEQ ID NO: 407191 - DNA, 15 bp, Homo sapiens
tcaaaatagtgtttc

SEQ ID NO: 407192 - DNA, 15 bp, Homo sapiens
ctcaaaatagtgttt

SEQ ID NO: 407193 - DNA, 15 bp, Homo sapiens
cctcaaaatagtgtt

SEQ ID NO: 407194 - DNA, 15 bp, Homo sapiens
ccctcaaaatagtgt

SEQ ID NO: 407195 - DNA, 15 bp, Homo sapiens
tccctcaaaatagtg

SEQ ID NO: 407196 - DNA, 15 bp, Homo sapiens
ttccctcaaaatagt

SEQ ID NO: 407197 - DNA, 15 bp, Homo sapiens
attccctcaaaatag

SEQ ID NO: 407198 - DNA, 15 bp, Homo sapiens
tattccctcaaaata

SEQ ID NO: 407199 - DNA, 15 bp, Homo sapiens
gtattccctcaaaat

SEQ ID NO: 407200 - DNA, 15 bp, Homo sapiens
ggtattccctcaaaa

SEQ ID NO: 407201 - DNA, 15 bp, Homo sapiens
tggtattccctcaaa

SEQ ID NO: 407202 - DNA, 15 bp, Homo sapiens
ttggtattccctcaa

SEQ ID NO: 407203 - DNA, 15 bp, Homo sapiens
cttggtattccctca

SEQ ID NO: 407204 - DNA, 15 bp, Homo sapiens
ccttggtattccctc

SEQ ID NO: 407205 - DNA, 15 bp, Homo sapiens
gccttggtattccct

SEQ ID NO: 407206 - DNA, 15 bp, Homo sapiens
ggccttggtattccc

SEQ ID NO: 407207 - DNA, 15 bp, Homo sapiens
aggccttggtattcc

SEQ ID NO: 407208 - DNA, 15 bp, Homo sapiens
caggccttggtattc

SEQ ID NO: 407209 - DNA, 15 bp, Homo sapiens
acaggccttggtatt

SEQ ID NO: 407210 - DNA, 15 bp, Homo sapiens
cacaggccttggtat

SEQ ID NO: 407211 - DNA, 15 bp, Homo sapiens
ccacaggccttggta

SEQ ID NO: 407212 - DNA, 15 bp, Homo sapiens
cccacaggccttggt

SEQ ID NO: 407213 - DNA, 15 bp, Homo sapiens
gcccacaggccttgg

SEQ ID NO: 407214 - DNA, 15 bp, Homo sapiens
tgcccacaggccttg

SEQ ID NO: 407215 - DNA, 15 bp, Homo sapiens
ttgcccacaggcctt

SEQ ID NO: 407216 - DNA, 15 bp, Homo sapiens
tttgcccacaggcct

SEQ ID NO: 407217 - DNA, 15 bp, Homo sapiens
ttttgcccacaggcc

SEQ ID NO: 407218 - DNA, 15 bp, Homo sapiens
attttgcccacaggc

SEQ ID NO: 407219 - DNA, 15 bp, Homo sapiens
cattttgcccacagg

SEQ ID NO: 407220 - DNA, 15 bp, Homo sapiens
tcattttgcccacag

SEQ ID NO: 407221 - DNA, 15 bp, Homo sapiens
ctcattttgcccaca

SEQ ID NO: 407222 - DNA, 15 bp, Homo sapiens
actcattttgcccac

SEQ ID NO: 407223 - DNA, 15 bp, Homo sapiens
cactcattttgccca

SEQ ID NO: 407224 - DNA, 15 bp, Homo sapiens
ccactcattttgccc

SEQ ID NO: 407225 - DNA, 15 bp, Homo sapiens
cccactcattttgcc

SEQ ID NO: 407226 - DNA, 15 bp, Homo sapiens
tcccactcattttgc

SEQ ID NO: 407227 - DNA, 15 bp, Homo sapiens
atcccactcattttg

SEQ ID NO: 407228 - DNA, 15 bp, Homo sapiens
aatcccactcatttt

SEQ ID NO: 407229 - DNA, 15 bp, Homo sapiens
gaatcccactcattt

SEQ ID NO: 407230 - DNA, 15 bp, Homo sapiens
ggaatcccactcatt

SEQ ID NO: 407231 - DNA, 15 bp, Homo sapiens
aggaatcccactcat

SEQ ID NO: 407232 - DNA, 15 bp, Homo sapiens
taggaatcccactca

SEQ ID NO: 407233 - DNA, 15 bp, Homo sapiens
ctaggaatcccactc

SEQ ID NO: 407234 - DNA, 15 bp, Homo sapiens
tctaggaatcccact

SEQ ID NO: 407235 - DNA, 15 bp, Homo sapiens
ttctaggaatcccac

SEQ ID NO: 407236 - DNA, 15 bp, Homo sapiens
cttctaggaatccca

SEQ ID NO: 407237 - DNA, 15 bp, Homo sapiens
ccttctaggaatccc

SEQ ID NO: 407238 - DNA, 15 bp, Homo sapiens
cccttctaggaatcc

SEQ ID NO: 407239 - DNA, 15 bp, Homo sapiens
tcccttctaggaatc

SEQ ID NO: 407240 - DNA, 15 bp, Homo sapiens
ttcccttctaggaat

SEQ ID NO: 407241 - DNA, 15 bp, Homo sapiens
tttcccttctaggaa

SEQ ID NO: 407242 - DNA, 15 bp, Homo sapiens
ctttcccttctagga

SEQ ID NO: 407243 - DNA, 15 bp, Homo sapiens
actttcccttctagg

SEQ ID NO: 407244 - DNA, 15 bp, Homo sapiens
tactttcccttctag

SEQ ID NO: 407245 - DNA, 15 bp, Homo sapiens
ttactttcccttcta

SEQ ID NO: 407246 - DNA, 15 bp, Homo sapiens
tttactttcccttct

SEQ ID NO: 407247 - DNA, 15 bp, Homo sapiens
ctttactttcccttc

SEQ ID NO: 407248 - DNA, 15 bp, Homo sapiens
cctttactttccctt

SEQ ID NO: 407249 - DNA, 15 bp, Homo sapiens
ccctttactttccct

SEQ ID NO: 407250 - DNA, 15 bp, Homo sapiens
tccctttactttccc

SEQ ID NO: 407251 - DNA, 15 bp, Homo sapiens
ttccctttactttcc

SEQ ID NO: 407252 - DNA, 15 bp, Homo sapiens
cttccctttactttc

SEQ ID NO: 407253 - DNA, 15 bp, Homo sapiens
tcttccctttacttt

SEQ ID NO: 407254 - DNA, 15 bp, Homo sapiens
ttcttccctttactt

SEQ ID NO: 407255 - DNA, 15 bp, Homo sapiens
tttcttccctttact

SEQ ID NO: 407256 - DNA, 15 bp, Homo sapiens
ttttcttccctttac

SEQ ID NO: 407257 - DNA, 15 bp, Homo sapiens
cttttcttcccttta

SEQ ID NO: 407258 - DNA, 15 bp, Homo sapiens
acttttcttcccttt

SEQ ID NO: 407259 - DNA, 15 bp, Homo sapiens
gacttttcttccctt

SEQ ID NO: 407260 - DNA, 15 bp, Homo sapiens
agacttttcttccct

SEQ ID NO: 407261 - DNA, 15 bp, Homo sapiens
aagacttttcttccc

SEQ ID NO: 407262 - DNA, 15 bp, Homo sapiens
taagacttttcttcc

SEQ ID NO: 407263 - DNA, 15 bp, Homo sapiens
ttaagacttttcttc

SEQ ID NO: 407264 - DNA, 15 bp, Homo sapiens
cttaagacttttctt

SEQ ID NO: 407265 - DNA, 15 bp, Homo sapiens
tcttaagacttttct

SEQ ID NO: 407266 - DNA, 15 bp, Homo sapiens
atcttaagacttttc

SEQ ID NO: 407267 - DNA, 15 bp, Homo sapiens
tatcttaagactttt

SEQ ID NO: 407268 - DNA, 15 bp, Homo sapiens
ttatcttaagacttt

SEQ ID NO: 407269 - DNA, 15 bp, Homo sapiens
cttatcttaagactt

SEQ ID NO: 407270 - DNA, 15 bp, Homo sapiens
tcttatcttaagact

SEQ ID NO: 407271 - DNA, 15 bp, Homo sapiens
gtcttatcttaagac

SEQ ID NO: 407272 - DNA, 15 bp, Homo sapiens
tgtcttatcttaaga

SEQ ID NO: 407273 - DNA, 15 bp, Homo sapiens
ctgtcttatcttaag

SEQ ID NO: 407274 - DNA, 15 bp, Homo sapiens
actgtcttatcttaa

SEQ ID NO: 407275 - DNA, 15 bp, Homo sapiens
cactgtcttatctta

SEQ ID NO: 407276 - DNA, 15 bp, Homo sapiens
acactgtcttatctt

SEQ ID NO: 407277 - DNA, 15 bp, Homo sapiens
cacactgtcttatct

SEQ ID NO: 407278 - DNA, 15 bp, Homo sapiens
ccacactgtcttatc

SEQ ID NO: 407279 - DNA, 15 bp, Homo sapiens
gccacactgtcttat

SEQ ID NO: 407280 - DNA, 15 bp, Homo sapiens
ggccacactgtctta

SEQ ID NO: 407281 - DNA, 15 bp, Homo sapiens
aggccacactgtctt

SEQ ID NO: 407282 - DNA, 15 bp, Homo sapiens
gaggccacactgtct

SEQ ID NO: 407283 - DNA, 15 bp, Homo sapiens
ggaggccacactgtc

SEQ ID NO: 407284 - DNA, 15 bp, Homo sapiens
tggaggccacactgt

SEQ ID NO: 407285 - DNA, 15 bp, Homo sapiens
atggaggccacactg

SEQ ID NO: 407286 - DNA, 15 bp, Homo sapiens
tatggaggccacact

SEQ ID NO: 407287 - DNA, 15 bp, Homo sapiens
ctatggaggccacac

SEQ ID NO: 407288 - DNA, 15 bp, Homo sapiens
gctatggaggccaca

SEQ ID NO: 407289 - DNA, 15 bp, Homo sapiens
tgctatggaggccac

SEQ ID NO: 407290 - DNA, 15 bp, Homo sapiens
ctgctatggaggcca

SEQ ID NO: 407291 - DNA, 15 bp, Homo sapiens
actgctatggaggcc

SEQ ID NO: 407292 - DNA, 15 bp, Homo sapiens
cactgctatggaggc

SEQ ID NO: 407293 - DNA, 15 bp, Homo sapiens
acactgctatggagg

SEQ ID NO: 407294 - DNA, 15 bp, Homo sapiens
tacactgctatggag

SEQ ID NO: 407295 - DNA, 15 bp, Homo sapiens
ctacactgctatgga

SEQ ID NO: 407296 - DNA, 15 bp, Homo sapiens
gctacactgctatgg

SEQ ID NO: 407297 - DNA, 15 bp, Homo sapiens
tgctacactgctatg

SEQ ID NO: 407298 - DNA, 15 bp, Homo sapiens
ctgctacactgctat

SEQ ID NO: 407299 - DNA, 15 bp, Homo sapiens
tctgctacactgcta

SEQ ID NO: 407300 - DNA, 15 bp, Homo sapiens
ctctgctacactgct

SEQ ID NO: 407301 - DNA, 15 bp, Homo sapiens
actctgctacactgc

SEQ ID NO: 407302 - DNA, 15 bp, Homo sapiens
cactctgctacactg

SEQ ID NO: 407303 - DNA, 15 bp, Homo sapiens
acactctgctacact

SEQ ID NO: 407304 - DNA, 15 bp, Homo sapiens
cacactctgctacac

SEQ ID NO: 407305 - DNA, 15 bp, Homo sapiens
gcacactctgctaca

SEQ ID NO: 407306 - DNA, 15 bp, Homo sapiens
tgcacactctgctac

SEQ ID NO: 407307 - DNA, 15 bp, Homo sapiens
ctgcacactctgcta

SEQ ID NO: 407308 - DNA, 15 bp, Homo sapiens
tctgcacactctgct

SEQ ID NO: 407309 - DNA, 15 bp, Homo sapiens
ttctgcacactctgc

SEQ ID NO: 407310 - DNA, 15 bp, Homo sapiens
tttctgcacactctg

SEQ ID NO: 407311 - DNA, 15 bp, Homo sapiens
ttttctgcacactct

SEQ ID NO: 407312 - DNA, 15 bp, Homo sapiens
cttttctgcacactc

SEQ ID NO: 407313 - DNA, 15 bp, Homo sapiens
ccttttctgcacact

SEQ ID NO: 407314 - DNA, 15 bp, Homo sapiens
tccttttctgcacac

SEQ ID NO: 407315 - DNA, 15 bp, Homo sapiens
ctccttttctgcaca

SEQ ID NO: 407316 - DNA, 15 bp, Homo sapiens
actccttttctgcac

SEQ ID NO: 407317 - DNA, 15 bp, Homo sapiens
gactccttttctgca

SEQ ID NO: 407318 - DNA, 15 bp, Homo sapiens
ggactccttttctgc

SEQ ID NO: 407319 - DNA, 15 bp, Homo sapiens
tggactccttttctg

SEQ ID NO: 407320 - DNA, 15 bp, Homo sapiens
ctggactccttttct

SEQ ID NO: 407321 - DNA, 15 bp, Homo sapiens
cctggactccttttc

SEQ ID NO: 407322 - DNA, 15 bp, Homo sapiens
tcctggactcctttt

SEQ ID NO: 407323 - DNA, 15 bp, Homo sapiens
ctcctggactccttt

SEQ ID NO: 407324 - DNA, 15 bp, Homo sapiens
gctcctggactcctt

SEQ ID NO: 407325 - DNA, 15 bp, Homo sapiens
ggctcctggactcct

SEQ ID NO: 407326 - DNA, 15 bp, Homo sapiens
gggctcctggactcc

SEQ ID NO: 407327 - DNA, 15 bp, Homo sapiens
agggctcctggactc

SEQ ID NO: 407328 - DNA, 15 bp, Homo sapiens
cagggctcctggact

SEQ ID NO: 407329 - DNA, 15 bp, Homo sapiens
acagggctcctggac

SEQ ID NO: 407330 - DNA, 15 bp, Homo sapiens
cacagggctcctgga

SEQ ID NO: 407331 - DNA, 15 bp, Homo sapiens
tcacagggctcctgg

SEQ ID NO: 407332 - DNA, 15 bp, Homo sapiens
gtcacagggctcctg

SEQ ID NO: 407333 - DNA, 15 bp, Homo sapiens
ggtcacagggctcct

SEQ ID NO: 407334 - DNA, 15 bp, Homo sapiens
tggtcacagggctcc

SEQ ID NO: 407335 - DNA, 15 bp, Homo sapiens
atggtcacagggctc

SEQ ID NO: 407336 - DNA, 15 bp, Homo sapiens
tatggtcacagggct

SEQ ID NO: 407337 - DNA, 15 bp, Homo sapiens
atatggtcacagggc

SEQ ID NO: 407338 - DNA, 15 bp, Homo sapiens
gatatggtcacaggg

SEQ ID NO: 407339 - DNA, 15 bp, Homo sapiens
tgatatggtcacagg

SEQ ID NO: 407340 - DNA, 15 bp, Homo sapiens
atgatatggtcacag

SEQ ID NO: 407341 - DNA, 15 bp, Homo sapiens
catgatatggtcaca

SEQ ID NO: 407342 - DNA, 15 bp, Homo sapiens
acatgatatggtcac

SEQ ID NO: 407343 - DNA, 15 bp, Homo sapiens
tacatgatatggtca

SEQ ID NO: 407344 - DNA, 15 bp, Homo sapiens
ttacatgatatggtc

SEQ ID NO: 407345 - DNA, 15 bp, Homo sapiens
gttacatgatatggt

SEQ ID NO: 407346 - DNA, 15 bp, Homo sapiens
tgttacatgatatgg

SEQ ID NO: 407347 - DNA, 15 bp, Homo sapiens
ttgttacatgatatg

SEQ ID NO: 407348 - DNA, 15 bp, Homo sapiens
attgttacatgatat

SEQ ID NO: 407349 - DNA, 15 bp, Homo sapiens
cattgttacatgata

SEQ ID NO: 407350 - DNA, 15 bp, Homo sapiens
acattgttacatgat

SEQ ID NO: 407351 - DNA, 15 bp, Homo sapiens
aacattgttacatga

SEQ ID NO: 407352 - DNA, 15 bp, Homo sapiens
gaacattgttacatg

SEQ ID NO: 407353 - DNA, 15 bp, Homo sapiens
agaacattgttacat

SEQ ID NO: 407354 - DNA, 15 bp, Homo sapiens
aagaacattgttaca

SEQ ID NO: 407355 - DNA, 15 bp, Homo sapiens
caagaacattgttac

SEQ ID NO: 407356 - DNA, 15 bp, Homo sapiens
gcaagaacattgtta

SEQ ID NO: 407357 - DNA, 15 bp, Homo sapiens
agcaagaacattgtt

SEQ ID NO: 407358 - DNA, 15 bp, Homo sapiens
aagcaagaacattgt

SEQ ID NO: 407359 - DNA, 15 bp, Homo sapiens
caagcaagaacattg

SEQ ID NO: 407360 - DNA, 15 bp, Homo sapiens
acaagcaagaacatt

SEQ ID NO: 407361 - DNA, 15 bp, Homo sapiens
gacaagcaagaacat

SEQ ID NO: 407362 - DNA, 15 bp, Homo sapiens
tgacaagcaagaaca

SEQ ID NO: 407363 - DNA, 15 bp, Homo sapiens
gtgacaagcaagaac

SEQ ID NO: 407364 - DNA, 15 bp, Homo sapiens
tgtgacaagcaagaa

SEQ ID NO: 407365 - DNA, 15 bp, Homo sapiens
gtgtgacaagcaaga

SEQ ID NO: 407366 - DNA, 15 bp, Homo sapiens
tgtgtgacaagcaag

SEQ ID NO: 407367 - DNA, 15 bp, Homo sapiens
atgtgtgacaagcaa

SEQ ID NO: 407368 - DNA, 15 bp, Homo sapiens
gatgtgtgacaagca

SEQ ID NO: 407369 - DNA, 15 bp, Homo sapiens
ggatgtgtgacaagc

SEQ ID NO: 407370 - DNA, 15 bp, Homo sapiens
aggatgtgtgacaag

SEQ ID NO: 407371 - DNA, 15 bp, Homo sapiens
gaggatgtgtgacaa

SEQ ID NO: 407372 - DNA, 15 bp, Homo sapiens
agaggatgtgtgaca

SEQ ID NO: 407373 - DNA, 15 bp, Homo sapiens
gagaggatgtgtgac

SEQ ID NO: 407374 - DNA, 15 bp, Homo sapiens
ggagaggatgtgtga

SEQ ID NO: 407375 - DNA, 15 bp, Homo sapiens
gggagaggatgtgtg

SEQ ID NO: 407376 - DNA, 15 bp, Homo sapiens
ggggagaggatgtgt

SEQ ID NO: 407377 - DNA, 15 bp, Homo sapiens
tggggagaggatgtg

SEQ ID NO: 407378 - DNA, 15 bp, Homo sapiens
ttggggagaggatgt

SEQ ID NO: 407379 - DNA, 15 bp, Homo sapiens
tttggggagaggatg

SEQ ID NO: 407380 - DNA, 15 bp, Homo sapiens
ctttggggagaggat

SEQ ID NO: 407381 - DNA, 15 bp, Homo sapiens
actttggggagagga

SEQ ID NO: 407382 - DNA, 15 bp, Homo sapiens
aactttggggagagg

SEQ ID NO: 407383 - DNA, 15 bp, Homo sapiens
aaactttggggagag

SEQ ID NO: 407384 - DNA, 15 bp, Homo sapiens
gaaactttggggaga

SEQ ID NO: 407385 - DNA, 15 bp, Homo sapiens
agaaactttggggag

SEQ ID NO: 407386 - DNA, 15 bp, Homo sapiens
cagaaactttgggga

SEQ ID NO: 407387 - DNA, 15 bp, Homo sapiens
acagaaactttgggg

SEQ ID NO: 407388 - DNA, 15 bp, Homo sapiens
gacagaaactttggg

SEQ ID NO: 407389 - DNA, 15 bp, Homo sapiens
agacagaaactttgg

SEQ ID NO: 407390 - DNA, 15 bp, Homo sapiens
gagacagaaactttg

SEQ ID NO: 407391 - DNA, 15 bp, Homo sapiens
ggagacagaaacttt

SEQ ID NO: 407392 - DNA, 15 bp, Homo sapiens
aggagacagaaactt

SEQ ID NO: 407393 - DNA, 15 bp, Homo sapiens
taggagacagaaact

SEQ ID NO: 407394 - DNA, 15 bp, Homo sapiens
ctaggagacagaaac

SEQ ID NO: 407395 - DNA, 15 bp, Homo sapiens
tctaggagacagaaa

SEQ ID NO: 407396 - DNA, 15 bp, Homo sapiens
ttctaggagacagaa

SEQ ID NO: 407397 - DNA, 15 bp, Homo sapiens
tttctaggagacaga

SEQ ID NO: 407398 - DNA, 15 bp, Homo sapiens
ctttctaggagacag

SEQ ID NO: 407399 - DNA, 15 bp, Homo sapiens
tctttctaggagaca

SEQ ID NO: 407400 - DNA, 15 bp, Homo sapiens
ttctttctaggagac

SEQ ID NO: 407401 - DNA, 15 bp, Homo sapiens
cttctttctaggaga

SEQ ID NO: 407402 - DNA, 15 bp, Homo sapiens
acttctttctaggag

SEQ ID NO: 407403 - DNA, 15 bp, Homo sapiens
aacttctttctagga

SEQ ID NO: 407404 - DNA, 15 bp, Homo sapiens
caacttctttctagg

SEQ ID NO: 407405 - DNA, 15 bp, Homo sapiens
acaacttctttctag

SEQ ID NO: 407406 - DNA, 15 bp, Homo sapiens
tacaacttctttcta

SEQ ID NO: 407407 - DNA, 15 bp, Homo sapiens
ttacaacttctttct

SEQ ID NO: 407408 - DNA, 15 bp, Homo sapiens
cttacaacttctttc

SEQ ID NO: 407409 - DNA, 15 bp, Homo sapiens
acttacaacttcttt

SEQ ID NO: 407410 - DNA, 15 bp, Homo sapiens
cacttacaacttctt

SEQ ID NO: 407411 - DNA, 15 bp, Homo sapiens
acacttacaacttct

SEQ ID NO: 407412 - DNA, 15 bp, Homo sapiens
gacacttacaacttc

SEQ ID NO: 407413 - DNA, 15 bp, Homo sapiens
agacacttacaactt

SEQ ID NO: 407414 - DNA, 15 bp, Homo sapiens
cagacacttacaact

SEQ ID NO: 407415 - DNA, 15 bp, Homo sapiens
tcagacacttacaac

SEQ ID NO: 407416 - DNA, 15 bp, Homo sapiens
ttcagacacttacaa

SEQ ID NO: 407417 - DNA, 15 bp, Homo sapiens
attcagacacttaca

SEQ ID NO: 407418 - DNA, 15 bp, Homo sapiens
aattcagacacttac

SEQ ID NO: 407419 - DNA, 15 bp, Homo sapiens
taattcagacactta

SEQ ID NO: 407420 - DNA, 15 bp, Homo sapiens
ataattcagacactt

SEQ ID NO: 407421 - DNA, 15 bp, Homo sapiens
cataattcagacact

SEQ ID NO: 407422 - DNA, 15 bp, Homo sapiens
gcataattcagacac

SEQ ID NO: 407423 - DNA, 15 bp, Homo sapiens
agcataattcagaca

SEQ ID NO: 407424 - DNA, 15 bp, Homo sapiens
tagcataattcagac

SEQ ID NO: 407425 - DNA, 15 bp, Homo sapiens
ctagcataattcaga

SEQ ID NO: 407426 - DNA, 15 bp, Homo sapiens
cctagcataattcag

SEQ ID NO: 407427 - DNA, 15 bp, Homo sapiens
tcctagcataattca

SEQ ID NO: 407428 - DNA, 15 bp, Homo sapiens
atcctagcataattc

SEQ ID NO: 407429 - DNA, 15 bp, Homo sapiens
tatcctagcataatt

SEQ ID NO: 407430 - DNA, 15 bp, Homo sapiens
ttatcctagcataat

SEQ ID NO: 407431 - DNA, 15 bp, Homo sapiens
tttatcctagcataa

SEQ ID NO: 407432 - DNA, 15 bp, Homo sapiens
atttatcctagcata

SEQ ID NO: 407433 - DNA, 15 bp, Homo sapiens
gatttatcctagcat

SEQ ID NO: 407434 - DNA, 15 bp, Homo sapiens
agatttatcctagca

SEQ ID NO: 407435 - DNA, 15 bp, Homo sapiens
tagatttatcctagc

SEQ ID NO: 407436 - DNA, 15 bp, Homo sapiens
gtagatttatcctag

SEQ ID NO: 407437 - DNA, 15 bp, Homo sapiens
agtagatttatccta

SEQ ID NO: 407438 - DNA, 15 bp, Homo sapiens
cagtagatttatcct

SEQ ID NO: 407439 - DNA, 15 bp, Homo sapiens
acagtagatttatcc

SEQ ID NO: 407440 - DNA, 15 bp, Homo sapiens
tacagtagatttatc

SEQ ID NO: 407441 - DNA, 15 bp, Homo sapiens
ctacagtagatttat

SEQ ID NO: 407442 - DNA, 15 bp, Homo sapiens
tctacagtagattta

SEQ ID NO: 407443 - DNA, 15 bp, Homo sapiens
ttctacagtagattt

SEQ ID NO: 407444 - DNA, 15 bp, Homo sapiens
tttctacagtagatt

SEQ ID NO: 407445 - DNA, 15 bp, Homo sapiens
atttctacagtagat

SEQ ID NO: 407446 - DNA, 15 bp, Homo sapiens
catttctacagtaga

SEQ ID NO: 407447 - DNA, 15 bp, Homo sapiens
ccatttctacagtag

SEQ ID NO: 407448 - DNA, 15 bp, Homo sapiens
accatttctacagta

SEQ ID NO: 407449 - DNA, 15 bp, Homo sapiens
taccatttctacagt

SEQ ID NO: 407450 - DNA, 15 bp, Homo sapiens
gtaccatttctacag

SEQ ID NO: 407451 - DNA, 15 bp, Homo sapiens
tgtaccatttctaca

SEQ ID NO: 407452 - DNA, 15 bp, Homo sapiens
gtgtaccatttctac

SEQ ID NO: 407453 - DNA, 15 bp, Homo sapiens
tgtgtaccatttcta

SEQ ID NO: 407454 - DNA, 15 bp, Homo sapiens
atgtgtaccatttct

SEQ ID NO: 407455 - DNA, 15 bp, Homo sapiens
tatgtgtaccatttc

SEQ ID NO: 407456 - DNA, 15 bp, Homo sapiens
ttatgtgtaccattt

SEQ ID NO: 407457 - DNA, 15 bp, Homo sapiens
tttatgtgtaccatt

SEQ ID NO: 407458 - DNA, 15 bp, Homo sapiens
atttatgtgtaccat

SEQ ID NO: 407459 - DNA, 15 bp, Homo sapiens
aatttatgtgtacca

SEQ ID NO: 407460 - DNA, 15 bp, Homo sapiens
aaatttatgtgtacc

SEQ ID NO: 407461 - DNA, 15 bp, Homo sapiens
taaatttatgtgtac

SEQ ID NO: 407462 - DNA, 15 bp, Homo sapiens
ataaatttatgtgta

SEQ ID NO: 407463 - DNA, 15 bp, Homo sapiens
tataaatttatgtgt

SEQ ID NO: 407464 - DNA, 15 bp, Homo sapiens
atataaatttatgtg

SEQ ID NO: 407465 - DNA, 15 bp, Homo sapiens
aatataaatttatgt

SEQ ID NO: 407466 - DNA, 15 bp, Homo sapiens
aaatataaatttatg

SEQ ID NO: 407467 - DNA, 15 bp, Homo sapiens
gaaatataaatttat

SEQ ID NO: 407468 - DNA, 15 bp, Homo sapiens
agaaatataaattta

SEQ ID NO: 407469 - DNA, 15 bp, Homo sapiens
tagaaatataaattt

SEQ ID NO: 407470 - DNA, 15 bp, Homo sapiens
ctagaaatataaatt

SEQ ID NO: 407471 - DNA, 15 bp, Homo sapiens
actagaaatataaat

SEQ ID NO: 407472 - DNA, 15 bp, Homo sapiens
aactagaaatataaa

SEQ ID NO: 407473 - DNA, 15 bp, Homo sapiens
aaactagaaatataa

SEQ ID NO: 407474 - DNA, 15 bp, Homo sapiens
aaaactagaaatata

SEQ ID NO: 407475 - DNA, 15 bp, Homo sapiens
aaaaactagaaatat

SEQ ID NO: 407476 - DNA, 15 bp, Homo sapiens
taaaaactagaaata

SEQ ID NO: 407477 - DNA, 15 bp, Homo sapiens
ataaaaactagaaat

SEQ ID NO: 407478 - DNA, 15 bp, Homo sapiens
gataaaaactagaaa

SEQ ID NO: 407479 - DNA, 15 bp, Homo sapiens
tgataaaaactagaa

SEQ ID NO: 407480 - DNA, 15 bp, Homo sapiens
ttgataaaaactaga

SEQ ID NO: 407481 - DNA, 15 bp, Homo sapiens
cttgataaaaactag

SEQ ID NO: 407482 - DNA, 15 bp, Homo sapiens
tcttgataaaaacta

SEQ ID NO: 407483 - DNA, 15 bp, Homo sapiens
gtcttgataaaaact

SEQ ID NO: 407484 - DNA, 15 bp, Homo sapiens
tgtcttgataaaaac

SEQ ID NO: 407485 - DNA, 15 bp, Homo sapiens
ctgtcttgataaaaa

SEQ ID NO: 407486 - DNA, 15 bp, Homo sapiens
tctgtcttgataaaa

SEQ ID NO: 407487 - DNA, 15 bp, Homo sapiens
gtctgtcttgataaa

SEQ ID NO: 407488 - DNA, 15 bp, Homo sapiens
tgtctgtcttgataa

SEQ ID NO: 407489 - DNA, 15 bp, Homo sapiens
gtgtctgtcttgata

SEQ ID NO: 407490 - DNA, 15 bp, Homo sapiens
tgtgtctgtcttgat

SEQ ID NO: 407491 - DNA, 15 bp, Homo sapiens
ttgtgtctgtcttga

SEQ ID NO: 407492 - DNA, 15 bp, Homo sapiens
tttgtgtctgtcttg

SEQ ID NO: 407493 - DNA, 15 bp, Homo sapiens
ttttgtgtctgtctt

SEQ ID NO: 407494 - DNA, 15 bp, Homo sapiens
tttttgtgtctgtct

SEQ ID NO: 407495 - DNA, 15 bp, Homo sapiens
gtttttgtgtctgtc

SEQ ID NO: 407496 - DNA, 15 bp, Homo sapiens
tgtttttgtgtctgt

SEQ ID NO: 407497 - DNA, 15 bp, Homo sapiens
ctgtttttgtgtctg

SEQ ID NO: 407498 - DNA, 15 bp, Homo sapiens
tctgtttttgtgtct

SEQ ID NO: 407499 - DNA, 15 bp, Homo sapiens
atctgtttttgtgtc

SEQ ID NO: 407500 - DNA, 15 bp, Homo sapiens
aatctgtttttgtgt

SEQ ID NO: 407501 - DNA, 15 bp, Homo sapiens
taatctgtttttgtg

SEQ ID NO: 407502 - DNA, 15 bp, Homo sapiens
gtaatctgtttttgt

SEQ ID NO: 407503 - DNA, 15 bp, Homo sapiens
cgtaatctgtttttg

SEQ ID NO: 407504 - DNA, 15 bp, Homo sapiens
tcgtaatctgttttt

SEQ ID NO: 407505 - DNA, 15 bp, Homo sapiens
atcgtaatctgtttt

SEQ ID NO: 407506 - DNA, 15 bp, Homo sapiens
catcgtaatctgttt

SEQ ID NO: 407507 - DNA, 15 bp, Homo sapiens
ccatcgtaatctgtt

SEQ ID NO: 407508 - DNA, 15 bp, Homo sapiens
accatcgtaatctgt

SEQ ID NO: 407509 - DNA, 15 bp, Homo sapiens
taccatcgtaatctg

SEQ ID NO: 407510 - DNA, 15 bp, Homo sapiens
ttaccatcgtaatct

SEQ ID NO: 407511 - DNA, 15 bp, Homo sapiens
gttaccatcgtaatc

SEQ ID NO: 407512 - DNA, 15 bp, Homo sapiens
ggttaccatcgtaat

SEQ ID NO: 407513 - DNA, 15 bp, Homo sapiens
aggttaccatcgtaa

SEQ ID NO: 407514 - DNA, 15 bp, Homo sapiens
taggttaccatcgta

SEQ ID NO: 407515 - DNA, 15 bp, Homo sapiens
ataggttaccatcgt

SEQ ID NO: 407516 - DNA, 15 bp, Homo sapiens
gataggttaccatcg

SEQ ID NO: 407517 - DNA, 15 bp, Homo sapiens
tgataggttaccatc

SEQ ID NO: 407518 - DNA, 15 bp, Homo sapiens
atgataggttaccat

SEQ ID NO: 407519 - DNA, 15 bp, Homo sapiens
catgataggttacca

SEQ ID NO: 407520 - DNA, 15 bp, Homo sapiens
ccatgataggttacc

SEQ ID NO: 407521 - DNA, 15 bp, Homo sapiens
gccatgataggttac

SEQ ID NO: 407522 - DNA, 15 bp, Homo sapiens
ggccatgataggtta

SEQ ID NO: 407523 - DNA, 15 bp, Homo sapiens
tggccatgataggtt

SEQ ID NO: 407524 - DNA, 15 bp, Homo sapiens
atggccatgataggt

SEQ ID NO: 407525 - DNA, 15 bp, Homo sapiens
aatggccatgatagg

SEQ ID NO: 407526 - DNA, 15 bp, Homo sapiens
caatggccatgatag

SEQ ID NO: 407527 - DNA, 15 bp, Homo sapiens
gcaatggccatgata

SEQ ID NO: 407528 - DNA, 15 bp, Homo sapiens
tgcaatggccatgat

SEQ ID NO: 407529 - DNA, 15 bp, Homo sapiens
ctgcaatggccatga

SEQ ID NO: 407530 - DNA, 15 bp, Homo sapiens
tctgcaatggccatg

SEQ ID NO: 407531 - DNA, 15 bp, Homo sapiens
atctgcaatggccat

SEQ ID NO: 407532 - DNA, 15 bp, Homo sapiens
catctgcaatggcca

SEQ ID NO: 407533 - DNA, 15 bp, Homo sapiens
acatctgcaatggcc

SEQ ID NO: 407534 - DNA, 15 bp, Homo sapiens
gacatctgcaatggc

SEQ ID NO: 407535 - DNA, 15 bp, Homo sapiens
tgacatctgcaatgg

SEQ ID NO: 407536 - DNA, 15 bp, Homo sapiens
ctgacatctgcaatg

SEQ ID NO: 407537 - DNA, 15 bp, Homo sapiens
tctgacatctgcaat

SEQ ID NO: 407538 - DNA, 15 bp, Homo sapiens
atctgacatctgcaa

SEQ ID NO: 407539 - DNA, 15 bp, Homo sapiens
catctgacatctgca

SEQ ID NO: 407540 - DNA, 15 bp, Homo sapiens
tcatctgacatctgc

SEQ ID NO: 407541 - DNA, 15 bp, Homo sapiens
atcatctgacatctg

SEQ ID NO: 407542 - DNA, 15 bp, Homo sapiens
catcatctgacatct

SEQ ID NO: 407543 - DNA, 15 bp, Homo sapiens
gcatcatctgacatc

SEQ ID NO: 407544 - DNA, 15 bp, Homo sapiens
ggcatcatctgacat

SEQ ID NO: 407545 - DNA, 15 bp, Homo sapiens
gggcatcatctgaca

SEQ ID NO: 407546 - DNA, 15 bp, Homo sapiens
tgggcatcatctgac

SEQ ID NO: 407547 - DNA, 15 bp, Homo sapiens
gtgggcatcatctga

SEQ ID NO: 407548 - DNA, 15 bp, Homo sapiens
ggtgggcatcatctg

SEQ ID NO: 407549 - DNA, 15 bp, Homo sapiens
tggtgggcatcatct

SEQ ID NO: 407550 - DNA, 15 bp, Homo sapiens
gtggtgggcatcatc

SEQ ID NO: 407551 - DNA, 15 bp, Homo sapiens
tgtggtgggcatcat

SEQ ID NO: 407552 - DNA, 15 bp, Homo sapiens
gtgtggtgggcatca

SEQ ID NO: 407553 - DNA, 15 bp, Homo sapiens
agtgtggtgggcatc

SEQ ID NO: 407554 - DNA, 15 bp, Homo sapiens
aagtgtggtgggcat

SEQ ID NO: 407555 - DNA, 15 bp, Homo sapiens
gaagtgtggtgggca

SEQ ID NO: 407556 - DNA, 15 bp, Homo sapiens
ggaagtgtggtgggc

SEQ ID NO: 407557 - DNA, 15 bp, Homo sapiens
aggaagtgtggtggg

SEQ ID NO: 407558 - DNA, 15 bp, Homo sapiens
gaggaagtgtggtgg

SEQ ID NO: 407559 - DNA, 15 bp, Homo sapiens
ggaggaagtgtggtg

SEQ ID NO: 407560 - DNA, 15 bp, Homo sapiens
aggaggaagtgtggt

SEQ ID NO: 407561 - DNA, 15 bp, Homo sapiens
aaggaggaagtgtgg

SEQ ID NO: 407562 - DNA, 15 bp, Homo sapiens
taaggaggaagtgtg

SEQ ID NO: 407563 - DNA, 15 bp, Homo sapiens
ttaaggaggaagtgt

SEQ ID NO: 407564 - DNA, 15 bp, Homo sapiens
tttaaggaggaagtg

SEQ ID NO: 407565 - DNA, 15 bp, Homo sapiens
ctttaaggaggaagt

SEQ ID NO: 407566 - DNA, 15 bp, Homo sapiens
gctttaaggaggaag

SEQ ID NO: 407567 - DNA, 15 bp, Homo sapiens
tgctttaaggaggaa

SEQ ID NO: 407568 - DNA, 15 bp, Homo sapiens
gtgctttaaggagga

SEQ ID NO: 407569 - DNA, 15 bp, Homo sapiens
agtgctttaaggagg

SEQ ID NO: 407570 - DNA, 15 bp, Homo sapiens
tagtgctttaaggag

SEQ ID NO: 407571 - DNA, 15 bp, Homo sapiens
atagtgctttaagga

SEQ ID NO: 407572 - DNA, 15 bp, Homo sapiens
gatagtgctttaagg

SEQ ID NO: 407573 - DNA, 15 bp, Homo sapiens
ggatagtgctttaag

SEQ ID NO: 407574 - DNA, 15 bp, Homo sapiens
aggatagtgctttaa

SEQ ID NO: 407575 - DNA, 15 bp, Homo sapiens
gaggatagtgcttta

SEQ ID NO: 407576 - DNA, 15 bp, Homo sapiens
agaggatagtgcttt

SEQ ID NO: 407577 - DNA, 15 bp, Homo sapiens
cagaggatagtgctt

SEQ ID NO: 407578 - DNA, 15 bp, Homo sapiens
tcagaggatagtgct

SEQ ID NO: 407579 - DNA, 15 bp, Homo sapiens
ctcagaggatagtgc

SEQ ID NO: 407580 - DNA, 15 bp, Homo sapiens
cctcagaggatagtg

SEQ ID NO: 407581 - DNA, 15 bp, Homo sapiens
tcctcagaggatagt

SEQ ID NO: 407582 - DNA, 15 bp, Homo sapiens
atcctcagaggatag

SEQ ID NO: 407583 - DNA, 15 bp, Homo sapiens
tatcctcagaggata

SEQ ID NO: 407584 - DNA, 15 bp, Homo sapiens
gtatcctcagaggat

SEQ ID NO: 407585 - DNA, 15 bp, Homo sapiens
tgtatcctcagagga

SEQ ID NO: 407586 - DNA, 15 bp, Homo sapiens
ctgtatcctcagagg

SEQ ID NO: 407587 - DNA, 15 bp, Homo sapiens
tctgtatcctcagag

SEQ ID NO: 407588 - DNA, 15 bp, Homo sapiens
cctctgtatcctcag

SEQ ID NO: 407589 - DNA, 15 bp, Homo sapiens
gcctctgtatcctca

SEQ ID NO: 407590 - DNA, 15 bp, Homo sapiens
agcctctgtatcctc

SEQ ID NO: 407591 - DNA, 15 bp, Homo sapiens
gagcctctgtatcct

SEQ ID NO: 407592 - DNA, 15 bp, Homo sapiens
tgagcctctgtatcc

SEQ ID NO: 407593 - DNA, 15 bp, Homo sapiens
ctgagcctctgtatc

SEQ ID NO: 407594 - DNA, 15 bp, Homo sapiens
tctgagcctctgtat

SEQ ID NO: 407595 - DNA, 15 bp, Homo sapiens
ctctgagcctctgta

SEQ ID NO: 407596 - DNA, 15 bp, Homo sapiens
tctctgagcctctgt

SEQ ID NO: 407597 - DNA, 15 bp, Homo sapiens
atctctgagcctctg

SEQ ID NO: 407598 - DNA, 15 bp, Homo sapiens
tatctctgagcctct

SEQ ID NO: 407599 - DNA, 15 bp, Homo sapiens
gtatctctgagcctc

SEQ ID NO: 407600 - DNA, 15 bp, Homo sapiens
agtatctctgagcct

SEQ ID NO: 407601 - DNA, 15 bp, Homo sapiens
gagtatctctgagcc

SEQ ID NO: 407602 - DNA, 15 bp, Homo sapiens
tgagtatctctgagc

SEQ ID NO: 407603 - DNA, 15 bp, Homo sapiens
ctgagtatctctgag

SEQ ID NO: 407604 - DNA, 15 bp, Homo sapiens
tctgagtatctctga

SEQ ID NO: 407605 - DNA, 15 bp, Homo sapiens
ctctgagtatctctg

SEQ ID NO: 407606 - DNA, 15 bp, Homo sapiens
gctctgagtatctct

SEQ ID NO: 407607 - DNA, 15 bp, Homo sapiens
tgctctgagtatctc

SEQ ID NO: 407608 - DNA, 15 bp, Homo sapiens
ctgctctgagtatct

SEQ ID NO: 407609 - DNA, 15 bp, Homo sapiens
gctgctctgagtatc

SEQ ID NO: 407610 - DNA, 15 bp, Homo sapiens
agctgctctgagtat

SEQ ID NO: 407611 - DNA, 15 bp, Homo sapiens
tagctgctctgagta

SEQ ID NO: 407612 - DNA, 15 bp, Homo sapiens
ttagctgctctgagt

SEQ ID NO: 407613 - DNA, 15 bp, Homo sapiens
cttagctgctctgag

SEQ ID NO: 407614 - DNA, 15 bp, Homo sapiens
gcttagctgctctga

SEQ ID NO: 407615 - DNA, 15 bp, Homo sapiens
ggcttagctgctctg

SEQ ID NO: 407616 - DNA, 15 bp, Homo sapiens
aggcttagctgctct

SEQ ID NO: 407617 - DNA, 15 bp, Homo sapiens
aaggcttagctgctc

SEQ ID NO: 407618 - DNA, 15 bp, Homo sapiens
gaaggcttagctgct

SEQ ID NO: 407619 - DNA, 15 bp, Homo sapiens
agaaggcttagctgc

SEQ ID NO: 407620 - DNA, 15 bp, Homo sapiens
tagaaggcttagctg

SEQ ID NO: 407621 - DNA, 15 bp, Homo sapiens
ttagaaggcttagct

SEQ ID NO: 407622 - DNA, 15 bp, Homo sapiens
attagaaggcttagc

SEQ ID NO: 407623 - DNA, 15 bp, Homo sapiens
gattagaaggcttag

SEQ ID NO: 407624 - DNA, 15 bp, Homo sapiens
agattagaaggctta

SEQ ID NO: 407625 - DNA, 15 bp, Homo sapiens
aagattagaaggctt

SEQ ID NO: 407626 - DNA, 15 bp, Homo sapiens
gaagattagaaggct

SEQ ID NO: 407627 - DNA, 15 bp, Homo sapiens
agaagattagaaggc

SEQ ID NO: 407628 - DNA, 15 bp, Homo sapiens
cagaagattagaagg

SEQ ID NO: 407629 - DNA, 15 bp, Homo sapiens
tcagaagattagaag

SEQ ID NO: 407630 - DNA, 15 bp, Homo sapiens
ttcagaagattagaa

SEQ ID NO: 407631 - DNA, 15 bp, Homo sapiens
attcagaagattaga

SEQ ID NO: 407632 - DNA, 15 bp, Homo sapiens
aattcagaagattag

SEQ ID NO: 407633 - DNA, 15 bp, Homo sapiens
aaattcagaagatta

SEQ ID NO: 407634 - DNA, 15 bp, Homo sapiens
aaaattcagaagatt

SEQ ID NO: 407635 - DNA, 15 bp, Homo sapiens
gaaaattcagaagat

SEQ ID NO: 407636 - DNA, 15 bp, Homo sapiens
ggaaaattcagaaga

SEQ ID NO: 407637 - DNA, 15 bp, Homo sapiens
gggaaaattcagaag

SEQ ID NO: 407638 - DNA, 15 bp, Homo sapiens
agggaaaattcagaa

SEQ ID NO: 407639 - DNA, 15 bp, Homo sapiens
cagggaaaattcaga

SEQ ID NO: 407640 - DNA, 15 bp, Homo sapiens
tcagggaaaattcag

SEQ ID NO: 407641 - DNA, 15 bp, Homo sapiens
ctcagggaaaattca

SEQ ID NO: 407642 - DNA, 15 bp, Homo sapiens
tctcagggaaaattc

SEQ ID NO: 407643 - DNA, 15 bp, Homo sapiens
ttctcagggaaaatt

SEQ ID NO: 407644 - DNA, 15 bp, Homo sapiens
tttctcagggaaaat

SEQ ID NO: 407645 - DNA, 15 bp, Homo sapiens
ttttctcagggaaaa

SEQ ID NO: 407646 - DNA, 15 bp, Homo sapiens
tttttctcagggaaa

SEQ ID NO: 407647 - DNA, 15 bp, Homo sapiens
ctttttctcagggaa

SEQ ID NO: 407648 - DNA, 15 bp, Homo sapiens
gctttttctcaggga

SEQ ID NO: 407649 - DNA, 15 bp, Homo sapiens
tgctttttctcaggg

SEQ ID NO: 407650 - DNA, 15 bp, Homo sapiens
ttgctttttctcagg

SEQ ID NO: 407651 - DNA, 15 bp, Homo sapiens
cttgctttttctcag

SEQ ID NO: 407652 - DNA, 15 bp, Homo sapiens
gcttgctttttctca

SEQ ID NO: 407653 - DNA, 15 bp, Homo sapiens
tgcttgctttttctc

SEQ ID NO: 407654 - DNA, 15 bp, Homo sapiens
atgcttgctttttct

SEQ ID NO: 407655 - DNA, 15 bp, Homo sapiens
tatgcttgctttttc

SEQ ID NO: 407656 - DNA, 15 bp, Homo sapiens
atatgcttgcttttt

SEQ ID NO: 407657 - DNA, 15 bp, Homo sapiens
tatatgcttgctttt

SEQ ID NO: 407658 - DNA, 15 bp, Homo sapiens
gtatatgcttgcttt

SEQ ID NO: 407659 - DNA, 15 bp, Homo sapiens
agtatatgcttgctt

SEQ ID NO: 407660 - DNA, 15 bp, Homo sapiens
gagtatatgcttgct

SEQ ID NO: 407661 - DNA, 15 bp, Homo sapiens
ggagtatatgcttgc

SEQ ID NO: 407662 - DNA, 15 bp, Homo sapiens
gggagtatatgcttg

SEQ ID NO: 407663 - DNA, 15 bp, Homo sapiens
tgggagtatatgctt

SEQ ID NO: 407664 - DNA, 15 bp, Homo sapiens
gtgggagtatatgct

SEQ ID NO: 407665 - DNA, 15 bp, Homo sapiens
cgtgggagtatatgc

SEQ ID NO: 407666 - DNA, 15 bp, Homo sapiens
acgtgggagtatatg

SEQ ID NO: 407667 - DNA, 15 bp, Homo sapiens
cacgtgggagtatat

SEQ ID NO: 407668 - DNA, 15 bp, Homo sapiens
gcacgtgggagtata

SEQ ID NO: 407669 - DNA, 15 bp, Homo sapiens
agcacgtgggagtat

SEQ ID NO: 407670 - DNA, 15 bp, Homo sapiens
tagcacgtgggagta

SEQ ID NO: 407671 - DNA, 15 bp, Homo sapiens
gtagcacgtgggagt

SEQ ID NO: 407672 - DNA, 15 bp, Homo sapiens
agtagcacgtgggag

SEQ ID NO: 407673 - DNA, 15 bp, Homo sapiens
tagtagcacgtggga

SEQ ID NO: 407674 - DNA, 15 bp, Homo sapiens
gtagtagcacgtggg

SEQ ID NO: 407675 - DNA, 15 bp, Homo sapiens
tgtagtagcacgtgg

SEQ ID NO: 407676 - DNA, 15 bp, Homo sapiens
ttgtagtagcacgtg

SEQ ID NO: 407677 - DNA, 15 bp, Homo sapiens
cttgtagtagcacgt

SEQ ID NO: 407678 - DNA, 15 bp, Homo sapiens
acttgtagtagcacg

SEQ ID NO: 407679 - DNA, 15 bp, Homo sapiens
cacttgtagtagcac

SEQ ID NO: 407680 - DNA, 15 bp, Homo sapiens
ccacttgtagtagca

SEQ ID NO: 407681 - DNA, 15 bp, Homo sapiens
gccacttgtagtagc

SEQ ID NO: 407682 - DNA, 15 bp, Homo sapiens
ggccacttgtagtag

SEQ ID NO: 407683 - DNA, 15 bp, Homo sapiens
aggccacttgtagta

SEQ ID NO: 407684 - DNA, 15 bp, Homo sapiens
caggccacttgtagt

SEQ ID NO: 407685 - DNA, 15 bp, Homo sapiens
tcaggccacttgtag

SEQ ID NO: 407686 - DNA, 15 bp, Homo sapiens
gtcaggccacttgta

SEQ ID NO: 407687 - DNA, 15 bp, Homo sapiens
agtcaggccacttgt

SEQ ID NO: 407688 - DNA, 15 bp, Homo sapiens
gagtcaggccacttg

SEQ ID NO: 407689 - DNA, 15 bp, Homo sapiens
ggagtcaggccactt

SEQ ID NO: 407690 - DNA, 15 bp, Homo sapiens
gggagtcaggccact

SEQ ID NO: 407691 - DNA, 15 bp, Homo sapiens
ggggagtcaggccac

SEQ ID NO: 407692 - DNA, 15 bp, Homo sapiens
tggggagtcaggcca

SEQ ID NO: 407693 - DNA, 15 bp, Homo sapiens
ctggggagtcaggcc

SEQ ID NO: 407694 - DNA, 15 bp, Homo sapiens
cctggggagtcaggc

SEQ ID NO: 407695 - DNA, 15 bp, Homo sapiens
gcctggggagtcagg

SEQ ID NO: 407696 - DNA, 15 bp, Homo sapiens
agcctggggagtcag

SEQ ID NO: 407697 - DNA, 15 bp, Homo sapiens
gagcctggggagtca

SEQ ID NO: 407698 - DNA, 15 bp, Homo sapiens
ggagcctggggagtc

SEQ ID NO: 407699 - DNA, 15 bp, Homo sapiens
aggagcctggggagt

SEQ ID NO: 407700 - DNA, 15 bp, Homo sapiens
caggagcctggggag

SEQ ID NO: 407701 - DNA, 15 bp, Homo sapiens
gcaggagcctgggga

SEQ ID NO: 407702 - DNA, 15 bp, Homo sapiens
agcaggagcctgggg

SEQ ID NO: 407703 - DNA, 15 bp, Homo sapiens
cagcaggagcctggg

SEQ ID NO: 407704 - DNA, 15 bp, Homo sapiens
acagcaggagcctgg

SEQ ID NO: 407705 - DNA, 15 bp, Homo sapiens
cacagcaggagcctg

SEQ ID NO: 407706 - DNA, 15 bp, Homo sapiens
acacagcaggagcct

SEQ ID NO: 407707 - DNA, 15 bp, Homo sapiens
aacacagcaggagcc

SEQ ID NO: 407708 - DNA, 15 bp, Homo sapiens
caacacagcaggagc

SEQ ID NO: 407709 - DNA, 15 bp, Homo sapiens
tcaacacagcaggag

SEQ ID NO: 407710 - DNA, 15 bp, Homo sapiens
gtcaacacagcagga

SEQ ID NO: 407711 - DNA, 15 bp, Homo sapiens
tgtcaacacagcagg

SEQ ID NO: 407712 - DNA, 15 bp, Homo sapiens
ttgtcaacacagcag

SEQ ID NO: 407713 - DNA, 15 bp, Homo sapiens
tttgtcaacacagca

SEQ ID NO: 407714 - DNA, 15 bp, Homo sapiens
ttttgtcaacacagc

SEQ ID NO: 407715 - DNA, 15 bp, Homo sapiens
attttgtcaacacag

SEQ ID NO: 407716 - DNA, 15 bp, Homo sapiens
aattttgtcaacaca

SEQ ID NO: 407717 - DNA, 15 bp, Homo sapiens
gaattttgtcaacac

SEQ ID NO: 407718 - DNA, 15 bp, Homo sapiens
agaattttgtcaaca

SEQ ID NO: 407719 - DNA, 15 bp, Homo sapiens
cagaattttgtcaac

SEQ ID NO: 407720 - DNA, 15 bp, Homo sapiens
gcagaattttgtcaa

SEQ ID NO: 407721 - DNA, 15 bp, Homo sapiens
tgcagaattttgtca

SEQ ID NO: 407722 - DNA, 15 bp, Homo sapiens
ttgcagaattttgtc

SEQ ID NO: 407723 - DNA, 15 bp, Homo sapiens
cttgcagaattttgt

SEQ ID NO: 407724 - DNA, 15 bp, Homo sapiens
gcttgcagaattttg

SEQ ID NO: 407725 - DNA, 15 bp, Homo sapiens
tgcttgcagaatttt

SEQ ID NO: 407726 - DNA, 15 bp, Homo sapiens
gtgcttgcagaattt

SEQ ID NO: 407727 - DNA, 15 bp, Homo sapiens
tgtgcttgcagaatt

SEQ ID NO: 407728 - DNA, 15 bp, Homo sapiens
ttgtgcttgcagaat

SEQ ID NO: 407729 - DNA, 15 bp, Homo sapiens
tttgtgcttgcagaa

SEQ ID NO: 407730 - DNA, 15 bp, Homo sapiens
atttgtgcttgcaga

SEQ ID NO: 407731 - DNA, 15 bp, Homo sapiens
catttgtgcttgcag

SEQ ID NO: 407732 - DNA, 15 bp, Homo sapiens
ccatttgtgcttgca

SEQ ID NO: 407733 - DNA, 15 bp, Homo sapiens
tccatttgtgcttgc

SEQ ID NO: 407734 - DNA, 15 bp, Homo sapiens
gtccatttgtgcttg

SEQ ID NO: 407735 - DNA, 15 bp, Homo sapiens
ggtccatttgtgctt

SEQ ID NO: 407736 - DNA, 15 bp, Homo sapiens
aggtccatttgtgct

SEQ ID NO: 407737 - DNA, 15 bp, Homo sapiens
caggtccatttgtgc

SEQ ID NO: 407738 - DNA, 15 bp, Homo sapiens
ccaggtccatttgtg

SEQ ID NO: 407739 - DNA, 15 bp, Homo sapiens
accaggtccatttgt

SEQ ID NO: 407740 - DNA, 15 bp, Homo sapiens
gaccaggtccatttg

SEQ ID NO: 407741 - DNA, 15 bp, Homo sapiens
tgaccaggtccattt

SEQ ID NO: 407742 - DNA, 15 bp, Homo sapiens
ctgaccaggtccatt

SEQ ID NO: 407743 - DNA, 15 bp, Homo sapiens
tctgaccaggtccat

SEQ ID NO: 407744 - DNA, 15 bp, Homo sapiens
ttctgaccaggtcca

SEQ ID NO: 407745 - DNA, 15 bp, Homo sapiens
tttctgaccaggtcc

SEQ ID NO: 407746 - DNA, 15 bp, Homo sapiens
ctttctgaccaggtc

SEQ ID NO: 407747 - DNA, 15 bp, Homo sapiens
tctttctgaccaggt

SEQ ID NO: 407748 - DNA, 15 bp, Homo sapiens
ctctttctgaccagg

SEQ ID NO: 407749 - DNA, 15 bp, Homo sapiens
gctctttctgaccag

SEQ ID NO: 407750 - DNA, 15 bp, Homo sapiens
ggctctttctgacca

SEQ ID NO: 407751 - DNA, 15 bp, Homo sapiens
gggctctttctgacc

SEQ ID NO: 407752 - DNA, 15 bp, Homo sapiens
agggctctttctgac

SEQ ID NO: 407753 - DNA, 15 bp, Homo sapiens
cagggctctttctga

SEQ ID NO: 407754 - DNA, 15 bp, Homo sapiens
ccagggctctttctg

SEQ ID NO: 407755 - DNA, 15 bp, Homo sapiens
accagggctctttct

SEQ ID NO: 407756 - DNA, 15 bp, Homo sapiens
aaccagggctctttc

SEQ ID NO: 407757 - DNA, 15 bp, Homo sapiens
taaccagggctcttt

SEQ ID NO: 407758 - DNA, 15 bp, Homo sapiens
gtaaccagggctctt

SEQ ID NO: 407759 - DNA, 15 bp, Homo sapiens
agtaaccagggctct

SEQ ID NO: 407760 - DNA, 15 bp, Homo sapiens
cagtaaccagggctc

SEQ ID NO: 407761 - DNA, 15 bp, Homo sapiens
acagtaaccagggct

SEQ ID NO: 407762 - DNA, 15 bp, Homo sapiens
tacagtaaccagggc

SEQ ID NO: 407763 - DNA, 15 bp, Homo sapiens
ttacagtaaccaggg

SEQ ID NO: 407764 - DNA, 15 bp, Homo sapiens
attacagtaaccagg

SEQ ID NO: 407765 - DNA, 15 bp, Homo sapiens
aattacagtaaccag

SEQ ID NO: 407766 - DNA, 15 bp, Homo sapiens
gaattacagtaacca

SEQ ID NO: 407767 - DNA, 15 bp, Homo sapiens
ggaattacagtaacc

SEQ ID NO: 407768 - DNA, 15 bp, Homo sapiens
gggaattacagtaac

SEQ ID NO: 407769 - DNA, 15 bp, Homo sapiens
agggaattacagtaa

SEQ ID NO: 407770 - DNA, 15 bp, Homo sapiens
tagggaattacagta

SEQ ID NO: 407771 - DNA, 15 bp, Homo sapiens
ttagggaattacagt

SEQ ID NO: 407772 - DNA, 15 bp, Homo sapiens
attagggaattacag

SEQ ID NO: 407773 - DNA, 15 bp, Homo sapiens
tattagggaattaca

SEQ ID NO: 407774 - DNA, 15 bp, Homo sapiens
ctattagggaattac

SEQ ID NO: 407775 - DNA, 15 bp, Homo sapiens
actattagggaatta

SEQ ID NO: 407776 - DNA, 15 bp, Homo sapiens
cactattagggaatt

SEQ ID NO: 407777 - DNA, 15 bp, Homo sapiens
tcactattagggaat

SEQ ID NO: 407778 - DNA, 15 bp, Homo sapiens
gtcactattagggaa

SEQ ID NO: 407779 - DNA, 15 bp, Homo sapiens
tgtcactattaggga

SEQ ID NO: 407780 - DNA, 15 bp, Homo sapiens
atgtcactattaggg

SEQ ID NO: 407781 - DNA, 15 bp, Homo sapiens
aatgtcactattagg

SEQ ID NO: 407782 - DNA, 15 bp, Homo sapiens
aaatgtcactattag

SEQ ID NO: 407783 - DNA, 15 bp, Homo sapiens
aaaatgtcactatta

SEQ ID NO: 407784 - DNA, 15 bp, Homo sapiens
gaaaatgtcactatt

SEQ ID NO: 407785 - DNA, 15 bp, Homo sapiens
ggaaaatgtcactat

SEQ ID NO: 407786 - DNA, 15 bp, Homo sapiens
tggaaaatgtcacta

SEQ ID NO: 407787 - DNA, 15 bp, Homo sapiens
ttggaaaatgtcact

SEQ ID NO: 407788 - DNA, 15 bp, Homo sapiens
attggaaaatgtcac

SEQ ID NO: 407789 - DNA, 15 bp, Homo sapiens
gattggaaaatgtca

SEQ ID NO: 407790 - DNA, 15 bp, Homo sapiens
agattggaaaatgtc

SEQ ID NO: 407791 - DNA, 15 bp, Homo sapiens
gagattggaaaatgt

SEQ ID NO: 407792 - DNA, 15 bp, Homo sapiens
agagattggaaaatg

SEQ ID NO: 407793 - DNA, 15 bp, Homo sapiens
cagagattggaaaat

SEQ ID NO: 407794 - DNA, 15 bp, Homo sapiens
gcagagattggaaaa

SEQ ID NO: 407795 - DNA, 15 bp, Homo sapiens
cgcagagattggaaa

SEQ ID NO: 407796 - DNA, 15 bp, Homo sapiens
acgcagagattggaa

SEQ ID NO: 407797 - DNA, 15 bp, Homo sapiens
gacgcagagattgga

SEQ ID NO: 407798 - DNA, 15 bp, Homo sapiens
cgacgcagagattgg

SEQ ID NO: 407799 - DNA, 15 bp, Homo sapiens
acgacgcagagattg

SEQ ID NO: 407800 - DNA, 15 bp, Homo sapiens
cacgacgcagagatt

SEQ ID NO: 407801 - DNA, 15 bp, Homo sapiens
acacgacgcagagat

SEQ ID NO: 407802 - DNA, 15 bp, Homo sapiens
aacacgacgcagaga

SEQ ID NO: 407803 - DNA, 15 bp, Homo sapiens
caacacgacgcagag

SEQ ID NO: 407804 - DNA, 15 bp, Homo sapiens
tcaacacgacgcaga

SEQ ID NO: 407805 - DNA, 15 bp, Homo sapiens
atcaacacgacgcag

SEQ ID NO: 407806 - DNA, 15 bp, Homo sapiens
gatcaacacgacgca

SEQ ID NO: 407807 - DNA, 15 bp, Homo sapiens
tgatcaacacgacgc

SEQ ID NO: 407808 - DNA, 15 bp, Homo sapiens
gtgatcaacacgacg

SEQ ID NO: 407809 - DNA, 15 bp, Homo sapiens
tgtgatcaacacgac

SEQ ID NO: 407810 - DNA, 15 bp, Homo sapiens
ttgtgatcaacacga

SEQ ID NO: 407811 - DNA, 15 bp, Homo sapiens
tttgtgatcaacacg

SEQ ID NO: 407812 - DNA, 15 bp, Homo sapiens
ctttgtgatcaacac

SEQ ID NO: 407813 - DNA, 15 bp, Homo sapiens
actttgtgatcaaca

SEQ ID NO: 407814 - DNA, 15 bp, Homo sapiens
aactttgtgatcaac

SEQ ID NO: 407815 - DNA, 15 bp, Homo sapiens
gaactttgtgatcaa

SEQ ID NO: 407816 - DNA, 15 bp, Homo sapiens
ggaactttgtgatca

SEQ ID NO: 407817 - DNA, 15 bp, Homo sapiens
aggaactttgtgatc

SEQ ID NO: 407818 - DNA, 15 bp, Homo sapiens
gaggaactttgtgat

SEQ ID NO: 407819 - DNA, 15 bp, Homo sapiens
agaggaactttgtga

SEQ ID NO: 407820 - DNA, 15 bp, Homo sapiens
cagaggaactttgtg

SEQ ID NO: 407821 - DNA, 15 bp, Homo sapiens
tcagaggaactttgt

SEQ ID NO: 407822 - DNA, 15 bp, Homo sapiens
gtcagaggaactttg

SEQ ID NO: 407823 - DNA, 15 bp, Homo sapiens
tgtcagaggaacttt

SEQ ID NO: 407824 - DNA, 15 bp, Homo sapiens
ctgtcagaggaactt

SEQ ID NO: 407825 - DNA, 15 bp, Homo sapiens
actgtcagaggaact

SEQ ID NO: 407826 - DNA, 15 bp, Homo sapiens
tactgtcagaggaac

SEQ ID NO: 407827 - DNA, 15 bp, Homo sapiens
ctactgtcagaggaa

SEQ ID NO: 407828 - DNA, 15 bp, Homo sapiens
tctactgtcagagga

SEQ ID NO: 407829 - DNA, 15 bp, Homo sapiens
ctctactgtcagagg

SEQ ID NO: 407830 - DNA, 15 bp, Homo sapiens
actctactgtcagag

SEQ ID NO: 407831 - DNA, 15 bp, Homo sapiens
cactctactgtcaga

SEQ ID NO: 407832 - DNA, 15 bp, Homo sapiens
acactctactgtcag

SEQ ID NO: 407833 - DNA, 15 bp, Homo sapiens
aacactctactgtca

SEQ ID NO: 407834 - DNA, 15 bp, Homo sapiens
gaacactctactgtc

SEQ ID NO: 407835 - DNA, 15 bp, Homo sapiens
agaacactctactgt

SEQ ID NO: 407836 - DNA, 15 bp, Homo sapiens
cagaacactctactg

SEQ ID NO: 407837 - DNA, 15 bp, Homo sapiens
tcagaacactctact

SEQ ID NO: 407838 - DNA, 15 bp, Homo sapiens
atcagaacactctac

SEQ ID NO: 407839 - DNA, 15 bp, Homo sapiens
tatcagaacactcta

SEQ ID NO: 407840 - DNA, 15 bp, Homo sapiens
ctatcagaacactct

SEQ ID NO: 407841 - DNA, 15 bp, Homo sapiens
gctatcagaacactc

SEQ ID NO: 407842 - DNA, 15 bp, Homo sapiens
tgctatcagaacact

SEQ ID NO: 407843 - DNA, 15 bp, Homo sapiens
ttgctatcagaacac

SEQ ID NO: 407844 - DNA, 15 bp, Homo sapiens
tttgctatcagaaca

SEQ ID NO: 407845 - DNA, 15 bp, Homo sapiens
gtttgctatcagaac

SEQ ID NO: 407846 - DNA, 15 bp, Homo sapiens
agtttgctatcagaa

SEQ ID NO: 407847 - DNA, 15 bp, Homo sapiens
cagtttgctatcaga

SEQ ID NO: 407848 - DNA, 15 bp, Homo sapiens
acagtttgctatcag

SEQ ID NO: 407849 - DNA, 15 bp, Homo sapiens
aacagtttgctatca

SEQ ID NO: 407850 - DNA, 15 bp, Homo sapiens
aaacagtttgctatc

SEQ ID NO: 407851 - DNA, 15 bp, Homo sapiens
gaaacagtttgctat

SEQ ID NO: 407852 - DNA, 15 bp, Homo sapiens
tgaaacagtttgcta

SEQ ID NO: 407853 - DNA, 15 bp, Homo sapiens
ctgaaacagtttgct

SEQ ID NO: 407854 - DNA, 15 bp, Homo sapiens
gctgaaacagtttgc

SEQ ID NO: 407855 - DNA, 15 bp, Homo sapiens
agctgaaacagtttg

SEQ ID NO: 407856 - DNA, 15 bp, Homo sapiens
cagctgaaacagttt

SEQ ID NO: 407857 - DNA, 15 bp, Homo sapiens
gcagctgaaacagtt

SEQ ID NO: 407858 - DNA, 15 bp, Homo sapiens
ggcagctgaaacagt

SEQ ID NO: 407859 - DNA, 15 bp, Homo sapiens
tggcagctgaaacag

SEQ ID NO: 407860 - DNA, 15 bp, Homo sapiens
atggcagctgaaaca

SEQ ID NO: 407861 - DNA, 15 bp, Homo sapiens
catggcagctgaaac

SEQ ID NO: 407862 - DNA, 15 bp, Homo sapiens
ccatggcagctgaaa

SEQ ID NO: 407863 - DNA, 15 bp, Homo sapiens
accatggcagctgaa

SEQ ID NO: 407864 - DNA, 15 bp, Homo sapiens
caccatggcagctga

SEQ ID NO: 407865 - DNA, 15 bp, Homo sapiens
ccaccatggcagctg

SEQ ID NO: 407866 - DNA, 15 bp, Homo sapiens
cccaccatggcagct

SEQ ID NO: 407867 - DNA, 15 bp, Homo sapiens
ccccaccatggcagc

SEQ ID NO: 407868 - DNA, 15 bp, Homo sapiens
cccccaccatggcag

SEQ ID NO: 407869 - DNA, 15 bp, Homo sapiens
ccccccaccatggca

SEQ ID NO: 407870 - DNA, 15 bp, Homo sapiens
tccccccaccatggc

SEQ ID NO: 407871 - DNA, 15 bp, Homo sapiens
ttccccccaccatgg

SEQ ID NO: 407872 - DNA, 15 bp, Homo sapiens
gttccccccaccatg

SEQ ID NO: 407873 - DNA, 15 bp, Homo sapiens
ggttccccccaccat

SEQ ID NO: 407874 - DNA, 15 bp, Homo sapiens
tggttccccccacca

SEQ ID NO: 407875 - DNA, 15 bp, Homo sapiens
gtggttccccccacc

SEQ ID NO: 407876 - DNA, 15 bp, Homo sapiens
tgtggttccccccac

SEQ ID NO: 407877 - DNA, 15 bp, Homo sapiens
ttgtggttcccccca

SEQ ID NO: 407878 - DNA, 15 bp, Homo sapiens
tttgtggttcccccc

SEQ ID NO: 407879 - DNA, 15 bp, Homo sapiens
gtttgtggttccccc

SEQ ID NO: 407880 - DNA, 15 bp, Homo sapiens
tgtttgtggttcccc

SEQ ID NO: 407881 - DNA, 15 bp, Homo sapiens
gtgtttgtggttccc

SEQ ID NO: 407882 - DNA, 15 bp, Homo sapiens
tgtgtttgtggttcc

SEQ ID NO: 407883 - DNA, 15 bp, Homo sapiens
ttgtgtttgtggttc

SEQ ID NO: 407884 - DNA, 15 bp, Homo sapiens
tttgtgtttgtggtt

SEQ ID NO: 407885 - DNA, 15 bp, Homo sapiens
ttttgtgtttgtggt

SEQ ID NO: 407886 - DNA, 15 bp, Homo sapiens
cttttgtgtttgtgg

SEQ ID NO: 407887 - DNA, 15 bp, Homo sapiens
gcttttgtgtttgtg

SEQ ID NO: 407888 - DNA, 15 bp, Homo sapiens
agcttttgtgtttgt

SEQ ID NO: 407889 - DNA, 15 bp, Homo sapiens
aagcttttgtgtttg

SEQ ID NO: 407890 - DNA, 15 bp, Homo sapiens
caagcttttgtgttt

SEQ ID NO: 407891 - DNA, 15 bp, Homo sapiens
tcaagcttttgtgtt

SEQ ID NO: 407892 - DNA, 15 bp, Homo sapiens
ctcaagcttttgtgt

SEQ ID NO: 407893 - DNA, 15 bp, Homo sapiens
gctcaagcttttgtg

SEQ ID NO: 407894 - DNA, 15 bp, Homo sapiens
tgctcaagcttttgt

SEQ ID NO: 407895 - DNA, 15 bp, Homo sapiens
ctgctcaagcttttg

SEQ ID NO: 407896 - DNA, 15 bp, Homo sapiens
tctgctcaagctttt

SEQ ID NO: 407897 - DNA, 15 bp, Homo sapiens
ttctgctcaagcttt

SEQ ID NO: 407898 - DNA, 15 bp, Homo sapiens
tttctgctcaagctt

SEQ ID NO: 407899 - DNA, 15 bp, Homo sapiens
atttctgctcaagct

SEQ ID NO: 407900 - DNA, 15 bp, Homo sapiens
tatttctgctcaagc

SEQ ID NO: 407901 - DNA, 15 bp, Homo sapiens
gtatttctgctcaag

SEQ ID NO: 407902 - DNA, 15 bp, Homo sapiens
tgtatttctgctcaa

SEQ ID NO: 407903 - DNA, 15 bp, Homo sapiens
ctgtatttctgctca

SEQ ID NO: 407904 - DNA, 15 bp, Homo sapiens
gctgtatttctgctc

SEQ ID NO: 407905 - DNA, 15 bp, Homo sapiens
ggctgtatttctgct

SEQ ID NO: 407906 - DNA, 15 bp, Homo sapiens
aggctgtatttctgc

SEQ ID NO: 407907 - DNA, 15 bp, Homo sapiens
caggctgtatttctg

SEQ ID NO: 407908 - DNA, 15 bp, Homo sapiens
tcaggctgtatttct

SEQ ID NO: 407909 - DNA, 15 bp, Homo sapiens
ttcaggctgtatttc

SEQ ID NO: 407910 - DNA, 15 bp, Homo sapiens
tttcaggctgtattt

SEQ ID NO: 407911 - DNA, 15 bp, Homo sapiens
ctttcaggctgtatt

SEQ ID NO: 407912 - DNA, 15 bp, Homo sapiens
cctttcaggctgtat

SEQ ID NO: 407913 - DNA, 15 bp, Homo sapiens
acctttcaggctgta

SEQ ID NO: 407914 - DNA, 15 bp, Homo sapiens
aacctttcaggctgt

SEQ ID NO: 407915 - DNA, 15 bp, Homo sapiens
caacctttcaggctg

SEQ ID NO: 407916 - DNA, 15 bp, Homo sapiens
tcaacctttcaggct

SEQ ID NO: 407917 - DNA, 15 bp, Homo sapiens
gtcaacctttcaggc

SEQ ID NO: 407918 - DNA, 15 bp, Homo sapiens
agtcaacctttcagg

SEQ ID NO: 407919 - DNA, 15 bp, Homo sapiens
aagtcaacctttcag

SEQ ID NO: 407920 - DNA, 15 bp, Homo sapiens
aaagtcaacctttca

SEQ ID NO: 407921 - DNA, 15 bp, Homo sapiens
aaaagtcaacctttc

SEQ ID NO: 407922 - DNA, 15 bp, Homo sapiens
gaaaagtcaaccttt

SEQ ID NO: 407923 - DNA, 15 bp, Homo sapiens
tgaaaagtcaacctt

SEQ ID NO: 407924 - DNA, 15 bp, Homo sapiens
atgaaaagtcaacct

SEQ ID NO: 407925 - DNA, 15 bp, Homo sapiens
aatgaaaagtcaacc

SEQ ID NO: 407926 - DNA, 15 bp, Homo sapiens
aaatgaaaagtcaac

SEQ ID NO: 407927 - DNA, 15 bp, Homo sapiens
taaatgaaaagtcaa

SEQ ID NO: 407928 - DNA, 15 bp, Homo sapiens
gtaaatgaaaagtca

SEQ ID NO: 407929 - DNA, 15 bp, Homo sapiens
agtaaatgaaaagtc

SEQ ID NO: 407930 - DNA, 15 bp, Homo sapiens
aagtaaatgaaaagt

SEQ ID NO: 407931 - DNA, 15 bp, Homo sapiens
gaagtaaatgaaaag

SEQ ID NO: 407932 - DNA, 15 bp, Homo sapiens
agaagtaaatgaaaa

SEQ ID NO: 407933 - DNA, 15 bp, Homo sapiens
tagaagtaaatgaaa

SEQ ID NO: 407934 - DNA, 15 bp, Homo sapiens
atagaagtaaatgaa

SEQ ID NO: 407935 - DNA, 15 bp, Homo sapiens
gatagaagtaaatga

SEQ ID NO: 407936 - DNA, 15 bp, Homo sapiens
agatagaagtaaatg

SEQ ID NO: 407937 - DNA, 15 bp, Homo sapiens
gagatagaagtaaat

SEQ ID NO: 407938 - DNA, 15 bp, Homo sapiens
agagatagaagtaaa

SEQ ID NO: 407939 - DNA, 15 bp, Homo sapiens
cagagatagaagtaa

SEQ ID NO: 407940 - DNA, 15 bp, Homo sapiens
ccagagatagaagta

SEQ ID NO: 407941 - DNA, 15 bp, Homo sapiens
tccagagatagaagt

SEQ ID NO: 407942 - DNA, 15 bp, Homo sapiens
ctccagagatagaag

SEQ ID NO: 407943 - DNA, 15 bp, Homo sapiens
gctccagagatagaa

SEQ ID NO: 407944 - DNA, 15 bp, Homo sapiens
agctccagagataga

SEQ ID NO: 407945 - DNA, 15 bp, Homo sapiens
gagctccagagatag

SEQ ID NO: 407946 - DNA, 15 bp, Homo sapiens
tgagctccagagata

SEQ ID NO: 407947 - DNA, 15 bp, Homo sapiens
atgagctccagagat

SEQ ID NO: 407948 - DNA, 15 bp, Homo sapiens
catgagctccagaga

SEQ ID NO: 407949 - DNA, 15 bp, Homo sapiens
ccatgagctccagag

SEQ ID NO: 407950 - DNA, 15 bp, Homo sapiens
gccatgagctccaga

SEQ ID NO: 407951 - DNA, 15 bp, Homo sapiens
cgccatgagctccag

SEQ ID NO: 407952 - DNA, 15 bp, Homo sapiens
gcgccatgagctcca

SEQ ID NO: 407953 - DNA, 15 bp, Homo sapiens
agcgccatgagctcc

SEQ ID NO: 407954 - DNA, 15 bp, Homo sapiens
tagcgccatgagctc

SEQ ID NO: 407955 - DNA, 15 bp, Homo sapiens
atagcgccatgagct

SEQ ID NO: 407956 - DNA, 15 bp, Homo sapiens
tatagcgccatgagc

SEQ ID NO: 407957 - DNA, 15 bp, Homo sapiens
ttatagcgccatgag

SEQ ID NO: 407958 - DNA, 15 bp, Homo sapiens
cttatagcgccatga

SEQ ID NO: 407959 - DNA, 15 bp, Homo sapiens
gcttatagcgccatg

SEQ ID NO: 407960 - DNA, 15 bp, Homo sapiens
agcttatagcgccat

SEQ ID NO: 407961 - DNA, 15 bp, Homo sapiens
gagcttatagcgcca

SEQ ID NO: 407962 - DNA, 15 bp, Homo sapiens
ggagcttatagcgcc

SEQ ID NO: 407963 - DNA, 15 bp, Homo sapiens
tggagcttatagcgc

SEQ ID NO: 407964 - DNA, 15 bp, Homo sapiens
ctggagcttatagcg

SEQ ID NO: 407965 - DNA, 15 bp, Homo sapiens
gctggagcttatagc

SEQ ID NO: 407966 - DNA, 15 bp, Homo sapiens
tgctggagcttatag

SEQ ID NO: 407967 - DNA, 15 bp, Homo sapiens
atgctggagcttata

SEQ ID NO: 407968 - DNA, 15 bp, Homo sapiens
aatgctggagcttat

SEQ ID NO: 407969 - DNA, 15 bp, Homo sapiens
taatgctggagctta

SEQ ID NO: 407970 - DNA, 15 bp, Homo sapiens
ttaatgctggagctt

SEQ ID NO: 407971 - DNA, 15 bp, Homo sapiens
tttaatgctggagct

SEQ ID NO: 407972 - DNA, 15 bp, Homo sapiens
atttaatgctggagc

SEQ ID NO: 407973 - DNA, 15 bp, Homo sapiens
aatttaatgctggag

SEQ ID NO: 407974 - DNA, 15 bp, Homo sapiens
aaatttaatgctgga

SEQ ID NO: 407975 - DNA, 15 bp, Homo sapiens
aaaatttaatgctgg

SEQ ID NO: 407976 - DNA, 15 bp, Homo sapiens
taaaatttaatgctg

SEQ ID NO: 407977 - DNA, 15 bp, Homo sapiens
ttaaaatttaatgct

SEQ ID NO: 407978 - DNA, 15 bp, Homo sapiens
cttaaaatttaatgc

SEQ ID NO: 407979 - DNA, 15 bp, Homo sapiens
gcttaaaatttaatg

SEQ ID NO: 407980 - DNA, 15 bp, Homo sapiens
tgcttaaaatttaat

SEQ ID NO: 407981 - DNA, 15 bp, Homo sapiens
atgcttaaaatttaa

SEQ ID NO: 407982 - DNA, 15 bp, Homo sapiens
aatgcttaaaattta

SEQ ID NO: 407983 - DNA, 15 bp, Homo sapiens
aaatgcttaaaattt

SEQ ID NO: 407984 - DNA, 15 bp, Homo sapiens
caaatgcttaaaatt

SEQ ID NO: 407985 - DNA, 15 bp, Homo sapiens
tcaaatgcttaaaat

SEQ ID NO: 407986 - DNA, 15 bp, Homo sapiens
atcaaatgcttaaaa

SEQ ID NO: 407987 - DNA, 15 bp, Homo sapiens
catcaaatgcttaaa

SEQ ID NO: 407988 - DNA, 15 bp, Homo sapiens
gcatcaaatgcttaa

SEQ ID NO: 407989 - DNA, 15 bp, Homo sapiens
tgcatcaaatgctta

SEQ ID NO: 407990 - DNA, 15 bp, Homo sapiens
ctgcatcaaatgctt

SEQ ID NO: 407991 - DNA, 15 bp, Homo sapiens
cctgcatcaaatgct

SEQ ID NO: 407992 - DNA, 15 bp, Homo sapiens
tcctgcatcaaatgc

SEQ ID NO: 407993 - DNA, 15 bp, Homo sapiens
ctcctgcatcaaatg

SEQ ID NO: 407994 - DNA, 15 bp, Homo sapiens
cctcctgcatcaaat

SEQ ID NO: 407995 - DNA, 15 bp, Homo sapiens
tcctcctgcatcaaa

SEQ ID NO: 407996 - DNA, 15 bp, Homo sapiens
atcctcctgcatcaa

SEQ ID NO: 407997 - DNA, 15 bp, Homo sapiens
gatcctcctgcatca

SEQ ID NO: 407998 - DNA, 15 bp, Homo sapiens
tgatcctcctgcatc

SEQ ID NO: 407999 - DNA, 15 bp, Homo sapiens
ttgatcctcctgcat

SEQ ID NO: 408000 - DNA, 15 bp, Homo sapiens
cttgatcctcctgca

SEQ ID NO: 408001 - DNA, 15 bp, Homo sapiens
ccttgatcctcctgc

SEQ ID NO: 408002 - DNA, 15 bp, Homo sapiens
cccttgatcctcctg

SEQ ID NO: 408003 - DNA, 15 bp, Homo sapiens
ccccttgatcctcct

SEQ ID NO: 408004 - DNA, 15 bp, Homo sapiens
tccccttgatcctcc

SEQ ID NO: 408005 - DNA, 15 bp, Homo sapiens
ttccccttgatcctc

SEQ ID NO: 408006 - DNA, 15 bp, Homo sapiens
cttccccttgatcct

SEQ ID NO: 408007 - DNA, 15 bp, Homo sapiens
gcttccccttgatcc

SEQ ID NO: 408008 - DNA, 15 bp, Homo sapiens
ggcttccccttgatc

SEQ ID NO: 408009 - DNA, 15 bp, Homo sapiens
aggcttccccttgat

SEQ ID NO: 408010 - DNA, 15 bp, Homo sapiens
caggcttccccttga

SEQ ID NO: 408011 - DNA, 15 bp, Homo sapiens
ccaggcttccccttg

SEQ ID NO: 408012 - DNA, 15 bp, Homo sapiens
cccaggcttcccctt

SEQ ID NO: 408013 - DNA, 15 bp, Homo sapiens
tcccaggcttcccct

SEQ ID NO: 408014 - DNA, 15 bp, Homo sapiens
ttcccaggcttcccc

SEQ ID NO: 408015 - DNA, 15 bp, Homo sapiens
cttcccaggcttccc

SEQ ID NO: 408016 - DNA, 15 bp, Homo sapiens
acttcccaggcttcc

SEQ ID NO: 408017 - DNA, 15 bp, Homo sapiens
cacttcccaggcttc

SEQ ID NO: 408018 - DNA, 15 bp, Homo sapiens
acacttcccaggctt

SEQ ID NO: 408019 - DNA, 15 bp, Homo sapiens
aacacttcccaggct

SEQ ID NO: 408020 - DNA, 15 bp, Homo sapiens
aaacacttcccaggc

SEQ ID NO: 408021 - DNA, 15 bp, Homo sapiens
caaacacttcccagg

SEQ ID NO: 408022 - DNA, 15 bp, Homo sapiens
ccaaacacttcccag

SEQ ID NO: 408023 - DNA, 15 bp, Homo sapiens
gccaaacacttccca

SEQ ID NO: 408024 - DNA, 15 bp, Homo sapiens
agccaaacacttccc

SEQ ID NO: 408025 - DNA, 15 bp, Homo sapiens
aagccaaacacttcc

SEQ ID NO: 408026 - DNA, 15 bp, Homo sapiens
gaagccaaacacttc

SEQ ID NO: 408027 - DNA, 15 bp, Homo sapiens
tgaagccaaacactt

SEQ ID NO: 408028 - DNA, 15 bp, Homo sapiens
atgaagccaaacact

SEQ ID NO: 408029 - DNA, 15 bp, Homo sapiens
gatgaagccaaacac

SEQ ID NO: 408030 - DNA, 15 bp, Homo sapiens
cgatgaagccaaaca

SEQ ID NO: 408031 - DNA, 15 bp, Homo sapiens
tcgatgaagccaaac

SEQ ID NO: 408032 - DNA, 15 bp, Homo sapiens
gtcgatgaagccaaa

SEQ ID NO: 408033 - DNA, 15 bp, Homo sapiens
ggtcgatgaagccaa

SEQ ID NO: 408034 - DNA, 15 bp, Homo sapiens
cggtcgatgaagcca

SEQ ID NO: 408035 - DNA, 15 bp, Homo sapiens
gcggtcgatgaagcc

SEQ ID NO: 408036 - DNA, 15 bp, Homo sapiens
agcggtcgatgaagc

SEQ ID NO: 408037 - DNA, 15 bp, Homo sapiens
cagcggtcgatgaag

SEQ ID NO: 408038 - DNA, 15 bp, Homo sapiens
ccagcggtcgatgaa

SEQ ID NO: 408039 - DNA, 15 bp, Homo sapiens
accagcggtcgatga

SEQ ID NO: 408040 - DNA, 15 bp, Homo sapiens
gaccagcggtcgatg

SEQ ID NO: 408041 - DNA, 15 bp, Homo sapiens
agaccagcggtcgat

SEQ ID NO: 408042 - DNA, 15 bp, Homo sapiens
aagaccagcggtcga

SEQ ID NO: 408043 - DNA, 15 bp, Homo sapiens
caagaccagcggtcg

SEQ ID NO: 408044 - DNA, 15 bp, Homo sapiens
gcaagaccagcggtc

SEQ ID NO: 408045 - DNA, 15 bp, Homo sapiens
agcaagaccagcggt

SEQ ID NO: 408046 - DNA, 15 bp, Homo sapiens
tagcaagaccagcgg

SEQ ID NO: 408047 - DNA, 15 bp, Homo sapiens
atagcaagaccagcg

SEQ ID NO: 408048 - DNA, 15 bp, Homo sapiens
catagcaagaccagc

SEQ ID NO: 408049 - DNA, 15 bp, Homo sapiens
tcatagcaagaccag

SEQ ID NO: 408050 - DNA, 15 bp, Homo sapiens
ttcatagcaagacca

SEQ ID NO: 408051 - DNA, 15 bp, Homo sapiens
attcatagcaagacc

SEQ ID NO: 408052 - DNA, 15 bp, Homo sapiens
aattcatagcaagac

SEQ ID NO: 408053 - DNA, 15 bp, Homo sapiens
aaattcatagcaaga

SEQ ID NO: 408054 - DNA, 15 bp, Homo sapiens
aaaattcatagcaag

SEQ ID NO: 408055 - DNA, 15 bp, Homo sapiens
gaaaattcatagcaa

SEQ ID NO: 408056 - DNA, 15 bp, Homo sapiens
tgaaaattcatagca

SEQ ID NO: 408057 - DNA, 15 bp, Homo sapiens
ctgaaaattcatagc

SEQ ID NO: 408058 - DNA, 15 bp, Homo sapiens
gctgaaaattcatag

SEQ ID NO: 408059 - DNA, 15 bp, Homo sapiens
tgctgaaaattcata

SEQ ID NO: 408060 - DNA, 15 bp, Homo sapiens
ttgctgaaaattcat

SEQ ID NO: 408061 - DNA, 15 bp, Homo sapiens
cttgctgaaaattca

SEQ ID NO: 408062 - DNA, 15 bp, Homo sapiens
tcttgctgaaaattc

SEQ ID NO: 408063 - DNA, 15 bp, Homo sapiens
ttcttgctgaaaatt

SEQ ID NO: 408064 - DNA, 15 bp, Homo sapiens
tttcttgctgaaaat

SEQ ID NO: 408065 - DNA, 15 bp, Homo sapiens
ttttcttgctgaaaa

SEQ ID NO: 408066 - DNA, 15 bp, Homo sapiens
tttttcttgctgaaa

SEQ ID NO: 408067 - DNA, 15 bp, Homo sapiens
ctttttcttgctgaa

SEQ ID NO: 408068 - DNA, 15 bp, Homo sapiens
tctttttcttgctga

SEQ ID NO: 408069 - DNA, 15 bp, Homo sapiens
ctctttttcttgctg

SEQ ID NO: 408070 - DNA, 15 bp, Homo sapiens
tctctttttcttgct

SEQ ID NO: 408071 - DNA, 15 bp, Homo sapiens
ctctctttttcttgc

SEQ ID NO: 408072 - DNA, 15 bp, Homo sapiens
cctctctttttcttg

SEQ ID NO: 408073 - DNA, 15 bp, Homo sapiens
gcctctctttttctt

SEQ ID NO: 408074 - DNA, 15 bp, Homo sapiens
tgcctctctttttct

SEQ ID NO: 408075 - DNA, 15 bp, Homo sapiens
atgcctctctttttc

SEQ ID NO: 408076 - DNA, 15 bp, Homo sapiens
aatgcctctcttttt

SEQ ID NO: 408077 - DNA, 15 bp, Homo sapiens
caatgcctctctttt

SEQ ID NO: 408078 - DNA, 15 bp, Homo sapiens
acaatgcctctcttt

SEQ ID NO: 408079 - DNA, 15 bp, Homo sapiens
aacaatgcctctctt

SEQ ID NO: 408080 - DNA, 15 bp, Homo sapiens
aaacaatgcctctct

SEQ ID NO: 408081 - DNA, 15 bp, Homo sapiens
caaacaatgcctctc

SEQ ID NO: 408082 - DNA, 15 bp, Homo sapiens
tcaaacaatgcctct

SEQ ID NO: 408083 - DNA, 15 bp, Homo sapiens
ttcaaacaatgcctc

SEQ ID NO: 408084 - DNA, 15 bp, Homo sapiens
cttcaaacaatgcct

SEQ ID NO: 408085 - DNA, 15 bp, Homo sapiens
tcttcaaacaatgcc

SEQ ID NO: 408086 - DNA, 15 bp, Homo sapiens
ctcttcaaacaatgc

SEQ ID NO: 408087 - DNA, 15 bp, Homo sapiens
tctcttcaaacaatg

SEQ ID NO: 408088 - DNA, 15 bp, Homo sapiens
ttctcttcaaacaat

SEQ ID NO: 408089 - DNA, 15 bp, Homo sapiens
attctcttcaaacaa

SEQ ID NO: 408090 - DNA, 15 bp, Homo sapiens
cattctcttcaaaca

SEQ ID NO: 408091 - DNA, 15 bp, Homo sapiens
acattctcttcaaac

SEQ ID NO: 408092 - DNA, 15 bp, Homo sapiens
tacattctcttcaaa

SEQ ID NO: 408093 - DNA, 15 bp, Homo sapiens
ttacattctcttcaa

SEQ ID NO: 408094 - DNA, 15 bp, Homo sapiens
gttacattctcttca

SEQ ID NO: 408095 - DNA, 15 bp, Homo sapiens
tgttacattctcttc

SEQ ID NO: 408096 - DNA, 15 bp, Homo sapiens
atgttacattctctt

SEQ ID NO: 408097 - DNA, 15 bp, Homo sapiens
aatgttacattctct

SEQ ID NO: 408098 - DNA, 15 bp, Homo sapiens
caatgttacattctc

SEQ ID NO: 408099 - DNA, 15 bp, Homo sapiens
ccaatgttacattct

SEQ ID NO: 408100 - DNA, 15 bp, Homo sapiens
tccaatgttacattc

SEQ ID NO: 408101 - DNA, 15 bp, Homo sapiens
gtccaatgttacatt

SEQ ID NO: 408102 - DNA, 15 bp, Homo sapiens
tgtccaatgttacat

SEQ ID NO: 408103 - DNA, 15 bp, Homo sapiens
ctgtccaatgttaca

SEQ ID NO: 408104 - DNA, 15 bp, Homo sapiens
tctgtccaatgttac

SEQ ID NO: 408105 - DNA, 15 bp, Homo sapiens
ttctgtccaatgtta

SEQ ID NO: 408106 - DNA, 15 bp, Homo sapiens
attctgtccaatgtt

SEQ ID NO: 408107 - DNA, 15 bp, Homo sapiens
aattctgtccaatgt

SEQ ID NO: 408108 - DNA, 15 bp, Homo sapiens
taattctgtccaatg

SEQ ID NO: 408109 - DNA, 15 bp, Homo sapiens
ttaattctgtccaat

SEQ ID NO: 408110 - DNA, 15 bp, Homo sapiens
tttaattctgtccaa

SEQ ID NO: 408111 - DNA, 15 bp, Homo sapiens
ctttaattctgtcca

SEQ ID NO: 408112 - DNA, 15 bp, Homo sapiens
gctttaattctgtcc

SEQ ID NO: 408113 - DNA, 15 bp, Homo sapiens
tgctttaattctgtc

SEQ ID NO: 408114 - DNA, 15 bp, Homo sapiens
atgctttaattctgt

SEQ ID NO: 408115 - DNA, 15 bp, Homo sapiens
gatgctttaattctg

SEQ ID NO: 408116 - DNA, 15 bp, Homo sapiens
agatgctttaattct

SEQ ID NO: 408117 - DNA, 15 bp, Homo sapiens
tagatgctttaattc

SEQ ID NO: 408118 - DNA, 15 bp, Homo sapiens
atagatgctttaatt

SEQ ID NO: 408119 - DNA, 15 bp, Homo sapiens
aatagatgctttaat

SEQ ID NO: 408120 - DNA, 15 bp, Homo sapiens
aaatagatgctttaa

SEQ ID NO: 408121 - DNA, 15 bp, Homo sapiens
gaaatagatgcttta

SEQ ID NO: 408122 - DNA, 15 bp, Homo sapiens
agaaatagatgcttt

SEQ ID NO: 408123 - DNA, 15 bp, Homo sapiens
cagaaatagatgctt

SEQ ID NO: 408124 - DNA, 15 bp, Homo sapiens
ccagaaatagatgct

SEQ ID NO: 408125 - DNA, 15 bp, Homo sapiens
tccagaaatagatgc

SEQ ID NO: 408126 - DNA, 15 bp, Homo sapiens
ctccagaaatagatg

SEQ ID NO: 408127 - DNA, 15 bp, Homo sapiens
tctccagaaatagat

SEQ ID NO: 408128 - DNA, 15 bp, Homo sapiens
atctccagaaataga

SEQ ID NO: 408129 - DNA, 15 bp, Homo sapiens
aatctccagaaatag

SEQ ID NO: 408130 - DNA, 15 bp, Homo sapiens
aaatctccagaaata

SEQ ID NO: 408131 - DNA, 15 bp, Homo sapiens
caaatctccagaaat

SEQ ID NO: 408132 - DNA, 15 bp, Homo sapiens
acaaatctccagaaa

SEQ ID NO: 408133 - DNA, 15 bp, Homo sapiens
cacaaatctccagaa

SEQ ID NO: 408134 - DNA, 15 bp, Homo sapiens
tcacaaatctccaga

SEQ ID NO: 408135 - DNA, 15 bp, Homo sapiens
ttcacaaatctccag

SEQ ID NO: 408136 - DNA, 15 bp, Homo sapiens
tttcacaaatctcca

SEQ ID NO: 408137 - DNA, 15 bp, Homo sapiens
atttcacaaatctcc

SEQ ID NO: 408138 - DNA, 15 bp, Homo sapiens
tatttcacaaatctc

SEQ ID NO: 408139 - DNA, 15 bp, Homo sapiens
atatttcacaaatct

SEQ ID NO: 408140 - DNA, 15 bp, Homo sapiens
gatatttcacaaatc

SEQ ID NO: 408141 - DNA, 15 bp, Homo sapiens
tgatatttcacaaat

SEQ ID NO: 408142 - DNA, 15 bp, Homo sapiens
atgatatttcacaaa

SEQ ID NO: 408143 - DNA, 15 bp, Homo sapiens
aatgatatttcacaa

SEQ ID NO: 408144 - DNA, 15 bp, Homo sapiens
taatgatatttcaca

SEQ ID NO: 408145 - DNA, 15 bp, Homo sapiens
ctaatgatatttcac

SEQ ID NO: 408146 - DNA, 15 bp, Homo sapiens
gctaatgatatttca

SEQ ID NO: 408147 - DNA, 15 bp, Homo sapiens
tgctaatgatatttc

SEQ ID NO: 408148 - DNA, 15 bp, Homo sapiens
ttgctaatgatattt

SEQ ID NO: 408149 - DNA, 15 bp, Homo sapiens
tttgctaatgatatt

SEQ ID NO: 408150 - DNA, 15 bp, Homo sapiens
atttgctaatgatat

SEQ ID NO: 408151 - DNA, 15 bp, Homo sapiens
aatttgctaatgata

SEQ ID NO: 408152 - DNA, 15 bp, Homo sapiens
aaatttgctaatgat

SEQ ID NO: 408153 - DNA, 15 bp, Homo sapiens
aaaatttgctaatga

SEQ ID NO: 408154 - DNA, 15 bp, Homo sapiens
taaaatttgctaatg

SEQ ID NO: 408155 - DNA, 15 bp, Homo sapiens
ctaaaatttgctaat

SEQ ID NO: 408156 - DNA, 15 bp, Homo sapiens
actaaaatttgctaa

SEQ ID NO: 408157 - DNA, 15 bp, Homo sapiens
aactaaaatttgcta

SEQ ID NO: 408158 - DNA, 15 bp, Homo sapiens
gaactaaaatttgct

SEQ ID NO: 408159 - DNA, 15 bp, Homo sapiens
tgaactaaaatttgc

SEQ ID NO: 408160 - DNA, 15 bp, Homo sapiens
ctgaactaaaatttg

SEQ ID NO: 408161 - DNA, 15 bp, Homo sapiens
tctgaactaaaattt

SEQ ID NO: 408162 - DNA, 15 bp, Homo sapiens
ctctgaactaaaatt

SEQ ID NO: 408163 - DNA, 15 bp, Homo sapiens
cctctgaactaaaat

SEQ ID NO: 408164 - DNA, 15 bp, Homo sapiens
ccctctgaactaaaa

SEQ ID NO: 408165 - DNA, 15 bp, Homo sapiens
accctctgaactaaa

SEQ ID NO: 408166 - DNA, 15 bp, Homo sapiens
taccctctgaactaa

SEQ ID NO: 408167 - DNA, 15 bp, Homo sapiens
ataccctctgaacta

SEQ ID NO: 408168 - DNA, 15 bp, Homo sapiens
tataccctctgaact

SEQ ID NO: 408169 - DNA, 15 bp, Homo sapiens
ctataccctctgaac

SEQ ID NO: 408170 - DNA, 15 bp, Homo sapiens
cctataccctctgaa

SEQ ID NO: 408171 - DNA, 15 bp, Homo sapiens
gcctataccctctga

SEQ ID NO: 408172 - DNA, 15 bp, Homo sapiens
tgcctataccctctg

SEQ ID NO: 408173 - DNA, 15 bp, Homo sapiens
atgcctataccctct

SEQ ID NO: 408174 - DNA, 15 bp, Homo sapiens
tatgcctataccctc

SEQ ID NO: 408175 - DNA, 15 bp, Homo sapiens
atatgcctataccct

SEQ ID NO: 408176 - DNA, 15 bp, Homo sapiens
catatgcctataccc

SEQ ID NO: 408177 - DNA, 15 bp, Homo sapiens
tcatatgcctatacc

SEQ ID NO: 408178 - DNA, 15 bp, Homo sapiens
gtcatatgcctatac

SEQ ID NO: 408179 - DNA, 15 bp, Homo sapiens
ggtcatatgcctata

SEQ ID NO: 408180 - DNA, 15 bp, Homo sapiens
gggtcatatgcctat

SEQ ID NO: 408181 - DNA, 15 bp, Homo sapiens
agggtcatatgccta

SEQ ID NO: 408182 - DNA, 15 bp, Homo sapiens
gagggtcatatgcct

SEQ ID NO: 408183 - DNA, 15 bp, Homo sapiens
tgagggtcatatgcc

SEQ ID NO: 408184 - DNA, 15 bp, Homo sapiens
cttgagggtcatatg

SEQ ID NO: 408185 - DNA, 15 bp, Homo sapiens
tcttgagggtcatat

SEQ ID NO: 408186 - DNA, 15 bp, Homo sapiens
ttcttgagggtcata

SEQ ID NO: 408187 - DNA, 15 bp, Homo sapiens
cttcttgagggtcat

SEQ ID NO: 408188 - DNA, 15 bp, Homo sapiens
ccttcttgagggtca

SEQ ID NO: 408189 - DNA, 15 bp, Homo sapiens
accttcttgagggtc

SEQ ID NO: 408190 - DNA, 15 bp, Homo sapiens
gaccttcttgagggt

SEQ ID NO: 408191 - DNA, 15 bp, Homo sapiens
tgaccttcttgaggg

SEQ ID NO: 408192 - DNA, 15 bp, Homo sapiens
ctgaccttcttgagg

SEQ ID NO: 408193 - DNA, 15 bp, Homo sapiens
actgaccttcttgag

SEQ ID NO: 408194 - DNA, 15 bp, Homo sapiens
tactgaccttcttga

SEQ ID NO: 408195 - DNA, 15 bp, Homo sapiens
atactgaccttcttg

SEQ ID NO: 408196 - DNA, 15 bp, Homo sapiens
aatactgaccttctt

SEQ ID NO: 408197 - DNA, 15 bp, Homo sapiens
gaatactgaccttct

SEQ ID NO: 408198 - DNA, 15 bp, Homo sapiens
tgaatactgaccttc

SEQ ID NO: 408199 - DNA, 15 bp, Homo sapiens
gtgaatactgacctt

SEQ ID NO: 408200 - DNA, 15 bp, Homo sapiens
agtgaatactgacct

SEQ ID NO: 408201 - DNA, 15 bp, Homo sapiens
tagtgaatactgacc

SEQ ID NO: 408202 - DNA, 15 bp, Homo sapiens
ctagtgaatactgac

SEQ ID NO: 408203 - DNA, 15 bp, Homo sapiens
tctagtgaatactga

SEQ ID NO: 408204 - DNA, 15 bp, Homo sapiens
ttctagtgaatactg

SEQ ID NO: 408205 - DNA, 15 bp, Homo sapiens
attctagtgaatact

SEQ ID NO: 408206 - DNA, 15 bp, Homo sapiens
tattctagtgaatac

SEQ ID NO: 408207 - DNA, 15 bp, Homo sapiens
atattctagtgaata

SEQ ID NO: 408208 - DNA, 15 bp, Homo sapiens
catattctagtgaat

SEQ ID NO: 408209 - DNA, 15 bp, Homo sapiens
ccatattctagtgaa

SEQ ID NO: 408210 - DNA, 15 bp, Homo sapiens
accatattctagtga

SEQ ID NO: 408211 - DNA, 15 bp, Homo sapiens
aaccatattctagtg

SEQ ID NO: 408212 - DNA, 15 bp, Homo sapiens
aaaccatattctagt

SEQ ID NO: 408213 - DNA, 15 bp, Homo sapiens
caaaccatattctag

SEQ ID NO: 408214 - DNA, 15 bp, Homo sapiens
gcaaaccatattcta

SEQ ID NO: 408215 - DNA, 15 bp, Homo sapiens
agcaaaccatattct

SEQ ID NO: 408216 - DNA, 15 bp, Homo sapiens
tagcaaaccatattc

SEQ ID NO: 408217 - DNA, 15 bp, Homo sapiens
atagcaaaccatatt

SEQ ID NO: 408218 - DNA, 15 bp, Homo sapiens
tatagcaaaccatat

SEQ ID NO: 408219 - DNA, 15 bp, Homo sapiens
ctatagcaaaccata

SEQ ID NO: 408220 - DNA, 15 bp, Homo sapiens
gctatagcaaaccat

SEQ ID NO: 408221 - DNA, 15 bp, Homo sapiens
cgctatagcaaacca

SEQ ID NO: 408222 - DNA, 15 bp, Homo sapiens
tcgctatagcaaacc

SEQ ID NO: 408223 - DNA, 15 bp, Homo sapiens
atcgctatagcaaac

SEQ ID NO: 408224 - DNA, 15 bp, Homo sapiens
tatcgctatagcaaa

SEQ ID NO: 408225 - DNA, 15 bp, Homo sapiens
ctatcgctatagcaa

SEQ ID NO: 408226 - DNA, 15 bp, Homo sapiens
tctatcgctatagca

SEQ ID NO: 408227 - DNA, 15 bp, Homo sapiens
ttctatcgctatagc

SEQ ID NO: 408228 - DNA, 15 bp, Homo sapiens
cttctatcgctatag

SEQ ID NO: 408229 - DNA, 15 bp, Homo sapiens
acttctatcgctata

SEQ ID NO: 408230 - DNA, 15 bp, Homo sapiens
aacttctatcgctat

SEQ ID NO: 408231 - DNA, 15 bp, Homo sapiens
taacttctatcgcta

SEQ ID NO: 408232 - DNA, 15 bp, Homo sapiens
ttaacttctatcgct

SEQ ID NO: 408233 - DNA, 15 bp, Homo sapiens
tttaacttctatcgc

SEQ ID NO: 408234 - DNA, 15 bp, Homo sapiens
atttaacttctatcg

SEQ ID NO: 408235 - DNA, 15 bp, Homo sapiens
gatttaacttctatc

SEQ ID NO: 408236 - DNA, 15 bp, Homo sapiens
agatttaacttctat

SEQ ID NO: 408237 - DNA, 15 bp, Homo sapiens
aagatttaacttcta

SEQ ID NO: 408238 - DNA, 15 bp, Homo sapiens
aaagatttaacttct

SEQ ID NO: 408239 - DNA, 15 bp, Homo sapiens
aaaagatttaacttc

SEQ ID NO: 408240 - DNA, 15 bp, Homo sapiens
aaaaagatttaactt

SEQ ID NO: 408241 - DNA, 15 bp, Homo sapiens
aaaaaagatttaact

SEQ ID NO: 408242 - DNA, 15 bp, Homo sapiens
aaaaaaagatttaac

SEQ ID NO: 408243 - DNA, 15 bp, Homo sapiens
taaaaaaagatttaa

SEQ ID NO: 408244 - DNA, 15 bp, Homo sapiens
ttaaaaaaagattta

SEQ ID NO: 408245 - DNA, 15 bp, Homo sapiens
gttaaaaaaagattt

SEQ ID NO: 408246 - DNA, 15 bp, Homo sapiens
agttaaaaaaagatt

SEQ ID NO: 408247 - DNA, 15 bp, Homo sapiens
tagttaaaaaaagat

SEQ ID NO: 408248 - DNA, 15 bp, Homo sapiens
gtagttaaaaaaaga

SEQ ID NO: 408249 - DNA, 15 bp, Homo sapiens
ggtagttaaaaaaag

SEQ ID NO: 408250 - DNA, 15 bp, Homo sapiens
aggtagttaaaaaaa

SEQ ID NO: 408251 - DNA, 15 bp, Homo sapiens
caggtagttaaaaaa

SEQ ID NO: 408252 - DNA, 15 bp, Homo sapiens
gcaggtagttaaaaa

SEQ ID NO: 408253 - DNA, 15 bp, Homo sapiens
tgcaggtagttaaaa

SEQ ID NO: 408254 - DNA, 15 bp, Homo sapiens
ctgcaggtagttaaa

SEQ ID NO: 408255 - DNA, 15 bp, Homo sapiens
tctgcaggtagttaa

SEQ ID NO: 408256 - DNA, 15 bp, Homo sapiens
ctctgcaggtagtta

SEQ ID NO: 408257 - DNA, 15 bp, Homo sapiens
tctctgcaggtagtt

SEQ ID NO: 408258 - DNA, 15 bp, Homo sapiens
atctctgcaggtagt

SEQ ID NO: 408259 - DNA, 15 bp, Homo sapiens
catctctgcaggtag

SEQ ID NO: 408260 - DNA, 15 bp, Homo sapiens
ccatctctgcaggta

SEQ ID NO: 408261 - DNA, 15 bp, Homo sapiens
tccatctctgcaggt

SEQ ID NO: 408262 - DNA, 15 bp, Homo sapiens
ttccatctctgcagg

SEQ ID NO: 408263 - DNA, 15 bp, Homo sapiens
tttccatctctgcag

SEQ ID NO: 408264 - DNA, 15 bp, Homo sapiens
ctttccatctctgca

SEQ ID NO: 408265 - DNA, 15 bp, Homo sapiens
tctttccatctctgc

SEQ ID NO: 408266 - DNA, 15 bp, Homo sapiens
ctctttccatctctg

SEQ ID NO: 408267 - DNA, 15 bp, Homo sapiens
tctctttccatctct

SEQ ID NO: 408268 - DNA, 15 bp, Homo sapiens
gtctctttccatctc

SEQ ID NO: 408269 - DNA, 15 bp, Homo sapiens
agtctctttccatct

SEQ ID NO: 408270 - DNA, 15 bp, Homo sapiens
cagtctctttccatc

SEQ ID NO: 408271 - DNA, 15 bp, Homo sapiens
acagtctctttccat

SEQ ID NO: 408272 - DNA, 15 bp, Homo sapiens
cacagtctctttcca

SEQ ID NO: 408273 - DNA, 15 bp, Homo sapiens
tcacagtctctttcc

SEQ ID NO: 408274 - DNA, 15 bp, Homo sapiens
ctcacagtctctttc

SEQ ID NO: 408275 - DNA, 15 bp, Homo sapiens
gctcacagtctcttt

SEQ ID NO: 408276 - DNA, 15 bp, Homo sapiens
agctcacagtctctt

SEQ ID NO: 408277 - DNA, 15 bp, Homo sapiens
gagctcacagtctct

SEQ ID NO: 408278 - DNA, 15 bp, Homo sapiens
agagctcacagtctc

SEQ ID NO: 408279 - DNA, 15 bp, Homo sapiens
aagagctcacagtct

SEQ ID NO: 408280 - DNA, 15 bp, Homo sapiens
aaagagctcacagtc

SEQ ID NO: 408281 - DNA, 15 bp, Homo sapiens
caaagagctcacagt

SEQ ID NO: 408282 - DNA, 15 bp, Homo sapiens
tcaaagagctcacag

SEQ ID NO: 408283 - DNA, 15 bp, Homo sapiens
ttcaaagagctcaca

SEQ ID NO: 408284 - DNA, 15 bp, Homo sapiens
tttcaaagagctcac

SEQ ID NO: 408285 - DNA, 15 bp, Homo sapiens
atttcaaagagctca

SEQ ID NO: 408286 - DNA, 15 bp, Homo sapiens
catttcaaagagctc

SEQ ID NO: 408287 - DNA, 15 bp, Homo sapiens
acatttcaaagagct

SEQ ID NO: 408288 - DNA, 15 bp, Homo sapiens
gacatttcaaagagc

SEQ ID NO: 408289 - DNA, 15 bp, Homo sapiens
agacatttcaaagag

SEQ ID NO: 408290 - DNA, 15 bp, Homo sapiens
tagacatttcaaaga

SEQ ID NO: 408291 - DNA, 15 bp, Homo sapiens
atagacatttcaaag

SEQ ID NO: 408292 - DNA, 15 bp, Homo sapiens
catagacatttcaaa

SEQ ID NO: 408293 - DNA, 15 bp, Homo sapiens
tcatagacatttcaa

SEQ ID NO: 408294 - DNA, 15 bp, Homo sapiens
atcatagacatttca

SEQ ID NO: 408295 - DNA, 15 bp, Homo sapiens
gatcatagacatttc

SEQ ID NO: 408296 - DNA, 15 bp, Homo sapiens
tgatcatagacattt

SEQ ID NO: 408297 - DNA, 15 bp, Homo sapiens
ctgatcatagacatt

SEQ ID NO: 408298 - DNA, 15 bp, Homo sapiens
cctgatcatagacat

SEQ ID NO: 408299 - DNA, 15 bp, Homo sapiens
ccctgatcatagaca

SEQ ID NO: 408300 - DNA, 15 bp, Homo sapiens
accctgatcatagac

SEQ ID NO: 408301 - DNA, 15 bp, Homo sapiens
caccctgatcataga

SEQ ID NO: 408302 - DNA, 15 bp, Homo sapiens
tcaccctgatcatag

SEQ ID NO: 408303 - DNA, 15 bp, Homo sapiens
ttcaccctgatcata

SEQ ID NO: 408304 - DNA, 15 bp, Homo sapiens
tttcaccctgatcat

SEQ ID NO: 408305 - DNA, 15 bp, Homo sapiens
atttcaccctgatca

SEQ ID NO: 408306 - DNA, 15 bp, Homo sapiens
tatttcaccctgatc

SEQ ID NO: 408307 - DNA, 15 bp, Homo sapiens
gtatttcaccctgat

SEQ ID NO: 408308 - DNA, 15 bp, Homo sapiens
tgtatttcaccctga

SEQ ID NO: 408309 - DNA, 15 bp, Homo sapiens
gtgtatttcaccctg

SEQ ID NO: 408310 - DNA, 15 bp, Homo sapiens
tgtgtatttcaccct

SEQ ID NO: 408311 - DNA, 15 bp, Homo sapiens
atgtgtatttcaccc

SEQ ID NO: 408312 - DNA, 15 bp, Homo sapiens
tatgtgtatttcacc

SEQ ID NO: 408313 - DNA, 15 bp, Homo sapiens
ttatgtgtatttcac

SEQ ID NO: 408314 - DNA, 15 bp, Homo sapiens
attatgtgtatttca

SEQ ID NO: 408315 - DNA, 15 bp, Homo sapiens
tattatgtgtatttc

SEQ ID NO: 408316 - DNA, 15 bp, Homo sapiens
atattatgtgtattt

SEQ ID NO: 408317 - DNA, 15 bp, Homo sapiens
aatattatgtgtatt

SEQ ID NO: 408318 - DNA, 15 bp, Homo sapiens
caatattatgtgtat

SEQ ID NO: 408319 - DNA, 15 bp, Homo sapiens
acaatattatgtgta

SEQ ID NO: 408320 - DNA, 15 bp, Homo sapiens
tacaatattatgtgt

SEQ ID NO: 408321 - DNA, 15 bp, Homo sapiens
ttacaatattatgtg

SEQ ID NO: 408322 - DNA, 15 bp, Homo sapiens
cttacaatattatgt

SEQ ID NO: 408323 - DNA, 15 bp, Homo sapiens
acttacaatattatg

SEQ ID NO: 408324 - DNA, 15 bp, Homo sapiens
aacttacaatattat

SEQ ID NO: 408325 - DNA, 15 bp, Homo sapiens
taacttacaatatta

SEQ ID NO: 408326 - DNA, 15 bp, Homo sapiens
ttaacttacaatatt

SEQ ID NO: 408327 - DNA, 15 bp, Homo sapiens
attaacttacaatat

SEQ ID NO: 408328 - DNA, 15 bp, Homo sapiens
tattaacttacaata

SEQ ID NO: 408329 - DNA, 15 bp, Homo sapiens
ttattaacttacaat

SEQ ID NO: 408330 - DNA, 15 bp, Homo sapiens
gttattaacttacaa

SEQ ID NO: 408331 - DNA, 15 bp, Homo sapiens
tgttattaacttaca

SEQ ID NO: 408332 - DNA, 15 bp, Homo sapiens
gtgttattaacttac

SEQ ID NO: 408333 - DNA, 15 bp, Homo sapiens
cgtgttattaactta

SEQ ID NO: 408334 - DNA, 15 bp, Homo sapiens
ccgtgttattaactt

SEQ ID NO: 408335 - DNA, 15 bp, Homo sapiens
accgtgttattaact

SEQ ID NO: 408336 - DNA, 15 bp, Homo sapiens
taccgtgttattaac

SEQ ID NO: 408337 - DNA, 15 bp, Homo sapiens
ataccgtgttattaa

SEQ ID NO: 408338 - DNA, 15 bp, Homo sapiens
aataccgtgttatta

SEQ ID NO: 408339 - DNA, 15 bp, Homo sapiens
aaataccgtgttatt

SEQ ID NO: 408340 - DNA, 15 bp, Homo sapiens
gaaataccgtgttat

SEQ ID NO: 408341 - DNA, 15 bp, Homo sapiens
tgaaataccgtgtta

SEQ ID NO: 408342 - DNA, 15 bp, Homo sapiens
atgaaataccgtgtt

SEQ ID NO: 408343 - DNA, 15 bp, Homo sapiens
catgaaataccgtgt

SEQ ID NO: 408344 - DNA, 15 bp, Homo sapiens
acatgaaataccgtg

SEQ ID NO: 408345 - DNA, 15 bp, Homo sapiens
aacatgaaataccgt

SEQ ID NO: 408346 - DNA, 15 bp, Homo sapiens
taacatgaaataccg

SEQ ID NO: 408347 - DNA, 15 bp, Homo sapiens
ttaacatgaaatacc

SEQ ID NO: 408348 - DNA, 15 bp, Homo sapiens
tttaacatgaaatac

SEQ ID NO: 408349 - DNA, 15 bp, Homo sapiens
atttaacatgaaata

SEQ ID NO: 408350 - DNA, 15 bp, Homo sapiens
catttaacatgaaat

SEQ ID NO: 408351 - DNA, 15 bp, Homo sapiens
tcatttaacatgaaa

SEQ ID NO: 408352 - DNA, 15 bp, Homo sapiens
ttcatttaacatgaa

SEQ ID NO: 408353 - DNA, 15 bp, Homo sapiens
cttcatttaacatga

SEQ ID NO: 408354 - DNA, 15 bp, Homo sapiens
gcttcatttaacatg

SEQ ID NO: 408355 - DNA, 15 bp, Homo sapiens
ggcttcatttaacat

SEQ ID NO: 408356 - DNA, 15 bp, Homo sapiens
tggcttcatttaaca

SEQ ID NO: 408357 - DNA, 15 bp, Homo sapiens
atggcttcatttaac

SEQ ID NO: 408358 - DNA, 15 bp, Homo sapiens
tatggcttcatttaa

SEQ ID NO: 408359 - DNA, 15 bp, Homo sapiens
ttatggcttcattta

SEQ ID NO: 408360 - DNA, 15 bp, Homo sapiens
attatggcttcattt

SEQ ID NO: 408361 - DNA, 15 bp, Homo sapiens
cattatggcttcatt

SEQ ID NO: 408362 - DNA, 15 bp, Homo sapiens
ccattatggcttcat

SEQ ID NO: 408363 - DNA, 15 bp, Homo sapiens
cccattatggcttca

SEQ ID NO: 408364 - DNA, 15 bp, Homo sapiens
ccccattatggcttc

SEQ ID NO: 408365 - DNA, 15 bp, Homo sapiens
gccccattatggctt

SEQ ID NO: 408366 - DNA, 15 bp, Homo sapiens
agccccattatggct

SEQ ID NO: 408367 - DNA, 15 bp, Homo sapiens
aagccccattatggc

SEQ ID NO: 408368 - DNA, 15 bp, Homo sapiens
aaagccccattatgg

SEQ ID NO: 408369 - DNA, 15 bp, Homo sapiens
aaaagccccattatg

SEQ ID NO: 408370 - DNA, 15 bp, Homo sapiens
taaaagccccattat

SEQ ID NO: 408371 - DNA, 15 bp, Homo sapiens
ataaaagccccatta

SEQ ID NO: 408372 - DNA, 15 bp, Homo sapiens
aataaaagccccatt

SEQ ID NO: 408373 - DNA, 15 bp, Homo sapiens
caataaaagccccat

SEQ ID NO: 408374 - DNA, 15 bp, Homo sapiens
acaataaaagcccca

SEQ ID NO: 408375 - DNA, 15 bp, Homo sapiens
aacaataaaagcccc

SEQ ID NO: 408376 - DNA, 15 bp, Homo sapiens
taacaataaaagccc

SEQ ID NO: 408377 - DNA, 15 bp, Homo sapiens
ctaacaataaaagcc

SEQ ID NO: 408378 - DNA, 15 bp, Homo sapiens
cctaacaataaaagc

SEQ ID NO: 408379 - DNA, 15 bp, Homo sapiens
gcctaacaataaaag

SEQ ID NO: 408380 - DNA, 15 bp, Homo sapiens
tgcctaacaataaaa

SEQ ID NO: 408381 - DNA, 15 bp, Homo sapiens
atgcctaacaataaa

SEQ ID NO: 408382 - DNA, 15 bp, Homo sapiens
aatgcctaacaataa

SEQ ID NO: 408383 - DNA, 15 bp, Homo sapiens
gaatgcctaacaata

SEQ ID NO: 408384 - DNA, 15 bp, Homo sapiens
agaatgcctaacaat

SEQ ID NO: 408385 - DNA, 15 bp, Homo sapiens
cagaatgcctaacaa

SEQ ID NO: 408386 - DNA, 15 bp, Homo sapiens
gcagaatgcctaaca

SEQ ID NO: 408387 - DNA, 15 bp, Homo sapiens
ggcagaatgcctaac

SEQ ID NO: 408388 - DNA, 15 bp, Homo sapiens
aggcagaatgcctaa

SEQ ID NO: 408389 - DNA, 15 bp, Homo sapiens
caggcagaatgccta

SEQ ID NO: 408390 - DNA, 15 bp, Homo sapiens
tcaggcagaatgcct

SEQ ID NO: 408391 - DNA, 15 bp, Homo sapiens
atcaggcagaatgcc

SEQ ID NO: 408392 - DNA, 15 bp, Homo sapiens
tatcaggcagaatgc

SEQ ID NO: 408393 - DNA, 15 bp, Homo sapiens
ttatcaggcagaatg

SEQ ID NO: 408394 - DNA, 15 bp, Homo sapiens
tttatcaggcagaat

SEQ ID NO: 408395 - DNA, 15 bp, Homo sapiens
atttatcaggcagaa

SEQ ID NO: 408396 - DNA, 15 bp, Homo sapiens
aatttatcaggcaga

SEQ ID NO: 408397 - DNA, 15 bp, Homo sapiens
caatttatcaggcag

SEQ ID NO: 408398 - DNA, 15 bp, Homo sapiens
acaatttatcaggca

SEQ ID NO: 408399 - DNA, 15 bp, Homo sapiens
aacaatttatcaggc

SEQ ID NO: 408400 - DNA, 15 bp, Homo sapiens
caacaatttatcagg

SEQ ID NO: 408401 - DNA, 15 bp, Homo sapiens
tcaacaatttatcag

SEQ ID NO: 408402 - DNA, 15 bp, Homo sapiens
gtcaacaatttatca

SEQ ID NO: 408403 - DNA, 15 bp, Homo sapiens
tgtcaacaatttatc

SEQ ID NO: 408404 - DNA, 15 bp, Homo sapiens
atgtcaacaatttat

SEQ ID NO: 408405 - DNA, 15 bp, Homo sapiens
catgtcaacaattta

SEQ ID NO: 408406 - DNA, 15 bp, Homo sapiens
tcatgtcaacaattt

SEQ ID NO: 408407 - DNA, 15 bp, Homo sapiens
atcatgtcaacaatt

SEQ ID NO: 408408 - DNA, 15 bp, Homo sapiens
tatcatgtcaacaat

SEQ ID NO: 408409 - DNA, 15 bp, Homo sapiens
ttatcatgtcaacaa

SEQ ID NO: 408410 - DNA, 15 bp, Homo sapiens
tttatcatgtcaaca

SEQ ID NO: 408411 - DNA, 15 bp, Homo sapiens
atttatcatgtcaac

SEQ ID NO: 408412 - DNA, 15 bp, Homo sapiens
tatttatcatgtcaa

SEQ ID NO: 408413 - DNA, 15 bp, Homo sapiens
atatttatcatgtca

SEQ ID NO: 408414 - DNA, 15 bp, Homo sapiens
tatatttatcatgtc

SEQ ID NO: 408415 - DNA, 15 bp, Homo sapiens
ctatatttatcatgt

SEQ ID NO: 408416 - DNA, 15 bp, Homo sapiens
tctatatttatcatg

SEQ ID NO: 408417 - DNA, 15 bp, Homo sapiens
atctatatttatcat

SEQ ID NO: 408418 - DNA, 15 bp, Homo sapiens
aatctatatttatca

SEQ ID NO: 408419 - DNA, 15 bp, Homo sapiens
taatctatatttatc

SEQ ID NO: 408420 - DNA, 15 bp, Homo sapiens
ttaatctatatttat

SEQ ID NO: 408421 - DNA, 15 bp, Homo sapiens
attaatctatattta

SEQ ID NO: 408422 - DNA, 15 bp, Homo sapiens
tattaatctatattt

SEQ ID NO: 408423 - DNA, 15 bp, Homo sapiens
ttattaatctatatt

SEQ ID NO: 408424 - DNA, 15 bp, Homo sapiens
gttattaatctatat

SEQ ID NO: 408425 - DNA, 15 bp, Homo sapiens
ggttattaatctata

SEQ ID NO: 408426 - DNA, 15 bp, Homo sapiens
aggttattaatctat

SEQ ID NO: 408427 - DNA, 15 bp, Homo sapiens
caggttattaatcta

SEQ ID NO: 408428 - DNA, 15 bp, Homo sapiens
tcaggttattaatct

SEQ ID NO: 408429 - DNA, 15 bp, Homo sapiens
ttcaggttattaatc

SEQ ID NO: 408430 - DNA, 15 bp, Homo sapiens
tttcaggttattaat

SEQ ID NO: 408431 - DNA, 15 bp, Homo sapiens
atttcaggttattaa

SEQ ID NO: 408432 - DNA, 15 bp, Homo sapiens
tatttcaggttatta

SEQ ID NO: 408433 - DNA, 15 bp, Homo sapiens
atatttcaggttatt

SEQ ID NO: 408434 - DNA, 15 bp, Homo sapiens
gatatttcaggttat

SEQ ID NO: 408435 - DNA, 15 bp, Homo sapiens
agatatttcaggtta

SEQ ID NO: 408436 - DNA, 15 bp, Homo sapiens
aagatatttcaggtt

SEQ ID NO: 408437 - DNA, 15 bp, Homo sapiens
aaagatatttcaggt

SEQ ID NO: 408438 - DNA, 15 bp, Homo sapiens
aaaagatatttcagg

SEQ ID NO: 408439 - DNA, 15 bp, Homo sapiens
aaaaagatatttcag

SEQ ID NO: 408440 - DNA, 15 bp, Homo sapiens
caaaaagatatttca

SEQ ID NO: 408441 - DNA, 15 bp, Homo sapiens
gcaaaaagatatttc

SEQ ID NO: 408442 - DNA, 15 bp, Homo sapiens
agcaaaaagatattt

SEQ ID NO: 408443 - DNA, 15 bp, Homo sapiens
gagcaaaaagatatt

SEQ ID NO: 408444 - DNA, 15 bp, Homo sapiens
ggagcaaaaagatat

SEQ ID NO: 408445 - DNA, 15 bp, Homo sapiens
gggagcaaaaagata

SEQ ID NO: 408446 - DNA, 15 bp, Homo sapiens
agggagcaaaaagat

SEQ ID NO: 408447 - DNA, 15 bp, Homo sapiens
gagggagcaaaaaga

SEQ ID NO: 408448 - DNA, 15 bp, Homo sapiens
tgagggagcaaaaag

SEQ ID NO: 408449 - DNA, 15 bp, Homo sapiens
ctgagggagcaaaaa

SEQ ID NO: 408450 - DNA, 15 bp, Homo sapiens
actgagggagcaaaa

SEQ ID NO: 408451 - DNA, 15 bp, Homo sapiens
gactgagggagcaaa

SEQ ID NO: 408452 - DNA, 15 bp, Homo sapiens
ggactgagggagcaa

SEQ ID NO: 408453 - DNA, 15 bp, Homo sapiens
aggactgagggagca

SEQ ID NO: 408454 - DNA, 15 bp, Homo sapiens
aaggactgagggagc

SEQ ID NO: 408455 - DNA, 15 bp, Homo sapiens
gaaggactgagggag

SEQ ID NO: 408456 - DNA, 15 bp, Homo sapiens
tgaaggactgaggga

SEQ ID NO: 408457 - DNA, 15 bp, Homo sapiens
ttgaaggactgaggg

SEQ ID NO: 408458 - DNA, 15 bp, Homo sapiens
cttgaaggactgagg

SEQ ID NO: 408459 - DNA, 15 bp, Homo sapiens
acttgaaggactgag

SEQ ID NO: 408460 - DNA, 15 bp, Homo sapiens
tacttgaaggactga

SEQ ID NO: 408461 - DNA, 15 bp, Homo sapiens
ttacttgaaggactg

SEQ ID NO: 408462 - DNA, 15 bp, Homo sapiens
attacttgaaggact

SEQ ID NO: 408463 - DNA, 15 bp, Homo sapiens
tattacttgaaggac

SEQ ID NO: 408464 - DNA, 15 bp, Homo sapiens
ctattacttgaagga

SEQ ID NO: 408465 - DNA, 15 bp, Homo sapiens
cctattacttgaagg

SEQ ID NO: 408466 - DNA, 15 bp, Homo sapiens
tcctattacttgaag

SEQ ID NO: 408467 - DNA, 15 bp, Homo sapiens
ttcctattacttgaa

SEQ ID NO: 408468 - DNA, 15 bp, Homo sapiens
attcctattacttga

SEQ ID NO: 408469 - DNA, 15 bp, Homo sapiens
aattcctattacttg

SEQ ID NO: 408470 - DNA, 15 bp, Homo sapiens
aaattcctattactt

SEQ ID NO: 408471 - DNA, 15 bp, Homo sapiens
caaattcctattact

SEQ ID NO: 408472 - DNA, 15 bp, Homo sapiens
tcaaattcctattac

SEQ ID NO: 408473 - DNA, 15 bp, Homo sapiens
ttcaaattcctatta

SEQ ID NO: 408474 - DNA, 15 bp, Homo sapiens
tttcaaattcctatt

SEQ ID NO: 408475 - DNA, 15 bp, Homo sapiens
gtttcaaattcctat

SEQ ID NO: 408476 - DNA, 15 bp, Homo sapiens
tgtttcaaattccta

SEQ ID NO: 408477 - DNA, 15 bp, Homo sapiens
gtgtttcaaattcct

SEQ ID NO: 408478 - DNA, 15 bp, Homo sapiens
agtgtttcaaattcc

SEQ ID NO: 408479 - DNA, 15 bp, Homo sapiens
aagtgtttcaaattc

SEQ ID NO: 408480 - DNA, 15 bp, Homo sapiens
taagtgtttcaaatt

SEQ ID NO: 408481 - DNA, 15 bp, Homo sapiens
ataagtgtttcaaat

SEQ ID NO: 408482 - DNA, 15 bp, Homo sapiens
aataagtgtttcaaa

SEQ ID NO: 408483 - DNA, 15 bp, Homo sapiens
aaataagtgtttcaa

SEQ ID NO: 408484 - DNA, 15 bp, Homo sapiens
aaaataagtgtttca

SEQ ID NO: 408485 - DNA, 15 bp, Homo sapiens
taaaataagtgtttc

SEQ ID NO: 408486 - DNA, 15 bp, Homo sapiens
ataaaataagtgttt

SEQ ID NO: 408487 - DNA, 15 bp, Homo sapiens
tataaaataagtgtt

SEQ ID NO: 408488 - DNA, 15 bp, Homo sapiens
ttataaaataagtgt

SEQ ID NO: 408489 - DNA, 15 bp, Homo sapiens
gttataaaataagtg

SEQ ID NO: 408490 - DNA, 15 bp, Homo sapiens
agttataaaataagt

SEQ ID NO: 408491 - DNA, 15 bp, Homo sapiens
tagttataaaataag

SEQ ID NO: 408492 - DNA, 15 bp, Homo sapiens
atagttataaaataa

SEQ ID NO: 408493 - DNA, 15 bp, Homo sapiens
aatagttataaaata

SEQ ID NO: 408494 - DNA, 15 bp, Homo sapiens
caatagttataaaat

SEQ ID NO: 408495 - DNA, 15 bp, Homo sapiens
acaatagttataaaa

SEQ ID NO: 408496 - DNA, 15 bp, Homo sapiens
tacaatagttataaa

SEQ ID NO: 408497 - DNA, 15 bp, Homo sapiens
gtacaatagttataa

SEQ ID NO: 408498 - DNA, 15 bp, Homo sapiens
tgtacaatagttata

SEQ ID NO: 408499 - DNA, 15 bp, Homo sapiens
ttgtacaatagttat

SEQ ID NO: 408500 - DNA, 15 bp, Homo sapiens
attgtacaatagtta

SEQ ID NO: 408501 - DNA, 15 bp, Homo sapiens
aattgtacaatagtt

SEQ ID NO: 408502 - DNA, 15 bp, Homo sapiens
gaattgtacaatagt

SEQ ID NO: 408503 - DNA, 15 bp, Homo sapiens
ggaattgtacaatag

SEQ ID NO: 408504 - DNA, 15 bp, Homo sapiens
aggaattgtacaata

SEQ ID NO: 408505 - DNA, 15 bp, Homo sapiens
aaggaattgtacaat

SEQ ID NO: 408506 - DNA, 15 bp, Homo sapiens
gaaggaattgtacaa

SEQ ID NO: 408507 - DNA, 15 bp, Homo sapiens
agaaggaattgtaca

SEQ ID NO: 408508 - DNA, 15 bp, Homo sapiens
cagaaggaattgtac

SEQ ID NO: 408509 - DNA, 15 bp, Homo sapiens
acagaaggaattgta

SEQ ID NO: 408510 - DNA, 15 bp, Homo sapiens
aacagaaggaattgt

SEQ ID NO: 408511 - DNA, 15 bp, Homo sapiens
aaacagaaggaattg

SEQ ID NO: 408512 - DNA, 15 bp, Homo sapiens
aaaacagaaggaatt

SEQ ID NO: 408513 - DNA, 15 bp, Homo sapiens
aaaaacagaaggaat

SEQ ID NO: 408514 - DNA, 15 bp, Homo sapiens
gaaaaacagaaggaa

SEQ ID NO: 408515 - DNA, 15 bp, Homo sapiens
tgaaaaacagaagga

SEQ ID NO: 408516 - DNA, 15 bp, Homo sapiens
ttgaaaaacagaagg

SEQ ID NO: 408517 - DNA, 15 bp, Homo sapiens
gttgaaaaacagaag

SEQ ID NO: 408518 - DNA, 15 bp, Homo sapiens
tgttgaaaaacagaa

SEQ ID NO: 408519 - DNA, 15 bp, Homo sapiens
ttgttgaaaaacaga

SEQ ID NO: 408520 - DNA, 15 bp, Homo sapiens
tttgttgaaaaacag

SEQ ID NO: 408521 - DNA, 15 bp, Homo sapiens
ttttgttgaaaaaca

SEQ ID NO: 408522 - DNA, 15 bp, Homo sapiens
cttttgttgaaaaac

SEQ ID NO: 408523 - DNA, 15 bp, Homo sapiens
ccttttgttgaaaaa

SEQ ID NO: 408524 - DNA, 15 bp, Homo sapiens
accttttgttgaaaa

SEQ ID NO: 408525 - DNA, 15 bp, Homo sapiens
gaccttttgttgaaa

SEQ ID NO: 408526 - DNA, 15 bp, Homo sapiens
tgaccttttgttgaa

SEQ ID NO: 408527 - DNA, 15 bp, Homo sapiens
atgaccttttgttga

SEQ ID NO: 408528 - DNA, 15 bp, Homo sapiens
aatgaccttttgttg

SEQ ID NO: 408529 - DNA, 15 bp, Homo sapiens
aaatgaccttttgtt

SEQ ID NO: 408530 - DNA, 15 bp, Homo sapiens
aaaatgaccttttgt

SEQ ID NO: 408531 - DNA, 15 bp, Homo sapiens
aaaaatgaccttttg

SEQ ID NO: 408532 - DNA, 15 bp, Homo sapiens
gaaaaatgacctttt

SEQ ID NO: 408533 - DNA, 15 bp, Homo sapiens
agaaaaatgaccttt

SEQ ID NO: 408534 - DNA, 15 bp, Homo sapiens
tagaaaaatgacctt

SEQ ID NO: 408535 - DNA, 15 bp, Homo sapiens
atagaaaaatgacct

SEQ ID NO: 408536 - DNA, 15 bp, Homo sapiens
tatagaaaaatgacc

SEQ ID NO: 408537 - DNA, 15 bp, Homo sapiens
ttatagaaaaatgac

SEQ ID NO: 408538 - DNA, 15 bp, Homo sapiens
gttatagaaaaatga

SEQ ID NO: 408539 - DNA, 15 bp, Homo sapiens
agttatagaaaaatg

SEQ ID NO: 408540 - DNA, 15 bp, Homo sapiens
tagttatagaaaaat

SEQ ID NO: 408541 - DNA, 15 bp, Homo sapiens
atagttatagaaaaa

SEQ ID NO: 408542 - DNA, 15 bp, Homo sapiens
catagttatagaaaa

SEQ ID NO: 408543 - DNA, 15 bp, Homo sapiens
acatagttatagaaa

SEQ ID NO: 408544 - DNA, 15 bp, Homo sapiens
tacatagttatagaa

SEQ ID NO: 408545 - DNA, 15 bp, Homo sapiens
ctacatagttataga

SEQ ID NO: 408546 - DNA, 15 bp, Homo sapiens
tctacatagttatag

SEQ ID NO: 408547 - DNA, 15 bp, Homo sapiens
gtctacatagttata

SEQ ID NO: 408548 - DNA, 15 bp, Homo sapiens
agtctacatagttat

SEQ ID NO: 408549 - DNA, 15 bp, Homo sapiens
tagtctacatagtta

SEQ ID NO: 408550 - DNA, 15 bp, Homo sapiens
ctagtctacatagtt

SEQ ID NO: 408551 - DNA, 15 bp, Homo sapiens
actagtctacatagt

SEQ ID NO: 408552 - DNA, 15 bp, Homo sapiens
cactagtctacatag

SEQ ID NO: 408553 - DNA, 15 bp, Homo sapiens
gcactagtctacata

SEQ ID NO: 408554 - DNA, 15 bp, Homo sapiens
tgcactagtctacat

SEQ ID NO: 408555 - DNA, 15 bp, Homo sapiens
atgcactagtctaca

SEQ ID NO: 408556 - DNA, 15 bp, Homo sapiens
catgcactagtctac

SEQ ID NO: 408557 - DNA, 15 bp, Homo sapiens
tcatgcactagtcta

SEQ ID NO: 408558 - DNA, 15 bp, Homo sapiens
ctcatgcactagtct

SEQ ID NO: 408559 - DNA, 15 bp, Homo sapiens
cctcatgcactagtc

SEQ ID NO: 408560 - DNA, 15 bp, Homo sapiens
tcctcatgcactagt

SEQ ID NO: 408561 - DNA, 15 bp, Homo sapiens
ttcctcatgcactag

SEQ ID NO: 408562 - DNA, 15 bp, Homo sapiens
attcctcatgcacta

SEQ ID NO: 408563 - DNA, 15 bp, Homo sapiens
aattcctcatgcact

SEQ ID NO: 408564 - DNA, 15 bp, Homo sapiens
taattcctcatgcac

SEQ ID NO: 408565 - DNA, 15 bp, Homo sapiens
ctaattcctcatgca

SEQ ID NO: 408566 - DNA, 15 bp, Homo sapiens
actaattcctcatgc

SEQ ID NO: 408567 - DNA, 15 bp, Homo sapiens
gactaattcctcatg

SEQ ID NO: 408568 - DNA, 15 bp, Homo sapiens
tgactaattcctcat

SEQ ID NO: 408569 - DNA, 15 bp, Homo sapiens
atgactaattcctca

SEQ ID NO: 408570 - DNA, 15 bp, Homo sapiens
aatgactaattcctc

SEQ ID NO: 408571 - DNA, 15 bp, Homo sapiens
caatgactaattcct

SEQ ID NO: 408572 - DNA, 15 bp, Homo sapiens
tcaatgactaattcc

SEQ ID NO: 408573 - DNA, 15 bp, Homo sapiens
ttcaatgactaattc

SEQ ID NO: 408574 - DNA, 15 bp, Homo sapiens
tttcaatgactaatt

SEQ ID NO: 408575 - DNA, 15 bp, Homo sapiens
ctttcaatgactaat

SEQ ID NO: 408576 - DNA, 15 bp, Homo sapiens
tctttcaatgactaa

SEQ ID NO: 408577 - DNA, 15 bp, Homo sapiens
ttctttcaatgacta

SEQ ID NO: 408578 - DNA, 15 bp, Homo sapiens
tttctttcaatgact

SEQ ID NO: 408579 - DNA, 15 bp, Homo sapiens
atttctttcaatgac

SEQ ID NO: 408580 - DNA, 15 bp, Homo sapiens
tatttctttcaatga

SEQ ID NO: 408581 - DNA, 15 bp, Homo sapiens
ctatttctttcaatg

SEQ ID NO: 408582 - DNA, 15 bp, Homo sapiens
actatttctttcaat

SEQ ID NO: 408583 - DNA, 15 bp, Homo sapiens
aactatttctttcaa

SEQ ID NO: 408584 - DNA, 15 bp, Homo sapiens
taactatttctttca

SEQ ID NO: 408585 - DNA, 15 bp, Homo sapiens
ataactatttctttc

SEQ ID NO: 408586 - DNA, 15 bp, Homo sapiens
tataactatttcttt

SEQ ID NO: 408587 - DNA, 15 bp, Homo sapiens
atataactatttctt

SEQ ID NO: 408588 - DNA, 15 bp, Homo sapiens
gatataactatttct

SEQ ID NO: 408589 - DNA, 15 bp, Homo sapiens
tgatataactatttc

SEQ ID NO: 408590 - DNA, 15 bp, Homo sapiens
ctgatataactattt

SEQ ID NO: 408591 - DNA, 15 bp, Homo sapiens
actgatataactatt

SEQ ID NO: 408592 - DNA, 15 bp, Homo sapiens
tactgatataactat

SEQ ID NO: 408593 - DNA, 15 bp, Homo sapiens
ttactgatataacta

SEQ ID NO: 408594 - DNA, 15 bp, Homo sapiens
attactgatataact

SEQ ID NO: 408595 - DNA, 15 bp, Homo sapiens
aattactgatataac

SEQ ID NO: 408596 - DNA, 15 bp, Homo sapiens
taattactgatataa

SEQ ID NO: 408597 - DNA, 15 bp, Homo sapiens
ctaattactgatata

SEQ ID NO: 408598 - DNA, 15 bp, Homo sapiens
tctaattactgatat

SEQ ID NO: 408599 - DNA, 15 bp, Homo sapiens
ttctaattactgata

SEQ ID NO: 408600 - DNA, 15 bp, Homo sapiens
cttctaattactgat

SEQ ID NO: 408601 - DNA, 15 bp, Homo sapiens
tcttctaattactga

SEQ ID NO: 408602 - DNA, 15 bp, Homo sapiens
ttcttctaattactg

SEQ ID NO: 408603 - DNA, 15 bp, Homo sapiens
tttcttctaattact

SEQ ID NO: 408604 - DNA, 15 bp, Homo sapiens
ctttcttctaattac

SEQ ID NO: 408605 - DNA, 15 bp, Homo sapiens
gctttcttctaatta

SEQ ID NO: 408606 - DNA, 15 bp, Homo sapiens
tgctttcttctaatt

SEQ ID NO: 408607 - DNA, 15 bp, Homo sapiens
ctgctttcttctaat

SEQ ID NO: 408608 - DNA, 15 bp, Homo sapiens
actgctttcttctaa

SEQ ID NO: 408609 - DNA, 15 bp, Homo sapiens
cactgctttcttcta

SEQ ID NO: 408610 - DNA, 15 bp, Homo sapiens
gcactgctttcttct

SEQ ID NO: 408611 - DNA, 15 bp, Homo sapiens
agcactgctttcttc

SEQ ID NO: 408612 - DNA, 15 bp, Homo sapiens
aagcactgctttctt

SEQ ID NO: 408613 - DNA, 15 bp, Homo sapiens
aaagcactgctttct

SEQ ID NO: 408614 - DNA, 15 bp, Homo sapiens
taaagcactgctttc

SEQ ID NO: 408615 - DNA, 15 bp, Homo sapiens
gtaaagcactgcttt

SEQ ID NO: 408616 - DNA, 15 bp, Homo sapiens
tgtaaagcactgctt

SEQ ID NO: 408617 - DNA, 15 bp, Homo sapiens
atgtaaagcactgct

SEQ ID NO: 408618 - DNA, 15 bp, Homo sapiens
aatgtaaagcactgc

SEQ ID NO: 408619 - DNA, 15 bp, Homo sapiens
aaatgtaaagcactg

SEQ ID NO: 408620 - DNA, 15 bp, Homo sapiens
caaatgtaaagcact

SEQ ID NO: 408621 - DNA, 15 bp, Homo sapiens
acaaatgtaaagcac

SEQ ID NO: 408622 - DNA, 15 bp, Homo sapiens
aacaaatgtaaagca

SEQ ID NO: 408623 - DNA, 15 bp, Homo sapiens
aaacaaatgtaaagc

SEQ ID NO: 408624 - DNA, 15 bp, Homo sapiens
aaaacaaatgtaaag

SEQ ID NO: 408625 - DNA, 15 bp, Homo sapiens
taaaacaaatgtaaa

SEQ ID NO: 408626 - DNA, 15 bp, Homo sapiens
gtaaaacaaatgtaa

SEQ ID NO: 408627 - DNA, 15 bp, Homo sapiens
agtaaaacaaatgta

SEQ ID NO: 408628 - DNA, 15 bp, Homo sapiens
gagtaaaacaaatgt

SEQ ID NO: 408629 - DNA, 15 bp, Homo sapiens
ggagtaaaacaaatg

SEQ ID NO: 408630 - DNA, 15 bp, Homo sapiens
tggagtaaaacaaat

SEQ ID NO: 408631 - DNA, 15 bp, Homo sapiens
ctggagtaaaacaaa

SEQ ID NO: 408632 - DNA, 15 bp, Homo sapiens
actggagtaaaacaa

SEQ ID NO: 408633 - DNA, 15 bp, Homo sapiens
aactggagtaaaaca

SEQ ID NO: 408634 - DNA, 15 bp, Homo sapiens
aaactggagtaaaac

SEQ ID NO: 408635 - DNA, 15 bp, Homo sapiens
aaaactggagtaaaa

SEQ ID NO: 408636 - DNA, 15 bp, Homo sapiens
aaaaactggagtaaa

SEQ ID NO: 408637 - DNA, 15 bp, Homo sapiens
aaaaaactggagtaa

SEQ ID NO: 408638 - DNA, 15 bp, Homo sapiens
taaaaaactggagta

SEQ ID NO: 408639 - DNA, 15 bp, Homo sapiens
gtaaaaaactggagt

SEQ ID NO: 408640 - DNA, 15 bp, Homo sapiens
agtaaaaaactggag

SEQ ID NO: 408641 - DNA, 15 bp, Homo sapiens
gagtaaaaaactgga

SEQ ID NO: 408642 - DNA, 15 bp, Homo sapiens
tgagtaaaaaactgg

SEQ ID NO: 408643 - DNA, 15 bp, Homo sapiens
atgagtaaaaaactg

SEQ ID NO: 408644 - DNA, 15 bp, Homo sapiens
aatgagtaaaaaact

SEQ ID NO: 408645 - DNA, 15 bp, Homo sapiens
gaatgagtaaaaaac

SEQ ID NO: 408646 - DNA, 15 bp, Homo sapiens
agaatgagtaaaaaa

SEQ ID NO: 408647 - DNA, 15 bp, Homo sapiens
aagaatgagtaaaaa

SEQ ID NO: 408648 - DNA, 15 bp, Homo sapiens
aaagaatgagtaaaa

SEQ ID NO: 408649 - DNA, 15 bp, Homo sapiens
gaaagaatgagtaaa

SEQ ID NO: 408650 - DNA, 15 bp, Homo sapiens
tgaaagaatgagtaa

SEQ ID NO: 408651 - DNA, 15 bp, Homo sapiens
ttgaaagaatgagta

SEQ ID NO: 408652 - DNA, 15 bp, Homo sapiens
tttgaaagaatgagt

SEQ ID NO: 408653 - DNA, 15 bp, Homo sapiens
ttttgaaagaatgag

SEQ ID NO: 408654 - DNA, 15 bp, Homo sapiens
tttttgaaagaatga

SEQ ID NO: 408655 - DNA, 15 bp, Homo sapiens
ctttttgaaagaatg

SEQ ID NO: 408656 - DNA, 15 bp, Homo sapiens
actttttgaaagaat

SEQ ID NO: 408657 - DNA, 15 bp, Homo sapiens
aactttttgaaagaa

SEQ ID NO: 408658 - DNA, 15 bp, Homo sapiens
taactttttgaaaga

SEQ ID NO: 408659 - DNA, 15 bp, Homo sapiens
ataactttttgaaag

SEQ ID NO: 408660 - DNA, 15 bp, Homo sapiens
aataactttttgaaa

SEQ ID NO: 408661 - DNA, 15 bp, Homo sapiens
aaataactttttgaa

SEQ ID NO: 408662 - DNA, 15 bp, Homo sapiens
gaaataactttttga

SEQ ID NO: 408663 - DNA, 15 bp, Homo sapiens
tgaaataactttttg

SEQ ID NO: 408664 - DNA, 15 bp, Homo sapiens
ctgaaataacttttt

SEQ ID NO: 408665 - DNA, 15 bp, Homo sapiens
cctgaaataactttt

SEQ ID NO: 408666 - DNA, 15 bp, Homo sapiens
tcctgaaataacttt

SEQ ID NO: 408667 - DNA, 15 bp, Homo sapiens
ttcctgaaataactt

SEQ ID NO: 408668 - DNA, 15 bp, Homo sapiens
gttcctgaaataact

SEQ ID NO: 408669 - DNA, 15 bp, Homo sapiens
ggttcctgaaataac

SEQ ID NO: 408670 - DNA, 15 bp, Homo sapiens
gggttcctgaaataa

SEQ ID NO: 408671 - DNA, 15 bp, Homo sapiens
ggggttcctgaaata

SEQ ID NO: 408672 - DNA, 15 bp, Homo sapiens
aggggttcctgaaat

SEQ ID NO: 408673 - DNA, 15 bp, Homo sapiens
taggggttcctgaaa

SEQ ID NO: 408674 - DNA, 15 bp, Homo sapiens
gtaggggttcctgaa

SEQ ID NO: 408675 - DNA, 15 bp, Homo sapiens
agtaggggttcctga

SEQ ID NO: 408676 - DNA, 15 bp, Homo sapiens
tagtaggggttcctg

SEQ ID NO: 408677 - DNA, 15 bp, Homo sapiens
atagtaggggttcct

SEQ ID NO: 408678 - DNA, 15 bp, Homo sapiens
catagtaggggttcc

SEQ ID NO: 408679 - DNA, 15 bp, Homo sapiens
acatagtaggggttc

SEQ ID NO: 408680 - DNA, 15 bp, Homo sapiens
cacatagtaggggtt

SEQ ID NO: 408681 - DNA, 15 bp, Homo sapiens
gcacatagtaggggt

SEQ ID NO: 408682 - DNA, 15 bp, Homo sapiens
agcacatagtagggg

SEQ ID NO: 408683 - DNA, 15 bp, Homo sapiens
tagcacatagtaggg

SEQ ID NO: 408684 - DNA, 15 bp, Homo sapiens
atagcacatagtagg

SEQ ID NO: 408685 - DNA, 15 bp, Homo sapiens
catagcacatagtag

SEQ ID NO: 408686 - DNA, 15 bp, Homo sapiens
gcatagcacatagta

SEQ ID NO: 408687 - DNA, 15 bp, Homo sapiens
agcatagcacatagt

SEQ ID NO: 408688 - DNA, 15 bp, Homo sapiens
tagcatagcacatag

SEQ ID NO: 408689 - DNA, 15 bp, Homo sapiens
ttagcatagcacata

SEQ ID NO: 408690 - DNA, 15 bp, Homo sapiens
tttagcatagcacat

SEQ ID NO: 408691 - DNA, 15 bp, Homo sapiens
atttagcatagcaca

SEQ ID NO: 408692 - DNA, 15 bp, Homo sapiens
catttagcatagcac

SEQ ID NO: 408693 - DNA, 15 bp, Homo sapiens
acatttagcatagca

SEQ ID NO: 408694 - DNA, 15 bp, Homo sapiens
aacatttagcatagc

SEQ ID NO: 408695 - DNA, 15 bp, Homo sapiens
taacatttagcatag

SEQ ID NO: 408696 - DNA, 15 bp, Homo sapiens
ctaacatttagcata

SEQ ID NO: 408697 - DNA, 15 bp, Homo sapiens
cctaacatttagcat

SEQ ID NO: 408698 - DNA, 15 bp, Homo sapiens
acctaacatttagca

SEQ ID NO: 408699 - DNA, 15 bp, Homo sapiens
cacctaacatttagc

SEQ ID NO: 408700 - DNA, 15 bp, Homo sapiens
ccacctaacatttag

SEQ ID NO: 408701 - DNA, 15 bp, Homo sapiens
tccacctaacattta

SEQ ID NO: 408702 - DNA, 15 bp, Homo sapiens
atccacctaacattt

SEQ ID NO: 408703 - DNA, 15 bp, Homo sapiens
catccacctaacatt

SEQ ID NO: 408704 - DNA, 15 bp, Homo sapiens
tcatccacctaacat

SEQ ID NO: 408705 - DNA, 15 bp, Homo sapiens
atcatccacctaaca

SEQ ID NO: 408706 - DNA, 15 bp, Homo sapiens
catcatccacctaac

SEQ ID NO: 408707 - DNA, 15 bp, Homo sapiens
ccatcatccacctaa

SEQ ID NO: 408708 - DNA, 15 bp, Homo sapiens
accatcatccaccta

SEQ ID NO: 408709 - DNA, 15 bp, Homo sapiens
caccatcatccacct

SEQ ID NO: 408710 - DNA, 15 bp, Homo sapiens
tcaccatcatccacc

SEQ ID NO: 408711 - DNA, 15 bp, Homo sapiens
gtcaccatcatccac

SEQ ID NO: 408712 - DNA, 15 bp, Homo sapiens
ggtcaccatcatcca

SEQ ID NO: 408713 - DNA, 15 bp, Homo sapiens
tggtcaccatcatcc

SEQ ID NO: 408714 - DNA, 15 bp, Homo sapiens
ttggtcaccatcatc

SEQ ID NO: 408715 - DNA, 15 bp, Homo sapiens
tttggtcaccatcat

SEQ ID NO: 408716 - DNA, 15 bp, Homo sapiens
gtttggtcaccatca

SEQ ID NO: 408717 - DNA, 15 bp, Homo sapiens
ggtttggtcaccatc

SEQ ID NO: 408718 - DNA, 15 bp, Homo sapiens
tggtttggtcaccat

SEQ ID NO: 408719 - DNA, 15 bp, Homo sapiens
ttggtttggtcacca

SEQ ID NO: 408720 - DNA, 15 bp, Homo sapiens
tttggtttggtcacc

SEQ ID NO: 408721 - DNA, 15 bp, Homo sapiens
gtttggtttggtcac

SEQ ID NO: 408722 - DNA, 15 bp, Homo sapiens
ggtttggtttggtca

SEQ ID NO: 408723 - DNA, 15 bp, Homo sapiens
tggtttggtttggtc

SEQ ID NO: 408724 - DNA, 15 bp, Homo sapiens
ttggtttggtttggt

SEQ ID NO: 408725 - DNA, 15 bp, Homo sapiens
attggtttggtttgg

SEQ ID NO: 408726 - DNA, 15 bp, Homo sapiens
gattggtttggtttg

SEQ ID NO: 408727 - DNA, 15 bp, Homo sapiens
ggattggtttggttt

SEQ ID NO: 408728 - DNA, 15 bp, Homo sapiens
gggattggtttggtt

SEQ ID NO: 408729 - DNA, 15 bp, Homo sapiens
agggattggtttggt

SEQ ID NO: 408730 - DNA, 15 bp, Homo sapiens
cagggattggtttgg

SEQ ID NO: 408731 - DNA, 15 bp, Homo sapiens
acagggattggtttg

SEQ ID NO: 408732 - DNA, 15 bp, Homo sapiens
aacagggattggttt

SEQ ID NO: 408733 - DNA, 15 bp, Homo sapiens
aaacagggattggtt

SEQ ID NO: 408734 - DNA, 15 bp, Homo sapiens
gaaacagggattggt

SEQ ID NO: 408735 - DNA, 15 bp, Homo sapiens
ggaaacagggattgg

SEQ ID NO: 408736 - DNA, 15 bp, Homo sapiens
tggaaacagggattg

SEQ ID NO: 408737 - DNA, 15 bp, Homo sapiens
atggaaacagggatt

SEQ ID NO: 408738 - DNA, 15 bp, Homo sapiens
catggaaacagggat

SEQ ID NO: 408739 - DNA, 15 bp, Homo sapiens
ccatggaaacaggga

SEQ ID NO: 408740 - DNA, 15 bp, Homo sapiens
tccatggaaacaggg

SEQ ID NO: 408741 - DNA, 15 bp, Homo sapiens
ttccatggaaacagg

SEQ ID NO: 408742 - DNA, 15 bp, Homo sapiens
gttccatggaaacag

SEQ ID NO: 408743 - DNA, 15 bp, Homo sapiens
tgttccatggaaaca

SEQ ID NO: 408744 - DNA, 15 bp, Homo sapiens
ttgttccatggaaac

SEQ ID NO: 408745 - DNA, 15 bp, Homo sapiens
tttgttccatggaaa

SEQ ID NO: 408746 - DNA, 15 bp, Homo sapiens
ttttgttccatggaa

SEQ ID NO: 408747 - DNA, 15 bp, Homo sapiens
tttttgttccatgga

SEQ ID NO: 408748 - DNA, 15 bp, Homo sapiens
atttttgttccatgg

SEQ ID NO: 408749 - DNA, 15 bp, Homo sapiens
gatttttgttccatg

SEQ ID NO: 408750 - DNA, 15 bp, Homo sapiens
agatttttgttccat

SEQ ID NO: 408751 - DNA, 15 bp, Homo sapiens
aagatttttgttcca

SEQ ID NO: 408752 - DNA, 15 bp, Homo sapiens
aaagatttttgttcc

SEQ ID NO: 408753 - DNA, 15 bp, Homo sapiens
caaagatttttgttc

SEQ ID NO: 408754 - DNA, 15 bp, Homo sapiens
tcaaagatttttgtt

SEQ ID NO: 408755 - DNA, 15 bp, Homo sapiens
gtcaaagatttttgt

SEQ ID NO: 408756 - DNA, 15 bp, Homo sapiens
tgtcaaagatttttg

SEQ ID NO: 408757 - DNA, 15 bp, Homo sapiens
ttgtcaaagattttt

SEQ ID NO: 408758 - DNA, 15 bp, Homo sapiens
tttgtcaaagatttt

SEQ ID NO: 408759 - DNA, 15 bp, Homo sapiens
gtttgtcaaagattt

SEQ ID NO: 408760 - DNA, 15 bp, Homo sapiens
ggtttgtcaaagatt

SEQ ID NO: 408761 - DNA, 15 bp, Homo sapiens
aaggtttgtcaaaga

SEQ ID NO: 408762 - DNA, 15 bp, Homo sapiens
caaggtttgtcaaag

SEQ ID NO: 408763 - DNA, 15 bp, Homo sapiens
acaaggtttgtcaaa

SEQ ID NO: 408764 - DNA, 15 bp, Homo sapiens
aacaaggtttgtcaa

SEQ ID NO: 408765 - DNA, 15 bp, Homo sapiens
aaacaaggtttgtca

SEQ ID NO: 408766 - DNA, 15 bp, Homo sapiens
gaaacaaggtttgtc

SEQ ID NO: 408767 - DNA, 15 bp, Homo sapiens
agaaacaaggtttgt

SEQ ID NO: 408768 - DNA, 15 bp, Homo sapiens
aagaaacaaggtttg

SEQ ID NO: 408769 - DNA, 15 bp, Homo sapiens
gaagaaacaaggttt

SEQ ID NO: 408770 - DNA, 15 bp, Homo sapiens
tgaagaaacaaggtt

SEQ ID NO: 408771 - DNA, 15 bp, Homo sapiens
ttgaagaaacaaggt

SEQ ID NO: 408772 - DNA, 15 bp, Homo sapiens
cttgaagaaacaagg

SEQ ID NO: 408773 - DNA, 15 bp, Homo sapiens
tcttgaagaaacaag

SEQ ID NO: 408774 - DNA, 15 bp, Homo sapiens
atcttgaagaaacaa

SEQ ID NO: 408775 - DNA, 15 bp, Homo sapiens
tatcttgaagaaaca

SEQ ID NO: 408776 - DNA, 15 bp, Homo sapiens
ctatcttgaagaaac

SEQ ID NO: 408777 - DNA, 15 bp, Homo sapiens
tctatcttgaagaaa

SEQ ID NO: 408778 - DNA, 15 bp, Homo sapiens
ctctatcttgaagaa

SEQ ID NO: 408779 - DNA, 15 bp, Homo sapiens
gctctatcttgaaga

SEQ ID NO: 408780 - DNA, 15 bp, Homo sapiens
tgctctatcttgaag

SEQ ID NO: 408781 - DNA, 15 bp, Homo sapiens
ttgctctatcttgaa

SEQ ID NO: 408782 - DNA, 15 bp, Homo sapiens
cttgctctatcttga

SEQ ID NO: 408783 - DNA, 15 bp, Homo sapiens
ccttgctctatcttg

SEQ ID NO: 408784 - DNA, 15 bp, Homo sapiens
cccttgctctatctt

SEQ ID NO: 408785 - DNA, 15 bp, Homo sapiens
acccttgctctatct

SEQ ID NO: 408786 - DNA, 15 bp, Homo sapiens
aacccttgctctatc

SEQ ID NO: 408787 - DNA, 15 bp, Homo sapiens
caacccttgctctat

SEQ ID NO: 408788 - DNA, 15 bp, Homo sapiens
tcaacccttgctcta

SEQ ID NO: 408789 - DNA, 15 bp, Homo sapiens
gtcaacccttgctct

SEQ ID NO: 408790 - DNA, 15 bp, Homo sapiens
tgtcaacccttgctc

SEQ ID NO: 408791 - DNA, 15 bp, Homo sapiens
gtgtcaacccttgct

SEQ ID NO: 408792 - DNA, 15 bp, Homo sapiens
ggtgtcaacccttgc

SEQ ID NO: 408793 - DNA, 15 bp, Homo sapiens
gggtgtcaacccttg

SEQ ID NO: 408794 - DNA, 15 bp, Homo sapiens
tgggtgtcaaccctt

SEQ ID NO: 408795 - DNA, 15 bp, Homo sapiens
ctgggtgtcaaccct

SEQ ID NO: 408796 - DNA, 15 bp, Homo sapiens
actgggtgtcaaccc

SEQ ID NO: 408797 - DNA, 15 bp, Homo sapiens
cactgggtgtcaacc

SEQ ID NO: 408798 - DNA, 15 bp, Homo sapiens
ccactgggtgtcaac

SEQ ID NO: 408799 - DNA, 15 bp, Homo sapiens
gccactgggtgtcaa

SEQ ID NO: 408800 - DNA, 15 bp, Homo sapiens
agccactgggtgtca

SEQ ID NO: 408801 - DNA, 15 bp, Homo sapiens
gagccactgggtgtc

SEQ ID NO: 408802 - DNA, 15 bp, Homo sapiens
tgagccactgggtgt

SEQ ID NO: 408803 - DNA, 15 bp, Homo sapiens
ctgagccactgggtg

SEQ ID NO: 408804 - DNA, 15 bp, Homo sapiens
actgagccactgggt

SEQ ID NO: 408805 - DNA, 15 bp, Homo sapiens
cactgagccactggg

SEQ ID NO: 408806 - DNA, 15 bp, Homo sapiens
acactgagccactgg

SEQ ID NO: 408807 - DNA, 15 bp, Homo sapiens
gacactgagccactg

SEQ ID NO: 408808 - DNA, 15 bp, Homo sapiens
tgacactgagccact

SEQ ID NO: 408809 - DNA, 15 bp, Homo sapiens
atgacactgagccac

SEQ ID NO: 408810 - DNA, 15 bp, Homo sapiens
catgacactgagcca

SEQ ID NO: 408811 - DNA, 15 bp, Homo sapiens
gcatgacactgagcc

SEQ ID NO: 408812 - DNA, 15 bp, Homo sapiens
agcatgacactgagc

SEQ ID NO: 408813 - DNA, 15 bp, Homo sapiens
aagcatgacactgag

SEQ ID NO: 408814 - DNA, 15 bp, Homo sapiens
caagcatgacactga

SEQ ID NO: 408815 - DNA, 15 bp, Homo sapiens
ccaagcatgacactg

SEQ ID NO: 408816 - DNA, 15 bp, Homo sapiens
tccaagcatgacact

SEQ ID NO: 408817 - DNA, 15 bp, Homo sapiens
ttccaagcatgacac

SEQ ID NO: 408818 - DNA, 15 bp, Homo sapiens
gttccaagcatgaca

SEQ ID NO: 408819 - DNA, 15 bp, Homo sapiens
tgttccaagcatgac

SEQ ID NO: 408820 - DNA, 15 bp, Homo sapiens
ctgttccaagcatga

SEQ ID NO: 408821 - DNA, 15 bp, Homo sapiens
tctgttccaagcatg

SEQ ID NO: 408822 - DNA, 15 bp, Homo sapiens
ctctgttccaagcat

SEQ ID NO: 408823 - DNA, 15 bp, Homo sapiens
cctctgttccaagca

SEQ ID NO: 408824 - DNA, 15 bp, Homo sapiens
gcctctgttccaagc

SEQ ID NO: 408825 - DNA, 15 bp, Homo sapiens
agcctctgttccaag

SEQ ID NO: 408826 - DNA, 15 bp, Homo sapiens
gagcctctgttccaa

SEQ ID NO: 408827 - DNA, 15 bp, Homo sapiens
tgagcctctgttcca

SEQ ID NO: 408828 - DNA, 15 bp, Homo sapiens
gtgagcctctgttcc

SEQ ID NO: 408829 - DNA, 15 bp, Homo sapiens
agtgagcctctgttc

SEQ ID NO: 408830 - DNA, 15 bp, Homo sapiens
cagtgagcctctgtt

SEQ ID NO: 408831 - DNA, 15 bp, Homo sapiens
ccagtgagcctctgt

SEQ ID NO: 408832 - DNA, 15 bp, Homo sapiens
tccagtgagcctctg

SEQ ID NO: 408833 - DNA, 15 bp, Homo sapiens
ctccagtgagcctct

SEQ ID NO: 408834 - DNA, 15 bp, Homo sapiens
gctccagtgagcctc

SEQ ID NO: 408835 - DNA, 15 bp, Homo sapiens
ggctccagtgagcct

SEQ ID NO: 408836 - DNA, 15 bp, Homo sapiens
aggctccagtgagcc

SEQ ID NO: 408837 - DNA, 15 bp, Homo sapiens
aaggctccagtgagc

SEQ ID NO: 408838 - DNA, 15 bp, Homo sapiens
gaaggctccagtgag

SEQ ID NO: 408839 - DNA, 15 bp, Homo sapiens
agaaggctccagtga

SEQ ID NO: 408840 - DNA, 15 bp, Homo sapiens
gagaaggctccagtg

SEQ ID NO: 408841 - DNA, 15 bp, Homo sapiens
ggagaaggctccagt

SEQ ID NO: 408842 - DNA, 15 bp, Homo sapiens
aggagaaggctccag

SEQ ID NO: 408843 - DNA, 15 bp, Homo sapiens
caggagaaggctcca

SEQ ID NO: 408844 - DNA, 15 bp, Homo sapiens
tcaggagaaggctcc

SEQ ID NO: 408845 - DNA, 15 bp, Homo sapiens
ttcaggagaaggctc

SEQ ID NO: 408846 - DNA, 15 bp, Homo sapiens
tttcaggagaaggct

SEQ ID NO: 408847 - DNA, 15 bp, Homo sapiens
gtttcaggagaaggc

SEQ ID NO: 408848 - DNA, 15 bp, Homo sapiens
cgtttcaggagaagg

SEQ ID NO: 408849 - DNA, 15 bp, Homo sapiens
ccgtttcaggagaag

SEQ ID NO: 408850 - DNA, 15 bp, Homo sapiens
cccgtttcaggagaa

SEQ ID NO: 408851 - DNA, 15 bp, Homo sapiens
tcccgtttcaggaga

SEQ ID NO: 408852 - DNA, 15 bp, Homo sapiens
ttcccgtttcaggag

SEQ ID NO: 408853 - DNA, 15 bp, Homo sapiens
tttcccgtttcagga

SEQ ID NO: 408854 - DNA, 15 bp, Homo sapiens
gtttcccgtttcagg

SEQ ID NO: 408855 - DNA, 15 bp, Homo sapiens
agtttcccgtttcag

SEQ ID NO: 408856 - DNA, 15 bp, Homo sapiens
aagtttcccgtttca

SEQ ID NO: 408857 - DNA, 15 bp, Homo sapiens
gaagtttcccgtttc

SEQ ID NO: 408858 - DNA, 15 bp, Homo sapiens
ggaagtttcccgttt

SEQ ID NO: 408859 - DNA, 15 bp, Homo sapiens
aggaagtttcccgtt

SEQ ID NO: 408860 - DNA, 15 bp, Homo sapiens
caggaagtttcccgt

SEQ ID NO: 408861 - DNA, 15 bp, Homo sapiens
gcaggaagtttcccg

SEQ ID NO: 408862 - DNA, 15 bp, Homo sapiens
tgcaggaagtttccc

SEQ ID NO: 408863 - DNA, 15 bp, Homo sapiens
ttgcaggaagtttcc

SEQ ID NO: 408864 - DNA, 15 bp, Homo sapiens
cttgcaggaagtttc

SEQ ID NO: 408865 - DNA, 15 bp, Homo sapiens
ccttgcaggaagttt

SEQ ID NO: 408866 - DNA, 15 bp, Homo sapiens
tccttgcaggaagtt

SEQ ID NO: 408867 - DNA, 15 bp, Homo sapiens
gtccttgcaggaagt

SEQ ID NO: 408868 - DNA, 15 bp, Homo sapiens
tgtccttgcaggaag

SEQ ID NO: 408869 - DNA, 15 bp, Homo sapiens
gtgtccttgcaggaa

SEQ ID NO: 408870 - DNA, 15 bp, Homo sapiens
tgtgtccttgcagga

SEQ ID NO: 408871 - DNA, 15 bp, Homo sapiens
atgtgtccttgcagg

SEQ ID NO: 408872 - DNA, 15 bp, Homo sapiens
tatgtgtccttgcag

SEQ ID NO: 408873 - DNA, 15 bp, Homo sapiens
ctatgtgtccttgca

SEQ ID NO: 408874 - DNA, 15 bp, Homo sapiens
cctatgtgtccttgc

SEQ ID NO: 408875 - DNA, 15 bp, Homo sapiens
tcctatgtgtccttg

SEQ ID NO: 408876 - DNA, 15 bp, Homo sapiens
atcctatgtgtcctt

SEQ ID NO: 408877 - DNA, 15 bp, Homo sapiens
gatcctatgtgtcct

SEQ ID NO: 408878 - DNA, 15 bp, Homo sapiens
agatcctatgtgtcc

SEQ ID NO: 408879 - DNA, 15 bp, Homo sapiens
aagatcctatgtgtc

SEQ ID NO: 408880 - DNA, 15 bp, Homo sapiens
caagatcctatgtgt

SEQ ID NO: 408881 - DNA, 15 bp, Homo sapiens
acaagatcctatgtg

SEQ ID NO: 408882 - DNA, 15 bp, Homo sapiens
cacaagatcctatgt

SEQ ID NO: 408883 - DNA, 15 bp, Homo sapiens
ccacaagatcctatg

SEQ ID NO: 408884 - DNA, 15 bp, Homo sapiens
cccacaagatcctat

SEQ ID NO: 408885 - DNA, 15 bp, Homo sapiens
tcccacaagatccta

SEQ ID NO: 408886 - DNA, 15 bp, Homo sapiens
atcccacaagatcct

SEQ ID NO: 408887 - DNA, 15 bp, Homo sapiens
gatcccacaagatcc

SEQ ID NO: 408888 - DNA, 15 bp, Homo sapiens
ggatcccacaagatc

SEQ ID NO: 408889 - DNA, 15 bp, Homo sapiens
cggatcccacaagat

SEQ ID NO: 408890 - DNA, 15 bp, Homo sapiens
tcggatcccacaaga

SEQ ID NO: 408891 - DNA, 15 bp, Homo sapiens
ttcggatcccacaag

SEQ ID NO: 408892 - DNA, 15 bp, Homo sapiens
tttcggatcccacaa

SEQ ID NO: 408893 - DNA, 15 bp, Homo sapiens
ttttcggatcccaca

SEQ ID NO: 408894 - DNA, 15 bp, Homo sapiens
tttttcggatcccac

SEQ ID NO: 408895 - DNA, 15 bp, Homo sapiens
ttttttcggatccca

SEQ ID NO: 408896 - DNA, 15 bp, Homo sapiens
tttttttcggatccc

SEQ ID NO: 408897 - DNA, 15 bp, Homo sapiens
ttttttttcggatcc

SEQ ID NO: 408898 - DNA, 15 bp, Homo sapiens
tttttttttcggatc

SEQ ID NO: 408899 - DNA, 15 bp, Homo sapiens
ttttttttttcggat

SEQ ID NO: 408900 - DNA, 15 bp, Homo sapiens
tttttttttttcgga

SEQ ID NO: 408901 - DNA, 15 bp, Homo sapiens
ctttttttttttcgg

SEQ ID NO: 408902 - DNA, 15 bp, Homo sapiens
cctttttttttttcg

SEQ ID NO: 408903 - DNA, 15 bp, Homo sapiens
tcctttttttttttc

SEQ ID NO: 408904 - DNA, 15 bp, Homo sapiens
aatcctttttttttt

SEQ ID NO: 408905 - DNA, 15 bp, Homo sapiens
taatccttttttttt

SEQ ID NO: 408906 - DNA, 15 bp, Homo sapiens
ctaatcctttttttt

SEQ ID NO: 408907 - DNA, 15 bp, Homo sapiens
cctaatccttttttt

SEQ ID NO: 408908 - DNA, 15 bp, Homo sapiens
gcctaatcctttttt

SEQ ID NO: 408909 - DNA, 15 bp, Homo sapiens
tgcctaatccttttt

SEQ ID NO: 408910 - DNA, 15 bp, Homo sapiens
atgcctaatcctttt

SEQ ID NO: 408911 - DNA, 15 bp, Homo sapiens
catgcctaatccttt

SEQ ID NO: 408912 - DNA, 15 bp, Homo sapiens
ccatgcctaatcctt

SEQ ID NO: 408913 - DNA, 15 bp, Homo sapiens
gccatgcctaatcct

SEQ ID NO: 408914 - DNA, 15 bp, Homo sapiens
ggccatgcctaatcc

SEQ ID NO: 408915 - DNA, 15 bp, Homo sapiens
tggccatgcctaatc

SEQ ID NO: 408916 - DNA, 15 bp, Homo sapiens
ctggccatgcctaat

SEQ ID NO: 408917 - DNA, 15 bp, Homo sapiens
cctggccatgcctaa

SEQ ID NO: 408918 - DNA, 15 bp, Homo sapiens
gcctggccatgccta

SEQ ID NO: 408919 - DNA, 15 bp, Homo sapiens
agcctggccatgcct

SEQ ID NO: 408920 - DNA, 15 bp, Homo sapiens
aagcctggccatgcc

SEQ ID NO: 408921 - DNA, 15 bp, Homo sapiens
gaagcctggccatgc

SEQ ID NO: 408922 - DNA, 15 bp, Homo sapiens
ggaagcctggccatg

SEQ ID NO: 408923 - DNA, 15 bp, Homo sapiens
gggaagcctggccat

SEQ ID NO: 408924 - DNA, 15 bp, Homo sapiens
tgggaagcctggcca

SEQ ID NO: 408925 - DNA, 15 bp, Homo sapiens
ttgggaagcctggcc

SEQ ID NO: 408926 - DNA, 15 bp, Homo sapiens
cttgggaagcctggc

SEQ ID NO: 408927 - DNA, 15 bp, Homo sapiens
tcttgggaagcctgg

SEQ ID NO: 408928 - DNA, 15 bp, Homo sapiens
gtcttgggaagcctg

SEQ ID NO: 408929 - DNA, 15 bp, Homo sapiens
ggtcttgggaagcct

SEQ ID NO: 408930 - DNA, 15 bp, Homo sapiens
aggtcttgggaagcc

SEQ ID NO: 408931 - DNA, 15 bp, Homo sapiens
caggtcttgggaagc

SEQ ID NO: 408932 - DNA, 15 bp, Homo sapiens
gcaggtcttgggaag

SEQ ID NO: 408933 - DNA, 15 bp, Homo sapiens
tgcaggtcttgggaa

SEQ ID NO: 408934 - DNA, 15 bp, Homo sapiens
ttgcaggtcttggga

SEQ ID NO: 408935 - DNA, 15 bp, Homo sapiens
attgcaggtcttggg

SEQ ID NO: 408936 - DNA, 15 bp, Homo sapiens
cattgcaggtcttgg

SEQ ID NO: 408937 - DNA, 15 bp, Homo sapiens
tcattgcaggtcttg

SEQ ID NO: 408938 - DNA, 15 bp, Homo sapiens
ttcattgcaggtctt

SEQ ID NO: 408939 - DNA, 15 bp, Homo sapiens
gttcattgcaggtct

SEQ ID NO: 408940 - DNA, 15 bp, Homo sapiens
ggttcattgcaggtc

SEQ ID NO: 408941 - DNA, 15 bp, Homo sapiens
gggttcattgcaggt

SEQ ID NO: 408942 - DNA, 15 bp, Homo sapiens
tgggttcattgcagg

SEQ ID NO: 408943 - DNA, 15 bp, Homo sapiens
ctgggttcattgcag

SEQ ID NO: 408944 - DNA, 15 bp, Homo sapiens
cctgggttcattgca

SEQ ID NO: 408945 - DNA, 15 bp, Homo sapiens
ccctgggttcattgc

SEQ ID NO: 408946 - DNA, 15 bp, Homo sapiens
gccctgggttcattg

SEQ ID NO: 408947 - DNA, 15 bp, Homo sapiens
tgccctgggttcatt

SEQ ID NO: 408948 - DNA, 15 bp, Homo sapiens
ctgccctgggttcat

SEQ ID NO: 408949 - DNA, 15 bp, Homo sapiens
gctgccctgggttca

SEQ ID NO: 408950 - DNA, 15 bp, Homo sapiens
ggctgccctgggttc

SEQ ID NO: 408951 - DNA, 15 bp, Homo sapiens
tggctgccctgggtt

SEQ ID NO: 408952 - DNA, 15 bp, Homo sapiens
atggctgccctgggt

SEQ ID NO: 408953 - DNA, 15 bp, Homo sapiens
tatggctgccctggg

SEQ ID NO: 408954 - DNA, 15 bp, Homo sapiens
ttatggctgccctgg

SEQ ID NO: 408955 - DNA, 15 bp, Homo sapiens
tttatggctgccctg

SEQ ID NO: 408956 - DNA, 15 bp, Homo sapiens
atttatggctgccct

SEQ ID NO: 408957 - DNA, 15 bp, Homo sapiens
gatttatggctgccc

SEQ ID NO: 408958 - DNA, 15 bp, Homo sapiens
ggatttatggctgcc

SEQ ID NO: 408959 - DNA, 15 bp, Homo sapiens
gggatttatggctgc

SEQ ID NO: 408960 - DNA, 15 bp, Homo sapiens
ggggatttatggctg

SEQ ID NO: 408961 - DNA, 15 bp, Homo sapiens
tggggatttatggct

SEQ ID NO: 408962 - DNA, 15 bp, Homo sapiens
gtggggatttatggc

SEQ ID NO: 408963 - DNA, 15 bp, Homo sapiens
tgtggggatttatgg

SEQ ID NO: 408964 - DNA, 15 bp, Homo sapiens
ctgtggggatttatg

SEQ ID NO: 408965 - DNA, 15 bp, Homo sapiens
gctgtggggatttat

SEQ ID NO: 408966 - DNA, 15 bp, Homo sapiens
ggctgtggggattta

SEQ ID NO: 408967 - DNA, 15 bp, Homo sapiens
aggctgtggggattt

SEQ ID NO: 408968 - DNA, 15 bp, Homo sapiens
caggctgtggggatt

SEQ ID NO: 408969 - DNA, 15 bp, Homo sapiens
tcaggctgtggggat

SEQ ID NO: 408970 - DNA, 15 bp, Homo sapiens
atcaggctgtgggga

SEQ ID NO: 408971 - DNA, 15 bp, Homo sapiens
aatcaggctgtgggg

SEQ ID NO: 408972 - DNA, 15 bp, Homo sapiens
aaatcaggctgtggg

SEQ ID NO: 408973 - DNA, 15 bp, Homo sapiens
aaaatcaggctgtgg

SEQ ID NO: 408974 - DNA, 15 bp, Homo sapiens
caaaatcaggctgtg

SEQ ID NO: 408975 - DNA, 15 bp, Homo sapiens
gcaaaatcaggctgt

SEQ ID NO: 408976 - DNA, 15 bp, Homo sapiens
agcaaaatcaggctg

SEQ ID NO: 408977 - DNA, 15 bp, Homo sapiens
gagcaaaatcaggct

SEQ ID NO: 408978 - DNA, 15 bp, Homo sapiens
agagcaaaatcaggc

SEQ ID NO: 408979 - DNA, 15 bp, Homo sapiens
aagagcaaaatcagg

SEQ ID NO: 408980 - DNA, 15 bp, Homo sapiens
gaagagcaaaatcag

SEQ ID NO: 408981 - DNA, 15 bp, Homo sapiens
agaagagcaaaatca

SEQ ID NO: 408982 - DNA, 15 bp, Homo sapiens
aagaagagcaaaatc

SEQ ID NO: 408983 - DNA, 15 bp, Homo sapiens
taagaagagcaaaat

SEQ ID NO: 408984 - DNA, 15 bp, Homo sapiens
gtaagaagagcaaaa

SEQ ID NO: 408985 - DNA, 15 bp, Homo sapiens
tgtaagaagagcaaa

SEQ ID NO: 408986 - DNA, 15 bp, Homo sapiens
gtgtaagaagagcaa

SEQ ID NO: 408987 - DNA, 15 bp, Homo sapiens
tgtgtaagaagagca

SEQ ID NO: 408988 - DNA, 15 bp, Homo sapiens
ttgtgtaagaagagc

SEQ ID NO: 408989 - DNA, 15 bp, Homo sapiens
cttgtgtaagaagag

SEQ ID NO: 408990 - DNA, 15 bp, Homo sapiens
acttgtgtaagaaga

SEQ ID NO: 408991 - DNA, 15 bp, Homo sapiens
aacttgtgtaagaag

SEQ ID NO: 408992 - DNA, 15 bp, Homo sapiens
taacttgtgtaagaa

SEQ ID NO: 408993 - DNA, 15 bp, Homo sapiens
ataacttgtgtaaga

SEQ ID NO: 408994 - DNA, 15 bp, Homo sapiens
gataacttgtgtaag

SEQ ID NO: 408995 - DNA, 15 bp, Homo sapiens
tgataacttgtgtaa

SEQ ID NO: 408996 - DNA, 15 bp, Homo sapiens
ctgataacttgtgta

SEQ ID NO: 408997 - DNA, 15 bp, Homo sapiens
gctgataacttgtgt

SEQ ID NO: 408998 - DNA, 15 bp, Homo sapiens
ggctgataacttgtg

SEQ ID NO: 408999 - DNA, 15 bp, Homo sapiens
tggctgataacttgt

SEQ ID NO: 409000 - DNA, 15 bp, Homo sapiens
gtggctgataacttg

SEQ ID NO: 409001 - DNA, 15 bp, Homo sapiens
agtggctgataactt

SEQ ID NO: 409002 - DNA, 15 bp, Homo sapiens
aagtggctgataact

SEQ ID NO: 409003 - DNA, 15 bp, Homo sapiens
gaagtggctgataac

SEQ ID NO: 409004 - DNA, 15 bp, Homo sapiens
agaagtggctgataa

SEQ ID NO: 409005 - DNA, 15 bp, Homo sapiens
tagaagtggctgata

SEQ ID NO: 409006 - DNA, 15 bp, Homo sapiens
ctagaagtggctgat

SEQ ID NO: 409007 - DNA, 15 bp, Homo sapiens
cctagaagtggctga

SEQ ID NO: 409008 - DNA, 15 bp, Homo sapiens
ccctagaagtggctg

SEQ ID NO: 409009 - DNA, 15 bp, Homo sapiens
gccctagaagtggct

SEQ ID NO: 409010 - DNA, 15 bp, Homo sapiens
agccctagaagtggc

SEQ ID NO: 409011 - DNA, 15 bp, Homo sapiens
gagccctagaagtgg

SEQ ID NO: 409012 - DNA, 15 bp, Homo sapiens
tgagccctagaagtg

SEQ ID NO: 409013 - DNA, 15 bp, Homo sapiens
ctgagccctagaagt

SEQ ID NO: 409014 - DNA, 15 bp, Homo sapiens
gctgagccctagaag

SEQ ID NO: 409015 - DNA, 15 bp, Homo sapiens
agctgagccctagaa

SEQ ID NO: 409016 - DNA, 15 bp, Homo sapiens
tagctgagccctaga

SEQ ID NO: 409017 - DNA, 15 bp, Homo sapiens
gtagctgagccctag

SEQ ID NO: 409018 - DNA, 15 bp, Homo sapiens
agtagctgagcccta

SEQ ID NO: 409019 - DNA, 15 bp, Homo sapiens
aagtagctgagccct

SEQ ID NO: 409020 - DNA, 15 bp, Homo sapiens
aaagtagctgagccc

SEQ ID NO: 409021 - DNA, 15 bp, Homo sapiens
gaaagtagctgagcc

SEQ ID NO: 409022 - DNA, 15 bp, Homo sapiens
agaaagtagctgagc

SEQ ID NO: 409023 - DNA, 15 bp, Homo sapiens
tagaaagtagctgag

SEQ ID NO: 409024 - DNA, 15 bp, Homo sapiens
atagaaagtagctga

SEQ ID NO: 409025 - DNA, 15 bp, Homo sapiens
aatagaaagtagctg

SEQ ID NO: 409026 - DNA, 15 bp, Homo sapiens
aaatagaaagtagct

SEQ ID NO: 409027 - DNA, 15 bp, Homo sapiens
caaatagaaagtagc

SEQ ID NO: 409028 - DNA, 15 bp, Homo sapiens
gcaaatagaaagtag

SEQ ID NO: 409029 - DNA, 15 bp, Homo sapiens
ggcaaatagaaagta

SEQ ID NO: 409030 - DNA, 15 bp, Homo sapiens
aggcaaatagaaagt

SEQ ID NO: 409031 - DNA, 15 bp, Homo sapiens
caggcaaatagaaag

SEQ ID NO: 409032 - DNA, 15 bp, Homo sapiens
gcaggcaaatagaaa

SEQ ID NO: 409033 - DNA, 15 bp, Homo sapiens
agcaggcaaatagaa

SEQ ID NO: 409034 - DNA, 15 bp, Homo sapiens
gagcaggcaaataga

SEQ ID NO: 409035 - DNA, 15 bp, Homo sapiens
agagcaggcaaatag

SEQ ID NO: 409036 - DNA, 15 bp, Homo sapiens
tagagcaggcaaata

SEQ ID NO: 409037 - DNA, 15 bp, Homo sapiens
gtagagcaggcaaat

SEQ ID NO: 409038 - DNA, 15 bp, Homo sapiens
tgtagagcaggcaaa

SEQ ID NO: 409039 - DNA, 15 bp, Homo sapiens
atgtagagcaggcaa

SEQ ID NO: 409040 - DNA, 15 bp, Homo sapiens
aatgtagagcaggca

SEQ ID NO: 409041 - DNA, 15 bp, Homo sapiens
gaatgtagagcaggc

SEQ ID NO: 409042 - DNA, 15 bp, Homo sapiens
agaatgtagagcagg

SEQ ID NO: 409043 - DNA, 15 bp, Homo sapiens
aagaatgtagagcag

SEQ ID NO: 409044 - DNA, 15 bp, Homo sapiens
gaagaatgtagagca

SEQ ID NO: 409045 - DNA, 15 bp, Homo sapiens
agaagaatgtagagc

SEQ ID NO: 409046 - DNA, 15 bp, Homo sapiens
aagaagaatgtagag

SEQ ID NO: 409047 - DNA, 15 bp, Homo sapiens
caagaagaatgtaga

SEQ ID NO: 409048 - DNA, 15 bp, Homo sapiens
gcaagaagaatgtag

SEQ ID NO: 409049 - DNA, 15 bp, Homo sapiens
agcaagaagaatgta

SEQ ID NO: 409050 - DNA, 15 bp, Homo sapiens
cagcaagaagaatgt

SEQ ID NO: 409051 - DNA, 15 bp, Homo sapiens
gcagcaagaagaatg

SEQ ID NO: 409052 - DNA, 15 bp, Homo sapiens
agcagcaagaagaat

SEQ ID NO: 409053 - DNA, 15 bp, Homo sapiens
tagcagcaagaagaa

SEQ ID NO: 409054 - DNA, 15 bp, Homo sapiens
gtagcagcaagaaga

SEQ ID NO: 409055 - DNA, 15 bp, Homo sapiens
agtagcagcaagaag

SEQ ID NO: 409056 - DNA, 15 bp, Homo sapiens
gagtagcagcaagaa

SEQ ID NO: 409057 - DNA, 15 bp, Homo sapiens
tgagtagcagcaaga

SEQ ID NO: 409058 - DNA, 15 bp, Homo sapiens
atgagtagcagcaag

SEQ ID NO: 409059 - DNA, 15 bp, Homo sapiens
gatgagtagcagcaa

SEQ ID NO: 409060 - DNA, 15 bp, Homo sapiens
tgatgagtagcagca

SEQ ID NO: 409061 - DNA, 15 bp, Homo sapiens
ttgatgagtagcagc

SEQ ID NO: 409062 - DNA, 15 bp, Homo sapiens
attgatgagtagcag

SEQ ID NO: 409063 - DNA, 15 bp, Homo sapiens
aattgatgagtagca

SEQ ID NO: 409064 - DNA, 15 bp, Homo sapiens
taattgatgagtagc

SEQ ID NO: 409065 - DNA, 15 bp, Homo sapiens
ataattgatgagtag

SEQ ID NO: 409066 - DNA, 15 bp, Homo sapiens
tataattgatgagta

SEQ ID NO: 409067 - DNA, 15 bp, Homo sapiens
ctataattgatgagt

SEQ ID NO: 409068 - DNA, 15 bp, Homo sapiens
tctataattgatgag

SEQ ID NO: 409069 - DNA, 15 bp, Homo sapiens
ctctataattgatga

SEQ ID NO: 409070 - DNA, 15 bp, Homo sapiens
tctctataattgatg

SEQ ID NO: 409071 - DNA, 15 bp, Homo sapiens
ttctctataattgat

SEQ ID NO: 409072 - DNA, 15 bp, Homo sapiens
cttctctataattga

SEQ ID NO: 409073 - DNA, 15 bp, Homo sapiens
gcttctctataattg

SEQ ID NO: 409074 - DNA, 15 bp, Homo sapiens
tgcttctctataatt

SEQ ID NO: 409075 - DNA, 15 bp, Homo sapiens
ctgcttctctataat

SEQ ID NO: 409076 - DNA, 15 bp, Homo sapiens
actgcttctctataa

SEQ ID NO: 409077 - DNA, 15 bp, Homo sapiens
cactgcttctctata

SEQ ID NO: 409078 - DNA, 15 bp, Homo sapiens
ccactgcttctctat

SEQ ID NO: 409079 - DNA, 15 bp, Homo sapiens
tccactgcttctcta

SEQ ID NO: 409080 - DNA, 15 bp, Homo sapiens
ttccactgcttctct

SEQ ID NO: 409081 - DNA, 15 bp, Homo sapiens
cttccactgcttctc

SEQ ID NO: 409082 - DNA, 15 bp, Homo sapiens
ccttccactgcttct

SEQ ID NO: 409083 - DNA, 15 bp, Homo sapiens
accttccactgcttc

SEQ ID NO: 409084 - DNA, 15 bp, Homo sapiens
taccttccactgctt

SEQ ID NO: 409085 - DNA, 15 bp, Homo sapiens
ttaccttccactgct

SEQ ID NO: 409086 - DNA, 15 bp, Homo sapiens
attaccttccactgc

SEQ ID NO: 409087 - DNA, 15 bp, Homo sapiens
cattaccttccactg

SEQ ID NO: 409088 - DNA, 15 bp, Homo sapiens
ccattaccttccact

SEQ ID NO: 409089 - DNA, 15 bp, Homo sapiens
accattaccttccac

SEQ ID NO: 409090 - DNA, 15 bp, Homo sapiens
caccattaccttcca

SEQ ID NO: 409091 - DNA, 15 bp, Homo sapiens
tcaccattaccttcc

SEQ ID NO: 409092 - DNA, 15 bp, Homo sapiens
ttcaccattaccttc

SEQ ID NO: 409093 - DNA, 15 bp, Homo sapiens
gttcaccattacctt

SEQ ID NO: 409094 - DNA, 15 bp, Homo sapiens
tgttcaccattacct

SEQ ID NO: 409095 - DNA, 15 bp, Homo sapiens
ttgttcaccattacc

SEQ ID NO: 409096 - DNA, 15 bp, Homo sapiens
cttgttcaccattac

SEQ ID NO: 409097 - DNA, 15 bp, Homo sapiens
gcttgttcaccatta

SEQ ID NO: 409098 - DNA, 15 bp, Homo sapiens
tgcttgttcaccatt

SEQ ID NO: 409099 - DNA, 15 bp, Homo sapiens
ctgcttgttcaccat

SEQ ID NO: 409100 - DNA, 15 bp, Homo sapiens
tctgcttgttcacca

SEQ ID NO: 409101 - DNA, 15 bp, Homo sapiens
gtctgcttgttcacc

SEQ ID NO: 409102 - DNA, 15 bp, Homo sapiens
agtctgcttgttcac

SEQ ID NO: 409103 - DNA, 15 bp, Homo sapiens
gagtctgcttgttca

SEQ ID NO: 409104 - DNA, 15 bp, Homo sapiens
agagtctgcttgttc

SEQ ID NO: 409105 - DNA, 15 bp, Homo sapiens
cagagtctgcttgtt

SEQ ID NO: 409106 - DNA, 15 bp, Homo sapiens
tcagagtctgcttgt

SEQ ID NO: 409107 - DNA, 15 bp, Homo sapiens
ttcagagtctgcttg

SEQ ID NO: 409108 - DNA, 15 bp, Homo sapiens
cttcagagtctgctt

SEQ ID NO: 409109 - DNA, 15 bp, Homo sapiens
gcttcagagtctgct

SEQ ID NO: 409110 - DNA, 15 bp, Homo sapiens
ggcttcagagtctgc

SEQ ID NO: 409111 - DNA, 15 bp, Homo sapiens
tggcttcagagtctg

SEQ ID NO: 409112 - DNA, 15 bp, Homo sapiens
atggcttcagagtct

SEQ ID NO: 409113 - DNA, 15 bp, Homo sapiens
tatggcttcagagtc

SEQ ID NO: 409114 - DNA, 15 bp, Homo sapiens
ttatggcttcagagt

SEQ ID NO: 409115 - DNA, 15 bp, Homo sapiens
tttatggcttcagag

SEQ ID NO: 409116 - DNA, 15 bp, Homo sapiens
ctttatggcttcaga

SEQ ID NO: 409117 - DNA, 15 bp, Homo sapiens
gctttatggcttcag

SEQ ID NO: 409118 - DNA, 15 bp, Homo sapiens
ggctttatggcttca

SEQ ID NO: 409119 - DNA, 15 bp, Homo sapiens
gggctttatggcttc

SEQ ID NO: 409120 - DNA, 15 bp, Homo sapiens
ggggctttatggctt

SEQ ID NO: 409121 - DNA, 15 bp, Homo sapiens
tggggctttatggct

SEQ ID NO: 409122 - DNA, 15 bp, Homo sapiens
gtggggctttatggc

SEQ ID NO: 409123 - DNA, 15 bp, Homo sapiens
agtggggctttatgg

SEQ ID NO: 409124 - DNA, 15 bp, Homo sapiens
aagtggggctttatg

SEQ ID NO: 409125 - DNA, 15 bp, Homo sapiens
gaagtggggctttat

SEQ ID NO: 409126 - DNA, 15 bp, Homo sapiens
tgaagtggggcttta

SEQ ID NO: 409127 - DNA, 15 bp, Homo sapiens
ttgaagtggggcttt

SEQ ID NO: 409128 - DNA, 15 bp, Homo sapiens
tttgaagtggggctt

SEQ ID NO: 409129 - DNA, 15 bp, Homo sapiens
atttgaagtggggct

SEQ ID NO: 409130 - DNA, 15 bp, Homo sapiens
catttgaagtggggc

SEQ ID NO: 409131 - DNA, 15 bp, Homo sapiens
gcatttgaagtgggg

SEQ ID NO: 409132 - DNA, 15 bp, Homo sapiens
tgcatttgaagtggg

SEQ ID NO: 409133 - DNA, 15 bp, Homo sapiens
ttgcatttgaagtgg

SEQ ID NO: 409134 - DNA, 15 bp, Homo sapiens
cttgcatttgaagtg

SEQ ID NO: 409135 - DNA, 15 bp, Homo sapiens
gcttgcatttgaagt

SEQ ID NO: 409136 - DNA, 15 bp, Homo sapiens
agcttgcatttgaag

SEQ ID NO: 409137 - DNA, 15 bp, Homo sapiens
aagcttgcatttgaa

SEQ ID NO: 409138 - DNA, 15 bp, Homo sapiens
aaagcttgcatttga

SEQ ID NO: 409139 - DNA, 15 bp, Homo sapiens
caaagcttgcatttg

SEQ ID NO: 409140 - DNA, 15 bp, Homo sapiens
gcaaagcttgcattt

SEQ ID NO: 409141 - DNA, 15 bp, Homo sapiens
ggcaaagcttgcatt

SEQ ID NO: 409142 - DNA, 15 bp, Homo sapiens
tggcaaagcttgcat

SEQ ID NO: 409143 - DNA, 15 bp, Homo sapiens
gtggcaaagcttgca

SEQ ID NO: 409144 - DNA, 15 bp, Homo sapiens
ggtggcaaagcttgc

SEQ ID NO: 409145 - DNA, 15 bp, Homo sapiens
aggtggcaaagcttg

SEQ ID NO: 409146 - DNA, 15 bp, Homo sapiens
taggtggcaaagctt

SEQ ID NO: 409147 - DNA, 15 bp, Homo sapiens
gtaggtggcaaagct

SEQ ID NO: 409148 - DNA, 15 bp, Homo sapiens
agtaggtggcaaagc

SEQ ID NO: 409149 - DNA, 15 bp, Homo sapiens
tagtaggtggcaaag

SEQ ID NO: 409150 - DNA, 15 bp, Homo sapiens
gtagtaggtggcaaa

SEQ ID NO: 409151 - DNA, 15 bp, Homo sapiens
ggtagtaggtggcaa

SEQ ID NO: 409152 - DNA, 15 bp, Homo sapiens
aggtagtaggtggca

SEQ ID NO: 409153 - DNA, 15 bp, Homo sapiens
caggtagtaggtggc

SEQ ID NO: 409154 - DNA, 15 bp, Homo sapiens
acaggtagtaggtgg

SEQ ID NO: 409155 - DNA, 15 bp, Homo sapiens
cacaggtagtaggtg

SEQ ID NO: 409156 - DNA, 15 bp, Homo sapiens
acacaggtagtaggt

SEQ ID NO: 409157 - DNA, 15 bp, Homo sapiens
cacacaggtagtagg

SEQ ID NO: 409158 - DNA, 15 bp, Homo sapiens
tcacacaggtagtag

SEQ ID NO: 409159 - DNA, 15 bp, Homo sapiens
gtcacacaggtagta

SEQ ID NO: 409160 - DNA, 15 bp, Homo sapiens
tgtcacacaggtagt

SEQ ID NO: 409161 - DNA, 15 bp, Homo sapiens
ctgtcacacaggtag

SEQ ID NO: 409162 - DNA, 15 bp, Homo sapiens
cctgtcacacaggta

SEQ ID NO: 409163 - DNA, 15 bp, Homo sapiens
tcctgtcacacaggt

SEQ ID NO: 409164 - DNA, 15 bp, Homo sapiens
ttcctgtcacacagg

SEQ ID NO: 409165 - DNA, 15 bp, Homo sapiens
cttcctgtcacacag

SEQ ID NO: 409166 - DNA, 15 bp, Homo sapiens
tcttcctgtcacaca

SEQ ID NO: 409167 - DNA, 15 bp, Homo sapiens
atcttcctgtcacac

SEQ ID NO: 409168 - DNA, 15 bp, Homo sapiens
catcttcctgtcaca

SEQ ID NO: 409169 - DNA, 15 bp, Homo sapiens
acatcttcctgtcac

SEQ ID NO: 409170 - DNA, 15 bp, Homo sapiens
aacatcttcctgtca

SEQ ID NO: 409171 - DNA, 15 bp, Homo sapiens
taacatcttcctgtc

SEQ ID NO: 409172 - DNA, 15 bp, Homo sapiens
ttaacatcttcctgt

SEQ ID NO: 409173 - DNA, 15 bp, Homo sapiens
attaacatcttcctg

SEQ ID NO: 409174 - DNA, 15 bp, Homo sapiens
tattaacatcttcct

SEQ ID NO: 409175 - DNA, 15 bp, Homo sapiens
ttattaacatcttcc

SEQ ID NO: 409176 - DNA, 15 bp, Homo sapiens
tttattaacatcttc

SEQ ID NO: 409177 - DNA, 15 bp, Homo sapiens
gtttattaacatctt

SEQ ID NO: 409178 - DNA, 15 bp, Homo sapiens
ggtttattaacatct

SEQ ID NO: 409179 - DNA, 15 bp, Homo sapiens
aggtttattaacatc

SEQ ID NO: 409180 - DNA, 15 bp, Homo sapiens
caggtttattaacat

SEQ ID NO: 409181 - DNA, 15 bp, Homo sapiens
acaggtttattaaca

SEQ ID NO: 409182 - DNA, 15 bp, Homo sapiens
tacaggtttattaac

SEQ ID NO: 409183 - DNA, 15 bp, Homo sapiens
atacaggtttattaa

SEQ ID NO: 409184 - DNA, 15 bp, Homo sapiens
catacaggtttatta

SEQ ID NO: 409185 - DNA, 15 bp, Homo sapiens
acatacaggtttatt

SEQ ID NO: 409186 - DNA, 15 bp, Homo sapiens
cacatacaggtttat

SEQ ID NO: 409187 - DNA, 15 bp, Homo sapiens
gcacatacaggttta

SEQ ID NO: 409188 - DNA, 15 bp, Homo sapiens
ggcacatacaggttt

SEQ ID NO: 409189 - DNA, 15 bp, Homo sapiens
aggcacatacaggtt

SEQ ID NO: 409190 - DNA, 15 bp, Homo sapiens
gaggcacatacaggt

SEQ ID NO: 409191 - DNA, 15 bp, Homo sapiens
tgaggcacatacagg

SEQ ID NO: 409192 - DNA, 15 bp, Homo sapiens
ctgaggcacatacag

SEQ ID NO: 409193 - DNA, 15 bp, Homo sapiens
actgaggcacataca

SEQ ID NO: 409194 - DNA, 15 bp, Homo sapiens
aactgaggcacatac

SEQ ID NO: 409195 - DNA, 15 bp, Homo sapiens
aaactgaggcacata

SEQ ID NO: 409196 - DNA, 15 bp, Homo sapiens
taaactgaggcacat

SEQ ID NO: 409197 - DNA, 15 bp, Homo sapiens
ataaactgaggcaca

SEQ ID NO: 409198 - DNA, 15 bp, Homo sapiens
aataaactgaggcac

SEQ ID NO: 409199 - DNA, 15 bp, Homo sapiens
gaataaactgaggca

SEQ ID NO: 409200 - DNA, 15 bp, Homo sapiens
agaataaactgaggc

SEQ ID NO: 409201 - DNA, 15 bp, Homo sapiens
aagaataaactgagg

SEQ ID NO: 409202 - DNA, 15 bp, Homo sapiens
gaagaataaactgag

SEQ ID NO: 409203 - DNA, 15 bp, Homo sapiens
ggaagaataaactga

SEQ ID NO: 409204 - DNA, 15 bp, Homo sapiens
tggaagaataaactg

SEQ ID NO: 409205 - DNA, 15 bp, Homo sapiens
gtggaagaataaact

SEQ ID NO: 409206 - DNA, 15 bp, Homo sapiens
tgtggaagaataaac

SEQ ID NO: 409207 - DNA, 15 bp, Homo sapiens
ttgtggaagaataaa

SEQ ID NO: 409208 - DNA, 15 bp, Homo sapiens
tttgtggaagaataa

SEQ ID NO: 409209 - DNA, 15 bp, Homo sapiens
ctttgtggaagaata

SEQ ID NO: 409210 - DNA, 15 bp, Homo sapiens
actttgtggaagaat

SEQ ID NO: 409211 - DNA, 15 bp, Homo sapiens
cactttgtggaagaa

SEQ ID NO: 409212 - DNA, 15 bp, Homo sapiens
ccactttgtggaaga

SEQ ID NO: 409213 - DNA, 15 bp, Homo sapiens
tccactttgtggaag

SEQ ID NO: 409214 - DNA, 15 bp, Homo sapiens
ctccactttgtggaa

SEQ ID NO: 409215 - DNA, 15 bp, Homo sapiens
tctccactttgtgga

SEQ ID NO: 409216 - DNA, 15 bp, Homo sapiens
atctccactttgtgg

SEQ ID NO: 409217 - DNA, 15 bp, Homo sapiens
tatctccactttgtg

SEQ ID NO: 409218 - DNA, 15 bp, Homo sapiens
atatctccactttgt

SEQ ID NO: 409219 - DNA, 15 bp, Homo sapiens
aatatctccactttg

SEQ ID NO: 409220 - DNA, 15 bp, Homo sapiens
taatatctccacttt

SEQ ID NO: 409221 - DNA, 15 bp, Homo sapiens
ttaatatctccactt

SEQ ID NO: 409222 - DNA, 15 bp, Homo sapiens
attaatatctccact

SEQ ID NO: 409223 - DNA, 15 bp, Homo sapiens
tattaatatctccac

SEQ ID NO: 409224 - DNA, 15 bp, Homo sapiens
ttattaatatctcca

SEQ ID NO: 409225 - DNA, 15 bp, Homo sapiens
tttattaatatctcc

SEQ ID NO: 409226 - DNA, 15 bp, Homo sapiens
ttttattaatatctc

SEQ ID NO: 409227 - DNA, 15 bp, Homo sapiens
attttattaatatct

SEQ ID NO: 409228 - DNA, 15 bp, Homo sapiens
tattttattaatatc

SEQ ID NO: 409229 - DNA, 15 bp, Homo sapiens
ttattttattaatat

SEQ ID NO: 409230 - DNA, 15 bp, Homo sapiens
attattttattaata

SEQ ID NO: 409231 - DNA, 15 bp, Homo sapiens
gattattttattaat

SEQ ID NO: 409232 - DNA, 15 bp, Homo sapiens
ggattattttattaa

SEQ ID NO: 409233 - DNA, 15 bp, Homo sapiens
aggattattttatta

SEQ ID NO: 409234 - DNA, 15 bp, Homo sapiens
gaggattattttatt

SEQ ID NO: 409235 - DNA, 15 bp, Homo sapiens
tgaggattattttat

SEQ ID NO: 409236 - DNA, 15 bp, Homo sapiens
atgaggattatttta

SEQ ID NO: 409237 - DNA, 15 bp, Homo sapiens
tatgaggattatttt

SEQ ID NO: 409238 - DNA, 15 bp, Homo sapiens
ttatgaggattattt

SEQ ID NO: 409239 - DNA, 15 bp, Homo sapiens
tttatgaggattatt

SEQ ID NO: 409240 - DNA, 15 bp, Homo sapiens
ctttatgaggattat

SEQ ID NO: 409241 - DNA, 15 bp, Homo sapiens
actttatgaggatta

SEQ ID NO: 409242 - DNA, 15 bp, Homo sapiens
aactttatgaggatt

SEQ ID NO: 409243 - DNA, 15 bp, Homo sapiens
caactttatgaggat

SEQ ID NO: 409244 - DNA, 15 bp, Homo sapiens
acaactttatgagga

SEQ ID NO: 409245 - DNA, 15 bp, Homo sapiens
aacaactttatgagg

SEQ ID NO: 409246 - DNA, 15 bp, Homo sapiens
caacaactttatgag

SEQ ID NO: 409247 - DNA, 15 bp, Homo sapiens
tcaacaactttatga

SEQ ID NO: 409248 - DNA, 15 bp, Homo sapiens
ttcaacaactttatg

SEQ ID NO: 409249 - DNA, 15 bp, Homo sapiens
tttcaacaactttat

SEQ ID NO: 409250 - DNA, 15 bp, Homo sapiens
ctttcaacaacttta

SEQ ID NO: 409251 - DNA, 15 bp, Homo sapiens
tctttcaacaacttt

SEQ ID NO: 409252 - DNA, 15 bp, Homo sapiens
atctttcaacaactt

SEQ ID NO: 409253 - DNA, 15 bp, Homo sapiens
aatctttcaacaact

SEQ ID NO: 409254 - DNA, 15 bp, Homo sapiens
gaatctttcaacaac

SEQ ID NO: 409255 - DNA, 15 bp, Homo sapiens
tgaatctttcaacaa

SEQ ID NO: 409256 - DNA, 15 bp, Homo sapiens
gtgaatctttcaaca

SEQ ID NO: 409257 - DNA, 15 bp, Homo sapiens
agtgaatctttcaac

SEQ ID NO: 409258 - DNA, 15 bp, Homo sapiens
cagtgaatctttcaa

SEQ ID NO: 409259 - DNA, 15 bp, Homo sapiens
tcagtgaatctttca

SEQ ID NO: 409260 - DNA, 15 bp, Homo sapiens
gtcagtgaatctttc

SEQ ID NO: 409261 - DNA, 15 bp, Homo sapiens
tgtcagtgaatcttt

SEQ ID NO: 409262 - DNA, 15 bp, Homo sapiens
atgtcagtgaatctt

SEQ ID NO: 409263 - DNA, 15 bp, Homo sapiens
tatgtcagtgaatct

SEQ ID NO: 409264 - DNA, 15 bp, Homo sapiens
ttatgtcagtgaatc

SEQ ID NO: 409265 - DNA, 15 bp, Homo sapiens
tttatgtcagtgaat

SEQ ID NO: 409266 - DNA, 15 bp, Homo sapiens
atttatgtcagtgaa

SEQ ID NO: 409267 - DNA, 15 bp, Homo sapiens
gatttatgtcagtga

SEQ ID NO: 409268 - DNA, 15 bp, Homo sapiens
tgatttatgtcagtg

SEQ ID NO: 409269 - DNA, 15 bp, Homo sapiens
gtgatttatgtcagt

SEQ ID NO: 409270 - DNA, 15 bp, Homo sapiens
tgtgatttatgtcag

SEQ ID NO: 409271 - DNA, 15 bp, Homo sapiens
atgtgatttatgtca

SEQ ID NO: 409272 - DNA, 15 bp, Homo sapiens
tatgtgatttatgtc

SEQ ID NO: 409273 - DNA, 15 bp, Homo sapiens
ttatgtgatttatgt

SEQ ID NO: 409274 - DNA, 15 bp, Homo sapiens
tttatgtgatttatg

SEQ ID NO: 409275 - DNA, 15 bp, Homo sapiens
gtttatgtgatttat

SEQ ID NO: 409276 - DNA, 15 bp, Homo sapiens
tgtttatgtgattta

SEQ ID NO: 409277 - DNA, 15 bp, Homo sapiens
gtgtttatgtgattt

SEQ ID NO: 409278 - DNA, 15 bp, Homo sapiens
agtgtttatgtgatt

SEQ ID NO: 409279 - DNA, 15 bp, Homo sapiens
aagtgtttatgtgat

SEQ ID NO: 409280 - DNA, 15 bp, Homo sapiens
taagtgtttatgtga

SEQ ID NO: 409281 - DNA, 15 bp, Homo sapiens
ctaagtgtttatgtg

SEQ ID NO: 409282 - DNA, 15 bp, Homo sapiens
actaagtgtttatgt

SEQ ID NO: 409283 - DNA, 15 bp, Homo sapiens
tactaagtgtttatg

SEQ ID NO: 409284 - DNA, 15 bp, Homo sapiens
atactaagtgtttat

SEQ ID NO: 409285 - DNA, 15 bp, Homo sapiens
catactaagtgttta

SEQ ID NO: 409286 - DNA, 15 bp, Homo sapiens
tcatactaagtgttt

SEQ ID NO: 409287 - DNA, 15 bp, Homo sapiens
atcatactaagtgtt

SEQ ID NO: 409288 - DNA, 15 bp, Homo sapiens
tatcatactaagtgt

SEQ ID NO: 409289 - DNA, 15 bp, Homo sapiens
gtatcatactaagtg

SEQ ID NO: 409290 - DNA, 15 bp, Homo sapiens
ggtatcatactaagt

SEQ ID NO: 409291 - DNA, 15 bp, Homo sapiens
aggtatcatactaag

SEQ ID NO: 409292 - DNA, 15 bp, Homo sapiens
gaggtatcatactaa

SEQ ID NO: 409293 - DNA, 15 bp, Homo sapiens
agaggtatcatacta

SEQ ID NO: 409294 - DNA, 15 bp, Homo sapiens
gagaggtatcatact

SEQ ID NO: 409295 - DNA, 15 bp, Homo sapiens
tgagaggtatcatac

SEQ ID NO: 409296 - DNA, 15 bp, Homo sapiens
ctgagaggtatcata

SEQ ID NO: 409297 - DNA, 15 bp, Homo sapiens
cctgagaggtatcat

SEQ ID NO: 409298 - DNA, 15 bp, Homo sapiens
acctgagaggtatca

SEQ ID NO: 409299 - DNA, 15 bp, Homo sapiens
tacctgagaggtatc

SEQ ID NO: 409300 - DNA, 15 bp, Homo sapiens
ttacctgagaggtat

SEQ ID NO: 409301 - DNA, 15 bp, Homo sapiens
attacctgagaggta

SEQ ID NO: 409302 - DNA, 15 bp, Homo sapiens
tattacctgagaggt

SEQ ID NO: 409303 - DNA, 15 bp, Homo sapiens
ttattacctgagagg

SEQ ID NO: 409304 - DNA, 15 bp, Homo sapiens
cttattacctgagag

SEQ ID NO: 409305 - DNA, 15 bp, Homo sapiens
acttattacctgaga

SEQ ID NO: 409306 - DNA, 15 bp, Homo sapiens
gacttattacctgag

SEQ ID NO: 409307 - DNA, 15 bp, Homo sapiens
tgacttattacctga

SEQ ID NO: 409308 - DNA, 15 bp, Homo sapiens
ttgacttattacctg

SEQ ID NO: 409309 - DNA, 15 bp, Homo sapiens
tttgacttattacct

SEQ ID NO: 409310 - DNA, 15 bp, Homo sapiens
gtttgacttattacc

SEQ ID NO: 409311 - DNA, 15 bp, Homo sapiens
tgtttgacttattac

SEQ ID NO: 409312 - DNA, 15 bp, Homo sapiens
gtgtttgacttatta

SEQ ID NO: 409313 - DNA, 15 bp, Homo sapiens
agtgtttgacttatt

SEQ ID NO: 409314 - DNA, 15 bp, Homo sapiens
cagtgtttgacttat

SEQ ID NO: 409315 - DNA, 15 bp, Homo sapiens
tcagtgtttgactta

SEQ ID NO: 409316 - DNA, 15 bp, Homo sapiens
atcagtgtttgactt

SEQ ID NO: 409317 - DNA, 15 bp, Homo sapiens
aatcagtgtttgact

SEQ ID NO: 409318 - DNA, 15 bp, Homo sapiens
caatcagtgtttgac

SEQ ID NO: 409319 - DNA, 15 bp, Homo sapiens
acaatcagtgtttga

SEQ ID NO: 409320 - DNA, 15 bp, Homo sapiens
tacaatcagtgtttg

SEQ ID NO: 409321 - DNA, 15 bp, Homo sapiens
atacaatcagtgttt

SEQ ID NO: 409322 - DNA, 15 bp, Homo sapiens
aatacaatcagtgtt

SEQ ID NO: 409323 - DNA, 15 bp, Homo sapiens
taatacaatcagtgt

SEQ ID NO: 409324 - DNA, 15 bp, Homo sapiens
ctaatacaatcagtg

SEQ ID NO: 409325 - DNA, 15 bp, Homo sapiens
actaatacaatcagt

SEQ ID NO: 409326 - DNA, 15 bp, Homo sapiens
gactaatacaatcag

SEQ ID NO: 409327 - DNA, 15 bp, Homo sapiens
ggactaatacaatca

SEQ ID NO: 409328 - DNA, 15 bp, Homo sapiens
tggactaatacaatc

SEQ ID NO: 409329 - DNA, 15 bp, Homo sapiens
atggactaatacaat

SEQ ID NO: 409330 - DNA, 15 bp, Homo sapiens
aatggactaatacaa

SEQ ID NO: 409331 - DNA, 15 bp, Homo sapiens
aaatggactaataca

SEQ ID NO: 409332 - DNA, 15 bp, Homo sapiens
atgaaaatggactaa

SEQ ID NO: 409333 - DNA, 15 bp, Homo sapiens
catgaaaatggacta

SEQ ID NO: 409334 - DNA, 15 bp, Homo sapiens
gcatgaaaatggact

SEQ ID NO: 409335 - DNA, 15 bp, Homo sapiens
agcatgaaaatggac

SEQ ID NO: 409336 - DNA, 15 bp, Homo sapiens
cagcatgaaaatgga

SEQ ID NO: 409337 - DNA, 15 bp, Homo sapiens
gcagcatgaaaatgg

SEQ ID NO: 409338 - DNA, 15 bp, Homo sapiens
agcagcatgaaaatg

SEQ ID NO: 409339 - DNA, 15 bp, Homo sapiens
cagcagcatgaaaat

SEQ ID NO: 409340 - DNA, 15 bp, Homo sapiens
tcagcagcatgaaaa

SEQ ID NO: 409341 - DNA, 15 bp, Homo sapiens
atcagcagcatgaaa

SEQ ID NO: 409342 - DNA, 15 bp, Homo sapiens
tatcagcagcatgaa

SEQ ID NO: 409343 - DNA, 15 bp, Homo sapiens
ttatcagcagcatga

SEQ ID NO: 409344 - DNA, 15 bp, Homo sapiens
tttatcagcagcatg

SEQ ID NO: 409345 - DNA, 15 bp, Homo sapiens
ctttatcagcagcat

SEQ ID NO: 409346 - DNA, 15 bp, Homo sapiens
tctttatcagcagca

SEQ ID NO: 409347 - DNA, 15 bp, Homo sapiens
gtctttatcagcagc

SEQ ID NO: 409348 - DNA, 15 bp, Homo sapiens
gggtatgtctttatc

SEQ ID NO: 409349 - DNA, 15 bp, Homo sapiens
tgggtatgtctttat

SEQ ID NO: 409350 - DNA, 15 bp, Homo sapiens
ttgggtatgtcttta

SEQ ID NO: 409351 - DNA, 15 bp, Homo sapiens
cttgggtatgtcttt

SEQ ID NO: 409352 - DNA, 15 bp, Homo sapiens
tcttgggtatgtctt

SEQ ID NO: 409353 - DNA, 15 bp, Homo sapiens
gtcttgggtatgtct

SEQ ID NO: 409354 - DNA, 15 bp, Homo sapiens
cgtcttgggtatgtc

SEQ ID NO: 409355 - DNA, 15 bp, Homo sapiens
ccgtcttgggtatgt

SEQ ID NO: 409356 - DNA, 15 bp, Homo sapiens
cccgtcttgggtatg

SEQ ID NO: 409357 - DNA, 15 bp, Homo sapiens
ccccgtcttgggtat

SEQ ID NO: 409358 - DNA, 15 bp, Homo sapiens
gccccgtcttgggta

SEQ ID NO: 409359 - DNA, 15 bp, Homo sapiens
tgccccgtcttgggt

SEQ ID NO: 409360 - DNA, 15 bp, Homo sapiens
ttgccccgtcttggg

SEQ ID NO: 409361 - DNA, 15 bp, Homo sapiens
attgccccgtcttgg

SEQ ID NO: 409362 - DNA, 15 bp, Homo sapiens
aattgccccgtcttg

SEQ ID NO: 409363 - DNA, 15 bp, Homo sapiens
aaattgccccgtctt

SEQ ID NO: 409364 - DNA, 15 bp, Homo sapiens
taaattgccccgtct

SEQ ID NO: 409365 - DNA, 15 bp, Homo sapiens
gtaaattgccccgtc

SEQ ID NO: 409366 - DNA, 15 bp, Homo sapiens
tgtaaattgccccgt

SEQ ID NO: 409367 - DNA, 15 bp, Homo sapiens
ttgtaaattgccccg

SEQ ID NO: 409368 - DNA, 15 bp, Homo sapiens
tttgtaaattgcccc

SEQ ID NO: 409369 - DNA, 15 bp, Homo sapiens
ttttgtaaattgccc

SEQ ID NO: 409370 - DNA, 15 bp, Homo sapiens
cttttgtaaattgcc

SEQ ID NO: 409371 - DNA, 15 bp, Homo sapiens
tcttttgtaaattgc

SEQ ID NO: 409372 - DNA, 15 bp, Homo sapiens
ttcttttgtaaattg

SEQ ID NO: 409373 - DNA, 15 bp, Homo sapiens
tttcttttgtaaatt

SEQ ID NO: 409374 - DNA, 15 bp, Homo sapiens
ctttcttttgtaaat

SEQ ID NO: 409375 - DNA, 15 bp, Homo sapiens
tctttcttttgtaaa

SEQ ID NO: 409376 - DNA, 15 bp, Homo sapiens
ctctttcttttgtaa

SEQ ID NO: 409377 - DNA, 15 bp, Homo sapiens
cctctttcttttgta

SEQ ID NO: 409378 - DNA, 15 bp, Homo sapiens
acctctttcttttgt

SEQ ID NO: 409379 - DNA, 15 bp, Homo sapiens
aacctctttcttttg

SEQ ID NO: 409380 - DNA, 15 bp, Homo sapiens
aaacctctttctttt

SEQ ID NO: 409381 - DNA, 15 bp, Homo sapiens
taaacctctttcttt

SEQ ID NO: 409382 - DNA, 15 bp, Homo sapiens
ttaaacctctttctt

SEQ ID NO: 409383 - DNA, 15 bp, Homo sapiens
attaaacctctttct

SEQ ID NO: 409384 - DNA, 15 bp, Homo sapiens
ccaattaaacctctt

SEQ ID NO: 409385 - DNA, 15 bp, Homo sapiens
tccaattaaacctct

SEQ ID NO: 409386 - DNA, 15 bp, Homo sapiens
gtccaattaaacctc

SEQ ID NO: 409387 - DNA, 15 bp, Homo sapiens
agtccaattaaacct

SEQ ID NO: 409388 - DNA, 15 bp, Homo sapiens
aagtccaattaaacc

SEQ ID NO: 409389 - DNA, 15 bp, Homo sapiens
taagtccaattaaac

SEQ ID NO: 409390 - DNA, 15 bp, Homo sapiens
gtaagtccaattaaa

SEQ ID NO: 409391 - DNA, 15 bp, Homo sapiens
tgtaagtccaattaa

SEQ ID NO: 409392 - DNA, 15 bp, Homo sapiens
ctgtaagtccaatta

SEQ ID NO: 409393 - DNA, 15 bp, Homo sapiens
actgtaagtccaatt

SEQ ID NO: 409394 - DNA, 15 bp, Homo sapiens
aactgtaagtccaat

SEQ ID NO: 409395 - DNA, 15 bp, Homo sapiens
gaactgtaagtccaa

SEQ ID NO: 409396 - DNA, 15 bp, Homo sapiens
ggaactgtaagtcca

SEQ ID NO: 409397 - DNA, 15 bp, Homo sapiens
tggaactgtaagtcc

SEQ ID NO: 409398 - DNA, 15 bp, Homo sapiens
cgtggaactgtaagt

SEQ ID NO: 409399 - DNA, 15 bp, Homo sapiens
acgtggaactgtaag

SEQ ID NO: 409400 - DNA, 15 bp, Homo sapiens
cacgtggaactgtaa

SEQ ID NO: 409401 - DNA, 15 bp, Homo sapiens
ccacgtggaactgta

SEQ ID NO: 409402 - DNA, 15 bp, Homo sapiens
gccacgtggaactgt

SEQ ID NO: 409403 - DNA, 15 bp, Homo sapiens
agccacgtggaactg

SEQ ID NO: 409404 - DNA, 15 bp, Homo sapiens
cagccacgtggaact

SEQ ID NO: 409405 - DNA, 15 bp, Homo sapiens
ccagccacgtggaac

SEQ ID NO: 409406 - DNA, 15 bp, Homo sapiens
cccagccacgtggaa

SEQ ID NO: 409407 - DNA, 15 bp, Homo sapiens
ccccagccacgtgga

SEQ ID NO: 409408 - DNA, 15 bp, Homo sapiens
tccccagccacgtgg

SEQ ID NO: 409409 - DNA, 15 bp, Homo sapiens
ttccccagccacgtg

SEQ ID NO: 409410 - DNA, 15 bp, Homo sapiens
cttccccagccacgt

SEQ ID NO: 409411 - DNA, 15 bp, Homo sapiens
gcttccccagccacg

SEQ ID NO: 409412 - DNA, 15 bp, Homo sapiens
ggcttccccagccac

SEQ ID NO: 409413 - DNA, 15 bp, Homo sapiens
aggcttccccagcca

SEQ ID NO: 409414 - DNA, 15 bp, Homo sapiens
gaggcttccccagcc

SEQ ID NO: 409415 - DNA, 15 bp, Homo sapiens
tgaggcttccccagc

SEQ ID NO: 409416 - DNA, 15 bp, Homo sapiens
gtgaggcttccccag

SEQ ID NO: 409417 - DNA, 15 bp, Homo sapiens
tgtgaggcttcccca

SEQ ID NO: 409418 - DNA, 15 bp, Homo sapiens
ttgtgaggcttcccc

SEQ ID NO: 409419 - DNA, 15 bp, Homo sapiens
attgtgaggcttccc

SEQ ID NO: 409420 - DNA, 15 bp, Homo sapiens
gattgtgaggcttcc

SEQ ID NO: 409421 - DNA, 15 bp, Homo sapiens
tgattgtgaggcttc

SEQ ID NO: 409422 - DNA, 15 bp, Homo sapiens
atgattgtgaggctt

SEQ ID NO: 409423 - DNA, 15 bp, Homo sapiens
catgattgtgaggct

SEQ ID NO: 409424 - DNA, 15 bp, Homo sapiens
ccatgattgtgaggc

SEQ ID NO: 409425 - DNA, 15 bp, Homo sapiens
gccatgattgtgagg

SEQ ID NO: 409426 - DNA, 15 bp, Homo sapiens
tgccatgattgtgag

SEQ ID NO: 409427 - DNA, 15 bp, Homo sapiens
ctgccatgattgtga

SEQ ID NO: 409428 - DNA, 15 bp, Homo sapiens
tctgccatgattgtg

SEQ ID NO: 409429 - DNA, 15 bp, Homo sapiens
ttctgccatgattgt

SEQ ID NO: 409430 - DNA, 15 bp, Homo sapiens
cttctgccatgattg

SEQ ID NO: 409431 - DNA, 15 bp, Homo sapiens
gccttctgccatgat

SEQ ID NO: 409432 - DNA, 15 bp, Homo sapiens
tgccttctgccatga

SEQ ID NO: 409433 - DNA, 15 bp, Homo sapiens
ttgccttctgccatg

SEQ ID NO: 409434 - DNA, 15 bp, Homo sapiens
cttgccttctgccat

SEQ ID NO: 409435 - DNA, 15 bp, Homo sapiens
ccttgccttctgcca

SEQ ID NO: 409436 - DNA, 15 bp, Homo sapiens
tccttgccttctgcc

SEQ ID NO: 409437 - DNA, 15 bp, Homo sapiens
ctccttgccttctgc

SEQ ID NO: 409438 - DNA, 15 bp, Homo sapiens
cctccttgccttctg

SEQ ID NO: 409439 - DNA, 15 bp, Homo sapiens
tcctccttgccttct

SEQ ID NO: 409440 - DNA, 15 bp, Homo sapiens
ctcctccttgccttc

SEQ ID NO: 409441 - DNA, 15 bp, Homo sapiens
gctcctccttgcctt

SEQ ID NO: 409442 - DNA, 15 bp, Homo sapiens
tgctcctccttgcct

SEQ ID NO: 409443 - DNA, 15 bp, Homo sapiens
ttgctcctccttgcc

SEQ ID NO: 409444 - DNA, 15 bp, Homo sapiens
cttgctcctccttgc

SEQ ID NO: 409445 - DNA, 15 bp, Homo sapiens
acttgctcctccttg

SEQ ID NO: 409446 - DNA, 15 bp, Homo sapiens
gacttgctcctcctt

SEQ ID NO: 409447 - DNA, 15 bp, Homo sapiens
tgacttgctcctcct

SEQ ID NO: 409448 - DNA, 15 bp, Homo sapiens
gtgacttgctcctcc

SEQ ID NO: 409449 - DNA, 15 bp, Homo sapiens
tgtgacttgctcctc

SEQ ID NO: 409450 - DNA, 15 bp, Homo sapiens
atgtgacttgctcct

SEQ ID NO: 409451 - DNA, 15 bp, Homo sapiens
gatgtgacttgctcc

SEQ ID NO: 409452 - DNA, 15 bp, Homo sapiens
agatgtgacttgctc

SEQ ID NO: 409453 - DNA, 15 bp, Homo sapiens
aagatgtgacttgct

SEQ ID NO: 409454 - DNA, 15 bp, Homo sapiens
taagatgtgacttgc

SEQ ID NO: 409455 - DNA, 15 bp, Homo sapiens
gtaagatgtgacttg

SEQ ID NO: 409456 - DNA, 15 bp, Homo sapiens
tgtaagatgtgactt

SEQ ID NO: 409457 - DNA, 15 bp, Homo sapiens
atgtaagatgtgact

SEQ ID NO: 409458 - DNA, 15 bp, Homo sapiens
catgtaagatgtgac

SEQ ID NO: 409459 - DNA, 15 bp, Homo sapiens
ccatgtaagatgtga

SEQ ID NO: 409460 - DNA, 15 bp, Homo sapiens
tccatgtaagatgtg

SEQ ID NO: 409461 - DNA, 15 bp, Homo sapiens
atccatgtaagatgt

SEQ ID NO: 409462 - DNA, 15 bp, Homo sapiens
catccatgtaagatg

SEQ ID NO: 409463 - DNA, 15 bp, Homo sapiens
ccatccatgtaagat

SEQ ID NO: 409464 - DNA, 15 bp, Homo sapiens
gccatccatgtaaga

SEQ ID NO: 409465 - DNA, 15 bp, Homo sapiens
tgccatccatgtaag

SEQ ID NO: 409466 - DNA, 15 bp, Homo sapiens
ctgccatccatgtaa

SEQ ID NO: 409467 - DNA, 15 bp, Homo sapiens
gctgccatccatgta

SEQ ID NO: 409468 - DNA, 15 bp, Homo sapiens
tgctgccatccatgt

SEQ ID NO: 409469 - DNA, 15 bp, Homo sapiens
ttgctgccatccatg

SEQ ID NO: 409470 - DNA, 15 bp, Homo sapiens
tttgctgccatccat

SEQ ID NO: 409471 - DNA, 15 bp, Homo sapiens
ctttgctgccatcca

SEQ ID NO: 409472 - DNA, 15 bp, Homo sapiens
tctttgctgccatcc

SEQ ID NO: 409473 - DNA, 15 bp, Homo sapiens
ctctttgctgccatc

SEQ ID NO: 409474 - DNA, 15 bp, Homo sapiens
tctctttgctgccat

SEQ ID NO: 409475 - DNA, 15 bp, Homo sapiens
ctctctttgctgcca

SEQ ID NO: 409476 - DNA, 15 bp, Homo sapiens
tctctctttgctgcc

SEQ ID NO: 409477 - DNA, 15 bp, Homo sapiens
ctctctctttgctgc

SEQ ID NO: 409478 - DNA, 15 bp, Homo sapiens
tctctctctttgctg

SEQ ID NO: 409479 - DNA, 15 bp, Homo sapiens
ttctctctctttgct

SEQ ID NO: 409480 - DNA, 15 bp, Homo sapiens
gttctctctctttgc

SEQ ID NO: 409481 - DNA, 15 bp, Homo sapiens
agttctctctctttg

SEQ ID NO: 409482 - DNA, 15 bp, Homo sapiens
gagttctctctcttt

SEQ ID NO: 409483 - DNA, 15 bp, Homo sapiens
cgagttctctctctt

SEQ ID NO: 409484 - DNA, 15 bp, Homo sapiens
acgagttctctctct

SEQ ID NO: 409485 - DNA, 15 bp, Homo sapiens
tacgagttctctctc

SEQ ID NO: 409486 - DNA, 15 bp, Homo sapiens
atacgagttctctct

SEQ ID NO: 409487 - DNA, 15 bp, Homo sapiens
tatacgagttctctc

SEQ ID NO: 409488 - DNA, 15 bp, Homo sapiens
ctatacgagttctct

SEQ ID NO: 409489 - DNA, 15 bp, Homo sapiens
cctatacgagttctc

SEQ ID NO: 409490 - DNA, 15 bp, Homo sapiens
tcctatacgagttct

SEQ ID NO: 409491 - DNA, 15 bp, Homo sapiens
ctcctatacgagttc

SEQ ID NO: 409492 - DNA, 15 bp, Homo sapiens
tctcctatacgagtt

SEQ ID NO: 409493 - DNA, 15 bp, Homo sapiens
ttctcctatacgagt

SEQ ID NO: 409494 - DNA, 15 bp, Homo sapiens
gttctcctatacgag

SEQ ID NO: 409495 - DNA, 15 bp, Homo sapiens
agttctcctatacga

SEQ ID NO: 409496 - DNA, 15 bp, Homo sapiens
gagttctcctatacg

SEQ ID NO: 409497 - DNA, 15 bp, Homo sapiens
ggagttctcctatac

SEQ ID NO: 409498 - DNA, 15 bp, Homo sapiens
gggagttctcctata

SEQ ID NO: 409499 - DNA, 15 bp, Homo sapiens
ggggagttctcctat

SEQ ID NO: 409500 - DNA, 15 bp, Homo sapiens
gggggagttctccta

SEQ ID NO: 409501 - DNA, 15 bp, Homo sapiens
agggggagttctcct

SEQ ID NO: 409502 - DNA, 15 bp, Homo sapiens
aagggggagttctcc

SEQ ID NO: 409503 - DNA, 15 bp, Homo sapiens
taagggggagttctc

SEQ ID NO: 409504 - DNA, 15 bp, Homo sapiens
ataagggggagttct

SEQ ID NO: 409505 - DNA, 15 bp, Homo sapiens
tataagggggagttc

SEQ ID NO: 409506 - DNA, 15 bp, Homo sapiens
ttataagggggagtt

SEQ ID NO: 409507 - DNA, 15 bp, Homo sapiens
attataagggggagt

SEQ ID NO: 409508 - DNA, 15 bp, Homo sapiens
tattataagggggag

SEQ ID NO: 409509 - DNA, 15 bp, Homo sapiens
ttattataaggggga

SEQ ID NO: 409510 - DNA, 15 bp, Homo sapiens
gttattataaggggg

SEQ ID NO: 409511 - DNA, 15 bp, Homo sapiens
ggttattataagggg

SEQ ID NO: 409512 - DNA, 15 bp, Homo sapiens
tggttattataaggg

SEQ ID NO: 409513 - DNA, 15 bp, Homo sapiens
atggttattataagg

SEQ ID NO: 409514 - DNA, 15 bp, Homo sapiens
gatggttattataag

SEQ ID NO: 409515 - DNA, 15 bp, Homo sapiens
tgatggttattataa

SEQ ID NO: 409516 - DNA, 15 bp, Homo sapiens
ctgatggttattata

SEQ ID NO: 409517 - DNA, 15 bp, Homo sapiens
tctgatggttattat

SEQ ID NO: 409518 - DNA, 15 bp, Homo sapiens
atctgatggttatta

SEQ ID NO: 409519 - DNA, 15 bp, Homo sapiens
gatctgatggttatt

SEQ ID NO: 409520 - DNA, 15 bp, Homo sapiens
agatctgatggttat

SEQ ID NO: 409521 - DNA, 15 bp, Homo sapiens
aagatctgatggtta

SEQ ID NO: 409522 - DNA, 15 bp, Homo sapiens
caagatctgatggtt

SEQ ID NO: 409523 - DNA, 15 bp, Homo sapiens
acaagatctgatggt

SEQ ID NO: 409524 - DNA, 15 bp, Homo sapiens
cacaagatctgatgg

SEQ ID NO: 409525 - DNA, 15 bp, Homo sapiens
tcacaagatctgatg

SEQ ID NO: 409526 - DNA, 15 bp, Homo sapiens
ctcacaagatctgat

SEQ ID NO: 409527 - DNA, 15 bp, Homo sapiens
tctcacaagatctga

SEQ ID NO: 409528 - DNA, 15 bp, Homo sapiens
gtctcacaagatctg

SEQ ID NO: 409529 - DNA, 15 bp, Homo sapiens
agtctcacaagatct

SEQ ID NO: 409530 - DNA, 15 bp, Homo sapiens
aagtctcacaagatc

SEQ ID NO: 409531 - DNA, 15 bp, Homo sapiens
taagtctcacaagat

SEQ ID NO: 409532 - DNA, 15 bp, Homo sapiens
ataagtctcacaaga

SEQ ID NO: 409533 - DNA, 15 bp, Homo sapiens
aataagtctcacaag

SEQ ID NO: 409534 - DNA, 15 bp, Homo sapiens
aaataagtctcacaa

SEQ ID NO: 409535 - DNA, 15 bp, Homo sapiens
taaataagtctcaca

SEQ ID NO: 409536 - DNA, 15 bp, Homo sapiens
gtaaataagtctcac

SEQ ID NO: 409537 - DNA, 15 bp, Homo sapiens
agtaaataagtctca

SEQ ID NO: 409538 - DNA, 15 bp, Homo sapiens
tagtaaataagtctc

SEQ ID NO: 409539 - DNA, 15 bp, Homo sapiens
atagtaaataagtct

SEQ ID NO: 409540 - DNA, 15 bp, Homo sapiens
tatagtaaataagtc

SEQ ID NO: 409541 - DNA, 15 bp, Homo sapiens
ttatagtaaataagt

SEQ ID NO: 409542 - DNA, 15 bp, Homo sapiens
attatagtaaataag

SEQ ID NO: 409543 - DNA, 15 bp, Homo sapiens
aattatagtaaataa

SEQ ID NO: 409544 - DNA, 15 bp, Homo sapiens
caattatagtaaata

SEQ ID NO: 409545 - DNA, 15 bp, Homo sapiens
tcaattatagtaaat

SEQ ID NO: 409546 - DNA, 15 bp, Homo sapiens
ctcaattatagtaaa

SEQ ID NO: 409547 - DNA, 15 bp, Homo sapiens
tctcaattatagtaa

SEQ ID NO: 409548 - DNA, 15 bp, Homo sapiens
ttctcaattatagta

SEQ ID NO: 409549 - DNA, 15 bp, Homo sapiens
gttctcaattatagt

SEQ ID NO: 409550 - DNA, 15 bp, Homo sapiens
tgttctcaattatag

SEQ ID NO: 409551 - DNA, 15 bp, Homo sapiens
ctgttctcaattata

SEQ ID NO: 409552 - DNA, 15 bp, Homo sapiens
gctgttctcaattat

SEQ ID NO: 409553 - DNA, 15 bp, Homo sapiens
tgctgttctcaatta

SEQ ID NO: 409554 - DNA, 15 bp, Homo sapiens
atgctgttctcaatt

SEQ ID NO: 409555 - DNA, 15 bp, Homo sapiens
catgctgttctcaat

SEQ ID NO: 409556 - DNA, 15 bp, Homo sapiens
ccatgctgttctcaa

SEQ ID NO: 409557 - DNA, 15 bp, Homo sapiens
cccatgctgttctca

SEQ ID NO: 409558 - DNA, 15 bp, Homo sapiens
tcccatgctgttctc

SEQ ID NO: 409559 - DNA, 15 bp, Homo sapiens
ttcccatgctgttct

SEQ ID NO: 409560 - DNA, 15 bp, Homo sapiens
tttcccatgctgttc

SEQ ID NO: 409561 - DNA, 15 bp, Homo sapiens
ctttcccatgctgtt

SEQ ID NO: 409562 - DNA, 15 bp, Homo sapiens
tctttcccatgctgt

SEQ ID NO: 409563 - DNA, 15 bp, Homo sapiens
gtctttcccatgctg

SEQ ID NO: 409564 - DNA, 15 bp, Homo sapiens
ggtctttcccatgct

SEQ ID NO: 409565 - DNA, 15 bp, Homo sapiens
gggtctttcccatgc

SEQ ID NO: 409566 - DNA, 15 bp, Homo sapiens
cgggtctttcccatg

SEQ ID NO: 409567 - DNA, 15 bp, Homo sapiens
gcgggtctttcccat

SEQ ID NO: 409568 - DNA, 15 bp, Homo sapiens
ggcgggtctttccca

SEQ ID NO: 409569 - DNA, 15 bp, Homo sapiens
gggcgggtctttccc

SEQ ID NO: 409570 - DNA, 15 bp, Homo sapiens
ggggcgggtctttcc

SEQ ID NO: 409571 - DNA, 15 bp, Homo sapiens
gggggcgggtctttc

SEQ ID NO: 409572 - DNA, 15 bp, Homo sapiens
tgggggcgggtcttt

SEQ ID NO: 409573 - DNA, 15 bp, Homo sapiens
atgggggcgggtctt

SEQ ID NO: 409574 - DNA, 15 bp, Homo sapiens
catgggggcgggtct

SEQ ID NO: 409575 - DNA, 15 bp, Homo sapiens
tcatgggggcgggtc

SEQ ID NO: 409576 - DNA, 15 bp, Homo sapiens
atcatgggggcgggt

SEQ ID NO: 409577 - DNA, 15 bp, Homo sapiens
aatcatgggggcggg

SEQ ID NO: 409578 - DNA, 15 bp, Homo sapiens
gaatcatgggggcgg

SEQ ID NO: 409579 - DNA, 15 bp, Homo sapiens
tgaatcatgggggcg

SEQ ID NO: 409580 - DNA, 15 bp, Homo sapiens
gagtgggaggtaatt

SEQ ID NO: 409581 - DNA, 15 bp, Homo sapiens
cgagtgggaggtaat

SEQ ID NO: 409582 - DNA, 15 bp, Homo sapiens
ccgagtgggaggtaa

SEQ ID NO: 409583 - DNA, 15 bp, Homo sapiens
accgagtgggaggta

SEQ ID NO: 409584 - DNA, 15 bp, Homo sapiens
gaccgagtgggaggt

SEQ ID NO: 409585 - DNA, 15 bp, Homo sapiens
ggaccgagtgggagg

SEQ ID NO: 409586 - DNA, 15 bp, Homo sapiens
gggaccgagtgggag

SEQ ID NO: 409587 - DNA, 15 bp, Homo sapiens
agggaccgagtggga

SEQ ID NO: 409588 - DNA, 15 bp, Homo sapiens
gagggaccgagtggg

SEQ ID NO: 409589 - DNA, 15 bp, Homo sapiens
ggagggaccgagtgg

SEQ ID NO: 409590 - DNA, 15 bp, Homo sapiens
gggagggaccgagtg

SEQ ID NO: 409591 - DNA, 15 bp, Homo sapiens
tgggagggaccgagt

SEQ ID NO: 409592 - DNA, 15 bp, Homo sapiens
gtgggagggaccgag

SEQ ID NO: 409593 - DNA, 15 bp, Homo sapiens
tgtgggagggaccga

SEQ ID NO: 409594 - DNA, 15 bp, Homo sapiens
ttgtgggagggaccg

SEQ ID NO: 409595 - DNA, 15 bp, Homo sapiens
gttgtgggagggacc

SEQ ID NO: 409596 - DNA, 15 bp, Homo sapiens
tgttgtgggagggac

SEQ ID NO: 409597 - DNA, 15 bp, Homo sapiens
gtgttgtgggaggga

SEQ ID NO: 409598 - DNA, 15 bp, Homo sapiens
cgtgttgtgggaggg

SEQ ID NO: 409599 - DNA, 15 bp, Homo sapiens
acgtgttgtgggagg

SEQ ID NO: 409600 - DNA, 15 bp, Homo sapiens
cacgtgttgtgggag

SEQ ID NO: 409601 - DNA, 15 bp, Homo sapiens
ccacgtgttgtggga

SEQ ID NO: 409602 - DNA, 15 bp, Homo sapiens
cccacgtgttgtggg

SEQ ID NO: 409603 - DNA, 15 bp, Homo sapiens
tcccacgtgttgtgg

SEQ ID NO: 409604 - DNA, 15 bp, Homo sapiens
ttcccacgtgttgtg

SEQ ID NO: 409605 - DNA, 15 bp, Homo sapiens
attcccacgtgttgt

SEQ ID NO: 409606 - DNA, 15 bp, Homo sapiens
aattcccacgtgttg

SEQ ID NO: 409607 - DNA, 15 bp, Homo sapiens
gaattcccacgtgtt

SEQ ID NO: 409608 - DNA, 15 bp, Homo sapiens
tgaattcccacgtgt

SEQ ID NO: 409609 - DNA, 15 bp, Homo sapiens
ttgaattcccacgtg

SEQ ID NO: 409610 - DNA, 15 bp, Homo sapiens
cttgaattcccacgt

SEQ ID NO: 409611 - DNA, 15 bp, Homo sapiens
tcttgaattcccacg

SEQ ID NO: 409612 - DNA, 15 bp, Homo sapiens
atcttgaattcccac

SEQ ID NO: 409613 - DNA, 15 bp, Homo sapiens
catcttgaattccca

SEQ ID NO: 409614 - DNA, 15 bp, Homo sapiens
tcatcttgaattccc

SEQ ID NO: 409615 - DNA, 15 bp, Homo sapiens
ttcatcttgaattcc

SEQ ID NO: 409616 - DNA, 15 bp, Homo sapiens
tttcatcttgaattc

SEQ ID NO: 409617 - DNA, 15 bp, Homo sapiens
atttcatcttgaatt

SEQ ID NO: 409618 - DNA, 15 bp, Homo sapiens
aatttcatcttgaat

SEQ ID NO: 409619 - DNA, 15 bp, Homo sapiens
aaatttcatcttgaa

SEQ ID NO: 409620 - DNA, 15 bp, Homo sapiens
caaatttcatcttga

SEQ ID NO: 409621 - DNA, 15 bp, Homo sapiens
ccaaatttcatcttg

SEQ ID NO: 409622 - DNA, 15 bp, Homo sapiens
cccaaatttcatctt

SEQ ID NO: 409623 - DNA, 15 bp, Homo sapiens
acccaaatttcatct

SEQ ID NO: 409624 - DNA, 15 bp, Homo sapiens
cacccaaatttcatc

SEQ ID NO: 409625 - DNA, 15 bp, Homo sapiens
gcacccaaatttcat

SEQ ID NO: 409626 - DNA, 15 bp, Homo sapiens
tgcacccaaatttca

SEQ ID NO: 409627 - DNA, 15 bp, Homo sapiens
ctgcacccaaatttc

SEQ ID NO: 409628 - DNA, 15 bp, Homo sapiens
tctgcacccaaattt

SEQ ID NO: 409629 - DNA, 15 bp, Homo sapiens
gtctgcacccaaatt

SEQ ID NO: 409630 - DNA, 15 bp, Homo sapiens
tgtctgcacccaaat

SEQ ID NO: 409631 - DNA, 15 bp, Homo sapiens
gtgtctgcacccaaa

SEQ ID NO: 409632 - DNA, 15 bp, Homo sapiens
tgtgtctgcacccaa

SEQ ID NO: 409633 - DNA, 15 bp, Homo sapiens
ctgtgtctgcaccca

SEQ ID NO: 409634 - DNA, 15 bp, Homo sapiens
gctgtgtctgcaccc

SEQ ID NO: 409635 - DNA, 15 bp, Homo sapiens
ggctgtgtctgcacc

SEQ ID NO: 409636 - DNA, 15 bp, Homo sapiens
tggctgtgtctgcac

SEQ ID NO: 409637 - DNA, 15 bp, Homo sapiens
ttggctgtgtctgca

SEQ ID NO: 409638 - DNA, 15 bp, Homo sapiens
tttggctgtgtctgc

SEQ ID NO: 409639 - DNA, 15 bp, Homo sapiens
gtttggctgtgtctg

SEQ ID NO: 409640 - DNA, 15 bp, Homo sapiens
ggtttggctgtgtct

SEQ ID NO: 409641 - DNA, 15 bp, Homo sapiens
atgatatggtttggc

SEQ ID NO: 409642 - DNA, 15 bp, Homo sapiens
aatgatatggtttgg

SEQ ID NO: 409643 - DNA, 15 bp, Homo sapiens
gaatgatatggtttg

SEQ ID NO: 409644 - DNA, 15 bp, Homo sapiens
ggaatgatatggttt

SEQ ID NO: 409645 - DNA, 15 bp, Homo sapiens
tggaatgatatggtt

SEQ ID NO: 409646 - DNA, 15 bp, Homo sapiens
gtggaatgatatggt

SEQ ID NO: 409647 - DNA, 15 bp, Homo sapiens
ggtggaatgatatgg

SEQ ID NO: 409648 - DNA, 15 bp, Homo sapiens
gggtggaatgatatg

SEQ ID NO: 409649 - DNA, 15 bp, Homo sapiens
agggtggaatgatat

SEQ ID NO: 409650 - DNA, 15 bp, Homo sapiens
aagggtggaatgata

SEQ ID NO: 409651 - DNA, 15 bp, Homo sapiens
caagggtggaatgat

SEQ ID NO: 409652 - DNA, 15 bp, Homo sapiens
ccaagggtggaatga

SEQ ID NO: 409653 - DNA, 15 bp, Homo sapiens
gccaagggtggaatg

SEQ ID NO: 409654 - DNA, 15 bp, Homo sapiens
ggccaagggtggaat

SEQ ID NO: 409655 - DNA, 15 bp, Homo sapiens
gggccaagggtggaa

SEQ ID NO: 409656 - DNA, 15 bp, Homo sapiens
ggggccaagggtgga

SEQ ID NO: 409657 - DNA, 15 bp, Homo sapiens
aggggccaagggtgg

SEQ ID NO: 409658 - DNA, 15 bp, Homo sapiens
aatttgggaggggcc

SEQ ID NO: 409659 - DNA, 15 bp, Homo sapiens
aaatttgggaggggc

SEQ ID NO: 409660 - DNA, 15 bp, Homo sapiens
gaaatttgggagggg

SEQ ID NO: 409661 - DNA, 15 bp, Homo sapiens
tgaaatttgggaggg

SEQ ID NO: 409662 - DNA, 15 bp, Homo sapiens
atgaaatttgggagg

SEQ ID NO: 409663 - DNA, 15 bp, Homo sapiens
catgaaatttgggag

SEQ ID NO: 409664 - DNA, 15 bp, Homo sapiens
acatgaaatttggga

SEQ ID NO: 409665 - DNA, 15 bp, Homo sapiens
gacatgaaatttggg

SEQ ID NO: 409666 - DNA, 15 bp, Homo sapiens
ggacatgaaatttgg

SEQ ID NO: 409667 - DNA, 15 bp, Homo sapiens
aggacatgaaatttg

SEQ ID NO: 409668 - DNA, 15 bp, Homo sapiens
gaggacatgaaattt

SEQ ID NO: 409669 - DNA, 15 bp, Homo sapiens
tgaggacatgaaatt

SEQ ID NO: 409670 - DNA, 15 bp, Homo sapiens
gtgaggacatgaaat

SEQ ID NO: 409671 - DNA, 15 bp, Homo sapiens
tgtgaggacatgaaa

SEQ ID NO: 409672 - DNA, 15 bp, Homo sapiens
atgtgaggacatgaa

SEQ ID NO: 409673 - DNA, 15 bp, Homo sapiens
gtttgaaatgtgagg

SEQ ID NO: 409674 - DNA, 15 bp, Homo sapiens
ggtttgaaatgtgag

SEQ ID NO: 409675 - DNA, 15 bp, Homo sapiens
tggtttgaaatgtga

SEQ ID NO: 409676 - DNA, 15 bp, Homo sapiens
ttggtttgaaatgtg

SEQ ID NO: 409677 - DNA, 15 bp, Homo sapiens
attggtttgaaatgt

SEQ ID NO: 409678 - DNA, 15 bp, Homo sapiens
gattggtttgaaatg

SEQ ID NO: 409679 - DNA, 15 bp, Homo sapiens
tgattggtttgaaat

SEQ ID NO: 409680 - DNA, 15 bp, Homo sapiens
atgattggtttgaaa

SEQ ID NO: 409681 - DNA, 15 bp, Homo sapiens
catgattggtttgaa

SEQ ID NO: 409682 - DNA, 15 bp, Homo sapiens
gcatgattggtttga

SEQ ID NO: 409683 - DNA, 15 bp, Homo sapiens
ggcatgattggtttg

SEQ ID NO: 409684 - DNA, 15 bp, Homo sapiens
aggcatgattggttt

SEQ ID NO: 409685 - DNA, 15 bp, Homo sapiens
aaggcatgattggtt

SEQ ID NO: 409686 - DNA, 15 bp, Homo sapiens
gaaggcatgattggt

SEQ ID NO: 409687 - DNA, 15 bp, Homo sapiens
ggaaggcatgattgg

SEQ ID NO: 409688 - DNA, 15 bp, Homo sapiens
gactgttgggaaggc

SEQ ID NO: 409689 - DNA, 15 bp, Homo sapiens
ggactgttgggaagg

SEQ ID NO: 409690 - DNA, 15 bp, Homo sapiens
gggactgttgggaag

SEQ ID NO: 409691 - DNA, 15 bp, Homo sapiens
ggggactgttgggaa

SEQ ID NO: 409692 - DNA, 15 bp, Homo sapiens
gggggactgttggga

SEQ ID NO: 409693 - DNA, 15 bp, Homo sapiens
tgggggactgttggg

SEQ ID NO: 409694 - DNA, 15 bp, Homo sapiens
ttgggggactgttgg

SEQ ID NO: 409695 - DNA, 15 bp, Homo sapiens
tttgggggactgttg

SEQ ID NO: 409696 - DNA, 15 bp, Homo sapiens
ctttgggggactgtt

SEQ ID NO: 409697 - DNA, 15 bp, Homo sapiens
actttgggggactgt

SEQ ID NO: 409698 - DNA, 15 bp, Homo sapiens
gactttgggggactg

SEQ ID NO: 409699 - DNA, 15 bp, Homo sapiens
agactttgggggact

SEQ ID NO: 409700 - DNA, 15 bp, Homo sapiens
aagactttgggggac

SEQ ID NO: 409701 - DNA, 15 bp, Homo sapiens
taagactttggggga

SEQ ID NO: 409702 - DNA, 15 bp, Homo sapiens
ttaagactttggggg

SEQ ID NO: 409703 - DNA, 15 bp, Homo sapiens
gttaagactttgggg

SEQ ID NO: 409704 - DNA, 15 bp, Homo sapiens
agttaagactttggg

SEQ ID NO: 409705 - DNA, 15 bp, Homo sapiens
aaatgagttaagact

SEQ ID NO: 409706 - DNA, 15 bp, Homo sapiens
gaaatgagttaagac

SEQ ID NO: 409707 - DNA, 15 bp, Homo sapiens
tgaaatgagttaaga

SEQ ID NO: 409708 - DNA, 15 bp, Homo sapiens
ctgaaatgagttaag

SEQ ID NO: 409709 - DNA, 15 bp, Homo sapiens
actgaaatgagttaa

SEQ ID NO: 409710 - DNA, 15 bp, Homo sapiens
tactgaaatgagtta

SEQ ID NO: 409711 - DNA, 15 bp, Homo sapiens
atactgaaatgagtt

SEQ ID NO: 409712 - DNA, 15 bp, Homo sapiens
aatactgaaatgagt

SEQ ID NO: 409713 - DNA, 15 bp, Homo sapiens
taatactgaaatgag

SEQ ID NO: 409714 - DNA, 15 bp, Homo sapiens
ttaatactgaaatga

SEQ ID NO: 409715 - DNA, 15 bp, Homo sapiens
gttaatactgaaatg

SEQ ID NO: 409716 - DNA, 15 bp, Homo sapiens
agttaatactgaaat

SEQ ID NO: 409717 - DNA, 15 bp, Homo sapiens
tagttaatactgaaa

SEQ ID NO: 409718 - DNA, 15 bp, Homo sapiens
ttagttaatactgaa

SEQ ID NO: 409719 - DNA, 15 bp, Homo sapiens
tttagttaatactga

SEQ ID NO: 409720 - DNA, 15 bp, Homo sapiens
ttttagttaatactg

SEQ ID NO: 409721 - DNA, 15 bp, Homo sapiens
cttttagttaatact

SEQ ID NO: 409722 - DNA, 15 bp, Homo sapiens
ccttttagttaatac

SEQ ID NO: 409723 - DNA, 15 bp, Homo sapiens
accttttagttaata

SEQ ID NO: 409724 - DNA, 15 bp, Homo sapiens
gaccttttagttaat

SEQ ID NO: 409725 - DNA, 15 bp, Homo sapiens
agaccttttagttaa

SEQ ID NO: 409726 - DNA, 15 bp, Homo sapiens
tagaccttttagtta

SEQ ID NO: 409727 - DNA, 15 bp, Homo sapiens
gtagaccttttagtt

SEQ ID NO: 409728 - DNA, 15 bp, Homo sapiens
tgtagaccttttagt

SEQ ID NO: 409729 - DNA, 15 bp, Homo sapiens
ctgtagaccttttag

SEQ ID NO: 409730 - DNA, 15 bp, Homo sapiens
actgtagacctttta

SEQ ID NO: 409731 - DNA, 15 bp, Homo sapiens
gactgtagacctttt

SEQ ID NO: 409732 - DNA, 15 bp, Homo sapiens
ggactgtagaccttt

SEQ ID NO: 409733 - DNA, 15 bp, Homo sapiens
tggactgtagacctt

SEQ ID NO: 409734 - DNA, 15 bp, Homo sapiens
ttggactgtagacct

SEQ ID NO: 409735 - DNA, 15 bp, Homo sapiens
tttggactgtagacc

SEQ ID NO: 409736 - DNA, 15 bp, Homo sapiens
ctttggactgtagac

SEQ ID NO: 409737 - DNA, 15 bp, Homo sapiens
actttggactgtaga

SEQ ID NO: 409738 - DNA, 15 bp, Homo sapiens
gactttggactgtag

SEQ ID NO: 409739 - DNA, 15 bp, Homo sapiens
agactttggactgta

SEQ ID NO: 409740 - DNA, 15 bp, Homo sapiens
gagactttggactgt

SEQ ID NO: 409741 - DNA, 15 bp, Homo sapiens
tgagactttggactg

SEQ ID NO: 409742 - DNA, 15 bp, Homo sapiens
ttcagatgagacttt

SEQ ID NO: 409743 - DNA, 15 bp, Homo sapiens
tttcagatgagactt

SEQ ID NO: 409744 - DNA, 15 bp, Homo sapiens
ttttcagatgagact

SEQ ID NO: 409745 - DNA, 15 bp, Homo sapiens
tttttcagatgagac

SEQ ID NO: 409746 - DNA, 15 bp, Homo sapiens
ttttttcagatgaga

SEQ ID NO: 409747 - DNA, 15 bp, Homo sapiens
cttttttcagatgag

SEQ ID NO: 409748 - DNA, 15 bp, Homo sapiens
ccttttttcagatga

SEQ ID NO: 409749 - DNA, 15 bp, Homo sapiens
gccttttttcagatg

SEQ ID NO: 409750 - DNA, 15 bp, Homo sapiens
tgccttttttcagat

SEQ ID NO: 409751 - DNA, 15 bp, Homo sapiens
ttgccttttttcaga

SEQ ID NO: 409752 - DNA, 15 bp, Homo sapiens
cttgccttttttcag

SEQ ID NO: 409753 - DNA, 15 bp, Homo sapiens
acttgccttttttca

SEQ ID NO: 409754 - DNA, 15 bp, Homo sapiens
gacttgccttttttc

SEQ ID NO: 409755 - DNA, 15 bp, Homo sapiens
ggacttgcctttttt

SEQ ID NO: 409756 - DNA, 15 bp, Homo sapiens
gggacttgccttttt

SEQ ID NO: 409757 - DNA, 15 bp, Homo sapiens
agggacttgcctttt

SEQ ID NO: 409758 - DNA, 15 bp, Homo sapiens
aagggacttgccttt

SEQ ID NO: 409759 - DNA, 15 bp, Homo sapiens
taagggacttgcctt

SEQ ID NO: 409760 - DNA, 15 bp, Homo sapiens
ctaagggacttgcct

SEQ ID NO: 409761 - DNA, 15 bp, Homo sapiens
cctaagggacttgcc

SEQ ID NO: 409762 - DNA, 15 bp, Homo sapiens
gcctaagggacttgc

SEQ ID NO: 409763 - DNA, 15 bp, Homo sapiens
ggcctaagggacttg

SEQ ID NO: 409764 - DNA, 15 bp, Homo sapiens
aggcctaagggactt

SEQ ID NO: 409765 - DNA, 15 bp, Homo sapiens
taggcctaagggact

SEQ ID NO: 409766 - DNA, 15 bp, Homo sapiens
ataggcctaagggac

SEQ ID NO: 409767 - DNA, 15 bp, Homo sapiens
cataggcctaaggga

SEQ ID NO: 409768 - DNA, 15 bp, Homo sapiens
tcataggcctaaggg

SEQ ID NO: 409769 - DNA, 15 bp, Homo sapiens
ctcataggcctaagg

SEQ ID NO: 409770 - DNA, 15 bp, Homo sapiens
gctcataggcctaag

SEQ ID NO: 409771 - DNA, 15 bp, Homo sapiens
ggctcataggcctaa

SEQ ID NO: 409772 - DNA, 15 bp, Homo sapiens
aggctcataggccta

SEQ ID NO: 409773 - DNA, 15 bp, Homo sapiens
caggctcataggcct

SEQ ID NO: 409774 - DNA, 15 bp, Homo sapiens
acaggctcataggcc

SEQ ID NO: 409775 - DNA, 15 bp, Homo sapiens
ctgcttttgatttta

SEQ ID NO: 409776 - DNA, 15 bp, Homo sapiens
cctgcttttgatttt

SEQ ID NO: 409777 - DNA, 15 bp, Homo sapiens
acctgcttttgattt

SEQ ID NO: 409778 - DNA, 15 bp, Homo sapiens
aacctgcttttgatt

SEQ ID NO: 409779 - DNA, 15 bp, Homo sapiens
gaacctgcttttgat

SEQ ID NO: 409780 - DNA, 15 bp, Homo sapiens
cgaacctgcttttga

SEQ ID NO: 409781 - DNA, 15 bp, Homo sapiens
acgaacctgcttttg

SEQ ID NO: 409782 - DNA, 15 bp, Homo sapiens
aacgaacctgctttt

SEQ ID NO: 409783 - DNA, 15 bp, Homo sapiens
taacgaacctgcttt

SEQ ID NO: 409784 - DNA, 15 bp, Homo sapiens
gtaacgaacctgctt

SEQ ID NO: 409785 - DNA, 15 bp, Homo sapiens
agtaacgaacctgct

SEQ ID NO: 409786 - DNA, 15 bp, Homo sapiens
aagtaacgaacctgc

SEQ ID NO: 409787 - DNA, 15 bp, Homo sapiens
gaagtaacgaacctg

SEQ ID NO: 409788 - DNA, 15 bp, Homo sapiens
ggaagtaacgaacct

SEQ ID NO: 409789 - DNA, 15 bp, Homo sapiens
aggaagtaacgaacc

SEQ ID NO: 409790 - DNA, 15 bp, Homo sapiens
taggaagtaacgaac

SEQ ID NO: 409791 - DNA, 15 bp, Homo sapiens
ctaggaagtaacgaa

SEQ ID NO: 409792 - DNA, 15 bp, Homo sapiens
tctaggaagtaacga

SEQ ID NO: 409793 - DNA, 15 bp, Homo sapiens
atctaggaagtaacg

SEQ ID NO: 409794 - DNA, 15 bp, Homo sapiens
tgtatctaggaagta

SEQ ID NO: 409795 - DNA, 15 bp, Homo sapiens
ttgtatctaggaagt

SEQ ID NO: 409796 - DNA, 15 bp, Homo sapiens
attgtatctaggaag

SEQ ID NO: 409797 - DNA, 15 bp, Homo sapiens
cattgtatctaggaa

SEQ ID NO: 409798 - DNA, 15 bp, Homo sapiens
ccattgtatctagga

SEQ ID NO: 409799 - DNA, 15 bp, Homo sapiens
cccattgtatctagg

SEQ ID NO: 409800 - DNA, 15 bp, Homo sapiens
ccccattgtatctag

SEQ ID NO: 409801 - DNA, 15 bp, Homo sapiens
cccccattgtatcta

SEQ ID NO: 409802 - DNA, 15 bp, Homo sapiens
acccccattgtatct

SEQ ID NO: 409803 - DNA, 15 bp, Homo sapiens
tacccccattgtatc

SEQ ID NO: 409804 - DNA, 15 bp, Homo sapiens
gtacccccattgtat

SEQ ID NO: 409805 - DNA, 15 bp, Homo sapiens
tgtacccccattgta

SEQ ID NO: 409806 - DNA, 15 bp, Homo sapiens
ctgtacccccattgt

SEQ ID NO: 409807 - DNA, 15 bp, Homo sapiens
gctgtacccccattg

SEQ ID NO: 409808 - DNA, 15 bp, Homo sapiens
tgctgtacccccatt

SEQ ID NO: 409809 - DNA, 15 bp, Homo sapiens
atgctgtacccccat

SEQ ID NO: 409810 - DNA, 15 bp, Homo sapiens
aatgctgtaccccca

SEQ ID NO: 409811 - DNA, 15 bp, Homo sapiens
caatgctgtaccccc

SEQ ID NO: 409812 - DNA, 15 bp, Homo sapiens
ccaatgctgtacccc

SEQ ID NO: 409813 - DNA, 15 bp, Homo sapiens
cccaatgctgtaccc

SEQ ID NO: 409814 - DNA, 15 bp, Homo sapiens
acccaatgctgtacc

SEQ ID NO: 409815 - DNA, 15 bp, Homo sapiens
tacccaatgctgtac

SEQ ID NO: 409816 - DNA, 15 bp, Homo sapiens
ttacccaatgctgta

SEQ ID NO: 409817 - DNA, 15 bp, Homo sapiens
tttacccaatgctgt

SEQ ID NO: 409818 - DNA, 15 bp, Homo sapiens
atttacccaatgctg

SEQ ID NO: 409819 - DNA, 15 bp, Homo sapiens
tatttacccaatgct

SEQ ID NO: 409820 - DNA, 15 bp, Homo sapiens
gtatttacccaatgc

SEQ ID NO: 409821 - DNA, 15 bp, Homo sapiens
tgtatttacccaatg

SEQ ID NO: 409822 - DNA, 15 bp, Homo sapiens
ctgtatttacccaat

SEQ ID NO: 409823 - DNA, 15 bp, Homo sapiens
gctgtatttacccaa

SEQ ID NO: 409824 - DNA, 15 bp, Homo sapiens
ggctgtatttaccca

SEQ ID NO: 409825 - DNA, 15 bp, Homo sapiens
tggctgtatttaccc

SEQ ID NO: 409826 - DNA, 15 bp, Homo sapiens
atggctgtatttacc

SEQ ID NO: 409827 - DNA, 15 bp, Homo sapiens
gatggctgtatttac

SEQ ID NO: 409828 - DNA, 15 bp, Homo sapiens
ggatggctgtattta

SEQ ID NO: 409829 - DNA, 15 bp, Homo sapiens
gggatggctgtattt

SEQ ID NO: 409830 - DNA, 15 bp, Homo sapiens
tgggatggctgtatt

SEQ ID NO: 409831 - DNA, 15 bp, Homo sapiens
ttgggatggctgtat

SEQ ID NO: 409832 - DNA, 15 bp, Homo sapiens
tttgggatggctgta

SEQ ID NO: 409833 - DNA, 15 bp, Homo sapiens
atttgggatggctgt

SEQ ID NO: 409834 - DNA, 15 bp, Homo sapiens
catttgggatggctg

SEQ ID NO: 409835 - DNA, 15 bp, Homo sapiens
ccatttgggatggct

SEQ ID NO: 409836 - DNA, 15 bp, Homo sapiens
cccatttgggatggc

SEQ ID NO: 409837 - DNA, 15 bp, Homo sapiens
tcccatttgggatgg

SEQ ID NO: 409838 - DNA, 15 bp, Homo sapiens
ctcccatttgggatg

SEQ ID NO: 409839 - DNA, 15 bp, Homo sapiens
tctcccatttgggat

SEQ ID NO: 409840 - DNA, 15 bp, Homo sapiens
ttctcccatttggga

SEQ ID NO: 409841 - DNA, 15 bp, Homo sapiens
tttctcccatttggg

SEQ ID NO: 409842 - DNA, 15 bp, Homo sapiens
atttctcccatttgg

SEQ ID NO: 409843 - DNA, 15 bp, Homo sapiens
aatttctcccatttg

SEQ ID NO: 409844 - DNA, 15 bp, Homo sapiens
caatttctcccattt

SEQ ID NO: 409845 - DNA, 15 bp, Homo sapiens
ccaatttctcccatt

SEQ ID NO: 409846 - DNA, 15 bp, Homo sapiens
gccaatttctcccat

SEQ ID NO: 409847 - DNA, 15 bp, Homo sapiens
ggccaatttctccca

SEQ ID NO: 409848 - DNA, 15 bp, Homo sapiens
tggccaatttctccc

SEQ ID NO: 409849 - DNA, 15 bp, Homo sapiens
cccctttgttttggc

SEQ ID NO: 409850 - DNA, 15 bp, Homo sapiens
gcccctttgttttgg

SEQ ID NO: 409851 - DNA, 15 bp, Homo sapiens
agacttgcatggggc

SEQ ID NO: 409852 - DNA, 15 bp, Homo sapiens
cagacttgcatgggg

SEQ ID NO: 409853 - DNA, 15 bp, Homo sapiens
tcagacttgcatggg

SEQ ID NO: 409854 - DNA, 15 bp, Homo sapiens
ttcagacttgcatgg

SEQ ID NO: 409855 - DNA, 15 bp, Homo sapiens
tttcagacttgcatg

SEQ ID NO: 409856 - DNA, 15 bp, Homo sapiens
atttcagacttgcat

SEQ ID NO: 409857 - DNA, 15 bp, Homo sapiens
gatttcagacttgca

SEQ ID NO: 409858 - DNA, 15 bp, Homo sapiens
ggatttcagacttgc

SEQ ID NO: 409859 - DNA, 15 bp, Homo sapiens
tggatttcagacttg

SEQ ID NO: 409860 - DNA, 15 bp, Homo sapiens
ctggatttcagactt

SEQ ID NO: 409861 - DNA, 15 bp, Homo sapiens
gctggatttcagact

SEQ ID NO: 409862 - DNA, 15 bp, Homo sapiens
tgctggatttcagac

SEQ ID NO: 409863 - DNA, 15 bp, Homo sapiens
ctgctggatttcaga

SEQ ID NO: 409864 - DNA, 15 bp, Homo sapiens
cctgctggatttcag

SEQ ID NO: 409865 - DNA, 15 bp, Homo sapiens
ccctgctggatttca

SEQ ID NO: 409866 - DNA, 15 bp, Homo sapiens
gccctgctggatttc

SEQ ID NO: 409867 - DNA, 15 bp, Homo sapiens
tgccctgctggattt

SEQ ID NO: 409868 - DNA, 15 bp, Homo sapiens
ttgccctgctggatt

SEQ ID NO: 409869 - DNA, 15 bp, Homo sapiens
attgccctgctggat

SEQ ID NO: 409870 - DNA, 15 bp, Homo sapiens
gattgccctgctgga

SEQ ID NO: 409871 - DNA, 15 bp, Homo sapiens
tgattgccctgctgg

SEQ ID NO: 409872 - DNA, 15 bp, Homo sapiens
ttgattgccctgctg

SEQ ID NO: 409873 - DNA, 15 bp, Homo sapiens
tttgattgccctgct

SEQ ID NO: 409874 - DNA, 15 bp, Homo sapiens
atttgattgccctgc

SEQ ID NO: 409875 - DNA, 15 bp, Homo sapiens
gatttgattgccctg

SEQ ID NO: 409876 - DNA, 15 bp, Homo sapiens
agatttgattgccct

SEQ ID NO: 409877 - DNA, 15 bp, Homo sapiens
aagatttgattgccc

SEQ ID NO: 409878 - DNA, 15 bp, Homo sapiens
taagatttgattgcc

SEQ ID NO: 409879 - DNA, 15 bp, Homo sapiens
ttaagatttgattgc

SEQ ID NO: 409880 - DNA, 15 bp, Homo sapiens
tttaagatttgattg

SEQ ID NO: 409881 - DNA, 15 bp, Homo sapiens
ctttaagatttgatt

SEQ ID NO: 409882 - DNA, 15 bp, Homo sapiens
actttaagatttgat

SEQ ID NO: 409883 - DNA, 15 bp, Homo sapiens
aactttaagatttga

SEQ ID NO: 409884 - DNA, 15 bp, Homo sapiens
gaactttaagatttg

SEQ ID NO: 409885 - DNA, 15 bp, Homo sapiens
ggaactttaagattt

SEQ ID NO: 409886 - DNA, 15 bp, Homo sapiens
tggaactttaagatt

SEQ ID NO: 409887 - DNA, 15 bp, Homo sapiens
ttggaactttaagat

SEQ ID NO: 409888 - DNA, 15 bp, Homo sapiens
tttggaactttaaga

SEQ ID NO: 409889 - DNA, 15 bp, Homo sapiens
tattttggaacttta

SEQ ID NO: 409890 - DNA, 15 bp, Homo sapiens
ttattttggaacttt

SEQ ID NO: 409891 - DNA, 15 bp, Homo sapiens
attattttggaactt

SEQ ID NO: 409892 - DNA, 15 bp, Homo sapiens
gattattttggaact

SEQ ID NO: 409893 - DNA, 15 bp, Homo sapiens
agattattttggaac

SEQ ID NO: 409894 - DNA, 15 bp, Homo sapiens
gagattattttggaa

SEQ ID NO: 409895 - DNA, 15 bp, Homo sapiens
ggagattattttgga

SEQ ID NO: 409896 - DNA, 15 bp, Homo sapiens
aggagattattttgg

SEQ ID NO: 409897 - DNA, 15 bp, Homo sapiens
aaggagattattttg

SEQ ID NO: 409898 - DNA, 15 bp, Homo sapiens
aaaggagattatttt

SEQ ID NO: 409899 - DNA, 15 bp, Homo sapiens
caaaggagattattt

SEQ ID NO: 409900 - DNA, 15 bp, Homo sapiens
tcaaaggagattatt

SEQ ID NO: 409901 - DNA, 15 bp, Homo sapiens
gtcaaaggagattat

SEQ ID NO: 409902 - DNA, 15 bp, Homo sapiens
agtcaaaggagatta

SEQ ID NO: 409903 - DNA, 15 bp, Homo sapiens
gagtcaaaggagatt

SEQ ID NO: 409904 - DNA, 15 bp, Homo sapiens
ggagtcaaaggagat

SEQ ID NO: 409905 - DNA, 15 bp, Homo sapiens
tggagtcaaaggaga

SEQ ID NO: 409906 - DNA, 15 bp, Homo sapiens
atggagtcaaaggag

SEQ ID NO: 409907 - DNA, 15 bp, Homo sapiens
catggagtcaaagga

SEQ ID NO: 409908 - DNA, 15 bp, Homo sapiens
atgtgagacatggag

SEQ ID NO: 409909 - DNA, 15 bp, Homo sapiens
gatgtgagacatgga

SEQ ID NO: 409910 - DNA, 15 bp, Homo sapiens
ggatgtgagacatgg

SEQ ID NO: 409911 - DNA, 15 bp, Homo sapiens
tggatgtgagacatg

SEQ ID NO: 409912 - DNA, 15 bp, Homo sapiens
ctggatgtgagacat

SEQ ID NO: 409913 - DNA, 15 bp, Homo sapiens
cctggatgtgagaca

SEQ ID NO: 409914 - DNA, 15 bp, Homo sapiens
acctggatgtgagac

SEQ ID NO: 409915 - DNA, 15 bp, Homo sapiens
gacctggatgtgaga

SEQ ID NO: 409916 - DNA, 15 bp, Homo sapiens
tgacctggatgtgag

SEQ ID NO: 409917 - DNA, 15 bp, Homo sapiens
gtgacctggatgtga

SEQ ID NO: 409918 - DNA, 15 bp, Homo sapiens
cgtgacctggatgtg

SEQ ID NO: 409919 - DNA, 15 bp, Homo sapiens
gcgtgacctggatgt

SEQ ID NO: 409920 - DNA, 15 bp, Homo sapiens
agcgtgacctggatg

SEQ ID NO: 409921 - DNA, 15 bp, Homo sapiens
cagcgtgacctggat

SEQ ID NO: 409922 - DNA, 15 bp, Homo sapiens
tcagcgtgacctgga

SEQ ID NO: 409923 - DNA, 15 bp, Homo sapiens
atcagcgtgacctgg

SEQ ID NO: 409924 - DNA, 15 bp, Homo sapiens
catcagcgtgacctg

SEQ ID NO: 409925 - DNA, 15 bp, Homo sapiens
gcatcagcgtgacct

SEQ ID NO: 409926 - DNA, 15 bp, Homo sapiens
tgcatcagcgtgacc

SEQ ID NO: 409927 - DNA, 15 bp, Homo sapiens
ttgcatcagcgtgac

SEQ ID NO: 409928 - DNA, 15 bp, Homo sapiens
cttgcatcagcgtga

SEQ ID NO: 409929 - DNA, 15 bp, Homo sapiens
tcttgcatcagcgtg

SEQ ID NO: 409930 - DNA, 15 bp, Homo sapiens
ctcttgcatcagcgt

SEQ ID NO: 409931 - DNA, 15 bp, Homo sapiens
cctcttgcatcagcg

SEQ ID NO: 409932 - DNA, 15 bp, Homo sapiens
acctcttgcatcagc

SEQ ID NO: 409933 - DNA, 15 bp, Homo sapiens
cctacctcttgcatc

SEQ ID NO: 409934 - DNA, 15 bp, Homo sapiens
acctacctcttgcat

SEQ ID NO: 409935 - DNA, 15 bp, Homo sapiens
aacctacctcttgca

SEQ ID NO: 409936 - DNA, 15 bp, Homo sapiens
gaacctacctcttgc

SEQ ID NO: 409937 - DNA, 15 bp, Homo sapiens
ggaacctacctcttg

SEQ ID NO: 409938 - DNA, 15 bp, Homo sapiens
gggaacctacctctt

SEQ ID NO: 409939 - DNA, 15 bp, Homo sapiens
tgggaacctacctct

SEQ ID NO: 409940 - DNA, 15 bp, Homo sapiens
atgggaacctacctc

SEQ ID NO: 409941 - DNA, 15 bp, Homo sapiens
catgggaacctacct

SEQ ID NO: 409942 - DNA, 15 bp, Homo sapiens
tcatgggaacctacc

SEQ ID NO: 409943 - DNA, 15 bp, Homo sapiens
atcatgggaacctac

SEQ ID NO: 409944 - DNA, 15 bp, Homo sapiens
gatcatgggaaccta

SEQ ID NO: 409945 - DNA, 15 bp, Homo sapiens
agatcatgggaacct

SEQ ID NO: 409946 - DNA, 15 bp, Homo sapiens
aagatcatgggaacc

SEQ ID NO: 409947 - DNA, 15 bp, Homo sapiens
caagatcatgggaac

SEQ ID NO: 409948 - DNA, 15 bp, Homo sapiens
ccaagatcatgggaa

SEQ ID NO: 409949 - DNA, 15 bp, Homo sapiens
tccaagatcatggga

SEQ ID NO: 409950 - DNA, 15 bp, Homo sapiens
gtccaagatcatggg

SEQ ID NO: 409951 - DNA, 15 bp, Homo sapiens
tgtccaagatcatgg

SEQ ID NO: 409952 - DNA, 15 bp, Homo sapiens
ctgtccaagatcatg

SEQ ID NO: 409953 - DNA, 15 bp, Homo sapiens
gctgtccaagatcat

SEQ ID NO: 409954 - DNA, 15 bp, Homo sapiens
agctgtccaagatca

SEQ ID NO: 409955 - DNA, 15 bp, Homo sapiens
gagctgtccaagatc

SEQ ID NO: 409956 - DNA, 15 bp, Homo sapiens
agagctgtccaagat

SEQ ID NO: 409957 - DNA, 15 bp, Homo sapiens
cagagctgtccaaga

SEQ ID NO: 409958 - DNA, 15 bp, Homo sapiens
gcagagctgtccaag

SEQ ID NO: 409959 - DNA, 15 bp, Homo sapiens
ggcagagctgtccaa

SEQ ID NO: 409960 - DNA, 15 bp, Homo sapiens
aggcagagctgtcca

SEQ ID NO: 409961 - DNA, 15 bp, Homo sapiens
gaggcagagctgtcc

SEQ ID NO: 409962 - DNA, 15 bp, Homo sapiens
agaggcagagctgtc

SEQ ID NO: 409963 - DNA, 15 bp, Homo sapiens
cagaggcagagctgt

SEQ ID NO: 409964 - DNA, 15 bp, Homo sapiens
acagaggcagagctg

SEQ ID NO: 409965 - DNA, 15 bp, Homo sapiens
cacagaggcagagct

SEQ ID NO: 409966 - DNA, 15 bp, Homo sapiens
ccacagaggcagagc

SEQ ID NO: 409967 - DNA, 15 bp, Homo sapiens
gccacagaggcagag

SEQ ID NO: 409968 - DNA, 15 bp, Homo sapiens
agccacagaggcaga

SEQ ID NO: 409969 - DNA, 15 bp, Homo sapiens
aagccacagaggcag

SEQ ID NO: 409970 - DNA, 15 bp, Homo sapiens
aaagccacagaggca

SEQ ID NO: 409971 - DNA, 15 bp, Homo sapiens
caaagccacagaggc

SEQ ID NO: 409972 - DNA, 15 bp, Homo sapiens
gcaaagccacagagg

SEQ ID NO: 409973 - DNA, 15 bp, Homo sapiens
tgcaaagccacagag

SEQ ID NO: 409974 - DNA, 15 bp, Homo sapiens
ctgcaaagccacaga

SEQ ID NO: 409975 - DNA, 15 bp, Homo sapiens
cctgcaaagccacag

SEQ ID NO: 409976 - DNA, 15 bp, Homo sapiens
ccctgcaaagccaca

SEQ ID NO: 409977 - DNA, 15 bp, Homo sapiens
accctgcaaagccac

SEQ ID NO: 409978 - DNA, 15 bp, Homo sapiens
taccctgcaaagcca

SEQ ID NO: 409979 - DNA, 15 bp, Homo sapiens
gtaccctgcaaagcc

SEQ ID NO: 409980 - DNA, 15 bp, Homo sapiens
aggctgtaccctgca

SEQ ID NO: 409981 - DNA, 15 bp, Homo sapiens
gaggctgtaccctgc

SEQ ID NO: 409982 - DNA, 15 bp, Homo sapiens
ggaggctgtaccctg

SEQ ID NO: 409983 - DNA, 15 bp, Homo sapiens
gggaggctgtaccct

SEQ ID NO: 409984 - DNA, 15 bp, Homo sapiens
agggaggctgtaccc

SEQ ID NO: 409985 - DNA, 15 bp, Homo sapiens
gagggaggctgtacc

SEQ ID NO: 409986 - DNA, 15 bp, Homo sapiens
ggagggaggctgtac

SEQ ID NO: 409987 - DNA, 15 bp, Homo sapiens
gggagggaggctgta

SEQ ID NO: 409988 - DNA, 15 bp, Homo sapiens
tgggagggaggctgt

SEQ ID NO: 409989 - DNA, 15 bp, Homo sapiens
ctgggagggaggctg

SEQ ID NO: 409990 - DNA, 15 bp, Homo sapiens
gctgggagggaggct

SEQ ID NO: 409991 - DNA, 15 bp, Homo sapiens
agctgggagggaggc

SEQ ID NO: 409992 - DNA, 15 bp, Homo sapiens
cagctgggagggagg

SEQ ID NO: 409993 - DNA, 15 bp, Homo sapiens
gcagctgggagggag

SEQ ID NO: 409994 - DNA, 15 bp, Homo sapiens
agcagctgggaggga

SEQ ID NO: 409995 - DNA, 15 bp, Homo sapiens
atgaaagcagctggg

SEQ ID NO: 409996 - DNA, 15 bp, Homo sapiens
catgaaagcagctgg

SEQ ID NO: 409997 - DNA, 15 bp, Homo sapiens
ccatgaaagcagctg

SEQ ID NO: 409998 - DNA, 15 bp, Homo sapiens
tccatgaaagcagct

SEQ ID NO: 409999 - DNA, 15 bp, Homo sapiens
gtccatgaaagcagc

SEQ ID NO: 410000 - DNA, 15 bp, Homo sapiens
agtccatgaaagcag

SEQ ID NO: 410001 - DNA, 15 bp, Homo sapiens
cagtccatgaaagca

SEQ ID NO: 410002 - DNA, 15 bp, Homo sapiens
ccagtccatgaaagc

SEQ ID NO: 410003 - DNA, 15 bp, Homo sapiens
accagtccatgaaag

SEQ ID NO: 410004 - DNA, 15 bp, Homo sapiens
taccagtccatgaaa

SEQ ID NO: 410005 - DNA, 15 bp, Homo sapiens
ataccagtccatgaa

SEQ ID NO: 410006 - DNA, 15 bp, Homo sapiens
aataccagtccatga

SEQ ID NO: 410007 - DNA, 15 bp, Homo sapiens
caataccagtccatg

SEQ ID NO: 410008 - DNA, 15 bp, Homo sapiens
tcaataccagtccat

SEQ ID NO: 410009 - DNA, 15 bp, Homo sapiens
ctcaataccagtcca

SEQ ID NO: 410010 - DNA, 15 bp, Homo sapiens
actcaataccagtcc

SEQ ID NO: 410011 - DNA, 15 bp, Homo sapiens
tactcaataccagtc

SEQ ID NO: 410012 - DNA, 15 bp, Homo sapiens
atactcaataccagt

SEQ ID NO: 410013 - DNA, 15 bp, Homo sapiens
gatactcaataccag

SEQ ID NO: 410014 - DNA, 15 bp, Homo sapiens
agatactcaatacca

SEQ ID NO: 410015 - DNA, 15 bp, Homo sapiens
cagatactcaatacc

SEQ ID NO: 410016 - DNA, 15 bp, Homo sapiens
acagatactcaatac

SEQ ID NO: 410017 - DNA, 15 bp, Homo sapiens
cacagatactcaata

SEQ ID NO: 410018 - DNA, 15 bp, Homo sapiens
tcacagatactcaat

SEQ ID NO: 410019 - DNA, 15 bp, Homo sapiens
gtcacagatactcaa

SEQ ID NO: 410020 - DNA, 15 bp, Homo sapiens
agtcacagatactca

SEQ ID NO: 410021 - DNA, 15 bp, Homo sapiens
aagtcacagatactc

SEQ ID NO: 410022 - DNA, 15 bp, Homo sapiens
aaagtcacagatact

SEQ ID NO: 410023 - DNA, 15 bp, Homo sapiens
aaaagtcacagatac

SEQ ID NO: 410024 - DNA, 15 bp, Homo sapiens
gaaaagtcacagata

SEQ ID NO: 410025 - DNA, 15 bp, Homo sapiens
ggaaaagtcacagat

SEQ ID NO: 410026 - DNA, 15 bp, Homo sapiens
tggaaaagtcacaga

SEQ ID NO: 410027 - DNA, 15 bp, Homo sapiens
ctggaaaagtcacag

SEQ ID NO: 410028 - DNA, 15 bp, Homo sapiens
cctggaaaagtcaca

SEQ ID NO: 410029 - DNA, 15 bp, Homo sapiens
acctggaaaagtcac

SEQ ID NO: 410030 - DNA, 15 bp, Homo sapiens
cacctggaaaagtca

SEQ ID NO: 410031 - DNA, 15 bp, Homo sapiens
gcacctggaaaagtc

SEQ ID NO: 410032 - DNA, 15 bp, Homo sapiens
ggcacctggaaaagt

SEQ ID NO: 410033 - DNA, 15 bp, Homo sapiens
tggcacctggaaaag

SEQ ID NO: 410034 - DNA, 15 bp, Homo sapiens
ctggcacctggaaaa

SEQ ID NO: 410035 - DNA, 15 bp, Homo sapiens
actggcacctggaaa

SEQ ID NO: 410036 - DNA, 15 bp, Homo sapiens
cactggcacctggaa

SEQ ID NO: 410037 - DNA, 15 bp, Homo sapiens
gcactggcacctgga

SEQ ID NO: 410038 - DNA, 15 bp, Homo sapiens
tgcactggcacctgg

SEQ ID NO: 410039 - DNA, 15 bp, Homo sapiens
ttgcactggcacctg

SEQ ID NO: 410040 - DNA, 15 bp, Homo sapiens
cttgcactggcacct

SEQ ID NO: 410041 - DNA, 15 bp, Homo sapiens
gcttgcactggcacc

SEQ ID NO: 410042 - DNA, 15 bp, Homo sapiens
agcttgcactggcac

SEQ ID NO: 410043 - DNA, 15 bp, Homo sapiens
tagcttgcactggca

SEQ ID NO: 410044 - DNA, 15 bp, Homo sapiens
atagcttgcactggc

SEQ ID NO: 410045 - DNA, 15 bp, Homo sapiens
gatagcttgcactgg

SEQ ID NO: 410046 - DNA, 15 bp, Homo sapiens
tgatagcttgcactg

SEQ ID NO: 410047 - DNA, 15 bp, Homo sapiens
ctgatagcttgcact

SEQ ID NO: 410048 - DNA, 15 bp, Homo sapiens
actgatagcttgcac

SEQ ID NO: 410049 - DNA, 15 bp, Homo sapiens
cactgatagcttgca

SEQ ID NO: 410050 - DNA, 15 bp, Homo sapiens
tcactgatagcttgc

SEQ ID NO: 410051 - DNA, 15 bp, Homo sapiens
ctcactgatagcttg

SEQ ID NO: 410052 - DNA, 15 bp, Homo sapiens
actcactgatagctt

SEQ ID NO: 410053 - DNA, 15 bp, Homo sapiens
gactcactgatagct

SEQ ID NO: 410054 - DNA, 15 bp, Homo sapiens
agactcactgatagc

SEQ ID NO: 410055 - DNA, 15 bp, Homo sapiens
tagactcactgatag

SEQ ID NO: 410056 - DNA, 15 bp, Homo sapiens
gtagactcactgata

SEQ ID NO: 410057 - DNA, 15 bp, Homo sapiens
ggtagactcactgat

SEQ ID NO: 410058 - DNA, 15 bp, Homo sapiens
tggtagactcactga

SEQ ID NO: 410059 - DNA, 15 bp, Homo sapiens
atggtagactcactg

SEQ ID NO: 410060 - DNA, 15 bp, Homo sapiens
aatggtagactcact

SEQ ID NO: 410061 - DNA, 15 bp, Homo sapiens
gaatggtagactcac

SEQ ID NO: 410062 - DNA, 15 bp, Homo sapiens
agaatggtagactca

SEQ ID NO: 410063 - DNA, 15 bp, Homo sapiens
cagaatggtagactc

SEQ ID NO: 410064 - DNA, 15 bp, Homo sapiens
ccagaatggtagact

SEQ ID NO: 410065 - DNA, 15 bp, Homo sapiens
cccagaatggtagac

SEQ ID NO: 410066 - DNA, 15 bp, Homo sapiens
tcaccatcctccaga

SEQ ID NO: 410067 - DNA, 15 bp, Homo sapiens
gtcaccatcctccag

SEQ ID NO: 410068 - DNA, 15 bp, Homo sapiens
ggtcaccatcctcca

SEQ ID NO: 410069 - DNA, 15 bp, Homo sapiens
gggtcaccatcctcc

SEQ ID NO: 410070 - DNA, 15 bp, Homo sapiens
agggtcaccatcctc

SEQ ID NO: 410071 - DNA, 15 bp, Homo sapiens
aagggtcaccatcct

SEQ ID NO: 410072 - DNA, 15 bp, Homo sapiens
aaagggtcaccatcc

SEQ ID NO: 410073 - DNA, 15 bp, Homo sapiens
aaaagggtcaccatc

SEQ ID NO: 410074 - DNA, 15 bp, Homo sapiens
gaaaagggtcaccat

SEQ ID NO: 410075 - DNA, 15 bp, Homo sapiens
agaaaagggtcacca

SEQ ID NO: 410076 - DNA, 15 bp, Homo sapiens
gagaaaagggtcacc

SEQ ID NO: 410077 - DNA, 15 bp, Homo sapiens
tgagaaaagggtcac

SEQ ID NO: 410078 - DNA, 15 bp, Homo sapiens
gtgagaaaagggtca

SEQ ID NO: 410079 - DNA, 15 bp, Homo sapiens
tgtgagaaaagggtc

SEQ ID NO: 410080 - DNA, 15 bp, Homo sapiens
ctgtgagaaaagggt

SEQ ID NO: 410081 - DNA, 15 bp, Homo sapiens
gctgtgagaaaaggg

SEQ ID NO: 410082 - DNA, 15 bp, Homo sapiens
agctgtgagaaaagg

SEQ ID NO: 410083 - DNA, 15 bp, Homo sapiens
gagctgtgagaaaag

SEQ ID NO: 410084 - DNA, 15 bp, Homo sapiens
ggagctgtgagaaaa

SEQ ID NO: 410085 - DNA, 15 bp, Homo sapiens
tggagctgtgagaaa

SEQ ID NO: 410086 - DNA, 15 bp, Homo sapiens
agtggagctgtgaga

SEQ ID NO: 410087 - DNA, 15 bp, Homo sapiens
tagtggagctgtgag

SEQ ID NO: 410088 - DNA, 15 bp, Homo sapiens
ctagtggagctgtga

SEQ ID NO: 410089 - DNA, 15 bp, Homo sapiens
cctagtggagctgtg

SEQ ID NO: 410090 - DNA, 15 bp, Homo sapiens
acctagtggagctgt

SEQ ID NO: 410091 - DNA, 15 bp, Homo sapiens
cacctagtggagctg

SEQ ID NO: 410092 - DNA, 15 bp, Homo sapiens
ccacctagtggagct

SEQ ID NO: 410093 - DNA, 15 bp, Homo sapiens
accacctagtggagc

SEQ ID NO: 410094 - DNA, 15 bp, Homo sapiens
caccacctagtggag

SEQ ID NO: 410095 - DNA, 15 bp, Homo sapiens
gcaccacctagtgga

SEQ ID NO: 410096 - DNA, 15 bp, Homo sapiens
ggcaccacctagtgg

SEQ ID NO: 410097 - DNA, 15 bp, Homo sapiens
gggcaccacctagtg

SEQ ID NO: 410098 - DNA, 15 bp, Homo sapiens
ggggcaccacctagt

SEQ ID NO: 410099 - DNA, 15 bp, Homo sapiens
cggggcaccacctag

SEQ ID NO: 410100 - DNA, 15 bp, Homo sapiens
ccggggcaccaccta

SEQ ID NO: 410101 - DNA, 15 bp, Homo sapiens
accggggcaccacct

SEQ ID NO: 410102 - DNA, 15 bp, Homo sapiens
taccggggcaccacc

SEQ ID NO: 410103 - DNA, 15 bp, Homo sapiens
ctaccggggcaccac

SEQ ID NO: 410104 - DNA, 15 bp, Homo sapiens
cctaccggggcacca

SEQ ID NO: 410105 - DNA, 15 bp, Homo sapiens
ccctaccggggcacc

SEQ ID NO: 410106 - DNA, 15 bp, Homo sapiens
tccctaccggggcac

SEQ ID NO: 410107 - DNA, 15 bp, Homo sapiens
gtccctaccggggca

SEQ ID NO: 410108 - DNA, 15 bp, Homo sapiens
agtccctaccggggc

SEQ ID NO: 410109 - DNA, 15 bp, Homo sapiens
gagtccctaccgggg

SEQ ID NO: 410110 - DNA, 15 bp, Homo sapiens
agagtccctaccggg

SEQ ID NO: 410111 - DNA, 15 bp, Homo sapiens
cagagtccctaccgg

SEQ ID NO: 410112 - DNA, 15 bp, Homo sapiens
acagagtccctaccg

SEQ ID NO: 410113 - DNA, 15 bp, Homo sapiens
cacagagtccctacc

SEQ ID NO: 410114 - DNA, 15 bp, Homo sapiens
acacagagtccctac

SEQ ID NO: 410115 - DNA, 15 bp, Homo sapiens
cacacagagtcccta

SEQ ID NO: 410116 - DNA, 15 bp, Homo sapiens
ccacacagagtccct

SEQ ID NO: 410117 - DNA, 15 bp, Homo sapiens
accacacagagtccc

SEQ ID NO: 410118 - DNA, 15 bp, Homo sapiens
caccacacagagtcc

SEQ ID NO: 410119 - DNA, 15 bp, Homo sapiens
ccaccacacagagtc

SEQ ID NO: 410120 - DNA, 15 bp, Homo sapiens
tgggttggagccacc

SEQ ID NO: 410121 - DNA, 15 bp, Homo sapiens
ttgggttggagccac

SEQ ID NO: 410122 - DNA, 15 bp, Homo sapiens
gttgggttggagcca

SEQ ID NO: 410123 - DNA, 15 bp, Homo sapiens
tgttgggttggagcc

SEQ ID NO: 410124 - DNA, 15 bp, Homo sapiens
atgttgggttggagc

SEQ ID NO: 410125 - DNA, 15 bp, Homo sapiens
aatgttgggttggag

SEQ ID NO: 410126 - DNA, 15 bp, Homo sapiens
aaatgttgggttgga

SEQ ID NO: 410127 - DNA, 15 bp, Homo sapiens
gaaatgttgggttgg

SEQ ID NO: 410128 - DNA, 15 bp, Homo sapiens
ggaaatgttgggttg

SEQ ID NO: 410129 - DNA, 15 bp, Homo sapiens
gggaaatgttgggtt

SEQ ID NO: 410130 - DNA, 15 bp, Homo sapiens
agggaaatgttgggt

SEQ ID NO: 410131 - DNA, 15 bp, Homo sapiens
aagggaaatgttggg

SEQ ID NO: 410132 - DNA, 15 bp, Homo sapiens
gaagggaaatgttgg

SEQ ID NO: 410133 - DNA, 15 bp, Homo sapiens
agaagggaaatgttg

SEQ ID NO: 410134 - DNA, 15 bp, Homo sapiens
cagaagggaaatgtt

SEQ ID NO: 410135 - DNA, 15 bp, Homo sapiens
atgcagaagggaaat

SEQ ID NO: 410136 - DNA, 15 bp, Homo sapiens
aatgcagaagggaaa

SEQ ID NO: 410137 - DNA, 15 bp, Homo sapiens
caatgcagaagggaa

SEQ ID NO: 410138 - DNA, 15 bp, Homo sapiens
gcaatgcagaaggga

SEQ ID NO: 410139 - DNA, 15 bp, Homo sapiens
ggcaatgcagaaggg

SEQ ID NO: 410140 - DNA, 15 bp, Homo sapiens
gggcaatgcagaagg

SEQ ID NO: 410141 - DNA, 15 bp, Homo sapiens
agggcaatgcagaag

SEQ ID NO: 410142 - DNA, 15 bp, Homo sapiens
tagggcaatgcagaa

SEQ ID NO: 410143 - DNA, 15 bp, Homo sapiens
ctagggcaatgcaga

SEQ ID NO: 410144 - DNA, 15 bp, Homo sapiens
gctagggcaatgcag

SEQ ID NO: 410145 - DNA, 15 bp, Homo sapiens
tgctagggcaatgca

SEQ ID NO: 410146 - DNA, 15 bp, Homo sapiens
ctgctagggcaatgc

SEQ ID NO: 410147 - DNA, 15 bp, Homo sapiens
tctgctagggcaatg

SEQ ID NO: 410148 - DNA, 15 bp, Homo sapiens
ctctgctagggcaat

SEQ ID NO: 410149 - DNA, 15 bp, Homo sapiens
cctctgctagggcaa

SEQ ID NO: 410150 - DNA, 15 bp, Homo sapiens
acctctgctagggca

SEQ ID NO: 410151 - DNA, 15 bp, Homo sapiens
aacctctgctagggc

SEQ ID NO: 410152 - DNA, 15 bp, Homo sapiens
gaacctctgctaggg

SEQ ID NO: 410153 - DNA, 15 bp, Homo sapiens
agaacctctgctagg

SEQ ID NO: 410154 - DNA, 15 bp, Homo sapiens
gagaacctctgctag

SEQ ID NO: 410155 - DNA, 15 bp, Homo sapiens
ggagaacctctgcta

SEQ ID NO: 410156 - DNA, 15 bp, Homo sapiens
tggagaacctctgct

SEQ ID NO: 410157 - DNA, 15 bp, Homo sapiens
ttcatggagaacctc

SEQ ID NO: 410158 - DNA, 15 bp, Homo sapiens
tttcatggagaacct

SEQ ID NO: 410159 - DNA, 15 bp, Homo sapiens
ctttcatggagaacc

SEQ ID NO: 410160 - DNA, 15 bp, Homo sapiens
gctttcatggagaac

SEQ ID NO: 410161 - DNA, 15 bp, Homo sapiens
ggctttcatggagaa

SEQ ID NO: 410162 - DNA, 15 bp, Homo sapiens
gggctttcatggaga

SEQ ID NO: 410163 - DNA, 15 bp, Homo sapiens
ggggctttcatggag

SEQ ID NO: 410164 - DNA, 15 bp, Homo sapiens
tggggctttcatgga

SEQ ID NO: 410165 - DNA, 15 bp, Homo sapiens
gtggggctttcatgg

SEQ ID NO: 410166 - DNA, 15 bp, Homo sapiens
agtggggctttcatg

SEQ ID NO: 410167 - DNA, 15 bp, Homo sapiens
gagtggggctttcat

SEQ ID NO: 410168 - DNA, 15 bp, Homo sapiens
ggagtggggctttca

SEQ ID NO: 410169 - DNA, 15 bp, Homo sapiens
aggagtggggctttc

SEQ ID NO: 410170 - DNA, 15 bp, Homo sapiens
caggagtggggcttt

SEQ ID NO: 410171 - DNA, 15 bp, Homo sapiens
gcaggagtggggctt

SEQ ID NO: 410172 - DNA, 15 bp, Homo sapiens
tgcaggagtggggct

SEQ ID NO: 410173 - DNA, 15 bp, Homo sapiens
ctgcaggagtggggc

SEQ ID NO: 410174 - DNA, 15 bp, Homo sapiens
gctgcaggagtgggg

SEQ ID NO: 410175 - DNA, 15 bp, Homo sapiens
tgctgcaggagtggg

SEQ ID NO: 410176 - DNA, 15 bp, Homo sapiens
ttgctgcaggagtgg

SEQ ID NO: 410177 - DNA, 15 bp, Homo sapiens
tttgctgcaggagtg

SEQ ID NO: 410178 - DNA, 15 bp, Homo sapiens
gtttgctgcaggagt

SEQ ID NO: 410179 - DNA, 15 bp, Homo sapiens
agtttgctgcaggag

SEQ ID NO: 410180 - DNA, 15 bp, Homo sapiens
aagtttgctgcagga

SEQ ID NO: 410181 - DNA, 15 bp, Homo sapiens
gaagtttgctgcagg

SEQ ID NO: 410182 - DNA, 15 bp, Homo sapiens
agaagtttgctgcag

SEQ ID NO: 410183 - DNA, 15 bp, Homo sapiens
cagaagtttgctgca

SEQ ID NO: 410184 - DNA, 15 bp, Homo sapiens
gcagaagtttgctgc

SEQ ID NO: 410185 - DNA, 15 bp, Homo sapiens
ggcagaagtttgctg

SEQ ID NO: 410186 - DNA, 15 bp, Homo sapiens
aggcagaagtttgct

SEQ ID NO: 410187 - DNA, 15 bp, Homo sapiens
caggcagaagtttgc

SEQ ID NO: 410188 - DNA, 15 bp, Homo sapiens
ccaggcagaagtttg

SEQ ID NO: 410189 - DNA, 15 bp, Homo sapiens
tccaggcagaagttt

SEQ ID NO: 410190 - DNA, 15 bp, Homo sapiens
gtccaggcagaagtt

SEQ ID NO: 410191 - DNA, 15 bp, Homo sapiens
tgtccaggcagaagt

SEQ ID NO: 410192 - DNA, 15 bp, Homo sapiens
gtgtccaggcagaag

SEQ ID NO: 410193 - DNA, 15 bp, Homo sapiens
ggtgtccaggcagaa

SEQ ID NO: 410194 - DNA, 15 bp, Homo sapiens
gggtgtccaggcaga

SEQ ID NO: 410195 - DNA, 15 bp, Homo sapiens
tgggtgtccaggcag

SEQ ID NO: 410196 - DNA, 15 bp, Homo sapiens
ctgggtgtccaggca

SEQ ID NO: 410197 - DNA, 15 bp, Homo sapiens
cctgggtgtccaggc

SEQ ID NO: 410198 - DNA, 15 bp, Homo sapiens
acctgggtgtccagg

SEQ ID NO: 410199 - DNA, 15 bp, Homo sapiens
cacctgggtgtccag

SEQ ID NO: 410200 - DNA, 15 bp, Homo sapiens
acacctgggtgtcca

SEQ ID NO: 410201 - DNA, 15 bp, Homo sapiens
aacacctgggtgtcc

SEQ ID NO: 410202 - DNA, 15 bp, Homo sapiens
aaacacctgggtgtc

SEQ ID NO: 410203 - DNA, 15 bp, Homo sapiens
gaaacacctgggtgt

SEQ ID NO: 410204 - DNA, 15 bp, Homo sapiens
ggaaacacctgggtg

SEQ ID NO: 410205 - DNA, 15 bp, Homo sapiens
tggaaacacctgggt

SEQ ID NO: 410206 - DNA, 15 bp, Homo sapiens
atggaaacacctggg

SEQ ID NO: 410207 - DNA, 15 bp, Homo sapiens
tatggaaacacctgg

SEQ ID NO: 410208 - DNA, 15 bp, Homo sapiens
gtatggaaacacctg

SEQ ID NO: 410209 - DNA, 15 bp, Homo sapiens
tgtatggaaacacct

SEQ ID NO: 410210 - DNA, 15 bp, Homo sapiens
atgtatggaaacacc

SEQ ID NO: 410211 - DNA, 15 bp, Homo sapiens
gatgtatggaaacac

SEQ ID NO: 410212 - DNA, 15 bp, Homo sapiens
agatgtatggaaaca

SEQ ID NO: 410213 - DNA, 15 bp, Homo sapiens
aagatgtatggaaac

SEQ ID NO: 410214 - DNA, 15 bp, Homo sapiens
gaagatgtatggaaa

SEQ ID NO: 410215 - DNA, 15 bp, Homo sapiens
agaagatgtatggaa

SEQ ID NO: 410216 - DNA, 15 bp, Homo sapiens
cagaagatgtatgga

SEQ ID NO: 410217 - DNA, 15 bp, Homo sapiens
tcagaagatgtatgg

SEQ ID NO: 410218 - DNA, 15 bp, Homo sapiens
ttcagaagatgtatg

SEQ ID NO: 410219 - DNA, 15 bp, Homo sapiens
tttcagaagatgtat

SEQ ID NO: 410220 - DNA, 15 bp, Homo sapiens
atttcagaagatgta

SEQ ID NO: 410221 - DNA, 15 bp, Homo sapiens
gatttcagaagatgt

SEQ ID NO: 410222 - DNA, 15 bp, Homo sapiens
agatttcagaagatg

SEQ ID NO: 410223 - DNA, 15 bp, Homo sapiens
tagatttcagaagat

SEQ ID NO: 410224 - DNA, 15 bp, Homo sapiens
ctagatttcagaaga

SEQ ID NO: 410225 - DNA, 15 bp, Homo sapiens
cctagatttcagaag

SEQ ID NO: 410226 - DNA, 15 bp, Homo sapiens
acctagatttcagaa

SEQ ID NO: 410227 - DNA, 15 bp, Homo sapiens
tacctagatttcaga

SEQ ID NO: 410228 - DNA, 15 bp, Homo sapiens
ctacctagatttcag

SEQ ID NO: 410229 - DNA, 15 bp, Homo sapiens
tctacctagatttca

SEQ ID NO: 410230 - DNA, 15 bp, Homo sapiens
ctctacctagatttc

SEQ ID NO: 410231 - DNA, 15 bp, Homo sapiens
cctctacctagattt

SEQ ID NO: 410232 - DNA, 15 bp, Homo sapiens
acctctacctagatt

SEQ ID NO: 410233 - DNA, 15 bp, Homo sapiens
aacctctacctagat

SEQ ID NO: 410234 - DNA, 15 bp, Homo sapiens
gaacctctacctaga

SEQ ID NO: 410235 - DNA, 15 bp, Homo sapiens
ggaacctctacctag

SEQ ID NO: 410236 - DNA, 15 bp, Homo sapiens
gggaacctctaccta

SEQ ID NO: 410237 - DNA, 15 bp, Homo sapiens
tgggaacctctacct

SEQ ID NO: 410238 - DNA, 15 bp, Homo sapiens
ttgggaacctctacc

SEQ ID NO: 410239 - DNA, 15 bp, Homo sapiens
tttgggaacctctac

SEQ ID NO: 410240 - DNA, 15 bp, Homo sapiens
gtttgggaacctcta

SEQ ID NO: 410241 - DNA, 15 bp, Homo sapiens
gggtttgggaacctc

SEQ ID NO: 410242 - DNA, 15 bp, Homo sapiens
ggggtttgggaacct

SEQ ID NO: 410243 - DNA, 15 bp, Homo sapiens
tggggtttgggaacc

SEQ ID NO: 410244 - DNA, 15 bp, Homo sapiens
ttggggtttgggaac

SEQ ID NO: 410245 - DNA, 15 bp, Homo sapiens
attggggtttgggaa

SEQ ID NO: 410246 - DNA, 15 bp, Homo sapiens
aattggggtttggga

SEQ ID NO: 410247 - DNA, 15 bp, Homo sapiens
gaattggggtttggg

SEQ ID NO: 410248 - DNA, 15 bp, Homo sapiens
agaattggggtttgg

SEQ ID NO: 410249 - DNA, 15 bp, Homo sapiens
aagaattggggtttg

SEQ ID NO: 410250 - DNA, 15 bp, Homo sapiens
caagaattggggttt

SEQ ID NO: 410251 - DNA, 15 bp, Homo sapiens
tcaagaattggggtt

SEQ ID NO: 410252 - DNA, 15 bp, Homo sapiens
gtcaagaattggggt

SEQ ID NO: 410253 - DNA, 15 bp, Homo sapiens
agtcaagaattgggg

SEQ ID NO: 410254 - DNA, 15 bp, Homo sapiens
aagtcaagaattggg

SEQ ID NO: 410255 - DNA, 15 bp, Homo sapiens
gaagtcaagaattgg

SEQ ID NO: 410256 - DNA, 15 bp, Homo sapiens
agaagtcaagaattg

SEQ ID NO: 410257 - DNA, 15 bp, Homo sapiens
cagaagtcaagaatt

SEQ ID NO: 410258 - DNA, 15 bp, Homo sapiens
acagaagtcaagaat

SEQ ID NO: 410259 - DNA, 15 bp, Homo sapiens
acacagaagtcaaga

SEQ ID NO: 410260 - DNA, 15 bp, Homo sapiens
tacacagaagtcaag

SEQ ID NO: 410261 - DNA, 15 bp, Homo sapiens
gtacacagaagtcaa

SEQ ID NO: 410262 - DNA, 15 bp, Homo sapiens
agtacacagaagtca

SEQ ID NO: 410263 - DNA, 15 bp, Homo sapiens
cagtacacagaagtc

SEQ ID NO: 410264 - DNA, 15 bp, Homo sapiens
ccagtacacagaagt

SEQ ID NO: 410265 - DNA, 15 bp, Homo sapiens
gccagtacacagaag

SEQ ID NO: 410266 - DNA, 15 bp, Homo sapiens
tgccagtacacagaa

SEQ ID NO: 410267 - DNA, 15 bp, Homo sapiens
ctgccagtacacaga

SEQ ID NO: 410268 - DNA, 15 bp, Homo sapiens
actgccagtacacag

SEQ ID NO: 410269 - DNA, 15 bp, Homo sapiens
gactgccagtacaca

SEQ ID NO: 410270 - DNA, 15 bp, Homo sapiens
agactgccagtacac

SEQ ID NO: 410271 - DNA, 15 bp, Homo sapiens
gagactgccagtaca

SEQ ID NO: 410272 - DNA, 15 bp, Homo sapiens
tgagactgccagtac

SEQ ID NO: 410273 - DNA, 15 bp, Homo sapiens
ttgagactgccagta

SEQ ID NO: 410274 - DNA, 15 bp, Homo sapiens
attgagactgccagt

SEQ ID NO: 410275 - DNA, 15 bp, Homo sapiens
tattgagactgccag

SEQ ID NO: 410276 - DNA, 15 bp, Homo sapiens
gtattgagactgcca

SEQ ID NO: 410277 - DNA, 15 bp, Homo sapiens
ggtattgagactgcc

SEQ ID NO: 410278 - DNA, 15 bp, Homo sapiens
tggtattgagactgc

SEQ ID NO: 410279 - DNA, 15 bp, Homo sapiens
ttggtattgagactg

SEQ ID NO: 410280 - DNA, 15 bp, Homo sapiens
cttggtattgagact

SEQ ID NO: 410281 - DNA, 15 bp, Homo sapiens
acttggtattgagac

SEQ ID NO: 410282 - DNA, 15 bp, Homo sapiens
cacttggtattgaga

SEQ ID NO: 410283 - DNA, 15 bp, Homo sapiens
ccacttggtattgag

SEQ ID NO: 410284 - DNA, 15 bp, Homo sapiens
gccacttggtattga

SEQ ID NO: 410285 - DNA, 15 bp, Homo sapiens
tgccacttggtattg

SEQ ID NO: 410286 - DNA, 15 bp, Homo sapiens
ctgccacttggtatt

SEQ ID NO: 410287 - DNA, 15 bp, Homo sapiens
gctgccacttggtat

SEQ ID NO: 410288 - DNA, 15 bp, Homo sapiens
agctgccacttggta

SEQ ID NO: 410289 - DNA, 15 bp, Homo sapiens
cagctgccacttggt

SEQ ID NO: 410290 - DNA, 15 bp, Homo sapiens
gcagctgccacttgg

SEQ ID NO: 410291 - DNA, 15 bp, Homo sapiens
tgcagctgccacttg

SEQ ID NO: 410292 - DNA, 15 bp, Homo sapiens
ttgcagctgccactt

SEQ ID NO: 410293 - DNA, 15 bp, Homo sapiens
tttgcagctgccact

SEQ ID NO: 410294 - DNA, 15 bp, Homo sapiens
ctttgcagctgccac

SEQ ID NO: 410295 - DNA, 15 bp, Homo sapiens
cctttgcagctgcca

SEQ ID NO: 410296 - DNA, 15 bp, Homo sapiens
gcctttgcagctgcc

SEQ ID NO: 410297 - DNA, 15 bp, Homo sapiens
agcctttgcagctgc

SEQ ID NO: 410298 - DNA, 15 bp, Homo sapiens
aagcctttgcagctg

SEQ ID NO: 410299 - DNA, 15 bp, Homo sapiens
caagcctttgcagct

SEQ ID NO: 410300 - DNA, 15 bp, Homo sapiens
tcaagcctttgcagc

SEQ ID NO: 410301 - DNA, 15 bp, Homo sapiens
ctcaagcctttgcag

SEQ ID NO: 410302 - DNA, 15 bp, Homo sapiens
cctcaagcctttgca

SEQ ID NO: 410303 - DNA, 15 bp, Homo sapiens
gcctcaagcctttgc

SEQ ID NO: 410304 - DNA, 15 bp, Homo sapiens
agcctcaagcctttg

SEQ ID NO: 410305 - DNA, 15 bp, Homo sapiens
aagcctcaagccttt

SEQ ID NO: 410306 - DNA, 15 bp, Homo sapiens
caagcctcaagcctt

SEQ ID NO: 410307 - DNA, 15 bp, Homo sapiens
gcaagcctcaagcct

SEQ ID NO: 410308 - DNA, 15 bp, Homo sapiens
tgcaagcctcaagcc

SEQ ID NO: 410309 - DNA, 15 bp, Homo sapiens
gtgcaagcctcaagc

SEQ ID NO: 410310 - DNA, 15 bp, Homo sapiens
ggtgcaagcctcaag

SEQ ID NO: 410311 - DNA, 15 bp, Homo sapiens
gggtgcaagcctcaa

SEQ ID NO: 410312 - DNA, 15 bp, Homo sapiens
agggtgcaagcctca

SEQ ID NO: 410313 - DNA, 15 bp, Homo sapiens
gagggtgcaagcctc

SEQ ID NO: 410314 - DNA, 15 bp, Homo sapiens
agagggtgcaagcct

SEQ ID NO: 410315 - DNA, 15 bp, Homo sapiens
cagagggtgcaagcc

SEQ ID NO: 410316 - DNA, 15 bp, Homo sapiens
tcagagggtgcaagc

SEQ ID NO: 410317 - DNA, 15 bp, Homo sapiens
ttcagagggtgcaag

SEQ ID NO: 410318 - DNA, 15 bp, Homo sapiens
ggcttcagagggtgc

SEQ ID NO: 410319 - DNA, 15 bp, Homo sapiens
ccatggcttcagagg

SEQ ID NO: 410320 - DNA, 15 bp, Homo sapiens
gccatggcttcagag

SEQ ID NO: 410321 - DNA, 15 bp, Homo sapiens
ggccatggcttcaga

SEQ ID NO: 410322 - DNA, 15 bp, Homo sapiens
gggccatggcttcag

SEQ ID NO: 410323 - DNA, 15 bp, Homo sapiens
cgggccatggcttca

SEQ ID NO: 410324 - DNA, 15 bp, Homo sapiens
acgggccatggcttc

SEQ ID NO: 410325 - DNA, 15 bp, Homo sapiens
cacgggccatggctt

SEQ ID NO: 410326 - DNA, 15 bp, Homo sapiens
gcacgggccatggct

SEQ ID NO: 410327 - DNA, 15 bp, Homo sapiens
agcacgggccatggc

SEQ ID NO: 410328 - DNA, 15 bp, Homo sapiens
gagcacgggccatgg

SEQ ID NO: 410329 - DNA, 15 bp, Homo sapiens
agagcacgggccatg

SEQ ID NO: 410330 - DNA, 15 bp, Homo sapiens
tagagcacgggccat

SEQ ID NO: 410331 - DNA, 15 bp, Homo sapiens
gtagagcacgggcca

SEQ ID NO: 410332 - DNA, 15 bp, Homo sapiens
tgtagagcacgggcc

SEQ ID NO: 410333 - DNA, 15 bp, Homo sapiens
atgtagagcacgggc

SEQ ID NO: 410334 - DNA, 15 bp, Homo sapiens
aatgtagagcacggg

SEQ ID NO: 410335 - DNA, 15 bp, Homo sapiens
caatgtagagcacgg

SEQ ID NO: 410336 - DNA, 15 bp, Homo sapiens
tcaatgtagagcacg

SEQ ID NO: 410337 - DNA, 15 bp, Homo sapiens
gtcaatgtagagcac

SEQ ID NO: 410338 - DNA, 15 bp, Homo sapiens
ggtcaatgtagagca

SEQ ID NO: 410339 - DNA, 15 bp, Homo sapiens
gggtcaatgtagagc

SEQ ID NO: 410340 - DNA, 15 bp, Homo sapiens
cgggtcaatgtagag

SEQ ID NO: 410341 - DNA, 15 bp, Homo sapiens
acgggtcaatgtaga

SEQ ID NO: 410342 - DNA, 15 bp, Homo sapiens
aacgggtcaatgtag

SEQ ID NO: 410343 - DNA, 15 bp, Homo sapiens
aaacgggtcaatgta

SEQ ID NO: 410344 - DNA, 15 bp, Homo sapiens
gaaacgggtcaatgt

SEQ ID NO: 410345 - DNA, 15 bp, Homo sapiens
tgaaacgggtcaatg

SEQ ID NO: 410346 - DNA, 15 bp, Homo sapiens
ctgaaacgggtcaat

SEQ ID NO: 410347 - DNA, 15 bp, Homo sapiens
gctgaaacgggtcaa

SEQ ID NO: 410348 - DNA, 15 bp, Homo sapiens
ggctgaaacgggtca

SEQ ID NO: 410349 - DNA, 15 bp, Homo sapiens
tggctgaaacgggtc

SEQ ID NO: 410350 - DNA, 15 bp, Homo sapiens
atggctgaaacgggt

SEQ ID NO: 410351 - DNA, 15 bp, Homo sapiens
catggctgaaacggg

SEQ ID NO: 410352 - DNA, 15 bp, Homo sapiens
ccatggctgaaacgg

SEQ ID NO: 410353 - DNA, 15 bp, Homo sapiens
gccatggctgaaacg

SEQ ID NO: 410354 - DNA, 15 bp, Homo sapiens
agccatggctgaaac

SEQ ID NO: 410355 - DNA, 15 bp, Homo sapiens
tagccatggctgaaa

SEQ ID NO: 410356 - DNA, 15 bp, Homo sapiens
ctagccatggctgaa

SEQ ID NO: 410357 - DNA, 15 bp, Homo sapiens
tctagccatggctga

SEQ ID NO: 410358 - DNA, 15 bp, Homo sapiens
ctctagccatggctg

SEQ ID NO: 410359 - DNA, 15 bp, Homo sapiens
gctctagccatggct

SEQ ID NO: 410360 - DNA, 15 bp, Homo sapiens
tgctctagccatggc

SEQ ID NO: 410361 - DNA, 15 bp, Homo sapiens
ctgctctagccatgg

SEQ ID NO: 410362 - DNA, 15 bp, Homo sapiens
gctgctctagccatg

SEQ ID NO: 410363 - DNA, 15 bp, Homo sapiens
agctgctctagccat

SEQ ID NO: 410364 - DNA, 15 bp, Homo sapiens
cagctgctctagcca

SEQ ID NO: 410365 - DNA, 15 bp, Homo sapiens
ccagctgctctagcc

SEQ ID NO: 410366 - DNA, 15 bp, Homo sapiens
cccagctgctctagc

SEQ ID NO: 410367 - DNA, 15 bp, Homo sapiens
tcccagctgctctag

SEQ ID NO: 410368 - DNA, 15 bp, Homo sapiens
gtcccagctgctcta

SEQ ID NO: 410369 - DNA, 15 bp, Homo sapiens
tgtcccagctgctct

SEQ ID NO: 410370 - DNA, 15 bp, Homo sapiens
gtgtcccagctgctc

SEQ ID NO: 410371 - DNA, 15 bp, Homo sapiens
tgtgtcccagctgct

SEQ ID NO: 410372 - DNA, 15 bp, Homo sapiens
ctgtgtcccagctgc

SEQ ID NO: 410373 - DNA, 15 bp, Homo sapiens
cctgtgtcccagctg

SEQ ID NO: 410374 - DNA, 15 bp, Homo sapiens
ccctgtgtcccagct

SEQ ID NO: 410375 - DNA, 15 bp, Homo sapiens
gccctgtgtcccagc

SEQ ID NO: 410376 - DNA, 15 bp, Homo sapiens
tgccctgtgtcccag

SEQ ID NO: 410377 - DNA, 15 bp, Homo sapiens
gtgccctgtgtccca

SEQ ID NO: 410378 - DNA, 15 bp, Homo sapiens
ggtgccctgtgtccc

SEQ ID NO: 410379 - DNA, 15 bp, Homo sapiens
tggtgccctgtgtcc

SEQ ID NO: 410380 - DNA, 15 bp, Homo sapiens
ttggtgccctgtgtc

SEQ ID NO: 410381 - DNA, 15 bp, Homo sapiens
cttggtgccctgtgt

SEQ ID NO: 410382 - DNA, 15 bp, Homo sapiens
acttggtgccctgtg

SEQ ID NO: 410383 - DNA, 15 bp, Homo sapiens
aacttggtgccctgt

SEQ ID NO: 410384 - DNA, 15 bp, Homo sapiens
gaacttggtgccctg

SEQ ID NO: 410385 - DNA, 15 bp, Homo sapiens
ggaacttggtgccct

SEQ ID NO: 410386 - DNA, 15 bp, Homo sapiens
aggaacttggtgccc

SEQ ID NO: 410387 - DNA, 15 bp, Homo sapiens
taggaacttggtgcc

SEQ ID NO: 410388 - DNA, 15 bp, Homo sapiens
ctaggaacttggtgc

SEQ ID NO: 410389 - DNA, 15 bp, Homo sapiens
cctaggaacttggtg

SEQ ID NO: 410390 - DNA, 15 bp, Homo sapiens
gcctaggaacttggt

SEQ ID NO: 410391 - DNA, 15 bp, Homo sapiens
agcctaggaacttgg

SEQ ID NO: 410392 - DNA, 15 bp, Homo sapiens
cagcctaggaacttg

SEQ ID NO: 410393 - DNA, 15 bp, Homo sapiens
gcagcctaggaactt

SEQ ID NO: 410394 - DNA, 15 bp, Homo sapiens
tgcagcctaggaact

SEQ ID NO: 410395 - DNA, 15 bp, Homo sapiens
gtgcagcctaggaac

SEQ ID NO: 410396 - DNA, 15 bp, Homo sapiens
tgtgcagcctaggaa

SEQ ID NO: 410397 - DNA, 15 bp, Homo sapiens
gtgtgcagcctagga

SEQ ID NO: 410398 - DNA, 15 bp, Homo sapiens
tgtgtgcagcctagg

SEQ ID NO: 410399 - DNA, 15 bp, Homo sapiens
ctgtgtgcagcctag

SEQ ID NO: 410400 - DNA, 15 bp, Homo sapiens
gctgtgtgcagccta

SEQ ID NO: 410401 - DNA, 15 bp, Homo sapiens
agctgtgtgcagcct

SEQ ID NO: 410402 - DNA, 15 bp, Homo sapiens
cagctgtgtgcagcc

SEQ ID NO: 410403 - DNA, 15 bp, Homo sapiens
ccagctgtgtgcagc

SEQ ID NO: 410404 - DNA, 15 bp, Homo sapiens
cccagctgtgtgcag

SEQ ID NO: 410405 - DNA, 15 bp, Homo sapiens
ccccagctgtgtgca

SEQ ID NO: 410406 - DNA, 15 bp, Homo sapiens
gccccagctgtgtgc

SEQ ID NO: 410407 - DNA, 15 bp, Homo sapiens
ggccccagctgtgtg

SEQ ID NO: 410408 - DNA, 15 bp, Homo sapiens
gggccccagctgtgt

SEQ ID NO: 410409 - DNA, 15 bp, Homo sapiens
tgggccccagctgtg

SEQ ID NO: 410410 - DNA, 15 bp, Homo sapiens
ctgggccccagctgt

SEQ ID NO: 410411 - DNA, 15 bp, Homo sapiens
actgggccccagctg

SEQ ID NO: 410412 - DNA, 15 bp, Homo sapiens
gactgggccccagct

SEQ ID NO: 410413 - DNA, 15 bp, Homo sapiens
ggactgggccccagc

SEQ ID NO: 410414 - DNA, 15 bp, Homo sapiens
tggactgggccccag

SEQ ID NO: 410415 - DNA, 15 bp, Homo sapiens
gtggactgggcccca

SEQ ID NO: 410416 - DNA, 15 bp, Homo sapiens
agtggactgggcccc

SEQ ID NO: 410417 - DNA, 15 bp, Homo sapiens
tagtggactgggccc

SEQ ID NO: 410418 - DNA, 15 bp, Homo sapiens
ttagtggactgggcc

SEQ ID NO: 410419 - DNA, 15 bp, Homo sapiens
tttagtggactgggc

SEQ ID NO: 410420 - DNA, 15 bp, Homo sapiens
gtttagtggactggg

SEQ ID NO: 410421 - DNA, 15 bp, Homo sapiens
ggtttagtggactgg

SEQ ID NO: 410422 - DNA, 15 bp, Homo sapiens
tggtttagtggactg

SEQ ID NO: 410423 - DNA, 15 bp, Homo sapiens
atggtttagtggact

SEQ ID NO: 410424 - DNA, 15 bp, Homo sapiens
tatggtttagtggac

SEQ ID NO: 410425 - DNA, 15 bp, Homo sapiens
atatggtttagtgga

SEQ ID NO: 410426 - DNA, 15 bp, Homo sapiens
aatatggtttagtgg

SEQ ID NO: 410427 - DNA, 15 bp, Homo sapiens
aaatatggtttagtg

SEQ ID NO: 410428 - DNA, 15 bp, Homo sapiens
aaaatatggtttagt

SEQ ID NO: 410429 - DNA, 15 bp, Homo sapiens
gaaaatatggtttag

SEQ ID NO: 410430 - DNA, 15 bp, Homo sapiens
ggaaaatatggttta

SEQ ID NO: 410431 - DNA, 15 bp, Homo sapiens
aggaaaatatggttt

SEQ ID NO: 410432 - DNA, 15 bp, Homo sapiens
gaggaaaatatggtt

SEQ ID NO: 410433 - DNA, 15 bp, Homo sapiens
ggaggaaaatatggt

SEQ ID NO: 410434 - DNA, 15 bp, Homo sapiens
aggaggaaaatatgg

SEQ ID NO: 410435 - DNA, 15 bp, Homo sapiens
taggaggaaaatatg

SEQ ID NO: 410436 - DNA, 15 bp, Homo sapiens
ctaggaggaaaatat

SEQ ID NO: 410437 - DNA, 15 bp, Homo sapiens
cctaggaggaaaata

SEQ ID NO: 410438 - DNA, 15 bp, Homo sapiens
acctaggaggaaaat

SEQ ID NO: 410439 - DNA, 15 bp, Homo sapiens
gacctaggaggaaaa

SEQ ID NO: 410440 - DNA, 15 bp, Homo sapiens
agacctaggaggaaa

SEQ ID NO: 410441 - DNA, 15 bp, Homo sapiens
gagacctaggaggaa

SEQ ID NO: 410442 - DNA, 15 bp, Homo sapiens
agagacctaggagga

SEQ ID NO: 410443 - DNA, 15 bp, Homo sapiens
cagagacctaggagg

SEQ ID NO: 410444 - DNA, 15 bp, Homo sapiens
acagagacctaggag

SEQ ID NO: 410445 - DNA, 15 bp, Homo sapiens
cacagagacctagga

SEQ ID NO: 410446 - DNA, 15 bp, Homo sapiens
gcacagagacctagg

SEQ ID NO: 410447 - DNA, 15 bp, Homo sapiens
ggcacagagacctag

SEQ ID NO: 410448 - DNA, 15 bp, Homo sapiens
aggcacagagaccta

SEQ ID NO: 410449 - DNA, 15 bp, Homo sapiens
caggcacagagacct

SEQ ID NO: 410450 - DNA, 15 bp, Homo sapiens
acaggcacagagacc

SEQ ID NO: 410451 - DNA, 15 bp, Homo sapiens
cacaggcacagagac

SEQ ID NO: 410452 - DNA, 15 bp, Homo sapiens
tcacaggcacagaga

SEQ ID NO: 410453 - DNA, 15 bp, Homo sapiens
gtcacaggcacagag

SEQ ID NO: 410454 - DNA, 15 bp, Homo sapiens
tgtcacaggcacaga

SEQ ID NO: 410455 - DNA, 15 bp, Homo sapiens
ttgtcacaggcacag

SEQ ID NO: 410456 - DNA, 15 bp, Homo sapiens
tttgtcacaggcaca

SEQ ID NO: 410457 - DNA, 15 bp, Homo sapiens
ttttgtcacaggcac

SEQ ID NO: 410458 - DNA, 15 bp, Homo sapiens
cttttgtcacaggca

SEQ ID NO: 410459 - DNA, 15 bp, Homo sapiens
ccttttgtcacaggc

SEQ ID NO: 410460 - DNA, 15 bp, Homo sapiens
cccttttgtcacagg

SEQ ID NO: 410461 - DNA, 15 bp, Homo sapiens
ccccttttgtcacag

SEQ ID NO: 410462 - DNA, 15 bp, Homo sapiens
gccccttttgtcaca

SEQ ID NO: 410463 - DNA, 15 bp, Homo sapiens
agccccttttgtcac

SEQ ID NO: 410464 - DNA, 15 bp, Homo sapiens
cagccccttttgtca

SEQ ID NO: 410465 - DNA, 15 bp, Homo sapiens
gcagccccttttgtc

SEQ ID NO: 410466 - DNA, 15 bp, Homo sapiens
agcagccccttttgt

SEQ ID NO: 410467 - DNA, 15 bp, Homo sapiens
cagcagccccttttg

SEQ ID NO: 410468 - DNA, 15 bp, Homo sapiens
acagcagcccctttt

SEQ ID NO: 410469 - DNA, 15 bp, Homo sapiens
cacagcagccccttt

SEQ ID NO: 410470 - DNA, 15 bp, Homo sapiens
tcacagcagcccctt

SEQ ID NO: 410471 - DNA, 15 bp, Homo sapiens
ttcacagcagcccct

SEQ ID NO: 410472 - DNA, 15 bp, Homo sapiens
cttcacagcagcccc

SEQ ID NO: 410473 - DNA, 15 bp, Homo sapiens
tcttcacagcagccc

SEQ ID NO: 410474 - DNA, 15 bp, Homo sapiens
gtcttcacagcagcc

SEQ ID NO: 410475 - DNA, 15 bp, Homo sapiens
ggtcttcacagcagc

SEQ ID NO: 410476 - DNA, 15 bp, Homo sapiens
aggtcttcacagcag

SEQ ID NO: 410477 - DNA, 15 bp, Homo sapiens
aaggtcttcacagca

SEQ ID NO: 410478 - DNA, 15 bp, Homo sapiens
taaggtcttcacagc

SEQ ID NO: 410479 - DNA, 15 bp, Homo sapiens
ctaaggtcttcacag

SEQ ID NO: 410480 - DNA, 15 bp, Homo sapiens
tctaaggtcttcaca

SEQ ID NO: 410481 - DNA, 15 bp, Homo sapiens
gtctaaggtcttcac

SEQ ID NO: 410482 - DNA, 15 bp, Homo sapiens
tgtctaaggtcttca

SEQ ID NO: 410483 - DNA, 15 bp, Homo sapiens
atgtctaaggtcttc

SEQ ID NO: 410484 - DNA, 15 bp, Homo sapiens
catgtctaaggtctt

SEQ ID NO: 410485 - DNA, 15 bp, Homo sapiens
gcatgtctaaggtct

SEQ ID NO: 410486 - DNA, 15 bp, Homo sapiens
ggcatgtctaaggtc

SEQ ID NO: 410487 - DNA, 15 bp, Homo sapiens
gggcatgtctaaggt

SEQ ID NO: 410488 - DNA, 15 bp, Homo sapiens
agggcatgtctaagg

SEQ ID NO: 410489 - DNA, 15 bp, Homo sapiens
cagggcatgtctaag

SEQ ID NO: 410490 - DNA, 15 bp, Homo sapiens
ccagggcatgtctaa

SEQ ID NO: 410491 - DNA, 15 bp, Homo sapiens
tccagggcatgtcta

SEQ ID NO: 410492 - DNA, 15 bp, Homo sapiens
ctccagggcatgtct

SEQ ID NO: 410493 - DNA, 15 bp, Homo sapiens
aggaaaatgtctcca

SEQ ID NO: 410494 - DNA, 15 bp, Homo sapiens
gaggaaaatgtctcc

SEQ ID NO: 410495 - DNA, 15 bp, Homo sapiens
tgaggaaaatgtctc

SEQ ID NO: 410496 - DNA, 15 bp, Homo sapiens
atgaggaaaatgtct

SEQ ID NO: 410497 - DNA, 15 bp, Homo sapiens
aatgaggaaaatgtc

SEQ ID NO: 410498 - DNA, 15 bp, Homo sapiens
caatgaggaaaatgt

SEQ ID NO: 410499 - DNA, 15 bp, Homo sapiens
acaatgaggaaaatg

SEQ ID NO: 410500 - DNA, 15 bp, Homo sapiens
gacaatgaggaaaat

SEQ ID NO: 410501 - DNA, 15 bp, Homo sapiens
agacaatgaggaaaa

SEQ ID NO: 410502 - DNA, 15 bp, Homo sapiens
gagacaatgaggaaa

SEQ ID NO: 410503 - DNA, 15 bp, Homo sapiens
cgagacaatgaggaa

SEQ ID NO: 410504 - DNA, 15 bp, Homo sapiens
ccgagacaatgagga

SEQ ID NO: 410505 - DNA, 15 bp, Homo sapiens
cccgagacaatgagg

SEQ ID NO: 410506 - DNA, 15 bp, Homo sapiens
ccccgagacaatgag

SEQ ID NO: 410507 - DNA, 15 bp, Homo sapiens
tccccgagacaatga

SEQ ID NO: 410508 - DNA, 15 bp, Homo sapiens
atccccgagacaatg

SEQ ID NO: 410509 - DNA, 15 bp, Homo sapiens
aatccccgagacaat

SEQ ID NO: 410510 - DNA, 15 bp, Homo sapiens
taatccccgagacaa

SEQ ID NO: 410511 - DNA, 15 bp, Homo sapiens
ttaatccccgagaca

SEQ ID NO: 410512 - DNA, 15 bp, Homo sapiens
gttaatccccgagac

SEQ ID NO: 410513 - DNA, 15 bp, Homo sapiens
agttaatccccgaga

SEQ ID NO: 410514 - DNA, 15 bp, Homo sapiens
aagttaatccccgag

SEQ ID NO: 410515 - DNA, 15 bp, Homo sapiens
aaagttaatccccga

SEQ ID NO: 410516 - DNA, 15 bp, Homo sapiens
gaaagttaatccccg

SEQ ID NO: 410517 - DNA, 15 bp, Homo sapiens
cgaaagttaatcccc

SEQ ID NO: 410518 - DNA, 15 bp, Homo sapiens
ccgaaagttaatccc

SEQ ID NO: 410519 - DNA, 15 bp, Homo sapiens
gccgaaagttaatcc

SEQ ID NO: 410520 - DNA, 15 bp, Homo sapiens
agccgaaagttaatc

SEQ ID NO: 410521 - DNA, 15 bp, Homo sapiens
gagccgaaagttaat

SEQ ID NO: 410522 - DNA, 15 bp, Homo sapiens
ggagccgaaagttaa

SEQ ID NO: 410523 - DNA, 15 bp, Homo sapiens
aggagccgaaagtta

SEQ ID NO: 410524 - DNA, 15 bp, Homo sapiens
aaggagccgaaagtt

SEQ ID NO: 410525 - DNA, 15 bp, Homo sapiens
caaggagccgaaagt

SEQ ID NO: 410526 - DNA, 15 bp, Homo sapiens
acaaggagccgaaag

SEQ ID NO: 410527 - DNA, 15 bp, Homo sapiens
aacaaggagccgaaa

SEQ ID NO: 410528 - DNA, 15 bp, Homo sapiens
taacaaggagccgaa

SEQ ID NO: 410529 - DNA, 15 bp, Homo sapiens
gtaacaaggagccga

SEQ ID NO: 410530 - DNA, 15 bp, Homo sapiens
agtaacaaggagccg

SEQ ID NO: 410531 - DNA, 15 bp, Homo sapiens
aagtaacaaggagcc

SEQ ID NO: 410532 - DNA, 15 bp, Homo sapiens
taagtaacaaggagc

SEQ ID NO: 410533 - DNA, 15 bp, Homo sapiens
ataagtaacaaggag

SEQ ID NO: 410534 - DNA, 15 bp, Homo sapiens
cataagtaacaagga

SEQ ID NO: 410535 - DNA, 15 bp, Homo sapiens
gcataagtaacaagg

SEQ ID NO: 410536 - DNA, 15 bp, Homo sapiens
tgcataagtaacaag

SEQ ID NO: 410537 - DNA, 15 bp, Homo sapiens
ttgcataagtaacaa

SEQ ID NO: 410538 - DNA, 15 bp, Homo sapiens
tttgcataagtaaca

SEQ ID NO: 410539 - DNA, 15 bp, Homo sapiens
atttgcataagtaac

SEQ ID NO: 410540 - DNA, 15 bp, Homo sapiens
aatttgcataagtaa

SEQ ID NO: 410541 - DNA, 15 bp, Homo sapiens
ctgcagaaatttgca

SEQ ID NO: 410542 - DNA, 15 bp, Homo sapiens
gctgcagaaatttgc

SEQ ID NO: 410543 - DNA, 15 bp, Homo sapiens
ggctgcagaaatttg

SEQ ID NO: 410544 - DNA, 15 bp, Homo sapiens
cggctgcagaaattt

SEQ ID NO: 410545 - DNA, 15 bp, Homo sapiens
ccggctgcagaaatt

SEQ ID NO: 410546 - DNA, 15 bp, Homo sapiens
gccggctgcagaaat

SEQ ID NO: 410547 - DNA, 15 bp, Homo sapiens
agccggctgcagaaa

SEQ ID NO: 410548 - DNA, 15 bp, Homo sapiens
aagccggctgcagaa

SEQ ID NO: 410549 - DNA, 15 bp, Homo sapiens
caagccggctgcaga

SEQ ID NO: 410550 - DNA, 15 bp, Homo sapiens
tcaagccggctgcag

SEQ ID NO: 410551 - DNA, 15 bp, Homo sapiens
ttcaagccggctgca

SEQ ID NO: 410552 - DNA, 15 bp, Homo sapiens
attcaagccggctgc

SEQ ID NO: 410553 - DNA, 15 bp, Homo sapiens
aattcaagccggctg

SEQ ID NO: 410554 - DNA, 15 bp, Homo sapiens
aaattcaagccggct

SEQ ID NO: 410555 - DNA, 15 bp, Homo sapiens
gaaattcaagccggc

SEQ ID NO: 410556 - DNA, 15 bp, Homo sapiens
agaaattcaagccgg

SEQ ID NO: 410557 - DNA, 15 bp, Homo sapiens
aagaaattcaagccg

SEQ ID NO: 410558 - DNA, 15 bp, Homo sapiens
agaagaaattcaagc

SEQ ID NO: 410559 - DNA, 15 bp, Homo sapiens
gagaagaaattcaag

SEQ ID NO: 410560 - DNA, 15 bp, Homo sapiens
tgagaagaaattcaa

SEQ ID NO: 410561 - DNA, 15 bp, Homo sapiens
ctgagaagaaattca

SEQ ID NO: 410562 - DNA, 15 bp, Homo sapiens
tctgagaagaaattc

SEQ ID NO: 410563 - DNA, 15 bp, Homo sapiens
ttctgagaagaaatt

SEQ ID NO: 410564 - DNA, 15 bp, Homo sapiens
tttctgagaagaaat

SEQ ID NO: 410565 - DNA, 15 bp, Homo sapiens
ttttctgagaagaaa

SEQ ID NO: 410566 - DNA, 15 bp, Homo sapiens
attttctgagaagaa

SEQ ID NO: 410567 - DNA, 15 bp, Homo sapiens
cattttctgagaaga

SEQ ID NO: 410568 - DNA, 15 bp, Homo sapiens
tcattttctgagaag

SEQ ID NO: 410569 - DNA, 15 bp, Homo sapiens
ctcattttctgagaa

SEQ ID NO: 410570 - DNA, 15 bp, Homo sapiens
tctcattttctgaga

SEQ ID NO: 410571 - DNA, 15 bp, Homo sapiens
atctcattttctgag

SEQ ID NO: 410572 - DNA, 15 bp, Homo sapiens
aatctcattttctga

SEQ ID NO: 410573 - DNA, 15 bp, Homo sapiens
aaatctcattttctg

SEQ ID NO: 410574 - DNA, 15 bp, Homo sapiens
aaaatctcattttct

SEQ ID NO: 410575 - DNA, 15 bp, Homo sapiens
gaaaatctcattttc

SEQ ID NO: 410576 - DNA, 15 bp, Homo sapiens
aaaagaaaatctcat

SEQ ID NO: 410577 - DNA, 15 bp, Homo sapiens
gaaaagaaaatctca

SEQ ID NO: 410578 - DNA, 15 bp, Homo sapiens
agaaaagaaaatctc

SEQ ID NO: 410579 - DNA, 15 bp, Homo sapiens
tagaaaagaaaatct

SEQ ID NO: 410580 - DNA, 15 bp, Homo sapiens
atagaaaagaaaatc

SEQ ID NO: 410581 - DNA, 15 bp, Homo sapiens
gatagaaaagaaaat

SEQ ID NO: 410582 - DNA, 15 bp, Homo sapiens
aatgtgatagaaaag

SEQ ID NO: 410583 - DNA, 15 bp, Homo sapiens
caatgtgatagaaaa

SEQ ID NO: 410584 - DNA, 15 bp, Homo sapiens
acaatgtgatagaaa

SEQ ID NO: 410585 - DNA, 15 bp, Homo sapiens
gacaatgtgatagaa

SEQ ID NO: 410586 - DNA, 15 bp, Homo sapiens
tgacaatgtgataga

SEQ ID NO: 410587 - DNA, 15 bp, Homo sapiens
ctgacaatgtgatag

SEQ ID NO: 410588 - DNA, 15 bp, Homo sapiens
cctgacaatgtgata

SEQ ID NO: 410589 - DNA, 15 bp, Homo sapiens
gcctgacaatgtgat

SEQ ID NO: 410590 - DNA, 15 bp, Homo sapiens
agcctgacaatgtga

SEQ ID NO: 410591 - DNA, 15 bp, Homo sapiens
cagcctgacaatgtg

SEQ ID NO: 410592 - DNA, 15 bp, Homo sapiens
gcagcctgacaatgt

SEQ ID NO: 410593 - DNA, 15 bp, Homo sapiens
tgcagcctgacaatg

SEQ ID NO: 410594 - DNA, 15 bp, Homo sapiens
ttgcagcctgacaat

SEQ ID NO: 410595 - DNA, 15 bp, Homo sapiens
tttgcagcctgacaa

SEQ ID NO: 410596 - DNA, 15 bp, Homo sapiens
atttgcagcctgaca

SEQ ID NO: 410597 - DNA, 15 bp, Homo sapiens
aatttgcagcctgac

SEQ ID NO: 410598 - DNA, 15 bp, Homo sapiens
gaagtttggaaaatt

SEQ ID NO: 410599 - DNA, 15 bp, Homo sapiens
agaagtttggaaaat

SEQ ID NO: 410600 - DNA, 15 bp, Homo sapiens
tagaagtttggaaaa

SEQ ID NO: 410601 - DNA, 15 bp, Homo sapiens
catagaagtttggaa

SEQ ID NO: 410602 - DNA, 15 bp, Homo sapiens
gcatagaagtttgga

SEQ ID NO: 410603 - DNA, 15 bp, Homo sapiens
agcatagaagtttgg

SEQ ID NO: 410604 - DNA, 15 bp, Homo sapiens
gagcatagaagtttg

SEQ ID NO: 410605 - DNA, 15 bp, Homo sapiens
agagcatagaagttt

SEQ ID NO: 410606 - DNA, 15 bp, Homo sapiens
cagagcatagaagtt

SEQ ID NO: 410607 - DNA, 15 bp, Homo sapiens
gcagagcatagaagt

SEQ ID NO: 410608 - DNA, 15 bp, Homo sapiens
agcagagcatagaag

SEQ ID NO: 410609 - DNA, 15 bp, Homo sapiens
gagcagagcatagaa

SEQ ID NO: 410610 - DNA, 15 bp, Homo sapiens
ggagcagagcataga

SEQ ID NO: 410611 - DNA, 15 bp, Homo sapiens
gggagcagagcatag

SEQ ID NO: 410612 - DNA, 15 bp, Homo sapiens
agggagcagagcata

SEQ ID NO: 410613 - DNA, 15 bp, Homo sapiens
aagggagcagagcat

SEQ ID NO: 410614 - DNA, 15 bp, Homo sapiens
aaagggagcagagca

SEQ ID NO: 410615 - DNA, 15 bp, Homo sapiens
taaagggagcagagc

SEQ ID NO: 410616 - DNA, 15 bp, Homo sapiens
ttaaagggagcagag

SEQ ID NO: 410617 - DNA, 15 bp, Homo sapiens
tttaaagggagcaga

SEQ ID NO: 410618 - DNA, 15 bp, Homo sapiens
ttttaaagggagcag

SEQ ID NO: 410619 - DNA, 15 bp, Homo sapiens
tttttaaagggagca

SEQ ID NO: 410620 - DNA, 15 bp, Homo sapiens
ttttttaaagggagc

SEQ ID NO: 410621 - DNA, 15 bp, Homo sapiens
gttttttaaagggag

SEQ ID NO: 410622 - DNA, 15 bp, Homo sapiens
agttttttaaaggga

SEQ ID NO: 410623 - DNA, 15 bp, Homo sapiens
cagttttttaaaggg

SEQ ID NO: 410624 - DNA, 15 bp, Homo sapiens
tcagttttttaaagg

SEQ ID NO: 410625 - DNA, 15 bp, Homo sapiens
ttcagttttttaaag

SEQ ID NO: 410626 - DNA, 15 bp, Homo sapiens
attcagttttttaaa

SEQ ID NO: 410627 - DNA, 15 bp, Homo sapiens
cattcagttttttaa

SEQ ID NO: 410628 - DNA, 15 bp, Homo sapiens
gcattcagtttttta

SEQ ID NO: 410629 - DNA, 15 bp, Homo sapiens
ggcattcagtttttt

SEQ ID NO: 410630 - DNA, 15 bp, Homo sapiens
aggcattcagttttt

SEQ ID NO: 410631 - DNA, 15 bp, Homo sapiens
aaggcattcagtttt

SEQ ID NO: 410632 - DNA, 15 bp, Homo sapiens
aaaggcattcagttt

SEQ ID NO: 410633 - DNA, 15 bp, Homo sapiens
taaaggcattcagtt

SEQ ID NO: 410634 - DNA, 15 bp, Homo sapiens
ttaaaggcattcagt

SEQ ID NO: 410635 - DNA, 15 bp, Homo sapiens
gttaaaggcattcag

SEQ ID NO: 410636 - DNA, 15 bp, Homo sapiens
tgttaaaggcattca

SEQ ID NO: 410637 - DNA, 15 bp, Homo sapiens
ctgttaaaggcattc

SEQ ID NO: 410638 - DNA, 15 bp, Homo sapiens
gctgttaaaggcatt

SEQ ID NO: 410639 - DNA, 15 bp, Homo sapiens
tgctgttaaaggcat

SEQ ID NO: 410640 - DNA, 15 bp, Homo sapiens
gtgctgttaaaggca

SEQ ID NO: 410641 - DNA, 15 bp, Homo sapiens
ggtgctgttaaaggc

SEQ ID NO: 410642 - DNA, 15 bp, Homo sapiens
gggtgctgttaaagg

SEQ ID NO: 410643 - DNA, 15 bp, Homo sapiens
tgggtgctgttaaag

SEQ ID NO: 410644 - DNA, 15 bp, Homo sapiens
ttgggtgctgttaaa

SEQ ID NO: 410645 - DNA, 15 bp, Homo sapiens
cttgggtgctgttaa

SEQ ID NO: 410646 - DNA, 15 bp, Homo sapiens
acttgggtgctgtta

SEQ ID NO: 410647 - DNA, 15 bp, Homo sapiens
gacttgggtgctgtt

SEQ ID NO: 410648 - DNA, 15 bp, Homo sapiens
tgacttgggtgctgt

SEQ ID NO: 410649 - DNA, 15 bp, Homo sapiens
gtgacttgggtgctg

SEQ ID NO: 410650 - DNA, 15 bp, Homo sapiens
ggtgacttgggtgct

SEQ ID NO: 410651 - DNA, 15 bp, Homo sapiens
aggtgacttgggtgc

SEQ ID NO: 410652 - DNA, 15 bp, Homo sapiens
gaggtgacttgggtg

SEQ ID NO: 410653 - DNA, 15 bp, Homo sapiens
agaggtgacttgggt

SEQ ID NO: 410654 - DNA, 15 bp, Homo sapiens
aagaggtgacttggg

SEQ ID NO: 410655 - DNA, 15 bp, Homo sapiens
caagaggtgacttgg

SEQ ID NO: 410656 - DNA, 15 bp, Homo sapiens
tcaagaggtgacttg

SEQ ID NO: 410657 - DNA, 15 bp, Homo sapiens
ttcaagaggtgactt

SEQ ID NO: 410658 - DNA, 15 bp, Homo sapiens
attcaagaggtgact

SEQ ID NO: 410659 - DNA, 15 bp, Homo sapiens
cattcaagaggtgac

SEQ ID NO: 410660 - DNA, 15 bp, Homo sapiens
gcattcaagaggtga

SEQ ID NO: 410661 - DNA, 15 bp, Homo sapiens
agcattcaagaggtg

SEQ ID NO: 410662 - DNA, 15 bp, Homo sapiens
aagcattcaagaggt

SEQ ID NO: 410663 - DNA, 15 bp, Homo sapiens
aacttttaatttctt

SEQ ID NO: 410664 - DNA, 15 bp, Homo sapiens
taacttttaatttct

SEQ ID NO: 410665 - DNA, 15 bp, Homo sapiens
ataacttttaatttc

SEQ ID NO: 410666 - DNA, 15 bp, Homo sapiens
aataacttttaattt

SEQ ID NO: 410667 - DNA, 15 bp, Homo sapiens
taataacttttaatt

SEQ ID NO: 410668 - DNA, 15 bp, Homo sapiens
ataataacttttaat

SEQ ID NO: 410669 - DNA, 15 bp, Homo sapiens
tataataacttttaa

SEQ ID NO: 410670 - DNA, 15 bp, Homo sapiens
ttataataactttta

SEQ ID NO: 410671 - DNA, 15 bp, Homo sapiens
tttataataactttt

SEQ ID NO: 410672 - DNA, 15 bp, Homo sapiens
ttttataataacttt

SEQ ID NO: 410673 - DNA, 15 bp, Homo sapiens
attttataataactt

SEQ ID NO: 410674 - DNA, 15 bp, Homo sapiens
aattttataataact

SEQ ID NO: 410675 - DNA, 15 bp, Homo sapiens
aaattttataataac

SEQ ID NO: 410676 - DNA, 15 bp, Homo sapiens
taaaattttataata

SEQ ID NO: 410677 - DNA, 15 bp, Homo sapiens
ctaaaattttataat

SEQ ID NO: 410678 - DNA, 15 bp, Homo sapiens
cctaaaattttataa

SEQ ID NO: 410679 - DNA, 15 bp, Homo sapiens
gcctaaaattttata

SEQ ID NO: 410680 - DNA, 15 bp, Homo sapiens
agcctaaaattttat

SEQ ID NO: 410681 - DNA, 15 bp, Homo sapiens
aagcctaaaatttta

SEQ ID NO: 410682 - DNA, 15 bp, Homo sapiens
caagcctaaaatttt

SEQ ID NO: 410683 - DNA, 15 bp, Homo sapiens
tcaagcctaaaattt

SEQ ID NO: 410684 - DNA, 15 bp, Homo sapiens
ctcaagcctaaaatt

SEQ ID NO: 410685 - DNA, 15 bp, Homo sapiens
tctcaagcctaaaat

SEQ ID NO: 410686 - DNA, 15 bp, Homo sapiens
ttctcaagcctaaaa

SEQ ID NO: 410687 - DNA, 15 bp, Homo sapiens
tttctcaagcctaaa

SEQ ID NO: 410688 - DNA, 15 bp, Homo sapiens
gtttctcaagcctaa

SEQ ID NO: 410689 - DNA, 15 bp, Homo sapiens
agtttctcaagccta

SEQ ID NO: 410690 - DNA, 15 bp, Homo sapiens
cagtttctcaagcct

SEQ ID NO: 410691 - DNA, 15 bp, Homo sapiens
tcagtttctcaagcc

SEQ ID NO: 410692 - DNA, 15 bp, Homo sapiens
ctcagtttctcaagc

SEQ ID NO: 410693 - DNA, 15 bp, Homo sapiens
actcagtttctcaag

SEQ ID NO: 410694 - DNA, 15 bp, Homo sapiens
tactcagtttctcaa

SEQ ID NO: 410695 - DNA, 15 bp, Homo sapiens
ctactcagtttctca

SEQ ID NO: 410696 - DNA, 15 bp, Homo sapiens
tctactcagtttctc

SEQ ID NO: 410697 - DNA, 15 bp, Homo sapiens
atctactcagtttct

SEQ ID NO: 410698 - DNA, 15 bp, Homo sapiens
aatctactcagtttc

SEQ ID NO: 410699 - DNA, 15 bp, Homo sapiens
caatctactcagttt

SEQ ID NO: 410700 - DNA, 15 bp, Homo sapiens
acaatctactcagtt

SEQ ID NO: 410701 - DNA, 15 bp, Homo sapiens
tacaatctactcagt

SEQ ID NO: 410702 - DNA, 15 bp, Homo sapiens
atacaatctactcag

SEQ ID NO: 410703 - DNA, 15 bp, Homo sapiens
catacaatctactca

SEQ ID NO: 410704 - DNA, 15 bp, Homo sapiens
tcatacaatctactc

SEQ ID NO: 410705 - DNA, 15 bp, Homo sapiens
atcatacaatctact

SEQ ID NO: 410706 - DNA, 15 bp, Homo sapiens
gatcatacaatctac

SEQ ID NO: 410707 - DNA, 15 bp, Homo sapiens
tgatcatacaatcta

SEQ ID NO: 410708 - DNA, 15 bp, Homo sapiens
atgatcatacaatct

SEQ ID NO: 410709 - DNA, 15 bp, Homo sapiens
aatgatcatacaatc

SEQ ID NO: 410710 - DNA, 15 bp, Homo sapiens
aaatgatcatacaat

SEQ ID NO: 410711 - DNA, 15 bp, Homo sapiens
taaatgatcatacaa

SEQ ID NO: 410712 - DNA, 15 bp, Homo sapiens
gtaaatgatcataca

SEQ ID NO: 410713 - DNA, 15 bp, Homo sapiens
agtaaatgatcatac

SEQ ID NO: 410714 - DNA, 15 bp, Homo sapiens
cagtaaatgatcata

SEQ ID NO: 410715 - DNA, 15 bp, Homo sapiens
tcagtaaatgatcat

SEQ ID NO: 410716 - DNA, 15 bp, Homo sapiens
ctcagtaaatgatca

SEQ ID NO: 410717 - DNA, 15 bp, Homo sapiens
actcagtaaatgatc

SEQ ID NO: 410718 - DNA, 15 bp, Homo sapiens
aactcagtaaatgat

SEQ ID NO: 410719 - DNA, 15 bp, Homo sapiens
caactcagtaaatga

SEQ ID NO: 410720 - DNA, 15 bp, Homo sapiens
tcaactcagtaaatg

SEQ ID NO: 410721 - DNA, 15 bp, Homo sapiens
ttcaactcagtaaat

SEQ ID NO: 410722 - DNA, 15 bp, Homo sapiens
tttcaactcagtaaa

SEQ ID NO: 410723 - DNA, 15 bp, Homo sapiens
ttttcaactcagtaa

SEQ ID NO: 410724 - DNA, 15 bp, Homo sapiens
tttttcaactcagta

SEQ ID NO: 410725 - DNA, 15 bp, Homo sapiens
ttttttcaactcagt

SEQ ID NO: 410726 - DNA, 15 bp, Homo sapiens
tttttttcaactcag

SEQ ID NO: 410727 - DNA, 15 bp, Homo sapiens
ttttttttcaactca

SEQ ID NO: 410728 - DNA, 15 bp, Homo sapiens
tttttttttcaactc

SEQ ID NO: 410729 - DNA, 15 bp, Homo sapiens
ttttttttttcaact

SEQ ID NO: 410730 - DNA, 15 bp, Homo sapiens
tttttttttttcaac

SEQ ID NO: 410731 - DNA, 15 bp, Homo sapiens
ttttttttttttcaa

SEQ ID NO: 410732 - DNA, 15 bp, Homo sapiens
tttttttttttttca

SEQ ID NO: 410733 - DNA, 15 bp, Homo sapiens
ttttttttttttttc

SEQ ID NO: 410734 - DNA, 15 bp, Homo sapiens
ttccttttttttttt

SEQ ID NO: 410735 - DNA, 15 bp, Homo sapiens
attcctttttttttt

SEQ ID NO: 410736 - DNA, 15 bp, Homo sapiens
cattccttttttttt

SEQ ID NO: 410737 - DNA, 15 bp, Homo sapiens
tcattcctttttttt

SEQ ID NO: 410738 - DNA, 15 bp, Homo sapiens
ctcattccttttttt

SEQ ID NO: 410739 - DNA, 15 bp, Homo sapiens
actcattcctttttt

SEQ ID NO: 410740 - DNA, 15 bp, Homo sapiens
tactcattccttttt

SEQ ID NO: 410741 - DNA, 15 bp, Homo sapiens
atactcattcctttt

SEQ ID NO: 410742 - DNA, 15 bp, Homo sapiens
gatactcattccttt

SEQ ID NO: 410743 - DNA, 15 bp, Homo sapiens
agatactcattcctt

SEQ ID NO: 410744 - DNA, 15 bp, Homo sapiens
cagatactcattcct

SEQ ID NO: 410745 - DNA, 15 bp, Homo sapiens
acagatactcattcc

SEQ ID NO: 410746 - DNA, 15 bp, Homo sapiens
gacagatactcattc

SEQ ID NO: 410747 - DNA, 15 bp, Homo sapiens
tgacagatactcatt

SEQ ID NO: 410748 - DNA, 15 bp, Homo sapiens
ctgacagatactcat

SEQ ID NO: 410749 - DNA, 15 bp, Homo sapiens
cctgacagatactca

SEQ ID NO: 410750 - DNA, 15 bp, Homo sapiens
tcctgacagatactc

SEQ ID NO: 410751 - DNA, 15 bp, Homo sapiens
ttcctgacagatact

SEQ ID NO: 410752 - DNA, 15 bp, Homo sapiens
tttcctgacagatac

SEQ ID NO: 410753 - DNA, 15 bp, Homo sapiens
ctttcctgacagata

SEQ ID NO: 410754 - DNA, 15 bp, Homo sapiens
actttcctgacagat

SEQ ID NO: 410755 - DNA, 15 bp, Homo sapiens
tactttcctgacaga

SEQ ID NO: 410756 - DNA, 15 bp, Homo sapiens
ttactttcctgacag

SEQ ID NO: 410757 - DNA, 15 bp, Homo sapiens
attactttcctgaca

SEQ ID NO: 410758 - DNA, 15 bp, Homo sapiens
gattactttcctgac

SEQ ID NO: 410759 - DNA, 15 bp, Homo sapiens
tgattactttcctga

SEQ ID NO: 410760 - DNA, 15 bp, Homo sapiens
ctgattactttcctg

SEQ ID NO: 410761 - DNA, 15 bp, Homo sapiens
tctgattactttcct

SEQ ID NO: 410762 - DNA, 15 bp, Homo sapiens
ctctgattactttcc

SEQ ID NO: 410763 - DNA, 15 bp, Homo sapiens
actctgattactttc

SEQ ID NO: 410764 - DNA, 15 bp, Homo sapiens
gactctgattacttt

SEQ ID NO: 410765 - DNA, 15 bp, Homo sapiens
ggactctgattactt

SEQ ID NO: 410766 - DNA, 15 bp, Homo sapiens
aggactctgattact

SEQ ID NO: 410767 - DNA, 15 bp, Homo sapiens
caggactctgattac

SEQ ID NO: 410768 - DNA, 15 bp, Homo sapiens
acaggactctgatta

SEQ ID NO: 410769 - DNA, 15 bp, Homo sapiens
aacaggactctgatt

SEQ ID NO: 410770 - DNA, 15 bp, Homo sapiens
caacaggactctgat

SEQ ID NO: 410771 - DNA, 15 bp, Homo sapiens
ccaacaggactctga

SEQ ID NO: 410772 - DNA, 15 bp, Homo sapiens
cccaacaggactctg

SEQ ID NO: 410773 - DNA, 15 bp, Homo sapiens
tcccaacaggactct

SEQ ID NO: 410774 - DNA, 15 bp, Homo sapiens
ttcccaacaggactc

SEQ ID NO: 410775 - DNA, 15 bp, Homo sapiens
cttcccaacaggact

SEQ ID NO: 410776 - DNA, 15 bp, Homo sapiens
acttcccaacaggac

SEQ ID NO: 410777 - DNA, 15 bp, Homo sapiens
cacttcccaacagga

SEQ ID NO: 410778 - DNA, 15 bp, Homo sapiens
acacttcccaacagg

SEQ ID NO: 410779 - DNA, 15 bp, Homo sapiens
gacacttcccaacag

SEQ ID NO: 410780 - DNA, 15 bp, Homo sapiens
tgacacttcccaaca

SEQ ID NO: 410781 - DNA, 15 bp, Homo sapiens
ttgacacttcccaac

SEQ ID NO: 410782 - DNA, 15 bp, Homo sapiens
attgacacttcccaa

SEQ ID NO: 410783 - DNA, 15 bp, Homo sapiens
aattgacacttccca

SEQ ID NO: 410784 - DNA, 15 bp, Homo sapiens
aaattgacacttccc

SEQ ID NO: 410785 - DNA, 15 bp, Homo sapiens
aaaattgacacttcc

SEQ ID NO: 410786 - DNA, 15 bp, Homo sapiens
aaaaattgacacttc

SEQ ID NO: 410787 - DNA, 15 bp, Homo sapiens
caaaaattgacactt

SEQ ID NO: 410788 - DNA, 15 bp, Homo sapiens
ccaaaaattgacact

SEQ ID NO: 410789 - DNA, 15 bp, Homo sapiens
tccaaaaattgacac

SEQ ID NO: 410790 - DNA, 15 bp, Homo sapiens
atccaaaaattgaca

SEQ ID NO: 410791 - DNA, 15 bp, Homo sapiens
catccaaaaattgac

SEQ ID NO: 410792 - DNA, 15 bp, Homo sapiens
acatccaaaaattga

SEQ ID NO: 410793 - DNA, 15 bp, Homo sapiens
gacatccaaaaattg

SEQ ID NO: 410794 - DNA, 15 bp, Homo sapiens
agacatccaaaaatt

SEQ ID NO: 410795 - DNA, 15 bp, Homo sapiens
tagacatccaaaaat

SEQ ID NO: 410796 - DNA, 15 bp, Homo sapiens
ctagacatccaaaaa

SEQ ID NO: 410797 - DNA, 15 bp, Homo sapiens
actagacatccaaaa

SEQ ID NO: 410798 - DNA, 15 bp, Homo sapiens
tactagacatccaaa

SEQ ID NO: 410799 - DNA, 15 bp, Homo sapiens
ctactagacatccaa

SEQ ID NO: 410800 - DNA, 15 bp, Homo sapiens
tctactagacatcca

SEQ ID NO: 410801 - DNA, 15 bp, Homo sapiens
atctactagacatcc

SEQ ID NO: 410802 - DNA, 15 bp, Homo sapiens
tatctactagacatc

SEQ ID NO: 410803 - DNA, 15 bp, Homo sapiens
gtatctactagacat

SEQ ID NO: 410804 - DNA, 15 bp, Homo sapiens
tgtatctactagaca

SEQ ID NO: 410805 - DNA, 15 bp, Homo sapiens
atgtatctactagac

SEQ ID NO: 410806 - DNA, 15 bp, Homo sapiens
tatgtatctactaga

SEQ ID NO: 410807 - DNA, 15 bp, Homo sapiens
ttatgtatctactag

SEQ ID NO: 410808 - DNA, 15 bp, Homo sapiens
tttatgtatctacta

SEQ ID NO: 410809 - DNA, 15 bp, Homo sapiens
atttatgtatctact

SEQ ID NO: 410810 - DNA, 15 bp, Homo sapiens
tatttatgtatctac

SEQ ID NO: 410811 - DNA, 15 bp, Homo sapiens
ctatttatgtatcta

SEQ ID NO: 410812 - DNA, 15 bp, Homo sapiens
actatttatgtatct

SEQ ID NO: 410813 - DNA, 15 bp, Homo sapiens
cactatttatgtatc

SEQ ID NO: 410814 - DNA, 15 bp, Homo sapiens
acactatttatgtat

SEQ ID NO: 410815 - DNA, 15 bp, Homo sapiens
gacactatttatgta

SEQ ID NO: 410816 - DNA, 15 bp, Homo sapiens
tgacactatttatgt

SEQ ID NO: 410817 - DNA, 15 bp, Homo sapiens
ctgacactatttatg

SEQ ID NO: 410818 - DNA, 15 bp, Homo sapiens
cctgacactatttat

SEQ ID NO: 410819 - DNA, 15 bp, Homo sapiens
gcctgacactattta

SEQ ID NO: 410820 - DNA, 15 bp, Homo sapiens
tgcctgacactattt

SEQ ID NO: 410821 - DNA, 15 bp, Homo sapiens
ctgcctgacactatt

SEQ ID NO: 410822 - DNA, 15 bp, Homo sapiens
tctgcctgacactat

SEQ ID NO: 410823 - DNA, 15 bp, Homo sapiens
ttctgcctgacacta

SEQ ID NO: 410824 - DNA, 15 bp, Homo sapiens
cttctgcctgacact

SEQ ID NO: 410825 - DNA, 15 bp, Homo sapiens
acttctgcctgacac

SEQ ID NO: 410826 - DNA, 15 bp, Homo sapiens
tacttctgcctgaca

SEQ ID NO: 410827 - DNA, 15 bp, Homo sapiens
atacttctgcctgac

SEQ ID NO: 410828 - DNA, 15 bp, Homo sapiens
tatacttctgcctga

SEQ ID NO: 410829 - DNA, 15 bp, Homo sapiens
atatacttctgcctg

SEQ ID NO: 410830 - DNA, 15 bp, Homo sapiens
catatacttctgcct

SEQ ID NO: 410831 - DNA, 15 bp, Homo sapiens
acatatacttctgcc

SEQ ID NO: 410832 - DNA, 15 bp, Homo sapiens
cacatatacttctgc

SEQ ID NO: 410833 - DNA, 15 bp, Homo sapiens
tcacatatacttctg

SEQ ID NO: 410834 - DNA, 15 bp, Homo sapiens
ctcacatatacttct

SEQ ID NO: 410835 - DNA, 15 bp, Homo sapiens
actcacatatacttc

SEQ ID NO: 410836 - DNA, 15 bp, Homo sapiens
gactcacatatactt

SEQ ID NO: 410837 - DNA, 15 bp, Homo sapiens
agactcacatatact

SEQ ID NO: 410838 - DNA, 15 bp, Homo sapiens
tagactcacatatac

SEQ ID NO: 410839 - DNA, 15 bp, Homo sapiens
ctagactcacatata

SEQ ID NO: 410840 - DNA, 15 bp, Homo sapiens
tctagactcacatat

SEQ ID NO: 410841 - DNA, 15 bp, Homo sapiens
ctctagactcacata

SEQ ID NO: 410842 - DNA, 15 bp, Homo sapiens
actctagactcacat

SEQ ID NO: 410843 - DNA, 15 bp, Homo sapiens
aactctagactcaca

SEQ ID NO: 410844 - DNA, 15 bp, Homo sapiens
aaactctagactcac

SEQ ID NO: 410845 - DNA, 15 bp, Homo sapiens
taaactctagactca

SEQ ID NO: 410846 - DNA, 15 bp, Homo sapiens
ctaaactctagactc

SEQ ID NO: 410847 - DNA, 15 bp, Homo sapiens
cctaaactctagact

SEQ ID NO: 410848 - DNA, 15 bp, Homo sapiens
tcctaaactctagac

SEQ ID NO: 410849 - DNA, 15 bp, Homo sapiens
ctcctaaactctaga

SEQ ID NO: 410850 - DNA, 15 bp, Homo sapiens
tctcctaaactctag

SEQ ID NO: 410851 - DNA, 15 bp, Homo sapiens
gtctcctaaactcta

SEQ ID NO: 410852 - DNA, 15 bp, Homo sapiens
tgtctcctaaactct

SEQ ID NO: 410853 - DNA, 15 bp, Homo sapiens
ttgtctcctaaactc

SEQ ID NO: 410854 - DNA, 15 bp, Homo sapiens
tttgtctcctaaact

SEQ ID NO: 410855 - DNA, 15 bp, Homo sapiens
atttgtctcctaaac

SEQ ID NO: 410856 - DNA, 15 bp, Homo sapiens
gatttgtctcctaaa

SEQ ID NO: 410857 - DNA, 15 bp, Homo sapiens
ggatttgtctcctaa

SEQ ID NO: 410858 - DNA, 15 bp, Homo sapiens
tggatttgtctccta

SEQ ID NO: 410859 - DNA, 15 bp, Homo sapiens
ctggatttgtctcct

SEQ ID NO: 410860 - DNA, 15 bp, Homo sapiens
tctggatttgtctcc

SEQ ID NO: 410861 - DNA, 15 bp, Homo sapiens
ctctggatttgtctc

SEQ ID NO: 410862 - DNA, 15 bp, Homo sapiens
tctctggatttgtct

SEQ ID NO: 410863 - DNA, 15 bp, Homo sapiens
atctctggatttgtc

SEQ ID NO: 410864 - DNA, 15 bp, Homo sapiens
tatctctggatttgt

SEQ ID NO: 410865 - DNA, 15 bp, Homo sapiens
atatctctggatttg

SEQ ID NO: 410866 - DNA, 15 bp, Homo sapiens
tatatctctggattt

SEQ ID NO: 410867 - DNA, 15 bp, Homo sapiens
ttatatctctggatt

SEQ ID NO: 410868 - DNA, 15 bp, Homo sapiens
tttatatctctggat

SEQ ID NO: 410869 - DNA, 15 bp, Homo sapiens
atttatatctctgga

SEQ ID NO: 410870 - DNA, 15 bp, Homo sapiens
aatttatatctctgg

SEQ ID NO: 410871 - DNA, 15 bp, Homo sapiens
aaatttatatctctg

SEQ ID NO: 410872 - DNA, 15 bp, Homo sapiens
caaatttatatctct

SEQ ID NO: 410873 - DNA, 15 bp, Homo sapiens
ccaaatttatatctc

SEQ ID NO: 410874 - DNA, 15 bp, Homo sapiens
cccaaatttatatct

SEQ ID NO: 410875 - DNA, 15 bp, Homo sapiens
tcccaaatttatatc

SEQ ID NO: 410876 - DNA, 15 bp, Homo sapiens
ctcccaaatttatat

SEQ ID NO: 410877 - DNA, 15 bp, Homo sapiens
actcccaaatttata

SEQ ID NO: 410878 - DNA, 15 bp, Homo sapiens
gactcccaaatttat

SEQ ID NO: 410879 - DNA, 15 bp, Homo sapiens
agactcccaaattta

SEQ ID NO: 410880 - DNA, 15 bp, Homo sapiens
aagactcccaaattt

SEQ ID NO: 410881 - DNA, 15 bp, Homo sapiens
caagactcccaaatt

SEQ ID NO: 410882 - DNA, 15 bp, Homo sapiens
ccaagactcccaaat

SEQ ID NO: 410883 - DNA, 15 bp, Homo sapiens
tccaagactcccaaa

SEQ ID NO: 410884 - DNA, 15 bp, Homo sapiens
ttccaagactcccaa

SEQ ID NO: 410885 - DNA, 15 bp, Homo sapiens
cttccaagactccca

SEQ ID NO: 410886 - DNA, 15 bp, Homo sapiens
acttccaagactccc

SEQ ID NO: 410887 - DNA, 15 bp, Homo sapiens
gacttccaagactcc

SEQ ID NO: 410888 - DNA, 15 bp, Homo sapiens
tgacttccaagactc

SEQ ID NO: 410889 - DNA, 15 bp, Homo sapiens
gtgacttccaagact

SEQ ID NO: 410890 - DNA, 15 bp, Homo sapiens
agtgacttccaagac

SEQ ID NO: 410891 - DNA, 15 bp, Homo sapiens
aagtgacttccaaga

SEQ ID NO: 410892 - DNA, 15 bp, Homo sapiens
taagtgacttccaag

SEQ ID NO: 410893 - DNA, 15 bp, Homo sapiens
ctaagtgacttccaa

SEQ ID NO: 410894 - DNA, 15 bp, Homo sapiens
gctaagtgacttcca

SEQ ID NO: 410895 - DNA, 15 bp, Homo sapiens
cgctaagtgacttcc

SEQ ID NO: 410896 - DNA, 15 bp, Homo sapiens
tcgctaagtgacttc

SEQ ID NO: 410897 - DNA, 15 bp, Homo sapiens
atcgctaagtgactt

SEQ ID NO: 410898 - DNA, 15 bp, Homo sapiens
tatcgctaagtgact

SEQ ID NO: 410899 - DNA, 15 bp, Homo sapiens
ctatcgctaagtgac

SEQ ID NO: 410900 - DNA, 15 bp, Homo sapiens
tctatcgctaagtga

SEQ ID NO: 410901 - DNA, 15 bp, Homo sapiens
atctatcgctaagtg

SEQ ID NO: 410902 - DNA, 15 bp, Homo sapiens
catctatcgctaagt

SEQ ID NO: 410903 - DNA, 15 bp, Homo sapiens
tcatctatcgctaag

SEQ ID NO: 410904 - DNA, 15 bp, Homo sapiens
atcatctatcgctaa

SEQ ID NO: 410905 - DNA, 15 bp, Homo sapiens
tatcatctatcgcta

SEQ ID NO: 410906 - DNA, 15 bp, Homo sapiens
ttatcatctatcgct

SEQ ID NO: 410907 - DNA, 15 bp, Homo sapiens
attatcatctatcgc

SEQ ID NO: 410908 - DNA, 15 bp, Homo sapiens
aattatcatctatcg

SEQ ID NO: 410909 - DNA, 15 bp, Homo sapiens
taattatcatctatc

SEQ ID NO: 410910 - DNA, 15 bp, Homo sapiens
ttaattatcatctat

SEQ ID NO: 410911 - DNA, 15 bp, Homo sapiens
tttaattatcatcta

SEQ ID NO: 410912 - DNA, 15 bp, Homo sapiens
ctttaattatcatct

SEQ ID NO: 410913 - DNA, 15 bp, Homo sapiens
cctttaattatcatc

SEQ ID NO: 410914 - DNA, 15 bp, Homo sapiens
gcctttaattatcat

SEQ ID NO: 410915 - DNA, 15 bp, Homo sapiens
tgcctttaattatca

SEQ ID NO: 410916 - DNA, 15 bp, Homo sapiens
atgcctttaattatc

SEQ ID NO: 410917 - DNA, 15 bp, Homo sapiens
catgcctttaattat

SEQ ID NO: 410918 - DNA, 15 bp, Homo sapiens
ccatgcctttaatta

SEQ ID NO: 410919 - DNA, 15 bp, Homo sapiens
tccatgcctttaatt

SEQ ID NO: 410920 - DNA, 15 bp, Homo sapiens
ttccatgcctttaat

SEQ ID NO: 410921 - DNA, 15 bp, Homo sapiens
gttccatgcctttaa

SEQ ID NO: 410922 - DNA, 15 bp, Homo sapiens
agttccatgccttta

SEQ ID NO: 410923 - DNA, 15 bp, Homo sapiens
tagttccatgccttt

SEQ ID NO: 410924 - DNA, 15 bp, Homo sapiens
ctagttccatgcctt

SEQ ID NO: 410925 - DNA, 15 bp, Homo sapiens
tctagttccatgcct

SEQ ID NO: 410926 - DNA, 15 bp, Homo sapiens
atctagttccatgcc

SEQ ID NO: 410927 - DNA, 15 bp, Homo sapiens
catctagttccatgc

SEQ ID NO: 410928 - DNA, 15 bp, Homo sapiens
tcatctagttccatg

SEQ ID NO: 410929 - DNA, 15 bp, Homo sapiens
ctcatctagttccat

SEQ ID NO: 410930 - DNA, 15 bp, Homo sapiens
cctcatctagttcca

SEQ ID NO: 410931 - DNA, 15 bp, Homo sapiens
acctcatctagttcc

SEQ ID NO: 410932 - DNA, 15 bp, Homo sapiens
gacctcatctagttc

SEQ ID NO: 410933 - DNA, 15 bp, Homo sapiens
tgacctcatctagtt

SEQ ID NO: 410934 - DNA, 15 bp, Homo sapiens
atgacctcatctagt

SEQ ID NO: 410935 - DNA, 15 bp, Homo sapiens
gatgacctcatctag

SEQ ID NO: 410936 - DNA, 15 bp, Homo sapiens
agatgacctcatcta

SEQ ID NO: 410937 - DNA, 15 bp, Homo sapiens
tagatgacctcatct

SEQ ID NO: 410938 - DNA, 15 bp, Homo sapiens
ctagatgacctcatc

SEQ ID NO: 410939 - DNA, 15 bp, Homo sapiens
cctagatgacctcat

SEQ ID NO: 410940 - DNA, 15 bp, Homo sapiens
tcctagatgacctca

SEQ ID NO: 410941 - DNA, 15 bp, Homo sapiens
ttcctagatgacctc

SEQ ID NO: 410942 - DNA, 15 bp, Homo sapiens
cttcctagatgacct

SEQ ID NO: 410943 - DNA, 15 bp, Homo sapiens
ccttcctagatgacc

SEQ ID NO: 410944 - DNA, 15 bp, Homo sapiens
tccttcctagatgac

SEQ ID NO: 410945 - DNA, 15 bp, Homo sapiens
ttccttcctagatga

SEQ ID NO: 410946 - DNA, 15 bp, Homo sapiens
cttccttcctagatg

SEQ ID NO: 410947 - DNA, 15 bp, Homo sapiens
ccttccttcctagat

SEQ ID NO: 410948 - DNA, 15 bp, Homo sapiens
tccttccttcctaga

SEQ ID NO: 410949 - DNA, 15 bp, Homo sapiens
atccttccttcctag

SEQ ID NO: 410950 - DNA, 15 bp, Homo sapiens
catccttccttccta

SEQ ID NO: 410951 - DNA, 15 bp, Homo sapiens
acatccttccttcct

SEQ ID NO: 410952 - DNA, 15 bp, Homo sapiens
tacatccttccttcc

SEQ ID NO: 410953 - DNA, 15 bp, Homo sapiens
atacatccttccttc

SEQ ID NO: 410954 - DNA, 15 bp, Homo sapiens
tatacatccttcctt

SEQ ID NO: 410955 - DNA, 15 bp, Homo sapiens
ctatacatccttcct

SEQ ID NO: 410956 - DNA, 15 bp, Homo sapiens
tctatacatccttcc

SEQ ID NO: 410957 - DNA, 15 bp, Homo sapiens
atctatacatccttc

SEQ ID NO: 410958 - DNA, 15 bp, Homo sapiens
aatctatacatcctt

SEQ ID NO: 410959 - DNA, 15 bp, Homo sapiens
aaatctatacatcct

SEQ ID NO: 410960 - DNA, 15 bp, Homo sapiens
caaatctatacatcc

SEQ ID NO: 410961 - DNA, 15 bp, Homo sapiens
acaaatctatacatc

SEQ ID NO: 410962 - DNA, 15 bp, Homo sapiens
cacaaatctatacat

SEQ ID NO: 410963 - DNA, 15 bp, Homo sapiens
ccacaaatctataca

SEQ ID NO: 410964 - DNA, 15 bp, Homo sapiens
accacaaatctatac

SEQ ID NO: 410965 - DNA, 15 bp, Homo sapiens
caccacaaatctata

SEQ ID NO: 410966 - DNA, 15 bp, Homo sapiens
ccaccacaaatctat

SEQ ID NO: 410967 - DNA, 15 bp, Homo sapiens
tccaccacaaatcta

SEQ ID NO: 410968 - DNA, 15 bp, Homo sapiens
ttccaccacaaatct

SEQ ID NO: 410969 - DNA, 15 bp, Homo sapiens
tttccaccacaaatc

SEQ ID NO: 410970 - DNA, 15 bp, Homo sapiens
ttttccaccacaaat

SEQ ID NO: 410971 - DNA, 15 bp, Homo sapiens
cttttccaccacaaa

SEQ ID NO: 410972 - DNA, 15 bp, Homo sapiens
ccttttccaccacaa

SEQ ID NO: 410973 - DNA, 15 bp, Homo sapiens
gccttttccaccaca

SEQ ID NO: 410974 - DNA, 15 bp, Homo sapiens
tgccttttccaccac

SEQ ID NO: 410975 - DNA, 15 bp, Homo sapiens
ttgccttttccacca

SEQ ID NO: 410976 - DNA, 15 bp, Homo sapiens
cttgccttttccacc

SEQ ID NO: 410977 - DNA, 15 bp, Homo sapiens
gcttgccttttccac

SEQ ID NO: 410978 - DNA, 15 bp, Homo sapiens
agcttgccttttcca

SEQ ID NO: 410979 - DNA, 15 bp, Homo sapiens
tagcttgccttttcc

SEQ ID NO: 410980 - DNA, 15 bp, Homo sapiens
atagcttgccttttc

SEQ ID NO: 410981 - DNA, 15 bp, Homo sapiens
gatagcttgcctttt

SEQ ID NO: 410982 - DNA, 15 bp, Homo sapiens
tgatagcttgccttt

SEQ ID NO: 410983 - DNA, 15 bp, Homo sapiens
ctgatagcttgcctt

SEQ ID NO: 410984 - DNA, 15 bp, Homo sapiens
actgatagcttgcct

SEQ ID NO: 410985 - DNA, 15 bp, Homo sapiens
aactgatagcttgcc

SEQ ID NO: 410986 - DNA, 15 bp, Homo sapiens
taactgatagcttgc

SEQ ID NO: 410987 - DNA, 15 bp, Homo sapiens
ttaactgatagcttg

SEQ ID NO: 410988 - DNA, 15 bp, Homo sapiens
gttaactgatagctt

SEQ ID NO: 410989 - DNA, 15 bp, Homo sapiens
tgttaactgatagct

SEQ ID NO: 410990 - DNA, 15 bp, Homo sapiens
ttgttaactgatagc

SEQ ID NO: 410991 - DNA, 15 bp, Homo sapiens
tttgttaactgatag

SEQ ID NO: 410992 - DNA, 15 bp, Homo sapiens
gtttgttaactgata

SEQ ID NO: 410993 - DNA, 15 bp, Homo sapiens
agtttgttaactgat

SEQ ID NO: 410994 - DNA, 15 bp, Homo sapiens
cagtttgttaactga

SEQ ID NO: 410995 - DNA, 15 bp, Homo sapiens
tcagtttgttaactg

SEQ ID NO: 410996 - DNA, 15 bp, Homo sapiens
ttcagtttgttaact

SEQ ID NO: 410997 - DNA, 15 bp, Homo sapiens
tttcagtttgttaac

SEQ ID NO: 410998 - DNA, 15 bp, Homo sapiens
ttttcagtttgttaa

SEQ ID NO: 410999 - DNA, 15 bp, Homo sapiens
gttttcagtttgtta

SEQ ID NO: 411000 - DNA, 15 bp, Homo sapiens
agttttcagtttgtt

SEQ ID NO: 411001 - DNA, 15 bp, Homo sapiens
cagttttcagtttgt

SEQ ID NO: 411002 - DNA, 15 bp, Homo sapiens
acagttttcagtttg

SEQ ID NO: 411003 - DNA, 15 bp, Homo sapiens
cacagttttcagttt

SEQ ID NO: 411004 - DNA, 15 bp, Homo sapiens
ccacagttttcagtt

SEQ ID NO: 411005 - DNA, 15 bp, Homo sapiens
cccacagttttcagt

SEQ ID NO: 411006 - DNA, 15 bp, Homo sapiens
tcccacagttttcag

SEQ ID NO: 411007 - DNA, 15 bp, Homo sapiens
ctcccacagttttca

SEQ ID NO: 411008 - DNA, 15 bp, Homo sapiens
cctcccacagttttc

SEQ ID NO: 411009 - DNA, 15 bp, Homo sapiens
acctcccacagtttt

SEQ ID NO: 411010 - DNA, 15 bp, Homo sapiens
aacctcccacagttt

SEQ ID NO: 411011 - DNA, 15 bp, Homo sapiens
aaacctcccacagtt

SEQ ID NO: 411012 - DNA, 15 bp, Homo sapiens
caaacctcccacagt

SEQ ID NO: 411013 - DNA, 15 bp, Homo sapiens
tcaaacctcccacag

SEQ ID NO: 411014 - DNA, 15 bp, Homo sapiens
gtcaaacctcccaca

SEQ ID NO: 411015 - DNA, 15 bp, Homo sapiens
tgtcaaacctcccac

SEQ ID NO: 411016 - DNA, 15 bp, Homo sapiens
ttgtcaaacctccca

SEQ ID NO: 411017 - DNA, 15 bp, Homo sapiens
cttgtcaaacctccc

SEQ ID NO: 411018 - DNA, 15 bp, Homo sapiens
tcttgtcaaacctcc

SEQ ID NO: 411019 - DNA, 15 bp, Homo sapiens
ttcttgtcaaacctc

SEQ ID NO: 411020 - DNA, 15 bp, Homo sapiens
tttcttgtcaaacct

SEQ ID NO: 411021 - DNA, 15 bp, Homo sapiens
ctttcttgtcaaacc

SEQ ID NO: 411022 - DNA, 15 bp, Homo sapiens
cctttcttgtcaaac

SEQ ID NO: 411023 - DNA, 15 bp, Homo sapiens
acctttcttgtcaaa

SEQ ID NO: 411024 - DNA, 15 bp, Homo sapiens
cacctttcttgtcaa

SEQ ID NO: 411025 - DNA, 15 bp, Homo sapiens
tcacctttcttgtca

SEQ ID NO: 411026 - DNA, 15 bp, Homo sapiens
ttcacctttcttgtc

SEQ ID NO: 411027 - DNA, 15 bp, Homo sapiens
cttcacctttcttgt

SEQ ID NO: 411028 - DNA, 15 bp, Homo sapiens
tcttcacctttcttg

SEQ ID NO: 411029 - DNA, 15 bp, Homo sapiens
atcttcacctttctt

SEQ ID NO: 411030 - DNA, 15 bp, Homo sapiens
tatcttcacctttct

SEQ ID NO: 411031 - DNA, 15 bp, Homo sapiens
atatcttcacctttc

SEQ ID NO: 411032 - DNA, 15 bp, Homo sapiens
catatcttcaccttt

SEQ ID NO: 411033 - DNA, 15 bp, Homo sapiens
tcatatcttcacctt

SEQ ID NO: 411034 - DNA, 15 bp, Homo sapiens
ttcatatcttcacct

SEQ ID NO: 411035 - DNA, 15 bp, Homo sapiens
attcatatcttcacc

SEQ ID NO: 411036 - DNA, 15 bp, Homo sapiens
aattcatatcttcac

SEQ ID NO: 411037 - DNA, 15 bp, Homo sapiens
taattcatatcttca

SEQ ID NO: 411038 - DNA, 15 bp, Homo sapiens
ttaattcatatcttc

SEQ ID NO: 411039 - DNA, 15 bp, Homo sapiens
attaattcatatctt

SEQ ID NO: 411040 - DNA, 15 bp, Homo sapiens
aattaattcatatct

SEQ ID NO: 411041 - DNA, 15 bp, Homo sapiens
caattaattcatatc

SEQ ID NO: 411042 - DNA, 15 bp, Homo sapiens
acaattaattcatat

SEQ ID NO: 411043 - DNA, 15 bp, Homo sapiens
aacaattaattcata

SEQ ID NO: 411044 - DNA, 15 bp, Homo sapiens
aaacaattaattcat

SEQ ID NO: 411045 - DNA, 15 bp, Homo sapiens
gaaacaattaattca

SEQ ID NO: 411046 - DNA, 15 bp, Homo sapiens
tgaaacaattaattc

SEQ ID NO: 411047 - DNA, 15 bp, Homo sapiens
ttgaaacaattaatt

SEQ ID NO: 411048 - DNA, 15 bp, Homo sapiens
tttgaaacaattaat

SEQ ID NO: 411049 - DNA, 15 bp, Homo sapiens
ctttgaaacaattaa

SEQ ID NO: 411050 - DNA, 15 bp, Homo sapiens
tctttgaaacaatta

SEQ ID NO: 411051 - DNA, 15 bp, Homo sapiens
ctctttgaaacaatt

SEQ ID NO: 411052 - DNA, 15 bp, Homo sapiens
tctctttgaaacaat

SEQ ID NO: 411053 - DNA, 15 bp, Homo sapiens
ctctctttgaaacaa

SEQ ID NO: 411054 - DNA, 15 bp, Homo sapiens
tctctctttgaaaca

SEQ ID NO: 411055 - DNA, 15 bp, Homo sapiens
ttctctctttgaaac

SEQ ID NO: 411056 - DNA, 15 bp, Homo sapiens
tttctctctttgaaa

SEQ ID NO: 411057 - DNA, 15 bp, Homo sapiens
atttctctctttgaa

SEQ ID NO: 411058 - DNA, 15 bp, Homo sapiens
gatttctctctttga

SEQ ID NO: 411059 - DNA, 15 bp, Homo sapiens
tgatttctctctttg

SEQ ID NO: 411060 - DNA, 15 bp, Homo sapiens
ttgatttctctcttt

SEQ ID NO: 411061 - DNA, 15 bp, Homo sapiens
tttgatttctctctt

SEQ ID NO: 411062 - DNA, 15 bp, Homo sapiens
gtttgatttctctct

SEQ ID NO: 411063 - DNA, 15 bp, Homo sapiens
agtttgatttctctc

SEQ ID NO: 411064 - DNA, 15 bp, Homo sapiens
gagtttgatttctct

SEQ ID NO: 411065 - DNA, 15 bp, Homo sapiens
tgagtttgatttctc

SEQ ID NO: 411066 - DNA, 15 bp, Homo sapiens
atgagtttgatttct

SEQ ID NO: 411067 - DNA, 15 bp, Homo sapiens
aatgagtttgatttc

SEQ ID NO: 411068 - DNA, 15 bp, Homo sapiens
taatgagtttgattt

SEQ ID NO: 411069 - DNA, 15 bp, Homo sapiens
ctaatgagtttgatt

SEQ ID NO: 411070 - DNA, 15 bp, Homo sapiens
cctaatgagtttgat

SEQ ID NO: 411071 - DNA, 15 bp, Homo sapiens
ccctaatgagtttga

SEQ ID NO: 411072 - DNA, 15 bp, Homo sapiens
tccctaatgagtttg

SEQ ID NO: 411073 - DNA, 15 bp, Homo sapiens
ttccctaatgagttt

SEQ ID NO: 411074 - DNA, 15 bp, Homo sapiens
gttccctaatgagtt

SEQ ID NO: 411075 - DNA, 15 bp, Homo sapiens
agttccctaatgagt

SEQ ID NO: 411076 - DNA, 15 bp, Homo sapiens
cagttccctaatgag

SEQ ID NO: 411077 - DNA, 15 bp, Homo sapiens
acagttccctaatga

SEQ ID NO: 411078 - DNA, 15 bp, Homo sapiens
tacagttccctaatg

SEQ ID NO: 411079 - DNA, 15 bp, Homo sapiens
ctacagttccctaat

SEQ ID NO: 411080 - DNA, 15 bp, Homo sapiens
cctacagttccctaa

SEQ ID NO: 411081 - DNA, 15 bp, Homo sapiens
acctacagttcccta

SEQ ID NO: 411082 - DNA, 15 bp, Homo sapiens
cacctacagttccct

SEQ ID NO: 411083 - DNA, 15 bp, Homo sapiens
tcacctacagttccc

SEQ ID NO: 411084 - DNA, 15 bp, Homo sapiens
atcacctacagttcc

SEQ ID NO: 411085 - DNA, 15 bp, Homo sapiens
catcacctacagttc

SEQ ID NO: 411086 - DNA, 15 bp, Homo sapiens
ccatcacctacagtt

SEQ ID NO: 411087 - DNA, 15 bp, Homo sapiens
accatcacctacagt

SEQ ID NO: 411088 - DNA, 15 bp, Homo sapiens
aaccatcacctacag

SEQ ID NO: 411089 - DNA, 15 bp, Homo sapiens
caaccatcacctaca

SEQ ID NO: 411090 - DNA, 15 bp, Homo sapiens
tcaaccatcacctac

SEQ ID NO: 411091 - DNA, 15 bp, Homo sapiens
ctcaaccatcaccta

SEQ ID NO: 411092 - DNA, 15 bp, Homo sapiens
actcaaccatcacct

SEQ ID NO: 411093 - DNA, 15 bp, Homo sapiens
tactcaaccatcacc

SEQ ID NO: 411094 - DNA, 15 bp, Homo sapiens
atactcaaccatcac

SEQ ID NO: 411095 - DNA, 15 bp, Homo sapiens
gatactcaaccatca

SEQ ID NO: 411096 - DNA, 15 bp, Homo sapiens
tgatactcaaccatc

SEQ ID NO: 411097 - DNA, 15 bp, Homo sapiens
atgatactcaaccat

SEQ ID NO: 411098 - DNA, 15 bp, Homo sapiens
aatgatactcaacca

SEQ ID NO: 411099 - DNA, 15 bp, Homo sapiens
aaatgatactcaacc

SEQ ID NO: 411100 - DNA, 15 bp, Homo sapiens
caaatgatactcaac

SEQ ID NO: 411101 - DNA, 15 bp, Homo sapiens
tcaaatgatactcaa

SEQ ID NO: 411102 - DNA, 15 bp, Homo sapiens
ttcaaatgatactca

SEQ ID NO: 411103 - DNA, 15 bp, Homo sapiens
tttcaaatgatactc

SEQ ID NO: 411104 - DNA, 15 bp, Homo sapiens
atttcaaatgatact

SEQ ID NO: 411105 - DNA, 15 bp, Homo sapiens
catttcaaatgatac

SEQ ID NO: 411106 - DNA, 15 bp, Homo sapiens
acatttcaaatgata

SEQ ID NO: 411107 - DNA, 15 bp, Homo sapiens
tacatttcaaatgat

SEQ ID NO: 411108 - DNA, 15 bp, Homo sapiens
atacatttcaaatga

SEQ ID NO: 411109 - DNA, 15 bp, Homo sapiens
tatacatttcaaatg

SEQ ID NO: 411110 - DNA, 15 bp, Homo sapiens
ctatacatttcaaat

SEQ ID NO: 411111 - DNA, 15 bp, Homo sapiens
actatacatttcaaa

SEQ ID NO: 411112 - DNA, 15 bp, Homo sapiens
gactatacatttcaa

SEQ ID NO: 411113 - DNA, 15 bp, Homo sapiens
tgactatacatttca

SEQ ID NO: 411114 - DNA, 15 bp, Homo sapiens
atgactatacatttc

SEQ ID NO: 411115 - DNA, 15 bp, Homo sapiens
aatgactatacattt

SEQ ID NO: 411116 - DNA, 15 bp, Homo sapiens
gaatgactatacatt

SEQ ID NO: 411117 - DNA, 15 bp, Homo sapiens
agaatgactatacat

SEQ ID NO: 411118 - DNA, 15 bp, Homo sapiens
aagaatgactataca

SEQ ID NO: 411119 - DNA, 15 bp, Homo sapiens
aaagaatgactatac

SEQ ID NO: 411120 - DNA, 15 bp, Homo sapiens
taaagaatgactata

SEQ ID NO: 411121 - DNA, 15 bp, Homo sapiens
ttaaagaatgactat

SEQ ID NO: 411122 - DNA, 15 bp, Homo sapiens
attaaagaatgacta

SEQ ID NO: 411123 - DNA, 15 bp, Homo sapiens
tattaaagaatgact

SEQ ID NO: 411124 - DNA, 15 bp, Homo sapiens
atattaaagaatgac

SEQ ID NO: 411125 - DNA, 15 bp, Homo sapiens
catattaaagaatga

SEQ ID NO: 411126 - DNA, 15 bp, Homo sapiens
tcatattaaagaatg

SEQ ID NO: 411127 - DNA, 15 bp, Homo sapiens
ttcatattaaagaat

SEQ ID NO: 411128 - DNA, 15 bp, Homo sapiens
cttcatattaaagaa

SEQ ID NO: 411129 - DNA, 15 bp, Homo sapiens
gcttcatattaaaga

SEQ ID NO: 411130 - DNA, 15 bp, Homo sapiens
ggcttcatattaaag

SEQ ID NO: 411131 - DNA, 15 bp, Homo sapiens
tggcttcatattaaa

SEQ ID NO: 411132 - DNA, 15 bp, Homo sapiens
ctggcttcatattaa

SEQ ID NO: 411133 - DNA, 15 bp, Homo sapiens
actggcttcatatta

SEQ ID NO: 411134 - DNA, 15 bp, Homo sapiens
tactggcttcatatt

SEQ ID NO: 411135 - DNA, 15 bp, Homo sapiens
ttactggcttcatat

SEQ ID NO: 411136 - DNA, 15 bp, Homo sapiens
cttactggcttcata

SEQ ID NO: 411137 - DNA, 15 bp, Homo sapiens
acttactggcttcat

SEQ ID NO: 411138 - DNA, 15 bp, Homo sapiens
gacttactggcttca

SEQ ID NO: 411139 - DNA, 15 bp, Homo sapiens
tgacttactggcttc

SEQ ID NO: 411140 - DNA, 15 bp, Homo sapiens
ctgacttactggctt

SEQ ID NO: 411141 - DNA, 15 bp, Homo sapiens
cctgacttactggct

SEQ ID NO: 411142 - DNA, 15 bp, Homo sapiens
gcctgacttactggc

SEQ ID NO: 411143 - DNA, 15 bp, Homo sapiens
agcctgacttactgg

SEQ ID NO: 411144 - DNA, 15 bp, Homo sapiens
aagcctgacttactg

SEQ ID NO: 411145 - DNA, 15 bp, Homo sapiens
aaagcctgacttact

SEQ ID NO: 411146 - DNA, 15 bp, Homo sapiens
caaagcctgacttac

SEQ ID NO: 411147 - DNA, 15 bp, Homo sapiens
acaaagcctgactta

SEQ ID NO: 411148 - DNA, 15 bp, Homo sapiens
cacaaagcctgactt

SEQ ID NO: 411149 - DNA, 15 bp, Homo sapiens
tcacaaagcctgact

SEQ ID NO: 411150 - DNA, 15 bp, Homo sapiens
atcacaaagcctgac

SEQ ID NO: 411151 - DNA, 15 bp, Homo sapiens
aatcacaaagcctga

SEQ ID NO: 411152 - DNA, 15 bp, Homo sapiens
aaatcacaaagcctg

SEQ ID NO: 411153 - DNA, 15 bp, Homo sapiens
aaaatcacaaagcct

SEQ ID NO: 411154 - DNA, 15 bp, Homo sapiens
gaaaatcacaaagcc

SEQ ID NO: 411155 - DNA, 15 bp, Homo sapiens
agaaaatcacaaagc

SEQ ID NO: 411156 - DNA, 15 bp, Homo sapiens
aagaaaatcacaaag

SEQ ID NO: 411157 - DNA, 15 bp, Homo sapiens
gaagaaaatcacaaa

SEQ ID NO: 411158 - DNA, 15 bp, Homo sapiens
tgaagaaaatcacaa

SEQ ID NO: 411159 - DNA, 15 bp, Homo sapiens
ctgaagaaaatcaca

SEQ ID NO: 411160 - DNA, 15 bp, Homo sapiens
actgaagaaaatcac

SEQ ID NO: 411161 - DNA, 15 bp, Homo sapiens
tactgaagaaaatca

SEQ ID NO: 411162 - DNA, 15 bp, Homo sapiens
ttactgaagaaaatc

SEQ ID NO: 411163 - DNA, 15 bp, Homo sapiens
tttactgaagaaaat

SEQ ID NO: 411164 - DNA, 15 bp, Homo sapiens
ctttactgaagaaaa

SEQ ID NO: 411165 - DNA, 15 bp, Homo sapiens
cctttactgaagaaa

SEQ ID NO: 411166 - DNA, 15 bp, Homo sapiens
acctttactgaagaa

SEQ ID NO: 411167 - DNA, 15 bp, Homo sapiens
aacctttactgaaga

SEQ ID NO: 411168 - DNA, 15 bp, Homo sapiens
caacctttactgaag

SEQ ID NO: 411169 - DNA, 15 bp, Homo sapiens
ccaacctttactgaa

SEQ ID NO: 411170 - DNA, 15 bp, Homo sapiens
gccaacctttactga

SEQ ID NO: 411171 - DNA, 15 bp, Homo sapiens
agccaacctttactg

SEQ ID NO: 411172 - DNA, 15 bp, Homo sapiens
cagccaacctttact

SEQ ID NO: 411173 - DNA, 15 bp, Homo sapiens
gcagccaacctttac

SEQ ID NO: 411174 - DNA, 15 bp, Homo sapiens
agcagccaaccttta

SEQ ID NO: 411175 - DNA, 15 bp, Homo sapiens
cagcagccaaccttt

SEQ ID NO: 411176 - DNA, 15 bp, Homo sapiens
gcagcagccaacctt

SEQ ID NO: 411177 - DNA, 15 bp, Homo sapiens
agcagcagccaacct

SEQ ID NO: 411178 - DNA, 15 bp, Homo sapiens
cagcagcagccaacc

SEQ ID NO: 411179 - DNA, 15 bp, Homo sapiens
acagcagcagccaac

SEQ ID NO: 411180 - DNA, 15 bp, Homo sapiens
tacagcagcagccaa

SEQ ID NO: 411181 - DNA, 15 bp, Homo sapiens
gtacagcagcagcca

SEQ ID NO: 411182 - DNA, 15 bp, Homo sapiens
tgtacagcagcagcc

SEQ ID NO: 411183 - DNA, 15 bp, Homo sapiens
ctgtacagcagcagc

SEQ ID NO: 411184 - DNA, 15 bp, Homo sapiens
cctgtacagcagcag

SEQ ID NO: 411185 - DNA, 15 bp, Homo sapiens
tcctgtacagcagca

SEQ ID NO: 411186 - DNA, 15 bp, Homo sapiens
ctcctgtacagcagc

SEQ ID NO: 411187 - DNA, 15 bp, Homo sapiens
gctcctgtacagcag

SEQ ID NO: 411188 - DNA, 15 bp, Homo sapiens
tgctcctgtacagca

SEQ ID NO: 411189 - DNA, 15 bp, Homo sapiens
ctgctcctgtacagc

SEQ ID NO: 411190 - DNA, 15 bp, Homo sapiens
tctgctcctgtacag

SEQ ID NO: 411191 - DNA, 15 bp, Homo sapiens
ttctgctcctgtaca

SEQ ID NO: 411192 - DNA, 15 bp, Homo sapiens
tttctgctcctgtac

SEQ ID NO: 411193 - DNA, 15 bp, Homo sapiens
ttttctgctcctgta

SEQ ID NO: 411194 - DNA, 15 bp, Homo sapiens
cttttctgctcctgt

SEQ ID NO: 411195 - DNA, 15 bp, Homo sapiens
tcttttctgctcctg

SEQ ID NO: 411196 - DNA, 15 bp, Homo sapiens
atcttttctgctcct

SEQ ID NO: 411197 - DNA, 15 bp, Homo sapiens
tatcttttctgctcc

SEQ ID NO: 411198 - DNA, 15 bp, Homo sapiens
ctatcttttctgctc

SEQ ID NO: 411199 - DNA, 15 bp, Homo sapiens
gctatcttttctgct

SEQ ID NO: 411200 - DNA, 15 bp, Homo sapiens
agctatcttttctgc

SEQ ID NO: 411201 - DNA, 15 bp, Homo sapiens
tagctatcttttctg

SEQ ID NO: 411202 - DNA, 15 bp, Homo sapiens
atagctatcttttct

SEQ ID NO: 411203 - DNA, 15 bp, Homo sapiens
aatagctatcttttc

SEQ ID NO: 411204 - DNA, 15 bp, Homo sapiens
aaatagctatctttt

SEQ ID NO: 411205 - DNA, 15 bp, Homo sapiens
aaaatagctatcttt

SEQ ID NO: 411206 - DNA, 15 bp, Homo sapiens
gaaaatagctatctt

SEQ ID NO: 411207 - DNA, 15 bp, Homo sapiens
tgaaaatagctatct

SEQ ID NO: 411208 - DNA, 15 bp, Homo sapiens
gtgaaaatagctatc

SEQ ID NO: 411209 - DNA, 15 bp, Homo sapiens
ggtgaaaatagctat

SEQ ID NO: 411210 - DNA, 15 bp, Homo sapiens
tggtgaaaatagcta

SEQ ID NO: 411211 - DNA, 15 bp, Homo sapiens
ttggtgaaaatagct

SEQ ID NO: 411212 - DNA, 15 bp, Homo sapiens
tttggtgaaaatagc

SEQ ID NO: 411213 - DNA, 15 bp, Homo sapiens
ctttggtgaaaatag

SEQ ID NO: 411214 - DNA, 15 bp, Homo sapiens
tctttggtgaaaata

SEQ ID NO: 411215 - DNA, 15 bp, Homo sapiens
atctttggtgaaaat

SEQ ID NO: 411216 - DNA, 15 bp, Homo sapiens
aatctttggtgaaaa

SEQ ID NO: 411217 - DNA, 15 bp, Homo sapiens
caatctttggtgaaa

SEQ ID NO: 411218 - DNA, 15 bp, Homo sapiens
ccaatctttggtgaa

SEQ ID NO: 411219 - DNA, 15 bp, Homo sapiens
cccaatctttggtga

SEQ ID NO: 411220 - DNA, 15 bp, Homo sapiens
ccccaatctttggtg

SEQ ID NO: 411221 - DNA, 15 bp, Homo sapiens
accccaatctttggt

SEQ ID NO: 411222 - DNA, 15 bp, Homo sapiens
aaccccaatctttgg

SEQ ID NO: 411223 - DNA, 15 bp, Homo sapiens
gaaccccaatctttg

SEQ ID NO: 411224 - DNA, 15 bp, Homo sapiens
tgaaccccaatcttt

SEQ ID NO: 411225 - DNA, 15 bp, Homo sapiens
ctgaaccccaatctt

SEQ ID NO: 411226 - DNA, 15 bp, Homo sapiens
actgaaccccaatct

SEQ ID NO: 411227 - DNA, 15 bp, Homo sapiens
gactgaaccccaatc

SEQ ID NO: 411228 - DNA, 15 bp, Homo sapiens
tgactgaaccccaat

SEQ ID NO: 411229 - DNA, 15 bp, Homo sapiens
ctgactgaaccccaa

SEQ ID NO: 411230 - DNA, 15 bp, Homo sapiens
tctgactgaacccca

SEQ ID NO: 411231 - DNA, 15 bp, Homo sapiens
atctgactgaacccc

SEQ ID NO: 411232 - DNA, 15 bp, Homo sapiens
tatctgactgaaccc

SEQ ID NO: 411233 - DNA, 15 bp, Homo sapiens
ttatctgactgaacc

SEQ ID NO: 411234 - DNA, 15 bp, Homo sapiens
cttatctgactgaac

SEQ ID NO: 411235 - DNA, 15 bp, Homo sapiens
ccttatctgactgaa

SEQ ID NO: 411236 - DNA, 15 bp, Homo sapiens
tccttatctgactga

SEQ ID NO: 411237 - DNA, 15 bp, Homo sapiens
gtccttatctgactg

SEQ ID NO: 411238 - DNA, 15 bp, Homo sapiens
tgtccttatctgact

SEQ ID NO: 411239 - DNA, 15 bp, Homo sapiens
ttgtccttatctgac

SEQ ID NO: 411240 - DNA, 15 bp, Homo sapiens
attgtccttatctga

SEQ ID NO: 411241 - DNA, 15 bp, Homo sapiens
tattgtccttatctg

SEQ ID NO: 411242 - DNA, 15 bp, Homo sapiens
ttattgtccttatct

SEQ ID NO: 411243 - DNA, 15 bp, Homo sapiens
tttattgtccttatc

SEQ ID NO: 411244 - DNA, 15 bp, Homo sapiens
ctttattgtccttat

SEQ ID NO: 411245 - DNA, 15 bp, Homo sapiens
cctttattgtcctta

SEQ ID NO: 411246 - DNA, 15 bp, Homo sapiens
ccctttattgtcctt

SEQ ID NO: 411247 - DNA, 15 bp, Homo sapiens
tccctttattgtcct

SEQ ID NO: 411248 - DNA, 15 bp, Homo sapiens
ttccctttattgtcc

SEQ ID NO: 411249 - DNA, 15 bp, Homo sapiens
tttccctttattgtc

SEQ ID NO: 411250 - DNA, 15 bp, Homo sapiens
ttttccctttattgt

SEQ ID NO: 411251 - DNA, 15 bp, Homo sapiens
attttccctttattg

SEQ ID NO: 411252 - DNA, 15 bp, Homo sapiens
cattttccctttatt

SEQ ID NO: 411253 - DNA, 15 bp, Homo sapiens
tcattttccctttat

SEQ ID NO: 411254 - DNA, 15 bp, Homo sapiens
ctcattttcccttta

SEQ ID NO: 411255 - DNA, 15 bp, Homo sapiens
cctcattttcccttt

SEQ ID NO: 411256 - DNA, 15 bp, Homo sapiens
gcctcattttccctt

SEQ ID NO: 411257 - DNA, 15 bp, Homo sapiens
tgcctcattttccct

SEQ ID NO: 411258 - DNA, 15 bp, Homo sapiens
ttgcctcattttccc

SEQ ID NO: 411259 - DNA, 15 bp, Homo sapiens
tttgcctcattttcc

SEQ ID NO: 411260 - DNA, 15 bp, Homo sapiens
ctttgcctcattttc

SEQ ID NO: 411261 - DNA, 15 bp, Homo sapiens
cctttgcctcatttt

SEQ ID NO: 411262 - DNA, 15 bp, Homo sapiens
tcctttgcctcattt

SEQ ID NO: 411263 - DNA, 15 bp, Homo sapiens
ctcctttgcctcatt

SEQ ID NO: 411264 - DNA, 15 bp, Homo sapiens
actcctttgcctcat

SEQ ID NO: 411265 - DNA, 15 bp, Homo sapiens
aactcctttgcctca

SEQ ID NO: 411266 - DNA, 15 bp, Homo sapiens
taactcctttgcctc

SEQ ID NO: 411267 - DNA, 15 bp, Homo sapiens
ctaactcctttgcct

SEQ ID NO: 411268 - DNA, 15 bp, Homo sapiens
cctaactcctttgcc

SEQ ID NO: 411269 - DNA, 15 bp, Homo sapiens
ccctaactcctttgc

SEQ ID NO: 411270 - DNA, 15 bp, Homo sapiens
cccctaactcctttg

SEQ ID NO: 411271 - DNA, 15 bp, Homo sapiens
acccctaactccttt

SEQ ID NO: 411272 - DNA, 15 bp, Homo sapiens
cacccctaactcctt

SEQ ID NO: 411273 - DNA, 15 bp, Homo sapiens
tcacccctaactcct

SEQ ID NO: 411274 - DNA, 15 bp, Homo sapiens
gtcacccctaactcc

SEQ ID NO: 411275 - DNA, 15 bp, Homo sapiens
agtcacccctaactc

SEQ ID NO: 411276 - DNA, 15 bp, Homo sapiens
cagtcacccctaact

SEQ ID NO: 411277 - DNA, 15 bp, Homo sapiens
gcagtcacccctaac

SEQ ID NO: 411278 - DNA, 15 bp, Homo sapiens
tgcagtcacccctaa

SEQ ID NO: 411279 - DNA, 15 bp, Homo sapiens
ttgcagtcaccccta

SEQ ID NO: 411280 - DNA, 15 bp, Homo sapiens
cttgcagtcacccct

SEQ ID NO: 411281 - DNA, 15 bp, Homo sapiens
ccttgcagtcacccc

SEQ ID NO: 411282 - DNA, 15 bp, Homo sapiens
cccttgcagtcaccc

SEQ ID NO: 411283 - DNA, 15 bp, Homo sapiens
tcccttgcagtcacc

SEQ ID NO: 411284 - DNA, 15 bp, Homo sapiens
ttcccttgcagtcac

SEQ ID NO: 411285 - DNA, 15 bp, Homo sapiens
cttcccttgcagtca

SEQ ID NO: 411286 - DNA, 15 bp, Homo sapiens
ccttcccttgcagtc

SEQ ID NO: 411287 - DNA, 15 bp, Homo sapiens
tccttcccttgcagt

SEQ ID NO: 411288 - DNA, 15 bp, Homo sapiens
atccttcccttgcag

SEQ ID NO: 411289 - DNA, 15 bp, Homo sapiens
aatccttcccttgca

SEQ ID NO: 411290 - DNA, 15 bp, Homo sapiens
taatccttcccttgc

SEQ ID NO: 411291 - DNA, 15 bp, Homo sapiens
ataatccttcccttg

SEQ ID NO: 411292 - DNA, 15 bp, Homo sapiens
tataatccttccctt

SEQ ID NO: 411293 - DNA, 15 bp, Homo sapiens
ctataatccttccct

SEQ ID NO: 411294 - DNA, 15 bp, Homo sapiens
cctataatccttccc

SEQ ID NO: 411295 - DNA, 15 bp, Homo sapiens
tcctataatccttcc

SEQ ID NO: 411296 - DNA, 15 bp, Homo sapiens
ttcctataatccttc

SEQ ID NO: 411297 - DNA, 15 bp, Homo sapiens
tttcctataatcctt

SEQ ID NO: 411298 - DNA, 15 bp, Homo sapiens
ttttcctataatcct

SEQ ID NO: 411299 - DNA, 15 bp, Homo sapiens
cttttcctataatcc

SEQ ID NO: 411300 - DNA, 15 bp, Homo sapiens
tcttttcctataatc

SEQ ID NO: 411301 - DNA, 15 bp, Homo sapiens
gtcttttcctataat

SEQ ID NO: 411302 - DNA, 15 bp, Homo sapiens
agtcttttcctataa

SEQ ID NO: 411303 - DNA, 15 bp, Homo sapiens
cagtcttttcctata

SEQ ID NO: 411304 - DNA, 15 bp, Homo sapiens
acagtcttttcctat

SEQ ID NO: 411305 - DNA, 15 bp, Homo sapiens
cacagtcttttccta

SEQ ID NO: 411306 - DNA, 15 bp, Homo sapiens
tcacagtcttttcct

SEQ ID NO: 411307 - DNA, 15 bp, Homo sapiens
ttcacagtcttttcc

SEQ ID NO: 411308 - DNA, 15 bp, Homo sapiens
tttcacagtcttttc

SEQ ID NO: 411309 - DNA, 15 bp, Homo sapiens
atttcacagtctttt

SEQ ID NO: 411310 - DNA, 15 bp, Homo sapiens
gatttcacagtcttt

SEQ ID NO: 411311 - DNA, 15 bp, Homo sapiens
cgatttcacagtctt

SEQ ID NO: 411312 - DNA, 15 bp, Homo sapiens
tcgatttcacagtct

SEQ ID NO: 411313 - DNA, 15 bp, Homo sapiens
atcgatttcacagtc

SEQ ID NO: 411314 - DNA, 15 bp, Homo sapiens
aatcgatttcacagt

SEQ ID NO: 411315 - DNA, 15 bp, Homo sapiens
aaatcgatttcacag

SEQ ID NO: 411316 - DNA, 15 bp, Homo sapiens
taaatcgatttcaca

SEQ ID NO: 411317 - DNA, 15 bp, Homo sapiens
ctaaatcgatttcac

SEQ ID NO: 411318 - DNA, 15 bp, Homo sapiens
tctaaatcgatttca

SEQ ID NO: 411319 - DNA, 15 bp, Homo sapiens
atctaaatcgatttc

SEQ ID NO: 411320 - DNA, 15 bp, Homo sapiens
catctaaatcgattt

SEQ ID NO: 411321 - DNA, 15 bp, Homo sapiens
tcatctaaatcgatt

SEQ ID NO: 411322 - DNA, 15 bp, Homo sapiens
ctcatctaaatcgat

SEQ ID NO: 411323 - DNA, 15 bp, Homo sapiens
cctcatctaaatcga

SEQ ID NO: 411324 - DNA, 15 bp, Homo sapiens
tcctcatctaaatcg

SEQ ID NO: 411325 - DNA, 15 bp, Homo sapiens
ctcctcatctaaatc

SEQ ID NO: 411326 - DNA, 15 bp, Homo sapiens
tctcctcatctaaat

SEQ ID NO: 411327 - DNA, 15 bp, Homo sapiens
ttctcctcatctaaa

SEQ ID NO: 411328 - DNA, 15 bp, Homo sapiens
tttctcctcatctaa

SEQ ID NO: 411329 - DNA, 15 bp, Homo sapiens
ttttctcctcatcta

SEQ ID NO: 411330 - DNA, 15 bp, Homo sapiens
cttttctcctcatct

SEQ ID NO: 411331 - DNA, 15 bp, Homo sapiens
gcttttctcctcatc

SEQ ID NO: 411332 - DNA, 15 bp, Homo sapiens
tgcttttctcctcat

SEQ ID NO: 411333 - DNA, 15 bp, Homo sapiens
ttgcttttctcctca

SEQ ID NO: 411334 - DNA, 15 bp, Homo sapiens
tttgcttttctcctc

SEQ ID NO: 411335 - DNA, 15 bp, Homo sapiens
ctttgcttttctcct

SEQ ID NO: 411336 - DNA, 15 bp, Homo sapiens
tctttgcttttctcc

SEQ ID NO: 411337 - DNA, 15 bp, Homo sapiens
ctctttgcttttctc

SEQ ID NO: 411338 - DNA, 15 bp, Homo sapiens
tctctttgcttttct

SEQ ID NO: 411339 - DNA, 15 bp, Homo sapiens
ctctctttgcttttc

SEQ ID NO: 411340 - DNA, 15 bp, Homo sapiens
cctctctttgctttt

SEQ ID NO: 411341 - DNA, 15 bp, Homo sapiens
tcctctctttgcttt

SEQ ID NO: 411342 - DNA, 15 bp, Homo sapiens
ttcctctctttgctt

SEQ ID NO: 411343 - DNA, 15 bp, Homo sapiens
cttcctctctttgct

SEQ ID NO: 411344 - DNA, 15 bp, Homo sapiens
acttcctctctttgc

SEQ ID NO: 411345 - DNA, 15 bp, Homo sapiens
cacttcctctctttg

SEQ ID NO: 411346 - DNA, 15 bp, Homo sapiens
tcacttcctctcttt

SEQ ID NO: 411347 - DNA, 15 bp, Homo sapiens
ctcacttcctctctt

SEQ ID NO: 411348 - DNA, 15 bp, Homo sapiens
tctcacttcctctct

SEQ ID NO: 411349 - DNA, 15 bp, Homo sapiens
ttctcacttcctctc

SEQ ID NO: 411350 - DNA, 15 bp, Homo sapiens
cttctcacttcctct

SEQ ID NO: 411351 - DNA, 15 bp, Homo sapiens
acttctcacttcctc

SEQ ID NO: 411352 - DNA, 15 bp, Homo sapiens
aacttctcacttcct

SEQ ID NO: 411353 - DNA, 15 bp, Homo sapiens
caacttctcacttcc

SEQ ID NO: 411354 - DNA, 15 bp, Homo sapiens
tcaacttctcacttc

SEQ ID NO: 411355 - DNA, 15 bp, Homo sapiens
atcaacttctcactt

SEQ ID NO: 411356 - DNA, 15 bp, Homo sapiens
catcaacttctcact

SEQ ID NO: 411357 - DNA, 15 bp, Homo sapiens
ccatcaacttctcac

SEQ ID NO: 411358 - DNA, 15 bp, Homo sapiens
tccatcaacttctca

SEQ ID NO: 411359 - DNA, 15 bp, Homo sapiens
atccatcaacttctc

SEQ ID NO: 411360 - DNA, 15 bp, Homo sapiens
tatccatcaacttct

SEQ ID NO: 411361 - DNA, 15 bp, Homo sapiens
ttatccatcaacttc

SEQ ID NO: 411362 - DNA, 15 bp, Homo sapiens
attatccatcaactt

SEQ ID NO: 411363 - DNA, 15 bp, Homo sapiens
cattatccatcaact

SEQ ID NO: 411364 - DNA, 15 bp, Homo sapiens
tcattatccatcaac

SEQ ID NO: 411365 - DNA, 15 bp, Homo sapiens
ttcattatccatcaa

SEQ ID NO: 411366 - DNA, 15 bp, Homo sapiens
tttcattatccatca

SEQ ID NO: 411367 - DNA, 15 bp, Homo sapiens
ttttcattatccatc

SEQ ID NO: 411368 - DNA, 15 bp, Homo sapiens
tttttcattatccat

SEQ ID NO: 411369 - DNA, 15 bp, Homo sapiens
gtttttcattatcca

SEQ ID NO: 411370 - DNA, 15 bp, Homo sapiens
tgtttttcattatcc

SEQ ID NO: 411371 - DNA, 15 bp, Homo sapiens
ctgtttttcattatc

SEQ ID NO: 411372 - DNA, 15 bp, Homo sapiens
gctgtttttcattat

SEQ ID NO: 411373 - DNA, 15 bp, Homo sapiens
agctgtttttcatta

SEQ ID NO: 411374 - DNA, 15 bp, Homo sapiens
cagctgtttttcatt

SEQ ID NO: 411375 - DNA, 15 bp, Homo sapiens
ccagctgtttttcat

SEQ ID NO: 411376 - DNA, 15 bp, Homo sapiens
cccagctgtttttca

SEQ ID NO: 411377 - DNA, 15 bp, Homo sapiens
tcccagctgtttttc

SEQ ID NO: 411378 - DNA, 15 bp, Homo sapiens
ctcccagctgttttt

SEQ ID NO: 411379 - DNA, 15 bp, Homo sapiens
tctcccagctgtttt

SEQ ID NO: 411380 - DNA, 15 bp, Homo sapiens
atctcccagctgttt

SEQ ID NO: 411381 - DNA, 15 bp, Homo sapiens
aatctcccagctgtt

SEQ ID NO: 411382 - DNA, 15 bp, Homo sapiens
gaatctcccagctgt

SEQ ID NO: 411383 - DNA, 15 bp, Homo sapiens
tgaatctcccagctg

SEQ ID NO: 411384 - DNA, 15 bp, Homo sapiens
ctgaatctcccagct

SEQ ID NO: 411385 - DNA, 15 bp, Homo sapiens
actgaatctcccagc

SEQ ID NO: 411386 - DNA, 15 bp, Homo sapiens
tactgaatctcccag

SEQ ID NO: 411387 - DNA, 15 bp, Homo sapiens
ttactgaatctccca

SEQ ID NO: 411388 - DNA, 15 bp, Homo sapiens
cttactgaatctccc

SEQ ID NO: 411389 - DNA, 15 bp, Homo sapiens
gcttactgaatctcc

SEQ ID NO: 411390 - DNA, 15 bp, Homo sapiens
agcttactgaatctc

SEQ ID NO: 411391 - DNA, 15 bp, Homo sapiens
gagcttactgaatct

SEQ ID NO: 411392 - DNA, 15 bp, Homo sapiens
tgagcttactgaatc

SEQ ID NO: 411393 - DNA, 15 bp, Homo sapiens
ttgagcttactgaat

SEQ ID NO: 411394 - DNA, 15 bp, Homo sapiens
tttgagcttactgaa

SEQ ID NO: 411395 - DNA, 15 bp, Homo sapiens
ttttgagcttactga

SEQ ID NO: 411396 - DNA, 15 bp, Homo sapiens
tttttgagcttactg

SEQ ID NO: 411397 - DNA, 15 bp, Homo sapiens
ctttttgagcttact

SEQ ID NO: 411398 - DNA, 15 bp, Homo sapiens
gctttttgagcttac

SEQ ID NO: 411399 - DNA, 15 bp, Homo sapiens
agctttttgagctta

SEQ ID NO: 411400 - DNA, 15 bp, Homo sapiens
tagctttttgagctt

SEQ ID NO: 411401 - DNA, 15 bp, Homo sapiens
atagctttttgagct

SEQ ID NO: 411402 - DNA, 15 bp, Homo sapiens
aatagctttttgagc

SEQ ID NO: 411403 - DNA, 15 bp, Homo sapiens
caatagctttttgag

SEQ ID NO: 411404 - DNA, 15 bp, Homo sapiens
gcaatagctttttga

SEQ ID NO: 411405 - DNA, 15 bp, Homo sapiens
tgcaatagctttttg

SEQ ID NO: 411406 - DNA, 15 bp, Homo sapiens
atgcaatagcttttt

SEQ ID NO: 411407 - DNA, 15 bp, Homo sapiens
tatgcaatagctttt

SEQ ID NO: 411408 - DNA, 15 bp, Homo sapiens
ctatgcaatagcttt

SEQ ID NO: 411409 - DNA, 15 bp, Homo sapiens
tctatgcaatagctt

SEQ ID NO: 411410 - DNA, 15 bp, Homo sapiens
ctctatgcaatagct

SEQ ID NO: 411411 - DNA, 15 bp, Homo sapiens
tctctatgcaatagc

SEQ ID NO: 411412 - DNA, 15 bp, Homo sapiens
ttctctatgcaatag

SEQ ID NO: 411413 - DNA, 15 bp, Homo sapiens
attctctatgcaata

SEQ ID NO: 411414 - DNA, 15 bp, Homo sapiens
gattctctatgcaat

SEQ ID NO: 411415 - DNA, 15 bp, Homo sapiens
agattctctatgcaa

SEQ ID NO: 411416 - DNA, 15 bp, Homo sapiens
aagattctctatgca

SEQ ID NO: 411417 - DNA, 15 bp, Homo sapiens
taagattctctatgc

SEQ ID NO: 411418 - DNA, 15 bp, Homo sapiens
ctaagattctctatg

SEQ ID NO: 411419 - DNA, 15 bp, Homo sapiens
tctaagattctctat

SEQ ID NO: 411420 - DNA, 15 bp, Homo sapiens
ttctaagattctcta

SEQ ID NO: 411421 - DNA, 15 bp, Homo sapiens
attctaagattctct

SEQ ID NO: 411422 - DNA, 15 bp, Homo sapiens
tattctaagattctc

SEQ ID NO: 411423 - DNA, 15 bp, Homo sapiens
ttattctaagattct

SEQ ID NO: 411424 - DNA, 15 bp, Homo sapiens
tttattctaagattc

SEQ ID NO: 411425 - DNA, 15 bp, Homo sapiens
atttattctaagatt

SEQ ID NO: 411426 - DNA, 15 bp, Homo sapiens
tatttattctaagat

SEQ ID NO: 411427 - DNA, 15 bp, Homo sapiens
ttatttattctaaga

SEQ ID NO: 411428 - DNA, 15 bp, Homo sapiens
cttatttattctaag

SEQ ID NO: 411429 - DNA, 15 bp, Homo sapiens
gcttatttattctaa

SEQ ID NO: 411430 - DNA, 15 bp, Homo sapiens
agcttatttattcta

SEQ ID NO: 411431 - DNA, 15 bp, Homo sapiens
aagcttatttattct

SEQ ID NO: 411432 - DNA, 15 bp, Homo sapiens
gaagcttatttattc

SEQ ID NO: 411433 - DNA, 15 bp, Homo sapiens
tgaagcttatttatt

SEQ ID NO: 411434 - DNA, 15 bp, Homo sapiens
ctgaagcttatttat

SEQ ID NO: 411435 - DNA, 15 bp, Homo sapiens
cctgaagcttattta

SEQ ID NO: 411436 - DNA, 15 bp, Homo sapiens
acctgaagcttattt

SEQ ID NO: 411437 - DNA, 15 bp, Homo sapiens
cacctgaagcttatt

SEQ ID NO: 411438 - DNA, 15 bp, Homo sapiens
tcacctgaagcttat

SEQ ID NO: 411439 - DNA, 15 bp, Homo sapiens
ttcacctgaagctta

SEQ ID NO: 411440 - DNA, 15 bp, Homo sapiens
attcacctgaagctt

SEQ ID NO: 411441 - DNA, 15 bp, Homo sapiens
cattcacctgaagct

SEQ ID NO: 411442 - DNA, 15 bp, Homo sapiens
gcattcacctgaagc

SEQ ID NO: 411443 - DNA, 15 bp, Homo sapiens
agcattcacctgaag

SEQ ID NO: 411444 - DNA, 15 bp, Homo sapiens
cagcattcacctgaa

SEQ ID NO: 411445 - DNA, 15 bp, Homo sapiens
acagcattcacctga

SEQ ID NO: 411446 - DNA, 15 bp, Homo sapiens
aacagcattcacctg

SEQ ID NO: 411447 - DNA, 15 bp, Homo sapiens
caacagcattcacct

SEQ ID NO: 411448 - DNA, 15 bp, Homo sapiens
tcaacagcattcacc

SEQ ID NO: 411449 - DNA, 15 bp, Homo sapiens
gtcaacagcattcac

SEQ ID NO: 411450 - DNA, 15 bp, Homo sapiens
ggtcaacagcattca

SEQ ID NO: 411451 - DNA, 15 bp, Homo sapiens
tggtcaacagcattc

SEQ ID NO: 411452 - DNA, 15 bp, Homo sapiens
ctggtcaacagcatt

SEQ ID NO: 411453 - DNA, 15 bp, Homo sapiens
cctggtcaacagcat

SEQ ID NO: 411454 - DNA, 15 bp, Homo sapiens
tcctggtcaacagca

SEQ ID NO: 411455 - DNA, 15 bp, Homo sapiens
ctcctggtcaacagc

SEQ ID NO: 411456 - DNA, 15 bp, Homo sapiens
actcctggtcaacag

SEQ ID NO: 411457 - DNA, 15 bp, Homo sapiens
tactcctggtcaaca

SEQ ID NO: 411458 - DNA, 15 bp, Homo sapiens
ctactcctggtcaac

SEQ ID NO: 411459 - DNA, 15 bp, Homo sapiens
cctactcctggtcaa

SEQ ID NO: 411460 - DNA, 15 bp, Homo sapiens
tcctactcctggtca

SEQ ID NO: 411461 - DNA, 15 bp, Homo sapiens
atcctactcctggtc

SEQ ID NO: 411462 - DNA, 15 bp, Homo sapiens
catcctactcctggt

SEQ ID NO: 411463 - DNA, 15 bp, Homo sapiens
acatcctactcctgg

SEQ ID NO: 411464 - DNA, 15 bp, Homo sapiens
aacatcctactcctg

SEQ ID NO: 411465 - DNA, 15 bp, Homo sapiens
aaacatcctactcct

SEQ ID NO: 411466 - DNA, 15 bp, Homo sapiens
taaacatcctactcc

SEQ ID NO: 411467 - DNA, 15 bp, Homo sapiens
ttaaacatcctactc

SEQ ID NO: 411468 - DNA, 15 bp, Homo sapiens
tttaaacatcctact

SEQ ID NO: 411469 - DNA, 15 bp, Homo sapiens
ttttaaacatcctac

SEQ ID NO: 411470 - DNA, 15 bp, Homo sapiens
attttaaacatccta

SEQ ID NO: 411471 - DNA, 15 bp, Homo sapiens
gattttaaacatcct

SEQ ID NO: 411472 - DNA, 15 bp, Homo sapiens
tgattttaaacatcc

SEQ ID NO: 411473 - DNA, 15 bp, Homo sapiens
ttgattttaaacatc

SEQ ID NO: 411474 - DNA, 15 bp, Homo sapiens
cttgattttaaacat

SEQ ID NO: 411475 - DNA, 15 bp, Homo sapiens
tcttgattttaaaca

SEQ ID NO: 411476 - DNA, 15 bp, Homo sapiens
atcttgattttaaac

SEQ ID NO: 411477 - DNA, 15 bp, Homo sapiens
aatcttgattttaaa

SEQ ID NO: 411478 - DNA, 15 bp, Homo sapiens
aaatcttgattttaa

SEQ ID NO: 411479 - DNA, 15 bp, Homo sapiens
gaaatcttgatttta

SEQ ID NO: 411480 - DNA, 15 bp, Homo sapiens
agaaatcttgatttt

SEQ ID NO: 411481 - DNA, 15 bp, Homo sapiens
cagaaatcttgattt

SEQ ID NO: 411482 - DNA, 15 bp, Homo sapiens
tcagaaatcttgatt

SEQ ID NO: 411483 - DNA, 15 bp, Homo sapiens
ctcagaaatcttgat

SEQ ID NO: 411484 - DNA, 15 bp, Homo sapiens
tctcagaaatcttga

SEQ ID NO: 411485 - DNA, 15 bp, Homo sapiens
atctcagaaatcttg

SEQ ID NO: 411486 - DNA, 15 bp, Homo sapiens
catctcagaaatctt

SEQ ID NO: 411487 - DNA, 15 bp, Homo sapiens
ccatctcagaaatct

SEQ ID NO: 411488 - DNA, 15 bp, Homo sapiens
accatctcagaaatc

SEQ ID NO: 411489 - DNA, 15 bp, Homo sapiens
caccatctcagaaat

SEQ ID NO: 411490 - DNA, 15 bp, Homo sapiens
gcaccatctcagaaa

SEQ ID NO: 411491 - DNA, 15 bp, Homo sapiens
tgcaccatctcagaa

SEQ ID NO: 411492 - DNA, 15 bp, Homo sapiens
ctgcaccatctcaga

SEQ ID NO: 411493 - DNA, 15 bp, Homo sapiens
tctgcaccatctcag

SEQ ID NO: 411494 - DNA, 15 bp, Homo sapiens
atctgcaccatctca

SEQ ID NO: 411495 - DNA, 15 bp, Homo sapiens
tatctgcaccatctc

SEQ ID NO: 411496 - DNA, 15 bp, Homo sapiens
gtatctgcaccatct

SEQ ID NO: 411497 - DNA, 15 bp, Homo sapiens
agtatctgcaccatc

SEQ ID NO: 411498 - DNA, 15 bp, Homo sapiens
tagtatctgcaccat

SEQ ID NO: 411499 - DNA, 15 bp, Homo sapiens
ctagtatctgcacca

SEQ ID NO: 411500 - DNA, 15 bp, Homo sapiens
actagtatctgcacc

SEQ ID NO: 411501 - DNA, 15 bp, Homo sapiens
cactagtatctgcac

SEQ ID NO: 411502 - DNA, 15 bp, Homo sapiens
tcactagtatctgca

SEQ ID NO: 411503 - DNA, 15 bp, Homo sapiens
atcactagtatctgc

SEQ ID NO: 411504 - DNA, 15 bp, Homo sapiens
catcactagtatctg

SEQ ID NO: 411505 - DNA, 15 bp, Homo sapiens
tcatcactagtatct

SEQ ID NO: 411506 - DNA, 15 bp, Homo sapiens
atcatcactagtatc

SEQ ID NO: 411507 - DNA, 15 bp, Homo sapiens
tatcatcactagtat

SEQ ID NO: 411508 - DNA, 15 bp, Homo sapiens
gtatcatcactagta

SEQ ID NO: 411509 - DNA, 15 bp, Homo sapiens
tgtatcatcactagt

SEQ ID NO: 411510 - DNA, 15 bp, Homo sapiens
ttgtatcatcactag

SEQ ID NO: 411511 - DNA, 15 bp, Homo sapiens
attgtatcatcacta

SEQ ID NO: 411512 - DNA, 15 bp, Homo sapiens
aattgtatcatcact

SEQ ID NO: 411513 - DNA, 15 bp, Homo sapiens
aaattgtatcatcac

SEQ ID NO: 411514 - DNA, 15 bp, Homo sapiens
taaattgtatcatca

SEQ ID NO: 411515 - DNA, 15 bp, Homo sapiens
ctaaattgtatcatc

SEQ ID NO: 411516 - DNA, 15 bp, Homo sapiens
cctaaattgtatcat

SEQ ID NO: 411517 - DNA, 15 bp, Homo sapiens
tcctaaattgtatca

SEQ ID NO: 411518 - DNA, 15 bp, Homo sapiens
atcctaaattgtatc

SEQ ID NO: 411519 - DNA, 15 bp, Homo sapiens
tatcctaaattgtat

SEQ ID NO: 411520 - DNA, 15 bp, Homo sapiens
atatcctaaattgta

SEQ ID NO: 411521 - DNA, 15 bp, Homo sapiens
catatcctaaattgt

SEQ ID NO: 411522 - DNA, 15 bp, Homo sapiens
tcatatcctaaattg

SEQ ID NO: 411523 - DNA, 15 bp, Homo sapiens
gtcatatcctaaatt

SEQ ID NO: 411524 - DNA, 15 bp, Homo sapiens
ggtcatatcctaaat

SEQ ID NO: 411525 - DNA, 15 bp, Homo sapiens
tggtcatatcctaaa

SEQ ID NO: 411526 - DNA, 15 bp, Homo sapiens
atggtcatatcctaa

SEQ ID NO: 411527 - DNA, 15 bp, Homo sapiens
catggtcatatccta

SEQ ID NO: 411528 - DNA, 15 bp, Homo sapiens
ccatggtcatatcct

SEQ ID NO: 411529 - DNA, 15 bp, Homo sapiens
cccatggtcatatcc

SEQ ID NO: 411530 - DNA, 15 bp, Homo sapiens
tcccatggtcatatc

SEQ ID NO: 411531 - DNA, 15 bp, Homo sapiens
ctcccatggtcatat

SEQ ID NO: 411532 - DNA, 15 bp, Homo sapiens
tctcccatggtcata

SEQ ID NO: 411533 - DNA, 15 bp, Homo sapiens
ctctcccatggtcat

SEQ ID NO: 411534 - DNA, 15 bp, Homo sapiens
tctctcccatggtca

SEQ ID NO: 411535 - DNA, 15 bp, Homo sapiens
ctctctcccatggtc

SEQ ID NO: 411536 - DNA, 15 bp, Homo sapiens
actctctcccatggt

SEQ ID NO: 411537 - DNA, 15 bp, Homo sapiens
cactctctcccatgg

SEQ ID NO: 411538 - DNA, 15 bp, Homo sapiens
ccactctctcccatg

SEQ ID NO: 411539 - DNA, 15 bp, Homo sapiens
cccactctctcccat

SEQ ID NO: 411540 - DNA, 15 bp, Homo sapiens
acccactctctccca

SEQ ID NO: 411541 - DNA, 15 bp, Homo sapiens
tacccactctctccc

SEQ ID NO: 411542 - DNA, 15 bp, Homo sapiens
ctacccactctctcc

SEQ ID NO: 411543 - DNA, 15 bp, Homo sapiens
tctacccactctctc

SEQ ID NO: 411544 - DNA, 15 bp, Homo sapiens
atctacccactctct

SEQ ID NO: 411545 - DNA, 15 bp, Homo sapiens
catctacccactctc

SEQ ID NO: 411546 - DNA, 15 bp, Homo sapiens
ccatctacccactct

SEQ ID NO: 411547 - DNA, 15 bp, Homo sapiens
tccatctacccactc

SEQ ID NO: 411548 - DNA, 15 bp, Homo sapiens
ctccatctacccact

SEQ ID NO: 411549 - DNA, 15 bp, Homo sapiens
tctccatctacccac

SEQ ID NO: 411550 - DNA, 15 bp, Homo sapiens
gtctccatctaccca

SEQ ID NO: 411551 - DNA, 15 bp, Homo sapiens
tgtctccatctaccc

SEQ ID NO: 411552 - DNA, 15 bp, Homo sapiens
ttgtctccatctacc

SEQ ID NO: 411553 - DNA, 15 bp, Homo sapiens
tttgtctccatctac

SEQ ID NO: 411554 - DNA, 15 bp, Homo sapiens
ttttgtctccatcta

SEQ ID NO: 411555 - DNA, 15 bp, Homo sapiens
attttgtctccatct

SEQ ID NO: 411556 - DNA, 15 bp, Homo sapiens
aattttgtctccatc

SEQ ID NO: 411557 - DNA, 15 bp, Homo sapiens
aaattttgtctccat

SEQ ID NO: 411558 - DNA, 15 bp, Homo sapiens
taaattttgtctcca

SEQ ID NO: 411559 - DNA, 15 bp, Homo sapiens
ctaaattttgtctcc

SEQ ID NO: 411560 - DNA, 15 bp, Homo sapiens
tctaaattttgtctc

SEQ ID NO: 411561 - DNA, 15 bp, Homo sapiens
atctaaattttgtct

SEQ ID NO: 411562 - DNA, 15 bp, Homo sapiens
gatctaaattttgtc

SEQ ID NO: 411563 - DNA, 15 bp, Homo sapiens
tgatctaaattttgt

SEQ ID NO: 411564 - DNA, 15 bp, Homo sapiens
atgatctaaattttg

SEQ ID NO: 411565 - DNA, 15 bp, Homo sapiens
catgatctaaatttt

SEQ ID NO: 411566 - DNA, 15 bp, Homo sapiens
acatgatctaaattt

SEQ ID NO: 411567 - DNA, 15 bp, Homo sapiens
gacatgatctaaatt

SEQ ID NO: 411568 - DNA, 15 bp, Homo sapiens
agacatgatctaaat

SEQ ID NO: 411569 - DNA, 15 bp, Homo sapiens
aagacatgatctaaa

SEQ ID NO: 411570 - DNA, 15 bp, Homo sapiens
aaagacatgatctaa

SEQ ID NO: 411571 - DNA, 15 bp, Homo sapiens
aaaagacatgatcta

SEQ ID NO: 411572 - DNA, 15 bp, Homo sapiens
caaaagacatgatct

SEQ ID NO: 411573 - DNA, 15 bp, Homo sapiens
tcaaaagacatgatc

SEQ ID NO: 411574 - DNA, 15 bp, Homo sapiens
atcaaaagacatgat

SEQ ID NO: 411575 - DNA, 15 bp, Homo sapiens
tatcaaaagacatga

SEQ ID NO: 411576 - DNA, 15 bp, Homo sapiens
gtatcaaaagacatg

SEQ ID NO: 411577 - DNA, 15 bp, Homo sapiens
agtatcaaaagacat

SEQ ID NO: 411578 - DNA, 15 bp, Homo sapiens
gagtatcaaaagaca

SEQ ID NO: 411579 - DNA, 15 bp, Homo sapiens
tgagtatcaaaagac

SEQ ID NO: 411580 - DNA, 15 bp, Homo sapiens
ctgagtatcaaaaga

SEQ ID NO: 411581 - DNA, 15 bp, Homo sapiens
gctgagtatcaaaag

SEQ ID NO: 411582 - DNA, 15 bp, Homo sapiens
tgctgagtatcaaaa

SEQ ID NO: 411583 - DNA, 15 bp, Homo sapiens
ttgctgagtatcaaa

SEQ ID NO: 411584 - DNA, 15 bp, Homo sapiens
attgctgagtatcaa

SEQ ID NO: 411585 - DNA, 15 bp, Homo sapiens
aattgctgagtatca

SEQ ID NO: 411586 - DNA, 15 bp, Homo sapiens
aaattgctgagtatc

SEQ ID NO: 411587 - DNA, 15 bp, Homo sapiens
gaaattgctgagtat

SEQ ID NO: 411588 - DNA, 15 bp, Homo sapiens
agaaattgctgagta

SEQ ID NO: 411589 - DNA, 15 bp, Homo sapiens
aagaaattgctgagt

SEQ ID NO: 411590 - DNA, 15 bp, Homo sapiens
caagaaattgctgag

SEQ ID NO: 411591 - DNA, 15 bp, Homo sapiens
acaagaaattgctga

SEQ ID NO: 411592 - DNA, 15 bp, Homo sapiens
cacaagaaattgctg

SEQ ID NO: 411593 - DNA, 15 bp, Homo sapiens
tcacaagaaattgct

SEQ ID NO: 411594 - DNA, 15 bp, Homo sapiens
ctcacaagaaattgc

SEQ ID NO: 411595 - DNA, 15 bp, Homo sapiens
tctcacaagaaattg

SEQ ID NO: 411596 - DNA, 15 bp, Homo sapiens
ctctcacaagaaatt

SEQ ID NO: 411597 - DNA, 15 bp, Homo sapiens
tctctcacaagaaat

SEQ ID NO: 411598 - DNA, 15 bp, Homo sapiens
ttctctcacaagaaa

SEQ ID NO: 411599 - DNA, 15 bp, Homo sapiens
attctctcacaagaa

SEQ ID NO: 411600 - DNA, 15 bp, Homo sapiens
gattctctcacaaga

SEQ ID NO: 411601 - DNA, 15 bp, Homo sapiens
tgattctctcacaag

SEQ ID NO: 411602 - DNA, 15 bp, Homo sapiens
ttgattctctcacaa

SEQ ID NO: 411603 - DNA, 15 bp, Homo sapiens
tttgattctctcaca

SEQ ID NO: 411604 - DNA, 15 bp, Homo sapiens
gtttgattctctcac

SEQ ID NO: 411605 - DNA, 15 bp, Homo sapiens
cgtttgattctctca

SEQ ID NO: 411606 - DNA, 15 bp, Homo sapiens
tcgtttgattctctc

SEQ ID NO: 411607 - DNA, 15 bp, Homo sapiens
ttcgtttgattctct

SEQ ID NO: 411608 - DNA, 15 bp, Homo sapiens
tttcgtttgattctc

SEQ ID NO: 411609 - DNA, 15 bp, Homo sapiens
gtttcgtttgattct

SEQ ID NO: 411610 - DNA, 15 bp, Homo sapiens
tgtttcgtttgattc

SEQ ID NO: 411611 - DNA, 15 bp, Homo sapiens
gtgtttcgtttgatt

SEQ ID NO: 411612 - DNA, 15 bp, Homo sapiens
tgtgtttcgtttgat

SEQ ID NO: 411613 - DNA, 15 bp, Homo sapiens
gtgtgtttcgtttga

SEQ ID NO: 411614 - DNA, 15 bp, Homo sapiens
ggtgtgtttcgtttg

SEQ ID NO: 411615 - DNA, 15 bp, Homo sapiens
tggtgtgtttcgttt

SEQ ID NO: 411616 - DNA, 15 bp, Homo sapiens
gtggtgtgtttcgtt

SEQ ID NO: 411617 - DNA, 15 bp, Homo sapiens
agtggtgtgtttcgt

SEQ ID NO: 411618 - DNA, 15 bp, Homo sapiens
cagtggtgtgtttcg

SEQ ID NO: 411619 - DNA, 15 bp, Homo sapiens
acagtggtgtgtttc

SEQ ID NO: 411620 - DNA, 15 bp, Homo sapiens
cacagtggtgtgttt

SEQ ID NO: 411621 - DNA, 15 bp, Homo sapiens
acacagtggtgtgtt

SEQ ID NO: 411622 - DNA, 15 bp, Homo sapiens
tacacagtggtgtgt

SEQ ID NO: 411623 - DNA, 15 bp, Homo sapiens
ctacacagtggtgtg

SEQ ID NO: 411624 - DNA, 15 bp, Homo sapiens
actacacagtggtgt

SEQ ID NO: 411625 - DNA, 15 bp, Homo sapiens
cactacacagtggtg

SEQ ID NO: 411626 - DNA, 15 bp, Homo sapiens
ccactacacagtggt

SEQ ID NO: 411627 - DNA, 15 bp, Homo sapiens
accactacacagtgg

SEQ ID NO: 411628 - DNA, 15 bp, Homo sapiens
taccactacacagtg

SEQ ID NO: 411629 - DNA, 15 bp, Homo sapiens
ctaccactacacagt

SEQ ID NO: 411630 - DNA, 15 bp, Homo sapiens
tctaccactacacag

SEQ ID NO: 411631 - DNA, 15 bp, Homo sapiens
ttctaccactacaca

SEQ ID NO: 411632 - DNA, 15 bp, Homo sapiens
gttctaccactacac

SEQ ID NO: 411633 - DNA, 15 bp, Homo sapiens
tgttctaccactaca

SEQ ID NO: 411634 - DNA, 15 bp, Homo sapiens
ttgttctaccactac

SEQ ID NO: 411635 - DNA, 15 bp, Homo sapiens
tttgttctaccacta

SEQ ID NO: 411636 - DNA, 15 bp, Homo sapiens
atttgttctaccact

SEQ ID NO: 411637 - DNA, 15 bp, Homo sapiens
tatttgttctaccac

SEQ ID NO: 411638 - DNA, 15 bp, Homo sapiens
ttatttgttctacca

SEQ ID NO: 411639 - DNA, 15 bp, Homo sapiens
attatttgttctacc

SEQ ID NO: 411640 - DNA, 15 bp, Homo sapiens
gattatttgttctac

SEQ ID NO: 411641 - DNA, 15 bp, Homo sapiens
agattatttgttcta

SEQ ID NO: 411642 - DNA, 15 bp, Homo sapiens
aagattatttgttct

SEQ ID NO: 411643 - DNA, 15 bp, Homo sapiens
aaagattatttgttc

SEQ ID NO: 411644 - DNA, 15 bp, Homo sapiens
aaaagattatttgtt

SEQ ID NO: 411645 - DNA, 15 bp, Homo sapiens
aaaaagattatttgt

SEQ ID NO: 411646 - DNA, 15 bp, Homo sapiens
caaaaagattatttg

SEQ ID NO: 411647 - DNA, 15 bp, Homo sapiens
ccaaaaagattattt

SEQ ID NO: 411648 - DNA, 15 bp, Homo sapiens
tccaaaaagattatt

SEQ ID NO: 411649 - DNA, 15 bp, Homo sapiens
ttccaaaaagattat

SEQ ID NO: 411650 - DNA, 15 bp, Homo sapiens
cttccaaaaagatta

SEQ ID NO: 411651 - DNA, 15 bp, Homo sapiens
acttccaaaaagatt

SEQ ID NO: 411652 - DNA, 15 bp, Homo sapiens
tacttccaaaaagat

SEQ ID NO: 411653 - DNA, 15 bp, Homo sapiens
ctacttccaaaaaga

SEQ ID NO: 411654 - DNA, 15 bp, Homo sapiens
tctacttccaaaaag

SEQ ID NO: 411655 - DNA, 15 bp, Homo sapiens
ttctacttccaaaaa

SEQ ID NO: 411656 - DNA, 15 bp, Homo sapiens
tttctacttccaaaa

SEQ ID NO: 411657 - DNA, 15 bp, Homo sapiens
ttttctacttccaaa

SEQ ID NO: 411658 - DNA, 15 bp, Homo sapiens
gttttctacttccaa

SEQ ID NO: 411659 - DNA, 15 bp, Homo sapiens
ggttttctacttcca

SEQ ID NO: 411660 - DNA, 15 bp, Homo sapiens
tggttttctacttcc

SEQ ID NO: 411661 - DNA, 15 bp, Homo sapiens
atggttttctacttc

SEQ ID NO: 411662 - DNA, 15 bp, Homo sapiens
tatggttttctactt

SEQ ID NO: 411663 - DNA, 15 bp, Homo sapiens
ctatggttttctact

SEQ ID NO: 411664 - DNA, 15 bp, Homo sapiens
cctatggttttctac

SEQ ID NO: 411665 - DNA, 15 bp, Homo sapiens
acctatggttttcta

SEQ ID NO: 411666 - DNA, 15 bp, Homo sapiens
aacctatggttttct

SEQ ID NO: 411667 - DNA, 15 bp, Homo sapiens
taacctatggttttc

SEQ ID NO: 411668 - DNA, 15 bp, Homo sapiens
ataacctatggtttt

SEQ ID NO: 411669 - DNA, 15 bp, Homo sapiens
cataacctatggttt

SEQ ID NO: 411670 - DNA, 15 bp, Homo sapiens
acataacctatggtt

SEQ ID NO: 411671 - DNA, 15 bp, Homo sapiens
aacataacctatggt

SEQ ID NO: 411672 - DNA, 15 bp, Homo sapiens
taacataacctatgg

SEQ ID NO: 411673 - DNA, 15 bp, Homo sapiens
ataacataacctatg

SEQ ID NO: 411674 - DNA, 15 bp, Homo sapiens
tataacataacctat

SEQ ID NO: 411675 - DNA, 15 bp, Homo sapiens
gtataacataaccta

SEQ ID NO: 411676 - DNA, 15 bp, Homo sapiens
agtataacataacct

SEQ ID NO: 411677 - DNA, 15 bp, Homo sapiens
aagtataacataacc

SEQ ID NO: 411678 - DNA, 15 bp, Homo sapiens
gaagtataacataac

SEQ ID NO: 411679 - DNA, 15 bp, Homo sapiens
agaagtataacataa

SEQ ID NO: 411680 - DNA, 15 bp, Homo sapiens
cagaagtataacata

SEQ ID NO: 411681 - DNA, 15 bp, Homo sapiens
acagaagtataacat

SEQ ID NO: 411682 - DNA, 15 bp, Homo sapiens
gacagaagtataaca

SEQ ID NO: 411683 - DNA, 15 bp, Homo sapiens
tgacagaagtataac

SEQ ID NO: 411684 - DNA, 15 bp, Homo sapiens
atgacagaagtataa

SEQ ID NO: 411685 - DNA, 15 bp, Homo sapiens
aatgacagaagtata

SEQ ID NO: 411686 - DNA, 15 bp, Homo sapiens
aaatgacagaagtat

SEQ ID NO: 411687 - DNA, 15 bp, Homo sapiens
taaatgacagaagta

SEQ ID NO: 411688 - DNA, 15 bp, Homo sapiens
gtaaatgacagaagt

SEQ ID NO: 411689 - DNA, 15 bp, Homo sapiens
agtaaatgacagaag

SEQ ID NO: 411690 - DNA, 15 bp, Homo sapiens
cagtaaatgacagaa

SEQ ID NO: 411691 - DNA, 15 bp, Homo sapiens
ccagtaaatgacaga

SEQ ID NO: 411692 - DNA, 15 bp, Homo sapiens
accagtaaatgacag

SEQ ID NO: 411693 - DNA, 15 bp, Homo sapiens
caccagtaaatgaca

SEQ ID NO: 411694 - DNA, 15 bp, Homo sapiens
ccaccagtaaatgac

SEQ ID NO: 411695 - DNA, 15 bp, Homo sapiens
gccaccagtaaatga

SEQ ID NO: 411696 - DNA, 15 bp, Homo sapiens
tgccaccagtaaatg

SEQ ID NO: 411697 - DNA, 15 bp, Homo sapiens
atgccaccagtaaat

SEQ ID NO: 411698 - DNA, 15 bp, Homo sapiens
catgccaccagtaaa

SEQ ID NO: 411699 - DNA, 15 bp, Homo sapiens
gcatgccaccagtaa

SEQ ID NO: 411700 - DNA, 15 bp, Homo sapiens
ggcatgccaccagta

SEQ ID NO: 411701 - DNA, 15 bp, Homo sapiens
aggcatgccaccagt

SEQ ID NO: 411702 - DNA, 15 bp, Homo sapiens
aaggcatgccaccag

SEQ ID NO: 411703 - DNA, 15 bp, Homo sapiens
caaggcatgccacca

SEQ ID NO: 411704 - DNA, 15 bp, Homo sapiens
ccaaggcatgccacc

SEQ ID NO: 411705 - DNA, 15 bp, Homo sapiens
tccaaggcatgccac

SEQ ID NO: 411706 - DNA, 15 bp, Homo sapiens
ttccaaggcatgcca

SEQ ID NO: 411707 - DNA, 15 bp, Homo sapiens
tttccaaggcatgcc

SEQ ID NO: 411708 - DNA, 15 bp, Homo sapiens
ttttccaaggcatgc

SEQ ID NO: 411709 - DNA, 15 bp, Homo sapiens
cttttccaaggcatg

SEQ ID NO: 411710 - DNA, 15 bp, Homo sapiens
gcttttccaaggcat

SEQ ID NO: 411711 - DNA, 15 bp, Homo sapiens
ggcttttccaaggca

SEQ ID NO: 411712 - DNA, 15 bp, Homo sapiens
aggcttttccaaggc

SEQ ID NO: 411713 - DNA, 15 bp, Homo sapiens
aaggcttttccaagg

SEQ ID NO: 411714 - DNA, 15 bp, Homo sapiens
gaaggcttttccaag

SEQ ID NO: 411715 - DNA, 15 bp, Homo sapiens
tgaaggcttttccaa

SEQ ID NO: 411716 - DNA, 15 bp, Homo sapiens
ctgaaggcttttcca

SEQ ID NO: 411717 - DNA, 15 bp, Homo sapiens
actgaaggcttttcc

SEQ ID NO: 411718 - DNA, 15 bp, Homo sapiens
cactgaaggcttttc

SEQ ID NO: 411719 - DNA, 15 bp, Homo sapiens
acactgaaggctttt

SEQ ID NO: 411720 - DNA, 15 bp, Homo sapiens
gacactgaaggcttt

SEQ ID NO: 411721 - DNA, 15 bp, Homo sapiens
agacactgaaggctt

SEQ ID NO: 411722 - DNA, 15 bp, Homo sapiens
cagacactgaaggct

SEQ ID NO: 411723 - DNA, 15 bp, Homo sapiens
acagacactgaaggc

SEQ ID NO: 411724 - DNA, 15 bp, Homo sapiens
aacagacactgaagg

SEQ ID NO: 411725 - DNA, 15 bp, Homo sapiens
aaacagacactgaag

SEQ ID NO: 411726 - DNA, 15 bp, Homo sapiens
gaaacagacactgaa

SEQ ID NO: 411727 - DNA, 15 bp, Homo sapiens
tgaaacagacactga

SEQ ID NO: 411728 - DNA, 15 bp, Homo sapiens
atgaaacagacactg

SEQ ID NO: 411729 - DNA, 15 bp, Homo sapiens
catgaaacagacact

SEQ ID NO: 411730 - DNA, 15 bp, Homo sapiens
tcatgaaacagacac

SEQ ID NO: 411731 - DNA, 15 bp, Homo sapiens
atcatgaaacagaca

SEQ ID NO: 411732 - DNA, 15 bp, Homo sapiens
gatcatgaaacagac

SEQ ID NO: 411733 - DNA, 15 bp, Homo sapiens
agatcatgaaacaga

SEQ ID NO: 411734 - DNA, 15 bp, Homo sapiens
cagatcatgaaacag

SEQ ID NO: 411735 - DNA, 15 bp, Homo sapiens
tcagatcatgaaaca

SEQ ID NO: 411736 - DNA, 15 bp, Homo sapiens
ttcagatcatgaaac

SEQ ID NO: 411737 - DNA, 15 bp, Homo sapiens
tttcagatcatgaaa

SEQ ID NO: 411738 - DNA, 15 bp, Homo sapiens
ttttcagatcatgaa

SEQ ID NO: 411739 - DNA, 15 bp, Homo sapiens
tttttcagatcatga

SEQ ID NO: 411740 - DNA, 15 bp, Homo sapiens
ttttttcagatcatg

SEQ ID NO: 411741 - DNA, 15 bp, Homo sapiens
attttttcagatcat

SEQ ID NO: 411742 - DNA, 15 bp, Homo sapiens
cattttttcagatca

SEQ ID NO: 411743 - DNA, 15 bp, Homo sapiens
ccattttttcagatc

SEQ ID NO: 411744 - DNA, 15 bp, Homo sapiens
accattttttcagat

SEQ ID NO: 411745 - DNA, 15 bp, Homo sapiens
caccattttttcaga

SEQ ID NO: 411746 - DNA, 15 bp, Homo sapiens
gcaccattttttcag

SEQ ID NO: 411747 - DNA, 15 bp, Homo sapiens
agcaccattttttca

SEQ ID NO: 411748 - DNA, 15 bp, Homo sapiens
tagcaccattttttc

SEQ ID NO: 411749 - DNA, 15 bp, Homo sapiens
ttagcaccatttttt

SEQ ID NO: 411750 - DNA, 15 bp, Homo sapiens
gttagcaccattttt

SEQ ID NO: 411751 - DNA, 15 bp, Homo sapiens
tgttagcaccatttt

SEQ ID NO: 411752 - DNA, 15 bp, Homo sapiens
ttgttagcaccattt

SEQ ID NO: 411753 - DNA, 15 bp, Homo sapiens
attgttagcaccatt

SEQ ID NO: 411754 - DNA, 15 bp, Homo sapiens
tattgttagcaccat

SEQ ID NO: 411755 - DNA, 15 bp, Homo sapiens
ttattgttagcacca

SEQ ID NO: 411756 - DNA, 15 bp, Homo sapiens
gttattgttagcacc

SEQ ID NO: 411757 - DNA, 15 bp, Homo sapiens
agttattgttagcac

SEQ ID NO: 411758 - DNA, 15 bp, Homo sapiens
tagttattgttagca

SEQ ID NO: 411759 - DNA, 15 bp, Homo sapiens
ttagttattgttagc

SEQ ID NO: 411760 - DNA, 15 bp, Homo sapiens
cttagttattgttag

SEQ ID NO: 411761 - DNA, 15 bp, Homo sapiens
acttagttattgtta

SEQ ID NO: 411762 - DNA, 15 bp, Homo sapiens
aacttagttattgtt

SEQ ID NO: 411763 - DNA, 15 bp, Homo sapiens
taacttagttattgt

SEQ ID NO: 411764 - DNA, 15 bp, Homo sapiens
ttaacttagttattg

SEQ ID NO: 411765 - DNA, 15 bp, Homo sapiens
gttaacttagttatt

SEQ ID NO: 411766 - DNA, 15 bp, Homo sapiens
tgttaacttagttat

SEQ ID NO: 411767 - DNA, 15 bp, Homo sapiens
atgttaacttagtta

SEQ ID NO: 411768 - DNA, 15 bp, Homo sapiens
aatgttaacttagtt

SEQ ID NO: 411769 - DNA, 15 bp, Homo sapiens
gaatgttaacttagt

SEQ ID NO: 411770 - DNA, 15 bp, Homo sapiens
tgaatgttaacttag

SEQ ID NO: 411771 - DNA, 15 bp, Homo sapiens
gtgaatgttaactta

SEQ ID NO: 411772 - DNA, 15 bp, Homo sapiens
tgtgaatgttaactt

SEQ ID NO: 411773 - DNA, 15 bp, Homo sapiens
ctgtgaatgttaact

SEQ ID NO: 411774 - DNA, 15 bp, Homo sapiens
cctgtgaatgttaac

SEQ ID NO: 411775 - DNA, 15 bp, Homo sapiens
tcctgtgaatgttaa

SEQ ID NO: 411776 - DNA, 15 bp, Homo sapiens
atcctgtgaatgtta

SEQ ID NO: 411777 - DNA, 15 bp, Homo sapiens
aatcctgtgaatgtt

SEQ ID NO: 411778 - DNA, 15 bp, Homo sapiens
aaatcctgtgaatgt

SEQ ID NO: 411779 - DNA, 15 bp, Homo sapiens
aaaatcctgtgaatg

SEQ ID NO: 411780 - DNA, 15 bp, Homo sapiens
aaaaatcctgtgaat

SEQ ID NO: 411781 - DNA, 15 bp, Homo sapiens
caaaaatcctgtgaa

SEQ ID NO: 411782 - DNA, 15 bp, Homo sapiens
acaaaaatcctgtga

SEQ ID NO: 411783 - DNA, 15 bp, Homo sapiens
gacaaaaatcctgtg

SEQ ID NO: 411784 - DNA, 15 bp, Homo sapiens
tgacaaaaatcctgt

SEQ ID NO: 411785 - DNA, 15 bp, Homo sapiens
atgacaaaaatcctg

SEQ ID NO: 411786 - DNA, 15 bp, Homo sapiens
aatgacaaaaatcct

SEQ ID NO: 411787 - DNA, 15 bp, Homo sapiens
caatgacaaaaatcc

SEQ ID NO: 411788 - DNA, 15 bp, Homo sapiens
acaatgacaaaaatc

SEQ ID NO: 411789 - DNA, 15 bp, Homo sapiens
aacaatgacaaaaat

SEQ ID NO: 411790 - DNA, 15 bp, Homo sapiens
taacaatgacaaaaa

SEQ ID NO: 411791 - DNA, 15 bp, Homo sapiens
ttaacaatgacaaaa

SEQ ID NO: 411792 - DNA, 15 bp, Homo sapiens
tttaacaatgacaaa

SEQ ID NO: 411793 - DNA, 15 bp, Homo sapiens
atttaacaatgacaa

SEQ ID NO: 411794 - DNA, 15 bp, Homo sapiens
tatttaacaatgaca

SEQ ID NO: 411795 - DNA, 15 bp, Homo sapiens
ctatttaacaatgac

SEQ ID NO: 411796 - DNA, 15 bp, Homo sapiens
tctatttaacaatga

SEQ ID NO: 411797 - DNA, 15 bp, Homo sapiens
ctctatttaacaatg

SEQ ID NO: 411798 - DNA, 15 bp, Homo sapiens
actctatttaacaat

SEQ ID NO: 411799 - DNA, 15 bp, Homo sapiens
cactctatttaacaa

SEQ ID NO: 411800 - DNA, 15 bp, Homo sapiens
tcactctatttaaca

SEQ ID NO: 411801 - DNA, 15 bp, Homo sapiens
gtcactctatttaac

SEQ ID NO: 411802 - DNA, 15 bp, Homo sapiens
tgtcactctatttaa

SEQ ID NO: 411803 - DNA, 15 bp, Homo sapiens
atgtcactctattta

SEQ ID NO: 411804 - DNA, 15 bp, Homo sapiens
tatgtcactctattt

SEQ ID NO: 411805 - DNA, 15 bp, Homo sapiens
atatgtcactctatt

SEQ ID NO: 411806 - DNA, 15 bp, Homo sapiens
tatatgtcactctat

SEQ ID NO: 411807 - DNA, 15 bp, Homo sapiens
atatatgtcactcta

SEQ ID NO: 411808 - DNA, 15 bp, Homo sapiens
gatatatgtcactct

SEQ ID NO: 411809 - DNA, 15 bp, Homo sapiens
tgatatatgtcactc

SEQ ID NO: 411810 - DNA, 15 bp, Homo sapiens
ttgatatatgtcact

SEQ ID NO: 411811 - DNA, 15 bp, Homo sapiens
tttgatatatgtcac

SEQ ID NO: 411812 - DNA, 15 bp, Homo sapiens
gtttgatatatgtca

SEQ ID NO: 411813 - DNA, 15 bp, Homo sapiens
agtttgatatatgtc

SEQ ID NO: 411814 - DNA, 15 bp, Homo sapiens
gagtttgatatatgt

SEQ ID NO: 411815 - DNA, 15 bp, Homo sapiens
tgagtttgatatatg

SEQ ID NO: 411816 - DNA, 15 bp, Homo sapiens
atgagtttgatatat

SEQ ID NO: 411817 - DNA, 15 bp, Homo sapiens
aatgagtttgatata

SEQ ID NO: 411818 - DNA, 15 bp, Homo sapiens
aaatgagtttgatat

SEQ ID NO: 411819 - DNA, 15 bp, Homo sapiens
aaaatgagtttgata

SEQ ID NO: 411820 - DNA, 15 bp, Homo sapiens
taaaatgagtttgat

SEQ ID NO: 411821 - DNA, 15 bp, Homo sapiens
ttaaaatgagtttga

SEQ ID NO: 411822 - DNA, 15 bp, Homo sapiens
tttaaaatgagtttg

SEQ ID NO: 411823 - DNA, 15 bp, Homo sapiens
ctttaaaatgagttt

SEQ ID NO: 411824 - DNA, 15 bp, Homo sapiens
gctttaaaatgagtt

SEQ ID NO: 411825 - DNA, 15 bp, Homo sapiens
tgctttaaaatgagt

SEQ ID NO: 411826 - DNA, 15 bp, Homo sapiens
ctgctttaaaatgag

SEQ ID NO: 411827 - DNA, 15 bp, Homo sapiens
tctgctttaaaatga

SEQ ID NO: 411828 - DNA, 15 bp, Homo sapiens
ttctgctttaaaatg

SEQ ID NO: 411829 - DNA, 15 bp, Homo sapiens
tttctgctttaaaat

SEQ ID NO: 411830 - DNA, 15 bp, Homo sapiens
ttttctgctttaaaa

SEQ ID NO: 411831 - DNA, 15 bp, Homo sapiens
gttttctgctttaaa

SEQ ID NO: 411832 - DNA, 15 bp, Homo sapiens
ggttttctgctttaa

SEQ ID NO: 411833 - DNA, 15 bp, Homo sapiens
tggttttctgcttta

SEQ ID NO: 411834 - DNA, 15 bp, Homo sapiens
gtggttttctgcttt

SEQ ID NO: 411835 - DNA, 15 bp, Homo sapiens
agtggttttctgctt

SEQ ID NO: 411836 - DNA, 15 bp, Homo sapiens
tagtggttttctgct

SEQ ID NO: 411837 - DNA, 15 bp, Homo sapiens
atagtggttttctgc

SEQ ID NO: 411838 - DNA, 15 bp, Homo sapiens
tatagtggttttctg

SEQ ID NO: 411839 - DNA, 15 bp, Homo sapiens
ttatagtggttttct

SEQ ID NO: 411840 - DNA, 15 bp, Homo sapiens
tttatagtggttttc

SEQ ID NO: 411841 - DNA, 15 bp, Homo sapiens
ttttatagtggtttt

SEQ ID NO: 411842 - DNA, 15 bp, Homo sapiens
attttatagtggttt

SEQ ID NO: 411843 - DNA, 15 bp, Homo sapiens
cattttatagtggtt

SEQ ID NO: 411844 - DNA, 15 bp, Homo sapiens
gcattttatagtggt

SEQ ID NO: 411845 - DNA, 15 bp, Homo sapiens
tgcattttatagtgg

SEQ ID NO: 411846 - DNA, 15 bp, Homo sapiens
ttgcattttatagtg

SEQ ID NO: 411847 - DNA, 15 bp, Homo sapiens
cttgcattttatagt

SEQ ID NO: 411848 - DNA, 15 bp, Homo sapiens
gcttgcattttatag

SEQ ID NO: 411849 - DNA, 15 bp, Homo sapiens
ggcttgcattttata

SEQ ID NO: 411850 - DNA, 15 bp, Homo sapiens
tggcttgcattttat

SEQ ID NO: 411851 - DNA, 15 bp, Homo sapiens
atggcttgcatttta

SEQ ID NO: 411852 - DNA, 15 bp, Homo sapiens
tatggcttgcatttt

SEQ ID NO: 411853 - DNA, 15 bp, Homo sapiens
ttatggcttgcattt

SEQ ID NO: 411854 - DNA, 15 bp, Homo sapiens
attatggcttgcatt

SEQ ID NO: 411855 - DNA, 15 bp, Homo sapiens
gattatggcttgcat

SEQ ID NO: 411856 - DNA, 15 bp, Homo sapiens
tgattatggcttgca

SEQ ID NO: 411857 - DNA, 15 bp, Homo sapiens
ctgattatggcttgc

SEQ ID NO: 411858 - DNA, 15 bp, Homo sapiens
cctgattatggcttg

SEQ ID NO: 411859 - DNA, 15 bp, Homo sapiens
tcctgattatggctt

SEQ ID NO: 411860 - DNA, 15 bp, Homo sapiens
atcctgattatggct

SEQ ID NO: 411861 - DNA, 15 bp, Homo sapiens
aatcctgattatggc

SEQ ID NO: 411862 - DNA, 15 bp, Homo sapiens
taatcctgattatgg

SEQ ID NO: 411863 - DNA, 15 bp, Homo sapiens
ataatcctgattatg

SEQ ID NO: 411864 - DNA, 15 bp, Homo sapiens
aataatcctgattat

SEQ ID NO: 411865 - DNA, 15 bp, Homo sapiens
aaataatcctgatta

SEQ ID NO: 411866 - DNA, 15 bp, Homo sapiens
aaaataatcctgatt

SEQ ID NO: 411867 - DNA, 15 bp, Homo sapiens
taaaataatcctgat

SEQ ID NO: 411868 - DNA, 15 bp, Homo sapiens
ataaaataatcctga

SEQ ID NO: 411869 - DNA, 15 bp, Homo sapiens
tataaaataatcctg

SEQ ID NO: 411870 - DNA, 15 bp, Homo sapiens
ctataaaataatcct

SEQ ID NO: 411871 - DNA, 15 bp, Homo sapiens
cctataaaataatcc

SEQ ID NO: 411872 - DNA, 15 bp, Homo sapiens
acctataaaataatc

SEQ ID NO: 411873 - DNA, 15 bp, Homo sapiens
tacctataaaataat

SEQ ID NO: 411874 - DNA, 15 bp, Homo sapiens
ttacctataaaataa

SEQ ID NO: 411875 - DNA, 15 bp, Homo sapiens
cttacctataaaata

SEQ ID NO: 411876 - DNA, 15 bp, Homo sapiens
tcttacctataaaat

SEQ ID NO: 411877 - DNA, 15 bp, Homo sapiens
ttcttacctataaaa

SEQ ID NO: 411878 - DNA, 15 bp, Homo sapiens
tttcttacctataaa

SEQ ID NO: 411879 - DNA, 15 bp, Homo sapiens
gtttcttacctataa

SEQ ID NO: 411880 - DNA, 15 bp, Homo sapiens
tgtttcttacctata

SEQ ID NO: 411881 - DNA, 15 bp, Homo sapiens
ttgtttcttacctat

SEQ ID NO: 411882 - DNA, 15 bp, Homo sapiens
cttgtttcttaccta

SEQ ID NO: 411883 - DNA, 15 bp, Homo sapiens
ccttgtttcttacct

SEQ ID NO: 411884 - DNA, 15 bp, Homo sapiens
gccttgtttcttacc

SEQ ID NO: 411885 - DNA, 15 bp, Homo sapiens
agccttgtttcttac

SEQ ID NO: 411886 - DNA, 15 bp, Homo sapiens
gagccttgtttctta

SEQ ID NO: 411887 - DNA, 15 bp, Homo sapiens
tgagccttgtttctt

SEQ ID NO: 411888 - DNA, 15 bp, Homo sapiens
ttgagccttgtttct

SEQ ID NO: 411889 - DNA, 15 bp, Homo sapiens
cttgagccttgtttc

SEQ ID NO: 411890 - DNA, 15 bp, Homo sapiens
tcttgagccttgttt

SEQ ID NO: 411891 - DNA, 15 bp, Homo sapiens
atcttgagccttgtt

SEQ ID NO: 411892 - DNA, 15 bp, Homo sapiens
tatcttgagccttgt

SEQ ID NO: 411893 - DNA, 15 bp, Homo sapiens
ttatcttgagccttg

SEQ ID NO: 411894 - DNA, 15 bp, Homo sapiens
gttatcttgagcctt

SEQ ID NO: 411895 - DNA, 15 bp, Homo sapiens
agttatcttgagcct

SEQ ID NO: 411896 - DNA, 15 bp, Homo sapiens
tagttatcttgagcc

SEQ ID NO: 411897 - DNA, 15 bp, Homo sapiens
ttagttatcttgagc

SEQ ID NO: 411898 - DNA, 15 bp, Homo sapiens
tttagttatcttgag

SEQ ID NO: 411899 - DNA, 15 bp, Homo sapiens
atttagttatcttga

SEQ ID NO: 411900 - DNA, 15 bp, Homo sapiens
catttagttatcttg

SEQ ID NO: 411901 - DNA, 15 bp, Homo sapiens
acatttagttatctt

SEQ ID NO: 411902 - DNA, 15 bp, Homo sapiens
aacatttagttatct

SEQ ID NO: 411903 - DNA, 15 bp, Homo sapiens
gaacatttagttatc

SEQ ID NO: 411904 - DNA, 15 bp, Homo sapiens
tgaacatttagttat

SEQ ID NO: 411905 - DNA, 15 bp, Homo sapiens
ttgaacatttagtta

SEQ ID NO: 411906 - DNA, 15 bp, Homo sapiens
cttgaacatttagtt

SEQ ID NO: 411907 - DNA, 15 bp, Homo sapiens
ccttgaacatttagt

SEQ ID NO: 411908 - DNA, 15 bp, Homo sapiens
accttgaacatttag

SEQ ID NO: 411909 - DNA, 15 bp, Homo sapiens
aaccttgaacattta

SEQ ID NO: 411910 - DNA, 15 bp, Homo sapiens
taaccttgaacattt

SEQ ID NO: 411911 - DNA, 15 bp, Homo sapiens
ctaaccttgaacatt

SEQ ID NO: 411912 - DNA, 15 bp, Homo sapiens
tctaaccttgaacat

SEQ ID NO: 411913 - DNA, 15 bp, Homo sapiens
atctaaccttgaaca

SEQ ID NO: 411914 - DNA, 15 bp, Homo sapiens
catctaaccttgaac

SEQ ID NO: 411915 - DNA, 15 bp, Homo sapiens
tcatctaaccttgaa

SEQ ID NO: 411916 - DNA, 15 bp, Homo sapiens
atcatctaaccttga

SEQ ID NO: 411917 - DNA, 15 bp, Homo sapiens
tatcatctaaccttg

SEQ ID NO: 411918 - DNA, 15 bp, Homo sapiens
ttatcatctaacctt

SEQ ID NO: 411919 - DNA, 15 bp, Homo sapiens
tttatcatctaacct

SEQ ID NO: 411920 - DNA, 15 bp, Homo sapiens
atttatcatctaacc

SEQ ID NO: 411921 - DNA, 15 bp, Homo sapiens
catttatcatctaac

SEQ ID NO: 411922 - DNA, 15 bp, Homo sapiens
tcatttatcatctaa

SEQ ID NO: 411923 - DNA, 15 bp, Homo sapiens
ttcatttatcatcta

SEQ ID NO: 411924 - DNA, 15 bp, Homo sapiens
cttcatttatcatct

SEQ ID NO: 411925 - DNA, 15 bp, Homo sapiens
ccttcatttatcatc

SEQ ID NO: 411926 - DNA, 15 bp, Homo sapiens
tccttcatttatcat

SEQ ID NO: 411927 - DNA, 15 bp, Homo sapiens
gtccttcatttatca

SEQ ID NO: 411928 - DNA, 15 bp, Homo sapiens
ggtccttcatttatc

SEQ ID NO: 411929 - DNA, 15 bp, Homo sapiens
aggtccttcatttat

SEQ ID NO: 411930 - DNA, 15 bp, Homo sapiens
taggtccttcattta

SEQ ID NO: 411931 - DNA, 15 bp, Homo sapiens
ctaggtccttcattt

SEQ ID NO: 411932 - DNA, 15 bp, Homo sapiens
tctaggtccttcatt

SEQ ID NO: 411933 - DNA, 15 bp, Homo sapiens
ttctaggtccttcat

SEQ ID NO: 411934 - DNA, 15 bp, Homo sapiens
attctaggtccttca

SEQ ID NO: 411935 - DNA, 15 bp, Homo sapiens
aattctaggtccttc

SEQ ID NO: 411936 - DNA, 15 bp, Homo sapiens
taattctaggtcctt

SEQ ID NO: 411937 - DNA, 15 bp, Homo sapiens
ttaattctaggtcct

SEQ ID NO: 411938 - DNA, 15 bp, Homo sapiens
tttaattctaggtcc

SEQ ID NO: 411939 - DNA, 15 bp, Homo sapiens
gtttaattctaggtc

SEQ ID NO: 411940 - DNA, 15 bp, Homo sapiens
ggtttaattctaggt

SEQ ID NO: 411941 - DNA, 15 bp, Homo sapiens
gggtttaattctagg

SEQ ID NO: 411942 - DNA, 15 bp, Homo sapiens
ggggtttaattctag

SEQ ID NO: 411943 - DNA, 15 bp, Homo sapiens
gggggtttaattcta

SEQ ID NO: 411944 - DNA, 15 bp, Homo sapiens
tgggggtttaattct

SEQ ID NO: 411945 - DNA, 15 bp, Homo sapiens
atgggggtttaattc

SEQ ID NO: 411946 - DNA, 15 bp, Homo sapiens
aatgggggtttaatt

SEQ ID NO: 411947 - DNA, 15 bp, Homo sapiens
taatgggggtttaat

SEQ ID NO: 411948 - DNA, 15 bp, Homo sapiens
ataatgggggtttaa

SEQ ID NO: 411949 - DNA, 15 bp, Homo sapiens
aataatgggggttta

SEQ ID NO: 411950 - DNA, 15 bp, Homo sapiens
aaataatgggggttt

SEQ ID NO: 411951 - DNA, 15 bp, Homo sapiens
caaataatgggggtt

SEQ ID NO: 411952 - DNA, 15 bp, Homo sapiens
tcaaataatgggggt

SEQ ID NO: 411953 - DNA, 15 bp, Homo sapiens
atcaaataatggggg

SEQ ID NO: 411954 - DNA, 15 bp, Homo sapiens
aatcaaataatgggg

SEQ ID NO: 411955 - DNA, 15 bp, Homo sapiens
gaatcaaataatggg

SEQ ID NO: 411956 - DNA, 15 bp, Homo sapiens
cgaatcaaataatgg

SEQ ID NO: 411957 - DNA, 15 bp, Homo sapiens
acgaatcaaataatg

SEQ ID NO: 411958 - DNA, 15 bp, Homo sapiens
tacgaatcaaataat

SEQ ID NO: 411959 - DNA, 15 bp, Homo sapiens
ctacgaatcaaataa

SEQ ID NO: 411960 - DNA, 15 bp, Homo sapiens
actacgaatcaaata

SEQ ID NO: 411961 - DNA, 15 bp, Homo sapiens
gactacgaatcaaat

SEQ ID NO: 411962 - DNA, 15 bp, Homo sapiens
agactacgaatcaaa

SEQ ID NO: 411963 - DNA, 15 bp, Homo sapiens
tagactacgaatcaa

SEQ ID NO: 411964 - DNA, 15 bp, Homo sapiens
gtagactacgaatca

SEQ ID NO: 411965 - DNA, 15 bp, Homo sapiens
agtagactacgaatc

SEQ ID NO: 411966 - DNA, 15 bp, Homo sapiens
cagtagactacgaat

SEQ ID NO: 411967 - DNA, 15 bp, Homo sapiens
gcagtagactacgaa

SEQ ID NO: 411968 - DNA, 15 bp, Homo sapiens
agcagtagactacga

SEQ ID NO: 411969 - DNA, 15 bp, Homo sapiens
gagcagtagactacg

SEQ ID NO: 411970 - DNA, 15 bp, Homo sapiens
agagcagtagactac

SEQ ID NO: 411971 - DNA, 15 bp, Homo sapiens
aagagcagtagacta

SEQ ID NO: 411972 - DNA, 15 bp, Homo sapiens
aaagagcagtagact

SEQ ID NO: 411973 - DNA, 15 bp, Homo sapiens
gaaagagcagtagac

SEQ ID NO: 411974 - DNA, 15 bp, Homo sapiens
ggaaagagcagtaga

SEQ ID NO: 411975 - DNA, 15 bp, Homo sapiens
tggaaagagcagtag

SEQ ID NO: 411976 - DNA, 15 bp, Homo sapiens
gtggaaagagcagta

SEQ ID NO: 411977 - DNA, 15 bp, Homo sapiens
ggtggaaagagcagt

SEQ ID NO: 411978 - DNA, 15 bp, Homo sapiens
tggtggaaagagcag

SEQ ID NO: 411979 - DNA, 15 bp, Homo sapiens
gtggtggaaagagca

SEQ ID NO: 411980 - DNA, 15 bp, Homo sapiens
tgtggtggaaagagc

SEQ ID NO: 411981 - DNA, 15 bp, Homo sapiens
gtgtggtggaaagag

SEQ ID NO: 411982 - DNA, 15 bp, Homo sapiens
ggtgtggtggaaaga

SEQ ID NO: 411983 - DNA, 15 bp, Homo sapiens
tggtgtggtggaaag

SEQ ID NO: 411984 - DNA, 15 bp, Homo sapiens
atggtgtggtggaaa

SEQ ID NO: 411985 - DNA, 15 bp, Homo sapiens
aatggtgtggtggaa

SEQ ID NO: 411986 - DNA, 15 bp, Homo sapiens
aaatggtgtggtgga

SEQ ID NO: 411987 - DNA, 15 bp, Homo sapiens
taaatggtgtggtgg

SEQ ID NO: 411988 - DNA, 15 bp, Homo sapiens
gtaaatggtgtggtg

SEQ ID NO: 411989 - DNA, 15 bp, Homo sapiens
tgtaaatggtgtggt

SEQ ID NO: 411990 - DNA, 15 bp, Homo sapiens
ttgtaaatggtgtgg

SEQ ID NO: 411991 - DNA, 15 bp, Homo sapiens
attgtaaatggtgtg

SEQ ID NO: 411992 - DNA, 15 bp, Homo sapiens
aattgtaaatggtgt

SEQ ID NO: 411993 - DNA, 15 bp, Homo sapiens
aaattgtaaatggtg

SEQ ID NO: 411994 - DNA, 15 bp, Homo sapiens
aaaattgtaaatggt

SEQ ID NO: 411995 - DNA, 15 bp, Homo sapiens
caaaattgtaaatgg

SEQ ID NO: 411996 - DNA, 15 bp, Homo sapiens
acaaaattgtaaatg

SEQ ID NO: 411997 - DNA, 15 bp, Homo sapiens
gacaaaattgtaaat

SEQ ID NO: 411998 - DNA, 15 bp, Homo sapiens
tgacaaaattgtaaa

SEQ ID NO: 411999 - DNA, 15 bp, Homo sapiens
ttgacaaaattgtaa

SEQ ID NO: 412000 - DNA, 15 bp, Homo sapiens
tttgacaaaattgta

SEQ ID NO: 412001 - DNA, 15 bp, Homo sapiens
gtttgacaaaattgt

SEQ ID NO: 412002 - DNA, 15 bp, Homo sapiens
tgtttgacaaaattg

SEQ ID NO: 412003 - DNA, 15 bp, Homo sapiens
atgtttgacaaaatt

SEQ ID NO: 412004 - DNA, 15 bp, Homo sapiens
tatgtttgacaaaat

SEQ ID NO: 412005 - DNA, 15 bp, Homo sapiens
ttatgtttgacaaaa

SEQ ID NO: 412006 - DNA, 15 bp, Homo sapiens
tttatgtttgacaaa

SEQ ID NO: 412007 - DNA, 15 bp, Homo sapiens
ttttatgtttgacaa

SEQ ID NO: 412008 - DNA, 15 bp, Homo sapiens
attttatgtttgaca

SEQ ID NO: 412009 - DNA, 15 bp, Homo sapiens
gattttatgtttgac

SEQ ID NO: 412010 - DNA, 15 bp, Homo sapiens
agattttatgtttga

SEQ ID NO: 412011 - DNA, 15 bp, Homo sapiens
tagattttatgtttg

SEQ ID NO: 412012 - DNA, 15 bp, Homo sapiens
gtagattttatgttt

SEQ ID NO: 412013 - DNA, 15 bp, Homo sapiens
tgtagattttatgtt

SEQ ID NO: 412014 - DNA, 15 bp, Homo sapiens
atgtagattttatgt

SEQ ID NO: 412015 - DNA, 15 bp, Homo sapiens
gatgtagattttatg

SEQ ID NO: 412016 - DNA, 15 bp, Homo sapiens
agatgtagattttat

SEQ ID NO: 412017 - DNA, 15 bp, Homo sapiens
gagatgtagatttta

SEQ ID NO: 412018 - DNA, 15 bp, Homo sapiens
tgagatgtagatttt

SEQ ID NO: 412019 - DNA, 15 bp, Homo sapiens
atgagatgtagattt

SEQ ID NO: 412020 - DNA, 15 bp, Homo sapiens
aatgagatgtagatt

SEQ ID NO: 412021 - DNA, 15 bp, Homo sapiens
taatgagatgtagat

SEQ ID NO: 412022 - DNA, 15 bp, Homo sapiens
ataatgagatgtaga

SEQ ID NO: 412023 - DNA, 15 bp, Homo sapiens
aataatgagatgtag

SEQ ID NO: 412024 - DNA, 15 bp, Homo sapiens
taataatgagatgta

SEQ ID NO: 412025 - DNA, 15 bp, Homo sapiens
ttaataatgagatgt

SEQ ID NO: 412026 - DNA, 15 bp, Homo sapiens
tttaataatgagatg

SEQ ID NO: 412027 - DNA, 15 bp, Homo sapiens
ttttaataatgagat

SEQ ID NO: 412028 - DNA, 15 bp, Homo sapiens
tttttaataatgaga

SEQ ID NO: 412029 - DNA, 15 bp, Homo sapiens
ctttttaataatgag

SEQ ID NO: 412030 - DNA, 15 bp, Homo sapiens
tctttttaataatga

SEQ ID NO: 412031 - DNA, 15 bp, Homo sapiens
ttctttttaataatg

SEQ ID NO: 412032 - DNA, 15 bp, Homo sapiens
tttctttttaataat

SEQ ID NO: 412033 - DNA, 15 bp, Homo sapiens
atttctttttaataa

SEQ ID NO: 412034 - DNA, 15 bp, Homo sapiens
tatttctttttaata

SEQ ID NO: 412035 - DNA, 15 bp, Homo sapiens
ttatttctttttaat

SEQ ID NO: 412036 - DNA, 15 bp, Homo sapiens
gttatttctttttaa

SEQ ID NO: 412037 - DNA, 15 bp, Homo sapiens
agttatttcttttta

SEQ ID NO: 412038 - DNA, 15 bp, Homo sapiens
aagttatttcttttt

SEQ ID NO: 412039 - DNA, 15 bp, Homo sapiens
gaagttatttctttt

SEQ ID NO: 412040 - DNA, 15 bp, Homo sapiens
cgaagttatttcttt

SEQ ID NO: 412041 - DNA, 15 bp, Homo sapiens
gcgaagttatttctt

SEQ ID NO: 412042 - DNA, 15 bp, Homo sapiens
tgcgaagttatttct

SEQ ID NO: 412043 - DNA, 15 bp, Homo sapiens
gtgcgaagttatttc

SEQ ID NO: 412044 - DNA, 15 bp, Homo sapiens
tgtgcgaagttattt

SEQ ID NO: 412045 - DNA, 15 bp, Homo sapiens
atgtgcgaagttatt

SEQ ID NO: 412046 - DNA, 15 bp, Homo sapiens
aatgtgcgaagttat

SEQ ID NO: 412047 - DNA, 15 bp, Homo sapiens
aaatgtgcgaagtta

SEQ ID NO: 412048 - DNA, 15 bp, Homo sapiens
aaaatgtgcgaagtt

SEQ ID NO: 412049 - DNA, 15 bp, Homo sapiens
caaaatgtgcgaagt

SEQ ID NO: 412050 - DNA, 15 bp, Homo sapiens
tcaaaatgtgcgaag

SEQ ID NO: 412051 - DNA, 15 bp, Homo sapiens
atcaaaatgtgcgaa

SEQ ID NO: 412052 - DNA, 15 bp, Homo sapiens
gatcaaaatgtgcga

SEQ ID NO: 412053 - DNA, 15 bp, Homo sapiens
agatcaaaatgtgcg

SEQ ID NO: 412054 - DNA, 15 bp, Homo sapiens
aagatcaaaatgtgc

SEQ ID NO: 412055 - DNA, 15 bp, Homo sapiens
aaagatcaaaatgtg

SEQ ID NO: 412056 - DNA, 15 bp, Homo sapiens
caaagatcaaaatgt

SEQ ID NO: 412057 - DNA, 15 bp, Homo sapiens
acaaagatcaaaatg

SEQ ID NO: 412058 - DNA, 15 bp, Homo sapiens
cacaaagatcaaaat

SEQ ID NO: 412059 - DNA, 15 bp, Homo sapiens
gcacaaagatcaaaa

SEQ ID NO: 412060 - DNA, 15 bp, Homo sapiens
tgcacaaagatcaaa

SEQ ID NO: 412061 - DNA, 15 bp, Homo sapiens
ttgcacaaagatcaa

SEQ ID NO: 412062 - DNA, 15 bp, Homo sapiens
tttgcacaaagatca

SEQ ID NO: 412063 - DNA, 15 bp, Homo sapiens
atttgcacaaagatc

SEQ ID NO: 412064 - DNA, 15 bp, Homo sapiens
tatttgcacaaagat

SEQ ID NO: 412065 - DNA, 15 bp, Homo sapiens
gtatttgcacaaaga

SEQ ID NO: 412066 - DNA, 15 bp, Homo sapiens
tgtatttgcacaaag

SEQ ID NO: 412067 - DNA, 15 bp, Homo sapiens
atgtatttgcacaaa

SEQ ID NO: 412068 - DNA, 15 bp, Homo sapiens
aatgtatttgcacaa

SEQ ID NO: 412069 - DNA, 15 bp, Homo sapiens
aaatgtatttgcaca

SEQ ID NO: 412070 - DNA, 15 bp, Homo sapiens
taaatgtatttgcac

SEQ ID NO: 412071 - DNA, 15 bp, Homo sapiens
ataaatgtatttgca

SEQ ID NO: 412072 - DNA, 15 bp, Homo sapiens
aataaatgtatttgc

SEQ ID NO: 412073 - DNA, 15 bp, Homo sapiens
taataaatgtatttg

SEQ ID NO: 412074 - DNA, 15 bp, Homo sapiens
ataataaatgtattt

SEQ ID NO: 412075 - DNA, 15 bp, Homo sapiens
tataataaatgtatt

SEQ ID NO: 412076 - DNA, 15 bp, Homo sapiens
ttataataaatgtat

SEQ ID NO: 412077 - DNA, 15 bp, Homo sapiens
gttataataaatgta

SEQ ID NO: 412078 - DNA, 15 bp, Homo sapiens
tgttataataaatgt

SEQ ID NO: 412079 - DNA, 15 bp, Homo sapiens
ttgttataataaatg

SEQ ID NO: 412080 - DNA, 15 bp, Homo sapiens
cttgttataataaat

SEQ ID NO: 412081 - DNA, 15 bp, Homo sapiens
tcttgttataataaa

SEQ ID NO: 412082 - DNA, 15 bp, Homo sapiens
ttcttgttataataa

SEQ ID NO: 412083 - DNA, 15 bp, Homo sapiens
tttcttgttataata

SEQ ID NO: 412084 - DNA, 15 bp, Homo sapiens
atttcttgttataat

SEQ ID NO: 412085 - DNA, 15 bp, Homo sapiens
catttcttgttataa

SEQ ID NO: 412086 - DNA, 15 bp, Homo sapiens
acatttcttgttata

SEQ ID NO: 412087 - DNA, 15 bp, Homo sapiens
cacatttcttgttat

SEQ ID NO: 412088 - DNA, 15 bp, Homo sapiens
ccacatttcttgtta

SEQ ID NO: 412089 - DNA, 15 bp, Homo sapiens
accacatttcttgtt

SEQ ID NO: 412090 - DNA, 15 bp, Homo sapiens
caccacatttcttgt

SEQ ID NO: 412091 - DNA, 15 bp, Homo sapiens
ccaccacatttcttg

SEQ ID NO: 412092 - DNA, 15 bp, Homo sapiens
gccaccacatttctt

SEQ ID NO: 412093 - DNA, 15 bp, Homo sapiens
tgccaccacatttct

SEQ ID NO: 412094 - DNA, 15 bp, Homo sapiens
gtgccaccacatttc

SEQ ID NO: 412095 - DNA, 15 bp, Homo sapiens
tgtgccaccacattt

SEQ ID NO: 412096 - DNA, 15 bp, Homo sapiens
gtgtgccaccacatt

SEQ ID NO: 412097 - DNA, 15 bp, Homo sapiens
agtgtgccaccacat

SEQ ID NO: 412098 - DNA, 15 bp, Homo sapiens
cagtgtgccaccaca

SEQ ID NO: 412099 - DNA, 15 bp, Homo sapiens
tcagtgtgccaccac

SEQ ID NO: 412100 - DNA, 15 bp, Homo sapiens
ctcagtgtgccacca

SEQ ID NO: 412101 - DNA, 15 bp, Homo sapiens
actcagtgtgccacc

SEQ ID NO: 412102 - DNA, 15 bp, Homo sapiens
aactcagtgtgccac

SEQ ID NO: 412103 - DNA, 15 bp, Homo sapiens
taactcagtgtgcca

SEQ ID NO: 412104 - DNA, 15 bp, Homo sapiens
ataactcagtgtgcc

SEQ ID NO: 412105 - DNA, 15 bp, Homo sapiens
tataactcagtgtgc

SEQ ID NO: 412106 - DNA, 15 bp, Homo sapiens
ttataactcagtgtg

SEQ ID NO: 412107 - DNA, 15 bp, Homo sapiens
tttataactcagtgt

SEQ ID NO: 412108 - DNA, 15 bp, Homo sapiens
gtttataactcagtg

SEQ ID NO: 412109 - DNA, 15 bp, Homo sapiens
agtttataactcagt

SEQ ID NO: 412110 - DNA, 15 bp, Homo sapiens
cagtttataactcag

SEQ ID NO: 412111 - DNA, 15 bp, Homo sapiens
tcagtttataactca

SEQ ID NO: 412112 - DNA, 15 bp, Homo sapiens
atcagtttataactc

SEQ ID NO: 412113 - DNA, 15 bp, Homo sapiens
aatcagtttataact

SEQ ID NO: 412114 - DNA, 15 bp, Homo sapiens
aaatcagtttataac

SEQ ID NO: 412115 - DNA, 15 bp, Homo sapiens
aaaatcagtttataa

SEQ ID NO: 412116 - DNA, 15 bp, Homo sapiens
aaaaatcagtttata

SEQ ID NO: 412117 - DNA, 15 bp, Homo sapiens
gaaaaatcagtttat

SEQ ID NO: 412118 - DNA, 15 bp, Homo sapiens
tgaaaaatcagttta

SEQ ID NO: 412119 - DNA, 15 bp, Homo sapiens
atgaaaaatcagttt

SEQ ID NO: 412120 - DNA, 15 bp, Homo sapiens
catgaaaaatcagtt

SEQ ID NO: 412121 - DNA, 15 bp, Homo sapiens
tcatgaaaaatcagt

SEQ ID NO: 412122 - DNA, 15 bp, Homo sapiens
ttcatgaaaaatcag

SEQ ID NO: 412123 - DNA, 15 bp, Homo sapiens
attcatgaaaaatca

SEQ ID NO: 412124 - DNA, 15 bp, Homo sapiens
aattcatgaaaaatc

SEQ ID NO: 412125 - DNA, 15 bp, Homo sapiens
caattcatgaaaaat

SEQ ID NO: 412126 - DNA, 15 bp, Homo sapiens
acaattcatgaaaaa

SEQ ID NO: 412127 - DNA, 15 bp, Homo sapiens
gacaattcatgaaaa

SEQ ID NO: 412128 - DNA, 15 bp, Homo sapiens
tgacaattcatgaaa

SEQ ID NO: 412129 - DNA, 15 bp, Homo sapiens
gtgacaattcatgaa

SEQ ID NO: 412130 - DNA, 15 bp, Homo sapiens
ggtgacaattcatga

SEQ ID NO: 412131 - DNA, 15 bp, Homo sapiens
gggtgacaattcatg

SEQ ID NO: 412132 - DNA, 15 bp, Homo sapiens
tgggtgacaattcat

SEQ ID NO: 412133 - DNA, 15 bp, Homo sapiens
ttgggtgacaattca

SEQ ID NO: 412134 - DNA, 15 bp, Homo sapiens
tttgggtgacaattc

SEQ ID NO: 412135 - DNA, 15 bp, Homo sapiens
ttttgggtgacaatt

SEQ ID NO: 412136 - DNA, 15 bp, Homo sapiens
tttttgggtgacaat

SEQ ID NO: 412137 - DNA, 15 bp, Homo sapiens
ctttttgggtgacaa

SEQ ID NO: 412138 - DNA, 15 bp, Homo sapiens
gctttttgggtgaca

SEQ ID NO: 412139 - DNA, 15 bp, Homo sapiens
tgctttttgggtgac

SEQ ID NO: 412140 - DNA, 15 bp, Homo sapiens
ctgctttttgggtga

SEQ ID NO: 412141 - DNA, 15 bp, Homo sapiens
tctgctttttgggtg

SEQ ID NO: 412142 - DNA, 15 bp, Homo sapiens
ttctgctttttgggt

SEQ ID NO: 412143 - DNA, 15 bp, Homo sapiens
tttctgctttttggg

SEQ ID NO: 412144 - DNA, 15 bp, Homo sapiens
atttctgctttttgg

SEQ ID NO: 412145 - DNA, 15 bp, Homo sapiens
aatttctgctttttg

SEQ ID NO: 412146 - DNA, 15 bp, Homo sapiens
gaatttctgcttttt

SEQ ID NO: 412147 - DNA, 15 bp, Homo sapiens
agaatttctgctttt

SEQ ID NO: 412148 - DNA, 15 bp, Homo sapiens
aagaatttctgcttt

SEQ ID NO: 412149 - DNA, 15 bp, Homo sapiens
taagaatttctgctt

SEQ ID NO: 412150 - DNA, 15 bp, Homo sapiens
ttaagaatttctgct

SEQ ID NO: 412151 - DNA, 15 bp, Homo sapiens
attaagaatttctgc

SEQ ID NO: 412152 - DNA, 15 bp, Homo sapiens
tattaagaatttctg

SEQ ID NO: 412153 - DNA, 15 bp, Homo sapiens
gtattaagaatttct

SEQ ID NO: 412154 - DNA, 15 bp, Homo sapiens
ggtattaagaatttc

SEQ ID NO: 412155 - DNA, 15 bp, Homo sapiens
tggtattaagaattt

SEQ ID NO: 412156 - DNA, 15 bp, Homo sapiens
atggtattaagaatt

SEQ ID NO: 412157 - DNA, 15 bp, Homo sapiens
tatggtattaagaat

SEQ ID NO: 412158 - DNA, 15 bp, Homo sapiens
gtatggtattaagaa

SEQ ID NO: 412159 - DNA, 15 bp, Homo sapiens
ggtatggtattaaga

SEQ ID NO: 412160 - DNA, 15 bp, Homo sapiens
tggtatggtattaag

SEQ ID NO: 412161 - DNA, 15 bp, Homo sapiens
atggtatggtattaa

SEQ ID NO: 412162 - DNA, 15 bp, Homo sapiens
aatggtatggtatta

SEQ ID NO: 412163 - DNA, 15 bp, Homo sapiens
taatggtatggtatt

SEQ ID NO: 412164 - DNA, 15 bp, Homo sapiens
gtaatggtatggtat

SEQ ID NO: 412165 - DNA, 15 bp, Homo sapiens
tgtaatggtatggta

SEQ ID NO: 412166 - DNA, 15 bp, Homo sapiens
ttgtaatggtatggt

SEQ ID NO: 412167 - DNA, 15 bp, Homo sapiens
gttgtaatggtatgg

SEQ ID NO: 412168 - DNA, 15 bp, Homo sapiens
tgttgtaatggtatg

SEQ ID NO: 412169 - DNA, 15 bp, Homo sapiens
atgttgtaatggtat

SEQ ID NO: 412170 - DNA, 15 bp, Homo sapiens
tatgttgtaatggta

SEQ ID NO: 412171 - DNA, 15 bp, Homo sapiens
atatgttgtaatggt

SEQ ID NO: 412172 - DNA, 15 bp, Homo sapiens
aatatgttgtaatgg

SEQ ID NO: 412173 - DNA, 15 bp, Homo sapiens
taatatgttgtaatg

SEQ ID NO: 412174 - DNA, 15 bp, Homo sapiens
gtaatatgttgtaat

SEQ ID NO: 412175 - DNA, 15 bp, Homo sapiens
tgtaatatgttgtaa

SEQ ID NO: 412176 - DNA, 15 bp, Homo sapiens
atgtaatatgttgta

SEQ ID NO: 412177 - DNA, 15 bp, Homo sapiens
aatgtaatatgttgt

SEQ ID NO: 412178 - DNA, 15 bp, Homo sapiens
gaatgtaatatgttg

SEQ ID NO: 412179 - DNA, 15 bp, Homo sapiens
tgaatgtaatatgtt

SEQ ID NO: 412180 - DNA, 15 bp, Homo sapiens
atgaatgtaatatgt

SEQ ID NO: 412181 - DNA, 15 bp, Homo sapiens
catgaatgtaatatg

SEQ ID NO: 412182 - DNA, 15 bp, Homo sapiens
gcatgaatgtaatat

SEQ ID NO: 412183 - DNA, 15 bp, Homo sapiens
tgcatgaatgtaata

SEQ ID NO: 412184 - DNA, 15 bp, Homo sapiens
gtgcatgaatgtaat

SEQ ID NO: 412185 - DNA, 15 bp, Homo sapiens
ggtgcatgaatgtaa

SEQ ID NO: 412186 - DNA, 15 bp, Homo sapiens
aggtgcatgaatgta

SEQ ID NO: 412187 - DNA, 15 bp, Homo sapiens
gaggtgcatgaatgt

SEQ ID NO: 412188 - DNA, 15 bp, Homo sapiens
agaggtgcatgaatg

SEQ ID NO: 412189 - DNA, 15 bp, Homo sapiens
aagaggtgcatgaat

SEQ ID NO: 412190 - DNA, 15 bp, Homo sapiens
aaagaggtgcatgaa

SEQ ID NO: 412191 - DNA, 15 bp, Homo sapiens
aaaagaggtgcatga

SEQ ID NO: 412192 - DNA, 15 bp, Homo sapiens
aaaaagaggtgcatg

SEQ ID NO: 412193 - DNA, 15 bp, Homo sapiens
aaaaaagaggtgcat

SEQ ID NO: 412194 - DNA, 15 bp, Homo sapiens
caaaaaagaggtgca

SEQ ID NO: 412195 - DNA, 15 bp, Homo sapiens
ccaaaaaagaggtgc

SEQ ID NO: 412196 - DNA, 15 bp, Homo sapiens
accaaaaaagaggtg

SEQ ID NO: 412197 - DNA, 15 bp, Homo sapiens
gaccaaaaaagaggt

SEQ ID NO: 412198 - DNA, 15 bp, Homo sapiens
tgaccaaaaaagagg

SEQ ID NO: 412199 - DNA, 15 bp, Homo sapiens
ttgaccaaaaaagag

SEQ ID NO: 412200 - DNA, 15 bp, Homo sapiens
attgaccaaaaaaga

SEQ ID NO: 412201 - DNA, 15 bp, Homo sapiens
cattgaccaaaaaag

SEQ ID NO: 412202 - DNA, 15 bp, Homo sapiens
tcattgaccaaaaaa

SEQ ID NO: 412203 - DNA, 15 bp, Homo sapiens
atcattgaccaaaaa

SEQ ID NO: 412204 - DNA, 15 bp, Homo sapiens
catcattgaccaaaa

SEQ ID NO: 412205 - DNA, 15 bp, Homo sapiens
tcatcattgaccaaa

SEQ ID NO: 412206 - DNA, 15 bp, Homo sapiens
ttcatcattgaccaa

SEQ ID NO: 412207 - DNA, 15 bp, Homo sapiens
gttcatcattgacca

SEQ ID NO: 412208 - DNA, 15 bp, Homo sapiens
agttcatcattgacc

SEQ ID NO: 412209 - DNA, 15 bp, Homo sapiens
tagttcatcattgac

SEQ ID NO: 412210 - DNA, 15 bp, Homo sapiens
atagttcatcattga

SEQ ID NO: 412211 - DNA, 15 bp, Homo sapiens
tatagttcatcattg

SEQ ID NO: 412212 - DNA, 15 bp, Homo sapiens
atatagttcatcatt

SEQ ID NO: 412213 - DNA, 15 bp, Homo sapiens
tatatagttcatcat

SEQ ID NO: 412214 - DNA, 15 bp, Homo sapiens
ctatatagttcatca

SEQ ID NO: 412215 - DNA, 15 bp, Homo sapiens
cctatatagttcatc

SEQ ID NO: 412216 - DNA, 15 bp, Homo sapiens
tcctatatagttcat

SEQ ID NO: 412217 - DNA, 15 bp, Homo sapiens
gtcctatatagttca

SEQ ID NO: 412218 - DNA, 15 bp, Homo sapiens
tgtcctatatagttc

SEQ ID NO: 412219 - DNA, 15 bp, Homo sapiens
atgtcctatatagtt

SEQ ID NO: 412220 - DNA, 15 bp, Homo sapiens
tatgtcctatatagt

SEQ ID NO: 412221 - DNA, 15 bp, Homo sapiens
ctatgtcctatatag

SEQ ID NO: 412222 - DNA, 15 bp, Homo sapiens
cctatgtcctatata

SEQ ID NO: 412223 - DNA, 15 bp, Homo sapiens
tcctatgtcctatat

SEQ ID NO: 412224 - DNA, 15 bp, Homo sapiens
gtcctatgtcctata

SEQ ID NO: 412225 - DNA, 15 bp, Homo sapiens
tgtcctatgtcctat

SEQ ID NO: 412226 - DNA, 15 bp, Homo sapiens
ttgtcctatgtccta

SEQ ID NO: 412227 - DNA, 15 bp, Homo sapiens
attgtcctatgtcct

SEQ ID NO: 412228 - DNA, 15 bp, Homo sapiens
cattgtcctatgtcc

SEQ ID NO: 412229 - DNA, 15 bp, Homo sapiens
ccattgtcctatgtc

SEQ ID NO: 412230 - DNA, 15 bp, Homo sapiens
accattgtcctatgt

SEQ ID NO: 412231 - DNA, 15 bp, Homo sapiens
gaccattgtcctatg

SEQ ID NO: 412232 - DNA, 15 bp, Homo sapiens
agaccattgtcctat

SEQ ID NO: 412233 - DNA, 15 bp, Homo sapiens
gagaccattgtccta

SEQ ID NO: 412234 - DNA, 15 bp, Homo sapiens
tgagaccattgtcct

SEQ ID NO: 412235 - DNA, 15 bp, Homo sapiens
atgagaccattgtcc

SEQ ID NO: 412236 - DNA, 15 bp, Homo sapiens
tatgagaccattgtc

SEQ ID NO: 412237 - DNA, 15 bp, Homo sapiens
ttatgagaccattgt

SEQ ID NO: 412238 - DNA, 15 bp, Homo sapiens
cttatgagaccattg

SEQ ID NO: 412239 - DNA, 15 bp, Homo sapiens
tcttatgagaccatt

SEQ ID NO: 412240 - DNA, 15 bp, Homo sapiens
atcttatgagaccat

SEQ ID NO: 412241 - DNA, 15 bp, Homo sapiens
aatcttatgagacca

SEQ ID NO: 412242 - DNA, 15 bp, Homo sapiens
taatcttatgagacc

SEQ ID NO: 412243 - DNA, 15 bp, Homo sapiens
ataatcttatgagac

SEQ ID NO: 412244 - DNA, 15 bp, Homo sapiens
tataatcttatgaga

SEQ ID NO: 412245 - DNA, 15 bp, Homo sapiens
ttataatcttatgag

SEQ ID NO: 412246 - DNA, 15 bp, Homo sapiens
attataatcttatga

SEQ ID NO: 412247 - DNA, 15 bp, Homo sapiens
tattataatcttatg

SEQ ID NO: 412248 - DNA, 15 bp, Homo sapiens
gtattataatcttat

SEQ ID NO: 412249 - DNA, 15 bp, Homo sapiens
agtattataatctta

SEQ ID NO: 412250 - DNA, 15 bp, Homo sapiens
cagtattataatctt

SEQ ID NO: 412251 - DNA, 15 bp, Homo sapiens
acagtattataatct

SEQ ID NO: 412252 - DNA, 15 bp, Homo sapiens
tacagtattataatc

SEQ ID NO: 412253 - DNA, 15 bp, Homo sapiens
ctacagtattataat

SEQ ID NO: 412254 - DNA, 15 bp, Homo sapiens
actacagtattataa

SEQ ID NO: 412255 - DNA, 15 bp, Homo sapiens
aactacagtattata

SEQ ID NO: 412256 - DNA, 15 bp, Homo sapiens
aaactacagtattat

SEQ ID NO: 412257 - DNA, 15 bp, Homo sapiens
aaaactacagtatta

SEQ ID NO: 412258 - DNA, 15 bp, Homo sapiens
taaaactacagtatt

SEQ ID NO: 412259 - DNA, 15 bp, Homo sapiens
gtaaaactacagtat

SEQ ID NO: 412260 - DNA, 15 bp, Homo sapiens
agtaaaactacagta

SEQ ID NO: 412261 - DNA, 15 bp, Homo sapiens
gagtaaaactacagt

SEQ ID NO: 412262 - DNA, 15 bp, Homo sapiens
agagtaaaactacag

SEQ ID NO: 412263 - DNA, 15 bp, Homo sapiens
tagagtaaaactaca

SEQ ID NO: 412264 - DNA, 15 bp, Homo sapiens
gtagagtaaaactac

SEQ ID NO: 412265 - DNA, 15 bp, Homo sapiens
ggtagagtaaaacta

SEQ ID NO: 412266 - DNA, 15 bp, Homo sapiens
aggtagagtaaaact

SEQ ID NO: 412267 - DNA, 15 bp, Homo sapiens
aaggtagagtaaaac

SEQ ID NO: 412268 - DNA, 15 bp, Homo sapiens
aaaggtagagtaaaa

SEQ ID NO: 412269 - DNA, 15 bp, Homo sapiens
aaaaggtagagtaaa

SEQ ID NO: 412270 - DNA, 15 bp, Homo sapiens
gaaaaggtagagtaa

SEQ ID NO: 412271 - DNA, 15 bp, Homo sapiens
agaaaaggtagagta

SEQ ID NO: 412272 - DNA, 15 bp, Homo sapiens
tagaaaaggtagagt

SEQ ID NO: 412273 - DNA, 15 bp, Homo sapiens
atagaaaaggtagag

SEQ ID NO: 412274 - DNA, 15 bp, Homo sapiens
catagaaaaggtaga

SEQ ID NO: 412275 - DNA, 15 bp, Homo sapiens
acatagaaaaggtag

SEQ ID NO: 412276 - DNA, 15 bp, Homo sapiens
aacatagaaaaggta

SEQ ID NO: 412277 - DNA, 15 bp, Homo sapiens
aaacatagaaaaggt

SEQ ID NO: 412278 - DNA, 15 bp, Homo sapiens
taaacatagaaaagg

SEQ ID NO: 412279 - DNA, 15 bp, Homo sapiens
ttaaacatagaaaag

SEQ ID NO: 412280 - DNA, 15 bp, Homo sapiens
tttaaacatagaaaa

SEQ ID NO: 412281 - DNA, 15 bp, Homo sapiens
atttaaacatagaaa

SEQ ID NO: 412282 - DNA, 15 bp, Homo sapiens
tatttaaacatagaa

SEQ ID NO: 412283 - DNA, 15 bp, Homo sapiens
atatttaaacataga

SEQ ID NO: 412284 - DNA, 15 bp, Homo sapiens
tatatttaaacatag

SEQ ID NO: 412285 - DNA, 15 bp, Homo sapiens
gtatatttaaacata

SEQ ID NO: 412286 - DNA, 15 bp, Homo sapiens
tgtatatttaaacat

SEQ ID NO: 412287 - DNA, 15 bp, Homo sapiens
ttgtatatttaaaca

SEQ ID NO: 412288 - DNA, 15 bp, Homo sapiens
tttgtatatttaaac

SEQ ID NO: 412289 - DNA, 15 bp, Homo sapiens
atttgtatatttaaa

SEQ ID NO: 412290 - DNA, 15 bp, Homo sapiens
tatttgtatatttaa

SEQ ID NO: 412291 - DNA, 15 bp, Homo sapiens
gtatttgtatattta

SEQ ID NO: 412292 - DNA, 15 bp, Homo sapiens
agtatttgtatattt

SEQ ID NO: 412293 - DNA, 15 bp, Homo sapiens
aagtatttgtatatt

SEQ ID NO: 412294 - DNA, 15 bp, Homo sapiens
taagtatttgtatat

SEQ ID NO: 412295 - DNA, 15 bp, Homo sapiens
gtaagtatttgtata

SEQ ID NO: 412296 - DNA, 15 bp, Homo sapiens
ggtaagtatttgtat

SEQ ID NO: 412297 - DNA, 15 bp, Homo sapiens
tggtaagtatttgta

SEQ ID NO: 412298 - DNA, 15 bp, Homo sapiens
atggtaagtatttgt

SEQ ID NO: 412299 - DNA, 15 bp, Homo sapiens
aatggtaagtatttg

SEQ ID NO: 412300 - DNA, 15 bp, Homo sapiens
caatggtaagtattt

SEQ ID NO: 412301 - DNA, 15 bp, Homo sapiens
acaatggtaagtatt

SEQ ID NO: 412302 - DNA, 15 bp, Homo sapiens
cacaatggtaagtat

SEQ ID NO: 412303 - DNA, 15 bp, Homo sapiens
acacaatggtaagta

SEQ ID NO: 412304 - DNA, 15 bp, Homo sapiens
aacacaatggtaagt

SEQ ID NO: 412305 - DNA, 15 bp, Homo sapiens
caacacaatggtaag

SEQ ID NO: 412306 - DNA, 15 bp, Homo sapiens
gcaacacaatggtaa

SEQ ID NO: 412307 - DNA, 15 bp, Homo sapiens
tgcaacacaatggta

SEQ ID NO: 412308 - DNA, 15 bp, Homo sapiens
ttgcaacacaatggt

SEQ ID NO: 412309 - DNA, 15 bp, Homo sapiens
attgcaacacaatgg

SEQ ID NO: 412310 - DNA, 15 bp, Homo sapiens
aattgcaacacaatg

SEQ ID NO: 412311 - DNA, 15 bp, Homo sapiens
caattgcaacacaat

SEQ ID NO: 412312 - DNA, 15 bp, Homo sapiens
gcaattgcaacacaa

SEQ ID NO: 412313 - DNA, 15 bp, Homo sapiens
ggcaattgcaacaca

SEQ ID NO: 412314 - DNA, 15 bp, Homo sapiens
aggcaattgcaacac

SEQ ID NO: 412315 - DNA, 15 bp, Homo sapiens
taggcaattgcaaca

SEQ ID NO: 412316 - DNA, 15 bp, Homo sapiens
gtaggcaattgcaac

SEQ ID NO: 412317 - DNA, 15 bp, Homo sapiens
tgtaggcaattgcaa

SEQ ID NO: 412318 - DNA, 15 bp, Homo sapiens
ctgtaggcaattgca

SEQ ID NO: 412319 - DNA, 15 bp, Homo sapiens
actgtaggcaattgc

SEQ ID NO: 412320 - DNA, 15 bp, Homo sapiens
cactgtaggcaattg

SEQ ID NO: 412321 - DNA, 15 bp, Homo sapiens
gcactgtaggcaatt

SEQ ID NO: 412322 - DNA, 15 bp, Homo sapiens
agcactgtaggcaat

SEQ ID NO: 412323 - DNA, 15 bp, Homo sapiens
gagcactgtaggcaa

SEQ ID NO: 412324 - DNA, 15 bp, Homo sapiens
tgagcactgtaggca

SEQ ID NO: 412325 - DNA, 15 bp, Homo sapiens
ctgagcactgtaggc

SEQ ID NO: 412326 - DNA, 15 bp, Homo sapiens
actgagcactgtagg

SEQ ID NO: 412327 - DNA, 15 bp, Homo sapiens
tactgagcactgtag

SEQ ID NO: 412328 - DNA, 15 bp, Homo sapiens
ttactgagcactgta

SEQ ID NO: 412329 - DNA, 15 bp, Homo sapiens
tttactgagcactgt

SEQ ID NO: 412330 - DNA, 15 bp, Homo sapiens
ctttactgagcactg

SEQ ID NO: 412331 - DNA, 15 bp, Homo sapiens
actttactgagcact

SEQ ID NO: 412332 - DNA, 15 bp, Homo sapiens
tactttactgagcac

SEQ ID NO: 412333 - DNA, 15 bp, Homo sapiens
ttactttactgagca

SEQ ID NO: 412334 - DNA, 15 bp, Homo sapiens
gttactttactgagc

SEQ ID NO: 412335 - DNA, 15 bp, Homo sapiens
tgttactttactgag

SEQ ID NO: 412336 - DNA, 15 bp, Homo sapiens
ttgttactttactga

SEQ ID NO: 412337 - DNA, 15 bp, Homo sapiens
tttgttactttactg

SEQ ID NO: 412338 - DNA, 15 bp, Homo sapiens
gtttgttactttact

SEQ ID NO: 412339 - DNA, 15 bp, Homo sapiens
agtttgttactttac

SEQ ID NO: 412340 - DNA, 15 bp, Homo sapiens
aagtttgttacttta

SEQ ID NO: 412341 - DNA, 15 bp, Homo sapiens
gaagtttgttacttt

SEQ ID NO: 412342 - DNA, 15 bp, Homo sapiens
tgaagtttgttactt

SEQ ID NO: 412343 - DNA, 15 bp, Homo sapiens
ctgaagtttgttact

SEQ ID NO: 412344 - DNA, 15 bp, Homo sapiens
tctgaagtttgttac

SEQ ID NO: 412345 - DNA, 15 bp, Homo sapiens
atctgaagtttgtta

SEQ ID NO: 412346 - DNA, 15 bp, Homo sapiens
aatctgaagtttgtt

SEQ ID NO: 412347 - DNA, 15 bp, Homo sapiens
aaatctgaagtttgt

SEQ ID NO: 412348 - DNA, 15 bp, Homo sapiens
caaatctgaagtttg

SEQ ID NO: 412349 - DNA, 15 bp, Homo sapiens
acaaatctgaagttt

SEQ ID NO: 412350 - DNA, 15 bp, Homo sapiens
tacaaatctgaagtt

SEQ ID NO: 412351 - DNA, 15 bp, Homo sapiens
ctacaaatctgaagt

SEQ ID NO: 412352 - DNA, 15 bp, Homo sapiens
gctacaaatctgaag

SEQ ID NO: 412353 - DNA, 15 bp, Homo sapiens
ggctacaaatctgaa

SEQ ID NO: 412354 - DNA, 15 bp, Homo sapiens
aggctacaaatctga

SEQ ID NO: 412355 - DNA, 15 bp, Homo sapiens
taggctacaaatctg

SEQ ID NO: 412356 - DNA, 15 bp, Homo sapiens
ctaggctacaaatct

SEQ ID NO: 412357 - DNA, 15 bp, Homo sapiens
cctaggctacaaatc

SEQ ID NO: 412358 - DNA, 15 bp, Homo sapiens
tcctaggctacaaat

SEQ ID NO: 412359 - DNA, 15 bp, Homo sapiens
ctcctaggctacaaa

SEQ ID NO: 412360 - DNA, 15 bp, Homo sapiens
gctcctaggctacaa

SEQ ID NO: 412361 - DNA, 15 bp, Homo sapiens
tgctcctaggctaca

SEQ ID NO: 412362 - DNA, 15 bp, Homo sapiens
ttgctcctaggctac

SEQ ID NO: 412363 - DNA, 15 bp, Homo sapiens
attgctcctaggcta

SEQ ID NO: 412364 - DNA, 15 bp, Homo sapiens
tattgctcctaggct

SEQ ID NO: 412365 - DNA, 15 bp, Homo sapiens
ctattgctcctaggc

SEQ ID NO: 412366 - DNA, 15 bp, Homo sapiens
cctattgctcctagg

SEQ ID NO: 412367 - DNA, 15 bp, Homo sapiens
gcctattgctcctag

SEQ ID NO: 412368 - DNA, 15 bp, Homo sapiens
agcctattgctccta

SEQ ID NO: 412369 - DNA, 15 bp, Homo sapiens
tagcctattgctcct

SEQ ID NO: 412370 - DNA, 15 bp, Homo sapiens
gtagcctattgctcc

SEQ ID NO: 412371 - DNA, 15 bp, Homo sapiens
tgtagcctattgctc

SEQ ID NO: 412372 - DNA, 15 bp, Homo sapiens
gtgtagcctattgct

SEQ ID NO: 412373 - DNA, 15 bp, Homo sapiens
agtgtagcctattgc

SEQ ID NO: 412374 - DNA, 15 bp, Homo sapiens
tagtgtagcctattg

SEQ ID NO: 412375 - DNA, 15 bp, Homo sapiens
atagtgtagcctatt

SEQ ID NO: 412376 - DNA, 15 bp, Homo sapiens
tatagtgtagcctat

SEQ ID NO: 412377 - DNA, 15 bp, Homo sapiens
atatagtgtagccta

SEQ ID NO: 412378 - DNA, 15 bp, Homo sapiens
tatatagtgtagcct

SEQ ID NO: 412379 - DNA, 15 bp, Homo sapiens
ctatatagtgtagcc

SEQ ID NO: 412380 - DNA, 15 bp, Homo sapiens
actatatagtgtagc

SEQ ID NO: 412381 - DNA, 15 bp, Homo sapiens
gactatatagtgtag

SEQ ID NO: 412382 - DNA, 15 bp, Homo sapiens
agactatatagtgta

SEQ ID NO: 412383 - DNA, 15 bp, Homo sapiens
tagactatatagtgt

SEQ ID NO: 412384 - DNA, 15 bp, Homo sapiens
ttagactatatagtg

SEQ ID NO: 412385 - DNA, 15 bp, Homo sapiens
cttagactatatagt

SEQ ID NO: 412386 - DNA, 15 bp, Homo sapiens
acttagactatatag

SEQ ID NO: 412387 - DNA, 15 bp, Homo sapiens
cacttagactatata

SEQ ID NO: 412388 - DNA, 15 bp, Homo sapiens
acacttagactatat

SEQ ID NO: 412389 - DNA, 15 bp, Homo sapiens
cacacttagactata

SEQ ID NO: 412390 - DNA, 15 bp, Homo sapiens
acacacttagactat

SEQ ID NO: 412391 - DNA, 15 bp, Homo sapiens
tacacacttagacta

SEQ ID NO: 412392 - DNA, 15 bp, Homo sapiens
ctacacacttagact

SEQ ID NO: 412393 - DNA, 15 bp, Homo sapiens
actacacacttagac

SEQ ID NO: 412394 - DNA, 15 bp, Homo sapiens
tactacacacttaga

SEQ ID NO: 412395 - DNA, 15 bp, Homo sapiens
ctactacacacttag

SEQ ID NO: 412396 - DNA, 15 bp, Homo sapiens
cctactacacactta

SEQ ID NO: 412397 - DNA, 15 bp, Homo sapiens
tcctactacacactt

SEQ ID NO: 412398 - DNA, 15 bp, Homo sapiens
atcctactacacact

SEQ ID NO: 412399 - DNA, 15 bp, Homo sapiens
tatcctactacacac

SEQ ID NO: 412400 - DNA, 15 bp, Homo sapiens
atatcctactacaca

SEQ ID NO: 412401 - DNA, 15 bp, Homo sapiens
tatatcctactacac

SEQ ID NO: 412402 - DNA, 15 bp, Homo sapiens
gtatatcctactaca

SEQ ID NO: 412403 - DNA, 15 bp, Homo sapiens
ggtatatcctactac

SEQ ID NO: 412404 - DNA, 15 bp, Homo sapiens
tggtatatcctacta

SEQ ID NO: 412405 - DNA, 15 bp, Homo sapiens
atggtatatcctact

SEQ ID NO: 412406 - DNA, 15 bp, Homo sapiens
gatggtatatcctac

SEQ ID NO: 412407 - DNA, 15 bp, Homo sapiens
agatggtatatccta

SEQ ID NO: 412408 - DNA, 15 bp, Homo sapiens
tagatggtatatcct

SEQ ID NO: 412409 - DNA, 15 bp, Homo sapiens
ttagatggtatatcc

SEQ ID NO: 412410 - DNA, 15 bp, Homo sapiens
cttagatggtatatc

SEQ ID NO: 412411 - DNA, 15 bp, Homo sapiens
acttagatggtatat

SEQ ID NO: 412412 - DNA, 15 bp, Homo sapiens
aacttagatggtata

SEQ ID NO: 412413 - DNA, 15 bp, Homo sapiens
aaacttagatggtat

SEQ ID NO: 412414 - DNA, 15 bp, Homo sapiens
caaacttagatggta

SEQ ID NO: 412415 - DNA, 15 bp, Homo sapiens
acaaacttagatggt

SEQ ID NO: 412416 - DNA, 15 bp, Homo sapiens
cacaaacttagatgg

SEQ ID NO: 412417 - DNA, 15 bp, Homo sapiens
acacaaacttagatg

SEQ ID NO: 412418 - DNA, 15 bp, Homo sapiens
tacacaaacttagat

SEQ ID NO: 412419 - DNA, 15 bp, Homo sapiens
ttacacaaacttaga

SEQ ID NO: 412420 - DNA, 15 bp, Homo sapiens
tttacacaaacttag

SEQ ID NO: 412421 - DNA, 15 bp, Homo sapiens
ttttacacaaactta

SEQ ID NO: 412422 - DNA, 15 bp, Homo sapiens
attttacacaaactt

SEQ ID NO: 412423 - DNA, 15 bp, Homo sapiens
tattttacacaaact

SEQ ID NO: 412424 - DNA, 15 bp, Homo sapiens
gtattttacacaaac

SEQ ID NO: 412425 - DNA, 15 bp, Homo sapiens
tgtattttacacaaa

SEQ ID NO: 412426 - DNA, 15 bp, Homo sapiens
atgtattttacacaa

SEQ ID NO: 412427 - DNA, 15 bp, Homo sapiens
aatgtattttacaca

SEQ ID NO: 412428 - DNA, 15 bp, Homo sapiens
gaatgtattttacac

SEQ ID NO: 412429 - DNA, 15 bp, Homo sapiens
agaatgtattttaca

SEQ ID NO: 412430 - DNA, 15 bp, Homo sapiens
tagaatgtattttac

SEQ ID NO: 412431 - DNA, 15 bp, Homo sapiens
gtagaatgtatttta

SEQ ID NO: 412432 - DNA, 15 bp, Homo sapiens
cgtagaatgtatttt

SEQ ID NO: 412433 - DNA, 15 bp, Homo sapiens
acgtagaatgtattt

SEQ ID NO: 412434 - DNA, 15 bp, Homo sapiens
aacgtagaatgtatt

SEQ ID NO: 412435 - DNA, 15 bp, Homo sapiens
taacgtagaatgtat

SEQ ID NO: 412436 - DNA, 15 bp, Homo sapiens
gtaacgtagaatgta

SEQ ID NO: 412437 - DNA, 15 bp, Homo sapiens
agtaacgtagaatgt

SEQ ID NO: 412438 - DNA, 15 bp, Homo sapiens
gagtaacgtagaatg

SEQ ID NO: 412439 - DNA, 15 bp, Homo sapiens
tgagtaacgtagaat

SEQ ID NO: 412440 - DNA, 15 bp, Homo sapiens
gtgagtaacgtagaa

SEQ ID NO: 412441 - DNA, 15 bp, Homo sapiens
tgtgagtaacgtaga

SEQ ID NO: 412442 - DNA, 15 bp, Homo sapiens
ctgtgagtaacgtag

SEQ ID NO: 412443 - DNA, 15 bp, Homo sapiens
cctgtgagtaacgta

SEQ ID NO: 412444 - DNA, 15 bp, Homo sapiens
tcctgtgagtaacgt

SEQ ID NO: 412445 - DNA, 15 bp, Homo sapiens
gtcctgtgagtaacg

SEQ ID NO: 412446 - DNA, 15 bp, Homo sapiens
tgtcctgtgagtaac

SEQ ID NO: 412447 - DNA, 15 bp, Homo sapiens
ttgtcctgtgagtaa

SEQ ID NO: 412448 - DNA, 15 bp, Homo sapiens
tttgtcctgtgagta

SEQ ID NO: 412449 - DNA, 15 bp, Homo sapiens
ttttgtcctgtgagt

SEQ ID NO: 412450 - DNA, 15 bp, Homo sapiens
attttgtcctgtgag

SEQ ID NO: 412451 - DNA, 15 bp, Homo sapiens
gattttgtcctgtga

SEQ ID NO: 412452 - DNA, 15 bp, Homo sapiens
tgattttgtcctgtg

SEQ ID NO: 412453 - DNA, 15 bp, Homo sapiens
ttgattttgtcctgt

SEQ ID NO: 412454 - DNA, 15 bp, Homo sapiens
gttgattttgtcctg

SEQ ID NO: 412455 - DNA, 15 bp, Homo sapiens
tgttgattttgtcct

SEQ ID NO: 412456 - DNA, 15 bp, Homo sapiens
gtgttgattttgtcc

SEQ ID NO: 412457 - DNA, 15 bp, Homo sapiens
tgtgttgattttgtc

SEQ ID NO: 412458 - DNA, 15 bp, Homo sapiens
atgtgttgattttgt

SEQ ID NO: 412459 - DNA, 15 bp, Homo sapiens
aatgtgttgattttg

SEQ ID NO: 412460 - DNA, 15 bp, Homo sapiens
aaatgtgttgatttt

SEQ ID NO: 412461 - DNA, 15 bp, Homo sapiens
gaaatgtgttgattt

SEQ ID NO: 412462 - DNA, 15 bp, Homo sapiens
agaaatgtgttgatt

SEQ ID NO: 412463 - DNA, 15 bp, Homo sapiens
gagaaatgtgttgat

SEQ ID NO: 412464 - DNA, 15 bp, Homo sapiens
tgagaaatgtgttga

SEQ ID NO: 412465 - DNA, 15 bp, Homo sapiens
ctgagaaatgtgttg

SEQ ID NO: 412466 - DNA, 15 bp, Homo sapiens
tctgagaaatgtgtt

SEQ ID NO: 412467 - DNA, 15 bp, Homo sapiens
ttctgagaaatgtgt

SEQ ID NO: 412468 - DNA, 15 bp, Homo sapiens
tttctgagaaatgtg

SEQ ID NO: 412469 - DNA, 15 bp, Homo sapiens
ttttctgagaaatgt

SEQ ID NO: 412470 - DNA, 15 bp, Homo sapiens
attttctgagaaatg

SEQ ID NO: 412471 - DNA, 15 bp, Homo sapiens
tattttctgagaaat

SEQ ID NO: 412472 - DNA, 15 bp, Homo sapiens
atattttctgagaaa

SEQ ID NO: 412473 - DNA, 15 bp, Homo sapiens
gatattttctgagaa

SEQ ID NO: 412474 - DNA, 15 bp, Homo sapiens
ggatattttctgaga

SEQ ID NO: 412475 - DNA, 15 bp, Homo sapiens
tggatattttctgag

SEQ ID NO: 412476 - DNA, 15 bp, Homo sapiens
atggatattttctga

SEQ ID NO: 412477 - DNA, 15 bp, Homo sapiens
catggatattttctg

SEQ ID NO: 412478 - DNA, 15 bp, Homo sapiens
acatggatattttct

SEQ ID NO: 412479 - DNA, 15 bp, Homo sapiens
gacatggatattttc

SEQ ID NO: 412480 - DNA, 15 bp, Homo sapiens
tgacatggatatttt

SEQ ID NO: 412481 - DNA, 15 bp, Homo sapiens
atgacatggatattt

SEQ ID NO: 412482 - DNA, 15 bp, Homo sapiens
aatgacatggatatt

SEQ ID NO: 412483 - DNA, 15 bp, Homo sapiens
taatgacatggatat

SEQ ID NO: 412484 - DNA, 15 bp, Homo sapiens
ttaatgacatggata

SEQ ID NO: 412485 - DNA, 15 bp, Homo sapiens
cttaatgacatggat

SEQ ID NO: 412486 - DNA, 15 bp, Homo sapiens
gcttaatgacatgga

SEQ ID NO: 412487 - DNA, 15 bp, Homo sapiens
tgcttaatgacatgg

SEQ ID NO: 412488 - DNA, 15 bp, Homo sapiens
ctgcttaatgacatg

SEQ ID NO: 412489 - DNA, 15 bp, Homo sapiens
actgcttaatgacat

SEQ ID NO: 412490 - DNA, 15 bp, Homo sapiens
cactgcttaatgaca

SEQ ID NO: 412491 - DNA, 15 bp, Homo sapiens
gcactgcttaatgac

SEQ ID NO: 412492 - DNA, 15 bp, Homo sapiens
tgcactgcttaatga

SEQ ID NO: 412493 - DNA, 15 bp, Homo sapiens
atgcactgcttaatg

SEQ ID NO: 412494 - DNA, 15 bp, Homo sapiens
catgcactgcttaat

SEQ ID NO: 412495 - DNA, 15 bp, Homo sapiens
acatgcactgcttaa

SEQ ID NO: 412496 - DNA, 15 bp, Homo sapiens
cacatgcactgctta

SEQ ID NO: 412497 - DNA, 15 bp, Homo sapiens
acacatgcactgctt

SEQ ID NO: 412498 - DNA, 15 bp, Homo sapiens
cacacatgcactgct

SEQ ID NO: 412499 - DNA, 15 bp, Homo sapiens
acacacatgcactgc

SEQ ID NO: 412500 - DNA, 15 bp, Homo sapiens
tacacacatgcactg

SEQ ID NO: 412501 - DNA, 15 bp, Homo sapiens
gtacacacatgcact

SEQ ID NO: 412502 - DNA, 15 bp, Homo sapiens
agtacacacatgcac

SEQ ID NO: 412503 - DNA, 15 bp, Homo sapiens
aagtacacacatgca

SEQ ID NO: 412504 - DNA, 15 bp, Homo sapiens
gaagtacacacatgc

SEQ ID NO: 412505 - DNA, 15 bp, Homo sapiens
ggaagtacacacatg

SEQ ID NO: 412506 - DNA, 15 bp, Homo sapiens
aggaagtacacacat

SEQ ID NO: 412507 - DNA, 15 bp, Homo sapiens
aaggaagtacacaca

SEQ ID NO: 412508 - DNA, 15 bp, Homo sapiens
caaggaagtacacac

SEQ ID NO: 412509 - DNA, 15 bp, Homo sapiens
tcaaggaagtacaca

SEQ ID NO: 412510 - DNA, 15 bp, Homo sapiens
ctcaaggaagtacac

SEQ ID NO: 412511 - DNA, 15 bp, Homo sapiens
actcaaggaagtaca

SEQ ID NO: 412512 - DNA, 15 bp, Homo sapiens
gactcaaggaagtac

SEQ ID NO: 412513 - DNA, 15 bp, Homo sapiens
tgactcaaggaagta

SEQ ID NO: 412514 - DNA, 15 bp, Homo sapiens
ttgactcaaggaagt

SEQ ID NO: 412515 - DNA, 15 bp, Homo sapiens
tttgactcaaggaag

SEQ ID NO: 412516 - DNA, 15 bp, Homo sapiens
ctttgactcaaggaa

SEQ ID NO: 412517 - DNA, 15 bp, Homo sapiens
tctttgactcaagga

SEQ ID NO: 412518 - DNA, 15 bp, Homo sapiens
ttctttgactcaagg

SEQ ID NO: 412519 - DNA, 15 bp, Homo sapiens
attctttgactcaag

SEQ ID NO: 412520 - DNA, 15 bp, Homo sapiens
cattctttgactcaa

SEQ ID NO: 412521 - DNA, 15 bp, Homo sapiens
tcattctttgactca

SEQ ID NO: 412522 - DNA, 15 bp, Homo sapiens
ctcattctttgactc

SEQ ID NO: 412523 - DNA, 15 bp, Homo sapiens
tctcattctttgact

SEQ ID NO: 412524 - DNA, 15 bp, Homo sapiens
gtctcattctttgac

SEQ ID NO: 412525 - DNA, 15 bp, Homo sapiens
agtctcattctttga

SEQ ID NO: 412526 - DNA, 15 bp, Homo sapiens
gagtctcattctttg

SEQ ID NO: 412527 - DNA, 15 bp, Homo sapiens
tgagtctcattcttt

SEQ ID NO: 412528 - DNA, 15 bp, Homo sapiens
ctgagtctcattctt

SEQ ID NO: 412529 - DNA, 15 bp, Homo sapiens
gctgagtctcattct

SEQ ID NO: 412530 - DNA, 15 bp, Homo sapiens
tgctgagtctcattc

SEQ ID NO: 412531 - DNA, 15 bp, Homo sapiens
gtgctgagtctcatt

SEQ ID NO: 412532 - DNA, 15 bp, Homo sapiens
tgtgctgagtctcat

SEQ ID NO: 412533 - DNA, 15 bp, Homo sapiens
ttgtgctgagtctca

SEQ ID NO: 412534 - DNA, 15 bp, Homo sapiens
gttgtgctgagtctc

SEQ ID NO: 412535 - DNA, 15 bp, Homo sapiens
agttgtgctgagtct

SEQ ID NO: 412536 - DNA, 15 bp, Homo sapiens
gagttgtgctgagtc

SEQ ID NO: 412537 - DNA, 15 bp, Homo sapiens
tgagttgtgctgagt

SEQ ID NO: 412538 - DNA, 15 bp, Homo sapiens
atgagttgtgctgag

SEQ ID NO: 412539 - DNA, 15 bp, Homo sapiens
aatgagttgtgctga

SEQ ID NO: 412540 - DNA, 15 bp, Homo sapiens
taatgagttgtgctg

SEQ ID NO: 412541 - DNA, 15 bp, Homo sapiens
ataatgagttgtgct

SEQ ID NO: 412542 - DNA, 15 bp, Homo sapiens
aataatgagttgtgc

SEQ ID NO: 412543 - DNA, 15 bp, Homo sapiens
aaataatgagttgtg

SEQ ID NO: 412544 - DNA, 15 bp, Homo sapiens
aaaataatgagttgt

SEQ ID NO: 412545 - DNA, 15 bp, Homo sapiens
caaaataatgagttg

SEQ ID NO: 412546 - DNA, 15 bp, Homo sapiens
tcaaaataatgagtt

SEQ ID NO: 412547 - DNA, 15 bp, Homo sapiens
ctcaaaataatgagt

SEQ ID NO: 412548 - DNA, 15 bp, Homo sapiens
actcaaaataatgag

SEQ ID NO: 412549 - DNA, 15 bp, Homo sapiens
tactcaaaataatga

SEQ ID NO: 412550 - DNA, 15 bp, Homo sapiens
gtactcaaaataatg

SEQ ID NO: 412551 - DNA, 15 bp, Homo sapiens
agtactcaaaataat

SEQ ID NO: 412552 - DNA, 15 bp, Homo sapiens
tagtactcaaaataa

SEQ ID NO: 412553 - DNA, 15 bp, Homo sapiens
ttagtactcaaaata

SEQ ID NO: 412554 - DNA, 15 bp, Homo sapiens
attagtactcaaaat

SEQ ID NO: 412555 - DNA, 15 bp, Homo sapiens
cattagtactcaaaa

SEQ ID NO: 412556 - DNA, 15 bp, Homo sapiens
gcattagtactcaaa

SEQ ID NO: 412557 - DNA, 15 bp, Homo sapiens
ggcattagtactcaa

SEQ ID NO: 412558 - DNA, 15 bp, Homo sapiens
gggcattagtactca

SEQ ID NO: 412559 - DNA, 15 bp, Homo sapiens
tgggcattagtactc

SEQ ID NO: 412560 - DNA, 15 bp, Homo sapiens
ctgggcattagtact

SEQ ID NO: 412561 - DNA, 15 bp, Homo sapiens
actgggcattagtac

SEQ ID NO: 412562 - DNA, 15 bp, Homo sapiens
cactgggcattagta

SEQ ID NO: 412563 - DNA, 15 bp, Homo sapiens
gcactgggcattagt

SEQ ID NO: 412564 - DNA, 15 bp, Homo sapiens
tgcactgggcattag

SEQ ID NO: 412565 - DNA, 15 bp, Homo sapiens
ctgcactgggcatta

SEQ ID NO: 412566 - DNA, 15 bp, Homo sapiens
tctgcactgggcatt

SEQ ID NO: 412567 - DNA, 15 bp, Homo sapiens
atctgcactgggcat

SEQ ID NO: 412568 - DNA, 15 bp, Homo sapiens
gatctgcactgggca

SEQ ID NO: 412569 - DNA, 15 bp, Homo sapiens
ggatctgcactgggc

SEQ ID NO: 412570 - DNA, 15 bp, Homo sapiens
aggatctgcactggg

SEQ ID NO: 412571 - DNA, 15 bp, Homo sapiens
caggatctgcactgg

SEQ ID NO: 412572 - DNA, 15 bp, Homo sapiens
acaggatctgcactg

SEQ ID NO: 412573 - DNA, 15 bp, Homo sapiens
aacaggatctgcact

SEQ ID NO: 412574 - DNA, 15 bp, Homo sapiens
taacaggatctgcac

SEQ ID NO: 412575 - DNA, 15 bp, Homo sapiens
ttaacaggatctgca

SEQ ID NO: 412576 - DNA, 15 bp, Homo sapiens
cttaacaggatctgc

SEQ ID NO: 412577 - DNA, 15 bp, Homo sapiens
tcttaacaggatctg

SEQ ID NO: 412578 - DNA, 15 bp, Homo sapiens
gtcttaacaggatct

SEQ ID NO: 412579 - DNA, 15 bp, Homo sapiens
agtcttaacaggatc

SEQ ID NO: 412580 - DNA, 15 bp, Homo sapiens
cagtcttaacaggat

SEQ ID NO: 412581 - DNA, 15 bp, Homo sapiens
ccagtcttaacagga

SEQ ID NO: 412582 - DNA, 15 bp, Homo sapiens
accagtcttaacagg

SEQ ID NO: 412583 - DNA, 15 bp, Homo sapiens
caccagtcttaacag

SEQ ID NO: 412584 - DNA, 15 bp, Homo sapiens
acaccagtcttaaca

SEQ ID NO: 412585 - DNA, 15 bp, Homo sapiens
cacaccagtcttaac

SEQ ID NO: 412586 - DNA, 15 bp, Homo sapiens
tcacaccagtcttaa

SEQ ID NO: 412587 - DNA, 15 bp, Homo sapiens
atcacaccagtctta

SEQ ID NO: 412588 - DNA, 15 bp, Homo sapiens
aatcacaccagtctt

SEQ ID NO: 412589 - DNA, 15 bp, Homo sapiens
caatcacaccagtct

SEQ ID NO: 412590 - DNA, 15 bp, Homo sapiens
gcaatcacaccagtc

SEQ ID NO: 412591 - DNA, 15 bp, Homo sapiens
tgcaatcacaccagt

SEQ ID NO: 412592 - DNA, 15 bp, Homo sapiens
ttgcaatcacaccag

SEQ ID NO: 412593 - DNA, 15 bp, Homo sapiens
cttgcaatcacacca

SEQ ID NO: 412594 - DNA, 15 bp, Homo sapiens
tcttgcaatcacacc

SEQ ID NO: 412595 - DNA, 15 bp, Homo sapiens
ttcttgcaatcacac

SEQ ID NO: 412596 - DNA, 15 bp, Homo sapiens
gttcttgcaatcaca

SEQ ID NO: 412597 - DNA, 15 bp, Homo sapiens
tgttcttgcaatcac

SEQ ID NO: 412598 - DNA, 15 bp, Homo sapiens
ttgttcttgcaatca

SEQ ID NO: 412599 - DNA, 15 bp, Homo sapiens
attgttcttgcaatc

SEQ ID NO: 412600 - DNA, 15 bp, Homo sapiens
gattgttcttgcaat

SEQ ID NO: 412601 - DNA, 15 bp, Homo sapiens
ggattgttcttgcaa

SEQ ID NO: 412602 - DNA, 15 bp, Homo sapiens
tggattgttcttgca

SEQ ID NO: 412603 - DNA, 15 bp, Homo sapiens
gtggattgttcttgc

SEQ ID NO: 412604 - DNA, 15 bp, Homo sapiens
tgtggattgttcttg

SEQ ID NO: 412605 - DNA, 15 bp, Homo sapiens
atgtggattgttctt

SEQ ID NO: 412606 - DNA, 15 bp, Homo sapiens
aatgtggattgttct

SEQ ID NO: 412607 - DNA, 15 bp, Homo sapiens
taatgtggattgttc

SEQ ID NO: 412608 - DNA, 15 bp, Homo sapiens
ataatgtggattgtt

SEQ ID NO: 412609 - DNA, 15 bp, Homo sapiens
cataatgtggattgt

SEQ ID NO: 412610 - DNA, 15 bp, Homo sapiens
tcataatgtggattg

SEQ ID NO: 412611 - DNA, 15 bp, Homo sapiens
ttcataatgtggatt

SEQ ID NO: 412612 - DNA, 15 bp, Homo sapiens
gttcataatgtggat

SEQ ID NO: 412613 - DNA, 15 bp, Homo sapiens
tgttcataatgtgga

SEQ ID NO: 412614 - DNA, 15 bp, Homo sapiens
gtgttcataatgtgg

SEQ ID NO: 412615 - DNA, 15 bp, Homo sapiens
agtgttcataatgtg

SEQ ID NO: 412616 - DNA, 15 bp, Homo sapiens
cagtgttcataatgt

SEQ ID NO: 412617 - DNA, 15 bp, Homo sapiens
ccagtgttcataatg

SEQ ID NO: 412618 - DNA, 15 bp, Homo sapiens
tccagtgttcataat

SEQ ID NO: 412619 - DNA, 15 bp, Homo sapiens
ttccagtgttcataa

SEQ ID NO: 412620 - DNA, 15 bp, Homo sapiens
cttccagtgttcata

SEQ ID NO: 412621 - DNA, 15 bp, Homo sapiens
acttccagtgttcat

SEQ ID NO: 412622 - DNA, 15 bp, Homo sapiens
aacttccagtgttca

SEQ ID NO: 412623 - DNA, 15 bp, Homo sapiens
aaacttccagtgttc

SEQ ID NO: 412624 - DNA, 15 bp, Homo sapiens
aaaacttccagtgtt

SEQ ID NO: 412625 - DNA, 15 bp, Homo sapiens
aaaaacttccagtgt

SEQ ID NO: 412626 - DNA, 15 bp, Homo sapiens
taaaaacttccagtg

SEQ ID NO: 412627 - DNA, 15 bp, Homo sapiens
ataaaaacttccagt

SEQ ID NO: 412628 - DNA, 15 bp, Homo sapiens
tataaaaacttccag

SEQ ID NO: 412629 - DNA, 15 bp, Homo sapiens
atataaaaacttcca

SEQ ID NO: 412630 - DNA, 15 bp, Homo sapiens
aatataaaaacttcc

SEQ ID NO: 412631 - DNA, 15 bp, Homo sapiens
aaatataaaaacttc

SEQ ID NO: 412632 - DNA, 15 bp, Homo sapiens
caaatataaaaactt

SEQ ID NO: 412633 - DNA, 15 bp, Homo sapiens
gcaaatataaaaact

SEQ ID NO: 412634 - DNA, 15 bp, Homo sapiens
tgcaaatataaaaac

SEQ ID NO: 412635 - DNA, 15 bp, Homo sapiens
atgcaaatataaaaa

SEQ ID NO: 412636 - DNA, 15 bp, Homo sapiens
aatgcaaatataaaa

SEQ ID NO: 412637 - DNA, 15 bp, Homo sapiens
taatgcaaatataaa

SEQ ID NO: 412638 - DNA, 15 bp, Homo sapiens
gtaatgcaaatataa

SEQ ID NO: 412639 - DNA, 15 bp, Homo sapiens
ggtaatgcaaatata

SEQ ID NO: 412640 - DNA, 15 bp, Homo sapiens
gggtaatgcaaatat

SEQ ID NO: 412641 - DNA, 15 bp, Homo sapiens
tgggtaatgcaaata

SEQ ID NO: 412642 - DNA, 15 bp, Homo sapiens
ctgggtaatgcaaat

SEQ ID NO: 412643 - DNA, 15 bp, Homo sapiens
tctgggtaatgcaaa

SEQ ID NO: 412644 - DNA, 15 bp, Homo sapiens
ctctgggtaatgcaa

SEQ ID NO: 412645 - DNA, 15 bp, Homo sapiens
actctgggtaatgca

SEQ ID NO: 412646 - DNA, 15 bp, Homo sapiens
cactctgggtaatgc

SEQ ID NO: 412647 - DNA, 15 bp, Homo sapiens
tcactctgggtaatg

SEQ ID NO: 412648 - DNA, 15 bp, Homo sapiens
gtcactctgggtaat

SEQ ID NO: 412649 - DNA, 15 bp, Homo sapiens
tgtcactctgggtaa

SEQ ID NO: 412650 - DNA, 15 bp, Homo sapiens
atgtcactctgggta

SEQ ID NO: 412651 - DNA, 15 bp, Homo sapiens
catgtcactctgggt

SEQ ID NO: 412652 - DNA, 15 bp, Homo sapiens
gcatgtcactctggg

SEQ ID NO: 412653 - DNA, 15 bp, Homo sapiens
tgcatgtcactctgg

SEQ ID NO: 412654 - DNA, 15 bp, Homo sapiens
atgcatgtcactctg

SEQ ID NO: 412655 - DNA, 15 bp, Homo sapiens
tatgcatgtcactct

SEQ ID NO: 412656 - DNA, 15 bp, Homo sapiens
atatgcatgtcactc

SEQ ID NO: 412657 - DNA, 15 bp, Homo sapiens
tatatgcatgtcact

SEQ ID NO: 412658 - DNA, 15 bp, Homo sapiens
atatatgcatgtcac

SEQ ID NO: 412659 - DNA, 15 bp, Homo sapiens
tatatatgcatgtca

SEQ ID NO: 412660 - DNA, 15 bp, Homo sapiens
ctatatatgcatgtc

SEQ ID NO: 412661 - DNA, 15 bp, Homo sapiens
gctatatatgcatgt

SEQ ID NO: 412662 - DNA, 15 bp, Homo sapiens
tgctatatatgcatg

SEQ ID NO: 412663 - DNA, 15 bp, Homo sapiens
ttgctatatatgcat

SEQ ID NO: 412664 - DNA, 15 bp, Homo sapiens
gttgctatatatgca

SEQ ID NO: 412665 - DNA, 15 bp, Homo sapiens
agttgctatatatgc

SEQ ID NO: 412666 - DNA, 15 bp, Homo sapiens
tagttgctatatatg

SEQ ID NO: 412667 - DNA, 15 bp, Homo sapiens
ttagttgctatatat

SEQ ID NO: 412668 - DNA, 15 bp, Homo sapiens
tttagttgctatata

SEQ ID NO: 412669 - DNA, 15 bp, Homo sapiens
gtttagttgctatat

SEQ ID NO: 412670 - DNA, 15 bp, Homo sapiens
agtttagttgctata

SEQ ID NO: 412671 - DNA, 15 bp, Homo sapiens
aagtttagttgctat

SEQ ID NO: 412672 - DNA, 15 bp, Homo sapiens
aaagtttagttgcta

SEQ ID NO: 412673 - DNA, 15 bp, Homo sapiens
caaagtttagttgct

SEQ ID NO: 412674 - DNA, 15 bp, Homo sapiens
acaaagtttagttgc

SEQ ID NO: 412675 - DNA, 15 bp, Homo sapiens
gacaaagtttagttg

SEQ ID NO: 412676 - DNA, 15 bp, Homo sapiens
ggacaaagtttagtt

SEQ ID NO: 412677 - DNA, 15 bp, Homo sapiens
tggacaaagtttagt

SEQ ID NO: 412678 - DNA, 15 bp, Homo sapiens
ttggacaaagtttag

SEQ ID NO: 412679 - DNA, 15 bp, Homo sapiens
tttggacaaagttta

SEQ ID NO: 412680 - DNA, 15 bp, Homo sapiens
ttttggacaaagttt

SEQ ID NO: 412681 - DNA, 15 bp, Homo sapiens
tttttggacaaagtt

SEQ ID NO: 412682 - DNA, 15 bp, Homo sapiens
atttttggacaaagt

SEQ ID NO: 412683 - DNA, 15 bp, Homo sapiens
tatttttggacaaag

SEQ ID NO: 412684 - DNA, 15 bp, Homo sapiens
ttatttttggacaaa

SEQ ID NO: 412685 - DNA, 15 bp, Homo sapiens
tttatttttggacaa

SEQ ID NO: 412686 - DNA, 15 bp, Homo sapiens
ttttatttttggaca

SEQ ID NO: 412687 - DNA, 15 bp, Homo sapiens
attttatttttggac

SEQ ID NO: 412688 - DNA, 15 bp, Homo sapiens
tattttatttttgga

SEQ ID NO: 412689 - DNA, 15 bp, Homo sapiens
ttattttatttttgg

SEQ ID NO: 412690 - DNA, 15 bp, Homo sapiens
tttattttatttttg

SEQ ID NO: 412691 - DNA, 15 bp, Homo sapiens
ttttattttattttt

SEQ ID NO: 412692 - DNA, 15 bp, Homo sapiens
gattttattttattt

SEQ ID NO: 412693 - DNA, 15 bp, Homo sapiens
agattttattttatt

SEQ ID NO: 412694 - DNA, 15 bp, Homo sapiens
gagattttattttat

SEQ ID NO: 412695 - DNA, 15 bp, Homo sapiens
agagattttatttta

SEQ ID NO: 412696 - DNA, 15 bp, Homo sapiens
gagagattttatttt

SEQ ID NO: 412697 - DNA, 15 bp, Homo sapiens
ggagagattttattt

SEQ ID NO: 412698 - DNA, 15 bp, Homo sapiens
aggagagattttatt

SEQ ID NO: 412699 - DNA, 15 bp, Homo sapiens
caggagagattttat

SEQ ID NO: 412700 - DNA, 15 bp, Homo sapiens
ccaggagagatttta

SEQ ID NO: 412701 - DNA, 15 bp, Homo sapiens
gccaggagagatttt

SEQ ID NO: 412702 - DNA, 15 bp, Homo sapiens
ggccaggagagattt

SEQ ID NO: 412703 - DNA, 15 bp, Homo sapiens
gggccaggagagatt

SEQ ID NO: 412704 - DNA, 15 bp, Homo sapiens
tgggccaggagagat

SEQ ID NO: 412705 - DNA, 15 bp, Homo sapiens
ctgggccaggagaga

SEQ ID NO: 412706 - DNA, 15 bp, Homo sapiens
tctgggccaggagag

SEQ ID NO: 412707 - DNA, 15 bp, Homo sapiens
ctctgggccaggaga

SEQ ID NO: 412708 - DNA, 15 bp, Homo sapiens
gctctgggccaggag

SEQ ID NO: 412709 - DNA, 15 bp, Homo sapiens
tgctctgggccagga

SEQ ID NO: 412710 - DNA, 15 bp, Homo sapiens
atgctctgggccagg

SEQ ID NO: 412711 - DNA, 15 bp, Homo sapiens
aatgctctgggccag

SEQ ID NO: 412712 - DNA, 15 bp, Homo sapiens
caatgctctgggcca

SEQ ID NO: 412713 - DNA, 15 bp, Homo sapiens
acaatgctctgggcc

SEQ ID NO: 412714 - DNA, 15 bp, Homo sapiens
cacaatgctctgggc

SEQ ID NO: 412715 - DNA, 15 bp, Homo sapiens
acacaatgctctggg

SEQ ID NO: 412716 - DNA, 15 bp, Homo sapiens
aacacaatgctctgg

SEQ ID NO: 412717 - DNA, 15 bp, Homo sapiens
taacacaatgctctg

SEQ ID NO: 412718 - DNA, 15 bp, Homo sapiens
ctaacacaatgctct

SEQ ID NO: 412719 - DNA, 15 bp, Homo sapiens
gctaacacaatgctc

SEQ ID NO: 412720 - DNA, 15 bp, Homo sapiens
ggctaacacaatgct

SEQ ID NO: 412721 - DNA, 15 bp, Homo sapiens
tggctaacacaatgc

SEQ ID NO: 412722 - DNA, 15 bp, Homo sapiens
gtggctaacacaatg

SEQ ID NO: 412723 - DNA, 15 bp, Homo sapiens
tgtggctaacacaat

SEQ ID NO: 412724 - DNA, 15 bp, Homo sapiens
ctgtggctaacacaa

SEQ ID NO: 412725 - DNA, 15 bp, Homo sapiens
tctgtggctaacaca

SEQ ID NO: 412726 - DNA, 15 bp, Homo sapiens
ttctgtggctaacac

SEQ ID NO: 412727 - DNA, 15 bp, Homo sapiens
cttctgtggctaaca

SEQ ID NO: 412728 - DNA, 15 bp, Homo sapiens
tcttctgtggctaac

SEQ ID NO: 412729 - DNA, 15 bp, Homo sapiens
ttcttctgtggctaa

SEQ ID NO: 412730 - DNA, 15 bp, Homo sapiens
tttcttctgtggcta

SEQ ID NO: 412731 - DNA, 15 bp, Homo sapiens
cattttcttctgtgg

SEQ ID NO: 412732 - DNA, 15 bp, Homo sapiens
ccattttcttctgtg

SEQ ID NO: 412733 - DNA, 15 bp, Homo sapiens
tccattttcttctgt

SEQ ID NO: 412734 - DNA, 15 bp, Homo sapiens
ttccattttcttctg

SEQ ID NO: 412735 - DNA, 15 bp, Homo sapiens
cttccattttcttct

SEQ ID NO: 412736 - DNA, 15 bp, Homo sapiens
ccttccattttcttc

SEQ ID NO: 412737 - DNA, 15 bp, Homo sapiens
cccttccattttctt

SEQ ID NO: 412738 - DNA, 15 bp, Homo sapiens
acccttccattttct

SEQ ID NO: 412739 - DNA, 15 bp, Homo sapiens
tacccttccattttc

SEQ ID NO: 412740 - DNA, 15 bp, Homo sapiens
atacccttccatttt

SEQ ID NO: 412741 - DNA, 15 bp, Homo sapiens
aatacccttccattt

SEQ ID NO: 412742 - DNA, 15 bp, Homo sapiens
aaatacccttccatt

SEQ ID NO: 412743 - DNA, 15 bp, Homo sapiens
taaatacccttccat

SEQ ID NO: 412744 - DNA, 15 bp, Homo sapiens
ttaaatacccttcca

SEQ ID NO: 412745 - DNA, 15 bp, Homo sapiens
tttaaatacccttcc

SEQ ID NO: 412746 - DNA, 15 bp, Homo sapiens
atttaaatacccttc

SEQ ID NO: 412747 - DNA, 15 bp, Homo sapiens
tatttaaataccctt

SEQ ID NO: 412748 - DNA, 15 bp, Homo sapiens
ctatttaaataccct

SEQ ID NO: 412749 - DNA, 15 bp, Homo sapiens
gctatttaaataccc

SEQ ID NO: 412750 - DNA, 15 bp, Homo sapiens
agctatttaaatacc

SEQ ID NO: 412751 - DNA, 15 bp, Homo sapiens
tagctatttaaatac

SEQ ID NO: 412752 - DNA, 15 bp, Homo sapiens
atagctatttaaata

SEQ ID NO: 412753 - DNA, 15 bp, Homo sapiens
aatagctatttaaat

SEQ ID NO: 412754 - DNA, 15 bp, Homo sapiens
aaatagctatttaaa

SEQ ID NO: 412755 - DNA, 15 bp, Homo sapiens
taaatagctatttaa

SEQ ID NO: 412756 - DNA, 15 bp, Homo sapiens
ttaaatagctattta

SEQ ID NO: 412757 - DNA, 15 bp, Homo sapiens
gttaaatagctattt

SEQ ID NO: 412758 - DNA, 15 bp, Homo sapiens
agttaaatagctatt

SEQ ID NO: 412759 - DNA, 15 bp, Homo sapiens
gagttaaatagctat

SEQ ID NO: 412760 - DNA, 15 bp, Homo sapiens
tgagttaaatagcta

SEQ ID NO: 412761 - DNA, 15 bp, Homo sapiens
gtgagttaaatagct

SEQ ID NO: 412762 - DNA, 15 bp, Homo sapiens
agtgagttaaatagc

SEQ ID NO: 412763 - DNA, 15 bp, Homo sapiens
gagtgagttaaatag

SEQ ID NO: 412764 - DNA, 15 bp, Homo sapiens
tgagtgagttaaata

SEQ ID NO: 412765 - DNA, 15 bp, Homo sapiens
ctgagtgagttaaat

SEQ ID NO: 412766 - DNA, 15 bp, Homo sapiens
tctgagtgagttaaa

SEQ ID NO: 412767 - DNA, 15 bp, Homo sapiens
atctgagtgagttaa

SEQ ID NO: 412768 - DNA, 15 bp, Homo sapiens
tatctgagtgagtta

SEQ ID NO: 412769 - DNA, 15 bp, Homo sapiens
ttatctgagtgagtt

SEQ ID NO: 412770 - DNA, 15 bp, Homo sapiens
tttatctgagtgagt

SEQ ID NO: 412771 - DNA, 15 bp, Homo sapiens
atttatctgagtgag

SEQ ID NO: 412772 - DNA, 15 bp, Homo sapiens
catttatctgagtga

SEQ ID NO: 412773 - DNA, 15 bp, Homo sapiens
tcatttatctgagtg

SEQ ID NO: 412774 - DNA, 15 bp, Homo sapiens
ttcatttatctgagt

SEQ ID NO: 412775 - DNA, 15 bp, Homo sapiens
gttcatttatctgag

SEQ ID NO: 412776 - DNA, 15 bp, Homo sapiens
agttcatttatctga

SEQ ID NO: 412777 - DNA, 15 bp, Homo sapiens
tagttcatttatctg

SEQ ID NO: 412778 - DNA, 15 bp, Homo sapiens
ttagttcatttatct

SEQ ID NO: 412779 - DNA, 15 bp, Homo sapiens
attagttcatttatc

SEQ ID NO: 412780 - DNA, 15 bp, Homo sapiens
tattagttcatttat

SEQ ID NO: 412781 - DNA, 15 bp, Homo sapiens
gtattagttcattta

SEQ ID NO: 412782 - DNA, 15 bp, Homo sapiens
tgtattagttcattt

SEQ ID NO: 412783 - DNA, 15 bp, Homo sapiens
ttgtattagttcatt

SEQ ID NO: 412784 - DNA, 15 bp, Homo sapiens
cttgtattagttcat

SEQ ID NO: 412785 - DNA, 15 bp, Homo sapiens
acttgtattagttca

SEQ ID NO: 412786 - DNA, 15 bp, Homo sapiens
tacttgtattagttc

SEQ ID NO: 412787 - DNA, 15 bp, Homo sapiens
ttacttgtattagtt

SEQ ID NO: 412788 - DNA, 15 bp, Homo sapiens
tttacttgtattagt

SEQ ID NO: 412789 - DNA, 15 bp, Homo sapiens
ctttacttgtattag

SEQ ID NO: 412790 - DNA, 15 bp, Homo sapiens
actttacttgtatta

SEQ ID NO: 412791 - DNA, 15 bp, Homo sapiens
tactttacttgtatt

SEQ ID NO: 412792 - DNA, 15 bp, Homo sapiens
atactttacttgtat

SEQ ID NO: 412793 - DNA, 15 bp, Homo sapiens
tatactttacttgta

SEQ ID NO: 412794 - DNA, 15 bp, Homo sapiens
ttatactttacttgt

SEQ ID NO: 412795 - DNA, 15 bp, Homo sapiens
attatactttacttg

SEQ ID NO: 412796 - DNA, 15 bp, Homo sapiens
tattatactttactt

SEQ ID NO: 412797 - DNA, 15 bp, Homo sapiens
gtattatactttact

SEQ ID NO: 412798 - DNA, 15 bp, Homo sapiens
agtattatactttac

SEQ ID NO: 412799 - DNA, 15 bp, Homo sapiens
aagtattatacttta

SEQ ID NO: 412800 - DNA, 15 bp, Homo sapiens
aaagtattatacttt

SEQ ID NO: 412801 - DNA, 15 bp, Homo sapiens
caaagtattatactt

SEQ ID NO: 412802 - DNA, 15 bp, Homo sapiens
acaaagtattatact

SEQ ID NO: 412803 - DNA, 15 bp, Homo sapiens
cacaaagtattatac

SEQ ID NO: 412804 - DNA, 15 bp, Homo sapiens
acacaaagtattata

SEQ ID NO: 412805 - DNA, 15 bp, Homo sapiens
cacacaaagtattat

SEQ ID NO: 412806 - DNA, 15 bp, Homo sapiens
tcacacaaagtatta

SEQ ID NO: 412807 - DNA, 15 bp, Homo sapiens
gtcacacaaagtatt

SEQ ID NO: 412808 - DNA, 15 bp, Homo sapiens
agtcacacaaagtat

SEQ ID NO: 412809 - DNA, 15 bp, Homo sapiens
gagtcacacaaagta

SEQ ID NO: 412810 - DNA, 15 bp, Homo sapiens
tgagtcacacaaagt

SEQ ID NO: 412811 - DNA, 15 bp, Homo sapiens
atgagtcacacaaag

SEQ ID NO: 412812 - DNA, 15 bp, Homo sapiens
catgagtcacacaaa

SEQ ID NO: 412813 - DNA, 15 bp, Homo sapiens
tcatgagtcacacaa

SEQ ID NO: 412814 - DNA, 15 bp, Homo sapiens
ttcatgagtcacaca

SEQ ID NO: 412815 - DNA, 15 bp, Homo sapiens
tttcatgagtcacac

SEQ ID NO: 412816 - DNA, 15 bp, Homo sapiens
ttttcatgagtcaca

SEQ ID NO: 412817 - DNA, 15 bp, Homo sapiens
gttttcatgagtcac

SEQ ID NO: 412818 - DNA, 15 bp, Homo sapiens
tgttttcatgagtca

SEQ ID NO: 412819 - DNA, 15 bp, Homo sapiens
ttgttttcatgagtc

SEQ ID NO: 412820 - DNA, 15 bp, Homo sapiens
tttgttttcatgagt

SEQ ID NO: 412821 - DNA, 15 bp, Homo sapiens
gatttgttttcatga

SEQ ID NO: 412822 - DNA, 15 bp, Homo sapiens
tgatttgttttcatg

SEQ ID NO: 412823 - DNA, 15 bp, Homo sapiens
ttgatttgttttcat

SEQ ID NO: 412824 - DNA, 15 bp, Homo sapiens
attgatttgttttca

SEQ ID NO: 412825 - DNA, 15 bp, Homo sapiens
cattgatttgttttc

SEQ ID NO: 412826 - DNA, 15 bp, Homo sapiens
tcattgatttgtttt

SEQ ID NO: 412827 - DNA, 15 bp, Homo sapiens
ctcattgatttgttt

SEQ ID NO: 412828 - DNA, 15 bp, Homo sapiens
tctcattgatttgtt

SEQ ID NO: 412829 - DNA, 15 bp, Homo sapiens
ttctcattgatttgt

SEQ ID NO: 412830 - DNA, 15 bp, Homo sapiens
attctcattgatttg

SEQ ID NO: 412831 - DNA, 15 bp, Homo sapiens
tattctcattgattt

SEQ ID NO: 412832 - DNA, 15 bp, Homo sapiens
ttattctcattgatt

SEQ ID NO: 412833 - DNA, 15 bp, Homo sapiens
attattctcattgat

SEQ ID NO: 412834 - DNA, 15 bp, Homo sapiens
tattattctcattga

SEQ ID NO: 412835 - DNA, 15 bp, Homo sapiens
ttattattctcattg

SEQ ID NO: 412836 - DNA, 15 bp, Homo sapiens
tttattattctcatt

SEQ ID NO: 412837 - DNA, 15 bp, Homo sapiens
gtttattattctcat

SEQ ID NO: 412838 - DNA, 15 bp, Homo sapiens
agtttattattctca

SEQ ID NO: 412839 - DNA, 15 bp, Homo sapiens
tagtttattattctc

SEQ ID NO: 412840 - DNA, 15 bp, Homo sapiens
gtagtttattattct

SEQ ID NO: 412841 - DNA, 15 bp, Homo sapiens
tgtagtttattattc

SEQ ID NO: 412842 - DNA, 15 bp, Homo sapiens
atgtagtttattatt

SEQ ID NO: 412843 - DNA, 15 bp, Homo sapiens
aatgtagtttattat

SEQ ID NO: 412844 - DNA, 15 bp, Homo sapiens
aaatgtagtttatta

SEQ ID NO: 412845 - DNA, 15 bp, Homo sapiens
taaatgtagtttatt

SEQ ID NO: 412846 - DNA, 15 bp, Homo sapiens
ctaaatgtagtttat

SEQ ID NO: 412847 - DNA, 15 bp, Homo sapiens
tctaaatgtagttta

SEQ ID NO: 412848 - DNA, 15 bp, Homo sapiens
ttctaaatgtagttt

SEQ ID NO: 412849 - DNA, 15 bp, Homo sapiens
gttctaaatgtagtt

SEQ ID NO: 412850 - DNA, 15 bp, Homo sapiens
tgttctaaatgtagt

SEQ ID NO: 412851 - DNA, 15 bp, Homo sapiens
ttgttctaaatgtag

SEQ ID NO: 412852 - DNA, 15 bp, Homo sapiens
cttgttctaaatgta

SEQ ID NO: 412853 - DNA, 15 bp, Homo sapiens
ccttgttctaaatgt

SEQ ID NO: 412854 - DNA, 15 bp, Homo sapiens
tccttgttctaaatg

SEQ ID NO: 412855 - DNA, 15 bp, Homo sapiens
ttccttgttctaaat

SEQ ID NO: 412856 - DNA, 15 bp, Homo sapiens
tttccttgttctaaa

SEQ ID NO: 412857 - DNA, 15 bp, Homo sapiens
ttttccttgttctaa

SEQ ID NO: 412858 - DNA, 15 bp, Homo sapiens
tttttccttgttcta

SEQ ID NO: 412859 - DNA, 15 bp, Homo sapiens
atttttccttgttct

SEQ ID NO: 412860 - DNA, 15 bp, Homo sapiens
tatttttccttgttc

SEQ ID NO: 412861 - DNA, 15 bp, Homo sapiens
atatttttccttgtt

SEQ ID NO: 412862 - DNA, 15 bp, Homo sapiens
aatatttttccttgt

SEQ ID NO: 412863 - DNA, 15 bp, Homo sapiens
caatatttttccttg

SEQ ID NO: 412864 - DNA, 15 bp, Homo sapiens
gcaatatttttcctt

SEQ ID NO: 412865 - DNA, 15 bp, Homo sapiens
tgcaatatttttcct

SEQ ID NO: 412866 - DNA, 15 bp, Homo sapiens
atgcaatatttttcc

SEQ ID NO: 412867 - DNA, 15 bp, Homo sapiens
tatgcaatatttttc

SEQ ID NO: 412868 - DNA, 15 bp, Homo sapiens
atatgcaatattttt

SEQ ID NO: 412869 - DNA, 15 bp, Homo sapiens
aatatgcaatatttt

SEQ ID NO: 412870 - DNA, 15 bp, Homo sapiens
aaatatgcaatattt

SEQ ID NO: 412871 - DNA, 15 bp, Homo sapiens
taaatatgcaatatt

SEQ ID NO: 412872 - DNA, 15 bp, Homo sapiens
ataaatatgcaatat

SEQ ID NO: 412873 - DNA, 15 bp, Homo sapiens
aataaatatgcaata

SEQ ID NO: 412874 - DNA, 15 bp, Homo sapiens
taataaatatgcaat

SEQ ID NO: 412875 - DNA, 15 bp, Homo sapiens
gtaataaatatgcaa

SEQ ID NO: 412876 - DNA, 15 bp, Homo sapiens
agtaataaatatgca

SEQ ID NO: 412877 - DNA, 15 bp, Homo sapiens
gagtaataaatatgc

SEQ ID NO: 412878 - DNA, 15 bp, Homo sapiens
agagtaataaatatg

SEQ ID NO: 412879 - DNA, 15 bp, Homo sapiens
aagagtaataaatat

SEQ ID NO: 412880 - DNA, 15 bp, Homo sapiens
gaagagtaataaata

SEQ ID NO: 412881 - DNA, 15 bp, Homo sapiens
agaagagtaataaat

SEQ ID NO: 412882 - DNA, 15 bp, Homo sapiens
aagaagagtaataaa

SEQ ID NO: 412883 - DNA, 15 bp, Homo sapiens
aaagaagagtaataa

SEQ ID NO: 412884 - DNA, 15 bp, Homo sapiens
caaagaagagtaata

SEQ ID NO: 412885 - DNA, 15 bp, Homo sapiens
tcaaagaagagtaat

SEQ ID NO: 412886 - DNA, 15 bp, Homo sapiens
atcaaagaagagtaa

SEQ ID NO: 412887 - DNA, 15 bp, Homo sapiens
catcaaagaagagta

SEQ ID NO: 412888 - DNA, 15 bp, Homo sapiens
acatcaaagaagagt

SEQ ID NO: 412889 - DNA, 15 bp, Homo sapiens
gacatcaaagaagag

SEQ ID NO: 412890 - DNA, 15 bp, Homo sapiens
agacatcaaagaaga

SEQ ID NO: 412891 - DNA, 15 bp, Homo sapiens
tagacatcaaagaag

SEQ ID NO: 412892 - DNA, 15 bp, Homo sapiens
ctagacatcaaagaa

SEQ ID NO: 412893 - DNA, 15 bp, Homo sapiens
tctagacatcaaaga

SEQ ID NO: 412894 - DNA, 15 bp, Homo sapiens
ttctagacatcaaag

SEQ ID NO: 412895 - DNA, 15 bp, Homo sapiens
attctagacatcaaa

SEQ ID NO: 412896 - DNA, 15 bp, Homo sapiens
cattctagacatcaa

SEQ ID NO: 412897 - DNA, 15 bp, Homo sapiens
tcattctagacatca

SEQ ID NO: 412898 - DNA, 15 bp, Homo sapiens
ttcattctagacatc

SEQ ID NO: 412899 - DNA, 15 bp, Homo sapiens
attcattctagacat

SEQ ID NO: 412900 - DNA, 15 bp, Homo sapiens
tattcattctagaca

SEQ ID NO: 412901 - DNA, 15 bp, Homo sapiens
ttattcattctagac

SEQ ID NO: 412902 - DNA, 15 bp, Homo sapiens
gttattcattctaga

SEQ ID NO: 412903 - DNA, 15 bp, Homo sapiens
cgttattcattctag

SEQ ID NO: 412904 - DNA, 15 bp, Homo sapiens
acgttattcattcta

SEQ ID NO: 412905 - DNA, 15 bp, Homo sapiens
tacgttattcattct

SEQ ID NO: 412906 - DNA, 15 bp, Homo sapiens
ctacgttattcattc

SEQ ID NO: 412907 - DNA, 15 bp, Homo sapiens
actacgttattcatt

SEQ ID NO: 412908 - DNA, 15 bp, Homo sapiens
tactacgttattcat

SEQ ID NO: 412909 - DNA, 15 bp, Homo sapiens
atactacgttattca

SEQ ID NO: 412910 - DNA, 15 bp, Homo sapiens
catactacgttattc

SEQ ID NO: 412911 - DNA, 15 bp, Homo sapiens
ccatactacgttatt

SEQ ID NO: 412912 - DNA, 15 bp, Homo sapiens
cccatactacgttat

SEQ ID NO: 412913 - DNA, 15 bp, Homo sapiens
tcccatactacgtta

SEQ ID NO: 412914 - DNA, 15 bp, Homo sapiens
ttcccatactacgtt

SEQ ID NO: 412915 - DNA, 15 bp, Homo sapiens
attcccatactacgt

SEQ ID NO: 412916 - DNA, 15 bp, Homo sapiens
gattcccatactacg

SEQ ID NO: 412917 - DNA, 15 bp, Homo sapiens
agattcccatactac

SEQ ID NO: 412918 - DNA, 15 bp, Homo sapiens
aagattcccatacta

SEQ ID NO: 412919 - DNA, 15 bp, Homo sapiens
gaagattcccatact

SEQ ID NO: 412920 - DNA, 15 bp, Homo sapiens
tgaagattcccatac

SEQ ID NO: 412921 - DNA, 15 bp, Homo sapiens
gtgaagattcccata

SEQ ID NO: 412922 - DNA, 15 bp, Homo sapiens
agtgaagattcccat

SEQ ID NO: 412923 - DNA, 15 bp, Homo sapiens
tagtgaagattccca

SEQ ID NO: 412924 - DNA, 15 bp, Homo sapiens
ttagtgaagattccc

SEQ ID NO: 412925 - DNA, 15 bp, Homo sapiens
tttagtgaagattcc

SEQ ID NO: 412926 - DNA, 15 bp, Homo sapiens
atttagtgaagattc

SEQ ID NO: 412927 - DNA, 15 bp, Homo sapiens
aatttagtgaagatt

SEQ ID NO: 412928 - DNA, 15 bp, Homo sapiens
taatttagtgaagat

SEQ ID NO: 412929 - DNA, 15 bp, Homo sapiens
gtaatttagtgaaga

SEQ ID NO: 412930 - DNA, 15 bp, Homo sapiens
tgtaatttagtgaag

SEQ ID NO: 412931 - DNA, 15 bp, Homo sapiens
ctgtaatttagtgaa

SEQ ID NO: 412932 - DNA, 15 bp, Homo sapiens
actgtaatttagtga

SEQ ID NO: 412933 - DNA, 15 bp, Homo sapiens
cactgtaatttagtg

SEQ ID NO: 412934 - DNA, 15 bp, Homo sapiens
acactgtaatttagt

SEQ ID NO: 412935 - DNA, 15 bp, Homo sapiens
cacactgtaatttag

SEQ ID NO: 412936 - DNA, 15 bp, Homo sapiens
tcacactgtaattta

SEQ ID NO: 412937 - DNA, 15 bp, Homo sapiens
ttcacactgtaattt

SEQ ID NO: 412938 - DNA, 15 bp, Homo sapiens
gttcacactgtaatt

SEQ ID NO: 412939 - DNA, 15 bp, Homo sapiens
tgttcacactgtaat

SEQ ID NO: 412940 - DNA, 15 bp, Homo sapiens
gtgttcacactgtaa

SEQ ID NO: 412941 - DNA, 15 bp, Homo sapiens
tgtgttcacactgta

SEQ ID NO: 412942 - DNA, 15 bp, Homo sapiens
atgtgttcacactgt

SEQ ID NO: 412943 - DNA, 15 bp, Homo sapiens
gatgtgttcacactg

SEQ ID NO: 412944 - DNA, 15 bp, Homo sapiens
ggatgtgttcacact

SEQ ID NO: 412945 - DNA, 15 bp, Homo sapiens
tggatgtgttcacac

SEQ ID NO: 412946 - DNA, 15 bp, Homo sapiens
ttggatgtgttcaca

SEQ ID NO: 412947 - DNA, 15 bp, Homo sapiens
cttggatgtgttcac

SEQ ID NO: 412948 - DNA, 15 bp, Homo sapiens
gcttggatgtgttca

SEQ ID NO: 412949 - DNA, 15 bp, Homo sapiens
agcttggatgtgttc

SEQ ID NO: 412950 - DNA, 15 bp, Homo sapiens
tagcttggatgtgtt

SEQ ID NO: 412951 - DNA, 15 bp, Homo sapiens
ttagcttggatgtgt

SEQ ID NO: 412952 - DNA, 15 bp, Homo sapiens
tttagcttggatgtg

SEQ ID NO: 412953 - DNA, 15 bp, Homo sapiens
atttagcttggatgt

SEQ ID NO: 412954 - DNA, 15 bp, Homo sapiens
aatttagcttggatg

SEQ ID NO: 412955 - DNA, 15 bp, Homo sapiens
caatttagcttggat

SEQ ID NO: 412956 - DNA, 15 bp, Homo sapiens
acaatttagcttgga

SEQ ID NO: 412957 - DNA, 15 bp, Homo sapiens
tacaatttagcttgg

SEQ ID NO: 412958 - DNA, 15 bp, Homo sapiens
gtacaatttagcttg

SEQ ID NO: 412959 - DNA, 15 bp, Homo sapiens
tgtacaatttagctt

SEQ ID NO: 412960 - DNA, 15 bp, Homo sapiens
gtgtacaatttagct

SEQ ID NO: 412961 - DNA, 15 bp, Homo sapiens
agtgtacaatttagc

SEQ ID NO: 412962 - DNA, 15 bp, Homo sapiens
tagtgtacaatttag

SEQ ID NO: 412963 - DNA, 15 bp, Homo sapiens
atagtgtacaattta

SEQ ID NO: 412964 - DNA, 15 bp, Homo sapiens
aatagtgtacaattt

SEQ ID NO: 412965 - DNA, 15 bp, Homo sapiens
caatagtgtacaatt

SEQ ID NO: 412966 - DNA, 15 bp, Homo sapiens
gcaatagtgtacaat

SEQ ID NO: 412967 - DNA, 15 bp, Homo sapiens
agcaatagtgtacaa

SEQ ID NO: 412968 - DNA, 15 bp, Homo sapiens
gagcaatagtgtaca

SEQ ID NO: 412969 - DNA, 15 bp, Homo sapiens
tgagcaatagtgtac

SEQ ID NO: 412970 - DNA, 15 bp, Homo sapiens
gtgagcaatagtgta

SEQ ID NO: 412971 - DNA, 15 bp, Homo sapiens
tgtgagcaatagtgt

SEQ ID NO: 412972 - DNA, 15 bp, Homo sapiens
ttgtgagcaatagtg

SEQ ID NO: 412973 - DNA, 15 bp, Homo sapiens
tttgtgagcaatagt

SEQ ID NO: 412974 - DNA, 15 bp, Homo sapiens
atttgtgagcaatag

SEQ ID NO: 412975 - DNA, 15 bp, Homo sapiens
aatttgtgagcaata

SEQ ID NO: 412976 - DNA, 15 bp, Homo sapiens
taatttgtgagcaat

SEQ ID NO: 412977 - DNA, 15 bp, Homo sapiens
ataatttgtgagcaa

SEQ ID NO: 412978 - DNA, 15 bp, Homo sapiens
tataatttgtgagca

SEQ ID NO: 412979 - DNA, 15 bp, Homo sapiens
gtataatttgtgagc

SEQ ID NO: 412980 - DNA, 15 bp, Homo sapiens
agtataatttgtgag

SEQ ID NO: 412981 - DNA, 15 bp, Homo sapiens
aagtataatttgtga

SEQ ID NO: 412982 - DNA, 15 bp, Homo sapiens
aaagtataatttgtg

SEQ ID NO: 412983 - DNA, 15 bp, Homo sapiens
caaagtataatttgt

SEQ ID NO: 412984 - DNA, 15 bp, Homo sapiens
gcaaagtataatttg

SEQ ID NO: 412985 - DNA, 15 bp, Homo sapiens
agcaaagtataattt

SEQ ID NO: 412986 - DNA, 15 bp, Homo sapiens
tagcaaagtataatt

SEQ ID NO: 412987 - DNA, 15 bp, Homo sapiens
ttagcaaagtataat

SEQ ID NO: 412988 - DNA, 15 bp, Homo sapiens
attagcaaagtataa

SEQ ID NO: 412989 - DNA, 15 bp, Homo sapiens
gattagcaaagtata

SEQ ID NO: 412990 - DNA, 15 bp, Homo sapiens
tgattagcaaagtat

SEQ ID NO: 412991 - DNA, 15 bp, Homo sapiens
ctgattagcaaagta

SEQ ID NO: 412992 - DNA, 15 bp, Homo sapiens
cctgattagcaaagt

SEQ ID NO: 412993 - DNA, 15 bp, Homo sapiens
acctgattagcaaag

SEQ ID NO: 412994 - DNA, 15 bp, Homo sapiens
tacctgattagcaaa

SEQ ID NO: 412995 - DNA, 15 bp, Homo sapiens
ttacctgattagcaa

SEQ ID NO: 412996 - DNA, 15 bp, Homo sapiens
attacctgattagca

SEQ ID NO: 412997 - DNA, 15 bp, Homo sapiens
cattacctgattagc

SEQ ID NO: 412998 - DNA, 15 bp, Homo sapiens
ccattacctgattag

SEQ ID NO: 412999 - DNA, 15 bp, Homo sapiens
accattacctgatta

SEQ ID NO: 413000 - DNA, 15 bp, Homo sapiens
caccattacctgatt

SEQ ID NO: 413001 - DNA, 15 bp, Homo sapiens
gcaccattacctgat

SEQ ID NO: 413002 - DNA, 15 bp, Homo sapiens
agcaccattacctga

SEQ ID NO: 413003 - DNA, 15 bp, Homo sapiens
cagcaccattacctg

SEQ ID NO: 413004 - DNA, 15 bp, Homo sapiens
acagcaccattacct

SEQ ID NO: 413005 - DNA, 15 bp, Homo sapiens
cacagcaccattacc

SEQ ID NO: 413006 - DNA, 15 bp, Homo sapiens
acacagcaccattac

SEQ ID NO: 413007 - DNA, 15 bp, Homo sapiens
gacacagcaccatta

SEQ ID NO: 413008 - DNA, 15 bp, Homo sapiens
agacacagcaccatt

SEQ ID NO: 413009 - DNA, 15 bp, Homo sapiens
aagacacagcaccat

SEQ ID NO: 413010 - DNA, 15 bp, Homo sapiens
gaagacacagcacca

SEQ ID NO: 413011 - DNA, 15 bp, Homo sapiens
agaagacacagcacc

SEQ ID NO: 413012 - DNA, 15 bp, Homo sapiens
aagaagacacagcac

SEQ ID NO: 413013 - DNA, 15 bp, Homo sapiens
taagaagacacagca

SEQ ID NO: 413014 - DNA, 15 bp, Homo sapiens
gtaagaagacacagc

SEQ ID NO: 413015 - DNA, 15 bp, Homo sapiens
tgtaagaagacacag

SEQ ID NO: 413016 - DNA, 15 bp, Homo sapiens
ttgtaagaagacaca

SEQ ID NO: 413017 - DNA, 15 bp, Homo sapiens
tttgtaagaagacac

SEQ ID NO: 413018 - DNA, 15 bp, Homo sapiens
ctttgtaagaagaca

SEQ ID NO: 413019 - DNA, 15 bp, Homo sapiens
actttgtaagaagac

SEQ ID NO: 413020 - DNA, 15 bp, Homo sapiens
tactttgtaagaaga

SEQ ID NO: 413021 - DNA, 15 bp, Homo sapiens
ctactttgtaagaag

SEQ ID NO: 413022 - DNA, 15 bp, Homo sapiens
cctactttgtaagaa

SEQ ID NO: 413023 - DNA, 15 bp, Homo sapiens
gcctactttgtaaga

SEQ ID NO: 413024 - DNA, 15 bp, Homo sapiens
tgcctactttgtaag

SEQ ID NO: 413025 - DNA, 15 bp, Homo sapiens
gtgcctactttgtaa

SEQ ID NO: 413026 - DNA, 15 bp, Homo sapiens
ggtgcctactttgta

SEQ ID NO: 413027 - DNA, 15 bp, Homo sapiens
tggtgcctactttgt

SEQ ID NO: 413028 - DNA, 15 bp, Homo sapiens
ttggtgcctactttg

SEQ ID NO: 413029 - DNA, 15 bp, Homo sapiens
tttggtgcctacttt

SEQ ID NO: 413030 - DNA, 15 bp, Homo sapiens
ttttggtgcctactt

SEQ ID NO: 413031 - DNA, 15 bp, Homo sapiens
tttttggtgcctact

SEQ ID NO: 413032 - DNA, 15 bp, Homo sapiens
ctttttggtgcctac

SEQ ID NO: 413033 - DNA, 15 bp, Homo sapiens
actttttggtgccta

SEQ ID NO: 413034 - DNA, 15 bp, Homo sapiens
tactttttggtgcct

SEQ ID NO: 413035 - DNA, 15 bp, Homo sapiens
ctactttttggtgcc

SEQ ID NO: 413036 - DNA, 15 bp, Homo sapiens
actactttttggtgc

SEQ ID NO: 413037 - DNA, 15 bp, Homo sapiens
gactactttttggtg

SEQ ID NO: 413038 - DNA, 15 bp, Homo sapiens
tgactactttttggt

SEQ ID NO: 413039 - DNA, 15 bp, Homo sapiens
atgactactttttgg

SEQ ID NO: 413040 - DNA, 15 bp, Homo sapiens
gatgactactttttg

SEQ ID NO: 413041 - DNA, 15 bp, Homo sapiens
cgatgactacttttt

SEQ ID NO: 413042 - DNA, 15 bp, Homo sapiens
gcgatgactactttt

SEQ ID NO: 413043 - DNA, 15 bp, Homo sapiens
tgcgatgactacttt

SEQ ID NO: 413044 - DNA, 15 bp, Homo sapiens
ctgcgatgactactt

SEQ ID NO: 413045 - DNA, 15 bp, Homo sapiens
gctgcgatgactact

SEQ ID NO: 413046 - DNA, 15 bp, Homo sapiens
tgctgcgatgactac

SEQ ID NO: 413047 - DNA, 15 bp, Homo sapiens
atgctgcgatgacta

SEQ ID NO: 413048 - DNA, 15 bp, Homo sapiens
aatgctgcgatgact

SEQ ID NO: 413049 - DNA, 15 bp, Homo sapiens
aaatgctgcgatgac

SEQ ID NO: 413050 - DNA, 15 bp, Homo sapiens
caaatgctgcgatga

SEQ ID NO: 413051 - DNA, 15 bp, Homo sapiens
tcaaatgctgcgatg

SEQ ID NO: 413052 - DNA, 15 bp, Homo sapiens
ctcaaatgctgcgat

SEQ ID NO: 413053 - DNA, 15 bp, Homo sapiens
tctcaaatgctgcga

SEQ ID NO: 413054 - DNA, 15 bp, Homo sapiens
gtctcaaatgctgcg

SEQ ID NO: 413055 - DNA, 15 bp, Homo sapiens
agtctcaaatgctgc

SEQ ID NO: 413056 - DNA, 15 bp, Homo sapiens
cagtctcaaatgctg

SEQ ID NO: 413057 - DNA, 15 bp, Homo sapiens
ccagtctcaaatgct

SEQ ID NO: 413058 - DNA, 15 bp, Homo sapiens
cccagtctcaaatgc

SEQ ID NO: 413059 - DNA, 15 bp, Homo sapiens
gcccagtctcaaatg

SEQ ID NO: 413060 - DNA, 15 bp, Homo sapiens
tgcccagtctcaaat

SEQ ID NO: 413061 - DNA, 15 bp, Homo sapiens
atgcccagtctcaaa

SEQ ID NO: 413062 - DNA, 15 bp, Homo sapiens
catgcccagtctcaa

SEQ ID NO: 413063 - DNA, 15 bp, Homo sapiens
ccatgcccagtctca

SEQ ID NO: 413064 - DNA, 15 bp, Homo sapiens
tccatgcccagtctc

SEQ ID NO: 413065 - DNA, 15 bp, Homo sapiens
gtccatgcccagtct

SEQ ID NO: 413066 - DNA, 15 bp, Homo sapiens
agtccatgcccagtc

SEQ ID NO: 413067 - DNA, 15 bp, Homo sapiens
gagtccatgcccagt

SEQ ID NO: 413068 - DNA, 15 bp, Homo sapiens
ggagtccatgcccag

SEQ ID NO: 413069 - DNA, 15 bp, Homo sapiens
aggagtccatgccca

SEQ ID NO: 413070 - DNA, 15 bp, Homo sapiens
taggagtccatgccc

SEQ ID NO: 413071 - DNA, 15 bp, Homo sapiens
ctaggagtccatgcc

SEQ ID NO: 413072 - DNA, 15 bp, Homo sapiens
tctaggagtccatgc

SEQ ID NO: 413073 - DNA, 15 bp, Homo sapiens
ctctaggagtccatg

SEQ ID NO: 413074 - DNA, 15 bp, Homo sapiens
actctaggagtccat

SEQ ID NO: 413075 - DNA, 15 bp, Homo sapiens
aactctaggagtcca

SEQ ID NO: 413076 - DNA, 15 bp, Homo sapiens
gaactctaggagtcc

SEQ ID NO: 413077 - DNA, 15 bp, Homo sapiens
tgaactctaggagtc

SEQ ID NO: 413078 - DNA, 15 bp, Homo sapiens
gtgaactctaggagt

SEQ ID NO: 413079 - DNA, 15 bp, Homo sapiens
agtgaactctaggag

SEQ ID NO: 413080 - DNA, 15 bp, Homo sapiens
gagtgaactctagga

SEQ ID NO: 413081 - DNA, 15 bp, Homo sapiens
cgagtgaactctagg

SEQ ID NO: 413082 - DNA, 15 bp, Homo sapiens
acgagtgaactctag

SEQ ID NO: 413083 - DNA, 15 bp, Homo sapiens
aacgagtgaactcta

SEQ ID NO: 413084 - DNA, 15 bp, Homo sapiens
gaacgagtgaactct

SEQ ID NO: 413085 - DNA, 15 bp, Homo sapiens
agaacgagtgaactc

SEQ ID NO: 413086 - DNA, 15 bp, Homo sapiens
aagaacgagtgaact

SEQ ID NO: 413087 - DNA, 15 bp, Homo sapiens
aaagaacgagtgaac

SEQ ID NO: 413088 - DNA, 15 bp, Homo sapiens
gaaagaacgagtgaa

SEQ ID NO: 413089 - DNA, 15 bp, Homo sapiens
ggaaagaacgagtga

SEQ ID NO: 413090 - DNA, 15 bp, Homo sapiens
gggaaagaacgagtg

SEQ ID NO: 413091 - DNA, 15 bp, Homo sapiens
tgggaaagaacgagt

SEQ ID NO: 413092 - DNA, 15 bp, Homo sapiens
ttgggaaagaacgag

SEQ ID NO: 413093 - DNA, 15 bp, Homo sapiens
tttgggaaagaacga

SEQ ID NO: 413094 - DNA, 15 bp, Homo sapiens
ctttgggaaagaacg

SEQ ID NO: 413095 - DNA, 15 bp, Homo sapiens
actttgggaaagaac

SEQ ID NO: 413096 - DNA, 15 bp, Homo sapiens
cactttgggaaagaa

SEQ ID NO: 413097 - DNA, 15 bp, Homo sapiens
gcactttgggaaaga

SEQ ID NO: 413098 - DNA, 15 bp, Homo sapiens
tgcactttgggaaag

SEQ ID NO: 413099 - DNA, 15 bp, Homo sapiens
atgcactttgggaaa

SEQ ID NO: 413100 - DNA, 15 bp, Homo sapiens
aatgcactttgggaa

SEQ ID NO: 413101 - DNA, 15 bp, Homo sapiens
caatgcactttggga

SEQ ID NO: 413102 - DNA, 15 bp, Homo sapiens
acaatgcactttggg

SEQ ID NO: 413103 - DNA, 15 bp, Homo sapiens
aacaatgcactttgg

SEQ ID NO: 413104 - DNA, 15 bp, Homo sapiens
caacaatgcactttg

SEQ ID NO: 413105 - DNA, 15 bp, Homo sapiens
acaacaatgcacttt

SEQ ID NO: 413106 - DNA, 15 bp, Homo sapiens
cacaacaatgcactt

SEQ ID NO: 413107 - DNA, 15 bp, Homo sapiens
ccacaacaatgcact

SEQ ID NO: 413108 - DNA, 15 bp, Homo sapiens
gccacaacaatgcac

SEQ ID NO: 413109 - DNA, 15 bp, Homo sapiens
tgccacaacaatgca

SEQ ID NO: 413110 - DNA, 15 bp, Homo sapiens
ttgccacaacaatgc

SEQ ID NO: 413111 - DNA, 15 bp, Homo sapiens
gttgccacaacaatg

SEQ ID NO: 413112 - DNA, 15 bp, Homo sapiens
agttgccacaacaat

SEQ ID NO: 413113 - DNA, 15 bp, Homo sapiens
tagttgccacaacaa

SEQ ID NO: 413114 - DNA, 15 bp, Homo sapiens
gtagttgccacaaca

SEQ ID NO: 413115 - DNA, 15 bp, Homo sapiens
ggtagttgccacaac

SEQ ID NO: 413116 - DNA, 15 bp, Homo sapiens
gggtagttgccacaa

SEQ ID NO: 413117 - DNA, 15 bp, Homo sapiens
ggggtagttgccaca

SEQ ID NO: 413118 - DNA, 15 bp, Homo sapiens
aggggtagttgccac

SEQ ID NO: 413119 - DNA, 15 bp, Homo sapiens
gaggggtagttgcca

SEQ ID NO: 413120 - DNA, 15 bp, Homo sapiens
tgaggggtagttgcc

SEQ ID NO: 413121 - DNA, 15 bp, Homo sapiens
gtgaggggtagttgc

SEQ ID NO: 413122 - DNA, 15 bp, Homo sapiens
tgtgaggggtagttg

SEQ ID NO: 413123 - DNA, 15 bp, Homo sapiens
gtgtgaggggtagtt

SEQ ID NO: 413124 - DNA, 15 bp, Homo sapiens
tgtgtgaggggtagt

SEQ ID NO: 413125 - DNA, 15 bp, Homo sapiens
gtgtgtgaggggtag

SEQ ID NO: 413126 - DNA, 15 bp, Homo sapiens
cgtgtgtgaggggta

SEQ ID NO: 413127 - DNA, 15 bp, Homo sapiens
acgtgtgtgaggggt

SEQ ID NO: 413128 - DNA, 15 bp, Homo sapiens
cacgtgtgtgagggg

SEQ ID NO: 413129 - DNA, 15 bp, Homo sapiens
acacgtgtgtgaggg

SEQ ID NO: 413130 - DNA, 15 bp, Homo sapiens
aacacgtgtgtgagg

SEQ ID NO: 413131 - DNA, 15 bp, Homo sapiens
taacacgtgtgtgag

SEQ ID NO: 413132 - DNA, 15 bp, Homo sapiens
ataacacgtgtgtga

SEQ ID NO: 413133 - DNA, 15 bp, Homo sapiens
gataacacgtgtgtg

SEQ ID NO: 413134 - DNA, 15 bp, Homo sapiens
tgataacacgtgtgt

SEQ ID NO: 413135 - DNA, 15 bp, Homo sapiens
ttgataacacgtgtg

SEQ ID NO: 413136 - DNA, 15 bp, Homo sapiens
gttgataacacgtgt

SEQ ID NO: 413137 - DNA, 15 bp, Homo sapiens
ggttgataacacgtg

SEQ ID NO: 413138 - DNA, 15 bp, Homo sapiens
tggttgataacacgt

SEQ ID NO: 413139 - DNA, 15 bp, Homo sapiens
gtggttgataacacg

SEQ ID NO: 413140 - DNA, 15 bp, Homo sapiens
ggtggttgataacac

SEQ ID NO: 413141 - DNA, 15 bp, Homo sapiens
gggtggttgataaca

SEQ ID NO: 413142 - DNA, 15 bp, Homo sapiens
tgggtggttgataac

SEQ ID NO: 413143 - DNA, 15 bp, Homo sapiens
gtgggtggttgataa

SEQ ID NO: 413144 - DNA, 15 bp, Homo sapiens
agtgggtggttgata

SEQ ID NO: 413145 - DNA, 15 bp, Homo sapiens
tagtgggtggttgat

SEQ ID NO: 413146 - DNA, 15 bp, Homo sapiens
ttagtgggtggttga

SEQ ID NO: 413147 - DNA, 15 bp, Homo sapiens
tttagtgggtggttg

SEQ ID NO: 413148 - DNA, 15 bp, Homo sapiens
ttttagtgggtggtt

SEQ ID NO: 413149 - DNA, 15 bp, Homo sapiens
tttttagtgggtggt

SEQ ID NO: 413150 - DNA, 15 bp, Homo sapiens
ttttttagtgggtgg

SEQ ID NO: 413151 - DNA, 15 bp, Homo sapiens
cttttttagtgggtg

SEQ ID NO: 413152 - DNA, 15 bp, Homo sapiens
tcttttttagtgggt

SEQ ID NO: 413153 - DNA, 15 bp, Homo sapiens
atcttttttagtggg

SEQ ID NO: 413154 - DNA, 15 bp, Homo sapiens
catcttttttagtgg

SEQ ID NO: 413155 - DNA, 15 bp, Homo sapiens
gcatcttttttagtg

SEQ ID NO: 413156 - DNA, 15 bp, Homo sapiens
ggcatcttttttagt

SEQ ID NO: 413157 - DNA, 15 bp, Homo sapiens
aggcatcttttttag

SEQ ID NO: 413158 - DNA, 15 bp, Homo sapiens
caggcatctttttta

SEQ ID NO: 413159 - DNA, 15 bp, Homo sapiens
acaggcatctttttt

SEQ ID NO: 413160 - DNA, 15 bp, Homo sapiens
gacaggcatcttttt

SEQ ID NO: 413161 - DNA, 15 bp, Homo sapiens
tgacaggcatctttt

SEQ ID NO: 413162 - DNA, 15 bp, Homo sapiens
gtgacaggcatcttt

SEQ ID NO: 413163 - DNA, 15 bp, Homo sapiens
agtgacaggcatctt

SEQ ID NO: 413164 - DNA, 15 bp, Homo sapiens
cagtgacaggcatct

SEQ ID NO: 413165 - DNA, 15 bp, Homo sapiens
ccagtgacaggcatc

SEQ ID NO: 413166 - DNA, 15 bp, Homo sapiens
gccagtgacaggcat

SEQ ID NO: 413167 - DNA, 15 bp, Homo sapiens
ggccagtgacaggca

SEQ ID NO: 413168 - DNA, 15 bp, Homo sapiens
tggccagtgacaggc

SEQ ID NO: 413169 - DNA, 15 bp, Homo sapiens
ttggccagtgacagg

SEQ ID NO: 413170 - DNA, 15 bp, Homo sapiens
gttggccagtgacag

SEQ ID NO: 413171 - DNA, 15 bp, Homo sapiens
agttggccagtgaca

SEQ ID NO: 413172 - DNA, 15 bp, Homo sapiens
tagttggccagtgac

SEQ ID NO: 413173 - DNA, 15 bp, Homo sapiens
ctagttggccagtga

SEQ ID NO: 413174 - DNA, 15 bp, Homo sapiens
actagttggccagtg

SEQ ID NO: 413175 - DNA, 15 bp, Homo sapiens
tactagttggccagt

SEQ ID NO: 413176 - DNA, 15 bp, Homo sapiens
atactagttggccag

SEQ ID NO: 413177 - DNA, 15 bp, Homo sapiens
tatactagttggcca

SEQ ID NO: 413178 - DNA, 15 bp, Homo sapiens
ctatactagttggcc

SEQ ID NO: 413179 - DNA, 15 bp, Homo sapiens
tctatactagttggc

SEQ ID NO: 413180 - DNA, 15 bp, Homo sapiens
gtctatactagttgg

SEQ ID NO: 413181 - DNA, 15 bp, Homo sapiens
ggtctatactagttg

SEQ ID NO: 413182 - DNA, 15 bp, Homo sapiens
gggtctatactagtt

SEQ ID NO: 413183 - DNA, 15 bp, Homo sapiens
cgggtctatactagt

SEQ ID NO: 413184 - DNA, 15 bp, Homo sapiens
tcgggtctatactag

SEQ ID NO: 413185 - DNA, 15 bp, Homo sapiens
gtcgggtctatacta

SEQ ID NO: 413186 - DNA, 15 bp, Homo sapiens
agtcgggtctatact

SEQ ID NO: 413187 - DNA, 15 bp, Homo sapiens
aagtcgggtctatac

SEQ ID NO: 413188 - DNA, 15 bp, Homo sapiens
aaagtcgggtctata

SEQ ID NO: 413189 - DNA, 15 bp, Homo sapiens
taaagtcgggtctat

SEQ ID NO: 413190 - DNA, 15 bp, Homo sapiens
ttaaagtcgggtcta

SEQ ID NO: 413191 - DNA, 15 bp, Homo sapiens
cttaaagtcgggtct

SEQ ID NO: 413192 - DNA, 15 bp, Homo sapiens
tcttaaagtcgggtc

SEQ ID NO: 413193 - DNA, 15 bp, Homo sapiens
atcttaaagtcgggt

SEQ ID NO: 413194 - DNA, 15 bp, Homo sapiens
tatcttaaagtcggg

SEQ ID NO: 413195 - DNA, 15 bp, Homo sapiens
atatcttaaagtcgg

SEQ ID NO: 413196 - DNA, 15 bp, Homo sapiens
catatcttaaagtcg

SEQ ID NO: 413197 - DNA, 15 bp, Homo sapiens
ccatatcttaaagtc

SEQ ID NO: 413198 - DNA, 15 bp, Homo sapiens
cccatatcttaaagt

SEQ ID NO: 413199 - DNA, 15 bp, Homo sapiens
ccccatatcttaaag

SEQ ID NO: 413200 - DNA, 15 bp, Homo sapiens
accccatatcttaaa

SEQ ID NO: 413201 - DNA, 15 bp, Homo sapiens
caccccatatcttaa

SEQ ID NO: 413202 - DNA, 15 bp, Homo sapiens
tcaccccatatctta

SEQ ID NO: 413203 - DNA, 15 bp, Homo sapiens
ctcaccccatatctt

SEQ ID NO: 413204 - DNA, 15 bp, Homo sapiens
actcaccccatatct

SEQ ID NO: 413205 - DNA, 15 bp, Homo sapiens
cactcaccccatatc

SEQ ID NO: 413206 - DNA, 15 bp, Homo sapiens
acactcaccccatat

SEQ ID NO: 413207 - DNA, 15 bp, Homo sapiens
gacactcaccccata

SEQ ID NO: 413208 - DNA, 15 bp, Homo sapiens
agacactcaccccat

SEQ ID NO: 413209 - DNA, 15 bp, Homo sapiens
cagacactcacccca

SEQ ID NO: 413210 - DNA, 15 bp, Homo sapiens
gcagacactcacccc

SEQ ID NO: 413211 - DNA, 15 bp, Homo sapiens
tgcagacactcaccc

SEQ ID NO: 413212 - DNA, 15 bp, Homo sapiens
ttgcagacactcacc

SEQ ID NO: 413213 - DNA, 15 bp, Homo sapiens
cttgcagacactcac

SEQ ID NO: 413214 - DNA, 15 bp, Homo sapiens
tcttgcagacactca

SEQ ID NO: 413215 - DNA, 15 bp, Homo sapiens
ttcttgcagacactc

SEQ ID NO: 413216 - DNA, 15 bp, Homo sapiens
attcttgcagacact

SEQ ID NO: 413217 - DNA, 15 bp, Homo sapiens
tattcttgcagacac

SEQ ID NO: 413218 - DNA, 15 bp, Homo sapiens
gtattcttgcagaca

SEQ ID NO: 413219 - DNA, 15 bp, Homo sapiens
agtattcttgcagac

SEQ ID NO: 413220 - DNA, 15 bp, Homo sapiens
aagtattcttgcaga

SEQ ID NO: 413221 - DNA, 15 bp, Homo sapiens
taagtattcttgcag

SEQ ID NO: 413222 - DNA, 15 bp, Homo sapiens
gtaagtattcttgca

SEQ ID NO: 413223 - DNA, 15 bp, Homo sapiens
agtaagtattcttgc

SEQ ID NO: 413224 - DNA, 15 bp, Homo sapiens
tagtaagtattcttg

SEQ ID NO: 413225 - DNA, 15 bp, Homo sapiens
gtagtaagtattctt

SEQ ID NO: 413226 - DNA, 15 bp, Homo sapiens
tgtagtaagtattct

SEQ ID NO: 413227 - DNA, 15 bp, Homo sapiens
ctgtagtaagtattc

SEQ ID NO: 413228 - DNA, 15 bp, Homo sapiens
gctgtagtaagtatt

SEQ ID NO: 413229 - DNA, 15 bp, Homo sapiens
ggctgtagtaagtat

SEQ ID NO: 413230 - DNA, 15 bp, Homo sapiens
aggctgtagtaagta

SEQ ID NO: 413231 - DNA, 15 bp, Homo sapiens
caggctgtagtaagt

SEQ ID NO: 413232 - DNA, 15 bp, Homo sapiens
ccaggctgtagtaag

SEQ ID NO: 413233 - DNA, 15 bp, Homo sapiens
gccaggctgtagtaa

SEQ ID NO: 413234 - DNA, 15 bp, Homo sapiens
agccaggctgtagta

SEQ ID NO: 413235 - DNA, 15 bp, Homo sapiens
gagccaggctgtagt

SEQ ID NO: 413236 - DNA, 15 bp, Homo sapiens
tgagccaggctgtag

SEQ ID NO: 413237 - DNA, 15 bp, Homo sapiens
atgagccaggctgta

SEQ ID NO: 413238 - DNA, 15 bp, Homo sapiens
aatgagccaggctgt

SEQ ID NO: 413239 - DNA, 15 bp, Homo sapiens
aaatgagccaggctg

SEQ ID NO: 413240 - DNA, 15 bp, Homo sapiens
aaaatgagccaggct

SEQ ID NO: 413241 - DNA, 15 bp, Homo sapiens
gaaaatgagccaggc

SEQ ID NO: 413242 - DNA, 15 bp, Homo sapiens
agaaaatgagccagg

SEQ ID NO: 413243 - DNA, 15 bp, Homo sapiens
cagaaaatgagccag

SEQ ID NO: 413244 - DNA, 15 bp, Homo sapiens
acagaaaatgagcca

SEQ ID NO: 413245 - DNA, 15 bp, Homo sapiens
aacagaaaatgagcc

SEQ ID NO: 413246 - DNA, 15 bp, Homo sapiens
aaacagaaaatgagc

SEQ ID NO: 413247 - DNA, 15 bp, Homo sapiens
aaaacagaaaatgag

SEQ ID NO: 413248 - DNA, 15 bp, Homo sapiens
taaaacagaaaatga

SEQ ID NO: 413249 - DNA, 15 bp, Homo sapiens
ataaaacagaaaatg

SEQ ID NO: 413250 - DNA, 15 bp, Homo sapiens
tataaaacagaaaat

SEQ ID NO: 413251 - DNA, 15 bp, Homo sapiens
ttataaaacagaaaa

SEQ ID NO: 413252 - DNA, 15 bp, Homo sapiens
tttataaaacagaaa

SEQ ID NO: 413253 - DNA, 15 bp, Homo sapiens
ttttataaaacagaa

SEQ ID NO: 413254 - DNA, 15 bp, Homo sapiens
attttataaaacaga

SEQ ID NO: 413255 - DNA, 15 bp, Homo sapiens
tattttataaaacag

SEQ ID NO: 413256 - DNA, 15 bp, Homo sapiens
ttattttataaaaca

SEQ ID NO: 413257 - DNA, 15 bp, Homo sapiens
tttattttataaaac

SEQ ID NO: 413258 - DNA, 15 bp, Homo sapiens
ttttattttataaaa

SEQ ID NO: 413259 - DNA, 15 bp, Homo sapiens
gttttattttataaa

SEQ ID NO: 413260 - DNA, 15 bp, Homo sapiens
ggttttattttataa

SEQ ID NO: 413261 - DNA, 15 bp, Homo sapiens
tggttttattttata

SEQ ID NO: 413262 - DNA, 15 bp, Homo sapiens
gtggttttattttat

SEQ ID NO: 413263 - DNA, 15 bp, Homo sapiens
ggtggttttatttta

SEQ ID NO: 413264 - DNA, 15 bp, Homo sapiens
aggtggttttatttt

SEQ ID NO: 413265 - DNA, 15 bp, Homo sapiens
gaggtggttttattt

SEQ ID NO: 413266 - DNA, 15 bp, Homo sapiens
agaggtggttttatt

SEQ ID NO: 413267 - DNA, 15 bp, Homo sapiens
gagaggtggttttat

SEQ ID NO: 413268 - DNA, 15 bp, Homo sapiens
tgagaggtggtttta

SEQ ID NO: 413269 - DNA, 15 bp, Homo sapiens
atgagaggtggtttt

SEQ ID NO: 413270 - DNA, 15 bp, Homo sapiens
aatgagaggtggttt

SEQ ID NO: 413271 - DNA, 15 bp, Homo sapiens
aaatgagaggtggtt

SEQ ID NO: 413272 - DNA, 15 bp, Homo sapiens
gaaatgagaggtggt

SEQ ID NO: 413273 - DNA, 15 bp, Homo sapiens
agaaatgagaggtgg

SEQ ID NO: 413274 - DNA, 15 bp, Homo sapiens
aagaaatgagaggtg

SEQ ID NO: 413275 - DNA, 15 bp, Homo sapiens
caagaaatgagaggt

SEQ ID NO: 413276 - DNA, 15 bp, Homo sapiens
acaagaaatgagagg

SEQ ID NO: 413277 - DNA, 15 bp, Homo sapiens
aacaagaaatgagag

SEQ ID NO: 413278 - DNA, 15 bp, Homo sapiens
caacaagaaatgaga

SEQ ID NO: 413279 - DNA, 15 bp, Homo sapiens
tcaacaagaaatgag

SEQ ID NO: 413280 - DNA, 15 bp, Homo sapiens
gtcaacaagaaatga

SEQ ID NO: 413281 - DNA, 15 bp, Homo sapiens
agtcaacaagaaatg

SEQ ID NO: 413282 - DNA, 15 bp, Homo sapiens
aagtcaacaagaaat

SEQ ID NO: 413283 - DNA, 15 bp, Homo sapiens
aaagtcaacaagaaa

SEQ ID NO: 413284 - DNA, 15 bp, Homo sapiens
gaaagtcaacaagaa

SEQ ID NO: 413285 - DNA, 15 bp, Homo sapiens
tgaaagtcaacaaga

SEQ ID NO: 413286 - DNA, 15 bp, Homo sapiens
gtgaaagtcaacaag

SEQ ID NO: 413287 - DNA, 15 bp, Homo sapiens
agtgaaagtcaacaa

SEQ ID NO: 413288 - DNA, 15 bp, Homo sapiens
aagtgaaagtcaaca

SEQ ID NO: 413289 - DNA, 15 bp, Homo sapiens
aaagtgaaagtcaac

SEQ ID NO: 413290 - DNA, 15 bp, Homo sapiens
gaaagtgaaagtcaa

SEQ ID NO: 413291 - DNA, 15 bp, Homo sapiens
agaaagtgaaagtca

SEQ ID NO: 413292 - DNA, 15 bp, Homo sapiens
tagaaagtgaaagtc

SEQ ID NO: 413293 - DNA, 15 bp, Homo sapiens
gtagaaagtgaaagt

SEQ ID NO: 413294 - DNA, 15 bp, Homo sapiens
ggtagaaagtgaaag

SEQ ID NO: 413295 - DNA, 15 bp, Homo sapiens
aggtagaaagtgaaa

SEQ ID NO: 413296 - DNA, 15 bp, Homo sapiens
aaggtagaaagtgaa

SEQ ID NO: 413297 - DNA, 15 bp, Homo sapiens
aaaggtagaaagtga

SEQ ID NO: 413298 - DNA, 15 bp, Homo sapiens
aaaaggtagaaagtg

SEQ ID NO: 413299 - DNA, 15 bp, Homo sapiens
gaaaaggtagaaagt

SEQ ID NO: 413300 - DNA, 15 bp, Homo sapiens
agaaaaggtagaaag

SEQ ID NO: 413301 - DNA, 15 bp, Homo sapiens
aagaaaaggtagaaa

SEQ ID NO: 413302 - DNA, 15 bp, Homo sapiens
gaagaaaaggtagaa

SEQ ID NO: 413303 - DNA, 15 bp, Homo sapiens
agaagaaaaggtaga

SEQ ID NO: 413304 - DNA, 15 bp, Homo sapiens
aagaagaaaaggtag

SEQ ID NO: 413305 - DNA, 15 bp, Homo sapiens
aaagaagaaaaggta

SEQ ID NO: 413306 - DNA, 15 bp, Homo sapiens
taaagaagaaaaggt

SEQ ID NO: 413307 - DNA, 15 bp, Homo sapiens
ataaagaagaaaagg

SEQ ID NO: 413308 - DNA, 15 bp, Homo sapiens
aataaagaagaaaag

SEQ ID NO: 413309 - DNA, 15 bp, Homo sapiens
aaataaagaagaaaa

SEQ ID NO: 413310 - DNA, 15 bp, Homo sapiens
aaaataaagaagaaa

SEQ ID NO: 413311 - DNA, 15 bp, Homo sapiens
aaaaataaagaagaa

SEQ ID NO: 413312 - DNA, 15 bp, Homo sapiens
gaaaaataaagaaga

SEQ ID NO: 413313 - DNA, 15 bp, Homo sapiens
ggaaaaataaagaag

SEQ ID NO: 413314 - DNA, 15 bp, Homo sapiens
tggaaaaataaagaa

SEQ ID NO: 413315 - DNA, 15 bp, Homo sapiens
ttggaaaaataaaga

SEQ ID NO: 413316 - DNA, 15 bp, Homo sapiens
tttggaaaaataaag

SEQ ID NO: 413317 - DNA, 15 bp, Homo sapiens
ctttggaaaaataaa

SEQ ID NO: 413318 - DNA, 15 bp, Homo sapiens
cctttggaaaaataa

SEQ ID NO: 413319 - DNA, 15 bp, Homo sapiens
ccctttggaaaaata

SEQ ID NO: 413320 - DNA, 15 bp, Homo sapiens
tccctttggaaaaat

SEQ ID NO: 413321 - DNA, 15 bp, Homo sapiens
ctccctttggaaaaa

SEQ ID NO: 413322 - DNA, 15 bp, Homo sapiens
gctccctttggaaaa

SEQ ID NO: 413323 - DNA, 15 bp, Homo sapiens
ggctccctttggaaa

SEQ ID NO: 413324 - DNA, 15 bp, Homo sapiens
aggctccctttggaa

SEQ ID NO: 413325 - DNA, 15 bp, Homo sapiens
caggctccctttgga

SEQ ID NO: 413326 - DNA, 15 bp, Homo sapiens
tcaggctccctttgg

SEQ ID NO: 413327 - DNA, 15 bp, Homo sapiens
ctcaggctccctttg

SEQ ID NO: 413328 - DNA, 15 bp, Homo sapiens
cctcaggctcccttt

SEQ ID NO: 413329 - DNA, 15 bp, Homo sapiens
gcctcaggctccctt

SEQ ID NO: 413330 - DNA, 15 bp, Homo sapiens
ggcctcaggctccct

SEQ ID NO: 413331 - DNA, 15 bp, Homo sapiens
tggcctcaggctccc

SEQ ID NO: 413332 - DNA, 15 bp, Homo sapiens
ctggcctcaggctcc

SEQ ID NO: 413333 - DNA, 15 bp, Homo sapiens
tctggcctcaggctc

SEQ ID NO: 413334 - DNA, 15 bp, Homo sapiens
atctggcctcaggct

SEQ ID NO: 413335 - DNA, 15 bp, Homo sapiens
aatctggcctcaggc

SEQ ID NO: 413336 - DNA, 15 bp, Homo sapiens
aaatctggcctcagg

SEQ ID NO: 413337 - DNA, 15 bp, Homo sapiens
aaaatctggcctcag

SEQ ID NO: 413338 - DNA, 15 bp, Homo sapiens
aaaaatctggcctca

SEQ ID NO: 413339 - DNA, 15 bp, Homo sapiens
taaaaatctggcctc

SEQ ID NO: 413340 - DNA, 15 bp, Homo sapiens
ttaaaaatctggcct

SEQ ID NO: 413341 - DNA, 15 bp, Homo sapiens
tttaaaaatctggcc

SEQ ID NO: 413342 - DNA, 15 bp, Homo sapiens
ttttaaaaatctggc

SEQ ID NO: 413343 - DNA, 15 bp, Homo sapiens
tttttaaaaatctgg

SEQ ID NO: 413344 - DNA, 15 bp, Homo sapiens
ctttttaaaaatctg

SEQ ID NO: 413345 - DNA, 15 bp, Homo sapiens
cctttttaaaaatct

SEQ ID NO: 413346 - DNA, 15 bp, Homo sapiens
acctttttaaaaatc

SEQ ID NO: 413347 - DNA, 15 bp, Homo sapiens
cacctttttaaaaat

SEQ ID NO: 413348 - DNA, 15 bp, Homo sapiens
acacctttttaaaaa

SEQ ID NO: 413349 - DNA, 15 bp, Homo sapiens
aacacctttttaaaa

SEQ ID NO: 413350 - DNA, 15 bp, Homo sapiens
aaacacctttttaaa

SEQ ID NO: 413351 - DNA, 15 bp, Homo sapiens
taaacacctttttaa

SEQ ID NO: 413352 - DNA, 15 bp, Homo sapiens
gtaaacaccttttta

SEQ ID NO: 413353 - DNA, 15 bp, Homo sapiens
agtaaacaccttttt

SEQ ID NO: 413354 - DNA, 15 bp, Homo sapiens
aagtaaacacctttt

SEQ ID NO: 413355 - DNA, 15 bp, Homo sapiens
gaagtaaacaccttt

SEQ ID NO: 413356 - DNA, 15 bp, Homo sapiens
tgaagtaaacacctt

SEQ ID NO: 413357 - DNA, 15 bp, Homo sapiens
ctgaagtaaacacct

SEQ ID NO: 413358 - DNA, 15 bp, Homo sapiens
actgaagtaaacacc

SEQ ID NO: 413359 - DNA, 15 bp, Homo sapiens
tactgaagtaaacac

SEQ ID NO: 413360 - DNA, 15 bp, Homo sapiens
ttactgaagtaaaca

SEQ ID NO: 413361 - DNA, 15 bp, Homo sapiens
tttactgaagtaaac

SEQ ID NO: 413362 - DNA, 15 bp, Homo sapiens
gtttactgaagtaaa

SEQ ID NO: 413363 - DNA, 15 bp, Homo sapiens
tgtttactgaagtaa

SEQ ID NO: 413364 - DNA, 15 bp, Homo sapiens
atgtttactgaagta

SEQ ID NO: 413365 - DNA, 15 bp, Homo sapiens
catgtttactgaagt

SEQ ID NO: 413366 - DNA, 15 bp, Homo sapiens
tcatgtttactgaag

SEQ ID NO: 413367 - DNA, 15 bp, Homo sapiens
atcatgtttactgaa

SEQ ID NO: 413368 - DNA, 15 bp, Homo sapiens
aatcatgtttactga

SEQ ID NO: 413369 - DNA, 15 bp, Homo sapiens
aaatcatgtttactg

SEQ ID NO: 413370 - DNA, 15 bp, Homo sapiens
caaatcatgtttact

SEQ ID NO: 413371 - DNA, 15 bp, Homo sapiens
ccaaatcatgtttac

SEQ ID NO: 413372 - DNA, 15 bp, Homo sapiens
gccaaatcatgttta

SEQ ID NO: 413373 - DNA, 15 bp, Homo sapiens
agccaaatcatgttt

SEQ ID NO: 413374 - DNA, 15 bp, Homo sapiens
aagccaaatcatgtt

SEQ ID NO: 413375 - DNA, 15 bp, Homo sapiens
caagccaaatcatgt

SEQ ID NO: 413376 - DNA, 15 bp, Homo sapiens
acaagccaaatcatg

SEQ ID NO: 413377 - DNA, 15 bp, Homo sapiens
gacaagccaaatcat

SEQ ID NO: 413378 - DNA, 15 bp, Homo sapiens
tgacaagccaaatca

SEQ ID NO: 413379 - DNA, 15 bp, Homo sapiens
gtgacaagccaaatc

SEQ ID NO: 413380 - DNA, 15 bp, Homo sapiens
ggtgacaagccaaat

SEQ ID NO: 413381 - DNA, 15 bp, Homo sapiens
aggtgacaagccaaa

SEQ ID NO: 413382 - DNA, 15 bp, Homo sapiens
taggtgacaagccaa

SEQ ID NO: 413383 - DNA, 15 bp, Homo sapiens
gtaggtgacaagcca

SEQ ID NO: 413384 - DNA, 15 bp, Homo sapiens
tgtaggtgacaagcc

SEQ ID NO: 413385 - DNA, 15 bp, Homo sapiens
gtgtaggtgacaagc

SEQ ID NO: 413386 - DNA, 15 bp, Homo sapiens
tgtgtaggtgacaag

SEQ ID NO: 413387 - DNA, 15 bp, Homo sapiens
ttgtgtaggtgacaa

SEQ ID NO: 413388 - DNA, 15 bp, Homo sapiens
attgtgtaggtgaca

SEQ ID NO: 413389 - DNA, 15 bp, Homo sapiens
gattgtgtaggtgac

SEQ ID NO: 413390 - DNA, 15 bp, Homo sapiens
agattgtgtaggtga

SEQ ID NO: 413391 - DNA, 15 bp, Homo sapiens
cagattgtgtaggtg

SEQ ID NO: 413392 - DNA, 15 bp, Homo sapiens
acagattgtgtaggt

SEQ ID NO: 413393 - DNA, 15 bp, Homo sapiens
gacagattgtgtagg

SEQ ID NO: 413394 - DNA, 15 bp, Homo sapiens
tgacagattgtgtag

SEQ ID NO: 413395 - DNA, 15 bp, Homo sapiens
gtgacagattgtgta

SEQ ID NO: 413396 - DNA, 15 bp, Homo sapiens
agtgacagattgtgt

SEQ ID NO: 413397 - DNA, 15 bp, Homo sapiens
tagtgacagattgtg

SEQ ID NO: 413398 - DNA, 15 bp, Homo sapiens
ttagtgacagattgt

SEQ ID NO: 413399 - DNA, 15 bp, Homo sapiens
attagtgacagattg

SEQ ID NO: 413400 - DNA, 15 bp, Homo sapiens
aattagtgacagatt

SEQ ID NO: 413401 - DNA, 15 bp, Homo sapiens
gaattagtgacagat

SEQ ID NO: 413402 - DNA, 15 bp, Homo sapiens
agaattagtgacaga

SEQ ID NO: 413403 - DNA, 15 bp, Homo sapiens
aagaattagtgacag

SEQ ID NO: 413404 - DNA, 15 bp, Homo sapiens
gaagaattagtgaca

SEQ ID NO: 413405 - DNA, 15 bp, Homo sapiens
agaagaattagtgac

SEQ ID NO: 413406 - DNA, 15 bp, Homo sapiens
aagaagaattagtga

SEQ ID NO: 413407 - DNA, 15 bp, Homo sapiens
gaagaagaattagtg

SEQ ID NO: 413408 - DNA, 15 bp, Homo sapiens
ggaagaagaattagt

SEQ ID NO: 413409 - DNA, 15 bp, Homo sapiens
tggaagaagaattag

SEQ ID NO: 413410 - DNA, 15 bp, Homo sapiens
gtggaagaagaatta

SEQ ID NO: 413411 - DNA, 15 bp, Homo sapiens
tgtggaagaagaatt

SEQ ID NO: 413412 - DNA, 15 bp, Homo sapiens
ttgtggaagaagaat

SEQ ID NO: 413413 - DNA, 15 bp, Homo sapiens
attgtggaagaagaa

SEQ ID NO: 413414 - DNA, 15 bp, Homo sapiens
gattgtggaagaaga

SEQ ID NO: 413415 - DNA, 15 bp, Homo sapiens
ggattgtggaagaag

SEQ ID NO: 413416 - DNA, 15 bp, Homo sapiens
gggattgtggaagaa

SEQ ID NO: 413417 - DNA, 15 bp, Homo sapiens
tgggattgtggaaga

SEQ ID NO: 413418 - DNA, 15 bp, Homo sapiens
atgggattgtggaag

SEQ ID NO: 413419 - DNA, 15 bp, Homo sapiens
aatgggattgtggaa

SEQ ID NO: 413420 - DNA, 15 bp, Homo sapiens
gaatgggattgtgga

SEQ ID NO: 413421 - DNA, 15 bp, Homo sapiens
tgaatgggattgtgg

SEQ ID NO: 413422 - DNA, 15 bp, Homo sapiens
gtgaatgggattgtg

SEQ ID NO: 413423 - DNA, 15 bp, Homo sapiens
cgtgaatgggattgt

SEQ ID NO: 413424 - DNA, 15 bp, Homo sapiens
acgtgaatgggattg

SEQ ID NO: 413425 - DNA, 15 bp, Homo sapiens
aacgtgaatgggatt

SEQ ID NO: 413426 - DNA, 15 bp, Homo sapiens
gaacgtgaatgggat

SEQ ID NO: 413427 - DNA, 15 bp, Homo sapiens
agaacgtgaatggga

SEQ ID NO: 413428 - DNA, 15 bp, Homo sapiens
gagaacgtgaatggg

SEQ ID NO: 413429 - DNA, 15 bp, Homo sapiens
tgagaacgtgaatgg

SEQ ID NO: 413430 - DNA, 15 bp, Homo sapiens
ctgagaacgtgaatg

SEQ ID NO: 413431 - DNA, 15 bp, Homo sapiens
gctgagaacgtgaat

SEQ ID NO: 413432 - DNA, 15 bp, Homo sapiens
tgctgagaacgtgaa

SEQ ID NO: 413433 - DNA, 15 bp, Homo sapiens
ttgctgagaacgtga

SEQ ID NO: 413434 - DNA, 15 bp, Homo sapiens
tttgctgagaacgtg

SEQ ID NO: 413435 - DNA, 15 bp, Homo sapiens
atttgctgagaacgt

SEQ ID NO: 413436 - DNA, 15 bp, Homo sapiens
catttgctgagaacg

SEQ ID NO: 413437 - DNA, 15 bp, Homo sapiens
gcatttgctgagaac

SEQ ID NO: 413438 - DNA, 15 bp, Homo sapiens
ggcatttgctgagaa

SEQ ID NO: 413439 - DNA, 15 bp, Homo sapiens
aggcatttgctgaga

SEQ ID NO: 413440 - DNA, 15 bp, Homo sapiens
taggcatttgctgag

SEQ ID NO: 413441 - DNA, 15 bp, Homo sapiens
ttaggcatttgctga

SEQ ID NO: 413442 - DNA, 15 bp, Homo sapiens
cttaggcatttgctg

SEQ ID NO: 413443 - DNA, 15 bp, Homo sapiens
gcttaggcatttgct

SEQ ID NO: 413444 - DNA, 15 bp, Homo sapiens
agcttaggcatttgc

SEQ ID NO: 413445 - DNA, 15 bp, Homo sapiens
cagcttaggcatttg

SEQ ID NO: 413446 - DNA, 15 bp, Homo sapiens
ccagcttaggcattt

SEQ ID NO: 413447 - DNA, 15 bp, Homo sapiens
cccagcttaggcatt

SEQ ID NO: 413448 - DNA, 15 bp, Homo sapiens
gcccagcttaggcat

SEQ ID NO: 413449 - DNA, 15 bp, Homo sapiens
agcccagcttaggca

SEQ ID NO: 413450 - DNA, 15 bp, Homo sapiens
aagcccagcttaggc

SEQ ID NO: 413451 - DNA, 15 bp, Homo sapiens
gaagcccagcttagg

SEQ ID NO: 413452 - DNA, 15 bp, Homo sapiens
agaagcccagcttag

SEQ ID NO: 413453 - DNA, 15 bp, Homo sapiens
tagaagcccagctta

SEQ ID NO: 413454 - DNA, 15 bp, Homo sapiens
ctagaagcccagctt

SEQ ID NO: 413455 - DNA, 15 bp, Homo sapiens
tctagaagcccagct

SEQ ID NO: 413456 - DNA, 15 bp, Homo sapiens
atctagaagcccagc

SEQ ID NO: 413457 - DNA, 15 bp, Homo sapiens
gatctagaagcccag

SEQ ID NO: 413458 - DNA, 15 bp, Homo sapiens
tgatctagaagccca

SEQ ID NO: 413459 - DNA, 15 bp, Homo sapiens
ctgatctagaagccc

SEQ ID NO: 413460 - DNA, 15 bp, Homo sapiens
actgatctagaagcc

SEQ ID NO: 413461 - DNA, 15 bp, Homo sapiens
aactgatctagaagc

SEQ ID NO: 413462 - DNA, 15 bp, Homo sapiens
gaactgatctagaag

SEQ ID NO: 413463 - DNA, 15 bp, Homo sapiens
agaactgatctagaa

SEQ ID NO: 413464 - DNA, 15 bp, Homo sapiens
cagaactgatctaga

SEQ ID NO: 413465 - DNA, 15 bp, Homo sapiens
gcagaactgatctag

SEQ ID NO: 413466 - DNA, 15 bp, Homo sapiens
agcagaactgatcta

SEQ ID NO: 413467 - DNA, 15 bp, Homo sapiens
tagcagaactgatct

SEQ ID NO: 413468 - DNA, 15 bp, Homo sapiens
ctagcagaactgatc

SEQ ID NO: 413469 - DNA, 15 bp, Homo sapiens
tctagcagaactgat

SEQ ID NO: 413470 - DNA, 15 bp, Homo sapiens
ttctagcagaactga

SEQ ID NO: 413471 - DNA, 15 bp, Homo sapiens
attctagcagaactg

SEQ ID NO: 413472 - DNA, 15 bp, Homo sapiens
aattctagcagaact

SEQ ID NO: 413473 - DNA, 15 bp, Homo sapiens
aaattctagcagaac

SEQ ID NO: 413474 - DNA, 15 bp, Homo sapiens
caaattctagcagaa

SEQ ID NO: 413475 - DNA, 15 bp, Homo sapiens
acaaattctagcaga

SEQ ID NO: 413476 - DNA, 15 bp, Homo sapiens
cacaaattctagcag

SEQ ID NO: 413477 - DNA, 15 bp, Homo sapiens
acacaaattctagca

SEQ ID NO: 413478 - DNA, 15 bp, Homo sapiens
cacacaaattctagc

SEQ ID NO: 413479 - DNA, 15 bp, Homo sapiens
acacacaaattctag

SEQ ID NO: 413480 - DNA, 15 bp, Homo sapiens
cacacacaaattcta

SEQ ID NO: 413481 - DNA, 15 bp, Homo sapiens
acacacacaaattct

SEQ ID NO: 413482 - DNA, 15 bp, Homo sapiens
cacacacacaaattc

SEQ ID NO: 413483 - DNA, 15 bp, Homo sapiens
acacacacacaaatt

SEQ ID NO: 413484 - DNA, 15 bp, Homo sapiens
cacacacacacaaat

SEQ ID NO: 413485 - DNA, 15 bp, Homo sapiens
acacacacacacaaa

SEQ ID NO: 413486 - DNA, 15 bp, Homo sapiens
cacacacacacacaa

SEQ ID NO: 413487 - DNA, 15 bp, Homo sapiens
gcacacacacacaca

SEQ ID NO: 413488 - DNA, 15 bp, Homo sapiens
tgcacacacacacac

SEQ ID NO: 413489 - DNA, 15 bp, Homo sapiens
gtgcacacacacaca

SEQ ID NO: 413490 - DNA, 15 bp, Homo sapiens
cgtgcacacacacac

SEQ ID NO: 413491 - DNA, 15 bp, Homo sapiens
gcgtgcacacacaca

SEQ ID NO: 413492 - DNA, 15 bp, Homo sapiens
cgcgtgcacacacac

SEQ ID NO: 413493 - DNA, 15 bp, Homo sapiens
gcgcgtgcacacaca

SEQ ID NO: 413494 - DNA, 15 bp, Homo sapiens
cgcgcgtgcacacac

SEQ ID NO: 413495 - DNA, 15 bp, Homo sapiens
acgcgcgtgcacaca

SEQ ID NO: 413496 - DNA, 15 bp, Homo sapiens
cacgcgcgtgcacac

SEQ ID NO: 413497 - DNA, 15 bp, Homo sapiens
acacgcgcgtgcaca

SEQ ID NO: 413498 - DNA, 15 bp, Homo sapiens
cacacgcgcgtgcac

SEQ ID NO: 413499 - DNA, 15 bp, Homo sapiens
gcacacgcgcgtgca

SEQ ID NO: 413500 - DNA, 15 bp, Homo sapiens
tgcacacgcgcgtgc

SEQ ID NO: 413501 - DNA, 15 bp, Homo sapiens
atgcacacgcgcgtg

SEQ ID NO: 413502 - DNA, 15 bp, Homo sapiens
catgcacacgcgcgt

SEQ ID NO: 413503 - DNA, 15 bp, Homo sapiens
acatgcacacgcgcg

SEQ ID NO: 413504 - DNA, 15 bp, Homo sapiens
cacatgcacacgcgc

SEQ ID NO: 413505 - DNA, 15 bp, Homo sapiens
acacatgcacacgcg

SEQ ID NO: 413506 - DNA, 15 bp, Homo sapiens
cacacatgcacacgc

SEQ ID NO: 413507 - DNA, 15 bp, Homo sapiens
gcacacatgcacacg

SEQ ID NO: 413508 - DNA, 15 bp, Homo sapiens
tgcacacatgcacac

SEQ ID NO: 413509 - DNA, 15 bp, Homo sapiens
atgcacacatgcaca

SEQ ID NO: 413510 - DNA, 15 bp, Homo sapiens
catgcacacatgcac

SEQ ID NO: 413511 - DNA, 15 bp, Homo sapiens
acatgcacacatgca

SEQ ID NO: 413512 - DNA, 15 bp, Homo sapiens
gacatgcacacatgc

SEQ ID NO: 413513 - DNA, 15 bp, Homo sapiens
ggacatgcacacatg

SEQ ID NO: 413514 - DNA, 15 bp, Homo sapiens
tggacatgcacacat

SEQ ID NO: 413515 - DNA, 15 bp, Homo sapiens
gtggacatgcacaca

SEQ ID NO: 413516 - DNA, 15 bp, Homo sapiens
cgtggacatgcacac

SEQ ID NO: 413517 - DNA, 15 bp, Homo sapiens
acgtggacatgcaca

SEQ ID NO: 413518 - DNA, 15 bp, Homo sapiens
cacgtggacatgcac

SEQ ID NO: 413519 - DNA, 15 bp, Homo sapiens
acacgtggacatgca

SEQ ID NO: 413520 - DNA, 15 bp, Homo sapiens
cacacgtggacatgc

SEQ ID NO: 413521 - DNA, 15 bp, Homo sapiens
acacacgtggacatg

SEQ ID NO: 413522 - DNA, 15 bp, Homo sapiens
cacacacgtggacat

SEQ ID NO: 413523 - DNA, 15 bp, Homo sapiens
acacacacgtggaca

SEQ ID NO: 413524 - DNA, 15 bp, Homo sapiens
cacacacacgtggac

SEQ ID NO: 413525 - DNA, 15 bp, Homo sapiens
gcacacacacgtgga

SEQ ID NO: 413526 - DNA, 15 bp, Homo sapiens
tgcacacacacgtgg

SEQ ID NO: 413527 - DNA, 15 bp, Homo sapiens
atgcacacacacgtg

SEQ ID NO: 413528 - DNA, 15 bp, Homo sapiens
catgcacacacacgt

SEQ ID NO: 413529 - DNA, 15 bp, Homo sapiens
acatgcacacacacg

SEQ ID NO: 413530 - DNA, 15 bp, Homo sapiens
gacatgcacacacac

SEQ ID NO: 413531 - DNA, 15 bp, Homo sapiens
ggacatgcacacaca

SEQ ID NO: 413532 - DNA, 15 bp, Homo sapiens
tggacatgcacacac

SEQ ID NO: 413533 - DNA, 15 bp, Homo sapiens
tgtggacatgcacac

SEQ ID NO: 413534 - DNA, 15 bp, Homo sapiens
gtgtggacatgcaca

SEQ ID NO: 413535 - DNA, 15 bp, Homo sapiens
tgtgtggacatgcac

SEQ ID NO: 413536 - DNA, 15 bp, Homo sapiens
atgtgtggacatgca

SEQ ID NO: 413537 - DNA, 15 bp, Homo sapiens
catgtgtggacatgc

SEQ ID NO: 413538 - DNA, 15 bp, Homo sapiens
acatgtgtggacatg

SEQ ID NO: 413539 - DNA, 15 bp, Homo sapiens
cacatgtgtggacat

SEQ ID NO: 413540 - DNA, 15 bp, Homo sapiens
acacatgtgtggaca

SEQ ID NO: 413541 - DNA, 15 bp, Homo sapiens
cacacatgtgtggac

SEQ ID NO: 413542 - DNA, 15 bp, Homo sapiens
gcacacatgtgtgga

SEQ ID NO: 413543 - DNA, 15 bp, Homo sapiens
tgcacacatgtgtgg

SEQ ID NO: 413544 - DNA, 15 bp, Homo sapiens
gtgcacacatgtgtg

SEQ ID NO: 413545 - DNA, 15 bp, Homo sapiens
agtgcacacatgtgt

SEQ ID NO: 413546 - DNA, 15 bp, Homo sapiens
cagtgcacacatgtg

SEQ ID NO: 413547 - DNA, 15 bp, Homo sapiens
ccagtgcacacatgt

SEQ ID NO: 413548 - DNA, 15 bp, Homo sapiens
tccagtgcacacatg

SEQ ID NO: 413549 - DNA, 15 bp, Homo sapiens
ctccagtgcacacat

SEQ ID NO: 413550 - DNA, 15 bp, Homo sapiens
cctccagtgcacaca

SEQ ID NO: 413551 - DNA, 15 bp, Homo sapiens
tcctccagtgcacac

SEQ ID NO: 413552 - DNA, 15 bp, Homo sapiens
ttcctccagtgcaca

SEQ ID NO: 413553 - DNA, 15 bp, Homo sapiens
gttcctccagtgcac

SEQ ID NO: 413554 - DNA, 15 bp, Homo sapiens
tgttcctccagtgca

SEQ ID NO: 413555 - DNA, 15 bp, Homo sapiens
ttgttcctccagtgc

SEQ ID NO: 413556 - DNA, 15 bp, Homo sapiens
cttgttcctccagtg

SEQ ID NO: 413557 - DNA, 15 bp, Homo sapiens
tcttgttcctccagt

SEQ ID NO: 413558 - DNA, 15 bp, Homo sapiens
gtcttgttcctccag

SEQ ID NO: 413559 - DNA, 15 bp, Homo sapiens
agtcttgttcctcca

SEQ ID NO: 413560 - DNA, 15 bp, Homo sapiens
cagtcttgttcctcc

SEQ ID NO: 413561 - DNA, 15 bp, Homo sapiens
tcagtcttgttcctc

SEQ ID NO: 413562 - DNA, 15 bp, Homo sapiens
ttcagtcttgttcct

SEQ ID NO: 413563 - DNA, 15 bp, Homo sapiens
tttcagtcttgttcc

SEQ ID NO: 413564 - DNA, 15 bp, Homo sapiens
gtttcagtcttgttc

SEQ ID NO: 413565 - DNA, 15 bp, Homo sapiens
ggtttcagtcttgtt

SEQ ID NO: 413566 - DNA, 15 bp, Homo sapiens
gggtttcagtcttgt

SEQ ID NO: 413567 - DNA, 15 bp, Homo sapiens
agggtttcagtcttg

SEQ ID NO: 413568 - DNA, 15 bp, Homo sapiens
cagggtttcagtctt

SEQ ID NO: 413569 - DNA, 15 bp, Homo sapiens
acagggtttcagtct

SEQ ID NO: 413570 - DNA, 15 bp, Homo sapiens
tacagggtttcagtc

SEQ ID NO: 413571 - DNA, 15 bp, Homo sapiens
gtacagggtttcagt

SEQ ID NO: 413572 - DNA, 15 bp, Homo sapiens
agtacagggtttcag

SEQ ID NO: 413573 - DNA, 15 bp, Homo sapiens
aagtacagggtttca

SEQ ID NO: 413574 - DNA, 15 bp, Homo sapiens
aaagtacagggtttc

SEQ ID NO: 413575 - DNA, 15 bp, Homo sapiens
gaaagtacagggttt

SEQ ID NO: 413576 - DNA, 15 bp, Homo sapiens
agaaagtacagggtt

SEQ ID NO: 413577 - DNA, 15 bp, Homo sapiens
cagaaagtacagggt

SEQ ID NO: 413578 - DNA, 15 bp, Homo sapiens
ccagaaagtacaggg

SEQ ID NO: 413579 - DNA, 15 bp, Homo sapiens
accagaaagtacagg

SEQ ID NO: 413580 - DNA, 15 bp, Homo sapiens
aaccagaaagtacag

SEQ ID NO: 413581 - DNA, 15 bp, Homo sapiens
aaaccagaaagtaca

SEQ ID NO: 413582 - DNA, 15 bp, Homo sapiens
aaaaccagaaagtac

SEQ ID NO: 413583 - DNA, 15 bp, Homo sapiens
caaaaccagaaagta

SEQ ID NO: 413584 - DNA, 15 bp, Homo sapiens
acaaaaccagaaagt

SEQ ID NO: 413585 - DNA, 15 bp, Homo sapiens
tacaaaaccagaaag

SEQ ID NO: 413586 - DNA, 15 bp, Homo sapiens
gtacaaaaccagaaa

SEQ ID NO: 413587 - DNA, 15 bp, Homo sapiens
tgtacaaaaccagaa

SEQ ID NO: 413588 - DNA, 15 bp, Homo sapiens
ttgtacaaaaccaga

SEQ ID NO: 413589 - DNA, 15 bp, Homo sapiens
cttgtacaaaaccag

SEQ ID NO: 413590 - DNA, 15 bp, Homo sapiens
tcttgtacaaaacca

SEQ ID NO: 413591 - DNA, 15 bp, Homo sapiens
gtcttgtacaaaacc

SEQ ID NO: 413592 - DNA, 15 bp, Homo sapiens
tgtcttgtacaaaac

SEQ ID NO: 413593 - DNA, 15 bp, Homo sapiens
ttgtcttgtacaaaa

SEQ ID NO: 413594 - DNA, 15 bp, Homo sapiens
attgtcttgtacaaa

SEQ ID NO: 413595 - DNA, 15 bp, Homo sapiens
cattgtcttgtacaa

SEQ ID NO: 413596 - DNA, 15 bp, Homo sapiens
gcattgtcttgtaca

SEQ ID NO: 413597 - DNA, 15 bp, Homo sapiens
agcattgtcttgtac

SEQ ID NO: 413598 - DNA, 15 bp, Homo sapiens
aagcattgtcttgta

SEQ ID NO: 413599 - DNA, 15 bp, Homo sapiens
aaagcattgtcttgt

SEQ ID NO: 413600 - DNA, 15 bp, Homo sapiens
aaaagcattgtcttg

SEQ ID NO: 413601 - DNA, 15 bp, Homo sapiens
taaaagcattgtctt

SEQ ID NO: 413602 - DNA, 15 bp, Homo sapiens
ataaaagcattgtct

SEQ ID NO: 413603 - DNA, 15 bp, Homo sapiens
aataaaagcattgtc

SEQ ID NO: 413604 - DNA, 15 bp, Homo sapiens
taataaaagcattgt

SEQ ID NO: 413605 - DNA, 15 bp, Homo sapiens
ttaataaaagcattg

SEQ ID NO: 413606 - DNA, 15 bp, Homo sapiens
attaataaaagcatt

SEQ ID NO: 413607 - DNA, 15 bp, Homo sapiens
gattaataaaagcat

SEQ ID NO: 413608 - DNA, 15 bp, Homo sapiens
tgattaataaaagca

SEQ ID NO: 413609 - DNA, 15 bp, Homo sapiens
gtgattaataaaagc

SEQ ID NO: 413610 - DNA, 15 bp, Homo sapiens
ggtgattaataaaag

SEQ ID NO: 413611 - DNA, 15 bp, Homo sapiens
aggtgattaataaaa

SEQ ID NO: 413612 - DNA, 15 bp, Homo sapiens
caggtgattaataaa

SEQ ID NO: 413613 - DNA, 15 bp, Homo sapiens
acaggtgattaataa

SEQ ID NO: 413614 - DNA, 15 bp, Homo sapiens
gacaggtgattaata

SEQ ID NO: 413615 - DNA, 15 bp, Homo sapiens
agacaggtgattaat

SEQ ID NO: 413616 - DNA, 15 bp, Homo sapiens
cagacaggtgattaa

SEQ ID NO: 413617 - DNA, 15 bp, Homo sapiens
acagacaggtgatta

SEQ ID NO: 413618 - DNA, 15 bp, Homo sapiens
aacagacaggtgatt

SEQ ID NO: 413619 - DNA, 15 bp, Homo sapiens
gaacagacaggtgat

SEQ ID NO: 413620 - DNA, 15 bp, Homo sapiens
ggaacagacaggtga

SEQ ID NO: 413621 - DNA, 15 bp, Homo sapiens
gggaacagacaggtg

SEQ ID NO: 413622 - DNA, 15 bp, Homo sapiens
agggaacagacaggt

SEQ ID NO: 413623 - DNA, 15 bp, Homo sapiens
tagggaacagacagg

SEQ ID NO: 413624 - DNA, 15 bp, Homo sapiens
ctagggaacagacag

SEQ ID NO: 413625 - DNA, 15 bp, Homo sapiens
actagggaacagaca

SEQ ID NO: 413626 - DNA, 15 bp, Homo sapiens
tactagggaacagac

SEQ ID NO: 413627 - DNA, 15 bp, Homo sapiens
gtactagggaacaga

SEQ ID NO: 413628 - DNA, 15 bp, Homo sapiens
ggtactagggaacag

SEQ ID NO: 413629 - DNA, 15 bp, Homo sapiens
tggtactagggaaca

SEQ ID NO: 413630 - DNA, 15 bp, Homo sapiens
ttggtactagggaac

SEQ ID NO: 413631 - DNA, 15 bp, Homo sapiens
attggtactagggaa

SEQ ID NO: 413632 - DNA, 15 bp, Homo sapiens
tattggtactaggga

SEQ ID NO: 413633 - DNA, 15 bp, Homo sapiens
ttattggtactaggg

SEQ ID NO: 413634 - DNA, 15 bp, Homo sapiens
gttattggtactagg

SEQ ID NO: 413635 - DNA, 15 bp, Homo sapiens
agttattggtactag

SEQ ID NO: 413636 - DNA, 15 bp, Homo sapiens
gagttattggtacta

SEQ ID NO: 413637 - DNA, 15 bp, Homo sapiens
ggagttattggtact

SEQ ID NO: 413638 - DNA, 15 bp, Homo sapiens
aggagttattggtac

SEQ ID NO: 413639 - DNA, 15 bp, Homo sapiens
aaggagttattggta

SEQ ID NO: 413640 - DNA, 15 bp, Homo sapiens
taaggagttattggt

SEQ ID NO: 413641 - DNA, 15 bp, Homo sapiens
ttaaggagttattgg

SEQ ID NO: 413642 - DNA, 15 bp, Homo sapiens
tttaaggagttattg

SEQ ID NO: 413643 - DNA, 15 bp, Homo sapiens
ttttaaggagttatt

SEQ ID NO: 413644 - DNA, 15 bp, Homo sapiens
tttttaaggagttat

SEQ ID NO: 413645 - DNA, 15 bp, Homo sapiens
atttttaaggagtta

SEQ ID NO: 413646 - DNA, 15 bp, Homo sapiens
aatttttaaggagtt

SEQ ID NO: 413647 - DNA, 15 bp, Homo sapiens
caatttttaaggagt

SEQ ID NO: 413648 - DNA, 15 bp, Homo sapiens
gcaatttttaaggag

SEQ ID NO: 413649 - DNA, 15 bp, Homo sapiens
agcaatttttaagga

SEQ ID NO: 413650 - DNA, 15 bp, Homo sapiens
tagcaatttttaagg

SEQ ID NO: 413651 - DNA, 15 bp, Homo sapiens
atagcaatttttaag

SEQ ID NO: 413652 - DNA, 15 bp, Homo sapiens
gatagcaatttttaa

SEQ ID NO: 413653 - DNA, 15 bp, Homo sapiens
ggatagcaattttta

SEQ ID NO: 413654 - DNA, 15 bp, Homo sapiens
aggatagcaattttt

SEQ ID NO: 413655 - DNA, 15 bp, Homo sapiens
taggatagcaatttt

SEQ ID NO: 413656 - DNA, 15 bp, Homo sapiens
ctaggatagcaattt

SEQ ID NO: 413657 - DNA, 15 bp, Homo sapiens
tctaggatagcaatt

SEQ ID NO: 413658 - DNA, 15 bp, Homo sapiens
gtctaggatagcaat

SEQ ID NO: 413659 - DNA, 15 bp, Homo sapiens
ggtctaggatagcaa

SEQ ID NO: 413660 - DNA, 15 bp, Homo sapiens
tggtctaggatagca

SEQ ID NO: 413661 - DNA, 15 bp, Homo sapiens
atggtctaggatagc

SEQ ID NO: 413662 - DNA, 15 bp, Homo sapiens
gatggtctaggatag

SEQ ID NO: 413663 - DNA, 15 bp, Homo sapiens
agatggtctaggata

SEQ ID NO: 413664 - DNA, 15 bp, Homo sapiens
aagatggtctaggat

SEQ ID NO: 413665 - DNA, 15 bp, Homo sapiens
gaagatggtctagga

SEQ ID NO: 413666 - DNA, 15 bp, Homo sapiens
ggaagatggtctagg

SEQ ID NO: 413667 - DNA, 15 bp, Homo sapiens
aggaagatggtctag

SEQ ID NO: 413668 - DNA, 15 bp, Homo sapiens
caggaagatggtcta

SEQ ID NO: 413669 - DNA, 15 bp, Homo sapiens
acaggaagatggtct

SEQ ID NO: 413670 - DNA, 15 bp, Homo sapiens
aacaggaagatggtc

SEQ ID NO: 413671 - DNA, 15 bp, Homo sapiens
gaacaggaagatggt

SEQ ID NO: 413672 - DNA, 15 bp, Homo sapiens
tgaacaggaagatgg

SEQ ID NO: 413673 - DNA, 15 bp, Homo sapiens
atgaacaggaagatg

SEQ ID NO: 413674 - DNA, 15 bp, Homo sapiens
gatgaacaggaagat

SEQ ID NO: 413675 - DNA, 15 bp, Homo sapiens
cgatgaacaggaaga

SEQ ID NO: 413676 - DNA, 15 bp, Homo sapiens
tcgatgaacaggaag

SEQ ID NO: 413677 - DNA, 15 bp, Homo sapiens
ctcgatgaacaggaa

SEQ ID NO: 413678 - DNA, 15 bp, Homo sapiens
gctcgatgaacagga

SEQ ID NO: 413679 - DNA, 15 bp, Homo sapiens
ggctcgatgaacagg

SEQ ID NO: 413680 - DNA, 15 bp, Homo sapiens
gggctcgatgaacag

SEQ ID NO: 413681 - DNA, 15 bp, Homo sapiens
agggctcgatgaaca

SEQ ID NO: 413682 - DNA, 15 bp, Homo sapiens
gagggctcgatgaac

SEQ ID NO: 413683 - DNA, 15 bp, Homo sapiens
tgagggctcgatgaa

SEQ ID NO: 413684 - DNA, 15 bp, Homo sapiens
ttgagggctcgatga

SEQ ID NO: 413685 - DNA, 15 bp, Homo sapiens
attgagggctcgatg

SEQ ID NO: 413686 - DNA, 15 bp, Homo sapiens
gattgagggctcgat

SEQ ID NO: 413687 - DNA, 15 bp, Homo sapiens
ggattgagggctcga

SEQ ID NO: 413688 - DNA, 15 bp, Homo sapiens
gggattgagggctcg

SEQ ID NO: 413689 - DNA, 15 bp, Homo sapiens
tgggattgagggctc

SEQ ID NO: 413690 - DNA, 15 bp, Homo sapiens
gtgggattgagggct

SEQ ID NO: 413691 - DNA, 15 bp, Homo sapiens
ggtgggattgagggc

SEQ ID NO: 413692 - DNA, 15 bp, Homo sapiens
gggtgggattgaggg

SEQ ID NO: 413693 - DNA, 15 bp, Homo sapiens
tgggtgggattgagg

SEQ ID NO: 413694 - DNA, 15 bp, Homo sapiens
atgggtgggattgag

SEQ ID NO: 413695 - DNA, 15 bp, Homo sapiens
gatgggtgggattga

SEQ ID NO: 413696 - DNA, 15 bp, Homo sapiens
agatgggtgggattg

SEQ ID NO: 413697 - DNA, 15 bp, Homo sapiens
gagatgggtgggatt

SEQ ID NO: 413698 - DNA, 15 bp, Homo sapiens
agagatgggtgggat

SEQ ID NO: 413699 - DNA, 15 bp, Homo sapiens
tagagatgggtggga

SEQ ID NO: 413700 - DNA, 15 bp, Homo sapiens
atagagatgggtggg

SEQ ID NO: 413701 - DNA, 15 bp, Homo sapiens
aatagagatgggtgg

SEQ ID NO: 413702 - DNA, 15 bp, Homo sapiens
taatagagatgggtg

SEQ ID NO: 413703 - DNA, 15 bp, Homo sapiens
ataatagagatgggt

SEQ ID NO: 413704 - DNA, 15 bp, Homo sapiens
gataatagagatggg

SEQ ID NO: 413705 - DNA, 15 bp, Homo sapiens
tgataatagagatgg

SEQ ID NO: 413706 - DNA, 15 bp, Homo sapiens
atgataatagagatg

SEQ ID NO: 413707 - DNA, 15 bp, Homo sapiens
gatgataatagagat

SEQ ID NO: 413708 - DNA, 15 bp, Homo sapiens
tgatgataatagaga

SEQ ID NO: 413709 - DNA, 15 bp, Homo sapiens
gtgatgataatagag

SEQ ID NO: 413710 - DNA, 15 bp, Homo sapiens
tgtgatgataataga

SEQ ID NO: 413711 - DNA, 15 bp, Homo sapiens
atgtgatgataatag

SEQ ID NO: 413712 - DNA, 15 bp, Homo sapiens
aatgtgatgataata

SEQ ID NO: 413713 - DNA, 15 bp, Homo sapiens
aaatgtgatgataat

SEQ ID NO: 413714 - DNA, 15 bp, Homo sapiens
taaatgtgatgataa

SEQ ID NO: 413715 - DNA, 15 bp, Homo sapiens
ttaaatgtgatgata

SEQ ID NO: 413716 - DNA, 15 bp, Homo sapiens
attaaatgtgatgat

SEQ ID NO: 413717 - DNA, 15 bp, Homo sapiens
aattaaatgtgatga

SEQ ID NO: 413718 - DNA, 15 bp, Homo sapiens
taattaaatgtgatg

SEQ ID NO: 413719 - DNA, 15 bp, Homo sapiens
ttaattaaatgtgat

SEQ ID NO: 413720 - DNA, 15 bp, Homo sapiens
tttaattaaatgtga

SEQ ID NO: 413721 - DNA, 15 bp, Homo sapiens
atttaattaaatgtg

SEQ ID NO: 413722 - DNA, 15 bp, Homo sapiens
catttaattaaatgt

SEQ ID NO: 413723 - DNA, 15 bp, Homo sapiens
gcatttaattaaatg

SEQ ID NO: 413724 - DNA, 15 bp, Homo sapiens
ggcatttaattaaat

SEQ ID NO: 413725 - DNA, 15 bp, Homo sapiens
aggcatttaattaaa

SEQ ID NO: 413726 - DNA, 15 bp, Homo sapiens
aaggcatttaattaa

SEQ ID NO: 413727 - DNA, 15 bp, Homo sapiens
aaaggcatttaatta

SEQ ID NO: 413728 - DNA, 15 bp, Homo sapiens
caaaggcatttaatt

SEQ ID NO: 413729 - DNA, 15 bp, Homo sapiens
gcaaaggcatttaat

SEQ ID NO: 413730 - DNA, 15 bp, Homo sapiens
agcaaaggcatttaa

SEQ ID NO: 413731 - DNA, 15 bp, Homo sapiens
gagcaaaggcattta

SEQ ID NO: 413732 - DNA, 15 bp, Homo sapiens
agagcaaaggcattt

SEQ ID NO: 413733 - DNA, 15 bp, Homo sapiens
aagagcaaaggcatt

SEQ ID NO: 413734 - DNA, 15 bp, Homo sapiens
taagagcaaaggcat

SEQ ID NO: 413735 - DNA, 15 bp, Homo sapiens
gtaagagcaaaggca

SEQ ID NO: 413736 - DNA, 15 bp, Homo sapiens
agtaagagcaaaggc

SEQ ID NO: 413737 - DNA, 15 bp, Homo sapiens
aagtaagagcaaagg

SEQ ID NO: 413738 - DNA, 15 bp, Homo sapiens
gaagtaagagcaaag

SEQ ID NO: 413739 - DNA, 15 bp, Homo sapiens
agaagtaagagcaaa

SEQ ID NO: 413740 - DNA, 15 bp, Homo sapiens
tagaagtaagagcaa

SEQ ID NO: 413741 - DNA, 15 bp, Homo sapiens
gtagaagtaagagca

SEQ ID NO: 413742 - DNA, 15 bp, Homo sapiens
ggtagaagtaagagc

SEQ ID NO: 413743 - DNA, 15 bp, Homo sapiens
tggtagaagtaagag

SEQ ID NO: 413744 - DNA, 15 bp, Homo sapiens
ctggtagaagtaaga

SEQ ID NO: 413745 - DNA, 15 bp, Homo sapiens
tctggtagaagtaag

SEQ ID NO: 413746 - DNA, 15 bp, Homo sapiens
ttctggtagaagtaa

SEQ ID NO: 413747 - DNA, 15 bp, Homo sapiens
cttctggtagaagta

SEQ ID NO: 413748 - DNA, 15 bp, Homo sapiens
tcttctggtagaagt

SEQ ID NO: 413749 - DNA, 15 bp, Homo sapiens
atcttctggtagaag

SEQ ID NO: 413750 - DNA, 15 bp, Homo sapiens
catcttctggtagaa

SEQ ID NO: 413751 - DNA, 15 bp, Homo sapiens
ccatcttctggtaga

SEQ ID NO: 413752 - DNA, 15 bp, Homo sapiens
accatcttctggtag

SEQ ID NO: 413753 - DNA, 15 bp, Homo sapiens
caccatcttctggta

SEQ ID NO: 413754 - DNA, 15 bp, Homo sapiens
tcaccatcttctggt

SEQ ID NO: 413755 - DNA, 15 bp, Homo sapiens
atcaccatcttctgg

SEQ ID NO: 413756 - DNA, 15 bp, Homo sapiens
aatcaccatcttctg

SEQ ID NO: 413757 - DNA, 15 bp, Homo sapiens
caatcaccatcttct

SEQ ID NO: 413758 - DNA, 15 bp, Homo sapiens
acaatcaccatcttc

SEQ ID NO: 413759 - DNA, 15 bp, Homo sapiens
tacaatcaccatctt

SEQ ID NO: 413760 - DNA, 15 bp, Homo sapiens
ttacaatcaccatct

SEQ ID NO: 413761 - DNA, 15 bp, Homo sapiens
cttacaatcaccatc

SEQ ID NO: 413762 - DNA, 15 bp, Homo sapiens
tcttacaatcaccat

SEQ ID NO: 413763 - DNA, 15 bp, Homo sapiens
atcttacaatcacca

SEQ ID NO: 413764 - DNA, 15 bp, Homo sapiens
tatcttacaatcacc

SEQ ID NO: 413765 - DNA, 15 bp, Homo sapiens
atatcttacaatcac

SEQ ID NO: 413766 - DNA, 15 bp, Homo sapiens
catatcttacaatca

SEQ ID NO: 413767 - DNA, 15 bp, Homo sapiens
tcatatcttacaatc

SEQ ID NO: 413768 - DNA, 15 bp, Homo sapiens
ttcatatcttacaat

SEQ ID NO: 413769 - DNA, 15 bp, Homo sapiens
gttcatatcttacaa

SEQ ID NO: 413770 - DNA, 15 bp, Homo sapiens
agttcatatcttaca

SEQ ID NO: 413771 - DNA, 15 bp, Homo sapiens
tagttcatatcttac

SEQ ID NO: 413772 - DNA, 15 bp, Homo sapiens
gtagttcatatctta

SEQ ID NO: 413773 - DNA, 15 bp, Homo sapiens
ggtagttcatatctt

SEQ ID NO: 413774 - DNA, 15 bp, Homo sapiens
aggtagttcatatct

SEQ ID NO: 413775 - DNA, 15 bp, Homo sapiens
aaggtagttcatatc

SEQ ID NO: 413776 - DNA, 15 bp, Homo sapiens
taaggtagttcatat

SEQ ID NO: 413777 - DNA, 15 bp, Homo sapiens
ataaggtagttcata

SEQ ID NO: 413778 - DNA, 15 bp, Homo sapiens
gataaggtagttcat

SEQ ID NO: 413779 - DNA, 15 bp, Homo sapiens
agataaggtagttca

SEQ ID NO: 413780 - DNA, 15 bp, Homo sapiens
aagataaggtagttc

SEQ ID NO: 413781 - DNA, 15 bp, Homo sapiens
gaagataaggtagtt

SEQ ID NO: 413782 - DNA, 15 bp, Homo sapiens
ggaagataaggtagt

SEQ ID NO: 413783 - DNA, 15 bp, Homo sapiens
gggaagataaggtag

SEQ ID NO: 413784 - DNA, 15 bp, Homo sapiens
agggaagataaggta

SEQ ID NO: 413785 - DNA, 15 bp, Homo sapiens
tagggaagataaggt

SEQ ID NO: 413786 - DNA, 15 bp, Homo sapiens
gtagggaagataagg

SEQ ID NO: 413787 - DNA, 15 bp, Homo sapiens
agtagggaagataag

SEQ ID NO: 413788 - DNA, 15 bp, Homo sapiens
gagtagggaagataa

SEQ ID NO: 413789 - DNA, 15 bp, Homo sapiens
ggagtagggaagata

SEQ ID NO: 413790 - DNA, 15 bp, Homo sapiens
tggagtagggaagat

SEQ ID NO: 413791 - DNA, 15 bp, Homo sapiens
ttggagtagggaaga

SEQ ID NO: 413792 - DNA, 15 bp, Homo sapiens
tttggagtagggaag

SEQ ID NO: 413793 - DNA, 15 bp, Homo sapiens
atttggagtagggaa

SEQ ID NO: 413794 - DNA, 15 bp, Homo sapiens
tatttggagtaggga

SEQ ID NO: 413795 - DNA, 15 bp, Homo sapiens
atatttggagtaggg

SEQ ID NO: 413796 - DNA, 15 bp, Homo sapiens
aatatttggagtagg

SEQ ID NO: 413797 - DNA, 15 bp, Homo sapiens
gaatatttggagtag

SEQ ID NO: 413798 - DNA, 15 bp, Homo sapiens
ggaatatttggagta

SEQ ID NO: 413799 - DNA, 15 bp, Homo sapiens
tggaatatttggagt

SEQ ID NO: 413800 - DNA, 15 bp, Homo sapiens
ctggaatatttggag

SEQ ID NO: 413801 - DNA, 15 bp, Homo sapiens
tctggaatatttgga

SEQ ID NO: 413802 - DNA, 15 bp, Homo sapiens
ctctggaatatttgg

SEQ ID NO: 413803 - DNA, 15 bp, Homo sapiens
actctggaatatttg

SEQ ID NO: 413804 - DNA, 15 bp, Homo sapiens
gactctggaatattt

SEQ ID NO: 413805 - DNA, 15 bp, Homo sapiens
agactctggaatatt

SEQ ID NO: 413806 - DNA, 15 bp, Homo sapiens
tagactctggaatat

SEQ ID NO: 413807 - DNA, 15 bp, Homo sapiens
gtagactctggaata

SEQ ID NO: 413808 - DNA, 15 bp, Homo sapiens
agtagactctggaat

SEQ ID NO: 413809 - DNA, 15 bp, Homo sapiens
aagtagactctggaa

SEQ ID NO: 413810 - DNA, 15 bp, Homo sapiens
aaagtagactctgga

SEQ ID NO: 413811 - DNA, 15 bp, Homo sapiens
gaaagtagactctgg

SEQ ID NO: 413812 - DNA, 15 bp, Homo sapiens
ggaaagtagactctg

SEQ ID NO: 413813 - DNA, 15 bp, Homo sapiens
aggaaagtagactct

SEQ ID NO: 413814 - DNA, 15 bp, Homo sapiens
gaggaaagtagactc

SEQ ID NO: 413815 - DNA, 15 bp, Homo sapiens
agaggaaagtagact

SEQ ID NO: 413816 - DNA, 15 bp, Homo sapiens
cagaggaaagtagac

SEQ ID NO: 413817 - DNA, 15 bp, Homo sapiens
acagaggaaagtaga

SEQ ID NO: 413818 - DNA, 15 bp, Homo sapiens
aacagaggaaagtag

SEQ ID NO: 413819 - DNA, 15 bp, Homo sapiens
gaacagaggaaagta

SEQ ID NO: 413820 - DNA, 15 bp, Homo sapiens
ggaacagaggaaagt

SEQ ID NO: 413821 - DNA, 15 bp, Homo sapiens
aggaacagaggaaag

SEQ ID NO: 413822 - DNA, 15 bp, Homo sapiens
aaggaacagaggaaa

SEQ ID NO: 413823 - DNA, 15 bp, Homo sapiens
aaaggaacagaggaa

SEQ ID NO: 413824 - DNA, 15 bp, Homo sapiens
caaaggaacagagga

SEQ ID NO: 413825 - DNA, 15 bp, Homo sapiens
tcaaaggaacagagg

SEQ ID NO: 413826 - DNA, 15 bp, Homo sapiens
atcaaaggaacagag

SEQ ID NO: 413827 - DNA, 15 bp, Homo sapiens
aatcaaaggaacaga

SEQ ID NO: 413828 - DNA, 15 bp, Homo sapiens
aaatcaaaggaacag

SEQ ID NO: 413829 - DNA, 15 bp, Homo sapiens
aaaatcaaaggaaca

SEQ ID NO: 413830 - DNA, 15 bp, Homo sapiens
gaaaatcaaaggaac

SEQ ID NO: 413831 - DNA, 15 bp, Homo sapiens
agaaaatcaaaggaa

SEQ ID NO: 413832 - DNA, 15 bp, Homo sapiens
aagaaaatcaaagga

SEQ ID NO: 413833 - DNA, 15 bp, Homo sapiens
gaagaaaatcaaagg

SEQ ID NO: 413834 - DNA, 15 bp, Homo sapiens
ggaagaaaatcaaag

SEQ ID NO: 413835 - DNA, 15 bp, Homo sapiens
aggaagaaaatcaaa

SEQ ID NO: 413836 - DNA, 15 bp, Homo sapiens
aaggaagaaaatcaa

SEQ ID NO: 413837 - DNA, 15 bp, Homo sapiens
gaaggaagaaaatca

SEQ ID NO: 413838 - DNA, 15 bp, Homo sapiens
agaaggaagaaaatc

SEQ ID NO: 413839 - DNA, 15 bp, Homo sapiens
aagaaggaagaaaat

SEQ ID NO: 413840 - DNA, 15 bp, Homo sapiens
taagaaggaagaaaa

SEQ ID NO: 413841 - DNA, 15 bp, Homo sapiens
ttaagaaggaagaaa

SEQ ID NO: 413842 - DNA, 15 bp, Homo sapiens
attaagaaggaagaa

SEQ ID NO: 413843 - DNA, 15 bp, Homo sapiens
gattaagaaggaaga

SEQ ID NO: 413844 - DNA, 15 bp, Homo sapiens
agattaagaaggaag

SEQ ID NO: 413845 - DNA, 15 bp, Homo sapiens
tagattaagaaggaa

SEQ ID NO: 413846 - DNA, 15 bp, Homo sapiens
ttagattaagaagga

SEQ ID NO: 413847 - DNA, 15 bp, Homo sapiens
cttagattaagaagg

SEQ ID NO: 413848 - DNA, 15 bp, Homo sapiens
tcttagattaagaag

SEQ ID NO: 413849 - DNA, 15 bp, Homo sapiens
gtcttagattaagaa

SEQ ID NO: 413850 - DNA, 15 bp, Homo sapiens
ggtcttagattaaga

SEQ ID NO: 413851 - DNA, 15 bp, Homo sapiens
aggtcttagattaag

SEQ ID NO: 413852 - DNA, 15 bp, Homo sapiens
aaggtcttagattaa

SEQ ID NO: 413853 - DNA, 15 bp, Homo sapiens
gaaggtcttagatta

SEQ ID NO: 413854 - DNA, 15 bp, Homo sapiens
agaaggtcttagatt

SEQ ID NO: 413855 - DNA, 15 bp, Homo sapiens
aagaaggtcttagat

SEQ ID NO: 413856 - DNA, 15 bp, Homo sapiens
aaagaaggtcttaga

SEQ ID NO: 413857 - DNA, 15 bp, Homo sapiens
gaaagaaggtcttag

SEQ ID NO: 413858 - DNA, 15 bp, Homo sapiens
agaaagaaggtctta

SEQ ID NO: 413859 - DNA, 15 bp, Homo sapiens
aagaaagaaggtctt

SEQ ID NO: 413860 - DNA, 15 bp, Homo sapiens
gaagaaagaaggtct

SEQ ID NO: 413861 - DNA, 15 bp, Homo sapiens
ggaagaaagaaggtc

SEQ ID NO: 413862 - DNA, 15 bp, Homo sapiens
gggaagaaagaaggt

SEQ ID NO: 413863 - DNA, 15 bp, Homo sapiens
ggggaagaaagaagg

SEQ ID NO: 413864 - DNA, 15 bp, Homo sapiens
tggggaagaaagaag

SEQ ID NO: 413865 - DNA, 15 bp, Homo sapiens
ttggggaagaaagaa

SEQ ID NO: 413866 - DNA, 15 bp, Homo sapiens
cttggggaagaaaga

SEQ ID NO: 413867 - DNA, 15 bp, Homo sapiens
tcttggggaagaaag

SEQ ID NO: 413868 - DNA, 15 bp, Homo sapiens
gtcttggggaagaaa

SEQ ID NO: 413869 - DNA, 15 bp, Homo sapiens
agtcttggggaagaa

SEQ ID NO: 413870 - DNA, 15 bp, Homo sapiens
gagtcttggggaaga

SEQ ID NO: 413871 - DNA, 15 bp, Homo sapiens
ggagtcttggggaag

SEQ ID NO: 413872 - DNA, 15 bp, Homo sapiens
tggagtcttggggaa

SEQ ID NO: 413873 - DNA, 15 bp, Homo sapiens
atggagtcttgggga

SEQ ID NO: 413874 - DNA, 15 bp, Homo sapiens
catggagtcttgggg

SEQ ID NO: 413875 - DNA, 15 bp, Homo sapiens
gcatggagtcttggg

SEQ ID NO: 413876 - DNA, 15 bp, Homo sapiens
ggcatggagtcttgg

SEQ ID NO: 413877 - DNA, 15 bp, Homo sapiens
aggcatggagtcttg

SEQ ID NO: 413878 - DNA, 15 bp, Homo sapiens
taggcatggagtctt

SEQ ID NO: 413879 - DNA, 15 bp, Homo sapiens
ctaggcatggagtct

SEQ ID NO: 413880 - DNA, 15 bp, Homo sapiens
tctaggcatggagtc

SEQ ID NO: 413881 - DNA, 15 bp, Homo sapiens
ttctaggcatggagt

SEQ ID NO: 413882 - DNA, 15 bp, Homo sapiens
attctaggcatggag

SEQ ID NO: 413883 - DNA, 15 bp, Homo sapiens
tattctaggcatgga

SEQ ID NO: 413884 - DNA, 15 bp, Homo sapiens
atattctaggcatgg

SEQ ID NO: 413885 - DNA, 15 bp, Homo sapiens
tatattctaggcatg

SEQ ID NO: 413886 - DNA, 15 bp, Homo sapiens
ttatattctaggcat

SEQ ID NO: 413887 - DNA, 15 bp, Homo sapiens
gttatattctaggca

SEQ ID NO: 413888 - DNA, 15 bp, Homo sapiens
ggttatattctaggc

SEQ ID NO: 413889 - DNA, 15 bp, Homo sapiens
tggttatattctagg

SEQ ID NO: 413890 - DNA, 15 bp, Homo sapiens
ttggttatattctag

SEQ ID NO: 413891 - DNA, 15 bp, Homo sapiens
tttggttatattcta

SEQ ID NO: 413892 - DNA, 15 bp, Homo sapiens
atttggttatattct

SEQ ID NO: 413893 - DNA, 15 bp, Homo sapiens
catttggttatattc

SEQ ID NO: 413894 - DNA, 15 bp, Homo sapiens
acatttggttatatt

SEQ ID NO: 413895 - DNA, 15 bp, Homo sapiens
aacatttggttatat

SEQ ID NO: 413896 - DNA, 15 bp, Homo sapiens
aaacatttggttata

SEQ ID NO: 413897 - DNA, 15 bp, Homo sapiens
aaaacatttggttat

SEQ ID NO: 413898 - DNA, 15 bp, Homo sapiens
aaaaacatttggtta

SEQ ID NO: 413899 - DNA, 15 bp, Homo sapiens
gaaaaacatttggtt

SEQ ID NO: 413900 - DNA, 15 bp, Homo sapiens
agaaaaacatttggt

SEQ ID NO: 413901 - DNA, 15 bp, Homo sapiens
tagaaaaacatttgg

SEQ ID NO: 413902 - DNA, 15 bp, Homo sapiens
gtagaaaaacatttg

SEQ ID NO: 413903 - DNA, 15 bp, Homo sapiens
ggtagaaaaacattt

SEQ ID NO: 413904 - DNA, 15 bp, Homo sapiens
aggtagaaaaacatt

SEQ ID NO: 413905 - DNA, 15 bp, Homo sapiens
gaggtagaaaaacat

SEQ ID NO: 413906 - DNA, 15 bp, Homo sapiens
agaggtagaaaaaca

SEQ ID NO: 413907 - DNA, 15 bp, Homo sapiens
gagaggtagaaaaac

SEQ ID NO: 413908 - DNA, 15 bp, Homo sapiens
ggagaggtagaaaaa

SEQ ID NO: 413909 - DNA, 15 bp, Homo sapiens
tggagaggtagaaaa

SEQ ID NO: 413910 - DNA, 15 bp, Homo sapiens
gtggagaggtagaaa

SEQ ID NO: 413911 - DNA, 15 bp, Homo sapiens
tgtggagaggtagaa

SEQ ID NO: 413912 - DNA, 15 bp, Homo sapiens
atgtggagaggtaga

SEQ ID NO: 413913 - DNA, 15 bp, Homo sapiens
gatgtggagaggtag

SEQ ID NO: 413914 - DNA, 15 bp, Homo sapiens
agatgtggagaggta

SEQ ID NO: 413915 - DNA, 15 bp, Homo sapiens
gagatgtggagaggt

SEQ ID NO: 413916 - DNA, 15 bp, Homo sapiens
ggagatgtggagagg

SEQ ID NO: 413917 - DNA, 15 bp, Homo sapiens
tggagatgtggagag

SEQ ID NO: 413918 - DNA, 15 bp, Homo sapiens
gtggagatgtggaga

SEQ ID NO: 413919 - DNA, 15 bp, Homo sapiens
agtggagatgtggag

SEQ ID NO: 413920 - DNA, 15 bp, Homo sapiens
gagtggagatgtgga

SEQ ID NO: 413921 - DNA, 15 bp, Homo sapiens
ggagtggagatgtgg

SEQ ID NO: 413922 - DNA, 15 bp, Homo sapiens
aggagtggagatgtg

SEQ ID NO: 413923 - DNA, 15 bp, Homo sapiens
gaggagtggagatgt

SEQ ID NO: 413924 - DNA, 15 bp, Homo sapiens
agaggagtggagatg

SEQ ID NO: 413925 - DNA, 15 bp, Homo sapiens
aagaggagtggagat

SEQ ID NO: 413926 - DNA, 15 bp, Homo sapiens
aaagaggagtggaga

SEQ ID NO: 413927 - DNA, 15 bp, Homo sapiens
caaagaggagtggag

SEQ ID NO: 413928 - DNA, 15 bp, Homo sapiens
gcaaagaggagtgga

SEQ ID NO: 413929 - DNA, 15 bp, Homo sapiens
ggcaaagaggagtgg

SEQ ID NO: 413930 - DNA, 15 bp, Homo sapiens
aggcaaagaggagtg

SEQ ID NO: 413931 - DNA, 15 bp, Homo sapiens
caggcaaagaggagt

SEQ ID NO: 413932 - DNA, 15 bp, Homo sapiens
acaggcaaagaggag

SEQ ID NO: 413933 - DNA, 15 bp, Homo sapiens
gacaggcaaagagga

SEQ ID NO: 413934 - DNA, 15 bp, Homo sapiens
ggacaggcaaagagg

SEQ ID NO: 413935 - DNA, 15 bp, Homo sapiens
tggacaggcaaagag

SEQ ID NO: 413936 - DNA, 15 bp, Homo sapiens
ttggacaggcaaaga

SEQ ID NO: 413937 - DNA, 15 bp, Homo sapiens
cttggacaggcaaag

SEQ ID NO: 413938 - DNA, 15 bp, Homo sapiens
acttggacaggcaaa

SEQ ID NO: 413939 - DNA, 15 bp, Homo sapiens
gacttggacaggcaa

SEQ ID NO: 413940 - DNA, 15 bp, Homo sapiens
agacttggacaggca

SEQ ID NO: 413941 - DNA, 15 bp, Homo sapiens
gagacttggacaggc

SEQ ID NO: 413942 - DNA, 15 bp, Homo sapiens
tgagacttggacagg

SEQ ID NO: 413943 - DNA, 15 bp, Homo sapiens
atgagacttggacag

SEQ ID NO: 413944 - DNA, 15 bp, Homo sapiens
aatgagacttggaca

SEQ ID NO: 413945 - DNA, 15 bp, Homo sapiens
caatgagacttggac

SEQ ID NO: 413946 - DNA, 15 bp, Homo sapiens
tcaatgagacttgga

SEQ ID NO: 413947 - DNA, 15 bp, Homo sapiens
ttcaatgagacttgg

SEQ ID NO: 413948 - DNA, 15 bp, Homo sapiens
gttcaatgagacttg

SEQ ID NO: 413949 - DNA, 15 bp, Homo sapiens
tgttcaatgagactt

SEQ ID NO: 413950 - DNA, 15 bp, Homo sapiens
ttgttcaatgagact

SEQ ID NO: 413951 - DNA, 15 bp, Homo sapiens
tttgttcaatgagac

SEQ ID NO: 413952 - DNA, 15 bp, Homo sapiens
ttttgttcaatgaga

SEQ ID NO: 413953 - DNA, 15 bp, Homo sapiens
tttttgttcaatgag

SEQ ID NO: 413954 - DNA, 15 bp, Homo sapiens
ctttttgttcaatga

SEQ ID NO: 413955 - DNA, 15 bp, Homo sapiens
tctttttgttcaatg

SEQ ID NO: 413956 - DNA, 15 bp, Homo sapiens
gtctttttgttcaat

SEQ ID NO: 413957 - DNA, 15 bp, Homo sapiens
ggtctttttgttcaa

SEQ ID NO: 413958 - DNA, 15 bp, Homo sapiens
gggtctttttgttca

SEQ ID NO: 413959 - DNA, 15 bp, Homo sapiens
tgggtctttttgttc

SEQ ID NO: 413960 - DNA, 15 bp, Homo sapiens
gtgggtctttttgtt

SEQ ID NO: 413961 - DNA, 15 bp, Homo sapiens
ggtgggtctttttgt

SEQ ID NO: 413962 - DNA, 15 bp, Homo sapiens
aggtgggtctttttg

SEQ ID NO: 413963 - DNA, 15 bp, Homo sapiens
gaggtgggtcttttt

SEQ ID NO: 413964 - DNA, 15 bp, Homo sapiens
tgaggtgggtctttt

SEQ ID NO: 413965 - DNA, 15 bp, Homo sapiens
ttgaggtgggtcttt

SEQ ID NO: 413966 - DNA, 15 bp, Homo sapiens
tttgaggtgggtctt

SEQ ID NO: 413967 - DNA, 15 bp, Homo sapiens
atttgaggtgggtct

SEQ ID NO: 413968 - DNA, 15 bp, Homo sapiens
gatttgaggtgggtc

SEQ ID NO: 413969 - DNA, 15 bp, Homo sapiens
ggatttgaggtgggt

SEQ ID NO: 413970 - DNA, 15 bp, Homo sapiens
gggatttgaggtggg

SEQ ID NO: 413971 - DNA, 15 bp, Homo sapiens
tgggatttgaggtgg

SEQ ID NO: 413972 - DNA, 15 bp, Homo sapiens
gtgggatttgaggtg

SEQ ID NO: 413973 - DNA, 15 bp, Homo sapiens
ggtgggatttgaggt

SEQ ID NO: 413974 - DNA, 15 bp, Homo sapiens
aggtgggatttgagg

SEQ ID NO: 413975 - DNA, 15 bp, Homo sapiens
gaggtgggatttgag

SEQ ID NO: 413976 - DNA, 15 bp, Homo sapiens
ggaggtgggatttga

SEQ ID NO: 413977 - DNA, 15 bp, Homo sapiens
aggaggtgggatttg

SEQ ID NO: 413978 - DNA, 15 bp, Homo sapiens
taggaggtgggattt

SEQ ID NO: 413979 - DNA, 15 bp, Homo sapiens
ataggaggtgggatt

SEQ ID NO: 413980 - DNA, 15 bp, Homo sapiens
tataggaggtgggat

SEQ ID NO: 413981 - DNA, 15 bp, Homo sapiens
ctataggaggtggga

SEQ ID NO: 413982 - DNA, 15 bp, Homo sapiens
cctataggaggtggg

SEQ ID NO: 413983 - DNA, 15 bp, Homo sapiens
tcctataggaggtgg

SEQ ID NO: 413984 - DNA, 15 bp, Homo sapiens
ttcctataggaggtg

SEQ ID NO: 413985 - DNA, 15 bp, Homo sapiens
cttcctataggaggt

SEQ ID NO: 413986 - DNA, 15 bp, Homo sapiens
gcttcctataggagg

SEQ ID NO: 413987 - DNA, 15 bp, Homo sapiens
ggcttcctataggag

SEQ ID NO: 413988 - DNA, 15 bp, Homo sapiens
aggcttcctatagga

SEQ ID NO: 413989 - DNA, 15 bp, Homo sapiens
aaggcttcctatagg

SEQ ID NO: 413990 - DNA, 15 bp, Homo sapiens
gaaggcttcctatag

SEQ ID NO: 413991 - DNA, 15 bp, Homo sapiens
ggaaggcttcctata

SEQ ID NO: 413992 - DNA, 15 bp, Homo sapiens
gggaaggcttcctat

SEQ ID NO: 413993 - DNA, 15 bp, Homo sapiens
agggaaggcttccta

SEQ ID NO: 413994 - DNA, 15 bp, Homo sapiens
aagggaaggcttcct

SEQ ID NO: 413995 - DNA, 15 bp, Homo sapiens
taagggaaggcttcc

SEQ ID NO: 413996 - DNA, 15 bp, Homo sapiens
ataagggaaggcttc

SEQ ID NO: 413997 - DNA, 15 bp, Homo sapiens
cataagggaaggctt

SEQ ID NO: 413998 - DNA, 15 bp, Homo sapiens
acataagggaaggct

SEQ ID NO: 413999 - DNA, 15 bp, Homo sapiens
aacataagggaaggc

SEQ ID NO: 414000 - DNA, 15 bp, Homo sapiens
gaacataagggaagg

SEQ ID NO: 414001 - DNA, 15 bp, Homo sapiens
ggaacataagggaag

SEQ ID NO: 414002 - DNA, 15 bp, Homo sapiens
gggaacataagggaa

SEQ ID NO: 414003 - DNA, 15 bp, Homo sapiens
tgggaacataaggga

SEQ ID NO: 414004 - DNA, 15 bp, Homo sapiens
ctgggaacataaggg

SEQ ID NO: 414005 - DNA, 15 bp, Homo sapiens
tctgggaacataagg

SEQ ID NO: 414006 - DNA, 15 bp, Homo sapiens
ttctgggaacataag

SEQ ID NO: 414007 - DNA, 15 bp, Homo sapiens
cttctgggaacataa

SEQ ID NO: 414008 - DNA, 15 bp, Homo sapiens
tcttctgggaacata

SEQ ID NO: 414009 - DNA, 15 bp, Homo sapiens
ttcttctgggaacat

SEQ ID NO: 414010 - DNA, 15 bp, Homo sapiens
tttcttctgggaaca

SEQ ID NO: 414011 - DNA, 15 bp, Homo sapiens
ttttcttctgggaac

SEQ ID NO: 414012 - DNA, 15 bp, Homo sapiens
tttttcttctgggaa

SEQ ID NO: 414013 - DNA, 15 bp, Homo sapiens
ctttttcttctggga

SEQ ID NO: 414014 - DNA, 15 bp, Homo sapiens
tctttttcttctggg

SEQ ID NO: 414015 - DNA, 15 bp, Homo sapiens
ctctttttcttctgg

SEQ ID NO: 414016 - DNA, 15 bp, Homo sapiens
tctctttttcttctg

SEQ ID NO: 414017 - DNA, 15 bp, Homo sapiens
atctctttttcttct

SEQ ID NO: 414018 - DNA, 15 bp, Homo sapiens
tatctctttttcttc

SEQ ID NO: 414019 - DNA, 15 bp, Homo sapiens
atatctctttttctt

SEQ ID NO: 414020 - DNA, 15 bp, Homo sapiens
tatatctctttttct

SEQ ID NO: 414021 - DNA, 15 bp, Homo sapiens
gtatatctctttttc

SEQ ID NO: 414022 - DNA, 15 bp, Homo sapiens
ggtatatctcttttt

SEQ ID NO: 414023 - DNA, 15 bp, Homo sapiens
gggtatatctctttt

SEQ ID NO: 414024 - DNA, 15 bp, Homo sapiens
ggggtatatctcttt

SEQ ID NO: 414025 - DNA, 15 bp, Homo sapiens
aggggtatatctctt

SEQ ID NO: 414026 - DNA, 15 bp, Homo sapiens
gaggggtatatctct

SEQ ID NO: 414027 - DNA, 15 bp, Homo sapiens
agaggggtatatctc

SEQ ID NO: 414028 - DNA, 15 bp, Homo sapiens
aagaggggtatatct

SEQ ID NO: 414029 - DNA, 15 bp, Homo sapiens
gaagaggggtatatc

SEQ ID NO: 414030 - DNA, 15 bp, Homo sapiens
ggaagaggggtatat

SEQ ID NO: 414031 - DNA, 15 bp, Homo sapiens
tggaagaggggtata

SEQ ID NO: 414032 - DNA, 15 bp, Homo sapiens
atggaagaggggtat

SEQ ID NO: 414033 - DNA, 15 bp, Homo sapiens
tatggaagaggggta

SEQ ID NO: 414034 - DNA, 15 bp, Homo sapiens
atatggaagaggggt

SEQ ID NO: 414035 - DNA, 15 bp, Homo sapiens
aatatggaagagggg

SEQ ID NO: 414036 - DNA, 15 bp, Homo sapiens
gaatatggaagaggg

SEQ ID NO: 414037 - DNA, 15 bp, Homo sapiens
agaatatggaagagg

SEQ ID NO: 414038 - DNA, 15 bp, Homo sapiens
aagaatatggaagag

SEQ ID NO: 414039 - DNA, 15 bp, Homo sapiens
taagaatatggaaga

SEQ ID NO: 414040 - DNA, 15 bp, Homo sapiens
ataagaatatggaag

SEQ ID NO: 414041 - DNA, 15 bp, Homo sapiens
gataagaatatggaa

SEQ ID NO: 414042 - DNA, 15 bp, Homo sapiens
tgataagaatatgga

SEQ ID NO: 414043 - DNA, 15 bp, Homo sapiens
gtgataagaatatgg

SEQ ID NO: 414044 - DNA, 15 bp, Homo sapiens
tgtgataagaatatg

SEQ ID NO: 414045 - DNA, 15 bp, Homo sapiens
ttgtgataagaatat

SEQ ID NO: 414046 - DNA, 15 bp, Homo sapiens
cttgtgataagaata

SEQ ID NO: 414047 - DNA, 15 bp, Homo sapiens
acttgtgataagaat

SEQ ID NO: 414048 - DNA, 15 bp, Homo sapiens
aacttgtgataagaa

SEQ ID NO: 414049 - DNA, 15 bp, Homo sapiens
aaacttgtgataaga

SEQ ID NO: 414050 - DNA, 15 bp, Homo sapiens
aaaacttgtgataag

SEQ ID NO: 414051 - DNA, 15 bp, Homo sapiens
caaaacttgtgataa

SEQ ID NO: 414052 - DNA, 15 bp, Homo sapiens
acaaaacttgtgata

SEQ ID NO: 414053 - DNA, 15 bp, Homo sapiens
aacaaaacttgtgat

SEQ ID NO: 414054 - DNA, 15 bp, Homo sapiens
aaacaaaacttgtga

SEQ ID NO: 414055 - DNA, 15 bp, Homo sapiens
aaaacaaaacttgtg

SEQ ID NO: 414056 - DNA, 15 bp, Homo sapiens
aaaaacaaaacttgt

SEQ ID NO: 414057 - DNA, 15 bp, Homo sapiens
taaaaacaaaacttg

SEQ ID NO: 414058 - DNA, 15 bp, Homo sapiens
ataaaaacaaaactt

SEQ ID NO: 414059 - DNA, 15 bp, Homo sapiens
aataaaaacaaaact

SEQ ID NO: 414060 - DNA, 15 bp, Homo sapiens
aaataaaaacaaaac

SEQ ID NO: 414061 - DNA, 15 bp, Homo sapiens
aaaataaaaacaaaa

SEQ ID NO: 414062 - DNA, 15 bp, Homo sapiens
aaaaataaaaacaaa

SEQ ID NO: 414063 - DNA, 15 bp, Homo sapiens
taaaaataaaaacaa

SEQ ID NO: 414064 - DNA, 15 bp, Homo sapiens
ataaaaataaaaaca

SEQ ID NO: 414065 - DNA, 15 bp, Homo sapiens
aataaaaataaaaac

SEQ ID NO: 414066 - DNA, 15 bp, Homo sapiens
aaataaaaataaaaa

SEQ ID NO: 414067 - DNA, 15 bp, Homo sapiens
aaaataaaaataaaa

SEQ ID NO: 414068 - DNA, 15 bp, Homo sapiens
caaaataaaaataaa

SEQ ID NO: 414069 - DNA, 15 bp, Homo sapiens
tcaaaataaaaataa

SEQ ID NO: 414070 - DNA, 15 bp, Homo sapiens
ctcaaaataaaaata

SEQ ID NO: 414071 - DNA, 15 bp, Homo sapiens
tctcaaaataaaaat

SEQ ID NO: 414072 - DNA, 15 bp, Homo sapiens
atctcaaaataaaaa

SEQ ID NO: 414073 - DNA, 15 bp, Homo sapiens
tatctcaaaataaaa

SEQ ID NO: 414074 - DNA, 15 bp, Homo sapiens
ctatctcaaaataaa

SEQ ID NO: 414075 - DNA, 15 bp, Homo sapiens
cctatctcaaaataa

SEQ ID NO: 414076 - DNA, 15 bp, Homo sapiens
ccctatctcaaaata

SEQ ID NO: 414077 - DNA, 15 bp, Homo sapiens
gccctatctcaaaat

SEQ ID NO: 414078 - DNA, 15 bp, Homo sapiens
ggccctatctcaaaa

SEQ ID NO: 414079 - DNA, 15 bp, Homo sapiens
aggccctatctcaaa

SEQ ID NO: 414080 - DNA, 15 bp, Homo sapiens
aaggccctatctcaa

SEQ ID NO: 414081 - DNA, 15 bp, Homo sapiens
aaaggccctatctca

SEQ ID NO: 414082 - DNA, 15 bp, Homo sapiens
gaaaggccctatctc

SEQ ID NO: 414083 - DNA, 15 bp, Homo sapiens
agaaaggccctatct

SEQ ID NO: 414084 - DNA, 15 bp, Homo sapiens
gagaaaggccctatc

SEQ ID NO: 414085 - DNA, 15 bp, Homo sapiens
agagaaaggccctat

SEQ ID NO: 414086 - DNA, 15 bp, Homo sapiens
cagagaaaggcccta

SEQ ID NO: 414087 - DNA, 15 bp, Homo sapiens
acagagaaaggccct

SEQ ID NO: 414088 - DNA, 15 bp, Homo sapiens
gacagagaaaggccc

SEQ ID NO: 414089 - DNA, 15 bp, Homo sapiens
tgacagagaaaggcc

SEQ ID NO: 414090 - DNA, 15 bp, Homo sapiens
gtgacagagaaaggc

SEQ ID NO: 414091 - DNA, 15 bp, Homo sapiens
ggtgacagagaaagg

SEQ ID NO: 414092 - DNA, 15 bp, Homo sapiens
gggtgacagagaaag

SEQ ID NO: 414093 - DNA, 15 bp, Homo sapiens
tgggtgacagagaaa

SEQ ID NO: 414094 - DNA, 15 bp, Homo sapiens
ctgggtgacagagaa

SEQ ID NO: 414095 - DNA, 15 bp, Homo sapiens
cctgggtgacagaga

SEQ ID NO: 414096 - DNA, 15 bp, Homo sapiens
gcctgggtgacagag

SEQ ID NO: 414097 - DNA, 15 bp, Homo sapiens
cactccagcctgggt

SEQ ID NO: 414098 - DNA, 15 bp, Homo sapiens
acactccagcctggg

SEQ ID NO: 414099 - DNA, 15 bp, Homo sapiens
tacactccagcctgg

SEQ ID NO: 414100 - DNA, 15 bp, Homo sapiens
ctacactccagcctg

SEQ ID NO: 414101 - DNA, 15 bp, Homo sapiens
actacactccagcct

SEQ ID NO: 414102 - DNA, 15 bp, Homo sapiens
cactacactccagcc

SEQ ID NO: 414103 - DNA, 15 bp, Homo sapiens
tcactacactccagc

SEQ ID NO: 414104 - DNA, 15 bp, Homo sapiens
atcactacactccag

SEQ ID NO: 414105 - DNA, 15 bp, Homo sapiens
catcactacactcca

SEQ ID NO: 414106 - DNA, 15 bp, Homo sapiens
gcatcactacactcc

SEQ ID NO: 414107 - DNA, 15 bp, Homo sapiens
ggcatcactacactc

SEQ ID NO: 414108 - DNA, 15 bp, Homo sapiens
tggcatcactacact

SEQ ID NO: 414109 - DNA, 15 bp, Homo sapiens
atggcatcactacac

SEQ ID NO: 414110 - DNA, 15 bp, Homo sapiens
aatggcatcactaca

SEQ ID NO: 414111 - DNA, 15 bp, Homo sapiens
taatggcatcactac

SEQ ID NO: 414112 - DNA, 15 bp, Homo sapiens
ataatggcatcacta

SEQ ID NO: 414113 - DNA, 15 bp, Homo sapiens
tataatggcatcact

SEQ ID NO: 414114 - DNA, 15 bp, Homo sapiens
ctataatggcatcac

SEQ ID NO: 414115 - DNA, 15 bp, Homo sapiens
gctataatggcatca

SEQ ID NO: 414116 - DNA, 15 bp, Homo sapiens
cgctataatggcatc

SEQ ID NO: 414117 - DNA, 15 bp, Homo sapiens
gcgctataatggcat

SEQ ID NO: 414118 - DNA, 15 bp, Homo sapiens
ggcgctataatggca

SEQ ID NO: 414119 - DNA, 15 bp, Homo sapiens
gggcgctataatggc

SEQ ID NO: 414120 - DNA, 15 bp, Homo sapiens
agggcgctataatgg

SEQ ID NO: 414121 - DNA, 15 bp, Homo sapiens
tagggcgctataatg

SEQ ID NO: 414122 - DNA, 15 bp, Homo sapiens
atagggcgctataat

SEQ ID NO: 414123 - DNA, 15 bp, Homo sapiens
tatagggcgctataa

SEQ ID NO: 414124 - DNA, 15 bp, Homo sapiens
gtatagggcgctata

SEQ ID NO: 414125 - DNA, 15 bp, Homo sapiens
ggtatagggcgctat

SEQ ID NO: 414126 - DNA, 15 bp, Homo sapiens
gggtatagggcgcta

SEQ ID NO: 414127 - DNA, 15 bp, Homo sapiens
agggtatagggcgct

SEQ ID NO: 414128 - DNA, 15 bp, Homo sapiens
gagggtatagggcgc

SEQ ID NO: 414129 - DNA, 15 bp, Homo sapiens
tgagggtatagggcg

SEQ ID NO: 414130 - DNA, 15 bp, Homo sapiens
ttgagggtatagggc

SEQ ID NO: 414131 - DNA, 15 bp, Homo sapiens
tttgagggtataggg

SEQ ID NO: 414132 - DNA, 15 bp, Homo sapiens
atttgagggtatagg

SEQ ID NO: 414133 - DNA, 15 bp, Homo sapiens
aatttgagggtatag

SEQ ID NO: 414134 - DNA, 15 bp, Homo sapiens
gaatttgagggtata

SEQ ID NO: 414135 - DNA, 15 bp, Homo sapiens
ggaatttgagggtat

SEQ ID NO: 414136 - DNA, 15 bp, Homo sapiens
aggaatttgagggta

SEQ ID NO: 414137 - DNA, 15 bp, Homo sapiens
caggaatttgagggt

SEQ ID NO: 414138 - DNA, 15 bp, Homo sapiens
ccaggaatttgaggg

SEQ ID NO: 414139 - DNA, 15 bp, Homo sapiens
cccaggaatttgagg

SEQ ID NO: 414140 - DNA, 15 bp, Homo sapiens
gcccaggaatttgag

SEQ ID NO: 414141 - DNA, 15 bp, Homo sapiens
agcccaggaatttga

SEQ ID NO: 414142 - DNA, 15 bp, Homo sapiens
gagcccaggaatttg

SEQ ID NO: 414143 - DNA, 15 bp, Homo sapiens
tgagcccaggaattt

SEQ ID NO: 414144 - DNA, 15 bp, Homo sapiens
ttgagcccaggaatt

SEQ ID NO: 414145 - DNA, 15 bp, Homo sapiens
cttgagcccaggaat

SEQ ID NO: 414146 - DNA, 15 bp, Homo sapiens
gcttgagcccaggaa

SEQ ID NO: 414147 - DNA, 15 bp, Homo sapiens
cgcttgagcccagga

SEQ ID NO: 414148 - DNA, 15 bp, Homo sapiens
tcgcttgagcccagg

SEQ ID NO: 414149 - DNA, 15 bp, Homo sapiens
atcgcttgagcccag

SEQ ID NO: 414150 - DNA, 15 bp, Homo sapiens
gatcgcttgagccca

SEQ ID NO: 414151 - DNA, 15 bp, Homo sapiens
ggatcgcttgagccc

SEQ ID NO: 414152 - DNA, 15 bp, Homo sapiens
aggatcgcttgagcc

SEQ ID NO: 414153 - DNA, 15 bp, Homo sapiens
gaggatcgcttgagc

SEQ ID NO: 414154 - DNA, 15 bp, Homo sapiens
ggaggatcgcttgag

SEQ ID NO: 414155 - DNA, 15 bp, Homo sapiens
aggaggatcgcttga

SEQ ID NO: 414156 - DNA, 15 bp, Homo sapiens
caggaggatcgcttg

SEQ ID NO: 414157 - DNA, 15 bp, Homo sapiens
gcaggaggatcgctt

SEQ ID NO: 414158 - DNA, 15 bp, Homo sapiens
ggcaggaggatcgct

SEQ ID NO: 414159 - DNA, 15 bp, Homo sapiens
aggcaggaggatcgc

SEQ ID NO: 414160 - DNA, 15 bp, Homo sapiens
aaggcaggaggatcg

SEQ ID NO: 414161 - DNA, 15 bp, Homo sapiens
caaggcaggaggatc

SEQ ID NO: 414162 - DNA, 15 bp, Homo sapiens
ccaaggcaggaggat

SEQ ID NO: 414163 - DNA, 15 bp, Homo sapiens
gccaaggcaggagga

SEQ ID NO: 414164 - DNA, 15 bp, Homo sapiens
ggccaaggcaggagg

SEQ ID NO: 414165 - DNA, 15 bp, Homo sapiens
aggccaaggcaggag

SEQ ID NO: 414166 - DNA, 15 bp, Homo sapiens
gaggccaaggcagga

SEQ ID NO: 414167 - DNA, 15 bp, Homo sapiens
ggaggccaaggcagg

SEQ ID NO: 414168 - DNA, 15 bp, Homo sapiens
gggaggccaaggcag

SEQ ID NO: 414169 - DNA, 15 bp, Homo sapiens
tgggaggccaaggca

SEQ ID NO: 414170 - DNA, 15 bp, Homo sapiens
ttgggaggccaaggc

SEQ ID NO: 414171 - DNA, 15 bp, Homo sapiens
cttgggaggccaagg

SEQ ID NO: 414172 - DNA, 15 bp, Homo sapiens
acttgggaggccaag

SEQ ID NO: 414173 - DNA, 15 bp, Homo sapiens
tacttgggaggccaa

SEQ ID NO: 414174 - DNA, 15 bp, Homo sapiens
ctacttgggaggcca

SEQ ID NO: 414175 - DNA, 15 bp, Homo sapiens
gctacttgggaggcc

SEQ ID NO: 414176 - DNA, 15 bp, Homo sapiens
ttagctacttgggag

SEQ ID NO: 414177 - DNA, 15 bp, Homo sapiens
tttagctacttggga

SEQ ID NO: 414178 - DNA, 15 bp, Homo sapiens
ttttagctacttggg

SEQ ID NO: 414179 - DNA, 15 bp, Homo sapiens
gttttagctacttgg

SEQ ID NO: 414180 - DNA, 15 bp, Homo sapiens
agttttagctacttg

SEQ ID NO: 414181 - DNA, 15 bp, Homo sapiens
tagttttagctactt

SEQ ID NO: 414182 - DNA, 15 bp, Homo sapiens
ctagttttagctact

SEQ ID NO: 414183 - DNA, 15 bp, Homo sapiens
tctagttttagctac

SEQ ID NO: 414184 - DNA, 15 bp, Homo sapiens
ctctagttttagcta

SEQ ID NO: 414185 - DNA, 15 bp, Homo sapiens
cctctagttttagct

SEQ ID NO: 414186 - DNA, 15 bp, Homo sapiens
acctctagttttagc

SEQ ID NO: 414187 - DNA, 15 bp, Homo sapiens
cacctctagttttag

SEQ ID NO: 414188 - DNA, 15 bp, Homo sapiens
acacctctagtttta

SEQ ID NO: 414189 - DNA, 15 bp, Homo sapiens
tacacctctagtttt

SEQ ID NO: 414190 - DNA, 15 bp, Homo sapiens
atacacctctagttt

SEQ ID NO: 414191 - DNA, 15 bp, Homo sapiens
tatacacctctagtt

SEQ ID NO: 414192 - DNA, 15 bp, Homo sapiens
gtatacacctctagt

SEQ ID NO: 414193 - DNA, 15 bp, Homo sapiens
ggtatacacctctag

SEQ ID NO: 414194 - DNA, 15 bp, Homo sapiens
tggtatacacctcta

SEQ ID NO: 414195 - DNA, 15 bp, Homo sapiens
gtggtatacacctct

SEQ ID NO: 414196 - DNA, 15 bp, Homo sapiens
agtggtatacacctc

SEQ ID NO: 414197 - DNA, 15 bp, Homo sapiens
tagtggtatacacct

SEQ ID NO: 414198 - DNA, 15 bp, Homo sapiens
gtagtggtatacacc

SEQ ID NO: 414199 - DNA, 15 bp, Homo sapiens
tgtagtggtatacac

SEQ ID NO: 414200 - DNA, 15 bp, Homo sapiens
gtgtagtggtataca

SEQ ID NO: 414201 - DNA, 15 bp, Homo sapiens
ggtgtagtggtatac

SEQ ID NO: 414202 - DNA, 15 bp, Homo sapiens
aggtgtagtggtata

SEQ ID NO: 414203 - DNA, 15 bp, Homo sapiens
caggtgtagtggtat

SEQ ID NO: 414204 - DNA, 15 bp, Homo sapiens
ccaggtgtagtggta

SEQ ID NO: 414205 - DNA, 15 bp, Homo sapiens
accaggtgtagtggt

SEQ ID NO: 414206 - DNA, 15 bp, Homo sapiens
aaccaggtgtagtgg

SEQ ID NO: 414207 - DNA, 15 bp, Homo sapiens
taaccaggtgtagtg

SEQ ID NO: 414208 - DNA, 15 bp, Homo sapiens
ataaccaggtgtagt

SEQ ID NO: 414209 - DNA, 15 bp, Homo sapiens
aataaccaggtgtag

SEQ ID NO: 414210 - DNA, 15 bp, Homo sapiens
aaataaccaggtgta

SEQ ID NO: 414211 - DNA, 15 bp, Homo sapiens
aaaataaccaggtgt

SEQ ID NO: 414212 - DNA, 15 bp, Homo sapiens
aaaaataaccaggtg

SEQ ID NO: 414213 - DNA, 15 bp, Homo sapiens
aaaaaataaccaggt

SEQ ID NO: 414214 - DNA, 15 bp, Homo sapiens
aaaaaaataaccagg

SEQ ID NO: 414215 - DNA, 15 bp, Homo sapiens
taaaaaaataaccag

SEQ ID NO: 414216 - DNA, 15 bp, Homo sapiens
ataaaaaaataacca

SEQ ID NO: 414217 - DNA, 15 bp, Homo sapiens
aataaaaaaataacc

SEQ ID NO: 414218 - DNA, 15 bp, Homo sapiens
aaataaaaaaataac

SEQ ID NO: 414219 - DNA, 15 bp, Homo sapiens
aaaataaaaaaataa

SEQ ID NO: 414220 - DNA, 15 bp, Homo sapiens
aaaaataaaaaaata

SEQ ID NO: 414221 - DNA, 15 bp, Homo sapiens
aaaaaataaaaaaat

SEQ ID NO: 414222 - DNA, 15 bp, Homo sapiens
aaaaaaataaaaaaa

SEQ ID NO: 414223 - DNA, 15 bp, Homo sapiens
taaaaaaataaaaaa

SEQ ID NO: 414224 - DNA, 15 bp, Homo sapiens
ataaaaaaataaaaa

SEQ ID NO: 414225 - DNA, 15 bp, Homo sapiens
cataaaaaaataaaa

SEQ ID NO: 414226 - DNA, 15 bp, Homo sapiens
ccataaaaaaataaa

SEQ ID NO: 414227 - DNA, 15 bp, Homo sapiens
gccataaaaaaataa

SEQ ID NO: 414228 - DNA, 15 bp, Homo sapiens
tgccataaaaaaata

SEQ ID NO: 414229 - DNA, 15 bp, Homo sapiens
ttgccataaaaaaat

SEQ ID NO: 414230 - DNA, 15 bp, Homo sapiens
attgccataaaaaaa

SEQ ID NO: 414231 - DNA, 15 bp, Homo sapiens
cattgccataaaaaa

SEQ ID NO: 414232 - DNA, 15 bp, Homo sapiens
ccattgccataaaaa

SEQ ID NO: 414233 - DNA, 15 bp, Homo sapiens
cccattgccataaaa

SEQ ID NO: 414234 - DNA, 15 bp, Homo sapiens
ccccattgccataaa

SEQ ID NO: 414235 - DNA, 15 bp, Homo sapiens
accccattgccataa

SEQ ID NO: 414236 - DNA, 15 bp, Homo sapiens
gaccccattgccata

SEQ ID NO: 414237 - DNA, 15 bp, Homo sapiens
agaccccattgccat

SEQ ID NO: 414238 - DNA, 15 bp, Homo sapiens
gagaccccattgcca

SEQ ID NO: 414239 - DNA, 15 bp, Homo sapiens
tgagaccccattgcc

SEQ ID NO: 414240 - DNA, 15 bp, Homo sapiens
gtgagaccccattgc

SEQ ID NO: 414241 - DNA, 15 bp, Homo sapiens
agtgagaccccattg

SEQ ID NO: 414242 - DNA, 15 bp, Homo sapiens
cagtgagaccccatt

SEQ ID NO: 414243 - DNA, 15 bp, Homo sapiens
acagtgagaccccat

SEQ ID NO: 414244 - DNA, 15 bp, Homo sapiens
cacagtgagacccca

SEQ ID NO: 414245 - DNA, 15 bp, Homo sapiens
acacagtgagacccc

SEQ ID NO: 414246 - DNA, 15 bp, Homo sapiens
aacacagtgagaccc

SEQ ID NO: 414247 - DNA, 15 bp, Homo sapiens
caacacagtgagacc

SEQ ID NO: 414248 - DNA, 15 bp, Homo sapiens
gcaacacagtgagac

SEQ ID NO: 414249 - DNA, 15 bp, Homo sapiens
ggcaacacagtgaga

SEQ ID NO: 414250 - DNA, 15 bp, Homo sapiens
gggcaacacagtgag

SEQ ID NO: 414251 - DNA, 15 bp, Homo sapiens
tgggcaacacagtga

SEQ ID NO: 414252 - DNA, 15 bp, Homo sapiens
ctgggcaacacagtg

SEQ ID NO: 414253 - DNA, 15 bp, Homo sapiens
cctgggcaacacagt

SEQ ID NO: 414254 - DNA, 15 bp, Homo sapiens
gcctgggcaacacag

SEQ ID NO: 414255 - DNA, 15 bp, Homo sapiens
agcctgggcaacaca

SEQ ID NO: 414256 - DNA, 15 bp, Homo sapiens
cagcctgggcaacac

SEQ ID NO: 414257 - DNA, 15 bp, Homo sapiens
tcagcctgggcaaca

SEQ ID NO: 414258 - DNA, 15 bp, Homo sapiens
atcagcctgggcaac

SEQ ID NO: 414259 - DNA, 15 bp, Homo sapiens
gatcagcctgggcaa

SEQ ID NO: 414260 - DNA, 15 bp, Homo sapiens
agatcagcctgggca

SEQ ID NO: 414261 - DNA, 15 bp, Homo sapiens
tagatcagcctgggc

SEQ ID NO: 414262 - DNA, 15 bp, Homo sapiens
ctagatcagcctggg

SEQ ID NO: 414263 - DNA, 15 bp, Homo sapiens
tctagatcagcctgg

SEQ ID NO: 414264 - DNA, 15 bp, Homo sapiens
ttctagatcagcctg

SEQ ID NO: 414265 - DNA, 15 bp, Homo sapiens
tttctagatcagcct

SEQ ID NO: 414266 - DNA, 15 bp, Homo sapiens
atttctagatcagcc

SEQ ID NO: 414267 - DNA, 15 bp, Homo sapiens
gatttctagatcagc

SEQ ID NO: 414268 - DNA, 15 bp, Homo sapiens
ggatttctagatcag

SEQ ID NO: 414269 - DNA, 15 bp, Homo sapiens
aggatttctagatca

SEQ ID NO: 414270 - DNA, 15 bp, Homo sapiens
caggatttctagatc

SEQ ID NO: 414271 - DNA, 15 bp, Homo sapiens
ccaggatttctagat

SEQ ID NO: 414272 - DNA, 15 bp, Homo sapiens
gccaggatttctaga

SEQ ID NO: 414273 - DNA, 15 bp, Homo sapiens
ggccaggatttctag

SEQ ID NO: 414274 - DNA, 15 bp, Homo sapiens
aggccaggatttcta

SEQ ID NO: 414275 - DNA, 15 bp, Homo sapiens
gaggccaggatttct

SEQ ID NO: 414276 - DNA, 15 bp, Homo sapiens
tgaggccaggatttc

SEQ ID NO: 414277 - DNA, 15 bp, Homo sapiens
ttgaggccaggattt

SEQ ID NO: 414278 - DNA, 15 bp, Homo sapiens
cttgaggccaggatt

SEQ ID NO: 414279 - DNA, 15 bp, Homo sapiens
acttgaggccaggat

SEQ ID NO: 414280 - DNA, 15 bp, Homo sapiens
cacttgaggccagga

SEQ ID NO: 414281 - DNA, 15 bp, Homo sapiens
tcacttgaggccagg

SEQ ID NO: 414282 - DNA, 15 bp, Homo sapiens
atcacttgaggccag

SEQ ID NO: 414283 - DNA, 15 bp, Homo sapiens
gatcacttgaggcca

SEQ ID NO: 414284 - DNA, 15 bp, Homo sapiens
ggatcacttgaggcc

SEQ ID NO: 414285 - DNA, 15 bp, Homo sapiens
aggatcacttgaggc

SEQ ID NO: 414286 - DNA, 15 bp, Homo sapiens
gaggatcacttgagg

SEQ ID NO: 414287 - DNA, 15 bp, Homo sapiens
ggaggatcacttgag

SEQ ID NO: 414288 - DNA, 15 bp, Homo sapiens
aggaggatcacttga

SEQ ID NO: 414289 - DNA, 15 bp, Homo sapiens
caggaggatcacttg

SEQ ID NO: 414290 - DNA, 15 bp, Homo sapiens
gcaggaggatcactt

SEQ ID NO: 414291 - DNA, 15 bp, Homo sapiens
agcaggaggatcact

SEQ ID NO: 414292 - DNA, 15 bp, Homo sapiens
aagcaggaggatcac

SEQ ID NO: 414293 - DNA, 15 bp, Homo sapiens
gaagcaggaggatca

SEQ ID NO: 414294 - DNA, 15 bp, Homo sapiens
tgaagcaggaggatc

SEQ ID NO: 414295 - DNA, 15 bp, Homo sapiens
ctgaagcaggaggat

SEQ ID NO: 414296 - DNA, 15 bp, Homo sapiens
gctgaagcaggagga

SEQ ID NO: 414297 - DNA, 15 bp, Homo sapiens
agctgaagcaggagg

SEQ ID NO: 414298 - DNA, 15 bp, Homo sapiens
aagctgaagcaggag

SEQ ID NO: 414299 - DNA, 15 bp, Homo sapiens
gaagctgaagcagga

SEQ ID NO: 414300 - DNA, 15 bp, Homo sapiens
agaagctgaagcagg

SEQ ID NO: 414301 - DNA, 15 bp, Homo sapiens
cagaagctgaagcag

SEQ ID NO: 414302 - DNA, 15 bp, Homo sapiens
tcagaagctgaagca

SEQ ID NO: 414303 - DNA, 15 bp, Homo sapiens
ttcagaagctgaagc

SEQ ID NO: 414304 - DNA, 15 bp, Homo sapiens
tttcagaagctgaag

SEQ ID NO: 414305 - DNA, 15 bp, Homo sapiens
ctttcagaagctgaa

SEQ ID NO: 414306 - DNA, 15 bp, Homo sapiens
gctttcagaagctga

SEQ ID NO: 414307 - DNA, 15 bp, Homo sapiens
tgctttcagaagctg

SEQ ID NO: 414308 - DNA, 15 bp, Homo sapiens
gtgctttcagaagct

SEQ ID NO: 414309 - DNA, 15 bp, Homo sapiens
agtgctttcagaagc

SEQ ID NO: 414310 - DNA, 15 bp, Homo sapiens
cagtgctttcagaag

SEQ ID NO: 414311 - DNA, 15 bp, Homo sapiens
ccagtgctttcagaa

SEQ ID NO: 414312 - DNA, 15 bp, Homo sapiens
cccagtgctttcaga

SEQ ID NO: 414313 - DNA, 15 bp, Homo sapiens
tcccagtgctttcag

SEQ ID NO: 414314 - DNA, 15 bp, Homo sapiens
atcccagtgctttca

SEQ ID NO: 414315 - DNA, 15 bp, Homo sapiens
aatcccagtgctttc

SEQ ID NO: 414316 - DNA, 15 bp, Homo sapiens
gaatcccagtgcttt

SEQ ID NO: 414317 - DNA, 15 bp, Homo sapiens
ggaatcccagtgctt

SEQ ID NO: 414318 - DNA, 15 bp, Homo sapiens
tggaatcccagtgct

SEQ ID NO: 414319 - DNA, 15 bp, Homo sapiens
ctggaatcccagtgc

SEQ ID NO: 414320 - DNA, 15 bp, Homo sapiens
cctggaatcccagtg

SEQ ID NO: 414321 - DNA, 15 bp, Homo sapiens
gcctggaatcccagt

SEQ ID NO: 414322 - DNA, 15 bp, Homo sapiens
tgcctggaatcccag

SEQ ID NO: 414323 - DNA, 15 bp, Homo sapiens
atgcctggaatccca

SEQ ID NO: 414324 - DNA, 15 bp, Homo sapiens
tatgcctggaatccc

SEQ ID NO: 414325 - DNA, 15 bp, Homo sapiens
ttatgcctggaatcc

SEQ ID NO: 414326 - DNA, 15 bp, Homo sapiens
cttatgcctggaatc

SEQ ID NO: 414327 - DNA, 15 bp, Homo sapiens
gcttatgcctggaat

SEQ ID NO: 414328 - DNA, 15 bp, Homo sapiens
ggcttatgcctggaa

SEQ ID NO: 414329 - DNA, 15 bp, Homo sapiens
tggcttatgcctgga

SEQ ID NO: 414330 - DNA, 15 bp, Homo sapiens
gtggcttatgcctgg

SEQ ID NO: 414331 - DNA, 15 bp, Homo sapiens
ggtggcttatgcctg

SEQ ID NO: 414332 - DNA, 15 bp, Homo sapiens
tggtggcttatgcct

SEQ ID NO: 414333 - DNA, 15 bp, Homo sapiens
atggtggcttatgcc

SEQ ID NO: 414334 - DNA, 15 bp, Homo sapiens
catggtggcttatgc

SEQ ID NO: 414335 - DNA, 15 bp, Homo sapiens
gcatggtggcttatg

SEQ ID NO: 414336 - DNA, 15 bp, Homo sapiens
agcatggtggcttat

SEQ ID NO: 414337 - DNA, 15 bp, Homo sapiens
gagcatggtggctta

SEQ ID NO: 414338 - DNA, 15 bp, Homo sapiens
tgagcatggtggctt

SEQ ID NO: 414339 - DNA, 15 bp, Homo sapiens
ctgagcatggtggct

SEQ ID NO: 414340 - DNA, 15 bp, Homo sapiens
gctgagcatggtggc

SEQ ID NO: 414341 - DNA, 15 bp, Homo sapiens
ggctgagcatggtgg

SEQ ID NO: 414342 - DNA, 15 bp, Homo sapiens
gggctgagcatggtg

SEQ ID NO: 414343 - DNA, 15 bp, Homo sapiens
tgggctgagcatggt

SEQ ID NO: 414344 - DNA, 15 bp, Homo sapiens
gtgggctgagcatgg

SEQ ID NO: 414345 - DNA, 15 bp, Homo sapiens
tgtgggctgagcatg

SEQ ID NO: 414346 - DNA, 15 bp, Homo sapiens
ttgtgggctgagcat

SEQ ID NO: 414347 - DNA, 15 bp, Homo sapiens
tttgtgggctgagca

SEQ ID NO: 414348 - DNA, 15 bp, Homo sapiens
atttgtgggctgagc

SEQ ID NO: 414349 - DNA, 15 bp, Homo sapiens
tatttgtgggctgag

SEQ ID NO: 414350 - DNA, 15 bp, Homo sapiens
atatttgtgggctga

SEQ ID NO: 414351 - DNA, 15 bp, Homo sapiens
aatatttgtgggctg

SEQ ID NO: 414352 - DNA, 15 bp, Homo sapiens
aaatatttgtgggct

SEQ ID NO: 414353 - DNA, 15 bp, Homo sapiens
aaaatatttgtgggc

SEQ ID NO: 414354 - DNA, 15 bp, Homo sapiens
aaaaatatttgtggg

SEQ ID NO: 414355 - DNA, 15 bp, Homo sapiens
gaaaaatatttgtgg

SEQ ID NO: 414356 - DNA, 15 bp, Homo sapiens
tgaaaaatatttgtg

SEQ ID NO: 414357 - DNA, 15 bp, Homo sapiens
atgaaaaatatttgt

SEQ ID NO: 414358 - DNA, 15 bp, Homo sapiens
tatgaaaaatatttg

SEQ ID NO: 414359 - DNA, 15 bp, Homo sapiens
gtatgaaaaatattt

SEQ ID NO: 414360 - DNA, 15 bp, Homo sapiens
tgtatgaaaaatatt

SEQ ID NO: 414361 - DNA, 15 bp, Homo sapiens
atgtatgaaaaatat

SEQ ID NO: 414362 - DNA, 15 bp, Homo sapiens
catgtatgaaaaata

SEQ ID NO: 414363 - DNA, 15 bp, Homo sapiens
acatgtatgaaaaat

SEQ ID NO: 414364 - DNA, 15 bp, Homo sapiens
cacatgtatgaaaaa

SEQ ID NO: 414365 - DNA, 15 bp, Homo sapiens
tcacatgtatgaaaa

SEQ ID NO: 414366 - DNA, 15 bp, Homo sapiens
atcacatgtatgaaa

SEQ ID NO: 414367 - DNA, 15 bp, Homo sapiens
aatcacatgtatgaa

SEQ ID NO: 414368 - DNA, 15 bp, Homo sapiens
aaatcacatgtatga

SEQ ID NO: 414369 - DNA, 15 bp, Homo sapiens
caaatcacatgtatg

SEQ ID NO: 414370 - DNA, 15 bp, Homo sapiens
ccaaatcacatgtat

SEQ ID NO: 414371 - DNA, 15 bp, Homo sapiens
gccaaatcacatgta

SEQ ID NO: 414372 - DNA, 15 bp, Homo sapiens
tgccaaatcacatgt

SEQ ID NO: 414373 - DNA, 15 bp, Homo sapiens
ctgccaaatcacatg

SEQ ID NO: 414374 - DNA, 15 bp, Homo sapiens
actgccaaatcacat

SEQ ID NO: 414375 - DNA, 15 bp, Homo sapiens
aactgccaaatcaca

SEQ ID NO: 414376 - DNA, 15 bp, Homo sapiens
taactgccaaatcac

SEQ ID NO: 414377 - DNA, 15 bp, Homo sapiens
ttaactgccaaatca

SEQ ID NO: 414378 - DNA, 15 bp, Homo sapiens
gttaactgccaaatc

SEQ ID NO: 414379 - DNA, 15 bp, Homo sapiens
ggttaactgccaaat

SEQ ID NO: 414380 - DNA, 15 bp, Homo sapiens
aggttaactgccaaa

SEQ ID NO: 414381 - DNA, 15 bp, Homo sapiens
taggttaactgccaa

SEQ ID NO: 414382 - DNA, 15 bp, Homo sapiens
ttaggttaactgcca

SEQ ID NO: 414383 - DNA, 15 bp, Homo sapiens
attaggttaactgcc

SEQ ID NO: 414384 - DNA, 15 bp, Homo sapiens
aattaggttaactgc

SEQ ID NO: 414385 - DNA, 15 bp, Homo sapiens
gaattaggttaactg

SEQ ID NO: 414386 - DNA, 15 bp, Homo sapiens
agaattaggttaact

SEQ ID NO: 414387 - DNA, 15 bp, Homo sapiens
cagaattaggttaac

SEQ ID NO: 414388 - DNA, 15 bp, Homo sapiens
gcagaattaggttaa

SEQ ID NO: 414389 - DNA, 15 bp, Homo sapiens
ggcagaattaggtta

SEQ ID NO: 414390 - DNA, 15 bp, Homo sapiens
aggcagaattaggtt

SEQ ID NO: 414391 - DNA, 15 bp, Homo sapiens
aaggcagaattaggt

SEQ ID NO: 414392 - DNA, 15 bp, Homo sapiens
caaggcagaattagg

SEQ ID NO: 414393 - DNA, 15 bp, Homo sapiens
acaaggcagaattag

SEQ ID NO: 414394 - DNA, 15 bp, Homo sapiens
cacaaggcagaatta

SEQ ID NO: 414395 - DNA, 15 bp, Homo sapiens
tcacaaggcagaatt

SEQ ID NO: 414396 - DNA, 15 bp, Homo sapiens
gtcacaaggcagaat

SEQ ID NO: 414397 - DNA, 15 bp, Homo sapiens
tgtcacaaggcagaa

SEQ ID NO: 414398 - DNA, 15 bp, Homo sapiens
ttgtcacaaggcaga

SEQ ID NO: 414399 - DNA, 15 bp, Homo sapiens
attgtcacaaggcag

SEQ ID NO: 414400 - DNA, 15 bp, Homo sapiens
aattgtcacaaggca

SEQ ID NO: 414401 - DNA, 15 bp, Homo sapiens
caattgtcacaaggc

SEQ ID NO: 414402 - DNA, 15 bp, Homo sapiens
gcaattgtcacaagg

SEQ ID NO: 414403 - DNA, 15 bp, Homo sapiens
tgcaattgtcacaag

SEQ ID NO: 414404 - DNA, 15 bp, Homo sapiens
atgcaattgtcacaa

SEQ ID NO: 414405 - DNA, 15 bp, Homo sapiens
tatgcaattgtcaca

SEQ ID NO: 414406 - DNA, 15 bp, Homo sapiens
ttatgcaattgtcac

SEQ ID NO: 414407 - DNA, 15 bp, Homo sapiens
attatgcaattgtca

SEQ ID NO: 414408 - DNA, 15 bp, Homo sapiens
aattatgcaattgtc

SEQ ID NO: 414409 - DNA, 15 bp, Homo sapiens
taattatgcaattgt

SEQ ID NO: 414410 - DNA, 15 bp, Homo sapiens
ataattatgcaattg

SEQ ID NO: 414411 - DNA, 15 bp, Homo sapiens
gataattatgcaatt

SEQ ID NO: 414412 - DNA, 15 bp, Homo sapiens
agataattatgcaat

SEQ ID NO: 414413 - DNA, 15 bp, Homo sapiens
aagataattatgcaa

SEQ ID NO: 414414 - DNA, 15 bp, Homo sapiens
caagataattatgca

SEQ ID NO: 414415 - DNA, 15 bp, Homo sapiens
tcaagataattatgc

SEQ ID NO: 414416 - DNA, 15 bp, Homo sapiens
ttcaagataattatg

SEQ ID NO: 414417 - DNA, 15 bp, Homo sapiens
attcaagataattat

SEQ ID NO: 414418 - DNA, 15 bp, Homo sapiens
aattcaagataatta

SEQ ID NO: 414419 - DNA, 15 bp, Homo sapiens
caattcaagataatt

SEQ ID NO: 414420 - DNA, 15 bp, Homo sapiens
gcaattcaagataat

SEQ ID NO: 414421 - DNA, 15 bp, Homo sapiens
agcaattcaagataa

SEQ ID NO: 414422 - DNA, 15 bp, Homo sapiens
cagcaattcaagata

SEQ ID NO: 414423 - DNA, 15 bp, Homo sapiens
acagcaattcaagat

SEQ ID NO: 414424 - DNA, 15 bp, Homo sapiens
aacagcaattcaaga

SEQ ID NO: 414425 - DNA, 15 bp, Homo sapiens
aaacagcaattcaag

SEQ ID NO: 414426 - DNA, 15 bp, Homo sapiens
aaaacagcaattcaa

SEQ ID NO: 414427 - DNA, 15 bp, Homo sapiens
taaaacagcaattca

SEQ ID NO: 414428 - DNA, 15 bp, Homo sapiens
ataaaacagcaattc

SEQ ID NO: 414429 - DNA, 15 bp, Homo sapiens
aataaaacagcaatt

SEQ ID NO: 414430 - DNA, 15 bp, Homo sapiens
aaataaaacagcaat

SEQ ID NO: 414431 - DNA, 15 bp, Homo sapiens
aaaataaaacagcaa

SEQ ID NO: 414432 - DNA, 15 bp, Homo sapiens
gaaaataaaacagca

SEQ ID NO: 414433 - DNA, 15 bp, Homo sapiens
ggaaaataaaacagc

SEQ ID NO: 414434 - DNA, 15 bp, Homo sapiens
aggaaaataaaacag

SEQ ID NO: 414435 - DNA, 15 bp, Homo sapiens
taggaaaataaaaca

SEQ ID NO: 414436 - DNA, 15 bp, Homo sapiens
ataggaaaataaaac

SEQ ID NO: 414437 - DNA, 15 bp, Homo sapiens
aataggaaaataaaa

SEQ ID NO: 414438 - DNA, 15 bp, Homo sapiens
aaataggaaaataaa

SEQ ID NO: 414439 - DNA, 15 bp, Homo sapiens
aaaataggaaaataa

SEQ ID NO: 414440 - DNA, 15 bp, Homo sapiens
caaaataggaaaata

SEQ ID NO: 414441 - DNA, 15 bp, Homo sapiens
acaaaataggaaaat

SEQ ID NO: 414442 - DNA, 15 bp, Homo sapiens
aacaaaataggaaaa

SEQ ID NO: 414443 - DNA, 15 bp, Homo sapiens
taacaaaataggaaa

SEQ ID NO: 414444 - DNA, 15 bp, Homo sapiens
ataacaaaataggaa

SEQ ID NO: 414445 - DNA, 15 bp, Homo sapiens
aataacaaaatagga

SEQ ID NO: 414446 - DNA, 15 bp, Homo sapiens
aaataacaaaatagg

SEQ ID NO: 414447 - DNA, 15 bp, Homo sapiens
taaataacaaaatag

SEQ ID NO: 414448 - DNA, 15 bp, Homo sapiens
ttaaataacaaaata

SEQ ID NO: 414449 - DNA, 15 bp, Homo sapiens
gttaaataacaaaat

SEQ ID NO: 414450 - DNA, 15 bp, Homo sapiens
agttaaataacaaaa

SEQ ID NO: 414451 - DNA, 15 bp, Homo sapiens
aagttaaataacaaa

SEQ ID NO: 414452 - DNA, 15 bp, Homo sapiens
gaagttaaataacaa

SEQ ID NO: 414453 - DNA, 15 bp, Homo sapiens
cgaagttaaataaca

SEQ ID NO: 414454 - DNA, 15 bp, Homo sapiens
acgaagttaaataac

SEQ ID NO: 414455 - DNA, 15 bp, Homo sapiens
cacgaagttaaataa

SEQ ID NO: 414456 - DNA, 15 bp, Homo sapiens
gcacgaagttaaata

SEQ ID NO: 414457 - DNA, 15 bp, Homo sapiens
tgcacgaagttaaat

SEQ ID NO: 414458 - DNA, 15 bp, Homo sapiens
atgcacgaagttaaa

SEQ ID NO: 414459 - DNA, 15 bp, Homo sapiens
tatgcacgaagttaa

SEQ ID NO: 414460 - DNA, 15 bp, Homo sapiens
atatgcacgaagtta

SEQ ID NO: 414461 - DNA, 15 bp, Homo sapiens
aatatgcacgaagtt

SEQ ID NO: 414462 - DNA, 15 bp, Homo sapiens
aaatatgcacgaagt

SEQ ID NO: 414463 - DNA, 15 bp, Homo sapiens
gaaatatgcacgaag

SEQ ID NO: 414464 - DNA, 15 bp, Homo sapiens
agaaatatgcacgaa

SEQ ID NO: 414465 - DNA, 15 bp, Homo sapiens
cagaaatatgcacga

SEQ ID NO: 414466 - DNA, 15 bp, Homo sapiens
tcagaaatatgcacg

SEQ ID NO: 414467 - DNA, 15 bp, Homo sapiens
atcagaaatatgcac

SEQ ID NO: 414468 - DNA, 15 bp, Homo sapiens
tatcagaaatatgca

SEQ ID NO: 414469 - DNA, 15 bp, Homo sapiens
atatcagaaatatgc

SEQ ID NO: 414470 - DNA, 15 bp, Homo sapiens
catatcagaaatatg

SEQ ID NO: 414471 - DNA, 15 bp, Homo sapiens
gcatatcagaaatat

SEQ ID NO: 414472 - DNA, 15 bp, Homo sapiens
ggcatatcagaaata

SEQ ID NO: 414473 - DNA, 15 bp, Homo sapiens
aggcatatcagaaat

SEQ ID NO: 414474 - DNA, 15 bp, Homo sapiens
aaggcatatcagaaa

SEQ ID NO: 414475 - DNA, 15 bp, Homo sapiens
gaaggcatatcagaa

SEQ ID NO: 414476 - DNA, 15 bp, Homo sapiens
ggaaggcatatcaga

SEQ ID NO: 414477 - DNA, 15 bp, Homo sapiens
gggaaggcatatcag

SEQ ID NO: 414478 - DNA, 15 bp, Homo sapiens
tgggaaggcatatca

SEQ ID NO: 414479 - DNA, 15 bp, Homo sapiens
ttgggaaggcatatc

SEQ ID NO: 414480 - DNA, 15 bp, Homo sapiens
gttgggaaggcatat

SEQ ID NO: 414481 - DNA, 15 bp, Homo sapiens
agttgggaaggcata

SEQ ID NO: 414482 - DNA, 15 bp, Homo sapiens
tagttgggaaggcat

SEQ ID NO: 414483 - DNA, 15 bp, Homo sapiens
ctagttgggaaggca

SEQ ID NO: 414484 - DNA, 15 bp, Homo sapiens
tctagttgggaaggc

SEQ ID NO: 414485 - DNA, 15 bp, Homo sapiens
atctagttgggaagg

SEQ ID NO: 414486 - DNA, 15 bp, Homo sapiens
aatctagttgggaag

SEQ ID NO: 414487 - DNA, 15 bp, Homo sapiens
aaatctagttgggaa

SEQ ID NO: 414488 - DNA, 15 bp, Homo sapiens
aaaatctagttggga

SEQ ID NO: 414489 - DNA, 15 bp, Homo sapiens
taaaatctagttggg

SEQ ID NO: 414490 - DNA, 15 bp, Homo sapiens
ttaaaatctagttgg

SEQ ID NO: 414491 - DNA, 15 bp, Homo sapiens
cttaaaatctagttg

SEQ ID NO: 414492 - DNA, 15 bp, Homo sapiens
acttaaaatctagtt

SEQ ID NO: 414493 - DNA, 15 bp, Homo sapiens
cacttaaaatctagt

SEQ ID NO: 414494 - DNA, 15 bp, Homo sapiens
acacttaaaatctag

SEQ ID NO: 414495 - DNA, 15 bp, Homo sapiens
aacacttaaaatcta

SEQ ID NO: 414496 - DNA, 15 bp, Homo sapiens
aaacacttaaaatct

SEQ ID NO: 414497 - DNA, 15 bp, Homo sapiens
aaaacacttaaaatc

SEQ ID NO: 414498 - DNA, 15 bp, Homo sapiens
taaaacacttaaaat

SEQ ID NO: 414499 - DNA, 15 bp, Homo sapiens
ttaaaacacttaaaa

SEQ ID NO: 414500 - DNA, 15 bp, Homo sapiens
tttaaaacacttaaa

SEQ ID NO: 414501 - DNA, 15 bp, Homo sapiens
ctttaaaacacttaa

SEQ ID NO: 414502 - DNA, 15 bp, Homo sapiens
cctttaaaacactta

SEQ ID NO: 414503 - DNA, 15 bp, Homo sapiens
tcctttaaaacactt

SEQ ID NO: 414504 - DNA, 15 bp, Homo sapiens
ttcctttaaaacact

SEQ ID NO: 414505 - DNA, 15 bp, Homo sapiens
cttcctttaaaacac

SEQ ID NO: 414506 - DNA, 15 bp, Homo sapiens
tcttcctttaaaaca

SEQ ID NO: 414507 - DNA, 15 bp, Homo sapiens
gtcttcctttaaaac

SEQ ID NO: 414508 - DNA, 15 bp, Homo sapiens
tgtcttcctttaaaa

SEQ ID NO: 414509 - DNA, 15 bp, Homo sapiens
atgtcttcctttaaa

SEQ ID NO: 414510 - DNA, 15 bp, Homo sapiens
catgtcttcctttaa

SEQ ID NO: 414511 - DNA, 15 bp, Homo sapiens
tcatgtcttccttta

SEQ ID NO: 414512 - DNA, 15 bp, Homo sapiens
atcatgtcttccttt

SEQ ID NO: 414513 - DNA, 15 bp, Homo sapiens
tatcatgtcttcctt

SEQ ID NO: 414514 - DNA, 15 bp, Homo sapiens
ttatcatgtcttcct

SEQ ID NO: 414515 - DNA, 15 bp, Homo sapiens
gttatcatgtcttcc

SEQ ID NO: 414516 - DNA, 15 bp, Homo sapiens
tgttatcatgtcttc

SEQ ID NO: 414517 - DNA, 15 bp, Homo sapiens
ttgttatcatgtctt

SEQ ID NO: 414518 - DNA, 15 bp, Homo sapiens
tttgttatcatgtct

SEQ ID NO: 414519 - DNA, 15 bp, Homo sapiens
gtttgttatcatgtc

SEQ ID NO: 414520 - DNA, 15 bp, Homo sapiens
tgtttgttatcatgt

SEQ ID NO: 414521 - DNA, 15 bp, Homo sapiens
atgtttgttatcatg

SEQ ID NO: 414522 - DNA, 15 bp, Homo sapiens
gatgtttgttatcat

SEQ ID NO: 414523 - DNA, 15 bp, Homo sapiens
agatgtttgttatca

SEQ ID NO: 414524 - DNA, 15 bp, Homo sapiens
gagatgtttgttatc

SEQ ID NO: 414525 - DNA, 15 bp, Homo sapiens
agagatgtttgttat

SEQ ID NO: 414526 - DNA, 15 bp, Homo sapiens
aagagatgtttgtta

SEQ ID NO: 414527 - DNA, 15 bp, Homo sapiens
aaagagatgtttgtt

SEQ ID NO: 414528 - DNA, 15 bp, Homo sapiens
aaaagagatgtttgt

SEQ ID NO: 414529 - DNA, 15 bp, Homo sapiens
gaaaagagatgtttg

SEQ ID NO: 414530 - DNA, 15 bp, Homo sapiens
tgaaaagagatgttt

SEQ ID NO: 414531 - DNA, 15 bp, Homo sapiens
gtgaaaagagatgtt

SEQ ID NO: 414532 - DNA, 15 bp, Homo sapiens
tgtgaaaagagatgt

SEQ ID NO: 414533 - DNA, 15 bp, Homo sapiens
ttgtgaaaagagatg

SEQ ID NO: 414534 - DNA, 15 bp, Homo sapiens
attgtgaaaagagat

SEQ ID NO: 414535 - DNA, 15 bp, Homo sapiens
aattgtgaaaagaga

SEQ ID NO: 414536 - DNA, 15 bp, Homo sapiens
aaattgtgaaaagag

SEQ ID NO: 414537 - DNA, 15 bp, Homo sapiens
taaattgtgaaaaga

SEQ ID NO: 414538 - DNA, 15 bp, Homo sapiens
ataaattgtgaaaag

SEQ ID NO: 414539 - DNA, 15 bp, Homo sapiens
aataaattgtgaaaa

SEQ ID NO: 414540 - DNA, 15 bp, Homo sapiens
taataaattgtgaaa

SEQ ID NO: 414541 - DNA, 15 bp, Homo sapiens
ttaataaattgtgaa

SEQ ID NO: 414542 - DNA, 15 bp, Homo sapiens
tttaataaattgtga

SEQ ID NO: 414543 - DNA, 15 bp, Homo sapiens
atttaataaattgtg

SEQ ID NO: 414544 - DNA, 15 bp, Homo sapiens
tatttaataaattgt

SEQ ID NO: 414545 - DNA, 15 bp, Homo sapiens
atatttaataaattg

SEQ ID NO: 414546 - DNA, 15 bp, Homo sapiens
catatttaataaatt

SEQ ID NO: 414547 - DNA, 15 bp, Homo sapiens
gcatatttaataaat

SEQ ID NO: 414548 - DNA, 15 bp, Homo sapiens
tgcatatttaataaa

SEQ ID NO: 414549 - DNA, 15 bp, Homo sapiens
atgcatatttaataa

SEQ ID NO: 414550 - DNA, 15 bp, Homo sapiens
tatgcatatttaata

SEQ ID NO: 414551 - DNA, 15 bp, Homo sapiens
ctatgcatatttaat

SEQ ID NO: 414552 - DNA, 15 bp, Homo sapiens
tctatgcatatttaa

SEQ ID NO: 414553 - DNA, 15 bp, Homo sapiens
ttctatgcatattta

SEQ ID NO: 414554 - DNA, 15 bp, Homo sapiens
attctatgcatattt

SEQ ID NO: 414555 - DNA, 15 bp, Homo sapiens
aattctatgcatatt

SEQ ID NO: 414556 - DNA, 15 bp, Homo sapiens
taattctatgcatat

SEQ ID NO: 414557 - DNA, 15 bp, Homo sapiens
ataattctatgcata

SEQ ID NO: 414558 - DNA, 15 bp, Homo sapiens
aataattctatgcat

SEQ ID NO: 414559 - DNA, 15 bp, Homo sapiens
gaataattctatgca

SEQ ID NO: 414560 - DNA, 15 bp, Homo sapiens
tgaataattctatgc

SEQ ID NO: 414561 - DNA, 15 bp, Homo sapiens
gtgaataattctatg

SEQ ID NO: 414562 - DNA, 15 bp, Homo sapiens
agtgaataattctat

SEQ ID NO: 414563 - DNA, 15 bp, Homo sapiens
aagtgaataattcta

SEQ ID NO: 414564 - DNA, 15 bp, Homo sapiens
caagtgaataattct

SEQ ID NO: 414565 - DNA, 15 bp, Homo sapiens
tcaagtgaataattc

SEQ ID NO: 414566 - DNA, 15 bp, Homo sapiens
atcaagtgaataatt

SEQ ID NO: 414567 - DNA, 15 bp, Homo sapiens
aatcaagtgaataat

SEQ ID NO: 414568 - DNA, 15 bp, Homo sapiens
aaatcaagtgaataa

SEQ ID NO: 414569 - DNA, 15 bp, Homo sapiens
caaatcaagtgaata

SEQ ID NO: 414570 - DNA, 15 bp, Homo sapiens
tcaaatcaagtgaat

SEQ ID NO: 414571 - DNA, 15 bp, Homo sapiens
atcaaatcaagtgaa

SEQ ID NO: 414572 - DNA, 15 bp, Homo sapiens
tatcaaatcaagtga

SEQ ID NO: 414573 - DNA, 15 bp, Homo sapiens
atatcaaatcaagtg

SEQ ID NO: 414574 - DNA, 15 bp, Homo sapiens
catatcaaatcaagt

SEQ ID NO: 414575 - DNA, 15 bp, Homo sapiens
acatatcaaatcaag

SEQ ID NO: 414576 - DNA, 15 bp, Homo sapiens
cacatatcaaatcaa

SEQ ID NO: 414577 - DNA, 15 bp, Homo sapiens
ccacatatcaaatca

SEQ ID NO: 414578 - DNA, 15 bp, Homo sapiens
tccacatatcaaatc

SEQ ID NO: 414579 - DNA, 15 bp, Homo sapiens
gtccacatatcaaat

SEQ ID NO: 414580 - DNA, 15 bp, Homo sapiens
cgtccacatatcaaa

SEQ ID NO: 414581 - DNA, 15 bp, Homo sapiens
acgtccacatatcaa

SEQ ID NO: 414582 - DNA, 15 bp, Homo sapiens
aacgtccacatatca

SEQ ID NO: 414583 - DNA, 15 bp, Homo sapiens
taacgtccacatatc

SEQ ID NO: 414584 - DNA, 15 bp, Homo sapiens
gtaacgtccacatat

SEQ ID NO: 414585 - DNA, 15 bp, Homo sapiens
agtaacgtccacata

SEQ ID NO: 414586 - DNA, 15 bp, Homo sapiens
aagtaacgtccacat

SEQ ID NO: 414587 - DNA, 15 bp, Homo sapiens
aaagtaacgtccaca

SEQ ID NO: 414588 - DNA, 15 bp, Homo sapiens
taaagtaacgtccac

SEQ ID NO: 414589 - DNA, 15 bp, Homo sapiens
ctaaagtaacgtcca

SEQ ID NO: 414590 - DNA, 15 bp, Homo sapiens
tctaaagtaacgtcc

SEQ ID NO: 414591 - DNA, 15 bp, Homo sapiens
atctaaagtaacgtc

SEQ ID NO: 414592 - DNA, 15 bp, Homo sapiens
catctaaagtaacgt

SEQ ID NO: 414593 - DNA, 15 bp, Homo sapiens
gcatctaaagtaacg

SEQ ID NO: 414594 - DNA, 15 bp, Homo sapiens
tgcatctaaagtaac

SEQ ID NO: 414595 - DNA, 15 bp, Homo sapiens
ttgcatctaaagtaa

SEQ ID NO: 414596 - DNA, 15 bp, Homo sapiens
attgcatctaaagta

SEQ ID NO: 414597 - DNA, 15 bp, Homo sapiens
cattgcatctaaagt

SEQ ID NO: 414598 - DNA, 15 bp, Homo sapiens
acattgcatctaaag

SEQ ID NO: 414599 - DNA, 15 bp, Homo sapiens
gacattgcatctaaa

SEQ ID NO: 414600 - DNA, 15 bp, Homo sapiens
tgacattgcatctaa

SEQ ID NO: 414601 - DNA, 15 bp, Homo sapiens
ttgacattgcatcta

SEQ ID NO: 414602 - DNA, 15 bp, Homo sapiens
tttgacattgcatct

SEQ ID NO: 414603 - DNA, 15 bp, Homo sapiens
atttgacattgcatc

SEQ ID NO: 414604 - DNA, 15 bp, Homo sapiens
tatttgacattgcat

SEQ ID NO: 414605 - DNA, 15 bp, Homo sapiens
ttatttgacattgca

SEQ ID NO: 414606 - DNA, 15 bp, Homo sapiens
tttatttgacattgc

SEQ ID NO: 414607 - DNA, 15 bp, Homo sapiens
ttttatttgacattg

SEQ ID NO: 414608 - DNA, 15 bp, Homo sapiens
tttttatttgacatt

SEQ ID NO: 414609 - DNA, 15 bp, Homo sapiens
gtttttatttgacat

SEQ ID NO: 414610 - DNA, 15 bp, Homo sapiens
tgtttttatttgaca

SEQ ID NO: 414611 - DNA, 15 bp, Homo sapiens
atgtttttatttgac

SEQ ID NO: 414612 - DNA, 15 bp, Homo sapiens
tatgtttttatttga

SEQ ID NO: 414613 - DNA, 15 bp, Homo sapiens
ttatgtttttatttg

SEQ ID NO: 414614 - DNA, 15 bp, Homo sapiens
tttatgtttttattt

SEQ ID NO: 414615 - DNA, 15 bp, Homo sapiens
atttatgtttttatt

SEQ ID NO: 414616 - DNA, 15 bp, Homo sapiens
catttatgtttttat

SEQ ID NO: 414617 - DNA, 15 bp, Homo sapiens
ccatttatgttttta

SEQ ID NO: 414618 - DNA, 15 bp, Homo sapiens
accatttatgttttt

SEQ ID NO: 414619 - DNA, 15 bp, Homo sapiens
aaccatttatgtttt

SEQ ID NO: 414620 - DNA, 15 bp, Homo sapiens
aaaccatttatgttt

SEQ ID NO: 414621 - DNA, 15 bp, Homo sapiens
aaaaccatttatgtt

SEQ ID NO: 414622 - DNA, 15 bp, Homo sapiens
taaaaccatttatgt

SEQ ID NO: 414623 - DNA, 15 bp, Homo sapiens
ttaaaaccatttatg

SEQ ID NO: 414624 - DNA, 15 bp, Homo sapiens
tttaaaaccatttat

SEQ ID NO: 414625 - DNA, 15 bp, Homo sapiens
ttttaaaaccattta

SEQ ID NO: 414626 - DNA, 15 bp, Homo sapiens
cttttaaaaccattt

SEQ ID NO: 414627 - DNA, 15 bp, Homo sapiens
tcttttaaaaccatt

SEQ ID NO: 414628 - DNA, 15 bp, Homo sapiens
ctcttttaaaaccat

SEQ ID NO: 414629 - DNA, 15 bp, Homo sapiens
actcttttaaaacca

SEQ ID NO: 414630 - DNA, 15 bp, Homo sapiens
tactcttttaaaacc

SEQ ID NO: 414631 - DNA, 15 bp, Homo sapiens
atactcttttaaaac

SEQ ID NO: 414632 - DNA, 15 bp, Homo sapiens
gatactcttttaaaa

SEQ ID NO: 414633 - DNA, 15 bp, Homo sapiens
tgatactcttttaaa

SEQ ID NO: 414634 - DNA, 15 bp, Homo sapiens
atgatactcttttaa

SEQ ID NO: 414635 - DNA, 15 bp, Homo sapiens
catgatactctttta

SEQ ID NO: 414636 - DNA, 15 bp, Homo sapiens
tcatgatactctttt

SEQ ID NO: 414637 - DNA, 15 bp, Homo sapiens
atcatgatactcttt

SEQ ID NO: 414638 - DNA, 15 bp, Homo sapiens
catcatgatactctt

SEQ ID NO: 414639 - DNA, 15 bp, Homo sapiens
acatcatgatactct

SEQ ID NO: 414640 - DNA, 15 bp, Homo sapiens
aacatcatgatactc

SEQ ID NO: 414641 - DNA, 15 bp, Homo sapiens
caacatcatgatact

SEQ ID NO: 414642 - DNA, 15 bp, Homo sapiens
tcaacatcatgatac

SEQ ID NO: 414643 - DNA, 15 bp, Homo sapiens
atcaacatcatgata

SEQ ID NO: 414644 - DNA, 15 bp, Homo sapiens
tatcaacatcatgat

SEQ ID NO: 414645 - DNA, 15 bp, Homo sapiens
atatcaacatcatga

SEQ ID NO: 414646 - DNA, 15 bp, Homo sapiens
tatatcaacatcatg

SEQ ID NO: 414647 - DNA, 15 bp, Homo sapiens
ttatatcaacatcat

SEQ ID NO: 414648 - DNA, 15 bp, Homo sapiens
attatatcaacatca

SEQ ID NO: 414649 - DNA, 15 bp, Homo sapiens
aattatatcaacatc

SEQ ID NO: 414650 - DNA, 15 bp, Homo sapiens
aaattatatcaacat

SEQ ID NO: 414651 - DNA, 15 bp, Homo sapiens
aaaattatatcaaca

SEQ ID NO: 414652 - DNA, 15 bp, Homo sapiens
taaaattatatcaac

SEQ ID NO: 414653 - DNA, 15 bp, Homo sapiens
ctaaaattatatcaa

SEQ ID NO: 414654 - DNA, 15 bp, Homo sapiens
tctaaaattatatca

SEQ ID NO: 414655 - DNA, 15 bp, Homo sapiens
ctctaaaattatatc

SEQ ID NO: 414656 - DNA, 15 bp, Homo sapiens
tctctaaaattatat

SEQ ID NO: 414657 - DNA, 15 bp, Homo sapiens
ctctctaaaattata

SEQ ID NO: 414658 - DNA, 15 bp, Homo sapiens
actctctaaaattat

SEQ ID NO: 414659 - DNA, 15 bp, Homo sapiens
tactctctaaaatta

SEQ ID NO: 414660 - DNA, 15 bp, Homo sapiens
ttactctctaaaatt

SEQ ID NO: 414661 - DNA, 15 bp, Homo sapiens
attactctctaaaat

SEQ ID NO: 414662 - DNA, 15 bp, Homo sapiens
aattactctctaaaa

SEQ ID NO: 414663 - DNA, 15 bp, Homo sapiens
taattactctctaaa

SEQ ID NO: 414664 - DNA, 15 bp, Homo sapiens
ttaattactctctaa

SEQ ID NO: 414665 - DNA, 15 bp, Homo sapiens
tttaattactctcta

SEQ ID NO: 414666 - DNA, 15 bp, Homo sapiens
gtttaattactctct

SEQ ID NO: 414667 - DNA, 15 bp, Homo sapiens
tgtttaattactctc

SEQ ID NO: 414668 - DNA, 15 bp, Homo sapiens
ttgtttaattactct

SEQ ID NO: 414669 - DNA, 15 bp, Homo sapiens
gttgtttaattactc

SEQ ID NO: 414670 - DNA, 15 bp, Homo sapiens
agttgtttaattact

SEQ ID NO: 414671 - DNA, 15 bp, Homo sapiens
aagttgtttaattac

SEQ ID NO: 414672 - DNA, 15 bp, Homo sapiens
taagttgtttaatta

SEQ ID NO: 414673 - DNA, 15 bp, Homo sapiens
gtaagttgtttaatt

SEQ ID NO: 414674 - DNA, 15 bp, Homo sapiens
tgtaagttgtttaat

SEQ ID NO: 414675 - DNA, 15 bp, Homo sapiens
atgtaagttgtttaa

SEQ ID NO: 414676 - DNA, 15 bp, Homo sapiens
tatgtaagttgttta

SEQ ID NO: 414677 - DNA, 15 bp, Homo sapiens
gtatgtaagttgttt

SEQ ID NO: 414678 - DNA, 15 bp, Homo sapiens
ggtatgtaagttgtt

SEQ ID NO: 414679 - DNA, 15 bp, Homo sapiens
gggtatgtaagttgt

SEQ ID NO: 414680 - DNA, 15 bp, Homo sapiens
agggtatgtaagttg

SEQ ID NO: 414681 - DNA, 15 bp, Homo sapiens
cagggtatgtaagtt

SEQ ID NO: 414682 - DNA, 15 bp, Homo sapiens
tcagggtatgtaagt

SEQ ID NO: 414683 - DNA, 15 bp, Homo sapiens
ttcagggtatgtaag

SEQ ID NO: 414684 - DNA, 15 bp, Homo sapiens
tttcagggtatgtaa

SEQ ID NO: 414685 - DNA, 15 bp, Homo sapiens
gtttcagggtatgta

SEQ ID NO: 414686 - DNA, 15 bp, Homo sapiens
ggtttcagggtatgt

SEQ ID NO: 414687 - DNA, 15 bp, Homo sapiens
gggtttcagggtatg

SEQ ID NO: 414688 - DNA, 15 bp, Homo sapiens
tgggtttcagggtat

SEQ ID NO: 414689 - DNA, 15 bp, Homo sapiens
gtgggtttcagggta

SEQ ID NO: 414690 - DNA, 15 bp, Homo sapiens
tgtgggtttcagggt

SEQ ID NO: 414691 - DNA, 15 bp, Homo sapiens
ttgtgggtttcaggg

SEQ ID NO: 414692 - DNA, 15 bp, Homo sapiens
attgtgggtttcagg

SEQ ID NO: 414693 - DNA, 15 bp, Homo sapiens
aattgtgggtttcag

SEQ ID NO: 414694 - DNA, 15 bp, Homo sapiens
gaattgtgggtttca

SEQ ID NO: 414695 - DNA, 15 bp, Homo sapiens
agaattgtgggtttc

SEQ ID NO: 414696 - DNA, 15 bp, Homo sapiens
cagaattgtgggttt

SEQ ID NO: 414697 - DNA, 15 bp, Homo sapiens
acagaattgtgggtt

SEQ ID NO: 414698 - DNA, 15 bp, Homo sapiens
gacagaattgtgggt

SEQ ID NO: 414699 - DNA, 15 bp, Homo sapiens
agacagaattgtggg

SEQ ID NO: 414700 - DNA, 15 bp, Homo sapiens
gagacagaattgtgg

SEQ ID NO: 414701 - DNA, 15 bp, Homo sapiens
agagacagaattgtg

SEQ ID NO: 414702 - DNA, 15 bp, Homo sapiens
tagagacagaattgt

SEQ ID NO: 414703 - DNA, 15 bp, Homo sapiens
ctagagacagaattg

SEQ ID NO: 414704 - DNA, 15 bp, Homo sapiens
tctagagacagaatt

SEQ ID NO: 414705 - DNA, 15 bp, Homo sapiens
atctagagacagaat

SEQ ID NO: 414706 - DNA, 15 bp, Homo sapiens
catctagagacagaa

SEQ ID NO: 414707 - DNA, 15 bp, Homo sapiens
acatctagagacaga

SEQ ID NO: 414708 - DNA, 15 bp, Homo sapiens
tactttatgtaaatt

SEQ ID NO: 414709 - DNA, 15 bp, Homo sapiens
atactttatgtaaat

SEQ ID NO: 414710 - DNA, 15 bp, Homo sapiens
aatactttatgtaaa

SEQ ID NO: 414711 - DNA, 15 bp, Homo sapiens
aaatactttatgtaa

SEQ ID NO: 414712 - DNA, 15 bp, Homo sapiens
taaatactttatgta

SEQ ID NO: 414713 - DNA, 15 bp, Homo sapiens
ataaatactttatgt

SEQ ID NO: 414714 - DNA, 15 bp, Homo sapiens
aataaatactttatg

SEQ ID NO: 414715 - DNA, 15 bp, Homo sapiens
caataaatactttat

SEQ ID NO: 414716 - DNA, 15 bp, Homo sapiens
gcaataaatacttta

SEQ ID NO: 414717 - DNA, 15 bp, Homo sapiens
agcaataaatacttt

SEQ ID NO: 414718 - DNA, 15 bp, Homo sapiens
cagcaataaatactt

SEQ ID NO: 414719 - DNA, 15 bp, Homo sapiens
ccagcaataaatact

SEQ ID NO: 414720 - DNA, 15 bp, Homo sapiens
tccagcaataaatac

SEQ ID NO: 414721 - DNA, 15 bp, Homo sapiens
gtccagcaataaata

SEQ ID NO: 414722 - DNA, 15 bp, Homo sapiens
tgtccagcaataaat

SEQ ID NO: 414723 - DNA, 15 bp, Homo sapiens
gtgtccagcaataaa

SEQ ID NO: 414724 - DNA, 15 bp, Homo sapiens
agtgtccagcaataa

SEQ ID NO: 414725 - DNA, 15 bp, Homo sapiens
aagtgtccagcaata

SEQ ID NO: 414726 - DNA, 15 bp, Homo sapiens
aaagtgtccagcaat

SEQ ID NO: 414727 - DNA, 15 bp, Homo sapiens
taaagtgtccagcaa

SEQ ID NO: 414728 - DNA, 15 bp, Homo sapiens
gtaaagtgtccagca

SEQ ID NO: 414729 - DNA, 15 bp, Homo sapiens
tgtaaagtgtccagc

SEQ ID NO: 414730 - DNA, 15 bp, Homo sapiens
atgtaaagtgtccag

SEQ ID NO: 414731 - DNA, 15 bp, Homo sapiens
catgtaaagtgtcca

SEQ ID NO: 414732 - DNA, 15 bp, Homo sapiens
gcatgtaaagtgtcc

SEQ ID NO: 414733 - DNA, 15 bp, Homo sapiens
tgcatgtaaagtgtc

SEQ ID NO: 414734 - DNA, 15 bp, Homo sapiens
gtgcatgtaaagtgt

SEQ ID NO: 414735 - DNA, 15 bp, Homo sapiens
agtgcatgtaaagtg

SEQ ID NO: 414736 - DNA, 15 bp, Homo sapiens
tagtgcatgtaaagt

SEQ ID NO: 414737 - DNA, 15 bp, Homo sapiens
atagtgcatgtaaag

SEQ ID NO: 414738 - DNA, 15 bp, Homo sapiens
gatagtgcatgtaaa

SEQ ID NO: 414739 - DNA, 15 bp, Homo sapiens
agatagtgcatgtaa

SEQ ID NO: 414740 - DNA, 15 bp, Homo sapiens
gagatagtgcatgta

SEQ ID NO: 414741 - DNA, 15 bp, Homo sapiens
tgagatagtgcatgt

SEQ ID NO: 414742 - DNA, 15 bp, Homo sapiens
atgagatagtgcatg

SEQ ID NO: 414743 - DNA, 15 bp, Homo sapiens
aatgagatagtgcat

SEQ ID NO: 414744 - DNA, 15 bp, Homo sapiens
aaatgagatagtgca

SEQ ID NO: 414745 - DNA, 15 bp, Homo sapiens
taaatgagatagtgc

SEQ ID NO: 414746 - DNA, 15 bp, Homo sapiens
ttaaatgagatagtg

SEQ ID NO: 414747 - DNA, 15 bp, Homo sapiens
gttaaatgagatagt

SEQ ID NO: 414748 - DNA, 15 bp, Homo sapiens
ggttaaatgagatag

SEQ ID NO: 414749 - DNA, 15 bp, Homo sapiens
tggttaaatgagata

SEQ ID NO: 414750 - DNA, 15 bp, Homo sapiens
gtggttaaatgagat

SEQ ID NO: 414751 - DNA, 15 bp, Homo sapiens
tgtggttaaatgaga

SEQ ID NO: 414752 - DNA, 15 bp, Homo sapiens
gtgtggttaaatgag

SEQ ID NO: 414753 - DNA, 15 bp, Homo sapiens
ggtgtggttaaatga

SEQ ID NO: 414754 - DNA, 15 bp, Homo sapiens
gggtgtggttaaatg

SEQ ID NO: 414755 - DNA, 15 bp, Homo sapiens
tgggtgtggttaaat

SEQ ID NO: 414756 - DNA, 15 bp, Homo sapiens
gtgggtgtggttaaa

SEQ ID NO: 414757 - DNA, 15 bp, Homo sapiens
ggtgggtgtggttaa

SEQ ID NO: 414758 - DNA, 15 bp, Homo sapiens
tggtgggtgtggtta

SEQ ID NO: 414759 - DNA, 15 bp, Homo sapiens
gtggtgggtgtggtt

SEQ ID NO: 414760 - DNA, 15 bp, Homo sapiens
agtggtgggtgtggt

SEQ ID NO: 414761 - DNA, 15 bp, Homo sapiens
gagtggtgggtgtgg

SEQ ID NO: 414762 - DNA, 15 bp, Homo sapiens
ggagtggtgggtgtg

SEQ ID NO: 414763 - DNA, 15 bp, Homo sapiens
tggagtggtgggtgt

SEQ ID NO: 414764 - DNA, 15 bp, Homo sapiens
ttggagtggtgggtg

SEQ ID NO: 414765 - DNA, 15 bp, Homo sapiens
cttggagtggtgggt

SEQ ID NO: 414766 - DNA, 15 bp, Homo sapiens
gcttggagtggtggg

SEQ ID NO: 414767 - DNA, 15 bp, Homo sapiens
agcttggagtggtgg

SEQ ID NO: 414768 - DNA, 15 bp, Homo sapiens
tagcttggagtggtg

SEQ ID NO: 414769 - DNA, 15 bp, Homo sapiens
atagcttggagtggt

SEQ ID NO: 414770 - DNA, 15 bp, Homo sapiens
aatagcttggagtgg

SEQ ID NO: 414771 - DNA, 15 bp, Homo sapiens
caatagcttggagtg

SEQ ID NO: 414772 - DNA, 15 bp, Homo sapiens
acaatagcttggagt

SEQ ID NO: 414773 - DNA, 15 bp, Homo sapiens
tacaatagcttggag

SEQ ID NO: 414774 - DNA, 15 bp, Homo sapiens
atacaatagcttgga

SEQ ID NO: 414775 - DNA, 15 bp, Homo sapiens
aatacaatagcttgg

SEQ ID NO: 414776 - DNA, 15 bp, Homo sapiens
taatacaatagcttg

SEQ ID NO: 414777 - DNA, 15 bp, Homo sapiens
ctaatacaatagctt

SEQ ID NO: 414778 - DNA, 15 bp, Homo sapiens
gctaatacaatagct

SEQ ID NO: 414779 - DNA, 15 bp, Homo sapiens
agctaatacaatagc

SEQ ID NO: 414780 - DNA, 15 bp, Homo sapiens
aagctaatacaatag

SEQ ID NO: 414781 - DNA, 15 bp, Homo sapiens
gaagctaatacaata

SEQ ID NO: 414782 - DNA, 15 bp, Homo sapiens
tgaagctaatacaat

SEQ ID NO: 414783 - DNA, 15 bp, Homo sapiens
gtgaagctaatacaa

SEQ ID NO: 414784 - DNA, 15 bp, Homo sapiens
ggtgaagctaataca

SEQ ID NO: 414785 - DNA, 15 bp, Homo sapiens
aggtgaagctaatac

SEQ ID NO: 414786 - DNA, 15 bp, Homo sapiens
taggtgaagctaata

SEQ ID NO: 414787 - DNA, 15 bp, Homo sapiens
ttaggtgaagctaat

SEQ ID NO: 414788 - DNA, 15 bp, Homo sapiens
cttaggtgaagctaa

SEQ ID NO: 414789 - DNA, 15 bp, Homo sapiens
tcttaggtgaagcta

SEQ ID NO: 414790 - DNA, 15 bp, Homo sapiens
ctcttaggtgaagct

SEQ ID NO: 414791 - DNA, 15 bp, Homo sapiens
tctcttaggtgaagc

SEQ ID NO: 414792 - DNA, 15 bp, Homo sapiens
ttctcttaggtgaag

SEQ ID NO: 414793 - DNA, 15 bp, Homo sapiens
cttctcttaggtgaa

SEQ ID NO: 414794 - DNA, 15 bp, Homo sapiens
gcttctcttaggtga

SEQ ID NO: 414795 - DNA, 15 bp, Homo sapiens
ggcttctcttaggtg

SEQ ID NO: 414796 - DNA, 15 bp, Homo sapiens
cggcttctcttaggt

SEQ ID NO: 414797 - DNA, 15 bp, Homo sapiens
tcggcttctcttagg

SEQ ID NO: 414798 - DNA, 15 bp, Homo sapiens
ctcggcttctcttag

SEQ ID NO: 414799 - DNA, 15 bp, Homo sapiens
cctcggcttctctta

SEQ ID NO: 414800 - DNA, 15 bp, Homo sapiens
gcctcggcttctctt

SEQ ID NO: 414801 - DNA, 15 bp, Homo sapiens
agcctcggcttctct

SEQ ID NO: 414802 - DNA, 15 bp, Homo sapiens
aagcctcggcttctc

SEQ ID NO: 414803 - DNA, 15 bp, Homo sapiens
gaagcctcggcttct

SEQ ID NO: 414804 - DNA, 15 bp, Homo sapiens
ggaagcctcggcttc

SEQ ID NO: 414805 - DNA, 15 bp, Homo sapiens
tggaagcctcggctt

SEQ ID NO: 414806 - DNA, 15 bp, Homo sapiens
ctggaagcctcggct

SEQ ID NO: 414807 - DNA, 15 bp, Homo sapiens
cctggaagcctcggc

SEQ ID NO: 414808 - DNA, 15 bp, Homo sapiens
tcctggaagcctcgg

SEQ ID NO: 414809 - DNA, 15 bp, Homo sapiens
ctcctggaagcctcg

SEQ ID NO: 414810 - DNA, 15 bp, Homo sapiens
tctcctggaagcctc

SEQ ID NO: 414811 - DNA, 15 bp, Homo sapiens
gtctcctggaagcct

SEQ ID NO: 414812 - DNA, 15 bp, Homo sapiens
cgtctcctggaagcc

SEQ ID NO: 414813 - DNA, 15 bp, Homo sapiens
acgtctcctggaagc

SEQ ID NO: 414814 - DNA, 15 bp, Homo sapiens
tacgtctcctggaag

SEQ ID NO: 414815 - DNA, 15 bp, Homo sapiens
gtacgtctcctggaa

SEQ ID NO: 414816 - DNA, 15 bp, Homo sapiens
ggtacgtctcctgga

SEQ ID NO: 414817 - DNA, 15 bp, Homo sapiens
aggtacgtctcctgg

SEQ ID NO: 414818 - DNA, 15 bp, Homo sapiens
gaggtacgtctcctg

SEQ ID NO: 414819 - DNA, 15 bp, Homo sapiens
tgaggtacgtctcct

SEQ ID NO: 414820 - DNA, 15 bp, Homo sapiens
gtgaggtacgtctcc

SEQ ID NO: 414821 - DNA, 15 bp, Homo sapiens
tgtgaggtacgtctc

SEQ ID NO: 414822 - DNA, 15 bp, Homo sapiens
atgtgaggtacgtct

SEQ ID NO: 414823 - DNA, 15 bp, Homo sapiens
gatgtgaggtacgtc

SEQ ID NO: 414824 - DNA, 15 bp, Homo sapiens
ggatgtgaggtacgt

SEQ ID NO: 414825 - DNA, 15 bp, Homo sapiens
aggatgtgaggtacg

SEQ ID NO: 414826 - DNA, 15 bp, Homo sapiens
caggatgtgaggtac

SEQ ID NO: 414827 - DNA, 15 bp, Homo sapiens
ccaggatgtgaggta

SEQ ID NO: 414828 - DNA, 15 bp, Homo sapiens
gccaggatgtgaggt

SEQ ID NO: 414829 - DNA, 15 bp, Homo sapiens
agccaggatgtgagg

SEQ ID NO: 414830 - DNA, 15 bp, Homo sapiens
tagccaggatgtgag

SEQ ID NO: 414831 - DNA, 15 bp, Homo sapiens
ttagccaggatgtga

SEQ ID NO: 414832 - DNA, 15 bp, Homo sapiens
attagccaggatgtg

SEQ ID NO: 414833 - DNA, 15 bp, Homo sapiens
aattagccaggatgt

SEQ ID NO: 414834 - DNA, 15 bp, Homo sapiens
caattagccaggatg

SEQ ID NO: 414835 - DNA, 15 bp, Homo sapiens
ccaattagccaggat

SEQ ID NO: 414836 - DNA, 15 bp, Homo sapiens
gccaattagccagga

SEQ ID NO: 414837 - DNA, 15 bp, Homo sapiens
tgccaattagccagg

SEQ ID NO: 414838 - DNA, 15 bp, Homo sapiens
ctgccaattagccag

SEQ ID NO: 414839 - DNA, 15 bp, Homo sapiens
tctgccaattagcca

SEQ ID NO: 414840 - DNA, 15 bp, Homo sapiens
ctctgccaattagcc

SEQ ID NO: 414841 - DNA, 15 bp, Homo sapiens
actctgccaattagc

SEQ ID NO: 414842 - DNA, 15 bp, Homo sapiens
gactctgccaattag

SEQ ID NO: 414843 - DNA, 15 bp, Homo sapiens
tgactctgccaatta

SEQ ID NO: 414844 - DNA, 15 bp, Homo sapiens
ctgactctgccaatt

SEQ ID NO: 414845 - DNA, 15 bp, Homo sapiens
tctgactctgccaat

SEQ ID NO: 414846 - DNA, 15 bp, Homo sapiens
ttctgactctgccaa

SEQ ID NO: 414847 - DNA, 15 bp, Homo sapiens
gttctgactctgcca

SEQ ID NO: 414848 - DNA, 15 bp, Homo sapiens
agttctgactctgcc

SEQ ID NO: 414849 - DNA, 15 bp, Homo sapiens
gagttctgactctgc

SEQ ID NO: 414850 - DNA, 15 bp, Homo sapiens
tgagttctgactctg

SEQ ID NO: 414851 - DNA, 15 bp, Homo sapiens
ttgagttctgactct

SEQ ID NO: 414852 - DNA, 15 bp, Homo sapiens
cttgagttctgactc

SEQ ID NO: 414853 - DNA, 15 bp, Homo sapiens
acttgagttctgact

SEQ ID NO: 414854 - DNA, 15 bp, Homo sapiens
gacttgagttctgac

SEQ ID NO: 414855 - DNA, 15 bp, Homo sapiens
agacttgagttctga

SEQ ID NO: 414856 - DNA, 15 bp, Homo sapiens
aagacttgagttctg

SEQ ID NO: 414857 - DNA, 15 bp, Homo sapiens
aaagacttgagttct

SEQ ID NO: 414858 - DNA, 15 bp, Homo sapiens
aaaagacttgagttc

SEQ ID NO: 414859 - DNA, 15 bp, Homo sapiens
aaaaagacttgagtt

SEQ ID NO: 414860 - DNA, 15 bp, Homo sapiens
caaaaagacttgagt

SEQ ID NO: 414861 - DNA, 15 bp, Homo sapiens
tcaaaaagacttgag

SEQ ID NO: 414862 - DNA, 15 bp, Homo sapiens
gtcaaaaagacttga

SEQ ID NO: 414863 - DNA, 15 bp, Homo sapiens
agtcaaaaagacttg

SEQ ID NO: 414864 - DNA, 15 bp, Homo sapiens
gagtcaaaaagactt

SEQ ID NO: 414865 - DNA, 15 bp, Homo sapiens
agagtcaaaaagact

SEQ ID NO: 414866 - DNA, 15 bp, Homo sapiens
aagagtcaaaaagac

SEQ ID NO: 414867 - DNA, 15 bp, Homo sapiens
taagagtcaaaaaga

SEQ ID NO: 414868 - DNA, 15 bp, Homo sapiens
ctaagagtcaaaaag

SEQ ID NO: 414869 - DNA, 15 bp, Homo sapiens
gctaagagtcaaaaa

SEQ ID NO: 414870 - DNA, 15 bp, Homo sapiens
agctaagagtcaaaa

SEQ ID NO: 414871 - DNA, 15 bp, Homo sapiens
aagctaagagtcaaa

SEQ ID NO: 414872 - DNA, 15 bp, Homo sapiens
aaagctaagagtcaa

SEQ ID NO: 414873 - DNA, 15 bp, Homo sapiens
aaaagctaagagtca

SEQ ID NO: 414874 - DNA, 15 bp, Homo sapiens
taaaagctaagagtc

SEQ ID NO: 414875 - DNA, 15 bp, Homo sapiens
ataaaagctaagagt

SEQ ID NO: 414876 - DNA, 15 bp, Homo sapiens
cataaaagctaagag

SEQ ID NO: 414877 - DNA, 15 bp, Homo sapiens
acataaaagctaaga

SEQ ID NO: 414878 - DNA, 15 bp, Homo sapiens
gacataaaagctaag

SEQ ID NO: 414879 - DNA, 15 bp, Homo sapiens
agacataaaagctaa

SEQ ID NO: 414880 - DNA, 15 bp, Homo sapiens
aagacataaaagcta

SEQ ID NO: 414881 - DNA, 15 bp, Homo sapiens
caagacataaaagct

SEQ ID NO: 414882 - DNA, 15 bp, Homo sapiens
acaagacataaaagc

SEQ ID NO: 414883 - DNA, 15 bp, Homo sapiens
aacaagacataaaag

SEQ ID NO: 414884 - DNA, 15 bp, Homo sapiens
caacaagacataaaa

SEQ ID NO: 414885 - DNA, 15 bp, Homo sapiens
ccaacaagacataaa

SEQ ID NO: 414886 - DNA, 15 bp, Homo sapiens
accaacaagacataa

SEQ ID NO: 414887 - DNA, 15 bp, Homo sapiens
taccaacaagacata

SEQ ID NO: 414888 - DNA, 15 bp, Homo sapiens
ataccaacaagacat

SEQ ID NO: 414889 - DNA, 15 bp, Homo sapiens
gataccaacaagaca

SEQ ID NO: 414890 - DNA, 15 bp, Homo sapiens
tgataccaacaagac

SEQ ID NO: 414891 - DNA, 15 bp, Homo sapiens
ctgataccaacaaga

SEQ ID NO: 414892 - DNA, 15 bp, Homo sapiens
cctgataccaacaag

SEQ ID NO: 414893 - DNA, 15 bp, Homo sapiens
tcctgataccaacaa

SEQ ID NO: 414894 - DNA, 15 bp, Homo sapiens
atcctgataccaaca

SEQ ID NO: 414895 - DNA, 15 bp, Homo sapiens
aatcctgataccaac

SEQ ID NO: 414896 - DNA, 15 bp, Homo sapiens
taatcctgataccaa

SEQ ID NO: 414897 - DNA, 15 bp, Homo sapiens
ttaatcctgatacca

SEQ ID NO: 414898 - DNA, 15 bp, Homo sapiens
attaatcctgatacc

SEQ ID NO: 414899 - DNA, 15 bp, Homo sapiens
aattaatcctgatac

SEQ ID NO: 414900 - DNA, 15 bp, Homo sapiens
aaattaatcctgata

SEQ ID NO: 414901 - DNA, 15 bp, Homo sapiens
caaattaatcctgat

SEQ ID NO: 414902 - DNA, 15 bp, Homo sapiens
ccaaattaatcctga

SEQ ID NO: 414903 - DNA, 15 bp, Homo sapiens
cccaaattaatcctg

SEQ ID NO: 414904 - DNA, 15 bp, Homo sapiens
ccccaaattaatcct

SEQ ID NO: 414905 - DNA, 15 bp, Homo sapiens
cccccaaattaatcc

SEQ ID NO: 414906 - DNA, 15 bp, Homo sapiens
acccccaaattaatc

SEQ ID NO: 414907 - DNA, 15 bp, Homo sapiens
tacccccaaattaat

SEQ ID NO: 414908 - DNA, 15 bp, Homo sapiens
ttacccccaaattaa

SEQ ID NO: 414909 - DNA, 15 bp, Homo sapiens
tttacccccaaatta

SEQ ID NO: 414910 - DNA, 15 bp, Homo sapiens
atttacccccaaatt

SEQ ID NO: 414911 - DNA, 15 bp, Homo sapiens
catttacccccaaat

SEQ ID NO: 414912 - DNA, 15 bp, Homo sapiens
tcatttacccccaaa

SEQ ID NO: 414913 - DNA, 15 bp, Homo sapiens
ttcatttacccccaa

SEQ ID NO: 414914 - DNA, 15 bp, Homo sapiens
attcatttaccccca

SEQ ID NO: 414915 - DNA, 15 bp, Homo sapiens
tattcatttaccccc

SEQ ID NO: 414916 - DNA, 15 bp, Homo sapiens
ctattcatttacccc

SEQ ID NO: 414917 - DNA, 15 bp, Homo sapiens
tctattcatttaccc

SEQ ID NO: 414918 - DNA, 15 bp, Homo sapiens
ctctattcatttacc

SEQ ID NO: 414919 - DNA, 15 bp, Homo sapiens
tctctattcatttac

SEQ ID NO: 414920 - DNA, 15 bp, Homo sapiens
atctctattcattta

SEQ ID NO: 414921 - DNA, 15 bp, Homo sapiens
catctctattcattt

SEQ ID NO: 414922 - DNA, 15 bp, Homo sapiens
gcatctctattcatt

SEQ ID NO: 414923 - DNA, 15 bp, Homo sapiens
ggcatctctattcat

SEQ ID NO: 414924 - DNA, 15 bp, Homo sapiens
aggcatctctattca

SEQ ID NO: 414925 - DNA, 15 bp, Homo sapiens
caggcatctctattc

SEQ ID NO: 414926 - DNA, 15 bp, Homo sapiens
ccaggcatctctatt

SEQ ID NO: 414927 - DNA, 15 bp, Homo sapiens
gccaggcatctctat

SEQ ID NO: 414928 - DNA, 15 bp, Homo sapiens
tgccaggcatctcta

SEQ ID NO: 414929 - DNA, 15 bp, Homo sapiens
ctgccaggcatctct

SEQ ID NO: 414930 - DNA, 15 bp, Homo sapiens
gctgccaggcatctc

SEQ ID NO: 414931 - DNA, 15 bp, Homo sapiens
tgctgccaggcatct

SEQ ID NO: 414932 - DNA, 15 bp, Homo sapiens
gtgctgccaggcatc

SEQ ID NO: 414933 - DNA, 15 bp, Homo sapiens
tgtgctgccaggcat

SEQ ID NO: 414934 - DNA, 15 bp, Homo sapiens
ctgtgctgccaggca

SEQ ID NO: 414935 - DNA, 15 bp, Homo sapiens
cctgtgctgccaggc

SEQ ID NO: 414936 - DNA, 15 bp, Homo sapiens
tcctgtgctgccagg

SEQ ID NO: 414937 - DNA, 15 bp, Homo sapiens
atcctgtgctgccag

SEQ ID NO: 414938 - DNA, 15 bp, Homo sapiens
tatcctgtgctgcca

SEQ ID NO: 414939 - DNA, 15 bp, Homo sapiens
ttatcctgtgctgcc

SEQ ID NO: 414940 - DNA, 15 bp, Homo sapiens
cttatcctgtgctgc

SEQ ID NO: 414941 - DNA, 15 bp, Homo sapiens
acttatcctgtgctg

SEQ ID NO: 414942 - DNA, 15 bp, Homo sapiens
gacttatcctgtgct

SEQ ID NO: 414943 - DNA, 15 bp, Homo sapiens
ggacttatcctgtgc

SEQ ID NO: 414944 - DNA, 15 bp, Homo sapiens
tggacttatcctgtg

SEQ ID NO: 414945 - DNA, 15 bp, Homo sapiens
ttggacttatcctgt

SEQ ID NO: 414946 - DNA, 15 bp, Homo sapiens
gttggacttatcctg

SEQ ID NO: 414947 - DNA, 15 bp, Homo sapiens
tgttggacttatcct

SEQ ID NO: 414948 - DNA, 15 bp, Homo sapiens
ctgttggacttatcc

SEQ ID NO: 414949 - DNA, 15 bp, Homo sapiens
tctgttggacttatc

SEQ ID NO: 414950 - DNA, 15 bp, Homo sapiens
atctgttggacttat

SEQ ID NO: 414951 - DNA, 15 bp, Homo sapiens
tatctgttggactta

SEQ ID NO: 414952 - DNA, 15 bp, Homo sapiens
gtatctgttggactt

SEQ ID NO: 414953 - DNA, 15 bp, Homo sapiens
agtatctgttggact

SEQ ID NO: 414954 - DNA, 15 bp, Homo sapiens
gagtatctgttggac

SEQ ID NO: 414955 - DNA, 15 bp, Homo sapiens
agagtatctgttgga

SEQ ID NO: 414956 - DNA, 15 bp, Homo sapiens
gagagtatctgttgg

SEQ ID NO: 414957 - DNA, 15 bp, Homo sapiens
tgagagtatctgttg

SEQ ID NO: 414958 - DNA, 15 bp, Homo sapiens
ctgagagtatctgtt

SEQ ID NO: 414959 - DNA, 15 bp, Homo sapiens
cctgagagtatctgt

SEQ ID NO: 414960 - DNA, 15 bp, Homo sapiens
tcctgagagtatctg

SEQ ID NO: 414961 - DNA, 15 bp, Homo sapiens
ttcctgagagtatct

SEQ ID NO: 414962 - DNA, 15 bp, Homo sapiens
tttcctgagagtatc

SEQ ID NO: 414963 - DNA, 15 bp, Homo sapiens
ttttcctgagagtat

SEQ ID NO: 414964 - DNA, 15 bp, Homo sapiens
tttttcctgagagta

SEQ ID NO: 414965 - DNA, 15 bp, Homo sapiens
gtttttcctgagagt

SEQ ID NO: 414966 - DNA, 15 bp, Homo sapiens
tgtttttcctgagag

SEQ ID NO: 414967 - DNA, 15 bp, Homo sapiens
ttgtttttcctgaga

SEQ ID NO: 414968 - DNA, 15 bp, Homo sapiens
attgtttttcctgag

SEQ ID NO: 414969 - DNA, 15 bp, Homo sapiens
aattgtttttcctga

SEQ ID NO: 414970 - DNA, 15 bp, Homo sapiens
caattgtttttcctg

SEQ ID NO: 414971 - DNA, 15 bp, Homo sapiens
gcaattgtttttcct

SEQ ID NO: 414972 - DNA, 15 bp, Homo sapiens
tgcaattgtttttcc

SEQ ID NO: 414973 - DNA, 15 bp, Homo sapiens
gtgcaattgtttttc

SEQ ID NO: 414974 - DNA, 15 bp, Homo sapiens
tgtgcaattgttttt

SEQ ID NO: 414975 - DNA, 15 bp, Homo sapiens
ttgtgcaattgtttt

SEQ ID NO: 414976 - DNA, 15 bp, Homo sapiens
tttgtgcaattgttt

SEQ ID NO: 414977 - DNA, 15 bp, Homo sapiens
ttttgtgcaattgtt

SEQ ID NO: 414978 - DNA, 15 bp, Homo sapiens
attttgtgcaattgt

SEQ ID NO: 414979 - DNA, 15 bp, Homo sapiens
gattttgtgcaattg

SEQ ID NO: 414980 - DNA, 15 bp, Homo sapiens
agattttgtgcaatt

SEQ ID NO: 414981 - DNA, 15 bp, Homo sapiens
tagattttgtgcaat

SEQ ID NO: 414982 - DNA, 15 bp, Homo sapiens
ctagattttgtgcaa

SEQ ID NO: 414983 - DNA, 15 bp, Homo sapiens
actagattttgtgca

SEQ ID NO: 414984 - DNA, 15 bp, Homo sapiens
gactagattttgtgc

SEQ ID NO: 414985 - DNA, 15 bp, Homo sapiens
tgactagattttgtg

SEQ ID NO: 414986 - DNA, 15 bp, Homo sapiens
ctgactagattttgt

SEQ ID NO: 414987 - DNA, 15 bp, Homo sapiens
actgactagattttg

SEQ ID NO: 414988 - DNA, 15 bp, Homo sapiens
aactgactagatttt

SEQ ID NO: 414989 - DNA, 15 bp, Homo sapiens
taactgactagattt

SEQ ID NO: 414990 - DNA, 15 bp, Homo sapiens
ataactgactagatt

SEQ ID NO: 414991 - DNA, 15 bp, Homo sapiens
cataactgactagat

SEQ ID NO: 414992 - DNA, 15 bp, Homo sapiens
acataactgactaga

SEQ ID NO: 414993 - DNA, 15 bp, Homo sapiens
aacataactgactag

SEQ ID NO: 414994 - DNA, 15 bp, Homo sapiens
aaacataactgacta

SEQ ID NO: 414995 - DNA, 15 bp, Homo sapiens
aaaacataactgact

SEQ ID NO: 414996 - DNA, 15 bp, Homo sapiens
taaaacataactgac

SEQ ID NO: 414997 - DNA, 15 bp, Homo sapiens
ctaaaacataactga

SEQ ID NO: 414998 - DNA, 15 bp, Homo sapiens
actaaaacataactg

SEQ ID NO: 414999 - DNA, 15 bp, Homo sapiens
aactaaaacataact

SEQ ID NO: 415000 - DNA, 15 bp, Homo sapiens
aaactaaaacataac

SEQ ID NO: 415001 - DNA, 15 bp, Homo sapiens
aaaactaaaacataa

SEQ ID NO: 415002 - DNA, 15 bp, Homo sapiens
caaaactaaaacata

SEQ ID NO: 415003 - DNA, 15 bp, Homo sapiens
tcaaaactaaaacat

SEQ ID NO: 415004 - DNA, 15 bp, Homo sapiens
ttcaaaactaaaaca

SEQ ID NO: 415005 - DNA, 15 bp, Homo sapiens
cttcaaaactaaaac

SEQ ID NO: 415006 - DNA, 15 bp, Homo sapiens
tcttcaaaactaaaa

SEQ ID NO: 415007 - DNA, 15 bp, Homo sapiens
ttcttcaaaactaaa

SEQ ID NO: 415008 - DNA, 15 bp, Homo sapiens
tttcttcaaaactaa

SEQ ID NO: 415009 - DNA, 15 bp, Homo sapiens
ttttcttcaaaacta

SEQ ID NO: 415010 - DNA, 15 bp, Homo sapiens
attttcttcaaaact

SEQ ID NO: 415011 - DNA, 15 bp, Homo sapiens
tattttcttcaaaac

SEQ ID NO: 415012 - DNA, 15 bp, Homo sapiens
ttattttcttcaaaa

SEQ ID NO: 415013 - DNA, 15 bp, Homo sapiens
tttattttcttcaaa

SEQ ID NO: 415014 - DNA, 15 bp, Homo sapiens
atttattttcttcaa

SEQ ID NO: 415015 - DNA, 15 bp, Homo sapiens
tatttattttcttca

SEQ ID NO: 415016 - DNA, 15 bp, Homo sapiens
gtatttattttcttc

SEQ ID NO: 415017 - DNA, 15 bp, Homo sapiens
agtatttattttctt

SEQ ID NO: 415018 - DNA, 15 bp, Homo sapiens
gagtatttattttct

SEQ ID NO: 415019 - DNA, 15 bp, Homo sapiens
tgagtatttattttc

SEQ ID NO: 415020 - DNA, 15 bp, Homo sapiens
atgagtatttatttt

SEQ ID NO: 415021 - DNA, 15 bp, Homo sapiens
aatgagtatttattt

SEQ ID NO: 415022 - DNA, 15 bp, Homo sapiens
ttaatgagtatttat

SEQ ID NO: 415023 - DNA, 15 bp, Homo sapiens
tttaatgagtattta

SEQ ID NO: 415024 - DNA, 15 bp, Homo sapiens
atttaatgagtattt

SEQ ID NO: 415025 - DNA, 15 bp, Homo sapiens
aatttaatgagtatt

SEQ ID NO: 415026 - DNA, 15 bp, Homo sapiens
taatttaatgagtat

SEQ ID NO: 415027 - DNA, 15 bp, Homo sapiens
ataatttaatgagta

SEQ ID NO: 415028 - DNA, 15 bp, Homo sapiens
tataatttaatgagt

SEQ ID NO: 415029 - DNA, 15 bp, Homo sapiens
ttataatttaatgag

SEQ ID NO: 415030 - DNA, 15 bp, Homo sapiens
attataatttaatga

SEQ ID NO: 415031 - DNA, 15 bp, Homo sapiens
aattataatttaatg

SEQ ID NO: 415032 - DNA, 15 bp, Homo sapiens
taattataatttaat

SEQ ID NO: 415033 - DNA, 15 bp, Homo sapiens
ataattataatttaa

SEQ ID NO: 415034 - DNA, 15 bp, Homo sapiens
gataattataattta

SEQ ID NO: 415035 - DNA, 15 bp, Homo sapiens
agataattataattt

SEQ ID NO: 415036 - DNA, 15 bp, Homo sapiens
cagataattataatt

SEQ ID NO: 415037 - DNA, 15 bp, Homo sapiens
ccagataattataat

SEQ ID NO: 415038 - DNA, 15 bp, Homo sapiens
accagataattataa

SEQ ID NO: 415039 - DNA, 15 bp, Homo sapiens
aaccagataattata

SEQ ID NO: 415040 - DNA, 15 bp, Homo sapiens
aaaccagataattat

SEQ ID NO: 415041 - DNA, 15 bp, Homo sapiens
taaaccagataatta

SEQ ID NO: 415042 - DNA, 15 bp, Homo sapiens
gtaaaccagataatt

SEQ ID NO: 415043 - DNA, 15 bp, Homo sapiens
ggtaaaccagataat

SEQ ID NO: 415044 - DNA, 15 bp, Homo sapiens
gggtaaaccagataa

SEQ ID NO: 415045 - DNA, 15 bp, Homo sapiens
cgggtaaaccagata

SEQ ID NO: 415046 - DNA, 15 bp, Homo sapiens
tcgggtaaaccagat

SEQ ID NO: 415047 - DNA, 15 bp, Homo sapiens
atcgggtaaaccaga

SEQ ID NO: 415048 - DNA, 15 bp, Homo sapiens
tatcgggtaaaccag

SEQ ID NO: 415049 - DNA, 15 bp, Homo sapiens
ttatcgggtaaacca

SEQ ID NO: 415050 - DNA, 15 bp, Homo sapiens
gttatcgggtaaacc

SEQ ID NO: 415051 - DNA, 15 bp, Homo sapiens
tgttatcgggtaaac

SEQ ID NO: 415052 - DNA, 15 bp, Homo sapiens
gtgttatcgggtaaa

SEQ ID NO: 415053 - DNA, 15 bp, Homo sapiens
ggtgttatcgggtaa

SEQ ID NO: 415054 - DNA, 15 bp, Homo sapiens
tggtgttatcgggta

SEQ ID NO: 415055 - DNA, 15 bp, Homo sapiens
ttggtgttatcgggt

SEQ ID NO: 415056 - DNA, 15 bp, Homo sapiens
tttggtgttatcggg

SEQ ID NO: 415057 - DNA, 15 bp, Homo sapiens
ttttggtgttatcgg

SEQ ID NO: 415058 - DNA, 15 bp, Homo sapiens
attttggtgttatcg

SEQ ID NO: 415059 - DNA, 15 bp, Homo sapiens
gattttggtgttatc

SEQ ID NO: 415060 - DNA, 15 bp, Homo sapiens
tgattttggtgttat

SEQ ID NO: 415061 - DNA, 15 bp, Homo sapiens
gtgattttggtgtta

SEQ ID NO: 415062 - DNA, 15 bp, Homo sapiens
tgtgattttggtgtt

SEQ ID NO: 415063 - DNA, 15 bp, Homo sapiens
ttgtgattttggtgt

SEQ ID NO: 415064 - DNA, 15 bp, Homo sapiens
attgtgattttggtg

SEQ ID NO: 415065 - DNA, 15 bp, Homo sapiens
tattgtgattttggt

SEQ ID NO: 415066 - DNA, 15 bp, Homo sapiens
gtattgtgattttgg

SEQ ID NO: 415067 - DNA, 15 bp, Homo sapiens
ggtattgtgattttg

SEQ ID NO: 415068 - DNA, 15 bp, Homo sapiens
tggtattgtgatttt

SEQ ID NO: 415069 - DNA, 15 bp, Homo sapiens
atggtattgtgattt

SEQ ID NO: 415070 - DNA, 15 bp, Homo sapiens
aatggtattgtgatt

SEQ ID NO: 415071 - DNA, 15 bp, Homo sapiens
gaatggtattgtgat

SEQ ID NO: 415072 - DNA, 15 bp, Homo sapiens
agaatggtattgtga

SEQ ID NO: 415073 - DNA, 15 bp, Homo sapiens
aagaatggtattgtg

SEQ ID NO: 415074 - DNA, 15 bp, Homo sapiens
taagaatggtattgt

SEQ ID NO: 415075 - DNA, 15 bp, Homo sapiens
ctaagaatggtattg

SEQ ID NO: 415076 - DNA, 15 bp, Homo sapiens
tctaagaatggtatt

SEQ ID NO: 415077 - DNA, 15 bp, Homo sapiens
ttctaagaatggtat

SEQ ID NO: 415078 - DNA, 15 bp, Homo sapiens
attctaagaatggta

SEQ ID NO: 415079 - DNA, 15 bp, Homo sapiens
tattctaagaatggt

SEQ ID NO: 415080 - DNA, 15 bp, Homo sapiens
ttattctaagaatgg

SEQ ID NO: 415081 - DNA, 15 bp, Homo sapiens
attattctaagaatg

SEQ ID NO: 415082 - DNA, 15 bp, Homo sapiens
gattattctaagaat

SEQ ID NO: 415083 - DNA, 15 bp, Homo sapiens
ggattattctaagaa

SEQ ID NO: 415084 - DNA, 15 bp, Homo sapiens
aggattattctaaga

SEQ ID NO: 415085 - DNA, 15 bp, Homo sapiens
aaggattattctaag

SEQ ID NO: 415086 - DNA, 15 bp, Homo sapiens
caaggattattctaa

SEQ ID NO: 415087 - DNA, 15 bp, Homo sapiens
ccaaggattattcta

SEQ ID NO: 415088 - DNA, 15 bp, Homo sapiens
gccaaggattattct

SEQ ID NO: 415089 - DNA, 15 bp, Homo sapiens
agccaaggattattc

SEQ ID NO: 415090 - DNA, 15 bp, Homo sapiens
gagccaaggattatt

SEQ ID NO: 415091 - DNA, 15 bp, Homo sapiens
agagccaaggattat

SEQ ID NO: 415092 - DNA, 15 bp, Homo sapiens
aagagccaaggatta

SEQ ID NO: 415093 - DNA, 15 bp, Homo sapiens
gaagagccaaggatt

SEQ ID NO: 415094 - DNA, 15 bp, Homo sapiens
agaagagccaaggat

SEQ ID NO: 415095 - DNA, 15 bp, Homo sapiens
aagaagagccaagga

SEQ ID NO: 415096 - DNA, 15 bp, Homo sapiens
aaagaagagccaagg

SEQ ID NO: 415097 - DNA, 15 bp, Homo sapiens
aaaagaagagccaag

SEQ ID NO: 415098 - DNA, 15 bp, Homo sapiens
caaaagaagagccaa

SEQ ID NO: 415099 - DNA, 15 bp, Homo sapiens
gcaaaagaagagcca

SEQ ID NO: 415100 - DNA, 15 bp, Homo sapiens
agcaaaagaagagcc

SEQ ID NO: 415101 - DNA, 15 bp, Homo sapiens
gagcaaaagaagagc

SEQ ID NO: 415102 - DNA, 15 bp, Homo sapiens
tgagcaaaagaagag

SEQ ID NO: 415103 - DNA, 15 bp, Homo sapiens
gtgagcaaaagaaga

SEQ ID NO: 415104 - DNA, 15 bp, Homo sapiens
tgtgagcaaaagaag

SEQ ID NO: 415105 - DNA, 15 bp, Homo sapiens
gtgtgagcaaaagaa

SEQ ID NO: 415106 - DNA, 15 bp, Homo sapiens
tgtgtgagcaaaaga

SEQ ID NO: 415107 - DNA, 15 bp, Homo sapiens
gtgtgtgagcaaaag

SEQ ID NO: 415108 - DNA, 15 bp, Homo sapiens
agtgtgtgagcaaaa

SEQ ID NO: 415109 - DNA, 15 bp, Homo sapiens
gagtgtgtgagcaaa

SEQ ID NO: 415110 - DNA, 15 bp, Homo sapiens
agagtgtgtgagcaa

SEQ ID NO: 415111 - DNA, 15 bp, Homo sapiens
tagagtgtgtgagca

SEQ ID NO: 415112 - DNA, 15 bp, Homo sapiens
gtagagtgtgtgagc

SEQ ID NO: 415113 - DNA, 15 bp, Homo sapiens
tgtagagtgtgtgag

SEQ ID NO: 415114 - DNA, 15 bp, Homo sapiens
ttgtagagtgtgtga

SEQ ID NO: 415115 - DNA, 15 bp, Homo sapiens
attgtagagtgtgtg

SEQ ID NO: 415116 - DNA, 15 bp, Homo sapiens
gattgtagagtgtgt

SEQ ID NO: 415117 - DNA, 15 bp, Homo sapiens
tgattgtagagtgtg

SEQ ID NO: 415118 - DNA, 15 bp, Homo sapiens
ttgattgtagagtgt

SEQ ID NO: 415119 - DNA, 15 bp, Homo sapiens
tttgattgtagagtg

SEQ ID NO: 415120 - DNA, 15 bp, Homo sapiens
atttgattgtagagt

SEQ ID NO: 415121 - DNA, 15 bp, Homo sapiens
gatttgattgtagag

SEQ ID NO: 415122 - DNA, 15 bp, Homo sapiens
ggatttgattgtaga

SEQ ID NO: 415123 - DNA, 15 bp, Homo sapiens
aggatttgattgtag

SEQ ID NO: 415124 - DNA, 15 bp, Homo sapiens
caggatttgattgta

SEQ ID NO: 415125 - DNA, 15 bp, Homo sapiens
acaggatttgattgt

SEQ ID NO: 415126 - DNA, 15 bp, Homo sapiens
gacaggatttgattg

SEQ ID NO: 415127 - DNA, 15 bp, Homo sapiens
tgacaggatttgatt

SEQ ID NO: 415128 - DNA, 15 bp, Homo sapiens
ctgacaggatttgat

SEQ ID NO: 415129 - DNA, 15 bp, Homo sapiens
actgacaggatttga

SEQ ID NO: 415130 - DNA, 15 bp, Homo sapiens
gactgacaggatttg

SEQ ID NO: 415131 - DNA, 15 bp, Homo sapiens
ggactgacaggattt

SEQ ID NO: 415132 - DNA, 15 bp, Homo sapiens
tggactgacaggatt

SEQ ID NO: 415133 - DNA, 15 bp, Homo sapiens
ctggactgacaggat

SEQ ID NO: 415134 - DNA, 15 bp, Homo sapiens
actggactgacagga

SEQ ID NO: 415135 - DNA, 15 bp, Homo sapiens
gactggactgacagg

SEQ ID NO: 415136 - DNA, 15 bp, Homo sapiens
ggactggactgacag

SEQ ID NO: 415137 - DNA, 15 bp, Homo sapiens
aggactggactgaca

SEQ ID NO: 415138 - DNA, 15 bp, Homo sapiens
gaggactggactgac

SEQ ID NO: 415139 - DNA, 15 bp, Homo sapiens
tgaggactggactga

SEQ ID NO: 415140 - DNA, 15 bp, Homo sapiens
ttgaggactggactg

SEQ ID NO: 415141 - DNA, 15 bp, Homo sapiens
tttgaggactggact

SEQ ID NO: 415142 - DNA, 15 bp, Homo sapiens
ttttgaggactggac

SEQ ID NO: 415143 - DNA, 15 bp, Homo sapiens
attttgaggactgga

SEQ ID NO: 415144 - DNA, 15 bp, Homo sapiens
tattttgaggactgg

SEQ ID NO: 415145 - DNA, 15 bp, Homo sapiens
ctattttgaggactg

SEQ ID NO: 415146 - DNA, 15 bp, Homo sapiens
tctattttgaggact

SEQ ID NO: 415147 - DNA, 15 bp, Homo sapiens
atctattttgaggac

SEQ ID NO: 415148 - DNA, 15 bp, Homo sapiens
aatctattttgagga

SEQ ID NO: 415149 - DNA, 15 bp, Homo sapiens
gaatctattttgagg

SEQ ID NO: 415150 - DNA, 15 bp, Homo sapiens
tgaatctattttgag

SEQ ID NO: 415151 - DNA, 15 bp, Homo sapiens
ctgaatctattttga

SEQ ID NO: 415152 - DNA, 15 bp, Homo sapiens
gctgaatctattttg

SEQ ID NO: 415153 - DNA, 15 bp, Homo sapiens
tgctgaatctatttt

SEQ ID NO: 415154 - DNA, 15 bp, Homo sapiens
atgctgaatctattt

SEQ ID NO: 415155 - DNA, 15 bp, Homo sapiens
gatgctgaatctatt

SEQ ID NO: 415156 - DNA, 15 bp, Homo sapiens
agatgctgaatctat

SEQ ID NO: 415157 - DNA, 15 bp, Homo sapiens
gagatgctgaatcta

SEQ ID NO: 415158 - DNA, 15 bp, Homo sapiens
ggagatgctgaatct

SEQ ID NO: 415159 - DNA, 15 bp, Homo sapiens
tggagatgctgaatc

SEQ ID NO: 415160 - DNA, 15 bp, Homo sapiens
ttggagatgctgaat

SEQ ID NO: 415161 - DNA, 15 bp, Homo sapiens
gttggagatgctgaa

SEQ ID NO: 415162 - DNA, 15 bp, Homo sapiens
cgttggagatgctga

SEQ ID NO: 415163 - DNA, 15 bp, Homo sapiens
gcgttggagatgctg

SEQ ID NO: 415164 - DNA, 15 bp, Homo sapiens
agcgttggagatgct

SEQ ID NO: 415165 - DNA, 15 bp, Homo sapiens
tagcgttggagatgc

SEQ ID NO: 415166 - DNA, 15 bp, Homo sapiens
gtagcgttggagatg

SEQ ID NO: 415167 - DNA, 15 bp, Homo sapiens
ggtagcgttggagat

SEQ ID NO: 415168 - DNA, 15 bp, Homo sapiens
gggtagcgttggaga

SEQ ID NO: 415169 - DNA, 15 bp, Homo sapiens
agggtagcgttggag

SEQ ID NO: 415170 - DNA, 15 bp, Homo sapiens
tagggtagcgttgga

SEQ ID NO: 415171 - DNA, 15 bp, Homo sapiens
gtagggtagcgttgg

SEQ ID NO: 415172 - DNA, 15 bp, Homo sapiens
agtagggtagcgttg

SEQ ID NO: 415173 - DNA, 15 bp, Homo sapiens
cagtagggtagcgtt

SEQ ID NO: 415174 - DNA, 15 bp, Homo sapiens
gcagtagggtagcgt

SEQ ID NO: 415175 - DNA, 15 bp, Homo sapiens
agcagtagggtagcg

SEQ ID NO: 415176 - DNA, 15 bp, Homo sapiens
gagcagtagggtagc

SEQ ID NO: 415177 - DNA, 15 bp, Homo sapiens
ggagcagtagggtag

SEQ ID NO: 415178 - DNA, 15 bp, Homo sapiens
tggagcagtagggta

SEQ ID NO: 415179 - DNA, 15 bp, Homo sapiens
gtggagcagtagggt

SEQ ID NO: 415180 - DNA, 15 bp, Homo sapiens
tgtggagcagtaggg

SEQ ID NO: 415181 - DNA, 15 bp, Homo sapiens
ttgtggagcagtagg

SEQ ID NO: 415182 - DNA, 15 bp, Homo sapiens
cttgtggagcagtag

SEQ ID NO: 415183 - DNA, 15 bp, Homo sapiens
gcttgtggagcagta

SEQ ID NO: 415184 - DNA, 15 bp, Homo sapiens
ggcttgtggagcagt

SEQ ID NO: 415185 - DNA, 15 bp, Homo sapiens
gggcttgtggagcag

SEQ ID NO: 415186 - DNA, 15 bp, Homo sapiens
tgggcttgtggagca

SEQ ID NO: 415187 - DNA, 15 bp, Homo sapiens
atgggcttgtggagc

SEQ ID NO: 415188 - DNA, 15 bp, Homo sapiens
gatgggcttgtggag

SEQ ID NO: 415189 - DNA, 15 bp, Homo sapiens
tgatgggcttgtgga

SEQ ID NO: 415190 - DNA, 15 bp, Homo sapiens
atgatgggcttgtgg

SEQ ID NO: 415191 - DNA, 15 bp, Homo sapiens
gatgatgggcttgtg

SEQ ID NO: 415192 - DNA, 15 bp, Homo sapiens
agatgatgggcttgt

SEQ ID NO: 415193 - DNA, 15 bp, Homo sapiens
gagatgatgggcttg

SEQ ID NO: 415194 - DNA, 15 bp, Homo sapiens
agagatgatgggctt

SEQ ID NO: 415195 - DNA, 15 bp, Homo sapiens
cagagatgatgggct

SEQ ID NO: 415196 - DNA, 15 bp, Homo sapiens
acagagatgatgggc

SEQ ID NO: 415197 - DNA, 15 bp, Homo sapiens
gacagagatgatggg

SEQ ID NO: 415198 - DNA, 15 bp, Homo sapiens
ggacagagatgatgg

SEQ ID NO: 415199 - DNA, 15 bp, Homo sapiens
aggacagagatgatg

SEQ ID NO: 415200 - DNA, 15 bp, Homo sapiens
caggacagagatgat

SEQ ID NO: 415201 - DNA, 15 bp, Homo sapiens
tcaggacagagatga

SEQ ID NO: 415202 - DNA, 15 bp, Homo sapiens
gtcaggacagagatg

SEQ ID NO: 415203 - DNA, 15 bp, Homo sapiens
agtcaggacagagat

SEQ ID NO: 415204 - DNA, 15 bp, Homo sapiens
gagtcaggacagaga

SEQ ID NO: 415205 - DNA, 15 bp, Homo sapiens
agagtcaggacagag

SEQ ID NO: 415206 - DNA, 15 bp, Homo sapiens
aagagtcaggacaga

SEQ ID NO: 415207 - DNA, 15 bp, Homo sapiens
aaagagtcaggacag

SEQ ID NO: 415208 - DNA, 15 bp, Homo sapiens
gaaagagtcaggaca

SEQ ID NO: 415209 - DNA, 15 bp, Homo sapiens
agaaagagtcaggac

SEQ ID NO: 415210 - DNA, 15 bp, Homo sapiens
tagaaagagtcagga

SEQ ID NO: 415211 - DNA, 15 bp, Homo sapiens
ttagaaagagtcagg

SEQ ID NO: 415212 - DNA, 15 bp, Homo sapiens
tttagaaagagtcag

SEQ ID NO: 415213 - DNA, 15 bp, Homo sapiens
atttagaaagagtca

SEQ ID NO: 415214 - DNA, 15 bp, Homo sapiens
tatttagaaagagtc

SEQ ID NO: 415215 - DNA, 15 bp, Homo sapiens
gtatttagaaagagt

SEQ ID NO: 415216 - DNA, 15 bp, Homo sapiens
tgtatttagaaagag

SEQ ID NO: 415217 - DNA, 15 bp, Homo sapiens
ttgtatttagaaaga

SEQ ID NO: 415218 - DNA, 15 bp, Homo sapiens
attgtatttagaaag

SEQ ID NO: 415219 - DNA, 15 bp, Homo sapiens
cattgtatttagaaa

SEQ ID NO: 415220 - DNA, 15 bp, Homo sapiens
acattgtatttagaa

SEQ ID NO: 415221 - DNA, 15 bp, Homo sapiens
gacattgtatttaga

SEQ ID NO: 415222 - DNA, 15 bp, Homo sapiens
tgacattgtatttag

SEQ ID NO: 415223 - DNA, 15 bp, Homo sapiens
ttgacattgtattta

SEQ ID NO: 415224 - DNA, 15 bp, Homo sapiens
tttgacattgtattt

SEQ ID NO: 415225 - DNA, 15 bp, Homo sapiens
ttttgacattgtatt

SEQ ID NO: 415226 - DNA, 15 bp, Homo sapiens
attttgacattgtat

SEQ ID NO: 415227 - DNA, 15 bp, Homo sapiens
cattttgacattgta

SEQ ID NO: 415228 - DNA, 15 bp, Homo sapiens
ccattttgacattgt

SEQ ID NO: 415229 - DNA, 15 bp, Homo sapiens
cccattttgacattg

SEQ ID NO: 415230 - DNA, 15 bp, Homo sapiens
acccattttgacatt

SEQ ID NO: 415231 - DNA, 15 bp, Homo sapiens
gacccattttgacat

SEQ ID NO: 415232 - DNA, 15 bp, Homo sapiens
agacccattttgaca

SEQ ID NO: 415233 - DNA, 15 bp, Homo sapiens
gagacccattttgac

SEQ ID NO: 415234 - DNA, 15 bp, Homo sapiens
agagacccattttga

SEQ ID NO: 415235 - DNA, 15 bp, Homo sapiens
gagagacccattttg

SEQ ID NO: 415236 - DNA, 15 bp, Homo sapiens
agagagacccatttt

SEQ ID NO: 415237 - DNA, 15 bp, Homo sapiens
cagagagacccattt

SEQ ID NO: 415238 - DNA, 15 bp, Homo sapiens
acagagagacccatt

SEQ ID NO: 415239 - DNA, 15 bp, Homo sapiens
aacagagagacccat

SEQ ID NO: 415240 - DNA, 15 bp, Homo sapiens
gaacagagagaccca

SEQ ID NO: 415241 - DNA, 15 bp, Homo sapiens
ggaacagagagaccc

SEQ ID NO: 415242 - DNA, 15 bp, Homo sapiens
tggaacagagagacc

SEQ ID NO: 415243 - DNA, 15 bp, Homo sapiens
ttggaacagagagac

SEQ ID NO: 415244 - DNA, 15 bp, Homo sapiens
gttggaacagagaga

SEQ ID NO: 415245 - DNA, 15 bp, Homo sapiens
ggttggaacagagag

SEQ ID NO: 415246 - DNA, 15 bp, Homo sapiens
gggttggaacagaga

SEQ ID NO: 415247 - DNA, 15 bp, Homo sapiens
agggttggaacagag

SEQ ID NO: 415248 - DNA, 15 bp, Homo sapiens
aagggttggaacaga

SEQ ID NO: 415249 - DNA, 15 bp, Homo sapiens
caagggttggaacag

SEQ ID NO: 415250 - DNA, 15 bp, Homo sapiens
gcaagggttggaaca

SEQ ID NO: 415251 - DNA, 15 bp, Homo sapiens
agcaagggttggaac

SEQ ID NO: 415252 - DNA, 15 bp, Homo sapiens
gagcaagggttggaa

SEQ ID NO: 415253 - DNA, 15 bp, Homo sapiens
tgagcaagggttgga

SEQ ID NO: 415254 - DNA, 15 bp, Homo sapiens
gtgagcaagggttgg

SEQ ID NO: 415255 - DNA, 15 bp, Homo sapiens
agtgagcaagggttg

SEQ ID NO: 415256 - DNA, 15 bp, Homo sapiens
cagtgagcaagggtt

SEQ ID NO: 415257 - DNA, 15 bp, Homo sapiens
gcagtgagcaagggt

SEQ ID NO: 415258 - DNA, 15 bp, Homo sapiens
tgcagtgagcaaggg

SEQ ID NO: 415259 - DNA, 15 bp, Homo sapiens
ttgcagtgagcaagg

SEQ ID NO: 415260 - DNA, 15 bp, Homo sapiens
cttgcagtgagcaag

SEQ ID NO: 415261 - DNA, 15 bp, Homo sapiens
ccttgcagtgagcaa

SEQ ID NO: 415262 - DNA, 15 bp, Homo sapiens
cccttgcagtgagca

SEQ ID NO: 415263 - DNA, 15 bp, Homo sapiens
gcccttgcagtgagc

SEQ ID NO: 415264 - DNA, 15 bp, Homo sapiens
agcccttgcagtgag

SEQ ID NO: 415265 - DNA, 15 bp, Homo sapiens
gagcccttgcagtga

SEQ ID NO: 415266 - DNA, 15 bp, Homo sapiens
tgagcccttgcagtg

SEQ ID NO: 415267 - DNA, 15 bp, Homo sapiens
ttgagcccttgcagt

SEQ ID NO: 415268 - DNA, 15 bp, Homo sapiens
gttgagcccttgcag

SEQ ID NO: 415269 - DNA, 15 bp, Homo sapiens
ggttgagcccttgca

SEQ ID NO: 415270 - DNA, 15 bp, Homo sapiens
aggttgagcccttgc

SEQ ID NO: 415271 - DNA, 15 bp, Homo sapiens
caggttgagcccttg

SEQ ID NO: 415272 - DNA, 15 bp, Homo sapiens
acaggttgagccctt

SEQ ID NO: 415273 - DNA, 15 bp, Homo sapiens
gacaggttgagccct

SEQ ID NO: 415274 - DNA, 15 bp, Homo sapiens
tgacaggttgagccc

SEQ ID NO: 415275 - DNA, 15 bp, Homo sapiens
ctgacaggttgagcc

SEQ ID NO: 415276 - DNA, 15 bp, Homo sapiens
gctgacaggttgagc

SEQ ID NO: 415277 - DNA, 15 bp, Homo sapiens
ggctgacaggttgag

SEQ ID NO: 415278 - DNA, 15 bp, Homo sapiens
tggctgacaggttga

SEQ ID NO: 415279 - DNA, 15 bp, Homo sapiens
ctggctgacaggttg

SEQ ID NO: 415280 - DNA, 15 bp, Homo sapiens
tctggctgacaggtt

SEQ ID NO: 415281 - DNA, 15 bp, Homo sapiens
ttctggctgacaggt

SEQ ID NO: 415282 - DNA, 15 bp, Homo sapiens
cttctggctgacagg

SEQ ID NO: 415283 - DNA, 15 bp, Homo sapiens
ccttctggctgacag

SEQ ID NO: 415284 - DNA, 15 bp, Homo sapiens
tccttctggctgaca

SEQ ID NO: 415285 - DNA, 15 bp, Homo sapiens
gtccttctggctgac

SEQ ID NO: 415286 - DNA, 15 bp, Homo sapiens
agtccttctggctga

SEQ ID NO: 415287 - DNA, 15 bp, Homo sapiens
gagtccttctggctg

SEQ ID NO: 415288 - DNA, 15 bp, Homo sapiens
ggagtccttctggct

SEQ ID NO: 415289 - DNA, 15 bp, Homo sapiens
tggagtccttctggc

SEQ ID NO: 415290 - DNA, 15 bp, Homo sapiens
atggagtccttctgg

SEQ ID NO: 415291 - DNA, 15 bp, Homo sapiens
aatggagtccttctg

SEQ ID NO: 415292 - DNA, 15 bp, Homo sapiens
taatggagtccttct

SEQ ID NO: 415293 - DNA, 15 bp, Homo sapiens
ttaatggagtccttc

SEQ ID NO: 415294 - DNA, 15 bp, Homo sapiens
tttaatggagtcctt

SEQ ID NO: 415295 - DNA, 15 bp, Homo sapiens
ttttaatggagtcct

SEQ ID NO: 415296 - DNA, 15 bp, Homo sapiens
cttttaatggagtcc

SEQ ID NO: 415297 - DNA, 15 bp, Homo sapiens
acttttaatggagtc

SEQ ID NO: 415298 - DNA, 15 bp, Homo sapiens
cacttttaatggagt

SEQ ID NO: 415299 - DNA, 15 bp, Homo sapiens
tcacttttaatggag

SEQ ID NO: 415300 - DNA, 15 bp, Homo sapiens
gtcacttttaatgga

SEQ ID NO: 415301 - DNA, 15 bp, Homo sapiens
cgtcacttttaatgg

SEQ ID NO: 415302 - DNA, 15 bp, Homo sapiens
acgtcacttttaatg

SEQ ID NO: 415303 - DNA, 15 bp, Homo sapiens
aacgtcacttttaat

SEQ ID NO: 415304 - DNA, 15 bp, Homo sapiens
caacgtcacttttaa

SEQ ID NO: 415305 - DNA, 15 bp, Homo sapiens
tcaacgtcactttta

SEQ ID NO: 415306 - DNA, 15 bp, Homo sapiens
atcaacgtcactttt

SEQ ID NO: 415307 - DNA, 15 bp, Homo sapiens
gatcaacgtcacttt

SEQ ID NO: 415308 - DNA, 15 bp, Homo sapiens
tgatcaacgtcactt

SEQ ID NO: 415309 - DNA, 15 bp, Homo sapiens
atgatcaacgtcact

SEQ ID NO: 415310 - DNA, 15 bp, Homo sapiens
catgatcaacgtcac

SEQ ID NO: 415311 - DNA, 15 bp, Homo sapiens
acatgatcaacgtca

SEQ ID NO: 415312 - DNA, 15 bp, Homo sapiens
gacatgatcaacgtc

SEQ ID NO: 415313 - DNA, 15 bp, Homo sapiens
ggacatgatcaacgt

SEQ ID NO: 415314 - DNA, 15 bp, Homo sapiens
tggacatgatcaacg

SEQ ID NO: 415315 - DNA, 15 bp, Homo sapiens
atggacatgatcaac

SEQ ID NO: 415316 - DNA, 15 bp, Homo sapiens
aatggacatgatcaa

SEQ ID NO: 415317 - DNA, 15 bp, Homo sapiens
taatggacatgatca

SEQ ID NO: 415318 - DNA, 15 bp, Homo sapiens
ctaatggacatgatc

SEQ ID NO: 415319 - DNA, 15 bp, Homo sapiens
tctaatggacatgat

SEQ ID NO: 415320 - DNA, 15 bp, Homo sapiens
atctaatggacatga

SEQ ID NO: 415321 - DNA, 15 bp, Homo sapiens
catctaatggacatg

SEQ ID NO: 415322 - DNA, 15 bp, Homo sapiens
gcatctaatggacat

SEQ ID NO: 415323 - DNA, 15 bp, Homo sapiens
agcatctaatggaca

SEQ ID NO: 415324 - DNA, 15 bp, Homo sapiens
gagcatctaatggac

SEQ ID NO: 415325 - DNA, 15 bp, Homo sapiens
tgagcatctaatgga

SEQ ID NO: 415326 - DNA, 15 bp, Homo sapiens
ttgagcatctaatgg

SEQ ID NO: 415327 - DNA, 15 bp, Homo sapiens
tttgagcatctaatg

SEQ ID NO: 415328 - DNA, 15 bp, Homo sapiens
ctttgagcatctaat

SEQ ID NO: 415329 - DNA, 15 bp, Homo sapiens
gctttgagcatctaa

SEQ ID NO: 415330 - DNA, 15 bp, Homo sapiens
ggctttgagcatcta

SEQ ID NO: 415331 - DNA, 15 bp, Homo sapiens
gggctttgagcatct

SEQ ID NO: 415332 - DNA, 15 bp, Homo sapiens
agggctttgagcatc

SEQ ID NO: 415333 - DNA, 15 bp, Homo sapiens
cagggctttgagcat

SEQ ID NO: 415334 - DNA, 15 bp, Homo sapiens
gcagggctttgagca

SEQ ID NO: 415335 - DNA, 15 bp, Homo sapiens
tgcagggctttgagc

SEQ ID NO: 415336 - DNA, 15 bp, Homo sapiens
ctgcagggctttgag

SEQ ID NO: 415337 - DNA, 15 bp, Homo sapiens
gctgcagggctttga

SEQ ID NO: 415338 - DNA, 15 bp, Homo sapiens
tgctgcagggctttg

SEQ ID NO: 415339 - DNA, 15 bp, Homo sapiens
ctgctgcagggcttt

SEQ ID NO: 415340 - DNA, 15 bp, Homo sapiens
gctgctgcagggctt

SEQ ID NO: 415341 - DNA, 15 bp, Homo sapiens
agctgctgcagggct

SEQ ID NO: 415342 - DNA, 15 bp, Homo sapiens
gagctgctgcagggc

SEQ ID NO: 415343 - DNA, 15 bp, Homo sapiens
agagctgctgcaggg

SEQ ID NO: 415344 - DNA, 15 bp, Homo sapiens
gagagctgctgcagg

SEQ ID NO: 415345 - DNA, 15 bp, Homo sapiens
ggagagctgctgcag

SEQ ID NO: 415346 - DNA, 15 bp, Homo sapiens
tggagagctgctgca

SEQ ID NO: 415347 - DNA, 15 bp, Homo sapiens
gtggagagctgctgc

SEQ ID NO: 415348 - DNA, 15 bp, Homo sapiens
agtggagagctgctg

SEQ ID NO: 415349 - DNA, 15 bp, Homo sapiens
aagtggagagctgct

SEQ ID NO: 415350 - DNA, 15 bp, Homo sapiens
gaagtggagagctgc

SEQ ID NO: 415351 - DNA, 15 bp, Homo sapiens
tgaagtggagagctg

SEQ ID NO: 415352 - DNA, 15 bp, Homo sapiens
gtgaagtggagagct

SEQ ID NO: 415353 - DNA, 15 bp, Homo sapiens
agtgaagtggagagc

SEQ ID NO: 415354 - DNA, 15 bp, Homo sapiens
gagtgaagtggagag

SEQ ID NO: 415355 - DNA, 15 bp, Homo sapiens
ggagtgaagtggaga

SEQ ID NO: 415356 - DNA, 15 bp, Homo sapiens
tggagtgaagtggag

SEQ ID NO: 415357 - DNA, 15 bp, Homo sapiens
ctggagtgaagtgga

SEQ ID NO: 415358 - DNA, 15 bp, Homo sapiens
cctggagtgaagtgg

SEQ ID NO: 415359 - DNA, 15 bp, Homo sapiens
gcctggagtgaagtg

SEQ ID NO: 415360 - DNA, 15 bp, Homo sapiens
tgcctggagtgaagt

SEQ ID NO: 415361 - DNA, 15 bp, Homo sapiens
ttgcctggagtgaag

SEQ ID NO: 415362 - DNA, 15 bp, Homo sapiens
tttgcctggagtgaa

SEQ ID NO: 415363 - DNA, 15 bp, Homo sapiens
ttttgcctggagtga

SEQ ID NO: 415364 - DNA, 15 bp, Homo sapiens
cttttgcctggagtg

SEQ ID NO: 415365 - DNA, 15 bp, Homo sapiens
tcttttgcctggagt

SEQ ID NO: 415366 - DNA, 15 bp, Homo sapiens
gtcttttgcctggag

SEQ ID NO: 415367 - DNA, 15 bp, Homo sapiens
tgtcttttgcctgga

SEQ ID NO: 415368 - DNA, 15 bp, Homo sapiens
ttgtcttttgcctgg

SEQ ID NO: 415369 - DNA, 15 bp, Homo sapiens
cttgtcttttgcctg

SEQ ID NO: 415370 - DNA, 15 bp, Homo sapiens
acttgtcttttgcct

SEQ ID NO: 415371 - DNA, 15 bp, Homo sapiens
gacttgtcttttgcc

SEQ ID NO: 415372 - DNA, 15 bp, Homo sapiens
ggacttgtcttttgc

SEQ ID NO: 415373 - DNA, 15 bp, Homo sapiens
aggacttgtcttttg

SEQ ID NO: 415374 - DNA, 15 bp, Homo sapiens
caggacttgtctttt

SEQ ID NO: 415375 - DNA, 15 bp, Homo sapiens
ccaggacttgtcttt

SEQ ID NO: 415376 - DNA, 15 bp, Homo sapiens
tccaggacttgtctt

SEQ ID NO: 415377 - DNA, 15 bp, Homo sapiens
gtccaggacttgtct

SEQ ID NO: 415378 - DNA, 15 bp, Homo sapiens
tgtccaggacttgtc

SEQ ID NO: 415379 - DNA, 15 bp, Homo sapiens
atgtccaggacttgt

SEQ ID NO: 415380 - DNA, 15 bp, Homo sapiens
aatgtccaggacttg

SEQ ID NO: 415381 - DNA, 15 bp, Homo sapiens
caatgtccaggactt

SEQ ID NO: 415382 - DNA, 15 bp, Homo sapiens
gcaatgtccaggact

SEQ ID NO: 415383 - DNA, 15 bp, Homo sapiens
ggcaatgtccaggac

SEQ ID NO: 415384 - DNA, 15 bp, Homo sapiens
aggcaatgtccagga

SEQ ID NO: 415385 - DNA, 15 bp, Homo sapiens
taggcaatgtccagg

SEQ ID NO: 415386 - DNA, 15 bp, Homo sapiens
gtaggcaatgtccag

SEQ ID NO: 415387 - DNA, 15 bp, Homo sapiens
tgtaggcaatgtcca

SEQ ID NO: 415388 - DNA, 15 bp, Homo sapiens
ctgtaggcaatgtcc

SEQ ID NO: 415389 - DNA, 15 bp, Homo sapiens
cctgtaggcaatgtc

SEQ ID NO: 415390 - DNA, 15 bp, Homo sapiens
gcctgtaggcaatgt

SEQ ID NO: 415391 - DNA, 15 bp, Homo sapiens
ggcctgtaggcaatg

SEQ ID NO: 415392 - DNA, 15 bp, Homo sapiens
aggcctgtaggcaat

SEQ ID NO: 415393 - DNA, 15 bp, Homo sapiens
aaggcctgtaggcaa

SEQ ID NO: 415394 - DNA, 15 bp, Homo sapiens
aaaggcctgtaggca

SEQ ID NO: 415395 - DNA, 15 bp, Homo sapiens
aaaaggcctgtaggc

SEQ ID NO: 415396 - DNA, 15 bp, Homo sapiens
caaaaggcctgtagg

SEQ ID NO: 415397 - DNA, 15 bp, Homo sapiens
acaaaaggcctgtag

SEQ ID NO: 415398 - DNA, 15 bp, Homo sapiens
cacaaaaggcctgta

SEQ ID NO: 415399 - DNA, 15 bp, Homo sapiens
tcacaaaaggcctgt

SEQ ID NO: 415400 - DNA, 15 bp, Homo sapiens
atcacaaaaggcctg

SEQ ID NO: 415401 - DNA, 15 bp, Homo sapiens
gatcacaaaaggcct

SEQ ID NO: 415402 - DNA, 15 bp, Homo sapiens
agatcacaaaaggcc

SEQ ID NO: 415403 - DNA, 15 bp, Homo sapiens
cagatcacaaaaggc

SEQ ID NO: 415404 - DNA, 15 bp, Homo sapiens
ccagatcacaaaagg

SEQ ID NO: 415405 - DNA, 15 bp, Homo sapiens
gccagatcacaaaag

SEQ ID NO: 415406 - DNA, 15 bp, Homo sapiens
agccagatcacaaaa

SEQ ID NO: 415407 - DNA, 15 bp, Homo sapiens
aagccagatcacaaa

SEQ ID NO: 415408 - DNA, 15 bp, Homo sapiens
gaagccagatcacaa

SEQ ID NO: 415409 - DNA, 15 bp, Homo sapiens
ggaagccagatcaca

SEQ ID NO: 415410 - DNA, 15 bp, Homo sapiens
aggaagccagatcac

SEQ ID NO: 415411 - DNA, 15 bp, Homo sapiens
caggaagccagatca

SEQ ID NO: 415412 - DNA, 15 bp, Homo sapiens
gcaggaagccagatc

SEQ ID NO: 415413 - DNA, 15 bp, Homo sapiens
agcaggaagccagat

SEQ ID NO: 415414 - DNA, 15 bp, Homo sapiens
cagcaggaagccaga

SEQ ID NO: 415415 - DNA, 15 bp, Homo sapiens
tcagcaggaagccag

SEQ ID NO: 415416 - DNA, 15 bp, Homo sapiens
gtcagcaggaagcca

SEQ ID NO: 415417 - DNA, 15 bp, Homo sapiens
agtcagcaggaagcc

SEQ ID NO: 415418 - DNA, 15 bp, Homo sapiens
aagtcagcaggaagc

SEQ ID NO: 415419 - DNA, 15 bp, Homo sapiens
aaagtcagcaggaag

SEQ ID NO: 415420 - DNA, 15 bp, Homo sapiens
gaaagtcagcaggaa

SEQ ID NO: 415421 - DNA, 15 bp, Homo sapiens
agaaagtcagcagga

SEQ ID NO: 415422 - DNA, 15 bp, Homo sapiens
aagaaagtcagcagg

SEQ ID NO: 415423 - DNA, 15 bp, Homo sapiens
aaagaaagtcagcag

SEQ ID NO: 415424 - DNA, 15 bp, Homo sapiens
aaaagaaagtcagca

SEQ ID NO: 415425 - DNA, 15 bp, Homo sapiens
aaaaagaaagtcagc

SEQ ID NO: 415426 - DNA, 15 bp, Homo sapiens
gaaaaagaaagtcag

SEQ ID NO: 415427 - DNA, 15 bp, Homo sapiens
agaaaaagaaagtca

SEQ ID NO: 415428 - DNA, 15 bp, Homo sapiens
aagaaaaagaaagtc

SEQ ID NO: 415429 - DNA, 15 bp, Homo sapiens
aaagaaaaagaaagt

SEQ ID NO: 415430 - DNA, 15 bp, Homo sapiens
gaaagaaaaagaaag

SEQ ID NO: 415431 - DNA, 15 bp, Homo sapiens
agaaagaaaaagaaa

SEQ ID NO: 415432 - DNA, 15 bp, Homo sapiens
aagaaagaaaaagaa

SEQ ID NO: 415433 - DNA, 15 bp, Homo sapiens
aaagaaagaaaaaga

SEQ ID NO: 415434 - DNA, 15 bp, Homo sapiens
gaaagaaagaaaaag

SEQ ID NO: 415435 - DNA, 15 bp, Homo sapiens
agaaagaaagaaaaa

SEQ ID NO: 415436 - DNA, 15 bp, Homo sapiens
aagaaagaaagaaaa

SEQ ID NO: 415437 - DNA, 15 bp, Homo sapiens
aaagaaagaaagaaa

SEQ ID NO: 415438 - DNA, 15 bp, Homo sapiens
gaaagaaagaaagaa

SEQ ID NO: 415439 - DNA, 15 bp, Homo sapiens
agaaagaaagaaaga

SEQ ID NO: 415440 - DNA, 15 bp, Homo sapiens
aagaaagaaagaaag

SEQ ID NO: 415441 - DNA, 15 bp, Homo sapiens
aaaagaaagaaagaa

SEQ ID NO: 415442 - DNA, 15 bp, Homo sapiens
aaaaagaaagaaaga

SEQ ID NO: 415443 - DNA, 15 bp, Homo sapiens
aaaaaagaaagaaag

SEQ ID NO: 415444 - DNA, 15 bp, Homo sapiens
gaccctgtctcaaaa

SEQ ID NO: 415445 - DNA, 15 bp, Homo sapiens
agaccctgtctcaaa

SEQ ID NO: 415446 - DNA, 15 bp, Homo sapiens
gagaccctgtctcaa

SEQ ID NO: 415447 - DNA, 15 bp, Homo sapiens
tgagaccctgtctca

SEQ ID NO: 415448 - DNA, 15 bp, Homo sapiens
gtgagaccctgtctc

SEQ ID NO: 415449 - DNA, 15 bp, Homo sapiens
agtgagaccctgtct

SEQ ID NO: 415450 - DNA, 15 bp, Homo sapiens
gagtgagaccctgtc

SEQ ID NO: 415451 - DNA, 15 bp, Homo sapiens
agagtgagaccctgt

SEQ ID NO: 415452 - DNA, 15 bp, Homo sapiens
cagagtgagaccctg

SEQ ID NO: 415453 - DNA, 15 bp, Homo sapiens
acagagtgagaccct

SEQ ID NO: 415454 - DNA, 15 bp, Homo sapiens
gacagagtgagaccc

SEQ ID NO: 415455 - DNA, 15 bp, Homo sapiens
tgacagagtgagacc

SEQ ID NO: 415456 - DNA, 15 bp, Homo sapiens
gtgacagagtgagac

SEQ ID NO: 415457 - DNA, 15 bp, Homo sapiens
ggtgacagagtgaga

SEQ ID NO: 415458 - DNA, 15 bp, Homo sapiens
gggtgacagagtgag

SEQ ID NO: 415459 - DNA, 15 bp, Homo sapiens
tgggtgacagagtga

SEQ ID NO: 415460 - DNA, 15 bp, Homo sapiens
ctgggtgacagagtg

SEQ ID NO: 415461 - DNA, 15 bp, Homo sapiens
cctgggtgacagagt

SEQ ID NO: 415462 - DNA, 15 bp, Homo sapiens
cgcctgggtgacaga

SEQ ID NO: 415463 - DNA, 15 bp, Homo sapiens
ccgcctgggtgacag

SEQ ID NO: 415464 - DNA, 15 bp, Homo sapiens
cccgcctgggtgaca

SEQ ID NO: 415465 - DNA, 15 bp, Homo sapiens
tcccgcctgggtgac

SEQ ID NO: 415466 - DNA, 15 bp, Homo sapiens
ctcccgcctgggtga

SEQ ID NO: 415467 - DNA, 15 bp, Homo sapiens
actcccgcctgggtg

SEQ ID NO: 415468 - DNA, 15 bp, Homo sapiens
tactcccgcctgggt

SEQ ID NO: 415469 - DNA, 15 bp, Homo sapiens
gtactcccgcctggg

SEQ ID NO: 415470 - DNA, 15 bp, Homo sapiens
cgtactcccgcctgg

SEQ ID NO: 415471 - DNA, 15 bp, Homo sapiens
ccgtactcccgcctg

SEQ ID NO: 415472 - DNA, 15 bp, Homo sapiens
accgtactcccgcct

SEQ ID NO: 415473 - DNA, 15 bp, Homo sapiens
caccgtactcccgcc

SEQ ID NO: 415474 - DNA, 15 bp, Homo sapiens
ccaccgtactcccgc

SEQ ID NO: 415475 - DNA, 15 bp, Homo sapiens
accaccgtactcccg

SEQ ID NO: 415476 - DNA, 15 bp, Homo sapiens
taccaccgtactccc

SEQ ID NO: 415477 - DNA, 15 bp, Homo sapiens
gtaccaccgtactcc

SEQ ID NO: 415478 - DNA, 15 bp, Homo sapiens
tgtaccaccgtactc

SEQ ID NO: 415479 - DNA, 15 bp, Homo sapiens
ttgtaccaccgtact

SEQ ID NO: 415480 - DNA, 15 bp, Homo sapiens
attgtaccaccgtac

SEQ ID NO: 415481 - DNA, 15 bp, Homo sapiens
gattgtaccaccgta

SEQ ID NO: 415482 - DNA, 15 bp, Homo sapiens
tgattgtaccaccgt

SEQ ID NO: 415483 - DNA, 15 bp, Homo sapiens
atgattgtaccaccg

SEQ ID NO: 415484 - DNA, 15 bp, Homo sapiens
tatgattgtaccacc

SEQ ID NO: 415485 - DNA, 15 bp, Homo sapiens
ctatgattgtaccac

SEQ ID NO: 415486 - DNA, 15 bp, Homo sapiens
gctatgattgtacca

SEQ ID NO: 415487 - DNA, 15 bp, Homo sapiens
agctatgattgtacc

SEQ ID NO: 415488 - DNA, 15 bp, Homo sapiens
gagctatgattgtac

SEQ ID NO: 415489 - DNA, 15 bp, Homo sapiens
tgagctatgattgta

SEQ ID NO: 415490 - DNA, 15 bp, Homo sapiens
gtgagctatgattgt

SEQ ID NO: 415491 - DNA, 15 bp, Homo sapiens
agtgagctatgattg

SEQ ID NO: 415492 - DNA, 15 bp, Homo sapiens
cagtgagctatgatt

SEQ ID NO: 415493 - DNA, 15 bp, Homo sapiens
gcagtgagctatgat

SEQ ID NO: 415494 - DNA, 15 bp, Homo sapiens
tgcagtgagctatga

SEQ ID NO: 415495 - DNA, 15 bp, Homo sapiens
ctgcagtgagctatg

SEQ ID NO: 415496 - DNA, 15 bp, Homo sapiens
gctgcagtgagctat

SEQ ID NO: 415497 - DNA, 15 bp, Homo sapiens
ggctgcagtgagcta

SEQ ID NO: 415498 - DNA, 15 bp, Homo sapiens
aggctgcagtgagct

SEQ ID NO: 415499 - DNA, 15 bp, Homo sapiens
gaggctgcagtgagc

SEQ ID NO: 415500 - DNA, 15 bp, Homo sapiens
tgaggctgcagtgag

SEQ ID NO: 415501 - DNA, 15 bp, Homo sapiens
ttgaggctgcagtga

SEQ ID NO: 415502 - DNA, 15 bp, Homo sapiens
gttgaggctgcagtg

SEQ ID NO: 415503 - DNA, 15 bp, Homo sapiens
ggttgaggctgcagt

SEQ ID NO: 415504 - DNA, 15 bp, Homo sapiens
aggttgaggctgcag

SEQ ID NO: 415505 - DNA, 15 bp, Homo sapiens
gaggttgaggctgca

SEQ ID NO: 415506 - DNA, 15 bp, Homo sapiens
ggaggttgaggctgc

SEQ ID NO: 415507 - DNA, 15 bp, Homo sapiens
aggaggttgaggctg

SEQ ID NO: 415508 - DNA, 15 bp, Homo sapiens
caggaggttgaggct

SEQ ID NO: 415509 - DNA, 15 bp, Homo sapiens
ccaggaggttgaggc

SEQ ID NO: 415510 - DNA, 15 bp, Homo sapiens
cccaggaggttgagg

SEQ ID NO: 415511 - DNA, 15 bp, Homo sapiens
gcccaggaggttgag

SEQ ID NO: 415512 - DNA, 15 bp, Homo sapiens
agcccaggaggttga

SEQ ID NO: 415513 - DNA, 15 bp, Homo sapiens
gagcccaggaggttg

SEQ ID NO: 415514 - DNA, 15 bp, Homo sapiens
ggagcccaggaggtt

SEQ ID NO: 415515 - DNA, 15 bp, Homo sapiens
tggagcccaggaggt

SEQ ID NO: 415516 - DNA, 15 bp, Homo sapiens
ctggagcccaggagg

SEQ ID NO: 415517 - DNA, 15 bp, Homo sapiens
gctggagcccaggag

SEQ ID NO: 415518 - DNA, 15 bp, Homo sapiens
tgctggagcccagga

SEQ ID NO: 415519 - DNA, 15 bp, Homo sapiens
ttgctggagcccagg

SEQ ID NO: 415520 - DNA, 15 bp, Homo sapiens
gttgctggagcccag

SEQ ID NO: 415521 - DNA, 15 bp, Homo sapiens
ggttgctggagccca

SEQ ID NO: 415522 - DNA, 15 bp, Homo sapiens
gggttgctggagccc

SEQ ID NO: 415523 - DNA, 15 bp, Homo sapiens
agggttgctggagcc

SEQ ID NO: 415524 - DNA, 15 bp, Homo sapiens
gagggttgctggagc

SEQ ID NO: 415525 - DNA, 15 bp, Homo sapiens
ggagggttgctggag

SEQ ID NO: 415526 - DNA, 15 bp, Homo sapiens
gggagggttgctgga

SEQ ID NO: 415527 - DNA, 15 bp, Homo sapiens
tgggagggttgctgg

SEQ ID NO: 415528 - DNA, 15 bp, Homo sapiens
ttgggagggttgctg

SEQ ID NO: 415529 - DNA, 15 bp, Homo sapiens
attgggagggttgct

SEQ ID NO: 415530 - DNA, 15 bp, Homo sapiens
gattgggagggttgc

SEQ ID NO: 415531 - DNA, 15 bp, Homo sapiens
agattgggagggttg

SEQ ID NO: 415532 - DNA, 15 bp, Homo sapiens
aagattgggagggtt

SEQ ID NO: 415533 - DNA, 15 bp, Homo sapiens
caagattgggagggt

SEQ ID NO: 415534 - DNA, 15 bp, Homo sapiens
ccaagattgggaggg

SEQ ID NO: 415535 - DNA, 15 bp, Homo sapiens
gccaagattgggagg

SEQ ID NO: 415536 - DNA, 15 bp, Homo sapiens
ggccaagattgggag

SEQ ID NO: 415537 - DNA, 15 bp, Homo sapiens
aggccaagattggga

SEQ ID NO: 415538 - DNA, 15 bp, Homo sapiens
gaggccaagattggg

SEQ ID NO: 415539 - DNA, 15 bp, Homo sapiens
ggaggccaagattgg

SEQ ID NO: 415540 - DNA, 15 bp, Homo sapiens
gggaggccaagattg

SEQ ID NO: 415541 - DNA, 15 bp, Homo sapiens
tgggaggccaagatt

SEQ ID NO: 415542 - DNA, 15 bp, Homo sapiens
ttgggaggccaagat

SEQ ID NO: 415543 - DNA, 15 bp, Homo sapiens
tttgggaggccaaga

SEQ ID NO: 415544 - DNA, 15 bp, Homo sapiens
gctttgggaggccaa

SEQ ID NO: 415545 - DNA, 15 bp, Homo sapiens
tgctttgggaggcca

SEQ ID NO: 415546 - DNA, 15 bp, Homo sapiens
atgctttgggaggcc

SEQ ID NO: 415547 - DNA, 15 bp, Homo sapiens
aatgctttgggaggc

SEQ ID NO: 415548 - DNA, 15 bp, Homo sapiens
caatgctttgggagg

SEQ ID NO: 415549 - DNA, 15 bp, Homo sapiens
ccaatgctttgggag

SEQ ID NO: 415550 - DNA, 15 bp, Homo sapiens
tccaatgctttggga

SEQ ID NO: 415551 - DNA, 15 bp, Homo sapiens
ttccaatgctttggg

SEQ ID NO: 415552 - DNA, 15 bp, Homo sapiens
attccaatgctttgg

SEQ ID NO: 415553 - DNA, 15 bp, Homo sapiens
aattccaatgctttg

SEQ ID NO: 415554 - DNA, 15 bp, Homo sapiens
taattccaatgcttt

SEQ ID NO: 415555 - DNA, 15 bp, Homo sapiens
gtaattccaatgctt

SEQ ID NO: 415556 - DNA, 15 bp, Homo sapiens
tgtaattccaatgct

SEQ ID NO: 415557 - DNA, 15 bp, Homo sapiens
ctgtaattccaatgc

SEQ ID NO: 415558 - DNA, 15 bp, Homo sapiens
cctgtaattccaatg

SEQ ID NO: 415559 - DNA, 15 bp, Homo sapiens
gcctgtaattccaat

SEQ ID NO: 415560 - DNA, 15 bp, Homo sapiens
tgcctgtaattccaa

SEQ ID NO: 415561 - DNA, 15 bp, Homo sapiens
atgcctgtaattcca

SEQ ID NO: 415562 - DNA, 15 bp, Homo sapiens
catgcctgtaattcc

SEQ ID NO: 415563 - DNA, 15 bp, Homo sapiens
tcatgcctgtaattc

SEQ ID NO: 415564 - DNA, 15 bp, Homo sapiens
ctcatgcctgtaatt

SEQ ID NO: 415565 - DNA, 15 bp, Homo sapiens
atggctcatgcctgt

SEQ ID NO: 415566 - DNA, 15 bp, Homo sapiens
catggctcatgcctg

SEQ ID NO: 415567 - DNA, 15 bp, Homo sapiens
ccatggctcatgcct

SEQ ID NO: 415568 - DNA, 15 bp, Homo sapiens
gccatggctcatgcc

SEQ ID NO: 415569 - DNA, 15 bp, Homo sapiens
tgccatggctcatgc

SEQ ID NO: 415570 - DNA, 15 bp, Homo sapiens
gtgccatggctcatg

SEQ ID NO: 415571 - DNA, 15 bp, Homo sapiens
ggtgccatggctcat

SEQ ID NO: 415572 - DNA, 15 bp, Homo sapiens
tggtgccatggctca

SEQ ID NO: 415573 - DNA, 15 bp, Homo sapiens
ctggtgccatggctc

SEQ ID NO: 415574 - DNA, 15 bp, Homo sapiens
gctggtgccatggct

SEQ ID NO: 415575 - DNA, 15 bp, Homo sapiens
ggctggtgccatggc

SEQ ID NO: 415576 - DNA, 15 bp, Homo sapiens
gggctggtgccatgg

SEQ ID NO: 415577 - DNA, 15 bp, Homo sapiens
agggctggtgccatg

SEQ ID NO: 415578 - DNA, 15 bp, Homo sapiens
gagggctggtgccat

SEQ ID NO: 415579 - DNA, 15 bp, Homo sapiens
agagggctggtgcca

SEQ ID NO: 415580 - DNA, 15 bp, Homo sapiens
tagagggctggtgcc

SEQ ID NO: 415581 - DNA, 15 bp, Homo sapiens
gtagagggctggtgc

SEQ ID NO: 415582 - DNA, 15 bp, Homo sapiens
agtagagggctggtg

SEQ ID NO: 415583 - DNA, 15 bp, Homo sapiens
tagtagagggctggt

SEQ ID NO: 415584 - DNA, 15 bp, Homo sapiens
ttagtagagggctgg

SEQ ID NO: 415585 - DNA, 15 bp, Homo sapiens
gttagtagagggctg

SEQ ID NO: 415586 - DNA, 15 bp, Homo sapiens
agttagtagagggct

SEQ ID NO: 415587 - DNA, 15 bp, Homo sapiens
aagttagtagagggc

SEQ ID NO: 415588 - DNA, 15 bp, Homo sapiens
aaagttagtagaggg

SEQ ID NO: 415589 - DNA, 15 bp, Homo sapiens
gaaagttagtagagg

SEQ ID NO: 415590 - DNA, 15 bp, Homo sapiens
agaaagttagtagag

SEQ ID NO: 415591 - DNA, 15 bp, Homo sapiens
tagaaagttagtaga

SEQ ID NO: 415592 - DNA, 15 bp, Homo sapiens
ttagaaagttagtag

SEQ ID NO: 415593 - DNA, 15 bp, Homo sapiens
attagaaagttagta

SEQ ID NO: 415594 - DNA, 15 bp, Homo sapiens
cattagaaagttagt

SEQ ID NO: 415595 - DNA, 15 bp, Homo sapiens
gcattagaaagttag

SEQ ID NO: 415596 - DNA, 15 bp, Homo sapiens
tgcattagaaagtta

SEQ ID NO: 415597 - DNA, 15 bp, Homo sapiens
gtgcattagaaagtt

SEQ ID NO: 415598 - DNA, 15 bp, Homo sapiens
ggtgcattagaaagt

SEQ ID NO: 415599 - DNA, 15 bp, Homo sapiens
aggtgcattagaaag

SEQ ID NO: 415600 - DNA, 15 bp, Homo sapiens
gaggtgcattagaaa

SEQ ID NO: 415601 - DNA, 15 bp, Homo sapiens
ggaggtgcattagaa

SEQ ID NO: 415602 - DNA, 15 bp, Homo sapiens
gggaggtgcattaga

SEQ ID NO: 415603 - DNA, 15 bp, Homo sapiens
ggggaggtgcattag

SEQ ID NO: 415604 - DNA, 15 bp, Homo sapiens
gggggaggtgcatta

SEQ ID NO: 415605 - DNA, 15 bp, Homo sapiens
tgggggaggtgcatt

SEQ ID NO: 415606 - DNA, 15 bp, Homo sapiens
gtgggggaggtgcat

SEQ ID NO: 415607 - DNA, 15 bp, Homo sapiens
agtgggggaggtgca

SEQ ID NO: 415608 - DNA, 15 bp, Homo sapiens
aagtgggggaggtgc

SEQ ID NO: 415609 - DNA, 15 bp, Homo sapiens
gaagtgggggaggtg

SEQ ID NO: 415610 - DNA, 15 bp, Homo sapiens
ggaagtgggggaggt

SEQ ID NO: 415611 - DNA, 15 bp, Homo sapiens
tggaagtgggggagg

SEQ ID NO: 415612 - DNA, 15 bp, Homo sapiens
atggaagtgggggag

SEQ ID NO: 415613 - DNA, 15 bp, Homo sapiens
catggaagtggggga

SEQ ID NO: 415614 - DNA, 15 bp, Homo sapiens
acatggaagtggggg

SEQ ID NO: 415615 - DNA, 15 bp, Homo sapiens
cacatggaagtgggg

SEQ ID NO: 415616 - DNA, 15 bp, Homo sapiens
tcacatggaagtggg

SEQ ID NO: 415617 - DNA, 15 bp, Homo sapiens
gtcacatggaagtgg

SEQ ID NO: 415618 - DNA, 15 bp, Homo sapiens
agtcacatggaagtg

SEQ ID NO: 415619 - DNA, 15 bp, Homo sapiens
gagtcacatggaagt

SEQ ID NO: 415620 - DNA, 15 bp, Homo sapiens
tgagtcacatggaag

SEQ ID NO: 415621 - DNA, 15 bp, Homo sapiens
gtgagtcacatggaa

SEQ ID NO: 415622 - DNA, 15 bp, Homo sapiens
agtgagtcacatgga

SEQ ID NO: 415623 - DNA, 15 bp, Homo sapiens
aagtgagtcacatgg

SEQ ID NO: 415624 - DNA, 15 bp, Homo sapiens
aaagtgagtcacatg

SEQ ID NO: 415625 - DNA, 15 bp, Homo sapiens
caaagtgagtcacat

SEQ ID NO: 415626 - DNA, 15 bp, Homo sapiens
gcaaagtgagtcaca

SEQ ID NO: 415627 - DNA, 15 bp, Homo sapiens
agcaaagtgagtcac

SEQ ID NO: 415628 - DNA, 15 bp, Homo sapiens
aagcaaagtgagtca

SEQ ID NO: 415629 - DNA, 15 bp, Homo sapiens
gaagcaaagtgagtc

SEQ ID NO: 415630 - DNA, 15 bp, Homo sapiens
agaagcaaagtgagt

SEQ ID NO: 415631 - DNA, 15 bp, Homo sapiens
aagaagcaaagtgag

SEQ ID NO: 415632 - DNA, 15 bp, Homo sapiens
aaagaagcaaagtga

SEQ ID NO: 415633 - DNA, 15 bp, Homo sapiens
caaagaagcaaagtg

SEQ ID NO: 415634 - DNA, 15 bp, Homo sapiens
gcaaagaagcaaagt

SEQ ID NO: 415635 - DNA, 15 bp, Homo sapiens
agcaaagaagcaaag

SEQ ID NO: 415636 - DNA, 15 bp, Homo sapiens
cagcaaagaagcaaa

SEQ ID NO: 415637 - DNA, 15 bp, Homo sapiens
acagcaaagaagcaa

SEQ ID NO: 415638 - DNA, 15 bp, Homo sapiens
aacagcaaagaagca

SEQ ID NO: 415639 - DNA, 15 bp, Homo sapiens
gaacagcaaagaagc

SEQ ID NO: 415640 - DNA, 15 bp, Homo sapiens
agaacagcaaagaag

SEQ ID NO: 415641 - DNA, 15 bp, Homo sapiens
aagaacagcaaagaa

SEQ ID NO: 415642 - DNA, 15 bp, Homo sapiens
gaagaacagcaaaga

SEQ ID NO: 415643 - DNA, 15 bp, Homo sapiens
tgaagaacagcaaag

SEQ ID NO: 415644 - DNA, 15 bp, Homo sapiens
ttgaagaacagcaaa

SEQ ID NO: 415645 - DNA, 15 bp, Homo sapiens
tttgaagaacagcaa

SEQ ID NO: 415646 - DNA, 15 bp, Homo sapiens
atttgaagaacagca

SEQ ID NO: 415647 - DNA, 15 bp, Homo sapiens
tatttgaagaacagc

SEQ ID NO: 415648 - DNA, 15 bp, Homo sapiens
gtatttgaagaacag

SEQ ID NO: 415649 - DNA, 15 bp, Homo sapiens
tgtatttgaagaaca

SEQ ID NO: 415650 - DNA, 15 bp, Homo sapiens
ctgtatttgaagaac

SEQ ID NO: 415651 - DNA, 15 bp, Homo sapiens
actgtatttgaagaa

SEQ ID NO: 415652 - DNA, 15 bp, Homo sapiens
tactgtatttgaaga

SEQ ID NO: 415653 - DNA, 15 bp, Homo sapiens
ttactgtatttgaag

SEQ ID NO: 415654 - DNA, 15 bp, Homo sapiens
cttactgtatttgaa

SEQ ID NO: 415655 - DNA, 15 bp, Homo sapiens
gcttactgtatttga

SEQ ID NO: 415656 - DNA, 15 bp, Homo sapiens
tgcttactgtatttg

SEQ ID NO: 415657 - DNA, 15 bp, Homo sapiens
gtgcttactgtattt

SEQ ID NO: 415658 - DNA, 15 bp, Homo sapiens
tgtgcttactgtatt

SEQ ID NO: 415659 - DNA, 15 bp, Homo sapiens
atgtgcttactgtat

SEQ ID NO: 415660 - DNA, 15 bp, Homo sapiens
aatgtgcttactgta

SEQ ID NO: 415661 - DNA, 15 bp, Homo sapiens
taatgtgcttactgt

SEQ ID NO: 415662 - DNA, 15 bp, Homo sapiens
ataatgtgcttactg

SEQ ID NO: 415663 - DNA, 15 bp, Homo sapiens
gataatgtgcttact

SEQ ID NO: 415664 - DNA, 15 bp, Homo sapiens
tgataatgtgcttac

SEQ ID NO: 415665 - DNA, 15 bp, Homo sapiens
gtgataatgtgctta

SEQ ID NO: 415666 - DNA, 15 bp, Homo sapiens
ggtgataatgtgctt

SEQ ID NO: 415667 - DNA, 15 bp, Homo sapiens
aggtgataatgtgct

SEQ ID NO: 415668 - DNA, 15 bp, Homo sapiens
gaggtgataatgtgc

SEQ ID NO: 415669 - DNA, 15 bp, Homo sapiens
tgaggtgataatgtg

SEQ ID NO: 415670 - DNA, 15 bp, Homo sapiens
ctgaggtgataatgt

SEQ ID NO: 415671 - DNA, 15 bp, Homo sapiens
cctgaggtgataatg

SEQ ID NO: 415672 - DNA, 15 bp, Homo sapiens
ccctgaggtgataat

SEQ ID NO: 415673 - DNA, 15 bp, Homo sapiens
accctgaggtgataa

SEQ ID NO: 415674 - DNA, 15 bp, Homo sapiens
gaccctgaggtgata

SEQ ID NO: 415675 - DNA, 15 bp, Homo sapiens
agaccctgaggtgat

SEQ ID NO: 415676 - DNA, 15 bp, Homo sapiens
tagaccctgaggtga

SEQ ID NO: 415677 - DNA, 15 bp, Homo sapiens
gtagaccctgaggtg

SEQ ID NO: 415678 - DNA, 15 bp, Homo sapiens
tgtagaccctgaggt

SEQ ID NO: 415679 - DNA, 15 bp, Homo sapiens
atgtagaccctgagg

SEQ ID NO: 415680 - DNA, 15 bp, Homo sapiens
aatgtagaccctgag

SEQ ID NO: 415681 - DNA, 15 bp, Homo sapiens
aaatgtagaccctga

SEQ ID NO: 415682 - DNA, 15 bp, Homo sapiens
caaatgtagaccctg

SEQ ID NO: 415683 - DNA, 15 bp, Homo sapiens
gcaaatgtagaccct

SEQ ID NO: 415684 - DNA, 15 bp, Homo sapiens
ggcaaatgtagaccc

SEQ ID NO: 415685 - DNA, 15 bp, Homo sapiens
tggcaaatgtagacc

SEQ ID NO: 415686 - DNA, 15 bp, Homo sapiens
atggcaaatgtagac

SEQ ID NO: 415687 - DNA, 15 bp, Homo sapiens
aatggcaaatgtaga

SEQ ID NO: 415688 - DNA, 15 bp, Homo sapiens
gaatggcaaatgtag

SEQ ID NO: 415689 - DNA, 15 bp, Homo sapiens
cgaatggcaaatgta

SEQ ID NO: 415690 - DNA, 15 bp, Homo sapiens
gcgaatggcaaatgt

SEQ ID NO: 415691 - DNA, 15 bp, Homo sapiens
ggcgaatggcaaatg

SEQ ID NO: 415692 - DNA, 15 bp, Homo sapiens
aggcgaatggcaaat

SEQ ID NO: 415693 - DNA, 15 bp, Homo sapiens
caggcgaatggcaaa

SEQ ID NO: 415694 - DNA, 15 bp, Homo sapiens
gcaggcgaatggcaa

SEQ ID NO: 415695 - DNA, 15 bp, Homo sapiens
ggcaggcgaatggca

SEQ ID NO: 415696 - DNA, 15 bp, Homo sapiens
aggcaggcgaatggc

SEQ ID NO: 415697 - DNA, 15 bp, Homo sapiens
aaggcaggcgaatgg

SEQ ID NO: 415698 - DNA, 15 bp, Homo sapiens
caaggcaggcgaatg

SEQ ID NO: 415699 - DNA, 15 bp, Homo sapiens
tcaaggcaggcgaat

SEQ ID NO: 415700 - DNA, 15 bp, Homo sapiens
ttcaaggcaggcgaa

SEQ ID NO: 415701 - DNA, 15 bp, Homo sapiens
attcaaggcaggcga

SEQ ID NO: 415702 - DNA, 15 bp, Homo sapiens
cattcaaggcaggcg

SEQ ID NO: 415703 - DNA, 15 bp, Homo sapiens
ccattcaaggcaggc

SEQ ID NO: 415704 - DNA, 15 bp, Homo sapiens
cccattcaaggcagg

SEQ ID NO: 415705 - DNA, 15 bp, Homo sapiens
tcccattcaaggcag

SEQ ID NO: 415706 - DNA, 15 bp, Homo sapiens
ttcccattcaaggca

SEQ ID NO: 415707 - DNA, 15 bp, Homo sapiens
tttcccattcaaggc

SEQ ID NO: 415708 - DNA, 15 bp, Homo sapiens
atttcccattcaagg

SEQ ID NO: 415709 - DNA, 15 bp, Homo sapiens
gatttcccattcaag

SEQ ID NO: 415710 - DNA, 15 bp, Homo sapiens
agatttcccattcaa

SEQ ID NO: 415711 - DNA, 15 bp, Homo sapiens
tagatttcccattca

SEQ ID NO: 415712 - DNA, 15 bp, Homo sapiens
gtagatttcccattc

SEQ ID NO: 415713 - DNA, 15 bp, Homo sapiens
agtagatttcccatt

SEQ ID NO: 415714 - DNA, 15 bp, Homo sapiens
aagtagatttcccat

SEQ ID NO: 415715 - DNA, 15 bp, Homo sapiens
caagtagatttccca

SEQ ID NO: 415716 - DNA, 15 bp, Homo sapiens
gcaagtagatttccc

SEQ ID NO: 415717 - DNA, 15 bp, Homo sapiens
agcaagtagatttcc

SEQ ID NO: 415718 - DNA, 15 bp, Homo sapiens
aagcaagtagatttc

SEQ ID NO: 415719 - DNA, 15 bp, Homo sapiens
taagcaagtagattt

SEQ ID NO: 415720 - DNA, 15 bp, Homo sapiens
gtaagcaagtagatt

SEQ ID NO: 415721 - DNA, 15 bp, Homo sapiens
ggtaagcaagtagat

SEQ ID NO: 415722 - DNA, 15 bp, Homo sapiens
aggtaagcaagtaga

SEQ ID NO: 415723 - DNA, 15 bp, Homo sapiens
gaggtaagcaagtag

SEQ ID NO: 415724 - DNA, 15 bp, Homo sapiens
tgaggtaagcaagta

SEQ ID NO: 415725 - DNA, 15 bp, Homo sapiens
gtgaggtaagcaagt

SEQ ID NO: 415726 - DNA, 15 bp, Homo sapiens
ggtgaggtaagcaag

SEQ ID NO: 415727 - DNA, 15 bp, Homo sapiens
tggtgaggtaagcaa

SEQ ID NO: 415728 - DNA, 15 bp, Homo sapiens
gtggtgaggtaagca

SEQ ID NO: 415729 - DNA, 15 bp, Homo sapiens
ggtggtgaggtaagc

SEQ ID NO: 415730 - DNA, 15 bp, Homo sapiens
tggtggtgaggtaag

SEQ ID NO: 415731 - DNA, 15 bp, Homo sapiens
ctggtggtgaggtaa

SEQ ID NO: 415732 - DNA, 15 bp, Homo sapiens
tctggtggtgaggta

SEQ ID NO: 415733 - DNA, 15 bp, Homo sapiens
atctggtggtgaggt

SEQ ID NO: 415734 - DNA, 15 bp, Homo sapiens
gatctggtggtgagg

SEQ ID NO: 415735 - DNA, 15 bp, Homo sapiens
ggatctggtggtgag

SEQ ID NO: 415736 - DNA, 15 bp, Homo sapiens
gggatctggtggtga

SEQ ID NO: 415737 - DNA, 15 bp, Homo sapiens
agggatctggtggtg

SEQ ID NO: 415738 - DNA, 15 bp, Homo sapiens
aagggatctggtggt

SEQ ID NO: 415739 - DNA, 15 bp, Homo sapiens
taagggatctggtgg

SEQ ID NO: 415740 - DNA, 15 bp, Homo sapiens
gtaagggatctggtg

SEQ ID NO: 415741 - DNA, 15 bp, Homo sapiens
ggtaagggatctggt

SEQ ID NO: 415742 - DNA, 15 bp, Homo sapiens
gggtaagggatctgg

SEQ ID NO: 415743 - DNA, 15 bp, Homo sapiens
ggggtaagggatctg

SEQ ID NO: 415744 - DNA, 15 bp, Homo sapiens
aggggtaagggatct

SEQ ID NO: 415745 - DNA, 15 bp, Homo sapiens
caggggtaagggatc

SEQ ID NO: 415746 - DNA, 15 bp, Homo sapiens
tcaggggtaagggat

SEQ ID NO: 415747 - DNA, 15 bp, Homo sapiens
atcaggggtaaggga

SEQ ID NO: 415748 - DNA, 15 bp, Homo sapiens
gatcaggggtaaggg

SEQ ID NO: 415749 - DNA, 15 bp, Homo sapiens
agatcaggggtaagg

SEQ ID NO: 415750 - DNA, 15 bp, Homo sapiens
gagatcaggggtaag

SEQ ID NO: 415751 - DNA, 15 bp, Homo sapiens
tgagatcaggggtaa

SEQ ID NO: 415752 - DNA, 15 bp, Homo sapiens
atgagatcaggggta

SEQ ID NO: 415753 - DNA, 15 bp, Homo sapiens
catgagatcaggggt

SEQ ID NO: 415754 - DNA, 15 bp, Homo sapiens
ccatgagatcagggg

SEQ ID NO: 415755 - DNA, 15 bp, Homo sapiens
gccatgagatcaggg

SEQ ID NO: 415756 - DNA, 15 bp, Homo sapiens
ggccatgagatcagg

SEQ ID NO: 415757 - DNA, 15 bp, Homo sapiens
tggccatgagatcag

SEQ ID NO: 415758 - DNA, 15 bp, Homo sapiens
ctggccatgagatca

SEQ ID NO: 415759 - DNA, 15 bp, Homo sapiens
tctggccatgagatc

SEQ ID NO: 415760 - DNA, 15 bp, Homo sapiens
atctggccatgagat

SEQ ID NO: 415761 - DNA, 15 bp, Homo sapiens
gatctggccatgaga

SEQ ID NO: 415762 - DNA, 15 bp, Homo sapiens
ggatctggccatgag

SEQ ID NO: 415763 - DNA, 15 bp, Homo sapiens
gggatctggccatga

SEQ ID NO: 415764 - DNA, 15 bp, Homo sapiens
agggatctggccatg

SEQ ID NO: 415765 - DNA, 15 bp, Homo sapiens
aagggatctggccat

SEQ ID NO: 415766 - DNA, 15 bp, Homo sapiens
taagggatctggcca

SEQ ID NO: 415767 - DNA, 15 bp, Homo sapiens
ataagggatctggcc

SEQ ID NO: 415768 - DNA, 15 bp, Homo sapiens
aataagggatctggc

SEQ ID NO: 415769 - DNA, 15 bp, Homo sapiens
aaataagggatctgg

SEQ ID NO: 415770 - DNA, 15 bp, Homo sapiens
taaataagggatctg

SEQ ID NO: 415771 - DNA, 15 bp, Homo sapiens
ataaataagggatct

SEQ ID NO: 415772 - DNA, 15 bp, Homo sapiens
aataaataagggatc

SEQ ID NO: 415773 - DNA, 15 bp, Homo sapiens
aaataaataagggat

SEQ ID NO: 415774 - DNA, 15 bp, Homo sapiens
taaataaataaggga

SEQ ID NO: 415775 - DNA, 15 bp, Homo sapiens
ataaataaataaggg

SEQ ID NO: 415776 - DNA, 15 bp, Homo sapiens
gataaataaataagg

SEQ ID NO: 415777 - DNA, 15 bp, Homo sapiens
agataaataaataag

SEQ ID NO: 415778 - DNA, 15 bp, Homo sapiens
gagataaataaataa

SEQ ID NO: 415779 - DNA, 15 bp, Homo sapiens
tgagataaataaata

SEQ ID NO: 415780 - DNA, 15 bp, Homo sapiens
atgagataaataaat

SEQ ID NO: 415781 - DNA, 15 bp, Homo sapiens
catgagataaataaa

SEQ ID NO: 415782 - DNA, 15 bp, Homo sapiens
ccatgagataaataa

SEQ ID NO: 415783 - DNA, 15 bp, Homo sapiens
tccatgagataaata

SEQ ID NO: 415784 - DNA, 15 bp, Homo sapiens
gtccatgagataaat

SEQ ID NO: 415785 - DNA, 15 bp, Homo sapiens
tgtccatgagataaa

SEQ ID NO: 415786 - DNA, 15 bp, Homo sapiens
ctgtccatgagataa

SEQ ID NO: 415787 - DNA, 15 bp, Homo sapiens
tctgtccatgagata

SEQ ID NO: 415788 - DNA, 15 bp, Homo sapiens
atctgtccatgagat

SEQ ID NO: 415789 - DNA, 15 bp, Homo sapiens
aatctgtccatgaga

SEQ ID NO: 415790 - DNA, 15 bp, Homo sapiens
gaatctgtccatgag

SEQ ID NO: 415791 - DNA, 15 bp, Homo sapiens
ggaatctgtccatga

SEQ ID NO: 415792 - DNA, 15 bp, Homo sapiens
aggaatctgtccatg

SEQ ID NO: 415793 - DNA, 15 bp, Homo sapiens
aaggaatctgtccat

SEQ ID NO: 415794 - DNA, 15 bp, Homo sapiens
taaggaatctgtcca

SEQ ID NO: 415795 - DNA, 15 bp, Homo sapiens
ataaggaatctgtcc

SEQ ID NO: 415796 - DNA, 15 bp, Homo sapiens
gataaggaatctgtc

SEQ ID NO: 415797 - DNA, 15 bp, Homo sapiens
agataaggaatctgt

SEQ ID NO: 415798 - DNA, 15 bp, Homo sapiens
gagataaggaatctg

SEQ ID NO: 415799 - DNA, 15 bp, Homo sapiens
agagataaggaatct

SEQ ID NO: 415800 - DNA, 15 bp, Homo sapiens
aagagataaggaatc

SEQ ID NO: 415801 - DNA, 15 bp, Homo sapiens
aaagagataaggaat

SEQ ID NO: 415802 - DNA, 15 bp, Homo sapiens
taaagagataaggaa

SEQ ID NO: 415803 - DNA, 15 bp, Homo sapiens
ataaagagataagga

SEQ ID NO: 415804 - DNA, 15 bp, Homo sapiens
gataaagagataagg

SEQ ID NO: 415805 - DNA, 15 bp, Homo sapiens
agataaagagataag

SEQ ID NO: 415806 - DNA, 15 bp, Homo sapiens
gagataaagagataa

SEQ ID NO: 415807 - DNA, 15 bp, Homo sapiens
tgagataaagagata

SEQ ID NO: 415808 - DNA, 15 bp, Homo sapiens
atgagataaagagat

SEQ ID NO: 415809 - DNA, 15 bp, Homo sapiens
tatgagataaagaga

SEQ ID NO: 415810 - DNA, 15 bp, Homo sapiens
ctatgagataaagag

SEQ ID NO: 415811 - DNA, 15 bp, Homo sapiens
gctatgagataaaga

SEQ ID NO: 415812 - DNA, 15 bp, Homo sapiens
agctatgagataaag

SEQ ID NO: 415813 - DNA, 15 bp, Homo sapiens
tagctatgagataaa

SEQ ID NO: 415814 - DNA, 15 bp, Homo sapiens
ttagctatgagataa

SEQ ID NO: 415815 - DNA, 15 bp, Homo sapiens
tttagctatgagata

SEQ ID NO: 415816 - DNA, 15 bp, Homo sapiens
atttagctatgagat

SEQ ID NO: 415817 - DNA, 15 bp, Homo sapiens
aatttagctatgaga

SEQ ID NO: 415818 - DNA, 15 bp, Homo sapiens
aaatttagctatgag

SEQ ID NO: 415819 - DNA, 15 bp, Homo sapiens
gaaatttagctatga

SEQ ID NO: 415820 - DNA, 15 bp, Homo sapiens
agaaatttagctatg

SEQ ID NO: 415821 - DNA, 15 bp, Homo sapiens
aagaaatttagctat

SEQ ID NO: 415822 - DNA, 15 bp, Homo sapiens
taagaaatttagcta

SEQ ID NO: 415823 - DNA, 15 bp, Homo sapiens
gtaagaaatttagct

SEQ ID NO: 415824 - DNA, 15 bp, Homo sapiens
ggtaagaaatttagc

SEQ ID NO: 415825 - DNA, 15 bp, Homo sapiens
aggtaagaaatttag

SEQ ID NO: 415826 - DNA, 15 bp, Homo sapiens
gaggtaagaaattta

SEQ ID NO: 415827 - DNA, 15 bp, Homo sapiens
ggaggtaagaaattt

SEQ ID NO: 415828 - DNA, 15 bp, Homo sapiens
aggaggtaagaaatt

SEQ ID NO: 415829 - DNA, 15 bp, Homo sapiens
aaggaggtaagaaat

SEQ ID NO: 415830 - DNA, 15 bp, Homo sapiens
taaggaggtaagaaa

SEQ ID NO: 415831 - DNA, 15 bp, Homo sapiens
gtaaggaggtaagaa

SEQ ID NO: 415832 - DNA, 15 bp, Homo sapiens
agtaaggaggtaaga

SEQ ID NO: 415833 - DNA, 15 bp, Homo sapiens
aagtaaggaggtaag

SEQ ID NO: 415834 - DNA, 15 bp, Homo sapiens
gaagtaaggaggtaa

SEQ ID NO: 415835 - DNA, 15 bp, Homo sapiens
tgaagtaaggaggta

SEQ ID NO: 415836 - DNA, 15 bp, Homo sapiens
atgaagtaaggaggt

SEQ ID NO: 415837 - DNA, 15 bp, Homo sapiens
catgaagtaaggagg

SEQ ID NO: 415838 - DNA, 15 bp, Homo sapiens
ccatgaagtaaggag

SEQ ID NO: 415839 - DNA, 15 bp, Homo sapiens
tccatgaagtaagga

SEQ ID NO: 415840 - DNA, 15 bp, Homo sapiens
ctccatgaagtaagg

SEQ ID NO: 415841 - DNA, 15 bp, Homo sapiens
tctccatgaagtaag

SEQ ID NO: 415842 - DNA, 15 bp, Homo sapiens
ctctccatgaagtaa

SEQ ID NO: 415843 - DNA, 15 bp, Homo sapiens
tctctccatgaagta

SEQ ID NO: 415844 - DNA, 15 bp, Homo sapiens
atctctccatgaagt

SEQ ID NO: 415845 - DNA, 15 bp, Homo sapiens
gatctctccatgaag

SEQ ID NO: 415846 - DNA, 15 bp, Homo sapiens
ggatctctccatgaa

SEQ ID NO: 415847 - DNA, 15 bp, Homo sapiens
gggatctctccatga

SEQ ID NO: 415848 - DNA, 15 bp, Homo sapiens
agggatctctccatg

SEQ ID NO: 415849 - DNA, 15 bp, Homo sapiens
aagggatctctccat

SEQ ID NO: 415850 - DNA, 15 bp, Homo sapiens
taagggatctctcca

SEQ ID NO: 415851 - DNA, 15 bp, Homo sapiens
gtaagggatctctcc

SEQ ID NO: 415852 - DNA, 15 bp, Homo sapiens
ggtaagggatctctc

SEQ ID NO: 415853 - DNA, 15 bp, Homo sapiens
aggtaagggatctct

SEQ ID NO: 415854 - DNA, 15 bp, Homo sapiens
gaggtaagggatctc

SEQ ID NO: 415855 - DNA, 15 bp, Homo sapiens
ggaggtaagggatct

SEQ ID NO: 415856 - DNA, 15 bp, Homo sapiens
aggaggtaagggatc

SEQ ID NO: 415857 - DNA, 15 bp, Homo sapiens
aaggaggtaagggat

SEQ ID NO: 415858 - DNA, 15 bp, Homo sapiens
taaggaggtaaggga

SEQ ID NO: 415859 - DNA, 15 bp, Homo sapiens
gtaaggaggtaaggg

SEQ ID NO: 415860 - DNA, 15 bp, Homo sapiens
ggtaaggaggtaagg

SEQ ID NO: 415861 - DNA, 15 bp, Homo sapiens
aggtaaggaggtaag

SEQ ID NO: 415862 - DNA, 15 bp, Homo sapiens
gaggtaaggaggtaa

SEQ ID NO: 415863 - DNA, 15 bp, Homo sapiens
tgaggtaaggaggta

SEQ ID NO: 415864 - DNA, 15 bp, Homo sapiens
atgaggtaaggaggt

SEQ ID NO: 415865 - DNA, 15 bp, Homo sapiens
catgaggtaaggagg

SEQ ID NO: 415866 - DNA, 15 bp, Homo sapiens
tcatgaggtaaggag

SEQ ID NO: 415867 - DNA, 15 bp, Homo sapiens
gtcatgaggtaagga

SEQ ID NO: 415868 - DNA, 15 bp, Homo sapiens
ggtcatgaggtaagg

SEQ ID NO: 415869 - DNA, 15 bp, Homo sapiens
tggtcatgaggtaag

SEQ ID NO: 415870 - DNA, 15 bp, Homo sapiens
ctggtcatgaggtaa

SEQ ID NO: 415871 - DNA, 15 bp, Homo sapiens
tctggtcatgaggta

SEQ ID NO: 415872 - DNA, 15 bp, Homo sapiens
atctggtcatgaggt

SEQ ID NO: 415873 - DNA, 15 bp, Homo sapiens
gatctggtcatgagg

SEQ ID NO: 415874 - DNA, 15 bp, Homo sapiens
ggatctggtcatgag

SEQ ID NO: 415875 - DNA, 15 bp, Homo sapiens
gggatctggtcatga

SEQ ID NO: 415876 - DNA, 15 bp, Homo sapiens
agggatctggtcatg

SEQ ID NO: 415877 - DNA, 15 bp, Homo sapiens
aagggatctggtcat

SEQ ID NO: 415878 - DNA, 15 bp, Homo sapiens
taagggatctggtca

SEQ ID NO: 415879 - DNA, 15 bp, Homo sapiens
gtaagggatctggtc

SEQ ID NO: 415880 - DNA, 15 bp, Homo sapiens
aggtaagggatctgg

SEQ ID NO: 415881 - DNA, 15 bp, Homo sapiens
gaggtaagggatctg

SEQ ID NO: 415882 - DNA, 15 bp, Homo sapiens
aatgaggtaaggagg

SEQ ID NO: 415883 - DNA, 15 bp, Homo sapiens
caatgaggtaaggag

SEQ ID NO: 415884 - DNA, 15 bp, Homo sapiens
gcaatgaggtaagga

SEQ ID NO: 415885 - DNA, 15 bp, Homo sapiens
agcaatgaggtaagg

SEQ ID NO: 415886 - DNA, 15 bp, Homo sapiens
tagcaatgaggtaag

SEQ ID NO: 415887 - DNA, 15 bp, Homo sapiens
ttagcaatgaggtaa

SEQ ID NO: 415888 - DNA, 15 bp, Homo sapiens
tttagcaatgaggta

SEQ ID NO: 415889 - DNA, 15 bp, Homo sapiens
atttagcaatgaggt

SEQ ID NO: 415890 - DNA, 15 bp, Homo sapiens
aatttagcaatgagg

SEQ ID NO: 415891 - DNA, 15 bp, Homo sapiens
aaatttagcaatgag

SEQ ID NO: 415892 - DNA, 15 bp, Homo sapiens
gaaatttagcaatga

SEQ ID NO: 415893 - DNA, 15 bp, Homo sapiens
agaaatttagcaatg

SEQ ID NO: 415894 - DNA, 15 bp, Homo sapiens
aagaaatttagcaat

SEQ ID NO: 415895 - DNA, 15 bp, Homo sapiens
taagaaatttagcaa

SEQ ID NO: 415896 - DNA, 15 bp, Homo sapiens
gtaagaaatttagca

SEQ ID NO: 415897 - DNA, 15 bp, Homo sapiens
taggtaagaaattta

SEQ ID NO: 415898 - DNA, 15 bp, Homo sapiens
gtaggtaagaaattt

SEQ ID NO: 415899 - DNA, 15 bp, Homo sapiens
agtaggtaagaaatt

SEQ ID NO: 415900 - DNA, 15 bp, Homo sapiens
gagtaggtaagaaat

SEQ ID NO: 415901 - DNA, 15 bp, Homo sapiens
tgagtaggtaagaaa

SEQ ID NO: 415902 - DNA, 15 bp, Homo sapiens
gtgagtaggtaagaa

SEQ ID NO: 415903 - DNA, 15 bp, Homo sapiens
agtgagtaggtaaga

SEQ ID NO: 415904 - DNA, 15 bp, Homo sapiens
gagtgagtaggtaag

SEQ ID NO: 415905 - DNA, 15 bp, Homo sapiens
ggagtgagtaggtaa

SEQ ID NO: 415906 - DNA, 15 bp, Homo sapiens
tggagtgagtaggta

SEQ ID NO: 415907 - DNA, 15 bp, Homo sapiens
atggagtgagtaggt

SEQ ID NO: 415908 - DNA, 15 bp, Homo sapiens
tatggagtgagtagg

SEQ ID NO: 415909 - DNA, 15 bp, Homo sapiens
ctatggagtgagtag

SEQ ID NO: 415910 - DNA, 15 bp, Homo sapiens
gctatggagtgagta

SEQ ID NO: 415911 - DNA, 15 bp, Homo sapiens
agctatggagtgagt

SEQ ID NO: 415912 - DNA, 15 bp, Homo sapiens
tagctatggagtgag

SEQ ID NO: 415913 - DNA, 15 bp, Homo sapiens
ttagctatggagtga

SEQ ID NO: 415914 - DNA, 15 bp, Homo sapiens
tttagctatggagtg

SEQ ID NO: 415915 - DNA, 15 bp, Homo sapiens
atttagctatggagt

SEQ ID NO: 415916 - DNA, 15 bp, Homo sapiens
aatttagctatggag

SEQ ID NO: 415917 - DNA, 15 bp, Homo sapiens
gaatttagctatgga

SEQ ID NO: 415918 - DNA, 15 bp, Homo sapiens
ggaatttagctatgg

SEQ ID NO: 415919 - DNA, 15 bp, Homo sapiens
aggaatttagctatg

SEQ ID NO: 415920 - DNA, 15 bp, Homo sapiens
aaggaatttagctat

SEQ ID NO: 415921 - DNA, 15 bp, Homo sapiens
taaggaatttagcta

SEQ ID NO: 415922 - DNA, 15 bp, Homo sapiens
gtaaggaatttagct

SEQ ID NO: 415923 - DNA, 15 bp, Homo sapiens
agtaaggaatttagc

SEQ ID NO: 415924 - DNA, 15 bp, Homo sapiens
aagtaaggaatttag

SEQ ID NO: 415925 - DNA, 15 bp, Homo sapiens
taagtaaggaattta

SEQ ID NO: 415926 - DNA, 15 bp, Homo sapiens
gtaagtaaggaattt

SEQ ID NO: 415927 - DNA, 15 bp, Homo sapiens
agtaagtaaggaatt

SEQ ID NO: 415928 - DNA, 15 bp, Homo sapiens
gagtaagtaaggaat

SEQ ID NO: 415929 - DNA, 15 bp, Homo sapiens
cgagtaagtaaggaa

SEQ ID NO: 415930 - DNA, 15 bp, Homo sapiens
gcgagtaagtaagga

SEQ ID NO: 415931 - DNA, 15 bp, Homo sapiens
ggcgagtaagtaagg

SEQ ID NO: 415932 - DNA, 15 bp, Homo sapiens
aggcgagtaagtaag

SEQ ID NO: 415933 - DNA, 15 bp, Homo sapiens
gaggcgagtaagtaa

SEQ ID NO: 415934 - DNA, 15 bp, Homo sapiens
agaggcgagtaagta

SEQ ID NO: 415935 - DNA, 15 bp, Homo sapiens
tagaggcgagtaagt

SEQ ID NO: 415936 - DNA, 15 bp, Homo sapiens
ctagaggcgagtaag

SEQ ID NO: 415937 - DNA, 15 bp, Homo sapiens
gctagaggcgagtaa

SEQ ID NO: 415938 - DNA, 15 bp, Homo sapiens
agctagaggcgagta

SEQ ID NO: 415939 - DNA, 15 bp, Homo sapiens
tagctagaggcgagt

SEQ ID NO: 415940 - DNA, 15 bp, Homo sapiens
ttagctagaggcgag

SEQ ID NO: 415941 - DNA, 15 bp, Homo sapiens
tttagctagaggcga

SEQ ID NO: 415942 - DNA, 15 bp, Homo sapiens
atttagctagaggcg

SEQ ID NO: 415943 - DNA, 15 bp, Homo sapiens
gatttagctagaggc

SEQ ID NO: 415944 - DNA, 15 bp, Homo sapiens
ggatttagctagagg

SEQ ID NO: 415945 - DNA, 15 bp, Homo sapiens
aggatttagctagag

SEQ ID NO: 415946 - DNA, 15 bp, Homo sapiens
aaggatttagctaga

SEQ ID NO: 415947 - DNA, 15 bp, Homo sapiens
aaaggatttagctag

SEQ ID NO: 415948 - DNA, 15 bp, Homo sapiens
taaaggatttagcta

SEQ ID NO: 415949 - DNA, 15 bp, Homo sapiens
gtaaaggatttagct

SEQ ID NO: 415950 - DNA, 15 bp, Homo sapiens
ggtaaaggatttagc

SEQ ID NO: 415951 - DNA, 15 bp, Homo sapiens
aggtaaaggatttag

SEQ ID NO: 415952 - DNA, 15 bp, Homo sapiens
gaggtaaaggattta

SEQ ID NO: 415953 - DNA, 15 bp, Homo sapiens
ggaggtaaaggattt

SEQ ID NO: 415954 - DNA, 15 bp, Homo sapiens
aggaggtaaaggatt

SEQ ID NO: 415955 - DNA, 15 bp, Homo sapiens
aaggaggtaaaggat

SEQ ID NO: 415956 - DNA, 15 bp, Homo sapiens
gaaggaggtaaagga

SEQ ID NO: 415957 - DNA, 15 bp, Homo sapiens
tgaaggaggtaaagg

SEQ ID NO: 415958 - DNA, 15 bp, Homo sapiens
ctgaaggaggtaaag

SEQ ID NO: 415959 - DNA, 15 bp, Homo sapiens
cctgaaggaggtaaa

SEQ ID NO: 415960 - DNA, 15 bp, Homo sapiens
acctgaaggaggtaa

SEQ ID NO: 415961 - DNA, 15 bp, Homo sapiens
gacctgaaggaggta

SEQ ID NO: 415962 - DNA, 15 bp, Homo sapiens
ggacctgaaggaggt

SEQ ID NO: 415963 - DNA, 15 bp, Homo sapiens
aggacctgaaggagg

SEQ ID NO: 415964 - DNA, 15 bp, Homo sapiens
gaggacctgaaggag

SEQ ID NO: 415965 - DNA, 15 bp, Homo sapiens
tgaggacctgaagga

SEQ ID NO: 415966 - DNA, 15 bp, Homo sapiens
atgaggacctgaagg

SEQ ID NO: 415967 - DNA, 15 bp, Homo sapiens
gatgaggacctgaag

SEQ ID NO: 415968 - DNA, 15 bp, Homo sapiens
tgatgaggacctgaa

SEQ ID NO: 415969 - DNA, 15 bp, Homo sapiens
ttgatgaggacctga

SEQ ID NO: 415970 - DNA, 15 bp, Homo sapiens
tttgatgaggacctg

SEQ ID NO: 415971 - DNA, 15 bp, Homo sapiens
ttttgatgaggacct

SEQ ID NO: 415972 - DNA, 15 bp, Homo sapiens
attttgatgaggacc

SEQ ID NO: 415973 - DNA, 15 bp, Homo sapiens
cattttgatgaggac

SEQ ID NO: 415974 - DNA, 15 bp, Homo sapiens
acattttgatgagga

SEQ ID NO: 415975 - DNA, 15 bp, Homo sapiens
aacattttgatgagg

SEQ ID NO: 415976 - DNA, 15 bp, Homo sapiens
caacattttgatgag

SEQ ID NO: 415977 - DNA, 15 bp, Homo sapiens
ccaacattttgatga

SEQ ID NO: 415978 - DNA, 15 bp, Homo sapiens
accaacattttgatg

SEQ ID NO: 415979 - DNA, 15 bp, Homo sapiens
aaccaacattttgat

SEQ ID NO: 415980 - DNA, 15 bp, Homo sapiens
aaaccaacattttga

SEQ ID NO: 415981 - DNA, 15 bp, Homo sapiens
taaaccaacattttg

SEQ ID NO: 415982 - DNA, 15 bp, Homo sapiens
ataaaccaacatttt

SEQ ID NO: 415983 - DNA, 15 bp, Homo sapiens
aataaaccaacattt

SEQ ID NO: 415984 - DNA, 15 bp, Homo sapiens
taataaaccaacatt

SEQ ID NO: 415985 - DNA, 15 bp, Homo sapiens
ctaataaaccaacat

SEQ ID NO: 415986 - DNA, 15 bp, Homo sapiens
actaataaaccaaca

SEQ ID NO: 415987 - DNA, 15 bp, Homo sapiens
cactaataaaccaac

SEQ ID NO: 415988 - DNA, 15 bp, Homo sapiens
tcactaataaaccaa

SEQ ID NO: 415989 - DNA, 15 bp, Homo sapiens
ctcactaataaacca

SEQ ID NO: 415990 - DNA, 15 bp, Homo sapiens
cctcactaataaacc

SEQ ID NO: 415991 - DNA, 15 bp, Homo sapiens
acctcactaataaac

SEQ ID NO: 415992 - DNA, 15 bp, Homo sapiens
gacctcactaataaa

SEQ ID NO: 415993 - DNA, 15 bp, Homo sapiens
tgacctcactaataa

SEQ ID NO: 415994 - DNA, 15 bp, Homo sapiens
gtgacctcactaata

SEQ ID NO: 415995 - DNA, 15 bp, Homo sapiens
agtgacctcactaat

SEQ ID NO: 415996 - DNA, 15 bp, Homo sapiens
tagtgacctcactaa

SEQ ID NO: 415997 - DNA, 15 bp, Homo sapiens
ttagtgacctcacta

SEQ ID NO: 415998 - DNA, 15 bp, Homo sapiens
attagtgacctcact

SEQ ID NO: 415999 - DNA, 15 bp, Homo sapiens
tattagtgacctcac

SEQ ID NO: 416000 - DNA, 15 bp, Homo sapiens
ctattagtgacctca

SEQ ID NO: 416001 - DNA, 15 bp, Homo sapiens
tctattagtgacctc

SEQ ID NO: 416002 - DNA, 15 bp, Homo sapiens
atctattagtgacct

SEQ ID NO: 416003 - DNA, 15 bp, Homo sapiens
aatctattagtgacc

SEQ ID NO: 416004 - DNA, 15 bp, Homo sapiens
taatctattagtgac

SEQ ID NO: 416005 - DNA, 15 bp, Homo sapiens
ttaatctattagtga

SEQ ID NO: 416006 - DNA, 15 bp, Homo sapiens
gttaatctattagtg

SEQ ID NO: 416007 - DNA, 15 bp, Homo sapiens
agttaatctattagt

SEQ ID NO: 416008 - DNA, 15 bp, Homo sapiens
tagttaatctattag

SEQ ID NO: 416009 - DNA, 15 bp, Homo sapiens
ttagttaatctatta

SEQ ID NO: 416010 - DNA, 15 bp, Homo sapiens
gttagttaatctatt

SEQ ID NO: 416011 - DNA, 15 bp, Homo sapiens
cgttagttaatctat

SEQ ID NO: 416012 - DNA, 15 bp, Homo sapiens
tcgttagttaatcta

SEQ ID NO: 416013 - DNA, 15 bp, Homo sapiens
atcgttagttaatct

SEQ ID NO: 416014 - DNA, 15 bp, Homo sapiens
gatcgttagttaatc

SEQ ID NO: 416015 - DNA, 15 bp, Homo sapiens
ggatcgttagttaat

SEQ ID NO: 416016 - DNA, 15 bp, Homo sapiens
gggatcgttagttaa

SEQ ID NO: 416017 - DNA, 15 bp, Homo sapiens
ggggatcgttagtta

SEQ ID NO: 416018 - DNA, 15 bp, Homo sapiens
aggggatcgttagtt

SEQ ID NO: 416019 - DNA, 15 bp, Homo sapiens
gaggggatcgttagt

SEQ ID NO: 416020 - DNA, 15 bp, Homo sapiens
ggaggggatcgttag

SEQ ID NO: 416021 - DNA, 15 bp, Homo sapiens
aggaggggatcgtta

SEQ ID NO: 416022 - DNA, 15 bp, Homo sapiens
gaggaggggatcgtt

SEQ ID NO: 416023 - DNA, 15 bp, Homo sapiens
ggaggaggggatcgt

SEQ ID NO: 416024 - DNA, 15 bp, Homo sapiens
gggaggaggggatcg

SEQ ID NO: 416025 - DNA, 15 bp, Homo sapiens
tgggaggaggggatc

SEQ ID NO: 416026 - DNA, 15 bp, Homo sapiens
gtgggaggaggggat

SEQ ID NO: 416027 - DNA, 15 bp, Homo sapiens
cgtgggaggagggga

SEQ ID NO: 416028 - DNA, 15 bp, Homo sapiens
acgtgggaggagggg

SEQ ID NO: 416029 - DNA, 15 bp, Homo sapiens
tacgtgggaggaggg

SEQ ID NO: 416030 - DNA, 15 bp, Homo sapiens
atacgtgggaggagg

SEQ ID NO: 416031 - DNA, 15 bp, Homo sapiens
gatacgtgggaggag

SEQ ID NO: 416032 - DNA, 15 bp, Homo sapiens
agatacgtgggagga

SEQ ID NO: 416033 - DNA, 15 bp, Homo sapiens
aagatacgtgggagg

SEQ ID NO: 416034 - DNA, 15 bp, Homo sapiens
gaagatacgtgggag

SEQ ID NO: 416035 - DNA, 15 bp, Homo sapiens
agaagatacgtggga

SEQ ID NO: 416036 - DNA, 15 bp, Homo sapiens
aagaagatacgtggg

SEQ ID NO: 416037 - DNA, 15 bp, Homo sapiens
gaagaagatacgtgg

SEQ ID NO: 416038 - DNA, 15 bp, Homo sapiens
ggaagaagatacgtg

SEQ ID NO: 416039 - DNA, 15 bp, Homo sapiens
gggaagaagatacgt

SEQ ID NO: 416040 - DNA, 15 bp, Homo sapiens
ggggaagaagatacg

SEQ ID NO: 416041 - DNA, 15 bp, Homo sapiens
aggggaagaagatac

SEQ ID NO: 416042 - DNA, 15 bp, Homo sapiens
caggggaagaagata

SEQ ID NO: 416043 - DNA, 15 bp, Homo sapiens
gcaggggaagaagat

SEQ ID NO: 416044 - DNA, 15 bp, Homo sapiens
tgcaggggaagaaga

SEQ ID NO: 416045 - DNA, 15 bp, Homo sapiens
atgcaggggaagaag

SEQ ID NO: 416046 - DNA, 15 bp, Homo sapiens
ttatgcaggggaaga

SEQ ID NO: 416047 - DNA, 15 bp, Homo sapiens
attatgcaggggaag

SEQ ID NO: 416048 - DNA, 15 bp, Homo sapiens
tattatgcaggggaa

SEQ ID NO: 416049 - DNA, 15 bp, Homo sapiens
atattatgcagggga

SEQ ID NO: 416050 - DNA, 15 bp, Homo sapiens
aatattatgcagggg

SEQ ID NO: 416051 - DNA, 15 bp, Homo sapiens
gaatattatgcaggg

SEQ ID NO: 416052 - DNA, 15 bp, Homo sapiens
agaatattatgcagg

SEQ ID NO: 416053 - DNA, 15 bp, Homo sapiens
gagaatattatgcag

SEQ ID NO: 416054 - DNA, 15 bp, Homo sapiens
ggagaatattatgca

SEQ ID NO: 416055 - DNA, 15 bp, Homo sapiens
tggagaatattatgc

SEQ ID NO: 416056 - DNA, 15 bp, Homo sapiens
ttggagaatattatg

SEQ ID NO: 416057 - DNA, 15 bp, Homo sapiens
cttggagaatattat

SEQ ID NO: 416058 - DNA, 15 bp, Homo sapiens
ccttggagaatatta

SEQ ID NO: 416059 - DNA, 15 bp, Homo sapiens
gccttggagaatatt

SEQ ID NO: 416060 - DNA, 15 bp, Homo sapiens
tgccttggagaatat

SEQ ID NO: 416061 - DNA, 15 bp, Homo sapiens
atgccttggagaata

SEQ ID NO: 416062 - DNA, 15 bp, Homo sapiens
aatgccttggagaat

SEQ ID NO: 416063 - DNA, 15 bp, Homo sapiens
taatgccttggagaa

SEQ ID NO: 416064 - DNA, 15 bp, Homo sapiens
ataatgccttggaga

SEQ ID NO: 416065 - DNA, 15 bp, Homo sapiens
gataatgccttggag

SEQ ID NO: 416066 - DNA, 15 bp, Homo sapiens
tgataatgccttgga

SEQ ID NO: 416067 - DNA, 15 bp, Homo sapiens
gtgataatgccttgg

SEQ ID NO: 416068 - DNA, 15 bp, Homo sapiens
ggtgataatgccttg

SEQ ID NO: 416069 - DNA, 15 bp, Homo sapiens
tggtgataatgcctt

SEQ ID NO: 416070 - DNA, 15 bp, Homo sapiens
ctggtgataatgcct

SEQ ID NO: 416071 - DNA, 15 bp, Homo sapiens
gctggtgataatgcc

SEQ ID NO: 416072 - DNA, 15 bp, Homo sapiens
ggctggtgataatgc

SEQ ID NO: 416073 - DNA, 15 bp, Homo sapiens
tggctggtgataatg

SEQ ID NO: 416074 - DNA, 15 bp, Homo sapiens
ttggctggtgataat

SEQ ID NO: 416075 - DNA, 15 bp, Homo sapiens
gttggctggtgataa

SEQ ID NO: 416076 - DNA, 15 bp, Homo sapiens
tgttggctggtgata

SEQ ID NO: 416077 - DNA, 15 bp, Homo sapiens
atgttggctggtgat

SEQ ID NO: 416078 - DNA, 15 bp, Homo sapiens
catgttggctggtga

SEQ ID NO: 416079 - DNA, 15 bp, Homo sapiens
tcatgttggctggtg

SEQ ID NO: 416080 - DNA, 15 bp, Homo sapiens
atcatgttggctggt

SEQ ID NO: 416081 - DNA, 15 bp, Homo sapiens
tatcatgttggctgg

SEQ ID NO: 416082 - DNA, 15 bp, Homo sapiens
atatcatgttggctg

SEQ ID NO: 416083 - DNA, 15 bp, Homo sapiens
tatatcatgttggct

SEQ ID NO: 416084 - DNA, 15 bp, Homo sapiens
atatatcatgttggc

SEQ ID NO: 416085 - DNA, 15 bp, Homo sapiens
tatatatcatgttgg

SEQ ID NO: 416086 - DNA, 15 bp, Homo sapiens
atatatatcatgttg

SEQ ID NO: 416087 - DNA, 15 bp, Homo sapiens
tatatatatcatgtt

SEQ ID NO: 416088 - DNA, 15 bp, Homo sapiens
gtatatatatcatgt

SEQ ID NO: 416089 - DNA, 15 bp, Homo sapiens
tgtatatatatcatg

SEQ ID NO: 416090 - DNA, 15 bp, Homo sapiens
ctgtatatatatcat

SEQ ID NO: 416091 - DNA, 15 bp, Homo sapiens
actgtatatatatca

SEQ ID NO: 416092 - DNA, 15 bp, Homo sapiens
gactgtatatatatc

SEQ ID NO: 416093 - DNA, 15 bp, Homo sapiens
tgactgtatatatat

SEQ ID NO: 416094 - DNA, 15 bp, Homo sapiens
atgactgtatatata

SEQ ID NO: 416095 - DNA, 15 bp, Homo sapiens
tatgactgtatatat

SEQ ID NO: 416096 - DNA, 15 bp, Homo sapiens
ttatgactgtatata

SEQ ID NO: 416097 - DNA, 15 bp, Homo sapiens
attatgactgtatat

SEQ ID NO: 416098 - DNA, 15 bp, Homo sapiens
aattatgactgtata

SEQ ID NO: 416099 - DNA, 15 bp, Homo sapiens
gaattatgactgtat

SEQ ID NO: 416100 - DNA, 15 bp, Homo sapiens
cgaattatgactgta

SEQ ID NO: 416101 - DNA, 15 bp, Homo sapiens
acgaattatgactgt

SEQ ID NO: 416102 - DNA, 15 bp, Homo sapiens
aacgaattatgactg

SEQ ID NO: 416103 - DNA, 15 bp, Homo sapiens
taacgaattatgact

SEQ ID NO: 416104 - DNA, 15 bp, Homo sapiens
ataacgaattatgac

SEQ ID NO: 416105 - DNA, 15 bp, Homo sapiens
gataacgaattatga

SEQ ID NO: 416106 - DNA, 15 bp, Homo sapiens
agataacgaattatg

SEQ ID NO: 416107 - DNA, 15 bp, Homo sapiens
aagataacgaattat

SEQ ID NO: 416108 - DNA, 15 bp, Homo sapiens
aaagataacgaatta

SEQ ID NO: 416109 - DNA, 15 bp, Homo sapiens
taaagataacgaatt

SEQ ID NO: 416110 - DNA, 15 bp, Homo sapiens
ataaagataacgaat

SEQ ID NO: 416111 - DNA, 15 bp, Homo sapiens
gataaagataacgaa

SEQ ID NO: 416112 - DNA, 15 bp, Homo sapiens
agataaagataacga

SEQ ID NO: 416113 - DNA, 15 bp, Homo sapiens
gagataaagataacg

SEQ ID NO: 416114 - DNA, 15 bp, Homo sapiens
agagataaagataac

SEQ ID NO: 416115 - DNA, 15 bp, Homo sapiens
aagagataaagataa

SEQ ID NO: 416116 - DNA, 15 bp, Homo sapiens
aaagagataaagata

SEQ ID NO: 416117 - DNA, 15 bp, Homo sapiens
taaagagataaagat

SEQ ID NO: 416118 - DNA, 15 bp, Homo sapiens
ataaagagataaaga

SEQ ID NO: 416119 - DNA, 15 bp, Homo sapiens
gataaagagataaag

SEQ ID NO: 416120 - DNA, 15 bp, Homo sapiens
ggataaagagataaa

SEQ ID NO: 416121 - DNA, 15 bp, Homo sapiens
gggataaagagataa

SEQ ID NO: 416122 - DNA, 15 bp, Homo sapiens
tgggataaagagata

SEQ ID NO: 416123 - DNA, 15 bp, Homo sapiens
gtgggataaagagat

SEQ ID NO: 416124 - DNA, 15 bp, Homo sapiens
agtgggataaagaga

SEQ ID NO: 416125 - DNA, 15 bp, Homo sapiens
aagtgggataaagag

SEQ ID NO: 416126 - DNA, 15 bp, Homo sapiens
caagtgggataaaga

SEQ ID NO: 416127 - DNA, 15 bp, Homo sapiens
tcaagtgggataaag

SEQ ID NO: 416128 - DNA, 15 bp, Homo sapiens
ttcaagtgggataaa

SEQ ID NO: 416129 - DNA, 15 bp, Homo sapiens
attcaagtgggataa

SEQ ID NO: 416130 - DNA, 15 bp, Homo sapiens
cattcaagtgggata

SEQ ID NO: 416131 - DNA, 15 bp, Homo sapiens
acattcaagtgggat

SEQ ID NO: 416132 - DNA, 15 bp, Homo sapiens
cacattcaagtggga

SEQ ID NO: 416133 - DNA, 15 bp, Homo sapiens
acacattcaagtggg

SEQ ID NO: 416134 - DNA, 15 bp, Homo sapiens
aacacattcaagtgg

SEQ ID NO: 416135 - DNA, 15 bp, Homo sapiens
taacacattcaagtg

SEQ ID NO: 416136 - DNA, 15 bp, Homo sapiens
ctaacacattcaagt

SEQ ID NO: 416137 - DNA, 15 bp, Homo sapiens
gctaacacattcaag

SEQ ID NO: 416138 - DNA, 15 bp, Homo sapiens
agctaacacattcaa

SEQ ID NO: 416139 - DNA, 15 bp, Homo sapiens
aagctaacacattca

SEQ ID NO: 416140 - DNA, 15 bp, Homo sapiens
caagctaacacattc

SEQ ID NO: 416141 - DNA, 15 bp, Homo sapiens
tcaagctaacacatt

SEQ ID NO: 416142 - DNA, 15 bp, Homo sapiens
ttcaagctaacacat

SEQ ID NO: 416143 - DNA, 15 bp, Homo sapiens
gttcaagctaacaca

SEQ ID NO: 416144 - DNA, 15 bp, Homo sapiens
ggttcaagctaacac

SEQ ID NO: 416145 - DNA, 15 bp, Homo sapiens
tggttcaagctaaca

SEQ ID NO: 416146 - DNA, 15 bp, Homo sapiens
atggttcaagctaac

SEQ ID NO: 416147 - DNA, 15 bp, Homo sapiens
tatggttcaagctaa

SEQ ID NO: 416148 - DNA, 15 bp, Homo sapiens
atatggttcaagcta

SEQ ID NO: 416149 - DNA, 15 bp, Homo sapiens
catatggttcaagct

SEQ ID NO: 416150 - DNA, 15 bp, Homo sapiens
tcatatggttcaagc

SEQ ID NO: 416151 - DNA, 15 bp, Homo sapiens
gtcatatggttcaag

SEQ ID NO: 416152 - DNA, 15 bp, Homo sapiens
tgtcatatggttcaa

SEQ ID NO: 416153 - DNA, 15 bp, Homo sapiens
gtgtcatatggttca

SEQ ID NO: 416154 - DNA, 15 bp, Homo sapiens
agtgtcatatggttc

SEQ ID NO: 416155 - DNA, 15 bp, Homo sapiens
cagtgtcatatggtt

SEQ ID NO: 416156 - DNA, 15 bp, Homo sapiens
gcagtgtcatatggt

SEQ ID NO: 416157 - DNA, 15 bp, Homo sapiens
ggcagtgtcatatgg

SEQ ID NO: 416158 - DNA, 15 bp, Homo sapiens
aggcagtgtcatatg

SEQ ID NO: 416159 - DNA, 15 bp, Homo sapiens
aaggcagtgtcatat

SEQ ID NO: 416160 - DNA, 15 bp, Homo sapiens
aaaggcagtgtcata

SEQ ID NO: 416161 - DNA, 15 bp, Homo sapiens
aaaaggcagtgtcat

SEQ ID NO: 416162 - DNA, 15 bp, Homo sapiens
taaaaggcagtgtca

SEQ ID NO: 416163 - DNA, 15 bp, Homo sapiens
ataaaaggcagtgtc

SEQ ID NO: 416164 - DNA, 15 bp, Homo sapiens
cataaaaggcagtgt

SEQ ID NO: 416165 - DNA, 15 bp, Homo sapiens
acataaaaggcagtg

SEQ ID NO: 416166 - DNA, 15 bp, Homo sapiens
tacataaaaggcagt

SEQ ID NO: 416167 - DNA, 15 bp, Homo sapiens
ctacataaaaggcag

SEQ ID NO: 416168 - DNA, 15 bp, Homo sapiens
cctacataaaaggca

SEQ ID NO: 416169 - DNA, 15 bp, Homo sapiens
acctacataaaaggc

SEQ ID NO: 416170 - DNA, 15 bp, Homo sapiens
tacctacataaaagg

SEQ ID NO: 416171 - DNA, 15 bp, Homo sapiens
ctacctacataaaag

SEQ ID NO: 416172 - DNA, 15 bp, Homo sapiens
tctacctacataaaa

SEQ ID NO: 416173 - DNA, 15 bp, Homo sapiens
ttctacctacataaa

SEQ ID NO: 416174 - DNA, 15 bp, Homo sapiens
tttctacctacataa

SEQ ID NO: 416175 - DNA, 15 bp, Homo sapiens
ttttctacctacata

SEQ ID NO: 416176 - DNA, 15 bp, Homo sapiens
attttctacctacat

SEQ ID NO: 416177 - DNA, 15 bp, Homo sapiens
cattttctacctaca

SEQ ID NO: 416178 - DNA, 15 bp, Homo sapiens
ccattttctacctac

SEQ ID NO: 416179 - DNA, 15 bp, Homo sapiens
accattttctaccta

SEQ ID NO: 416180 - DNA, 15 bp, Homo sapiens
gaccattttctacct

SEQ ID NO: 416181 - DNA, 15 bp, Homo sapiens
tgaccattttctacc

SEQ ID NO: 416182 - DNA, 15 bp, Homo sapiens
ttgaccattttctac

SEQ ID NO: 416183 - DNA, 15 bp, Homo sapiens
tttgaccattttcta

SEQ ID NO: 416184 - DNA, 15 bp, Homo sapiens
atttgaccattttct

SEQ ID NO: 416185 - DNA, 15 bp, Homo sapiens
catttgaccattttc

SEQ ID NO: 416186 - DNA, 15 bp, Homo sapiens
acatttgaccatttt

SEQ ID NO: 416187 - DNA, 15 bp, Homo sapiens
gacatttgaccattt

SEQ ID NO: 416188 - DNA, 15 bp, Homo sapiens
agacatttgaccatt

SEQ ID NO: 416189 - DNA, 15 bp, Homo sapiens
tagacatttgaccat

SEQ ID NO: 416190 - DNA, 15 bp, Homo sapiens
atagacatttgacca

SEQ ID NO: 416191 - DNA, 15 bp, Homo sapiens
tatagacatttgacc

SEQ ID NO: 416192 - DNA, 15 bp, Homo sapiens
ttatagacatttgac

SEQ ID NO: 416193 - DNA, 15 bp, Homo sapiens
attatagacatttga

SEQ ID NO: 416194 - DNA, 15 bp, Homo sapiens
aattatagacatttg

SEQ ID NO: 416195 - DNA, 15 bp, Homo sapiens
aaattatagacattt

SEQ ID NO: 416196 - DNA, 15 bp, Homo sapiens
gaaattatagacatt

SEQ ID NO: 416197 - DNA, 15 bp, Homo sapiens
tgaaattatagacat

SEQ ID NO: 416198 - DNA, 15 bp, Homo sapiens
atgaaattatagaca

SEQ ID NO: 416199 - DNA, 15 bp, Homo sapiens
aatgaaattatagac

SEQ ID NO: 416200 - DNA, 15 bp, Homo sapiens
aaatgaaattataga

SEQ ID NO: 416201 - DNA, 15 bp, Homo sapiens
aaaatgaaattatag

SEQ ID NO: 416202 - DNA, 15 bp, Homo sapiens
caaaatgaaattata

SEQ ID NO: 416203 - DNA, 15 bp, Homo sapiens
acaaaatgaaattat

SEQ ID NO: 416204 - DNA, 15 bp, Homo sapiens
aacaaaatgaaatta

SEQ ID NO: 416205 - DNA, 15 bp, Homo sapiens
aaacaaaatgaaatt

SEQ ID NO: 416206 - DNA, 15 bp, Homo sapiens
taaacaaaatgaaat

SEQ ID NO: 416207 - DNA, 15 bp, Homo sapiens
ttaaacaaaatgaaa

SEQ ID NO: 416208 - DNA, 15 bp, Homo sapiens
gttaaacaaaatgaa

SEQ ID NO: 416209 - DNA, 15 bp, Homo sapiens
agttaaacaaaatga

SEQ ID NO: 416210 - DNA, 15 bp, Homo sapiens
aagttaaacaaaatg

SEQ ID NO: 416211 - DNA, 15 bp, Homo sapiens
taagttaaacaaaat

SEQ ID NO: 416212 - DNA, 15 bp, Homo sapiens
ctaagttaaacaaaa

SEQ ID NO: 416213 - DNA, 15 bp, Homo sapiens
actaagttaaacaaa

SEQ ID NO: 416214 - DNA, 15 bp, Homo sapiens
tactaagttaaacaa

SEQ ID NO: 416215 - DNA, 15 bp, Homo sapiens
ctactaagttaaaca

SEQ ID NO: 416216 - DNA, 15 bp, Homo sapiens
actactaagttaaac

SEQ ID NO: 416217 - DNA, 15 bp, Homo sapiens
aactactaagttaaa

SEQ ID NO: 416218 - DNA, 15 bp, Homo sapiens
caactactaagttaa

SEQ ID NO: 416219 - DNA, 15 bp, Homo sapiens
tcaactactaagtta

SEQ ID NO: 416220 - DNA, 15 bp, Homo sapiens
atcaactactaagtt

SEQ ID NO: 416221 - DNA, 15 bp, Homo sapiens
tatcaactactaagt

SEQ ID NO: 416222 - DNA, 15 bp, Homo sapiens
atatcaactactaag

SEQ ID NO: 416223 - DNA, 15 bp, Homo sapiens
catatcaactactaa

SEQ ID NO: 416224 - DNA, 15 bp, Homo sapiens
ccatatcaactacta

SEQ ID NO: 416225 - DNA, 15 bp, Homo sapiens
accatatcaactact

SEQ ID NO: 416226 - DNA, 15 bp, Homo sapiens
aaccatatcaactac

SEQ ID NO: 416227 - DNA, 15 bp, Homo sapiens
aaaccatatcaacta

SEQ ID NO: 416228 - DNA, 15 bp, Homo sapiens
caaaccatatcaact

SEQ ID NO: 416229 - DNA, 15 bp, Homo sapiens
ccaaaccatatcaac

SEQ ID NO: 416230 - DNA, 15 bp, Homo sapiens
gccaaaccatatcaa

SEQ ID NO: 416231 - DNA, 15 bp, Homo sapiens
ggacacagccaaacc

SEQ ID NO: 416232 - DNA, 15 bp, Homo sapiens
gggacacagccaaac

SEQ ID NO: 416233 - DNA, 15 bp, Homo sapiens
ggggacacagccaaa

SEQ ID NO: 416234 - DNA, 15 bp, Homo sapiens
tggggacacagccaa

SEQ ID NO: 416235 - DNA, 15 bp, Homo sapiens
ttggggacacagcca

SEQ ID NO: 416236 - DNA, 15 bp, Homo sapiens
gttggggacacagcc

SEQ ID NO: 416237 - DNA, 15 bp, Homo sapiens
ggttggggacacagc

SEQ ID NO: 416238 - DNA, 15 bp, Homo sapiens
tggttggggacacag

SEQ ID NO: 416239 - DNA, 15 bp, Homo sapiens
ttggttggggacaca

SEQ ID NO: 416240 - DNA, 15 bp, Homo sapiens
tttggttggggacac

SEQ ID NO: 416241 - DNA, 15 bp, Homo sapiens
atttggttggggaca

SEQ ID NO: 416242 - DNA, 15 bp, Homo sapiens
gatttggttggggac

SEQ ID NO: 416243 - DNA, 15 bp, Homo sapiens
agatttggttgggga

SEQ ID NO: 416244 - DNA, 15 bp, Homo sapiens
gagatttggttgggg

SEQ ID NO: 416245 - DNA, 15 bp, Homo sapiens
tgagatttggttggg

SEQ ID NO: 416246 - DNA, 15 bp, Homo sapiens
atgagatttggttgg

SEQ ID NO: 416247 - DNA, 15 bp, Homo sapiens
gatgagatttggttg

SEQ ID NO: 416248 - DNA, 15 bp, Homo sapiens
agatgagatttggtt

SEQ ID NO: 416249 - DNA, 15 bp, Homo sapiens
aagatgagatttggt

SEQ ID NO: 416250 - DNA, 15 bp, Homo sapiens
caagatgagatttgg

SEQ ID NO: 416251 - DNA, 15 bp, Homo sapiens
tcaagatgagatttg

SEQ ID NO: 416252 - DNA, 15 bp, Homo sapiens
ttcaagatgagattt

SEQ ID NO: 416253 - DNA, 15 bp, Homo sapiens
attcaagatgagatt

SEQ ID NO: 416254 - DNA, 15 bp, Homo sapiens
aattcaagatgagat

SEQ ID NO: 416255 - DNA, 15 bp, Homo sapiens
caattcaagatgaga

SEQ ID NO: 416256 - DNA, 15 bp, Homo sapiens
acaattcaagatgag

SEQ ID NO: 416257 - DNA, 15 bp, Homo sapiens
tacaattcaagatga

SEQ ID NO: 416258 - DNA, 15 bp, Homo sapiens
ttacaattcaagatg

SEQ ID NO: 416259 - DNA, 15 bp, Homo sapiens
attacaattcaagat

SEQ ID NO: 416260 - DNA, 15 bp, Homo sapiens
aattacaattcaaga

SEQ ID NO: 416261 - DNA, 15 bp, Homo sapiens
gaattacaattcaag

SEQ ID NO: 416262 - DNA, 15 bp, Homo sapiens
ggaattacaattcaa

SEQ ID NO: 416263 - DNA, 15 bp, Homo sapiens
cggaattacaattca

SEQ ID NO: 416264 - DNA, 15 bp, Homo sapiens
tcggaattacaattc

SEQ ID NO: 416265 - DNA, 15 bp, Homo sapiens
atcggaattacaatt

SEQ ID NO: 416266 - DNA, 15 bp, Homo sapiens
catcggaattacaat

SEQ ID NO: 416267 - DNA, 15 bp, Homo sapiens
acatcggaattacaa

SEQ ID NO: 416268 - DNA, 15 bp, Homo sapiens
cacatcggaattaca

SEQ ID NO: 416269 - DNA, 15 bp, Homo sapiens
acacatcggaattac

SEQ ID NO: 416270 - DNA, 15 bp, Homo sapiens
gacacatcggaatta

SEQ ID NO: 416271 - DNA, 15 bp, Homo sapiens
tgacacatcggaatt

SEQ ID NO: 416272 - DNA, 15 bp, Homo sapiens
atgacacatcggaat

SEQ ID NO: 416273 - DNA, 15 bp, Homo sapiens
catgacacatcggaa

SEQ ID NO: 416274 - DNA, 15 bp, Homo sapiens
ccatgacacatcgga

SEQ ID NO: 416275 - DNA, 15 bp, Homo sapiens
cccatgacacatcgg

SEQ ID NO: 416276 - DNA, 15 bp, Homo sapiens
tcccatgacacatcg

SEQ ID NO: 416277 - DNA, 15 bp, Homo sapiens
ctcccatgacacatc

SEQ ID NO: 416278 - DNA, 15 bp, Homo sapiens
cctcccatgacacat

SEQ ID NO: 416279 - DNA, 15 bp, Homo sapiens
tcctcccatgacaca

SEQ ID NO: 416280 - DNA, 15 bp, Homo sapiens
ctcctcccatgacac

SEQ ID NO: 416281 - DNA, 15 bp, Homo sapiens
cctcctcccatgaca

SEQ ID NO: 416282 - DNA, 15 bp, Homo sapiens
gcctcctcccatgac

SEQ ID NO: 416283 - DNA, 15 bp, Homo sapiens
agcctcctcccatga

SEQ ID NO: 416284 - DNA, 15 bp, Homo sapiens
cagcctcctcccatg

SEQ ID NO: 416285 - DNA, 15 bp, Homo sapiens
ccagcctcctcccat

SEQ ID NO: 416286 - DNA, 15 bp, Homo sapiens
tccagcctcctccca

SEQ ID NO: 416287 - DNA, 15 bp, Homo sapiens
ttccagcctcctccc

SEQ ID NO: 416288 - DNA, 15 bp, Homo sapiens
cttccagcctcctcc

SEQ ID NO: 416289 - DNA, 15 bp, Homo sapiens
ccttccagcctcctc

SEQ ID NO: 416290 - DNA, 15 bp, Homo sapiens
tccttccagcctcct

SEQ ID NO: 416291 - DNA, 15 bp, Homo sapiens
atccttccagcctcc

SEQ ID NO: 416292 - DNA, 15 bp, Homo sapiens
catccttccagcctc

SEQ ID NO: 416293 - DNA, 15 bp, Homo sapiens
gcatccttccagcct

SEQ ID NO: 416294 - DNA, 15 bp, Homo sapiens
tgcatccttccagcc

SEQ ID NO: 416295 - DNA, 15 bp, Homo sapiens
ttgcatccttccagc

SEQ ID NO: 416296 - DNA, 15 bp, Homo sapiens
gttgcatccttccag

SEQ ID NO: 416297 - DNA, 15 bp, Homo sapiens
agttgcatccttcca

SEQ ID NO: 416298 - DNA, 15 bp, Homo sapiens
cagttgcatccttcc

SEQ ID NO: 416299 - DNA, 15 bp, Homo sapiens
tcagttgcatccttc

SEQ ID NO: 416300 - DNA, 15 bp, Homo sapiens
ttcagttgcatcctt

SEQ ID NO: 416301 - DNA, 15 bp, Homo sapiens
attcagttgcatcct

SEQ ID NO: 416302 - DNA, 15 bp, Homo sapiens
aattcagttgcatcc

SEQ ID NO: 416303 - DNA, 15 bp, Homo sapiens
aaattcagttgcatc

SEQ ID NO: 416304 - DNA, 15 bp, Homo sapiens
aaaattcagttgcat

SEQ ID NO: 416305 - DNA, 15 bp, Homo sapiens
caaaattcagttgca

SEQ ID NO: 416306 - DNA, 15 bp, Homo sapiens
ccaaaattcagttgc

SEQ ID NO: 416307 - DNA, 15 bp, Homo sapiens
cccaaaattcagttg

SEQ ID NO: 416308 - DNA, 15 bp, Homo sapiens
ccccaaaattcagtt

SEQ ID NO: 416309 - DNA, 15 bp, Homo sapiens
cccccaaaattcagt

SEQ ID NO: 416310 - DNA, 15 bp, Homo sapiens
gcccccaaaattcag

SEQ ID NO: 416311 - DNA, 15 bp, Homo sapiens
tgcccccaaaattca

SEQ ID NO: 416312 - DNA, 15 bp, Homo sapiens
ctgcccccaaaattc

SEQ ID NO: 416313 - DNA, 15 bp, Homo sapiens
cctgcccccaaaatt

SEQ ID NO: 416314 - DNA, 15 bp, Homo sapiens
acctgcccccaaaat

SEQ ID NO: 416315 - DNA, 15 bp, Homo sapiens
gacctgcccccaaaa

SEQ ID NO: 416316 - DNA, 15 bp, Homo sapiens
agacctgcccccaaa

SEQ ID NO: 416317 - DNA, 15 bp, Homo sapiens
aagacctgcccccaa

SEQ ID NO: 416318 - DNA, 15 bp, Homo sapiens
aaagacctgccccca

SEQ ID NO: 416319 - DNA, 15 bp, Homo sapiens
gaaagacctgccccc

SEQ ID NO: 416320 - DNA, 15 bp, Homo sapiens
ggaaagacctgcccc

SEQ ID NO: 416321 - DNA, 15 bp, Homo sapiens
gggaaagacctgccc

SEQ ID NO: 416322 - DNA, 15 bp, Homo sapiens
tgggaaagacctgcc

SEQ ID NO: 416323 - DNA, 15 bp, Homo sapiens
atgggaaagacctgc

SEQ ID NO: 416324 - DNA, 15 bp, Homo sapiens
catgggaaagacctg

SEQ ID NO: 416325 - DNA, 15 bp, Homo sapiens
gcatgggaaagacct

SEQ ID NO: 416326 - DNA, 15 bp, Homo sapiens
agcatgggaaagacc

SEQ ID NO: 416327 - DNA, 15 bp, Homo sapiens
tagcatgggaaagac

SEQ ID NO: 416328 - DNA, 15 bp, Homo sapiens
atagcatgggaaaga

SEQ ID NO: 416329 - DNA, 15 bp, Homo sapiens
aatagcatgggaaag

SEQ ID NO: 416330 - DNA, 15 bp, Homo sapiens
gaatagcatgggaaa

SEQ ID NO: 416331 - DNA, 15 bp, Homo sapiens
agaatagcatgggaa

SEQ ID NO: 416332 - DNA, 15 bp, Homo sapiens
gagaatagcatggga

SEQ ID NO: 416333 - DNA, 15 bp, Homo sapiens
tgagaatagcatggg

SEQ ID NO: 416334 - DNA, 15 bp, Homo sapiens
atgagaatagcatgg

SEQ ID NO: 416335 - DNA, 15 bp, Homo sapiens
catgagaatagcatg

SEQ ID NO: 416336 - DNA, 15 bp, Homo sapiens
tcatgagaatagcat

SEQ ID NO: 416337 - DNA, 15 bp, Homo sapiens
gtcatgagaatagca

SEQ ID NO: 416338 - DNA, 15 bp, Homo sapiens
tgtcatgagaatagc

SEQ ID NO: 416339 - DNA, 15 bp, Homo sapiens
ctgtcatgagaatag

SEQ ID NO: 416340 - DNA, 15 bp, Homo sapiens
actgtcatgagaata

SEQ ID NO: 416341 - DNA, 15 bp, Homo sapiens
cactgtcatgagaat

SEQ ID NO: 416342 - DNA, 15 bp, Homo sapiens
tcactgtcatgagaa

SEQ ID NO: 416343 - DNA, 15 bp, Homo sapiens
ttcactgtcatgaga

SEQ ID NO: 416344 - DNA, 15 bp, Homo sapiens
attcactgtcatgag

SEQ ID NO: 416345 - DNA, 15 bp, Homo sapiens
tattcactgtcatga

SEQ ID NO: 416346 - DNA, 15 bp, Homo sapiens
ttattcactgtcatg

SEQ ID NO: 416347 - DNA, 15 bp, Homo sapiens
cttattcactgtcat

SEQ ID NO: 416348 - DNA, 15 bp, Homo sapiens
acttattcactgtca

SEQ ID NO: 416349 - DNA, 15 bp, Homo sapiens
gacttattcactgtc

SEQ ID NO: 416350 - DNA, 15 bp, Homo sapiens
agacttattcactgt

SEQ ID NO: 416351 - DNA, 15 bp, Homo sapiens
gagacttattcactg

SEQ ID NO: 416352 - DNA, 15 bp, Homo sapiens
tgagacttattcact

SEQ ID NO: 416353 - DNA, 15 bp, Homo sapiens
gtgagacttattcac

SEQ ID NO: 416354 - DNA, 15 bp, Homo sapiens
tgtgagacttattca

SEQ ID NO: 416355 - DNA, 15 bp, Homo sapiens
ttgtgagacttattc

SEQ ID NO: 416356 - DNA, 15 bp, Homo sapiens
cttgtgagacttatt

SEQ ID NO: 416357 - DNA, 15 bp, Homo sapiens
tcttgtgagacttat

SEQ ID NO: 416358 - DNA, 15 bp, Homo sapiens
atcttgtgagactta

SEQ ID NO: 416359 - DNA, 15 bp, Homo sapiens
gatcttgtgagactt

SEQ ID NO: 416360 - DNA, 15 bp, Homo sapiens
agatcttgtgagact

SEQ ID NO: 416361 - DNA, 15 bp, Homo sapiens
cagatcttgtgagac

SEQ ID NO: 416362 - DNA, 15 bp, Homo sapiens
tcagatcttgtgaga

SEQ ID NO: 416363 - DNA, 15 bp, Homo sapiens
gtcagatcttgtgag

SEQ ID NO: 416364 - DNA, 15 bp, Homo sapiens
tgtcagatcttgtga

SEQ ID NO: 416365 - DNA, 15 bp, Homo sapiens
ctgtcagatcttgtg

SEQ ID NO: 416366 - DNA, 15 bp, Homo sapiens
actgtcagatcttgt

SEQ ID NO: 416367 - DNA, 15 bp, Homo sapiens
aactgtcagatcttg

SEQ ID NO: 416368 - DNA, 15 bp, Homo sapiens
aaactgtcagatctt

SEQ ID NO: 416369 - DNA, 15 bp, Homo sapiens
aaaactgtcagatct

SEQ ID NO: 416370 - DNA, 15 bp, Homo sapiens
taaaactgtcagatc

SEQ ID NO: 416371 - DNA, 15 bp, Homo sapiens
ttaaaactgtcagat

SEQ ID NO: 416372 - DNA, 15 bp, Homo sapiens
tttaaaactgtcaga

SEQ ID NO: 416373 - DNA, 15 bp, Homo sapiens
ttttaaaactgtcag

SEQ ID NO: 416374 - DNA, 15 bp, Homo sapiens
tttttaaaactgtca

SEQ ID NO: 416375 - DNA, 15 bp, Homo sapiens
ttttttaaaactgtc

SEQ ID NO: 416376 - DNA, 15 bp, Homo sapiens
tttttttaaaactgt

SEQ ID NO: 416377 - DNA, 15 bp, Homo sapiens
gtttttttaaaactg

SEQ ID NO: 416378 - DNA, 15 bp, Homo sapiens
tgtttttttaaaact

SEQ ID NO: 416379 - DNA, 15 bp, Homo sapiens
ctgtttttttaaaac

SEQ ID NO: 416380 - DNA, 15 bp, Homo sapiens
cctgtttttttaaaa

SEQ ID NO: 416381 - DNA, 15 bp, Homo sapiens
ccctgtttttttaaa

SEQ ID NO: 416382 - DNA, 15 bp, Homo sapiens
cccctgtttttttaa

SEQ ID NO: 416383 - DNA, 15 bp, Homo sapiens
acccctgttttttta

SEQ ID NO: 416384 - DNA, 15 bp, Homo sapiens
aacccctgttttttt

SEQ ID NO: 416385 - DNA, 15 bp, Homo sapiens
aaacccctgtttttt

SEQ ID NO: 416386 - DNA, 15 bp, Homo sapiens
aaaacccctgttttt

SEQ ID NO: 416387 - DNA, 15 bp, Homo sapiens
gaaaacccctgtttt

SEQ ID NO: 416388 - DNA, 15 bp, Homo sapiens
ggaaaacccctgttt

SEQ ID NO: 416389 - DNA, 15 bp, Homo sapiens
aggaaaacccctgtt

SEQ ID NO: 416390 - DNA, 15 bp, Homo sapiens
caggaaaacccctgt

SEQ ID NO: 416391 - DNA, 15 bp, Homo sapiens
gcaggaaaacccctg

SEQ ID NO: 416392 - DNA, 15 bp, Homo sapiens
tgcaggaaaacccct

SEQ ID NO: 416393 - DNA, 15 bp, Homo sapiens
gtgcaggaaaacccc

SEQ ID NO: 416394 - DNA, 15 bp, Homo sapiens
tgtgcaggaaaaccc

SEQ ID NO: 416395 - DNA, 15 bp, Homo sapiens
ttgtgcaggaaaacc

SEQ ID NO: 416396 - DNA, 15 bp, Homo sapiens
cttgtgcaggaaaac

SEQ ID NO: 416397 - DNA, 15 bp, Homo sapiens
gcttgtgcaggaaaa

SEQ ID NO: 416398 - DNA, 15 bp, Homo sapiens
agcttgtgcaggaaa

SEQ ID NO: 416399 - DNA, 15 bp, Homo sapiens
gagcttgtgcaggaa

SEQ ID NO: 416400 - DNA, 15 bp, Homo sapiens
agagcttgtgcagga

SEQ ID NO: 416401 - DNA, 15 bp, Homo sapiens
gagagcttgtgcagg

SEQ ID NO: 416402 - DNA, 15 bp, Homo sapiens
agagagcttgtgcag

SEQ ID NO: 416403 - DNA, 15 bp, Homo sapiens
aagagagcttgtgca

SEQ ID NO: 416404 - DNA, 15 bp, Homo sapiens
caagagagcttgtgc

SEQ ID NO: 416405 - DNA, 15 bp, Homo sapiens
acaagagagcttgtg

SEQ ID NO: 416406 - DNA, 15 bp, Homo sapiens
gacaagagagcttgt

SEQ ID NO: 416407 - DNA, 15 bp, Homo sapiens
agacaagagagcttg

SEQ ID NO: 416408 - DNA, 15 bp, Homo sapiens
aagacaagagagctt

SEQ ID NO: 416409 - DNA, 15 bp, Homo sapiens
caagacaagagagct

SEQ ID NO: 416410 - DNA, 15 bp, Homo sapiens
acaagacaagagagc

SEQ ID NO: 416411 - DNA, 15 bp, Homo sapiens
gacaagacaagagag

SEQ ID NO: 416412 - DNA, 15 bp, Homo sapiens
agacaagacaagaga

SEQ ID NO: 416413 - DNA, 15 bp, Homo sapiens
cagacaagacaagag

SEQ ID NO: 416414 - DNA, 15 bp, Homo sapiens
gcagacaagacaaga

SEQ ID NO: 416415 - DNA, 15 bp, Homo sapiens
ggcagacaagacaag

SEQ ID NO: 416416 - DNA, 15 bp, Homo sapiens
tggcagacaagacaa

SEQ ID NO: 416417 - DNA, 15 bp, Homo sapiens
gtggcagacaagaca

SEQ ID NO: 416418 - DNA, 15 bp, Homo sapiens
ggtggcagacaagac

SEQ ID NO: 416419 - DNA, 15 bp, Homo sapiens
tggtggcagacaaga

SEQ ID NO: 416420 - DNA, 15 bp, Homo sapiens
atggtggcagacaag

SEQ ID NO: 416421 - DNA, 15 bp, Homo sapiens
catggtggcagacaa

SEQ ID NO: 416422 - DNA, 15 bp, Homo sapiens
acatggtggcagaca

SEQ ID NO: 416423 - DNA, 15 bp, Homo sapiens
cacatggtggcagac

SEQ ID NO: 416424 - DNA, 15 bp, Homo sapiens
tcacatggtggcaga

SEQ ID NO: 416425 - DNA, 15 bp, Homo sapiens
ctcacatggtggcag

SEQ ID NO: 416426 - DNA, 15 bp, Homo sapiens
tctcacatggtggca

SEQ ID NO: 416427 - DNA, 15 bp, Homo sapiens
gtctcacatggtggc

SEQ ID NO: 416428 - DNA, 15 bp, Homo sapiens
cgtctcacatggtgg

SEQ ID NO: 416429 - DNA, 15 bp, Homo sapiens
acgtctcacatggtg

SEQ ID NO: 416430 - DNA, 15 bp, Homo sapiens
cacgtctcacatggt

SEQ ID NO: 416431 - DNA, 15 bp, Homo sapiens
acacgtctcacatgg

SEQ ID NO: 416432 - DNA, 15 bp, Homo sapiens
gacacgtctcacatg

SEQ ID NO: 416433 - DNA, 15 bp, Homo sapiens
agacacgtctcacat

SEQ ID NO: 416434 - DNA, 15 bp, Homo sapiens
aagacacgtctcaca

SEQ ID NO: 416435 - DNA, 15 bp, Homo sapiens
aaagacacgtctcac

SEQ ID NO: 416436 - DNA, 15 bp, Homo sapiens
gaaagacacgtctca

SEQ ID NO: 416437 - DNA, 15 bp, Homo sapiens
tgaaagacacgtctc

SEQ ID NO: 416438 - DNA, 15 bp, Homo sapiens
gtgaaagacacgtct

SEQ ID NO: 416439 - DNA, 15 bp, Homo sapiens
ggtgaaagacacgtc

SEQ ID NO: 416440 - DNA, 15 bp, Homo sapiens
aggtgaaagacacgt

SEQ ID NO: 416441 - DNA, 15 bp, Homo sapiens
aaggtgaaagacacg

SEQ ID NO: 416442 - DNA, 15 bp, Homo sapiens
gaaggtgaaagacac

SEQ ID NO: 416443 - DNA, 15 bp, Homo sapiens
agaaggtgaaagaca

SEQ ID NO: 416444 - DNA, 15 bp, Homo sapiens
cagaaggtgaaagac

SEQ ID NO: 416445 - DNA, 15 bp, Homo sapiens
gcagaaggtgaaaga

SEQ ID NO: 416446 - DNA, 15 bp, Homo sapiens
ggcagaaggtgaaag

SEQ ID NO: 416447 - DNA, 15 bp, Homo sapiens
tggcagaaggtgaaa

SEQ ID NO: 416448 - DNA, 15 bp, Homo sapiens
atggcagaaggtgaa

SEQ ID NO: 416449 - DNA, 15 bp, Homo sapiens
catggcagaaggtga

SEQ ID NO: 416450 - DNA, 15 bp, Homo sapiens
tcatggcagaaggtg

SEQ ID NO: 416451 - DNA, 15 bp, Homo sapiens
atcatggcagaaggt

SEQ ID NO: 416452 - DNA, 15 bp, Homo sapiens
aatcatggcagaagg

SEQ ID NO: 416453 - DNA, 15 bp, Homo sapiens
caatcatggcagaag

SEQ ID NO: 416454 - DNA, 15 bp, Homo sapiens
acaatcatggcagaa

SEQ ID NO: 416455 - DNA, 15 bp, Homo sapiens
cacaatcatggcaga

SEQ ID NO: 416456 - DNA, 15 bp, Homo sapiens
tcacaatcatggcag

SEQ ID NO: 416457 - DNA, 15 bp, Homo sapiens
ctcacaatcatggca

SEQ ID NO: 416458 - DNA, 15 bp, Homo sapiens
cctcacaatcatggc

SEQ ID NO: 416459 - DNA, 15 bp, Homo sapiens
gcctcacaatcatgg

SEQ ID NO: 416460 - DNA, 15 bp, Homo sapiens
agcctcacaatcatg

SEQ ID NO: 416461 - DNA, 15 bp, Homo sapiens
aagcctcacaatcat

SEQ ID NO: 416462 - DNA, 15 bp, Homo sapiens
aaagcctcacaatca

SEQ ID NO: 416463 - DNA, 15 bp, Homo sapiens
gaaagcctcacaatc

SEQ ID NO: 416464 - DNA, 15 bp, Homo sapiens
ggaaagcctcacaat

SEQ ID NO: 416465 - DNA, 15 bp, Homo sapiens
gggaaagcctcacaa

SEQ ID NO: 416466 - DNA, 15 bp, Homo sapiens
tgggaaagcctcaca

SEQ ID NO: 416467 - DNA, 15 bp, Homo sapiens
ctgggaaagcctcac

SEQ ID NO: 416468 - DNA, 15 bp, Homo sapiens
gctgggaaagcctca

SEQ ID NO: 416469 - DNA, 15 bp, Homo sapiens
ggctgggaaagcctc

SEQ ID NO: 416470 - DNA, 15 bp, Homo sapiens
tggctgggaaagcct

SEQ ID NO: 416471 - DNA, 15 bp, Homo sapiens
gtggctgggaaagcc

SEQ ID NO: 416472 - DNA, 15 bp, Homo sapiens
cgtggctgggaaagc

SEQ ID NO: 416473 - DNA, 15 bp, Homo sapiens
acgtggctgggaaag

SEQ ID NO: 416474 - DNA, 15 bp, Homo sapiens
tacgtggctgggaaa

SEQ ID NO: 416475 - DNA, 15 bp, Homo sapiens
ctacgtggctgggaa

SEQ ID NO: 416476 - DNA, 15 bp, Homo sapiens
tctacgtggctggga

SEQ ID NO: 416477 - DNA, 15 bp, Homo sapiens
ttctacgtggctggg

SEQ ID NO: 416478 - DNA, 15 bp, Homo sapiens
gttctacgtggctgg

SEQ ID NO: 416479 - DNA, 15 bp, Homo sapiens
agttctacgtggctg

SEQ ID NO: 416480 - DNA, 15 bp, Homo sapiens
cagttctacgtggct

SEQ ID NO: 416481 - DNA, 15 bp, Homo sapiens
acagttctacgtggc

SEQ ID NO: 416482 - DNA, 15 bp, Homo sapiens
tacagttctacgtgg

SEQ ID NO: 416483 - DNA, 15 bp, Homo sapiens
ttacagttctacgtg

SEQ ID NO: 416484 - DNA, 15 bp, Homo sapiens
cttacagttctacgt

SEQ ID NO: 416485 - DNA, 15 bp, Homo sapiens
acttacagttctacg

SEQ ID NO: 416486 - DNA, 15 bp, Homo sapiens
gacttacagttctac

SEQ ID NO: 416487 - DNA, 15 bp, Homo sapiens
ggacttacagttcta

SEQ ID NO: 416488 - DNA, 15 bp, Homo sapiens
tggacttacagttct

SEQ ID NO: 416489 - DNA, 15 bp, Homo sapiens
ttggacttacagttc

SEQ ID NO: 416490 - DNA, 15 bp, Homo sapiens
attggacttacagtt

SEQ ID NO: 416491 - DNA, 15 bp, Homo sapiens
tattggacttacagt

SEQ ID NO: 416492 - DNA, 15 bp, Homo sapiens
ttattggacttacag

SEQ ID NO: 416493 - DNA, 15 bp, Homo sapiens
tttattggacttaca

SEQ ID NO: 416494 - DNA, 15 bp, Homo sapiens
atttattggacttac

SEQ ID NO: 416495 - DNA, 15 bp, Homo sapiens
gatttattggactta

SEQ ID NO: 416496 - DNA, 15 bp, Homo sapiens
agatttattggactt

SEQ ID NO: 416497 - DNA, 15 bp, Homo sapiens
gagatttattggact

SEQ ID NO: 416498 - DNA, 15 bp, Homo sapiens
agagatttattggac

SEQ ID NO: 416499 - DNA, 15 bp, Homo sapiens
aagagatttattgga

SEQ ID NO: 416500 - DNA, 15 bp, Homo sapiens
taagagatttattgg

SEQ ID NO: 416501 - DNA, 15 bp, Homo sapiens
gtaagagatttattg

SEQ ID NO: 416502 - DNA, 15 bp, Homo sapiens
agtaagagatttatt

SEQ ID NO: 416503 - DNA, 15 bp, Homo sapiens
aagtaagagatttat

SEQ ID NO: 416504 - DNA, 15 bp, Homo sapiens
aaagtaagagattta

SEQ ID NO: 416505 - DNA, 15 bp, Homo sapiens
aaaagtaagagattt

SEQ ID NO: 416506 - DNA, 15 bp, Homo sapiens
caaaagtaagagatt

SEQ ID NO: 416507 - DNA, 15 bp, Homo sapiens
acaaaagtaagagat

SEQ ID NO: 416508 - DNA, 15 bp, Homo sapiens
tacaaaagtaagaga

SEQ ID NO: 416509 - DNA, 15 bp, Homo sapiens
ttacaaaagtaagag

SEQ ID NO: 416510 - DNA, 15 bp, Homo sapiens
tttacaaaagtaaga

SEQ ID NO: 416511 - DNA, 15 bp, Homo sapiens
atttacaaaagtaag

SEQ ID NO: 416512 - DNA, 15 bp, Homo sapiens
aatttacaaaagtaa

SEQ ID NO: 416513 - DNA, 15 bp, Homo sapiens
taatttacaaaagta

SEQ ID NO: 416514 - DNA, 15 bp, Homo sapiens
gtaatttacaaaagt

SEQ ID NO: 416515 - DNA, 15 bp, Homo sapiens
ggtaatttacaaaag

SEQ ID NO: 416516 - DNA, 15 bp, Homo sapiens
gggtaatttacaaaa

SEQ ID NO: 416517 - DNA, 15 bp, Homo sapiens
tgggtaatttacaaa

SEQ ID NO: 416518 - DNA, 15 bp, Homo sapiens
ctgggtaatttacaa

SEQ ID NO: 416519 - DNA, 15 bp, Homo sapiens
actgggtaatttaca

SEQ ID NO: 416520 - DNA, 15 bp, Homo sapiens
gactgggtaatttac

SEQ ID NO: 416521 - DNA, 15 bp, Homo sapiens
tgagactgggtaatt

SEQ ID NO: 416522 - DNA, 15 bp, Homo sapiens
ctgagactgggtaat

SEQ ID NO: 416523 - DNA, 15 bp, Homo sapiens
cctgagactgggtaa

SEQ ID NO: 416524 - DNA, 15 bp, Homo sapiens
acctgagactgggta

SEQ ID NO: 416525 - DNA, 15 bp, Homo sapiens
tacctgagactgggt

SEQ ID NO: 416526 - DNA, 15 bp, Homo sapiens
atacctgagactggg

SEQ ID NO: 416527 - DNA, 15 bp, Homo sapiens
catacctgagactgg

SEQ ID NO: 416528 - DNA, 15 bp, Homo sapiens
acatacctgagactg

SEQ ID NO: 416529 - DNA, 15 bp, Homo sapiens
gacatacctgagact

SEQ ID NO: 416530 - DNA, 15 bp, Homo sapiens
agacatacctgagac

SEQ ID NO: 416531 - DNA, 15 bp, Homo sapiens
aagacatacctgaga

SEQ ID NO: 416532 - DNA, 15 bp, Homo sapiens
aaagacatacctgag

SEQ ID NO: 416533 - DNA, 15 bp, Homo sapiens
taaagacatacctga

SEQ ID NO: 416534 - DNA, 15 bp, Homo sapiens
ataaagacatacctg

SEQ ID NO: 416535 - DNA, 15 bp, Homo sapiens
gataaagacatacct

SEQ ID NO: 416536 - DNA, 15 bp, Homo sapiens
tgataaagacatacc

SEQ ID NO: 416537 - DNA, 15 bp, Homo sapiens
ctgataaagacatac

SEQ ID NO: 416538 - DNA, 15 bp, Homo sapiens
gctgataaagacata

SEQ ID NO: 416539 - DNA, 15 bp, Homo sapiens
tgctgataaagacat

SEQ ID NO: 416540 - DNA, 15 bp, Homo sapiens
ctgctgataaagaca

SEQ ID NO: 416541 - DNA, 15 bp, Homo sapiens
actgctgataaagac

SEQ ID NO: 416542 - DNA, 15 bp, Homo sapiens
cactgctgataaaga

SEQ ID NO: 416543 - DNA, 15 bp, Homo sapiens
acactgctgataaag

SEQ ID NO: 416544 - DNA, 15 bp, Homo sapiens
tacactgctgataaa

SEQ ID NO: 416545 - DNA, 15 bp, Homo sapiens
ttacactgctgataa

SEQ ID NO: 416546 - DNA, 15 bp, Homo sapiens
tttacactgctgata

SEQ ID NO: 416547 - DNA, 15 bp, Homo sapiens
ttttacactgctgat

SEQ ID NO: 416548 - DNA, 15 bp, Homo sapiens
cttttacactgctga

SEQ ID NO: 416549 - DNA, 15 bp, Homo sapiens
acttttacactgctg

SEQ ID NO: 416550 - DNA, 15 bp, Homo sapiens
cacttttacactgct

SEQ ID NO: 416551 - DNA, 15 bp, Homo sapiens
ccacttttacactgc

SEQ ID NO: 416552 - DNA, 15 bp, Homo sapiens
tccacttttacactg

SEQ ID NO: 416553 - DNA, 15 bp, Homo sapiens
gtccacttttacact

SEQ ID NO: 416554 - DNA, 15 bp, Homo sapiens
agtccacttttacac

SEQ ID NO: 416555 - DNA, 15 bp, Homo sapiens
tagtccacttttaca

SEQ ID NO: 416556 - DNA, 15 bp, Homo sapiens
ttagtccacttttac

SEQ ID NO: 416557 - DNA, 15 bp, Homo sapiens
attagtccactttta

SEQ ID NO: 416558 - DNA, 15 bp, Homo sapiens
tattagtccactttt

SEQ ID NO: 416559 - DNA, 15 bp, Homo sapiens
gtattagtccacttt

SEQ ID NO: 416560 - DNA, 15 bp, Homo sapiens
tgtattagtccactt

SEQ ID NO: 416561 - DNA, 15 bp, Homo sapiens
ctgtattagtccact

SEQ ID NO: 416562 - DNA, 15 bp, Homo sapiens
actgtattagtccac

SEQ ID NO: 416563 - DNA, 15 bp, Homo sapiens
tactgtattagtcca

SEQ ID NO: 416564 - DNA, 15 bp, Homo sapiens
ttactgtattagtcc

SEQ ID NO: 416565 - DNA, 15 bp, Homo sapiens
gttactgtattagtc

SEQ ID NO: 416566 - DNA, 15 bp, Homo sapiens
agttactgtattagt

SEQ ID NO: 416567 - DNA, 15 bp, Homo sapiens
aagttactgtattag

SEQ ID NO: 416568 - DNA, 15 bp, Homo sapiens
aaagttactgtatta

SEQ ID NO: 416569 - DNA, 15 bp, Homo sapiens
taaagttactgtatt

SEQ ID NO: 416570 - DNA, 15 bp, Homo sapiens
ataaagttactgtat

SEQ ID NO: 416571 - DNA, 15 bp, Homo sapiens
tataaagttactgta

SEQ ID NO: 416572 - DNA, 15 bp, Homo sapiens
ttataaagttactgt

SEQ ID NO: 416573 - DNA, 15 bp, Homo sapiens
attataaagttactg

SEQ ID NO: 416574 - DNA, 15 bp, Homo sapiens
cattataaagttact

SEQ ID NO: 416575 - DNA, 15 bp, Homo sapiens
tcattataaagttac

SEQ ID NO: 416576 - DNA, 15 bp, Homo sapiens
atcattataaagtta

SEQ ID NO: 416577 - DNA, 15 bp, Homo sapiens
gatcattataaagtt

SEQ ID NO: 416578 - DNA, 15 bp, Homo sapiens
agatcattataaagt

SEQ ID NO: 416579 - DNA, 15 bp, Homo sapiens
cagatcattataaag

SEQ ID NO: 416580 - DNA, 15 bp, Homo sapiens
acagatcattataaa

SEQ ID NO: 416581 - DNA, 15 bp, Homo sapiens
aacagatcattataa

SEQ ID NO: 416582 - DNA, 15 bp, Homo sapiens
aaacagatcattata

SEQ ID NO: 416583 - DNA, 15 bp, Homo sapiens
gaaacagatcattat

SEQ ID NO: 416584 - DNA, 15 bp, Homo sapiens
tgaaacagatcatta

SEQ ID NO: 416585 - DNA, 15 bp, Homo sapiens
atgaaacagatcatt

SEQ ID NO: 416586 - DNA, 15 bp, Homo sapiens
tatgaaacagatcat

SEQ ID NO: 416587 - DNA, 15 bp, Homo sapiens
gtatgaaacagatca

SEQ ID NO: 416588 - DNA, 15 bp, Homo sapiens
tgtatgaaacagatc

SEQ ID NO: 416589 - DNA, 15 bp, Homo sapiens
gtgtatgaaacagat

SEQ ID NO: 416590 - DNA, 15 bp, Homo sapiens
agtgtatgaaacaga

SEQ ID NO: 416591 - DNA, 15 bp, Homo sapiens
cagtgtatgaaacag

SEQ ID NO: 416592 - DNA, 15 bp, Homo sapiens
gcagtgtatgaaaca

SEQ ID NO: 416593 - DNA, 15 bp, Homo sapiens
agcagtgtatgaaac

SEQ ID NO: 416594 - DNA, 15 bp, Homo sapiens
tagcagtgtatgaaa

SEQ ID NO: 416595 - DNA, 15 bp, Homo sapiens
ttagcagtgtatgaa

SEQ ID NO: 416596 - DNA, 15 bp, Homo sapiens
tttagcagtgtatga

SEQ ID NO: 416597 - DNA, 15 bp, Homo sapiens
atttagcagtgtatg

SEQ ID NO: 416598 - DNA, 15 bp, Homo sapiens
aatttagcagtgtat

SEQ ID NO: 416599 - DNA, 15 bp, Homo sapiens
aaatttagcagtgta

SEQ ID NO: 416600 - DNA, 15 bp, Homo sapiens
gaaatttagcagtgt

SEQ ID NO: 416601 - DNA, 15 bp, Homo sapiens
ggaaatttagcagtg

SEQ ID NO: 416602 - DNA, 15 bp, Homo sapiens
aggaaatttagcagt

SEQ ID NO: 416603 - DNA, 15 bp, Homo sapiens
taggaaatttagcag

SEQ ID NO: 416604 - DNA, 15 bp, Homo sapiens
ttaggaaatttagca

SEQ ID NO: 416605 - DNA, 15 bp, Homo sapiens
attaggaaatttagc

SEQ ID NO: 416606 - DNA, 15 bp, Homo sapiens
cattaggaaatttag

SEQ ID NO: 416607 - DNA, 15 bp, Homo sapiens
gcattaggaaattta

SEQ ID NO: 416608 - DNA, 15 bp, Homo sapiens
tgcattaggaaattt

SEQ ID NO: 416609 - DNA, 15 bp, Homo sapiens
ctgcattaggaaatt

SEQ ID NO: 416610 - DNA, 15 bp, Homo sapiens
tctgcattaggaaat

SEQ ID NO: 416611 - DNA, 15 bp, Homo sapiens
atctgcattaggaaa

SEQ ID NO: 416612 - DNA, 15 bp, Homo sapiens
tatctgcattaggaa

SEQ ID NO: 416613 - DNA, 15 bp, Homo sapiens
ttatctgcattagga

SEQ ID NO: 416614 - DNA, 15 bp, Homo sapiens
gttatctgcattagg

SEQ ID NO: 416615 - DNA, 15 bp, Homo sapiens
tgttatctgcattag

SEQ ID NO: 416616 - DNA, 15 bp, Homo sapiens
gtgttatctgcatta

SEQ ID NO: 416617 - DNA, 15 bp, Homo sapiens
agtgttatctgcatt

SEQ ID NO: 416618 - DNA, 15 bp, Homo sapiens
cagtgttatctgcat

SEQ ID NO: 416619 - DNA, 15 bp, Homo sapiens
gcagtgttatctgca

SEQ ID NO: 416620 - DNA, 15 bp, Homo sapiens
ggcagtgttatctgc

SEQ ID NO: 416621 - DNA, 15 bp, Homo sapiens
aggcagtgttatctg

SEQ ID NO: 416622 - DNA, 15 bp, Homo sapiens
aaggcagtgttatct

SEQ ID NO: 416623 - DNA, 15 bp, Homo sapiens
caaggcagtgttatc

SEQ ID NO: 416624 - DNA, 15 bp, Homo sapiens
gcaaggcagtgttat

SEQ ID NO: 416625 - DNA, 15 bp, Homo sapiens
tgcaaggcagtgtta

SEQ ID NO: 416626 - DNA, 15 bp, Homo sapiens
atgcaaggcagtgtt

SEQ ID NO: 416627 - DNA, 15 bp, Homo sapiens
tatgcaaggcagtgt

SEQ ID NO: 416628 - DNA, 15 bp, Homo sapiens
atatgcaaggcagtg

SEQ ID NO: 416629 - DNA, 15 bp, Homo sapiens
tatatgcaaggcagt

SEQ ID NO: 416630 - DNA, 15 bp, Homo sapiens
ttatatgcaaggcag

SEQ ID NO: 416631 - DNA, 15 bp, Homo sapiens
gttatatgcaaggca

SEQ ID NO: 416632 - DNA, 15 bp, Homo sapiens
tgttatatgcaaggc

SEQ ID NO: 416633 - DNA, 15 bp, Homo sapiens
ctgttatatgcaagg

SEQ ID NO: 416634 - DNA, 15 bp, Homo sapiens
cctgttatatgcaag

SEQ ID NO: 416635 - DNA, 15 bp, Homo sapiens
acctgttatatgcaa

SEQ ID NO: 416636 - DNA, 15 bp, Homo sapiens
cacctgttatatgca

SEQ ID NO: 416637 - DNA, 15 bp, Homo sapiens
acacctgttatatgc

SEQ ID NO: 416638 - DNA, 15 bp, Homo sapiens
aacacctgttatatg

SEQ ID NO: 416639 - DNA, 15 bp, Homo sapiens
gaacacctgttatat

SEQ ID NO: 416640 - DNA, 15 bp, Homo sapiens
tgaacacctgttata

SEQ ID NO: 416641 - DNA, 15 bp, Homo sapiens
ttgaacacctgttat

SEQ ID NO: 416642 - DNA, 15 bp, Homo sapiens
attgaacacctgtta

SEQ ID NO: 416643 - DNA, 15 bp, Homo sapiens
tattgaacacctgtt

SEQ ID NO: 416644 - DNA, 15 bp, Homo sapiens
ttattgaacacctgt

SEQ ID NO: 416645 - DNA, 15 bp, Homo sapiens
tttattgaacacctg

SEQ ID NO: 416646 - DNA, 15 bp, Homo sapiens
atttattgaacacct

SEQ ID NO: 416647 - DNA, 15 bp, Homo sapiens
tatttattgaacacc

SEQ ID NO: 416648 - DNA, 15 bp, Homo sapiens
ttatttattgaacac

SEQ ID NO: 416649 - DNA, 15 bp, Homo sapiens
attatttattgaaca

SEQ ID NO: 416650 - DNA, 15 bp, Homo sapiens
aattatttattgaac

SEQ ID NO: 416651 - DNA, 15 bp, Homo sapiens
caattatttattgaa

SEQ ID NO: 416652 - DNA, 15 bp, Homo sapiens
acaattatttattga

SEQ ID NO: 416653 - DNA, 15 bp, Homo sapiens
aacaattatttattg

SEQ ID NO: 416654 - DNA, 15 bp, Homo sapiens
aaacaattatttatt

SEQ ID NO: 416655 - DNA, 15 bp, Homo sapiens
taaacaattatttat

SEQ ID NO: 416656 - DNA, 15 bp, Homo sapiens
ttaaacaattattta

SEQ ID NO: 416657 - DNA, 15 bp, Homo sapiens
tttaaacaattattt

SEQ ID NO: 416658 - DNA, 15 bp, Homo sapiens
ttttaaacaattatt

SEQ ID NO: 416659 - DNA, 15 bp, Homo sapiens
tttttaaacaattat

SEQ ID NO: 416660 - DNA, 15 bp, Homo sapiens
atttttaaacaatta

SEQ ID NO: 416661 - DNA, 15 bp, Homo sapiens
catttttaaacaatt

SEQ ID NO: 416662 - DNA, 15 bp, Homo sapiens
tcatttttaaacaat

SEQ ID NO: 416663 - DNA, 15 bp, Homo sapiens
gtcatttttaaacaa

SEQ ID NO: 416664 - DNA, 15 bp, Homo sapiens
agtcatttttaaaca

SEQ ID NO: 416665 - DNA, 15 bp, Homo sapiens
aagtcatttttaaac

SEQ ID NO: 416666 - DNA, 15 bp, Homo sapiens
caagtcatttttaaa

SEQ ID NO: 416667 - DNA, 15 bp, Homo sapiens
acaagtcatttttaa

SEQ ID NO: 416668 - DNA, 15 bp, Homo sapiens
aacaagtcattttta

SEQ ID NO: 416669 - DNA, 15 bp, Homo sapiens
aaacaagtcattttt

SEQ ID NO: 416670 - DNA, 15 bp, Homo sapiens
caaacaagtcatttt

SEQ ID NO: 416671 - DNA, 15 bp, Homo sapiens
ccaaacaagtcattt

SEQ ID NO: 416672 - DNA, 15 bp, Homo sapiens
gccaaacaagtcatt

SEQ ID NO: 416673 - DNA, 15 bp, Homo sapiens
tgccaaacaagtcat

SEQ ID NO: 416674 - DNA, 15 bp, Homo sapiens
gtgccaaacaagtca

SEQ ID NO: 416675 - DNA, 15 bp, Homo sapiens
tgtgccaaacaagtc

SEQ ID NO: 416676 - DNA, 15 bp, Homo sapiens
ttgtgccaaacaagt

SEQ ID NO: 416677 - DNA, 15 bp, Homo sapiens
cttgtgccaaacaag

SEQ ID NO: 416678 - DNA, 15 bp, Homo sapiens
acttgtgccaaacaa

SEQ ID NO: 416679 - DNA, 15 bp, Homo sapiens
aacttgtgccaaaca

SEQ ID NO: 416680 - DNA, 15 bp, Homo sapiens
aaacttgtgccaaac

SEQ ID NO: 416681 - DNA, 15 bp, Homo sapiens
aaaacttgtgccaaa

SEQ ID NO: 416682 - DNA, 15 bp, Homo sapiens
taaaacttgtgccaa

SEQ ID NO: 416683 - DNA, 15 bp, Homo sapiens
ttaaaacttgtgcca

SEQ ID NO: 416684 - DNA, 15 bp, Homo sapiens
tttaaaacttgtgcc

SEQ ID NO: 416685 - DNA, 15 bp, Homo sapiens
atttaaaacttgtgc

SEQ ID NO: 416686 - DNA, 15 bp, Homo sapiens
tatttaaaacttgtg

SEQ ID NO: 416687 - DNA, 15 bp, Homo sapiens
ttatttaaaacttgt

SEQ ID NO: 416688 - DNA, 15 bp, Homo sapiens
gttatttaaaacttg

SEQ ID NO: 416689 - DNA, 15 bp, Homo sapiens
agttatttaaaactt

SEQ ID NO: 416690 - DNA, 15 bp, Homo sapiens
cagttatttaaaact

SEQ ID NO: 416691 - DNA, 15 bp, Homo sapiens
tcagttatttaaaac

SEQ ID NO: 416692 - DNA, 15 bp, Homo sapiens
ttcagttatttaaaa

SEQ ID NO: 416693 - DNA, 15 bp, Homo sapiens
tttcagttatttaaa

SEQ ID NO: 416694 - DNA, 15 bp, Homo sapiens
gtttcagttatttaa

SEQ ID NO: 416695 - DNA, 15 bp, Homo sapiens
tgtttcagttattta

SEQ ID NO: 416696 - DNA, 15 bp, Homo sapiens
atgtttcagttattt

SEQ ID NO: 416697 - DNA, 15 bp, Homo sapiens
catgtttcagttatt

SEQ ID NO: 416698 - DNA, 15 bp, Homo sapiens
acatgtttcagttat

SEQ ID NO: 416699 - DNA, 15 bp, Homo sapiens
tacatgtttcagtta

SEQ ID NO: 416700 - DNA, 15 bp, Homo sapiens
ctacatgtttcagtt

SEQ ID NO: 416701 - DNA, 15 bp, Homo sapiens
tctacatgtttcagt

SEQ ID NO: 416702 - DNA, 15 bp, Homo sapiens
ttctacatgtttcag

SEQ ID NO: 416703 - DNA, 15 bp, Homo sapiens
cttctacatgtttca

SEQ ID NO: 416704 - DNA, 15 bp, Homo sapiens
acttctacatgtttc

SEQ ID NO: 416705 - DNA, 15 bp, Homo sapiens
tacttctacatgttt

SEQ ID NO: 416706 - DNA, 15 bp, Homo sapiens
ctacttctacatgtt

SEQ ID NO: 416707 - DNA, 15 bp, Homo sapiens
cctacttctacatgt

SEQ ID NO: 416708 - DNA, 15 bp, Homo sapiens
acctacttctacatg

SEQ ID NO: 416709 - DNA, 15 bp, Homo sapiens
tacctacttctacat

SEQ ID NO: 416710 - DNA, 15 bp, Homo sapiens
ctacctacttctaca

SEQ ID NO: 416711 - DNA, 15 bp, Homo sapiens
tctacctacttctac

SEQ ID NO: 416712 - DNA, 15 bp, Homo sapiens
atctacctacttcta

SEQ ID NO: 416713 - DNA, 15 bp, Homo sapiens
catctacctacttct

SEQ ID NO: 416714 - DNA, 15 bp, Homo sapiens
acatctacctacttc

SEQ ID NO: 416715 - DNA, 15 bp, Homo sapiens
gacatctacctactt

SEQ ID NO: 416716 - DNA, 15 bp, Homo sapiens
agacatctacctact

SEQ ID NO: 416717 - DNA, 15 bp, Homo sapiens
aagacatctacctac

SEQ ID NO: 416718 - DNA, 15 bp, Homo sapiens
caagacatctaccta

SEQ ID NO: 416719 - DNA, 15 bp, Homo sapiens
acaagacatctacct

SEQ ID NO: 416720 - DNA, 15 bp, Homo sapiens
gacaagacatctacc

SEQ ID NO: 416721 - DNA, 15 bp, Homo sapiens
agacaagacatctac

SEQ ID NO: 416722 - DNA, 15 bp, Homo sapiens
tagacaagacatcta

SEQ ID NO: 416723 - DNA, 15 bp, Homo sapiens
ttagacaagacatct

SEQ ID NO: 416724 - DNA, 15 bp, Homo sapiens
gttagacaagacatc

SEQ ID NO: 416725 - DNA, 15 bp, Homo sapiens
agttagacaagacat

SEQ ID NO: 416726 - DNA, 15 bp, Homo sapiens
cagttagacaagaca

SEQ ID NO: 416727 - DNA, 15 bp, Homo sapiens
tcagttagacaagac

SEQ ID NO: 416728 - DNA, 15 bp, Homo sapiens
atcagttagacaaga

SEQ ID NO: 416729 - DNA, 15 bp, Homo sapiens
catcagttagacaag

SEQ ID NO: 416730 - DNA, 15 bp, Homo sapiens
ccatcagttagacaa

SEQ ID NO: 416731 - DNA, 15 bp, Homo sapiens
accatcagttagaca

SEQ ID NO: 416732 - DNA, 15 bp, Homo sapiens
taccatcagttagac

SEQ ID NO: 416733 - DNA, 15 bp, Homo sapiens
ttaccatcagttaga

SEQ ID NO: 416734 - DNA, 15 bp, Homo sapiens
attaccatcagttag

SEQ ID NO: 416735 - DNA, 15 bp, Homo sapiens
aattaccatcagtta

SEQ ID NO: 416736 - DNA, 15 bp, Homo sapiens
taattaccatcagtt

SEQ ID NO: 416737 - DNA, 15 bp, Homo sapiens
ttaattaccatcagt

SEQ ID NO: 416738 - DNA, 15 bp, Homo sapiens
attaattaccatcag

SEQ ID NO: 416739 - DNA, 15 bp, Homo sapiens
aattaattaccatca

SEQ ID NO: 416740 - DNA, 15 bp, Homo sapiens
aaattaattaccatc

SEQ ID NO: 416741 - DNA, 15 bp, Homo sapiens
gaaattaattaccat

SEQ ID NO: 416742 - DNA, 15 bp, Homo sapiens
ggaaattaattacca

SEQ ID NO: 416743 - DNA, 15 bp, Homo sapiens
tggaaattaattacc

SEQ ID NO: 416744 - DNA, 15 bp, Homo sapiens
atggaaattaattac

SEQ ID NO: 416745 - DNA, 15 bp, Homo sapiens
gatggaaattaatta

SEQ ID NO: 416746 - DNA, 15 bp, Homo sapiens
agatggaaattaatt

SEQ ID NO: 416747 - DNA, 15 bp, Homo sapiens
gagatggaaattaat

SEQ ID NO: 416748 - DNA, 15 bp, Homo sapiens
tgagatggaaattaa

SEQ ID NO: 416749 - DNA, 15 bp, Homo sapiens
ctgagatggaaatta

SEQ ID NO: 416750 - DNA, 15 bp, Homo sapiens
gctgagatggaaatt

SEQ ID NO: 416751 - DNA, 15 bp, Homo sapiens
ggctgagatggaaat

SEQ ID NO: 416752 - DNA, 15 bp, Homo sapiens
gggctgagatggaaa

SEQ ID NO: 416753 - DNA, 15 bp, Homo sapiens
tgggctgagatggaa

SEQ ID NO: 416754 - DNA, 15 bp, Homo sapiens
ttgggctgagatgga

SEQ ID NO: 416755 - DNA, 15 bp, Homo sapiens
attgggctgagatgg

SEQ ID NO: 416756 - DNA, 15 bp, Homo sapiens
aattgggctgagatg

SEQ ID NO: 416757 - DNA, 15 bp, Homo sapiens
aaattgggctgagat

SEQ ID NO: 416758 - DNA, 15 bp, Homo sapiens
taaattgggctgaga

SEQ ID NO: 416759 - DNA, 15 bp, Homo sapiens
ctaaattgggctgag

SEQ ID NO: 416760 - DNA, 15 bp, Homo sapiens
actaaattgggctga

SEQ ID NO: 416761 - DNA, 15 bp, Homo sapiens
gactaaattgggctg

SEQ ID NO: 416762 - DNA, 15 bp, Homo sapiens
ggactaaattgggct

SEQ ID NO: 416763 - DNA, 15 bp, Homo sapiens
gggactaaattgggc

SEQ ID NO: 416764 - DNA, 15 bp, Homo sapiens
ggggactaaattggg

SEQ ID NO: 416765 - DNA, 15 bp, Homo sapiens
tggggactaaattgg

SEQ ID NO: 416766 - DNA, 15 bp, Homo sapiens
ttggggactaaattg

SEQ ID NO: 416767 - DNA, 15 bp, Homo sapiens
attggggactaaatt

SEQ ID NO: 416768 - DNA, 15 bp, Homo sapiens
aattggggactaaat

SEQ ID NO: 416769 - DNA, 15 bp, Homo sapiens
taattggggactaaa

SEQ ID NO: 416770 - DNA, 15 bp, Homo sapiens
ataattggggactaa

SEQ ID NO: 416771 - DNA, 15 bp, Homo sapiens
gataattggggacta

SEQ ID NO: 416772 - DNA, 15 bp, Homo sapiens
tgataattggggact

SEQ ID NO: 416773 - DNA, 15 bp, Homo sapiens
gtgataattggggac

SEQ ID NO: 416774 - DNA, 15 bp, Homo sapiens
tgtgataattgggga

SEQ ID NO: 416775 - DNA, 15 bp, Homo sapiens
atgtgataattgggg

SEQ ID NO: 416776 - DNA, 15 bp, Homo sapiens
gatgtgataattggg

SEQ ID NO: 416777 - DNA, 15 bp, Homo sapiens
agatgtgataattgg

SEQ ID NO: 416778 - DNA, 15 bp, Homo sapiens
aagatgtgataattg

SEQ ID NO: 416779 - DNA, 15 bp, Homo sapiens
taagatgtgataatt

SEQ ID NO: 416780 - DNA, 15 bp, Homo sapiens
ataagatgtgataat

SEQ ID NO: 416781 - DNA, 15 bp, Homo sapiens
tataagatgtgataa

SEQ ID NO: 416782 - DNA, 15 bp, Homo sapiens
atataagatgtgata

SEQ ID NO: 416783 - DNA, 15 bp, Homo sapiens
tatataagatgtgat

SEQ ID NO: 416784 - DNA, 15 bp, Homo sapiens
gtatataagatgtga

SEQ ID NO: 416785 - DNA, 15 bp, Homo sapiens
ggtatataagatgtg

SEQ ID NO: 416786 - DNA, 15 bp, Homo sapiens
gggtatataagatgt

SEQ ID NO: 416787 - DNA, 15 bp, Homo sapiens
tgggtatataagatg

SEQ ID NO: 416788 - DNA, 15 bp, Homo sapiens
ctgggtatataagat

SEQ ID NO: 416789 - DNA, 15 bp, Homo sapiens
actgggtatataaga

SEQ ID NO: 416790 - DNA, 15 bp, Homo sapiens
aactgggtatataag

SEQ ID NO: 416791 - DNA, 15 bp, Homo sapiens
taactgggtatataa

SEQ ID NO: 416792 - DNA, 15 bp, Homo sapiens
ctaactgggtatata

SEQ ID NO: 416793 - DNA, 15 bp, Homo sapiens
cctaactgggtatat

SEQ ID NO: 416794 - DNA, 15 bp, Homo sapiens
tcctaactgggtata

SEQ ID NO: 416795 - DNA, 15 bp, Homo sapiens
ttcctaactgggtat

SEQ ID NO: 416796 - DNA, 15 bp, Homo sapiens
tttcctaactgggta

SEQ ID NO: 416797 - DNA, 15 bp, Homo sapiens
atttcctaactgggt

SEQ ID NO: 416798 - DNA, 15 bp, Homo sapiens
aatttcctaactggg

SEQ ID NO: 416799 - DNA, 15 bp, Homo sapiens
taatttcctaactgg

SEQ ID NO: 416800 - DNA, 15 bp, Homo sapiens
ctaatttcctaactg

SEQ ID NO: 416801 - DNA, 15 bp, Homo sapiens
actaatttcctaact

SEQ ID NO: 416802 - DNA, 15 bp, Homo sapiens
aactaatttcctaac

SEQ ID NO: 416803 - DNA, 15 bp, Homo sapiens
gaactaatttcctaa

SEQ ID NO: 416804 - DNA, 15 bp, Homo sapiens
tgaactaatttccta

SEQ ID NO: 416805 - DNA, 15 bp, Homo sapiens
ttgaactaatttcct

SEQ ID NO: 416806 - DNA, 15 bp, Homo sapiens
gttgaactaatttcc

SEQ ID NO: 416807 - DNA, 15 bp, Homo sapiens
ggttgaactaatttc

SEQ ID NO: 416808 - DNA, 15 bp, Homo sapiens
aggttgaactaattt

SEQ ID NO: 416809 - DNA, 15 bp, Homo sapiens
caggttgaactaatt

SEQ ID NO: 416810 - DNA, 15 bp, Homo sapiens
tcaggttgaactaat

SEQ ID NO: 416811 - DNA, 15 bp, Homo sapiens
ttcaggttgaactaa

SEQ ID NO: 416812 - DNA, 15 bp, Homo sapiens
gttcaggttgaacta

SEQ ID NO: 416813 - DNA, 15 bp, Homo sapiens
ggttcaggttgaact

SEQ ID NO: 416814 - DNA, 15 bp, Homo sapiens
tggttcaggttgaac

SEQ ID NO: 416815 - DNA, 15 bp, Homo sapiens
gtggttcaggttgaa

SEQ ID NO: 416816 - DNA, 15 bp, Homo sapiens
ggtggttcaggttga

SEQ ID NO: 416817 - DNA, 15 bp, Homo sapiens
gggtggttcaggttg

SEQ ID NO: 416818 - DNA, 15 bp, Homo sapiens
agggtggttcaggtt

SEQ ID NO: 416819 - DNA, 15 bp, Homo sapiens
aagggtggttcaggt

SEQ ID NO: 416820 - DNA, 15 bp, Homo sapiens
caagggtggttcagg

SEQ ID NO: 416821 - DNA, 15 bp, Homo sapiens
acaagggtggttcag

SEQ ID NO: 416822 - DNA, 15 bp, Homo sapiens
cacaagggtggttca

SEQ ID NO: 416823 - DNA, 15 bp, Homo sapiens
ccacaagggtggttc

SEQ ID NO: 416824 - DNA, 15 bp, Homo sapiens
accacaagggtggtt

SEQ ID NO: 416825 - DNA, 15 bp, Homo sapiens
aaccacaagggtggt

SEQ ID NO: 416826 - DNA, 15 bp, Homo sapiens
aaaccacaagggtgg

SEQ ID NO: 416827 - DNA, 15 bp, Homo sapiens
gaaaccacaagggtg

SEQ ID NO: 416828 - DNA, 15 bp, Homo sapiens
agaaaccacaagggt

SEQ ID NO: 416829 - DNA, 15 bp, Homo sapiens
aagaaaccacaaggg

SEQ ID NO: 416830 - DNA, 15 bp, Homo sapiens
aaagaaaccacaagg

SEQ ID NO: 416831 - DNA, 15 bp, Homo sapiens
caaagaaaccacaag

SEQ ID NO: 416832 - DNA, 15 bp, Homo sapiens
ccaaagaaaccacaa

SEQ ID NO: 416833 - DNA, 15 bp, Homo sapiens
tccaaagaaaccaca

SEQ ID NO: 416834 - DNA, 15 bp, Homo sapiens
ttccaaagaaaccac

SEQ ID NO: 416835 - DNA, 15 bp, Homo sapiens
gttccaaagaaacca

SEQ ID NO: 416836 - DNA, 15 bp, Homo sapiens
agttccaaagaaacc

SEQ ID NO: 416837 - DNA, 15 bp, Homo sapiens
gagttccaaagaaac

SEQ ID NO: 416838 - DNA, 15 bp, Homo sapiens
tgagttccaaagaaa

SEQ ID NO: 416839 - DNA, 15 bp, Homo sapiens
ttgagttccaaagaa

SEQ ID NO: 416840 - DNA, 15 bp, Homo sapiens
tttgagttccaaaga

SEQ ID NO: 416841 - DNA, 15 bp, Homo sapiens
ctttgagttccaaag

SEQ ID NO: 416842 - DNA, 15 bp, Homo sapiens
gctttgagttccaaa

SEQ ID NO: 416843 - DNA, 15 bp, Homo sapiens
agctttgagttccaa

SEQ ID NO: 416844 - DNA, 15 bp, Homo sapiens
tagctttgagttcca

SEQ ID NO: 416845 - DNA, 15 bp, Homo sapiens
ctagctttgagttcc

SEQ ID NO: 416846 - DNA, 15 bp, Homo sapiens
gctagctttgagttc

SEQ ID NO: 416847 - DNA, 15 bp, Homo sapiens
cgctagctttgagtt

SEQ ID NO: 416848 - DNA, 15 bp, Homo sapiens
ccgctagctttgagt

SEQ ID NO: 416849 - DNA, 15 bp, Homo sapiens
accgctagctttgag

SEQ ID NO: 416850 - DNA, 15 bp, Homo sapiens
taccgctagctttga

SEQ ID NO: 416851 - DNA, 15 bp, Homo sapiens
ataccgctagctttg

SEQ ID NO: 416852 - DNA, 15 bp, Homo sapiens
aataccgctagcttt

SEQ ID NO: 416853 - DNA, 15 bp, Homo sapiens
gaataccgctagctt

SEQ ID NO: 416854 - DNA, 15 bp, Homo sapiens
tgaataccgctagct

SEQ ID NO: 416855 - DNA, 15 bp, Homo sapiens
gtgaataccgctagc

SEQ ID NO: 416856 - DNA, 15 bp, Homo sapiens
ggtgaataccgctag

SEQ ID NO: 416857 - DNA, 15 bp, Homo sapiens
gggtgaataccgcta

SEQ ID NO: 416858 - DNA, 15 bp, Homo sapiens
ggggtgaataccgct

SEQ ID NO: 416859 - DNA, 15 bp, Homo sapiens
tggggtgaataccgc

SEQ ID NO: 416860 - DNA, 15 bp, Homo sapiens
atggggtgaataccg

SEQ ID NO: 416861 - DNA, 15 bp, Homo sapiens
aatggggtgaatacc

SEQ ID NO: 416862 - DNA, 15 bp, Homo sapiens
aaatggggtgaatac

SEQ ID NO: 416863 - DNA, 15 bp, Homo sapiens
caaatggggtgaata

SEQ ID NO: 416864 - DNA, 15 bp, Homo sapiens
gcaaatggggtgaat

SEQ ID NO: 416865 - DNA, 15 bp, Homo sapiens
ggcaaatggggtgaa

SEQ ID NO: 416866 - DNA, 15 bp, Homo sapiens
aggcaaatggggtga

SEQ ID NO: 416867 - DNA, 15 bp, Homo sapiens
gaggcaaatggggtg

SEQ ID NO: 416868 - DNA, 15 bp, Homo sapiens
agaggcaaatggggt

SEQ ID NO: 416869 - DNA, 15 bp, Homo sapiens
cagaggcaaatgggg

SEQ ID NO: 416870 - DNA, 15 bp, Homo sapiens
acagaggcaaatggg

SEQ ID NO: 416871 - DNA, 15 bp, Homo sapiens
gacagaggcaaatgg

SEQ ID NO: 416872 - DNA, 15 bp, Homo sapiens
agacagaggcaaatg

SEQ ID NO: 416873 - DNA, 15 bp, Homo sapiens
gagacagaggcaaat

SEQ ID NO: 416874 - DNA, 15 bp, Homo sapiens
agagacagaggcaaa

SEQ ID NO: 416875 - DNA, 15 bp, Homo sapiens
aagagacagaggcaa

SEQ ID NO: 416876 - DNA, 15 bp, Homo sapiens
gaagagacagaggca

SEQ ID NO: 416877 - DNA, 15 bp, Homo sapiens
tgaagagacagaggc

SEQ ID NO: 416878 - DNA, 15 bp, Homo sapiens
ttgaagagacagagg

SEQ ID NO: 416879 - DNA, 15 bp, Homo sapiens
tttgaagagacagag

SEQ ID NO: 416880 - DNA, 15 bp, Homo sapiens
ctttgaagagacaga

SEQ ID NO: 416881 - DNA, 15 bp, Homo sapiens
tctttgaagagacag

SEQ ID NO: 416882 - DNA, 15 bp, Homo sapiens
gtctttgaagagaca

SEQ ID NO: 416883 - DNA, 15 bp, Homo sapiens
agtctttgaagagac

SEQ ID NO: 416884 - DNA, 15 bp, Homo sapiens
aagtctttgaagaga

SEQ ID NO: 416885 - DNA, 15 bp, Homo sapiens
gaagtctttgaagag

SEQ ID NO: 416886 - DNA, 15 bp, Homo sapiens
tgaagtctttgaaga

SEQ ID NO: 416887 - DNA, 15 bp, Homo sapiens
ttgaagtctttgaag

SEQ ID NO: 416888 - DNA, 15 bp, Homo sapiens
tttgaagtctttgaa

SEQ ID NO: 416889 - DNA, 15 bp, Homo sapiens
ctttgaagtctttga

SEQ ID NO: 416890 - DNA, 15 bp, Homo sapiens
gctttgaagtctttg

SEQ ID NO: 416891 - DNA, 15 bp, Homo sapiens
agctttgaagtcttt

SEQ ID NO: 416892 - DNA, 15 bp, Homo sapiens
gagctttgaagtctt

SEQ ID NO: 416893 - DNA, 15 bp, Homo sapiens
agagctttgaagtct

SEQ ID NO: 416894 - DNA, 15 bp, Homo sapiens
cagagctttgaagtc

SEQ ID NO: 416895 - DNA, 15 bp, Homo sapiens
tcagagctttgaagt

SEQ ID NO: 416896 - DNA, 15 bp, Homo sapiens
ctcagagctttgaag

SEQ ID NO: 416897 - DNA, 15 bp, Homo sapiens
actcagagctttgaa

SEQ ID NO: 416898 - DNA, 15 bp, Homo sapiens
aactcagagctttga

SEQ ID NO: 416899 - DNA, 15 bp, Homo sapiens
aaactcagagctttg

SEQ ID NO: 416900 - DNA, 15 bp, Homo sapiens
aaaactcagagcttt

SEQ ID NO: 416901 - DNA, 15 bp, Homo sapiens
aaaaactcagagctt

SEQ ID NO: 416902 - DNA, 15 bp, Homo sapiens
gaaaaactcagagct

SEQ ID NO: 416903 - DNA, 15 bp, Homo sapiens
ggaaaaactcagagc

SEQ ID NO: 416904 - DNA, 15 bp, Homo sapiens
aggaaaaactcagag

SEQ ID NO: 416905 - DNA, 15 bp, Homo sapiens
caggaaaaactcaga

SEQ ID NO: 416906 - DNA, 15 bp, Homo sapiens
acaggaaaaactcag

SEQ ID NO: 416907 - DNA, 15 bp, Homo sapiens
aacaggaaaaactca

SEQ ID NO: 416908 - DNA, 15 bp, Homo sapiens
caacaggaaaaactc

SEQ ID NO: 416909 - DNA, 15 bp, Homo sapiens
tcaacaggaaaaact

SEQ ID NO: 416910 - DNA, 15 bp, Homo sapiens
gtcaacaggaaaaac

SEQ ID NO: 416911 - DNA, 15 bp, Homo sapiens
tgtcaacaggaaaaa

SEQ ID NO: 416912 - DNA, 15 bp, Homo sapiens
ctgtcaacaggaaaa

SEQ ID NO: 416913 - DNA, 15 bp, Homo sapiens
actgtcaacaggaaa

SEQ ID NO: 416914 - DNA, 15 bp, Homo sapiens
aactgtcaacaggaa

SEQ ID NO: 416915 - DNA, 15 bp, Homo sapiens
aaactgtcaacagga

SEQ ID NO: 416916 - DNA, 15 bp, Homo sapiens
gaaactgtcaacagg

SEQ ID NO: 416917 - DNA, 15 bp, Homo sapiens
tgaaactgtcaacag

SEQ ID NO: 416918 - DNA, 15 bp, Homo sapiens
ttgaaactgtcaaca

SEQ ID NO: 416919 - DNA, 15 bp, Homo sapiens
tttgaaactgtcaac

SEQ ID NO: 416920 - DNA, 15 bp, Homo sapiens
ttttgaaactgtcaa

SEQ ID NO: 416921 - DNA, 15 bp, Homo sapiens
tttttgaaactgtca

SEQ ID NO: 416922 - DNA, 15 bp, Homo sapiens
ttttttgaaactgtc

SEQ ID NO: 416923 - DNA, 15 bp, Homo sapiens
tttttttgaaactgt

SEQ ID NO: 416924 - DNA, 15 bp, Homo sapiens
ttttttttgaaactg

SEQ ID NO: 416925 - DNA, 15 bp, Homo sapiens
tttttttttgaaact

SEQ ID NO: 416926 - DNA, 15 bp, Homo sapiens
ttttttttttgaaac

SEQ ID NO: 416927 - DNA, 15 bp, Homo sapiens
cttttttttttgaaa

SEQ ID NO: 416928 - DNA, 15 bp, Homo sapiens
tcttttttttttgaa

SEQ ID NO: 416929 - DNA, 15 bp, Homo sapiens
ttcttttttttttga

SEQ ID NO: 416930 - DNA, 15 bp, Homo sapiens
cttcttttttttttg

SEQ ID NO: 416931 - DNA, 15 bp, Homo sapiens
acttctttttttttt

SEQ ID NO: 416932 - DNA, 15 bp, Homo sapiens
aacttcttttttttt

SEQ ID NO: 416933 - DNA, 15 bp, Homo sapiens
taacttctttttttt

SEQ ID NO: 416934 - DNA, 15 bp, Homo sapiens
ataacttcttttttt

SEQ ID NO: 416935 - DNA, 15 bp, Homo sapiens
gataacttctttttt

SEQ ID NO: 416936 - DNA, 15 bp, Homo sapiens
agataacttcttttt

SEQ ID NO: 416937 - DNA, 15 bp, Homo sapiens
tagataacttctttt

SEQ ID NO: 416938 - DNA, 15 bp, Homo sapiens
atagataacttcttt

SEQ ID NO: 416939 - DNA, 15 bp, Homo sapiens
aatagataacttctt

SEQ ID NO: 416940 - DNA, 15 bp, Homo sapiens
taatagataacttct

SEQ ID NO: 416941 - DNA, 15 bp, Homo sapiens
gtaatagataacttc

SEQ ID NO: 416942 - DNA, 15 bp, Homo sapiens
agtaatagataactt

SEQ ID NO: 416943 - DNA, 15 bp, Homo sapiens
aagtaatagataact

SEQ ID NO: 416944 - DNA, 15 bp, Homo sapiens
aaagtaatagataac

SEQ ID NO: 416945 - DNA, 15 bp, Homo sapiens
aaaagtaatagataa

SEQ ID NO: 416946 - DNA, 15 bp, Homo sapiens
aaaaagtaatagata

SEQ ID NO: 416947 - DNA, 15 bp, Homo sapiens
caaaaagtaatagat

SEQ ID NO: 416948 - DNA, 15 bp, Homo sapiens
acaaaaagtaataga

SEQ ID NO: 416949 - DNA, 15 bp, Homo sapiens
aacaaaaagtaatag

SEQ ID NO: 416950 - DNA, 15 bp, Homo sapiens
gaacaaaaagtaata

SEQ ID NO: 416951 - DNA, 15 bp, Homo sapiens
agaacaaaaagtaat

SEQ ID NO: 416952 - DNA, 15 bp, Homo sapiens
aagaacaaaaagtaa

SEQ ID NO: 416953 - DNA, 15 bp, Homo sapiens
caagaacaaaaagta

SEQ ID NO: 416954 - DNA, 15 bp, Homo sapiens
ccaagaacaaaaagt

SEQ ID NO: 416955 - DNA, 15 bp, Homo sapiens
tccaagaacaaaaag

SEQ ID NO: 416956 - DNA, 15 bp, Homo sapiens
gtccaagaacaaaaa

SEQ ID NO: 416957 - DNA, 15 bp, Homo sapiens
ggtccaagaacaaaa

SEQ ID NO: 416958 - DNA, 15 bp, Homo sapiens
aggtccaagaacaaa

SEQ ID NO: 416959 - DNA, 15 bp, Homo sapiens
gaggtccaagaacaa

SEQ ID NO: 416960 - DNA, 15 bp, Homo sapiens
ggaggtccaagaaca

SEQ ID NO: 416961 - DNA, 15 bp, Homo sapiens
gggaggtccaagaac

SEQ ID NO: 416962 - DNA, 15 bp, Homo sapiens
ggggaggtccaagaa

SEQ ID NO: 416963 - DNA, 15 bp, Homo sapiens
aggggaggtccaaga

SEQ ID NO: 416964 - DNA, 15 bp, Homo sapiens
taggggaggtccaag

SEQ ID NO: 416965 - DNA, 15 bp, Homo sapiens
gtaggggaggtccaa

SEQ ID NO: 416966 - DNA, 15 bp, Homo sapiens
tgtaggggaggtcca

SEQ ID NO: 416967 - DNA, 15 bp, Homo sapiens
atgtaggggaggtcc

SEQ ID NO: 416968 - DNA, 15 bp, Homo sapiens
tatgtaggggaggtc

SEQ ID NO: 416969 - DNA, 15 bp, Homo sapiens
atatgtaggggaggt

SEQ ID NO: 416970 - DNA, 15 bp, Homo sapiens
aatatgtaggggagg

SEQ ID NO: 416971 - DNA, 15 bp, Homo sapiens
gaatatgtaggggag

SEQ ID NO: 416972 - DNA, 15 bp, Homo sapiens
ggaatatgtagggga

SEQ ID NO: 416973 - DNA, 15 bp, Homo sapiens
tggaatatgtagggg

SEQ ID NO: 416974 - DNA, 15 bp, Homo sapiens
gtggaatatgtaggg

SEQ ID NO: 416975 - DNA, 15 bp, Homo sapiens
tgtggaatatgtagg

SEQ ID NO: 416976 - DNA, 15 bp, Homo sapiens
gtgtggaatatgtag

SEQ ID NO: 416977 - DNA, 15 bp, Homo sapiens
agtgtggaatatgta

SEQ ID NO: 416978 - DNA, 15 bp, Homo sapiens
aagtgtggaatatgt

SEQ ID NO: 416979 - DNA, 15 bp, Homo sapiens
aaagtgtggaatatg

SEQ ID NO: 416980 - DNA, 15 bp, Homo sapiens
caaagtgtggaatat

SEQ ID NO: 416981 - DNA, 15 bp, Homo sapiens
ccaaagtgtggaata

SEQ ID NO: 416982 - DNA, 15 bp, Homo sapiens
tccaaagtgtggaat

SEQ ID NO: 416983 - DNA, 15 bp, Homo sapiens
ttccaaagtgtggaa

SEQ ID NO: 416984 - DNA, 15 bp, Homo sapiens
cttccaaagtgtgga

SEQ ID NO: 416985 - DNA, 15 bp, Homo sapiens
ccttccaaagtgtgg

SEQ ID NO: 416986 - DNA, 15 bp, Homo sapiens
cccttccaaagtgtg

SEQ ID NO: 416987 - DNA, 15 bp, Homo sapiens
ccccttccaaagtgt

SEQ ID NO: 416988 - DNA, 15 bp, Homo sapiens
tccccttccaaagtg

SEQ ID NO: 416989 - DNA, 15 bp, Homo sapiens
ttccccttccaaagt

SEQ ID NO: 416990 - DNA, 15 bp, Homo sapiens
tttccccttccaaag

SEQ ID NO: 416991 - DNA, 15 bp, Homo sapiens
gtttccccttccaaa

SEQ ID NO: 416992 - DNA, 15 bp, Homo sapiens
ggtttccccttccaa

SEQ ID NO: 416993 - DNA, 15 bp, Homo sapiens
aggtttccccttcca

SEQ ID NO: 416994 - DNA, 15 bp, Homo sapiens
caggtttccccttcc

SEQ ID NO: 416995 - DNA, 15 bp, Homo sapiens
ccaggtttccccttc

SEQ ID NO: 416996 - DNA, 15 bp, Homo sapiens
gccaggtttcccctt

SEQ ID NO: 416997 - DNA, 15 bp, Homo sapiens
tgccaggtttcccct

SEQ ID NO: 416998 - DNA, 15 bp, Homo sapiens
atgccaggtttcccc

SEQ ID NO: 416999 - DNA, 15 bp, Homo sapiens
catgccaggtttccc

SEQ ID NO: 417000 - DNA, 15 bp, Homo sapiens
ccatgccaggtttcc

SEQ ID NO: 417001 - DNA, 15 bp, Homo sapiens
tccatgccaggtttc

SEQ ID NO: 417002 - DNA, 15 bp, Homo sapiens
gtccatgccaggttt

SEQ ID NO: 417003 - DNA, 15 bp, Homo sapiens
cgtccatgccaggtt

SEQ ID NO: 417004 - DNA, 15 bp, Homo sapiens
tcgtccatgccaggt

SEQ ID NO: 417005 - DNA, 15 bp, Homo sapiens
ctcgtccatgccagg

SEQ ID NO: 417006 - DNA, 15 bp, Homo sapiens
cctcgtccatgccag

SEQ ID NO: 417007 - DNA, 15 bp, Homo sapiens
ccctcgtccatgcca

SEQ ID NO: 417008 - DNA, 15 bp, Homo sapiens
gccctcgtccatgcc

SEQ ID NO: 417009 - DNA, 15 bp, Homo sapiens
tgccctcgtccatgc

SEQ ID NO: 417010 - DNA, 15 bp, Homo sapiens
atgccctcgtccatg

SEQ ID NO: 417011 - DNA, 15 bp, Homo sapiens
aatgccctcgtccat

SEQ ID NO: 417012 - DNA, 15 bp, Homo sapiens
gaatgccctcgtcca

SEQ ID NO: 417013 - DNA, 15 bp, Homo sapiens
agaatgccctcgtcc

SEQ ID NO: 417014 - DNA, 15 bp, Homo sapiens
cagaatgccctcgtc

SEQ ID NO: 417015 - DNA, 15 bp, Homo sapiens
ccagaatgccctcgt

SEQ ID NO: 417016 - DNA, 15 bp, Homo sapiens
cccagaatgccctcg

SEQ ID NO: 417017 - DNA, 15 bp, Homo sapiens
ccccagaatgccctc

SEQ ID NO: 417018 - DNA, 15 bp, Homo sapiens
accccagaatgccct

SEQ ID NO: 417019 - DNA, 15 bp, Homo sapiens
gaccccagaatgccc

SEQ ID NO: 417020 - DNA, 15 bp, Homo sapiens
ggaccccagaatgcc

SEQ ID NO: 417021 - DNA, 15 bp, Homo sapiens
gggaccccagaatgc

SEQ ID NO: 417022 - DNA, 15 bp, Homo sapiens
agggaccccagaatg

SEQ ID NO: 417023 - DNA, 15 bp, Homo sapiens
cagggaccccagaat

SEQ ID NO: 417024 - DNA, 15 bp, Homo sapiens
ccagggaccccagaa

SEQ ID NO: 417025 - DNA, 15 bp, Homo sapiens
gccagggaccccaga

SEQ ID NO: 417026 - DNA, 15 bp, Homo sapiens
tgccagggaccccag

SEQ ID NO: 417027 - DNA, 15 bp, Homo sapiens
ctgccagggacccca

SEQ ID NO: 417028 - DNA, 15 bp, Homo sapiens
cctgccagggacccc

SEQ ID NO: 417029 - DNA, 15 bp, Homo sapiens
gcctgccagggaccc

SEQ ID NO: 417030 - DNA, 15 bp, Homo sapiens
agcctgccagggacc

SEQ ID NO: 417031 - DNA, 15 bp, Homo sapiens
cagcctgccagggac

SEQ ID NO: 417032 - DNA, 15 bp, Homo sapiens
acagcctgccaggga

SEQ ID NO: 417033 - DNA, 15 bp, Homo sapiens
aacagcctgccaggg

SEQ ID NO: 417034 - DNA, 15 bp, Homo sapiens
gaacagcctgccagg

SEQ ID NO: 417035 - DNA, 15 bp, Homo sapiens
ggaacagcctgccag

SEQ ID NO: 417036 - DNA, 15 bp, Homo sapiens
gggaacagcctgcca

SEQ ID NO: 417037 - DNA, 15 bp, Homo sapiens
cgggaacagcctgcc

SEQ ID NO: 417038 - DNA, 15 bp, Homo sapiens
ccgggaacagcctgc

SEQ ID NO: 417039 - DNA, 15 bp, Homo sapiens
tccgggaacagcctg

SEQ ID NO: 417040 - DNA, 15 bp, Homo sapiens
atccgggaacagcct

SEQ ID NO: 417041 - DNA, 15 bp, Homo sapiens
gatccgggaacagcc

SEQ ID NO: 417042 - DNA, 15 bp, Homo sapiens
tgatccgggaacagc

SEQ ID NO: 417043 - DNA, 15 bp, Homo sapiens
gtgatccgggaacag

SEQ ID NO: 417044 - DNA, 15 bp, Homo sapiens
tgtgatccgggaaca

SEQ ID NO: 417045 - DNA, 15 bp, Homo sapiens
gtgtgatccgggaac

SEQ ID NO: 417046 - DNA, 15 bp, Homo sapiens
tgtgtgatccgggaa

SEQ ID NO: 417047 - DNA, 15 bp, Homo sapiens
ctgtgtgatccggga

SEQ ID NO: 417048 - DNA, 15 bp, Homo sapiens
actgtgtgatccggg

SEQ ID NO: 417049 - DNA, 15 bp, Homo sapiens
gactgtgtgatccgg

SEQ ID NO: 417050 - DNA, 15 bp, Homo sapiens
tgactgtgtgatccg

SEQ ID NO: 417051 - DNA, 15 bp, Homo sapiens
gtgactgtgtgatcc

SEQ ID NO: 417052 - DNA, 15 bp, Homo sapiens
cgtgactgtgtgatc

SEQ ID NO: 417053 - DNA, 15 bp, Homo sapiens
ccgtgactgtgtgat

SEQ ID NO: 417054 - DNA, 15 bp, Homo sapiens
gccgtgactgtgtga

SEQ ID NO: 417055 - DNA, 15 bp, Homo sapiens
tgccgtgactgtgtg

SEQ ID NO: 417056 - DNA, 15 bp, Homo sapiens
ttgccgtgactgtgt

SEQ ID NO: 417057 - DNA, 15 bp, Homo sapiens
gttgccgtgactgtg

SEQ ID NO: 417058 - DNA, 15 bp, Homo sapiens
agttgccgtgactgt

SEQ ID NO: 417059 - DNA, 15 bp, Homo sapiens
gagttgccgtgactg

SEQ ID NO: 417060 - DNA, 15 bp, Homo sapiens
agagttgccgtgact

SEQ ID NO: 417061 - DNA, 15 bp, Homo sapiens
aagagttgccgtgac

SEQ ID NO: 417062 - DNA, 15 bp, Homo sapiens
aaagagttgccgtga

SEQ ID NO: 417063 - DNA, 15 bp, Homo sapiens
taaagagttgccgtg

SEQ ID NO: 417064 - DNA, 15 bp, Homo sapiens
gtaaagagttgccgt

SEQ ID NO: 417065 - DNA, 15 bp, Homo sapiens
agtaaagagttgccg

SEQ ID NO: 417066 - DNA, 15 bp, Homo sapiens
cagtaaagagttgcc

SEQ ID NO: 417067 - DNA, 15 bp, Homo sapiens
tcagtaaagagttgc

SEQ ID NO: 417068 - DNA, 15 bp, Homo sapiens
ctcagtaaagagttg

SEQ ID NO: 417069 - DNA, 15 bp, Homo sapiens
actcagtaaagagtt

SEQ ID NO: 417070 - DNA, 15 bp, Homo sapiens
aactcagtaaagagt

SEQ ID NO: 417071 - DNA, 15 bp, Homo sapiens
taactcagtaaagag

SEQ ID NO: 417072 - DNA, 15 bp, Homo sapiens
ctaactcagtaaaga

SEQ ID NO: 417073 - DNA, 15 bp, Homo sapiens
cctaactcagtaaag

SEQ ID NO: 417074 - DNA, 15 bp, Homo sapiens
tcctaactcagtaaa

SEQ ID NO: 417075 - DNA, 15 bp, Homo sapiens
ctcctaactcagtaa

SEQ ID NO: 417076 - DNA, 15 bp, Homo sapiens
actcctaactcagta

SEQ ID NO: 417077 - DNA, 15 bp, Homo sapiens
tactcctaactcagt

SEQ ID NO: 417078 - DNA, 15 bp, Homo sapiens
ctactcctaactcag

SEQ ID NO: 417079 - DNA, 15 bp, Homo sapiens
cctactcctaactca

SEQ ID NO: 417080 - DNA, 15 bp, Homo sapiens
tcctactcctaactc

SEQ ID NO: 417081 - DNA, 15 bp, Homo sapiens
ttcctactcctaact

SEQ ID NO: 417082 - DNA, 15 bp, Homo sapiens
tttcctactcctaac

SEQ ID NO: 417083 - DNA, 15 bp, Homo sapiens
ttttcctactcctaa

SEQ ID NO: 417084 - DNA, 15 bp, Homo sapiens
tttttcctactccta

SEQ ID NO: 417085 - DNA, 15 bp, Homo sapiens
ctttttcctactcct

SEQ ID NO: 417086 - DNA, 15 bp, Homo sapiens
cctttttcctactcc

SEQ ID NO: 417087 - DNA, 15 bp, Homo sapiens
acctttttcctactc

SEQ ID NO: 417088 - DNA, 15 bp, Homo sapiens
tacctttttcctact

SEQ ID NO: 417089 - DNA, 15 bp, Homo sapiens
ctacctttttcctac

SEQ ID NO: 417090 - DNA, 15 bp, Homo sapiens
tctacctttttccta

SEQ ID NO: 417091 - DNA, 15 bp, Homo sapiens
ttctacctttttcct

SEQ ID NO: 417092 - DNA, 15 bp, Homo sapiens
tttctacctttttcc

SEQ ID NO: 417093 - DNA, 15 bp, Homo sapiens
ctttctacctttttc

SEQ ID NO: 417094 - DNA, 15 bp, Homo sapiens
cctttctaccttttt

SEQ ID NO: 417095 - DNA, 15 bp, Homo sapiens
gcctttctacctttt

SEQ ID NO: 417096 - DNA, 15 bp, Homo sapiens
ggcctttctaccttt

SEQ ID NO: 417097 - DNA, 15 bp, Homo sapiens
aggcctttctacctt

SEQ ID NO: 417098 - DNA, 15 bp, Homo sapiens
taggcctttctacct

SEQ ID NO: 417099 - DNA, 15 bp, Homo sapiens
ataggcctttctacc

SEQ ID NO: 417100 - DNA, 15 bp, Homo sapiens
gataggcctttctac

SEQ ID NO: 417101 - DNA, 15 bp, Homo sapiens
cgataggcctttcta

SEQ ID NO: 417102 - DNA, 15 bp, Homo sapiens
acgataggcctttct

SEQ ID NO: 417103 - DNA, 15 bp, Homo sapiens
gacgataggcctttc

SEQ ID NO: 417104 - DNA, 15 bp, Homo sapiens
ggacgataggccttt

SEQ ID NO: 417105 - DNA, 15 bp, Homo sapiens
aggacgataggcctt

SEQ ID NO: 417106 - DNA, 15 bp, Homo sapiens
gaggacgataggcct

SEQ ID NO: 417107 - DNA, 15 bp, Homo sapiens
ggaggacgataggcc

SEQ ID NO: 417108 - DNA, 15 bp, Homo sapiens
gggaggacgataggc

SEQ ID NO: 417109 - DNA, 15 bp, Homo sapiens
agggaggacgatagg

SEQ ID NO: 417110 - DNA, 15 bp, Homo sapiens
aagggaggacgatag

SEQ ID NO: 417111 - DNA, 15 bp, Homo sapiens
aaagggaggacgata

SEQ ID NO: 417112 - DNA, 15 bp, Homo sapiens
gaaagggaggacgat

SEQ ID NO: 417113 - DNA, 15 bp, Homo sapiens
agaaagggaggacga

SEQ ID NO: 417114 - DNA, 15 bp, Homo sapiens
cagaaagggaggacg

SEQ ID NO: 417115 - DNA, 15 bp, Homo sapiens
gcagaaagggaggac

SEQ ID NO: 417116 - DNA, 15 bp, Homo sapiens
agcagaaagggagga

SEQ ID NO: 417117 - DNA, 15 bp, Homo sapiens
gagcagaaagggagg

SEQ ID NO: 417118 - DNA, 15 bp, Homo sapiens
agagcagaaagggag

SEQ ID NO: 417119 - DNA, 15 bp, Homo sapiens
gagagcagaaaggga

SEQ ID NO: 417120 - DNA, 15 bp, Homo sapiens
agagagcagaaaggg

SEQ ID NO: 417121 - DNA, 15 bp, Homo sapiens
aagagagcagaaagg

SEQ ID NO: 417122 - DNA, 15 bp, Homo sapiens
aaagagagcagaaag

SEQ ID NO: 417123 - DNA, 15 bp, Homo sapiens
caaagagagcagaaa

SEQ ID NO: 417124 - DNA, 15 bp, Homo sapiens
acaaagagagcagaa

SEQ ID NO: 417125 - DNA, 15 bp, Homo sapiens
aacaaagagagcaga

SEQ ID NO: 417126 - DNA, 15 bp, Homo sapiens
gaacaaagagagcag

SEQ ID NO: 417127 - DNA, 15 bp, Homo sapiens
tgaacaaagagagca

SEQ ID NO: 417128 - DNA, 15 bp, Homo sapiens
ttgaacaaagagagc

SEQ ID NO: 417129 - DNA, 15 bp, Homo sapiens
cttgaacaaagagag

SEQ ID NO: 417130 - DNA, 15 bp, Homo sapiens
ccttgaacaaagaga

SEQ ID NO: 417131 - DNA, 15 bp, Homo sapiens
gccttgaacaaagag

SEQ ID NO: 417132 - DNA, 15 bp, Homo sapiens
agccttgaacaaaga

SEQ ID NO: 417133 - DNA, 15 bp, Homo sapiens
aagccttgaacaaag

SEQ ID NO: 417134 - DNA, 15 bp, Homo sapiens
taagccttgaacaaa

SEQ ID NO: 417135 - DNA, 15 bp, Homo sapiens
ctaagccttgaacaa

SEQ ID NO: 417136 - DNA, 15 bp, Homo sapiens
tctaagccttgaaca

SEQ ID NO: 417137 - DNA, 15 bp, Homo sapiens
ctctaagccttgaac

SEQ ID NO: 417138 - DNA, 15 bp, Homo sapiens
tctctaagccttgaa

SEQ ID NO: 417139 - DNA, 15 bp, Homo sapiens
ctctctaagccttga

SEQ ID NO: 417140 - DNA, 15 bp, Homo sapiens
actctctaagccttg

SEQ ID NO: 417141 - DNA, 15 bp, Homo sapiens
gactctctaagcctt

SEQ ID NO: 417142 - DNA, 15 bp, Homo sapiens
agactctctaagcct

SEQ ID NO: 417143 - DNA, 15 bp, Homo sapiens
aagactctctaagcc

SEQ ID NO: 417144 - DNA, 15 bp, Homo sapiens
caagactctctaagc

SEQ ID NO: 417145 - DNA, 15 bp, Homo sapiens
tcaagactctctaag

SEQ ID NO: 417146 - DNA, 15 bp, Homo sapiens
atcaagactctctaa

SEQ ID NO: 417147 - DNA, 15 bp, Homo sapiens
gatcaagactctcta

SEQ ID NO: 417148 - DNA, 15 bp, Homo sapiens
ggatcaagactctct

SEQ ID NO: 417149 - DNA, 15 bp, Homo sapiens
gggatcaagactctc

SEQ ID NO: 417150 - DNA, 15 bp, Homo sapiens
ggggatcaagactct

SEQ ID NO: 417151 - DNA, 15 bp, Homo sapiens
tggggatcaagactc

SEQ ID NO: 417152 - DNA, 15 bp, Homo sapiens
ttggggatcaagact

SEQ ID NO: 417153 - DNA, 15 bp, Homo sapiens
attggggatcaagac

SEQ ID NO: 417154 - DNA, 15 bp, Homo sapiens
gattggggatcaaga

SEQ ID NO: 417155 - DNA, 15 bp, Homo sapiens
agattggggatcaag

SEQ ID NO: 417156 - DNA, 15 bp, Homo sapiens
aagattggggatcaa

SEQ ID NO: 417157 - DNA, 15 bp, Homo sapiens
taagattggggatca

SEQ ID NO: 417158 - DNA, 15 bp, Homo sapiens
ttaagattggggatc

SEQ ID NO: 417159 - DNA, 15 bp, Homo sapiens
attaagattggggat

SEQ ID NO: 417160 - DNA, 15 bp, Homo sapiens
tattaagattgggga

SEQ ID NO: 417161 - DNA, 15 bp, Homo sapiens
atattaagattgggg

SEQ ID NO: 417162 - DNA, 15 bp, Homo sapiens
tatattaagattggg

SEQ ID NO: 417163 - DNA, 15 bp, Homo sapiens
atatattaagattgg

SEQ ID NO: 417164 - DNA, 15 bp, Homo sapiens
tatatattaagattg

SEQ ID NO: 417165 - DNA, 15 bp, Homo sapiens
gtatatattaagatt

SEQ ID NO: 417166 - DNA, 15 bp, Homo sapiens
agtatatattaagat

SEQ ID NO: 417167 - DNA, 15 bp, Homo sapiens
tagtatatattaaga

SEQ ID NO: 417168 - DNA, 15 bp, Homo sapiens
ttagtatatattaag

SEQ ID NO: 417169 - DNA, 15 bp, Homo sapiens
tttagtatatattaa

SEQ ID NO: 417170 - DNA, 15 bp, Homo sapiens
atttagtatatatta

SEQ ID NO: 417171 - DNA, 15 bp, Homo sapiens
tatttagtatatatt

SEQ ID NO: 417172 - DNA, 15 bp, Homo sapiens
ttatttagtatatat

SEQ ID NO: 417173 - DNA, 15 bp, Homo sapiens
gttatttagtatata

SEQ ID NO: 417174 - DNA, 15 bp, Homo sapiens
tgttatttagtatat

SEQ ID NO: 417175 - DNA, 15 bp, Homo sapiens
atgttatttagtata

SEQ ID NO: 417176 - DNA, 15 bp, Homo sapiens
aatgttatttagtat

SEQ ID NO: 417177 - DNA, 15 bp, Homo sapiens
aaatgttatttagta

SEQ ID NO: 417178 - DNA, 15 bp, Homo sapiens
aaaatgttatttagt

SEQ ID NO: 417179 - DNA, 15 bp, Homo sapiens
taaaatgttatttag

SEQ ID NO: 417180 - DNA, 15 bp, Homo sapiens
ataaaatgttattta

SEQ ID NO: 417181 - DNA, 15 bp, Homo sapiens
aataaaatgttattt

SEQ ID NO: 417182 - DNA, 15 bp, Homo sapiens
aaataaaatgttatt

SEQ ID NO: 417183 - DNA, 15 bp, Homo sapiens
gaaataaaatgttat

SEQ ID NO: 417184 - DNA, 15 bp, Homo sapiens
ggaaataaaatgtta

SEQ ID NO: 417185 - DNA, 15 bp, Homo sapiens
tggaaataaaatgtt

SEQ ID NO: 417186 - DNA, 15 bp, Homo sapiens
gtggaaataaaatgt

SEQ ID NO: 417187 - DNA, 15 bp, Homo sapiens
agtggaaataaaatg

SEQ ID NO: 417188 - DNA, 15 bp, Homo sapiens
aagtggaaataaaat

SEQ ID NO: 417189 - DNA, 15 bp, Homo sapiens
gaagtggaaataaaa

SEQ ID NO: 417190 - DNA, 15 bp, Homo sapiens
tgaagtggaaataaa

SEQ ID NO: 417191 - DNA, 15 bp, Homo sapiens
atgaagtggaaataa

SEQ ID NO: 417192 - DNA, 15 bp, Homo sapiens
aatgaagtggaaata

SEQ ID NO: 417193 - DNA, 15 bp, Homo sapiens
taatgaagtggaaat

SEQ ID NO: 417194 - DNA, 15 bp, Homo sapiens
ataatgaagtggaaa

SEQ ID NO: 417195 - DNA, 15 bp, Homo sapiens
aataatgaagtggaa

SEQ ID NO: 417196 - DNA, 15 bp, Homo sapiens
aaataatgaagtgga

SEQ ID NO: 417197 - DNA, 15 bp, Homo sapiens
aaaataatgaagtgg

SEQ ID NO: 417198 - DNA, 15 bp, Homo sapiens
gaaaataatgaagtg

SEQ ID NO: 417199 - DNA, 15 bp, Homo sapiens
agaaaataatgaagt

SEQ ID NO: 417200 - DNA, 15 bp, Homo sapiens
aagaaaataatgaag

SEQ ID NO: 417201 - DNA, 15 bp, Homo sapiens
caagaaaataatgaa

SEQ ID NO: 417202 - DNA, 15 bp, Homo sapiens
gcaagaaaataatga

SEQ ID NO: 417203 - DNA, 15 bp, Homo sapiens
tgcaagaaaataatg

SEQ ID NO: 417204 - DNA, 15 bp, Homo sapiens
ctgcaagaaaataat

SEQ ID NO: 417205 - DNA, 15 bp, Homo sapiens
tctgcaagaaaataa

SEQ ID NO: 417206 - DNA, 15 bp, Homo sapiens
ttctgcaagaaaata

SEQ ID NO: 417207 - DNA, 15 bp, Homo sapiens
tttctgcaagaaaat

SEQ ID NO: 417208 - DNA, 15 bp, Homo sapiens
ctttctgcaagaaaa

SEQ ID NO: 417209 - DNA, 15 bp, Homo sapiens
actttctgcaagaaa

SEQ ID NO: 417210 - DNA, 15 bp, Homo sapiens
aactttctgcaagaa

SEQ ID NO: 417211 - DNA, 15 bp, Homo sapiens
taactttctgcaaga

SEQ ID NO: 417212 - DNA, 15 bp, Homo sapiens
ttaactttctgcaag

SEQ ID NO: 417213 - DNA, 15 bp, Homo sapiens
gttaactttctgcaa

SEQ ID NO: 417214 - DNA, 15 bp, Homo sapiens
agttaactttctgca

SEQ ID NO: 417215 - DNA, 15 bp, Homo sapiens
cagttaactttctgc

SEQ ID NO: 417216 - DNA, 15 bp, Homo sapiens
gcagttaactttctg

SEQ ID NO: 417217 - DNA, 15 bp, Homo sapiens
agcagttaactttct

SEQ ID NO: 417218 - DNA, 15 bp, Homo sapiens
aagcagttaactttc

SEQ ID NO: 417219 - DNA, 15 bp, Homo sapiens
aaagcagttaacttt

SEQ ID NO: 417220 - DNA, 15 bp, Homo sapiens
gaaagcagttaactt

SEQ ID NO: 417221 - DNA, 15 bp, Homo sapiens
agaaagcagttaact

SEQ ID NO: 417222 - DNA, 15 bp, Homo sapiens
aagaaagcagttaac

SEQ ID NO: 417223 - DNA, 15 bp, Homo sapiens
taagaaagcagttaa

SEQ ID NO: 417224 - DNA, 15 bp, Homo sapiens
gtaagaaagcagtta

SEQ ID NO: 417225 - DNA, 15 bp, Homo sapiens
agtaagaaagcagtt

SEQ ID NO: 417226 - DNA, 15 bp, Homo sapiens
tagtaagaaagcagt

SEQ ID NO: 417227 - DNA, 15 bp, Homo sapiens
atagtaagaaagcag

SEQ ID NO: 417228 - DNA, 15 bp, Homo sapiens
aatagtaagaaagca

SEQ ID NO: 417229 - DNA, 15 bp, Homo sapiens
gaatagtaagaaagc

SEQ ID NO: 417230 - DNA, 15 bp, Homo sapiens
tgaatagtaagaaag

SEQ ID NO: 417231 - DNA, 15 bp, Homo sapiens
ttgaatagtaagaaa

SEQ ID NO: 417232 - DNA, 15 bp, Homo sapiens
gttgaatagtaagaa

SEQ ID NO: 417233 - DNA, 15 bp, Homo sapiens
tgttgaatagtaaga

SEQ ID NO: 417234 - DNA, 15 bp, Homo sapiens
atgttgaatagtaag

SEQ ID NO: 417235 - DNA, 15 bp, Homo sapiens
catgttgaatagtaa

SEQ ID NO: 417236 - DNA, 15 bp, Homo sapiens
ccatgttgaatagta

SEQ ID NO: 417237 - DNA, 15 bp, Homo sapiens
gccatgttgaatagt

SEQ ID NO: 417238 - DNA, 15 bp, Homo sapiens
agccatgttgaatag

SEQ ID NO: 417239 - DNA, 15 bp, Homo sapiens
aagccatgttgaata

SEQ ID NO: 417240 - DNA, 15 bp, Homo sapiens
aaagccatgttgaat

SEQ ID NO: 417241 - DNA, 15 bp, Homo sapiens
aaaagccatgttgaa

SEQ ID NO: 417242 - DNA, 15 bp, Homo sapiens
taaaagccatgttga

SEQ ID NO: 417243 - DNA, 15 bp, Homo sapiens
ataaaagccatgttg

SEQ ID NO: 417244 - DNA, 15 bp, Homo sapiens
aataaaagccatgtt

SEQ ID NO: 417245 - DNA, 15 bp, Homo sapiens
aaataaaagccatgt

SEQ ID NO: 417246 - DNA, 15 bp, Homo sapiens
aaaataaaagccatg

SEQ ID NO: 417247 - DNA, 15 bp, Homo sapiens
aaaaataaaagccat

SEQ ID NO: 417248 - DNA, 15 bp, Homo sapiens
taaaaataaaagcca

SEQ ID NO: 417249 - DNA, 15 bp, Homo sapiens
ttaaaaataaaagcc

SEQ ID NO: 417250 - DNA, 15 bp, Homo sapiens
tttaaaaataaaagc

SEQ ID NO: 417251 - DNA, 15 bp, Homo sapiens
atttaaaaataaaag

SEQ ID NO: 417252 - DNA, 15 bp, Homo sapiens
aatttaaaaataaaa

SEQ ID NO: 417253 - DNA, 15 bp, Homo sapiens
aaatttaaaaataaa

SEQ ID NO: 417254 - DNA, 15 bp, Homo sapiens
aaaatttaaaaataa

SEQ ID NO: 417255 - DNA, 15 bp, Homo sapiens
taaaatttaaaaata

SEQ ID NO: 417256 - DNA, 15 bp, Homo sapiens
ttaaaatttaaaaat

SEQ ID NO: 417257 - DNA, 15 bp, Homo sapiens
cttaaaatttaaaaa

SEQ ID NO: 417258 - DNA, 15 bp, Homo sapiens
acttaaaatttaaaa

SEQ ID NO: 417259 - DNA, 15 bp, Homo sapiens
tacttaaaatttaaa

SEQ ID NO: 417260 - DNA, 15 bp, Homo sapiens
atacttaaaatttaa

SEQ ID NO: 417261 - DNA, 15 bp, Homo sapiens
aatacttaaaattta

SEQ ID NO: 417262 - DNA, 15 bp, Homo sapiens
aaatacttaaaattt

SEQ ID NO: 417263 - DNA, 15 bp, Homo sapiens
aaaatacttaaaatt

SEQ ID NO: 417264 - DNA, 15 bp, Homo sapiens
taaaatacttaaaat

SEQ ID NO: 417265 - DNA, 15 bp, Homo sapiens
ttaaaatacttaaaa

SEQ ID NO: 417266 - DNA, 15 bp, Homo sapiens
tttaaaatacttaaa

SEQ ID NO: 417267 - DNA, 15 bp, Homo sapiens
ttttaaaatacttaa

SEQ ID NO: 417268 - DNA, 15 bp, Homo sapiens
attttaaaatactta

SEQ ID NO: 417269 - DNA, 15 bp, Homo sapiens
aattttaaaatactt

SEQ ID NO: 417270 - DNA, 15 bp, Homo sapiens
gaattttaaaatact

SEQ ID NO: 417271 - DNA, 15 bp, Homo sapiens
ggaattttaaaatac

SEQ ID NO: 417272 - DNA, 15 bp, Homo sapiens
tggaattttaaaata

SEQ ID NO: 417273 - DNA, 15 bp, Homo sapiens
atggaattttaaaat

SEQ ID NO: 417274 - DNA, 15 bp, Homo sapiens
catggaattttaaaa

SEQ ID NO: 417275 - DNA, 15 bp, Homo sapiens
ccatggaattttaaa

SEQ ID NO: 417276 - DNA, 15 bp, Homo sapiens
tccatggaattttaa

SEQ ID NO: 417277 - DNA, 15 bp, Homo sapiens
ttccatggaatttta

SEQ ID NO: 417278 - DNA, 15 bp, Homo sapiens
cttccatggaatttt

SEQ ID NO: 417279 - DNA, 15 bp, Homo sapiens
tcttccatggaattt

SEQ ID NO: 417280 - DNA, 15 bp, Homo sapiens
atcttccatggaatt

SEQ ID NO: 417281 - DNA, 15 bp, Homo sapiens
aatcttccatggaat

SEQ ID NO: 417282 - DNA, 15 bp, Homo sapiens
taatcttccatggaa

SEQ ID NO: 417283 - DNA, 15 bp, Homo sapiens
ataatcttccatgga

SEQ ID NO: 417284 - DNA, 15 bp, Homo sapiens
cataatcttccatgg

SEQ ID NO: 417285 - DNA, 15 bp, Homo sapiens
acataatcttccatg

SEQ ID NO: 417286 - DNA, 15 bp, Homo sapiens
tacataatcttccat

SEQ ID NO: 417287 - DNA, 15 bp, Homo sapiens
atacataatcttcca

SEQ ID NO: 417288 - DNA, 15 bp, Homo sapiens
aatacataatcttcc

SEQ ID NO: 417289 - DNA, 15 bp, Homo sapiens
aaatacataatcttc

SEQ ID NO: 417290 - DNA, 15 bp, Homo sapiens
taaatacataatctt

SEQ ID NO: 417291 - DNA, 15 bp, Homo sapiens
ataaatacataatct

SEQ ID NO: 417292 - DNA, 15 bp, Homo sapiens
tataaatacataatc

SEQ ID NO: 417293 - DNA, 15 bp, Homo sapiens
ctataaatacataat

SEQ ID NO: 417294 - DNA, 15 bp, Homo sapiens
gctataaatacataa

SEQ ID NO: 417295 - DNA, 15 bp, Homo sapiens
tgctataaatacata

SEQ ID NO: 417296 - DNA, 15 bp, Homo sapiens
ctgctataaatacat

SEQ ID NO: 417297 - DNA, 15 bp, Homo sapiens
actgctataaataca

SEQ ID NO: 417298 - DNA, 15 bp, Homo sapiens
tactgctataaatac

SEQ ID NO: 417299 - DNA, 15 bp, Homo sapiens
ttactgctataaata

SEQ ID NO: 417300 - DNA, 15 bp, Homo sapiens
tttactgctataaat

SEQ ID NO: 417301 - DNA, 15 bp, Homo sapiens
atttactgctataaa

SEQ ID NO: 417302 - DNA, 15 bp, Homo sapiens
catttactgctataa

SEQ ID NO: 417303 - DNA, 15 bp, Homo sapiens
gcatttactgctata

SEQ ID NO: 417304 - DNA, 15 bp, Homo sapiens
agcatttactgctat

SEQ ID NO: 417305 - DNA, 15 bp, Homo sapiens
gagcatttactgcta

SEQ ID NO: 417306 - DNA, 15 bp, Homo sapiens
tgagcatttactgct

SEQ ID NO: 417307 - DNA, 15 bp, Homo sapiens
ttgagcatttactgc

SEQ ID NO: 417308 - DNA, 15 bp, Homo sapiens
attgagcatttactg

SEQ ID NO: 417309 - DNA, 15 bp, Homo sapiens
tattgagcatttact

SEQ ID NO: 417310 - DNA, 15 bp, Homo sapiens
ttattgagcatttac

SEQ ID NO: 417311 - DNA, 15 bp, Homo sapiens
attattgagcattta

SEQ ID NO: 417312 - DNA, 15 bp, Homo sapiens
tattattgagcattt

SEQ ID NO: 417313 - DNA, 15 bp, Homo sapiens
atattattgagcatt

SEQ ID NO: 417314 - DNA, 15 bp, Homo sapiens
aatattattgagcat

SEQ ID NO: 417315 - DNA, 15 bp, Homo sapiens
taatattattgagca

SEQ ID NO: 417316 - DNA, 15 bp, Homo sapiens
ttaatattattgagc

SEQ ID NO: 417317 - DNA, 15 bp, Homo sapiens
attaatattattgag

SEQ ID NO: 417318 - DNA, 15 bp, Homo sapiens
tattaatattattga

SEQ ID NO: 417319 - DNA, 15 bp, Homo sapiens
atattaatattattg

SEQ ID NO: 417320 - DNA, 15 bp, Homo sapiens
gatattaatattatt

SEQ ID NO: 417321 - DNA, 15 bp, Homo sapiens
tgatattaatattat

SEQ ID NO: 417322 - DNA, 15 bp, Homo sapiens
ctgatattaatatta

SEQ ID NO: 417323 - DNA, 15 bp, Homo sapiens
tctgatattaatatt

SEQ ID NO: 417324 - DNA, 15 bp, Homo sapiens
gtctgatattaatat

SEQ ID NO: 417325 - DNA, 15 bp, Homo sapiens
ggtctgatattaata

SEQ ID NO: 417326 - DNA, 15 bp, Homo sapiens
aggtctgatattaat

SEQ ID NO: 417327 - DNA, 15 bp, Homo sapiens
caggtctgatattaa

SEQ ID NO: 417328 - DNA, 15 bp, Homo sapiens
gcaggtctgatatta

SEQ ID NO: 417329 - DNA, 15 bp, Homo sapiens
agcaggtctgatatt

SEQ ID NO: 417330 - DNA, 15 bp, Homo sapiens
aagcaggtctgatat

SEQ ID NO: 417331 - DNA, 15 bp, Homo sapiens
aaagcaggtctgata

SEQ ID NO: 417332 - DNA, 15 bp, Homo sapiens
aaaagcaggtctgat

SEQ ID NO: 417333 - DNA, 15 bp, Homo sapiens
gaaaagcaggtctga

SEQ ID NO: 417334 - DNA, 15 bp, Homo sapiens
ggaaaagcaggtctg

SEQ ID NO: 417335 - DNA, 15 bp, Homo sapiens
gggaaaagcaggtct

SEQ ID NO: 417336 - DNA, 15 bp, Homo sapiens
ggggaaaagcaggtc

SEQ ID NO: 417337 - DNA, 15 bp, Homo sapiens
gggggaaaagcaggt

SEQ ID NO: 417338 - DNA, 15 bp, Homo sapiens
agggggaaaagcagg

SEQ ID NO: 417339 - DNA, 15 bp, Homo sapiens
aagggggaaaagcag

SEQ ID NO: 417340 - DNA, 15 bp, Homo sapiens
aaagggggaaaagca

SEQ ID NO: 417341 - DNA, 15 bp, Homo sapiens
aaaagggggaaaagc

SEQ ID NO: 417342 - DNA, 15 bp, Homo sapiens
aaaaagggggaaaag

SEQ ID NO: 417343 - DNA, 15 bp, Homo sapiens
caaaaagggggaaaa

SEQ ID NO: 417344 - DNA, 15 bp, Homo sapiens
tcaaaaagggggaaa

SEQ ID NO: 417345 - DNA, 15 bp, Homo sapiens
ttcaaaaagggggaa

SEQ ID NO: 417346 - DNA, 15 bp, Homo sapiens
attcaaaaaggggga

SEQ ID NO: 417347 - DNA, 15 bp, Homo sapiens
gattcaaaaaggggg

SEQ ID NO: 417348 - DNA, 15 bp, Homo sapiens
agattcaaaaagggg

SEQ ID NO: 417349 - DNA, 15 bp, Homo sapiens
cagattcaaaaaggg

SEQ ID NO: 417350 - DNA, 15 bp, Homo sapiens
ccagattcaaaaagg

SEQ ID NO: 417351 - DNA, 15 bp, Homo sapiens
cccagattcaaaaag

SEQ ID NO: 417352 - DNA, 15 bp, Homo sapiens
acccagattcaaaaa

SEQ ID NO: 417353 - DNA, 15 bp, Homo sapiens
gacccagattcaaaa

SEQ ID NO: 417354 - DNA, 15 bp, Homo sapiens
ggacccagattcaaa

SEQ ID NO: 417355 - DNA, 15 bp, Homo sapiens
tggacccagattcaa

SEQ ID NO: 417356 - DNA, 15 bp, Homo sapiens
ttggacccagattca

SEQ ID NO: 417357 - DNA, 15 bp, Homo sapiens
tttggacccagattc

SEQ ID NO: 417358 - DNA, 15 bp, Homo sapiens
ttttggacccagatt

SEQ ID NO: 417359 - DNA, 15 bp, Homo sapiens
attttggacccagat

SEQ ID NO: 417360 - DNA, 15 bp, Homo sapiens
tattttggacccaga

SEQ ID NO: 417361 - DNA, 15 bp, Homo sapiens
ttattttggacccag

SEQ ID NO: 417362 - DNA, 15 bp, Homo sapiens
attattttggaccca

SEQ ID NO: 417363 - DNA, 15 bp, Homo sapiens
gattattttggaccc

SEQ ID NO: 417364 - DNA, 15 bp, Homo sapiens
tgattattttggacc

SEQ ID NO: 417365 - DNA, 15 bp, Homo sapiens
ttgattattttggac

SEQ ID NO: 417366 - DNA, 15 bp, Homo sapiens
tttgattattttgga

SEQ ID NO: 417367 - DNA, 15 bp, Homo sapiens
atttgattattttgg

SEQ ID NO: 417368 - DNA, 15 bp, Homo sapiens
tatttgattattttg

SEQ ID NO: 417369 - DNA, 15 bp, Homo sapiens
ctatttgattatttt

SEQ ID NO: 417370 - DNA, 15 bp, Homo sapiens
cctatttgattattt

SEQ ID NO: 417371 - DNA, 15 bp, Homo sapiens
gcctatttgattatt

SEQ ID NO: 417372 - DNA, 15 bp, Homo sapiens
agcctatttgattat

SEQ ID NO: 417373 - DNA, 15 bp, Homo sapiens
aagcctatttgatta

SEQ ID NO: 417374 - DNA, 15 bp, Homo sapiens
aaagcctatttgatt

SEQ ID NO: 417375 - DNA, 15 bp, Homo sapiens
taaagcctatttgat

SEQ ID NO: 417376 - DNA, 15 bp, Homo sapiens
gtaaagcctatttga

SEQ ID NO: 417377 - DNA, 15 bp, Homo sapiens
ggtaaagcctatttg

SEQ ID NO: 417378 - DNA, 15 bp, Homo sapiens
gggtaaagcctattt

SEQ ID NO: 417379 - DNA, 15 bp, Homo sapiens
agggtaaagcctatt

SEQ ID NO: 417380 - DNA, 15 bp, Homo sapiens
tagggtaaagcctat

SEQ ID NO: 417381 - DNA, 15 bp, Homo sapiens
atagggtaaagccta

SEQ ID NO: 417382 - DNA, 15 bp, Homo sapiens
aatagggtaaagcct

SEQ ID NO: 417383 - DNA, 15 bp, Homo sapiens
aaatagggtaaagcc

SEQ ID NO: 417384 - DNA, 15 bp, Homo sapiens
caaatagggtaaagc

SEQ ID NO: 417385 - DNA, 15 bp, Homo sapiens
acaaatagggtaaag

SEQ ID NO: 417386 - DNA, 15 bp, Homo sapiens
aacaaatagggtaaa

SEQ ID NO: 417387 - DNA, 15 bp, Homo sapiens
gaacaaatagggtaa

SEQ ID NO: 417388 - DNA, 15 bp, Homo sapiens
agaacaaatagggta

SEQ ID NO: 417389 - DNA, 15 bp, Homo sapiens
cagaacaaatagggt

SEQ ID NO: 417390 - DNA, 15 bp, Homo sapiens
acagaacaaataggg

SEQ ID NO: 417391 - DNA, 15 bp, Homo sapiens
gacagaacaaatagg

SEQ ID NO: 417392 - DNA, 15 bp, Homo sapiens
tgacagaacaaatag

SEQ ID NO: 417393 - DNA, 15 bp, Homo sapiens
ttgacagaacaaata

SEQ ID NO: 417394 - DNA, 15 bp, Homo sapiens
tttgacagaacaaat

SEQ ID NO: 417395 - DNA, 15 bp, Homo sapiens
atttgacagaacaaa

SEQ ID NO: 417396 - DNA, 15 bp, Homo sapiens
catttgacagaacaa

SEQ ID NO: 417397 - DNA, 15 bp, Homo sapiens
acatttgacagaaca

SEQ ID NO: 417398 - DNA, 15 bp, Homo sapiens
tacatttgacagaac

SEQ ID NO: 417399 - DNA, 15 bp, Homo sapiens
atacatttgacagaa

SEQ ID NO: 417400 - DNA, 15 bp, Homo sapiens
aatacatttgacaga

SEQ ID NO: 417401 - DNA, 15 bp, Homo sapiens
aaatacatttgacag

SEQ ID NO: 417402 - DNA, 15 bp, Homo sapiens
caaatacatttgaca

SEQ ID NO: 417403 - DNA, 15 bp, Homo sapiens
acaaatacatttgac

SEQ ID NO: 417404 - DNA, 15 bp, Homo sapiens
tacaaatacatttga

SEQ ID NO: 417405 - DNA, 15 bp, Homo sapiens
gtacaaatacatttg

SEQ ID NO: 417406 - DNA, 15 bp, Homo sapiens
agtacaaatacattt

SEQ ID NO: 417407 - DNA, 15 bp, Homo sapiens
cagtacaaatacatt

SEQ ID NO: 417408 - DNA, 15 bp, Homo sapiens
ccagtacaaatacat

SEQ ID NO: 417409 - DNA, 15 bp, Homo sapiens
cccagtacaaataca

SEQ ID NO: 417410 - DNA, 15 bp, Homo sapiens
acccagtacaaatac

SEQ ID NO: 417411 - DNA, 15 bp, Homo sapiens
gacccagtacaaata

SEQ ID NO: 417412 - DNA, 15 bp, Homo sapiens
agacccagtacaaat

SEQ ID NO: 417413 - DNA, 15 bp, Homo sapiens
cagacccagtacaaa

SEQ ID NO: 417414 - DNA, 15 bp, Homo sapiens
tcagacccagtacaa

SEQ ID NO: 417415 - DNA, 15 bp, Homo sapiens
ctcagacccagtaca

SEQ ID NO: 417416 - DNA, 15 bp, Homo sapiens
tctcagacccagtac

SEQ ID NO: 417417 - DNA, 15 bp, Homo sapiens
gtctcagacccagta

SEQ ID NO: 417418 - DNA, 15 bp, Homo sapiens
tgtctcagacccagt

SEQ ID NO: 417419 - DNA, 15 bp, Homo sapiens
gtgtctcagacccag

SEQ ID NO: 417420 - DNA, 15 bp, Homo sapiens
ggtgtctcagaccca

SEQ ID NO: 417421 - DNA, 15 bp, Homo sapiens
cggtgtctcagaccc

SEQ ID NO: 417422 - DNA, 15 bp, Homo sapiens
acggtgtctcagacc

SEQ ID NO: 417423 - DNA, 15 bp, Homo sapiens
tacggtgtctcagac

SEQ ID NO: 417424 - DNA, 15 bp, Homo sapiens
ttacggtgtctcaga

SEQ ID NO: 417425 - DNA, 15 bp, Homo sapiens
gttacggtgtctcag

SEQ ID NO: 417426 - DNA, 15 bp, Homo sapiens
tgttacggtgtctca

SEQ ID NO: 417427 - DNA, 15 bp, Homo sapiens
gtgttacggtgtctc

SEQ ID NO: 417428 - DNA, 15 bp, Homo sapiens
tgtgttacggtgtct

SEQ ID NO: 417429 - DNA, 15 bp, Homo sapiens
ttgtgttacggtgtc

SEQ ID NO: 417430 - DNA, 15 bp, Homo sapiens
tttgtgttacggtgt

SEQ ID NO: 417431 - DNA, 15 bp, Homo sapiens
ctttgtgttacggtg

SEQ ID NO: 417432 - DNA, 15 bp, Homo sapiens
tctttgtgttacggt

SEQ ID NO: 417433 - DNA, 15 bp, Homo sapiens
ttctttgtgttacgg

SEQ ID NO: 417434 - DNA, 15 bp, Homo sapiens
gttctttgtgttacg

SEQ ID NO: 417435 - DNA, 15 bp, Homo sapiens
tgttctttgtgttac

SEQ ID NO: 417436 - DNA, 15 bp, Homo sapiens
atgttctttgtgtta

SEQ ID NO: 417437 - DNA, 15 bp, Homo sapiens
tatgttctttgtgtt

SEQ ID NO: 417438 - DNA, 15 bp, Homo sapiens
ttatgttctttgtgt

SEQ ID NO: 417439 - DNA, 15 bp, Homo sapiens
attatgttctttgtg

SEQ ID NO: 417440 - DNA, 15 bp, Homo sapiens
gattatgttctttgt

SEQ ID NO: 417441 - DNA, 15 bp, Homo sapiens
tgattatgttctttg

SEQ ID NO: 417442 - DNA, 15 bp, Homo sapiens
atgattatgttcttt

SEQ ID NO: 417443 - DNA, 15 bp, Homo sapiens
aatgattatgttctt

SEQ ID NO: 417444 - DNA, 15 bp, Homo sapiens
taatgattatgttct

SEQ ID NO: 417445 - DNA, 15 bp, Homo sapiens
gtaatgattatgttc

SEQ ID NO: 417446 - DNA, 15 bp, Homo sapiens
agtaatgattatgtt

SEQ ID NO: 417447 - DNA, 15 bp, Homo sapiens
cagtaatgattatgt

SEQ ID NO: 417448 - DNA, 15 bp, Homo sapiens
ccagtaatgattatg

SEQ ID NO: 417449 - DNA, 15 bp, Homo sapiens
tccagtaatgattat

SEQ ID NO: 417450 - DNA, 15 bp, Homo sapiens
ttccagtaatgatta

SEQ ID NO: 417451 - DNA, 15 bp, Homo sapiens
attccagtaatgatt

SEQ ID NO: 417452 - DNA, 15 bp, Homo sapiens
cattccagtaatgat

SEQ ID NO: 417453 - DNA, 15 bp, Homo sapiens
acattccagtaatga

SEQ ID NO: 417454 - DNA, 15 bp, Homo sapiens
tacattccagtaatg

SEQ ID NO: 417455 - DNA, 15 bp, Homo sapiens
ttacattccagtaat

SEQ ID NO: 417456 - DNA, 15 bp, Homo sapiens
attacattccagtaa

SEQ ID NO: 417457 - DNA, 15 bp, Homo sapiens
cattacattccagta

SEQ ID NO: 417458 - DNA, 15 bp, Homo sapiens
tcattacattccagt

SEQ ID NO: 417459 - DNA, 15 bp, Homo sapiens
ctcattacattccag

SEQ ID NO: 417460 - DNA, 15 bp, Homo sapiens
cctcattacattcca

SEQ ID NO: 417461 - DNA, 15 bp, Homo sapiens
tcctcattacattcc

SEQ ID NO: 417462 - DNA, 15 bp, Homo sapiens
ctcctcattacattc

SEQ ID NO: 417463 - DNA, 15 bp, Homo sapiens
tctcctcattacatt

SEQ ID NO: 417464 - DNA, 15 bp, Homo sapiens
ttctcctcattacat

SEQ ID NO: 417465 - DNA, 15 bp, Homo sapiens
attctcctcattaca

SEQ ID NO: 417466 - DNA, 15 bp, Homo sapiens
cattctcctcattac

SEQ ID NO: 417467 - DNA, 15 bp, Homo sapiens
acattctcctcatta

SEQ ID NO: 417468 - DNA, 15 bp, Homo sapiens
cacattctcctcatt

SEQ ID NO: 417469 - DNA, 15 bp, Homo sapiens
gcacattctcctcat

SEQ ID NO: 417470 - DNA, 15 bp, Homo sapiens
tgcacattctcctca

SEQ ID NO: 417471 - DNA, 15 bp, Homo sapiens
atgcacattctcctc

SEQ ID NO: 417472 - DNA, 15 bp, Homo sapiens
tatgcacattctcct

SEQ ID NO: 417473 - DNA, 15 bp, Homo sapiens
atatgcacattctcc

SEQ ID NO: 417474 - DNA, 15 bp, Homo sapiens
gatatgcacattctc

SEQ ID NO: 417475 - DNA, 15 bp, Homo sapiens
agatatgcacattct

SEQ ID NO: 417476 - DNA, 15 bp, Homo sapiens
aagatatgcacattc

SEQ ID NO: 417477 - DNA, 15 bp, Homo sapiens
caagatatgcacatt

SEQ ID NO: 417478 - DNA, 15 bp, Homo sapiens
ccaagatatgcacat

SEQ ID NO: 417479 - DNA, 15 bp, Homo sapiens
cccaagatatgcaca

SEQ ID NO: 417480 - DNA, 15 bp, Homo sapiens
tcccaagatatgcac

SEQ ID NO: 417481 - DNA, 15 bp, Homo sapiens
ttcccaagatatgca

SEQ ID NO: 417482 - DNA, 15 bp, Homo sapiens
attcccaagatatgc

SEQ ID NO: 417483 - DNA, 15 bp, Homo sapiens
aattcccaagatatg

SEQ ID NO: 417484 - DNA, 15 bp, Homo sapiens
taattcccaagatat

SEQ ID NO: 417485 - DNA, 15 bp, Homo sapiens
gtaattcccaagata

SEQ ID NO: 417486 - DNA, 15 bp, Homo sapiens
ggtaattcccaagat

SEQ ID NO: 417487 - DNA, 15 bp, Homo sapiens
tggtaattcccaaga

SEQ ID NO: 417488 - DNA, 15 bp, Homo sapiens
atggtaattcccaag

SEQ ID NO: 417489 - DNA, 15 bp, Homo sapiens
tatggtaattcccaa

SEQ ID NO: 417490 - DNA, 15 bp, Homo sapiens
atatggtaattccca

SEQ ID NO: 417491 - DNA, 15 bp, Homo sapiens
tatatggtaattccc

SEQ ID NO: 417492 - DNA, 15 bp, Homo sapiens
atatatggtaattcc

SEQ ID NO: 417493 - DNA, 15 bp, Homo sapiens
catatatggtaattc

SEQ ID NO: 417494 - DNA, 15 bp, Homo sapiens
gcatatatggtaatt

SEQ ID NO: 417495 - DNA, 15 bp, Homo sapiens
tgcatatatggtaat

SEQ ID NO: 417496 - DNA, 15 bp, Homo sapiens
atgcatatatggtaa

SEQ ID NO: 417497 - DNA, 15 bp, Homo sapiens
catgcatatatggta

SEQ ID NO: 417498 - DNA, 15 bp, Homo sapiens
acatgcatatatggt

SEQ ID NO: 417499 - DNA, 15 bp, Homo sapiens
aacatgcatatatgg

SEQ ID NO: 417500 - DNA, 15 bp, Homo sapiens
gaacatgcatatatg

SEQ ID NO: 417501 - DNA, 15 bp, Homo sapiens
tgaacatgcatatat

SEQ ID NO: 417502 - DNA, 15 bp, Homo sapiens
gtgaacatgcatata

SEQ ID NO: 417503 - DNA, 15 bp, Homo sapiens
agtgaacatgcatat

SEQ ID NO: 417504 - DNA, 15 bp, Homo sapiens
tagtgaacatgcata

SEQ ID NO: 417505 - DNA, 15 bp, Homo sapiens
gtagtgaacatgcat

SEQ ID NO: 417506 - DNA, 15 bp, Homo sapiens
ggtagtgaacatgca

SEQ ID NO: 417507 - DNA, 15 bp, Homo sapiens
aggtagtgaacatgc

SEQ ID NO: 417508 - DNA, 15 bp, Homo sapiens
gaggtagtgaacatg

SEQ ID NO: 417509 - DNA, 15 bp, Homo sapiens
agaggtagtgaacat

SEQ ID NO: 417510 - DNA, 15 bp, Homo sapiens
aagaggtagtgaaca

SEQ ID NO: 417511 - DNA, 15 bp, Homo sapiens
gaagaggtagtgaac

SEQ ID NO: 417512 - DNA, 15 bp, Homo sapiens
ggaagaggtagtgaa

SEQ ID NO: 417513 - DNA, 15 bp, Homo sapiens
aggaagaggtagtga

SEQ ID NO: 417514 - DNA, 15 bp, Homo sapiens
gaggaagaggtagtg

SEQ ID NO: 417515 - DNA, 15 bp, Homo sapiens
ggaggaagaggtagt

SEQ ID NO: 417516 - DNA, 15 bp, Homo sapiens
gggaggaagaggtag

SEQ ID NO: 417517 - DNA, 15 bp, Homo sapiens
ggggaggaagaggta

SEQ ID NO: 417518 - DNA, 15 bp, Homo sapiens
tggggaggaagaggt

SEQ ID NO: 417519 - DNA, 15 bp, Homo sapiens
gtggggaggaagagg

SEQ ID NO: 417520 - DNA, 15 bp, Homo sapiens
agtggggaggaagag

SEQ ID NO: 417521 - DNA, 15 bp, Homo sapiens
gagtggggaggaaga

SEQ ID NO: 417522 - DNA, 15 bp, Homo sapiens
agagtggggaggaag

SEQ ID NO: 417523 - DNA, 15 bp, Homo sapiens
aagagtggggaggaa

SEQ ID NO: 417524 - DNA, 15 bp, Homo sapiens
gaagagtggggagga

SEQ ID NO: 417525 - DNA, 15 bp, Homo sapiens
ggaagagtggggagg

SEQ ID NO: 417526 - DNA, 15 bp, Homo sapiens
gggaagagtggggag

SEQ ID NO: 417527 - DNA, 15 bp, Homo sapiens
tgggaagagtgggga

SEQ ID NO: 417528 - DNA, 15 bp, Homo sapiens
gtgggaagagtgggg

SEQ ID NO: 417529 - DNA, 15 bp, Homo sapiens
ggtgggaagagtggg

SEQ ID NO: 417530 - DNA, 15 bp, Homo sapiens
tggtgggaagagtgg

SEQ ID NO: 417531 - DNA, 15 bp, Homo sapiens
ttggtgggaagagtg

SEQ ID NO: 417532 - DNA, 15 bp, Homo sapiens
gttggtgggaagagt

SEQ ID NO: 417533 - DNA, 15 bp, Homo sapiens
agttggtgggaagag

SEQ ID NO: 417534 - DNA, 15 bp, Homo sapiens
gagttggtgggaaga

SEQ ID NO: 417535 - DNA, 15 bp, Homo sapiens
tgagttggtgggaag

SEQ ID NO: 417536 - DNA, 15 bp, Homo sapiens
ctgagttggtgggaa

SEQ ID NO: 417537 - DNA, 15 bp, Homo sapiens
tctgagttggtggga

SEQ ID NO: 417538 - DNA, 15 bp, Homo sapiens
gtctgagttggtggg

SEQ ID NO: 417539 - DNA, 15 bp, Homo sapiens
agtctgagttggtgg

SEQ ID NO: 417540 - DNA, 15 bp, Homo sapiens
gagtctgagttggtg

SEQ ID NO: 417541 - DNA, 15 bp, Homo sapiens
ggagtctgagttggt

SEQ ID NO: 417542 - DNA, 15 bp, Homo sapiens
tggagtctgagttgg

SEQ ID NO: 417543 - DNA, 15 bp, Homo sapiens
ctggagtctgagttg

SEQ ID NO: 417544 - DNA, 15 bp, Homo sapiens
tctggagtctgagtt

SEQ ID NO: 417545 - DNA, 15 bp, Homo sapiens
atctggagtctgagt

SEQ ID NO: 417546 - DNA, 15 bp, Homo sapiens
gatctggagtctgag

SEQ ID NO: 417547 - DNA, 15 bp, Homo sapiens
ggatctggagtctga

SEQ ID NO: 417548 - DNA, 15 bp, Homo sapiens
tggatctggagtctg

SEQ ID NO: 417549 - DNA, 15 bp, Homo sapiens
atggatctggagtct

SEQ ID NO: 417550 - DNA, 15 bp, Homo sapiens
tatggatctggagtc

SEQ ID NO: 417551 - DNA, 15 bp, Homo sapiens
atatggatctggagt

SEQ ID NO: 417552 - DNA, 15 bp, Homo sapiens
aatatggatctggag

SEQ ID NO: 417553 - DNA, 15 bp, Homo sapiens
gaatatggatctgga

SEQ ID NO: 417554 - DNA, 15 bp, Homo sapiens
agaatatggatctgg

SEQ ID NO: 417555 - DNA, 15 bp, Homo sapiens
aagaatatggatctg

SEQ ID NO: 417556 - DNA, 15 bp, Homo sapiens
aaagaatatggatct

SEQ ID NO: 417557 - DNA, 15 bp, Homo sapiens
aaaagaatatggatc

SEQ ID NO: 417558 - DNA, 15 bp, Homo sapiens
aaaaagaatatggat

SEQ ID NO: 417559 - DNA, 15 bp, Homo sapiens
aaaaaagaatatgga

SEQ ID NO: 417560 - DNA, 15 bp, Homo sapiens
caaaaaagaatatgg

SEQ ID NO: 417561 - DNA, 15 bp, Homo sapiens
ccaaaaaagaatatg

SEQ ID NO: 417562 - DNA, 15 bp, Homo sapiens
cccaaaaaagaatat

SEQ ID NO: 417563 - DNA, 15 bp, Homo sapiens
tcccaaaaaagaata

SEQ ID NO: 417564 - DNA, 15 bp, Homo sapiens
gtcccaaaaaagaat

SEQ ID NO: 417565 - DNA, 15 bp, Homo sapiens
agtcccaaaaaagaa

SEQ ID NO: 417566 - DNA, 15 bp, Homo sapiens
gagtcccaaaaaaga

SEQ ID NO: 417567 - DNA, 15 bp, Homo sapiens
ggagtcccaaaaaag

SEQ ID NO: 417568 - DNA, 15 bp, Homo sapiens
tggagtcccaaaaaa

SEQ ID NO: 417569 - DNA, 15 bp, Homo sapiens
ctggagtcccaaaaa

SEQ ID NO: 417570 - DNA, 15 bp, Homo sapiens
tctggagtcccaaaa

SEQ ID NO: 417571 - DNA, 15 bp, Homo sapiens
ttctggagtcccaaa

SEQ ID NO: 417572 - DNA, 15 bp, Homo sapiens
tttctggagtcccaa

SEQ ID NO: 417573 - DNA, 15 bp, Homo sapiens
atttctggagtccca

SEQ ID NO: 417574 - DNA, 15 bp, Homo sapiens
aatttctggagtccc

SEQ ID NO: 417575 - DNA, 15 bp, Homo sapiens
gaatttctggagtcc

SEQ ID NO: 417576 - DNA, 15 bp, Homo sapiens
tgaatttctggagtc

SEQ ID NO: 417577 - DNA, 15 bp, Homo sapiens
gtgaatttctggagt

SEQ ID NO: 417578 - DNA, 15 bp, Homo sapiens
ggtgaatttctggag

SEQ ID NO: 417579 - DNA, 15 bp, Homo sapiens
tggtgaatttctgga

SEQ ID NO: 417580 - DNA, 15 bp, Homo sapiens
ctggtgaatttctgg

SEQ ID NO: 417581 - DNA, 15 bp, Homo sapiens
cctggtgaatttctg

SEQ ID NO: 417582 - DNA, 15 bp, Homo sapiens
ccctggtgaatttct

SEQ ID NO: 417583 - DNA, 15 bp, Homo sapiens
tccctggtgaatttc

SEQ ID NO: 417584 - DNA, 15 bp, Homo sapiens
atccctggtgaattt

SEQ ID NO: 417585 - DNA, 15 bp, Homo sapiens
tatccctggtgaatt

SEQ ID NO: 417586 - DNA, 15 bp, Homo sapiens
atatccctggtgaat

SEQ ID NO: 417587 - DNA, 15 bp, Homo sapiens
aatatccctggtgaa

SEQ ID NO: 417588 - DNA, 15 bp, Homo sapiens
gaatatccctggtga

SEQ ID NO: 417589 - DNA, 15 bp, Homo sapiens
agaatatccctggtg

SEQ ID NO: 417590 - DNA, 15 bp, Homo sapiens
aagaatatccctggt

SEQ ID NO: 417591 - DNA, 15 bp, Homo sapiens
gaagaatatccctgg

SEQ ID NO: 417592 - DNA, 15 bp, Homo sapiens
ggaagaatatccctg

SEQ ID NO: 417593 - DNA, 15 bp, Homo sapiens
tggaagaatatccct

SEQ ID NO: 417594 - DNA, 15 bp, Homo sapiens
ttggaagaatatccc

SEQ ID NO: 417595 - DNA, 15 bp, Homo sapiens
tttggaagaatatcc

SEQ ID NO: 417596 - DNA, 15 bp, Homo sapiens
ctttggaagaatatc

SEQ ID NO: 417597 - DNA, 15 bp, Homo sapiens
cctttggaagaatat

SEQ ID NO: 417598 - DNA, 15 bp, Homo sapiens
acctttggaagaata

SEQ ID NO: 417599 - DNA, 15 bp, Homo sapiens
aacctttggaagaat

SEQ ID NO: 417600 - DNA, 15 bp, Homo sapiens
aaacctttggaagaa

SEQ ID NO: 417601 - DNA, 15 bp, Homo sapiens
caaacctttggaaga

SEQ ID NO: 417602 - DNA, 15 bp, Homo sapiens
acaaacctttggaag

SEQ ID NO: 417603 - DNA, 15 bp, Homo sapiens
cacaaacctttggaa

SEQ ID NO: 417604 - DNA, 15 bp, Homo sapiens
tcacaaacctttgga

SEQ ID NO: 417605 - DNA, 15 bp, Homo sapiens
atcacaaacctttgg

SEQ ID NO: 417606 - DNA, 15 bp, Homo sapiens
tatcacaaacctttg

SEQ ID NO: 417607 - DNA, 15 bp, Homo sapiens
gtatcacaaaccttt

SEQ ID NO: 417608 - DNA, 15 bp, Homo sapiens
ggtatcacaaacctt

SEQ ID NO: 417609 - DNA, 15 bp, Homo sapiens
aggtatcacaaacct

SEQ ID NO: 417610 - DNA, 15 bp, Homo sapiens
gaggtatcacaaacc

SEQ ID NO: 417611 - DNA, 15 bp, Homo sapiens
ggaggtatcacaaac

SEQ ID NO: 417612 - DNA, 15 bp, Homo sapiens
aggaggtatcacaaa

SEQ ID NO: 417613 - DNA, 15 bp, Homo sapiens
aaggaggtatcacaa

SEQ ID NO: 417614 - DNA, 15 bp, Homo sapiens
aaaggaggtatcaca

SEQ ID NO: 417615 - DNA, 15 bp, Homo sapiens
aaaaggaggtatcac

SEQ ID NO: 417616 - DNA, 15 bp, Homo sapiens
gaaaaggaggtatca

SEQ ID NO: 417617 - DNA, 15 bp, Homo sapiens
agaaaaggaggtatc

SEQ ID NO: 417618 - DNA, 15 bp, Homo sapiens
gagaaaaggaggtat

SEQ ID NO: 417619 - DNA, 15 bp, Homo sapiens
agagaaaaggaggta

SEQ ID NO: 417620 - DNA, 15 bp, Homo sapiens
aagagaaaaggaggt

SEQ ID NO: 417621 - DNA, 15 bp, Homo sapiens
caagagaaaaggagg

SEQ ID NO: 417622 - DNA, 15 bp, Homo sapiens
gcaagagaaaaggag

SEQ ID NO: 417623 - DNA, 15 bp, Homo sapiens
agcaagagaaaagga

SEQ ID NO: 417624 - DNA, 15 bp, Homo sapiens
cagcaagagaaaagg

SEQ ID NO: 417625 - DNA, 15 bp, Homo sapiens
tcagcaagagaaaag

SEQ ID NO: 417626 - DNA, 15 bp, Homo sapiens
atcagcaagagaaaa

SEQ ID NO: 417627 - DNA, 15 bp, Homo sapiens
tatcagcaagagaaa

SEQ ID NO: 417628 - DNA, 15 bp, Homo sapiens
atatcagcaagagaa

SEQ ID NO: 417629 - DNA, 15 bp, Homo sapiens
tatatcagcaagaga

SEQ ID NO: 417630 - DNA, 15 bp, Homo sapiens
ttatatcagcaagag

SEQ ID NO: 417631 - DNA, 15 bp, Homo sapiens
attatatcagcaaga

SEQ ID NO: 417632 - DNA, 15 bp, Homo sapiens
aattatatcagcaag

SEQ ID NO: 417633 - DNA, 15 bp, Homo sapiens
caattatatcagcaa

SEQ ID NO: 417634 - DNA, 15 bp, Homo sapiens
gcaattatatcagca

SEQ ID NO: 417635 - DNA, 15 bp, Homo sapiens
ggcaattatatcagc

SEQ ID NO: 417636 - DNA, 15 bp, Homo sapiens
tggcaattatatcag

SEQ ID NO: 417637 - DNA, 15 bp, Homo sapiens
ttggcaattatatca

SEQ ID NO: 417638 - DNA, 15 bp, Homo sapiens
cttggcaattatatc

SEQ ID NO: 417639 - DNA, 15 bp, Homo sapiens
gcttggcaattatat

SEQ ID NO: 417640 - DNA, 15 bp, Homo sapiens
agcttggcaattata

SEQ ID NO: 417641 - DNA, 15 bp, Homo sapiens
cagcttggcaattat

SEQ ID NO: 417642 - DNA, 15 bp, Homo sapiens
acagcttggcaatta

SEQ ID NO: 417643 - DNA, 15 bp, Homo sapiens
cacagcttggcaatt

SEQ ID NO: 417644 - DNA, 15 bp, Homo sapiens
acacagcttggcaat

SEQ ID NO: 417645 - DNA, 15 bp, Homo sapiens
cacacagcttggcaa

SEQ ID NO: 417646 - DNA, 15 bp, Homo sapiens
tcacacagcttggca

SEQ ID NO: 417647 - DNA, 15 bp, Homo sapiens
ctcacacagcttggc

SEQ ID NO: 417648 - DNA, 15 bp, Homo sapiens
cctcacacagcttgg

SEQ ID NO: 417649 - DNA, 15 bp, Homo sapiens
acctcacacagcttg

SEQ ID NO: 417650 - DNA, 15 bp, Homo sapiens
tacctcacacagctt

SEQ ID NO: 417651 - DNA, 15 bp, Homo sapiens
ttacctcacacagct

SEQ ID NO: 417652 - DNA, 15 bp, Homo sapiens
cttacctcacacagc

SEQ ID NO: 417653 - DNA, 15 bp, Homo sapiens
ccttacctcacacag

SEQ ID NO: 417654 - DNA, 15 bp, Homo sapiens
tccttacctcacaca

SEQ ID NO: 417655 - DNA, 15 bp, Homo sapiens
ctccttacctcacac

SEQ ID NO: 417656 - DNA, 15 bp, Homo sapiens
gctccttacctcaca

SEQ ID NO: 417657 - DNA, 15 bp, Homo sapiens
agctccttacctcac

SEQ ID NO: 417658 - DNA, 15 bp, Homo sapiens
gagctccttacctca

SEQ ID NO: 417659 - DNA, 15 bp, Homo sapiens
agagctccttacctc

SEQ ID NO: 417660 - DNA, 15 bp, Homo sapiens
gagagctccttacct

SEQ ID NO: 417661 - DNA, 15 bp, Homo sapiens
agagagctccttacc

SEQ ID NO: 417662 - DNA, 15 bp, Homo sapiens
tagagagctccttac

SEQ ID NO: 417663 - DNA, 15 bp, Homo sapiens
atagagagctcctta

SEQ ID NO: 417664 - DNA, 15 bp, Homo sapiens
gatagagagctcctt

SEQ ID NO: 417665 - DNA, 15 bp, Homo sapiens
ggatagagagctcct

SEQ ID NO: 417666 - DNA, 15 bp, Homo sapiens
aggatagagagctcc

SEQ ID NO: 417667 - DNA, 15 bp, Homo sapiens
caggatagagagctc

SEQ ID NO: 417668 - DNA, 15 bp, Homo sapiens
gcaggatagagagct

SEQ ID NO: 417669 - DNA, 15 bp, Homo sapiens
ggcaggatagagagc

SEQ ID NO: 417670 - DNA, 15 bp, Homo sapiens
tggcaggatagagag

SEQ ID NO: 417671 - DNA, 15 bp, Homo sapiens
ctggcaggatagaga

SEQ ID NO: 417672 - DNA, 15 bp, Homo sapiens
actggcaggatagag

SEQ ID NO: 417673 - DNA, 15 bp, Homo sapiens
aactggcaggataga

SEQ ID NO: 417674 - DNA, 15 bp, Homo sapiens
gaactggcaggatag

SEQ ID NO: 417675 - DNA, 15 bp, Homo sapiens
agaactggcaggata

SEQ ID NO: 417676 - DNA, 15 bp, Homo sapiens
gagaactggcaggat

SEQ ID NO: 417677 - DNA, 15 bp, Homo sapiens
tgagaactggcagga

SEQ ID NO: 417678 - DNA, 15 bp, Homo sapiens
atgagaactggcagg

SEQ ID NO: 417679 - DNA, 15 bp, Homo sapiens
aatgagaactggcag

SEQ ID NO: 417680 - DNA, 15 bp, Homo sapiens
aaatgagaactggca

SEQ ID NO: 417681 - DNA, 15 bp, Homo sapiens
taaatgagaactggc

SEQ ID NO: 417682 - DNA, 15 bp, Homo sapiens
gtaaatgagaactgg

SEQ ID NO: 417683 - DNA, 15 bp, Homo sapiens
tgtaaatgagaactg

SEQ ID NO: 417684 - DNA, 15 bp, Homo sapiens
ctgtaaatgagaact

SEQ ID NO: 417685 - DNA, 15 bp, Homo sapiens
tctgtaaatgagaac

SEQ ID NO: 417686 - DNA, 15 bp, Homo sapiens
gtctgtaaatgagaa

SEQ ID NO: 417687 - DNA, 15 bp, Homo sapiens
tgtctgtaaatgaga

SEQ ID NO: 417688 - DNA, 15 bp, Homo sapiens
ctgtctgtaaatgag

SEQ ID NO: 417689 - DNA, 15 bp, Homo sapiens
tctgtctgtaaatga

SEQ ID NO: 417690 - DNA, 15 bp, Homo sapiens
ttctgtctgtaaatg

SEQ ID NO: 417691 - DNA, 15 bp, Homo sapiens
tttctgtctgtaaat

SEQ ID NO: 417692 - DNA, 15 bp, Homo sapiens
ctttctgtctgtaaa

SEQ ID NO: 417693 - DNA, 15 bp, Homo sapiens
gctttctgtctgtaa

SEQ ID NO: 417694 - DNA, 15 bp, Homo sapiens
ggctttctgtctgta

SEQ ID NO: 417695 - DNA, 15 bp, Homo sapiens
tggctttctgtctgt

SEQ ID NO: 417696 - DNA, 15 bp, Homo sapiens
atggctttctgtctg

SEQ ID NO: 417697 - DNA, 15 bp, Homo sapiens
aatggctttctgtct

SEQ ID NO: 417698 - DNA, 15 bp, Homo sapiens
taatggctttctgtc

SEQ ID NO: 417699 - DNA, 15 bp, Homo sapiens
gtaatggctttctgt

SEQ ID NO: 417700 - DNA, 15 bp, Homo sapiens
tgtaatggctttctg

SEQ ID NO: 417701 - DNA, 15 bp, Homo sapiens
atgtaatggctttct

SEQ ID NO: 417702 - DNA, 15 bp, Homo sapiens
gatgtaatggctttc

SEQ ID NO: 417703 - DNA, 15 bp, Homo sapiens
agatgtaatggcttt

SEQ ID NO: 417704 - DNA, 15 bp, Homo sapiens
aagatgtaatggctt

SEQ ID NO: 417705 - DNA, 15 bp, Homo sapiens
gaagatgtaatggct

SEQ ID NO: 417706 - DNA, 15 bp, Homo sapiens
tgaagatgtaatggc

SEQ ID NO: 417707 - DNA, 15 bp, Homo sapiens
atgaagatgtaatgg

SEQ ID NO: 417708 - DNA, 15 bp, Homo sapiens
aatgaagatgtaatg

SEQ ID NO: 417709 - DNA, 15 bp, Homo sapiens
aaatgaagatgtaat

SEQ ID NO: 417710 - DNA, 15 bp, Homo sapiens
gaaatgaagatgtaa

SEQ ID NO: 417711 - DNA, 15 bp, Homo sapiens
tgaaatgaagatgta

SEQ ID NO: 417712 - DNA, 15 bp, Homo sapiens
ctgaaatgaagatgt

SEQ ID NO: 417713 - DNA, 15 bp, Homo sapiens
gctgaaatgaagatg

SEQ ID NO: 417714 - DNA, 15 bp, Homo sapiens
ggctgaaatgaagat

SEQ ID NO: 417715 - DNA, 15 bp, Homo sapiens
tggctgaaatgaaga

SEQ ID NO: 417716 - DNA, 15 bp, Homo sapiens
gtggctgaaatgaag

SEQ ID NO: 417717 - DNA, 15 bp, Homo sapiens
tgtggctgaaatgaa

SEQ ID NO: 417718 - DNA, 15 bp, Homo sapiens
ctgtggctgaaatga

SEQ ID NO: 417719 - DNA, 15 bp, Homo sapiens
tctgtggctgaaatg

SEQ ID NO: 417720 - DNA, 15 bp, Homo sapiens
gtctgtggctgaaat

SEQ ID NO: 417721 - DNA, 15 bp, Homo sapiens
ggtctgtggctgaaa

SEQ ID NO: 417722 - DNA, 15 bp, Homo sapiens
tggtctgtggctgaa

SEQ ID NO: 417723 - DNA, 15 bp, Homo sapiens
ttggtctgtggctga

SEQ ID NO: 417724 - DNA, 15 bp, Homo sapiens
tttggtctgtggctg

SEQ ID NO: 417725 - DNA, 15 bp, Homo sapiens
atttggtctgtggct

SEQ ID NO: 417726 - DNA, 15 bp, Homo sapiens
catttggtctgtggc

SEQ ID NO: 417727 - DNA, 15 bp, Homo sapiens
acatttggtctgtgg

SEQ ID NO: 417728 - DNA, 15 bp, Homo sapiens
aacatttggtctgtg

SEQ ID NO: 417729 - DNA, 15 bp, Homo sapiens
gaacatttggtctgt

SEQ ID NO: 417730 - DNA, 15 bp, Homo sapiens
tgaacatttggtctg

SEQ ID NO: 417731 - DNA, 15 bp, Homo sapiens
ctgaacatttggtct

SEQ ID NO: 417732 - DNA, 15 bp, Homo sapiens
actgaacatttggtc

SEQ ID NO: 417733 - DNA, 15 bp, Homo sapiens
cactgaacatttggt

SEQ ID NO: 417734 - DNA, 15 bp, Homo sapiens
acactgaacatttgg

SEQ ID NO: 417735 - DNA, 15 bp, Homo sapiens
cacactgaacatttg

SEQ ID NO: 417736 - DNA, 15 bp, Homo sapiens
acacactgaacattt

SEQ ID NO: 417737 - DNA, 15 bp, Homo sapiens
gacacactgaacatt

SEQ ID NO: 417738 - DNA, 15 bp, Homo sapiens
agacacactgaacat

SEQ ID NO: 417739 - DNA, 15 bp, Homo sapiens
aagacacactgaaca

SEQ ID NO: 417740 - DNA, 15 bp, Homo sapiens
taagacacactgaac

SEQ ID NO: 417741 - DNA, 15 bp, Homo sapiens
ataagacacactgaa

SEQ ID NO: 417742 - DNA, 15 bp, Homo sapiens
aataagacacactga

SEQ ID NO: 417743 - DNA, 15 bp, Homo sapiens
taataagacacactg

SEQ ID NO: 417744 - DNA, 15 bp, Homo sapiens
ttaataagacacact

SEQ ID NO: 417745 - DNA, 15 bp, Homo sapiens
tttaataagacacac

SEQ ID NO: 417746 - DNA, 15 bp, Homo sapiens
ttttaataagacaca

SEQ ID NO: 417747 - DNA, 15 bp, Homo sapiens
tttttaataagacac

SEQ ID NO: 417748 - DNA, 15 bp, Homo sapiens
ttttttaataagaca

SEQ ID NO: 417749 - DNA, 15 bp, Homo sapiens
attttttaataagac

SEQ ID NO: 417750 - DNA, 15 bp, Homo sapiens
tattttttaataaga

SEQ ID NO: 417751 - DNA, 15 bp, Homo sapiens
atattttttaataag

SEQ ID NO: 417752 - DNA, 15 bp, Homo sapiens
aatattttttaataa

SEQ ID NO: 417753 - DNA, 15 bp, Homo sapiens
taatattttttaata

SEQ ID NO: 417754 - DNA, 15 bp, Homo sapiens
ttaatattttttaat

SEQ ID NO: 417755 - DNA, 15 bp, Homo sapiens
gttaatattttttaa

SEQ ID NO: 417756 - DNA, 15 bp, Homo sapiens
agttaatatttttta

SEQ ID NO: 417757 - DNA, 15 bp, Homo sapiens
gagttaatatttttt

SEQ ID NO: 417758 - DNA, 15 bp, Homo sapiens
tgagttaatattttt

SEQ ID NO: 417759 - DNA, 15 bp, Homo sapiens
ttgagttaatatttt

SEQ ID NO: 417760 - DNA, 15 bp, Homo sapiens
tttgagttaatattt

SEQ ID NO: 417761 - DNA, 15 bp, Homo sapiens
ctttgagttaatatt

SEQ ID NO: 417762 - DNA, 15 bp, Homo sapiens
actttgagttaatat

SEQ ID NO: 417763 - DNA, 15 bp, Homo sapiens
aactttgagttaata

SEQ ID NO: 417764 - DNA, 15 bp, Homo sapiens
caactttgagttaat

SEQ ID NO: 417765 - DNA, 15 bp, Homo sapiens
acaactttgagttaa

SEQ ID NO: 417766 - DNA, 15 bp, Homo sapiens
aacaactttgagtta

SEQ ID NO: 417767 - DNA, 15 bp, Homo sapiens
aaacaactttgagtt

SEQ ID NO: 417768 - DNA, 15 bp, Homo sapiens
aaaacaactttgagt

SEQ ID NO: 417769 - DNA, 15 bp, Homo sapiens
taaaacaactttgag

SEQ ID NO: 417770 - DNA, 15 bp, Homo sapiens
ctaaaacaactttga

SEQ ID NO: 417771 - DNA, 15 bp, Homo sapiens
actaaaacaactttg

SEQ ID NO: 417772 - DNA, 15 bp, Homo sapiens
tactaaaacaacttt

SEQ ID NO: 417773 - DNA, 15 bp, Homo sapiens
gtactaaaacaactt

SEQ ID NO: 417774 - DNA, 15 bp, Homo sapiens
tgtactaaaacaact

SEQ ID NO: 417775 - DNA, 15 bp, Homo sapiens
ctgtactaaaacaac

SEQ ID NO: 417776 - DNA, 15 bp, Homo sapiens
tctgtactaaaacaa

SEQ ID NO: 417777 - DNA, 15 bp, Homo sapiens
ctctgtactaaaaca

SEQ ID NO: 417778 - DNA, 15 bp, Homo sapiens
actctgtactaaaac

SEQ ID NO: 417779 - DNA, 15 bp, Homo sapiens
aactctgtactaaaa

SEQ ID NO: 417780 - DNA, 15 bp, Homo sapiens
aaactctgtactaaa

SEQ ID NO: 417781 - DNA, 15 bp, Homo sapiens
aaaactctgtactaa

SEQ ID NO: 417782 - DNA, 15 bp, Homo sapiens
gaaaactctgtacta

SEQ ID NO: 417783 - DNA, 15 bp, Homo sapiens
agaaaactctgtact

SEQ ID NO: 417784 - DNA, 15 bp, Homo sapiens
cagaaaactctgtac

SEQ ID NO: 417785 - DNA, 15 bp, Homo sapiens
gcagaaaactctgta

SEQ ID NO: 417786 - DNA, 15 bp, Homo sapiens
agcagaaaactctgt

SEQ ID NO: 417787 - DNA, 15 bp, Homo sapiens
aagcagaaaactctg

SEQ ID NO: 417788 - DNA, 15 bp, Homo sapiens
gaagcagaaaactct

SEQ ID NO: 417789 - DNA, 15 bp, Homo sapiens
tgaagcagaaaactc

SEQ ID NO: 417790 - DNA, 15 bp, Homo sapiens
ctgaagcagaaaact

SEQ ID NO: 417791 - DNA, 15 bp, Homo sapiens
actgaagcagaaaac

SEQ ID NO: 417792 - DNA, 15 bp, Homo sapiens
aactgaagcagaaaa

SEQ ID NO: 417793 - DNA, 15 bp, Homo sapiens
taactgaagcagaaa

SEQ ID NO: 417794 - DNA, 15 bp, Homo sapiens
gtaactgaagcagaa

SEQ ID NO: 417795 - DNA, 15 bp, Homo sapiens
agtaactgaagcaga

SEQ ID NO: 417796 - DNA, 15 bp, Homo sapiens
cagtaactgaagcag

SEQ ID NO: 417797 - DNA, 15 bp, Homo sapiens
acagtaactgaagca

SEQ ID NO: 417798 - DNA, 15 bp, Homo sapiens
gacagtaactgaagc

SEQ ID NO: 417799 - DNA, 15 bp, Homo sapiens
agacagtaactgaag

SEQ ID NO: 417800 - DNA, 15 bp, Homo sapiens
aagacagtaactgaa

SEQ ID NO: 417801 - DNA, 15 bp, Homo sapiens
taagacagtaactga

SEQ ID NO: 417802 - DNA, 15 bp, Homo sapiens
ctaagacagtaactg

SEQ ID NO: 417803 - DNA, 15 bp, Homo sapiens
actaagacagtaact

SEQ ID NO: 417804 - DNA, 15 bp, Homo sapiens
gactaagacagtaac

SEQ ID NO: 417805 - DNA, 15 bp, Homo sapiens
ggactaagacagtaa

SEQ ID NO: 417806 - DNA, 15 bp, Homo sapiens
tggactaagacagta

SEQ ID NO: 417807 - DNA, 15 bp, Homo sapiens
atggactaagacagt

SEQ ID NO: 417808 - DNA, 15 bp, Homo sapiens
aatggactaagacag

SEQ ID NO: 417809 - DNA, 15 bp, Homo sapiens
aaatggactaagaca

SEQ ID NO: 417810 - DNA, 15 bp, Homo sapiens
caaatggactaagac

SEQ ID NO: 417811 - DNA, 15 bp, Homo sapiens
acaaatggactaaga

SEQ ID NO: 417812 - DNA, 15 bp, Homo sapiens
cacaaatggactaag

SEQ ID NO: 417813 - DNA, 15 bp, Homo sapiens
gcacaaatggactaa

SEQ ID NO: 417814 - DNA, 15 bp, Homo sapiens
agcacaaatggacta

SEQ ID NO: 417815 - DNA, 15 bp, Homo sapiens
cagcacaaatggact

SEQ ID NO: 417816 - DNA, 15 bp, Homo sapiens
gcagcacaaatggac

SEQ ID NO: 417817 - DNA, 15 bp, Homo sapiens
agcagcacaaatgga

SEQ ID NO: 417818 - DNA, 15 bp, Homo sapiens
tagcagcacaaatgg

SEQ ID NO: 417819 - DNA, 15 bp, Homo sapiens
atagcagcacaaatg

SEQ ID NO: 417820 - DNA, 15 bp, Homo sapiens
tatagcagcacaaat

SEQ ID NO: 417821 - DNA, 15 bp, Homo sapiens
ttatagcagcacaaa

SEQ ID NO: 417822 - DNA, 15 bp, Homo sapiens
gttatagcagcacaa

SEQ ID NO: 417823 - DNA, 15 bp, Homo sapiens
tgttatagcagcaca

SEQ ID NO: 417824 - DNA, 15 bp, Homo sapiens
ttgttatagcagcac

SEQ ID NO: 417825 - DNA, 15 bp, Homo sapiens
tttgttatagcagca

SEQ ID NO: 417826 - DNA, 15 bp, Homo sapiens
ttttgttatagcagc

SEQ ID NO: 417827 - DNA, 15 bp, Homo sapiens
attttgttatagcag

SEQ ID NO: 417828 - DNA, 15 bp, Homo sapiens
cattttgttatagca

SEQ ID NO: 417829 - DNA, 15 bp, Homo sapiens
acattttgttatagc

SEQ ID NO: 417830 - DNA, 15 bp, Homo sapiens
cacattttgttatag

SEQ ID NO: 417831 - DNA, 15 bp, Homo sapiens
tcacattttgttata

SEQ ID NO: 417832 - DNA, 15 bp, Homo sapiens
gtcacattttgttat

SEQ ID NO: 417833 - DNA, 15 bp, Homo sapiens
tgtcacattttgtta

SEQ ID NO: 417834 - DNA, 15 bp, Homo sapiens
gtgtcacattttgtt

SEQ ID NO: 417835 - DNA, 15 bp, Homo sapiens
tgtgtcacattttgt

SEQ ID NO: 417836 - DNA, 15 bp, Homo sapiens
gtgtgtcacattttg

SEQ ID NO: 417837 - DNA, 15 bp, Homo sapiens
agtgtgtcacatttt

SEQ ID NO: 417838 - DNA, 15 bp, Homo sapiens
cagtgtgtcacattt

SEQ ID NO: 417839 - DNA, 15 bp, Homo sapiens
ccagtgtgtcacatt

SEQ ID NO: 417840 - DNA, 15 bp, Homo sapiens
cccagtgtgtcacat

SEQ ID NO: 417841 - DNA, 15 bp, Homo sapiens
acccagtgtgtcaca

SEQ ID NO: 417842 - DNA, 15 bp, Homo sapiens
tacccagtgtgtcac

SEQ ID NO: 417843 - DNA, 15 bp, Homo sapiens
ttacccagtgtgtca

SEQ ID NO: 417844 - DNA, 15 bp, Homo sapiens
attacccagtgtgtc

SEQ ID NO: 417845 - DNA, 15 bp, Homo sapiens
aattacccagtgtgt

SEQ ID NO: 417846 - DNA, 15 bp, Homo sapiens
aaattacccagtgtg

SEQ ID NO: 417847 - DNA, 15 bp, Homo sapiens
gtaaattacccagtg

SEQ ID NO: 417848 - DNA, 15 bp, Homo sapiens
tgtaaattacccagt

SEQ ID NO: 417849 - DNA, 15 bp, Homo sapiens
ttgtaaattacccag

SEQ ID NO: 417850 - DNA, 15 bp, Homo sapiens
tttgtaaattaccca

SEQ ID NO: 417851 - DNA, 15 bp, Homo sapiens
ctttgtaaattaccc

SEQ ID NO: 417852 - DNA, 15 bp, Homo sapiens
tctttgtaaattacc

SEQ ID NO: 417853 - DNA, 15 bp, Homo sapiens
ttctttgtaaattac

SEQ ID NO: 417854 - DNA, 15 bp, Homo sapiens
gttctttgtaaatta

SEQ ID NO: 417855 - DNA, 15 bp, Homo sapiens
tgttctttgtaaatt

SEQ ID NO: 417856 - DNA, 15 bp, Homo sapiens
ttgttctttgtaaat

SEQ ID NO: 417857 - DNA, 15 bp, Homo sapiens
tttgttctttgtaaa

SEQ ID NO: 417858 - DNA, 15 bp, Homo sapiens
ttttgttctttgtaa

SEQ ID NO: 417859 - DNA, 15 bp, Homo sapiens
tttttgttctttgta

SEQ ID NO: 417860 - DNA, 15 bp, Homo sapiens
atttttgttctttgt

SEQ ID NO: 417861 - DNA, 15 bp, Homo sapiens
catttttgttctttg

SEQ ID NO: 417862 - DNA, 15 bp, Homo sapiens
acatttttgttcttt

SEQ ID NO: 417863 - DNA, 15 bp, Homo sapiens
tacatttttgttctt

SEQ ID NO: 417864 - DNA, 15 bp, Homo sapiens
atacatttttgttct

SEQ ID NO: 417865 - DNA, 15 bp, Homo sapiens
aatacatttttgttc

SEQ ID NO: 417866 - DNA, 15 bp, Homo sapiens
aaatacatttttgtt

SEQ ID NO: 417867 - DNA, 15 bp, Homo sapiens
aaaatacatttttgt

SEQ ID NO: 417868 - DNA, 15 bp, Homo sapiens
gaaaatacatttttg

SEQ ID NO: 417869 - DNA, 15 bp, Homo sapiens
agaaaatacattttt

SEQ ID NO: 417870 - DNA, 15 bp, Homo sapiens
gagaaaatacatttt

SEQ ID NO: 417871 - DNA, 15 bp, Homo sapiens
tgagaaaatacattt

SEQ ID NO: 417872 - DNA, 15 bp, Homo sapiens
gtgagaaaatacatt

SEQ ID NO: 417873 - DNA, 15 bp, Homo sapiens
tgtgagaaaatacat

SEQ ID NO: 417874 - DNA, 15 bp, Homo sapiens
ttgtgagaaaataca

SEQ ID NO: 417875 - DNA, 15 bp, Homo sapiens
attgtgagaaaatac

SEQ ID NO: 417876 - DNA, 15 bp, Homo sapiens
aattgtgagaaaata

SEQ ID NO: 417877 - DNA, 15 bp, Homo sapiens
gaattgtgagaaaat

SEQ ID NO: 417878 - DNA, 15 bp, Homo sapiens
agaattgtgagaaaa

SEQ ID NO: 417879 - DNA, 15 bp, Homo sapiens
cagaattgtgagaaa

SEQ ID NO: 417880 - DNA, 15 bp, Homo sapiens
ccagaattgtgagaa

SEQ ID NO: 417881 - DNA, 15 bp, Homo sapiens
tccagaattgtgaga

SEQ ID NO: 417882 - DNA, 15 bp, Homo sapiens
ctccagaattgtgag

SEQ ID NO: 417883 - DNA, 15 bp, Homo sapiens
tctccagaattgtga

SEQ ID NO: 417884 - DNA, 15 bp, Homo sapiens
gtctccagaattgtg

SEQ ID NO: 417885 - DNA, 15 bp, Homo sapiens
agtctccagaattgt

SEQ ID NO: 417886 - DNA, 15 bp, Homo sapiens
cagtctccagaattg

SEQ ID NO: 417887 - DNA, 15 bp, Homo sapiens
ccagtctccagaatt

SEQ ID NO: 417888 - DNA, 15 bp, Homo sapiens
cccagtctccagaat

SEQ ID NO: 417889 - DNA, 15 bp, Homo sapiens
tcccagtctccagaa

SEQ ID NO: 417890 - DNA, 15 bp, Homo sapiens
ttcccagtctccaga

SEQ ID NO: 417891 - DNA, 15 bp, Homo sapiens
cttcccagtctccag

SEQ ID NO: 417892 - DNA, 15 bp, Homo sapiens
acttcccagtctcca

SEQ ID NO: 417893 - DNA, 15 bp, Homo sapiens
gacttcccagtctcc

SEQ ID NO: 417894 - DNA, 15 bp, Homo sapiens
ggacttcccagtctc

SEQ ID NO: 417895 - DNA, 15 bp, Homo sapiens
tggacttcccagtct

SEQ ID NO: 417896 - DNA, 15 bp, Homo sapiens
atggacttcccagtc

SEQ ID NO: 417897 - DNA, 15 bp, Homo sapiens
catggacttcccagt

SEQ ID NO: 417898 - DNA, 15 bp, Homo sapiens
tcatggacttcccag

SEQ ID NO: 417899 - DNA, 15 bp, Homo sapiens
ttcatggacttccca

SEQ ID NO: 417900 - DNA, 15 bp, Homo sapiens
cttcatggacttccc

SEQ ID NO: 417901 - DNA, 15 bp, Homo sapiens
tcttcatggacttcc

SEQ ID NO: 417902 - DNA, 15 bp, Homo sapiens
ctcttcatggacttc

SEQ ID NO: 417903 - DNA, 15 bp, Homo sapiens
cctcttcatggactt

SEQ ID NO: 417904 - DNA, 15 bp, Homo sapiens
acctcttcatggact

SEQ ID NO: 417905 - DNA, 15 bp, Homo sapiens
gacctcttcatggac

SEQ ID NO: 417906 - DNA, 15 bp, Homo sapiens
agacctcttcatgga

SEQ ID NO: 417907 - DNA, 15 bp, Homo sapiens
cagacctcttcatgg

SEQ ID NO: 417908 - DNA, 15 bp, Homo sapiens
tcagacctcttcatg

SEQ ID NO: 417909 - DNA, 15 bp, Homo sapiens
ctcagacctcttcat

SEQ ID NO: 417910 - DNA, 15 bp, Homo sapiens
gctcagacctcttca

SEQ ID NO: 417911 - DNA, 15 bp, Homo sapiens
tgctcagacctcttc

SEQ ID NO: 417912 - DNA, 15 bp, Homo sapiens
atgctcagacctctt

SEQ ID NO: 417913 - DNA, 15 bp, Homo sapiens
aatgctcagacctct

SEQ ID NO: 417914 - DNA, 15 bp, Homo sapiens
caatgctcagacctc

SEQ ID NO: 417915 - DNA, 15 bp, Homo sapiens
ccaatgctcagacct

SEQ ID NO: 417916 - DNA, 15 bp, Homo sapiens
accaatgctcagacc

SEQ ID NO: 417917 - DNA, 15 bp, Homo sapiens
caccaatgctcagac

SEQ ID NO: 417918 - DNA, 15 bp, Homo sapiens
acaccaatgctcaga

SEQ ID NO: 417919 - DNA, 15 bp, Homo sapiens
gacaccaatgctcag

SEQ ID NO: 417920 - DNA, 15 bp, Homo sapiens
agacaccaatgctca

SEQ ID NO: 417921 - DNA, 15 bp, Homo sapiens
cagacaccaatgctc

SEQ ID NO: 417922 - DNA, 15 bp, Homo sapiens
ccagacaccaatgct

SEQ ID NO: 417923 - DNA, 15 bp, Homo sapiens
accagacaccaatgc

SEQ ID NO: 417924 - DNA, 15 bp, Homo sapiens
caccagacaccaatg

SEQ ID NO: 417925 - DNA, 15 bp, Homo sapiens
tcaccagacaccaat

SEQ ID NO: 417926 - DNA, 15 bp, Homo sapiens
ctcaccagacaccaa

SEQ ID NO: 417927 - DNA, 15 bp, Homo sapiens
tctcaccagacacca

SEQ ID NO: 417928 - DNA, 15 bp, Homo sapiens
ctctcaccagacacc

SEQ ID NO: 417929 - DNA, 15 bp, Homo sapiens
tctctcaccagacac

SEQ ID NO: 417930 - DNA, 15 bp, Homo sapiens
gtctctcaccagaca

SEQ ID NO: 417931 - DNA, 15 bp, Homo sapiens
ggtctctcaccagac

SEQ ID NO: 417932 - DNA, 15 bp, Homo sapiens
tggtctctcaccaga

SEQ ID NO: 417933 - DNA, 15 bp, Homo sapiens
gtggtctctcaccag

SEQ ID NO: 417934 - DNA, 15 bp, Homo sapiens
agtggtctctcacca

SEQ ID NO: 417935 - DNA, 15 bp, Homo sapiens
gagtggtctctcacc

SEQ ID NO: 417936 - DNA, 15 bp, Homo sapiens
ggagtggtctctcac

SEQ ID NO: 417937 - DNA, 15 bp, Homo sapiens
tggagtggtctctca

SEQ ID NO: 417938 - DNA, 15 bp, Homo sapiens
atggagtggtctctc

SEQ ID NO: 417939 - DNA, 15 bp, Homo sapiens
aatggagtggtctct

SEQ ID NO: 417940 - DNA, 15 bp, Homo sapiens
caatggagtggtctc

SEQ ID NO: 417941 - DNA, 15 bp, Homo sapiens
tcaatggagtggtct

SEQ ID NO: 417942 - DNA, 15 bp, Homo sapiens
atcaatggagtggtc

SEQ ID NO: 417943 - DNA, 15 bp, Homo sapiens
catcaatggagtggt

SEQ ID NO: 417944 - DNA, 15 bp, Homo sapiens
tcatcaatggagtgg

SEQ ID NO: 417945 - DNA, 15 bp, Homo sapiens
ttcatcaatggagtg

SEQ ID NO: 417946 - DNA, 15 bp, Homo sapiens
tttcatcaatggagt

SEQ ID NO: 417947 - DNA, 15 bp, Homo sapiens
atttcatcaatggag

SEQ ID NO: 417948 - DNA, 15 bp, Homo sapiens
aatttcatcaatgga

SEQ ID NO: 417949 - DNA, 15 bp, Homo sapiens
aaatttcatcaatgg

SEQ ID NO: 417950 - DNA, 15 bp, Homo sapiens
aaaatttcatcaatg

SEQ ID NO: 417951 - DNA, 15 bp, Homo sapiens
aaaaatttcatcaat

SEQ ID NO: 417952 - DNA, 15 bp, Homo sapiens
taaaaatttcatcaa

SEQ ID NO: 417953 - DNA, 15 bp, Homo sapiens
ttaaaaatttcatca

SEQ ID NO: 417954 - DNA, 15 bp, Homo sapiens
attaaaaatttcatc

SEQ ID NO: 417955 - DNA, 15 bp, Homo sapiens
cattaaaaatttcat

SEQ ID NO: 417956 - DNA, 15 bp, Homo sapiens
ccattaaaaatttca

SEQ ID NO: 417957 - DNA, 15 bp, Homo sapiens
accattaaaaatttc

SEQ ID NO: 417958 - DNA, 15 bp, Homo sapiens
taccattaaaaattt

SEQ ID NO: 417959 - DNA, 15 bp, Homo sapiens
ctaccattaaaaatt

SEQ ID NO: 417960 - DNA, 15 bp, Homo sapiens
gctaccattaaaaat

SEQ ID NO: 417961 - DNA, 15 bp, Homo sapiens
tgctaccattaaaaa

SEQ ID NO: 417962 - DNA, 15 bp, Homo sapiens
atgctaccattaaaa

SEQ ID NO: 417963 - DNA, 15 bp, Homo sapiens
gatgctaccattaaa

SEQ ID NO: 417964 - DNA, 15 bp, Homo sapiens
ggatgctaccattaa

SEQ ID NO: 417965 - DNA, 15 bp, Homo sapiens
aggatgctaccatta

SEQ ID NO: 417966 - DNA, 15 bp, Homo sapiens
gaggatgctaccatt

SEQ ID NO: 417967 - DNA, 15 bp, Homo sapiens
tgaggatgctaccat

SEQ ID NO: 417968 - DNA, 15 bp, Homo sapiens
gtgaggatgctacca

SEQ ID NO: 417969 - DNA, 15 bp, Homo sapiens
tgtgaggatgctacc

SEQ ID NO: 417970 - DNA, 15 bp, Homo sapiens
atgtgaggatgctac

SEQ ID NO: 417971 - DNA, 15 bp, Homo sapiens
catgtgaggatgcta

SEQ ID NO: 417972 - DNA, 15 bp, Homo sapiens
tcatgtgaggatgct

SEQ ID NO: 417973 - DNA, 15 bp, Homo sapiens
gtcatgtgaggatgc

SEQ ID NO: 417974 - DNA, 15 bp, Homo sapiens
tgtcatgtgaggatg

SEQ ID NO: 417975 - DNA, 15 bp, Homo sapiens
ctgtcatgtgaggat

SEQ ID NO: 417976 - DNA, 15 bp, Homo sapiens
tctgtcatgtgagga

SEQ ID NO: 417977 - DNA, 15 bp, Homo sapiens
ttctgtcatgtgagg

SEQ ID NO: 417978 - DNA, 15 bp, Homo sapiens
cttctgtcatgtgag

SEQ ID NO: 417979 - DNA, 15 bp, Homo sapiens
ccttctgtcatgtga

SEQ ID NO: 417980 - DNA, 15 bp, Homo sapiens
gccttctgtcatgtg

SEQ ID NO: 417981 - DNA, 15 bp, Homo sapiens
tgccttctgtcatgt

SEQ ID NO: 417982 - DNA, 15 bp, Homo sapiens
ctgccttctgtcatg

SEQ ID NO: 417983 - DNA, 15 bp, Homo sapiens
tctgccttctgtcat

SEQ ID NO: 417984 - DNA, 15 bp, Homo sapiens
ttctgccttctgtca

SEQ ID NO: 417985 - DNA, 15 bp, Homo sapiens
cttctgccttctgtc

SEQ ID NO: 417986 - DNA, 15 bp, Homo sapiens
acttctgccttctgt

SEQ ID NO: 417987 - DNA, 15 bp, Homo sapiens
cacttctgccttctg

SEQ ID NO: 417988 - DNA, 15 bp, Homo sapiens
acacttctgccttct

SEQ ID NO: 417989 - DNA, 15 bp, Homo sapiens
cacacttctgccttc

SEQ ID NO: 417990 - DNA, 15 bp, Homo sapiens
tcacacttctgcctt

SEQ ID NO: 417991 - DNA, 15 bp, Homo sapiens
ttcacacttctgcct

SEQ ID NO: 417992 - DNA, 15 bp, Homo sapiens
tttcacacttctgcc

SEQ ID NO: 417993 - DNA, 15 bp, Homo sapiens
ttttcacacttctgc

SEQ ID NO: 417994 - DNA, 15 bp, Homo sapiens
cttttcacacttctg

SEQ ID NO: 417995 - DNA, 15 bp, Homo sapiens
ccttttcacacttct

SEQ ID NO: 417996 - DNA, 15 bp, Homo sapiens
cccttttcacacttc

SEQ ID NO: 417997 - DNA, 15 bp, Homo sapiens
gcccttttcacactt

SEQ ID NO: 417998 - DNA, 15 bp, Homo sapiens
ggcccttttcacact

SEQ ID NO: 417999 - DNA, 15 bp, Homo sapiens
tggcccttttcacac

SEQ ID NO: 418000 - DNA, 15 bp, Homo sapiens
ttggcccttttcaca

SEQ ID NO: 418001 - DNA, 15 bp, Homo sapiens
tttggcccttttcac

SEQ ID NO: 418002 - DNA, 15 bp, Homo sapiens
ctttggcccttttca

SEQ ID NO: 418003 - DNA, 15 bp, Homo sapiens
cctttggcccttttc

SEQ ID NO: 418004 - DNA, 15 bp, Homo sapiens
gcctttggccctttt

SEQ ID NO: 418005 - DNA, 15 bp, Homo sapiens
agcctttggcccttt

SEQ ID NO: 418006 - DNA, 15 bp, Homo sapiens
cagcctttggccctt

SEQ ID NO: 418007 - DNA, 15 bp, Homo sapiens
acagcctttggccct

SEQ ID NO: 418008 - DNA, 15 bp, Homo sapiens
cacagcctttggccc

SEQ ID NO: 418009 - DNA, 15 bp, Homo sapiens
acacagcctttggcc

SEQ ID NO: 418010 - DNA, 15 bp, Homo sapiens
cacacagcctttggc

SEQ ID NO: 418011 - DNA, 15 bp, Homo sapiens
tcacacagcctttgg

SEQ ID NO: 418012 - DNA, 15 bp, Homo sapiens
ttcacacagcctttg

SEQ ID NO: 418013 - DNA, 15 bp, Homo sapiens
cttcacacagccttt

SEQ ID NO: 418014 - DNA, 15 bp, Homo sapiens
gcttcacacagcctt

SEQ ID NO: 418015 - DNA, 15 bp, Homo sapiens
ggcttcacacagcct

SEQ ID NO: 418016 - DNA, 15 bp, Homo sapiens
aggcttcacacagcc

SEQ ID NO: 418017 - DNA, 15 bp, Homo sapiens
gaggcttcacacagc

SEQ ID NO: 418018 - DNA, 15 bp, Homo sapiens
agaggcttcacacag

SEQ ID NO: 418019 - DNA, 15 bp, Homo sapiens
aagaggcttcacaca

SEQ ID NO: 418020 - DNA, 15 bp, Homo sapiens
gaagaggcttcacac

SEQ ID NO: 418021 - DNA, 15 bp, Homo sapiens
agaagaggcttcaca

SEQ ID NO: 418022 - DNA, 15 bp, Homo sapiens
aagaagaggcttcac

SEQ ID NO: 418023 - DNA, 15 bp, Homo sapiens
aaagaagaggcttca

SEQ ID NO: 418024 - DNA, 15 bp, Homo sapiens
taaagaagaggcttc

SEQ ID NO: 418025 - DNA, 15 bp, Homo sapiens
ttaaagaagaggctt

SEQ ID NO: 418026 - DNA, 15 bp, Homo sapiens
tttaaagaagaggct

SEQ ID NO: 418027 - DNA, 15 bp, Homo sapiens
ctttaaagaagaggc

SEQ ID NO: 418028 - DNA, 15 bp, Homo sapiens
cctttaaagaagagg

SEQ ID NO: 418029 - DNA, 15 bp, Homo sapiens
acctttaaagaagag

SEQ ID NO: 418030 - DNA, 15 bp, Homo sapiens
gacctttaaagaaga

SEQ ID NO: 418031 - DNA, 15 bp, Homo sapiens
ggacctttaaagaag

SEQ ID NO: 418032 - DNA, 15 bp, Homo sapiens
aggacctttaaagaa

SEQ ID NO: 418033 - DNA, 15 bp, Homo sapiens
taggacctttaaaga

SEQ ID NO: 418034 - DNA, 15 bp, Homo sapiens
ttaggacctttaaag

SEQ ID NO: 418035 - DNA, 15 bp, Homo sapiens
cttaggacctttaaa

SEQ ID NO: 418036 - DNA, 15 bp, Homo sapiens
gcttaggacctttaa

SEQ ID NO: 418037 - DNA, 15 bp, Homo sapiens
ggcttaggaccttta

SEQ ID NO: 418038 - DNA, 15 bp, Homo sapiens
gggcttaggaccttt

SEQ ID NO: 418039 - DNA, 15 bp, Homo sapiens
tgggcttaggacctt

SEQ ID NO: 418040 - DNA, 15 bp, Homo sapiens
gtgggcttaggacct

SEQ ID NO: 418041 - DNA, 15 bp, Homo sapiens
cgtgggcttaggacc

SEQ ID NO: 418042 - DNA, 15 bp, Homo sapiens
tcgtgggcttaggac

SEQ ID NO: 418043 - DNA, 15 bp, Homo sapiens
ttcgtgggcttagga

SEQ ID NO: 418044 - DNA, 15 bp, Homo sapiens
gttcgtgggcttagg

SEQ ID NO: 418045 - DNA, 15 bp, Homo sapiens
tgttcgtgggcttag

SEQ ID NO: 418046 - DNA, 15 bp, Homo sapiens
atgttcgtgggctta

SEQ ID NO: 418047 - DNA, 15 bp, Homo sapiens
catgttcgtgggctt

SEQ ID NO: 418048 - DNA, 15 bp, Homo sapiens
ccatgttcgtgggct

SEQ ID NO: 418049 - DNA, 15 bp, Homo sapiens
cccatgttcgtgggc

SEQ ID NO: 418050 - DNA, 15 bp, Homo sapiens
gcccatgttcgtggg

SEQ ID NO: 418051 - DNA, 15 bp, Homo sapiens
agcccatgttcgtgg

SEQ ID NO: 418052 - DNA, 15 bp, Homo sapiens
gagcccatgttcgtg

SEQ ID NO: 418053 - DNA, 15 bp, Homo sapiens
ggagcccatgttcgt

SEQ ID NO: 418054 - DNA, 15 bp, Homo sapiens
tggagcccatgttcg

SEQ ID NO: 418055 - DNA, 15 bp, Homo sapiens
gtggagcccatgttc

SEQ ID NO: 418056 - DNA, 15 bp, Homo sapiens
ggtggagcccatgtt

SEQ ID NO: 418057 - DNA, 15 bp, Homo sapiens
aggtggagcccatgt

SEQ ID NO: 418058 - DNA, 15 bp, Homo sapiens
aaggtggagcccatg

SEQ ID NO: 418059 - DNA, 15 bp, Homo sapiens
aaaggtggagcccat

SEQ ID NO: 418060 - DNA, 15 bp, Homo sapiens
taaaggtggagccca

SEQ ID NO: 418061 - DNA, 15 bp, Homo sapiens
ataaaggtggagccc

SEQ ID NO: 418062 - DNA, 15 bp, Homo sapiens
cataaaggtggagcc

SEQ ID NO: 418063 - DNA, 15 bp, Homo sapiens
ccataaaggtggagc

SEQ ID NO: 418064 - DNA, 15 bp, Homo sapiens
gccataaaggtggag

SEQ ID NO: 418065 - DNA, 15 bp, Homo sapiens
agccataaaggtgga

SEQ ID NO: 418066 - DNA, 15 bp, Homo sapiens
aagccataaaggtgg

SEQ ID NO: 418067 - DNA, 15 bp, Homo sapiens
taagccataaaggtg

SEQ ID NO: 418068 - DNA, 15 bp, Homo sapiens
ttaagccataaaggt

SEQ ID NO: 418069 - DNA, 15 bp, Homo sapiens
attaagccataaagg

SEQ ID NO: 418070 - DNA, 15 bp, Homo sapiens
gattaagccataaag

SEQ ID NO: 418071 - DNA, 15 bp, Homo sapiens
agattaagccataaa

SEQ ID NO: 418072 - DNA, 15 bp, Homo sapiens
gagattaagccataa

SEQ ID NO: 418073 - DNA, 15 bp, Homo sapiens
ggagattaagccata

SEQ ID NO: 418074 - DNA, 15 bp, Homo sapiens
aggagattaagccat

SEQ ID NO: 418075 - DNA, 15 bp, Homo sapiens
gaggagattaagcca

SEQ ID NO: 418076 - DNA, 15 bp, Homo sapiens
tgaggagattaagcc

SEQ ID NO: 418077 - DNA, 15 bp, Homo sapiens
atgaggagattaagc

SEQ ID NO: 418078 - DNA, 15 bp, Homo sapiens
tatgaggagattaag

SEQ ID NO: 418079 - DNA, 15 bp, Homo sapiens
ttatgaggagattaa

SEQ ID NO: 418080 - DNA, 15 bp, Homo sapiens
tttatgaggagatta

SEQ ID NO: 418081 - DNA, 15 bp, Homo sapiens
ctttatgaggagatt

SEQ ID NO: 418082 - DNA, 15 bp, Homo sapiens
tctttatgaggagat

SEQ ID NO: 418083 - DNA, 15 bp, Homo sapiens
gtctttatgaggaga

SEQ ID NO: 418084 - DNA, 15 bp, Homo sapiens
agtctttatgaggag

SEQ ID NO: 418085 - DNA, 15 bp, Homo sapiens
gagtctttatgagga

SEQ ID NO: 418086 - DNA, 15 bp, Homo sapiens
ggagtctttatgagg

SEQ ID NO: 418087 - DNA, 15 bp, Homo sapiens
tggagtctttatgag

SEQ ID NO: 418088 - DNA, 15 bp, Homo sapiens
gtggagtctttatga

SEQ ID NO: 418089 - DNA, 15 bp, Homo sapiens
tgtggagtctttatg

SEQ ID NO: 418090 - DNA, 15 bp, Homo sapiens
atgtggagtctttat

SEQ ID NO: 418091 - DNA, 15 bp, Homo sapiens
gatgtggagtcttta

SEQ ID NO: 418092 - DNA, 15 bp, Homo sapiens
agatgtggagtcttt

SEQ ID NO: 418093 - DNA, 15 bp, Homo sapiens
aagatgtggagtctt

SEQ ID NO: 418094 - DNA, 15 bp, Homo sapiens
taagatgtggagtct

SEQ ID NO: 418095 - DNA, 15 bp, Homo sapiens
ttaagatgtggagtc

SEQ ID NO: 418096 - DNA, 15 bp, Homo sapiens
attaagatgtggagt

SEQ ID NO: 418097 - DNA, 15 bp, Homo sapiens
tattaagatgtggag

SEQ ID NO: 418098 - DNA, 15 bp, Homo sapiens
gtattaagatgtgga

SEQ ID NO: 418099 - DNA, 15 bp, Homo sapiens
agtattaagatgtgg

SEQ ID NO: 418100 - DNA, 15 bp, Homo sapiens
tagtattaagatgtg

SEQ ID NO: 418101 - DNA, 15 bp, Homo sapiens
atagtattaagatgt

SEQ ID NO: 418102 - DNA, 15 bp, Homo sapiens
gatagtattaagatg

SEQ ID NO: 418103 - DNA, 15 bp, Homo sapiens
tgatagtattaagat

SEQ ID NO: 418104 - DNA, 15 bp, Homo sapiens
gtgatagtattaaga

SEQ ID NO: 418105 - DNA, 15 bp, Homo sapiens
cgtgatagtattaag

SEQ ID NO: 418106 - DNA, 15 bp, Homo sapiens
gcgtgatagtattaa

SEQ ID NO: 418107 - DNA, 15 bp, Homo sapiens
agcgtgatagtatta

SEQ ID NO: 418108 - DNA, 15 bp, Homo sapiens
cagcgtgatagtatt

SEQ ID NO: 418109 - DNA, 15 bp, Homo sapiens
ccagcgtgatagtat

SEQ ID NO: 418110 - DNA, 15 bp, Homo sapiens
accagcgtgatagta

SEQ ID NO: 418111 - DNA, 15 bp, Homo sapiens
taccagcgtgatagt

SEQ ID NO: 418112 - DNA, 15 bp, Homo sapiens
ttaccagcgtgatag

SEQ ID NO: 418113 - DNA, 15 bp, Homo sapiens
cttaccagcgtgata

SEQ ID NO: 418114 - DNA, 15 bp, Homo sapiens
acttaccagcgtgat

SEQ ID NO: 418115 - DNA, 15 bp, Homo sapiens
tacttaccagcgtga

SEQ ID NO: 418116 - DNA, 15 bp, Homo sapiens
ttacttaccagcgtg

SEQ ID NO: 418117 - DNA, 15 bp, Homo sapiens
cttacttaccagcgt

SEQ ID NO: 418118 - DNA, 15 bp, Homo sapiens
acttacttaccagcg

SEQ ID NO: 418119 - DNA, 15 bp, Homo sapiens
aacttacttaccagc

SEQ ID NO: 418120 - DNA, 15 bp, Homo sapiens
aaacttacttaccag

SEQ ID NO: 418121 - DNA, 15 bp, Homo sapiens
aaaacttacttacca

SEQ ID NO: 418122 - DNA, 15 bp, Homo sapiens
taaaacttacttacc

SEQ ID NO: 418123 - DNA, 15 bp, Homo sapiens
ctaaaacttacttac

SEQ ID NO: 418124 - DNA, 15 bp, Homo sapiens
gctaaaacttactta

SEQ ID NO: 418125 - DNA, 15 bp, Homo sapiens
tgctaaaacttactt

SEQ ID NO: 418126 - DNA, 15 bp, Homo sapiens
ctgctaaaacttact

SEQ ID NO: 418127 - DNA, 15 bp, Homo sapiens
tctgctaaaacttac

SEQ ID NO: 418128 - DNA, 15 bp, Homo sapiens
ctctgctaaaactta

SEQ ID NO: 418129 - DNA, 15 bp, Homo sapiens
cctctgctaaaactt

SEQ ID NO: 418130 - DNA, 15 bp, Homo sapiens
tcctctgctaaaact

SEQ ID NO: 418131 - DNA, 15 bp, Homo sapiens
ttcctctgctaaaac

SEQ ID NO: 418132 - DNA, 15 bp, Homo sapiens
attcctctgctaaaa

SEQ ID NO: 418133 - DNA, 15 bp, Homo sapiens
cattcctctgctaaa

SEQ ID NO: 418134 - DNA, 15 bp, Homo sapiens
ccattcctctgctaa

SEQ ID NO: 418135 - DNA, 15 bp, Homo sapiens
cccattcctctgcta

SEQ ID NO: 418136 - DNA, 15 bp, Homo sapiens
ccccattcctctgct

SEQ ID NO: 418137 - DNA, 15 bp, Homo sapiens
tccccattcctctgc

SEQ ID NO: 418138 - DNA, 15 bp, Homo sapiens
ctccccattcctctg

SEQ ID NO: 418139 - DNA, 15 bp, Homo sapiens
tctccccattcctct

SEQ ID NO: 418140 - DNA, 15 bp, Homo sapiens
ctctccccattcctc

SEQ ID NO: 418141 - DNA, 15 bp, Homo sapiens
cctctccccattcct

SEQ ID NO: 418142 - DNA, 15 bp, Homo sapiens
ccctctccccattcc

SEQ ID NO: 418143 - DNA, 15 bp, Homo sapiens
cccctctccccattc

SEQ ID NO: 418144 - DNA, 15 bp, Homo sapiens
gcccctctccccatt

SEQ ID NO: 418145 - DNA, 15 bp, Homo sapiens
tgcccctctccccat

SEQ ID NO: 418146 - DNA, 15 bp, Homo sapiens
atgcccctctcccca

SEQ ID NO: 418147 - DNA, 15 bp, Homo sapiens
aatgcccctctcccc

SEQ ID NO: 418148 - DNA, 15 bp, Homo sapiens
gaatgcccctctccc

SEQ ID NO: 418149 - DNA, 15 bp, Homo sapiens
tgaatgcccctctcc

SEQ ID NO: 418150 - DNA, 15 bp, Homo sapiens
ctgaatgcccctctc

SEQ ID NO: 418151 - DNA, 15 bp, Homo sapiens
tctgaatgcccctct

SEQ ID NO: 418152 - DNA, 15 bp, Homo sapiens
gtctgaatgcccctc

SEQ ID NO: 418153 - DNA, 15 bp, Homo sapiens
ggtctgaatgcccct

SEQ ID NO: 418154 - DNA, 15 bp, Homo sapiens
aggtctgaatgcccc

SEQ ID NO: 418155 - DNA, 15 bp, Homo sapiens
taggtctgaatgccc

SEQ ID NO: 418156 - DNA, 15 bp, Homo sapiens
gtaggtctgaatgcc

SEQ ID NO: 418157 - DNA, 15 bp, Homo sapiens
ggtaggtctgaatgc

SEQ ID NO: 418158 - DNA, 15 bp, Homo sapiens
tggtaggtctgaatg

SEQ ID NO: 418159 - DNA, 15 bp, Homo sapiens
ctggtaggtctgaat

SEQ ID NO: 418160 - DNA, 15 bp, Homo sapiens
actggtaggtctgaa

SEQ ID NO: 418161 - DNA, 15 bp, Homo sapiens
aactggtaggtctga

SEQ ID NO: 418162 - DNA, 15 bp, Homo sapiens
taactggtaggtctg

SEQ ID NO: 418163 - DNA, 15 bp, Homo sapiens
gtaactggtaggtct

SEQ ID NO: 418164 - DNA, 15 bp, Homo sapiens
tgtaactggtaggtc

SEQ ID NO: 418165 - DNA, 15 bp, Homo sapiens
ctgtaactggtaggt

SEQ ID NO: 418166 - DNA, 15 bp, Homo sapiens
actgtaactggtagg

SEQ ID NO: 418167 - DNA, 15 bp, Homo sapiens
gactgtaactggtag

SEQ ID NO: 418168 - DNA, 15 bp, Homo sapiens
ggactgtaactggta

SEQ ID NO: 418169 - DNA, 15 bp, Homo sapiens
aggactgtaactggt

SEQ ID NO: 418170 - DNA, 15 bp, Homo sapiens
taggactgtaactgg

SEQ ID NO: 418171 - DNA, 15 bp, Homo sapiens
gtaggactgtaactg

SEQ ID NO: 418172 - DNA, 15 bp, Homo sapiens
ggtaggactgtaact

SEQ ID NO: 418173 - DNA, 15 bp, Homo sapiens
aggtaggactgtaac

SEQ ID NO: 418174 - DNA, 15 bp, Homo sapiens
aaggtaggactgtaa

SEQ ID NO: 418175 - DNA, 15 bp, Homo sapiens
aaaggtaggactgta

SEQ ID NO: 418176 - DNA, 15 bp, Homo sapiens
gaaaggtaggactgt

SEQ ID NO: 418177 - DNA, 15 bp, Homo sapiens
tgaaaggtaggactg

SEQ ID NO: 418178 - DNA, 15 bp, Homo sapiens
atgaaaggtaggact

SEQ ID NO: 418179 - DNA, 15 bp, Homo sapiens
catgaaaggtaggac

SEQ ID NO: 418180 - DNA, 15 bp, Homo sapiens
acatgaaaggtagga

SEQ ID NO: 418181 - DNA, 15 bp, Homo sapiens
gacatgaaaggtagg

SEQ ID NO: 418182 - DNA, 15 bp, Homo sapiens
agacatgaaaggtag

SEQ ID NO: 418183 - DNA, 15 bp, Homo sapiens
tagacatgaaaggta

SEQ ID NO: 418184 - DNA, 15 bp, Homo sapiens
gtagacatgaaaggt

SEQ ID NO: 418185 - DNA, 15 bp, Homo sapiens
tgtagacatgaaagg

SEQ ID NO: 418186 - DNA, 15 bp, Homo sapiens
gtgtagacatgaaag

SEQ ID NO: 418187 - DNA, 15 bp, Homo sapiens
ggtgtagacatgaaa

SEQ ID NO: 418188 - DNA, 15 bp, Homo sapiens
aggtgtagacatgaa

SEQ ID NO: 418189 - DNA, 15 bp, Homo sapiens
aaggtgtagacatga

SEQ ID NO: 418190 - DNA, 15 bp, Homo sapiens
aaaggtgtagacatg

SEQ ID NO: 418191 - DNA, 15 bp, Homo sapiens
gaaaggtgtagacat

SEQ ID NO: 418192 - DNA, 15 bp, Homo sapiens
agaaaggtgtagaca

SEQ ID NO: 418193 - DNA, 15 bp, Homo sapiens
aagaaaggtgtagac

SEQ ID NO: 418194 - DNA, 15 bp, Homo sapiens
aaagaaaggtgtaga

SEQ ID NO: 418195 - DNA, 15 bp, Homo sapiens
caaagaaaggtgtag

SEQ ID NO: 418196 - DNA, 15 bp, Homo sapiens
ccaaagaaaggtgta

SEQ ID NO: 418197 - DNA, 15 bp, Homo sapiens
tccaaagaaaggtgt

SEQ ID NO: 418198 - DNA, 15 bp, Homo sapiens
gtccaaagaaaggtg

SEQ ID NO: 418199 - DNA, 15 bp, Homo sapiens
agtccaaagaaaggt

SEQ ID NO: 418200 - DNA, 15 bp, Homo sapiens
cagtccaaagaaagg

SEQ ID NO: 418201 - DNA, 15 bp, Homo sapiens
tcagtccaaagaaag

SEQ ID NO: 418202 - DNA, 15 bp, Homo sapiens
ctcagtccaaagaaa

SEQ ID NO: 418203 - DNA, 15 bp, Homo sapiens
gctcagtccaaagaa

SEQ ID NO: 418204 - DNA, 15 bp, Homo sapiens
ggctcagtccaaaga

SEQ ID NO: 418205 - DNA, 15 bp, Homo sapiens
aggctcagtccaaag

SEQ ID NO: 418206 - DNA, 15 bp, Homo sapiens
aaggctcagtccaaa

SEQ ID NO: 418207 - DNA, 15 bp, Homo sapiens
caaggctcagtccaa

SEQ ID NO: 418208 - DNA, 15 bp, Homo sapiens
ccaaggctcagtcca

SEQ ID NO: 418209 - DNA, 15 bp, Homo sapiens
tccaaggctcagtcc

SEQ ID NO: 418210 - DNA, 15 bp, Homo sapiens
ttccaaggctcagtc

SEQ ID NO: 418211 - DNA, 15 bp, Homo sapiens
tttccaaggctcagt

SEQ ID NO: 418212 - DNA, 15 bp, Homo sapiens
ctttccaaggctcag

SEQ ID NO: 418213 - DNA, 15 bp, Homo sapiens
tctttccaaggctca

SEQ ID NO: 418214 - DNA, 15 bp, Homo sapiens
atctttccaaggctc

SEQ ID NO: 418215 - DNA, 15 bp, Homo sapiens
tatctttccaaggct

SEQ ID NO: 418216 - DNA, 15 bp, Homo sapiens
gtatctttccaaggc

SEQ ID NO: 418217 - DNA, 15 bp, Homo sapiens
tgtatctttccaagg

SEQ ID NO: 418218 - DNA, 15 bp, Homo sapiens
ttgtatctttccaag

SEQ ID NO: 418219 - DNA, 15 bp, Homo sapiens
cttgtatctttccaa

SEQ ID NO: 418220 - DNA, 15 bp, Homo sapiens
ccttgtatctttcca

SEQ ID NO: 418221 - DNA, 15 bp, Homo sapiens
accttgtatctttcc

SEQ ID NO: 418222 - DNA, 15 bp, Homo sapiens
caccttgtatctttc

SEQ ID NO: 418223 - DNA, 15 bp, Homo sapiens
tcaccttgtatcttt

SEQ ID NO: 418224 - DNA, 15 bp, Homo sapiens
ttcaccttgtatctt

SEQ ID NO: 418225 - DNA, 15 bp, Homo sapiens
tttcaccttgtatct

SEQ ID NO: 418226 - DNA, 15 bp, Homo sapiens
ttttcaccttgtatc

SEQ ID NO: 418227 - DNA, 15 bp, Homo sapiens
tttttcaccttgtat

SEQ ID NO: 418228 - DNA, 15 bp, Homo sapiens
ttttttcaccttgta

SEQ ID NO: 418229 - DNA, 15 bp, Homo sapiens
cttttttcaccttgt

SEQ ID NO: 418230 - DNA, 15 bp, Homo sapiens
tcttttttcaccttg

SEQ ID NO: 418231 - DNA, 15 bp, Homo sapiens
ttcttttttcacctt

SEQ ID NO: 418232 - DNA, 15 bp, Homo sapiens
tttcttttttcacct

SEQ ID NO: 418233 - DNA, 15 bp, Homo sapiens
ctttcttttttcacc

SEQ ID NO: 418234 - DNA, 15 bp, Homo sapiens
tctttcttttttcac

SEQ ID NO: 418235 - DNA, 15 bp, Homo sapiens
ttctttcttttttca

SEQ ID NO: 418236 - DNA, 15 bp, Homo sapiens
tttctttcttttttc

SEQ ID NO: 418237 - DNA, 15 bp, Homo sapiens
ctttctttctttttt

SEQ ID NO: 418238 - DNA, 15 bp, Homo sapiens
tctttctttcttttt

SEQ ID NO: 418239 - DNA, 15 bp, Homo sapiens
ttctttctttctttt

SEQ ID NO: 418240 - DNA, 15 bp, Homo sapiens
tttctttctttcttt

SEQ ID NO: 418241 - DNA, 15 bp, Homo sapiens
ctttctttctttctt

SEQ ID NO: 418242 - DNA, 15 bp, Homo sapiens
tctttctttctttct

SEQ ID NO: 418243 - DNA, 15 bp, Homo sapiens
ttctttctttctttc

SEQ ID NO: 418244 - DNA, 15 bp, Homo sapiens
ttttctttctttctt

SEQ ID NO: 418245 - DNA, 15 bp, Homo sapiens
cttttctttctttct

SEQ ID NO: 418246 - DNA, 15 bp, Homo sapiens
tcttttctttctttc

SEQ ID NO: 418247 - DNA, 15 bp, Homo sapiens
ttcttttctttcttt

SEQ ID NO: 418248 - DNA, 15 bp, Homo sapiens
tttcttttctttctt

SEQ ID NO: 418249 - DNA, 15 bp, Homo sapiens
ctttcttttctttct

SEQ ID NO: 418250 - DNA, 15 bp, Homo sapiens
tctttcttttctttc

SEQ ID NO: 418251 - DNA, 15 bp, Homo sapiens
gtctttcttttcttt

SEQ ID NO: 418252 - DNA, 15 bp, Homo sapiens
tgtctttcttttctt

SEQ ID NO: 418253 - DNA, 15 bp, Homo sapiens
ctgtctttcttttct

SEQ ID NO: 418254 - DNA, 15 bp, Homo sapiens
cctgtctttcttttc

SEQ ID NO: 418255 - DNA, 15 bp, Homo sapiens
tcctgtctttctttt

SEQ ID NO: 418256 - DNA, 15 bp, Homo sapiens
atcctgtctttcttt

SEQ ID NO: 418257 - DNA, 15 bp, Homo sapiens
tatcctgtctttctt

SEQ ID NO: 418258 - DNA, 15 bp, Homo sapiens
ctatcctgtctttct

SEQ ID NO: 418259 - DNA, 15 bp, Homo sapiens
cctatcctgtctttc

SEQ ID NO: 418260 - DNA, 15 bp, Homo sapiens
tcctatcctgtcttt

SEQ ID NO: 418261 - DNA, 15 bp, Homo sapiens
ttcctatcctgtctt

SEQ ID NO: 418262 - DNA, 15 bp, Homo sapiens
tttcctatcctgtct

SEQ ID NO: 418263 - DNA, 15 bp, Homo sapiens
gtttcctatcctgtc

SEQ ID NO: 418264 - DNA, 15 bp, Homo sapiens
tgtttcctatcctgt

SEQ ID NO: 418265 - DNA, 15 bp, Homo sapiens
atgtttcctatcctg

SEQ ID NO: 418266 - DNA, 15 bp, Homo sapiens
tatgtttcctatcct

SEQ ID NO: 418267 - DNA, 15 bp, Homo sapiens
atatgtttcctatcc

SEQ ID NO: 418268 - DNA, 15 bp, Homo sapiens
gatatgtttcctatc

SEQ ID NO: 418269 - DNA, 15 bp, Homo sapiens
agatatgtttcctat

SEQ ID NO: 418270 - DNA, 15 bp, Homo sapiens
tagatatgtttccta

SEQ ID NO: 418271 - DNA, 15 bp, Homo sapiens
gtagatatgtttcct

SEQ ID NO: 418272 - DNA, 15 bp, Homo sapiens
tgtagatatgtttcc

SEQ ID NO: 418273 - DNA, 15 bp, Homo sapiens
ctgtagatatgtttc

SEQ ID NO: 418274 - DNA, 15 bp, Homo sapiens
tctgtagatatgttt

SEQ ID NO: 418275 - DNA, 15 bp, Homo sapiens
ctctgtagatatgtt

SEQ ID NO: 418276 - DNA, 15 bp, Homo sapiens
gctctgtagatatgt

SEQ ID NO: 418277 - DNA, 15 bp, Homo sapiens
ggctctgtagatatg

SEQ ID NO: 418278 - DNA, 15 bp, Homo sapiens
gggctctgtagatat

SEQ ID NO: 418279 - DNA, 15 bp, Homo sapiens
agggctctgtagata

SEQ ID NO: 418280 - DNA, 15 bp, Homo sapiens
aagggctctgtagat

SEQ ID NO: 418281 - DNA, 15 bp, Homo sapiens
aaagggctctgtaga

SEQ ID NO: 418282 - DNA, 15 bp, Homo sapiens
gaaagggctctgtag

SEQ ID NO: 418283 - DNA, 15 bp, Homo sapiens
agaaagggctctgta

SEQ ID NO: 418284 - DNA, 15 bp, Homo sapiens
tagaaagggctctgt

SEQ ID NO: 418285 - DNA, 15 bp, Homo sapiens
atagaaagggctctg

SEQ ID NO: 418286 - DNA, 15 bp, Homo sapiens
catagaaagggctct

SEQ ID NO: 418287 - DNA, 15 bp, Homo sapiens
acatagaaagggctc

SEQ ID NO: 418288 - DNA, 15 bp, Homo sapiens
gacatagaaagggct

SEQ ID NO: 418289 - DNA, 15 bp, Homo sapiens
ggacatagaaagggc

SEQ ID NO: 418290 - DNA, 15 bp, Homo sapiens
gggacatagaaaggg

SEQ ID NO: 418291 - DNA, 15 bp, Homo sapiens
tgggacatagaaagg

SEQ ID NO: 418292 - DNA, 15 bp, Homo sapiens
ctgggacatagaaag

SEQ ID NO: 418293 - DNA, 15 bp, Homo sapiens
cctgggacatagaaa

SEQ ID NO: 418294 - DNA, 15 bp, Homo sapiens
acctgggacatagaa

SEQ ID NO: 418295 - DNA, 15 bp, Homo sapiens
aacctgggacataga

SEQ ID NO: 418296 - DNA, 15 bp, Homo sapiens
gaacctgggacatag

SEQ ID NO: 418297 - DNA, 15 bp, Homo sapiens
ggaacctgggacata

SEQ ID NO: 418298 - DNA, 15 bp, Homo sapiens
aggaacctgggacat

SEQ ID NO: 418299 - DNA, 15 bp, Homo sapiens
caggaacctgggaca

SEQ ID NO: 418300 - DNA, 15 bp, Homo sapiens
acaggaacctgggac

SEQ ID NO: 418301 - DNA, 15 bp, Homo sapiens
aacaggaacctggga

SEQ ID NO: 418302 - DNA, 15 bp, Homo sapiens
gaacaggaacctggg

SEQ ID NO: 418303 - DNA, 15 bp, Homo sapiens
ggaacaggaacctgg

SEQ ID NO: 418304 - DNA, 15 bp, Homo sapiens
tggaacaggaacctg

SEQ ID NO: 418305 - DNA, 15 bp, Homo sapiens
atggaacaggaacct

SEQ ID NO: 418306 - DNA, 15 bp, Homo sapiens
tatggaacaggaacc

SEQ ID NO: 418307 - DNA, 15 bp, Homo sapiens
atatggaacaggaac

SEQ ID NO: 418308 - DNA, 15 bp, Homo sapiens
tatatggaacaggaa

SEQ ID NO: 418309 - DNA, 15 bp, Homo sapiens
atatatggaacagga

SEQ ID NO: 418310 - DNA, 15 bp, Homo sapiens
aatatatggaacagg

SEQ ID NO: 418311 - DNA, 15 bp, Homo sapiens
caatatatggaacag

SEQ ID NO: 418312 - DNA, 15 bp, Homo sapiens
gcaatatatggaaca

SEQ ID NO: 418313 - DNA, 15 bp, Homo sapiens
ggcaatatatggaac

SEQ ID NO: 418314 - DNA, 15 bp, Homo sapiens
aggcaatatatggaa

SEQ ID NO: 418315 - DNA, 15 bp, Homo sapiens
aaggcaatatatgga

SEQ ID NO: 418316 - DNA, 15 bp, Homo sapiens
caaggcaatatatgg

SEQ ID NO: 418317 - DNA, 15 bp, Homo sapiens
acaaggcaatatatg

SEQ ID NO: 418318 - DNA, 15 bp, Homo sapiens
aacaaggcaatatat

SEQ ID NO: 418319 - DNA, 15 bp, Homo sapiens
aaacaaggcaatata

SEQ ID NO: 418320 - DNA, 15 bp, Homo sapiens
gaaacaaggcaatat

SEQ ID NO: 418321 - DNA, 15 bp, Homo sapiens
ggaaacaaggcaata

SEQ ID NO: 418322 - DNA, 15 bp, Homo sapiens
tggaaacaaggcaat

SEQ ID NO: 418323 - DNA, 15 bp, Homo sapiens
atggaaacaaggcaa

SEQ ID NO: 418324 - DNA, 15 bp, Homo sapiens
gatggaaacaaggca

SEQ ID NO: 418325 - DNA, 15 bp, Homo sapiens
agatggaaacaaggc

SEQ ID NO: 418326 - DNA, 15 bp, Homo sapiens
gagatggaaacaagg

SEQ ID NO: 418327 - DNA, 15 bp, Homo sapiens
tgagatggaaacaag

SEQ ID NO: 418328 - DNA, 15 bp, Homo sapiens
gtgagatggaaacaa

SEQ ID NO: 418329 - DNA, 15 bp, Homo sapiens
cgtgagatggaaaca

SEQ ID NO: 418330 - DNA, 15 bp, Homo sapiens
ccgtgagatggaaac

SEQ ID NO: 418331 - DNA, 15 bp, Homo sapiens
accgtgagatggaaa

SEQ ID NO: 418332 - DNA, 15 bp, Homo sapiens
aaccgtgagatggaa

SEQ ID NO: 418333 - DNA, 15 bp, Homo sapiens
aaaccgtgagatgga

SEQ ID NO: 418334 - DNA, 15 bp, Homo sapiens
aaaaccgtgagatgg

SEQ ID NO: 418335 - DNA, 15 bp, Homo sapiens
caaaaccgtgagatg

SEQ ID NO: 418336 - DNA, 15 bp, Homo sapiens
ccaaaaccgtgagat

SEQ ID NO: 418337 - DNA, 15 bp, Homo sapiens
cccaaaaccgtgaga

SEQ ID NO: 418338 - DNA, 15 bp, Homo sapiens
ccccaaaaccgtgag

SEQ ID NO: 418339 - DNA, 15 bp, Homo sapiens
tccccaaaaccgtga

SEQ ID NO: 418340 - DNA, 15 bp, Homo sapiens
ttccccaaaaccgtg

SEQ ID NO: 418341 - DNA, 15 bp, Homo sapiens
attccccaaaaccgt

SEQ ID NO: 418342 - DNA, 15 bp, Homo sapiens
gattccccaaaaccg

SEQ ID NO: 418343 - DNA, 15 bp, Homo sapiens
ggattccccaaaacc

SEQ ID NO: 418344 - DNA, 15 bp, Homo sapiens
tggattccccaaaac

SEQ ID NO: 418345 - DNA, 15 bp, Homo sapiens
atggattccccaaaa

SEQ ID NO: 418346 - DNA, 15 bp, Homo sapiens
aatggattccccaaa

SEQ ID NO: 418347 - DNA, 15 bp, Homo sapiens
taatggattccccaa

SEQ ID NO: 418348 - DNA, 15 bp, Homo sapiens
ttaatggattcccca

SEQ ID NO: 418349 - DNA, 15 bp, Homo sapiens
tttaatggattcccc

SEQ ID NO: 418350 - DNA, 15 bp, Homo sapiens
atttaatggattccc

SEQ ID NO: 418351 - DNA, 15 bp, Homo sapiens
gatttaatggattcc

SEQ ID NO: 418352 - DNA, 15 bp, Homo sapiens
agatttaatggattc

SEQ ID NO: 418353 - DNA, 15 bp, Homo sapiens
tagatttaatggatt

SEQ ID NO: 418354 - DNA, 15 bp, Homo sapiens
ctagatttaatggat

SEQ ID NO: 418355 - DNA, 15 bp, Homo sapiens
tctagatttaatgga

SEQ ID NO: 418356 - DNA, 15 bp, Homo sapiens
ctctagatttaatgg

SEQ ID NO: 418357 - DNA, 15 bp, Homo sapiens
gctctagatttaatg

SEQ ID NO: 418358 - DNA, 15 bp, Homo sapiens
tgctctagatttaat

SEQ ID NO: 418359 - DNA, 15 bp, Homo sapiens
ctgctctagatttaa

SEQ ID NO: 418360 - DNA, 15 bp, Homo sapiens
cctgctctagattta

SEQ ID NO: 418361 - DNA, 15 bp, Homo sapiens
acctgctctagattt

SEQ ID NO: 418362 - DNA, 15 bp, Homo sapiens
cacctgctctagatt

SEQ ID NO: 418363 - DNA, 15 bp, Homo sapiens
tcacctgctctagat

SEQ ID NO: 418364 - DNA, 15 bp, Homo sapiens
ctcacctgctctaga

SEQ ID NO: 418365 - DNA, 15 bp, Homo sapiens
actcacctgctctag

SEQ ID NO: 418366 - DNA, 15 bp, Homo sapiens
tactcacctgctcta

SEQ ID NO: 418367 - DNA, 15 bp, Homo sapiens
ttactcacctgctct

SEQ ID NO: 418368 - DNA, 15 bp, Homo sapiens
cttactcacctgctc

SEQ ID NO: 418369 - DNA, 15 bp, Homo sapiens
tcttactcacctgct

SEQ ID NO: 418370 - DNA, 15 bp, Homo sapiens
ttcttactcacctgc

SEQ ID NO: 418371 - DNA, 15 bp, Homo sapiens
tttcttactcacctg

SEQ ID NO: 418372 - DNA, 15 bp, Homo sapiens
ttttcttactcacct

SEQ ID NO: 418373 - DNA, 15 bp, Homo sapiens
attttcttactcacc

SEQ ID NO: 418374 - DNA, 15 bp, Homo sapiens
tattttcttactcac

SEQ ID NO: 418375 - DNA, 15 bp, Homo sapiens
gtattttcttactca

SEQ ID NO: 418376 - DNA, 15 bp, Homo sapiens
agtattttcttactc

SEQ ID NO: 418377 - DNA, 15 bp, Homo sapiens
aagtattttcttact

SEQ ID NO: 418378 - DNA, 15 bp, Homo sapiens
caagtattttcttac

SEQ ID NO: 418379 - DNA, 15 bp, Homo sapiens
tcaagtattttctta

SEQ ID NO: 418380 - DNA, 15 bp, Homo sapiens
ttcaagtattttctt

SEQ ID NO: 418381 - DNA, 15 bp, Homo sapiens
cttcaagtattttct

SEQ ID NO: 418382 - DNA, 15 bp, Homo sapiens
acttcaagtattttc

SEQ ID NO: 418383 - DNA, 15 bp, Homo sapiens
gacttcaagtatttt

SEQ ID NO: 418384 - DNA, 15 bp, Homo sapiens
tgacttcaagtattt

SEQ ID NO: 418385 - DNA, 15 bp, Homo sapiens
ttgacttcaagtatt

SEQ ID NO: 418386 - DNA, 15 bp, Homo sapiens
cttgacttcaagtat

SEQ ID NO: 418387 - DNA, 15 bp, Homo sapiens
gcttgacttcaagta

SEQ ID NO: 418388 - DNA, 15 bp, Homo sapiens
tgcttgacttcaagt

SEQ ID NO: 418389 - DNA, 15 bp, Homo sapiens
ttgcttgacttcaag

SEQ ID NO: 418390 - DNA, 15 bp, Homo sapiens
attgcttgacttcaa

SEQ ID NO: 418391 - DNA, 15 bp, Homo sapiens
aattgcttgacttca

SEQ ID NO: 418392 - DNA, 15 bp, Homo sapiens
taattgcttgacttc

SEQ ID NO: 418393 - DNA, 15 bp, Homo sapiens
ctaattgcttgactt

SEQ ID NO: 418394 - DNA, 15 bp, Homo sapiens
cctaattgcttgact

SEQ ID NO: 418395 - DNA, 15 bp, Homo sapiens
acctaattgcttgac

SEQ ID NO: 418396 - DNA, 15 bp, Homo sapiens
tacctaattgcttga

SEQ ID NO: 418397 - DNA, 15 bp, Homo sapiens
ttacctaattgcttg

SEQ ID NO: 418398 - DNA, 15 bp, Homo sapiens
attacctaattgctt

SEQ ID NO: 418399 - DNA, 15 bp, Homo sapiens
gattacctaattgct

SEQ ID NO: 418400 - DNA, 15 bp, Homo sapiens
agattacctaattgc

SEQ ID NO: 418401 - DNA, 15 bp, Homo sapiens
tagattacctaattg

SEQ ID NO: 418402 - DNA, 15 bp, Homo sapiens
ttagattacctaatt

SEQ ID NO: 418403 - DNA, 15 bp, Homo sapiens
cttagattacctaat

SEQ ID NO: 418404 - DNA, 15 bp, Homo sapiens
tcttagattacctaa

SEQ ID NO: 418405 - DNA, 15 bp, Homo sapiens
gtcttagattaccta

SEQ ID NO: 418406 - DNA, 15 bp, Homo sapiens
tgtcttagattacct

SEQ ID NO: 418407 - DNA, 15 bp, Homo sapiens
ctgtcttagattacc

SEQ ID NO: 418408 - DNA, 15 bp, Homo sapiens
actgtcttagattac

SEQ ID NO: 418409 - DNA, 15 bp, Homo sapiens
cactgtcttagatta

SEQ ID NO: 418410 - DNA, 15 bp, Homo sapiens
ccactgtcttagatt

SEQ ID NO: 418411 - DNA, 15 bp, Homo sapiens
gccactgtcttagat

SEQ ID NO: 418412 - DNA, 15 bp, Homo sapiens
agccactgtcttaga

SEQ ID NO: 418413 - DNA, 15 bp, Homo sapiens
cagccactgtcttag

SEQ ID NO: 418414 - DNA, 15 bp, Homo sapiens
acagccactgtctta

SEQ ID NO: 418415 - DNA, 15 bp, Homo sapiens
cacagccactgtctt

SEQ ID NO: 418416 - DNA, 15 bp, Homo sapiens
acacagccactgtct

SEQ ID NO: 418417 - DNA, 15 bp, Homo sapiens
cacacagccactgtc

SEQ ID NO: 418418 - DNA, 15 bp, Homo sapiens
ccacacagccactgt

SEQ ID NO: 418419 - DNA, 15 bp, Homo sapiens
cccacacagccactg

SEQ ID NO: 418420 - DNA, 15 bp, Homo sapiens
tcccacacagccact

SEQ ID NO: 418421 - DNA, 15 bp, Homo sapiens
ttcccacacagccac

SEQ ID NO: 418422 - DNA, 15 bp, Homo sapiens
cttcccacacagcca

SEQ ID NO: 418423 - DNA, 15 bp, Homo sapiens
acttcccacacagcc

SEQ ID NO: 418424 - DNA, 15 bp, Homo sapiens
aacttcccacacagc

SEQ ID NO: 418425 - DNA, 15 bp, Homo sapiens
taacttcccacacag

SEQ ID NO: 418426 - DNA, 15 bp, Homo sapiens
gtaacttcccacaca

SEQ ID NO: 418427 - DNA, 15 bp, Homo sapiens
tgtaacttcccacac

SEQ ID NO: 418428 - DNA, 15 bp, Homo sapiens
atgtaacttcccaca

SEQ ID NO: 418429 - DNA, 15 bp, Homo sapiens
catgtaacttcccac

SEQ ID NO: 418430 - DNA, 15 bp, Homo sapiens
aaattccccacctgc

SEQ ID NO: 418431 - DNA, 15 bp, Homo sapiens
gaaattccccacctg

SEQ ID NO: 418432 - DNA, 15 bp, Homo sapiens
tgaaattccccacct

SEQ ID NO: 418433 - DNA, 15 bp, Homo sapiens
ctgaaattccccacc

SEQ ID NO: 418434 - DNA, 15 bp, Homo sapiens
tctgaaattccccac

SEQ ID NO: 418435 - DNA, 15 bp, Homo sapiens
ttctgaaattcccca

SEQ ID NO: 418436 - DNA, 15 bp, Homo sapiens
attctgaaattcccc

SEQ ID NO: 418437 - DNA, 15 bp, Homo sapiens
gattctgaaattccc

SEQ ID NO: 418438 - DNA, 15 bp, Homo sapiens
agattctgaaattcc

SEQ ID NO: 418439 - DNA, 15 bp, Homo sapiens
cagattctgaaattc

SEQ ID NO: 418440 - DNA, 15 bp, Homo sapiens
tcagattctgaaatt

SEQ ID NO: 418441 - DNA, 15 bp, Homo sapiens
gtcagattctgaaat

SEQ ID NO: 418442 - DNA, 15 bp, Homo sapiens
agtcagattctgaaa

SEQ ID NO: 418443 - DNA, 15 bp, Homo sapiens
gagtcagattctgaa

SEQ ID NO: 418444 - DNA, 15 bp, Homo sapiens
agagtcagattctga

SEQ ID NO: 418445 - DNA, 15 bp, Homo sapiens
aagagtcagattctg

SEQ ID NO: 418446 - DNA, 15 bp, Homo sapiens
gaagagtcagattct

SEQ ID NO: 418447 - DNA, 15 bp, Homo sapiens
tgaagagtcagattc

SEQ ID NO: 418448 - DNA, 15 bp, Homo sapiens
gtgaagagtcagatt

SEQ ID NO: 418449 - DNA, 15 bp, Homo sapiens
agtgaagagtcagat

SEQ ID NO: 418450 - DNA, 15 bp, Homo sapiens
gagtgaagagtcaga

SEQ ID NO: 418451 - DNA, 15 bp, Homo sapiens
tgagtgaagagtcag

SEQ ID NO: 418452 - DNA, 15 bp, Homo sapiens
gtgagtgaagagtca

SEQ ID NO: 418453 - DNA, 15 bp, Homo sapiens
tgtgagtgaagagtc

SEQ ID NO: 418454 - DNA, 15 bp, Homo sapiens
ttgtgagtgaagagt

SEQ ID NO: 418455 - DNA, 15 bp, Homo sapiens
attgtgagtgaagag

SEQ ID NO: 418456 - DNA, 15 bp, Homo sapiens
aattgtgagtgaaga

SEQ ID NO: 418457 - DNA, 15 bp, Homo sapiens
aaattgtgagtgaag

SEQ ID NO: 418458 - DNA, 15 bp, Homo sapiens
gaaattgtgagtgaa

SEQ ID NO: 418459 - DNA, 15 bp, Homo sapiens
ggaaattgtgagtga

SEQ ID NO: 418460 - DNA, 15 bp, Homo sapiens
aggaaattgtgagtg

SEQ ID NO: 418461 - DNA, 15 bp, Homo sapiens
caggaaattgtgagt

SEQ ID NO: 418462 - DNA, 15 bp, Homo sapiens
acaggaaattgtgag

SEQ ID NO: 418463 - DNA, 15 bp, Homo sapiens
tacaggaaattgtga

SEQ ID NO: 418464 - DNA, 15 bp, Homo sapiens
atacaggaaattgtg

SEQ ID NO: 418465 - DNA, 15 bp, Homo sapiens
catacaggaaattgt

SEQ ID NO: 418466 - DNA, 15 bp, Homo sapiens
acatacaggaaattg

SEQ ID NO: 418467 - DNA, 15 bp, Homo sapiens
tacatacaggaaatt

SEQ ID NO: 418468 - DNA, 15 bp, Homo sapiens
atacatacaggaaat

SEQ ID NO: 418469 - DNA, 15 bp, Homo sapiens
gatacatacaggaaa

SEQ ID NO: 418470 - DNA, 15 bp, Homo sapiens
tgatacatacaggaa

SEQ ID NO: 418471 - DNA, 15 bp, Homo sapiens
atgatacatacagga

SEQ ID NO: 418472 - DNA, 15 bp, Homo sapiens
tatgatacatacagg

SEQ ID NO: 418473 - DNA, 15 bp, Homo sapiens
ctatgatacatacag

SEQ ID NO: 418474 - DNA, 15 bp, Homo sapiens
tctatgatacataca

SEQ ID NO: 418475 - DNA, 15 bp, Homo sapiens
gtctatgatacatac

SEQ ID NO: 418476 - DNA, 15 bp, Homo sapiens
cgtctatgatacata

SEQ ID NO: 418477 - DNA, 15 bp, Homo sapiens
tcgtctatgatacat

SEQ ID NO: 418478 - DNA, 15 bp, Homo sapiens
gtcgtctatgataca

SEQ ID NO: 418479 - DNA, 15 bp, Homo sapiens
ggtcgtctatgatac

SEQ ID NO: 418480 - DNA, 15 bp, Homo sapiens
gggtcgtctatgata

SEQ ID NO: 418481 - DNA, 15 bp, Homo sapiens
agggtcgtctatgat

SEQ ID NO: 418482 - DNA, 15 bp, Homo sapiens
gagggtcgtctatga

SEQ ID NO: 418483 - DNA, 15 bp, Homo sapiens
ggagggtcgtctatg

SEQ ID NO: 418484 - DNA, 15 bp, Homo sapiens
gggagggtcgtctat

SEQ ID NO: 418485 - DNA, 15 bp, Homo sapiens
tgggagggtcgtcta

SEQ ID NO: 418486 - DNA, 15 bp, Homo sapiens
ctgggagggtcgtct

SEQ ID NO: 418487 - DNA, 15 bp, Homo sapiens
gctgggagggtcgtc

SEQ ID NO: 418488 - DNA, 15 bp, Homo sapiens
ggctgggagggtcgt

SEQ ID NO: 418489 - DNA, 15 bp, Homo sapiens
tggctgggagggtcg

SEQ ID NO: 418490 - DNA, 15 bp, Homo sapiens
ctggctgggagggtc

SEQ ID NO: 418491 - DNA, 15 bp, Homo sapiens
cctggctgggagggt

SEQ ID NO: 418492 - DNA, 15 bp, Homo sapiens
tcctggctgggaggg

SEQ ID NO: 418493 - DNA, 15 bp, Homo sapiens
ttcctggctgggagg

SEQ ID NO: 418494 - DNA, 15 bp, Homo sapiens
attcctggctgggag

SEQ ID NO: 418495 - DNA, 15 bp, Homo sapiens
cattcctggctggga

SEQ ID NO: 418496 - DNA, 15 bp, Homo sapiens
acattcctggctggg

SEQ ID NO: 418497 - DNA, 15 bp, Homo sapiens
aacattcctggctgg

SEQ ID NO: 418498 - DNA, 15 bp, Homo sapiens
caacattcctggctg

SEQ ID NO: 418499 - DNA, 15 bp, Homo sapiens
tcaacattcctggct

SEQ ID NO: 418500 - DNA, 15 bp, Homo sapiens
gtcaacattcctggc

SEQ ID NO: 418501 - DNA, 15 bp, Homo sapiens
tgtcaacattcctgg

SEQ ID NO: 418502 - DNA, 15 bp, Homo sapiens
atgtcaacattcctg

SEQ ID NO: 418503 - DNA, 15 bp, Homo sapiens
catgtcaacattcct

SEQ ID NO: 418504 - DNA, 15 bp, Homo sapiens
tcatgtcaacattcc

SEQ ID NO: 418505 - DNA, 15 bp, Homo sapiens
atcatgtcaacattc

SEQ ID NO: 418506 - DNA, 15 bp, Homo sapiens
gatcatgtcaacatt

SEQ ID NO: 418507 - DNA, 15 bp, Homo sapiens
tgatcatgtcaacat

SEQ ID NO: 418508 - DNA, 15 bp, Homo sapiens
gtgatcatgtcaaca

SEQ ID NO: 418509 - DNA, 15 bp, Homo sapiens
tgtgatcatgtcaac

SEQ ID NO: 418510 - DNA, 15 bp, Homo sapiens
ctgtgatcatgtcaa

SEQ ID NO: 418511 - DNA, 15 bp, Homo sapiens
tctgtgatcatgtca

SEQ ID NO: 418512 - DNA, 15 bp, Homo sapiens
ttctgtgatcatgtc

SEQ ID NO: 418513 - DNA, 15 bp, Homo sapiens
attctgtgatcatgt

SEQ ID NO: 418514 - DNA, 15 bp, Homo sapiens
tattctgtgatcatg

SEQ ID NO: 418515 - DNA, 15 bp, Homo sapiens
gtattctgtgatcat

SEQ ID NO: 418516 - DNA, 15 bp, Homo sapiens
tgtattctgtgatca

SEQ ID NO: 418517 - DNA, 15 bp, Homo sapiens
atgtattctgtgatc

SEQ ID NO: 418518 - DNA, 15 bp, Homo sapiens
tatgtattctgtgat

SEQ ID NO: 418519 - DNA, 15 bp, Homo sapiens
ttatgtattctgtga

SEQ ID NO: 418520 - DNA, 15 bp, Homo sapiens
tttatgtattctgtg

SEQ ID NO: 418521 - DNA, 15 bp, Homo sapiens
atttatgtattctgt

SEQ ID NO: 418522 - DNA, 15 bp, Homo sapiens
tatttatgtattctg

SEQ ID NO: 418523 - DNA, 15 bp, Homo sapiens
ttatttatgtattct

SEQ ID NO: 418524 - DNA, 15 bp, Homo sapiens
tttatttatgtattc

SEQ ID NO: 418525 - DNA, 15 bp, Homo sapiens
ttttatttatgtatt

SEQ ID NO: 418526 - DNA, 15 bp, Homo sapiens
cttttatttatgtat

SEQ ID NO: 418527 - DNA, 15 bp, Homo sapiens
ccttttatttatgta

SEQ ID NO: 418528 - DNA, 15 bp, Homo sapiens
tccttttatttatgt

SEQ ID NO: 418529 - DNA, 15 bp, Homo sapiens
ctccttttatttatg

SEQ ID NO: 418530 - DNA, 15 bp, Homo sapiens
cctccttttatttat

SEQ ID NO: 418531 - DNA, 15 bp, Homo sapiens
acctccttttattta

SEQ ID NO: 418532 - DNA, 15 bp, Homo sapiens
cacctccttttattt

SEQ ID NO: 418533 - DNA, 15 bp, Homo sapiens
tcacctccttttatt

SEQ ID NO: 418534 - DNA, 15 bp, Homo sapiens
atcacctccttttat

SEQ ID NO: 418535 - DNA, 15 bp, Homo sapiens
tatcacctcctttta

SEQ ID NO: 418536 - DNA, 15 bp, Homo sapiens
ctatcacctcctttt

SEQ ID NO: 418537 - DNA, 15 bp, Homo sapiens
actatcacctccttt

SEQ ID NO: 418538 - DNA, 15 bp, Homo sapiens
aactatcacctcctt

SEQ ID NO: 418539 - DNA, 15 bp, Homo sapiens
aaactatcacctcct

SEQ ID NO: 418540 - DNA, 15 bp, Homo sapiens
aaaactatcacctcc

SEQ ID NO: 418541 - DNA, 15 bp, Homo sapiens
caaaactatcacctc

SEQ ID NO: 418542 - DNA, 15 bp, Homo sapiens
gcaaaactatcacct

SEQ ID NO: 418543 - DNA, 15 bp, Homo sapiens
ggcaaaactatcacc

SEQ ID NO: 418544 - DNA, 15 bp, Homo sapiens
tggcaaaactatcac

SEQ ID NO: 418545 - DNA, 15 bp, Homo sapiens
atggcaaaactatca

SEQ ID NO: 418546 - DNA, 15 bp, Homo sapiens
gatggcaaaactatc

SEQ ID NO: 418547 - DNA, 15 bp, Homo sapiens
ggatggcaaaactat

SEQ ID NO: 418548 - DNA, 15 bp, Homo sapiens
aggatggcaaaacta

SEQ ID NO: 418549 - DNA, 15 bp, Homo sapiens
gaggatggcaaaact

SEQ ID NO: 418550 - DNA, 15 bp, Homo sapiens
tgaggatggcaaaac

SEQ ID NO: 418551 - DNA, 15 bp, Homo sapiens
ctgaggatggcaaaa

SEQ ID NO: 418552 - DNA, 15 bp, Homo sapiens
tctgaggatggcaaa

SEQ ID NO: 418553 - DNA, 15 bp, Homo sapiens
ttctgaggatggcaa

SEQ ID NO: 418554 - DNA, 15 bp, Homo sapiens
cttctgaggatggca

SEQ ID NO: 418555 - DNA, 15 bp, Homo sapiens
acttctgaggatggc

SEQ ID NO: 418556 - DNA, 15 bp, Homo sapiens
tacttctgaggatgg

SEQ ID NO: 418557 - DNA, 15 bp, Homo sapiens
ttacttctgaggatg

SEQ ID NO: 418558 - DNA, 15 bp, Homo sapiens
attacttctgaggat

SEQ ID NO: 418559 - DNA, 15 bp, Homo sapiens
aattacttctgagga

SEQ ID NO: 418560 - DNA, 15 bp, Homo sapiens
taattacttctgagg

SEQ ID NO: 418561 - DNA, 15 bp, Homo sapiens
ctaattacttctgag

SEQ ID NO: 418562 - DNA, 15 bp, Homo sapiens
tctaattacttctga

SEQ ID NO: 418563 - DNA, 15 bp, Homo sapiens
atctaattacttctg

SEQ ID NO: 418564 - DNA, 15 bp, Homo sapiens
catctaattacttct

SEQ ID NO: 418565 - DNA, 15 bp, Homo sapiens
tcatctaattacttc

SEQ ID NO: 418566 - DNA, 15 bp, Homo sapiens
gtcatctaattactt

SEQ ID NO: 418567 - DNA, 15 bp, Homo sapiens
tgtcatctaattact

SEQ ID NO: 418568 - DNA, 15 bp, Homo sapiens
gtgtcatctaattac

SEQ ID NO: 418569 - DNA, 15 bp, Homo sapiens
ggtgtcatctaatta

SEQ ID NO: 418570 - DNA, 15 bp, Homo sapiens
tggtgtcatctaatt

SEQ ID NO: 418571 - DNA, 15 bp, Homo sapiens
ctggtgtcatctaat

SEQ ID NO: 418572 - DNA, 15 bp, Homo sapiens
tctggtgtcatctaa

SEQ ID NO: 418573 - DNA, 15 bp, Homo sapiens
ttctggtgtcatcta

SEQ ID NO: 418574 - DNA, 15 bp, Homo sapiens
cttctggtgtcatct

SEQ ID NO: 418575 - DNA, 15 bp, Homo sapiens
acttctggtgtcatc

SEQ ID NO: 418576 - DNA, 15 bp, Homo sapiens
aacttctggtgtcat

SEQ ID NO: 418577 - DNA, 15 bp, Homo sapiens
caacttctggtgtca

SEQ ID NO: 418578 - DNA, 15 bp, Homo sapiens
acaacttctggtgtc

SEQ ID NO: 418579 - DNA, 15 bp, Homo sapiens
tacaacttctggtgt

SEQ ID NO: 418580 - DNA, 15 bp, Homo sapiens
atacaacttctggtg

SEQ ID NO: 418581 - DNA, 15 bp, Homo sapiens
tatacaacttctggt

SEQ ID NO: 418582 - DNA, 15 bp, Homo sapiens
ttatacaacttctgg

SEQ ID NO: 418583 - DNA, 15 bp, Homo sapiens
attatacaacttctg

SEQ ID NO: 418584 - DNA, 15 bp, Homo sapiens
gattatacaacttct

SEQ ID NO: 418585 - DNA, 15 bp, Homo sapiens
tgattatacaacttc

SEQ ID NO: 418586 - DNA, 15 bp, Homo sapiens
ctgattatacaactt

SEQ ID NO: 418587 - DNA, 15 bp, Homo sapiens
tctgattatacaact

SEQ ID NO: 418588 - DNA, 15 bp, Homo sapiens
ttctgattatacaac

SEQ ID NO: 418589 - DNA, 15 bp, Homo sapiens
tttctgattatacaa

SEQ ID NO: 418590 - DNA, 15 bp, Homo sapiens
ttttctgattataca

SEQ ID NO: 418591 - DNA, 15 bp, Homo sapiens
tttttctgattatac

SEQ ID NO: 418592 - DNA, 15 bp, Homo sapiens
gtttttctgattata

SEQ ID NO: 418593 - DNA, 15 bp, Homo sapiens
tgtttttctgattat

SEQ ID NO: 418594 - DNA, 15 bp, Homo sapiens
ctgtttttctgatta

SEQ ID NO: 418595 - DNA, 15 bp, Homo sapiens
tctgtttttctgatt

SEQ ID NO: 418596 - DNA, 15 bp, Homo sapiens
ttctgtttttctgat

SEQ ID NO: 418597 - DNA, 15 bp, Homo sapiens
attctgtttttctga

SEQ ID NO: 418598 - DNA, 15 bp, Homo sapiens
gattctgtttttctg

SEQ ID NO: 418599 - DNA, 15 bp, Homo sapiens
cgattctgtttttct

SEQ ID NO: 418600 - DNA, 15 bp, Homo sapiens
acgattctgtttttc

SEQ ID NO: 418601 - DNA, 15 bp, Homo sapiens
tacgattctgttttt

SEQ ID NO: 418602 - DNA, 15 bp, Homo sapiens
gtacgattctgtttt

SEQ ID NO: 418603 - DNA, 15 bp, Homo sapiens
tgtacgattctgttt

SEQ ID NO: 418604 - DNA, 15 bp, Homo sapiens
ctgtacgattctgtt

SEQ ID NO: 418605 - DNA, 15 bp, Homo sapiens
actgtacgattctgt

SEQ ID NO: 418606 - DNA, 15 bp, Homo sapiens
cactgtacgattctg

SEQ ID NO: 418607 - DNA, 15 bp, Homo sapiens
acactgtacgattct

SEQ ID NO: 418608 - DNA, 15 bp, Homo sapiens
aacactgtacgattc

SEQ ID NO: 418609 - DNA, 15 bp, Homo sapiens
aaacactgtacgatt

SEQ ID NO: 418610 - DNA, 15 bp, Homo sapiens
taaacactgtacgat

SEQ ID NO: 418611 - DNA, 15 bp, Homo sapiens
ttaaacactgtacga

SEQ ID NO: 418612 - DNA, 15 bp, Homo sapiens
tttaaacactgtacg

SEQ ID NO: 418613 - DNA, 15 bp, Homo sapiens
ttttaaacactgtac

SEQ ID NO: 418614 - DNA, 15 bp, Homo sapiens
cttttaaacactgta

SEQ ID NO: 418615 - DNA, 15 bp, Homo sapiens
acttttaaacactgt

SEQ ID NO: 418616 - DNA, 15 bp, Homo sapiens
cacttttaaacactg

SEQ ID NO: 418617 - DNA, 15 bp, Homo sapiens
acacttttaaacact

SEQ ID NO: 418618 - DNA, 15 bp, Homo sapiens
tacacttttaaacac

SEQ ID NO: 418619 - DNA, 15 bp, Homo sapiens
ctacacttttaaaca

SEQ ID NO: 418620 - DNA, 15 bp, Homo sapiens
tctacacttttaaac

SEQ ID NO: 418621 - DNA, 15 bp, Homo sapiens
gtctacacttttaaa

SEQ ID NO: 418622 - DNA, 15 bp, Homo sapiens
agtctacacttttaa

SEQ ID NO: 418623 - DNA, 15 bp, Homo sapiens
gagtctacactttta

SEQ ID NO: 418624 - DNA, 15 bp, Homo sapiens
ggagtctacactttt

SEQ ID NO: 418625 - DNA, 15 bp, Homo sapiens
aggagtctacacttt

SEQ ID NO: 418626 - DNA, 15 bp, Homo sapiens
taggagtctacactt

SEQ ID NO: 418627 - DNA, 15 bp, Homo sapiens
ttaggagtctacact

SEQ ID NO: 418628 - DNA, 15 bp, Homo sapiens
attaggagtctacac

SEQ ID NO: 418629 - DNA, 15 bp, Homo sapiens
cattaggagtctaca

SEQ ID NO: 418630 - DNA, 15 bp, Homo sapiens
acattaggagtctac

SEQ ID NO: 418631 - DNA, 15 bp, Homo sapiens
tacattaggagtcta

SEQ ID NO: 418632 - DNA, 15 bp, Homo sapiens
ctacattaggagtct

SEQ ID NO: 418633 - DNA, 15 bp, Homo sapiens
cctacattaggagtc

SEQ ID NO: 418634 - DNA, 15 bp, Homo sapiens
gcctacattaggagt

SEQ ID NO: 418635 - DNA, 15 bp, Homo sapiens
agcctacattaggag

SEQ ID NO: 418636 - DNA, 15 bp, Homo sapiens
cagcctacattagga

SEQ ID NO: 418637 - DNA, 15 bp, Homo sapiens
gcagcctacattagg

SEQ ID NO: 418638 - DNA, 15 bp, Homo sapiens
agcagcctacattag

SEQ ID NO: 418639 - DNA, 15 bp, Homo sapiens
cagcagcctacatta

SEQ ID NO: 418640 - DNA, 15 bp, Homo sapiens
ccagcagcctacatt

SEQ ID NO: 418641 - DNA, 15 bp, Homo sapiens
tccagcagcctacat

SEQ ID NO: 418642 - DNA, 15 bp, Homo sapiens
ctccagcagcctaca

SEQ ID NO: 418643 - DNA, 15 bp, Homo sapiens
actccagcagcctac

SEQ ID NO: 418644 - DNA, 15 bp, Homo sapiens
aactccagcagccta

SEQ ID NO: 418645 - DNA, 15 bp, Homo sapiens
gaactccagcagcct

SEQ ID NO: 418646 - DNA, 15 bp, Homo sapiens
tgaactccagcagcc

SEQ ID NO: 418647 - DNA, 15 bp, Homo sapiens
ttgaactccagcagc

SEQ ID NO: 418648 - DNA, 15 bp, Homo sapiens
tttgaactccagcag

SEQ ID NO: 418649 - DNA, 15 bp, Homo sapiens
gtttgaactccagca

SEQ ID NO: 418650 - DNA, 15 bp, Homo sapiens
ggtttgaactccagc

SEQ ID NO: 418651 - DNA, 15 bp, Homo sapiens
gggtttgaactccag

SEQ ID NO: 418652 - DNA, 15 bp, Homo sapiens
agggtttgaactcca

SEQ ID NO: 418653 - DNA, 15 bp, Homo sapiens
cagggtttgaactcc

SEQ ID NO: 418654 - DNA, 15 bp, Homo sapiens
ccagggtttgaactc

SEQ ID NO: 418655 - DNA, 15 bp, Homo sapiens
gccagggtttgaact

SEQ ID NO: 418656 - DNA, 15 bp, Homo sapiens
agccagggtttgaac

SEQ ID NO: 418657 - DNA, 15 bp, Homo sapiens
gagccagggtttgaa

SEQ ID NO: 418658 - DNA, 15 bp, Homo sapiens
ggagccagggtttga

SEQ ID NO: 418659 - DNA, 15 bp, Homo sapiens
aggagccagggtttg

SEQ ID NO: 418660 - DNA, 15 bp, Homo sapiens
gaggagccagggttt

SEQ ID NO: 418661 - DNA, 15 bp, Homo sapiens
agaggagccagggtt

SEQ ID NO: 418662 - DNA, 15 bp, Homo sapiens
tagaggagccagggt

SEQ ID NO: 418663 - DNA, 15 bp, Homo sapiens
gtagaggagccaggg

SEQ ID NO: 418664 - DNA, 15 bp, Homo sapiens
agtagaggagccagg

SEQ ID NO: 418665 - DNA, 15 bp, Homo sapiens
aagtagaggagccag

SEQ ID NO: 418666 - DNA, 15 bp, Homo sapiens
caagtagaggagcca

SEQ ID NO: 418667 - DNA, 15 bp, Homo sapiens
gcaagtagaggagcc

SEQ ID NO: 418668 - DNA, 15 bp, Homo sapiens
ggcaagtagaggagc

SEQ ID NO: 418669 - DNA, 15 bp, Homo sapiens
cggcaagtagaggag

SEQ ID NO: 418670 - DNA, 15 bp, Homo sapiens
ccggcaagtagagga

SEQ ID NO: 418671 - DNA, 15 bp, Homo sapiens
accggcaagtagagg

SEQ ID NO: 418672 - DNA, 15 bp, Homo sapiens
aaccggcaagtagag

SEQ ID NO: 418673 - DNA, 15 bp, Homo sapiens
aaaccggcaagtaga

SEQ ID NO: 418674 - DNA, 15 bp, Homo sapiens
aaaaccggcaagtag

SEQ ID NO: 418675 - DNA, 15 bp, Homo sapiens
caaaaccggcaagta

SEQ ID NO: 418676 - DNA, 15 bp, Homo sapiens
tcaaaaccggcaagt

SEQ ID NO: 418677 - DNA, 15 bp, Homo sapiens
ctcaaaaccggcaag

SEQ ID NO: 418678 - DNA, 15 bp, Homo sapiens
gctcaaaaccggcaa

SEQ ID NO: 418679 - DNA, 15 bp, Homo sapiens
tgctcaaaaccggca

SEQ ID NO: 418680 - DNA, 15 bp, Homo sapiens
ttgctcaaaaccggc

SEQ ID NO: 418681 - DNA, 15 bp, Homo sapiens
cttgctcaaaaccgg

SEQ ID NO: 418682 - DNA, 15 bp, Homo sapiens
acttgctcaaaaccg

SEQ ID NO: 418683 - DNA, 15 bp, Homo sapiens
aacttgctcaaaacc

SEQ ID NO: 418684 - DNA, 15 bp, Homo sapiens
taacttgctcaaaac

SEQ ID NO: 418685 - DNA, 15 bp, Homo sapiens
ataacttgctcaaaa

SEQ ID NO: 418686 - DNA, 15 bp, Homo sapiens
cataacttgctcaaa

SEQ ID NO: 418687 - DNA, 15 bp, Homo sapiens
tcataacttgctcaa

SEQ ID NO: 418688 - DNA, 15 bp, Homo sapiens
ttcataacttgctca

SEQ ID NO: 418689 - DNA, 15 bp, Homo sapiens
cttcataacttgctc

SEQ ID NO: 418690 - DNA, 15 bp, Homo sapiens
gcttcataacttgct

SEQ ID NO: 418691 - DNA, 15 bp, Homo sapiens
agcttcataacttgc

SEQ ID NO: 418692 - DNA, 15 bp, Homo sapiens
tagcttcataacttg

SEQ ID NO: 418693 - DNA, 15 bp, Homo sapiens
atagcttcataactt

SEQ ID NO: 418694 - DNA, 15 bp, Homo sapiens
catagcttcataact

SEQ ID NO: 418695 - DNA, 15 bp, Homo sapiens
gcatagcttcataac

SEQ ID NO: 418696 - DNA, 15 bp, Homo sapiens
tgcatagcttcataa

SEQ ID NO: 418697 - DNA, 15 bp, Homo sapiens
ttgcatagcttcata

SEQ ID NO: 418698 - DNA, 15 bp, Homo sapiens
gttgcatagcttcat

SEQ ID NO: 418699 - DNA, 15 bp, Homo sapiens
ggttgcatagcttca

SEQ ID NO: 418700 - DNA, 15 bp, Homo sapiens
aggttgcatagcttc

SEQ ID NO: 418701 - DNA, 15 bp, Homo sapiens
aaggttgcatagctt

SEQ ID NO: 418702 - DNA, 15 bp, Homo sapiens
gaaggttgcatagct

SEQ ID NO: 418703 - DNA, 15 bp, Homo sapiens
tgaaggttgcatagc

SEQ ID NO: 418704 - DNA, 15 bp, Homo sapiens
atgaaggttgcatag

SEQ ID NO: 418705 - DNA, 15 bp, Homo sapiens
gatgaaggttgcata

SEQ ID NO: 418706 - DNA, 15 bp, Homo sapiens
tgatgaaggttgcat

SEQ ID NO: 418707 - DNA, 15 bp, Homo sapiens
ctgatgaaggttgca

SEQ ID NO: 418708 - DNA, 15 bp, Homo sapiens
actgatgaaggttgc

SEQ ID NO: 418709 - DNA, 15 bp, Homo sapiens
tactgatgaaggttg

SEQ ID NO: 418710 - DNA, 15 bp, Homo sapiens
ttactgatgaaggtt

SEQ ID NO: 418711 - DNA, 15 bp, Homo sapiens
tttactgatgaaggt

SEQ ID NO: 418712 - DNA, 15 bp, Homo sapiens
ttttactgatgaagg

SEQ ID NO: 418713 - DNA, 15 bp, Homo sapiens
attttactgatgaag

SEQ ID NO: 418714 - DNA, 15 bp, Homo sapiens
tattttactgatgaa

SEQ ID NO: 418715 - DNA, 15 bp, Homo sapiens
ctattttactgatga

SEQ ID NO: 418716 - DNA, 15 bp, Homo sapiens
cctattttactgatg

SEQ ID NO: 418717 - DNA, 15 bp, Homo sapiens
tcctattttactgat

SEQ ID NO: 418718 - DNA, 15 bp, Homo sapiens
ttcctattttactga

SEQ ID NO: 418719 - DNA, 15 bp, Homo sapiens
attcctattttactg

SEQ ID NO: 418720 - DNA, 15 bp, Homo sapiens
tattcctattttact

SEQ ID NO: 418721 - DNA, 15 bp, Homo sapiens
ttattcctattttac

SEQ ID NO: 418722 - DNA, 15 bp, Homo sapiens
attattcctatttta

SEQ ID NO: 418723 - DNA, 15 bp, Homo sapiens
tattattcctatttt

SEQ ID NO: 418724 - DNA, 15 bp, Homo sapiens
ttattattcctattt

SEQ ID NO: 418725 - DNA, 15 bp, Homo sapiens
tttattattcctatt

SEQ ID NO: 418726 - DNA, 15 bp, Homo sapiens
ttttattattcctat

SEQ ID NO: 418727 - DNA, 15 bp, Homo sapiens
tttttattattccta

SEQ ID NO: 418728 - DNA, 15 bp, Homo sapiens
atttttattattcct

SEQ ID NO: 418729 - DNA, 15 bp, Homo sapiens
tatttttattattcc

SEQ ID NO: 418730 - DNA, 15 bp, Homo sapiens
gtatttttattattc

SEQ ID NO: 418731 - DNA, 15 bp, Homo sapiens
ggtatttttattatt

SEQ ID NO: 418732 - DNA, 15 bp, Homo sapiens
aggtatttttattat

SEQ ID NO: 418733 - DNA, 15 bp, Homo sapiens
taggtatttttatta

SEQ ID NO: 418734 - DNA, 15 bp, Homo sapiens
ataggtatttttatt

SEQ ID NO: 418735 - DNA, 15 bp, Homo sapiens
gataggtatttttat

SEQ ID NO: 418736 - DNA, 15 bp, Homo sapiens
agataggtattttta

SEQ ID NO: 418737 - DNA, 15 bp, Homo sapiens
aagataggtattttt

SEQ ID NO: 418738 - DNA, 15 bp, Homo sapiens
taagataggtatttt

SEQ ID NO: 418739 - DNA, 15 bp, Homo sapiens
ataagataggtattt

SEQ ID NO: 418740 - DNA, 15 bp, Homo sapiens
cataagataggtatt

SEQ ID NO: 418741 - DNA, 15 bp, Homo sapiens
ccataagataggtat

SEQ ID NO: 418742 - DNA, 15 bp, Homo sapiens
cccataagataggta

SEQ ID NO: 418743 - DNA, 15 bp, Homo sapiens
ccccataagataggt

SEQ ID NO: 418744 - DNA, 15 bp, Homo sapiens
cccccataagatagg

SEQ ID NO: 418745 - DNA, 15 bp, Homo sapiens
acccccataagatag

SEQ ID NO: 418746 - DNA, 15 bp, Homo sapiens
aacccccataagata

SEQ ID NO: 418747 - DNA, 15 bp, Homo sapiens
aaacccccataagat

SEQ ID NO: 418748 - DNA, 15 bp, Homo sapiens
gaaacccccataaga

SEQ ID NO: 418749 - DNA, 15 bp, Homo sapiens
ggaaacccccataag

SEQ ID NO: 418750 - DNA, 15 bp, Homo sapiens
cggaaacccccataa

SEQ ID NO: 418751 - DNA, 15 bp, Homo sapiens
ccggaaacccccata

SEQ ID NO: 418752 - DNA, 15 bp, Homo sapiens
gccggaaacccccat

SEQ ID NO: 418753 - DNA, 15 bp, Homo sapiens
tgccggaaaccccca

SEQ ID NO: 418754 - DNA, 15 bp, Homo sapiens
ttgccggaaaccccc

SEQ ID NO: 418755 - DNA, 15 bp, Homo sapiens
gttgccggaaacccc

SEQ ID NO: 418756 - DNA, 15 bp, Homo sapiens
agttgccggaaaccc

SEQ ID NO: 418757 - DNA, 15 bp, Homo sapiens
tagttgccggaaacc

SEQ ID NO: 418758 - DNA, 15 bp, Homo sapiens
gtagttgccggaaac

SEQ ID NO: 418759 - DNA, 15 bp, Homo sapiens
tgtagttgccggaaa

SEQ ID NO: 418760 - DNA, 15 bp, Homo sapiens
atgtagttgccggaa

SEQ ID NO: 418761 - DNA, 15 bp, Homo sapiens
aatgtagttgccgga

SEQ ID NO: 418762 - DNA, 15 bp, Homo sapiens
taatgtagttgccgg

SEQ ID NO: 418763 - DNA, 15 bp, Homo sapiens
ttaatgtagttgccg

SEQ ID NO: 418764 - DNA, 15 bp, Homo sapiens
attaatgtagttgcc

SEQ ID NO: 418765 - DNA, 15 bp, Homo sapiens
aattaatgtagttgc

SEQ ID NO: 418766 - DNA, 15 bp, Homo sapiens
taattaatgtagttg

SEQ ID NO: 418767 - DNA, 15 bp, Homo sapiens
ttaattaatgtagtt

SEQ ID NO: 418768 - DNA, 15 bp, Homo sapiens
tttaattaatgtagt

SEQ ID NO: 418769 - DNA, 15 bp, Homo sapiens
ttttaattaatgtag

SEQ ID NO: 418770 - DNA, 15 bp, Homo sapiens
attttaattaatgta

SEQ ID NO: 418771 - DNA, 15 bp, Homo sapiens
tattttaattaatgt

SEQ ID NO: 418772 - DNA, 15 bp, Homo sapiens
atattttaattaatg

SEQ ID NO: 418773 - DNA, 15 bp, Homo sapiens
gtatattttaattaa

SEQ ID NO: 418774 - DNA, 15 bp, Homo sapiens
tgtatattttaatta

SEQ ID NO: 418775 - DNA, 15 bp, Homo sapiens
ttgtatattttaatt

SEQ ID NO: 418776 - DNA, 15 bp, Homo sapiens
tttgtatattttaat

SEQ ID NO: 418777 - DNA, 15 bp, Homo sapiens
ctttgtatattttaa

SEQ ID NO: 418778 - DNA, 15 bp, Homo sapiens
gctttgtatatttta

SEQ ID NO: 418779 - DNA, 15 bp, Homo sapiens
tgctttgtatatttt

SEQ ID NO: 418780 - DNA, 15 bp, Homo sapiens
ttgctttgtatattt

SEQ ID NO: 418781 - DNA, 15 bp, Homo sapiens
gttgctttgtatatt

SEQ ID NO: 418782 - DNA, 15 bp, Homo sapiens
tgttgctttgtatat

SEQ ID NO: 418783 - DNA, 15 bp, Homo sapiens
atgttgctttgtata

SEQ ID NO: 418784 - DNA, 15 bp, Homo sapiens
catgttgctttgtat

SEQ ID NO: 418785 - DNA, 15 bp, Homo sapiens
tcatgttgctttgta

SEQ ID NO: 418786 - DNA, 15 bp, Homo sapiens
ttcatgttgctttgt

SEQ ID NO: 418787 - DNA, 15 bp, Homo sapiens
tttcatgttgctttg

SEQ ID NO: 418788 - DNA, 15 bp, Homo sapiens
atttcatgttgcttt

SEQ ID NO: 418789 - DNA, 15 bp, Homo sapiens
tatttcatgttgctt

SEQ ID NO: 418790 - DNA, 15 bp, Homo sapiens
ttatttcatgttgct

SEQ ID NO: 418791 - DNA, 15 bp, Homo sapiens
attatttcatgttgc

SEQ ID NO: 418792 - DNA, 15 bp, Homo sapiens
tattatttcatgttg

SEQ ID NO: 418793 - DNA, 15 bp, Homo sapiens
ttattatttcatgtt

SEQ ID NO: 418794 - DNA, 15 bp, Homo sapiens
tttattatttcatgt

SEQ ID NO: 418795 - DNA, 15 bp, Homo sapiens
atttattatttcatg

SEQ ID NO: 418796 - DNA, 15 bp, Homo sapiens
catttattatttcat

SEQ ID NO: 418797 - DNA, 15 bp, Homo sapiens
acatttattatttca

SEQ ID NO: 418798 - DNA, 15 bp, Homo sapiens
aacatttattatttc

SEQ ID NO: 418799 - DNA, 15 bp, Homo sapiens
taacatttattattt

SEQ ID NO: 418800 - DNA, 15 bp, Homo sapiens
ttaacatttattatt

SEQ ID NO: 418801 - DNA, 15 bp, Homo sapiens
attaacatttattat

SEQ ID NO: 418802 - DNA, 15 bp, Homo sapiens
tattaacatttatta

SEQ ID NO: 418803 - DNA, 15 bp, Homo sapiens
atattaacatttatt

SEQ ID NO: 418804 - DNA, 15 bp, Homo sapiens
aatattaacatttat

SEQ ID NO: 418805 - DNA, 15 bp, Homo sapiens
caatattaacattta

SEQ ID NO: 418806 - DNA, 15 bp, Homo sapiens
acaatattaacattt

SEQ ID NO: 418807 - DNA, 15 bp, Homo sapiens
tacaatattaacatt

SEQ ID NO: 418808 - DNA, 15 bp, Homo sapiens
ttacaatattaacat

SEQ ID NO: 418809 - DNA, 15 bp, Homo sapiens
attacaatattaaca

SEQ ID NO: 418810 - DNA, 15 bp, Homo sapiens
cattacaatattaac

SEQ ID NO: 418811 - DNA, 15 bp, Homo sapiens
gcattacaatattaa

SEQ ID NO: 418812 - DNA, 15 bp, Homo sapiens
ggcattacaatatta

SEQ ID NO: 418813 - DNA, 15 bp, Homo sapiens
gggcattacaatatt

SEQ ID NO: 418814 - DNA, 15 bp, Homo sapiens
tgggcattacaatat

SEQ ID NO: 418815 - DNA, 15 bp, Homo sapiens
atgggcattacaata

SEQ ID NO: 418816 - DNA, 15 bp, Homo sapiens
tatgggcattacaat

SEQ ID NO: 418817 - DNA, 15 bp, Homo sapiens
ttatgggcattacaa

SEQ ID NO: 418818 - DNA, 15 bp, Homo sapiens
attatgggcattaca

SEQ ID NO: 418819 - DNA, 15 bp, Homo sapiens
tattatgggcattac

SEQ ID NO: 418820 - DNA, 15 bp, Homo sapiens
gtattatgggcatta

SEQ ID NO: 418821 - DNA, 15 bp, Homo sapiens
agtattatgggcatt

SEQ ID NO: 418822 - DNA, 15 bp, Homo sapiens
aagtattatgggcat

SEQ ID NO: 418823 - DNA, 15 bp, Homo sapiens
aaagtattatgggca

SEQ ID NO: 418824 - DNA, 15 bp, Homo sapiens
taaagtattatgggc

SEQ ID NO: 418825 - DNA, 15 bp, Homo sapiens
ttaaagtattatggg

SEQ ID NO: 418826 - DNA, 15 bp, Homo sapiens
cttaaagtattatgg

SEQ ID NO: 418827 - DNA, 15 bp, Homo sapiens
tcttaaagtattatg

SEQ ID NO: 418828 - DNA, 15 bp, Homo sapiens
ctcttaaagtattat

SEQ ID NO: 418829 - DNA, 15 bp, Homo sapiens
tctcttaaagtatta

SEQ ID NO: 418830 - DNA, 15 bp, Homo sapiens
ctctcttaaagtatt

SEQ ID NO: 418831 - DNA, 15 bp, Homo sapiens
tctctcttaaagtat

SEQ ID NO: 418832 - DNA, 15 bp, Homo sapiens
atctctcttaaagta

SEQ ID NO: 418833 - DNA, 15 bp, Homo sapiens
tatctctcttaaagt

SEQ ID NO: 418834 - DNA, 15 bp, Homo sapiens
atatctctcttaaag

SEQ ID NO: 418835 - DNA, 15 bp, Homo sapiens
aatatctctcttaaa

SEQ ID NO: 418836 - DNA, 15 bp, Homo sapiens
taatatctctcttaa

SEQ ID NO: 418837 - DNA, 15 bp, Homo sapiens
ttaatatctctctta

SEQ ID NO: 418838 - DNA, 15 bp, Homo sapiens
gttaatatctctctt

SEQ ID NO: 418839 - DNA, 15 bp, Homo sapiens
ggttaatatctctct

SEQ ID NO: 418840 - DNA, 15 bp, Homo sapiens
tggttaatatctctc

SEQ ID NO: 418841 - DNA, 15 bp, Homo sapiens
ttggttaatatctct

SEQ ID NO: 418842 - DNA, 15 bp, Homo sapiens
attggttaatatctc

SEQ ID NO: 418843 - DNA, 15 bp, Homo sapiens
cattggttaatatct

SEQ ID NO: 418844 - DNA, 15 bp, Homo sapiens
ccattggttaatatc

SEQ ID NO: 418845 - DNA, 15 bp, Homo sapiens
tccattggttaatat

SEQ ID NO: 418846 - DNA, 15 bp, Homo sapiens
ctccattggttaata

SEQ ID NO: 418847 - DNA, 15 bp, Homo sapiens
gctccattggttaat

SEQ ID NO: 418848 - DNA, 15 bp, Homo sapiens
tgctccattggttaa

SEQ ID NO: 418849 - DNA, 15 bp, Homo sapiens
atgctccattggtta

SEQ ID NO: 418850 - DNA, 15 bp, Homo sapiens
tatgctccattggtt

SEQ ID NO: 418851 - DNA, 15 bp, Homo sapiens
ctatgctccattggt

SEQ ID NO: 418852 - DNA, 15 bp, Homo sapiens
gctatgctccattgg

SEQ ID NO: 418853 - DNA, 15 bp, Homo sapiens
ggctatgctccattg

SEQ ID NO: 418854 - DNA, 15 bp, Homo sapiens
aggctatgctccatt

SEQ ID NO: 418855 - DNA, 15 bp, Homo sapiens
caggctatgctccat

SEQ ID NO: 418856 - DNA, 15 bp, Homo sapiens
tcaggctatgctcca

SEQ ID NO: 418857 - DNA, 15 bp, Homo sapiens
gtcaggctatgctcc

SEQ ID NO: 418858 - DNA, 15 bp, Homo sapiens
tgtcaggctatgctc

SEQ ID NO: 418859 - DNA, 15 bp, Homo sapiens
ttgtcaggctatgct

SEQ ID NO: 418860 - DNA, 15 bp, Homo sapiens
cttgtcaggctatgc

SEQ ID NO: 418861 - DNA, 15 bp, Homo sapiens
ccttgtcaggctatg

SEQ ID NO: 418862 - DNA, 15 bp, Homo sapiens
accttgtcaggctat

SEQ ID NO: 418863 - DNA, 15 bp, Homo sapiens
caccttgtcaggcta

SEQ ID NO: 418864 - DNA, 15 bp, Homo sapiens
tcaccttgtcaggct

SEQ ID NO: 418865 - DNA, 15 bp, Homo sapiens
gtcaccttgtcaggc

SEQ ID NO: 418866 - DNA, 15 bp, Homo sapiens
ggtcaccttgtcagg

SEQ ID NO: 418867 - DNA, 15 bp, Homo sapiens
tggtcaccttgtcag

SEQ ID NO: 418868 - DNA, 15 bp, Homo sapiens
ctggtcaccttgtca

SEQ ID NO: 418869 - DNA, 15 bp, Homo sapiens
tctggtcaccttgtc

SEQ ID NO: 418870 - DNA, 15 bp, Homo sapiens
ttctggtcaccttgt

SEQ ID NO: 418871 - DNA, 15 bp, Homo sapiens
attctggtcaccttg

SEQ ID NO: 418872 - DNA, 15 bp, Homo sapiens
tattctggtcacctt

SEQ ID NO: 418873 - DNA, 15 bp, Homo sapiens
atattctggtcacct

SEQ ID NO: 418874 - DNA, 15 bp, Homo sapiens
catattctggtcacc

SEQ ID NO: 418875 - DNA, 15 bp, Homo sapiens
tcatattctggtcac

SEQ ID NO: 418876 - DNA, 15 bp, Homo sapiens
ttcatattctggtca

SEQ ID NO: 418877 - DNA, 15 bp, Homo sapiens
cttcatattctggtc

SEQ ID NO: 418878 - DNA, 15 bp, Homo sapiens
tcttcatattctggt

SEQ ID NO: 418879 - DNA, 15 bp, Homo sapiens
gtcttcatattctgg

SEQ ID NO: 418880 - DNA, 15 bp, Homo sapiens
tgtcttcatattctg

SEQ ID NO: 418881 - DNA, 15 bp, Homo sapiens
ttgtcttcatattct

SEQ ID NO: 418882 - DNA, 15 bp, Homo sapiens
tttgtcttcatattc

SEQ ID NO: 418883 - DNA, 15 bp, Homo sapiens
gtttgtcttcatatt

SEQ ID NO: 418884 - DNA, 15 bp, Homo sapiens
agtttgtcttcatat

SEQ ID NO: 418885 - DNA, 15 bp, Homo sapiens
cagtttgtcttcata

SEQ ID NO: 418886 - DNA, 15 bp, Homo sapiens
tcagtttgtcttcat

SEQ ID NO: 418887 - DNA, 15 bp, Homo sapiens
ctcagtttgtcttca

SEQ ID NO: 418888 - DNA, 15 bp, Homo sapiens
tctcagtttgtcttc

SEQ ID NO: 418889 - DNA, 15 bp, Homo sapiens
atctcagtttgtctt

SEQ ID NO: 418890 - DNA, 15 bp, Homo sapiens
aatctcagtttgtct

SEQ ID NO: 418891 - DNA, 15 bp, Homo sapiens
taatctcagtttgtc

SEQ ID NO: 418892 - DNA, 15 bp, Homo sapiens
ataatctcagtttgt

SEQ ID NO: 418893 - DNA, 15 bp, Homo sapiens
cataatctcagtttg

SEQ ID NO: 418894 - DNA, 15 bp, Homo sapiens
gcataatctcagttt

SEQ ID NO: 418895 - DNA, 15 bp, Homo sapiens
ggcataatctcagtt

SEQ ID NO: 418896 - DNA, 15 bp, Homo sapiens
tggcataatctcagt

SEQ ID NO: 418897 - DNA, 15 bp, Homo sapiens
atggcataatctcag

SEQ ID NO: 418898 - DNA, 15 bp, Homo sapiens
catggcataatctca

SEQ ID NO: 418899 - DNA, 15 bp, Homo sapiens
acatggcataatctc

SEQ ID NO: 418900 - DNA, 15 bp, Homo sapiens
cacatggcataatct

SEQ ID NO: 418901 - DNA, 15 bp, Homo sapiens
tcacatggcataatc

SEQ ID NO: 418902 - DNA, 15 bp, Homo sapiens
ttcacatggcataat

SEQ ID NO: 418903 - DNA, 15 bp, Homo sapiens
cttcacatggcataa

SEQ ID NO: 418904 - DNA, 15 bp, Homo sapiens
tcttcacatggcata

SEQ ID NO: 418905 - DNA, 15 bp, Homo sapiens
ttcttcacatggcat

SEQ ID NO: 418906 - DNA, 15 bp, Homo sapiens
attcttcacatggca

SEQ ID NO: 418907 - DNA, 15 bp, Homo sapiens
tattcttcacatggc

SEQ ID NO: 418908 - DNA, 15 bp, Homo sapiens
ttattcttcacatgg

SEQ ID NO: 418909 - DNA, 15 bp, Homo sapiens
attattcttcacatg

SEQ ID NO: 418910 - DNA, 15 bp, Homo sapiens
aattattcttcacat

SEQ ID NO: 418911 - DNA, 15 bp, Homo sapiens
caattattcttcaca

SEQ ID NO: 418912 - DNA, 15 bp, Homo sapiens
acaattattcttcac

SEQ ID NO: 418913 - DNA, 15 bp, Homo sapiens
tacaattattcttca

SEQ ID NO: 418914 - DNA, 15 bp, Homo sapiens
ctacaattattcttc

SEQ ID NO: 418915 - DNA, 15 bp, Homo sapiens
actacaattattctt

SEQ ID NO: 418916 - DNA, 15 bp, Homo sapiens
aactacaattattct

SEQ ID NO: 418917 - DNA, 15 bp, Homo sapiens
taactacaattattc

SEQ ID NO: 418918 - DNA, 15 bp, Homo sapiens
ataactacaattatt

SEQ ID NO: 418919 - DNA, 15 bp, Homo sapiens
tataactacaattat

SEQ ID NO: 418920 - DNA, 15 bp, Homo sapiens
atataactacaatta

SEQ ID NO: 418921 - DNA, 15 bp, Homo sapiens
catataactacaatt

SEQ ID NO: 418922 - DNA, 15 bp, Homo sapiens
gcatataactacaat

SEQ ID NO: 418923 - DNA, 15 bp, Homo sapiens
tgcatataactacaa

SEQ ID NO: 418924 - DNA, 15 bp, Homo sapiens
ttgcatataactaca

SEQ ID NO: 418925 - DNA, 15 bp, Homo sapiens
gttgcatataactac

SEQ ID NO: 418926 - DNA, 15 bp, Homo sapiens
agttgcatataacta

SEQ ID NO: 418927 - DNA, 15 bp, Homo sapiens
aagttgcatataact

SEQ ID NO: 418928 - DNA, 15 bp, Homo sapiens
taagttgcatataac

SEQ ID NO: 418929 - DNA, 15 bp, Homo sapiens
gtaagttgcatataa

SEQ ID NO: 418930 - DNA, 15 bp, Homo sapiens
tgtaagttgcatata

SEQ ID NO: 418931 - DNA, 15 bp, Homo sapiens
ctgtaagttgcatat

SEQ ID NO: 418932 - DNA, 15 bp, Homo sapiens
actgtaagttgcata

SEQ ID NO: 418933 - DNA, 15 bp, Homo sapiens
tactgtaagttgcat

SEQ ID NO: 418934 - DNA, 15 bp, Homo sapiens
ttactgtaagttgca

SEQ ID NO: 418935 - DNA, 15 bp, Homo sapiens
tttactgtaagttgc

SEQ ID NO: 418936 - DNA, 15 bp, Homo sapiens
ctttactgtaagttg

SEQ ID NO: 418937 - DNA, 15 bp, Homo sapiens
tctttactgtaagtt

SEQ ID NO: 418938 - DNA, 15 bp, Homo sapiens
ttctttactgtaagt

SEQ ID NO: 418939 - DNA, 15 bp, Homo sapiens
tttctttactgtaag

SEQ ID NO: 418940 - DNA, 15 bp, Homo sapiens
atttctttactgtaa

SEQ ID NO: 418941 - DNA, 15 bp, Homo sapiens
catttctttactgta

SEQ ID NO: 418942 - DNA, 15 bp, Homo sapiens
acatttctttactgt

SEQ ID NO: 418943 - DNA, 15 bp, Homo sapiens
aacatttctttactg

SEQ ID NO: 418944 - DNA, 15 bp, Homo sapiens
caacatttctttact

SEQ ID NO: 418945 - DNA, 15 bp, Homo sapiens
ccaacatttctttac

SEQ ID NO: 418946 - DNA, 15 bp, Homo sapiens
gccaacatttcttta

SEQ ID NO: 418947 - DNA, 15 bp, Homo sapiens
ggccaacatttcttt

SEQ ID NO: 418948 - DNA, 15 bp, Homo sapiens
tggccaacatttctt

SEQ ID NO: 418949 - DNA, 15 bp, Homo sapiens
ctggccaacatttct

SEQ ID NO: 418950 - DNA, 15 bp, Homo sapiens
cctggccaacatttc

SEQ ID NO: 418951 - DNA, 15 bp, Homo sapiens
gcctggccaacattt

SEQ ID NO: 418952 - DNA, 15 bp, Homo sapiens
tgcctggccaacatt

SEQ ID NO: 418953 - DNA, 15 bp, Homo sapiens
gtgcctggccaacat

SEQ ID NO: 418954 - DNA, 15 bp, Homo sapiens
cgtgcctggccaaca

SEQ ID NO: 418955 - DNA, 15 bp, Homo sapiens
ccgtgcctggccaac

SEQ ID NO: 418956 - DNA, 15 bp, Homo sapiens
accgtgcctggccaa

SEQ ID NO: 418957 - DNA, 15 bp, Homo sapiens
caccgtgcctggcca

SEQ ID NO: 418958 - DNA, 15 bp, Homo sapiens
ccaccgtgcctggcc

SEQ ID NO: 418959 - DNA, 15 bp, Homo sapiens
gccaccgtgcctggc

SEQ ID NO: 418960 - DNA, 15 bp, Homo sapiens
agccaccgtgcctgg

SEQ ID NO: 418961 - DNA, 15 bp, Homo sapiens
gagccaccgtgcctg

SEQ ID NO: 418962 - DNA, 15 bp, Homo sapiens
tgagccaccgtgcct

SEQ ID NO: 418963 - DNA, 15 bp, Homo sapiens
gtgagccaccgtgcc

SEQ ID NO: 418964 - DNA, 15 bp, Homo sapiens
cgtgagccaccgtgc

SEQ ID NO: 418965 - DNA, 15 bp, Homo sapiens
gcgtgagccaccgtg

SEQ ID NO: 418966 - DNA, 15 bp, Homo sapiens
ggcgtgagccaccgt

SEQ ID NO: 418967 - DNA, 15 bp, Homo sapiens
aggcgtgagccaccg

SEQ ID NO: 418968 - DNA, 15 bp, Homo sapiens
gccaaagtgctggga

SEQ ID NO: 418969 - DNA, 15 bp, Homo sapiens
tgccaaagtgctggg

SEQ ID NO: 418970 - DNA, 15 bp, Homo sapiens
ctgccaaagtgctgg

SEQ ID NO: 418971 - DNA, 15 bp, Homo sapiens
cctgccaaagtgctg

SEQ ID NO: 418972 - DNA, 15 bp, Homo sapiens
acctgccaaagtgct

SEQ ID NO: 418973 - DNA, 15 bp, Homo sapiens
gacctgccaaagtgc

SEQ ID NO: 418974 - DNA, 15 bp, Homo sapiens
tgacctgccaaagtg

SEQ ID NO: 418975 - DNA, 15 bp, Homo sapiens
ttgacctgccaaagt

SEQ ID NO: 418976 - DNA, 15 bp, Homo sapiens
cttgacctgccaaag

SEQ ID NO: 418977 - DNA, 15 bp, Homo sapiens
ccttgacctgccaaa

SEQ ID NO: 418978 - DNA, 15 bp, Homo sapiens
gccttgacctgccaa

SEQ ID NO: 418979 - DNA, 15 bp, Homo sapiens
tgccttgacctgcca

SEQ ID NO: 418980 - DNA, 15 bp, Homo sapiens
ctgccttgacctgcc

SEQ ID NO: 418981 - DNA, 15 bp, Homo sapiens
cctgccttgacctgc

SEQ ID NO: 418982 - DNA, 15 bp, Homo sapiens
gcctgccttgacctg

SEQ ID NO: 418983 - DNA, 15 bp, Homo sapiens
tgcctgccttgacct

SEQ ID NO: 418984 - DNA, 15 bp, Homo sapiens
ctgcctgccttgacc

SEQ ID NO: 418985 - DNA, 15 bp, Homo sapiens
tctgcctgccttgac

SEQ ID NO: 418986 - DNA, 15 bp, Homo sapiens
atctgcctgccttga

SEQ ID NO: 418987 - DNA, 15 bp, Homo sapiens
gatctgcctgccttg

SEQ ID NO: 418988 - DNA, 15 bp, Homo sapiens
tgatctgcctgcctt

SEQ ID NO: 418989 - DNA, 15 bp, Homo sapiens
tgtgatctgcctgcc

SEQ ID NO: 418990 - DNA, 15 bp, Homo sapiens
ttgtgatctgcctgc

SEQ ID NO: 418991 - DNA, 15 bp, Homo sapiens
cttgtgatctgcctg

SEQ ID NO: 418992 - DNA, 15 bp, Homo sapiens
ccttgtgatctgcct

SEQ ID NO: 418993 - DNA, 15 bp, Homo sapiens
accttgtgatctgcc

SEQ ID NO: 418994 - DNA, 15 bp, Homo sapiens
gaccttgtgatctgc

SEQ ID NO: 418995 - DNA, 15 bp, Homo sapiens
tgaccttgtgatctg

SEQ ID NO: 418996 - DNA, 15 bp, Homo sapiens
ctgaccttgtgatct

SEQ ID NO: 418997 - DNA, 15 bp, Homo sapiens
actcctgaccttgtg

SEQ ID NO: 418998 - DNA, 15 bp, Homo sapiens
aactcctgaccttgt

SEQ ID NO: 418999 - DNA, 15 bp, Homo sapiens
gaactcctgaccttg

SEQ ID NO: 419000 - DNA, 15 bp, Homo sapiens
tgaactcctgacctt

SEQ ID NO: 419001 - DNA, 15 bp, Homo sapiens
aatgttggccaggct

SEQ ID NO: 419002 - DNA, 15 bp, Homo sapiens
caatgttggccaggc

SEQ ID NO: 419003 - DNA, 15 bp, Homo sapiens
acaatgttggccagg

SEQ ID NO: 419004 - DNA, 15 bp, Homo sapiens
cacaatgttggccag

SEQ ID NO: 419005 - DNA, 15 bp, Homo sapiens
tcacaatgttggcca

SEQ ID NO: 419006 - DNA, 15 bp, Homo sapiens
ttcacaatgttggcc

SEQ ID NO: 419007 - DNA, 15 bp, Homo sapiens
tttcacaatgttggc

SEQ ID NO: 419008 - DNA, 15 bp, Homo sapiens
atttcacaatgttgg

SEQ ID NO: 419009 - DNA, 15 bp, Homo sapiens
gatttcacaatgttg

SEQ ID NO: 419010 - DNA, 15 bp, Homo sapiens
ggatttcacaatgtt

SEQ ID NO: 419011 - DNA, 15 bp, Homo sapiens
gggatttcacaatgt

SEQ ID NO: 419012 - DNA, 15 bp, Homo sapiens
tgggatttcacaatg

SEQ ID NO: 419013 - DNA, 15 bp, Homo sapiens
atgggatttcacaat

SEQ ID NO: 419014 - DNA, 15 bp, Homo sapiens
gatgggatttcacaa

SEQ ID NO: 419015 - DNA, 15 bp, Homo sapiens
agatgggatttcaca

SEQ ID NO: 419016 - DNA, 15 bp, Homo sapiens
gagatgggatttcac

SEQ ID NO: 419017 - DNA, 15 bp, Homo sapiens
agagatgggatttca

SEQ ID NO: 419018 - DNA, 15 bp, Homo sapiens
tagagatgggatttc

SEQ ID NO: 419019 - DNA, 15 bp, Homo sapiens
gtagagatgggattt

SEQ ID NO: 419020 - DNA, 15 bp, Homo sapiens
agtagagatgggatt

SEQ ID NO: 419021 - DNA, 15 bp, Homo sapiens
tagtagagatgggat

SEQ ID NO: 419022 - DNA, 15 bp, Homo sapiens
ttagtagagatggga

SEQ ID NO: 419023 - DNA, 15 bp, Homo sapiens
acccagctaattttt

SEQ ID NO: 419024 - DNA, 15 bp, Homo sapiens
cacccagctaatttt

SEQ ID NO: 419025 - DNA, 15 bp, Homo sapiens
acacccagctaattt

SEQ ID NO: 419026 - DNA, 15 bp, Homo sapiens
cacacccagctaatt

SEQ ID NO: 419027 - DNA, 15 bp, Homo sapiens
tcacacccagctaat

SEQ ID NO: 419028 - DNA, 15 bp, Homo sapiens
atcacacccagctaa

SEQ ID NO: 419029 - DNA, 15 bp, Homo sapiens
catcacacccagcta

SEQ ID NO: 419030 - DNA, 15 bp, Homo sapiens
tcatcacacccagct

SEQ ID NO: 419031 - DNA, 15 bp, Homo sapiens
gtcatcacacccagc

SEQ ID NO: 419032 - DNA, 15 bp, Homo sapiens
cgtcatcacacccag

SEQ ID NO: 419033 - DNA, 15 bp, Homo sapiens
ccgtcatcacaccca

SEQ ID NO: 419034 - DNA, 15 bp, Homo sapiens
cccgtcatcacaccc

SEQ ID NO: 419035 - DNA, 15 bp, Homo sapiens
gcccgtcatcacacc

SEQ ID NO: 419036 - DNA, 15 bp, Homo sapiens
cgcccgtcatcacac

SEQ ID NO: 419037 - DNA, 15 bp, Homo sapiens
gcgcccgtcatcaca

SEQ ID NO: 419038 - DNA, 15 bp, Homo sapiens
ggcgcccgtcatcac

SEQ ID NO: 419039 - DNA, 15 bp, Homo sapiens
aggcgcccgtcatca

SEQ ID NO: 419040 - DNA, 15 bp, Homo sapiens
caggcgcccgtcatc

SEQ ID NO: 419041 - DNA, 15 bp, Homo sapiens
acaggcgcccgtcat

SEQ ID NO: 419042 - DNA, 15 bp, Homo sapiens
tacaggcgcccgtca

SEQ ID NO: 419043 - DNA, 15 bp, Homo sapiens
ttacaggcgcccgtc

SEQ ID NO: 419044 - DNA, 15 bp, Homo sapiens
attacaggcgcccgt

SEQ ID NO: 419045 - DNA, 15 bp, Homo sapiens
gattacaggcgcccg

SEQ ID NO: 419046 - DNA, 15 bp, Homo sapiens
ggattacaggcgccc

SEQ ID NO: 419047 - DNA, 15 bp, Homo sapiens
tggattacaggcgcc

SEQ ID NO: 419048 - DNA, 15 bp, Homo sapiens
ttggattacaggcgc

SEQ ID NO: 419049 - DNA, 15 bp, Homo sapiens
cttggattacaggcg

SEQ ID NO: 419050 - DNA, 15 bp, Homo sapiens
gcttggattacaggc

SEQ ID NO: 419051 - DNA, 15 bp, Homo sapiens
agcttggattacagg

SEQ ID NO: 419052 - DNA, 15 bp, Homo sapiens
tagcttggattacag

SEQ ID NO: 419053 - DNA, 15 bp, Homo sapiens
gtagcttggattaca

SEQ ID NO: 419054 - DNA, 15 bp, Homo sapiens
agtagcttggattac

SEQ ID NO: 419055 - DNA, 15 bp, Homo sapiens
gagtagcttggatta

SEQ ID NO: 419056 - DNA, 15 bp, Homo sapiens
tgagtagcttggatt

SEQ ID NO: 419057 - DNA, 15 bp, Homo sapiens
ctgagtagcttggat

SEQ ID NO: 419058 - DNA, 15 bp, Homo sapiens
tctgagtagcttgga

SEQ ID NO: 419059 - DNA, 15 bp, Homo sapiens
ctctgagtagcttgg

SEQ ID NO: 419060 - DNA, 15 bp, Homo sapiens
cctctgagtagcttg

SEQ ID NO: 419061 - DNA, 15 bp, Homo sapiens
gcctctgagtagctt

SEQ ID NO: 419062 - DNA, 15 bp, Homo sapiens
agcctctgagtagct

SEQ ID NO: 419063 - DNA, 15 bp, Homo sapiens
cagcctctgagtagc

SEQ ID NO: 419064 - DNA, 15 bp, Homo sapiens
tcagcctctgagtag

SEQ ID NO: 419065 - DNA, 15 bp, Homo sapiens
ctcagcctctgagta

SEQ ID NO: 419066 - DNA, 15 bp, Homo sapiens
cctcagcctctgagt

SEQ ID NO: 419067 - DNA, 15 bp, Homo sapiens
gcctcagcctctgag

SEQ ID NO: 419068 - DNA, 15 bp, Homo sapiens
tgcctcagcctctga

SEQ ID NO: 419069 - DNA, 15 bp, Homo sapiens
ctgcctcagcctctg

SEQ ID NO: 419070 - DNA, 15 bp, Homo sapiens
aattctcctgcctca

SEQ ID NO: 419071 - DNA, 15 bp, Homo sapiens
gaattctcctgcctc

SEQ ID NO: 419072 - DNA, 15 bp, Homo sapiens
ggaattctcctgcct

SEQ ID NO: 419073 - DNA, 15 bp, Homo sapiens
aggaattctcctgcc

SEQ ID NO: 419074 - DNA, 15 bp, Homo sapiens
aaggaattctcctgc

SEQ ID NO: 419075 - DNA, 15 bp, Homo sapiens
caaggaattctcctg

SEQ ID NO: 419076 - DNA, 15 bp, Homo sapiens
tcaaggaattctcct

SEQ ID NO: 419077 - DNA, 15 bp, Homo sapiens
ttcaaggaattctcc

SEQ ID NO: 419078 - DNA, 15 bp, Homo sapiens
gttcaaggaattctc

SEQ ID NO: 419079 - DNA, 15 bp, Homo sapiens
ggttcaaggaattct

SEQ ID NO: 419080 - DNA, 15 bp, Homo sapiens
aggttcaaggaattc

SEQ ID NO: 419081 - DNA, 15 bp, Homo sapiens
caggttcaaggaatt

SEQ ID NO: 419082 - DNA, 15 bp, Homo sapiens
ccaggttcaaggaat

SEQ ID NO: 419083 - DNA, 15 bp, Homo sapiens
cccaggttcaaggaa

SEQ ID NO: 419084 - DNA, 15 bp, Homo sapiens
tcccaggttcaagga

SEQ ID NO: 419085 - DNA, 15 bp, Homo sapiens
ctcccaggttcaagg

SEQ ID NO: 419086 - DNA, 15 bp, Homo sapiens
agctcactgcaacct

SEQ ID NO: 419087 - DNA, 15 bp, Homo sapiens
cagctcactgcaacc

SEQ ID NO: 419088 - DNA, 15 bp, Homo sapiens
tcagctcactgcaac

SEQ ID NO: 419089 - DNA, 15 bp, Homo sapiens
ctcagctcactgcaa

SEQ ID NO: 419090 - DNA, 15 bp, Homo sapiens
tctcagctcactgca

SEQ ID NO: 419091 - DNA, 15 bp, Homo sapiens
atctcagctcactgc

SEQ ID NO: 419092 - DNA, 15 bp, Homo sapiens
gatctcagctcactg

SEQ ID NO: 419093 - DNA, 15 bp, Homo sapiens
tgatctcagctcact

SEQ ID NO: 419094 - DNA, 15 bp, Homo sapiens
gtgatctcagctcac

SEQ ID NO: 419095 - DNA, 15 bp, Homo sapiens
cgtgatctcagctca

SEQ ID NO: 419096 - DNA, 15 bp, Homo sapiens
gcgtgatctcagctc

SEQ ID NO: 419097 - DNA, 15 bp, Homo sapiens
ggcgtgatctcagct

SEQ ID NO: 419098 - DNA, 15 bp, Homo sapiens
tggcgtgatctcagc

SEQ ID NO: 419099 - DNA, 15 bp, Homo sapiens
gtggcgtgatctcag

SEQ ID NO: 419100 - DNA, 15 bp, Homo sapiens
agtggcgtgatctca

SEQ ID NO: 419101 - DNA, 15 bp, Homo sapiens
cagtggcgtgatctc

SEQ ID NO: 419102 - DNA, 15 bp, Homo sapiens
gggctggagtgcagt

SEQ ID NO: 419103 - DNA, 15 bp, Homo sapiens
cgggctggagtgcag

SEQ ID NO: 419104 - DNA, 15 bp, Homo sapiens
ccgggctggagtgca

SEQ ID NO: 419105 - DNA, 15 bp, Homo sapiens
cccgggctggagtgc

SEQ ID NO: 419106 - DNA, 15 bp, Homo sapiens
acccgggctggagtg

SEQ ID NO: 419107 - DNA, 15 bp, Homo sapiens
cacccgggctggagt

SEQ ID NO: 419108 - DNA, 15 bp, Homo sapiens
tcacccgggctggag

SEQ ID NO: 419109 - DNA, 15 bp, Homo sapiens
gtcacccgggctgga

SEQ ID NO: 419110 - DNA, 15 bp, Homo sapiens
tgtcacccgggctgg

SEQ ID NO: 419111 - DNA, 15 bp, Homo sapiens
ctgtcacccgggctg

SEQ ID NO: 419112 - DNA, 15 bp, Homo sapiens
actgtcacccgggct

SEQ ID NO: 419113 - DNA, 15 bp, Homo sapiens
cactgtcacccgggc

SEQ ID NO: 419114 - DNA, 15 bp, Homo sapiens
gcactgtcacccggg

SEQ ID NO: 419115 - DNA, 15 bp, Homo sapiens
tgcactgtcacccgg

SEQ ID NO: 419116 - DNA, 15 bp, Homo sapiens
ttgcactgtcacccg

SEQ ID NO: 419117 - DNA, 15 bp, Homo sapiens
cttgcactgtcaccc

SEQ ID NO: 419118 - DNA, 15 bp, Homo sapiens
tcttgcactgtcacc

SEQ ID NO: 419119 - DNA, 15 bp, Homo sapiens
gtcttgcactgtcac

SEQ ID NO: 419120 - DNA, 15 bp, Homo sapiens
agtcttgcactgtca

SEQ ID NO: 419121 - DNA, 15 bp, Homo sapiens
gagtcttgcactgtc

SEQ ID NO: 419122 - DNA, 15 bp, Homo sapiens
ggagtcttgcactgt

SEQ ID NO: 419123 - DNA, 15 bp, Homo sapiens
cggagtcttgcactg

SEQ ID NO: 419124 - DNA, 15 bp, Homo sapiens
acggagtcttgcact

SEQ ID NO: 419125 - DNA, 15 bp, Homo sapiens
gacggagtcttgcac

SEQ ID NO: 419126 - DNA, 15 bp, Homo sapiens
agacggagtcttgca

SEQ ID NO: 419127 - DNA, 15 bp, Homo sapiens
gagacggagtcttgc

SEQ ID NO: 419128 - DNA, 15 bp, Homo sapiens
tgagacggagtcttg

SEQ ID NO: 419129 - DNA, 15 bp, Homo sapiens
ttgagacggagtctt

SEQ ID NO: 419130 - DNA, 15 bp, Homo sapiens
gtttttgagacggag

SEQ ID NO: 419131 - DNA, 15 bp, Homo sapiens
tgtttttgagacgga

SEQ ID NO: 419132 - DNA, 15 bp, Homo sapiens
ttgtttttgagacgg

SEQ ID NO: 419133 - DNA, 15 bp, Homo sapiens
tttgtttttgagacg

SEQ ID NO: 419134 - DNA, 15 bp, Homo sapiens
ttttgtttttgagac

SEQ ID NO: 419135 - DNA, 15 bp, Homo sapiens
tttttgtttttgaga

SEQ ID NO: 419136 - DNA, 15 bp, Homo sapiens
ttttttgtttttgag

SEQ ID NO: 419137 - DNA, 15 bp, Homo sapiens
cttttttgtttttga

SEQ ID NO: 419138 - DNA, 15 bp, Homo sapiens
acttttttgtttttg

SEQ ID NO: 419139 - DNA, 15 bp, Homo sapiens
gacttttttgttttt

SEQ ID NO: 419140 - DNA, 15 bp, Homo sapiens
tgacttttttgtttt

SEQ ID NO: 419141 - DNA, 15 bp, Homo sapiens
ctgacttttttgttt

SEQ ID NO: 419142 - DNA, 15 bp, Homo sapiens
tctgacttttttgtt

SEQ ID NO: 419143 - DNA, 15 bp, Homo sapiens
ttctgacttttttgt

SEQ ID NO: 419144 - DNA, 15 bp, Homo sapiens
tttctgacttttttg

SEQ ID NO: 419145 - DNA, 15 bp, Homo sapiens
atttctgactttttt

SEQ ID NO: 419146 - DNA, 15 bp, Homo sapiens
catttctgacttttt

SEQ ID NO: 419147 - DNA, 15 bp, Homo sapiens
acatttctgactttt

SEQ ID NO: 419148 - DNA, 15 bp, Homo sapiens
aacatttctgacttt

SEQ ID NO: 419149 - DNA, 15 bp, Homo sapiens
caacatttctgactt

SEQ ID NO: 419150 - DNA, 15 bp, Homo sapiens
ccaacatttctgact

SEQ ID NO: 419151 - DNA, 15 bp, Homo sapiens
gccaacatttctgac

SEQ ID NO: 419152 - DNA, 15 bp, Homo sapiens
tgccaacatttctga

SEQ ID NO: 419153 - DNA, 15 bp, Homo sapiens
ttgccaacatttctg

SEQ ID NO: 419154 - DNA, 15 bp, Homo sapiens
cttgccaacatttct

SEQ ID NO: 419155 - DNA, 15 bp, Homo sapiens
tcttgccaacatttc

SEQ ID NO: 419156 - DNA, 15 bp, Homo sapiens
gtcttgccaacattt

SEQ ID NO: 419157 - DNA, 15 bp, Homo sapiens
tgtcttgccaacatt

SEQ ID NO: 419158 - DNA, 15 bp, Homo sapiens
atgtcttgccaacat

SEQ ID NO: 419159 - DNA, 15 bp, Homo sapiens
aatgtcttgccaaca

SEQ ID NO: 419160 - DNA, 15 bp, Homo sapiens
taatgtcttgccaac

SEQ ID NO: 419161 - DNA, 15 bp, Homo sapiens
gtaatgtcttgccaa

SEQ ID NO: 419162 - DNA, 15 bp, Homo sapiens
tgtaatgtcttgcca

SEQ ID NO: 419163 - DNA, 15 bp, Homo sapiens
atgtaatgtcttgcc

SEQ ID NO: 419164 - DNA, 15 bp, Homo sapiens
catgtaatgtcttgc

SEQ ID NO: 419165 - DNA, 15 bp, Homo sapiens
ccatgtaatgtcttg

SEQ ID NO: 419166 - DNA, 15 bp, Homo sapiens
gccatgtaatgtctt

SEQ ID NO: 419167 - DNA, 15 bp, Homo sapiens
tgccatgtaatgtct

SEQ ID NO: 419168 - DNA, 15 bp, Homo sapiens
ttgccatgtaatgtc

SEQ ID NO: 419169 - DNA, 15 bp, Homo sapiens
cttgccatgtaatgt

SEQ ID NO: 419170 - DNA, 15 bp, Homo sapiens
tcttgccatgtaatg

SEQ ID NO: 419171 - DNA, 15 bp, Homo sapiens
atcttgccatgtaat

SEQ ID NO: 419172 - DNA, 15 bp, Homo sapiens
catcttgccatgtaa

SEQ ID NO: 419173 - DNA, 15 bp, Homo sapiens
acatcttgccatgta

SEQ ID NO: 419174 - DNA, 15 bp, Homo sapiens
tacatcttgccatgt

SEQ ID NO: 419175 - DNA, 15 bp, Homo sapiens
gtacatcttgccatg

SEQ ID NO: 419176 - DNA, 15 bp, Homo sapiens
agtacatcttgccat

SEQ ID NO: 419177 - DNA, 15 bp, Homo sapiens
tagtacatcttgcca

SEQ ID NO: 419178 - DNA, 15 bp, Homo sapiens
ttagtacatcttgcc

SEQ ID NO: 419179 - DNA, 15 bp, Homo sapiens
tttagtacatcttgc

SEQ ID NO: 419180 - DNA, 15 bp, Homo sapiens
ttttagtacatcttg

SEQ ID NO: 419181 - DNA, 15 bp, Homo sapiens
attttagtacatctt

SEQ ID NO: 419182 - DNA, 15 bp, Homo sapiens
tattttagtacatct

SEQ ID NO: 419183 - DNA, 15 bp, Homo sapiens
atattttagtacatc

SEQ ID NO: 419184 - DNA, 15 bp, Homo sapiens
gatattttagtacat

SEQ ID NO: 419185 - DNA, 15 bp, Homo sapiens
agatattttagtaca

SEQ ID NO: 419186 - DNA, 15 bp, Homo sapiens
cagatattttagtac

SEQ ID NO: 419187 - DNA, 15 bp, Homo sapiens
ccagatattttagta

SEQ ID NO: 419188 - DNA, 15 bp, Homo sapiens
tccagatattttagt

SEQ ID NO: 419189 - DNA, 15 bp, Homo sapiens
ttccagatattttag

SEQ ID NO: 419190 - DNA, 15 bp, Homo sapiens
tttccagatatttta

SEQ ID NO: 419191 - DNA, 15 bp, Homo sapiens
ctttccagatatttt

SEQ ID NO: 419192 - DNA, 15 bp, Homo sapiens
gctttccagatattt

SEQ ID NO: 419193 - DNA, 15 bp, Homo sapiens
tgctttccagatatt

SEQ ID NO: 419194 - DNA, 15 bp, Homo sapiens
ttgctttccagatat

SEQ ID NO: 419195 - DNA, 15 bp, Homo sapiens
attgctttccagata

SEQ ID NO: 419196 - DNA, 15 bp, Homo sapiens
gattgctttccagat

SEQ ID NO: 419197 - DNA, 15 bp, Homo sapiens
ggattgctttccaga

SEQ ID NO: 419198 - DNA, 15 bp, Homo sapiens
tggattgctttccag

SEQ ID NO: 419199 - DNA, 15 bp, Homo sapiens
ctggattgctttcca

SEQ ID NO: 419200 - DNA, 15 bp, Homo sapiens
tctggattgctttcc

SEQ ID NO: 419201 - DNA, 15 bp, Homo sapiens
ctctggattgctttc

SEQ ID NO: 419202 - DNA, 15 bp, Homo sapiens
actctggattgcttt

SEQ ID NO: 419203 - DNA, 15 bp, Homo sapiens
cactctggattgctt

SEQ ID NO: 419204 - DNA, 15 bp, Homo sapiens
acactctggattgct

SEQ ID NO: 419205 - DNA, 15 bp, Homo sapiens
aacactctggattgc

SEQ ID NO: 419206 - DNA, 15 bp, Homo sapiens
caacactctggattg

SEQ ID NO: 419207 - DNA, 15 bp, Homo sapiens
tcaacactctggatt

SEQ ID NO: 419208 - DNA, 15 bp, Homo sapiens
ttcaacactctggat

SEQ ID NO: 419209 - DNA, 15 bp, Homo sapiens
gttcaacactctgga

SEQ ID NO: 419210 - DNA, 15 bp, Homo sapiens
ggttcaacactctgg

SEQ ID NO: 419211 - DNA, 15 bp, Homo sapiens
tggttcaacactctg

SEQ ID NO: 419212 - DNA, 15 bp, Homo sapiens
ctggttcaacactct

SEQ ID NO: 419213 - DNA, 15 bp, Homo sapiens
cctggttcaacactc

SEQ ID NO: 419214 - DNA, 15 bp, Homo sapiens
tcctggttcaacact

SEQ ID NO: 419215 - DNA, 15 bp, Homo sapiens
ttcctggttcaacac

SEQ ID NO: 419216 - DNA, 15 bp, Homo sapiens
gttcctggttcaaca

SEQ ID NO: 419217 - DNA, 15 bp, Homo sapiens
tgttcctggttcaac

SEQ ID NO: 419218 - DNA, 15 bp, Homo sapiens
atgttcctggttcaa

SEQ ID NO: 419219 - DNA, 15 bp, Homo sapiens
aatgttcctggttca

SEQ ID NO: 419220 - DNA, 15 bp, Homo sapiens
taatgttcctggttc

SEQ ID NO: 419221 - DNA, 15 bp, Homo sapiens
ctaatgttcctggtt

SEQ ID NO: 419222 - DNA, 15 bp, Homo sapiens
actaatgttcctggt

SEQ ID NO: 419223 - DNA, 15 bp, Homo sapiens
cactaatgttcctgg

SEQ ID NO: 419224 - DNA, 15 bp, Homo sapiens
ccactaatgttcctg

SEQ ID NO: 419225 - DNA, 15 bp, Homo sapiens
tccactaatgttcct

SEQ ID NO: 419226 - DNA, 15 bp, Homo sapiens
ttccactaatgttcc

SEQ ID NO: 419227 - DNA, 15 bp, Homo sapiens
gttccactaatgttc

SEQ ID NO: 419228 - DNA, 15 bp, Homo sapiens
agttccactaatgtt

SEQ ID NO: 419229 - DNA, 15 bp, Homo sapiens
gagttccactaatgt

SEQ ID NO: 419230 - DNA, 15 bp, Homo sapiens
agagttccactaatg

SEQ ID NO: 419231 - DNA, 15 bp, Homo sapiens
aagagttccactaat

SEQ ID NO: 419232 - DNA, 15 bp, Homo sapiens
caagagttccactaa

SEQ ID NO: 419233 - DNA, 15 bp, Homo sapiens
ccaagagttccacta

SEQ ID NO: 419234 - DNA, 15 bp, Homo sapiens
cccaagagttccact

SEQ ID NO: 419235 - DNA, 15 bp, Homo sapiens
tcccaagagttccac

SEQ ID NO: 419236 - DNA, 15 bp, Homo sapiens
ttcccaagagttcca

SEQ ID NO: 419237 - DNA, 15 bp, Homo sapiens
tttcccaagagttcc

SEQ ID NO: 419238 - DNA, 15 bp, Homo sapiens
gtttcccaagagttc

SEQ ID NO: 419239 - DNA, 15 bp, Homo sapiens
tgtttcccaagagtt

SEQ ID NO: 419240 - DNA, 15 bp, Homo sapiens
ttgtttcccaagagt

SEQ ID NO: 419241 - DNA, 15 bp, Homo sapiens
tttgtttcccaagag

SEQ ID NO: 419242 - DNA, 15 bp, Homo sapiens
atttgtttcccaaga

SEQ ID NO: 419243 - DNA, 15 bp, Homo sapiens
aatttgtttcccaag

SEQ ID NO: 419244 - DNA, 15 bp, Homo sapiens
gaatttgtttcccaa

SEQ ID NO: 419245 - DNA, 15 bp, Homo sapiens
agaatttgtttccca

SEQ ID NO: 419246 - DNA, 15 bp, Homo sapiens
tagaatttgtttccc

SEQ ID NO: 419247 - DNA, 15 bp, Homo sapiens
ctagaatttgtttcc

SEQ ID NO: 419248 - DNA, 15 bp, Homo sapiens
gctagaatttgtttc

SEQ ID NO: 419249 - DNA, 15 bp, Homo sapiens
agctagaatttgttt

SEQ ID NO: 419250 - DNA, 15 bp, Homo sapiens
gagctagaatttgtt

SEQ ID NO: 419251 - DNA, 15 bp, Homo sapiens
tgagctagaatttgt

SEQ ID NO: 419252 - DNA, 15 bp, Homo sapiens
ttgagctagaatttg

SEQ ID NO: 419253 - DNA, 15 bp, Homo sapiens
tttgagctagaattt

SEQ ID NO: 419254 - DNA, 15 bp, Homo sapiens
atttgagctagaatt

SEQ ID NO: 419255 - DNA, 15 bp, Homo sapiens
aatttgagctagaat

SEQ ID NO: 419256 - DNA, 15 bp, Homo sapiens
gaatttgagctagaa

SEQ ID NO: 419257 - DNA, 15 bp, Homo sapiens
agaatttgagctaga

SEQ ID NO: 419258 - DNA, 15 bp, Homo sapiens
tagaatttgagctag

SEQ ID NO: 419259 - DNA, 15 bp, Homo sapiens
ctagaatttgagcta

SEQ ID NO: 419260 - DNA, 15 bp, Homo sapiens
tctagaatttgagct

SEQ ID NO: 419261 - DNA, 15 bp, Homo sapiens
ttctagaatttgagc

SEQ ID NO: 419262 - DNA, 15 bp, Homo sapiens
tttctagaatttgag

SEQ ID NO: 419263 - DNA, 15 bp, Homo sapiens
gtttctagaatttga

SEQ ID NO: 419264 - DNA, 15 bp, Homo sapiens
tgtttctagaatttg

SEQ ID NO: 419265 - DNA, 15 bp, Homo sapiens
gtgtttctagaattt

SEQ ID NO: 419266 - DNA, 15 bp, Homo sapiens
agtgtttctagaatt

SEQ ID NO: 419267 - DNA, 15 bp, Homo sapiens
aagtgtttctagaat

SEQ ID NO: 419268 - DNA, 15 bp, Homo sapiens
aaagtgtttctagaa

SEQ ID NO: 419269 - DNA, 15 bp, Homo sapiens
aaaagtgtttctaga

SEQ ID NO: 419270 - DNA, 15 bp, Homo sapiens
gaaaagtgtttctag

SEQ ID NO: 419271 - DNA, 15 bp, Homo sapiens
tgaaaagtgtttcta

SEQ ID NO: 419272 - DNA, 15 bp, Homo sapiens
atgaaaagtgtttct

SEQ ID NO: 419273 - DNA, 15 bp, Homo sapiens
tatgaaaagtgtttc

SEQ ID NO: 419274 - DNA, 15 bp, Homo sapiens
ttatgaaaagtgttt

SEQ ID NO: 419275 - DNA, 15 bp, Homo sapiens
tttatgaaaagtgtt

SEQ ID NO: 419276 - DNA, 15 bp, Homo sapiens
ttttatgaaaagtgt

SEQ ID NO: 419277 - DNA, 15 bp, Homo sapiens
cttttatgaaaagtg

SEQ ID NO: 419278 - DNA, 15 bp, Homo sapiens
tcttttatgaaaagt

SEQ ID NO: 419279 - DNA, 15 bp, Homo sapiens
ttcttttatgaaaag

SEQ ID NO: 419280 - DNA, 15 bp, Homo sapiens
tttcttttatgaaaa

SEQ ID NO: 419281 - DNA, 15 bp, Homo sapiens
atttcttttatgaaa

SEQ ID NO: 419282 - DNA, 15 bp, Homo sapiens
catttcttttatgaa

SEQ ID NO: 419283 - DNA, 15 bp, Homo sapiens
acatttcttttatga

SEQ ID NO: 419284 - DNA, 15 bp, Homo sapiens
gacatttcttttatg

SEQ ID NO: 419285 - DNA, 15 bp, Homo sapiens
agacatttcttttat

SEQ ID NO: 419286 - DNA, 15 bp, Homo sapiens
tagacatttctttta

SEQ ID NO: 419287 - DNA, 15 bp, Homo sapiens
ttagacatttctttt

SEQ ID NO: 419288 - DNA, 15 bp, Homo sapiens
gttagacatttcttt

SEQ ID NO: 419289 - DNA, 15 bp, Homo sapiens
tgttagacatttctt

SEQ ID NO: 419290 - DNA, 15 bp, Homo sapiens
ttgttagacatttct

SEQ ID NO: 419291 - DNA, 15 bp, Homo sapiens
attgttagacatttc

SEQ ID NO: 419292 - DNA, 15 bp, Homo sapiens
tattgttagacattt

SEQ ID NO: 419293 - DNA, 15 bp, Homo sapiens
ttattgttagacatt

SEQ ID NO: 419294 - DNA, 15 bp, Homo sapiens
cttattgttagacat

SEQ ID NO: 419295 - DNA, 15 bp, Homo sapiens
tcttattgttagaca

SEQ ID NO: 419296 - DNA, 15 bp, Homo sapiens
ctcttattgttagac

SEQ ID NO: 419297 - DNA, 15 bp, Homo sapiens
cctcttattgttaga

SEQ ID NO: 419298 - DNA, 15 bp, Homo sapiens
ccctcttattgttag

SEQ ID NO: 419299 - DNA, 15 bp, Homo sapiens
accctcttattgtta

SEQ ID NO: 419300 - DNA, 15 bp, Homo sapiens
aaccctcttattgtt

SEQ ID NO: 419301 - DNA, 15 bp, Homo sapiens
aaaccctcttattgt

SEQ ID NO: 419302 - DNA, 15 bp, Homo sapiens
caaaccctcttattg

SEQ ID NO: 419303 - DNA, 15 bp, Homo sapiens
acaaaccctcttatt

SEQ ID NO: 419304 - DNA, 15 bp, Homo sapiens
gacaaaccctcttat

SEQ ID NO: 419305 - DNA, 15 bp, Homo sapiens
tgacaaaccctctta

SEQ ID NO: 419306 - DNA, 15 bp, Homo sapiens
atgacaaaccctctt

SEQ ID NO: 419307 - DNA, 15 bp, Homo sapiens
gatgacaaaccctct

SEQ ID NO: 419308 - DNA, 15 bp, Homo sapiens
tgatgacaaaccctc

SEQ ID NO: 419309 - DNA, 15 bp, Homo sapiens
ctgatgacaaaccct

SEQ ID NO: 419310 - DNA, 15 bp, Homo sapiens
tctgatgacaaaccc

SEQ ID NO: 419311 - DNA, 15 bp, Homo sapiens
ctctgatgacaaacc

SEQ ID NO: 419312 - DNA, 15 bp, Homo sapiens
tctctgatgacaaac

SEQ ID NO: 419313 - DNA, 15 bp, Homo sapiens
ttctctgatgacaaa

SEQ ID NO: 419314 - DNA, 15 bp, Homo sapiens
tttctctgatgacaa

SEQ ID NO: 419315 - DNA, 15 bp, Homo sapiens
ctttctctgatgaca

SEQ ID NO: 419316 - DNA, 15 bp, Homo sapiens
actttctctgatgac

SEQ ID NO: 419317 - DNA, 15 bp, Homo sapiens
cactttctctgatga

SEQ ID NO: 419318 - DNA, 15 bp, Homo sapiens
ccactttctctgatg

SEQ ID NO: 419319 - DNA, 15 bp, Homo sapiens
cccactttctctgat

SEQ ID NO: 419320 - DNA, 15 bp, Homo sapiens
acccactttctctga

SEQ ID NO: 419321 - DNA, 15 bp, Homo sapiens
aacccactttctctg

SEQ ID NO: 419322 - DNA, 15 bp, Homo sapiens
gaacccactttctct

SEQ ID NO: 419323 - DNA, 15 bp, Homo sapiens
ggaacccactttctc

SEQ ID NO: 419324 - DNA, 15 bp, Homo sapiens
gggaacccactttct

SEQ ID NO: 419325 - DNA, 15 bp, Homo sapiens
ggggaacccactttc

SEQ ID NO: 419326 - DNA, 15 bp, Homo sapiens
aggggaacccacttt

SEQ ID NO: 419327 - DNA, 15 bp, Homo sapiens
gaggggaacccactt

SEQ ID NO: 419328 - DNA, 15 bp, Homo sapiens
ggaggggaacccact

SEQ ID NO: 419329 - DNA, 15 bp, Homo sapiens
tggaggggaacccac

SEQ ID NO: 419330 - DNA, 15 bp, Homo sapiens
gtggaggggaaccca

SEQ ID NO: 419331 - DNA, 15 bp, Homo sapiens
agtggaggggaaccc

SEQ ID NO: 419332 - DNA, 15 bp, Homo sapiens
tagtggaggggaacc

SEQ ID NO: 419333 - DNA, 15 bp, Homo sapiens
ttagtggaggggaac

SEQ ID NO: 419334 - DNA, 15 bp, Homo sapiens
tttagtggaggggaa

SEQ ID NO: 419335 - DNA, 15 bp, Homo sapiens
ctttagtggagggga

SEQ ID NO: 419336 - DNA, 15 bp, Homo sapiens
cctttagtggagggg

SEQ ID NO: 419337 - DNA, 15 bp, Homo sapiens
acctttagtggaggg

SEQ ID NO: 419338 - DNA, 15 bp, Homo sapiens
cacctttagtggagg

SEQ ID NO: 419339 - DNA, 15 bp, Homo sapiens
acacctttagtggag

SEQ ID NO: 419340 - DNA, 15 bp, Homo sapiens
aacacctttagtgga

SEQ ID NO: 419341 - DNA, 15 bp, Homo sapiens
aaacacctttagtgg

SEQ ID NO: 419342 - DNA, 15 bp, Homo sapiens
taaacacctttagtg

SEQ ID NO: 419343 - DNA, 15 bp, Homo sapiens
ttaaacacctttagt

SEQ ID NO: 419344 - DNA, 15 bp, Homo sapiens
gttaaacacctttag

SEQ ID NO: 419345 - DNA, 15 bp, Homo sapiens
ggttaaacaccttta

SEQ ID NO: 419346 - DNA, 15 bp, Homo sapiens
tggttaaacaccttt

SEQ ID NO: 419347 - DNA, 15 bp, Homo sapiens
ttggttaaacacctt

SEQ ID NO: 419348 - DNA, 15 bp, Homo sapiens
attggttaaacacct

SEQ ID NO: 419349 - DNA, 15 bp, Homo sapiens
tattggttaaacacc

SEQ ID NO: 419350 - DNA, 15 bp, Homo sapiens
ctattggttaaacac

SEQ ID NO: 419351 - DNA, 15 bp, Homo sapiens
gctattggttaaaca

SEQ ID NO: 419352 - DNA, 15 bp, Homo sapiens
agctattggttaaac

SEQ ID NO: 419353 - DNA, 15 bp, Homo sapiens
cagctattggttaaa

SEQ ID NO: 419354 - DNA, 15 bp, Homo sapiens
ccagctattggttaa

SEQ ID NO: 419355 - DNA, 15 bp, Homo sapiens
tccagctattggtta

SEQ ID NO: 419356 - DNA, 15 bp, Homo sapiens
atccagctattggtt

SEQ ID NO: 419357 - DNA, 15 bp, Homo sapiens
tatccagctattggt

SEQ ID NO: 419358 - DNA, 15 bp, Homo sapiens
ttatccagctattgg

SEQ ID NO: 419359 - DNA, 15 bp, Homo sapiens
gttatccagctattg

SEQ ID NO: 419360 - DNA, 15 bp, Homo sapiens
agttatccagctatt

SEQ ID NO: 419361 - DNA, 15 bp, Homo sapiens
gagttatccagctat

SEQ ID NO: 419362 - DNA, 15 bp, Homo sapiens
agagttatccagcta

SEQ ID NO: 419363 - DNA, 15 bp, Homo sapiens
aagagttatccagct

SEQ ID NO: 419364 - DNA, 15 bp, Homo sapiens
gaagagttatccagc

SEQ ID NO: 419365 - DNA, 15 bp, Homo sapiens
tgaagagttatccag

SEQ ID NO: 419366 - DNA, 15 bp, Homo sapiens
atgaagagttatcca

SEQ ID NO: 419367 - DNA, 15 bp, Homo sapiens
aatgaagagttatcc

SEQ ID NO: 419368 - DNA, 15 bp, Homo sapiens
aaatgaagagttatc

SEQ ID NO: 419369 - DNA, 15 bp, Homo sapiens
taaatgaagagttat

SEQ ID NO: 419370 - DNA, 15 bp, Homo sapiens
gtaaatgaagagtta

SEQ ID NO: 419371 - DNA, 15 bp, Homo sapiens
tgtaaatgaagagtt

SEQ ID NO: 419372 - DNA, 15 bp, Homo sapiens
ttgtaaatgaagagt

SEQ ID NO: 419373 - DNA, 15 bp, Homo sapiens
attgtaaatgaagag

SEQ ID NO: 419374 - DNA, 15 bp, Homo sapiens
tattgtaaatgaaga

SEQ ID NO: 419375 - DNA, 15 bp, Homo sapiens
atattgtaaatgaag

SEQ ID NO: 419376 - DNA, 15 bp, Homo sapiens
aatattgtaaatgaa

SEQ ID NO: 419377 - DNA, 15 bp, Homo sapiens
aaatattgtaaatga

SEQ ID NO: 419378 - DNA, 15 bp, Homo sapiens
gaaatattgtaaatg

SEQ ID NO: 419379 - DNA, 15 bp, Homo sapiens
tgaaatattgtaaat

SEQ ID NO: 419380 - DNA, 15 bp, Homo sapiens
ttgaaatattgtaaa

SEQ ID NO: 419381 - DNA, 15 bp, Homo sapiens
tttgaaatattgtaa

SEQ ID NO: 419382 - DNA, 15 bp, Homo sapiens
ctttgaaatattgta

SEQ ID NO: 419383 - DNA, 15 bp, Homo sapiens
tctttgaaatattgt

SEQ ID NO: 419384 - DNA, 15 bp, Homo sapiens
ttctttgaaatattg

SEQ ID NO: 419385 - DNA, 15 bp, Homo sapiens
tttctttgaaatatt

SEQ ID NO: 419386 - DNA, 15 bp, Homo sapiens
atttctttgaaatat

SEQ ID NO: 419387 - DNA, 15 bp, Homo sapiens
aatttctttgaaata

SEQ ID NO: 419388 - DNA, 15 bp, Homo sapiens
caatttctttgaaat

SEQ ID NO: 419389 - DNA, 15 bp, Homo sapiens
tcaatttctttgaaa

SEQ ID NO: 419390 - DNA, 15 bp, Homo sapiens
atcaatttctttgaa

SEQ ID NO: 419391 - DNA, 15 bp, Homo sapiens
gatcaatttctttga

SEQ ID NO: 419392 - DNA, 15 bp, Homo sapiens
tgatcaatttctttg

SEQ ID NO: 419393 - DNA, 15 bp, Homo sapiens
ttgatcaatttcttt

SEQ ID NO: 419394 - DNA, 15 bp, Homo sapiens
tttgatcaatttctt

SEQ ID NO: 419395 - DNA, 15 bp, Homo sapiens
ttttgatcaatttct

SEQ ID NO: 419396 - DNA, 15 bp, Homo sapiens
tttttgatcaatttc

SEQ ID NO: 419397 - DNA, 15 bp, Homo sapiens
ttttttgatcaattt

SEQ ID NO: 419398 - DNA, 15 bp, Homo sapiens
tttttttgatcaatt

SEQ ID NO: 419399 - DNA, 15 bp, Homo sapiens
atttttttgatcaat

SEQ ID NO: 419400 - DNA, 15 bp, Homo sapiens
catttttttgatcaa

SEQ ID NO: 419401 - DNA, 15 bp, Homo sapiens
gcatttttttgatca

SEQ ID NO: 419402 - DNA, 15 bp, Homo sapiens
tgcatttttttgatc

SEQ ID NO: 419403 - DNA, 15 bp, Homo sapiens
ctgcatttttttgat

SEQ ID NO: 419404 - DNA, 15 bp, Homo sapiens
cctgcatttttttga

SEQ ID NO: 419405 - DNA, 15 bp, Homo sapiens
ccctgcatttttttg

SEQ ID NO: 419406 - DNA, 15 bp, Homo sapiens
cccctgcattttttt

SEQ ID NO: 419407 - DNA, 15 bp, Homo sapiens
tcccctgcatttttt

SEQ ID NO: 419408 - DNA, 15 bp, Homo sapiens
ctcccctgcattttt

SEQ ID NO: 419409 - DNA, 15 bp, Homo sapiens
tctcccctgcatttt

SEQ ID NO: 419410 - DNA, 15 bp, Homo sapiens
ttctcccctgcattt

SEQ ID NO: 419411 - DNA, 15 bp, Homo sapiens
tttctcccctgcatt

SEQ ID NO: 419412 - DNA, 15 bp, Homo sapiens
ttttctcccctgcat

SEQ ID NO: 419413 - DNA, 15 bp, Homo sapiens
tttttctcccctgca

SEQ ID NO: 419414 - DNA, 15 bp, Homo sapiens
atttttctcccctgc

SEQ ID NO: 419415 - DNA, 15 bp, Homo sapiens
catttttctcccctg

SEQ ID NO: 419416 - DNA, 15 bp, Homo sapiens
tcatttttctcccct

SEQ ID NO: 419417 - DNA, 15 bp, Homo sapiens
gtcatttttctcccc

SEQ ID NO: 419418 - DNA, 15 bp, Homo sapiens
agtcatttttctccc

SEQ ID NO: 419419 - DNA, 15 bp, Homo sapiens
agaagtcatttttct

SEQ ID NO: 419420 - DNA, 15 bp, Homo sapiens
tagaagtcatttttc

SEQ ID NO: 419421 - DNA, 15 bp, Homo sapiens
ttagaagtcattttt

SEQ ID NO: 419422 - DNA, 15 bp, Homo sapiens
cttagaagtcatttt

SEQ ID NO: 419423 - DNA, 15 bp, Homo sapiens
ccttagaagtcattt

SEQ ID NO: 419424 - DNA, 15 bp, Homo sapiens
cccttagaagtcatt

SEQ ID NO: 419425 - DNA, 15 bp, Homo sapiens
tcccttagaagtcat

SEQ ID NO: 419426 - DNA, 15 bp, Homo sapiens
gtcccttagaagtca

SEQ ID NO: 419427 - DNA, 15 bp, Homo sapiens
agtcccttagaagtc

SEQ ID NO: 419428 - DNA, 15 bp, Homo sapiens
aagtcccttagaagt

SEQ ID NO: 419429 - DNA, 15 bp, Homo sapiens
taagtcccttagaag

SEQ ID NO: 419430 - DNA, 15 bp, Homo sapiens
ctaagtcccttagaa

SEQ ID NO: 419431 - DNA, 15 bp, Homo sapiens
cctaagtcccttaga

SEQ ID NO: 419432 - DNA, 15 bp, Homo sapiens
ccctaagtcccttag

SEQ ID NO: 419433 - DNA, 15 bp, Homo sapiens
cccctaagtccctta

SEQ ID NO: 419434 - DNA, 15 bp, Homo sapiens
acccctaagtccctt

SEQ ID NO: 419435 - DNA, 15 bp, Homo sapiens
gacccctaagtccct

SEQ ID NO: 419436 - DNA, 15 bp, Homo sapiens
agacccctaagtccc

SEQ ID NO: 419437 - DNA, 15 bp, Homo sapiens
gagacccctaagtcc

SEQ ID NO: 419438 - DNA, 15 bp, Homo sapiens
tgagacccctaagtc

SEQ ID NO: 419439 - DNA, 15 bp, Homo sapiens
ctgagacccctaagt

SEQ ID NO: 419440 - DNA, 15 bp, Homo sapiens
tctgagacccctaag

SEQ ID NO: 419441 - DNA, 15 bp, Homo sapiens
atctgagacccctaa

SEQ ID NO: 419442 - DNA, 15 bp, Homo sapiens
catctgagaccccta

SEQ ID NO: 419443 - DNA, 15 bp, Homo sapiens
tcatctgagacccct

SEQ ID NO: 419444 - DNA, 15 bp, Homo sapiens
gtcatctgagacccc

SEQ ID NO: 419445 - DNA, 15 bp, Homo sapiens
tgtcatctgagaccc

SEQ ID NO: 419446 - DNA, 15 bp, Homo sapiens
ttgtcatctgagacc

SEQ ID NO: 419447 - DNA, 15 bp, Homo sapiens
tttgtcatctgagac

SEQ ID NO: 419448 - DNA, 15 bp, Homo sapiens
ctttgtcatctgaga

SEQ ID NO: 419449 - DNA, 15 bp, Homo sapiens
cctttgtcatctgag

SEQ ID NO: 419450 - DNA, 15 bp, Homo sapiens
ccctttgtcatctga

SEQ ID NO: 419451 - DNA, 15 bp, Homo sapiens
gccctttgtcatctg

SEQ ID NO: 419452 - DNA, 15 bp, Homo sapiens
agccctttgtcatct

SEQ ID NO: 419453 - DNA, 15 bp, Homo sapiens
aagccctttgtcatc

SEQ ID NO: 419454 - DNA, 15 bp, Homo sapiens
gaagccctttgtcat

SEQ ID NO: 419455 - DNA, 15 bp, Homo sapiens
tgaagccctttgtca

SEQ ID NO: 419456 - DNA, 15 bp, Homo sapiens
atgaagccctttgtc

SEQ ID NO: 419457 - DNA, 15 bp, Homo sapiens
tatgaagccctttgt

SEQ ID NO: 419458 - DNA, 15 bp, Homo sapiens
atatgaagccctttg

SEQ ID NO: 419459 - DNA, 15 bp, Homo sapiens
catatgaagcccttt

SEQ ID NO: 419460 - DNA, 15 bp, Homo sapiens
acatatgaagccctt

SEQ ID NO: 419461 - DNA, 15 bp, Homo sapiens
gacatatgaagccct

SEQ ID NO: 419462 - DNA, 15 bp, Homo sapiens
tgacatatgaagccc

SEQ ID NO: 419463 - DNA, 15 bp, Homo sapiens
gtgacatatgaagcc

SEQ ID NO: 419464 - DNA, 15 bp, Homo sapiens
ggtgacatatgaagc

SEQ ID NO: 419465 - DNA, 15 bp, Homo sapiens
aggtgacatatgaag

SEQ ID NO: 419466 - DNA, 15 bp, Homo sapiens
taggtgacatatgaa

SEQ ID NO: 419467 - DNA, 15 bp, Homo sapiens
ttaggtgacatatga

SEQ ID NO: 419468 - DNA, 15 bp, Homo sapiens
gttaggtgacatatg

SEQ ID NO: 419469 - DNA, 15 bp, Homo sapiens
tgttaggtgacatat

SEQ ID NO: 419470 - DNA, 15 bp, Homo sapiens
ctgttaggtgacata

SEQ ID NO: 419471 - DNA, 15 bp, Homo sapiens
actgttaggtgacat

SEQ ID NO: 419472 - DNA, 15 bp, Homo sapiens
tactgttaggtgaca

SEQ ID NO: 419473 - DNA, 15 bp, Homo sapiens
ttactgttaggtgac

SEQ ID NO: 419474 - DNA, 15 bp, Homo sapiens
tttactgttaggtga

SEQ ID NO: 419475 - DNA, 15 bp, Homo sapiens
atttactgttaggtg

SEQ ID NO: 419476 - DNA, 15 bp, Homo sapiens
tatttactgttaggt

SEQ ID NO: 419477 - DNA, 15 bp, Homo sapiens
ctatttactgttagg

SEQ ID NO: 419478 - DNA, 15 bp, Homo sapiens
cctatttactgttag

SEQ ID NO: 419479 - DNA, 15 bp, Homo sapiens
acctatttactgtta

SEQ ID NO: 419480 - DNA, 15 bp, Homo sapiens
cacctatttactgtt

SEQ ID NO: 419481 - DNA, 15 bp, Homo sapiens
gcacctatttactgt

SEQ ID NO: 419482 - DNA, 15 bp, Homo sapiens
agcacctatttactg

SEQ ID NO: 419483 - DNA, 15 bp, Homo sapiens
aagcacctatttact

SEQ ID NO: 419484 - DNA, 15 bp, Homo sapiens
taagcacctatttac

SEQ ID NO: 419485 - DNA, 15 bp, Homo sapiens
ataagcacctattta

SEQ ID NO: 419486 - DNA, 15 bp, Homo sapiens
tataagcacctattt

SEQ ID NO: 419487 - DNA, 15 bp, Homo sapiens
ctataagcacctatt

SEQ ID NO: 419488 - DNA, 15 bp, Homo sapiens
actataagcacctat

SEQ ID NO: 419489 - DNA, 15 bp, Homo sapiens
tactataagcaccta

SEQ ID NO: 419490 - DNA, 15 bp, Homo sapiens
ttactataagcacct

SEQ ID NO: 419491 - DNA, 15 bp, Homo sapiens
attactataagcacc

SEQ ID NO: 419492 - DNA, 15 bp, Homo sapiens
aattactataagcac

SEQ ID NO: 419493 - DNA, 15 bp, Homo sapiens
taattactataagca

SEQ ID NO: 419494 - DNA, 15 bp, Homo sapiens
ataattactataagc

SEQ ID NO: 419495 - DNA, 15 bp, Homo sapiens
aataattactataag

SEQ ID NO: 419496 - DNA, 15 bp, Homo sapiens
aaataattactataa

SEQ ID NO: 419497 - DNA, 15 bp, Homo sapiens
aaaataattactata

SEQ ID NO: 419498 - DNA, 15 bp, Homo sapiens
aaaaataattactat

SEQ ID NO: 419499 - DNA, 15 bp, Homo sapiens
taaaaataattacta

SEQ ID NO: 419500 - DNA, 15 bp, Homo sapiens
ctaaaaataattact

SEQ ID NO: 419501 - DNA, 15 bp, Homo sapiens
actaaaaataattac

SEQ ID NO: 419502 - DNA, 15 bp, Homo sapiens
tactaaaaataatta

SEQ ID NO: 419503 - DNA, 15 bp, Homo sapiens
ttactaaaaataatt

SEQ ID NO: 419504 - DNA, 15 bp, Homo sapiens
tttactaaaaataat

SEQ ID NO: 419505 - DNA, 15 bp, Homo sapiens
atttactaaaaataa

SEQ ID NO: 419506 - DNA, 15 bp, Homo sapiens
aatttactaaaaata

SEQ ID NO: 419507 - DNA, 15 bp, Homo sapiens
gaatttactaaaaat

SEQ ID NO: 419508 - DNA, 15 bp, Homo sapiens
ggaatttactaaaaa

SEQ ID NO: 419509 - DNA, 15 bp, Homo sapiens
tggaatttactaaaa

SEQ ID NO: 419510 - DNA, 15 bp, Homo sapiens
atggaatttactaaa

SEQ ID NO: 419511 - DNA, 15 bp, Homo sapiens
tatggaatttactaa

SEQ ID NO: 419512 - DNA, 15 bp, Homo sapiens
ttatggaatttacta

SEQ ID NO: 419513 - DNA, 15 bp, Homo sapiens
tttatggaatttact

SEQ ID NO: 419514 - DNA, 15 bp, Homo sapiens
ctttatggaatttac

SEQ ID NO: 419515 - DNA, 15 bp, Homo sapiens
actttatggaattta

SEQ ID NO: 419516 - DNA, 15 bp, Homo sapiens
tactttatggaattt

SEQ ID NO: 419517 - DNA, 15 bp, Homo sapiens
atactttatggaatt

SEQ ID NO: 419518 - DNA, 15 bp, Homo sapiens
tatactttatggaat

SEQ ID NO: 419519 - DNA, 15 bp, Homo sapiens
ttatactttatggaa

SEQ ID NO: 419520 - DNA, 15 bp, Homo sapiens
tttatactttatgga

SEQ ID NO: 419521 - DNA, 15 bp, Homo sapiens
atttatactttatgg

SEQ ID NO: 419522 - DNA, 15 bp, Homo sapiens
tatttatactttatg

SEQ ID NO: 419523 - DNA, 15 bp, Homo sapiens
ctatttatactttat

SEQ ID NO: 419524 - DNA, 15 bp, Homo sapiens
actatttatacttta

SEQ ID NO: 419525 - DNA, 15 bp, Homo sapiens
gactatttatacttt

SEQ ID NO: 419526 - DNA, 15 bp, Homo sapiens
tgactatttatactt

SEQ ID NO: 419527 - DNA, 15 bp, Homo sapiens
atgactatttatact

SEQ ID NO: 419528 - DNA, 15 bp, Homo sapiens
catgactatttatac

SEQ ID NO: 419529 - DNA, 15 bp, Homo sapiens
ccatgactatttata

SEQ ID NO: 419530 - DNA, 15 bp, Homo sapiens
gccatgactatttat

SEQ ID NO: 419531 - DNA, 15 bp, Homo sapiens
tgccatgactattta

SEQ ID NO: 419532 - DNA, 15 bp, Homo sapiens
atgccatgactattt

SEQ ID NO: 419533 - DNA, 15 bp, Homo sapiens
catgccatgactatt

SEQ ID NO: 419534 - DNA, 15 bp, Homo sapiens
tcatgccatgactat

SEQ ID NO: 419535 - DNA, 15 bp, Homo sapiens
ctcatgccatgacta

SEQ ID NO: 419536 - DNA, 15 bp, Homo sapiens
gctcatgccatgact

SEQ ID NO: 419537 - DNA, 15 bp, Homo sapiens
agctcatgccatgac

SEQ ID NO: 419538 - DNA, 15 bp, Homo sapiens
aagctcatgccatga

SEQ ID NO: 419539 - DNA, 15 bp, Homo sapiens
taagctcatgccatg

SEQ ID NO: 419540 - DNA, 15 bp, Homo sapiens
ctaagctcatgccat

SEQ ID NO: 419541 - DNA, 15 bp, Homo sapiens
cctaagctcatgcca

SEQ ID NO: 419542 - DNA, 15 bp, Homo sapiens
acctaagctcatgcc

SEQ ID NO: 419543 - DNA, 15 bp, Homo sapiens
aacctaagctcatgc

SEQ ID NO: 419544 - DNA, 15 bp, Homo sapiens
caacctaagctcatg

SEQ ID NO: 419545 - DNA, 15 bp, Homo sapiens
tcaacctaagctcat

SEQ ID NO: 419546 - DNA, 15 bp, Homo sapiens
atcaacctaagctca

SEQ ID NO: 419547 - DNA, 15 bp, Homo sapiens
aatcaacctaagctc

SEQ ID NO: 419548 - DNA, 15 bp, Homo sapiens
aaatcaacctaagct

SEQ ID NO: 419549 - DNA, 15 bp, Homo sapiens
caaatcaacctaagc

SEQ ID NO: 419550 - DNA, 15 bp, Homo sapiens
acaaatcaacctaag

SEQ ID NO: 419551 - DNA, 15 bp, Homo sapiens
gacaaatcaacctaa

SEQ ID NO: 419552 - DNA, 15 bp, Homo sapiens
tgacaaatcaaccta

SEQ ID NO: 419553 - DNA, 15 bp, Homo sapiens
atgacaaatcaacct

SEQ ID NO: 419554 - DNA, 15 bp, Homo sapiens
gatgacaaatcaacc

SEQ ID NO: 419555 - DNA, 15 bp, Homo sapiens
agatgacaaatcaac

SEQ ID NO: 419556 - DNA, 15 bp, Homo sapiens
tagatgacaaatcaa

SEQ ID NO: 419557 - DNA, 15 bp, Homo sapiens
ctagatgacaaatca

SEQ ID NO: 419558 - DNA, 15 bp, Homo sapiens
actagatgacaaatc

SEQ ID NO: 419559 - DNA, 15 bp, Homo sapiens
aactagatgacaaat

SEQ ID NO: 419560 - DNA, 15 bp, Homo sapiens
aaactagatgacaaa

SEQ ID NO: 419561 - DNA, 15 bp, Homo sapiens
gaaactagatgacaa

SEQ ID NO: 419562 - DNA, 15 bp, Homo sapiens
ggaaactagatgaca

SEQ ID NO: 419563 - DNA, 15 bp, Homo sapiens
gggaaactagatgac

SEQ ID NO: 419564 - DNA, 15 bp, Homo sapiens
agggaaactagatga

SEQ ID NO: 419565 - DNA, 15 bp, Homo sapiens
aagggaaactagatg

SEQ ID NO: 419566 - DNA, 15 bp, Homo sapiens
taagggaaactagat

SEQ ID NO: 419567 - DNA, 15 bp, Homo sapiens
ttaagggaaactaga

SEQ ID NO: 419568 - DNA, 15 bp, Homo sapiens
attaagggaaactag

SEQ ID NO: 419569 - DNA, 15 bp, Homo sapiens
tattaagggaaacta

SEQ ID NO: 419570 - DNA, 15 bp, Homo sapiens
ttattaagggaaact

SEQ ID NO: 419571 - DNA, 15 bp, Homo sapiens
gttattaagggaaac

SEQ ID NO: 419572 - DNA, 15 bp, Homo sapiens
ggttattaagggaaa

SEQ ID NO: 419573 - DNA, 15 bp, Homo sapiens
gggttattaagggaa

SEQ ID NO: 419574 - DNA, 15 bp, Homo sapiens
agggttattaaggga

SEQ ID NO: 419575 - DNA, 15 bp, Homo sapiens
cagggttattaaggg

SEQ ID NO: 419576 - DNA, 15 bp, Homo sapiens
acagggttattaagg

SEQ ID NO: 419577 - DNA, 15 bp, Homo sapiens
aacagggttattaag

SEQ ID NO: 419578 - DNA, 15 bp, Homo sapiens
aaacagggttattaa

SEQ ID NO: 419579 - DNA, 15 bp, Homo sapiens
taaacagggttatta

SEQ ID NO: 419580 - DNA, 15 bp, Homo sapiens
gtaaacagggttatt

SEQ ID NO: 419581 - DNA, 15 bp, Homo sapiens
ggtaaacagggttat

SEQ ID NO: 419582 - DNA, 15 bp, Homo sapiens
gggtaaacagggtta

SEQ ID NO: 419583 - DNA, 15 bp, Homo sapiens
tgggtaaacagggtt

SEQ ID NO: 419584 - DNA, 15 bp, Homo sapiens
ctgggtaaacagggt

SEQ ID NO: 419585 - DNA, 15 bp, Homo sapiens
actgggtaaacaggg

SEQ ID NO: 419586 - DNA, 15 bp, Homo sapiens
cactgggtaaacagg

SEQ ID NO: 419587 - DNA, 15 bp, Homo sapiens
tcactgggtaaacag

SEQ ID NO: 419588 - DNA, 15 bp, Homo sapiens
atcactgggtaaaca

SEQ ID NO: 419589 - DNA, 15 bp, Homo sapiens
catcactgggtaaac

SEQ ID NO: 419590 - DNA, 15 bp, Homo sapiens
tcatcactgggtaaa

SEQ ID NO: 419591 - DNA, 15 bp, Homo sapiens
ctcatcactgggtaa

SEQ ID NO: 419592 - DNA, 15 bp, Homo sapiens
actcatcactgggta

SEQ ID NO: 419593 - DNA, 15 bp, Homo sapiens
tactcatcactgggt

SEQ ID NO: 419594 - DNA, 15 bp, Homo sapiens
ttactcatcactggg

SEQ ID NO: 419595 - DNA, 15 bp, Homo sapiens
tttactcatcactgg

SEQ ID NO: 419596 - DNA, 15 bp, Homo sapiens
ttttactcatcactg

SEQ ID NO: 419597 - DNA, 15 bp, Homo sapiens
attttactcatcact

SEQ ID NO: 419598 - DNA, 15 bp, Homo sapiens
tattttactcatcac

SEQ ID NO: 419599 - DNA, 15 bp, Homo sapiens
gtattttactcatca

SEQ ID NO: 419600 - DNA, 15 bp, Homo sapiens
tgtattttactcatc

SEQ ID NO: 419601 - DNA, 15 bp, Homo sapiens
ctgtattttactcat

SEQ ID NO: 419602 - DNA, 15 bp, Homo sapiens
tctgtattttactca

SEQ ID NO: 419603 - DNA, 15 bp, Homo sapiens
atctgtattttactc

SEQ ID NO: 419604 - DNA, 15 bp, Homo sapiens
gatctgtattttact

SEQ ID NO: 419605 - DNA, 15 bp, Homo sapiens
agatctgtattttac

SEQ ID NO: 419606 - DNA, 15 bp, Homo sapiens
tagatctgtatttta

SEQ ID NO: 419607 - DNA, 15 bp, Homo sapiens
ctagatctgtatttt

SEQ ID NO: 419608 - DNA, 15 bp, Homo sapiens
cctagatctgtattt

SEQ ID NO: 419609 - DNA, 15 bp, Homo sapiens
ccctagatctgtatt

SEQ ID NO: 419610 - DNA, 15 bp, Homo sapiens
tccctagatctgtat

SEQ ID NO: 419611 - DNA, 15 bp, Homo sapiens
atccctagatctgta

SEQ ID NO: 419612 - DNA, 15 bp, Homo sapiens
catccctagatctgt

SEQ ID NO: 419613 - DNA, 15 bp, Homo sapiens
acatccctagatctg

SEQ ID NO: 419614 - DNA, 15 bp, Homo sapiens
cacatccctagatct

SEQ ID NO: 419615 - DNA, 15 bp, Homo sapiens
acacatccctagatc

SEQ ID NO: 419616 - DNA, 15 bp, Homo sapiens
gacacatccctagat

SEQ ID NO: 419617 - DNA, 15 bp, Homo sapiens
tgacacatccctaga

SEQ ID NO: 419618 - DNA, 15 bp, Homo sapiens
gtgacacatccctag

SEQ ID NO: 419619 - DNA, 15 bp, Homo sapiens
tgtgacacatcccta

SEQ ID NO: 419620 - DNA, 15 bp, Homo sapiens
atgtgacacatccct

SEQ ID NO: 419621 - DNA, 15 bp, Homo sapiens
gatgtgacacatccc

SEQ ID NO: 419622 - DNA, 15 bp, Homo sapiens
tgatgtgacacatcc

SEQ ID NO: 419623 - DNA, 15 bp, Homo sapiens
atgatgtgacacatc

SEQ ID NO: 419624 - DNA, 15 bp, Homo sapiens
gatgatgtgacacat

SEQ ID NO: 419625 - DNA, 15 bp, Homo sapiens
agatgatgtgacaca

SEQ ID NO: 419626 - DNA, 15 bp, Homo sapiens
cagatgatgtgacac

SEQ ID NO: 419627 - DNA, 15 bp, Homo sapiens
tcagatgatgtgaca

SEQ ID NO: 419628 - DNA, 15 bp, Homo sapiens
ttcagatgatgtgac

SEQ ID NO: 419629 - DNA, 15 bp, Homo sapiens
tttcagatgatgtga

SEQ ID NO: 419630 - DNA, 15 bp, Homo sapiens
atttcagatgatgtg

SEQ ID NO: 419631 - DNA, 15 bp, Homo sapiens
aatttcagatgatgt

SEQ ID NO: 419632 - DNA, 15 bp, Homo sapiens
taatttcagatgatg

SEQ ID NO: 419633 - DNA, 15 bp, Homo sapiens
ataatttcagatgat

SEQ ID NO: 419634 - DNA, 15 bp, Homo sapiens
aataatttcagatga

SEQ ID NO: 419635 - DNA, 15 bp, Homo sapiens
aaataatttcagatg

SEQ ID NO: 419636 - DNA, 15 bp, Homo sapiens
gaaataatttcagat

SEQ ID NO: 419637 - DNA, 15 bp, Homo sapiens
ggaaataatttcaga

SEQ ID NO: 419638 - DNA, 15 bp, Homo sapiens
gggaaataatttcag

SEQ ID NO: 419639 - DNA, 15 bp, Homo sapiens
ggggaaataatttca

SEQ ID NO: 419640 - DNA, 15 bp, Homo sapiens
tggggaaataatttc

SEQ ID NO: 419641 - DNA, 15 bp, Homo sapiens
ctggggaaataattt

SEQ ID NO: 419642 - DNA, 15 bp, Homo sapiens
gctggggaaataatt

SEQ ID NO: 419643 - DNA, 15 bp, Homo sapiens
agctggggaaataat

SEQ ID NO: 419644 - DNA, 15 bp, Homo sapiens
gagctggggaaataa

SEQ ID NO: 419645 - DNA, 15 bp, Homo sapiens
ggagctggggaaata

SEQ ID NO: 419646 - DNA, 15 bp, Homo sapiens
tggagctggggaaat

SEQ ID NO: 419647 - DNA, 15 bp, Homo sapiens
atggagctggggaaa

SEQ ID NO: 419648 - DNA, 15 bp, Homo sapiens
catggagctggggaa

SEQ ID NO: 419649 - DNA, 15 bp, Homo sapiens
tcatggagctgggga

SEQ ID NO: 419650 - DNA, 15 bp, Homo sapiens
atcatggagctgggg

SEQ ID NO: 419651 - DNA, 15 bp, Homo sapiens
aatcatggagctggg

SEQ ID NO: 419652 - DNA, 15 bp, Homo sapiens
gaatcatggagctgg

SEQ ID NO: 419653 - DNA, 15 bp, Homo sapiens
tgaatcatggagctg

SEQ ID NO: 419654 - DNA, 15 bp, Homo sapiens
atgaatcatggagct

SEQ ID NO: 419655 - DNA, 15 bp, Homo sapiens
gatgaatcatggagc

SEQ ID NO: 419656 - DNA, 15 bp, Homo sapiens
cgatgaatcatggag

SEQ ID NO: 419657 - DNA, 15 bp, Homo sapiens
acgatgaatcatgga

SEQ ID NO: 419658 - DNA, 15 bp, Homo sapiens
cacgatgaatcatgg

SEQ ID NO: 419659 - DNA, 15 bp, Homo sapiens
ccacgatgaatcatg

SEQ ID NO: 419660 - DNA, 15 bp, Homo sapiens
tccacgatgaatcat

SEQ ID NO: 419661 - DNA, 15 bp, Homo sapiens
gtccacgatgaatca

SEQ ID NO: 419662 - DNA, 15 bp, Homo sapiens
tgtccacgatgaatc

SEQ ID NO: 419663 - DNA, 15 bp, Homo sapiens
ctgtccacgatgaat

SEQ ID NO: 419664 - DNA, 15 bp, Homo sapiens
gctgtccacgatgaa

SEQ ID NO: 419665 - DNA, 15 bp, Homo sapiens
agctgtccacgatga

SEQ ID NO: 419666 - DNA, 15 bp, Homo sapiens
gagctgtccacgatg

SEQ ID NO: 419667 - DNA, 15 bp, Homo sapiens
agagctgtccacgat

SEQ ID NO: 419668 - DNA, 15 bp, Homo sapiens
tagagctgtccacga

SEQ ID NO: 419669 - DNA, 15 bp, Homo sapiens
ctagagctgtccacg

SEQ ID NO: 419670 - DNA, 15 bp, Homo sapiens
tctagagctgtccac

SEQ ID NO: 419671 - DNA, 15 bp, Homo sapiens
gtctagagctgtcca

SEQ ID NO: 419672 - DNA, 15 bp, Homo sapiens
tgtctagagctgtcc

SEQ ID NO: 419673 - DNA, 15 bp, Homo sapiens
ttgtctagagctgtc

SEQ ID NO: 419674 - DNA, 15 bp, Homo sapiens
tttgtctagagctgt

SEQ ID NO: 419675 - DNA, 15 bp, Homo sapiens
atttgtctagagctg

SEQ ID NO: 419676 - DNA, 15 bp, Homo sapiens
catttgtctagagct

SEQ ID NO: 419677 - DNA, 15 bp, Homo sapiens
gcatttgtctagagc

SEQ ID NO: 419678 - DNA, 15 bp, Homo sapiens
agcatttgtctagag

SEQ ID NO: 419679 - DNA, 15 bp, Homo sapiens
gagcatttgtctaga

SEQ ID NO: 419680 - DNA, 15 bp, Homo sapiens
agagcatttgtctag

SEQ ID NO: 419681 - DNA, 15 bp, Homo sapiens
gagagcatttgtcta

SEQ ID NO: 419682 - DNA, 15 bp, Homo sapiens
tgagagcatttgtct

SEQ ID NO: 419683 - DNA, 15 bp, Homo sapiens
ttgagagcatttgtc

SEQ ID NO: 419684 - DNA, 15 bp, Homo sapiens
cttgagagcatttgt

SEQ ID NO: 419685 - DNA, 15 bp, Homo sapiens
acttgagagcatttg

SEQ ID NO: 419686 - DNA, 15 bp, Homo sapiens
cacttgagagcattt

SEQ ID NO: 419687 - DNA, 15 bp, Homo sapiens
ccacttgagagcatt

SEQ ID NO: 419688 - DNA, 15 bp, Homo sapiens
accacttgagagcat

SEQ ID NO: 419689 - DNA, 15 bp, Homo sapiens
taccacttgagagca

SEQ ID NO: 419690 - DNA, 15 bp, Homo sapiens
ctaccacttgagagc

SEQ ID NO: 419691 - DNA, 15 bp, Homo sapiens
gctaccacttgagag

SEQ ID NO: 419692 - DNA, 15 bp, Homo sapiens
agctaccacttgaga

SEQ ID NO: 419693 - DNA, 15 bp, Homo sapiens
cagctaccacttgag

SEQ ID NO: 419694 - DNA, 15 bp, Homo sapiens
acagctaccacttga

SEQ ID NO: 419695 - DNA, 15 bp, Homo sapiens
gacagctaccacttg

SEQ ID NO: 419696 - DNA, 15 bp, Homo sapiens
ggacagctaccactt

SEQ ID NO: 419697 - DNA, 15 bp, Homo sapiens
gggacagctaccact

SEQ ID NO: 419698 - DNA, 15 bp, Homo sapiens
agggacagctaccac

SEQ ID NO: 419699 - DNA, 15 bp, Homo sapiens
cagggacagctacca

SEQ ID NO: 419700 - DNA, 15 bp, Homo sapiens
ccagggacagctacc

SEQ ID NO: 419701 - DNA, 15 bp, Homo sapiens
gccagggacagctac

SEQ ID NO: 419702 - DNA, 15 bp, Homo sapiens
agccagggacagcta

SEQ ID NO: 419703 - DNA, 15 bp, Homo sapiens
tagccagggacagct

SEQ ID NO: 419704 - DNA, 15 bp, Homo sapiens
gtagccagggacagc

SEQ ID NO: 419705 - DNA, 15 bp, Homo sapiens
agtagccagggacag

SEQ ID NO: 419706 - DNA, 15 bp, Homo sapiens
cagtagccagggaca

SEQ ID NO: 419707 - DNA, 15 bp, Homo sapiens
gcagtagccagggac

SEQ ID NO: 419708 - DNA, 15 bp, Homo sapiens
tgcagtagccaggga

SEQ ID NO: 419709 - DNA, 15 bp, Homo sapiens
ctgcagtagccaggg

SEQ ID NO: 419710 - DNA, 15 bp, Homo sapiens
gctgcagtagccagg

SEQ ID NO: 419711 - DNA, 15 bp, Homo sapiens
agctgcagtagccag

SEQ ID NO: 419712 - DNA, 15 bp, Homo sapiens
cagctgcagtagcca

SEQ ID NO: 419713 - DNA, 15 bp, Homo sapiens
gcagctgcagtagcc

SEQ ID NO: 419714 - DNA, 15 bp, Homo sapiens
tgcagctgcagtagc

SEQ ID NO: 419715 - DNA, 15 bp, Homo sapiens
atgcagctgcagtag

SEQ ID NO: 419716 - DNA, 15 bp, Homo sapiens
aatgcagctgcagta

SEQ ID NO: 419717 - DNA, 15 bp, Homo sapiens
aaatgcagctgcagt

SEQ ID NO: 419718 - DNA, 15 bp, Homo sapiens
gaaatgcagctgcag

SEQ ID NO: 419719 - DNA, 15 bp, Homo sapiens
ggaaatgcagctgca

SEQ ID NO: 419720 - DNA, 15 bp, Homo sapiens
aggaaatgcagctgc

SEQ ID NO: 419721 - DNA, 15 bp, Homo sapiens
aaggaaatgcagctg

SEQ ID NO: 419722 - DNA, 15 bp, Homo sapiens
aaaggaaatgcagct

SEQ ID NO: 419723 - DNA, 15 bp, Homo sapiens
aaaaggaaatgcagc

SEQ ID NO: 419724 - DNA, 15 bp, Homo sapiens
caaaaggaaatgcag

SEQ ID NO: 419725 - DNA, 15 bp, Homo sapiens
acaaaaggaaatgca

SEQ ID NO: 419726 - DNA, 15 bp, Homo sapiens
aacaaaaggaaatgc

SEQ ID NO: 419727 - DNA, 15 bp, Homo sapiens
gaacaaaaggaaatg

SEQ ID NO: 419728 - DNA, 15 bp, Homo sapiens
ggaacaaaaggaaat

SEQ ID NO: 419729 - DNA, 15 bp, Homo sapiens
gggaacaaaaggaaa

SEQ ID NO: 419730 - DNA, 15 bp, Homo sapiens
tgggaacaaaaggaa

SEQ ID NO: 419731 - DNA, 15 bp, Homo sapiens
atgggaacaaaagga

SEQ ID NO: 419732 - DNA, 15 bp, Homo sapiens
catgggaacaaaagg

SEQ ID NO: 419733 - DNA, 15 bp, Homo sapiens
ccatgggaacaaaag

SEQ ID NO: 419734 - DNA, 15 bp, Homo sapiens
tccatgggaacaaaa

SEQ ID NO: 419735 - DNA, 15 bp, Homo sapiens
ttccatgggaacaaa

SEQ ID NO: 419736 - DNA, 15 bp, Homo sapiens
attccatgggaacaa

SEQ ID NO: 419737 - DNA, 15 bp, Homo sapiens
aattccatgggaaca

SEQ ID NO: 419738 - DNA, 15 bp, Homo sapiens
aaattccatgggaac

SEQ ID NO: 419739 - DNA, 15 bp, Homo sapiens
aaaattccatgggaa

SEQ ID NO: 419740 - DNA, 15 bp, Homo sapiens
aaaaattccatggga

SEQ ID NO: 419741 - DNA, 15 bp, Homo sapiens
gaaaaattccatggg

SEQ ID NO: 419742 - DNA, 15 bp, Homo sapiens
agaaaaattccatgg

SEQ ID NO: 419743 - DNA, 15 bp, Homo sapiens
aagaaaaattccatg

SEQ ID NO: 419744 - DNA, 15 bp, Homo sapiens
caagaaaaattccat

SEQ ID NO: 419745 - DNA, 15 bp, Homo sapiens
tcaagaaaaattcca

SEQ ID NO: 419746 - DNA, 15 bp, Homo sapiens
ttcaagaaaaattcc

SEQ ID NO: 419747 - DNA, 15 bp, Homo sapiens
tttcaagaaaaattc

SEQ ID NO: 419748 - DNA, 15 bp, Homo sapiens
ttttcaagaaaaatt

SEQ ID NO: 419749 - DNA, 15 bp, Homo sapiens
tttttcaagaaaaat

SEQ ID NO: 419750 - DNA, 15 bp, Homo sapiens
gtttttcaagaaaaa

SEQ ID NO: 419751 - DNA, 15 bp, Homo sapiens
tgtttttcaagaaaa

SEQ ID NO: 419752 - DNA, 15 bp, Homo sapiens
gtgtttttcaagaaa

SEQ ID NO: 419753 - DNA, 15 bp, Homo sapiens
tgtgtttttcaagaa

SEQ ID NO: 419754 - DNA, 15 bp, Homo sapiens
ttgtgtttttcaaga

SEQ ID NO: 419755 - DNA, 15 bp, Homo sapiens
attgtgtttttcaag

SEQ ID NO: 419756 - DNA, 15 bp, Homo sapiens
cattgtgtttttcaa

SEQ ID NO: 419757 - DNA, 15 bp, Homo sapiens
tcattgtgtttttca

SEQ ID NO: 419758 - DNA, 15 bp, Homo sapiens
gtcattgtgtttttc

SEQ ID NO: 419759 - DNA, 15 bp, Homo sapiens
agtcattgtgttttt

SEQ ID NO: 419760 - DNA, 15 bp, Homo sapiens
tagtcattgtgtttt

SEQ ID NO: 419761 - DNA, 15 bp, Homo sapiens
atagtcattgtgttt

SEQ ID NO: 419762 - DNA, 15 bp, Homo sapiens
aatagtcattgtgtt

SEQ ID NO: 419763 - DNA, 15 bp, Homo sapiens
aaatagtcattgtgt

SEQ ID NO: 419764 - DNA, 15 bp, Homo sapiens
aaaatagtcattgtg

SEQ ID NO: 419765 - DNA, 15 bp, Homo sapiens
aaaaatagtcattgt

SEQ ID NO: 419766 - DNA, 15 bp, Homo sapiens
aaaaaatagtcattg

SEQ ID NO: 419767 - DNA, 15 bp, Homo sapiens
aaaaaaatagtcatt

SEQ ID NO: 419768 - DNA, 15 bp, Homo sapiens
taaaaaaatagtcat

SEQ ID NO: 419769 - DNA, 15 bp, Homo sapiens
gtaaaaaaatagtca

SEQ ID NO: 419770 - DNA, 15 bp, Homo sapiens
ggtaaaaaaatagtc

SEQ ID NO: 419771 - DNA, 15 bp, Homo sapiens
aggtaaaaaaatagt

SEQ ID NO: 419772 - DNA, 15 bp, Homo sapiens
gaggtaaaaaaatag

SEQ ID NO: 419773 - DNA, 15 bp, Homo sapiens
agaggtaaaaaaata

SEQ ID NO: 419774 - DNA, 15 bp, Homo sapiens
tagaggtaaaaaaat

SEQ ID NO: 419775 - DNA, 15 bp, Homo sapiens
gtagaggtaaaaaaa

SEQ ID NO: 419776 - DNA, 15 bp, Homo sapiens
tgtagaggtaaaaaa

SEQ ID NO: 419777 - DNA, 15 bp, Homo sapiens
ttgtagaggtaaaaa

SEQ ID NO: 419778 - DNA, 15 bp, Homo sapiens
attgtagaggtaaaa

SEQ ID NO: 419779 - DNA, 15 bp, Homo sapiens
aattgtagaggtaaa

SEQ ID NO: 419780 - DNA, 15 bp, Homo sapiens
aaattgtagaggtaa

SEQ ID NO: 419781 - DNA, 15 bp, Homo sapiens
caaattgtagaggta

SEQ ID NO: 419782 - DNA, 15 bp, Homo sapiens
gcaaattgtagaggt

SEQ ID NO: 419783 - DNA, 15 bp, Homo sapiens
agcaaattgtagagg

SEQ ID NO: 419784 - DNA, 15 bp, Homo sapiens
aagcaaattgtagag

SEQ ID NO: 419785 - DNA, 15 bp, Homo sapiens
caagcaaattgtaga

SEQ ID NO: 419786 - DNA, 15 bp, Homo sapiens
gcaagcaaattgtag

SEQ ID NO: 419787 - DNA, 15 bp, Homo sapiens
tgcaagcaaattgta

SEQ ID NO: 419788 - DNA, 15 bp, Homo sapiens
ctgcaagcaaattgt

SEQ ID NO: 419789 - DNA, 15 bp, Homo sapiens
actgcaagcaaattg

SEQ ID NO: 419790 - DNA, 15 bp, Homo sapiens
cactgcaagcaaatt

SEQ ID NO: 419791 - DNA, 15 bp, Homo sapiens
acactgcaagcaaat

SEQ ID NO: 419792 - DNA, 15 bp, Homo sapiens
aacactgcaagcaaa

SEQ ID NO: 419793 - DNA, 15 bp, Homo sapiens
aaacactgcaagcaa

SEQ ID NO: 419794 - DNA, 15 bp, Homo sapiens
gaaacactgcaagca

SEQ ID NO: 419795 - DNA, 15 bp, Homo sapiens
agaaacactgcaagc

SEQ ID NO: 419796 - DNA, 15 bp, Homo sapiens
aagaaacactgcaag

SEQ ID NO: 419797 - DNA, 15 bp, Homo sapiens
aaagaaacactgcaa

SEQ ID NO: 419798 - DNA, 15 bp, Homo sapiens
aaaagaaacactgca

SEQ ID NO: 419799 - DNA, 15 bp, Homo sapiens
gaaaagaaacactgc

SEQ ID NO: 419800 - DNA, 15 bp, Homo sapiens
tgaaaagaaacactg

SEQ ID NO: 419801 - DNA, 15 bp, Homo sapiens
atgaaaagaaacact

SEQ ID NO: 419802 - DNA, 15 bp, Homo sapiens
aatgaaaagaaacac

SEQ ID NO: 419803 - DNA, 15 bp, Homo sapiens
gaatgaaaagaaaca

SEQ ID NO: 419804 - DNA, 15 bp, Homo sapiens
tgaatgaaaagaaac

SEQ ID NO: 419805 - DNA, 15 bp, Homo sapiens
atgaatgaaaagaaa

SEQ ID NO: 419806 - DNA, 15 bp, Homo sapiens
aatgaatgaaaagaa

SEQ ID NO: 419807 - DNA, 15 bp, Homo sapiens
aaatgaatgaaaaga

SEQ ID NO: 419808 - DNA, 15 bp, Homo sapiens
taaatgaatgaaaag

SEQ ID NO: 419809 - DNA, 15 bp, Homo sapiens
ttaaatgaatgaaaa

SEQ ID NO: 419810 - DNA, 15 bp, Homo sapiens
gttaaatgaatgaaa

SEQ ID NO: 419811 - DNA, 15 bp, Homo sapiens
cgttaaatgaatgaa

SEQ ID NO: 419812 - DNA, 15 bp, Homo sapiens
acgttaaatgaatga

SEQ ID NO: 419813 - DNA, 15 bp, Homo sapiens
cacgttaaatgaatg

SEQ ID NO: 419814 - DNA, 15 bp, Homo sapiens
acacgttaaatgaat

SEQ ID NO: 419815 - DNA, 15 bp, Homo sapiens
aacacgttaaatgaa

SEQ ID NO: 419816 - DNA, 15 bp, Homo sapiens
aaacacgttaaatga

SEQ ID NO: 419817 - DNA, 15 bp, Homo sapiens
aaaacacgttaaatg

SEQ ID NO: 419818 - DNA, 15 bp, Homo sapiens
caaaacacgttaaat

SEQ ID NO: 419819 - DNA, 15 bp, Homo sapiens
tcaaaacacgttaaa

SEQ ID NO: 419820 - DNA, 15 bp, Homo sapiens
ttcaaaacacgttaa

SEQ ID NO: 419821 - DNA, 15 bp, Homo sapiens
tttcaaaacacgtta

SEQ ID NO: 419822 - DNA, 15 bp, Homo sapiens
ctttcaaaacacgtt

SEQ ID NO: 419823 - DNA, 15 bp, Homo sapiens
gctttcaaaacacgt

SEQ ID NO: 419824 - DNA, 15 bp, Homo sapiens
tgctttcaaaacacg

SEQ ID NO: 419825 - DNA, 15 bp, Homo sapiens
ttgctttcaaaacac

SEQ ID NO: 419826 - DNA, 15 bp, Homo sapiens
attgctttcaaaaca

SEQ ID NO: 419827 - DNA, 15 bp, Homo sapiens
tattgctttcaaaac

SEQ ID NO: 419828 - DNA, 15 bp, Homo sapiens
atattgctttcaaaa

SEQ ID NO: 419829 - DNA, 15 bp, Homo sapiens
catattgctttcaaa

SEQ ID NO: 419830 - DNA, 15 bp, Homo sapiens
gcatattgctttcaa

SEQ ID NO: 419831 - DNA, 15 bp, Homo sapiens
ggcatattgctttca

SEQ ID NO: 419832 - DNA, 15 bp, Homo sapiens
tggcatattgctttc

SEQ ID NO: 419833 - DNA, 15 bp, Homo sapiens
ttggcatattgcttt

SEQ ID NO: 419834 - DNA, 15 bp, Homo sapiens
tttggcatattgctt

SEQ ID NO: 419835 - DNA, 15 bp, Homo sapiens
ctttggcatattgct

SEQ ID NO: 419836 - DNA, 15 bp, Homo sapiens
cctttggcatattgc

SEQ ID NO: 419837 - DNA, 15 bp, Homo sapiens
ccctttggcatattg

SEQ ID NO: 419838 - DNA, 15 bp, Homo sapiens
tccctttggcatatt

SEQ ID NO: 419839 - DNA, 15 bp, Homo sapiens
ttccctttggcatat

SEQ ID NO: 419840 - DNA, 15 bp, Homo sapiens
attccctttggcata

SEQ ID NO: 419841 - DNA, 15 bp, Homo sapiens
aattccctttggcat

SEQ ID NO: 419842 - DNA, 15 bp, Homo sapiens
aaattccctttggca

SEQ ID NO: 419843 - DNA, 15 bp, Homo sapiens
caaattccctttggc

SEQ ID NO: 419844 - DNA, 15 bp, Homo sapiens
tcaaattccctttgg

SEQ ID NO: 419845 - DNA, 15 bp, Homo sapiens
ctcaaattccctttg

SEQ ID NO: 419846 - DNA, 15 bp, Homo sapiens
tctcaaattcccttt

SEQ ID NO: 419847 - DNA, 15 bp, Homo sapiens
ctctcaaattccctt

SEQ ID NO: 419848 - DNA, 15 bp, Homo sapiens
cctctcaaattccct

SEQ ID NO: 419849 - DNA, 15 bp, Homo sapiens
tcctctcaaattccc

SEQ ID NO: 419850 - DNA, 15 bp, Homo sapiens
ctcctctcaaattcc

SEQ ID NO: 419851 - DNA, 15 bp, Homo sapiens
actcctctcaaattc

SEQ ID NO: 419852 - DNA, 15 bp, Homo sapiens
aactcctctcaaatt

SEQ ID NO: 419853 - DNA, 15 bp, Homo sapiens
aaactcctctcaaat

SEQ ID NO: 419854 - DNA, 15 bp, Homo sapiens
aaaactcctctcaaa

SEQ ID NO: 419855 - DNA, 15 bp, Homo sapiens
taaaactcctctcaa

SEQ ID NO: 419856 - DNA, 15 bp, Homo sapiens
ataaaactcctctca

SEQ ID NO: 419857 - DNA, 15 bp, Homo sapiens
aataaaactcctctc

SEQ ID NO: 419858 - DNA, 15 bp, Homo sapiens
aaataaaactcctct

SEQ ID NO: 419859 - DNA, 15 bp, Homo sapiens
aaaataaaactcctc

SEQ ID NO: 419860 - DNA, 15 bp, Homo sapiens
caaaataaaactcct

SEQ ID NO: 419861 - DNA, 15 bp, Homo sapiens
tcaaaataaaactcc

SEQ ID NO: 419862 - DNA, 15 bp, Homo sapiens
gtcaaaataaaactc

SEQ ID NO: 419863 - DNA, 15 bp, Homo sapiens
ggtcaaaataaaact

SEQ ID NO: 419864 - DNA, 15 bp, Homo sapiens
gggtcaaaataaaac

SEQ ID NO: 419865 - DNA, 15 bp, Homo sapiens
agggtcaaaataaaa

SEQ ID NO: 419866 - DNA, 15 bp, Homo sapiens
tagggtcaaaataaa

SEQ ID NO: 419867 - DNA, 15 bp, Homo sapiens
atagggtcaaaataa

SEQ ID NO: 419868 - DNA, 15 bp, Homo sapiens
catagggtcaaaata

SEQ ID NO: 419869 - DNA, 15 bp, Homo sapiens
acatagggtcaaaat

SEQ ID NO: 419870 - DNA, 15 bp, Homo sapiens
tacatagggtcaaaa

SEQ ID NO: 419871 - DNA, 15 bp, Homo sapiens
atacatagggtcaaa

SEQ ID NO: 419872 - DNA, 15 bp, Homo sapiens
gatacatagggtcaa

SEQ ID NO: 419873 - DNA, 15 bp, Homo sapiens
tgatacatagggtca

SEQ ID NO: 419874 - DNA, 15 bp, Homo sapiens
ctgatacatagggtc

SEQ ID NO: 419875 - DNA, 15 bp, Homo sapiens
actgatacatagggt

SEQ ID NO: 419876 - DNA, 15 bp, Homo sapiens
aactgatacataggg

SEQ ID NO: 419877 - DNA, 15 bp, Homo sapiens
aaactgatacatagg

SEQ ID NO: 419878 - DNA, 15 bp, Homo sapiens
gaaactgatacatag

SEQ ID NO: 419879 - DNA, 15 bp, Homo sapiens
tgaaactgatacata

SEQ ID NO: 419880 - DNA, 15 bp, Homo sapiens
ttgaaactgatacat

SEQ ID NO: 419881 - DNA, 15 bp, Homo sapiens
cttgaaactgataca

SEQ ID NO: 419882 - DNA, 15 bp, Homo sapiens
tcttgaaactgatac

SEQ ID NO: 419883 - DNA, 15 bp, Homo sapiens
ttcttgaaactgata

SEQ ID NO: 419884 - DNA, 15 bp, Homo sapiens
cttcttgaaactgat

SEQ ID NO: 419885 - DNA, 15 bp, Homo sapiens
ccttcttgaaactga

SEQ ID NO: 419886 - DNA, 15 bp, Homo sapiens
accttcttgaaactg

SEQ ID NO: 419887 - DNA, 15 bp, Homo sapiens
caccttcttgaaact

SEQ ID NO: 419888 - DNA, 15 bp, Homo sapiens
tcaccttcttgaaac

SEQ ID NO: 419889 - DNA, 15 bp, Homo sapiens
ttcaccttcttgaaa

SEQ ID NO: 419890 - DNA, 15 bp, Homo sapiens
tttcaccttcttgaa

SEQ ID NO: 419891 - DNA, 15 bp, Homo sapiens
ttttcaccttcttga

SEQ ID NO: 419892 - DNA, 15 bp, Homo sapiens
tttttcaccttcttg

SEQ ID NO: 419893 - DNA, 15 bp, Homo sapiens
ctttttcaccttctt

SEQ ID NO: 419894 - DNA, 15 bp, Homo sapiens
actttttcaccttct

SEQ ID NO: 419895 - DNA, 15 bp, Homo sapiens
aactttttcaccttc

SEQ ID NO: 419896 - DNA, 15 bp, Homo sapiens
gaactttttcacctt

SEQ ID NO: 419897 - DNA, 15 bp, Homo sapiens
tgaactttttcacct

SEQ ID NO: 419898 - DNA, 15 bp, Homo sapiens
ctgaactttttcacc

SEQ ID NO: 419899 - DNA, 15 bp, Homo sapiens
tctgaactttttcac

SEQ ID NO: 419900 - DNA, 15 bp, Homo sapiens
ttctgaactttttca

SEQ ID NO: 419901 - DNA, 15 bp, Homo sapiens
tttctgaactttttc

SEQ ID NO: 419902 - DNA, 15 bp, Homo sapiens
gtttctgaacttttt

SEQ ID NO: 419903 - DNA, 15 bp, Homo sapiens
tgtttctgaactttt

SEQ ID NO: 419904 - DNA, 15 bp, Homo sapiens
ttgtttctgaacttt

SEQ ID NO: 419905 - DNA, 15 bp, Homo sapiens
tttgtttctgaactt

SEQ ID NO: 419906 - DNA, 15 bp, Homo sapiens
ctttgtttctgaact

SEQ ID NO: 419907 - DNA, 15 bp, Homo sapiens
tctttgtttctgaac

SEQ ID NO: 419908 - DNA, 15 bp, Homo sapiens
ttctttgtttctgaa

SEQ ID NO: 419909 - DNA, 15 bp, Homo sapiens
tttctttgtttctga

SEQ ID NO: 419910 - DNA, 15 bp, Homo sapiens
atttctttgtttctg

SEQ ID NO: 419911 - DNA, 15 bp, Homo sapiens
aatttctttgtttct

SEQ ID NO: 419912 - DNA, 15 bp, Homo sapiens
caatttctttgtttc

SEQ ID NO: 419913 - DNA, 15 bp, Homo sapiens
tcaatttctttgttt

SEQ ID NO: 419914 - DNA, 15 bp, Homo sapiens
ctcaatttctttgtt

SEQ ID NO: 419915 - DNA, 15 bp, Homo sapiens
actcaatttctttgt

SEQ ID NO: 419916 - DNA, 15 bp, Homo sapiens
gactcaatttctttg

SEQ ID NO: 419917 - DNA, 15 bp, Homo sapiens
tgactcaatttcttt

SEQ ID NO: 419918 - DNA, 15 bp, Homo sapiens
atgactcaatttctt

SEQ ID NO: 419919 - DNA, 15 bp, Homo sapiens
gatgactcaatttct

SEQ ID NO: 419920 - DNA, 15 bp, Homo sapiens
agatgactcaatttc

SEQ ID NO: 419921 - DNA, 15 bp, Homo sapiens
aagatgactcaattt

SEQ ID NO: 419922 - DNA, 15 bp, Homo sapiens
aaagatgactcaatt

SEQ ID NO: 419923 - DNA, 15 bp, Homo sapiens
aaaagatgactcaat

SEQ ID NO: 419924 - DNA, 15 bp, Homo sapiens
caaaagatgactcaa

SEQ ID NO: 419925 - DNA, 15 bp, Homo sapiens
tcaaaagatgactca

SEQ ID NO: 419926 - DNA, 15 bp, Homo sapiens
gtcaaaagatgactc

SEQ ID NO: 419927 - DNA, 15 bp, Homo sapiens
ggtcaaaagatgact

SEQ ID NO: 419928 - DNA, 15 bp, Homo sapiens
aggtcaaaagatgac

SEQ ID NO: 419929 - DNA, 15 bp, Homo sapiens
aaggtcaaaagatga

SEQ ID NO: 419930 - DNA, 15 bp, Homo sapiens
caaggtcaaaagatg

SEQ ID NO: 419931 - DNA, 15 bp, Homo sapiens
tcaaggtcaaaagat

SEQ ID NO: 419932 - DNA, 15 bp, Homo sapiens
atcaaggtcaaaaga

SEQ ID NO: 419933 - DNA, 15 bp, Homo sapiens
tatcaaggtcaaaag

SEQ ID NO: 419934 - DNA, 15 bp, Homo sapiens
gtatcaaggtcaaaa

SEQ ID NO: 419935 - DNA, 15 bp, Homo sapiens
tgtatcaaggtcaaa

SEQ ID NO: 419936 - DNA, 15 bp, Homo sapiens
ttgtatcaaggtcaa

SEQ ID NO: 419937 - DNA, 15 bp, Homo sapiens
gttgtatcaaggtca

SEQ ID NO: 419938 - DNA, 15 bp, Homo sapiens
agttgtatcaaggtc

SEQ ID NO: 419939 - DNA, 15 bp, Homo sapiens
cagttgtatcaaggt

SEQ ID NO: 419940 - DNA, 15 bp, Homo sapiens
tcagttgtatcaagg

SEQ ID NO: 419941 - DNA, 15 bp, Homo sapiens
ttcagttgtatcaag

SEQ ID NO: 419942 - DNA, 15 bp, Homo sapiens
cttcagttgtatcaa

SEQ ID NO: 419943 - DNA, 15 bp, Homo sapiens
gcttcagttgtatca

SEQ ID NO: 419944 - DNA, 15 bp, Homo sapiens
agcttcagttgtatc

SEQ ID NO: 419945 - DNA, 15 bp, Homo sapiens
aagcttcagttgtat

SEQ ID NO: 419946 - DNA, 15 bp, Homo sapiens
aaagcttcagttgta

SEQ ID NO: 419947 - DNA, 15 bp, Homo sapiens
taaagcttcagttgt

SEQ ID NO: 419948 - DNA, 15 bp, Homo sapiens
ttaaagcttcagttg

SEQ ID NO: 419949 - DNA, 15 bp, Homo sapiens
cttaaagcttcagtt

SEQ ID NO: 419950 - DNA, 15 bp, Homo sapiens
tcttaaagcttcagt

SEQ ID NO: 419951 - DNA, 15 bp, Homo sapiens
atcttaaagcttcag

SEQ ID NO: 419952 - DNA, 15 bp, Homo sapiens
tatcttaaagcttca

SEQ ID NO: 419953 - DNA, 15 bp, Homo sapiens
ttatcttaaagcttc

SEQ ID NO: 419954 - DNA, 15 bp, Homo sapiens
tttatcttaaagctt

SEQ ID NO: 419955 - DNA, 15 bp, Homo sapiens
atttatcttaaagct

SEQ ID NO: 419956 - DNA, 15 bp, Homo sapiens
gatttatcttaaagc

SEQ ID NO: 419957 - DNA, 15 bp, Homo sapiens
ggatttatcttaaag

SEQ ID NO: 419958 - DNA, 15 bp, Homo sapiens
tggatttatcttaaa

SEQ ID NO: 419959 - DNA, 15 bp, Homo sapiens
atggatttatcttaa

SEQ ID NO: 419960 - DNA, 15 bp, Homo sapiens
aatggatttatctta

SEQ ID NO: 419961 - DNA, 15 bp, Homo sapiens
taatggatttatctt

SEQ ID NO: 419962 - DNA, 15 bp, Homo sapiens
ttaatggatttatct

SEQ ID NO: 419963 - DNA, 15 bp, Homo sapiens
tttaatggatttatc

SEQ ID NO: 419964 - DNA, 15 bp, Homo sapiens
ttttaatggatttat

SEQ ID NO: 419965 - DNA, 15 bp, Homo sapiens
tttttaatggattta

SEQ ID NO: 419966 - DNA, 15 bp, Homo sapiens
ctttttaatggattt

SEQ ID NO: 419967 - DNA, 15 bp, Homo sapiens
tctttttaatggatt

SEQ ID NO: 419968 - DNA, 15 bp, Homo sapiens
ctctttttaatggat

SEQ ID NO: 419969 - DNA, 15 bp, Homo sapiens
gctctttttaatgga

SEQ ID NO: 419970 - DNA, 15 bp, Homo sapiens
agctctttttaatgg

SEQ ID NO: 419971 - DNA, 15 bp, Homo sapiens
tagctctttttaatg

SEQ ID NO: 419972 - DNA, 15 bp, Homo sapiens
gtagctctttttaat

SEQ ID NO: 419973 - DNA, 15 bp, Homo sapiens
agtagctctttttaa

SEQ ID NO: 419974 - DNA, 15 bp, Homo sapiens
gagtagctcttttta

SEQ ID NO: 419975 - DNA, 15 bp, Homo sapiens
tgagtagctcttttt

SEQ ID NO: 419976 - DNA, 15 bp, Homo sapiens
ctgagtagctctttt

SEQ ID NO: 419977 - DNA, 15 bp, Homo sapiens
actgagtagctcttt

SEQ ID NO: 419978 - DNA, 15 bp, Homo sapiens
gactgagtagctctt

SEQ ID NO: 419979 - DNA, 15 bp, Homo sapiens
cgactgagtagctct

SEQ ID NO: 419980 - DNA, 15 bp, Homo sapiens
tcgactgagtagctc

SEQ ID NO: 419981 - DNA, 15 bp, Homo sapiens
ttcgactgagtagct

SEQ ID NO: 419982 - DNA, 15 bp, Homo sapiens
attcgactgagtagc

SEQ ID NO: 419983 - DNA, 15 bp, Homo sapiens
aattcgactgagtag

SEQ ID NO: 419984 - DNA, 15 bp, Homo sapiens
gaattcgactgagta

SEQ ID NO: 419985 - DNA, 15 bp, Homo sapiens
ggaattcgactgagt

SEQ ID NO: 419986 - DNA, 15 bp, Homo sapiens
aggaattcgactgag

SEQ ID NO: 419987 - DNA, 15 bp, Homo sapiens
taggaattcgactga

SEQ ID NO: 419988 - DNA, 15 bp, Homo sapiens
gtaggaattcgactg

SEQ ID NO: 419989 - DNA, 15 bp, Homo sapiens
agtaggaattcgact

SEQ ID NO: 419990 - DNA, 15 bp, Homo sapiens
tagtaggaattcgac

SEQ ID NO: 419991 - DNA, 15 bp, Homo sapiens
atagtaggaattcga

SEQ ID NO: 419992 - DNA, 15 bp, Homo sapiens
catagtaggaattcg

SEQ ID NO: 419993 - DNA, 15 bp, Homo sapiens
acatagtaggaattc

SEQ ID NO: 419994 - DNA, 15 bp, Homo sapiens
tacatagtaggaatt

SEQ ID NO: 419995 - DNA, 15 bp, Homo sapiens
gtacatagtaggaat

SEQ ID NO: 419996 - DNA, 15 bp, Homo sapiens
ggtacatagtaggaa

SEQ ID NO: 419997 - DNA, 15 bp, Homo sapiens
tggtacatagtagga

SEQ ID NO: 419998 - DNA, 15 bp, Homo sapiens
ttggtacatagtagg

SEQ ID NO: 419999 - DNA, 15 bp, Homo sapiens
attggtacatagtag

SEQ ID NO: 420000 - DNA, 15 bp, Homo sapiens
tattggtacatagta

SEQ ID NO: 420001 - DNA, 15 bp, Homo sapiens
ttattggtacatagt

SEQ ID NO: 420002 - DNA, 15 bp, Homo sapiens
attattggtacatag

SEQ ID NO: 420003 - DNA, 15 bp, Homo sapiens
tattattggtacata

SEQ ID NO: 420004 - DNA, 15 bp, Homo sapiens
ttattattggtacat

SEQ ID NO: 420005 - DNA, 15 bp, Homo sapiens
attattattggtaca

SEQ ID NO: 420006 - DNA, 15 bp, Homo sapiens
aattattattggtac

SEQ ID NO: 420007 - DNA, 15 bp, Homo sapiens
gaattattattggta

SEQ ID NO: 420008 - DNA, 15 bp, Homo sapiens
agaattattattggt

SEQ ID NO: 420009 - DNA, 15 bp, Homo sapiens
tagaattattattgg

SEQ ID NO: 420010 - DNA, 15 bp, Homo sapiens
atagaattattattg

SEQ ID NO: 420011 - DNA, 15 bp, Homo sapiens
aatagaattattatt

SEQ ID NO: 420012 - DNA, 15 bp, Homo sapiens
aaatagaattattat

SEQ ID NO: 420013 - DNA, 15 bp, Homo sapiens
aaaatagaattatta

SEQ ID NO: 420014 - DNA, 15 bp, Homo sapiens
taaaatagaattatt

SEQ ID NO: 420015 - DNA, 15 bp, Homo sapiens
ttaaaatagaattat

SEQ ID NO: 420016 - DNA, 15 bp, Homo sapiens
tttaaaatagaatta

SEQ ID NO: 420017 - DNA, 15 bp, Homo sapiens
ttttaaaatagaatt

SEQ ID NO: 420018 - DNA, 15 bp, Homo sapiens
tttttaaaatagaat

SEQ ID NO: 420019 - DNA, 15 bp, Homo sapiens
tatttttaaaataga

SEQ ID NO: 420020 - DNA, 15 bp, Homo sapiens
ttatttttaaaatag

SEQ ID NO: 420021 - DNA, 15 bp, Homo sapiens
tttatttttaaaata

SEQ ID NO: 420022 - DNA, 15 bp, Homo sapiens
ttttatttttaaaat

SEQ ID NO: 420023 - DNA, 15 bp, Homo sapiens
tttttatttttaaaa

SEQ ID NO: 420024 - DNA, 15 bp, Homo sapiens
ttttttatttttaaa

SEQ ID NO: 420025 - DNA, 15 bp, Homo sapiens
tttttttatttttaa

SEQ ID NO: 420026 - DNA, 15 bp, Homo sapiens
gtttttttattttta

SEQ ID NO: 420027 - DNA, 15 bp, Homo sapiens
ctgtttttttatttt

SEQ ID NO: 420028 - DNA, 15 bp, Homo sapiens
cctgtttttttattt

SEQ ID NO: 420029 - DNA, 15 bp, Homo sapiens
gcctgtttttttatt

SEQ ID NO: 420030 - DNA, 15 bp, Homo sapiens
agcctgtttttttat

SEQ ID NO: 420031 - DNA, 15 bp, Homo sapiens
tagcctgttttttta

SEQ ID NO: 420032 - DNA, 15 bp, Homo sapiens
ttagcctgttttttt

SEQ ID NO: 420033 - DNA, 15 bp, Homo sapiens
cttagcctgtttttt

SEQ ID NO: 420034 - DNA, 15 bp, Homo sapiens
tcttagcctgttttt

SEQ ID NO: 420035 - DNA, 15 bp, Homo sapiens
gtcttagcctgtttt

SEQ ID NO: 420036 - DNA, 15 bp, Homo sapiens
cgtcttagcctgttt

SEQ ID NO: 420037 - DNA, 15 bp, Homo sapiens
ccgtcttagcctgtt

SEQ ID NO: 420038 - DNA, 15 bp, Homo sapiens
cccgtcttagcctgt

SEQ ID NO: 420039 - DNA, 15 bp, Homo sapiens
gcccgtcttagcctg

SEQ ID NO: 420040 - DNA, 15 bp, Homo sapiens
agcccgtcttagcct

SEQ ID NO: 420041 - DNA, 15 bp, Homo sapiens
aagcccgtcttagcc

SEQ ID NO: 420042 - DNA, 15 bp, Homo sapiens
taagcccgtcttagc

SEQ ID NO: 420043 - DNA, 15 bp, Homo sapiens
ttaagcccgtcttag

SEQ ID NO: 420044 - DNA, 15 bp, Homo sapiens
attaagcccgtctta

SEQ ID NO: 420045 - DNA, 15 bp, Homo sapiens
tattaagcccgtctt

SEQ ID NO: 420046 - DNA, 15 bp, Homo sapiens
ctattaagcccgtct

SEQ ID NO: 420047 - DNA, 15 bp, Homo sapiens
gctattaagcccgtc

SEQ ID NO: 420048 - DNA, 15 bp, Homo sapiens
ggctattaagcccgt

SEQ ID NO: 420049 - DNA, 15 bp, Homo sapiens
tggctattaagcccg

SEQ ID NO: 420050 - DNA, 15 bp, Homo sapiens
ttggctattaagccc

SEQ ID NO: 420051 - DNA, 15 bp, Homo sapiens
gttggctattaagcc

SEQ ID NO: 420052 - DNA, 15 bp, Homo sapiens
agttggctattaagc

SEQ ID NO: 420053 - DNA, 15 bp, Homo sapiens
gagttggctattaag

SEQ ID NO: 420054 - DNA, 15 bp, Homo sapiens
tgagttggctattaa

SEQ ID NO: 420055 - DNA, 15 bp, Homo sapiens
ttgagttggctatta

SEQ ID NO: 420056 - DNA, 15 bp, Homo sapiens
tttgagttggctatt

SEQ ID NO: 420057 - DNA, 15 bp, Homo sapiens
ctttgagttggctat

SEQ ID NO: 420058 - DNA, 15 bp, Homo sapiens
gctttgagttggcta

SEQ ID NO: 420059 - DNA, 15 bp, Homo sapiens
ggctttgagttggct

SEQ ID NO: 420060 - DNA, 15 bp, Homo sapiens
tggctttgagttggc

SEQ ID NO: 420061 - DNA, 15 bp, Homo sapiens
gtggctttgagttgg

SEQ ID NO: 420062 - DNA, 15 bp, Homo sapiens
tgtggctttgagttg

SEQ ID NO: 420063 - DNA, 15 bp, Homo sapiens
atgtggctttgagtt

SEQ ID NO: 420064 - DNA, 15 bp, Homo sapiens
catgtggctttgagt

SEQ ID NO: 420065 - DNA, 15 bp, Homo sapiens
ccatgtggctttgag

SEQ ID NO: 420066 - DNA, 15 bp, Homo sapiens
accatgtggctttga

SEQ ID NO: 420067 - DNA, 15 bp, Homo sapiens
gaccatgtggctttg

SEQ ID NO: 420068 - DNA, 15 bp, Homo sapiens
tgaccatgtggcttt

SEQ ID NO: 420069 - DNA, 15 bp, Homo sapiens
ttgaccatgtggctt

SEQ ID NO: 420070 - DNA, 15 bp, Homo sapiens
attgaccatgtggct

SEQ ID NO: 420071 - DNA, 15 bp, Homo sapiens
tattgaccatgtggc

SEQ ID NO: 420072 - DNA, 15 bp, Homo sapiens
ttattgaccatgtgg

SEQ ID NO: 420073 - DNA, 15 bp, Homo sapiens
cttattgaccatgtg

SEQ ID NO: 420074 - DNA, 15 bp, Homo sapiens
ccttattgaccatgt

SEQ ID NO: 420075 - DNA, 15 bp, Homo sapiens
tccttattgaccatg

SEQ ID NO: 420076 - DNA, 15 bp, Homo sapiens
ctccttattgaccat

SEQ ID NO: 420077 - DNA, 15 bp, Homo sapiens
cctccttattgacca

SEQ ID NO: 420078 - DNA, 15 bp, Homo sapiens
tcctccttattgacc

SEQ ID NO: 420079 - DNA, 15 bp, Homo sapiens
ttcctccttattgac

SEQ ID NO: 420080 - DNA, 15 bp, Homo sapiens
tttcctccttattga

SEQ ID NO: 420081 - DNA, 15 bp, Homo sapiens
ctttcctccttattg

SEQ ID NO: 420082 - DNA, 15 bp, Homo sapiens
gctttcctccttatt

SEQ ID NO: 420083 - DNA, 15 bp, Homo sapiens
agctttcctccttat

SEQ ID NO: 420084 - DNA, 15 bp, Homo sapiens
cagctttcctcctta

SEQ ID NO: 420085 - DNA, 15 bp, Homo sapiens
tcagctttcctcctt

SEQ ID NO: 420086 - DNA, 15 bp, Homo sapiens
ctcagctttcctcct

SEQ ID NO: 420087 - DNA, 15 bp, Homo sapiens
tctcagctttcctcc

SEQ ID NO: 420088 - DNA, 15 bp, Homo sapiens
ctctcagctttcctc

SEQ ID NO: 420089 - DNA, 15 bp, Homo sapiens
actctcagctttcct

SEQ ID NO: 420090 - DNA, 15 bp, Homo sapiens
gactctcagctttcc

SEQ ID NO: 420091 - DNA, 15 bp, Homo sapiens
tgactctcagctttc

SEQ ID NO: 420092 - DNA, 15 bp, Homo sapiens
ctgactctcagcttt

SEQ ID NO: 420093 - DNA, 15 bp, Homo sapiens
actgactctcagctt

SEQ ID NO: 420094 - DNA, 15 bp, Homo sapiens
gactgactctcagct

SEQ ID NO: 420095 - DNA, 15 bp, Homo sapiens
tgactgactctcagc

SEQ ID NO: 420096 - DNA, 15 bp, Homo sapiens
atgactgactctcag

SEQ ID NO: 420097 - DNA, 15 bp, Homo sapiens
catgactgactctca

SEQ ID NO: 420098 - DNA, 15 bp, Homo sapiens
acatgactgactctc

SEQ ID NO: 420099 - DNA, 15 bp, Homo sapiens
cacatgactgactct

SEQ ID NO: 420100 - DNA, 15 bp, Homo sapiens
tcacatgactgactc

SEQ ID NO: 420101 - DNA, 15 bp, Homo sapiens
ctcacatgactgact

SEQ ID NO: 420102 - DNA, 15 bp, Homo sapiens
actcacatgactgac

SEQ ID NO: 420103 - DNA, 15 bp, Homo sapiens
gactcacatgactga

SEQ ID NO: 420104 - DNA, 15 bp, Homo sapiens
agactcacatgactg

SEQ ID NO: 420105 - DNA, 15 bp, Homo sapiens
tagactcacatgact

SEQ ID NO: 420106 - DNA, 15 bp, Homo sapiens
ttagactcacatgac

SEQ ID NO: 420107 - DNA, 15 bp, Homo sapiens
attagactcacatga

SEQ ID NO: 420108 - DNA, 15 bp, Homo sapiens
cattagactcacatg

SEQ ID NO: 420109 - DNA, 15 bp, Homo sapiens
acattagactcacat

SEQ ID NO: 420110 - DNA, 15 bp, Homo sapiens
gacattagactcaca

SEQ ID NO: 420111 - DNA, 15 bp, Homo sapiens
tgacattagactcac

SEQ ID NO: 420112 - DNA, 15 bp, Homo sapiens
ttgacattagactca

SEQ ID NO: 420113 - DNA, 15 bp, Homo sapiens
tttgacattagactc

SEQ ID NO: 420114 - DNA, 15 bp, Homo sapiens
atttgacattagact

SEQ ID NO: 420115 - DNA, 15 bp, Homo sapiens
tatttgacattagac

SEQ ID NO: 420116 - DNA, 15 bp, Homo sapiens
atatttgacattaga

SEQ ID NO: 420117 - DNA, 15 bp, Homo sapiens
tatatttgacattag

SEQ ID NO: 420118 - DNA, 15 bp, Homo sapiens
atatatttgacatta

SEQ ID NO: 420119 - DNA, 15 bp, Homo sapiens
aatatatttgacatt

SEQ ID NO: 420120 - DNA, 15 bp, Homo sapiens
taatatatttgacat

SEQ ID NO: 420121 - DNA, 15 bp, Homo sapiens
ataatatatttgaca

SEQ ID NO: 420122 - DNA, 15 bp, Homo sapiens
cataatatatttgac

SEQ ID NO: 420123 - DNA, 15 bp, Homo sapiens
gcataatatatttga

SEQ ID NO: 420124 - DNA, 15 bp, Homo sapiens
ggcataatatatttg

SEQ ID NO: 420125 - DNA, 15 bp, Homo sapiens
aggcataatatattt

SEQ ID NO: 420126 - DNA, 15 bp, Homo sapiens
caggcataatatatt

SEQ ID NO: 420127 - DNA, 15 bp, Homo sapiens
tcaggcataatatat

SEQ ID NO: 420128 - DNA, 15 bp, Homo sapiens
atcaggcataatata

SEQ ID NO: 420129 - DNA, 15 bp, Homo sapiens
aatcaggcataatat

SEQ ID NO: 420130 - DNA, 15 bp, Homo sapiens
aaatcaggcataata

SEQ ID NO: 420131 - DNA, 15 bp, Homo sapiens
gaaatcaggcataat

SEQ ID NO: 420132 - DNA, 15 bp, Homo sapiens
agaaatcaggcataa

SEQ ID NO: 420133 - DNA, 15 bp, Homo sapiens
tagaaatcaggcata

SEQ ID NO: 420134 - DNA, 15 bp, Homo sapiens
gtagaaatcaggcat

SEQ ID NO: 420135 - DNA, 15 bp, Homo sapiens
ggtagaaatcaggca

SEQ ID NO: 420136 - DNA, 15 bp, Homo sapiens
gggtagaaatcaggc

SEQ ID NO: 420137 - DNA, 15 bp, Homo sapiens
agggtagaaatcagg

SEQ ID NO: 420138 - DNA, 15 bp, Homo sapiens
aagggtagaaatcag

SEQ ID NO: 420139 - DNA, 15 bp, Homo sapiens
aaagggtagaaatca

SEQ ID NO: 420140 - DNA, 15 bp, Homo sapiens
taaagggtagaaatc

SEQ ID NO: 420141 - DNA, 15 bp, Homo sapiens
ttaaagggtagaaat

SEQ ID NO: 420142 - DNA, 15 bp, Homo sapiens
cttaaagggtagaaa

SEQ ID NO: 420143 - DNA, 15 bp, Homo sapiens
tcttaaagggtagaa

SEQ ID NO: 420144 - DNA, 15 bp, Homo sapiens
gtcttaaagggtaga

SEQ ID NO: 420145 - DNA, 15 bp, Homo sapiens
tgtcttaaagggtag

SEQ ID NO: 420146 - DNA, 15 bp, Homo sapiens
gtgtcttaaagggta

SEQ ID NO: 420147 - DNA, 15 bp, Homo sapiens
tgtgtcttaaagggt

SEQ ID NO: 420148 - DNA, 15 bp, Homo sapiens
gtgtgtcttaaaggg

SEQ ID NO: 420149 - DNA, 15 bp, Homo sapiens
tgtgtgtcttaaagg

SEQ ID NO: 420150 - DNA, 15 bp, Homo sapiens
gtgtgtgtcttaaag

SEQ ID NO: 420151 - DNA, 15 bp, Homo sapiens
tgtgtgtgtcttaaa

SEQ ID NO: 420152 - DNA, 15 bp, Homo sapiens
gtgtgtgtgtcttaa

SEQ ID NO: 420153 - DNA, 15 bp, Homo sapiens
tgtgtgtgtgtctta

SEQ ID NO: 420154 - DNA, 15 bp, Homo sapiens
gtgtgtgtgtgtctt

SEQ ID NO: 420155 - DNA, 15 bp, Homo sapiens
tgtgtgtgtgtgtct

SEQ ID NO: 420156 - DNA, 15 bp, Homo sapiens
gtgtgtgtgtgtgtc

SEQ ID NO: 420157 - DNA, 15 bp, Homo sapiens
ggtgtgtgtgtgtgt

SEQ ID NO: 420158 - DNA, 15 bp, Homo sapiens
aggtgtgtgtgtgtg

SEQ ID NO: 420159 - DNA, 15 bp, Homo sapiens
caggtgtgtgtgtgt

SEQ ID NO: 420160 - DNA, 15 bp, Homo sapiens
acaggtgtgtgtgtg

SEQ ID NO: 420161 - DNA, 15 bp, Homo sapiens
aacaggtgtgtgtgt

SEQ ID NO: 420162 - DNA, 15 bp, Homo sapiens
gaacaggtgtgtgtg

SEQ ID NO: 420163 - DNA, 15 bp, Homo sapiens
ggaacaggtgtgtgt

SEQ ID NO: 420164 - DNA, 15 bp, Homo sapiens
tggaacaggtgtgtg

SEQ ID NO: 420165 - DNA, 15 bp, Homo sapiens
ctggaacaggtgtgt

SEQ ID NO: 420166 - DNA, 15 bp, Homo sapiens
cctggaacaggtgtg

SEQ ID NO: 420167 - DNA, 15 bp, Homo sapiens
gcctggaacaggtgt

SEQ ID NO: 420168 - DNA, 15 bp, Homo sapiens
agcctggaacaggtg

SEQ ID NO: 420169 - DNA, 15 bp, Homo sapiens
gagcctggaacaggt

SEQ ID NO: 420170 - DNA, 15 bp, Homo sapiens
tgagcctggaacagg

SEQ ID NO: 420171 - DNA, 15 bp, Homo sapiens
gtgagcctggaacag

SEQ ID NO: 420172 - DNA, 15 bp, Homo sapiens
agtgagcctggaaca

SEQ ID NO: 420173 - DNA, 15 bp, Homo sapiens
gagtgagcctggaac

SEQ ID NO: 420174 - DNA, 15 bp, Homo sapiens
ggagtgagcctggaa

SEQ ID NO: 420175 - DNA, 15 bp, Homo sapiens
gggagtgagcctgga

SEQ ID NO: 420176 - DNA, 15 bp, Homo sapiens
agggagtgagcctgg

SEQ ID NO: 420177 - DNA, 15 bp, Homo sapiens
cagggagtgagcctg

SEQ ID NO: 420178 - DNA, 15 bp, Homo sapiens
gcagggagtgagcct

SEQ ID NO: 420179 - DNA, 15 bp, Homo sapiens
tgcagggagtgagcc

SEQ ID NO: 420180 - DNA, 15 bp, Homo sapiens
atgcagggagtgagc

SEQ ID NO: 420181 - DNA, 15 bp, Homo sapiens
gatgcagggagtgag

SEQ ID NO: 420182 - DNA, 15 bp, Homo sapiens
tgatgcagggagtga

SEQ ID NO: 420183 - DNA, 15 bp, Homo sapiens
atgatgcagggagtg

SEQ ID NO: 420184 - DNA, 15 bp, Homo sapiens
tatgatgcagggagt

SEQ ID NO: 420185 - DNA, 15 bp, Homo sapiens
gtatgatgcagggag

SEQ ID NO: 420186 - DNA, 15 bp, Homo sapiens
tgtatgatgcaggga

SEQ ID NO: 420187 - DNA, 15 bp, Homo sapiens
ctgtatgatgcaggg

SEQ ID NO: 420188 - DNA, 15 bp, Homo sapiens
actgtatgatgcagg

SEQ ID NO: 420189 - DNA, 15 bp, Homo sapiens
tactgtatgatgcag

SEQ ID NO: 420190 - DNA, 15 bp, Homo sapiens
ttactgtatgatgca

SEQ ID NO: 420191 - DNA, 15 bp, Homo sapiens
tttactgtatgatgc

SEQ ID NO: 420192 - DNA, 15 bp, Homo sapiens
ctttactgtatgatg

SEQ ID NO: 420193 - DNA, 15 bp, Homo sapiens
gctttactgtatgat

SEQ ID NO: 420194 - DNA, 15 bp, Homo sapiens
tgctttactgtatga

SEQ ID NO: 420195 - DNA, 15 bp, Homo sapiens
atgctttactgtatg

SEQ ID NO: 420196 - DNA, 15 bp, Homo sapiens
catgctttactgtat

SEQ ID NO: 420197 - DNA, 15 bp, Homo sapiens
acatgctttactgta

SEQ ID NO: 420198 - DNA, 15 bp, Homo sapiens
gacatgctttactgt

SEQ ID NO: 420199 - DNA, 15 bp, Homo sapiens
agacatgctttactg

SEQ ID NO: 420200 - DNA, 15 bp, Homo sapiens
gagacatgctttact

SEQ ID NO: 420201 - DNA, 15 bp, Homo sapiens
tgagacatgctttac

SEQ ID NO: 420202 - DNA, 15 bp, Homo sapiens
ttgagacatgcttta

SEQ ID NO: 420203 - DNA, 15 bp, Homo sapiens
tttgagacatgcttt

SEQ ID NO: 420204 - DNA, 15 bp, Homo sapiens
atttgagacatgctt

SEQ ID NO: 420205 - DNA, 15 bp, Homo sapiens
gatttgagacatgct

SEQ ID NO: 420206 - DNA, 15 bp, Homo sapiens
agatttgagacatgc

SEQ ID NO: 420207 - DNA, 15 bp, Homo sapiens
aagatttgagacatg

SEQ ID NO: 420208 - DNA, 15 bp, Homo sapiens
caagatttgagacat

SEQ ID NO: 420209 - DNA, 15 bp, Homo sapiens
tcaagatttgagaca

SEQ ID NO: 420210 - DNA, 15 bp, Homo sapiens
ttcaagatttgagac

SEQ ID NO: 420211 - DNA, 15 bp, Homo sapiens
cttcaagatttgaga

SEQ ID NO: 420212 - DNA, 15 bp, Homo sapiens
ccttcaagatttgag

SEQ ID NO: 420213 - DNA, 15 bp, Homo sapiens
accttcaagatttga

SEQ ID NO: 420214 - DNA, 15 bp, Homo sapiens
taccttcaagatttg

SEQ ID NO: 420215 - DNA, 15 bp, Homo sapiens
ctaccttcaagattt

SEQ ID NO: 420216 - DNA, 15 bp, Homo sapiens
cctaccttcaagatt

SEQ ID NO: 420217 - DNA, 15 bp, Homo sapiens
tcctaccttcaagat

SEQ ID NO: 420218 - DNA, 15 bp, Homo sapiens
ctcctaccttcaaga

SEQ ID NO: 420219 - DNA, 15 bp, Homo sapiens
tctcctaccttcaag

SEQ ID NO: 420220 - DNA, 15 bp, Homo sapiens
ttctcctaccttcaa

SEQ ID NO: 420221 - DNA, 15 bp, Homo sapiens
cttctcctaccttca

SEQ ID NO: 420222 - DNA, 15 bp, Homo sapiens
gcttctcctaccttc

SEQ ID NO: 420223 - DNA, 15 bp, Homo sapiens
ggcttctcctacctt

SEQ ID NO: 420224 - DNA, 15 bp, Homo sapiens
tggcttctcctacct

SEQ ID NO: 420225 - DNA, 15 bp, Homo sapiens
ctggcttctcctacc

SEQ ID NO: 420226 - DNA, 15 bp, Homo sapiens
actggcttctcctac

SEQ ID NO: 420227 - DNA, 15 bp, Homo sapiens
cactggcttctccta

SEQ ID NO: 420228 - DNA, 15 bp, Homo sapiens
acactggcttctcct

SEQ ID NO: 420229 - DNA, 15 bp, Homo sapiens
tacactggcttctcc

SEQ ID NO: 420230 - DNA, 15 bp, Homo sapiens
gtacactggcttctc

SEQ ID NO: 420231 - DNA, 15 bp, Homo sapiens
ggtacactggcttct

SEQ ID NO: 420232 - DNA, 15 bp, Homo sapiens
tggtacactggcttc

SEQ ID NO: 420233 - DNA, 15 bp, Homo sapiens
atggtacactggctt

SEQ ID NO: 420234 - DNA, 15 bp, Homo sapiens
aatggtacactggct

SEQ ID NO: 420235 - DNA, 15 bp, Homo sapiens
gaatggtacactggc

SEQ ID NO: 420236 - DNA, 15 bp, Homo sapiens
agaatggtacactgg

SEQ ID NO: 420237 - DNA, 15 bp, Homo sapiens
gagaatggtacactg

SEQ ID NO: 420238 - DNA, 15 bp, Homo sapiens
agagaatggtacact

SEQ ID NO: 420239 - DNA, 15 bp, Homo sapiens
tagagaatggtacac

SEQ ID NO: 420240 - DNA, 15 bp, Homo sapiens
atagagaatggtaca

SEQ ID NO: 420241 - DNA, 15 bp, Homo sapiens
catagagaatggtac

SEQ ID NO: 420242 - DNA, 15 bp, Homo sapiens
ccatagagaatggta

SEQ ID NO: 420243 - DNA, 15 bp, Homo sapiens
accatagagaatggt

SEQ ID NO: 420244 - DNA, 15 bp, Homo sapiens
gaccatagagaatgg

SEQ ID NO: 420245 - DNA, 15 bp, Homo sapiens
ggaccatagagaatg

SEQ ID NO: 420246 - DNA, 15 bp, Homo sapiens
aggaccatagagaat

SEQ ID NO: 420247 - DNA, 15 bp, Homo sapiens
caggaccatagagaa

SEQ ID NO: 420248 - DNA, 15 bp, Homo sapiens
tcaggaccatagaga

SEQ ID NO: 420249 - DNA, 15 bp, Homo sapiens
ttcaggaccatagag

SEQ ID NO: 420250 - DNA, 15 bp, Homo sapiens
gttcaggaccataga

SEQ ID NO: 420251 - DNA, 15 bp, Homo sapiens
ggttcaggaccatag

SEQ ID NO: 420252 - DNA, 15 bp, Homo sapiens
tggttcaggaccata

SEQ ID NO: 420253 - DNA, 15 bp, Homo sapiens
atggttcaggaccat

SEQ ID NO: 420254 - DNA, 15 bp, Homo sapiens
gatggttcaggacca

SEQ ID NO: 420255 - DNA, 15 bp, Homo sapiens
agatggttcaggacc

SEQ ID NO: 420256 - DNA, 15 bp, Homo sapiens
aagatggttcaggac

SEQ ID NO: 420257 - DNA, 15 bp, Homo sapiens
aaagatggttcagga

SEQ ID NO: 420258 - DNA, 15 bp, Homo sapiens
gaaagatggttcagg

SEQ ID NO: 420259 - DNA, 15 bp, Homo sapiens
tgaaagatggttcag

SEQ ID NO: 420260 - DNA, 15 bp, Homo sapiens
gtgaaagatggttca

SEQ ID NO: 420261 - DNA, 15 bp, Homo sapiens
ggtgaaagatggttc

SEQ ID NO: 420262 - DNA, 15 bp, Homo sapiens
gggtgaaagatggtt

SEQ ID NO: 420263 - DNA, 15 bp, Homo sapiens
agggtgaaagatggt

SEQ ID NO: 420264 - DNA, 15 bp, Homo sapiens
cagggtgaaagatgg

SEQ ID NO: 420265 - DNA, 15 bp, Homo sapiens
tcagggtgaaagatg

SEQ ID NO: 420266 - DNA, 15 bp, Homo sapiens
ctcagggtgaaagat

SEQ ID NO: 420267 - DNA, 15 bp, Homo sapiens
cctcagggtgaaaga

SEQ ID NO: 420268 - DNA, 15 bp, Homo sapiens
tcctcagggtgaaag

SEQ ID NO: 420269 - DNA, 15 bp, Homo sapiens
ttcctcagggtgaaa

SEQ ID NO: 420270 - DNA, 15 bp, Homo sapiens
gttcctcagggtgaa

SEQ ID NO: 420271 - DNA, 15 bp, Homo sapiens
tgttcctcagggtga

SEQ ID NO: 420272 - DNA, 15 bp, Homo sapiens
gtgttcctcagggtg

SEQ ID NO: 420273 - DNA, 15 bp, Homo sapiens
tgtgttcctcagggt

SEQ ID NO: 420274 - DNA, 15 bp, Homo sapiens
gtgtgttcctcaggg

SEQ ID NO: 420275 - DNA, 15 bp, Homo sapiens
ggtgtgttcctcagg

SEQ ID NO: 420276 - DNA, 15 bp, Homo sapiens
tggtgtgttcctcag

SEQ ID NO: 420277 - DNA, 15 bp, Homo sapiens
ttggtgtgttcctca

SEQ ID NO: 420278 - DNA, 15 bp, Homo sapiens
cttggtgtgttcctc

SEQ ID NO: 420279 - DNA, 15 bp, Homo sapiens
ccttggtgtgttcct

SEQ ID NO: 420280 - DNA, 15 bp, Homo sapiens
gccttggtgtgttcc

SEQ ID NO: 420281 - DNA, 15 bp, Homo sapiens
ggccttggtgtgttc

SEQ ID NO: 420282 - DNA, 15 bp, Homo sapiens
tggccttggtgtgtt

SEQ ID NO: 420283 - DNA, 15 bp, Homo sapiens
ctggccttggtgtgt

SEQ ID NO: 420284 - DNA, 15 bp, Homo sapiens
actggccttggtgtg

SEQ ID NO: 420285 - DNA, 15 bp, Homo sapiens
gactggccttggtgt

SEQ ID NO: 420286 - DNA, 15 bp, Homo sapiens
agactggccttggtg

SEQ ID NO: 420287 - DNA, 15 bp, Homo sapiens
aagactggccttggt

SEQ ID NO: 420288 - DNA, 15 bp, Homo sapiens
aaagactggccttgg

SEQ ID NO: 420289 - DNA, 15 bp, Homo sapiens
caaagactggccttg

SEQ ID NO: 420290 - DNA, 15 bp, Homo sapiens
tcaaagactggcctt

SEQ ID NO: 420291 - DNA, 15 bp, Homo sapiens
ttcaaagactggcct

SEQ ID NO: 420292 - DNA, 15 bp, Homo sapiens
attcaaagactggcc

SEQ ID NO: 420293 - DNA, 15 bp, Homo sapiens
aattcaaagactggc

SEQ ID NO: 420294 - DNA, 15 bp, Homo sapiens
aaattcaaagactgg

SEQ ID NO: 420295 - DNA, 15 bp, Homo sapiens
caaattcaaagactg

SEQ ID NO: 420296 - DNA, 15 bp, Homo sapiens
gcaaattcaaagact

SEQ ID NO: 420297 - DNA, 15 bp, Homo sapiens
tgcaaattcaaagac

SEQ ID NO: 420298 - DNA, 15 bp, Homo sapiens
atgcaaattcaaaga

SEQ ID NO: 420299 - DNA, 15 bp, Homo sapiens
tatgcaaattcaaag

SEQ ID NO: 420300 - DNA, 15 bp, Homo sapiens
atatgcaaattcaaa

SEQ ID NO: 420301 - DNA, 15 bp, Homo sapiens
tatatgcaaattcaa

SEQ ID NO: 420302 - DNA, 15 bp, Homo sapiens
ttatatgcaaattca

SEQ ID NO: 420303 - DNA, 15 bp, Homo sapiens
attatatgcaaattc

SEQ ID NO: 420304 - DNA, 15 bp, Homo sapiens
tattatatgcaaatt

SEQ ID NO: 420305 - DNA, 15 bp, Homo sapiens
atattatatgcaaat

SEQ ID NO: 420306 - DNA, 15 bp, Homo sapiens
aatattatatgcaaa

SEQ ID NO: 420307 - DNA, 15 bp, Homo sapiens
aaatattatatgcaa

SEQ ID NO: 420308 - DNA, 15 bp, Homo sapiens
caaatattatatgca

SEQ ID NO: 420309 - DNA, 15 bp, Homo sapiens
tcaaatattatatgc

SEQ ID NO: 420310 - DNA, 15 bp, Homo sapiens
atcaaatattatatg

SEQ ID NO: 420311 - DNA, 15 bp, Homo sapiens
catcaaatattatat

SEQ ID NO: 420312 - DNA, 15 bp, Homo sapiens
acatcaaatattata

SEQ ID NO: 420313 - DNA, 15 bp, Homo sapiens
aacatcaaatattat

SEQ ID NO: 420314 - DNA, 15 bp, Homo sapiens
taacatcaaatatta

SEQ ID NO: 420315 - DNA, 15 bp, Homo sapiens
gtaacatcaaatatt

SEQ ID NO: 420316 - DNA, 15 bp, Homo sapiens
tgtaacatcaaatat

SEQ ID NO: 420317 - DNA, 15 bp, Homo sapiens
ctgtaacatcaaata

SEQ ID NO: 420318 - DNA, 15 bp, Homo sapiens
actgtaacatcaaat

SEQ ID NO: 420319 - DNA, 15 bp, Homo sapiens
aactgtaacatcaaa

SEQ ID NO: 420320 - DNA, 15 bp, Homo sapiens
aaactgtaacatcaa

SEQ ID NO: 420321 - DNA, 15 bp, Homo sapiens
caaactgtaacatca

SEQ ID NO: 420322 - DNA, 15 bp, Homo sapiens
acaaactgtaacatc

SEQ ID NO: 420323 - DNA, 15 bp, Homo sapiens
tacaaactgtaacat

SEQ ID NO: 420324 - DNA, 15 bp, Homo sapiens
gtacaaactgtaaca

SEQ ID NO: 420325 - DNA, 15 bp, Homo sapiens
ggtacaaactgtaac

SEQ ID NO: 420326 - DNA, 15 bp, Homo sapiens
aggtacaaactgtaa

SEQ ID NO: 420327 - DNA, 15 bp, Homo sapiens
caggtacaaactgta

SEQ ID NO: 420328 - DNA, 15 bp, Homo sapiens
gcaggtacaaactgt

SEQ ID NO: 420329 - DNA, 15 bp, Homo sapiens
tgcaggtacaaactg

SEQ ID NO: 420330 - DNA, 15 bp, Homo sapiens
gtgcaggtacaaact

SEQ ID NO: 420331 - DNA, 15 bp, Homo sapiens
cgtgcaggtacaaac

SEQ ID NO: 420332 - DNA, 15 bp, Homo sapiens
acgtgcaggtacaaa

SEQ ID NO: 420333 - DNA, 15 bp, Homo sapiens
aacgtgcaggtacaa

SEQ ID NO: 420334 - DNA, 15 bp, Homo sapiens
taacgtgcaggtaca

SEQ ID NO: 420335 - DNA, 15 bp, Homo sapiens
gtaacgtgcaggtac

SEQ ID NO: 420336 - DNA, 15 bp, Homo sapiens
agtaacgtgcaggta

SEQ ID NO: 420337 - DNA, 15 bp, Homo sapiens
cagtaacgtgcaggt

SEQ ID NO: 420338 - DNA, 15 bp, Homo sapiens
acagtaacgtgcagg

SEQ ID NO: 420339 - DNA, 15 bp, Homo sapiens
aacagtaacgtgcag

SEQ ID NO: 420340 - DNA, 15 bp, Homo sapiens
aaacagtaacgtgca

SEQ ID NO: 420341 - DNA, 15 bp, Homo sapiens
caaacagtaacgtgc

SEQ ID NO: 420342 - DNA, 15 bp, Homo sapiens
ccaaacagtaacgtg

SEQ ID NO: 420343 - DNA, 15 bp, Homo sapiens
gccaaacagtaacgt

SEQ ID NO: 420344 - DNA, 15 bp, Homo sapiens
ggccaaacagtaacg

SEQ ID NO: 420345 - DNA, 15 bp, Homo sapiens
aggccaaacagtaac

SEQ ID NO: 420346 - DNA, 15 bp, Homo sapiens
caggccaaacagtaa

SEQ ID NO: 420347 - DNA, 15 bp, Homo sapiens
ccaggccaaacagta

SEQ ID NO: 420348 - DNA, 15 bp, Homo sapiens
tccaggccaaacagt

SEQ ID NO: 420349 - DNA, 15 bp, Homo sapiens
atccaggccaaacag

SEQ ID NO: 420350 - DNA, 15 bp, Homo sapiens
aatccaggccaaaca

SEQ ID NO: 420351 - DNA, 15 bp, Homo sapiens
aaatccaggccaaac

SEQ ID NO: 420352 - DNA, 15 bp, Homo sapiens
caaatccaggccaaa

SEQ ID NO: 420353 - DNA, 15 bp, Homo sapiens
acaaatccaggccaa

SEQ ID NO: 420354 - DNA, 15 bp, Homo sapiens
gacaaatccaggcca

SEQ ID NO: 420355 - DNA, 15 bp, Homo sapiens
ggacaaatccaggcc

SEQ ID NO: 420356 - DNA, 15 bp, Homo sapiens
tggacaaatccaggc

SEQ ID NO: 420357 - DNA, 15 bp, Homo sapiens
gtggacaaatccagg

SEQ ID NO: 420358 - DNA, 15 bp, Homo sapiens
agtggacaaatccag

SEQ ID NO: 420359 - DNA, 15 bp, Homo sapiens
cagtggacaaatcca

SEQ ID NO: 420360 - DNA, 15 bp, Homo sapiens
ccagtggacaaatcc

SEQ ID NO: 420361 - DNA, 15 bp, Homo sapiens
gccagtggacaaatc

SEQ ID NO: 420362 - DNA, 15 bp, Homo sapiens
agccagtggacaaat

SEQ ID NO: 420363 - DNA, 15 bp, Homo sapiens
gagccagtggacaaa

SEQ ID NO: 420364 - DNA, 15 bp, Homo sapiens
tgagccagtggacaa

SEQ ID NO: 420365 - DNA, 15 bp, Homo sapiens
ctgagccagtggaca

SEQ ID NO: 420366 - DNA, 15 bp, Homo sapiens
cctgagccagtggac

SEQ ID NO: 420367 - DNA, 15 bp, Homo sapiens
tcctgagccagtgga

SEQ ID NO: 420368 - DNA, 15 bp, Homo sapiens
gtcctgagccagtgg

SEQ ID NO: 420369 - DNA, 15 bp, Homo sapiens
agtcctgagccagtg

SEQ ID NO: 420370 - DNA, 15 bp, Homo sapiens
tagtcctgagccagt

SEQ ID NO: 420371 - DNA, 15 bp, Homo sapiens
ctagtcctgagccag

SEQ ID NO: 420372 - DNA, 15 bp, Homo sapiens
gctagtcctgagcca

SEQ ID NO: 420373 - DNA, 15 bp, Homo sapiens
ggctagtcctgagcc

SEQ ID NO: 420374 - DNA, 15 bp, Homo sapiens
tggctagtcctgagc

SEQ ID NO: 420375 - DNA, 15 bp, Homo sapiens
ctggctagtcctgag

SEQ ID NO: 420376 - DNA, 15 bp, Homo sapiens
actggctagtcctga

SEQ ID NO: 420377 - DNA, 15 bp, Homo sapiens
aactggctagtcctg

SEQ ID NO: 420378 - DNA, 15 bp, Homo sapiens
taactggctagtcct

SEQ ID NO: 420379 - DNA, 15 bp, Homo sapiens
ctaactggctagtcc

SEQ ID NO: 420380 - DNA, 15 bp, Homo sapiens
cctaactggctagtc

SEQ ID NO: 420381 - DNA, 15 bp, Homo sapiens
gcctaactggctagt

SEQ ID NO: 420382 - DNA, 15 bp, Homo sapiens
agcctaactggctag

SEQ ID NO: 420383 - DNA, 15 bp, Homo sapiens
gagcctaactggcta

SEQ ID NO: 420384 - DNA, 15 bp, Homo sapiens
agagcctaactggct

SEQ ID NO: 420385 - DNA, 15 bp, Homo sapiens
gagagcctaactggc

SEQ ID NO: 420386 - DNA, 15 bp, Homo sapiens
ggagagcctaactgg

SEQ ID NO: 420387 - DNA, 15 bp, Homo sapiens
gggagagcctaactg

SEQ ID NO: 420388 - DNA, 15 bp, Homo sapiens
agggagagcctaact

SEQ ID NO: 420389 - DNA, 15 bp, Homo sapiens
gagggagagcctaac

SEQ ID NO: 420390 - DNA, 15 bp, Homo sapiens
ggagggagagcctaa

SEQ ID NO: 420391 - DNA, 15 bp, Homo sapiens
gggagggagagccta

SEQ ID NO: 420392 - DNA, 15 bp, Homo sapiens
agggagggagagcct

SEQ ID NO: 420393 - DNA, 15 bp, Homo sapiens
cagggagggagagcc

SEQ ID NO: 420394 - DNA, 15 bp, Homo sapiens
acagggagggagagc

SEQ ID NO: 420395 - DNA, 15 bp, Homo sapiens
tacagggagggagag

SEQ ID NO: 420396 - DNA, 15 bp, Homo sapiens
ctacagggagggaga

SEQ ID NO: 420397 - DNA, 15 bp, Homo sapiens
gctacagggagggag

SEQ ID NO: 420398 - DNA, 15 bp, Homo sapiens
tgctacagggaggga

SEQ ID NO: 420399 - DNA, 15 bp, Homo sapiens
gtgctacagggaggg

SEQ ID NO: 420400 - DNA, 15 bp, Homo sapiens
ggtgctacagggagg

SEQ ID NO: 420401 - DNA, 15 bp, Homo sapiens
tggtgctacagggag

SEQ ID NO: 420402 - DNA, 15 bp, Homo sapiens
ttggtgctacaggga

SEQ ID NO: 420403 - DNA, 15 bp, Homo sapiens
gttggtgctacaggg

SEQ ID NO: 420404 - DNA, 15 bp, Homo sapiens
tgttggtgctacagg

SEQ ID NO: 420405 - DNA, 15 bp, Homo sapiens
gtgttggtgctacag

SEQ ID NO: 420406 - DNA, 15 bp, Homo sapiens
ggtgttggtgctaca

SEQ ID NO: 420407 - DNA, 15 bp, Homo sapiens
gggtgttggtgctac

SEQ ID NO: 420408 - DNA, 15 bp, Homo sapiens
agggtgttggtgcta

SEQ ID NO: 420409 - DNA, 15 bp, Homo sapiens
gagggtgttggtgct

SEQ ID NO: 420410 - DNA, 15 bp, Homo sapiens
ggagggtgttggtgc

SEQ ID NO: 420411 - DNA, 15 bp, Homo sapiens
tggagggtgttggtg

SEQ ID NO: 420412 - DNA, 15 bp, Homo sapiens
ttggagggtgttggt

SEQ ID NO: 420413 - DNA, 15 bp, Homo sapiens
gttggagggtgttgg

SEQ ID NO: 420414 - DNA, 15 bp, Homo sapiens
ggttggagggtgttg

SEQ ID NO: 420415 - DNA, 15 bp, Homo sapiens
gggttggagggtgtt

SEQ ID NO: 420416 - DNA, 15 bp, Homo sapiens
cgggttggagggtgt

SEQ ID NO: 420417 - DNA, 15 bp, Homo sapiens
tcgggttggagggtg

SEQ ID NO: 420418 - DNA, 15 bp, Homo sapiens
gtcgggttggagggt

SEQ ID NO: 420419 - DNA, 15 bp, Homo sapiens
agtcgggttggaggg

SEQ ID NO: 420420 - DNA, 15 bp, Homo sapiens
gagtcgggttggagg

SEQ ID NO: 420421 - DNA, 15 bp, Homo sapiens
ggagtcgggttggag

SEQ ID NO: 420422 - DNA, 15 bp, Homo sapiens
aggagtcgggttgga

SEQ ID NO: 420423 - DNA, 15 bp, Homo sapiens
caggagtcgggttgg

SEQ ID NO: 420424 - DNA, 15 bp, Homo sapiens
ccaggagtcgggttg

SEQ ID NO: 420425 - DNA, 15 bp, Homo sapiens
gccaggagtcgggtt

SEQ ID NO: 420426 - DNA, 15 bp, Homo sapiens
tgccaggagtcgggt

SEQ ID NO: 420427 - DNA, 15 bp, Homo sapiens
gtgccaggagtcggg

SEQ ID NO: 420428 - DNA, 15 bp, Homo sapiens
ggtgccaggagtcgg

SEQ ID NO: 420429 - DNA, 15 bp, Homo sapiens
aggtgccaggagtcg

SEQ ID NO: 420430 - DNA, 15 bp, Homo sapiens
caggtgccaggagtc

SEQ ID NO: 420431 - DNA, 15 bp, Homo sapiens
ccaggtgccaggagt

SEQ ID NO: 420432 - DNA, 15 bp, Homo sapiens
gccaggtgccaggag

SEQ ID NO: 420433 - DNA, 15 bp, Homo sapiens
ggccaggtgccagga

SEQ ID NO: 420434 - DNA, 15 bp, Homo sapiens
tggccaggtgccagg

SEQ ID NO: 420435 - DNA, 15 bp, Homo sapiens
gtggccaggtgccag

SEQ ID NO: 420436 - DNA, 15 bp, Homo sapiens
agtggccaggtgcca

SEQ ID NO: 420437 - DNA, 15 bp, Homo sapiens
cagtggccaggtgcc

SEQ ID NO: 420438 - DNA, 15 bp, Homo sapiens
ccagtggccaggtgc

SEQ ID NO: 420439 - DNA, 15 bp, Homo sapiens
cccagtggccaggtg

SEQ ID NO: 420440 - DNA, 15 bp, Homo sapiens
gcccagtggccaggt

SEQ ID NO: 420441 - DNA, 15 bp, Homo sapiens
cgcccagtggccagg

SEQ ID NO: 420442 - DNA, 15 bp, Homo sapiens
acgcccagtggccag

SEQ ID NO: 420443 - DNA, 15 bp, Homo sapiens
aacgcccagtggcca

SEQ ID NO: 420444 - DNA, 15 bp, Homo sapiens
aaacgcccagtggcc

SEQ ID NO: 420445 - DNA, 15 bp, Homo sapiens
gaaacgcccagtggc

SEQ ID NO: 420446 - DNA, 15 bp, Homo sapiens
ggaaacgcccagtgg

SEQ ID NO: 420447 - DNA, 15 bp, Homo sapiens
aggaaacgcccagtg

SEQ ID NO: 420448 - DNA, 15 bp, Homo sapiens
aaggaaacgcccagt

SEQ ID NO: 420449 - DNA, 15 bp, Homo sapiens
taaggaaacgcccag

SEQ ID NO: 420450 - DNA, 15 bp, Homo sapiens
gtaaggaaacgccca

SEQ ID NO: 420451 - DNA, 15 bp, Homo sapiens
ggtaaggaaacgccc

SEQ ID NO: 420452 - DNA, 15 bp, Homo sapiens
tggtaaggaaacgcc

SEQ ID NO: 420453 - DNA, 15 bp, Homo sapiens
gtggtaaggaaacgc

SEQ ID NO: 420454 - DNA, 15 bp, Homo sapiens
ggtggtaaggaaacg

SEQ ID NO: 420455 - DNA, 15 bp, Homo sapiens
tggtggtaaggaaac

SEQ ID NO: 420456 - DNA, 15 bp, Homo sapiens
gtggtggtaaggaaa

SEQ ID NO: 420457 - DNA, 15 bp, Homo sapiens
ggtggtggtaaggaa

SEQ ID NO: 420458 - DNA, 15 bp, Homo sapiens
aggtggtggtaagga

SEQ ID NO: 420459 - DNA, 15 bp, Homo sapiens
caggtggtggtaagg

SEQ ID NO: 420460 - DNA, 15 bp, Homo sapiens
gcaggtggtggtaag

SEQ ID NO: 420461 - DNA, 15 bp, Homo sapiens
tgcaggtggtggtaa

SEQ ID NO: 420462 - DNA, 15 bp, Homo sapiens
gtgcaggtggtggta

SEQ ID NO: 420463 - DNA, 15 bp, Homo sapiens
tgtgcaggtggtggt

SEQ ID NO: 420464 - DNA, 15 bp, Homo sapiens
ttgtgcaggtggtgg

SEQ ID NO: 420465 - DNA, 15 bp, Homo sapiens
cttgtgcaggtggtg

SEQ ID NO: 420466 - DNA, 15 bp, Homo sapiens
tcttgtgcaggtggt

SEQ ID NO: 420467 - DNA, 15 bp, Homo sapiens
ctcttgtgcaggtgg

SEQ ID NO: 420468 - DNA, 15 bp, Homo sapiens
gctcttgtgcaggtg

SEQ ID NO: 420469 - DNA, 15 bp, Homo sapiens
cgctcttgtgcaggt

SEQ ID NO: 420470 - DNA, 15 bp, Homo sapiens
tcgctcttgtgcagg

SEQ ID NO: 420471 - DNA, 15 bp, Homo sapiens
atcgctcttgtgcag

SEQ ID NO: 420472 - DNA, 15 bp, Homo sapiens
catcgctcttgtgca

SEQ ID NO: 420473 - DNA, 15 bp, Homo sapiens
acatcgctcttgtgc

SEQ ID NO: 420474 - DNA, 15 bp, Homo sapiens
cacatcgctcttgtg

SEQ ID NO: 420475 - DNA, 15 bp, Homo sapiens
tcacatcgctcttgt

SEQ ID NO: 420476 - DNA, 15 bp, Homo sapiens
atcacatcgctcttg

SEQ ID NO: 420477 - DNA, 15 bp, Homo sapiens
tatcacatcgctctt

SEQ ID NO: 420478 - DNA, 15 bp, Homo sapiens
ttatcacatcgctct

SEQ ID NO: 420479 - DNA, 15 bp, Homo sapiens
attatcacatcgctc

SEQ ID NO: 420480 - DNA, 15 bp, Homo sapiens
aattatcacatcgct

SEQ ID NO: 420481 - DNA, 15 bp, Homo sapiens
aaattatcacatcgc

SEQ ID NO: 420482 - DNA, 15 bp, Homo sapiens
taaattatcacatcg

SEQ ID NO: 420483 - DNA, 15 bp, Homo sapiens
ctaaattatcacatc

SEQ ID NO: 420484 - DNA, 15 bp, Homo sapiens
actaaattatcacat

SEQ ID NO: 420485 - DNA, 15 bp, Homo sapiens
gactaaattatcaca

SEQ ID NO: 420486 - DNA, 15 bp, Homo sapiens
tgactaaattatcac

SEQ ID NO: 420487 - DNA, 15 bp, Homo sapiens
atgactaaattatca

SEQ ID NO: 420488 - DNA, 15 bp, Homo sapiens
aatgactaaattatc

SEQ ID NO: 420489 - DNA, 15 bp, Homo sapiens
aaatgactaaattat

SEQ ID NO: 420490 - DNA, 15 bp, Homo sapiens
taaatgactaaatta

SEQ ID NO: 420491 - DNA, 15 bp, Homo sapiens
ttaaatgactaaatt

SEQ ID NO: 420492 - DNA, 15 bp, Homo sapiens
attaaatgactaaat

SEQ ID NO: 420493 - DNA, 15 bp, Homo sapiens
gattaaatgactaaa

SEQ ID NO: 420494 - DNA, 15 bp, Homo sapiens
tgattaaatgactaa

SEQ ID NO: 420495 - DNA, 15 bp, Homo sapiens
atgattaaatgacta

SEQ ID NO: 420496 - DNA, 15 bp, Homo sapiens
gatgattaaatgact

SEQ ID NO: 420497 - DNA, 15 bp, Homo sapiens
ggatgattaaatgac

SEQ ID NO: 420498 - DNA, 15 bp, Homo sapiens
tggatgattaaatga

SEQ ID NO: 420499 - DNA, 15 bp, Homo sapiens
atggatgattaaatg

SEQ ID NO: 420500 - DNA, 15 bp, Homo sapiens
aatggatgattaaat

SEQ ID NO: 420501 - DNA, 15 bp, Homo sapiens
aaatggatgattaaa

SEQ ID NO: 420502 - DNA, 15 bp, Homo sapiens
gaaatggatgattaa

SEQ ID NO: 420503 - DNA, 15 bp, Homo sapiens
tgaaatggatgatta

SEQ ID NO: 420504 - DNA, 15 bp, Homo sapiens
ctgaaatggatgatt

SEQ ID NO: 420505 - DNA, 15 bp, Homo sapiens
gctgaaatggatgat

SEQ ID NO: 420506 - DNA, 15 bp, Homo sapiens
agctgaaatggatga

SEQ ID NO: 420507 - DNA, 15 bp, Homo sapiens
cagctgaaatggatg

SEQ ID NO: 420508 - DNA, 15 bp, Homo sapiens
ccagctgaaatggat

SEQ ID NO: 420509 - DNA, 15 bp, Homo sapiens
tccagctgaaatgga

SEQ ID NO: 420510 - DNA, 15 bp, Homo sapiens
ctccagctgaaatgg

SEQ ID NO: 420511 - DNA, 15 bp, Homo sapiens
actccagctgaaatg

SEQ ID NO: 420512 - DNA, 15 bp, Homo sapiens
cactccagctgaaat

SEQ ID NO: 420513 - DNA, 15 bp, Homo sapiens
acactccagctgaaa

SEQ ID NO: 420514 - DNA, 15 bp, Homo sapiens
gacactccagctgaa

SEQ ID NO: 420515 - DNA, 15 bp, Homo sapiens
tgacactccagctga

SEQ ID NO: 420516 - DNA, 15 bp, Homo sapiens
ttgacactccagctg

SEQ ID NO: 420517 - DNA, 15 bp, Homo sapiens
cttgacactccagct

SEQ ID NO: 420518 - DNA, 15 bp, Homo sapiens
tcttgacactccagc

SEQ ID NO: 420519 - DNA, 15 bp, Homo sapiens
gtcttgacactccag

SEQ ID NO: 420520 - DNA, 15 bp, Homo sapiens
tgtcttgacactcca

SEQ ID NO: 420521 - DNA, 15 bp, Homo sapiens
atgtcttgacactcc

SEQ ID NO: 420522 - DNA, 15 bp, Homo sapiens
catgtcttgacactc

SEQ ID NO: 420523 - DNA, 15 bp, Homo sapiens
acatgtcttgacact

SEQ ID NO: 420524 - DNA, 15 bp, Homo sapiens
aacatgtcttgacac

SEQ ID NO: 420525 - DNA, 15 bp, Homo sapiens
taacatgtcttgaca

SEQ ID NO: 420526 - DNA, 15 bp, Homo sapiens
ataacatgtcttgac

SEQ ID NO: 420527 - DNA, 15 bp, Homo sapiens
cataacatgtcttga

SEQ ID NO: 420528 - DNA, 15 bp, Homo sapiens
gcataacatgtcttg

SEQ ID NO: 420529 - DNA, 15 bp, Homo sapiens
agcataacatgtctt

SEQ ID NO: 420530 - DNA, 15 bp, Homo sapiens
cagcataacatgtct

SEQ ID NO: 420531 - DNA, 15 bp, Homo sapiens
acagcataacatgtc

SEQ ID NO: 420532 - DNA, 15 bp, Homo sapiens
cacagcataacatgt

SEQ ID NO: 420533 - DNA, 15 bp, Homo sapiens
tcacagcataacatg

SEQ ID NO: 420534 - DNA, 15 bp, Homo sapiens
atcacagcataacat

SEQ ID NO: 420535 - DNA, 15 bp, Homo sapiens
aatcacagcataaca

SEQ ID NO: 420536 - DNA, 15 bp, Homo sapiens
caatcacagcataac

SEQ ID NO: 420537 - DNA, 15 bp, Homo sapiens
ccaatcacagcataa

SEQ ID NO: 420538 - DNA, 15 bp, Homo sapiens
accaatcacagcata

SEQ ID NO: 420539 - DNA, 15 bp, Homo sapiens
aaccaatcacagcat

SEQ ID NO: 420540 - DNA, 15 bp, Homo sapiens
taaccaatcacagca

SEQ ID NO: 420541 - DNA, 15 bp, Homo sapiens
ataaccaatcacagc

SEQ ID NO: 420542 - DNA, 15 bp, Homo sapiens
cataaccaatcacag

SEQ ID NO: 420543 - DNA, 15 bp, Homo sapiens
tcataaccaatcaca

SEQ ID NO: 420544 - DNA, 15 bp, Homo sapiens
ttcataaccaatcac

SEQ ID NO: 420545 - DNA, 15 bp, Homo sapiens
attcataaccaatca

SEQ ID NO: 420546 - DNA, 15 bp, Homo sapiens
cattcataaccaatc

SEQ ID NO: 420547 - DNA, 15 bp, Homo sapiens
ccattcataaccaat

SEQ ID NO: 420548 - DNA, 15 bp, Homo sapiens
gccattcataaccaa

SEQ ID NO: 420549 - DNA, 15 bp, Homo sapiens
tgccattcataacca

SEQ ID NO: 420550 - DNA, 15 bp, Homo sapiens
gtgccattcataacc

SEQ ID NO: 420551 - DNA, 15 bp, Homo sapiens
tgtgccattcataac

SEQ ID NO: 420552 - DNA, 15 bp, Homo sapiens
ctgtgccattcataa

SEQ ID NO: 420553 - DNA, 15 bp, Homo sapiens
gctgtgccattcata

SEQ ID NO: 420554 - DNA, 15 bp, Homo sapiens
tgctgtgccattcat

SEQ ID NO: 420555 - DNA, 15 bp, Homo sapiens
atgctgtgccattca

SEQ ID NO: 420556 - DNA, 15 bp, Homo sapiens
tatgctgtgccattc

SEQ ID NO: 420557 - DNA, 15 bp, Homo sapiens
ttatgctgtgccatt

SEQ ID NO: 420558 - DNA, 15 bp, Homo sapiens
tttatgctgtgccat

SEQ ID NO: 420559 - DNA, 15 bp, Homo sapiens
ctttatgctgtgcca

SEQ ID NO: 420560 - DNA, 15 bp, Homo sapiens
actttatgctgtgcc

SEQ ID NO: 420561 - DNA, 15 bp, Homo sapiens
aactttatgctgtgc

SEQ ID NO: 420562 - DNA, 15 bp, Homo sapiens
aaactttatgctgtg

SEQ ID NO: 420563 - DNA, 15 bp, Homo sapiens
aaaactttatgctgt

SEQ ID NO: 420564 - DNA, 15 bp, Homo sapiens
caaaactttatgctg

SEQ ID NO: 420565 - DNA, 15 bp, Homo sapiens
gcaaaactttatgct

SEQ ID NO: 420566 - DNA, 15 bp, Homo sapiens
tgcaaaactttatgc

SEQ ID NO: 420567 - DNA, 15 bp, Homo sapiens
atgcaaaactttatg

SEQ ID NO: 420568 - DNA, 15 bp, Homo sapiens
tatgcaaaactttat

SEQ ID NO: 420569 - DNA, 15 bp, Homo sapiens
ttatgcaaaacttta

SEQ ID NO: 420570 - DNA, 15 bp, Homo sapiens
gttatgcaaaacttt

SEQ ID NO: 420571 - DNA, 15 bp, Homo sapiens
agttatgcaaaactt

SEQ ID NO: 420572 - DNA, 15 bp, Homo sapiens
aagttatgcaaaact

SEQ ID NO: 420573 - DNA, 15 bp, Homo sapiens
caagttatgcaaaac

SEQ ID NO: 420574 - DNA, 15 bp, Homo sapiens
ccaagttatgcaaaa

SEQ ID NO: 420575 - DNA, 15 bp, Homo sapiens
tccaagttatgcaaa

SEQ ID NO: 420576 - DNA, 15 bp, Homo sapiens
ctccaagttatgcaa

SEQ ID NO: 420577 - DNA, 15 bp, Homo sapiens
actccaagttatgca

SEQ ID NO: 420578 - DNA, 15 bp, Homo sapiens
gactccaagttatgc

SEQ ID NO: 420579 - DNA, 15 bp, Homo sapiens
ggactccaagttatg

SEQ ID NO: 420580 - DNA, 15 bp, Homo sapiens
tggactccaagttat

SEQ ID NO: 420581 - DNA, 15 bp, Homo sapiens
atggactccaagtta

SEQ ID NO: 420582 - DNA, 15 bp, Homo sapiens
tatggactccaagtt

SEQ ID NO: 420583 - DNA, 15 bp, Homo sapiens
gtatggactccaagt

SEQ ID NO: 420584 - DNA, 15 bp, Homo sapiens
agtatggactccaag

SEQ ID NO: 420585 - DNA, 15 bp, Homo sapiens
cagtatggactccaa

SEQ ID NO: 420586 - DNA, 15 bp, Homo sapiens
gcagtatggactcca

SEQ ID NO: 420587 - DNA, 15 bp, Homo sapiens
tgcagtatggactcc

SEQ ID NO: 420588 - DNA, 15 bp, Homo sapiens
ctgcagtatggactc

SEQ ID NO: 420589 - DNA, 15 bp, Homo sapiens
gctgcagtatggact

SEQ ID NO: 420590 - DNA, 15 bp, Homo sapiens
ggctgcagtatggac

SEQ ID NO: 420591 - DNA, 15 bp, Homo sapiens
aggctgcagtatgga

SEQ ID NO: 420592 - DNA, 15 bp, Homo sapiens
caggctgcagtatgg

SEQ ID NO: 420593 - DNA, 15 bp, Homo sapiens
tcaggctgcagtatg

SEQ ID NO: 420594 - DNA, 15 bp, Homo sapiens
gtcaggctgcagtat

SEQ ID NO: 420595 - DNA, 15 bp, Homo sapiens
ggtcaggctgcagta

SEQ ID NO: 420596 - DNA, 15 bp, Homo sapiens
aggtcaggctgcagt

SEQ ID NO: 420597 - DNA, 15 bp, Homo sapiens
aaggtcaggctgcag

SEQ ID NO: 420598 - DNA, 15 bp, Homo sapiens
aaaggtcaggctgca

SEQ ID NO: 420599 - DNA, 15 bp, Homo sapiens
gaaaggtcaggctgc

SEQ ID NO: 420600 - DNA, 15 bp, Homo sapiens
tgaaaggtcaggctg

SEQ ID NO: 420601 - DNA, 15 bp, Homo sapiens
ctgaaaggtcaggct

SEQ ID NO: 420602 - DNA, 15 bp, Homo sapiens
tctgaaaggtcaggc

SEQ ID NO: 420603 - DNA, 15 bp, Homo sapiens
ttctgaaaggtcagg

SEQ ID NO: 420604 - DNA, 15 bp, Homo sapiens
attctgaaaggtcag

SEQ ID NO: 420605 - DNA, 15 bp, Homo sapiens
tattctgaaaggtca

SEQ ID NO: 420606 - DNA, 15 bp, Homo sapiens
atattctgaaaggtc

SEQ ID NO: 420607 - DNA, 15 bp, Homo sapiens
catattctgaaaggt

SEQ ID NO: 420608 - DNA, 15 bp, Homo sapiens
ccatattctgaaagg

SEQ ID NO: 420609 - DNA, 15 bp, Homo sapiens
tccatattctgaaag

SEQ ID NO: 420610 - DNA, 15 bp, Homo sapiens
ttccatattctgaaa

SEQ ID NO: 420611 - DNA, 15 bp, Homo sapiens
tttccatattctgaa

SEQ ID NO: 420612 - DNA, 15 bp, Homo sapiens
atttccatattctga

SEQ ID NO: 420613 - DNA, 15 bp, Homo sapiens
aatttccatattctg

SEQ ID NO: 420614 - DNA, 15 bp, Homo sapiens
gaatttccatattct

SEQ ID NO: 420615 - DNA, 15 bp, Homo sapiens
ggaatttccatattc

SEQ ID NO: 420616 - DNA, 15 bp, Homo sapiens
tggaatttccatatt

SEQ ID NO: 420617 - DNA, 15 bp, Homo sapiens
atggaatttccatat

SEQ ID NO: 420618 - DNA, 15 bp, Homo sapiens
catggaatttccata

SEQ ID NO: 420619 - DNA, 15 bp, Homo sapiens
ccatggaatttccat

SEQ ID NO: 420620 - DNA, 15 bp, Homo sapiens
gccatggaatttcca

SEQ ID NO: 420621 - DNA, 15 bp, Homo sapiens
tgccatggaatttcc

SEQ ID NO: 420622 - DNA, 15 bp, Homo sapiens
atgccatggaatttc

SEQ ID NO: 420623 - DNA, 15 bp, Homo sapiens
catgccatggaattt

SEQ ID NO: 420624 - DNA, 15 bp, Homo sapiens
ccatgccatggaatt

SEQ ID NO: 420625 - DNA, 15 bp, Homo sapiens
tccatgccatggaat

SEQ ID NO: 420626 - DNA, 15 bp, Homo sapiens
ttccatgccatggaa

SEQ ID NO: 420627 - DNA, 15 bp, Homo sapiens
attccatgccatgga

SEQ ID NO: 420628 - DNA, 15 bp, Homo sapiens
tattccatgccatgg

SEQ ID NO: 420629 - DNA, 15 bp, Homo sapiens
gtattccatgccatg

SEQ ID NO: 420630 - DNA, 15 bp, Homo sapiens
tgtattccatgccat

SEQ ID NO: 420631 - DNA, 15 bp, Homo sapiens
ttgtattccatgcca

SEQ ID NO: 420632 - DNA, 15 bp, Homo sapiens
cttgtattccatgcc

SEQ ID NO: 420633 - DNA, 15 bp, Homo sapiens
tcttgtattccatgc

SEQ ID NO: 420634 - DNA, 15 bp, Homo sapiens
ttcttgtattccatg

SEQ ID NO: 420635 - DNA, 15 bp, Homo sapiens
tttcttgtattccat

SEQ ID NO: 420636 - DNA, 15 bp, Homo sapiens
ttttcttgtattcca

SEQ ID NO: 420637 - DNA, 15 bp, Homo sapiens
attttcttgtattcc

SEQ ID NO: 420638 - DNA, 15 bp, Homo sapiens
cattttcttgtattc

SEQ ID NO: 420639 - DNA, 15 bp, Homo sapiens
acattttcttgtatt

SEQ ID NO: 420640 - DNA, 15 bp, Homo sapiens
cacattttcttgtat

SEQ ID NO: 420641 - DNA, 15 bp, Homo sapiens
acacattttcttgta

SEQ ID NO: 420642 - DNA, 15 bp, Homo sapiens
cacacattttcttgt

SEQ ID NO: 420643 - DNA, 15 bp, Homo sapiens
tcacacattttcttg

SEQ ID NO: 420644 - DNA, 15 bp, Homo sapiens
ttcacacattttctt

SEQ ID NO: 420645 - DNA, 15 bp, Homo sapiens
tttcacacattttct

SEQ ID NO: 420646 - DNA, 15 bp, Homo sapiens
atttcacacattttc

SEQ ID NO: 420647 - DNA, 15 bp, Homo sapiens
catttcacacatttt

SEQ ID NO: 420648 - DNA, 15 bp, Homo sapiens
acatttcacacattt

SEQ ID NO: 420649 - DNA, 15 bp, Homo sapiens
cacatttcacacatt

SEQ ID NO: 420650 - DNA, 15 bp, Homo sapiens
tcacatttcacacat

SEQ ID NO: 420651 - DNA, 15 bp, Homo sapiens
ctcacatttcacaca

SEQ ID NO: 420652 - DNA, 15 bp, Homo sapiens
cctcacatttcacac

SEQ ID NO: 420653 - DNA, 15 bp, Homo sapiens
ccctcacatttcaca

SEQ ID NO: 420654 - DNA, 15 bp, Homo sapiens
cccctcacatttcac

SEQ ID NO: 420655 - DNA, 15 bp, Homo sapiens
tcccctcacatttca

SEQ ID NO: 420656 - DNA, 15 bp, Homo sapiens
ttcccctcacatttc

SEQ ID NO: 420657 - DNA, 15 bp, Homo sapiens
tttcccctcacattt

SEQ ID NO: 420658 - DNA, 15 bp, Homo sapiens
ctttcccctcacatt

SEQ ID NO: 420659 - DNA, 15 bp, Homo sapiens
cctttcccctcacat

SEQ ID NO: 420660 - DNA, 15 bp, Homo sapiens
tcctttcccctcaca

SEQ ID NO: 420661 - DNA, 15 bp, Homo sapiens
atcctttcccctcac

SEQ ID NO: 420662 - DNA, 15 bp, Homo sapiens
catcctttcccctca

SEQ ID NO: 420663 - DNA, 15 bp, Homo sapiens
tcatcctttcccctc

SEQ ID NO: 420664 - DNA, 15 bp, Homo sapiens
ttcatcctttcccct

SEQ ID NO: 420665 - DNA, 15 bp, Homo sapiens
cttcatcctttcccc

SEQ ID NO: 420666 - DNA, 15 bp, Homo sapiens
tcttcatcctttccc

SEQ ID NO: 420667 - DNA, 15 bp, Homo sapiens
ttcttcatcctttcc

SEQ ID NO: 420668 - DNA, 15 bp, Homo sapiens
tttcttcatcctttc

SEQ ID NO: 420669 - DNA, 15 bp, Homo sapiens
ctttcttcatccttt

SEQ ID NO: 420670 - DNA, 15 bp, Homo sapiens
gctttcttcatcctt

SEQ ID NO: 420671 - DNA, 15 bp, Homo sapiens
tgctttcttcatcct

SEQ ID NO: 420672 - DNA, 15 bp, Homo sapiens
gtgctttcttcatcc

SEQ ID NO: 420673 - DNA, 15 bp, Homo sapiens
ggtgctttcttcatc

SEQ ID NO: 420674 - DNA, 15 bp, Homo sapiens
tggtgctttcttcat

SEQ ID NO: 420675 - DNA, 15 bp, Homo sapiens
atggtgctttcttca

SEQ ID NO: 420676 - DNA, 15 bp, Homo sapiens
gatggtgctttcttc

SEQ ID NO: 420677 - DNA, 15 bp, Homo sapiens
agatggtgctttctt

SEQ ID NO: 420678 - DNA, 15 bp, Homo sapiens
gagatggtgctttct

SEQ ID NO: 420679 - DNA, 15 bp, Homo sapiens
cgagatggtgctttc

SEQ ID NO: 420680 - DNA, 15 bp, Homo sapiens
acgagatggtgcttt

SEQ ID NO: 420681 - DNA, 15 bp, Homo sapiens
tacgagatggtgctt

SEQ ID NO: 420682 - DNA, 15 bp, Homo sapiens
atacgagatggtgct

SEQ ID NO: 420683 - DNA, 15 bp, Homo sapiens
aatacgagatggtgc

SEQ ID NO: 420684 - DNA, 15 bp, Homo sapiens
caatacgagatggtg

SEQ ID NO: 420685 - DNA, 15 bp, Homo sapiens
tcaatacgagatggt

SEQ ID NO: 420686 - DNA, 15 bp, Homo sapiens
atcaatacgagatgg

SEQ ID NO: 420687 - DNA, 15 bp, Homo sapiens
tatcaatacgagatg

SEQ ID NO: 420688 - DNA, 15 bp, Homo sapiens
gtatcaatacgagat

SEQ ID NO: 420689 - DNA, 15 bp, Homo sapiens
agtatcaatacgaga

SEQ ID NO: 420690 - DNA, 15 bp, Homo sapiens
aagtatcaatacgag

SEQ ID NO: 420691 - DNA, 15 bp, Homo sapiens
taagtatcaatacga

SEQ ID NO: 420692 - DNA, 15 bp, Homo sapiens
ttaagtatcaatacg

SEQ ID NO: 420693 - DNA, 15 bp, Homo sapiens
cttaagtatcaatac

SEQ ID NO: 420694 - DNA, 15 bp, Homo sapiens
ccttaagtatcaata

SEQ ID NO: 420695 - DNA, 15 bp, Homo sapiens
cccttaagtatcaat

SEQ ID NO: 420696 - DNA, 15 bp, Homo sapiens
ccccttaagtatcaa

SEQ ID NO: 420697 - DNA, 15 bp, Homo sapiens
gccccttaagtatca

SEQ ID NO: 420698 - DNA, 15 bp, Homo sapiens
tgccccttaagtatc

SEQ ID NO: 420699 - DNA, 15 bp, Homo sapiens
ttgccccttaagtat

SEQ ID NO: 420700 - DNA, 15 bp, Homo sapiens
tttgccccttaagta

SEQ ID NO: 420701 - DNA, 15 bp, Homo sapiens
ttttgccccttaagt

SEQ ID NO: 420702 - DNA, 15 bp, Homo sapiens
cttttgccccttaag

SEQ ID NO: 420703 - DNA, 15 bp, Homo sapiens
ccttttgccccttaa

SEQ ID NO: 420704 - DNA, 15 bp, Homo sapiens
tccttttgcccctta

SEQ ID NO: 420705 - DNA, 15 bp, Homo sapiens
ttccttttgcccctt

SEQ ID NO: 420706 - DNA, 15 bp, Homo sapiens
attccttttgcccct

SEQ ID NO: 420707 - DNA, 15 bp, Homo sapiens
cattccttttgcccc

SEQ ID NO: 420708 - DNA, 15 bp, Homo sapiens
acattccttttgccc

SEQ ID NO: 420709 - DNA, 15 bp, Homo sapiens
aatataatcaatccc

SEQ ID NO: 420710 - DNA, 15 bp, Homo sapiens
gaatataatcaatcc

SEQ ID NO: 420711 - DNA, 15 bp, Homo sapiens
tgaatataatcaatc

SEQ ID NO: 420712 - DNA, 15 bp, Homo sapiens
ctgaatataatcaat

SEQ ID NO: 420713 - DNA, 15 bp, Homo sapiens
cctgaatataatcaa

SEQ ID NO: 420714 - DNA, 15 bp, Homo sapiens
acctgaatataatca

SEQ ID NO: 420715 - DNA, 15 bp, Homo sapiens
aacctgaatataatc

SEQ ID NO: 420716 - DNA, 15 bp, Homo sapiens
gaacctgaatataat

SEQ ID NO: 420717 - DNA, 15 bp, Homo sapiens
tgaacctgaatataa

SEQ ID NO: 420718 - DNA, 15 bp, Homo sapiens
ctgaacctgaatata

SEQ ID NO: 420719 - DNA, 15 bp, Homo sapiens
cctgaacctgaatat

SEQ ID NO: 420720 - DNA, 15 bp, Homo sapiens
acctgaacctgaata

SEQ ID NO: 420721 - DNA, 15 bp, Homo sapiens
aacctgaacctgaat

SEQ ID NO: 420722 - DNA, 15 bp, Homo sapiens
aaacctgaacctgaa

SEQ ID NO: 420723 - DNA, 15 bp, Homo sapiens
aaaacctgaacctga

SEQ ID NO: 420724 - DNA, 15 bp, Homo sapiens
aaaaacctgaacctg

SEQ ID NO: 420725 - DNA, 15 bp, Homo sapiens
aaaaaacctgaacct

SEQ ID NO: 420726 - DNA, 15 bp, Homo sapiens
caaaaaacctgaacc

SEQ ID NO: 420727 - DNA, 15 bp, Homo sapiens
acaaaaaacctgaac

SEQ ID NO: 420728 - DNA, 15 bp, Homo sapiens
tacaaaaaacctgaa

SEQ ID NO: 420729 - DNA, 15 bp, Homo sapiens
ttacaaaaaacctga

SEQ ID NO: 420730 - DNA, 15 bp, Homo sapiens
cttacaaaaaacctg

SEQ ID NO: 420731 - DNA, 15 bp, Homo sapiens
tcttacaaaaaacct

SEQ ID NO: 420732 - DNA, 15 bp, Homo sapiens
gtcttacaaaaaacc

SEQ ID NO: 420733 - DNA, 15 bp, Homo sapiens
agtcttacaaaaaac

SEQ ID NO: 420734 - DNA, 15 bp, Homo sapiens
tagtcttacaaaaaa

SEQ ID NO: 420735 - DNA, 15 bp, Homo sapiens
ttagtcttacaaaaa

SEQ ID NO: 420736 - DNA, 15 bp, Homo sapiens
tttagtcttacaaaa

SEQ ID NO: 420737 - DNA, 15 bp, Homo sapiens
atttagtcttacaaa

SEQ ID NO: 420738 - DNA, 15 bp, Homo sapiens
gatttagtcttacaa

SEQ ID NO: 420739 - DNA, 15 bp, Homo sapiens
tgatttagtcttaca

SEQ ID NO: 420740 - DNA, 15 bp, Homo sapiens
atgatttagtcttac

SEQ ID NO: 420741 - DNA, 15 bp, Homo sapiens
tatgatttagtctta

SEQ ID NO: 420742 - DNA, 15 bp, Homo sapiens
ttatgatttagtctt

SEQ ID NO: 420743 - DNA, 15 bp, Homo sapiens
attatgatttagtct

SEQ ID NO: 420744 - DNA, 15 bp, Homo sapiens
aattatgatttagtc

SEQ ID NO: 420745 - DNA, 15 bp, Homo sapiens
caattatgatttagt

SEQ ID NO: 420746 - DNA, 15 bp, Homo sapiens
tcaattatgatttag

SEQ ID NO: 420747 - DNA, 15 bp, Homo sapiens
atcaattatgattta

SEQ ID NO: 420748 - DNA, 15 bp, Homo sapiens
tatcaattatgattt

SEQ ID NO: 420749 - DNA, 15 bp, Homo sapiens
atatcaattatgatt

SEQ ID NO: 420750 - DNA, 15 bp, Homo sapiens
aatatcaattatgat

SEQ ID NO: 420751 - DNA, 15 bp, Homo sapiens
caatatcaattatga

SEQ ID NO: 420752 - DNA, 15 bp, Homo sapiens
acaatatcaattatg

SEQ ID NO: 420753 - DNA, 15 bp, Homo sapiens
tacaatatcaattat

SEQ ID NO: 420754 - DNA, 15 bp, Homo sapiens
ctacaatatcaatta

SEQ ID NO: 420755 - DNA, 15 bp, Homo sapiens
actacaatatcaatt

SEQ ID NO: 420756 - DNA, 15 bp, Homo sapiens
aactacaatatcaat

SEQ ID NO: 420757 - DNA, 15 bp, Homo sapiens
caactacaatatcaa

SEQ ID NO: 420758 - DNA, 15 bp, Homo sapiens
acaactacaatatca

SEQ ID NO: 420759 - DNA, 15 bp, Homo sapiens
aacaactacaatatc

SEQ ID NO: 420760 - DNA, 15 bp, Homo sapiens
gaacaactacaatat

SEQ ID NO: 420761 - DNA, 15 bp, Homo sapiens
agaacaactacaata

SEQ ID NO: 420762 - DNA, 15 bp, Homo sapiens
gagaacaactacaat

SEQ ID NO: 420763 - DNA, 15 bp, Homo sapiens
agagaacaactacaa

SEQ ID NO: 420764 - DNA, 15 bp, Homo sapiens
aagagaacaactaca

SEQ ID NO: 420765 - DNA, 15 bp, Homo sapiens
aaagagaacaactac

SEQ ID NO: 420766 - DNA, 15 bp, Homo sapiens
aaaagagaacaacta

SEQ ID NO: 420767 - DNA, 15 bp, Homo sapiens
aaaaagagaacaact

SEQ ID NO: 420768 - DNA, 15 bp, Homo sapiens
caaaaagagaacaac

SEQ ID NO: 420769 - DNA, 15 bp, Homo sapiens
tcaaaaagagaacaa

SEQ ID NO: 420770 - DNA, 15 bp, Homo sapiens
atcaaaaagagaaca

SEQ ID NO: 420771 - DNA, 15 bp, Homo sapiens
tatcaaaaagagaac

SEQ ID NO: 420772 - DNA, 15 bp, Homo sapiens
ttatcaaaaagagaa

SEQ ID NO: 420773 - DNA, 15 bp, Homo sapiens
attatcaaaaagaga

SEQ ID NO: 420774 - DNA, 15 bp, Homo sapiens
tattatcaaaaagag

SEQ ID NO: 420775 - DNA, 15 bp, Homo sapiens
ttattatcaaaaaga

SEQ ID NO: 420776 - DNA, 15 bp, Homo sapiens
tttattatcaaaaag

SEQ ID NO: 420777 - DNA, 15 bp, Homo sapiens
ttttattatcaaaaa

SEQ ID NO: 420778 - DNA, 15 bp, Homo sapiens
tttttattatcaaaa

SEQ ID NO: 420779 - DNA, 15 bp, Homo sapiens
atttttattatcaaa

SEQ ID NO: 420780 - DNA, 15 bp, Homo sapiens
gatttttattatcaa

SEQ ID NO: 420781 - DNA, 15 bp, Homo sapiens
tgatttttattatca

SEQ ID NO: 420782 - DNA, 15 bp, Homo sapiens
atgatttttattatc

SEQ ID NO: 420783 - DNA, 15 bp, Homo sapiens
aatgatttttattat

SEQ ID NO: 420784 - DNA, 15 bp, Homo sapiens
gaatgatttttatta

SEQ ID NO: 420785 - DNA, 15 bp, Homo sapiens
tgaatgatttttatt

SEQ ID NO: 420786 - DNA, 15 bp, Homo sapiens
atgaatgatttttat

SEQ ID NO: 420787 - DNA, 15 bp, Homo sapiens
catgaatgattttta

SEQ ID NO: 420788 - DNA, 15 bp, Homo sapiens
tcatgaatgattttt

SEQ ID NO: 420789 - DNA, 15 bp, Homo sapiens
atcatgaatgatttt

SEQ ID NO: 420790 - DNA, 15 bp, Homo sapiens
gatcatgaatgattt

SEQ ID NO: 420791 - DNA, 15 bp, Homo sapiens
tgatcatgaatgatt

SEQ ID NO: 420792 - DNA, 15 bp, Homo sapiens
ttgatcatgaatgat

SEQ ID NO: 420793 - DNA, 15 bp, Homo sapiens
cttgatcatgaatga

SEQ ID NO: 420794 - DNA, 15 bp, Homo sapiens
ccttgatcatgaatg

SEQ ID NO: 420795 - DNA, 15 bp, Homo sapiens
accttgatcatgaat

SEQ ID NO: 420796 - DNA, 15 bp, Homo sapiens
gaccttgatcatgaa

SEQ ID NO: 420797 - DNA, 15 bp, Homo sapiens
agaccttgatcatga

SEQ ID NO: 420798 - DNA, 15 bp, Homo sapiens
gagaccttgatcatg

SEQ ID NO: 420799 - DNA, 15 bp, Homo sapiens
tgagaccttgatcat

SEQ ID NO: 420800 - DNA, 15 bp, Homo sapiens
ctgagaccttgatca

SEQ ID NO: 420801 - DNA, 15 bp, Homo sapiens
actgagaccttgatc

SEQ ID NO: 420802 - DNA, 15 bp, Homo sapiens
tactgagaccttgat

SEQ ID NO: 420803 - DNA, 15 bp, Homo sapiens
gtactgagaccttga

SEQ ID NO: 420804 - DNA, 15 bp, Homo sapiens
tgtactgagaccttg

SEQ ID NO: 420805 - DNA, 15 bp, Homo sapiens
atgtactgagacctt

SEQ ID NO: 420806 - DNA, 15 bp, Homo sapiens
aatgtactgagacct

SEQ ID NO: 420807 - DNA, 15 bp, Homo sapiens
taatgtactgagacc

SEQ ID NO: 420808 - DNA, 15 bp, Homo sapiens
ttaatgtactgagac

SEQ ID NO: 420809 - DNA, 15 bp, Homo sapiens
gttaatgtactgaga

SEQ ID NO: 420810 - DNA, 15 bp, Homo sapiens
ggttaatgtactgag

SEQ ID NO: 420811 - DNA, 15 bp, Homo sapiens
gggttaatgtactga

SEQ ID NO: 420812 - DNA, 15 bp, Homo sapiens
tgggttaatgtactg

SEQ ID NO: 420813 - DNA, 15 bp, Homo sapiens
atgggttaatgtact

SEQ ID NO: 420814 - DNA, 15 bp, Homo sapiens
aatgggttaatgtac

SEQ ID NO: 420815 - DNA, 15 bp, Homo sapiens
taatgggttaatgta

SEQ ID NO: 420816 - DNA, 15 bp, Homo sapiens
ataatgggttaatgt

SEQ ID NO: 420817 - DNA, 15 bp, Homo sapiens
cataatgggttaatg

SEQ ID NO: 420818 - DNA, 15 bp, Homo sapiens
tcataatgggttaat

SEQ ID NO: 420819 - DNA, 15 bp, Homo sapiens
ctcataatgggttaa

SEQ ID NO: 420820 - DNA, 15 bp, Homo sapiens
actcataatgggtta

SEQ ID NO: 420821 - DNA, 15 bp, Homo sapiens
aactcataatgggtt

SEQ ID NO: 420822 - DNA, 15 bp, Homo sapiens
caactcataatgggt

SEQ ID NO: 420823 - DNA, 15 bp, Homo sapiens
gcaactcataatggg

SEQ ID NO: 420824 - DNA, 15 bp, Homo sapiens
tgcaactcataatgg

SEQ ID NO: 420825 - DNA, 15 bp, Homo sapiens
ttgcaactcataatg

SEQ ID NO: 420826 - DNA, 15 bp, Homo sapiens
tttgcaactcataat

SEQ ID NO: 420827 - DNA, 15 bp, Homo sapiens
ttttgcaactcataa

SEQ ID NO: 420828 - DNA, 15 bp, Homo sapiens
attttgcaactcata

SEQ ID NO: 420829 - DNA, 15 bp, Homo sapiens
cattttgcaactcat

SEQ ID NO: 420830 - DNA, 15 bp, Homo sapiens
tcattttgcaactca

SEQ ID NO: 420831 - DNA, 15 bp, Homo sapiens
atcattttgcaactc

SEQ ID NO: 420832 - DNA, 15 bp, Homo sapiens
catcattttgcaact

SEQ ID NO: 420833 - DNA, 15 bp, Homo sapiens
tcatcattttgcaac

SEQ ID NO: 420834 - DNA, 15 bp, Homo sapiens
atcatcattttgcaa

SEQ ID NO: 420835 - DNA, 15 bp, Homo sapiens
tatcatcattttgca

SEQ ID NO: 420836 - DNA, 15 bp, Homo sapiens
ctatcatcattttgc

SEQ ID NO: 420837 - DNA, 15 bp, Homo sapiens
actatcatcattttg

SEQ ID NO: 420838 - DNA, 15 bp, Homo sapiens
aactatcatcatttt

SEQ ID NO: 420839 - DNA, 15 bp, Homo sapiens
aaactatcatcattt

SEQ ID NO: 420840 - DNA, 15 bp, Homo sapiens
taaactatcatcatt

SEQ ID NO: 420841 - DNA, 15 bp, Homo sapiens
ttaaactatcatcat

SEQ ID NO: 420842 - DNA, 15 bp, Homo sapiens
attaaactatcatca

SEQ ID NO: 420843 - DNA, 15 bp, Homo sapiens
aattaaactatcatc

SEQ ID NO: 420844 - DNA, 15 bp, Homo sapiens
gaattaaactatcat

SEQ ID NO: 420845 - DNA, 15 bp, Homo sapiens
agaattaaactatca

SEQ ID NO: 420846 - DNA, 15 bp, Homo sapiens
tagaattaaactatc

SEQ ID NO: 420847 - DNA, 15 bp, Homo sapiens
gtagaattaaactat

SEQ ID NO: 420848 - DNA, 15 bp, Homo sapiens
tagtagaattaaact

SEQ ID NO: 420849 - DNA, 15 bp, Homo sapiens
atagtagaattaaac

SEQ ID NO: 420850 - DNA, 15 bp, Homo sapiens
tatagtagaattaaa

SEQ ID NO: 420851 - DNA, 15 bp, Homo sapiens
gtatagtagaattaa

SEQ ID NO: 420852 - DNA, 15 bp, Homo sapiens
ggtatagtagaatta

SEQ ID NO: 420853 - DNA, 15 bp, Homo sapiens
tggtatagtagaatt

SEQ ID NO: 420854 - DNA, 15 bp, Homo sapiens
atggtatagtagaat

SEQ ID NO: 420855 - DNA, 15 bp, Homo sapiens
gatggtatagtagaa

SEQ ID NO: 420856 - DNA, 15 bp, Homo sapiens
ggatggtatagtaga

SEQ ID NO: 420857 - DNA, 15 bp, Homo sapiens
aggatggtatagtag

SEQ ID NO: 420858 - DNA, 15 bp, Homo sapiens
gaggatggtatagta

SEQ ID NO: 420859 - DNA, 15 bp, Homo sapiens
tgaggatggtatagt

SEQ ID NO: 420860 - DNA, 15 bp, Homo sapiens
atgaggatggtatag

SEQ ID NO: 420861 - DNA, 15 bp, Homo sapiens
aatgaggatggtata

SEQ ID NO: 420862 - DNA, 15 bp, Homo sapiens
taatgaggatggtat

SEQ ID NO: 420863 - DNA, 15 bp, Homo sapiens
ttaatgaggatggta

SEQ ID NO: 420864 - DNA, 15 bp, Homo sapiens
gttaatgaggatggt

SEQ ID NO: 420865 - DNA, 15 bp, Homo sapiens
agttaatgaggatgg

SEQ ID NO: 420866 - DNA, 15 bp, Homo sapiens
tagttaatgaggatg

SEQ ID NO: 420867 - DNA, 15 bp, Homo sapiens
ttagttaatgaggat

SEQ ID NO: 420868 - DNA, 15 bp, Homo sapiens
cttagttaatgagga

SEQ ID NO: 420869 - DNA, 15 bp, Homo sapiens
acttagttaatgagg

SEQ ID NO: 420870 - DNA, 15 bp, Homo sapiens
aacttagttaatgag

SEQ ID NO: 420871 - DNA, 15 bp, Homo sapiens
taacttagttaatga

SEQ ID NO: 420872 - DNA, 15 bp, Homo sapiens
ttaacttagttaatg

SEQ ID NO: 420873 - DNA, 15 bp, Homo sapiens
tttaacttagttaat

SEQ ID NO: 420874 - DNA, 15 bp, Homo sapiens
atttaacttagttaa

SEQ ID NO: 420875 - DNA, 15 bp, Homo sapiens
tatttaacttagtta

SEQ ID NO: 420876 - DNA, 15 bp, Homo sapiens
gtatttaacttagtt

SEQ ID NO: 420877 - DNA, 15 bp, Homo sapiens
agtatttaacttagt

SEQ ID NO: 420878 - DNA, 15 bp, Homo sapiens
aagtatttaacttag

SEQ ID NO: 420879 - DNA, 15 bp, Homo sapiens
gaagtatttaactta

SEQ ID NO: 420880 - DNA, 15 bp, Homo sapiens
agaagtatttaactt

SEQ ID NO: 420881 - DNA, 15 bp, Homo sapiens
tagaagtatttaact

SEQ ID NO: 420882 - DNA, 15 bp, Homo sapiens
gtagaagtatttaac

SEQ ID NO: 420883 - DNA, 15 bp, Homo sapiens
tgtagaagtatttaa

SEQ ID NO: 420884 - DNA, 15 bp, Homo sapiens
ttgtagaagtattta

SEQ ID NO: 420885 - DNA, 15 bp, Homo sapiens
tttgtagaagtattt

SEQ ID NO: 420886 - DNA, 15 bp, Homo sapiens
ctttgtagaagtatt

SEQ ID NO: 420887 - DNA, 15 bp, Homo sapiens
tctttgtagaagtat

SEQ ID NO: 420888 - DNA, 15 bp, Homo sapiens
ttctttgtagaagta

SEQ ID NO: 420889 - DNA, 15 bp, Homo sapiens
tttctttgtagaagt

SEQ ID NO: 420890 - DNA, 15 bp, Homo sapiens
ttttctttgtagaag

SEQ ID NO: 420891 - DNA, 15 bp, Homo sapiens
tttttctttgtagaa

SEQ ID NO: 420892 - DNA, 15 bp, Homo sapiens
gtttttctttgtaga

SEQ ID NO: 420893 - DNA, 15 bp, Homo sapiens
agtttttctttgtag

SEQ ID NO: 420894 - DNA, 15 bp, Homo sapiens
aagtttttctttgta

SEQ ID NO: 420895 - DNA, 15 bp, Homo sapiens
aaagtttttctttgt

SEQ ID NO: 420896 - DNA, 15 bp, Homo sapiens
taaagtttttctttg

SEQ ID NO: 420897 - DNA, 15 bp, Homo sapiens
ttaaagtttttcttt

SEQ ID NO: 420898 - DNA, 15 bp, Homo sapiens
attaaagtttttctt

SEQ ID NO: 420899 - DNA, 15 bp, Homo sapiens
aattaaagtttttct

SEQ ID NO: 420900 - DNA, 15 bp, Homo sapiens
gaattaaagtttttc

SEQ ID NO: 420901 - DNA, 15 bp, Homo sapiens
tgaattaaagttttt

SEQ ID NO: 420902 - DNA, 15 bp, Homo sapiens
gtgaattaaagtttt

SEQ ID NO: 420903 - DNA, 15 bp, Homo sapiens
ggtgaattaaagttt

SEQ ID NO: 420904 - DNA, 15 bp, Homo sapiens
aggtgaattaaagtt

SEQ ID NO: 420905 - DNA, 15 bp, Homo sapiens
taggtgaattaaagt

SEQ ID NO: 420906 - DNA, 15 bp, Homo sapiens
gtaggtgaattaaag

SEQ ID NO: 420907 - DNA, 15 bp, Homo sapiens
agtaggtgaattaaa

SEQ ID NO: 420908 - DNA, 15 bp, Homo sapiens
tagtaggtgaattaa

SEQ ID NO: 420909 - DNA, 15 bp, Homo sapiens
atagtaggtgaatta

SEQ ID NO: 420910 - DNA, 15 bp, Homo sapiens
aatagtaggtgaatt

SEQ ID NO: 420911 - DNA, 15 bp, Homo sapiens
aaatagtaggtgaat

SEQ ID NO: 420912 - DNA, 15 bp, Homo sapiens
caaatagtaggtgaa

SEQ ID NO: 420913 - DNA, 15 bp, Homo sapiens
ccaaatagtaggtga

SEQ ID NO: 420914 - DNA, 15 bp, Homo sapiens
accaaatagtaggtg

SEQ ID NO: 420915 - DNA, 15 bp, Homo sapiens
aaccaaatagtaggt

SEQ ID NO: 420916 - DNA, 15 bp, Homo sapiens
aaaccaaatagtagg

SEQ ID NO: 420917 - DNA, 15 bp, Homo sapiens
gaaaccaaatagtag

SEQ ID NO: 420918 - DNA, 15 bp, Homo sapiens
ggaaaccaaatagta

SEQ ID NO: 420919 - DNA, 15 bp, Homo sapiens
gggaaaccaaatagt

SEQ ID NO: 420920 - DNA, 15 bp, Homo sapiens
tgggaaaccaaatag

SEQ ID NO: 420921 - DNA, 15 bp, Homo sapiens
ctgggaaaccaaata

SEQ ID NO: 420922 - DNA, 15 bp, Homo sapiens
actgggaaaccaaat

SEQ ID NO: 420923 - DNA, 15 bp, Homo sapiens
cactgggaaaccaaa

SEQ ID NO: 420924 - DNA, 15 bp, Homo sapiens
gcactgggaaaccaa

SEQ ID NO: 420925 - DNA, 15 bp, Homo sapiens
agcactgggaaacca

SEQ ID NO: 420926 - DNA, 15 bp, Homo sapiens
aagcactgggaaacc

SEQ ID NO: 420927 - DNA, 15 bp, Homo sapiens
aaagcactgggaaac

SEQ ID NO: 420928 - DNA, 15 bp, Homo sapiens
taaagcactgggaaa

SEQ ID NO: 420929 - DNA, 15 bp, Homo sapiens
ctaaagcactgggaa

SEQ ID NO: 420930 - DNA, 15 bp, Homo sapiens
actaaagcactggga

SEQ ID NO: 420931 - DNA, 15 bp, Homo sapiens
aactaaagcactggg

SEQ ID NO: 420932 - DNA, 15 bp, Homo sapiens
taactaaagcactgg

SEQ ID NO: 420933 - DNA, 15 bp, Homo sapiens
ttaactaaagcactg

SEQ ID NO: 420934 - DNA, 15 bp, Homo sapiens
attaactaaagcact

SEQ ID NO: 420935 - DNA, 15 bp, Homo sapiens
tattaactaaagcac

SEQ ID NO: 420936 - DNA, 15 bp, Homo sapiens
ttattaactaaagca

SEQ ID NO: 420937 - DNA, 15 bp, Homo sapiens
tttattaactaaagc

SEQ ID NO: 420938 - DNA, 15 bp, Homo sapiens
ttttattaactaaag

SEQ ID NO: 420939 - DNA, 15 bp, Homo sapiens
cttttattaactaaa

SEQ ID NO: 420940 - DNA, 15 bp, Homo sapiens
tcttttattaactaa

SEQ ID NO: 420941 - DNA, 15 bp, Homo sapiens
ttcttttattaacta

SEQ ID NO: 420942 - DNA, 15 bp, Homo sapiens
tttcttttattaact

SEQ ID NO: 420943 - DNA, 15 bp, Homo sapiens
atttcttttattaac

SEQ ID NO: 420944 - DNA, 15 bp, Homo sapiens
tatttcttttattaa

SEQ ID NO: 420945 - DNA, 15 bp, Homo sapiens
atatttcttttatta

SEQ ID NO: 420946 - DNA, 15 bp, Homo sapiens
tatatttcttttatt

SEQ ID NO: 420947 - DNA, 15 bp, Homo sapiens
ctatatttcttttat

SEQ ID NO: 420948 - DNA, 15 bp, Homo sapiens
cctatatttctttta

SEQ ID NO: 420949 - DNA, 15 bp, Homo sapiens
tcctatatttctttt

SEQ ID NO: 420950 - DNA, 15 bp, Homo sapiens
atcctatatttcttt

SEQ ID NO: 420951 - DNA, 15 bp, Homo sapiens
tatcctatatttctt

SEQ ID NO: 420952 - DNA, 15 bp, Homo sapiens
ttatcctatatttct

SEQ ID NO: 420953 - DNA, 15 bp, Homo sapiens
tttatcctatatttc

SEQ ID NO: 420954 - DNA, 15 bp, Homo sapiens
atttatcctatattt

SEQ ID NO: 420955 - DNA, 15 bp, Homo sapiens
catttatcctatatt

SEQ ID NO: 420956 - DNA, 15 bp, Homo sapiens
tcatttatcctatat

SEQ ID NO: 420957 - DNA, 15 bp, Homo sapiens
atcatttatcctata

SEQ ID NO: 420958 - DNA, 15 bp, Homo sapiens
catcatttatcctat

SEQ ID NO: 420959 - DNA, 15 bp, Homo sapiens
ccatcatttatccta

SEQ ID NO: 420960 - DNA, 15 bp, Homo sapiens
tccatcatttatcct

SEQ ID NO: 420961 - DNA, 15 bp, Homo sapiens
atccatcatttatcc

SEQ ID NO: 420962 - DNA, 15 bp, Homo sapiens
aatccatcatttatc

SEQ ID NO: 420963 - DNA, 15 bp, Homo sapiens
gaatccatcatttat

SEQ ID NO: 420964 - DNA, 15 bp, Homo sapiens
agaatccatcattta

SEQ ID NO: 420965 - DNA, 15 bp, Homo sapiens
aagaatccatcattt

SEQ ID NO: 420966 - DNA, 15 bp, Homo sapiens
aaagaatccatcatt

SEQ ID NO: 420967 - DNA, 15 bp, Homo sapiens
aaaagaatccatcat

SEQ ID NO: 420968 - DNA, 15 bp, Homo sapiens
gaaaagaatccatca

SEQ ID NO: 420969 - DNA, 15 bp, Homo sapiens
ggaaaagaatccatc

SEQ ID NO: 420970 - DNA, 15 bp, Homo sapiens
aggaaaagaatccat

SEQ ID NO: 420971 - DNA, 15 bp, Homo sapiens
taggaaaagaatcca

SEQ ID NO: 420972 - DNA, 15 bp, Homo sapiens
ataggaaaagaatcc

SEQ ID NO: 420973 - DNA, 15 bp, Homo sapiens
tataggaaaagaatc

SEQ ID NO: 420974 - DNA, 15 bp, Homo sapiens
gtataggaaaagaat

SEQ ID NO: 420975 - DNA, 15 bp, Homo sapiens
agtataggaaaagaa

SEQ ID NO: 420976 - DNA, 15 bp, Homo sapiens
aagtataggaaaaga

SEQ ID NO: 420977 - DNA, 15 bp, Homo sapiens
taagtataggaaaag

SEQ ID NO: 420978 - DNA, 15 bp, Homo sapiens
gtaagtataggaaaa

SEQ ID NO: 420979 - DNA, 15 bp, Homo sapiens
ggtaagtataggaaa

SEQ ID NO: 420980 - DNA, 15 bp, Homo sapiens
tggtaagtataggaa

SEQ ID NO: 420981 - DNA, 15 bp, Homo sapiens
ctggtaagtatagga

SEQ ID NO: 420982 - DNA, 15 bp, Homo sapiens
cctggtaagtatagg

SEQ ID NO: 420983 - DNA, 15 bp, Homo sapiens
acctggtaagtatag

SEQ ID NO: 420984 - DNA, 15 bp, Homo sapiens
aacctggtaagtata

SEQ ID NO: 420985 - DNA, 15 bp, Homo sapiens
aaacctggtaagtat

SEQ ID NO: 420986 - DNA, 15 bp, Homo sapiens
gaaacctggtaagta

SEQ ID NO: 420987 - DNA, 15 bp, Homo sapiens
tgaaacctggtaagt

SEQ ID NO: 420988 - DNA, 15 bp, Homo sapiens
ttgaaacctggtaag

SEQ ID NO: 420989 - DNA, 15 bp, Homo sapiens
attgaaacctggtaa

SEQ ID NO: 420990 - DNA, 15 bp, Homo sapiens
tattgaaacctggta

SEQ ID NO: 420991 - DNA, 15 bp, Homo sapiens
atattgaaacctggt

SEQ ID NO: 420992 - DNA, 15 bp, Homo sapiens
tatattgaaacctgg

SEQ ID NO: 420993 - DNA, 15 bp, Homo sapiens
ttatattgaaacctg

SEQ ID NO: 420994 - DNA, 15 bp, Homo sapiens
attatattgaaacct

SEQ ID NO: 420995 - DNA, 15 bp, Homo sapiens
tattatattgaaacc

SEQ ID NO: 420996 - DNA, 15 bp, Homo sapiens
ttattatattgaaac

SEQ ID NO: 420997 - DNA, 15 bp, Homo sapiens
cttattatattgaaa

SEQ ID NO: 420998 - DNA, 15 bp, Homo sapiens
acttattatattgaa

SEQ ID NO: 420999 - DNA, 15 bp, Homo sapiens
aacttattatattga

SEQ ID NO: 421000 - DNA, 15 bp, Homo sapiens
caacttattatattg

SEQ ID NO: 421001 - DNA, 15 bp, Homo sapiens
tcaacttattatatt

SEQ ID NO: 421002 - DNA, 15 bp, Homo sapiens
atcaacttattatat

SEQ ID NO: 421003 - DNA, 15 bp, Homo sapiens
aatcaacttattata

SEQ ID NO: 421004 - DNA, 15 bp, Homo sapiens
gaatcaacttattat

SEQ ID NO: 421005 - DNA, 15 bp, Homo sapiens
ggaatcaacttatta

SEQ ID NO: 421006 - DNA, 15 bp, Homo sapiens
gggaatcaacttatt

SEQ ID NO: 421007 - DNA, 15 bp, Homo sapiens
agggaatcaacttat

SEQ ID NO: 421008 - DNA, 15 bp, Homo sapiens
tagggaatcaactta

SEQ ID NO: 421009 - DNA, 15 bp, Homo sapiens
ctagggaatcaactt

SEQ ID NO: 421010 - DNA, 15 bp, Homo sapiens
gctagggaatcaact

SEQ ID NO: 421011 - DNA, 15 bp, Homo sapiens
tgctagggaatcaac

SEQ ID NO: 421012 - DNA, 15 bp, Homo sapiens
atgctagggaatcaa

SEQ ID NO: 421013 - DNA, 15 bp, Homo sapiens
gatgctagggaatca

SEQ ID NO: 421014 - DNA, 15 bp, Homo sapiens
agatgctagggaatc

SEQ ID NO: 421015 - DNA, 15 bp, Homo sapiens
aagatgctagggaat

SEQ ID NO: 421016 - DNA, 15 bp, Homo sapiens
gaagatgctagggaa

SEQ ID NO: 421017 - DNA, 15 bp, Homo sapiens
agaagatgctaggga

SEQ ID NO: 421018 - DNA, 15 bp, Homo sapiens
tagaagatgctaggg

SEQ ID NO: 421019 - DNA, 15 bp, Homo sapiens
ttagaagatgctagg

SEQ ID NO: 421020 - DNA, 15 bp, Homo sapiens
attagaagatgctag

SEQ ID NO: 421021 - DNA, 15 bp, Homo sapiens
cattagaagatgcta

SEQ ID NO: 421022 - DNA, 15 bp, Homo sapiens
ccattagaagatgct

SEQ ID NO: 421023 - DNA, 15 bp, Homo sapiens
accattagaagatgc

SEQ ID NO: 421024 - DNA, 15 bp, Homo sapiens
caccattagaagatg

SEQ ID NO: 421025 - DNA, 15 bp, Homo sapiens
tcaccattagaagat

SEQ ID NO: 421026 - DNA, 15 bp, Homo sapiens
gtcaccattagaaga

SEQ ID NO: 421027 - DNA, 15 bp, Homo sapiens
ggtcaccattagaag

SEQ ID NO: 421028 - DNA, 15 bp, Homo sapiens
tggtcaccattagaa

SEQ ID NO: 421029 - DNA, 15 bp, Homo sapiens
ttggtcaccattaga

SEQ ID NO: 421030 - DNA, 15 bp, Homo sapiens
attggtcaccattag

SEQ ID NO: 421031 - DNA, 15 bp, Homo sapiens
aattggtcaccatta

SEQ ID NO: 421032 - DNA, 15 bp, Homo sapiens
taattggtcaccatt

SEQ ID NO: 421033 - DNA, 15 bp, Homo sapiens
ctaattggtcaccat

SEQ ID NO: 421034 - DNA, 15 bp, Homo sapiens
actaattggtcacca

SEQ ID NO: 421035 - DNA, 15 bp, Homo sapiens
aactaattggtcacc

SEQ ID NO: 421036 - DNA, 15 bp, Homo sapiens
caactaattggtcac

SEQ ID NO: 421037 - DNA, 15 bp, Homo sapiens
acaactaattggtca

SEQ ID NO: 421038 - DNA, 15 bp, Homo sapiens
aacaactaattggtc

SEQ ID NO: 421039 - DNA, 15 bp, Homo sapiens
aaacaactaattggt

SEQ ID NO: 421040 - DNA, 15 bp, Homo sapiens
aaaacaactaattgg

SEQ ID NO: 421041 - DNA, 15 bp, Homo sapiens
aaaaacaactaattg

SEQ ID NO: 421042 - DNA, 15 bp, Homo sapiens
aaaaaacaactaatt

SEQ ID NO: 421043 - DNA, 15 bp, Homo sapiens
aaaaaaacaactaat

SEQ ID NO: 421044 - DNA, 15 bp, Homo sapiens
aaaaaaaacaactaa

SEQ ID NO: 421045 - DNA, 15 bp, Homo sapiens
taaaaaaaacaacta

SEQ ID NO: 421046 - DNA, 15 bp, Homo sapiens
ttaaaaaaaacaact

SEQ ID NO: 421047 - DNA, 15 bp, Homo sapiens
tttaaaaaaaacaac

SEQ ID NO: 421048 - DNA, 15 bp, Homo sapiens
ttttaaaaaaaacaa

SEQ ID NO: 421049 - DNA, 15 bp, Homo sapiens
tttttaaaaaaaaca

SEQ ID NO: 421050 - DNA, 15 bp, Homo sapiens
ttttttaaaaaaaac

SEQ ID NO: 421051 - DNA, 15 bp, Homo sapiens
tttttttaaaaaaaa

SEQ ID NO: 421052 - DNA, 15 bp, Homo sapiens
ttttttttaaaaaaa

SEQ ID NO: 421053 - DNA, 15 bp, Homo sapiens
tttttttttaaaaaa

SEQ ID NO: 421054 - DNA, 15 bp, Homo sapiens
ttttttttttaaaaa

SEQ ID NO: 421055 - DNA, 15 bp, Homo sapiens
tttttttttttaaaa

SEQ ID NO: 421056 - DNA, 15 bp, Homo sapiens
agtgctttttttttt

SEQ ID NO: 421057 - DNA, 15 bp, Homo sapiens
tagtgcttttttttt

SEQ ID NO: 421058 - DNA, 15 bp, Homo sapiens
atagtgctttttttt

SEQ ID NO: 421059 - DNA, 15 bp, Homo sapiens
catagtgcttttttt

SEQ ID NO: 421060 - DNA, 15 bp, Homo sapiens
tcatagtgctttttt

SEQ ID NO: 421061 - DNA, 15 bp, Homo sapiens
ttcatagtgcttttt

SEQ ID NO: 421062 - DNA, 15 bp, Homo sapiens
tttcatagtgctttt

SEQ ID NO: 421063 - DNA, 15 bp, Homo sapiens
atttcatagtgcttt

SEQ ID NO: 421064 - DNA, 15 bp, Homo sapiens
aatttcatagtgctt

SEQ ID NO: 421065 - DNA, 15 bp, Homo sapiens
taatttcatagtgct

SEQ ID NO: 421066 - DNA, 15 bp, Homo sapiens
ataatttcatagtgc

SEQ ID NO: 421067 - DNA, 15 bp, Homo sapiens
cataatttcatagtg

SEQ ID NO: 421068 - DNA, 15 bp, Homo sapiens
ccataatttcatagt

SEQ ID NO: 421069 - DNA, 15 bp, Homo sapiens
cccataatttcatag

SEQ ID NO: 421070 - DNA, 15 bp, Homo sapiens
acccataatttcata

SEQ ID NO: 421071 - DNA, 15 bp, Homo sapiens
aacccataatttcat

SEQ ID NO: 421072 - DNA, 15 bp, Homo sapiens
taacccataatttca

SEQ ID NO: 421073 - DNA, 15 bp, Homo sapiens
ttaacccataatttc

SEQ ID NO: 421074 - DNA, 15 bp, Homo sapiens
tttaacccataattt

SEQ ID NO: 421075 - DNA, 15 bp, Homo sapiens
gtttaacccataatt

SEQ ID NO: 421076 - DNA, 15 bp, Homo sapiens
tgtttaacccataat

SEQ ID NO: 421077 - DNA, 15 bp, Homo sapiens
gtgtttaacccataa

SEQ ID NO: 421078 - DNA, 15 bp, Homo sapiens
tgtgtttaacccata

SEQ ID NO: 421079 - DNA, 15 bp, Homo sapiens
atgtgtttaacccat

SEQ ID NO: 421080 - DNA, 15 bp, Homo sapiens
aatgtgtttaaccca

SEQ ID NO: 421081 - DNA, 15 bp, Homo sapiens
aaatgtgtttaaccc

SEQ ID NO: 421082 - DNA, 15 bp, Homo sapiens
caaatgtgtttaacc

SEQ ID NO: 421083 - DNA, 15 bp, Homo sapiens
gcaaatgtgtttaac

SEQ ID NO: 421084 - DNA, 15 bp, Homo sapiens
agcaaatgtgtttaa

SEQ ID NO: 421085 - DNA, 15 bp, Homo sapiens
cagcaaatgtgttta

SEQ ID NO: 421086 - DNA, 15 bp, Homo sapiens
acagcaaatgtgttt

SEQ ID NO: 421087 - DNA, 15 bp, Homo sapiens
tacagcaaatgtgtt

SEQ ID NO: 421088 - DNA, 15 bp, Homo sapiens
atacagcaaatgtgt

SEQ ID NO: 421089 - DNA, 15 bp, Homo sapiens
aatacagcaaatgtg

SEQ ID NO: 421090 - DNA, 15 bp, Homo sapiens
aaatacagcaaatgt

SEQ ID NO: 421091 - DNA, 15 bp, Homo sapiens
gaaatacagcaaatg

SEQ ID NO: 421092 - DNA, 15 bp, Homo sapiens
agaaatacagcaaat

SEQ ID NO: 421093 - DNA, 15 bp, Homo sapiens
tagaaatacagcaaa

SEQ ID NO: 421094 - DNA, 15 bp, Homo sapiens
atagaaatacagcaa

SEQ ID NO: 421095 - DNA, 15 bp, Homo sapiens
aatagaaatacagca

SEQ ID NO: 421096 - DNA, 15 bp, Homo sapiens
gaatagaaatacagc

SEQ ID NO: 421097 - DNA, 15 bp, Homo sapiens
tgaatagaaatacag

SEQ ID NO: 421098 - DNA, 15 bp, Homo sapiens
atgaatagaaataca

SEQ ID NO: 421099 - DNA, 15 bp, Homo sapiens
aatgaatagaaatac

SEQ ID NO: 421100 - DNA, 15 bp, Homo sapiens
aaatgaatagaaata

SEQ ID NO: 421101 - DNA, 15 bp, Homo sapiens
gaaatgaatagaaat

SEQ ID NO: 421102 - DNA, 15 bp, Homo sapiens
tgaaatgaatagaaa

SEQ ID NO: 421103 - DNA, 15 bp, Homo sapiens
ctgaaatgaatagaa

SEQ ID NO: 421104 - DNA, 15 bp, Homo sapiens
gctgaaatgaataga

SEQ ID NO: 421105 - DNA, 15 bp, Homo sapiens
agctgaaatgaatag

SEQ ID NO: 421106 - DNA, 15 bp, Homo sapiens
cagctgaaatgaata

SEQ ID NO: 421107 - DNA, 15 bp, Homo sapiens
acagctgaaatgaat

SEQ ID NO: 421108 - DNA, 15 bp, Homo sapiens
aacagctgaaatgaa

SEQ ID NO: 421109 - DNA, 15 bp, Homo sapiens
caacagctgaaatga

SEQ ID NO: 421110 - DNA, 15 bp, Homo sapiens
acaacagctgaaatg

SEQ ID NO: 421111 - DNA, 15 bp, Homo sapiens
gacaacagctgaaat

SEQ ID NO: 421112 - DNA, 15 bp, Homo sapiens
ggacaacagctgaaa

SEQ ID NO: 421113 - DNA, 15 bp, Homo sapiens
aggacaacagctgaa

SEQ ID NO: 421114 - DNA, 15 bp, Homo sapiens
caggacaacagctga

SEQ ID NO: 421115 - DNA, 15 bp, Homo sapiens
tcaggacaacagctg

SEQ ID NO: 421116 - DNA, 15 bp, Homo sapiens
atcaggacaacagct

SEQ ID NO: 421117 - DNA, 15 bp, Homo sapiens
aatcaggacaacagc

SEQ ID NO: 421118 - DNA, 15 bp, Homo sapiens
caatcaggacaacag

SEQ ID NO: 421119 - DNA, 15 bp, Homo sapiens
tcaatcaggacaaca

SEQ ID NO: 421120 - DNA, 15 bp, Homo sapiens
atcaatcaggacaac

SEQ ID NO: 421121 - DNA, 15 bp, Homo sapiens
tatcaatcaggacaa

SEQ ID NO: 421122 - DNA, 15 bp, Homo sapiens
gtatcaatcaggaca

SEQ ID NO: 421123 - DNA, 15 bp, Homo sapiens
agtatcaatcaggac

SEQ ID NO: 421124 - DNA, 15 bp, Homo sapiens
aagtatcaatcagga

SEQ ID NO: 421125 - DNA, 15 bp, Homo sapiens
taagtatcaatcagg

SEQ ID NO: 421126 - DNA, 15 bp, Homo sapiens
ctaagtatcaatcag

SEQ ID NO: 421127 - DNA, 15 bp, Homo sapiens
tctaagtatcaatca

SEQ ID NO: 421128 - DNA, 15 bp, Homo sapiens
atctaagtatcaatc

SEQ ID NO: 421129 - DNA, 15 bp, Homo sapiens
aatctaagtatcaat

SEQ ID NO: 421130 - DNA, 15 bp, Homo sapiens
caatctaagtatcaa

SEQ ID NO: 421131 - DNA, 15 bp, Homo sapiens
gcaatctaagtatca

SEQ ID NO: 421132 - DNA, 15 bp, Homo sapiens
ggcaatctaagtatc

SEQ ID NO: 421133 - DNA, 15 bp, Homo sapiens
gggcaatctaagtat

SEQ ID NO: 421134 - DNA, 15 bp, Homo sapiens
agggcaatctaagta

SEQ ID NO: 421135 - DNA, 15 bp, Homo sapiens
aagggcaatctaagt

SEQ ID NO: 421136 - DNA, 15 bp, Homo sapiens
aaagggcaatctaag

SEQ ID NO: 421137 - DNA, 15 bp, Homo sapiens
gaaagggcaatctaa

SEQ ID NO: 421138 - DNA, 15 bp, Homo sapiens
agaaagggcaatcta

SEQ ID NO: 421139 - DNA, 15 bp, Homo sapiens
aagaaagggcaatct

SEQ ID NO: 421140 - DNA, 15 bp, Homo sapiens
aaagaaagggcaatc

SEQ ID NO: 421141 - DNA, 15 bp, Homo sapiens
caaagaaagggcaat

SEQ ID NO: 421142 - DNA, 15 bp, Homo sapiens
acaaagaaagggcaa

SEQ ID NO: 421143 - DNA, 15 bp, Homo sapiens
aacaaagaaagggca

SEQ ID NO: 421144 - DNA, 15 bp, Homo sapiens
gaacaaagaaagggc

SEQ ID NO: 421145 - DNA, 15 bp, Homo sapiens
ggaacaaagaaaggg

SEQ ID NO: 421146 - DNA, 15 bp, Homo sapiens
tggaacaaagaaagg

SEQ ID NO: 421147 - DNA, 15 bp, Homo sapiens
atggaacaaagaaag

SEQ ID NO: 421148 - DNA, 15 bp, Homo sapiens
gatggaacaaagaaa

SEQ ID NO: 421149 - DNA, 15 bp, Homo sapiens
agatggaacaaagaa

SEQ ID NO: 421150 - DNA, 15 bp, Homo sapiens
aagatggaacaaaga

SEQ ID NO: 421151 - DNA, 15 bp, Homo sapiens
gaagatggaacaaag

SEQ ID NO: 421152 - DNA, 15 bp, Homo sapiens
tgaagatggaacaaa

SEQ ID NO: 421153 - DNA, 15 bp, Homo sapiens
ttgaagatggaacaa

SEQ ID NO: 421154 - DNA, 15 bp, Homo sapiens
cttgaagatggaaca

SEQ ID NO: 421155 - DNA, 15 bp, Homo sapiens
acttgaagatggaac

SEQ ID NO: 421156 - DNA, 15 bp, Homo sapiens
aacttgaagatggaa

SEQ ID NO: 421157 - DNA, 15 bp, Homo sapiens
caacttgaagatgga

SEQ ID NO: 421158 - DNA, 15 bp, Homo sapiens
ccaacttgaagatgg

SEQ ID NO: 421159 - DNA, 15 bp, Homo sapiens
accaacttgaagatg

SEQ ID NO: 421160 - DNA, 15 bp, Homo sapiens
gaccaacttgaagat

SEQ ID NO: 421161 - DNA, 15 bp, Homo sapiens
ggaccaacttgaaga

SEQ ID NO: 421162 - DNA, 15 bp, Homo sapiens
gggaccaacttgaag

SEQ ID NO: 421163 - DNA, 15 bp, Homo sapiens
agggaccaacttgaa

SEQ ID NO: 421164 - DNA, 15 bp, Homo sapiens
cagggaccaacttga

SEQ ID NO: 421165 - DNA, 15 bp, Homo sapiens
tcagggaccaacttg

SEQ ID NO: 421166 - DNA, 15 bp, Homo sapiens
ttcagggaccaactt

SEQ ID NO: 421167 - DNA, 15 bp, Homo sapiens
gttcagggaccaact

SEQ ID NO: 421168 - DNA, 15 bp, Homo sapiens
agttcagggaccaac

SEQ ID NO: 421169 - DNA, 15 bp, Homo sapiens
gagttcagggaccaa

SEQ ID NO: 421170 - DNA, 15 bp, Homo sapiens
ggagttcagggacca

SEQ ID NO: 421171 - DNA, 15 bp, Homo sapiens
aggagttcagggacc

SEQ ID NO: 421172 - DNA, 15 bp, Homo sapiens
aaggagttcagggac

SEQ ID NO: 421173 - DNA, 15 bp, Homo sapiens
aaaggagttcaggga

SEQ ID NO: 421174 - DNA, 15 bp, Homo sapiens
caaaggagttcaggg

SEQ ID NO: 421175 - DNA, 15 bp, Homo sapiens
tcaaaggagttcagg

SEQ ID NO: 421176 - DNA, 15 bp, Homo sapiens
ttcaaaggagttcag

SEQ ID NO: 421177 - DNA, 15 bp, Homo sapiens
cttcaaaggagttca

SEQ ID NO: 421178 - DNA, 15 bp, Homo sapiens
gcttcaaaggagttc

SEQ ID NO: 421179 - DNA, 15 bp, Homo sapiens
tgcttcaaaggagtt

SEQ ID NO: 421180 - DNA, 15 bp, Homo sapiens
ttgcttcaaaggagt

SEQ ID NO: 421181 - DNA, 15 bp, Homo sapiens
attgcttcaaaggag

SEQ ID NO: 421182 - DNA, 15 bp, Homo sapiens
gattgcttcaaagga

SEQ ID NO: 421183 - DNA, 15 bp, Homo sapiens
ggattgcttcaaagg

SEQ ID NO: 421184 - DNA, 15 bp, Homo sapiens
aggattgcttcaaag

SEQ ID NO: 421185 - DNA, 15 bp, Homo sapiens
caggattgcttcaaa

SEQ ID NO: 421186 - DNA, 15 bp, Homo sapiens
tcaggattgcttcaa

SEQ ID NO: 421187 - DNA, 15 bp, Homo sapiens
atcaggattgcttca

SEQ ID NO: 421188 - DNA, 15 bp, Homo sapiens
tatcaggattgcttc

SEQ ID NO: 421189 - DNA, 15 bp, Homo sapiens
ctatcaggattgctt

SEQ ID NO: 421190 - DNA, 15 bp, Homo sapiens
actatcaggattgct

SEQ ID NO: 421191 - DNA, 15 bp, Homo sapiens
gactatcaggattgc

SEQ ID NO: 421192 - DNA, 15 bp, Homo sapiens
agactatcaggattg

SEQ ID NO: 421193 - DNA, 15 bp, Homo sapiens
cagactatcaggatt

SEQ ID NO: 421194 - DNA, 15 bp, Homo sapiens
tcagactatcaggat

SEQ ID NO: 421195 - DNA, 15 bp, Homo sapiens
atcagactatcagga

SEQ ID NO: 421196 - DNA, 15 bp, Homo sapiens
tatcagactatcagg

SEQ ID NO: 421197 - DNA, 15 bp, Homo sapiens
ctatcagactatcag

SEQ ID NO: 421198 - DNA, 15 bp, Homo sapiens
actatcagactatca

SEQ ID NO: 421199 - DNA, 15 bp, Homo sapiens
gactatcagactatc

SEQ ID NO: 421200 - DNA, 15 bp, Homo sapiens
agactatcagactat

SEQ ID NO: 421201 - DNA, 15 bp, Homo sapiens
aagactatcagacta

SEQ ID NO: 421202 - DNA, 15 bp, Homo sapiens
aaagactatcagact

SEQ ID NO: 421203 - DNA, 15 bp, Homo sapiens
caaagactatcagac

SEQ ID NO: 421204 - DNA, 15 bp, Homo sapiens
tcaaagactatcaga

SEQ ID NO: 421205 - DNA, 15 bp, Homo sapiens
atcaaagactatcag

SEQ ID NO: 421206 - DNA, 15 bp, Homo sapiens
tatcaaagactatca

SEQ ID NO: 421207 - DNA, 15 bp, Homo sapiens
ctatcaaagactatc

SEQ ID NO: 421208 - DNA, 15 bp, Homo sapiens
tctatcaaagactat

SEQ ID NO: 421209 - DNA, 15 bp, Homo sapiens
atctatcaaagacta

SEQ ID NO: 421210 - DNA, 15 bp, Homo sapiens
catctatcaaagact

SEQ ID NO: 421211 - DNA, 15 bp, Homo sapiens
gcatctatcaaagac

SEQ ID NO: 421212 - DNA, 15 bp, Homo sapiens
ggcatctatcaaaga

SEQ ID NO: 421213 - DNA, 15 bp, Homo sapiens
gggcatctatcaaag

SEQ ID NO: 421214 - DNA, 15 bp, Homo sapiens
agggcatctatcaaa

SEQ ID NO: 421215 - DNA, 15 bp, Homo sapiens
cagggcatctatcaa

SEQ ID NO: 421216 - DNA, 15 bp, Homo sapiens
gcagggcatctatca

SEQ ID NO: 421217 - DNA, 15 bp, Homo sapiens
agcagggcatctatc

SEQ ID NO: 421218 - DNA, 15 bp, Homo sapiens
tagcagggcatctat

SEQ ID NO: 421219 - DNA, 15 bp, Homo sapiens
atagcagggcatcta

SEQ ID NO: 421220 - DNA, 15 bp, Homo sapiens
gatagcagggcatct

SEQ ID NO: 421221 - DNA, 15 bp, Homo sapiens
agatagcagggcatc

SEQ ID NO: 421222 - DNA, 15 bp, Homo sapiens
tagatagcagggcat

SEQ ID NO: 421223 - DNA, 15 bp, Homo sapiens
ctagatagcagggca

SEQ ID NO: 421224 - DNA, 15 bp, Homo sapiens
actagatagcagggc

SEQ ID NO: 421225 - DNA, 15 bp, Homo sapiens
cactagatagcaggg

SEQ ID NO: 421226 - DNA, 15 bp, Homo sapiens
acactagatagcagg

SEQ ID NO: 421227 - DNA, 15 bp, Homo sapiens
tacactagatagcag

SEQ ID NO: 421228 - DNA, 15 bp, Homo sapiens
ttacactagatagca

SEQ ID NO: 421229 - DNA, 15 bp, Homo sapiens
attacactagatagc

SEQ ID NO: 421230 - DNA, 15 bp, Homo sapiens
aattacactagatag

SEQ ID NO: 421231 - DNA, 15 bp, Homo sapiens
gaattacactagata

SEQ ID NO: 421232 - DNA, 15 bp, Homo sapiens
tgaattacactagat

SEQ ID NO: 421233 - DNA, 15 bp, Homo sapiens
atgaattacactaga

SEQ ID NO: 421234 - DNA, 15 bp, Homo sapiens
gatgaattacactag

SEQ ID NO: 421235 - DNA, 15 bp, Homo sapiens
agatgaattacacta

SEQ ID NO: 421236 - DNA, 15 bp, Homo sapiens
aagatgaattacact

SEQ ID NO: 421237 - DNA, 15 bp, Homo sapiens
gaagatgaattacac

SEQ ID NO: 421238 - DNA, 15 bp, Homo sapiens
ggaagatgaattaca

SEQ ID NO: 421239 - DNA, 15 bp, Homo sapiens
aggaagatgaattac

SEQ ID NO: 421240 - DNA, 15 bp, Homo sapiens
aaggaagatgaatta

SEQ ID NO: 421241 - DNA, 15 bp, Homo sapiens
taaggaagatgaatt

SEQ ID NO: 421242 - DNA, 15 bp, Homo sapiens
ataaggaagatgaat

SEQ ID NO: 421243 - DNA, 15 bp, Homo sapiens
aataaggaagatgaa

SEQ ID NO: 421244 - DNA, 15 bp, Homo sapiens
aaataaggaagatga

SEQ ID NO: 421245 - DNA, 15 bp, Homo sapiens
gaaataaggaagatg

SEQ ID NO: 421246 - DNA, 15 bp, Homo sapiens
ggaaataaggaagat

SEQ ID NO: 421247 - DNA, 15 bp, Homo sapiens
aggaaataaggaaga

SEQ ID NO: 421248 - DNA, 15 bp, Homo sapiens
caggaaataaggaag

SEQ ID NO: 421249 - DNA, 15 bp, Homo sapiens
acaggaaataaggaa

SEQ ID NO: 421250 - DNA, 15 bp, Homo sapiens
gacaggaaataagga

SEQ ID NO: 421251 - DNA, 15 bp, Homo sapiens
ggacaggaaataagg

SEQ ID NO: 421252 - DNA, 15 bp, Homo sapiens
gggacaggaaataag

SEQ ID NO: 421253 - DNA, 15 bp, Homo sapiens
tgggacaggaaataa

SEQ ID NO: 421254 - DNA, 15 bp, Homo sapiens
gtgggacaggaaata

SEQ ID NO: 421255 - DNA, 15 bp, Homo sapiens
tgtgggacaggaaat

SEQ ID NO: 421256 - DNA, 15 bp, Homo sapiens
atgtgggacaggaaa

SEQ ID NO: 421257 - DNA, 15 bp, Homo sapiens
gatgtgggacaggaa

SEQ ID NO: 421258 - DNA, 15 bp, Homo sapiens
agatgtgggacagga

SEQ ID NO: 421259 - DNA, 15 bp, Homo sapiens
cagatgtgggacagg

SEQ ID NO: 421260 - DNA, 15 bp, Homo sapiens
ccagatgtgggacag

SEQ ID NO: 421261 - DNA, 15 bp, Homo sapiens
tccagatgtgggaca

SEQ ID NO: 421262 - DNA, 15 bp, Homo sapiens
ttccagatgtgggac

SEQ ID NO: 421263 - DNA, 15 bp, Homo sapiens
attccagatgtggga

SEQ ID NO: 421264 - DNA, 15 bp, Homo sapiens
gattccagatgtggg

SEQ ID NO: 421265 - DNA, 15 bp, Homo sapiens
tgattccagatgtgg

SEQ ID NO: 421266 - DNA, 15 bp, Homo sapiens
ctgattccagatgtg

SEQ ID NO: 421267 - DNA, 15 bp, Homo sapiens
actgattccagatgt

SEQ ID NO: 421268 - DNA, 15 bp, Homo sapiens
gactgattccagatg

SEQ ID NO: 421269 - DNA, 15 bp, Homo sapiens
agactgattccagat

SEQ ID NO: 421270 - DNA, 15 bp, Homo sapiens
aagactgattccaga

SEQ ID NO: 421271 - DNA, 15 bp, Homo sapiens
gaagactgattccag

SEQ ID NO: 421272 - DNA, 15 bp, Homo sapiens
agaagactgattcca

SEQ ID NO: 421273 - DNA, 15 bp, Homo sapiens
gagaagactgattcc

SEQ ID NO: 421274 - DNA, 15 bp, Homo sapiens
ggagaagactgattc

SEQ ID NO: 421275 - DNA, 15 bp, Homo sapiens
gggagaagactgatt

SEQ ID NO: 421276 - DNA, 15 bp, Homo sapiens
agggagaagactgat

SEQ ID NO: 421277 - DNA, 15 bp, Homo sapiens
tagggagaagactga

SEQ ID NO: 421278 - DNA, 15 bp, Homo sapiens
ttagggagaagactg

SEQ ID NO: 421279 - DNA, 15 bp, Homo sapiens
cttagggagaagact

SEQ ID NO: 421280 - DNA, 15 bp, Homo sapiens
ccttagggagaagac

SEQ ID NO: 421281 - DNA, 15 bp, Homo sapiens
tccttagggagaaga

SEQ ID NO: 421282 - DNA, 15 bp, Homo sapiens
ttccttagggagaag

SEQ ID NO: 421283 - DNA, 15 bp, Homo sapiens
attccttagggagaa

SEQ ID NO: 421284 - DNA, 15 bp, Homo sapiens
gattccttagggaga

SEQ ID NO: 421285 - DNA, 15 bp, Homo sapiens
agattccttagggag

SEQ ID NO: 421286 - DNA, 15 bp, Homo sapiens
aagattccttaggga

SEQ ID NO: 421287 - DNA, 15 bp, Homo sapiens
aaagattccttaggg

SEQ ID NO: 421288 - DNA, 15 bp, Homo sapiens
taaagattccttagg

SEQ ID NO: 421289 - DNA, 15 bp, Homo sapiens
ataaagattccttag

SEQ ID NO: 421290 - DNA, 15 bp, Homo sapiens
aataaagattcctta

SEQ ID NO: 421291 - DNA, 15 bp, Homo sapiens
gaataaagattcctt

SEQ ID NO: 421292 - DNA, 15 bp, Homo sapiens
ggaataaagattcct

SEQ ID NO: 421293 - DNA, 15 bp, Homo sapiens
aggaataaagattcc

SEQ ID NO: 421294 - DNA, 15 bp, Homo sapiens
aaggaataaagattc

SEQ ID NO: 421295 - DNA, 15 bp, Homo sapiens
taaggaataaagatt

SEQ ID NO: 421296 - DNA, 15 bp, Homo sapiens
ataaggaataaagat

SEQ ID NO: 421297 - DNA, 15 bp, Homo sapiens
tataaggaataaaga

SEQ ID NO: 421298 - DNA, 15 bp, Homo sapiens
ctataaggaataaag

SEQ ID NO: 421299 - DNA, 15 bp, Homo sapiens
cctataaggaataaa

SEQ ID NO: 421300 - DNA, 15 bp, Homo sapiens
tcctataaggaataa

SEQ ID NO: 421301 - DNA, 15 bp, Homo sapiens
ttcctataaggaata

SEQ ID NO: 421302 - DNA, 15 bp, Homo sapiens
gttcctataaggaat

SEQ ID NO: 421303 - DNA, 15 bp, Homo sapiens
tgttcctataaggaa

SEQ ID NO: 421304 - DNA, 15 bp, Homo sapiens
ttgttcctataagga

SEQ ID NO: 421305 - DNA, 15 bp, Homo sapiens
attgttcctataagg

SEQ ID NO: 421306 - DNA, 15 bp, Homo sapiens
cattgttcctataag

SEQ ID NO: 421307 - DNA, 15 bp, Homo sapiens
gcattgttcctataa

SEQ ID NO: 421308 - DNA, 15 bp, Homo sapiens
agcattgttcctata

SEQ ID NO: 421309 - DNA, 15 bp, Homo sapiens
cagcattgttcctat

SEQ ID NO: 421310 - DNA, 15 bp, Homo sapiens
ccagcattgttccta

SEQ ID NO: 421311 - DNA, 15 bp, Homo sapiens
gccagcattgttcct

SEQ ID NO: 421312 - DNA, 15 bp, Homo sapiens
tgccagcattgttcc

SEQ ID NO: 421313 - DNA, 15 bp, Homo sapiens
atgccagcattgttc

SEQ ID NO: 421314 - DNA, 15 bp, Homo sapiens
aatgccagcattgtt

SEQ ID NO: 421315 - DNA, 15 bp, Homo sapiens
aaatgccagcattgt

SEQ ID NO: 421316 - DNA, 15 bp, Homo sapiens
aaaatgccagcattg

SEQ ID NO: 421317 - DNA, 15 bp, Homo sapiens
gaaaatgccagcatt

SEQ ID NO: 421318 - DNA, 15 bp, Homo sapiens
agaaaatgccagcat

SEQ ID NO: 421319 - DNA, 15 bp, Homo sapiens
gagaaaatgccagca

SEQ ID NO: 421320 - DNA, 15 bp, Homo sapiens
ggagaaaatgccagc

SEQ ID NO: 421321 - DNA, 15 bp, Homo sapiens
tggagaaaatgccag

SEQ ID NO: 421322 - DNA, 15 bp, Homo sapiens
ttggagaaaatgcca

SEQ ID NO: 421323 - DNA, 15 bp, Homo sapiens
gttggagaaaatgcc

SEQ ID NO: 421324 - DNA, 15 bp, Homo sapiens
cgttggagaaaatgc

SEQ ID NO: 421325 - DNA, 15 bp, Homo sapiens
tcgttggagaaaatg

SEQ ID NO: 421326 - DNA, 15 bp, Homo sapiens
atcgttggagaaaat

SEQ ID NO: 421327 - DNA, 15 bp, Homo sapiens
gatcgttggagaaaa

SEQ ID NO: 421328 - DNA, 15 bp, Homo sapiens
agatcgttggagaaa

SEQ ID NO: 421329 - DNA, 15 bp, Homo sapiens
aagatcgttggagaa

SEQ ID NO: 421330 - DNA, 15 bp, Homo sapiens
taagatcgttggaga

SEQ ID NO: 421331 - DNA, 15 bp, Homo sapiens
ttaagatcgttggag

SEQ ID NO: 421332 - DNA, 15 bp, Homo sapiens
attaagatcgttgga

SEQ ID NO: 421333 - DNA, 15 bp, Homo sapiens
gattaagatcgttgg

SEQ ID NO: 421334 - DNA, 15 bp, Homo sapiens
ggattaagatcgttg

SEQ ID NO: 421335 - DNA, 15 bp, Homo sapiens
tggattaagatcgtt

SEQ ID NO: 421336 - DNA, 15 bp, Homo sapiens
atggattaagatcgt

SEQ ID NO: 421337 - DNA, 15 bp, Homo sapiens
gatggattaagatcg

SEQ ID NO: 421338 - DNA, 15 bp, Homo sapiens
ggatggattaagatc

SEQ ID NO: 421339 - DNA, 15 bp, Homo sapiens
aggatggattaagat

SEQ ID NO: 421340 - DNA, 15 bp, Homo sapiens
caggatggattaaga

SEQ ID NO: 421341 - DNA, 15 bp, Homo sapiens
tcaggatggattaag

SEQ ID NO: 421342 - DNA, 15 bp, Homo sapiens
ttcaggatggattaa

SEQ ID NO: 421343 - DNA, 15 bp, Homo sapiens
attcaggatggatta

SEQ ID NO: 421344 - DNA, 15 bp, Homo sapiens
cattcaggatggatt

SEQ ID NO: 421345 - DNA, 15 bp, Homo sapiens
acattcaggatggat

SEQ ID NO: 421346 - DNA, 15 bp, Homo sapiens
gacattcaggatgga

SEQ ID NO: 421347 - DNA, 15 bp, Homo sapiens
agacattcaggatgg

SEQ ID NO: 421348 - DNA, 15 bp, Homo sapiens
tagacattcaggatg

SEQ ID NO: 421349 - DNA, 15 bp, Homo sapiens
atagacattcaggat

SEQ ID NO: 421350 - DNA, 15 bp, Homo sapiens
aatagacattcagga

SEQ ID NO: 421351 - DNA, 15 bp, Homo sapiens
caatagacattcagg

SEQ ID NO: 421352 - DNA, 15 bp, Homo sapiens
gcaatagacattcag

SEQ ID NO: 421353 - DNA, 15 bp, Homo sapiens
tgcaatagacattca

SEQ ID NO: 421354 - DNA, 15 bp, Homo sapiens
atgcaatagacattc

SEQ ID NO: 421355 - DNA, 15 bp, Homo sapiens
aatgcaatagacatt

SEQ ID NO: 421356 - DNA, 15 bp, Homo sapiens
aaatgcaatagacat

SEQ ID NO: 421357 - DNA, 15 bp, Homo sapiens
gaaatgcaatagaca

SEQ ID NO: 421358 - DNA, 15 bp, Homo sapiens
agaaatgcaatagac

SEQ ID NO: 421359 - DNA, 15 bp, Homo sapiens
cagaaatgcaataga

SEQ ID NO: 421360 - DNA, 15 bp, Homo sapiens
gcagaaatgcaatag

SEQ ID NO: 421361 - DNA, 15 bp, Homo sapiens
tgcagaaatgcaata

SEQ ID NO: 421362 - DNA, 15 bp, Homo sapiens
gtgcagaaatgcaat

SEQ ID NO: 421363 - DNA, 15 bp, Homo sapiens
agtgcagaaatgcaa

SEQ ID NO: 421364 - DNA, 15 bp, Homo sapiens
aagtgcagaaatgca

SEQ ID NO: 421365 - DNA, 15 bp, Homo sapiens
gaagtgcagaaatgc

SEQ ID NO: 421366 - DNA, 15 bp, Homo sapiens
tgaagtgcagaaatg

SEQ ID NO: 421367 - DNA, 15 bp, Homo sapiens
gtgaagtgcagaaat

SEQ ID NO: 421368 - DNA, 15 bp, Homo sapiens
ggtgaagtgcagaaa

SEQ ID NO: 421369 - DNA, 15 bp, Homo sapiens
gggtgaagtgcagaa

SEQ ID NO: 421370 - DNA, 15 bp, Homo sapiens
ggggtgaagtgcaga

SEQ ID NO: 421371 - DNA, 15 bp, Homo sapiens
tggggtgaagtgcag

SEQ ID NO: 421372 - DNA, 15 bp, Homo sapiens
ttggggtgaagtgca

SEQ ID NO: 421373 - DNA, 15 bp, Homo sapiens
gttggggtgaagtgc

SEQ ID NO: 421374 - DNA, 15 bp, Homo sapiens
tgttggggtgaagtg

SEQ ID NO: 421375 - DNA, 15 bp, Homo sapiens
gtgttggggtgaagt

SEQ ID NO: 421376 - DNA, 15 bp, Homo sapiens
ggtgttggggtgaag

SEQ ID NO: 421377 - DNA, 15 bp, Homo sapiens
tggtgttggggtgaa

SEQ ID NO: 421378 - DNA, 15 bp, Homo sapiens
atggtgttggggtga

SEQ ID NO: 421379 - DNA, 15 bp, Homo sapiens
catggtgttggggtg

SEQ ID NO: 421380 - DNA, 15 bp, Homo sapiens
gcatggtgttggggt

SEQ ID NO: 421381 - DNA, 15 bp, Homo sapiens
ggcatggtgttgggg

SEQ ID NO: 421382 - DNA, 15 bp, Homo sapiens
aggcatggtgttggg

SEQ ID NO: 421383 - DNA, 15 bp, Homo sapiens
gaggcatggtgttgg

SEQ ID NO: 421384 - DNA, 15 bp, Homo sapiens
ggaggcatggtgttg

SEQ ID NO: 421385 - DNA, 15 bp, Homo sapiens
gggaggcatggtgtt

SEQ ID NO: 421386 - DNA, 15 bp, Homo sapiens
tgggaggcatggtgt

SEQ ID NO: 421387 - DNA, 15 bp, Homo sapiens
ctgggaggcatggtg

SEQ ID NO: 421388 - DNA, 15 bp, Homo sapiens
actgggaggcatggt

SEQ ID NO: 421389 - DNA, 15 bp, Homo sapiens
aactgggaggcatgg

SEQ ID NO: 421390 - DNA, 15 bp, Homo sapiens
caactgggaggcatg

SEQ ID NO: 421391 - DNA, 15 bp, Homo sapiens
tcaactgggaggcat

SEQ ID NO: 421392 - DNA, 15 bp, Homo sapiens
ctcaactgggaggca

SEQ ID NO: 421393 - DNA, 15 bp, Homo sapiens
tctcaactgggaggc

SEQ ID NO: 421394 - DNA, 15 bp, Homo sapiens
gtctcaactgggagg

SEQ ID NO: 421395 - DNA, 15 bp, Homo sapiens
agtctcaactgggag

SEQ ID NO: 421396 - DNA, 15 bp, Homo sapiens
gagtctcaactggga

SEQ ID NO: 421397 - DNA, 15 bp, Homo sapiens
tgagtctcaactggg

SEQ ID NO: 421398 - DNA, 15 bp, Homo sapiens
ctgagtctcaactgg

SEQ ID NO: 421399 - DNA, 15 bp, Homo sapiens
cctgagtctcaactg

SEQ ID NO: 421400 - DNA, 15 bp, Homo sapiens
ccctgagtctcaact

SEQ ID NO: 421401 - DNA, 15 bp, Homo sapiens
tccctgagtctcaac

SEQ ID NO: 421402 - DNA, 15 bp, Homo sapiens
atccctgagtctcaa

SEQ ID NO: 421403 - DNA, 15 bp, Homo sapiens
catccctgagtctca

SEQ ID NO: 421404 - DNA, 15 bp, Homo sapiens
gcatccctgagtctc

SEQ ID NO: 421405 - DNA, 15 bp, Homo sapiens
tgcatccctgagtct

SEQ ID NO: 421406 - DNA, 15 bp, Homo sapiens
ttgcatccctgagtc

SEQ ID NO: 421407 - DNA, 15 bp, Homo sapiens
cttgcatccctgagt

SEQ ID NO: 421408 - DNA, 15 bp, Homo sapiens
ccttgcatccctgag

SEQ ID NO: 421409 - DNA, 15 bp, Homo sapiens
tccttgcatccctga

SEQ ID NO: 421410 - DNA, 15 bp, Homo sapiens
ctccttgcatccctg

SEQ ID NO: 421411 - DNA, 15 bp, Homo sapiens
cctccttgcatccct

SEQ ID NO: 421412 - DNA, 15 bp, Homo sapiens
ccctccttgcatccc

SEQ ID NO: 421413 - DNA, 15 bp, Homo sapiens
tccctccttgcatcc

SEQ ID NO: 421414 - DNA, 15 bp, Homo sapiens
atccctccttgcatc

SEQ ID NO: 421415 - DNA, 15 bp, Homo sapiens
aatccctccttgcat

SEQ ID NO: 421416 - DNA, 15 bp, Homo sapiens
caatccctccttgca

SEQ ID NO: 421417 - DNA, 15 bp, Homo sapiens
tcaatccctccttgc

SEQ ID NO: 421418 - DNA, 15 bp, Homo sapiens
ttcaatccctccttg

SEQ ID NO: 421419 - DNA, 15 bp, Homo sapiens
tttcaatccctcctt

SEQ ID NO: 421420 - DNA, 15 bp, Homo sapiens
ctttcaatccctcct

SEQ ID NO: 421421 - DNA, 15 bp, Homo sapiens
actttcaatccctcc

SEQ ID NO: 421422 - DNA, 15 bp, Homo sapiens
aactttcaatccctc

SEQ ID NO: 421423 - DNA, 15 bp, Homo sapiens
gaactttcaatccct

SEQ ID NO: 421424 - DNA, 15 bp, Homo sapiens
ggaactttcaatccc

SEQ ID NO: 421425 - DNA, 15 bp, Homo sapiens
aggaactttcaatcc

SEQ ID NO: 421426 - DNA, 15 bp, Homo sapiens
gaggaactttcaatc

SEQ ID NO: 421427 - DNA, 15 bp, Homo sapiens
tgaggaactttcaat

SEQ ID NO: 421428 - DNA, 15 bp, Homo sapiens
atgaggaactttcaa

SEQ ID NO: 421429 - DNA, 15 bp, Homo sapiens
catgaggaactttca

SEQ ID NO: 421430 - DNA, 15 bp, Homo sapiens
tcatgaggaactttc

SEQ ID NO: 421431 - DNA, 15 bp, Homo sapiens
ttcatgaggaacttt

SEQ ID NO: 421432 - DNA, 15 bp, Homo sapiens
attcatgaggaactt

SEQ ID NO: 421433 - DNA, 15 bp, Homo sapiens
tattcatgaggaact

SEQ ID NO: 421434 - DNA, 15 bp, Homo sapiens
atattcatgaggaac

SEQ ID NO: 421435 - DNA, 15 bp, Homo sapiens
catattcatgaggaa

SEQ ID NO: 421436 - DNA, 15 bp, Homo sapiens
tcatattcatgagga

SEQ ID NO: 421437 - DNA, 15 bp, Homo sapiens
atcatattcatgagg

SEQ ID NO: 421438 - DNA, 15 bp, Homo sapiens
catcatattcatgag

SEQ ID NO: 421439 - DNA, 15 bp, Homo sapiens
tcatcatattcatga

SEQ ID NO: 421440 - DNA, 15 bp, Homo sapiens
gtcatcatattcatg

SEQ ID NO: 421441 - DNA, 15 bp, Homo sapiens
tgtcatcatattcat

SEQ ID NO: 421442 - DNA, 15 bp, Homo sapiens
ctgtcatcatattca

SEQ ID NO: 421443 - DNA, 15 bp, Homo sapiens
tctgtcatcatattc

SEQ ID NO: 421444 - DNA, 15 bp, Homo sapiens
atctgtcatcatatt

SEQ ID NO: 421445 - DNA, 15 bp, Homo sapiens
tatctgtcatcatat

SEQ ID NO: 421446 - DNA, 15 bp, Homo sapiens
ctatctgtcatcata

SEQ ID NO: 421447 - DNA, 15 bp, Homo sapiens
cctatctgtcatcat

SEQ ID NO: 421448 - DNA, 15 bp, Homo sapiens
acctatctgtcatca

SEQ ID NO: 421449 - DNA, 15 bp, Homo sapiens
aacctatctgtcatc

SEQ ID NO: 421450 - DNA, 15 bp, Homo sapiens
aaacctatctgtcat

SEQ ID NO: 421451 - DNA, 15 bp, Homo sapiens
taaacctatctgtca

SEQ ID NO: 421452 - DNA, 15 bp, Homo sapiens
ctaaacctatctgtc

SEQ ID NO: 421453 - DNA, 15 bp, Homo sapiens
cctaaacctatctgt

SEQ ID NO: 421454 - DNA, 15 bp, Homo sapiens
gcctaaacctatctg

SEQ ID NO: 421455 - DNA, 15 bp, Homo sapiens
agcctaaacctatct

SEQ ID NO: 421456 - DNA, 15 bp, Homo sapiens
gagcctaaacctatc

SEQ ID NO: 421457 - DNA, 15 bp, Homo sapiens
tgagcctaaacctat

SEQ ID NO: 421458 - DNA, 15 bp, Homo sapiens
ttgagcctaaaccta

SEQ ID NO: 421459 - DNA, 15 bp, Homo sapiens
tttgagcctaaacct

SEQ ID NO: 421460 - DNA, 15 bp, Homo sapiens
ctttgagcctaaacc

SEQ ID NO: 421461 - DNA, 15 bp, Homo sapiens
tctttgagcctaaac

SEQ ID NO: 421462 - DNA, 15 bp, Homo sapiens
atctttgagcctaaa

SEQ ID NO: 421463 - DNA, 15 bp, Homo sapiens
catctttgagcctaa

SEQ ID NO: 421464 - DNA, 15 bp, Homo sapiens
ccatctttgagccta

SEQ ID NO: 421465 - DNA, 15 bp, Homo sapiens
gccatctttgagcct

SEQ ID NO: 421466 - DNA, 15 bp, Homo sapiens
agccatctttgagcc

SEQ ID NO: 421467 - DNA, 15 bp, Homo sapiens
cagccatctttgagc

SEQ ID NO: 421468 - DNA, 15 bp, Homo sapiens
tcagccatctttgag

SEQ ID NO: 421469 - DNA, 15 bp, Homo sapiens
ttcagccatctttga

SEQ ID NO: 421470 - DNA, 15 bp, Homo sapiens
cttcagccatctttg

SEQ ID NO: 421471 - DNA, 15 bp, Homo sapiens
gcttcagccatcttt

SEQ ID NO: 421472 - DNA, 15 bp, Homo sapiens
ggcttcagccatctt

SEQ ID NO: 421473 - DNA, 15 bp, Homo sapiens
gggcttcagccatct

SEQ ID NO: 421474 - DNA, 15 bp, Homo sapiens
tgggcttcagccatc

SEQ ID NO: 421475 - DNA, 15 bp, Homo sapiens
ctgggcttcagccat

SEQ ID NO: 421476 - DNA, 15 bp, Homo sapiens
cctgggcttcagcca

SEQ ID NO: 421477 - DNA, 15 bp, Homo sapiens
ccctgggcttcagcc

SEQ ID NO: 421478 - DNA, 15 bp, Homo sapiens
tccctgggcttcagc

SEQ ID NO: 421479 - DNA, 15 bp, Homo sapiens
atccctgggcttcag

SEQ ID NO: 421480 - DNA, 15 bp, Homo sapiens
catccctgggcttca

SEQ ID NO: 421481 - DNA, 15 bp, Homo sapiens
acatccctgggcttc

SEQ ID NO: 421482 - DNA, 15 bp, Homo sapiens
gacatccctgggctt

SEQ ID NO: 421483 - DNA, 15 bp, Homo sapiens
ggacatccctgggct

SEQ ID NO: 421484 - DNA, 15 bp, Homo sapiens
tggacatccctgggc

SEQ ID NO: 421485 - DNA, 15 bp, Homo sapiens
atggacatccctggg

SEQ ID NO: 421486 - DNA, 15 bp, Homo sapiens
catggacatccctgg

SEQ ID NO: 421487 - DNA, 15 bp, Homo sapiens
tcatggacatccctg

SEQ ID NO: 421488 - DNA, 15 bp, Homo sapiens
gtcatggacatccct

SEQ ID NO: 421489 - DNA, 15 bp, Homo sapiens
tgtcatggacatccc

SEQ ID NO: 421490 - DNA, 15 bp, Homo sapiens
atgtcatggacatcc

SEQ ID NO: 421491 - DNA, 15 bp, Homo sapiens
tatgtcatggacatc

SEQ ID NO: 421492 - DNA, 15 bp, Homo sapiens
ttatgtcatggacat

SEQ ID NO: 421493 - DNA, 15 bp, Homo sapiens
tttatgtcatggaca

SEQ ID NO: 421494 - DNA, 15 bp, Homo sapiens
atttatgtcatggac

SEQ ID NO: 421495 - DNA, 15 bp, Homo sapiens
catttatgtcatgga

SEQ ID NO: 421496 - DNA, 15 bp, Homo sapiens
tcatttatgtcatgg

SEQ ID NO: 421497 - DNA, 15 bp, Homo sapiens
gtcatttatgtcatg

SEQ ID NO: 421498 - DNA, 15 bp, Homo sapiens
agtcatttatgtcat

SEQ ID NO: 421499 - DNA, 15 bp, Homo sapiens
aagtcatttatgtca

SEQ ID NO: 421500 - DNA, 15 bp, Homo sapiens
caagtcatttatgtc

SEQ ID NO: 421501 - DNA, 15 bp, Homo sapiens
ccaagtcatttatgt

SEQ ID NO: 421502 - DNA, 15 bp, Homo sapiens
accaagtcatttatg

SEQ ID NO: 421503 - DNA, 15 bp, Homo sapiens
taccaagtcatttat

SEQ ID NO: 421504 - DNA, 15 bp, Homo sapiens
ctaccaagtcattta

SEQ ID NO: 421505 - DNA, 15 bp, Homo sapiens
tctaccaagtcattt

SEQ ID NO: 421506 - DNA, 15 bp, Homo sapiens
ttctaccaagtcatt

SEQ ID NO: 421507 - DNA, 15 bp, Homo sapiens
tttctaccaagtcat

SEQ ID NO: 421508 - DNA, 15 bp, Homo sapiens
atttctaccaagtca

SEQ ID NO: 421509 - DNA, 15 bp, Homo sapiens
tatttctaccaagtc

SEQ ID NO: 421510 - DNA, 15 bp, Homo sapiens
ttatttctaccaagt

SEQ ID NO: 421511 - DNA, 15 bp, Homo sapiens
attatttctaccaag

SEQ ID NO: 421512 - DNA, 15 bp, Homo sapiens
tattatttctaccaa

SEQ ID NO: 421513 - DNA, 15 bp, Homo sapiens
ttattatttctacca

SEQ ID NO: 421514 - DNA, 15 bp, Homo sapiens
tttattatttctacc

SEQ ID NO: 421515 - DNA, 15 bp, Homo sapiens
ttttattatttctac

SEQ ID NO: 421516 - DNA, 15 bp, Homo sapiens
attttattatttcta

SEQ ID NO: 421517 - DNA, 15 bp, Homo sapiens
tattttattatttct

SEQ ID NO: 421518 - DNA, 15 bp, Homo sapiens
ttattttattatttc

SEQ ID NO: 421519 - DNA, 15 bp, Homo sapiens
attattttattattt

SEQ ID NO: 421520 - DNA, 15 bp, Homo sapiens
cattattttattatt

SEQ ID NO: 421521 - DNA, 15 bp, Homo sapiens
accattattttatta

SEQ ID NO: 421522 - DNA, 15 bp, Homo sapiens
taccattattttatt

SEQ ID NO: 421523 - DNA, 15 bp, Homo sapiens
ataccattattttat

SEQ ID NO: 421524 - DNA, 15 bp, Homo sapiens
aataccattatttta

SEQ ID NO: 421525 - DNA, 15 bp, Homo sapiens
taataccattatttt

SEQ ID NO: 421526 - DNA, 15 bp, Homo sapiens
gtaataccattattt

SEQ ID NO: 421527 - DNA, 15 bp, Homo sapiens
tgtaataccattatt

SEQ ID NO: 421528 - DNA, 15 bp, Homo sapiens
ttgtaataccattat

SEQ ID NO: 421529 - DNA, 15 bp, Homo sapiens
attgtaataccatta

SEQ ID NO: 421530 - DNA, 15 bp, Homo sapiens
aattgtaataccatt

SEQ ID NO: 421531 - DNA, 15 bp, Homo sapiens
aaattgtaataccat

SEQ ID NO: 421532 - DNA, 15 bp, Homo sapiens
gaaattgtaatacca

SEQ ID NO: 421533 - DNA, 15 bp, Homo sapiens
tgaaattgtaatacc

SEQ ID NO: 421534 - DNA, 15 bp, Homo sapiens
ttgaaattgtaatac

SEQ ID NO: 421535 - DNA, 15 bp, Homo sapiens
cttgaaattgtaata

SEQ ID NO: 421536 - DNA, 15 bp, Homo sapiens
acttgaaattgtaat

SEQ ID NO: 421537 - DNA, 15 bp, Homo sapiens
cacttgaaattgtaa

SEQ ID NO: 421538 - DNA, 15 bp, Homo sapiens
ccacttgaaattgta

SEQ ID NO: 421539 - DNA, 15 bp, Homo sapiens
gccacttgaaattgt

SEQ ID NO: 421540 - DNA, 15 bp, Homo sapiens
agccacttgaaattg

SEQ ID NO: 421541 - DNA, 15 bp, Homo sapiens
tagccacttgaaatt

SEQ ID NO: 421542 - DNA, 15 bp, Homo sapiens
gtagccacttgaaat

SEQ ID NO: 421543 - DNA, 15 bp, Homo sapiens
agtagccacttgaaa

SEQ ID NO: 421544 - DNA, 15 bp, Homo sapiens
tagtagccacttgaa

SEQ ID NO: 421545 - DNA, 15 bp, Homo sapiens
atagtagccacttga

SEQ ID NO: 421546 - DNA, 15 bp, Homo sapiens
catagtagccacttg

SEQ ID NO: 421547 - DNA, 15 bp, Homo sapiens
tcatagtagccactt

SEQ ID NO: 421548 - DNA, 15 bp, Homo sapiens
gtcatagtagccact

SEQ ID NO: 421549 - DNA, 15 bp, Homo sapiens
tgtcatagtagccac

SEQ ID NO: 421550 - DNA, 15 bp, Homo sapiens
gtgtcatagtagcca

SEQ ID NO: 421551 - DNA, 15 bp, Homo sapiens
tgtgtcatagtagcc

SEQ ID NO: 421552 - DNA, 15 bp, Homo sapiens
ctgtgtcatagtagc

SEQ ID NO: 421553 - DNA, 15 bp, Homo sapiens
gctgtgtcatagtag

SEQ ID NO: 421554 - DNA, 15 bp, Homo sapiens
ggctgtgtcatagta

SEQ ID NO: 421555 - DNA, 15 bp, Homo sapiens
tggctgtgtcatagt

SEQ ID NO: 421556 - DNA, 15 bp, Homo sapiens
atggctgtgtcatag

SEQ ID NO: 421557 - DNA, 15 bp, Homo sapiens
tatggctgtgtcata

SEQ ID NO: 421558 - DNA, 15 bp, Homo sapiens
atatggctgtgtcat

SEQ ID NO: 421559 - DNA, 15 bp, Homo sapiens
gatatggctgtgtca

SEQ ID NO: 421560 - DNA, 15 bp, Homo sapiens
tgatatggctgtgtc

SEQ ID NO: 421561 - DNA, 15 bp, Homo sapiens
ttgatatggctgtgt

SEQ ID NO: 421562 - DNA, 15 bp, Homo sapiens
tttgatatggctgtg

SEQ ID NO: 421563 - DNA, 15 bp, Homo sapiens
ttttgatatggctgt

SEQ ID NO: 421564 - DNA, 15 bp, Homo sapiens
attttgatatggctg

SEQ ID NO: 421565 - DNA, 15 bp, Homo sapiens
tattttgatatggct

SEQ ID NO: 421566 - DNA, 15 bp, Homo sapiens
gtattttgatatggc

SEQ ID NO: 421567 - DNA, 15 bp, Homo sapiens
ggtattttgatatgg

SEQ ID NO: 421568 - DNA, 15 bp, Homo sapiens
gggtattttgatatg

SEQ ID NO: 421569 - DNA, 15 bp, Homo sapiens
agggtattttgatat

SEQ ID NO: 421570 - DNA, 15 bp, Homo sapiens
cagggtattttgata

SEQ ID NO: 421571 - DNA, 15 bp, Homo sapiens
gcagggtattttgat

SEQ ID NO: 421572 - DNA, 15 bp, Homo sapiens
agcagggtattttga

SEQ ID NO: 421573 - DNA, 15 bp, Homo sapiens
cagcagggtattttg

SEQ ID NO: 421574 - DNA, 15 bp, Homo sapiens
acagcagggtatttt

SEQ ID NO: 421575 - DNA, 15 bp, Homo sapiens
tacagcagggtattt

SEQ ID NO: 421576 - DNA, 15 bp, Homo sapiens
ttacagcagggtatt

SEQ ID NO: 421577 - DNA, 15 bp, Homo sapiens
cttacagcagggtat

SEQ ID NO: 421578 - DNA, 15 bp, Homo sapiens
ccttacagcagggta

SEQ ID NO: 421579 - DNA, 15 bp, Homo sapiens
gccttacagcagggt

SEQ ID NO: 421580 - DNA, 15 bp, Homo sapiens
tgccttacagcaggg

SEQ ID NO: 421581 - DNA, 15 bp, Homo sapiens
ttgccttacagcagg

SEQ ID NO: 421582 - DNA, 15 bp, Homo sapiens
cttgccttacagcag

SEQ ID NO: 421583 - DNA, 15 bp, Homo sapiens
gcttgccttacagca

SEQ ID NO: 421584 - DNA, 15 bp, Homo sapiens
ggcttgccttacagc

SEQ ID NO: 421585 - DNA, 15 bp, Homo sapiens
tggcttgccttacag

SEQ ID NO: 421586 - DNA, 15 bp, Homo sapiens
ttggcttgccttaca

SEQ ID NO: 421587 - DNA, 15 bp, Homo sapiens
gttggcttgccttac

SEQ ID NO: 421588 - DNA, 15 bp, Homo sapiens
ggttggcttgcctta

SEQ ID NO: 421589 - DNA, 15 bp, Homo sapiens
tggttggcttgcctt

SEQ ID NO: 421590 - DNA, 15 bp, Homo sapiens
ctggttggcttgcct

SEQ ID NO: 421591 - DNA, 15 bp, Homo sapiens
actggttggcttgcc

SEQ ID NO: 421592 - DNA, 15 bp, Homo sapiens
aactggttggcttgc

SEQ ID NO: 421593 - DNA, 15 bp, Homo sapiens
taactggttggcttg

SEQ ID NO: 421594 - DNA, 15 bp, Homo sapiens
ctaactggttggctt

SEQ ID NO: 421595 - DNA, 15 bp, Homo sapiens
cctaactggttggct

SEQ ID NO: 421596 - DNA, 15 bp, Homo sapiens
tcctaactggttggc

SEQ ID NO: 421597 - DNA, 15 bp, Homo sapiens
ctcctaactggttgg

SEQ ID NO: 421598 - DNA, 15 bp, Homo sapiens
cctcctaactggttg

SEQ ID NO: 421599 - DNA, 15 bp, Homo sapiens
gcctcctaactggtt

SEQ ID NO: 421600 - DNA, 15 bp, Homo sapiens
tgcctcctaactggt

SEQ ID NO: 421601 - DNA, 15 bp, Homo sapiens
ttgcctcctaactgg

SEQ ID NO: 421602 - DNA, 15 bp, Homo sapiens
attgcctcctaactg

SEQ ID NO: 421603 - DNA, 15 bp, Homo sapiens
aattgcctcctaact

SEQ ID NO: 421604 - DNA, 15 bp, Homo sapiens
aaattgcctcctaac

SEQ ID NO: 421605 - DNA, 15 bp, Homo sapiens
caaattgcctcctaa

SEQ ID NO: 421606 - DNA, 15 bp, Homo sapiens
tcaaattgcctccta

SEQ ID NO: 421607 - DNA, 15 bp, Homo sapiens
atcaaattgcctcct

SEQ ID NO: 421608 - DNA, 15 bp, Homo sapiens
aatcaaattgcctcc

SEQ ID NO: 421609 - DNA, 15 bp, Homo sapiens
taatcaaattgcctc

SEQ ID NO: 421610 - DNA, 15 bp, Homo sapiens
ataatcaaattgcct

SEQ ID NO: 421611 - DNA, 15 bp, Homo sapiens
aataatcaaattgcc

SEQ ID NO: 421612 - DNA, 15 bp, Homo sapiens
aaataatcaaattgc

SEQ ID NO: 421613 - DNA, 15 bp, Homo sapiens
gaaataatcaaattg

SEQ ID NO: 421614 - DNA, 15 bp, Homo sapiens
tgaaataatcaaatt

SEQ ID NO: 421615 - DNA, 15 bp, Homo sapiens
ctgaaataatcaaat

SEQ ID NO: 421616 - DNA, 15 bp, Homo sapiens
cctgaaataatcaaa

SEQ ID NO: 421617 - DNA, 15 bp, Homo sapiens
tcctgaaataatcaa

SEQ ID NO: 421618 - DNA, 15 bp, Homo sapiens
ttcctgaaataatca

SEQ ID NO: 421619 - DNA, 15 bp, Homo sapiens
tttcctgaaataatc

SEQ ID NO: 421620 - DNA, 15 bp, Homo sapiens
ttttcctgaaataat

SEQ ID NO: 421621 - DNA, 15 bp, Homo sapiens
cttttcctgaaataa

SEQ ID NO: 421622 - DNA, 15 bp, Homo sapiens
gcttttcctgaaata

SEQ ID NO: 421623 - DNA, 15 bp, Homo sapiens
tgcttttcctgaaat

SEQ ID NO: 421624 - DNA, 15 bp, Homo sapiens
ctgcttttcctgaaa

SEQ ID NO: 421625 - DNA, 15 bp, Homo sapiens
gctgcttttcctgaa

SEQ ID NO: 421626 - DNA, 15 bp, Homo sapiens
tgctgcttttcctga

SEQ ID NO: 421627 - DNA, 15 bp, Homo sapiens
atgctgcttttcctg

SEQ ID NO: 421628 - DNA, 15 bp, Homo sapiens
catgctgcttttcct

SEQ ID NO: 421629 - DNA, 15 bp, Homo sapiens
tcatgctgcttttcc

SEQ ID NO: 421630 - DNA, 15 bp, Homo sapiens
atcatgctgcttttc

SEQ ID NO: 421631 - DNA, 15 bp, Homo sapiens
tatcatgctgctttt

SEQ ID NO: 421632 - DNA, 15 bp, Homo sapiens
ctatcatgctgcttt

SEQ ID NO: 421633 - DNA, 15 bp, Homo sapiens
cctatcatgctgctt

SEQ ID NO: 421634 - DNA, 15 bp, Homo sapiens
acctatcatgctgct

SEQ ID NO: 421635 - DNA, 15 bp, Homo sapiens
tacctatcatgctgc

SEQ ID NO: 421636 - DNA, 15 bp, Homo sapiens
atacctatcatgctg

SEQ ID NO: 421637 - DNA, 15 bp, Homo sapiens
aatacctatcatgct

SEQ ID NO: 421638 - DNA, 15 bp, Homo sapiens
caatacctatcatgc

SEQ ID NO: 421639 - DNA, 15 bp, Homo sapiens
ccaatacctatcatg

SEQ ID NO: 421640 - DNA, 15 bp, Homo sapiens
tccaatacctatcat

SEQ ID NO: 421641 - DNA, 15 bp, Homo sapiens
ctccaatacctatca

SEQ ID NO: 421642 - DNA, 15 bp, Homo sapiens
actccaatacctatc

SEQ ID NO: 421643 - DNA, 15 bp, Homo sapiens
gactccaatacctat

SEQ ID NO: 421644 - DNA, 15 bp, Homo sapiens
tgactccaataccta

SEQ ID NO: 421645 - DNA, 15 bp, Homo sapiens
ttgactccaatacct

SEQ ID NO: 421646 - DNA, 15 bp, Homo sapiens
tttgactccaatacc

SEQ ID NO: 421647 - DNA, 15 bp, Homo sapiens
gtttgactccaatac

SEQ ID NO: 421648 - DNA, 15 bp, Homo sapiens
agtttgactccaata

SEQ ID NO: 421649 - DNA, 15 bp, Homo sapiens
tagtttgactccaat

SEQ ID NO: 421650 - DNA, 15 bp, Homo sapiens
ttagtttgactccaa

SEQ ID NO: 421651 - DNA, 15 bp, Homo sapiens
gttagtttgactcca

SEQ ID NO: 421652 - DNA, 15 bp, Homo sapiens
agttagtttgactcc

SEQ ID NO: 421653 - DNA, 15 bp, Homo sapiens
aagttagtttgactc

SEQ ID NO: 421654 - DNA, 15 bp, Homo sapiens
caagttagtttgact

SEQ ID NO: 421655 - DNA, 15 bp, Homo sapiens
ccaagttagtttgac

SEQ ID NO: 421656 - DNA, 15 bp, Homo sapiens
cccaagttagtttga

SEQ ID NO: 421657 - DNA, 15 bp, Homo sapiens
acccaagttagtttg

SEQ ID NO: 421658 - DNA, 15 bp, Homo sapiens
aacccaagttagttt

SEQ ID NO: 421659 - DNA, 15 bp, Homo sapiens
aaacccaagttagtt

SEQ ID NO: 421660 - DNA, 15 bp, Homo sapiens
caaacccaagttagt

SEQ ID NO: 421661 - DNA, 15 bp, Homo sapiens
tcaaacccaagttag

SEQ ID NO: 421662 - DNA, 15 bp, Homo sapiens
ttcaaacccaagtta

SEQ ID NO: 421663 - DNA, 15 bp, Homo sapiens
attcaaacccaagtt

SEQ ID NO: 421664 - DNA, 15 bp, Homo sapiens
gattcaaacccaagt

SEQ ID NO: 421665 - DNA, 15 bp, Homo sapiens
ggattcaaacccaag

SEQ ID NO: 421666 - DNA, 15 bp, Homo sapiens
gggattcaaacccaa

SEQ ID NO: 421667 - DNA, 15 bp, Homo sapiens
cgggattcaaaccca

SEQ ID NO: 421668 - DNA, 15 bp, Homo sapiens
acgggattcaaaccc

SEQ ID NO: 421669 - DNA, 15 bp, Homo sapiens
tacgggattcaaacc

SEQ ID NO: 421670 - DNA, 15 bp, Homo sapiens
atacgggattcaaac

SEQ ID NO: 421671 - DNA, 15 bp, Homo sapiens
gatacgggattcaaa

SEQ ID NO: 421672 - DNA, 15 bp, Homo sapiens
agatacgggattcaa

SEQ ID NO: 421673 - DNA, 15 bp, Homo sapiens
tagatacgggattca

SEQ ID NO: 421674 - DNA, 15 bp, Homo sapiens
gtagatacgggattc

SEQ ID NO: 421675 - DNA, 15 bp, Homo sapiens
agtagatacgggatt

SEQ ID NO: 421676 - DNA, 15 bp, Homo sapiens
tagtagatacgggat

SEQ ID NO: 421677 - DNA, 15 bp, Homo sapiens
gtagtagatacggga

SEQ ID NO: 421678 - DNA, 15 bp, Homo sapiens
agtagtagatacggg

SEQ ID NO: 421679 - DNA, 15 bp, Homo sapiens
aagtagtagatacgg

SEQ ID NO: 421680 - DNA, 15 bp, Homo sapiens
caagtagtagatacg

SEQ ID NO: 421681 - DNA, 15 bp, Homo sapiens
tcaagtagtagatac

SEQ ID NO: 421682 - DNA, 15 bp, Homo sapiens
ttcaagtagtagata

SEQ ID NO: 421683 - DNA, 15 bp, Homo sapiens
tttcaagtagtagat

SEQ ID NO: 421684 - DNA, 15 bp, Homo sapiens
ttttcaagtagtaga

SEQ ID NO: 421685 - DNA, 15 bp, Homo sapiens
attttcaagtagtag

SEQ ID NO: 421686 - DNA, 15 bp, Homo sapiens
aattttcaagtagta

SEQ ID NO: 421687 - DNA, 15 bp, Homo sapiens
aaattttcaagtagt

SEQ ID NO: 421688 - DNA, 15 bp, Homo sapiens
caaattttcaagtag

SEQ ID NO: 421689 - DNA, 15 bp, Homo sapiens
gcaaattttcaagta

SEQ ID NO: 421690 - DNA, 15 bp, Homo sapiens
tgcaaattttcaagt

SEQ ID NO: 421691 - DNA, 15 bp, Homo sapiens
atgcaaattttcaag

SEQ ID NO: 421692 - DNA, 15 bp, Homo sapiens
catgcaaattttcaa

SEQ ID NO: 421693 - DNA, 15 bp, Homo sapiens
tcatgcaaattttca

SEQ ID NO: 421694 - DNA, 15 bp, Homo sapiens
gtcatgcaaattttc

SEQ ID NO: 421695 - DNA, 15 bp, Homo sapiens
ggtcatgcaaatttt

SEQ ID NO: 421696 - DNA, 15 bp, Homo sapiens
aggtcatgcaaattt

SEQ ID NO: 421697 - DNA, 15 bp, Homo sapiens
aaggtcatgcaaatt

SEQ ID NO: 421698 - DNA, 15 bp, Homo sapiens
caaggtcatgcaaat

SEQ ID NO: 421699 - DNA, 15 bp, Homo sapiens
ccaaggtcatgcaaa

SEQ ID NO: 421700 - DNA, 15 bp, Homo sapiens
cccaaggtcatgcaa

SEQ ID NO: 421701 - DNA, 15 bp, Homo sapiens
gcccaaggtcatgca

SEQ ID NO: 421702 - DNA, 15 bp, Homo sapiens
tgcccaaggtcatgc

SEQ ID NO: 421703 - DNA, 15 bp, Homo sapiens
ttgcccaaggtcatg

SEQ ID NO: 421704 - DNA, 15 bp, Homo sapiens
tttgcccaaggtcat

SEQ ID NO: 421705 - DNA, 15 bp, Homo sapiens
atttgcccaaggtca

SEQ ID NO: 421706 - DNA, 15 bp, Homo sapiens
aatttgcccaaggtc

SEQ ID NO: 421707 - DNA, 15 bp, Homo sapiens
taatttgcccaaggt

SEQ ID NO: 421708 - DNA, 15 bp, Homo sapiens
gtaatttgcccaagg

SEQ ID NO: 421709 - DNA, 15 bp, Homo sapiens
agtaatttgcccaag

SEQ ID NO: 421710 - DNA, 15 bp, Homo sapiens
aagtaatttgcccaa

SEQ ID NO: 421711 - DNA, 15 bp, Homo sapiens
taagtaatttgccca

SEQ ID NO: 421712 - DNA, 15 bp, Homo sapiens
ttaagtaatttgccc

SEQ ID NO: 421713 - DNA, 15 bp, Homo sapiens
gttaagtaatttgcc

SEQ ID NO: 421714 - DNA, 15 bp, Homo sapiens
ggttaagtaatttgc

SEQ ID NO: 421715 - DNA, 15 bp, Homo sapiens
aggttaagtaatttg

SEQ ID NO: 421716 - DNA, 15 bp, Homo sapiens
gaggttaagtaattt

SEQ ID NO: 421717 - DNA, 15 bp, Homo sapiens
ggaggttaagtaatt

SEQ ID NO: 421718 - DNA, 15 bp, Homo sapiens
gggaggttaagtaat

SEQ ID NO: 421719 - DNA, 15 bp, Homo sapiens
agggaggttaagtaa

SEQ ID NO: 421720 - DNA, 15 bp, Homo sapiens
tagggaggttaagta

SEQ ID NO: 421721 - DNA, 15 bp, Homo sapiens
ttagggaggttaagt

SEQ ID NO: 421722 - DNA, 15 bp, Homo sapiens
cttagggaggttaag

SEQ ID NO: 421723 - DNA, 15 bp, Homo sapiens
gcttagggaggttaa

SEQ ID NO: 421724 - DNA, 15 bp, Homo sapiens
ggcttagggaggtta

SEQ ID NO: 421725 - DNA, 15 bp, Homo sapiens
aggcttagggaggtt

SEQ ID NO: 421726 - DNA, 15 bp, Homo sapiens
gaggcttagggaggt

SEQ ID NO: 421727 - DNA, 15 bp, Homo sapiens
tgaggcttagggagg

SEQ ID NO: 421728 - DNA, 15 bp, Homo sapiens
ctgaggcttagggag

SEQ ID NO: 421729 - DNA, 15 bp, Homo sapiens
gctgaggcttaggga

SEQ ID NO: 421730 - DNA, 15 bp, Homo sapiens
tgctgaggcttaggg

SEQ ID NO: 421731 - DNA, 15 bp, Homo sapiens
atgctgaggcttagg

SEQ ID NO: 421732 - DNA, 15 bp, Homo sapiens
gatgctgaggcttag

SEQ ID NO: 421733 - DNA, 15 bp, Homo sapiens
ggatgctgaggctta

SEQ ID NO: 421734 - DNA, 15 bp, Homo sapiens
aggatgctgaggctt

SEQ ID NO: 421735 - DNA, 15 bp, Homo sapiens
gaggatgctgaggct

SEQ ID NO: 421736 - DNA, 15 bp, Homo sapiens
tgaggatgctgaggc

SEQ ID NO: 421737 - DNA, 15 bp, Homo sapiens
atgaggatgctgagg

SEQ ID NO: 421738 - DNA, 15 bp, Homo sapiens
aatgaggatgctgag

SEQ ID NO: 421739 - DNA, 15 bp, Homo sapiens
gaatgaggatgctga

SEQ ID NO: 421740 - DNA, 15 bp, Homo sapiens
tgaatgaggatgctg

SEQ ID NO: 421741 - DNA, 15 bp, Homo sapiens
atgaatgaggatgct

SEQ ID NO: 421742 - DNA, 15 bp, Homo sapiens
tatgaatgaggatgc

SEQ ID NO: 421743 - DNA, 15 bp, Homo sapiens
ttatgaatgaggatg

SEQ ID NO: 421744 - DNA, 15 bp, Homo sapiens
tttatgaatgaggat

SEQ ID NO: 421745 - DNA, 15 bp, Homo sapiens
ttttatgaatgagga

SEQ ID NO: 421746 - DNA, 15 bp, Homo sapiens
attttatgaatgagg

SEQ ID NO: 421747 - DNA, 15 bp, Homo sapiens
tattttatgaatgag

SEQ ID NO: 421748 - DNA, 15 bp, Homo sapiens
ctattttatgaatga

SEQ ID NO: 421749 - DNA, 15 bp, Homo sapiens
cctattttatgaatg

SEQ ID NO: 421750 - DNA, 15 bp, Homo sapiens
tcctattttatgaat

SEQ ID NO: 421751 - DNA, 15 bp, Homo sapiens
atcctattttatgaa

SEQ ID NO: 421752 - DNA, 15 bp, Homo sapiens
tatcctattttatga

SEQ ID NO: 421753 - DNA, 15 bp, Homo sapiens
ctatcctattttatg

SEQ ID NO: 421754 - DNA, 15 bp, Homo sapiens
actatcctattttat

SEQ ID NO: 421755 - DNA, 15 bp, Homo sapiens
tactatcctatttta

SEQ ID NO: 421756 - DNA, 15 bp, Homo sapiens
ttactatcctatttt

SEQ ID NO: 421757 - DNA, 15 bp, Homo sapiens
attactatcctattt

SEQ ID NO: 421758 - DNA, 15 bp, Homo sapiens
tattactatcctatt

SEQ ID NO: 421759 - DNA, 15 bp, Homo sapiens
ttattactatcctat

SEQ ID NO: 421760 - DNA, 15 bp, Homo sapiens
gttattactatccta

SEQ ID NO: 421761 - DNA, 15 bp, Homo sapiens
tgttattactatcct

SEQ ID NO: 421762 - DNA, 15 bp, Homo sapiens
gtgttattactatcc

SEQ ID NO: 421763 - DNA, 15 bp, Homo sapiens
tgtgttattactatc

SEQ ID NO: 421764 - DNA, 15 bp, Homo sapiens
atgtgttattactat

SEQ ID NO: 421765 - DNA, 15 bp, Homo sapiens
tatgtgttattacta

SEQ ID NO: 421766 - DNA, 15 bp, Homo sapiens
atatgtgttattact

SEQ ID NO: 421767 - DNA, 15 bp, Homo sapiens
gatatgtgttattac

SEQ ID NO: 421768 - DNA, 15 bp, Homo sapiens
agatatgtgttatta

SEQ ID NO: 421769 - DNA, 15 bp, Homo sapiens
cagatatgtgttatt

SEQ ID NO: 421770 - DNA, 15 bp, Homo sapiens
tcagatatgtgttat

SEQ ID NO: 421771 - DNA, 15 bp, Homo sapiens
atcagatatgtgtta

SEQ ID NO: 421772 - DNA, 15 bp, Homo sapiens
tatcagatatgtgtt

SEQ ID NO: 421773 - DNA, 15 bp, Homo sapiens
ctatcagatatgtgt

SEQ ID NO: 421774 - DNA, 15 bp, Homo sapiens
cctatcagatatgtg

SEQ ID NO: 421775 - DNA, 15 bp, Homo sapiens
ccctatcagatatgt

SEQ ID NO: 421776 - DNA, 15 bp, Homo sapiens
accctatcagatatg

SEQ ID NO: 421777 - DNA, 15 bp, Homo sapiens
aaccctatcagatat

SEQ ID NO: 421778 - DNA, 15 bp, Homo sapiens
taaccctatcagata

SEQ ID NO: 421779 - DNA, 15 bp, Homo sapiens
ataaccctatcagat

SEQ ID NO: 421780 - DNA, 15 bp, Homo sapiens
gataaccctatcaga

SEQ ID NO: 421781 - DNA, 15 bp, Homo sapiens
tgataaccctatcag

SEQ ID NO: 421782 - DNA, 15 bp, Homo sapiens
ttgataaccctatca

SEQ ID NO: 421783 - DNA, 15 bp, Homo sapiens
attgataaccctatc

SEQ ID NO: 421784 - DNA, 15 bp, Homo sapiens
cattgataaccctat

SEQ ID NO: 421785 - DNA, 15 bp, Homo sapiens
acattgataacccta

SEQ ID NO: 421786 - DNA, 15 bp, Homo sapiens
tacattgataaccct

SEQ ID NO: 421787 - DNA, 15 bp, Homo sapiens
ttacattgataaccc

SEQ ID NO: 421788 - DNA, 15 bp, Homo sapiens
attacattgataacc

SEQ ID NO: 421789 - DNA, 15 bp, Homo sapiens
tattacattgataac

SEQ ID NO: 421790 - DNA, 15 bp, Homo sapiens
gtattacattgataa

SEQ ID NO: 421791 - DNA, 15 bp, Homo sapiens
tgtattacattgata

SEQ ID NO: 421792 - DNA, 15 bp, Homo sapiens
atgtattacattgat

SEQ ID NO: 421793 - DNA, 15 bp, Homo sapiens
catgtattacattga

SEQ ID NO: 421794 - DNA, 15 bp, Homo sapiens
acatgtattacattg

SEQ ID NO: 421795 - DNA, 15 bp, Homo sapiens
tacatgtattacatt

SEQ ID NO: 421796 - DNA, 15 bp, Homo sapiens
ttacatgtattacat

SEQ ID NO: 421797 - DNA, 15 bp, Homo sapiens
tttacatgtattaca

SEQ ID NO: 421798 - DNA, 15 bp, Homo sapiens
ttttacatgtattac

SEQ ID NO: 421799 - DNA, 15 bp, Homo sapiens
gttttacatgtatta

SEQ ID NO: 421800 - DNA, 15 bp, Homo sapiens
tgttttacatgtatt

SEQ ID NO: 421801 - DNA, 15 bp, Homo sapiens
atgttttacatgtat

SEQ ID NO: 421802 - DNA, 15 bp, Homo sapiens
tatgttttacatgta

SEQ ID NO: 421803 - DNA, 15 bp, Homo sapiens
ttatgttttacatgt

SEQ ID NO: 421804 - DNA, 15 bp, Homo sapiens
cttatgttttacatg

SEQ ID NO: 421805 - DNA, 15 bp, Homo sapiens
tcttatgttttacat

SEQ ID NO: 421806 - DNA, 15 bp, Homo sapiens
gtcttatgttttaca

SEQ ID NO: 421807 - DNA, 15 bp, Homo sapiens
ggtcttatgttttac

SEQ ID NO: 421808 - DNA, 15 bp, Homo sapiens
aggtcttatgtttta

SEQ ID NO: 421809 - DNA, 15 bp, Homo sapiens
taggtcttatgtttt

SEQ ID NO: 421810 - DNA, 15 bp, Homo sapiens
ataggtcttatgttt

SEQ ID NO: 421811 - DNA, 15 bp, Homo sapiens
aataggtcttatgtt

SEQ ID NO: 421812 - DNA, 15 bp, Homo sapiens
taataggtcttatgt

SEQ ID NO: 421813 - DNA, 15 bp, Homo sapiens
gtaataggtcttatg

SEQ ID NO: 421814 - DNA, 15 bp, Homo sapiens
tgtaataggtcttat

SEQ ID NO: 421815 - DNA, 15 bp, Homo sapiens
atgtaataggtctta

SEQ ID NO: 421816 - DNA, 15 bp, Homo sapiens
tatgtaataggtctt

SEQ ID NO: 421817 - DNA, 15 bp, Homo sapiens
gtatgtaataggtct

SEQ ID NO: 421818 - DNA, 15 bp, Homo sapiens
ggtatgtaataggtc

SEQ ID NO: 421819 - DNA, 15 bp, Homo sapiens
tggtatgtaataggt

SEQ ID NO: 421820 - DNA, 15 bp, Homo sapiens
ttggtatgtaatagg

SEQ ID NO: 421821 - DNA, 15 bp, Homo sapiens
cttggtatgtaatag

SEQ ID NO: 421822 - DNA, 15 bp, Homo sapiens
acttggtatgtaata

SEQ ID NO: 421823 - DNA, 15 bp, Homo sapiens
cacttggtatgtaat

SEQ ID NO: 421824 - DNA, 15 bp, Homo sapiens
gcacttggtatgtaa

SEQ ID NO: 421825 - DNA, 15 bp, Homo sapiens
agcacttggtatgta

SEQ ID NO: 421826 - DNA, 15 bp, Homo sapiens
gagcacttggtatgt

SEQ ID NO: 421827 - DNA, 15 bp, Homo sapiens
tgagcacttggtatg

SEQ ID NO: 421828 - DNA, 15 bp, Homo sapiens
ttgagcacttggtat

SEQ ID NO: 421829 - DNA, 15 bp, Homo sapiens
attgagcacttggta

SEQ ID NO: 421830 - DNA, 15 bp, Homo sapiens
tattgagcacttggt

SEQ ID NO: 421831 - DNA, 15 bp, Homo sapiens
ttattgagcacttgg

SEQ ID NO: 421832 - DNA, 15 bp, Homo sapiens
tttattgagcacttg

SEQ ID NO: 421833 - DNA, 15 bp, Homo sapiens
atttattgagcactt

SEQ ID NO: 421834 - DNA, 15 bp, Homo sapiens
tatttattgagcact

SEQ ID NO: 421835 - DNA, 15 bp, Homo sapiens
ttatttattgagcac

SEQ ID NO: 421836 - DNA, 15 bp, Homo sapiens
tttatttattgagca

SEQ ID NO: 421837 - DNA, 15 bp, Homo sapiens
ttttatttattgagc

SEQ ID NO: 421838 - DNA, 15 bp, Homo sapiens
tttttatttattgag

SEQ ID NO: 421839 - DNA, 15 bp, Homo sapiens
atttttatttattga

SEQ ID NO: 421840 - DNA, 15 bp, Homo sapiens
tatttttatttattg

SEQ ID NO: 421841 - DNA, 15 bp, Homo sapiens
ctatttttatttatt

SEQ ID NO: 421842 - DNA, 15 bp, Homo sapiens
actatttttatttat

SEQ ID NO: 421843 - DNA, 15 bp, Homo sapiens
cactatttttattta

SEQ ID NO: 421844 - DNA, 15 bp, Homo sapiens
tcactatttttattt

SEQ ID NO: 421845 - DNA, 15 bp, Homo sapiens
atcactatttttatt

SEQ ID NO: 421846 - DNA, 15 bp, Homo sapiens
aatcactatttttat

SEQ ID NO: 421847 - DNA, 15 bp, Homo sapiens
taatcactattttta

SEQ ID NO: 421848 - DNA, 15 bp, Homo sapiens
ataatcactattttt

SEQ ID NO: 421849 - DNA, 15 bp, Homo sapiens
aataatcactatttt

SEQ ID NO: 421850 - DNA, 15 bp, Homo sapiens
aaataatcactattt

SEQ ID NO: 421851 - DNA, 15 bp, Homo sapiens
aaaataatcactatt

SEQ ID NO: 421852 - DNA, 15 bp, Homo sapiens
aaaaataatcactat

SEQ ID NO: 421853 - DNA, 15 bp, Homo sapiens
caaaaataatcacta

SEQ ID NO: 421854 - DNA, 15 bp, Homo sapiens
tcaaaaataatcact

SEQ ID NO: 421855 - DNA, 15 bp, Homo sapiens
gtcaaaaataatcac

SEQ ID NO: 421856 - DNA, 15 bp, Homo sapiens
tgtcaaaaataatca

SEQ ID NO: 421857 - DNA, 15 bp, Homo sapiens
atgtcaaaaataatc

SEQ ID NO: 421858 - DNA, 15 bp, Homo sapiens
aatgtcaaaaataat

SEQ ID NO: 421859 - DNA, 15 bp, Homo sapiens
aaatgtcaaaaataa

SEQ ID NO: 421860 - DNA, 15 bp, Homo sapiens
aaaatgtcaaaaata

SEQ ID NO: 421861 - DNA, 15 bp, Homo sapiens
taaaatgtcaaaaat

SEQ ID NO: 421862 - DNA, 15 bp, Homo sapiens
ataaaatgtcaaaaa

SEQ ID NO: 421863 - DNA, 15 bp, Homo sapiens
aataaaatgtcaaaa

SEQ ID NO: 421864 - DNA, 15 bp, Homo sapiens
taataaaatgtcaaa

SEQ ID NO: 421865 - DNA, 15 bp, Homo sapiens
ataataaaatgtcaa

SEQ ID NO: 421866 - DNA, 15 bp, Homo sapiens
aataataaaatgtca

SEQ ID NO: 421867 - DNA, 15 bp, Homo sapiens
caataataaaatgtc

SEQ ID NO: 421868 - DNA, 15 bp, Homo sapiens
gcaataataaaatgt

SEQ ID NO: 421869 - DNA, 15 bp, Homo sapiens
agcaataataaaatg

SEQ ID NO: 421870 - DNA, 15 bp, Homo sapiens
tagcaataataaaat

SEQ ID NO: 421871 - DNA, 15 bp, Homo sapiens
ttagcaataataaaa

SEQ ID NO: 421872 - DNA, 15 bp, Homo sapiens
tttagcaataataaa

SEQ ID NO: 421873 - DNA, 15 bp, Homo sapiens
ttttagcaataataa

SEQ ID NO: 421874 - DNA, 15 bp, Homo sapiens
attttagcaataata

SEQ ID NO: 421875 - DNA, 15 bp, Homo sapiens
aattttagcaataat

SEQ ID NO: 421876 - DNA, 15 bp, Homo sapiens
aaattttagcaataa

SEQ ID NO: 421877 - DNA, 15 bp, Homo sapiens
taaattttagcaata

SEQ ID NO: 421878 - DNA, 15 bp, Homo sapiens
ataaattttagcaat

SEQ ID NO: 421879 - DNA, 15 bp, Homo sapiens
tataaattttagcaa

SEQ ID NO: 421880 - DNA, 15 bp, Homo sapiens
atataaattttagca

SEQ ID NO: 421881 - DNA, 15 bp, Homo sapiens
tatataaattttagc

SEQ ID NO: 421882 - DNA, 15 bp, Homo sapiens
gtatataaattttag

SEQ ID NO: 421883 - DNA, 15 bp, Homo sapiens
agtatataaatttta

SEQ ID NO: 421884 - DNA, 15 bp, Homo sapiens
cagtatataaatttt

SEQ ID NO: 421885 - DNA, 15 bp, Homo sapiens
tcagtatataaattt

SEQ ID NO: 421886 - DNA, 15 bp, Homo sapiens
gtcagtatataaatt

SEQ ID NO: 421887 - DNA, 15 bp, Homo sapiens
tgtcagtatataaat

SEQ ID NO: 421888 - DNA, 15 bp, Homo sapiens
ctgtcagtatataaa

SEQ ID NO: 421889 - DNA, 15 bp, Homo sapiens
tctgtcagtatataa

SEQ ID NO: 421890 - DNA, 15 bp, Homo sapiens
gtctgtcagtatata

SEQ ID NO: 421891 - DNA, 15 bp, Homo sapiens
tgtctgtcagtatat

SEQ ID NO: 421892 - DNA, 15 bp, Homo sapiens
ctgtctgtcagtata

SEQ ID NO: 421893 - DNA, 15 bp, Homo sapiens
gctgtctgtcagtat

SEQ ID NO: 421894 - DNA, 15 bp, Homo sapiens
tgctgtctgtcagta

SEQ ID NO: 421895 - DNA, 15 bp, Homo sapiens
ctgctgtctgtcagt

SEQ ID NO: 421896 - DNA, 15 bp, Homo sapiens
tctgctgtctgtcag

SEQ ID NO: 421897 - DNA, 15 bp, Homo sapiens
atctgctgtctgtca

SEQ ID NO: 421898 - DNA, 15 bp, Homo sapiens
aatctgctgtctgtc

SEQ ID NO: 421899 - DNA, 15 bp, Homo sapiens
gaatctgctgtctgt

SEQ ID NO: 421900 - DNA, 15 bp, Homo sapiens
agaatctgctgtctg

SEQ ID NO: 421901 - DNA, 15 bp, Homo sapiens
tagaatctgctgtct

SEQ ID NO: 421902 - DNA, 15 bp, Homo sapiens
ttagaatctgctgtc

SEQ ID NO: 421903 - DNA, 15 bp, Homo sapiens
tttagaatctgctgt

SEQ ID NO: 421904 - DNA, 15 bp, Homo sapiens
ttttagaatctgctg

SEQ ID NO: 421905 - DNA, 15 bp, Homo sapiens
gttttagaatctgct

SEQ ID NO: 421906 - DNA, 15 bp, Homo sapiens
tgttttagaatctgc

SEQ ID NO: 421907 - DNA, 15 bp, Homo sapiens
ctgttttagaatctg

SEQ ID NO: 421908 - DNA, 15 bp, Homo sapiens
actgttttagaatct

SEQ ID NO: 421909 - DNA, 15 bp, Homo sapiens
cactgttttagaatc

SEQ ID NO: 421910 - DNA, 15 bp, Homo sapiens
gcactgttttagaat

SEQ ID NO: 421911 - DNA, 15 bp, Homo sapiens
tgcactgttttagaa

SEQ ID NO: 421912 - DNA, 15 bp, Homo sapiens
ttgcactgttttaga

SEQ ID NO: 421913 - DNA, 15 bp, Homo sapiens
tttgcactgttttag

SEQ ID NO: 421914 - DNA, 15 bp, Homo sapiens
ttttgcactgtttta

SEQ ID NO: 421915 - DNA, 15 bp, Homo sapiens
gttttgcactgtttt

SEQ ID NO: 421916 - DNA, 15 bp, Homo sapiens
tgttttgcactgttt

SEQ ID NO: 421917 - DNA, 15 bp, Homo sapiens
ctgttttgcactgtt

SEQ ID NO: 421918 - DNA, 15 bp, Homo sapiens
actgttttgcactgt

SEQ ID NO: 421919 - DNA, 15 bp, Homo sapiens
tactgttttgcactg

SEQ ID NO: 421920 - DNA, 15 bp, Homo sapiens
ctactgttttgcact

SEQ ID NO: 421921 - DNA, 15 bp, Homo sapiens
gctactgttttgcac

SEQ ID NO: 421922 - DNA, 15 bp, Homo sapiens
ggctactgttttgca

SEQ ID NO: 421923 - DNA, 15 bp, Homo sapiens
tggctactgttttgc

SEQ ID NO: 421924 - DNA, 15 bp, Homo sapiens
gtggctactgttttg

SEQ ID NO: 421925 - DNA, 15 bp, Homo sapiens
agtggctactgtttt

SEQ ID NO: 421926 - DNA, 15 bp, Homo sapiens
tagtggctactgttt

SEQ ID NO: 421927 - DNA, 15 bp, Homo sapiens
ctagtggctactgtt

SEQ ID NO: 421928 - DNA, 15 bp, Homo sapiens
gctagtggctactgt

SEQ ID NO: 421929 - DNA, 15 bp, Homo sapiens
ggctagtggctactg

SEQ ID NO: 421930 - DNA, 15 bp, Homo sapiens
tggctagtggctact

SEQ ID NO: 421931 - DNA, 15 bp, Homo sapiens
gtggctagtggctac

SEQ ID NO: 421932 - DNA, 15 bp, Homo sapiens
tgtggctagtggcta

SEQ ID NO: 421933 - DNA, 15 bp, Homo sapiens
ctgtggctagtggct

SEQ ID NO: 421934 - DNA, 15 bp, Homo sapiens
cctgtggctagtggc

SEQ ID NO: 421935 - DNA, 15 bp, Homo sapiens
acctgtggctagtgg

SEQ ID NO: 421936 - DNA, 15 bp, Homo sapiens
cacctgtggctagtg

SEQ ID NO: 421937 - DNA, 15 bp, Homo sapiens
tcacctgtggctagt

SEQ ID NO: 421938 - DNA, 15 bp, Homo sapiens
gtcacctgtggctag

SEQ ID NO: 421939 - DNA, 15 bp, Homo sapiens
agtcacctgtggcta

SEQ ID NO: 421940 - DNA, 15 bp, Homo sapiens
tagtcacctgtggct

SEQ ID NO: 421941 - DNA, 15 bp, Homo sapiens
gtagtcacctgtggc

SEQ ID NO: 421942 - DNA, 15 bp, Homo sapiens
agtagtcacctgtgg

SEQ ID NO: 421943 - DNA, 15 bp, Homo sapiens
cagtagtcacctgtg

SEQ ID NO: 421944 - DNA, 15 bp, Homo sapiens
tcagtagtcacctgt

SEQ ID NO: 421945 - DNA, 15 bp, Homo sapiens
ctcagtagtcacctg

SEQ ID NO: 421946 - DNA, 15 bp, Homo sapiens
gctcagtagtcacct

SEQ ID NO: 421947 - DNA, 15 bp, Homo sapiens
tgctcagtagtcacc

SEQ ID NO: 421948 - DNA, 15 bp, Homo sapiens
gtgctcagtagtcac

SEQ ID NO: 421949 - DNA, 15 bp, Homo sapiens
agtgctcagtagtca

SEQ ID NO: 421950 - DNA, 15 bp, Homo sapiens
gagtgctcagtagtc

SEQ ID NO: 421951 - DNA, 15 bp, Homo sapiens
ggagtgctcagtagt

SEQ ID NO: 421952 - DNA, 15 bp, Homo sapiens
tggagtgctcagtag

SEQ ID NO: 421953 - DNA, 15 bp, Homo sapiens
ttggagtgctcagta

SEQ ID NO: 421954 - DNA, 15 bp, Homo sapiens
tttggagtgctcagt

SEQ ID NO: 421955 - DNA, 15 bp, Homo sapiens
atttggagtgctcag

SEQ ID NO: 421956 - DNA, 15 bp, Homo sapiens
catttggagtgctca

SEQ ID NO: 421957 - DNA, 15 bp, Homo sapiens
acatttggagtgctc

SEQ ID NO: 421958 - DNA, 15 bp, Homo sapiens
cacatttggagtgct

SEQ ID NO: 421959 - DNA, 15 bp, Homo sapiens
ccacatttggagtgc

SEQ ID NO: 421960 - DNA, 15 bp, Homo sapiens
accacatttggagtg

SEQ ID NO: 421961 - DNA, 15 bp, Homo sapiens
aaccacatttggagt

SEQ ID NO: 421962 - DNA, 15 bp, Homo sapiens
caaccacatttggag

SEQ ID NO: 421963 - DNA, 15 bp, Homo sapiens
ccaaccacatttgga

SEQ ID NO: 421964 - DNA, 15 bp, Homo sapiens
accaaccacatttgg

SEQ ID NO: 421965 - DNA, 15 bp, Homo sapiens
gaccaaccacatttg

SEQ ID NO: 421966 - DNA, 15 bp, Homo sapiens
agaccaaccacattt

SEQ ID NO: 421967 - DNA, 15 bp, Homo sapiens
cagaccaaccacatt

SEQ ID NO: 421968 - DNA, 15 bp, Homo sapiens
gcagaccaaccacat

SEQ ID NO: 421969 - DNA, 15 bp, Homo sapiens
tgcagaccaaccaca

SEQ ID NO: 421970 - DNA, 15 bp, Homo sapiens
gtgcagaccaaccac

SEQ ID NO: 421971 - DNA, 15 bp, Homo sapiens
agtgcagaccaacca

SEQ ID NO: 421972 - DNA, 15 bp, Homo sapiens
cagtgcagaccaacc

SEQ ID NO: 421973 - DNA, 15 bp, Homo sapiens
gcagtgcagaccaac

SEQ ID NO: 421974 - DNA, 15 bp, Homo sapiens
tgcagtgcagaccaa

SEQ ID NO: 421975 - DNA, 15 bp, Homo sapiens
ttgcagtgcagacca

SEQ ID NO: 421976 - DNA, 15 bp, Homo sapiens
tttgcagtgcagacc

SEQ ID NO: 421977 - DNA, 15 bp, Homo sapiens
ctttgcagtgcagac

SEQ ID NO: 421978 - DNA, 15 bp, Homo sapiens
actttgcagtgcaga

SEQ ID NO: 421979 - DNA, 15 bp, Homo sapiens
cactttgcagtgcag

SEQ ID NO: 421980 - DNA, 15 bp, Homo sapiens
gcactttgcagtgca

SEQ ID NO: 421981 - DNA, 15 bp, Homo sapiens
agcactttgcagtgc

SEQ ID NO: 421982 - DNA, 15 bp, Homo sapiens
tagcactttgcagtg

SEQ ID NO: 421983 - DNA, 15 bp, Homo sapiens
atagcactttgcagt

SEQ ID NO: 421984 - DNA, 15 bp, Homo sapiens
tatagcactttgcag

SEQ ID NO: 421985 - DNA, 15 bp, Homo sapiens
ttatagcactttgca

SEQ ID NO: 421986 - DNA, 15 bp, Homo sapiens
cttatagcactttgc

SEQ ID NO: 421987 - DNA, 15 bp, Homo sapiens
acttatagcactttg

SEQ ID NO: 421988 - DNA, 15 bp, Homo sapiens
tacttatagcacttt

SEQ ID NO: 421989 - DNA, 15 bp, Homo sapiens
atacttatagcactt

SEQ ID NO: 421990 - DNA, 15 bp, Homo sapiens
tatacttatagcact

SEQ ID NO: 421991 - DNA, 15 bp, Homo sapiens
ttatacttatagcac

SEQ ID NO: 421992 - DNA, 15 bp, Homo sapiens
tttatacttatagca

SEQ ID NO: 421993 - DNA, 15 bp, Homo sapiens
ttttatacttatagc

SEQ ID NO: 421994 - DNA, 15 bp, Homo sapiens
attttatacttatag

SEQ ID NO: 421995 - DNA, 15 bp, Homo sapiens
tattttatacttata

SEQ ID NO: 421996 - DNA, 15 bp, Homo sapiens
atattttatacttat

SEQ ID NO: 421997 - DNA, 15 bp, Homo sapiens
catattttatactta

SEQ ID NO: 421998 - DNA, 15 bp, Homo sapiens
gcatattttatactt

SEQ ID NO: 421999 - DNA, 15 bp, Homo sapiens
tgcatattttatact

SEQ ID NO: 422000 - DNA, 15 bp, Homo sapiens
gtgcatattttatac

SEQ ID NO: 422001 - DNA, 15 bp, Homo sapiens
agtgcatattttata

SEQ ID NO: 422002 - DNA, 15 bp, Homo sapiens
cagtgcatattttat

SEQ ID NO: 422003 - DNA, 15 bp, Homo sapiens
tcagtgcatatttta

SEQ ID NO: 422004 - DNA, 15 bp, Homo sapiens
ttcagtgcatatttt

SEQ ID NO: 422005 - DNA, 15 bp, Homo sapiens
attcagtgcatattt

SEQ ID NO: 422006 - DNA, 15 bp, Homo sapiens
aattcagtgcatatt

SEQ ID NO: 422007 - DNA, 15 bp, Homo sapiens
aaattcagtgcatat

SEQ ID NO: 422008 - DNA, 15 bp, Homo sapiens
gaaattcagtgcata

SEQ ID NO: 422009 - DNA, 15 bp, Homo sapiens
tgaaattcagtgcat

SEQ ID NO: 422010 - DNA, 15 bp, Homo sapiens
ttgaaattcagtgca

SEQ ID NO: 422011 - DNA, 15 bp, Homo sapiens
tttgaaattcagtgc

SEQ ID NO: 422012 - DNA, 15 bp, Homo sapiens
ctttgaaattcagtg

SEQ ID NO: 422013 - DNA, 15 bp, Homo sapiens
gctttgaaattcagt

SEQ ID NO: 422014 - DNA, 15 bp, Homo sapiens
ggctttgaaattcag

SEQ ID NO: 422015 - DNA, 15 bp, Homo sapiens
aggctttgaaattca

SEQ ID NO: 422016 - DNA, 15 bp, Homo sapiens
aaggctttgaaattc

SEQ ID NO: 422017 - DNA, 15 bp, Homo sapiens
aaaggctttgaaatt

SEQ ID NO: 422018 - DNA, 15 bp, Homo sapiens
caaaggctttgaaat

SEQ ID NO: 422019 - DNA, 15 bp, Homo sapiens
acaaaggctttgaaa

SEQ ID NO: 422020 - DNA, 15 bp, Homo sapiens
cacaaaggctttgaa

SEQ ID NO: 422021 - DNA, 15 bp, Homo sapiens
tcacaaaggctttga

SEQ ID NO: 422022 - DNA, 15 bp, Homo sapiens
ttcacaaaggctttg

SEQ ID NO: 422023 - DNA, 15 bp, Homo sapiens
tttcacaaaggcttt

SEQ ID NO: 422024 - DNA, 15 bp, Homo sapiens
ctttcacaaaggctt

SEQ ID NO: 422025 - DNA, 15 bp, Homo sapiens
actttcacaaaggct

SEQ ID NO: 422026 - DNA, 15 bp, Homo sapiens
tactttcacaaaggc

SEQ ID NO: 422027 - DNA, 15 bp, Homo sapiens
ttactttcacaaagg

SEQ ID NO: 422028 - DNA, 15 bp, Homo sapiens
attactttcacaaag

SEQ ID NO: 422029 - DNA, 15 bp, Homo sapiens
cattactttcacaaa

SEQ ID NO: 422030 - DNA, 15 bp, Homo sapiens
acattactttcacaa

SEQ ID NO: 422031 - DNA, 15 bp, Homo sapiens
tacattactttcaca

SEQ ID NO: 422032 - DNA, 15 bp, Homo sapiens
ttacattactttcac

SEQ ID NO: 422033 - DNA, 15 bp, Homo sapiens
tttacattactttca

SEQ ID NO: 422034 - DNA, 15 bp, Homo sapiens
atttacattactttc

SEQ ID NO: 422035 - DNA, 15 bp, Homo sapiens
aatttacattacttt

SEQ ID NO: 422036 - DNA, 15 bp, Homo sapiens
taatttacattactt

SEQ ID NO: 422037 - DNA, 15 bp, Homo sapiens
ataatttacattact

SEQ ID NO: 422038 - DNA, 15 bp, Homo sapiens
tataatttacattac

SEQ ID NO: 422039 - DNA, 15 bp, Homo sapiens
gtataatttacatta

SEQ ID NO: 422040 - DNA, 15 bp, Homo sapiens
ggtataatttacatt

SEQ ID NO: 422041 - DNA, 15 bp, Homo sapiens
tggtataatttacat

SEQ ID NO: 422042 - DNA, 15 bp, Homo sapiens
atggtataatttaca

SEQ ID NO: 422043 - DNA, 15 bp, Homo sapiens
aatggtataatttac

SEQ ID NO: 422044 - DNA, 15 bp, Homo sapiens
taatggtataattta

SEQ ID NO: 422045 - DNA, 15 bp, Homo sapiens
ttaatggtataattt

SEQ ID NO: 422046 - DNA, 15 bp, Homo sapiens
attaatggtataatt

SEQ ID NO: 422047 - DNA, 15 bp, Homo sapiens
aattaatggtataat

SEQ ID NO: 422048 - DNA, 15 bp, Homo sapiens
gaattaatggtataa

SEQ ID NO: 422049 - DNA, 15 bp, Homo sapiens
agaattaatggtata

SEQ ID NO: 422050 - DNA, 15 bp, Homo sapiens
aagaattaatggtat

SEQ ID NO: 422051 - DNA, 15 bp, Homo sapiens
aaagaattaatggta

SEQ ID NO: 422052 - DNA, 15 bp, Homo sapiens
aaaagaattaatggt

SEQ ID NO: 422053 - DNA, 15 bp, Homo sapiens
aaaaagaattaatgg

SEQ ID NO: 422054 - DNA, 15 bp, Homo sapiens
taaaaagaattaatg

SEQ ID NO: 422055 - DNA, 15 bp, Homo sapiens
ataaaaagaattaat

SEQ ID NO: 422056 - DNA, 15 bp, Homo sapiens
aataaaaagaattaa

SEQ ID NO: 422057 - DNA, 15 bp, Homo sapiens
aaataaaaagaatta

SEQ ID NO: 422058 - DNA, 15 bp, Homo sapiens
aaaataaaaagaatt

SEQ ID NO: 422059 - DNA, 15 bp, Homo sapiens
aaaaataaaaagaat

SEQ ID NO: 422060 - DNA, 15 bp, Homo sapiens
taaaaataaaaagaa

SEQ ID NO: 422061 - DNA, 15 bp, Homo sapiens
ataaaaataaaaaga

SEQ ID NO: 422062 - DNA, 15 bp, Homo sapiens
aataaaaataaaaag

SEQ ID NO: 422063 - DNA, 15 bp, Homo sapiens
taataaaaataaaaa

SEQ ID NO: 422064 - DNA, 15 bp, Homo sapiens
gtaataaaaataaaa

SEQ ID NO: 422065 - DNA, 15 bp, Homo sapiens
tgtaataaaaataaa

SEQ ID NO: 422066 - DNA, 15 bp, Homo sapiens
atgtaataaaaataa

SEQ ID NO: 422067 - DNA, 15 bp, Homo sapiens
catgtaataaaaata

SEQ ID NO: 422068 - DNA, 15 bp, Homo sapiens
tcatgtaataaaaat

SEQ ID NO: 422069 - DNA, 15 bp, Homo sapiens
atcatgtaataaaaa

SEQ ID NO: 422070 - DNA, 15 bp, Homo sapiens
catcatgtaataaaa

SEQ ID NO: 422071 - DNA, 15 bp, Homo sapiens
tcatcatgtaataaa

SEQ ID NO: 422072 - DNA, 15 bp, Homo sapiens
ttcatcatgtaataa

SEQ ID NO: 422073 - DNA, 15 bp, Homo sapiens
tttcatcatgtaata

SEQ ID NO: 422074 - DNA, 15 bp, Homo sapiens
atttcatcatgtaat

SEQ ID NO: 422075 - DNA, 15 bp, Homo sapiens
aatttcatcatgtaa

SEQ ID NO: 422076 - DNA, 15 bp, Homo sapiens
caatttcatcatgta

SEQ ID NO: 422077 - DNA, 15 bp, Homo sapiens
acaatttcatcatgt

SEQ ID NO: 422078 - DNA, 15 bp, Homo sapiens
tacaatttcatcatg

SEQ ID NO: 422079 - DNA, 15 bp, Homo sapiens
ttacaatttcatcat

SEQ ID NO: 422080 - DNA, 15 bp, Homo sapiens
attacaatttcatca

SEQ ID NO: 422081 - DNA, 15 bp, Homo sapiens
tattacaatttcatc

SEQ ID NO: 422082 - DNA, 15 bp, Homo sapiens
atattacaatttcat

SEQ ID NO: 422083 - DNA, 15 bp, Homo sapiens
aatattacaatttca

SEQ ID NO: 422084 - DNA, 15 bp, Homo sapiens
aaatattacaatttc

SEQ ID NO: 422085 - DNA, 15 bp, Homo sapiens
aaaatattacaattt

SEQ ID NO: 422086 - DNA, 15 bp, Homo sapiens
caaaatattacaatt

SEQ ID NO: 422087 - DNA, 15 bp, Homo sapiens
ccaaaatattacaat

SEQ ID NO: 422088 - DNA, 15 bp, Homo sapiens
cccaaaatattacaa

SEQ ID NO: 422089 - DNA, 15 bp, Homo sapiens
gcccaaaatattaca

SEQ ID NO: 422090 - DNA, 15 bp, Homo sapiens
tgcccaaaatattac

SEQ ID NO: 422091 - DNA, 15 bp, Homo sapiens
atgcccaaaatatta

SEQ ID NO: 422092 - DNA, 15 bp, Homo sapiens
tatgcccaaaatatt

SEQ ID NO: 422093 - DNA, 15 bp, Homo sapiens
atatgcccaaaatat

SEQ ID NO: 422094 - DNA, 15 bp, Homo sapiens
aatatgcccaaaata

SEQ ID NO: 422095 - DNA, 15 bp, Homo sapiens
taatatgcccaaaat

SEQ ID NO: 422096 - DNA, 15 bp, Homo sapiens
ctaatatgcccaaaa

SEQ ID NO: 422097 - DNA, 15 bp, Homo sapiens
cctaatatgcccaaa

SEQ ID NO: 422098 - DNA, 15 bp, Homo sapiens
acctaatatgcccaa

SEQ ID NO: 422099 - DNA, 15 bp, Homo sapiens
aacctaatatgccca

SEQ ID NO: 422100 - DNA, 15 bp, Homo sapiens
taacctaatatgccc

SEQ ID NO: 422101 - DNA, 15 bp, Homo sapiens
ttaacctaatatgcc

SEQ ID NO: 422102 - DNA, 15 bp, Homo sapiens
tttaacctaatatgc

SEQ ID NO: 422103 - DNA, 15 bp, Homo sapiens
atttaacctaatatg

SEQ ID NO: 422104 - DNA, 15 bp, Homo sapiens
tatttaacctaatat

SEQ ID NO: 422105 - DNA, 15 bp, Homo sapiens
ttatttaacctaata

SEQ ID NO: 422106 - DNA, 15 bp, Homo sapiens
tttatttaacctaat

SEQ ID NO: 422107 - DNA, 15 bp, Homo sapiens
ttttatttaacctaa

SEQ ID NO: 422108 - DNA, 15 bp, Homo sapiens
attttatttaaccta

SEQ ID NO: 422109 - DNA, 15 bp, Homo sapiens
tattttatttaacct

SEQ ID NO: 422110 - DNA, 15 bp, Homo sapiens
atattttatttaacc

SEQ ID NO: 422111 - DNA, 15 bp, Homo sapiens
tatattttatttaac

SEQ ID NO: 422112 - DNA, 15 bp, Homo sapiens
atatattttatttaa

SEQ ID NO: 422113 - DNA, 15 bp, Homo sapiens
aatatattttattta

SEQ ID NO: 422114 - DNA, 15 bp, Homo sapiens
taatatattttattt

SEQ ID NO: 422115 - DNA, 15 bp, Homo sapiens
ataatatattttatt

SEQ ID NO: 422116 - DNA, 15 bp, Homo sapiens
aataatatattttat

SEQ ID NO: 422117 - DNA, 15 bp, Homo sapiens
taataatatatttta

SEQ ID NO: 422118 - DNA, 15 bp, Homo sapiens
ctaataatatatttt

SEQ ID NO: 422119 - DNA, 15 bp, Homo sapiens
tctaataatatattt

SEQ ID NO: 422120 - DNA, 15 bp, Homo sapiens
ttctaataatatatt

SEQ ID NO: 422121 - DNA, 15 bp, Homo sapiens
attctaataatatat

SEQ ID NO: 422122 - DNA, 15 bp, Homo sapiens
aattctaataatata

SEQ ID NO: 422123 - DNA, 15 bp, Homo sapiens
taattctaataatat

SEQ ID NO: 422124 - DNA, 15 bp, Homo sapiens
ttaattctaataata

SEQ ID NO: 422125 - DNA, 15 bp, Homo sapiens
attaattctaataat

SEQ ID NO: 422126 - DNA, 15 bp, Homo sapiens
aattaattctaataa

SEQ ID NO: 422127 - DNA, 15 bp, Homo sapiens
aaattaattctaata

SEQ ID NO: 422128 - DNA, 15 bp, Homo sapiens
aaaattaattctaat

SEQ ID NO: 422129 - DNA, 15 bp, Homo sapiens
aaaaattaattctaa

SEQ ID NO: 422130 - DNA, 15 bp, Homo sapiens
gaaaaattaattcta

SEQ ID NO: 422131 - DNA, 15 bp, Homo sapiens
ggaaaaattaattct

SEQ ID NO: 422132 - DNA, 15 bp, Homo sapiens
aggaaaaattaattc

SEQ ID NO: 422133 - DNA, 15 bp, Homo sapiens
taggaaaaattaatt

SEQ ID NO: 422134 - DNA, 15 bp, Homo sapiens
ataggaaaaattaat

SEQ ID NO: 422135 - DNA, 15 bp, Homo sapiens
aataggaaaaattaa

SEQ ID NO: 422136 - DNA, 15 bp, Homo sapiens
aaataggaaaaatta

SEQ ID NO: 422137 - DNA, 15 bp, Homo sapiens
gaaataggaaaaatt

SEQ ID NO: 422138 - DNA, 15 bp, Homo sapiens
agaaataggaaaaat

SEQ ID NO: 422139 - DNA, 15 bp, Homo sapiens
aagaaataggaaaaa

SEQ ID NO: 422140 - DNA, 15 bp, Homo sapiens
aaagaaataggaaaa

SEQ ID NO: 422141 - DNA, 15 bp, Homo sapiens
taaaagaaataggaa

SEQ ID NO: 422142 - DNA, 15 bp, Homo sapiens
ataaaagaaatagga

SEQ ID NO: 422143 - DNA, 15 bp, Homo sapiens
aataaaagaaatagg

SEQ ID NO: 422144 - DNA, 15 bp, Homo sapiens
taataaaagaaatag

SEQ ID NO: 422145 - DNA, 15 bp, Homo sapiens
ataataaaagaaata

SEQ ID NO: 422146 - DNA, 15 bp, Homo sapiens
aataataaaagaaat

SEQ ID NO: 422147 - DNA, 15 bp, Homo sapiens
aaataataaaagaaa

SEQ ID NO: 422148 - DNA, 15 bp, Homo sapiens
aaaataataaaagaa

SEQ ID NO: 422149 - DNA, 15 bp, Homo sapiens
taaaataataaaaga

SEQ ID NO: 422150 - DNA, 15 bp, Homo sapiens
ttaaaataataaaag

SEQ ID NO: 422151 - DNA, 15 bp, Homo sapiens
attaaaataataaaa

SEQ ID NO: 422152 - DNA, 15 bp, Homo sapiens
cattaaaataataaa

SEQ ID NO: 422153 - DNA, 15 bp, Homo sapiens
acattaaaataataa

SEQ ID NO: 422154 - DNA, 15 bp, Homo sapiens
tacattaaaataata

SEQ ID NO: 422155 - DNA, 15 bp, Homo sapiens
ttacattaaaataat

SEQ ID NO: 422156 - DNA, 15 bp, Homo sapiens
attacattaaaataa

SEQ ID NO: 422157 - DNA, 15 bp, Homo sapiens
tattacattaaaata

SEQ ID NO: 422158 - DNA, 15 bp, Homo sapiens
gtattacattaaaat

SEQ ID NO: 422159 - DNA, 15 bp, Homo sapiens
agtattacattaaaa

SEQ ID NO: 422160 - DNA, 15 bp, Homo sapiens
tagtattacattaaa

SEQ ID NO: 422161 - DNA, 15 bp, Homo sapiens
ctagtattacattaa

SEQ ID NO: 422162 - DNA, 15 bp, Homo sapiens
tctagtattacatta

SEQ ID NO: 422163 - DNA, 15 bp, Homo sapiens
ttctagtattacatt

SEQ ID NO: 422164 - DNA, 15 bp, Homo sapiens
tttctagtattacat

SEQ ID NO: 422165 - DNA, 15 bp, Homo sapiens
ttttctagtattaca

SEQ ID NO: 422166 - DNA, 15 bp, Homo sapiens
attttctagtattac

SEQ ID NO: 422167 - DNA, 15 bp, Homo sapiens
aattttctagtatta

SEQ ID NO: 422168 - DNA, 15 bp, Homo sapiens
aaattttctagtatt

SEQ ID NO: 422169 - DNA, 15 bp, Homo sapiens
taaattttctagtat

SEQ ID NO: 422170 - DNA, 15 bp, Homo sapiens
ttaaattttctagta

SEQ ID NO: 422171 - DNA, 15 bp, Homo sapiens
tttaaattttctagt

SEQ ID NO: 422172 - DNA, 15 bp, Homo sapiens
ttttaaattttctag

SEQ ID NO: 422173 - DNA, 15 bp, Homo sapiens
attttaaattttcta

SEQ ID NO: 422174 - DNA, 15 bp, Homo sapiens
aattttaaattttct

SEQ ID NO: 422175 - DNA, 15 bp, Homo sapiens
taattttaaattttc

SEQ ID NO: 422176 - DNA, 15 bp, Homo sapiens
ataattttaaatttt

SEQ ID NO: 422177 - DNA, 15 bp, Homo sapiens
tataattttaaattt

SEQ ID NO: 422178 - DNA, 15 bp, Homo sapiens
atataattttaaatt

SEQ ID NO: 422179 - DNA, 15 bp, Homo sapiens
tatataattttaaat

SEQ ID NO: 422180 - DNA, 15 bp, Homo sapiens
atatataattttaaa

SEQ ID NO: 422181 - DNA, 15 bp, Homo sapiens
catatataattttaa

SEQ ID NO: 422182 - DNA, 15 bp, Homo sapiens
acatatataatttta

SEQ ID NO: 422183 - DNA, 15 bp, Homo sapiens
cacatatataatttt

SEQ ID NO: 422184 - DNA, 15 bp, Homo sapiens
tcacatatataattt

SEQ ID NO: 422185 - DNA, 15 bp, Homo sapiens
gtcacatatataatt

SEQ ID NO: 422186 - DNA, 15 bp, Homo sapiens
tgtcacatatataat

SEQ ID NO: 422187 - DNA, 15 bp, Homo sapiens
gtgtcacatatataa

SEQ ID NO: 422188 - DNA, 15 bp, Homo sapiens
tgtgtcacatatata

SEQ ID NO: 422189 - DNA, 15 bp, Homo sapiens
atgtgtcacatatat

SEQ ID NO: 422190 - DNA, 15 bp, Homo sapiens
aatgtgtcacatata

SEQ ID NO: 422191 - DNA, 15 bp, Homo sapiens
gaatgtgtcacatat

SEQ ID NO: 422192 - DNA, 15 bp, Homo sapiens
agaatgtgtcacata

SEQ ID NO: 422193 - DNA, 15 bp, Homo sapiens
tagaatgtgtcacat

SEQ ID NO: 422194 - DNA, 15 bp, Homo sapiens
gtagaatgtgtcaca

SEQ ID NO: 422195 - DNA, 15 bp, Homo sapiens
agtagaatgtgtcac

SEQ ID NO: 422196 - DNA, 15 bp, Homo sapiens
aagtagaatgtgtca

SEQ ID NO: 422197 - DNA, 15 bp, Homo sapiens
gaagtagaatgtgtc

SEQ ID NO: 422198 - DNA, 15 bp, Homo sapiens
agaagtagaatgtgt

SEQ ID NO: 422199 - DNA, 15 bp, Homo sapiens
tagaagtagaatgtg

SEQ ID NO: 422200 - DNA, 15 bp, Homo sapiens
gtagaagtagaatgt

SEQ ID NO: 422201 - DNA, 15 bp, Homo sapiens
agtagaagtagaatg

SEQ ID NO: 422202 - DNA, 15 bp, Homo sapiens
cagtagaagtagaat

SEQ ID NO: 422203 - DNA, 15 bp, Homo sapiens
ccagtagaagtagaa

SEQ ID NO: 422204 - DNA, 15 bp, Homo sapiens
tccagtagaagtaga

SEQ ID NO: 422205 - DNA, 15 bp, Homo sapiens
gtccagtagaagtag

SEQ ID NO: 422206 - DNA, 15 bp, Homo sapiens
tgtccagtagaagta

SEQ ID NO: 422207 - DNA, 15 bp, Homo sapiens
ctgtccagtagaagt

SEQ ID NO: 422208 - DNA, 15 bp, Homo sapiens
actgtccagtagaag

SEQ ID NO: 422209 - DNA, 15 bp, Homo sapiens
cactgtccagtagaa

SEQ ID NO: 422210 - DNA, 15 bp, Homo sapiens
gcactgtccagtaga

SEQ ID NO: 422211 - DNA, 15 bp, Homo sapiens
agcactgtccagtag

SEQ ID NO: 422212 - DNA, 15 bp, Homo sapiens
aagcactgtccagta

SEQ ID NO: 422213 - DNA, 15 bp, Homo sapiens
gaagcactgtccagt

SEQ ID NO: 422214 - DNA, 15 bp, Homo sapiens
agaagcactgtccag

SEQ ID NO: 422215 - DNA, 15 bp, Homo sapiens
gagaagcactgtcca

SEQ ID NO: 422216 - DNA, 15 bp, Homo sapiens
agagaagcactgtcc

SEQ ID NO: 422217 - DNA, 15 bp, Homo sapiens
tagagaagcactgtc

SEQ ID NO: 422218 - DNA, 15 bp, Homo sapiens
ctagagaagcactgt

SEQ ID NO: 422219 - DNA, 15 bp, Homo sapiens
ctctagagaagcact

SEQ ID NO: 422220 - DNA, 15 bp, Homo sapiens
tctctagagaagcac

SEQ ID NO: 422221 - DNA, 15 bp, Homo sapiens
atctctagagaagca

SEQ ID NO: 422222 - DNA, 15 bp, Homo sapiens
tatctctagagaagc

SEQ ID NO: 422223 - DNA, 15 bp, Homo sapiens
atatctctagagaag

SEQ ID NO: 422224 - DNA, 15 bp, Homo sapiens
aatatctctagagaa

SEQ ID NO: 422225 - DNA, 15 bp, Homo sapiens
taatatctctagaga

SEQ ID NO: 422226 - DNA, 15 bp, Homo sapiens
ttaatatctctagag

SEQ ID NO: 422227 - DNA, 15 bp, Homo sapiens
cttaatatctctaga

SEQ ID NO: 422228 - DNA, 15 bp, Homo sapiens
tcttaatatctctag

SEQ ID NO: 422229 - DNA, 15 bp, Homo sapiens
ttcttaatatctcta

SEQ ID NO: 422230 - DNA, 15 bp, Homo sapiens
cttcttaatatctct

SEQ ID NO: 422231 - DNA, 15 bp, Homo sapiens
tcttcttaatatctc

SEQ ID NO: 422232 - DNA, 15 bp, Homo sapiens
atcttcttaatatct

SEQ ID NO: 422233 - DNA, 15 bp, Homo sapiens
tatcttcttaatatc

SEQ ID NO: 422234 - DNA, 15 bp, Homo sapiens
atatcttcttaatat

SEQ ID NO: 422235 - DNA, 15 bp, Homo sapiens
aatatcttcttaata

SEQ ID NO: 422236 - DNA, 15 bp, Homo sapiens
aaatatcttcttaat

SEQ ID NO: 422237 - DNA, 15 bp, Homo sapiens
aaaatatcttcttaa

SEQ ID NO: 422238 - DNA, 15 bp, Homo sapiens
aaaaatatcttctta

SEQ ID NO: 422239 - DNA, 15 bp, Homo sapiens
caaaaatatcttctt

SEQ ID NO: 422240 - DNA, 15 bp, Homo sapiens
acaaaaatatcttct

SEQ ID NO: 422241 - DNA, 15 bp, Homo sapiens
aacaaaaatatcttc

SEQ ID NO: 422242 - DNA, 15 bp, Homo sapiens
aaacaaaaatatctt

SEQ ID NO: 422243 - DNA, 15 bp, Homo sapiens
aaaacaaaaatatct

SEQ ID NO: 422244 - DNA, 15 bp, Homo sapiens
caaaacaaaaatatc

SEQ ID NO: 422245 - DNA, 15 bp, Homo sapiens
acaaaacaaaaatat

SEQ ID NO: 422246 - DNA, 15 bp, Homo sapiens
aacaaaacaaaaata

SEQ ID NO: 422247 - DNA, 15 bp, Homo sapiens
aaacaaaacaaaaat

SEQ ID NO: 422248 - DNA, 15 bp, Homo sapiens
taaacaaaacaaaac

SEQ ID NO: 422249 - DNA, 15 bp, Homo sapiens
gtaaacaaaacaaaa

SEQ ID NO: 422250 - DNA, 15 bp, Homo sapiens
tgtaaacaaaacaaa

SEQ ID NO: 422251 - DNA, 15 bp, Homo sapiens
ctgtaaacaaaacaa

SEQ ID NO: 422252 - DNA, 15 bp, Homo sapiens
gctgtaaacaaaaca

SEQ ID NO: 422253 - DNA, 15 bp, Homo sapiens
tgctgtaaacaaaac

SEQ ID NO: 422254 - DNA, 15 bp, Homo sapiens
ttgctgtaaacaaaa

SEQ ID NO: 422255 - DNA, 15 bp, Homo sapiens
tttgctgtaaacaaa

SEQ ID NO: 422256 - DNA, 15 bp, Homo sapiens
ctttgctgtaaacaa

SEQ ID NO: 422257 - DNA, 15 bp, Homo sapiens
cctttgctgtaaaca

SEQ ID NO: 422258 - DNA, 15 bp, Homo sapiens
ccctttgctgtaaac

SEQ ID NO: 422259 - DNA, 15 bp, Homo sapiens
cccctttgctgtaaa

SEQ ID NO: 422260 - DNA, 15 bp, Homo sapiens
tcccctttgctgtaa

SEQ ID NO: 422261 - DNA, 15 bp, Homo sapiens
gtcccctttgctgta

SEQ ID NO: 422262 - DNA, 15 bp, Homo sapiens
ggtcccctttgctgt

SEQ ID NO: 422263 - DNA, 15 bp, Homo sapiens
tggtcccctttgctg

SEQ ID NO: 422264 - DNA, 15 bp, Homo sapiens
ttggtcccctttgct

SEQ ID NO: 422265 - DNA, 15 bp, Homo sapiens
tttggtcccctttgc

SEQ ID NO: 422266 - DNA, 15 bp, Homo sapiens
atttggtcccctttg

SEQ ID NO: 422267 - DNA, 15 bp, Homo sapiens
catttggtccccttt

SEQ ID NO: 422268 - DNA, 15 bp, Homo sapiens
tcatttggtcccctt

SEQ ID NO: 422269 - DNA, 15 bp, Homo sapiens
ttcatttggtcccct

SEQ ID NO: 422270 - DNA, 15 bp, Homo sapiens
attcatttggtcccc

SEQ ID NO: 422271 - DNA, 15 bp, Homo sapiens
aattcatttggtccc

SEQ ID NO: 422272 - DNA, 15 bp, Homo sapiens
taattcatttggtcc

SEQ ID NO: 422273 - DNA, 15 bp, Homo sapiens
ttaattcatttggtc

SEQ ID NO: 422274 - DNA, 15 bp, Homo sapiens
cttaattcatttggt

SEQ ID NO: 422275 - DNA, 15 bp, Homo sapiens
tcttaattcatttgg

SEQ ID NO: 422276 - DNA, 15 bp, Homo sapiens
ttcttaattcatttg

SEQ ID NO: 422277 - DNA, 15 bp, Homo sapiens
attcttaattcattt

SEQ ID NO: 422278 - DNA, 15 bp, Homo sapiens
tattcttaattcatt

SEQ ID NO: 422279 - DNA, 15 bp, Homo sapiens
atattcttaattcat

SEQ ID NO: 422280 - DNA, 15 bp, Homo sapiens
tatattcttaattca

SEQ ID NO: 422281 - DNA, 15 bp, Homo sapiens
atatattcttaattc

SEQ ID NO: 422282 - DNA, 15 bp, Homo sapiens
catatattcttaatt

SEQ ID NO: 422283 - DNA, 15 bp, Homo sapiens
tcatatattcttaat

SEQ ID NO: 422284 - DNA, 15 bp, Homo sapiens
gtcatatattcttaa

SEQ ID NO: 422285 - DNA, 15 bp, Homo sapiens
cgtcatatattctta

SEQ ID NO: 422286 - DNA, 15 bp, Homo sapiens
ccgtcatatattctt

SEQ ID NO: 422287 - DNA, 15 bp, Homo sapiens
cccgtcatatattct

SEQ ID NO: 422288 - DNA, 15 bp, Homo sapiens
gcccgtcatatattc

SEQ ID NO: 422289 - DNA, 15 bp, Homo sapiens
tgcccgtcatatatt

SEQ ID NO: 422290 - DNA, 15 bp, Homo sapiens
gtgcccgtcatatat

SEQ ID NO: 422291 - DNA, 15 bp, Homo sapiens
cgtgcccgtcatata

SEQ ID NO: 422292 - DNA, 15 bp, Homo sapiens
ccgtgcccgtcatat

SEQ ID NO: 422293 - DNA, 15 bp, Homo sapiens
accgtgcccgtcata

SEQ ID NO: 422294 - DNA, 15 bp, Homo sapiens
caccgtgcccgtcat

SEQ ID NO: 422295 - DNA, 15 bp, Homo sapiens
ccaccgtgcccgtca

SEQ ID NO: 422296 - DNA, 15 bp, Homo sapiens
gccaccgtgcccgtc

SEQ ID NO: 422297 - DNA, 15 bp, Homo sapiens
agccaccgtgcccgt

SEQ ID NO: 422298 - DNA, 15 bp, Homo sapiens
gagccaccgtgcccg

SEQ ID NO: 422299 - DNA, 15 bp, Homo sapiens
tgagccaccgtgccc

SEQ ID NO: 422300 - DNA, 15 bp, Homo sapiens
acccacctcagcctc

SEQ ID NO: 422301 - DNA, 15 bp, Homo sapiens
cacccacctcagcct

SEQ ID NO: 422302 - DNA, 15 bp, Homo sapiens
ccacccacctcagcc

SEQ ID NO: 422303 - DNA, 15 bp, Homo sapiens
tccacccacctcagc

SEQ ID NO: 422304 - DNA, 15 bp, Homo sapiens
atccacccacctcag

SEQ ID NO: 422305 - DNA, 15 bp, Homo sapiens
aatccacccacctca

SEQ ID NO: 422306 - DNA, 15 bp, Homo sapiens
taatccacccacctc

SEQ ID NO: 422307 - DNA, 15 bp, Homo sapiens
gtaatccacccacct

SEQ ID NO: 422308 - DNA, 15 bp, Homo sapiens
ggtaatccacccacc

SEQ ID NO: 422309 - DNA, 15 bp, Homo sapiens
aggtaatccacccac

SEQ ID NO: 422310 - DNA, 15 bp, Homo sapiens
caggtaatccaccca

SEQ ID NO: 422311 - DNA, 15 bp, Homo sapiens
tcaggtaatccaccc

SEQ ID NO: 422312 - DNA, 15 bp, Homo sapiens
ctcaggtaatccacc

SEQ ID NO: 422313 - DNA, 15 bp, Homo sapiens
cctcaggtaatccac

SEQ ID NO: 422314 - DNA, 15 bp, Homo sapiens
acctcaggtaatcca

SEQ ID NO: 422315 - DNA, 15 bp, Homo sapiens
gacctcaggtaatcc

SEQ ID NO: 422316 - DNA, 15 bp, Homo sapiens
tgacctcaggtaatc

SEQ ID NO: 422317 - DNA, 15 bp, Homo sapiens
ctgacctcaggtaat

SEQ ID NO: 422318 - DNA, 15 bp, Homo sapiens
cctgacctcaggtaa

SEQ ID NO: 422319 - DNA, 15 bp, Homo sapiens
ccctgacctcaggta

SEQ ID NO: 422320 - DNA, 15 bp, Homo sapiens
cccctgacctcaggt

SEQ ID NO: 422321 - DNA, 15 bp, Homo sapiens
acccctgacctcagg

SEQ ID NO: 422322 - DNA, 15 bp, Homo sapiens
aacccctgacctcag

SEQ ID NO: 422323 - DNA, 15 bp, Homo sapiens
aaacccctgacctca

SEQ ID NO: 422324 - DNA, 15 bp, Homo sapiens
caaacccctgacctc

SEQ ID NO: 422325 - DNA, 15 bp, Homo sapiens
tcaaacccctgacct

SEQ ID NO: 422326 - DNA, 15 bp, Homo sapiens
ctcaaacccctgacc

SEQ ID NO: 422327 - DNA, 15 bp, Homo sapiens
tctcaaacccctgac

SEQ ID NO: 422328 - DNA, 15 bp, Homo sapiens
gtctcaaacccctga

SEQ ID NO: 422329 - DNA, 15 bp, Homo sapiens
ggtctcaaacccctg

SEQ ID NO: 422330 - DNA, 15 bp, Homo sapiens
tggtctcaaacccct

SEQ ID NO: 422331 - DNA, 15 bp, Homo sapiens
ctggtctcaaacccc

SEQ ID NO: 422332 - DNA, 15 bp, Homo sapiens
gctggtctcaaaccc

SEQ ID NO: 422333 - DNA, 15 bp, Homo sapiens
ggctggtctcaaacc

SEQ ID NO: 422334 - DNA, 15 bp, Homo sapiens
cggggtttcaccatg

SEQ ID NO: 422335 - DNA, 15 bp, Homo sapiens
acggggtttcaccat

SEQ ID NO: 422336 - DNA, 15 bp, Homo sapiens
gacggggtttcacca

SEQ ID NO: 422337 - DNA, 15 bp, Homo sapiens
gatttttgtattttt

SEQ ID NO: 422338 - DNA, 15 bp, Homo sapiens
tgatttttgtatttt

SEQ ID NO: 422339 - DNA, 15 bp, Homo sapiens
ctgatttttgtattt

SEQ ID NO: 422340 - DNA, 15 bp, Homo sapiens
gctgatttttgtatt

SEQ ID NO: 422341 - DNA, 15 bp, Homo sapiens
ggctgatttttgtat

SEQ ID NO: 422342 - DNA, 15 bp, Homo sapiens
tggctgatttttgta

SEQ ID NO: 422343 - DNA, 15 bp, Homo sapiens
ttggctgatttttgt

SEQ ID NO: 422344 - DNA, 15 bp, Homo sapiens
cttggctgatttttg

SEQ ID NO: 422345 - DNA, 15 bp, Homo sapiens
gcttggctgattttt

SEQ ID NO: 422346 - DNA, 15 bp, Homo sapiens
cgcttggctgatttt

SEQ ID NO: 422347 - DNA, 15 bp, Homo sapiens
acgcttggctgattt

SEQ ID NO: 422348 - DNA, 15 bp, Homo sapiens
cacgcttggctgatt

SEQ ID NO: 422349 - DNA, 15 bp, Homo sapiens
ccacgcttggctgat

SEQ ID NO: 422350 - DNA, 15 bp, Homo sapiens
accacgcttggctga

SEQ ID NO: 422351 - DNA, 15 bp, Homo sapiens
caccacgcttggctg

SEQ ID NO: 422352 - DNA, 15 bp, Homo sapiens
ccaccacgcttggct

SEQ ID NO: 422353 - DNA, 15 bp, Homo sapiens
gccaccacgcttggc

SEQ ID NO: 422354 - DNA, 15 bp, Homo sapiens
tgccaccacgcttgg

SEQ ID NO: 422355 - DNA, 15 bp, Homo sapiens
gtgccaccacgcttg

SEQ ID NO: 422356 - DNA, 15 bp, Homo sapiens
tgtgccaccacgctt

SEQ ID NO: 422357 - DNA, 15 bp, Homo sapiens
gtgtgccaccacgct

SEQ ID NO: 422358 - DNA, 15 bp, Homo sapiens
cgtgtgccaccacgc

SEQ ID NO: 422359 - DNA, 15 bp, Homo sapiens
gcgtgtgccaccacg

SEQ ID NO: 422360 - DNA, 15 bp, Homo sapiens
ggcgtgtgccaccac

SEQ ID NO: 422361 - DNA, 15 bp, Homo sapiens
aggcgtgtgccacca

SEQ ID NO: 422362 - DNA, 15 bp, Homo sapiens
caggcgtgtgccacc

SEQ ID NO: 422363 - DNA, 15 bp, Homo sapiens
acaggcgtgtgccac

SEQ ID NO: 422364 - DNA, 15 bp, Homo sapiens
tacaggcgtgtgcca

SEQ ID NO: 422365 - DNA, 15 bp, Homo sapiens
ttacaggcgtgtgcc

SEQ ID NO: 422366 - DNA, 15 bp, Homo sapiens
attacaggcgtgtgc

SEQ ID NO: 422367 - DNA, 15 bp, Homo sapiens
gattacaggcgtgtg

SEQ ID NO: 422368 - DNA, 15 bp, Homo sapiens
ggattacaggcgtgt

SEQ ID NO: 422369 - DNA, 15 bp, Homo sapiens
caattctcctgcctc

SEQ ID NO: 422370 - DNA, 15 bp, Homo sapiens
gcaattctcctgcct

SEQ ID NO: 422371 - DNA, 15 bp, Homo sapiens
agcaattctcctgcc

SEQ ID NO: 422372 - DNA, 15 bp, Homo sapiens
aagcaattctcctgc

SEQ ID NO: 422373 - DNA, 15 bp, Homo sapiens
caagcaattctcctg

SEQ ID NO: 422374 - DNA, 15 bp, Homo sapiens
tcaagcaattctcct

SEQ ID NO: 422375 - DNA, 15 bp, Homo sapiens
ctcaagcaattctcc

SEQ ID NO: 422376 - DNA, 15 bp, Homo sapiens
gctcaagcaattctc

SEQ ID NO: 422377 - DNA, 15 bp, Homo sapiens
ggctcaagcaattct

SEQ ID NO: 422378 - DNA, 15 bp, Homo sapiens
tggctcaagcaattc

SEQ ID NO: 422379 - DNA, 15 bp, Homo sapiens
ttggctcaagcaatt

SEQ ID NO: 422380 - DNA, 15 bp, Homo sapiens
cttggctcaagcaat

SEQ ID NO: 422381 - DNA, 15 bp, Homo sapiens
ccttggctcaagcaa

SEQ ID NO: 422382 - DNA, 15 bp, Homo sapiens
tccttggctcaagca

SEQ ID NO: 422383 - DNA, 15 bp, Homo sapiens
ctccttggctcaagc

SEQ ID NO: 422384 - DNA, 15 bp, Homo sapiens
tctccttggctcaag

SEQ ID NO: 422385 - DNA, 15 bp, Homo sapiens
gtctccttggctcaa

SEQ ID NO: 422386 - DNA, 15 bp, Homo sapiens
tgtctccttggctca

SEQ ID NO: 422387 - DNA, 15 bp, Homo sapiens
ctgtctccttggctc

SEQ ID NO: 422388 - DNA, 15 bp, Homo sapiens
tctgtctccttggct

SEQ ID NO: 422389 - DNA, 15 bp, Homo sapiens
ctctgtctccttggc

SEQ ID NO: 422390 - DNA, 15 bp, Homo sapiens
cctctgtctccttgg

SEQ ID NO: 422391 - DNA, 15 bp, Homo sapiens
acctctgtctccttg

SEQ ID NO: 422392 - DNA, 15 bp, Homo sapiens
aacctctgtctcctt

SEQ ID NO: 422393 - DNA, 15 bp, Homo sapiens
tactgcaacctctgt

SEQ ID NO: 422394 - DNA, 15 bp, Homo sapiens
ttactgcaacctctg

SEQ ID NO: 422395 - DNA, 15 bp, Homo sapiens
cttactgcaacctct

SEQ ID NO: 422396 - DNA, 15 bp, Homo sapiens
gcttactgcaacctc

SEQ ID NO: 422397 - DNA, 15 bp, Homo sapiens
ggcttactgcaacct

SEQ ID NO: 422398 - DNA, 15 bp, Homo sapiens
tggcttactgcaacc

SEQ ID NO: 422399 - DNA, 15 bp, Homo sapiens
ttggcttactgcaac

SEQ ID NO: 422400 - DNA, 15 bp, Homo sapiens
cttggcttactgcaa

SEQ ID NO: 422401 - DNA, 15 bp, Homo sapiens
tcttggcttactgca

SEQ ID NO: 422402 - DNA, 15 bp, Homo sapiens
atcttggcttactgc

SEQ ID NO: 422403 - DNA, 15 bp, Homo sapiens
aatcttggcttactg

SEQ ID NO: 422404 - DNA, 15 bp, Homo sapiens
caatcttggcttact

SEQ ID NO: 422405 - DNA, 15 bp, Homo sapiens
acaatcttggcttac

SEQ ID NO: 422406 - DNA, 15 bp, Homo sapiens
cacaatcttggctta

SEQ ID NO: 422407 - DNA, 15 bp, Homo sapiens
gcacaatcttggctt

SEQ ID NO: 422408 - DNA, 15 bp, Homo sapiens
gcagtggcacaatct

SEQ ID NO: 422409 - DNA, 15 bp, Homo sapiens
gtgcagtggcacaat

SEQ ID NO: 422410 - DNA, 15 bp, Homo sapiens
agtgcagtggcacaa

SEQ ID NO: 422411 - DNA, 15 bp, Homo sapiens
gagtgcagtggcaca

SEQ ID NO: 422412 - DNA, 15 bp, Homo sapiens
ggagtgcagtggcac

SEQ ID NO: 422413 - DNA, 15 bp, Homo sapiens
tggagtgcagtggca

SEQ ID NO: 422414 - DNA, 15 bp, Homo sapiens
aaggctggagtgcag

SEQ ID NO: 422415 - DNA, 15 bp, Homo sapiens
caaggctggagtgca

SEQ ID NO: 422416 - DNA, 15 bp, Homo sapiens
ccaaggctggagtgc

SEQ ID NO: 422417 - DNA, 15 bp, Homo sapiens
tccaaggctggagtg

SEQ ID NO: 422418 - DNA, 15 bp, Homo sapiens
ctccaaggctggagt

SEQ ID NO: 422419 - DNA, 15 bp, Homo sapiens
gctccaaggctggag

SEQ ID NO: 422420 - DNA, 15 bp, Homo sapiens
tgctccaaggctgga

SEQ ID NO: 422421 - DNA, 15 bp, Homo sapiens
ttgctccaaggctgg

SEQ ID NO: 422422 - DNA, 15 bp, Homo sapiens
cttgctccaaggctg

SEQ ID NO: 422423 - DNA, 15 bp, Homo sapiens
tcttgctccaaggct

SEQ ID NO: 422424 - DNA, 15 bp, Homo sapiens
gtcttgctccaaggc

SEQ ID NO: 422425 - DNA, 15 bp, Homo sapiens
agtcttgctccaagg

SEQ ID NO: 422426 - DNA, 15 bp, Homo sapiens
gagtcttgctccaag

SEQ ID NO: 422427 - DNA, 15 bp, Homo sapiens
agagtcttgctccaa

SEQ ID NO: 422428 - DNA, 15 bp, Homo sapiens
cagagtcttgctcca

SEQ ID NO: 422429 - DNA, 15 bp, Homo sapiens
acagagtcttgctcc

SEQ ID NO: 422430 - DNA, 15 bp, Homo sapiens
atttttagacagagt

SEQ ID NO: 422431 - DNA, 15 bp, Homo sapiens
aatttttagacagag

SEQ ID NO: 422432 - DNA, 15 bp, Homo sapiens
aaatttttagacaga

SEQ ID NO: 422433 - DNA, 15 bp, Homo sapiens
taaatttttagacag

SEQ ID NO: 422434 - DNA, 15 bp, Homo sapiens
ttaaatttttagaca

SEQ ID NO: 422435 - DNA, 15 bp, Homo sapiens
tttaaatttttagac

SEQ ID NO: 422436 - DNA, 15 bp, Homo sapiens
ttttaaatttttaga

SEQ ID NO: 422437 - DNA, 15 bp, Homo sapiens
tttttaaatttttag

SEQ ID NO: 422438 - DNA, 15 bp, Homo sapiens
ttttttaaattttta

SEQ ID NO: 422439 - DNA, 15 bp, Homo sapiens
attttttaaattttt

SEQ ID NO: 422440 - DNA, 15 bp, Homo sapiens
tattttttaaatttt

SEQ ID NO: 422441 - DNA, 15 bp, Homo sapiens
ttattttttaaattt

SEQ ID NO: 422442 - DNA, 15 bp, Homo sapiens
attattttttaaatt

SEQ ID NO: 422443 - DNA, 15 bp, Homo sapiens
tattattttttaaat

SEQ ID NO: 422444 - DNA, 15 bp, Homo sapiens
ttattattttttaaa

SEQ ID NO: 422445 - DNA, 15 bp, Homo sapiens
attattattttttaa

SEQ ID NO: 422446 - DNA, 15 bp, Homo sapiens
tattattatttttta

SEQ ID NO: 422447 - DNA, 15 bp, Homo sapiens
ttattattatttttt

SEQ ID NO: 422448 - DNA, 15 bp, Homo sapiens
attattattattttt

SEQ ID NO: 422449 - DNA, 15 bp, Homo sapiens
tattattattatttt

SEQ ID NO: 422450 - DNA, 15 bp, Homo sapiens
atattattattattt

SEQ ID NO: 422451 - DNA, 15 bp, Homo sapiens
tatattattattatt

SEQ ID NO: 422452 - DNA, 15 bp, Homo sapiens
atatattattattat

SEQ ID NO: 422453 - DNA, 15 bp, Homo sapiens
tatatattattatta

SEQ ID NO: 422454 - DNA, 15 bp, Homo sapiens
atatatattattatt

SEQ ID NO: 422455 - DNA, 15 bp, Homo sapiens
tatatatattattat

SEQ ID NO: 422456 - DNA, 15 bp, Homo sapiens
atatatatattatta

SEQ ID NO: 422457 - DNA, 15 bp, Homo sapiens
tatatatatattatt

SEQ ID NO: 422458 - DNA, 15 bp, Homo sapiens
gtatatatatattat

SEQ ID NO: 422459 - DNA, 15 bp, Homo sapiens
tgtatatatatatta

SEQ ID NO: 422460 - DNA, 15 bp, Homo sapiens
gtgtatatatatatt

SEQ ID NO: 422461 - DNA, 15 bp, Homo sapiens
gtatatatatgtgta

SEQ ID NO: 422462 - DNA, 15 bp, Homo sapiens
tgtatatatatgtgt

SEQ ID NO: 422463 - DNA, 15 bp, Homo sapiens
atgtatatatatgtg

SEQ ID NO: 422464 - DNA, 15 bp, Homo sapiens
tatgtatatatatgt

SEQ ID NO: 422465 - DNA, 15 bp, Homo sapiens
atatgtatatatatg

SEQ ID NO: 422466 - DNA, 15 bp, Homo sapiens
catatatgtatatat

SEQ ID NO: 422467 - DNA, 15 bp, Homo sapiens
acatatatgtatata

SEQ ID NO: 422468 - DNA, 15 bp, Homo sapiens
tacatatatgtatat

SEQ ID NO: 422469 - DNA, 15 bp, Homo sapiens
atacatatatgtata

SEQ ID NO: 422470 - DNA, 15 bp, Homo sapiens
tatacatatatgtat

SEQ ID NO: 422471 - DNA, 15 bp, Homo sapiens
atatacatatatgta

SEQ ID NO: 422472 - DNA, 15 bp, Homo sapiens
tatatacatatatgt

SEQ ID NO: 422473 - DNA, 15 bp, Homo sapiens
ctatatacatatatg

SEQ ID NO: 422474 - DNA, 15 bp, Homo sapiens
actatatacatatat

SEQ ID NO: 422475 - DNA, 15 bp, Homo sapiens
tactatatacatata

SEQ ID NO: 422476 - DNA, 15 bp, Homo sapiens
ttactatatacatat

SEQ ID NO: 422477 - DNA, 15 bp, Homo sapiens
cttactatatacata

SEQ ID NO: 422478 - DNA, 15 bp, Homo sapiens
gcttactatatacat

SEQ ID NO: 422479 - DNA, 15 bp, Homo sapiens
tgcttactatataca

SEQ ID NO: 422480 - DNA, 15 bp, Homo sapiens
ttgcttactatatac

SEQ ID NO: 422481 - DNA, 15 bp, Homo sapiens
tttgcttactatata

SEQ ID NO: 422482 - DNA, 15 bp, Homo sapiens
ctttgcttactatat

SEQ ID NO: 422483 - DNA, 15 bp, Homo sapiens
cctttgcttactata

SEQ ID NO: 422484 - DNA, 15 bp, Homo sapiens
acctttgcttactat

SEQ ID NO: 422485 - DNA, 15 bp, Homo sapiens
aacctttgcttacta

SEQ ID NO: 422486 - DNA, 15 bp, Homo sapiens
aaacctttgcttact

SEQ ID NO: 422487 - DNA, 15 bp, Homo sapiens
caaacctttgcttac

SEQ ID NO: 422488 - DNA, 15 bp, Homo sapiens
ccaaacctttgctta

SEQ ID NO: 422489 - DNA, 15 bp, Homo sapiens
accaaacctttgctt

SEQ ID NO: 422490 - DNA, 15 bp, Homo sapiens
caccaaacctttgct

SEQ ID NO: 422491 - DNA, 15 bp, Homo sapiens
tcaccaaacctttgc

SEQ ID NO: 422492 - DNA, 15 bp, Homo sapiens
gtcaccaaacctttg

SEQ ID NO: 422493 - DNA, 15 bp, Homo sapiens
agtcaccaaaccttt

SEQ ID NO: 422494 - DNA, 15 bp, Homo sapiens
cagtcaccaaacctt

SEQ ID NO: 422495 - DNA, 15 bp, Homo sapiens
gcagtcaccaaacct

SEQ ID NO: 422496 - DNA, 15 bp, Homo sapiens
agcagtcaccaaacc

SEQ ID NO: 422497 - DNA, 15 bp, Homo sapiens
cagcagtcaccaaac

SEQ ID NO: 422498 - DNA, 15 bp, Homo sapiens
ccagcagtcaccaaa

SEQ ID NO: 422499 - DNA, 15 bp, Homo sapiens
cccagcagtcaccaa

SEQ ID NO: 422500 - DNA, 15 bp, Homo sapiens
tcccagcagtcacca

SEQ ID NO: 422501 - DNA, 15 bp, Homo sapiens
atcccagcagtcacc

SEQ ID NO: 422502 - DNA, 15 bp, Homo sapiens
gatcccagcagtcac

SEQ ID NO: 422503 - DNA, 15 bp, Homo sapiens
agatcccagcagtca

SEQ ID NO: 422504 - DNA, 15 bp, Homo sapiens
cagatcccagcagtc

SEQ ID NO: 422505 - DNA, 15 bp, Homo sapiens
ccagatcccagcagt

SEQ ID NO: 422506 - DNA, 15 bp, Homo sapiens
cccagatcccagcag

SEQ ID NO: 422507 - DNA, 15 bp, Homo sapiens
tcccagatcccagca

SEQ ID NO: 422508 - DNA, 15 bp, Homo sapiens
atcccagatcccagc

SEQ ID NO: 422509 - DNA, 15 bp, Homo sapiens
catcccagatcccag

SEQ ID NO: 422510 - DNA, 15 bp, Homo sapiens
tcatcccagatccca

SEQ ID NO: 422511 - DNA, 15 bp, Homo sapiens
ctcatcccagatccc

SEQ ID NO: 422512 - DNA, 15 bp, Homo sapiens
cctcatcccagatcc

SEQ ID NO: 422513 - DNA, 15 bp, Homo sapiens
ccctcatcccagatc

SEQ ID NO: 422514 - DNA, 15 bp, Homo sapiens
cccctcatcccagat

SEQ ID NO: 422515 - DNA, 15 bp, Homo sapiens
acccctcatcccaga

SEQ ID NO: 422516 - DNA, 15 bp, Homo sapiens
cacccctcatcccag

SEQ ID NO: 422517 - DNA, 15 bp, Homo sapiens
tcacccctcatccca

SEQ ID NO: 422518 - DNA, 15 bp, Homo sapiens
ctcacccctcatccc

SEQ ID NO: 422519 - DNA, 15 bp, Homo sapiens
cctcacccctcatcc

SEQ ID NO: 422520 - DNA, 15 bp, Homo sapiens
tcctcacccctcatc

SEQ ID NO: 422521 - DNA, 15 bp, Homo sapiens
ttcctcacccctcat

SEQ ID NO: 422522 - DNA, 15 bp, Homo sapiens
gttcctcacccctca

SEQ ID NO: 422523 - DNA, 15 bp, Homo sapiens
tgttcctcacccctc

SEQ ID NO: 422524 - DNA, 15 bp, Homo sapiens
ctgttcctcacccct

SEQ ID NO: 422525 - DNA, 15 bp, Homo sapiens
cctgttcctcacccc

SEQ ID NO: 422526 - DNA, 15 bp, Homo sapiens
ccctgttcctcaccc

SEQ ID NO: 422527 - DNA, 15 bp, Homo sapiens
cccctgttcctcacc

SEQ ID NO: 422528 - DNA, 15 bp, Homo sapiens
ccccctgttcctcac

SEQ ID NO: 422529 - DNA, 15 bp, Homo sapiens
cccccctgttcctca

SEQ ID NO: 422530 - DNA, 15 bp, Homo sapiens
tcccccctgttcctc

SEQ ID NO: 422531 - DNA, 15 bp, Homo sapiens
ctcccccctgttcct

SEQ ID NO: 422532 - DNA, 15 bp, Homo sapiens
actcccccctgttcc

SEQ ID NO: 422533 - DNA, 15 bp, Homo sapiens
cactcccccctgttc

SEQ ID NO: 422534 - DNA, 15 bp, Homo sapiens
tcactcccccctgtt

SEQ ID NO: 422535 - DNA, 15 bp, Homo sapiens
atcactcccccctgt

SEQ ID NO: 422536 - DNA, 15 bp, Homo sapiens
catcactcccccctg

SEQ ID NO: 422537 - DNA, 15 bp, Homo sapiens
ccatcactcccccct

SEQ ID NO: 422538 - DNA, 15 bp, Homo sapiens
tccatcactcccccc

SEQ ID NO: 422539 - DNA, 15 bp, Homo sapiens
gtccatcactccccc

SEQ ID NO: 422540 - DNA, 15 bp, Homo sapiens
ggtccatcactcccc

SEQ ID NO: 422541 - DNA, 15 bp, Homo sapiens
tggtccatcactccc

SEQ ID NO: 422542 - DNA, 15 bp, Homo sapiens
gtggtccatcactcc

SEQ ID NO: 422543 - DNA, 15 bp, Homo sapiens
ggtggtccatcactc

SEQ ID NO: 422544 - DNA, 15 bp, Homo sapiens
aggtggtccatcact

SEQ ID NO: 422545 - DNA, 15 bp, Homo sapiens
gaggtggtccatcac

SEQ ID NO: 422546 - DNA, 15 bp, Homo sapiens
agaggtggtccatca

SEQ ID NO: 422547 - DNA, 15 bp, Homo sapiens
tagaggtggtccatc

SEQ ID NO: 422548 - DNA, 15 bp, Homo sapiens
ctagaggtggtccat

SEQ ID NO: 422549 - DNA, 15 bp, Homo sapiens
actagaggtggtcca

SEQ ID NO: 422550 - DNA, 15 bp, Homo sapiens
aactagaggtggtcc

SEQ ID NO: 422551 - DNA, 15 bp, Homo sapiens
aaactagaggtggtc

SEQ ID NO: 422552 - DNA, 15 bp, Homo sapiens
aaaactagaggtggt

SEQ ID NO: 422553 - DNA, 15 bp, Homo sapiens
gaaaactagaggtgg

SEQ ID NO: 422554 - DNA, 15 bp, Homo sapiens
agaaaactagaggtg

SEQ ID NO: 422555 - DNA, 15 bp, Homo sapiens
cagaaaactagaggt

SEQ ID NO: 422556 - DNA, 15 bp, Homo sapiens
ccagaaaactagagg

SEQ ID NO: 422557 - DNA, 15 bp, Homo sapiens
gccagaaaactagag

SEQ ID NO: 422558 - DNA, 15 bp, Homo sapiens
ggccagaaaactaga

SEQ ID NO: 422559 - DNA, 15 bp, Homo sapiens
aggccagaaaactag

SEQ ID NO: 422560 - DNA, 15 bp, Homo sapiens
taggccagaaaacta

SEQ ID NO: 422561 - DNA, 15 bp, Homo sapiens
ttaggccagaaaact

SEQ ID NO: 422562 - DNA, 15 bp, Homo sapiens
tttaggccagaaaac

SEQ ID NO: 422563 - DNA, 15 bp, Homo sapiens
atttaggccagaaaa

SEQ ID NO: 422564 - DNA, 15 bp, Homo sapiens
gatttaggccagaaa

SEQ ID NO: 422565 - DNA, 15 bp, Homo sapiens
tgatttaggccagaa

SEQ ID NO: 422566 - DNA, 15 bp, Homo sapiens
atgatttaggccaga

SEQ ID NO: 422567 - DNA, 15 bp, Homo sapiens
aatgatttaggccag

SEQ ID NO: 422568 - DNA, 15 bp, Homo sapiens
aaatgatttaggcca

SEQ ID NO: 422569 - DNA, 15 bp, Homo sapiens
gaaatgatttaggcc

SEQ ID NO: 422570 - DNA, 15 bp, Homo sapiens
agaaatgatttaggc

SEQ ID NO: 422571 - DNA, 15 bp, Homo sapiens
aagaaatgatttagg

SEQ ID NO: 422572 - DNA, 15 bp, Homo sapiens
aaagaaatgatttag

SEQ ID NO: 422573 - DNA, 15 bp, Homo sapiens
gaaagaaatgattta

SEQ ID NO: 422574 - DNA, 15 bp, Homo sapiens
tgaaagaaatgattt

SEQ ID NO: 422575 - DNA, 15 bp, Homo sapiens
atgaaagaaatgatt

SEQ ID NO: 422576 - DNA, 15 bp, Homo sapiens
catgaaagaaatgat

SEQ ID NO: 422577 - DNA, 15 bp, Homo sapiens
ccatgaaagaaatga

SEQ ID NO: 422578 - DNA, 15 bp, Homo sapiens
tccatgaaagaaatg

SEQ ID NO: 422579 - DNA, 15 bp, Homo sapiens
ctccatgaaagaaat

SEQ ID NO: 422580 - DNA, 15 bp, Homo sapiens
gctccatgaaagaaa

SEQ ID NO: 422581 - DNA, 15 bp, Homo sapiens
ggctccatgaaagaa

SEQ ID NO: 422582 - DNA, 15 bp, Homo sapiens
aggctccatgaaaga

SEQ ID NO: 422583 - DNA, 15 bp, Homo sapiens
taggctccatgaaag

SEQ ID NO: 422584 - DNA, 15 bp, Homo sapiens
ataggctccatgaaa

SEQ ID NO: 422585 - DNA, 15 bp, Homo sapiens
cataggctccatgaa

SEQ ID NO: 422586 - DNA, 15 bp, Homo sapiens
gcataggctccatga

SEQ ID NO: 422587 - DNA, 15 bp, Homo sapiens
tgcataggctccatg

SEQ ID NO: 422588 - DNA, 15 bp, Homo sapiens
gtgcataggctccat

SEQ ID NO: 422589 - DNA, 15 bp, Homo sapiens
ggtgcataggctcca

SEQ ID NO: 422590 - DNA, 15 bp, Homo sapiens
aggtgcataggctcc

SEQ ID NO: 422591 - DNA, 15 bp, Homo sapiens
caggtgcataggctc

SEQ ID NO: 422592 - DNA, 15 bp, Homo sapiens
tcaggtgcataggct

SEQ ID NO: 422593 - DNA, 15 bp, Homo sapiens
gtcaggtgcataggc

SEQ ID NO: 422594 - DNA, 15 bp, Homo sapiens
tgtcaggtgcatagg

SEQ ID NO: 422595 - DNA, 15 bp, Homo sapiens
gtgtcaggtgcatag

SEQ ID NO: 422596 - DNA, 15 bp, Homo sapiens
agtgtcaggtgcata

SEQ ID NO: 422597 - DNA, 15 bp, Homo sapiens
aagtgtcaggtgcat

SEQ ID NO: 422598 - DNA, 15 bp, Homo sapiens
aaagtgtcaggtgca

SEQ ID NO: 422599 - DNA, 15 bp, Homo sapiens
gaaagtgtcaggtgc

SEQ ID NO: 422600 - DNA, 15 bp, Homo sapiens
agaaagtgtcaggtg

SEQ ID NO: 422601 - DNA, 15 bp, Homo sapiens
tagaaagtgtcaggt

SEQ ID NO: 422602 - DNA, 15 bp, Homo sapiens
ttagaaagtgtcagg

SEQ ID NO: 422603 - DNA, 15 bp, Homo sapiens
gttagaaagtgtcag

SEQ ID NO: 422604 - DNA, 15 bp, Homo sapiens
tgttagaaagtgtca

SEQ ID NO: 422605 - DNA, 15 bp, Homo sapiens
atgttagaaagtgtc

SEQ ID NO: 422606 - DNA, 15 bp, Homo sapiens
catgttagaaagtgt

SEQ ID NO: 422607 - DNA, 15 bp, Homo sapiens
tcatgttagaaagtg

SEQ ID NO: 422608 - DNA, 15 bp, Homo sapiens
ttcatgttagaaagt

SEQ ID NO: 422609 - DNA, 15 bp, Homo sapiens
tttcatgttagaaag

SEQ ID NO: 422610 - DNA, 15 bp, Homo sapiens
gtttcatgttagaaa

SEQ ID NO: 422611 - DNA, 15 bp, Homo sapiens
ggtttcatgttagaa

SEQ ID NO: 422612 - DNA, 15 bp, Homo sapiens
cggtttcatgttaga

SEQ ID NO: 422613 - DNA, 15 bp, Homo sapiens
gcggtttcatgttag

SEQ ID NO: 422614 - DNA, 15 bp, Homo sapiens
agcggtttcatgtta

SEQ ID NO: 422615 - DNA, 15 bp, Homo sapiens
aagcggtttcatgtt

SEQ ID NO: 422616 - DNA, 15 bp, Homo sapiens
aaagcggtttcatgt

SEQ ID NO: 422617 - DNA, 15 bp, Homo sapiens
aaaagcggtttcatg

SEQ ID NO: 422618 - DNA, 15 bp, Homo sapiens
aaaaagcggtttcat

SEQ ID NO: 422619 - DNA, 15 bp, Homo sapiens
aaaaaagcggtttca

SEQ ID NO: 422620 - DNA, 15 bp, Homo sapiens
aaaaaaagcggtttc

SEQ ID NO: 422621 - DNA, 15 bp, Homo sapiens
aaaaaaaagcggttt

SEQ ID NO: 422622 - DNA, 15 bp, Homo sapiens
aaaaaaaaagcggtt

SEQ ID NO: 422623 - DNA, 15 bp, Homo sapiens
aaaaaaaaaagcggt

SEQ ID NO: 422624 - DNA, 15 bp, Homo sapiens
gaaaaaaaaaagcgg

SEQ ID NO: 422625 - DNA, 15 bp, Homo sapiens
agaaaaaaaaaagcg

SEQ ID NO: 422626 - DNA, 15 bp, Homo sapiens
aagaaaaaaaaaagc

SEQ ID NO: 422627 - DNA, 15 bp, Homo sapiens
aaaagaaaaaaaaaa

SEQ ID NO: 422628 - DNA, 15 bp, Homo sapiens
aaaaagaaaaaaaaa

SEQ ID NO: 422629 - DNA, 15 bp, Homo sapiens
aaaaaagaaaaaaaa

SEQ ID NO: 422630 - DNA, 15 bp, Homo sapiens
taaaaaaagaaaaaa

SEQ ID NO: 422631 - DNA, 15 bp, Homo sapiens
ataaaaaaagaaaaa

SEQ ID NO: 422632 - DNA, 15 bp, Homo sapiens
aataaaaaaagaaaa

SEQ ID NO: 422633 - DNA, 15 bp, Homo sapiens
taataaaaaaagaaa

SEQ ID NO: 422634 - DNA, 15 bp, Homo sapiens
ataataaaaaaagaa

SEQ ID NO: 422635 - DNA, 15 bp, Homo sapiens
tataataaaaaaaga

SEQ ID NO: 422636 - DNA, 15 bp, Homo sapiens
gtataataaaaaaag

SEQ ID NO: 422637 - DNA, 15 bp, Homo sapiens
tatgtgcacatgtac

SEQ ID NO: 422638 - DNA, 15 bp, Homo sapiens
ctatgtgcacatgta

SEQ ID NO: 422639 - DNA, 15 bp, Homo sapiens
actatgtgcacatgt

SEQ ID NO: 422640 - DNA, 15 bp, Homo sapiens
cactatgtgcacatg

SEQ ID NO: 422641 - DNA, 15 bp, Homo sapiens
gcactatgtgcacat

SEQ ID NO: 422642 - DNA, 15 bp, Homo sapiens
tgcactatgtgcaca

SEQ ID NO: 422643 - DNA, 15 bp, Homo sapiens
ctgcactatgtgcac

SEQ ID NO: 422644 - DNA, 15 bp, Homo sapiens
cctgcactatgtgca

SEQ ID NO: 422645 - DNA, 15 bp, Homo sapiens
acctgcactatgtgc

SEQ ID NO: 422646 - DNA, 15 bp, Homo sapiens
aacctgcactatgtg

SEQ ID NO: 422647 - DNA, 15 bp, Homo sapiens
taacctgcactatgt

SEQ ID NO: 422648 - DNA, 15 bp, Homo sapiens
ctaacctgcactatg

SEQ ID NO: 422649 - DNA, 15 bp, Homo sapiens
actaacctgcactat

SEQ ID NO: 422650 - DNA, 15 bp, Homo sapiens
aactaacctgcacta

SEQ ID NO: 422651 - DNA, 15 bp, Homo sapiens
taactaacctgcact

SEQ ID NO: 422652 - DNA, 15 bp, Homo sapiens
gcatggcacatgtat

SEQ ID NO: 422653 - DNA, 15 bp, Homo sapiens
agcatggcacatgta

SEQ ID NO: 422654 - DNA, 15 bp, Homo sapiens
cagcatggcacatgt

SEQ ID NO: 422655 - DNA, 15 bp, Homo sapiens
ccagcatggcacatg

SEQ ID NO: 422656 - DNA, 15 bp, Homo sapiens
accagcatggcacat

SEQ ID NO: 422657 - DNA, 15 bp, Homo sapiens
caccagcatggcaca

SEQ ID NO: 422658 - DNA, 15 bp, Homo sapiens
gcaccagcatggcac

SEQ ID NO: 422659 - DNA, 15 bp, Homo sapiens
cgcaccagcatggca

SEQ ID NO: 422660 - DNA, 15 bp, Homo sapiens
gcgcaccagcatggc

SEQ ID NO: 422661 - DNA, 15 bp, Homo sapiens
agcgcaccagcatgg

SEQ ID NO: 422662 - DNA, 15 bp, Homo sapiens
cagcgcaccagcatg

SEQ ID NO: 422663 - DNA, 15 bp, Homo sapiens
gcagcgcaccagcat

SEQ ID NO: 422664 - DNA, 15 bp, Homo sapiens
tgcagcgcaccagca

SEQ ID NO: 422665 - DNA, 15 bp, Homo sapiens
gtgcagcgcaccagc

SEQ ID NO: 422666 - DNA, 15 bp, Homo sapiens
ggtgcagcgcaccag

SEQ ID NO: 422667 - DNA, 15 bp, Homo sapiens
gggtgcagcgcacca

SEQ ID NO: 422668 - DNA, 15 bp, Homo sapiens
tgggtgcagcgcacc

SEQ ID NO: 422669 - DNA, 15 bp, Homo sapiens
gtgggtgcagcgcac

SEQ ID NO: 422670 - DNA, 15 bp, Homo sapiens
agtgggtgcagcgca

SEQ ID NO: 422671 - DNA, 15 bp, Homo sapiens
tagtgggtgcagcgc

SEQ ID NO: 422672 - DNA, 15 bp, Homo sapiens
ttagtgggtgcagcg

SEQ ID NO: 422673 - DNA, 15 bp, Homo sapiens
gttagtgggtgcagc

SEQ ID NO: 422674 - DNA, 15 bp, Homo sapiens
agttagtgggtgcag

SEQ ID NO: 422675 - DNA, 15 bp, Homo sapiens
gagttagtgggtgca

SEQ ID NO: 422676 - DNA, 15 bp, Homo sapiens
cgagttagtgggtgc

SEQ ID NO: 422677 - DNA, 15 bp, Homo sapiens
acgagttagtgggtg

SEQ ID NO: 422678 - DNA, 15 bp, Homo sapiens
gacgagttagtgggt

SEQ ID NO: 422679 - DNA, 15 bp, Homo sapiens
tgacgagttagtggg

SEQ ID NO: 422680 - DNA, 15 bp, Homo sapiens
atgacgagttagtgg

SEQ ID NO: 422681 - DNA, 15 bp, Homo sapiens
gatgacgagttagtg

SEQ ID NO: 422682 - DNA, 15 bp, Homo sapiens
agatgacgagttagt

SEQ ID NO: 422683 - DNA, 15 bp, Homo sapiens
tagatgacgagttag

SEQ ID NO: 422684 - DNA, 15 bp, Homo sapiens
ctagatgacgagtta

SEQ ID NO: 422685 - DNA, 15 bp, Homo sapiens
gctagatgacgagtt

SEQ ID NO: 422686 - DNA, 15 bp, Homo sapiens
tgctagatgacgagt

SEQ ID NO: 422687 - DNA, 15 bp, Homo sapiens
atgctagatgacgag

SEQ ID NO: 422688 - DNA, 15 bp, Homo sapiens
aatgctagatgacga

SEQ ID NO: 422689 - DNA, 15 bp, Homo sapiens
taatgctagatgacg

SEQ ID NO: 422690 - DNA, 15 bp, Homo sapiens
ctaatgctagatgac

SEQ ID NO: 422691 - DNA, 15 bp, Homo sapiens
cctaatgctagatga

SEQ ID NO: 422692 - DNA, 15 bp, Homo sapiens
acctaatgctagatg

SEQ ID NO: 422693 - DNA, 15 bp, Homo sapiens
tacctaatgctagat

SEQ ID NO: 422694 - DNA, 15 bp, Homo sapiens
atacctaatgctaga

SEQ ID NO: 422695 - DNA, 15 bp, Homo sapiens
tatacctaatgctag

SEQ ID NO: 422696 - DNA, 15 bp, Homo sapiens
ctgggagatatacct

SEQ ID NO: 422697 - DNA, 15 bp, Homo sapiens
actgggagatatacc

SEQ ID NO: 422698 - DNA, 15 bp, Homo sapiens
cactgggagatatac

SEQ ID NO: 422699 - DNA, 15 bp, Homo sapiens
gcactgggagatata

SEQ ID NO: 422700 - DNA, 15 bp, Homo sapiens
agcactgggagatat

SEQ ID NO: 422701 - DNA, 15 bp, Homo sapiens
tagcactgggagata

SEQ ID NO: 422702 - DNA, 15 bp, Homo sapiens
atagcactgggagat

SEQ ID NO: 422703 - DNA, 15 bp, Homo sapiens
gatagcactgggaga

SEQ ID NO: 422704 - DNA, 15 bp, Homo sapiens
ggatagcactgggag

SEQ ID NO: 422705 - DNA, 15 bp, Homo sapiens
gggatagcactggga

SEQ ID NO: 422706 - DNA, 15 bp, Homo sapiens
agggatagcactggg

SEQ ID NO: 422707 - DNA, 15 bp, Homo sapiens
gagggatagcactgg

SEQ ID NO: 422708 - DNA, 15 bp, Homo sapiens
ggagggatagcactg

SEQ ID NO: 422709 - DNA, 15 bp, Homo sapiens
gggagggatagcact

SEQ ID NO: 422710 - DNA, 15 bp, Homo sapiens
ggggagggatagcac

SEQ ID NO: 422711 - DNA, 15 bp, Homo sapiens
aggggggagggatag

SEQ ID NO: 422712 - DNA, 15 bp, Homo sapiens
gaggggggagggata

SEQ ID NO: 422713 - DNA, 15 bp, Homo sapiens
ggaggggggagggat

SEQ ID NO: 422714 - DNA, 15 bp, Homo sapiens
gggaggggggaggga

SEQ ID NO: 422715 - DNA, 15 bp, Homo sapiens
ggggaggggggaggg

SEQ ID NO: 422716 - DNA, 15 bp, Homo sapiens
gggggaggggggagg

SEQ ID NO: 422717 - DNA, 15 bp, Homo sapiens
ggggggaggggggag

SEQ ID NO: 422718 - DNA, 15 bp, Homo sapiens
tggggggagggggga

SEQ ID NO: 422719 - DNA, 15 bp, Homo sapiens
ggtggggtgggggga

SEQ ID NO: 422720 - DNA, 15 bp, Homo sapiens
tggtggggtgggggg

SEQ ID NO: 422721 - DNA, 15 bp, Homo sapiens
gtggtggggtggggg

SEQ ID NO: 422722 - DNA, 15 bp, Homo sapiens
tgtggtggggtgggg

SEQ ID NO: 422723 - DNA, 15 bp, Homo sapiens
ctgtggtggggtggg

SEQ ID NO: 422724 - DNA, 15 bp, Homo sapiens
actgtggtggggtgg

SEQ ID NO: 422725 - DNA, 15 bp, Homo sapiens
gactgtggtggggtg

SEQ ID NO: 422726 - DNA, 15 bp, Homo sapiens
ggactgtggtggggt

SEQ ID NO: 422727 - DNA, 15 bp, Homo sapiens
gggactgtggtgggg

SEQ ID NO: 422728 - DNA, 15 bp, Homo sapiens
ggggactgtggtggg

SEQ ID NO: 422729 - DNA, 15 bp, Homo sapiens
tggggactgtggtgg

SEQ ID NO: 422730 - DNA, 15 bp, Homo sapiens
ctggggactgtggtg

SEQ ID NO: 422731 - DNA, 15 bp, Homo sapiens
tctggggactgtggt

SEQ ID NO: 422732 - DNA, 15 bp, Homo sapiens
ctctggggactgtgg

SEQ ID NO: 422733 - DNA, 15 bp, Homo sapiens
actctggggactgtg

SEQ ID NO: 422734 - DNA, 15 bp, Homo sapiens
cactctggggactgt

SEQ ID NO: 422735 - DNA, 15 bp, Homo sapiens
acactctggggactg

SEQ ID NO: 422736 - DNA, 15 bp, Homo sapiens
cacactctggggact

SEQ ID NO: 422737 - DNA, 15 bp, Homo sapiens
tcacactctggggac

SEQ ID NO: 422738 - DNA, 15 bp, Homo sapiens
atcacactctgggga

SEQ ID NO: 422739 - DNA, 15 bp, Homo sapiens
tatcacactctgggg

SEQ ID NO: 422740 - DNA, 15 bp, Homo sapiens
atatcacactctggg

SEQ ID NO: 422741 - DNA, 15 bp, Homo sapiens
aatatcacactctgg

SEQ ID NO: 422742 - DNA, 15 bp, Homo sapiens
gaatatcacactctg

SEQ ID NO: 422743 - DNA, 15 bp, Homo sapiens
ggaatatcacactct

SEQ ID NO: 422744 - DNA, 15 bp, Homo sapiens
gggaatatcacactc

SEQ ID NO: 422745 - DNA, 15 bp, Homo sapiens
ggggaatatcacact

SEQ ID NO: 422746 - DNA, 15 bp, Homo sapiens
aggggaatatcacac

SEQ ID NO: 422747 - DNA, 15 bp, Homo sapiens
aaggggaatatcaca

SEQ ID NO: 422748 - DNA, 15 bp, Homo sapiens
gaaggggaatatcac

SEQ ID NO: 422749 - DNA, 15 bp, Homo sapiens
ggaaggggaatatca

SEQ ID NO: 422750 - DNA, 15 bp, Homo sapiens
aggaaggggaatatc

SEQ ID NO: 422751 - DNA, 15 bp, Homo sapiens
caggaaggggaatat

SEQ ID NO: 422752 - DNA, 15 bp, Homo sapiens
acaggaaggggaata

SEQ ID NO: 422753 - DNA, 15 bp, Homo sapiens
cacaggaaggggaat

SEQ ID NO: 422754 - DNA, 15 bp, Homo sapiens
tcacatggacacagg

SEQ ID NO: 422755 - DNA, 15 bp, Homo sapiens
atcacatggacacag

SEQ ID NO: 422756 - DNA, 15 bp, Homo sapiens
gatcacatggacaca

SEQ ID NO: 422757 - DNA, 15 bp, Homo sapiens
agatcacatggacac

SEQ ID NO: 422758 - DNA, 15 bp, Homo sapiens
gagatcacatggaca

SEQ ID NO: 422759 - DNA, 15 bp, Homo sapiens
tgagatcacatggac

SEQ ID NO: 422760 - DNA, 15 bp, Homo sapiens
atgagatcacatgga

SEQ ID NO: 422761 - DNA, 15 bp, Homo sapiens
aatgagatcacatgg

SEQ ID NO: 422762 - DNA, 15 bp, Homo sapiens
caatgagatcacatg

SEQ ID NO: 422763 - DNA, 15 bp, Homo sapiens
acaatgagatcacat

SEQ ID NO: 422764 - DNA, 15 bp, Homo sapiens
aacaatgagatcaca

SEQ ID NO: 422765 - DNA, 15 bp, Homo sapiens
gaacaatgagatcac

SEQ ID NO: 422766 - DNA, 15 bp, Homo sapiens
tgaacaatgagatca

SEQ ID NO: 422767 - DNA, 15 bp, Homo sapiens
ttgaacaatgagatc

SEQ ID NO: 422768 - DNA, 15 bp, Homo sapiens
attgaacaatgagat

SEQ ID NO: 422769 - DNA, 15 bp, Homo sapiens
gtgggaattgaacaa

SEQ ID NO: 422770 - DNA, 15 bp, Homo sapiens
attctcactcatagg

SEQ ID NO: 422771 - DNA, 15 bp, Homo sapiens
tattctcactcatag

SEQ ID NO: 422772 - DNA, 15 bp, Homo sapiens
atattctcactcata

SEQ ID NO: 422773 - DNA, 15 bp, Homo sapiens
catattctcactcat

SEQ ID NO: 422774 - DNA, 15 bp, Homo sapiens
gcatattctcactca

SEQ ID NO: 422775 - DNA, 15 bp, Homo sapiens
cgcatattctcactc

SEQ ID NO: 422776 - DNA, 15 bp, Homo sapiens
ccgcatattctcact

SEQ ID NO: 422777 - DNA, 15 bp, Homo sapiens
accgcatattctcac

SEQ ID NO: 422778 - DNA, 15 bp, Homo sapiens
caccgcatattctca

SEQ ID NO: 422779 - DNA, 15 bp, Homo sapiens
acaccgcatattctc

SEQ ID NO: 422780 - DNA, 15 bp, Homo sapiens
aacaccgcatattct

SEQ ID NO: 422781 - DNA, 15 bp, Homo sapiens
aaacaccgcatattc

SEQ ID NO: 422782 - DNA, 15 bp, Homo sapiens
caaacaccgcatatt

SEQ ID NO: 422783 - DNA, 15 bp, Homo sapiens
ccaaacaccgcatat

SEQ ID NO: 422784 - DNA, 15 bp, Homo sapiens
accaaacaccgcata

SEQ ID NO: 422785 - DNA, 15 bp, Homo sapiens
aaaaaccaaacaccg

SEQ ID NO: 422786 - DNA, 15 bp, Homo sapiens
aaaaaaccaaacacc

SEQ ID NO: 422787 - DNA, 15 bp, Homo sapiens
aacaaaaaaccaaac

SEQ ID NO: 422788 - DNA, 15 bp, Homo sapiens
gaacaaaaaaccaaa

SEQ ID NO: 422789 - DNA, 15 bp, Homo sapiens
agaacaaaaaaccaa

SEQ ID NO: 422790 - DNA, 15 bp, Homo sapiens
aagaacaaaaaacca

SEQ ID NO: 422791 - DNA, 15 bp, Homo sapiens
caagaacaaaaaacc

SEQ ID NO: 422792 - DNA, 15 bp, Homo sapiens
gcaagaacaaaaaac

SEQ ID NO: 422793 - DNA, 15 bp, Homo sapiens
cgcaagaacaaaaaa

SEQ ID NO: 422794 - DNA, 15 bp, Homo sapiens
tcgcaagaacaaaaa

SEQ ID NO: 422795 - DNA, 15 bp, Homo sapiens
atcgcaagaacaaaa

SEQ ID NO: 422796 - DNA, 15 bp, Homo sapiens
tatcgcaagaacaaa

SEQ ID NO: 422797 - DNA, 15 bp, Homo sapiens
ctatcgcaagaacaa

SEQ ID NO: 422798 - DNA, 15 bp, Homo sapiens
actatcgcaagaaca

SEQ ID NO: 422799 - DNA, 15 bp, Homo sapiens
aactatcgcaagaac

SEQ ID NO: 422800 - DNA, 15 bp, Homo sapiens
aaactatcgcaagaa

SEQ ID NO: 422801 - DNA, 15 bp, Homo sapiens
taaactatcgcaaga

SEQ ID NO: 422802 - DNA, 15 bp, Homo sapiens
gtaaactatcgcaag

SEQ ID NO: 422803 - DNA, 15 bp, Homo sapiens
agtaaactatcgcaa

SEQ ID NO: 422804 - DNA, 15 bp, Homo sapiens
cagtaaactatcgca

SEQ ID NO: 422805 - DNA, 15 bp, Homo sapiens
tcagtaaactatcgc

SEQ ID NO: 422806 - DNA, 15 bp, Homo sapiens
ctcagtaaactatcg

SEQ ID NO: 422807 - DNA, 15 bp, Homo sapiens
tctcagtaaactatc

SEQ ID NO: 422808 - DNA, 15 bp, Homo sapiens
cgtcctttgtaggga

SEQ ID NO: 422809 - DNA, 15 bp, Homo sapiens
acgtcctttgtaggg

SEQ ID NO: 422810 - DNA, 15 bp, Homo sapiens
cacgtcctttgtagg

SEQ ID NO: 422811 - DNA, 15 bp, Homo sapiens
tcacgtcctttgtag

SEQ ID NO: 422812 - DNA, 15 bp, Homo sapiens
ttcacgtcctttgta

SEQ ID NO: 422813 - DNA, 15 bp, Homo sapiens
gttcacgtcctttgt

SEQ ID NO: 422814 - DNA, 15 bp, Homo sapiens
agttcacgtcctttg

SEQ ID NO: 422815 - DNA, 15 bp, Homo sapiens
gagttcacgtccttt

SEQ ID NO: 422816 - DNA, 15 bp, Homo sapiens
tgagttcacgtcctt

SEQ ID NO: 422817 - DNA, 15 bp, Homo sapiens
atgagttcacgtcct

SEQ ID NO: 422818 - DNA, 15 bp, Homo sapiens
gatgagttcacgtcc

SEQ ID NO: 422819 - DNA, 15 bp, Homo sapiens
tgatgagttcacgtc

SEQ ID NO: 422820 - DNA, 15 bp, Homo sapiens
atgatgagttcacgt

SEQ ID NO: 422821 - DNA, 15 bp, Homo sapiens
aatgatgagttcacg

SEQ ID NO: 422822 - DNA, 15 bp, Homo sapiens
aaatgatgagttcac

SEQ ID NO: 422823 - DNA, 15 bp, Homo sapiens
ttattcacaatagca

SEQ ID NO: 422824 - DNA, 15 bp, Homo sapiens
attattcacaatagc

SEQ ID NO: 422825 - DNA, 15 bp, Homo sapiens
cattattcacaatag

SEQ ID NO: 422826 - DNA, 15 bp, Homo sapiens
gcattattcacaata

SEQ ID NO: 422827 - DNA, 15 bp, Homo sapiens
ggcattattcacaat

SEQ ID NO: 422828 - DNA, 15 bp, Homo sapiens
tggcattattcacaa

SEQ ID NO: 422829 - DNA, 15 bp, Homo sapiens
gtggcattattcaca

SEQ ID NO: 422830 - DNA, 15 bp, Homo sapiens
tgtggcattattcac

SEQ ID NO: 422831 - DNA, 15 bp, Homo sapiens
ttgtggcattattca

SEQ ID NO: 422832 - DNA, 15 bp, Homo sapiens
attgtggcattattc

SEQ ID NO: 422833 - DNA, 15 bp, Homo sapiens
tattgtggcattatt

SEQ ID NO: 422834 - DNA, 15 bp, Homo sapiens
ttattgtggcattat

SEQ ID NO: 422835 - DNA, 15 bp, Homo sapiens
tttattgtggcatta

SEQ ID NO: 422836 - DNA, 15 bp, Homo sapiens
gtttattgtggcatt

SEQ ID NO: 422837 - DNA, 15 bp, Homo sapiens
tgtttattgtggcat

SEQ ID NO: 422838 - DNA, 15 bp, Homo sapiens
atgtttattgtggca

SEQ ID NO: 422839 - DNA, 15 bp, Homo sapiens
tatgtttattgtggc

SEQ ID NO: 422840 - DNA, 15 bp, Homo sapiens
gtatgtttattgtgg

SEQ ID NO: 422841 - DNA, 15 bp, Homo sapiens
cgtatgtttattgtg

SEQ ID NO: 422842 - DNA, 15 bp, Homo sapiens
acgtatgtttattgt

SEQ ID NO: 422843 - DNA, 15 bp, Homo sapiens
catgcacacgtatgt

SEQ ID NO: 422844 - DNA, 15 bp, Homo sapiens
acatgcacacgtatg

SEQ ID NO: 422845 - DNA, 15 bp, Homo sapiens
cacatgcacacgtat

SEQ ID NO: 422846 - DNA, 15 bp, Homo sapiens
acacatgcacacgta

SEQ ID NO: 422847 - DNA, 15 bp, Homo sapiens
gctataaagacacat

SEQ ID NO: 422848 - DNA, 15 bp, Homo sapiens
tgctataaagacaca

SEQ ID NO: 422849 - DNA, 15 bp, Homo sapiens
ctgctataaagacac

SEQ ID NO: 422850 - DNA, 15 bp, Homo sapiens
ccattactgggtata

SEQ ID NO: 422851 - DNA, 15 bp, Homo sapiens
cccattactgggtat

SEQ ID NO: 422852 - DNA, 15 bp, Homo sapiens
tcccattactgggta

SEQ ID NO: 422853 - DNA, 15 bp, Homo sapiens
atcccattactgggt

SEQ ID NO: 422854 - DNA, 15 bp, Homo sapiens
catcccattactggg

SEQ ID NO: 422855 - DNA, 15 bp, Homo sapiens
ccatcccattactgg

SEQ ID NO: 422856 - DNA, 15 bp, Homo sapiens
gccatcccattactg

SEQ ID NO: 422857 - DNA, 15 bp, Homo sapiens
agccatcccattact

SEQ ID NO: 422858 - DNA, 15 bp, Homo sapiens
cagccatcccattac

SEQ ID NO: 422859 - DNA, 15 bp, Homo sapiens
ccagccatcccatta

SEQ ID NO: 422860 - DNA, 15 bp, Homo sapiens
cccagccatcccatt

SEQ ID NO: 422861 - DNA, 15 bp, Homo sapiens
acccagccatcccat

SEQ ID NO: 422862 - DNA, 15 bp, Homo sapiens
gacccagccatccca

SEQ ID NO: 422863 - DNA, 15 bp, Homo sapiens
ctagttcaaccattg

SEQ ID NO: 422864 - DNA, 15 bp, Homo sapiens
actagttcaaccatt

SEQ ID NO: 422865 - DNA, 15 bp, Homo sapiens
cactagttcaaccat

SEQ ID NO: 422866 - DNA, 15 bp, Homo sapiens
acactagttcaacca

SEQ ID NO: 422867 - DNA, 15 bp, Homo sapiens
tacactagttcaacc

SEQ ID NO: 422868 - DNA, 15 bp, Homo sapiens
gtacactagttcaac

SEQ ID NO: 422869 - DNA, 15 bp, Homo sapiens
tgtacactagttcaa

SEQ ID NO: 422870 - DNA, 15 bp, Homo sapiens
ctgtacactagttca

SEQ ID NO: 422871 - DNA, 15 bp, Homo sapiens
actgtacactagttc

SEQ ID NO: 422872 - DNA, 15 bp, Homo sapiens
gactgtacactagtt

SEQ ID NO: 422873 - DNA, 15 bp, Homo sapiens
ggactgtacactagt

SEQ ID NO: 422874 - DNA, 15 bp, Homo sapiens
gggactgtacactag

SEQ ID NO: 422875 - DNA, 15 bp, Homo sapiens
tgggactgtacacta

SEQ ID NO: 422876 - DNA, 15 bp, Homo sapiens
gtgggactgtacact

SEQ ID NO: 422877 - DNA, 15 bp, Homo sapiens
ggtgggactgtacac

SEQ ID NO: 422878 - DNA, 15 bp, Homo sapiens
tggtgggactgtaca

SEQ ID NO: 422879 - DNA, 15 bp, Homo sapiens
ttggtgggactgtac

SEQ ID NO: 422880 - DNA, 15 bp, Homo sapiens
aaaataggaacactt

SEQ ID NO: 422881 - DNA, 15 bp, Homo sapiens
aaaaataggaacact

SEQ ID NO: 422882 - DNA, 15 bp, Homo sapiens
gaaaaataggaacac

SEQ ID NO: 422883 - DNA, 15 bp, Homo sapiens
ggaaaaataggaaca

SEQ ID NO: 422884 - DNA, 15 bp, Homo sapiens
tggaaaaataggaac

SEQ ID NO: 422885 - DNA, 15 bp, Homo sapiens
gtggaaaaataggaa

SEQ ID NO: 422886 - DNA, 15 bp, Homo sapiens
tgtggaaaaatagga

SEQ ID NO: 422887 - DNA, 15 bp, Homo sapiens
atgtggaaaaatagg

SEQ ID NO: 422888 - DNA, 15 bp, Homo sapiens
gatgtggaaaaatag

SEQ ID NO: 422889 - DNA, 15 bp, Homo sapiens
ggatgtggaaaaata

SEQ ID NO: 422890 - DNA, 15 bp, Homo sapiens
aggatgtggaaaaat

SEQ ID NO: 422891 - DNA, 15 bp, Homo sapiens
gaggatgtggaaaaa

SEQ ID NO: 422892 - DNA, 15 bp, Homo sapiens
agaggatgtggaaaa

SEQ ID NO: 422893 - DNA, 15 bp, Homo sapiens
gagaggatgtggaaa

SEQ ID NO: 422894 - DNA, 15 bp, Homo sapiens
ggagaggatgtggaa

SEQ ID NO: 422895 - DNA, 15 bp, Homo sapiens
tggaaacaacaggtg

SEQ ID NO: 422896 - DNA, 15 bp, Homo sapiens
ctggaaacaacaggt

SEQ ID NO: 422897 - DNA, 15 bp, Homo sapiens
tctggaaacaacagg

SEQ ID NO: 422898 - DNA, 15 bp, Homo sapiens
gtctggaaacaacag

SEQ ID NO: 422899 - DNA, 15 bp, Homo sapiens
agtctggaaacaaca

SEQ ID NO: 422900 - DNA, 15 bp, Homo sapiens
aagtctggaaacaac

SEQ ID NO: 422901 - DNA, 15 bp, Homo sapiens
aaagtctggaaacaa

SEQ ID NO: 422902 - DNA, 15 bp, Homo sapiens
aaaagtctggaaaca

SEQ ID NO: 422903 - DNA, 15 bp, Homo sapiens
aaaaagtctggaaac

SEQ ID NO: 422904 - DNA, 15 bp, Homo sapiens
taaaaagtctggaaa

SEQ ID NO: 422905 - DNA, 15 bp, Homo sapiens
ttaaaaagtctggaa

SEQ ID NO: 422906 - DNA, 15 bp, Homo sapiens
attaaaaagtctgga

SEQ ID NO: 422907 - DNA, 15 bp, Homo sapiens
cattaaaaagtctgg

SEQ ID NO: 422908 - DNA, 15 bp, Homo sapiens
tcattaaaaagtctg

SEQ ID NO: 422909 - DNA, 15 bp, Homo sapiens
atcattaaaaagtct

SEQ ID NO: 422910 - DNA, 15 bp, Homo sapiens
gccagttagaatggc

SEQ ID NO: 422911 - DNA, 15 bp, Homo sapiens
cgccagttagaatgg

SEQ ID NO: 422912 - DNA, 15 bp, Homo sapiens
acgccagttagaatg

SEQ ID NO: 422913 - DNA, 15 bp, Homo sapiens
cacgccagttagaat

SEQ ID NO: 422914 - DNA, 15 bp, Homo sapiens
tcacgccagttagaa

SEQ ID NO: 422915 - DNA, 15 bp, Homo sapiens
ctcacgccagttaga

SEQ ID NO: 422916 - DNA, 15 bp, Homo sapiens
tctcacgccagttag

SEQ ID NO: 422917 - DNA, 15 bp, Homo sapiens
atctcacgccagtta

SEQ ID NO: 422918 - DNA, 15 bp, Homo sapiens
catctcacgccagtt

SEQ ID NO: 422919 - DNA, 15 bp, Homo sapiens
ccatctcacgccagt

SEQ ID NO: 422920 - DNA, 15 bp, Homo sapiens
accatctcacgccag

SEQ ID NO: 422921 - DNA, 15 bp, Homo sapiens
taccatctcacgcca

SEQ ID NO: 422922 - DNA, 15 bp, Homo sapiens
ataccatctcacgcc

SEQ ID NO: 422923 - DNA, 15 bp, Homo sapiens
gataccatctcacgc

SEQ ID NO: 422924 - DNA, 15 bp, Homo sapiens
agataccatctcacg

SEQ ID NO: 422925 - DNA, 15 bp, Homo sapiens
aacacatgaaaaaat

SEQ ID NO: 422926 - DNA, 15 bp, Homo sapiens
aaacacatgaaaaaa

SEQ ID NO: 422927 - DNA, 15 bp, Homo sapiens
aaaacacatgaaaaa

SEQ ID NO: 422928 - DNA, 15 bp, Homo sapiens
aaaaacacatgaaaa

SEQ ID NO: 422929 - DNA, 15 bp, Homo sapiens
aaaaaacacatgaaa

SEQ ID NO: 422930 - DNA, 15 bp, Homo sapiens
caaaaaacacatgaa

SEQ ID NO: 422931 - DNA, 15 bp, Homo sapiens
ccaaaaaacacatga

SEQ ID NO: 422932 - DNA, 15 bp, Homo sapiens
gccaaaaaacacatg

SEQ ID NO: 422933 - DNA, 15 bp, Homo sapiens
agccaaaaaacacat

SEQ ID NO: 422934 - DNA, 15 bp, Homo sapiens
cagccaaaaaacaca

SEQ ID NO: 422935 - DNA, 15 bp, Homo sapiens
gcagccaaaaaacac

SEQ ID NO: 422936 - DNA, 15 bp, Homo sapiens
tgcagccaaaaaaca

SEQ ID NO: 422937 - DNA, 15 bp, Homo sapiens
atgcagccaaaaaac

SEQ ID NO: 422938 - DNA, 15 bp, Homo sapiens
tatgcagccaaaaaa

SEQ ID NO: 422939 - DNA, 15 bp, Homo sapiens
ttatgcagccaaaaa

SEQ ID NO: 422940 - DNA, 15 bp, Homo sapiens
catgaacagacactt

SEQ ID NO: 422941 - DNA, 15 bp, Homo sapiens
acatgaacagacact

SEQ ID NO: 422942 - DNA, 15 bp, Homo sapiens
gacatgaacagacac

SEQ ID NO: 422943 - DNA, 15 bp, Homo sapiens
ggacatgaacagaca

SEQ ID NO: 422944 - DNA, 15 bp, Homo sapiens
aggacatgaacagac

SEQ ID NO: 422945 - DNA, 15 bp, Homo sapiens
acaaaatgggagaaa

SEQ ID NO: 422946 - DNA, 15 bp, Homo sapiens
tacaaaatgggagaa

SEQ ID NO: 422947 - DNA, 15 bp, Homo sapiens
ctacaaaatgggaga

SEQ ID NO: 422948 - DNA, 15 bp, Homo sapiens
actacaaaatgggag

SEQ ID NO: 422949 - DNA, 15 bp, Homo sapiens
aactacaaaatggga

SEQ ID NO: 422950 - DNA, 15 bp, Homo sapiens
aaactacaaaatggg

SEQ ID NO: 422951 - DNA, 15 bp, Homo sapiens
caaactacaaaatgg

SEQ ID NO: 422952 - DNA, 15 bp, Homo sapiens
gcaaactacaaaatg

SEQ ID NO: 422953 - DNA, 15 bp, Homo sapiens
ggcaaactacaaaat

SEQ ID NO: 422954 - DNA, 15 bp, Homo sapiens
aggcaaactacaaaa

SEQ ID NO: 422955 - DNA, 15 bp, Homo sapiens
caggcaaactacaaa

SEQ ID NO: 422956 - DNA, 15 bp, Homo sapiens
acaggcaaactacaa

SEQ ID NO: 422957 - DNA, 15 bp, Homo sapiens
aacaggcaaactaca

SEQ ID NO: 422958 - DNA, 15 bp, Homo sapiens
gaacaggcaaactac

SEQ ID NO: 422959 - DNA, 15 bp, Homo sapiens
tgaacaggcaaacta

SEQ ID NO: 422960 - DNA, 15 bp, Homo sapiens
gtgaacaggcaaact

SEQ ID NO: 422961 - DNA, 15 bp, Homo sapiens
agtgaacaggcaaac

SEQ ID NO: 422962 - DNA, 15 bp, Homo sapiens
ctgtctaaaacacca

SEQ ID NO: 422963 - DNA, 15 bp, Homo sapiens
cctgtctaaaacacc

SEQ ID NO: 422964 - DNA, 15 bp, Homo sapiens
tcctgtctaaaacac

SEQ ID NO: 422965 - DNA, 15 bp, Homo sapiens
ttcctgtctaaaaca

SEQ ID NO: 422966 - DNA, 15 bp, Homo sapiens
cttcctgtctaaaac

SEQ ID NO: 422967 - DNA, 15 bp, Homo sapiens
acttcctgtctaaaa

SEQ ID NO: 422968 - DNA, 15 bp, Homo sapiens
gacttcctgtctaaa

SEQ ID NO: 422969 - DNA, 15 bp, Homo sapiens
ggacttcctgtctaa

SEQ ID NO: 422970 - DNA, 15 bp, Homo sapiens
aggacttcctgtcta

SEQ ID NO: 422971 - DNA, 15 bp, Homo sapiens
aaggacttcctgtct

SEQ ID NO: 422972 - DNA, 15 bp, Homo sapiens
caaggacttcctgtc

SEQ ID NO: 422973 - DNA, 15 bp, Homo sapiens
gcaaggacttcctgt

SEQ ID NO: 422974 - DNA, 15 bp, Homo sapiens
ggcaaggacttcctg

SEQ ID NO: 422975 - DNA, 15 bp, Homo sapiens
gggcaaggacttcct

SEQ ID NO: 422976 - DNA, 15 bp, Homo sapiens
tgggcaaggacttcc

SEQ ID NO: 422977 - DNA, 15 bp, Homo sapiens
ctagaagaaaaccta

SEQ ID NO: 422978 - DNA, 15 bp, Homo sapiens
cctagaagaaaacct

SEQ ID NO: 422979 - DNA, 15 bp, Homo sapiens
ccctagaagaaaacc

SEQ ID NO: 422980 - DNA, 15 bp, Homo sapiens
accctagaagaaaac

SEQ ID NO: 422981 - DNA, 15 bp, Homo sapiens
aaccctagaagaaaa

SEQ ID NO: 422982 - DNA, 15 bp, Homo sapiens
aaaccctagaagaaa

SEQ ID NO: 422983 - DNA, 15 bp, Homo sapiens
aaaaccctagaagaa

SEQ ID NO: 422984 - DNA, 15 bp, Homo sapiens
aaaaaccctagaaga

SEQ ID NO: 422985 - DNA, 15 bp, Homo sapiens
taaaaaccctagaag

SEQ ID NO: 422986 - DNA, 15 bp, Homo sapiens
ataaaaaccctagaa

SEQ ID NO: 422987 - DNA, 15 bp, Homo sapiens
cataaaaaccctaga

SEQ ID NO: 422988 - DNA, 15 bp, Homo sapiens
ccataaaaaccctag

SEQ ID NO: 422989 - DNA, 15 bp, Homo sapiens
accataaaaacccta

SEQ ID NO: 422990 - DNA, 15 bp, Homo sapiens
aaccataaaaaccct

SEQ ID NO: 422991 - DNA, 15 bp, Homo sapiens
acttaaatgttagac

SEQ ID NO: 422992 - DNA, 15 bp, Homo sapiens
gacttaaatgttaga

SEQ ID NO: 422993 - DNA, 15 bp, Homo sapiens
agacttaaatgttag

SEQ ID NO: 422994 - DNA, 15 bp, Homo sapiens
aagacttaaatgtta

SEQ ID NO: 422995 - DNA, 15 bp, Homo sapiens
aaagacttaaatgtt

SEQ ID NO: 422996 - DNA, 15 bp, Homo sapiens
taaagacttaaatgt

SEQ ID NO: 422997 - DNA, 15 bp, Homo sapiens
ttaaagacttaaatg

SEQ ID NO: 422998 - DNA, 15 bp, Homo sapiens
attaaagacttaaat

SEQ ID NO: 422999 - DNA, 15 bp, Homo sapiens
ggattaaagacttaa

SEQ ID NO: 423000 - DNA, 15 bp, Homo sapiens
tggattaaagactta

SEQ ID NO: 423001 - DNA, 15 bp, Homo sapiens
atggattaaagactt

SEQ ID NO: 423002 - DNA, 15 bp, Homo sapiens
gatggattaaagact

SEQ ID NO: 423003 - DNA, 15 bp, Homo sapiens
agatggattaaagac

SEQ ID NO: 423004 - DNA, 15 bp, Homo sapiens
caattcaagatggat

SEQ ID NO: 423005 - DNA, 15 bp, Homo sapiens
tcaattcaagatgga

SEQ ID NO: 423006 - DNA, 15 bp, Homo sapiens
atcaattcaagatgg

SEQ ID NO: 423007 - DNA, 15 bp, Homo sapiens
aatcaattcaagatg

SEQ ID NO: 423008 - DNA, 15 bp, Homo sapiens
aaatcaattcaagat

SEQ ID NO: 423009 - DNA, 15 bp, Homo sapiens
aaaatcaattcaaga

SEQ ID NO: 423010 - DNA, 15 bp, Homo sapiens
aaaaatcaattcaag

SEQ ID NO: 423011 - DNA, 15 bp, Homo sapiens
caaaaatcaattcaa

SEQ ID NO: 423012 - DNA, 15 bp, Homo sapiens
acaaaaatcaattca

SEQ ID NO: 423013 - DNA, 15 bp, Homo sapiens
tacaaaaatcaattc

SEQ ID NO: 423014 - DNA, 15 bp, Homo sapiens
atacaaaaatcaatt

SEQ ID NO: 423015 - DNA, 15 bp, Homo sapiens
tatacaaaaatcaat

SEQ ID NO: 423016 - DNA, 15 bp, Homo sapiens
ttatacaaaaatcaa

SEQ ID NO: 423017 - DNA, 15 bp, Homo sapiens
cttatacaaaaatca

SEQ ID NO: 423018 - DNA, 15 bp, Homo sapiens
ccttatacaaaaatc

SEQ ID NO: 423019 - DNA, 15 bp, Homo sapiens
actgaaactggatcc

SEQ ID NO: 423020 - DNA, 15 bp, Homo sapiens
aactgaaactggatc

SEQ ID NO: 423021 - DNA, 15 bp, Homo sapiens
aaactgaaactggat

SEQ ID NO: 423022 - DNA, 15 bp, Homo sapiens
aaaactgaaactgga

SEQ ID NO: 423023 - DNA, 15 bp, Homo sapiens
gaaaactgaaactgg

SEQ ID NO: 423024 - DNA, 15 bp, Homo sapiens
agaaaactgaaactg

SEQ ID NO: 423025 - DNA, 15 bp, Homo sapiens
tagaaaactgaaact

SEQ ID NO: 423026 - DNA, 15 bp, Homo sapiens
gtagaaaactgaaac

SEQ ID NO: 423027 - DNA, 15 bp, Homo sapiens
tgtagaaaactgaaa

SEQ ID NO: 423028 - DNA, 15 bp, Homo sapiens
atgtagaaaactgaa

SEQ ID NO: 423029 - DNA, 15 bp, Homo sapiens
tatgtagaaaactga

SEQ ID NO: 423030 - DNA, 15 bp, Homo sapiens
atatgtagaaaactg

SEQ ID NO: 423031 - DNA, 15 bp, Homo sapiens
catatgtagaaaact

SEQ ID NO: 423032 - DNA, 15 bp, Homo sapiens
ccatatgtagaaaac

SEQ ID NO: 423033 - DNA, 15 bp, Homo sapiens
gccatatgtagaaaa

SEQ ID NO: 423034 - DNA, 15 bp, Homo sapiens
agccatatgtagaaa

SEQ ID NO: 423035 - DNA, 15 bp, Homo sapiens
tagccatatgtagaa

SEQ ID NO: 423036 - DNA, 15 bp, Homo sapiens
ctagccatatgtaga

SEQ ID NO: 423037 - DNA, 15 bp, Homo sapiens
gctagccatatgtag

SEQ ID NO: 423038 - DNA, 15 bp, Homo sapiens
ggctagccatatgta

SEQ ID NO: 423039 - DNA, 15 bp, Homo sapiens
cctgagaaaaacaag

SEQ ID NO: 423040 - DNA, 15 bp, Homo sapiens
acctgagaaaaacaa

SEQ ID NO: 423041 - DNA, 15 bp, Homo sapiens
aacctgagaaaaaca

SEQ ID NO: 423042 - DNA, 15 bp, Homo sapiens
aaacctgagaaaaac

SEQ ID NO: 423043 - DNA, 15 bp, Homo sapiens
caaacctgagaaaaa

SEQ ID NO: 423044 - DNA, 15 bp, Homo sapiens
acaaacctgagaaaa

SEQ ID NO: 423045 - DNA, 15 bp, Homo sapiens
gacaaacctgagaaa

SEQ ID NO: 423046 - DNA, 15 bp, Homo sapiens
tgacaaacctgagaa

SEQ ID NO: 423047 - DNA, 15 bp, Homo sapiens
ttgacaaacctgaga

SEQ ID NO: 423048 - DNA, 15 bp, Homo sapiens
tttgacaaacctgag

SEQ ID NO: 423049 - DNA, 15 bp, Homo sapiens
gatctttgacaaacc

SEQ ID NO: 423050 - DNA, 15 bp, Homo sapiens
tgatctttgacaaac

SEQ ID NO: 423051 - DNA, 15 bp, Homo sapiens
tatatctacaactat

SEQ ID NO: 423052 - DNA, 15 bp, Homo sapiens
gtatatctacaacta

SEQ ID NO: 423053 - DNA, 15 bp, Homo sapiens
cgtatatctacaact

SEQ ID NO: 423054 - DNA, 15 bp, Homo sapiens
ccgtatatctacaac

SEQ ID NO: 423055 - DNA, 15 bp, Homo sapiens
gccgtatatctacaa

SEQ ID NO: 423056 - DNA, 15 bp, Homo sapiens
cgccgtatatctaca

SEQ ID NO: 423057 - DNA, 15 bp, Homo sapiens
acgccgtatatctac

SEQ ID NO: 423058 - DNA, 15 bp, Homo sapiens
aacgccgtatatcta

SEQ ID NO: 423059 - DNA, 15 bp, Homo sapiens
taacgccgtatatct

SEQ ID NO: 423060 - DNA, 15 bp, Homo sapiens
ataacgccgtatatc

SEQ ID NO: 423061 - DNA, 15 bp, Homo sapiens
aataacgccgtatat

SEQ ID NO: 423062 - DNA, 15 bp, Homo sapiens
aaataacgccgtata

SEQ ID NO: 423063 - DNA, 15 bp, Homo sapiens
gaaataacgccgtat

SEQ ID NO: 423064 - DNA, 15 bp, Homo sapiens
agaaataacgccgta

SEQ ID NO: 423065 - DNA, 15 bp, Homo sapiens
cagaaataacgccgt

SEQ ID NO: 423066 - DNA, 15 bp, Homo sapiens
gtggaacagaacaga

SEQ ID NO: 423067 - DNA, 15 bp, Homo sapiens
agtggaacagaacag

SEQ ID NO: 423068 - DNA, 15 bp, Homo sapiens
cagtggaacagaaca

SEQ ID NO: 423069 - DNA, 15 bp, Homo sapiens
tcagtggaacagaac

SEQ ID NO: 423070 - DNA, 15 bp, Homo sapiens
atcagtggaacagaa

SEQ ID NO: 423071 - DNA, 15 bp, Homo sapiens
gatcagtggaacaga

SEQ ID NO: 423072 - DNA, 15 bp, Homo sapiens
agatcagtggaacag

SEQ ID NO: 423073 - DNA, 15 bp, Homo sapiens
tagatcagtggaaca

SEQ ID NO: 423074 - DNA, 15 bp, Homo sapiens
atagatcagtggaac

SEQ ID NO: 423075 - DNA, 15 bp, Homo sapiens
tatagatcagtggaa

SEQ ID NO: 423076 - DNA, 15 bp, Homo sapiens
atatagatcagtgga

SEQ ID NO: 423077 - DNA, 15 bp, Homo sapiens
gatatagatcagtgg

SEQ ID NO: 423078 - DNA, 15 bp, Homo sapiens
agatatagatcagtg

SEQ ID NO: 423079 - DNA, 15 bp, Homo sapiens
gagatatagatcagt

SEQ ID NO: 423080 - DNA, 15 bp, Homo sapiens
agagatatagatcag

SEQ ID NO: 423081 - DNA, 15 bp, Homo sapiens
cagagatatagatca

SEQ ID NO: 423082 - DNA, 15 bp, Homo sapiens
acagagatatagatc

SEQ ID NO: 423083 - DNA, 15 bp, Homo sapiens
aacagagatatagat

SEQ ID NO: 423084 - DNA, 15 bp, Homo sapiens
cacaaggctacagta

SEQ ID NO: 423085 - DNA, 15 bp, Homo sapiens
ccacaaggctacagt

SEQ ID NO: 423086 - DNA, 15 bp, Homo sapiens
accacaaggctacag

SEQ ID NO: 423087 - DNA, 15 bp, Homo sapiens
taccacaaggctaca

SEQ ID NO: 423088 - DNA, 15 bp, Homo sapiens
ataccacaaggctac

SEQ ID NO: 423089 - DNA, 15 bp, Homo sapiens
tataccacaaggcta

SEQ ID NO: 423090 - DNA, 15 bp, Homo sapiens
ctataccacaaggct

SEQ ID NO: 423091 - DNA, 15 bp, Homo sapiens
actataccacaaggc

SEQ ID NO: 423092 - DNA, 15 bp, Homo sapiens
aactataccacaagg

SEQ ID NO: 423093 - DNA, 15 bp, Homo sapiens
aaactataccacaag

SEQ ID NO: 423094 - DNA, 15 bp, Homo sapiens
caaactataccacaa

SEQ ID NO: 423095 - DNA, 15 bp, Homo sapiens
tcaaactataccaca

SEQ ID NO: 423096 - DNA, 15 bp, Homo sapiens
ttcaaactataccac

SEQ ID NO: 423097 - DNA, 15 bp, Homo sapiens
cttcaaactatacca

SEQ ID NO: 423098 - DNA, 15 bp, Homo sapiens
acttcaaactatacc

SEQ ID NO: 423099 - DNA, 15 bp, Homo sapiens
tgctacctgacttca

SEQ ID NO: 423100 - DNA, 15 bp, Homo sapiens
atgctacctgacttc

SEQ ID NO: 423101 - DNA, 15 bp, Homo sapiens
catgctacctgactt

SEQ ID NO: 423102 - DNA, 15 bp, Homo sapiens
tcatgctacctgact

SEQ ID NO: 423103 - DNA, 15 bp, Homo sapiens
atcatgctacctgac

SEQ ID NO: 423104 - DNA, 15 bp, Homo sapiens
catcatgctacctga

SEQ ID NO: 423105 - DNA, 15 bp, Homo sapiens
gcatcatgctacctg

SEQ ID NO: 423106 - DNA, 15 bp, Homo sapiens
ggcatcatgctacct

SEQ ID NO: 423107 - DNA, 15 bp, Homo sapiens
aggcatcatgctacc

SEQ ID NO: 423108 - DNA, 15 bp, Homo sapiens
gaggcatcatgctac

SEQ ID NO: 423109 - DNA, 15 bp, Homo sapiens
ggaggcatcatgcta

SEQ ID NO: 423110 - DNA, 15 bp, Homo sapiens
tggaggcatcatgct

SEQ ID NO: 423111 - DNA, 15 bp, Homo sapiens
ctggaggcatcatgc

SEQ ID NO: 423112 - DNA, 15 bp, Homo sapiens
gctggaggcatcatg

SEQ ID NO: 423113 - DNA, 15 bp, Homo sapiens
agctggaggcatcat

SEQ ID NO: 423114 - DNA, 15 bp, Homo sapiens
agaacaaagctggag

SEQ ID NO: 423115 - DNA, 15 bp, Homo sapiens
aagaacaaagctgga

SEQ ID NO: 423116 - DNA, 15 bp, Homo sapiens
aaagaacaaagctgg

SEQ ID NO: 423117 - DNA, 15 bp, Homo sapiens
aaaagaacaaagctg

SEQ ID NO: 423118 - DNA, 15 bp, Homo sapiens
caaaagaacaaagct

SEQ ID NO: 423119 - DNA, 15 bp, Homo sapiens
ccaaaagaacaaagc

SEQ ID NO: 423120 - DNA, 15 bp, Homo sapiens
gccaaaagaacaaag

SEQ ID NO: 423121 - DNA, 15 bp, Homo sapiens
agccaaaagaacaaa

SEQ ID NO: 423122 - DNA, 15 bp, Homo sapiens
aagccaaaagaacaa

SEQ ID NO: 423123 - DNA, 15 bp, Homo sapiens
taagccaaaagaaca

SEQ ID NO: 423124 - DNA, 15 bp, Homo sapiens
ctaagccaaaagaac

SEQ ID NO: 423125 - DNA, 15 bp, Homo sapiens
cctaagccaaaagaa

SEQ ID NO: 423126 - DNA, 15 bp, Homo sapiens
tcctaagccaaaaga

SEQ ID NO: 423127 - DNA, 15 bp, Homo sapiens
atcctaagccaaaag

SEQ ID NO: 423128 - DNA, 15 bp, Homo sapiens
aatcctaagccaaaa

SEQ ID NO: 423129 - DNA, 15 bp, Homo sapiens
gcattgccaagtcaa

SEQ ID NO: 423130 - DNA, 15 bp, Homo sapiens
cgcattgccaagtca

SEQ ID NO: 423131 - DNA, 15 bp, Homo sapiens
ccgcattgccaagtc

SEQ ID NO: 423132 - DNA, 15 bp, Homo sapiens
cccgcattgccaagt

SEQ ID NO: 423133 - DNA, 15 bp, Homo sapiens
gcccgcattgccaag

SEQ ID NO: 423134 - DNA, 15 bp, Homo sapiens
agcccgcattgccaa

SEQ ID NO: 423135 - DNA, 15 bp, Homo sapiens
gagcccgcattgcca

SEQ ID NO: 423136 - DNA, 15 bp, Homo sapiens
agagcccgcattgcc

SEQ ID NO: 423137 - DNA, 15 bp, Homo sapiens
aagagcccgcattgc

SEQ ID NO: 423138 - DNA, 15 bp, Homo sapiens
aaagagcccgcattg

SEQ ID NO: 423139 - DNA, 15 bp, Homo sapiens
aaaagagcccgcatt

SEQ ID NO: 423140 - DNA, 15 bp, Homo sapiens
aaaaagagcccgcat

SEQ ID NO: 423141 - DNA, 15 bp, Homo sapiens
aaaaaagagcccgca

SEQ ID NO: 423142 - DNA, 15 bp, Homo sapiens
caaaaaagagcccgc

SEQ ID NO: 423143 - DNA, 15 bp, Homo sapiens
ccaaaaaagagcccg

SEQ ID NO: 423144 - DNA, 15 bp, Homo sapiens
gaaccaaaaaagagc

SEQ ID NO: 423145 - DNA, 15 bp, Homo sapiens
ggaaccaaaaaagag

SEQ ID NO: 423146 - DNA, 15 bp, Homo sapiens
tggaaccaaaaaaga

SEQ ID NO: 423147 - DNA, 15 bp, Homo sapiens
atggaaccaaaaaag

SEQ ID NO: 423148 - DNA, 15 bp, Homo sapiens
tatggaaccaaaaaa

SEQ ID NO: 423149 - DNA, 15 bp, Homo sapiens
atatggaaccaaaaa

SEQ ID NO: 423150 - DNA, 15 bp, Homo sapiens
catatggaaccaaaa

SEQ ID NO: 423151 - DNA, 15 bp, Homo sapiens
tcatatggaaccaaa

SEQ ID NO: 423152 - DNA, 15 bp, Homo sapiens
ttcatatggaaccaa

SEQ ID NO: 423153 - DNA, 15 bp, Homo sapiens
gttcatatggaacca

SEQ ID NO: 423154 - DNA, 15 bp, Homo sapiens
agttcatatggaacc

SEQ ID NO: 423155 - DNA, 15 bp, Homo sapiens
aagttcatatggaac

SEQ ID NO: 423156 - DNA, 15 bp, Homo sapiens
aaagttcatatggaa

SEQ ID NO: 423157 - DNA, 15 bp, Homo sapiens
taaagttcatatgga

SEQ ID NO: 423158 - DNA, 15 bp, Homo sapiens
ttaaagttcatatgg

SEQ ID NO: 423159 - DNA, 15 bp, Homo sapiens
gaaaaaactacttta

SEQ ID NO: 423160 - DNA, 15 bp, Homo sapiens
ggaaaaaactacttt

SEQ ID NO: 423161 - DNA, 15 bp, Homo sapiens
tggaaaaaactactt

SEQ ID NO: 423162 - DNA, 15 bp, Homo sapiens
ttggaaaaaactact

SEQ ID NO: 423163 - DNA, 15 bp, Homo sapiens
attggaaaaaactac

SEQ ID NO: 423164 - DNA, 15 bp, Homo sapiens
aattggaaaaaacta

SEQ ID NO: 423165 - DNA, 15 bp, Homo sapiens
gaattggaaaaaact

SEQ ID NO: 423166 - DNA, 15 bp, Homo sapiens
agaattggaaaaaac

SEQ ID NO: 423167 - DNA, 15 bp, Homo sapiens
tcaatgccatcccca

SEQ ID NO: 423168 - DNA, 15 bp, Homo sapiens
ttcaatgccatcccc

SEQ ID NO: 423169 - DNA, 15 bp, Homo sapiens
attcaatgccatccc

SEQ ID NO: 423170 - DNA, 15 bp, Homo sapiens
gattcaatgccatcc

SEQ ID NO: 423171 - DNA, 15 bp, Homo sapiens
agattcaatgccatc

SEQ ID NO: 423172 - DNA, 15 bp, Homo sapiens
cagattcaatgccat

SEQ ID NO: 423173 - DNA, 15 bp, Homo sapiens
acagattcaatgcca

SEQ ID NO: 423174 - DNA, 15 bp, Homo sapiens
tacagattcaatgcc

SEQ ID NO: 423175 - DNA, 15 bp, Homo sapiens
ttacagattcaatgc

SEQ ID NO: 423176 - DNA, 15 bp, Homo sapiens
tttacagattcaatg

SEQ ID NO: 423177 - DNA, 15 bp, Homo sapiens
atttacagattcaat

SEQ ID NO: 423178 - DNA, 15 bp, Homo sapiens
aatttacagattcaa

SEQ ID NO: 423179 - DNA, 15 bp, Homo sapiens
taatttacagattca

SEQ ID NO: 423180 - DNA, 15 bp, Homo sapiens
gtaatttacagattc

SEQ ID NO: 423181 - DNA, 15 bp, Homo sapiens
ggtaatttacagatt

SEQ ID NO: 423182 - DNA, 15 bp, Homo sapiens
aggtaatttacagat

SEQ ID NO: 423183 - DNA, 15 bp, Homo sapiens
aaggtaatttacaga

SEQ ID NO: 423184 - DNA, 15 bp, Homo sapiens
caaggtaatttacag

SEQ ID NO: 423185 - DNA, 15 bp, Homo sapiens
ccaaggtaatttaca

SEQ ID NO: 423186 - DNA, 15 bp, Homo sapiens
cccaaggtaatttac

SEQ ID NO: 423187 - DNA, 15 bp, Homo sapiens
gcccaaggtaattta

SEQ ID NO: 423188 - DNA, 15 bp, Homo sapiens
tgcccaaggtaattt

SEQ ID NO: 423189 - DNA, 15 bp, Homo sapiens
ctgcccaaggtaatt

SEQ ID NO: 423190 - DNA, 15 bp, Homo sapiens
actgcccaaggtaat

SEQ ID NO: 423191 - DNA, 15 bp, Homo sapiens
tactgcccaaggtaa

SEQ ID NO: 423192 - DNA, 15 bp, Homo sapiens
atactgcccaaggta

SEQ ID NO: 423193 - DNA, 15 bp, Homo sapiens
catactgcccaaggt

SEQ ID NO: 423194 - DNA, 15 bp, Homo sapiens
ccatactgcccaagg

SEQ ID NO: 423195 - DNA, 15 bp, Homo sapiens
gccatactgcccaag

SEQ ID NO: 423196 - DNA, 15 bp, Homo sapiens
ggccatactgcccaa

SEQ ID NO: 423197 - DNA, 15 bp, Homo sapiens
tggccatactgccca

SEQ ID NO: 423198 - DNA, 15 bp, Homo sapiens
atggccatactgccc

SEQ ID NO: 423199 - DNA, 15 bp, Homo sapiens
aatggccatactgcc

SEQ ID NO: 423200 - DNA, 15 bp, Homo sapiens
aaatggccatactgc

SEQ ID NO: 423201 - DNA, 15 bp, Homo sapiens
aaaatggccatactg

SEQ ID NO: 423202 - DNA, 15 bp, Homo sapiens
gaaaatggccatact

SEQ ID NO: 423203 - DNA, 15 bp, Homo sapiens
tgaaaatggccatac

SEQ ID NO: 423204 - DNA, 15 bp, Homo sapiens
gtgaaaatggccata

SEQ ID NO: 423205 - DNA, 15 bp, Homo sapiens
cgtgaaaatggccat

SEQ ID NO: 423206 - DNA, 15 bp, Homo sapiens
tcgtgaaaatggcca

SEQ ID NO: 423207 - DNA, 15 bp, Homo sapiens
atcgtgaaaatggcc

SEQ ID NO: 423208 - DNA, 15 bp, Homo sapiens
tatcgtgaaaatggc

SEQ ID NO: 423209 - DNA, 15 bp, Homo sapiens
atatcgtgaaaatgg

SEQ ID NO: 423210 - DNA, 15 bp, Homo sapiens
aatatcgtgaaaatg

SEQ ID NO: 423211 - DNA, 15 bp, Homo sapiens
caatatcgtgaaaat

SEQ ID NO: 423212 - DNA, 15 bp, Homo sapiens
tcaatatcgtgaaaa

SEQ ID NO: 423213 - DNA, 15 bp, Homo sapiens
atcaatatcgtgaaa

SEQ ID NO: 423214 - DNA, 15 bp, Homo sapiens
aatcaatatcgtgaa

SEQ ID NO: 423215 - DNA, 15 bp, Homo sapiens
gaatcaatatcgtga

SEQ ID NO: 423216 - DNA, 15 bp, Homo sapiens
agaatcaatatcgtg

SEQ ID NO: 423217 - DNA, 15 bp, Homo sapiens
aagaatcaatatcgt

SEQ ID NO: 423218 - DNA, 15 bp, Homo sapiens
gaagaatcaatatcg

SEQ ID NO: 423219 - DNA, 15 bp, Homo sapiens
ggaagaatcaatatc

SEQ ID NO: 423220 - DNA, 15 bp, Homo sapiens
aggaagaatcaatat

SEQ ID NO: 423221 - DNA, 15 bp, Homo sapiens
taggaagaatcaata

SEQ ID NO: 423222 - DNA, 15 bp, Homo sapiens
gtaggaagaatcaat

SEQ ID NO: 423223 - DNA, 15 bp, Homo sapiens
ggtaggaagaatcaa

SEQ ID NO: 423224 - DNA, 15 bp, Homo sapiens
gggtaggaagaatca

SEQ ID NO: 423225 - DNA, 15 bp, Homo sapiens
tgggtaggaagaatc

SEQ ID NO: 423226 - DNA, 15 bp, Homo sapiens
ctgggtaggaagaat

SEQ ID NO: 423227 - DNA, 15 bp, Homo sapiens
cctgggtaggaagaa

SEQ ID NO: 423228 - DNA, 15 bp, Homo sapiens
tcctgggtaggaaga

SEQ ID NO: 423229 - DNA, 15 bp, Homo sapiens
ctcctgggtaggaag

SEQ ID NO: 423230 - DNA, 15 bp, Homo sapiens
gctcctgggtaggaa

SEQ ID NO: 423231 - DNA, 15 bp, Homo sapiens
tgctcctgggtagga

SEQ ID NO: 423232 - DNA, 15 bp, Homo sapiens
atgctcctgggtagg

SEQ ID NO: 423233 - DNA, 15 bp, Homo sapiens
catgctcctgggtag

SEQ ID NO: 423234 - DNA, 15 bp, Homo sapiens
ccatgctcctgggta

SEQ ID NO: 423235 - DNA, 15 bp, Homo sapiens
tccatgctcctgggt

SEQ ID NO: 423236 - DNA, 15 bp, Homo sapiens
ttccatgctcctggg

SEQ ID NO: 423237 - DNA, 15 bp, Homo sapiens
attccatgctcctgg

SEQ ID NO: 423238 - DNA, 15 bp, Homo sapiens
cattccatgctcctg

SEQ ID NO: 423239 - DNA, 15 bp, Homo sapiens
acattccatgctcct

SEQ ID NO: 423240 - DNA, 15 bp, Homo sapiens
aacattccatgctcc

SEQ ID NO: 423241 - DNA, 15 bp, Homo sapiens
gaacattccatgctc

SEQ ID NO: 423242 - DNA, 15 bp, Homo sapiens
agaacattccatgct

SEQ ID NO: 423243 - DNA, 15 bp, Homo sapiens
aagaacattccatgc

SEQ ID NO: 423244 - DNA, 15 bp, Homo sapiens
gaagaacattccatg

SEQ ID NO: 423245 - DNA, 15 bp, Homo sapiens
ggaagaacattccat

SEQ ID NO: 423246 - DNA, 15 bp, Homo sapiens
tggaagaacattcca

SEQ ID NO: 423247 - DNA, 15 bp, Homo sapiens
atggaagaacattcc

SEQ ID NO: 423248 - DNA, 15 bp, Homo sapiens
aatggaagaacattc

SEQ ID NO: 423249 - DNA, 15 bp, Homo sapiens
aaatggaagaacatt

SEQ ID NO: 423250 - DNA, 15 bp, Homo sapiens
caaatggaagaacat

SEQ ID NO: 423251 - DNA, 15 bp, Homo sapiens
acaaatggaagaaca

SEQ ID NO: 423252 - DNA, 15 bp, Homo sapiens
aacaaatggaagaac

SEQ ID NO: 423253 - DNA, 15 bp, Homo sapiens
aaacaaatggaagaa

SEQ ID NO: 423254 - DNA, 15 bp, Homo sapiens
caaacaaatggaaga

SEQ ID NO: 423255 - DNA, 15 bp, Homo sapiens
acaaacaaatggaag

SEQ ID NO: 423256 - DNA, 15 bp, Homo sapiens
tacaaacaaatggaa

SEQ ID NO: 423257 - DNA, 15 bp, Homo sapiens
atacaaacaaatgga

SEQ ID NO: 423258 - DNA, 15 bp, Homo sapiens
gatacaaacaaatgg

SEQ ID NO: 423259 - DNA, 15 bp, Homo sapiens
ggatacaaacaaatg

SEQ ID NO: 423260 - DNA, 15 bp, Homo sapiens
aggatacaaacaaat

SEQ ID NO: 423261 - DNA, 15 bp, Homo sapiens
gaggatacaaacaaa

SEQ ID NO: 423262 - DNA, 15 bp, Homo sapiens
agaggatacaaacaa

SEQ ID NO: 423263 - DNA, 15 bp, Homo sapiens
aagaggatacaaaca

SEQ ID NO: 423264 - DNA, 15 bp, Homo sapiens
aaagaggatacaaac

SEQ ID NO: 423265 - DNA, 15 bp, Homo sapiens
aaaagaggatacaaa

SEQ ID NO: 423266 - DNA, 15 bp, Homo sapiens
taaaagaggatacaa

SEQ ID NO: 423267 - DNA, 15 bp, Homo sapiens
ataaaagaggataca

SEQ ID NO: 423268 - DNA, 15 bp, Homo sapiens
aataaaagaggatac

SEQ ID NO: 423269 - DNA, 15 bp, Homo sapiens
aaataaaagaggata

SEQ ID NO: 423270 - DNA, 15 bp, Homo sapiens
gaaataaaagaggat

SEQ ID NO: 423271 - DNA, 15 bp, Homo sapiens
ggaaataaaagagga

SEQ ID NO: 423272 - DNA, 15 bp, Homo sapiens
aggaaataaaagagg

SEQ ID NO: 423273 - DNA, 15 bp, Homo sapiens
aaggaaataaaagag

SEQ ID NO: 423274 - DNA, 15 bp, Homo sapiens
caaggaaataaaaga

SEQ ID NO: 423275 - DNA, 15 bp, Homo sapiens
tcaaggaaataaaag

SEQ ID NO: 423276 - DNA, 15 bp, Homo sapiens
ctcaaggaaataaaa

SEQ ID NO: 423277 - DNA, 15 bp, Homo sapiens
gctcaaggaaataaa

SEQ ID NO: 423278 - DNA, 15 bp, Homo sapiens
tgctcaaggaaataa

SEQ ID NO: 423279 - DNA, 15 bp, Homo sapiens
ctgctcaaggaaata

SEQ ID NO: 423280 - DNA, 15 bp, Homo sapiens
actgctcaaggaaat

SEQ ID NO: 423281 - DNA, 15 bp, Homo sapiens
cactgctcaaggaaa

SEQ ID NO: 423282 - DNA, 15 bp, Homo sapiens
ccactgctcaaggaa

SEQ ID NO: 423283 - DNA, 15 bp, Homo sapiens
accactgctcaagga

SEQ ID NO: 423284 - DNA, 15 bp, Homo sapiens
aaccactgctcaagg

SEQ ID NO: 423285 - DNA, 15 bp, Homo sapiens
aaaccactgctcaag

SEQ ID NO: 423286 - DNA, 15 bp, Homo sapiens
caaaccactgctcaa

SEQ ID NO: 423287 - DNA, 15 bp, Homo sapiens
acaaaccactgctca

SEQ ID NO: 423288 - DNA, 15 bp, Homo sapiens
tacaaaccactgctc

SEQ ID NO: 423289 - DNA, 15 bp, Homo sapiens
ctacaaaccactgct

SEQ ID NO: 423290 - DNA, 15 bp, Homo sapiens
actacaaaccactgc

SEQ ID NO: 423291 - DNA, 15 bp, Homo sapiens
aactacaaaccactg

SEQ ID NO: 423292 - DNA, 15 bp, Homo sapiens
gaactacaaaccact

SEQ ID NO: 423293 - DNA, 15 bp, Homo sapiens
agaactacaaaccac

SEQ ID NO: 423294 - DNA, 15 bp, Homo sapiens
gagaactacaaacca

SEQ ID NO: 423295 - DNA, 15 bp, Homo sapiens
ggagaactacaaacc

SEQ ID NO: 423296 - DNA, 15 bp, Homo sapiens
aggagaactacaaac

SEQ ID NO: 423297 - DNA, 15 bp, Homo sapiens
aaggagaactacaaa

SEQ ID NO: 423298 - DNA, 15 bp, Homo sapiens
caaggagaactacaa

SEQ ID NO: 423299 - DNA, 15 bp, Homo sapiens
tcaaggagaactaca

SEQ ID NO: 423300 - DNA, 15 bp, Homo sapiens
ttcaaggagaactac

SEQ ID NO: 423301 - DNA, 15 bp, Homo sapiens
cttcaaggagaacta

SEQ ID NO: 423302 - DNA, 15 bp, Homo sapiens
tcttcaaggagaact

SEQ ID NO: 423303 - DNA, 15 bp, Homo sapiens
ctcttcaaggagaac

SEQ ID NO: 423304 - DNA, 15 bp, Homo sapiens
cctcttcaaggagaa

SEQ ID NO: 423305 - DNA, 15 bp, Homo sapiens
acctcttcaaggaga

SEQ ID NO: 423306 - DNA, 15 bp, Homo sapiens
gacctcttcaaggag

SEQ ID NO: 423307 - DNA, 15 bp, Homo sapiens
ggacctcttcaagga

SEQ ID NO: 423308 - DNA, 15 bp, Homo sapiens
aggacctcttcaagg

SEQ ID NO: 423309 - DNA, 15 bp, Homo sapiens
aaggacctcttcaag

SEQ ID NO: 423310 - DNA, 15 bp, Homo sapiens
gaaggacctcttcaa

SEQ ID NO: 423311 - DNA, 15 bp, Homo sapiens
tgaaggacctcttca

SEQ ID NO: 423312 - DNA, 15 bp, Homo sapiens
gtgaaggacctcttc

SEQ ID NO: 423313 - DNA, 15 bp, Homo sapiens
tgtgaaggacctctt

SEQ ID NO: 423314 - DNA, 15 bp, Homo sapiens
atgtgaaggacctct

SEQ ID NO: 423315 - DNA, 15 bp, Homo sapiens
gatgtgaaggacctc

SEQ ID NO: 423316 - DNA, 15 bp, Homo sapiens
ggatgtgaaggacct

SEQ ID NO: 423317 - DNA, 15 bp, Homo sapiens
gggatgtgaaggacc

SEQ ID NO: 423318 - DNA, 15 bp, Homo sapiens
agggatgtgaaggac

SEQ ID NO: 423319 - DNA, 15 bp, Homo sapiens
aagggatgtgaagga

SEQ ID NO: 423320 - DNA, 15 bp, Homo sapiens
caagggatgtgaagg

SEQ ID NO: 423321 - DNA, 15 bp, Homo sapiens
acaagggatgtgaag

SEQ ID NO: 423322 - DNA, 15 bp, Homo sapiens
tacaagggatgtgaa

SEQ ID NO: 423323 - DNA, 15 bp, Homo sapiens
ttacaagggatgtga

SEQ ID NO: 423324 - DNA, 15 bp, Homo sapiens
cttacaagggatgtg

SEQ ID NO: 423325 - DNA, 15 bp, Homo sapiens
ccttacaagggatgt

SEQ ID NO: 423326 - DNA, 15 bp, Homo sapiens
accttacaagggatg

SEQ ID NO: 423327 - DNA, 15 bp, Homo sapiens
caccttacaagggat

SEQ ID NO: 423328 - DNA, 15 bp, Homo sapiens
ccaccttacaaggga

SEQ ID NO: 423329 - DNA, 15 bp, Homo sapiens
tccaccttacaaggg

SEQ ID NO: 423330 - DNA, 15 bp, Homo sapiens
atccaccttacaagg

SEQ ID NO: 423331 - DNA, 15 bp, Homo sapiens
aatccaccttacaag

SEQ ID NO: 423332 - DNA, 15 bp, Homo sapiens
gaatccaccttacaa

SEQ ID NO: 423333 - DNA, 15 bp, Homo sapiens
ggaatccaccttaca

SEQ ID NO: 423334 - DNA, 15 bp, Homo sapiens
aggaatccaccttac

SEQ ID NO: 423335 - DNA, 15 bp, Homo sapiens
taggaatccacctta

SEQ ID NO: 423336 - DNA, 15 bp, Homo sapiens
ctaggaatccacctt

SEQ ID NO: 423337 - DNA, 15 bp, Homo sapiens
cctaggaatccacct

SEQ ID NO: 423338 - DNA, 15 bp, Homo sapiens
acctaggaatccacc

SEQ ID NO: 423339 - DNA, 15 bp, Homo sapiens
tacctaggaatccac

SEQ ID NO: 423340 - DNA, 15 bp, Homo sapiens
atacctaggaatcca

SEQ ID NO: 423341 - DNA, 15 bp, Homo sapiens
aatacctaggaatcc

SEQ ID NO: 423342 - DNA, 15 bp, Homo sapiens
aaatacctaggaatc

SEQ ID NO: 423343 - DNA, 15 bp, Homo sapiens
aaaatacctaggaat

SEQ ID NO: 423344 - DNA, 15 bp, Homo sapiens
taaaatacctaggaa

SEQ ID NO: 423345 - DNA, 15 bp, Homo sapiens
ataaaatacctagga

SEQ ID NO: 423346 - DNA, 15 bp, Homo sapiens
aataaaatacctagg

SEQ ID NO: 423347 - DNA, 15 bp, Homo sapiens
gaataaaatacctag

SEQ ID NO: 423348 - DNA, 15 bp, Homo sapiens
agaataaaataccta

SEQ ID NO: 423349 - DNA, 15 bp, Homo sapiens
gagaataaaatacct

SEQ ID NO: 423350 - DNA, 15 bp, Homo sapiens
agagaataaaatacc

SEQ ID NO: 423351 - DNA, 15 bp, Homo sapiens
aagagaataaaatac

SEQ ID NO: 423352 - DNA, 15 bp, Homo sapiens
aaagagaataaaata

SEQ ID NO: 423353 - DNA, 15 bp, Homo sapiens
caaagagaataaaat

SEQ ID NO: 423354 - DNA, 15 bp, Homo sapiens
tcaaagagaataaaa

SEQ ID NO: 423355 - DNA, 15 bp, Homo sapiens
ttcaaagagaataaa

SEQ ID NO: 423356 - DNA, 15 bp, Homo sapiens
cttcaaagagaataa

SEQ ID NO: 423357 - DNA, 15 bp, Homo sapiens
gcttcaaagagaata

SEQ ID NO: 423358 - DNA, 15 bp, Homo sapiens
tgcttcaaagagaat

SEQ ID NO: 423359 - DNA, 15 bp, Homo sapiens
ttgcttcaaagagaa

SEQ ID NO: 423360 - DNA, 15 bp, Homo sapiens
attgcttcaaagaga

SEQ ID NO: 423361 - DNA, 15 bp, Homo sapiens
aattgcttcaaagag

SEQ ID NO: 423362 - DNA, 15 bp, Homo sapiens
caattgcttcaaaga

SEQ ID NO: 423363 - DNA, 15 bp, Homo sapiens
acaattgcttcaaag

SEQ ID NO: 423364 - DNA, 15 bp, Homo sapiens
cacaattgcttcaaa

SEQ ID NO: 423365 - DNA, 15 bp, Homo sapiens
tcacaattgcttcaa

SEQ ID NO: 423366 - DNA, 15 bp, Homo sapiens
ttcacaattgcttca

SEQ ID NO: 423367 - DNA, 15 bp, Homo sapiens
attcacaattgcttc

SEQ ID NO: 423368 - DNA, 15 bp, Homo sapiens
cattcacaattgctt

SEQ ID NO: 423369 - DNA, 15 bp, Homo sapiens
ccattcacaattgct

SEQ ID NO: 423370 - DNA, 15 bp, Homo sapiens
tcccattcacaattg

SEQ ID NO: 423371 - DNA, 15 bp, Homo sapiens
ctcccattcacaatt

SEQ ID NO: 423372 - DNA, 15 bp, Homo sapiens
actcccattcacaat

SEQ ID NO: 423373 - DNA, 15 bp, Homo sapiens
aactcccattcacaa

SEQ ID NO: 423374 - DNA, 15 bp, Homo sapiens
gaactcccattcaca

SEQ ID NO: 423375 - DNA, 15 bp, Homo sapiens
tgaactcccattcac

SEQ ID NO: 423376 - DNA, 15 bp, Homo sapiens
gtgaactcccattca

SEQ ID NO: 423377 - DNA, 15 bp, Homo sapiens
agtgaactcccattc

SEQ ID NO: 423378 - DNA, 15 bp, Homo sapiens
gagtgaactcccatt

SEQ ID NO: 423379 - DNA, 15 bp, Homo sapiens
tgagtgaactcccat

SEQ ID NO: 423380 - DNA, 15 bp, Homo sapiens
atgagtgaactccca

SEQ ID NO: 423381 - DNA, 15 bp, Homo sapiens
catgagtgaactccc

SEQ ID NO: 423382 - DNA, 15 bp, Homo sapiens
tcatgagtgaactcc

SEQ ID NO: 423383 - DNA, 15 bp, Homo sapiens
atcatgagtgaactc

SEQ ID NO: 423384 - DNA, 15 bp, Homo sapiens
aatcatgagtgaact

SEQ ID NO: 423385 - DNA, 15 bp, Homo sapiens
aaatcatgagtgaac

SEQ ID NO: 423386 - DNA, 15 bp, Homo sapiens
caaatcatgagtgaa

SEQ ID NO: 423387 - DNA, 15 bp, Homo sapiens
ccaaatcatgagtga

SEQ ID NO: 423388 - DNA, 15 bp, Homo sapiens
gccaaatcatgagtg

SEQ ID NO: 423389 - DNA, 15 bp, Homo sapiens
agccaaatcatgagt

SEQ ID NO: 423390 - DNA, 15 bp, Homo sapiens
gagccaaatcatgag

SEQ ID NO: 423391 - DNA, 15 bp, Homo sapiens
agagccaaatcatga

SEQ ID NO: 423392 - DNA, 15 bp, Homo sapiens
gagagccaaatcatg

SEQ ID NO: 423393 - DNA, 15 bp, Homo sapiens
agagagccaaatcat

SEQ ID NO: 423394 - DNA, 15 bp, Homo sapiens
cagagagccaaatca

SEQ ID NO: 423395 - DNA, 15 bp, Homo sapiens
acagagagccaaatc

SEQ ID NO: 423396 - DNA, 15 bp, Homo sapiens
aacagagagccaaat

SEQ ID NO: 423397 - DNA, 15 bp, Homo sapiens
aaacagagagccaaa

SEQ ID NO: 423398 - DNA, 15 bp, Homo sapiens
caaacagagagccaa

SEQ ID NO: 423399 - DNA, 15 bp, Homo sapiens
acaaacagagagcca

SEQ ID NO: 423400 - DNA, 15 bp, Homo sapiens
gacaaacagagagcc

SEQ ID NO: 423401 - DNA, 15 bp, Homo sapiens
agacaaacagagagc

SEQ ID NO: 423402 - DNA, 15 bp, Homo sapiens
cagacaaacagagag

SEQ ID NO: 423403 - DNA, 15 bp, Homo sapiens
acagacaaacagaga

SEQ ID NO: 423404 - DNA, 15 bp, Homo sapiens
aacagacaaacagag

SEQ ID NO: 423405 - DNA, 15 bp, Homo sapiens
caacagacaaacaga

SEQ ID NO: 423406 - DNA, 15 bp, Homo sapiens
acaacagacaaacag

SEQ ID NO: 423407 - DNA, 15 bp, Homo sapiens
aacaacagacaaaca

SEQ ID NO: 423408 - DNA, 15 bp, Homo sapiens
caacaacagacaaac

SEQ ID NO: 423409 - DNA, 15 bp, Homo sapiens
ccaacaacagacaaa

SEQ ID NO: 423410 - DNA, 15 bp, Homo sapiens
accaacaacagacaa

SEQ ID NO: 423411 - DNA, 15 bp, Homo sapiens
caccaacaacagaca

SEQ ID NO: 423412 - DNA, 15 bp, Homo sapiens
acaccaacaacagac

SEQ ID NO: 423413 - DNA, 15 bp, Homo sapiens
tacaccaacaacaga

SEQ ID NO: 423414 - DNA, 15 bp, Homo sapiens
atacaccaacaacag

SEQ ID NO: 423415 - DNA, 15 bp, Homo sapiens
tatacaccaacaaca

SEQ ID NO: 423416 - DNA, 15 bp, Homo sapiens
ttatacaccaacaac

SEQ ID NO: 423417 - DNA, 15 bp, Homo sapiens
cttatacaccaacaa

SEQ ID NO: 423418 - DNA, 15 bp, Homo sapiens
tcttatacaccaaca

SEQ ID NO: 423419 - DNA, 15 bp, Homo sapiens
ttcttatacaccaac

SEQ ID NO: 423420 - DNA, 15 bp, Homo sapiens
gttcttatacaccaa

SEQ ID NO: 423421 - DNA, 15 bp, Homo sapiens
cgttcttatacacca

SEQ ID NO: 423422 - DNA, 15 bp, Homo sapiens
gcgttcttatacacc

SEQ ID NO: 423423 - DNA, 15 bp, Homo sapiens
agcgttcttatacac

SEQ ID NO: 423424 - DNA, 15 bp, Homo sapiens
aagcgttcttataca

SEQ ID NO: 423425 - DNA, 15 bp, Homo sapiens
caagcgttcttatac

SEQ ID NO: 423426 - DNA, 15 bp, Homo sapiens
acaagcgttcttata

SEQ ID NO: 423427 - DNA, 15 bp, Homo sapiens
cacaagcgttcttat

SEQ ID NO: 423428 - DNA, 15 bp, Homo sapiens
tcacaagcgttctta

SEQ ID NO: 423429 - DNA, 15 bp, Homo sapiens
atcacaagcgttctt

SEQ ID NO: 423430 - DNA, 15 bp, Homo sapiens
aatcacaagcgttct

SEQ ID NO: 423431 - DNA, 15 bp, Homo sapiens
aaatcacaagcgttc

SEQ ID NO: 423432 - DNA, 15 bp, Homo sapiens
aaaatcacaagcgtt

SEQ ID NO: 423433 - DNA, 15 bp, Homo sapiens
aaaaatcacaagcgt

SEQ ID NO: 423434 - DNA, 15 bp, Homo sapiens
caaaaatcacaagcg

SEQ ID NO: 423435 - DNA, 15 bp, Homo sapiens
acaaaaatcacaagc

SEQ ID NO: 423436 - DNA, 15 bp, Homo sapiens
tacaaaaatcacaag

SEQ ID NO: 423437 - DNA, 15 bp, Homo sapiens
gtacaaaaatcacaa

SEQ ID NO: 423438 - DNA, 15 bp, Homo sapiens
tgtacaaaaatcaca

SEQ ID NO: 423439 - DNA, 15 bp, Homo sapiens
atgtacaaaaatcac

SEQ ID NO: 423440 - DNA, 15 bp, Homo sapiens
aatgtacaaaaatca

SEQ ID NO: 423441 - DNA, 15 bp, Homo sapiens
caatgtacaaaaatc

SEQ ID NO: 423442 - DNA, 15 bp, Homo sapiens
tcaatgtacaaaaat

SEQ ID NO: 423443 - DNA, 15 bp, Homo sapiens
atcaatgtacaaaaa

SEQ ID NO: 423444 - DNA, 15 bp, Homo sapiens
aatcaatgtacaaaa

SEQ ID NO: 423445 - DNA, 15 bp, Homo sapiens
aaatcaatgtacaaa

SEQ ID NO: 423446 - DNA, 15 bp, Homo sapiens
aaaatcaatgtacaa

SEQ ID NO: 423447 - DNA, 15 bp, Homo sapiens
caaaatcaatgtaca

SEQ ID NO: 423448 - DNA, 15 bp, Homo sapiens
acaaaatcaatgtac

SEQ ID NO: 423449 - DNA, 15 bp, Homo sapiens
tacaaaatcaatgta

SEQ ID NO: 423450 - DNA, 15 bp, Homo sapiens
cttcagcaaagtctc

SEQ ID NO: 423451 - DNA, 15 bp, Homo sapiens
acttcagcaaagtct

SEQ ID NO: 423452 - DNA, 15 bp, Homo sapiens
aacttcagcaaagtc

SEQ ID NO: 423453 - DNA, 15 bp, Homo sapiens
caacttcagcaaagt

SEQ ID NO: 423454 - DNA, 15 bp, Homo sapiens
gcaacttcagcaaag

SEQ ID NO: 423455 - DNA, 15 bp, Homo sapiens
agcaacttcagcaaa

SEQ ID NO: 423456 - DNA, 15 bp, Homo sapiens
aagcaacttcagcaa

SEQ ID NO: 423457 - DNA, 15 bp, Homo sapiens
taagcaacttcagca

SEQ ID NO: 423458 - DNA, 15 bp, Homo sapiens
ataagcaacttcagc

SEQ ID NO: 423459 - DNA, 15 bp, Homo sapiens
gataagcaacttcag

SEQ ID NO: 423460 - DNA, 15 bp, Homo sapiens
tgataagcaacttca

SEQ ID NO: 423461 - DNA, 15 bp, Homo sapiens
ctgataagcaacttc

SEQ ID NO: 423462 - DNA, 15 bp, Homo sapiens
gctgataagcaactt

SEQ ID NO: 423463 - DNA, 15 bp, Homo sapiens
agctgataagcaact

SEQ ID NO: 423464 - DNA, 15 bp, Homo sapiens
aagctgataagcaac

SEQ ID NO: 423465 - DNA, 15 bp, Homo sapiens
taagctgataagcaa

SEQ ID NO: 423466 - DNA, 15 bp, Homo sapiens
ttaagctgataagca

SEQ ID NO: 423467 - DNA, 15 bp, Homo sapiens
cttaagctgataagc

SEQ ID NO: 423468 - DNA, 15 bp, Homo sapiens
ccttaagctgataag

SEQ ID NO: 423469 - DNA, 15 bp, Homo sapiens
tccttaagctgataa

SEQ ID NO: 423470 - DNA, 15 bp, Homo sapiens
ctccttaagctgata

SEQ ID NO: 423471 - DNA, 15 bp, Homo sapiens
tctccttaagctgat

SEQ ID NO: 423472 - DNA, 15 bp, Homo sapiens
atctccttaagctga

SEQ ID NO: 423473 - DNA, 15 bp, Homo sapiens
aatctccttaagctg

SEQ ID NO: 423474 - DNA, 15 bp, Homo sapiens
aaatctccttaagct

SEQ ID NO: 423475 - DNA, 15 bp, Homo sapiens
caaatctccttaagc

SEQ ID NO: 423476 - DNA, 15 bp, Homo sapiens
ccaaatctccttaag

SEQ ID NO: 423477 - DNA, 15 bp, Homo sapiens
cccaaatctccttaa

SEQ ID NO: 423478 - DNA, 15 bp, Homo sapiens
ccccaaatctcctta

SEQ ID NO: 423479 - DNA, 15 bp, Homo sapiens
gccccaaatctcctt

SEQ ID NO: 423480 - DNA, 15 bp, Homo sapiens
agccccaaatctcct

SEQ ID NO: 423481 - DNA, 15 bp, Homo sapiens
cagccccaaatctcc

SEQ ID NO: 423482 - DNA, 15 bp, Homo sapiens
tcagccccaaatctc

SEQ ID NO: 423483 - DNA, 15 bp, Homo sapiens
ctcagccccaaatct

SEQ ID NO: 423484 - DNA, 15 bp, Homo sapiens
tctcagccccaaatc

SEQ ID NO: 423485 - DNA, 15 bp, Homo sapiens
gtctcagccccaaat

SEQ ID NO: 423486 - DNA, 15 bp, Homo sapiens
tgtctcagccccaaa

SEQ ID NO: 423487 - DNA, 15 bp, Homo sapiens
ttgtctcagccccaa

SEQ ID NO: 423488 - DNA, 15 bp, Homo sapiens
attgtctcagcccca

SEQ ID NO: 423489 - DNA, 15 bp, Homo sapiens
cattgtctcagcccc

SEQ ID NO: 423490 - DNA, 15 bp, Homo sapiens
ccattgtctcagccc

SEQ ID NO: 423491 - DNA, 15 bp, Homo sapiens
cccattgtctcagcc

SEQ ID NO: 423492 - DNA, 15 bp, Homo sapiens
ccccattgtctcagc

SEQ ID NO: 423493 - DNA, 15 bp, Homo sapiens
accccattgtctcag

SEQ ID NO: 423494 - DNA, 15 bp, Homo sapiens
aaccccattgtctca

SEQ ID NO: 423495 - DNA, 15 bp, Homo sapiens
aaaccccattgtctc

SEQ ID NO: 423496 - DNA, 15 bp, Homo sapiens
aaaaccccattgtct

SEQ ID NO: 423497 - DNA, 15 bp, Homo sapiens
gaaaaccccattgtc

SEQ ID NO: 423498 - DNA, 15 bp, Homo sapiens
agaaaaccccattgt

SEQ ID NO: 423499 - DNA, 15 bp, Homo sapiens
tagaaaaccccattg

SEQ ID NO: 423500 - DNA, 15 bp, Homo sapiens
ctagaaaaccccatt

SEQ ID NO: 423501 - DNA, 15 bp, Homo sapiens
gtatatctagaaaac

SEQ ID NO: 423502 - DNA, 15 bp, Homo sapiens
tgtatatctagaaaa

SEQ ID NO: 423503 - DNA, 15 bp, Homo sapiens
ttgtatatctagaaa

SEQ ID NO: 423504 - DNA, 15 bp, Homo sapiens
attgtatatctagaa

SEQ ID NO: 423505 - DNA, 15 bp, Homo sapiens
gattgtatatctaga

SEQ ID NO: 423506 - DNA, 15 bp, Homo sapiens
tgattgtatatctag

SEQ ID NO: 423507 - DNA, 15 bp, Homo sapiens
atgattgtatatcta

SEQ ID NO: 423508 - DNA, 15 bp, Homo sapiens
catgattgtatatct

SEQ ID NO: 423509 - DNA, 15 bp, Homo sapiens
acatgattgtatatc

SEQ ID NO: 423510 - DNA, 15 bp, Homo sapiens
gacatgattgtatat

SEQ ID NO: 423511 - DNA, 15 bp, Homo sapiens
cgacatgattgtata

SEQ ID NO: 423512 - DNA, 15 bp, Homo sapiens
acgacatgattgtat

SEQ ID NO: 423513 - DNA, 15 bp, Homo sapiens
gacgacatgattgta

SEQ ID NO: 423514 - DNA, 15 bp, Homo sapiens
agacgacatgattgt

SEQ ID NO: 423515 - DNA, 15 bp, Homo sapiens
cagacgacatgattg

SEQ ID NO: 423516 - DNA, 15 bp, Homo sapiens
gcagacgacatgatt

SEQ ID NO: 423517 - DNA, 15 bp, Homo sapiens
tgcagacgacatgat

SEQ ID NO: 423518 - DNA, 15 bp, Homo sapiens
ttgcagacgacatga

SEQ ID NO: 423519 - DNA, 15 bp, Homo sapiens
tttgcagacgacatg

SEQ ID NO: 423520 - DNA, 15 bp, Homo sapiens
gtttgcagacgacat

SEQ ID NO: 423521 - DNA, 15 bp, Homo sapiens
tgtttgcagacgaca

SEQ ID NO: 423522 - DNA, 15 bp, Homo sapiens
ctgtttgcagacgac

SEQ ID NO: 423523 - DNA, 15 bp, Homo sapiens
cctgtttgcagacga

SEQ ID NO: 423524 - DNA, 15 bp, Homo sapiens
ccctgtttgcagacg

SEQ ID NO: 423525 - DNA, 15 bp, Homo sapiens
tccctgtttgcagac

SEQ ID NO: 423526 - DNA, 15 bp, Homo sapiens
atccctgtttgcaga

SEQ ID NO: 423527 - DNA, 15 bp, Homo sapiens
tatccctgtttgcag

SEQ ID NO: 423528 - DNA, 15 bp, Homo sapiens
ttatccctgtttgca

SEQ ID NO: 423529 - DNA, 15 bp, Homo sapiens
attatccctgtttgc

SEQ ID NO: 423530 - DNA, 15 bp, Homo sapiens
aattatccctgtttg

SEQ ID NO: 423531 - DNA, 15 bp, Homo sapiens
aaattatccctgttt

SEQ ID NO: 423532 - DNA, 15 bp, Homo sapiens
caaattatccctgtt

SEQ ID NO: 423533 - DNA, 15 bp, Homo sapiens
tcaaattatccctgt

SEQ ID NO: 423534 - DNA, 15 bp, Homo sapiens
gtcaaattatccctg

SEQ ID NO: 423535 - DNA, 15 bp, Homo sapiens
agtcaaattatccct

SEQ ID NO: 423536 - DNA, 15 bp, Homo sapiens
aagtcaaattatccc

SEQ ID NO: 423537 - DNA, 15 bp, Homo sapiens
gaagtcaaattatcc

SEQ ID NO: 423538 - DNA, 15 bp, Homo sapiens
ggaagtcaaattatc

SEQ ID NO: 423539 - DNA, 15 bp, Homo sapiens
aggaagtcaaattat

SEQ ID NO: 423540 - DNA, 15 bp, Homo sapiens
gaggaagtcaaatta

SEQ ID NO: 423541 - DNA, 15 bp, Homo sapiens
agaggaagtcaaatt

SEQ ID NO: 423542 - DNA, 15 bp, Homo sapiens
aagaggaagtcaaat

SEQ ID NO: 423543 - DNA, 15 bp, Homo sapiens
aaagaggaagtcaaa

SEQ ID NO: 423544 - DNA, 15 bp, Homo sapiens
aaaagaggaagtcaa

SEQ ID NO: 423545 - DNA, 15 bp, Homo sapiens
gaaaagaggaagtca

SEQ ID NO: 423546 - DNA, 15 bp, Homo sapiens
ggaaaagaggaagtc

SEQ ID NO: 423547 - DNA, 15 bp, Homo sapiens
aggaaaagaggaagt

SEQ ID NO: 423548 - DNA, 15 bp, Homo sapiens
taggaaaagaggaag

SEQ ID NO: 423549 - DNA, 15 bp, Homo sapiens
ttaggaaaagaggaa

SEQ ID NO: 423550 - DNA, 15 bp, Homo sapiens
attaggaaaagagga

SEQ ID NO: 423551 - DNA, 15 bp, Homo sapiens
aattaggaaaagagg

SEQ ID NO: 423552 - DNA, 15 bp, Homo sapiens
caattaggaaaagag

SEQ ID NO: 423553 - DNA, 15 bp, Homo sapiens
tcaattaggaaaaga

SEQ ID NO: 423554 - DNA, 15 bp, Homo sapiens
ttcaattaggaaaag

SEQ ID NO: 423555 - DNA, 15 bp, Homo sapiens
attcaattaggaaaa

SEQ ID NO: 423556 - DNA, 15 bp, Homo sapiens
tattcaattaggaaa

SEQ ID NO: 423557 - DNA, 15 bp, Homo sapiens
gtattcaattaggaa

SEQ ID NO: 423558 - DNA, 15 bp, Homo sapiens
ggtattcaattagga

SEQ ID NO: 423559 - DNA, 15 bp, Homo sapiens
ctttggctactctag

SEQ ID NO: 423560 - DNA, 15 bp, Homo sapiens
gctttggctactcta

SEQ ID NO: 423561 - DNA, 15 bp, Homo sapiens
ggctttggctactct

SEQ ID NO: 423562 - DNA, 15 bp, Homo sapiens
tggctttggctactc

SEQ ID NO: 423563 - DNA, 15 bp, Homo sapiens
atggctttggctact

SEQ ID NO: 423564 - DNA, 15 bp, Homo sapiens
tatggctttggctac

SEQ ID NO: 423565 - DNA, 15 bp, Homo sapiens
gtatggctttggcta

SEQ ID NO: 423566 - DNA, 15 bp, Homo sapiens
agtatggctttggct

SEQ ID NO: 423567 - DNA, 15 bp, Homo sapiens
cagtatggctttggc

SEQ ID NO: 423568 - DNA, 15 bp, Homo sapiens
tcagtatggctttgg

SEQ ID NO: 423569 - DNA, 15 bp, Homo sapiens
ctcagtatggctttg

SEQ ID NO: 423570 - DNA, 15 bp, Homo sapiens
gctcagtatggcttt

SEQ ID NO: 423571 - DNA, 15 bp, Homo sapiens
tgctcagtatggctt

SEQ ID NO: 423572 - DNA, 15 bp, Homo sapiens
ttgctcagtatggct

SEQ ID NO: 423573 - DNA, 15 bp, Homo sapiens
tttgctcagtatggc

SEQ ID NO: 423574 - DNA, 15 bp, Homo sapiens
ttttgctcagtatgg

SEQ ID NO: 423575 - DNA, 15 bp, Homo sapiens
tttttgctcagtatg

SEQ ID NO: 423576 - DNA, 15 bp, Homo sapiens
ctttttgctcagtat

SEQ ID NO: 423577 - DNA, 15 bp, Homo sapiens
tctttttgctcagta

SEQ ID NO: 423578 - DNA, 15 bp, Homo sapiens
ctctttttgctcagt

SEQ ID NO: 423579 - DNA, 15 bp, Homo sapiens
gctctttttgctcag

SEQ ID NO: 423580 - DNA, 15 bp, Homo sapiens
tgctctttttgctca

SEQ ID NO: 423581 - DNA, 15 bp, Homo sapiens
gtgctctttttgctc

SEQ ID NO: 423582 - DNA, 15 bp, Homo sapiens
tgtgctctttttgct

SEQ ID NO: 423583 - DNA, 15 bp, Homo sapiens
ttgtgctctttttgc

SEQ ID NO: 423584 - DNA, 15 bp, Homo sapiens
gttgtgctctttttg

SEQ ID NO: 423585 - DNA, 15 bp, Homo sapiens
agttgtgctcttttt

SEQ ID NO: 423586 - DNA, 15 bp, Homo sapiens
cagttgtgctctttt

SEQ ID NO: 423587 - DNA, 15 bp, Homo sapiens
ccagttgtgctcttt

SEQ ID NO: 423588 - DNA, 15 bp, Homo sapiens
tccagttgtgctctt

SEQ ID NO: 423589 - DNA, 15 bp, Homo sapiens
ctccagttgtgctct

SEQ ID NO: 423590 - DNA, 15 bp, Homo sapiens
cctccagttgtgctc

SEQ ID NO: 423591 - DNA, 15 bp, Homo sapiens
tcctccagttgtgct

SEQ ID NO: 423592 - DNA, 15 bp, Homo sapiens
ttcctccagttgtgc

SEQ ID NO: 423593 - DNA, 15 bp, Homo sapiens
attcctccagttgtg

SEQ ID NO: 423594 - DNA, 15 bp, Homo sapiens
gattcctccagttgt

SEQ ID NO: 423595 - DNA, 15 bp, Homo sapiens
tgattcctccagttg

SEQ ID NO: 423596 - DNA, 15 bp, Homo sapiens
atgattcctccagtt

SEQ ID NO: 423597 - DNA, 15 bp, Homo sapiens
tatgattcctccagt

SEQ ID NO: 423598 - DNA, 15 bp, Homo sapiens
atatgattcctccag

SEQ ID NO: 423599 - DNA, 15 bp, Homo sapiens
aatatgattcctcca

SEQ ID NO: 423600 - DNA, 15 bp, Homo sapiens
taatatgattcctcc

SEQ ID NO: 423601 - DNA, 15 bp, Homo sapiens
ataatatgattcctc

SEQ ID NO: 423602 - DNA, 15 bp, Homo sapiens
gataatatgattcct

SEQ ID NO: 423603 - DNA, 15 bp, Homo sapiens
agataatatgattcc

SEQ ID NO: 423604 - DNA, 15 bp, Homo sapiens
cagataatatgattc

SEQ ID NO: 423605 - DNA, 15 bp, Homo sapiens
tcagataatatgatt

SEQ ID NO: 423606 - DNA, 15 bp, Homo sapiens
gtcagataatatgat

SEQ ID NO: 423607 - DNA, 15 bp, Homo sapiens
tgtcagataatatga

SEQ ID NO: 423608 - DNA, 15 bp, Homo sapiens
atgtcagataatatg

SEQ ID NO: 423609 - DNA, 15 bp, Homo sapiens
gatgtcagataatat

SEQ ID NO: 423610 - DNA, 15 bp, Homo sapiens
tgatgtcagataata

SEQ ID NO: 423611 - DNA, 15 bp, Homo sapiens
ttgatgtcagataat

SEQ ID NO: 423612 - DNA, 15 bp, Homo sapiens
tttgatgtcagataa

SEQ ID NO: 423613 - DNA, 15 bp, Homo sapiens
atttgatgtcagata

SEQ ID NO: 423614 - DNA, 15 bp, Homo sapiens
aatttgatgtcagat

SEQ ID NO: 423615 - DNA, 15 bp, Homo sapiens
taatttgatgtcaga

SEQ ID NO: 423616 - DNA, 15 bp, Homo sapiens
ataatttgatgtcag

SEQ ID NO: 423617 - DNA, 15 bp, Homo sapiens
cataatttgatgtca

SEQ ID NO: 423618 - DNA, 15 bp, Homo sapiens
gcataatttgatgtc

SEQ ID NO: 423619 - DNA, 15 bp, Homo sapiens
ggcataatttgatgt

SEQ ID NO: 423620 - DNA, 15 bp, Homo sapiens
tggcataatttgatg

SEQ ID NO: 423621 - DNA, 15 bp, Homo sapiens
gtggcataatttgat

SEQ ID NO: 423622 - DNA, 15 bp, Homo sapiens
tgtggcataatttga

SEQ ID NO: 423623 - DNA, 15 bp, Homo sapiens
gtgtggcataatttg

SEQ ID NO: 423624 - DNA, 15 bp, Homo sapiens
tgtgtggcataattt

SEQ ID NO: 423625 - DNA, 15 bp, Homo sapiens
ctgtgtggcataatt

SEQ ID NO: 423626 - DNA, 15 bp, Homo sapiens
gctgtgtggcataat

SEQ ID NO: 423627 - DNA, 15 bp, Homo sapiens
agctgtgtggcataa

SEQ ID NO: 423628 - DNA, 15 bp, Homo sapiens
tagctgtgtggcata

SEQ ID NO: 423629 - DNA, 15 bp, Homo sapiens
atagctgtgtggcat

SEQ ID NO: 423630 - DNA, 15 bp, Homo sapiens
tatagctgtgtggca

SEQ ID NO: 423631 - DNA, 15 bp, Homo sapiens
ttatagctgtgtggc

SEQ ID NO: 423632 - DNA, 15 bp, Homo sapiens
attatagctgtgtgg

SEQ ID NO: 423633 - DNA, 15 bp, Homo sapiens
tattatagctgtgtg

SEQ ID NO: 423634 - DNA, 15 bp, Homo sapiens
ttattatagctgtgt

SEQ ID NO: 423635 - DNA, 15 bp, Homo sapiens
gttattatagctgtg

SEQ ID NO: 423636 - DNA, 15 bp, Homo sapiens
ggttattatagctgt

SEQ ID NO: 423637 - DNA, 15 bp, Homo sapiens
tggttattatagctg

SEQ ID NO: 423638 - DNA, 15 bp, Homo sapiens
ttggttattatagct

SEQ ID NO: 423639 - DNA, 15 bp, Homo sapiens
tttggttattatagc

SEQ ID NO: 423640 - DNA, 15 bp, Homo sapiens
ttttggttattatag

SEQ ID NO: 423641 - DNA, 15 bp, Homo sapiens
gttttggttattata

SEQ ID NO: 423642 - DNA, 15 bp, Homo sapiens
tgttttggttattat

SEQ ID NO: 423643 - DNA, 15 bp, Homo sapiens
ctgttttggttatta

SEQ ID NO: 423644 - DNA, 15 bp, Homo sapiens
gctgttttggttatt

SEQ ID NO: 423645 - DNA, 15 bp, Homo sapiens
tgctgttttggttat

SEQ ID NO: 423646 - DNA, 15 bp, Homo sapiens
gccatgctgttttgg

SEQ ID NO: 423647 - DNA, 15 bp, Homo sapiens
tgccatgctgttttg

SEQ ID NO: 423648 - DNA, 15 bp, Homo sapiens
gtgccatgctgtttt

SEQ ID NO: 423649 - DNA, 15 bp, Homo sapiens
agtgccatgctgttt

SEQ ID NO: 423650 - DNA, 15 bp, Homo sapiens
cagtgccatgctgtt

SEQ ID NO: 423651 - DNA, 15 bp, Homo sapiens
ccagtgccatgctgt

SEQ ID NO: 423652 - DNA, 15 bp, Homo sapiens
tccagtgccatgctg

SEQ ID NO: 423653 - DNA, 15 bp, Homo sapiens
ttccagtgccatgct

SEQ ID NO: 423654 - DNA, 15 bp, Homo sapiens
cttccagtgccatgc

SEQ ID NO: 423655 - DNA, 15 bp, Homo sapiens
tcttccagtgccatg

SEQ ID NO: 423656 - DNA, 15 bp, Homo sapiens
ttcttccagtgccat

SEQ ID NO: 423657 - DNA, 15 bp, Homo sapiens
tttcttccagtgcca

SEQ ID NO: 423658 - DNA, 15 bp, Homo sapiens
ttttcttccagtgcc

SEQ ID NO: 423659 - DNA, 15 bp, Homo sapiens
tttttcttccagtgc

SEQ ID NO: 423660 - DNA, 15 bp, Homo sapiens
ctttttcttccagtg

SEQ ID NO: 423661 - DNA, 15 bp, Homo sapiens
tctttttcttccagt

SEQ ID NO: 423662 - DNA, 15 bp, Homo sapiens
ctctttttcttccag

SEQ ID NO: 423663 - DNA, 15 bp, Homo sapiens
tctctttttcttcca

SEQ ID NO: 423664 - DNA, 15 bp, Homo sapiens
gtctctttttcttcc

SEQ ID NO: 423665 - DNA, 15 bp, Homo sapiens
tgtctctttttcttc

SEQ ID NO: 423666 - DNA, 15 bp, Homo sapiens
ttgtctctttttctt

SEQ ID NO: 423667 - DNA, 15 bp, Homo sapiens
tttgtctctttttct

SEQ ID NO: 423668 - DNA, 15 bp, Homo sapiens
atttgtctctttttc

SEQ ID NO: 423669 - DNA, 15 bp, Homo sapiens
tatttgtctcttttt

SEQ ID NO: 423670 - DNA, 15 bp, Homo sapiens
gtatttgtctctttt

SEQ ID NO: 423671 - DNA, 15 bp, Homo sapiens
tgtatttgtctcttt

SEQ ID NO: 423672 - DNA, 15 bp, Homo sapiens
gtgtatttgtctctt

SEQ ID NO: 423673 - DNA, 15 bp, Homo sapiens
ggtgtatttgtctct

SEQ ID NO: 423674 - DNA, 15 bp, Homo sapiens
tggtgtatttgtctc

SEQ ID NO: 423675 - DNA, 15 bp, Homo sapiens
ttggtgtatttgtct

SEQ ID NO: 423676 - DNA, 15 bp, Homo sapiens
tttggtgtatttgtc

SEQ ID NO: 423677 - DNA, 15 bp, Homo sapiens
ctttggtgtatttgt

SEQ ID NO: 423678 - DNA, 15 bp, Homo sapiens
tctttggtgtatttg

SEQ ID NO: 423679 - DNA, 15 bp, Homo sapiens
ttctttggtgtattt

SEQ ID NO: 423680 - DNA, 15 bp, Homo sapiens
tttctttggtgtatt

SEQ ID NO: 423681 - DNA, 15 bp, Homo sapiens
gtttctttggtgtat

SEQ ID NO: 423682 - DNA, 15 bp, Homo sapiens
tgtttctttggtgta

SEQ ID NO: 423683 - DNA, 15 bp, Homo sapiens
ttgtttctttggtgt

SEQ ID NO: 423684 - DNA, 15 bp, Homo sapiens
tttgtttctttggtg

SEQ ID NO: 423685 - DNA, 15 bp, Homo sapiens
ttttgtttctttggt

SEQ ID NO: 423686 - DNA, 15 bp, Homo sapiens
attttgtttctttgg

SEQ ID NO: 423687 - DNA, 15 bp, Homo sapiens
tattttgtttctttg

SEQ ID NO: 423688 - DNA, 15 bp, Homo sapiens
ctattttgtttcttt

SEQ ID NO: 423689 - DNA, 15 bp, Homo sapiens
tctattttgtttctt

SEQ ID NO: 423690 - DNA, 15 bp, Homo sapiens
ctctattttgtttct

SEQ ID NO: 423691 - DNA, 15 bp, Homo sapiens
tctctattttgtttc

SEQ ID NO: 423692 - DNA, 15 bp, Homo sapiens
ttctctattttgttt

SEQ ID NO: 423693 - DNA, 15 bp, Homo sapiens
gttctctattttgtt

SEQ ID NO: 423694 - DNA, 15 bp, Homo sapiens
ggttctctattttgt

SEQ ID NO: 423695 - DNA, 15 bp, Homo sapiens
gggttctctattttg

SEQ ID NO: 423696 - DNA, 15 bp, Homo sapiens
tgggttctctatttt

SEQ ID NO: 423697 - DNA, 15 bp, Homo sapiens
ctgggttctctattt

SEQ ID NO: 423698 - DNA, 15 bp, Homo sapiens
tctgggttctctatt

SEQ ID NO: 423699 - DNA, 15 bp, Homo sapiens
ttctgggttctctat

SEQ ID NO: 423700 - DNA, 15 bp, Homo sapiens
tttctgggttctcta

SEQ ID NO: 423701 - DNA, 15 bp, Homo sapiens
gtttctgggttctct

SEQ ID NO: 423702 - DNA, 15 bp, Homo sapiens
tgtttctgggttctc

SEQ ID NO: 423703 - DNA, 15 bp, Homo sapiens
ttgtttctgggttct

SEQ ID NO: 423704 - DNA, 15 bp, Homo sapiens
tttgtttctgggttc

SEQ ID NO: 423705 - DNA, 15 bp, Homo sapiens
atttgtttctgggtt

SEQ ID NO: 423706 - DNA, 15 bp, Homo sapiens
gatttgtttctgggt

SEQ ID NO: 423707 - DNA, 15 bp, Homo sapiens
agatttgtttctggg

SEQ ID NO: 423708 - DNA, 15 bp, Homo sapiens
tagatttgtttctgg

SEQ ID NO: 423709 - DNA, 15 bp, Homo sapiens
gtagatttgtttctg

SEQ ID NO: 423710 - DNA, 15 bp, Homo sapiens
tgtagatttgtttct

SEQ ID NO: 423711 - DNA, 15 bp, Homo sapiens
gtgtagatttgtttc

SEQ ID NO: 423712 - DNA, 15 bp, Homo sapiens
tgtgtagatttgttt

SEQ ID NO: 423713 - DNA, 15 bp, Homo sapiens
atgtgtagatttgtt

SEQ ID NO: 423714 - DNA, 15 bp, Homo sapiens
gatgtgtagatttgt

SEQ ID NO: 423715 - DNA, 15 bp, Homo sapiens
agatgtgtagatttg

SEQ ID NO: 423716 - DNA, 15 bp, Homo sapiens
tagatgtgtagattt

SEQ ID NO: 423717 - DNA, 15 bp, Homo sapiens
gtagatgtgtagatt

SEQ ID NO: 423718 - DNA, 15 bp, Homo sapiens
tgtagatgtgtagat

SEQ ID NO: 423719 - DNA, 15 bp, Homo sapiens
atgtagatgtgtaga

SEQ ID NO: 423720 - DNA, 15 bp, Homo sapiens
aatgtagatgtgtag

SEQ ID NO: 423721 - DNA, 15 bp, Homo sapiens
taatgtagatgtgta

SEQ ID NO: 423722 - DNA, 15 bp, Homo sapiens
ttaatgtagatgtgt

SEQ ID NO: 423723 - DNA, 15 bp, Homo sapiens
tttaatgtagatgtg

SEQ ID NO: 423724 - DNA, 15 bp, Homo sapiens
gtttaatgtagatgt

SEQ ID NO: 423725 - DNA, 15 bp, Homo sapiens
agtttaatgtagatg

SEQ ID NO: 423726 - DNA, 15 bp, Homo sapiens
gagtttaatgtagat

SEQ ID NO: 423727 - DNA, 15 bp, Homo sapiens
tgagtttaatgtaga

SEQ ID NO: 423728 - DNA, 15 bp, Homo sapiens
atgagtttaatgtag

SEQ ID NO: 423729 - DNA, 15 bp, Homo sapiens
aatgagtttaatgta

SEQ ID NO: 423730 - DNA, 15 bp, Homo sapiens
aaatgagtttaatgt

SEQ ID NO: 423731 - DNA, 15 bp, Homo sapiens
aaaatgagtttaatg

SEQ ID NO: 423732 - DNA, 15 bp, Homo sapiens
gaaaatgagtttaat

SEQ ID NO: 423733 - DNA, 15 bp, Homo sapiens
tgaaaatgagtttaa

SEQ ID NO: 423734 - DNA, 15 bp, Homo sapiens
ttgaaaatgagttta

SEQ ID NO: 423735 - DNA, 15 bp, Homo sapiens
gttgaaaatgagttt

SEQ ID NO: 423736 - DNA, 15 bp, Homo sapiens
tgttgaaaatgagtt

SEQ ID NO: 423737 - DNA, 15 bp, Homo sapiens
ttgttgaaaatgagt

SEQ ID NO: 423738 - DNA, 15 bp, Homo sapiens
tttgttgaaaatgag

SEQ ID NO: 423739 - DNA, 15 bp, Homo sapiens
ctttgttgaaaatga

SEQ ID NO: 423740 - DNA, 15 bp, Homo sapiens
cctttgttgaaaatg

SEQ ID NO: 423741 - DNA, 15 bp, Homo sapiens
acctttgttgaaaat

SEQ ID NO: 423742 - DNA, 15 bp, Homo sapiens
tacctttgttgaaaa

SEQ ID NO: 423743 - DNA, 15 bp, Homo sapiens
ctacctttgttgaaa

SEQ ID NO: 423744 - DNA, 15 bp, Homo sapiens
gctacctttgttgaa

SEQ ID NO: 423745 - DNA, 15 bp, Homo sapiens
tgctacctttgttga

SEQ ID NO: 423746 - DNA, 15 bp, Homo sapiens
ttgctacctttgttg

SEQ ID NO: 423747 - DNA, 15 bp, Homo sapiens
cttgctacctttgtt

SEQ ID NO: 423748 - DNA, 15 bp, Homo sapiens
tcttgctacctttgt

SEQ ID NO: 423749 - DNA, 15 bp, Homo sapiens
ttcttgctacctttg

SEQ ID NO: 423750 - DNA, 15 bp, Homo sapiens
gttcttgctaccttt

SEQ ID NO: 423751 - DNA, 15 bp, Homo sapiens
tgttcttgctacctt

SEQ ID NO: 423752 - DNA, 15 bp, Homo sapiens
atgttcttgctacct

SEQ ID NO: 423753 - DNA, 15 bp, Homo sapiens
tatgttcttgctacc

SEQ ID NO: 423754 - DNA, 15 bp, Homo sapiens
atatgttcttgctac

SEQ ID NO: 423755 - DNA, 15 bp, Homo sapiens
tatatgttcttgcta

SEQ ID NO: 423756 - DNA, 15 bp, Homo sapiens
atatatgttcttgct

SEQ ID NO: 423757 - DNA, 15 bp, Homo sapiens
aatatatgttcttgc

SEQ ID NO: 423758 - DNA, 15 bp, Homo sapiens
caatatatgttcttg

SEQ ID NO: 423759 - DNA, 15 bp, Homo sapiens
ccaatatatgttctt

SEQ ID NO: 423760 - DNA, 15 bp, Homo sapiens
cccaatatatgttct

SEQ ID NO: 423761 - DNA, 15 bp, Homo sapiens
ccccaatatatgttc

SEQ ID NO: 423762 - DNA, 15 bp, Homo sapiens
tccccaatatatgtt

SEQ ID NO: 423763 - DNA, 15 bp, Homo sapiens
ttccccaatatatgt

SEQ ID NO: 423764 - DNA, 15 bp, Homo sapiens
tttccccaatatatg

SEQ ID NO: 423765 - DNA, 15 bp, Homo sapiens
ttttccccaatatat

SEQ ID NO: 423766 - DNA, 15 bp, Homo sapiens
tttttccccaatata

SEQ ID NO: 423767 - DNA, 15 bp, Homo sapiens
ctttttccccaatat

SEQ ID NO: 423768 - DNA, 15 bp, Homo sapiens
tctttttccccaata

SEQ ID NO: 423769 - DNA, 15 bp, Homo sapiens
atctttttccccaat

SEQ ID NO: 423770 - DNA, 15 bp, Homo sapiens
tatctttttccccaa

SEQ ID NO: 423771 - DNA, 15 bp, Homo sapiens
ctatctttttcccca

SEQ ID NO: 423772 - DNA, 15 bp, Homo sapiens
actatctttttcccc

SEQ ID NO: 423773 - DNA, 15 bp, Homo sapiens
gactatctttttccc

SEQ ID NO: 423774 - DNA, 15 bp, Homo sapiens
agactatctttttcc

SEQ ID NO: 423775 - DNA, 15 bp, Homo sapiens
aagactatctttttc

SEQ ID NO: 423776 - DNA, 15 bp, Homo sapiens
aaagactatcttttt

SEQ ID NO: 423777 - DNA, 15 bp, Homo sapiens
aaaagactatctttt

SEQ ID NO: 423778 - DNA, 15 bp, Homo sapiens
gaaaagactatcttt

SEQ ID NO: 423779 - DNA, 15 bp, Homo sapiens
tgaaaagactatctt

SEQ ID NO: 423780 - DNA, 15 bp, Homo sapiens
ttgaaaagactatct

SEQ ID NO: 423781 - DNA, 15 bp, Homo sapiens
attgaaaagactatc

SEQ ID NO: 423782 - DNA, 15 bp, Homo sapiens
tattgaaaagactat

SEQ ID NO: 423783 - DNA, 15 bp, Homo sapiens
ttattgaaaagacta

SEQ ID NO: 423784 - DNA, 15 bp, Homo sapiens
tttattgaaaagact

SEQ ID NO: 423785 - DNA, 15 bp, Homo sapiens
atttattgaaaagac

SEQ ID NO: 423786 - DNA, 15 bp, Homo sapiens
catttattgaaaaga

SEQ ID NO: 423787 - DNA, 15 bp, Homo sapiens
ccatttattgaaaag

SEQ ID NO: 423788 - DNA, 15 bp, Homo sapiens
accatttattgaaaa

SEQ ID NO: 423789 - DNA, 15 bp, Homo sapiens
caccatttattgaaa

SEQ ID NO: 423790 - DNA, 15 bp, Homo sapiens
gcaccatttattgaa

SEQ ID NO: 423791 - DNA, 15 bp, Homo sapiens
agcaccatttattga

SEQ ID NO: 423792 - DNA, 15 bp, Homo sapiens
cagcaccatttattg

SEQ ID NO: 423793 - DNA, 15 bp, Homo sapiens
ccagcaccatttatt

SEQ ID NO: 423794 - DNA, 15 bp, Homo sapiens
cccagcaccatttat

SEQ ID NO: 423795 - DNA, 15 bp, Homo sapiens
tcccagcaccattta

SEQ ID NO: 423796 - DNA, 15 bp, Homo sapiens
ttcccagcaccattt

SEQ ID NO: 423797 - DNA, 15 bp, Homo sapiens
tttcccagcaccatt

SEQ ID NO: 423798 - DNA, 15 bp, Homo sapiens
ttttcccagcaccat

SEQ ID NO: 423799 - DNA, 15 bp, Homo sapiens
gttttcccagcacca

SEQ ID NO: 423800 - DNA, 15 bp, Homo sapiens
agttttcccagcacc

SEQ ID NO: 423801 - DNA, 15 bp, Homo sapiens
tagttttcccagcac

SEQ ID NO: 423802 - DNA, 15 bp, Homo sapiens
ttagttttcccagca

SEQ ID NO: 423803 - DNA, 15 bp, Homo sapiens
tttagttttcccagc

SEQ ID NO: 423804 - DNA, 15 bp, Homo sapiens
atttagttttcccag

SEQ ID NO: 423805 - DNA, 15 bp, Homo sapiens
tatttagttttccca

SEQ ID NO: 423806 - DNA, 15 bp, Homo sapiens
atatttagttttccc

SEQ ID NO: 423807 - DNA, 15 bp, Homo sapiens
gatatttagttttcc

SEQ ID NO: 423808 - DNA, 15 bp, Homo sapiens
agatatttagttttc

SEQ ID NO: 423809 - DNA, 15 bp, Homo sapiens
tagatatttagtttt

SEQ ID NO: 423810 - DNA, 15 bp, Homo sapiens
atagatatttagttt

SEQ ID NO: 423811 - DNA, 15 bp, Homo sapiens
tatagatatttagtt

SEQ ID NO: 423812 - DNA, 15 bp, Homo sapiens
atatagatatttagt

SEQ ID NO: 423813 - DNA, 15 bp, Homo sapiens
catatagatatttag

SEQ ID NO: 423814 - DNA, 15 bp, Homo sapiens
gcatatagatattta

SEQ ID NO: 423815 - DNA, 15 bp, Homo sapiens
agcatatagatattt

SEQ ID NO: 423816 - DNA, 15 bp, Homo sapiens
cagcatatagatatt

SEQ ID NO: 423817 - DNA, 15 bp, Homo sapiens
tcagcatatagatat

SEQ ID NO: 423818 - DNA, 15 bp, Homo sapiens
ttcagcatatagata

SEQ ID NO: 423819 - DNA, 15 bp, Homo sapiens
cttcagcatatagat

SEQ ID NO: 423820 - DNA, 15 bp, Homo sapiens
tcttcagcatataga

SEQ ID NO: 423821 - DNA, 15 bp, Homo sapiens
ttcttcagcatatag

SEQ ID NO: 423822 - DNA, 15 bp, Homo sapiens
attcttcagcatata

SEQ ID NO: 423823 - DNA, 15 bp, Homo sapiens
cattcttcagcatat

SEQ ID NO: 423824 - DNA, 15 bp, Homo sapiens
tcattcttcagcata

SEQ ID NO: 423825 - DNA, 15 bp, Homo sapiens
ttcattcttcagcat

SEQ ID NO: 423826 - DNA, 15 bp, Homo sapiens
tttcattcttcagca

SEQ ID NO: 423827 - DNA, 15 bp, Homo sapiens
gtttcattcttcagc

SEQ ID NO: 423828 - DNA, 15 bp, Homo sapiens
ggtttcattcttcag

SEQ ID NO: 423829 - DNA, 15 bp, Homo sapiens
tggtttcattcttca

SEQ ID NO: 423830 - DNA, 15 bp, Homo sapiens
ctggtttcattcttc

SEQ ID NO: 423831 - DNA, 15 bp, Homo sapiens
tctggtttcattctt

SEQ ID NO: 423832 - DNA, 15 bp, Homo sapiens
gtctggtttcattct

SEQ ID NO: 423833 - DNA, 15 bp, Homo sapiens
agtctggtttcattc

SEQ ID NO: 423834 - DNA, 15 bp, Homo sapiens
gagtctggtttcatt

SEQ ID NO: 423835 - DNA, 15 bp, Homo sapiens
agagtctggtttcat

SEQ ID NO: 423836 - DNA, 15 bp, Homo sapiens
cagagtctggtttca

SEQ ID NO: 423837 - DNA, 15 bp, Homo sapiens
acagagtctggtttc

SEQ ID NO: 423838 - DNA, 15 bp, Homo sapiens
gacagagtctggttt

SEQ ID NO: 423839 - DNA, 15 bp, Homo sapiens
agacagagtctggtt

SEQ ID NO: 423840 - DNA, 15 bp, Homo sapiens
gagacagagtctggt

SEQ ID NO: 423841 - DNA, 15 bp, Homo sapiens
agagacagagtctgg

SEQ ID NO: 423842 - DNA, 15 bp, Homo sapiens
aagagacagagtctg

SEQ ID NO: 423843 - DNA, 15 bp, Homo sapiens
caagagacagagtct

SEQ ID NO: 423844 - DNA, 15 bp, Homo sapiens
gcaagagacagagtc

SEQ ID NO: 423845 - DNA, 15 bp, Homo sapiens
ggcaagagacagagt

SEQ ID NO: 423846 - DNA, 15 bp, Homo sapiens
tggcaagagacagag

SEQ ID NO: 423847 - DNA, 15 bp, Homo sapiens
atggcaagagacaga

SEQ ID NO: 423848 - DNA, 15 bp, Homo sapiens
catggcaagagacag

SEQ ID NO: 423849 - DNA, 15 bp, Homo sapiens
acatggcaagagaca

SEQ ID NO: 423850 - DNA, 15 bp, Homo sapiens
cacatggcaagagac

SEQ ID NO: 423851 - DNA, 15 bp, Homo sapiens
gcacatggcaagaga

SEQ ID NO: 423852 - DNA, 15 bp, Homo sapiens
tgcacatggcaagag

SEQ ID NO: 423853 - DNA, 15 bp, Homo sapiens
ttgcacatggcaaga

SEQ ID NO: 423854 - DNA, 15 bp, Homo sapiens
tttgcacatggcaag

SEQ ID NO: 423855 - DNA, 15 bp, Homo sapiens
ttttgcacatggcaa

SEQ ID NO: 423856 - DNA, 15 bp, Homo sapiens
tttttgcacatggca

SEQ ID NO: 423857 - DNA, 15 bp, Homo sapiens
ttttttgcacatggc

SEQ ID NO: 423858 - DNA, 15 bp, Homo sapiens
gttttttgcacatgg

SEQ ID NO: 423859 - DNA, 15 bp, Homo sapiens
tgttttttgcacatg

SEQ ID NO: 423860 - DNA, 15 bp, Homo sapiens
ttgttttttgcacat

SEQ ID NO: 423861 - DNA, 15 bp, Homo sapiens
tttgttttttgcaca

SEQ ID NO: 423862 - DNA, 15 bp, Homo sapiens
atttgttttttgcac

SEQ ID NO: 423863 - DNA, 15 bp, Homo sapiens
gatttgttttttgca

SEQ ID NO: 423864 - DNA, 15 bp, Homo sapiens
tgatttgttttttgc

SEQ ID NO: 423865 - DNA, 15 bp, Homo sapiens
ttgatttgttttttg

SEQ ID NO: 423866 - DNA, 15 bp, Homo sapiens
tttgatttgtttttt

SEQ ID NO: 423867 - DNA, 15 bp, Homo sapiens
ttttgatttgttttt

SEQ ID NO: 423868 - DNA, 15 bp, Homo sapiens
attttgatttgtttt

SEQ ID NO: 423869 - DNA, 15 bp, Homo sapiens
cattttgatttgttt

SEQ ID NO: 423870 - DNA, 15 bp, Homo sapiens
ccattttgatttgtt

SEQ ID NO: 423871 - DNA, 15 bp, Homo sapiens
tccattttgatttgt

SEQ ID NO: 423872 - DNA, 15 bp, Homo sapiens
atccattttgatttg

SEQ ID NO: 423873 - DNA, 15 bp, Homo sapiens
aatccattttgattt

SEQ ID NO: 423874 - DNA, 15 bp, Homo sapiens
taatccattttgatt

SEQ ID NO: 423875 - DNA, 15 bp, Homo sapiens
ttaatccattttgat

SEQ ID NO: 423876 - DNA, 15 bp, Homo sapiens
tttaatccattttga

SEQ ID NO: 423877 - DNA, 15 bp, Homo sapiens
ttttaatccattttg

SEQ ID NO: 423878 - DNA, 15 bp, Homo sapiens
tttttaatccatttt

SEQ ID NO: 423879 - DNA, 15 bp, Homo sapiens
gtttttaatccattt

SEQ ID NO: 423880 - DNA, 15 bp, Homo sapiens
agtttttaatccatt

SEQ ID NO: 423881 - DNA, 15 bp, Homo sapiens
aagtttttaatccat

SEQ ID NO: 423882 - DNA, 15 bp, Homo sapiens
taagtttttaatcca

SEQ ID NO: 423883 - DNA, 15 bp, Homo sapiens
ttaagtttttaatcc

SEQ ID NO: 423884 - DNA, 15 bp, Homo sapiens
tttaagtttttaatc

SEQ ID NO: 423885 - DNA, 15 bp, Homo sapiens
atttaagtttttaat

SEQ ID NO: 423886 - DNA, 15 bp, Homo sapiens
gatttaagtttttaa

SEQ ID NO: 423887 - DNA, 15 bp, Homo sapiens
agatttaagttttta

SEQ ID NO: 423888 - DNA, 15 bp, Homo sapiens
tagatttaagttttt

SEQ ID NO: 423889 - DNA, 15 bp, Homo sapiens
ttagatttaagtttt

SEQ ID NO: 423890 - DNA, 15 bp, Homo sapiens
cttagatttaagttt

SEQ ID NO: 423891 - DNA, 15 bp, Homo sapiens
tcttagatttaagtt

SEQ ID NO: 423892 - DNA, 15 bp, Homo sapiens
atcttagatttaagt

SEQ ID NO: 423893 - DNA, 15 bp, Homo sapiens
gatcttagatttaag

SEQ ID NO: 423894 - DNA, 15 bp, Homo sapiens
agatcttagatttaa

SEQ ID NO: 423895 - DNA, 15 bp, Homo sapiens
gagatcttagattta

SEQ ID NO: 423896 - DNA, 15 bp, Homo sapiens
tgagatcttagattt

SEQ ID NO: 423897 - DNA, 15 bp, Homo sapiens
ttgagatcttagatt

SEQ ID NO: 423898 - DNA, 15 bp, Homo sapiens
tttgagatcttagat

SEQ ID NO: 423899 - DNA, 15 bp, Homo sapiens
gtttgagatcttaga

SEQ ID NO: 423900 - DNA, 15 bp, Homo sapiens
ggtttgagatcttag

SEQ ID NO: 423901 - DNA, 15 bp, Homo sapiens
tggtttgagatctta

SEQ ID NO: 423902 - DNA, 15 bp, Homo sapiens
atggtttgagatctt

SEQ ID NO: 423903 - DNA, 15 bp, Homo sapiens
catggtttgagatct

SEQ ID NO: 423904 - DNA, 15 bp, Homo sapiens
tcatggtttgagatc

SEQ ID NO: 423905 - DNA, 15 bp, Homo sapiens
ttcatggtttgagat

SEQ ID NO: 423906 - DNA, 15 bp, Homo sapiens
tttcatggtttgaga

SEQ ID NO: 423907 - DNA, 15 bp, Homo sapiens
gtttcatggtttgag

SEQ ID NO: 423908 - DNA, 15 bp, Homo sapiens
ggtttcatggtttga

SEQ ID NO: 423909 - DNA, 15 bp, Homo sapiens
tggtttcatggtttg

SEQ ID NO: 423910 - DNA, 15 bp, Homo sapiens
gtggtttcatggttt

SEQ ID NO: 423911 - DNA, 15 bp, Homo sapiens
agtggtttcatggtt

SEQ ID NO: 423912 - DNA, 15 bp, Homo sapiens
cagtggtttcatggt

SEQ ID NO: 423913 - DNA, 15 bp, Homo sapiens
acagtggtttcatgg

SEQ ID NO: 423914 - DNA, 15 bp, Homo sapiens
tacagtggtttcatg

SEQ ID NO: 423915 - DNA, 15 bp, Homo sapiens
ttacagtggtttcat

SEQ ID NO: 423916 - DNA, 15 bp, Homo sapiens
cttacagtggtttca

SEQ ID NO: 423917 - DNA, 15 bp, Homo sapiens
tcttacagtggtttc

SEQ ID NO: 423918 - DNA, 15 bp, Homo sapiens
ttcttacagtggttt

SEQ ID NO: 423919 - DNA, 15 bp, Homo sapiens
tttcttacagtggtt

SEQ ID NO: 423920 - DNA, 15 bp, Homo sapiens
ttttcttacagtggt

SEQ ID NO: 423921 - DNA, 15 bp, Homo sapiens
gttttcttacagtgg

SEQ ID NO: 423922 - DNA, 15 bp, Homo sapiens
tgttttcttacagtg

SEQ ID NO: 423923 - DNA, 15 bp, Homo sapiens
atgttttcttacagt

SEQ ID NO: 423924 - DNA, 15 bp, Homo sapiens
aatgttttcttacag

SEQ ID NO: 423925 - DNA, 15 bp, Homo sapiens
taatgttttcttaca

SEQ ID NO: 423926 - DNA, 15 bp, Homo sapiens
ttaatgttttcttac

SEQ ID NO: 423927 - DNA, 15 bp, Homo sapiens
cttaatgttttctta

SEQ ID NO: 423928 - DNA, 15 bp, Homo sapiens
ccttaatgttttctt

SEQ ID NO: 423929 - DNA, 15 bp, Homo sapiens
tccttaatgttttct

SEQ ID NO: 423930 - DNA, 15 bp, Homo sapiens
ttccttaatgttttc

SEQ ID NO: 423931 - DNA, 15 bp, Homo sapiens
cttccttaatgtttt

SEQ ID NO: 423932 - DNA, 15 bp, Homo sapiens
gcttccttaatgttt

SEQ ID NO: 423933 - DNA, 15 bp, Homo sapiens
agcttccttaatgtt

SEQ ID NO: 423934 - DNA, 15 bp, Homo sapiens
gagcttccttaatgt

SEQ ID NO: 423935 - DNA, 15 bp, Homo sapiens
agagcttccttaatg

SEQ ID NO: 423936 - DNA, 15 bp, Homo sapiens
gagagcttccttaat

SEQ ID NO: 423937 - DNA, 15 bp, Homo sapiens
ggagagcttccttaa

SEQ ID NO: 423938 - DNA, 15 bp, Homo sapiens
tggagagcttcctta

SEQ ID NO: 423939 - DNA, 15 bp, Homo sapiens
ctggagagcttcctt

SEQ ID NO: 423940 - DNA, 15 bp, Homo sapiens
cctggagagcttcct

SEQ ID NO: 423941 - DNA, 15 bp, Homo sapiens
tcctggagagcttcc

SEQ ID NO: 423942 - DNA, 15 bp, Homo sapiens
gtcctggagagcttc

SEQ ID NO: 423943 - DNA, 15 bp, Homo sapiens
tgtcctggagagctt

SEQ ID NO: 423944 - DNA, 15 bp, Homo sapiens
atgtcctggagagct

SEQ ID NO: 423945 - DNA, 15 bp, Homo sapiens
aatgtcctggagagc

SEQ ID NO: 423946 - DNA, 15 bp, Homo sapiens
caatgtcctggagag

SEQ ID NO: 423947 - DNA, 15 bp, Homo sapiens
ccaatgtcctggaga

SEQ ID NO: 423948 - DNA, 15 bp, Homo sapiens
accaatgtcctggag

SEQ ID NO: 423949 - DNA, 15 bp, Homo sapiens
gaccaatgtcctgga

SEQ ID NO: 423950 - DNA, 15 bp, Homo sapiens
agaccaatgtcctgg

SEQ ID NO: 423951 - DNA, 15 bp, Homo sapiens
tagaccaatgtcctg

SEQ ID NO: 423952 - DNA, 15 bp, Homo sapiens
ctagaccaatgtcct

SEQ ID NO: 423953 - DNA, 15 bp, Homo sapiens
cctagaccaatgtcc

SEQ ID NO: 423954 - DNA, 15 bp, Homo sapiens
gcctagaccaatgtc

SEQ ID NO: 423955 - DNA, 15 bp, Homo sapiens
tgcctagaccaatgt

SEQ ID NO: 423956 - DNA, 15 bp, Homo sapiens
ttgcctagaccaatg

SEQ ID NO: 423957 - DNA, 15 bp, Homo sapiens
tttgcctagaccaat

SEQ ID NO: 423958 - DNA, 15 bp, Homo sapiens
ctttgcctagaccaa

SEQ ID NO: 423959 - DNA, 15 bp, Homo sapiens
tctttgcctagacca

SEQ ID NO: 423960 - DNA, 15 bp, Homo sapiens
atctttgcctagacc

SEQ ID NO: 423961 - DNA, 15 bp, Homo sapiens
aatctttgcctagac

SEQ ID NO: 423962 - DNA, 15 bp, Homo sapiens
aaatctttgcctaga

SEQ ID NO: 423963 - DNA, 15 bp, Homo sapiens
gaaatctttgcctag

SEQ ID NO: 423964 - DNA, 15 bp, Homo sapiens
agaaatctttgccta

SEQ ID NO: 423965 - DNA, 15 bp, Homo sapiens
aagaaatctttgcct

SEQ ID NO: 423966 - DNA, 15 bp, Homo sapiens
caagaaatctttgcc

SEQ ID NO: 423967 - DNA, 15 bp, Homo sapiens
tcaagaaatctttgc

SEQ ID NO: 423968 - DNA, 15 bp, Homo sapiens
ctcaagaaatctttg

SEQ ID NO: 423969 - DNA, 15 bp, Homo sapiens
gctcaagaaatcttt

SEQ ID NO: 423970 - DNA, 15 bp, Homo sapiens
tgctcaagaaatctt

SEQ ID NO: 423971 - DNA, 15 bp, Homo sapiens
ctgctcaagaaatct

SEQ ID NO: 423972 - DNA, 15 bp, Homo sapiens
actgctcaagaaatc

SEQ ID NO: 423973 - DNA, 15 bp, Homo sapiens
tactgctcaagaaat

SEQ ID NO: 423974 - DNA, 15 bp, Homo sapiens
gtactgctcaagaaa

SEQ ID NO: 423975 - DNA, 15 bp, Homo sapiens
ggtactgctcaagaa

SEQ ID NO: 423976 - DNA, 15 bp, Homo sapiens
gggtactgctcaaga

SEQ ID NO: 423977 - DNA, 15 bp, Homo sapiens
ggggtactgctcaag

SEQ ID NO: 423978 - DNA, 15 bp, Homo sapiens
tggggtactgctcaa

SEQ ID NO: 423979 - DNA, 15 bp, Homo sapiens
ttggggtactgctca

SEQ ID NO: 423980 - DNA, 15 bp, Homo sapiens
tttggggtactgctc

SEQ ID NO: 423981 - DNA, 15 bp, Homo sapiens
ttttggggtactgct

SEQ ID NO: 423982 - DNA, 15 bp, Homo sapiens
tttttggggtactgc

SEQ ID NO: 423983 - DNA, 15 bp, Homo sapiens
gtttttggggtactg

SEQ ID NO: 423984 - DNA, 15 bp, Homo sapiens
tgtttttggggtact

SEQ ID NO: 423985 - DNA, 15 bp, Homo sapiens
gtgtttttggggtac

SEQ ID NO: 423986 - DNA, 15 bp, Homo sapiens
tgtgtttttggggta

SEQ ID NO: 423987 - DNA, 15 bp, Homo sapiens
ctgtgtttttggggt

SEQ ID NO: 423988 - DNA, 15 bp, Homo sapiens
cctgtgtttttgggg

SEQ ID NO: 423989 - DNA, 15 bp, Homo sapiens
tcctgtgtttttggg

SEQ ID NO: 423990 - DNA, 15 bp, Homo sapiens
ttcctgtgtttttgg

SEQ ID NO: 423991 - DNA, 15 bp, Homo sapiens
tttcctgtgtttttg

SEQ ID NO: 423992 - DNA, 15 bp, Homo sapiens
ttttcctgtgttttt

SEQ ID NO: 423993 - DNA, 15 bp, Homo sapiens
gttttcctgtgtttt

SEQ ID NO: 423994 - DNA, 15 bp, Homo sapiens
tgttttcctgtgttt

SEQ ID NO: 423995 - DNA, 15 bp, Homo sapiens
ctgttttcctgtgtt

SEQ ID NO: 423996 - DNA, 15 bp, Homo sapiens
tctgttttcctgtgt

SEQ ID NO: 423997 - DNA, 15 bp, Homo sapiens
ctctgttttcctgtg

SEQ ID NO: 423998 - DNA, 15 bp, Homo sapiens
gctctgttttcctgt

SEQ ID NO: 423999 - DNA, 15 bp, Homo sapiens
tgctctgttttcctg

SEQ ID NO: 424000 - DNA, 15 bp, Homo sapiens
ttgctctgttttcct

SEQ ID NO: 424001 - DNA, 15 bp, Homo sapiens
tttgctctgttttcc

SEQ ID NO: 424002 - DNA, 15 bp, Homo sapiens
ttttgctctgttttc

SEQ ID NO: 424003 - DNA, 15 bp, Homo sapiens
tttttgctctgtttt

SEQ ID NO: 424004 - DNA, 15 bp, Homo sapiens
atttttgctctgttt

SEQ ID NO: 424005 - DNA, 15 bp, Homo sapiens
gatttttgctctgtt

SEQ ID NO: 424006 - DNA, 15 bp, Homo sapiens
ggatttttgctctgt

SEQ ID NO: 424007 - DNA, 15 bp, Homo sapiens
tggatttttgctctg

SEQ ID NO: 424008 - DNA, 15 bp, Homo sapiens
gtggatttttgctct

SEQ ID NO: 424009 - DNA, 15 bp, Homo sapiens
ggtggatttttgctc

SEQ ID NO: 424010 - DNA, 15 bp, Homo sapiens
tggtggatttttgct

SEQ ID NO: 424011 - DNA, 15 bp, Homo sapiens
ttggtggatttttgc

SEQ ID NO: 424012 - DNA, 15 bp, Homo sapiens
attggtggatttttg

SEQ ID NO: 424013 - DNA, 15 bp, Homo sapiens
cattggtggattttt

SEQ ID NO: 424014 - DNA, 15 bp, Homo sapiens
ccattggtggatttt

SEQ ID NO: 424015 - DNA, 15 bp, Homo sapiens
cccattggtggattt

SEQ ID NO: 424016 - DNA, 15 bp, Homo sapiens
tcccattggtggatt

SEQ ID NO: 424017 - DNA, 15 bp, Homo sapiens
atcccattggtggat

SEQ ID NO: 424018 - DNA, 15 bp, Homo sapiens
gatcccattggtgga

SEQ ID NO: 424019 - DNA, 15 bp, Homo sapiens
tgatcccattggtgg

SEQ ID NO: 424020 - DNA, 15 bp, Homo sapiens
gtgatcccattggtg

SEQ ID NO: 424021 - DNA, 15 bp, Homo sapiens
tgtgatcccattggt

SEQ ID NO: 424022 - DNA, 15 bp, Homo sapiens
atgtgatcccattgg

SEQ ID NO: 424023 - DNA, 15 bp, Homo sapiens
gatgtgatcccattg

SEQ ID NO: 424024 - DNA, 15 bp, Homo sapiens
tgatgtgatcccatt

SEQ ID NO: 424025 - DNA, 15 bp, Homo sapiens
ttgatgtgatcccat

SEQ ID NO: 424026 - DNA, 15 bp, Homo sapiens
cttgatgtgatccca

SEQ ID NO: 424027 - DNA, 15 bp, Homo sapiens
acttgatgtgatccc

SEQ ID NO: 424028 - DNA, 15 bp, Homo sapiens
aacttgatgtgatcc

SEQ ID NO: 424029 - DNA, 15 bp, Homo sapiens
taacttgatgtgatc

SEQ ID NO: 424030 - DNA, 15 bp, Homo sapiens
ttaacttgatgtgat

SEQ ID NO: 424031 - DNA, 15 bp, Homo sapiens
tttaacttgatgtga

SEQ ID NO: 424032 - DNA, 15 bp, Homo sapiens
ttttaacttgatgtg

SEQ ID NO: 424033 - DNA, 15 bp, Homo sapiens
tttttaacttgatgt

SEQ ID NO: 424034 - DNA, 15 bp, Homo sapiens
ctttttaacttgatg

SEQ ID NO: 424035 - DNA, 15 bp, Homo sapiens
gctttttaacttgat

SEQ ID NO: 424036 - DNA, 15 bp, Homo sapiens
agctttttaacttga

SEQ ID NO: 424037 - DNA, 15 bp, Homo sapiens
aagctttttaacttg

SEQ ID NO: 424038 - DNA, 15 bp, Homo sapiens
gaagctttttaactt

SEQ ID NO: 424039 - DNA, 15 bp, Homo sapiens
agaagctttttaact

SEQ ID NO: 424040 - DNA, 15 bp, Homo sapiens
cagaagctttttaac

SEQ ID NO: 424041 - DNA, 15 bp, Homo sapiens
gcagaagctttttaa

SEQ ID NO: 424042 - DNA, 15 bp, Homo sapiens
tgcagaagcttttta

SEQ ID NO: 424043 - DNA, 15 bp, Homo sapiens
atgcagaagcttttt

SEQ ID NO: 424044 - DNA, 15 bp, Homo sapiens
tatgcagaagctttt

SEQ ID NO: 424045 - DNA, 15 bp, Homo sapiens
ctatgcagaagcttt

SEQ ID NO: 424046 - DNA, 15 bp, Homo sapiens
gctatgcagaagctt

SEQ ID NO: 424047 - DNA, 15 bp, Homo sapiens
tgctatgcagaagct

SEQ ID NO: 424048 - DNA, 15 bp, Homo sapiens
ttgctatgcagaagc

SEQ ID NO: 424049 - DNA, 15 bp, Homo sapiens
tttgctatgcagaag

SEQ ID NO: 424050 - DNA, 15 bp, Homo sapiens
ctttgctatgcagaa

SEQ ID NO: 424051 - DNA, 15 bp, Homo sapiens
tctttgctatgcaga

SEQ ID NO: 424052 - DNA, 15 bp, Homo sapiens
ttctttgctatgcag

SEQ ID NO: 424053 - DNA, 15 bp, Homo sapiens
tttctttgctatgca

SEQ ID NO: 424054 - DNA, 15 bp, Homo sapiens
ttttctttgctatgc

SEQ ID NO: 424055 - DNA, 15 bp, Homo sapiens
cttttctttgctatg

SEQ ID NO: 424056 - DNA, 15 bp, Homo sapiens
tcttttctttgctat

SEQ ID NO: 424057 - DNA, 15 bp, Homo sapiens
ttcttttctttgcta

SEQ ID NO: 424058 - DNA, 15 bp, Homo sapiens
attcttttctttgct

SEQ ID NO: 424059 - DNA, 15 bp, Homo sapiens
gattcttttctttgc

SEQ ID NO: 424060 - DNA, 15 bp, Homo sapiens
tgattcttttctttg

SEQ ID NO: 424061 - DNA, 15 bp, Homo sapiens
ttgattcttttcttt

SEQ ID NO: 424062 - DNA, 15 bp, Homo sapiens
gttgattcttttctt

SEQ ID NO: 424063 - DNA, 15 bp, Homo sapiens
tgttgattcttttct

SEQ ID NO: 424064 - DNA, 15 bp, Homo sapiens
ttgttgattcttttc

SEQ ID NO: 424065 - DNA, 15 bp, Homo sapiens
tttgttgattctttt

SEQ ID NO: 424066 - DNA, 15 bp, Homo sapiens
ctttgttgattcttt

SEQ ID NO: 424067 - DNA, 15 bp, Homo sapiens
actttgttgattctt

SEQ ID NO: 424068 - DNA, 15 bp, Homo sapiens
cactttgttgattct

SEQ ID NO: 424069 - DNA, 15 bp, Homo sapiens
tcactttgttgattc

SEQ ID NO: 424070 - DNA, 15 bp, Homo sapiens
ttcactttgttgatt

SEQ ID NO: 424071 - DNA, 15 bp, Homo sapiens
cttcactttgttgat

SEQ ID NO: 424072 - DNA, 15 bp, Homo sapiens
tcttcactttgttga

SEQ ID NO: 424073 - DNA, 15 bp, Homo sapiens
ctcttcactttgttg

SEQ ID NO: 424074 - DNA, 15 bp, Homo sapiens
tctcttcactttgtt

SEQ ID NO: 424075 - DNA, 15 bp, Homo sapiens
gtctcttcactttgt

SEQ ID NO: 424076 - DNA, 15 bp, Homo sapiens
tgtctcttcactttg

SEQ ID NO: 424077 - DNA, 15 bp, Homo sapiens
ttgtctcttcacttt

SEQ ID NO: 424078 - DNA, 15 bp, Homo sapiens
gttgtctcttcactt

SEQ ID NO: 424079 - DNA, 15 bp, Homo sapiens
ggttgtctcttcact

SEQ ID NO: 424080 - DNA, 15 bp, Homo sapiens
gggttgtctcttcac

SEQ ID NO: 424081 - DNA, 15 bp, Homo sapiens
tgggttgtctcttca

SEQ ID NO: 424082 - DNA, 15 bp, Homo sapiens
gtgggttgtctcttc

SEQ ID NO: 424083 - DNA, 15 bp, Homo sapiens
tgtgggttgtctctt

SEQ ID NO: 424084 - DNA, 15 bp, Homo sapiens
ttgtgggttgtctct

SEQ ID NO: 424085 - DNA, 15 bp, Homo sapiens
tttgtgggttgtctc

SEQ ID NO: 424086 - DNA, 15 bp, Homo sapiens
ttttgtgggttgtct

SEQ ID NO: 424087 - DNA, 15 bp, Homo sapiens
attttgtgggttgtc

SEQ ID NO: 424088 - DNA, 15 bp, Homo sapiens
cattttgtgggttgt

SEQ ID NO: 424089 - DNA, 15 bp, Homo sapiens
ccattttgtgggttg

SEQ ID NO: 424090 - DNA, 15 bp, Homo sapiens
cccattttgtgggtt

SEQ ID NO: 424091 - DNA, 15 bp, Homo sapiens
tcccattttgtgggt

SEQ ID NO: 424092 - DNA, 15 bp, Homo sapiens
ctcccattttgtggg

SEQ ID NO: 424093 - DNA, 15 bp, Homo sapiens
tctcccattttgtgg

SEQ ID NO: 424094 - DNA, 15 bp, Homo sapiens
ttctcccattttgtg

SEQ ID NO: 424095 - DNA, 15 bp, Homo sapiens
tttctcccattttgt

SEQ ID NO: 424096 - DNA, 15 bp, Homo sapiens
ttttctcccattttg

SEQ ID NO: 424097 - DNA, 15 bp, Homo sapiens
attttctcccatttt

SEQ ID NO: 424098 - DNA, 15 bp, Homo sapiens
tattttctcccattt

SEQ ID NO: 424099 - DNA, 15 bp, Homo sapiens
atattttctcccatt

SEQ ID NO: 424100 - DNA, 15 bp, Homo sapiens
gatattttctcccat

SEQ ID NO: 424101 - DNA, 15 bp, Homo sapiens
agatattttctccca

SEQ ID NO: 424102 - DNA, 15 bp, Homo sapiens
cagatattttctccc

SEQ ID NO: 424103 - DNA, 15 bp, Homo sapiens
gcagatattttctcc

SEQ ID NO: 424104 - DNA, 15 bp, Homo sapiens
tgcagatattttctc

SEQ ID NO: 424105 - DNA, 15 bp, Homo sapiens
ttgcagatattttct

SEQ ID NO: 424106 - DNA, 15 bp, Homo sapiens
attgcagatattttc

SEQ ID NO: 424107 - DNA, 15 bp, Homo sapiens
gattgcagatatttt

SEQ ID NO: 424108 - DNA, 15 bp, Homo sapiens
agattgcagatattt

SEQ ID NO: 424109 - DNA, 15 bp, Homo sapiens
tagattgcagatatt

SEQ ID NO: 424110 - DNA, 15 bp, Homo sapiens
atagattgcagatat

SEQ ID NO: 424111 - DNA, 15 bp, Homo sapiens
gatagattgcagata

SEQ ID NO: 424112 - DNA, 15 bp, Homo sapiens
ggatagattgcagat

SEQ ID NO: 424113 - DNA, 15 bp, Homo sapiens
tggatagattgcaga

SEQ ID NO: 424114 - DNA, 15 bp, Homo sapiens
atggatagattgcag

SEQ ID NO: 424115 - DNA, 15 bp, Homo sapiens
gatggatagattgca

SEQ ID NO: 424116 - DNA, 15 bp, Homo sapiens
agatggatagattgc

SEQ ID NO: 424117 - DNA, 15 bp, Homo sapiens
cagatggatagattg

SEQ ID NO: 424118 - DNA, 15 bp, Homo sapiens
tcagatggatagatt

SEQ ID NO: 424119 - DNA, 15 bp, Homo sapiens
gtcagatggatagat

SEQ ID NO: 424120 - DNA, 15 bp, Homo sapiens
tgtcagatggataga

SEQ ID NO: 424121 - DNA, 15 bp, Homo sapiens
ttgtcagatggatag

SEQ ID NO: 424122 - DNA, 15 bp, Homo sapiens
cttgtcagatggata

SEQ ID NO: 424123 - DNA, 15 bp, Homo sapiens
ccttgtcagatggat

SEQ ID NO: 424124 - DNA, 15 bp, Homo sapiens
cccttgtcagatgga

SEQ ID NO: 424125 - DNA, 15 bp, Homo sapiens
tcccttgtcagatgg

SEQ ID NO: 424126 - DNA, 15 bp, Homo sapiens
atcccttgtcagatg

SEQ ID NO: 424127 - DNA, 15 bp, Homo sapiens
aatcccttgtcagat

SEQ ID NO: 424128 - DNA, 15 bp, Homo sapiens
taatcccttgtcaga

SEQ ID NO: 424129 - DNA, 15 bp, Homo sapiens
ctaatcccttgtcag

SEQ ID NO: 424130 - DNA, 15 bp, Homo sapiens
actaatcccttgtca

SEQ ID NO: 424131 - DNA, 15 bp, Homo sapiens
tactaatcccttgtc

SEQ ID NO: 424132 - DNA, 15 bp, Homo sapiens
ttactaatcccttgt

SEQ ID NO: 424133 - DNA, 15 bp, Homo sapiens
gttactaatcccttg

SEQ ID NO: 424134 - DNA, 15 bp, Homo sapiens
ggttactaatccctt

SEQ ID NO: 424135 - DNA, 15 bp, Homo sapiens
tggttactaatccct

SEQ ID NO: 424136 - DNA, 15 bp, Homo sapiens
ctggttactaatccc

SEQ ID NO: 424137 - DNA, 15 bp, Homo sapiens
tctggttactaatcc

SEQ ID NO: 424138 - DNA, 15 bp, Homo sapiens
ttctggttactaatc

SEQ ID NO: 424139 - DNA, 15 bp, Homo sapiens
attctggttactaat

SEQ ID NO: 424140 - DNA, 15 bp, Homo sapiens
tattctggttactaa

SEQ ID NO: 424141 - DNA, 15 bp, Homo sapiens
atattctggttacta

SEQ ID NO: 424142 - DNA, 15 bp, Homo sapiens
catattctggttact

SEQ ID NO: 424143 - DNA, 15 bp, Homo sapiens
acatattctggttac

SEQ ID NO: 424144 - DNA, 15 bp, Homo sapiens
tacatattctggtta

SEQ ID NO: 424145 - DNA, 15 bp, Homo sapiens
ttacatattctggtt

SEQ ID NO: 424146 - DNA, 15 bp, Homo sapiens
cttacatattctggt

SEQ ID NO: 424147 - DNA, 15 bp, Homo sapiens
ccttacatattctgg

SEQ ID NO: 424148 - DNA, 15 bp, Homo sapiens
tccttacatattctg

SEQ ID NO: 424149 - DNA, 15 bp, Homo sapiens
ctccttacatattct

SEQ ID NO: 424150 - DNA, 15 bp, Homo sapiens
gctccttacatattc

SEQ ID NO: 424151 - DNA, 15 bp, Homo sapiens
agctccttacatatt

SEQ ID NO: 424152 - DNA, 15 bp, Homo sapiens
gagctccttacatat

SEQ ID NO: 424153 - DNA, 15 bp, Homo sapiens
tgagctccttacata

SEQ ID NO: 424154 - DNA, 15 bp, Homo sapiens
ttgagctccttacat

SEQ ID NO: 424155 - DNA, 15 bp, Homo sapiens
tttgagctccttaca

SEQ ID NO: 424156 - DNA, 15 bp, Homo sapiens
gtttgagctccttac

SEQ ID NO: 424157 - DNA, 15 bp, Homo sapiens
tgtttgagctcctta

SEQ ID NO: 424158 - DNA, 15 bp, Homo sapiens
ttgtttgagctcctt

SEQ ID NO: 424159 - DNA, 15 bp, Homo sapiens
tttgtttgagctcct

SEQ ID NO: 424160 - DNA, 15 bp, Homo sapiens
atttgtttgagctcc

SEQ ID NO: 424161 - DNA, 15 bp, Homo sapiens
gatttgtttgagctc

SEQ ID NO: 424162 - DNA, 15 bp, Homo sapiens
agatttgtttgagct

SEQ ID NO: 424163 - DNA, 15 bp, Homo sapiens
tagatttgtttgagc

SEQ ID NO: 424164 - DNA, 15 bp, Homo sapiens
atagatttgtttgag

SEQ ID NO: 424165 - DNA, 15 bp, Homo sapiens
tatagatttgtttga

SEQ ID NO: 424166 - DNA, 15 bp, Homo sapiens
ctatagatttgtttg

SEQ ID NO: 424167 - DNA, 15 bp, Homo sapiens
cctatagatttgttt

SEQ ID NO: 424168 - DNA, 15 bp, Homo sapiens
tcctatagatttgtt

SEQ ID NO: 424169 - DNA, 15 bp, Homo sapiens
ttcctatagatttgt

SEQ ID NO: 424170 - DNA, 15 bp, Homo sapiens
tttcctatagatttg

SEQ ID NO: 424171 - DNA, 15 bp, Homo sapiens
ttttcctatagattt

SEQ ID NO: 424172 - DNA, 15 bp, Homo sapiens
tttttcctatagatt

SEQ ID NO: 424173 - DNA, 15 bp, Homo sapiens
ttttttcctatagat

SEQ ID NO: 424174 - DNA, 15 bp, Homo sapiens
tttttttcctataga

SEQ ID NO: 424175 - DNA, 15 bp, Homo sapiens
atttttttcctatag

SEQ ID NO: 424176 - DNA, 15 bp, Homo sapiens
gatttttttcctata

SEQ ID NO: 424177 - DNA, 15 bp, Homo sapiens
agatttttttcctat

SEQ ID NO: 424178 - DNA, 15 bp, Homo sapiens
tagatttttttccta

SEQ ID NO: 424179 - DNA, 15 bp, Homo sapiens
ttagatttttttcct

SEQ ID NO: 424180 - DNA, 15 bp, Homo sapiens
attagatttttttcc

SEQ ID NO: 424181 - DNA, 15 bp, Homo sapiens
tattagatttttttc

SEQ ID NO: 424182 - DNA, 15 bp, Homo sapiens
ttattagattttttt

SEQ ID NO: 424183 - DNA, 15 bp, Homo sapiens
attattagatttttt

SEQ ID NO: 424184 - DNA, 15 bp, Homo sapiens
gattattagattttt

SEQ ID NO: 424185 - DNA, 15 bp, Homo sapiens
agattattagatttt

SEQ ID NO: 424186 - DNA, 15 bp, Homo sapiens
cagattattagattt

SEQ ID NO: 424187 - DNA, 15 bp, Homo sapiens
tcagattattagatt

SEQ ID NO: 424188 - DNA, 15 bp, Homo sapiens
atcagattattagat

SEQ ID NO: 424189 - DNA, 15 bp, Homo sapiens
aatcagattattaga

SEQ ID NO: 424190 - DNA, 15 bp, Homo sapiens
taatcagattattag

SEQ ID NO: 424191 - DNA, 15 bp, Homo sapiens
ttaatcagattatta

SEQ ID NO: 424192 - DNA, 15 bp, Homo sapiens
tttaatcagattatt

SEQ ID NO: 424193 - DNA, 15 bp, Homo sapiens
ctttaatcagattat

SEQ ID NO: 424194 - DNA, 15 bp, Homo sapiens
tctttaatcagatta

SEQ ID NO: 424195 - DNA, 15 bp, Homo sapiens
ttctttaatcagatt

SEQ ID NO: 424196 - DNA, 15 bp, Homo sapiens
attctttaatcagat

SEQ ID NO: 424197 - DNA, 15 bp, Homo sapiens
cattctttaatcaga

SEQ ID NO: 424198 - DNA, 15 bp, Homo sapiens
ccattctttaatcag

SEQ ID NO: 424199 - DNA, 15 bp, Homo sapiens
cccattctttaatca

SEQ ID NO: 424200 - DNA, 15 bp, Homo sapiens
gcccattctttaatc

SEQ ID NO: 424201 - DNA, 15 bp, Homo sapiens
tgcccattctttaat

SEQ ID NO: 424202 - DNA, 15 bp, Homo sapiens
ttgcccattctttaa

SEQ ID NO: 424203 - DNA, 15 bp, Homo sapiens
gttgcccattcttta

SEQ ID NO: 424204 - DNA, 15 bp, Homo sapiens
tgttgcccattcttt

SEQ ID NO: 424205 - DNA, 15 bp, Homo sapiens
ctgttgcccattctt

SEQ ID NO: 424206 - DNA, 15 bp, Homo sapiens
actgttgcccattct

SEQ ID NO: 424207 - DNA, 15 bp, Homo sapiens
aactgttgcccattc

SEQ ID NO: 424208 - DNA, 15 bp, Homo sapiens
gaactgttgcccatt

SEQ ID NO: 424209 - DNA, 15 bp, Homo sapiens
agaactgttgcccat

SEQ ID NO: 424210 - DNA, 15 bp, Homo sapiens
cagaactgttgccca

SEQ ID NO: 424211 - DNA, 15 bp, Homo sapiens
tcagaactgttgccc

SEQ ID NO: 424212 - DNA, 15 bp, Homo sapiens
ttcagaactgttgcc

SEQ ID NO: 424213 - DNA, 15 bp, Homo sapiens
attcagaactgttgc

SEQ ID NO: 424214 - DNA, 15 bp, Homo sapiens
tattcagaactgttg

SEQ ID NO: 424215 - DNA, 15 bp, Homo sapiens
ctattcagaactgtt

SEQ ID NO: 424216 - DNA, 15 bp, Homo sapiens
tctattcagaactgt

SEQ ID NO: 424217 - DNA, 15 bp, Homo sapiens
gtctattcagaactg

SEQ ID NO: 424218 - DNA, 15 bp, Homo sapiens
tgtctattcagaact

SEQ ID NO: 424219 - DNA, 15 bp, Homo sapiens
atgtctattcagaac

SEQ ID NO: 424220 - DNA, 15 bp, Homo sapiens
aatgtctattcagaa

SEQ ID NO: 424221 - DNA, 15 bp, Homo sapiens
aaatgtctattcaga

SEQ ID NO: 424222 - DNA, 15 bp, Homo sapiens
gaaatgtctattcag

SEQ ID NO: 424223 - DNA, 15 bp, Homo sapiens
agaaatgtctattca

SEQ ID NO: 424224 - DNA, 15 bp, Homo sapiens
gagaaatgtctattc

SEQ ID NO: 424225 - DNA, 15 bp, Homo sapiens
tgagaaatgtctatt

SEQ ID NO: 424226 - DNA, 15 bp, Homo sapiens
ttgagaaatgtctat

SEQ ID NO: 424227 - DNA, 15 bp, Homo sapiens
attgagaaatgtcta

SEQ ID NO: 424228 - DNA, 15 bp, Homo sapiens
tattgagaaatgtct

SEQ ID NO: 424229 - DNA, 15 bp, Homo sapiens
ctattgagaaatgtc

SEQ ID NO: 424230 - DNA, 15 bp, Homo sapiens
tctattgagaaatgt

SEQ ID NO: 424231 - DNA, 15 bp, Homo sapiens
gtctattgagaaatg

SEQ ID NO: 424232 - DNA, 15 bp, Homo sapiens
tgtctattgagaaat

SEQ ID NO: 424233 - DNA, 15 bp, Homo sapiens
atgtctattgagaaa

SEQ ID NO: 424234 - DNA, 15 bp, Homo sapiens
tatgtctattgagaa

SEQ ID NO: 424235 - DNA, 15 bp, Homo sapiens
gtatgtctattgaga

SEQ ID NO: 424236 - DNA, 15 bp, Homo sapiens
tgtatgtctattgag

SEQ ID NO: 424237 - DNA, 15 bp, Homo sapiens
ttgtatgtctattga

SEQ ID NO: 424238 - DNA, 15 bp, Homo sapiens
tttgtatgtctattg

SEQ ID NO: 424239 - DNA, 15 bp, Homo sapiens
atttgtatgtctatt

SEQ ID NO: 424240 - DNA, 15 bp, Homo sapiens
catttgtatgtctat

SEQ ID NO: 424241 - DNA, 15 bp, Homo sapiens
ccatttgtatgtcta

SEQ ID NO: 424242 - DNA, 15 bp, Homo sapiens
gccatttgtatgtct

SEQ ID NO: 424243 - DNA, 15 bp, Homo sapiens
tgccatttgtatgtc

SEQ ID NO: 424244 - DNA, 15 bp, Homo sapiens
ttgccatttgtatgt

SEQ ID NO: 424245 - DNA, 15 bp, Homo sapiens
tttgccatttgtatg

SEQ ID NO: 424246 - DNA, 15 bp, Homo sapiens
gtttgccatttgtat

SEQ ID NO: 424247 - DNA, 15 bp, Homo sapiens
tgtttgccatttgta

SEQ ID NO: 424248 - DNA, 15 bp, Homo sapiens
ttgtttgccatttgt

SEQ ID NO: 424249 - DNA, 15 bp, Homo sapiens
cttgtttgccatttg

SEQ ID NO: 424250 - DNA, 15 bp, Homo sapiens
acttgtttgccattt

SEQ ID NO: 424251 - DNA, 15 bp, Homo sapiens
tacttgtttgccatt

SEQ ID NO: 424252 - DNA, 15 bp, Homo sapiens
atacttgtttgccat

SEQ ID NO: 424253 - DNA, 15 bp, Homo sapiens
tatacttgtttgcca

SEQ ID NO: 424254 - DNA, 15 bp, Homo sapiens
atatacttgtttgcc

SEQ ID NO: 424255 - DNA, 15 bp, Homo sapiens
catatacttgtttgc

SEQ ID NO: 424256 - DNA, 15 bp, Homo sapiens
tcatatacttgtttg

SEQ ID NO: 424257 - DNA, 15 bp, Homo sapiens
ttcatatacttgttt

SEQ ID NO: 424258 - DNA, 15 bp, Homo sapiens
tttcatatacttgtt

SEQ ID NO: 424259 - DNA, 15 bp, Homo sapiens
ttttcatatacttgt

SEQ ID NO: 424260 - DNA, 15 bp, Homo sapiens
cttttcatatacttg

SEQ ID NO: 424261 - DNA, 15 bp, Homo sapiens
ccttttcatatactt

SEQ ID NO: 424262 - DNA, 15 bp, Homo sapiens
accttttcatatact

SEQ ID NO: 424263 - DNA, 15 bp, Homo sapiens
caccttttcatatac

SEQ ID NO: 424264 - DNA, 15 bp, Homo sapiens
gcaccttttcatata

SEQ ID NO: 424265 - DNA, 15 bp, Homo sapiens
agcaccttttcatat

SEQ ID NO: 424266 - DNA, 15 bp, Homo sapiens
gagcaccttttcata

SEQ ID NO: 424267 - DNA, 15 bp, Homo sapiens
tgagcaccttttcat

SEQ ID NO: 424268 - DNA, 15 bp, Homo sapiens
ttgagcaccttttca

SEQ ID NO: 424269 - DNA, 15 bp, Homo sapiens
gttgagcaccttttc

SEQ ID NO: 424270 - DNA, 15 bp, Homo sapiens
tgttgagcacctttt

SEQ ID NO: 424271 - DNA, 15 bp, Homo sapiens
atgttgagcaccttt

SEQ ID NO: 424272 - DNA, 15 bp, Homo sapiens
gatgttgagcacctt

SEQ ID NO: 424273 - DNA, 15 bp, Homo sapiens
tgatgttgagcacct

SEQ ID NO: 424274 - DNA, 15 bp, Homo sapiens
atgatgttgagcacc

SEQ ID NO: 424275 - DNA, 15 bp, Homo sapiens
aatgatgttgagcac

SEQ ID NO: 424276 - DNA, 15 bp, Homo sapiens
caatgatgttgagca

SEQ ID NO: 424277 - DNA, 15 bp, Homo sapiens
ccaatgatgttgagc

SEQ ID NO: 424278 - DNA, 15 bp, Homo sapiens
accaatgatgttgag

SEQ ID NO: 424279 - DNA, 15 bp, Homo sapiens
gaccaatgatgttga

SEQ ID NO: 424280 - DNA, 15 bp, Homo sapiens
tgaccaatgatgttg

SEQ ID NO: 424281 - DNA, 15 bp, Homo sapiens
atgaccaatgatgtt

SEQ ID NO: 424282 - DNA, 15 bp, Homo sapiens
gatgaccaatgatgt

SEQ ID NO: 424283 - DNA, 15 bp, Homo sapiens
tgatgaccaatgatg

SEQ ID NO: 424284 - DNA, 15 bp, Homo sapiens
ttgatgaccaatgat

SEQ ID NO: 424285 - DNA, 15 bp, Homo sapiens
tttgatgaccaatga

SEQ ID NO: 424286 - DNA, 15 bp, Homo sapiens
ctttgatgaccaatg

SEQ ID NO: 424287 - DNA, 15 bp, Homo sapiens
tctttgatgaccaat

SEQ ID NO: 424288 - DNA, 15 bp, Homo sapiens
ttctttgatgaccaa

SEQ ID NO: 424289 - DNA, 15 bp, Homo sapiens
tttctttgatgacca

SEQ ID NO: 424290 - DNA, 15 bp, Homo sapiens
atttctttgatgacc

SEQ ID NO: 424291 - DNA, 15 bp, Homo sapiens
catttctttgatgac

SEQ ID NO: 424292 - DNA, 15 bp, Homo sapiens
gcatttctttgatga

SEQ ID NO: 424293 - DNA, 15 bp, Homo sapiens
tgcatttctttgatg

SEQ ID NO: 424294 - DNA, 15 bp, Homo sapiens
ttgcatttctttgat

SEQ ID NO: 424295 - DNA, 15 bp, Homo sapiens
tttgcatttctttga

SEQ ID NO: 424296 - DNA, 15 bp, Homo sapiens
atttgcatttctttg

SEQ ID NO: 424297 - DNA, 15 bp, Homo sapiens
ttttaatttgcattt

SEQ ID NO: 424298 - DNA, 15 bp, Homo sapiens
gttttaatttgcatt

SEQ ID NO: 424299 - DNA, 15 bp, Homo sapiens
agttttaatttgcat

SEQ ID NO: 424300 - DNA, 15 bp, Homo sapiens
tagttttaatttgca

SEQ ID NO: 424301 - DNA, 15 bp, Homo sapiens
gtagttttaatttgc

SEQ ID NO: 424302 - DNA, 15 bp, Homo sapiens
tgtagttttaatttg

SEQ ID NO: 424303 - DNA, 15 bp, Homo sapiens
ttgtagttttaattt

SEQ ID NO: 424304 - DNA, 15 bp, Homo sapiens
attgtagttttaatt

SEQ ID NO: 424305 - DNA, 15 bp, Homo sapiens
cattgtagttttaat

SEQ ID NO: 424306 - DNA, 15 bp, Homo sapiens
tcattgtagttttaa

SEQ ID NO: 424307 - DNA, 15 bp, Homo sapiens
ctcattgtagtttta

SEQ ID NO: 424308 - DNA, 15 bp, Homo sapiens
tctcattgtagtttt

SEQ ID NO: 424309 - DNA, 15 bp, Homo sapiens
atctcattgtagttt

SEQ ID NO: 424310 - DNA, 15 bp, Homo sapiens
tatctcattgtagtt

SEQ ID NO: 424311 - DNA, 15 bp, Homo sapiens
atatctcattgtagt

SEQ ID NO: 424312 - DNA, 15 bp, Homo sapiens
gatatctcattgtag

SEQ ID NO: 424313 - DNA, 15 bp, Homo sapiens
cgatatctcattgta

SEQ ID NO: 424314 - DNA, 15 bp, Homo sapiens
acgatatctcattgt

SEQ ID NO: 424315 - DNA, 15 bp, Homo sapiens
gacgatatctcattg

SEQ ID NO: 424316 - DNA, 15 bp, Homo sapiens
agacgatatctcatt

SEQ ID NO: 424317 - DNA, 15 bp, Homo sapiens
gagacgatatctcat

SEQ ID NO: 424318 - DNA, 15 bp, Homo sapiens
tgagacgatatctca

SEQ ID NO: 424319 - DNA, 15 bp, Homo sapiens
gtgagacgatatctc

SEQ ID NO: 424320 - DNA, 15 bp, Homo sapiens
ggtgagacgatatct

SEQ ID NO: 424321 - DNA, 15 bp, Homo sapiens
gggtgagacgatatc

SEQ ID NO: 424322 - DNA, 15 bp, Homo sapiens
ggggtgagacgatat

SEQ ID NO: 424323 - DNA, 15 bp, Homo sapiens
tggggtgagacgata

SEQ ID NO: 424324 - DNA, 15 bp, Homo sapiens
ttggggtgagacgat

SEQ ID NO: 424325 - DNA, 15 bp, Homo sapiens
cttggggtgagacga

SEQ ID NO: 424326 - DNA, 15 bp, Homo sapiens
acttggggtgagacg

SEQ ID NO: 424327 - DNA, 15 bp, Homo sapiens
aacttggggtgagac

SEQ ID NO: 424328 - DNA, 15 bp, Homo sapiens
taacttggggtgaga

SEQ ID NO: 424329 - DNA, 15 bp, Homo sapiens
ttaacttggggtgag

SEQ ID NO: 424330 - DNA, 15 bp, Homo sapiens
tttaacttggggtga

SEQ ID NO: 424331 - DNA, 15 bp, Homo sapiens
ttttaacttggggtg

SEQ ID NO: 424332 - DNA, 15 bp, Homo sapiens
attttaacttggggt

SEQ ID NO: 424333 - DNA, 15 bp, Homo sapiens
cattttaacttgggg

SEQ ID NO: 424334 - DNA, 15 bp, Homo sapiens
tcattttaacttggg

SEQ ID NO: 424335 - DNA, 15 bp, Homo sapiens
gtcattttaacttgg

SEQ ID NO: 424336 - DNA, 15 bp, Homo sapiens
agtcattttaacttg

SEQ ID NO: 424337 - DNA, 15 bp, Homo sapiens
aagtcattttaactt

SEQ ID NO: 424338 - DNA, 15 bp, Homo sapiens
aaagtcattttaact

SEQ ID NO: 424339 - DNA, 15 bp, Homo sapiens
aaaagtcattttaac

SEQ ID NO: 424340 - DNA, 15 bp, Homo sapiens
taaaagtcattttaa

SEQ ID NO: 424341 - DNA, 15 bp, Homo sapiens
ataaaagtcatttta

SEQ ID NO: 424342 - DNA, 15 bp, Homo sapiens
gataaaagtcatttt

SEQ ID NO: 424343 - DNA, 15 bp, Homo sapiens
ggataaaagtcattt

SEQ ID NO: 424344 - DNA, 15 bp, Homo sapiens
tggataaaagtcatt

SEQ ID NO: 424345 - DNA, 15 bp, Homo sapiens
ttggataaaagtcat

SEQ ID NO: 424346 - DNA, 15 bp, Homo sapiens
tttggataaaagtca

SEQ ID NO: 424347 - DNA, 15 bp, Homo sapiens
ttttggataaaagtc

SEQ ID NO: 424348 - DNA, 15 bp, Homo sapiens
cttttggataaaagt

SEQ ID NO: 424349 - DNA, 15 bp, Homo sapiens
tcttttggataaaag

SEQ ID NO: 424350 - DNA, 15 bp, Homo sapiens
gtcttttggataaaa

SEQ ID NO: 424351 - DNA, 15 bp, Homo sapiens
tgtcttttggataaa

SEQ ID NO: 424352 - DNA, 15 bp, Homo sapiens
ctgtcttttggataa

SEQ ID NO: 424353 - DNA, 15 bp, Homo sapiens
cctgtcttttggata

SEQ ID NO: 424354 - DNA, 15 bp, Homo sapiens
ccctgtcttttggat

SEQ ID NO: 424355 - DNA, 15 bp, Homo sapiens
tccctgtcttttgga

SEQ ID NO: 424356 - DNA, 15 bp, Homo sapiens
ttccctgtcttttgg

SEQ ID NO: 424357 - DNA, 15 bp, Homo sapiens
attccctgtcttttg

SEQ ID NO: 424358 - DNA, 15 bp, Homo sapiens
tattccctgtctttt

SEQ ID NO: 424359 - DNA, 15 bp, Homo sapiens
ttattccctgtcttt

SEQ ID NO: 424360 - DNA, 15 bp, Homo sapiens
gttattccctgtctt

SEQ ID NO: 424361 - DNA, 15 bp, Homo sapiens
tgttattccctgtct

SEQ ID NO: 424362 - DNA, 15 bp, Homo sapiens
ttgttattccctgtc

SEQ ID NO: 424363 - DNA, 15 bp, Homo sapiens
tttgttattccctgt

SEQ ID NO: 424364 - DNA, 15 bp, Homo sapiens
atttgttattccctg

SEQ ID NO: 424365 - DNA, 15 bp, Homo sapiens
catttgttattccct

SEQ ID NO: 424366 - DNA, 15 bp, Homo sapiens
gcatttgttattccc

SEQ ID NO: 424367 - DNA, 15 bp, Homo sapiens
agcatttgttattcc

SEQ ID NO: 424368 - DNA, 15 bp, Homo sapiens
tagcatttgttattc

SEQ ID NO: 424369 - DNA, 15 bp, Homo sapiens
ctagcatttgttatt

SEQ ID NO: 424370 - DNA, 15 bp, Homo sapiens
actagcatttgttat

SEQ ID NO: 424371 - DNA, 15 bp, Homo sapiens
cactagcatttgtta

SEQ ID NO: 424372 - DNA, 15 bp, Homo sapiens
tcactagcatttgtt

SEQ ID NO: 424373 - DNA, 15 bp, Homo sapiens
ctcactagcatttgt

SEQ ID NO: 424374 - DNA, 15 bp, Homo sapiens
cctcactagcatttg

SEQ ID NO: 424375 - DNA, 15 bp, Homo sapiens
tcctcactagcattt

SEQ ID NO: 424376 - DNA, 15 bp, Homo sapiens
atcctcactagcatt

SEQ ID NO: 424377 - DNA, 15 bp, Homo sapiens
catcctcactagcat

SEQ ID NO: 424378 - DNA, 15 bp, Homo sapiens
acatcctcactagca

SEQ ID NO: 424379 - DNA, 15 bp, Homo sapiens
cacatcctcactagc

SEQ ID NO: 424380 - DNA, 15 bp, Homo sapiens
ccacatcctcactag

SEQ ID NO: 424381 - DNA, 15 bp, Homo sapiens
tccacatcctcacta

SEQ ID NO: 424382 - DNA, 15 bp, Homo sapiens
ctccacatcctcact

SEQ ID NO: 424383 - DNA, 15 bp, Homo sapiens
tctccacatcctcac

SEQ ID NO: 424384 - DNA, 15 bp, Homo sapiens
ttctccacatcctca

SEQ ID NO: 424385 - DNA, 15 bp, Homo sapiens
ttttctccacatcct

SEQ ID NO: 424386 - DNA, 15 bp, Homo sapiens
cttttctccacatcc

SEQ ID NO: 424387 - DNA, 15 bp, Homo sapiens
ccttttctccacatc

SEQ ID NO: 424388 - DNA, 15 bp, Homo sapiens
cccttttctccacat

SEQ ID NO: 424389 - DNA, 15 bp, Homo sapiens
gttcccttttctcca

SEQ ID NO: 424390 - DNA, 15 bp, Homo sapiens
agttcccttttctcc

SEQ ID NO: 424391 - DNA, 15 bp, Homo sapiens
gagttcccttttctc

SEQ ID NO: 424392 - DNA, 15 bp, Homo sapiens
agagttcccttttct

SEQ ID NO: 424393 - DNA, 15 bp, Homo sapiens
aagagttcccttttc

SEQ ID NO: 424394 - DNA, 15 bp, Homo sapiens
caagagttccctttt

SEQ ID NO: 424395 - DNA, 15 bp, Homo sapiens
acaagagttcccttt

SEQ ID NO: 424396 - DNA, 15 bp, Homo sapiens
tacaagagttccctt

SEQ ID NO: 424397 - DNA, 15 bp, Homo sapiens
gtacaagagttccct

SEQ ID NO: 424398 - DNA, 15 bp, Homo sapiens
tgtacaagagttccc

SEQ ID NO: 424399 - DNA, 15 bp, Homo sapiens
gtgtacaagagttcc

SEQ ID NO: 424400 - DNA, 15 bp, Homo sapiens
agtgtacaagagttc

SEQ ID NO: 424401 - DNA, 15 bp, Homo sapiens
cagtgtacaagagtt

SEQ ID NO: 424402 - DNA, 15 bp, Homo sapiens
acagtgtacaagagt

SEQ ID NO: 424403 - DNA, 15 bp, Homo sapiens
aacagtgtacaagag

SEQ ID NO: 424404 - DNA, 15 bp, Homo sapiens
caacagtgtacaaga

SEQ ID NO: 424405 - DNA, 15 bp, Homo sapiens
ccaacagtgtacaag

SEQ ID NO: 424406 - DNA, 15 bp, Homo sapiens
accaacagtgtacaa

SEQ ID NO: 424407 - DNA, 15 bp, Homo sapiens
caccaacagtgtaca

SEQ ID NO: 424408 - DNA, 15 bp, Homo sapiens
ccaccaacagtgtac

SEQ ID NO: 424409 - DNA, 15 bp, Homo sapiens
taatttacattccca

SEQ ID NO: 424410 - DNA, 15 bp, Homo sapiens
ctaatttacattccc

SEQ ID NO: 424411 - DNA, 15 bp, Homo sapiens
actaatttacattcc

SEQ ID NO: 424412 - DNA, 15 bp, Homo sapiens
tactaatttacattc

SEQ ID NO: 424413 - DNA, 15 bp, Homo sapiens
gtactaatttacatt

SEQ ID NO: 424414 - DNA, 15 bp, Homo sapiens
tgtactaatttacat

SEQ ID NO: 424415 - DNA, 15 bp, Homo sapiens
ttgtactaatttaca

SEQ ID NO: 424416 - DNA, 15 bp, Homo sapiens
gttgtactaatttac

SEQ ID NO: 424417 - DNA, 15 bp, Homo sapiens
ggttgtactaattta

SEQ ID NO: 424418 - DNA, 15 bp, Homo sapiens
cggttgtactaattt

SEQ ID NO: 424419 - DNA, 15 bp, Homo sapiens
acggttgtactaatt

SEQ ID NO: 424420 - DNA, 15 bp, Homo sapiens
aacggttgtactaat

SEQ ID NO: 424421 - DNA, 15 bp, Homo sapiens
taacggttgtactaa

SEQ ID NO: 424422 - DNA, 15 bp, Homo sapiens
ataacggttgtacta

SEQ ID NO: 424423 - DNA, 15 bp, Homo sapiens
cataacggttgtact

SEQ ID NO: 424424 - DNA, 15 bp, Homo sapiens
ccataacggttgtac

SEQ ID NO: 424425 - DNA, 15 bp, Homo sapiens
tccataacggttgta

SEQ ID NO: 424426 - DNA, 15 bp, Homo sapiens
ttccataacggttgt

SEQ ID NO: 424427 - DNA, 15 bp, Homo sapiens
tttccataacggttg

SEQ ID NO: 424428 - DNA, 15 bp, Homo sapiens
ttttccataacggtt

SEQ ID NO: 424429 - DNA, 15 bp, Homo sapiens
gttttccataacggt

SEQ ID NO: 424430 - DNA, 15 bp, Homo sapiens
tgttttccataacgg

SEQ ID NO: 424431 - DNA, 15 bp, Homo sapiens
ctgttttccataacg

SEQ ID NO: 424432 - DNA, 15 bp, Homo sapiens
actgttttccataac

SEQ ID NO: 424433 - DNA, 15 bp, Homo sapiens
aactgttttccataa

SEQ ID NO: 424434 - DNA, 15 bp, Homo sapiens
aaactgttttccata

SEQ ID NO: 424435 - DNA, 15 bp, Homo sapiens
caaactgttttccat

SEQ ID NO: 424436 - DNA, 15 bp, Homo sapiens
ccaaactgttttcca

SEQ ID NO: 424437 - DNA, 15 bp, Homo sapiens
tccaaactgttttcc

SEQ ID NO: 424438 - DNA, 15 bp, Homo sapiens
ctccaaactgttttc

SEQ ID NO: 424439 - DNA, 15 bp, Homo sapiens
actccaaactgtttt

SEQ ID NO: 424440 - DNA, 15 bp, Homo sapiens
aactccaaactgttt

SEQ ID NO: 424441 - DNA, 15 bp, Homo sapiens
aaactccaaactgtt

SEQ ID NO: 424442 - DNA, 15 bp, Homo sapiens
gaaactccaaactgt

SEQ ID NO: 424443 - DNA, 15 bp, Homo sapiens
ggaaactccaaactg

SEQ ID NO: 424444 - DNA, 15 bp, Homo sapiens
aggaaactccaaact

SEQ ID NO: 424445 - DNA, 15 bp, Homo sapiens
gaggaaactccaaac

SEQ ID NO: 424446 - DNA, 15 bp, Homo sapiens
tgaggaaactccaaa

SEQ ID NO: 424447 - DNA, 15 bp, Homo sapiens
ttgaggaaactccaa

SEQ ID NO: 424448 - DNA, 15 bp, Homo sapiens
tttgaggaaactcca

SEQ ID NO: 424449 - DNA, 15 bp, Homo sapiens
ttttgaggaaactcc

SEQ ID NO: 424450 - DNA, 15 bp, Homo sapiens
tttttgaggaaactc

SEQ ID NO: 424451 - DNA, 15 bp, Homo sapiens
ttttttgaggaaact

SEQ ID NO: 424452 - DNA, 15 bp, Homo sapiens
tttttttgaggaaac

SEQ ID NO: 424453 - DNA, 15 bp, Homo sapiens
atttttttgaggaaa

SEQ ID NO: 424454 - DNA, 15 bp, Homo sapiens
tatttttttgaggaa

SEQ ID NO: 424455 - DNA, 15 bp, Homo sapiens
atatttttttgagga

SEQ ID NO: 424456 - DNA, 15 bp, Homo sapiens
tatatttttttgagg

SEQ ID NO: 424457 - DNA, 15 bp, Homo sapiens
ttatatttttttgag

SEQ ID NO: 424458 - DNA, 15 bp, Homo sapiens
tttatatttttttga

SEQ ID NO: 424459 - DNA, 15 bp, Homo sapiens
atttatatttttttg

SEQ ID NO: 424460 - DNA, 15 bp, Homo sapiens
tatttatattttttt

SEQ ID NO: 424461 - DNA, 15 bp, Homo sapiens
ctatttatatttttt

SEQ ID NO: 424462 - DNA, 15 bp, Homo sapiens
tctatttatattttt

SEQ ID NO: 424463 - DNA, 15 bp, Homo sapiens
ttctatttatatttt

SEQ ID NO: 424464 - DNA, 15 bp, Homo sapiens
gttctatttatattt

SEQ ID NO: 424465 - DNA, 15 bp, Homo sapiens
agttctatttatatt

SEQ ID NO: 424466 - DNA, 15 bp, Homo sapiens
tagttctatttatat

SEQ ID NO: 424467 - DNA, 15 bp, Homo sapiens
gtagttctatttata

SEQ ID NO: 424468 - DNA, 15 bp, Homo sapiens
ggtagttctatttat

SEQ ID NO: 424469 - DNA, 15 bp, Homo sapiens
tggtagttctattta

SEQ ID NO: 424470 - DNA, 15 bp, Homo sapiens
atggtagttctattt

SEQ ID NO: 424471 - DNA, 15 bp, Homo sapiens
tatggtagttctatt

SEQ ID NO: 424472 - DNA, 15 bp, Homo sapiens
atatggtagttctat

SEQ ID NO: 424473 - DNA, 15 bp, Homo sapiens
tatatggtagttcta

SEQ ID NO: 424474 - DNA, 15 bp, Homo sapiens
ttatatggtagttct

SEQ ID NO: 424475 - DNA, 15 bp, Homo sapiens
attatatggtagttc

SEQ ID NO: 424476 - DNA, 15 bp, Homo sapiens
gattatatggtagtt

SEQ ID NO: 424477 - DNA, 15 bp, Homo sapiens
ggattatatggtagt

SEQ ID NO: 424478 - DNA, 15 bp, Homo sapiens
tggattatatggtag

SEQ ID NO: 424479 - DNA, 15 bp, Homo sapiens
ctggattatatggta

SEQ ID NO: 424480 - DNA, 15 bp, Homo sapiens
gctggattatatggt

SEQ ID NO: 424481 - DNA, 15 bp, Homo sapiens
tgctggattatatgg

SEQ ID NO: 424482 - DNA, 15 bp, Homo sapiens
ttgctggattatatg

SEQ ID NO: 424483 - DNA, 15 bp, Homo sapiens
attgctggattatat

SEQ ID NO: 424484 - DNA, 15 bp, Homo sapiens
gattgctggattata

SEQ ID NO: 424485 - DNA, 15 bp, Homo sapiens
ggattgctggattat

SEQ ID NO: 424486 - DNA, 15 bp, Homo sapiens
gggattgctggatta

SEQ ID NO: 424487 - DNA, 15 bp, Homo sapiens
tgggattgctggatt

SEQ ID NO: 424488 - DNA, 15 bp, Homo sapiens
gtgggattgctggat

SEQ ID NO: 424489 - DNA, 15 bp, Homo sapiens
agtgggattgctgga

SEQ ID NO: 424490 - DNA, 15 bp, Homo sapiens
cagtgggattgctgg

SEQ ID NO: 424491 - DNA, 15 bp, Homo sapiens
gcagtgggattgctg

SEQ ID NO: 424492 - DNA, 15 bp, Homo sapiens
agcagtgggattgct

SEQ ID NO: 424493 - DNA, 15 bp, Homo sapiens
tagcagtgggattgc

SEQ ID NO: 424494 - DNA, 15 bp, Homo sapiens
ctagcagtgggattg

SEQ ID NO: 424495 - DNA, 15 bp, Homo sapiens
tctagcagtgggatt

SEQ ID NO: 424496 - DNA, 15 bp, Homo sapiens
atctagcagtgggat

SEQ ID NO: 424497 - DNA, 15 bp, Homo sapiens
tatctagcagtggga

SEQ ID NO: 424498 - DNA, 15 bp, Homo sapiens
ttatctagcagtggg

SEQ ID NO: 424499 - DNA, 15 bp, Homo sapiens
tttatctagcagtgg

SEQ ID NO: 424500 - DNA, 15 bp, Homo sapiens
gtttatctagcagtg

SEQ ID NO: 424501 - DNA, 15 bp, Homo sapiens
ggtttatctagcagt

SEQ ID NO: 424502 - DNA, 15 bp, Homo sapiens
gggtttatctagcag

SEQ ID NO: 424503 - DNA, 15 bp, Homo sapiens
tgggtttatctagca

SEQ ID NO: 424504 - DNA, 15 bp, Homo sapiens
ttgggtttatctagc

SEQ ID NO: 424505 - DNA, 15 bp, Homo sapiens
tttgggtttatctag

SEQ ID NO: 424506 - DNA, 15 bp, Homo sapiens
ttttgggtttatcta

SEQ ID NO: 424507 - DNA, 15 bp, Homo sapiens
cttttgggtttatct

SEQ ID NO: 424508 - DNA, 15 bp, Homo sapiens
tcttttgggtttatc

SEQ ID NO: 424509 - DNA, 15 bp, Homo sapiens
ttcttttgggtttat

SEQ ID NO: 424510 - DNA, 15 bp, Homo sapiens
attcttttgggttta

SEQ ID NO: 424511 - DNA, 15 bp, Homo sapiens
cattcttttgggttt

SEQ ID NO: 424512 - DNA, 15 bp, Homo sapiens
gcattcttttgggtt

SEQ ID NO: 424513 - DNA, 15 bp, Homo sapiens
tgcattcttttgggt

SEQ ID NO: 424514 - DNA, 15 bp, Homo sapiens
ttgcattcttttggg

SEQ ID NO: 424515 - DNA, 15 bp, Homo sapiens
attgcattcttttgg

SEQ ID NO: 424516 - DNA, 15 bp, Homo sapiens
aattgcattcttttg

SEQ ID NO: 424517 - DNA, 15 bp, Homo sapiens
gaattgcattctttt

SEQ ID NO: 424518 - DNA, 15 bp, Homo sapiens
tgaattgcattcttt

SEQ ID NO: 424519 - DNA, 15 bp, Homo sapiens
ctgaattgcattctt

SEQ ID NO: 424520 - DNA, 15 bp, Homo sapiens
actgaattgcattct

SEQ ID NO: 424521 - DNA, 15 bp, Homo sapiens
tactgaattgcattc

SEQ ID NO: 424522 - DNA, 15 bp, Homo sapiens
atactgaattgcatt

SEQ ID NO: 424523 - DNA, 15 bp, Homo sapiens
catactgaattgcat

SEQ ID NO: 424524 - DNA, 15 bp, Homo sapiens
acatactgaattgca

SEQ ID NO: 424525 - DNA, 15 bp, Homo sapiens
gacatactgaattgc

SEQ ID NO: 424526 - DNA, 15 bp, Homo sapiens
tgacatactgaattg

SEQ ID NO: 424527 - DNA, 15 bp, Homo sapiens
ttgacatactgaatt

SEQ ID NO: 424528 - DNA, 15 bp, Homo sapiens
tttgacatactgaat

SEQ ID NO: 424529 - DNA, 15 bp, Homo sapiens
ctttgacatactgaa

SEQ ID NO: 424530 - DNA, 15 bp, Homo sapiens
tctttgacatactga

SEQ ID NO: 424531 - DNA, 15 bp, Homo sapiens
gtctttgacatactg

SEQ ID NO: 424532 - DNA, 15 bp, Homo sapiens
tgtctttgacatact

SEQ ID NO: 424533 - DNA, 15 bp, Homo sapiens
atgtctttgacatac

SEQ ID NO: 424534 - DNA, 15 bp, Homo sapiens
tatgtctttgacata

SEQ ID NO: 424535 - DNA, 15 bp, Homo sapiens
gtatgtctttgacat

SEQ ID NO: 424536 - DNA, 15 bp, Homo sapiens
ggtatgtctttgaca

SEQ ID NO: 424537 - DNA, 15 bp, Homo sapiens
aggtatgtctttgac

SEQ ID NO: 424538 - DNA, 15 bp, Homo sapiens
caggtatgtctttga

SEQ ID NO: 424539 - DNA, 15 bp, Homo sapiens
acaggtatgtctttg

SEQ ID NO: 424540 - DNA, 15 bp, Homo sapiens
tacaggtatgtcttt

SEQ ID NO: 424541 - DNA, 15 bp, Homo sapiens
gtacaggtatgtctt

SEQ ID NO: 424542 - DNA, 15 bp, Homo sapiens
agtacaggtatgtct

SEQ ID NO: 424543 - DNA, 15 bp, Homo sapiens
tagtacaggtatgtc

SEQ ID NO: 424544 - DNA, 15 bp, Homo sapiens
gtagtacaggtatgt

SEQ ID NO: 424545 - DNA, 15 bp, Homo sapiens
ggtagtacaggtatg

SEQ ID NO: 424546 - DNA, 15 bp, Homo sapiens
tggtagtacaggtat

SEQ ID NO: 424547 - DNA, 15 bp, Homo sapiens
gtggtagtacaggta

SEQ ID NO: 424548 - DNA, 15 bp, Homo sapiens
cgtggtagtacaggt

SEQ ID NO: 424549 - DNA, 15 bp, Homo sapiens
acgtggtagtacagg

SEQ ID NO: 424550 - DNA, 15 bp, Homo sapiens
aacgtggtagtacag

SEQ ID NO: 424551 - DNA, 15 bp, Homo sapiens
aaacgtggtagtaca

SEQ ID NO: 424552 - DNA, 15 bp, Homo sapiens
caaacgtggtagtac

SEQ ID NO: 424553 - DNA, 15 bp, Homo sapiens
acaaacgtggtagta

SEQ ID NO: 424554 - DNA, 15 bp, Homo sapiens
aacaaacgtggtagt

SEQ ID NO: 424555 - DNA, 15 bp, Homo sapiens
caacaaacgtggtag

SEQ ID NO: 424556 - DNA, 15 bp, Homo sapiens
gcaacaaacgtggta

SEQ ID NO: 424557 - DNA, 15 bp, Homo sapiens
tgcaacaaacgtggt

SEQ ID NO: 424558 - DNA, 15 bp, Homo sapiens
ctgcaacaaacgtgg

SEQ ID NO: 424559 - DNA, 15 bp, Homo sapiens
gctgcaacaaacgtg

SEQ ID NO: 424560 - DNA, 15 bp, Homo sapiens
tgctgcaacaaacgt

SEQ ID NO: 424561 - DNA, 15 bp, Homo sapiens
gtgctgcaacaaacg

SEQ ID NO: 424562 - DNA, 15 bp, Homo sapiens
agtgctgcaacaaac

SEQ ID NO: 424563 - DNA, 15 bp, Homo sapiens
tagtgctgcaacaaa

SEQ ID NO: 424564 - DNA, 15 bp, Homo sapiens
atagtgctgcaacaa

SEQ ID NO: 424565 - DNA, 15 bp, Homo sapiens
aatagtgctgcaaca

SEQ ID NO: 424566 - DNA, 15 bp, Homo sapiens
gaatagtgctgcaac

SEQ ID NO: 424567 - DNA, 15 bp, Homo sapiens
attgtgaatagtgct

SEQ ID NO: 424568 - DNA, 15 bp, Homo sapiens
tattgtgaatagtgc

SEQ ID NO: 424569 - DNA, 15 bp, Homo sapiens
ctattgtgaatagtg

SEQ ID NO: 424570 - DNA, 15 bp, Homo sapiens
gctattgtgaatagt

SEQ ID NO: 424571 - DNA, 15 bp, Homo sapiens
ggctattgtgaatag

SEQ ID NO: 424572 - DNA, 15 bp, Homo sapiens
tggctattgtgaata

SEQ ID NO: 424573 - DNA, 15 bp, Homo sapiens
ttggctattgtgaat

SEQ ID NO: 424574 - DNA, 15 bp, Homo sapiens
cttggctattgtgaa

SEQ ID NO: 424575 - DNA, 15 bp, Homo sapiens
tcttggctattgtga

SEQ ID NO: 424576 - DNA, 15 bp, Homo sapiens
atcttggctattgtg

SEQ ID NO: 424577 - DNA, 15 bp, Homo sapiens
aatcttggctattgt

SEQ ID NO: 424578 - DNA, 15 bp, Homo sapiens
aaatcttggctattg

SEQ ID NO: 424579 - DNA, 15 bp, Homo sapiens
caaatcttggctatt

SEQ ID NO: 424580 - DNA, 15 bp, Homo sapiens
ccaaatcttggctat

SEQ ID NO: 424581 - DNA, 15 bp, Homo sapiens
tccaaatcttggcta

SEQ ID NO: 424582 - DNA, 15 bp, Homo sapiens
ttccaaatcttggct

SEQ ID NO: 424583 - DNA, 15 bp, Homo sapiens
cttccaaatcttggc

SEQ ID NO: 424584 - DNA, 15 bp, Homo sapiens
gcttccaaatcttgg

SEQ ID NO: 424585 - DNA, 15 bp, Homo sapiens
tgcttccaaatcttg

SEQ ID NO: 424586 - DNA, 15 bp, Homo sapiens
ttgcttccaaatctt

SEQ ID NO: 424587 - DNA, 15 bp, Homo sapiens
gttgcttccaaatct

SEQ ID NO: 424588 - DNA, 15 bp, Homo sapiens
agttgcttccaaatc

SEQ ID NO: 424589 - DNA, 15 bp, Homo sapiens
aagttgcttccaaat

SEQ ID NO: 424590 - DNA, 15 bp, Homo sapiens
taagttgcttccaaa

SEQ ID NO: 424591 - DNA, 15 bp, Homo sapiens
ttaagttgcttccaa

SEQ ID NO: 424592 - DNA, 15 bp, Homo sapiens
cttaagttgcttcca

SEQ ID NO: 424593 - DNA, 15 bp, Homo sapiens
acttaagttgcttcc

SEQ ID NO: 424594 - DNA, 15 bp, Homo sapiens
cacttaagttgcttc

SEQ ID NO: 424595 - DNA, 15 bp, Homo sapiens
acacttaagttgctt

SEQ ID NO: 424596 - DNA, 15 bp, Homo sapiens
gacacttaagttgct

SEQ ID NO: 424597 - DNA, 15 bp, Homo sapiens
ggacacttaagttgc

SEQ ID NO: 424598 - DNA, 15 bp, Homo sapiens
tggacacttaagttg

SEQ ID NO: 424599 - DNA, 15 bp, Homo sapiens
atggacacttaagtt

SEQ ID NO: 424600 - DNA, 15 bp, Homo sapiens
gatggacacttaagt

SEQ ID NO: 424601 - DNA, 15 bp, Homo sapiens
tgatggacacttaag

SEQ ID NO: 424602 - DNA, 15 bp, Homo sapiens
ttgatggacacttaa

SEQ ID NO: 424603 - DNA, 15 bp, Homo sapiens
gttgatggacactta

SEQ ID NO: 424604 - DNA, 15 bp, Homo sapiens
tgttgatggacactt

SEQ ID NO: 424605 - DNA, 15 bp, Homo sapiens
ctgttgatggacact

SEQ ID NO: 424606 - DNA, 15 bp, Homo sapiens
tctgttgatggacac

SEQ ID NO: 424607 - DNA, 15 bp, Homo sapiens
atctgttgatggaca

SEQ ID NO: 424608 - DNA, 15 bp, Homo sapiens
catctgttgatggac

SEQ ID NO: 424609 - DNA, 15 bp, Homo sapiens
tcatctgttgatgga

SEQ ID NO: 424610 - DNA, 15 bp, Homo sapiens
ttcatctgttgatgg

SEQ ID NO: 424611 - DNA, 15 bp, Homo sapiens
attcatctgttgatg

SEQ ID NO: 424612 - DNA, 15 bp, Homo sapiens
tattcatctgttgat

SEQ ID NO: 424613 - DNA, 15 bp, Homo sapiens
ctattcatctgttga

SEQ ID NO: 424614 - DNA, 15 bp, Homo sapiens
tctattcatctgttg

SEQ ID NO: 424615 - DNA, 15 bp, Homo sapiens
atctattcatctgtt

SEQ ID NO: 424616 - DNA, 15 bp, Homo sapiens
tatctattcatctgt

SEQ ID NO: 424617 - DNA, 15 bp, Homo sapiens
ttatctattcatctg

SEQ ID NO: 424618 - DNA, 15 bp, Homo sapiens
tttatctattcatct

SEQ ID NO: 424619 - DNA, 15 bp, Homo sapiens
ctttatctattcatc

SEQ ID NO: 424620 - DNA, 15 bp, Homo sapiens
tctttatctattcat

SEQ ID NO: 424621 - DNA, 15 bp, Homo sapiens
ttctttatctattca

SEQ ID NO: 424622 - DNA, 15 bp, Homo sapiens
tttctttatctattc

SEQ ID NO: 424623 - DNA, 15 bp, Homo sapiens
ttttctttatctatt

SEQ ID NO: 424624 - DNA, 15 bp, Homo sapiens
attttctttatctat

SEQ ID NO: 424625 - DNA, 15 bp, Homo sapiens
tgtgtatatgtacca

SEQ ID NO: 424626 - DNA, 15 bp, Homo sapiens
ttgtgtatatgtacc

SEQ ID NO: 424627 - DNA, 15 bp, Homo sapiens
attgtgtatatgtac

SEQ ID NO: 424628 - DNA, 15 bp, Homo sapiens
cattgtgtatatgta

SEQ ID NO: 424629 - DNA, 15 bp, Homo sapiens
tcattgtgtatatgt

SEQ ID NO: 424630 - DNA, 15 bp, Homo sapiens
ttcattgtgtatatg

SEQ ID NO: 424631 - DNA, 15 bp, Homo sapiens
cttcattgtgtatat

SEQ ID NO: 424632 - DNA, 15 bp, Homo sapiens
acttcattgtgtata

SEQ ID NO: 424633 - DNA, 15 bp, Homo sapiens
tacttcattgtgtat

SEQ ID NO: 424634 - DNA, 15 bp, Homo sapiens
gtacttcattgtgta

SEQ ID NO: 424635 - DNA, 15 bp, Homo sapiens
agtacttcattgtgt

SEQ ID NO: 424636 - DNA, 15 bp, Homo sapiens
tagtacttcattgtg

SEQ ID NO: 424637 - DNA, 15 bp, Homo sapiens
atagtacttcattgt

SEQ ID NO: 424638 - DNA, 15 bp, Homo sapiens
aatagtacttcattg

SEQ ID NO: 424639 - DNA, 15 bp, Homo sapiens
gaatagtacttcatt

SEQ ID NO: 424640 - DNA, 15 bp, Homo sapiens
tgaatagtacttcat

SEQ ID NO: 424641 - DNA, 15 bp, Homo sapiens
ctgaatagtacttca

SEQ ID NO: 424642 - DNA, 15 bp, Homo sapiens
gctgaatagtacttc

SEQ ID NO: 424643 - DNA, 15 bp, Homo sapiens
ggctgaatagtactt

SEQ ID NO: 424644 - DNA, 15 bp, Homo sapiens
tggctgaatagtact

SEQ ID NO: 424645 - DNA, 15 bp, Homo sapiens
atggctgaatagtac

SEQ ID NO: 424646 - DNA, 15 bp, Homo sapiens
tatggctgaatagta

SEQ ID NO: 424647 - DNA, 15 bp, Homo sapiens
ttatggctgaatagt

SEQ ID NO: 424648 - DNA, 15 bp, Homo sapiens
tttatggctgaatag

SEQ ID NO: 424649 - DNA, 15 bp, Homo sapiens
ttttatggctgaata

SEQ ID NO: 424650 - DNA, 15 bp, Homo sapiens
tttttatggctgaat

SEQ ID NO: 424651 - DNA, 15 bp, Homo sapiens
ttttttatggctgaa

SEQ ID NO: 424652 - DNA, 15 bp, Homo sapiens
tttttttatggctga

SEQ ID NO: 424653 - DNA, 15 bp, Homo sapiens
atttttttatggctg

SEQ ID NO: 424654 - DNA, 15 bp, Homo sapiens
tatttttttatggct

SEQ ID NO: 424655 - DNA, 15 bp, Homo sapiens
ctatttttttatggc

SEQ ID NO: 424656 - DNA, 15 bp, Homo sapiens
tctatttttttatgg

SEQ ID NO: 424657 - DNA, 15 bp, Homo sapiens
atctatttttttatg

SEQ ID NO: 424658 - DNA, 15 bp, Homo sapiens
gatctatttttttat

SEQ ID NO: 424659 - DNA, 15 bp, Homo sapiens
ggatctattttttta

SEQ ID NO: 424660 - DNA, 15 bp, Homo sapiens
aggatctattttttt

SEQ ID NO: 424661 - DNA, 15 bp, Homo sapiens
caggatctatttttt

SEQ ID NO: 424662 - DNA, 15 bp, Homo sapiens
acaggatctattttt

SEQ ID NO: 424663 - DNA, 15 bp, Homo sapiens
gacaggatctatttt

SEQ ID NO: 424664 - DNA, 15 bp, Homo sapiens
tgacaggatctattt

SEQ ID NO: 424665 - DNA, 15 bp, Homo sapiens
atgacaggatctatt

SEQ ID NO: 424666 - DNA, 15 bp, Homo sapiens
aatgacaggatctat

SEQ ID NO: 424667 - DNA, 15 bp, Homo sapiens
aaatgacaggatcta

SEQ ID NO: 424668 - DNA, 15 bp, Homo sapiens
taaatgacaggatct

SEQ ID NO: 424669 - DNA, 15 bp, Homo sapiens
ataaatgacaggatc

SEQ ID NO: 424670 - DNA, 15 bp, Homo sapiens
aataaatgacaggat

SEQ ID NO: 424671 - DNA, 15 bp, Homo sapiens
gaataaatgacagga

SEQ ID NO: 424672 - DNA, 15 bp, Homo sapiens
ggaataaatgacagg

SEQ ID NO: 424673 - DNA, 15 bp, Homo sapiens
tggaataaatgacag

SEQ ID NO: 424674 - DNA, 15 bp, Homo sapiens
ttggaataaatgaca

SEQ ID NO: 424675 - DNA, 15 bp, Homo sapiens
gttggaataaatgac

SEQ ID NO: 424676 - DNA, 15 bp, Homo sapiens
tgttggaataaatga

SEQ ID NO: 424677 - DNA, 15 bp, Homo sapiens
atgttggaataaatg

SEQ ID NO: 424678 - DNA, 15 bp, Homo sapiens
tatgttggaataaat

SEQ ID NO: 424679 - DNA, 15 bp, Homo sapiens
ctatgttggaataaa

SEQ ID NO: 424680 - DNA, 15 bp, Homo sapiens
tctatgttggaataa

SEQ ID NO: 424681 - DNA, 15 bp, Homo sapiens
atctatgttggaata

SEQ ID NO: 424682 - DNA, 15 bp, Homo sapiens
tatctatgttggaat

SEQ ID NO: 424683 - DNA, 15 bp, Homo sapiens
ctatctatgttggaa

SEQ ID NO: 424684 - DNA, 15 bp, Homo sapiens
tctatctatgttgga

SEQ ID NO: 424685 - DNA, 15 bp, Homo sapiens
ttctatctatgttgg

SEQ ID NO: 424686 - DNA, 15 bp, Homo sapiens
gttctatctatgttg

SEQ ID NO: 424687 - DNA, 15 bp, Homo sapiens
agttctatctatgtt

SEQ ID NO: 424688 - DNA, 15 bp, Homo sapiens
aagttctatctatgt

SEQ ID NO: 424689 - DNA, 15 bp, Homo sapiens
caagttctatctatg

SEQ ID NO: 424690 - DNA, 15 bp, Homo sapiens
tcaagttctatctat

SEQ ID NO: 424691 - DNA, 15 bp, Homo sapiens
ctcaagttctatcta

SEQ ID NO: 424692 - DNA, 15 bp, Homo sapiens
cctcaagttctatct

SEQ ID NO: 424693 - DNA, 15 bp, Homo sapiens
acctcaagttctatc

SEQ ID NO: 424694 - DNA, 15 bp, Homo sapiens
gacctcaagttctat

SEQ ID NO: 424695 - DNA, 15 bp, Homo sapiens
tgacctcaagttcta

SEQ ID NO: 424696 - DNA, 15 bp, Homo sapiens
atgacctcaagttct

SEQ ID NO: 424697 - DNA, 15 bp, Homo sapiens
aatgacctcaagttc

SEQ ID NO: 424698 - DNA, 15 bp, Homo sapiens
taatgacctcaagtt

SEQ ID NO: 424699 - DNA, 15 bp, Homo sapiens
ataatgacctcaagt

SEQ ID NO: 424700 - DNA, 15 bp, Homo sapiens
tataatgacctcaag

SEQ ID NO: 424701 - DNA, 15 bp, Homo sapiens
atataatgacctcaa

SEQ ID NO: 424702 - DNA, 15 bp, Homo sapiens
aatataatgacctca

SEQ ID NO: 424703 - DNA, 15 bp, Homo sapiens
taatataatgacctc

SEQ ID NO: 424704 - DNA, 15 bp, Homo sapiens
gtaatataatgacct

SEQ ID NO: 424705 - DNA, 15 bp, Homo sapiens
tgtaatataatgacc

SEQ ID NO: 424706 - DNA, 15 bp, Homo sapiens
atgtaatataatgac

SEQ ID NO: 424707 - DNA, 15 bp, Homo sapiens
catgtaatataatga

SEQ ID NO: 424708 - DNA, 15 bp, Homo sapiens
tcatgtaatataatg

SEQ ID NO: 424709 - DNA, 15 bp, Homo sapiens
ttcatgtaatataat

SEQ ID NO: 424710 - DNA, 15 bp, Homo sapiens
tttcatgtaatataa

SEQ ID NO: 424711 - DNA, 15 bp, Homo sapiens
atttcatgtaatata

SEQ ID NO: 424712 - DNA, 15 bp, Homo sapiens
tatttcatgtaatat

SEQ ID NO: 424713 - DNA, 15 bp, Homo sapiens
ttatttcatgtaata

SEQ ID NO: 424714 - DNA, 15 bp, Homo sapiens
cttatttcatgtaat

SEQ ID NO: 424715 - DNA, 15 bp, Homo sapiens
gcttatttcatgtaa

SEQ ID NO: 424716 - DNA, 15 bp, Homo sapiens
ggcttatttcatgta

SEQ ID NO: 424717 - DNA, 15 bp, Homo sapiens
tggcttatttcatgt

SEQ ID NO: 424718 - DNA, 15 bp, Homo sapiens
ctggcttatttcatg

SEQ ID NO: 424719 - DNA, 15 bp, Homo sapiens
cctggcttatttcat

SEQ ID NO: 424720 - DNA, 15 bp, Homo sapiens
gcctggcttatttca

SEQ ID NO: 424721 - DNA, 15 bp, Homo sapiens
tgcctggcttatttc

SEQ ID NO: 424722 - DNA, 15 bp, Homo sapiens
gtgcctggcttattt

SEQ ID NO: 424723 - DNA, 15 bp, Homo sapiens
tgtgcctggcttatt

SEQ ID NO: 424724 - DNA, 15 bp, Homo sapiens
ctgtgcctggcttat

SEQ ID NO: 424725 - DNA, 15 bp, Homo sapiens
tctgtgcctggctta

SEQ ID NO: 424726 - DNA, 15 bp, Homo sapiens
ttctgtgcctggctt

SEQ ID NO: 424727 - DNA, 15 bp, Homo sapiens
tttctgtgcctggct

SEQ ID NO: 424728 - DNA, 15 bp, Homo sapiens
ctttctgtgcctggc

SEQ ID NO: 424729 - DNA, 15 bp, Homo sapiens
tctttctgtgcctgg

SEQ ID NO: 424730 - DNA, 15 bp, Homo sapiens
gtctttctgtgcctg

SEQ ID NO: 424731 - DNA, 15 bp, Homo sapiens
tgtctttctgtgcct

SEQ ID NO: 424732 - DNA, 15 bp, Homo sapiens
ttgtctttctgtgcc

SEQ ID NO: 424733 - DNA, 15 bp, Homo sapiens
tttgtctttctgtgc

SEQ ID NO: 424734 - DNA, 15 bp, Homo sapiens
ctttgtctttctgtg

SEQ ID NO: 424735 - DNA, 15 bp, Homo sapiens
actttgtctttctgt

SEQ ID NO: 424736 - DNA, 15 bp, Homo sapiens
aactttgtctttctg

SEQ ID NO: 424737 - DNA, 15 bp, Homo sapiens
gaactttgtctttct

SEQ ID NO: 424738 - DNA, 15 bp, Homo sapiens
tgaactttgtctttc

SEQ ID NO: 424739 - DNA, 15 bp, Homo sapiens
gtgaactttgtcttt

SEQ ID NO: 424740 - DNA, 15 bp, Homo sapiens
tgtgaactttgtctt

SEQ ID NO: 424741 - DNA, 15 bp, Homo sapiens
atgtgaactttgtct

SEQ ID NO: 424742 - DNA, 15 bp, Homo sapiens
catgtgaactttgtc

SEQ ID NO: 424743 - DNA, 15 bp, Homo sapiens
ccatgtgaactttgt

SEQ ID NO: 424744 - DNA, 15 bp, Homo sapiens
accatgtgaactttg

SEQ ID NO: 424745 - DNA, 15 bp, Homo sapiens
gaccatgtgaacttt

SEQ ID NO: 424746 - DNA, 15 bp, Homo sapiens
agaccatgtgaactt

SEQ ID NO: 424747 - DNA, 15 bp, Homo sapiens
gagaccatgtgaact

SEQ ID NO: 424748 - DNA, 15 bp, Homo sapiens
tgagaccatgtgaac

SEQ ID NO: 424749 - DNA, 15 bp, Homo sapiens
gtgagaccatgtgaa

SEQ ID NO: 424750 - DNA, 15 bp, Homo sapiens
agtgagaccatgtga

SEQ ID NO: 424751 - DNA, 15 bp, Homo sapiens
gagtgagaccatgtg

SEQ ID NO: 424752 - DNA, 15 bp, Homo sapiens
tgagtgagaccatgt

SEQ ID NO: 424753 - DNA, 15 bp, Homo sapiens
atgagtgagaccatg

SEQ ID NO: 424754 - DNA, 15 bp, Homo sapiens
aatgagtgagaccat

SEQ ID NO: 424755 - DNA, 15 bp, Homo sapiens
aaatgagtgagacca

SEQ ID NO: 424756 - DNA, 15 bp, Homo sapiens
caaatgagtgagacc

SEQ ID NO: 424757 - DNA, 15 bp, Homo sapiens
acaaatgagtgagac

SEQ ID NO: 424758 - DNA, 15 bp, Homo sapiens
cacaaatgagtgaga

SEQ ID NO: 424759 - DNA, 15 bp, Homo sapiens
ccacaaatgagtgag

SEQ ID NO: 424760 - DNA, 15 bp, Homo sapiens
tccacaaatgagtga

SEQ ID NO: 424761 - DNA, 15 bp, Homo sapiens
ttccacaaatgagtg

SEQ ID NO: 424762 - DNA, 15 bp, Homo sapiens
cttccacaaatgagt

SEQ ID NO: 424763 - DNA, 15 bp, Homo sapiens
gcttccacaaatgag

SEQ ID NO: 424764 - DNA, 15 bp, Homo sapiens
agcttccacaaatga

SEQ ID NO: 424765 - DNA, 15 bp, Homo sapiens
tagcttccacaaatg

SEQ ID NO: 424766 - DNA, 15 bp, Homo sapiens
ttagcttccacaaat

SEQ ID NO: 424767 - DNA, 15 bp, Homo sapiens
tttagcttccacaaa

SEQ ID NO: 424768 - DNA, 15 bp, Homo sapiens
ttttagcttccacaa

SEQ ID NO: 424769 - DNA, 15 bp, Homo sapiens
cttttagcttccaca

SEQ ID NO: 424770 - DNA, 15 bp, Homo sapiens
acttttagcttccac

SEQ ID NO: 424771 - DNA, 15 bp, Homo sapiens
aacttttagcttcca

SEQ ID NO: 424772 - DNA, 15 bp, Homo sapiens
taacttttagcttcc

SEQ ID NO: 424773 - DNA, 15 bp, Homo sapiens
ttaacttttagcttc

SEQ ID NO: 424774 - DNA, 15 bp, Homo sapiens
tttaacttttagctt

SEQ ID NO: 424775 - DNA, 15 bp, Homo sapiens
ttttaacttttagct

SEQ ID NO: 424776 - DNA, 15 bp, Homo sapiens
gttttaacttttagc

SEQ ID NO: 424777 - DNA, 15 bp, Homo sapiens
tgttttaacttttag

SEQ ID NO: 424778 - DNA, 15 bp, Homo sapiens
ttgttttaactttta

SEQ ID NO: 424779 - DNA, 15 bp, Homo sapiens
attgttttaactttt

SEQ ID NO: 424780 - DNA, 15 bp, Homo sapiens
aattgttttaacttt

SEQ ID NO: 424781 - DNA, 15 bp, Homo sapiens
caattgttttaactt

SEQ ID NO: 424782 - DNA, 15 bp, Homo sapiens
tcaattgttttaact

SEQ ID NO: 424783 - DNA, 15 bp, Homo sapiens
ttcaattgttttaac

SEQ ID NO: 424784 - DNA, 15 bp, Homo sapiens
gttcaattgttttaa

SEQ ID NO: 424785 - DNA, 15 bp, Homo sapiens
agttcaattgtttta

SEQ ID NO: 424786 - DNA, 15 bp, Homo sapiens
gagttcaattgtttt

SEQ ID NO: 424787 - DNA, 15 bp, Homo sapiens
tgagttcaattgttt

SEQ ID NO: 424788 - DNA, 15 bp, Homo sapiens
atgagttcaattgtt

SEQ ID NO: 424789 - DNA, 15 bp, Homo sapiens
catgagttcaattgt

SEQ ID NO: 424790 - DNA, 15 bp, Homo sapiens
ccatgagttcaattg

SEQ ID NO: 424791 - DNA, 15 bp, Homo sapiens
tccatgagttcaatt

SEQ ID NO: 424792 - DNA, 15 bp, Homo sapiens
ctccatgagttcaat

SEQ ID NO: 424793 - DNA, 15 bp, Homo sapiens
tctccatgagttcaa

SEQ ID NO: 424794 - DNA, 15 bp, Homo sapiens
atctccatgagttca

SEQ ID NO: 424795 - DNA, 15 bp, Homo sapiens
tatctccatgagttc

SEQ ID NO: 424796 - DNA, 15 bp, Homo sapiens
ctatctccatgagtt

SEQ ID NO: 424797 - DNA, 15 bp, Homo sapiens
tctatctccatgagt

SEQ ID NO: 424798 - DNA, 15 bp, Homo sapiens
ttctatctccatgag

SEQ ID NO: 424799 - DNA, 15 bp, Homo sapiens
tttctatctccatga

SEQ ID NO: 424800 - DNA, 15 bp, Homo sapiens
ctttctatctccatg

SEQ ID NO: 424801 - DNA, 15 bp, Homo sapiens
actttctatctccat

SEQ ID NO: 424802 - DNA, 15 bp, Homo sapiens
tactttctatctcca

SEQ ID NO: 424803 - DNA, 15 bp, Homo sapiens
ctactttctatctcc

SEQ ID NO: 424804 - DNA, 15 bp, Homo sapiens
tctactttctatctc

SEQ ID NO: 424805 - DNA, 15 bp, Homo sapiens
ttctactttctatct

SEQ ID NO: 424806 - DNA, 15 bp, Homo sapiens
cttctactttctatc

SEQ ID NO: 424807 - DNA, 15 bp, Homo sapiens
ccttctactttctat

SEQ ID NO: 424808 - DNA, 15 bp, Homo sapiens
tccttctactttcta

SEQ ID NO: 424809 - DNA, 15 bp, Homo sapiens
atccttctactttct

SEQ ID NO: 424810 - DNA, 15 bp, Homo sapiens
catccttctactttc

SEQ ID NO: 424811 - DNA, 15 bp, Homo sapiens
ccatccttctacttt

SEQ ID NO: 424812 - DNA, 15 bp, Homo sapiens
accatccttctactt

SEQ ID NO: 424813 - DNA, 15 bp, Homo sapiens
aaccatccttctact

SEQ ID NO: 424814 - DNA, 15 bp, Homo sapiens
taaccatccttctac

SEQ ID NO: 424815 - DNA, 15 bp, Homo sapiens
gtaaccatccttcta

SEQ ID NO: 424816 - DNA, 15 bp, Homo sapiens
ggtaaccatccttct

SEQ ID NO: 424817 - DNA, 15 bp, Homo sapiens
tggtaaccatccttc

SEQ ID NO: 424818 - DNA, 15 bp, Homo sapiens
ctggtaaccatcctt

SEQ ID NO: 424819 - DNA, 15 bp, Homo sapiens
tctggtaaccatcct

SEQ ID NO: 424820 - DNA, 15 bp, Homo sapiens
ctctggtaaccatcc

SEQ ID NO: 424821 - DNA, 15 bp, Homo sapiens
cctctggtaaccatc

SEQ ID NO: 424822 - DNA, 15 bp, Homo sapiens
gcctctggtaaccat

SEQ ID NO: 424823 - DNA, 15 bp, Homo sapiens
agcctctggtaacca

SEQ ID NO: 424824 - DNA, 15 bp, Homo sapiens
cagcctctggtaacc

SEQ ID NO: 424825 - DNA, 15 bp, Homo sapiens
ccagcctctggtaac

SEQ ID NO: 424826 - DNA, 15 bp, Homo sapiens
cccagcctctggtaa

SEQ ID NO: 424827 - DNA, 15 bp, Homo sapiens
tcccagcctctggta

SEQ ID NO: 424828 - DNA, 15 bp, Homo sapiens
ttcccagcctctggt

SEQ ID NO: 424829 - DNA, 15 bp, Homo sapiens
cttcccagcctctgg

SEQ ID NO: 424830 - DNA, 15 bp, Homo sapiens
ccttcccagcctctg

SEQ ID NO: 424831 - DNA, 15 bp, Homo sapiens
tccttcccagcctct

SEQ ID NO: 424832 - DNA, 15 bp, Homo sapiens
ttccttcccagcctc

SEQ ID NO: 424833 - DNA, 15 bp, Homo sapiens
tttccttcccagcct

SEQ ID NO: 424834 - DNA, 15 bp, Homo sapiens
ctttccttcccagcc

SEQ ID NO: 424835 - DNA, 15 bp, Homo sapiens
actttccttcccagc

SEQ ID NO: 424836 - DNA, 15 bp, Homo sapiens
gactttccttcccag

SEQ ID NO: 424837 - DNA, 15 bp, Homo sapiens
tgactttccttccca

SEQ ID NO: 424838 - DNA, 15 bp, Homo sapiens
ctgactttccttccc

SEQ ID NO: 424839 - DNA, 15 bp, Homo sapiens
cctgactttccttcc

SEQ ID NO: 424840 - DNA, 15 bp, Homo sapiens
tcctgactttccttc

SEQ ID NO: 424841 - DNA, 15 bp, Homo sapiens
ttcctgactttcctt

SEQ ID NO: 424842 - DNA, 15 bp, Homo sapiens
attcctgactttcct

SEQ ID NO: 424843 - DNA, 15 bp, Homo sapiens
cattcctgactttcc

SEQ ID NO: 424844 - DNA, 15 bp, Homo sapiens
ccattcctgactttc

SEQ ID NO: 424845 - DNA, 15 bp, Homo sapiens
tccattcctgacttt

SEQ ID NO: 424846 - DNA, 15 bp, Homo sapiens
ctccattcctgactt

SEQ ID NO: 424847 - DNA, 15 bp, Homo sapiens
cctccattcctgact

SEQ ID NO: 424848 - DNA, 15 bp, Homo sapiens
ccctccattcctgac

SEQ ID NO: 424849 - DNA, 15 bp, Homo sapiens
tccctccattcctga

SEQ ID NO: 424850 - DNA, 15 bp, Homo sapiens
ctccctccattcctg

SEQ ID NO: 424851 - DNA, 15 bp, Homo sapiens
tctccctccattcct

SEQ ID NO: 424852 - DNA, 15 bp, Homo sapiens
ttctccctccattcc

SEQ ID NO: 424853 - DNA, 15 bp, Homo sapiens
tttctccctccattc

SEQ ID NO: 424854 - DNA, 15 bp, Homo sapiens
ttttctccctccatt

SEQ ID NO: 424855 - DNA, 15 bp, Homo sapiens
attttctccctccat

SEQ ID NO: 424856 - DNA, 15 bp, Homo sapiens
cattttctccctcca

SEQ ID NO: 424857 - DNA, 15 bp, Homo sapiens
tcattttctccctcc

SEQ ID NO: 424858 - DNA, 15 bp, Homo sapiens
ctcattttctccctc

SEQ ID NO: 424859 - DNA, 15 bp, Homo sapiens
tctcattttctccct

SEQ ID NO: 424860 - DNA, 15 bp, Homo sapiens
ttctcattttctccc

SEQ ID NO: 424861 - DNA, 15 bp, Homo sapiens
attctcattttctcc

SEQ ID NO: 424862 - DNA, 15 bp, Homo sapiens
cattctcattttctc

SEQ ID NO: 424863 - DNA, 15 bp, Homo sapiens
ccattctcattttct

SEQ ID NO: 424864 - DNA, 15 bp, Homo sapiens
accattctcattttc

SEQ ID NO: 424865 - DNA, 15 bp, Homo sapiens
aaccattctcatttt

SEQ ID NO: 424866 - DNA, 15 bp, Homo sapiens
taaccattctcattt

SEQ ID NO: 424867 - DNA, 15 bp, Homo sapiens
ttaaccattctcatt

SEQ ID NO: 424868 - DNA, 15 bp, Homo sapiens
attaaccattctcat

SEQ ID NO: 424869 - DNA, 15 bp, Homo sapiens
cattaaccattctca

SEQ ID NO: 424870 - DNA, 15 bp, Homo sapiens
ccattaaccattctc

SEQ ID NO: 424871 - DNA, 15 bp, Homo sapiens
cccattaaccattct

SEQ ID NO: 424872 - DNA, 15 bp, Homo sapiens
acccattaaccattc

SEQ ID NO: 424873 - DNA, 15 bp, Homo sapiens
tacccattaaccatt

SEQ ID NO: 424874 - DNA, 15 bp, Homo sapiens
gtacccattaaccat

SEQ ID NO: 424875 - DNA, 15 bp, Homo sapiens
tgtacccattaacca

SEQ ID NO: 424876 - DNA, 15 bp, Homo sapiens
ttgtacccattaacc

SEQ ID NO: 424877 - DNA, 15 bp, Homo sapiens
tttgtacccattaac

SEQ ID NO: 424878 - DNA, 15 bp, Homo sapiens
ttttgtacccattaa

SEQ ID NO: 424879 - DNA, 15 bp, Homo sapiens
attttgtacccatta

SEQ ID NO: 424880 - DNA, 15 bp, Homo sapiens
tattttgtacccatt

SEQ ID NO: 424881 - DNA, 15 bp, Homo sapiens
atattttgtacccat

SEQ ID NO: 424882 - DNA, 15 bp, Homo sapiens
tatattttgtaccca

SEQ ID NO: 424883 - DNA, 15 bp, Homo sapiens
ctatattttgtaccc

SEQ ID NO: 424884 - DNA, 15 bp, Homo sapiens
actatattttgtacc

SEQ ID NO: 424885 - DNA, 15 bp, Homo sapiens
aactatattttgtac

SEQ ID NO: 424886 - DNA, 15 bp, Homo sapiens
caactatattttgta

SEQ ID NO: 424887 - DNA, 15 bp, Homo sapiens
tcaactatattttgt

SEQ ID NO: 424888 - DNA, 15 bp, Homo sapiens
atcaactatattttg

SEQ ID NO: 424889 - DNA, 15 bp, Homo sapiens
tatcaactatatttt

SEQ ID NO: 424890 - DNA, 15 bp, Homo sapiens
ctatcaactatattt

SEQ ID NO: 424891 - DNA, 15 bp, Homo sapiens
tctatcaactatatt

SEQ ID NO: 424892 - DNA, 15 bp, Homo sapiens
ttctatcaactatat

SEQ ID NO: 424893 - DNA, 15 bp, Homo sapiens
attctatcaactata

SEQ ID NO: 424894 - DNA, 15 bp, Homo sapiens
cattctatcaactat

SEQ ID NO: 424895 - DNA, 15 bp, Homo sapiens
tcattctatcaacta

SEQ ID NO: 424896 - DNA, 15 bp, Homo sapiens
ttcattctatcaact

SEQ ID NO: 424897 - DNA, 15 bp, Homo sapiens
attcattctatcaac

SEQ ID NO: 424898 - DNA, 15 bp, Homo sapiens
tattcattctatcaa

SEQ ID NO: 424899 - DNA, 15 bp, Homo sapiens
ttattcattctatca

SEQ ID NO: 424900 - DNA, 15 bp, Homo sapiens
cttattcattctatc

SEQ ID NO: 424901 - DNA, 15 bp, Homo sapiens
tcttattcattctat

SEQ ID NO: 424902 - DNA, 15 bp, Homo sapiens
atcttattcattcta

SEQ ID NO: 424903 - DNA, 15 bp, Homo sapiens
gatcttattcattct

SEQ ID NO: 424904 - DNA, 15 bp, Homo sapiens
agatcttattcattc

SEQ ID NO: 424905 - DNA, 15 bp, Homo sapiens
tagatcttattcatt

SEQ ID NO: 424906 - DNA, 15 bp, Homo sapiens
ctagatcttattcat

SEQ ID NO: 424907 - DNA, 15 bp, Homo sapiens
actagatcttattca

SEQ ID NO: 424908 - DNA, 15 bp, Homo sapiens
tactagatcttattc

SEQ ID NO: 424909 - DNA, 15 bp, Homo sapiens
atactagatcttatt

SEQ ID NO: 424910 - DNA, 15 bp, Homo sapiens
aatactagatcttat

SEQ ID NO: 424911 - DNA, 15 bp, Homo sapiens
aaatactagatctta

SEQ ID NO: 424912 - DNA, 15 bp, Homo sapiens
taaatactagatctt

SEQ ID NO: 424913 - DNA, 15 bp, Homo sapiens
ttaaatactagatct

SEQ ID NO: 424914 - DNA, 15 bp, Homo sapiens
attaaatactagatc

SEQ ID NO: 424915 - DNA, 15 bp, Homo sapiens
tattaaatactagat

SEQ ID NO: 424916 - DNA, 15 bp, Homo sapiens
ctattaaatactaga

SEQ ID NO: 424917 - DNA, 15 bp, Homo sapiens
gctattaaatactag

SEQ ID NO: 424918 - DNA, 15 bp, Homo sapiens
tgctattaaatacta

SEQ ID NO: 424919 - DNA, 15 bp, Homo sapiens
gtgctattaaatact

SEQ ID NO: 424920 - DNA, 15 bp, Homo sapiens
tgtgctattaaatac

SEQ ID NO: 424921 - DNA, 15 bp, Homo sapiens
ttgtgctattaaata

SEQ ID NO: 424922 - DNA, 15 bp, Homo sapiens
gttgtgctattaaat

SEQ ID NO: 424923 - DNA, 15 bp, Homo sapiens
tgttgtgctattaaa

SEQ ID NO: 424924 - DNA, 15 bp, Homo sapiens
ctgttgtgctattaa

SEQ ID NO: 424925 - DNA, 15 bp, Homo sapiens
cctgttgtgctatta

SEQ ID NO: 424926 - DNA, 15 bp, Homo sapiens
ccctgttgtgctatt

SEQ ID NO: 424927 - DNA, 15 bp, Homo sapiens
accctgttgtgctat

SEQ ID NO: 424928 - DNA, 15 bp, Homo sapiens
caccctgttgtgcta

SEQ ID NO: 424929 - DNA, 15 bp, Homo sapiens
tcaccctgttgtgct

SEQ ID NO: 424930 - DNA, 15 bp, Homo sapiens
gtcaccctgttgtgc

SEQ ID NO: 424931 - DNA, 15 bp, Homo sapiens
agtcaccctgttgtg

SEQ ID NO: 424932 - DNA, 15 bp, Homo sapiens
cagtcaccctgttgt

SEQ ID NO: 424933 - DNA, 15 bp, Homo sapiens
gcagtcaccctgttg

SEQ ID NO: 424934 - DNA, 15 bp, Homo sapiens
tgcagtcaccctgtt

SEQ ID NO: 424935 - DNA, 15 bp, Homo sapiens
ctgcagtcaccctgt

SEQ ID NO: 424936 - DNA, 15 bp, Homo sapiens
actgcagtcaccctg

SEQ ID NO: 424937 - DNA, 15 bp, Homo sapiens
gactgcagtcaccct

SEQ ID NO: 424938 - DNA, 15 bp, Homo sapiens
agactgcagtcaccc

SEQ ID NO: 424939 - DNA, 15 bp, Homo sapiens
tagactgcagtcacc

SEQ ID NO: 424940 - DNA, 15 bp, Homo sapiens
gtagactgcagtcac

SEQ ID NO: 424941 - DNA, 15 bp, Homo sapiens
tgtagactgcagtca

SEQ ID NO: 424942 - DNA, 15 bp, Homo sapiens
ttgtagactgcagtc

SEQ ID NO: 424943 - DNA, 15 bp, Homo sapiens
attgtagactgcagt

SEQ ID NO: 424944 - DNA, 15 bp, Homo sapiens
tattgtagactgcag

SEQ ID NO: 424945 - DNA, 15 bp, Homo sapiens
ttattgtagactgca

SEQ ID NO: 424946 - DNA, 15 bp, Homo sapiens
attattgtagactgc

SEQ ID NO: 424947 - DNA, 15 bp, Homo sapiens
aattattgtagactg

SEQ ID NO: 424948 - DNA, 15 bp, Homo sapiens
aaattattgtagact

SEQ ID NO: 424949 - DNA, 15 bp, Homo sapiens
taaattattgtagac

SEQ ID NO: 424950 - DNA, 15 bp, Homo sapiens
ataaattattgtaga

SEQ ID NO: 424951 - DNA, 15 bp, Homo sapiens
aataaattattgtag

SEQ ID NO: 424952 - DNA, 15 bp, Homo sapiens
caataaattattgta

SEQ ID NO: 424953 - DNA, 15 bp, Homo sapiens
gcaataaattattgt

SEQ ID NO: 424954 - DNA, 15 bp, Homo sapiens
tgcaataaattattg

SEQ ID NO: 424955 - DNA, 15 bp, Homo sapiens
gtgcaataaattatt

SEQ ID NO: 424956 - DNA, 15 bp, Homo sapiens
tgtgcaataaattat

SEQ ID NO: 424957 - DNA, 15 bp, Homo sapiens
atgtgcaataaatta

SEQ ID NO: 424958 - DNA, 15 bp, Homo sapiens
aatgtgcaataaatt

SEQ ID NO: 424959 - DNA, 15 bp, Homo sapiens
aaatgtgcaataaat

SEQ ID NO: 424960 - DNA, 15 bp, Homo sapiens
aaaatgtgcaataaa

SEQ ID NO: 424961 - DNA, 15 bp, Homo sapiens
taaaatgtgcaataa

SEQ ID NO: 424962 - DNA, 15 bp, Homo sapiens
ttaaaatgtgcaata

SEQ ID NO: 424963 - DNA, 15 bp, Homo sapiens
tttaaaatgtgcaat

SEQ ID NO: 424964 - DNA, 15 bp, Homo sapiens
ttttaaaatgtgcaa

SEQ ID NO: 424965 - DNA, 15 bp, Homo sapiens
attttaaaatgtgca

SEQ ID NO: 424966 - DNA, 15 bp, Homo sapiens
tattttaaaatgtgc

SEQ ID NO: 424967 - DNA, 15 bp, Homo sapiens
ttattttaaaatgtg

SEQ ID NO: 424968 - DNA, 15 bp, Homo sapiens
gttattttaaaatgt

SEQ ID NO: 424969 - DNA, 15 bp, Homo sapiens
agttattttaaaatg

SEQ ID NO: 424970 - DNA, 15 bp, Homo sapiens
tagttattttaaaat

SEQ ID NO: 424971 - DNA, 15 bp, Homo sapiens
ttagttattttaaaa

SEQ ID NO: 424972 - DNA, 15 bp, Homo sapiens
tttagttattttaaa

SEQ ID NO: 424973 - DNA, 15 bp, Homo sapiens
ttttagttattttaa

SEQ ID NO: 424974 - DNA, 15 bp, Homo sapiens
cttttagttatttta

SEQ ID NO: 424975 - DNA, 15 bp, Homo sapiens
tcttttagttatttt

SEQ ID NO: 424976 - DNA, 15 bp, Homo sapiens
ctcttttagttattt

SEQ ID NO: 424977 - DNA, 15 bp, Homo sapiens
actcttttagttatt

SEQ ID NO: 424978 - DNA, 15 bp, Homo sapiens
tactcttttagttat

SEQ ID NO: 424979 - DNA, 15 bp, Homo sapiens
ttactcttttagtta

SEQ ID NO: 424980 - DNA, 15 bp, Homo sapiens
attactcttttagtt

SEQ ID NO: 424981 - DNA, 15 bp, Homo sapiens
tattactcttttagt

SEQ ID NO: 424982 - DNA, 15 bp, Homo sapiens
ttattactcttttag

SEQ ID NO: 424983 - DNA, 15 bp, Homo sapiens
attattactctttta

SEQ ID NO: 424984 - DNA, 15 bp, Homo sapiens
aattattactctttt

SEQ ID NO: 424985 - DNA, 15 bp, Homo sapiens
caattattactcttt

SEQ ID NO: 424986 - DNA, 15 bp, Homo sapiens
ccaattattactctt

SEQ ID NO: 424987 - DNA, 15 bp, Homo sapiens
tccaattattactct

SEQ ID NO: 424988 - DNA, 15 bp, Homo sapiens
atccaattattactc

SEQ ID NO: 424989 - DNA, 15 bp, Homo sapiens
catccaattattact

SEQ ID NO: 424990 - DNA, 15 bp, Homo sapiens
ccatccaattattac

SEQ ID NO: 424991 - DNA, 15 bp, Homo sapiens
accatccaattatta

SEQ ID NO: 424992 - DNA, 15 bp, Homo sapiens
aaccatccaattatt

SEQ ID NO: 424993 - DNA, 15 bp, Homo sapiens
aaaccatccaattat

SEQ ID NO: 424994 - DNA, 15 bp, Homo sapiens
caaaccatccaatta

SEQ ID NO: 424995 - DNA, 15 bp, Homo sapiens
acaaaccatccaatt

SEQ ID NO: 424996 - DNA, 15 bp, Homo sapiens
tacaaaccatccaat

SEQ ID NO: 424997 - DNA, 15 bp, Homo sapiens
ttacaaaccatccaa

SEQ ID NO: 424998 - DNA, 15 bp, Homo sapiens
gttacaaaccatcca

SEQ ID NO: 424999 - DNA, 15 bp, Homo sapiens
tgttacaaaccatcc

SEQ ID NO: 425000 - DNA, 15 bp, Homo sapiens
gtgttacaaaccatc

SEQ ID NO: 425001 - DNA, 15 bp, Homo sapiens
cgtgttacaaaccat

SEQ ID NO: 425002 - DNA, 15 bp, Homo sapiens
tcgtgttacaaacca

SEQ ID NO: 425003 - DNA, 15 bp, Homo sapiens
atcgtgttacaaacc

SEQ ID NO: 425004 - DNA, 15 bp, Homo sapiens
catcgtgttacaaac

SEQ ID NO: 425005 - DNA, 15 bp, Homo sapiens
tcatcgtgttacaaa

SEQ ID NO: 425006 - DNA, 15 bp, Homo sapiens
ttcatcgtgttacaa

SEQ ID NO: 425007 - DNA, 15 bp, Homo sapiens
tttcatcgtgttaca

SEQ ID NO: 425008 - DNA, 15 bp, Homo sapiens
atttcatcgtgttac

SEQ ID NO: 425009 - DNA, 15 bp, Homo sapiens
catttcatcgtgtta

SEQ ID NO: 425010 - DNA, 15 bp, Homo sapiens
tcatttcatcgtgtt

SEQ ID NO: 425011 - DNA, 15 bp, Homo sapiens
atcatttcatcgtgt

SEQ ID NO: 425012 - DNA, 15 bp, Homo sapiens
tatcatttcatcgtg

SEQ ID NO: 425013 - DNA, 15 bp, Homo sapiens
ttatcatttcatcgt

SEQ ID NO: 425014 - DNA, 15 bp, Homo sapiens
tttatcatttcatcg

SEQ ID NO: 425015 - DNA, 15 bp, Homo sapiens
atttatcatttcatc

SEQ ID NO: 425016 - DNA, 15 bp, Homo sapiens
catttatcatttcat

SEQ ID NO: 425017 - DNA, 15 bp, Homo sapiens
gcatttatcatttca

SEQ ID NO: 425018 - DNA, 15 bp, Homo sapiens
agcatttatcatttc

SEQ ID NO: 425019 - DNA, 15 bp, Homo sapiens
gagcatttatcattt

SEQ ID NO: 425020 - DNA, 15 bp, Homo sapiens
tgagcatttatcatt

SEQ ID NO: 425021 - DNA, 15 bp, Homo sapiens
ttgagcatttatcat

SEQ ID NO: 425022 - DNA, 15 bp, Homo sapiens
cttgagcatttatca

SEQ ID NO: 425023 - DNA, 15 bp, Homo sapiens
ccttgagcatttatc

SEQ ID NO: 425024 - DNA, 15 bp, Homo sapiens
accttgagcatttat

SEQ ID NO: 425025 - DNA, 15 bp, Homo sapiens
caccttgagcattta

SEQ ID NO: 425026 - DNA, 15 bp, Homo sapiens
tcaccttgagcattt

SEQ ID NO: 425027 - DNA, 15 bp, Homo sapiens
atcaccttgagcatt

SEQ ID NO: 425028 - DNA, 15 bp, Homo sapiens
catcaccttgagcat

SEQ ID NO: 425029 - DNA, 15 bp, Homo sapiens
ccatcaccttgagca

SEQ ID NO: 425030 - DNA, 15 bp, Homo sapiens
tccatcaccttgagc

SEQ ID NO: 425031 - DNA, 15 bp, Homo sapiens
atccatcaccttgag

SEQ ID NO: 425032 - DNA, 15 bp, Homo sapiens
tatccatcaccttga

SEQ ID NO: 425033 - DNA, 15 bp, Homo sapiens
gtatccatcaccttg

SEQ ID NO: 425034 - DNA, 15 bp, Homo sapiens
ggtatccatcacctt

SEQ ID NO: 425035 - DNA, 15 bp, Homo sapiens
cggtatccatcacct

SEQ ID NO: 425036 - DNA, 15 bp, Homo sapiens
gcggtatccatcacc

SEQ ID NO: 425037 - DNA, 15 bp, Homo sapiens
tgcggtatccatcac

SEQ ID NO: 425038 - DNA, 15 bp, Homo sapiens
atgcggtatccatca

SEQ ID NO: 425039 - DNA, 15 bp, Homo sapiens
aatgcggtatccatc

SEQ ID NO: 425040 - DNA, 15 bp, Homo sapiens
aaatgcggtatccat

SEQ ID NO: 425041 - DNA, 15 bp, Homo sapiens
taaatgcggtatcca

SEQ ID NO: 425042 - DNA, 15 bp, Homo sapiens
gtaaatgcggtatcc

SEQ ID NO: 425043 - DNA, 15 bp, Homo sapiens
agtaaatgcggtatc

SEQ ID NO: 425044 - DNA, 15 bp, Homo sapiens
gagtaaatgcggtat

SEQ ID NO: 425045 - DNA, 15 bp, Homo sapiens
agagtaaatgcggta

SEQ ID NO: 425046 - DNA, 15 bp, Homo sapiens
cagagtaaatgcggt

SEQ ID NO: 425047 - DNA, 15 bp, Homo sapiens
tcagagtaaatgcgg

SEQ ID NO: 425048 - DNA, 15 bp, Homo sapiens
gtcagagtaaatgcg

SEQ ID NO: 425049 - DNA, 15 bp, Homo sapiens
tgtcagagtaaatgc

SEQ ID NO: 425050 - DNA, 15 bp, Homo sapiens
atgtcagagtaaatg

SEQ ID NO: 425051 - DNA, 15 bp, Homo sapiens
catgtcagagtaaat

SEQ ID NO: 425052 - DNA, 15 bp, Homo sapiens
tcatgtcagagtaaa

SEQ ID NO: 425053 - DNA, 15 bp, Homo sapiens
atcatgtcagagtaa

SEQ ID NO: 425054 - DNA, 15 bp, Homo sapiens
aatcatgtcagagta

SEQ ID NO: 425055 - DNA, 15 bp, Homo sapiens
caatcatgtcagagt

SEQ ID NO: 425056 - DNA, 15 bp, Homo sapiens
acaatcatgtcagag

SEQ ID NO: 425057 - DNA, 15 bp, Homo sapiens
aacaatcatgtcaga

SEQ ID NO: 425058 - DNA, 15 bp, Homo sapiens
taacaatcatgtcag

SEQ ID NO: 425059 - DNA, 15 bp, Homo sapiens
gtaacaatcatgtca

SEQ ID NO: 425060 - DNA, 15 bp, Homo sapiens
ggtaacaatcatgtc

SEQ ID NO: 425061 - DNA, 15 bp, Homo sapiens
gggtaacaatcatgt

SEQ ID NO: 425062 - DNA, 15 bp, Homo sapiens
tgggtaacaatcatg

SEQ ID NO: 425063 - DNA, 15 bp, Homo sapiens
atgggtaacaatcat

SEQ ID NO: 425064 - DNA, 15 bp, Homo sapiens
aatgggtaacaatca

SEQ ID NO: 425065 - DNA, 15 bp, Homo sapiens
caatgggtaacaatc

SEQ ID NO: 425066 - DNA, 15 bp, Homo sapiens
acaatgggtaacaat

SEQ ID NO: 425067 - DNA, 15 bp, Homo sapiens
tacaatgggtaacaa

SEQ ID NO: 425068 - DNA, 15 bp, Homo sapiens
atacaatgggtaaca

SEQ ID NO: 425069 - DNA, 15 bp, Homo sapiens
catacaatgggtaac

SEQ ID NO: 425070 - DNA, 15 bp, Homo sapiens
gcatacaatgggtaa

SEQ ID NO: 425071 - DNA, 15 bp, Homo sapiens
ggcatacaatgggta

SEQ ID NO: 425072 - DNA, 15 bp, Homo sapiens
aggcatacaatgggt

SEQ ID NO: 425073 - DNA, 15 bp, Homo sapiens
caggcatacaatggg

SEQ ID NO: 425074 - DNA, 15 bp, Homo sapiens
acaggcatacaatgg

SEQ ID NO: 425075 - DNA, 15 bp, Homo sapiens
tacaggcatacaatg

SEQ ID NO: 425076 - DNA, 15 bp, Homo sapiens
atacaggcatacaat

SEQ ID NO: 425077 - DNA, 15 bp, Homo sapiens
gatacaggcatacaa

SEQ ID NO: 425078 - DNA, 15 bp, Homo sapiens
tgatacaggcataca

SEQ ID NO: 425079 - DNA, 15 bp, Homo sapiens
ttgatacaggcatac

SEQ ID NO: 425080 - DNA, 15 bp, Homo sapiens
tttgatacaggcata

SEQ ID NO: 425081 - DNA, 15 bp, Homo sapiens
ttttgatacaggcat

SEQ ID NO: 425082 - DNA, 15 bp, Homo sapiens
attttgatacaggca

SEQ ID NO: 425083 - DNA, 15 bp, Homo sapiens
tattttgatacaggc

SEQ ID NO: 425084 - DNA, 15 bp, Homo sapiens
ttattttgatacagg

SEQ ID NO: 425085 - DNA, 15 bp, Homo sapiens
gttattttgatacag

SEQ ID NO: 425086 - DNA, 15 bp, Homo sapiens
agttattttgataca

SEQ ID NO: 425087 - DNA, 15 bp, Homo sapiens
gagttattttgatac

SEQ ID NO: 425088 - DNA, 15 bp, Homo sapiens
tgagttattttgata

SEQ ID NO: 425089 - DNA, 15 bp, Homo sapiens
atgagttattttgat

SEQ ID NO: 425090 - DNA, 15 bp, Homo sapiens
catgagttattttga

SEQ ID NO: 425091 - DNA, 15 bp, Homo sapiens
acatgagttattttg

SEQ ID NO: 425092 - DNA, 15 bp, Homo sapiens
tacatgagttatttt

SEQ ID NO: 425093 - DNA, 15 bp, Homo sapiens
gtacatgagttattt

SEQ ID NO: 425094 - DNA, 15 bp, Homo sapiens
ggtacatgagttatt

SEQ ID NO: 425095 - DNA, 15 bp, Homo sapiens
gggtacatgagttat

SEQ ID NO: 425096 - DNA, 15 bp, Homo sapiens
ggggtacatgagtta

SEQ ID NO: 425097 - DNA, 15 bp, Homo sapiens
tggggtacatgagtt

SEQ ID NO: 425098 - DNA, 15 bp, Homo sapiens
atggggtacatgagt

SEQ ID NO: 425099 - DNA, 15 bp, Homo sapiens
tatggggtacatgag

SEQ ID NO: 425100 - DNA, 15 bp, Homo sapiens
gtatggggtacatga

SEQ ID NO: 425101 - DNA, 15 bp, Homo sapiens
agtatggggtacatg

SEQ ID NO: 425102 - DNA, 15 bp, Homo sapiens
tagtatggggtacat

SEQ ID NO: 425103 - DNA, 15 bp, Homo sapiens
atagtatggggtaca

SEQ ID NO: 425104 - DNA, 15 bp, Homo sapiens
tatagtatggggtac

SEQ ID NO: 425105 - DNA, 15 bp, Homo sapiens
atatagtatggggta

SEQ ID NO: 425106 - DNA, 15 bp, Homo sapiens
catatagtatggggt

SEQ ID NO: 425107 - DNA, 15 bp, Homo sapiens
gcatatagtatgggg

SEQ ID NO: 425108 - DNA, 15 bp, Homo sapiens
agcatatagtatggg

SEQ ID NO: 425109 - DNA, 15 bp, Homo sapiens
tagcatatagtatgg

SEQ ID NO: 425110 - DNA, 15 bp, Homo sapiens
atagcatatagtatg

SEQ ID NO: 425111 - DNA, 15 bp, Homo sapiens
tatagcatatagtat

SEQ ID NO: 425112 - DNA, 15 bp, Homo sapiens
gtatagcatatagta

SEQ ID NO: 425113 - DNA, 15 bp, Homo sapiens
agtatagcatatagt

SEQ ID NO: 425114 - DNA, 15 bp, Homo sapiens
tagtatagcatatag

SEQ ID NO: 425115 - DNA, 15 bp, Homo sapiens
atagtatagcatata

SEQ ID NO: 425116 - DNA, 15 bp, Homo sapiens
catagtatagcatat

SEQ ID NO: 425117 - DNA, 15 bp, Homo sapiens
gcatagtatagcata

SEQ ID NO: 425118 - DNA, 15 bp, Homo sapiens
tgcatagtatagcat

SEQ ID NO: 425119 - DNA, 15 bp, Homo sapiens
gtgcatagtatagca

SEQ ID NO: 425120 - DNA, 15 bp, Homo sapiens
ggtgcatagtatagc

SEQ ID NO: 425121 - DNA, 15 bp, Homo sapiens
gggtgcatagtatag

SEQ ID NO: 425122 - DNA, 15 bp, Homo sapiens
tgggtgcatagtata

SEQ ID NO: 425123 - DNA, 15 bp, Homo sapiens
atgggtgcatagtat

SEQ ID NO: 425124 - DNA, 15 bp, Homo sapiens
tatgggtgcatagta

SEQ ID NO: 425125 - DNA, 15 bp, Homo sapiens
ttatgggtgcatagt

SEQ ID NO: 425126 - DNA, 15 bp, Homo sapiens
tttatgggtgcatag

SEQ ID NO: 425127 - DNA, 15 bp, Homo sapiens
ttttatgggtgcata

SEQ ID NO: 425128 - DNA, 15 bp, Homo sapiens
tttttatgggtgcat

SEQ ID NO: 425129 - DNA, 15 bp, Homo sapiens
atttttatgggtgca

SEQ ID NO: 425130 - DNA, 15 bp, Homo sapiens
aatttttatgggtgc

SEQ ID NO: 425131 - DNA, 15 bp, Homo sapiens
taatttttatgggtg

SEQ ID NO: 425132 - DNA, 15 bp, Homo sapiens
ttaatttttatgggt

SEQ ID NO: 425133 - DNA, 15 bp, Homo sapiens
tttaatttttatggg

SEQ ID NO: 425134 - DNA, 15 bp, Homo sapiens
ttttaatttttatgg

SEQ ID NO: 425135 - DNA, 15 bp, Homo sapiens
tttttaatttttatg

SEQ ID NO: 425136 - DNA, 15 bp, Homo sapiens
ctttttaatttttat

SEQ ID NO: 425137 - DNA, 15 bp, Homo sapiens
tctttttaattttta

SEQ ID NO: 425138 - DNA, 15 bp, Homo sapiens
ttctttttaattttt

SEQ ID NO: 425139 - DNA, 15 bp, Homo sapiens
tttctttttaatttt

SEQ ID NO: 425140 - DNA, 15 bp, Homo sapiens
ctttctttttaattt

SEQ ID NO: 425141 - DNA, 15 bp, Homo sapiens
tctttctttttaatt

SEQ ID NO: 425142 - DNA, 15 bp, Homo sapiens
ttctttctttttaat

SEQ ID NO: 425143 - DNA, 15 bp, Homo sapiens
tttctttctttttaa

SEQ ID NO: 425144 - DNA, 15 bp, Homo sapiens
ctttctttcttttta

SEQ ID NO: 425145 - DNA, 15 bp, Homo sapiens
cttcttttctttctt

SEQ ID NO: 425146 - DNA, 15 bp, Homo sapiens
acttcttttctttct

SEQ ID NO: 425147 - DNA, 15 bp, Homo sapiens
gacttcttttctttc

SEQ ID NO: 425148 - DNA, 15 bp, Homo sapiens
agacttcttttcttt

SEQ ID NO: 425149 - DNA, 15 bp, Homo sapiens
cagacttcttttctt
